United States Patent Application Publication US 2017/0009304 A1 - sequence listing, part 7

SEQ ID NO: 129176 - DNA, 100 bp, Homo sapiens
ccagtttcggacccgtttcagaccatgatatgactattgggaagaagttacctgcaactacagcaactccagactcatcaaaaacagaaatggacagcag

SEQ ID NO: 129177 - DNA, 75 bp, Homo sapiens
gtcgcgggcgccgccaccgccgccgctgccagagtcatgtgctgttcctggggcttggatgatgtaggggaagca

SEQ ID NO: 129178 - DNA, 100 bp, Homo sapiens
agcgagtaaagtcttggacagacttaaaccagttataggggtaaacactgatccagaacgggttaaagcacgaattgggagctctcagcgacatcaccag

SEQ ID NO: 129179 - DNA, 100 bp, Homo sapiens
gctctgtgcaacggagactccaaggtggaatgcaagctttaggacttcacctgacagatccaagtcaacgtcttgttcagaactgtctttggactctcag

SEQ ID NO: 129180 - DNA, 90 bp, Homo sapiens
ccactccgccggcggcgcgtccttgtccgtgaggtgctggagaatctggtaaaagcaccattgtgaagcagatgaggatcctgcatgtta

SEQ ID NO: 129181 - DNA, 100 bp, Homo sapiens
ggccggaggaccacaggcttccagtacgagctggttaggaggcacagggcgtcggacctgcacgagctgtctggttacgggcaggacttgagtggcttcg

SEQ ID NO: 129182 - DNA, 83 bp, Homo sapiens
gttcacggagttcacagaggacgagctcattcttggaatcccagaacaggccttaagtcttctccacatggccatcgagccca

SEQ ID NO: 129183 - DNA, 90 bp, Homo sapiens
gactctgctcagagagatttgtatagagatgtgatgttggagaactatagcaacttggtatcactagagacagagtcttgctctgttgtc

SEQ ID NO: 129184 - DNA, 80 bp, Homo sapiens
tcccacggtggaagcgagagaggaggcaccttggaacatttcaagaggtggctccagccagataaagtagccgtcagcac

SEQ ID NO: 129185 - DNA, 100 bp, Homo sapiens
attttactccaagatacaccccttagaaaatggagaggaggaattaattccaatgagtgtgaaaatgtatcaagaaaaaagaaaatgtcagaggaatttg

SEQ ID NO: 129186 - DNA, 75 bp, Homo sapiens
caacctcagctacacctgccggttagctttatacgtctacgaatatttactgcacgtaggagcacagaaatctgc

SEQ ID NO: 129187 - DNA, 98 bp, Homo sapiens
ctgcaattctggatttcctgccaggttaatatggctccaaaagggccccctcctttcccaggagtccctctcatgagcacccccatgggaggccctgt

SEQ ID NO: 129188 - DNA, 98 bp, Homo sapiens
aaatgagcagaaaggagttggggcttgatgaaggcgtggatagcctgaaggcagccattcagtttgaacgccatgaccctgtggatgggagaattact

SEQ ID NO: 129189 - DNA, 83 bp, Homo sapiens
tggtgaacctcagcaccgagaacatctactctttcaactacaccagccagcccgaccaggagaatggggtactaagagaaaag

SEQ ID NO: 129190 - DNA, 82 bp, Homo sapiens
cgtggcccctgcagcggaaccggacccagtccctgagccgcccctacacccacaggtgaataagccttacgggaaagtccag

SEQ ID NO: 129191 - DNA, 90 bp, Homo sapiens
acaatgctaccctgctttttctggtgtcctgaacctggaagttgtgctttttaaggtcttgatttcccagttaaagatgttcttcacccg

SEQ ID NO: 129192 - DNA, 129 bp, Homo sapiens
tcattgatgaccacagagctgggaaaattgttgtgaacctcacaggcaggctaaacaagtttcttgcagaacataaattattaggaaacattaaaaatgtggccaagacagctaacaaggaccacttgg

SEQ ID NO: 129193 - DNA, 73 bp, Homo sapiens
gcgaagctagggtcgccgccactgccgcaggaggcgtgagagagcctatctctggcagaagtagccaacgagc

SEQ ID NO: 129194 - DNA, 75 bp, Homo sapiens
tggccaaagcctgcccagacggctcacctgtgcgggatggaacaaaagaggcagggcaggtgtgatacctatgcc

SEQ ID NO: 129195 - DNA, 96 bp, Homo sapiens
attttgagaacctcctctcccacttcttgccccagaaagccccagacggaaagagctacttgctgaccctggcctcccacgactacatcctgaaga

SEQ ID NO: 129196 - DNA, 75 bp, Homo sapiens
gaacctaaaatactttacagggcagcaggggagagaccattctaacacaggtaccgtccagacagtgcctctgag

SEQ ID NO: 129197 - DNA, 80 bp, Homo sapiens
agacgctgtttcagagcgtttgggtcctctgaggccccttgaccagggtgatcagcccatgacctaaacctccagacaaa

SEQ ID NO: 129198 - DNA, 75 bp, Homo sapiens
gagcctcagccactagctgcgatgcatgtgatcaagcgagaaaagccaggactctatttgaaaaaaatgctgccc

SEQ ID NO: 129199 - DNA, 82 bp, Homo sapiens
tgctgctgacgctgctgctgcccggcctcggggttcgagaacttgtcttggacaattgcaaatcaaatgatggaaaaattga

SEQ ID NO: 129200 - DNA, 100 bp, Homo sapiens
aactttgcccaactcggccatgagtccttctactggcagctgccggagacataccagggagacaaggccctagactggagctggttacagacggaagaag

SEQ ID NO: 129201 - DNA, 78 bp, Homo sapiens
agagcggagccaagatgcgaatgggagatacaatcttgcttgaccgtttgggacatcaatcttccacatgaagtgcaa

SEQ ID NO: 129202 - DNA, 82 bp, Homo sapiens
agccgatccagcctgcggagcctgtggggcagatatctaacagtgatacgccttcaccaccacctggtttgtcaaaatccaa

SEQ ID NO: 129203 - DNA, 100 bp, Homo sapiens
aaggcagctaccaagcacaggtgtgaagcacttttccagccattaactccaggctctcgagaatttgaagatgttgtaaatattctccattcttcttacc

SEQ ID NO: 129204 - DNA, 75 bp, Homo sapiens
catgacgcaggtgcaggtgtctcttctcgccctggcggggaaggatgggcgggatccccgctgtgaacggccgcg

SEQ ID NO: 129205 - DNA, 95 bp, Homo sapiens
cgaactccaagcgtgaccagctttctgttgggaacactcaaagagaaactccagaaaatcttgccaaacttctgaccaggatgtatttaaaatca

SEQ ID NO: 129206 - DNA, 97 bp, Homo sapiens
gcgtcccgctcgctgggagagaggtacctctccttttccctctccctttccctaaggcagtggcgattttgacagccacataccctgtgggtcacat

SEQ ID NO: 129207 - DNA, 98 bp, Homo sapiens
gtcaaaagcgcactaaatcgtctccaagaaatgaaagctcattagcatctacactgaagacgctcctgttcttcacagctttaatgatcactgttcct

SEQ ID NO: 129208 - DNA, 75 bp, Homo sapiens
aaagggtgaagcaagagaatctgaacctcgtctgtattcccacttccttccagttggaattaacgacctctggaa

SEQ ID NO: 129209 - DNA, 83 bp, Homo sapiens
ccaccatgtactcgggagccggccccgagtccctgtgaagcaggaagagtgagggcaggttcactgcagctcagcagcatgtc

SEQ ID NO: 129210 - DNA, 74 bp, Homo sapiens
ggaagatcgtcgccacctggatgctggagcttcggaaccaaaaagaagcttcccagagccggggccaggagccc

SEQ ID NO: 129211 - DNA, 100 bp, Homo sapiens
gggcaatattagaccatcaacagtttgactacataataaggatgatgaattgtactctacagattaacaaaagcagtggcattgtggaggcatcacggat

SEQ ID NO: 129212 - DNA, 83 bp, Homo sapiens
cagcgcgtgcccgcgaggagccgccgcgcgcccgcgccctccgcgcgacgccagaattcagaaggagctggcggacatcactt

SEQ ID NO: 129213 - DNA, 100 bp, Homo sapiens
ccctgatggcctcagaggaggaggaacctacaagttccagaagacagagctacggaaggagggctttgacccggctattgtgaaagacccgctgttctat

SEQ ID NO: 129214 - DNA, 82 bp, Homo sapiens
gagcgcggcgacgctgctgccccgaaatccccgtggattttgagtcgattatgagcctcaaacaatttgtgagcatctccag

SEQ ID NO: 129215 - DNA, 100 bp, Homo sapiens
ttcatttccatttctaccttgtatgcctcaatttgctggatttaagcactgctgcactttatgagatctatgccctcaacagagtcatgacagaactgga

SEQ ID NO: 129216 - DNA, 75 bp, Homo sapiens
aagcaatcctaccatgtcagccttcccagtagctggaactacagattctccggtgaagactcccatcaaggtgaa

SEQ ID NO: 129217 - DNA, 75 bp, Homo sapiens
ctcagcctcctaagtagctgggactacaggatgagttccacccgttcatcgaggccctgctgcctcacgtccgcg

SEQ ID NO: 129218 - DNA, 51 bp, Homo sapiens
gggatcagttataaactctagagtgagaaagcatgggattatggcaaccac

SEQ ID NO: 129219 - DNA, 100 bp, Homo sapiens
cacacgtgggagcagctgggcacactgcagctactgtcacagaggggctaccgggccgtggcccttgaccttccagggcaaacttgaagataaatctttt

SEQ ID NO: 129220 - DNA, 90 bp, Homo sapiens
ctcgaccagctgctggacatgtcctagtgaggagctcatctacctggacccccacaccacgcagccagccgtggagcccactgatggctg

SEQ ID NO: 129221 - DNA, 100 bp, Homo sapiens
catgtggctgactccactgcaccgggctgttgcttccagaagtgaagggagctgaatatgtatctgcaagagagtggatgaggatttgctttgagctttt

SEQ ID NO: 129222 - DNA, 83 bp, Homo sapiens
actggaaactggatgcagcaaggaaataggatttaaccgctctctgcctcccagaagtgtatgctgacttgtaaagtgaagaa

SEQ ID NO: 129223 - DNA, 98 bp, Homo sapiens
ttgtctctgctgggcctgtgtgcctggaaaggaattgttttggcctaggatcatccaggacagagcgggatgccaccagcttgtccaaagggaagttc

SEQ ID NO: 129224 - DNA, 100 bp, Homo sapiens
cccaggagcctcaaggcggcccggcgggcgactggacggccggacagacgttggacctctcgaacaaccagctgagcgagatccctgcagagcttgcgga

SEQ ID NO: 129225 - DNA, 100 bp, Homo sapiens
acttgtgtatagcttgcctttcaaggacatggacaaattttcaggtgaagttttgggattactaggacacaatggagctggtaaaagtacttccattaaa

SEQ ID NO: 129226 - DNA, 100 bp, Homo sapiens
agcagcgggagcagccggaacgatgccggccgtgagcctcccgcccaaggagaatgcgctcttcaagcggatcttggtctcggacagcccgggagacgag

SEQ ID NO: 129227 - DNA, 100 bp, Homo sapiens
cggagctttcgcagctggagaagtggaggaaggccctgtcttcgccatgtgcatggcgggtgctcatgaccaggcgacgatggctaagtggatccagggc

SEQ ID NO: 129228 - DNA, 101 bp, Homo sapiens
agacctgtcaccccgactcaacgtgagacgcaccgcccggactcaccatggtccgtaaaagccctgggctcagccagagcagggcagaggatgacgggatg

SEQ ID NO: 129229 - DNA, 100 bp, Homo sapiens
cacctggactcagggcccagcactgccaaactggactactccaaggtgaggtcccagcttgaagagaaagaaaacaagaagttccctgtgtttaaggccg

SEQ ID NO: 129230 - DNA, 98 bp, Homo sapiens
tcgcctatgtctggctttatctcatccttgctgttttttcccccggtgtggtccagatagcatagaagccaatgtggaaaatgcagaggtgcacgttc

SEQ ID NO: 129231 - DNA, 74 bp, Homo sapiens
gaggcctcaagaaacccaaggctcgtcctgaagagcggttctggtgaggttggaaggatgcagccacccggttg

SEQ ID NO: 129232 - DNA, 82 bp, Homo sapiens
gctcctaagcctgcacagccgcggcggcagcagcagtgagaggttcgagaacttgtcttggacaattgcaaatcaaatgatg

SEQ ID NO: 129233 - DNA, 100 bp, Homo sapiens
agtcatgtcctcctaccaagacttctactgcaagaaggagcgtcgcttcacctcggaaaacgcccactcctggatcttcacattgaactcaatggctaca

SEQ ID NO: 129234 - DNA, 87 bp, Homo sapiens
agatcactcgcaaccaaaagcgcaagcatgatgagatcaaccatgtgcagaagatcccgggggcataactgctggcagcaccgacga

SEQ ID NO: 129235 - DNA, 75 bp, Homo sapiens
gtggccgctgccgcctccgccccagatggaaaagggatagcagtggaaataaaatcatgcatcctgtttctggga

SEQ ID NO: 129236 - DNA, 98 bp, Homo sapiens
accatcaaggaggaaggcctggttcttcaaggtggaaccgtcccaaaatgtcccttgctcagaagaaggatcgggtagctcaaaagaaggcaagcttc

SEQ ID NO: 129237 - DNA, 74 bp, Homo sapiens
cagcaggggactcctgacacttccccttccccaccgaaccgcggacagctaacccccgcatcggtgacgtgatc

SEQ ID NO: 129238 - DNA, 97 bp, Homo sapiens
cgatggctactctgtaatggcagaaacgaaatcctgaagttcgacatgtagatttggagatactgtgagtttgatggaatgaatcacctgggtgggg

SEQ ID NO: 129239 - DNA, 101 bp, Homo sapiens
ggagtgtaggaagaggcactgctgagggggcgcgaggggaacggaggccagagctgcggctatgaccagggccagagcactcagatctcagtcagaggagt

SEQ ID NO: 129240 - DNA, 100 bp, Homo sapiens
ttggcagtgccacgaccatctcgcactaccctgactacagctggagcgcccagaggcgagccctggtggaggaagagacatatgaagaagttggagatga

SEQ ID NO: 129241 - DNA, 98 bp, Homo sapiens
tccctgctccgcagcgacatcaccaagctggaggtggacgccatcgtcaacgccgtgagtgacctgcaggaagaaggcaagaatgccatcaactcacc

SEQ ID NO: 129242 - DNA, 100 bp, Homo sapiens
ccgagttgggcagtatgtggtcgacctgacttcttttgagcagttggcactacccgtcttgaggaatgtggcttgctttggtgaaggtattcatacagcc

SEQ ID NO: 129243 - DNA, 90 bp, Homo sapiens
atggaaaaccagttattgaatatcaagaggaggagttgttgaccccaccaacaactgaacgctttggtcaggctgctacaatggaaggaa

SEQ ID NO: 129244 - DNA, 98 bp, Homo sapiens
atggaccccgaggacgaaggggtagcgggagtgatgtctgtggggccgccggcggcccggcttcaggtctcctctgagcctccggcctccataagacc

SEQ ID NO: 129245 - DNA, 90 bp, Homo sapiens
gccatcaacaacaccctcattgctttcttcattttgactacgataaaagcgagaaccctctgcccacagtggagattgccatccggaaca

SEQ ID NO: 129246 - DNA, 97 bp, Homo sapiens
aagttttctaaagaagaatctgaagtgaaatgacatcaagagacctatcaagacctgtatccaggaaaagaccaagatcactccatggatgaaatga

SEQ ID NO: 129247 - DNA, 90 bp, Homo sapiens
acactcagcttcccattgctgagagctcctgctgttgattgtggaaaaggacacctcttctgctggactccatccccgtgtctacctccc

SEQ ID NO: 129248 - DNA, 75 bp, Homo sapiens
gggagagaaagggaaggaaattatgaccaagtacctcaccccaaagacctcctgccccccgaggtctgcagtctc

SEQ ID NO: 129249 - DNA, 100 bp, Homo sapiens
ggaaagcgaccccggggtcttcaccgagctcattaaaggattcgaatttctacttggataacagaggaaaaaaagaaagcaaggaaactaatgagaaaat

SEQ ID NO: 129250 - DNA, 100 bp, Homo sapiens
ctcaaggtgaagattgctgaccttggaaatgcttgttgggtgctgtcgacttgctggagaagatgcttgtattggactcagataagagaattacagcggc

SEQ ID NO: 129251 - DNA, 100 bp, Homo sapiens
tcatggatgttcttcttcgagtatttgtagaagggtatatttgcttacttaaactaccatgttcctcgaacgagacgagaaatcctggagaccctaatca

SEQ ID NO: 129252 - DNA, 83 bp, Homo sapiens
ctgctacatcgatgacagaggattcagtgacaaccatgagtggaaaaaactaattatggttcagcactggcctgagacagtat

SEQ ID NO: 129253 - DNA, 50 bp, Homo sapiens
aagtattcaccagttaatagcaccagactctcagcgttctcatctctctt

SEQ ID NO: 129254 - DNA, 127 bp, Homo sapiens
aaccaagaaaaccttatcagcactatttgaaacttttatctcatctggcttggcgcctgaggttctcccattagattccaactccacagagtgaccagagagaggacgtggctgaagacaccaaaga

SEQ ID NO: 129255 - DNA, 76 bp, Homo sapiens
cgcggcgaaggcggctcgggctcgggctccgcaccagtggaacagtgattaacaagctgaaggttgttaagaagca

SEQ ID NO: 129256 - DNA, 100 bp, Homo sapiens
gagttgtacgagcagtcagatgaggagcaggactcggtgaagtggagacctttggcgacttggcctttggcgacatcttcctccacctgctcacgggcaa

SEQ ID NO: 129257 - DNA, 74 bp, Homo sapiens
gggagatccacagctaagacgccaggacccactggaagcctagaaatgtgtgaaataaaagtagccatgtcgaa

SEQ ID NO: 129258 - DNA, 100 bp, Homo sapiens
accaccggagaattcctggggcgcaccgccaagagctgggtgctgaagctgctgaaagatggcagaagaagtggtggtagtagccaaatttgattatgtg

SEQ ID NO: 129259 - DNA, 75 bp, Homo sapiens
gattccaagtaactcttatttgccccattgacaaaccttcagattctctcagtatagggaacggtgataattccc

SEQ ID NO: 129260 - DNA, 90 bp, Homo sapiens
ctttaccgctacatgcacttcttggagaaccaggttcggactctgtctactagtgacgatgtcgaagacagggaaaatgaaaagggtcgc

SEQ ID NO: 129261 - DNA, 74 bp, Homo sapiens
atggctttggtccccagcgcagtgaagtggtgagcctttttgtcactggctctggaagaggatctgaaccagaa

SEQ ID NO: 129262 - DNA, 73 bp, Homo sapiens
gcagagccgcccagccctgccagctgcgccgggacggttctgcggggagtgtctccagccctgcctgcaggtg

SEQ ID NO: 129263 - DNA, 100 bp, Homo sapiens
tttacagaaagagtcaacagcagtggcaacagtgagttggactatggatcaggtactgtgctcagcatcagaaaatgggatgacaatgaacagagtaaca

SEQ ID NO: 129264 - DNA, 74 bp, Homo sapiens
gcacagacaagatcttcaggcagatggacaccaacaatgacgctctccctcgggctgctggttgctgactttgg

SEQ ID NO: 129265 - DNA, 75 bp, Homo sapiens
gaagctgcagccacaatgtgcctttgcaggggagcctgagagccacaggttgatggacggatggctacatggatg

SEQ ID NO: 129266 - DNA, 86 bp, Homo sapiens
ggcagtttggcatctgtggccgagttgctgttgccgggtgatagttggagcggagactgaatcttgtcgattggcctggctgctgc

SEQ ID NO: 129267 - DNA, 101 bp, Homo sapiens
atcgagatcaatgaacctttagatgaatttacagaacattttagtggacaaaccaaatgaccaatcttcaagatggtcttcagagagcaactatcctcccc

SEQ ID NO: 129268 - DNA, 90 bp, Homo sapiens
aggacacgggaagaacaaagacttagactcggttcgctatcctgatcgcatcacactgatccggggcaaccatgagagtcgccagatcac

SEQ ID NO: 129269 - DNA, 97 bp, Homo sapiens
ggagcagcggccgggagcccttagggaggcaggtagagtcactgaccacagagctgtcagctgagcgcagtttctcagccaaggcagagagcgggcg

SEQ ID NO: 129270 - DNA, 96 bp, Homo sapiens
ctcaatatctgtcttcggtggactccttcggcagtccacccaccgccgccgcctcccaggccacccttaagtacaatgttctcctacctaagaagg

SEQ ID NO: 129271 - DNA, 73 bp, Homo sapiens
aaccaaatattatggatcctatctgaagtacctggagtagaacagaaaaattattatgtctgtgttcccttgg

SEQ ID NO: 129272 - DNA, 75 bp, Homo sapiens
cggggtgactcttctcaaatgccttctcatccccacatatggaagtgaagaagctctttccaatgaagactgtga

SEQ ID NO: 129273 - DNA, 82 bp, Homo sapiens
ccccagttccccggcagcgggacccggcgaagacgcgaccgcggcgcgagtcaccatgatcctgaggaggatgaaggggctg

SEQ ID NO: 129274 - DNA, 75 bp, Homo sapiens
tttctctcattctctcgttcgaggagttggaggatagctgctgcctgatgtaaacctagcctttaagcaacctgg

SEQ ID NO: 129275 - DNA, 100 bp, Homo sapiens
tatgcaaagccagcgttacagtaatgttccagtaccatgcggagaccatcaagaatgtgcgcacagccacggaaagctttgcttctgaccccatcctcta

SEQ ID NO: 129276 - DNA, 100 bp, Homo sapiens
cgatgtgttccgacagaggatgatgcagatgtacagacacaagcgggccaacaaataggatgaaattgattctgcagtaaagatgttggtgtcattaaaa

SEQ ID NO: 129277 - DNA, 98 bp, Homo sapiens
gcatatgtctgcacgctgaggccgaggcggagaaggggcttcctgagcgtcccagtacactgacagaggaatacaatagatatggctggtgggtagga

SEQ ID NO: 129278 - DNA, 100 bp, Homo sapiens
gcttcctcctgcttcccatcgaagctctagaaatgaatgtttccatctcttcagagatgaaccagatcactgtgtccactactatgatcttcgtaacact

SEQ ID NO: 129279 - DNA, 100 bp, Homo sapiens
gccacggccatttccttgatgcgcaagttcattgcctaccagttcacagacacggtatcactaccattaaagttaacattcgtaatgccaattccctggg

SEQ ID NO: 129280 - DNA, 96 bp, Homo sapiens
gcacaccttttatagaagtacgtccaggaatagaagtgacctgctttttcgcaagctgattcaccccaagagtggccgttcctaccacgaggagtt

SEQ ID NO: 129281 - DNA, 100 bp, Homo sapiens
ggagagctgcaagccggtgcagcagccttcagcttttggcagcatgaaagttagcagaaacttccagctggtcaaagagattgccgatgaagaccccagc

SEQ ID NO: 129282 - DNA, 117 bp, Homo sapiens
gaggcttcgcccggctttgcagcggggacttcggcggcggcgcctcaggcacctcggcccgggtccagagccaaacccgtcactgaccccccagcccaggcgcccagccactcccca

SEQ ID NO: 129283 - DNA, 98 bp, Homo sapiens
gcggagctgctgcagtccttcgcgccctcctcgccctccccaccgacatcatgctccagttcctggtgccgacgccaccgccgagcccatgatcctgg

SEQ ID NO: 129284 - DNA, 100 bp, Homo sapiens
catcatgatggtcaatgccactaaccagatgggaagcagtttctcggatgaactttatgtggacgtgacttacatagatgttgatgttagtgaagattca

SEQ ID NO: 129285 - DNA, 100 bp, Homo sapiens
tgaatgcagacagaaataaattagtgtccttaccaaaagaggcctcaggagtgcaagtagctgatgaagtatgtcgcattttttatgacatgaaagttcg

SEQ ID NO: 129286 - DNA, 75 bp, Homo sapiens
tcttgccctcatcctggttctggaatcctcagttcaaggtatctggaatcccggcgcctagaacgtgtttttcgg

SEQ ID NO: 129287 - DNA, 100 bp, Homo sapiens
cgacattatagtattaacaaaagatatacaagaaggagatacattaaatgcaatagcccttcagtactgttgtacggtgaacggaagagtccttatgttg

SEQ ID NO: 129288 - DNA, 90 bp, Homo sapiens
ccgagcggatcctaataaggggaaaatgggtctcctatggacagaagtgcgggcaaggagctttgttcctccccgatgtcaccctcccac

SEQ ID NO: 129289 - DNA, 100 bp, Homo sapiens
caggaagcatggcactctggcgggcataccagcgggccctggccgctcacccgtggaaagtacaggtcctgacagctgagagagtctacagggagattga

SEQ ID NO: 129290 - DNA, 75 bp, Homo sapiens
tcctgaagggagttcctcctagatctggtcggacctttgtatggtagtgggcagcagtcagtgacaggtgtaacc

SEQ ID NO: 129291 - DNA, 100 bp, Homo sapiens
gactcgggaacaagagaagctccttgggcaactgaaagaagtacaagcagacaaggagcaaagtgaggaagagagaagggcacagttacctaagtatcaa

SEQ ID NO: 129292 - DNA, 74 bp, Homo sapiens
gtaagcgcagaaagcaggcgaacccgcggcgcaataacggtgtgggcaagagcagtttactgttgcgttttgca

SEQ ID NO: 129293 - DNA, 90 bp, Homo sapiens
cggtgacggcggagaggcgccccccgcagcaggtgaaaggtgtagcagtcactcggcctacacccacagcatcgaccttgtgaacccagc

SEQ ID NO: 129294 - DNA, 75 bp, Homo sapiens
tcaagggtttccgcaatgcccctgttgcccgctacaacttcatccgaagcatggccgcctacagcctcctgctgt

SEQ ID NO: 129295 - DNA, 99 bp, Homo sapiens
gtgaagccacacagtgtccagatacgaggattttattggctgggtgcggtggctcacgtctgtaatcccagcactttgggaggctgaggtgggcagatc

SEQ ID NO: 129296 - DNA, 96 bp, Homo sapiens
agctgctaaagtggcatcctgggattttgttgaagccacacaaagaacaaattgcagttgtttgaggccgagacgcatccagagctttcgtgaccg

SEQ ID NO: 129297 - DNA, 100 bp, Homo sapiens
gagcaagcggagctcccccaagagccggaaagatatggctcgtggacagcagaaaattcagtctcagcagaaaaatgccaaaaagcaagctggacaaaag

SEQ ID NO: 129298 - DNA, 51 bp, Homo sapiens
ctttccgtctggcggcagccatcagacaggaacacagaggacgatcgcccc

SEQ ID NO: 129299 - DNA, 83 bp, Homo sapiens
cgccgccgcgggcgccgggagcgagctgggagggagccgcgcgcctttgtgcgcgcgccgagaactgccattggatgtccaga

SEQ ID NO: 129300 - DNA, 73 bp, Homo sapiens
tcatatgaaatcactatgaatgggagagacaaaggcagcgctgccctcgggggagtattggccctggcggaac

SEQ ID NO: 129301 - DNA, 50 bp, Homo sapiens
cctgtatctgctgctgctgctcatactgaaagtgcccactacggaaaagc

SEQ ID NO: 129302 - DNA, 100 bp, Homo sapiens
gattttcgtctaaaaataacaagaatgggaggagaaggtggatgattcaacagccacacaaagcagcaacattttttggatgcattgggatagataaatt

SEQ ID NO: 129303 - DNA, 99 bp, Homo sapiens
gaaagtagttcgaggggagaaggggaaccttggaatgaactgccagcaggcgtggcagtatgatcacctcacggctacctatcttctgcttctagccaa

SEQ ID NO: 129304 - DNA, 75 bp, Homo sapiens
actgggtgctggtgcctatagcatgagtttttggctttcacccccaaccagtgaccaaagacttgaccactcaaa

SEQ ID NO: 129305 - DNA, 51 bp, Homo sapiens
aggaaattaaaagaggcacgaagctggcagtggttgcaggaatccagcagg

SEQ ID NO: 129306 - DNA, 75 bp, Homo sapiens
cctacggtgtcccaaatcaatgcggagttcgtgacccaggcataagatgcacatttttctgctctggagccggga

SEQ ID NO: 129307 - DNA, 74 bp, Homo sapiens
tcgctcccatcgtcatctttgcatccaaccgaggcaactgtgtcatcagatgggtctgtgaagaaatcccggat

SEQ ID NO: 129308 - DNA, 100 bp, Homo sapiens
caaacatgatcgtttactgcaaataacggcacagccaacaagatgaacggagctttggatcactcagaccaaccagacccagatgccattaagatgtttg

SEQ ID NO: 129309 - DNA, 100 bp, Homo sapiens
agaaaatggccagcattttccaagtactgtaaattcctgtgcagaaggcatcgtcgtcttccggacagactatggtcagacaaggagccccaaactgtct

SEQ ID NO: 129310 - DNA, 82 bp, Homo sapiens
ggaaccgccacagcactcaagaggactggaatgaaattgaccccattaaaaagaaagaccttcatcacagcaatggagaaga

SEQ ID NO: 129311 - DNA, 90 bp, Homo sapiens
aaacaggactggctgatactacatattccagatgggaaacctcaaatgaattctgaaggggagataccttccctgccatcaggcagccaa

SEQ ID NO: 129312 - DNA, 50 bp, Homo sapiens
tcttgcagctctaaaaaccatggctcggatttggagtccaggaatgagac

SEQ ID NO: 129313 - DNA, 75 bp, Homo sapiens
accaaaggaattttgaagtcaccactgaggaggaattcaccctgttcgtctatgatcctgtggtattgtggaaat

SEQ ID NO: 129314 - DNA, 75 bp, Homo sapiens
gtgaggaatctggattgtcacctttgctgcaaaaaattacgggccttttaaaggaccatgggctgtttgaggggc

SEQ ID NO: 129315 - DNA, 75 bp, Homo sapiens
atattaaactcttccggaaatacttttgggatagagcctttcttgtcaaggttactcactataaacaatatccac

SEQ ID NO: 129316 - DNA, 100 bp, Homo sapiens
tgaaagctcggacagctcaattagccaagataaaatgggtgataagtgtcgctttctacgtattgcaggaagtgctctctggcgtggtggtcatatcgag

SEQ ID NO: 129317 - DNA, 90 bp, Homo sapiens
cgaattctctcaattgatggtggaggaacaaggtgaaatgaggaatgatttatatatcactattgaaaggggagaatttgagaaaggagg

SEQ ID NO: 129318 - DNA, 138 bp, Homo sapiens
gatgggtactttgttggaccctcgtcaatctctttcgaagccattcagtcctcaatctccttttccttggctaccccttcttggacacttaatgattgttggcaagaaatgtgctgctgatctgggcctgaataaggg

SEQ ID NO: 129319 - DNA, 98 bp, Homo sapiens
tgaaagcagtaatcagatgtttgccatgaaagaaataaggcttcccaaggcagcctggcatcctcgctacaacctcattgttgtgggccgatacccag

SEQ ID NO: 129320 - DNA, 83 bp, Homo sapiens
ctccgggccgcgaagtcgcagcgccagacccaaggcccccgagtgagcgcgggcgccgaggagtggagtcaacatatcaatgg

SEQ ID NO: 129321 - DNA, 75 bp, Homo sapiens
tactcacagagttagagagagggatggtgaacattctagtatgccagtagaaaaaaatatcactttagaaaggcc

SEQ ID NO: 129322 - DNA, 100 bp, Homo sapiens
gcagaagctggtgcccttggtgcggaccgtgtgcgtccgaagcccgaggcagaggaaccggctcccagaagacctatggagcattcatgatctagaagca

SEQ ID NO: 129323 - DNA, 100 bp, Homo sapiens
aaagacccggagcggcggcgactccgccccgcagcaggaagagggaagaaggagaaagggccaacccctgaagaagcaatacagaaactgaaggagacag

SEQ ID NO: 129324 - DNA, 100 bp, Homo sapiens
gtccgcctcaggggccatggcgaagcacgagcagatcctggtcctcgatccgcccacagacctcaaattcaaagagctttttagatgaggaatttcctca

SEQ ID NO: 129325 - DNA, 100 bp, Homo sapiens
gccagcgccgttgctgcgggggattgtgggagtctccgcgtcccgctcgctgggagagagctgattggggccctggtcctgtctgtgggcatctatgcag

SEQ ID NO: 129326 - DNA, 100 bp, Homo sapiens
tgattctggaactgggagaagatggctttaaagaatacacttcaagtgacatgtacagccatgatgggaatactgatgagccagaatgggtaaagacaga

SEQ ID NO: 129327 - DNA, 82 bp, Homo sapiens
agatcagaggtagtcggacctttcccgctggcgcgcagcctcagctaggttattcagcttctcaaggctggaaaagcgaagg

SEQ ID NO: 129328 - DNA, 75 bp, Homo sapiens
attttttgcttggtttggaaaaatttcattagagctggtggagctgtctaaggctcaagatatagaagcaggaga

SEQ ID NO: 129329 - DNA, 88 bp, Homo sapiens
tctatccaagaaaatgctttttctcagactcatttaaaagaactgcattcaaaagtgcggcagaagagtgaggtggacattgttgtta

SEQ ID NO: 129330 - DNA, 90 bp, Homo sapiens
aaaggatccagcttccttctgaaaaggcgatcttcctgtttgtggataagacagtcccacagtccaggctagatgaactgcagaagcaac

SEQ ID NO: 129331 - DNA, 83 bp, Homo sapiens
ctgagaaggaggggtatgagccacacatccccgaccacttgcggcctgagtatggccgtaagttcatcatcgccaacgctcgg

SEQ ID NO: 129332 - DNA, 101 bp, Homo sapiens
ggagcctcagttggaagcagccgatccagcctgcggagcctgtggggcagatggagtgaaggtacctgagcgcaggaaccatggtcttcattgctgcctca

SEQ ID NO: 129333 - DNA, 100 bp, Homo sapiens
tggataaatattccgaggacctgaaggacgcgcaggagaagctggagctcacggagaagaaggcctccgacgtctcctctgagcctccggcctccataag

SEQ ID NO: 129334 - DNA, 100 bp, Homo sapiens
gtattactcatcacagatcggaacggaggcctgtggagtacaagcgcaagctagccagagtttccctggtgcgcaaagaactcaggtcccggatccagag

SEQ ID NO: 129335 - DNA, 107 bp, Homo sapiens
tgaccgagagcgcgaatatcgtcatcgttagaaggaacgtcaaggtcgtgggaaataaaaggcagttctacacagactgcagcaacggttgcatctgcatatcctaa

SEQ ID NO: 129336 - DNA, 75 bp, Homo sapiens
cagcgaggaagctacacttttcaccaaggaactggtgctgcagcgagagatatgcacccaatgtccagggagcgt

SEQ ID NO: 129337 - DNA, 50 bp, Homo sapiens
tgtccttctgctattgatcctgaagggggcttgtacatgacagctggaat

SEQ ID NO: 129338 - DNA, 100 bp, Homo sapiens
tcgcaatgttttgtgggaagttaaatatgcatgtgaacattcagactgggaaatgggaacctgatccaacagccacccaagtgatgagaaggacttctcc

SEQ ID NO: 129339 - DNA, 96 bp, Homo sapiens
ctccgccatgaacctgaggggcctcttccaggacttcaacccgaggtgaactgcgccaggccactgtggccatgatgaacaggaaggatgagctgg

SEQ ID NO: 129340 - DNA, 75 bp, Homo sapiens
cgcgcttttgctcctcctgaagtgtctttggtccaacgttgttccaggatggcaaatttgagttacatcaaaaac

SEQ ID NO: 129341 - DNA, 75 bp, Homo sapiens
ctttctccttccatcctgaagccctttccgctgtggacaggaaaacaggagtgactggctgcaggcaagaccaag

SEQ ID NO: 129342 - DNA, 83 bp, Homo sapiens
tccacgtgaagctcaccgacagtgccctgagggccttcgagagctaccgcgccagacaggctgaaggggatgctaagggagat

SEQ ID NO: 129343 - DNA, 80 bp, Homo sapiens
cgtggagaagaagagctgctgatgaggactgggacagcactctggcccccagaagcttctccacattgcccaggagctcc

SEQ ID NO: 129344 - DNA, 75 bp, Homo sapiens
tgctttcaggaacattgctgtggattcccaggtgatgatgaacagtctacacagatggctgcaagttgggaagat

SEQ ID NO: 129345 - DNA, 90 bp, Homo sapiens
cgggagttacaccgccaccgccagggaaagggtgccacactgggaatgcaagctgtccttgcttctgaaccaagactactattgtgccag

SEQ ID NO: 129346 - DNA, 100 bp, Homo sapiens
aaaggaaattaccgggaggctctcactaaccacaggcatcagttggtactcgccatgaaactcaaagatcgagagggatgatccaccaacacattctcag

SEQ ID NO: 129347 - DNA, 82 bp, Homo sapiens
ctcccctctcaggacaacccagatgtgcaacaaagtgcgatggtatcatgatattagctggtttgacatcaagtcatttgtg

SEQ ID NO: 129348 - DNA, 90 bp, Homo sapiens
gcagatttcttttggatagtgatgggaaaagaaatcattccagactgggacaaatgcacgtctagatgaacgcatttttgctatgtgtca

SEQ ID NO: 129349 - DNA, 100 bp, Homo sapiens
ttcctaatagtttggaccagacagacatgcacggagactcagaatacaacatcatgtttgaaaattctaacgatgattcccaccgatgaggagaagcaga

SEQ ID NO: 129350 - DNA, 73 bp, Homo sapiens
ctcagtcacacatgccagagattgctcaggaagcaatggaggcatttctcattgcaattgtggtaccagatgt

SEQ ID NO: 129351 - DNA, 90 bp, Homo sapiens
gtggcacagtggagcagctctgaagatgcaaagatcccagatgcagtgactggttactacctgaaccgtgctggctttgaggcctcagac

SEQ ID NO: 129352 - DNA, 97 bp, Homo sapiens
cacctcaaatctcagggcatcaccatggacgagctcccgctcataggatgctggtcgtttactatatattggccaaaatgagtggacacatgtaaat

SEQ ID NO: 129353 - DNA, 111 bp, Homo sapiens
gccgcagccgcctccgaagatgggggatttctacgacccggagcacccgacccctgagtacaccaggggttggaaaaaccacactaggcaaagaacttgcgtcaaaatcag

SEQ ID NO: 129354 - DNA, 82 bp, Homo sapiens
atggacatgagggtccccgctcagctcctggggctcctgctgctctggctcccaggttgattgtacacagcactatgaactc

SEQ ID NO: 129355 - DNA, 100 bp, Homo sapiens
ctgtcgcggctgctaagcgctcggcgcctggcgctggcgctggccaaggctgttttgggatttgagattgacgcggtgaactctgtccagttttcaaacc

SEQ ID NO: 129356 - DNA, 100 bp, Homo sapiens
caagctcctggccagcgacgccgaggccttgtccctgctggcacacaaccccttcgcgggcaggcccccgcccaggtcccgcagcccccggaagccaata

SEQ ID NO: 129357 - DNA, 92 bp, Homo sapiens
attcatcgacaggaaggacagttactactccattcaccagataggtatcgagaaccttccctgcgaacttcagaggaacttccagctgatgc

SEQ ID NO: 129358 - DNA, 99 bp, Homo sapiens
cgtgatctcagcgggcacgtggtgtaccttgaaagacttttaacatacgcagagatagatatctgtccggccaactggaagcggattgttttaggggcg

SEQ ID NO: 129359 - DNA, 75 bp, Homo sapiens
aactaccaggccaaggaccagggagcttctggaagaggtgaagaaggaattgcagaaagtgaaagaggaaatcat

SEQ ID NO: 129360 - DNA, 75 bp, Homo sapiens
ggaaaatcgcttggttaaaacctgacacttttaacagggcacattcactgaaatccccgccagcaatattcgaag

SEQ ID NO: 129361 - DNA, 51 bp, Homo sapiens
cagtctggaaagctttaggagttcacagtgattcaagatgaccaacgaaga

SEQ ID NO: 129362 - DNA, 80 bp, Homo sapiens
ttccagggagggaacaaagcccacagcaccgaattccatacgacataatctgtcattgaacaaatgtttccttaaagtgc

SEQ ID NO: 129363 - DNA, 89 bp, Homo sapiens
ggggcctgctcccggagagatacggctatgtcgatcgaaatcgaatcttcggatttcagagactcctccactctctgggaatgacacgg

SEQ ID NO: 129364 - DNA, 100 bp, Homo sapiens
cgcccgcacctcgctagcgttcccctgtcttccccaacgccccggagccgccggccgctagcgtcagcgccagccagacagagattgcgaagagactgaa

SEQ ID NO: 129365 - DNA, 73 bp, Homo sapiens
accctggccgccccgagcggagcctggaggactggcattgcggactgacctccagggagaggcccagatctga

SEQ ID NO: 129366 - DNA, 83 bp, Homo sapiens
cttgcagctgccgccgccgccaccgagccgccgcgtaactaggatttctacctcaaccgcgagacctatgcaaggacggtgtg

SEQ ID NO: 129367 - DNA, 90 bp, Homo sapiens
tgataatctgacactatggacttcagacatgcagggtgacggaaaactcctccttaacttggtagatcatactgaagtggtcagagattt

SEQ ID NO: 129368 - DNA, 100 bp, Homo sapiens
gagtacctacgctatcaggaggccctgagtgagctggccactgcgatggatagaatgacagaagatgctcttcgcttgaatctgttgaagcggagcttgg

SEQ ID NO: 129369 - DNA, 103 bp, Homo sapiens
ctggaaattcctgacgttcattgatctggctcgggttatgtatgattttgctgctgaacctggaaataatgaactgacggttaatgaaggagaaatcatcaca

SEQ ID NO: 129370 - DNA, 90 bp, Homo sapiens
ggaatttgattaactcattcaaggttacccagttgaacatgccagatccccacaaccttccaatagtggctggttggaagaaatacccac

SEQ ID NO: 129371 - DNA, 75 bp, Homo sapiens
tggactctttgcctgtttggataggctgggcggggagcgtcggaccagaagagaatcacgccaggaaagcgaccc

SEQ ID NO: 129372 - DNA, 75 bp, Homo sapiens
ggagaagaagagctgctgatgaggactgggacaggtatctcagatgaagacatcatcaacattactcttcctact

SEQ ID NO: 129373 - DNA, 98 bp, Homo sapiens
aaacactcagagtggaaaaagtaccatcatttgaaacagccatgaagctcatgactgctctggtgaatgttgccttaaacctcagtattcatcaggat

SEQ ID NO: 129374 - DNA, 51 bp, Homo sapiens
tgaactgtaagctggctaccagggccaagcccggggcctgccaagctaatg

SEQ ID NO: 129375 - DNA, 100 bp, Homo sapiens
cccctccggctcaagtgtgtcaagcaaggtatgggatggcaccaggacaccatttccatcttggagagtcttaatacaagaccttgttcttgaaggtgat

SEQ ID NO: 129376 - DNA, 126 bp, Homo sapiens
cggacgagaactggagagaactgctggaaggagactggatgatagaattgtttgagaaatttctgtggttcattagctcagagaactatctaattataggtggacgagatcagcaacagaatgaaa

SEQ ID NO: 129377 - DNA, 75 bp, Homo sapiens
gccaacattgacctcacaaccgagcaaattgaagagacgttaaaatacttccgcccagctgagagccagcctgga

SEQ ID NO: 129378 - DNA, 100 bp, Homo sapiens
aaaaagagaaacctgggtgaactttcacggacaacctcagaggacaacgaagtgttcggtcaaaatgcagatcttcgtgaaaacccttaccggcaagacc

SEQ ID NO: 129379 - DNA, 101 bp, Homo sapiens
ccagctgttagtcgggtaggcataggttctccaaaatacttatcattcaggttgaataaaccagttctacagactgcttcttccatgcatttcccaatgat

SEQ ID NO: 129380 - DNA, 75 bp, Homo sapiens
ggacagcatgcctcaccaagtcacatgacaagcaatttgggaatggatgatgaaggagatgatgacccagttcct

SEQ ID NO: 129381 - DNA, 50 bp, Homo sapiens
ccgggccctcgagacggggacggctgaccccgcactacatctacccacca

SEQ ID NO: 129382 - DNA, 82 bp, Homo sapiens
tcgccgcccgtccccggcacacgcgcagccccggcctctcggcctctgccggagaaacagatataacacgtgggaaccggag

SEQ ID NO: 129383 - DNA, 74 bp, Homo sapiens
tcaagtccagaaaataaaagtttagaagttagtgatacacttgacatccctgcacactggagtgatatgaagca

SEQ ID NO: 129384 - DNA, 98 bp, Homo sapiens
tcacctagtaacacacgctacctctttctgggtgactatgtggacagaggctatttcagtatagaggtcccctcttgctgttggctgcacatcaggaa

SEQ ID NO: 129385 - DNA, 75 bp, Homo sapiens
atttacagaaagagtcaacagcagtggcaacagaaggcagacggtaacaagtactccttgctggattgaacttca

SEQ ID NO: 129386 - DNA, 50 bp, Homo sapiens
cgggccatggccgccgccgatgccgaggtttggtgcacctcgatttggag

SEQ ID NO: 129387 - DNA, 100 bp, Homo sapiens
gaaccccggccatccgcaaggtcacatgctgtctcatggtgatttgaatttacatagtacatgacgaagttaaggataaagcttttgaactagaactcag

SEQ ID NO: 129388 - DNA, 100 bp, Homo sapiens
agggctccggcgcgtcacgggcctcagctgggattcccgcgcccctcggacggccacgagactcggctgcaagctttcttcctggtggcagatgacatca

SEQ ID NO: 129389 - DNA, 75 bp, Homo sapiens
cctggacctgctgacacggtgccgggagcatgtggagaagctatttaattcaggacactcatccagacttctgaa

SEQ ID NO: 129390 - DNA, 80 bp, Homo sapiens
gaatctgccccagcagaatcttcaccatctaagtttaattggttggggtcagataagaagaggagtgacaatcaagccaa

SEQ ID NO: 129391 - DNA, 74 bp, Homo sapiens
cgcccgtccacacccgccgccagcttcgagagctgtgcccaggagtgaacaaccagccctacctctgtgagagt

SEQ ID NO: 129392 - DNA, 50 bp, Homo sapiens
gggacgtccaaggatgatgggcactgtcctcctccgcctcctcctctctg

SEQ ID NO: 129393 - DNA, 101 bp, Homo sapiens
gtcttcagtgagaagtctctccataatgctccctaacatcagatccatgttaatcctgatgcacagaactgggaataggttaatgttgaagaaggaaaatg

SEQ ID NO: 129394 - DNA, 82 bp, Homo sapiens
cgagagtggccccagccgggccagaagcaggtactccaaagattcaggtttactcacgtcatccagcagagaatggaaagtc

SEQ ID NO: 129395 - DNA, 75 bp, Homo sapiens
ttttcagggacgtagccatccagagcacttgcacctcctgcgccgccgccccccatccaaggatatgccttcaag

SEQ ID NO: 129396 - DNA, 100 bp, Homo sapiens
ctcagcggcagcggcaagagcatgaacgcgaggccactgtctgcagctcccgtgaagatgtccactccagacccacccctgggcggaactcctcggccag

SEQ ID NO: 129397 - DNA, 80 bp, Homo sapiens
atgaaatagatggattagctccagttcgctctagcagacaagatcagatccacagtagaccaaattttggtacaattgaa

SEQ ID NO: 129398 - DNA, 75 bp, Homo sapiens
agacgagtctttagatacctgtaccgattattcctactatcatgcaatattggaggctgcatttcagtttctgtc

SEQ ID NO: 129399 - DNA, 82 bp, Homo sapiens
aggactgacgaatcttctggatgtccctggattgaagtaccttgtggtctataatcctttagaacaagaccgaatctcgttg

SEQ ID NO: 129400 - DNA, 98 bp, Homo sapiens
tccagagctgcatcattccttggggcaaaatgtggacaaggctgcagaagaaagatcagcaactggagcctaaaaaaagtaccagccctaaaaaagct

SEQ ID NO: 129401 - DNA, 90 bp, Homo sapiens
gggaccaggacagtcgcgaggttcgagtgttgcagagcctgcggggcaagatctgtgaaaagaaagggattatctcagacagtaagccag

SEQ ID NO: 129402 - DNA, 100 bp, Homo sapiens
tggtgtccttctcaaggcagtggcccaggccacaggaccttgcagatgcttcgggagaacctggaggaggaggccatcatcatgaaggacgtgcccgact

SEQ ID NO: 129403 - DNA, 83 bp, Homo sapiens
ttccccacactcaagttctttcctgccagtgccgacaggacgactccaaccgggaagactttgacccagcacctgtaaagagc

SEQ ID NO: 129404 - DNA, 75 bp, Homo sapiens
ctcgagccagcccgccagcatgccccagtccaaaggaactctgcgaccttcaagtcgtttgaggaccgagttggg

SEQ ID NO: 129405 - DNA, 73 bp, Homo sapiens
ccggccggtccctcgcctcccggccgagctgacggaaatcacattctgcctgatgaagatctggcttcctttc

SEQ ID NO: 129406 - DNA, 98 bp, Homo sapiens
aacctggtatacctggccacgatcgcagactccaaccagaacatgcagtccctgcttcctgccgttttccagcttgcagctcatctggtgtactgggg

SEQ ID NO: 129407 - DNA, 76 bp, Homo sapiens
aaagagtccaaaagttaccaaaagaactactttccagattgcattcacagagtggattgaaccacctaaacgagaa

SEQ ID NO: 129408 - DNA, 78 bp, Homo sapiens
ttgtacagcgccggtcaacatcgcggtcatcaagtactgagcatcagatccatgctgctgctgactcggagccccaca

SEQ ID NO: 129409 - DNA, 100 bp, Homo sapiens
ctgcagggacccggtgacagcgtgagaggttcgcagaagctgtaggtaaaacttgcctactgatcagttacacaaccaatgcatttcctggagaatatat

SEQ ID NO: 129410 - DNA, 100 bp, Homo sapiens
agagggtctggagggctgagcagtcaactcaaatgcaagtccaagaggaggaggaggcggaggtccaagcggaaaggttcatgtactggacagactgggg

SEQ ID NO: 129411 - DNA, 50 bp, Homo sapiens
ccttggaagtcaacactgtcaattgtttgttgacacaagtgtttactaac

SEQ ID NO: 129412 - DNA, 87 bp, Homo sapiens
aggactgctctcctactacacggcattcctgcatcgcatccggcagaacgtggccgactcagtggagaagggcctcacggaggagaa

SEQ ID NO: 129413 - DNA, 75 bp, Homo sapiens
cacaggagctgtagagaggaccccggtacatctgaaagccgggaaatggctggtacacacccccaaaagaagacg

SEQ ID NO: 129414 - DNA, 96 bp, Homo sapiens
agctgccttcaccacagcccatgaattagatctgtcagaggagcctttcgatatctggggaacttggcattcaacattaaaaagcggatccaaaga

SEQ ID NO: 129415 - DNA, 51 bp, Homo sapiens
ctcggaggcgttcagctgcttcaagatgaagttctgttccaagagataacc

SEQ ID NO: 129416 - DNA, 82 bp, Homo sapiens
ccggcttcgcgcgcgaacccggctttcgcatttgggaccctgcaggagctccacgcaggagatcggtgaggagctgatcaac

SEQ ID NO: 129417 - DNA, 98 bp, Homo sapiens
agttccgtgctccattatgtcgtgtgcttccccgatatttggagtctgggagtgatccttttcatgttggtgtgtgggcagccgccctttcaagaagc

SEQ ID NO: 129418 - DNA, 50 bp, Homo sapiens
gactcatggaggctgagcatttattcagggtttccctagccagcagagct

SEQ ID NO: 129419 - DNA, 75 bp, Homo sapiens
caaccccgaacggggggagattctgctcacggaactgcaggtgaattatgtaacctcattacgctggatgtagct

SEQ ID NO: 129420 - DNA, 83 bp, Homo sapiens
tgcggtctcggatattgccggtcatgtctcacaagagaacagcgagtacggatcttaagcaactgaaccaggtcaactttacc

SEQ ID NO: 129421 - DNA, 90 bp, Homo sapiens
cgctggcagccgcggatctcaccgccgctcaggaggacgggaggggcaagctgcggccaaccaaggccaagagcgagcggaagaagaaga

SEQ ID NO: 129422 - DNA, 100 bp, Homo sapiens
ttgtacattcttttggccgaggaaacagaatgagctgcgacagtcttaaggacaaacatttgtggattttttatcaagcagaaatgcatcgaacaacgag

SEQ ID NO: 129423 - DNA, 100 bp, Homo sapiens
aatggcgtcggaaagcgacaccgaggaattctatgatgcccctgaagatgtgcacctagggggcggctaccccgtgggtttgcatttatgtcggatcctc

SEQ ID NO: 129424 - DNA, 87 bp, Homo sapiens
gcgcgcgggggcgacgcgcgggaacaacgcgagtcggcgcgcgggacgaagatgtccagctcgccgctgtccaagaaacgtcgcgtg

SEQ ID NO: 129425 - DNA, 100 bp, Homo sapiens
ctcctcgccgcggcggggactgcagaattctggggagacattgccaaggaattttactggaagactccatgccctggcccattccttcggtacaactttg

SEQ ID NO: 129426 - DNA, 98 bp, Homo sapiens
gaggtggtggctgcggcctttgaacaatctcggaagggtgctgacctggaccgggagaagaaggctgccgagtgcaaggtggacagcatcgggagcgg

SEQ ID NO: 129427 - DNA, 80 bp, Homo sapiens
gttctggaaaggcacccatccttattgctacagatgtagcctcccgtgggctagcccaagaagatgaaaggattgttctt

SEQ ID NO: 129428 - DNA, 100 bp, Homo sapiens
gacagaatgtacgaccttgttgctgttgtggttcactgtggaagccgattacacctcaacaagaaggcaactgacaaacagccttatagcaagctcccag

SEQ ID NO: 129429 - DNA, 98 bp, Homo sapiens
agctccggccgcctggctccccatactagtcgccgaatgagcatgttgattacgtagatgttggtggagcttatgtgggaccaacccaaaacagaatc

SEQ ID NO: 129430 - DNA, 100 bp, Homo sapiens
tggctgttctgaagagtgttactgtgaacattcatgcacaaatttttatgtggagagagaaaaggaacagttccgtaagctctttattggtggcttaagc

SEQ ID NO: 129431 - DNA, 100 bp, Homo sapiens
aagatgaacaacggcggcaaagccgagaaggagaacaccccgagcgaggccaaccttcaggaggaggaggtgtggctggatctcctaaaacccattgtga

SEQ ID NO: 129432 - DNA, 105 bp, Homo sapiens
aattgggatgatgacaatgtagaggatgacttctctaatcagttacgccaacaagtcccaaatttggaaaagctgactcatatgaaaagctggaaaaactagggg

SEQ ID NO: 129433 - DNA, 100 bp, Homo sapiens
aagacaaggaagatgagctgtcctttcaggaaggagccattatttatgtcatcaagaagaatgacgatggacgctgtgcagagctgcaagtccgtatcac

SEQ ID NO: 129434 - DNA, 75 bp, Homo sapiens
atgacagattacgccccctatcctatccgcaaacagccgtcatgattggggacgatatcgtgggcgacgtcggcg

SEQ ID NO: 129435 - DNA, 90 bp, Homo sapiens
gagaggccattcgacgctacagccacaggattggcccactttccccattcacatcggcgaggctctggcctgggcaaaagaggagcagct

SEQ ID NO: 129436 - DNA, 100 bp, Homo sapiens
ggattctacagatatatgcaagtacataagattctttcctgatggccatgtgatgatgttgacaacccctgaagagcctcagtccattgttccacgttta

SEQ ID NO: 129437 - DNA, 100 bp, Homo sapiens
aaggtggccacctccctgctgctgctgctcttcgccatcttcatgggcctgcgggcctccaagagtggtggatatgttcttggctttaaaatagatcctg

SEQ ID NO: 129438 - DNA, 100 bp, Homo sapiens
tcgacgtgttgcagcacatcctcatccgagcctttgatttgagtggcaaggaccagactggcttgagctctctgagatgaccgagcagccagactatgac

SEQ ID NO: 129439 - DNA, 75 bp, Homo sapiens
gccgtcttcctatccttacccgacctcagatgctcccttctgctcctggaaaatgtttataggaggccttagctg

SEQ ID NO: 129440 - DNA, 82 bp, Homo sapiens
ctggtatttcgaaggactctatccaacctattatattattgcctaagtgtaatcttgaacatgggcggtgctgtgagtgctg

SEQ ID NO: 129441 - DNA, 100 bp, Homo sapiens
gatcgtcaacaaaaacaatgtgagatgtctccagcatttttacggacccaatcatgagcactgctttaatagggttggactccatgaaagaattgcacaa

SEQ ID NO: 129442 - DNA, 83 bp, Homo sapiens
ggtaacattacattatgctttccagacagaaaccaaacttcatctcattttaggatttgctcgaatatttgggtacccagtag

SEQ ID NO: 129443 - DNA, 117 bp, Homo sapiens
tggagagccgccagggctctatcaaggggctggtgtactccagcaacttccaggatcagggagcttccaaggcatttgatacctttttgatgggaagaagggctctgaggagctcca

SEQ ID NO: 129444 - DNA, 98 bp, Homo sapiens
gaaatcatgtcaagcgaagccttgaaaaagctgccctgagacggtgtcccgccgaaagggaacaacctatcttcagcactcgagctcatgtcttccaa

SEQ ID NO: 129445 - DNA, 107 bp, Homo sapiens
ggacccggcccgggaccggcggcgcgcggcggccgaggccagggccaattcctgtccccccagcagcatggcatcgtgtgctgaaccctctgagccctctgccccac

SEQ ID NO: 129446 - DNA, 96 bp, Homo sapiens
gggaagctgccttacaagcacaaaagctgtcggaaaaggtaacagaagatggaactcgaaatcccaatgaaaaacctacccagcaaagaagcatag

SEQ ID NO: 129447 - DNA, 100 bp, Homo sapiens
atcctgctgtatgatgacaacagcatcatgaccttcaacctcagtcagttgatggcagctcatgccagtagagacagagtcataaaaaactgtatagccc

SEQ ID NO: 129448 - DNA, 74 bp, Homo sapiens
ttttatattcatctcaaaaacaaaattctgaactcaggacttggcaacagttggaattgatcacaccttttcag

SEQ ID NO: 129449 - DNA, 100 bp, Homo sapiens
cgtacactgaattctgtcaaggtcggacaatgagatgggccttagcttggagtttttatgatgatgtcacagtaccagttggatggcaagcatgtggtgt

SEQ ID NO: 129450 - DNA, 83 bp, Homo sapiens
caggcggagagacccgccgccaggtcagcccaaggccaaccccactgtcactctgttcccgccctcctctgaggagctccaag

SEQ ID NO: 129451 - DNA, 100 bp, Homo sapiens
tcgcagtggtcgcttcttctccttggcaaacgaagcggatgctgtgacactggatgcaggtttggtgtatgatgcttacctggctcccaataacctgaag

SEQ ID NO: 129452 - DNA, 100 bp, Homo sapiens
ccggccgcagcgcaggcagcccagcaggttttgcacactagggaccaagaagccctcggggacactgctgagaaaagactgccgaagggaagaccagcgg

SEQ ID NO: 129453 - DNA, 90 bp, Homo sapiens
gcagcctcctgtacagcccgccgcccctgcagccgctgccatggcccagacactgcagatggagatcccgaacttcggcaacagcatcct

SEQ ID NO: 129454 - DNA, 100 bp, Homo sapiens
gctcgatccgctgctcgcacgggagccagctgggtgacaggcaggattgaacccaactaccccaaggtctgcggccaccagggcaatgtgctggatatca

SEQ ID NO: 129455 - DNA, 92 bp, Homo sapiens
gacggcggcggtggcggcttggacgactcggagagccggaacttgctactaccagcaccatgccctaccaatatccagcactgaccccggag

SEQ ID NO: 129456 - DNA, 82 bp, Homo sapiens
gctcaagatgtgggaactggaactttaatggctgttaaacagaatatcctccgaatcctaaatctagagctccaaggatgct

SEQ ID NO: 129457 - DNA, 150 bp, Homo sapiens
atgaaaccaaccagcagggggcttgaaggaggcgtctagggctttgctcccaagggctgtggctgatgatggtctggtcttctctcgtctgagccctgagtactacgacctggcaagagcccacctgcgtgatgaggagaaatcctgccc

SEQ ID NO: 129458 - DNA, 75 bp, Homo sapiens
tctgagtgtatcacaaggctatgcagtggcctgacaatgaactactgcaggaatccagatgccgataaaggcccc

SEQ ID NO: 129459 - DNA, 73 bp, Homo sapiens
tcagatcatccaagtggaggttcctacagagattcatatgagagttatgggttaaagcacgaattgggagctc

SEQ ID NO: 129460 - DNA, 100 bp, Homo sapiens
caccaggagggagatggctccgagggagaaggagaaggagaaactgaaggagatgtccacactagcaacaggaaaatgtttataggaggccttagctggg

SEQ ID NO: 129461 - DNA, 121 bp, Homo sapiens
cgagaatgctaggcttctggcccagaaaagaggagctttgcagggctctgcatggcaggttagctcagatcctaaatgcccaggagatgttgattttcataatagtgactgggacattaag

SEQ ID NO: 129462 - DNA, 99 bp, Homo sapiens
ctgtgcccaggccagggctgccaaggtcagcagcaaggacaagatggagtaaaagtccagcaagctactatagctcctgtaactgtagcagttggagga

SEQ ID NO: 129463 - DNA, 100 bp, Homo sapiens
atctttggctgatcacagcatttcatgaaaaggctcaggcagctgtccaaggacctgttggtacagatttcaaacccttaaatagtacccctgcaacaac

SEQ ID NO: 129464 - DNA, 50 bp, Homo sapiens
gtaaatgtttatggagtgcatgtgccagggtactgaaatggctaaatatt

SEQ ID NO: 129465 - DNA, 88 bp, Homo sapiens
ttccctccttcgtcgctgttgctgccgccatacgcgctctccctgtttagagattatgcatgatgtgataaagaaggtcaagaagaag

SEQ ID NO: 129466 - DNA, 90 bp, Homo sapiens
aaactcatttcacagttatcatcacttccgtagctagtatgttcaacacaccaggaatgcagagcttgttgcaacaaataactgaaaacc

SEQ ID NO: 129467 - DNA, 73 bp, Homo sapiens
gcggcatcctcagcgccccagcgatccggtgcccattagatgatgattattctccaccgtctaagagaccaaa

SEQ ID NO: 129468 - DNA, 75 bp, Homo sapiens
agcccctcccgcagccggtgtgacctgtcccttcaggtcctgggaactccaacaagggagcaaatcagagaaatg

SEQ ID NO: 129469 - DNA, 100 bp, Homo sapiens
tgatccggaaatatggcctcaatatgtgccgccagtgtttccgtcagtacgcgaaggatatcggtttcattaagtacataccgagcatcaaatattaagg

SEQ ID NO: 129470 - DNA, 100 bp, Homo sapiens
cgggaacagatgagtgaagcagaggtgggggtgtttgtccagcgactccggggcctgatgaatgacatcggacagagcgggatgccaccagcttgtccaa

SEQ ID NO: 129471 - DNA, 100 bp, Homo sapiens
aaggaagctcggacttctcctggggatatgatgagtgatgtgtctgcaggaggagccactgtttttcctgaagttggagctagtgtttggcccaaaaaag

SEQ ID NO: 129472 - DNA, 132 bp, Homo sapiens
tcaccagggcagaaaagatgacagccatggaagcagagctcaaaggactgaaagctacagagacttctgaagtggagagtctgcgacctcctcggttcttcaatgaagatggagttatcagaccgtacaggt

SEQ ID NO: 129473 - DNA, 97 bp, Homo sapiens
ccattctacatcccagacaaatggaagtgttatgatgcccttcgaaaaatgatcaactattgaccatataggaagaagaaattgtcgagacgaataa

SEQ ID NO: 129474 - DNA, 90 bp, Homo sapiens
gcagaattaccgcctcttctttagaacctagaaagattgtacaatgaatggtgattctcgtgctgcggtggtgacctcaccacccccgac

SEQ ID NO: 129475 - DNA, 75 bp, Homo sapiens
tagatgatccaagtcaccaagaaattactgtctcaagtgatacgctggaccaagcaacactctccctggccgtga

SEQ ID NO: 129476 - DNA, 75 bp, Homo sapiens
caggaagcgagggatggaggttgtgcaggaagtgggaaaactcttgcctttgccatcccaatgattcatgcggtg

SEQ ID NO: 129477 - DNA, 83 bp, Homo sapiens
gggatcctttatcctggtcatcttctatttccaaaaatagcctaacatggcagaccagagacagcgctcactgtctacctctg

SEQ ID NO: 129478 - DNA, 51 bp, Homo sapiens
gcatgagccaccgtgcccggccaacgtcgatggccaggtggtcttcataaa

SEQ ID NO: 129479 - DNA, 100 bp, Homo sapiens
gaggacgtgggcacggtggtcggcatcgacctggggaccacctactcctggttattcagcttctcaaggctggaaaagcgaaggaagtttcctacaatgc

SEQ ID NO: 129480 - DNA, 100 bp, Homo sapiens
ctggctttcacaattgcccatgagctaggacacaggatactggtatcagtgtcaggaaaagagtaataaagattctcagagacatttgtattgaacaacc

SEQ ID NO: 129481 - DNA, 100 bp, Homo sapiens
actcgtagggactccaaaccccagtactcctctgcccaacactgtacctcagttcattgccagagagccatcaacctcaagcccagcagcgaagagtcac

SEQ ID NO: 129482 - DNA, 83 bp, Homo sapiens
gtggaaggtactatggcagaggttacaaaaaccaggcagcaattcagggcagccccgagaaccacaggtgtacaccctgcccc

SEQ ID NO: 129483 - DNA, 88 bp, Homo sapiens
tctgagtattgtctttatatcctgacactatgaatgctacttggatgcctcttaaggtgtgtgatcctgtaaaattaaatcttccaag

SEQ ID NO: 129484 - DNA, 90 bp, Homo sapiens
tggtggtaaatatgtaaagttacaaatatgggatacagcaggacaagaacgattcagtactttgttgaataagaatggagagagtgggca

SEQ ID NO: 129485 - DNA, 100 bp, Homo sapiens
gatggcagcgacacaattgtctgtgacagtaacagtacttgggatcccccagttccaaagtgtcttaaaggccgtcaccgatgggttgtatatactactg

SEQ ID NO: 129486 - DNA, 100 bp, Homo sapiens
gcattactgcctttgctgggcaaccaaaggaggaaatgagcttgcaaaagatacagatattgtggatgaagccatctattacttcaaggccaatgtcttc

SEQ ID NO: 129487 - DNA, 82 bp, Homo sapiens
agcccccagcatgtcgggcccagacgtcgagacgccgtccgccatccagatctgccgaaacgcttcgttaagggactcaggc

SEQ ID NO: 129488 - DNA, 100 bp, Homo sapiens
ttgagcccggaagcgcagaagctgcccccaaatacatcaagatgtttgtactggatgaagctgacgaaatgttaagccgtggattcaaggaccagatcta

SEQ ID NO: 129489 - DNA, 100 bp, Homo sapiens
gaaatacaacatagagaaggacattgcggctcatatcaagaagccgtttccctggggagatggtaaccatactctattccataaccctcatgtgaatcca

SEQ ID NO: 129490 - DNA, 100 bp, Homo sapiens
ctgccgcggctacgctgaggctctccgctcagttttcaatggttccagcaggtcaacacgggagaaggaacctgttcaaaaacacaaaagcaaagaggcc

SEQ ID NO: 129491 - DNA, 100 bp, Homo sapiens
gcagagagagtgcgcagaaggattccgggagcacagttccgccgaatagaatgagtccatttaagtcccaggacggtggaaactagctagtagattgcag

SEQ ID NO: 129492 - DNA, 100 bp, Homo sapiens
tgtgacttcgagtgaagtgtggaagcgctggaagcacttagaccctgcctctatcaagcccagagagagacgtggagagggacgtcttcctgtatagagc

SEQ ID NO: 129493 - DNA, 100 bp, Homo sapiens
gtcccggcccctgcagtccggatactcacgccagaaggagatacaactcgtcaacgaatcaaattcagtgatgacagagtatgcaagagtcaccttctca

SEQ ID NO: 129494 - DNA, 74 bp, Homo sapiens
gctacctcatccgcttcctgcagccagctgaggtgggtgtcctggttggcaaagaccggtcaagtttttacgtg

SEQ ID NO: 129495 - DNA, 95 bp, Homo sapiens
tggcttgggtagagatgatgcgcttctcagaaatgtccagacaatgcagatcttcgtgaagactctgactggtaagaccatcaccctcgaggttg

SEQ ID NO: 129496 - DNA, 82 bp, Homo sapiens
gaaaatgcccaggaggaagcaggagcagcccaagcgccttccctcacgtactggctgtgatcgaacttctcaaccctcagag

SEQ ID NO: 129497 - DNA, 75 bp, Homo sapiens
aagtactcgccgagtggaacgggcaatgaggcagacacaggaggcaggtggaagtcatcataaagtttctgtttc

SEQ ID NO: 129498 - DNA, 88 bp, Homo sapiens
gcggatcgcaacccggagtccggatccgatcccgctctgcacattccaaaggacctgaaggagaagaaggagaaggtggaggagaagg

SEQ ID NO: 129499 - DNA, 78 bp, Homo sapiens
ggcggggagaggaccatgtgagtgggctccggagcctcagcgccgcgcaggtgaactggcacaaaggttaatctcaag

SEQ ID NO: 129500 - DNA, 90 bp, Homo sapiens
ctcagccattttccacagatcagcagcgtcaccctttacaccagaaagctggcgggcactatggggaaaaaacaaaacaagaagaaagtg

SEQ ID NO: 129501 - DNA, 50 bp, Homo sapiens
gtttcagcaacaccagcaaacagtggtctatgttaacaatgaatgggcaa

SEQ ID NO: 129502 - DNA, 98 bp, Homo sapiens
attttggtttacagttggctgatgattccacagataacccaatgttctacatttcaactccatcaaatattaaattgatgtttatgggctaacctgga

SEQ ID NO: 129503 - DNA, 90 bp, Homo sapiens
tgctgtccagtgtcttcgatctgcttctgatgaaaaaaatggctactggacaggatcgagtggttgctctcgtggacatggactgttttt

SEQ ID NO: 129504 - DNA, 100 bp, Homo sapiens
gaacactgctctggatgatgcagaagaggagtcctttaggaaggtgactgctggctgctggcagccattgcctccctcaccttgaatgaagaaatcctgg

SEQ ID NO: 129505 - DNA, 74 bp, Homo sapiens
cgacatggaacagggactcactgggggaataagtcagcaacctgatccaggctttactggggctacgactcccc

SEQ ID NO: 129506 - DNA, 87 bp, Homo sapiens
gaggcctgcgtggaggaggcgccccgcgcagctggctggcggagcatgagcgccccagtttcatgatcaacatgggagactcccacg

SEQ ID NO: 129507 - DNA, 51 bp, Homo sapiens
cgttcgctgcgcgtgcacattccgcaaagcttcgaggcgcaccaggacgag

SEQ ID NO: 129508 - DNA, 100 bp, Homo sapiens
acgtgtgttgggaatggtcgtggggaatggacatgcattgcctactcgcagcttcgaggaactggaagaggaggcaacagtatttggggcaagaagtttg

SEQ ID NO: 129509 - DNA, 76 bp, Homo sapiens
aaagagccatctgtggtgccaattgaaggtggtgttcccactgatgaagagcaggcgactgggttggagagggaga

SEQ ID NO: 129510 - DNA, 75 bp, Homo sapiens
cagcgagatccgggccgtgaacgaaagcagtgacggaggagcttgtaccaccgctgactcctgagttctcacaac

SEQ ID NO: 129511 - DNA, 100 bp, Homo sapiens
atcgcttacatctccagagaaatcctgaggaattacctctggactacaaatttacaagattctcttcaagcaattcaaaaacagctggctactatccaaa

SEQ ID NO: 129512 - DNA, 75 bp, Homo sapiens
ctgtcagttttctgtggatgaaggatttgtacacacagatatgacgaaagacttgaaagaagaacatttaaagaa

SEQ ID NO: 129513 - DNA, 82 bp, Homo sapiens
gggagcgcaaggtcgccctcaaggccatgatcaaaacactccgccgtggtcatggaggagggaagtccgggcgaggttcctg

SEQ ID NO: 129514 - DNA, 87 bp, Homo sapiens
cgaagggaatccatttgatcattttagtgctggagaatctgtacttcctcctgtgctggttccaagacacagcgaatataatcctca

SEQ ID NO: 129515 - DNA, 100 bp, Homo sapiens
acttaatcctactcagaagaacttgtacagagatgtgatgttggagaactatagcaatctggttttcttggagccctgcccccttggcctcgcctcttcg

SEQ ID NO: 129516 - DNA, 100 bp, Homo sapiens
actgctactgcgaagacagctggcaggttttgcacactagggaccaagaagccctcggggacactgctgagaaaagactgccgaagggaagaccagcggg

SEQ ID NO: 129517 - DNA, 98 bp, Homo sapiens
ccaagttggaacaaggagaagagccatggatcataaagagacacataccaaattggatctatccaggttcctctcctggctgaaatttatggtataga

SEQ ID NO: 129518 - DNA, 75 bp, Homo sapiens
agcaacggcgacatccagcaaggatttggtgctatggagaaatttttggtagaatataagagtgcagtggagaag

SEQ ID NO: 129519 - DNA, 100 bp, Homo sapiens
gctgcccaggctcgcctcgactccaaatggttgaaaacagatatacagacagaaccaagttgtattgttagacacactggaacaagagatttcaaaattt

SEQ ID NO: 129520 - DNA, 75 bp, Homo sapiens
gccaagaccagcgcgagggccctgggcaaggcccgacagacttgcctcctcatgcggcagcagcacgaggccgcg

SEQ ID NO: 129521 - DNA, 75 bp, Homo sapiens
cagattcgcagtggtcgcttcttctccttgctttggaaacatgatgagcaaggagaagcgagaggctgtcagtaa

SEQ ID NO: 129522 - DNA, 50 bp, Homo sapiens
cagagagaactagtggcccaagggaaggcgcgggcccaggccgaggccct

SEQ ID NO: 129523 - DNA, 100 bp, Homo sapiens
ctgcagaaggtctctggagacatcttcagcagcaccttatgaagctaggcagccccttgtccagcccgagggatcctcatcagggggcccaggaaccaag

SEQ ID NO: 129524 - DNA, 100 bp, Homo sapiens
agaagaagtatcagaaagcagggctgtattctgacgtttacaaaactacagagtttgttaagaagttggagcactcttggaaagccctggtacatgacgg

SEQ ID NO: 129525 - DNA, 98 bp, Homo sapiens
ggctacccgctctttgccgtgacaacaccgttcccccagccgggctgagattggaaaggtgtatgagcattgtgacatcgatgactgctggtgtctcg

SEQ ID NO: 129526 - DNA, 100 bp, Homo sapiens
cgcggcgcaggcaccggcccggggagaggcaccatgagcgatcaagtggcctgtgcagatccagagatctgccagaagatctgcagcaacccctcaggct

SEQ ID NO: 129527 - DNA, 75 bp, Homo sapiens
ggacggagagaacacgagcccatcagggcacacgtgtttcacgttgacaggtttgcttgggacgctagtaaccat

SEQ ID NO: 129528 - DNA, 74 bp, Homo sapiens
acggaggtggcagccatctccttctcgccccctgactcaggatgacagacaggtggaactgccagtgtagaggg

SEQ ID NO: 129529 - DNA, 82 bp, Homo sapiens
gccgaagatggtggcggctactcctcctgcctcccgcgacgatgcccctcaacgttagcttcaccaacaggaactatgacct

SEQ ID NO: 129530 - DNA, 100 bp, Homo sapiens
tggaacttctgcccagctctccttggtgtgatgaatgcagactctgctaccattttggctgtttggatcctcctttgaaaaagtctcctaaacagacagg

SEQ ID NO: 129531 - DNA, 100 bp, Homo sapiens
cccgcgtccgccgattcctcctccttggtcgccgcgtccttggctggcgtggagaagaaatgggtgaccgttggtgacacatccctacgaatctacaaat

SEQ ID NO: 129532 - DNA, 100 bp, Homo sapiens
tgaagataaaccgaaaccttccaaacagtcacttcagtcttaccaagaggctttgcagcagcagaacaaaatccagtctcatagcagaggagaatataat

SEQ ID NO: 129533 - DNA, 96 bp, Homo sapiens
cggacagaagggagaaatttcagcagcgcccccagcaaatgctccagccacaggggccaattcctgtccccccagcagcatggcatcgtgtgctga

SEQ ID NO: 129534 - DNA, 100 bp, Homo sapiens
gccagatcaacctggagctctacgcctcctacgtttacctgtccatgacgttccatcctcagagcagcctgaactgttcctaaagaaacttcagcagtgc

SEQ ID NO: 129535 - DNA, 74 bp, Homo sapiens
tggagatgttggagctcggcctgagtgaggcacagttagtgtgactctggatccagatacagctcatcacgaac

SEQ ID NO: 129536 - DNA, 75 bp, Homo sapiens
ctcaaatctcctgctgtgaaccagcagaatttttgaacagacttaattcagtgcacaaatgagatgaatgtgaac

SEQ ID NO: 129537 - DNA, 90 bp, Homo sapiens
atcctggcggcggccagcccgtacatcaggtgaccaaaagccagccccactgtgagttgaactctttcgtgttgaccggccactctccgt

SEQ ID NO: 129538 - DNA, 83 bp, Homo sapiens
ttgacatttaattttagggtcctttatatagaagggagagtagttccagtgtctcgccccatcctcaccctcagggttcccag

SEQ ID NO: 129539 - DNA, 100 bp, Homo sapiens
caccagtcccaagtcgtccccctctccgccccccaggaggggcgagagggagccgcagctgatgtcaggagggtgcatctgcccggaagactcagactcc

SEQ ID NO: 129540 - DNA, 100 bp, Homo sapiens
gctgtatctactcaagagtggaagttttcacagatcgggcccgggacacccagacagatgagattgtcgcactgaagaaggtgcggatggacaaggagaa

SEQ ID NO: 129541 - DNA, 100 bp, Homo sapiens
ctccaggatttctgaagactattgtggaagaagcatccattaagctcctgacccctgaggattaccagcgatttctagacctgggcatctccattgctga

SEQ ID NO: 129542 - DNA, 103 bp, Homo sapiens
gccacctggcttcaacgatgtggacgctctgtgccgggcgctgtcagctgtccacagccccaccttctgccaggtggctgacatggaggagctgaccatctgg

SEQ ID NO: 129543 - DNA, 75 bp, Homo sapiens
accacttacacccagggggtgccccccagccaagtgcaccaattccagctggacatcactgtgaaaatgggacgg

SEQ ID NO: 129544 - DNA, 98 bp, Homo sapiens
tctaggctgccgggcgctggtcgtcagcgccgaggctgggctgaggcgccgcggtaccatgaggcgccggccaagatgctgaattatcagggacactt

SEQ ID NO: 129545 - DNA, 50 bp, Homo sapiens
cggcctctcaaagtgctggtattacaggtgtgagccaccatgcctggccc

SEQ ID NO: 129546 - DNA, 122 bp, Homo sapiens
gccattatcctctgtttctctgctgcaccgacctcgacgtcttgcctgtgtcccacttgttcgcggcctataggctgaccccgcactacatctacccaccagccatcgtgcagcccagcgtg

SEQ ID NO: 129547 - DNA, 50 bp, Homo sapiens
cgccagtcaataggaagtacgagtgtaagaatgattgatgttggctgata

SEQ ID NO: 129548 - DNA, 75 bp, Homo sapiens
ggtcgcctgtgtggcaagagtagaaggagcatcgatgcaggaggactcagagagagtaatgataattaccggacc

SEQ ID NO: 129549 - DNA, 100 bp, Homo sapiens
ggaagctgctaacccgacccggattggcgctgaggtggcccgtggggcagaggttgaaggctgcattgactcaccaccctgctgccatgtcaaatgggaa

SEQ ID NO: 129550 - DNA, 75 bp, Homo sapiens
cgctggtgcatctgtttgccggagggttgtatctcccacttcacccttctagaccatcccagaagatctataaga

SEQ ID NO: 129551 - DNA, 100 bp, Homo sapiens
gtaaaaataagcctacgatgaactatgagaaactcagtcgtgcattaagatacgtaggtaacctttccagagatgtgacagaagtccttatacttcagtt

SEQ ID NO: 129552 - DNA, 100 bp, Homo sapiens
ccacgggcggctgcagggtggagcaacctttcccctggatctcacaaaaactcgactccaaatgcaaggagaagcagctcttgctcggttgggagacggt

SEQ ID NO: 129553 - DNA, 98 bp, Homo sapiens
acgagctgaacctgaaggatgccatcagctacgtggctgagggtgattctgggggtccacttgtctgtaatggtgtgcttcaaggtatcacatcatgg

SEQ ID NO: 129554 - DNA, 100 bp, Homo sapiens
ccagaggaagctggaggcgctgatccgagaccctcgctcccccatcaacgtggagagcttgctgtttattgaagtcaaactgtgatggctggctgcttgg

SEQ ID NO: 129555 - DNA, 50 bp, Homo sapiens
cggcccggcagcgacatggaaggccaaatagttgcatcacatgtatctaa

SEQ ID NO: 129556 - DNA, 75 bp, Homo sapiens
atcttgagaaaagaagattgtctatcatgaaggaggaaaatcctgccttgcttcgttgggcctatgcaagaacaa

SEQ ID NO: 129557 - DNA, 75 bp, Homo sapiens
tcgtgatccacccgcctcggcctcccaaagtgctgggattacaggcatttacctatgcctaatgaaaaaaatgat

SEQ ID NO: 129558 - DNA, 82 bp, Homo sapiens
tggatgaattaatgaaccttgacccacaccaagcaatggctgccatccggaagaaactggtgattgttggtgatggagcctg

SEQ ID NO: 129559 - DNA, 82 bp, Homo sapiens
tcagccagcacactcctcgcgagcaaggtgtggacactgccagcggctgcagccgacttggaatgacctgggagacaaatac

SEQ ID NO: 129560 - DNA, 83 bp, Homo sapiens
taggcagatactcatggatactatccagttacctgccaaggaaagtgactattttaccccacagggagaattccgtgtagaca

SEQ ID NO: 129561 - DNA, 100 bp, Homo sapiens
ctatccgtttgttcaggaaccaccagtgacagagctggctgccacatccgaggttggggacctgccatggaaattctacttcaaactttactgcttcctg

SEQ ID NO: 129562 - DNA, 80 bp, Homo sapiens
agttttttctaatggctattcaaggtaaatgtctgctctaagaagcagacaaccggacatgcgcattcatagcagaagga

SEQ ID NO: 129563 - DNA, 75 bp, Homo sapiens
atcgtgctgtattggagagagaagtccatccaagtggtaagaagttcagaagcaagcctcagttggcaaggtacc

SEQ ID NO: 129564 - DNA, 82 bp, Homo sapiens
cggcggcagcagcacggtgcagcgctccaagcctcccgcgacgatgcccctcaacgttagcttcaccaacaggaactatgac

SEQ ID NO: 129565 - DNA, 75 bp, Homo sapiens
tcacggtccaagtcccagcccaagaaagaaatgaaggctaaatcacgttctagatctcacattcttgaaggtggc

SEQ ID NO: 129566 - DNA, 49 bp, Homo sapiens
gttgattatgccagccagatgcaggttgagataagtcgaagagtgactc

SEQ ID NO: 129567 - DNA, 74 bp, Homo sapiens
aatagacctaaagccacagtcttcaagagcccacggacaccacctcaacgggcagccgatgaagtgcaaccttc

SEQ ID NO: 129568 - DNA, 85 bp, Homo sapiens
aatgatgggatagcgttgcaaatccttaaaagagtcttaacgggctcaagcacctcttactgcctcctcactctggaaccaaatg

SEQ ID NO: 129569 - DNA, 131 bp, Homo sapiens
ccctggctcgactggtccagccacaatgtcaagtgctccaaccctcaaatcaccgagaggacaaaagcatgtcttcccttcctgggtgcattggtttggatgcagcaacagctacagtggagtctgaagag

SEQ ID NO: 129570 - DNA, 75 bp, Homo sapiens
cccagcagccaggccgggctcaaccaaaagctagcatttgccaagcggcagcagcagcttaccgccatgaaggtc

SEQ ID NO: 129571 - DNA, 74 bp, Homo sapiens
cctgctgccccgtctcagggcctggaggacgggcaaaacgggtgctggagaatctggtaaaagcaccattgtga

SEQ ID NO: 129572 - DNA, 90 bp, Homo sapiens
cagcctctttcatgttgaggatgttggcttcacttaatcatatccgagctgcgaatgtctgcgacaacgagctcctgcactgccagaacg

SEQ ID NO: 129573 - DNA, 82 bp, Homo sapiens
gcgggcggcttcctggcctgggcgctccggtggcggcggagcggagcgtgctttggacaccatgaattttgatgttataaag

SEQ ID NO: 129574 - DNA, 51 bp, Homo sapiens
cgcaagatggcagccaccacgggctcggtagagacggggtttcgccgtgtt

SEQ ID NO: 129575 - DNA, 76 bp, Homo sapiens
aagacagcagtgacctgcaccaagcagaagaagggaggcttgtggatcagaatctgaacaaaattgggaaagatga

SEQ ID NO: 129576 - DNA, 74 bp, Homo sapiens
gcagggtgtggtcaaccagcctgagtatgagtgtcttcgagagaactctgacgtgaagacgcacgggccttttg

SEQ ID NO: 129577 - DNA, 98 bp, Homo sapiens
ggagctccaaacccaacgtttcccaatttttttccaaactcagccaggtggttcgaaagacttcaagcaattggggccttggacaagttgttactgac

SEQ ID NO: 129578 - DNA, 100 bp, Homo sapiens
ggcgagctgagcacctgtagtcaatcacacgcaggtgcactacatcctccaggaggtggtgatgggtgggatggtgttggaaacaaacatgaatgaaatc

SEQ ID NO: 129579 - DNA, 80 bp, Homo sapiens
ttggcgaagccttgggtttctttcttaaaggactgatttttagaactccacatttgagggaagacatgtaaggaatttgc

SEQ ID NO: 129580 - DNA, 100 bp, Homo sapiens
cctcgttacctgcaggtattgggagatccacagctaagacgccaggacccactggaagcctagaaatggtgacagagctgaatgaacctctctccaatga

SEQ ID NO: 129581 - DNA, 82 bp, Homo sapiens
gtgaaatcagaggagatgtaactatcgttggtagctggcagtgttgtgatggcttttgaagaagtatgcccggacagaatag

SEQ ID NO: 129582 - DNA, 100 bp, Homo sapiens
cagcagtcatgtaactataagcagcttcggaaaggagccaatgagggcgcagttgtgtagcagttgagtaatgctggttagctgttaaggtggcgtgttg

SEQ ID NO: 129583 - DNA, 140 bp, Homo sapiens
agacgatctgcacttcgcattttggcattgacatttaattttagggtcctttatatagaagggagagtaggttaaagctgaagctcaacaaagatatagtgatctctgtgggcatttataatctggtccagaaggctctc

SEQ ID NO: 129584 - DNA, 99 bp, Homo sapiens
tggcccccgatcaccatgtcggctttcgacaccaaccccttcgcggacccagtggatgtaaaccccttccagcactctacacccccaagtgcatatggg

SEQ ID NO: 129585 - DNA, 83 bp, Homo sapiens
cccatagcagtctgccagacaatagagcatatggccccactgcaggccccaccatggcgccgttcctgcgcatcgccttcaac

SEQ ID NO: 129586 - DNA, 90 bp, Homo sapiens
gtttgtctggattttcctgtagaactgagggcagtgaacagagtatctgtcaggcaagagctgctgtgatggtttatgatgatgccaata

SEQ ID NO: 129587 - DNA, 75 bp, Homo sapiens
tcctgaacctggaagttgtgctttttaagggtgtcaaattgagaaccaggtagatccccaccacctacagtaaaa

SEQ ID NO: 129588 - DNA, 100 bp, Homo sapiens
gcagtcctggagctgtgaggagattcgggccgtcaccctgcctcccctgcgtcccgccaccggccgcttctgtcctcgaaagcttatagcttcattgcac

SEQ ID NO: 129589 - DNA, 90 bp, Homo sapiens
tttgggcccaaagaggtgtccacagcttgtgccaccgccgtgctgggcaatcagggagatgcacttatttacatggaaccagagaaacaa

SEQ ID NO: 129590 - DNA, 100 bp, Homo sapiens
tttcagctccatgaaccatttcttctgtatagaaatgcaagctgtgttgctgcctatgttggctggcaaagctcctcaattctcaagcctctgctgcaac

SEQ ID NO: 129591 - DNA, 97 bp, Homo sapiens
tggccatgatggactacccctaccccactgacttcctgggtcccctccctgccaaccccgtcaaggctgagaacgggaagcttgtcatcaatggaaa

SEQ ID NO: 129592 - DNA, 75 bp, Homo sapiens
ccgccatacgcgctctccctgtttaggttaaacccatccagagtaatggctgcggccttacccaggaccctgggg

SEQ ID NO: 129593 - DNA, 82 bp, Homo sapiens
catgtctgcgagccaggattcccgctgagctgactgctgcccactttggaggaggcggtgggctccttcacaagaagactca

SEQ ID NO: 129594 - DNA, 83 bp, Homo sapiens
ctctgtgcactgataataaccctgcaggccgggcactgctgcggctgaatgcggagaagctgcagcggatggggctggcccag

SEQ ID NO: 129595 - DNA, 74 bp, Homo sapiens
ggatttcaacctgaaagtggaggctgcgaaaataggttctgtcatatgttgaagaatccatacaccattaagaa

SEQ ID NO: 129596 - DNA, 100 bp, Homo sapiens
ggtccacctccaccaaaacccaacagaccaccaaatgttgacctgacgaaattccacaaaacctcttctggaaacagggatcatcgtcttgctcttcttt

SEQ ID NO: 129597 - DNA, 100 bp, Homo sapiens
tgatgccagtcgtggtactttaagcagctatagtcttgtattgatggttttgcactatttacaaaaaatacactttcgggaaatggcctctaaatcctgg

SEQ ID NO: 129598 - DNA, 100 bp, Homo sapiens
agcgaacgccagggaccctgtgcaggcctgctcctccgtttgcaaggatctagtgaaaagccatttgatgtatgcggtcagagaagaagtggaggtcctc

SEQ ID NO: 129599 - DNA, 100 bp, Homo sapiens
gctatgggaagacactcaaggatggggattcaaggatggaatttttcataactccatatggcttgaagttcaccatgtctattctcaagatccatgccag

SEQ ID NO: 129600 - DNA, 83 bp, Homo sapiens
agtcactgccttctaacgaaagggcagtacagactttggcagggttcttgtggtgcttgctgggctttcagtgctgtgggggc

SEQ ID NO: 129601 - DNA, 75 bp, Homo sapiens
ccagttatgtccatggtgacatacttaggactgagtaagagcagctgctggtcgggctgaaggacaaggacacgg

SEQ ID NO: 129602 - DNA, 100 bp, Homo sapiens
aggagccaggcggggcatgcacgcttttattgtgccaatccggagtcttcaggaccacaccccactgccaggaacttgaaactggtattgttgaccttct

SEQ ID NO: 129603 - DNA, 71 bp, Homo sapiens
acctcttcaccaactacatctcactctacaacacgtgtatgaaggtggttggaggcaaagtaaagaagccc

SEQ ID NO: 129604 - DNA, 82 bp, Homo sapiens
cgcagaagtcgcgtgtctaggtgagtcgcggtgggtcctcgcttgcagttcagcgaccacgatgatgctgaggctgctggtc

SEQ ID NO: 129605 - DNA, 75 bp, Homo sapiens
cagtttgagaaacctggatctgcgatctgtttgtgcaaatcgcagtcttctccaggctgacaaggcgaagggcat

SEQ ID NO: 129606 - DNA, 88 bp, Homo sapiens
tgctgctgccactcgtcattctgatgcccgccaagcttctcacctggggcgggtgggttctgcaccaccctcccaccctccttcctcc

SEQ ID NO: 129607 - DNA, 50 bp, Homo sapiens
tgccagacccttaccagaagcagtggactaaagaggatggacatagaact

SEQ ID NO: 129608 - DNA, 76 bp, Homo sapiens
ggagttggggcttgatgaaggcgtggatagcctgaaggcagccattcagcatgcttttcacttccactgcatctct

SEQ ID NO: 129609 - DNA, 83 bp, Homo sapiens
gaaaagaaaacagcaacacagttacatagtaaaaggaggcctaaatgattcacagcgtaagcagtatgaagagtggctccagg

SEQ ID NO: 129610 - DNA, 100 bp, Homo sapiens
gcctcctgcgccggccttgcctcgggagcggcggcatggaggctctcaccactcagctggggccggggcgcgagggcagttcctcgcccaactccaagca

SEQ ID NO: 129611 - DNA, 101 bp, Homo sapiens
ccgggcttcggcccccaccagagactcggttatgacgacctgacccaggggacagcagcaggagactactccaaaggtggctatgctggatcatcgcaggc

SEQ ID NO: 129612 - DNA, 82 bp, Homo sapiens
aaattttgtctttgctctaatttataatctggttggaattcccatagctgctgaagggaacttgccgaaaacttaggtgtga

SEQ ID NO: 129613 - DNA, 90 bp, Homo sapiens
aaaagaccagttttcatctttgaatggttgcgatttcttgataaagtcttggttgctgccaacaaggtggaaaatagctattcaatttct

SEQ ID NO: 129614 - DNA, 50 bp, Homo sapiens
ctggcggcgaagccctggactaaggaggactctgtaagctcggttcggct

SEQ ID NO: 129615 - DNA, 50 bp, Homo sapiens
gattctcgtgcctcagcctcccagatatgtacacggtgcagggggtgtgt

SEQ ID NO: 129616 - DNA, 100 bp, Homo sapiens
agtcgggctctgcaggagcgcgcggaggcaaacgaagatttaatattaaattgtggaagaccttcactgattgttttaactgtctgcctatagcagccat

SEQ ID NO: 129617 - DNA, 75 bp, Homo sapiens
ctgctgtggaagaattggctctgcagactcaggaacccggtcaatgagtggtcattgaagataagaaaggaaatg

SEQ ID NO: 129618 - DNA, 82 bp, Homo sapiens
taaggataaaggatttggctttatccgcttgatgggaaataaggccaagattgcaaaatgtcctttaagaacaaaaactggg

SEQ ID NO: 129619 - DNA, 96 bp, Homo sapiens
gtgaactactgaagagggtgcttaacccattacttctttccacctagttatgctggtatatctgaactgaatcagcctgctgaacttttacctcag

SEQ ID NO: 129620 - DNA, 100 bp, Homo sapiens
gtttgctctgctcttccaacaccagtggaagatgatcacatcccagctgttccaggagctctgagtcctttggccattccaaatgctgctgcagcagctg

SEQ ID NO: 129621 - DNA, 98 bp, Homo sapiens
gcgcggcacgcagccgggaggccgaggactcggagttcacctgcagaacatgaaaggctcccggagcagcgctgactcctccaggaaacactgaggca

SEQ ID NO: 129622 - DNA, 100 bp, Homo sapiens
gccccggacgaaggtactcgcagcacttggagcgcagaaccggccgcgcccggtactaggttttgacaagcttgcatcatgcgtgagtataagctagtcg

SEQ ID NO: 129623 - DNA, 82 bp, Homo sapiens
ccatttctaccttgtatgcctcaatttgctggatttaagcactgctgcactttatgagctgcagaaccttggcctgaaaatg

SEQ ID NO: 129624 - DNA, 75 bp, Homo sapiens
gttctgtcactcacttacacagtattgggaaatctgtgaaagaaatatacagcctctgcagacactgcttctgaa

SEQ ID NO: 129625 - DNA, 100 bp, Homo sapiens
aaatatgaactatgataagctgagcagagccctgcgatactattatgacaaggtcctcagaatggttggaatgaccctccagctttgaacagagtaccca

SEQ ID NO: 129626 - DNA, 81 bp, Homo sapiens
gggattgtgggagtctccgcgtcccgctcgctgggagagagggtgaggtggctttgaccccgggttgcccggccagcacga

SEQ ID NO: 129627 - DNA, 111 bp, Homo sapiens
ttcgagatcaccttcgagtgcatcgaggacctgtctgaagacaatgcagatcttcgtgaagactctgactggtaagaccatcaccctcgaggttgagcccagtgacaccat

SEQ ID NO: 129628 - DNA, 100 bp, Homo sapiens
gccgccatccagccaccattccaagatggagtcatcagaacccactgtgaggaagtgacttctccttgaggtcacccagacactccaaacagagcagagc

SEQ ID NO: 129629 - DNA, 101 bp, Homo sapiens
cctgcccagacggctcacctgtgcgggatggaacaaaaggcttcagggatgacttcttagggggcaggggaggtagtcgcccaggcgaccggcgaacaggc

SEQ ID NO: 129630 - DNA, 75 bp, Homo sapiens
caaggattggagcacagaggctcagaagcaagtccagtgctgggattacaagcgtgagctaccacacccagcgag

SEQ ID NO: 129631 - DNA, 101 bp, Homo sapiens
agagctcatgaaaaccccttccatctcgaaaaagaaccgcgcgggaagccccagcccgcagccctcggggggaaagcaggcaggatgggagagtcgccgat

SEQ ID NO: 129632 - DNA, 88 bp, Homo sapiens
ttcaatattggaagcgctttgatttacagcagctgcaggtgtatgcaacagcgttattgcaacaggctaacgaaaacagacaaaattc

SEQ ID NO: 129633 - DNA, 100 bp, Homo sapiens
cacatcttagaagtttagttgaaatcattgaacatgcgggacgaccctgggacagtctccactggggcagatccagctgaccatccggcacagctcgcag

SEQ ID NO: 129634 - DNA, 100 bp, Homo sapiens
gcccccctgtgctcacgccgggttctttacctccgagccaggccgccgcaaagcaggatattaccttccaaatgatgatggagaattttatcagttctgt

SEQ ID NO: 129635 - DNA, 80 bp, Homo sapiens
ccatcattggacccaatggctctgaggctgggaggcggcagaatgcagccagaggagggcacaggctggctgctggagct

SEQ ID NO: 129636 - DNA, 95 bp, Homo sapiens
tcagcgggctgcagcgcgccaaaaccgggacggacaagaccctggtgaaggaggtcgtacagatggcaagagacttctggggccccagtggctgg

SEQ ID NO: 129637 - DNA, 75 bp, Homo sapiens
acaccacttcctgcgcagaggcatcttcttctcacacaggtaaattcaactggaagggaactattaaagcaattc

SEQ ID NO: 129638 - DNA, 50 bp, Homo sapiens
ttttcagggacgtagccatccagagcacttttccagccattaactccagg

SEQ ID NO: 129639 - DNA, 83 bp, Homo sapiens
cgggaacatcattacaagacagacagtctccagggaggacggtgacagacgggtcctcggtggcactggtgcccaagcagacg

SEQ ID NO: 129640 - DNA, 100 bp, Homo sapiens
gatcacaggggccaggaacctagcagtctcccaggccgtgcataaggctgtgctgaccatcgacgagaaagggactgaagctgctggggccatgttttta

SEQ ID NO: 129641 - DNA, 100 bp, Homo sapiens
aaaatgcagtcccctcatgccaagcgggcgatgatgagatctcatttgaccctgatgacatcatcaccaacatcgagatgattgacgacggctggtggcg

SEQ ID NO: 129642 - DNA, 100 bp, Homo sapiens
ccgcggaaaccgatctgcccgttgtgtttgtgaaacagagaaagataggcggccatggtccaaccttgaaggaatgtatcctgtcaggtataatgtcagt

SEQ ID NO: 129643 - DNA, 96 bp, Homo sapiens
gcggcctgggatgcgcttgggctccctggttggtgttcgaggaagagacattgttgttcttggtgtggagaagaagtcagtggccaaactgcagga

SEQ ID NO: 129644 - DNA, 100 bp, Homo sapiens
agtggagctccttttcctccacctaccttcccgaaatgctatcttctttgagaagtcaaattgtcaggatcaggaatgtatgttttcttccatctggatt

SEQ ID NO: 129645 - DNA, 71 bp, Homo sapiens
cacacttttggatcaaagggagcctttgggtttcagcatcctgtaagttttctggatatgccgcagaagga

SEQ ID NO: 129646 - DNA, 97 bp, Homo sapiens
ttgggccggactgcttaccctccatttgtttctatacatttctcaatgcttaccaggttggcaaaagcagcttttgatgatgcaattgcagaactgg

SEQ ID NO: 129647 - DNA, 100 bp, Homo sapiens
ccaggccaggtgttcaagcccttcctccccagcatcatcgccctgtgcatggagcaagtgtatcccatcattgccgagggagcgggaacgccgagagaag

SEQ ID NO: 129648 - DNA, 76 bp, Homo sapiens
cctgtacagcatcaactacctgcactttggggagcctaagtcctgggaaattcaactactgaggaggttacggcac

SEQ ID NO: 129649 - DNA, 89 bp, Homo sapiens
ttgaatggcgactagatgtacaggtgattttacaacgagatgctgctctccatagggatgctcatgctgtcagccacacaagtctacac

SEQ ID NO: 129650 - DNA, 100 bp, Homo sapiens
atgaagtaaaacgggcccaaagacaggtagtggtagcagagaattttgatgaaatagtgaataatgaaaataaagatgtgctgattgaattttatgcccc

SEQ ID NO: 129651 - DNA, 73 bp, Homo sapiens
tttagcagtgggtcccaggacgtgcaccagaaaagagactggacgccgggcatggcagtgccacgggacattg

SEQ ID NO: 129652 - DNA, 98 bp, Homo sapiens
cttggaggagggtcactatgtcattgggccaaagatagagattccggtacattatgcaggaataagacgagttggaagaagacctgatcaacaacttc

SEQ ID NO: 129653 - DNA, 80 bp, Homo sapiens
cgagttcgaggagaggcaatcaggatacgaaccatgaagatgcgtcaacaaggaagctgacctggttacaactcatgaat

SEQ ID NO: 129654 - DNA, 98 bp, Homo sapiens
agatgtggtttccttattggagcaagggaaagaaccctggctggggaaaagggaagtgaaaagagatctgttttcagatcactttgggaagcagtgac

SEQ ID NO: 129655 - DNA, 90 bp, Homo sapiens
gtgaccacagatatcaccgcctcagccatgcgagtccacaaagatggtgagaatgagatggtgatcatgagacctggaaacaaatatgag

SEQ ID NO: 129656 - DNA, 75 bp, Homo sapiens
ggccatctgcattgacccggcctacagcaaggcctacggcaggatgggacagtactactggtatgacgagcgggg

SEQ ID NO: 129657 - DNA, 100 bp, Homo sapiens
ttccatcctctggaaatcagctgtggtatgatgcattgtgtattctccttcgtcacagcaagaatgtacgtttttggtttgctcataacgtcctttttaa

SEQ ID NO: 129658 - DNA, 96 bp, Homo sapiens
atgaagaagatcctgttccaagaggcacccaacggccctggtgccgaggccccagaggaggaagaggatggagatgaagatgaggaagctgagtca

SEQ ID NO: 129659 - DNA, 101 bp, Homo sapiens
ggcgccgaggcggccacccgagacgcggcgcgcacgctccggcctgcgggagtgcatccgccccaacccttttccccctcgtctcctgtgagaattccccg

SEQ ID NO: 129660 - DNA, 75 bp, Homo sapiens
acgtctatgtctgcacagggccactcttcctgcccagtgggcagcccatccctcgagtggaatacatggaggaag

SEQ ID NO: 129661 - DNA, 75 bp, Homo sapiens
cagcctgcggagcctgtggggcagctaggtcttgactccactaacggggacttctcatacggctttgaacttgga

SEQ ID NO: 129662 - DNA, 100 bp, Homo sapiens
gtcgccagaaggaagatggcggatctggaggagcagttgtctgatgaagagaagtttaatgagtggtgttaagaataatgttggaagagggatcaatgtt

SEQ ID NO: 129663 - DNA, 82 bp, Homo sapiens
cttgagtgttggcatgttctaaggtagtcagcagagtgcacacagcagctgtcatccctccttcgctcctgtcatcactggc

SEQ ID NO: 129664 - DNA, 100 bp, Homo sapiens
agcggcgcgagcggaagagatagagcttcgcggagacggcggaagcggagagcaacagcgcgccggtaatctgtaagtcagatgctccaacaggggatgt

SEQ ID NO: 129665 - DNA, 51 bp, Homo sapiens
ggtgaatttccatgtcaacatagtcctggagaataaaggcagccccgttga

SEQ ID NO: 129666 - DNA, 100 bp, Homo sapiens
ccgtacaggttgagggatgggactggaaatcaaatgttacagctgtcggaaaaggtaacagaagatggaactcgaaatcccaatgaaaaacctacccagc

SEQ ID NO: 129667 - DNA, 90 bp, Homo sapiens
cagaaatcacattggaccctcctcccaactgtagggctgatcccttatccaacatggttctaaccttcagtactaaagaagatgcagttt

SEQ ID NO: 129668 - DNA, 100 bp, Homo sapiens
ctttctcattctccctgggtacatcgacttcactgcagaccaggtggtgtctcgaaataatgatgtgtggcagaaccatgaagcagttcctggaagagca

SEQ ID NO: 129669 - DNA, 100 bp, Homo sapiens
gtggatgaaggtggggtggcgtggcaagccggactaaggaccggggacttcttgattgaggggcttgcagtcatgtctacagatcttgaagaagtggtta

SEQ ID NO: 129670 - DNA, 90 bp, Homo sapiens
gtgaaaacaaccgatgtccaacttcaagcctttgattttgaagatgaccactttggaaatggtggagtctgcactcagagccggggccct

SEQ ID NO: 129671 - DNA, 50 bp, Homo sapiens
tttacatattatagcaatcgtagagatcacaaaatggctcttcttcagat

SEQ ID NO: 129672 - DNA, 100 bp, Homo sapiens
gacaacaggcaggagaattatgggagcgcatttccccagggacccgtgccagccccaacaaacttaaagattactgaagtaacatcagagggtttcagag

SEQ ID NO: 129673 - DNA, 100 bp, Homo sapiens
ctaaatgtgttaccataccaaggtcatcatcagatttgaaatatttaaagtggatacaaaactatttcagcaatgcagacaattaagtgtgttgttgtgg

SEQ ID NO: 129674 - DNA, 100 bp, Homo sapiens
tgaccctagtaagcacatatttggtagcctttgcatacaagaatgtgaaatttgttctcaagcacaaggccctggaaatacaaggataaatggaggatgg

SEQ ID NO: 129675 - DNA, 88 bp, Homo sapiens
cctcttcagttctctggagccccagattcaacccgtgtacgtgcctgtgcctaaagtcctgggaactccaacaagggagcaaatcaga

SEQ ID NO: 129676 - DNA, 120 bp, Homo sapiens
aactgccagagtggaaataaaccgcaaggatgaagaaataagtaatcttcaccaaagacggtctggaaaatcccgaagcagaagcccgtattcatctaggcattcaagatctcgtagcag

SEQ ID NO: 129677 - DNA, 82 bp, Homo sapiens
ggaggcagccaagctcgtggcctgcctctgcgtgctcaggatggctaaaggtgaccccaagaaaccaaagggcaagatgtcc

SEQ ID NO: 129678 - DNA, 100 bp, Homo sapiens
gggcgcgggaggcagagctgcagatgctgctgaggttggatggcaagcatgtggtgtttggcaaagtgaaagaaggcatgaatattgtggaggccatgga

SEQ ID NO: 129679 - DNA, 100 bp, Homo sapiens
ttggcagacatcgagaagcataatgacattgtggacagtgacagcgatgctgaggatcgaggaacgttgtctgatatttggagttcttacaacatggcag

SEQ ID NO: 129680 - DNA, 82 bp, Homo sapiens
cgcgcagggcctgcagcgggagctggacggcgagcgcgagcggcgcgagaaagagctgcgggcgtctttggagacacagcgt

SEQ ID NO: 129681 - DNA, 95 bp, Homo sapiens
atcgccatcctgtctatcctcctggccgtcctcctcacggtcctcctggctgtgctcatatacacctggtgatactgtgcttgtccaccgagttc

SEQ ID NO: 129682 - DNA, 80 bp, Homo sapiens
cacaaagatccctgaggatgtgtctggtctcgtttctcttgaggtttactcctggcttgggggcattaggaagcactgga

SEQ ID NO: 129683 - DNA, 74 bp, Homo sapiens
cgcgcccttcctcggcgggccggactggttcgagaaatggctgctactaccttaagcggtctgctacagtgtaa

SEQ ID NO: 129684 - DNA, 100 bp, Homo sapiens
atgatgataaagactacaggagaattcggtttgtaggtcgtcagaaagaggttaatacaatctgttggaatgacactggagaatatattttatctggctc

SEQ ID NO: 129685 - DNA, 75 bp, Homo sapiens
caaccaaaagcgcaagcatgatgagatcaaccatgtgcagaaggaggaacggctgaagctcccaattctctccga

SEQ ID NO: 129686 - DNA, 83 bp, Homo sapiens
ccaggatcacgtttgagtgtgctcagatatcgagctttatggatatcgcaatttcggataagggattatggacctgtacttcc

SEQ ID NO: 129687 - DNA, 100 bp, Homo sapiens
ggttccagtcatcaggaatgtggaagctatgaattttgcagatattgaacggaccatcactgaactgggagagaagcttcacttaaaggacaagaagcga

SEQ ID NO: 129688 - DNA, 101 bp, Homo sapiens
ctcttcactcctcagcgcgacgtcgtgtcgagttcccaaaaagctccgcaggggctgtagggagagttgtctgctggttctcagcttgaagaagattctgc

SEQ ID NO: 129689 - DNA, 82 bp, Homo sapiens
cggtgatgctcgacagcctggactctgcaacacctgtcaactccatctgcagtgttcaaggcaggtgacagcagggacatgt

SEQ ID NO: 129690 - DNA, 74 bp, Homo sapiens
cgtcccccgcgggtctgctctgtgtgccatggacggggcagctgtgcggagggtagtggcagccatgaaccgga

SEQ ID NO: 129691 - DNA, 74 bp, Homo sapiens
caggatgtggaggcccaggccgccacctgcaaccacactgtgagctcccccatccaggaatccactgctcccga

SEQ ID NO: 129692 - DNA, 90 bp, Homo sapiens
gaaactcctgcgtaagaagatcgagaagcggaacctcaaattgcggcagcggaacctaaagtttcaggggtcctgtggtgacagataatg

SEQ ID NO: 129693 - DNA, 82 bp, Homo sapiens
cggcgctccaccggcgtggtcaacatccctgccgcagaggagtccaaaactacttacctggaagaccttccaccaccccctg

SEQ ID NO: 129694 - DNA, 90 bp, Homo sapiens
acgtctgcggaagtgcagctgcctcagttcttagcgcaggttacgaaggtgagaatctgatgaaaattctaaaagacattgaaaacagca

SEQ ID NO: 129695 - DNA, 50 bp, Homo sapiens
ctttaatcctgaaagccatgcagcggattcagagcattcttcactccaga

SEQ ID NO: 129696 - DNA, 100 bp, Homo sapiens
gggagccccgggagccgcacggttgggataattcttcactattccacccttgccacagtactatgggtaggagtgacagctcgaaatatctacaaacaag

SEQ ID NO: 129697 - DNA, 75 bp, Homo sapiens
ggatcgcgttgggtgaaggtgacggcgtcgagcgttatcaatactctggctgaccatcatcatcgtgggactgac

SEQ ID NO: 129698 - DNA, 154 bp, Homo sapiens
gccacgcgcagtgctcttggccgggaggaggctgtgctgcaccagcacctcttgctccacatctccagagagcccaggcactgtacaaaacgagttaaacagacatggcccttgccccctgggagttttcagtctaagatgatgctgacatgga

SEQ ID NO: 129699 - DNA, 75 bp, Homo sapiens
acccgcagcccagaaccctgaggacctccgcatgtttgccagacagccctcagcgcctttttccaggagaccaac

SEQ ID NO: 129700 - DNA, 90 bp, Homo sapiens
agaagaggattggtcctgcttttaagcctagctgaaattcttttcaagtttcttgcagaacataaattattaggaaacattaaaaatgtg

SEQ ID NO: 129701 - DNA, 74 bp, Homo sapiens
acagcaacagcgacgactatgacctcgagtctgacatggtagacaagggcgtggtccccctggcagggacaaat

SEQ ID NO: 129702 - DNA, 100 bp, Homo sapiens
ccacctcgaagctggctcagcctttgttcaggaaccgagtgtgaacatggctacgcctcttcattcccgtccatgccgagcccccgactgcagcattcaa

SEQ ID NO: 129703 - DNA, 75 bp, Homo sapiens
aaaggagcaagatggctagggattatgatgcatcattatcacagaagaaattcgtgtctatagcttttaaggact

SEQ ID NO: 129704 - DNA, 82 bp, Homo sapiens
cggatactcagttgtggagagctgattcccaaatctaaaggttttgcaaaaggcatcaaattaaatcaagttcaaatattcc

SEQ ID NO: 129705 - DNA, 87 bp, Homo sapiens
ttggttctccagttaaggttggaaagatggatgctacttcctattctaggtaagcttgatgattaccaggaacgaatgaacaaaggg

SEQ ID NO: 129706 - DNA, 83 bp, Homo sapiens
ctcggtgctgcagacggcgagacctcctgcacagtctttcccagggaactccgatgaagtgttccaacaaaatgagcgagtga

SEQ ID NO: 129707 - DNA, 75 bp, Homo sapiens
cagacatctcgaaccaaaatgacaccacaattttggatcagtggatgaagagatatttggtgtgcctataccaat

SEQ ID NO: 129708 - DNA, 50 bp, Homo sapiens
cctgctcacacttcagaatagagaaggtggttgtgtcaaaccgattggtg

SEQ ID NO: 129709 - DNA, 75 bp, Homo sapiens
tgtttgtggatcgctgtgatcgtcacttggtgtttaagatagaagtgctaatgaatggaagaaaacattttgttg

SEQ ID NO: 129710 - DNA, 75 bp, Homo sapiens
cttgtggctgcggctgctaactggctgcgcacagcaattaccagctctggctgggtcgccacaacttgtttgacg

SEQ ID NO: 129711 - DNA, 100 bp, Homo sapiens
tggtcagcagtgatgatgaagagcctagcacctcttatactgatggttcatcatttacaacccaacagcctcaggcttataaccttttcctgaccacggc

SEQ ID NO: 129712 - DNA, 74 bp, Homo sapiens
atggctataatgggtatggaggaggacctggagattaactgctgaagtactgatcgagttctgcatttcttcaa

SEQ ID NO: 129713 - DNA, 82 bp, Homo sapiens
ccactgctccagtgtcacggatttgattgtgcaggacggacaggaggcacccaggtacatgtcccagagcaagcacacggag

SEQ ID NO: 129714 - DNA, 101 bp, Homo sapiens
cacctataaaccgaggaattcatgatcatttgccagattgaagataaaactttccaagtccttggtaatctttacagcgagggagactgcacttacctgaa

SEQ ID NO: 129715 - DNA, 112 bp, Homo sapiens
aatttatagacaatgaaatgatagtgatccttggtcaaatggatagccctacacagatatttgagcatgtgttcctggagcaatttacagcaatgagggatttatacatgaa

SEQ ID NO: 129716 - DNA, 75 bp, Homo sapiens
cttgtatgcctcaatttgctggatttaagcactgctgcactttatgagggaatgaaagctactggttgattttaa

SEQ ID NO: 129717 - DNA, 75 bp, Homo sapiens
agggcctgcagcgggagctggacggcgagcgcgagcggcgcgagaaaggcagctggtggaatttttgaagaaaat

SEQ ID NO: 129718 - DNA, 51 bp, Homo sapiens
ccggccggtcagggcaagagccagtacatcgggtgattcttctcggtcaaa

SEQ ID NO: 129719 - DNA, 100 bp, Homo sapiens
ccggaccaacaagcagaatcagaagaagaaacggaaagtggagccccccacaccacagctgcggcatgaagctgaacctggactatctgctggagatgct

SEQ ID NO: 129720 - DNA, 75 bp, Homo sapiens
ggggccccagcagcccccgaaggccctatcaggacatggagtatgaaagacggtacctgtgtgacaaggtcgtcc

SEQ ID NO: 129721 - DNA, 98 bp, Homo sapiens
agggccccccgtcgacgttgggatgcggatcgatgtcgccagcatagacatggtctccgaagtgaatatgagccagctctcccaggcgctgaacggac

SEQ ID NO: 129722 - DNA, 82 bp, Homo sapiens
cgtaggaatggagagggaccggatctcagcatgatgccttcttctgtagagtgggcgctttgcagaatacgtgttgaatgaa

SEQ ID NO: 129723 - DNA, 100 bp, Homo sapiens
caggttttaaatcaagatttaacattccaacacataaaaattatttatccaacagctcctcccaggagtgaactgctttcttttatcaaaaaattacgag

SEQ ID NO: 129724 - DNA, 89 bp, Homo sapiens
cccagggatgtggaggtgatggggggccggggaggaataactgaagtgaagtgatggactccgatttggagagtagtaagacgtgaaag

SEQ ID NO: 129725 - DNA, 74 bp, Homo sapiens
cgaatcttccttcaggatatcaaggtaaaaagcagcttcctgattcaaatgagattgtggaaaaattgcttcta

SEQ ID NO: 129726 - DNA, 100 bp, Homo sapiens
atcagatcacagaccatggtctcaggagacgagtttcctaagggcacgagtccagcaaattcaggttcccttaggtgacgcagctaggccaagtcacctt

SEQ ID NO: 129727 - DNA, 100 bp, Homo sapiens
tttccttccagtaggcaccgaacccagcattttcggcaaccgctgctggcagttttgccaggtgtttgttaccttgatggcctctccagaggagaagtgt

SEQ ID NO: 129728 - DNA, 100 bp, Homo sapiens
aggatggggccctggatgagggggaagggcctcaaagccagaaggaggaagtgggacgcagagagaaacgcacatggggagaacgccacgtgaaggctga

SEQ ID NO: 129729 - DNA, 87 bp, Homo sapiens
ctgcttcctcgtcctagtgatccacgcgcagttcctcaaagaaggagtgtggccatctggggccgtgtggtatttgccactcaggag

SEQ ID NO: 129730 - DNA, 100 bp, Homo sapiens
taaggcggggaaccgcagcgcagtgacagtgcagaaccccggcgcggcccttggagccgggtgtgggctgagccctgcctgattgatgctgccaaggagg

SEQ ID NO: 129731 - DNA, 100 bp, Homo sapiens
gatgcagccagtagcttggatccttgtgggcatgatccataatcggtttcaaggccatctgtcctggacagctttgccttgctttctggacagctgaaca

SEQ ID NO: 129732 - DNA, 75 bp, Homo sapiens
cgctcgatgccagccgtcatcggtttccagacagctgggaacaacagccgcttgcaggccgagctctgccagaag

SEQ ID NO: 129733 - DNA, 121 bp, Homo sapiens
ggtggtcaacgggcgggtgctggagctgttccgggccgcgcagctgccgaacgacgtggtcctacagtgcctacaccaactaatgttacaattgaatcctataacatgaaccctatcgtat

SEQ ID NO: 129734 - DNA, 83 bp, Homo sapiens
gacttgtcatgcaatcaaaatgaagttgaagcatcaggagaatgaagtttctagattagaagacataatgcagcatttaaaat

SEQ ID NO: 129735 - DNA, 50 bp, Homo sapiens
gctgtggaaagaagttgcaaaacactggatcactttttaattcgggcctc

SEQ ID NO: 129736 - DNA, 100 bp, Homo sapiens
tcacaaataatgaaaaagttgttgttaaaattctcaaggctgtgggtgagcgtggaggatgctcagatgcacaccgtcaccatctggctcacagtgcgcc

SEQ ID NO: 129737 - DNA, 75 bp, Homo sapiens
catggtgtcagagcaaggagaagctgttgacgcatcttctctccagactgccgatcccagaaagccaggtgatca

SEQ ID NO: 129738 - DNA, 51 bp, Homo sapiens
cacggctctacctggacccaggactgaggaataactgcacaaagacttgcc

SEQ ID NO: 129739 - DNA, 75 bp, Homo sapiens
ctttctggcctggaggctatccagcgcagacatctggtccctgggcataacagctattgaacttgcaagagggga

SEQ ID NO: 129740 - DNA, 83 bp, Homo sapiens
atcgggagcgcaaggtcgccctcaaggccatgatcaaaaccggcaagcctgcacgagctgtgtgctgccagagtgtcagaggt

SEQ ID NO: 129741 - DNA, 51 bp, Homo sapiens
ctgttccacatgatcattgtaataagtgttctttcagaggaccaagacagt

SEQ ID NO: 129742 - DNA, 74 bp, Homo sapiens
cagcggcctctagtgtctggaggaggaagtgtcagcgctactgccgcaggatctcgctttgtcacccaggctgg

SEQ ID NO: 129743 - DNA, 100 bp, Homo sapiens
gcacgctgtctgccagtacatggacctcatctcggccagtatgggcactaggaaaagacttcttccatcaagcttaattgttttgttattcatttaatga

SEQ ID NO: 129744 - DNA, 82 bp, Homo sapiens
ctcgcttgcagttcagcgaccacggtgtcccgacccaggctaagcttgagcatggctgagcaggagcccacagccgagcagc

SEQ ID NO: 129745 - DNA, 75 bp, Homo sapiens
cgaaagccagaggctcgagttacccctcttaccaccgtcatggcagtcccagaggaagaagcccctccagatggt

SEQ ID NO: 129746 - DNA, 82 bp, Homo sapiens
aaatgtttgacgacactgatggtttggcctgtcccctcagttcccaggtgccatgaggaagcctcgtcggaagtcccggcag

SEQ ID NO: 129747 - DNA, 100 bp, Homo sapiens
gtatgcctcaatttgctggatttaagcactgctgcactttatgaggctgttaccttctcctctcaaggatgcagtggaagtctcaacctggagaagatgc

SEQ ID NO: 129748 - DNA, 100 bp, Homo sapiens
ctgtggacccgtgagcaagcataagctgccaaaccaagtgacagacatcacacctccagtgcaatccctgttcctaagagacaaagctccatatttgggg

SEQ ID NO: 129749 - DNA, 75 bp, Homo sapiens
tctgcaaatctgggacaaaaaggaagttctactacatcaccctgctacgagaccccgtgtcccgctacctgagcg

SEQ ID NO: 129750 - DNA, 75 bp, Homo sapiens
gagagatggtcaggtctggagctcgaccgggccaggtaaaataccatgaagattttgaaaaaacaaaggggagag

SEQ ID NO: 129751 - DNA, 75 bp, Homo sapiens
tgcgctggaccgtcgccttgctcctcgccgcggcggggactgcagccgcttacaaacacgcagatggcaagaaga

SEQ ID NO: 129752 - DNA, 100 bp, Homo sapiens
ccaagaaagagattaacagaacaagaattacatgatgtatcagaaaaactctctcagcggctttctgaactagattggtttgatgatcttatggtggaga

SEQ ID NO: 129753 - DNA, 100 bp, Homo sapiens
tggagataaagttcttctcccagaatatggaggcaccaaagtagttctagatgacaaggtgagagagcgattacgagtagcacttgaaagatgtagtttg

SEQ ID NO: 129754 - DNA, 89 bp, Homo sapiens
gggttcagttcgtcatggggctgtttggaaagacccaggagaagccgcccaaagaactggccagtactgatgcaggcactgcaggagcc

SEQ ID NO: 129755 - DNA, 100 bp, Homo sapiens
gccggggggcggccaggggccgactgtgaagtttgcagacctgacagacgctgctgcccgcaacgcggagctgctccgccaggccaagcacgaagccaac

SEQ ID NO: 129756 - DNA, 88 bp, Homo sapiens
gtcctgcagaaacgggaccacgagggctttggttttgtgctccggggagccaaaggtgaccctggcagcaaccccaacaaacgccaga

SEQ ID NO: 129757 - DNA, 80 bp, Homo sapiens
cggatggcccccggtgcaagaggcgcaaacaagccaatcccaggaggaaaaacggatagcactataatatgcagaaatct

SEQ ID NO: 129758 - DNA, 100 bp, Homo sapiens
ggacgggaacagcagtaaaggtactgaagggacagtcattttgtttactcattcagccctgttgcaggtcccaataaactcttcataaggttgacagaag

SEQ ID NO: 129759 - DNA, 90 bp, Homo sapiens
ctatgcagtatttctttggcatcactgcagctagtaatttgccttctggattggccgttgttcgagagagaactgcaagtatcttcaccc

SEQ ID NO: 129760 - DNA, 80 bp, Homo sapiens
cgggcggcgaccggggcctgggtccacgccgagggcaggacgaacttcaccaggtgtccctggccagtgtccttccacct

SEQ ID NO: 129761 - DNA, 101 bp, Homo sapiens
ctgccaccgctgcccgagcccgattgctgctaaaattgattcaattcctcacttgaataattccacacctctagtggacccctcagtatatggatacggag

SEQ ID NO: 129762 - DNA, 100 bp, Homo sapiens
cggcaccaacctgcgccggttccgggccgtgtttggggagagcggcgggggaggcggcagcggagaggattcttgggatgagcttcttattggtgacgtg

SEQ ID NO: 129763 - DNA, 80 bp, Homo sapiens
ctgcccaacgtgaaccagatcgggagtggcaccatggacctgcccttccaggccggatcacctcaacagtcacgtcagac

SEQ ID NO: 129764 - DNA, 87 bp, Homo sapiens
aggtggtctgactaccagtggctctgcagagcttcctgcctgacacagctcacttcaagaagtgcacaatgtcagaacgtggaatta

SEQ ID NO: 129765 - DNA, 101 bp, Homo sapiens
aaaagaacccaccaggcatggatgaccaactttggggccgttgctccagggagaactgcaaatatcttcatccacccccacatttaaaaacgcagttggag

SEQ ID NO: 129766 - DNA, 51 bp, Homo sapiens
agaatgaacaaacattgagagcaggaacggaaaacagttcttccttcaaag

SEQ ID NO: 129767 - DNA, 74 bp, Homo sapiens
ttctctacctggaccgcacgctcctcgcgcaaggagggtagagctcaagaggcggggtttcaccatgttgccca

SEQ ID NO: 129768 - DNA, 85 bp, Homo sapiens
caaccgcctgcgcagctgggtccagccccctgcggctgacatgcggaggctgattccaaaagatgagcatattcttcggttcctc

SEQ ID NO: 129769 - DNA, 98 bp, Homo sapiens
cagagcagaggaatctatacaaagaagtgatgctggagaattacaggaatcttctctcattggttgatggagaaccttgtgacctgtctttgaatata

SEQ ID NO: 129770 - DNA, 50 bp, Homo sapiens
ttgtctcctttttcaacaaatgggtggccaggtggtaaacctgatgaacc

SEQ ID NO: 129771 - DNA, 82 bp, Homo sapiens
aacggaatttacactgacagaagcagtggtcgaatccagtagaaaactggtcaaggaagctcaaattgtggctactaatttg

SEQ ID NO: 129772 - DNA, 75 bp, Homo sapiens
ctgacatcgcgacgctgctcaaaacctcgctccggaaaggggacacctgctctctccttcctgcttcctccttgc

SEQ ID NO: 129773 - DNA, 100 bp, Homo sapiens
gctgttcccagaagcgaagtggagagcgccagagtaatggaaccacaatggacactgccagccatagccttgttcttctccagcagctgaacatgcagcg

SEQ ID NO: 129774 - DNA, 83 bp, Homo sapiens
aagaaatttggagtgtgcgtgcgcgccgagcggtgagcatgggtttatgcgtcttaggcattattgtgatggcgagcaccaat

SEQ ID NO: 129775 - DNA, 50 bp, Homo sapiens
gtactggcatgcgcacgtggacaagcttgtagaccctggagttaaggcat

SEQ ID NO: 129776 - DNA, 97 bp, Homo sapiens
gcccaggctcgcctcgactccaaatggttgaaaacagatatacagtctttagaagaagtgtgtgacctgctgcacgcggctcctttccagaacatct

SEQ ID NO: 129777 - DNA, 75 bp, Homo sapiens
acccgataccatcggacaggatttctccgcctcagcccaacggggaggctctgacgcccgctctgcggcttcggt

SEQ ID NO: 129778 - DNA, 82 bp, Homo sapiens
tggagggccatctgtacaatggcttcaacctcatagcagccgacctgaggtagttgaattcagtgaattggacaaacccaga

SEQ ID NO: 129779 - DNA, 107 bp, Homo sapiens
ccgtacccggctgtaccggcagatcctcaggggcaagtacagttactctggggaggattttttatcaagcagaaatgcatcgaacaacgagaatcaagatcactgag

SEQ ID NO: 129780 - DNA, 128 bp, Homo sapiens
gaggaggagtaggtgcgggtgaagatggcggcagccgaggccgcgaactgcatcatggagacaatgcagatcttcgtgaagactctgactggtaagaccatcaccctcgaggttgagcccagtgacac

SEQ ID NO: 129781 - DNA, 74 bp, Homo sapiens
aaatagcatggatttcatccattatgctggctgttatgtacgcaggaggaatgattggtaacagtgcttctcgg

SEQ ID NO: 129782 - DNA, 83 bp, Homo sapiens
ctcagagggctctagccttcctgtgcaacctgaggtggcactgaagaggctccaggaggccagagctctactgaagcggcggc

SEQ ID NO: 129783 - DNA, 50 bp, Homo sapiens
gcaacaccagcactgccaacagcatcagaggctccttgaaatgctagata

SEQ ID NO: 129784 - DNA, 100 bp, Homo sapiens
gtactgcccagaggagaaggagattgcccgtgaggcagaggctgccatctaccacttgcaattatttgaggaactccgccgcctggcgcccattaccagc

SEQ ID NO: 129785 - DNA, 100 bp, Homo sapiens
cgtgtgcccagaccttccctgccaaacaggaattatcccgaaaagttaacatgtcacctccacgaggccatcctctgtgaccgaaggcagctgctgcgga

SEQ ID NO: 129786 - DNA, 107 bp, Homo sapiens
ctcgtcttgtatctctaattggaagcacaaaccagtccagctacgggggcccagccagccagcagctgagtgggggttacggaggcggctacggtggccagagcagc

SEQ ID NO: 129787 - DNA, 50 bp, Homo sapiens
tggccgcgggctccatcagcatggctgagatgggggctccggaggtggcg

SEQ ID NO: 129788 - DNA, 75 bp, Homo sapiens
gatcaggaagaaattcgaaccgcatatgctactttgattgaaaatgattcaaatccagaagttagacgggcagtg

SEQ ID NO: 129789 - DNA, 98 bp, Homo sapiens
aacagcgaggaagaagaggacgacgacgacgaggaagaggaggtttctgagctgctctgttaaaagcgaaaatgaaacaattgcctgcggcaacagtt

SEQ ID NO: 129790 - DNA, 100 bp, Homo sapiens
ttttactccattcaagagcagcattcataaatttccaggaattgaatgatctggcacgggaccctccagcacagtgttcagcaggtcctgttggagatga

SEQ ID NO: 129791 - DNA, 100 bp, Homo sapiens
ggatgtgtggtgctgtcacagacagaacctgagccaaagcacattcccacagagaaagtcaaggctgtggataccacgaaacattctggtgagaatggtg

SEQ ID NO: 129792 - DNA, 111 bp, Homo sapiens
cgcgtgtctaggtgagtcgcggtgggtcctcgcttgcagttcagcgaccacgttacagaatgtctgaaggggacagtgtgggagaatccgtccatgggaaaccttcggtgg

SEQ ID NO: 129793 - DNA, 98 bp, Homo sapiens
agttacaggatcctgggaagcagagtgtctggatggaacctgagctgggtctctgactcacttctgactttaggtcccccacggcccttcaggatgaa

SEQ ID NO: 129794 - DNA, 100 bp, Homo sapiens
ctgcagtggcgcctaaagtctgagagagggaagtcgcctctgtgctcgtgagtgcatggggtataagcctgccacagtgactcaggtcactcaaggaact

SEQ ID NO: 129795 - DNA, 88 bp, Homo sapiens
aatatgtgccgccagtgtttccgtcagtacgcgaaggatatcggtttcattaagaattctgcttggtcagaatcgtgatggcattgtg

SEQ ID NO: 129796 - DNA, 75 bp, Homo sapiens
aaggattccaagtaactcttatttgaggccccacagtatcaaatatccgcctggctggattagagtatgttctgc

SEQ ID NO: 129797 - DNA, 98 bp, Homo sapiens
tgtcgcagccgcgccgccgcgcagcgccccagccacacgccggcgggcagaagccgcccgctctccggggtgcgtcagggaaatcatgcagccatcag

SEQ ID NO: 129798 - DNA, 50 bp, Homo sapiens
ctactactacgtggtgcttggaaagctgttctaaagaaatccaaatggca

SEQ ID NO: 129799 - DNA, 101 bp, Homo sapiens
agaaacaaggacatgaccaaaaggctgctgccaaagctgccttaatatatacctgcactgtctgtagggctgagggtaaaaagctgggattggtaggctgg

SEQ ID NO: 129800 - DNA, 100 bp, Homo sapiens
gctccctgcccttcgacgggcacaacctcaagaggcatttcatccttcatgaagccattcaggattttgaattgcatatgagtgcttggctcttccttct

SEQ ID NO: 129801 - DNA, 83 bp, Homo sapiens
ctctgatagttgttccttgtgcagaagattaagcctgatcaagatgacaacctcccaaaagcaccgagacttcgtggcagagc

SEQ ID NO: 129802 - DNA, 82 bp, Homo sapiens
aaaatggacatacggatgttgcagatgttttacttcaagcaggggctgatttaatcctgataacttaagtgactctctcttt

SEQ ID NO: 129803 - DNA, 96 bp, Homo sapiens
atacttttgagtcggtggactgaacatgactgatgtatatagattgccacggcagtgaagtttctacagaattcccgggtccgccagagcccactt

SEQ ID NO: 129804 - DNA, 101 bp, Homo sapiens
gcctggaatatgaaggcttccccgtcccggtcttttatcagaaatcaccgatccagagagcttcctgaaggacctgttgaactcagtcccctgaccaccac

SEQ ID NO: 129805 - DNA, 100 bp, Homo sapiens
tggaccaggtggacggctttgagtgcatctgccccgagcagtgggtgggggccacctgccagctgggtcgcccacgtccagccccacgccgcagcgccga

SEQ ID NO: 129806 - DNA, 100 bp, Homo sapiens
agggcctagtcatggctgaggtggccgcggggggctggcattctgtgtgtgtgagtgacccctgacctggagcagctggagccgtctttggaagatgtgg

SEQ ID NO: 129807 - DNA, 76 bp, Homo sapiens
tttactggaacagaaagctttataacaaggaacccagtgagattgttggaagctctggaggaatatgtgaaaaaag

SEQ ID NO: 129808 - DNA, 100 bp, Homo sapiens
ctcgtggtggtcggcgggggcggcgtgggcaagtcggcgctcaccatccagttcatccaggtttctgggtggagcggacccctgtgcacgaggcagccca

SEQ ID NO: 129809 - DNA, 83 bp, Homo sapiens
ccaccagtgagatccactgctccagactctcagcgttctcatctctcttccttcaccatgaagctgatggacaaattccactc

SEQ ID NO: 129810 - DNA, 100 bp, Homo sapiens
ccgggagtaggagactcagaatcgaatctcttctccctccccttcttggttcctgggtggagctacccatgaacagcagcaatggcaatgataatggcaa

SEQ ID NO: 129811 - DNA, 98 bp, Homo sapiens
cgattttctgcagaagatgaagctttgagtaacattgccagagagcaatttccagtttatgtactaccaaaagtagagtatcaagcttgttatggagt

SEQ ID NO: 129812 - DNA, 75 bp, Homo sapiens
gcggcccggaggcggcggagggcaccccgggcgggcggcggctgctgattgtcagtggcttcgccccgaggagag

SEQ ID NO: 129813 - DNA, 100 bp, Homo sapiens
gcctggcccccgggactccctgtgccttgcttggagctgacgccgacggggacaaactctgcctgggcgagtccttttcctgcgttatgtcgttcagacc

SEQ ID NO: 129814 - DNA, 98 bp, Homo sapiens
gggactcaagtctgcagtggacgtcgtcttccaggctcaaaaggagccacaccccctgcagtttctcagtgccggtggtggtgtgcacattgagcccc

SEQ ID NO: 129815 - DNA, 90 bp, Homo sapiens
ccattggtgatcccgaggatttttgtcaagattggataaaccatgtatcacattgattgtagagatcaggaactgaggacatatctaaat

SEQ ID NO: 129816 - DNA, 100 bp, Homo sapiens
gcagtggtcgcttcttctccttgatatttggttcccgggtaagagttgactctacagcaaaggttgcagaaatagaacatgcggaaaaggaaaaaatgaa

SEQ ID NO: 129817 - DNA, 98 bp, Homo sapiens
attttggtgatgctttcaaacagtgtcaatacaaagatactctccccaagcctcgtcacgtgttcaatatgctaaagaagtatgtccgcgcagaacag

SEQ ID NO: 129818 - DNA, 74 bp, Homo sapiens
cactagcggactcttcttcgccttcgagaaaatagttctgcttgcaggatgggcattgttcttattccttgcat

SEQ ID NO: 129819 - DNA, 100 bp, Homo sapiens
aatttatcattgaataagtgttttaagaaagtggacaaagagaggagtcaggttctaagctggtctatgtccatcaccttcttggagaaggagcctttgc

SEQ ID NO: 129820 - DNA, 75 bp, Homo sapiens
cacagaacaagggagggaagaaaagctcagccttaaacatagcaagcatggaggatgaaaaggaagatagtaaag

SEQ ID NO: 129821 - DNA, 90 bp, Homo sapiens
cgaccgtctggggaagaaggtccgcgttaaatgttcctccccgggcagaagaaatcaccattccagctgatgtcaccccagagagagttc

SEQ ID NO: 129822 - DNA, 139 bp, Homo sapiens
ggaatcacaaaatttagctgactttccccgacctgttcatcacaggatacccaactttaagctgcggttggatttctcacgatgtccagtgttatctccatgtctgcccctttcttcctggggaagatcattgatgtca

SEQ ID NO: 129823 - DNA, 51 bp, Homo sapiens
aaggattccaagtaactcttatttggccggtcatgcccaacatggtcttca

SEQ ID NO: 129824 - DNA, 75 bp, Homo sapiens
actgatcaagtggctgacctccgtgccagcgaagaaagctaccgtgaatttactgggtgaagaaaagaagagcac

SEQ ID NO: 129825 - DNA, 100 bp, Homo sapiens
cgaaagggaagaggagagctcagaattgccaagatttatgacaggagcctcctcaacaagcccaagagtgagatgaccccagaggagctgcagaagcgag

SEQ ID NO: 129826 - DNA, 82 bp, Homo sapiens
cctctggaagcttgtgcagggcacctgccactgtgaccacctggacgcagcatgcttttcacttccactgcatctctcgctg

SEQ ID NO: 129827 - DNA, 83 bp, Homo sapiens
cggatggacacggacgtggtcaagctgaggtaggaaaagtaattggaattgctattatgaaacactttggatggaaagcagac

SEQ ID NO: 129828 - DNA, 96 bp, Homo sapiens
aacggaagtgaggatcacctacagctcctttagcggcagagttttccgagtgaccttcttgatgctggctgtttctctcaccgttcccctgcttgg

SEQ ID NO: 129829 - DNA, 74 bp, Homo sapiens
ggaagtgctcctgctgggcctcaaggaccgcgagaagctgatgcgcctcccaggaggccccaccttgaccttcc

SEQ ID NO: 129830 - DNA, 90 bp, Homo sapiens
gcaggaggaggtggcggcggcgggaagatctggagaagaagcaggcgctccctccattccagccacagatcacagacgactacggtctgg

SEQ ID NO: 129831 - DNA, 83 bp, Homo sapiens
tgccaccctacgccgtagccgtccagagactggcaggcctcggcctaaagaaaagggagacccttatgtttgaaaaagattgt

SEQ ID NO: 129832 - DNA, 100 bp, Homo sapiens
aaagtgagaggcatcagtgaggtgctggctcggaggcacatgaaagtggctttttttggccgaaaccacaataaaggctctcgcccacattcttccctca

SEQ ID NO: 129833 - DNA, 100 bp, Homo sapiens
gtggatgcttcaggctgcttcacaacggaggtgacagatttcgcaggacagtatgtgaaggagtctatgggtaaaacatcagggaagctgtttgatagca

SEQ ID NO: 129834 - DNA, 96 bp, Homo sapiens
cagctttgtagttttgcgtgtgttgaaagtacaattctattgcacatcaatgatatcatcccagctgaagtgagtagtgaatatagtatggacaag

SEQ ID NO: 129835 - DNA, 100 bp, Homo sapiens
gagggggcagtcccgggagaacctgcggcggccggagcgatcagctgtttcatgtattagccttgcacatgcggctttatagcattgactctgagtataa

SEQ ID NO: 129836 - DNA, 100 bp, Homo sapiens
gagattgcctgacccaggcctgctcggccctcacagggtgaaaggtgtagcagtcactcggcctacacccacagcatcgaccttgtgaacccagcgacct

SEQ ID NO: 129837 - DNA, 88 bp, Homo sapiens
aaggattccaagtaactcttatttgggtaaagttctttacaaagttcgctggaaaggctatacatcggatgatgatacctgggagccc

SEQ ID NO: 129838 - DNA, 51 bp, Homo sapiens
ggcgaatggggctcacgtcgagtccttggagaccagcctggtgccactctc

SEQ ID NO: 129839 - DNA, 82 bp, Homo sapiens
catgcattggtatagcccaccagaaaggacagttctgcatcctccaggctctggttcccatgcagcagctgtcagcgttcag

SEQ ID NO: 129840 - DNA, 110 bp, Homo sapiens
tggaactaccaagcatgtggctcctggtcagtgtaattctaatctcacggatatcctctgttgggggagaagctattgacctgaaaagtggttctggaaaagtgtaccaa

SEQ ID NO: 129841 - DNA, 90 bp, Homo sapiens
ctcctccgtgcggagaagaagctgcggccgcacctggccaagaattcctagaggacctgtgcaacaacctcttgaggatcgaatcttcac

SEQ ID NO: 129842 - DNA, 89 bp, Homo sapiens
ccaggaaaatcccttttttagaaaactcagcagtgagacctacagtcaagcaaaggacctggggaaaaagacctcgatgaagttctgca

SEQ ID NO: 129843 - DNA, 83 bp, Homo sapiens
acgatgacattttcaggaaaatcctgaagctgtacattggaatgcgtttacagtcattgtaatggaagcaaaatacatgaagg

SEQ ID NO: 129844 - DNA, 75 bp, Homo sapiens
aaggagtcacggatcggattcctcagctacgaggaggcgctgaggagagtgggaatgtaagacggacttagatat

SEQ ID NO: 129845 - DNA, 98 bp, Homo sapiens
atcttctccttcctcatttccctcatcttcatctatgagactttctccaagctgatcaaggtcaaaatgcagatcttcgtgaaaacccttaccggcaa

SEQ ID NO: 129846 - DNA, 98 bp, Homo sapiens
actccccgagtccccgaccctccccaagcaaggagtaagtccatgagtgatgtcagcgcagaagatgttcaaaacttgcgtcagctgcgttacgagga

SEQ ID NO: 129847 - DNA, 100 bp, Homo sapiens
gaggcctcccggctcgacaagttcaagcagctgcttgccggccccaacacggaccttgagacggtaaagaacaggtccaagaaaagctcaaagaaagcaa

SEQ ID NO: 129848 - DNA, 89 bp, Homo sapiens
gccggagcggcgagcatggcccgcgcggcgccgggcgctgactgaggggacaggggaggcctcctcaggatccacagatgcccagtctc

SEQ ID NO: 129849 - DNA, 101 bp, Homo sapiens
cagaagccgagttcaacatcctcctggccaccgactcctacaagctcaccatggatgatgatatcgccgcgctcgtcgtcgacaacggctccggcatgtgc

SEQ ID NO: 129850 - DNA, 82 bp, Homo sapiens
gtcgcttatgccttctactacctgagcagcattgccaaggtgattggcgaggacaacgtggcagtcccctcacacctttata

SEQ ID NO: 129851 - DNA, 75 bp, Homo sapiens
cgcggcggcaccgggaggccgggccgagcgacctaatctgggagcctgcaagtgacaacagcctttgcggtcctt

SEQ ID NO: 129852 - DNA, 100 bp, Homo sapiens
cggccttcgaggaggtcatgaaggacctgagcctgacgcgggccgcgcggcataagcttaaatcgtctcagaaggacaaggtccgccagtttatggcgtg

SEQ ID NO: 129853 - DNA, 90 bp, Homo sapiens
tgggcaagagaagaattcagaagaaacaaaagtgccaccgaagagttttagttactatccagcagaaaacttgatagagtacaaatggcc

SEQ ID NO: 129854 - DNA, 74 bp, Homo sapiens
tgggtcgcagttcttgtttgtggatcgctgtgatcgtcacttgaactgtcaagtaatccacctctggctaccat

SEQ ID NO: 129855 - DNA, 75 bp, Homo sapiens
cacactggtgacaactcaagagcaatcagtaccatctggcaccataaggatgaagtggctggtgacatattcgac

SEQ ID NO: 129856 - DNA, 98 bp, Homo sapiens
agcccttcatttgacagtgtactgccccgttacttatttttacaagagttaaagttcctcgtaattttcgcttgttggaagaacttgaagaaggacaa

SEQ ID NO: 129857 - DNA, 103 bp, Homo sapiens
ctggtggcggcggcgctttcggcgcgggcccgggccccgagcgcccgaacaggaaggtgctcgggtcttcggggcactgggtcccatcggtccctcctcacct

SEQ ID NO: 129858 - DNA, 101 bp, Homo sapiens
catggcagcagcgcgggccagagcgcagcgccgagcgcggcccgggcgccatcgagccttggcggcggacgtgcagtgcggcatcgtcctgggggcgctgc

SEQ ID NO: 129859 - DNA, 74 bp, Homo sapiens
tccaattcgggttgtcaatgcattgcagggtggtgacttcacacgccataatggcactggtggcaagtccatct

SEQ ID NO: 129860 - DNA, 101 bp, Homo sapiens
ggaggtttgacctacagaacccatctcgaatggatcgtaatgtggaaatgtttatgaacattgaaaaaacattggtgcagctatcagttgagggatttgca

SEQ ID NO: 129861 - DNA, 75 bp, Homo sapiens
gctgggcgagccgtgcgatctggacgcggcgctgctgaccgacatcgaaggacagacccacgaagtcaagcatgc

SEQ ID NO: 129862 - DNA, 50 bp, Homo sapiens
tcgtgcagtattttctgaatcacaatgcaagttctagccggtttttccta

SEQ ID NO: 129863 - DNA, 100 bp, Homo sapiens
cagcatcccccctccactcacccggcagatatccgtgaaggctctaggaacatctgctcagcaattggatgcaacatttagtacgaatgcttcccttgag

SEQ ID NO: 129864 - DNA, 75 bp, Homo sapiens
ccggggtccccaggtccctcaagcccctacatcccttcaccaggagcctgcccaggaggagctggtggcagagga

SEQ ID NO: 129865 - DNA, 82 bp, Homo sapiens
attaaatcagccattcgggataacaatccagttaacaagcacaagccctggctggagcccacctaccacggcatagtcacag

SEQ ID NO: 129866 - DNA, 73 bp, Homo sapiens
gcacgtggtgggctatggccaccttgcctgtttgggggccaggctgaggggccgccggtcaccaacatcatgt

SEQ ID NO: 129867 - DNA, 100 bp, Homo sapiens
cgcagtcggcaaggagagacgtcgctgaggggcttgcctgaagcgaggggtactactgagcgagtgtgcttgatccagggaacggttgaagcactgaatg

SEQ ID NO: 129868 - DNA, 87 bp, Homo sapiens
attaactgcctttcttctgtgggctgtgattttcagaggggaatgctaagagttccctgtattgaacactgatatacaaggaatgaa

SEQ ID NO: 129869 - DNA, 98 bp, Homo sapiens
aagaagatgatagcagtggagaagaggtcattaaggagtccaagcaggagcacaaggatgtgatgtgaggcaggacccacctggtggcctctgccccg

SEQ ID NO: 129870 - DNA, 51 bp, Homo sapiens
ccctgggctggggcaggagccggattttggccccaaacagtaattatcaag

SEQ ID NO: 129871 - DNA, 100 bp, Homo sapiens
atgttgcttcagagtgtgaagtcaaatgcatgccaacattccagttttttaagaagggacaaaagggctcctcgcacctaccccagcaactcaaattcac

SEQ ID NO: 129872 - DNA, 51 bp, Homo sapiens
accaaggacagcttttttcctgcaaggaagcagtcaattatagatttcttc

SEQ ID NO: 129873 - DNA, 51 bp, Homo sapiens
ggtcgcacccggtggcgggatcaaatggaacctggatatcatgatatcatc

SEQ ID NO: 129874 - DNA, 60 bp, Homo sapiens
aacatggccaaggggtccttctactcctaaagttatcattaccatgttggtgacctgttc

SEQ ID NO: 129875 - DNA, 105 bp, Homo sapiens
ggaacgtgaccgtcactgacgtggacatcgtcttcagcaagatcaagcccagggccccggccagtgcccagccccgctgggagacccggccagcaccacggacgg

SEQ ID NO: 129876 - DNA, 76 bp, Homo sapiens
aattgaaacatcaagatggcattagaaacttaagaaatttacaacgggaatgattttaccaacgaaagctatggca

SEQ ID NO: 129877 - DNA, 101 bp, Homo sapiens
catcaagggttattaccgccgggctgccagcaacatggcactgggcaagttccgggccgcgctgcgagactacgagacgacggagtctcactctgtcacca

SEQ ID NO: 129878 - DNA, 73 bp, Homo sapiens
gcgagcaaggccgccagatgtgcagttgacatgaagacaatggagactgcagagaaactggctagatttgttg

SEQ ID NO: 129879 - DNA, 101 bp, Homo sapiens
ttggaataagctataagggaattggccaatatgatatacaagacaaggtgaagcctcggaaggctgactcttgcttgtggtggggtggccctgaattcttt

SEQ ID NO: 129880 - DNA, 73 bp, Homo sapiens
gaatcccctcagcccctgttatccccacacaccaggccttggtcctagcacccactcgagaattggctcagca

SEQ ID NO: 129881 - DNA, 100 bp, Homo sapiens
ttcagtcaggtggcaaaaacattgaacttgctgtcatgaggcgagatcaatccctcaagattatgccgacaagcccctggagaagcctctaaagctagtc

SEQ ID NO: 129882 - DNA, 100 bp, Homo sapiens
ctacagactccaaaaggcccttttcagggcccccaaactgtcacagaaagagctgttaacacttcctagataacgggtattctttaggtgatgctagaag

SEQ ID NO: 129883 - DNA, 98 bp, Homo sapiens
tatttgaagcacatttgggaagccacattttgcagtccctctgtcgtgaaatcaagcaacgacgtcgaggagttgcctccattctgcgactatgccag

SEQ ID NO: 129884 - DNA, 50 bp, Homo sapiens
ggccgcctcgatgcaggaggacgaacagcaacgcacctcttgctttttcc

SEQ ID NO: 129885 - DNA, 100 bp, Homo sapiens
ctttgaggatctggaggacggagaggacctgttcaccagcactgtctccaccctagaggcattctttagtggcaggctgaaggccagagggaacatcatg

SEQ ID NO: 129886 - DNA, 97 bp, Homo sapiens
gtccaagtcaaacgcagaaggactgcctcactgagcaaccaagagctctgcagatggcatggggaggaggttgcactcagcccatgatcctggtctc

SEQ ID NO: 129887 - DNA, 89 bp, Homo sapiens
agcaatcaccttctaactccctgaagctatgaattcatcttttgaaactgctattgccacaagtgatctttagacagtgactgagtatg

SEQ ID NO: 129888 - DNA, 75 bp, Homo sapiens
ctacctgccctaggcgttcgtgaagagaagcagctgttgctattggaggaggtcacgagaagagaatgccttcta

SEQ ID NO: 129889 - DNA, 97 bp, Homo sapiens
tgcggtgctctgccatattgtgtcttccccggccggtccctcgcctcccggccgagctgacgagagaagtggagatcctgatgtttctcagtgccat

SEQ ID NO: 129890 - DNA, 101 bp, Homo sapiens
acattgtgctggcattatacagcggcctctttgcctatggaggatgggccaagaccagcttcaagtctccatggtaccagaaaacaacaacctcacagcac

SEQ ID NO: 129891 - DNA, 90 bp, Homo sapiens
cgcggtagcagtgctggcggcggcgggtcaggagcagccgcagcgacggcggcgacagcagatgtccagctcgccgctgtccaagaaacg

SEQ ID NO: 129892 - DNA, 80 bp, Homo sapiens
aacggatgaaaatgaagacgacattcagtttgtcagtcattcgttcagtcagagagcataatagaagtactgcgttttga

SEQ ID NO: 129893 - DNA, 98 bp, Homo sapiens
gctgtttgtatgcacgacttgaagacacgcacttatcattcagtggagatgggcagtagcgaaccccttcccatcgcagatggtgacaggaggaggaa

SEQ ID NO: 129894 - DNA, 100 bp, Homo sapiens
ccagtagcttggatccttgtgggcatgatccataatcggtttcaaggatgatgacagcaactttcatatggatttcatcgtggctgcatccaacctccgg

SEQ ID NO: 129895 - DNA, 100 bp, Homo sapiens
gataatggattcatacccgattcacttctggaagatgtgatgaaagcattggaccttgtttcagatcctgaatattccaagatgagatgggattctccaa

SEQ ID NO: 129896 - DNA, 96 bp, Homo sapiens
gaacactaccgttcaagaggatgctcacttcaaagctttcttccagatactccatcctcccccactcagatccggagcgttgcttctctatccagc

SEQ ID NO: 129897 - DNA, 122 bp, Homo sapiens
gaggcagacagtggggaggaagaatgccggtcacagcccaggagttctttctaccacactcccgaggaagctcccatggacaaagccggataatccgaaaggcgtacctggaagacttttac

SEQ ID NO: 129898 - DNA, 75 bp, Homo sapiens
gcctggaccagcctcttctgaaacactgggctattgacctgaaaagtggttctggaaaagtgtaccaaggccctg

SEQ ID NO: 129899 - DNA, 82 bp, Homo sapiens
gggacatctccagcaccctcatcgccctggccgacaagcacgcaattacgccccatggtgtccatcctgccagcagactgat

SEQ ID NO: 129900 - DNA, 88 bp, Homo sapiens
ttcccagctttggttggaagacctattatcagatcaaccaccaaagtgggaaacattgaaatcaagacagctacagacagttcttcta

SEQ ID NO: 129901 - DNA, 101 bp, Homo sapiens
acagaggagaatctgaaaaaaagagaaacctgggtgaactttcacggacaacctcagaggacaacgaagtgttcgggtgaaaatcctatttataagagtgc

SEQ ID NO: 129902 - DNA, 76 bp, Homo sapiens
gagcaacagtccaagctcaaactccgccgcatgcaagagatgattgcaaggatgcaggcgcagatgcagatgcaga

SEQ ID NO: 129903 - DNA, 98 bp, Homo sapiens
aaagtttgcaaaaattactagctgataaaaaacttgtggattcccttgatccagaaacaagaaggacagaataacgggctcccagattcacaagcccc

SEQ ID NO: 129904 - DNA, 124 bp, Homo sapiens
tgacaaaccaggaaaaatgggcccacctcagcccttcggaattttcccaacttcagaaatatgctgagtgaggaagataccaactagagataaaaataccagaaacatacccatttaatccccc

SEQ ID NO: 129905 - DNA, 95 bp, Homo sapiens
tcatcctggatgcaattgctgtggttaacattccaaagaactactggttcagattttagctcttcccaagttgtgaaaatagtgaaggatgctta

SEQ ID NO: 129906 - DNA, 74 bp, Homo sapiens
agggaaatctccgaccaggcccgcccaggagtgcatttgcccagtataacatggatcagttcacgcctgtgaag

SEQ ID NO: 129907 - DNA, 99 bp, Homo sapiens
tctcctccaatcgagcgtatgattttctgtacgatttccttgatagctgccgtgccagtactctattggctgagctcgatgatgatgaggacttacctg

SEQ ID NO: 129908 - DNA, 75 bp, Homo sapiens
gtctgcggaagtgcagctgcctcagttcttagcgcaggaggctgctggaatcttccctcatttcattatcccgtt

SEQ ID NO: 129909 - DNA, 100 bp, Homo sapiens
acctgcctccacgtctggaataatgggtactctttcctcgtggaatttgaagattctacagataaatcaggatgctccagaccttgtatgattacttctg

SEQ ID NO: 129910 - DNA, 100 bp, Homo sapiens
tcaactgataagttgccttatgtcaccatgggtgcccaccagctgacctctcctccttctcagtcagagtctctgctggccatgtttgatccactgtctt

SEQ ID NO: 129911 - DNA, 75 bp, Homo sapiens
actcctttgaaggcgtggacgaggacgagtgggcctcgctgaccccggtgaagtcgggcgagcacaaggacgagg

SEQ ID NO: 129912 - DNA, 75 bp, Homo sapiens
gggaaggtgtgtccggaggtttgcaggggtgcagtgtgtctggtcttatgagctgatcctacagttaaagactta

SEQ ID NO: 129913 - DNA, 90 bp, Homo sapiens
aagaggaccccgctgctaactcggctacaacatttggcagagatgttgatcttgtctcagaatattgcccaactggaggcccaggtggaa

SEQ ID NO: 129914 - DNA, 90 bp, Homo sapiens
tgctggaccagctcatgggcacggctcgggacggcttctccagggaaagtgaccgaggcagtgaaagaggccattgacgcagggtaccgg

SEQ ID NO: 129915 - DNA, 97 bp, Homo sapiens
aacagcttgattttagtgtcagtatttgtcagactttgatgcaagaccagcagaataattgtgtgcccaagaagatgctgcagctggttggtgtcac

SEQ ID NO: 129916 - DNA, 82 bp, Homo sapiens
tcaatgctacatatgtacagcctagaagaaaacagagagatgagcagcttctgagacatggatttgattgacatactttgga

SEQ ID NO: 129917 - DNA, 88 bp, Homo sapiens
cagttgctgcaggcggcccactggcagttcgaggtgagaagccctaccactgcaactgggacggctgcggctggaagtttgcgcgctc

SEQ ID NO: 129918 - DNA, 75 bp, Homo sapiens
ctggtctccattatttgagatgagttacatcttggagcttataggctttatactgtggtgcctcgcctggtcaag

SEQ ID NO: 129919 - DNA, 74 bp, Homo sapiens
tcgccaagggccccaatgagtggcacacagtctactatcaccgacaggaaatgatcgaaatggcctagatttca

SEQ ID NO: 129920 - DNA, 75 bp, Homo sapiens
cctatcaggacatggagtatgaaagacgtggccacaagtaatcatcctgagactgactacaagaacaaagactgg

SEQ ID NO: 129921 - DNA, 96 bp, Homo sapiens
accacgcttgatccccggccgcggggccaggaagtcggagtttgagccccggaggcagagcggctgccatgagagcagggctttggcggagtcaca

SEQ ID NO: 129922 - DNA, 90 bp, Homo sapiens
gcaggggccaccccgtgggcggcgggggcacagacactaaccgactgtttctggaaaaggtaaacatctattctccaaagggcagtgact

SEQ ID NO: 129923 - DNA, 101 bp, Homo sapiens
tgagaacttgatcagtttgtgtcagccaccttgttctctaaagaatcccagtgttccaatgcagaagttgcaggatatccagagagcaatggagctgctat

SEQ ID NO: 129924 - DNA, 100 bp, Homo sapiens
ctggagtcgaaggccgtgaggtatttttctaaggcatgtggagaccccaaggcaaaaccatcctatcttatcgacaaaaacctggaatctgctgtgaaat

SEQ ID NO: 129925 - DNA, 75 bp, Homo sapiens
tcccgtgtccgggctacctgtttgaagagattgctaatgtatgtccctgggaagctgcatgatgtggaacacgtg

SEQ ID NO: 129926 - DNA, 100 bp, Homo sapiens
ccgggtgctgctggttagtgtgctctgagggagggtccgagccagccgctgttttgccggaggagcccctcaggccgtgttggtaaatcatgcttattgc

SEQ ID NO: 129927 - DNA, 100 bp, Homo sapiens
gggggccatttcatagatgaaaatggctctcgccttccagcaattccccgactccagttccaacaccatcttctgagatgatcctgattcccagaatgct

SEQ ID NO: 129928 - DNA, 90 bp, Homo sapiens
ggcgcttccgcgggggcctgcggtgcatcaagtacctgctgcttggcttcaacctgctcttctggcatacggcggcatcaagaaaggaga

SEQ ID NO: 129929 - DNA, 98 bp, Homo sapiens
gttcttgcaaacaagcagatatttgtgtgactggtgtcgttcagtatttctacattgaagactggcaattcgttaatgattatcgacatcctgtcagt

SEQ ID NO: 129930 - DNA, 100 bp, Homo sapiens
gtcggcggcgccctgcaccgcgcctcgcaaaggattatcttgaacacataacctccattggccccaggactacaggaagtccagaaaatgaaattctgac

SEQ ID NO: 129931 - DNA, 74 bp, Homo sapiens
ccgcctcccagcactcccatcaagctggaggaaggtggaggctccaacccattccagcaccttgagaagagtgc

SEQ ID NO: 129932 - DNA, 75 bp, Homo sapiens
gacccctatccctggacccactgaggacagcagccctgtgcagccccaggctccaacagacagaagcagagctca

SEQ ID NO: 129933 - DNA, 82 bp, Homo sapiens
cttcctgcttcatctctaaaggtccttctaggagagaggtgaaaggtcatgcagaaggcttttgtatgatgtgtacaatgca

SEQ ID NO: 129934 - DNA, 74 bp, Homo sapiens
actactatattcagtggctaaatggctccctgattcatggttctggaggacacgtgccggcggcaggacttcaa

SEQ ID NO: 129935 - DNA, 100 bp, Homo sapiens
ggctcagagatccaagtgcgcgccctggcgggtccggaccaaggtctcctctgagcctccggcctccataagacccaaaacagatgacacctcttcccag

SEQ ID NO: 129936 - DNA, 107 bp, Homo sapiens
cagtactcgggcaagaccaccttcgtcaacgtgatcgcggggaagcagaagtatacacttccgctgtaccacgcaatgatgggtggcagtgaggtggcccagaccct

SEQ ID NO: 129937 - DNA, 100 bp, Homo sapiens
cagcattcattcataggatcaactaacaaccatgtggtgaggaattcaagagctgaaggacaaacactggttcagctaatggttgcagagaagaatggaa

SEQ ID NO: 129938 - DNA, 101 bp, Homo sapiens
agaaaatgggatgcaggattcaaggaagaaattagaccagatgagaagtcaattcattcggctcctaaagaagtagcagtgtccaaggaacaagaagagaa

SEQ ID NO: 129939 - DNA, 50 bp, Homo sapiens
agaggagaaggagcagtccgtgctcaatgctatcagactccccctggacc

SEQ ID NO: 129940 - DNA, 100 bp, Homo sapiens
cgggccctgccagggagcaagtctgcatcgcagaggccagggtcgcaatggaagaagagatcgccgcgctggtcattgacaatggctccggcatgtgcaa

SEQ ID NO: 129941 - DNA, 97 bp, Homo sapiens
ttgatacttctacagaaatcaaaggccgagtgtactacttcaaccacatcactaacgccagccagtgggagcggcccagcggcaacagcagcagtgg

SEQ ID NO: 129942 - DNA, 98 bp, Homo sapiens
ttccatgatgggaagtgacatgatacagtttatgtaacttgatggaagaaaatggaattactccaaaaagacaagtgctcaagcagcaaaatccttac

SEQ ID NO: 129943 - DNA, 74 bp, Homo sapiens
gtccgagccagccgctgttttgccggaggagcccctcaggccgttaatccctatatcctgaagaagaacatgat

SEQ ID NO: 129944 - DNA, 101 bp, Homo sapiens
gactgagtgaagaagaacagctcgagagagcattacaagccagcctctgggaccgagtaatccatgacaaattgcctctccaagaaagtgaagaagaagag

SEQ ID NO: 129945 - DNA, 75 bp, Homo sapiens
tatcaagaggttctactctttggatagagaccaaaatcatactttgaactgttttcactcattagctcctgaggt

SEQ ID NO: 129946 - DNA, 100 bp, Homo sapiens
ggacctggttctgccttctggacaatctttccgaaaaccatgagctgttttccaagagcttcatctccatggaagtgcctgtcatggtagtaaatggcaa

SEQ ID NO: 129947 - DNA, 100 bp, Homo sapiens
tgcagacaagaaacattcgtttatgagatggtatacatggactggtacgagaagttccaggacaggctcaacaagaaggtggtactcctgacaggcgaga

SEQ ID NO: 129948 - DNA, 98 bp, Homo sapiens
acatgcctccgccggggggctatgggcccatcgactacaaacggaacttgccgcgtcgaggactgtcgggttctcaggaatcagatagctcgcagtcg

SEQ ID NO: 129949 - DNA, 96 bp, Homo sapiens
ataattcatgacagaagggagtttgctaaatttgaaaaggagaaaatgaatgccaaatgggacacgccgggggccattgagactgccatggaagac

SEQ ID NO: 129950 - DNA, 100 bp, Homo sapiens
ccagggcccaagggagaccctggattccagggcatgcctgctttaaactccagagaacctcatatgtgtttagtaagagatatttcaaactgctgggccc

SEQ ID NO: 129951 - DNA, 74 bp, Homo sapiens
tcagggttgcttctcccatgaacaaatctccctcagcaatgcaacagcaaggccctcgggaccaaggatcacgt

SEQ ID NO: 129952 - DNA, 100 bp, Homo sapiens
tttgagaacctctgcaagctcatgaaagaaatcttagataagaaggttgagaaggaacagcgccttttgatagtcctaagtaattgctgctatctagaac

SEQ ID NO: 129953 - DNA, 125 bp, Homo sapiens
accaaatttacgccatgaaagtggtgaagaaagagctggtgcatgatgacgagttacagaatgtctgaaggggacagtgtgggagaatccgtccatgggaaaccttcggtggtgtacagattttt

SEQ ID NO: 129954 - DNA, 100 bp, Homo sapiens
ttcagcatccccaagcagggggaggtacccactgatggtaatgctggcctgctggctgaaccccagattgccatgttctgtggcagactgaacatgcaca

SEQ ID NO: 129955 - DNA, 83 bp, Homo sapiens
ctgggatttcaacctgaaagtggaggctgcgaaaatagtgaaggtggtgtttttaaggctcatcttactttcccaaaagatta

SEQ ID NO: 129956 - DNA, 75 bp, Homo sapiens
cacagcctcccgcgcctcgctcagctccaacatgataaacctctcataatgaaggcccccgctgtgcttgcacct

SEQ ID NO: 129957 - DNA, 100 bp, Homo sapiens
gccaggatgccgtccaggcggcgcggcggctcctcactcatcccaggcatgacagcaagcgctgtggcggctttgatcctcatgacgtcctccatcatgt

SEQ ID NO: 129958 - DNA, 75 bp, Homo sapiens
cagaaggaacttgcagaaatcacattggaccctcctcccaactgtaggtgtgagatgcacaatgcgaaacctagg

SEQ ID NO: 129959 - DNA, 75 bp, Homo sapiens
tggatcctgactctatccctagcccattgggagctgaaagtgccgacagcattggtgccgtgttaaatagcaaag

SEQ ID NO: 129960 - DNA, 90 bp, Homo sapiens
gcccttgttgcctctcagcaggtggctgcccaggcatctgcatctggaatgtttcctggacaaagaaggatccctccccgcggcggcgat

SEQ ID NO: 129961 - DNA, 100 bp, Homo sapiens
gcggctagagccggagtggggcgagccgcggaacccggccgggagccgcgcgaggcgctttcactctactcagttcctgagggtcaatcgaagtatgtgg

SEQ ID NO: 129962 - DNA, 100 bp, Homo sapiens
cacagcccttccccgatcctctccgtgggagccagcgagcctctctccctgatcttacgtgctcaagaaatcatgaccaccccaggaaaagagaactttc

SEQ ID NO: 129963 - DNA, 100 bp, Homo sapiens
ccgggacccgcccgcccgcgggaggaaggaaaatcacctcggcagtgtttgaaggaaggatactgcaactctttgaagtacgcattttttgagtgtaaaa

SEQ ID NO: 129964 - DNA, 50 bp, Homo sapiens
ggaaaatgtgatgcatgtctcagtggctgatgaggaagagatgcttgata

SEQ ID NO: 129965 - DNA, 100 bp, Homo sapiens
tcacggtctctacaccagagtcactactttaggcggattcgcgaaggtgccgacgccaccgccgagcccatgatcctggaacagtacgtggtggtgtcca

SEQ ID NO: 129966 - DNA, 83 bp, Homo sapiens
ccccgagcccgtggagaagctgaggaaactgcagagagctttggatgttcacgtcccagtatgcccactctgtaataccccca

SEQ ID NO: 129967 - DNA, 75 bp, Homo sapiens
cctggaaaaggcctgaagtggcactgaaatgaggcatagatgaggctctgcagatggcatggggaggaggttgca

SEQ ID NO: 129968 - DNA, 100 bp, Homo sapiens
tggctatgtctcctcctttgtccctgcgtgggtgaggctggaggacccccacgggaagccatacttctacaatccagaggactcctctgttcgatgggag

SEQ ID NO: 129969 - DNA, 90 bp, Homo sapiens
gctgcgggagagccgggtaccggccgtggaagcggccaccgactactgtcagcagctgtgccagatgctctacccatggtaccccaggac

SEQ ID NO: 129970 - DNA, 90 bp, Homo sapiens
ctgcattcgcggggcatgttcccgaggctgtcaccaggcacagtggacagtttggcacaatcaataacttcaggctgggtcgcctgccca

SEQ ID NO: 129971 - DNA, 90 bp, Homo sapiens
gtcctaccatggtatttgctaacgtttagagagtgcttccccttgccgagcactgggaggagaaagtgcaggccatgccacttcctctca

SEQ ID NO: 129972 - DNA, 100 bp, Homo sapiens
ctttatacatcttttctttcctggaccctcggagcctttgtcgttgtgcacagactggtcgaattgacaaatcttaccctacagtatgtggccacacagg

SEQ ID NO: 129973 - DNA, 75 bp, Homo sapiens
aatgattaatccagtgccgcctggaggcagccggtccaacctgaggacgatgacatgaatgaggacacagtagag

SEQ ID NO: 129974 - DNA, 101 bp, Homo sapiens
tcctccgcgcccccactcgcgctgcgatgacgcgctcactgttcaagggaaacttttggattggccacatcgaaggacagcctgaaaggaagggggtcttt

SEQ ID NO: 129975 - DNA, 100 bp, Homo sapiens
caatgcagtaaagccagaaaagactgctgctccctcgccgtcactgttgtataaatcaggagcgagaacccgagcagcgccatgagcaacactaccgtcg

SEQ ID NO: 129976 - DNA, 100 bp, Homo sapiens
aaagccttggagaggaggagaatgtatcaagatcttgtcacaaatacagaagtatgataacttaataacacctgtagtagattcattgaaatacctcact

SEQ ID NO: 129977 - DNA, 98 bp, Homo sapiens
ctgactgaacactagcatacctgcatgaacaacaggcctaatttgtagatatcctcaagaagattatgagtcattctcactaccggaatctgttcctc

SEQ ID NO: 129978 - DNA, 75 bp, Homo sapiens
gaagaatttattgcttttgagcatcctgaagaagttgattatatgacgggaaaggggcgtattcgtcgaggaaac

SEQ ID NO: 129979 - DNA, 74 bp, Homo sapiens
acttacgaggagcagtttaagcaggctggagtgcagtggcgagatctcgactcactgcaggctccgactcccca

SEQ ID NO: 129980 - DNA, 129 bp, Homo sapiens
tcacgaaatggattggagtgaaccggagaccccgaaaacggaagcgcagggagaaggaagaggtgtttgaaaaggcccgacaacaagctcaaatacgtcaccaaatggcagaggacagcaaagcagatt

SEQ ID NO: 129981 - DNA, 100 bp, Homo sapiens
ctgggattggagattccacccaaacttgctggtcactgggagaaccccttgttcgtggaggctgaggagaaagtctcctacaactgctgccgccagggca

SEQ ID NO: 129982 - DNA, 90 bp, Homo sapiens
gacgactacagctacaatcagttttccacatatggcgatgccaatgccgctggtgcttattatcagcacccagtcagcttgaagagtttc

SEQ ID NO: 129983 - DNA, 80 bp, Homo sapiens
gaaaatgacggttataagaccatttatttctttggagacaaaactatgccagacaggaaaggccatgtgaggacataggg

SEQ ID NO: 129984 - DNA, 100 bp, Homo sapiens
aagcgggtgtgaggagcgcggcgcggcagtgtccacaggatgaaatgtccgagtcaggccagtcctcggcggccgccacacccagcaccacaggcaccaa

SEQ ID NO: 129985 - DNA, 100 bp, Homo sapiens
agccgggagcgctgactggcccggctgggcagggctgctgacttgagtaaaccaatagataaaaggatatacaaaggaacacagcctacttgtcatgact

SEQ ID NO: 129986 - DNA, 115 bp, Homo sapiens
gattcgctcttcaagttggagcaaggagaacccccagggatagcagaaggagcagcccacagtcaaatctgtccaggtatctctcctaaatgtgtgatcaaggaattaccaccaa

SEQ ID NO: 129987 - DNA, 90 bp, Homo sapiens
caaaactgtcattttgggactgctgtgcctcctcctcctgtggtggaggagaaggaaaggtgcaagttcttcagtctgactgagacacca

SEQ ID NO: 129988 - DNA, 52 bp, Homo sapiens
ccaggatggtctcaatctcctgaccttgtgatctgcccacctcagcctccca

SEQ ID NO: 129989 - DNA, 100 bp, Homo sapiens
tttacctggtatttcaatggggcccttgcagattttaagaaagatggatctcactttgagaaagttggtgggcctgccacagtgactcaggtcactcaag

SEQ ID NO: 129990 - DNA, 75 bp, Homo sapiens
aaaatgcgctcgggctggaccagcaggtacactgaggaggggacggctccgtcttcacattgtgcacagatctga

SEQ ID NO: 129991 - DNA, 83 bp, Homo sapiens
tggtggtcctggtctacgtcatcggccgccaccggcacggccaggccagcatggtggaccacttacttccagtggacgagaac

SEQ ID NO: 129992 - DNA, 83 bp, Homo sapiens
cggaggccgcctggggtagcggcggcgggagtcctggcgctctgcaggattttttatcaagcagaaatgcatcgaacaacgag

SEQ ID NO: 129993 - DNA, 100 bp, Homo sapiens
tcatctgcccccggagattgtgcctgccaccctacgccgtagccgtccagagactggcaggcctcggcctaaagacaagttggatggcttgaggactggt

SEQ ID NO: 129994 - DNA, 100 bp, Homo sapiens
atattatcagacgcgacacagcctcttgaaagtcagaatttttctcctgtggtgagagatatgaccttgaatgatgccatgaggaacaaggcaaggctgt

SEQ ID NO: 129995 - DNA, 100 bp, Homo sapiens
gactggagaactgtgaatgaagtggatcctcacaaagctacaagaagcaagagaaccttctccgagcctctgacagagaacactgcctgaagacacacag

SEQ ID NO: 129996 - DNA, 89 bp, Homo sapiens
attgctctttggcgactcttattgatgggaaagggctccttcaagtatgcctgggtcttggataaactgaaagctgagcgtgaacgtgg

SEQ ID NO: 129997 - DNA, 75 bp, Homo sapiens
gagctccttttcctccacctaccttcccgatgaacttgaagatgatttacttggagaagatttgctatctggcaa

SEQ ID NO: 129998 - DNA, 96 bp, Homo sapiens
tcaattcggaaccgaagattaaaaaactggagccagtccttttgccaggcactgccaggacttaccgtacaacactccttggcttctggaatttta

SEQ ID NO: 129999 - DNA, 100 bp, Homo sapiens
ttccgttgtcggcctcccactgcagggttcttgaagcttttgagattaacaatggcaggaaaatcatcactttttaaagtaattctccttggagatggtg

SEQ ID NO: 130000 - DNA, 100 bp, Homo sapiens
ccaacaccctctacgaaggcggctacttcaagcaccagtggaacagtgattaacaagctgaaggttgttaagaagcagacatgccctttacagactgggg

SEQ ID NO: 130001 - DNA, 100 bp, Homo sapiens
tttgggagaggaaacagaggattcattgttttcaacaatgatgactgttcacagaagaaaagcttggccaggctgagaagacagaattggatgctcactt

SEQ ID NO: 130002 - DNA, 83 bp, Homo sapiens
aagatcatcattaaggacggaggcacggagtgcgccggtctcggggaaatgcccggttccttcgtgcccacggtcaccgcgat

SEQ ID NO: 130003 - DNA, 100 bp, Homo sapiens
gcggagcggccaacatggcggaacgcaggagacacaagaagcggatccagactccaagaatgaaaaggctctgggccgcaaaataaactcctgggaatca

SEQ ID NO: 130004 - DNA, 75 bp, Homo sapiens
tataccatcttcctatgcatggaaactcattatgagaaggttggtcaaagaaaaagtgatgtatgaaaaagaggc

SEQ ID NO: 130005 - DNA, 51 bp, Homo sapiens
tggacgctgactcggaagtgcagaaagaagatgctgatatgctacaacacg

SEQ ID NO: 130006 - DNA, 90 bp, Homo sapiens
cgctgaaccgtgcagtgctcgctgccatggatgccaccaagctggaccctgatgcttggtgtgacctgagtaaatttgacctccctgagg

SEQ ID NO: 130007 - DNA, 98 bp, Homo sapiens
tcagcctcccataccagttcaactttttcagattccacgtggcccagtcatatatgcacagttagaccactccggcggacatcacagtgacaagatta

SEQ ID NO: 130008 - DNA, 100 bp, Homo sapiens
ctgaggcccgtggtatcaatggaggtgcaactggagaaggcactgaagccctacgagattcacaccgtcttcggtctcctggggtcggcgccgagtggga

SEQ ID NO: 130009 - DNA, 100 bp, Homo sapiens
tatcagttgttgcatgaagcaagacggtaccacatacttgggaatgaaatgatgtccccaaggactaggccacgcaggtatcctctggcacatgcaggcc

SEQ ID NO: 130010 - DNA, 101 bp, Homo sapiens
atccagtacataagcacctttgcattcggaacgaatgggggacaaaccaggggatgctcgctctatggcagcagctgctgcatccctcgggggaccccgag

SEQ ID NO: 130011 - DNA, 100 bp, Homo sapiens
gttgaggtgcgagttacaccaaccaggacagaaatcattatcttagccaccagacagatgtcatcaatgcttcttggtgggtcatgagcaacaagactcg

SEQ ID NO: 130012 - DNA, 98 bp, Homo sapiens
ttcaggaaatggtgtcacaatttgtgaagcattaggtggtctcttcagtcagcctacacaagctcctacccagtccaaccagctgataaatactgcga

SEQ ID NO: 130013 - DNA, 88 bp, Homo sapiens
cagtttgtcccagattttcagtctgataaccggccgttgctccagggagaactgcaaatatcttcatccacccccacatttaaaaacg

SEQ ID NO: 130014 - DNA, 100 bp, Homo sapiens
acattcgtctcggaaaccccgcctcttacagtcacgagatcataggtatattgaactgttcctgaattcatgtccaaaaggaaaataagactctaggggc

SEQ ID NO: 130015 - DNA, 51 bp, Homo sapiens
gaagtgcagaggtttttttctgcatgaatgtcagcatcatcattcaaagaa

SEQ ID NO: 130016 - DNA, 75 bp, Homo sapiens
aggcagttggttgggacccgctccaaccctcggctccatctactctttgaagcttctgcccagcttgcattgttt

SEQ ID NO: 130017 - DNA, 82 bp, Homo sapiens
tcataagtggaattttggagatattcaaaggagctggtgactgccctcatgtgtgatttgcggcggccagcggcaggtggga

SEQ ID NO: 130018 - DNA, 100 bp, Homo sapiens
agcagcggacgtgagcgataatggcggatatggaggatctcttcgggagcgacgccgacagcgaagctgagcgtaaagacagaaccaagttgtattgtta

SEQ ID NO: 130019 - DNA, 83 bp, Homo sapiens
gaggaaaagaagcagttcctgatgttacaaatgaacaaggatctcccaggaactgtggctgcaccatctgtcttcatcttccc

SEQ ID NO: 130020 - DNA, 121 bp, Homo sapiens
cctggaccaggaggaggttttcaggaccaaaattgtggaaaagtcactctggttgcatctggaggtggtggggttggagatggtgttcaagaaccaaccacaggcaactggagaggaatgc

SEQ ID NO: 130021 - DNA, 100 bp, Homo sapiens
gcgccatccccgagcagcggtggaagctggattttcaagaaagacatgtctgacaaaatgtctagcttcctacatattggagacatttgttctctgtacg

SEQ ID NO: 130022 - DNA, 100 bp, Homo sapiens
attacctgtctggagcaaggaaaagagccctggaatatgaagagacatgagatggtagctaaacatttaggtgtctgtgacctttgaggatgtggctgtg

SEQ ID NO: 130023 - DNA, 100 bp, Homo sapiens
tttacaaccaattttctggattggactgatcagttcagtttgctgtgtgtttgctcaaacagataaaaatgaatgccatttcccatccagtactgaagtg

SEQ ID NO: 130024 - DNA, 83 bp, Homo sapiens
cgcggctacgtgggcaaccgggcggccacgttcccgctgcaggctccccacaggtgcaggaagccgccgcccagccatggacg

SEQ ID NO: 130025 - DNA, 82 bp, Homo sapiens
tgaggcttatttgggaaagaaggaagatgagaatgtgcctactgctcctgatcctccaagtcaacatttacgtgggcatggg

SEQ ID NO: 130026 - DNA, 90 bp, Homo sapiens
atcagccaggagcccgatcctgtccagaggcttcaggagctagtgaagatcctgcacaaggcactggaggccgcccagcaggagaagcgg

SEQ ID NO: 130027 - DNA, 75 bp, Homo sapiens
ttggctggacggcgcggccacggagaagggcgcggttattcagcttctcaaggctggaaaagcgaaggaagtttc

SEQ ID NO: 130028 - DNA, 96 bp, Homo sapiens
ggaacagctccggtctacagctcccagcgtgagcgacgcagaagacgggtgatttctgcatttccatctgagattgttcactgttggcatatagaa

SEQ ID NO: 130029 - DNA, 100 bp, Homo sapiens
ccgggacaaggaaggttacaatagcatacattatgctgccgcctatgggcacaggcagtgtctggaattggattctcaaagttggattggtggaaacaat

SEQ ID NO: 130030 - DNA, 73 bp, Homo sapiens
ttttaagtgtggcatacaagaaaggaatgatgagaagacagcagctgattacaagattttaggtggttcagtc

SEQ ID NO: 130031 - DNA, 96 bp, Homo sapiens
gtgttcgacatcctggccgtgctgcagatatcagttttagagaatgtggcgtggagaaattctcaaggaaagagtaaaatgctggtgatgtgctga

SEQ ID NO: 130032 - DNA, 75 bp, Homo sapiens
ttgatgcgctgcgggcagccgtggtggaccggaaagctctggattaatcgaattacagctgctagccaggaacat

SEQ ID NO: 130033 - DNA, 111 bp, Homo sapiens
catggtcccgagtggcggcgtcccccagggcctcggcggccgctctgcctgcgcgctgctcctgctctgctacctgggcagctgcaatgactctccgcacggtattattgt

SEQ ID NO: 130034 - DNA, 100 bp, Homo sapiens
aggattacgacgcggcagatgacgtgcagctctccaagacgctggagctgcgcgtggcctgggtacccgtgctccatctcatctccacgcccttccctgc

SEQ ID NO: 130035 - DNA, 51 bp, Homo sapiens
atttatccaacagctcctcccagatatgagatcctgactccaaactccatt

SEQ ID NO: 130036 - DNA, 75 bp, Homo sapiens
acaacctggctgtgctggagatgcggaagggccacgttgaacaggtgaccaagaatatggcccaggtgaccaaag

SEQ ID NO: 130037 - DNA, 75 bp, Homo sapiens
tctgacgaggcacagcgtttcttgcaagaatgggagggagaaacacatctcatctttcctaaaaaagcttcagtg

SEQ ID NO: 130038 - DNA, 90 bp, Homo sapiens
gaaccaaacaaccttcgtgaggagtttacaagttctgctgtatgtgcggagggagactgaggaggtgtttgacgcgctcatgttgaagac

SEQ ID NO: 130039 - DNA, 100 bp, Homo sapiens
atgcagcctccgggcccgcccccggcctatgcccccactaacggggacttcacctttgtctcctcagcagacgcggaagagaggaccaggtaaacttccg

SEQ ID NO: 130040 - DNA, 51 bp, Homo sapiens
ctacttcaacagcatttccttaactgctttctgattccaaacagttcaaca

SEQ ID NO: 130041 - DNA, 101 bp, Homo sapiens
ttgttttcacatgtgtgatagaatggttatctatttcttcattgctgcttcttatgctccatggggtccccacggagtctggaccatggaggagcgaggtc

SEQ ID NO: 130042 - DNA, 100 bp, Homo sapiens
ttcctgtgccagcccctggatgtgctgaagactcgcctgatgaactccaagggggagtatcaggatgattaccttgacctctttggggaccccagtgtga

SEQ ID NO: 130043 - DNA, 100 bp, Homo sapiens
cagctcatgtctcattaatcacaccaacaaaaagatcctgtggtacagcattacccaaggaatatcagaagataggaaaggccttgcagagtttggccac

SEQ ID NO: 130044 - DNA, 90 bp, Homo sapiens
cacagcaatatctctgggctttcacagctttaatgaagcaccagttgagattcccagtccttctgaaaccccagctaaaccttctgaacc

SEQ ID NO: 130045 - DNA, 144 bp, Homo sapiens
aaggtggaagtagaaagtctgaagcgggaactccaggagagagagcagctgctcatcaaagcctcgttttgaggttttgctgaagatattcctgaagaatcatcccaggtgccacactaaaaaaatgatccagttgacagctac

SEQ ID NO: 130046 - DNA, 118 bp, Homo sapiens
tccgccgtcctagccgctgctgtcttcgtgggaggcgccgtgagttcgccgctggtggctccggattattcagagctgggagagcttcccccacgatctcctttagaaccagtttgtg

SEQ ID NO: 130047 - DNA, 98 bp, Homo sapiens
tgaactttgtcgcttatggactgaaagtttattgcattccaacagctcattttatgttgtttgtacctgttcaagctaggcctggcccctcagattca

SEQ ID NO: 130048 - DNA, 83 bp, Homo sapiens
gggctgcctgggtgttagcaaagaagctattcaggattatgaaactgctcaggaacacaatgaaaatgatcagcagattcgag

SEQ ID NO: 130049 - DNA, 89 bp, Homo sapiens
attcatgacagaagggagtttgctaaatttgaaaaggagaaaatgaatgccaaatgggacacgctcaagactgcagtgcagatgacgac

SEQ ID NO: 130050 - DNA, 90 bp, Homo sapiens
ggaagacgaggaggaagatgaaggcaactgaatcccaagaggcacctgcagccaggaaggaaagggactttctgctttcttaagaccggc

SEQ ID NO: 130051 - DNA, 100 bp, Homo sapiens
atagagaaggaggatcaaaatcagacagtgaagatataacaagatcagcaaatctaactgaccaggtgctggagaatctggtaaaagcaccattgtgaag

SEQ ID NO: 130052 - DNA, 98 bp, Homo sapiens
ggctgtcaggcggaagctgcattcatggaagaagagtgtgtggacactccaaaggattcagtgcgcctccttgctgtggaagcttgtgtcagtattgc

SEQ ID NO: 130053 - DNA, 98 bp, Homo sapiens
accgacgtcatcatgctgaccaccaatcagatccgtaaggcccgtgaaggtggagcggacccggaagcggtccgagggcttctcgatggacaggaagg

SEQ ID NO: 130054 - DNA, 100 bp, Homo sapiens
cggagaccttcactctctccagcaacatcatcatggacacctccaccttcctgctcagctggattcactcctgcttgcgaaaagctgacaaaaacaagga

SEQ ID NO: 130055 - DNA, 98 bp, Homo sapiens
ctggaaggaaaatgggacattagttcaagtagcaactatatcaggtatttaaaccatgtcagagctgcctcaccacaggaccttgctggaggctatac

SEQ ID NO: 130056 - DNA, 77 bp, Homo sapiens
gaggacacgaggcggcgggctggagacatggaccgcggcgagcaagcacactgggaccccaaagtttttacagctta

SEQ ID NO: 130057 - DNA, 95 bp, Homo sapiens
acgtgattgctggttattatcaagctaatgagcgagtaaaggatgccagttaccggtattgtaagaacaagccgtacccaaagtctcgcttctgc

SEQ ID NO: 130058 - DNA, 100 bp, Homo sapiens
cccttactacctgaagatcaactactcctgcgaggaaaagggatgtgcccttctcgtaaagttgttcaatggctgccccctccggatccacagcacggcc

SEQ ID NO: 130059 - DNA, 82 bp, Homo sapiens
acagaaccctgccatcagcatcactgaaaacgtgctgcatttcaaaggaaggatttgatgccctggatccctttattcccat

SEQ ID NO: 130060 - DNA, 75 bp, Homo sapiens
gtacaccttcctccagcagctctgtccaggaaacatgacagagtgtcctggccactttggccacattgaactggc

SEQ ID NO: 130061 - DNA, 100 bp, Homo sapiens
ccccgcgtcctacgcccgcggcgactgtaaggactttgaagccctgagatggggtcttgccaggtcttggccaggctggtcttgaactcccggactcaag

SEQ ID NO: 130062 - DNA, 74 bp, Homo sapiens
ggacaccccggaagctgggaaatgaaaggtgacagagttttcactagcagcacgatctctgggggttatgcaga

SEQ ID NO: 130063 - DNA, 100 bp, Homo sapiens
tctgatctataaatgcggtggcatcgacaaaagaaccattgaaaaatttgagaaggaggctgctgagatggtgcacaaagctgtggtggaggtggacgag

SEQ ID NO: 130064 - DNA, 83 bp, Homo sapiens
gcgccgacggcagccggcacctgacggcgtgaccgacccgagccggcggctatgagaggttttcctccgagtacccagaattc

SEQ ID NO: 130065 - DNA, 73 bp, Homo sapiens
cgagctccagccgaaggagaaggggggatacagttgatatattagttggatggcatatagatcatactcagaa

SEQ ID NO: 130066 - DNA, 75 bp, Homo sapiens
tagcaatcaagactgctgacagcacgtcgcgtttggaaaaattatctcccagcaattaatgggattgtctttctg

SEQ ID NO: 130067 - DNA, 98 bp, Homo sapiens
gcggagctggacgccgcgatcgtggggcccgcgaggcgggcagccggggcgtccaggaccaagaatcgccttcagccctgtctggtgcatccttggca

SEQ ID NO: 130068 - DNA, 74 bp, Homo sapiens
ctgctgttgctcttctccgccgcggcactgatccccacaggtactccaaagattcaggtttactcacgtcatcc

SEQ ID NO: 130069 - DNA, 141 bp, Homo sapiens
tcatgtggccatcttgagtctactctgtcgctcttgtgccctagcaccccgagaaccgtcagtttgagccagatggtgtcatggagaaactccagctgggcccagagattctgcagcgggaaaatccaaggcttatttatg

SEQ ID NO: 130070 - DNA, 83 bp, Homo sapiens
cgcggagcccggctcccgcaccatggaggaggacgacagctacggccagaagcggactcctagaagaggggagcagcaaggat

SEQ ID NO: 130071 - DNA, 83 bp, Homo sapiens
ctttcacaataagagcagaggatggaacacttcagtgcattcaagtgtgtcccggcatggatatccggaacaacctcactagg

SEQ ID NO: 130072 - DNA, 75 bp, Homo sapiens
ggtgggcgccgtgaagagccttcaggcgctgggcgagaatgactcccggcgtggctcgggctccccggaagacac

SEQ ID NO: 130073 - DNA, 75 bp, Homo sapiens
cacagacaccgcctacaggagtatgatgcaagcatttaaatcaaacggtattgagatggattgggttatgaaaca

SEQ ID NO: 130074 - DNA, 101 bp, Homo sapiens
gacgcgcgggaacaacgcgagtcggcgcgcgggacgaagtattctaccttgtaaatactgttatttgtatatactgtaaatgatgacatcggtgggcacta

SEQ ID NO: 130075 - DNA, 90 bp, Homo sapiens
cacgcctggcctcactcaaacagtaaacgaggaactgtggaaggtgcatcagtgaagaaatggaccaatgtgtataatcatggaatctcc

SEQ ID NO: 130076 - DNA, 83 bp, Homo sapiens
gtacctgcaggcctcctacacctacctctctctgtttgcagaaaaaacttcagcatgtgccaggaacacaacctcaccttgat

SEQ ID NO: 130077 - DNA, 100 bp, Homo sapiens
agactttcagctacttgaagatagccatcagccgctacgtgactcttttctccagatctcgacatggcaggagctgaggcagctgcaggagcagatccgg

SEQ ID NO: 130078 - DNA, 75 bp, Homo sapiens
cagcacaaaccctggggaacgcaggtttgcctgaatccatcattgcagctgcatgttcaagaagtggccggagag

SEQ ID NO: 130079 - DNA, 101 bp, Homo sapiens
gtgaagcaaaagcctttcatgattatgctgaagacaatgagaacttcaagacaatagtggagtttgagtgccggggccttgaaccagttgatttccagccg

SEQ ID NO: 130080 - DNA, 100 bp, Homo sapiens
gcgggaacgcaggcgtaccatccacaccttcccctgcctcaaggagctgtgcaccagcccccggtagacaagggcgtggtccccctggcagggacaaatg

SEQ ID NO: 130081 - DNA, 82 bp, Homo sapiens
gacatgttcacgcacgggatccagagcgccgcgcacttcgtcatgttcttcgcgccctgaatactaagaagtttcagcagtg

SEQ ID NO: 130082 - DNA, 83 bp, Homo sapiens
cggcggcggcggctgcggcccaatatagaataccctctaccatctgctttggtcagggtgccgctcgaggatttaaaagcaac

SEQ ID NO: 130083 - DNA, 100 bp, Homo sapiens
ctcgtcacttgcctcccgggagtcgctgtggcaaaagctgtacctgggcatcgtgctggcggccgtggtgatcatcactggctgcttctcctactaccag

SEQ ID NO: 130084 - DNA, 83 bp, Homo sapiens
aggcaaggagctaaagcagcgtgcgttcagccctggggttcccaacaaggctacgcagaagaacccccttgactgaagcaatg

SEQ ID NO: 130085 - DNA, 100 bp, Homo sapiens
cgggaggcgcgtctccccggcccagtccgcgcccggccccgcggggccgctccggcccgctccgaggtgacaccggctccgacacgccgctaaccggccg

SEQ ID NO: 130086 - DNA, 100 bp, Homo sapiens
acagctatgactacgacctgcaggaacaggttctcctgaaaagaaagctgaacattcatctataaatcaagaaaatggcactgcaaaccctatcaagaac

SEQ ID NO: 130087 - DNA, 75 bp, Homo sapiens
taacaatcagtgccgagcaattgtgatgagatattctgctgagtggaagttgtcactcagcccagtccatcagtt

SEQ ID NO: 130088 - DNA, 117 bp, Homo sapiens
ggctgctggttccgcctgggcggggcccgcccgctcatcccgttgggcccgtgaatctgaatggtgcctaccctaagctggtgcctttcagacctgcaggacggctgatctctccac

SEQ ID NO: 130089 - DNA, 100 bp, Homo sapiens
ggaatgaagatggtgaaagaagagctatgataactcctgctctccgagaagcccttactaaacaaggagtccaatgtgctgattgctgctaacagtcagg

SEQ ID NO: 130090 - DNA, 101 bp, Homo sapiens
ggcgggcgcggagatgtggcccctggtagcggcgctgttgctgggctcggcgtgctgcggttgcacgttttcaaaaaatacctaatggtgaaaatgagaca

SEQ ID NO: 130091 - DNA, 95 bp, Homo sapiens
ccgacttcgatgatcgtgtgtcggatgaggagaagggtaaaccagacttgaatacaacattgccaattagacaaacagcatcaattttcaaacaa

SEQ ID NO: 130092 - DNA, 100 bp, Homo sapiens
tgttaagctttttgagactgagcactcccagctggacgtgatggagcagcaatcatttggggaagaatctacagttgctgatggacagagtggatgaaat

SEQ ID NO: 130093 - DNA, 100 bp, Homo sapiens
gaagatcagatgagccgtcttgccaagggcaggtgtttgtttgccagtggcagtccatttgggccagtgaaacttacagatgggcgagtctttacaccag

SEQ ID NO: 130094 - DNA, 102 bp, Homo sapiens
accaacttctttggcaagtggacattttactggctcaaaatatgcttttaaggctattaaccagggtggccttacatcagtagctgtcagagggaaagactg

SEQ ID NO: 130095 - DNA, 105 bp, Homo sapiens
atcctctgcagccagaagaacaagaagtaggcattgaccccttgtccagttactctaacaagtctggagcccccttggacagctctcctctgtccaagcagtcac

SEQ ID NO: 130096 - DNA, 100 bp, Homo sapiens
cgcactactggcccctgatccggttcttggtgcccctgggcatcaccaacatagccatcgacttcggggagcaggcccagtgacgagcaccatccggaag

SEQ ID NO: 130097 - DNA, 96 bp, Homo sapiens
agcaccctttgtgatgttggcagttgaaccgaccatcagcttatacaatgacagacatcacacctccagtgcaatccctgttcctaagagacaaag

SEQ ID NO: 130098 - DNA, 87 bp, Homo sapiens
cacctgtggactctgaccgcaaacaaggagagcctactgagcagcctgagtggctagaacaacagaggcagcagttgcttactgaac

SEQ ID NO: 130099 - DNA, 96 bp, Homo sapiens
gattcactgacagtaaacgctatgaaaaggacttccagagctgttttgggagtggattagaacaagatgacatgagaattttatacaaatacctta

SEQ ID NO: 130100 - DNA, 75 bp, Homo sapiens
ctggaccaagatcgagcccagcgtcaacttcctcaagtcgcccaaagtcttccaggatctcaaccagttctctca

SEQ ID NO: 130101 - DNA, 75 bp, Homo sapiens
gcgatgacggctacgaggccgctgggagttaacccctcaactaccgggacccaggagttgaagccggggttggag

SEQ ID NO: 130102 - DNA, 98 bp, Homo sapiens
cacggatcggattcctcagctacgaggaggcgctgaggagagatatccttggaacagaagatcttattgtggaagtgacttccaatgatgctgtgaga

SEQ ID NO: 130103 - DNA, 59 bp, Homo sapiens
cagctaagacgccaggactccctggaagcctagaaatgacttattcgtctaatggaaga

SEQ ID NO: 130104 - DNA, 75 bp, Homo sapiens
cccatgtttttgagtatatccgttctgagacatacaaataaaagctgtatacctgcacaagtggtggctgccatt

SEQ ID NO: 130105 - DNA, 75 bp, Homo sapiens
caacctcatctaccccatctttgtcacgatctaggggtgtttattcctgctcctatggctcaagggatgagaagt

SEQ ID NO: 130106 - DNA, 151 bp, Homo sapiens
gaagcaagatgatcgaccgcaacttacgggaggacggggaaaaagcggccaaagaagtgaagctgctgctactcggaggcaagtgaggcctatctggttggcctttttgaagacaccaacctgtgtgctatccatgccaaacgtgtaacaa

SEQ ID NO: 130107 - DNA, 97 bp, Homo sapiens
cactcatgagctcatcgtgcataagggctcccagaaaggaagacccagtggacgtgtggtcacacagtatcactacacgcagtggcctgacatggga

SEQ ID NO: 130108 - DNA, 89 bp, Homo sapiens
ccactgatatctcaaaaggtgatctggacaaaggaacaggtatctcagcttgtggagagactccagagcaaatacgagcaccaagtggc

SEQ ID NO: 130109 - DNA, 90 bp, Homo sapiens
gacggcttcagtgcccgggagctcatgatccacgcgccaactgtcagtgggtggcggtcacctagacgttggacctctcgaacaaccagc

SEQ ID NO: 130110 - DNA, 48 bp, Homo sapiens
gacagcgaacatgtcgcggcctgtcagagttgctggagaatgtaaccc

SEQ ID NO: 130111 - DNA, 49 bp, Homo sapiens
gcagacctggtggaggtgttaaatgaaattggttgaatctggcgatgtg

SEQ ID NO: 130112 - DNA, 75 bp, Homo sapiens
gactatttggcaagaagcagatgcgcattttgatgggttatgaagacagtatggagtttccagaccatagtagac

SEQ ID NO: 130113 - DNA, 83 bp, Homo sapiens
gctgctcgcacaggactcggccacctgcccttcctgcaccgactggccagacaatgcagatcttcgtgaagactctgactggt

SEQ ID NO: 130114 - DNA, 96 bp, Homo sapiens
accgactcttccaattttgaggcagagggttctggaaggaagattccggattccgtatttcatgtcagaagaatatcaacttgcaaggccttctga

SEQ ID NO: 130115 - DNA, 49 bp, Homo sapiens
ttaacgtctctgttagttcagaggtgtcagagatggctgaagatgggag

SEQ ID NO: 130116 - DNA, 109 bp, Homo sapiens
catctccaggacagtgggaagagtggctggaggaattcagtttcttggggctatctttcagatcattcagagcataaggatgggcatgtgagaaagccagggatttgac

SEQ ID NO: 130117 - DNA, 100 bp, Homo sapiens
ttggagaccaaattatagcactggaaaggcagctcatcatgcagagtgaaatgagggaaagacaaatggccatgcagattgcgtggtctcgggaattcct

SEQ ID NO: 130118 - DNA, 99 bp, Homo sapiens
ctggcggagcaggaggatgggcgattcttcaagagaaacttaatgaaatgagctatgaactaaagtgtgctcaggagtcgtctcaaaagcaagatggta

SEQ ID NO: 130119 - DNA, 50 bp, Homo sapiens
agcggaggagcccgaccgacccggttttgagcaaaattttggactgtgaa

SEQ ID NO: 130120 - DNA, 76 bp, Homo sapiens
ttggaaaagagaactcaaggtctggcagggagaaaggagcaaggttagatggagtcagatttgaaaatgaaaaaat

SEQ ID NO: 130121 - DNA, 98 bp, Homo sapiens
actgatacataataagacacaatctattctgctgattcacaattatggagactgtaaatggtggagtcaatgaagaaagtagcagggatggatgtgga

SEQ ID NO: 130122 - DNA, 99 bp, Homo sapiens
cctggggattccttaccacattgtgaatattgtctcaggtgaatccctgactccagaacgcactcagctcctctatctccttgctgttgctgttgtcat

SEQ ID NO: 130123 - DNA, 82 bp, Homo sapiens
gcgtcccggccttcatcgacatcagtgaagaagatcagggtggcccagttgaaatccttcccttcctctaccttggaagtgc

SEQ ID NO: 130124 - DNA, 75 bp, Homo sapiens
ggcacggcgtggaggaggaaccagaccgcggccagagcgttcagggagtactacatcaccatggtgaagtgggcc

SEQ ID NO: 130125 - DNA, 98 bp, Homo sapiens
gagggagaaaggagacaagcaagtcagaaagcgatttgataggtctcttgatgttttaagcgatggtgttttgaaggatctttctgagttttaccgga

SEQ ID NO: 130126 - DNA, 98 bp, Homo sapiens
ccgcccttctgctccacgaggagcacagccgggccgctgcgaagcttatttccagtgatgctgatggagccatccaaagggctggaagattcagagtg

SEQ ID NO: 130127 - DNA, 76 bp, Homo sapiens
agaagacaaactgtatggtggagaaagaagtgggaaggatctgcgcgggtgacagtgggaactggatcgagatcgc

SEQ ID NO: 130128 - DNA, 100 bp, Homo sapiens
taccaagaaggttgggaaagcaccaaaatctgcatgtggtgtgtgcccaggcagacttcgagggattatttgcatgggtgcaaaagaaaatggtttgccg

SEQ ID NO: 130129 - DNA, 75 bp, Homo sapiens
gatcggtttgatgtggtggttttggcccctttgctgcaaagtgatcttggcatatacagaagggctgcatggaaa

SEQ ID NO: 130130 - DNA, 100 bp, Homo sapiens
gcaagttctcgaagaggaaaacacacagttaataagatctggggtgaaaagaagttgctgatagtccaactccaccgccaccacctccaccagatgacat

SEQ ID NO: 130131 - DNA, 83 bp, Homo sapiens
cgccgctctccagcccgcttgaacggtttgatgaacttgtgaaaaaattcaaagtcgaatatcatgctggtggctctacccag

SEQ ID NO: 130132 - DNA, 76 bp, Homo sapiens
ggcggatcggctcacgcagcttcaggacgctgtgaattcgtgtcaaaccagaagagaagtaaaattcaacaaaaat

SEQ ID NO: 130133 - DNA, 100 bp, Homo sapiens
ctagtggctctcacctgcttcctcctgggcgtgggctgccgaggtcctgctgtactagccaccaaagcagctgctggtactaagaaatatgatcttagta

SEQ ID NO: 130134 - DNA, 100 bp, Homo sapiens
cctctcaagacccacagcagcccaccagtactgagtgttgcggagataggaacatgggagagaaacaatctgggtaacatgaaagtgatgctggttgcta

SEQ ID NO: 130135 - DNA, 83 bp, Homo sapiens
agaaactcttcgactacttcaaccaggaggttttccgagacaacaacggcaccgcgcaagagtgagccatggagctacgtgtg

SEQ ID NO: 130136 - DNA, 98 bp, Homo sapiens
ggaaaggtctgccttacaagggacaccatagcctctcaccctaagggtatggttccgaccggcgtttagccgagctctctgattaccgccgtttatca

SEQ ID NO: 130137 - DNA, 100 bp, Homo sapiens
cgcgtccaggcctgacagctctgcggctcgggccctgagtgatagactggagtgatgttagaaaacacaaatatggtcacctatcagagtctgcatccca

SEQ ID NO: 130138 - DNA, 90 bp, Homo sapiens
gctctgacccttctgctggccagtctgggcacctgatcatcaatgctgtggtactgttgattttattgagtgccctggctgatccggatc

SEQ ID NO: 130139 - DNA, 98 bp, Homo sapiens
cccgccaggcgctctgaccactctccagcaccagcttccagttagtggatatagcacaccatccccagccaatggtgtcctactcttctgtcctcaca

SEQ ID NO: 130140 - DNA, 100 bp, Homo sapiens
tcaggaccgcccgcgtcctactgcgccaagctctgcgagccgcaggagcttttgatgggaggccagcagactatttattcatgctcctctttaactggat

SEQ ID NO: 130141 - DNA, 80 bp, Homo sapiens
attaattgatgagggagatgaaaccaaactagagtcagaacgaatactagcatcagtggggaagaaacctccccaggaaa

SEQ ID NO: 130142 - DNA, 100 bp, Homo sapiens
cccagaggactttcttccagcttctgctgtccttctttgtggagagcaagaaaagacccgacgacacagctttccaaatagtggaacttcggattttttc

SEQ ID NO: 130143 - DNA, 100 bp, Homo sapiens
agaggccacggaaatgatgggtgcccttgtggccagtaggcaatcacctgaaggatctgacttccagaaggtatgaggatacatgggctgcacttcacag

SEQ ID NO: 130144 - DNA, 90 bp, Homo sapiens
ctcgtgcaggaagtactcatcgactgatgtggcagactttgctccctggcaaaaggagttaaatacctgtgcatcccagcagcggattca

SEQ ID NO: 130145 - DNA, 75 bp, Homo sapiens
cccttctctcttcctcggcgctgcctacggaggtggcagccatctccttctcgtactaaggctcgtacgtctgca

SEQ ID NO: 130146 - DNA, 76 bp, Homo sapiens
gtgataaactgaaccctaaaacaattaatccggtacttattacagtgcctgcctgctttgaaattctgctgcttgc

SEQ ID NO: 130147 - DNA, 74 bp, Homo sapiens
agcagccctgagacgcccatccaaaaccctgttgtgaaacatctgccgacacacaagctctgttgaggaatgac

SEQ ID NO: 130148 - DNA, 75 bp, Homo sapiens
tatgggagcgcatttccccagggtgacgcatccaaagaagacattgacactgctatgaaattaggagccggttac

SEQ ID NO: 130149 - DNA, 51 bp, Homo sapiens
agtccggacatctgaaacttggattttctgccgtctcttggcaaaaatggc

SEQ ID NO: 130150 - DNA, 80 bp, Homo sapiens
acatggtcatgagctttgtgaacctggcctgaactctttgcttccggaatccgggattgttgctgacatagaattagaaa

SEQ ID NO: 130151 - DNA, 153 bp, Homo sapiens
cataggtcccggttggtagagggtttgagtccgcatcgccacagctgaaggctgcgagggactaagagcagagtcccttcaccgatgttgtcaccaccaacctaaagcttggcaacccgacagaccgaaatgtgtgttttaaggtgaagacta

SEQ ID NO: 130152 - DNA, 75 bp, Homo sapiens
atcgctaccctccgaagtccgactgtgccctgtccacggtgcctcctgcatgtcctgctgccctgagctgtcccg

SEQ ID NO: 130153 - DNA, 75 bp, Homo sapiens
cgaggaatctgattccaagcaaaaaccagatcatggaagggaagtggttgctgtgtatgttactggtgcttggaa

SEQ ID NO: 130154 - DNA, 82 bp, Homo sapiens
gcgaagcgggcgagcggtggtttggacgccggcggagacgcgggcgaggtttacccaaggtccagcctagcccctaggcacc

SEQ ID NO: 130155 - DNA, 80 bp, Homo sapiens
ataggatgttttggcgagagatgtattcagtggaggaagctggtgcatctgcagcttctatgttgatttttattcttcct

SEQ ID NO: 130156 - DNA, 90 bp, Homo sapiens
gacagcatcgatgctagacagacagtgaaatgacaatggatgctctgttggctcgattgaaacttctgaatccagatgaccttagagaag

SEQ ID NO: 130157 - DNA, 50 bp, Homo sapiens
aacgagctgagctggcagagtcctggtgcccctgggtgaactgaccaagc

SEQ ID NO: 130158 - DNA, 75 bp, Homo sapiens
ttcgagaagaagttgacaccttcatgtttgaggtgtggaaggagagcctctagtgagttcccagagtggacagag

SEQ ID NO: 130159 - DNA, 82 bp, Homo sapiens
cttggactgagtcctgcaggacacagatgtggacgagtgctcactagcagaaaaaacctgtgtgaggaaaaacgaaaactgc

SEQ ID NO: 130160 - DNA, 75 bp, Homo sapiens
gcaacatccagcggatcagccaagccaatttgtgacccagaaggaaatctctgacctcagctgtggctcttggtg

SEQ ID NO: 130161 - DNA, 96 bp, Homo sapiens
cttcttcaactccttcaatgaggccaccatggttctggtctcctggatcatgtggaagattgttgatcgaatcgacaatgatggggatggctttgt

SEQ ID NO: 130162 - DNA, 75 bp, Homo sapiens
cagcctcccgagtagctggtattacagtggatgagtgctcgtctgactacacaattgtgcttcctgtgattgggg

SEQ ID NO: 130163 - DNA, 75 bp, Homo sapiens
gcccagaagccccgaagccacttcacgacacctgcccctgctgtaccttcacagtcctggtgcacacgagagaag

SEQ ID NO: 130164 - DNA, 75 bp, Homo sapiens
tgcaggtgtacctgccgcgacaccgagcatgattatgatatgagggtggatgatttccttcgtcgcacacaagct

SEQ ID NO: 130165 - DNA, 100 bp, Homo sapiens
gggaggagtccagggagcccagcacaggaaccaggtgcagatgggtctcttccttcctgcccccatctctctcactcctggctcagtgcggcactctcca

SEQ ID NO: 130166 - DNA, 82 bp, Homo sapiens
gtaatcctgaggaggaagagtggctcacagctgaacgaatggcacctcagccaaacagcaaatacaagactagcatgtgccg

SEQ ID NO: 130167 - DNA, 90 bp, Homo sapiens
gtgccactcacataagaagtgcccggaggaccccgttctggagcgttatttcaaaggccacaaagctgcgatcacctccttggacctcag

SEQ ID NO: 130168 - DNA, 110 bp, Homo sapiens
cccagaccctggagcctcagttggaagcagccgatccagcctgcggagcctgtggggcaggcgagcccacaccttaaccgtgctcttcatcctcacctgtacgcttggct

SEQ ID NO: 130169 - DNA, 101 bp, Homo sapiens
gggctgctgctgacctgggagagtgggcaggtcctgggggaccagacggtctcagacaatgagctccagggcctgatcacttgaacggacatatcaagcag

SEQ ID NO: 130170 - DNA, 100 bp, Homo sapiens
tgtgtgaccacaaaaccaagttttcctgttggagtacaggacaacataacgatgcacggatgaaccttgccattgctctgactgctgccaggtatggggc

SEQ ID NO: 130171 - DNA, 101 bp, Homo sapiens
gccgggccccggacgccgcgcggaaaaggtcactcctggaagcaaggcggctctagctaatttatgtattggagatgtaatcacagccattgatggggaaa

SEQ ID NO: 130172 - DNA, 96 bp, Homo sapiens
ttcccgcacaaggcagcaggattgcccatgaatgaacatgggtgaaatcgttggatacagtcagccataatggcaggtgaagaaattaatgaagac

SEQ ID NO: 130173 - DNA, 76 bp, Homo sapiens
tatgtctcaggcttccatgcagcctgccttaccgatgcttgtggttggtggcatcgaccgggtttatgaaattgga

SEQ ID NO: 130174 - DNA, 75 bp, Homo sapiens
ctctgccagtgaaacctcaggtgatattgctactgtgtgtgattcaggcccttgatgagcctccctatttgacag

SEQ ID NO: 130175 - DNA, 90 bp, Homo sapiens
ggactggcagctccactgccgtcaactcctgttctcctcagagcctgtgtctgctgcacagagctttacatccccgggagcctctacccc

SEQ ID NO: 130176 - DNA, 95 bp, Homo sapiens
ggagcctcacagctgtattcatgtgggtggatgaaccgcatcaaagacttccagaagccactccagtgaccataagataaatgtcagaatcgcat

SEQ ID NO: 130177 - DNA, 101 bp, Homo sapiens
gagttccaggccacccaggtgtgaggggccctgatggcttgaagggtcagaaaggaaataatgaagatgtttcattttcaagaccagcagatcttgacctt

SEQ ID NO: 130178 - DNA, 87 bp, Homo sapiens
aaaggatgctgaggctttgagatgcttaaatgatgtgcccagggtctagaaggaactatcgtgagcataggtgaccctaagaaaaaa

SEQ ID NO: 130179 - DNA, 82 bp, Homo sapiens
cggtccagcggtcacctacccccagcaccacctccagcccctgcgcctcggaagagtctgccgaaggtgaaggccatggact

SEQ ID NO: 130180 - DNA, 100 bp, Homo sapiens
tgacactattgatgatgagaaattaaggaaagaattttctccttttggatcaattaccagtgctaaggtctgcgcaggcatggcactaagtgtcccatgg

SEQ ID NO: 130181 - DNA, 75 bp, Homo sapiens
tacagaaacaaaatgtcaacaaattgatggacggtttctacctgcccaccgcgggggctccgggctccctgcact

SEQ ID NO: 130182 - DNA, 100 bp, Homo sapiens
gcggagcagaggaaccacacgctgatcatggaactagccagctgtggatggagtaagaaggagaaacacagtcttgcccctaacgttgtggcctttaccc

SEQ ID NO: 130183 - DNA, 51 bp, Homo sapiens
tgcgacaggctaagctggattatcagccaaactatgaattactggaaaaag

SEQ ID NO: 130184 - DNA, 99 bp, Homo sapiens
tgtgagtcctggaacaacatcaataccaatgaatttcccaatattggatcctggcttcggaaatgtgtggacacctacaagtaccttttcatcttctct

SEQ ID NO: 130185 - DNA, 100 bp, Homo sapiens
cgagatctccattgacctctacgagctggaggaggagtattactcgtccagagttgatctctctaatgtattagatcttcatgcctttgatagtctctct

SEQ ID NO: 130186 - DNA, 100 bp, Homo sapiens
ctccagagtctgcaagaaaacttcatcctagaccaagtgataaactgaaccctaaaacaattaatccgagttatggtgaatggttgcatggatttgaaaa

SEQ ID NO: 130187 - DNA, 78 bp, Homo sapiens
agcactggggcctggaccagcctcttctgaaacactggggaatgggtaccacagaccatgtcatcgtcctggcgtcca

SEQ ID NO: 130188 - DNA, 49 bp, Homo sapiens
tgtactttaccaacgagctgaagcagtttcgtgtggctgatcaaagaaa

SEQ ID NO: 130189 - DNA, 117 bp, Homo sapiens
tcgtgcctccctgaaccactccactgcctttaaccctcagcctcagagtcagatgcaggacagatgcttccagaatcaatcaccgaatggtggatctacagccaaccacccattctc

SEQ ID NO: 130190 - DNA, 100 bp, Homo sapiens
actccagggtgtctggtccacgacctatcctaggcgccatgatggaagatggtaccccaaagcatatcatccagatgacaggatttaagatggaagaaaa

SEQ ID NO: 130191 - DNA, 98 bp, Homo sapiens
cgccgagggcgggggagagcgcgccgctgctcccggaccgggccgcgcacgccgcctcagacgagatgatgcctattggccagaaggaaagcgtgtgg

SEQ ID NO: 130192 - DNA, 74 bp, Homo sapiens
gaagacccggaaacttaggggccacgtgagccacggccacggccgcatagaactagacagtacggatggtgcca

SEQ ID NO: 130193 - DNA, 100 bp, Homo sapiens
tgcaggaaaacaagttcagggctcccactgattctacattatgtctgttcggcacttgaagtactccttgtttaagaaatcactactgggcagtgtttcg

SEQ ID NO: 130194 - DNA, 87 bp, Homo sapiens
tgattatggtggcccacttttcctcctgccaggatgctgaaaacgccattcaacagatgggtggccagtggcttggtggaagacaaa

SEQ ID NO: 130195 - DNA, 100 bp, Homo sapiens
gggacaacattcagacccatttccagtcatgagacccactgatctcagcatgaagagacaattggcgactagctcaggatcctccagcagctcaaactcc

SEQ ID NO: 130196 - DNA, 74 bp, Homo sapiens
ttactcgggagctggctgaagatggctactctggagttgagtgaacctccttggcctgggcgaagctgtgtgga

SEQ ID NO: 130197 - DNA, 50 bp, Homo sapiens
actatgtgttctctgcccgtaattgaaactactaaagttcctggggaagc

SEQ ID NO: 130198 - DNA, 75 bp, Homo sapiens
tgcatgcgtcgtcggcctctgggcagcagttactccacaggatccgctgaacataggatgttgccacaaaatcta

SEQ ID NO: 130199 - DNA, 98 bp, Homo sapiens
ctacttgctaaagagaagaattttggtttgggataaatttatgtggatcttcgctttggtgccataaaggcccgcagcccgagtgtcgccgccatggc

SEQ ID NO: 130200 - DNA, 98 bp, Homo sapiens
gctgaactgagcgtatgtgccacgccgcccaggagacccctctgctgcaccacttcatggaactctgcgaccttcaagtcgtttgaggaccgagttgg

SEQ ID NO: 130201 - DNA, 82 bp, Homo sapiens
ccgggccctcgagacggggacgatgaaggtcaccgtgtccaaagggggcgaccgggacagtgacgacgacagcgtcctcgaa

SEQ ID NO: 130202 - DNA, 75 bp, Homo sapiens
tcggtgtcgtggcctcgcagatggggaaagttgctcagacagcttgcatgtcagcctgccagcatctgtcaacat

SEQ ID NO: 130203 - DNA, 98 bp, Homo sapiens
tgggagccatcacgcccagctagccatcttctaattttcattccttcaaaggtgaaatgacaatggatgctctgttggctcgattgaaacttctgaat

SEQ ID NO: 130204 - DNA, 50 bp, Homo sapiens
cgaagcttcacaaaagatgtctaaggcaatcgaaaatatcgacaccttaa

SEQ ID NO: 130205 - DNA, 100 bp, Homo sapiens
ggagagcggcgaagaagcggtgacccttgtggaggatatgcagagagagcttgggagactgagacaacagaaggggaaactgaggcccaaggaaattgag

SEQ ID NO: 130206 - DNA, 90 bp, Homo sapiens
ctggccttgttactagagaccctgaatggcagccaggaggtagaagaggatgatccagtgcctgagatccgtcgagatcactttgaagaa

SEQ ID NO: 130207 - DNA, 82 bp, Homo sapiens
gcgagcgcgagcggcgcgagaaagcatgtcgggccccaggcctgtggtgctgagcgggccttcgggagctgggaagagcacc

SEQ ID NO: 130208 - DNA, 75 bp, Homo sapiens
cctggcgctgacaagggtccagcctccgattgcccccagagtgagctggatgctgaaactgtgaagagcattctg

SEQ ID NO: 130209 - DNA, 83 bp, Homo sapiens
cgggcgagaagccctacgagtgcaacatctgcaaggtccgcttcaccagatattaataaggcagcggaaagaagaaatatgaa

SEQ ID NO: 130210 - DNA, 75 bp, Homo sapiens
gaaagactgttccaaaaacagtggataattttgtggccttagctacaggagagtgcacgtggtgattgctacccc

SEQ ID NO: 130211 - DNA, 80 bp, Homo sapiens
ctcaagtccttcagataaaaaggcttctcacggcattcagcagcagcgttgctgtaaccgacaaagacaccttcgaatta

SEQ ID NO: 130212 - DNA, 90 bp, Homo sapiens
cctacattagcgtctacgaccaccaaggtacaacaaataacactgtgactccaacctcacaacctgtgcgaaagtctacctttgatgcag

SEQ ID NO: 130213 - DNA, 82 bp, Homo sapiens
gcggtggtggcgggtggaggttcgagcgctgttctcgctccggagccgctgcacatttcgattgagaggatccagaatccag

SEQ ID NO: 130214 - DNA, 87 bp, Homo sapiens
aacccgaagaagaaaggattcgttacagccagagattgggtcagtgctgcttgcccatttaataaagctggacagcatccaagtcag

SEQ ID NO: 130215 - DNA, 96 bp, Homo sapiens
ccttgctgatcagtggtgggctattgatgatattgtgaaaacatctgttccttcaagagaggggcttaagcagattagtgatgatgaaccaggtta

SEQ ID NO: 130216 - DNA, 100 bp, Homo sapiens
gttaaagggagaaaacaccagcaagccgtgagagagaataccagcatccaggggcgtgaactgtcagatgaagaagtgggggcagtacccaaaggaaacg

SEQ ID NO: 130217 - DNA, 50 bp, Homo sapiens
cgacgacatggcctccgctatgaaggcgatgggactgagtatgggctgag

SEQ ID NO: 130218 - DNA, 100 bp, Homo sapiens
gcgatccagtgcttagttccgtcatatccctctccacgacctcggtcgagcatgttcaccagggcccagtgaagaatgcaaattgcacatcagattttga

SEQ ID NO: 130219 - DNA, 51 bp, Homo sapiens
caggattcatctccagagaagaaggtgaagataaatttggacagcgggcat

SEQ ID NO: 130220 - DNA, 105 bp, Homo sapiens
tttttgaaagtttagaagcgaacttactgtgggaaaaatcctgggtagaagctggatcagcaagaatgtcactccttatattggtgtccattttcttatctgcag

SEQ ID NO: 130221 - DNA, 90 bp, Homo sapiens
gactccagtgatgacgcaggccttaaggagaaagtttcaggccgttaattaaggaaaagttgagccagggcgtgaccctcgtcgtggaca

SEQ ID NO: 130222 - DNA, 80 bp, Homo sapiens
gggagattcagccgtgaagcaagtgcagatagatggccttttttcagataactattatcgtgcagaaatgattgatgccc

SEQ ID NO: 130223 - DNA, 80 bp, Homo sapiens
ggctccgggtcttccagagcgtgaagatcaagatcgatggtcagtaggacagaaggtaacattgatgactcgctcattgg

SEQ ID NO: 130224 - DNA, 75 bp, Homo sapiens
agaaaaggcctaagaattttggcattggggaaactgactctactctgtgatgccaagacagatgggagtttcctt

SEQ ID NO: 130225 - DNA, 75 bp, Homo sapiens
agtgtggcaaccagatcggtgccaagtcacctgtgtgccgcccgcctgtggtcctgggagcccgaggccagcccg

SEQ ID NO: 130226 - DNA, 100 bp, Homo sapiens
cacgaatgggaagccaagtgccatcttcaaaatttcaggtcttaaatctgctaagatatcaacatggactagggactccagacttgcggcaaacccttcc

SEQ ID NO: 130227 - DNA, 99 bp, Homo sapiens
cccagctcagaaagggagcctctgcgactcattcatcgccctccagaaaaagcttgagtctccacccccatctaccaatcccttcctggaagatgagcc

SEQ ID NO: 130228 - DNA, 101 bp, Homo sapiens
ggtatttcaaatgaccaccatgttgcaaaaggttggcaaaagcagcttttgatgatgcaattgcagaactggatacgctgagtgaagaaagctataaggac

SEQ ID NO: 130229 - DNA, 80 bp, Homo sapiens
gtccgagtcaacaaccgcttcgagctggctccataaaaatacagactcaccagttcctgctttgatgtgacatgtgactc

SEQ ID NO: 130230 - DNA, 100 bp, Homo sapiens
gaagatggatatactcaattacacttcgactctcaaagcaataccaggatagctgttgtttcagagaaaggtggcctccatgaaccagcgccgtgtggat

SEQ ID NO: 130231 - DNA, 100 bp, Homo sapiens
ctgaaggaaagcggaatcgatctgacaccgagcaggagaccaggcacctggatgagatgaagtcggccatgcggaaaggccacaacctgctgaagaagaa

SEQ ID NO: 130232 - DNA, 83 bp, Homo sapiens
ctccactccgtcccccgcgggtctgctctgtgtgccatggacggggtttgccttcccggattgggcctacaagccagagtcgt

SEQ ID NO: 130233 - DNA, 96 bp, Homo sapiens
tcccctggcgctacccggacatctctcagggtgccggcaccatgaagatctggacttcggagcacgtctttgaatgcctcctgcttggattctgag

SEQ ID NO: 130234 - DNA, 98 bp, Homo sapiens
ggatccggtgtgattaaagctggttttgctggtgatcagatccccaaatactgctttccaaactatggaagacaagcattccagtgatgccagtagtt

SEQ ID NO: 130235 - DNA, 100 bp, Homo sapiens
ccagacaagctgaaggaccacaggaagatgagaagtttttgtctgaagtttttgcacaattaacagatgaggctacagatgatgataaacggcgtgaatt

SEQ ID NO: 130236 - DNA, 100 bp, Homo sapiens
gtactatttaattatgaggagagaactcagcgacactacctgggccatacagactgtgtgaaatggaggagatgttaaagtaacccatcttgcaggacga

SEQ ID NO: 130237 - DNA, 126 bp, Homo sapiens
gactgttagagggatccgtggagaggaggccaggacacctggaagccgggaaatgataagccatcaccaaactcagaaaatgaacaaaattctgttaccctggaagtcctgcttgtgaaagtttgc

SEQ ID NO: 130238 - DNA, 74 bp, Homo sapiens
cctgatttaaaatcagctaatgttgataagcaatacaaatcggtaacaaaaccaaagccactaagtcaagctga

SEQ ID NO: 130239 - DNA, 100 bp, Homo sapiens
acctgcgtcctttttcgtttttcggatgatgccttcaatactacctttatttccaccataggtgctagaacagacttaagaaacattgagaagaagctgg

SEQ ID NO: 130240 - DNA, 100 bp, Homo sapiens
gagtatgcctacagcgacaacagcctggaccccggtgcggccggccggacggacctactacgactgcgcagacggtttatgagggaccaggagaagctca

SEQ ID NO: 130241 - DNA, 97 bp, Homo sapiens
ccgggatcgagctgagaatagggacggccccaaggtgtggatgaggtcaccattgtcaacattttgaccaaccgcagcaatgcacagagacaggata

SEQ ID NO: 130242 - DNA, 89 bp, Homo sapiens
gtcgtctcccttcagtcgccatcatgattatctaccgggacctcatcagccacaatgcagatcttcgtgaagactctgactggtaagac

SEQ ID NO: 130243 - DNA, 98 bp, Homo sapiens
gaaaaattcggcggcttatgggaaaaccacggagttacatggacacagaacagtatgaagaagcagtacgagactatgaaaaagtataccagacagag

SEQ ID NO: 130244 - DNA, 50 bp, Homo sapiens
atcatgaattcccaagaaggagtcttctcacaagactttcaggattaagc

SEQ ID NO: 130245 - DNA, 90 bp, Homo sapiens
gcactgtgccttaacagaaggtcttgagattctaagtgggaatcatttcagcttcagttgtggagggccaaaagggtatcattcttcgag

SEQ ID NO: 130246 - DNA, 71 bp, Homo sapiens
aggatcttacgatggagttttgccccaaagtggaactcacccaaatgtctatcgtctgctgaatggataag

SEQ ID NO: 130247 - DNA, 82 bp, Homo sapiens
gcccgccgtctacccgtggccgctgccggtctaccggggatctgacgagcttttctctacttgtgtcactaacggaccgttt

SEQ ID NO: 130248 - DNA, 100 bp, Homo sapiens
ctgcagtacctgcagaaggtctctggagacatcttcagcaggctgagtcatcactagagagtgggaagggcagcagcagcagagaatccaaaccctaaag

SEQ ID NO: 130249 - DNA, 82 bp, Homo sapiens
gcagacggtgcccggcgcccacgggttttgtaccaatggctagaagcagatcgtcatggcaagagccaaggtgctgcaaata

SEQ ID NO: 130250 - DNA, 98 bp, Homo sapiens
ccccgaccccaagctctgccacgaaggtgccaccggacacagaatttccaggtgttgtggtgcgaccaattggtgaatttcgtagttccatagattac

SEQ ID NO: 130251 - DNA, 100 bp, Homo sapiens
ctcggacaagtacttcgacgaacactacgagtaccgccagagtcacagcggaaggagtttgcagagaagctggagtccctgctgcaccgtgcctaccacc

SEQ ID NO: 130252 - DNA, 100 bp, Homo sapiens
ccccagctccgtctcggcggcggcgggtgtcgtgaaaactacccctaaaagccaaaatgggaaaggaaaagactcatatcaacattgtcgtcattggaca

SEQ ID NO: 130253 - DNA, 100 bp, Homo sapiens
agccggctgcaggccagagagggcctcgggaagagatgcgaggatgacaaggtattttcagtgtcaacccaaatatggcttgttcgctcctgtccacaaa

SEQ ID NO: 130254 - DNA, 83 bp, Homo sapiens
tggtggcatccagtggtggccagtagaggaggaggtgaacaaggaggaggccagctccaaggacacaggtcagttgtatgcag

SEQ ID NO: 130255 - DNA, 100 bp, Homo sapiens
ggccaatgtgggatcgatgtttcaatattggaagcgctttgatttacagcagctgcaggttggtgttcgaggaagagacattgttgttcttggtgtggag

SEQ ID NO: 130256 - DNA, 75 bp, Homo sapiens
cggttttcttatgcttataagagtggaacagtaagactttgaccccgacgcaggcttcagtgattgccgcggatc

SEQ ID NO: 130257 - DNA, 100 bp, Homo sapiens
tttgatccagaacttgcagcaacaatagaaagctgtatacctgcacaagtggtggctgccattgatgtcaacactgtcgctaatgaagtatacaagtata

SEQ ID NO: 130258 - DNA, 78 bp, Homo sapiens
ggagccctgcatatgattggctctttagctgaaatacttctgaaggttcttttgaacatccatgataatgaagtcatt

SEQ ID NO: 130259 - DNA, 75 bp, Homo sapiens
ttggaagatgattcagatgaagaagaggacttttttcttgacagctggagtatcagccttggaagtatatacgcc

SEQ ID NO: 130260 - DNA, 82 bp, Homo sapiens
ttgggtgaactctagcaattacaagcttcctgcctgacacagctcacttcaagaagtgcacaatgtcagaacgtggaattaa

SEQ ID NO: 130261 - DNA, 51 bp, Homo sapiens
cgcactcctccgcatccctctttaacacatccagcagattcagtgctgttt

SEQ ID NO: 130262 - DNA, 100 bp, Homo sapiens
gaatattaaggctctccgtacagacaatgagtccctggaacgccagatgcgtgaaatggaagagaactttgccgttgaagctgctaactaccaagacact

SEQ ID NO: 130263 - DNA, 90 bp, Homo sapiens
agccgcccgcgggccagcgcaccggtcccccagcggcagccgagcccgcccgcgcgccggactcagcgaatgctctctacaccaaatgcc

SEQ ID NO: 130264 - DNA, 83 bp, Homo sapiens
ctcgagaaagtcctctcgggagaagcagcgcctgttcccggggcagatccaggttcaggtacatggtgcgggtccgagctgtg

SEQ ID NO: 130265 - DNA, 100 bp, Homo sapiens
cgccatcttggatccgcgggacaagaaaattcatgcggagagagctctgttagcagaatgaaaaaattggaagccagattcagggagggactggaagcaa

SEQ ID NO: 130266 - DNA, 89 bp, Homo sapiens
ggcctacgtgaacaacctgaacgtcaccgaggagaagtaccaggaggcgttggccaaggatgaagactggcccatttgcagagcactcc

SEQ ID NO: 130267 - DNA, 50 bp, Homo sapiens
tggtgtgcatgacactcctggaaaacaggagtccaatgtgctgattgctg

SEQ ID NO: 130268 - DNA, 90 bp, Homo sapiens
atctggaggacggagaggacctgttcaccagcactgtctccaccctagaggtgttttcacagtcctgtgtttggtatggagagtgtggaa

SEQ ID NO: 130269 - DNA, 80 bp, Homo sapiens
atgaagacatagctgtgaagctgggaactgatctagaatagacactgcccatctctaagataagaacctggaaaggggac

SEQ ID NO: 130270 - DNA, 75 bp, Homo sapiens
ggaaatcgggctgaagcgactgagtccgcgatggagagatcctgaaggagctagacgagtgctacgagcgcttca

SEQ ID NO: 130271 - DNA, 90 bp, Homo sapiens
cttttttgaagccatccgcagaaggggagacacattttatgttgtgtcatttcgaaggaaagccttgagccgggccatgcttctcacatc

SEQ ID NO: 130272 - DNA, 98 bp, Homo sapiens
aatgtctcttttgactactattattttcttcttataaccatggcatcatatataccttgcgcattctacattctaaaggggagctcagtgaagataga

SEQ ID NO: 130273 - DNA, 97 bp, Homo sapiens
ggtaagaatgattgatgttggctgatattggagtgctcattcacatgaataaaatgtttattggaggcttgagctgggatacaagcaaaaaagatct

SEQ ID NO: 130274 - DNA, 100 bp, Homo sapiens
gacgttgctggagttcttgaagagagataaagacagggatgatcgttcttttggccgtgatagaaatcgggattctgacaaaacagatacagactggagg

SEQ ID NO: 130275 - DNA, 90 bp, Homo sapiens
caggcttcgggcccgggaatcgccgccgccgccgccgcagagctgcagctcggggccgaggaactgacactggggctgcgggcgcccccg

SEQ ID NO: 130276 - DNA, 96 bp, Homo sapiens
acgcagctggctggcttcagtggaccaattcagccatccctgtggaaagtgacaccgatgatgaaggagcacctcgaattagtctggctgagatgc

SEQ ID NO: 130277 - DNA, 83 bp, Homo sapiens
cgtgtccttgtaccctggctacaacttcagggcagctgcaatgactctccgcacggtattattgtcattgcaagcactattgg

SEQ ID NO: 130278 - DNA, 99 bp, Homo sapiens
cagaacaggaggtggtagagggcatggatatctctactcgctccaaagtgccggtggtggtgtgcacattgagccccggtatagacagttcccccagct

SEQ ID NO: 130279 - DNA, 99 bp, Homo sapiens
ggacatccataaaaattcatcagagagcattttactactgagctgcaaagaaccagaagagtgtgttaattgcacagatgaatgccgagtgcttggtca

SEQ ID NO: 130280 - DNA, 74 bp, Homo sapiens
aaccaaagcttcaagttcttggaacaaattctaatgagcatgttgattacgtagatgttggtggagcttatgtg

SEQ ID NO: 130281 - DNA, 97 bp, Homo sapiens
atgcgctcgggctggaccagcaggaattatccagactgccttgccactagatgaatggaagacaatgatttgaactaagggccagcaaagaattatc

SEQ ID NO: 130282 - DNA, 50 bp, Homo sapiens
cccgaagaagactcccccacatctgggtccaaacactgcagtttcatcca

SEQ ID NO: 130283 - DNA, 76 bp, Homo sapiens
tcagcaagaacgggaacaaaactctgatctaagctggaaccagaaccaaatacaaagacaagagaatccacatctt

SEQ ID NO: 130284 - DNA, 100 bp, Homo sapiens
accacctgaacaacagcacactgaaggaggctcagttcaaagacctgttcttaaaaaaagtcttattgttacaggtatcgctgtgctgctcggagccaga

SEQ ID NO: 130285 - DNA, 74 bp, Homo sapiens
gggcgcagagcgcgggaggcggcggcggcgcggagcccaggtactctttgagcacatcaaattcttccattgcc

SEQ ID NO: 130286 - DNA, 75 bp, Homo sapiens
ctgcgagacgccttcacctggaacatgaatggacaaccctccatatgataagggagccttcagaatcgaaatcaa

SEQ ID NO: 130287 - DNA, 99 bp, Homo sapiens
tggcgaccaagcggctcgcgcggcttatcaggagggcagacttcaaaagctactaaaaatgaacggccctgaagatcttcccaagtcctatgactatga

SEQ ID NO: 130288 - DNA, 51 bp, Homo sapiens
tcaatccagttccaaggactccacggggtcctgggaactccaacaagggag

SEQ ID NO: 130289 - DNA, 50 bp, Homo sapiens
accacacctgtgtggccttcgcctggagccctgaggatgatgacaggaag

SEQ ID NO: 130290 - DNA, 108 bp, Homo sapiens
gttgaagttggagaagtatccaatagggatattgtagaaactgtctttaacctgtatttgactacagtcattccttatgagaaaaaaaacggaccaccgtctgttgaa

SEQ ID NO: 130291 - DNA, 100 bp, Homo sapiens
agaccagcagagaccggaaggatcacatgggcggcgactggcggcgcgatggacctgaccgggctcctgctggacgaagaaggcaccttctccctcgccg

SEQ ID NO: 130292 - DNA, 98 bp, Homo sapiens
agatttgctgggtatgaataatgactttcctccaagagcacattgcctggtaagatgatatcattaacggagctcaagaaaaatgtgtattgcctcct

SEQ ID NO: 130293 - DNA, 101 bp, Homo sapiens
ggagcccatgcagtccgactccgaggacggggaggaggaggaggcggcgcccgcggacgcaggggcgttcaatgatagctttccaatgattagacgaattg

SEQ ID NO: 130294 - DNA, 100 bp, Homo sapiens
cctttctccagacccttgcgatgctcctgatcgggacagtgtctttccacctttggatccgcagaaatcgaggtgtgttcatcctcgaggtggtgtgatt

SEQ ID NO: 130295 - DNA, 97 bp, Homo sapiens
gatgcaatcaaagctcgacttctcaatcccaagtggccaaaggatagtgacaacctctggtgggacgcctttgccactgaattttttgaagatgacg

SEQ ID NO: 130296 - DNA, 100 bp, Homo sapiens
cacccagtacgagcgggagaaggcgctgcgcaagcacgctgaggagacaattggaaccaagccagttgctcatattgaccaatttactgctgacatgctg

SEQ ID NO: 130297 - DNA, 83 bp, Homo sapiens
ctggagccttccctcctcttcccagcaggccaggaatttagtggttatgttcaacaagtaaaatatgcaatgacaagaataaa

SEQ ID NO: 130298 - DNA, 98 bp, Homo sapiens
gaggcggcagcggcgggcctgaggcgaaggagcggccgggagcccgccgcgctggtagcgatcgggagcggtgccgagaaaaatttccttactagatg

SEQ ID NO: 130299 - DNA, 78 bp, Homo sapiens
ccgggagttcaagaagaacactccagagggtcctaacctgattataaaacaaccagatgagttgctggacagcatgtc

SEQ ID NO: 130300 - DNA, 50 bp, Homo sapiens
agacaacaggatcgtctcgtccaagacttttggaacagcgatcgtaatca

SEQ ID NO: 130301 - DNA, 100 bp, Homo sapiens
cctgtttgcagggaagccccacttgaaggaagaagtctaagagtgaagtaggtgtgctgtgtgtgaggcgcctgccatggtgatggccgtgcacagccag

SEQ ID NO: 130302 - DNA, 50 bp, Homo sapiens
cctagcgtcctggaattacttcaatcaacgggtatttctgtgggacttgg

SEQ ID NO: 130303 - DNA, 107 bp, Homo sapiens
tttcctgatctcatgatgtgcttacctgagattcgatatattgcaggcggacgccgcgggcatggactattcgtacgacgaggacctggacgagctgtgccccgtgt

SEQ ID NO: 130304 - DNA, 83 bp, Homo sapiens
ctcccgcgcgtgctgcgggtctgctcgggggtctacttcgaggaagcgccaagaaccagaaccagaacagccacccagaccag

SEQ ID NO: 130305 - DNA, 82 bp, Homo sapiens
tccatccggcgctcagctgggcttgaggagtatgctgctgctgttccgctttgcgtcctcgctacaaacgcctggtggacaa

SEQ ID NO: 130306 - DNA, 98 bp, Homo sapiens
gctgaggctgagtctcagtgttgccctgttcagtctgagtaaccctccactgagtgaagaaatgttgcctcctggagagtggatgtgtcaccggtgca

SEQ ID NO: 130307 - DNA, 74 bp, Homo sapiens
acagccccaccccgctggagagcaggctgggttacatgtctgccagctcgtgtgggcgctcgtccacaaacact

SEQ ID NO: 130308 - DNA, 83 bp, Homo sapiens
cagagacaattatgacaactgaaatgagacatgcacataatataggggactcgggcaagggtgccgaagatagacaagaggca

SEQ ID NO: 130309 - DNA, 90 bp, Homo sapiens
aaaagaaccagatgtcaaaactgatttcagaaatgcatagttttatccagcctgaacagaaacagatggtggcccagcaggaatctatca

SEQ ID NO: 130310 - DNA, 83 bp, Homo sapiens
ccagcatcaagatgatttatggtaataaggacagagcgggatgccaccagcttgtccaaagggaagttccaggagctcctggt

SEQ ID NO: 130311 - DNA, 50 bp, Homo sapiens
ggcatccgtaaccacaaggaggacgagaaaactttagaaactgttccttt

SEQ ID NO: 130312 - DNA, 100 bp, Homo sapiens
atgaagaagcagtcaaaaagatgcttgtggaagccacccgggagtttgaggaggttgtggatatgtcgttattgatccagctcaactttatgtatatgag

SEQ ID NO: 130313 - DNA, 97 bp, Homo sapiens
accgctgtcacctgcacggtgtggctggcggcctacggactcttcaccctctgcgagcctgaagagttgagagaaatcattgagaagacaagagaga

SEQ ID NO: 130314 - DNA, 104 bp, Homo sapiens
cgagttcctcggcggctgcaggatgggggactccaaagtgaaagtggcggtgcggatacgacccatgaaccggcgagggcatccgcttcgatcctgaaattccg

SEQ ID NO: 130315 - DNA, 109 bp, Homo sapiens
atgaggaaactgaggcctggagaggttaaagagacccgttcagagtcctacagtggcagcaccacaccccactctggccggagcacgccaagcagctccccatcgctcc

SEQ ID NO: 130316 - DNA, 97 bp, Homo sapiens
gggtggtctggagaccatggagaccctcacggagctgggcgacgagctgaccctgggagacatcgacgatgctgttgatggagtaatgaatggtgaa

SEQ ID NO: 130317 - DNA, 75 bp, Homo sapiens
gtggtctccaggtttccctattacaactccctcaaggactgcctttcctgtgcacagccagagaacaacacatca

SEQ ID NO: 130318 - DNA, 90 bp, Homo sapiens
caagaagcggaagtatgagttggggcgcccagctgccaacaccaaggtaagaaacgttttcactatgactgcgaaagagggaagaaagaa

SEQ ID NO: 130319 - DNA, 82 bp, Homo sapiens
cgccaccatgcccaagagaaagctgcagagaaagtaccctgggccatgcagctgcactcccctcccaggaaaggggcaggat

SEQ ID NO: 130320 - DNA, 100 bp, Homo sapiens
aaaacccagaacagaagatcattaagagagtgattgctcttgaaggagatattgtcaggccggagcctcaacagaaagctcctttagttcctcctcctcc

SEQ ID NO: 130321 - DNA, 97 bp, Homo sapiens
ataaagagttctgattcccagaggtcttcaagaaagtttaggtgaggggataagagtggctacattttcaaagtcagtgaaagtagagcattcgaga

SEQ ID NO: 130322 - DNA, 114 bp, Homo sapiens
tgacaatgcagtttattagtcatcagttccctgattatcatgaccctactatagataatcctgatttgctgagccatgtcacagtgggtattagagttctggatgtcaatgaca

SEQ ID NO: 130323 - DNA, 100 bp, Homo sapiens
acccagaggagcaatgatgtagccacctcctaaccttcccttcttgaacccccagctatgacttcacacctatggattcttctgcagtttatgtgttaag

SEQ ID NO: 130324 - DNA, 75 bp, Homo sapiens
cgccgaggtgacaagctgcgcacctggaaagttacccggctgtctggtgagctaagatatcaacatggactaggg

SEQ ID NO: 130325 - DNA, 87 bp, Homo sapiens
caagaaaatcttcgaagacttttcaaacaaatgccctgaggtagaggagttggtcttcagccattttgtgatctgtaatgacacaca

SEQ ID NO: 130326 - DNA, 100 bp, Homo sapiens
tgccattgatgtgaagaaggtgtctgtggaagactttcttactgacctgaataacttcagaaccacattcatgacaccagagaagcctatgatgacaagc

SEQ ID NO: 130327 - DNA, 83 bp, Homo sapiens
tcgctcggctgcgggaaatcgggctgaagcgactgagtccgcgatggagagtttacagatgcttcctcagcaacggaaagcca

SEQ ID NO: 130328 - DNA, 51 bp, Homo sapiens
cgtctccttaacaccgaacaccgtaagaatgattgatgttggctgatattg

SEQ ID NO: 130329 - DNA, 99 bp, Homo sapiens
tggaggctttgaagtcaacaagaataattccttccatatcaacatgaggaattggattcaagtacgtggctctgggagacctcatcatcctcatcactt

SEQ ID NO: 130330 - DNA, 83 bp, Homo sapiens
ggagaggcgagctcgcgatgagtggtctcggcaggctcttcgggaaggaaggaccctctattgtcccaggcctgtgttggctg

SEQ ID NO: 130331 - DNA, 83 bp, Homo sapiens
caccaccctcccagccacctctgaagttgccaggcttcccaacattcttgtctgtggatttttttcccaggaagccatcccgt

SEQ ID NO: 130332 - DNA, 50 bp, Homo sapiens
ttacacatctcacccaattcaggaagggaaaaggccgaggcatcagcgtg

SEQ ID NO: 130333 - DNA, 74 bp, Homo sapiens
atcgatagggatgcagaggatcagaaccggtacctggatggcatggtacatccagacactgaaggaccacaggc

SEQ ID NO: 130334 - DNA, 96 bp, Homo sapiens
gggccatggcgctgccatcccgaatcctgctttggaaacttgtgcttctgcagatccgccagttccttgggagtggggtcagccctgacttggcca

SEQ ID NO: 130335 - DNA, 75 bp, Homo sapiens
cgggagatcccaggcggtgacagagtggagccatggctagagacgccctgctggcggacttggagtctaccacct

SEQ ID NO: 130336 - DNA, 83 bp, Homo sapiens
aggggacaggaaagctccacaaacaggacctggaacatccagggagcgtctgggctgcaggccataaagaatgctgatgggag

SEQ ID NO: 130337 - DNA, 98 bp, Homo sapiens
gagaacagctattccacgagaggatccgcgagtgtatttgcctggtactggataggaacttcatggaatggagctaatgggccgtagggcaggtttga

SEQ ID NO: 130338 - DNA, 97 bp, Homo sapiens
aagcagttccagtcagcccctgccactgtgagaatgacacaaccatttcctacacagtttgcaccccagacgctctgctgttgcccgtattcaggag

SEQ ID NO: 130339 - DNA, 80 bp, Homo sapiens
cctgaattttacccttcaggttattcttccagttacacaataactggagtgccaaggctaaaagacgaaataccaccgga

SEQ ID NO: 130340 - DNA, 101 bp, Homo sapiens
gccggcaggctgagaaaagcgagaccgcgtgcgaggaccgggcagagcggcttgggtaaatccaccttaatcaacaccctcttcaaatccaaaatcagccg

SEQ ID NO: 130341 - DNA, 76 bp, Homo sapiens
ccgtgtccgccgcggccctgcgaggtccgaggggcagcaattccatttccgtgagggcgtttctagatgaagatga

SEQ ID NO: 130342 - DNA, 83 bp, Homo sapiens
tgacagatccgtagggaggacaccgtgacttcccggacgctgggaaatggagattacctggggcaattgatgttatcggtcag

SEQ ID NO: 130343 - DNA, 83 bp, Homo sapiens
gccgcttctagaccctactgcggtctcggatattgccgggtacaatgactcttcttgcttttcacctaagttgaataagcacc

SEQ ID NO: 130344 - DNA, 80 bp, Homo sapiens
ttgcagatctgcgacctgatccgccaaggggacacacactgtcggaaaaggtaacagaagatggaactcgaaatcccaat

SEQ ID NO: 130345 - DNA, 90 bp, Homo sapiens
actggcggagtctctctttccggattctgcctccctccgctaacctccgaaacaaatcattgtggaccccttgagcttcagcgaggagcg

SEQ ID NO: 130346 - DNA, 100 bp, Homo sapiens
gccgctgccgctgctgctggtgttagcgctcagtcaaggtgtcatggagaaactccagctgggcccagagattctgcagcgggaaaatccaaggcttatt

SEQ ID NO: 130347 - DNA, 100 bp, Homo sapiens
ccacgtaggcattcaccccagcaaggtctctaccttgacagacctccagccgtacatgcgacagttcgtggctcacctgcaggagaccagcccgctgagg

SEQ ID NO: 130348 - DNA, 88 bp, Homo sapiens
gctcaacgagctgctggaggacgagggccagctgacggagatggtgcagaagatggaggagcggaccgagaaagtcgttacgaggaag

SEQ ID NO: 130349 - DNA, 96 bp, Homo sapiens
actgacattgaggaaagaagcagctatgaagaccagggggttcagctttccaagacaaagaatgattacggacctgaagccaaagaacaagatgcg

SEQ ID NO: 130350 - DNA, 100 bp, Homo sapiens
gcggcgacagagcgagcgcggcgcggggccaccatgggggcccagctcagcacgcccatagtaaccagccagcttggcacagttaacaacatcattcaag

SEQ ID NO: 130351 - DNA, 140 bp, Homo sapiens
gcgagggcgcggctgcggggttcctggtgctgaggacggacgccattggagttcccgagaagagggtgatgagacaggagtgatggataatctgctggaggccttgcagtccggggctgccttccgcgacagaagaaaaa

SEQ ID NO: 130352 - DNA, 90 bp, Homo sapiens
ttcgtcgagagattcactatggaatcgtggtgccagtgaagaagaggacacatgaaggcttgctacccccagtggaaaatcatcccctcc

SEQ ID NO: 130353 - DNA, 100 bp, Homo sapiens
ggtacttcggttcaggcggaggcatccttaccaaggaatctgcttttcaagtatgccaccaacagtgaagagctccaagccctcagtgagcctcagccca

SEQ ID NO: 130354 - DNA, 98 bp, Homo sapiens
gcagcaagccgcacctggagaagctgaccctgggcatcacgcgcatcctagtggtcatctccatcagaggcaactgaaagtttcttatcaaaagaaat

SEQ ID NO: 130355 - DNA, 100 bp, Homo sapiens
gacctggtacatcgccgagttctgtattctaataggctctacaagtatgatcacaactttgtgaaagctatcaatgccattcagaagtcttggactgcaa

SEQ ID NO: 130356 - DNA, 90 bp, Homo sapiens
catcgctatgcaggtgcggaagctggtgggcactcagcaccctctgcttaccacagccaggttgcacagagcattgaggatcaccatcag

SEQ ID NO: 130357 - DNA, 100 bp, Homo sapiens
cacaccactgcctcgtgtggggttgttcgcccgtgaaggggcaggacagggtgcgcgctggtggaggctatgcccactggaagggccaagtgctgaattc

SEQ ID NO: 130358 - DNA, 74 bp, Homo sapiens
acgcggggtctcgcggcgcctggcagcagagaccaccagaagggtgttgacttcaaaatcaaaactgtagagct

SEQ ID NO: 130359 - DNA, 90 bp, Homo sapiens
atgtgctccgatgactggaagggtcactacgcaaatgttgcctgtgcccaactgggtttcccaaggatcaaccacaggtttgtctgctac

SEQ ID NO: 130360 - DNA, 87 bp, Homo sapiens
acaacaagtactgcgccgactgcgaggccaaaggaatttatgttgatgcagttaactccttgggccaaacagcactttttgttgcgg

SEQ ID NO: 130361 - DNA, 100 bp, Homo sapiens
atcttaactcagtggtcatcgctgtgaagctgcagtctatatcggcacaggatgaaaacctctcaaaaacaatgtttctgccccttgctgagagaatggt

SEQ ID NO: 130362 - DNA, 74 bp, Homo sapiens
aataacacaggagaatggataaggcaaaacggaggctgggttctgatggtcctttggctaccagcaaaccagtc

SEQ ID NO: 130363 - DNA, 98 bp, Homo sapiens
ttgggaataacatttcttggaattggactgtgggcatggaatgaaaaaaaaataaagcagttggagtgatgaagtcgggccatgtatttacaattgag

SEQ ID NO: 130364 - DNA, 53 bp, Homo sapiens
actgtcagtggatttcttcttagtcagaaccctatgtataattggagcccaga

SEQ ID NO: 130365 - DNA, 100 bp, Homo sapiens
gctgggtaacccagatcgctactaccccgcagttcccggacatgatcctctccgcctctcgaggtgatcatggaggaagcactttactcccaccaaatgt

SEQ ID NO: 130366 - DNA, 90 bp, Homo sapiens
gctcgtcaccaggacccaaggaaccaggtgtccgcaatgttgccagtgtctgtctgcagattggctacccaactgttgcatcagtacccc

SEQ ID NO: 130367 - DNA, 100 bp, Homo sapiens
taatctaaatggatgtagccgactcattattgcggcacagaaaactgaatctgtagataacgagggagaatgaattgtcatgaaaaattggggttgattt

SEQ ID NO: 130368 - DNA, 74 bp, Homo sapiens
gggcgcaagtcccagaagatgtcggagcccatagcaggccagctgcgggccgtccagcggctgtgccacttcta

SEQ ID NO: 130369 - DNA, 75 bp, Homo sapiens
gtccaagactgagaaatggatggaacgaatacacctcaatgtctctgaccccaccaacaactgaacgctttggtc

SEQ ID NO: 130370 - DNA, 96 bp, Homo sapiens
cccagagggacaacccactgctagcaccccagagagtgaggagtggagcagcagccagcctgatgcgtctgttactagagtggagagtctaccttc

SEQ ID NO: 130371 - DNA, 76 bp, Homo sapiens
agctgtggtgtcctctacaccatctgtggtcatgtcaacagtagcacaaggggtctgtcctccagcctcagcagat

SEQ ID NO: 130372 - DNA, 100 bp, Homo sapiens
tgggcatccactgccaaaatgcagctcttacagaaatgtgtcttgttgcatttggtaatttagcagaacttggcatccgtgtcattctggaccttactcc

SEQ ID NO: 130373 - DNA, 90 bp, Homo sapiens
gccaacacctggcctgcccgagcaagagcctggagctgcgcaagtggtttgtgcaagtttgcaaacatgttcaccctgtctcagacctcg

SEQ ID NO: 130374 - DNA, 101 bp, Homo sapiens
gtgtacgagctgtgcgaggtgatcggaaacaggagcattggtttgaaaaggccctacgagacaagaagggcttcatcatcaagcagatgaaggaggatggc

SEQ ID NO: 130375 - DNA, 101 bp, Homo sapiens
gtatccctgtctcagcgaagtggtgaaagagcatcaggtatgtttctataaaacctgataaccgaaaattggccaacggaacaaatgtcctcggcttactg

SEQ ID NO: 130376 - DNA, 97 bp, Homo sapiens
ccgaacccgcgatggaataatgcccagcggcccgccaggtcccggagcgatctctctttgagtcggcatggaagaaggagaaggacatcgtttccaa

SEQ ID NO: 130377 - DNA, 118 bp, Homo sapiens
gagctccggagaggaaccctccgaaggtgacttcagaactggagggttacacatcattttggaatgactgtatatcatctggattacgtggctgtatgttaattgaattagcattgag

SEQ ID NO: 130378 - DNA, 90 bp, Homo sapiens
cagaactgaacaaagacaacattgttcctggaacgccctctttttaaaaaagcagtgattccagcagtagttcaagtgatgattctccag

SEQ ID NO: 130379 - DNA, 100 bp, Homo sapiens
tcactgcatctatttagaaaatgggatgcaggattcaaggaagaaattagaccagatgagaagtcaagcatgccagatttcctggagaagctgcacatgg

SEQ ID NO: 130380 - DNA, 90 bp, Homo sapiens
cgttctgtgcctgaactcaaagatgcccttaaaaggcaagaaacctattggaattcgagacttaattaatgaagctttgcatcgagaaac

SEQ ID NO: 130381 - DNA, 83 bp, Homo sapiens
cgctgatctacaagaaaatccacaagaacgcactttcctcccagtcttcccgaggctgctgtccatgacactgagtccagatc

SEQ ID NO: 130382 - DNA, 51 bp, Homo sapiens
cgtccgacagccaggcccgggagaaatcatcaatgctgtggtactgttgat

SEQ ID NO: 130383 - DNA, 75 bp, Homo sapiens
gcggctgctggagataaaacctggcaaactcagctttcaccagacccaggtgtcccagcgcctggccaccgacct

SEQ ID NO: 130384 - DNA, 100 bp, Homo sapiens
atttcttcggcattctgcaacaggtccaggggcaagttcatcctactctcgagtctaatgatgatgctcttcagtatgttgaagaattaattttgcaatt

SEQ ID NO: 130385 - DNA, 100 bp, Homo sapiens
gagaaatggttggcccgggaaaaggcagcctggcatcctcgctacaacctcattgttgtgggccgatacccagatcctaatttcaaaagttgtacccctt

SEQ ID NO: 130386 - DNA, 100 bp, Homo sapiens
tttagttctggggagcgcctcgtcgacatgagtgatgtggaggaaaacaacttcgagggcagagttactataacaacagtaccaaggtggctgtgaaaac

SEQ ID NO: 130387 - DNA, 98 bp, Homo sapiens
ttctgaatctggtgatgaacttagcagcagctccactgaacagataagggtactttggaagttcgtcttatgggctgccaagatatcctagagaatgt

SEQ ID NO: 130388 - DNA, 71 bp, Homo sapiens
atgctccttctcctggagacgcaactcaaggttccttgcattgactccatggagagtatatcacctgattt

SEQ ID NO: 130389 - DNA, 95 bp, Homo sapiens
agaagtcattttaaactatggacgactccgaggaacattgaggtacctggactatgccagagtccccaatagcaatccccctgaatatgagttct

SEQ ID NO: 130390 - DNA, 75 bp, Homo sapiens
gacagtgccctgagggccttcgagagctaccgcgccagacaggattatatctgtccaagatgcgagtctggtttt

SEQ ID NO: 130391 - DNA, 100 bp, Homo sapiens
gtggcttaaactcttggcatttggctttgcctttctggacacagaagtatttgtgacaggatccaaggagctggttctgctggttggaccaaacctcgtg

SEQ ID NO: 130392 - DNA, 90 bp, Homo sapiens
ggcggagacgtgggcgccctccccgccaaggcccgtgcgagggtatgcagaagttggctagtcaatacctgaagagagattggcctggag

SEQ ID NO: 130393 - DNA, 75 bp, Homo sapiens
ctcatcctggttctggaatcctcagttcaagagcactacaaacaccactggtttcccgaaaagccgtccaagggc

SEQ ID NO: 130394 - DNA, 100 bp, Homo sapiens
ccgcgcccggcggcggcgggagcccaggagcctgccccgccctggggacgaagagctgcagctcctcctgtgcgggcacagatagatcattatctaggac

SEQ ID NO: 130395 - DNA, 100 bp, Homo sapiens
agtgtctcagaccttgccccaccacggaaagcccttttcacctaccccaaaggagctggagagatgttagaagaaaaactgcttaaggttgaaaagagaa

SEQ ID NO: 130396 - DNA, 100 bp, Homo sapiens
cgagcacctctccgcgcacatcactcccgagtggaggaagcaatacatccagtatgaggcacaacagcaacgccatgaaagagacttggccctcttgaaa

SEQ ID NO: 130397 - DNA, 49 bp, Homo sapiens
tctgctttgctgcatctaccttccctgattacagtggcgagatcttgaa

SEQ ID NO: 130398 - DNA, 96 bp, Homo sapiens
ccgagggcggcctgagcccggcgcaggtgaccggcgcgcgggagcgctacggccccaacgtctctgctttctatccgtcaagatgataaagtcgtg

SEQ ID NO: 130399 - DNA, 82 bp, Homo sapiens
tggaaaaagaagtccaagaagcaaaaaagggactgctaagaagataccaccagctgtatgcaggagctattcttgaagtttg

SEQ ID NO: 130400 - DNA, 108 bp, Homo sapiens
ggactatgctatgaatttatacaaggagaagcactggatccaaagcatgtctgcaacccagccattttcagagttacactgttagaccttatgatagccaagataacg

SEQ ID NO: 130401 - DNA, 83 bp, Homo sapiens
cggtgggtcctcgcttgcagttcagcgaccacgaccatggtgaatccgggcagcagctcgcagccgcccccggtgacggccgg

SEQ ID NO: 130402 - DNA, 87 bp, Homo sapiens
tggttgtacgagacgtggcctgtggcgctaaccacacggatcgaagagtcagaccaaggcccttatgccatcatcctggctcccacc

SEQ ID NO: 130403 - DNA, 96 bp, Homo sapiens
aacaagactgtccttcggacaagttttaggcttgcattgatgacaatgttgatatggtgaagtttctggtagaaaatggagcaaatattaatcaac

SEQ ID NO: 130404 - DNA, 88 bp, Homo sapiens
agagctctcacagatgaagcaggaactgctctataaagaacaaggctttgaaacattgcagcacagcaacccagctcatagatactac

SEQ ID NO: 130405 - DNA, 101 bp, Homo sapiens
ctcatgaattcgagcggctctcataaagatctggctggcaaacatccacgacagcgatggcagttccagcagcagccaccagagcctcaagagcacagcca

SEQ ID NO: 130406 - DNA, 100 bp, Homo sapiens
ttcgcattttggcattgacatttaattttagggtcctttatatagaagggagagtagaatggtagctgagtggaggttgtctcgaggtgttgaagaacag

SEQ ID NO: 130407 - DNA, 90 bp, Homo sapiens
aacaatgtagataaagataagccattatctgggggctatttgatgcatgaatttcataagttttggatcgaagaggaccccatggacata

SEQ ID NO: 130408 - DNA, 82 bp, Homo sapiens
ctggtgggccgcgtcgaagacatggaccagggctacggagactcggagccgtgggtcccgactgaacatcatcatcatcgct

SEQ ID NO: 130409 - DNA, 50 bp, Homo sapiens
ggaactcagacatctgcaaatcatgaaaagactgtatcttcaccattgac

SEQ ID NO: 130410 - DNA, 75 bp, Homo sapiens
gaagcaaagacctttgatcagctgacaccagaagagagcaaggaaaggcttggtgccggtggtggtgtgcacatt

SEQ ID NO: 130411 - DNA, 83 bp, Homo sapiens
agacggcctgggtgctggcgaagcggaggccggaggaatgtatcctgtcaggtataatgtcagtgaatggcaagaaagttctt

SEQ ID NO: 130412 - DNA, 76 bp, Homo sapiens
tgccctggctgccttgagaggtcacttctgcctttccagtgacaaaatggtgtgcgggtattcccctacatctcag

SEQ ID NO: 130413 - DNA, 100 bp, Homo sapiens
gtcttcggctagcaagttcaccagcatccctgcagccttctggtataccatcgtcaccatgacaacactaggaatctgtgtttgtggatatcctcgacaa

SEQ ID NO: 130414 - DNA, 82 bp, Homo sapiens
cgacgacctgtctcgccgagcgcacgccttgccgccgccccgcagcaattctgtggtgttcttggtcacacatttatggagt

SEQ ID NO: 130415 - DNA, 87 bp, Homo sapiens
tattttgattctgagcgtcaaacttgttatgcagcatataacagccagaaaggaaggtctcagcgcttgccagcagtctgggttccc

SEQ ID NO: 130416 - DNA, 75 bp, Homo sapiens
gatgatgttcctcccttagaccgagaagtaggagatcgtaaagctgaaaattgaaatcatgaaagtagacaggac

SEQ ID NO: 130417 - DNA, 96 bp, Homo sapiens
gagacgcggctgcctttccgccggggcatcgcgctgttggaaagcggctgcgtagacaacgtcctgcaagtcgggtacactcaactctgtgactgg

SEQ ID NO: 130418 - DNA, 88 bp, Homo sapiens
tggtttttcaacaagttggagtaagcatgcaatcgggtgtcgtagtcattcttcagcacaattcttaattggagaccaagaaccctgg

SEQ ID NO: 130419 - DNA, 100 bp, Homo sapiens
tgaggtcatcacggcgcgacgacgagctgcagttgtgggcaccttgtatgcggcgcatattaaatttcctattgactacccctattcaccacctaccttc

SEQ ID NO: 130420 - DNA, 75 bp, Homo sapiens
ctcgacgtgttgcagcacatcctcatccgagcctttgatttgagtgggaaagaccacagcaagattctttcattc

SEQ ID NO: 130421 - DNA, 74 bp, Homo sapiens
cgcagagcaaacatctttcaaaggttgaagacctcaatgccaagtggcagcgctacaacgccagcagggacgaa

SEQ ID NO: 130422 - DNA, 83 bp, Homo sapiens
attttcttctgcacttctgtctggagagagagcgcctgctcgctgtgcccccgggttatgacgacccccaataaaggaaacaa

SEQ ID NO: 130423 - DNA, 100 bp, Homo sapiens
tgagtagctgggagccatcacgcccagctagccatcttctaattttcattccttcaaagctggtcctatagtacccctcctcaggaatgtctccccagtg

SEQ ID NO: 130424 - DNA, 100 bp, Homo sapiens
accagttcctcggggtgcagcaggaagacaactgttagttttgtggcttactgctgctccacccagtgtctgcagacttttgacctgctgagttgataaa

SEQ ID NO: 130425 - DNA, 76 bp, Homo sapiens
aacgaagcgcttcttcacatgaagtacctccaggttcacccagttctccatggcaactcagtcctccagcagaccc

SEQ ID NO: 130426 - DNA, 84 bp, Homo sapiens
acagagcctcgcctttgccgatccgccgcccgtccacacccgccgccagtgcctccggagccagcgtggtggccatagacaaca

SEQ ID NO: 130427 - DNA, 51 bp, Homo sapiens
cctgtctcccggaggagcgcgcaccgtggccagaatggatttgtggccagg

SEQ ID NO: 130428 - DNA, 100 bp, Homo sapiens
tgggagataatgcccacttaagcatcattaatgaatatctttcccagtcctaccagaaattcaggttggatggcaagcatgtggtgtttggcaaagtgaa

SEQ ID NO: 130429 - DNA, 76 bp, Homo sapiens
caagagacgatcattctgcaagcaggcaacctgaatacaggtgaaactgaaattggctgtatcatctgaaacttca

SEQ ID NO: 130430 - DNA, 95 bp, Homo sapiens
agataccagatcatgtcagagagagagcttggttaacttgggagaaagtttcatctgtggatggagtattgcaacatctgaatgaattgatgacg

SEQ ID NO: 130431 - DNA, 119 bp, Homo sapiens
atgaaacctgggaaggtggtgcttgtcctggctggacgctactccggacgcaaagctgtcatcgtgaagactctgtccctacctgtggttgtcatcgtccacggcagccaggaccacaa

SEQ ID NO: 130432 - DNA, 100 bp, Homo sapiens
acagaaagtcagcctcttgtgatgcagcagcttttttatgagaattacgagcagaacaaaaaggggtacattagagatctccataacagtaaaattcacc

SEQ ID NO: 130433 - DNA, 100 bp, Homo sapiens
attacatagctggaaaggatcttacagccattcaacaaagacagttatggacttcgtgaatagcagtgataatgtcatctttgtacacaacacaattcat

SEQ ID NO: 130434 - DNA, 90 bp, Homo sapiens
cagacgaagacagtccctggatcaccgacagcacagacagaatccctgctaccagactttctgcagggcgactgcaccaaagcgaaacag

SEQ ID NO: 130435 - DNA, 51 bp, Homo sapiens
catggccgcagccgctctggggcagggaaatatgcagaggtgtaaacttgt

SEQ ID NO: 130436 - DNA, 88 bp, Homo sapiens
ctgaccactctggtgccttccataacaaatttgttcccgacaaggagttttctggttcagaccgtagacagagaggccgagaaggacc

SEQ ID NO: 130437 - DNA, 100 bp, Homo sapiens
tatcagaatctgtagcatcttctcaattggacagtacatctgtggacaaagcagtacctgaaacagaagatgtgcaggtgagctggagattggatcacag

SEQ ID NO: 130438 - DNA, 75 bp, Homo sapiens
gaagaactgagaatgttaagctttcagcagatgacgtggcgaacaaatagggatggcattcctactgtatttgtg

SEQ ID NO: 130439 - DNA, 100 bp, Homo sapiens
ggaagaggcgttgcggcgaaaggaacggctgaaggccctacgggagaaaaccgggcgcaaggttcagcagactgtacaggatctttttggcagagcccca

SEQ ID NO: 130440 - DNA, 83 bp, Homo sapiens
gtcggcgccggggttcggtggcctctagtgagatctggagatctattccagaggggagcttcaccacttcattgacggcttta

SEQ ID NO: 130441 - DNA, 83 bp, Homo sapiens
atttcctgcgctgttccacctcattcaacttcaggtataggactttcactaaccttggaccatatatttgccaggaagaatgt

SEQ ID NO: 130442 - DNA, 98 bp, Homo sapiens
gcgccatgtggagcaccgggtccgcgcgggcgacacgctgcagggcatcgcgctcaagtacggtgtcacggcatttggctttatgtcccgagttgccc

SEQ ID NO: 130443 - DNA, 100 bp, Homo sapiens
ggctcgtaagttggtgatcattgaaggagacttggaacgcacagaggaacgagctgagctggcagagtctttcagatgcttcatcaagatgaatcaaata

SEQ ID NO: 130444 - DNA, 97 bp, Homo sapiens
tggaagttcaacagaaggcaaatacgaagacgaggcaaagcacccagctttcttcactcttccggggtagaaatatttctgtcatggctcattcaaa

SEQ ID NO: 130445 - DNA, 75 bp, Homo sapiens
aaaactcagttactcaaactgaaacgtctcctgcatcagggtaaaccagacttgaatacaacattgccaattaga

SEQ ID NO: 130446 - DNA, 83 bp, Homo sapiens
ctgcctgtgtccctgaccatggctccctgcagtaccctttaacggcaactcagcatatctgccaccaaaaatgtaaagaggaa

SEQ ID NO: 130447 - DNA, 80 bp, Homo sapiens
ctcctggtgcgtggcccagcctcagaggcgtgatggtgggcatgggtcagaaggattcctatgtgggcgacgaggcccag

SEQ ID NO: 130448 - DNA, 90 bp, Homo sapiens
tggcatttcagtcactggtttgcagagtccaggttgcccccaagtttcctggcagtgtgtgatactgaggaggtgagcttgtttctggag

SEQ ID NO: 130449 - DNA, 75 bp, Homo sapiens
agcgcaagatcaccatccagaaccgtcttccgaccccgaactccaccggaggcaattgcactgtgtagccgtctg

SEQ ID NO: 130450 - DNA, 82 bp, Homo sapiens
ggggtagatcctaacttaatcaacaacctggaaacattctttgaattggattatcccaaatgagctggaacgtctgagcaat

SEQ ID NO: 130451 - DNA, 74 bp, Homo sapiens
acggtcggactcccgcggcgggaggagcctgttcccctgagatatgaggccccaggattcctggcgaggtcctc

SEQ ID NO: 130452 - DNA, 82 bp, Homo sapiens
ggacccaccgctgccctcagctccgagtccagggcgagggccggtcactccgcgcaagtttgggttcctgttttagaactgc

SEQ ID NO: 130453 - DNA, 100 bp, Homo sapiens
aggaatttccccgtaccgcagcccccgggcacgacctctcggacacggtgcaggcaggaattcgaatttagagtttaatttctcagagcattctctccag

SEQ ID NO: 130454 - DNA, 97 bp, Homo sapiens
caagaccatcactatgctggatgaacaaaaggttgctcaaaatgtggtaagcatgagtaaacatcatgtacagataaaagatgtaaatctggaggtt

SEQ ID NO: 130455 - DNA, 96 bp, Homo sapiens
ggcaaagcgaaattggtcattctcgctaacaactgcccagctttgagcatgttggcagataaattgaacatgactccagaagaagctgaaaggtgg

SEQ ID NO: 130456 - DNA, 83 bp, Homo sapiens
ggctgcaggcaccatggaccgagcccccacggagcagcgatgccctcctagctagccgtcacgggatggagggcttcatggac

SEQ ID NO: 130457 - DNA, 73 bp, Homo sapiens
agagatgtgatgttggagaactacagaaacctcgtctccctggctcctccatttacaacctacaaagataaaa

SEQ ID NO: 130458 - DNA, 100 bp, Homo sapiens
tgagccgagggctcgcactcttctggtctcccaggcccaacccacctgaagaacctatctacaagacctcttgtgctttgactattcatgctattggacg

SEQ ID NO: 130459 - DNA, 97 bp, Homo sapiens
gttcgcgtctctctgctgcggcgcggggaccgctgtgctctcggtcccattttcagtgcccaagatccccctggtattccgaggacacacccagcag

SEQ ID NO: 130460 - DNA, 100 bp, Homo sapiens
cacggtgaccttcgcttggtgtcctcctggcctcagcaacctgacaattctgtcgtgtcccgttaatatgatcctctgttgaagcaagaagacaaactgt

SEQ ID NO: 130461 - DNA, 75 bp, Homo sapiens
ggccattgaagacatcatcacagggggggccctcagcctcttggccttgaacgggctgttcatcttgattcacaa

SEQ ID NO: 130462 - DNA, 50 bp, Homo sapiens
tggtgacgctatcaactgcagagattgaatcaggaaacccaggcccaacg

SEQ ID NO: 130463 - DNA, 100 bp, Homo sapiens
ccatggcccctcggccccgcgcccgcccaggggtcgctgtcgcctgctgctggctcctcactggttgtccttctattcaggccactcttcgttttccatg

SEQ ID NO: 130464 - DNA, 100 bp, Homo sapiens
gcagctgcagaagtgaaccggcaaatgctgcaggaactggtgaacgcaggatgcgaccagagaccatttgtttgtgactatgaagggtgtggcaaggcct

SEQ ID NO: 130465 - DNA, 98 bp, Homo sapiens
gtaagtctgagcatcagtttaatattgacagcatggttcataaacatggtgtaatcctgagagattcacatggtgttgcacaagtacgttttgtgaca

SEQ ID NO: 130466 - DNA, 75 bp, Homo sapiens
aaaagctgccctgagacggtgtcccgccgaaagaccccttgttgaaatgggacagttggcagcggctctgatgag

SEQ ID NO: 130467 - DNA, 100 bp, Homo sapiens
aaaagcactagcaacttcaaagccgacggcctgtccggcactgctgaaggaagggaaaaggccgaggcatcagcgtgtgaagaccgcaaagacgatcccg

SEQ ID NO: 130468 - DNA, 50 bp, Homo sapiens
gctgaacattactcttccagaagaggtgactcctgcacctgcgccggctc

SEQ ID NO: 130469 - DNA, 100 bp, Homo sapiens
ccaggcagagcctgaggaagctgaagcagaggtttcccagaatccctgtaaccattcatccaggtgttgagaagatatgtagcagccgagcacccatctt

SEQ ID NO: 130470 - DNA, 50 bp, Homo sapiens
agctatcagaagaaaatcggcacctgagaacatggatgggtgcaaaaaag

SEQ ID NO: 130471 - DNA, 98 bp, Homo sapiens
gagccgcctctgcggctccaggagggcgcaggagcgggactgagagcgcctggaggctcgagcggagggctctagaccaagatagaacagcccttcag

SEQ ID NO: 130472 - DNA, 76 bp, Homo sapiens
cgattcttgtataaaaagttaccaagttacccggctgtatgtgaattcttacagcacaataacttgttatctatac

SEQ ID NO: 130473 - DNA, 100 bp, Homo sapiens
accagatcgtccagaggtatttgagcagcgagcagaattcatggggagatttccttttggataccatctcggggcttgtatttgatactgcaaaggaaga

SEQ ID NO: 130474 - DNA, 90 bp, Homo sapiens
tggaaatgaagtataataccaagaaagccccacttggagttaagtatgacattgacctgcccaacaagaaggtctgcattgaatctgagc

SEQ ID NO: 130475 - DNA, 100 bp, Homo sapiens
cgacagccggctcgggacccaactctgcgagccaggaggcaggtggaagtcatcataaagtttctgtttcacccgtcgtccatgttcgaggactctgtga

SEQ ID NO: 130476 - DNA, 100 bp, Homo sapiens
ggagcgtgtcctgaaggagttccaccaggccgggaagcccatcgggagcttactccacgggaacagcctctagataatctgagttgttgaaaatacgaag

SEQ ID NO: 130477 - DNA, 90 bp, Homo sapiens
cgtggctacggtcctcacggccggcgcttacctctgctacagggcattgaacctggccacatcccaggtaccgtgaacatccccttcaca

SEQ ID NO: 130478 - DNA, 98 bp, Homo sapiens
catggagtcctacgatgtgatcgccaaccagcctgtcgtgatcgacaacgtgtgggcccatcgctggatggatctgtcagaacacggctttgggctgg

SEQ ID NO: 130479 - DNA, 75 bp, Homo sapiens
ccgaaactgtcaagattggcaagatcttgcttctgaaatatctacctgggatggagtgatagtaacaccttcaga

SEQ ID NO: 130480 - DNA, 98 bp, Homo sapiens
gaccgctatgacatctctatccagcagctgcatttagttgcgctttcctgcctgcttctagcaagacagtactgcttttaaagagacagtgttaggga

SEQ ID NO: 130481 - DNA, 74 bp, Homo sapiens
ataagggcttaactcatatatttaacccccctccaaaaaggagtgcatccgccccaacccttttccccctcgtc

SEQ ID NO: 130482 - DNA, 99 bp, Homo sapiens
gaatcctgagagcccatttatgttttccttacatctcaatgaagcaagggactatgaaggtctagacaaactgaaaggcaataaatcctatgtgaacat

SEQ ID NO: 130483 - DNA, 98 bp, Homo sapiens
ttctctgaggcggcgagagatggtcaggtctggagctcgaccgggccaggtctaaagacattgccctcacagagtgaaatgatggcagaaatatctaa

SEQ ID NO: 130484 - DNA, 83 bp, Homo sapiens
gaaaagggtcctcctgctcacagtgtgaataacagtaatctcaggggcgatataatcaatgaggtggtcctaaagttgctcaa

SEQ ID NO: 130485 - DNA, 100 bp, Homo sapiens
ttattatatctgacagagctcatattggatgacgtagctttgccaaagacttagaagctaagcagaaaatgagcttaacatcctggtttttggtgagcag

SEQ ID NO: 130486 - DNA, 75 bp, Homo sapiens
aggaggcgaattttcagttgataggctatgtccaaactgggtcttcggcaggttacaggagttactagagtcact

SEQ ID NO: 130487 - DNA, 100 bp, Homo sapiens
acaagtccaggctgccttgcgccgtggggccactcagcaatccagctccaggtcccacaggggctcttcttccccacgaaaaagatcttattcaagttca

SEQ ID NO: 130488 - DNA, 98 bp, Homo sapiens
aggccctgatggaggggacggaggcaacggtggacacgtcattctgagagatggcctctccagaggagaagtgtcaacaagtcttggaacccccttat

SEQ ID NO: 130489 - DNA, 83 bp, Homo sapiens
cgttcatgatcctggccagcctgctcatcgcctactgcacatcacaggacatggccccctcagccacctagctggggcccatc

SEQ ID NO: 130490 - DNA, 101 bp, Homo sapiens
gcggttggcttcttccagcgaggagtggccaacttccagctggcaagctggactgtgctgctgccatctcggctcactgcaacctccctgcctgattctcc

SEQ ID NO: 130491 - DNA, 90 bp, Homo sapiens
gaaggtggcaagatggtgttggaaagcactatggtgtggagtttaccagctacttccaaagacatgacgaggtcctaacagaactggaaa

SEQ ID NO: 130492 - DNA, 76 bp, Homo sapiens
ccctcaacatcccggagcagctgccacaatgggacatgtgcaatcatctggggacctggagaatgatgagcaggca

SEQ ID NO: 130493 - DNA, 116 bp, Homo sapiens
cgaactcgcccggccgggagccgccgcgggcaggacgcgcgctgcagcatgcccagcctcttgcataggaagaagtggtaagctaaggagagaaatgcagggttcctagtacacca

SEQ ID NO: 130494 - DNA, 96 bp, Homo sapiens
gcggccggcacatcctctcggtgttcccgctggcggcgggcatcttcttcgtgaggctgctcttcgagcggatgaagcctgctgggagcgtgaatg

SEQ ID NO: 130495 - DNA, 75 bp, Homo sapiens
cttctacaaggaatttttaagtaaaaattttcagaagcacatgtattataacagcagcagccgctcttctaaaac

SEQ ID NO: 130496 - DNA, 75 bp, Homo sapiens
aacggacggaagaaaaggtctggccgtttgctaatccagactttacacaacctatctcagaagttgtagatgaag

SEQ ID NO: 130497 - DNA, 100 bp, Homo sapiens
ttttctaggtggaaagaatctgatgagccttttaggcctgttcagttggttcagcagtggccacaaatgcagaaatctgccatcaaggatgctgaggaag

SEQ ID NO: 130498 - DNA, 99 bp, Homo sapiens
gccgtgggtccgcgctgcttccacccaacttcctgttagggcttttaccaagatggcctcagctccggccagctatggcagcactaccactaaaccaat

SEQ ID NO: 130499 - DNA, 100 bp, Homo sapiens
gctgtgctcgctggcaccccgaacgggttgcttcccccgctgcgagtgggtaattccagaattgattggccataccattgtcactgtattactgctcatg

SEQ ID NO: 130500 - DNA, 74 bp, Homo sapiens
gtttctctcctgctaattcctgaagggagcatgattgatgccaacctgaaattgctgcaggaagctgagcaacg

SEQ ID NO: 130501 - DNA, 75 bp, Homo sapiens
cttggttccccctccctcagcttccgccccaaaagacctgcctgaccagtgcacgcccaacccctgcgataggaa

SEQ ID NO: 130502 - DNA, 82 bp, Homo sapiens
tagaaactcgctctaaagacggaaccgccacagcactcaaatgcctgaggaaacccagacccaagaccaaccgatggaggag

SEQ ID NO: 130503 - DNA, 73 bp, Homo sapiens
atctattcgactttttcagagactgggacttggagcagcagtggattgacttctaaggactcttggtacatga

SEQ ID NO: 130504 - DNA, 51 bp, Homo sapiens
gtgcagtactcggcaggaaattgatattaataaggcagcggaaagaagaaa

SEQ ID NO: 130505 - DNA, 87 bp, Homo sapiens
taaccccaaaatcagtgattctacatctcaagctcatattttgaagtgtttacggagcccacaggcggttttgtgagctgcttcccc

SEQ ID NO: 130506 - DNA, 100 bp, Homo sapiens
tgcaaggctcgcccctgcccggcgtggagggcgcggggggcgcggagtaacaattgctcgagcaattgaactaaaacatgctcctggactaattgctgca

SEQ ID NO: 130507 - DNA, 74 bp, Homo sapiens
ctcgaggcctcctgcactccgcccggacccccggccccgccgtggcatgatgccttcttctgtagagtgggcgc

SEQ ID NO: 130508 - DNA, 100 bp, Homo sapiens
aagctccgagaagaccggcggccaatcacagtccactttggacagtgagattacgtactataggtgaacttttagctcctgcagctccttttgacaagaa

SEQ ID NO: 130509 - DNA, 109 bp, Homo sapiens
cggttcttgggggactatgtggtggacttggacacgtcccagctctctctgggcatctggaaagggacaggagagagtggcaagagtacgtttatcaagcagatgagaa

SEQ ID NO: 130510 - DNA, 100 bp, Homo sapiens
cttgaccgagagcaggctggagcagccgcccaactcctggcgcgggatctgctgaggggtcacggggacacctgtgttcgtgcatgcgggcccttttgct

SEQ ID NO: 130511 - DNA, 75 bp, Homo sapiens
attgatttcccggatctggtaacatggcaaaagatgaatgtatcctgtcaggtataatgtcagtgaatggcaaga

SEQ ID NO: 130512 - DNA, 88 bp, Homo sapiens
gggtcaaccgctcttccatgaccttcttaacccgtcagcacacacatgccctcttggttctgtttctttgaagaaccccaggaaaaca

SEQ ID NO: 130513 - DNA, 50 bp, Homo sapiens
gaaagctttaggagttcacagtagacttgcagccaatacaggaagcaaac

SEQ ID NO: 130514 - DNA, 74 bp, Homo sapiens
tcagtgttgtgtggaagccagaacatcgttctcaatggcaagtctctcctggagctgcacaagaggaggaaagc

SEQ ID NO: 130515 - DNA, 100 bp, Homo sapiens
ccgtcatcgagcagctcttcttcgtccgtttggaaacttttgagaagaactttgaaagagaaacccataaaataagtgagcaaaatgatgctgataatgc

SEQ ID NO: 130516 - DNA, 75 bp, Homo sapiens
ttcccaagagcagcggaaaatgatccagtcacagctgcggttggatttctcacgatgtccagtgttatctccatg

SEQ ID NO: 130517 - DNA, 82 bp, Homo sapiens
acagacccctcggggtgtccatcacaaaagccgagtgcctccggagccagcgtggtggccatagacaacaagatcgaacagg

SEQ ID NO: 130518 - DNA, 73 bp, Homo sapiens
agccgaccccacatggattctcaacaggtggccgggaaaatgttggggcttttcaggaagcataataagattc

SEQ ID NO: 130519 - DNA, 75 bp, Homo sapiens
ttcttcgggggcgaggttttccagaatcactttgaacctgcagctccccttccaccccccggggaactgaagatt

SEQ ID NO: 130520 - DNA, 95 bp, Homo sapiens
gatccagataatgaggatgcaacagggtatgaagttatgaaaccagatgtcatcttcaaattggagcaaggagaagagccgtgggtaggagatgg

SEQ ID NO: 130521 - DNA, 75 bp, Homo sapiens
gggggccacaccatttgccgtggccaggctagaggtcccaggtgtgacaccttcagcaggtctcagggaagatgg

SEQ ID NO: 130522 - DNA, 87 bp, Homo sapiens
gctccagatggcgtcttccgtgggcaacgtggccgacagcacaggatgaagtcattgctgtttccgaaaaggtgattgtgaagcttg

SEQ ID NO: 130523 - DNA, 90 bp, Homo sapiens
gtcagcttcttacctgaacgcttgtcttttacactgttacttcagtcaggtgattaaggctgcagaagacagtgcgttgcagtatatgaa

SEQ ID NO: 130524 - DNA, 50 bp, Homo sapiens
caggccaccactgcggcgggctctggttcatccatgagctcggatttccc

SEQ ID NO: 130525 - DNA, 100 bp, Homo sapiens
tagaatgagaatgaagtatggaatcttgtggaagaagaatgaagttgctgattatgaagctacaacattttccatcttctataacaacactctgttcctg

SEQ ID NO: 130526 - DNA, 96 bp, Homo sapiens
ggtgatcctgtatatgtttactataaactggcaagaggatggcctgaagtttgggctggaagtgtacaccaggggttggaaaaaccacactaggca

SEQ ID NO: 130527 - DNA, 82 bp, Homo sapiens
gactctgactctcggactgagaaacgcaaggaaatctggcattttttaaagtttgcgccccacaaagaggaaatattccaaa

SEQ ID NO: 130528 - DNA, 99 bp, Homo sapiens
aaactgctttttgaaacagagaaaatagatatagtactacattttgccgcacaaacacatgtagcttcagctttagctgcagctgcctctgttcagcca

SEQ ID NO: 130529 - DNA, 100 bp, Homo sapiens
cctcatgttgctcctgtgatgccattagatcgtttcattacagctcatctttgggtgaaaaattgtcgggatcttctgcagtccagctacaacaaacagc

SEQ ID NO: 130530 - DNA, 100 bp, Homo sapiens
accactacttgaatcagtctggatgtgtagaagacaagacaatcagtgaccaggaatcctttagggaagttattcctgggactacggccagggcttcgtg

SEQ ID NO: 130531 - DNA, 100 bp, Homo sapiens
ctggatctaattttcttccagaatccaaaatcatttttcttgaaaaaggacaagagagtgttaccgggggtccttgctcccagaactcccaagatggtcg

SEQ ID NO: 130532 - DNA, 82 bp, Homo sapiens
ctgccgctgccgcacctccgtagctgactcgctcctggccactctgaatccacttcctggctctggattggcttgtcctgga

SEQ ID NO: 130533 - DNA, 130 bp, Homo sapiens
aggacccaagactctcctctgaggtagcagcccccagagaaggttagctgttctctgatggaacctagaaagattgtacaatgaatggtgattctcgtgctgcggtggtgacctcaccacccccgaccac

SEQ ID NO: 130534 - DNA, 100 bp, Homo sapiens
aaatagcaaacgatccagacggcagggagtgcatcaaaggtgtgaacacaggaaggttagaatgcatgtttataacatcaataaaattacaaggatttac

SEQ ID NO: 130535 - DNA, 75 bp, Homo sapiens
atagatgaccaggagaacctagctcatagcaggaggcagcagtgttgtactgctacttctataaacggacagccg

SEQ ID NO: 130536 - DNA, 75 bp, Homo sapiens
gccatggagttgagctgcagcgaagcacctctttaccaccaatgttgttatgaattattcagagatcgagtctaa

SEQ ID NO: 130537 - DNA, 83 bp, Homo sapiens
caggcacagccgacgccgcgggggtttccaggcctgaggtgcccgccctggccccaggagaatgaaccagccgcagaggatgg

SEQ ID NO: 130538 - DNA, 96 bp, Homo sapiens
gccggcaccatgggctgctgcaccggacgctgctcgctcatctgcctctgcgcgctgcagttgggttctccaaaaaatgtggaatcctttgcatct

SEQ ID NO: 130539 - DNA, 83 bp, Homo sapiens
actgtcttctcttcctcctccaccgagtcgtgctctcgccccaacccgcgcgccagctcaccatggatgatgatatcgccgcg

SEQ ID NO: 130540 - DNA, 100 bp, Homo sapiens
ggacctccaaggaagccacgtgcagacatctacaaccttcgatctcctgacgagttttgatgatgatggttcagaatttcatgaacatatatttctggag

SEQ ID NO: 130541 - DNA, 100 bp, Homo sapiens
gttggtgcggcctccattgttcgtgttttaaggcgccatgaggagcctcctcaacaagcccaagagtgagatgaccccagaggagctgcagaagcgagag

SEQ ID NO: 130542 - DNA, 83 bp, Homo sapiens
agcagagacgtcatacttggaaatggctgcaggttcagaagatgtgaactttgtccccataaggatggagctttaaaaagaac

SEQ ID NO: 130543 - DNA, 50 bp, Homo sapiens
tgcctggttccactttgtcttgtgccttgacccaagccattcgaaatttt

SEQ ID NO: 130544 - DNA, 98 bp, Homo sapiens
ggcggccgctcacaacatgcacagcctggcgacggctgcgaaacaaaggatggagtatggcccaagaccagctgatactccccctgctccatcacctc

SEQ ID NO: 130545 - DNA, 98 bp, Homo sapiens
actgttctaatgaggtcctatctattactgctatgttgtcaggtcgccactgaaatactgggaacagaagcttccacacaagcttcccccattaaggg

SEQ ID NO: 130546 - DNA, 96 bp, Homo sapiens
aagtcctgcctcaccaaggctggctcctcaagaaagaagggtgacatccagcagctgctctttgtctcggaccaccgggcagcttatgattactgt

SEQ ID NO: 130547 - DNA, 101 bp, Homo sapiens
gtggcctcctctccgccctagcgctgagaactcgacattgacgatcgaggagtttcattccaagcttcaggaggccaccaacttccctctgcggccgtttg

SEQ ID NO: 130548 - DNA, 85 bp, Homo sapiens
cgctcccatggcgcacattaccattaaccagtacctgcagcagaattagacctttacgagaagcacagttttgtcttcagtttcc

SEQ ID NO: 130549 - DNA, 90 bp, Homo sapiens
ttgatcgctgggaattctccaccttaaagaagtgccttcagcttgtgggaaatcccgaagatggccaaagacaactcaactgttcgttgc

SEQ ID NO: 130550 - DNA, 88 bp, Homo sapiens
cttgaattagattacagcgatggggacacagaaggttcaatggataatacagttcgattatgggatgctatcaaagcctttgaagatt

SEQ ID NO: 130551 - DNA, 87 bp, Homo sapiens
gccagatgaactgtccttccaacggggtgacctcatccgtattctgagcaaggtgaaggtaggcaatgaagttgctacaggaacagg

SEQ ID NO: 130552 - DNA, 98 bp, Homo sapiens
ctgatagagaccctagtaacatgatttatcagcaagactgttgaacgcataactgcccaagatgcctgtccctccccctccagcacccccgccgcccc

SEQ ID NO: 130553 - DNA, 117 bp, Homo sapiens
gtgactcacaatctgtcttttgatgaaatcaacaaagcctttgaactgatgcattctggaaagagagcctggaaccaatgattctcagcactctaaatgtgatgtagataagtctgt

SEQ ID NO: 130554 - DNA, 75 bp, Homo sapiens
tcgcattttggcattgacatttaattttagggtcctttatatagaagggagagtcactcagctctatgtgccagc

SEQ ID NO: 130555 - DNA, 83 bp, Homo sapiens
catcactcccgagtggaggaagcaatacatccagtatgaggccccctcagaccgtgccatgggtgacagtgatgacgagtacg

SEQ ID NO: 130556 - DNA, 100 bp, Homo sapiens
gaagaaaaagagcaggaagtcattacatgagtctcagtcatagcctgccttcatctctgaagggaccaggcgacccatggagtgcctcggcagcctcgtc

SEQ ID NO: 130557 - DNA, 100 bp, Homo sapiens
acaagcggttctctaccctgtaaaggttgtctgcattcaaaagagcattctattaaagctaccttaatttggcgcttatttttcttaatcatgtttctga

SEQ ID NO: 130558 - DNA, 75 bp, Homo sapiens
ggcatggaaggggtcctcagagttactgggatcatggaagggaagtggttgctgtgtatgttactggtgcttgga

SEQ ID NO: 130559 - DNA, 100 bp, Homo sapiens
cctgctccttgcagccatgctcctgggcaacccagggatgtttgtgggggtggcgtcagcccagggagcgaacccctgcaggactcccgaggagaccttt

SEQ ID NO: 130560 - DNA, 75 bp, Homo sapiens
gtgaagctcctgggagcctactatcacgacgggaagctgtggatgcgctggctccctccctccgaggctacttct

SEQ ID NO: 130561 - DNA, 74 bp, Homo sapiens
tcgctgaagatacaactgttagtccaaggaggctctgtcggtggtgagcgacgaccagtccctctttgactcag

SEQ ID NO: 130562 - DNA, 83 bp, Homo sapiens
cgggacttccagacactggaaaactggatgctgcagacactgaacgaggagccagtgttaatatgatcctctgttgaagcaag

SEQ ID NO: 130563 - DNA, 86 bp, Homo sapiens
cggaggcgcctccgctgcagtcgctgcgtctccaagaggttgacggatatattcagacgttacgacacggatcaggacggctggat

SEQ ID NO: 130564 - DNA, 100 bp, Homo sapiens
gtctcctcagcagacgcggaaggaagctgtgctgaatggtttggtggccactgaggtgttgatgtggttttatgtcggagagattataggcaagcggggc

SEQ ID NO: 130565 - DNA, 80 bp, Homo sapiens
ctggccagctgactgcacttcttttttgagaaaggaaggaatatatcctgactgattgagcagtttttgcaagaaaggat

SEQ ID NO: 130566 - DNA, 73 bp, Homo sapiens
tttacgtgtcccccctttgggagctgctcaggtaagaatgattgatgttggctgatattggagtgctcattca

SEQ ID NO: 130567 - DNA, 50 bp, Homo sapiens
gaaaaagaacattactgtcttggtttttctattgggaaagctactgatcg

SEQ ID NO: 130568 - DNA, 75 bp, Homo sapiens
aaaggaaatctcctaaaaaagtgtctgctctaaaacgttggctggatctattattggcaaaggtggtcagcggat

SEQ ID NO: 130569 - DNA, 100 bp, Homo sapiens
agaagccgacgcccatccagctgaacccggcccccgacggctctgcagttaacgggaccagctctgcggagaagatgagaatgtgcctactgctcctgat

SEQ ID NO: 130570 - DNA, 90 bp, Homo sapiens
ggttgcacagtcgccttttccagtttggagagacgttgttaaaaatctgtaagagcctgattttagaattcaccagctcctcagaagttt

SEQ ID NO: 130571 - DNA, 75 bp, Homo sapiens
ctgacggcgacctgacgctactatgggccgagtggcagggacgacgcccagggttctatggcctggatgagtctg

SEQ ID NO: 130572 - DNA, 75 bp, Homo sapiens
tgctggggaaggtccggggaatcatcgatgagctccagggcaaggcgctcaagtctattatcctcccagtccaca

SEQ ID NO: 130573 - DNA, 86 bp, Homo sapiens
atttgttaaggattccaagtaactcttatttgattatgtgtgacaatccaagaagccaaccaattaagaaccgaaaatacacatct

SEQ ID NO: 130574 - DNA, 99 bp, Homo sapiens
cttaggtctgttagaggaagacgacgagtttgaagagttccctgccgaagtttgtttcagtgttggaaggcgtgttgtctaagctgtcaaggtatgatg

SEQ ID NO: 130575 - DNA, 75 bp, Homo sapiens
gacagatctggcatctccactggacactggtcagagtgaagtaattgggaaactgttcatttgaggataaaaaag

SEQ ID NO: 130576 - DNA, 75 bp, Homo sapiens
tcgggtctcgggggccgctctgggatcccggccaccagcaattgtccgacaaaaaacttggactttcgccgaaag

SEQ ID NO: 130577 - DNA, 75 bp, Homo sapiens
aaagcagctacacaaagagggtcatctcttctattgtacctgcaggtgtttggagaagagggattgaccctgaat

SEQ ID NO: 130578 - DNA, 100 bp, Homo sapiens
actttcgaaagaatatgatcaactcctgaaagaacactctgaacttcaggattaagttgtcatcattctgggaagaaaaaaaaaacattaatgaagaggc

SEQ ID NO: 130579 - DNA, 98 bp, Homo sapiens
tctggagggcgccccggaaaccatggcacttgcagaagcaagagggtgcagtgaatcccgaatcctgctattactactgtgccgtgtgtgattacacc

SEQ ID NO: 130580 - DNA, 90 bp, Homo sapiens
tttagatggcggagatgttttattcacaggattttggcattagagaagctcggtgctgtcttcaatcaagtagccttcccactgcagtac

SEQ ID NO: 130581 - DNA, 96 bp, Homo sapiens
tcgctctgtgacctgctggcattgaatgatttatagctaagactccaggacacccctgaagccgagaaatgcaagagtgagccatggagctacgtg

SEQ ID NO: 130582 - DNA, 82 bp, Homo sapiens
gaagacgagacgcaccccaacatcgacacggccagtctcttccgctggcggcatcagggtctgtgctgaatgtgtaatatgc

SEQ ID NO: 130583 - DNA, 100 bp, Homo sapiens
cagagttcaaggaggccttccagctgtttgaccgaacaggaaatggggacatcttgtcatttgaggatgccaaccgcgccatgcagactggtgtcaccgg

SEQ ID NO: 130584 - DNA, 110 bp, Homo sapiens
atgcagtacgccacggggccgctgctcaagttccagatttgggccgttgctccagggagaactgcaaatatcttcatccacccccacatttaaaaacgcagttggagata

SEQ ID NO: 130585 - DNA, 100 bp, Homo sapiens
gttctggagttcatgtcgatgaagtcctatcccgacgtttctgtggatatctccatgctcagctctctggtgccaggtcaccagatggaaagcgaaaaag

SEQ ID NO: 130586 - DNA, 90 bp, Homo sapiens
tcccaagtggctgggattacagcagccatggcaatgacaggctcaacaccttgctcatccatgagtaaccacacaaaggaaagggtgaca

SEQ ID NO: 130587 - DNA, 51 bp, Homo sapiens
aggtgccaaagtggtggtatctggtggtgatcgtgcagtccggccgccacc

SEQ ID NO: 130588 - DNA, 82 bp, Homo sapiens
ctcgaccacatcaagaagctcagcactgatgtggacttgattgtggaagtgctaagatatttccagtgggttcaaggagatg

SEQ ID NO: 130589 - DNA, 75 bp, Homo sapiens
gaggctcgcgggcggcgggcccggagtgcagcagctgccccgagccccgtgcttggcaacattccccccaacgat

SEQ ID NO: 130590 - DNA, 75 bp, Homo sapiens
cttcgttttgtgaaaggccaatttcatgaatttcaagagagtaccattggggacctcctgccccccgaggtctgc

SEQ ID NO: 130591 - DNA, 83 bp, Homo sapiens
atggccattcctggaggccccaaatttgaacctcttgttcgagacatcaacctacaggccatggagttggggagagaatgtct

SEQ ID NO: 130592 - DNA, 98 bp, Homo sapiens
agatcgtggccgagatgctgagctatctggagacagctgactactccatccgagaagagattaacatttccccagaggagctcaaaatggagttgccg

SEQ ID NO: 130593 - DNA, 100 bp, Homo sapiens
caggcttccagtacgagctggttaggaggcacagggcgtcggacctgcacgagctgtctgggtttgccttcccggattgggcctacaagccagagtcgtc

SEQ ID NO: 130594 - DNA, 90 bp, Homo sapiens
ggacccggccgaggcggtgctgcaagagaaggcactcaagtttatgaacctgcaaccatggtcgtgccactagccagctcggaagcccag

SEQ ID NO: 130595 - DNA, 90 bp, Homo sapiens
ctgaagtatccagcgctcattgggaatttagttaagacagaggtgttccaggccttgcagcggctccatatgaccatcttctcccagagc

SEQ ID NO: 130596 - DNA, 107 bp, Homo sapiens
cccagcgtcctcaccgactcctcggccacctcctccgcggacgccggggagaacccaggtcagtatcattgacagtgttcaacaggaaacagatgatcttactaagc

SEQ ID NO: 130597 - DNA, 100 bp, Homo sapiens
aaagactgctgccagcggggtggaggcgaacagcagaccccaagactgaccatgaggaacacttggagctcaggaaggaaagatcagcccagaagcaggg

SEQ ID NO: 130598 - DNA, 82 bp, Homo sapiens
attgaggactctgtagttgaagattataattcagtggataaaactaccacagattgagaggatccagaatccagatctctgg

SEQ ID NO: 130599 - DNA, 100 bp, Homo sapiens
gcaggtattgggagatccacagctaagactccaggaccctctggaagcctagaaatgaacaccttccaccatgaccacctcagcaagttcccacttaaat

SEQ ID NO: 130600 - DNA, 82 bp, Homo sapiens
gcgctggcgctgagcctgcagccggccctgccgctttaaggaagcctcctatttcagtttctcaacatgaaagtcatcaagc

SEQ ID NO: 130601 - DNA, 83 bp, Homo sapiens
aacctgggcgacatccaggtggtctcgctgcccctgctcaagccccaggtacgcaaagagaaccagtggtgtgaagagaagtg

SEQ ID NO: 130602 - DNA, 100 bp, Homo sapiens
ggagtgatgaatcagcccatggcttacgctgcacttccatcccacggtcaggaaatggctagtgatgagctgaaagagatgcggaaaaacttgaccaaag

SEQ ID NO: 130603 - DNA, 75 bp, Homo sapiens
aaaagatgaacctttggagtttaaaagggttctggacaacatcaaagaatgtatcctgtcaggtataatgtcagt

SEQ ID NO: 130604 - DNA, 98 bp, Homo sapiens
acaatcaatttgaactctgcatcttcatggtttacagaaattggtgcagaaacgcttcgttaagggactcaggcagtacgggaagaacttcttcagaa

SEQ ID NO: 130605 - DNA, 75 bp, Homo sapiens
gaggacacttctctgtcgtcacagttagttgcctgtgtccctggagtgttacacagtgcctcctgaagacaacct

SEQ ID NO: 130606 - DNA, 101 bp, Homo sapiens
ccagctatgagagacagagccaggatttgaaaccaggatgatcacggacgtgcagctcgccatcttcgccaacatgctgggcgtgtcgctcttcttgcttg

SEQ ID NO: 130607 - DNA, 74 bp, Homo sapiens
aatgagcattgaactacaatcagtttctaatccagttcacagaaagggttatgtggtccgaatcagtggtggga

SEQ ID NO: 130608 - DNA, 102 bp, Homo sapiens
gttgttaccgaacatctcataaataagtttaaggaagaaatctctaaacgttttaaatcacatactgaccaacttgtgttgatatttgctggaaaaattttg

SEQ ID NO: 130609 - DNA, 100 bp, Homo sapiens
tgctgtttggcaccgactaccccttcttccatgacccaccatctgtcttctacgttcaggacctcaaggggctcggctatgagaaggggaagcctgtggg

SEQ ID NO: 130610 - DNA, 100 bp, Homo sapiens
ggagcgcccgcggcgtcgggtttgggctggaggtcgccatggggcgaggcagcggcaccttcgagcgtctcctaggatttgacactgttgacctccgcac

SEQ ID NO: 130611 - DNA, 100 bp, Homo sapiens
ttgataaaaagagatgtggggggattctcgacctgctaacagaactggaccttttcgatgccactgccgccaggagccctgtaacatcagccatcgtcaa

SEQ ID NO: 130612 - DNA, 51 bp, Homo sapiens
aggaaccaggatccgaacccgcctccccagactatgaaaatgatgttagac

SEQ ID NO: 130613 - DNA, 75 bp, Homo sapiens
cttctgcctggtgctctgcgtcctcatcgggcttatgttcgagcaaattgtggctactaatttgccccctgaaga

SEQ ID NO: 130614 - DNA, 90 bp, Homo sapiens
tctcgctcggctgcgggaaatcgggctgaagcgactgagtccgcgatggagtgttatagttttgccgctggactcttccctcccttcccc

SEQ ID NO: 130615 - DNA, 90 bp, Homo sapiens
ggaggggaatagactccatctatccatatgaggcggcgggaatcaaggcacctccacctctttatgccagccgtgatgggattcgttgcc

SEQ ID NO: 130616 - DNA, 75 bp, Homo sapiens
ctgaaggggttaattcaacagttcaccaccattaccggctactgcagcactggggtgtcagttgttggtccgacc

SEQ ID NO: 130617 - DNA, 75 bp, Homo sapiens
ccgggctccgggaaaactacactggccagagtttatgtggccgaggcagacaagtggaattaggccttgctgcag

SEQ ID NO: 130618 - DNA, 88 bp, Homo sapiens
caagagccgatccttagaaagaaaacgacgagaaccagagaggagacgactttcttctccaagacgtcttgctgccctccaaaaaaga

SEQ ID NO: 130619 - DNA, 88 bp, Homo sapiens
ttaccacgaagccggaagcagaggttatcaatagtctggctgtctatcgtcatcgtgagactgactttggtgtaggagttcgagacca

SEQ ID NO: 130620 - DNA, 76 bp, Homo sapiens
gagacaagtttgggattacctttttggaaaagaaatgtatcaggctgtggaaaatctctgttctcacaaagtctcc

SEQ ID NO: 130621 - DNA, 75 bp, Homo sapiens
ggaggatccacctggagctgaggaaccggaccccggcagctgcagacgcgtgccatgcctaccagatcattcacc

SEQ ID NO: 130622 - DNA, 50 bp, Homo sapiens
gaaggacgcgcagtccatctctctcaggtgccttggcatctcccaatggg

SEQ ID NO: 130623 - DNA, 75 bp, Homo sapiens
acactctccttctgccacatttgttttgagctaaatattgagggcaccacactgtaactcgaggcatcaccaaag

SEQ ID NO: 130624 - DNA, 82 bp, Homo sapiens
gccatgtttctggaggccaacgtaccccatgcctacctgaaaggaggacttctgcacggacctggccgtctccagtgccaac

SEQ ID NO: 130625 - DNA, 95 bp, Homo sapiens
aaaactaggaatctatgatgctgatggtgatggagattttgatgtggatgatgccaaagttttattaggtccttttggaataaatcatgggattg

SEQ ID NO: 130626 - DNA, 100 bp, Homo sapiens
cttcgtgggaggcgccgtgagttcgccgctggtggctccgggtatatgactgatgggatgttacttcgtgaagctatgaatgatcccctcctggagcgtt

SEQ ID NO: 130627 - DNA, 75 bp, Homo sapiens
actttatataattggcagtgatattgagctaatgattgcaaaggtcgactgcaaggaagtactagacatcatttg

SEQ ID NO: 130628 - DNA, 83 bp, Homo sapiens
ctcagccgcttggggcccgcacggaccctctacttcatgaactttgaggcgctgatcatcaccatgtcggtagtcgggggaac

SEQ ID NO: 130629 - DNA, 83 bp, Homo sapiens
ctgaagtaatgcaatggtctcaatctctggaaaaacttcttgccaaccaaagccagaagcggactcctagaagaggggagcag

SEQ ID NO: 130630 - DNA, 100 bp, Homo sapiens
gccacaggcagtacggcatggtgctcgaccagcatctcagacatgtcgaaaaagatgttttgatccctaaaataatgagagaaaaggccaaagagaggtg

SEQ ID NO: 130631 - DNA, 74 bp, Homo sapiens
ctgccgccgctctgaggagttaaagggaaggttgggtgtggctctccaagaatacattttggtggactcattga

SEQ ID NO: 130632 - DNA, 75 bp, Homo sapiens
agctcacctgcatcctcaagggcgactggctgggtctctacaggcggccggggacggtgcatcaagcagggggag

SEQ ID NO: 130633 - DNA, 50 bp, Homo sapiens
gtaactggcatagacaactatgggcagttcatggcctcccacgggaacga

SEQ ID NO: 130634 - DNA, 98 bp, Homo sapiens
atagatgtcatacattcatatctgtgtaaaggattgcaagagaagttcttcaagaggaaacccaaagtccttgggatgtggccgtcttgtatatcatc

SEQ ID NO: 130635 - DNA, 89 bp, Homo sapiens
ggtcttgctcggccgatgaagtgcagaggtttttttctgctacgagagtacaaggtagtgggtcgctgcctgcccacccccaaatgcca

SEQ ID NO: 130636 - DNA, 50 bp, Homo sapiens
ctcgtggcctgcctctgcgtgcgtaaagatgatgattcttttgatcggaa

SEQ ID NO: 130637 - DNA, 75 bp, Homo sapiens
cagaggagaaattcagacggctcccgagggtcccgctccccgaggcgcaggtcccccgtgcgccggagatcacgg

SEQ ID NO: 130638 - DNA, 82 bp, Homo sapiens
ggggacattattgcgcgtggaacggctgcttttggaagacagacagtctagcagtgcttccttggagaccctgttagcactt

SEQ ID NO: 130639 - DNA, 100 bp, Homo sapiens
tcagcagcaacagcagcagcaagttagtggattaaaatctcccaagaggaatgacaaacaaccagctcttcagactgctctggcccatttagagtctctt

SEQ ID NO: 130640 - DNA, 82 bp, Homo sapiens
ggccaccggctggagcggatcccacacctccggaccgagggacgcggagctagagccggtgcaggccacgcagaacaagaca

SEQ ID NO: 130641 - DNA, 75 bp, Homo sapiens
tgaggattctagtaatcaagcagcagccagagaatgggaggtatggctgatggcaagcattgtacttttccacat

SEQ ID NO: 130642 - DNA, 50 bp, Homo sapiens
tgctgaagaggtggaagcaaagttcaaggatgactctgttccagaagaca

SEQ ID NO: 130643 - DNA, 74 bp, Homo sapiens
ttcacgttcatgggcgagggaacagatgagaaacccggcaatgaaaatgcttcagaatccatctgagtttgcac

SEQ ID NO: 130644 - DNA, 50 bp, Homo sapiens
agtgctaccatgggccaactgtatgaggaaggtgtcttgctgcaggtaac

SEQ ID NO: 130645 - DNA, 75 bp, Homo sapiens
gtttgcctcacagttcccgctgggattcgtagccagagtctttgcattgttggaaactgttactacatttttact

SEQ ID NO: 130646 - DNA, 136 bp, Homo sapiens
agaggattggaggtgtcagtgttaaaggaacctctacaacgaaggtgaagccacggaagataaggagcttgatcctggatagtgtttgtatgatgtgcacacgtctctgcaaatgcttgtttgaagattggctgtg

SEQ ID NO: 130647 - DNA, 100 bp, Homo sapiens
atgattcagacgagtctttagatacctgtgagacgatgcggatcgcctcctccgagtttgcagatgacccttgctcgtcggtaaagcgcggcaccatggt

SEQ ID NO: 130648 - DNA, 97 bp, Homo sapiens
gggcggcggcagcgacggcagcggcggcggctggactaaacaggtcacctgcagataatttttatggtgggacgaggatacctgtctccagatctca

SEQ ID NO: 130649 - DNA, 99 bp, Homo sapiens
gcagtggcacctgcgcgaagctggccaaagcctgcccagacggctcacctgtgcgggatggaacaaaaggttttgggatttgagattgacgcggtgaac

SEQ ID NO: 130650 - DNA, 83 bp, Homo sapiens
ccaccccgagtcaaagcgctgaaatgagccccgcggcaggtgagaagccctaccactgcaactgggacggctgcggctggaag

SEQ ID NO: 130651 - DNA, 100 bp, Homo sapiens
gtgaggcttttcccttctgctgttgacaagacccggattggtgtccaaggcagctgcagatttgatggcctactgtgaagcacatgccaaggaagacccc

SEQ ID NO: 130652 - DNA, 100 bp, Homo sapiens
aagaaaacaagggaggagaagacaagctaaaaatgattcgggaatatcggcaaatgcagctaccaagggggtgccagctggaaacagtgacacagagggg

SEQ ID NO: 130653 - DNA, 100 bp, Homo sapiens
ctgcgcttggggatcctctgtacgcccgttcactggtttttgctaatgaagtaaatgctcatcgagaccagatcattgagctggatcaaactgggaatca

SEQ ID NO: 130654 - DNA, 96 bp, Homo sapiens
gaatgaatcacgatgatgggagagattgttcctgtggagcaaagagctgcatcatgaattcaggagcatcattatttgcatgggtgcaaaagaaaa

SEQ ID NO: 130655 - DNA, 100 bp, Homo sapiens
ggaaactggcggctgctggtagttccatgctgtctgttcagacttcagcttggtgtctccggataactgtgctcctgacatccttccttatggttttggg

SEQ ID NO: 130656 - DNA, 101 bp, Homo sapiens
gtcacagagtgcaccgtatcctgtcacttctggatgtgagcccatcacctcttcatgaccactgcctgccaggaggctaactacggtgccctcctccggga

SEQ ID NO: 130657 - DNA, 82 bp, Homo sapiens
ctaaaatgaaagaaaccgctgaggcttatttgggaaagaagggaattcaagtttggaccaatgctaaggaatgctttagcaa

SEQ ID NO: 130658 - DNA, 75 bp, Homo sapiens
ttagaggcatctgttctatcttcccatcataaaaaaagatgaggactcagtgtgtcgtcgtggctgctcttgagt

SEQ ID NO: 130659 - DNA, 100 bp, Homo sapiens
ccagcacttcctacacagcctgctgaagaagcagcacgaaagagagaggtccgtctaatgaagaacagtgatgtcttggcattgcccattttcaagcagg

SEQ ID NO: 130660 - DNA, 46 bp, Homo sapiens
gtatgggcctgctgtgttcccttaactctgggtggattttaactac

SEQ ID NO: 130661 - DNA, 100 bp, Homo sapiens
agatgcagagagaggctgcgttcagactggggcactgccatcccctccgcatcatggggtctgtggaccaaggtgattacgtttttgaagaagaaggaca

SEQ ID NO: 130662 - DNA, 82 bp, Homo sapiens
tgggacgccagtcaccagcaggagcagccaaccagcagcagccatcatggaggtcttgggcgtctttggtactggctttttt

SEQ ID NO: 130663 - DNA, 90 bp, Homo sapiens
tcctaagcctgcacagccgcggcggcagcagcagtgagagataccggggagaccacgacgctgcctcctgggcgccatgagttcctgttc

SEQ ID NO: 130664 - DNA, 90 bp, Homo sapiens
ctggaaaatcatccgatcggaaaacttcgaggaattgctcaaagtgctgggggtcaccagtcgttggcacaccaagaagctgccccgcaa

SEQ ID NO: 130665 - DNA, 75 bp, Homo sapiens
aggatcaggaccgcaagtcccgtcttatgggacttgaggccctcaagtagtattattgattccacagaatacagc

SEQ ID NO: 130666 - DNA, 75 bp, Homo sapiens
ctgcggcctggggctggagtccgattgccgattcagcccagcagctgctggagccagttctgcttctcggcaagg

SEQ ID NO: 130667 - DNA, 90 bp, Homo sapiens
gcacttctaaagtgtccagtggatttttaatcacatgaggttaaaaagatcaagtggcatgagcagccttttggggaaaattggtgccaa

SEQ ID NO: 130668 - DNA, 74 bp, Homo sapiens
ggtgaaggatgcagcagaatttgccatcagcattaaatttggtgcttccagatgtgagttatcaggtggaatcc

SEQ ID NO: 130669 - DNA, 89 bp, Homo sapiens
agatgatgatatccttctcaaccttgtgggatgtgaaaactctgttactgaagcaaaccattcctcaagcaactgcagcaaaatatccc

SEQ ID NO: 130670 - DNA, 112 bp, Homo sapiens
tgctgatcagtgacacccagcactatggcgtgacagtgccccggaccagttactctccacaagaaaattcacacaaccacagtgctcttcatagttcaaattcacattcttc

SEQ ID NO: 130671 - DNA, 89 bp, Homo sapiens
ctataagagcattatgggcagacagcggcatacagaatgcctatgaccggcgtcgagaatttcaactgatggaatatcgaaagacgtct

SEQ ID NO: 130672 - DNA, 90 bp, Homo sapiens
ctggatatgactggtttgagcaactgcttcaaaacgacctctttgtttttagacatgaattggccataatgagactagcagcctttatgg

SEQ ID NO: 130673 - DNA, 75 bp, Homo sapiens
ggaaatcaggtcagcggagaagatgctggaaacaattattgccttgtctgtcaagatccgcagttatgaagaaca

SEQ ID NO: 130674 - DNA, 100 bp, Homo sapiens
ggccggtgctggctgcattggaatcgctgaaccgtgcagtgctcgctgccatggatgccaccaagctgccggccaagctcgctgaggccttcaagtactt

SEQ ID NO: 130675 - DNA, 101 bp, Homo sapiens
aatccgtccttccttagaaagctgaaagctgataaggtgtcaacaggcagaggtgggaactgaacccgaagtctgcagagcataaaagtttctgctttttt

SEQ ID NO: 130676 - DNA, 75 bp, Homo sapiens
cacaggagctgtagagaggaccccggtacatctgaaagccgggaaatgaccacactgcccacgtttcagagccca

SEQ ID NO: 130677 - DNA, 83 bp, Homo sapiens
cacccacctgctctttagcctgggagctgtgtgtctggacagaccgtcaacaaagatgtggacgcacaggctgaaggagaagg

SEQ ID NO: 130678 - DNA, 50 bp, Homo sapiens
cactatcagataagagtgccgatgtttacgaaaatggggttacagaagat

SEQ ID NO: 130679 - DNA, 82 bp, Homo sapiens
cgtagtctcggcgcccctgggagccgcccggtggaagctcctgcggcagactaatagggatgccaaaggaaaaatatgatcc

SEQ ID NO: 130680 - DNA, 83 bp, Homo sapiens
agcacacagaggatgatgctgactttgatgaagggggaaatttgcagtggtgagaaaatgtataaagaaagattctgggaaag

SEQ ID NO: 130681 - DNA, 100 bp, Homo sapiens
gagaagctcaccatcctcaacgaccggggcgtcggcatgctcacccgcctctacaacatcaagaaggggccacctacagatgctcctgcagtggacacag

SEQ ID NO: 130682 - DNA, 75 bp, Homo sapiens
ccacgacctggacaggacggagcgcaggcagtttcagaaagtgctttctctctgtggacatgaggattggattag

SEQ ID NO: 130683 - DNA, 100 bp, Homo sapiens
ggctgcagcgcccaccctgcgccagagaccagataaactgttgtagcaaacagtgacgaatctcagcttctgacaccaggaaagatgagtcagcgccaag

SEQ ID NO: 130684 - DNA, 50 bp, Homo sapiens
accaaggctcagagacatgttgctagtttcgctcttgttgccccggctgg

SEQ ID NO: 130685 - DNA, 75 bp, Homo sapiens
ggaattttagctgatgatatgggtttgtactcccctgccctcaacaagatgttttgccaactggccaagacctgc

SEQ ID NO: 130686 - DNA, 74 bp, Homo sapiens
ccaggccctgcagcagcagcttcaccagagcgggaacagcttccacgtgttcgaccagggccagtttgccaagg

SEQ ID NO: 130687 - DNA, 98 bp, Homo sapiens
atccccggccgcggggccaggaagtcggagtttgagccccggaggcagagcggctgccatgctggacaagatcgagggcgtgttcgagcggccgagcg

SEQ ID NO: 130688 - DNA, 100 bp, Homo sapiens
ctaaaattgcctttggacagtctatggatctacattataccaataacgagggagaagcatgacactggccaacactgcgtccagcatttgggtggccctc

SEQ ID NO: 130689 - DNA, 51 bp, Homo sapiens
gcaggccgcttggttctgacccagctgagaatgatatggaacctagcaaag

SEQ ID NO: 130690 - DNA, 75 bp, Homo sapiens
gccggagctgaaacacgacgtgaaggttttcaaatggaacattttgatgcatcacttagtacctatttcaaggca

SEQ ID NO: 130691 - DNA, 80 bp, Homo sapiens
aattgactccttgataggcaaaggttcctttggacagatctccagatcacactaagtttgtgggaagcttcaaaaccaaa

SEQ ID NO: 130692 - DNA, 100 bp, Homo sapiens
cgccggcagaggatccagtgttcaccatcctggccccggaagtatggtttgaagtggtgaacatggatttttctcggcttcacatgtacagtcctcccca

SEQ ID NO: 130693 - DNA, 82 bp, Homo sapiens
accagttcgcccgtccccctgccccgttcacaatgagtggagtcaacatatcaatggagcaagtcacagtcgtcgatgccag

SEQ ID NO: 130694 - DNA, 51 bp, Homo sapiens
attttgccgatttcatgactaaccagtgcacttctccttgctgctgccaca

SEQ ID NO: 130695 - DNA, 88 bp, Homo sapiens
ataaacttgatcgcattatggccagcactattaaggatctctgctgtctcttggatcccatctgcctagatggaagaggatcctatcc

SEQ ID NO: 130696 - DNA, 100 bp, Homo sapiens
cggcgacagtggcggcggcgccatggcagggcttgcagcactctcgagtggaccctgaggagctcttcaccaagctcgaccgcattggcaagggctcgtt

SEQ ID NO: 130697 - DNA, 75 bp, Homo sapiens
aaacatccacagcagcgactggcccaagttctttgaaaaggttgttttggaaaccgaaataacaaataagtccgc

SEQ ID NO: 130698 - DNA, 83 bp, Homo sapiens
tactgcgaccagatcttccaggacgagacgggcaagaaccgagcccaaatcttgtgacaaaactcacacatgcccaccgtgcc

SEQ ID NO: 130699 - DNA, 82 bp, Homo sapiens
aaacgagcaggtcgatgcctgaggatttaatggagaaatcccaaagcagttcaattaacctccagaagatggctgaacctgc

SEQ ID NO: 130700 - DNA, 82 bp, Homo sapiens
ggcgctgggcaatgacatctacgtgacggtgtctccagaacgctatagctatggcacctccagctcttcaaagaggacagag

SEQ ID NO: 130701 - DNA, 75 bp, Homo sapiens
gggaagctcattgaagcagaggacaacatgaactgccaggtcacgcatgaagggagcaccgtggagaagacagtg

SEQ ID NO: 130702 - DNA, 100 bp, Homo sapiens
tagagaagtcagtctccccgcaaaattcagattcttcagatgtcgacgtacaagcgggccacgctggacgaggaggacctggtggactcgctctccgagg

SEQ ID NO: 130703 - DNA, 100 bp, Homo sapiens
ccgccgtctacccgtggccgctgccggtctacaatcactgagcttcagctcaaacttgagagtgcccttactgaactagaacaactccgcaaatcacgac

SEQ ID NO: 130704 - DNA, 100 bp, Homo sapiens
cctatgtggcgcaggtctcccccacggatgaggagaagaccatgctcgacagctgaccaaggccatgatgcgaaaggccacggccagccgcctggtcacg

SEQ ID NO: 130705 - DNA, 76 bp, Homo sapiens
tcccaccgcacgttcagaagtcgggtacttcgtactggatttcgaggctggcatcctgcagtattttgtgaatgag

SEQ ID NO: 130706 - DNA, 75 bp, Homo sapiens
aagcaggtggaattatgccctgttggttccaatgctgggattggctgcttttcggtttcgaaaaaacgatgaaat

SEQ ID NO: 130707 - DNA, 78 bp, Homo sapiens
gaggatccagtgttcaccatcctggccccggaaggttttgtagtgcatccctgagcatgagcacagaatgaagcggcg

SEQ ID NO: 130708 - DNA, 100 bp, Homo sapiens
gtgatcgtcatcacagtcaactatcgacttggagtactcgaacattaaccaggtggtatttgttggaaatttcttgagaattaatacgatcgccatgcgg

SEQ ID NO: 130709 - DNA, 100 bp, Homo sapiens
actaacaagatccatctgatgtgttgttattgatgccttcagattgatcaatgctaatatgatggtcttaggacatgaaccaagacaaacaacttcgaat

SEQ ID NO: 130710 - DNA, 98 bp, Homo sapiens
ggagacagaaatccaaggagatgggtgttcaggtgatagtagaaaaggctcccaaagctcggataggagacctggacaaaaagaaatacctggtgcct

SEQ ID NO: 130711 - DNA, 80 bp, Homo sapiens
tggagaacacccccccatggaggcgagataaacaatcagattctgtatggaagaagtcaccaaaatgcatctgccattat

SEQ ID NO: 130712 - DNA, 98 bp, Homo sapiens
tcaatattggaagcgatttgatctacggcgactccaggcttctgggaacttggcagacgcagcttagagagactcaccagcgagcgtcattgttgtct

SEQ ID NO: 130713 - DNA, 100 bp, Homo sapiens
ccctcacaccccttccagctacatcgaaacgcctgtctcctccctcctacacatttccagctcctgctgcagttattcctacagaagctgccatttacca

SEQ ID NO: 130714 - DNA, 75 bp, Homo sapiens
caaaactccacgttttctgctacctggaaccgaggattcctagatgaggttatgaagaagtatggcagtttggtt

SEQ ID NO: 130715 - DNA, 100 bp, Homo sapiens
ggtggtctgtctgctcctggcatgccctgccacagccactgagtacaggggctcaggtccaggtggcaggggatatgctacccaactcaactgagcgggc

SEQ ID NO: 130716 - DNA, 100 bp, Homo sapiens
gcagtacatcgcaggggccaactgtgcccaccagctccccatcgcagaggccatgctgacctacaagcagaagaggccggccttgtgctggaaagagcat

SEQ ID NO: 130717 - DNA, 99 bp, Homo sapiens
tccgagcgcaaggacagcgcgaggtccgcgcagcccagcgcagccataataccctctaccatctgctttggtcagggtgccgctcgaggatttaaaagc

SEQ ID NO: 130718 - DNA, 80 bp, Homo sapiens
atttacgtggagatcaagcgcagcgatggctactgcagcactggggtgtcagttgttggtccgacccagaacgcttcagt

SEQ ID NO: 130719 - DNA, 101 bp, Homo sapiens
gttcgagacttgcatttgaaatggacagaaggcattgtcaatgaattttatgagcagtttcagttcttgccggagagtttccagatttctcctcctgatgg

SEQ ID NO: 130720 - DNA, 100 bp, Homo sapiens
aaggctctccttgcagctgcttagacgctggatttttttcgggtagtggaaaaccagagcctggagacacaggccccatccttcccaatggggacacttc

SEQ ID NO: 130721 - DNA, 104 bp, Homo sapiens
aagctacgtagctctgactgatggcttagggaacctcaccatcatcattgaaaccatgggtcttgcctatttgcatactaaaggcaaaatgcatagagatatca

SEQ ID NO: 130722 - DNA, 100 bp, Homo sapiens
tgaccgagagcgcgaatatcgtcatcgttagaagagtgggaaaccacccatcaatgatatgttcacagacctcaaagatggaaggaagctattggatctt

SEQ ID NO: 130723 - DNA, 51 bp, Homo sapiens
agttaacgggaccagctctgcggaacaattgcagcatgactttcccagggc

SEQ ID NO: 130724 - DNA, 100 bp, Homo sapiens
gtctgaatctggagaaggggaaatctccccacaaagagaagtctcaagatcccagagtaattccctcctggtcccagacagtctaagaggcacagataaa

SEQ ID NO: 130725 - DNA, 100 bp, Homo sapiens
aaggttgtgcggatatgagtgtccagtctccagcttcgtgggtgcctggaggcaggtgcggaggcccacctgccgtttgctgtcattggcagcacagaag

SEQ ID NO: 130726 - DNA, 75 bp, Homo sapiens
aatggagatattgttcgctttcacaggctgaagctctattatcaagtcctaaattttggaatgattgtctcatcg

SEQ ID NO: 130727 - DNA, 100 bp, Homo sapiens
ttttgtaggctctccaggggttgagatgattcctgcttctgcgaaggctccccataaacagcctcataagcaggaaatggctaattctgtctacctggtt

SEQ ID NO: 130728 - DNA, 100 bp, Homo sapiens
acatgttgataaaaaatgatgattttgtggaagtataatactttgtcattatgagatgtcgtctctcggtgcctcctttgtgcaaattaaatttgatgac

SEQ ID NO: 130729 - DNA, 75 bp, Homo sapiens
ttggaggtctgtgcatgcatgttcagacctgcaatgcttcttttgccacccgagaccgtctgcgctcccacctgg

SEQ ID NO: 130730 - DNA, 75 bp, Homo sapiens
cggtggaggaatttgtggctggctggatctctggctttaaggagttttaagctgagtgtcactgtagaccccaaa

SEQ ID NO: 130731 - DNA, 83 bp, Homo sapiens
ttttgattgatttccatgctctgaaagacatccttgggcccccgatgtatgaaatggagtttgctgacctctctgaggctgcc

SEQ ID NO: 130732 - DNA, 103 bp, Homo sapiens
gaagacccctggctctataagctgaattatggcagcccagtcaaggtagctacagcaagctgggtagcaggcagatccaaaggatatcatgaagtttccaggg

SEQ ID NO: 130733 - DNA, 100 bp, Homo sapiens
aaactgtacaacttttgcaattccagttgtgtggctaaatttcaggttggaaaagagactgttcaaaccactgaggatcagattttgaagagagatatgc

SEQ ID NO: 130734 - DNA, 50 bp, Homo sapiens
agaacacagccagtgtgaatgcaggactgggaggtgctggtcctagggaa

SEQ ID NO: 130735 - DNA, 74 bp, Homo sapiens
gccacctcgcagagctacacgcggagcaggtttttctattgggaaagctactgatcggatggatgctttcagga

SEQ ID NO: 130736 - DNA, 100 bp, Homo sapiens
tctgcccatcatgtttccttccttgtaccgcaactcaaagacccattggaacaaacaaagacctgcggaccaagggcttcagcctagagtcgtgccgcag

SEQ ID NO: 130737 - DNA, 100 bp, Homo sapiens
atatgtcgtctctaattcggcaaagacggtgatgactgtatatatgcaggccaattcctattgctgacagacagaacgccttggaggctgagtggaggac

SEQ ID NO: 130738 - DNA, 83 bp, Homo sapiens
atctgtcttcggtggactccttcggcagtccacccaccgccgccgcctcccagctggtactcctggttaatcaacagcttcgt

SEQ ID NO: 130739 - DNA, 100 bp, Homo sapiens
gtttaaagccctaaatgccatgcgtatctttaagaaattttatcttttgaaacacgttctgattaaccaaggatgcatcaatctcaaataattctacaag

SEQ ID NO: 130740 - DNA, 100 bp, Homo sapiens
atgaagacctgtgttgatacctataccaaccgtttaagaattcaaagaagctttttcactatttgacaaagatggtgatggaactataacaacaaaggaa

SEQ ID NO: 130741 - DNA, 100 bp, Homo sapiens
acactctccagcagtgctaaggctgacacctccaaacccagcacgctggacctaccatgaaagacttctgaatccaggaagagaaactgactgggcaaca

SEQ ID NO: 130742 - DNA, 88 bp, Homo sapiens
gcggagcggggcagccagcagcggaggcgcggcgcgcagcacacccggggatggacccccttggggacacgctgcggcgactgcggga

SEQ ID NO: 130743 - DNA, 100 bp, Homo sapiens
cggaaggcttcaaaggctgtcgcaaggaggaaggctgcagagagactaagggcacttcctgaggttcattaccacctggggcagaaggacagggagacag

SEQ ID NO: 130744 - DNA, 100 bp, Homo sapiens
gcaagaaggccctggacacagcaatatctctgggctttcacaggtgtttaatcaggaaggagaattcatgttgaagtttggctcaaatggagaaggaaat

SEQ ID NO: 130745 - DNA, 75 bp, Homo sapiens
tgccgagtcgccgcgtcgccagaccgccggctgcgccggagctgggggccttagatggagtctcgctttgtcgcc

SEQ ID NO: 130746 - DNA, 75 bp, Homo sapiens
cctggatgggggaccacaagatcctcatcgacagttggcccagtcccgcggtgaaaggaaggttcaagtctcagc

SEQ ID NO: 130747 - DNA, 100 bp, Homo sapiens
aaggacggcgttctggatctcaaagcggatgggtcatcagttaaggaagttgaaacctaccaccggacacgtgctttaagatctttgagaaaagatgcac

SEQ ID NO: 130748 - DNA, 78 bp, Homo sapiens
gagaagtaccaggaggcgttggccaagggcatgcccaagagaatcgtaaatgcaaaaattgcttgccttgacttcagc

SEQ ID NO: 130749 - DNA, 83 bp, Homo sapiens
cagcgcgcacttcacccgcagttgaagccccatgtgccactcccctgatctgcagcttcggtaggccggtggacctggagaag

SEQ ID NO: 130750 - DNA, 90 bp, Homo sapiens
ggacatgtacactcttcttcgcctttgagatgctttaatctggatcccaatagagttttggatgtcattttagaagtgtttgaatgcagg

SEQ ID NO: 130751 - DNA, 100 bp, Homo sapiens
cacagtgaatcttggttgtaaacttgacctaaagaccattgcacttcgtgcccgaaacgccgaatataatcccaaggtggagccgccaccaaaatgcaga

SEQ ID NO: 130752 - DNA, 78 bp, Homo sapiens
cctttttggccctctgtgctacagattctttggatgggaagagaccttgaaaggacctctagtttatcctgcaactcc

SEQ ID NO: 130753 - DNA, 50 bp, Homo sapiens
ggcatattttacatggttgtgtcaagaactgctctacacttggcctgtgc

SEQ ID NO: 130754 - DNA, 100 bp, Homo sapiens
tggtagtgctggaaaagaaggggggccctttaaagctcttttaagacaacagactcaatcagcgttggaacagaggggattaatgaaaatcaagttccat

SEQ ID NO: 130755 - DNA, 97 bp, Homo sapiens
agattcgcagtggtcgcttcttctccttggaaacatgccctgaactgtcacagaatgaaaccagcgctcttcagcgtcctgtgtgagatcaaagaga

SEQ ID NO: 130756 - DNA, 98 bp, Homo sapiens
ggaagacaaggactatccttgaggcaaaacaagcgaccccaccaacaactgaacgctttggtcaggctgctacaatggaaggaattggggcaattggt

SEQ ID NO: 130757 - DNA, 100 bp, Homo sapiens
gtctcagctgcagagcaggctggagcccaagccccagccccctgtggctgaggctacaccccggagccaggaggttacagaatgtctgaaggggacagtg

SEQ ID NO: 130758 - DNA, 75 bp, Homo sapiens
agacaccctgtccctcacggacagcagcgtggacccccatcaaccgaatccccatcatggccaaacagatcctgg

SEQ ID NO: 130759 - DNA, 89 bp, Homo sapiens
gtgctcgcgctactctctctttctggcctggaggctatccagcaattcagaaggagctggcggacatcactttagaccctccacctaat

SEQ ID NO: 130760 - DNA, 100 bp, Homo sapiens
aaatagagtgtgtatcagcagagaccaccgaagactgcatcgccaagatcatgagagagtctacaaggagattgaacaggtggttggcccacatcgccct

SEQ ID NO: 130761 - DNA, 100 bp, Homo sapiens
aagaaggtgaagatgatacctttctaacagcccaagtggaagtttagctgatgctataagtgaaaactacagaatcatgagttactttaaagaagcagag

SEQ ID NO: 130762 - DNA, 100 bp, Homo sapiens
tatttgcagccagtactctatatgaacaatccgtctggatcacggatgtaggaagtggttatgatgtgattgctcaagcccaatctgggactgggaaaac

SEQ ID NO: 130763 - DNA, 101 bp, Homo sapiens
ctggcctcccaagccctgataaacatccacgacagcgatggcagttccagcagcagccaccagagcctcaagagcacagccaaatgggcggcatccctgga

SEQ ID NO: 130764 - DNA, 82 bp, Homo sapiens
ccgctgcatccccatcttcggcatgtccttcgcctgccagtcgtttttctatatgagtggagaagacagctgttaccaggga

SEQ ID NO: 130765 - DNA, 50 bp, Homo sapiens
gtcagatcttctcacactgctgtaaacaacatctgaatgaattgatgacg

SEQ ID NO: 130766 - DNA, 100 bp, Homo sapiens
cataaagtgcctgccctctagcctctactcttccagttgcggcttattgcatcacagtaattgctgtacgaagactctttttgatcagaacaatgctgca

SEQ ID NO: 130767 - DNA, 50 bp, Homo sapiens
ccccgagaaccgtcagtttgagccagatgaacttggcaagtggcttgaac

SEQ ID NO: 130768 - DNA, 100 bp, Homo sapiens
aacatatgtttatgttctaacagtcactgaaatattagaagattgggaagattctgttaatattgggctgccatcctggaaaaaatgcctcttgtggagc

SEQ ID NO: 130769 - DNA, 100 bp, Homo sapiens
gaatatgatgtcaagtatccagccttgatacccattaccactgcctcctttattgcagcaggaatttggtagtatcacattgtttgcagtcattaccgtc

SEQ ID NO: 130770 - DNA, 99 bp, Homo sapiens
gaaaaactttctggaaaggaaataaatgggagaaaaataaaattaattgaaggcagcaaaaggcacagtcagtcaagaacaatacccaagtgctcatca

SEQ ID NO: 130771 - DNA, 90 bp, Homo sapiens
caagacccatctttatgcaaagccagcgttacagtaatgttccagaaataagcgggttttgaaaacaaaaaaaagaaggagtggaagagg

SEQ ID NO: 130772 - DNA, 146 bp, Homo sapiens
tgttggggagaagaggattggaggtgtcagtgttaaaggaacctctacaacgaaggtgaagccacggaagataaggtatcgagaaccttccctgcgaacttcagaggaacttccagctgatgcgagagctggaccagaggacggaa

SEQ ID NO: 130773 - DNA, 100 bp, Homo sapiens
cccatatatgattttctttaaggatggtttagaaatggaaaaatgtatgaccgcacctcgagcaggagtggggatgccacgtctgcccccagcgcccggc

SEQ ID NO: 130774 - DNA, 83 bp, Homo sapiens
tgaagaagaagattaacctggagttaaggaacagatccccggaggagggaaagcaggcaggatgggagagtcgccgatagaac

SEQ ID NO: 130775 - DNA, 101 bp, Homo sapiens
gcgatacaaacttggagttcgcttgtattaccgagtaatggaatccatgcttaaatcaagggcacatctgctcgataacacagagaggctggaaaggtcat

SEQ ID NO: 130776 - DNA, 93 bp, Homo sapiens
gccgcgcactcggagccggcacggctcggcgacaatgcagatcttcgtgaagactctgactggtaagaccatcaccctcgaggttgagcccag

SEQ ID NO: 130777 - DNA, 101 bp, Homo sapiens
atgcagcaagagggtactccatatacagtgaaagtaagtgaacacagtctcctgccccttatgctggagcagtttccgtttctttatgtttctggcccaac

SEQ ID NO: 130778 - DNA, 75 bp, Homo sapiens
gaaacatgcagattatatcgcatcctatggctcaaagaaagatgattatatttggaacttggccacaaatcgcct

SEQ ID NO: 130779 - DNA, 125 bp, Homo sapiens
agcagatggcggatgccctgcagtacctgcagaaggtctctggagacatcttcagcagacctgcaggctgggacaatgaaaagaaaatagctattttacatgaaaattttacaaccgtgaagccg

SEQ ID NO: 130780 - DNA, 97 bp, Homo sapiens
cctcctaagtagctgggattacagggagtcaaggtggacgcgagagaccacagtggagccacagcccggatgctggccaagcagtacggacacatga

SEQ ID NO: 130781 - DNA, 100 bp, Homo sapiens
cccgggtcccggatccccgcgcacccggccagctgaagggaactgtgcgcccagccaatgacttcaaccctgacgcagatgccaaagcgctgcggaaagc

SEQ ID NO: 130782 - DNA, 76 bp, Homo sapiens
aaacaagatgatatgtgggagcacatcgcaactttcaatgctttaggctcataggcggaagggacttgccttgtct

SEQ ID NO: 130783 - DNA, 83 bp, Homo sapiens
ctggagcctcagttggaagcagccgatccagcctgcggagcctgtggggcagggattaatgaaaatcaagttccatcctcaga

SEQ ID NO: 130784 - DNA, 100 bp, Homo sapiens
aacatctcctccatctatcagttccattctcagttcttcctcccagagctgcagcggcgcctggacgactgatgaacaagagaactgggcaacccatgat

SEQ ID NO: 130785 - DNA, 75 bp, Homo sapiens
gcggccctcagcggccgcgaccgagtcatggctgagacctacggttcacgcttacatcatcagctacctgaagaa

SEQ ID NO: 130786 - DNA, 75 bp, Homo sapiens
gagcaatccaatccatctatggtattggacatagagtaaagcttgagagcaactttgcctccattgtgtttgcca

SEQ ID NO: 130787 - DNA, 74 bp, Homo sapiens
gtacggcaagcagaagatctattttgcggatcaggtcttgggtggtgcctatgatgagttcatctttgctcctc

SEQ ID NO: 130788 - DNA, 50 bp, Homo sapiens
gaatcaaagggccgggagcgatgaggtcagctggcggctccagtcctgaa

SEQ ID NO: 130789 - DNA, 75 bp, Homo sapiens
tcatacttaaatacttgacatctaaaatttttggtattgcagatgacacaggctagcctcaatgaagcagctgag

SEQ ID NO: 130790 - DNA, 94 bp, Homo sapiens
ataattaatgaccgaacagaaacccctcctcccctagcttcactcaatgttagtaagggatgccgttctgagtgcctgactgcctcgccccgaa

SEQ ID NO: 130791 - DNA, 90 bp, Homo sapiens
cgggaagtttggatcctggttccgtccgctaggagtctgcgtgcgagtatgccgagattttgctgtcctggaggaccacaccctggctca

SEQ ID NO: 130792 - DNA, 100 bp, Homo sapiens
ccaggaagtaccttcgcagtgtaggagatggagagactgtggagtttgatgttgttgaaggagaaaagggtgggaaaacatggaaaggtgtttttaacag

SEQ ID NO: 130793 - DNA, 100 bp, Homo sapiens
cctgcccggcggccctatgccgggggtgccgctcagaaagcgccgcccttggtgggccgctgggtgccctttgccgctgtggctgcggctaactgtgtca

SEQ ID NO: 130794 - DNA, 100 bp, Homo sapiens
ggagcacggaggacggggccgggcgacctgggcaccagcaggacccgaggccaggagccaggggcccagaaggcatccgagatgtttccaaatggagtga

SEQ ID NO: 130795 - DNA, 101 bp, Homo sapiens
ctatgcctgggtcaaccgctcttccatgaccttcttaacccgtcagtggcggcttatttggcctccccaggacggactggagcatcagtagtgcctgagtt

SEQ ID NO: 130796 - DNA, 88 bp, Homo sapiens
atgctgcagaggaagaagccattagatggtggagaaagctttgccctttcggatgaagcatacagatccctacgagatcaagataagg

SEQ ID NO: 130797 - DNA, 73 bp, Homo sapiens
ctggataaggaccagtacctgcccaggaaactggtggactggctgacggagaaaatgagggaagccaacttca

SEQ ID NO: 130798 - DNA, 75 bp, Homo sapiens
acagaagctcatccgcaaggtgtccacgtcgggtcagatccgacagaagtggatgtggccacggcgctgcctctg

SEQ ID NO: 130799 - DNA, 98 bp, Homo sapiens
gctgtggattgtcagcagctgcctctgcagagcctggacggctccctccacgtcccttccagaaagctgagtctgatctggattacattcaatacagg

SEQ ID NO: 130800 - DNA, 97 bp, Homo sapiens
gtgagatgtttcatcccaacagcattggaggtgatccttttaatggaacagattttattgactgcctcgaaatctttttgaacgattctgccacaga

SEQ ID NO: 130801 - DNA, 75 bp, Homo sapiens
taaaccctcacaagagctgttatttatctgaaagcttctgaaagttctgctgaagacagtgagcaggaagatgag

SEQ ID NO: 130802 - DNA, 75 bp, Homo sapiens
agatgtggttggaatccttgctgtgctgaatcctggctgtgtgaccccaaggtcctggcggcagagaccacgtcc

SEQ ID NO: 130803 - DNA, 90 bp, Homo sapiens
gtcccgggagcccggcctcgtgcgccgcgctttgaggtgtgctgggcatcaaggtgaagatcatgctgccctgggacccaactggtaaga

SEQ ID NO: 130804 - DNA, 98 bp, Homo sapiens
ctaccatcctttacctgtagccctggagagaggaaaaggagcttgtgcagtggaggggtcaaagaaaactgatgttgaggagagaccaagaacaacac

SEQ ID NO: 130805 - DNA, 90 bp, Homo sapiens
gcccgggtgaacgcccaggacaatgaacagcgatttcttgcgggagctcgtgatcaccatcgccagggagggccttgaggacaaatacaa

SEQ ID NO: 130806 - DNA, 82 bp, Homo sapiens
tgccgcccaagtcctgcagcacccctgggttcaggggggctggatcttcaacgtggttccttggttggtggcgattccggcc

SEQ ID NO: 130807 - DNA, 83 bp, Homo sapiens
cggtggcatgagggtcggaccccagtaccaggcggtggtgcccgacttcgaccccggacaaccctccatatgataagggagcc

SEQ ID NO: 130808 - DNA, 51 bp, Homo sapiens
cctacatttagcgcatcatgtgatccggaccattcctcaagaattttgtat

SEQ ID NO: 130809 - DNA, 97 bp, Homo sapiens
caagtttctggacactctccgagaggtgaaggtgaatcacaagcctttgagaacagcctgagccttcagccctcacagatgcccagcctcatagctg

SEQ ID NO: 130810 - DNA, 100 bp, Homo sapiens
ggccccgaccccaagtgcggggacctccggcgaataaagaaaaatggctacaaacttcctagcacatgagaagatctggttcgacaagttcaaatatgac

SEQ ID NO: 130811 - DNA, 100 bp, Homo sapiens
tggggctgtttggaaagacccaggagaagccgcccaaagaactgggaataaccagcaagtacctgtcaagaatgaagtagatcattgtgaaaatttgaag

SEQ ID NO: 130812 - DNA, 50 bp, Homo sapiens
gtcggttttcaataacaagaacatgcaggatttggactgctacacgaccg

SEQ ID NO: 130813 - DNA, 128 bp, Homo sapiens
gtataacagcattggcagaggagctggctttgagaggatgaggcgtggtgcttatggtggaggctattgagggcacctacattgacaagaaatgccccttcactggtaatgtgtccattcgagggcgg

SEQ ID NO: 130814 - DNA, 100 bp, Homo sapiens
agtctcttggaagagtttggtccaattgaatcaattaatcaagcctgtggttatgagtttaccagcaagctacatcggatgtatacagatatgagtgtca

SEQ ID NO: 130815 - DNA, 75 bp, Homo sapiens
gtgttcaataccatccttaccaccagaagctatccacaacttcgcagagtttcaccagtgatcattaaagaatgg

SEQ ID NO: 130816 - DNA, 83 bp, Homo sapiens
ccgatttaaagctgagctgcgaggaaaatggcggcgggagattactctcgtggctttggtggccggtacggggtggagaagga

SEQ ID NO: 130817 - DNA, 100 bp, Homo sapiens
tggctgcacagtcagcgccgaaagttgtgctaaaaagcaccaccaagatgtctctaaatgagcgaaaaatggagtgctggcatacattgggaattttcgc

SEQ ID NO: 130818 - DNA, 100 bp, Homo sapiens
ctcggagagggtgagttgaaacgctgcctggaaaggaagtaccaggacttgcacagagactgacttgcataccaaatgtgtggtggatgtggatgcaaac

SEQ ID NO: 130819 - DNA, 75 bp, Homo sapiens
ctgacgactgtgcaggaagaaaacgagccagtgatttacaatagagcaaggctgaatattctgaactggtcgaaa

SEQ ID NO: 130820 - DNA, 100 bp, Homo sapiens
ccgccatcaaccgccagatcaacctggagctctacgcctcctacgtttacctgtccatggcaatcgtggatgggtttgaagatgctgaggtgctgctgcg

SEQ ID NO: 130821 - DNA, 83 bp, Homo sapiens
atctcacccaattactctgctcagcttttatgaaatgtggaagtgaggacactgctccagttattatatttgtttccaaaatg

SEQ ID NO: 130822 - DNA, 100 bp, Homo sapiens
tctccaccaggatcacgtttgagtgtgctcagatatcgtttgaccttgtctgtgtcaatgcgtggatgctggacctcacccaagccatcctgaacctcgg

SEQ ID NO: 130823 - DNA, 97 bp, Homo sapiens
caagacctgctctcccctcggaaagggggacatcctcctgcagttttaagcagggtctgaaaacccttggtgttttggagaaaattcaggcttatcc

SEQ ID NO: 130824 - DNA, 82 bp, Homo sapiens
gaagctcggggacgcgaggagccggcgtggccctggagcccactgcggaagagggcagcccggcaagcccgggccctgagcc

SEQ ID NO: 130825 - DNA, 74 bp, Homo sapiens
gtccacttctaaattcttgtcttagtgaaagaccacctgttcagaacattgcttacagaaatatttaaaaatga

SEQ ID NO: 130826 - DNA, 75 bp, Homo sapiens
atccccaacggtgaatggctctgtccccgttgtacgtgcccaccagaagtatgtccgacaagcctggcagaaggc

SEQ ID NO: 130827 - DNA, 101 bp, Homo sapiens
gcgtggggcctcgctaaggaattcccggcccctcagggccacggctttagcggtgtcttttgcgccaccaattaccctagttatgggcccatcatctcacc

SEQ ID NO: 130828 - DNA, 83 bp, Homo sapiens
attttacctcagtataacattagcgtgcctacagcagttgcacatgattggtgaaggaagccgtggagctacactggaaatga

SEQ ID NO: 130829 - DNA, 88 bp, Homo sapiens
tttgataattttgtggctgacaaagacacagtgctgctggagttttatgctccatgcttcttctatcaataattcgcctcaagaatgg

SEQ ID NO: 130830 - DNA, 100 bp, Homo sapiens
gcccaaagtcatcgaccaggagcatgatgtggtgtggaccgaagcttacattgacagcactcttcttaatgaagaggataactcagaatcatcggctata

SEQ ID NO: 130831 - DNA, 100 bp, Homo sapiens
taggcgacaggccgctgacggccggaaggaaaatggtcacttatacatctcaagaggatctggtggagaaaaagtgcttagcaaaaaaatatactcacct

SEQ ID NO: 130832 - DNA, 100 bp, Homo sapiens
tggatgaagacggcggcggcgagggtggtggcggagcctcacagtctactcagagaaaaataaaagaaggcaaaatgagtcctccccatttccatgcaag

SEQ ID NO: 130833 - DNA, 97 bp, Homo sapiens
gtttgatctcagactgctgtgctagcaatcagcgagactccgtgggcgtaggaccctccgagccaggacaccatgtaaaattgaacctagtataaac

SEQ ID NO: 130834 - DNA, 82 bp, Homo sapiens
taaagctgagctgcgaggaaaatggcggcgggaggagccttcacgtaaatgggtccagtcatgcctcccagtaagaagccag

SEQ ID NO: 130835 - DNA, 99 bp, Homo sapiens
tctggttttgtctctgctgggcctgtgtgcctggaaaggaattgttttggcctaggatcatccagaccctgcttttacatggaaacatcatcacctctc

SEQ ID NO: 130836 - DNA, 82 bp, Homo sapiens
cgtcaacctgtcccacagcgaaaggtgggatgctatggaatatgatgagaagctggcccgtttccggcaggcccacctcaac

SEQ ID NO: 130837 - DNA, 88 bp, Homo sapiens
cggatttttggcctcatactctgttatagataaacaagattactcttgtctctgctgctcctgggaaagtgatttgtgaaatgaaagt

SEQ ID NO: 130838 - DNA, 75 bp, Homo sapiens
gaggacgtgaaggcgtacggagtctgggagtagtacaccacgtaggaaacatgccctgaactgtcacagaatgaa

SEQ ID NO: 130839 - DNA, 97 bp, Homo sapiens
gtcaagtggcaactccgtcagctcgttagaaagatggaacaagaggctgagaggcgcaggcagccacaaataaagcaagagccagaatcagaagagg

SEQ ID NO: 130840 - DNA, 75 bp, Homo sapiens
cggcttatggaccagtggcagcagcggcggtggcggcagcaagaggatcaggtcaaaatgcagatcttcgtgaaa

SEQ ID NO: 130841 - DNA, 89 bp, Homo sapiens
gacagattgtaggaccgagcgcgggcaggcgggaggcaacggagctaccagccgggctgcacaaagatgttcagggataactcggccat

SEQ ID NO: 130842 - DNA, 127 bp, Homo sapiens
gccctcaccgccctcaccacccctatccagacggctgcccttcaagtaccatggaatgcagtagccctctgggcctgggatattgtggttgataactgtgccatctgcaggaaccacattatggatc

SEQ ID NO: 130843 - DNA, 76 bp, Homo sapiens
gcttagcgcacccatcccaccttcccgcaccctgggaccggtcaaaatgcagatcttcgtgaaaacccttaccggc

SEQ ID NO: 130844 - DNA, 100 bp, Homo sapiens
aatattattaccagaggggctgcctctaccggctgcgggccctgggggagaggaaccacctggatctcacagtgggccggaccatgggaaccccaaagcc

SEQ ID NO: 130845 - DNA, 100 bp, Homo sapiens
tcaaggccgacgtcaacctgtcccacagcgaaaggtgagaagccctaccactgcaactgggacggctgcggctggaagtttgcgcgctcagacgagctca

SEQ ID NO: 130846 - DNA, 90 bp, Homo sapiens
ggagagtctgccggcggagaatataaggctttacaggaagtatggtgctggcatctgcttggcttctagagagtcttacaatcgtggagg

SEQ ID NO: 130847 - DNA, 75 bp, Homo sapiens
gagcggaagaatggcagtgctcaaactcaccgaccaggagctatgaagacatgattggtgaggaggtgccatcgg

SEQ ID NO: 130848 - DNA, 100 bp, Homo sapiens
ggctgctgtcgcccagcgccgccccgtcgtcgtctgccttcgcttcacggcgccgagccgcggtccgagtctgccatcatggatgttctcgcagaagcaa

SEQ ID NO: 130849 - DNA, 90 bp, Homo sapiens
tgagcaaagtgcgtgaggagtttaaggagctgaaagcgcggtcaccagtgaaaagttgtgcagagcccaacatgagcttcatttccaagc

SEQ ID NO: 130850 - DNA, 75 bp, Homo sapiens
gtggttggaaatggcacctatggacaagtctataagaaatgttgctgaagtgctgctgaaagggccagagatgca

SEQ ID NO: 130851 - DNA, 103 bp, Homo sapiens
gtccgcggcggagcgagcgagcggccggcaggttgggaggagcggccgaaggcacaccttgggcccaccccacctccacatagccttaattacaaatcagagg

SEQ ID NO: 130852 - DNA, 97 bp, Homo sapiens
aagtgctccactcgaacagatgtgagcgagaaagccgttgcctccagcaccacttctaatgcagtcctgcgttaactgcggccgggaggctatgagc

SEQ ID NO: 130853 - DNA, 116 bp, Homo sapiens
ctctaccttaaggatgtgcaggatcttgatggtggcaaggatgcctacaccaactaatgttacaattgaatcctataacatgaaccctatcgtatattgggagtaccagatcatgc

SEQ ID NO: 130854 - DNA, 100 bp, Homo sapiens
ccattggccagtatgaagtggtgaaggagtgtgtgcagcggcgtcctgcctctgcggctctgccccctgcatcctgtgcagctgctgccccgccagccgc

SEQ ID NO: 130855 - DNA, 95 bp, Homo sapiens
gctgaccctgatggaggaagtgctcctgctgggcctcaaggaccgcgaggtgaatgattccaattgtgaccaagaacttctttccctgctcctgg

SEQ ID NO: 130856 - DNA, 75 bp, Homo sapiens
acttctgctacagacgactcagatgtagtaactggagttagtcccctgctcttcaggaaactcagtaatcctgac

SEQ ID NO: 130857 - DNA, 82 bp, Homo sapiens
gagatcgtcaagtctcccagcgaccccaagcaataccggtcagcccaaggccaaccccactgtcactctgttcccgccctcc

SEQ ID NO: 130858 - DNA, 95 bp, Homo sapiens
gggtctttcttgtcaactgctcacgacagaaggcgtctcatggcgttggaataccggctctcagcggctcagcatctggaatcaagagacccatg

SEQ ID NO: 130859 - DNA, 100 bp, Homo sapiens
tccagcctgagccccagccaggacgagaggatgcggagcccgcagaacctccacagtcaagaggacggcatcacccaagagaaaatcaacgagatgcggg

SEQ ID NO: 130860 - DNA, 75 bp, Homo sapiens
ccccgagcgggacagcgcggcggggagcgacgaagacacctatggctgccgatgaaggctcagcagagaaacagg

SEQ ID NO: 130861 - DNA, 78 bp, Homo sapiens
ggtgcaagaggcgcaaacaagccaatcccaggaggaaaaacggtatctatgccagcagctcatgcaacatcatctgct

SEQ ID NO: 130862 - DNA, 89 bp, Homo sapiens
ggcggcggcggcggcggcgcgcgggggcgacgcgcgggaacaacgcgagtcggcgcgcgggacgaagataccggggagaccacgacgct

SEQ ID NO: 130863 - DNA, 98 bp, Homo sapiens
cggaaccccacccaatttcagttgcccaatgaactgacttgtaccactgcactaccagggttccttggatatcacccagagtattgaagacgacccac

SEQ ID NO: 130864 - DNA, 109 bp, Homo sapiens
caggacttccggtcgccatgatggctgtgggcggtaaacgcggttagtgcaagcatctgggccatcttcaatgactcgggcagccgcaagtagctcctccagcgccagc

SEQ ID NO: 130865 - DNA, 98 bp, Homo sapiens
tgtagtacagagcggactgcagttaaacccatccagagtaatggctgcggccttacccaggaccctgggggagttgcagctgtatagaatattacaaa

SEQ ID NO: 130866 - DNA, 50 bp, Homo sapiens
gcggcggcagtgacgtcgccgggatttttagactctgaggagcagttgga

SEQ ID NO: 130867 - DNA, 96 bp, Homo sapiens
aggaagcatgctgtcctatgtcagcaaaaactggagcagaaattggaggctcagcataggccttgtgaaaaagggtaaagaacaaaacacacagcg

SEQ ID NO: 130868 - DNA, 90 bp, Homo sapiens
ctttggccactttacttcctgccagccccttctactgaattagtttctggaggatctgataatcaagtgattcactgggaaatagaggat

SEQ ID NO: 130869 - DNA, 98 bp, Homo sapiens
ttaattgtcacagccacagaatgtcgggtcacagaaagtcgagagagccaaatgacgattgaggagaggaagcagctcatcactgtgagagaggaggc

SEQ ID NO: 130870 - DNA, 90 bp, Homo sapiens
cggccggtgccagcacctttcggcttctgagacggcggcagcagcggcattcaggtgaagttcatccacgaccagacctccccaaacccc

SEQ ID NO: 130871 - DNA, 100 bp, Homo sapiens
ccggtaccaagaaggggagtgcccgcggcagcaacatgagcagcccggagccccccacagagccccccgagcccgacaaccccacctggtcgactcagcc

SEQ ID NO: 130872 - DNA, 74 bp, Homo sapiens
tcctttacctttagacgtattagaagatatattctggtgctaaaatgatgtattttctggacaagtcaaggcag

SEQ ID NO: 130873 - DNA, 90 bp, Homo sapiens
aactctgccttttcccagaaggaggaggggaaaaatgaccaagttccaggtaaaacttccttttcctgtagatcaaatcacagatcttcc

SEQ ID NO: 130874 - DNA, 78 bp, Homo sapiens
cggagcttctcagaagacagagggttttcttttgaggttctatggggctcttctgggcacagtctgcatgctgtattt

SEQ ID NO: 130875 - DNA, 100 bp, Homo sapiens
ggtgctggacgagggcgcctgtgtgggcctgacctctcgggacacacccagccctgtggacccagacaccgtggaggtgttgatgacctttgaacccgac

SEQ ID NO: 130876 - DNA, 50 bp, Homo sapiens
gacagtgaaagccgcggaggtaaaaaggtgtgagcggtactgggcccagg

SEQ ID NO: 130877 - DNA, 90 bp, Homo sapiens
ccgcctggacggctcgggcgctggagctccagaacctgggtatcaacccagcaaacattggcttcagtaccctgactatggagtctgaca

SEQ ID NO: 130878 - DNA, 90 bp, Homo sapiens
cggcagatatccgtgaaggctctaggtttttcttcccccagtccctcagctgctgctgctgctcaggaggtcagatctgccactgatggt

SEQ ID NO: 130879 - DNA, 75 bp, Homo sapiens
cctatggtggttccatgtgtgctaaatgtgttcgtgacaggatcaagcagtgcaccaccgtgaacttggaggacc

SEQ ID NO: 130880 - DNA, 100 bp, Homo sapiens
tgcaggcgggggtgctgcagaggacacgaggcggcgggctggagacatggaccgcggcgagcaaggtacaccagtactatagctgtctcccagaagagaa

SEQ ID NO: 130881 - DNA, 100 bp, Homo sapiens
cgcgttcttgagtcgggaaatggccgctgtgtggttgcaacggagataaattcccggaaccgcgattcggcgtgtcagatcagttggccttatttcctca

SEQ ID NO: 130882 - DNA, 80 bp, Homo sapiens
gctcatcaccaaggccaagaacgggcacctggctgtgaatgagaagctgagccgcaatgagacgcaggtggacggcgcca

SEQ ID NO: 130883 - DNA, 90 bp, Homo sapiens
ctcgtagtggctgcggcgcgggccgagaaggaagcctccggccagctgagcctcgcttctctctagtggatgccacctccctgcacattg

SEQ ID NO: 130884 - DNA, 83 bp, Homo sapiens
gcagccggcgggtacctgcggccaattcggtggaacgaggacgcggactgcgaaggcagacgccgcaccaggctgcaggccag

SEQ ID NO: 130885 - DNA, 100 bp, Homo sapiens
ctcatgagaccagtgcccatgaaggtcagactgagtataactttgaaaatgcatctcagacatttgatgacctccctgcaagatttggttatagacttcc

SEQ ID NO: 130886 - DNA, 50 bp, Homo sapiens
tgtggaagggcgctattatctacaggacccagatgatgtggtaccagttg

SEQ ID NO: 130887 - DNA, 100 bp, Homo sapiens
ggacccgaggccaggagccaggggcccagaaggtggaagcagggaaaggcctggagatgaggaagctggttctctcggggttcttggccagcgaagagat

SEQ ID NO: 130888 - DNA, 75 bp, Homo sapiens
aatcctcctacctttgtgaatatgactatgtgaaggaactggcgctgaagaccctggggacagatggcctttttc

SEQ ID NO: 130889 - DNA, 100 bp, Homo sapiens
gacctcccagccatcatggtgtccaacatgctagcacaggacagccacctgctgtcgggccagctgcccacggtgaaagaacttgtcctggacaacagtc

SEQ ID NO: 130890 - DNA, 99 bp, Homo sapiens
ctctgctacttatatgttgtcatgcaagcctcaaagcccaagtattactttgcatggacattagagaaagtggctcatgccaaagaagaaaaccttagt

SEQ ID NO: 130891 - DNA, 87 bp, Homo sapiens
tgattacccgttaagtcccccaaagatgagatttacctgtgagatgtttcatcccaacaggctgaaatctctttaatgatggaggga

SEQ ID NO: 130892 - DNA, 83 bp, Homo sapiens
taactgtctttgtgcctcagtggcgcttcagtaaggatgccaaagtcagagcctcgtggtggaacatcggacccattcaagag

SEQ ID NO: 130893 - DNA, 98 bp, Homo sapiens
ttattatcattgaaacggaccacaatgcctacactgaggccacgaaagctcagagaaagcagcagatggcagagagtatgaagctgagcagcctccct

SEQ ID NO: 130894 - DNA, 75 bp, Homo sapiens
cacggacgcaggcccagtgttcgtcaaagtcaaccgcaggacgcagtggtccatgctgtggacggcaccgccgag

SEQ ID NO: 130895 - DNA, 89 bp, Homo sapiens
ggccgagcaggaggcgccatcatgggtgaggacgcttgagcggaagttagaagcaaaaatgatcaaggaggaaagcgactaccacgacc

SEQ ID NO: 130896 - DNA, 97 bp, Homo sapiens
agacagatcgccggggaggcagcgcgggatcccagcctcaggcgtgcgcggacggtgtgcgggatgaatttcacccattcatcgaggcacttcttcc

SEQ ID NO: 130897 - DNA, 100 bp, Homo sapiens
tgatcatcttgggagtgatttgcgccatcatcctcatcatcatcatagacaaaacctgctacaaccccctcttcaactacgaggacatgcaggagatcac

SEQ ID NO: 130898 - DNA, 80 bp, Homo sapiens
gaagtgacccccacaacgatgcgtctcctggatggataacgaaggaggcccaacttcattcaataaggagcctgacggat

SEQ ID NO: 130899 - DNA, 74 bp, Homo sapiens
gcagtccacgcaggagatccatgagaagaaaccaaggtgtatgttggtaacctgggaactggcgctggcaaagg

SEQ ID NO: 130900 - DNA, 50 bp, Homo sapiens
gtttgagtccccttgcccgctccttcagggagcaaagcttgtattggctt

SEQ ID NO: 130901 - DNA, 95 bp, Homo sapiens
cggggccctctcagcaagaacgggaacaaaactctgaagacttctggatactgaagatgagctcagtgacattcagactgactcagtcccatctg

SEQ ID NO: 130902 - DNA, 100 bp, Homo sapiens
gaggtatttcaaaatgagtgaagcatgactctcacagatgaaggcctagacgcagcaggaacgaatgcaggaatttgggaactgagctgtgcaagtgctg

SEQ ID NO: 130903 - DNA, 101 bp, Homo sapiens
ctggatcgcttacatctccagagaaatcctgaggactgcagcagaagttggaataattgagagtattcacctaaaaaacttcatgtgtcattcaatgcttg

SEQ ID NO: 130904 - DNA, 100 bp, Homo sapiens
aaagaaactaaaaaatggcagctctcagaatgggaagaatgagagaagtcatatgcccggcacaacctttttgctacttgatgagatatcacagcgcaac

SEQ ID NO: 130905 - DNA, 83 bp, Homo sapiens
ctggcggtgcccgaggagtagtcgctggagtccgcgcctccctggtgttctagaacagatcagacattttgtaatgatgcctg

SEQ ID NO: 130906 - DNA, 100 bp, Homo sapiens
cttttctcttcctgaatttgaaccaccgtttccatcgtctcgtagtccgacgcctggggcgatggatccgtttacggagagagaactcgatgccaccgca

SEQ ID NO: 130907 - DNA, 100 bp, Homo sapiens
atgtttggattgaagccgcctctgtattacttaccaggtctgccatcatggatgttctcgcagaagcaaatggcacctttgccttaaaccttttgaaaac

SEQ ID NO: 130908 - DNA, 98 bp, Homo sapiens
tatcagtctacgtgcaaccaccattagaattgacttgtgatcagttcacctttgaatttatgaaaagtggggctgatccaacaattgaaactgactct

SEQ ID NO: 130909 - DNA, 83 bp, Homo sapiens
gggcagcaagatggcgtctgctagtagggtcgttcagcaattctgtggtgttcttggtcacacatttatggagtttctgaagg

SEQ ID NO: 130910 - DNA, 83 bp, Homo sapiens
ggacaaccacaaggcagacatcagctcctggttcaacgaggccattgacttcatagggaaatcctcattgacgattcaatttg

SEQ ID NO: 130911 - DNA, 49 bp, Homo sapiens
gactctgtcaccaggagagcacgccaagacttaattcagtgcacaaatg

SEQ ID NO: 130912 - DNA, 100 bp, Homo sapiens
ggctccaacagggatgcgctgagcgatttcttcgaggtggagtcggagctgggacgtgccgtggaggtcccagcccccgctgcggttctcggaggtccgg

SEQ ID NO: 130913 - DNA, 82 bp, Homo sapiens
gtcggacctttcccgctggcgcgcagcctcagctaggatgaccagtgtcccagtgaaggaacgagtgaaggtgtctcagaac

SEQ ID NO: 130914 - DNA, 100 bp, Homo sapiens
cacgcccatcaggtggtggtggccaagtatgcgcccagcggattctacattgcctccggaggtgtgagtgcatgccaggttatgcaggtgacaactgcag

SEQ ID NO: 130915 - DNA, 83 bp, Homo sapiens
gcattatccaacggctgctggaaggtgagaagccctaccactgcaactgggacggctgcggctggaagtttgcgcgctcagac

SEQ ID NO: 130916 - DNA, 75 bp, Homo sapiens
gcagtcccgcggcagcaggatcacaggtggcagtagagaagagcatcacagaagttgctcaggagctgacagagc

SEQ ID NO: 130917 - DNA, 76 bp, Homo sapiens
cgggccgtgaacgaaagcagtgacggaggagcttgtaccaccgattatcttagaagacctaggactccaaaaatgt

SEQ ID NO: 130918 - DNA, 101 bp, Homo sapiens
atggcaacggccaacttcggcaagatccagatcgggatttacgtggagatcaagcgcagcgatgaaacctctgtagaggagcaggatgcaaccgacaggct

SEQ ID NO: 130919 - DNA, 100 bp, Homo sapiens
agccgcctcatgcagaactatgaaaaggtgtgatgaatgcagactctgctaccattttggctgtttggatcctcctttgaaaaagtctcctaaacagaca

SEQ ID NO: 130920 - DNA, 96 bp, Homo sapiens
atgcagcactggaagaaaatggtttggctgtgataggagtatttttaaagctcctattaaggaaccaaaaaagttgatgcccaaaacatccctccc

SEQ ID NO: 130921 - DNA, 100 bp, Homo sapiens
tcgccgctggggactgggaaatcagggcatcggagagtgccacattaatggccagctgaggtgggtgtcctggttggcaaagaccggtcaagtttttacg

SEQ ID NO: 130922 - DNA, 51 bp, Homo sapiens
ccatccctgcagcatgaacaagtgttgttacagatcttataacagtcggtt

SEQ ID NO: 130923 - DNA, 100 bp, Homo sapiens
cctgaagaagattccactcgtggtatgagagtggataatataatcaactcctctgcctgggctgcttccccaagcccacagtctgtaagaagggtctcat

SEQ ID NO: 130924 - DNA, 75 bp, Homo sapiens
cctacactgactctgatagatacaccaatttggaggagattacctaaaaccagatccatggatgatcttctttct

SEQ ID NO: 130925 - DNA, 75 bp, Homo sapiens
acagttcgctacacagcaatgcatcgagacccttcgcaggtgttacagtcgggtgaaagaacatggtgttgggaa

SEQ ID NO: 130926 - DNA, 76 bp, Homo sapiens
agccagtactctatatgaacaatccgtctggatcacggatgtaggaagtggttttcgaaaggccttacactctgac

SEQ ID NO: 130927 - DNA, 100 bp, Homo sapiens
cgggatggtgccacaggaggctgtgcgggccccgctccgcttcgaatggtattctaccttgtaaatactgttatttgtatatactgtaaatgatgacatc

SEQ ID NO: 130928 - DNA, 51 bp, Homo sapiens
cgagatccgagcccatgccacagccaaggccccaataagaaacccttttcc

SEQ ID NO: 130929 - DNA, 100 bp, Homo sapiens
agaaatccgcagaagcttattaaagttaagcctgtggacatctctacagcaatgagtgaacgggcacttgctcagaaaagactcagtgagaatgcatttg

SEQ ID NO: 130930 - DNA, 83 bp, Homo sapiens
aataccaggctaccatggtctacaagactctcttcgctctttgcatcttaactgcaggattctgatgagatggaggatgggcc

SEQ ID NO: 130931 - DNA, 90 bp, Homo sapiens
ggaagtaaccccttccgggagcctagatcctgtgctttactctgaagactcgaggaagacaatgtgtggcaccctggactacctgccccc

SEQ ID NO: 130932 - DNA, 100 bp, Homo sapiens
cgtgtctcgaccgcgtcttctgagtcagctggagaatgctggaggagaccttaaggatggccaccaccactatgaaggagctgttgtcattctggatgct

SEQ ID NO: 130933 - DNA, 99 bp, Homo sapiens
agagaaagctcgggcgacggccatcttcatccgtgaccgaagctggctttggtgctgacatcggaatggagaaattcttcaacatcaagtgccgagctt

SEQ ID NO: 130934 - DNA, 96 bp, Homo sapiens
aagatggaaaaccagttattgaatatcaagaggaggagttgttgctggaggaaagcaggaatgttcagaggcaaatgaagattctgcagaataagc

SEQ ID NO: 130935 - DNA, 90 bp, Homo sapiens
atgtctacggatgaggaaactgaggcctggagaggttaaagagacccgttcagagtcctacagtggcagccttaattttaaagaccccga

SEQ ID NO: 130936 - DNA, 95 bp, Homo sapiens
aaggagcagaagcagcccttacaagttgcaaaggcatcaactgtgaaatctgtgttagaattgattcctgaattaaatgaaaaggaagaagcata

SEQ ID NO: 130937 - DNA, 100 bp, Homo sapiens
aattaattcatcattagagaaattagatctgggtgactgtgatctggtaagaagcacatcactgtctttggaagtacagaaggagaatcatctgatgaca

SEQ ID NO: 130938 - DNA, 126 bp, Homo sapiens
ggacagcggccgggacagcggcgagacgcgcgtgtgtgagcgcgccggaccaagcgggcccagaagcggacaatgcagatcttcgtgaagactctgactggtaagaccatcaccctcgaggttgag

SEQ ID NO: 130939 - DNA, 74 bp, Homo sapiens
ccctgtcaagaaggtgccggtggtgcgagtcttcggagcgaccccggcagatgcctgaggaaacccagacccaa

SEQ ID NO: 130940 - DNA, 100 bp, Homo sapiens
cggaggagtctcagagctgtcagaaaggcattttaaattatacctgacatcaagtactgaacgtttttcacaaaatttcaaggtcgtggtggtggatggt

SEQ ID NO: 130941 - DNA, 100 bp, Homo sapiens
cgcgacctcggtacctcggaccagctctgtaaaagccccgcctctgccttcggatagggcggcgactggcggcgcgatggacctgaccgggctcctgctg

SEQ ID NO: 130942 - DNA, 131 bp, Homo sapiens
ggcgacggagggggcggccgggtccgcatcgagaagatgagctcagaggtggtggattcgaatccctacaggttgcccgaagctcagcagagagtcggaggctgctttttaaacctgatgccacagatgaa

SEQ ID NO: 130943 - DNA, 82 bp, Homo sapiens
tgtctttctctgaaaaaggaaaatataaaaatgaagcaagaggttgagtaacagcaacaagtgggaatggagactttggtga

SEQ ID NO: 130944 - DNA, 100 bp, Homo sapiens
tggcgacgcggggccatgtgcaggaccctaacgacaggcgcctccggcccatttacggcaagtgtcgtggacttcgtactgctaggaagctccgtagtca

SEQ ID NO: 130945 - DNA, 101 bp, Homo sapiens
gcggcagcagcagcggcgggaggagcctccggggttatacattggctcttcaaagacgttcacctcatcagagaaatccctgactcctttgcagtggtgta

SEQ ID NO: 130946 - DNA, 100 bp, Homo sapiens
ctgattaaggactatcgggagaaagtggagtccgagctgagatccatctgcaccacggtgctggtttaaacttacacgaatcgctttctggaggaggagg

SEQ ID NO: 130947 - DNA, 100 bp, Homo sapiens
tccaggccatcgcctgccgcagcgcccccgtcagcaaaacactctcttcttcagacacaggttccccaatatcaactccaagcccatcaccattgcctcg

SEQ ID NO: 130948 - DNA, 83 bp, Homo sapiens
cggaagtggctgcgtcgtcgacgctgggctttcgggtcccgcgcccagatgtgtatatctcatgattgatatggagaaactag

SEQ ID NO: 130949 - DNA, 100 bp, Homo sapiens
gctgagcgatatcacagaacacaagattaatcaatgtcaactgacaggacagtcggcccaatatgtcaagacctctgatcactagatcccctgcatctcc

SEQ ID NO: 130950 - DNA, 83 bp, Homo sapiens
tgctgccgggttgcgctccgtgcacctcttgcggctaatataatgccttcgtcgtctcatctctttggctcaatgccatgggg

SEQ ID NO: 130951 - DNA, 100 bp, Homo sapiens
cccgagttcatcgcctacccccatctccgcatcaggaccaaggagttcatgatcaagtgttgcccacaccaaatgcttcatccagagtcatagtacatgt

SEQ ID NO: 130952 - DNA, 83 bp, Homo sapiens
tcgctggcctgcgacccagccagccagcaacctggaccgctgtgagtacccaggaagctgcaccgtgtggcctggagctgtct

SEQ ID NO: 130953 - DNA, 82 bp, Homo sapiens
ttgcctgtgtcccacttgttcgcggcctataggatctcattttgcccaacggtggtactccagcaggtacttcaagtccagc

SEQ ID NO: 130954 - DNA, 100 bp, Homo sapiens
tgttgaatggagctcttctggcattgctgtttcctgtggtaaacactcggctggaagaagcattgcatgcatttattcagccagagattctggatggccc

SEQ ID NO: 130955 - DNA, 100 bp, Homo sapiens
ctgccacattgagatgatccttacggaaaaggaacagattgttcctaaaccagaagaggaggttgcccagaagaaaaagagccctgaagacaaggggtaa

SEQ ID NO: 130956 - DNA, 100 bp, Homo sapiens
gagccacttcagtgcgagcgaggagtccatggacttcctggataagagcacaggtagatgacattaatgctgataagaatatctcttctgcacagattgt

SEQ ID NO: 130957 - DNA, 75 bp, Homo sapiens
ctgtaacccagcctgtttcacttcttggttaccttttcagccaagggcatctgacccgtgctatttgctgtcgtg

SEQ ID NO: 130958 - DNA, 100 bp, Homo sapiens
ctcctattctgattgctacagatgtggcctccagagggctagattcagtgctcaagagtgaagaaaattctactgtctttagccacttaatgaagtaccc

SEQ ID NO: 130959 - DNA, 90 bp, Homo sapiens
ctgagatgcacagcctgaagacatctcatcagccatcagctcccttaaggactttgcctcccgggccaaactggcagttcaaaaactagt

SEQ ID NO: 130960 - DNA, 82 bp, Homo sapiens
agagcccatagcagtctgccagacaatagagcatatggattataagcgccatggctatggctagtgttaaattgcttgccgg

SEQ ID NO: 130961 - DNA, 98 bp, Homo sapiens
aaggaagtgaagaaggcgcatcactcccagctgcgcaaagcttgcgaggtggcgttagagctgcagaaactggagggcagcagtggacctgtgcggac

SEQ ID NO: 130962 - DNA, 97 bp, Homo sapiens
gagcagtctcaggcctttagtgatgatggtccagaggtgtccttctaaagctggtagaggtttcacgagtcatcagggacccagaacccttctcttt

SEQ ID NO: 130963 - DNA, 100 bp, Homo sapiens
tgagcgcccctctgctgaccccggggagcgtggactacgagttggcgcccaagtccagaatccgcgcgcaccgcgtatttgcataagcttttcaagagag

SEQ ID NO: 130964 - DNA, 75 bp, Homo sapiens
acctcgccaaagcagagaaatagttgtggcagcactgcctgaaggtatgagaccagattctaatctttatggttt

SEQ ID NO: 130965 - DNA, 100 bp, Homo sapiens
cgtggaccacatagacatttacgcggatgtcggcgaagagttcaaccagcggttaagaagattgtctaccaaatatagaacagaaaagatatatcccaca

SEQ ID NO: 130966 - DNA, 75 bp, Homo sapiens
tgctgggcaggtcatgagtcaccatggttctaagctggtctatgtccatcaccttcttggagaaggagcctttgc

SEQ ID NO: 130967 - DNA, 75 bp, Homo sapiens
gtgaccctgaacctctacgacacggccggttgggttaacggcatggagaacagtcaccccccccaccaccaccac

SEQ ID NO: 130968 - DNA, 123 bp, Homo sapiens
tgctgttcctgctcctgctcccgccgctccccgtcctgctcgcggacccaggggcgcccacgccaggtgctggagaatctggtaaaagcaccattgtgaagcagatgaggatcctgcatgtta

SEQ ID NO: 130969 - DNA, 100 bp, Homo sapiens
cccgcgccgagccggaggccgcgtggacccgaaagccgctgggaaaaataatagaatctgtccctccagctggccctgaggcatctgagtcaacaacgga

SEQ ID NO: 130970 - DNA, 58 bp, Homo sapiens
cccgttcagcacaccagtggggcagtgcctcgtgtaaagctttctgatggaagagagc

SEQ ID NO: 130971 - DNA, 89 bp, Homo sapiens
cggccaccgactactgtcagcagctgtgccagagtgcttgtgatttcacgtatttttgctgaactcgtaaaagagacacttggatggtg

SEQ ID NO: 130972 - DNA, 51 bp, Homo sapiens
cgggaagccatagctctgcatggattgatctgaagttaaacaaaaaaccac

SEQ ID NO: 130973 - DNA, 83 bp, Homo sapiens
tcagaatcgaatctcttctccctccccttcttgtttggtgccctggttgtcagatgttggaaagcagtaggacggaacatact

SEQ ID NO: 130974 - DNA, 75 bp, Homo sapiens
aaaaaaaggaagacgatgacttcaggaggccgtgtgcaggcggtcctgaccagtgactcaccagccctcgtgggc

SEQ ID NO: 130975 - DNA, 74 bp, Homo sapiens
gaggcgagccctggtggaggaagagatgacagcatattaaagtgagtgaccctgcgacccactctttggaccag

SEQ ID NO: 130976 - DNA, 95 bp, Homo sapiens
cggaccggcggcccaggcacggagaggcggcgagaccgcaggaagggatgagaccatgcagcctgcgaaaccatcctttcttgaatattttgaac

SEQ ID NO: 130977 - DNA, 80 bp, Homo sapiens
ctagaatcaaggatttcagcaacaatgcctctgttcaaactcccaggtgttcctccaagaaaagctggttatattgaaga

SEQ ID NO: 130978 - DNA, 100 bp, Homo sapiens
ccaacttcagccccagatgtcaccaagaaggcagcaacaactcatctccagtggattttgtaaataacaagaggacagacttatcttcagaacatttcag

SEQ ID NO: 130979 - DNA, 75 bp, Homo sapiens
gatcaacgtcctccgggaccggagtcagaaccctccgcagagtaaagatcaatgaactgagccatgttcaaatcc

SEQ ID NO: 130980 - DNA, 100 bp, Homo sapiens
ttgttgagcatgtcattcatctgttcaaggaggaagtaatgaccaaattaagtcattttcgagaatgtgggaaggatacgagcaagataaagcagcgagg

SEQ ID NO: 130981 - DNA, 75 bp, Homo sapiens
tgtcctacgacgaaattagccagctccgcctggttgcaaaagcttctcatttcagagagatgccaggatcctaag

SEQ ID NO: 130982 - DNA, 50 bp, Homo sapiens
ggcggagcagacctactcgtggtttgacatctacaggaaggtgcccaagg

SEQ ID NO: 130983 - DNA, 87 bp, Homo sapiens
tggtaggagtgacccagcctcgaagagtggctgctgttacagttgcccgaagctcagcagagagtcggaggctgctttttaaacctg

SEQ ID NO: 130984 - DNA, 75 bp, Homo sapiens
tagacatttacgcggatgtcggcgaagagttcaaccaggagccttcacgtaaatgggtccagtcatgcctcccag

SEQ ID NO: 130985 - DNA, 50 bp, Homo sapiens
accagaggtgcggaaggaacagaaagtgtaatgttcaagctcagaaatgc

SEQ ID NO: 130986 - DNA, 73 bp, Homo sapiens
tcacaataagagcagaggatggaacacttcagtgcattcaaggcttgggaacaatgggccgaggcattgtcat

SEQ ID NO: 130987 - DNA, 75 bp, Homo sapiens
ccactgccactacagggaagtgcatcacatgtcaggtacgcatagctgctaaattcatcactcatgcacccccag

SEQ ID NO: 130988 - DNA, 100 bp, Homo sapiens
ggacttgctgaaccgcttcctgggggactatgtggagaacctgaacaagtcccagctgaagctgggcatctggggcggcatggctctgtgagcgctgatg

SEQ ID NO: 130989 - DNA, 75 bp, Homo sapiens
caaacggaacttgccgcgtcgaggactgtcgggtgaagctcgtgtgtggagtgccacggtacaatcagacgacag

SEQ ID NO: 130990 - DNA, 75 bp, Homo sapiens
gatgattattgtatttcgccgtcaacagctttatagcaggccaaatcgactcttgtctggtgtgccactgtacaa

SEQ ID NO: 130991 - DNA, 100 bp, Homo sapiens
ctttgccagtttagctggatgctcattcagggctctggaggccacgggcatgatgcttcgggtcctggtgggggctgtcctccctgccatgctactggct

SEQ ID NO: 130992 - DNA, 100 bp, Homo sapiens
ggaaggagtacagggaagtctataagctttgcaacagaattacagagtatgatgcattatccaattggtttgctatttgatcttcttgcatcaagttcag

SEQ ID NO: 130993 - DNA, 100 bp, Homo sapiens
tggggtgtccgagttgccgccggagaggagtggcctcgcccgcttggagctcttgtccctggcaaagcgaaagcgcagtgactctgaggagaaggagccg

SEQ ID NO: 130994 - DNA, 75 bp, Homo sapiens
cttggatacaactgggaaagccgtctacactctcacctatgttgttagagttggaagcttggcagttggcctccc

SEQ ID NO: 130995 - DNA, 100 bp, Homo sapiens
cctctctgaagccctggacttgatcgagtcggaccctgtacccctgttcaagatctatgtggcggagctgatccagcagctgcagcagcaggcactgtca

SEQ ID NO: 130996 - DNA, 100 bp, Homo sapiens
cgcgattcggggaggtaggcgctgggccgaggagatgatgataattccgaagaaggcttccacactattcattcaggaaggcatgaatatgcattcagct

SEQ ID NO: 130997 - DNA, 100 bp, Homo sapiens
tattgcctttgattttgactatggaaattgggggaaaagatttgttgcaatgaaagttgtaaaaagtgcccagcattatacggagacagccttggatgaa

SEQ ID NO: 130998 - DNA, 100 bp, Homo sapiens
cccctgctcaggcttgcacccagacacgacaccatgcatctcctcggcccctggctcctgctcctgggtccccttcccctgagcccatctacaatagcga

SEQ ID NO: 130999 - DNA, 83 bp, Homo sapiens
gccggctgtaaagtcatcacctcctgggatcagatgtgcattgagatcaatgtccgagttaccaccatggatgcagagctgga

SEQ ID NO: 131000 - DNA, 80 bp, Homo sapiens
gcgcccgggaggaaggaacgaggcaaggagctaaagcagcgtgcgttcagccctggggcacagccaaaattggtcagaaa

SEQ ID NO: 131001 - DNA, 101 bp, Homo sapiens
ggcttccgaggagctgtacgaggaagattcttacctctgaagacaatgttaggaccaagatatgatagtcaagttgctgaagaaaatcggttccatcccag

SEQ ID NO: 131002 - DNA, 75 bp, Homo sapiens
aaggccctagaggcagcccatgggcctgggcaggccaaccaggatgctgaaaacgccattcaacagatgggtggc

SEQ ID NO: 131003 - DNA, 60 bp, Homo sapiens
cggcgacggcgcagtgcgaagcgaaacagaaaatgcatccgatgcagatttatggctcct

SEQ ID NO: 131004 - DNA, 75 bp, Homo sapiens
aggcatctacatgggcagaccaactcatggaatgcagtagccctctgggcctgggatattgtggttgataactgt

SEQ ID NO: 131005 - DNA, 99 bp, Homo sapiens
gatcgatctaagatggcgactgtcgaaccgagcgtttcccaaagtgtattctgcggaactagcacctactgtgttctcaacaccgtgccacctatagaa

SEQ ID NO: 131006 - DNA, 100 bp, Homo sapiens
ctggaggaggccaacgctgacctggaggtgctgaacgaggctcgtgtgcggaagcctgtgaacgtgcagatgctcttctccaatccactggatgagccgg

SEQ ID NO: 131007 - DNA, 96 bp, Homo sapiens
caatggtgacaaatacctggctattgcccctcctatcatcaagaattgcggcgagcagtaagaagcagcgtgtggaaaagggagacgattgttcat

SEQ ID NO: 131008 - DNA, 75 bp, Homo sapiens
aagtacatatgatttcagctgcaatggcagaactgataaatttcaaacggaagagagtggcagcatttagaaaga

SEQ ID NO: 131009 - DNA, 90 bp, Homo sapiens
cgctactctctctttctggcctggaggctatccagcgagatcatgaatcagacagataaaaatcaacaagaaatcccatcataccttaat

SEQ ID NO: 131010 - DNA, 90 bp, Homo sapiens
ggaatgttgtacaaacaggaaaagctgttgttgttgacctcctgtactggagagacattaagaagactggagtggtgtttggtgccagcc

SEQ ID NO: 131011 - DNA, 100 bp, Homo sapiens
agccgatactgagcttcttcctatttgccatggataacaacgaacttgatgcaagtgataggtttgccaaggtcagacctctcatcatccggatgaactg

SEQ ID NO: 131012 - DNA, 51 bp, Homo sapiens
ggcgccgcgccctcggcctgcacgggagtttgaccctgaagagttctacca

SEQ ID NO: 131013 - DNA, 101 bp, Homo sapiens
gttccctcggctgtggaccgggcggcacgcacgcggtgcagggtaacatggcggatgcggaagggtgactatgaccagagcaggaccaaagtgctgcacat

SEQ ID NO: 131014 - DNA, 101 bp, Homo sapiens
gcatcaccaccggatcaacttcgacaaatagacctgaaggagaagaaggagaaggtggaggagaaggcaagccggaaagagcgaaagaaagaagtggtgga

SEQ ID NO: 131015 - DNA, 73 bp, Homo sapiens
caaaagtccattcagaaaagacaagagccctgtgagtgatgtccttgcattgcccatttttaagcaagaagag

SEQ ID NO: 131016 - DNA, 100 bp, Homo sapiens
gagctgagctccccaccaagacagtttgctgcggtcagcatcacaactaatcaggctggtaggcgaaaaccaagagtacatcggcctcgttctcctatat

SEQ ID NO: 131017 - DNA, 75 bp, Homo sapiens
ctgtggagctttaccaaaaaggcctcgcacattcagttggacaggcaatttctcagcaagacctggtacacatgg

SEQ ID NO: 131018 - DNA, 100 bp, Homo sapiens
aagccagcagaggaactccttggtgcttcaaggatgaccgcatcgtcttctggacttggatgttctccacctacttcatggagaaatgggctccccggca

SEQ ID NO: 131019 - DNA, 98 bp, Homo sapiens
gcagtcagctcagatctccaaagccctggtcgatgttggagtggatttccaggcaatgcgaatgtctgcgacaacgagctcctgcactgccagaacgg

SEQ ID NO: 131020 - DNA, 82 bp, Homo sapiens
tttttccaggggtggaagcagaagaatggggtaaatttcttcacaccaaaaataagagctgctgcaaccattgacagcttag

SEQ ID NO: 131021 - DNA, 98 bp, Homo sapiens
tggggaggttgggctgaactgcagtgggagaggagaagagatgctggcgtgaaggggacatggtccggcgaggagagatcatcgacaatgacaccgag

SEQ ID NO: 131022 - DNA, 90 bp, Homo sapiens
tgcatgctgcatgagacccagggtcctgcctgatctagttgaatctgaagatgtggacctgctgatgaagagggctgactgtatctaact

SEQ ID NO: 131023 - DNA, 75 bp, Homo sapiens
gaagaatctttttggctgttagatgctcttgttggaagaatactaccagggaataactattcgaccactggtgga

SEQ ID NO: 131024 - DNA, 83 bp, Homo sapiens
cggaacaggacgccctctgatatgtccagggtgctgcagaaggacgcggagcaggagtcacagatgagagcggagatccagga

SEQ ID NO: 131025 - DNA, 82 bp, Homo sapiens
ctgtacttctatatctacaagggggtccgcaaggtgcagagcattgtagaccaaggagccatggataggagaagtatgggtg

SEQ ID NO: 131026 - DNA, 75 bp, Homo sapiens
gcagaacctggctgtcaagtggtttaagaattgtttaagctgcatcaatggagcacatacagggagcttggaaga

SEQ ID NO: 131027 - DNA, 75 bp, Homo sapiens
aaggaggagtacaaggacatcctgcgcaaggccgtgcagaagggtttgccttcccggattgggcctacaagccag

SEQ ID NO: 131028 - DNA, 74 bp, Homo sapiens
ccagaccgagaaggctggctattgaaactcggtgctggagaatctggtaaaagcaccattgtgaagcagatgag

SEQ ID NO: 131029 - DNA, 78 bp, Homo sapiens
ttttttgatgctgaggagctcctggtcgatgaagaggatgatgtttttggtgaagcaattctgtggtgttcttggtca

SEQ ID NO: 131030 - DNA, 100 bp, Homo sapiens
ctggcggtggggctgcggcgcctgggactgcaccgcaccgagggcgagctccagggaatggcagatggagagagcgttccagacagctctgtggttgctg

SEQ ID NO: 131031 - DNA, 101 bp, Homo sapiens
ggcgggggcggcgtgcggcctagcgtctcagttgaccagatataccatctggcatctccagcctcccctccaaactacatgtataatcctatcaagacatt

SEQ ID NO: 131032 - DNA, 75 bp, Homo sapiens
ccccgaaggccctatcaggacatggagtatgaaagacggttctgccctgatgtttcctggaataatgctgaggac

SEQ ID NO: 131033 - DNA, 50 bp, Homo sapiens
tcacggccgggacactcagggcaggaatactcccccagttgcaagaggcg

SEQ ID NO: 131034 - DNA, 100 bp, Homo sapiens
ggaggtggactggagcagtgagaaagcaaaggctgctctgaagcgcacgacctccgactactttctccttcaagattcgcttcaagctcagcttatcaat

SEQ ID NO: 131035 - DNA, 96 bp, Homo sapiens
acaaaatacaaatcatggagccgctggggtcccttttgcctcagatactattttgaagtggacgtgactctggacccagacacggcctaccccagc

SEQ ID NO: 131036 - DNA, 100 bp, Homo sapiens
tctttaaaaattccgccgaaaaagagaagacgctttacccgactctttgggccgttatctcacttcatggcctcccacgggaacgacgccgcgagagcca

SEQ ID NO: 131037 - DNA, 100 bp, Homo sapiens
ggctgcaggtcctgcatccaatggatgctgcccagagatcgcagcatatcaaaatggcccactgcgtgaccttggttcagctgtccatttcctgtgacca

SEQ ID NO: 131038 - DNA, 49 bp, Homo sapiens
ctcccaaagtgctgagattacaggctggtctcgaactcctgacctcaag

SEQ ID NO: 131039 - DNA, 90 bp, Homo sapiens
agctggcagaagaagcaacacgcaaacgagagctgaggctaatgaaaaacaggattccatgataaagacagttcaggttggagttgcagc

SEQ ID NO: 131040 - DNA, 140 bp, Homo sapiens
cccgaagcggcggcggccgaggacggggacagcgacgacgcggaggcagagaagggaacgcccggcccagccccaaatcaatgtggactgaacataaatcacctgatggaaggacttactactacaacactgaaaccaaa

SEQ ID NO: 131041 - DNA, 96 bp, Homo sapiens
aagaaaaaagtaaactacttgaaaaatttagccttgttcaaaaagagtgtacttttcccaacactggtgctcgtatcatgatgttcattggtggtc

SEQ ID NO: 131042 - DNA, 90 bp, Homo sapiens
cccaggtgcccccggcctgcgctcccatccacacgctcggaagccatcttcgacaagagcacagggaaggttgttttgaagacgttcagc

SEQ ID NO: 131043 - DNA, 96 bp, Homo sapiens
ctgggtgcagcgtagcatctgggagaatggagacagtctggaagagctgatggaagaggtcttgcagatacttgacttatatgctcaggtatatga

SEQ ID NO: 131044 - DNA, 101 bp, Homo sapiens
aagacgagcagctcccaccaaagtcttgcctccccttaccccgaaagccccgctcagtgatagatacagtgatgccagtgatgacagcttttcagagccaa

SEQ ID NO: 131045 - DNA, 100 bp, Homo sapiens
ttctgcaattgagaaacaggcacacaagtgtgaggagttgctaaatgctcagccgtgctatcaagactaatcaggaccttctcccagaaactccatggac

SEQ ID NO: 131046 - DNA, 100 bp, Homo sapiens
cggcaatagggaaagtgaggcagctgcaaggagggcggcgggactgcactcgagtgtccagacctgctcgatgggagaccctgcagcgtcatggtgctgg

SEQ ID NO: 131047 - DNA, 100 bp, Homo sapiens
agaagctggagaagcagcagaagatcgagcaggagcgcaagcgccggcagaagcaccaggtctgggaggggctgaacgtggtgaagacaggccgagtgat

SEQ ID NO: 131048 - DNA, 100 bp, Homo sapiens
ctgtcaactgcgtcttcttcgatgaggccaacaagcagaaagcttatagcttcattgcaccatgtgtggcatttgggcgctgtttggcagtgatgattgc

SEQ ID NO: 131049 - DNA, 74 bp, Homo sapiens
gtgagccatcaggactccatcactcgtcttatggaggtgtctgtaactgaggttacttacaaagctccagttcc

SEQ ID NO: 131050 - DNA, 74 bp, Homo sapiens
tggagctgtgggacttcctggaccccccggcccttcaggccttgtgcacgtggtgaggtgtgtatggcttcccg

SEQ ID NO: 131051 - DNA, 83 bp, Homo sapiens
cagcagggcgttggctatgtgcccatcacaggattttttatcaagcagaaatgcatcgaacaacgagaatcaagatcactgag

SEQ ID NO: 131052 - DNA, 83 bp, Homo sapiens
cagagcgacttgcgcgccttgtcactggagtgcaagaagaaattcccacctgtcaaagagatgatgataattccgaagaaggc

SEQ ID NO: 131053 - DNA, 100 bp, Homo sapiens
gccgagtgccagaactacgccaaggaggtggcaggggttggtgttcgaggaagagacattgttgttcttggtgtggagaagaagtcagtggccaaactgc

SEQ ID NO: 131054 - DNA, 100 bp, Homo sapiens
gaaacactctcaacattgacaaattgaaaatagaaactgctcagtgagcatttgtcctgtgctttcacattctttctgcatggagaaagtaatgtatgca

SEQ ID NO: 131055 - DNA, 50 bp, Homo sapiens
aagtattgcaggacaagagatttaaggtcaccctgctgattgccttcatc

SEQ ID NO: 131056 - DNA, 51 bp, Homo sapiens
atctcccagcccatccatgacagcacctgagacagctgcctgtgtgggact

SEQ ID NO: 131057 - DNA, 100 bp, Homo sapiens
gcttttccagtacccagacactagatatctagtagatgggacaaagcccaatgcgggaaggtgtcaccacagtgatggcagtggaggacagcacgctgca

SEQ ID NO: 131058 - DNA, 98 bp, Homo sapiens
accattcaagtgtttcactcctaaaggttcatctctcaaggaagagttacaggccaacctggacctgatccaaacctacagaatgcatattgcccaag

SEQ ID NO: 131059 - DNA, 75 bp, Homo sapiens
agcgaatcggtggccatgatctctaggcaccagtctgctgagtggcggtcgtgaatctgtacttgtagagtggcg

SEQ ID NO: 131060 - DNA, 48 bp, Homo sapiens
ctgatgagtcaggatgctccgattgtgactgctttaggtaaacaagaa

SEQ ID NO: 131061 - DNA, 75 bp, Homo sapiens
tggacagacgcacagacacctgcaggggcctttatcatctgctggactcctggattggttttgttacttctagac

SEQ ID NO: 131062 - DNA, 82 bp, Homo sapiens
cgagcctgagcgcggcggcggcccacgcgcagcgacagggagagcccgagcgggaagaagttccgcagcaagccgcagctgg

SEQ ID NO: 131063 - DNA, 90 bp, Homo sapiens
gctccatatgaacaccttattattgatggccccacaccagtgagaagcatcagcaccgtgaacttgtctgagaatagcagtgttgtcatc

SEQ ID NO: 131064 - DNA, 101 bp, Homo sapiens
gatatatatgctgacgaggagttcaaccagagcttgcatggagatggtcccctgcggctgctgctgctgccctctatccaccttgaggccttggacctgct

SEQ ID NO: 131065 - DNA, 100 bp, Homo sapiens
tggggggaaactaggtcgatggtcggcggcgcccggatgggcagctgaggaactgcaagcacatgttgaccagataactgaaatggcagcagtaatgagg

SEQ ID NO: 131066 - DNA, 88 bp, Homo sapiens
cgagcgcggccgcggacgaagatggcgaccgccatgtacttggagcactatctggacattccagggtctccctccactgctgtagtaa

SEQ ID NO: 131067 - DNA, 100 bp, Homo sapiens
ggccccggcgccggcaaggggacccagtgcgcccgcatcgtcgaggagtataacatgtatggctggtgggtgggagaactgaacagcctcgttgggattg

SEQ ID NO: 131068 - DNA, 82 bp, Homo sapiens
agtgtgatgaagattggcacccagggcccttggaagaaaatcctcgctgtgtccaggctgaggcggggggctaatgacagtg

SEQ ID NO: 131069 - DNA, 100 bp, Homo sapiens
acaatgagtacaactaccgctgctggaccacaaaccgctgccagaaaaagataattgacgaccttgccaacctagtggagaacacagatgaaaaacttcg

SEQ ID NO: 131070 - DNA, 100 bp, Homo sapiens
gaacatcatgcctatttataaccactgaatgcactgactttcaaaaactgaggggcaccaccacgaggcgatttgtgggccataccaaggatgtgctgag

SEQ ID NO: 131071 - DNA, 87 bp, Homo sapiens
gaagaattgcttccggatgactgaccaagagaaacatgatcaagtccttctatactgcaagtcttttgatagatgtcataacagtat

SEQ ID NO: 131072 - DNA, 75 bp, Homo sapiens
cctttccaaaggacgcgaccataactctaaaagatcggcttcaccaccgaccctcggatggcccgctcctccccc

SEQ ID NO: 131073 - DNA, 76 bp, Homo sapiens
ccctaagcaaaggaagcagagtgtgtacacaccacccaccataaaagggcctattccactagaagcaagatggctg

SEQ ID NO: 131074 - DNA, 75 bp, Homo sapiens
gtgtaactcactggcctacctcgtcaatacctatgcactggacagtgggctggtggaggccattgtcttgccaat

SEQ ID NO: 131075 - DNA, 108 bp, Homo sapiens
atcaatactataatcttaaggacttggtggacatcacaaagcaacctgtggacccagatgatgtggtaccagttggccaaagaagagcctggtgttggtgcatgtgct

SEQ ID NO: 131076 - DNA, 75 bp, Homo sapiens
cttctcagaaacaaccagccttgaagctcggccgctactccgccctgttcctcggtgtggcctacggagccacgc

SEQ ID NO: 131077 - DNA, 100 bp, Homo sapiens
cctgcgccccgctctgctgtgggcgctgctggcgctctggctgtgctgcgcgacccccgcgcatgggaatgaaagctactggttgattttaaagtgcctg

SEQ ID NO: 131078 - DNA, 100 bp, Homo sapiens
aacccgacccggattggcgctgaggtggcccgtggggcaggagcagcagccaagctggacagatgacctgcctctctgccacctctctggggttggctca

SEQ ID NO: 131079 - DNA, 99 bp, Homo sapiens
caaagccggtgatctccgagatacaggtggcgacatgtctaagaatgtgagccagtcacagatggcaaaattgaaccaacaaatggccaaaatgatgga

SEQ ID NO: 131080 - DNA, 100 bp, Homo sapiens
gttgaccaagcaagcttccaggttgatgcctttggaacgtcattcattctcgatgtcgtgctaaatcagtttccaatacttatctacaggaatcgccatg

SEQ ID NO: 131081 - DNA, 98 bp, Homo sapiens
atggaccgcctgggggactcggaactatcttactgtgccgagatcgctcacaatgtttcctccaagaaccgcaaagccatcgtggaaagagctgccca

SEQ ID NO: 131082 - DNA, 83 bp, Homo sapiens
cgcgcctttgcccccgtgcgcacccccgccccgctcaccttagccccgcgcccgagggggatatgagactttctactcggaat

SEQ ID NO: 131083 - DNA, 98 bp, Homo sapiens
gggaggtggaacgggccgaactgcagggattccggttcacaatggatgctgataaagagaaagatttgcagaaatttcttaaaaatgtggatgaaatc

SEQ ID NO: 131084 - DNA, 100 bp, Homo sapiens
gctctggtgctgattgtagacgccatgtccaaaagttaaatctactacagggacaagtttcagagctgccactcagcttcaacattgctttatggcatgt

SEQ ID NO: 131085 - DNA, 113 bp, Homo sapiens
ccggggccatggccggaatgcagtaccctcagcagcagactttaagaaagaaaggccttaatggttgtgagagccctgatgctgacgattactttgagcacagtccactctcg

SEQ ID NO: 131086 - DNA, 75 bp, Homo sapiens
cgacttcaactgcaacgtctgggatgcactcaaagccgaccgggcaggtgtactcagtgcctatggggggtatga

SEQ ID NO: 131087 - DNA, 96 bp, Homo sapiens
atccagatggcagccagtcagtggtggaggctgcagccacaggtccgcacggaaaaccaggagctccaagactgccgcacactcaacatccaactc

SEQ ID NO: 131088 - DNA, 95 bp, Homo sapiens
cgcgcgccggcggcaccatgaagtcagcggaggaagtgcggaaacatggctcgcgaaggactgcggaccctcgtggttgcaaagaaggcgttgac

SEQ ID NO: 131089 - DNA, 95 bp, Homo sapiens
cagaacacagcagggcggaggaaagtgcagaacatccagtcatggataaaaatgagctggttcagaaggccaaactggccgagcaggctgagcga

SEQ ID NO: 131090 - DNA, 50 bp, Homo sapiens
ctacttgcaatggaagatgtcagtggaggctggagtgcaaaggcgtgatc

SEQ ID NO: 131091 - DNA, 97 bp, Homo sapiens
ggagaactatagcaatctggttttcttggggtggcagaaaagggaaaagaaactctgaatccgaccagtgtaggtgattacattagcctttgaagtc

SEQ ID NO: 131092 - DNA, 74 bp, Homo sapiens
gcagatgcgggccctgctggaccagctcatgggcacggctcgggacgcttttatgatggtcaacagcctgtgct

SEQ ID NO: 131093 - DNA, 75 bp, Homo sapiens
gaagaagatgaatacaaagctttctacaaatcattttcaaaggttatcaatactctggctgaccatcatcatcgt

SEQ ID NO: 131094 - DNA, 80 bp, Homo sapiens
ggctaccggcggcggcgcgcagcgtgtcaggcggagagacccgccgccaggtggaaccaagctcacaaatcctcaggaac

SEQ ID NO: 131095 - DNA, 74 bp, Homo sapiens
tgaaaagatccgatggcagcaccacttcgaccagcttcatcctcagacagaaaacagaatcttggcattgtctt

SEQ ID NO: 131096 - DNA, 100 bp, Homo sapiens
ccggtttccctcggcgtgctactgtgcgctcgatccagcaccatggggaagcgggacaatcgggtgaacctgtgagaagtttctacaatggtgggctcag

SEQ ID NO: 131097 - DNA, 107 bp, Homo sapiens
tggaatgaggaaaagtgaacttttcgaggcatttgacttgtttgatgttcgtgactttggaaaggaaacattggcaaatttggagcgacagatctatgcttttgagg

SEQ ID NO: 131098 - DNA, 75 bp, Homo sapiens
ttggaaccccttcatcatattccgcagataatcttgtgccgtggaaatcagaagggcaaaacgaagcagtcatga

SEQ ID NO: 131099 - DNA, 75 bp, Homo sapiens
atccaggataacggaggctggcttctcagatgaccaagatggtgctgcagatggtgctgaggatggagaacccac

SEQ ID NO: 131100 - DNA, 100 bp, Homo sapiens
tttacctcagccaccgagaaggctacggcaccatgtacatgaagacacggcttttccagctctcgtggcattatccttcagtggggctattggactgact

SEQ ID NO: 131101 - DNA, 82 bp, Homo sapiens
gaggttcgagcgctgttctcgctccggagccgctgcacatttcggtatcttcaaagaacagtaaaacatccaactttactac

SEQ ID NO: 131102 - DNA, 90 bp, Homo sapiens
ggatgacagcagcgaagaggaacatgccattgagataactacccaagagatcactcagctcctcaatcagtttgaaaacacaggcccccc

SEQ ID NO: 131103 - DNA, 82 bp, Homo sapiens
ctcccggctcgacaagttcaagcagctgcttgccggccccaacacggaccttggaatactctgaagatagtaactccgagcc

SEQ ID NO: 131104 - DNA, 75 bp, Homo sapiens
ttttgcgtgaattagaaaaggaccctcaaactgacacaagacctacagagaaaaccctttgccaaatctgctctc

SEQ ID NO: 131105 - DNA, 75 bp, Homo sapiens
ctgcggccccggctccggcccccgcaggagcagggtttctgatctctaacttggctgtgatcattgtgatggagc

SEQ ID NO: 131106 - DNA, 50 bp, Homo sapiens
cagagaagaggaaaactctaccggtgcagcatgaatctagagaaacatta

SEQ ID NO: 131107 - DNA, 50 bp, Homo sapiens
tcttcaccaaaaatgggaagcgggttctggaggacacgtgccggcggcag

SEQ ID NO: 131108 - DNA, 82 bp, Homo sapiens
gcctattatgcccagacaagtccccagggaatgccacagcatcctccagcacctcagagccacctgagctgaagattccctt

SEQ ID NO: 131109 - DNA, 98 bp, Homo sapiens
tctgccttcccctctccatcttcatccagattgtgcaagtcagctacaagacgaagggaacgtcatcgtttggaaagcgtcgcaataagacgcacacg

SEQ ID NO: 131110 - DNA, 97 bp, Homo sapiens
ccagccccttgtcagccagggctgaacccccgcaggaattggattcaagtacgtggctctgggagacctcatcatcctcatcacttttggcccgctg

SEQ ID NO: 131111 - DNA, 51 bp, Homo sapiens
gcccgggacccccgggggcgcaggtccctgtgcgttttattgcgacctgcc

SEQ ID NO: 131112 - DNA, 75 bp, Homo sapiens
cgaagagaacgcgcccaagtggcggggactactggtgcctgcgctgaaaaagattgcagcaggagagaagattcc

SEQ ID NO: 131113 - DNA, 82 bp, Homo sapiens
cggcttacgaaaatttgtgcaacacatcaagacaattctgtggtgttcttggtcacacatttatggagtttctgaagggcag

SEQ ID NO: 131114 - DNA, 100 bp, Homo sapiens
tgtggttctctttgaaagatgtgtcatatcatgtgccctctatgaggagttttggattaagggaagtatgggtagtattacctgcatcgcttggaaaggt

SEQ ID NO: 131115 - DNA, 106 bp, Homo sapiens
tcgccactgccctggggcagctgaactgagcgtatgtgccacgccgcccaggagacccctctgctgcaccacttcatgggagaagcagaatttgcccgcatcatga

SEQ ID NO: 131116 - DNA, 100 bp, Homo sapiens
tgccatgaaggtgcttaaaaagctcctcaagagttactgatctatgaaatggcagagaatggaaaaaattgtgaccagagacgtgtagcaatgaacaagg

SEQ ID NO: 131117 - DNA, 100 bp, Homo sapiens
cctctctacagtttgttgtagaaccaagtgaagccacaaacagatcagagaccctcctggatgacttccttctcacgtacactgtcttcatgacaactga

SEQ ID NO: 131118 - DNA, 100 bp, Homo sapiens
gcagggctgttccgtggagaaggccaacaaccccggggtgcgagaggtggtgtgcatgacactcctggaaaacagaaagccaaacttggccctgctggca

SEQ ID NO: 131119 - DNA, 82 bp, Homo sapiens
gcacgattttcccgagagttcacagatgaaattgtgctccaagtgttttccaaggttccgtatgacccatcatttgatgaaa

SEQ ID NO: 131120 - DNA, 75 bp, Homo sapiens
gcagagccagatgatccacaggatgctgtagtagcaaatcagatttgttcccgacaaggagttttctggttcaga

SEQ ID NO: 131121 - DNA, 99 bp, Homo sapiens
ctcgtggcgagagaaggaaaatgcgcgtcccgggcgcggggagaggtgatatccagcctcagttggacagtgctctccaagatgtcaatgataagtatc

SEQ ID NO: 131122 - DNA, 100 bp, Homo sapiens
cagcattcctgaaatacatccaggaaagacatggagattctcttaaaaagagacgagttgtactgctgtcacaggaaatggacgctggattacaagcatg

SEQ ID NO: 131123 - DNA, 73 bp, Homo sapiens
ccatcagcatcactgaaaacgtgctgcatttcaaagctcccatccaaggctctggtgcccgaaatggaagacg

SEQ ID NO: 131124 - DNA, 111 bp, Homo sapiens
ggtctgctggtgggactcaatgttctcgatgccaatctctgcttgaaaggagaagacttggattctcagcctcccaaagtgaaatgcctgaccaagatctggcaccccaac

SEQ ID NO: 131125 - DNA, 75 bp, Homo sapiens
ctagtctttatgggaaacctcagcttgatgatgtatctcagaaaactgtcgctgaaaagcaggagaagagaaatc

SEQ ID NO: 131126 - DNA, 80 bp, Homo sapiens
gccgcacggagttgcgtcccggggacttggggccgcagggaggtcaaaatgcagatcttcgtgaaaacccttaccggcaa

SEQ ID NO: 131127 - DNA, 75 bp, Homo sapiens
ccggaaccactctttgtgccgcagcttcgcagaacccggcagtgggcaggtgtttgtgacttcagagaaccaact

SEQ ID NO: 131128 - DNA, 55 bp, Homo sapiens
gcctcgcctcctcgcagcagcgccatgatggcgcggccaatccaggtgaagcctg

SEQ ID NO: 131129 - DNA, 75 bp, Homo sapiens
gcggaaggaaggcaattagagcgggacctagatgtgaaggctggtggaggctgtgtaatgaccattggagaaatg

SEQ ID NO: 131130 - DNA, 76 bp, Homo sapiens
cagagtttgatgttgtcttcaatgctgcccacatgctcagaacgtactcaggaaaagtggggatttccaatgtgcc

SEQ ID NO: 131131 - DNA, 82 bp, Homo sapiens
aagagcactagtgtctagaaggcactaaggggtgccatgactcccggaatccctatctttagtccaatgatgccttatggca

SEQ ID NO: 131132 - DNA, 75 bp, Homo sapiens
gcaggggccacccgaacagtctctcctcctcacagaagcctgatgtttcaggacccagtggcctttgaggatgtg

SEQ ID NO: 131133 - DNA, 98 bp, Homo sapiens
ccacctcagccacgtgagccatgccagccaccctacctgtgaccccatctgtggccccagttatcatggagtagaggagaatacttatctctggcgca

SEQ ID NO: 131134 - DNA, 82 bp, Homo sapiens
ctccggctccggcttctgctgttgctcttctccgccgcggcactgatccccacaggtccagctgggagctccccgacctcca

SEQ ID NO: 131135 - DNA, 98 bp, Homo sapiens
ccagctgctgcacaacctctcccccggctccatcgacctcaaggacatcaacttccggccgcagatgtcccaggtacaccaggggttggaaaaaccac

SEQ ID NO: 131136 - DNA, 75 bp, Homo sapiens
cgtggatgccctgcaccgggtccggcagggaataaccagcaagtacctgtcaagaatgaagtagatcattgtgaa

SEQ ID NO: 131137 - DNA, 100 bp, Homo sapiens
aggaagaaatagaaatgatgaagttaatgggatttgcctcctttgactccacaaaaccactgttccatccctgacccatctttgtcgtttggaaattcgg

SEQ ID NO: 131138 - DNA, 50 bp, Homo sapiens
tgaataattcatcaaattacacaactggtctcttgcagctgaatggggta

SEQ ID NO: 131139 - DNA, 96 bp, Homo sapiens
tcttcaaagaatgatatttccaaagtttgcagaaaagaatatgagggagtactgatggtcggcccacctggcacggggaagacgctccttgctaaa

SEQ ID NO: 131140 - DNA, 100 bp, Homo sapiens
attcagaaggaacttgcagaaatcacattggaccctcctcccaactgtagatgccttcaattaagttgcagagttctgatggagagatatttgaagttga

SEQ ID NO: 131141 - DNA, 100 bp, Homo sapiens
atgccctgaaaaagtatcgtcgagaagcctatcatcgggcggcgactggcggcgcgatggacctgaccgggctcctgctggacgaagaaggcaccttctc

SEQ ID NO: 131142 - DNA, 100 bp, Homo sapiens
gttctctggagccccagattcaacccgtgtacgtgcctgtgcctaaagttcactatagttgcggagagtctgcagcaagttcggcagcagcttaaaaagt

SEQ ID NO: 131143 - DNA, 83 bp, Homo sapiens
cgctactctctctttctggcctggaggctatccagcattacctaaaacctcgggcagaagaggagaggaggatagcagcagaa

SEQ ID NO: 131144 - DNA, 50 bp, Homo sapiens
cttcgggaagcagggattccagtgccaagcatcagtatgacaacctgttc

SEQ ID NO: 131145 - DNA, 101 bp, Homo sapiens
cttccgggagggcggctcgcagatttgtgacacagactatatccagtacccaaactactgttccttcaaaagccagcagtgtctgatgagaaaccgcaatc

SEQ ID NO: 131146 - DNA, 148 bp, Homo sapiens
gggagaagcatgggaaggaggccgagccgggatctcaggtcctcgggggcggcggccacgccaaggacggcctctacggcagacacatgcaggccaacccagaaccaccgaagaagaataatgacaaatcgaaaaagatcagccggaa

SEQ ID NO: 131147 - DNA, 74 bp, Homo sapiens
taagtttagtagcagccttaatgcttgctaagtgccttcagacatttctcttgggaagttgtgcatctgacagg

SEQ ID NO: 131148 - DNA, 80 bp, Homo sapiens
tcctcctcctcagtaacgcgggatccgagccagagacaacaacggctcctacgccctgtgcctgctgcacgaagggaagg

SEQ ID NO: 131149 - DNA, 107 bp, Homo sapiens
gccgggagtcgctgggtgcgtggggctgcctcgccgcgtctcgccacgctgtgagccgtgagctttgaggcggtgggatgtgtcagcagaatgtctcctgcccccga

SEQ ID NO: 131150 - DNA, 75 bp, Homo sapiens
tgtaaagcttgttcgaatgtctgcaagccagttagaagccctctgtcctcaggtggctggtcattgaccgcaagg

SEQ ID NO: 131151 - DNA, 50 bp, Homo sapiens
cgcggcgcatcacggtgcgcgtggccgcactgccagtgaaagatgtagaa

SEQ ID NO: 131152 - DNA, 90 bp, Homo sapiens
gttccatgtgatggtggagtaggaggcaggtctccgcgtactatactggcaattgctggagaagattttgcaattgttgcttctgatact

SEQ ID NO: 131153 - DNA, 101 bp, Homo sapiens
atcggaccccgaggatcaggaaaaactatggaggagaaagtgcaggccatgccacttcctctcaggagcctagtggatgctcagatcagagacctgcagag

SEQ ID NO: 131154 - DNA, 100 bp, Homo sapiens
tgatgaagctactccacattattttgccttaattgatcaactaattgaaggacatcagtggctggaaaataatatagggaaggaaactgaaaaggccaag

SEQ ID NO: 131155 - DNA, 110 bp, Homo sapiens
aataatgaaatgctgactaaggaacaaggattaaagcaaggagagccaatcatgactggcaaaacacagaccagcaacgtcaccaataagaatgaccccaagtccatcaa

SEQ ID NO: 131156 - DNA, 96 bp, Homo sapiens
agccaagatccttttccagcagccataattttaaaagttgctttgaatatggcaagagggttaaagactgacttccttttggtagtactgcgtgat

SEQ ID NO: 131157 - DNA, 100 bp, Homo sapiens
gatgactttgaccagtttgataagcctggcgcggaacggtcgtggagaagaagagctgctgatgaggactgggacagctgctggaaacgcgttctgccag

SEQ ID NO: 131158 - DNA, 100 bp, Homo sapiens
ctcagatgagaacaactactcattgagccgggagctgctcatcaagtctccaaaaaaagttggtgatgacattgccaaggcaacgggtgactggaagggc

SEQ ID NO: 131159 - DNA, 75 bp, Homo sapiens
ctgggacctctgaagtgaacactgcagggccatttggttggaagtgtgaatcctgctgaaaacttccgtgttcta

SEQ ID NO: 131160 - DNA, 100 bp, Homo sapiens
gccccgcgagcacagagcctcgcctttgccgatccgccgcccgtccacacccgccgccaggtgtgtagctgggacggtgctggtctgagctggaccttgt

SEQ ID NO: 131161 - DNA, 100 bp, Homo sapiens
ctctgacaagaccaagtactaccttcaaggtatccgcccccagatcatgaacggccccctgcacccccgccccctggtggcgctgctggacggccgcgac

SEQ ID NO: 131162 - DNA, 85 bp, Homo sapiens
gaaaatctgggctaagtgctggcaagagcgatgtctactacttcagactttgagaatcactacaagaaaaactccttgtggtgaa

SEQ ID NO: 131163 - DNA, 100 bp, Homo sapiens
acccgttgcagtccttcagggccattcagcttctattacttccatacagatttgaaaaatgtgtgagtgctaaggaagctttggagactgatctttataa

SEQ ID NO: 131164 - DNA, 89 bp, Homo sapiens
gcctgcatctactcggccctcattctgcacgacgatgaggtgacagtcacggtgctgactgggttacttttttaaacactaggaatggt

SEQ ID NO: 131165 - DNA, 100 bp, Homo sapiens
tcatatttgatgaggtggatctgacagatgccagcgtagctgaatccagtaccaaaaacgtcaacaacagttttacggttcaattcccatgaaagtgcag

SEQ ID NO: 131166 - DNA, 82 bp, Homo sapiens
ctaccaagaagccagtcaagcggccagatcaggatcctcatgaccagccaaagagaagaagaattaggaagcataaatcaaa

SEQ ID NO: 131167 - DNA, 83 bp, Homo sapiens
ctttaatcctgaaagccatgcagcggtcctgtgcctcctgattgctgagtgttcacctggaccttctgactaccttccctgtg

SEQ ID NO: 131168 - DNA, 80 bp, Homo sapiens
taaagcaattgagcaggctgatctactgcaggagctgctctgttaaaagcgaaaatgaaacaattgcctgcggcaacagt

SEQ ID NO: 131169 - DNA, 116 bp, Homo sapiens
caaacactgggcgacggtggctccagcatgtatcagccgaggtggagctgcggggccctggcatgaaaggcattggcagtggcaggcctgagccccctcctccagagaagccattc

SEQ ID NO: 131170 - DNA, 48 bp, Homo sapiens
catgccttttcaggagcgcagaaggtttttgatgggagtggatcattt

SEQ ID NO: 131171 - DNA, 98 bp, Homo sapiens
gaagttaatgcacctggtggttgaaagttttccttcttacagagatgtgactctgtttgagatggcccactgcgtgaccttggttcagctgtccattt

SEQ ID NO: 131172 - DNA, 82 bp, Homo sapiens
tttagaccctccacctaattgcagcaatggctgccatccggaagaaactggtgattgttggtgatggagcctgtggaaagac

SEQ ID NO: 131173 - DNA, 90 bp, Homo sapiens
ctcggcgcgactcgcttctttcggttctacctgggagaatccaccgccatccgccaccatgtggagcggaggcggagggacaagatcaac

SEQ ID NO: 131174 - DNA, 75 bp, Homo sapiens
cttacgtctgcggaagtgcagctgcctcagttcttagcgcaggatgaatttcatcctttcatcgaagcacttctg

SEQ ID NO: 131175 - DNA, 100 bp, Homo sapiens
ctggatttgattttccatgtagacaaggctgagagcagtttcagtgaagaagaggaagaaaaacttcaagcggcattttctctagagaaacaagatcttc

SEQ ID NO: 131176 - DNA, 90 bp, Homo sapiens
caacttccaggttcccatcctgcggatcccctaacaacagtgagagagcaatgcgagcagttggagaaatgtgtaaaggcccgggagcgg

SEQ ID NO: 131177 - DNA, 75 bp, Homo sapiens
aaagcattaccgggttcgctaggctcacagaaagtcagaaacatggccctggatgatgtcgtgatcctgaatgtg

SEQ ID NO: 131178 - DNA, 75 bp, Homo sapiens
tcatcaagcagcaggtccttaagcaggttcaggagaagtggcacctggtggaggacctgtcgcgactgctgccgg

SEQ ID NO: 131179 - DNA, 90 bp, Homo sapiens
tggagattctccggggacccttccgtatctgcctaggcattttgctgtctcctcctaatacgaatggaacaaaagtgggacttttaaaat

SEQ ID NO: 131180 - DNA, 75 bp, Homo sapiens
acattgttcgatacagggtgtatgaggagctcctccattcctgagaccacctggaatgccaggactccgagggcc

SEQ ID NO: 131181 - DNA, 78 bp, Homo sapiens
gcgcctcttcctcgcagtctccactcggcaaccaccatcggaaataagagcatcagatccatgctgctgctgactcgg

SEQ ID NO: 131182 - DNA, 84 bp, Homo sapiens
gttggaatttgtgcaatgtttagccaacccaaattaccttaattgtaaaacttccttttcctgtagatcaaatcacagatcttc

SEQ ID NO: 131183 - DNA, 130 bp, Homo sapiens
tcctcgatcgaggacgacttcaactatggcagcagcgtggcctccgccaccgtgcacatccgaatggacaacagaaaccagtggtaggactctgccagacaagggtgaagaggcctgtggatatttcttg

SEQ ID NO: 131184 - DNA, 78 bp, Homo sapiens
tttatacctatagatattttatccacaactggccacagctgtgcttcttggatattggtgctggaaaaggcaaatact

SEQ ID NO: 131185 - DNA, 100 bp, Homo sapiens
attcttcaagggatatggacggataagagatattgatctgaaaagaggctttggttttgtgctgtcggaaaaggtaacagaagatggaactcgaaatccc

SEQ ID NO: 131186 - DNA, 96 bp, Homo sapiens
gcatttggcttctatcagtcactttatgcaatttccacatcatttacaggaggctgtgaggactgctgccataaccctgcttggcgtgatgtatct

SEQ ID NO: 131187 - DNA, 75 bp, Homo sapiens
acctgcgctgtgatgcctgcagagctgtggcttaccaggtgggcaatgccgtgccaccgcccctggccaaagcca

SEQ ID NO: 131188 - DNA, 90 bp, Homo sapiens
gtctggtcggatggggcaggatggctgcgttgacacgtcttatttaatccacatcatagtgcctaagtgtctagagagctgagtgggttg

SEQ ID NO: 131189 - DNA, 133 bp, Homo sapiens
tgtgtctctgtgaccatggtggtggcgctgctcatcgtttgcgacgttccctcagcctctgcccaaagaaagaaggaggagatgaagccttatctaaatcagtgcctgtcacagtggatgatgatgatgacga

SEQ ID NO: 131190 - DNA, 100 bp, Homo sapiens
gaaccatttgcttttctggggagtcctggcggtttttattaaggctgttcatgtgaaagctctagaagatgaagacaacaaaaaagatgatggtatctca

SEQ ID NO: 131191 - DNA, 100 bp, Homo sapiens
gaggacttcccctccgtggtgacagcctctgggtcctcggtcggtacagtctctgcacctcgcgccccagcaggcccttcatgctgctgccgcccctcat

SEQ ID NO: 131192 - DNA, 100 bp, Homo sapiens
gccgctgcattaggggcttcctgaggaagcgcgggcggacgacagaggatgccgaaccactccaagcatacctgaagagagatacaagatgaagagcaag

SEQ ID NO: 131193 - DNA, 90 bp, Homo sapiens
ttagggcaatttgtctcaataaaagcccaggaagaagacgaggatgggcaaagtatgtttagtccagcaagtatcggtcagccacgaaag

SEQ ID NO: 131194 - DNA, 50 bp, Homo sapiens
ccaggagtcatcggacgccagaatctgggatgtttcagcagcccctgaga

SEQ ID NO: 131195 - DNA, 100 bp, Homo sapiens
ccacctgagtcctgacctgcctcttctcctgctggcaggtacacttcttcaggctgtgtcctctgtgcagatggcgtgatcaacatgagcatccccattg

SEQ ID NO: 131196 - DNA, 99 bp, Homo sapiens
tcccccgggagagcaagccgggcggcctgccccgccggagcagcatcatcaagtgatatcagtatcaagataaaagtttggaatgggagaaaaattctc

SEQ ID NO: 131197 - DNA, 75 bp, Homo sapiens
attctcttcagagattctgcaaatgcgacaagcctcccagatgggatgtcttgggagctgtcattggtacagaat

SEQ ID NO: 131198 - DNA, 82 bp, Homo sapiens
gaggagcgggccgtggaggcttcgccgcctagggcacacgtgtttcacgttgacaggtttgcttgggacgctagtaaccatg

SEQ ID NO: 131199 - DNA, 101 bp, Homo sapiens
ttttgctgcgccaacgcagtgaccgaaggctccgctcacgcccggattacaggacaggcccatgttttactgtgatcagcaaccagatgtgccagggacaa

SEQ ID NO: 131200 - DNA, 131 bp, Homo sapiens
cctcaatctttgatgactttgcacattatgaaaagcgtcaagaagaggaggaagccatgcgtaggctgccttcctatttcaaggaaagacgccaaggtaattttgacccagaggagcaatgatgtagccac

SEQ ID NO: 131201 - DNA, 90 bp, Homo sapiens
catctctcaagtacccatcttggagggtacggaccccacatgagggcttcacaggctgctcaagaagccgagatcaatgccagaaaagcc

SEQ ID NO: 131202 - DNA, 75 bp, Homo sapiens
caaaacagcagatttcccaagagcagcggaaaatgatccagtcacagtgacttatcagatgccctggtcatcttc

SEQ ID NO: 131203 - DNA, 148 bp, Homo sapiens
ccggcacacagccgcgcagctgggcgagaagctgctccggcctagcctggcggagctccacgacgagctggaaaagatggaatcttgctctcttgctcagactggagtgcagtggcatgaccttggctcactgcaacctcacctctcg

SEQ ID NO: 131204 - DNA, 98 bp, Homo sapiens
gtcatgctgccagacaaccagagcttggttggattcagatgccgaggacacagtacttcctcagaaagaagacagaatttgcaaaagagaccagataa

SEQ ID NO: 131205 - DNA, 136 bp, Homo sapiens
gtccccacggccctggaggccggcagctggcgctggggatccctgctcttcgctctcttcctggctgcgtccctagttggggaatggcggtcaatgtgtattctacctcgataacccaagagactatgagcagaca

SEQ ID NO: 131206 - DNA, 75 bp, Homo sapiens
agtcatttcacatcgaagccatgatttaaatatcggcgttaaggctgcttttgtcagagacgttttattaccggg

SEQ ID NO: 131207 - DNA, 83 bp, Homo sapiens
ccggttcttggtgggatctgagcagcaaattgtggctactaatttgccccctgaagatcaagatggctctggggatgactctg

SEQ ID NO: 131208 - DNA, 83 bp, Homo sapiens
cccgcgagcacagagcctcgcctttgccgatccgccgcccgtccacacccgccgccagagaggaggttcagatgagcccctgc

SEQ ID NO: 131209 - DNA, 90 bp, Homo sapiens
catggacagcagacgatcccgaacggactgattgatgaacagagtgagctgaaagccatcgagaaagagaagaaggtgacagccctgccc

SEQ ID NO: 131210 - DNA, 90 bp, Homo sapiens
agaatatttagcattgtggatttacaagtataaggaaaatgtgaccatggaacaactggagtcgctcaggagcaagctgtggcaagctgg

SEQ ID NO: 131211 - DNA, 73 bp, Homo sapiens
aagcccgaagggcttttcagaaatcggtttgaagttagaaatggttccttcaatggtgccttagctgctgttc

SEQ ID NO: 131212 - DNA, 75 bp, Homo sapiens
cttggctgcggtgctcacactcatgaggagccggaaggagtctgatgacttttcacagtaccaactcaaaggctt

SEQ ID NO: 131213 - DNA, 75 bp, Homo sapiens
atggagtggtccttttcattgatgctgctgaggggttgaacagacacggtagaagactcgcccattttggaatgt

SEQ ID NO: 131214 - DNA, 100 bp, Homo sapiens
gcgctactctctctttctggcctggaggctatccagccctcggagaagtcaatgtgcccatcgctggacgaagcccagcccttccccctgcctttcaaac

SEQ ID NO: 131215 - DNA, 50 bp, Homo sapiens
aagttcttcagcttctcagccccccaggatgtgatcttcgtggtggaaag

SEQ ID NO: 131216 - DNA, 82 bp, Homo sapiens
cggggggaccggtgctggcgagacctcacctgcatggacttccactatgagctgaactttgacctggaccggggcgtgtttc

SEQ ID NO: 131217 - DNA, 75 bp, Homo sapiens
gggaaccaaggagacgctcctggcactgcaggcatcacttacacttgaagaaaaacaaaaattagcaaaagaaca

SEQ ID NO: 131218 - DNA, 74 bp, Homo sapiens
ggcccgtagctgggctctgcgaggagaccctcctgttcttaactgtgggcgatgagaaaggtggtggactcttc

SEQ ID NO: 131219 - DNA, 75 bp, Homo sapiens
ggaagcccagcgcggagccggccgcggccccctgttgtgttgctgcggagaggttcagccgtctgtatatctccc

SEQ ID NO: 131220 - DNA, 75 bp, Homo sapiens
ggaacagccatgcaaaggcaggggaggaagccacctcgagtttctcacatggtcatagaggaagttaatttcatg

SEQ ID NO: 131221 - DNA, 106 bp, Homo sapiens
gcggccgagtcgcggaggcgcctccgctgcagtcgctgcgtctccaagccggcacagtcttcactaccgtagaagaccttggctccaagatactcctcacctgctc

SEQ ID NO: 131222 - DNA, 75 bp, Homo sapiens
ttcaatgatcccaagtggcccagcatgtggtatatgcggggatctgatgagcttctttcttctggcatcattaac

SEQ ID NO: 131223 - DNA, 75 bp, Homo sapiens
gagcagttgtctgatgaagagaaggttgctagaacacatcacgtccaagcagaaagctacctggtgtacaacatc

SEQ ID NO: 131224 - DNA, 100 bp, Homo sapiens
gcggtgatgcggctgtgaagccctagtcgatctcccttgagtttagaaatctggctgagaaataccaaacagtgattgccgacatttgccggagaatggg

SEQ ID NO: 131225 - DNA, 80 bp, Homo sapiens
aaaggccgtcctgcagcacccgccgctgtcgccgaccgcccgcacatccgtcggtttcaggtttagctgtgcctcccagt

SEQ ID NO: 131226 - DNA, 74 bp, Homo sapiens
cacggagtcagcacaagtctcatcaggtttacccaaggtccagcctagcccctaggcaccatgtcggacagtga

SEQ ID NO: 131227 - DNA, 100 bp, Homo sapiens
agtacctggtcattggtgacctgctcttctcaggccagcaccctgtggagggcgaccggcaatgacctccgtccacctcccccctcaccatcctccgacc

SEQ ID NO: 131228 - DNA, 98 bp, Homo sapiens
tcttgattggtctcatgcctttgtggttgtaaatgtgcctggaatcctagcctttcatgactctaaaatagagctcaagcttgagaagagagaaccac

SEQ ID NO: 131229 - DNA, 100 bp, Homo sapiens
gaggcatccatcagggaaatcaagtcaccttcaggccattcagaggaggaaagagaggggaatatgaagtcagccaagccccaagtgaaccacagtcagc

SEQ ID NO: 131230 - DNA, 98 bp, Homo sapiens
ccaagttctaccagccctactgtgccatgcggagctgaatgccatcatgaacaaaaattcgaccgatgtgaaaggctgtagtatgtatgttgccttgt

SEQ ID NO: 131231 - DNA, 98 bp, Homo sapiens
acggtgggtaccatgtgccagctcctggagtccacagtgatccaacctcaaggggacagccccgggaggagtggatgcgggccatccagatggtcgcc

SEQ ID NO: 131232 - DNA, 83 bp, Homo sapiens
agggaggttcggagcgcggccgggcgcgcggcgccgccacaagttgcgctgctcgcgacgagacctcctgccccccgaggtct

SEQ ID NO: 131233 - DNA, 82 bp, Homo sapiens
gcgaacccctctgggatccccgccgctctgtctacaacccgagaattcagaaggagctggcggacatcactttagaccctcc

SEQ ID NO: 131234 - DNA, 75 bp, Homo sapiens
tggatacctacggagcacgagaaatacggcgtggggggtcctgatgacaacttaattgaaggtggaggaacaaaa

SEQ ID NO: 131235 - DNA, 100 bp, Homo sapiens
gatgaggttttgaagattatgccagtgcagaagcagacccgtgccggccagcgcaccaggttcaaggtgccagctgctgcccgtgctggtgccattgccc

SEQ ID NO: 131236 - DNA, 112 bp, Homo sapiens
cttgaggaaaaccagaatgctttgaagttctgtaatttggctttattgcttcctactgttaccaaagagtggtctcaaatagtcaagaccccctgctgggaggagcttctat

SEQ ID NO: 131237 - DNA, 93 bp, Homo sapiens
acggtggctactctgcctcggggacgaaagcagctctctctccagatcggattcaaccgcacatcatgacagatgttccggctacatttaccc

SEQ ID NO: 131238 - DNA, 100 bp, Homo sapiens
cgttcttggcagaaattatattttccagcccgtgtctgcaggctaactcaggtgagatggagccgctatagtcctgaattcaaggatcccttgattgaca

SEQ ID NO: 131239 - DNA, 82 bp, Homo sapiens
ttacataaaaatggctgagtgtcttgtcatgctagcactgcattaagtgatgcatacagcccaagaagatgaaaggattgtt

SEQ ID NO: 131240 - DNA, 80 bp, Homo sapiens
tcagctttgactgctttatgaccatattaatgcagatgaggcgttctttggtacaccaggggttggaaaaaccacactag

SEQ ID NO: 131241 - DNA, 100 bp, Homo sapiens
atcagtggttgtcccaatatccaagaagcagtagagggtgccatgcacattcagaaaaacacaccttgactttagtcagatacatcactgtctgttaaag

SEQ ID NO: 131242 - DNA, 48 bp, Homo sapiens
aaggcctaagaattttggcattgatgaccgcacctcgagcaggagtgg

SEQ ID NO: 131243 - DNA, 140 bp, Homo sapiens
ggagtaatagctttcatggtgaacttatcaatttattggatcattgggaacacttcacctgtcacaaactcatcactgctatatatgcagattatgcccggagtttgaagaacctcggttttaagcagggagcagttctc

SEQ ID NO: 131244 - DNA, 96 bp, Homo sapiens
cgcggggcacgatgttgaacatgtggaaggtgcgcgagctggtggacaaagctgcagaatacagaaactgcagccatgaccacgcacgtcaccctg

SEQ ID NO: 131245 - DNA, 98 bp, Homo sapiens
ctctcgcatctatttcctgaaccagctgggggacctggccctgtctgcggctcagtcggtggcaagtgggatgatactggtcatggctttctttctca

SEQ ID NO: 131246 - DNA, 75 bp, Homo sapiens
tggaggaggaggccatcatcatgaaggacgtgcccgactggaagatgaggaaactgaggctgggcaagaggaagt

SEQ ID NO: 131247 - DNA, 100 bp, Homo sapiens
caatgcctccaagccctcggagcgtgggctggtcaggcaaggcttcagcaaccaggagggattgactgagatcttaacaacagcagcaacgatacatcag

SEQ ID NO: 131248 - DNA, 100 bp, Homo sapiens
tccattcctggtatagaatccccatttgaacaagcaaagaaggtgataaccatgtttgtacagcgacagccccagtataagctaacagtggagttccggg

SEQ ID NO: 131249 - DNA, 99 bp, Homo sapiens
gcgggcgccgcgggacctctccgggccatgggtgtttgctgagaacaaggatgagattgctttagtcctgtttggtacagatggcactgacaatcccct

SEQ ID NO: 131250 - DNA, 83 bp, Homo sapiens
tttactcattggaggaacagtaccttggcttggctcttgacgtggacagaactgtggctgcaccatctgtcttcatcttcccg

SEQ ID NO: 131251 - DNA, 100 bp, Homo sapiens
tattcgggtgggagtgacccgattttccaggcatatcacacctgaaaaattttatgtggaagcttgtgatgatggagcagatgacgtacttaccattgac

SEQ ID NO: 131252 - DNA, 100 bp, Homo sapiens
ccactcccagaggacaactatgaaaggaccacgccggatggcagtgttggtgaggcagagcatatggaaaatggcaccatcatgactccaagcggaggag

SEQ ID NO: 131253 - DNA, 141 bp, Homo sapiens
ctttggacaaggtcgagatagaagctcgcttttagatgataccactgtgacattgtcgttatgccagctaagaaatattgccaccaaggagccaatgaatcccattaaacaatatgtaaaggatggaaagctacgctatgt

SEQ ID NO: 131254 - DNA, 51 bp, Homo sapiens
cctgtttgacatcatccctccccaggtgtcagagatggctgaagatgggag

SEQ ID NO: 131255 - DNA, 83 bp, Homo sapiens
gcagggcctgcagcgggagctggacggcgagcgcgagcggcgcgagaaatgagggagactctgatgtggactcggagctggag

SEQ ID NO: 131256 - DNA, 87 bp, Homo sapiens
ctgccacaggtttgacatccaggtacagtcctccagggtatacttcgtggcctgcaccatcggtgagatcggactggaactgttcgg

SEQ ID NO: 131257 - DNA, 75 bp, Homo sapiens
atgcaaccctgcagcatgttttaatgagtgactgctctttcaccatgcctggatcacttcctttgaatgcagaag

SEQ ID NO: 131258 - DNA, 100 bp, Homo sapiens
atggtgtggctcctcgagcaaaaatgaaccagcagcgtgggaggcgttttagttgggatgaatgggttccggagagcagagtactcaaatacgtggacac

SEQ ID NO: 131259 - DNA, 90 bp, Homo sapiens
ggggaaaattgagaaagtgcgagttcttagaaatgatcgacgagaagaaggtctgaagaaaaccctgcgggatgagatcaatgccattct

SEQ ID NO: 131260 - DNA, 90 bp, Homo sapiens
cgacctgatacgccactgtaacgggaagctgggcagctacaaaatcaatggccggacgaaagcatttataagacgctgtttggcatatcg

SEQ ID NO: 131261 - DNA, 75 bp, Homo sapiens
ctgagggagggtccgagccagccgctgttttgccggaggagcccctcaggccgtacagtatatcagaagtatgag

SEQ ID NO: 131262 - DNA, 75 bp, Homo sapiens
ttgacctaagcaacaatgatattagtaggttctgaagatgaaacaagaatagatatgcaatatcctgctcagcat

SEQ ID NO: 131263 - DNA, 90 bp, Homo sapiens
gatttaaacaagagatttccacagaaggtacaaatctattgtcaagtacaagacagctttctactccttctaccttcctatagctgcagc

SEQ ID NO: 131264 - DNA, 74 bp, Homo sapiens
gaccgcagtgggataaatctcaaagatctcgtacaagatccttctttaactcccctgattgcagctggagtaat

SEQ ID NO: 131265 - DNA, 87 bp, Homo sapiens
ccattgctgatagagcgatacccgggatcccctggaagctatgctgctcgtcagcaagattaccttatgctggctactttggatgag

SEQ ID NO: 131266 - DNA, 75 bp, Homo sapiens
cgctgagtggtttttcggatcatgtctggtggctccgcggattataacagacaaatttacatgtattggagacca

SEQ ID NO: 131267 - DNA, 96 bp, Homo sapiens
cagccacttcaaaatcagacctctgtggcagcattttttccagaacacaaaaggaggtggccaggtggaagtaaaatctgagaagcttgacttcaa

SEQ ID NO: 131268 - DNA, 75 bp, Homo sapiens
ccgccgctgctacctgcagcgccgtgtggcacgacacaaaaatcagacccctcctcctgtagagagtggtgctgc

SEQ ID NO: 131269 - DNA, 118 bp, Homo sapiens
ctggcatattagcgctagccctgcagacagaggtgtgctgacgacctgctacaacagaaaactcttcctaatgatatacctccattccaagatgatattcctgaggaaaacctctccc

SEQ ID NO: 131270 - DNA, 100 bp, Homo sapiens
acccaccagacctcacagtcattgataagttggttgtgtccagggagtcggtagtaagggatggcgggacgtcaccacctttttttcggggaaagcagag

SEQ ID NO: 131271 - DNA, 100 bp, Homo sapiens
atcatgagagatatagcccacttagaaatcacaaattggcagagggggtcgatttgggaggaaaggtgtggctataaactttgttactgaagaagacaag

SEQ ID NO: 131272 - DNA, 48 bp, Homo sapiens
cagaccactatcacctcgatcagtaaaagctggaccttcggaccccag

SEQ ID NO: 131273 - DNA, 75 bp, Homo sapiens
ctggaggattccctggaagacctgggggcagcagatgacggagcagcggaaacgcaggcaacgcctaggctttgt

SEQ ID NO: 131274 - DNA, 100 bp, Homo sapiens
agagaggcaccgggatcgtgaccgagaccgtgaccgagagcgtgaccgagagcgcgaatatcgtcatcgttagaaggaaaatatgagagccacacccgtg

SEQ ID NO: 131275 - DNA, 97 bp, Homo sapiens
cgatggagccccagctgaaggaaagcggaatcgatctgacaccgagcagctgcagaaccttggcctgaaaatgctacattatatcagcaattgaaag

SEQ ID NO: 131276 - DNA, 100 bp, Homo sapiens
gctactatggaggaaactgggccagttttagcttttcaggactattgtcctggctaaaggaataccagttcgaagcattcagcaaacaatggcaaggcag

SEQ ID NO: 131277 - DNA, 101 bp, Homo sapiens
ggggcttcgcgtgttccaagaactgcctgtgcgccctcaacctgctttacaccccctgggcgctgcctatggcacagccaagagcggtaccggcattgcgg

SEQ ID NO: 131278 - DNA, 78 bp, Homo sapiens
ctgagtcaaagaagatgcctcgaactaaacaaattcatcccagaaatctaagagccagagactgctgctactttgaaa

SEQ ID NO: 131279 - DNA, 121 bp, Homo sapiens
attacctgtctgtaaagaagaagaggaggagggagacagcggggaggatccggtggcagtttaacaccagagcagaagtccattggaatattaagcccaggagttgctttggggatggctg

SEQ ID NO: 131280 - DNA, 50 bp, Homo sapiens
ccgacatggaacagggactcactggggtacctgttcctgacttttccacg

SEQ ID NO: 131281 - DNA, 127 bp, Homo sapiens
ctctgattctccagcgacaggacccggcgccgggcactgagcaccgccaccatggggaaggggattctggaacttttcaaagcctgactctcttcttgaaacagtggagcatcatacagagtttact

SEQ ID NO: 131282 - DNA, 100 bp, Homo sapiens
gcttcagggctgcctggctgcaggtcccaggtgtgacaccttcagcaggtctcagggaagatggcagccctaggggacattcaggagtccccttctgtcc

SEQ ID NO: 131283 - DNA, 100 bp, Homo sapiens
ggaactttgggtcctgaatcttctgggagctgaggaaccagatatcttgaaaagctgccagaaaggctttcttctagtcaagatgagtgataaaccagac

SEQ ID NO: 131284 - DNA, 98 bp, Homo sapiens
gtctgggtgtcgcgggccggccccgcggggagcgcccccggcgcgatgcccttcaggaaaggacatgtattcctctgagaaaccttggacagcagatt

SEQ ID NO: 131285 - DNA, 100 bp, Homo sapiens
atcaactcaagcaatttctcacctttgacaaacaggccactgagaatgcaaaggaggaagtgaggcgaattctggggctgctggatgcttacttgaagac

SEQ ID NO: 131286 - DNA, 100 bp, Homo sapiens
gctttgataaatgaaatcttcctaagtatagtttcctattctgtgaaacagaagacattgtgatggagtggttcttcagctactggatggaaacatatgc

SEQ ID NO: 131287 - DNA, 100 bp, Homo sapiens
gagaaacctcaagatgtggatttaccttatcccctcaacaacttttcagtggcaagactcgctcagcagcagcctgaaaacttgctacaagtatctcaat

SEQ ID NO: 131288 - DNA, 75 bp, Homo sapiens
atcaacaaaacaattattccccgacttacaggttgttggaagaggagcctttggagttgtttgcaaagctaagtg

SEQ ID NO: 131289 - DNA, 99 bp, Homo sapiens
agccagattcattttccacggcacatggtttcctgtgggtttgatttttgccaagcatcagaaggaaagcgcccatctgaaaatcttggtcaggtacta

SEQ ID NO: 131290 - DNA, 101 bp, Homo sapiens
caggactttaaaacagatctgcgcttccagagcgcagctatcggtgctttgcaggtgattcgcaaggggtggctcaccatcagcaacattggcatcatgaa

SEQ ID NO: 131291 - DNA, 82 bp, Homo sapiens
ccgaaactgtcaagattggcaaggcaaaatttggtttctctaatattactggaattgattactctccttctgcaattcagct

SEQ ID NO: 131292 - DNA, 100 bp, Homo sapiens
tgagtcagtgtgacagtccatatgtaaccaaatattatggatcctatctgaaggcaccaccttccatggtcaataatgaacaacgccagcatgcagagca

SEQ ID NO: 131293 - DNA, 88 bp, Homo sapiens
ttcatttacagagcaacttgatgaaggtacacccaatagagagctggtagccggtctgggtctccaggaagagttctgaccacaacag

SEQ ID NO: 131294 - DNA, 75 bp, Homo sapiens
cttcttgtatcttcagcagcagcagacgtttggaaagggtcacggagactcaccagttggcagaattaaatgaga

SEQ ID NO: 131295 - DNA, 74 bp, Homo sapiens
tggatgaggtggtgaaagccacttctaggggctgcatcaccatcatagtgccggtggtggtgtgcacattgagc

SEQ ID NO: 131296 - DNA, 128 bp, Homo sapiens
ccggagcctggaggagctgctgctggacgccaaccagctccgcgagctgcccgagcggggatctgacgagcttttctctacttgtgtcactaacggaccgtttatcatgagcagcaactcggcttctg

SEQ ID NO: 131297 - DNA, 88 bp, Homo sapiens
gctgtatgattaggccacaatcttcaatgagtaaacatattcctgcaggtgacagcagggacatgtctcgggagatgcaggatgtaga

SEQ ID NO: 131298 - DNA, 100 bp, Homo sapiens
gagcccgctctgcgttttgttttcccctcggcactaggcagcggaggagcccgaccgacccggtcagtttgctgagaacgaaaccaatgaggtcaatttt

SEQ ID NO: 131299 - DNA, 100 bp, Homo sapiens
agaattattttgcaccactggatgttgtttactgttctaatacccgatttacaattacattgaactacaaggatcccctcactggagatgaagagacctt

SEQ ID NO: 131300 - DNA, 100 bp, Homo sapiens
ctttgatttgattcagcagtcctgtcaagtataaatggctggcgctgtgacaactgccgcagacctgggggtgaacccagtcccgaaggcactactggcc

SEQ ID NO: 131301 - DNA, 98 bp, Homo sapiens
ccgcgggcgcccgaggggccgagcgaggagcttctacctggccctctacaagcagatgagcttcctggagaagcgaggctgcccgcgcacggcgctgg

SEQ ID NO: 131302 - DNA, 51 bp, Homo sapiens
gctttgctggctgtgggggctacaaaaggagtgttgaagcctggaaatccc

SEQ ID NO: 131303 - DNA, 82 bp, Homo sapiens
tgcagccaaatgccgcaaccggaggagggagctgactgatacactccaagcgtaccaatattagcatgtggcaatgatgatt

SEQ ID NO: 131304 - DNA, 75 bp, Homo sapiens
ggggctgaatcgctggaaacggttcacaaggaagccgagtcccaagagtgcagtgggccatgagtatgttgccga

SEQ ID NO: 131305 - DNA, 75 bp, Homo sapiens
caacatcaggtgactgtcccagaagtgaatcgcaggttaatttggagtggcccctggagtcagtttcctacacca

SEQ ID NO: 131306 - DNA, 75 bp, Homo sapiens
gcggggcgtgcgcgtcctcctccccaggcccgccgcctccctgccaagaacgtgcgcatcgaccccagtagcctg

SEQ ID NO: 131307 - DNA, 90 bp, Homo sapiens
tacaggtcgcgggagtcgtagggaggacgccgggacacctggaagccgagaaatgttacctagaaaagtacgagaaagttcatcattttg

SEQ ID NO: 131308 - DNA, 85 bp, Homo sapiens
ataaggaagccaagttggaccgttctgatgtgactgagagagaaggattttgacacttcatgacatgtcattatttagagcaata

SEQ ID NO: 131309 - DNA, 80 bp, Homo sapiens
ctggaacttgccctgtctcctcgcagatgagacggtctggaaaatcccgaagcagaagcccgtattcatctaggcattca

SEQ ID NO: 131310 - DNA, 83 bp, Homo sapiens
gtgaaatcagaggagatgtaactatcgaaattgaagccaaggaagcttgtgattggctacgggcaactggtttcccccagtat

SEQ ID NO: 131311 - DNA, 50 bp, Homo sapiens
tgcatctttatacaaagaccatgtgcaaggagtaactattcccagtcaga

SEQ ID NO: 131312 - DNA, 98 bp, Homo sapiens
gaccgccctggacatcaagattaaaagagcgaataaagtttatcacgccgggatacttttctgctgtgagaatgtaagatggatccagaagagcagga

SEQ ID NO: 131313 - DNA, 77 bp, Homo sapiens
tttgactctgacagtcctcccactaagtaagactttgaccccgacgcaggcttcagtgattgccgcggatcagaagc

SEQ ID NO: 131314 - DNA, 75 bp, Homo sapiens
ccctcggcggcgttcttctgtgtggcccgcctgcaggtgtgatgaatgcagactctgctaccattttggctgttt

SEQ ID NO: 131315 - DNA, 90 bp, Homo sapiens
gcatgatgcagtcactaagccagaatcctgaccttgctgcacaggcacttcagacaccacctccaacaacacagcaaccgtgatttccac

SEQ ID NO: 131316 - DNA, 75 bp, Homo sapiens
gaccgcagtgggataaatctcaaagatctcgtacaagatccttctttctatgaaacccacgtagtcgaacaccgt

SEQ ID NO: 131317 - DNA, 98 bp, Homo sapiens
ctcatctcagcctccaaaagtgctggcattacagcttgcttggctcaggaacaacagaagagaataaagaaaatgacctcagaccttccttacctcag

SEQ ID NO: 131318 - DNA, 83 bp, Homo sapiens
acctaaatcctggatggaagatagcttgaacagggctgacaacatttttccttttccggtggtgctgtgggtcggcctgggcg

SEQ ID NO: 131319 - DNA, 75 bp, Homo sapiens
tgcagatcacattcagttggatgccagcatccctgtcacttttacaaagaggaagaagcccctccagatggtgct

SEQ ID NO: 131320 - DNA, 87 bp, Homo sapiens
gcgagacgcgcagcgccggcgcccgggagacccaggaggagcccgcagggacagtggcacagcgacgtcttcagtggactgggcagc

SEQ ID NO: 131321 - DNA, 83 bp, Homo sapiens
ctccctccgcgcggggacccctggcgggcggcaggaggacatggccagcgacgccgtgcagtgccggtggtggtgtgcacatt

SEQ ID NO: 131322 - DNA, 98 bp, Homo sapiens
atcaatctaaacatttgtgggaagttgtattcatcaataatgaaatgctgactaaggaacaaggaaaaccagtggctgttacaagtaacagaggcaca

SEQ ID NO: 131323 - DNA, 74 bp, Homo sapiens
gaattaaaagccttttgtgctgatcaacttgatgtctttttacaaaaaggcatgtgctgataagttgaaaagag

SEQ ID NO: 131324 - DNA, 80 bp, Homo sapiens
cacagttccggaaagcacagccagctccctgtgctgtcaggaatctacaggacttggctcgtatttacattcgacgcaca

SEQ ID NO: 131325 - DNA, 97 bp, Homo sapiens
gaacttagaaggcaaaagagggaggagatgcgactcgaagcagaaagacaacagcagttctgtagagagtttaaatatgaaggaatggcaggacggg

SEQ ID NO: 131326 - DNA, 141 bp, Homo sapiens
gtccgggctcccgtggccgcgtgctgggaggagactggagcccggttaggaagaatggagttggcgactcgctaccagcttatatagaattggtgataggatcacaacttctgaggtcccagcaagagtcctaacatctag

SEQ ID NO: 131327 - DNA, 74 bp, Homo sapiens
cttccccaagaagctcactcccaaaaaagatttctcgagtcaatcccgacgtgtcaatcccgacgatagagagc

SEQ ID NO: 131328 - DNA, 75 bp, Homo sapiens
atatgacaaggatggaagaggtcctatgacaggatcaagtgcacactggtttttggctgttgtttgtttccccgg

SEQ ID NO: 131329 - DNA, 100 bp, Homo sapiens
cgcgtggtcacactgctctacgacctggtcacggagaaggttattaatgctgcactggctttagcagcaaaaccacagagtaaactggcccaagagaaca

SEQ ID NO: 131330 - DNA, 50 bp, Homo sapiens
cccagcctgtttcacttcttggccagaagcggactcctagaagaggggag

SEQ ID NO: 131331 - DNA, 80 bp, Homo sapiens
tggccgccgcggagacccagtcgctacgggagcagccagagtgaaaggtgtagcagtcactcggcctacacccacagcat

SEQ ID NO: 131332 - DNA, 48 bp, Homo sapiens
accccaacagcaggaatagctcccggactaaaaacagcccttgtagaa

SEQ ID NO: 131333 - DNA, 90 bp, Homo sapiens
cgctatggcgcactggagtaccctgttcctggcagtgattgtagagaaggctccaaaagccagggtgcctgatctggacaagaggaagta

SEQ ID NO: 131334 - DNA, 83 bp, Homo sapiens
cgatccagcctgcggagcctgtggggcagtggaagcatcagttcacagcagtaatgcacactgtacagataagacaattgaag

SEQ ID NO: 131335 - DNA, 100 bp, Homo sapiens
aaatgatcagccttgcaaataatcacagattagctggcggtgtccgtgtcctccatgtctgagttccagcgtctaatggacatctcccccttcctgcctg

SEQ ID NO: 131336 - DNA, 76 bp, Homo sapiens
gaaaagagaggacagcggacgagcagatccgagaaagatgctggtttcgagttttggagatccttgttttttatgg

SEQ ID NO: 131337 - DNA, 112 bp, Homo sapiens
gttgttgagcagagggaaagggataggagaaggatgtggactgcagtgctgcagtgccagctccacagcacctgttgccttcattagcagcttttcctcctcttccctgcac

SEQ ID NO: 131338 - DNA, 146 bp, Homo sapiens
gtcggcagtgtgaggagctgctatggtgctgagtttcctggtagagccggccgagctgaggcggtcgcggccatgaagacacgatgaggcgagtggtacgacagagcaagtttcggcatgtatttgggcaagcggtgaaaaatgac

SEQ ID NO: 131339 - DNA, 75 bp, Homo sapiens
caaatgaagaacactttcaagaaccagattccaacaatgtctcacccatcttggctgccacccaaaagcactggt

SEQ ID NO: 131340 - DNA, 90 bp, Homo sapiens
gaactgccccatcgatgtgcggcgcccgctgtataagctgttgttggcctactgtacccctgtatcgacagtcacctcggagaaccccac

SEQ ID NO: 131341 - DNA, 75 bp, Homo sapiens
gcctaggcattttgctgtctcctcctaatacgagcctgtgtggtgcccctatctccttgttccaagggcctctct

SEQ ID NO: 131342 - DNA, 74 bp, Homo sapiens
accgtgaccgagagcgtgaccgagagcgcgaatatcgtcatcgttagaaggcgagaaccgaagtttggaggtag

SEQ ID NO: 131343 - DNA, 98 bp, Homo sapiens
ctttatctatattttttgactgctctgctcctctatgctggacatcaaatttccagcaattcaattaaaccccagctatatcagggcaatattgagga

SEQ ID NO: 131344 - DNA, 51 bp, Homo sapiens
ctttggagacagatgaagatatggacctcagcagccatgtcgaagccccat

SEQ ID NO: 131345 - DNA, 132 bp, Homo sapiens
gtgctgtccttatggcaagaatatatagaagttggagggaagataaactctcttctggatgtctgaggccaaagatgaagaggaagcctttctggattggagtgatgatgatgatgatgatgatgatggatt

SEQ ID NO: 131346 - DNA, 145 bp, Homo sapiens
ggctgatgtagaatttgagctgagtgcagacacagatggttgggtagcagttggattctcttcagacaagaaaatgatctggacgttggtggttggctatgtgttgactgtttcattcaagtggaatgcaagcactgaacgctac

SEQ ID NO: 131347 - DNA, 90 bp, Homo sapiens
gaaaaatttctttaaagactggagaaagcccccaaatacatcaagatgtttgtactggatgaagctgacgaaatgttaagccgtggattc

SEQ ID NO: 131348 - DNA, 90 bp, Homo sapiens
ccgcggccatggacctggcggatccggcctgccctggcccagctcaacacctgatttcggatgatcacggacgtgcagctcgccatcttc

SEQ ID NO: 131349 - DNA, 75 bp, Homo sapiens
gcctggctccccatactagtcgccggagaccaagacacattccaccccagtggggggtcccataccactcatgga

SEQ ID NO: 131350 - DNA, 90 bp, Homo sapiens
gaatgctaagaaagctaggcttctaccagaaggggaggagacgttggaatcagccttgttcgggagtctagcagttctcgctcaccaacc

SEQ ID NO: 131351 - DNA, 100 bp, Homo sapiens
cggccgtcggagacatgggagacccggggtcggagattactcttgtctctgctgctcctgggaaagtgatttgtgaaatgaaagtagaagaagagcatac

SEQ ID NO: 131352 - DNA, 82 bp, Homo sapiens
gtcgttgtggtgcgctgtcttcccgcttgcgtcagggacctgcccgactcagtgacctcctgccccccgaggtctgcagtct

SEQ ID NO: 131353 - DNA, 80 bp, Homo sapiens
ccgcgaggccaacgacgctgtcctctttggctttctgaccacctggttcctgggtgagatctgggcacgaaagcttctct

SEQ ID NO: 131354 - DNA, 96 bp, Homo sapiens
tggcagagaagttccggcagaaggcctccatccacgaggcctggactgacggtgtctcaaaggctgttgagcacatcaataaaactattgcgcctg

SEQ ID NO: 131355 - DNA, 87 bp, Homo sapiens
ggaggatgtcgggacaccccggaagctgggaaatggtgttgacttcaaaatcaaaactgtagagctaagaggaaagaaaattagatt

SEQ ID NO: 131356 - DNA, 78 bp, Homo sapiens
gataagggcgacagcaacagctctgccggctggaagtgtctttgcaagatataacaatgaggaaagctttccgaagtt

SEQ ID NO: 131357 - DNA, 83 bp, Homo sapiens
ctcgtccctccgggccgacatgagtggggaccacctccacaacgattcccagcggacaaggcaaaatctcagcaagttcggac

SEQ ID NO: 131358 - DNA, 51 bp, Homo sapiens
cgagaagtcatggacctaatcattgagaacatggtaactgttggaaaaacc

SEQ ID NO: 131359 - DNA, 82 bp, Homo sapiens
tccacccaccgccgccgcctcccagtggttcgcacagacagtttaaaaggccggagaggtcgtttgccctcgaaaccgaaga

SEQ ID NO: 131360 - DNA, 98 bp, Homo sapiens
gaagctcgcagcagctggggaggagccaaagcctcggcgctcacctaagccgcagggagatacacccaactgggagctgtgttctcatttcacccaag

SEQ ID NO: 131361 - DNA, 100 bp, Homo sapiens
acagaatagacctgaagacaaaaatccagaagtacaagcagtctggttgttcctcaaagtcattcaagctgtactcgccgaaggagcccccgaacggcaa

SEQ ID NO: 131362 - DNA, 89 bp, Homo sapiens
ctccattttccaccagaaggccgaaaaggtgaatgaaaactttgccattgatttgatagcagagcagcccgtgagcgaggtggagactc

SEQ ID NO: 131363 - DNA, 100 bp, Homo sapiens
gcttcgtcatcgtgtcctcggtgagcaggcccgaagcaggcacgacctttgattatgtttgagaccttcaacaccccggccatgtacgtggccatccagg

SEQ ID NO: 131364 - DNA, 100 bp, Homo sapiens
gggaggaaggaacgaggcaaggagctaaagcagcgtgcgttcagccctggggtctaccccgagccccggagcgagagcgagtgcctgagcaacatccgcg

SEQ ID NO: 131365 - DNA, 58 bp, Homo sapiens
tgggattctgaccatctcacatgccacaatgtggagtactcggatgaccactgccatt

SEQ ID NO: 131366 - DNA, 90 bp, Homo sapiens
ggaggaaacagtgacagacctggagactgcagttctctatccttcacacaggttggtcaaagaaaaagtgatgtatgaaaaagaggcaaa

SEQ ID NO: 131367 - DNA, 50 bp, Homo sapiens
agccatgacaatttgggatttcaaggttcaagggcagcaggaaagacgag

SEQ ID NO: 131368 - DNA, 75 bp, Homo sapiens
gagaaaatgaaaccagcagacagaatttgtcagatcaggaagcaccatacctcctgcgaaacctcagtgatcaca

SEQ ID NO: 131369 - DNA, 75 bp, Homo sapiens
cagacaagttccatcccacctttgagtcaggtctattattagcagaagatttttctgcatagttggcacgctgta

SEQ ID NO: 131370 - DNA, 100 bp, Homo sapiens
cgaattgtgaatcgcttctccaaacagtccccagacagtcccggtgtgcacacttccctgcttctgttcatgatgttctctgaacctgggatcacctttc

SEQ ID NO: 131371 - DNA, 75 bp, Homo sapiens
gtaccggctgggccggaagatcggcagcggctccttcggagacatctatctcgctgtaccgcctgtgctgggttc

SEQ ID NO: 131372 - DNA, 76 bp, Homo sapiens
caagagtataatgtctatggtgaagtcttttgtacagtggttagagttaaacatgaagtttctggagagacagtgg

SEQ ID NO: 131373 - DNA, 90 bp, Homo sapiens
gtgcattgaattttaatttatttgaaaaatctgcagctgctactgaagaagagaaagaataactgaagtgaagtgatggactccgatttg

SEQ ID NO: 131374 - DNA, 90 bp, Homo sapiens
cactacaagggtcctgaagtcagttgttgcatcaaatacttcatatttggcttcaatgtcatattttggatcaggatcctcatgaccagc

SEQ ID NO: 131375 - DNA, 120 bp, Homo sapiens
ggaatttgcttcgagtatttcaacattgcaatgataatacctcagtgttcacataactaccagcatctcagacatgtcgaaaaagatgttttgatccctaaaataatgagagaaaaggcc

SEQ ID NO: 131376 - DNA, 101 bp, Homo sapiens
gaggttcagtgcgaaggcaacagcttccataaatcctgcttcctgtgcagcacatctccctaacacttcctgccaccttccgaggcaggaacagcacccgg

SEQ ID NO: 131377 - DNA, 75 bp, Homo sapiens
gaaaagatccctggaatatgaagagacacagtatggtagccacacccccagttctttatagctccaagctctaca

SEQ ID NO: 131378 - DNA, 97 bp, Homo sapiens
aaattcgtcattcgaaacatagtggaggccgcagcagtcagggacatttctgaagcgagcgtcttcgatggtgtaatcctgagagattcacatggtg

SEQ ID NO: 131379 - DNA, 101 bp, Homo sapiens
gctcgagaatacagagagaaaattgagacggagctaagagatatctgcaatgatgtactggtatgtcgagagtaccaacgtggcaattgcaaccgaggaga

SEQ ID NO: 131380 - DNA, 100 bp, Homo sapiens
aaggaagatgagctgtcctttcaggaaggagccattatttatgtcatcaagaagaatgacgatggtgatgctgtggagtcttcaaaaagcccgaccactc

SEQ ID NO: 131381 - DNA, 75 bp, Homo sapiens
cgcccccagaagcccgggaacaaacgaatcactagatttgatctacttggcgactttggaaggtttaattggctg

SEQ ID NO: 131382 - DNA, 96 bp, Homo sapiens
cacccaggacacactatggtgcttcagccaagtgaaaggcactatcgagattggaaccacagaagaataactgaagtgaagtgatggactccgatt

SEQ ID NO: 131383 - DNA, 95 bp, Homo sapiens
cctgtgtggcaccagcagcatcttagagccccaggagtccctgtttctgctgctccagtacctgccccctggggtcatcgccctggtcaacttcc

SEQ ID NO: 131384 - DNA, 50 bp, Homo sapiens
cctcgccatgtcctgctgcccgctcctgccctccactgactccagagagg

SEQ ID NO: 131385 - DNA, 74 bp, Homo sapiens
tcatcggcactctgaacgcggccaaggtgccggccgacaccgctggagctgcactgtcaggtgatgttccgaaa

SEQ ID NO: 131386 - DNA, 75 bp, Homo sapiens
tgctgctcctcacggacgaccaggacgaagtgctcggcggcatgctatcatggtgaacttacttcagattgtgcg

SEQ ID NO: 131387 - DNA, 100 bp, Homo sapiens
gggaaggcgggagacgagaagcctgaaaagtcgcagcgagctggagccgccggaggaggcactggctacaattaggcttctcgacgtcctgtgcgaaatg

SEQ ID NO: 131388 - DNA, 100 bp, Homo sapiens
ggggaagaggcccaccctggagtaaccctcactggagaatccagaggtggataatattaatgcagctgtgatggatttgaaaaaaaagaagatccgcagt

SEQ ID NO: 131389 - DNA, 95 bp, Homo sapiens
gaagacgtctgcgtgagaatagagaccaccgagtcccccccctacagctctgggagctacgattccatcaagaccgaggtcagcggctgccctga

SEQ ID NO: 131390 - DNA, 51 bp, Homo sapiens
acacccctgaagccgagaaatgtgcacaagggtctggatccctgaccctga

SEQ ID NO: 131391 - DNA, 88 bp, Homo sapiens
atggatgcagctcttctgttgataggaaaatcctgccttgcttcgttgggcctatgcaagaacaataaatgtctatcctaatttcaga

SEQ ID NO: 131392 - DNA, 100 bp, Homo sapiens
cgggtttcgtcttcttggcttctgatatttatgaccatgcagttctattcaataagtctggctctgcagatggcatggggaggaggttgcactcagccca

SEQ ID NO: 131393 - DNA, 71 bp, Homo sapiens
gcgagtgaggaaaggaggtactgtagaacactctgctccagccaaggtggtgagggcagctgttcctaaac

SEQ ID NO: 131394 - DNA, 100 bp, Homo sapiens
actggggccagggaaccctggtcaccgtctcctcagtaagactttgaccccgacgcaggcttcagtgattgccgcggatcagaagcctgagcactttggc

SEQ ID NO: 131395 - DNA, 75 bp, Homo sapiens
ctttcactcacccagtgatgacatggacagcatcatcttcccaaaggttcaggaacaagtgcatcccactctctc

SEQ ID NO: 131396 - DNA, 98 bp, Homo sapiens
aactctctgctccaaagaaagatgtcaagcagccagaagaactccctcccatcacaaccacaagacggtatgccctggtagttgcaggagatattgct

SEQ ID NO: 131397 - DNA, 90 bp, Homo sapiens
gcttgctgcctggaagaatgacggatttcaataacgagagtgacagctgacatttctcttgctaagaggtctgtcctaaataatcccagc

SEQ ID NO: 131398 - DNA, 100 bp, Homo sapiens
ctgcagatcatcctggcgatctacttcctctggcaggtggacccaagtggagagattgtggaactggcgaaaggtgcatgtccctggaaggagcatctct

SEQ ID NO: 131399 - DNA, 100 bp, Homo sapiens
gtgcggcttccggggcgtcgcggcccaggtgctgcggcctggggctggagtccgattgccgattcagcccagcagttttaaccatgctgaccaacgaaac

SEQ ID NO: 131400 - DNA, 100 bp, Homo sapiens
cttaggaccacccaccatgcctatccaggaataaaggttggggagactacacctgacaaacttttcactcttatagaagtggaatgtttaggggcctgtg

SEQ ID NO: 131401 - DNA, 100 bp, Homo sapiens
tctgtccttaaaagcaggtggagttggtttgaatctgtctgcagcttctcgagtgtttttaatggatccagagaatacttatctctggcgcacatcacta

SEQ ID NO: 131402 - DNA, 83 bp, Homo sapiens
cggacatcgtctcctgtgtggcgatggtcttcctgctggggctcatgtttgagccaccagagaaacggcggagaacaattgag

SEQ ID NO: 131403 - DNA, 73 bp, Homo sapiens
atatggacaggtctacgccacatcacttagatagaagaagtcagagatgccatggaaaatgaaatgagaaccc

SEQ ID NO: 131404 - DNA, 100 bp, Homo sapiens
gctcgacttcaaactcgtctttggcgaggacggggcgccggcgccgccgcccccgggctcgcggcctgcagccactgaggcggctcccagctgcgttggc

SEQ ID NO: 131405 - DNA, 75 bp, Homo sapiens
gccgcagtgggtcccggacaaggagttgctgattgttggaggttcttttggtcttcgtgagttttctcaaatccg

SEQ ID NO: 131406 - DNA, 74 bp, Homo sapiens
caattgaaggagtctataacacagtcgctgcggtgagcaccacgggtctgagtgccagcgatggtttatcacgg

SEQ ID NO: 131407 - DNA, 98 bp, Homo sapiens
tggtagatttggggccccagtatcagggctggtgaattaccatatctccgtcaagtgcagtaaccagttcaagttggaagtgtgtcttttgaaatcag

SEQ ID NO: 131408 - DNA, 82 bp, Homo sapiens
ggcctgggtccacgccgagggcaggacgaacttcaccagacaatgcagatcttcgtgaagactctgactggtaagaccatca

SEQ ID NO: 131409 - DNA, 71 bp, Homo sapiens
gcttgcccacggccgcttcagtgccaagatgagcagccagacacagtctccaacgccaccaaagcctccgt

SEQ ID NO: 131410 - DNA, 75 bp, Homo sapiens
agcacggccaagtcagccacctggacggacgtcttcctcatctgcttctccctcgtcagcccagcctcttatgag

SEQ ID NO: 131411 - DNA, 100 bp, Homo sapiens
tccataaattcactcctggaccccagttgagaaccctgaccctaaggattctgagcctgcaaaccctggagaaaagatggagaaaatcctccaagaaccc

SEQ ID NO: 131412 - DNA, 100 bp, Homo sapiens
gaaggatatcgacgtcgtgatccagaagtccagagctgaggactgcctgtttgcagaccaagcggagcagccagctggcagtagcgccctgtaggacccc

SEQ ID NO: 131413 - DNA, 50 bp, Homo sapiens
ttcaacctggcacactgttatctggaagaaaaagatgctatggacgtatg

SEQ ID NO: 131414 - DNA, 51 bp, Homo sapiens
catctctgagcccaagacctaaaggacagaataacgggctcccagattcac

SEQ ID NO: 131415 - DNA, 76 bp, Homo sapiens
ggagcaatgctgacctcggtttcctggacccattccgactcaggtctatcatttggcaagtgtacgcttacgtgat

SEQ ID NO: 131416 - DNA, 74 bp, Homo sapiens
cagaaggaagatggcggatctggaggagcagttgtctgatgaagagaaggataacgtggaaagggcagatgctt

SEQ ID NO: 131417 - DNA, 100 bp, Homo sapiens
atcatcaccatggaaaaagtgacttgagcagattaatcctaccatatgaaagatttattaaaggagaagaagataagcccctgcctccaatcaaacctcg

SEQ ID NO: 131418 - DNA, 51 bp, Homo sapiens
taaggattccaagtaactcttatttggacatggatttgattgacatacttt

SEQ ID NO: 131419 - DNA, 83 bp, Homo sapiens
agccgcgccgtccgcgccgcccgttctggagaactacgatgacccgcacaaaacccctgcctccccagttgtccacatcaggg

SEQ ID NO: 131420 - DNA, 100 bp, Homo sapiens
gcagtgatggaggaggaggcggagaccgaggagcagcagcgattctcttaccaacagatcagagcctcctaagaaatatccagaagtcaagccatggatc

SEQ ID NO: 131421 - DNA, 82 bp, Homo sapiens
accccagagcggccatgagctggtgtgcagccgcccaggaggggagtgtggccatctggggccgtgtggtatttgccactca

SEQ ID NO: 131422 - DNA, 100 bp, Homo sapiens
cctgtgcaggcctgctcctccgtttgcaaggcaaaaactgattattccaagtggaagttgccctgttattctgaatacttacttttgtgagaaagttgtt

SEQ ID NO: 131423 - DNA, 83 bp, Homo sapiens
cgcctgggtggttgttggcgtgtccctgcagcgaaggatcctgggaccttaaaccggaaaacattttgttaaatgaagatatg

SEQ ID NO: 131424 - DNA, 85 bp, Homo sapiens
gacttctcaatcccaagtggccaaaggatgaagaggaagccggcttattggagctcttaaaatcccagatttgtgataatgccgc

SEQ ID NO: 131425 - DNA, 100 bp, Homo sapiens
cctgagtccttttgaggatgtggctggcacagaagcctgaaaagcctcacctgaacctgtggctggaagcccccgacctcctcttggccgaagttgacct

SEQ ID NO: 131426 - DNA, 100 bp, Homo sapiens
ggcccgcggctgcgcttccgacggggcggccgggggctcagagatccaagtgcgcgccctggcgggtccggaccaaggagctttgctggcagtagaacac

SEQ ID NO: 131427 - DNA, 88 bp, Homo sapiens
tctccgcagatttgcaaatacacacactgctccagccacagtggttcttgtgtcaaatgggatgtaatgaccgaatttccccaagaaa

SEQ ID NO: 131428 - DNA, 83 bp, Homo sapiens
gtcgccggagccgcgccccaccccgccagctccagagccacgtacgatttttggaagtaccagcacagtgacgcttcctgaaa

SEQ ID NO: 131429 - DNA, 83 bp, Homo sapiens
tcgtcttcacgggcctgagccagaaggtgaaaaagaacaccttccaccatgaccacctcagcaagttcccacttaaataaagg

SEQ ID NO: 131430 - DNA, 95 bp, Homo sapiens
gtgcacccccagtgggtgctcacagctgcccattgcctaaagaaactggcacagcctccaggttggcgggctcatctgcgctggggttctgtgcg

SEQ ID NO: 131431 - DNA, 99 bp, Homo sapiens
gtgaccgagagcgcgaatatcgtcatcgttagaagtaagttcttggagacgtgctgatgacaggaaagatgaccgggtggaagagcgggaccctcctcg

SEQ ID NO: 131432 - DNA, 100 bp, Homo sapiens
gccgtgggtacgaccggaagccgcaggaccctggctctcaagctcccacatcctggattagtgagtctcaggtttcccagacaactgaagttctgactac

SEQ ID NO: 131433 - DNA, 88 bp, Homo sapiens
ggccagccctgctcgcagaattaccgcctcttctttactgcaggtggagctggagcaagaataccaagacaaattcaaaagactgccc

SEQ ID NO: 131434 - DNA, 100 bp, Homo sapiens
gtcccaccagcctgtgctgctgttcctcagggatccatatgtcttgcctgcagccagcggattttatattgcacgctgatcttgcctatgtatcacctcg

SEQ ID NO: 131435 - DNA, 90 bp, Homo sapiens
ataatgtgggagaaataagtgtatccaccagactcacagttttgcggggttatatatgccgcaattttacagggtcttctgctttgctga

SEQ ID NO: 131436 - DNA, 89 bp, Homo sapiens
catgagggacccactgacagattgtccggaacgccagccactacatctgcagctacaacaggcttcagtttaggattcaataaacctgc

SEQ ID NO: 131437 - DNA, 100 bp, Homo sapiens
accagcaataaggaatgggaggatgagggtttatttgcaagatgggtttgagggaattaaggataaagtctgctgaaagtagcaccagcctctggattaa

SEQ ID NO: 131438 - DNA, 79 bp, Homo sapiens
tgcacttccgagccgcccggccacccttcgtcatctgcgtgaagctgggggggccctcagcctcttggccttgaacggg

SEQ ID NO: 131439 - DNA, 75 bp, Homo sapiens
tctgctgactctgcttcctcctccgatacttcccgcagtcgatttcagaaatacagaggccttaagagcttccgg

SEQ ID NO: 131440 - DNA, 50 bp, Homo sapiens
cttctcagcaacctcgatgaaggggccaactcaccctatgcagcacagcc

SEQ ID NO: 131441 - DNA, 100 bp, Homo sapiens
tgatttgctgtcagccatgaacggatggatgtgatgcctgctagccaaaaggaacactatggctatgcatcctccaacgtcagccccgccctgccgctcc

SEQ ID NO: 131442 - DNA, 75 bp, Homo sapiens
cagaaaatcaacctatcctccttcaggaccaaccaataccaagtttccaggcccgaagagcatcccagactattg

SEQ ID NO: 131443 - DNA, 153 bp, Homo sapiens
ctggagtttctctgccttgctgatctgagctcagacctgccaatttaccagagataattgataacaccctgtaacagctgagcttgcagtaaggttgggctgctggcacgacccttacatccaccactttgtgagactgtctaaagacaggaa

SEQ ID NO: 131444 - DNA, 90 bp, Homo sapiens
ctccggtccaccatggagtacctctcagctctgaaccccagtgacttactcagtttgacaagtatgcgcccaagctggacagcccctact

SEQ ID NO: 131445 - DNA, 50 bp, Homo sapiens
ctgctgcacatcctgtgcaaccttgggattgccccctgtgggtcactttc

SEQ ID NO: 131446 - DNA, 75 bp, Homo sapiens
ttgggtcgcagttcttgtttgtggatcgctgtgatcgtcacttgacacagaatgttcagcttaacaaagaaatga

SEQ ID NO: 131447 - DNA, 100 bp, Homo sapiens
gagaactatgacaacttagtctcattgggtgcatcatttctggcatggcttcaggaagcattgtgctattttacaacgactttaaccggtggcatcatga

SEQ ID NO: 131448 - DNA, 75 bp, Homo sapiens
ccgatgctgtcatctatctcaagattcttcgctgctgctgccttaccgccgagaaccaccacccgccaggcgtct

SEQ ID NO: 131449 - DNA, 100 bp, Homo sapiens
ggctatttctggcgctggcgcggctccaagaaggcgctatgtccaaactgggtcttcggcaggttacaggagttactagagtcactatccggaaatctaa

SEQ ID NO: 131450 - DNA, 87 bp, Homo sapiens
tgtctgtaccccacaccaacggaccaatcaatccagggcccagtatatttgccttccctccatgatctccaacactatccgataaag

SEQ ID NO: 131451 - DNA, 75 bp, Homo sapiens
aagatgagaccgcaattcgagaatcaaagggccgggagcgatgttggtccaggcgcaatgttcagcgtatttgag

SEQ ID NO: 131452 - DNA, 83 bp, Homo sapiens
ctgactttcagctatggaatcgcagtacctgacacgtccacttaccagtatgatgaatcttcaggatattactatgatccgac

SEQ ID NO: 131453 - DNA, 100 bp, Homo sapiens
cttctttggcaagtggacattttactggctcaattcaaagcagtattcagcgatttcaagagaagttttttatttttgctttgacacctcaacaagttag

SEQ ID NO: 131454 - DNA, 75 bp, Homo sapiens
ccggcccggcccactgttcaatcccagcccagcctgcagggggggccctcagcctcttggccttgaacgggctgt

SEQ ID NO: 131455 - DNA, 96 bp, Homo sapiens
agcggccagatcggcttcatgctgtgcagcaagaacccgcatggcctgtatgagaagaaaaagacctcaagaaagcaacgaaaggaacgcaagaac

SEQ ID NO: 131456 - DNA, 90 bp, Homo sapiens
ggcgtggcaagccggactaaggaccggggacttcttgattgagggttggggtgctggaggactgcttcaccttcctgggcatcttcctgg

SEQ ID NO: 131457 - DNA, 90 bp, Homo sapiens
acttatgtacaagatttaaaaagcatcgtagaggtctctaattaacagaagatggcaaagcccagccacagcagctatgtccttcagcag

SEQ ID NO: 131458 - DNA, 74 bp, Homo sapiens
tgagaatagtggttcttaactctagtgatggctgttttagtacttcaggtggaattcgtccttttcatcttcag

SEQ ID NO: 131459 - DNA, 127 bp, Homo sapiens
tgaaaggccgcgaaatcggcatgtggtacgcgaaaaaacaggggcagaagaacaaggaagcggagaggcaagagttgaaatggatgcagtcagaactgaatgttgaagaagtggtaaatgacaggag

SEQ ID NO: 131460 - DNA, 75 bp, Homo sapiens
tacttatggaagatacaaaggacatgcgtcgggatgtccaggaaatttttcgcatgaccccccacgagaagcagg

SEQ ID NO: 131461 - DNA, 74 bp, Homo sapiens
ctgcctcagcctcccgagtggctgggattacagttggcttcaggtcacatgttgctctggagaaccgagaaggg

SEQ ID NO: 131462 - DNA, 75 bp, Homo sapiens
cgggcttccagtggggggagagcccctggcaggtctcgcatgaatttgccttgaatttcaaccccagtaacccct

SEQ ID NO: 131463 - DNA, 100 bp, Homo sapiens
gccttcctcaaaagtctgatgctagtcatctcggaaggcctcagaaaaagccttaaaggactggctggacaatggcccagaacaagctattcaacaagat

SEQ ID NO: 131464 - DNA, 75 bp, Homo sapiens
aactggagctacatttgcccatatctgcaaaatgacagatgtctttgaagacagagggataaattggaagaaatc

SEQ ID NO: 131465 - DNA, 90 bp, Homo sapiens
ccgccggagatgcctgacgcatctgtctgaggagcggtcagtgacgcgatggagcgggcaagctgcagaaccttggcctgaaaatgctac

SEQ ID NO: 131466 - DNA, 97 bp, Homo sapiens
gtccagcatgacaggatggaagtacaagtgtcagcacctataacaaaatccagtctcatagcagaggagaatataatgtttacagcaccttccagag

SEQ ID NO: 131467 - DNA, 101 bp, Homo sapiens
ggccaacatgagcttcttgtttaccttctccaggcaaattccgttcccctgcagcaccatctcctttggctcttcggcaaccagtgaaagcatttagtaac

SEQ ID NO: 131468 - DNA, 75 bp, Homo sapiens
atgatgaagccatcatggctcagcaggaccgaattcagcaagaggcctccggtgtggctgtctctgatggtgtca

SEQ ID NO: 131469 - DNA, 100 bp, Homo sapiens
ggatgggatttaatgcatcttccatgctacgaaaaagccagctgggttttctcaacgtcaccaattactgccatcaagagaatccatcccattaaatgac

SEQ ID NO: 131470 - DNA, 97 bp, Homo sapiens
gttacagatcttataacagtcggtttaaaggagcttcaggatggttcgtactaagacatggaccctgaagaagcactttgttggctatcctactaat

SEQ ID NO: 131471 - DNA, 100 bp, Homo sapiens
ggctaaaagacgaaataccaccggaactggtcgaatgaggcacctaaaaattgtataccgcagattcagatccagctccaggtcccacaggggctcttct

SEQ ID NO: 131472 - DNA, 100 bp, Homo sapiens
gtggttagtcttcttctagacgacgaagagttggagaagaaacgtgtggcacttgctgaaggatttcatgcaagattacaggaatttcagaattttgaac

SEQ ID NO: 131473 - DNA, 75 bp, Homo sapiens
tttgttcctctccaccacttctacctgactccggaaagcttcgatcagaagtttgcagatggggtcatcttactc

SEQ ID NO: 131474 - DNA, 100 bp, Homo sapiens
cagcagttatgaggcagagcctaagagaactatggcaacatcaggtgactgtcccagaagtgaatcgcagatcagtgtactgttacccggacatacctat

SEQ ID NO: 131475 - DNA, 75 bp, Homo sapiens
ccgagactgacaacgcggtcccacaggatacagttgatatattagttggatggcatatagatcatactcagaaac

SEQ ID NO: 131476 - DNA, 98 bp, Homo sapiens
ccagaccctggagcctcagttggaagcagccgatccagcctgcggagcctgtggggcaggagcatctttccttgaagaagtacattattgacattgtg

SEQ ID NO: 131477 - DNA, 75 bp, Homo sapiens
gaccacgggctcctgtgctagtaccaggacgagattgaggagctgcgggccgagatgctggagatgcgggacgtc

SEQ ID NO: 131478 - DNA, 82 bp, Homo sapiens
gtttggctcaggacactacacagcctattgctacaacacagagggagagtaagcaggaaattcacaggaggtctgctcggct

SEQ ID NO: 131479 - DNA, 97 bp, Homo sapiens
ctcatgggacatagagacacctggtttggcgataccccttcaccaaggagactgctatttcatgcttggaattaaatcaaatgctcgcagaaacacc

SEQ ID NO: 131480 - DNA, 75 bp, Homo sapiens
gccttgtatgaggctatgtttacccagtacagcatctgtgctgcccagacactggaagaagagtttgccaggaaa

SEQ ID NO: 131481 - DNA, 75 bp, Homo sapiens
agctcccttctcctcgccactccaaggttgcagacgaagcagggtggtagatctctgtagaaatgtaaaagaaag

SEQ ID NO: 131482 - DNA, 98 bp, Homo sapiens
ctgaatgagcctgaagacaaggatgtgactgaccggccagccttgcagctgtatgatccaggagctcgcttccgagcgcgagagtgtggcggaaacag

SEQ ID NO: 131483 - DNA, 74 bp, Homo sapiens
ctgaaaaccaagtcttgtagtggagtgatccagacatttaatgtggatgcaccatgccagaccgtggaagattt

SEQ ID NO: 131484 - DNA, 100 bp, Homo sapiens
gtcattctgacccggggattcctcacagcgtctggcagttcccttttagactatggcgacatacctggagttcatccagcagaatgaagaacgggatggt

SEQ ID NO: 131485 - DNA, 90 bp, Homo sapiens
agcgtgaacgcgcccctcggggctccagtggagagttcttacgacatcgctattgcggttccgaggcagtgggaagagatgcggcccctg

SEQ ID NO: 131486 - DNA, 75 bp, Homo sapiens
ccggaagcggagagcggctgatcgcagtccggaggtacgaggaacagcaaattcaggaaaaagtggcgacctttc

SEQ ID NO: 131487 - DNA, 51 bp, Homo sapiens
ggagcgcagagcgggcgagcgcgcacccccaaattcagaaggagtcccagt

SEQ ID NO: 131488 - DNA, 98 bp, Homo sapiens
cgacgacggccgctgcctaagctggaaaatacgtaggtaacctttccagagatgtgacagaagtccttatacttcagttgttcagtcagattggaccc

SEQ ID NO: 131489 - DNA, 74 bp, Homo sapiens
cggagccggagccgcagaggctcccgggctggactcaggcttctcagcctgaactctttgcttccggaatccgg

SEQ ID NO: 131490 - DNA, 50 bp, Homo sapiens
gcggctgtatggagcgattttgcagatgatctgttcgcagttgagtacca

SEQ ID NO: 131491 - DNA, 74 bp, Homo sapiens
tggagatacaggtgaaatctggtccctccttgtggtccatttctgggcaccatgggctccacagtgtgcacaga

SEQ ID NO: 131492 - DNA, 74 bp, Homo sapiens
acttcagcactggcaagatcggctggttcctgggaggccagttaaatgtctctggcatgagccatgagcccaag

SEQ ID NO: 131493 - DNA, 100 bp, Homo sapiens
atcttcgagttcaaagagaccctcggaaccagccattgtttgatgtcctgtgactgagaaaccaggctttaaactttatgcctttggagatggagcccaa

SEQ ID NO: 131494 - DNA, 50 bp, Homo sapiens
cactccagtgcctccgacgcctcctgatgaaaaacacaccttgactttag

SEQ ID NO: 131495 - DNA, 73 bp, Homo sapiens
gtttttcagctcaaaaaccacagctgcacattctttaggtggagccgccaccaaaatgcagattttcgtgaaa

SEQ ID NO: 131496 - DNA, 100 bp, Homo sapiens
ccttcagaatggacatgattcagggagctagaagacactttaagttatactggaaaattcagtaagactttgaccccgacgcaggcttcagtgattgccg

SEQ ID NO: 131497 - DNA, 83 bp, Homo sapiens
tcgggagcgcaaggtcgccctcaaggccatgatcaaaacagtctgtagaagaggcgacaccagggcttccaaatgaacaaccg

SEQ ID NO: 131498 - DNA, 98 bp, Homo sapiens
gaggcggcgagagatggtcaggtctggagctcgaccgggccagtttggctgtagcagcaattcctgaaggtctccccattgtggtcacagtgacgcta

SEQ ID NO: 131499 - DNA, 102 bp, Homo sapiens
acgccatgtcgggttattcgagtgaccgagaccgcggccgggaccgagggattgtcagtggcttcgccccgaggagagctgactgccctgggctgctgcctc

SEQ ID NO: 131500 - DNA, 75 bp, Homo sapiens
tctcagagaaattggccatggaagctttggagcagtgtattttgtacaccaggggttggaaaaaccacactaggc

SEQ ID NO: 131501 - DNA, 98 bp, Homo sapiens
cggcaggagagtccggccgcgacaggacggttgattcttcaccacactgaaaccattaggaaaaatccttgtggttaacagcagaggcttcagagtgt

SEQ ID NO: 131502 - DNA, 98 bp, Homo sapiens
gccctcaagtccctgatggcctcagaggaggaggctggatccagacccctttgtgcggcacaccttctggaccttggccttcgggggtgtcttcatga

SEQ ID NO: 131503 - DNA, 50 bp, Homo sapiens
cctggggcgcaccgccaagagctgggctcctgcccctcctaaagctgaag

SEQ ID NO: 131504 - DNA, 108 bp, Homo sapiens
cagacccgaagcgcaccattgctcaggattatggggtcttaaaggctgatgaaggcatctcgttcaggtggatgggaagagagtcccaagggatgcagggcatcctct

SEQ ID NO: 131505 - DNA, 82 bp, Homo sapiens
gagagtaaaccaagaagaaatccacagatttagttctgtcagtcttcactgtttccaatggaagatggattcttggatgatg

SEQ ID NO: 131506 - DNA, 74 bp, Homo sapiens
tgcgctcgcgcccggatccctcaggttgggcccgaaggcatcctgcagaacggggctgtggacgacagtgtagc

SEQ ID NO: 131507 - DNA, 82 bp, Homo sapiens
agcgggagctggacggcgagcgcgagcggcgcgagaaattgattatggaagattcccacaagagtaccacgtcagagacagc

SEQ ID NO: 131508 - DNA, 51 bp, Homo sapiens
aataaatcttctcagttcctggctcccaagtgcacagccagagaacaacac

SEQ ID NO: 131509 - DNA, 75 bp, Homo sapiens
gtctctgcttcagaggatgctacaattaagacagatacattgataactccatttgtgggtttaatagaccacaac

SEQ ID NO: 131510 - DNA, 100 bp, Homo sapiens
tggaggccgcagcagtcagggacatttctgaagcgagcgtcttcgatggttagcactctacgtatatgaatatctgctccatgtaggagctcagaaatca

SEQ ID NO: 131511 - DNA, 100 bp, Homo sapiens
cttacagtaatctcatattaacaggttatccggtgttggctcctgctgcttactatgaccaaactggtgcccttgtagtgaatgcaggcgcgagaaatgg

SEQ ID NO: 131512 - DNA, 75 bp, Homo sapiens
taaaggatagccaattgcagtttgaggctcttcttaatgaagaggataactcagaatcatcggctatagagcagc

SEQ ID NO: 131513 - DNA, 51 bp, Homo sapiens
ccgggttgggccaggatcccggcagattgggggcaccaacttcgtggcacc

SEQ ID NO: 131514 - DNA, 75 bp, Homo sapiens
aggaagtggatgcctccatttttaagagcaatggtggaacaaagcggcaaaagatatcccatcaaaattatatag

SEQ ID NO: 131515 - DNA, 75 bp, Homo sapiens
tggttccacctaatgtcagggaccttctggatattttacgggaaagagcaatggctgccatccggaagaaactgg

SEQ ID NO: 131516 - DNA, 141 bp, Homo sapiens
tccgtcctcctccaggccgccgccccttctgaggacccaggcaccaaggtgctgctggtctcctggacctaccagggtggtgaaggaggagatctttgatgacaatgccaagcttccctgcttcaacggccgcgtggtctc

SEQ ID NO: 131517 - DNA, 50 bp, Homo sapiens
gagctggtgcacattaagccgtgcaggagaacccggggaggaggcccagg

SEQ ID NO: 131518 - DNA, 82 bp, Homo sapiens
gggcgccaggaccggccgaacgcagaggttgggcccgaaggcatcctgcagaacggggctgtggacgacagtgtagccaaga

SEQ ID NO: 131519 - DNA, 100 bp, Homo sapiens
gccatccagcttctagaagacccattacagagggataaagtagccaatatttggtgcagcttcaatgtctttctgaagattaaggatattttgccacgtc

SEQ ID NO: 131520 - DNA, 100 bp, Homo sapiens
tcgccccgattaaagactgtgttgcattatcagctgccttcctatttcaaggaaagacgccaaggtaattttgacccagaggagcaatgatgtagccacc

SEQ ID NO: 131521 - DNA, 82 bp, Homo sapiens
cggaggaaacgggagtgaacggagagcgtagtgaccatcatggacccagacatggagctgcgggaagaagcctggtctccgg

SEQ ID NO: 131522 - DNA, 100 bp, Homo sapiens
taggggtcggtcagtgctgggcggagactgtctcctcaagttctcgctgtttgagtacaagctcagcttcaaaggcccaaggctggcattgcctggggct

SEQ ID NO: 131523 - DNA, 82 bp, Homo sapiens
ggcgtgcagcgcaaccacgagacggccttccaaggaatgggtaccacagaccatgtcatcgtcctggcgtccacgaaccgag

SEQ ID NO: 131524 - DNA, 82 bp, Homo sapiens
gtcagaaggcaaagaacagaagatcctccttgggcgaagctgtgctcaggcccgggctggacgcagagccagagctgtcccc

SEQ ID NO: 131525 - DNA, 100 bp, Homo sapiens
tagaattggctagatcaggaagcctatgtcaactatggaacaacaacttgcagctcatctctattgatggaattgaatgatctggcacgggaccctccag

SEQ ID NO: 131526 - DNA, 100 bp, Homo sapiens
ggctgcgggccgccgtctggatgggaagttacggcgaagtccacccagcgtttctcagagcaatggtggaacaaagcggcaaaagatatcccatcaaaat

SEQ ID NO: 131527 - DNA, 82 bp, Homo sapiens
ggcaaaaatcccatctaccgcaactctcagttcgagagtaaagcagccattgtttgatgtcctgtgactgagaaaccaggct

SEQ ID NO: 131528 - DNA, 74 bp, Homo sapiens
tacgacttccactcatcctctgagtttgagattgtcaaggccataaaagaagttgaggaacaggttagcaccac

SEQ ID NO: 131529 - DNA, 75 bp, Homo sapiens
cgccgtgagccggctgagcaggaagcggccgccgtcagacatcccaggtgaagccatggtgaagctctactgccc

SEQ ID NO: 131530 - DNA, 83 bp, Homo sapiens
agcagttcagaagagccaaggaataaacatgcaatgaacccaaaaggacatatctgaagagatggattaagaatgctttggat

SEQ ID NO: 131531 - DNA, 82 bp, Homo sapiens
gccgatccagcctgcggagcctgtggggcaggtcgccttttgctcttggtgccaacaaggactcactctcggccttcgagta

SEQ ID NO: 131532 - DNA, 90 bp, Homo sapiens
gtggagatcaactcctctctgttaatggagtggtgggatgtgtgtgggctgaaattccgagctgcggttgtgcatgagaatacacccttc

SEQ ID NO: 131533 - DNA, 74 bp, Homo sapiens
cgcagtgccacttcgacatcgagatcaaccgggagccggcagagcatcctggccagaacaagccaaggagccaa

SEQ ID NO: 131534 - DNA, 74 bp, Homo sapiens
tgtggatttaccttatcccctcaacaacttttcagtggcaagtgtacgaagccatcgacagcagagatggagca

SEQ ID NO: 131535 - DNA, 78 bp, Homo sapiens
gcagatgcgggccctgctggaccagctcatgggcacggctcgggacgatgtaggtgcaaaaaactacagacatctctg

SEQ ID NO: 131536 - DNA, 82 bp, Homo sapiens
tagaaactcacatgagacaaatgcgctcagcttcaattgcatcaagatggtgctcatgtggaccagtggtgacgccttcaag

SEQ ID NO: 131537 - DNA, 100 bp, Homo sapiens
tgtcctgtcctggatcagtttctttgtcatgtagccaagactggagaaacaatgcaatccagcatccagcagatgagaagttgcaagagaaggcatgggg

SEQ ID NO: 131538 - DNA, 76 bp, Homo sapiens
ccaaaggtgtattggatttgcacgaagacgggttgggcgcggtggaaggtcctaaacatgcagctttcggatggag

SEQ ID NO: 131539 - DNA, 80 bp, Homo sapiens
ccgacttcgactcttggggccagctggtggaggcgatagacgagtatcagatggatgctgtgaagaagtgttttgccgtg

SEQ ID NO: 131540 - DNA, 75 bp, Homo sapiens
agagatgtgatgttggagaactacagaaacctggtctccctaggcctctactacgtggacagtgaagggaaccgg

SEQ ID NO: 131541 - DNA, 98 bp, Homo sapiens
gtctacacacgttgcaggggcatactaatagagtctattcattacagaaagtcaaaaatgtgttgacagtgggaagtgtttcaagtgaagaactggat

SEQ ID NO: 131542 - DNA, 82 bp, Homo sapiens
attgcgctggaccgtcgccttgctcctcgccgcggcggggactgcaggaaccctaaggactctgcaatatgaataattccct

SEQ ID NO: 131543 - DNA, 80 bp, Homo sapiens
gtgactcgccgataatcgaggacctgccaataacgcgatgaggtgctggatagtttactagtccagtatggagtggtgga

SEQ ID NO: 131544 - DNA, 51 bp, Homo sapiens
tagccatcgacttcggggagcagggtggacaagcttcatttacacgatatc

SEQ ID NO: 131545 - DNA, 80 bp, Homo sapiens
ccctgttccaaagcctcctggaccgtccaagaagtgggtcatgataactgggtacgtggagttctgttccattctggggg

SEQ ID NO: 131546 - DNA, 96 bp, Homo sapiens
ggttgggccgggccggttgctaagacttggcgaagcgctgcgctcgcgcccggatccctcagattccaaatcctttatttgatctggctggaataa

SEQ ID NO: 131547 - DNA, 100 bp, Homo sapiens
tccgagaggcaaacttttaagattccaggacctctgatggctgatttcatcttcaaggtagaacaagtcagccagttggctgtgttcatagaggcagcat

SEQ ID NO: 131548 - DNA, 100 bp, Homo sapiens
ggggacgctgggaacactgaatcaacatgggcaatgagaacagcacctcggacaaccaggcaggatgacgcaaaacacggtgattgtgaatggagttgct

SEQ ID NO: 131549 - DNA, 100 bp, Homo sapiens
taggaatctatgatgctgatggtgatggagattttgatgtggatgatgccaaagttttattagctccagggcccacaacggcagtgtcctacatgtcggt

SEQ ID NO: 131550 - DNA, 87 bp, Homo sapiens
gtgccctgccactctcctccagcccaggggggaccagcccctcaccgcctcccaggtgatgatgaacagtctacacagatggctgca

SEQ ID NO: 131551 - DNA, 75 bp, Homo sapiens
tctcactctgttaaagctggtctgttctaactgagacctgcctagagctggaacgttacctccagagcgagccct

SEQ ID NO: 131552 - DNA, 90 bp, Homo sapiens
cttcacggcgccgagccgcggtccgaaaatggtggagtcaatgaagaaagtagcagggatggatgtggagctgacagttgaagaaagaaa

SEQ ID NO: 131553 - DNA, 106 bp, Homo sapiens
ttcggcggcgcccgggacggcggcggacctgtcgcgatgtcagggctgcgcctctctgcagcagaaatttaaaagcctgttgattcaagaactttctaaagtattt

SEQ ID NO: 131554 - DNA, 91 bp, Homo sapiens
ccaggcgcagatgcgggccctgctggaccagctcatgggcacggctcgggacgccgcttacaaacacgcagatggcaagaagattgatggc

SEQ ID NO: 131555 - DNA, 100 bp, Homo sapiens
aaggatttggttcacagagaagcagacgagttcactagacaagtgtgccatgcggagctgaatgccatcatgaacaaaaattcgaccgatgtgaaaggct

SEQ ID NO: 131556 - DNA, 132 bp, Homo sapiens
tttcagcatgtccttctctgaatgatgaatacttttactactgtgacaacattaacggactccctggaggaaaagcggaagcggcagcggtctgaacgcctggaacggattttccaacttagtgaggctcat

SEQ ID NO: 131557 - DNA, 100 bp, Homo sapiens
tgcctgctgtgccgcttcaccgacaacgagttccactcctcgcacatctccaccatcgctaaagatcatcaccctggtaaaactttgccagagaacccag

SEQ ID NO: 131558 - DNA, 98 bp, Homo sapiens
cgctgcccgcgggcccggccacggcggagccaagggtgaggtggctttgaccccgggttgcccggccagcacgaccgaggaggtggctggacagctgg

SEQ ID NO: 131559 - DNA, 99 bp, Homo sapiens
ggctgcagctcgtgtgcaacgcgctactggcccaggtgtgatccctcacatccacaaatctctgattggaaagaagggacagcagaaaactgcttagag

SEQ ID NO: 131560 - DNA, 73 bp, Homo sapiens
cggcccacagtgggggtgtgcaaacccgagagaactgggggtctatgcctttggtttcctcttcatgctgccc

SEQ ID NO: 131561 - DNA, 75 bp, Homo sapiens
gcctatcagctggggctggatgagtctcaaagcttggattctgccgtgccactcacgaatggcgacacagaagac

SEQ ID NO: 131562 - DNA, 82 bp, Homo sapiens
gtgggaggattgcattcagtctagttcctggttgccggctgaaataacctggcttcagggatgacttcttagggggcagggg

SEQ ID NO: 131563 - DNA, 95 bp, Homo sapiens
ccccaatgctgaccaaggaggagcctgttccagaactgctggaagctgagctccccgtaggcccagtcgtaagggcctgcggaatgataaagata

SEQ ID NO: 131564 - DNA, 75 bp, Homo sapiens
gtatcagaagacaatatcatgcaagtgtggcaaatggttatcaatactctggctgaccatcatcatcgtgggact

SEQ ID NO: 131565 - DNA, 101 bp, Homo sapiens
ttcaaattggagcaaggagaagagccatggatatcagagggagaaatccaacgacctttctatccagagtttatgtggccgaggcagacaagtggaattag

SEQ ID NO: 131566 - DNA, 100 bp, Homo sapiens
tcaggtcctcgggggcggcggccacgccaaggacggagctctgtgacgatgacccgccagagatcccacacgccacattcaaagccatggcctacaagga

SEQ ID NO: 131567 - DNA, 100 bp, Homo sapiens
gtgtttgacggcatcccaccgccctacgacaagaaatctgacccggtcgtctcgtaccgcgagacggtcagtgaagagtcgaacgtgctctgcctctcca

SEQ ID NO: 131568 - DNA, 100 bp, Homo sapiens
tgggctcctctgtcaatgacgctttaaagagagataaagatgccatttatgggttgctccttgagggcaggacagttcttatggctttatccgttgcgta

SEQ ID NO: 131569 - DNA, 96 bp, Homo sapiens
ctggcgcagtatatctacaagagcgcacctgcccgttcctatgtcctgcggtcttagtggtgcaatggctagtataagcgtgcgttcgagtacccc

SEQ ID NO: 131570 - DNA, 51 bp, Homo sapiens
cttgtgctcagtgacatcattcaggtcccccccaaagacccaaactgaatc

SEQ ID NO: 131571 - DNA, 103 bp, Homo sapiens
cagatagaaaacggcgagagtgggcgagaacgtccactgcgggccggcgaaagctgatttaagtaagtcttccccaacaccgaatgggattccatcttcagac

SEQ ID NO: 131572 - DNA, 105 bp, Homo sapiens
cttacccagccgaccaagatattcctgggaatggcacagttgtcatcaattgtgactgctttaggtaaacaagaagcagaaaggaagtttgaaactttgttaaag

SEQ ID NO: 131573 - DNA, 130 bp, Homo sapiens
ctggtcctgtgtccggagtgtgaggagcctgtccccaaggaaaccatggaggagcactgcaagcttgagcaccagcagaaagcaagtgattgctttcctttcctcatttttggaagccctgcctaacaca

SEQ ID NO: 131574 - DNA, 101 bp, Homo sapiens
ccagtacacggcccacgttgccaggacacattcagctaacgtattttagcaggtggagtgaggttgaagattcctgtgacagcgatgccatagagagaatg

SEQ ID NO: 131575 - DNA, 51 bp, Homo sapiens
acatttcaaatattccatggacacctatgatggagtctcgctctgtcgccc

SEQ ID NO: 131576 - DNA, 76 bp, Homo sapiens
ctcagatgctgccagggtccctgaagagggaagacacgcggaaacagattatatcttggccaagcacagagattcc

SEQ ID NO: 131577 - DNA, 82 bp, Homo sapiens
ctctctttctggcctggaggctatccagctggacatcctcatcatggatgatgacgacgtccccagctggcctcccaccaag

SEQ ID NO: 131578 - DNA, 100 bp, Homo sapiens
aaggcagactttttgatattcagagccttggaagtcaacactgtcagattggcctaatgaagaagttcaacctggagagatggaaaatcagctctcataa

SEQ ID NO: 131579 - DNA, 75 bp, Homo sapiens
ccagacctgcgtggtgcactacaccggtgaatgaaaactttgccattgatttgatagcagagcagcccgtgagcg

SEQ ID NO: 131580 - DNA, 100 bp, Homo sapiens
tgatatacctaatccaccaaggatagccaatcggaccaaaaattcactcactttgcaatggaaggagttcatcctttgctgcctggcccgggaccctgcc

SEQ ID NO: 131581 - DNA, 100 bp, Homo sapiens
ggtggggttcggggggccaccgaatcgctgtcacgccggcaggagccaaaaacctgtatatcatctccgtgaaggggatcaagggacggctgaacagact

SEQ ID NO: 131582 - DNA, 97 bp, Homo sapiens
ggagccgacgggcggtggccgcactgggaccccggaatcccgcgcgctgcccacgattcgcttctgagcatctggaatcaagagacccatggcatct

SEQ ID NO: 131583 - DNA, 75 bp, Homo sapiens
ccgaccagagcttggacgaggcgcaagcaaagcgggcgctaatattgacacctgctcagaagaccagaggacccc

SEQ ID NO: 131584 - DNA, 97 bp, Homo sapiens
cgtccggcttcggagcgggagtgttcgttgtgccagcgactaaaaagagggcgatgccagtccctccactccagaggagaacgaaaccacgacaacc

SEQ ID NO: 131585 - DNA, 98 bp, Homo sapiens
agacacgacaccatgcatctcctcggcccctggctcctgctcctggtcaagaggtgttgccaaagattcacgaagataaacactacccttgtactttg

SEQ ID NO: 131586 - DNA, 83 bp, Homo sapiens
ttctgcccgtgcctggagtctggaattcagaacgtcagcacctgcaggttcagtcagcccaaggccaaccccactgtcactct

SEQ ID NO: 131587 - DNA, 82 bp, Homo sapiens
ccgctgccctcagctccgagtccagggcgagcggaaggagagttttacatggaagtggcttacagaaacttggcgctgaggt

SEQ ID NO: 131588 - DNA, 75 bp, Homo sapiens
acgcacgcggtgcagggtaacatggcggatgcggaaggtgggtgatggcaccacctcagtgaccttgctggctgc

SEQ ID NO: 131589 - DNA, 75 bp, Homo sapiens
gaggagtgcaggcgcttcaccacagacggaagcgtcctgatcagacatgggttcagtgtgatgcctgtctaaagt

SEQ ID NO: 131590 - DNA, 90 bp, Homo sapiens
gaccccataacgtttgcaccatttaaaatttcttgtgctaccacatactgttgattgtgatgaaatgccagttgaagcacctgtcctgcg

SEQ ID NO: 131591 - DNA, 87 bp, Homo sapiens
ctacgagctgggcgggcccatgaccctgcagcgccgaggtctcggcgcggaagatggccggcggcgtggacggccccatcgggatcc

SEQ ID NO: 131592 - DNA, 109 bp, Homo sapiens
ctgcaaggaacaaaatgtttgtaaattctccttttaccaagacaggggcaagtgtccgagtggtgaatcagctacttacagagatggatggtctggaagcacgccagca

SEQ ID NO: 131593 - DNA, 51 bp, Homo sapiens
caacgaatttcagtggttcacaacagatcccggagatcgcccgccatggct

SEQ ID NO: 131594 - DNA, 90 bp, Homo sapiens
ggcgccatcaccgagcgcttgatgtgcgcggagagcaatcgccgggacagctgcaaggtggtctttgggaagaagcttcctgcctttgcc

SEQ ID NO: 131595 - DNA, 50 bp, Homo sapiens
caacgaatcttcatcctgtcaaggaatactctgaagatagtaactccgag

SEQ ID NO: 131596 - DNA, 75 bp, Homo sapiens
acctggaacttcatcatcatctacttcacaggaattgccattttgttccattggcaagctacaataatggggcca

SEQ ID NO: 131597 - DNA, 98 bp, Homo sapiens
tggacggggccggggccgaggccgcggagctcgcggaggcaaggccgaggataaggaggacaaggtgctgcggatgctgtacgtgtgggcgctctgcc

SEQ ID NO: 131598 - DNA, 82 bp, Homo sapiens
ggaggagaagtcagtagcaagcagctaagacaacatggtacatgtggatcccctaacaacagtgagagagcaatgcgagcag

SEQ ID NO: 131599 - DNA, 101 bp, Homo sapiens
gccatacacagagcccgaggaggacttcggggacaccaagagaattggtcatactccctgtcacaaactccagctgaactaacttggaggaggatcttccc

SEQ ID NO: 131600 - DNA, 90 bp, Homo sapiens
aatatgtgccgccagtgtttccgtcagtacgcgaaggatatcggtttcattaaggctgggcggggagcgtcggaccagaagagaatcacg

SEQ ID NO: 131601 - DNA, 74 bp, Homo sapiens
gttatgccaaaagatgaagacattctccaagtgattgctcgctgtaagcagctcatctgtgaccccagctacgt

SEQ ID NO: 131602 - DNA, 101 bp, Homo sapiens
gtgcatctgtttcttctgtagcagtggctgtatcttcttggggtctccaccgcaggtctcctctgagcctccggcctccataagacccaaaacagatgaca

SEQ ID NO: 131603 - DNA, 75 bp, Homo sapiens
gtggaacctttgaaagacataggttatggtggcatatccttggcggtggaaggccccagcaaagtggacatccag

SEQ ID NO: 131604 - DNA, 75 bp, Homo sapiens
agcaatgcttgaggctccttacaagaaggtgcacctctctgagaaacataagagacaatgaggaaaaggattcag

SEQ ID NO: 131605 - DNA, 100 bp, Homo sapiens
atggaacaaaaggactcagcagatgcttcatggtcttcagaatcaagcactcttttggaagagggtaatctctctccaaaaactgaggacacttaccttc

SEQ ID NO: 131606 - DNA, 100 bp, Homo sapiens
atgggaatcacattgctctctgtccctgagatcttgctggagacagggctactcagtccctctttgccagtggaaggagaacatgaatctctcagaggcc

SEQ ID NO: 131607 - DNA, 100 bp, Homo sapiens
taggccagccccggtcacagagtgcaccgtatcctgtcacttctggatgtgaggttgagcaatgtttaaagcgtttgaaaaacatgaatttggagggctc

SEQ ID NO: 131608 - DNA, 100 bp, Homo sapiens
cgccaagtccctatgacactgactccctcaaaatcaagcaccagcagacgtttttgaatcaactgagagaaattacggggattaatgacacccagatact

SEQ ID NO: 131609 - DNA, 101 bp, Homo sapiens
tgacgaagcttggaagttgcagaagactacagtggtagtggaggccgaagcggcgggaacagctacggctcaggcggggcatcctacaacccagggtcaca

SEQ ID NO: 131610 - DNA, 74 bp, Homo sapiens
ggtcggggctgtcggccggccacagggatgtcttttactataggtccgcgggagagctgtggggcttggtgagt

SEQ ID NO: 131611 - DNA, 99 bp, Homo sapiens
ctatgtccgatctcaaagactttctggagagcatccgcaaacattcagacaaaattggagagactgccatgaagcaaggtgctggagatctagaagacc

SEQ ID NO: 131612 - DNA, 100 bp, Homo sapiens
ctaaggaaagaactccagaaagtgaagaagaaaatgtagaatgggaaactaatagagatggtggagccgccaccaaaatgcagattttcgtgaaaaccct

SEQ ID NO: 131613 - DNA, 100 bp, Homo sapiens
cagagaaggaaggatggcctctggacatccgagtggaaaaactgattgcttatcaacgagaattccttgctttgaaagaacgtcttcgaatagctgaaca

SEQ ID NO: 131614 - DNA, 75 bp, Homo sapiens
aagaagctgcagccgcacctggccaaggctcctactccaatgtggccagatgacctgcaaaaccacacattcctg

SEQ ID NO: 131615 - DNA, 75 bp, Homo sapiens
aagaatttcctctgaagcaccggaaatctggcattttttaaagtttgcgccccacaaagaggaaatattccaaag

SEQ ID NO: 131616 - DNA, 100 bp, Homo sapiens
agacatttatgaaagcccaaatcacctgtacttggtcatgcagctgtgtcagttgtacccgaggcgttctcagcagcagcaagtacctgtggtggatttc

SEQ ID NO: 131617 - DNA, 90 bp, Homo sapiens
atggaaacttatttaaggatggctgacttaccgtatcagtcccgggctgcacgccagctgatggagaggacccagtcatccaacatggag

SEQ ID NO: 131618 - DNA, 83 bp, Homo sapiens
cttgtggcgctgaaaacgaacgagcttcttcgagacaccttcacttccctgggctatgaagtccagaaattcttgcatctcag

SEQ ID NO: 131619 - DNA, 98 bp, Homo sapiens
cggcggcggctgcggaggcgcaggcagcaactgaggcagcggcaggctcaggtgcagccgctgaaagaatcttcaagagggagacatagggaaaagga

SEQ ID NO: 131620 - DNA, 100 bp, Homo sapiens
agaaggtgttcactttttacacactcgtgatgtagttcatcttgatttgaagatcacccggaagttcaggctgaattctgaaggcaaacttgagcagacg

SEQ ID NO: 131621 - DNA, 90 bp, Homo sapiens
ctgtggaataatatggaagaagatggaaaaaacttgtttaatgggtttggttgggatgttccagtaattctgagaaattcagaagagacc

SEQ ID NO: 131622 - DNA, 83 bp, Homo sapiens
ctggcccaacgatggcgagggcgccttccatggagacgcagattctgaaagtcaagaagacatcatccggaatattgccaggc

SEQ ID NO: 131623 - DNA, 100 bp, Homo sapiens
ctcaatgtctgcagcagcgaagaggtggagaaagtggtggagattgtccgctcgagcctgaaggaccctgagaaaggaacatgagaacatcaatggtgta

SEQ ID NO: 131624 - DNA, 83 bp, Homo sapiens
gcagccctgcaggccaagcgcagcctccaccaggtgagcacctgcggatctgtccccagggctacacctgctgcaccagcgag

SEQ ID NO: 131625 - DNA, 100 bp, Homo sapiens
gaacagcagcagcagcagtgatggtggcagcaacaaggagggaaaaaagagcaggtggaaaaggaaaggttactcactataaacaatatccacccaacac

SEQ ID NO: 131626 - DNA, 90 bp, Homo sapiens
gttgtttcccattgcagcccaggtggataaggaacatctcttcccagcggctcagataatcagggaggctatggatcagttggaagaatg

SEQ ID NO: 131627 - DNA, 100 bp, Homo sapiens
tccaaaaggcccttttcagggcccccaaactgtcacagaaagagctgttaacacttcctagataacggcacaacctccaagagggaaaacatttctccag

SEQ ID NO: 131628 - DNA, 78 bp, Homo sapiens
tctggactgcaggctggctgctgctgctgctgcttcgcggaggtgtgctgatgtatcgggactaccccctggaactat

SEQ ID NO: 131629 - DNA, 155 bp, Homo sapiens
ccaagtttcacatccttgtctgtgaagctaaactcaatgctgctgtgtgggaagaagatttgtaaagaaaactcttagagcctggcccaactagagaatctgtgcaaacagctgtatgaaaccacagacacaaccactcgactccaggcagagaa

SEQ ID NO: 131630 - DNA, 96 bp, Homo sapiens
gcggcgcgatggagcagcgaaaacgtggttgtagagttccgtgactcccagacaaatttacatgtattggagaccagaccagaagcccttctgaat

SEQ ID NO: 131631 - DNA, 75 bp, Homo sapiens
aggaaaaggagcttagctgctggcaagaaactatattcagtctttgactcagatgccgaagatgaactttgcgaa

SEQ ID NO: 131632 - DNA, 51 bp, Homo sapiens
tgatgatgaaggggaggaaggagagactccatcagcagctatgaagcccag

SEQ ID NO: 131633 - DNA, 100 bp, Homo sapiens
tccctgtgccttgcttggagctgacgccgacgggtacaccaggggttggaaaaaccacactaggcaaagaacttgcgtcaaaatcaggactgaaatacat

SEQ ID NO: 131634 - DNA, 82 bp, Homo sapiens
gaggaggaggtgaacaaggaggaggcagccgaggccggggccggggctacaggggccgaggaagccgtggaggatcgcgagg

SEQ ID NO: 131635 - DNA, 100 bp, Homo sapiens
cgtctccttaacaccgaacaccatatggctcgtggacagcagaaaattcagtctcagcagaaaaatgccaaaaagcaagctggacaaaagaagaaacaag

SEQ ID NO: 131636 - DNA, 75 bp, Homo sapiens
cggcttttcagattgctgcagaaaacttctttcttcaggtacaggtttgcagattccgccagcagcacagcaagc

SEQ ID NO: 131637 - DNA, 74 bp, Homo sapiens
cgccgcgacctccggatgacccgggcttcggcccccaccagagactcgtactatactggcaattgctggagaag

SEQ ID NO: 131638 - DNA, 75 bp, Homo sapiens
ctgtctgtgaggttgtgaatttaacaaatttacattgtatcctgtgtctgtatgaaagcatgtggtcaatttctg

SEQ ID NO: 131639 - DNA, 100 bp, Homo sapiens
tgcaggctgaggatgggcactggacgggtgattatggtggcccacttttcctcctgccaggtaaactttggagtcggagtttaaaactagcttatactct

SEQ ID NO: 131640 - DNA, 83 bp, Homo sapiens
ggacaaacccaccttcatcaaaggggtagggttctttcacagtctactcccggaactccatcaaagaccataacaatatctga

SEQ ID NO: 131641 - DNA, 100 bp, Homo sapiens
ggatgctgatctaaacgtggaaaaaatgtggatgttgttgatcctgatgaaaagtccatcatgacctatgtggcacagtttctgcagtattccaaagatg

SEQ ID NO: 131642 - DNA, 88 bp, Homo sapiens
cgcttgaaaagactgggcttgtccttgctggtgcatgcgtcgtcggcctctgggcagcagttcccagtgacctgacagcagaggagcg

SEQ ID NO: 131643 - DNA, 75 bp, Homo sapiens
gggagacgacgctgctgggtccgctgagcggggcgacccgagaaactatccaactctggccaatattgaaaggaa

SEQ ID NO: 131644 - DNA, 125 bp, Homo sapiens
cccaccaccatcgagcgggagttcgaagagttggatactcagcgtcgctggcagccgctgtacttggtactccaaagattcaggtttactcacgtcatccagcagagaatggaaagtcaaatttc

SEQ ID NO: 131645 - DNA, 83 bp, Homo sapiens
atcgtgcgcggctacaagtgggctgagtaccatggtgcctgtggacatacgagatccagttctctcaggacggtaaggcgtac

SEQ ID NO: 131646 - DNA, 101 bp, Homo sapiens
atatttgatcttctcagtgttggaaaatctactaaaactttcaccattaatccagaggacagagcgggatgccaccagcttgtccaaagggaagttccagg

SEQ ID NO: 131647 - DNA, 95 bp, Homo sapiens
gtctggcaaagagaatctgcaaagacctcggtctgcggatcaatggagagctaatcactgcctacccacaagtggtggtagtcagagtaccaacc

SEQ ID NO: 131648 - DNA, 109 bp, Homo sapiens
ctcgctccgtggccttagctgtgctcgcgctactctctctttctggcctggaggctatccagcgtgcccgtggttgacacgagctgtgtccccagctgttcccgtctac

SEQ ID NO: 131649 - DNA, 101 bp, Homo sapiens
ctttcaaagataattcgcagtgatgtgaaactggcctcccaagccctgataaggaggttcccctgaaggatgctaaggaatacgctgaatccataggtgcc

SEQ ID NO: 131650 - DNA, 97 bp, Homo sapiens
agatctcttagcggcagatttctcagccgtcatttcaccaagctgataatgttcggggaacccgccatcacgggctggtggagaggccatccaggaa

SEQ ID NO: 131651 - DNA, 100 bp, Homo sapiens
aaggattccgccttgttggtctgaaattcatgcaatcccaggacatcaaagctctgcagaaagaactcgagcaatttgccaagctcctgaagcagaagag

SEQ ID NO: 131652 - DNA, 100 bp, Homo sapiens
gctcttagtaaagaaaaggcttggcagacattcatcattgacttactattgcactgtcacagcaaacccaacatgagtgaagtttcctgcaagaaacggg

SEQ ID NO: 131653 - DNA, 96 bp, Homo sapiens
aaattcccttatcgatattatgagagcagagcatgatcctcttaaggatgaatcagcagatggctggcatgagtatcagtagtgcaacccctactg

SEQ ID NO: 131654 - DNA, 96 bp, Homo sapiens
atgcccccagtaaggatatctttgttaaattgacaacaatggccatgtatccattcttcccctggaggctggagtttccaggatgtcaaaattacc

SEQ ID NO: 131655 - DNA, 100 bp, Homo sapiens
ccaaatcgcagagggaagcttcaaatacacttctaatcatcctcagtacccagcagtatatgtatcctccatgaaatgtgggatccttccaatttctcaa

SEQ ID NO: 131656 - DNA, 100 bp, Homo sapiens
gctggaagaggagtctgcctccaaggagaagggcgagggagtaaagccacggcaggaggagggtgtacaactatgagcctttgacacagctcaagaatgt

SEQ ID NO: 131657 - DNA, 100 bp, Homo sapiens
ttcagccaaagaaacaagccgtggaataggtgtatcaagtaatggtgcaaagcctgaaaattatatccagatcgagagacagaagattctgaaagggttc

SEQ ID NO: 131658 - DNA, 98 bp, Homo sapiens
caacctaagttttaaacagaaggtgaacctctgaggttcaattcccatgaaagtgcagcacatgcaattgtttctgttaatggtactaccattgaagg

SEQ ID NO: 131659 - DNA, 100 bp, Homo sapiens
ggcgcggacagcgttcggtgctgtgtgccggcgcctctggcaggattatctactatctagatccatctgttctgtccggcgtttcctgttttgttatgtt

SEQ ID NO: 131660 - DNA, 95 bp, Homo sapiens
ctgggcaccacggggactcggagacaggtgctggagaatctggtaaaagcaccattgtgaagcagatgaggatcctgcatgttaatgggtttaat

SEQ ID NO: 131661 - DNA, 75 bp, Homo sapiens
atcagaaccggtacctggatggcatggtactccaaagattcaggtttactcacgtcatccagcagagaatggaaa

SEQ ID NO: 131662 - DNA, 100 bp, Homo sapiens
ctgtgccaggtggcctccttggtatgccagatccaggtccagagagcatcgcagacatcgatctcgctccatgtcacgtgaacgcaagaggagaactcga

SEQ ID NO: 131663 - DNA, 51 bp, Homo sapiens
ctcccgagcagctgggactacagattgactatccaccatttgaaaaaaact

SEQ ID NO: 131664 - DNA, 100 bp, Homo sapiens
atggggtggctcccactcctgctgcttctgactcaatgcttaggggtccctgggcagtagctcgcctgagccagagatttcccaaagctgagtttgcaga

SEQ ID NO: 131665 - DNA, 89 bp, Homo sapiens
aaacggcaagatgtccagtaatgtcccggcggatatgtggccaagttctagctgctcttcctagaacctctaggcaagttcaagttcta

SEQ ID NO: 131666 - DNA, 98 bp, Homo sapiens
tgcagaaataccagtccccagtgagggtgtacaaatacccctttgaattaattatggctatgatgtctttctacctaaagatattgacctagacagtg

SEQ ID NO: 131667 - DNA, 75 bp, Homo sapiens
gctgaaaggaattcctagatctaaacaccaggtaaaaatgcatttgcaaagggagaaaatgaaggccaaacagaa

SEQ ID NO: 131668 - DNA, 97 bp, Homo sapiens
cccgacctcagatgctcccttctgctcctggagaagtttcggtgtccgacatccctgtctgttgttaaagacagaaacctaactgagaaccaagaag

SEQ ID NO: 131669 - DNA, 100 bp, Homo sapiens
gagagagagtgttagtggtaggacagagactgggcaccattaggttctttgggacaacaaacttcgctccagaatccaagcaaaaatccctggattgaag

SEQ ID NO: 131670 - DNA, 82 bp, Homo sapiens
cccccctcctcccaacatgaccaccaacgagaggagagtcatcgtccccgcaggtgtcacgtcttgaaattttaaatgtcct

SEQ ID NO: 131671 - DNA, 74 bp, Homo sapiens
ttgaactcagctatgcaaagcaactcagcctctggtgcacatggcttcctccccggcggtggacgtgtcctgca

SEQ ID NO: 131672 - DNA, 74 bp, Homo sapiens
ccttgtagagtcattcctgcctttgagcggactcccttttaagtttgaaaatctgaacacagttgctgagtgtc

SEQ ID NO: 131673 - DNA, 83 bp, Homo sapiens
tcataaggataaaggatttggctttatccgcttgctcattcttggaatcccagaacaggccttaagtcttctccacatggcca

SEQ ID NO: 131674 - DNA, 73 bp, Homo sapiens
gcgaatactggaagagaataaccgaaaaattgcagaagcacaagccaaactgatcagatccagactgtgaaga

SEQ ID NO: 131675 - DNA, 83 bp, Homo sapiens
ccgcgcgcagggcctgcagcgggagctggacggcgagcgcgagcggcgcgagaaagactgatcctttgaaatactccagccat

SEQ ID NO: 131676 - DNA, 83 bp, Homo sapiens
cttggccatcctgctctttgtatatgaacagaagcgcatgattgcaaatacggccagaacagtgagatactacaggagccaac

SEQ ID NO: 131677 - DNA, 83 bp, Homo sapiens
gtggacgtcactggccctggtggggattgacagccacgggaagtgcagagcagagcgggcggaggaccccgggcgcgggcgcg

SEQ ID NO: 131678 - DNA, 82 bp, Homo sapiens
ctgccctcagctccgagtccagggcgagcaaattgtggctactaatttgccccctgaagatcaagatggctctggggatgac

SEQ ID NO: 131679 - DNA, 83 bp, Homo sapiens
aaactggtggatgcagcagatgtaagcgctaataaagttacctcaatgaccttcttaactggcaaagcagtagaagatttgtg

SEQ ID NO: 131680 - DNA, 83 bp, Homo sapiens
ccatgaactaccacctgatgcccttcaggcagcactgcaggcagagcctggccagcaggagtacaagcgcaagctagccagag

SEQ ID NO: 131681 - DNA, 128 bp, Homo sapiens
tggcaaatacattgtctgtagttcagcacttggtctctaccagtgggactttgccagttatgatattctcagagtatgtatgtaactgctctgtggttggaagcctgaatgtgaatcgctgcaaccag

SEQ ID NO: 131682 - DNA, 100 bp, Homo sapiens
cccgaactcgcccggccgggagccgccgcgggcaggacgcgcgctgcaggtcaaaatgcagatcttcgtgaaaacccttaccggcaagaccatcaccctt

SEQ ID NO: 131683 - DNA, 75 bp, Homo sapiens
aatttgaaccatgtttggattgaagccgcctctgtattacttaccaggaggccgccgagcggctgaattccgtgg

SEQ ID NO: 131684 - DNA, 80 bp, Homo sapiens
cagtctccaagggcgagaatggaccctgatggacttggacatggagctgtccttggtgtggtgctggaggctgtggcatg

SEQ ID NO: 131685 - DNA, 100 bp, Homo sapiens
ctctgtgattgaagaagtcggctctgggctccagtgcgggaatcacacacatacctcagggccaattcctgtccccccagcagcatggcatcgtgtgctg

SEQ ID NO: 131686 - DNA, 74 bp, Homo sapiens
aatacagctatcaaaatgatcccaggtgttcattgaggatgtcagcagggagtttgtggaggagttcatctggc

SEQ ID NO: 131687 - DNA, 75 bp, Homo sapiens
gacgcgtcatcgagtgtgacgtggtgaaagatatggctcgtggacagcagaaaattcagtctcagcagaaaaatg

SEQ ID NO: 131688 - DNA, 75 bp, Homo sapiens
cccgagtcactgcagccaacccttcagcaagagtctcactgtcgcccaggctgcagtgcagtggtgccatcacgc

SEQ ID NO: 131689 - DNA, 87 bp, Homo sapiens
tagtcgggaggaggagagcttcacctgtcggcttggagagatccaggtgagaagccctaccactgcaactgggacggctgcggctgg

SEQ ID NO: 131690 - DNA, 85 bp, Homo sapiens
tggactttgggcgtcccattgccatgttgttccaatcagaaaaattcatgctctgaccatcacatgggcacttcctcctcaacag

SEQ ID NO: 131691 - DNA, 82 bp, Homo sapiens
ctcatcgtgatcccggcgacatactacctctggccccgagatcagaatgccgggatccaggtccggcacgatcaagacccag

SEQ ID NO: 131692 - DNA, 73 bp, Homo sapiens
atgtctggtggctccgcggattataacagagaagatggcgaattagaagatggtgaaatagacgatgcaggat

SEQ ID NO: 131693 - DNA, 82 bp, Homo sapiens
aatggccgtcctgaacctgttatcacctggagacaccttacaccaactgatcttaaaccttactcaggcattgagagacggg

SEQ ID NO: 131694 - DNA, 122 bp, Homo sapiens
tatctggttttgtctctgctgggcctgtgtgcctggaaaggaattgttttggcctaggatcatccaggagccagatgaccaagatgctccagatgaacatgagtcgcctccacctgaagatg

SEQ ID NO: 131695 - DNA, 80 bp, Homo sapiens
cttcgccgccgcctctgcagtcctcagcgcagacctcctgccccccgaggtctgcagtctcctgaacccagcagccatct

SEQ ID NO: 131696 - DNA, 134 bp, Homo sapiens
tctgtgttctcagaagacgttctgtatttcagcttcctgctatgtgccctctttgttcctaaagaaaaccatgagctgttttccaagagcttcatctccatggaagtgcctgtcatggtagtaaatggcaagga

SEQ ID NO: 131697 - DNA, 100 bp, Homo sapiens
cggaagtgtttcctgggtgagcgcggcagcgggacccgtttccggaaggctgattgcatcagacacgatgaggcgagtggtacgacagagcaagtttcgg

SEQ ID NO: 131698 - DNA, 51 bp, Homo sapiens
tgtggatgatgccaaagttttattaggtgaatctggattgggaaagtcgac

SEQ ID NO: 131699 - DNA, 75 bp, Homo sapiens
tggaggaccagtatttcccatggagggtgacaaaatatctgaacagaagaggacttaggagagatctgaactcca

SEQ ID NO: 131700 - DNA, 100 bp, Homo sapiens
catctttcagcagttggcacacatggttaaggaacaggaggaaaccattcagaggtgatgtagtcaaggtgatcgtctccgtccaggtattgatcctcct

SEQ ID NO: 131701 - DNA, 100 bp, Homo sapiens
gccttgcatcgttccgagtcctgtactggactgcatcaggccgcgtctcctcaggacccagaacgctggacaaacattcctttgctggtcaagatcctaa

SEQ ID NO: 131702 - DNA, 100 bp, Homo sapiens
taatagatgacaatgatctctaccgatgggaagtccttattattggccctccagatacactttaccacaatggtgcgcatgaatgtcctggcagatgctc

SEQ ID NO: 131703 - DNA, 75 bp, Homo sapiens
caaacttctgcttgatgctatgaaacactcaggttggtgtgatccctcacatccacaaatctctgattggaaaga

SEQ ID NO: 131704 - DNA, 90 bp, Homo sapiens
gcaagatggccgagcagtacaaggagcagagagcagaaattatccatcatctggctgatctgttgacggaccagcgtgatgagatcctgt

SEQ ID NO: 131705 - DNA, 100 bp, Homo sapiens
ggagaggagctgtggataacgggaggtgaatttccatgtcaacatagtcctggagactataaatattcaggaagagatagtttgatttttttggttgatg

SEQ ID NO: 131706 - DNA, 100 bp, Homo sapiens
aatggaacagaaacatagagaggaactggagcaattgaagctgactactaaggagaataagtagacggataattaaccttggcccagtaatgcttatttc

SEQ ID NO: 131707 - DNA, 100 bp, Homo sapiens
aggatggaccgcatcgagaaggagcgcaagcaccagaagctcaaccagaacgtaagttctttccaaagaaaatttgttggtgaggtgaagaggtgtgaag

SEQ ID NO: 131708 - DNA, 82 bp, Homo sapiens
gttaaggaactcgtcctacgtaacacagccagttaggtggatctaggatccggcttccaacatgtggcagctctgggcctcc

SEQ ID NO: 131709 - DNA, 78 bp, Homo sapiens
cgctgcagtgaattttccccccaaactgcaataagccgccttccaagtcgtgagatggagaataaagaaactctcaaa

SEQ ID NO: 131710 - DNA, 75 bp, Homo sapiens
cgcacacgagaacgacatcacccacttctacatgctcactatagacaagctgcagatccctagtgtgaagggctt

SEQ ID NO: 131711 - DNA, 75 bp, Homo sapiens
gaccagtgcaaccacgggatgaaggacagaataacgggctcccagattcacaagccccaccaagaggatcacccc

SEQ ID NO: 131712 - DNA, 82 bp, Homo sapiens
gaccccgtcccgaccctggccgccccgagcggagcctggaggttagctttatacgtctacgaatatttactgcacgtaggag

SEQ ID NO: 131713 - DNA, 100 bp, Homo sapiens
ccgtcactcagatcaaggagcttggaaaccggctgtgggatgtggccgacttcgtgaagccacctcagatctgtacccccgatttggtggtattcctggc

SEQ ID NO: 131714 - DNA, 97 bp, Homo sapiens
tggcagttctaaatttgaatttgaggcaggagctaacatgattgtgtctggcagtgctattatgaggagtgaagaccccagatctgtgatcaatcta

SEQ ID NO: 131715 - DNA, 50 bp, Homo sapiens
cggcaccggatcaccaagacggagaatctgagagaggccgagtggagttc

SEQ ID NO: 131716 - DNA, 51 bp, Homo sapiens
ggcgattggattggactttaccgggatagctgggagtatggccaccctgct

SEQ ID NO: 131717 - DNA, 75 bp, Homo sapiens
atattgtactggcctgctgctggcccgcaggaggcccagaaatctaaagatctttgttctataactgtaagtgga

SEQ ID NO: 131718 - DNA, 80 bp, Homo sapiens
ggggcgacgctggctgcagggacccggtgacagcgtgagaggaggagacatcacagctttcccagatcgggaggaaaaat

SEQ ID NO: 131719 - DNA, 98 bp, Homo sapiens
ggctccgagcagggaccgcctgctgcactttgggttcaaggcgacaagttgcatgctgagaatttgaaaaatgaagatgatgtagacactggactatt

SEQ ID NO: 131720 - DNA, 100 bp, Homo sapiens
aacaatgtcatctccctggactatgacagcgtggatggaaaggtctattacacagatgtgttcctggatgttatcagggatcatagacggtatttctatg

SEQ ID NO: 131721 - DNA, 125 bp, Homo sapiens
cgcccggctgcgaccgccggggatgctgctccgcgcgctcctgctcctgctgctgctcagtcctttgccaggaaaattcacgaattgtgagagtaagagttatagccggaataggccttgccaag

SEQ ID NO: 131722 - DNA, 95 bp, Homo sapiens
gaacgaggcaaggagctaaagcagcgtgcgttcagccctggggtggtacagaagttggtcctgccctttgggcgactgaactacctgcccctgga

SEQ ID NO: 131723 - DNA, 95 bp, Homo sapiens
gcccttgatgccaagagagaatcagcctttcttagaagtgaaaatctggagctgaaggagaaaatgactgtcaagaacaagtatgccacatcgaa

SEQ ID NO: 131724 - DNA, 100 bp, Homo sapiens
gcggcggctgctgctgctgcagtgggacaggtggcggcgaccggcggcgtccgaggagagtctccgggaccattatggcagtcaagtggacgggtgggca

SEQ ID NO: 131725 - DNA, 108 bp, Homo sapiens
tcagtcagagtaggaaataattttcacaaccttcaagaaattcgggtgaccaagaatatggcccaggtgaccaaagccctggacaaggccctgagcaccatggacctg

SEQ ID NO: 131726 - DNA, 90 bp, Homo sapiens
aagaggcctacgtgcgggtggtcaccgagaagtccccgaccgactggtgccacatcatctcacagttcaaccaaggcttctacgactgtg

SEQ ID NO: 131727 - DNA, 100 bp, Homo sapiens
gtcagccatgaacggatggatgtgatgcctgctagccaaaaggatccctccctggtgccacagcagctgagtgcgcatcaaatctgaagaaaatctacac

SEQ ID NO: 131728 - DNA, 50 bp, Homo sapiens
cagccagtgaagcaagcacaatcaggatctacagtctttgcagaaattca

SEQ ID NO: 131729 - DNA, 50 bp, Homo sapiens
tgagtgttaaggaatgggtgtaaaagtcttccgaccccgaactccaccgg

SEQ ID NO: 131730 - DNA, 98 bp, Homo sapiens
aggcgctctgaccactctccagcaccagcttccagttagtggatatagcacaccatccccagccaagacacctatggctgccgatgaaggctcagcag

SEQ ID NO: 131731 - DNA, 75 bp, Homo sapiens
atttgttaaggattccaagtaactcttatttgtgagttggactatggatcaggtactgtgctcagcatcagaaaa

SEQ ID NO: 131732 - DNA, 100 bp, Homo sapiens
agagagtctccatcaggaaaacaagcctggttcagttaaacctactcaaactattggtccagtggtttacgtcttggatcttgcagatagactgatctca

SEQ ID NO: 131733 - DNA, 100 bp, Homo sapiens
tggactgccggactctttggccatcctgtcagagatgggagaagtcacagacggaatgatggatacaaaggtggttgtgtcaaaccgattggtgacatct

SEQ ID NO: 131734 - DNA, 80 bp, Homo sapiens
ccaccactgccacaaacgccgcaccaggtcttgtagcagcgcctcctcggttatggaaacaaaggacatgctttacatcg

SEQ ID NO: 131735 - DNA, 82 bp, Homo sapiens
tgaggagtttttagaacaaaccctggctcctccaaggcagaagctcctcctggggtagagacagatcttattgatgttggat

SEQ ID NO: 131736 - DNA, 75 bp, Homo sapiens
tgggcgcggattcgccgaggcaccgaggcactcagaggagacaccattcgcttttcacccaagatgatttgatgt

SEQ ID NO: 131737 - DNA, 50 bp, Homo sapiens
agacaaaattgatgtacttctgcaacagctgtcggaaaaggtaacagaag

SEQ ID NO: 131738 - DNA, 50 bp, Homo sapiens
atccagatgaaagaccatctttcttaagtaacaaatattgggtgttcaag

SEQ ID NO: 131739 - DNA, 100 bp, Homo sapiens
ccgtcttcgacctcagttacttcatcgtctccatcctctacctcaagtatgagccagctgggagtgtccactcgccttccaccagcatggcaacgtcttc

SEQ ID NO: 131740 - DNA, 98 bp, Homo sapiens
tgtactccttgtctttgcaaacaaacagtgtggcaaaggagcagagaactttgacaagttcttcacacgaggacagcccgtcttaacaccacctgatc

SEQ ID NO: 131741 - DNA, 100 bp, Homo sapiens
ccgtggaagatttaacgaatggggttgtgatggcccaggttcttcaaaagatagcctgccttctggtacaagatgcctgtggaatgttcggtgaagtgca

SEQ ID NO: 131742 - DNA, 82 bp, Homo sapiens
tggggatgagtatgcggaggacagctctgatgaggaggagcatcagatccatgctgctgctgactcggagccccacagcttg

SEQ ID NO: 131743 - DNA, 100 bp, Homo sapiens
atcctggagtacattctgcaccagaagaaggagattgcccggcagatgaagtccaatggatgggaccccaatgaaatgttcaagttcaatgaggagaact

SEQ ID NO: 131744 - DNA, 50 bp, Homo sapiens
tcagacatcaccatcatgtttgagaaggcccgagtagaggaagcctccac

SEQ ID NO: 131745 - DNA, 101 bp, Homo sapiens
atataggacatgcgtttgagatctactgtgacctgcctagggtagttaaaagacgagtgaatgctctcaaaaacctgcaagttaaatgtgcacagatagaa

SEQ ID NO: 131746 - DNA, 100 bp, Homo sapiens
tccggctgcatcagaggctgcagctgtgtgttttccagcaggacgttcagcagggttacacatcattttggaatgactgtatatcatctggattacgtgg

SEQ ID NO: 131747 - DNA, 96 bp, Homo sapiens
aggaacatgacatttttgttccagaggatgatgatgatgatgactaacagcagtggacgtcagctcagcgaggtcttcatccagctgccctcgcga

SEQ ID NO: 131748 - DNA, 100 bp, Homo sapiens
gggagatgaacccaacctagtgggtgtaatacatcatgaactgcaggaacagctttgctgagccatcaaggtctaatggaagcatggttcggcattcttc

SEQ ID NO: 131749 - DNA, 90 bp, Homo sapiens
catgagaaccgtcaaattggccagtcggctttgaacatcatcgagaagcactttggtgaggctgatgtggtcatcaagttccctgaggaa

SEQ ID NO: 131750 - DNA, 82 bp, Homo sapiens
cgggcacctccgagcgcaaggacagcgcgaggtccgcgcagcccagcgcagccatgtgacccggccctgtagctacagcaag

SEQ ID NO: 131751 - DNA, 96 bp, Homo sapiens
cagctgcaccgtgcggctgctggacgacagcgagtacacctgcaccatccagggagactcatgcatctgtatgccgtgtgcgtggactgcctggaa

SEQ ID NO: 131752 - DNA, 118 bp, Homo sapiens
aaagatttcagaattgtcagatttcgctttgatgaatcaggtcccgaaagtgctaaaaagggcacacgtgtttcacgttgacaggtttgcttgggacgctagtaaccatgggcttgct

SEQ ID NO: 131753 - DNA, 100 bp, Homo sapiens
cggaatcatcgatgcaggggcctcaattaatgtatctggatttggagttccatggagtgatgagattttattttcaagataaagctgctggaaactttgc

SEQ ID NO: 131754 - DNA, 80 bp, Homo sapiens
agagagactgactgggcaacatgttattcagatgaattttgataagaggcaacatgaagcaagaatccagcaaatggaga

SEQ ID NO: 131755 - DNA, 108 bp, Homo sapiens
gcctttctagacaatcacaattatgccaagtcccccatgcagatggagtcttgcttagtcgcccaagctggagtagtgtggctcgatctcagctctgcaacctctgcc

SEQ ID NO: 131756 - DNA, 74 bp, Homo sapiens
actactggtgcctgcgctgaaaaagttaatgacagttcggactatcacaggaaatatctactatgcaaggtcag

SEQ ID NO: 131757 - DNA, 100 bp, Homo sapiens
atttgttagaaaggagacccgactgcaactgctggattgctgcaaggctgagggacgagaacgaggtatcatcttcaccaaataaagaaagtaatgaaga

SEQ ID NO: 131758 - DNA, 98 bp, Homo sapiens
acactttgttattggagaaacatgcagattatatcgcatcctatggctcaaagaaagatgattatcaggaagaaccggacccggcgaacctggaagtg

SEQ ID NO: 131759 - DNA, 100 bp, Homo sapiens
tccagcattacacgatgcacttaatgaccctaaaaatggcgattctgcaaccaagcacctgaaacagcagacgctgaccggaaaggagattgagattgac

SEQ ID NO: 131760 - DNA, 75 bp, Homo sapiens
ttctgcgtctcccggctggtggggaagcctctgcgccgccggcaccatgaggtccagtttctttacacatctctg

SEQ ID NO: 131761 - DNA, 74 bp, Homo sapiens
taaacttttggccaagagaatgaagagcaagtagagagtttcacatcaaagccatcagcattgccaaaattttc

SEQ ID NO: 131762 - DNA, 82 bp, Homo sapiens
atcagctacagactttcctgagtcagaatggtaccaaaccaccactggatgcagatgtaaatttggaagcaattgctggtga

SEQ ID NO: 131763 - DNA, 100 bp, Homo sapiens
tggccttcaggaaaagcatcccggaggaggaagaagaagtgttatatgtcctaaagtaaggtttcagtaatctatgccagcaattatgacaatgttagca

SEQ ID NO: 131764 - DNA, 50 bp, Homo sapiens
ccctgatcatcctgctgctccccggaaatggcttgaaacccctccttcct

SEQ ID NO: 131765 - DNA, 75 bp, Homo sapiens
caatcttcctaagctgaagaacctctacctgatgcagacagacatgctgaactatctggaagtccactgaaaagc

SEQ ID NO: 131766 - DNA, 100 bp, Homo sapiens
tcctcagtcctattcccgagctgcctgaagtccctgagatgacaccttccattccgagcatccgaagactgggttcaggctggagtgcaatggcacgatc

SEQ ID NO: 131767 - DNA, 75 bp, Homo sapiens
cgagtccttgtgagtgaaggagtaattttctacggttcaagcactgtcttcctgttggccctgacaatcatagcc

SEQ ID NO: 131768 - DNA, 100 bp, Homo sapiens
cttatgaacgccttgttgcccagttccccagttctggcagattctggaaactgtacattgaagcagaggtttcagtgtagctcagaagccatttggagcc

SEQ ID NO: 131769 - DNA, 75 bp, Homo sapiens
atctcaaagatctcgtacaagatccttctttgactttgtgtcattgtatcaagattttgaaaacttttatacaag

SEQ ID NO: 131770 - DNA, 100 bp, Homo sapiens
aaggtcgcgatggttttcttgggaacacgatagacagcatattctggcagctgtccgtacctggcggtgaaaatcacccctgccatccctgcagtcgctg

SEQ ID NO: 131771 - DNA, 82 bp, Homo sapiens
gagacggcgacccaggcatctggggagccacagaagtcgtactcccttaaaccaatgattacggacctgaagccaaagaaca

SEQ ID NO: 131772 - DNA, 98 bp, Homo sapiens
gtcctcctagaaattccccccgaagaagactcccccacatctgggtctctgaaagaagatgaatttggctgagatttgtgataatgcaaagaaaggaa

SEQ ID NO: 131773 - DNA, 75 bp, Homo sapiens
ccattgccgtctcagacaccagaggctcccacttgaccagagttctaaagttcctgttgcttcagacaatggatg

SEQ ID NO: 131774 - DNA, 90 bp, Homo sapiens
cgggcctcccattgcagcatctgtgacaactgtgtggctactcccgagcccggagaggacccacgcgtgacccgggccaagtacttcatt

SEQ ID NO: 131775 - DNA, 83 bp, Homo sapiens
gccagatgtttatgaaactagcgacctacctgaggatgatcaagcggagttcgatgcgctgtttgcagacaaggtcccaaaga

SEQ ID NO: 131776 - DNA, 115 bp, Homo sapiens
cgccatgctgaccttcttcctcgtgtcggggggctccctctggctattcgtagtgttaatgtaccgcggtgaggctcttgaagatttcacaggcccggattgtcgttttgtgaat

SEQ ID NO: 131777 - DNA, 98 bp, Homo sapiens
gcaggtcttctcaaagtacggacagatctctgaaggtgatttgatgaaggctgctgcaggagagttcgcagatgatccctgctcttctgtgaagcgag

SEQ ID NO: 131778 - DNA, 75 bp, Homo sapiens
caacaccaaaaagctttctgctagggatgttgctatgaggacagattcatcaaaaatgactgacgtggagtctgg

SEQ ID NO: 131779 - DNA, 98 bp, Homo sapiens
agaggtgttccagcacataccttatattaaagagcccaagcctttcattgatgtgagtgtcatcacaagatttaatgagtacagtaaagtcttacagt

SEQ ID NO: 131780 - DNA, 97 bp, Homo sapiens
gcgcaggcccgcggggagcgcagcccggcggaggtatgtgactggtgtaagcacataagacacacaaaagaatacctggattttggggacggggaaa

SEQ ID NO: 131781 - DNA, 74 bp, Homo sapiens
gtccatgaaccaggcgttgcagaggcgcttcgccaagggggtgcagtacaacactggtgccgacaagaaagccg

SEQ ID NO: 131782 - DNA, 101 bp, Homo sapiens
ctgggactaccgggctgtcaaatttacattaactatgagaattaagcagaaaggaagctgttgaagttattgaagtacctgttgctatattctaagaaatt

SEQ ID NO: 131783 - DNA, 75 bp, Homo sapiens
cgaagatccggactctgggtgttttgctaccgtgaccgtttaggctgtgtggttccgggtgctggtgctgtggaa

SEQ ID NO: 131784 - DNA, 100 bp, Homo sapiens
tcctcttcctcttcctctcggagctcaccggatttataacgacagaagtagggtcaccatgaagttcaatcccttcgttacctcggaccgcagtaaaaac

SEQ ID NO: 131785 - DNA, 75 bp, Homo sapiens
ggagtacctggagaaagctttaaacaagtgtgatgaatgcagactctgctaccattttggctgtttggatcctcc

SEQ ID NO: 131786 - DNA, 75 bp, Homo sapiens
cacctttacttttacctacgttggcggccccagaagattcactgcgtgctgtcctcacttgttctacaatgagtg

SEQ ID NO: 131787 - DNA, 100 bp, Homo sapiens
agaaacacagcaatggatgcacaggaagctttagctagaagggaagacaccctctctggacccccatcagaccaaagagcagaagattctgcaggaaact

SEQ ID NO: 131788 - DNA, 100 bp, Homo sapiens
cctcagttcttccagacgctttctgagagaatgggggcaggagctctagccatctgtcaataacaattggtcgtcttggttacgtttgtcctcaagaggt

SEQ ID NO: 131789 - DNA, 100 bp, Homo sapiens
tcgtaagcaacagacaaataatcaaacagaagtagttaaaataattgaaaaagatgttatggaaggatcagttcgacagcttagacaagcatacacaatg

SEQ ID NO: 131790 - DNA, 90 bp, Homo sapiens
gccttggtctgagtggactgtcctgcagtaccaaaagaattggtggagctccatttgaagctgatgaggaaaattggcaaatctgttact

SEQ ID NO: 131791 - DNA, 100 bp, Homo sapiens
attttggaacctggggcagccaagaacgagcagccaaggaatcctaatgtacctggctagctggtggtgagtaggggctttggggccaacttggtgggct

SEQ ID NO: 131792 - DNA, 100 bp, Homo sapiens
aggaggccaggggtgtcgccatgagatggggtttcatcacattgcccaggctggtctcgaactcctgggctgaagcaatcctcccgcctcagcctaccaa

SEQ ID NO: 131793 - DNA, 100 bp, Homo sapiens
ctcacaggctgttgtgaggactaagggtgcggcagtgcctggtacatggtgtgaaatccccgggggagaagtcacgctatgagacctcactgaatctgac

SEQ ID NO: 131794 - DNA, 75 bp, Homo sapiens
gataagactcctgtcatccgctcagtgatactgaaactgcttttgaagtacagacttcaatccccgactcggaaa

SEQ ID NO: 131795 - DNA, 100 bp, Homo sapiens
cccagccgcaagcccgacctgcgagtcatcacttcccaggcaggaaaggggttaatgcatcacttgggttgaagtcaaaagaccaaaatactaatcacta

SEQ ID NO: 131796 - DNA, 82 bp, Homo sapiens
cgggtctgtcatcatgtcgcgttacgggcggtacggaggagtgtactaatggtcacttgatgtgcgctggctgttttatcca

SEQ ID NO: 131797 - DNA, 98 bp, Homo sapiens
tcagtgcgccgctctccagcccgcttgaacgatcgtcagtatttaaacagatcacatcatgcgtgagtacaagctagtggtccttggttcaggaggcg

SEQ ID NO: 131798 - DNA, 133 bp, Homo sapiens
gcgtcaacgccgtatccagcgactacgcggccgcggagacctacctgcggcgtcggcagctgctgctccgagggccaattcctgtccccccagcagcatggcatcgtgtgctgaaccctctgagccctctgcc

SEQ ID NO: 131799 - DNA, 51 bp, Homo sapiens
tgcaggaactgaagctcttagaagatgaccagtgtcccagtgaaggaacga

SEQ ID NO: 131800 - DNA, 98 bp, Homo sapiens
aaacctaccagggtattctgaagaagacaagagtcatggaaaaaaccaagtggctggatatcaaaggaaatcatgataacaaagctgcagctcttttg

SEQ ID NO: 131801 - DNA, 101 bp, Homo sapiens
gttttaccgtgacaagaagtacgaggaagtgagacaatgcagatcttcgtgaagactctgactggtaagaccatcaccctcgaggttgagcccagtgacac

SEQ ID NO: 131802 - DNA, 50 bp, Homo sapiens
agagagaaaatggctgagttaaaggtcttccgaccccgaactccaccgga

SEQ ID NO: 131803 - DNA, 82 bp, Homo sapiens
acagaatatgccaaaaatggagaaatttttgacaatgcagatcttcgtgaagactctgactggtaagaccatcaccctcgag

SEQ ID NO: 131804 - DNA, 85 bp, Homo sapiens
attccagcagatacatggccacaagagctctacaggtgacgggggaagtgacagatccatcaggaaaagtccactttgctcttct

SEQ ID NO: 131805 - DNA, 100 bp, Homo sapiens
tttgaaagcatcatgcccagattatcagtggatttttgaaagcctggtctgccacctcagaacttttcaatgtctgtcacagttccagtgaccagcccca

SEQ ID NO: 131806 - DNA, 83 bp, Homo sapiens
cgtgcccttcgccttcgtgcgcttcgaggacccccggttatcaatactctggctgaccatcatcatcgtgggactgactttgg

SEQ ID NO: 131807 - DNA, 90 bp, Homo sapiens
tggagacccaggcagggaaggtgcaggaggctcaggaactccttgaacagagcaagtttccgaaaggcagacctctgagcccacaaggac

SEQ ID NO: 131808 - DNA, 50 bp, Homo sapiens
gtttggagacttcaaagatgtattagtggagagatctacagaccaagtaa

SEQ ID NO: 131809 - DNA, 100 bp, Homo sapiens
aacttttgtggcacctatctatggtgcagatattaatgggagcatatatgatgagttcagggcgacagctcagtgaagtcttcattcagttaccttcaag

SEQ ID NO: 131810 - DNA, 100 bp, Homo sapiens
tgctgcagccaagtccagctaatgaggaaaatgtcagtattgaatatggtggtgaggcgtgaccctggcaacactgaacctgtgaaagccaaggaagagc

SEQ ID NO: 131811 - DNA, 75 bp, Homo sapiens
ctgactcccagctggccttacccattcagcccattccctgcaaaccagggacaccacatcatttgaagcattctt

SEQ ID NO: 131812 - DNA, 82 bp, Homo sapiens
ctattgtaagtgcagatggaacacaacagtgaagcagccgacacgagtcgttgttcataaaacagcttttgaaagttgagag

SEQ ID NO: 131813 - DNA, 75 bp, Homo sapiens
ctgccatcccagtcttctccttcagtaagaggggtctggttgctgcttacagtggtgacagtgacaatgaggagg

SEQ ID NO: 131814 - DNA, 89 bp, Homo sapiens
tcctgtggcccctgaggatcgcataagccgcaaatattcctttaaggtgtccaggactaagcctgtatgtgtcacctgcagtgcccatc

SEQ ID NO: 131815 - DNA, 100 bp, Homo sapiens
gatcgagaggatctggtgtaccaggcgaagctggccgagcaggctgagcgatacgacggagatacaactcgtcaacgaatcaaattcagtgatgacagag

SEQ ID NO: 131816 - DNA, 100 bp, Homo sapiens
ttcaccatcaacaaagaagaccacacactgggaaacatcattaaatcatacctcaaatcagctatgcatccacagccccagagctaagtgataacaccag

SEQ ID NO: 131817 - DNA, 82 bp, Homo sapiens
aagaaggggaggaatttcagccagaaggaagcaaatgtaccaagtgttcctgcactagactctccaacatgtgccttctgac

SEQ ID NO: 131818 - DNA, 76 bp, Homo sapiens
agaccgcggccgggaccgagggctggtgtgtgacagctctgtgctgctgtgcctcaagaagagatttcacctgggc

SEQ ID NO: 131819 - DNA, 75 bp, Homo sapiens
gagagaggcagacaaacccatcagccatggttattcagcttctcaaggctggaaaagcgaaggaagtttcctaca

SEQ ID NO: 131820 - DNA, 100 bp, Homo sapiens
acggtcttcatcttttacttttcatattacagattctcagtcccagggagggagtgaactactttatgtccaagggtatcctggatgattcgccaaagga

SEQ ID NO: 131821 - DNA, 90 bp, Homo sapiens
gccagatcaacctggagctctacgcctcctacgtttacctgtccatggggcggcctgagctgacacccatagcgatcatggccgggaggc

SEQ ID NO: 131822 - DNA, 82 bp, Homo sapiens
gacaccaagggtcgctttgctgtacatcgtattacacctgaggaggccaagcctttagaagaagccacactctctgaattaa

SEQ ID NO: 131823 - DNA, 87 bp, Homo sapiens
gacaacgaacagctcttcaccatgaaatggatagatgaggaaggaactcaacagaggcaattattatcccgactgcaaatcgaccca

SEQ ID NO: 131824 - DNA, 152 bp, Homo sapiens
ctgcagcagtgaggccaagctccagtgtcccacttgcatcaagctgggcatccagggctcgtacttctgctcgcagataatctcagtgataccttgaagaagctgaagataacagctgttgacaagactgaggatagtttagaaggatgctt

SEQ ID NO: 131825 - DNA, 75 bp, Homo sapiens
ggcgcggcggcggcggcggtggaggagccggagcataatgttttcggctttgtgagaaaccttaccatcaaacac

SEQ ID NO: 131826 - DNA, 50 bp, Homo sapiens
tagccatcgacttcggggagcaggctggagcattggatttgctaaaggag

SEQ ID NO: 131827 - DNA, 110 bp, Homo sapiens
ggaggggccccagcagcccccgaaggccctatcaggacatggagtatgaaagacgacctctgtgagtgaaagccttcagagggaagctgctaagaagcaggccatgaaac

SEQ ID NO: 131828 - DNA, 100 bp, Homo sapiens
aaggaacagtgccaagttagatgccgattacccacttcgagtcctttattgtggaggctggtgtttggaatgctttatcctgcatattattcatacaaag

SEQ ID NO: 131829 - DNA, 98 bp, Homo sapiens
acgattcttgaagttgaagaaaagaaataaactatcaatcttgcccagactggagaaaggactgcagcaacaaccctgtttcagtattctggaaaacg

SEQ ID NO: 131830 - DNA, 100 bp, Homo sapiens
acccggagcgtgaggacagtgagactcgaacacttaggcctgggggagcccatccaggaacatgcagtcccagcagaccaggctcctgagaagaactttc

SEQ ID NO: 131831 - DNA, 83 bp, Homo sapiens
cgggcttcatctcttgtgtggggagtttcatcctagcggaggtcctgctgtactagccaccaaagcagctgctggtactaaga

SEQ ID NO: 131832 - DNA, 100 bp, Homo sapiens
gcagtcgtaagaagaggtcccaatcccccactctttccgccctaatggaggtctccagtttcgttctggaactgggaagtccaagatcagggctcctgcc

SEQ ID NO: 131833 - DNA, 82 bp, Homo sapiens
agtgccccacaccaccgcactgtcgctgcccgcctgccctgaggagtccccgctgcttggcaattaagttggaatatgcaag

SEQ ID NO: 131834 - DNA, 98 bp, Homo sapiens
gggggctgctgcagacaatgtcttcaccacgtctgtggcgaacgcggcatccatctcaggacatgttctgcagaacagccctgtggcccccacagccc

SEQ ID NO: 131835 - DNA, 96 bp, Homo sapiens
cagaagaagctgaggatgaagaagatgtatgtctggacctaatagctcttcagaatggtccattgaaggtcgtcgattggtaccactgatgccccg

SEQ ID NO: 131836 - DNA, 60 bp, Homo sapiens
ggccgaggcagggcgcagcgtgggaagaggaaacgtgcccaacgagaagatcgcgatatg

SEQ ID NO: 131837 - DNA, 100 bp, Homo sapiens
gcggggaccgctgtgctctcggaacatggagctgatccaggacacctcccgcccgccactggagtacgtgaagggggtcccgctcatcaagtactttgca

SEQ ID NO: 131838 - DNA, 100 bp, Homo sapiens
tccctatgccaagggtggcaaaattgggcgtgatggtgggcatgggtcagaaggattcctatgtgggcgacgaggcccagagcaagagaggcatcctcac

SEQ ID NO: 131839 - DNA, 88 bp, Homo sapiens
caggtgtatgtaaatgacttacctgtaaatagtggtgtaacccgaataagctgtcagactttgatagttgaaatggatgcagtcagaa

SEQ ID NO: 131840 - DNA, 100 bp, Homo sapiens
gcgggcgagcggtggtttggacgccggcggagacgcgggcgagggaaatcctcattgacgattcaatttgttgaaggccaatttgtggactcctacgatc

SEQ ID NO: 131841 - DNA, 83 bp, Homo sapiens
agcagcagcagcacagcgacaagacggttaatttggagtggcccctggagtcagtttcctacaccatccgaggccccacccag

SEQ ID NO: 131842 - DNA, 100 bp, Homo sapiens
aagccattcgcaaaatcatggacgaattcaaggggtcaccagtcgttggcacaccaagaagctgccccgcaagacccaccgaggcctgcgcaaggtggcc

SEQ ID NO: 131843 - DNA, 87 bp, Homo sapiens
ctgacggtgaccaacttattagaaaaggatgcctttgaagatgagaaacccccaaagaagagccttctctccaaagtttcacaagga

SEQ ID NO: 131844 - DNA, 100 bp, Homo sapiens
cttcccctgtctccacataccaggtttacccagggttgatgataaccgctggccttattcattggattttaaatacattgaacataactgttcacataag

SEQ ID NO: 131845 - DNA, 100 bp, Homo sapiens
cggcgagctgcacctggagatctgcctgaaggacctggaggaggaccacgcctgcatccccatcaaggtacaccagaggatcgcttcctggcagaatttg

SEQ ID NO: 131846 - DNA, 82 bp, Homo sapiens
ttagtgccggactccgggccgcaggcagtcccgcggcagcaggatcacagtcctggatcagtgacattcgagcaggaaccgc

SEQ ID NO: 131847 - DNA, 96 bp, Homo sapiens
gaactgaacgaatgaagaagactatggcatcacaagtgtcagctttcagcagaggccaaggcagcattgcttgaatttgaagaaagggagcgacag

SEQ ID NO: 131848 - DNA, 100 bp, Homo sapiens
cgacgcctcagccgcttggggcccgcacggaccctctacttcaatgcacccactgggcctatgtaataacaatgacgaagaggacttgtatgaatatggc

SEQ ID NO: 131849 - DNA, 100 bp, Homo sapiens
cagccgcgctgccgagaagctttacctcgctgaccctatgaagggtggtggccttgtccatgtcacctgtggatgacactttcatttctgggtctcttga

SEQ ID NO: 131850 - DNA, 75 bp, Homo sapiens
tgtccgcttctcagcaacctcgatgaagttgggcatcgatgggctgattgttacgaacaccaccgtgagtcgccc

SEQ ID NO: 131851 - DNA, 96 bp, Homo sapiens
ttgagaactggcattcgatcctgcgcaatgggctggtcaatgcatcctacaccaaactgcagtgagaaagatcagtctaaagaaaaggagaagaaa

SEQ ID NO: 131852 - DNA, 50 bp, Homo sapiens
tgcccagatggagcccatgtatcaaggacttaaccaccaccatgtcgagc

SEQ ID NO: 131853 - DNA, 101 bp, Homo sapiens
tggccaagagctttgtgtgggagacggcaagggttggatttttcaaaagagtaaaccagatatctccggagcatttggataatgtgacagttggaatgcag

SEQ ID NO: 131854 - DNA, 75 bp, Homo sapiens
tcacccagcgcggcaacgtcgccaagacctcgggggatatgagactttctactcggaatatcctgagtgttgcgt

SEQ ID NO: 131855 - DNA, 100 bp, Homo sapiens
tcaccgacagcacagacagaatccctgctaccaggtcatctagtagcaggcacccaaatcaggcaactcccaagaaaagtggtttaaagaatggccagat

SEQ ID NO: 131856 - DNA, 110 bp, Homo sapiens
gagagcttcatcaaaaatagtgatagctttgataagaagttaaatgaagttcgaaagagattgaatgagctaagagaattagttcattattatgaacaaacgtcagacat

SEQ ID NO: 131857 - DNA, 78 bp, Homo sapiens
gcctatactttctaccagaagcttgaagggtttggttaagatttttaagaagaagccagaccacttcccattcttttt

SEQ ID NO: 131858 - DNA, 90 bp, Homo sapiens
cttggatctccagtgggagctgccctctcgaaggcaggacagcggtggcggcagtccacctgatcccggtgtcgactcctaagaatggaa

SEQ ID NO: 131859 - DNA, 111 bp, Homo sapiens
gggaccggctgccatcttagtctagggactgaggagtcgccgccgccccgagtcccggctgaaggtgatgtggccgccctcaaccgacgcatccagctcgttgaggaggag

SEQ ID NO: 131860 - DNA, 88 bp, Homo sapiens
tttctctctggactgtgcatagcagtagctgttgtttgggctgtgtttcgaaatgaagacaggactcagaattcatgattgaagaaat

SEQ ID NO: 131861 - DNA, 78 bp, Homo sapiens
actatatgccaccatggagaagcataaagaggtcgtctgatctttgataacttgaagaaatccattgcttatacctta

SEQ ID NO: 131862 - DNA, 100 bp, Homo sapiens
gaggaatctcagtagggacaacaggcaggagaattatgggagcgcatttccccaggaacgtatgaaggtcaactccctgtgctggccatcacagatcccg

SEQ ID NO: 131863 - DNA, 82 bp, Homo sapiens
ctccaaaatttcagaagctgatgccggaagctgagaggaaaagccttttattttgtcaacggcaaagtgttttgtgaagaag

SEQ ID NO: 131864 - DNA, 82 bp, Homo sapiens
cccaaccagcctggaggcaagaggctcctgcagacccctggcttcctgcagaagctcctcctggggtagagacagatcttat

SEQ ID NO: 131865 - DNA, 83 bp, Homo sapiens
ctgctctgcctccggggacaagaaactagagcaaataaccgttttgaaattgatgacactcctgtccaggacactaaaatgtg

SEQ ID NO: 131866 - DNA, 96 bp, Homo sapiens
tatcaatgaagtccgagtcatacccccaggagtaagagcccatagcagtctgccagacaatagagcatatggtggtgctgattactatgattacgg

SEQ ID NO: 131867 - DNA, 101 bp, Homo sapiens
gcaggatccggctgccgaaggtcctcgccaggagtcggatggtcagggctgccctttctgtcgttgtgaaataaaaggaactgagcccataatcgtggacc

SEQ ID NO: 131868 - DNA, 100 bp, Homo sapiens
caggacctggcttagctattcattgcatgcaggtcgagctgtgtttagagtgcatcgaatgggccaagtcagagaaaagaactttcttacgccaagcttt

SEQ ID NO: 131869 - DNA, 100 bp, Homo sapiens
ccgaagaggaaagtctagtactcaataaagggaagcagagctgaggctggtaaagttcctgcctgagattttggccttgcaaagggatctagtgaagcag

SEQ ID NO: 131870 - DNA, 100 bp, Homo sapiens
aacttggtgctgctagaatgcaggaacagcaggctttgatgaactaggtggacttctcaaaccaacagtggcctctcagaaccagaaccttcctgttgcc

SEQ ID NO: 131871 - DNA, 82 bp, Homo sapiens
acctccattggatttaaaagacagtcctcgtcagcactgactttcagctatggaatcggttaacaatgagaatgttgtcaaa

SEQ ID NO: 131872 - DNA, 82 bp, Homo sapiens
ccagccgctgttttgccggaggagcccctcaggccacaaatttacatgtattggagaccagaccagaagcccttctgaatta

SEQ ID NO: 131873 - DNA, 83 bp, Homo sapiens
ttttgaagttattaaagtctgttggtgcacaaaaagacacttatactatgaaagagctccgccgcatgcaagagatgattgca

SEQ ID NO: 131874 - DNA, 75 bp, Homo sapiens
tattggacaaatttggtggggagcataatccaccatcaatatatctggagagctagcaacatggaccacagatat

SEQ ID NO: 131875 - DNA, 83 bp, Homo sapiens
cctgaaggtaccgcggacctcgccccgggacagcgaggagctgagggacccttgtactaatggtcacttgatgtgcgctggct

SEQ ID NO: 131876 - DNA, 51 bp, Homo sapiens
accgggagctggacctccgggaggatgacttggttacagtcaaaaccccag

SEQ ID NO: 131877 - DNA, 74 bp, Homo sapiens
gacaccagctccgaaatcaccaccaaggacacgcaggagaaagaaggtattctgcctgagagagctgaagaggc

SEQ ID NO: 131878 - DNA, 100 bp, Homo sapiens
ggtcttctcgtcggattgcccatgcacttgttgcagaaacagccaaggtctacttcaggaaaggaaaagtactctgcgatgctggttttttaggtgatgc

SEQ ID NO: 131879 - DNA, 85 bp, Homo sapiens
acaaagcatggagaccctccctccagtgcaatcagaatctggttgtgccaacatagtgtctgcagccccttgccaggcagaaccc

SEQ ID NO: 131880 - DNA, 82 bp, Homo sapiens
actgaccccacagtatctggcggtgtggctttgatagctggtggtgccacttcctggccttggatgagccgtacgcctctgt

SEQ ID NO: 131881 - DNA, 74 bp, Homo sapiens
ggcagtgaccggcaccttctgtgcgtcctggactcctctgagaaacaggacatgtattcctctgagaaaccttg

SEQ ID NO: 131882 - DNA, 96 bp, Homo sapiens
acgccagtcaccagcaggagcagccaaccagcagcagccatcatggaggccaggaccaaaccgtcacgagccaggtggccgtgaccctccgcagca

SEQ ID NO: 131883 - DNA, 100 bp, Homo sapiens
actttgtctgatagtgaaattgagaccaactctgccacaagcaccatctttgcctgggccgaggccactggtgcatatgttcccgggagggataagccag

SEQ ID NO: 131884 - DNA, 98 bp, Homo sapiens
gtgttcaagaaggcggtggtactgcatgtgcttccagaggagcccaaaggaagcaatgcctgtgtgcccaggccatgcagcctgctgtgcctgcccaa

SEQ ID NO: 131885 - DNA, 83 bp, Homo sapiens
cggcgacgcagcccgcggcagaagctgtttttggaaggaagaaagatggaaagcggtgcagttctgctggaatccaaatcctc

SEQ ID NO: 131886 - DNA, 75 bp, Homo sapiens
atagcagcccagccttgtcaggccagctccagttcccagagaatatgatacaaggcagatccaaccatccccacc

SEQ ID NO: 131887 - DNA, 98 bp, Homo sapiens
ggggcaccgagggctaccacgttctgcggaaacagagcctcactctgtcacctaggctggagtgcagtggtgcaattatggctcactgcagtttcaac

SEQ ID NO: 131888 - DNA, 72 bp, Homo sapiens
gcagatgttgttgaagataaagacaaggtgtgcttgtgagaaatggaggaagttttgaagatgatttgtcat

SEQ ID NO: 131889 - DNA, 82 bp, Homo sapiens
caacaactgtactgggagagctaggatggaaaacatatccattaaatgggtgtcgagttatagcagtgctggattgggagct

SEQ ID NO: 131890 - DNA, 75 bp, Homo sapiens
cagccgcaagtacccgtccatcatagtcaactgcgtggaagagaagaattcctagaggacctgtgcaacaacctc

SEQ ID NO: 131891 - DNA, 82 bp, Homo sapiens
gggggcggcgtgggcaagtcggcgctcaccatccagttcatccaggagcaggccgggctctcgccatgggtcactgtcgcct

SEQ ID NO: 131892 - DNA, 100 bp, Homo sapiens
ccgaggagccatcagcttcagctccagctccgctctcttcggctgccccaatccccggcagctctctcagtttgcaggtcgaagtaagaaggaaaccaaa

SEQ ID NO: 131893 - DNA, 100 bp, Homo sapiens
tgaagctgactactaaggagaataagagtatgcggttgaaattgattgcaaataatacaacagtggaacggaggtttagctcatggattggcggctccat

SEQ ID NO: 131894 - DNA, 100 bp, Homo sapiens
ggtgtggcggcggcgcttacccccgagcggctcctggagtggcagggtgcttttgaagatgatgatatcacgcacgttgaaggaagtgtagatcctattc

SEQ ID NO: 131895 - DNA, 97 bp, Homo sapiens
ccagaggttccggtaactaggctacaggaacagggactgcaaggctggaagtccggtggggaccgtggctgtgtgctggaggcgctgctgccgctga

SEQ ID NO: 131896 - DNA, 100 bp, Homo sapiens
gggagtcctaaaacctgcgacaggaagtgggcctttggagtgacgctgtgggaactcatgactctgggccagactccctacgtggacattgaccccttcg

SEQ ID NO: 131897 - DNA, 50 bp, Homo sapiens
gctttcggagtacatgggcaatgccttcactattctgtgtgatattttga

SEQ ID NO: 131898 - DNA, 75 bp, Homo sapiens
ttcgtctcttacgtctgcggaagtgcagctgcctcagttcttagcgcaggtttggacatatttgactcttttccc

SEQ ID NO: 131899 - DNA, 75 bp, Homo sapiens
gctgctcttggcttggaagttccaggctgcaaccatgtgcaaattcaccaggtttctagagaggaaggatctccc

SEQ ID NO: 131900 - DNA, 83 bp, Homo sapiens
acgcagacatcttcagccgctgccagcccgtggaccgggagcccgtggaccgggagccggtggtgtgccaccccgacctggag

SEQ ID NO: 131901 - DNA, 101 bp, Homo sapiens
tgggattcgcgctgctgggcacccacggagcctccggggctggggttgccctgctgtcagacgtctatcctgagaaaatcttgccggacttgttggctcaa

SEQ ID NO: 131902 - DNA, 134 bp, Homo sapiens
gacgctctgcggggctgagctggtggatgctcttcagttcgtgtgtggagacaggggcttttatttcagtgtcatggagaaactccagctgggcccagagattctgcagcgggaaaatccaaggcttatttatg

SEQ ID NO: 131903 - DNA, 100 bp, Homo sapiens
catcttctggacctttgtccagcttatgttcctgaggaagaattgaaggcagcagaaatagatgaagagcacgtggaggatgacgggctgtctttggaca

SEQ ID NO: 131904 - DNA, 82 bp, Homo sapiens
ccttctctactcactgtactgctttgaatatcgttggttcaataaagtattcacaggcctccactgggctctcagtaggtgg

SEQ ID NO: 131905 - DNA, 97 bp, Homo sapiens
agcgcgaatatcgtcatcgttagaaggtgtttggatttatagcaagttttatgttcctacttgactttatcactatgctgtatgaaaaacgacagga

SEQ ID NO: 131906 - DNA, 100 bp, Homo sapiens
ctggggacctgccctcctcctccagccgcccgcttcctccttgccaggaggtattgcgcagcgatgcacggccatcaagtaccacttttctcagcccatc

SEQ ID NO: 131907 - DNA, 82 bp, Homo sapiens
gccgccgccgggactcccgtcccagcagagagatggaaaacttgatgactagctccaccctaccgcccctttttgcagatga

SEQ ID NO: 131908 - DNA, 83 bp, Homo sapiens
caagtacgaagaggactgcgagagcccccagaactgcagcatcatgtaatctgggacctgccaggcaggggtgggggtggagg

SEQ ID NO: 131909 - DNA, 95 bp, Homo sapiens
tgatgcaatgttcaaactggaacaacaagatccatggataataggtcaagaaatcctaaatcagaacttttcagacattcagtcccctgaagctg

SEQ ID NO: 131910 - DNA, 82 bp, Homo sapiens
tggagcctcagttggaagcagccgatccagcctgcggagcctgtggggcagacggtctggaaaatcccgaagcagaagcccg

SEQ ID NO: 131911 - DNA, 50 bp, Homo sapiens
gccggcctccggggagaaacggacatgagacttcacaacctgctaaaaat

SEQ ID NO: 131912 - DNA, 82 bp, Homo sapiens
gcactctgcatgtgactccccgcagcctggacagaggcaccttccactagcaacagtctccccaggcacaacacagctaaca

SEQ ID NO: 131913 - DNA, 100 bp, Homo sapiens
cagaagttttgagccactatattaaaactgctaagatgtgaaaggaccacccacccaccgtctgtcttgtggtcagtcaccctacaccgagacaacaacg

SEQ ID NO: 131914 - DNA, 100 bp, Homo sapiens
cccaagttcccgagaggcctccaaaaccattcccgcggagaatcaactctgaacggaaagctggcagctgtcagcaagatgggagacctttaactctgaa

SEQ ID NO: 131915 - DNA, 100 bp, Homo sapiens
acggggtcctcttctgcaaggtccggctgctggatggaggggattttgtcagcttgtcgtcaaggaatactcccccagttgcaagaggcgcaggaccgtg

SEQ ID NO: 131916 - DNA, 98 bp, Homo sapiens
acattttccccaagcactctcaggaacctggcaacaggtggtcctggctctgccatatgacacccccgtgcccggctacatgaataacactgtcaaca

SEQ ID NO: 131917 - DNA, 76 bp, Homo sapiens
agcggtcagcagctgtaatggctgctaccatactgggaactgcccaatggagaggcccacattccacaaggaactg

SEQ ID NO: 131918 - DNA, 75 bp, Homo sapiens
ggagagaatactactttgcaataacaatggaaaggtcatttcaagataaagatggtgatagagcagttcaccatg

SEQ ID NO: 131919 - DNA, 90 bp, Homo sapiens
ttaagacggtctacaaaggtctggacactgaaaccaccgtggaagtcgcctggtgtgaactgcagcaacttcccagccagaagacagtcg

SEQ ID NO: 131920 - DNA, 75 bp, Homo sapiens
gccaaagcctgcccagacggctcacctgtgcgggatggaacaaaagtgaagatagtgatccggggagacaggaac

SEQ ID NO: 131921 - DNA, 75 bp, Homo sapiens
cttcacagcaagacccaggaagccgcgggcaaactcagactcgaagacaatgcagatcttcgtgaagactctgac

SEQ ID NO: 131922 - DNA, 82 bp, Homo sapiens
cgactttccaaagcgctggaattatgggcgtgagccactgtgcccaggaactgtggctgcaccatctgtcttcatcttcccg

SEQ ID NO: 131923 - DNA, 100 bp, Homo sapiens
gttaacagttcatgcatcatacctgtccacggtatgatctcgtgaaaccttgagagaaactgaatgacgaatgaaactattgttcctgtttcacacagaa

SEQ ID NO: 131924 - DNA, 75 bp, Homo sapiens
aagaaagtggtgaatcccctgtttgagaaaaggcctaagaattttggcattgtgcccatgacgcttccggagaca

SEQ ID NO: 131925 - DNA, 50 bp, Homo sapiens
cgccatcacccacgctctgacctctgagtgcctggaagagctgggatgtc

SEQ ID NO: 131926 - DNA, 90 bp, Homo sapiens
ctcgcagctcgccaagttcctgttggaccggaccacggaggggtgatcgtgaacatcactgccaccctggggaaccgggggcaggcgctc

SEQ ID NO: 131927 - DNA, 100 bp, Homo sapiens
attctttgtgactcctcgatcttcagttgagattgggaaaatgaggtacgttagtgttcgcgattttaaaggcaaagtgctaattgatattagagaatat

SEQ ID NO: 131928 - DNA, 100 bp, Homo sapiens
acgctcgctccgctcgtcccgctcgtcatggcctacccgggatacggaggagggtgaacagagtatctgtcaggcaagagctgctgtgatggtttatgat

SEQ ID NO: 131929 - DNA, 74 bp, Homo sapiens
tgagagtgaccaggcttgttctggatccctatttattaaaggttcttgctcagaactctggttttgaccttcag

SEQ ID NO: 131930 - DNA, 100 bp, Homo sapiens
tttctgtcttccttcctgggtcagtgattcccggaccctggaagagaagagggtggctaatgattaaggtcacggtctagatcacattctcgatccagag

SEQ ID NO: 131931 - DNA, 75 bp, Homo sapiens
aaaggccaagatccaggataaggaagaatccaagcaaaaatccctggattgaagcgcaaagctgaatgaaaacgc

SEQ ID NO: 131932 - DNA, 50 bp, Homo sapiens
aaggggtcaaatggttgtcatttcatagatctccaagaggtttgtctcat

SEQ ID NO: 131933 - DNA, 82 bp, Homo sapiens
tcagttggaagcagccgatccagcctgcggagcctgtggggcaggaaggaggagacagttactgtctatcccgcagacgtgg

SEQ ID NO: 131934 - DNA, 100 bp, Homo sapiens
tcagataaatctgaatggaagagtgagggcttcctcagccgccgcctcaagggctccatcaagcgcaccaagagccagcccaagctggaccgcaaccaca

SEQ ID NO: 131935 - DNA, 144 bp, Homo sapiens
gctgctggaggtttggttctcccggcagcagcccgacgcaaaccaaggatctggggatcttcgcactatcccaaggagcagttggttctggtggaattatcaggaattattgattcagacttcctctcaaaatgtgaaaataaa

SEQ ID NO: 131936 - DNA, 100 bp, Homo sapiens
gaagcttctgaaccatccacacatcataaagctttaccagagcaaggtccgtggtcctgtcagtggaagcccggatagcatgaatgcctctcgacttagc

SEQ ID NO: 131937 - DNA, 100 bp, Homo sapiens
tccaacgtgatattccttgaagtagatgtggatgactgtcagaagaacccagcaagtccctataaccttgcatataagtataattttgaatattccgtgg

SEQ ID NO: 131938 - DNA, 119 bp, Homo sapiens
ttcaaggttaattcgaaagtcttgtggaagatctggaagaaacaggccataagatgttttattgaaagaaactttcaatatcaagtaatccaaccaaccttctaagataagccttttcc

SEQ ID NO: 131939 - DNA, 100 bp, Homo sapiens
cgggactaaactggcgggctccgtggaagcgtggccggcagcgtcccggacgaggaggggtatgatatcagctttctgatcaccaacttccacacagagc

SEQ ID NO: 131940 - DNA, 74 bp, Homo sapiens
acactatgattaccaccaggagattgcaagttcaggacaaagaggtgtgggcaggccactgggccagctggtaa

SEQ ID NO: 131941 - DNA, 75 bp, Homo sapiens
tgaataaagctgttttggaactgtcaggtacctcaaagcgtgctggagaatctggtaaaagcaccattgtgaagc

SEQ ID NO: 131942 - DNA, 74 bp, Homo sapiens
gacgtcttgcctgtgtcccacttgttcgcggcctatagcggagcgtgctttggacaccatgaattttgatgtta

SEQ ID NO: 131943 - DNA, 82 bp, Homo sapiens
gctggaaccatgacaggcatgttgtataaatgtacaggatcactactcttggaatcaaagataaatccaaatactgcatatc

SEQ ID NO: 131944 - DNA, 50 bp, Homo sapiens
ttgcatccggagagtggacaagaaaggtgactgtcgttcctacagttacg

SEQ ID NO: 131945 - DNA, 75 bp, Homo sapiens
gctccacattgagagcaaaatctacaagatgatgcagggaggaggaacccacttccagcgggtgatcccagaaga

SEQ ID NO: 131946 - DNA, 98 bp, Homo sapiens
ctactgggggacatcctgttgtgaagttctaggggcaccactatcagttaaccctaaagatttctgtgggtgaaaccattttgattaccatcttgctc

SEQ ID NO: 131947 - DNA, 100 bp, Homo sapiens
agccatctttagttcgtctttcctagagagatcagaccccaacaccaacaagattcttgaaaaactgtgaagaagtgggtttgtttaatgagttggcgag

SEQ ID NO: 131948 - DNA, 75 bp, Homo sapiens
agaagcggaacagccacagcagcctcccaaggagtctgcaagttgtttggcctgtcactgctcctcatcctcctg

SEQ ID NO: 131949 - DNA, 151 bp, Homo sapiens
ttatttcttcagcatggctcatattctacttcattcagaagatcaggtacacaaatgcacgcgacaggaaccaggaaaaatcgcagccctcagagagtcgctggctgaagtatctagaaaaggactcccaagaactggagctggaaggaac

SEQ ID NO: 131950 - DNA, 82 bp, Homo sapiens
ccgccgctgagccgtcgcggagccgcgcagccctcggagcacgggcagcgaggtcacaggccccacctttgctgatggcgag

SEQ ID NO: 131951 - DNA, 75 bp, Homo sapiens
tgatgcagatgaggaggtggaactgatcctgggggacagacaaattgatggccaggagatcactgccaccgccgt

SEQ ID NO: 131952 - DNA, 74 bp, Homo sapiens
tgccaatccagaggcaagcacaatattccagaggaactctcaaacagatgcactcctgtaggaggcctgctgat

SEQ ID NO: 131953 - DNA, 74 bp, Homo sapiens
agaaaggagaaagagagctcaaaatcggagacagagtattggatgacagtgatgggattccgtggtcagaagaa

SEQ ID NO: 131954 - DNA, 100 bp, Homo sapiens
tacacaatgattaatccagtgccgcctggaggcagccggtccaacggtttggattcaggatttgttcctagtgtccaagattttgataagaaacttacag

SEQ ID NO: 131955 - DNA, 100 bp, Homo sapiens
ttcctcgtcgagcgcaacccaaggtggataatattaatgcagctgtgatggatttgaaaaaaaagaagatccgcagtctaagtgaagaggtcaaaatagg

SEQ ID NO: 131956 - DNA, 100 bp, Homo sapiens
catacatgtggttgtgctgctgcttcggggactcagccagaaagctactgaggtgtgcgactctgacactgtgctggatccagcctgcaccatcgagatg

SEQ ID NO: 131957 - DNA, 75 bp, Homo sapiens
atgttcagataaatctgaatggaagagtgagagataacaggaagagagcctggttaccatttggtggaacaatcc

SEQ ID NO: 131958 - DNA, 98 bp, Homo sapiens
caagctcggggccgagcgggaggcagccgtggccgaggagtgcccgtgcgcagcggagatgccaccttccccaaagctatggacaacgtgacggtccg

SEQ ID NO: 131959 - DNA, 98 bp, Homo sapiens
cactttcgccagcccgtgccgcgagcgcggcctgcaggagggtcccctcctcggccgccccccgcccggccgcccgccctcgggcctccccccgggcc

SEQ ID NO: 131960 - DNA, 75 bp, Homo sapiens
ttgtaaagcaatgcattgaagctgttgagaaaagagattagtgggatggtttggccatgaactcagcaccagatt

SEQ ID NO: 131961 - DNA, 80 bp, Homo sapiens
tggaagcacgcgggcaagcaggactacaaccgcgaggaggacgccgcgctcttcaagattcctggtcgggtggcttccag

SEQ ID NO: 131962 - DNA, 82 bp, Homo sapiens
cacccaccgccgccgcctcccaggttcaaaatggaaagtatttattgaccaaattaacaggtctttggagaattacgaacca

SEQ ID NO: 131963 - DNA, 100 bp, Homo sapiens
ggaggaggcagcggcgcggggacctgaggatccccgtggcccccggcgctcaccccggactcagggcgaaggcccagaatttatagagcggcagcacgca

SEQ ID NO: 131964 - DNA, 88 bp, Homo sapiens
acaaaaccagcgcggcctgatccaattgatatggatgaggcctttgaagaagatggtggagagaattcgcaagttccagattctcaat

SEQ ID NO: 131965 - DNA, 82 bp, Homo sapiens
ccctgaaggcagacgggataatgtggttggccaaggcctgttggtccatccagagtgaaatctatgacaagttcaagcagag

SEQ ID NO: 131966 - DNA, 98 bp, Homo sapiens
gcgcccagggaccccagttcccgcgagcagctccgcgccgcgcctgattgactatattgtggagtatgactatgatgctgtacatgatgatgaattaa

SEQ ID NO: 131967 - DNA, 100 bp, Homo sapiens
aatggaacatcagcaatgcttctgactgcttttcaggaagccttggacgctgcaggtgataaacttgtagtagttgacttctcagccacgtggtgtgggc

SEQ ID NO: 131968 - DNA, 90 bp, Homo sapiens
acaactgccccatctgccggctgcgctgttttggagtcagcggaagatcaccaaggccagggagtggttccaccgcactgtgaagattga

SEQ ID NO: 131969 - DNA, 146 bp, Homo sapiens
atcgaccgcaccatcggcaagggcaacttcgcggtggtcaagcgggccacgcacctcgtcaccaaggccaaggtgaccactgactgggaccttcagaagggcactggctgcactgagggccacacagggacctcagctgcagcgcc

SEQ ID NO: 131970 - DNA, 75 bp, Homo sapiens
cttcgtcatgttcttcgcgccctgggtttccaggcctgaggtgcccgccctggccccaggagaatgaaccagccg

SEQ ID NO: 131971 - DNA, 95 bp, Homo sapiens
aggaactgggtgctcctgcccgctggcccctcgcgcgtgaggatctatctcaggttaaagaggaggaagatggcagataaggttctacctcagcg

SEQ ID NO: 131972 - DNA, 82 bp, Homo sapiens
cgctacttcaaagggtactttttagaaccaaagtgctgacttgctcatcagttttgcacagtggcaattttgggactgattt

SEQ ID NO: 131973 - DNA, 99 bp, Homo sapiens
ctatggaagcagaagaagctgaggatgaagaagatgcatttaaatcaaacggtattgagatggattgggttatgaaacataatggtccaaatgacgcta

SEQ ID NO: 131974 - DNA, 98 bp, Homo sapiens
gacgagctgccactgcccccgggctgggagatgaccttcacggccactggccagaggtacttcctcaagtatgaggatacatgggctgcacttcacag

SEQ ID NO: 131975 - DNA, 82 bp, Homo sapiens
gtacagaggtatacatgaaggtcagcatcaatggtgttctcagctacccatgttgagctatcatggtgaacttacttcagat

SEQ ID NO: 131976 - DNA, 112 bp, Homo sapiens
ggcgacctgggcaccagcaggacccgaggccaggagccaggggcccagaaggactgagcagggggaggaacatttaagctgatggaagtggaagtggaagttgctgtacatt

SEQ ID NO: 131977 - DNA, 100 bp, Homo sapiens
ttggaaagtgatccaccttacatggaaatgaaggagatctataaggacaggcagaaattctcagaacaggttttcaaagtggcctcctcagacctggtca

SEQ ID NO: 131978 - DNA, 100 bp, Homo sapiens
ttcgtctccgagtttgcgactcgcggaccggcgtccccggcgcgaagaggctggactcggattcgttgcctgaggcttggacttaaggatcagcaggaga

SEQ ID NO: 131979 - DNA, 101 bp, Homo sapiens
acaggtcaatcattttcaaaaagattccatttatagacacccttcattgcaagttcttatttgtaagcatccgcacttccactaatagccaagtagacaag

SEQ ID NO: 131980 - DNA, 115 bp, Homo sapiens
ctttcccgcgcaagggggacaggctggactgaaagaggacacgggaagaacaaagacttagactcgacatttatgcagtgtgtgattctttctaaaacaactccctggaagagag

SEQ ID NO: 131981 - DNA, 83 bp, Homo sapiens
gcgcctttgtgcgcgcgccgagggtcggcactcttcaccctcccgagccctgcccgtctcggccccatgcccccaccagtcag

SEQ ID NO: 131982 - DNA, 107 bp, Homo sapiens
caggcaacgtgttggaccttccggagcttctcagaagacagagggttttcttttgagatggcagatgatcagggctgtattgaagagcagggggttgaggattcagc

SEQ ID NO: 131983 - DNA, 101 bp, Homo sapiens
actggccgaaggggcgtctgcggctctccgccgtccccagccctgcctctccctgggctctggtgctggagaatctggtaaaagcaccattgtgaagcaga

SEQ ID NO: 131984 - DNA, 76 bp, Homo sapiens
attcccgcgcccctcggacggccacgagactcgggagtgaaaaggctctcagtgtctgagttaaatgaaatcctgg

SEQ ID NO: 131985 - DNA, 101 bp, Homo sapiens
agcgtttagaagaatctattaaaacaaatgagaagctacggaaacagttggaacggcaaggatctgaatttgttcaaggtcgttccaggggtagaggaggc

SEQ ID NO: 131986 - DNA, 83 bp, Homo sapiens
gccctcatcctggttctggaatcctcagttcaaggctctacacagagaacagagggagctggttgctgtgctgagggagcctg

SEQ ID NO: 131987 - DNA, 100 bp, Homo sapiens
agaaacaattcttcgacatactctccagcttcaagttttacagaaggcgacacatgttgttcagagtgaagtggacaaatatgtagatgatattatgaag

SEQ ID NO: 131988 - DNA, 83 bp, Homo sapiens
gagatgtattcagtggaggaagctgactgcaaaattcaaaatggggctcaaggtattcgtttcatctacaccagagaaggcag

SEQ ID NO: 131989 - DNA, 90 bp, Homo sapiens
attcccttggctgttaatttctcagaggtaaatggccaagacctaaagaacctgctgcaccaggatgctgtagacctctttcgtaatgca

SEQ ID NO: 131990 - DNA, 75 bp, Homo sapiens
gagaccaacctggccaacatgtgacaaggacggtgtgtgcagaacaatgtgacggcagatgctacggaccttacg

SEQ ID NO: 131991 - DNA, 100 bp, Homo sapiens
ggccccctgagtgagtccggtctcccggcgaaagtgagcgaggtttgcccggagcgcgcacgaggagaagccgtacaagtgctcagagtgcagcaaggcc

SEQ ID NO: 131992 - DNA, 96 bp, Homo sapiens
ggaagtgaaggcagatttccctccttcgtcgctgttgctgccgccatacgcgctctccctgtttagcccgggaccatggctggttcccgcagctgc

SEQ ID NO: 131993 - DNA, 75 bp, Homo sapiens
acccggctgcagaaggatctccggacctacctggcctccgtcaaaggatgactttgacaacgatgtggatgctct

SEQ ID NO: 131994 - DNA, 90 bp, Homo sapiens
cgccagaggaaatttggccagttatccaattgatgaactagtagatagagccaaacaatcttttcaagagagaactcgatgccaccgcaa

SEQ ID NO: 131995 - DNA, 75 bp, Homo sapiens
gaagatcttcaccttaaaatcaaagccacaagacactgctgataaggatgaaccgcatgcacgagtctctcatgc

SEQ ID NO: 131996 - DNA, 100 bp, Homo sapiens
gtctctgtcttggctggacccaggtgggcagatcctcagatcaggtccctcagacttaactcgggaaatgcattcggcaagaagtacccgctgattcgag

SEQ ID NO: 131997 - DNA, 83 bp, Homo sapiens
gcgtacatactgaatgatctctacatctcagactactgtgtgtggattcagaaagtcaaccggatcgagctgggagatgtgac

SEQ ID NO: 131998 - DNA, 80 bp, Homo sapiens
ccaccgctgccctcagctccgagtccagggcgaggaggctactcacagtcgaactacaactccccggggtccggccagaa

SEQ ID NO: 131999 - DNA, 100 bp, Homo sapiens
gggacccctgtgcaagaacggatctccctctccgctggagaatgctggaggagaccttaaggatggccaccaccactatgaaggagctgttgtcattctg

SEQ ID NO: 132000 - DNA, 100 bp, Homo sapiens
acttttgcactgtaaaactttacacattgtgctattcactctgctttacaaggtgctttgtaacagagccagactggtttcctatctcccaggattttgc

SEQ ID NO: 132001 - DNA, 50 bp, Homo sapiens
ctcacatcaacttctaccagctgttaagtgggcagaccaacatccacctc

SEQ ID NO: 132002 - DNA, 100 bp, Homo sapiens
gcagccggagcccgggaggggccgcgccgccaccgtctgaactaggatgtcccgacatgaagatgaagttggagcccttgtttttgacattggatcctat

SEQ ID NO: 132003 - DNA, 89 bp, Homo sapiens
gcgaggggaacggaggccagagctgcggaacctcactctggagcctgagatcatgcctgctgccactgacaaccgctatatccgcgcgg

SEQ ID NO: 132004 - DNA, 95 bp, Homo sapiens
agacgctgtgctcgctggcaccccgaacgggttgcttcccccgctgcgaggatgataatgaagataattcaaatgatgggacccagccatccaaa

SEQ ID NO: 132005 - DNA, 75 bp, Homo sapiens
gtataatggactctcagaataaaggaaagacctcagagtgttctcagccagtcttcagagacctgagattaaact

SEQ ID NO: 132006 - DNA, 93 bp, Homo sapiens
cttgaacttaatacagcaagaaagaccatcaagtttaccagttttgtcaggttcttagaaggctattatattgtgttaataactaaaaggagg

SEQ ID NO: 132007 - DNA, 100 bp, Homo sapiens
aagaaatgggctagatatttccagaggctgcaatctggaggcgtttggaggtattcttgcatgagcttccagtgtaaaagaggccacatctgtaaggcag

SEQ ID NO: 132008 - DNA, 75 bp, Homo sapiens
gggggttatggtgggaggagccgatactgagcttcttcctatttgccatgggctggagtgcagtggcatgatctc

SEQ ID NO: 132009 - DNA, 96 bp, Homo sapiens
ccatgtgcgtgtgccaggaccccaccagctgcccagcccccattggcgagtttgagaaggtgacaatctccaatagacttgtgtcttcaccttgct

SEQ ID NO: 132010 - DNA, 89 bp, Homo sapiens
cgtcccctatccaagtagcctgctgtcgcccagccgcgaccaaagagaaccctgtacagtaagaaatatggtgtggacctcatcagata

SEQ ID NO: 132011 - DNA, 100 bp, Homo sapiens
gagccatcctctacaggacccgctttctaccattaaggttggcgtgcagtggtgtgatctcagctcattgcaacctctgcctcccggactcaagcaatcc

SEQ ID NO: 132012 - DNA, 100 bp, Homo sapiens
acctccggatactcagtttgtaaaaacatggcggatccagaattctggagatttttcaagagcttgggatgttcttcttgaccatatacagtcagcagca

SEQ ID NO: 132013 - DNA, 101 bp, Homo sapiens
atgaaacatgtgctcccttaactgaggatgaaatgagagaattccaagttattagtgaacaggccttcccttcttcttggtggtgttcttgagtaagataa

SEQ ID NO: 132014 - DNA, 97 bp, Homo sapiens
ggagacgtatccagcaagcggaacctctgggaaaagcaatctgtggataaggtcacttcccccactaagatgccatggacaatattaccaggcagaa

SEQ ID NO: 132015 - DNA, 96 bp, Homo sapiens
aaaggtgaccaagcccaaagaggagaaagatgcttctaaggtttccacagtgcctacacaacctgataatccattttctcaccctgacaaactcaa

SEQ ID NO: 132016 - DNA, 90 bp, Homo sapiens
tgacagatggggccttctggggactgtccaagatgcatgtgctgtatgaaaatgaaagtcttcagaatggaaggaagtcaactgaatttc

SEQ ID NO: 132017 - DNA, 50 bp, Homo sapiens
cgggcagccgtggtggaccggaaaggaagcttgctgtcttcgatacgtgg

SEQ ID NO: 132018 - DNA, 83 bp, Homo sapiens
tccacccaccgccgccgcctcccagggtctccgtctctccaccgggggcttcatccttccagggaggagaagagggactccag

SEQ ID NO: 132019 - DNA, 75 bp, Homo sapiens
gggtccctgaagagggaagacacgcggaaacaggtgtctactatgaaccatcctgtactcagaatgtgaatcatg

SEQ ID NO: 132020 - DNA, 82 bp, Homo sapiens
ctatgaagaagattttgaggctccttttttggaaatgtctgcagaattttttcaggtaaagtcagtgataaatcttttgttt

SEQ ID NO: 132021 - DNA, 90 bp, Homo sapiens
tggagccgtgaacccagccgcgccaggcaccatggctgaggaaacagctccagcagttcttgagcggcaccagggggccctgtactccct

SEQ ID NO: 132022 - DNA, 83 bp, Homo sapiens
ccacatcaaatatgctgtcaccactgggttattgacccagtggctccacgatatgttgcattactgaagaaagaagtgatccc

SEQ ID NO: 132023 - DNA, 101 bp, Homo sapiens
tgatctgttactgcaacttcagcgaattgctctgctgcccaaaggcaagtgtccagagaatggctgggatgaaagtacacttgaactctttttacatgaac

SEQ ID NO: 132024 - DNA, 100 bp, Homo sapiens
tatctaacatggagaagccaagatgtggagaactgtgctgtacggggaaagctgacgtactcccctgccctcaacaagatgttttgccaactggccaaga

SEQ ID NO: 132025 - DNA, 100 bp, Homo sapiens
ggaaaataaaatgcataactatactgattggatgctgctcaaaatcagcctacatgccatctttgctggatccagaacgaagtttatttgaccaaggagt

SEQ ID NO: 132026 - DNA, 100 bp, Homo sapiens
aaaggatgacatatttttggacctgaaacagaaattctggaacacctatatgcttaacagagcgttccaaaaagaggactctccagctactttttattgc

SEQ ID NO: 132027 - DNA, 95 bp, Homo sapiens
caaggacagttgcatcatcaaagaaggagacgtggggtcactggtgtatgtcatggaagaacacagatatgtagaactcttcttgaattctacag

SEQ ID NO: 132028 - DNA, 75 bp, Homo sapiens
aacttggccatcctagagaaaattaaaaagaaccagaggcaagattacttaaatatgaccctgatgatctgcaat

SEQ ID NO: 132029 - DNA, 83 bp, Homo sapiens
cacctcagcggggagttcgggaaaccgtattttatcaagcagctgcagctactggaggttctgttctcaatgttgctgccctg

SEQ ID NO: 132030 - DNA, 100 bp, Homo sapiens
cgatgcggaaggcgagtgccaggagggagagatcctggccacaggcagtacggcatggtgctcgtctccaaaaaaagttggtgatgacattgccaaggca

SEQ ID NO: 132031 - DNA, 95 bp, Homo sapiens
gcctgagcaggagagacagatcacagccagagaaggggccagtcggaaagttcacgcaaagaatctgctccacaagttttgcttccagaagaaga

SEQ ID NO: 132032 - DNA, 100 bp, Homo sapiens
gaacagagggtctttaggacacagattcttaaaagtgcagggccgttgctccagggagaactgcaaatatcttcatccacccccacatttaaaaacgcag

SEQ ID NO: 132033 - DNA, 100 bp, Homo sapiens
ctcacctgtgcgggatggaacaaaagctgaccccattgcgcaggtccaccaggccttctgcaagaacctgctggagcgagctatagagtccttggtgaaa

SEQ ID NO: 132034 - DNA, 100 bp, Homo sapiens
gtttacagcatcaagtataataaccaattagcaactcggactgcacaagctatttttgatgacagctatttggattcccttggggctcagcatcggggtc

SEQ ID NO: 132035 - DNA, 100 bp, Homo sapiens
cttgcagccgcgcctcggccccatggacgccctgtgcggttccggggagctcggctccaagttctgggttcaagaacatgaagactcgggtgactcagaa

SEQ ID NO: 132036 - DNA, 90 bp, Homo sapiens
cctgcagattgacgtctgggacggagactccctgctgctcatcggatctgctgccgtccagatgaagaaaaagcttgtggtgaagggggg

SEQ ID NO: 132037 - DNA, 75 bp, Homo sapiens
gggaacaggcttcggcgaacacaaagattaaaaggggacttggcatataattatagaggaccacgaacaaaagat

SEQ ID NO: 132038 - DNA, 100 bp, Homo sapiens
gaccttggacttctcagcctccagaatgatgcgtctgttactagagtggagagtctaccttcgtctcacatgtgccacaaaggatggcatggcccgggag

SEQ ID NO: 132039 - DNA, 101 bp, Homo sapiens
acccccaggagcagaagtccttcttcgccaaatacgttggtgttcgaggaagagacattgttgttcttggtgtggagaagaagtcagtggccaaactgcag

SEQ ID NO: 132040 - DNA, 82 bp, Homo sapiens
gtgtccagaacgtgccatggagacgcttaacgatattaataaggcagcggaaagaagaaatatgaatacggctccatcaaga

SEQ ID NO: 132041 - DNA, 75 bp, Homo sapiens
agtcagaagaggactggaagacgaggtggcaggtgtcacagctttagcctgtggaatgatagcagtagggtcctg

SEQ ID NO: 132042 - DNA, 53 bp, Homo sapiens
gtgtgtggcacaaaatgcaacacgcttttgaagaccctgatagtgccgtcgat

SEQ ID NO: 132043 - DNA, 100 bp, Homo sapiens
ttctaagtccatgtgccaaaggctgccaggaaggagtcaagagaatccatcccattaaatgacctgaagtcagaagtatcaccacggatttcagcagagg

SEQ ID NO: 132044 - DNA, 100 bp, Homo sapiens
cttcatcccggccaaagctgactcagtggtggtgctgctgtgcaggcaaggggagagccagttgcgcagagccctgcaaccagcagtccagggagaagtg

SEQ ID NO: 132045 - DNA, 90 bp, Homo sapiens
gtggactcagcagcagcaactgtgggactttttgactacaattctcaacaacaggtgccaaaagaacatcttttagtctcgattcctctc

SEQ ID NO: 132046 - DNA, 82 bp, Homo sapiens
cggcagtcgcgctgagggactcggctcaggagaactacgatgacccgcacaaaacccctgcctccccagttgtccacatcag

SEQ ID NO: 132047 - DNA, 100 bp, Homo sapiens
cagcaccgcagatgttgtcaaggtggcctaccaggaggccaggggtgtcgccatgccccggtttctctggattctgtgcttctccatggaggaaactcaa

SEQ ID NO: 132048 - DNA, 90 bp, Homo sapiens
cggcggaggcggcccgggaatccgcaaggacgctttcgccgacgccgtgcagcgggcccgccagaaaaacacaccttgactttagtcaga

SEQ ID NO: 132049 - DNA, 98 bp, Homo sapiens
cagaacagttggatcttgctcagtctctgtcagaggaagatcccttggagaaaatgcagaagtctccatggacgtttccctggcttaccgtgatgacg

SEQ ID NO: 132050 - DNA, 75 bp, Homo sapiens
gaggtctggaaccagctgctaagccagaagcgcgtgtgcatctgcagacgcagcaggaggtgaagctgcgcatga

SEQ ID NO: 132051 - DNA, 83 bp, Homo sapiens
gggagatccgtagctcagacgccaggacatcccggaagctgggaaatgggggatatgagactttctactcggaatatcctgag

SEQ ID NO: 132052 - DNA, 100 bp, Homo sapiens
gcagtggatccgggccaagtacgagcgacaggagttcatctacccggagaagcaggagccctactcggcaggattcggacggagagcgcgaggactcggc

SEQ ID NO: 132053 - DNA, 98 bp, Homo sapiens
caagagagacatttctggctctgaaggcgaacgcttcgctggccatttaggagctctgctcaaagccagacgggagttctgggaaatcgttcattcat

SEQ ID NO: 132054 - DNA, 127 bp, Homo sapiens
gcctcaacaagggccacaaagtgaccaagaacgtgagcaagcccaggcacagccgacgccgcgggacaatgcagatcttcgtgaagactctgactggtaagaccatcaccctcgaggttgagcccag

SEQ ID NO: 132055 - DNA, 75 bp, Homo sapiens
gttacaaggctgcggacttccagctgcacacacatgtgggtaaaagcatgtctacgaagaaaagtatgtgaacag

SEQ ID NO: 132056 - DNA, 98 bp, Homo sapiens
tccgcgcccgccgcgccgggagcagcaccgcggggccagcggagctggagtttgttcagatcatcatcatcgtggtggtgatgatggtgatggtggtg

SEQ ID NO: 132057 - DNA, 99 bp, Homo sapiens
gtggtggcttgtggtgcggcctcaccatacaggaacagggcagacgttagcgtgagtgatcactctcaatcccggatgagcacaatgcctggactcccc

SEQ ID NO: 132058 - DNA, 51 bp, Homo sapiens
acctcatcggggcggtgattgccgggtcaaaatgcagatcttcgtgaaaac

SEQ ID NO: 132059 - DNA, 80 bp, Homo sapiens
cttatcagtccccagggggaaagactctcacaaggtttggagtgagccgtagatccccagcctccattgacaggcagaac

SEQ ID NO: 132060 - DNA, 74 bp, Homo sapiens
cggcggctgatttagaaggaggttcaggctacggtgagccgaagaccctgtcacactcactgaaaatggcggac

SEQ ID NO: 132061 - DNA, 103 bp, Homo sapiens
gtcacgctgctggtggcccgggtcttccagaaggctgtagaccagagtatcgagaaggagtccaaaactacttacctggaagaccttccaccaccccctgagt

SEQ ID NO: 132062 - DNA, 100 bp, Homo sapiens
cacactatggcgctgaaacggattaataagtgtaatgttcaagctcagaaatgccttatgtggatcgtcagaatcgcatttgtggttttctagacattga

SEQ ID NO: 132063 - DNA, 101 bp, Homo sapiens
agaagtacaatttcttcacctttcttcctgggctcatcagcatcggatcttcctataactacggcaatgaggatcaggcagaattcctctgtgttgtctcc

SEQ ID NO: 132064 - DNA, 75 bp, Homo sapiens
cattatgacggctacctggctaaagacggctcgaaattctactgcagcacttgcacctcctgcgccgccgccccc

SEQ ID NO: 132065 - DNA, 100 bp, Homo sapiens
ggaagaaagaaaacctaaagtatttgccgttggtgattcaaggaaatcatgagtggaggatctcaagtccacattttttggggtgctccaattgctccac

SEQ ID NO: 132066 - DNA, 74 bp, Homo sapiens
gagtttgtagcctattggaggaaaacacaccaagctgatcttgcatctttaatggataaaacatttgagagaaa

SEQ ID NO: 132067 - DNA, 108 bp, Homo sapiens
gcctctcagaaatttcttaggaaatttgttgggtctttcatgaatgtagaatggaattttccagaggctacatcacgtgcaacactgtgccagaccaaaagcagaagc

SEQ ID NO: 132068 - DNA, 98 bp, Homo sapiens
cagagccaggagacactgcagacagtgaccatctacagtgggccatgcacagacacagctcatgtctcattaatcacaccaacaaaaagatcctgtgg

SEQ ID NO: 132069 - DNA, 101 bp, Homo sapiens
aaccatgtctccatccccgaccgccctcttctgtcttgttgctctatatgcaatcagtgctgtctactttgctggagtgatggtgcgactgatgttgactt

SEQ ID NO: 132070 - DNA, 50 bp, Homo sapiens
aggtggcagccatctccttctcgagcagccagacacagtctccaacgcca

SEQ ID NO: 132071 - DNA, 100 bp, Homo sapiens
gagagcactggggaccgagacccggcaccacctcccggtccgccctccaggttacttgaatttccactagaggagcagaaatgccaccaatgccaagtgc

SEQ ID NO: 132072 - DNA, 75 bp, Homo sapiens
gctcttttaccgatgctttaacatacagccactagcacttttccagccattaactccaggctctcgagaatttga

SEQ ID NO: 132073 - DNA, 80 bp, Homo sapiens
tcctggaggccccaaatttgaacctcttgttcgagacatcaacctacagagttcatgatcaagtgttgcccacaccaaat

SEQ ID NO: 132074 - DNA, 51 bp, Homo sapiens
gctgccgtgaataggcagcctaaaggcctctcttctgtggaaactctgaag

SEQ ID NO: 132075 - DNA, 74 bp, Homo sapiens
cgctgttttgccggaggagcccctcaggcccgtctgttcctcacacaccccgcccaaggacgtgcctggcagcg

SEQ ID NO: 132076 - DNA, 50 bp, Homo sapiens
cgggactctgaggaaaagctcgcaccaggtctggcggcttctctgttgac

SEQ ID NO: 132077 - DNA, 100 bp, Homo sapiens
cagtcgccaactgatgtctacaggtggataatattaatgcagctgtgatggatttgaaaaaaaagaagatccgcagtctaagtgaagaggtcaaaatagg

SEQ ID NO: 132078 - DNA, 83 bp, Homo sapiens
ctggagcccctcctcctccacatgtgcgaatccaggagccacagaaggtgatgggcagaggcttcagtgtccccttcgcctcc

SEQ ID NO: 132079 - DNA, 100 bp, Homo sapiens
tgcctctagagtggactgtgttgggaagttcttcacttgaagctggctgcgtcctggtgttgagcaggaacttcgtgcagtacgcctgcttcgggctctt

SEQ ID NO: 132080 - DNA, 100 bp, Homo sapiens
cccccagagaaggtgcaggcaggcgccgtgaggaacacgcagcatctctgggaggcagcttcatcagccttgagcagtctgggccacgtgtacacagcca

SEQ ID NO: 132081 - DNA, 90 bp, Homo sapiens
gaaacaggggagcaaggtgcaagagtccacaaagggacctgatgaagcgaagatcaagaccctggtgggcagcagtgggaccattctgac

SEQ ID NO: 132082 - DNA, 100 bp, Homo sapiens
gtggacgtggatttggggatggctataatgggtatggaggaggacctggaggtgccacacctccctggatgatccaagatgaagaatacattgctgggaa

SEQ ID NO: 132083 - DNA, 75 bp, Homo sapiens
caggacctggaaaaattacatgaaacctaacgaagcatatgaaatctaaagcacacatgaaaaaatgcctggaat

SEQ ID NO: 132084 - DNA, 97 bp, Homo sapiens
aggagtcctgcttatcacaatgagttaatagagtggatacaaccttgctgaagatgaagaatatacaatattgaggatatttttttctttttttttt

SEQ ID NO: 132085 - DNA, 75 bp, Homo sapiens
ggatatatacacaaaggcactgacgtcataccctaatgatcccagcaagataatgtcctgtcttctaagatgtgc

SEQ ID NO: 132086 - DNA, 87 bp, Homo sapiens
cagcaacgtgcggtgggaccacgagagcatgggcaccagttgcgtcttgaagtgccatcagctgtaaccaaagttccacatcccaag

SEQ ID NO: 132087 - DNA, 100 bp, Homo sapiens
ctgggcttccacacaactccagtgctaactcaacagttctctttgccatgaaggaggataatgagaaggtgcctactttgctaacggactacattttaaa

SEQ ID NO: 132088 - DNA, 100 bp, Homo sapiens
ctcggccgccttccctctcgcccacctctacccggcagcgggggcagtcagagcggagccaagatgcgaatgggaatttgaatatggaggctacaggaac

SEQ ID NO: 132089 - DNA, 75 bp, Homo sapiens
tgtgcgcgcgaaggagcggaagaatggcagtgctcaaactcaccgaccagtgggtaattccagaattgattggcc

SEQ ID NO: 132090 - DNA, 100 bp, Homo sapiens
aattgttaatcctctgagaatccatggtctgaaaaagttcttttcttgtcgtggaattgcaattgcagttgaatatttttggaagcttggcaacagaaac

SEQ ID NO: 132091 - DNA, 98 bp, Homo sapiens
atgaaggcagtggacacacagcatggagaaatccttcgcaatgtcaccatcctacgagcgcgtacttgctttgtaagtgatctgaagcgaggactaaa

SEQ ID NO: 132092 - DNA, 113 bp, Homo sapiens
gagacaataaagcttctcctttgggttgtactcatagattgtgtaggcgttggtcttctgatagcaactttaatgtgggagatgcacttatttacatggaaccagagaaacaa

SEQ ID NO: 132093 - DNA, 100 bp, Homo sapiens
cccagatcgcggagctcaagatgcagctggccaagaaagaggaggagctccaggccgccctggccagacggggaagcggagccaacatgccagtggcccg

SEQ ID NO: 132094 - DNA, 75 bp, Homo sapiens
ctggaccgtcgccttgctcctcgccgcggcggggactgcagaattaaatgtgagggagtctgacgtaagagtttg

SEQ ID NO: 132095 - DNA, 124 bp, Homo sapiens
ggcggaagaccgcgcgcagggcctgcagcgggagctggacggcgagcgcgagcggcgcgagaaagtcgcaatggaagaagagatcgccgcgctggtcattgacaatggctccggcatgtgcaaa

SEQ ID NO: 132096 - DNA, 153 bp, Homo sapiens
cgcaggtcccggatgttgcggacagtatgaggcaagcgcagggggacggggaccagcagctgtcgccgccgctctcaggccatctgctttatctgaagattttcagctgatgaagaactaggaggctcaaacactatcttacctgagtccagg

SEQ ID NO: 132097 - DNA, 75 bp, Homo sapiens
cttctggaggatgatttgggaatatagtgtccttgaaacttcggctgttctcaggaaattctaagcatcgctgcc

SEQ ID NO: 132098 - DNA, 100 bp, Homo sapiens
acttcctattccactggattgggaaagaccatggcaggtatatgatgatggaaagtatgtgtatgtagtaacagaacttatgaaaggaggtgaattgctg

SEQ ID NO: 132099 - DNA, 98 bp, Homo sapiens
agaagggcaggcccccaagcagcagcaggactcagaggcgagagtggccccagccgggccagaagcagctcatttacagaaattgatgtctgataaga

SEQ ID NO: 132100 - DNA, 73 bp, Homo sapiens
cagattatggctttgtccccacccagcactgatgatattataaaggtgtcaaattgagaaccaggtagatccc

SEQ ID NO: 132101 - DNA, 100 bp, Homo sapiens
gggggcgcgggcggcggcgccggcaggaagggtcaggataaacatgaagaatattttgctgagaacttcggcggcccagaaggggagttccacttctcag

SEQ ID NO: 132102 - DNA, 100 bp, Homo sapiens
tcccagcgatgtgactgctcaatggagagaaggaaagtcaatcgtaggaagaacacagtacagaatgtgacagtgatgataacatgggtgccaaaaatac

SEQ ID NO: 132103 - DNA, 82 bp, Homo sapiens
ggaacattgatggtgaggcttgggtagcaaatgagagcttctatccagtttggtgccctggttgtcagatgttggaaagcag

SEQ ID NO: 132104 - DNA, 100 bp, Homo sapiens
ccgtctgcgatgcagggcggcggcctgtaatcccagcgaccgccagggtcagctacacaacctggatcttaccacagtttggatatgactgaggctctcc

SEQ ID NO: 132105 - DNA, 100 bp, Homo sapiens
cagccctctgctgcctcttgccatgtctgcccggttccgcctggccatgagcctggctcaggcctgcatgaaaccagccctgagcaaaggggttctgagg

SEQ ID NO: 132106 - DNA, 98 bp, Homo sapiens
gccgggagagcctgggccccccggagagaaaggagaggcgggcgacgaggaagatatggggatgacatatgcggagctctcggtctatgggaaactca

SEQ ID NO: 132107 - DNA, 100 bp, Homo sapiens
acggctcacctgtgcgggatggaacaaaagatgttgctgacaaaaatgcttctaacagaaattctgctggatgtcacagatgaagaaatttattacgtag

SEQ ID NO: 132108 - DNA, 100 bp, Homo sapiens
tatgaagataattgcatctcttattgcattaaacaccccgagcagaaggcagaccggtattttgtgttatacaaaccgccccctaaagacaacattcccg

SEQ ID NO: 132109 - DNA, 100 bp, Homo sapiens
tttgattcttttgaaccaggaatgtttcctcctactcctctttcacctgccaggttcaaatgcctggaatgatgtcgtcagtaatgcctggaatgatgat

SEQ ID NO: 132110 - DNA, 111 bp, Homo sapiens
tctgaccccaagagcatctccttcagtgtggtcttccaggaggccgaggacacaccgctggatcagtgtaaggcagagttgggcctaaatgagcaccatcaaaatgaagtt

SEQ ID NO: 132111 - DNA, 90 bp, Homo sapiens
gagaagcagcacgcctggctgcccttaaccatcgaggtttcacagatggcagtgttacattgaacaaaggagacatcacccgggaccggc

SEQ ID NO: 132112 - DNA, 95 bp, Homo sapiens
agaggaaactgacggagacgcagatgtggacttgaaagaagctgcagcggaggaaggcgaggtcagaaagcaacattgaatgcagaagaaatggc

SEQ ID NO: 132113 - DNA, 80 bp, Homo sapiens
atatggctggacagctagctgcttatggctataaaattacagagaagatggcgaattagaagatggtgaaatagacgatg

SEQ ID NO: 132114 - DNA, 75 bp, Homo sapiens
ttgtggtcccgcctcacctggggtatggagaggaaggaagaggagtccttcaataatgttaaacagtggctgcag

SEQ ID NO: 132115 - DNA, 100 bp, Homo sapiens
aagactgggaggaactggggtgataagaaatctattcactgtcaaggtcacttagaaaattggaattgtaccatggaacttcataatagattctctggga

SEQ ID NO: 132116 - DNA, 97 bp, Homo sapiens
ttctcaggggaacgatgcaacacacctgcacgcaacagaagaaggaaaggacttagaagccttacaaatacatctgtgcattcttgcttcagacttt

SEQ ID NO: 132117 - DNA, 82 bp, Homo sapiens
cgggcgctcgagacttaccagagccacaagacctcctgccccccgaggtctgcagtctcctgaacccagcagccatctacgc

SEQ ID NO: 132118 - DNA, 100 bp, Homo sapiens
aggactcaggagcaaatcagtaatatgcattatgttcaagataaattatttgtgggtctagaacatgctgtacccacttttaatgtcaaggagaaggtgg

SEQ ID NO: 132119 - DNA, 83 bp, Homo sapiens
cagaaagtagatgaagatgagattcagaagatgcagatgctttggagtctgcaatgaagaatggcctgtggggtcacgctctg

SEQ ID NO: 132120 - DNA, 74 bp, Homo sapiens
gaactcccggcatgagcgtgcgcgaaggaagttacacgtcaagtcaaagtcttgggcgtctttggtactggctt

SEQ ID NO: 132121 - DNA, 98 bp, Homo sapiens
gccattccagcactggactcatggaggctgagcatttattcagcgaacacttgccaagtatttcaatccttgctatgccactgctaggttaaaaccaa

SEQ ID NO: 132122 - DNA, 100 bp, Homo sapiens
gccctacactgctgtagaggtcatgctggaagtgtagattctatagctgttgatggctcaggaactaaaggtctcactctctgacctcagctggagtaca

SEQ ID NO: 132123 - DNA, 90 bp, Homo sapiens
cagaaaccccgttgacaaggcactgctttttcatgacggtaaattcaactggaagggaactattaaagcaattctgaaacaggccccaga

SEQ ID NO: 132124 - DNA, 104 bp, Homo sapiens
cgcagtacacctgccccatctgcctggaggtctatcaccggcccgtggccatcggcagctgcggccacacggtgctttcttctgcgacctggtactcatctacc

SEQ ID NO: 132125 - DNA, 74 bp, Homo sapiens
ggaaaactggcatgaaggcaaagaaaacatcagagctgctgttgcagcggggtgggcgcggagaagacctgccg

SEQ ID NO: 132126 - DNA, 101 bp, Homo sapiens
gccacccccaggacgccttctgcaactccgacatcgtgatcagggccaaagcggtcagtgagaaggaagtggactctggaaacgacatttatggcaaccct

SEQ ID NO: 132127 - DNA, 101 bp, Homo sapiens
catcatcgacagtgccttcggccagagcggcaagttcaagatccacatcccagtttttcagaagaagtgaagtcaagatgaagaaccatttgcttttctgg

SEQ ID NO: 132128 - DNA, 129 bp, Homo sapiens
gtctgggccatgtctggctgtgatgctcgggagggagactgttgttcccggagatgcggcgcgcaggcttgttgattggtgctggctgtgccctctaccccttgggctgggacagtgaggaagtccggc

SEQ ID NO: 132129 - DNA, 83 bp, Homo sapiens
ctctgaggaggattcactcaggaggactgatcctttgaaatactccagccatgactaaaagagaagcagaggagctgatagaa

SEQ ID NO: 132130 - DNA, 82 bp, Homo sapiens
cggttcagccctttgatgaccgcagcagaaaggagaatcacttgaacccaggaggaggaggttgtggtgagccgagattgcg

SEQ ID NO: 132131 - DNA, 50 bp, Homo sapiens
caagcgtataccatgcaatgccttgaattggcagcaatgaaacagattct

SEQ ID NO: 132132 - DNA, 100 bp, Homo sapiens
gagtgtggtcagtgccttagcctggcctggatgcctaccaggccccaccaacacctagctgctggatattataatgatggagtctcgccctgtcacccag

SEQ ID NO: 132133 - DNA, 98 bp, Homo sapiens
aaggattccaagtaactcttatttgacatagggcctgattacattccaacagaggaagaaaggagagtcttcgcagaatgcaatgatgaaagcttctg

SEQ ID NO: 132134 - DNA, 75 bp, Homo sapiens
cgctgggctggaggcggcggagcgcgagagcttcgagcggactcaggagaataaaggcagccccgttgatgactg

SEQ ID NO: 132135 - DNA, 71 bp, Homo sapiens
ggctcaccgcaacctctgcctcccagcagtgtggcataaatgccaacgatgtgaagaaattggaagaagct

SEQ ID NO: 132136 - DNA, 74 bp, Homo sapiens
cttggaggcattcatggctgaagtggaggctgctgagaaactaggtgaaactgagaaacttagtataatgattg

SEQ ID NO: 132137 - DNA, 100 bp, Homo sapiens
agcttgcagccctgtgccttgacaagagcctcatccacaccgtgttgctgcaaaaggactatcaggcacagagttcgagtacaccgactcagagagcgag

SEQ ID NO: 132138 - DNA, 82 bp, Homo sapiens
ttggcacgtcctgctccgtggtgctctatgaccccctggagccttcacgtaaatgggtccagtcatgcctcccagtaagaag

SEQ ID NO: 132139 - DNA, 90 bp, Homo sapiens
gacggcgagacctcctgcacagatgaggacggggacttggttgccttttccagtgacgaggaattgacaatggccatgtcctacgtgaag

SEQ ID NO: 132140 - DNA, 74 bp, Homo sapiens
ggacagccaagcacccgccgccggcagcttcgctggaagatatggatcagaaactttcgaagttggtagaagag

SEQ ID NO: 132141 - DNA, 50 bp, Homo sapiens
gggcgactctgtgcctcgctgagggaaggtggacttttaaatattctcca

SEQ ID NO: 132142 - DNA, 90 bp, Homo sapiens
gaaagtttttccaaatattcatctgtacagatcctgtgaagccacctggcagctctttacaagcaccagctgatttacctttagctataa

SEQ ID NO: 132143 - DNA, 100 bp, Homo sapiens
gtggaaaaaagccgaaataccctcccaacaaaggttttacacatccataagtagacctttttggagcctcaccagccaattcaatggcgtcctcttctac

SEQ ID NO: 132144 - DNA, 102 bp, Homo sapiens
gcgcgctcggccgcctcaaggtcgcccaagtggtacggaatggccacatcaaaagaatcactgataatgacatccagtccctggtgctagagattgaaggga

SEQ ID NO: 132145 - DNA, 98 bp, Homo sapiens
aggcaaagcgaaattggtcattctcgctaacaactgcccagctttgagaagtctgggccaacggtcacaaaagttgtcactgttgtgacaaccaaaaa

SEQ ID NO: 132146 - DNA, 100 bp, Homo sapiens
aataagagactggacgctgtgaggtacttcaactcccgcccccacctgtgtcccgctggctcctaagctgcccccctacgtgtgggttgcgtctgagatg

SEQ ID NO: 132147 - DNA, 74 bp, Homo sapiens
ctgaaactaatggcctcctctgtggagaccctgaggaaaactgtgcagggtcctgtagcatccacagtatcagc

SEQ ID NO: 132148 - DNA, 100 bp, Homo sapiens
gttggccaaatgtttgtccactgagctgatctcctctctggagcaccggggccaccaggagggaggacttgaaagaggagattgatattcgactctccag

SEQ ID NO: 132149 - DNA, 102 bp, Homo sapiens
gtcgccgcggcggcgtgtgcgcccctcaggtttctggtcctcataccgtgtggttgagtgaaatcaaaacttccacgatagcaatgctgattggacaaagaa

SEQ ID NO: 132150 - DNA, 98 bp, Homo sapiens
taggagagagcagaagttttaaacctcatttgaccttcatgaagttgtcaaaatcaccgtggctccgtaagaatgaagaagctgtttgttttgattct

SEQ ID NO: 132151 - DNA, 96 bp, Homo sapiens
aagtaaccagttctgtttgcctgttttggatagcaatgatcccaatttccagatgccttgttcaacagacatgggatgtagagctggaaagatctg

SEQ ID NO: 132152 - DNA, 90 bp, Homo sapiens
agctcatgaatagactctcccatcccaacatccttaggaattacatgaatgacagtcttcgaaccaatgtgtttgttcgatttcaaccag

SEQ ID NO: 132153 - DNA, 100 bp, Homo sapiens
ccggacccaaagtgccatgtctttaattgttctaagaacggaagcatctgggctggatggaatttagcatcaagcagagtcccctttctgttcagagtgt

SEQ ID NO: 132154 - DNA, 97 bp, Homo sapiens
aagtgccaatgctggcccagctctccgtgttccggtgtggggatgcggaactgaaaggttcaggcttcactgtgacaggaggaacagaagaacttcc

SEQ ID NO: 132155 - DNA, 83 bp, Homo sapiens
atttgaagtctgtgtcaaacatccatatcataagtggaattttggagatattcaaagggacagttgacattcaaggatgtggc

SEQ ID NO: 132156 - DNA, 100 bp, Homo sapiens
ccccactcacctcagacgaggagccaggctctgaggacgagcccagcagtgctcgcactccgtacaaagtgagacctgtggccatcaagcaactctccgg

SEQ ID NO: 132157 - DNA, 83 bp, Homo sapiens
agccgctcagcccagcagcggggcaagctgacctgcctagagctggaacgttacctccagagcgagccctgctatgtttcagc

SEQ ID NO: 132158 - DNA, 90 bp, Homo sapiens
ggatcttcacacagctgcttccattggccagtatgaagtggtgaaggagtgtgtgcagcgggcaattgaaggaacagactaaaaatcgtg

SEQ ID NO: 132159 - DNA, 100 bp, Homo sapiens
tacatgctggattgtagaacttctctctctttagagatgtttatgattacttccgagctgtcctgcagcgtgatgaaagaagtgaacgagcttttaagct

SEQ ID NO: 132160 - DNA, 98 bp, Homo sapiens
gaagagaccacctgtccttcgagcaggtacaactccaaaaggagacattggagaagaaccaagctgggtctataaggaattgcacatgagatggcaca

SEQ ID NO: 132161 - DNA, 98 bp, Homo sapiens
gatcgacaagaccatgctggcaagtctgaaggtcaagctgttactgaggcggagacacgggtgatgattggctttctggggagagaggaagtcctgtg

SEQ ID NO: 132162 - DNA, 75 bp, Homo sapiens
gacaacctggagttcttcctggccggcatcggcaggctgcacctctcaggcgccgtggggaagacatgcttgctg

SEQ ID NO: 132163 - DNA, 96 bp, Homo sapiens
cctatgcagttcgaaaactggataacactaagtttagatctcatgaggtgggagaggacacagaggagacacctcaccgctggtggatagaaacct

SEQ ID NO: 132164 - DNA, 88 bp, Homo sapiens
ccactctgcatctttccaacattccttggctagagatttactacatccgtccttggaagaggaaaagaaaaaacataaaaagaaacgc

SEQ ID NO: 132165 - DNA, 85 bp, Homo sapiens
tcgatgctacgctaacctatcgggttctctctccgcgcgttcaggtctagatgttgatggaatatatcgagttagtggcaatctg

SEQ ID NO: 132166 - DNA, 75 bp, Homo sapiens
caatcccactgatgaggatcagcccatgcaaagccttctagacaagctcagtggaatctgaagggcccaccccat

SEQ ID NO: 132167 - DNA, 51 bp, Homo sapiens
aggaacgtttggggtttcctaggagactaagctgaaactgctgctcagctc

SEQ ID NO: 132168 - DNA, 75 bp, Homo sapiens
cggcaccctgtccccgaggaggggaccatgacacagtgaagctcgtgtgtggagtgccacggtacaatcagacga

SEQ ID NO: 132169 - DNA, 95 bp, Homo sapiens
gccaaggactgtctgaacgtgctgaacaagagcaacgaggatgaggaggccgactacctcggcgtgcgtatccagctgcggagggagcagggtgc

SEQ ID NO: 132170 - DNA, 90 bp, Homo sapiens
cgcggcgagaagccccagctgcactacgcggctggtccctgcagacggcttcccatttttatgaccggatgctgggaagcctgctggtcc

SEQ ID NO: 132171 - DNA, 82 bp, Homo sapiens
gccgcgtaggagcgtgcgttcgggccctcttctcccacctgttcgttgttcaggggatgaaggaagctcaggaaaggctgac

SEQ ID NO: 132172 - DNA, 100 bp, Homo sapiens
cggcactggtctcgacgtggggcggccagcgatgaagccggaggagaatgaagtcactgagttctttgtgaccctggagaaggatccccaacaagaagac

SEQ ID NO: 132173 - DNA, 87 bp, Homo sapiens
attcagctacagggtgaccaacgcaagaacatatgccagttcctcgtagaggagcgagaacccgagcagcgccatgagcaacactac

SEQ ID NO: 132174 - DNA, 98 bp, Homo sapiens
tggggcagatccagctgaccatccggcacagctcgcagagaaacaagcttatcgtggtcgtgcatgcctgcaggaagaaggtagataatgactataat

SEQ ID NO: 132175 - DNA, 87 bp, Homo sapiens
accaagaactgtgaagagaggagttgagaacatctctgttgacattcattgtgggcaattgaaggaacagactaaaaatcgtgtcct

SEQ ID NO: 132176 - DNA, 74 bp, Homo sapiens
ttctaccagaagcttgaagggtttggttaagatgttgtgactgtgacagactcactggggtttgtacatgctgg

SEQ ID NO: 132177 - DNA, 74 bp, Homo sapiens
gatggtcagctcaacccacgtgcattagatgtacgaagtaggtccaaagttgttgaccgtatttacagtctcta

SEQ ID NO: 132178 - DNA, 98 bp, Homo sapiens
tttgttatgtttgtatggtcctattggatgacaattttcacatctcccgcttccccctccaaagagataaatttgcgcctcattttggtaagcggaaa

SEQ ID NO: 132179 - DNA, 100 bp, Homo sapiens
atcgccttcagccctgtctggtgcatccttggcagaaagtgaggaggaaaacacccccattcaacagggagctgccaccaccgtgtactgtgctgctgtc

SEQ ID NO: 132180 - DNA, 95 bp, Homo sapiens
ggagacttggatgaggtgaaagactatgtggccaaggtaaagagaaatgtgtatgaccttacaagtatccccgttcgccaccaattatgggaggg

SEQ ID NO: 132181 - DNA, 75 bp, Homo sapiens
gcacatggcccaggcagaccttgcagtcaaagtttcagatcgacaaagctatcttgtcatatctttggttctttg

SEQ ID NO: 132182 - DNA, 100 bp, Homo sapiens
actcgcgcagcgccatggcccccattggcctcaaagctgttgtcggagagagatttctataattggcctgatgaatcctttgatgaaatggacagtacac

SEQ ID NO: 132183 - DNA, 100 bp, Homo sapiens
ctcatcatcaaggatcaggaccgcaagtcccgtcttatgggacttgaggccctcaagggctccacgctggccaggaggatgaaaggccccagctgggggc

SEQ ID NO: 132184 - DNA, 75 bp, Homo sapiens
ccgttattggctgccgttaaggaccgttacgtttcccgggtctcagccagaaaactgaaaccaactccaccacgg

SEQ ID NO: 132185 - DNA, 80 bp, Homo sapiens
ccttgctcacccatcagggtgaagagacacctgtgccctgcctggtccgacccccagtggcactaacgtgggatcctcag

SEQ ID NO: 132186 - DNA, 96 bp, Homo sapiens
gcctgatctaacccctagaaacagatctgaaatagctcaactcagtcaagaaaaaaggtatacatatgataaattgggaaagttacagagaagaaa

SEQ ID NO: 132187 - DNA, 90 bp, Homo sapiens
cccggtaccaagaaggggagtgcccgcggcagaatgcctgttattaaaccagacatagccaactgggagctctcagtaaaattgcatgat

SEQ ID NO: 132188 - DNA, 74 bp, Homo sapiens
ccctccacgggcggctgcagggtggagctggaagctctttgacatcctttggaacagaaacatcaaacagtggt

SEQ ID NO: 132189 - DNA, 100 bp, Homo sapiens
caggagcggccacctggttcctgcgtgctacggccctgtgggcctgggagctgcctctgaggaacacgccgcaggcctctttgtgcagcgccttgctgac

SEQ ID NO: 132190 - DNA, 98 bp, Homo sapiens
caggttccagctgaatcttgacaagaccatagagagttgcaaagcacaattagctgcagaaccttggcctgaaaatgctacattatatcagcaattga

SEQ ID NO: 132191 - DNA, 101 bp, Homo sapiens
gctgcagcctccggcactttgcctgcgaacagaacctgctgtcgcggccagatggctctgcttccttcctgcaagactgtgccctgtccacggtgcctcct

SEQ ID NO: 132192 - DNA, 74 bp, Homo sapiens
gagcccgcgcgccgagccccactattctaccttgtaaatactgttatttgtatatactgtaaatgatgacatcg

SEQ ID NO: 132193 - DNA, 98 bp, Homo sapiens
ggcaggatgaaagtgagcagtccagaaagcggcttatcgaacagagccgggagttcaagaagaacactccagagtttgaaggatgacctctaggaaga

SEQ ID NO: 132194 - DNA, 50 bp, Homo sapiens
ccgaggccccctcttcgcctcctccagatggaaccccactgagctggtgg

SEQ ID NO: 132195 - DNA, 98 bp, Homo sapiens
agcacttcacggactgcaagcgaggcacttgctaactcttggattgatgatggtctccagctgtcaaagaagattgtggttgccaagagaaaggtaac

SEQ ID NO: 132196 - DNA, 100 bp, Homo sapiens
cccgggcggcgggcggagacgtgggcgccctccccgccaaggcccgtgcgagatgatgaacaacatgggtggtgatgaggatgtagatttaccagaagta

SEQ ID NO: 132197 - DNA, 100 bp, Homo sapiens
gatgggtgaaatttgatggccttagcatttcttactacaataatgagaagtcaaataaagtgcccgtggtgcagccatcccatgcggtccatcctctcac

SEQ ID NO: 132198 - DNA, 73 bp, Homo sapiens
ggaagagcgctcccaggagaaacaagcatgatgggcccacctcctggtatgagacctcctatgggtcccccaa

SEQ ID NO: 132199 - DNA, 100 bp, Homo sapiens
tgcctggctgagtttcggacgtggttaagaaccaactggttgaggttcaatgcagacaagacggatgtgatgctgtcacaatatggagcttccgtttctg

SEQ ID NO: 132200 - DNA, 100 bp, Homo sapiens
cgaaagcctcagcgagctgcggcagaagggctacgaagaagtgcttcagcgggccaggaagcgcatccaggaggtgattaaagtatacagtgaagatgaa

SEQ ID NO: 132201 - DNA, 98 bp, Homo sapiens
ccgcctgcggcctttgctgcgggcgccggcgctggcggccgtgccgggagatagcagaccccacgttagctgaaatgggaaaaaacttgaaggaggca

SEQ ID NO: 132202 - DNA, 49 bp, Homo sapiens
gaccgagctgcggctgctgtggactgttggcaagagtagcaagatgctg

SEQ ID NO: 132203 - DNA, 73 bp, Homo sapiens
ggctctggaaaatccgcaagaccatcatgcagggtgaggtggctttgaccccgggttgcccggccagcacgac

SEQ ID NO: 132204 - DNA, 98 bp, Homo sapiens
ggtgttgtaggtagcggtaccttgagtggcaacagagggaatctggaaaaattgcaatcaaaacatcatttctctaagaaaattttgggtaaccgaag

SEQ ID NO: 132205 - DNA, 100 bp, Homo sapiens
accagctgtagcaaaagtgggaagccaagcctttcctcccggaatttagataatgggctgtgtgcaatgtaaggataaagaagcaacaaaactgacggag

SEQ ID NO: 132206 - DNA, 90 bp, Homo sapiens
gccaggcagagtcagcagctgcagtgtggaaggtacctgtgtgacaaggtcgtccctgggaacagggttaccatcatgggcatctactcc

SEQ ID NO: 132207 - DNA, 88 bp, Homo sapiens
aggggccctcagggaagagaccctgcaaagatcctgggagaccaaggccctgtctctgcccctggtggtcatcgtccatggcaaccaa

SEQ ID NO: 132208 - DNA, 101 bp, Homo sapiens
ccgggggcccgaggaggtgaaccggctcacggagagcacctaccggactgctgtggatgtttttcgaaggataattttggaggcagaaaaaatggacgggg

SEQ ID NO: 132209 - DNA, 83 bp, Homo sapiens
ctcagtggctcaacaggctgaagggagcatttgcaagtgaggaagcagcacaaccctgggttttagataatttctaacagaga

SEQ ID NO: 132210 - DNA, 88 bp, Homo sapiens
tggaggactacagagccggtgatatgatctgtcctgaatgtggcttggttgtagctataaggaagaccagatggatgagaaactaatg

SEQ ID NO: 132211 - DNA, 83 bp, Homo sapiens
cctcagttggaagcagccgatccagcctgcggagcctgtggggcagaactgataaatttcaaacggaagagagtggcagcatt

SEQ ID NO: 132212 - DNA, 138 bp, Homo sapiens
ggctccaccccttccacgtcatccgcatcaacaagatgttgtcctgtgctggggctgacaggaactgtggctgcaccatctgtcttcatcttcccgccatctgatgagcagttgaaatctggaactgcctctgttgtg

SEQ ID NO: 132213 - DNA, 83 bp, Homo sapiens
cggggctgacatcagcggctctttgtatgatgacgctcgggacgtgtacgaggaggccatccggacagtgatgaccgtgcggg

SEQ ID NO: 132214 - DNA, 75 bp, Homo sapiens
agatcgattttaccttggataccctgctttgggttttttgcatgtctgacacccatgactccacctggaccttat

SEQ ID NO: 132215 - DNA, 82 bp, Homo sapiens
gcggtgcagctgccgacaccccagcctgttgctgacactagtacctgcctagagctggaacgttacctccagagcgagccct

SEQ ID NO: 132216 - DNA, 75 bp, Homo sapiens
ttcggggccgcccggcggccgaggcgcccgccgaaggccctgctgtaaaagcgctgtgcttcgccgtgagccgct

SEQ ID NO: 132217 - DNA, 87 bp, Homo sapiens
cctgctgaaagaagacagcactctgaaagcagctggaatcgtgccggtggtggtgtgcacattgagccccggtatagacagttcccc

SEQ ID NO: 132218 - DNA, 75 bp, Homo sapiens
gagacctctacttagctcagcaattcttaccttggttctgagcaaggttcaaccagtcaagaacaggccttatct

SEQ ID NO: 132219 - DNA, 73 bp, Homo sapiens
agccctgggctggggcaggagccgcctcaaggcacttctaggacctgcctcttctcaccaagatgaactcact

SEQ ID NO: 132220 - DNA, 75 bp, Homo sapiens
caccagtggcctggacaacagacctctgtttggggagacgtccgccaaggtggctttttctcaagtatattttcc

SEQ ID NO: 132221 - DNA, 106 bp, Homo sapiens
cagggcctgcagcgggagctggacggcgagcgcgagcggcgcgagaaagcgtccgagctgggccacagcctgaacgagaacgtcctcaagcctgcgcaggagaagg

SEQ ID NO: 132222 - DNA, 100 bp, Homo sapiens
cattctttgcatacagagatcataaaaacatttggtagagttggccctaacgcagaacccaggttccgagatgagtgagtcaaattgactttatcagctt

SEQ ID NO: 132223 - DNA, 100 bp, Homo sapiens
agtgaccaggcttgttctggatccctatttattaaaggggttggtgccatctacatccgtcgccggccccgtgtgcgtgtggaggccctgcagagtggag

SEQ ID NO: 132224 - DNA, 100 bp, Homo sapiens
cgccatgtcgggttattcgagtgaccgagaccgcggccgggaccgaggaccctgtattcagtggatcagctggcaccacccaaatagataaattggccca

SEQ ID NO: 132225 - DNA, 75 bp, Homo sapiens
caagcagctgcttgccggccccaacacggaccttgttgtgaatgggagagttcacatccgcgactggcgagagga

SEQ ID NO: 132226 - DNA, 82 bp, Homo sapiens
acaagaaactagagcaaataaccgttttgaaattatgccatggacaatattaccaggcagaaccaattctacgatacccaag

SEQ ID NO: 132227 - DNA, 90 bp, Homo sapiens
cagaggatggattacccagtaaacctccacagctgttgagaaaaaggagaaacctcttccaagacttaatatccattctggattctggat

SEQ ID NO: 132228 - DNA, 90 bp, Homo sapiens
cgcggacggtggcgttaagggaacgctgaggtcccgcgctccccgaccgagagccccccaagatgaacccagtggtggagccactgtcct

SEQ ID NO: 132229 - DNA, 90 bp, Homo sapiens
gttgtctatggctcctggtcatacagatagatccacaagccctagccatgccgtggtagccaatgttcagcttgtcttgcatctaatgaa

SEQ ID NO: 132230 - DNA, 80 bp, Homo sapiens
ggagttccgggagctctcccgtctcacaggggataagaagtttcaggtgtccctggccagtgtccttccacctgtccaca

SEQ ID NO: 132231 - DNA, 97 bp, Homo sapiens
tgattcatgtgcgcccttggaaacgtggtatattgaaagtgtcattttggtggaatcctcaacatttgtctcttcgccaacgaagttaactgaatcc

SEQ ID NO: 132232 - DNA, 100 bp, Homo sapiens
tgggccaggcccgcatctgctgcccagcaacgagtgcgtggagctcttcagaaccgcctacttctgcagagtggcctcatcctgcatgactcgcctgtcc

SEQ ID NO: 132233 - DNA, 90 bp, Homo sapiens
aagggagatatgttgtgaaagaagcagtagcagtgaatctacagggacgccatcgaatccggatgtggctgggccgccgggccctgtgcg

SEQ ID NO: 132234 - DNA, 100 bp, Homo sapiens
cctccccctccccttgtcccctgccccttgccctgcttctgcagaaggatctatcttgggatcccatggctttctttactgggctctggggccccttcac

SEQ ID NO: 132235 - DNA, 88 bp, Homo sapiens
tggctacaaaaatcaatctcagggctacaaccagtggcagcagggtgtacatcaggaacgtctctatcaagaatacaatttcagcaag

SEQ ID NO: 132236 - DNA, 98 bp, Homo sapiens
aggtggtggtggccaagtatgcgcccagcggattctacattgcctccggagaacaccttccaccatgaccacctcagcaagttcccacttaaataaag

SEQ ID NO: 132237 - DNA, 118 bp, Homo sapiens
ccaccatcgagcgggagttcgaagagttggatactcagcgtcgctggcagccgctgtacttgacaatgcagatcttcgtgaagactctgactggtaagaccatcaccctcgaggttga

SEQ ID NO: 132238 - DNA, 74 bp, Homo sapiens
gggacacagtacggtagtcaaacccccagtacgtagagaaatcgacactcttaatgaacgtttagctgctgaag

SEQ ID NO: 132239 - DNA, 90 bp, Homo sapiens
cccgcctggtggagctcaagaggcaggccctgaggttgctcctcccggggcccttcccgggcaaggaattgaatgatctggcacgggacc

SEQ ID NO: 132240 - DNA, 75 bp, Homo sapiens
cccgcggccggagccatggagatgccgctgccccccgatgcaattctgtggtgttcttggtcacacatttatgga

SEQ ID NO: 132241 - DNA, 100 bp, Homo sapiens
cagcctgctttcctttatgatctaccaggagagcgtggggagctatgtgcagggtgacttgggttggatgaccagagggtccatggtgggaccatttcaa

SEQ ID NO: 132242 - DNA, 110 bp, Homo sapiens
gactgtgatggtacaggaagggaacgtggaaagcgcatacaggaccctaaacaggcaggatgtagccaatcaaatgtgcaccaagaccaaggaggagtgtgagaagcact

SEQ ID NO: 132243 - DNA, 100 bp, Homo sapiens
atttccatttctaccttgtatgcctcaatttgctggatttaagcactgctgcactttatgagcactattcctgatcagagaactccagttgcttcaacac

SEQ ID NO: 132244 - DNA, 50 bp, Homo sapiens
agatcatggtggccaaacccacaggttccgtggggaccccactgcctgga

SEQ ID NO: 132245 - DNA, 82 bp, Homo sapiens
ccgaccctggccgccccgagcggagcctggaggaatcaagagagacccggccaaggcttttgtgcccaggactgttatgatt

SEQ ID NO: 132246 - DNA, 80 bp, Homo sapiens
gcagcagcgtgtcgcctccggggggcgtagcaaggtcggggtatgataggtcggggaagagggggctttggaggccgagg

SEQ ID NO: 132247 - DNA, 113 bp, Homo sapiens
gagactgaacagtgaaggatctcactcagaatcctgtccacaatctgtccagtttacaccttaccccaaagagcctcgcagtcacctctgtgccctgctggttgtcttcccag

SEQ ID NO: 132248 - DNA, 82 bp, Homo sapiens
ctggggaaaaggcaaaaatcccatctaccgcaactctcagttcgagagtaaaggcaagataacccctgtgacagaaggctac

SEQ ID NO: 132249 - DNA, 100 bp, Homo sapiens
tgtctgtccgtccagggctcagcctccatcgtggcgcccctgctgctgagaaacacatcagcccggcttctctatctgagatgtgcacagaaacccagac

SEQ ID NO: 132250 - DNA, 100 bp, Homo sapiens
attttgctggtacagcctaccaagaggccagaaggcagaacttatgctgactacgaatctgtgaatgaatgcatggaagatgatccctctgataagccac

SEQ ID NO: 132251 - DNA, 100 bp, Homo sapiens
aatatttatggagcatatattatggaacacaatcttgacagaacaagtatgtactcaggtcgtacacaaaccacatccagagccagattctacagtgaaa

SEQ ID NO: 132252 - DNA, 96 bp, Homo sapiens
gcagctggaggagcagctgcgcccgctgccagcacacgactacttcgagttcttcgccgccgacctgagcatgttggcagataaattgaacatgac

SEQ ID NO: 132253 - DNA, 100 bp, Homo sapiens
gaatgttcttaacccagaagtagctgaatgtgttactccattgctgaggagtgatcacctctgcagcctgcacagccgggcctttggactcctggatgct

SEQ ID NO: 132254 - DNA, 83 bp, Homo sapiens
gatgacacagccctcagcgagagtgccaaccaggccttcctggaccaagaatcgccttcagccctgtctggtgcatccttggc

SEQ ID NO: 132255 - DNA, 74 bp, Homo sapiens
aagcatataggtttggtgtacagtggcatgggccccgattacagttgtggtcagaaatgagaagacatgaaatg

SEQ ID NO: 132256 - DNA, 51 bp, Homo sapiens
ctttgactggaacatgctgaaattcgaagcggctcagccccagggcagcac

SEQ ID NO: 132257 - DNA, 100 bp, Homo sapiens
ttaggcgccgggaccctcaggctcagatcagtggccgaggccccagaggaacttgctactaccagcaccatgccctaccaatatccagcactgaccccgg

SEQ ID NO: 132258 - DNA, 100 bp, Homo sapiens
aagaagcgctggcagtttcaaacgccccaaggcccagaagaaatttaagcgtcttatgctgcatcggataaagtgggatgaacagacatctaacacaaag

SEQ ID NO: 132259 - DNA, 100 bp, Homo sapiens
tgtcaacaagaacaagtcatcggctattgtggaaatattctccaaggtctcactctgctcactctgtctcccaagctggagtgcagtggtacagtcacgg

SEQ ID NO: 132260 - DNA, 95 bp, Homo sapiens
ctcatggggaaaatctccccggtgactttcagtgcctaagtgtctagagagctgagtgggttgcctcggatcggccaggcctggatatcagcgaa

SEQ ID NO: 132261 - DNA, 50 bp, Homo sapiens
atgggaaaactcgaaacagatttttggccacagatgtctttaattccaaa

SEQ ID NO: 132262 - DNA, 82 bp, Homo sapiens
gctgggagcaacgggagtgtcctggacccagctgagcgggcggtcattcgcatcgcagctggtaggtgagtgctgtcctcgg

SEQ ID NO: 132263 - DNA, 98 bp, Homo sapiens
attataatactggagaggataaatcctcaaaaaatcttcttggttctgctacaattgttgacctcctgtactggagagacattaagaagactggagtg

SEQ ID NO: 132264 - DNA, 75 bp, Homo sapiens
agggctacgggaagatcctggaggtggatctgaagaacggagaccatggcgagcccagggaaagacaattatcga

SEQ ID NO: 132265 - DNA, 87 bp, Homo sapiens
cgggccggcgcgggagggctgtgtgatggcctcggagcgcccggagccggagagtccttagccaggatggaggctgttgtgaacttg

SEQ ID NO: 132266 - DNA, 96 bp, Homo sapiens
tctcaagatggcggccaatgtgggatcgatgtttcaatattggaagcgctttgatttacagcagctgcagcttttacccagcacctgtccagtgaa

SEQ ID NO: 132267 - DNA, 96 bp, Homo sapiens
gcgaaagcatccctgcccttggatggatagctgtggcccggacatatatccagtccctgccccccatgccccagaaggacctgagcagcatcttcc

SEQ ID NO: 132268 - DNA, 90 bp, Homo sapiens
caagcaggaacaggggtcacggggcaaggagcacgtggcagcgcaggaaacaggcccccgacagctgctctcgggagccgcctcccgaca

SEQ ID NO: 132269 - DNA, 74 bp, Homo sapiens
ttggaacctcactgaaaattggtattgttggattgccaaatgttgggttttaaaaagttgcagaaagaagaaag

SEQ ID NO: 132270 - DNA, 53 bp, Homo sapiens
atcttctgcactgtttacaggcacagcaaacttggaaatcatgtcttagagat

SEQ ID NO: 132271 - DNA, 100 bp, Homo sapiens
cacagttcaagtgaccattgacccagtccctcaacaccttacactaagtcaaagcgtggccacagagaagaggagcaagaagacctgacaaaggacatgg

SEQ ID NO: 132272 - DNA, 100 bp, Homo sapiens
gtcgatctggagcttttcccctccccgggtttgccatgcagaacttgaattggggacttgttttcaagcagtaaatagcagaattcagttacaaattctt

SEQ ID NO: 132273 - DNA, 96 bp, Homo sapiens
gcgagctgagtggttgtgtggtcgcgtctcggaaaccggtagcgcttgcagcatggttgcagtttcatcactgtctgcggtaatcaagtttttaga

SEQ ID NO: 132274 - DNA, 90 bp, Homo sapiens
atcctggtgcggaacatccccttccaggcccacagccgggagatccgagagctcttcagattggcacagcaacgaggggacagtgaggac

SEQ ID NO: 132275 - DNA, 83 bp, Homo sapiens
caggcgctgggcgagccgtgcgatctggacgcggcgctgctgaccgacatcgaaggtggaagttaaacgagctgagcctcggg

SEQ ID NO: 132276 - DNA, 83 bp, Homo sapiens
agatcctgagaacatcaccgaaatatgtcatgtggcctgtgttttggaccgtggttcgtacctatgctccttatgtcacattc

SEQ ID NO: 132277 - DNA, 82 bp, Homo sapiens
ggagctgtcgacccggcctggcgccggactaggtgagcatgggtttatgcgtcttaggcattattgtgatggcgagcaccaa

SEQ ID NO: 132278 - DNA, 75 bp, Homo sapiens
ttccagttcatgctgcccacatctcatccaaacagatattcctcttcgtcaagttatagctgaggaatgtgttgc

SEQ ID NO: 132279 - DNA, 50 bp, Homo sapiens
gcgcccgccagctgctccggagatacggaacaagatcactcaaggtgaag

SEQ ID NO: 132280 - DNA, 100 bp, Homo sapiens
ctgagccagaaattacaagtgtactgtgatatgaccaccgacgggggcggctggattagttgtaaacaaacgagatgttcctgcccagtaaaacttcgcc

SEQ ID NO: 132281 - DNA, 112 bp, Homo sapiens
gtcgcgcccgggaggaaggaacgaggcaaggagctaaagcagcgtgcgttcagccctgggcaaaagactgttgaagtagagagcattttgcccagctcactcggattctttg

SEQ ID NO: 132282 - DNA, 97 bp, Homo sapiens
gtccatttggggaaatccttcggatggtgaactcattagaaatttgaacatggaattcaatccttcagatcatcctcgggccagcacaatattcctc

SEQ ID NO: 132283 - DNA, 75 bp, Homo sapiens
gtcagtgtctgatgtcagatttatctcatgctgtgcagaagatgcaagtggaccaggaggaaccacatgttgaag

SEQ ID NO: 132284 - DNA, 100 bp, Homo sapiens
ccgcgccctgctccaggggaaccagactgtgtaatctggcttccgaagaaaggatcatcaccaaggggaagctccatggctccatcgatgtccggctgtc

SEQ ID NO: 132285 - DNA, 75 bp, Homo sapiens
gaaaaacctcagcgacctgatcgacctggcattatattgtacttctagcaagtgcaccaacagaaaaacaacgcc

SEQ ID NO: 132286 - DNA, 83 bp, Homo sapiens
aaaaaaggagatgcctggcagccccgctctctgcatgctccctaccctcacctcaagacgaccatggccaccatcccagactg

SEQ ID NO: 132287 - DNA, 71 bp, Homo sapiens
tacccaataaccaggtgcttggcaaaatcgagcgggccattgatcctgaacccgccgccctccccggccac

SEQ ID NO: 132288 - DNA, 90 bp, Homo sapiens
tgagtgatgtggaggaaaacaacttcgagggcagaattcgacggaggcgccttgcacgacttgctggtggacagacctctcagccaacca

SEQ ID NO: 132289 - DNA, 75 bp, Homo sapiens
ggcgactgccgagggtctcagcgggatctggagtcagggggcgcggatggcgtcggggcgccccgaggagctgtg

SEQ ID NO: 132290 - DNA, 88 bp, Homo sapiens
tcctcacccgcgcctgcgacctcggtgatggtaatgcccgaaggagcagacacggtgtccaggcccagtcccgactaccccatgttac

SEQ ID NO: 132291 - DNA, 82 bp, Homo sapiens
tttgaagtctgtgtcaaacatccatatcataagtggaattttggagatattcaaagaatgattacggacctgaagccaaaga

SEQ ID NO: 132292 - DNA, 87 bp, Homo sapiens
ggaacccctggaagcctagaaatggttatcaatactctggctgaccatcatcatcgtgggactgactttggtggaagtccttggtta

SEQ ID NO: 132293 - DNA, 83 bp, Homo sapiens
gtcacggtgagctgcggcgagcggagcttcgcggggatcctgctggactgcacgaaaaagcttcaccggccagaactgtgagg

SEQ ID NO: 132294 - DNA, 90 bp, Homo sapiens
ccgtttctggctccgggctgagcttcctggagaagaggaagattgaagccttcagctgactgtggcccttttcgaggtctgcctctcttc

SEQ ID NO: 132295 - DNA, 95 bp, Homo sapiens
gccgacggctgctcaaacatcagggtgacttaagagattaaaattaatttggttgctgttggttctgaacaaataatgagttcttttatttgagg

SEQ ID NO: 132296 - DNA, 100 bp, Homo sapiens
gaacatctgggagaatatttaatggaaaatcgcttggttaaaacctgacacttttaacaggaacttacaatgtctcagaaaaatggtgggaatgttcttc

SEQ ID NO: 132297 - DNA, 100 bp, Homo sapiens
cattggtctgttagagttcgaaaagctgagaatcctcagtgtttgctaggagaagaaatatcaggctctgatatcagtgggtcagaggaagatgatgatg

SEQ ID NO: 132298 - DNA, 121 bp, Homo sapiens
ccgagtcttgacctccctcccctctccgggctgccgggacaactcggggcggccactcttgccaggaggcatgaaggtcaccgtgtccaaagggggcgaccgggacagtgacgacgacagc

SEQ ID NO: 132299 - DNA, 101 bp, Homo sapiens
agaccctgaacattggaaatgtcatggaaaatggaagatttgcaaaatacaaatattttacccatgtcatgatcaataagacagatatgctaatgataacc

SEQ ID NO: 132300 - DNA, 100 bp, Homo sapiens
tccaataaatacattgagcatctgctgactcagcttgaggagcaacacaggagtctctggagatatcattaacggagctcaagaaaaatgtgtattgcct

SEQ ID NO: 132301 - DNA, 109 bp, Homo sapiens
ccgcgctgcgcatctccaacagcgacctgagcggtcgcgtctccttcttcacctcggggtccgagaacctacaccgcgtggagaaggtccactggggcacccgttacgc

SEQ ID NO: 132302 - DNA, 51 bp, Homo sapiens
aaagctgttgtctcagggagcacagaaaccagagtgaactccgagcaggaa

SEQ ID NO: 132303 - DNA, 96 bp, Homo sapiens
cagggctccaccccgtcgcctcgacagctctttcagtctcacatggcaacgaaaacaacttgtatgtcttcacaaggatcagatgatgaacagata

SEQ ID NO: 132304 - DNA, 50 bp, Homo sapiens
tcacagctttgagtgagaaacaggactgagcagggggaggaacatttaag

SEQ ID NO: 132305 - DNA, 90 bp, Homo sapiens
caacggagctgcagacgaaaggcaagaacggcgatggccgccgtaggtcagggcagcccaatggatccaatggtgatgaagagacctcag

SEQ ID NO: 132306 - DNA, 82 bp, Homo sapiens
atccacagctaagactccaggaccctctggaagcctagaaatggtcaaaatgcagatcttcgtgaaaacccttaccggcaag

SEQ ID NO: 132307 - DNA, 90 bp, Homo sapiens
ttcccagggatcttgagagtgaagatctcgaaggatttcataggtagcactggctgtatccttgaacttgagaacattcctccggcttca

SEQ ID NO: 132308 - DNA, 101 bp, Homo sapiens
cctggccatcatcagcttctacgtgaggcacagctgcctgcgggaagctcttctgcaccttctcaacaagtatcaccttttgccatgatagcatttctttc

SEQ ID NO: 132309 - DNA, 75 bp, Homo sapiens
gcaccagcaagcggcattggctgcggtgagaagccctaccactgcaactgggacggctgcggctggaagtttgcg

SEQ ID NO: 132310 - DNA, 90 bp, Homo sapiens
cgcggctcctgtgtgctttgaagtttcaggtttagctgtgcctcccagtgactataatgacaaggaagctgtaaatgtatttgagttaag

SEQ ID NO: 132311 - DNA, 75 bp, Homo sapiens
aagggagccgcctgctgcgaggccgccgggctcccggtgcaatgaagggcgtgttggtagacattgtgaatgcag

SEQ ID NO: 132312 - DNA, 101 bp, Homo sapiens
gtgtgaagttgcccgaaggaagcttcaggagattgaggacagtgctggaactttgcctgtcacctttcgttgcctggaagaaaatctggggattgataagc

SEQ ID NO: 132313 - DNA, 80 bp, Homo sapiens
cagagcctcgcctttgccgatccgccgcccgtccacacccgccgccaggctgcctgctgtttcccggggagatcatgaaa

SEQ ID NO: 132314 - DNA, 100 bp, Homo sapiens
ctgagaactgtgtccttccattcctgagtccagcacttcccaggccaggaatgatgagaagacagcagctgattacaagattttaggtggttcagtcctt

SEQ ID NO: 132315 - DNA, 75 bp, Homo sapiens
gtggaagcgggaggcagttgcagctttcagggccagtactgtgacatctgcacggctgccaacagcaacaaggca

SEQ ID NO: 132316 - DNA, 75 bp, Homo sapiens
ttatacactcttagtgctgtccagatcttcttggaaacagaattgttctacaaaggtatccgccctgcaattaac

SEQ ID NO: 132317 - DNA, 101 bp, Homo sapiens
gcgggacgcgcacagtccctccacgcggaaagaagtaccttcgccggtcaccggctcctgcaggggacagcaatcagacctattgctttgagagctgtgac

SEQ ID NO: 132318 - DNA, 100 bp, Homo sapiens
gaagttcatggatgctgtcaacaagaagagcagttcccaggatctgcataaaggtgaacggaagagtccttatgttgcagtatgctgtatagtaatggcc

SEQ ID NO: 132319 - DNA, 102 bp, Homo sapiens
ccactctccagtgtaatgattattgacaacagggagaagaaatgggtgaccgttggtgacacatccctacgaatctacaaatgggtccctgtgacggagccc

SEQ ID NO: 132320 - DNA, 75 bp, Homo sapiens
cagaaaaccagtctgggtaaaatcacagtaagtacaaatggatcctaggtgaagaaccggtggagaaacgaagaa

SEQ ID NO: 132321 - DNA, 83 bp, Homo sapiens
cacagagcctcgcctttgccgatccgccgcccgtccacacccgccgccagcgtccgtctccaagagagtatgaagagagtgcg

SEQ ID NO: 132322 - DNA, 101 bp, Homo sapiens
cagacccattgcacttcagtatctcaggcggcaccctgtccccgaggaggggaccatgacacaaacaccttccaccatgaccacctcagcaagttcccact

SEQ ID NO: 132323 - DNA, 100 bp, Homo sapiens
tttctcctgtacctatgggaagcctgtcacttttgactgtgcagtgaaaccatctgttacctgtgtttttaaacagatttctcaagcttacgaagttctc

SEQ ID NO: 132324 - DNA, 87 bp, Homo sapiens
agacatttgctacagcatcccacattaagtcaacgatcctccaggtcctattgacaatactaagattgcagtcactaaatgtggtaa

SEQ ID NO: 132325 - DNA, 100 bp, Homo sapiens
ggacgcgactcgagggtgacgctcgctccgctcgtcccgctcgtcatggcctacccgggatacggaggaggggttcggctttccagtttggcagcagcac

SEQ ID NO: 132326 - DNA, 74 bp, Homo sapiens
cgttgtgtgaagagtatcattcgacaggttaaatggaaaccacccttgggaactggatgcctgtgtagctgttc

SEQ ID NO: 132327 - DNA, 75 bp, Homo sapiens
taaaagaccaactaaaaagaaaactccaagggattacgcggaatgggataagtgcttgtgaatgacttcttcttg

SEQ ID NO: 132328 - DNA, 100 bp, Homo sapiens
tccatgcaaactggggatttggttttgccttacactaaaagcattacctcacctcatccagctcgatgcattctatttctcatcatttggctcataactg

SEQ ID NO: 132329 - DNA, 49 bp, Homo sapiens
gcgacgttgctggtaatagaaggtgaacagggatattgtgtcaggcctg

SEQ ID NO: 132330 - DNA, 98 bp, Homo sapiens
aaagaccaaattgctattagagagattgaaagctctagagaaatctcctgcaaagaagctgagccatgcaattagtaaatctttggggtgtgtaccca

SEQ ID NO: 132331 - DNA, 75 bp, Homo sapiens
caaactgatcccctggccgttggaggagcagttccttgtcttaaaagaagaagcatctgattaccttgaattgga

SEQ ID NO: 132332 - DNA, 90 bp, Homo sapiens
tttgatattgatgaagctgaagaaggtgtaaagattggcggcagtaagcacacaatgaatgatcacctgcatgtcggcagccacgctcac

SEQ ID NO: 132333 - DNA, 101 bp, Homo sapiens
aagcaatggtacctggaggtgcaaggtgtgcgccaaggaaatgctggattctagtgacatttataacgaattgaaagaaacatatcctaattatcttcctc

SEQ ID NO: 132334 - DNA, 75 bp, Homo sapiens
tttacatgtattggagaccagaccagaagcccttctgaattaagcaaacggggattcagcgtccgatcctttgga

SEQ ID NO: 132335 - DNA, 104 bp, Homo sapiens
tttcggtccccgccgaagtcaccgtgatcctgttagatatcgaagacaatgcagatcttcgtgaagactctgactggtaagaccatcaccctcgaggttgagcc

SEQ ID NO: 132336 - DNA, 80 bp, Homo sapiens
tcgccgtgcccgagaatagctccgtccagcaggtgtcgtgaaaactacccctaaaagccaaaatgggaaaggaaaagact

SEQ ID NO: 132337 - DNA, 100 bp, Homo sapiens
ggggcctctccagggagtgctctgttcacggctccatcgctgttagcccctccagccagcgtcaggtgcagaatggcccctctcctgatgagatggacat

SEQ ID NO: 132338 - DNA, 96 bp, Homo sapiens
accagagcttcaagactgtttaggacaaacactggtgctgatcggatctctctcagccttgtctgcttatcacactggcttgatcgcgcccatgaa

SEQ ID NO: 132339 - DNA, 87 bp, Homo sapiens
ggtctacgagctgtttctcatctttatactcttccaggtcttgaggaccggcccagctcaggctcctggggcagcggcgaccagagc

SEQ ID NO: 132340 - DNA, 75 bp, Homo sapiens
gaaaatacagagcttcttacaactttaggattactctacttacaggtgaggtcccagcttgaagagaaagaaaac

SEQ ID NO: 132341 - DNA, 75 bp, Homo sapiens
aggggccgcgccgccaccgtctgaactaggatgtcccgacatgaagaaaactttagaaactgttcctttggagag

SEQ ID NO: 132342 - DNA, 100 bp, Homo sapiens
acatcttgactgatgttgtcattgttgtgagccgtgagcagtttagagcccataaaacggtcctcatggcctgcagaatcgtactcataatcagctctgc

SEQ ID NO: 132343 - DNA, 96 bp, Homo sapiens
acaaccccacagaggactttaggagaaagttgctgaaggcaggagggccaaaactggacaagccaaggcatctgtagccaaagtaaacaaatctac

SEQ ID NO: 132344 - DNA, 99 bp, Homo sapiens
cgctctcagctctcggcgcacggcccagaaaattttaagagcttgcattgaacaagtgaaaaagtattcagaattctatactctccacgaggtcaccag

SEQ ID NO: 132345 - DNA, 100 bp, Homo sapiens
gtctgctgatcacttggagtgctgtcccttggaacaggaggagtaagattgaggtaaaatctgtaaaaactgggtcagttttttggacaatgtgctgctg

SEQ ID NO: 132346 - DNA, 89 bp, Homo sapiens
cttttgagtgcaactgccttccagttgcaggacgaggagcggaggcggcagcagcagttagaagagatgcgcaagcgggaagcggaaga

SEQ ID NO: 132347 - DNA, 50 bp, Homo sapiens
aacctgcagggcctctagatttttagaaagagcgttttcgctacgtaaag

SEQ ID NO: 132348 - DNA, 100 bp, Homo sapiens
cccatgtgctcctggccgtggccaagctgagggtaaaaagctgggattggtaggctgggtccagaacactgaccggggcacagtgcaaggacaattgcaa

SEQ ID NO: 132349 - DNA, 112 bp, Homo sapiens
aatatctgtcttcggtggactccttcggcagtccacccaccgccgccgcctcccaggtgtttcccattaaacactaccaggacaaaatcaggccttacatccagctgccatc

SEQ ID NO: 132350 - DNA, 100 bp, Homo sapiens
atctggaggacggagaggacctgttcaccagcactgtctccaccctagaggctgaacaagaagcatggcaccagcatctgcttctggtgaggacctcagg

SEQ ID NO: 132351 - DNA, 75 bp, Homo sapiens
gcggacccagctcgctcctggtagcaagacccgaactgtcctgccgccacccccactggtgcctgtggttccggt

SEQ ID NO: 132352 - DNA, 100 bp, Homo sapiens
acacactcaacacattagacggcctcctgcatctgatggggaaatcctcattgacgattcaatttgttgaaggccaatttgtggactcctacgatccaac

SEQ ID NO: 132353 - DNA, 109 bp, Homo sapiens
cagcctccacccaccggcccaccctacatttagcgcatcatgtgatccgggattatcgagattgcagcctgtcactccacacacacgtctgcggccaagacgcagggtg

SEQ ID NO: 132354 - DNA, 75 bp, Homo sapiens
gaaccctgcgcctctgggatctcacaacgcagtacgccccgaggtgctccgtctgctctgagcccatcatgcctg

SEQ ID NO: 132355 - DNA, 83 bp, Homo sapiens
ggagaatcgaggagctcaacaagccacataaagaagatccctaatagtcatttctcaacaattatatagtcaactgatgtaac

SEQ ID NO: 132356 - DNA, 97 bp, Homo sapiens
tgagacagtattacacactgctgaaccaggccccagacatgctgcatagtttttagtgggcatgaaaggcaaggatgaagctatggccattggaggc

SEQ ID NO: 132357 - DNA, 60 bp, Homo sapiens
gctgtgggctgtgttccacaagttcaaagaaaaacacaccttgactttagtcagatacat

SEQ ID NO: 132358 - DNA, 90 bp, Homo sapiens
gttcccggctccgtggggccgtcttcccggcgagtccgcgacggtcgccgcccacggcgagatacttggcatatcgaaattttatgattg

SEQ ID NO: 132359 - DNA, 89 bp, Homo sapiens
ggcagcgcgggatcccagcctcaggcgtgcgcggacggtgtgcgggaagcaatgaggctccccaagaacacacctgaggaaaaggacag

SEQ ID NO: 132360 - DNA, 82 bp, Homo sapiens
attttgtcagcttgtcgtcaagacgagccaaactcaggctgtaccttgagcagctcaagcaactggtgcccctgggccccga

SEQ ID NO: 132361 - DNA, 75 bp, Homo sapiens
ccagtgatggtgccatttcagtaccaagcctttctgctccaggtcaaggaattgcattttgtgaaaaaagaacaa

SEQ ID NO: 132362 - DNA, 99 bp, Homo sapiens
gaacctgaaggctctccggaaattgcgctaggttacaggagtgtaaggatggttggattggtgttcgatcagtgatgctcaagaaatcactaacagcta

SEQ ID NO: 132363 - DNA, 90 bp, Homo sapiens
gccgacgctcaaggatggtgatttcatcttgaccgaaaggccacggcagagacaacgtgtgtaccccaagtgcacatggctgaccacccc

SEQ ID NO: 132364 - DNA, 74 bp, Homo sapiens
ggacgcgcgcagcccgcccgcccggcgaccagcaagtgatgatgatgatgattttgatgatgaggaagctgaag

SEQ ID NO: 132365 - DNA, 98 bp, Homo sapiens
gccaaagcctgcccagacggctcacctgtgcgggatggaacaaaaggtcttgggcgtctttggtactggcttttttaggggtctgcctggggattacc

SEQ ID NO: 132366 - DNA, 100 bp, Homo sapiens
gaagaagtctgtgtcgctgtgtggtgagctctccaggccaggtgccgcgcggcctccacctctgcggcagaggcaaggctggcagcaaaacgggctgccc

SEQ ID NO: 132367 - DNA, 100 bp, Homo sapiens
aatcacttaaaggagtggacattgctagcaatgagctcccaaagccatccagacatggcccatgaacatggacatgagcatggacatcataaaatggaac

SEQ ID NO: 132368 - DNA, 83 bp, Homo sapiens
ccagaacatacacttacatctctagataacagtctgcactttcacccgtttcaggtaaataccagctgtcccctacagtgaat

SEQ ID NO: 132369 - DNA, 90 bp, Homo sapiens
gatgaggtcaacttcttggtatatagatacttgcaagagtcagcctcccaaagtgaaatgcctgaccaagatctggcaccccaacatcac

SEQ ID NO: 132370 - DNA, 100 bp, Homo sapiens
cgctggtttaacatttcgtttgatatttttggtcgcaccaccactccacagcagaccaaggcaattgaaggaacagactaaaaatcgtgtcctggaagga

SEQ ID NO: 132371 - DNA, 100 bp, Homo sapiens
gtgtacggggggctggcctccatcactgctgagtgcgggacacagcaggtcaggagagattcaacagcattacctcagcttattacagaagtgccaaggg

SEQ ID NO: 132372 - DNA, 98 bp, Homo sapiens
gcggggcgacgctggctgcagggacccggtgacagcgtgagaggactattggaaatgcacttcatgcaatgaaatgaatcccccccttccatcacatt

SEQ ID NO: 132373 - DNA, 50 bp, Homo sapiens
gatttaaaaagaatgggtttgaagattgtagaaggcatgaaacaaaaaat

SEQ ID NO: 132374 - DNA, 141 bp, Homo sapiens
ccacgctccagaacagcatcagtgttttttaagggaccaggaaaagtggtgatggttgcaatttgcatacatcttcatgcccgttagttcatcgtttgcctagcatgtccctgtggcgtctcaaaaaaaagtttcatcgtc

SEQ ID NO: 132375 - DNA, 89 bp, Homo sapiens
ggcaaggagctaaagcagcgtgcgttcagccctgggtgtctccagaacgctatagctatggcacctccagctcttcaaagaggacagag

SEQ ID NO: 132376 - DNA, 98 bp, Homo sapiens
tggaccactctgcaaatgcagcgcaaaggcaagacgcacaggaattaggcacagcatttatcctggagaagagcgcttctctgaagtagctttggaaa

SEQ ID NO: 132377 - DNA, 100 bp, Homo sapiens
aaggaacgtgcccgattgaagacagtgaagtttaatgccaaacctggagtgattgattcgaaaggggacttgccatcaactacccaaccaaaaggacgac

SEQ ID NO: 132378 - DNA, 75 bp, Homo sapiens
gctgctgtgatgtggaggaagaagagctcagtgtttcctgaggttataggcgggtgtttgaggagtacatgcggg

SEQ ID NO: 132379 - DNA, 75 bp, Homo sapiens
ccgggccctcgagacggggacgattacgggcagggacgacctgtcaaagcgcggagtggaccaaacctgcactcg

SEQ ID NO: 132380 - DNA, 75 bp, Homo sapiens
cacttttgaagggaatttctgcccagatagtgtctgcagctgttttggagccctctcttaagtcagaactctgtc

SEQ ID NO: 132381 - DNA, 50 bp, Homo sapiens
ccacaatgcatcgctggaagtagccaatgcagccgctctctgctccctgc

SEQ ID NO: 132382 - DNA, 88 bp, Homo sapiens
aaaggaagcaagcagttcagaagagccaaggaataaacatgcaatgaacccaaaaggaatctgaattatccagaacagaaagttgtga

SEQ ID NO: 132383 - DNA, 100 bp, Homo sapiens
gctaacctggtgcggagccagcctgggtctcagccccgcgtacggcctttcacgagtcttcaagccttcaggccaccaccacctatcatgacagatggtg

SEQ ID NO: 132384 - DNA, 100 bp, Homo sapiens
ctgtgatttacctgggtgagacagcttgagccccatcgtggattccaagacatccctgctgagagagccaagacaatagttgaacttgcagagacaggaa

SEQ ID NO: 132385 - DNA, 75 bp, Homo sapiens
caaggaagcaacaagatcctaagattttcagctgaactctcatctctcaacactggcaaatattcataagatcta

SEQ ID NO: 132386 - DNA, 100 bp, Homo sapiens
tgaaactgactcttcccctccaccatatagtagtattactgtggaagtacctacaacttcagcggtcttgcgagtggctggttccctgcagaagagcaca

SEQ ID NO: 132387 - DNA, 82 bp, Homo sapiens
cgatgccagacacggggagcacccgtcagtgaccccatccacctctctgtatccaatgtcgagcaaaagatgtgataatacc

SEQ ID NO: 132388 - DNA, 50 bp, Homo sapiens
tcccgagtaactgggactacagaagaagcctgggaagtttataaacagat

SEQ ID NO: 132389 - DNA, 102 bp, Homo sapiens
atgttgaccaaatgcaccagcacagaagtggaattgaatctgctctaaaggagaccaaggttacattcacttcgttccctaagtcttcacaataacttgctg

SEQ ID NO: 132390 - DNA, 100 bp, Homo sapiens
ccccaatgggggtgacttccagccaggctgtggactcaacgatgtcttgggatcaattgcatatggaagttatcaatactctggctgaccatcatcatcg

SEQ ID NO: 132391 - DNA, 100 bp, Homo sapiens
cagacatcatgagggccgttaccattacgatccatctccgattcctccattgcatatctgtcctgagagcacgtctctacatctctacctgcattctgga

SEQ ID NO: 132392 - DNA, 90 bp, Homo sapiens
cagcctcacttctttgattgaatacttacataatgcattggaacatgacatgagattaaggacacagcattgttggttttgccatgtact

SEQ ID NO: 132393 - DNA, 101 bp, Homo sapiens
gaagctgcggccgcacctggccaaggctatggaaagggcaaatggaatggagctggatggtagaagaattcgggtggattattctataaccaagagagcgc

SEQ ID NO: 132394 - DNA, 100 bp, Homo sapiens
cttgacgcgctggagcttgagagcgcaccctttgcatatctctacctacttgtgcataattcagcatccagcagaggaagacaaaatgttgcggacagtt

SEQ ID NO: 132395 - DNA, 88 bp, Homo sapiens
cctgcctcagcctcccaagcagctgagactacaggccatggcccaaaaggaagatatggaagagagaatcactactcttgaaaaacgc

SEQ ID NO: 132396 - DNA, 90 bp, Homo sapiens
gccagtgtttccgtcagtacgcgaaggatatcggtttcattaaggtgccttatgcccgctcagaggcccacctcacagagctgctggagg

SEQ ID NO: 132397 - DNA, 46 bp, Homo sapiens
acattgtggagtggctgaagaaagtacccagtactatgacatgcgc

SEQ ID NO: 132398 - DNA, 100 bp, Homo sapiens
tgttccagagcatggagatcaaggtggggctggtgtccgagcacttctcgcaggccccgcagaggctgtccttctacagctggtacggcagtgccaggct

SEQ ID NO: 132399 - DNA, 75 bp, Homo sapiens
cgactttgacttcctgccaaaatcctgttaccctagcaacagtgacaaccatgagtggaaaaaactaattatggt

SEQ ID NO: 132400 - DNA, 98 bp, Homo sapiens
caagaaggacgagcccaagagcggcgaggaggcgctcatcatcccccccgacgccgtcgcggtggactgcaaggtccaaccgtgactgccagatcgac

SEQ ID NO: 132401 - DNA, 100 bp, Homo sapiens
agaaggttctctggtggaggcgctcttcctggtgtcccgcccagtagatgccttcaattaagttgcagagttctgatggagagatatttgaagttgatgt

SEQ ID NO: 132402 - DNA, 75 bp, Homo sapiens
gccagccaccagttcaggagcacttgggagtgatctaggaagtgtttggattgtgagctatttcagaactgttct

SEQ ID NO: 132403 - DNA, 82 bp, Homo sapiens
tcttccatcaatcatatctcacaggtatgccattgcattggccttaagggaaaagcagcgtgtaatatttaccagcccaatt

SEQ ID NO: 132404 - DNA, 88 bp, Homo sapiens
atgcccaaatcccggaaactccagcgtgtctccagccgtggttttcacctcaaatggccccacggtgatcatgcccacctggttctgc

SEQ ID NO: 132405 - DNA, 75 bp, Homo sapiens
ggagtgtgcgacggattgggagtattggatacaaatgaccgatttctacgaaaaataaccatcgggcagggaaac

SEQ ID NO: 132406 - DNA, 50 bp, Homo sapiens
gctgacgctgggcccgcctcgagaaggcgtccagctcagcgcatgaaggt

SEQ ID NO: 132407 - DNA, 75 bp, Homo sapiens
atcagctggcctggtttgatactgacctgtaaatcatcctttaggttatggaggttttgatgactatggtggcta

SEQ ID NO: 132408 - DNA, 100 bp, Homo sapiens
cctgagggaacatatggagagcaacttgttcctgagctgtgcaaccaatcagagtccagtggagaaggtggccccctgctgtatgaaggcatcagtctca

SEQ ID NO: 132409 - DNA, 50 bp, Homo sapiens
aggtccatacatgaagtcaccataagctgtcccctttcctccaacccaac

SEQ ID NO: 132410 - DNA, 75 bp, Homo sapiens
ctgtcgctgcatctttctcatgaagcacggggaacgggtcggatgggccaattcctgtccccccagcagcatggc

SEQ ID NO: 132411 - DNA, 100 bp, Homo sapiens
gtgagacagattcagcccaggatcagcctgtgaaggttgtggcagcactgcctgaaggtatgagaccagattctaatctttatggttttccatgggaatt

SEQ ID NO: 132412 - DNA, 100 bp, Homo sapiens
tgctgaatcacacgccgccatccgggaggcccagggaaggttcgagaacttgtcttggacaattgcaaatcaaatgatggaaaaattgagggcttaacag

SEQ ID NO: 132413 - DNA, 82 bp, Homo sapiens
cctcagcagatgaaatacatgaaggagacctagtggaagtggttctttcagctctgaccacaaagccgagctctctgtcctg

SEQ ID NO: 132414 - DNA, 100 bp, Homo sapiens
cttttgtcgtctaccgctggcaaggagatgcccgccaaaaagctctgaaggacttgctgaaatgggtcttagaggtctctgtcccacctggtgctctgga

SEQ ID NO: 132415 - DNA, 111 bp, Homo sapiens
gccgtccttctccactttcgccagcccgtgccgcgagcgcggcctgcaggaggttgacatcatggacatatgtgagtccatcctggagaggaagcggcatgacagcgaaag

SEQ ID NO: 132416 - DNA, 75 bp, Homo sapiens
cctacgtgaaggatgacatcttccgaatctacattaaagggtataatagactacattttctattctaaacctcag

SEQ ID NO: 132417 - DNA, 50 bp, Homo sapiens
gaagaggcgagtccggtctcaaaatggagccctccagaatacccatcata

SEQ ID NO: 132418 - DNA, 50 bp, Homo sapiens
aacagcagtattatttgaacaaagggtttgtggatgcacttagatgtttg

SEQ ID NO: 132419 - DNA, 76 bp, Homo sapiens
acaaaagccaagaggaggacagttcgctacacagcaatgcatcgaggtcttctcgtgggcaccctggacgtggtgc

SEQ ID NO: 132420 - DNA, 75 bp, Homo sapiens
tgggatctttccggatcaatccagatggcagccagtcagtggtggagactgtggatattcataaggagaaagtgg

SEQ ID NO: 132421 - DNA, 83 bp, Homo sapiens
cacggggccgctgctcaagttccagatttggctctgggcgtggggaggctgagacacgggagtgcatctactacaacgccaac

SEQ ID NO: 132422 - DNA, 74 bp, Homo sapiens
cacctcactattgatggtgtagcgctttaggggaagagcgtttcccaaagtgtattctgcggaactagcaccta

SEQ ID NO: 132423 - DNA, 82 bp, Homo sapiens
cctggagcgactgaagaagattcgggcccatagagggctgcgtcacttctgggggtcagtatggtggtcatcatcaaggcat

SEQ ID NO: 132424 - DNA, 82 bp, Homo sapiens
caacatttcaggaaaacagagaaagaagtgataggagggctctgtaggcatgaatgctttacagttgcagaacctggcgacg

SEQ ID NO: 132425 - DNA, 50 bp, Homo sapiens
catccagctgatgcccttcttcgtggctaccagggcatggtggacggagg

SEQ ID NO: 132426 - DNA, 97 bp, Homo sapiens
gcagaggaagaagtattccaactccaacgtcatcatgcacgagacctcgcagtaccacgtccagtgggctcgggatgagtttgaaggcctcttcaag

SEQ ID NO: 132427 - DNA, 100 bp, Homo sapiens
gatcctcaagaagaagaagttgcgaaggatccccaacggggaggccaacgtgaagaattggaaagacttcaaatcatgcaatagttcttgcccagctcat

SEQ ID NO: 132428 - DNA, 75 bp, Homo sapiens
aaaaaactggctgtgaataatatagctggtattgaagaggtaaagagaaatgtgtatgaccttacaagtatcccc

SEQ ID NO: 132429 - DNA, 50 bp, Homo sapiens
cttagtcacacacggcaagaggatgaggtgaagaaactgaggctctgaga

SEQ ID NO: 132430 - DNA, 74 bp, Homo sapiens
gtccttgctcctggtgaattcggtaaccatagaccaaaaggaattaaggataacctagacgacataaagaggat

SEQ ID NO: 132431 - DNA, 50 bp, Homo sapiens
ctcagctgctgactgatgaggcactgaaccttttgaagatgctctcaaga

SEQ ID NO: 132432 - DNA, 95 bp, Homo sapiens
tattggtgtccactgtacccatggtttaaacaggactggctacctcatttgcaggtcattaaatttgacggtggagaggaagtacttatttcagg

SEQ ID NO: 132433 - DNA, 83 bp, Homo sapiens
ctcgcgccggctatggccgtgccctggggctgagccctcaggggacggcaaaacagaacagaaaggcggagataaaaagaggg

SEQ ID NO: 132434 - DNA, 120 bp, Homo sapiens
cctcaacacggaccgcgcccgccgggcacacaagaatggtcactggaaagcaggcaggatgggagagtcgccgatagaaccacctcttccctgcctcctgggcttgggggaagcttgaat

SEQ ID NO: 132435 - DNA, 90 bp, Homo sapiens
gttggagaactatagcaatctggttttcttggtatgagaaggcgctcctgcgtggctatgtggagagctgctccaacctgacctggtgca

SEQ ID NO: 132436 - DNA, 83 bp, Homo sapiens
ggggaccagcagctgtcgccgccgctctcagttttcggctttgtgagaaaccttaccatcaaacacgatggccagcaacgtta

SEQ ID NO: 132437 - DNA, 75 bp, Homo sapiens
gacagttgtttggtgttttgcttcaggttatagatggagagacctataaagaatcccacgtggcgaagtctcgat

SEQ ID NO: 132438 - DNA, 101 bp, Homo sapiens
aaactggataacactaagtttagatctcatgaggtgtatgcaacagcgttattgcaacaggctaacgaaaacagacaaaattcaactggaaaagcatgttt

SEQ ID NO: 132439 - DNA, 87 bp, Homo sapiens
agatcatcattaaggacggaggcacgaatccacattcatctcaatggaaggatcctgccttaagtcaacttatttgtttttgccggg

SEQ ID NO: 132440 - DNA, 83 bp, Homo sapiens
ggagaatatggtgcagaggccctccacgatttaggcctattaaaggaaggcaggaagaactaaaggaagtaattgaacgtttt

SEQ ID NO: 132441 - DNA, 83 bp, Homo sapiens
gggaggatgaagttgattgactatggtctctccggctaccaggcggacctacgtgggcgccatgcccgggaagatcatccagt

SEQ ID NO: 132442 - DNA, 98 bp, Homo sapiens
gatacagctcggagagagagagatgccctgcagctggaaatgagcttggtgcaggccctgtctctgcccctggtggtcatcgtccatggcaaccaaga

SEQ ID NO: 132443 - DNA, 75 bp, Homo sapiens
tggcctccatcttcggcaccgagaaagacaaataagagtgcccaggagtggaatctggaaatagagtctacattt

SEQ ID NO: 132444 - DNA, 88 bp, Homo sapiens
cagattcgcagtggtcgcttcttctccttggatgtatcaggaatgccagctctgtgctctccaatttcccagggagggggtggttttg

SEQ ID NO: 132445 - DNA, 111 bp, Homo sapiens
gggagcggggtcccataggttacggccgattcctggagcttctggactgagggccgcgtctattatcctcccagtccacaacgctgaaccgtggctggacgaatgtttgag

SEQ ID NO: 132446 - DNA, 75 bp, Homo sapiens
ccaggcaggaaaggggttaatgcatcacttggctgctgaatcaggaataataaaagttaaaacaattgctgcacg

SEQ ID NO: 132447 - DNA, 80 bp, Homo sapiens
tcgcagctccattaatgcaactaccattacactaagatgatggatttggacatgcttctatgaagaaatgccacatggtc

SEQ ID NO: 132448 - DNA, 100 bp, Homo sapiens
cctccccagccacatggaactcgtcatcacgtagacataaccaagaaacttcacccaaatcaagctggcctggattcaaaagtactgattggtagtcaga

SEQ ID NO: 132449 - DNA, 74 bp, Homo sapiens
tcagcgaggagcagcagcagctccagcaggcgctggctcctgctcaggtttaactatagatcaacacatcatct

SEQ ID NO: 132450 - DNA, 51 bp, Homo sapiens
ttccggaaggtgtcttagaggacattaaagctattggaatcagatgcaaag

SEQ ID NO: 132451 - DNA, 100 bp, Homo sapiens
acaacaaatgttatgcaaaaataatctgtaatactaaagacaatacagcaccagttgcccttgaagcagaaaacagaggtgaaatgaaactagctctcca

SEQ ID NO: 132452 - DNA, 82 bp, Homo sapiens
cccccagcgctctgataaaaataatgtgtttctaagacctcagagaaatttggaatctatagacccgcagtttacaatccgg

SEQ ID NO: 132453 - DNA, 90 bp, Homo sapiens
cgccccgcgagcacagagcctcgcctttgccgatccgccgcccgtccacacccgccgccagcgccatcatgaccgggtcctataacaact

SEQ ID NO: 132454 - DNA, 83 bp, Homo sapiens
cgcacttcgtcatgttcttcgcgccctggttgacatcatggacatatgtgagtccatcctggagaggaagcggcatgacagcg

SEQ ID NO: 132455 - DNA, 75 bp, Homo sapiens
ttggagagactgccatgaagcaagggtagagaagatgaagtccatgtcacagcttgcagttttgtcaagacggtg

SEQ ID NO: 132456 - DNA, 100 bp, Homo sapiens
ctggcagccgccttggtagcagcgggtgacatggaaggggcagtacaagcttacgtctctgctcttcagtacaatcctctgtgcggtcagagaagaaacg

SEQ ID NO: 132457 - DNA, 83 bp, Homo sapiens
ggcagccgcggatctcaccgccgctcaggagcctggcagagagcaggtgtgtgatacacgtcgtcaggtgactgaccgaggaa

SEQ ID NO: 132458 - DNA, 98 bp, Homo sapiens
ttccttcttccttcccctcctcgccgccaccgcccaggaccgccggccgggggacgagctcggagcagcagccagagctgagctcaatgtgcagcaat

SEQ ID NO: 132459 - DNA, 98 bp, Homo sapiens
gggcggcagcatgtcggtggcggggctgaagaagcagttctacaaggcgagccaggtgatgtgtccaatctagatcccaacttctcatttgaaggcac

SEQ ID NO: 132460 - DNA, 82 bp, Homo sapiens
ggcggatgaagcagctggtggggctctactgcgacaaggttattcagcttctcaaggctggaaaagcgaaggaagtttccta

SEQ ID NO: 132461 - DNA, 74 bp, Homo sapiens
gtacaagctcctgcgggccggcgggatcattgagaagcagccaggccacattcggagcagggttttcagggagg

SEQ ID NO: 132462 - DNA, 96 bp, Homo sapiens
agacccatgctttatgaagcaatctgtaacttgcttcaagatcaagatttagtgaagaaaaagtcagcactttttgaagtgtctgaggttatacca

SEQ ID NO: 132463 - DNA, 99 bp, Homo sapiens
tttgccattcatggaaacttttctggacacattcagctaacgtattttagcaggtggagtgaggttgaagattcctgtgacagcgatgccatagagaga

SEQ ID NO: 132464 - DNA, 96 bp, Homo sapiens
cggccggggcagcgctcctggcgctgctggctgcgctctgcccggcgagtcgggctctggaggaaaagaaagatgctttctgatgcagcacctggg

SEQ ID NO: 132465 - DNA, 74 bp, Homo sapiens
tggagttcgaacctggggatcgggtaaagataccaggtattgggaaatgagagagcagcgcacccccactttga

SEQ ID NO: 132466 - DNA, 100 bp, Homo sapiens
gacactatgaatgctacttggatgcctcttaagagcctgtgtggtgcccctatctccttgttccaagggcctctcttgccttgaaagccttcttattaca

SEQ ID NO: 132467 - DNA, 100 bp, Homo sapiens
gtctgagtgcgttggtcggcggcagtcgggccagacccaggactctgcgactttacctccagaaacatgacaaggaggactttcctgcctcttggagatc

SEQ ID NO: 132468 - DNA, 84 bp, Homo sapiens
gtcagtgcgccgctctccagcccgcttgaacggttttaaaatcaaagatgggaaaatcggagaaaattgcccttccccatggcc

SEQ ID NO: 132469 - DNA, 51 bp, Homo sapiens
gatagaatgagaatgaagtatgggtaagaatgattgatgttggctgatatt

SEQ ID NO: 132470 - DNA, 50 bp, Homo sapiens
cctggtcatcttctatttccaaagactccctggaggaaaagcggaagcgg

SEQ ID NO: 132471 - DNA, 100 bp, Homo sapiens
ggaaatggttgtggactacgtctgtgcggctgcgtggggctcggccgcgcggactgaaggagactgaaggcctcatggcggtccgagcttcgttcgagaa

SEQ ID NO: 132472 - DNA, 101 bp, Homo sapiens
accattaatggacaaaaacatgagtcaatatgtattgtggcattcaaatcctagcactctgggagaggttgatgccgtcagaattgttcacattcattctg

SEQ ID NO: 132473 - DNA, 100 bp, Homo sapiens
ggaggtagaagaattcctgaaagaagctgcagtaatgaaggaaatcaagcatcctaatctggtacaacttttaggtgttggagcgggccggagagaagta

SEQ ID NO: 132474 - DNA, 100 bp, Homo sapiens
atcaacctaagttttaaacagaaggtgaacctctgagaaaaatggctacaaacttcctagcacatgagaagatctggttcgacaagttcaaatatgacga

SEQ ID NO: 132475 - DNA, 100 bp, Homo sapiens
agcaagttagtggattaaaatctcccaagaggaatgacaaacaaccagctcttcagatatgaggccccaggattcctggcgaggtcctcctccccttttc

SEQ ID NO: 132476 - DNA, 75 bp, Homo sapiens
cagattatattaatgccaactatattgataaatggcgaaaagtcttttgaagacagcctctctgtctggaaggac

SEQ ID NO: 132477 - DNA, 100 bp, Homo sapiens
gggagtgatgtcttccagactcggtgctgtacccgccttttcggctttgtgagaaaccttaccatcaaacacgatggccagcaacgttaccaacaagaca

SEQ ID NO: 132478 - DNA, 96 bp, Homo sapiens
tgaaccagttcccatttctgaagaatctgaagagctggatcagaagacattcagcattaaatctcctttacagacaataggtgaagaacaaaccca

SEQ ID NO: 132479 - DNA, 82 bp, Homo sapiens
gagcatgtcgaccccggcccggaggaggctcatgcgggatttcaagcgtcgctgaaacctctacaacttagttgaccgtaac

SEQ ID NO: 132480 - DNA, 98 bp, Homo sapiens
tcctcactaagctgcctgcgcacacagaggcatttcatccttcatgaagccattcaggattttgaattgcatatgagtgcttggctcttccttctgtt

SEQ ID NO: 132481 - DNA, 83 bp, Homo sapiens
cggacggtggcgggcgagcggctcctctgccagagaacatccagtcatggataaaaatgagctggttcagaaggccaaactgg

SEQ ID NO: 132482 - DNA, 97 bp, Homo sapiens
atgccgcctcacatctacgccatcgcagacacggcctaccggagcatgcttcaagtttgttctgtcagtcaaaaccaagggagaagattgttcccaa

SEQ ID NO: 132483 - DNA, 101 bp, Homo sapiens
tacacggccagcgtgaccgttggcagcaaggaggtgaccctgaacctctacgacacggccgatgggtccgctgtgtgcagaggctccatgggatgtgttgt

SEQ ID NO: 132484 - DNA, 83 bp, Homo sapiens
ccttgagtcagtgcgccgctctccagcccgcttgaacgatggccaccatgtctgggagatggaagcgaaaactgaccgggacc

SEQ ID NO: 132485 - DNA, 95 bp, Homo sapiens
attgttcaggcacgcagcatctaccccatcaccagaacccagcagcttgccagcatcgttgcagttggcagatgcactacctgaacactcccctg

SEQ ID NO: 132486 - DNA, 100 bp, Homo sapiens
cgacaagttcaagcagctgcttgccggccccaacacggaccttggctggctacagcaaacatcattcaagatgtccagcaaagggagcagcacagatggc

SEQ ID NO: 132487 - DNA, 100 bp, Homo sapiens
gaactgactgccccgcatcaccggagcgtcccagctgcgaggaggtactccaaagattcaggtttactcacgtcatccagcagagaatggaaagtcaaat

SEQ ID NO: 132488 - DNA, 74 bp, Homo sapiens
cagatcctgccccgtggccgcggccgtctcgtagtctgcagatctccaggggagcccaccagcctagtcaacat

SEQ ID NO: 132489 - DNA, 101 bp, Homo sapiens
gcaatcttaaaagaaactgtgaagcaaattcgtcagatcaaagaacaagacagaaagaatttactttcaggttttcttacctaaagggagcaaagagaaga

SEQ ID NO: 132490 - DNA, 98 bp, Homo sapiens
cctctctgtccgggcgctgcaggagatgctggctaacaccgtggagaaatcagaaggggattaccgagaggatgggatggatctaggcagtgacgccg

SEQ ID NO: 132491 - DNA, 100 bp, Homo sapiens
atggtgtcttgtaatcgtttgtgggtggggacaggaaatggtgtcattatctccatcccattgacagaaagtcgttccaggggtagaggaggcatgaagg

SEQ ID NO: 132492 - DNA, 82 bp, Homo sapiens
ttgctgtcagccatgaacggatggatgtgatgcctgctagccaaaagggtgtggatgaggtcaccattgtcaacattttgac

SEQ ID NO: 132493 - DNA, 100 bp, Homo sapiens
caggtttcgagatttgctgctaggggaccaaggatggcaaaacgacgacagaaaaggatgcgcctccacttagcaaggctgggcaggatgtggttctgca

SEQ ID NO: 132494 - DNA, 88 bp, Homo sapiens
gctgctgcagcccgcgcacagctgctcccttcgccttcgccctttccacctcgcggcagttcggtagtcggtcttctcttgcccaacc

SEQ ID NO: 132495 - DNA, 100 bp, Homo sapiens
tataataaggctgagtgcggagccaaggttggtcaaagaaaaagtgatgtatgaaaaagaggcaaaacaacaagaagaaaagattgaaaaaatgagagct

SEQ ID NO: 132496 - DNA, 74 bp, Homo sapiens
tcccctgagctccaggaagcacgttctctacgtggagcacaggttcttaaatgttagaaaccacaggaatcagt

SEQ ID NO: 132497 - DNA, 127 bp, Homo sapiens
gcacagatcctgaaggatatgggaatcacagagtatgaaccaagggttataaatcaaatgttggaatttgctttccgtcttgtcatctcctaatcagcagaaggaaaagaaagtcagggatgcacag

SEQ ID NO: 132498 - DNA, 100 bp, Homo sapiens
ggagaagcgcagcgacggcgtcgggagagcgcgcctagccggctcgcgattgctgatcatctgggctgtgatccacaaacccggttctttgtccctccta

SEQ ID NO: 132499 - DNA, 100 bp, Homo sapiens
gacccgtcctggttcctcttacttcaatttgaacccatttgaggtctcctctgagcctccggcctccataagacccaaaacagatgacacctcttcccag

SEQ ID NO: 132500 - DNA, 80 bp, Homo sapiens
tgcacctgatagtgcaacacttcaagaataactgaagtgaagtgatggactccgatttggagagtagtaagacgtgaaag

SEQ ID NO: 132501 - DNA, 100 bp, Homo sapiens
cccagatatagccgttggtacaaaggagggtgaggacaaaatcttcttaatcaacaagcttcactccatctacgagaggaaggagagggaggagaggagc

SEQ ID NO: 132502 - DNA, 87 bp, Homo sapiens
ccaacatgaactctttgaaagatttcttctgtatgaccagacaaaaggttacttcttgctgcagattctgcgcaggatcggagctgt

SEQ ID NO: 132503 - DNA, 75 bp, Homo sapiens
tagaacctcacaattaaatgactcttctgaaatggatccctcaacacagaagtctaacgtgaagacattttgctc

SEQ ID NO: 132504 - DNA, 83 bp, Homo sapiens
caaacatattcatgtcaaagctttttccaaagatcagagtactgtggacaaactcattaagaagacaaacctggcccttgtgg

SEQ ID NO: 132505 - DNA, 50 bp, Homo sapiens
aagaagcagtcattgaaaaatgctgactctattgacctgttgtattggcg

SEQ ID NO: 132506 - DNA, 155 bp, Homo sapiens
tgttcgtatacagatctgcagctcatcaatgctgaggagcagacgagtggccaggcttctggggctgactcaactggtactccaaagattcaggtttactcacgtcatccagcagagaatggaaagtcaaatttcctgaattgctatgtgtctgg

SEQ ID NO: 132507 - DNA, 87 bp, Homo sapiens
gcgtacctccacctggagaaggccgactcctggcagaggcccttcagcacctggatgcaggaggtggtggaagctacaatgattttg

SEQ ID NO: 132508 - DNA, 100 bp, Homo sapiens
cgcggaggccgcctgctagcaaggcaccgaccgtcacgagctaacttcctggaagagctttccgtctattttcaaattctttaccgaagcctcagaggcc

SEQ ID NO: 132509 - DNA, 100 bp, Homo sapiens
agaaaaagccaaacgatatcacatggatgccagtggtgaggctgtaagcgaaactcttcagtttaaagctcaagacagccgctgtactgtgttaaggaaa

SEQ ID NO: 132510 - DNA, 82 bp, Homo sapiens
gcaggcagcaactgaggcagcggcaggctcaggtgcagccgctgatgaaggatttgggggcagagcacttggcaggtcatga

SEQ ID NO: 132511 - DNA, 82 bp, Homo sapiens
tatttctcgtcggcggcgccctgcaccgcgcctcgcaaagttcagcagctggacatggagaaccaacgctcatcacctctgt

SEQ ID NO: 132512 - DNA, 49 bp, Homo sapiens
ccacaggctgagctccctgaaccaggtttattcttcagtccaaggaagc

SEQ ID NO: 132513 - DNA, 100 bp, Homo sapiens
gttttagttgaagttctaaagcagggtctcactgtgccacccagctggagtatagtggtgcaaacacagcttgctgcaacctcaatctcctggactcgag

SEQ ID NO: 132514 - DNA, 75 bp, Homo sapiens
ttcggatcatgtctggtggctccgcggattataacagtgcctccggagccagcgtggtggccatagacaacaaga

SEQ ID NO: 132515 - DNA, 73 bp, Homo sapiens
gagaacctctctacattccagtaacccagagatgggggtctcactgggttgctcagctggtctctaactcctg

SEQ ID NO: 132516 - DNA, 100 bp, Homo sapiens
ttttcctgtatgaagcggttggcaccactgaagtgaccgaatgaggcccagttctggtgatgatttcacttttgacagaagctgtccctcaaaagcaaac

SEQ ID NO: 132517 - DNA, 75 bp, Homo sapiens
ttccgatttaaagctgagctgcgaggaaaatggcggcgggagtgcctccggagccagcgtggtggccatagacaa

SEQ ID NO: 132518 - DNA, 100 bp, Homo sapiens
gtggcagtcagcagccggcagcagcagcggggctgtcacatggtgactgaagaacttcattccataacgtttgaaacacagatctgcctctatggcctga

SEQ ID NO: 132519 - DNA, 83 bp, Homo sapiens
gccgcggggcctcgaccctgtggagatcctgcaggagcgcgagtacagcttgcttggctcaggaacaacagaagagaataaag

SEQ ID NO: 132520 - DNA, 100 bp, Homo sapiens
ccggcagggttgtggcgcagcagtctccttcctgcgcgcgcgcctgaagtcggcgtgggcgtttgaggaagctggatgcccagacctggaggatccccag

SEQ ID NO: 132521 - DNA, 83 bp, Homo sapiens
gtcagttgctgtgtttctgccggatcagatgagcagattggttagtgaaggtgccagcgagatttcagattcctgtaaacctc

SEQ ID NO: 132522 - DNA, 100 bp, Homo sapiens
cttacttctccgccaacgcggtcatctcgcagaacgccatcaaccagctggtccacatatagcctcagttacattagctgcttatgaatgcaattcagtt

SEQ ID NO: 132523 - DNA, 101 bp, Homo sapiens
cggagccgcagaaacaagaggccgagccgtgtcgaagatgccccaggatgggtgagttcaacgagaagaagacaacatgtggcaccgtttgcctcaagtac

SEQ ID NO: 132524 - DNA, 95 bp, Homo sapiens
ccccggaaaacctaaccatgaagacttgaacttaatacagcaagaaagaccatcaagtttaccagacaactacacctttgcccaacctgggattc

SEQ ID NO: 132525 - DNA, 100 bp, Homo sapiens
gtactgtgactacagaaagcacagttcctggggtacaggtttgcagattccgccagcagcacagcaagctctacagatgagtggctctttggcatttggt

SEQ ID NO: 132526 - DNA, 90 bp, Homo sapiens
tgaagattctacagataaatcagatggagtctcgccctgtcacccaggctggagtgcaatggcgtgatctcggcgcacttcaacctcgcc

SEQ ID NO: 132527 - DNA, 75 bp, Homo sapiens
aagaaaccaaaaacagcaagcgcagagccaaacagccaggcaggcaaagcgaaggctggagctaggagaaagcgg

SEQ ID NO: 132528 - DNA, 83 bp, Homo sapiens
ctcctaaatgatcgcaaagtgtccttggtatagtagtgggagttctccttcaggatcatgatgttcgtcagagtgaatttcag

SEQ ID NO: 132529 - DNA, 90 bp, Homo sapiens
ctgcagcgagcgctggacggagaggaaagcgtgccctgcaggagtcattaaatcaaaacttcatgctgatcatcacccaccgagaagtcc

SEQ ID NO: 132530 - DNA, 90 bp, Homo sapiens
gcggaggatggggtcaccgccctcagtgtctacctcacccccaagaccaggcccatcaaccgtgagatgcgccacctgattagtagtctt

SEQ ID NO: 132531 - DNA, 98 bp, Homo sapiens
ctctgtacctctgagtgtcgatccagctgccttgtgaccaggacacttagaagaagcatggaccctgcaagaggaattcgacaccaaattttggaact

SEQ ID NO: 132532 - DNA, 74 bp, Homo sapiens
gatcaccgagggcatttacggcagcctccgggaggagttcctgggacacagccattgctgcccaattctatgga

SEQ ID NO: 132533 - DNA, 90 bp, Homo sapiens
tcctgggcaaacctgcggacgacgtagacaagtttggcaacgagatcacccagctggcccggcccctgcctgtggagtatctcatcatag

SEQ ID NO: 132534 - DNA, 95 bp, Homo sapiens
ctggagtccttaaggacagaatttacctctaaacagaaagatggaaactaaagtacatttattctgccagactgggactcttcaattaatctgac

SEQ ID NO: 132535 - DNA, 127 bp, Homo sapiens
gccgtccagcagatggcggatgccctgcagtacctgcagaaggtctctggagacatcttcagcagagagaagaagaaggaggttcctgctgtgccagaaacccttaagaaaaagcgaaggaatttcg

SEQ ID NO: 132536 - DNA, 76 bp, Homo sapiens
gacgctgacatcaatgtcacaaaagcggatgttgaaaaggcactaactgtgacatctatgaccttttttatcatcg

SEQ ID NO: 132537 - DNA, 100 bp, Homo sapiens
ccgggtcctcctagaaattccccccgaagaagactcccccacatctgggcagtcatcaagtgcctactatgactttaactaccatgatggaagcatgtgc

SEQ ID NO: 132538 - DNA, 100 bp, Homo sapiens
gaagaaggaaaaatttactccagagtactgaggtgcaaatatatacagagcttcataatcagcccaagaccacatagagcaaacatgaatgatatttccc

SEQ ID NO: 132539 - DNA, 76 bp, Homo sapiens
gtgtggttccaaggacaatattaagcatgtccctggaggtggtaatggagatgtcctttgcttctcagatgtaaat

SEQ ID NO: 132540 - DNA, 101 bp, Homo sapiens
accagctccgaaatcaccaccaaggactcaagatcaacatggaagaagagagtgaaagtgaaagtgagcaaagtatggattctgaggagccggacagccgg

SEQ ID NO: 132541 - DNA, 100 bp, Homo sapiens
cattttaactaatcctgaggacttcatccggtcaccatctacctattcttcaaatgatttctacctggacaaggactggtactatacccacagataggag

SEQ ID NO: 132542 - DNA, 100 bp, Homo sapiens
cttgccttgaaggacaagaacagcgccgtcaccagcagcagtggacgtcagctcagcgaggtcttcatccagctgccctcgcgaaaggagctgcccgagt

SEQ ID NO: 132543 - DNA, 83 bp, Homo sapiens
gcgggaggataaagaccaccacggccagctgcgggccgtccagcggctgtgccacttctacagcgccgtcatgcccagcgagg

SEQ ID NO: 132544 - DNA, 100 bp, Homo sapiens
cagagccccactgtgacaggacctagcattcaccttcctcttctgttccgagtgcgagaagctctacttctgcaggccccatcccttcccagaaagaaga

SEQ ID NO: 132545 - DNA, 75 bp, Homo sapiens
tagtacttactgcaatgctcgctggaggacaacaacaggctggagttgttgcccatcctcctgcagtgcctccaa

SEQ ID NO: 132546 - DNA, 48 bp, Homo sapiens
gcggaaaatgatccagtcacagcataccctcggggaagtctgggtaca

SEQ ID NO: 132547 - DNA, 75 bp, Homo sapiens
ggcggatctggaggagcagttgtctgatgaagagaaggttcagcagctccacagaacagagcagtgcctcacgcc

SEQ ID NO: 132548 - DNA, 100 bp, Homo sapiens
tgcagccaccctcgctccctctgctcttcctcccttcgctcgcaccatgaaatgcactcggtgatggaaagagagccactattctgaagaacacttggcc

SEQ ID NO: 132549 - DNA, 90 bp, Homo sapiens
cacagcctagccagctcccacagaaactccaagaatttgcctgaccccgggaaagcacaagattttgtgaagaaatttaaccaggttctc

SEQ ID NO: 132550 - DNA, 99 bp, Homo sapiens
tcattctggtcgtcgtcctctgctgcatcatgatgtcaacaaccgtggctcacaagatgaaagagcacgtacttttagtgtttaccaaagaagataacc

SEQ ID NO: 132551 - DNA, 96 bp, Homo sapiens
ggagaagtaactgaaattaatgaagctcttgcagaaaatccaggacttgtaaacaaatcttgttatgaagatgctgtctgcgagcctggctgtggt

SEQ ID NO: 132552 - DNA, 103 bp, Homo sapiens
gggagggagatgactccttgtagctgatacttggcaaagatgtcactgagaggatggaaagaagaagtttgacaaagagagtgaaaaatattactctatcctt

SEQ ID NO: 132553 - DNA, 75 bp, Homo sapiens
gcgtggagtgacggtcacaccgcggcgtgtgttctaggtcagtggcttcaaagactccagttggattcattggac

SEQ ID NO: 132554 - DNA, 75 bp, Homo sapiens
ccgcggccaggcagggaggagaccggcacccagacaggtggcgaaggcagaggacgggtgcctcccaggtcaaat

SEQ ID NO: 132555 - DNA, 78 bp, Homo sapiens
tttggctctgcgtgagtgtggtctacgagctgtttctcatctttatactcttccagcagggagagcaacaagccccgg

SEQ ID NO: 132556 - DNA, 100 bp, Homo sapiens
gaagactccctgcctcctgagtcccaatctcccttgagtttagaaatctggctgagaaataccaaacagtgattgccgacatttgccggagaatgggcat

SEQ ID NO: 132557 - DNA, 82 bp, Homo sapiens
caactgcccagcgtgaccagtggccacctctgcagtgtcttccacaacctgggcatcaagcatgatggaaccatgtgtgata

SEQ ID NO: 132558 - DNA, 100 bp, Homo sapiens
tggcagagtcccagtattaagaatggaatcgaataccattatgtgacaattaccctggatttacagcaggctgctgctgggccccttgacatgtctctgc

SEQ ID NO: 132559 - DNA, 98 bp, Homo sapiens
ccacgccccgggtccggctctcattcaaagctaatgatggaaactggccaacattaaaacagaattctagctcttccgtgaaaccagtgcaggtggcc

SEQ ID NO: 132560 - DNA, 75 bp, Homo sapiens
ggaagaggagcactttgaagtcattaatgatgagattagcctgaggcctgctcagtcgttcctaatgaataaaaa

SEQ ID NO: 132561 - DNA, 74 bp, Homo sapiens
taagaatggtgcctggcagataaatgccagaggattcaacatgagcatacctatgcctgggcatccagtgaact

SEQ ID NO: 132562 - DNA, 76 bp, Homo sapiens
gtgataacacactcagcatcactaaagacaatggctttggccacagccgtcttgtgaaggaaaacctgattgacta

SEQ ID NO: 132563 - DNA, 71 bp, Homo sapiens
atgttccgcctctgggcgttcacgggcatgatggctcagaccccccaccccctggattttccttctccctc

SEQ ID NO: 132564 - DNA, 87 bp, Homo sapiens
ctgcagtcgccgccgccgccgccaggttattaacacggggatcaaagtctggtgtagaaataacagcggtgaagagtttgactgtgc

SEQ ID NO: 132565 - DNA, 82 bp, Homo sapiens
ggtcttgctcggccgatgaagtgcagaggtttttttctgtgtgcctacaagacagtgtgctagctttctggaaacatggaat

SEQ ID NO: 132566 - DNA, 140 bp, Homo sapiens
actaccaagcatgtggctcctggtcagtgtaattctaatctcacggatatcctctgttgggggagaagaatctaaaggaatgtgcacatctcctcctcttattaaacatggagtcattattagttcaacagtagacacct

SEQ ID NO: 132567 - DNA, 100 bp, Homo sapiens
gccacatcaccctgacctgcttacgcccagattctacttcaaagaaatcctgccacccgatgattaaacagtgaataaaatgtcatggctctttcctgcg

SEQ ID NO: 132568 - DNA, 100 bp, Homo sapiens
agacgcggtgggccgcccctccggtcagacacattctatgtgaaaaacatggcaaaatcatggaagccatggaaaagttaaagtctgggatgagattcaa

SEQ ID NO: 132569 - DNA, 75 bp, Homo sapiens
gtagagggagctgtcgtcgccctggaagacgatcccgagttcaacgcaggaagccagcagacctgcagaacttgg

SEQ ID NO: 132570 - DNA, 101 bp, Homo sapiens
cagcagcccccgaaggccctatcaggacatggagtatgaaagacggtttttcgttggaatatacgttgcacatttatggcgattctgagtgtgagggcaga

SEQ ID NO: 132571 - DNA, 100 bp, Homo sapiens
tactatctttgtatcactaagtgtaataggctacaacatccatggaacaattggcttctttgcatgcttttggtttgttaccaaaatatacagtgtggtg

SEQ ID NO: 132572 - DNA, 105 bp, Homo sapiens
ccgagccgggatctcaggtcctcgggggcggcggccacgccaaggacgggtgctggagaatctggtaaaagcaccattgtgaagcagatgaggatcctgcatgtt

SEQ ID NO: 132573 - DNA, 100 bp, Homo sapiens
gcgcagaaagcaggcgaacccgcggcgcaataacggttaaacccatccagagtaatggctgcggccttacccaggaccctgggggagttgcagctgtata

SEQ ID NO: 132574 - DNA, 100 bp, Homo sapiens
aagcaaattaaaaacaggatgaaaaagactgattggctcttcctcaatgcttgtgtggggatatcagtatgaacaacattactcagttgccagaagatgc

SEQ ID NO: 132575 - DNA, 80 bp, Homo sapiens
ctcagaagccatgcccctcaggctggaacttgccctgtctcctcgcagatgaggattttctgccgtctcttggcaaaaat

SEQ ID NO: 132576 - DNA, 98 bp, Homo sapiens
aggatcctgtcgcacggcgtcacctccttctgccccaccctggtcacttccccaccggaggtttatcacaagattaaaaggagcccaagccccatctc

SEQ ID NO: 132577 - DNA, 90 bp, Homo sapiens
gtctcgagctgagccccctaccgggccggatcccgagatacaaggtctcgctgttctacctaggctgttctagaactcctaatgtcaagc

SEQ ID NO: 132578 - DNA, 74 bp, Homo sapiens
gatgatgtcatcctgacagaacttcaaggttactgactttttatgatgtttggtggctatgagactatagaagc

SEQ ID NO: 132579 - DNA, 48 bp, Homo sapiens
aggatttggctttatccgcttgtctatccagaagttaaaggagagatt

SEQ ID NO: 132580 - DNA, 100 bp, Homo sapiens
accagagggagctgtacctgggcctgctctaccccacggaggactacaaggtcttcctgtccacttccaacgaagcggtctataagatctttgatgacag

SEQ ID NO: 132581 - DNA, 100 bp, Homo sapiens
gcgcgccgtgggcgccgagccccatttcttcgatcgcagctacgacaagggcctcgcttggtaccggaagctcttcgtgggcggtcttgactggagcacg

SEQ ID NO: 132582 - DNA, 78 bp, Homo sapiens
ccaggcagctcgccgctccctagcaccttctccagtcgacactctcgcgcccggagattagtgggatggtttggccat

SEQ ID NO: 132583 - DNA, 74 bp, Homo sapiens
gcctgggctgtctggaaatctgaggctactgcagcactggggtgtcagttgttggtccgacccagaacgcttca

SEQ ID NO: 132584 - DNA, 75 bp, Homo sapiens
agcaccatggggaagcgggacaatcgggtgtaaataacagatgcgggtgaaagatccaactaaagctttacctga

SEQ ID NO: 132585 - DNA, 83 bp, Homo sapiens
catcagtaggacatagtggcatctggtcctttgaagggattggtggcaatcaaggtgtgaccaattcagtgaaaggaacgaat

SEQ ID NO: 132586 - DNA, 100 bp, Homo sapiens
cagcgctgtggtggagttctgggatgagaaagatcagtctaaagaaaaggagaagaaagtgaaaaaaacaattccttcctgggctaccctttctgccagc

SEQ ID NO: 132587 - DNA, 75 bp, Homo sapiens
ttcagcttgagccccatcactaggccccctcttctctcctggaggtcagccggccccttgtggctctcaggccag

SEQ ID NO: 132588 - DNA, 75 bp, Homo sapiens
gggaccttgcggtgaggctgcgcggggccgaggccgcctccgagcgccagatggctctgagagattcctctgcga

SEQ ID NO: 132589 - DNA, 75 bp, Homo sapiens
aaggacctcaacccaggagttaaaaaggtcagagtgtccccatccgtctccgagttcctgctccagttagacagc

SEQ ID NO: 132590 - DNA, 50 bp, Homo sapiens
ctcacagtggatgaatggaagcatggcagtggcagcaccatgatgcaaac

SEQ ID NO: 132591 - DNA, 89 bp, Homo sapiens
ctgctttcatccaaaggactccagataattggcacctacgcccagacggaaatgggccacgatcccaaagagaagattgatattgggct

SEQ ID NO: 132592 - DNA, 124 bp, Homo sapiens
cctgaatccatcattgcagctgcatgttcaagaagtggccggagagttctgcatgttgattcagtaaagccaatcccagctgaaggaatcaagtcaaatccttccaagcggcatagagaccgac

SEQ ID NO: 132593 - DNA, 48 bp, Homo sapiens
ggggatcctctgtacgcccgttcactgagtccgaaattgaagttcaga

SEQ ID NO: 132594 - DNA, 51 bp, Homo sapiens
ttccatgcccactgcctacaacacaggtggcaaagcaaagctatattcaag

SEQ ID NO: 132595 - DNA, 82 bp, Homo sapiens
gatcaccaagcagaatgtccagcgggtcctggaggctgctaacctcttccaggtcagcccaaggccaaccccactgtcactc

SEQ ID NO: 132596 - DNA, 75 bp, Homo sapiens
gggtcctaaaacaggatcagtaaagaaggaaaaagcagtaaagccagaggaagtactgagatgatgaggaacgtg

SEQ ID NO: 132597 - DNA, 100 bp, Homo sapiens
agctcatcacccagtacgagcgggagaaggcgctgcgcaagcacgctgaggaggttcaagaacatgaagactcgggtgactcagaagtggagaatgaagc

SEQ ID NO: 132598 - DNA, 98 bp, Homo sapiens
ttgcacccctcgctgggcttgctttggcaacagagtgcctgacccaggtcagtcttattgttacaggtatcgctgtgctgctcggagccagaacacac

SEQ ID NO: 132599 - DNA, 82 bp, Homo sapiens
acagttcctgggaaggtggagccaccagcctctccttgagtcagcgtgggagaaattgtaacgagaaaccaacaaatgtcag

SEQ ID NO: 132600 - DNA, 95 bp, Homo sapiens
ccgcctgtgggaagccgtgtccggtgcccagccggtgggtagagaggaaggatgtcacatgtacttcagtttgaggataaaagcagaaaagtgaa

SEQ ID NO: 132601 - DNA, 100 bp, Homo sapiens
gagagtactgcggtgtccctggtgatggtgaggaagaggatggagatgaagatgaggaagctgagtcagctacgggcaagcgggcagctgaagatgatga

SEQ ID NO: 132602 - DNA, 49 bp, Homo sapiens
ggatcggttgccttgagcctggaaaaccagtagattcccagacatcgcg

SEQ ID NO: 132603 - DNA, 101 bp, Homo sapiens
gcctaagtaccgatgcagcagccccacagaccatggtcatgccagcttgcctgggaccagtggcagggaccccggaacctgaaggtgctgacaaagatgac

SEQ ID NO: 132604 - DNA, 83 bp, Homo sapiens
aggcgctcatggacggaagacccctggctctataagctgaattatggcagcccagtcaagataacgaaggaggcccaacttca

SEQ ID NO: 132605 - DNA, 100 bp, Homo sapiens
ctccagtgtgagtgaagacttagatgtggattggaggaatagaaggacagtctgtggaagtttccaatattgtggacatccgaaaagtatataaccgtga

SEQ ID NO: 132606 - DNA, 100 bp, Homo sapiens
aaactacatcactcgtctgggatctgacaagaggaccccgctgctaactcggctacaacatttggcagagattagtgatgatgaaccaggttatgacctt

SEQ ID NO: 132607 - DNA, 50 bp, Homo sapiens
gtttcggcacatggagattgatgtaccattgttggatactggtgacatca

SEQ ID NO: 132608 - DNA, 100 bp, Homo sapiens
gcagagctgcaaccctcttgtcctctttgaagcagaaattgaaaagtactgcccagagaattttgtagacatcaaggcgcatattaaatttcctattgac

SEQ ID NO: 132609 - DNA, 100 bp, Homo sapiens
cttctgcatcgacagatagccgtcttcagcttgagccccatcactaggctccccacaggtgcaggaagccgccgcccagccatggacggggaggagcagc

SEQ ID NO: 132610 - DNA, 82 bp, Homo sapiens
cgccaataactcagtcactggctgcaacaggaccacagtcaagacgatcatagtcactgtttgtcagaggaatggctgtgaa

SEQ ID NO: 132611 - DNA, 75 bp, Homo sapiens
tcgtatcagatggcagacatacatcatttaaaggtcacagcccgttggagattgtgattttaatgttcgtctgca

SEQ ID NO: 132612 - DNA, 51 bp, Homo sapiens
caggagtgaagctgcagaccttcgcgcactttcttatgcaaggagctaaac

SEQ ID NO: 132613 - DNA, 75 bp, Homo sapiens
tgaagtttcaaaaaaacgcacacaatcagatactggtgtcaagttacatcaaagagcaaactcaagaccagtttc

SEQ ID NO: 132614 - DNA, 75 bp, Homo sapiens
gcgaagctggccgagcaggctgagcgatacgacgctgagcgggctttggacaccatgaactttgatgtgattaag

SEQ ID NO: 132615 - DNA, 88 bp, Homo sapiens
gcgggtgtgacgttgaagatgtcggccttctgagccgactgcggtggtcaagaggtctcctagtaggacaaggaaagcccagcaagca

SEQ ID NO: 132616 - DNA, 100 bp, Homo sapiens
atttggcaactcctttacatcatacttggacatatcaagcattggtgcacgatgtactgttgtgcagccaatggctgtgatcaaaaattcaacacaaaat

SEQ ID NO: 132617 - DNA, 75 bp, Homo sapiens
gccttctctagaccttgccaagatggcacagttatcagggaataccaagagcagagagagcatccaggaacctag

SEQ ID NO: 132618 - DNA, 83 bp, Homo sapiens
gggctgcgtgagcgagcagaggcttaaggtcttcagcggggcgctccaggaggcactcacagtaggagctgtggcgcggggcc

SEQ ID NO: 132619 - DNA, 100 bp, Homo sapiens
agttatttgcctcagtaaaagaataaccttctgttcggtgatgaaattatcactaatggttttcattcctgtgaaagtgatgaggaggatagagcctcac

SEQ ID NO: 132620 - DNA, 80 bp, Homo sapiens
ctgacctctctgatgagatggatcgacgaagttatacggaagcgtctcctcattgatggagatggtgctggagatgatcg

SEQ ID NO: 132621 - DNA, 100 bp, Homo sapiens
ccagactgaagcttcaaggagcaaaatttaggaatgaagacattgtaccaacaaactacaaaggtatcattgatcctaagtgtgaacgtgaagtccccag

SEQ ID NO: 132622 - DNA, 100 bp, Homo sapiens
gttttccaaaagtacaaattcctctgatgtttcagctaagtcaggatcctcctttgtatttggaactggaccctcagcaccatctgccagtccagcattt

SEQ ID NO: 132623 - DNA, 73 bp, Homo sapiens
aggtcgtgcgtctgaagcctacaagaaaggaacagcatatgccatatatgagctggctgtggcttcatttccc

SEQ ID NO: 132624 - DNA, 101 bp, Homo sapiens
gatatttggagttcttacaacatggcagacattgacaaatgagtgaccgaggaggtggcgttcctttgaggaaaattgacagacttttcaactacatgtat

SEQ ID NO: 132625 - DNA, 100 bp, Homo sapiens
gcagccaggagtcatgagcgacagcggcgagcagaactacggcgagcgggggtgacagtccaaagattgacttggccggcagttcgctatctggcatcct

SEQ ID NO: 132626 - DNA, 82 bp, Homo sapiens
ctcaaagtgggagggatccttgtcatgccactggaagagaagctggaagaagcacgccaaattcattctcgttttgaaaaag

SEQ ID NO: 132627 - DNA, 100 bp, Homo sapiens
ccagaagcagaacttgaaggttaaaccactagcccatttcacagctgaaaatgtgtgtctgacatgcaagctcagtggggcagagacccgtggattgctg

SEQ ID NO: 132628 - DNA, 131 bp, Homo sapiens
ctgccccacttcgacctgagctgggaggccactagcagccagttccggcccgaggacaccgactaccagcaggtactccaaagattcaggtttactcacgtcatccagcagagaatggaaagtcaaatttc

SEQ ID NO: 132629 - DNA, 99 bp, Homo sapiens
tatgccccttaccacaggagctctgcacaggtgcagtctttgcaagccacatttggaacttttgagtccatcttgagaagctcccaacataaacaagac

SEQ ID NO: 132630 - DNA, 98 bp, Homo sapiens
aaagatcagtatttcatgcaaagacatcagctacttaagcgccacgagaaggttcacctagaaatcaatgacccaaacgtcatttcacaagaggaagc

SEQ ID NO: 132631 - DNA, 100 bp, Homo sapiens
ttagtccattgactatgcagcctaatgtgctgggagaaggactggccaagggagaagatgcctttcgggcagtgctttgctgcatgcagctgaaagggaa

SEQ ID NO: 132632 - DNA, 100 bp, Homo sapiens
ggtggggaaaatggcggtgtctacagtgttctcgacttcgtcgctggttgatgctatgaaactgggagtaaaggaaatgaagaaggcatacaagcaagtg

SEQ ID NO: 132633 - DNA, 90 bp, Homo sapiens
ctccatcacccaccaacaacaccacaataatccacagccaagaaatgcactcggtgatggaaagagagccactattctgaagaacacttg

SEQ ID NO: 132634 - DNA, 75 bp, Homo sapiens
ttgaagtcatttcacatcgaagccatgatttaaatatcggcgttaagctgtgaaagttgtgtagatttactgttt

SEQ ID NO: 132635 - DNA, 100 bp, Homo sapiens
gatccagatcgggatttacgtggagatcaagcgcagcgatgattgacgagatgcctgaggctgccgtgaaatcaacagccaacaaataccaagtcttttt

SEQ ID NO: 132636 - DNA, 75 bp, Homo sapiens
tgccaaggaaaaactggagagcttcatcaaaaatagtgatagctttgataaagatttttatccagcctactccaa

SEQ ID NO: 132637 - DNA, 87 bp, Homo sapiens
atgatgtgatgctggagaccttgacacttatatcctccctggatgaggacggggacttggttgccttttccagtgacgaggaattga

SEQ ID NO: 132638 - DNA, 143 bp, Homo sapiens
ttggatcctggagtacctgtctggtacctggtacccggcacactgtgagttcctggacatcaagggctggtaatagcctgcagctggtgttttgagaagccctactgctgaaaacttaacaattttgtgtaataaaaatggag

SEQ ID NO: 132639 - DNA, 75 bp, Homo sapiens
gggacccaggagtttcctgtgtccagcgctgccggagccgcctgaggaaagtccaatccaaccttttatctccag

SEQ ID NO: 132640 - DNA, 100 bp, Homo sapiens
gtcgtttgtttctccaaggtttgaaaagcagctggcctgcaagagagtaaaacttgtctcggcacagagtcaagtaaagaaagccaacatacagtggagc

SEQ ID NO: 132641 - DNA, 75 bp, Homo sapiens
cgccaccccgcggtcatcggtcaccggtcgctctcaggaacagcagttaccggtattgtaagaacaagccgtacc

SEQ ID NO: 132642 - DNA, 80 bp, Homo sapiens
cggacggggccctgacacggccaccctactgcctggaggccggggagccgacgcctgaaatcaatgtggactgaacataa

SEQ ID NO: 132643 - DNA, 82 bp, Homo sapiens
gcaagtttgtgccccatagctgcacagctggagaatgctggaggagaccttaaggatggccaccaccactatgaaggagctg

SEQ ID NO: 132644 - DNA, 83 bp, Homo sapiens
aaacaagctcagggctcccacggattctacattatgaactgccattggatgtccagaatcccctgtagttgataatgttggga

SEQ ID NO: 132645 - DNA, 75 bp, Homo sapiens
tgaacatgtatttaaccaagttccaacaaaagaatgctgccgcaggttatgatgtgattgctcaagcccaatctg

SEQ ID NO: 132646 - DNA, 99 bp, Homo sapiens
aaggttgtgtctgtgacaaggaagccagaagaggacggggctcggcgcagaggatcctctttcagaacacagggagagcttgggaggacctggaagcca

SEQ ID NO: 132647 - DNA, 102 bp, Homo sapiens
cgactggaccaagatcgagcccagcgtcaacttcctcaagtcgcccaaagctacgagttccagggagctctgtcctggtgaccgtgcccgggttatgacgac

SEQ ID NO: 132648 - DNA, 88 bp, Homo sapiens
atggacgaagccttcaaatccatcaagctcatcaaaaggctcagctgtcgcaggccctggaggagctgggaggccagaaacaaagagc

SEQ ID NO: 132649 - DNA, 51 bp, Homo sapiens
gaatgtgatttgcttgaagatatgaggtccactccatactcggcatacgac

SEQ ID NO: 132650 - DNA, 102 bp, Homo sapiens
tcaccagctgctggaagtcgaacatggcacgaaagagatcaaggtttcactgggatcgattctgaatatgaaaagccagaggcccctgagttggtgctgaaa

SEQ ID NO: 132651 - DNA, 100 bp, Homo sapiens
caggcgcagacccacccgccatgaagccccccgcaggcgaagtttattttgagttggatgctgataaaatatgtagagcagcagcacgaatgctacttca

SEQ ID NO: 132652 - DNA, 83 bp, Homo sapiens
cacctcgtgaaccactactactgcaagcgccccatctatgagttcaagatcacatggtgcaaaatgatgcttcaacacccagg

SEQ ID NO: 132653 - DNA, 90 bp, Homo sapiens
tcctgtaacggtcaagcgagagcctgaagagttggaccagttgtacctggatgacggaatactcccccagttgcaagaggcgcaggaccg

SEQ ID NO: 132654 - DNA, 100 bp, Homo sapiens
gaacagaggaggcaggcacagagaggcaatctttggcagccagacactacctaactccaatttatggacaatgaataatggtgcaggttgtagaatttcc

SEQ ID NO: 132655 - DNA, 100 bp, Homo sapiens
cacttctttacttggtgcaggaaggcagtctttgctacgtacagcaaaaggcctggagctgctgaagactgctattgggaaagctggctacactgataag

SEQ ID NO: 132656 - DNA, 110 bp, Homo sapiens
ccactgatatctcaaaaggtgatctggacaaaggaacaggtatctcaggtgacagatcagtcagtgaaagcatttgctgaacactgtcctgagcttcaatatgtaggctt

SEQ ID NO: 132657 - DNA, 83 bp, Homo sapiens
cttctcggcgctgccgtctctggaggagtactggcaacagcaattctgtggtgttcttggtcacacatttatggagtttctga

SEQ ID NO: 132658 - DNA, 50 bp, Homo sapiens
cctcatgacccgagagaagcacccagatgattggactggctaaggacgat

SEQ ID NO: 132659 - DNA, 90 bp, Homo sapiens
tgcacagcccaaactcgctgtcatccaggaagcccggtttgcccagagcgccccagacacacaaactcgggccacttctaagagtctctt

SEQ ID NO: 132660 - DNA, 75 bp, Homo sapiens
aagcaactcatcggggaatacaaacacagacccaccagctgaggatgtttctttctcagcaaaatagaggagaag

SEQ ID NO: 132661 - DNA, 82 bp, Homo sapiens
cagaagtcaaggcagtcaagctgcggcgagatagccgctgctttgatgggagcacccctgtccatgcagcagcattttcggg

SEQ ID NO: 132662 - DNA, 83 bp, Homo sapiens
tgcccctgagttcaagttcatgccaccaccgacttatactgaggtataatgggtctctcccaaatggcgatagaggaaggagg

SEQ ID NO: 132663 - DNA, 100 bp, Homo sapiens
cgtgttgttgccatccagggagtgaaaacagggttgtatatagccatgaatggagaaggttacctctacccatcactgcaggtggagctggagcaagaat

SEQ ID NO: 132664 - DNA, 100 bp, Homo sapiens
gggagaagctggagctgagactgaagtcgcccgtgggggctgagcccgccgtctacccgtggccgctgccggtctacgcgtcacaatgtagcagggaccc

SEQ ID NO: 132665 - DNA, 100 bp, Homo sapiens
ctttgcagccttgcagtccttgtacccattgttctcttctgtgagcagcatgtcttcgcgtttcagagattctgacaatggagatattaattatgattat

SEQ ID NO: 132666 - DNA, 100 bp, Homo sapiens
ggccatgagacctgtcctgatggtctcggcgcggaagatggccggcggcgtggacggccccatcgggatcccgttccccgaccacagcagcgacatcctg

SEQ ID NO: 132667 - DNA, 74 bp, Homo sapiens
aatgattgataacagctatcaagttgagaaactggcaaacttgcaaagagatgaaagctgacatcatgtttctg

SEQ ID NO: 132668 - DNA, 75 bp, Homo sapiens
ggatcagctctattatttcaaagatgaagatgaaaccaagcccttggttcagcagactgtacaggatctttttgg

SEQ ID NO: 132669 - DNA, 84 bp, Homo sapiens
tttttcctttagtcaggaaggacgttggtgttgagacaatgcagatcttcgtgaagactctgactggtaagaccatcaccctcg

SEQ ID NO: 132670 - DNA, 98 bp, Homo sapiens
cgcgggcaggagcctggcgaggatgcaccttcccctgccttggaaagtgatgtccttgcattgcccatttttaagcaagaagagtcgagtttgcctcc

SEQ ID NO: 132671 - DNA, 75 bp, Homo sapiens
ggaaatgaaaaagttctggaaaggtaacagctatcagatatgaagaagctgaagtccggaaaaaacttgaggaaa

SEQ ID NO: 132672 - DNA, 48 bp, Homo sapiens
ggggcgggacctggcgccaccttgcagactggcacacaaccttttaac

SEQ ID NO: 132673 - DNA, 75 bp, Homo sapiens
aggagcgcggaatcggggagcgtccggagctagctggatcctctaggcaggatgaaaactttcggaagagaaagt

SEQ ID NO: 132674 - DNA, 50 bp, Homo sapiens
tatagccctaccatcaaaacccgggttcccatgtgaccaggtggccgggc

SEQ ID NO: 132675 - DNA, 100 bp, Homo sapiens
agctgaccatatacttaatgactcctaaaatctcgtggacttctaaggctccttctcctgaaaaagccgaggaggagagtgagaggcttctgagggaact

SEQ ID NO: 132676 - DNA, 90 bp, Homo sapiens
tttcggatgatgccttcaatactacctttatttccaccatagctcactaaatagcctgcctgatttttttctacctgaggctatgcaccg

SEQ ID NO: 132677 - DNA, 100 bp, Homo sapiens
caatcccatttgaccttaacagaccttggagttgcccaccaggtgcgcccacagactcagaggatctgcgctggtgtattctcagcaggccttgctccag

SEQ ID NO: 132678 - DNA, 100 bp, Homo sapiens
cattttctttcgcgctggctgcagctgacccggcgaagggagccgaccgggccctgggctggaggtaaaaccccacgagaccatcatgcagacatcagag

SEQ ID NO: 132679 - DNA, 82 bp, Homo sapiens
cgagggcatcctctacaccatcgacaccgaaaactccaccgtagcccttgccaaaggtgatctgtgaaaatggttcgctatt

SEQ ID NO: 132680 - DNA, 50 bp, Homo sapiens
agacaaccgccctgtgagcttctacaagtctcacagatttcaagcctggc

SEQ ID NO: 132681 - DNA, 75 bp, Homo sapiens
aaatggctgaaggaaaacctccttatgctgatatacatccaatgaggctcactggacagccagtgctcattggtg

SEQ ID NO: 132682 - DNA, 75 bp, Homo sapiens
gtcgagatttgaaagagctcagacatctgtatggtggtgatattacccgaaaaatgaagcttttgaagagacaag

SEQ ID NO: 132683 - DNA, 100 bp, Homo sapiens
ccagcaccagcttccagttagtggatatagcacaccatccccagccagatagagggaggaatcagcagcttggaaattcaagcacgtgatctggcgggat

SEQ ID NO: 132684 - DNA, 87 bp, Homo sapiens
tgtcggcacgcctggcgatcctgggcggcgtggaggggcagcctgggcagctggtggaatttttgaagaaaatggaatctcgaggcc

SEQ ID NO: 132685 - DNA, 50 bp, Homo sapiens
tccacgctgacgcagagcggaaggagcttcggaaccaaaaagaagcttcc

SEQ ID NO: 132686 - DNA, 50 bp, Homo sapiens
ggaatttgtggctggctggatctctgggacccccgatgatgccaccttac

SEQ ID NO: 132687 - DNA, 82 bp, Homo sapiens
ttttccgcccgcttcgatcgcctcgcgccggctgctctttccgggaatactcccccagttgcaagaggcgcaggaccgtgga

SEQ ID NO: 132688 - DNA, 100 bp, Homo sapiens
gatccagtcgctgctgagctcagtggagagtgcggtggaggccatcgaggaacagaccagccagctccgaagctagagtttttgcaactttttggcttga

SEQ ID NO: 132689 - DNA, 100 bp, Homo sapiens
ctggcactgcgccatgcaggcaagaagccaaggccacctttgatgccatttctaagacctacagctacctgacccccgacctctggaaggagactgtatt

SEQ ID NO: 132690 - DNA, 75 bp, Homo sapiens
cccggggcgcagacggaatctgccagatccttaggcgatatgttcaaggaatgagtgatttactttcccctcttt

SEQ ID NO: 132691 - DNA, 101 bp, Homo sapiens
cgctgcggatccagggggtcggctgccaggtacaggaatgtatacaaagactatcgcttccttgagctggcatgtgattcccaggaggatgtcgacagctg

SEQ ID NO: 132692 - DNA, 100 bp, Homo sapiens
catcaggaagcctctgatgacaagagtagttgaaaggagtagttctatgacttcaacaatgacaatagtgatttcctgaaggaaatataatgatctgttc

SEQ ID NO: 132693 - DNA, 75 bp, Homo sapiens
tgcctgctaacatagctgtttgcagttctaagcaaactgcggaaccaggcacagagtgagcgatacggatataag

SEQ ID NO: 132694 - DNA, 83 bp, Homo sapiens
gaagagcgacaagccgctggcagccgcggatctcaccgccgctcaggccggcacagtcttcactaccgtagaagaccttggct

SEQ ID NO: 132695 - DNA, 50 bp, Homo sapiens
ttttgcttgcagttaggtcaagtggagatcctccaggtcctattgacaat

SEQ ID NO: 132696 - DNA, 75 bp, Homo sapiens
ggttattgaggaacatggcgttgctggtgcgagtccttgtacttacactgtgaaattttatgatggagtagttca

SEQ ID NO: 132697 - DNA, 87 bp, Homo sapiens
agctgaccaagatgctatgtgagatcttgaaagtgggcgagttgcggaaatcctcattgacgattcaatttgttgaaggccaatttg

SEQ ID NO: 132698 - DNA, 83 bp, Homo sapiens
tgaatgtccatccccagatacttctcaaaatacttgtaaaagtcctccaaaaatgagcaagctacccagaatggaatcctgac

SEQ ID NO: 132699 - DNA, 75 bp, Homo sapiens
gttggaccttccggagcttctcagaagacagagggttttcttttgagctgagatctgtatctgtggacctgaatg

SEQ ID NO: 132700 - DNA, 82 bp, Homo sapiens
cattttggcattgacatttaattttagggtcctttatatagaagggagagtaggtggtaggcagctccctcctcttcgtgca

SEQ ID NO: 132701 - DNA, 75 bp, Homo sapiens
gcagctggcgcctctgcagtggggaccgtgcaggcggccccaacagaggacggggacagctctctccttctgtaa

SEQ ID NO: 132702 - DNA, 76 bp, Homo sapiens
atgctgtattcagctcaggaccaggcaccttctgtggaagattgtttgttgacacaagtgtttactaacactggac

SEQ ID NO: 132703 - DNA, 100 bp, Homo sapiens
aaaagagttgtctgaaccaagcagcacgcgtatctatgccattgccaaggccatcaacgtggagcaggcgttccagacgattgcacggaatgcacttaag

SEQ ID NO: 132704 - DNA, 98 bp, Homo sapiens
atgacccagtcctgatcccaggtgcaaggtatcgagcaggacctggtgataggttctgccggagacttccatttggcctcaatgtgaaattaaagtag

SEQ ID NO: 132705 - DNA, 75 bp, Homo sapiens
cttatgctgggtgaaaacaaagtactgtaagattgatgttaaaggcatggtgttcaccccacttcatcagcgtac

SEQ ID NO: 132706 - DNA, 83 bp, Homo sapiens
tgagatctatgatcccacatctggaatctggaatgaaatcttccaagtccaaggatgtaatgttcatgaagaagtcttacaag

SEQ ID NO: 132707 - DNA, 75 bp, Homo sapiens
gagcttactctctcagatgacttcgtctcccaccgactgcctgtttaaggctgaagggtatgtgattggcagctg

SEQ ID NO: 132708 - DNA, 75 bp, Homo sapiens
ccacctagactggatgcagagcatggcagaggtggaggagacactgaagcgactgcagagccagaagggagtgca

SEQ ID NO: 132709 - DNA, 90 bp, Homo sapiens
cacatccccaccccacaggatctgccccagagaaagtcctcgctcgtcaccagcaagcttgcgggagctggagaaagagctttcccggag

SEQ ID NO: 132710 - DNA, 100 bp, Homo sapiens
ctccctgggctgggtgttgagtgcctatgctgcaaacgtgcattatctcttcattacttttggagtcgcagctggtctgaaggggcgtctcgattacctg

SEQ ID NO: 132711 - DNA, 88 bp, Homo sapiens
ggctgctcccgccggtgcccgctcagaagttctcggcgctcacgggtatttgaagtataccatacaactgttttgaaaatccagcgtg

SEQ ID NO: 132712 - DNA, 90 bp, Homo sapiens
gtcagagcgcggatggccgtaaccccgaaggaaatactggagttccatagactttctgaagaaaacactttgttgaaaaacgatctggga

SEQ ID NO: 132713 - DNA, 75 bp, Homo sapiens
gcagtatcatgctggccaagaagatcatcattaaggacggaggcacgactctttttgatcagaacaatgctgcaa

SEQ ID NO: 132714 - DNA, 100 bp, Homo sapiens
tccatgtcctgttgtggggcttttacagcctttggtcttcaggagacatatgaagcaaaaaggaatgaattcctgggagaactgcagaagaaagaagaag

SEQ ID NO: 132715 - DNA, 82 bp, Homo sapiens
ctgaccaccgtgaacggacagtcccccccaggttaacacagaaatctgcctcctgggccatgccgcttctaaggcctgtttc

SEQ ID NO: 132716 - DNA, 75 bp, Homo sapiens
tggacccagcacccgggagaaagtactgttgtatctggaggtaaagcttgcatttccttcaacaagaaggattac

SEQ ID NO: 132717 - DNA, 82 bp, Homo sapiens
gtcgtgcgacccaagcccctgcattcctgtacgggaaaatgtttataggaggccttagctgggacactacaaagaaagatct

SEQ ID NO: 132718 - DNA, 90 bp, Homo sapiens
agttctccacgctctgtctcctcaacctctacctggcggagtattctgaagaagccaataatctcattgaagaatgtgaacaagctgaac

SEQ ID NO: 132719 - DNA, 51 bp, Homo sapiens
cccaaagaaccatctcccaaacaggatgaactgataaatttcaaacggaag

SEQ ID NO: 132720 - DNA, 98 bp, Homo sapiens
ggatcgagaagactgagaacagaactggagatggaatcgccacttatatatgtttcagttttgcttttgaacatatttgaattttcatcaggaatagt

SEQ ID NO: 132721 - DNA, 100 bp, Homo sapiens
tgttggattgccagaagaagaagaaatcccagcaaataggaaaattaagtttagtagtgctcctattaaggtttactcctggcttgggggcattaggaag

SEQ ID NO: 132722 - DNA, 95 bp, Homo sapiens
gtttaattcaagcacgaagtattggtgctcagaaggctaaacttggacaggtctgggaccagtcttcagtataaatctcagccagaaaaaccaac

SEQ ID NO: 132723 - DNA, 86 bp, Homo sapiens
ggcaaccaccccgtctgagaagtgaggagcccctccgcccggcagctgccccgtctgagaaataattttcatggaggacattttga

SEQ ID NO: 132724 - DNA, 88 bp, Homo sapiens
ccgggaggctgagccccactacatggtgctggaatatgtggatctgaggagaaggcagagcccccccaggctatgaatgccctgatgc

SEQ ID NO: 132725 - DNA, 95 bp, Homo sapiens
cggaacccgtgggcctgtggactgcagcctcggcggtcagcaggcaacatgagtgagaatgaggaagaggaaatttctcagcaagaaggcagtgg

SEQ ID NO: 132726 - DNA, 90 bp, Homo sapiens
cggacttcaccactgcctcggaatgggaaaggtcctggagatgtggctgagctacctgcagccgtggcggtacgcgcctgacaagcaggc

SEQ ID NO: 132727 - DNA, 100 bp, Homo sapiens
cggcaactcagaaacatcaggtccaaggtattgacctgatggacatggcttcggacatcctgcagcccaaaggagatgatgtggcccggatcagctggta

SEQ ID NO: 132728 - DNA, 98 bp, Homo sapiens
tcggcggctgcaggatgggggactccaaagtgaaagtggcggtgcggatacgacccatgaaccggcgagtccacaagaatcggaatgtcagttaatgc

SEQ ID NO: 132729 - DNA, 101 bp, Homo sapiens
attaaagaaagagaaacggcaattcggcagctggaggtagatgggaaattgctgtgctggctgtgcacactttcatacaaacgggtccttcagaagaccaa

SEQ ID NO: 132730 - DNA, 83 bp, Homo sapiens
ctctgggccttgaacattccgaaactgtcaagattggcaagacaatgcagatcttcgtgaagactctgactggtaagaccatc

SEQ ID NO: 132731 - DNA, 83 bp, Homo sapiens
cggatgtaaaagaactctggctagagaccctccaaggaactgtaagagtaaatgggtccagtaattggaatgactccagataa

SEQ ID NO: 132732 - DNA, 82 bp, Homo sapiens
ctcaggctggaacttgccctgtctcctcgcagatgagggtgaaaagttcggaccctttgctggagagaagagaatgcctgaa

SEQ ID NO: 132733 - DNA, 90 bp, Homo sapiens
cttttgatgatcatgatacagttgataaaattgttggaggggttcaaaatgggactaactcttgaaggcacagtattttgtctcgacccg

SEQ ID NO: 132734 - DNA, 74 bp, Homo sapiens
tgaagatgaagatggctgggctgaacgccatccagacgttatcaatactctggctgaccatcatcatcgtggga

SEQ ID NO: 132735 - DNA, 90 bp, Homo sapiens
aagtgatgtccaggaaggaggaggaataatatttatggagcatatattatggaacacagaaatggctagtgatgagctgaaagagatgcg

SEQ ID NO: 132736 - DNA, 51 bp, Homo sapiens
tgtacttcgtctatgtggcgcccggcatagacctggacaaacaccagactc

SEQ ID NO: 132737 - DNA, 88 bp, Homo sapiens
tgactgaaaacatcctggaatcaaatagtgttacggcaacaaggaattgaatgatctggcacgggaccctccagcacagtgttcagca

SEQ ID NO: 132738 - DNA, 100 bp, Homo sapiens
tttgtggagcttattgtatggaggagaagcaaaatagcgtcattgatatctgcttctaagatgaccagtggtctggaacctaacctgcagtgtctctgag

SEQ ID NO: 132739 - DNA, 75 bp, Homo sapiens
gggactaggaaggactgcctgaaagaattctggcccacaggctgcgttcaaggagatctgcccagctgggaaggg

SEQ ID NO: 132740 - DNA, 140 bp, Homo sapiens
cttgtccagctcctccaggatgttttgtgccgctcagctcctgcccgtgtcattgtggtctcctcagagtcccatcgaaacagtttgctagatgatgctaaggcccgcttaagaaagtatgatattggaggcaaatattc

SEQ ID NO: 132741 - DNA, 50 bp, Homo sapiens
acagggatcatgaaagacagtgctgctacaggagctgagagaccctaccc

SEQ ID NO: 132742 - DNA, 75 bp, Homo sapiens
ttaggaggctgaagcaggagaatcgcttgaaccccggaggtggaggctacagctcctgcttaccatcttattttg

SEQ ID NO: 132743 - DNA, 90 bp, Homo sapiens
cagagacaagccattttgggagaacacccttcttcgtttagacatgatggctatggtccctctgctggctccggttctgcgaggttcagc

SEQ ID NO: 132744 - DNA, 100 bp, Homo sapiens
gagtttgggaaaaaccgcgaagtcatggggctctgtcgggaagccccctggccactgttctaggtgctgttgttctactaaacaaggaaacagtcaagag

SEQ ID NO: 132745 - DNA, 113 bp, Homo sapiens
aaaagcttccaggaacaagccatggagggtcaaagaaactcctggttgagctcaaagttattttacattgtaccagctggaggatgagtctgcgcatttggatgaaatgccac

SEQ ID NO: 132746 - DNA, 100 bp, Homo sapiens
actccaaggagaaaggcggcggtgcgtgttgctgcgagtgggacgcgcactggtcggtgccggctcaggagccggggtggcaggacaaattgcgcccatt

SEQ ID NO: 132747 - DNA, 74 bp, Homo sapiens
gcggagaccctcgaagtgcgcaaacttgacactcaccctgaccggtgttcagtgtgaggtggagctgatagagt

SEQ ID NO: 132748 - DNA, 82 bp, Homo sapiens
agaggacccaggagaaattcgccctcaaaagctggaagtcgagtgtgctactcaactcaggagatttggagacaaactgaac

SEQ ID NO: 132749 - DNA, 97 bp, Homo sapiens
atgggcaacctgcacacctgggatggccccctgcccccctcctggcacatcaagcagctttacctgcagaaccggggtgcgctccaggctgttgatc

SEQ ID NO: 132750 - DNA, 58 bp, Homo sapiens
aaaggcctgggcctgagaactgaatcaggatatggctttagttgcccctgaagctcct

SEQ ID NO: 132751 - DNA, 51 bp, Homo sapiens
cggcgtgatcacggccagcgaggacagagaaactccagaaaatcttgccaa

SEQ ID NO: 132752 - DNA, 95 bp, Homo sapiens
ggaatgcaacttcaaggtcaagatggtggacgagcttaagagagcaggagccgaggacggcatgtcccaggccccgggagcacagccgagcccac

SEQ ID NO: 132753 - DNA, 75 bp, Homo sapiens
gcggttcttctccagcgccctggcctccctcaccttggacacctcgcttgggttcgtgctggccgtgggcagcgc

SEQ ID NO: 132754 - DNA, 100 bp, Homo sapiens
ggccttctctagaagactcttcaggatacagacgtccctcaccagtgccagcttggggtctgcagatgagaactccgtggcccaggctgacgatagcctg

SEQ ID NO: 132755 - DNA, 75 bp, Homo sapiens
gacaggagtggagtgatatcagacaccgagcttcagcaagctctctccaacgggcagctttggaagaagtagaag

SEQ ID NO: 132756 - DNA, 75 bp, Homo sapiens
actgcttgtggcacaaggggagatggctttggaagaatttttgaagcaggtattgatgaagatgaccctactgct

SEQ ID NO: 132757 - DNA, 100 bp, Homo sapiens
taccggcgtgccaaggagggcagcagccgcggccgagggacacttgacattcagggacgtggccatagaattctctcaggaggagtggaaatgcctggac

SEQ ID NO: 132758 - DNA, 100 bp, Homo sapiens
aaaggcaaggaaacatcttttgacaagatgtcacctgaaagtggtcacagccgcatctttgaagggcccacccaatgctaatgaagactacagagaagct

SEQ ID NO: 132759 - DNA, 101 bp, Homo sapiens
cgagcttgcgctctttgctgccgccttcctgtgcggggccgtggcggccgcggcgatgactcggacccaggctacggaaaaacctgcgagccctggtggtt

SEQ ID NO: 132760 - DNA, 75 bp, Homo sapiens
tgatccacatgagagtccactctggggagaagcccaacaagtgtacggttgctgctaaatgggaaaaacttagct

SEQ ID NO: 132761 - DNA, 80 bp, Homo sapiens
atctcgtacacttcttggcagtcatggacaagagctattgatagaagttggcaaacatgaattgactgggcataaagtag

SEQ ID NO: 132762 - DNA, 114 bp, Homo sapiens
ggttctggtaaagaagtgagggtaccagctactgccttgtgtgtcttcgtgatttgaagatattaaagctagaaattggaactagaaaatcaaaagaattcaaggcatcttaac

SEQ ID NO: 132763 - DNA, 100 bp, Homo sapiens
gctgagagagagcaagcgtttcagcgcctacaattacagtaattcgccaaaatgacgaacacaaagggaaagaggagaggcacccgatatatgttctcta

SEQ ID NO: 132764 - DNA, 75 bp, Homo sapiens
aggtgcccaccgcgcactcggagatgcagccgctgatgatatcatcaagttgaatcgaaaggaagggaagaagca

SEQ ID NO: 132765 - DNA, 100 bp, Homo sapiens
aggggaggagagcagagaacgtccccagaggctgaagcagaggatgtggacagcccagcaagttcccatgagcctcttgcctggctcccccagcagggcc

SEQ ID NO: 132766 - DNA, 97 bp, Homo sapiens
tgatccagaacttgcagcaacaataggcagttgcagtggtgcagaatggctgacctcagtcttgcagatgcattaacagaaccatctccagacattg

SEQ ID NO: 132767 - DNA, 100 bp, Homo sapiens
caccatgggatgacgcagtaagaaggccatcagtagatgccagtccctcaaccttgaactttccagacgcagaactggtcgacaagtgcccccaatgatt

SEQ ID NO: 132768 - DNA, 75 bp, Homo sapiens
gagcgcgcctagccggctcgcgaggacaagaatccttcaagaaacaggaaaaaactcctaaaacaccaaaaggac

SEQ ID NO: 132769 - DNA, 75 bp, Homo sapiens
tctgagccccggggcatctatgccagtgagaggcccaagtccctagtctccaacctgtcccagtatttcagccca

SEQ ID NO: 132770 - DNA, 80 bp, Homo sapiens
tgggaaggtgtgtccggaggtttgcaggggtgcagtgtgtctggtcttatgaggtccccaggtgcatccaatttttcaac

SEQ ID NO: 132771 - DNA, 101 bp, Homo sapiens
tgtggtggaattccagttcatgctgcccacatctcatccaaacaggtaccaggtcatcagtacaccatctgatattttcatggtgatggaatatgtctcag

SEQ ID NO: 132772 - DNA, 83 bp, Homo sapiens
ggactgagtcctgcaggacacagaatggctctcttctgtgtataaacagcagtggtttgctatgctgcgggcagaacaggaca

SEQ ID NO: 132773 - DNA, 100 bp, Homo sapiens
aggaacaaaaggtcccggaccccccggatctgacggggcgggacctggcgccaccttgcaggtgttatttgagcttgcccgctaccacgccccatccacg

SEQ ID NO: 132774 - DNA, 82 bp, Homo sapiens
ccaagatggtgaagcagatcgagagcaagctgtcggcagcatccagcccctccagtcacagtcctcacagagcttcaggaaa

SEQ ID NO: 132775 - DNA, 100 bp, Homo sapiens
gtaaggttaccccagagtatagacagcaaaatgatgcttcaacacccaggccaggtctctgcctcggaagtgagtgcttctgccatcgtcccctgcctgt

SEQ ID NO: 132776 - DNA, 100 bp, Homo sapiens
ttcatcaagtggagacacgtttagcttaaaaacagctcattctcctaatgttttccttcagcaaggacaaagtgagaaagatcagtctaaagaaaaggag

SEQ ID NO: 132777 - DNA, 51 bp, Homo sapiens
atacagttgataaaattgttggatgtggacaacaaagtagagaggatttgg

SEQ ID NO: 132778 - DNA, 90 bp, Homo sapiens
atttcctgaaggggaagagcaagatgcagtcagtggagtgtgccccctaccaccggagccagagaatggtggctacatctgccacccccg

SEQ ID NO: 132779 - DNA, 75 bp, Homo sapiens
tacccgtccatcatagtcaactgcgtggaagagaagatatgtgtcacaaagatgtctacacggaactgccaggga

SEQ ID NO: 132780 - DNA, 107 bp, Homo sapiens
cggcggggctggcgcggctcctgttgctcctcgggctctcggccggcgacaatgcagatcttcgtgaagactctgactggtaagaccatcaccctcgaggttgagcc

SEQ ID NO: 132781 - DNA, 100 bp, Homo sapiens
aattgcaccacagatatatgggttgaactgtggctgcaccatctgtcttcatcttcccgccatctgatgagcagttgaaatctggaactgcctctgttgt

SEQ ID NO: 132782 - DNA, 81 bp, Homo sapiens
ttaaggattccaagtaactcttatttggttgtttacattcagagctctatcaataagaggaatacatattacagtgaattc

SEQ ID NO: 132783 - DNA, 75 bp, Homo sapiens
tgaataaaactgaccatagccagagaacagccctccatcttgcagcccagaagagggtggttttcctgaagcagc

SEQ ID NO: 132784 - DNA, 82 bp, Homo sapiens
gccaacctcagctcccaggccagttctctgaatgtcgagttatcctcctggattccaaagcctcccaggccgagctgggctg

SEQ ID NO: 132785 - DNA, 100 bp, Homo sapiens
cctgggctgggaacccgcggtggagcgggacacgaacgtggtactggagattgagagcagttggcttctggaggtggctccccattattataaggccaag

SEQ ID NO: 132786 - DNA, 50 bp, Homo sapiens
gaagaatttgttcacataaacagattgaaaactttagaaactgttccttt

SEQ ID NO: 132787 - DNA, 98 bp, Homo sapiens
atggaggctgatggggccggcgagcagatgagaccgctactcacccggtttgtcccatgaggagcacccccatagccatcctctctatggacatggtg

SEQ ID NO: 132788 - DNA, 100 bp, Homo sapiens
gctactggggccccacgacctccacgctggactggtgcgaggagaactactccgtgacctggtacatcgccgagttctatggcgtttaatgattgcttca

SEQ ID NO: 132789 - DNA, 100 bp, Homo sapiens
atgaagtactgagttcagatatcttgccccggtgggccatcattggttggctcctgacaacgtgcacggggaaaagattaccttgaggttgtgttcaaca

SEQ ID NO: 132790 - DNA, 100 bp, Homo sapiens
acagcctcgctggaggcagtttctgattgctcatttagaaagtggatgtgtgggataacatgtccaatgtgtccgaggagagaagaaaaaggcagcagaa

SEQ ID NO: 132791 - DNA, 83 bp, Homo sapiens
agactgggcttgtccttgctggtgcatgcgtcgtcggcctctgggcagcagattttctggcatccttaaatcttgtgtcaagg

SEQ ID NO: 132792 - DNA, 75 bp, Homo sapiens
tggtgcctttgggggtgatgccaggttaaaagaaatcatgagtggaggatctcaagtccacattttttggggtgc

SEQ ID NO: 132793 - DNA, 50 bp, Homo sapiens
tgcagtgcgagacgctagaggcttcatggcggctgaagagatgcattggc

SEQ ID NO: 132794 - DNA, 100 bp, Homo sapiens
caatcagcgagattccgtgggcgtaggaccctctgagccagtatctccagaggcagttggatttttgtcagctgttggggtgtttattatcttgatgctg

SEQ ID NO: 132795 - DNA, 113 bp, Homo sapiens
ttggacaagcaagtgcctgataccagcgtgcaagagacagaccggatcctggtggagaagcatgaagaggaaccacctcagaatatgaaaccacaatcaggaaacgataagcc

SEQ ID NO: 132796 - DNA, 75 bp, Homo sapiens
aaagttctccggcagccctgagatctcaagtgttctaagaacggaagcatctgggctggatggaatttagcatca

SEQ ID NO: 132797 - DNA, 100 bp, Homo sapiens
aaagctccgattccacacttgattctcttatacgctacttttactcagagtttgaaggttgtgaccaaaagaggctccgatgccttcaattaagttgcag

SEQ ID NO: 132798 - DNA, 101 bp, Homo sapiens
caccgccttcctgggccacaacggggccggcaagaccaccaccctctgctacaggagctgagagaccctaccctcactttccgtctgcttggctcccccag

SEQ ID NO: 132799 - DNA, 88 bp, Homo sapiens
ctgatgtatgatgagatcttcatgaaaataatgttgagtttccatgaagaacaggaagtactgccagaaactttccttgctaatttcc

SEQ ID NO: 132800 - DNA, 101 bp, Homo sapiens
atgggctcgaccccccatttccatgaactttgaggtgcccgtgaccttcgatgatgtggccgtgtatttctctgagctggagtggggcaagctggaggact

SEQ ID NO: 132801 - DNA, 101 bp, Homo sapiens
gggaacccggaggcccaacgtggtgctgctcctcacggacgaccaggacgaagtgctcggcggcatggaattcatgaagcataatagtccacagcagaata

SEQ ID NO: 132802 - DNA, 71 bp, Homo sapiens
gcagccgcagcctgtggctgtgcagggccccgagccggcccgggtcgagagtcctgtgtatggaaactcac

SEQ ID NO: 132803 - DNA, 83 bp, Homo sapiens
gcgtgctgcggacggcgctgcggtacatccaggtgaaatgacaatggatgctctgttggctcgattgaaacttctgaatccag

SEQ ID NO: 132804 - DNA, 76 bp, Homo sapiens
aatcgccctggccaagaagcacggcacgcagaataagcgaggaaatgcaacctcaccacaagtacaaagaccatct

SEQ ID NO: 132805 - DNA, 75 bp, Homo sapiens
ctattgtgtattgtgggatgactccaaaacattgattataccggaacagagccttccagtccctgtaataaatgt

SEQ ID NO: 132806 - DNA, 98 bp, Homo sapiens
tcatctctcccttcgcccagttccctgcatcctaagactcgaaggcagcacaggacctggaaaaattacatggtggtgattccactgaagcaactgcc

SEQ ID NO: 132807 - DNA, 100 bp, Homo sapiens
caggcgtttgatgttggccagccccgggacggactgaagctggtgcgcaaggacagttcaacttcctcaattgctttgcctcactcttctatattgcctt

SEQ ID NO: 132808 - DNA, 82 bp, Homo sapiens
cctgtacgcgctgctaggcattgaggagaaggcagcggacaaagaggtgccagaaccctgtggagcatcatgaactgggaag

SEQ ID NO: 132809 - DNA, 50 bp, Homo sapiens
ctgactttcagctatggaatcgccagagactgctgctactttgaaacgta

SEQ ID NO: 132810 - DNA, 75 bp, Homo sapiens
aagactggcaagcacggccacgccaaggagtcagtggatcggtggggaaaatgctgcttaccctgggccctgggc

SEQ ID NO: 132811 - DNA, 98 bp, Homo sapiens
taatgaagaaggtgtaaagcttgttcgaatgtctgcaagccagttagaagccctctgtcctcagggcggcgactggcggcgcgatggacctgaccggg

SEQ ID NO: 132812 - DNA, 98 bp, Homo sapiens
ctgcgttgaggatctttgctcttccatccgcctttgatcgtcttcctcttcagccatccagacaggggcaagtgtccgagtggtgaatcagctactta

SEQ ID NO: 132813 - DNA, 100 bp, Homo sapiens
aaacacccaaatattgttgcttattttggaagctatctcagctgtcaccactgactaaagaagagaaaactgcggcagagcaattcaaatttcacatgcc

SEQ ID NO: 132814 - DNA, 83 bp, Homo sapiens
ccgcaccatgccgctcctaagcctgcacagccgcggcggcagcagcagtgagagccagtccgagagtcttgatcagatcccca

SEQ ID NO: 132815 - DNA, 101 bp, Homo sapiens
tccttgtctgtgaagctaaactcaatgctgctgtgtgggaagaagatttgtaaagaaaactcttagatactcctgggcatggaagtggatgggctgagact

SEQ ID NO: 132816 - DNA, 74 bp, Homo sapiens
cttggctttgtgatgataattttccagatgatgaatctcgtcaccatttcagcaggaacttgatgcaaggcatg

SEQ ID NO: 132817 - DNA, 87 bp, Homo sapiens
cctatgcagagaaggtcacagaaaagccaccgagggctacagcctcgggaaaagagacgagttgtactgctgtcacaggaaatggac

SEQ ID NO: 132818 - DNA, 75 bp, Homo sapiens
tgtttgtggatcgctgtgatcgtcacttggtggaccatttgtgctcgtgttaccaacaaaagtcagatccgtacc

SEQ ID NO: 132819 - DNA, 97 bp, Homo sapiens
cgggacccatcgtctccgtgtggcaccgcgagctccgcaaagaacaggccgcccgcctgaagaaactacaagagcaagagaaacaacagaaagtgga

SEQ ID NO: 132820 - DNA, 100 bp, Homo sapiens
tggagcctcaggcggcagcgcttctagaatactctggagcagtgcaatgtgtgttccaagcccatcatggagcggattctccgagccaccgggaaggcct

SEQ ID NO: 132821 - DNA, 75 bp, Homo sapiens
caggtgtaagcgcagaaagcaggcgaacccgcggcgcaataacgtttaacggatgaagagtcccggaaaaattgg

SEQ ID NO: 132822 - DNA, 80 bp, Homo sapiens
aatatggaattgaagactgtaagaagtaatttgaatcagctcaatcaatcgctggaatcatgggtaaagaaggaagacag

SEQ ID NO: 132823 - DNA, 75 bp, Homo sapiens
tttgtatgaacaaaaccagtctgatgtagctgtgttgccgctttccttgatgttgtgattgggggccgtgcagtg

SEQ ID NO: 132824 - DNA, 100 bp, Homo sapiens
ccaatcccccctcacccaggcccctgtcaagaaggtgccggtggtgcgagtcttcggagcgaccccggcagatcctggctctgcagagagaacagcccag

SEQ ID NO: 132825 - DNA, 97 bp, Homo sapiens
tgagcgcccagcggacaccggcagcgcgcggtcgacgcgggcctgagctccctccaggttcaggaagatttgactgaagagaaaaaaagggaactgg

SEQ ID NO: 132826 - DNA, 51 bp, Homo sapiens
taacaacgtcacatctgtggttgttgatccctcaattgttaacatatcaga

SEQ ID NO: 132827 - DNA, 90 bp, Homo sapiens
gccgtgtggaagagtgcgccctgggacaggacctctgcaggaccacgatcgtgcgcttgtgggaagagacagggtctcactctgttgccc

SEQ ID NO: 132828 - DNA, 75 bp, Homo sapiens
cgtcctgcatcggacatactcggcaccagctatcaacgccatccagaccaagatcactccatggatgaaatgaca

SEQ ID NO: 132829 - DNA, 100 bp, Homo sapiens
ggagacccagctcttccaggactttgagccagtccagaccctgctgctgtcttcaaagaaggtgagaagccctaccactgcaactgggacggctgcggct

SEQ ID NO: 132830 - DNA, 80 bp, Homo sapiens
atggaatcggtcctggaggacaggtgggaatgatggttagatgctgccgaacatacgaagaagtgtgcgaaggtgatgtg

SEQ ID NO: 132831 - DNA, 100 bp, Homo sapiens
aagacgctgcggccaagcagaaagttgaacagaacgcggctcccagccacaccaagttcagatacattccaccgttgatctgggggaaaagtggacacat

SEQ ID NO: 132832 - DNA, 75 bp, Homo sapiens
gggactcactccatagtccaggagttccaggttccggaatttaaactttgggataatgagctgcagtatgtggac

SEQ ID NO: 132833 - DNA, 82 bp, Homo sapiens
gtctacaagactctcttcgctctttgcatcttaactgcaggcagttgtgaaaaacttcaggacaaaaatgtttcatttaagg

SEQ ID NO: 132834 - DNA, 75 bp, Homo sapiens
aaggatgtgatttccatatttcaagtcattcaaagacagatgatgaccgtcgtgatgtgagtaggtatggagaag

SEQ ID NO: 132835 - DNA, 51 bp, Homo sapiens
agccctggacggcattcagtgttttggtccaaagaagtcgatgtttccaaa

SEQ ID NO: 132836 - DNA, 100 bp, Homo sapiens
cgcgcccgcgccctccgcgcgacgccaggaaggagtcaagactgagaacaacgatcatattaatttgaaggtggcggggcaggatggttctgtggtgcag

SEQ ID NO: 132837 - DNA, 100 bp, Homo sapiens
tttgtaactacctggcattgccttttgttgaggatcaccaaacaattttgagagcatgggctgtgaaagattttgctccaaattgtcctttgtatgtcca

SEQ ID NO: 132838 - DNA, 75 bp, Homo sapiens
cagactgccaaaatacagcagcagatcattcggcacaaggattcgctaaatattgtaatggatcaaggagataca

SEQ ID NO: 132839 - DNA, 73 bp, Homo sapiens
ggaagacaatctcattaagcagctcaccagtgcaggccacgtgctgtacgccgacatcaagatggagaatggg

SEQ ID NO: 132840 - DNA, 83 bp, Homo sapiens
cgtgctcttcgctcacctggatgacaacgagaggaggtatttctgggaaaagccagcttctgtttgcactggtcttcacaact

SEQ ID NO: 132841 - DNA, 82 bp, Homo sapiens
ccagtccgcccgcccgccctctccccgtggcgcggcggcggggaggcgaggttttgcactgattgcaaaaataaagtcctcc

SEQ ID NO: 132842 - DNA, 82 bp, Homo sapiens
ccaggagctggcatgacgtgcaggtctctagcgcgtatcgagaaccttccctgcgaacttcagaggaacttccagctgatgc

SEQ ID NO: 132843 - DNA, 51 bp, Homo sapiens
cacccaagtgcattgcctttggaaacgagggcatgagccagaaggagagct

SEQ ID NO: 132844 - DNA, 100 bp, Homo sapiens
gccggttcctcaccctcggggagcaacatggcttggcattcattaaacgtactcccgtgattgatgcagataaacccgtgtcttctcagctccgggtcct

SEQ ID NO: 132845 - DNA, 78 bp, Homo sapiens
gcctcgcccgcccggaccagcctgccccggcgccgagacttcccaagtaagaagcggaagaggagccgctggaaccaa

SEQ ID NO: 132846 - DNA, 83 bp, Homo sapiens
ccaacgtgaaccagatcgggagtggcaccatggacctgcccttccaggtcctgtccctgggcgccgacgtgctgcctgagtac

SEQ ID NO: 132847 - DNA, 101 bp, Homo sapiens
tggtggttgccactcacctgaggatcgggcactgctactaccagactgtggtgacccccgtcatcgagcagatcctgcctgactcccctggctcccacctg

SEQ ID NO: 132848 - DNA, 100 bp, Homo sapiens
cattcagacgcctcctaatttccaaattacaagatgaatttgaaaaccgaactagaaatgttgatgcttgactgctgtggctccagcacactgactgctt

SEQ ID NO: 132849 - DNA, 113 bp, Homo sapiens
ttcgatcctgtgcagcgttataagatgctcatcccgcagctgaaggagagtctacagcggcagtacatacctgtgaaaatgaagagcaaagccttctggatcttttcttggga

SEQ ID NO: 132850 - DNA, 96 bp, Homo sapiens
gcggatggtctgggtggacctggaggtgttttattccaaacgtctatgctgctttgttcactgcagctcttgttcctttgacgtgcctcgtggtgg

SEQ ID NO: 132851 - DNA, 100 bp, Homo sapiens
cgcgccgcagctgcccaggccggaccgggccgggcgcccgcagttacagaatgtctgaaggggacagtgtgggagaatccgtccatgggaaaccttcggt

SEQ ID NO: 132852 - DNA, 51 bp, Homo sapiens
ccggcacgcgactccccccgggcccaaaatccagacatttaatgtggatgc

SEQ ID NO: 132853 - DNA, 102 bp, Homo sapiens
cattttctcaaacgagagtcagcctttaacgtgtaaacaggaacatcgataagtagtgtaaaaacttgcacaatgaaatccgaagccaaggatggagaggag

SEQ ID NO: 132854 - DNA, 75 bp, Homo sapiens
tgcagccgagtcactactgcctgcctgcctgcctgctacggtatggacctgtctgccaatcaggacgaggagacc

SEQ ID NO: 132855 - DNA, 96 bp, Homo sapiens
ccggagcgtagcctccaccccccactcgcagtccccaagtgtccgagctgcaggaggagggaatgaacgccatcaacctgcccctcagcccaattc

SEQ ID NO: 132856 - DNA, 75 bp, Homo sapiens
agaggtgccaagggagcttctgtcccgaggaccaggggatgcgaagggtgaagtattacagacacttagcacctg

SEQ ID NO: 132857 - DNA, 75 bp, Homo sapiens
cggacccaggccctggatgggactgtctatgatgtcatgtttgtcagcacagtcacggaacagcaaatttctgag

SEQ ID NO: 132858 - DNA, 50 bp, Homo sapiens
ccgttcagagtcctacagtggcagagctaaagttgcagacaagatccagc

SEQ ID NO: 132859 - DNA, 98 bp, Homo sapiens
gcggccttcgaggaggtcatgaaggacctgagcctgacgcgggccgcgcgggttatgaagacagtatggagtttccagaccatagtagacatttgcta

SEQ ID NO: 132860 - DNA, 90 bp, Homo sapiens
gaatgcttcaggtgtcagaagttcattgcacccaccaaggctccggatgtgttccccatcatatcagggtgcagacacccaaaggataac

SEQ ID NO: 132861 - DNA, 90 bp, Homo sapiens
gcgatagacgagtatcagatgatcctgatggtgaacatgccaggagagcaatgcaaaaggtgatggctacgactggtgggatgggtatgg

SEQ ID NO: 132862 - DNA, 90 bp, Homo sapiens
ggaagccagaagatgggagagacatttttgaagcactcaaggagttgcccctggtcctgtaattggacttcaggcaccatctactggtct

SEQ ID NO: 132863 - DNA, 100 bp, Homo sapiens
ctatgaacccagaggtcgtggaggtggccgtggaggcagaggtggcatggggcctccccatggccacccatggaccagtcggcattcacttcctcccttc

SEQ ID NO: 132864 - DNA, 100 bp, Homo sapiens
cgaggacttcttcttcaccgccaggacctccttcttcaggagagcgccccagggcaagccccgctccggccaacaagaactctaatgaatcattgattga

SEQ ID NO: 132865 - DNA, 100 bp, Homo sapiens
gaaggacttactgaaagatatgaatcagagttcattggccaaggagtgccccctttcacagaggcgtggagctatttcctatgacagttctgatcagact

SEQ ID NO: 132866 - DNA, 100 bp, Homo sapiens
ggaagaccgcgcgcagggcctgcagcgggagctggacggcgagcgcgagcggcgcgagaaaaccatgtcgcctgaagaatggacgtatctagtggttctt

SEQ ID NO: 132867 - DNA, 100 bp, Homo sapiens
atcagctgaaatcaccgtgtactttaacccactagaagccaagctctatcaacagaccatttactgcgacattttagaaagaatcttcaagagggagaca

SEQ ID NO: 132868 - DNA, 98 bp, Homo sapiens
ttaaatctgtcgtttgaatttaggaccacctcggtgcacttacagagtgctacgatgaactggggaacagatatcagcttccagtgtattgcttggca

SEQ ID NO: 132869 - DNA, 93 bp, Homo sapiens
cggtggactccttcggcagtccacccaccgccgccgcctcccagactgcaaaattcaaaatggggctcaaggtattcgtttcatctacaccag

SEQ ID NO: 132870 - DNA, 50 bp, Homo sapiens
aaataatctagatattgatggctttgagaggatctgacgaactactctca

SEQ ID NO: 132871 - DNA, 82 bp, Homo sapiens
cgctgtggcatggcggacgaggggaagtcgtacagcggctaccaagcagtttctcgaagagattaacaagtggacagttcag

SEQ ID NO: 132872 - DNA, 100 bp, Homo sapiens
caggcggcgagctcgggggccgcaggggacaaacgcttcgagtgcgcccagtgtcagaagcgcttcatgaggagtgaccacctcaccaagcattacaaga

SEQ ID NO: 132873 - DNA, 75 bp, Homo sapiens
attcttctcaagagtacccagcaagaggtttgcaaagaggagttattcagtgagcatccgtgtacaagatttgca

SEQ ID NO: 132874 - DNA, 51 bp, Homo sapiens
cctggtacaagggaatgtcacaagcacaactgaacctccattgaatactcc

SEQ ID NO: 132875 - DNA, 100 bp, Homo sapiens
tgggagttgggggcaaggagaagatcctgttacaggatcctgggaagcagagtgtctggatggaacctgagctgggtctctgactcacttctgactttag

SEQ ID NO: 132876 - DNA, 101 bp, Homo sapiens
atggtgctgagtttcctggtagagccggccgagctgaggcggtcgcggccatgaaggctccagggagttccacgctgtccagttctctctgccgtgataaa

SEQ ID NO: 132877 - DNA, 50 bp, Homo sapiens
gagcccgccgccacatcctctgagctcctccgcctctgatgcagaatttg

SEQ ID NO: 132878 - DNA, 85 bp, Homo sapiens
agcgacaagccgctggcagccgcggatctcaccgccgctcaggctacgagttccagggagctctgtcctggtgaccgtgcccggg

SEQ ID NO: 132879 - DNA, 97 bp, Homo sapiens
gtcgtattgaatggtgttgtagatgtggaagatgtcaagtttgtgatcaactatgactatccaaacagctcagaggattatgtgcaccgtattggcc

SEQ ID NO: 132880 - DNA, 75 bp, Homo sapiens
ggccaggctggccccgagcggaactggagaaagctgagggttggggtgactcagtgggaacgccatctgagcggg

SEQ ID NO: 132881 - DNA, 75 bp, Homo sapiens
aaggagaaggataagtcgaaggggaaggcgcctgaagaggacgaaggaccgccgggagagcctgcccacctcccc

SEQ ID NO: 132882 - DNA, 100 bp, Homo sapiens
tcttgttgcatttggtaatttagcagaacttggtggtgttatcaaggagaagaaattcctgccttgaccagatgtgtggagcatctacaaatgaatgaat

SEQ ID NO: 132883 - DNA, 75 bp, Homo sapiens
ccgagggtcagtttcccgagtacccaccagagggcgccactaaactgggcagtcgatgatgtgaagaaaggttac

SEQ ID NO: 132884 - DNA, 96 bp, Homo sapiens
tcactgctgtggctgcgggaaagcctctctcttgcccaaaccacgatgggaattgctcatcatcactgtaggggacctttgaaagagctgccggag

SEQ ID NO: 132885 - DNA, 51 bp, Homo sapiens
accgagaccgcggccgggaccgagggtttgatctgtggatgaaatgaatca

SEQ ID NO: 132886 - DNA, 75 bp, Homo sapiens
ccaaaggagaagcaatctgcatggatacaagtactggttgaacctgaccacttcaaggttgcagtgaatgatgct

SEQ ID NO: 132887 - DNA, 100 bp, Homo sapiens
gggatttacgtggagatcaagcgcagcgatggaattgaaagatgttggccatcgtgatcagatggctgcagctagaggaatcctgcagaagaacgttccg

SEQ ID NO: 132888 - DNA, 97 bp, Homo sapiens
tatcgttctatttctctagctattgccttattttttctcatggatgttcttcttcgagtatttgtagaaggggatcatggcccaagttgcaatgtcc

SEQ ID NO: 132889 - DNA, 74 bp, Homo sapiens
gccacgaaagctcagagaaagcagcagatggcagaggttcgttccaccagtcataaaccagatgaaatctatgg

SEQ ID NO: 132890 - DNA, 75 bp, Homo sapiens
tagaagggtgcacccttacagatggagcaatggtatccaaaccttgaaacctttgctctagatgtcaggcttgtt

SEQ ID NO: 132891 - DNA, 100 bp, Homo sapiens
gcctccttgcccgtgaccgtcgctagaactcagttgtgcgttgcggccagtcgccactgctggccgttgctccagggagaactgcaaatatcttcatcca

SEQ ID NO: 132892 - DNA, 75 bp, Homo sapiens
caggacaattccatttggggaccagagatggacggtcactcagcctatggaggcatgctgcagacagacctttcc

SEQ ID NO: 132893 - DNA, 75 bp, Homo sapiens
ggcaggagtagctgatcaaaccaaggatgggctcgaaaaattctgcgggaactgaagcatcaaaagcgctgtaag

SEQ ID NO: 132894 - DNA, 49 bp, Homo sapiens
tcgcagcatggtggccgtgatggataggaagaagtctgctgtgaagaaa

SEQ ID NO: 132895 - DNA, 74 bp, Homo sapiens
tgcttcatcagtactccaaagcccctgtgtatctatttgagcagactcagcccacctgcacccaggtgaaataa

SEQ ID NO: 132896 - DNA, 82 bp, Homo sapiens
cttctgtctccacagcaggacagccgaactggaatctggatgagcagctcaagcagcatttaaatcaaacggtattgagatg

SEQ ID NO: 132897 - DNA, 75 bp, Homo sapiens
cgtctacttcgacggccgcgaccgggagaggattcaattactggacttgtcaactctgccagtgtacgtgccatt

SEQ ID NO: 132898 - DNA, 100 bp, Homo sapiens
tgacgctgctgctcttctgcctgtgcgccttcctctcgctgtcctggtacgcggcactcagcggccagaaagggggggccctcagcctcttggccttgaa

SEQ ID NO: 132899 - DNA, 101 bp, Homo sapiens
cgacagttcctccgtttgaaatctcgccggctcctgagcgggccaccgggcccgggctgggggtctggcggcctgtgaccactgccttagggcactagaga

SEQ ID NO: 132900 - DNA, 82 bp, Homo sapiens
atttcttccaaagcacaggaatctcactctgttaaagctggtctgttctaactgagggtgcgaagtaccacattactgtcat

SEQ ID NO: 132901 - DNA, 100 bp, Homo sapiens
ggaccgggacctgctcctggacccggcctgggagaagcagcagagaaaggtcgtgggacccagtactctactcgctgctatcaagaacttggatatttta

SEQ ID NO: 132902 - DNA, 90 bp, Homo sapiens
gaacactaaagtgttacatgacagatgtatgagggtttgtggatgcacttagatgtttgcaatgagcactgtggctggcatgccccagtg

SEQ ID NO: 132903 - DNA, 100 bp, Homo sapiens
cggcgcctttggtgctgcttcctgcgtggctcgtgatggtcgcctgcagcccgcactccttgaggatcgatttggagcaagaggtggtggtggccttccc

SEQ ID NO: 132904 - DNA, 100 bp, Homo sapiens
caacccccgaaacagaactggttttggggacaccagggcctggttgcttacactgtctttcagtatttaaaaatgctgcagaagctaggcccagaaaaaa

SEQ ID NO: 132905 - DNA, 83 bp, Homo sapiens
attctgtggtgactcatctcgcacgtgacccccctccctcttcaagatgaggcctgcctgtgttaatacacctagtgaggagt

SEQ ID NO: 132906 - DNA, 83 bp, Homo sapiens
gctaaagagccgagcacgcgggtctgtcatcatgtcgcgttacgggcggtacggaggaggctgaccaactgactgaagagcag

SEQ ID NO: 132907 - DNA, 75 bp, Homo sapiens
agccgctggcagccgcggatctcaccgccgctcaggttcgtgtttagtaggagcacagtagctgtttggggaacg

SEQ ID NO: 132908 - DNA, 73 bp, Homo sapiens
gtgcaagcagctgtccgagtcccaggtcaagagcctctgcgagaagactgacatcaatttgccctatcttaca

SEQ ID NO: 132909 - DNA, 95 bp, Homo sapiens
ccaccccagcccgtggtcctgatgccaacagtgtaccagcagggcgttggctatgtgcccatcacagcatcaagatggtgctcatgtggaccagt

SEQ ID NO: 132910 - DNA, 51 bp, Homo sapiens
taccagaagtagatggagcagatgatattcaggcttcttcaggagaaagca

SEQ ID NO: 132911 - DNA, 146 bp, Homo sapiens
gttccccaaatgccggttctgtggagcagacgcccaagaagcctggcctcagaagacgtcaaacgtaaacagctcgcttgtagagaactgtgtttgccttcttcggaacttatcatatcaagttcaccgggagatcccacaggcag

SEQ ID NO: 132912 - DNA, 100 bp, Homo sapiens
ccccgcccggccccggcgcaggcagttcagcaaatccttgctgttcccacccatgtcaaaaccgaggtgtatgtatgagtgtgggatttgaccagtataa

SEQ ID NO: 132913 - DNA, 83 bp, Homo sapiens
cccgggcactgttgctgctgcgggaggtcagcccaaggccaaccccactgtcactctgttcccgccctcctctgaggagctcc

SEQ ID NO: 132914 - DNA, 90 bp, Homo sapiens
cccctggcggaaccgcccccaggctgaccggttccctgatgtgttacctgcttctgctactgatccaaactgcagaacttctcattcatc

SEQ ID NO: 132915 - DNA, 89 bp, Homo sapiens
ctggagcctcagttggaagcagccgatccagcctgcggagcctgtggggcaggaaatctggcattttttaaagtttgcgccccacaaag

SEQ ID NO: 132916 - DNA, 75 bp, Homo sapiens
ctaagagccttgaggcagaggcagctggaccgagctgcggctgctgtgggattggcagcagtagcactgattaat

SEQ ID NO: 132917 - DNA, 90 bp, Homo sapiens
aaaagtagcccactttattcacagagaaatgcccggcgaagccacagaaaccgtccctgctacagagcaggagttgccgcagccccaggc

SEQ ID NO: 132918 - DNA, 100 bp, Homo sapiens
ctcggcgttcagcatgaaccgcagccaccggcacggggcgggcagcggctgcctgggcactatggaggtgaagagcaagaaactaattctgaagcaagcc

SEQ ID NO: 132919 - DNA, 82 bp, Homo sapiens
gctcctgcctattctcctaacatgtatcctggagcgaatcctaccttccaaacaggatgttgcttcagagtgtgaagtcaaa

SEQ ID NO: 132920 - DNA, 75 bp, Homo sapiens
gctcaggtgctgcaggcacagcccgagaaaccgcagcactacaccatgcagccagtaaagatcccagagaagttc

SEQ ID NO: 132921 - DNA, 83 bp, Homo sapiens
cacatacatacacggaaaaccttgcaagagtggagaaaagaagggagaggtacaatgactcttcttgcttttcacctaagttg

SEQ ID NO: 132922 - DNA, 83 bp, Homo sapiens
aagaaccagatgtcaaaactgatttcagaaatgcatagttttatccagattatgatgcatcattatcacagaagaaattcgtg

SEQ ID NO: 132923 - DNA, 100 bp, Homo sapiens
ggaagcaggactgcgccgcgtcttcctcaagagggagaaccgaagattacaggaggccagcatgaggttggaacaagagaatgatgaccttgcccatgaa

SEQ ID NO: 132924 - DNA, 50 bp, Homo sapiens
atggaactcagacatctgcaaatcatgagtccggcagcgtcttctcttga

SEQ ID NO: 132925 - DNA, 95 bp, Homo sapiens
cccggctcagcccccggccgcggcgggacccgagctggaagagttgtctttgaattattttctgatgtgtgccccaaaacatgcgagaactttcg

SEQ ID NO: 132926 - DNA, 100 bp, Homo sapiens
tcaatatgtgccgccagtgtttccgtcagtacgcgaaggatatcggtttcattaagtgtgttaacagggcacaaccattatgtgatgtgtgctcagttcc

SEQ ID NO: 132927 - DNA, 98 bp, Homo sapiens
cgggagccgcacgcggcgatatggaagaggagggcaagaagggcaagaagtgcaatgtgccaccccaagccctcccacctcccctgcttccccggctc

SEQ ID NO: 132928 - DNA, 75 bp, Homo sapiens
atgacagaaatgttgaatgttcctttgagaatttcgctaaggagtttgtgatcagtgatcggaaggagctggagg

SEQ ID NO: 132929 - DNA, 75 bp, Homo sapiens
tgcccagcgcctgggattccagatctgcgtttgaatccaggaaagggagataacgaaggaggcccaacttcattc

SEQ ID NO: 132930 - DNA, 50 bp, Homo sapiens
accggccagaggacgagtgtggactgcgtcgatccctgctgtgattcttt

SEQ ID NO: 132931 - DNA, 90 bp, Homo sapiens
gctgtcttcacgctgacccagacctgttgtcaggaggaagaagacctagctttagcacaagcactgtcagccagtgaggcagaataccag

SEQ ID NO: 132932 - DNA, 117 bp, Homo sapiens
cgcgcgcagggcctgcagcgggagctggacggcgagcgcgagcggcgcgagaaacgtccgtctccaagagagtatgaagagagtgcgtctgtagggcagggaagatggcggacaagc

SEQ ID NO: 132933 - DNA, 50 bp, Homo sapiens
ggaactctggtggtttcaggaagagtgatcagcagctggactgtgccttg

SEQ ID NO: 132934 - DNA, 80 bp, Homo sapiens
gatgcctggcagccccgctctctgcactgttggctcctgggaccctgtgccgcgagcaggccaggcagtgtgacctcccg

SEQ ID NO: 132935 - DNA, 96 bp, Homo sapiens
ggacaagagacgatcattctgcaagcaggcaacctgaatacaggtcctcagaatggttggaatgaccctccagctttgaacagagtacccaaaaag

SEQ ID NO: 132936 - DNA, 100 bp, Homo sapiens
ggaagacaaaggggacactctgaagattattgagcggctggaccacctggagaatgtcatcaagcagcacattcaagagcatgtctgttcgatcctggct

SEQ ID NO: 132937 - DNA, 76 bp, Homo sapiens
gagctgctgcgcacgaccggcgcctcggacaccttcgagggttggggcgccaatgcttcggcattagagaaagaga

SEQ ID NO: 132938 - DNA, 75 bp, Homo sapiens
cttgaagaaaagggtgaaggaggcgaattttcagttgataggaccctgatgctcccataagacagaaaatgcccc

SEQ ID NO: 132939 - DNA, 100 bp, Homo sapiens
aagatcgccggagtcatattatcgacgtagttaaagcccactagcctaaagccgggcggactgcggggatcccaacaagccctcaggattcagaagtgtt

SEQ ID NO: 132940 - DNA, 99 bp, Homo sapiens
ccagccctttgcacctcgcagctaaaaacggccacatcgacatcatcaggtcttccactgccacttcaacagcaacttcttccctctcttcctggagca

SEQ ID NO: 132941 - DNA, 100 bp, Homo sapiens
cagatgtggaaccatatccgtggacctccatatgctcataagaacccacacaatggacaagtggtggttatccaaatgccaacccagtccaggtttcaac

SEQ ID NO: 132942 - DNA, 87 bp, Homo sapiens
aggggcgtgatagacctggatgtcttcctgaagtggttcagcactgagtcatgcttgcttctgctacgcactgatttgttctattcc

SEQ ID NO: 132943 - DNA, 90 bp, Homo sapiens
aaggtgatggtcctggactttgtcactcccacccctcttggaactagatggggaagatattcctcgtcagcttgtctacattggtcttta

SEQ ID NO: 132944 - DNA, 98 bp, Homo sapiens
caggtattgggagatccacagctaagacaccgggacctcctggaagccaaaaatgcggacgcccgtggtttactgtgtgaggttagccaaggcccttg

SEQ ID NO: 132945 - DNA, 51 bp, Homo sapiens
tgcaactctccgggcggccgcacctgccagtcctctgtgatgtcggtctgc

SEQ ID NO: 132946 - DNA, 100 bp, Homo sapiens
gcggagcctggcgggcgtgggaacccaggccccgccgaggcggccagggtctctcattcatcacttttatctgctatgtggcgtcctcagcatctgcctt

SEQ ID NO: 132947 - DNA, 100 bp, Homo sapiens
ataggattagatgatccaagtcaccaagaaattactgtctcaagtgatacgcatcatcggctggttcgtgcgaagcttcaagtacttttacgggctccgc

SEQ ID NO: 132948 - DNA, 73 bp, Homo sapiens
tggttgattctgtcctggatgtggtacggaaggagtgcagagaactgcattcagaattagacaacctcagtga

SEQ ID NO: 132949 - DNA, 75 bp, Homo sapiens
gaggagccgagaggagctgagcgagcgcggaagatgccttcaattaagttgcagagttctgatggagagatattt

SEQ ID NO: 132950 - DNA, 75 bp, Homo sapiens
tgggaacatgacgcaggtgcaggtgtctcttctcgccctggcggggaagagatggaaaataatgtcctgcaagat

SEQ ID NO: 132951 - DNA, 98 bp, Homo sapiens
gcaggcgggagctgatggtccagctggaagagctgatgaagttgctgaaggttacggcctccgctgccacagggccatcatcaccatctgccggctca

SEQ ID NO: 132952 - DNA, 86 bp, Homo sapiens
ccgccaccgccggacttcaatgcccagtccccagctcgccagcgtaagaatgattgatgttggctgatattggagtgctcattcac

SEQ ID NO: 132953 - DNA, 100 bp, Homo sapiens
accaaattgatgtgtctgacgtcatcaggcttgttcaagacacaccggaggcgacggccatggccacaggttgtggcagcactgcctgaaggtatgagac

SEQ ID NO: 132954 - DNA, 100 bp, Homo sapiens
gggcggccgtggacaacatgatggtcagaaaaggggacacggcggtgcttaggtgctggtaaaccgcctatgtttggtgattatgaagctcagagacact

SEQ ID NO: 132955 - DNA, 104 bp, Homo sapiens
acggaacagagactctttggtcaaaagatatggcgccatatcaggaagggccaaggcgttatcgtcggccacgcacaagatttctctccaaacaactcacagca

SEQ ID NO: 132956 - DNA, 83 bp, Homo sapiens
attctcaaagaaaagtttccacgagctacagctataaaagtcactgacatttcagactgtgtcagggaaaagggaggcaaggt

SEQ ID NO: 132957 - DNA, 107 bp, Homo sapiens
aggcaccgggatcgtgaccgagaccgtgaccgagagcgtgaccgagagcgcgaatatcgtcatcgttagaaggtgttgacttcaaaatcaaaactgtagagctaaga

SEQ ID NO: 132958 - DNA, 120 bp, Homo sapiens
ggcaccttctcatctctgcaaaccaaacaaaggcgaccctcgaaagacaaggtctttactaggtgtatttgaagaagatgccacagctatttccaactatatgaaccagttgtatcaagc

SEQ ID NO: 132959 - DNA, 75 bp, Homo sapiens
cataggattagatgatccaagtcaccaagaaattactgtctcaagtgatacgattatcttagaagacctaggact

SEQ ID NO: 132960 - DNA, 75 bp, Homo sapiens
atttggccagtttggagatgacccaaagatacaagtactggttgaacctgaccacttcaaggttgcagtgaatga

SEQ ID NO: 132961 - DNA, 101 bp, Homo sapiens
aaccttattaatctcagggaactggatgtcagcaagaatgtgtaaacaggaacatcgataagtagtgtaaaaacttgcacaatgaaatccgaagccaagga

SEQ ID NO: 132962 - DNA, 75 bp, Homo sapiens
cccaacattgaattgacctcgccacgcatgttcacctatgggggacttgatctcatcttcatgccaggccttggg

SEQ ID NO: 132963 - DNA, 83 bp, Homo sapiens
ggatgtgagcgctgagcccttggcagcctgtgggccaaagctgaccaactcccccaccgtcatcgtcatggtgggcctccccg

SEQ ID NO: 132964 - DNA, 100 bp, Homo sapiens
ccgccaaaatgaacagctcggacgaagagaagcagctgcagctcattaccagtctgaaggagcaaggctggacgtaaagaaagaagtgatgcactcaatt

SEQ ID NO: 132965 - DNA, 100 bp, Homo sapiens
tcagaacagtgctagtgaaagaatgttattctgtcttcacaaatcgaaggaaacagattgtctcagtttacctagctttgaaaatgccatacccatggga

SEQ ID NO: 132966 - DNA, 98 bp, Homo sapiens
gaggaccattatgagatgggggaggagctgggcaggctgttttggagtcagcggaagatcaccaaggccagggagtggttccaccgcactgtgaagat

SEQ ID NO: 132967 - DNA, 100 bp, Homo sapiens
cgagagcgcgaatatcgtcatcgttagaagagctccttaataagcatttatagtcagtttttggcagcaatagaatcactaaaggcattctgggatgtta

SEQ ID NO: 132968 - DNA, 98 bp, Homo sapiens
acaggaggaagtcaagcatatgaagattttgtagctggtcttggttgggaggaggtgtgattgcctatatcagttcttccagctcagcctcaagccct

SEQ ID NO: 132969 - DNA, 78 bp, Homo sapiens
gccctgcagtacctgcagaaggtctctggagacatcttcagcagacggttgatgatgaagcgccggccgtgtaaatga

SEQ ID NO: 132970 - DNA, 100 bp, Homo sapiens
ttggtgtgattagcttcgcagtctggaaagctttaggagttcacagtatggcccactgcgtgaccttggttcagctgtccatttcctgtgaccatctcat

SEQ ID NO: 132971 - DNA, 139 bp, Homo sapiens
agcaaatttcacaaagagaccctgcggttcataagcaccaagctgcccgacaagaccgtggagttcctccaggagtcggagaagctggaaagtgtgaatgctgaactgaaggctcagattgaggagctcaagaacgaga

SEQ ID NO: 132972 - DNA, 51 bp, Homo sapiens
cagcaactcccagctcaatgcaatgcttagcagtgtctgcaaaaacgaatc

SEQ ID NO: 132973 - DNA, 88 bp, Homo sapiens
aaaccttattctggccaacagtgttaagtataatggaagttggctggaatgtgatgacttaaaaggcccatgttctgaaaggcacaag

SEQ ID NO: 132974 - DNA, 80 bp, Homo sapiens
gaagagatcatcaggggccaggttttcttcaggcagagggtctcttcagttccagtctcatcagattttccatgtcctgg

SEQ ID NO: 132975 - DNA, 100 bp, Homo sapiens
caaaatcctgatggactccacgaaagtgcaaattggagttccatgcttgttctactggcaaaagcctcgccaccctctgtgatgggccctgtccctgtct

SEQ ID NO: 132976 - DNA, 98 bp, Homo sapiens
gagtcatacccccaggagtaagagcccatagcagtctgccagacaatagagcatatgggctggagcattggatttgctaaaggagcttaagaatattc

SEQ ID NO: 132977 - DNA, 75 bp, Homo sapiens
gaggagcgggaagagttgctggggctaactatatgtcagaaagcatcagcttttctcgatggacccattcatcta

SEQ ID NO: 132978 - DNA, 99 bp, Homo sapiens
ccgccgccccgcgccccgcgacctgcccctcggccgggacaatggccagctgtcaaagctcgaaaaacagcagcagaggaaagaaaagaccagagctaa

SEQ ID NO: 132979 - DNA, 82 bp, Homo sapiens
cggtgcagcacacgtactcctgcaaggagcaggccgggctctcgccatgggtcactgtcgcctctgccacgggaagttttcc

SEQ ID NO: 132980 - DNA, 100 bp, Homo sapiens
ccgtgtgcgaggagtgcctcaaagtctacctgagcgcccagagctccaaacgagaatggaagccgctggaggaccgtagctgcacagacataccatggct

SEQ ID NO: 132981 - DNA, 97 bp, Homo sapiens
cttcagctcatcttaggctgtgctgtgaactgtgaacagaagcaagtggttggcacttaccatggttccccagaccagtcccatcaagtgactggta

SEQ ID NO: 132982 - DNA, 82 bp, Homo sapiens
agctggacggcgagcgcgagcggcgcgagaaaaagaaggctgaagctgcacatcggattctggaaggcctggggccccaggt

SEQ ID NO: 132983 - DNA, 90 bp, Homo sapiens
attggtgggccagcaatcctcagacgcctcacttaggacaaataagtgccatagagttcatttccatttgccgtatcgatggcaattctt

SEQ ID NO: 132984 - DNA, 74 bp, Homo sapiens
aaatggcattctctcaaaagcagtgtgcaacttgctttggtgtttgctgttttattgccacagatgacattact

SEQ ID NO: 132985 - DNA, 100 bp, Homo sapiens
gattggaggtgtcagtgttaaaggaacctctacaacgaaggtgaagccacggaagataagtttgtttcgacgccggaccgcgtaagagacgatgatgttg

SEQ ID NO: 132986 - DNA, 83 bp, Homo sapiens
gcagaaaggcttcactacccttatcccggagagctgacaatgatgaatctcattgctgctgacacgccgaccgcctgctgctt

SEQ ID NO: 132987 - DNA, 100 bp, Homo sapiens
gtttcctgagttgctgtttcttgggactgcgaagctatacaggctaaaatacaggcctttgcagtatcttggaggggagcttgttgccacccaaaactca

SEQ ID NO: 132988 - DNA, 75 bp, Homo sapiens
ggacaagcaggtctaccgggccacgcaccgcctgctgctgctggaccatggtgaatccgggcagcagctcgcagc

SEQ ID NO: 132989 - DNA, 99 bp, Homo sapiens
ctttgtcagtgcacaaaatggcgccctacagcctactggtgactcggctgcaggtgacagagctgaatgaacctctctccaatgaagatcgaaatctcc

SEQ ID NO: 132990 - DNA, 82 bp, Homo sapiens
gtcgggttattcgagtgaccgagaccgcggccgggaccgaggaattcggttccctcaaaattataaaggcaggaaagctcaa

SEQ ID NO: 132991 - DNA, 112 bp, Homo sapiens
cttgggaaaggacaaaaaaattcctggaaaaagaagtccaagaagcaaaaaagggactgctaagaagataccaccagaatgtgacagtgatgataacatgggtgccaaaaat

SEQ ID NO: 132992 - DNA, 97 bp, Homo sapiens
gccttctgcctctacatgctgaagaccatccgtctgcccaccttcaagggcgagctgaggatcagtgtcctgcctgcctacctgtcctatgatgccc

SEQ ID NO: 132993 - DNA, 96 bp, Homo sapiens
gcagggaggagaccggcacccagacaggtggcgacggcagaggagaccttttaccaatttgaggctgcgtgggacagctccatgcacaactctctc

SEQ ID NO: 132994 - DNA, 97 bp, Homo sapiens
aattgctatgatgaaaccaaaaggccagactgaacacgatgagggtcaaaatgcagatcttcgtgaaaacccttaccggcaagaccatcacccttga

SEQ ID NO: 132995 - DNA, 50 bp, Homo sapiens
cacgtatcctcctgcctagcgcagcttcttggacacttaatgattgttgg

SEQ ID NO: 132996 - DNA, 100 bp, Homo sapiens
tggagttgggagtttcgctgatccagatgacctgccggggctggcacactttttggagcacagttgctatcggctggtggactatttggaagggatccgg

SEQ ID NO: 132997 - DNA, 101 bp, Homo sapiens
ctggccccggctctctggaccttgtctcgctcgggagcggaaacagcggcagccagaggcaaacataaatggccgtgtgttagctcagtgtaacattgatg

SEQ ID NO: 132998 - DNA, 100 bp, Homo sapiens
gggctcctctccttgaccttcgtgctgtttctctccctggcttttggggcaagctacggaacagagttcacagttaccagccaagaaaacttgaaaatga

SEQ ID NO: 132999 - DNA, 98 bp, Homo sapiens
gaatctgaaaaaaagagaaacctgggtgaactttcacggacaacctcagaggacaacgaagtgttcgaagagcgtgttgtccccattgaagtttgccg

SEQ ID NO: 133000 - DNA, 100 bp, Homo sapiens
tgacaacggagtgagagttcaaagattctttgtagcagacactgcaaatgaagctctcgaggctgctaagagactaagccgctgtgctcgctgtggagaa

SEQ ID NO: 133001 - DNA, 101 bp, Homo sapiens
agctggcggccgggctggggctgctgggcggagaaagacgagaatccaggacttgaatcgtatcttcccactttctgaggactactctggatcaggcttcg

SEQ ID NO: 133002 - DNA, 95 bp, Homo sapiens
cacaacagggacacctggttccagctgcagcacgtggacgctgactcggaagtgcagatctctgttgaggagctggcgcggaatctggtcatcaa

SEQ ID NO: 133003 - DNA, 78 bp, Homo sapiens
gattcctcctccttggtcgccgcgtccttggctggcgtgaagtgggacccatggcagccgagacctcccagtcaacag

SEQ ID NO: 133004 - DNA, 100 bp, Homo sapiens
gaggggccgccccgcgggaagatgaataagggctggctggagctggagagcgacccaggtcatccacagcaccgtggtggacacgtctgtgctcttcccc

SEQ ID NO: 133005 - DNA, 100 bp, Homo sapiens
tctcacctatttgccaagaatcaaagaatatctggatcaactagtgtttgcaagagcagacccttggacctggtgtttatcattgatagttctcgtagcg

SEQ ID NO: 133006 - DNA, 99 bp, Homo sapiens
tcctagcttccctgtatgtgatgatgaccgtcaccaactggttcaagtttggaattcacccagttgcaggccgaatgcctggtcagcttaatgtgctgc

SEQ ID NO: 133007 - DNA, 88 bp, Homo sapiens
cttggaaagatttactaagaagtcaaatagtgggttccttagagggaagaggatggagatgaagatgaggaagctgagtcagctacgg

SEQ ID NO: 133008 - DNA, 101 bp, Homo sapiens
ctagacagattattagcaatattatatagtatcgtggacagcagagttgctccaacagcaaatattttttcccaggttttgattcccaccatggccatcac

SEQ ID NO: 133009 - DNA, 74 bp, Homo sapiens
ctccggagtagctgggattacaggaaattcgaaatgagtcccatgactatcctcatagagtggccaagtttcca

SEQ ID NO: 133010 - DNA, 75 bp, Homo sapiens
gcgcctgttctcgggctgtttggcggcaaaagctggcaggctgacagaggcggcctcaggacggaccttctggct

SEQ ID NO: 133011 - DNA, 75 bp, Homo sapiens
gggaggcgcctggccagagcctggtcgagccggaggaagccaccaggattcgctaaatattgtaatggatcaagg

SEQ ID NO: 133012 - DNA, 98 bp, Homo sapiens
cccctgttccgaggtcaggaggatgcaagtcctgacagattcagcaacactgaccgccgggagagcctgcccacctccccaccctggacgccgggcgc

SEQ ID NO: 133013 - DNA, 100 bp, Homo sapiens
aagaaaaagagtttgttgagatactctttgtaaaagggcttattaggggatgctgagaacttgctggagtcacagccactgggatcctttctcatcaggg

SEQ ID NO: 133014 - DNA, 75 bp, Homo sapiens
cagagatgctgaaccagacggacccatcatttaagagtacggcaagaagaagctgaaatacctgccctacaatca

SEQ ID NO: 133015 - DNA, 100 bp, Homo sapiens
atctgaagctcaagaatccgtaacaaaaacaactaactactctacaggcccttccttggaggagaagttcctagtatcttgtgatataagtacatctggg

SEQ ID NO: 133016 - DNA, 82 bp, Homo sapiens
cttatgtacatgggatacaaatttgagcagtacatgtgtgcagagaggagtctgcaatgccgagtggaggaaggaggaaccg

SEQ ID NO: 133017 - DNA, 98 bp, Homo sapiens
cgcagagcctcctacccaggaccatggcagccccccaggacagcctcagaccaggggaggaagacgaagaggaaaaccagcgtgtgctagtgatacac

SEQ ID NO: 133018 - DNA, 74 bp, Homo sapiens
ttcattgatatcctaaacttgctgaaggcaaagaaaacctttctacgcctgcaagctctcagaccgggaacatc

SEQ ID NO: 133019 - DNA, 101 bp, Homo sapiens
gcctgtcgctggagcacaaaagagtctccgcggtggaggtctgcgttgctcttgcttttcctcgctggggtgtacgttgctgtctctgctggccttcatct

SEQ ID NO: 133020 - DNA, 82 bp, Homo sapiens
tattcttgaaccaggtcatgctccaaatgattacaaggcagaggaagacccagcaaaatttaaatctatcaaaacaggccga

SEQ ID NO: 133021 - DNA, 82 bp, Homo sapiens
tcttcacatggatcctcttcaagcttaaacctgggatttttcaagccacattcaattgataggatgaaaaaatttaagagaa

SEQ ID NO: 133022 - DNA, 100 bp, Homo sapiens
gggattccgtcgcttcaagcgctcagctcagttcttcaactacaagatccagacgctgaccggaaaggagattgagattgacattgaacctacagacaag

SEQ ID NO: 133023 - DNA, 82 bp, Homo sapiens
ggcggcgctgtgtccgtcgccatgacagaatgcctccaaagccgtccgaccggaagtgaatactgtcgcctcgtcagatgag

SEQ ID NO: 133024 - DNA, 74 bp, Homo sapiens
ttcggggacttgacagccgctgccgccgcagggggaaatttgcagtggtgagaaaatgtataaagaaagattct

SEQ ID NO: 133025 - DNA, 83 bp, Homo sapiens
tatcaacttaaaagatgccacctctaaggtggacccccaaaagtacaagggcatatttaacggattctcagttacacttaaag

SEQ ID NO: 133026 - DNA, 75 bp, Homo sapiens
tgatattgaattttataaggcaagagttgaggagtctactcttcatcttgtgttgagacttcgtggtggtgctaa

SEQ ID NO: 133027 - DNA, 75 bp, Homo sapiens
gtgcgaatacaggagacgtgtggagtcttcccaagggattgttgaagaaacttctgaagagggaaactctgtacc

SEQ ID NO: 133028 - DNA, 83 bp, Homo sapiens
ctggctttgggggacccacctgtgagacagaggtcatggaagaagtgacaacatgctccttcaacagccctctgttccggcag

SEQ ID NO: 133029 - DNA, 102 bp, Homo sapiens
tcaaaggagacccagactcctcttgccacgcatcagtctgaagactgggctggcttagatgaagatgaagatgcacatgtctgggaggataattgggatgat

SEQ ID NO: 133030 - DNA, 51 bp, Homo sapiens
gaagacttgcccatccaatctgatcaatgtccgagttaccaccatggatgc

SEQ ID NO: 133031 - DNA, 97 bp, Homo sapiens
tatattttgctgattcttttgacagaggaactctgtcaggaatcaaagaatcttcaggatggcagcaagtgtttacgagcccatatttggattggac

SEQ ID NO: 133032 - DNA, 74 bp, Homo sapiens
gaatccagaggctgaatgagctagaggagagactcttgcttctcgagttgcagcatcccagctcacttgcttag

SEQ ID NO: 133033 - DNA, 74 bp, Homo sapiens
tggcaggagccgcagaggcttgggctgcagcctctgcgcttagataccttcatgaaaacagaatcatccatcgg

SEQ ID NO: 133034 - DNA, 100 bp, Homo sapiens
aatttgattatgtgattaatgatttgacagctgttccaatctccacgtctccagaagaagaatccgaatcggaaggtgaggaaaattaaatggctcaaca

SEQ ID NO: 133035 - DNA, 150 bp, Homo sapiens
gaagtccatcaagcacaattttaactttgagctgttgccaagtaatctcttcaatagcagttctacaccggtatcaggtggagctcatgaaggacttcagcatttgggtccttttggcaacatccccaacatcgtggcagagttgactgg

SEQ ID NO: 133036 - DNA, 77 bp, Homo sapiens
ccagccctgcctctccctgggctctgttctttatagctccaagctctacagattcttcaaatatattgagaataggg

SEQ ID NO: 133037 - DNA, 50 bp, Homo sapiens
atcgcctcctgcgtcatcaacttaggcgagatccgtgctcagctcacaga

SEQ ID NO: 133038 - DNA, 110 bp, Homo sapiens
atgaattccggagttgccatgaaatatggaaacgactcctcggccgagctgagtgagtttggtgccctggttgtcagatgttggaaagcagtaggacggaacatactctt

SEQ ID NO: 133039 - DNA, 97 bp, Homo sapiens
gtattttgaaaaaaagtggacagatactttcaaagtgcttttgaagatgatgatatcacgcacgttgaaggaagtgtagatcctattcgagatatag

SEQ ID NO: 133040 - DNA, 98 bp, Homo sapiens
gagccacactttcaagtaaaccaggtggtgatgaagcataatgctgtaatagaacatttaaaacagaaaaagagcatgactccagctgaaagagaaga

SEQ ID NO: 133041 - DNA, 75 bp, Homo sapiens
actggctactgcgtacatccacaggttcactaacgggggcaaggaataagtatgggatggtagcacaagtgacac

SEQ ID NO: 133042 - DNA, 90 bp, Homo sapiens
ggatttggctacacacttatagatcttctgcactgtttacaggcacagccacttggcaaagtccctccctttgccctccagtgtgaatcg

SEQ ID NO: 133043 - DNA, 74 bp, Homo sapiens
gggagttcaaggaggtgctgaagagcgaggagctgactcaggtgttgacaccttggcagtgtttatggccagca

SEQ ID NO: 133044 - DNA, 75 bp, Homo sapiens
gagatgcctttgttcaccgccaaccccttcgagcaagacgtgggtcgcaatggaagaagagatcgccgcgctggt

SEQ ID NO: 133045 - DNA, 75 bp, Homo sapiens
tgcttggattccagttcgtctgcccacagccctccactcaacacaggaagcacttgctctgaaatttggggactg

SEQ ID NO: 133046 - DNA, 82 bp, Homo sapiens
ggttttccactccattgttgttagaagccagtgaagcctgcctacagttttcacaaatctgtatcctttcagtaaagaatgg

SEQ ID NO: 133047 - DNA, 76 bp, Homo sapiens
ttctttacctgcttcccaatcccactgatgaggatcagcccatgggactatgcagccatcgtcttctttgctaaca

SEQ ID NO: 133048 - DNA, 90 bp, Homo sapiens
ctataatcaagtaaaaacaatagctcaaggaaacctttccaacacagatgtccaagctgccaaatccccgtcgaggtcaagatcaagatc

SEQ ID NO: 133049 - DNA, 75 bp, Homo sapiens
caacttccggctggattccaagtccgtcgtggaggaacgtggctcccaagaccacaatggggcgctccaaccccc

SEQ ID NO: 133050 - DNA, 75 bp, Homo sapiens
tgggcaaataatggcagttaaagaagtgtttggattgtgagctatttcagaactgttctcaggactcattatttt

SEQ ID NO: 133051 - DNA, 74 bp, Homo sapiens
tggaggaaggaatgttgcacggaggacgtttgggagagcccatggtgactgcgtgagtggagcccagctgtgtg

SEQ ID NO: 133052 - DNA, 100 bp, Homo sapiens
cagcccctgtgaggcgctcacctgcaccatggaggaggttatcaatactctggctgaccatcatcatcgtgggactgactttggtggaagtccttggtta

SEQ ID NO: 133053 - DNA, 75 bp, Homo sapiens
atgtcaactttactgagaattttccacctcctgacacaacaccactcacagccaacagagcagtcagcagagcag

SEQ ID NO: 133054 - DNA, 90 bp, Homo sapiens
gtctgctgaagcatgtagtgagatgttaccttcgactttcagataaccccagcagcacagtcagcagcctccattcaagagttgattcat

SEQ ID NO: 133055 - DNA, 83 bp, Homo sapiens
cgggtgagctcaccgcccagcccaaaccaggagattgcgagggagcgatgcggtgcagcgcgtttaatggatcgagaagtggc

SEQ ID NO: 133056 - DNA, 101 bp, Homo sapiens
ctagaattacctggaacttcatcatcatctacttcacaggaattgccatttggagaagaaatgggtgaccgttggtgacacatccctacgaatctacaaat

SEQ ID NO: 133057 - DNA, 96 bp, Homo sapiens
aaaaggatatgaaaagaagaggtcaaagttaattggagcctaccttccgcagcctccgagtatgaacgctgccgtccgtgccgtggtgcgcatggg

SEQ ID NO: 133058 - DNA, 74 bp, Homo sapiens
gggaagcaagagaaaaagaacattactgtcttggactctgagagtgtttccaaagtgctttggctggatgagat

SEQ ID NO: 133059 - DNA, 75 bp, Homo sapiens
aagatccaatcccagaggagcagcaggggaacaggaacctgataaagaatcaggagcctcagtggatgaagtagc

SEQ ID NO: 133060 - DNA, 82 bp, Homo sapiens
cgaggcttcacggaggaggtggacctgcctagagctggaacgttacctccagagcgagccctgctatgtttcagcctcagaa

SEQ ID NO: 133061 - DNA, 100 bp, Homo sapiens
cggattacccctccacggtaccgggcggatgaataccagccccccggtgtcatggagaaactccagctgggcccagagattctgcagcgggaaaatccaa

SEQ ID NO: 133062 - DNA, 74 bp, Homo sapiens
ctcaggcacataaatcctgtgaagttattattggttccaatacatatgaagaggcagctgcctatattcaatgc

SEQ ID NO: 133063 - DNA, 106 bp, Homo sapiens
tgagaaggaggggtatgagccacacatccccgaccacttgcggcctgagtatgacaatgcagatcttcgtgaagactctgactggtaagaccatcaccctcgaggt

SEQ ID NO: 133064 - DNA, 75 bp, Homo sapiens
tggtgtcgtttttccttgagctgaacgtcttgcaacagtggccgcacgcatagggaagacatgtaaggaatttgc

SEQ ID NO: 133065 - DNA, 100 bp, Homo sapiens
ctcctccttggtcgccgcgtccttggctggcgtgtgctgggcgtcctcttctttgccatagcctgcttcttatacaagcccctgtcggagtcttcagatg

SEQ ID NO: 133066 - DNA, 100 bp, Homo sapiens
cagcctccacaccccaccccatactggatcctgaagaactcctggggggcccaatggggagagaaggttttggaacttgaaggtgaaaaaggagaatggg

SEQ ID NO: 133067 - DNA, 83 bp, Homo sapiens
tgggtctccaggcccgcgaccgtccgccagtcgtcccgagtgcaagaagaaacacacgctgctgtgccccgactttgcccgca

SEQ ID NO: 133068 - DNA, 83 bp, Homo sapiens
gatgtggatacgagcgatgagaagtcggcccaggaagaggttgaagtggatattaagcatgacaccctctgtgaaagtggaaa

SEQ ID NO: 133069 - DNA, 101 bp, Homo sapiens
cttcacctggtgtttgaatattgtgaccacacagttctccatgagttggacagataccaaagaggtctccatgcagtaaacagacccagcagaacctgccc

SEQ ID NO: 133070 - DNA, 80 bp, Homo sapiens
cagggccgtgccgcagatgcccaccggaatggagaaggaagaggagtcgggccttgggtgtctccgtgactgactacacg

SEQ ID NO: 133071 - DNA, 75 bp, Homo sapiens
ctccaagggacgacgctcgcggaagcagaggtttggggtaggtgagctcgtgaaacaatatgaagaggagaaaat

SEQ ID NO: 133072 - DNA, 90 bp, Homo sapiens
ggccaggggacacaccaatggcacaaagcctctggatggcttcgacgtgtggaaaaccatcagcattagtgccagcagtagttcccaagg

SEQ ID NO: 133073 - DNA, 100 bp, Homo sapiens
gcccttagcgaccccgcccgggccccctcagggctgcaaagttgttggagcagtagggtctgatgaaaaggttgcctaccttcaaaagcttggatttgat

SEQ ID NO: 133074 - DNA, 100 bp, Homo sapiens
atgaatcagagttcattggccaaggagtgccccctttcacagttgtcatggatgcactggtagaagatgatatctgtattctgaatcatgaaaaagccca

SEQ ID NO: 133075 - DNA, 104 bp, Homo sapiens
ccacgctgctgatcgtcctgctgctgatggtgtgcggtgataacccccgtgaggacaggccatggctacgtatacgagtacccatccagataccaaaaggacgt

SEQ ID NO: 133076 - DNA, 82 bp, Homo sapiens
aaatcttgtgacaaaactcacacatgcccaccgtgcccaggagcttggcgtgctgcaggattacctgctggccctaaccacg

SEQ ID NO: 133077 - DNA, 100 bp, Homo sapiens
aaggacacatccaatttccattcgcatccaaaatggaatccgagacagaaagaggaccttaggatgttgcttcagagtgtgaagtcaaatgcatgccaac

SEQ ID NO: 133078 - DNA, 82 bp, Homo sapiens
gcccgccgggccgcggacactgtcgcccggcgcccagagacctgtcggccatggagcctaatgatagtaccagtaccgctgt

SEQ ID NO: 133079 - DNA, 90 bp, Homo sapiens
caacagcctcagcagtctcctttgccacctggtattaaacctaccatccaaatcaaacaggagtcagagatgggttttcgccatgttggc

SEQ ID NO: 133080 - DNA, 82 bp, Homo sapiens
caatcttcaatgagtaaacatattcctggcgaccattgacgaggtggagacggacgtggtggagattgaggccaaactggac

SEQ ID NO: 133081 - DNA, 100 bp, Homo sapiens
gaaaactaggaatctatgatgctgatggtgatggagattttgatgtggatgatgccaaagttttattagtgcaaacttggatgaggaggcacaggctggt

SEQ ID NO: 133082 - DNA, 74 bp, Homo sapiens
cacacgcgcagccccggcctctcggcctctgccggagaaacagaactgataaatttcaaacggaagagagtggc

SEQ ID NO: 133083 - DNA, 87 bp, Homo sapiens
caaggcaagactggcacccagcacagcagatcttcagatccctacctgttggctataacatctctaagcaagttcttgatcagtatc

SEQ ID NO: 133084 - DNA, 82 bp, Homo sapiens
ctttgggcggggcggagccgagagccacactttcaagtaaaccagaggtggggctggtgtccgagcacttctcgcaggcccc

SEQ ID NO: 133085 - DNA, 75 bp, Homo sapiens
agaatgaatgaagtgcttcagatttaaatagtatgattatcgggaaatgctgcacaatgccactttctgtctggt

SEQ ID NO: 133086 - DNA, 100 bp, Homo sapiens
ggaaaatggattcagtttgcatctctccctcctttaaacagcttctccgggtctcagcatgtcgcagatatggccagtacactatgaaccaggaaagcac

SEQ ID NO: 133087 - DNA, 100 bp, Homo sapiens
gaatcacggactcgaggctatgaccgtgacatagcattcatcatggatgacttccaacatgccatgtcagacagtgaagctccagtgatccacaagctca

SEQ ID NO: 133088 - DNA, 75 bp, Homo sapiens
aagttgagggagaaaggcgggcccgggaacaggatgaatagccttggaagatagagatcgtgtctccctccagag

SEQ ID NO: 133089 - DNA, 50 bp, Homo sapiens
atcaacttaaaagatgccacctctaaggagcaggagcagtgacttcacct

SEQ ID NO: 133090 - DNA, 50 bp, Homo sapiens
gaactgtccacactgctgaaaaatctgcatctgcaaacatagagaattct

SEQ ID NO: 133091 - DNA, 97 bp, Homo sapiens
tgcgtaactccaaggacttttcggagacttttgttggtcctgcactttggtggtggtggcttcctggcattttataattgtcagttgtcttggagct

SEQ ID NO: 133092 - DNA, 90 bp, Homo sapiens
agcatataagccaggcatgtctcccgaggagtgcaggcgcttcaccacagacgagtatcgagatcgttatgattcagaccggtatcggga

SEQ ID NO: 133093 - DNA, 100 bp, Homo sapiens
cccggcccccgcctgcctccgccggctacagcgggaagagcgatggacacccgctccgggagccagtgttccgtcaccccagaagccatactcaataatg

SEQ ID NO: 133094 - DNA, 100 bp, Homo sapiens
tgagggagcggtacttctcagggctaatatatgtggtctcatggattataaccatttggatatttggttcactaacaattttcttactggccagagttct

SEQ ID NO: 133095 - DNA, 82 bp, Homo sapiens
agctctcatgttctgcacctcaggagggaattcagcctcagtgatgtccatgagaaggaagaggcccagcagaagggactcg

SEQ ID NO: 133096 - DNA, 76 bp, Homo sapiens
ctgaaagtgacaagcattttagaaagccctggtacctgacagtgtaaagaaggagctcctacaaagaataagaaca

SEQ ID NO: 133097 - DNA, 82 bp, Homo sapiens
ttgttcacgagaacattgagacatttctttcggcccttcataacacaaggcttttatctgcttattccgccattgatcccag

SEQ ID NO: 133098 - DNA, 98 bp, Homo sapiens
attggcgtttgtcatcagaatcagagggcgcattctacattctaaaggggagctcagtgaagatagacataaacagtatgaggaatttgctatgtctt

SEQ ID NO: 133099 - DNA, 83 bp, Homo sapiens
gtcccccagtaggagaatgactccgattcgtgaccctcagcgccggtgcatgtcgattgcacacatataatcttagataatgc

SEQ ID NO: 133100 - DNA, 105 bp, Homo sapiens
cgtccttctccactttcgccagcccgtgccgcgagcgcggcctgcaggaggtacacggtcctcttctcgcacggcaatgccgtggacctgggccagatgagcagc

SEQ ID NO: 133101 - DNA, 75 bp, Homo sapiens
gtgacacacagccctctcttccatcagaatgccagaggacttggatctgagctaaaggacagtattccagttact

SEQ ID NO: 133102 - DNA, 73 bp, Homo sapiens
ccagccacagattgccacattagcccaggtggagccgccaccaaaatgcagattttcgtgaaaacccttacgg

SEQ ID NO: 133103 - DNA, 51 bp, Homo sapiens
gccgggggcgtctttcagagcattacgggttacacatcattttggaatgac

SEQ ID NO: 133104 - DNA, 90 bp, Homo sapiens
atggcacagacggctatcaaggcaatgcaccaagcacagaccatggagggacaacaccttccatccacatatgggacgccatgaccaaac

SEQ ID NO: 133105 - DNA, 97 bp, Homo sapiens
tttataatacttttgtgatagaagaaaaacatggcttcaatcaacagctctggattaatcgaattacagctgctagccaggaacatggactgaagta

SEQ ID NO: 133106 - DNA, 131 bp, Homo sapiens
aaatatttgtaggcgggttatctgcgaacacagtagtggaagatgtaaagcaatatttcgagcagtttggcaagggggatatgagactttctactcggaatatcctgagtgttgcgtggatgtaaaaccca

SEQ ID NO: 133107 - DNA, 90 bp, Homo sapiens
ccagacaacttctggcagaaacagaggactaattttggcagttctaaatttgaatttgagtctgaaaacttagagaatacagtaatcata

SEQ ID NO: 133108 - DNA, 101 bp, Homo sapiens
gctgagaccgggcggccacagtccgcagggatgaacctcgagttgctgggtttaggaatgtatgaaacacccctgttcctagctcatgaagaagagtcagg

SEQ ID NO: 133109 - DNA, 82 bp, Homo sapiens
gttccctcggattaaacgccggagagagcgtgaatttgcctcggggacgcctctccaggttggacttggctcagtctctggg

SEQ ID NO: 133110 - DNA, 50 bp, Homo sapiens
caaaagtccattatgaaactggaaagtaatggaccagtgaaggtgtgggg

SEQ ID NO: 133111 - DNA, 75 bp, Homo sapiens
cacaggctcctgccctggactaccgaggcagagatcctacaagaatccaggatgatgatcccagattgccagcgc

SEQ ID NO: 133112 - DNA, 151 bp, Homo sapiens
cgaacgtcatgagcatagtgatcccattgggggttgatacagcagagacgtcatacttggaaatggctgcaggttcagagagcagatgtctcaagtattagatgccatgtttgaaaaattggtcaaagatggggagcatgtaattgatcaa

SEQ ID NO: 133113 - DNA, 100 bp, Homo sapiens
gaaaagctttggatgaaggagcttcaaacccaaagaggtatggacctgtctgccaatcaggacgaggagaccgaccaggagaccttccagctggagatcg

SEQ ID NO: 133114 - DNA, 100 bp, Homo sapiens
gacgaggggctccgggtcttccagagcgtgaagatcaagatcggtgacttaagagattaaaattaatttggttgctgttggttctgaacaaataatgagt

SEQ ID NO: 133115 - DNA, 75 bp, Homo sapiens
gtgcctaggctcggaagcacgttcagtctggatacctccatggttaaagaactgaatcattatctggaagctgag

SEQ ID NO: 133116 - DNA, 100 bp, Homo sapiens
ttacgttcttgtcagaactcgtgccttttgagtctccccggtacctgcaggtgctcatggaaacaacctcattgctgttctagccaaatacatctaccac

SEQ ID NO: 133117 - DNA, 75 bp, Homo sapiens
cagccacatactatccgtttgttcaggaaccaccagtgacagattccagctttacatgtggtttggctggggctc

SEQ ID NO: 133118 - DNA, 75 bp, Homo sapiens
acgagaagcctgaaaagtcgcagcgagctggagccgccggaggcagcaaaggaacagactcaagatttaatagta

SEQ ID NO: 133119 - DNA, 100 bp, Homo sapiens
gccgccgaagaagcatcgttaaagtctctcttcaccctgccgtcatgtctaagtcagagatgtagatttagaagaggctggaaaagagggtggaaaaagc

SEQ ID NO: 133120 - DNA, 83 bp, Homo sapiens
cgagcacgagctgtgaggggattcacttgtgtgcggaactcctcggaaccatggccaagaagcttgagagaagaaaaatttca

SEQ ID NO: 133121 - DNA, 83 bp, Homo sapiens
gataacaccctgtaacagctgagcacgtgtggttctcaaatataggcattctgatgggaacttgtgtgttaaagtaacagatg

SEQ ID NO: 133122 - DNA, 101 bp, Homo sapiens
gtgtgctggggcggaatttcaagatggatcggggctgaaatctctttaatgatggagggaagcaggcagacgcgagtgtctcggccatacaagatcagcga

SEQ ID NO: 133123 - DNA, 97 bp, Homo sapiens
caacctagtgggtgtaatacatcatgaactgcagggttgagcaatgtttaaagcgtttgaaaaacatgaatttggagggctcaattcaagacctgtt

SEQ ID NO: 133124 - DNA, 100 bp, Homo sapiens
agcaaatgataaaccgcaataaggtcgtcaaggtgacagcaccagaagcccaagcaaagagattcattctcctgctggttgtaacggaaatgaatttcag

SEQ ID NO: 133125 - DNA, 99 bp, Homo sapiens
cgccatcgttgctgccttcttcgtcaaggtgttggagcgggccggagagaagtagagtgggctgcgaggagaaggaaacaggcctttcggaggctcctc

SEQ ID NO: 133126 - DNA, 100 bp, Homo sapiens
agctgtagaagcactgaagggagcaccgtcagggactgtgagaataggagttgctaagcctttacccttcctctgtgacgagggtgcaggtatctctggg

SEQ ID NO: 133127 - DNA, 85 bp, Homo sapiens
aggctggggtgccccatgcccctgtcaggacccccagcctcagccctgtggagaaacagccagcagaaaactgagcttccggtca

SEQ ID NO: 133128 - DNA, 119 bp, Homo sapiens
ccaccattgaagactcctacctgaaacatacggagattgacaatcaatgggccatcttggacgctgctcatgtttcccacctggagaatgtgtcagaggaagaaatgaacagactcctg

SEQ ID NO: 133129 - DNA, 100 bp, Homo sapiens
accgcatctggctggagccctgcattcgcggcgtgtgcagattgcttccaagtatgatcatcaggcagaagaagatcttcgcaattggatagaagaggtg

SEQ ID NO: 133130 - DNA, 100 bp, Homo sapiens
ttctggacgtcctgtcactccacctcgaacagctaatccgccgaagaaaaggcggcacaggcaccaagatgtccaaccgagtggtctgccgagaagccag

SEQ ID NO: 133131 - DNA, 100 bp, Homo sapiens
gccgtggctgacactaaagactttgtagccatcaacccgagtgcagtttcgatggaaaatgaagacgagatcatcagatgttcattcatctggatcttca

SEQ ID NO: 133132 - DNA, 90 bp, Homo sapiens
gaaaggaaggaatatatcctgactgattgttttagtgccaaagaaccctgcgttcatggggaagatggttgaagtggacatctatgaatc

SEQ ID NO: 133133 - DNA, 50 bp, Homo sapiens
gggcatgactacatctgtcatggagcatcagatccatgctgctgctgact

SEQ ID NO: 133134 - DNA, 100 bp, Homo sapiens
tggggacgagcgggccccgcggcgtcatcggcggcgagagagaagctgcatgaggccaataatgaactacagaagaagagagccattattgaagatctcg

SEQ ID NO: 133135 - DNA, 75 bp, Homo sapiens
gaacaaggcacctaacctcgccagagctttggattttgaattatgggatgatgtaggattaaacattccaaaacc

SEQ ID NO: 133136 - DNA, 75 bp, Homo sapiens
tttatgccagctccaaggacgccatcaagaagaagctgacaggatcaagcgtgctttccttatcgaggagcagaa

SEQ ID NO: 133137 - DNA, 74 bp, Homo sapiens
ggccgtggtgaggaaccctggactctcagctgaccacagtggccgagaagtcgcgcgtgctgcagctggaggag

SEQ ID NO: 133138 - DNA, 75 bp, Homo sapiens
gattcatttagagctgcggaacaggacgccctctgatgagagcttgtttcatatccatatcccactgtattcctg

SEQ ID NO: 133139 - DNA, 80 bp, Homo sapiens
cggctaccaaagctgttctccaggagtttggtagaatcctgacatgcatcctgacggaacagcggatcgtcttcttctcc

SEQ ID NO: 133140 - DNA, 96 bp, Homo sapiens
cctattatctcccctgcccagagatcttgacaaggagactggctttcacagaggtttgggttgggttcagttttcttcagaagaaggacttcggaa

SEQ ID NO: 133141 - DNA, 100 bp, Homo sapiens
tgatcccaacactttgggaagtgaagttgggcggatcacttgaggacagaactgtaccgctctctttttggccagctccaccctcccgacgaaggccacg

SEQ ID NO: 133142 - DNA, 75 bp, Homo sapiens
tgtgcaaagctgcagaaaccacagtggtagagaaatgcatcttctgcagacaccgggttaagagggtctctggag

SEQ ID NO: 133143 - DNA, 75 bp, Homo sapiens
tgtcaactctaccatgtgctagagacagccaacaaaatattcatggttcttgagatctccagtctatgtgctgaa

SEQ ID NO: 133144 - DNA, 100 bp, Homo sapiens
atggattagtgataactcaagtttcatcacctctccctggcagccaggcaagagacagaagagccttctctgggattcctgatgcatatagaaaaaagat

SEQ ID NO: 133145 - DNA, 100 bp, Homo sapiens
ctgccgtgccacctgctgcacccacgaatctgcccacccctcctgtaacccagcctgtttcacttcttgatatttggagttcttacaacatggcagacat

SEQ ID NO: 133146 - DNA, 75 bp, Homo sapiens
taacctgcgggagaggtttggaattgatgatcaagatttccaggtctctaattaacagaagatggcaaagcccag

SEQ ID NO: 133147 - DNA, 75 bp, Homo sapiens
cacccaccgtggcctcccaaagtgctgagattaaagaccaagatcactccatggatgaaatgacagctgtggtga

SEQ ID NO: 133148 - DNA, 75 bp, Homo sapiens
tattcctgtgactggtcctgtggctcagctctacagcttacctcctgaaggtttgccatctgcaaatctggccgc

SEQ ID NO: 133149 - DNA, 51 bp, Homo sapiens
gaattacactgtgatacgactgactgaaagaaaccaccattttctgacaag

SEQ ID NO: 133150 - DNA, 75 bp, Homo sapiens
actcctcccagtgacgggtctggagtgcgtgggggaccggctgttggcggaagaagaaaggagggcgcgggctaa

SEQ ID NO: 133151 - DNA, 75 bp, Homo sapiens
aaacttgtcattaataaaatagcatatgatgtgcagtgtccaaagagaggtgacgcatccaaagaagacattgac

SEQ ID NO: 133152 - DNA, 101 bp, Homo sapiens
ctcgaattagcaaaggaaacttttgatttcccatcagatatcgctaacaagtctctctcagagaccactgcaacaatgctctggaagtccaagggcaggag

SEQ ID NO: 133153 - DNA, 75 bp, Homo sapiens
tgtgctgaatcctggctgtgtgaccccaacaataccaagtttccaggcccgaagagcatcccagactattgggac

SEQ ID NO: 133154 - DNA, 88 bp, Homo sapiens
agaagagccaaggaataaacatgcaatgaacccaaaaggatgacgaagatgatcctgcagaagctgaaaaggagggaaatgaaatgga

SEQ ID NO: 133155 - DNA, 100 bp, Homo sapiens
ctgggaaccacccttctactttctgtctctaggaatttcactactctaggttctggaggacacgtgccggcggcaggacttcaacccctgtgaatatgat

SEQ ID NO: 133156 - DNA, 105 bp, Homo sapiens
cctaaacagcaaagagtggatccgacctttggcttcagggatgctctaaagctgggctcaagcaagccctggccagaggtcctaaagatgctgactggggagtct

SEQ ID NO: 133157 - DNA, 90 bp, Homo sapiens
tacacagtgtcggaccccaggactcaccccaagggctacaccgagtacaaagtaaccgcgcaggagccctgcagattgaaagcagtgagg

SEQ ID NO: 133158 - DNA, 73 bp, Homo sapiens
aggaagctgagtcagctacgggcaagcgggcagctgaagatgatgaggagctctacggtgactttgaagactt

SEQ ID NO: 133159 - DNA, 75 bp, Homo sapiens
ccgcgcggggggcgagtaagccagcggcaggaccagcgggcgggggcccacgaatgatgataattccgaagaagg

SEQ ID NO: 133160 - DNA, 100 bp, Homo sapiens
ggagccggcgctcgagggcgtgctcagcaaatacaccaacctcctccagggctggcagaacaggtatggaaaaattgtatctacaaaggcaattcttgac

SEQ ID NO: 133161 - DNA, 100 bp, Homo sapiens
ggagaataatttctttctcgctgatcgcctaacttctactgacgaagcttggaagttgcagaagtgccagccatttttggagtctcctttggtatccgca

SEQ ID NO: 133162 - DNA, 82 bp, Homo sapiens
tcctgttcccgcaggaaggcatatgtttgtatttcagagggagaaccgaagattacaggaggccagcatgaggttggaacaa

SEQ ID NO: 133163 - DNA, 100 bp, Homo sapiens
aaactgattggaaactctttgggaaagccactcgaaaagatgccagcctgttattgcgctccaggccactatcactccagccaacctcagtatcgcccag

SEQ ID NO: 133164 - DNA, 50 bp, Homo sapiens
cagccagcacactcctcgcgagcaaggaagaggcatggtctcctaccatg

SEQ ID NO: 133165 - DNA, 100 bp, Homo sapiens
cttgggggtcgagcacataacggggttcgggtgtctcgtgtgtgaacatcacagggacttgccatgaggtgttgaagccttgtttcactgagttggagag

SEQ ID NO: 133166 - DNA, 82 bp, Homo sapiens
ttttccacagggaattgagttgggtagaagagcagaggatggctctgtcattgattatgaactgattgaccaagatgctcgg

SEQ ID NO: 133167 - DNA, 113 bp, Homo sapiens
ccagaagtgagctccagtcagcagcagcccccagtcgctccagccataaccactgaggccacagcacagtgcataccagcggggatctgatgagcttctttcttctggcatca

SEQ ID NO: 133168 - DNA, 100 bp, Homo sapiens
cgtcatctctctcaaggaggagttctacaccaaggccgagagcctcattggagtctatcctgagagtgttctgccagttctggataatccactgtccaag

SEQ ID NO: 133169 - DNA, 100 bp, Homo sapiens
ggactatgtggtggacttggacacgtcccagctctctctgggcatctggaaagggatcgcttacacctgagacgaactacagaacagcacgtaccagagg

SEQ ID NO: 133170 - DNA, 75 bp, Homo sapiens
ggagcagtggagcccaaagacccctggagacatgcatggcaccttgggcagtggccgctcctcggacaaaggccc

SEQ ID NO: 133171 - DNA, 75 bp, Homo sapiens
agaagatggacagtttcagtgcattacaggaccagtcctgcctctgttgtagaagacatgtggtgtatataaagt

SEQ ID NO: 133172 - DNA, 107 bp, Homo sapiens
tggcggatggccccaggtgtaagcgcagaaagcaggcgaacccgcggcgcaataacgctcaccatggatgatgatatcgccgcgctcgtcgtcgacaacggctccgg

SEQ ID NO: 133173 - DNA, 73 bp, Homo sapiens
actaaggacgagctgatcaagtatatgactgaagaagcataaaacgaccatcaccagctgaaaagtcacataa

SEQ ID NO: 133174 - DNA, 100 bp, Homo sapiens
gtcctgagcggccaggacgacgaggagcagggcctgactgcgcaggttgcacagagcattgaggatcaccatcaggaagtgattggtttctgcagagaga

SEQ ID NO: 133175 - DNA, 83 bp, Homo sapiens
ggcgacccaagacacccagagagggacagacaatgcagatcttcgtgaagactctgactggtaagaccatcaccctcgaggtt

SEQ ID NO: 133176 - DNA, 74 bp, Homo sapiens
aagcttcaagactttgacatgtgtgaaaacatgaaatgtgttctaagaacggaagcatctgggctggatggaat

SEQ ID NO: 133177 - DNA, 80 bp, Homo sapiens
cccagcgctttgggaggccgaggctggctacagcaaacatcattcaagatgtccagcaaagggagcagcacagatggcag

SEQ ID NO: 133178 - DNA, 82 bp, Homo sapiens
tggaacgatgccaaagaattgagctgaagcagggctacacatttttcatcccttccgtcgagtaatcctgcctgtgtctgta

SEQ ID NO: 133179 - DNA, 104 bp, Homo sapiens
ttcaaggtgcaggaagtccaagagagaaagatgtttgagtttgtggagcctccccaaggaggcccgcctgacgactgaccagttgccatggcatcctactacga

SEQ ID NO: 133180 - DNA, 75 bp, Homo sapiens
actcggattcttcaaaaacttcacctgaaggctgctttgtaccgcctcagtggagactggaatcccttacacatt

SEQ ID NO: 133181 - DNA, 83 bp, Homo sapiens
ccacatctgtttcaactctccgccgagggcgagcaggagcgagagtgtgtcgacggagctggagtttgttcagatcatcatca

SEQ ID NO: 133182 - DNA, 96 bp, Homo sapiens
gtcgtcctgtctgggtgtcgcgggccggccccgcggggagcgcccccggcgcgatgcccttcaggaaaggcagttgcagtggtgcagaatggctga

SEQ ID NO: 133183 - DNA, 98 bp, Homo sapiens
ccttagctgtgctcgcgctactctctctttctggcctggaggctatccagcgactcctcctattttgaggacttctccaacatctccatcttctcctc

SEQ ID NO: 133184 - DNA, 50 bp, Homo sapiens
cacacagtcattcaaacagccgctctagaccaagatagaacagcccttca

SEQ ID NO: 133185 - DNA, 98 bp, Homo sapiens
aggcatcacagagcattggaggttccagtgctttcggatttggttggaagtactccatgacacacactcggagaaagtcccttcccatgctgagttcg

SEQ ID NO: 133186 - DNA, 102 bp, Homo sapiens
cggcccgcgtcggcgctggggacaaagtgcctggatcaaagtggaacagctgaagccatatcatgctcataaagaggaaatgataaaaattaacaagggtaa

SEQ ID NO: 133187 - DNA, 98 bp, Homo sapiens
gtcaggccgcgacgagggcgctgagggagccccgcgcggactcactctatgatgtccctgtcggtgcggccgcagcgccgtctgctcagcgcccgggt

SEQ ID NO: 133188 - DNA, 80 bp, Homo sapiens
gtcaaatttacagtgcacacaaagaacatggctctctatgctgacgtcggtggaaaacaattccctgtcactcgaggcca

SEQ ID NO: 133189 - DNA, 83 bp, Homo sapiens
tgctgctcatcccggtggccgccgcgcaggagcctcccggagctgggaacggcaggagcagctgatgggatatcggaagagag

SEQ ID NO: 133190 - DNA, 76 bp, Homo sapiens
ctctgggaggtgttcagcaaccccgagtttgacaagtatgcgcccaagctggacagcccctacttccgacattcca

SEQ ID NO: 133191 - DNA, 89 bp, Homo sapiens
cagaaggatatcgacgtcgtgatccagaagtccagagctgaggactgcctgtttgcaggctaatggaggttggcaggatgctactaccc

SEQ ID NO: 133192 - DNA, 75 bp, Homo sapiens
ccctgtggaatcttttaactcccaagcgccctcacaaagccaatgctgaggagatgaccaagtaccacagcgatg

SEQ ID NO: 133193 - DNA, 100 bp, Homo sapiens
tcccgtagcctcggggaaggagcaggatttagaggaccactagttggaccccatcctcgtgctggaggaacaggattcgtgaagttttttggaaacctgg

SEQ ID NO: 133194 - DNA, 98 bp, Homo sapiens
agggcggtggcgcccgcgggacctgcggtactccaaagattcaggtttactcacgtcatccagcagagaatggaaagtcaaatttcctgaattgctat

SEQ ID NO: 133195 - DNA, 100 bp, Homo sapiens
gatcctggagatgtggttacacagcttgaatgccaagtcctgtatctgccatgtctgtggcgtccacctcaacaggctgcattcctgcctctactgtgtc

SEQ ID NO: 133196 - DNA, 124 bp, Homo sapiens
gccgcaccatgccgctcctaagcctgcacagccgcggcggcagcagcagtgagagcttccccgggcgctgcctggacaggcctgcctgcgtgctgggacatgtctggcctccaaggaccgtcgg

SEQ ID NO: 133197 - DNA, 100 bp, Homo sapiens
agacatttacgcggatgtcggcgaagagttcaaccagctttaccgatttgttacaactcaagcaagggccagcagaaattctcttttgacagatataatt

SEQ ID NO: 133198 - DNA, 98 bp, Homo sapiens
cccagacaccagccccccaccatgggcgccctgcgtccggcagaggaggcgagcatcccgctcaggtgatgaggaacccctcgcgcacccagcgcaga

SEQ ID NO: 133199 - DNA, 100 bp, Homo sapiens
tgtggctgcaagatacggtcatgagcttttgattaacaccttaataaccagcggagctgacacagccaagcttgttagcagtggcacaagatcttacaga

SEQ ID NO: 133200 - DNA, 82 bp, Homo sapiens
cctaatcaagttcctgtacaaccagaagcgacacaggtacagtgaaggtgaaattcgatttaatttaatggccattgtgtct

SEQ ID NO: 133201 - DNA, 88 bp, Homo sapiens
tgaatggggtgtttgaggtacataaggttcgttccaccagtcataaaccagatgaaatctatggcatgattgaaagactatctcctgg

SEQ ID NO: 133202 - DNA, 50 bp, Homo sapiens
tctggacaaaggaacaggtatctcaggacctgagagtcagtatactaaga

SEQ ID NO: 133203 - DNA, 85 bp, Homo sapiens
cagaagtccagagctgaggactgcctgtttgcagctgcatcttcctcccgtgaggctggccgagctccacgctgatctgaagata

SEQ ID NO: 133204 - DNA, 100 bp, Homo sapiens
gtttggtgccattgtatcagcaactgatccagatggagtttcactcttgttgcccaggctggagtgcaatggcgtgacctcggctggctgcaaccttcac

SEQ ID NO: 133205 - DNA, 85 bp, Homo sapiens
tccttcggcagtccacccaccgccgccgcctcccagtggtcccaggctgcacccatggcagaaggaggagggcagaatcatcacg

SEQ ID NO: 133206 - DNA, 100 bp, Homo sapiens
atggcgactccctcaccgagtacgaagcgggcgtttgcgaaggttgaatgcctttgagaacttgatgcataaaatttgcatgactcctcactcctttctg

SEQ ID NO: 133207 - DNA, 98 bp, Homo sapiens
tgtctgtccccagagcctcagtttgtgcaggacaccgacatggaacagggactcactggggacagcgtggaagatgaactggagatggccaccgtcag

SEQ ID NO: 133208 - DNA, 98 bp, Homo sapiens
gaggacatgaaccgccggaggtgttgatgggaaccattttcagcatcctgctggtgactgtcatccttatggcattttgtgtctacaagcccattcgg

SEQ ID NO: 133209 - DNA, 100 bp, Homo sapiens
actgctggagatggtggagtccgtcaagatgagcatcaggattttatggatgagcaaaaacgactaaagaagcttcgtggaaaggagaaaccaaagaaag

SEQ ID NO: 133210 - DNA, 83 bp, Homo sapiens
ccccgatctacggggctgacatcagcggctctttgtatgatgacgccgccatggcatcagatgaaggcaaactttttgttgga

SEQ ID NO: 133211 - DNA, 100 bp, Homo sapiens
aaagaacctggcctggcaaatcaaggaaggctgctggtgatcatgctaagggtcttcatataccacgattaacagagctggtggagctgtctaaggctca

SEQ ID NO: 133212 - DNA, 100 bp, Homo sapiens
ttcatgtaaacagcatgacgtgaggccgtggatgcaggcattaaggttgcagagcctgaggcctgtgatcagatgtacgagagcttagcgcgactccatt

SEQ ID NO: 133213 - DNA, 88 bp, Homo sapiens
taactaacacggtttttattgacagagctctgatagttgttccttgtgcagaagggatgatgtgcattgtgaaaccagatggacctcc

SEQ ID NO: 133214 - DNA, 82 bp, Homo sapiens
ggtccttccgaggaagctaaggccgcgttggggtgagaccctcacttcatccgggtaacaagatgctcaactatagtgctcc

SEQ ID NO: 133215 - DNA, 75 bp, Homo sapiens
gacgacggcaccaacaccttcttctgtctagggacaggaagatggttggcgacgtgaccggggcccaggcctatg

SEQ ID NO: 133216 - DNA, 83 bp, Homo sapiens
ctactacgtggtgcttggaaaggaagatgttaccgagtacttcagtgaattccttagtgcaggggaacggagtcttgaattcc

SEQ ID NO: 133217 - DNA, 75 bp, Homo sapiens
cggatcgccgccgccgccgccgcacggaactgtggctgcaccatctgtcttcatcttcccgccatctgatgagca

SEQ ID NO: 133218 - DNA, 50 bp, Homo sapiens
ttgccggaggagcccctcaggccaaagtcattgggtggtacagattccgg

SEQ ID NO: 133219 - DNA, 75 bp, Homo sapiens
ctggagatgaaatgctgtcccaaccttactggaaataggaaggttgttgattactcacagtttcaggaatctgat

SEQ ID NO: 133220 - DNA, 73 bp, Homo sapiens
aagtggataaactttttagcgcttggatgcagcatgcttggtgggaccggccttattgtcgcctgctaccacg

SEQ ID NO: 133221 - DNA, 80 bp, Homo sapiens
gatggcgcgaaagaggccagggatgccggcgacggttgtgtcgcagggccagctctcaatgttgcaagaaaaaatagacc

SEQ ID NO: 133222 - DNA, 100 bp, Homo sapiens
gagccagtttggctgaaaataaaagtatgtccgtggttcagaccctgtattaaagcttttggacgacaatgggaacattgctgaagaactgagcattctc

SEQ ID NO: 133223 - DNA, 50 bp, Homo sapiens
ggaatttctcctggggctcagagtcaagcaggcagctggtgtggaagaat

SEQ ID NO: 133224 - DNA, 100 bp, Homo sapiens
acatcatccagctgcctcaaatcgtcgtagtgggaacgcagccaaagaaactctccctgatttggtttccatcattcctgacacagtcccgagtactgac

SEQ ID NO: 133225 - DNA, 146 bp, Homo sapiens
ctgggctgaggatggcgagctggactgaggatggtgggcaggaggccggctgcgggggaggaggaactcccaggcagccgtgtctgtgtttttgtctcgcagaattagagcccattgggaacgatgccaccaccgtcagacattgt

SEQ ID NO: 133226 - DNA, 73 bp, Homo sapiens
attccagttaccgtccatctcaaaagattctttcttgtggagaagttattcatgtgaagatccttggaatttt

SEQ ID NO: 133227 - DNA, 111 bp, Homo sapiens
gagaccgctccttcatctccgagcagatgtatgaagaactttgtgttaaagcatcatgtattcttggtccgaaactgggagaagattcgtcaaaaacaggaggaagtaaag

SEQ ID NO: 133228 - DNA, 129 bp, Homo sapiens
ccaggactcagatccccgctctcctactcttggtattgcacggacacctatgaagaccagcagtggaggaaattctgaaacagccacacctacaaatgtagacttgcctcaggtcatccccaagtctga

SEQ ID NO: 133229 - DNA, 100 bp, Homo sapiens
tccaggagtcagtttattactggaaagcccagtttaccctcaatttaccctcttctacatcttccacatctgcaccaatctggggagatgaagaaacttc

SEQ ID NO: 133230 - DNA, 75 bp, Homo sapiens
cccggttccccggcccacagtgggggtgtgcaaacccgagagaactgggagaaggccatcagcatttgggagtca

SEQ ID NO: 133231 - DNA, 75 bp, Homo sapiens
gccaggacttgttaaaaagatcaatagattgcctacccccattgcaggactggttggagttgctgtgggtgagct

SEQ ID NO: 133232 - DNA, 74 bp, Homo sapiens
gctcggccgatgaagtgcagaggtttttttctgattcccaggactccggctctctctgcttctgtttccggtgg

SEQ ID NO: 133233 - DNA, 100 bp, Homo sapiens
cgcagaacgccatcaaccagctatctctgcactcgtcctaagagcccaggcctccgagatcttacttgaagagttacagcaggggctttcccaggcaaag

SEQ ID NO: 133234 - DNA, 100 bp, Homo sapiens
gtcctgtgttgtagctggagtttcagacgtctgagacatcaacaagcgcctatcactaccagctgacatccggctgcctgagggctacctggagaagctg

SEQ ID NO: 133235 - DNA, 90 bp, Homo sapiens
caccaaaagtggcaagctgaagaagctaaacatgaattcagctccaactttcatcaactttcctgcaaaagggaaacccaaacggggtga

SEQ ID NO: 133236 - DNA, 90 bp, Homo sapiens
ctgtgacccttatgcaacagtttctctagtgggcccttctagcctcggcctcccgaggtgccgggattgcagatggagtctcgttcactc

SEQ ID NO: 133237 - DNA, 50 bp, Homo sapiens
aaggctacgatcctacagtggagaatagagttcatgatcaagtgttgccc

SEQ ID NO: 133238 - DNA, 100 bp, Homo sapiens
caaacgacttctcccttctttgaactggaccccgcgagcaccagagtcggcgtaactatcgcctgacagggataagtctacttttcttccacgtaacaac

SEQ ID NO: 133239 - DNA, 98 bp, Homo sapiens
taacagaaaggaactggctaccgttcggactatttgtagtcatgtacagaacatgatcaagggtgttacactggtgacagtatcagtgagtgccatac

SEQ ID NO: 133240 - DNA, 99 bp, Homo sapiens
acttagaaccgcagcagggacgtcggtttgctatcgggactcggcgaggacggacaagaaatggattctcagtcatgaagatgtcatattgggagaatt

SEQ ID NO: 133241 - DNA, 87 bp, Homo sapiens
agctttgaagctggataggagtctccagtcttcctcttgatccatatgtttcagtactatactggcaattgctggagaagattttgc

SEQ ID NO: 133242 - DNA, 100 bp, Homo sapiens
gcggcacgatggtcatggcgtatttcgtcgagaatttttggaggcggggtttcaccatgttgcccagactggtcttgaactcctgagcttaagcaatcca

SEQ ID NO: 133243 - DNA, 98 bp, Homo sapiens
agatatctgggaaggaggaagagacatcagtcaccatcttagtgaccatggaggaagaagatgagtctcgagggaagacagaggagtcgggggaggat

SEQ ID NO: 133244 - DNA, 74 bp, Homo sapiens
gagcgctccttcctgcgtgagttccacaaggaatgggtaccacagaccatgtcatcgtcctggcgtccacgaac

SEQ ID NO: 133245 - DNA, 75 bp, Homo sapiens
cgtcaagccacaggttttccagtcgcactgcgcacccttacccttctgaagaacagaaaaagcagttggcacaag

SEQ ID NO: 133246 - DNA, 80 bp, Homo sapiens
tggaataaatggcgtccaaagtcacagatgctatagtctggtatcaaaagaagggcaaagcccaacaccttcccccactg

SEQ ID NO: 133247 - DNA, 100 bp, Homo sapiens
gaactgcagtgggagaggagaagagatgctggcgtgaagggtggcttacagaagagacgaaatgtggtctgagggacgatatgaatatgaaagaattccg

SEQ ID NO: 133248 - DNA, 100 bp, Homo sapiens
gcagaattatacctagaagtctactaatggacagttagtcacccacctacatgttgagcataagcagtactataatggatgtagacagcacaatttccag

SEQ ID NO: 133249 - DNA, 111 bp, Homo sapiens
tcaggtcttgtactccaccagtggtgagaatgcatctggaaaatactgtgggaaaacccaaaccatctttctgaagagtaagtgtttcccttgtccagctgaaggatgccc

SEQ ID NO: 133250 - DNA, 100 bp, Homo sapiens
tggaacttctacccgacacttacatgccatggccttctacgttgtgaaaatgctttcaccaacaatcaccagtggtttacacaacattgcaaggagcatt

SEQ ID NO: 133251 - DNA, 100 bp, Homo sapiens
tgtgatgatgaccgtcaccaactggttcaagaccagttgctcttctgtgatgactgcgatcgtggctaccacatgtactgtctcaccccgtccatgtctg

SEQ ID NO: 133252 - DNA, 100 bp, Homo sapiens
catgccttggcgtttcagctcctcgttgtctagtccctctgtcgtgaaatcaagcaacgacgtcgaggagttgcctccattctgcgactatgccagcatc

SEQ ID NO: 133253 - DNA, 49 bp, Homo sapiens
ttatctccatcccattgacagaaacctgagaaatgccagtggcctgaca

SEQ ID NO: 133254 - DNA, 109 bp, Homo sapiens
ccgacagttgtgttgtgccaatggtggagaagaaaacttcggagctgctgcccaaagggagcaaggaggaacagcgggattacgtcttctacctggccgtggggaacta

SEQ ID NO: 133255 - DNA, 50 bp, Homo sapiens
gcatgcgattcttattgaccttggtgaaatgacaatggatgctctgttgg

SEQ ID NO: 133256 - DNA, 74 bp, Homo sapiens
gtggaccagctggtgaaggcagacagcgagtggcgacgatatattaataaggcagcggaaagaagaaatatgaa

SEQ ID NO: 133257 - DNA, 82 bp, Homo sapiens
ctccctgcgactcctggaccaccgggcgctggtctgctcccagccgttccagggtctccctccactgctgtagtaacccggg

SEQ ID NO: 133258 - DNA, 96 bp, Homo sapiens
tgcagctgaagagcacggactctggagccaaagatcttgccgtggaccttattgaaaaatgcagcatggtgattcatttgatgcttccagaaacca

SEQ ID NO: 133259 - DNA, 82 bp, Homo sapiens
aattctggacacattgggattaaagatcccgactggattaagaggttactgcaaagcccctgccctttctgtgattctcctg

SEQ ID NO: 133260 - DNA, 75 bp, Homo sapiens
caactcatgttgacgggcagccagctagctggggtcctcatcagcatggtgtacctacccgaggccatgccagcc

SEQ ID NO: 133261 - DNA, 95 bp, Homo sapiens
tcatcatagctgtgctgatgagcgctcaggaatcatgggctatcaaaggattcctgagctgaaatgcagatgaccacattcaaggaagaactttc

SEQ ID NO: 133262 - DNA, 75 bp, Homo sapiens
ctgccgtgcaaatgttcctcagcagcacatagcacctatcgggcctagttccccgagagcgttcagacagtgggg

SEQ ID NO: 133263 - DNA, 75 bp, Homo sapiens
gcccgacgaaaggatgccaaataaaatgtggacacagacttgccaggcagcctggggcagagtgaagagaagccc

SEQ ID NO: 133264 - DNA, 98 bp, Homo sapiens
tggacaccatcaacgccttcttcagctccccattctctgagaacagcacttccctgcagagtcttgctttgtcgcccaggttggagtgcagtggcacg

SEQ ID NO: 133265 - DNA, 50 bp, Homo sapiens
actttcaaaccactttcagtaacagaaaaagcttgtggtgaaggggggca

SEQ ID NO: 133266 - DNA, 97 bp, Homo sapiens
atggatcccaaagacaattggtcaaaagatgcaaatgtttacagacaaggatcagcagccctctggaagtgagggagaggatgatgatgcggaggct

SEQ ID NO: 133267 - DNA, 82 bp, Homo sapiens
tttctctccctctgcccccccttccccacgcaaccccagatccatttacactttacaccttgatgacttacaagccctcaag

SEQ ID NO: 133268 - DNA, 50 bp, Homo sapiens
ttgcggcgcccaccttcgggaggatcagttacctagccccaggtgaggac

SEQ ID NO: 133269 - DNA, 100 bp, Homo sapiens
attttaccggtggaaaaattgctaaggttaagaatagacccaccagcatttcgtgggatggtcttgattcagggaagctctacaccttggtcctgacaga

SEQ ID NO: 133270 - DNA, 50 bp, Homo sapiens
agaacacacagcagttctcacaaaggaccacagaatactggccatggtgc

SEQ ID NO: 133271 - DNA, 108 bp, Homo sapiens
cgcggggcccctggagcaacgcaagttcatctcggaagcacagccgtacagatcaagccaccaatatctgagagagaaatgctggcttcaggagagctcaagtcagag

SEQ ID NO: 133272 - DNA, 100 bp, Homo sapiens
ctcattcagtgatttccaagagttgcctgcttcttcaaaaacaagtaactcccagcatggaaacagcattgctatggcaacaaaagaaaatatgacttca

SEQ ID NO: 133273 - DNA, 101 bp, Homo sapiens
ttttgtagcaagtggtgataacacactcagcatcactaaaggttgtaggtggcctagatatccacaaaaagatggtggtagatgtgtgactcttatcagag

SEQ ID NO: 133274 - DNA, 76 bp, Homo sapiens
aatgtgagccccaggctgcagaagtcagcagataagcagagagccctagaagaaaccaaagcctacaccacccaat

SEQ ID NO: 133275 - DNA, 82 bp, Homo sapiens
agcgcgtcgtggggcgagcggcaggtgctggagaatctggtaaaagcaccattgtgaagcagatgaggatcctgcatgttaa

SEQ ID NO: 133276 - DNA, 83 bp, Homo sapiens
cggcttcaaagagaaaaggcaacatcctgtcacaggccatgctctggcaaaaacgccctgagcctgtgcaattatttcgagag

SEQ ID NO: 133277 - DNA, 85 bp, Homo sapiens
ctttggggacaagcactttatatcatcgcaaaactcctggaattagacctttacgagaagcacagttttgtcttcagtttcctct

SEQ ID NO: 133278 - DNA, 98 bp, Homo sapiens
cgggtcctcgcacaccatcctggactatgagctctggaagtcctcggacaagatctgccgacagctcatctaccacctcacccctcactcgaagcagc

SEQ ID NO: 133279 - DNA, 82 bp, Homo sapiens
tggcggtggaggacgaggggctccgggtcttccagagcgtgaagatcaagatcggctccccacaggtgcaggaagccgccgc

SEQ ID NO: 133280 - DNA, 74 bp, Homo sapiens
agattcgcagtggtcgcttcttctccttgatatgatctatgtctctggaggctttgatggaagcaggcgtcaca

SEQ ID NO: 133281 - DNA, 90 bp, Homo sapiens
ctccgatccctgcgcgggctcgagagctcgccccgaacgggggtcttcctcctccgccgttgacagacggggaaatcctttacatttatg

SEQ ID NO: 133282 - DNA, 83 bp, Homo sapiens
cccattatggccaaggaggggcagctatatgccatggagttacaggagcagcccgacggccatggaggctgaagagacgatgg

SEQ ID NO: 133283 - DNA, 100 bp, Homo sapiens
accggggcggcggcagcccgtcggccgccgccaactacctgctctgtaccaactgccggaaagtgctgcggaagttccaccaggtgagaagagtgatgac

SEQ ID NO: 133284 - DNA, 50 bp, Homo sapiens
gttccgcgggatcttgcagaggagagacgtcttccatgtatgcacctttt

SEQ ID NO: 133285 - DNA, 83 bp, Homo sapiens
ctggaagctactactacgtggtgcttggaaaggttaacgtccctaaaacccgccggactttctgtaagaagtgtggcaagcac

SEQ ID NO: 133286 - DNA, 83 bp, Homo sapiens
tccacctggagctgaggaaccggaccccggcagctgtgtgtgccctcttcctgattctggagaaaaatgccggtccggaagca

SEQ ID NO: 133287 - DNA, 100 bp, Homo sapiens
ggtagccaacggctccatgtctctgaggagcggcgggcggcggcgcgcggacccaggcgcggatggcgaggccagcagggaagaaacccttttttcttgg

SEQ ID NO: 133288 - DNA, 75 bp, Homo sapiens
tattatggtctttgtgcacatttacatcaaggtgtgttccagagaacaagccttcagacatttgctatattgacg

SEQ ID NO: 133289 - DNA, 83 bp, Homo sapiens
gacccttggcgcctgcccctgcaacgggaggttctgcggggagtgtctccagccctgcctgcaggtgccatccccgctgtgcc

SEQ ID NO: 133290 - DNA, 82 bp, Homo sapiens
caccagccagaacatccacctgctgtatttggacctgctggattatctgaagacaatgaagatctccttcaacgacaaaagc

SEQ ID NO: 133291 - DNA, 82 bp, Homo sapiens
ctggtgcagatcatctacgacgagaaccggacctgcctagagctggaacgttacctccagagcgagccctgctatgtttcag

SEQ ID NO: 133292 - DNA, 83 bp, Homo sapiens
gatggcgaaggtctcagagctttacgatgtcacttgggaagtgggttgtatcccctgcagaaaaagctaaatatgatgaaatc

SEQ ID NO: 133293 - DNA, 82 bp, Homo sapiens
caccacgcctggcctcactcaaacagtaaacgaggttcctacaaacttgatgacttttgagtagaagcctgagaaaaaaaga

SEQ ID NO: 133294 - DNA, 50 bp, Homo sapiens
aggtgtctgtcggtccaagctagaagtgtaaacaggaacatcgataagta

SEQ ID NO: 133295 - DNA, 98 bp, Homo sapiens
cttgattacccgttaagtcccccaaagatgagatttacctgtgagatgtttcatcccaacaagaagtgttgggcatttttgcaagaatcttctctgaa

SEQ ID NO: 133296 - DNA, 75 bp, Homo sapiens
ggcaactcagaaacatcaggtccaagattcgaagcttcttgagcctgggactgtatcttgatcattgcagaatcc

SEQ ID NO: 133297 - DNA, 95 bp, Homo sapiens
ccaggcccggatccaagtggttgtcctttcagagcccagcattacatcaacatgcccgtgcagttcaaaccgaagtccgcaggcaaatttgaagc

SEQ ID NO: 133298 - DNA, 100 bp, Homo sapiens
cgccgccgaagaagcatcgttaaagtctctcttcaccctgccgtcatgtctaagtcagagataaaccgagactactccttccttgactacatcctgggag

SEQ ID NO: 133299 - DNA, 51 bp, Homo sapiens
cgacgtctcctcccgcctcaccacagtggctgagcacggtgccaggttcca

SEQ ID NO: 133300 - DNA, 74 bp, Homo sapiens
tggactgtgaggaggacattgatgactgccttgccagaaaactaggtgtctgtgttcactccaggctgaagtta

SEQ ID NO: 133301 - DNA, 50 bp, Homo sapiens
cgctactattcaggactaatctatgtccacctgggcttgcgaaggcacag

SEQ ID NO: 133302 - DNA, 89 bp, Homo sapiens
tcgcctccaggccaagagggatccttcacccgtgtctggatgattcaaagccgccttactcctacgcgcagctgatagttcaggcgatt

SEQ ID NO: 133303 - DNA, 83 bp, Homo sapiens
gcctccatgaacaatctcacccaattactctgctcagtgtggggtgatcagccccagatttgacgtgcaactcaaagacctgg

SEQ ID NO: 133304 - DNA, 100 bp, Homo sapiens
gcccagagagagacgtggagagggacgtcttcctgtatagagcgtacctggcgcaggttaatatggctccaaaagggccccctcctttcccaggagtccc

SEQ ID NO: 133305 - DNA, 100 bp, Homo sapiens
aattccagcgctgcttcatcttccagtgctgataattatggcattagccatcctggaacagcatatgccatatatgagctggctgtggcttcatttccca

SEQ ID NO: 133306 - DNA, 75 bp, Homo sapiens
aacactatcctctgagatcccagatcatgagcatgcttttcacttccactgcatctctcgctggctcaaaacacg

SEQ ID NO: 133307 - DNA, 98 bp, Homo sapiens
agtttgcgactcgcggaccggcgtccccggcgcgaagaggctggactcggattcgttgcctgaggtacggttcctggagcagcagaacaagatgctgg

SEQ ID NO: 133308 - DNA, 83 bp, Homo sapiens
ctcatgaagactgtgtaaataatatcagctggatacacagtatcgtcgctcatgtgcagttgagtatcctcatcaggcccgac

SEQ ID NO: 133309 - DNA, 100 bp, Homo sapiens
gtcttgtctgcaatcatcaacaaaacaattattccccgacttacaggcgaggattaaatccaccacacagggtgaaatctatctccatgacaacattcac

SEQ ID NO: 133310 - DNA, 100 bp, Homo sapiens
tttacatcagcttaaagccttgaagacaaggcggccccgctcccgggttcctctgaggattggaattctagaggaagaagaggtggataagatgatggaa

SEQ ID NO: 133311 - DNA, 137 bp, Homo sapiens
actagggctcgggcgccggcgagatgcctttgttcaccgccaaccccttcgagcaagacgtgggtgcaatggatgagcttcatagtctggatccaagaaggcaagagttattggaagctagatttactggagttgca

SEQ ID NO: 133312 - DNA, 85 bp, Homo sapiens
ggggagcaggaaccagagcccatcttaatcccggaaattggccttgcctctctgggtgcacctgatgaatacattgaaaagctcg

SEQ ID NO: 133313 - DNA, 100 bp, Homo sapiens
aaaatattattccttatgttgctgatggagctaaggctgcaattctgggttttacatcaccggtctgggcagatcttcagcctgttaaacaagaaaacga

SEQ ID NO: 133314 - DNA, 76 bp, Homo sapiens
gagagtagatctggagaaaccaacagctgtgttgaagaaataatccggcttcttaatgaagaggataactcagaat

SEQ ID NO: 133315 - DNA, 75 bp, Homo sapiens
agaagaagtgttatatgtcctaaagtaaggtttcaggcaacatcagatgctgacctgaaagaacatatggttgga

SEQ ID NO: 133316 - DNA, 60 bp, Homo sapiens
agcatccccgcggcggcgtcatagatctcggtgctcagcggcggcaaggccaagtgctcg

SEQ ID NO: 133317 - DNA, 100 bp, Homo sapiens
tgccggtggaggaatttgtggctggctggatctctgggccccaggccagcccaagatcgaccacctgcggaggctgcaccttggcgcttgccccacggag

SEQ ID NO: 133318 - DNA, 83 bp, Homo sapiens
caggggtgcccaagctgcaatcgtggtttacgacattactaatcaggttctgaagaaggccttccaggccacgctcaggtggc

SEQ ID NO: 133319 - DNA, 100 bp, Homo sapiens
ctcagccctccgttaagatcctggttccatgccgcagtaggacagcaggcccaagtctgcacatcccaggtgaaggtgctaaaggagaagatagaagctg

SEQ ID NO: 133320 - DNA, 100 bp, Homo sapiens
agcaaaccccagctcacttgttctggaaaggagagaggtggaggtgaaaggtgtagcagtcactcggcctacacccacagcatcgaccttgtgaacccag

SEQ ID NO: 133321 - DNA, 90 bp, Homo sapiens
gaggccgggacttggccgagcggatcctaataaggggaaaatggttgaaatcacaaagattagacacctttttagataggtgttcttcag

SEQ ID NO: 133322 - DNA, 101 bp, Homo sapiens
gctgcagcagtgaggccaagctccagtgtcccacttgcatcaagctgggcatccagggctcgtacttctgctcgcagagcatctgctgcacccaagcctga

SEQ ID NO: 133323 - DNA, 90 bp, Homo sapiens
cccggtgcaagaggcgcaaacaagccaatcccaggaggaaaaacgcaaagcgagctgaattccttcttgtggaccattaagcgagaccca

SEQ ID NO: 133324 - DNA, 80 bp, Homo sapiens
cgggcctccaaccgcggttacaggtttacccaaggtccagcctagcccctaggcaccatgtcggacagtgatctaggtga

SEQ ID NO: 133325 - DNA, 75 bp, Homo sapiens
ggagcattctgtgaagaaggcagtacattttgggttaccgtattcacaggcctccactgggctctcagtaggtgg

SEQ ID NO: 133326 - DNA, 100 bp, Homo sapiens
ggaatggccgcgggcggctcgacgcagcagaggcgacgcgagatggcggcagcttcagcggcggcgatctcaggtgaactccagtttgcttttgtgtgct

SEQ ID NO: 133327 - DNA, 82 bp, Homo sapiens
ggcagaagccgagttcaacatcctcctggccaccgactcctacaaggtggatcagtacaagggaaagcgggatttggagtca

SEQ ID NO: 133328 - DNA, 75 bp, Homo sapiens
cacctaccccagcggccagatcggcttcatgctgtgcagcaagaacccgaacctgcagatgacagcagcttctcg

SEQ ID NO: 133329 - DNA, 100 bp, Homo sapiens
caaagatttgcatcagccatctcttagtccagcaagtcctcatagccaggctgggctcaaaatgcagagaactcaaagatattcatttcggccagtgtta

SEQ ID NO: 133330 - DNA, 75 bp, Homo sapiens
atcaacagaccaccccacaggctcagcaaggacagcagcaggattggccatttgatgatggagctccacccccta

SEQ ID NO: 133331 - DNA, 85 bp, Homo sapiens
ctctgtccgcggagaggagtgggacaactcctaaagccatcactggtgcaagctatatttaacggagatcctgatgaagttcgag

SEQ ID NO: 133332 - DNA, 80 bp, Homo sapiens
ggcttcactttatatcatgatgacccttaccaactggtacagttgggacagaaataacccagagccctggaacaaactgg

SEQ ID NO: 133333 - DNA, 75 bp, Homo sapiens
cttcacctgctggataagctactagcattcctgtattctgggttattcagcttctcaaggctggaaaagcgaagg

SEQ ID NO: 133334 - DNA, 88 bp, Homo sapiens
atgacaaaaagcttcagagttctctaaaaaaactggctgtgaataatatagctggtattgaagaggaaggtgggagtcaatcattttg

SEQ ID NO: 133335 - DNA, 100 bp, Homo sapiens
acacaacccaaaaacgatacgccatctgttctgccctggctgcctcagccctaccagcactggtcatgtctaaaggtggaaagcgtaaagatagtgtgtg

SEQ ID NO: 133336 - DNA, 100 bp, Homo sapiens
acgacagccgacgggtctttaaacaatttctcaggttcagacttcaaatcatcccaacaccagagaacactaaatgacagtggacaggaagacagtgtac

SEQ ID NO: 133337 - DNA, 100 bp, Homo sapiens
ctggggacgcggggcgggccccccagattttcgacaatgaagccaaagacgtggagagagaagtttgctttattgatattgcctgcgatgaaattccaga

SEQ ID NO: 133338 - DNA, 49 bp, Homo sapiens
ccgagtccagcccaggaaaatggagagacttcagattttcctgtccttg

SEQ ID NO: 133339 - DNA, 75 bp, Homo sapiens
agccggggcgaagctggatcccctagaatatgtttcgacagcaacaaaagattcttcaacaatctagaattgttc

SEQ ID NO: 133340 - DNA, 74 bp, Homo sapiens
aaaagagacctctacttagctcagcaattcttaccttatttgaaagttgagagcagcatgttttgcccactgaa

SEQ ID NO: 133341 - DNA, 100 bp, Homo sapiens
gaaggcgggagacgagaagcctgaaaagtcgcagcgagctggagccgccggaggaacatggaggagacatatttccacctatttctctccataagtataa

SEQ ID NO: 133342 - DNA, 100 bp, Homo sapiens
ctcaccgtctacctgggaaagcgggactttgtggaccacatcgacctcgtggaccctgtggtcccccatttatgcttcctgttgggtgtacctctctgaa

SEQ ID NO: 133343 - DNA, 101 bp, Homo sapiens
gccaccgatccagaaccctgctcctcaccccacagacatgtcatgctgcccaaggacatagccaagctggtccctaaaacccatctgatgtctgaatctga

SEQ ID NO: 133344 - DNA, 82 bp, Homo sapiens
cgagcatggcatggccccgcaggtcttcacccaggccctggagtgcatgcgcaggtagcctttccagtaaatatatgactca

SEQ ID NO: 133345 - DNA, 74 bp, Homo sapiens
cccagcggccagatcggcttcatgctgtgcagcaagaacccggaatggaagttggatacactttgtgacttgta

SEQ ID NO: 133346 - DNA, 95 bp, Homo sapiens
atatctgccgaacatctgactagccacaagtatgttacccagatgtagaattttcatcactaaacagatgagaacaagttgagcagtgccaacgg

SEQ ID NO: 133347 - DNA, 75 bp, Homo sapiens
ggacaaagatgctgggaaaagggatgatttcattggcaggtatcttcaaagaacagtaaaacatccaactttact

SEQ ID NO: 133348 - DNA, 90 bp, Homo sapiens
ccggagggaggatgttaaagccccgcgcttgggcaatggtagatggtggttcaaatgtgaaagcccgctcttcctacaatgagaagaccc

SEQ ID NO: 133349 - DNA, 100 bp, Homo sapiens
acatctgaaagccgggaaatgttgctagacctgatgcacaccctgcacacgcgggcagcctctatctacagctcatgggcggaggagcaacgccacctgg

SEQ ID NO: 133350 - DNA, 100 bp, Homo sapiens
cccagccccagctccgggagctggagtaccaggtcctcggcttccgggaccggctgaaggaagcaaggcagcgaagacaacctccagggcaccgacccgc

SEQ ID NO: 133351 - DNA, 50 bp, Homo sapiens
tgtggatgaatttgcttttctggaaggccagcctttattattgccatata

SEQ ID NO: 133352 - DNA, 92 bp, Homo sapiens
tgagcggcgagtttccgatttaaagctgagctgcgaggaaaatggcggcgggaggagctgacatggacccaaatcctcgggccgccctggag

SEQ ID NO: 133353 - DNA, 80 bp, Homo sapiens
ctggacacagcaatatctctgggctttcacagagtaatcagtgtgagctgagctctttccctgaatgaatccaagtaacc

SEQ ID NO: 133354 - DNA, 100 bp, Homo sapiens
cgacaacacggcttttatggacgagttcttttctgaggttagaaaatggatttctgactggaatctcaccactgaaaaaaagcacacccttttaagacta

SEQ ID NO: 133355 - DNA, 151 bp, Homo sapiens
aaacagcactgccaaatagcagaagaataccatgaggtcaaaaaggaaatcaccctgcttgagcaaaggaagttgatgataattagaagcatgctttccactgaacttcccgacaacatttgttatgcagaatgtctctgagtgagaactc

SEQ ID NO: 133356 - DNA, 74 bp, Homo sapiens
gacatcactgtgcggcacatcgcagacctgtcaccaggagacaagacctcctgccccccgaggtctgcagtctc

SEQ ID NO: 133357 - DNA, 75 bp, Homo sapiens
aactgcagaggatgccaaactagagaagattttgagcaaacagagttttaaacccaatgaaggagttatcataat

SEQ ID NO: 133358 - DNA, 99 bp, Homo sapiens
aagcgaaaacatgaccgctgagcccatgaggcatggagggatttttgaaatcagatgagaggcagagattggccaaagaaagacgagaagaaagagaaa

SEQ ID NO: 133359 - DNA, 102 bp, Homo sapiens
cgaggctgccagcagagcagacaccatcctgtgtctagggtccagcctgaagaccccacgcgggaccagtgcttcggggaccgcttcagccgcctgctgctg

SEQ ID NO: 133360 - DNA, 80 bp, Homo sapiens
ctgttcttcttttgcatcctacgtaaccagaccaagctgtggggttatcaatactctggctgaccatcatcatcgtggga

SEQ ID NO: 133361 - DNA, 95 bp, Homo sapiens
cgaagagctgcagctcctcctgtgcgggacctccacaaaaagtactcgtacatccgcaagaccaggcctgacggcaactgtttctatcgggcttt

SEQ ID NO: 133362 - DNA, 100 bp, Homo sapiens
cgctccccgaactcccgcgcaccgcggaggaggcggccctggcgcggggaagcagtgggaaaatcgcaaggaagccgggatgtcttcatcacattttgcc

SEQ ID NO: 133363 - DNA, 75 bp, Homo sapiens
ctggatgggggaccacaagatcctcatcgacaggggtgagcccctccagactccgaataggagatcaagagtttg

SEQ ID NO: 133364 - DNA, 90 bp, Homo sapiens
agatggacagggatgataattgggcctccaagagttcatcctaagttccactataaacaggctcatgactcgggcacagacacttcttgc

SEQ ID NO: 133365 - DNA, 96 bp, Homo sapiens
cagaacccagacatgacgcatgtcatccacaagctctcctttggggacacgctacaggttcagaaaagaagcatgagaaattatcatcttccgttc

SEQ ID NO: 133366 - DNA, 100 bp, Homo sapiens
gacagaacgattgatgaagtagttgagacttatcaaactggtttcaaagcacagagctcaagtaatttacaccagaaataccaagggtggagatgctcca

SEQ ID NO: 133367 - DNA, 82 bp, Homo sapiens
ttaaaagacagtcctcgtcagcactgactttcagctatggaatcggtggaaaggagactatggaaccaggatccagcagtac

SEQ ID NO: 133368 - DNA, 75 bp, Homo sapiens
cacagaaaggagtcactgccttctaacgaaagggcagtacagactttggcagtatttcatggttctatcaaagca

SEQ ID NO: 133369 - DNA, 73 bp, Homo sapiens
gaaagtgctggaatcatcttcccccagtgggaatttcagattggaccttgtgaaggaatcagcatgggagatc

SEQ ID NO: 133370 - DNA, 96 bp, Homo sapiens
gtcttcccaggctgtcatataactcctgagaatagtggttcttaactcttaagactttgaccccgacgcaggcttcagtgattgccgcggatcaga

SEQ ID NO: 133371 - DNA, 75 bp, Homo sapiens
gagcgtgaccgagagcgcgaatatcgtcatcgttagaaggtgaattcacataaaagggcatcagaaaaatacaaa

SEQ ID NO: 133372 - DNA, 100 bp, Homo sapiens
ctccacactgtaaagattgacacaaaaatcacaacgcaaatcaccgccggagccaggaacttagacctcaagagtactttagattgattgccgagcgggg

SEQ ID NO: 133373 - DNA, 88 bp, Homo sapiens
ggacggcgcgggaactctacgccaacgtggtgctggggaactctagccaagaaccacggcctacactctccaacacaatccagaggcc

SEQ ID NO: 133374 - DNA, 100 bp, Homo sapiens
caagccccagtatgggaatttaaatatggagacctcctgggacacttgactggtgaattttcagctcgtttccttttgaagctgcccgtagatttcagca

SEQ ID NO: 133375 - DNA, 100 bp, Homo sapiens
gggcggagctgtgcgagagcctcctcacttggacctgcaggctgggacaatgaaaagaaaatagctattttacatgaaaattttacaaccgtgaagccgg

SEQ ID NO: 133376 - DNA, 50 bp, Homo sapiens
cctttgctttaaaacagtattacttgcgatccaagtattttagaacatgc

SEQ ID NO: 133377 - DNA, 74 bp, Homo sapiens
cctccgggcggcgctgcagagccaggcagaagcgctgcggagggcctgcttccgcgaggccaacatcccaaccc

SEQ ID NO: 133378 - DNA, 98 bp, Homo sapiens
tggttctctcggggttcttggccagcgaagagatctacattaaccagctggaagccctgttgctgtgcaagtctgtactgcggcaggactgagtctgg

SEQ ID NO: 133379 - DNA, 100 bp, Homo sapiens
gaccgcgaggcgagacctcttccgagtgtttaagacggatatggagctggaggttctgcgctataccaataaaatctccagcgaggcccaccgtgaggta

SEQ ID NO: 133380 - DNA, 50 bp, Homo sapiens
gtccattcgaagtgttggcagtcacaggtgtctaaaaagcacggcaagct

SEQ ID NO: 133381 - DNA, 75 bp, Homo sapiens
ggtggcctgggagtagatattgtcctagatgctggaggttagaaaatggatttctgactggaatctcaccactga

SEQ ID NO: 133382 - DNA, 101 bp, Homo sapiens
gcgaggagcatctgcggagatatgctcccgaccctgtattagtgcggggtgccggccacatcactgtaggacgattatttatcatttctactaaagcagga

SEQ ID NO: 133383 - DNA, 82 bp, Homo sapiens
cgctctcagctctcggcgcacggcccaggaacctggccactgctccttggtccttggcattatgacgggattcccttgtcac

SEQ ID NO: 133384 - DNA, 100 bp, Homo sapiens
gctgctgggcacccacggagcctccggggctggcattgaatgccccagaggagcccgaaacctcccaggcttggtgcaggaaggagagcccttcagcgag

SEQ ID NO: 133385 - DNA, 97 bp, Homo sapiens
tggagctttgtctttgaggactttgtctctgatgagctgagaaacaaagccacccagccaatgaagatggttgccaccctggggaccacaacatgct

SEQ ID NO: 133386 - DNA, 100 bp, Homo sapiens
cgcctgcccagcaaatgcgaaggagctggtgactgccctcatgtgtgatttgcggcggccagcggcaggtgggatgatggacttggcctacgtctgtgag

SEQ ID NO: 133387 - DNA, 100 bp, Homo sapiens
ttttcctgataactggaaagttcctcaagatggagactttgactttgacaaaagatccttcatcaccgaagtgacgttttagaaacagtggtcctgatca

SEQ ID NO: 133388 - DNA, 82 bp, Homo sapiens
accaggaggaggttttcaggaccaaaattgtggaaaagtcactctgaaaccaaggtgtatgttggtaacctgggaactggcg

SEQ ID NO: 133389 - DNA, 75 bp, Homo sapiens
gatgtccccaaggactaggccacgcaggaatcactagatttgatctacttggcgactttggaaggtttaattggc

SEQ ID NO: 133390 - DNA, 95 bp, Homo sapiens
cggagatgcagcggctgaccaagtaccccctgctcctgcagagcatcgggcagaacacaggatctgtgccagttcagaagcaggcgagcctcttc

SEQ ID NO: 133391 - DNA, 75 bp, Homo sapiens
ggactgcctggccgacgtggacaccaagatgggaataactgggaacacaagtccatttggacagccctttagtca

SEQ ID NO: 133392 - DNA, 74 bp, Homo sapiens
cctcgaagtcttcagcgctcaagccagcagaaagctattctggaagaccttctgaccgatatccccgtgcactt

SEQ ID NO: 133393 - DNA, 100 bp, Homo sapiens
ttcaagtcctgttctacctactgccaattggaaaggttgtacctacaacagatcatatagatacagaaaaattgaaagccagagaacagattaagttttt

SEQ ID NO: 133394 - DNA, 50 bp, Homo sapiens
ccgctgaagaggaatcaattttgacaacaagggaggtgtcacagttttcc

SEQ ID NO: 133395 - DNA, 75 bp, Homo sapiens
gcggaggcttgtcattctgacccggggattcctcacagcgtctggcagagccagtccatgacagacatgcttctc

SEQ ID NO: 133396 - DNA, 88 bp, Homo sapiens
agggggccgcatgggcacctggagcaccaggtgatcctcaggtggccagcaggtagcatctaaaggaactggtttaaatcctaatgcc

SEQ ID NO: 133397 - DNA, 100 bp, Homo sapiens
tgagaagtctgtcctgaaggaagtcagccacccgttcctcatcaggctgtcctcgatgggcttcctggaatattggtgtgtttatttgcatcagatgtgc

SEQ ID NO: 133398 - DNA, 100 bp, Homo sapiens
ccggccgcagtgccacttcgacatcgagatcaaccgggagccgggtccttccaaccctcctgctaccatgaagattgcagtgattggacagagcctgttt

SEQ ID NO: 133399 - DNA, 74 bp, Homo sapiens
gtgaagatgatggaacagtaattgttgagacagcagatggagagacttggagaaagtatagcagcaaacaatgc

SEQ ID NO: 133400 - DNA, 50 bp, Homo sapiens
cgacattttcgagcgcatcgcaggatgacagtgatgggattccgtggtca

SEQ ID NO: 133401 - DNA, 98 bp, Homo sapiens
ggcaggtgagaggcggatctacagacataggtgctggagaatctggtaaaagcaccattgtgaagcagatgaggatcctgcatgttaatgggtttaat

SEQ ID NO: 133402 - DNA, 98 bp, Homo sapiens
tccactccacctggacctgccccatggaggtgctgcgggatcacctcctcggcgtgagcgacagcggcaaatgggatgccatcactgaaatggatgaa

SEQ ID NO: 133403 - DNA, 100 bp, Homo sapiens
cggacggggagctgaacgtggacagcctcatcacccggctgctggaggcttggtgatccagctatttttcctgccgtaattgtggaacatgttcctggtg

SEQ ID NO: 133404 - DNA, 98 bp, Homo sapiens
tgagcaggagcccgctgctcttccccactcagtttctggcccccaaagacaaaccaagtggagacacagcagctgtatttgaagaaggtggtgatgtg

SEQ ID NO: 133405 - DNA, 71 bp, Homo sapiens
gcggaatccaccggcgcagtttcatctagcgactggatttctctctgatcaaacggacagttcaggactca

SEQ ID NO: 133406 - DNA, 75 bp, Homo sapiens
ggaaggcgcgagtgaggaaaggaggtactgtaggccatcgaagacggcaatttggaggaaatggaagaggaagta

SEQ ID NO: 133407 - DNA, 75 bp, Homo sapiens
ggattccatgtagagacccctggagacgaaggggaggaccaggctggcgatgaagatgaagatgatgaatgggat

SEQ ID NO: 133408 - DNA, 74 bp, Homo sapiens
acccgacgcatgagtggcaggcccttcagccaggagtggagtcaacatatcaatggagcaagtcacagtcgtcg

SEQ ID NO: 133409 - DNA, 98 bp, Homo sapiens
ggcggcctcgccggggacccggccatggcgctggacttcttggctggatgcgcggggggtgctggagaatctggtaaaagcaccattgtgaagcagat

SEQ ID NO: 133410 - DNA, 101 bp, Homo sapiens
ctcgagggtgacgctcgctccgctcgtcccgctcgtcatggcctacccgggatacggaggaggggtacgctatttgaagaacaggtttccatgctcttaga

SEQ ID NO: 133411 - DNA, 74 bp, Homo sapiens
aaatgcacaacagagggacaacaaaagcctcctacaagagtcctaccaaaaaggaagaatacaagcgattgagt

SEQ ID NO: 133412 - DNA, 106 bp, Homo sapiens
tagtctccaggcccagtacatggatgcttgttggatgaattaatgaaccttgacccacaccaagggaggagtctgctactagtcttatcagctcttaaaaacagaa

SEQ ID NO: 133413 - DNA, 74 bp, Homo sapiens
cgagatcgactgttacaacagcctggcaggtgtttgtaaaatgtatgaagaacatctgaaaagaatgaatccca

SEQ ID NO: 133414 - DNA, 82 bp, Homo sapiens
gggcgattccatctctgaagcaacaaggggaatggggtcaaaatgagcagcacttttccagccattaactccaggctctcga

SEQ ID NO: 133415 - DNA, 80 bp, Homo sapiens
cgtgctctcagtcttcctcctgcagcggctctaatggtaccaagtgacaggttggctttactgtgactcggggacgccag

SEQ ID NO: 133416 - DNA, 83 bp, Homo sapiens
ggctccaggcatccggtcctggtccctgctggttggcaccgtccacattttccaaattgaagatggagatcaagaagagccgg

SEQ ID NO: 133417 - DNA, 75 bp, Homo sapiens
aatctgtgcagcagagacggtcaccaagccccagggatgttttgctctgagcaaatgcaggaccgtggcgggccc

SEQ ID NO: 133418 - DNA, 74 bp, Homo sapiens
gcatcagtcttgcagctgctgaggatcagtgaatgcttgtgaaaagacctcatttatgtttctgcggcaagagt

SEQ ID NO: 133419 - DNA, 126 bp, Homo sapiens
ctgggagatgggcctactcgcccgccaccctgcgctgccgccgctctgaggagttaaagccttgcccctcttgctcgccttgaaaatggaaaagatgctcgcaggctgctttctgctgatcctcgg

SEQ ID NO: 133420 - DNA, 75 bp, Homo sapiens
agccagttccggcccgaggacaccgactaccagcagatggtcatcatgggccagtgctactacaacgagaccatc

SEQ ID NO: 133421 - DNA, 100 bp, Homo sapiens
ccgggatctcaggtcctcgggggcggcggccacgccaaggacgggaatgtaacctggaatagtttagctattccagacacacactgctcaccagagctag

SEQ ID NO: 133422 - DNA, 76 bp, Homo sapiens
tttgaagtggtgtctacacttataaaagtaagaaccttgatgctgtccatgatatcactgtggcgtatcctcacaa

SEQ ID NO: 133423 - DNA, 75 bp, Homo sapiens
atcacctgtcatgcctggaacagggatcgtactcgttgttctccaaagaagtatggaacgagtacagtccttttt

SEQ ID NO: 133424 - DNA, 100 bp, Homo sapiens
gcggggtggtgctggacccatcggggtataaagacgtcactcaagacgcagaagtcatggatatgtgatggcgtccagtttggagctgggataaggttcc

SEQ ID NO: 133425 - DNA, 100 bp, Homo sapiens
ctgctggctgccctgctggccgcgccgggagcggcgctggccccaaggcgctgccctgcgcagggccaccagcttgggctccccacggagggcagcaagt

SEQ ID NO: 133426 - DNA, 83 bp, Homo sapiens
tcgcggtggtcaagcgggccacgcacctcgtcaccaaggccaaggcagcggaggaggaaatggcaggtcctaatcaactctgc

SEQ ID NO: 133427 - DNA, 100 bp, Homo sapiens
aggttatttctccagtttgtgactggtagcccaagattgcctgttggaggtggtggcagcagaggtagttatggaggaggtgatggtggatataatggat

SEQ ID NO: 133428 - DNA, 100 bp, Homo sapiens
ccaccaatggaagcagctggcttcactgctcaggaaatcacattctgcctgatgaagatctggcttcctttcactggagtttacttggtccagaacatcc

SEQ ID NO: 133429 - DNA, 90 bp, Homo sapiens
cggcgggcgagtgactgcggccacgcctgaaaggcgactctcctgcaatccaccttccaaagaggtgcctgctgggaagtacccattcat

SEQ ID NO: 133430 - DNA, 75 bp, Homo sapiens
ccagattcttccattttgaaaaaggctactgggaacgttatttggaaacattcctgtggaaaaccactcttctct

SEQ ID NO: 133431 - DNA, 83 bp, Homo sapiens
ggataagacagtcccacagtccagatgaaatcgtggacactttgggtgaaggagcctttggcaaagttgtagagtgcattgat

SEQ ID NO: 133432 - DNA, 78 bp, Homo sapiens
ggcgacctgaggggagagggaacgcagctgaaagcgtgaactgtgtgttccagtgcctcttaattgagggtgagaatt

SEQ ID NO: 133433 - DNA, 100 bp, Homo sapiens
tggtcttcgggctgtcgctcgtctacttcctcagcagcaccttcaagcagtgttctaagaacggaagcatctgggctggatggaatttagcatcaagcag

SEQ ID NO: 133434 - DNA, 77 bp, Homo sapiens
cctcagttggaagcagccgatccagcctgcggagcctgtggggcagtggaacatgacaaggaattcttccacccacg

SEQ ID NO: 133435 - DNA, 100 bp, Homo sapiens
ccatggtatgacactgaaatctgtaacgaatgaggacctaatttgcttcaaagatatcaaaccagcagcaactcatcattatcttgtggtgccaaagaag

SEQ ID NO: 133436 - DNA, 75 bp, Homo sapiens
cctcagcctcctgagttgctgggattacagattcaaaaacatgccacaggaaagaagtctccagcaaagagtcct

SEQ ID NO: 133437 - DNA, 75 bp, Homo sapiens
ctaagaagtatgaaaaaggaacccctttcttctacagcaaaaaaggtgagaaaccttaccactgtgactgggacg

SEQ ID NO: 133438 - DNA, 98 bp, Homo sapiens
cgcggccctgggagctggaggaaccgcggttataatcaccaacagatgagtgaaggacacaggcagaaatctgaattttataaccgcacagcatctga

SEQ ID NO: 133439 - DNA, 75 bp, Homo sapiens
agcgcgaccggaccggggccggaggcggcgcgccctgcaagaggtggtcaaggtggacagggggcggtggtgatg

SEQ ID NO: 133440 - DNA, 100 bp, Homo sapiens
ggagatcaacctgaggccgcagatgtcccagataattagcaccatggagcctcaggtgtcaaatggtccgacatccaatacaagcaatggaccctccagc

SEQ ID NO: 133441 - DNA, 100 bp, Homo sapiens
tggctccagcctgagcaagcaagaattttcttcccaggaagctcctctcgctccccggccgcccacccccagcctggggatcttatgaccatgacctggc

SEQ ID NO: 133442 - DNA, 49 bp, Homo sapiens
gatgactggactcttagtggaaagcatgtaccttccacattgagtattc

SEQ ID NO: 133443 - DNA, 82 bp, Homo sapiens
caactatactgtttgtaaaaggagaagattacaacagcagtgaattgaaaacagcctgcaggaagcatgagctgtatgtgag

SEQ ID NO: 133444 - DNA, 105 bp, Homo sapiens
aaggtgaacatttgtagcattgatttcccggatctggtaacatggcaaaagatagatcctgaaggagctagacgagtgctacgagcgcttcagtcgcgagacaga

SEQ ID NO: 133445 - DNA, 100 bp, Homo sapiens
aagatgaaaatcacagactttgagaacaggcgaagttttaaatgtatatggttaaacagccaatttagggaagaggtcagccatgtcatctgagcctccc

SEQ ID NO: 133446 - DNA, 75 bp, Homo sapiens
aaggcactgctttttcatgacggaatactcccccagttgcaagaggcgcaggaccgtggaagacttcaacaaatt

SEQ ID NO: 133447 - DNA, 100 bp, Homo sapiens
aatcaacccagaacggatagctccctcctggaaaagatttgccctacagatggtgtaaaagggatggatggcttttgctctagaagtcaacattcatctt

SEQ ID NO: 133448 - DNA, 96 bp, Homo sapiens
tttcactccctccccgcggggcgcgcagctcgcgggtctttggacaccaccggtcctgagtccgcggatggaggatgaagctgtcctggacagagg

SEQ ID NO: 133449 - DNA, 75 bp, Homo sapiens
gcaacatcaggtgactgtcccagaagtgaatcgcagttgctgatagtccaactccaccgccaccacctccaccag

SEQ ID NO: 133450 - DNA, 100 bp, Homo sapiens
cttgtagtaagttcttctacaaattctttcaggagtttacccaagaaccattggtggagatagaaggaacatgtttgacaagctgaaccgtgatgccttt

SEQ ID NO: 133451 - DNA, 50 bp, Homo sapiens
cattgaacgtcataagacttgttggttcaactactcaatttcatgctggc

SEQ ID NO: 133452 - DNA, 75 bp, Homo sapiens
gagcacagagaaagagaatgatgaagagaaaggcccggagactgcatcccgggcccaaatcctagacaaagccac

SEQ ID NO: 133453 - DNA, 78 bp, Homo sapiens
tcacccagtacgagcgtgagaaggcgctgcgcaggcaggcggaggaggcctacagattcctggaggagatgcggcggc

SEQ ID NO: 133454 - DNA, 97 bp, Homo sapiens
gaaggtggctctcactgggaacatggccaagagtggacaacacctggggacccctgccgaatctgccggtgcctgatacagcaatgatgtgacttct

SEQ ID NO: 133455 - DNA, 50 bp, Homo sapiens
ctctggaaaaacttcttgccaaccaaaaacagcctgcttggacacagctc

SEQ ID NO: 133456 - DNA, 99 bp, Homo sapiens
ccacaacagggacacctggttccagctgcagcacgtggacgctgactcggaagtgcagtaagactttgaccccgacgcaggcttcagtgattgccgcgg

SEQ ID NO: 133457 - DNA, 75 bp, Homo sapiens
gcggccgggagcccttagggaggcagagttcactgacttgaagtatactcagttaaaatcggggctggaggtgca

SEQ ID NO: 133458 - DNA, 88 bp, Homo sapiens
agaagagggggaaatgcggcggcggccccaatcgaggaaagaccacagcaagattctttcattcgtctcctcctagcctgggggacca

SEQ ID NO: 133459 - DNA, 60 bp, Homo sapiens
tcacttacacagtatttaaatggcccagattcgccttttacaagtccacctctcagagaa

SEQ ID NO: 133460 - DNA, 90 bp, Homo sapiens
atgacagagaaagagagagagcaagaactgttcaatcgcatagagaagagggaggtgttgaaaagaaggctaaatttggccgaagatgga

SEQ ID NO: 133461 - DNA, 111 bp, Homo sapiens
ccggagcctgtcgcggctgctaagcgctcggcgcctggcgctggcgctggccaaggctatgatatcatcaagttgaatcgaaaggaagggaagaagcagaattttccaaga

SEQ ID NO: 133462 - DNA, 100 bp, Homo sapiens
tggagatcaagcgcagcgatggttgacatcatggacatatgtgagtccatcctggagaggaagcggcatgacagcgaaaggtctacttgcagcatcttgg

SEQ ID NO: 133463 - DNA, 100 bp, Homo sapiens
aaattgcagcagtcacccaaacctggggagaagcggctggctgtcggcaattggattcttccagtacagcccgggcgctgccgtggtcatgctgcttcca

SEQ ID NO: 133464 - DNA, 100 bp, Homo sapiens
gctgcagggggctgcgcctgcctgctccgccccagacctgtcggcgaaaggaggctgggaggcggcagaatgcagccagaggagggcacaggctggctgc

SEQ ID NO: 133465 - DNA, 90 bp, Homo sapiens
tccagcagcagaaggccatccagccccaggctgcacagggcccggcagccgtccagcagaagggatcatagacggtatttctatgtaaac

SEQ ID NO: 133466 - DNA, 50 bp, Homo sapiens
gctgtttctcatctttatactcttccagcacccaccaaggctccggatgt

SEQ ID NO: 133467 - DNA, 101 bp, Homo sapiens
ctgaactcaagtcaccgtggagctccgccgccccgaaactttcaccgcgagcggaacatccagtcatggataaaaatgagctggttcagaaggccaaactg

SEQ ID NO: 133468 - DNA, 100 bp, Homo sapiens
ctttcaatgacctctggagacttgacctaaacagcaaagagtggatccgacctttggcttcagaggaatacccacacaccgaagttgggtgaggaagatt

SEQ ID NO: 133469 - DNA, 82 bp, Homo sapiens
cagccggctctggtgctcccagaagagggctgaagaagatgcagagcagcctgaagctggtggactgtatcatcgaggtcca

SEQ ID NO: 133470 - DNA, 75 bp, Homo sapiens
ggggacctgctccgggacaacatgctgcggggcacaggtgagaagcgccactgctttgatgtcaactataattca

SEQ ID NO: 133471 - DNA, 121 bp, Homo sapiens
gccacctcttccaagtggagtacgcgcaggaggccgtcaagaagggctcgaccgcgccaaaatgaagtttaatccctttgtgacttccgaccgaagcaagaatcgcaaaaggcatttcaat

SEQ ID NO: 133472 - DNA, 100 bp, Homo sapiens
aatggtagaatatatcacccataatcggaatgtgatcacagagcctatttacccagaagtagtccatatggtaagaatgattgatgttggctgatattgg

SEQ ID NO: 133473 - DNA, 87 bp, Homo sapiens
tccccagatagtcacagctttaacatttgaaagggtacgagtgatttacaagtatgccctggacagaatttcaaaacaagatgccca

SEQ ID NO: 133474 - DNA, 75 bp, Homo sapiens
cctctgcattgctgatcttgtacttggattcagcaaggaaccttccggtacctggcaaagaattctgcaactttg

SEQ ID NO: 133475 - DNA, 98 bp, Homo sapiens
gctgcttcccccgcgccgcctccccgcgccgctcgcgcagccatgtccgaggagaagcccaaggtgcagaggccaagaccgttttgcccaagaaggag

SEQ ID NO: 133476 - DNA, 83 bp, Homo sapiens
gtgtttgaccgagacataaactgcagaagagcagcctctgtggtacagaagttggtcctgccctttgggcgactgaactacct

SEQ ID NO: 133477 - DNA, 80 bp, Homo sapiens
aggagctcttgaggaaagccattgctgaaagcctgaatatccaggatgagaagactgataaaagaagaagctagctgaac

SEQ ID NO: 133478 - DNA, 100 bp, Homo sapiens
tgtttctctgtatggcacagaagaatatttgattcatgatgttgctatcaaaagttgagaaattgtcagaagaaatcatggagataatgcaaaatttaag

SEQ ID NO: 133479 - DNA, 75 bp, Homo sapiens
ctcggcctcccaaagagctgggattacaggacacatattgaaggaaatgtggatattggagatttgacctgggag

SEQ ID NO: 133480 - DNA, 75 bp, Homo sapiens
ggagccccgagaacgcctccagcggggatgacacagaagaacccagtgacttgattgtaaaaatttacagagcgg

SEQ ID NO: 133481 - DNA, 80 bp, Homo sapiens
gaaggaagttaatgaagtaatacaaaaagtttctgcgggtccatatggaatatttgctggtagggatgcctccagaggac

SEQ ID NO: 133482 - DNA, 99 bp, Homo sapiens
cttccgcggggcccagcgtgagtctctacctgagcgaggacgaggtgcgccggctgatcggtgttgctgcctatgttggctggcaaagctcctcaattc

SEQ ID NO: 133483 - DNA, 100 bp, Homo sapiens
aagaagaagagcccagctagcaccttcgccctctccagccaggtacctttggaatcgaagcctcttaaaatggcagatgacttggacttcgagacaggag

SEQ ID NO: 133484 - DNA, 100 bp, Homo sapiens
gacacattttatgttgtgtcatttcgaagggaacccaagccagaccgtctccttgtattgaaagtactatggaatgatttcctgatgtgctactcctctc

SEQ ID NO: 133485 - DNA, 96 bp, Homo sapiens
ctgcagggaacaagaattgcaactgcatccgagaaaggcttccgttacaagatgaggtctgtgtatgctcacttccccatcaacgttgttatccag

SEQ ID NO: 133486 - DNA, 75 bp, Homo sapiens
cggtcatcgactgcagcatctccaatgacaagtatgaaaactttcaaagacgactagcacagaaccctctctttt

SEQ ID NO: 133487 - DNA, 100 bp, Homo sapiens
tcagaggccctgatccgagaggtggccaacaaagtcaaggtccccctgcaggagaaccccagttacaaaggtgatgcctcagatcccaaggcagcaggaa

SEQ ID NO: 133488 - DNA, 99 bp, Homo sapiens
ttcaaaaatttaaacaagaatccactgttgctactgaaaggctggcacagtgatgtttgagtatggaatgcggcttggcagagaagttcgaactctccg

SEQ ID NO: 133489 - DNA, 85 bp, Homo sapiens
ttttcaccagaaagtgttgcagcgtttatagcagtccttggcattctttccattattgcacaggagctggaagctatcaaagctc

SEQ ID NO: 133490 - DNA, 90 bp, Homo sapiens
tcaagcagggcatggagtattaccgtgccctcaagacccggaatgtgcctgttcggaggccatgatggatttcttcaacgcccagatgcg

SEQ ID NO: 133491 - DNA, 75 bp, Homo sapiens
gaagacctcactgaccccagagtggcagaaaggctgatgcagcaggacaatgaaggccaaacagctctacattat

SEQ ID NO: 133492 - DNA, 148 bp, Homo sapiens
actaatcagattgtgatgaattgtgctgatattgatattattacagcttcatatgcaccagaaggagatgaagagacggggttttgctatgttgccccggctggtcttgaactcctgagctcaagagatccacccaccgcaacctccc

SEQ ID NO: 133493 - DNA, 101 bp, Homo sapiens
gcacacgggtgagaagcccttcgcctgcacctggccaggctgcggctggaggttggcgtgcagtggtgtgatctcagctcattgcaacctctgcctcccgg

SEQ ID NO: 133494 - DNA, 100 bp, Homo sapiens
gagggttctggggaactattgccgccttggtgaagtgcgcacccacattcgtgtgggtgttgtggggtatttaaaggatccacgataccaggaagtggac

SEQ ID NO: 133495 - DNA, 75 bp, Homo sapiens
cagatccttatcgccgacctcaggggaaatcctaagtaatgcactgaagagaggagagatcattgcaaagcaggg

SEQ ID NO: 133496 - DNA, 100 bp, Homo sapiens
aagccacccaggcaaagcaggcacttttggcaaagaaggaggtcccccacggcccttcaggatgaaagctgcggtgctgaccttggccgtgctcttcctg

SEQ ID NO: 133497 - DNA, 100 bp, Homo sapiens
cttgggccaaaggacagttagaagacagtaggactccatccccgtgtctacctccctccttggagacacttccgacacgacctctactggccttgcccag

SEQ ID NO: 133498 - DNA, 91 bp, Homo sapiens
gggctttcgcccgggtcctcctagaaattccccccgaagaagactcccccacatctgggcctggtctccaagtcctctcctaagaagcctc

SEQ ID NO: 133499 - DNA, 75 bp, Homo sapiens
cgcgggctggcgacgtagaggaggacgcctcacagctcatctttcctaaaggtcagcccaaggccaaccccactg

SEQ ID NO: 133500 - DNA, 98 bp, Homo sapiens
gtaacttgcaggagacagaaactggcatgaggattctgccaccatggaagggctcctgtctccgatgaggacgaagcctctacggcagacacatgcag

SEQ ID NO: 133501 - DNA, 96 bp, Homo sapiens
ctccgcctccatgtgccggatagcgggagcgctgcggaccctgctgccgctgctggcggccctgcttcagaaccccaagtttcacatgcctgagga

SEQ ID NO: 133502 - DNA, 98 bp, Homo sapiens
gctgctggttagtgtgctctgagggagggtccgagccagccgctgttttgccggaggagcccctcaggccacacgatgaggcgagtggtacgacagag

SEQ ID NO: 133503 - DNA, 75 bp, Homo sapiens
gagaaagatcacagcagtgttccaagttctaaagaggccaaagaggtgctgaaaaaatatttggagtccaaggag

SEQ ID NO: 133504 - DNA, 75 bp, Homo sapiens
ctgggagagaggtacctctccttttccctctccctttccctaagagtgatcagcagctggactgtgccttggacc

SEQ ID NO: 133505 - DNA, 83 bp, Homo sapiens
caggaccgccggccgggggacgagctcggagcagcagccaggtcgcaatggaagaagagatcgccgcgctggtcattgacaat

SEQ ID NO: 133506 - DNA, 75 bp, Homo sapiens
cccaggacccccaagccgccgcggacgcaggtgctggagaatctggtaaaagcaccattgtgaagcagatgagga

SEQ ID NO: 133507 - DNA, 98 bp, Homo sapiens
tgggaaatttgagaaaaccatatctggtcacaagctggttctgctccagacgagcccttaccacgttgactcactcctgcagctcagcgatgcctgcc

SEQ ID NO: 133508 - DNA, 49 bp, Homo sapiens
acctgctctgctcttataaggatccgagaaggacacgtctgccacatcc

SEQ ID NO: 133509 - DNA, 96 bp, Homo sapiens
ctctgcatctccaagcccgaacgccccatgaagttcctccgggagcacttcgagaagctggagaagttgcctttccccatcttcctggttctgctc

SEQ ID NO: 133510 - DNA, 100 bp, Homo sapiens
gcttgaattgggaggggggcagctggagcctcaggcggcagcgcttctagtgaacagagtatctgtcaggcaagagctgctgtgatggtttatgatgatg

SEQ ID NO: 133511 - DNA, 90 bp, Homo sapiens
gacagttacccgagatcagccacgcagagtcctgccttcctttggaccgttccccagcacaccccaccccactcagccgctcagcctccc

SEQ ID NO: 133512 - DNA, 73 bp, Homo sapiens
ggcattggaacttcctgttctgatagcgtggaagataaccatgatgactacacagacttctactatgacattt

SEQ ID NO: 133513 - DNA, 50 bp, Homo sapiens
agctgtaatcaattgtgctgacaacacagaaatgtagacaaccaatttcc

SEQ ID NO: 133514 - DNA, 83 bp, Homo sapiens
cgctactctctctttctggcctggaggctatccagcgtggagctggccctgctacagcgctcctaccaggacctggcctcgca

SEQ ID NO: 133515 - DNA, 75 bp, Homo sapiens
aatacatccaggaaagacatggagattctcttaaaaagggccgcccagtatgcttgctctcttcttggccatgcg

SEQ ID NO: 133516 - DNA, 75 bp, Homo sapiens
cctaaaatgaaattcattacagaaatctggcacccaaatgcgatctgaagataaaggttggggacaggcacatca

SEQ ID NO: 133517 - DNA, 98 bp, Homo sapiens
gcagggagtgcatcaaaggtgtgaacacagagtaaaaggcgatttgaacgcgattgcaaagaggcggacagggcgcagcagtactttgagaaaatgga

SEQ ID NO: 133518 - DNA, 100 bp, Homo sapiens
ctcccgagtagctggaattacagtggtttgatgataagaacccaatttgggccgggcgcggttgctcacgcctgtaatcccaacactttgggaggctaag

SEQ ID NO: 133519 - DNA, 83 bp, Homo sapiens
agagcatctctgaagagcccggctgggaggaggaggaagccccggcccacgctgaccctctcgcaggccccacagcctggccc

SEQ ID NO: 133520 - DNA, 100 bp, Homo sapiens
ccagagggtccaggccatgaagagtcctgaccacaatggggaggacaacttcgcccgggacttcatggtggtcgtgtgatggtaacagatgctgacaggt

SEQ ID NO: 133521 - DNA, 83 bp, Homo sapiens
tagctttcatgagcacaggcatcagtcaggcagatgtttgtcgactggaatgggttgttgatcattatgaaaatcctagaaac

SEQ ID NO: 133522 - DNA, 98 bp, Homo sapiens
acgggggctggtcccagaagatggcggaggcgggggcagaaggagaagacagcctgaagaagatgcagctgatggagcttgcgattctgaatggcacc

SEQ ID NO: 133523 - DNA, 100 bp, Homo sapiens
tttccgacctcatctccaggacagtgggaagagtggctggaggaattcagtttcttgggggtcttcatcctccaggtccacctttagcaagacctattct

SEQ ID NO: 133524 - DNA, 98 bp, Homo sapiens
ggaacatcagttctacgagaccctccctgctgagatgcgcaaattcactccccagtacaaaggcccaagtctgttttggtggtctgagaggaaaaaag

SEQ ID NO: 133525 - DNA, 100 bp, Homo sapiens
ccgctgcccaccagccatcatgtcggaccccgcggtcaacgcgcagctggatgggatcatttcggacttcgaagatgccatggacaatattaccaggcag

SEQ ID NO: 133526 - DNA, 100 bp, Homo sapiens
ccgagttcaacatcctcctggccaccgactcctacaaggccccccaaagatggcggacaaggtggtcccacggcaggtggcccggctgggccgcactgtg

SEQ ID NO: 133527 - DNA, 100 bp, Homo sapiens
atgccctgaaaaagtatcgtcgagaagcctatcatcggtcttctctgttggttgaaatgtctatgattttatctgcctcagtcattcgtgtcagagatgg

SEQ ID NO: 133528 - DNA, 75 bp, Homo sapiens
ctgatgttacaaatgaacaaggatctcccagagacggggtctccctatgtggcccagcctggtctcaaactcctg

SEQ ID NO: 133529 - DNA, 82 bp, Homo sapiens
ttctcagctttaccatccctggaggagacctggcagcagatgatgatgtgcctgcagatatggttgcagaagaatcaggtcc

SEQ ID NO: 133530 - DNA, 75 bp, Homo sapiens
gcaccgcgttctcgcacgcgtcatgacctgtgaccgcatcaagcagtcagcagctggcaccaagcgtcgggtgtt

SEQ ID NO: 133531 - DNA, 50 bp, Homo sapiens
catggactggttaaataagaggctggacctgatcccaaccttgaagaaag

SEQ ID NO: 133532 - DNA, 100 bp, Homo sapiens
ggaaatggtcgtgctttcggtccccgccgaagtcaccgtgatcctgttagatatcgaagggcaaggactctccctctaagcagagccctggggagtccac

SEQ ID NO: 133533 - DNA, 100 bp, Homo sapiens
aaagcactttcagcttctggtcaggactctattcagagactgaaggcactgaggaggcgtctccctattccttacttgatatctgcttgaatttcttgac

SEQ ID NO: 133534 - DNA, 75 bp, Homo sapiens
gcggccaattcggtggaacgaggacgcggactgcgaaggcaggcccggattgcatttctacaaggcgaaagaaaa

SEQ ID NO: 133535 - DNA, 75 bp, Homo sapiens
aaccagactgggggcgagctgagcacctgtagtcaatcacacgcagcaaatgatggctcagacattcattctgct

SEQ ID NO: 133536 - DNA, 100 bp, Homo sapiens
attgaacgcttcctgcgacgactggagttccatgccagcaagaaatacccgcagcccaaagggcagaagaagaagaagatcgtcaagtacggcatgggtg

SEQ ID NO: 133537 - DNA, 99 bp, Homo sapiens
caaaaacctatcgttagagtcttcctgcccaacaaacagaggacagtggtgtttggagaagagggattgaccctgaatcttgaagacgttcagcctcat

SEQ ID NO: 133538 - DNA, 101 bp, Homo sapiens
gctgcacaacgtgctcttctcaatcctgcagtgtcaccctaagattatgactgtacccaatgacccttacacttttctctcttgtggtgaagatggaactg

SEQ ID NO: 133539 - DNA, 75 bp, Homo sapiens
aacgtgtaatcagaaggcacagattagaggaaggaagagtgttatctacaaacttctggcatcgaaaagtgaagg

SEQ ID NO: 133540 - DNA, 139 bp, Homo sapiens
tattcccagaggcaggtggtgctgaccctgtaacccaaaggaggaaacagctggctaagctcatcattgttactgggacatcgataaagttgatgagttaatgcaggacattgctgaccagcaagaacttgcagaggag

SEQ ID NO: 133541 - DNA, 90 bp, Homo sapiens
cagtggtccagcacctcctcccaacagatttaatatctggcctggatatcgctgggacggagtggacagagatggagtttcaccatgttg

SEQ ID NO: 133542 - DNA, 82 bp, Homo sapiens
ctgggattccttgggcaatggtgaatttgaaaagcagtgcctgatttgagatggggtcccaggtctcggtggaatcgggagc

SEQ ID NO: 133543 - DNA, 100 bp, Homo sapiens
tgttatccaaggagcagcctgcgttccagtatagcagccacgtctcgctgcaggcttccagtgggcacatgtgcaggttcaggagaagtggcacctggtg

SEQ ID NO: 133544 - DNA, 74 bp, Homo sapiens
caggcccagaggtccgtgcggcagcagctccagagctttgtcaaagagttccaagttccccatcaagtggacag

SEQ ID NO: 133545 - DNA, 98 bp, Homo sapiens
aaagtctgggatgagattcaatgaagtggccgcacagtatagtgaagataaagccaggcaagggattggattcttcaaaagaccactgaaaaagaaaa

SEQ ID NO: 133546 - DNA, 82 bp, Homo sapiens
tgctggccgcctggacggctcgggcgctggaggattttttatcaagcagaaatgcatcgaacaacgagaatcaagatcactg

SEQ ID NO: 133547 - DNA, 75 bp, Homo sapiens
caattctagatgatattggacatggagtaaaggccgcaaaagataagtaccgtgaattggctgtggaagggatgc

SEQ ID NO: 133548 - DNA, 101 bp, Homo sapiens
acaggtgtgatggacagtcttctagaagccctgcagtcaggggcagcattccgacggaagagagggccccgtcaaggtggagtctcgctctgtcgcccagg

SEQ ID NO: 133549 - DNA, 75 bp, Homo sapiens
tcgcagtggtcgcttcttctccttgatatgatacaccaacttctaaaaagaaagtacgaattaaagaccgcaata

SEQ ID NO: 133550 - DNA, 96 bp, Homo sapiens
tccaatcggctgggagcctcgtggaggctgagctccagggcctggaatggatggtttccctgtataataacaacttgaacggaatcttagccgatg

SEQ ID NO: 133551 - DNA, 100 bp, Homo sapiens
ggagcgcaggaggaacaaatggaaaggactagacatttgtgttttatggaccatgtgctgctatgtatgcctgaagaagtacttgaaatgcaaatttggg

SEQ ID NO: 133552 - DNA, 75 bp, Homo sapiens
cgggccgcccccacagcaccccgggctggcgtgagttggagtcattcgttgcccagtttgcagccaagaatgtgc

SEQ ID NO: 133553 - DNA, 76 bp, Homo sapiens
gtcggggatagtgtcatcggttcggtaaagtttctgttctctggagtccccgggccccaggctgcagactggtacc

SEQ ID NO: 133554 - DNA, 87 bp, Homo sapiens
cctggagcctcagttggaagcagccgatccagcctgcggagcctgtggggcagggagactcatgcatctgtatgccgtgtgcgtgga

SEQ ID NO: 133555 - DNA, 96 bp, Homo sapiens
agaggggcaggttacaagaacttcacatctctcaggctacatgttgcaaaggttaaattccagaatggagatttacagacagtcatctgggtggag

SEQ ID NO: 133556 - DNA, 100 bp, Homo sapiens
ttactctcaccagagtgtcagcaatgggaccttctcttcggatgaggagaccctggaagacaatctaagggtcagagcacttactctaggcagatcaagc

SEQ ID NO: 133557 - DNA, 75 bp, Homo sapiens
gagctagccgggagttacaccgccaccgccagaattaaagctatagagagtcccaacaaagaagatgatacccag

SEQ ID NO: 133558 - DNA, 82 bp, Homo sapiens
ctacagcttcagaagaccgaagcgttcgtatctggaaggtgacgcggcgcacggcgcggatggtggccgagtggcagtgtgt

SEQ ID NO: 133559 - DNA, 96 bp, Homo sapiens
tggtgctggccaagcgcaacggaggcgtggcagaggtgtccaggacctgcctgctcacggttcgtgtcctgcaggcccatcgcctaccctctaagg

SEQ ID NO: 133560 - DNA, 100 bp, Homo sapiens
ctggaggccattcagctgtgcgaccgggacggttaccccacagcctatccagcagctgcccctgcctacaatcccagcctgtaccccaccaatagtccca

SEQ ID NO: 133561 - DNA, 100 bp, Homo sapiens
ctcagaagtccgagcttggacccttaatgaggaccacactccaacgcggggcgcagtggtagagttggctttgtgggacacagctgggcaggaagattat

SEQ ID NO: 133562 - DNA, 75 bp, Homo sapiens
ggcaagaccaccttcgtcaacgtgatcgcggtctcctctgagcctccggcctccataagacccaaaacagatgac

SEQ ID NO: 133563 - DNA, 83 bp, Homo sapiens
cgacttcggttcgggtgcgctgctcaaggacacggtctacaccgacttcgacggctgaaaggttccctgagtcgaggtgactg

SEQ ID NO: 133564 - DNA, 100 bp, Homo sapiens
ctgaggcccccgcctgtggccggtgacctccctcctccgagggaggggggttgtgaccccagggtctaggtgctggagtgcgcacggaggccgatgtaga

SEQ ID NO: 133565 - DNA, 98 bp, Homo sapiens
actactaatagtagttgggtggtggtcttcaaatctctcattacaactcatcatttgatggtgtatggaaatgaggagaaggaagccaacatcctttt

SEQ ID NO: 133566 - DNA, 80 bp, Homo sapiens
gcatgcctgtgtttccgcagcgagagcgaggaggaggtactttgcagcaactcagtttgaacccctggcagcaagatctg

SEQ ID NO: 133567 - DNA, 100 bp, Homo sapiens
acagtgacaccatgtcagcaaaacttcttttgggcatggtgacatggaccagaaggagagagatgttatcatgagggaattccggtcagggtcaagtcgt

SEQ ID NO: 133568 - DNA, 76 bp, Homo sapiens
caaagaaaaagttcaaaaactgaaggactctgaagctgagttgacgaaggatcagagattggtgtattcgggcaga

SEQ ID NO: 133569 - DNA, 75 bp, Homo sapiens
ggagaagccgcccaaagaactgattttaccaaatgttgcaagaactctggagttcttatggtagtaaaatgccgg

SEQ ID NO: 133570 - DNA, 83 bp, Homo sapiens
cggcggaggaggaggaggtggactctgccgacaccggagagagaagcctaaagaaactgttccaactcttgctccaaaaactc

SEQ ID NO: 133571 - DNA, 80 bp, Homo sapiens
gcagtttcgatggaaaatgaaggttggaatgttgcatcagcaggtagaagaacatgaaaaaatcaagcaagagatgacca

SEQ ID NO: 133572 - DNA, 82 bp, Homo sapiens
aagacagctgggcctaacaagtgcccaggtgactcaggtactccaaagattcaggtttactcacgtcatccagcagagaatg

SEQ ID NO: 133573 - DNA, 51 bp, Homo sapiens
cactcattggcagagaagctgtgcccagctaagacctgaatgccatcaccc

SEQ ID NO: 133574 - DNA, 100 bp, Homo sapiens
ggaagaagagccgcgaccgagagaggccgccgagcgtccccgccctcagagagcagcctcccgagacagactgcctctgtcaccgggtccctccaccctt

SEQ ID NO: 133575 - DNA, 100 bp, Homo sapiens
gagcgtccggagctagctggatcctctaggcaggtggccagcatcgaaatgttcagccttttagtgatgaagatgcatcaattgaaacaatgagccattg

SEQ ID NO: 133576 - DNA, 75 bp, Homo sapiens
gaatgcctgccttttgaagaccacttttaaggtgtctagtaagacagcaggtacactggagccccatattttgca

SEQ ID NO: 133577 - DNA, 99 bp, Homo sapiens
tgtcccaggacagaaaccatgttcaagaacatgaagactcgggtgactcagaagtggagaatgaagcaaaaggtaattttccacctcaaaagaagccag

SEQ ID NO: 133578 - DNA, 100 bp, Homo sapiens
atccagaaaattatcaacattctcacagacaagcatggagcctggggaaattctgcagtgaggtgagagttacgtgtgtgcatccaatgaaccatttcgt

SEQ ID NO: 133579 - DNA, 101 bp, Homo sapiens
caggcttactgaatatcctcttataattaatgcaataaaacgcttccatctttatccagagatatgattctataacagactcttccagaaatgatatgaag

SEQ ID NO: 133580 - DNA, 95 bp, Homo sapiens
acgagaagcgcagcaacgtgcggtgggaccacgagagcgtcatcatcagatttgaaatatttaaagtggatacaaaactatttcagcaatgcaga

SEQ ID NO: 133581 - DNA, 89 bp, Homo sapiens
ataatccacatgctaactcgatatgctcggacacagtttgtcagcccttggaaagagctctatcgtccgagctttgtgcacccaggggc

SEQ ID NO: 133582 - DNA, 100 bp, Homo sapiens
tgatgaaaattctcttcattctcttggactgaacttaaatactgataggaaccctaaggactctgcaatatgaataattccctagagaacaccatctcct

SEQ ID NO: 133583 - DNA, 75 bp, Homo sapiens
aggttgtttatgagtcgcaccaaccggccgcctctgtccctttcccggatgttgaacagacacggtagaagactc

SEQ ID NO: 133584 - DNA, 80 bp, Homo sapiens
ctgaagacgtctgcgtgagaatagagaccaccgagcaacgaaggttttgggaacagtaaaatggttcaatgtaaggaacg

SEQ ID NO: 133585 - DNA, 100 bp, Homo sapiens
ttgtcggcagctgctccacctgaaggaccagtgtctgatcagctgctgcgtgctcagccccagagcagtgcccgccaccaagctcagcacactgacgcgg

SEQ ID NO: 133586 - DNA, 50 bp, Homo sapiens
ggtccccagattcgagacttggaaagaggactcagaattcatgattgaag

SEQ ID NO: 133587 - DNA, 74 bp, Homo sapiens
cggtggcgagaggtgcggcgaaggaggcagaggcacttatgcttgtcagatgccttcaattaagttgcagagtt

SEQ ID NO: 133588 - DNA, 75 bp, Homo sapiens
gctttcccgaatctcagaatgcctgccctgcaggagtcattaaatcaaaacttcatgctgatcatcacccaccga

SEQ ID NO: 133589 - DNA, 75 bp, Homo sapiens
tgcctacagttttcacaaatctagttcctcctgcttgagaacgtggtgcaccacttcaagtacccctgcgtgttg

SEQ ID NO: 133590 - DNA, 100 bp, Homo sapiens
gaagaagccagtgtttgagaaaagcttcgtgggtcagtatagaccttctgatttgctgtgccctgagacatatgtttgggtacccattgagcaatgcctg

SEQ ID NO: 133591 - DNA, 75 bp, Homo sapiens
ccaagaactcaaactggatatgaatggcagtgactctggaccaagcatgtttcgccaagggatgcatgacttgaa

SEQ ID NO: 133592 - DNA, 100 bp, Homo sapiens
acttgaaccagctgagcgctgccatcccggccacgcgggtggaggtgtccgtgtcctgcagggagtaagccctgaaccaattcatcttaagattttttca

SEQ ID NO: 133593 - DNA, 98 bp, Homo sapiens
tgggagtctccgcgtcccgctcgctgggagagaggtacctctccttttccctctccctttccctaagtgtcaagctgagctcccagactctgatacag

SEQ ID NO: 133594 - DNA, 98 bp, Homo sapiens
gagagccctgctacgcgtcgggtccaggtggcagaacatcctaggtggtgaaaacaggaatgagaacgaggagtcaacctcaaaggctgaaacctcgg

SEQ ID NO: 133595 - DNA, 100 bp, Homo sapiens
ttgtactatcctcggtgctgtggtgcagagctagttcctctccagctcagccgcgtactaggttttgacaagcttgcatcatgcgtgagtataagctagt

SEQ ID NO: 133596 - DNA, 100 bp, Homo sapiens
gggtactctacacttgcttccaatccatacaggcccaaaagagttcagagatgtggtaccacagattgtcccacctacacagcaggcttcaggacttgct

SEQ ID NO: 133597 - DNA, 100 bp, Homo sapiens
gctctccacacacgagctgacctctctgctcgagaaggaggggcaagattcttgccaagagaattaatgtgcgtattgagcacattaagcactctaagag

SEQ ID NO: 133598 - DNA, 74 bp, Homo sapiens
gctcctaaagattttgcagaacagagatgacatgccagcccagactttcatagatggggttttgccatgttgcc

SEQ ID NO: 133599 - DNA, 75 bp, Homo sapiens
ccacaaacctccacccacatcgccaaatcatggaagggaagtggttgctgtgtatgttactggtgcttggaactg

SEQ ID NO: 133600 - DNA, 98 bp, Homo sapiens
cggcattaagcagtttccaaaagaatcagtgctgctgatgtagacctacagtggaatttttcacagactccaattgagcatgtgtttcctgttcccaa

SEQ ID NO: 133601 - DNA, 83 bp, Homo sapiens
gtccagcgatgcagacaccctgtccctcacggacagcagcgtaaaaagatgttgctggtccatttgacgaagaagtccagagc

SEQ ID NO: 133602 - DNA, 73 bp, Homo sapiens
tcagaaactcagccactggttgccttggtaggcaataaaaatggcttgttcaatcagtatatcagtcaacagg

SEQ ID NO: 133603 - DNA, 100 bp, Homo sapiens
tcaaagcctacatgttgatgactcttcaaggattagaatatttacatcaacattggatcctacataggaaatggagtatcactatgttgctcaagctaga

SEQ ID NO: 133604 - DNA, 89 bp, Homo sapiens
aggcggagccgctgtcctcgtccccagcggtcccgcccaacgcccgactctgtctcggacagcccgggagacgagccctcggagtcccc

SEQ ID NO: 133605 - DNA, 100 bp, Homo sapiens
cttgctgtttcatttgctccacttgtgcaaccaagtaagaatgataatggcaaaccagattctgtgggactccagacaaagcatggaggacacaagaatg

SEQ ID NO: 133606 - DNA, 83 bp, Homo sapiens
ctctcatgttctgcacctcaggagggaattcagcctcagtgatgtccatgagaatgattacggacctgaagccaaagaacaag

SEQ ID NO: 133607 - DNA, 97 bp, Homo sapiens
ggaggatagcagcagaagagaagaagaagcaggatgaactgaaacggattgccagagaattggcagaaggttgtctttctactcgggacactcttcc

SEQ ID NO: 133608 - DNA, 74 bp, Homo sapiens
ttaaaggaaatctaaagcatgaacaggcatctaatgttcttagtgacattagtacccatcagccacaccccgtc

SEQ ID NO: 133609 - DNA, 74 bp, Homo sapiens
gtagcagagaacagctctttgcatccggagagtggacaagaaactgtttttggaaggaagaaagatggaaagcg

SEQ ID NO: 133610 - DNA, 83 bp, Homo sapiens
ggcatttgtggtgagggaaccgagtctgtgcaaagcctcctgcttgtcagcgccaacggcaatgtcctgcgcagcgagatcgt

SEQ ID NO: 133611 - DNA, 50 bp, Homo sapiens
caaggtcttggacaagtcaaaggcggcagtttccaacatggctagatcca

SEQ ID NO: 133612 - DNA, 96 bp, Homo sapiens
cttttcccttacctcgacccttttgattccgcctcacagttgatggagccagcagcaagatgaagagcgacgtcggcagctgagagagagagctcg

SEQ ID NO: 133613 - DNA, 98 bp, Homo sapiens
ccgagtttgcgactcgcggaccggcgtccccggcgcgaagaggctggactcggattcgttgcctgagccaccccacgtcatgctgcagcgccgcagag

SEQ ID NO: 133614 - DNA, 75 bp, Homo sapiens
ttccctcctggaaccaaaggaaatacatttgtacacgatcccaaggtaaattaaaagatcttgggaacttggttc

SEQ ID NO: 133615 - DNA, 142 bp, Homo sapiens
aacagcctgagcttagctcagcgccggggcttcaccaagacctacactgttggctgtgaggaatgcacagggactcgggcaagggtgccgaagatagacaagaggcacacagagacagaccaactggcagccaggcagcccc

SEQ ID NO: 133616 - DNA, 80 bp, Homo sapiens
caggggcagagaggtgaaactgggcccccaggtccagttggctctccaggtcttcctgcatgttggagacttgggcaatg

SEQ ID NO: 133617 - DNA, 82 bp, Homo sapiens
cgcggggagcttctgcccggtgattggtcaaatgagctgcctgtggaggaaccgattgtgtccacagatgaggtcatcttcc

SEQ ID NO: 133618 - DNA, 75 bp, Homo sapiens
gtgaccatgtttctcagacacattcatttttacaccccagcaactagaagccatttgtgtcaaggtaacgtctgg

SEQ ID NO: 133619 - DNA, 101 bp, Homo sapiens
taacttcgaaggattttgcaacaaattcgagctgtccgactctgagaatgctgtcacgggaagtctttttaggataaacgtaggcctgcgtggcctggtgg

SEQ ID NO: 133620 - DNA, 80 bp, Homo sapiens
aaacagccaaaagaaaggccagcacctgaagaattgatgcagagagagatcatcattgcctgaatttagctttgtgactg

SEQ ID NO: 133621 - DNA, 90 bp, Homo sapiens
taatggcactcagcagcaagcacagagtatgaccaccactattaatattcacaggcctccactgggctctcagtaggtgggatttgtcag

SEQ ID NO: 133622 - DNA, 75 bp, Homo sapiens
gtccaggccgtggtcagccgcttcgacgagcagctccttcgagaactcatagaacggaagaccagctccttggat

SEQ ID NO: 133623 - DNA, 82 bp, Homo sapiens
cgcggtttccccgccgcccacccggacgccgacgaaagccagcgagctcctcagcctcagcgccgtgccgtccctgcagtga

SEQ ID NO: 133624 - DNA, 96 bp, Homo sapiens
aggcaagaccgaattcagaaggatatcgacgtcgtgatccagaagtccagagctgaggactgcctgtttgcagggttggaagcccagcgaggctag

SEQ ID NO: 133625 - DNA, 80 bp, Homo sapiens
aaggtctcacctgaggtgaaccttcgaccttggacttctcagcctccagaatgctacaaaagaccccacagctgtagaga

SEQ ID NO: 133626 - DNA, 73 bp, Homo sapiens
ctttgaagccacctccagggccagaaactaatggagaggacccccttccagatcctgtacttggattcatcag

SEQ ID NO: 133627 - DNA, 101 bp, Homo sapiens
caacagaagagtgagagatggaacccgaagaagaaaggattcgttacagccagagattgaggcttcaggtacaactggccacagagatagtcctggaagac

SEQ ID NO: 133628 - DNA, 137 bp, Homo sapiens
aacttatgaacatgctttggtcacgaatgttaaaagacaacaaaaagaattggagaagagtttataaggttctaagaattttagatccagttacctgcaaagagagttcacctgataatccattttttgagtcttca

SEQ ID NO: 133629 - DNA, 75 bp, Homo sapiens
gagaagattagcaaaggtgctaatccagtggaaatcaggagaggacgaataacctttacagaaccaaatattcag

SEQ ID NO: 133630 - DNA, 100 bp, Homo sapiens
ccctctcttttgggtggtgagatgctgaggcctgagggtttctagtgagaaagatcagtctaaagaaaaggagaagaaagtgaaaaaaacaattccttcc

SEQ ID NO: 133631 - DNA, 98 bp, Homo sapiens
gaggaagcaacccaagacgttcaccgtgaggatcgtcaccatggacgccgagatggagttcaattgcgagtaccttctccaggcaaattccgttcccc

SEQ ID NO: 133632 - DNA, 85 bp, Homo sapiens
cagatcgacaagtccgggagctgggcggccatttaccaggcgaaggaggtggaggagaccatcgagggcatgctcctcaggctgg

SEQ ID NO: 133633 - DNA, 74 bp, Homo sapiens
tgggcttggattactcttacaagtgcaccacgcctgtcccagaacagcacaagacggagtctcgctctgtcacc

SEQ ID NO: 133634 - DNA, 75 bp, Homo sapiens
tttgtgttaaccaaagccagcctggcatactttgaagatcgtcatgggactgacatcaatttgccctatcttaca

SEQ ID NO: 133635 - DNA, 74 bp, Homo sapiens
cgcgcctctcttcgcctcgcctcgggacccgcggtccccgctcttgctggtcaaaggcaacagaactggaccaa

SEQ ID NO: 133636 - DNA, 75 bp, Homo sapiens
attgaagccgcctctgtattacttaccagtgtggacgaatgtggaacctcgctctgtggctgtgttcccttggca

SEQ ID NO: 133637 - DNA, 100 bp, Homo sapiens
tgctagttaggattttattactggcagcatgtatatcttttgtcttcaataaactcatcaggagatataagtatttggagaaggcatttgaagatgaaat

SEQ ID NO: 133638 - DNA, 98 bp, Homo sapiens
cgggactttgcagaaaggcttcactacccttatcccggagagctgacaatgatgaatctcaacctgcctagagctggaacgttacctccagagcgagc

SEQ ID NO: 133639 - DNA, 83 bp, Homo sapiens
gctgaaaccaactcagaatgcttctgagaagaaaaggcgacggcggattgacagaagtatgattggagagcccacaaactttg

SEQ ID NO: 133640 - DNA, 100 bp, Homo sapiens
tgggaaccgaggggagcctgatcctatcgttttgacgccaggttgacatcatggacatatgtgagtccatcctggagaggaagcggcatgacagcgaaag

SEQ ID NO: 133641 - DNA, 113 bp, Homo sapiens
acacacctccattggatttaaaagacagtcctcgtcagcactgactttcagctatggaatcggtcaaaatgcagatcttcgtgaaaacccttaccggcaagaccatcaccctt

SEQ ID NO: 133642 - DNA, 75 bp, Homo sapiens
cgcgagcaccgcgctgcagacgaagcccgcgcgtgatcccgctccgggcacgtgtggttctcaaatataggcatt

SEQ ID NO: 133643 - DNA, 80 bp, Homo sapiens
aggagtttgacaatcacattaattcatatgaccatgctcacaagcagggtgataaaagaaaatgtggctgaagttacccg

SEQ ID NO: 133644 - DNA, 74 bp, Homo sapiens
ggatatcgtgtctggagcagtggagcccaaagacccctggagacatggttaaacccatccagagtaatggctgc

SEQ ID NO: 133645 - DNA, 75 bp, Homo sapiens
gcagcagccttcagcttttggcagcatgaaagttagcatgaagctgtggtctaccaatctagacaactcagtggc

SEQ ID NO: 133646 - DNA, 97 bp, Homo sapiens
gaggtgatccctgggcctccatcagagagccctggcatgctgactaagctccagtttaattggttggggtcagataagaagaggagtgacaatcaag

SEQ ID NO: 133647 - DNA, 98 bp, Homo sapiens
ctggaccctacctacatcctgagctacatggccccctggtttagggaggattctgaaaagaaatcatctctcctgtcagaggaacaacaagaaacaag

SEQ ID NO: 133648 - DNA, 96 bp, Homo sapiens
cagaaaatagcacacttttactctacgcaactgttgctttttcatggattggtagcttatgtcgatcttgatgaaagagcaattgatgctctcagg

SEQ ID NO: 133649 - DNA, 82 bp, Homo sapiens
cccagtcctcatcctggatgaagccaccagcgctttggatgccgagagcgagtatctggctgaactcacgggaatcaaatgg

SEQ ID NO: 133650 - DNA, 101 bp, Homo sapiens
ttctgacaatgcagcttctcttgcagtgcaggtgaggtttatacatggggcgacaatgatgagggacaactgggagacggaaccaccaatgccatccagag

SEQ ID NO: 133651 - DNA, 75 bp, Homo sapiens
ctgtttgacatcatccctccccagagacacctatggctgccgatgaaggctcagcagagaaacaggcaggagagg

SEQ ID NO: 133652 - DNA, 90 bp, Homo sapiens
gtcgcatccctgggctctgcggagaaggaacccgagcagcccccggccctgtggaggaagtcctacgtccagtgccaggggatcccgcag

SEQ ID NO: 133653 - DNA, 75 bp, Homo sapiens
ggctcgaagcctggatgaaatagatctctcggctctgaggcaatggctgccatccggaagaaactggtgattgtt

SEQ ID NO: 133654 - DNA, 74 bp, Homo sapiens
cttgtcctggctcttgccctcatcctggttctggaatcctcagttcaagatgatgatgtgcctgcagatatggt

SEQ ID NO: 133655 - DNA, 100 bp, Homo sapiens
ctcctttggggcatcctcagcacccgcccaaggctttgttggtgttgcacctttcgattctactctgctactcaagtagtggtcactatgattctgtgta

SEQ ID NO: 133656 - DNA, 98 bp, Homo sapiens
tggaaagtgaggaattttgaagtacaccgtggtgacattgtatcattggtgttgctacaagcctcaggaaaaatcagattacttgatgttggcagctg

SEQ ID NO: 133657 - DNA, 75 bp, Homo sapiens
gtacctgcctccttcagcccactagtagtgcgctggtaaatgctacggaatggggggtgctcaaaggatttaaag

SEQ ID NO: 133658 - DNA, 100 bp, Homo sapiens
gatctggacaaaggaacaggtatctcaggcagaagtcaattcatctggaaagactatctctgagtcagacttaaaccactctttttcactaactgattta

SEQ ID NO: 133659 - DNA, 75 bp, Homo sapiens
cctcttcgccgtcatccgcttcgaaagcatcatccacgagttcgacccgtgaaatgctgctcatggattctccct

SEQ ID NO: 133660 - DNA, 78 bp, Homo sapiens
agcgatcccaccgaagcagcgtgtcctccgtgggagcccgaggtcttggtcttgatgccaagtttgggaaaggagcta

SEQ ID NO: 133661 - DNA, 74 bp, Homo sapiens
ggagatgggattggcctgcgttgtttgtaggagtgtacctcacagccttctaggatctccagagtggacaggaa

SEQ ID NO: 133662 - DNA, 75 bp, Homo sapiens
ggacaggacggcggggcgagccagaattcagcttagagaactatcaacacaggacaatgcaagcccatgagctgt

SEQ ID NO: 133663 - DNA, 50 bp, Homo sapiens
tgaactagagtcccaggtcaacctgtaaggcaagcaagctccacatatgc

SEQ ID NO: 133664 - DNA, 100 bp, Homo sapiens
attctcccagagcacccccattgggttggaccgtgtgggacgccggcggcagatgagagcatccaacggtctcctttacagaaaggggcttggataagga

SEQ ID NO: 133665 - DNA, 75 bp, Homo sapiens
cattgccacgggcattctccatctccttgcagatgcgcctggagaaggacaggttctctgtcaacctggatgtga

SEQ ID NO: 133666 - DNA, 100 bp, Homo sapiens
agagatgtcaaagtgcttaggctgatatccttgggaactgtggaggaaatcatgtatttacgacagatatacaagcaggcttgcacagaaatctggaggc

SEQ ID NO: 133667 - DNA, 90 bp, Homo sapiens
tgaagagccattttttcaccatgctaaaaaggcaatggtggcttgctatccgggaaatggaacaggttatgttcgccacgtggacaaccc

SEQ ID NO: 133668 - DNA, 101 bp, Homo sapiens
gcggccgtcctccaccgtttcctccaggacagcacctagtcgtggccggaggagtctcagagctgtcagaaagtgtgcaggatgacagaattcgagtcgaa

SEQ ID NO: 133669 - DNA, 83 bp, Homo sapiens
gaaggagcagaacgtgagggtgtaacttacaaaaagatgcgtctgttactagagtggagagtctaccttcgtctcacatgtgc

SEQ ID NO: 133670 - DNA, 100 bp, Homo sapiens
accggccattcccgccgggcctttggccgactcacccatgggaatagaacgtgtccgggctgtggccaagcggattggtgaggtccaggtggcttgtggc

SEQ ID NO: 133671 - DNA, 82 bp, Homo sapiens
gggagagggagaacacagttggagaaaatcggcagctgagacggccttggccgctcaccaagctcctgtatctactggaaaa

SEQ ID NO: 133672 - DNA, 75 bp, Homo sapiens
atttctcttttgtctgcccctattgtaagtgcagatggaacacaacaggttgacagatttgcaatggaattagaa

SEQ ID NO: 133673 - DNA, 49 bp, Homo sapiens
cgggcatcttggctcctccttgagtttctgggtgtctctggggagcccc

SEQ ID NO: 133674 - DNA, 89 bp, Homo sapiens
ggaaaccctgcttctcctggagctttggacatcagacagtgcaggagaagaatgtgatgcggcagaaggggctgaaaactaaatccata

SEQ ID NO: 133675 - DNA, 98 bp, Homo sapiens
ctcgggccggcggacagtgagggcgcgagcgctctactcacccagaatggcacgggcagccttcctcgcaacctggcagccacactgcaggacatcga

SEQ ID NO: 133676 - DNA, 83 bp, Homo sapiens
cttcaactccacttttatctccaccataggtcaaaatgcagatcttcgtgaaaacccttaccggcaagaccatcacccttgag

SEQ ID NO: 133677 - DNA, 74 bp, Homo sapiens
gagaagggagctctatagtcggagtggagaactgcaaggaagcatctcgaagaacagccctgccacactctttg

SEQ ID NO: 133678 - DNA, 90 bp, Homo sapiens
ctcaggattctacagatatatgcaagcaacagttaatgcccgggcaaaccaggatcttgcccttctgtgtgaggtccgtgacagcaatag

SEQ ID NO: 133679 - DNA, 74 bp, Homo sapiens
cggacatcactttagaccctccacctaattgcaggttagagcagccagcgggtacagaatggattttggaagag

SEQ ID NO: 133680 - DNA, 90 bp, Homo sapiens
gcacagtctctgacatcagctctcctgggaccctccaagagcactagtgtctagaaggcactaagggcttggcttggactcatcgtcaac

SEQ ID NO: 133681 - DNA, 75 bp, Homo sapiens
tgaaagaaatagaaccaaatctgtttgctgatgaagattcacctgtgcatgacccaacatgagtgaagtttcctg

SEQ ID NO: 133682 - DNA, 89 bp, Homo sapiens
tccatctctgctgctctctcatttgctggccatcggattggggtccccgcggaagccgcggtgtcggcgccatggcggagctgacggct

SEQ ID NO: 133683 - DNA, 100 bp, Homo sapiens
ggtaggctgctctgctcctcggaaaggaaagtccagtgggacctcgctgctctgctcccagagccaaggattgtcaccagtgaagaggtcattattcgag

SEQ ID NO: 133684 - DNA, 90 bp, Homo sapiens
cgactaccggcgccagttgcagtccttgacctgcgacctggagtctctgcgcggcacgattatgtttgagaccttcaacaccccggccat

SEQ ID NO: 133685 - DNA, 83 bp, Homo sapiens
cagggagtggagcttggtttcgggatctcggtgctgcagacggcgagacctcctgcacagactgattcttgctattccaaatc

SEQ ID NO: 133686 - DNA, 78 bp, Homo sapiens
catcatcaaggatcaggaccgcaagtcccgtcttatgggacttgaggccctcaagggccatgatccaaaggaaccaga

SEQ ID NO: 133687 - DNA, 98 bp, Homo sapiens
ttgggatatcaagagtataatgtctatggtgaagtcttttgtacagtggttagtgtgaccgcaacaagggaaaacatggcttatactgtggaatgcct

SEQ ID NO: 133688 - DNA, 101 bp, Homo sapiens
gctggcaagctgtggacagcaccccccaggaaaatagcgatgatggcagtggcagcaccatgatgcaaaccaagaccttctcctcttcctcctcatccaag

SEQ ID NO: 133689 - DNA, 51 bp, Homo sapiens
gtctcagcagtgctcgggcgcagattttgagaagagggggaaaaaggaagt

SEQ ID NO: 133690 - DNA, 100 bp, Homo sapiens
gagatgaggacactgaaattcagagaggggaagtgatttgcctcagcttgtactccgtgctatcaagactaatcaggaccttctcccagaaactccatgg

SEQ ID NO: 133691 - DNA, 90 bp, Homo sapiens
ggcagagtttgatacagcatgtgttaccaagctgtttcctaccaggtcacacactgttgcagcgcagtgatcttccattgtttgaagcac

SEQ ID NO: 133692 - DNA, 82 bp, Homo sapiens
gagctgcggtggcgtctccacacgagaaaagaaaccttgtttattccctgtgaaaatgagaagatttctaaacagctccacc

SEQ ID NO: 133693 - DNA, 74 bp, Homo sapiens
cagaggggagcacagagaaagagaatgatgaagagaaaggcccggagactgacttggtgaaatgtgaaaataag

SEQ ID NO: 133694 - DNA, 87 bp, Homo sapiens
agaccgggcagatctggcccaacgatggcgagggcgccttccatggagacgcagacaaatttacatgtattggagaccagaccagaa

SEQ ID NO: 133695 - DNA, 95 bp, Homo sapiens
tgacaatgcagcttctcttgcagtgcaggtaaaataccatgaagattttgaaaaaacaaaggggagaggctttactcccgtcgtggacgatcctg

SEQ ID NO: 133696 - DNA, 96 bp, Homo sapiens
ttgaatgttgaagatgtccttaccagctttgacaatacaggaaatgttttgctgggcctaaaggagataacatttatgaatggagatcaactatac

SEQ ID NO: 133697 - DNA, 50 bp, Homo sapiens
gtttggcaattttttcaaaacaggtccaagcatctcattttgaaggccta

SEQ ID NO: 133698 - DNA, 73 bp, Homo sapiens
tgagatcgtcagcgctgactccatgcaggagtccaagattgatctccttgatcggaaggaggatgtgaagaaa

SEQ ID NO: 133699 - DNA, 50 bp, Homo sapiens
ccctcagaccccgtcatcattgacagtttaagctatgaagaaggacatcc

SEQ ID NO: 133700 - DNA, 98 bp, Homo sapiens
ggccaagcacatctttgaccacgtcatcgggccagaaggcgtgctggcaggcaagatatgcacccaatgtccagggagcgtgcaaaatttgtcaaaag

SEQ ID NO: 133701 - DNA, 119 bp, Homo sapiens
ctcacacccgccgggccgttgttcccgagacgttgttgagtcccctgtgtcctcttctgggtacgcccagagccagaccgtgtttcaaaatccagacgcacaccccgccaacagcagca

SEQ ID NO: 133702 - DNA, 74 bp, Homo sapiens
tgtgagcaaacaacccatgacggagatcatttggcatttagctgtgatgttgctaaagaacatgatgttcaaaa

SEQ ID NO: 133703 - DNA, 86 bp, Homo sapiens
ggcgcggattcgccgaggcaccgaggcactcagaggagaggccacaagaggaagctgaatgaagaggacgccgccagcgagtccag

SEQ ID NO: 133704 - DNA, 109 bp, Homo sapiens
gcgacctcccagcggtgaaagcgaggagacaggctgaatttgaacactttcagaggaggatggatagaatgacagaagatgctcttcgcttgaatctgttgaagcggag

SEQ ID NO: 133705 - DNA, 100 bp, Homo sapiens
tagcctcaaactcccaggctcaagcagtcctaccatgtcagccttcccagtagctgggaccacagaggctgggcactcactgcagctggctaatgatgac

SEQ ID NO: 133706 - DNA, 75 bp, Homo sapiens
cacagatgctatagtctggtatcaaaagaagtgtatgcagagaatatttccaaaatggtgggaagagaaaagcac

SEQ ID NO: 133707 - DNA, 97 bp, Homo sapiens
gttctactctgccagggaagaaattgtgataggaactgagatcattgctgaaggtgccaatgggccaacaactccagaagctgacaagatcttcctg

SEQ ID NO: 133708 - DNA, 75 bp, Homo sapiens
atgatgggcttatttctctccaggtgaagcagaaagagtttcactctgtcacccaggctcgagtgcagtggcgtg

SEQ ID NO: 133709 - DNA, 82 bp, Homo sapiens
cacgctgcgggcccgggccatggccgccgccgatgccgagaaccgtgggtaccgatggatgtggccgagagccctgaacggg

SEQ ID NO: 133710 - DNA, 97 bp, Homo sapiens
tttgccagtctcccttccaagagggatgccagagccttctgacttggatgttgtgggtgatggtatgcagtgtcctccttcacctttgctttttgat

SEQ ID NO: 133711 - DNA, 87 bp, Homo sapiens
gggagtctccgcgtcccgctcgctgggagagagagaatgtaactggtcactacatttccccctttcatgatattcctctgaaggtga

SEQ ID NO: 133712 - DNA, 101 bp, Homo sapiens
gagacgtcatacttggaaatggctgcaggttcagagatgctgtgaccatctgtaccctgggaattgggacggcctttggagagtccattctggacaacaca

SEQ ID NO: 133713 - DNA, 100 bp, Homo sapiens
ctggaaatgcgaatcctaaagcgtttcctcgcttgcattcagctcctctgtgtttgccgcctggtggtacagcctccaaccatcacccaacagtctccaa

SEQ ID NO: 133714 - DNA, 100 bp, Homo sapiens
caaaattatcatctggaagtaaaagatgttctgaagactttagtcctctctcacctgatgtgcctatgcttttgctctgcatgcctgcaggaatgtctga

SEQ ID NO: 133715 - DNA, 75 bp, Homo sapiens
cagtagaacagcgaagctcatagtagcaggaagcgagcagctgcaaagcatctaatagaacgctactaccaccag

SEQ ID NO: 133716 - DNA, 96 bp, Homo sapiens
atcgaggttgtttgcaacgaccgtctggggaagaaggtccgcgttaaataaacaccatctgattcagatcacaagaagaagaaaaagaaaaaagaa

SEQ ID NO: 133717 - DNA, 100 bp, Homo sapiens
ggtagtcggacctttcccgctggcgcgcagcctcagctaggctgggagtcctccgtcagcatcagctccggctccggtgtcctccttctctcgcacttct

SEQ ID NO: 133718 - DNA, 100 bp, Homo sapiens
atatcgctcgagatggtgccagcaatatcttcaggtgtaacgtctttaaatccaagaagaaggaaattgcaagaacctattgatggcttggatgctctgg

SEQ ID NO: 133719 - DNA, 82 bp, Homo sapiens
ataaacacttcgagagttcttccaaagtcgcccaggcaccttctccatgcattgcaagtcaagtatatgaaggacgtctcac

SEQ ID NO: 133720 - DNA, 100 bp, Homo sapiens
ctgagaccgggcggccacagtccgcagggatgaacctcgagttgctggacacttcgtgtatgatcatgtgttcgctgagaagatcacttccttgcaaggt

SEQ ID NO: 133721 - DNA, 74 bp, Homo sapiens
ctttatgaaacagcttgcttcctacagttccatgccattgcagtgtcaactaggcctcagttacttttcagttt

SEQ ID NO: 133722 - DNA, 75 bp, Homo sapiens
cccctttcatccctatgtggaaaacggagatttgctctgacccatctgaagtccatatggctctgtatgatgaag

SEQ ID NO: 133723 - DNA, 75 bp, Homo sapiens
acaaactcgaagaacagctgtggaaagaagttgcaaaacactgggtatgtaccctctggtcacagcgacccagga

SEQ ID NO: 133724 - DNA, 80 bp, Homo sapiens
ggaccacggtcaccgtctcctcaggggaccctcacaatgatcccaatgctcagggggatgccttcaagactctcttcgtg

SEQ ID NO: 133725 - DNA, 50 bp, Homo sapiens
gcaaacagtatatcatttcagaggagcatttaaatcaaacggtattgaga

SEQ ID NO: 133726 - DNA, 100 bp, Homo sapiens
aaggagtctagcagtgagcagtacgtgcctgatgtgttttataaggtgggatgtgtgtgggctgaaattccgagctgcggttgtgcatgagaatacaccc

SEQ ID NO: 133727 - DNA, 117 bp, Homo sapiens
tcggtgctggaggggacgtacctggacaagcacatggaggctcagcgggccgaggagagcccagccctgaccctgctgctggtggacgaggcctgctggctgaggacgctgccccag

SEQ ID NO: 133728 - DNA, 90 bp, Homo sapiens
ccaggccaggaggaagacggacccctgaagggcaaaggtcaaggggccaccacagccgacggcaaagagttcacccagggcatgatctta

SEQ ID NO: 133729 - DNA, 83 bp, Homo sapiens
ttagaaaggagacccgactgcaactgctggattgctgcaaggctgagggacgagaacgagcatcgagagtaaacatgaggtta

SEQ ID NO: 133730 - DNA, 100 bp, Homo sapiens
cgacaagccgctggcagccgcggatctcaccgccgctcagggtggtacagaagttggtcctgccctttgggcgactgaactacctgcccctggaacagca

SEQ ID NO: 133731 - DNA, 90 bp, Homo sapiens
cgtacgtggccctcgatgtgctctgcgtgttgctggatacactgcctctaggactgggacagatagccactgagtacctgcttcaaatca

SEQ ID NO: 133732 - DNA, 85 bp, Homo sapiens
tgggtcagtccgccgctcaccccgcggccgcaccttcccgccttctcagtgtgtcccggcatggatatccggaacaacctcacta

SEQ ID NO: 133733 - DNA, 100 bp, Homo sapiens
cgccggcggtggcgcctgcggacctaactagctccaggttaggccgagctttgcgggaaagcagcggaaggatgtgcccgtggaacaggtgacacacgca

SEQ ID NO: 133734 - DNA, 98 bp, Homo sapiens
ttgattgcgtcctccttgcaagagctccacctcagatcaggcgtcccaatcgagaagtaagacctctgaggaaagaaatggcaggagtaggagcccgg

SEQ ID NO: 133735 - DNA, 100 bp, Homo sapiens
cctttgggttgtactcatagattgtgtaggcgttggtcttctgatagcaactttaatgtggatttctccagtgatgattctaagttagaatataacgtag

SEQ ID NO: 133736 - DNA, 90 bp, Homo sapiens
acgttgttcagttgctcacacaatttctggctggccatagacactcagattggtcctccagaagtacatttagaagctgaagataaggca

SEQ ID NO: 133737 - DNA, 90 bp, Homo sapiens
gtccgtgcgagaggaccaacggagcgctgaggcgggcgttttcttggatgaattgcttgctttggagggagctgagcacataacgactta

SEQ ID NO: 133738 - DNA, 88 bp, Homo sapiens
tccccctaaacaggagcacctgctggcgctaaaagagcagcccgacggccatggaggctgaagagacgatggaatgccttcaggagtt

SEQ ID NO: 133739 - DNA, 87 bp, Homo sapiens
gatctacgacgctccccaagtaagcctacacttgcctatccagaaagcaacagcagagatatggaatgtgcagatgtcccactatta

SEQ ID NO: 133740 - DNA, 100 bp, Homo sapiens
agcatttctctgacttgacataacttcccatccagccaggagtctgcactcttcagtctttgcaggggatgtggagacgctggtagcggggccaggaagg

SEQ ID NO: 133741 - DNA, 75 bp, Homo sapiens
gaagcttttctccctagaactggttgacgaaagtattctgctcctaagtgtaggagagaacttggtgcctcttcc

SEQ ID NO: 133742 - DNA, 50 bp, Homo sapiens
gacagagacaacaccgagtatgagaagacgtagacaagtttggcaacgag

SEQ ID NO: 133743 - DNA, 100 bp, Homo sapiens
agatcaccgacaagatcaccacggacgagatgatcaaacgcctgaagctaccaagtcaggattgttacccccaccacctgcgctccctccaagaccttgt

SEQ ID NO: 133744 - DNA, 49 bp, Homo sapiens
gaacattaacattgttcgcaaacgcgggaatgcatatcagtccacgtgg

SEQ ID NO: 133745 - DNA, 97 bp, Homo sapiens
caaatcagcctggtcaccagcttttcggaacagcagagacacagagggcagtcatgagcccaaaatggagttaatcctgactgggagaagaaagtaa

SEQ ID NO: 133746 - DNA, 75 bp, Homo sapiens
ggcgccgcgccaggccgggcgggcgatcactggggtgatcctgctggctgttggagtctggggcaaacttactct

SEQ ID NO: 133747 - DNA, 95 bp, Homo sapiens
gagtcagacctgtaggcctgatagactgattaaaccacaggttatcaatactctggctgaccatcatcatcgtgggactgactttggtggaagtc

SEQ ID NO: 133748 - DNA, 97 bp, Homo sapiens
tggacataagttgtcgactcatttggataaagaccaagaagtgggattactggattatatggtttccttaatgacaacaaaaaagggagtaatccta

SEQ ID NO: 133749 - DNA, 100 bp, Homo sapiens
tggtccgagagttgctacccagtgacagcagcgcgacactgaagaaagtcacccagagactacagtaactttgaccaggagttcctgaacgagaaggcgc

SEQ ID NO: 133750 - DNA, 50 bp, Homo sapiens
agaaaagtctctaagtttgtgaaacacatttactccccaataattgtacg

SEQ ID NO: 133751 - DNA, 75 bp, Homo sapiens
tcctttgcagaaatgactacattagggggatatgagactttctactcggaatatcctgagtgttgcgtggatgta

SEQ ID NO: 133752 - DNA, 85 bp, Homo sapiens
ttggactaaattaccagaatgcaggggtcccccacggcccttcaggatgaaagctgcggtgctgaccttggccgtgctcttcctg

SEQ ID NO: 133753 - DNA, 82 bp, Homo sapiens
gtaaagtcaccaacgagatcttccgccactacgagtgacttaagagattaaaattaatttggttgctgttggttctgaacaa

SEQ ID NO: 133754 - DNA, 83 bp, Homo sapiens
gtccgattagccttttctctgccttgcttgcttgagcttcagcggaattcgaaatgtgacatattcgatgccatgttccctgt

SEQ ID NO: 133755 - DNA, 100 bp, Homo sapiens
gccaggaagatccttcaggtgctggaaaggaatgaggagttacagagggccgagaaggacaggatcagtctgaagatgatgagaaactgaaaaagaggaa

SEQ ID NO: 133756 - DNA, 50 bp, Homo sapiens
gggctctcggccgaagtcaagaacaagaaagacaaggcactctctccaca

SEQ ID NO: 133757 - DNA, 100 bp, Homo sapiens
gctcccgcgccgcgctcccctcgcccgcccgggccgccagtgggtaattccagaattgattggccataccattgtcactgtattactgctcatgtcattg

SEQ ID NO: 133758 - DNA, 103 bp, Homo sapiens
cgtgaagcgtgatctgctcttccaagccctgggccgcacctacacttgcccaacagaaggtggaaaaaatcactgaaagtaaaaataaactggcctatgaaaa

SEQ ID NO: 133759 - DNA, 100 bp, Homo sapiens
cccagacctacccgggcgaagcgggcgagcggtggtttggacgccggcggagacgcgggcgaggtatgaggatacatgggctgcacttcacagaagagcc

SEQ ID NO: 133760 - DNA, 80 bp, Homo sapiens
accgcaactctcagttcgagagtaaagaagcatcaagtgtacctgatttgtgaacctatcttgcttcagttggtttcctc

SEQ ID NO: 133761 - DNA, 83 bp, Homo sapiens
ctggcaactgcagcccgaggacaagcggctgagccttcacgtaaatgggtccagtcatgcctcccagtaagaagccagaaagc

SEQ ID NO: 133762 - DNA, 90 bp, Homo sapiens
gcaaatataataatggcagcacagagctacattcgagccctttctaaggcacaaaatgatgtgatggaaatgaagatgcagtcagagaga

SEQ ID NO: 133763 - DNA, 96 bp, Homo sapiens
aaacactgggcgacggtggctccagcatgtatcagccgaggtggagctgcggggccctggcatgaaaggtagacaacaccaagtttacgatggact

SEQ ID NO: 133764 - DNA, 75 bp, Homo sapiens
gacctttcccgctggcgcgcagcctcagctaggctggttggaaggaaaatcatgcaacattcatgagcgaactaa

SEQ ID NO: 133765 - DNA, 88 bp, Homo sapiens
gaccatccgcctgtgtgacatgcgctcctcggccctgtgcgacagacactccaagtgtttcagcaagcagatggtggaaattcttcac

SEQ ID NO: 133766 - DNA, 98 bp, Homo sapiens
agaatcaccagcactggctgaagctctgccaagccaaaggcttcatctgtgagttctgtcagaatgaggatgacatcatctttccctttgagctccat

SEQ ID NO: 133767 - DNA, 100 bp, Homo sapiens
ccgacaagcaggcgtgggcctcgaaccaggtggatggagagagaaagaaaaagccagagaggagagctggggtccacctcgagaatcaaggccatcagaa

SEQ ID NO: 133768 - DNA, 75 bp, Homo sapiens
cacctggtggttgaaagttttccttcttacagagatgtgactctgtttgagattgtgaataagtggaatacagct

SEQ ID NO: 133769 - DNA, 97 bp, Homo sapiens
tctagccgctactttgtaatccggatccaggatggtactgatctggcaccactccttctacaatgagctgcgtgtagcacctgaagagcaccccacc

SEQ ID NO: 133770 - DNA, 101 bp, Homo sapiens
tggaagagtacaagctgatcctgtccacagcaactgcttcgagaacgacagcagatggccagccgtccctttgcttctgttgatgtagctctggaagtggg

SEQ ID NO: 133771 - DNA, 82 bp, Homo sapiens
cactgccgcggccgtgggcccgaccgcggggacccgtataatgggtctctcccaaatggcgatagaggaaggaggaaaagta

SEQ ID NO: 133772 - DNA, 102 bp, Homo sapiens
tgggcctcctgtgcaaaagcatggagacagtgtttcacaaaatgattttccttctgaagctcccatctccttgaatctttctcataacatctgcaatcccat

SEQ ID NO: 133773 - DNA, 90 bp, Homo sapiens
actgctcctgctggccgcctggacggctcgggcgctggagtccaaggtttacactcgcacaccaaccttatatttggacttcaaattgga

SEQ ID NO: 133774 - DNA, 101 bp, Homo sapiens
aaagagcaactgaagattcatacgcagctggcagatattatcatagttgctgcagctgacaacatagaaggacccatagccttgaagttctcacacctttg

SEQ ID NO: 133775 - DNA, 83 bp, Homo sapiens
agccgatccagcctgcggagcctgtggggcaggtgtctttcaggttgcagaaaagatggaaaaaaggacatgtgcactctgcc

SEQ ID NO: 133776 - DNA, 100 bp, Homo sapiens
cagctgctcaaacagcagcttaaagatcagtatttcatgcaaagacatcagctacttaagcgccacgagaagtccatgaacatcctgacctccgtgctgc

SEQ ID NO: 133777 - DNA, 75 bp, Homo sapiens
tttcagcattccaaaccagatgtagatatagttgtaggtactccgggaagactagatgacttggtgtcaactgga

SEQ ID NO: 133778 - DNA, 100 bp, Homo sapiens
gcagcggccacgtagccgtcagcgacgggcgccacatgttcgtctggggcggctacaaggtcaaaatgtgggtacagctcctgattcccaggatagaaga

SEQ ID NO: 133779 - DNA, 75 bp, Homo sapiens
ggaacagattacggatgctgcattgtggaacttggaaaaacaagaccttccgaaaagcaagagcagtggcgcctt

SEQ ID NO: 133780 - DNA, 51 bp, Homo sapiens
gcctcccgagtggctgggactacagatttgtgacccagaaggaaatctctg

SEQ ID NO: 133781 - DNA, 98 bp, Homo sapiens
gagaaaacagagtcagcatcagagcagcaggagggaaaatgaagaaggaacgatctcgtaagaaggattcaaactgataaatttcaaacggaagagag

SEQ ID NO: 133782 - DNA, 49 bp, Homo sapiens
aggagccgggcgcaatggagcggaagagagccccccaagatgaacccag

SEQ ID NO: 133783 - DNA, 82 bp, Homo sapiens
agcagcgcgcggagaagaacggggagccaggcagatcgggagcggtgccgagaaaaatttccttactagatgacatttcatc

SEQ ID NO: 133784 - DNA, 90 bp, Homo sapiens
ctagtgaaaagaacaagaagtcttaccctcaggtcaaacaattctgtggtgttcttggtcacacatttatggagtttctgaagggcagtg

SEQ ID NO: 133785 - DNA, 50 bp, Homo sapiens
cggcagagcagggcggcggcgactcgattaagatgttctacgaggagcat

SEQ ID NO: 133786 - DNA, 75 bp, Homo sapiens
attgctagcaatgagctcccaaagccatccagtttggaaattttagcattcaggtgccaggaatgcagatgggac

SEQ ID NO: 133787 - DNA, 83 bp, Homo sapiens
ctactgggctcagcgacaccgcgagctatatctgcgcgtggagctgagtgacgtacagatgcctgaggaaacccagacccaag

SEQ ID NO: 133788 - DNA, 75 bp, Homo sapiens
ataaaatctccttgaatcgctctctcccagatatccggcacccaaatgttatccaagataaattctgtgggatta

SEQ ID NO: 133789 - DNA, 102 bp, Homo sapiens
gtcggcctggaccttgcagccgcaatgggctgcagactcctgttccagaggtcattgttgatgtggaatccatggacatcttcccagtgggctggtgtgaag

SEQ ID NO: 133790 - DNA, 100 bp, Homo sapiens
ttcattagctgaacctggctctgcttacctggtggtgaagagattcttaaccgctgacacaattaaacactgcagtgattcgcttcaagctcagcttatc

SEQ ID NO: 133791 - DNA, 97 bp, Homo sapiens
agcctgaaaagtcgcagcgagctggagccgccggaggtatgcgccaggggaacgaccatggcactcagtaccgctcggccatctacccgacctctgc

SEQ ID NO: 133792 - DNA, 101 bp, Homo sapiens
gtcatacaccagtactaccaaggacagcttttttcctgcaaggaaaatgtttataggaggccttagctgggacactacaaagaaagatctgaaggactact

SEQ ID NO: 133793 - DNA, 96 bp, Homo sapiens
accaccaccacagagtctgtggaagaggtggttcgagctattgacctgttgtattggcgggacatcaagcagacgggcatcgtgtttgggagtttc

SEQ ID NO: 133794 - DNA, 100 bp, Homo sapiens
ataatgtggtgaattgcttataccatggagaaggagcccagtggtttttagatcgtatggctgatgacgactggtggccaatgcagatactaattaagtg

SEQ ID NO: 133795 - DNA, 98 bp, Homo sapiens
ggcggcggccggcagcggcgagatcgtccaactgaacgtaggggggaccagctctttacacgctgtcttacaccgcttgtaccagaagaccttagaaa

SEQ ID NO: 133796 - DNA, 74 bp, Homo sapiens
aaggattccaagtaactcttatttgcccagctggtcctgtccttcctgcaccttcatcaatgccccagaccgcc

SEQ ID NO: 133797 - DNA, 103 bp, Homo sapiens
attttcaaggagccttatttggacattcacaaacttgttcaaagtggaataaaggaagtcctggctgagcaaggttggaagccctagttctcgcattgaccgc

SEQ ID NO: 133798 - DNA, 83 bp, Homo sapiens
ggtgacggcgccgctaggatgaagctcgtgagatgtccctggtagatttgggaaagaagcttttagaagcggcacgagcaggt

SEQ ID NO: 133799 - DNA, 90 bp, Homo sapiens
gattttgcatgcagcaggtgcgcaaggtgaaatgttcactgttaaagagcatttcagcaggaacttgatgcaaggcatgacaaatatgag

SEQ ID NO: 133800 - DNA, 51 bp, Homo sapiens
gctttaatcctgaaagccatgcagcggtaagagttccctatttcattgatt

SEQ ID NO: 133801 - DNA, 100 bp, Homo sapiens
ttcatttttgttgaaatgcaaggccacgcgtacaacaagtcttttgaagttcagaagtatggctgttcggctcttgaatcccagcgatgaaaccaggaac

SEQ ID NO: 133802 - DNA, 82 bp, Homo sapiens
tgatgagccgggcctggcggacgcggcgccatcgcagtcaggttcccaacaaggctacgcagaagaacccccttgactgaag

SEQ ID NO: 133803 - DNA, 75 bp, Homo sapiens
aaagtgttagaaacagtagtggagaatcaagacctttccaaagtgaaactgatgagatttgatgatccactgttg

SEQ ID NO: 133804 - DNA, 101 bp, Homo sapiens
ccctcttccccacttccctgcactctcatcgctctcggcctcggcctcggcctccgacacggtggcccacaaactctttaacaacttgaaataaatgtgtg

SEQ ID NO: 133805 - DNA, 100 bp, Homo sapiens
gtagacagtttctgcctcttcttgtttggggattggagagggaagtgcgtctggatgactactaagccgcggcccatggagcccgccggcccggcccccg

SEQ ID NO: 133806 - DNA, 75 bp, Homo sapiens
ccgccagatcaacctggagctctacgcctcctacgtttacctgtccatggtccctgaagaagtctggtgacatct

SEQ ID NO: 133807 - DNA, 90 bp, Homo sapiens
gcctcaaactcccaggctcaagcaatcctaccatgtcagccttcccagtagctggaactacagggcctcctcccaaggagaacatgagac

SEQ ID NO: 133808 - DNA, 50 bp, Homo sapiens
atgggaagaagagagccagccagaaaatgcatccgatgcagatttatggc

SEQ ID NO: 133809 - DNA, 102 bp, Homo sapiens
tccctgcatcctaagactcgaaggcagcacaggacctggaaaaattacataatcttgacaaaacttttggaagtgtcagatgatccccaagtcttagctgtt

SEQ ID NO: 133810 - DNA, 102 bp, Homo sapiens
aagctctttatgagaatggcatctaagacgctgggtcgggccggcagcccgcgttgcgcccgcacgtgcacaagcagacggagaagacgacccgcgtgcgga

SEQ ID NO: 133811 - DNA, 89 bp, Homo sapiens
gccccgcggggccgctccggcccgctccgagaagctccaccatgaggcgaggtggatggaggaagcgagctgaaaatgatggctgggaa

SEQ ID NO: 133812 - DNA, 121 bp, Homo sapiens
tgggagtctccgcgtcccgctcgctgggagagaggtacctctccttttccctctccctttccctaagctctaagcgaaagacatgaggcctcagcctgaaatgaggttgttttgaggtcat

SEQ ID NO: 133813 - DNA, 100 bp, Homo sapiens
ctcggccgccctgcccagctgcctgcccccggaggtgcccacgcagctgcctggacaaggcagtaaacggctttgaccccgctcctcctcctcctggtct

SEQ ID NO: 133814 - DNA, 71 bp, Homo sapiens
cttggcctgggctgctacgtggctgccgctgacatccagcttgaattcggagtgatttaccactgcacaga

SEQ ID NO: 133815 - DNA, 84 bp, Homo sapiens
ccaggcggtgacagagtggagccatggctagaggtatcatgatattagctggtttgacatcaagtcatttgtgagtcatcagat

SEQ ID NO: 133816 - DNA, 75 bp, Homo sapiens
ccaaaggctcccccagcaagcacagctgtctgtaagtacactgttcacgaccagtgtgccatgaaagccctgcct

SEQ ID NO: 133817 - DNA, 101 bp, Homo sapiens
ccgggggcgcgggccggggtggcctcaggcccaggcccaaggccaagtgagagagcccaggccacaggacatgctgccattctgccaagagaggctcttct

SEQ ID NO: 133818 - DNA, 75 bp, Homo sapiens
acaaacataggatgttttggcgagagatgtattcagtggaggaagctgatgtgactccctgcatgtctcctctgc

SEQ ID NO: 133819 - DNA, 100 bp, Homo sapiens
ggttcacctttacctgagtattttactgagaacaaaagtgaagtggtggcaaagtgctggaccagatgttagaagtctccaatttgctctcgacaacaac

SEQ ID NO: 133820 - DNA, 100 bp, Homo sapiens
tgactttcagctatggaatcgcatgtttccccctccaaggacatccggacagccagcacagaggccgacaagaagctctctgagttcgacgtggagatga

SEQ ID NO: 133821 - DNA, 97 bp, Homo sapiens
tgcgaagttttgctcctggatgaatccaagttaacccttaccacccagcagcagggcatcaaggctgcctgctcgaggagggcctctgcggagcgtc

SEQ ID NO: 133822 - DNA, 100 bp, Homo sapiens
ttcaagcctgagtgtgaagattataaaagaagccaatttctggggtgctaactttgtaatgagtggttctgactgtggccacattttcatctgggatcgg

SEQ ID NO: 133823 - DNA, 105 bp, Homo sapiens
ctgccgtccttctccactttcgccagcccgtgccgcgagcgcggcctgcaggaggtaactaggatttctacctcaaccgcgagacctatgcaaggacggtgtgga

SEQ ID NO: 133824 - DNA, 75 bp, Homo sapiens
ttttgttgcaacttggagtgccagtgaatgataaagacgatacttctctcagctggcgccaccagagtttatgcc

SEQ ID NO: 133825 - DNA, 87 bp, Homo sapiens
tggaccttccggagcttctcagaagacagagggttttcttttgagatccagctatgggacacagcaggacaagaacgattcagaaag

SEQ ID NO: 133826 - DNA, 98 bp, Homo sapiens
agcgaagcatgcaaactgaacagttcgagattgtcgtcatcctagaaggcattgtggaaacaactgaaaatgcatccgatgcagatttatggctcctg

SEQ ID NO: 133827 - DNA, 82 bp, Homo sapiens
ctacctagcctcggaccccgactgccgctggtgcccggccccggactgcggaacccagcttagactagaaagtctagaagac

SEQ ID NO: 133828 - DNA, 110 bp, Homo sapiens
tgtgctcgctggcaccccgaacgggttgcttcccccgctgcgaggtcaaaatgcagatcttcgtgaaaacccttaccggcaagaccatcacccttgaggtggagcccagt

SEQ ID NO: 133829 - DNA, 98 bp, Homo sapiens
tcctgggcacccagaagacctaccagtgggtgcccttccatggggggccggctgcagtctcaggacctgggcaggcacctagcaggagtggaggacct

SEQ ID NO: 133830 - DNA, 100 bp, Homo sapiens
aagcctgcgctcagcatggaggtggcctgtgccaggatggtgggcagctgttgtactatcatgagccctgaccagggcagcccctttgcccaggagctgc

SEQ ID NO: 133831 - DNA, 83 bp, Homo sapiens
aaaggagcgggactccggacctccaggaggaaacactgcgctaacttatgcatgtgctggaggatttgttgacattgttaaag

SEQ ID NO: 133832 - DNA, 75 bp, Homo sapiens
gcagccatgactcttctaagtgatgcttctcatctgcctaaggcatctgaaatagctcaactcagtcaagaaaaa

SEQ ID NO: 133833 - DNA, 98 bp, Homo sapiens
cccctgccctgggagcgggttcaggaccgcggatcggaaatctatccatactaatggaaatgtaactggaactgactctgatgataaaatcaaggacc

SEQ ID NO: 133834 - DNA, 51 bp, Homo sapiens
gcagtaccctgatggagtcccttgcaggtaaaataccatgaagattttgaa

SEQ ID NO: 133835 - DNA, 75 bp, Homo sapiens
tggggccacttgtggtcgccgggagttcctctgtgacgagggtgcaggtatctctggggactacatcgatcgcgt

SEQ ID NO: 133836 - DNA, 100 bp, Homo sapiens
tgagattgacgcggtgaactctgtccagttttcaaaccacacagtgactcaagaccctcttaggaacttcttcactgaactcaaggaggagatcaggcaa

SEQ ID NO: 133837 - DNA, 96 bp, Homo sapiens
gtattgatgaaaagagggactgccataacattcccaaaggtaaagagaaatgtgtatgaccttacaagtatccccgttcgccaccaattatgggag

SEQ ID NO: 133838 - DNA, 118 bp, Homo sapiens
tgcagaggacacgaggcggcgggctggagacatggaccgcggcgagcaaggtggtataagttgaaatccaaaccaggaaagaaggacaaggagcgaggagaaattgaggttgacatcc

SEQ ID NO: 133839 - DNA, 90 bp, Homo sapiens
tggatgtaccatttaaagttaaagttggtcacatagatggaattgtcagccacttgaagaagcaggcaggaccagcttcagtgcctctca

SEQ ID NO: 133840 - DNA, 100 bp, Homo sapiens
gaggggatccgacttgccggcagaacttacgctgcgggaccccgggcactgttgctgctgcgggaggtctctagcatcaattcacgctttgccaaagtac

SEQ ID NO: 133841 - DNA, 100 bp, Homo sapiens
gctccgagaggtgaacagagcccctgttgttgacctcctgtactggagagacattaagaagactggagtggtgtttggtgccagcctattcctgctgctt

SEQ ID NO: 133842 - DNA, 90 bp, Homo sapiens
cgacagcaacccgaagacagggaaatttagggtgtccgcaatgttgccagtgtctgtctgcagattggctacccaactgttgcatcagta

SEQ ID NO: 133843 - DNA, 75 bp, Homo sapiens
gcgtttaatgaagacaatctcaaattcatcctcatggactgcatgatcttgattccacccaaaggtttattttca

SEQ ID NO: 133844 - DNA, 100 bp, Homo sapiens
ggcagcggcggaggaggaggaggctggagtgggcgcggaggcgaccgccatggcgttcctcaaactccgtgaccagagatggggtctcactctgtcatcc

SEQ ID NO: 133845 - DNA, 97 bp, Homo sapiens
agccaccggaacagagctgaggctggacatctgtgtcaaggatggttctgaaagaacatggtctcatgaacaggtacaccaggggttggaaaaacca

SEQ ID NO: 133846 - DNA, 83 bp, Homo sapiens
cgtaaacatctgggtgtatatcaaacggcaagatgtccagtaatgtcccggcggatatgggaatagcatttcaaggttcagtg

SEQ ID NO: 133847 - DNA, 82 bp, Homo sapiens
gaaagaagatgttaactttcaggccagaagcggactcctagaagaggggagcagcaaggatggaatgacagccgtgggccgg

SEQ ID NO: 133848 - DNA, 75 bp, Homo sapiens
cttcttcgagtatttgtagaagggttagaaaatggatttctgactggaatctcaccactgaaaaaaagcacaccc

SEQ ID NO: 133849 - DNA, 98 bp, Homo sapiens
gcgagaggtgcggcgaaggaggcagaggcacttatgcttgtcaggtgacagatcagtcagtgaaagcatttgctgaacactgtcctgagcttcaatat

SEQ ID NO: 133850 - DNA, 75 bp, Homo sapiens
ccactctaccgctgctgagctcaccggacccagcctggtggaagactcaaagccacccgtcatctcgttacaaaa

SEQ ID NO: 133851 - DNA, 100 bp, Homo sapiens
gggagcggcggccacggaggcaccatgaagaagtcttactcagtagcataatggcagaacctgtttctccactgaagcactttgtgctggctaagaaggc

SEQ ID NO: 133852 - DNA, 74 bp, Homo sapiens
tttaatggaaaatcgcttggttaaaacctgacacttttaacagctgtcaccactgactaaagaagagaaaactg

SEQ ID NO: 133853 - DNA, 50 bp, Homo sapiens
caggacttgagtaacagcaacatgggacttccttccccgcggttcaggaa

SEQ ID NO: 133854 - DNA, 101 bp, Homo sapiens
gccggggctctgggagcgtggtaacgtggctgcaaccttagcgacatcaggaagaacagggtcgaggatcgaggtaaaatgtccagtgatcgagctttgag

SEQ ID NO: 133855 - DNA, 100 bp, Homo sapiens
ccaggagttcgtctcttacgtctgcggaagtgcagctgcctcagttcttagcgcagcacctgtgaaactggaaaaacatctgcacagtgctagatctgaa

SEQ ID NO: 133856 - DNA, 90 bp, Homo sapiens
agcaaacgcactaggcatggaagagtcaaaacaactgcaaattcacctggatgatatagacggagtctcgctgtgtcgcccaggctggag

SEQ ID NO: 133857 - DNA, 75 bp, Homo sapiens
ggggcagagggaccactctgacaggctgagtatgagtttatcagctctggtctctacctagtggtgttattgcac

SEQ ID NO: 133858 - DNA, 95 bp, Homo sapiens
cggcgcccctgagccggccgagcggcgacggaccgcgaggtatttcaggacagccaggagggggcgcacatccgccgcgaaactgtgagcaagag

SEQ ID NO: 133859 - DNA, 80 bp, Homo sapiens
agatggtacaggcgctttacgagataacgaaggaggcccaacttcattcaataaggagcctgacggatttatcccagacg

SEQ ID NO: 133860 - DNA, 74 bp, Homo sapiens
atggtgggaaggacctgatgatacagaggagaagggagcactggctttgctttcatcaggccaaagatgccttt

SEQ ID NO: 133861 - DNA, 76 bp, Homo sapiens
atcaaagagcaaacagattcagtggcctgcattgcaacgaagtggtgaatctgttaaagtgcaccaactagatgtt

SEQ ID NO: 133862 - DNA, 98 bp, Homo sapiens
ggcgctgcctacggaggtggcagccatctccttctcggggcctttacaacaactaaacggacaggcattccagccccacgggaattttcagtaactgt

SEQ ID NO: 133863 - DNA, 114 bp, Homo sapiens
cgaaggacttcggcgcgggactcaagtacaactcccggcacgaggtgtcctgatggcaaatttcaagggccacgcgcttccagggagtttcttcctgatcattgggctgtgttg

SEQ ID NO: 133864 - DNA, 90 bp, Homo sapiens
gagaccccgtcggacccatggtttccagtgcagcgcggagtgggcgatgccagcgtgccagaatatatacagccctgctctgggacacac

SEQ ID NO: 133865 - DNA, 101 bp, Homo sapiens
cttcaggctgtggcagccactgcccaccaacacacccaaatcaatcaagatgaatcccagaaaaatggctacaaacttcctagcacatgagaagatctggt

SEQ ID NO: 133866 - DNA, 75 bp, Homo sapiens
gcggaataacatcggaggagaaggaagaaatgttggctatttggcgatgagaggtggtgaacagtgaccatactg

SEQ ID NO: 133867 - DNA, 100 bp, Homo sapiens
atgtggatttccgaggcaagaaggtgatcgaactgggtgcggggacaggcatcgtggggatcttggcagcgctgcagggcccttgtagctggaatttctc

SEQ ID NO: 133868 - DNA, 90 bp, Homo sapiens
ccaaaggcagggcaaggaaactggccacaagcatcttataagccattgttgaagcaagttgtggaggaaatatttcatcccgagaggcca

SEQ ID NO: 133869 - DNA, 100 bp, Homo sapiens
ttcactccctgtgccttcctttgttggtaccgacccatctataaggcctttagcaggtgaaccaggatgtgagccggcagctgcttcaggatgggtatca

SEQ ID NO: 133870 - DNA, 98 bp, Homo sapiens
tgccattcttatcatttctaagcaggttcatgccagcccagaacagagaatcagccagccaagccagggacttgttgtcaaagatgctagtgattgac

SEQ ID NO: 133871 - DNA, 82 bp, Homo sapiens
gccatgtcgggttattcgagtgaccgagaccgcggccgggaccgaggcccccctcccaactcccaaatcccccggcgtcgga

SEQ ID NO: 133872 - DNA, 100 bp, Homo sapiens
gatgcggcagcctgggcgggtgcaggagatcgtgggcgccctccgcaagggcggcggagaccggttacaggccaaacgtaccaagaaagtcgggatcgtc

SEQ ID NO: 133873 - DNA, 100 bp, Homo sapiens
caaatctgatttaagcttcacacatgtagaacagaagtcccaggagtcagtatcatttaaagatgtgactgtgggcttcacccaggaggagtggcagcac

SEQ ID NO: 133874 - DNA, 85 bp, Homo sapiens
cggcggcggccggcagcggcgagatcgtccaactgaacgtaggggggaccagatcttcataaacaatgaatggcatgattcagtg

SEQ ID NO: 133875 - DNA, 90 bp, Homo sapiens
tggaggatcaagaagggcttcgtgcccaacatgcaggtgttcagaatgccaggattccctcaccaactggtactatgagaaggatgggaa

SEQ ID NO: 133876 - DNA, 100 bp, Homo sapiens
aggccagagctggagacctagcacccagaagatgagaccgcaattcgagaatcaaagggccgggagcgatggatctatctggttcaatagatgacctccc

SEQ ID NO: 133877 - DNA, 96 bp, Homo sapiens
gcaggttcgagctttggcgagtgcagatacccttcatgagacccaactctgccacagctcatcctcggaggcaatcccggaaacctcttttataag

SEQ ID NO: 133878 - DNA, 75 bp, Homo sapiens
ctgaaggtccaggagtacccgaccctcaagagtgcctggtgaagaatgtgatgggatcactagcatgtctgcgga

SEQ ID NO: 133879 - DNA, 100 bp, Homo sapiens
caggcatcctgactcagatgcagtaggacaagcttgtacctccttttaaacctcaagtaacatctgagacagatactagatattttgatgaagaatttac

SEQ ID NO: 133880 - DNA, 100 bp, Homo sapiens
ggagaatatttaatggaaaatcgcttggttaaaacctgacacttttaacagttaattggccttggtcctcacagctccaaaaagaaacaggatctcgata

SEQ ID NO: 133881 - DNA, 83 bp, Homo sapiens
tccctttcctctgctgccgctcggtcacgcttgactaatagggatgccaaaggaaaaatatgatcctccagatcctcgcagaa

SEQ ID NO: 133882 - DNA, 98 bp, Homo sapiens
cctttgaccagtgctttctatagggccagacgggtgcagggaacaactgggcgaaagggcactacacggagggcgcggagctggtggacgcagtgctg

SEQ ID NO: 133883 - DNA, 100 bp, Homo sapiens
cacatgtcttcggctacactggtgaaggcatcgtgcctgctccacagcacatttttattcaaggttggagctgaaggagtgcccaggctgcggatggagg

SEQ ID NO: 133884 - DNA, 80 bp, Homo sapiens
ttccccgtcagcatcccagccgtgctcacgaggctgggaggcggcagaatgcagccagaggagggcacaggctggctgct

SEQ ID NO: 133885 - DNA, 101 bp, Homo sapiens
caagcatgtacggcaaaggcaagagtaacagcagcgccgtcccgtccgacagccaggcccgggagaaggagaagatgtcaaccggacactagaaggtggaa

SEQ ID NO: 133886 - DNA, 88 bp, Homo sapiens
gcctttctcattattataggctccctcctgctgtcaggctacatcagcaaaggggcctgggccgaggccactggtgcatatgttcccg

SEQ ID NO: 133887 - DNA, 82 bp, Homo sapiens
ccaaaattgtggaaaagtcactctgcgcgagcccagcattgacctgctgcaggccttcgtggagcactggaagggcatcacg

SEQ ID NO: 133888 - DNA, 82 bp, Homo sapiens
agcgtcgccgccgccgccgccatgaacaactcgggcgccgacgagatcggatttgcttgtaaatgcatcacgaagaggcagc

SEQ ID NO: 133889 - DNA, 74 bp, Homo sapiens
aggaacttaagagtcttaggagtcagttggatgtgacacataaggagatgtgttcagagcaacattgttttgtt

SEQ ID NO: 133890 - DNA, 74 bp, Homo sapiens
cggtgctgcagacggcgagacctcctgcacaggtattaatctctggagaagacacatccacagttagcactttc

SEQ ID NO: 133891 - DNA, 100 bp, Homo sapiens
cgaggacgaggacgaggacgtcaagcactatcctgaggagcgacatgtggttgaacgccatggacgggacacaagcggaccaaggaaagagtggcatggt

SEQ ID NO: 133892 - DNA, 100 bp, Homo sapiens
cgccgccggggaggagcagccgctgccgcccaggactgggcccttagtaagactttgaccccgacgcaggcttcagtgattgccgcggatcagaagcctg

SEQ ID NO: 133893 - DNA, 80 bp, Homo sapiens
tcaggccagaacttcagcaccctggctgagaaggttaagaatagacccaccagcatttcgtgggatggtcttgattcagg

SEQ ID NO: 133894 - DNA, 98 bp, Homo sapiens
ttccaaaacgcagccaccgccgtcaccaatctctacaaaggggatagggtctccctctgtctcccaggctggagtgcaatggtgggatcttggctcac

SEQ ID NO: 133895 - DNA, 100 bp, Homo sapiens
ttgaagtcaaagaattgaaaccctccaaaccacgtcatctgattgcaagcttcttccatctggtgaaaaagatgaacaccaggcgtgtctgatcttccca

SEQ ID NO: 133896 - DNA, 83 bp, Homo sapiens
caccggcggtctgataggctacatcgcggcatgagatgaagctgtgacagaagttattcttccaacacctgaaggttctacca

SEQ ID NO: 133897 - DNA, 88 bp, Homo sapiens
agtgcgggaccggcaaccgtagctgctgccgaccggtccaaatggcacattccgataccgtcgtgttctaagaacggaagcatctggg

SEQ ID NO: 133898 - DNA, 98 bp, Homo sapiens
ggtggagaacgtagtacctttcggggacattggacactactctaggaccggtgatctcagtgaaaaccaaattcaggcaatcccaaggaaagctttcc

SEQ ID NO: 133899 - DNA, 90 bp, Homo sapiens
atccgccttctgctccacatccaaatgacctgagcgggcccagcgtgccaggcatgggaggtatccagtcggaattctttattaacacca

SEQ ID NO: 133900 - DNA, 112 bp, Homo sapiens
aacaatgtgccaaggctgaaattatcctacaaaggtccctgattaccctccaaactatattttattccttaataacttaccagaagagactaatgagatgatgttatccatg

SEQ ID NO: 133901 - DNA, 82 bp, Homo sapiens
agctcacccaggaacaagtatctgacagcttactgaaacaaatgcaggtatcaagtgcttggactccatgtgctgtttcccg

SEQ ID NO: 133902 - DNA, 100 bp, Homo sapiens
ggcagagttaggtgaaatttcagacatacacaccaaattgttgagactctggaggctgccatcgagaacctcaatgaagccaagaactattttgcaaagg

SEQ ID NO: 133903 - DNA, 98 bp, Homo sapiens
ttgtcatgcaggaggcacaacagaatgatgattttaaggaagaaatctctaaacgttttaaatcacatactgaccaacttgtgttgatatttgctgga

SEQ ID NO: 133904 - DNA, 110 bp, Homo sapiens
ggggctggacctgctggtgttcgcccacgaccatggagtctccccaggacagtgctatcacccgggatattaaccgaacattcccagcccatgactactttaaggacaca

SEQ ID NO: 133905 - DNA, 100 bp, Homo sapiens
ttcgaagtgaagcttccagaaatggcatttagcccagacgaagttatacggaagcgtctcctcattgatggagatggtgctggagatgatcggagaatta

SEQ ID NO: 133906 - DNA, 100 bp, Homo sapiens
aaactagcagtttagggtgtcagattgtctttggctatagagtttttttttttaaagattactaaacatacaggaagtgataagaagtatcattcatcag

SEQ ID NO: 133907 - DNA, 83 bp, Homo sapiens
caattccgatggcaaagccgttgccaagaacacaccacagccatcagcactggaatgcaaagaccagaacaaacagaaggaag

SEQ ID NO: 133908 - DNA, 75 bp, Homo sapiens
aaatttaaggagttatatttggctaaagagggtggagccgccaccaaaatgcagattttcgtgaaaacccttacg

SEQ ID NO: 133909 - DNA, 98 bp, Homo sapiens
ggaagaggcactgctgagggggcgcgaggggaacggaggccagagctgcgcctcctgacaaggtgatccgggcgggccccgcaggaattttatcccct

SEQ ID NO: 133910 - DNA, 74 bp, Homo sapiens
cttggagtcatcaatttgatctttcagataatttcatctctcagaatttctacaagtgtgaaagaattagaaaa

SEQ ID NO: 133911 - DNA, 50 bp, Homo sapiens
cttccgaactgtgggcaaaaatggcgttcccagtgcagtgtttgacatcc

SEQ ID NO: 133912 - DNA, 90 bp, Homo sapiens
gccgccgtgcaggcggccgtcagcaacctcgtccggatcaccagaaactagaacgtgaggctcggatatgtcgacttctgaaacatccaa

SEQ ID NO: 133913 - DNA, 75 bp, Homo sapiens
ccagagtatgatctgcaacttggtgaatctggattgggaaagtcgacattaatcaactcattattcctcacagat

SEQ ID NO: 133914 - DNA, 101 bp, Homo sapiens
cggggaggagatcccggtgcagaagaacatcctggcggcggccagcccgtacatcaggcctcttcatgtgcttgtgtgcaacgcagcaacttttgctctac

SEQ ID NO: 133915 - DNA, 100 bp, Homo sapiens
ccgaggcgagcaggagcagggaacagatgtccatttctccatcttcactgctccagtccaagctatcatctcctagtcctgtataatacaggttgagcat

SEQ ID NO: 133916 - DNA, 82 bp, Homo sapiens
ggtgcccccggcctgcgctcccatccacacgctcgagtgagcctcgcagctggtccctgctagagcagctgggcctggccgg

SEQ ID NO: 133917 - DNA, 91 bp, Homo sapiens
acttcttagacttggaggaggtatgcctggactgggccagtttttcagaagaagtgaagtcaagatgaagaaccatttgcttttctgggga

SEQ ID NO: 133918 - DNA, 49 bp, Homo sapiens
cggcgggaggagcctgttcccctgagtgtcaaatcaacagtgccttgac

SEQ ID NO: 133919 - DNA, 83 bp, Homo sapiens
gggcaagagaggtggatctgtgagggaaaagacccaataggataactcaagttactggatatccattaccaaaacttgacatg

SEQ ID NO: 133920 - DNA, 82 bp, Homo sapiens
gaaaaccggggagatctatttggaatgtatctaactccaaagaaaccatcagaggtaacagtagagacgggggttcaccatg

SEQ ID NO: 133921 - DNA, 97 bp, Homo sapiens
atgttcacttgatgaaaactcctccaaaagaaagctcctgctgcttctgtaccccgcctgtccctcccagctgcgcagggccccttcgtgggatcat

SEQ ID NO: 133922 - DNA, 78 bp, Homo sapiens
gcaagtcgagaggaaactgttgtgcctcttcatattggcgatcctgttgtgtcttgaggaccggcccagctcaggctc

SEQ ID NO: 133923 - DNA, 89 bp, Homo sapiens
gggaaaaattattttagttttggaaagatcctcttcagaaataccactatcttcctgaagtgtggatatggttatagaagaagtggccg

SEQ ID NO: 133924 - DNA, 87 bp, Homo sapiens
accctccatcttcaacactctgaagagggtgtccgcaatgttgccagtgtctgtctgcagattggctacccaactgttgcatcagta

SEQ ID NO: 133925 - DNA, 75 bp, Homo sapiens
gcctgctccaaactccaccagccccgtgtccttcattgccacgtacaggcacaacactttcactgggcgatggct

SEQ ID NO: 133926 - DNA, 74 bp, Homo sapiens
tcgtccagtggctgaggctggacagagcacagatgtgtgcaacagcaccgatcttccggaagtcgagatcatta

SEQ ID NO: 133927 - DNA, 75 bp, Homo sapiens
gaaaatgactttctgccggtagaaaaggatttaagaggggtgcagatcccggaatgcctgaaccaactgttttga

SEQ ID NO: 133928 - DNA, 88 bp, Homo sapiens
gaaaggactgaccatgctggatcacgaacagtgttttacgacgacgacttgactgatgctgtgtttaaaacgctctcccgactcgccc

SEQ ID NO: 133929 - DNA, 100 bp, Homo sapiens
gtttctccattctgttggttttatgcatctttatccaatcaagtgcccttggacaaagcctgaaaccaggacaggcgacactaacaggtgaagatctcgg

SEQ ID NO: 133930 - DNA, 100 bp, Homo sapiens
gaaagatctgatgtgcaaatacacgtgcccactttcaccttcagagtaaccgttggtgacataacctgcacaggtgtctctgccaacagactcatgggtg

SEQ ID NO: 133931 - DNA, 75 bp, Homo sapiens
ctcagggctgcggccgcccgaagaggagagagcgcgggcctctaggaaggaaagaacgcgctttgagaatttggg

SEQ ID NO: 133932 - DNA, 90 bp, Homo sapiens
aatgtcgaccggggcgcgggctccatccgggaagccggtggggccttcggaaagagagagcaggatttctctgcctcttccaaacttttc

SEQ ID NO: 133933 - DNA, 83 bp, Homo sapiens
gaagatgaggaggtcgctgagagctgggaagaggcggcagacagcgggaatccacattcatctcaatggaaggatcctgcctt

SEQ ID NO: 133934 - DNA, 75 bp, Homo sapiens
tctgctcctaaccaaccccgacaaaagaaagtgactgagaccgaagatgatagtgatagtgacagcgatgatgat

SEQ ID NO: 133935 - DNA, 74 bp, Homo sapiens
cggatcccgtggagtgaaggtcgcaccgcggcgatgagctctctccggaacagcacaacctttctttatactcc

SEQ ID NO: 133936 - DNA, 90 bp, Homo sapiens
ggaggcctcagtaatattacccattctgaagaaaaaactagccttcctttcagatggctattcatatgaaaaggaagcaatggaaaattg

SEQ ID NO: 133937 - DNA, 100 bp, Homo sapiens
ctgacgggctcttccacctcttactccttcttcccggacaagcctatcacccaggtaagaaggtgttttaccctgtggtgttcagtctttacaatcctgc

SEQ ID NO: 133938 - DNA, 98 bp, Homo sapiens
cttccccgtgcgtgtgccctttgaggccttcctggccaggcctccaagcagcccggaggctggggctgaggacagcatagactcacccagtgcccgcc

SEQ ID NO: 133939 - DNA, 89 bp, Homo sapiens
agccacccccaggacgccttctgcaactccgacatcgaaggatgccctgcagtggtctcgccatccagctacagtggagggagaggagc

SEQ ID NO: 133940 - DNA, 85 bp, Homo sapiens
cactagtcgcgggagccacgcagaggacgccggaacaccctggaagccgagaaatgacggcaccgaaagcgaaggaagctcctgc

SEQ ID NO: 133941 - DNA, 80 bp, Homo sapiens
gctcctgcctcccccgtcccaccactgaggctgttgggccaggccagtcatgctagaacaataccctctaccatctgctt

SEQ ID NO: 133942 - DNA, 90 bp, Homo sapiens
gtggagtgggctgctggaggagctggccaggaacgaaaccagcctggacaccaagtctgtgtcagaaggccacctcaagaggaacatcgt

SEQ ID NO: 133943 - DNA, 100 bp, Homo sapiens
tctgccaccatcctgggttgacaattctacacaaggaggtatctggtgacccatctcatgggggcagatctgaacaacattgtgaaatgtcagaagctta

SEQ ID NO: 133944 - DNA, 80 bp, Homo sapiens
gcatctgcgatgtgaggaaaggcacctccaccagattttgcctgcctgagctcctctagtagtggccacaattgccagag

SEQ ID NO: 133945 - DNA, 75 bp, Homo sapiens
ccttccagctgtttgaccgaacaggacactcatgaggaccatgatacttccactgagaatacagacgagtccaac

SEQ ID NO: 133946 - DNA, 83 bp, Homo sapiens
ctcagcgcggacctagacctggaatcgcccaagtccctctactcgcgaggctctgtcaacagactcaatagaaagactcccag

SEQ ID NO: 133947 - DNA, 100 bp, Homo sapiens
catggtgcaaagataccagtctcctgtccgagtctacaagtacccgtttgagctggtcatggcgaatctgtctatgatcttctcccaaaggagttacagt

SEQ ID NO: 133948 - DNA, 78 bp, Homo sapiens
cactactgaccaagatcttgtcaagctgtgtcagccgaaacaaacgtacttggatttaaaggtcctaggaaaatgtct

SEQ ID NO: 133949 - DNA, 75 bp, Homo sapiens
gcccttcagaatatttccctcaagcacctggggactgaaatacaaaactcagccaagaatgtttaaagcagctgg

SEQ ID NO: 133950 - DNA, 51 bp, Homo sapiens
acagacaatggagaatggggctctcattcttgtcacaccatgtctgaccgg

SEQ ID NO: 133951 - DNA, 99 bp, Homo sapiens
gctcgggcaggccttccgagaggaacctctatgccgacatcgacgccgcctggcaggccctgcgcaccaggcaccgaccgtcacgagctaacttcctgg

SEQ ID NO: 133952 - DNA, 75 bp, Homo sapiens
ctggagcctcagttggaagcagccgatccagcctgcggagcctgtggggcagatgctattaactgagtacttgga

SEQ ID NO: 133953 - DNA, 75 bp, Homo sapiens
agatcggctgcggcaacttcggggagctccgcctaggatgtgatcttcgtggtggaaagctaaattttaaaacca

SEQ ID NO: 133954 - DNA, 97 bp, Homo sapiens
ccggccaacgggctgcgcagagccgcggcgccggagcaagtctggaaaagtttgaaattccagtaaaaattcgtttgagtcctgaaccgtggacccc

SEQ ID NO: 133955 - DNA, 100 bp, Homo sapiens
cgcgggagcccggggaacagcggaggctctgtcggtggtgagcgacgaccagtccctctttgactcagcgtacggagcggcagcccatctccccaaggcc

SEQ ID NO: 133956 - DNA, 98 bp, Homo sapiens
agggctccaccccgtcgcctcgacagaaaagactgtatcttcaccattgacccatcaaccgcccgagacctcgatgatgccctctcctgcaagccact

SEQ ID NO: 133957 - DNA, 100 bp, Homo sapiens
cgcgccaccgagtccggaccggagactttggggcctaactagaacccctgaacagtgcccaagtgttgtctctttgttgtcagagagttacaaccctcat

SEQ ID NO: 133958 - DNA, 75 bp, Homo sapiens
ccgactgtaagcaatctacgaagaccgaggaaaagctgcgggcaagacatctgtatagattctgcttcatccgtg

SEQ ID NO: 133959 - DNA, 100 bp, Homo sapiens
caccaaggtacccaatgcctgtttattcaccatcaacaaagaagaccacacactgggaaacatcattaaatcagcccccaggtggtgaggaccccccact

SEQ ID NO: 133960 - DNA, 101 bp, Homo sapiens
cagctatggaggacttgcttttgttgaactggaatgtatcctgtcaggtataatgtcagtgaatggcaagaaagttcttcatatggatcgaaacccttact

SEQ ID NO: 133961 - DNA, 96 bp, Homo sapiens
ctgttgataaaatgaaactagtggaatctttgtgtcaagtattacagtctgctgggtttttcagcattgaccagcgaaccatccaggagctgtttg

SEQ ID NO: 133962 - DNA, 100 bp, Homo sapiens
agaatagtggttcttaactctaccatatactccttgacgacagggactaccaccttcaccttcatgcccacaaggtgtcacactgcaaggctgagctgac

SEQ ID NO: 133963 - DNA, 83 bp, Homo sapiens
ggagaagcggcggcgccgggaagcaggaagactatgaccgtctgaggcctttatcttacccaatgaccgatgtcttccttata

SEQ ID NO: 133964 - DNA, 82 bp, Homo sapiens
acgagtttgaagagttccctgccgaaggattctttctactaatccagatacttgttgaagtgctgactagtttcttggggaa

SEQ ID NO: 133965 - DNA, 75 bp, Homo sapiens
tcgcgccggatgcggagcgcggtgctgccggtggagcttcagacaaatttacatgtattggagaccagaccagaa

SEQ ID NO: 133966 - DNA, 100 bp, Homo sapiens
accaggaaaaactgtaaatgatgtcaacagcaataataacatgtcttacagggatgaattgtaaaagcaacatcagcttgaccagtataaaattacagtg

SEQ ID NO: 133967 - DNA, 82 bp, Homo sapiens
ttgttcctgagggagccaaaaaagattagagagaactcccctgcagtctctcctaccacaaacagcacagctccatttggcc

SEQ ID NO: 133968 - DNA, 75 bp, Homo sapiens
aagcctggatttttggtactgcaaacgagacgtcccagtgatcgggaggagtgggaagagcttcagctacaacca

SEQ ID NO: 133969 - DNA, 98 bp, Homo sapiens
aacaaataagttatgctatgaggatgacaaactctggagtaattggagccaagaaatgagtatagggacttgcaacaaagcattgccagagaacctag

SEQ ID NO: 133970 - DNA, 73 bp, Homo sapiens
aaagcattgctggtatttcgaaggactctatccaacctattatatgtcaaaatgcagatcttcgtgaaaaccc

SEQ ID NO: 133971 - DNA, 95 bp, Homo sapiens
agtggttcatgtcgtcgaagtcttttgagccccaagaaaactcagaggcgacatgttagtacagcagaagagccaataatttctgaagatcagac

SEQ ID NO: 133972 - DNA, 90 bp, Homo sapiens
gcagcccccgaaggccctatcaggacatggagtatgaaagacgcccaagagttccatggcctccacttcccgccgccaacgccgagaacg

SEQ ID NO: 133973 - DNA, 87 bp, Homo sapiens
gctttgaggccagcaccgacgcagccctggagggcacagactccatcaagatggagaacgggcagagcacagccgccaagctggggc

SEQ ID NO: 133974 - DNA, 90 bp, Homo sapiens
gtgaagatacataagatcgtagccagacccccaggaacgtgttgtgggctttcacgtactgggtccaaatgctggagaagttacacaagg

SEQ ID NO: 133975 - DNA, 83 bp, Homo sapiens
gtccgagaacgccgcgctgcgcatctccaacagcgacctgagcgctgcggttggatttctcacgatgtccagtgttatctcca

SEQ ID NO: 133976 - DNA, 82 bp, Homo sapiens
cttgggacccaccgctgccctcagctccgagtccagggcgagccctgaaggatggctgccatattgggagacaccatcatgg

SEQ ID NO: 133977 - DNA, 98 bp, Homo sapiens
catgattcagagcaagtgcagtgtgcccttcacccctattgagatctgggacttggctagtggcaaattaaaactgtcattgactgggcatattagta

SEQ ID NO: 133978 - DNA, 92 bp, Homo sapiens
gactgggcttactacaaggccaatgtggccaaggctggcttggtggatgactttgagaagaagtatatttatcctctggcacgggaaccttc

SEQ ID NO: 133979 - DNA, 76 bp, Homo sapiens
cgacggcctcagcaggcggggaagatgaaaggggtcctggttcttatatcatgaactacataatgtacatcttctg

SEQ ID NO: 133980 - DNA, 97 bp, Homo sapiens
ggctttggagcaggcgctgggcgagccgtgcgatctggacgcggcgctgctgaccgacatcgaaggaacagcttgagaactatgacttcaccaaatt

SEQ ID NO: 133981 - DNA, 82 bp, Homo sapiens
ggcgaagcacgagcagatcctggtcctcgatccgcccacagacctcaaattcaaagagtcatcttagtgggatttggggaag

SEQ ID NO: 133982 - DNA, 75 bp, Homo sapiens
aagagccaggaccccctagaagtctagaaatggagatcatcacctccatcctgctgagcgggcggatcgggccca

SEQ ID NO: 133983 - DNA, 76 bp, Homo sapiens
tgaaattcaccagtgaagccgtgacatcctgggatattctttgttgagagaaggatgccctgcagtggtctcgcca

SEQ ID NO: 133984 - DNA, 100 bp, Homo sapiens
aggttaagctggctgtcctgaaatattataagcctgctgagggatgcccaagaagttccagggtgagaacaccaagtcggcagcggcccgggcacgtagg

SEQ ID NO: 133985 - DNA, 74 bp, Homo sapiens
tctgtgacttcccatgaaacttctgatttcttccctaggcctttacgatgaaggatttgatgccctggatccct

SEQ ID NO: 133986 - DNA, 100 bp, Homo sapiens
tcaccgactccttcctgctgcggttcctgcgcgcccgggatttcgatctggacctggcctggcggagaaagcagcagctgccaacatagatgaagtgcag

SEQ ID NO: 133987 - DNA, 88 bp, Homo sapiens
cgcaaggacagcgcgaggtccgcgcagcccagcgcagccatggagtgcatccgccccaacccttttccccctcgtctcctgtgagaat

SEQ ID NO: 133988 - DNA, 101 bp, Homo sapiens
tcagcagatcctgaaagccgtgcggatgaggaccggagcggaaaaccttctgaaatatggaagaaagtagcagtgttgccatgttggtgccagatattggg

SEQ ID NO: 133989 - DNA, 75 bp, Homo sapiens
agagggaagacacgcggaaacagattacacccatgctaatttggtggataaggcattgcagctcttgaaggaaag

SEQ ID NO: 133990 - DNA, 98 bp, Homo sapiens
ggttctcccggcagcagcccgacgcaaaccaaggatctggggatcttcgcactatcccaaggcctccggtgtggctgtctctgatggtgtcatcaagg

SEQ ID NO: 133991 - DNA, 100 bp, Homo sapiens
gacgaggaagctggtggtgttgatcactcctcaggtgtccagcctgctcagatgtcagtattgaatatggtggtgaggcgtgaccctggcaacactgaac

SEQ ID NO: 133992 - DNA, 75 bp, Homo sapiens
cgccgccggacgtcggcaacggagaagaactgataaatttcaaacggaagagagtggcagcatttagaaagaatc

SEQ ID NO: 133993 - DNA, 80 bp, Homo sapiens
aaggagggttggctgcacaaacgaggtccaggacgctgtgaaatgccgtgtggttgaccggcaggaggagggcaacgggg

SEQ ID NO: 133994 - DNA, 83 bp, Homo sapiens
gaagacgttccttgaggaggtttgaaaaactgtttttggaaggaagaaagatggaaagcggtgcagttctgctggaatccaaa

SEQ ID NO: 133995 - DNA, 78 bp, Homo sapiens
tggccccagtgctgcgtccttatcagccgagccgagcccgtgttctggtactacgtgaaggaggtcctcaacaagcac

SEQ ID NO: 133996 - DNA, 98 bp, Homo sapiens
atcgaggacgacttcaactatggcagcagcgtggcctccgccaccgtgcacatccgaatggtttggaaattttagcattcaggtgccaggaatgcaga

SEQ ID NO: 133997 - DNA, 98 bp, Homo sapiens
cagcaccgcagatgttgtcaaggtggcctaccaggaggccaggggtgtcgccatggctttgatgacagtagggaaagaaccatttcctaccatttacg

SEQ ID NO: 133998 - DNA, 126 bp, Homo sapiens
gtctgggggttcgcgcccgccgacccgcgccctgctccctctcagcacctgggcggacgggagctgcagtccatggctgaccaggagcaggtgtcaccagccgccatcaagaagaccatcctggac

SEQ ID NO: 133999 - DNA, 100 bp, Homo sapiens
cccgggggcgcgggccggggtgggtgagaactctgtctcagtcgacgggaagtgcagtgactccacgctactgagcaacttgttagaagagatgaaggcg

SEQ ID NO: 134000 - DNA, 100 bp, Homo sapiens
cgaagctggccgagcaggctgagcgatacgacgatatctcccggggccaattcagcatctctacctggccatcctaacaaggtgatttgtgaaagggtga

SEQ ID NO: 134001 - DNA, 82 bp, Homo sapiens
caggagttcgtctcttacgtctgcggaagtgcagctgcctcagttcttagcgcagaggcagaagaggcctggaccttggcgc

SEQ ID NO: 134002 - DNA, 80 bp, Homo sapiens
tttgggttgatgctgaattagggagtgatatttaccttgatggtggaataacactcccatggatgaagcactgcactttg

SEQ ID NO: 134003 - DNA, 82 bp, Homo sapiens
cctcctccttggtcgccgcgtccttggctggcgtggcaccatgccggtggaaaggatgcgcatgcgcccgtggctggaggag

SEQ ID NO: 134004 - DNA, 50 bp, Homo sapiens
ctcccctccactttctcccggctcctcaggcagtgcaggacaacccagct

SEQ ID NO: 134005 - DNA, 100 bp, Homo sapiens
tggagcactcttggaaagccctggtacatgacggaagaccgatcagaaaggatttcttaactggcactgctggcagagacggagaccgcggctggggcaa

SEQ ID NO: 134006 - DNA, 100 bp, Homo sapiens
gccgggggagcggggccttccacaccccctccgtgggtgtgtgaagcatcaagtgtacctgatttgtgaacctatcttgcttcagttggtttcctcctaa

SEQ ID NO: 134007 - DNA, 98 bp, Homo sapiens
cagctggtggctggagcgaccccttgttctttggtggcgctggtgcagcggaactgctgcctgacgctctgcaacttcagcatccccgaggagctgga

SEQ ID NO: 134008 - DNA, 100 bp, Homo sapiens
ggaaggaaatggcaccgtcatgggtgctgaaatccggcatgttcttgtcacactgggtgaggaagaggatggagatgaagatgaggaagctgagtcagct

SEQ ID NO: 134009 - DNA, 90 bp, Homo sapiens
cctcatcacctccagtccacatccagccgccgtcagccaatccagtggactcgcagccaaatttgtcatccactgtcacatccctcagtg

SEQ ID NO: 134010 - DNA, 94 bp, Homo sapiens
gtcggtcgcctagtctggagaactagtcctcgactcacgattggctctaccagtgcacctggacagggaggaatcctggctcagcgggagtttg

SEQ ID NO: 134011 - DNA, 100 bp, Homo sapiens
gaactgctcaggcagctccgtagcatgaggaagagtcaggggcacagagagatggagagagacctagttaggtattaatctctggagaagacacatccac

SEQ ID NO: 134012 - DNA, 74 bp, Homo sapiens
cttccgtgggcaacgtggccgacagcacagattcctggtcgggtggcttccagtggtcttcagtctgtcgtgca

SEQ ID NO: 134013 - DNA, 101 bp, Homo sapiens
gtggtggttaaaccatgttaaggaggattttacagagggtgtactttcggctccatgcttccatcctgaagctcctggggaagcccgattctggggttggt

SEQ ID NO: 134014 - DNA, 75 bp, Homo sapiens
tatacttttacaatttttgaaaattgcagagtggtatttccaacttggggatgtttggcatcgacgaatttactg

SEQ ID NO: 134015 - DNA, 90 bp, Homo sapiens
ccccccacccatcggctgttgcaagagctgctcaacatgatatgtgcagcgggggctacagcgagtggggctagatccccagctgccact

SEQ ID NO: 134016 - DNA, 100 bp, Homo sapiens
aacgtggggtcatcatcaacactgccagtgtggctgccttcgagggtcaggtgtgtgggcagggggtgctgtggaatctattgccatgaagaaccccaaa

SEQ ID NO: 134017 - DNA, 100 bp, Homo sapiens
cctcttctgccagaagcgttttgatgagtccatgcaggtctttgctaaacttggcacagttgatggagaaccttgtgacctgtctttgaatataacctgg

SEQ ID NO: 134018 - DNA, 95 bp, Homo sapiens
cccgtgacctgaaggctgtcaagtatgtggagtgttctgcacttacacagcttagcagtgtctgcaaaaacgaatcttttcctacaacctgttaa

SEQ ID NO: 134019 - DNA, 96 bp, Homo sapiens
cctttccaactggacagcaccatgtccaccaaagcggagcagtgttcggctttccagtttggcagcagcactacaaatttcaacttcacaaacaac

SEQ ID NO: 134020 - DNA, 100 bp, Homo sapiens
aaagaaaagttgtttcctccaacattgatgttcctccagcaagggaactctaatgatccaggacaaagaagttaccctggagtatgtatcaagcctggat

SEQ ID NO: 134021 - DNA, 74 bp, Homo sapiens
ctgaagagggaagacacgcggaaacaggttttgaacgaagaatgtgatcagaactggtacaaggcagagcttaa

SEQ ID NO: 134022 - DNA, 75 bp, Homo sapiens
ggaatgctggcagacaaaataggaatatttccaatttcatatgttgagaatggacagcaaattatggatgaacct

SEQ ID NO: 134023 - DNA, 98 bp, Homo sapiens
gggcggcgcgcggcggcggcgctcggcgatggtaggcgtccctggagcggccgccttccagcgaaactgttgtgactgaatatctaaatagtggaaat

SEQ ID NO: 134024 - DNA, 97 bp, Homo sapiens
agcacttttcacagcatcagcagtcatctcactagttatgttcaaaaaacatgcaatgatgctacctgttctgacccatcatatccgctaccaccaa

SEQ ID NO: 134025 - DNA, 73 bp, Homo sapiens
gctgtgctacagccatcgccaagaatcctgccgcctttgacttcctgctgcagcgggttgagaagaccttgcg

SEQ ID NO: 134026 - DNA, 83 bp, Homo sapiens
tggacatgagccccctgaggccccagaactatcttttcgtgcctccggagccagcgtggtggccatagacaacaagatcgaac

SEQ ID NO: 134027 - DNA, 100 bp, Homo sapiens
cgggtcctcgtccagaccggccaccggagcttgacctcctgcatcgacccattcgcaacgacaggcgcctcctctgccaaccggtttgtcagcatcggac

SEQ ID NO: 134028 - DNA, 97 bp, Homo sapiens
ctactctggagttgaggtgcgagttacaccaaccaggacagaaatcattatcttagccaccaggattgaaatgtcaaaagatgcacttcctgagaag

SEQ ID NO: 134029 - DNA, 100 bp, Homo sapiens
accgcatcgagaaggagcgcaagcaccagaaggtgggatgcagatcttcgtgaagaccctgactggtaagaccatcactctcgaagtggagccgagtgac

SEQ ID NO: 134030 - DNA, 74 bp, Homo sapiens
tgcagtacctgcagaaggtctctggagacatcttcagcagcgcacaactacgggattggcgccgccgcctgcgt

SEQ ID NO: 134031 - DNA, 80 bp, Homo sapiens
cccgcaagcccagacaatgccggtggaggaatttgtggctggctggatctctgtcaaaaggaccatacctcctgaactgc

SEQ ID NO: 134032 - DNA, 89 bp, Homo sapiens
ggtggaagacccattacatcgttggctacaacctcccaagctatgagtacctctataatttggatctgactgcagccatgagcagcaat

SEQ ID NO: 134033 - DNA, 75 bp, Homo sapiens
cgaggccttattgaaggaaatgacatttatggagtttcataatagaagagcagagtttcttactatgtgaagatc

SEQ ID NO: 134034 - DNA, 83 bp, Homo sapiens
cccgctgccactgccgcagcccaatacctgcaaagacaaaggagggcgagtttaccctgtcggccatgacatctgggattcgg

SEQ ID NO: 134035 - DNA, 90 bp, Homo sapiens
tgaagtaactcggatggccagaaagtttactcatatttcagctctgttacagtgggctcgggatgagtttgaaggcctcttcaagcagcc

SEQ ID NO: 134036 - DNA, 50 bp, Homo sapiens
cctgtgtgaaattgcttctgtcaaagagcaaagactcaggtggactgaag

SEQ ID NO: 134037 - DNA, 90 bp, Homo sapiens
ggggcccatagtttcatctctggactccctcagggctatgacacagaagaacatgtgatcatccaggccgagttctatctgaatcctgac

SEQ ID NO: 134038 - DNA, 82 bp, Homo sapiens
gaggaaacagctggctaagctcatcattgttactgatctgcgagtgaagagggacgagggaaaagaaacaaagccacagacg

SEQ ID NO: 134039 - DNA, 100 bp, Homo sapiens
ttttccgcaaccgcttcttgctgctgctggccctggctgcgctgctggcctttgtgagcctcagcctgcagttctgtatctcacatgatgctattgctca

SEQ ID NO: 134040 - DNA, 75 bp, Homo sapiens
aggacaagcaaacctcagcctggaggcacttttccagctgttctttggatggaaagtctgtgcttgtgaatggga

SEQ ID NO: 134041 - DNA, 100 bp, Homo sapiens
gcggcctctctggcagcagacatcagccacgcatctgaccttgttggtcctgcacccagacctcacgacgcacctcctgcctctccgctgcttttggaaa

SEQ ID NO: 134042 - DNA, 98 bp, Homo sapiens
ggcggggacagcggggacggcacggcgcgcgcagccctgcttcagtgacaagaccagcaacctggaggcttatgtgaaatggttcaacaggctgtgct

SEQ ID NO: 134043 - DNA, 83 bp, Homo sapiens
accgacatggcccggaggcagcagaaggtcccagctagtccacagggaccagcagtgccatggaaggatttaacatgtctcag

SEQ ID NO: 134044 - DNA, 75 bp, Homo sapiens
agtatggcccggcacgtgttcctaacggggcccccagtctcggaagggtgctgacctggaccgggagaagaaggc

SEQ ID NO: 134045 - DNA, 74 bp, Homo sapiens
ttatatggccaaggagaactcccccagtgtttctgcagcttgaaattttgacaaacttggcaaatgaagccaac

SEQ ID NO: 134046 - DNA, 90 bp, Homo sapiens
gccaaagaggaaaccaagtttgcacaggtcagaaacccttcccttgtcaaaaatgcgatgccttcttttctaccaaatctaactgtgaac

SEQ ID NO: 134047 - DNA, 82 bp, Homo sapiens
cccgcggcctggagtacaacgaggtcaacgtcaccctggacctgggccagcgtgaagcctctgcgggccttcttttcgtctt

SEQ ID NO: 134048 - DNA, 50 bp, Homo sapiens
cagcacaggacctggaaaaattacatctgatggtgagaccattctaaaag

SEQ ID NO: 134049 - DNA, 75 bp, Homo sapiens
ccgttctgagacatacaaataatagaagctttggagaaaatgaatgaagatcacgttcagaagaatggaaggaaa

SEQ ID NO: 134050 - DNA, 75 bp, Homo sapiens
gcatggtggcgcccctccccgtgaccaccgctgcgttttctcgggtgccggtggtggtgtgcacattgagccccg

SEQ ID NO: 134051 - DNA, 82 bp, Homo sapiens
catgttcctgggcaccggggagccggccttggacacggaagccatcttcgacaagagcacagggaaggttgttttgaagacg

SEQ ID NO: 134052 - DNA, 100 bp, Homo sapiens
gagaacttcctgatctctctcgctgtgagacatgtctgagactcctgctcagtgtagcattaaggtatttctggtggtcgcattcatatgtcagttttag

SEQ ID NO: 134053 - DNA, 82 bp, Homo sapiens
cgcgaggaggcgcgggaggtgttcgagaacgaccccgagacgaatctccggcctgtgaaactgtgaggggattcggccaaga

SEQ ID NO: 134054 - DNA, 95 bp, Homo sapiens
agcctgcggcgttttagaaacgattcgcattagtgcacagagctacccttccaggtggccaaacaggagaagaagaagaagaagacaggtcgggc

SEQ ID NO: 134055 - DNA, 75 bp, Homo sapiens
aaataaagctcctgggcaaggggacgtctgcagctgactatatgttctcctttcagccaagacctttcaccagtg

SEQ ID NO: 134056 - DNA, 97 bp, Homo sapiens
cccgcttgccggggtggtcctcttccctttgtcggattgcagtaacggatgctccgcagagtgtaccggagaaggaggatcaaaagaggtggtgggg

SEQ ID NO: 134057 - DNA, 74 bp, Homo sapiens
tgtctaggtgagtcgcggtgggtcctcgcttgcagttcagcgaccacgttcaaatctgaacatcaatgatgtac

SEQ ID NO: 134058 - DNA, 75 bp, Homo sapiens
atggctctgtcggtgtaaaaaagccccaaggcccagaagaaatttaagcgtcttatgctgcatcggataaagtgg

SEQ ID NO: 134059 - DNA, 75 bp, Homo sapiens
atttgtatagagatgtgatgttggagaactacagaaacctggtctccctagagctctctttacgagaaaaggaag

SEQ ID NO: 134060 - DNA, 98 bp, Homo sapiens
tagccgggagttacaccgccaccgccagttaagatccttctattctacgtaatattttatggctgcctggctggcatcttcatcggaaccatccaagt

SEQ ID NO: 134061 - DNA, 100 bp, Homo sapiens
tgatattcaactgtcattgccatccagtccagaaccagaagatggtgataaagtatataagaccccaggcaggcacagtcttccccgccgtggtcctatg

SEQ ID NO: 134062 - DNA, 122 bp, Homo sapiens
ctgggaggtcatcgaaggctaccgggcccagcacagccagcaccgcacgccctgcaagggaggggagtcctcagcactgcctcttctatttccctgtggaaacctcaaaagagaaatcctgc

SEQ ID NO: 134063 - DNA, 98 bp, Homo sapiens
ggcagcggtcccagcggcagcagcagcggcgggaggagcctccgggatccgagtgaagcctgacaggaccggtgtggtcacggatggtgtgaagcact

SEQ ID NO: 134064 - DNA, 100 bp, Homo sapiens
cgtgggggagccgggccctcccctcaggaacgtgtcccggggccgacccggcccgtagtgtggaagcagcttcagaggaagtggcttttaggaagaagag

SEQ ID NO: 134065 - DNA, 75 bp, Homo sapiens
cttggaatccctcagaacactattttggtgcagactttgctgagggtgacccagattcaattagcagagcctcac

SEQ ID NO: 134066 - DNA, 100 bp, Homo sapiens
tcttgctgctctggaagacagtattggatctatcttgggatcccatggctttctttactgggctctggggccccttcacctgtgtaagcagagtgctgag

SEQ ID NO: 134067 - DNA, 80 bp, Homo sapiens
aacctcacattgctcctgctgctgctgcagctgctggagccagttctgcttctcggcaaggagcgatttgctggtgtaga

SEQ ID NO: 134068 - DNA, 82 bp, Homo sapiens
cctggacgagctgcggcagttccaccacagcagaggggggatatgagactttctactcggaatatcctgagtgttgcgtgga

SEQ ID NO: 134069 - DNA, 75 bp, Homo sapiens
agcaaatacaacccagcagtaggttattgaagacagcagccccaggttctcaacaggaggtgtgtagaagcggcg

SEQ ID NO: 134070 - DNA, 96 bp, Homo sapiens
gccggccttgaggtggaggactcagaccctgagcctgaaggggaggcggaggacagaggcccacctcacagagctgctggaggagatatgtgaccg

SEQ ID NO: 134071 - DNA, 100 bp, Homo sapiens
agccaataaggtggaaattgagaaaattcggtcctcctgtcaggcgccagagaggaagaagggatcgtctgtctcgacataattccattagtcaagatga

SEQ ID NO: 134072 - DNA, 89 bp, Homo sapiens
tgcgagcgagccgcgaaccgagcgggcggcgggcgcgcgcaccatgggggagaaacccgggaccaggataattcagctccttatggggc

SEQ ID NO: 134073 - DNA, 80 bp, Homo sapiens
ggcgctacggtctggccgtcggctgcggcgccatcgtaatgtgtgtggctggtattggacttgttgtattattcttcagt

SEQ ID NO: 134074 - DNA, 50 bp, Homo sapiens
gaactggcccggaaacaggaggacgtattgttgcagcatctggcagtgag

SEQ ID NO: 134075 - DNA, 100 bp, Homo sapiens
accggaacccgagaccgagtcagaacccgagtgctgcttggcggcgagattcatgatgttgctatcaaaagttgagaaattgtcagaagaaatcatggag

SEQ ID NO: 134076 - DNA, 100 bp, Homo sapiens
gcaccgggatcgtgaccgagaccgtgaccgagagcgtgaccgagagcgcgaatatcgtcatcgttagaagatcaacaacccctccccgtcgtaaacgctg

SEQ ID NO: 134077 - DNA, 101 bp, Homo sapiens
gccgtggaataggtgtatcaagtaatggtgcaaagcctgaagccttgtccatcaaaacctcatccctagcagaggctgagaacatggctgacctcatagac

SEQ ID NO: 134078 - DNA, 82 bp, Homo sapiens
atagaaaatatggatctttacatgttgaatccttgcagcactaaaatttgattatgatgcatcattatcacagaagaaattc

SEQ ID NO: 134079 - DNA, 60 bp, Homo sapiens
gccagccccagtgaaattgaggatctatgaggctcagccggagatttcccgggcatttca

SEQ ID NO: 134080 - DNA, 74 bp, Homo sapiens
cgctcaccccgcggccgcaccttcccgccttctcagcttttaaagcagttctccaccagcctttgaaggtcatc

SEQ ID NO: 134081 - DNA, 75 bp, Homo sapiens
gatgaaatcggcaactttataattgaggttttctgtctcaactggtctctgacaagcctctgactgaatgtatcc

SEQ ID NO: 134082 - DNA, 100 bp, Homo sapiens
tgatgtccttgatgttctcatcaagcccacgagtttagatctgactgcagccatgagcagcaatgagtgcttcaagtgtggacgatctggccactgggcc

SEQ ID NO: 134083 - DNA, 75 bp, Homo sapiens
ctggagaaaaatgtttcagttcagcgcttttgcctgcagttgaggctttatggaccctatgtactcggaactggg

SEQ ID NO: 134084 - DNA, 75 bp, Homo sapiens
tgtggagggggtgaagaccgtgttggtgacgaccaacttggcccctcacgggtgacttaagagattaaaattaat

SEQ ID NO: 134085 - DNA, 76 bp, Homo sapiens
gtttcttccaatacagtcaaaatccaagtccaagtggcctcggaggcctttgaagatgacagctgtagcaactttg

SEQ ID NO: 134086 - DNA, 82 bp, Homo sapiens
gagggcttcagtctggagccgcccagaggtccctggtgctgaaccgcctgcgtccagttgccagcgggggtgggaaagccca

SEQ ID NO: 134087 - DNA, 75 bp, Homo sapiens
caacctgctcaccggggagtctgatacacaggtctccatccaatcccaccccaaggaggaaaactggagattgct

SEQ ID NO: 134088 - DNA, 100 bp, Homo sapiens
ctcacgttcatcatggtgcctggctgccaggcagatatctacgtctgcatgatctcctttgcgcacaatgtagcagcacaagggaagtacattgctatag

SEQ ID NO: 134089 - DNA, 89 bp, Homo sapiens
agtgaagaaagctggtaatagatgtctgacaaactaaagaaagacttgtgttacgtcttgttgcagtaggagaaagagcacaaaagagg

SEQ ID NO: 134090 - DNA, 90 bp, Homo sapiens
cccagccgctcgcaggcgccgcacggagttgcgtcccggggacttggggccgcagggagagcccaaatcttgtgacaaaactcacacatg

SEQ ID NO: 134091 - DNA, 51 bp, Homo sapiens
ccccgggacccccacgccgccgccagtggtcctcgcggaggtgatccaggc

SEQ ID NO: 134092 - DNA, 87 bp, Homo sapiens
tttaatgccaacccaaattatacctggttctggagttaaacatagatgtagctgatgtggagagcttgctggtgcagtgcatattgg

SEQ ID NO: 134093 - DNA, 100 bp, Homo sapiens
ccgcaagaccgggcagatctggcccaacgatggcgagggcgccttccatggagacgcagatcgaagccgcggtcaaggccgccagagaagcctttcccag

SEQ ID NO: 134094 - DNA, 75 bp, Homo sapiens
atcaaaatccagatgctggatgacacccaggaggcatttgaagttccagttgcctttttcctctacaatggggtg

SEQ ID NO: 134095 - DNA, 100 bp, Homo sapiens
acagttcctaccttatgagctcggttttcttatgcttataagagtggaacagggtagagtggagtgctgggacccaagaactcgaaacagagttggcctg

SEQ ID NO: 134096 - DNA, 82 bp, Homo sapiens
ccgcagtatcatgctggccaagaagatcatcattaaggacggaggcacgtatctggcaccaattctgacccagtcatttgtg

SEQ ID NO: 134097 - DNA, 74 bp, Homo sapiens
gcaggagcccgcggccggccagccgaagatggtggcggctactcctcctgaacatggtccaagacaattcctgg

SEQ ID NO: 134098 - DNA, 90 bp, Homo sapiens
gagaaatgttcatggtatcaattttgtcagtcctgttcgaaaccaagcactcccacttcatctggaaccgcacggaactcctgacccttg

SEQ ID NO: 134099 - DNA, 100 bp, Homo sapiens
cctggctgtcaatattttggacaggttcttggctcttatgaaggtggacccaagtggagagattgtggaactggcgaaaggtgcatgtccctggaaggag

SEQ ID NO: 134100 - DNA, 100 bp, Homo sapiens
tggcagaggagctggcggagagcggcctgcgggcgatcgggccgaggtcaatatccaacacagccaacctaccctgtgcagcctcctgggaatccagtat

SEQ ID NO: 134101 - DNA, 75 bp, Homo sapiens
gccctgtcaccatttctttcacaaaccttgtgtctcaatttggctacaaaagtttgcctatctggggcgcctggc

SEQ ID NO: 134102 - DNA, 101 bp, Homo sapiens
aaaaagtggcacacactggagagatatcagtactaggttttgacaagcttgcatcatgcgtgagtataagctagtcgttcttggctcaggaggcgttggaa

SEQ ID NO: 134103 - DNA, 101 bp, Homo sapiens
ttcgaatccctatgtccagtttgaaatccttggcactacctatagtgagacttttggcaaagacatgcgcaaggtatttaccttgctgtggattgctgact

SEQ ID NO: 134104 - DNA, 143 bp, Homo sapiens
acgtcccggccctgagcgcactctggagggattctggcatcagggaggctttcagccggagaagcgagtttcagctgggtgactatgaccagagcaggaccaaagtgctgcacatgagcctgaaccccaccagtgtggccagg

SEQ ID NO: 134105 - DNA, 75 bp, Homo sapiens
gacgagaagcgcagcaacgtgcggtgggaccacgagagcgtgaattcacataaaagggcatcagaaaaatacaaa

SEQ ID NO: 134106 - DNA, 80 bp, Homo sapiens
aagcggggaaggaatgaagcgtgtcctgacttctgtcagcttggggaaggaagtcagtaggggtctggttgctgcttaca

SEQ ID NO: 134107 - DNA, 125 bp, Homo sapiens
tgaagatgcacatgtctgggaggataattgggatgatgacaatgtagaggatgacttctctaatcagttacgcgtttatgtcatggttggtgcagatgtcccgttttcttcttgtttacgagaag

SEQ ID NO: 134108 - DNA, 80 bp, Homo sapiens
agaagagtctctacagagatgtgatgcaggaaaccatcagaaacctggactgtatagatctgctcactttagcactctgg

SEQ ID NO: 134109 - DNA, 100 bp, Homo sapiens
ctcagcaatggggataccattctggaagacttgcccatccaatctgttccggaaccccaaggcatccttgcgtgtgcggctctgtgacctcctgagccac

SEQ ID NO: 134110 - DNA, 87 bp, Homo sapiens
cgggcggccgggagccatggagcgcggccctggggcccgggggcgcgggccggggtgggagtgcatccgccccaacccttttccccc

SEQ ID NO: 134111 - DNA, 99 bp, Homo sapiens
gcttatacacccaagttaactcagaacagtccacaggaagaggttgaactaaagaagttgaaacatttggagaagtctgtggagaagatagctgaccag

SEQ ID NO: 134112 - DNA, 75 bp, Homo sapiens
attgcagaacagcctcagcctgctgtgggtgagcgtggaggatgctcagatgcacaccgtcaccatctggctcac

SEQ ID NO: 134113 - DNA, 98 bp, Homo sapiens
taacttctactgacgaagcttggaagttgcagaagtggaaccacaactgccctcaaaagagggtcctgaaccaccagaagaggttcctcctcctacca

SEQ ID NO: 134114 - DNA, 98 bp, Homo sapiens
cacctggagaatgtcatcaagcagcacattcaaggctcttgagcaataacaagatcacggggctccgcaatggctccttcctgggactgtcactgctg

SEQ ID NO: 134115 - DNA, 75 bp, Homo sapiens
cactacatccacatcaagatacgagttccaaagttattgaaagctatgggttggcaggaatatcctgaaaatgat

SEQ ID NO: 134116 - DNA, 99 bp, Homo sapiens
ataaaaagaaattgctgcagattttactttatgtgagaaaatctacaatttcttcgagacactcatataaaggaagttaaatgaagttcgaaagagatt

SEQ ID NO: 134117 - DNA, 83 bp, Homo sapiens
ctcgtggcctgcctctgcgtgccacttgcacctcctgcgccgccgccccccatccaaggatatgccttcaagcctccacctag

SEQ ID NO: 134118 - DNA, 82 bp, Homo sapiens
aaaccaacgcctggctcggagcagcagcctctgagagctagagccggtgcaggccacgcagaacaagacagggaagtatgtg

SEQ ID NO: 134119 - DNA, 75 bp, Homo sapiens
aaaattgcacgtaatcacccaaatgccaaattgaggaacagttgactttggaaaagttgcatgagtggactaaac

SEQ ID NO: 134120 - DNA, 87 bp, Homo sapiens
agcgacacaattgtctgtgacagtaacagtacttgggatcccccagttccaaagtgtcttaaaggaaaaccgtcttcagatacagtc

SEQ ID NO: 134121 - DNA, 74 bp, Homo sapiens
cccggcgcgaagaggctggactcggattcgttgcctgaggaggagtatttgaagacttctgagcggaggagtcg

SEQ ID NO: 134122 - DNA, 90 bp, Homo sapiens
gcccttgcatgcttcagttcatgatgttggagactatttccccacccttgcggaaaaacaacctagaagtcggaatccggaagaagatcg

SEQ ID NO: 134123 - DNA, 87 bp, Homo sapiens
cacttcaaaatcagacctctgtggcagcattttttccagaacacaaaagagcatgcaagcggcaagatgtcctacagatgaattatc

SEQ ID NO: 134124 - DNA, 83 bp, Homo sapiens
aatactaaaatataacattcaatataggaccaaagatgcctcaacttggagccagggccagatattcgaagcttacaacatgg

SEQ ID NO: 134125 - DNA, 85 bp, Homo sapiens
acagctctgcgcggctttttgagcggtcccgcatcaaggctctggcagaattaacactgaatcctccggaaggaattgtagcagg

SEQ ID NO: 134126 - DNA, 75 bp, Homo sapiens
gcgcgcccgccccgctctgggaggaccgcgagtgatgggaccagtggaggccgcgcctgaataccgcgtcatcgt

SEQ ID NO: 134127 - DNA, 82 bp, Homo sapiens
tatacccagacagtttatgaagaagaaattattcacatgcttgaatactgtggacacttcaaatgcttcaccttcagaaggc

SEQ ID NO: 134128 - DNA, 100 bp, Homo sapiens
cccgtcctaaatggtgcgtggctgacaccgtagtgttttcaaaactggatatggccaggatgctatagcattgtcagtctttggcagcatgtaagcagct

SEQ ID NO: 134129 - DNA, 74 bp, Homo sapiens
gaagagaatctgcttccgggaacacctgattttcatacaatcccagcatttcaggaaaaccgaaagcgccatgg

SEQ ID NO: 134130 - DNA, 75 bp, Homo sapiens
aatctccagagctgctgcagaaaagctgtttggacgctgttggaagctctgactgtggcagttgttggtaagccg

SEQ ID NO: 134131 - DNA, 83 bp, Homo sapiens
cccaacaccctctacgaaggcggctacttcaaggtgttgacttcaaaatcaaaactgtagagctaagaggaaagaaaattaga

SEQ ID NO: 134132 - DNA, 100 bp, Homo sapiens
cagcatactgggaaaggggaaaggttgaggcaactaacgtgctggagaatctggtaaaagcaccattgtgaagcagatgaggatcctgcatgttaatggg

SEQ ID NO: 134133 - DNA, 120 bp, Homo sapiens
agaagatctcggagatcgagaaggagatcgctcggacacagaagaacaagggtactgaacgacacctgggtctccttcccttcctggtctgaggactccacgttcgtcagctccaagaag

SEQ ID NO: 134134 - DNA, 75 bp, Homo sapiens
tccacagacagccccagctcggtgttcctcagcctgttcgacatgggcggtgagtattactgcttcgcttccgac

SEQ ID NO: 134135 - DNA, 97 bp, Homo sapiens
ctggacagccaccttcgggatgagcataagtaacagtgtatcatgtatgccactgattccaggggacactcccctgctttcctccaacctcagaatg

SEQ ID NO: 134136 - DNA, 82 bp, Homo sapiens
cgaggaggccaaggcgccagtgagaggcggtactccaaagattcaggtttactcacgtcatccagcagagaatggaaagtca

SEQ ID NO: 134137 - DNA, 122 bp, Homo sapiens
aactgggggagctgctgggcgaagcacgctactacctggtgcagggcctgattgaggactgccagctggcgctgcagtgtggggtgatcagccccagatttgacgtgcaactcaaagacctg

SEQ ID NO: 134138 - DNA, 80 bp, Homo sapiens
aatttcatgactttgatcagccactgcctgacttagagtatgattatcgggaaatgctgcacaatgccactttctgtctg

SEQ ID NO: 134139 - DNA, 98 bp, Homo sapiens
gcttctgccccagaaccggtcgaaaaccgtgtatgagggattcatctcggctcaggaagtcctggctgagcaaggttggaagccctagttctcgcatt

SEQ ID NO: 134140 - DNA, 100 bp, Homo sapiens
gggtaaaaggctgagaagcttaagttccggtgtctcgccccgtcctcaccctcagggctcccggggcccaggctgtggtgggggacctgctggagcttca

SEQ ID NO: 134141 - DNA, 100 bp, Homo sapiens
tggacatggacgccacgctggaggagctgtcggtgcagcaggagacggaggaccagaactacggcatctctggccaggctgccgcacctctacaggaact

SEQ ID NO: 134142 - DNA, 50 bp, Homo sapiens
cattgaggcccgcacagcccagtccagaaagaccacagcaagattctttc

SEQ ID NO: 134143 - DNA, 75 bp, Homo sapiens
gcaggtagcgccgctgctgaagagtttccaaggagaggaaatccaaatctcctcccaaagtgcccattgtgattc

SEQ ID NO: 134144 - DNA, 75 bp, Homo sapiens
tgaaagacattcaggatcaacttgaacgaatatttctgtaatagctcttcaagtctgcaataaaaaatggcctcc

SEQ ID NO: 134145 - DNA, 80 bp, Homo sapiens
gttgcaacggagataaattcccggaaccgcgattcggcgtgtcaggtttaaggagttcatgagtaaacatgttcacttaa

SEQ ID NO: 134146 - DNA, 75 bp, Homo sapiens
tgctggacgggcggcgggtgaagctgcagctctgggctccctgcggactgccgtggccgctgggagagcttcgtg

SEQ ID NO: 134147 - DNA, 98 bp, Homo sapiens
acgtcagatcaaagaaaacagatcttctccagattggcagaaagttgatataggtggacttttttacagcattatggatccaagcctgttgagagaaa

SEQ ID NO: 134148 - DNA, 75 bp, Homo sapiens
aactggcaaagcagctacacaaagagggtcatctcttctattgtacctgcaggtcagaacaaaatctgcttcatc

SEQ ID NO: 134149 - DNA, 96 bp, Homo sapiens
tatgatgtgcagtgtccaaagagagtgctgggattacaagcgtgagctaccacacccagcgaggaagccaagtttaacgtgtgtgctccactcctc

SEQ ID NO: 134150 - DNA, 75 bp, Homo sapiens
ggactcatggaggctgagcatttattcaggcttcatcggttatgcccccaacctcagcaaactggtggccgagtg

SEQ ID NO: 134151 - DNA, 97 bp, Homo sapiens
gaaaactgcactttattgcaaatatcaatgatgtcaaacggctgaaacctggctacttagaagctactgtggactggtttagaaggtataaggttcc

SEQ ID NO: 134152 - DNA, 74 bp, Homo sapiens
ccaggggactgtgcgaactgcaggatatgaattgtctcccacggcagcagctaacttcacacgccgaaacctgg

SEQ ID NO: 134153 - DNA, 100 bp, Homo sapiens
taccagtgcttggaggagggcaaacactccagccacgaagtcaaggctctgggggccatgtggaaactacataagtggctatctgctgggcagacagagg

SEQ ID NO: 134154 - DNA, 50 bp, Homo sapiens
cggcgccgtcgcgccactcctccgagtgtaattagcatggtcaatgcggg

SEQ ID NO: 134155 - DNA, 100 bp, Homo sapiens
ccgatccccatttttattgaaagatgtattgagtacattgaagccacaggtactgcttctccgagatggccccagtgtgtgcggtggttggagggatttt

SEQ ID NO: 134156 - DNA, 82 bp, Homo sapiens
cttacctggcccaggaggatgggcccgttgtgactcccgaggcttgccgacaggcccgaagctaccttgagttttctgagga

SEQ ID NO: 134157 - DNA, 110 bp, Homo sapiens
gtagattgtgcagtgctcgactgtgaggatggagtggctgcaaacaaaaaggccgaaatagaactatttgtgaacagacttgattcagtggaatcagttcttccttatga

SEQ ID NO: 134158 - DNA, 137 bp, Homo sapiens
ggagctcgcccaagccgcgtccccagagagcgccctgagagaacagggtggccgcttggtccagcaatcagaaacggagactgttcatctgtttatcccagctctatcagtcggtgccatcatcggcaagcagggcc

SEQ ID NO: 134159 - DNA, 100 bp, Homo sapiens
cttcagtctgcaagtatggagctcaagttcttaattattcagaatgctgcggttttccaagatgctgttgatggagtaatgaatggtgaatactaccagg

SEQ ID NO: 134160 - DNA, 99 bp, Homo sapiens
cagacggctgcccttcaagtaccaaccattgtgatgaatgactgtattatccgaggggatctggcaaatgtaagagttggacgtcattgtgttgtgaaa

SEQ ID NO: 134161 - DNA, 90 bp, Homo sapiens
cggcctcccaaagtgctcggattacagacgtgagccaccgtgcctggcccttatccacaactcttaaaagatggggtttcgccatgttgc

SEQ ID NO: 134162 - DNA, 121 bp, Homo sapiens
tcagctatacatttacatcagattattgggagcctatttgttcatcatttctcgtgttcaaggtcctggcattgatgtgcctgctccagacatgagcacaggtgagcgggagatgtcctgg

SEQ ID NO: 134163 - DNA, 90 bp, Homo sapiens
tggaactggccgggctgagctgtgctacagccatcgccaaggcatcattctgggcacacaccacgagaagggggctttcaccttctggtc

SEQ ID NO: 134164 - DNA, 82 bp, Homo sapiens
cagttaacagtgccaccggtgttccaactgtttaaaggcgaactttctgaccaagtatacaactacccagagggcctaggag

SEQ ID NO: 134165 - DNA, 98 bp, Homo sapiens
gtggacggcttgacagccctgcaccagcctggatgtgtaaatacaactgaagtggacattaagaagtcatccagaatgagaaacccccacaaaacacg

SEQ ID NO: 134166 - DNA, 100 bp, Homo sapiens
ggcaagagtaacagcagcgccgtcccgtccgacagccaggcccgggagaagatcttatggttggtgatgaggcaagtgaattacgatcaatgttagaagt

SEQ ID NO: 134167 - DNA, 82 bp, Homo sapiens
ctgaagtaatgcaatggtctcaatctctggaaaaacttcttgccaaccaaagcaggtaaagtgaggaaacatgcaactgaac

SEQ ID NO: 134168 - DNA, 49 bp, Homo sapiens
aatggggggaactgccttgtgcactgactgactcacagtacacttcggc

SEQ ID NO: 134169 - DNA, 90 bp, Homo sapiens
cctgtgaccacccctgaagaaattgcacagggatgacttgtcaagctcgaacatcatatactgaagatgaagttctttggggtcatcgtt

SEQ ID NO: 134170 - DNA, 90 bp, Homo sapiens
tgtggagcgcttctttaagggctacgggaagatcctggaggtggatctgaagaacggatcttcaaagctgctgcgggcattctatgtccc

SEQ ID NO: 134171 - DNA, 50 bp, Homo sapiens
gctgtatcttcccaagtaccacaatatgaggactcttgtgaagatatgag

SEQ ID NO: 134172 - DNA, 100 bp, Homo sapiens
gcgtgcgggttcgcgtctgggaggccaagaccgctgtgtggaggtagccgcagcgccagcaccaggtcctacgggaagtgaaggtgctggcaggtcttca

SEQ ID NO: 134173 - DNA, 73 bp, Homo sapiens
aagaggtggaccggctgcggacccaggcttcacaggctgctcaagaagccgagatcaatgccagaaaagccaa

SEQ ID NO: 134174 - DNA, 100 bp, Homo sapiens
cctgtcaggcaggacttcaggaagagaggaactccgcaccgtttgatcaggattcccaggtgtgactttgcagagtttgctctccaaagctcggggaatt

SEQ ID NO: 134175 - DNA, 51 bp, Homo sapiens
cgggagacccaggaggagcccgcaggaatcatattgacaggtcatgaaaat

SEQ ID NO: 134176 - DNA, 101 bp, Homo sapiens
cgtgtacggattctgtgggtgtaaagcaaagaacaaaatgaagtgtgattcaaggtgggaaatagccgcttcaggctattcagcttgaccctgaagaaact

SEQ ID NO: 134177 - DNA, 98 bp, Homo sapiens
ttggaggccgcacctgcagcgagtgccaggaactcttctggggagaccccgacgtggagtgccgagaggcacagttgaatgctgttgatgctttgatt

SEQ ID NO: 134178 - DNA, 90 bp, Homo sapiens
aaaattgcaagagagagactattttcgttattacaagttcgcggcgcggcggacatggcggtggagtcctgagctagtcgtgtcccggcc

SEQ ID NO: 134179 - DNA, 100 bp, Homo sapiens
ctttatccgagcgctggattgcatgagaagtcgtcctcttgagttctggcgccttgactactgggaagatgacttgcggcgccggcgacgatttgtgcgt

SEQ ID NO: 134180 - DNA, 81 bp, Homo sapiens
ccatgacaaccaggcaatgctggatagataccgaattcttatcacaaaggcagaagatgctgatgaagttatgggtaaata

SEQ ID NO: 134181 - DNA, 101 bp, Homo sapiens
ccgagcgcgcccaggacatcggcatctggttccacatcctggcgggcctcacgcacctggcggtcatcagcaacggccaattcctgtccccccagcagcat

SEQ ID NO: 134182 - DNA, 83 bp, Homo sapiens
gtctgcgtgagaatagagaccaccgagcaggagcattggtttgaaaaggccctacgagacaagaagggcttcatcatcaagca

SEQ ID NO: 134183 - DNA, 75 bp, Homo sapiens
cgcctggctcggagcagcagcctctgagttgttgacctcctgtactggagagacattaagaagactggagtggtg

SEQ ID NO: 134184 - DNA, 90 bp, Homo sapiens
cgtgaaggagttgcggacaatcctcaataggatcatcagcaaacggctcccactgcagcagctcgggggaccccgctgagtacaacctgc

SEQ ID NO: 134185 - DNA, 75 bp, Homo sapiens
aatgcatttcttagtcttcaatacttattcctccttgtaactggatttctgatatctgagaaatatgggctgccc

SEQ ID NO: 134186 - DNA, 75 bp, Homo sapiens
agcctctgggagcagaagggaggctccaagacctcatcaacaattaaggttcacaaccagtatccaactgagttt

SEQ ID NO: 134187 - DNA, 80 bp, Homo sapiens
cctgtctggattattcattattacatgaagtatcatgtttctatcagtacaatggaacatgaattttcaataaaggaacg

SEQ ID NO: 134188 - DNA, 74 bp, Homo sapiens
gccacagaaaattagtcccaaatcaactaatggagatttacagacagtcatctgggtggaggacacccttttgg

SEQ ID NO: 134189 - DNA, 100 bp, Homo sapiens
caagaattcataagatagccatcctgggtcttggcagcagcattgggactcctccagaaggaccagaagtcaacagtgatctctttaaagaagctgattg

SEQ ID NO: 134190 - DNA, 80 bp, Homo sapiens
cagggaggatgtcgggacaccccggaagctgggaaatgggacccagacatggagctgcgggaagaagcctggtctccggg

SEQ ID NO: 134191 - DNA, 98 bp, Homo sapiens
gctggtccgggctcctcaggttcagacccgaccgttatccagtcggttcgtggagaggagagcattttctgcattagcaaatatcgacctggctttag

SEQ ID NO: 134192 - DNA, 50 bp, Homo sapiens
ggggaagagcaagatgcagtcagtggagggctgggcttcaacatcgtcgg

SEQ ID NO: 134193 - DNA, 87 bp, Homo sapiens
tcagtccgtggactttcccgctgcacactgccctccgaagtcggggacgcgggctcgacgcaaacatgcagatctttgtgaagaccc

SEQ ID NO: 134194 - DNA, 85 bp, Homo sapiens
acagcaggcgctcaccatgttccctggaggaggatacgaagcgttttcggcttcctgcccggagctgtgcagcaaacagtcgacc

SEQ ID NO: 134195 - DNA, 83 bp, Homo sapiens
ctggaagctactactacgtggtgcttggaaaggttaaaaagatcaagtggcatgagcagccttttggggaaaattggtgccaa

SEQ ID NO: 134196 - DNA, 100 bp, Homo sapiens
tgattgaccagaaccgtgatggcttcattgacaaggaggacctgcacgacatgctggcctcgctgggttcatcatgcctagtggcgtataagaagacccc

SEQ ID NO: 134197 - DNA, 98 bp, Homo sapiens
acacatctgtgctggagcatctgccttcggaaagcctgagaaattcacgaaagtctgtgaggccttggagcatggacatgtggaatggagcagccgag

SEQ ID NO: 134198 - DNA, 106 bp, Homo sapiens
actaattttggcagttctaaatttgaatttgagatctatgatcgaattctgtcaatttcctctcaagagggtgagacgattgaattggataaacctgtcatggcag

SEQ ID NO: 134199 - DNA, 153 bp, Homo sapiens
catcatcgagcccattatgaaactgaaggtagccgaggggcagtaaaagcatctactgggggacatcctgttgtgaagcagtacttcatcctcctcatcatcacggacggggtcatcagtgacatggaggagacacggcatgccgtggtgcag

SEQ ID NO: 134200 - DNA, 100 bp, Homo sapiens
tacgcggccgcggagacctacctgcggcgtcggcagctgctgctccgagaatatttttctcagcacttgggcgagtatgagaatgtactagcagcacttg

SEQ ID NO: 134201 - DNA, 100 bp, Homo sapiens
aatatatccgcagggttcggatgagaccaggcgcacatggcacagcactcaagcctacggccccaccagtgtagccagtgcagctttgcctccaagaaca

SEQ ID NO: 134202 - DNA, 97 bp, Homo sapiens
aaagatgagatttacctgtgagatgtttcatcccaacacaatcccacagagtattgatgaggaaactgaagtttggagcgatcacatcattttccca

SEQ ID NO: 134203 - DNA, 88 bp, Homo sapiens
tcagccagtttgatgaagaactttataaggggttggtgccatctacatccgtcgccggccccgtgtgcgtgtggaggccctgcagagt

SEQ ID NO: 134204 - DNA, 100 bp, Homo sapiens
gcaggagcgggagaattctgcggagcctgcgggacggcggcggtggcgccgtaggcagccgggacaggtgatggagagcaccccttcaaggggactgaac

SEQ ID NO: 134205 - DNA, 101 bp, Homo sapiens
catgaagtcacagggctactgttttccaatcctcagttcttggccaggctgactgagagatttgtgctgggagtggatatgttcgtggagacactgtggaa

SEQ ID NO: 134206 - DNA, 75 bp, Homo sapiens
tggataccactacatgcagcagcttcctgtggatatcttgatattgcagaatgtgttcagagcaacattgttttg

SEQ ID NO: 134207 - DNA, 50 bp, Homo sapiens
cttctgtccctactacgatgcaatcctgattgacaacacttactacaaag

SEQ ID NO: 134208 - DNA, 75 bp, Homo sapiens
gccacaggaagatatggaccatcacttggtgcaattgcaaatagaagagtcttccaaaccagtgaggctatcaca

SEQ ID NO: 134209 - DNA, 100 bp, Homo sapiens
cgatctacggggctgacatcagcggctctttgtatgatgacgaggaacgtctgcgggggacagtgctgcccaggatggacaacagcaaacagcaccaacc

SEQ ID NO: 134210 - DNA, 108 bp, Homo sapiens
ggcggcgactggccggcggggctgaccacttaccgcagcatccaagtcggccctgatgtgaagttcatttccaatccgccctccatggtggcagcggggagcgtggtg

SEQ ID NO: 134211 - DNA, 90 bp, Homo sapiens
gtctctccagaaaatcttgtggacaaatccaggggaagggtgactgtcgttcctacagttacgtgtgtggaatctccagtaaagatgaac

SEQ ID NO: 134212 - DNA, 101 bp, Homo sapiens
gtcatcgctgacagctgaggaagtctgcatccacattgcacataaagttggacagtcattttgtttactcattcagccctgttgcaggtcccaataaactc

SEQ ID NO: 134213 - DNA, 75 bp, Homo sapiens
aaaaataccacgacaaaaccaccctagcctttttgcaaatgtgtaacttgcctatcaaagtagtttgtagggcaa

SEQ ID NO: 134214 - DNA, 75 bp, Homo sapiens
cggcccccgcagcaagccccagccaaaggctccccaaaaaggccacaaagacagccccacctgccctgcctacag

SEQ ID NO: 134215 - DNA, 51 bp, Homo sapiens
gggcatacatctttcttcgacaaagggagcagtatagcatcaagttctaga

SEQ ID NO: 134216 - DNA, 75 bp, Homo sapiens
gatgcgcaagttcattgcctaccagttcacagacacggaggatttgacagctaaggatattgaagaaattattga

SEQ ID NO: 134217 - DNA, 82 bp, Homo sapiens
gtcctgaattagaaaaggtattcattaaagaaaataatgggaaggaagaagtatccaagacatgggaaagtctctttctcat

SEQ ID NO: 134218 - DNA, 75 bp, Homo sapiens
aattcactgtggtccagaagcagatatcggtgaggatgtatggcttatttcaaacatcattttactttggatata

SEQ ID NO: 134219 - DNA, 97 bp, Homo sapiens
ccctgtgccccaactctacttccctctgctccttcccagggtgcaggttcgcagccctgtcaaccagctccgagccggcagcgaaacctgaagtgga

SEQ ID NO: 134220 - DNA, 90 bp, Homo sapiens
gtcagcagcgaggaaggaaacagcggtgggcaatgccgtgccaccgcccctggccaaagccattggcttggagatcaagctttgtatgtt

SEQ ID NO: 134221 - DNA, 99 bp, Homo sapiens
gctgaatttccttctgcctgctgcccgatttctatttgactggcaatagtctggttgcagtattttacagagctagcccaaggcacaagatgaaaatta

SEQ ID NO: 134222 - DNA, 97 bp, Homo sapiens
gcagctggcctgcatcatggagggaactctaatgatccaggacaaagaagttaccctggagtatgtatcaagcctggatttttggtactgcaaacga

SEQ ID NO: 134223 - DNA, 83 bp, Homo sapiens
ctggagtaaaagctgatgatcggaatgattacagagccctatgagtttgtctctctggaatggctgcaaaagtggttggatga

SEQ ID NO: 134224 - DNA, 90 bp, Homo sapiens
gtccaacactgataagattgaatgccaagcagaaaattacctaaatgcactctttcgaaagaaagtgagtgacctgcaggaagaaggcaa

SEQ ID NO: 134225 - DNA, 100 bp, Homo sapiens
ttctgacgaagaggaagaccctcctgccaaaaggaaatgcatctttatgtcagaaacacaaagcagcccaaccaaaggatctgcgagtgaagagggacga

SEQ ID NO: 134226 - DNA, 90 bp, Homo sapiens
agggatgtgaatcttcctagaccacctggagccctttgcgagcagaaacgggagacctgtgccagaagatcagctgccatgttacttgac

SEQ ID NO: 134227 - DNA, 90 bp, Homo sapiens
gagcgctcctggggacttctccctctctgtcaagttcacagagtgtttccaaatgggctggcctcccaggaagggactattcagaagggc

SEQ ID NO: 134228 - DNA, 73 bp, Homo sapiens
tgatgttggagaactacaggaacatggtcttgctggtgaatcagaaatcctgcaccatgagaagcagtacgag

SEQ ID NO: 134229 - DNA, 101 bp, Homo sapiens
ctatgacagagagatgatatacccgaagctgctggataattttatcccagggtggctgaatcacggaatggtgtgtgattccagaaacaagtgccattgtt

SEQ ID NO: 134230 - DNA, 90 bp, Homo sapiens
tgatggtgaatattttgctactgctggaaaggcaatggtggcttgctatccgggaaatggaacaggttatgttcgccacgtggacaaccc

SEQ ID NO: 134231 - DNA, 74 bp, Homo sapiens
gacaagcacacactatggcgctgaaacggattaataagagctattaagaatggcaaaggattgcatagcaagaa

SEQ ID NO: 134232 - DNA, 82 bp, Homo sapiens
aaggacagcgcgaggtccgcgcagcccagcgcagccatccatccgggtgacctgcataggttcctgcggggtctccaacaag

SEQ ID NO: 134233 - DNA, 75 bp, Homo sapiens
ggaacacctcgccaaagcagagaaataaaactggcgatggaatatgagaggagccctctggaaagaaaaggacag

SEQ ID NO: 134234 - DNA, 50 bp, Homo sapiens
gggatgtgaaaactctgttactgaaggatttattggatcattcgtgtaca

SEQ ID NO: 134235 - DNA, 90 bp, Homo sapiens
gttgtttcttatgttgttgcagacatggaagaaatgctgcctaggtcctagaaacacattccccgtcggagccctttctagagaaaccag

SEQ ID NO: 134236 - DNA, 100 bp, Homo sapiens
gtccgaggctcgcgggcggcgggcccggccaaggctaagtcgaaatgtggcccaaccttcttcccctgtgccagcggcatccattgcatcattggtcgct

SEQ ID NO: 134237 - DNA, 100 bp, Homo sapiens
cagaaacacaaagcagcccaaccaaagggcatcaagcatgatggaaccatgtgtgatacctgccgccagcaaccaatcattggcattcgatggaagtgtg

SEQ ID NO: 134238 - DNA, 100 bp, Homo sapiens
aatgacaaacaaccagctcttcaggtcctccagcagcctgacctgagtgggttagtgatccagagaaaccagcaggccaacttggtcaggaaggttcggg

SEQ ID NO: 134239 - DNA, 74 bp, Homo sapiens
gagggcgtgcgcggcacctgcgaagatgcttccctgtgcaagaggcccgtgggagtcagcatgccgcgtggctg

SEQ ID NO: 134240 - DNA, 75 bp, Homo sapiens
tgaacttgaagagacatatggacaatgaatctgcaaagccattcgttcctggttaactcggaaacacatccagag

SEQ ID NO: 134241 - DNA, 100 bp, Homo sapiens
tctacaggaatggaaattctgctgtcaacattagagtaattataaagtggactgtgcctgtcacaagggaaaccggaattgtcctatacaaaaaaggaat

SEQ ID NO: 134242 - DNA, 100 bp, Homo sapiens
ttcttttttgagaaaggaaggaatatatcctgactgattacctgtgttgcgtggtgggtctgctgccgccacttctaatcctcatcatgacaacgtcagg

SEQ ID NO: 134243 - DNA, 88 bp, Homo sapiens
cagatgctagtgtagctgaagcaagcacgaaaaatgctaacaacagcttcacggttggcgtgcagtggtgtgatctcagctcattgca

SEQ ID NO: 134244 - DNA, 127 bp, Homo sapiens
gctaacctcatgtccggcccccacagttatgggccagccagagagaccaacagctgcaccgaggggatgtgtttggccaaatgggagagtggttacaacacacgagctacaaactacaatgctggag

SEQ ID NO: 134245 - DNA, 100 bp, Homo sapiens
gttacttcaagttgtgtttggagctgacgtgagcgaggttggtcatgtgctcggggtatcctgtcttggtagtgaatggaagagggcctggtccctgggg

SEQ ID NO: 134246 - DNA, 74 bp, Homo sapiens
tttatctgtaatggtgaaagatgattatgtccacgaatttgctggacccaaaggagacaacatttatgaatgga

SEQ ID NO: 134247 - DNA, 96 bp, Homo sapiens
cggagccgcgaggagacagctgaggcccgcggagaccagggggctacaccaagtccattgatatttggtctgtaggctgcattctggcagaaatgc

SEQ ID NO: 134248 - DNA, 74 bp, Homo sapiens
tccgatggctgcggctgcgccgaggcgccctactcagttgggatgaatgggttccggagagcagagtactcaaa

SEQ ID NO: 134249 - DNA, 75 bp, Homo sapiens
gaatattgacccttatttatccagaagattgatcatcatatgggttcaagtctggaaaagtttgaaattccagta

SEQ ID NO: 134250 - DNA, 50 bp, Homo sapiens
agaaaccaaactttttccaaggaggttattaacacggggatcaaagtctg

SEQ ID NO: 134251 - DNA, 75 bp, Homo sapiens
gggctgtcggccgaggtcaagaaccgggtgatgtgtccaatctagatcccaacttctcatttgaaggcaccaaac

SEQ ID NO: 134252 - DNA, 87 bp, Homo sapiens
ccgagcagggaccgcctgctgcactttgggttcaaggcgacagaagttggtgaaccatctaaagaagagaaggctgtggccaagtat

SEQ ID NO: 134253 - DNA, 100 bp, Homo sapiens
gtttcttccactcagcctgtgggagtctctatgctgcagtgcctcctcttccagcagcctctatctttattctacaggatccagagaatcacccgctgat

SEQ ID NO: 134254 - DNA, 100 bp, Homo sapiens
aaagctgttttggaactgtcaggtacctcaaagcaatgaagaaaactttcttgagaacgagaacacatcaggaaacaactcaataagaagcagagctgtg

SEQ ID NO: 134255 - DNA, 74 bp, Homo sapiens
atcaagcaccttcattctgctggaattattcatcggatgaagaactgccagcatgcgaatgctgaacgtcctac

SEQ ID NO: 134256 - DNA, 51 bp, Homo sapiens
attccagagagcatcatcaagtgttatttgagcttgcccgctaccacgccc

SEQ ID NO: 134257 - DNA, 76 bp, Homo sapiens
agaagacgaggatgatgcggaaattaaccccaaggtgaccaagaatatggcccaggtgaccaaagccctggacaag

SEQ ID NO: 134258 - DNA, 74 bp, Homo sapiens
caaggctggccgagccgtggatgtcgctgaattgcccgtgcccccagactctgggctgggaagccctgttggcc

SEQ ID NO: 134259 - DNA, 99 bp, Homo sapiens
cagcagcccagacgcggcacagagagggcctgggagcttgctgcagcttcaggtttacccaaggtccagcctagcccctaggcaccatgtcggacagtg

SEQ ID NO: 134260 - DNA, 75 bp, Homo sapiens
ggattcgtggcgccacaagctcattcactgtgtaggaagctcttcgtgggcggtcttgactggagcacgacccaa

SEQ ID NO: 134261 - DNA, 75 bp, Homo sapiens
ctcgagaaccgtttggcaatatgtacgacgcggatgagggtcctcagaatggttggaatgaccctccagctttga

SEQ ID NO: 134262 - DNA, 100 bp, Homo sapiens
ggccggccccggcggcggcggcggccttgggccggtggacgtacccagcgctcggcacaggggcagagccagggtcagccatcctcaagtagcttaacag

SEQ ID NO: 134263 - DNA, 76 bp, Homo sapiens
gctagatgccctgatgcgagtggccaatgaggagtcagagcacaatcaagggccgcgatgggcctcttggaacatt

SEQ ID NO: 134264 - DNA, 123 bp, Homo sapiens
cggcgagccaaagaggagccggccgcgcgggccgggaggggacggccgccggagccgcgaggccaataagactttgaccccgacgcaggcttcagtgattgccgcggatcagaagcctgagca

SEQ ID NO: 134265 - DNA, 74 bp, Homo sapiens
gatctggtctgtggtgatgatgaaaaccctagcgcctattatagtgatggagaatgaagttgaagaggtaaaag

SEQ ID NO: 134266 - DNA, 90 bp, Homo sapiens
ccccgatggccccgaccgcgtgctggagctcttcgacccacccaaggtttgcccttgcatctcatttcctctggggactgtggtccattg

SEQ ID NO: 134267 - DNA, 75 bp, Homo sapiens
cgccacatgttcgtctggggcggctacaagtccattgctgatggttttaaagaggcagttcgttatgtccttcca

SEQ ID NO: 134268 - DNA, 100 bp, Homo sapiens
agacagtggacagaccattccaaaagcccagcagatgcacactgggcctgtgcttgatgtctgctggagtgacgaggagatgttaaagtaacccatcttg

SEQ ID NO: 134269 - DNA, 82 bp, Homo sapiens
tgaggaggcccgagcggcggcggtggcggcgaaggccgaggcgatgccatggacaatattaccaggcagaaccaattctacg

SEQ ID NO: 134270 - DNA, 82 bp, Homo sapiens
ccgattcctcctccttggtcgccgcgtccttggctggcgtctgtcgcctggttgggcccggaaatgggacgtcgcgctttct

SEQ ID NO: 134271 - DNA, 75 bp, Homo sapiens
gacgtggactacctgcatcacaagtacccagggacctcctggagaagacgcgcctgctgagccgggcctcgcccg

SEQ ID NO: 134272 - DNA, 74 bp, Homo sapiens
ccacgtcatccgcatcaacaagatgttgtcctgtgctggggctgacagagctgcctggattgacaagtgccgcc

SEQ ID NO: 134273 - DNA, 100 bp, Homo sapiens
cccagctcagtattggcaactaggagagtagtgagattgaacttggccttgaggaacagctgcctctagagttggtaaataccagctgtcccctacagtg

SEQ ID NO: 134274 - DNA, 76 bp, Homo sapiens
ttggataataagcttttacaaactgatgcacctaattacaacaagcatgcacattttggtgcattcaagaatggaa

SEQ ID NO: 134275 - DNA, 83 bp, Homo sapiens
gtgatgcctgcagagctgtggcttaccaggatccctccccgcggcggcgatggcccgagccatgagagtgaggactttccgcg

SEQ ID NO: 134276 - DNA, 100 bp, Homo sapiens
ggggacccagaccctggagcctcagttggaagcagccgatccagcctgcggagcctgtggggcaggaagatgagaatgtgcctactgctcctgatcctcc

SEQ ID NO: 134277 - DNA, 76 bp, Homo sapiens
gtgagcccacgtgaagtgggccataacatctatatcctggcgctgcaggcccaggcccagctacaggagtcctctc

SEQ ID NO: 134278 - DNA, 75 bp, Homo sapiens
atattagaagcattttgcaacgtagtgttgccaatccagcatttttgaaaatcacggtcactttcaacattaaca

SEQ ID NO: 134279 - DNA, 48 bp, Homo sapiens
tcgccatggccgacgaaaagcccaagtcttacacagtgtgggccatgt

SEQ ID NO: 134280 - DNA, 75 bp, Homo sapiens
agggatcacttcatccgaaccctcagcctcaagccgctgctcttcggtgttccatttggtttaaaaaatacttca

SEQ ID NO: 134281 - DNA, 100 bp, Homo sapiens
agcgactcaggaacaagtgtgggagaggaagcggcggcggcggcgccgggcccgggggtggtgacagcaggtctgaggcgaaggaggtgtggtcaaacgc

SEQ ID NO: 134282 - DNA, 90 bp, Homo sapiens
gcaaaaccacattcatgggacacttctccagactccagggattagagctcgatctgcaaggcttcagtggttttgtgacagatgtgttgc

SEQ ID NO: 134283 - DNA, 120 bp, Homo sapiens
tacgcgctacacaagtggagctccttttcctccacctaccttcccgaatggactagaggcttttaccagatttcttaaaactgaattcagtgaagaaaatattgaattttggatagcctg

SEQ ID NO: 134284 - DNA, 88 bp, Homo sapiens
aaaactaaaatagaaaaatctccagctcctcaaaagatggcagaaacggtggacacaagcgaaatggtcaacggcgctacagaacaaa

SEQ ID NO: 134285 - DNA, 90 bp, Homo sapiens
caggaaaagactcaggacggacaagcacagtcttcggaagtttgacaacttaaatgctgcgcatgaaacctctaagttggaaattgaagc

SEQ ID NO: 134286 - DNA, 100 bp, Homo sapiens
tactcttggaatcaaagataaatccaaatactgcatatcagaaacaacaggagtctactcttcatcttgtgttgagacttcgtggtggtgctaagaaaag

SEQ ID NO: 134287 - DNA, 75 bp, Homo sapiens
taacttccgacgcttcacgacagccagtgacgtctggatgttcggtttggtgcacctcgatttggaggaagtagg

SEQ ID NO: 134288 - DNA, 75 bp, Homo sapiens
gagactttctccttcaagtacttggcagatcactctcttagcagagaaattaatggacttacgaaatgaatacct

SEQ ID NO: 134289 - DNA, 88 bp, Homo sapiens
agtcgctgctcctgcttctcgggctgctggtgctgtgcgcgaggctcctcactgcagcgaaggggggaattgcagcaggaagcagcgg

SEQ ID NO: 134290 - DNA, 75 bp, Homo sapiens
attttttgcctttgttgattaactggacaaattcaggtctagatgttgatggaatatatcgagttagtggcaatc

SEQ ID NO: 134291 - DNA, 75 bp, Homo sapiens
cctacctgaagttcttcaactgccaaaagcacaggccttcccttcttcttggtggtgttcttgagtaagataatc

SEQ ID NO: 134292 - DNA, 100 bp, Homo sapiens
cggagagctgaatttcccctatctgtttcaactgctggaagatgaaggctacaaaggcttcgtgggctaaccggcagatgaagcacatctcagctgagca

SEQ ID NO: 134293 - DNA, 74 bp, Homo sapiens
cgggagccgggccggcctagccaggaccatggccaacctggagcgcaccttcatcgccatcaagccggacggcg

SEQ ID NO: 134294 - DNA, 75 bp, Homo sapiens
ccggcagccaccccatctgggaaaaaggacccaggagcgataacagtaaatcaaataagatatttgtcggtggaa

SEQ ID NO: 134295 - DNA, 100 bp, Homo sapiens
cttgctgctgctgctactgctgtttccaggggctgcagagcatggactgttaaatcttgcacttcttctgagtgaggttcatatccagctttcagagtgg

SEQ ID NO: 134296 - DNA, 83 bp, Homo sapiens
acagacttggacaacatgtcccaacattacatcccagtgtatcagttcctatccctgtgattggactgagggacgaagaaaag

SEQ ID NO: 134297 - DNA, 74 bp, Homo sapiens
cagccaactacacagaccagtgggagagatggtggaagaacccagagcaatgagaaggacgttgaagagtgggc

SEQ ID NO: 134298 - DNA, 90 bp, Homo sapiens
ttcgagatggaatgtgtagacagtctttcacgggacatgtctcagatatcaatgctgtcagtctccctagatctttagcttctactccca

SEQ ID NO: 134299 - DNA, 100 bp, Homo sapiens
ggagcgcttccgcaccatcacctccacctgggagtgtccactcgccttccaccagcatggcaacgtcttcacagtaccgccagctgctcagtgactacgg

SEQ ID NO: 134300 - DNA, 75 bp, Homo sapiens
actgtcagacagttcctgctgctgcccaggtgcatctgaatgcatggtcatggaggctatgattctgattttagt

SEQ ID NO: 134301 - DNA, 50 bp, Homo sapiens
gtccatttgtgccacagatgggtgatgagcaattctgtggtgttcttggt

SEQ ID NO: 134302 - DNA, 100 bp, Homo sapiens
ccctgcagtacctgcagaaggtctctggagacatcttcagcaggtggcattggtagggtggtcaacggagccttcatggtgctgaaagggcatcgatcta

SEQ ID NO: 134303 - DNA, 83 bp, Homo sapiens
gaaacactctccttctgccacatttgttttgagctaaatattgagggtttttagaacttcagccataaaaatgggcagaattt

SEQ ID NO: 134304 - DNA, 74 bp, Homo sapiens
gcagtacctgcagaaggtctctggagacatcttcagcagctctggcaggctgccctgagcacgctcaaccccaa

SEQ ID NO: 134305 - DNA, 74 bp, Homo sapiens
gcttcctgctgctattgcagaatttttgactggagactatagtaggtaactcacgtagtgctccacctacacga

SEQ ID NO: 134306 - DNA, 133 bp, Homo sapiens
atctgtccctccagctggccctgaggcatctgagtcaacaacggatgaaaatgaagacgacattcagtttgtcagtagactctgacctgtttttgttggacacccgtgtagtatgggcctcagaagaaggctg

SEQ ID NO: 134307 - DNA, 102 bp, Homo sapiens
cctttatatagaagggagagtaggctcccctgcaaactttgctgtgtacactgccctggtggaaccccatgggcgcatcatgggcctggaccttccggatgg

SEQ ID NO: 134308 - DNA, 98 bp, Homo sapiens
ccaaccccaccatcccaccaaagggggctgctgaccgagagagctcactcagccagtgttctaagaacggaagcatctgggctggatggaatttagca

SEQ ID NO: 134309 - DNA, 100 bp, Homo sapiens
ctgctgctgagcagcgccgcggctttgacagatccaaatgcttctgctgcccagcaggctgttctccagcagcacatcaatagtctaacatactcacctt

SEQ ID NO: 134310 - DNA, 100 bp, Homo sapiens
gctgctgcttggagagccccagacagtcgcttgaagagatatgcaatatgatgaggatgatgatgaaatcaccccggatttgtggcaagaagcatgctgg

SEQ ID NO: 134311 - DNA, 96 bp, Homo sapiens
aatcatttcggctctcatgttcctccatgataaaggaatcatctataggtggaagatggatgcctgaagtgtagactgctgctagctgaataccat

SEQ ID NO: 134312 - DNA, 100 bp, Homo sapiens
aaggggaaaaatttcaacttctatttaaatttagtagtcgatatccttttgactctcctcaggtgaatcttggaagcaaccagtaccttttctctgtcat

SEQ ID NO: 134313 - DNA, 130 bp, Homo sapiens
aaaacatctgaccctttgaagattctggccaacgcagacaccatgaaggtgctgggagtgcagcggcctctcctacaggaagaggagttgtacgcatgtcagagaggttgcaggctgttttcaatttgtc

SEQ ID NO: 134314 - DNA, 100 bp, Homo sapiens
gatttgcagcagccaacttttcacccatctgtacatcctatgtcaactgcttctcaggtagcaagtacatggggaggacctgatcccaaccttgaagaaa

SEQ ID NO: 134315 - DNA, 100 bp, Homo sapiens
tgcagatcggtgtggtgggcggctctgactactgtaagatcgctgagcagctgggtgacggggatgaagaatttctacagacagttcaaggaaattgctg

SEQ ID NO: 134316 - DNA, 90 bp, Homo sapiens
gggggctacggccatgcagcgcatggctcatgtggacggcgagcttgccactgtgagagctgcaggtggagctggagcaagaataccaag

SEQ ID NO: 134317 - DNA, 75 bp, Homo sapiens
ctggaccagttgatgggcacctcccgggacggatcagttcttaagagcagccccggtaactggaggaatgggagc

SEQ ID NO: 134318 - DNA, 100 bp, Homo sapiens
gtgagagagagctattagagattgtgaagaagaatttcgatctccgccctggggtcattgtcagggagaccctgcagcgtcatggtgctggagctggtgg

SEQ ID NO: 134319 - DNA, 101 bp, Homo sapiens
cagcagcaacatccccaaacagcggcgtttcacggtggcacatacatggaaacgttttgatggtaaattacaatcagaatcaactaataatggaaaaaata

SEQ ID NO: 134320 - DNA, 74 bp, Homo sapiens
atcagaacagatccgggaattaagagaggttcaaaccttgtactactcagctgatcacaagctgcttgatggga

SEQ ID NO: 134321 - DNA, 51 bp, Homo sapiens
ataatggagcagagacttcttggcagatgaagaggaagatgatgatgtagt

SEQ ID NO: 134322 - DNA, 100 bp, Homo sapiens
accgcgaccagggccgcaggaagacgcagacttggaaaaggagagtgacacacccctccagcaagtatccattgaagaaattctagaagaacaaagggtg

SEQ ID NO: 134323 - DNA, 100 bp, Homo sapiens
gacggaccacatcctggagaccaaggaggcatcgatgatggagacacagaatttccaggtgttgtggtgcgaccaattggtgaatttcgtagttccatag

SEQ ID NO: 134324 - DNA, 100 bp, Homo sapiens
cagtccgtcatcaagctctacatcatctacaacatgctggagcatctattgctggcaccatctgacgtggcaggctgggggatttttatcaaagatcctg

SEQ ID NO: 134325 - DNA, 96 bp, Homo sapiens
gcaaggctgacgtggagcggtacatcgcctcggtgcagggctccaccccgtcgcctcgacaggatggaaaggcagatgtaaagtccctcatggcga

SEQ ID NO: 134326 - DNA, 104 bp, Homo sapiens
ccctttggttgaaacctctcacaatgtggcagcaccagtggcagttcgcagcctccaggacttggctcgcatcgccatccggggcaccattaaaaagattattc

SEQ ID NO: 134327 - DNA, 50 bp, Homo sapiens
cgagggtctaacttgcgcttcatggcttgcattgatgacaatgttgatat

SEQ ID NO: 134328 - DNA, 100 bp, Homo sapiens
gctgaatggaggccagatagtaccatgatagctgtatcaacctagaggatcaagacataatgggagcatttttagacaagccaaagatggaaaagcataa

SEQ ID NO: 134329 - DNA, 100 bp, Homo sapiens
cacctgaagatattgcccaattcttacatcaagaggaaagattagactcttgatgatgatgatgattttgatgatgaggaagctgaagaaaaagcgccag

SEQ ID NO: 134330 - DNA, 71 bp, Homo sapiens
tttatattcatctcaaaaacaaaattctgaactcaggacttggcaaggaccccagagctaagcacagctga

SEQ ID NO: 134331 - DNA, 109 bp, Homo sapiens
ggggccaccgacgggacgcggctccgggaacatggctcgcttcgctctgactgttgtccggcagactcctgcactgactcctgaggacttttgtctgggattggtcatc

SEQ ID NO: 134332 - DNA, 100 bp, Homo sapiens
acattgaacgggaaatcggcgccatccttcagaatgcagattgctggactcgctgaagagagactacgcaggaaagccccagccacccatcaaatcagag

SEQ ID NO: 134333 - DNA, 98 bp, Homo sapiens
agagcgacccgtggccttgtgtttcaggaagctttctttggaaaagatcttctagatacaagtagacaaagcaagataagtttagataatctgtcaga

SEQ ID NO: 134334 - DNA, 100 bp, Homo sapiens
gccttctctacttcgctcttggaacataatttctcatggcaggtcagaagaggccaagtgatggaaatagtggattaatggcaaaaaagcaaaagcgtac

SEQ ID NO: 134335 - DNA, 50 bp, Homo sapiens
acagcaaattaaagataacttgcgagaggatggcacatttctggtcagag

SEQ ID NO: 134336 - DNA, 90 bp, Homo sapiens
ctactgtgcatctccttgactgccgcatcatgggagccgaatacatcaagcaatggtaacatctttaaatgaagataatgaaagtgtaac

SEQ ID NO: 134337 - DNA, 75 bp, Homo sapiens
attccaagtaactcttatttggtgattatgggagtgctattgagacactggtaactgcaatttctttaattaaac

SEQ ID NO: 134338 - DNA, 83 bp, Homo sapiens
ttcctttgctaggataagtgatgaagactgggaattatgatctagcccttaagtatttccagaaagctgctgaacaaggctgg

SEQ ID NO: 134339 - DNA, 100 bp, Homo sapiens
gccgcgcaggatgagccggagaccccgagggccgtggccttccaggggatctcggggagaccccggtgatgcaggaccccgtggagactcaggacagcca

SEQ ID NO: 134340 - DNA, 96 bp, Homo sapiens
ggtgtgggcgcgtcaggccgcgacgagggcgctgaggtgataacgtggtgctggaccagacctacctgtggcagggtgttcgagtggcggctggag

SEQ ID NO: 134341 - DNA, 75 bp, Homo sapiens
cggctgcagacttggccaaatggacgggactattaagattgtcctgggtcacataatgccagctgagcgtaaaaa

SEQ ID NO: 134342 - DNA, 74 bp, Homo sapiens
gctccgtggagatcgtcccgcgcctgccgctctccctgtccagccgcctgcagctgaccctgtaccagtacaag

SEQ ID NO: 134343 - DNA, 100 bp, Homo sapiens
cgccgagcgcaccgacatctgcctgctcaaaggccacggcgtatgcctccaaggacggggtcctgaccgaggccatgatggacgcctgcgtgcaagactt

SEQ ID NO: 134344 - DNA, 96 bp, Homo sapiens
taccttcttatgacccatccagtccacaaaccagccaggtgattctggacttgaaaggttctgattacagctggtcgtatcagacgccaccctctt

SEQ ID NO: 134345 - DNA, 80 bp, Homo sapiens
tctctcctctgcaacctgataggatttggctacccagcctacatctcgttcgatacaagaggctgttttcctagcgtggc

SEQ ID NO: 134346 - DNA, 51 bp, Homo sapiens
catacaggatatctaccacttcaatagtttcagaagaggagccccgccgag

SEQ ID NO: 134347 - DNA, 100 bp, Homo sapiens
gcctcgcgcctgttccgctgcaggttggccccggcggcgggagcgcccccgatccggacaaagaaacgagcgctcgaccaagagtgcagatttccataag

SEQ ID NO: 134348 - DNA, 100 bp, Homo sapiens
caccccggtcaaaggatgctgagtccggagcgcctagccctaccggactacgagtatctggaaactaattctgaagcaagcccttatagttgtgctgcag

SEQ ID NO: 134349 - DNA, 100 bp, Homo sapiens
caggagggcacagcactgcacctgcagacaagcctgccagccctttctgaggcagatacccaggaactaacccagtttggcaatgaggagcagcagctgg

SEQ ID NO: 134350 - DNA, 82 bp, Homo sapiens
gaagcgcaagaacctcttcccccgcagagaagagctgctcagtctggcatgcagaggttgacggatatattcagacgttacg

SEQ ID NO: 134351 - DNA, 100 bp, Homo sapiens
caaagacagctttcacagtttgcgggactcagtcccatcactccaaggagagaagaatcctgctgcatcacagaagctggaagttctgatgttccactga

SEQ ID NO: 134352 - DNA, 96 bp, Homo sapiens
gagaattcctgcagatccagaagcaggtgtatggctgctgctttaaaagatgcaggtgtgcagcctgaggagatatcctatatcaatgcacatgct

SEQ ID NO: 134353 - DNA, 90 bp, Homo sapiens
gctctggcttgggacgaaagtgtcaaggcattacggctcccattgagtttcttgcagaacataaattattaggaaacattaaaaatgtgg

SEQ ID NO: 134354 - DNA, 75 bp, Homo sapiens
atcgtcgccacctggatgctggagaggctgggaggcggcagaatgcagccagaggagggcacaggctggctgctg

SEQ ID NO: 134355 - DNA, 100 bp, Homo sapiens
cccttctcctttctacaacccgttccagttcgagatcaccttcgagtgcatcgaggacctgtctgaagctgaaggaagaggatcaccttccaagacaaaa

SEQ ID NO: 134356 - DNA, 96 bp, Homo sapiens
aggagccagacgacaagcacacactatggcgctgaaacggattaataagattttcagctgaactctcatctctcaacactggcaaatattcataag

SEQ ID NO: 134357 - DNA, 87 bp, Homo sapiens
gccgccatgaacaactcgggcgccgacgagatcgggttggcgctgtacgtttatgagtacctgctgcacatcggtgcccagaagtca

SEQ ID NO: 134358 - DNA, 74 bp, Homo sapiens
cacatctttagagccatcctgatcaagaaaaccgacaggtgaaaggtgtagcagtcactcggcctacacccaca

SEQ ID NO: 134359 - DNA, 75 bp, Homo sapiens
cagacctctttacctggctgttcatcttccataatcaactggactatttaagaaacaactgaggcatcagaccaa

SEQ ID NO: 134360 - DNA, 103 bp, Homo sapiens
cgcggggcgacgctggctgcagggacccggtgacagcgtgagaggttcgcagaacaatgcagatcttcgtgaagactctgactggtaagaccatcaccctcga

SEQ ID NO: 134361 - DNA, 97 bp, Homo sapiens
agaccctggagcctcagttggaagcagccgatccagcctgcggagcctgtggggcaggtgtcttcagtgccctgggtttgcctgtgacccaatgccc

SEQ ID NO: 134362 - DNA, 82 bp, Homo sapiens
ctgccggggagggcccagcgcatccgacaggcttgggcactgtttaaaggaaagttccgagaaggcatcgacaagccggacc

SEQ ID NO: 134363 - DNA, 100 bp, Homo sapiens
aaaccctgagagaaggtgatatggagtttcactcttgtctcccaggctggagtacaatggcatgatctcagcttactgcaacctccgtctcctgggttca

SEQ ID NO: 134364 - DNA, 100 bp, Homo sapiens
cgaagagatcgcccagctgctgtctgggtccttctaccctgatgggagagtctgcatttccatcctccacgcgccaggcgatgaccccatgggctacgag

SEQ ID NO: 134365 - DNA, 105 bp, Homo sapiens
tatcaaggctgcctataatcaagtaaaaacaatagctcaaggaaacctttccaacacagatgtccaagctgccaactaggtcttgactccactaacggggacttc

SEQ ID NO: 134366 - DNA, 100 bp, Homo sapiens
tttagttccatcaaacacagaggaatgaccaccatggcagatggcaacagaggatgtcaacaattttttggaggaacgattccaggtgaagaatcctccc

SEQ ID NO: 134367 - DNA, 75 bp, Homo sapiens
ccagttcctcggggtgcagcaggtttctgcccacttggctatagggaatgtcataatggaaaatgctataggctg

SEQ ID NO: 134368 - DNA, 87 bp, Homo sapiens
taactggggctacgactctgatgggcagaggtggaggagacactgaagcgactgcagagccagaagggagtgcagggaatcatcgtc

SEQ ID NO: 134369 - DNA, 97 bp, Homo sapiens
agtgccgagcccttagcgtggactgggctggccccggaagcccccacgggctctacctgaccctgcagtcatagtataacatcagtaacaaaaatga

SEQ ID NO: 134370 - DNA, 80 bp, Homo sapiens
cgacgtggtagtgtgcgaccagcccgagggaagaatgcgtctctgcccaaaccctgcttctgcagctactccagagctgc

SEQ ID NO: 134371 - DNA, 76 bp, Homo sapiens
ctgagttgggagaagagctccagagacagtcaatggcagtaatcctgaaggtgaagatcctgagagggaacctgta

SEQ ID NO: 134372 - DNA, 51 bp, Homo sapiens
agagtctttggaggatgcggctttgatggagtgtgaacatggctacgcctc

SEQ ID NO: 134373 - DNA, 83 bp, Homo sapiens
gttgcagagcctgcggggcaagatctatggcggacttccaccacaaatggagggattttgactgtatctattgacaatcctgg

SEQ ID NO: 134374 - DNA, 100 bp, Homo sapiens
agtatgcaaggccacgacccacgagatcatggggcccaagaaaaagcacctggactggaggaataagtttttttcatctgtaatttggaagccaagtcag

SEQ ID NO: 134375 - DNA, 90 bp, Homo sapiens
taaagagacccgttcagagtcctacagtggcagattcttcacggaaaaatccagcaaagcctactccttctggatgaagttcagagtcac

SEQ ID NO: 134376 - DNA, 83 bp, Homo sapiens
ttgcaagagagagactattttcgttattacaaggaaatgctgtctatgatttcttcattggccgtgaattaaaccctcgaatt

SEQ ID NO: 134377 - DNA, 50 bp, Homo sapiens
taagcacgacccgtttgcatccatgcatattgtccgtacagatagtctga

SEQ ID NO: 134378 - DNA, 100 bp, Homo sapiens
ggtcaaggattatggcagctggcttgatattgggacaaggatggatagaatgacagaagatgctcttcgcttgaatctgttgaagcggagcttggaccca

SEQ ID NO: 134379 - DNA, 90 bp, Homo sapiens
aggatgttggcggtccctgtgacctgtggagacacggccagatctgccctccagcaaatatcaatattccaatgggagcctttcggccag

SEQ ID NO: 134380 - DNA, 90 bp, Homo sapiens
gctcaacgacgaggacctgacgcagatacgtaggtaacctttccagagatgtgacagaagtccttatacttcagttgttcagtcagattg

SEQ ID NO: 134381 - DNA, 50 bp, Homo sapiens
cagatgagctcatgagtgaaaggacctctttgtttttagacatgaattgg

SEQ ID NO: 134382 - DNA, 100 bp, Homo sapiens
gcagaatgtgatttgcttgaagatatgaggacatttcatatatatggatttcacagctacactcgatccacgccccacaccacatacaggctgctgtctc

SEQ ID NO: 134383 - DNA, 74 bp, Homo sapiens
ctctaacacagtacctgttaacaactgctgtggagcatccgagtgtgccagagtctccagaattcgtcagggtc

SEQ ID NO: 134384 - DNA, 100 bp, Homo sapiens
cgacgctgctcaaaacctcgctccggaaaggggacacctgcttagaaatgttggacaaagttgagcctccaactatacctgaaggttacgccatgtctgt

SEQ ID NO: 134385 - DNA, 97 bp, Homo sapiens
cacctgtgtcctggttgagggtctccagggttctttggggcccgagatgccctgctctctgacctggagactaccacctcgcacatgccaaggtcag

SEQ ID NO: 134386 - DNA, 141 bp, Homo sapiens
cgctgctgctgcccaaggccttcctgtcccgcgggaagcggcaggagccgccgccgacacctgaaggtatttaaaccatgtcagagctgcctcaccacaggaccttgctggaggctatacttcttctcttgcttgtcacag

SEQ ID NO: 134387 - DNA, 75 bp, Homo sapiens
gctcagccgcaagtacccgtccatcatagtcaactgcgtggaagagaagatgatttgtcattaattcggaagaac

SEQ ID NO: 134388 - DNA, 100 bp, Homo sapiens
ctggagaaggaccgtgtagccctcaggaggacgctggacaaggttgtaagccaatgttgtgaggcttcaagttcagacatcactgagaaatcagatggac

SEQ ID NO: 134389 - DNA, 100 bp, Homo sapiens
ctgaaataacccttgatcctcctcctaattgcaggtttacccaaggtccagcctagcccctaggcaccatgtcggacagtgatctaggtgaggacgaagg

SEQ ID NO: 134390 - DNA, 98 bp, Homo sapiens
gcggagcccgcgcagtccgcgcagccctcatcgcaactgggcccgcgcgcaggctctgggcgtggggaggctgagacacgggagtgcatctactacaa

SEQ ID NO: 134391 - DNA, 85 bp, Homo sapiens
atcattttaggattgtcaaaaggaggattgaggaggatcagatcaataatggaggcaatgaaccactcacgaattcttgtttggt

SEQ ID NO: 134392 - DNA, 107 bp, Homo sapiens
gctgtctctgatccgcaagcatgctcagaccttcattgctctgtgtgccaccgtacaagccagctgccatgttgtgagcacataccacatagctccatggagatgcc

SEQ ID NO: 134393 - DNA, 76 bp, Homo sapiens
tcgcctcgactccaaatggttgaaaacagatatacagttgtatcacggactgattcaccgagcccaaccgtactca

SEQ ID NO: 134394 - DNA, 100 bp, Homo sapiens
gccccatggggtatatccaccctcaagtgtggtcactacaggaaaagatatcttcattaaagtgcaacagcacactgagagcaacacaccaccacagcag

SEQ ID NO: 134395 - DNA, 75 bp, Homo sapiens
gtttccagatggctctaacctcagtgggtttcgaaaaaacgatgaaatgaaagctatggatgttttaccaatttt

SEQ ID NO: 134396 - DNA, 82 bp, Homo sapiens
atctgtcttcggtggactccttcggcagtccacccaccgccgccgcctcccaggttattcagcttctcaaggctggaaaagc

SEQ ID NO: 134397 - DNA, 97 bp, Homo sapiens
gaagcaggactgcgccgcgtcttcctcaaggtggggttcggggggccaccgaatcgctgtcacgccggcaggtggagattctggacgcaaagacaag

SEQ ID NO: 134398 - DNA, 89 bp, Homo sapiens
acaaccttcaaaacaactggaatatttagcaaggattcaaggctttcagggtgatgttgcaaatgaagtggagactgaacaaatactct

SEQ ID NO: 134399 - DNA, 100 bp, Homo sapiens
acgcctggggcgtggagctgcccaagcgtggctatccccctggatacaacttcagtattaaaggaggaacatgttacaacctttgaagatgaaggatcct

SEQ ID NO: 134400 - DNA, 82 bp, Homo sapiens
acatatattcaaaagatcttcaggatggaggtctctaattaacagaagatggcaaagcccagccacagcagctatgtccttc

SEQ ID NO: 134401 - DNA, 88 bp, Homo sapiens
aaagacaaaaggagattctgatgaagaagttattcaagatggtttgtggtaaatatgccagctctagaacacatgaatcagattttac

SEQ ID NO: 134402 - DNA, 100 bp, Homo sapiens
aaggagacgtcagaacgtggcttatgagtacctttgtcatttggaagaagcgaagaggtgtgactgcacagaaaagttacaaaacaaatttgactttttg

SEQ ID NO: 134403 - DNA, 96 bp, Homo sapiens
cggggagagtagggtgctgtggtctgagctagagggtgaagctggcggagcaggaggatgggcggatgagcagagtgctgtctccatgttgaagaa

SEQ ID NO: 134404 - DNA, 87 bp, Homo sapiens
aaggtcgccctcaaggccatgatcaaaaccacatacccccggcctcatgagtacctgtccccagcggatctgcccaagagctgggac

SEQ ID NO: 134405 - DNA, 98 bp, Homo sapiens
cggaccagcctgccccggcgccgagggagactgccagactcgggaggaggcagtggcgctcggcgtgggtctgtgcaacaatggcttcatgcaccacg

SEQ ID NO: 134406 - DNA, 82 bp, Homo sapiens
ggggcctcgaggctttttttctccagccgagaggacgcggctgtgatatacgaagcattggttggatggtacaaaaagcatc

SEQ ID NO: 134407 - DNA, 83 bp, Homo sapiens
gttagcgttgtcgccgaaccgaaacaatgcagatcttcgtgaagactctgactggtaagaccatcaccctcgaggttgagccc

SEQ ID NO: 134408 - DNA, 96 bp, Homo sapiens
caaactcccaggctcaagcaatcctaccatgtcagccttcccagtagctggaactacaggatgtcgctgctgagcctgtcttggctgggcctcagg

SEQ ID NO: 134409 - DNA, 75 bp, Homo sapiens
gcatttccaaaggaaggagttttttgcgaaacttagagaattactgcttaggctggagttcagtggcgtgatctc

SEQ ID NO: 134410 - DNA, 100 bp, Homo sapiens
caaaccgtggctgctcgataaatcagacagaacagttaatcctcaatttaagcctgatctaacccctagaaacaggttactttgacgcgcacgcccttgc

SEQ ID NO: 134411 - DNA, 103 bp, Homo sapiens
gtccagagctgaggactgcctgtttgcagctgccactgcagagccccgccatggaagacacgccgttggtgatatcgaagcagaagacggaggtggtgtgcgg

SEQ ID NO: 134412 - DNA, 100 bp, Homo sapiens
aagatggcggccggcgaaaggagctggtgcctgtgcaagttgttgagttcagggtaccaacatttctttccatggatgttgatggacgtgtcatcagagc

SEQ ID NO: 134413 - DNA, 83 bp, Homo sapiens
gcacacaccctcgtattctcctgcccttccccagatagcagaccccacgttagctgaaatgggaaaaaacttgaaggaggcag

SEQ ID NO: 134414 - DNA, 90 bp, Homo sapiens
agcaccggcccccggagaagccgccgcggccaccccggcccctgcatctgtccgatcgctctttcagatcctgcatagggacatgaaggc

SEQ ID NO: 134415 - DNA, 100 bp, Homo sapiens
tgcccataagttttgtaacacagaagatgaggagactatgtatctgcggaggatgtacagttacccagcacgtgtacctcctcctcctcctattgctcgg

SEQ ID NO: 134416 - DNA, 100 bp, Homo sapiens
aggggtcagtgatggagctgcttcagttatataagtttggagagacagtttctattgttttttggacagacacttggagaccagaaagcttctttgacaa

SEQ ID NO: 134417 - DNA, 102 bp, Homo sapiens
atcttactacacatcttttgtggtaaaagatgagctgtggcttgtcatgaagctgctaagtggagtattggtaaaggttttcaaggtgtcatgaaaagatgg

SEQ ID NO: 134418 - DNA, 82 bp, Homo sapiens
cggattcacacaggatggcttgcagaagacgctatttgctgagcagtccaaagtcctgagcgccgtggaggaccgcatggac

SEQ ID NO: 134419 - DNA, 75 bp, Homo sapiens
gcggattcgccgaggcaccgaggcactcagaggaggtttggacatatttgactcttttccccccaggttgaattg

SEQ ID NO: 134420 - DNA, 97 bp, Homo sapiens
gggacatgtctcagatatcaatgctgtcagtaccgaggcacagtgtggcaagtttagaaagcattgtgaatgaagccaagaacattccagcctttct

SEQ ID NO: 134421 - DNA, 82 bp, Homo sapiens
ctcttacgtctgcggaagtgcagctgcctcagttcttagcgcagggtttccaggcctgaggtgcccgccctggccccaggag

SEQ ID NO: 134422 - DNA, 100 bp, Homo sapiens
tagaaggagactctgaattcttacaacctctctacgccaaagaaatccagtcccgaccaccaagggaagagatggtgttgagtggaaaatacaaatctgg

SEQ ID NO: 134423 - DNA, 75 bp, Homo sapiens
cggacctgcacgagctgtctgaatggatgatgaacttgttgttggacatagtgcaagatcagacatctccagctt

SEQ ID NO: 134424 - DNA, 89 bp, Homo sapiens
gaaattgccggtctgggagttgggggcaaggagaagatcctgattgttagcactgctagagtttgctgaagagaagatgaaagtgaact

SEQ ID NO: 134425 - DNA, 126 bp, Homo sapiens
gggtgagcttgtttgtgtccctgtgggtggacgtggttggtgattggcaggatcctggtatccgctaacaggtccgagcctccgtactgggtgcaatgaaagctccacgcaggccttaccatggaa

SEQ ID NO: 134426 - DNA, 124 bp, Homo sapiens
gatcagcgcaaggcaaagttgggtgactcccacgacctgcagcgcttccttagcgatttccgatagaagagtgatggatgtcatttctcgttcacagctttacttggatgatcttttttctgac

SEQ ID NO: 134427 - DNA, 75 bp, Homo sapiens
ggaaaaggacgcaaagttctccggcgagggggggctgtcggggggctgttaggtgcctggatgacaagtggacag

SEQ ID NO: 134428 - DNA, 88 bp, Homo sapiens
ccagccatatcgcgctgggtgccgcttcgccagcgcccgagatgatttacatggacgatggagtgtcatcttttgtccagatcagagg

SEQ ID NO: 134429 - DNA, 75 bp, Homo sapiens
tctgtgagatgtcctcactgtttcaggagttgattatggaagattcccacaagagtaccacgtcagagacagcac

SEQ ID NO: 134430 - DNA, 75 bp, Homo sapiens
ttttaatgaccacaacaagcaagcatgcagcttactgcttgaaagacacctagctcccctgtttgacaaccctaa

SEQ ID NO: 134431 - DNA, 126 bp, Homo sapiens
agccccttggcccttgtccttgtaatttaacagctggagcctgtgatgttcgctgctgctgtgaccaggtcaaaggtcgtgataaacatatcaataatttgaaaaagaaatgccagaaggaatcag

SEQ ID NO: 134432 - DNA, 75 bp, Homo sapiens
taccagactgttatgtctttcagaatacggccttagaaaatttacgtgtatacctgtgtgagaaaatcatagctg

SEQ ID NO: 134433 - DNA, 83 bp, Homo sapiens
tattagtggcagtgtcttaccatctcagccgacaaagcagtgatccatctgtactttttgtttgatgatggtgatgagcgaac

SEQ ID NO: 134434 - DNA, 80 bp, Homo sapiens
cgccttcaacaccaccttcatctccaccatcgcttggtaaaatgcggctgacaattccgtgtcgggcccttacatgttct

SEQ ID NO: 134435 - DNA, 93 bp, Homo sapiens
acctggggccctgggtgaagtgctccgccgcccttgcctccagggccttcatcccagaataatcactgaaggatttgaagctgtgaaggaaaa

SEQ ID NO: 134436 - DNA, 51 bp, Homo sapiens
agcctcctgagtagctgtgattacagaaaagaagagtcggggacctcctag

SEQ ID NO: 134437 - DNA, 75 bp, Homo sapiens
gtgaggtcaacctgcgcccccagatgtcccagatttggatttacagtgtgagataatcagctacatagaagtacc

SEQ ID NO: 134438 - DNA, 50 bp, Homo sapiens
ccgcggctcctgtgtgctttgaagatattctctaagccgctttcatcatg

SEQ ID NO: 134439 - DNA, 98 bp, Homo sapiens
tgacaaatttagtggccatcccaaaggctgcctctctccagaatgatctcaaccagggtggcccagggagcactaattccaagaggcaggccaactgg

SEQ ID NO: 134440 - DNA, 100 bp, Homo sapiens
ctcctcccagctctgtttcttgtcctcctggtattgggatttggatggctgctctttttctaaagaggttaacactacaaactgtaaagtctgaaaatag

SEQ ID NO: 134441 - DNA, 100 bp, Homo sapiens
cggccccgcgcagcccccggccgcagcgcaggcagcccagcaggacctgaaggagaagaaggagaaggtggaggagaaggcaagccggaaagagcgaaag

SEQ ID NO: 134442 - DNA, 90 bp, Homo sapiens
cttcagtatctcagtcctccagtgtttggatattcaggcaattaagttggaatatgcaaggttggttaagttggcccaagaagacacccc

SEQ ID NO: 134443 - DNA, 100 bp, Homo sapiens
cctgaatcttctgggagctgaggaaccagatatcttgaaaagctgccagaaagatgaagatgacgccaacagactcggggagaaggtgatcctgcgggag

SEQ ID NO: 134444 - DNA, 98 bp, Homo sapiens
gaaagagcctccgtcaccacataattgctcttaaacttggtgtgactgctaatgatgtaaagaatgtcattatctggggaaaccattcctcgactcag

SEQ ID NO: 134445 - DNA, 50 bp, Homo sapiens
tcagcaagaacgggaacaaaactctggttaaccccaaagattggctttcc

SEQ ID NO: 134446 - DNA, 100 bp, Homo sapiens
ggaatcagaatgccacagcagtcccaaatgggaaaaagattgccaggatgcagaaaatgcgattgtgcatatgggcggtcagtggttgggtggtcgtcaa

SEQ ID NO: 134447 - DNA, 100 bp, Homo sapiens
ccactttccaacttcgagtcacaccagaattataagcttcttccagaccagctggtcttgcttctggagcatctcttggagcagaagactctgagccccc

SEQ ID NO: 134448 - DNA, 100 bp, Homo sapiens
tgagtttctcctctggtagaattgggttgtctcctcacagactatgagctccttgaaagagggaatcgtgtcttactcatctttgtatccccagtgtcta

SEQ ID NO: 134449 - DNA, 74 bp, Homo sapiens
aacctaagttttaaacagaaggtgaacctctgaggccctagactggagctggttacagacggaagaagaagagc

SEQ ID NO: 134450 - DNA, 95 bp, Homo sapiens
tgtgaagaagaatttcgatctccgccctggggtcattgtcaggtctagtgacggagcccgcgcgcggcgccaccatgcggcagaaggcggtatcg

SEQ ID NO: 134451 - DNA, 74 bp, Homo sapiens
gctgtactgctccccaagaagactgagagtcaccacaaggccaaggggccgttgctccagggagaactgcaaat

SEQ ID NO: 134452 - DNA, 88 bp, Homo sapiens
gacgtgggcgaacttctgagctaccagagtaacagttacccctcaatgagcgacccctacctgtccagctattacccgccgtccattg

SEQ ID NO: 134453 - DNA, 100 bp, Homo sapiens
ctgcactcccggccgggtggtgggcgcatatcctgggtagcctctaggaagcgctagacacatagtaattccctcctggtcccagacagtctaagaggca

SEQ ID NO: 134454 - DNA, 75 bp, Homo sapiens
attgcattcagtctagttcctggttgccggctgaaataacctgggctaccagggcatggtggacggaggctcaaa

SEQ ID NO: 134455 - DNA, 75 bp, Homo sapiens
ctgggagcagccggccactaaggatggccatgagctacccccaccaattgcctttgatgttgaagcccccacgac

SEQ ID NO: 134456 - DNA, 82 bp, Homo sapiens
ttcctcctccttggtcgccgcgtccttggctggcgtgttcgagaacttgtcttggacaattgcaaatcaaatgatggaaaaa

SEQ ID NO: 134457 - DNA, 80 bp, Homo sapiens
gctatgaagacacgcttcttctggaagaccagccaacagtgcctccggagccagcgtggtggccatagacaacaagatcg

SEQ ID NO: 134458 - DNA, 82 bp, Homo sapiens
acctcctaggactctatgacacggccggacaggattttttatcaagcagaaatgcatcgaacaacgagaatcaagatcactg

SEQ ID NO: 134459 - DNA, 98 bp, Homo sapiens
ggaagtttacttatctgggtccttcaacaactggagtaaacttcccctcaccagaagaacaccttccaccatgaccacctcagcaagttcccacttaa

SEQ ID NO: 134460 - DNA, 98 bp, Homo sapiens
ctgataagccacggcatatccagatgaaactagccagactggaatttgagtctttggaggcactcaagcagcagcatctgacagatacgtctcatggt

SEQ ID NO: 134461 - DNA, 100 bp, Homo sapiens
ctgatcacaaacaaatccttgaaagaagaagatggagaagaaatagttacctatgatcaaatggtggagtcaatgaagaaagtagcagggatggatgtgg

SEQ ID NO: 134462 - DNA, 100 bp, Homo sapiens
attctctgctgtgcctgatcccatcccgcagtggaacaacaatgcctgccttcaccaagccctggatgaaaacatggacctcttggaaggtataactggc

SEQ ID NO: 134463 - DNA, 75 bp, Homo sapiens
gcaggacctctgtcagagaatgaaacactcatcgcatggaaatgactccaaagtagatggtttagtaaactttga

SEQ ID NO: 134464 - DNA, 73 bp, Homo sapiens
gcggcagtgacccgccctgggagctgcccccagcgtgttatgtgccaagaaccttgcaaagaaagacttcttc

SEQ ID NO: 134465 - DNA, 83 bp, Homo sapiens
tattcatctcaaaaacaaaattctgaactcaggacttggcaagtgtctggaaatgaagtatggaaatgaaatcatgaataaag

SEQ ID NO: 134466 - DNA, 75 bp, Homo sapiens
ccgtcgccagcggagcgaacccgagagcgtggagcgggctgggccagagtggagactgctgcacggactctggaa

SEQ ID NO: 134467 - DNA, 75 bp, Homo sapiens
cagacggacagtacctcttctgcaggtactggaaacccacaggcacacccaatgggccgaattcattttgttttc

SEQ ID NO: 134468 - DNA, 82 bp, Homo sapiens
ctcggcggccccggcgccggcaaggggacccagtgcgcccgcatcgtcgaggtgctgactgggttacttttttaaacactag

SEQ ID NO: 134469 - DNA, 74 bp, Homo sapiens
catatttgggtccaactgtgaagccagatgataagggtttttaatgaccacaacaagcaagcatgcagcttact

SEQ ID NO: 134470 - DNA, 75 bp, Homo sapiens
ctcaaagctgctgccgccccttgggctaaaaggctcttgtcaggatggtgaagctgttcatcggaaacctgcccc

SEQ ID NO: 134471 - DNA, 83 bp, Homo sapiens
cagcctcttgcgaccacagccagagcctcagcaggagcctgttctcatcaccatggcaacagcaaaatgatgcttcaacaccc

SEQ ID NO: 134472 - DNA, 82 bp, Homo sapiens
cctgcagtacctgcagaaggtctctggagacatcttcagcaggccctgggctgcatcttgtacctgctgtgcttccggcagc

SEQ ID NO: 134473 - DNA, 75 bp, Homo sapiens
cagaaaaggatcggaaaagaattttggtcctctcagggtgcgccatcattgtccgaggtcagcctcgtggtgggc

SEQ ID NO: 134474 - DNA, 100 bp, Homo sapiens
cccaaatcgtggccccttcgacctgcgctccgcgctctggcgctacggtctggccgtcggctgcggcgccatcgtacaagattctgctgtactcattgga

SEQ ID NO: 134475 - DNA, 96 bp, Homo sapiens
tcgggcagagaaagagtgcaagatagaatatgatgatttcgtagagtgtttgcttcggcagaaaacggatatgctgcaggctgctagtcattatcg

SEQ ID NO: 134476 - DNA, 75 bp, Homo sapiens
agagagccagcaatgcctccatgaacaatctcacccaattactctgctcaggttctccccatgacaccacctgaa

SEQ ID NO: 134477 - DNA, 87 bp, Homo sapiens
ggggtctaagcctgtgcggctgagcgtggcaatccctaaagcgtttcccaacctctttcccccactgaagccggagacggtggcccg

SEQ ID NO: 134478 - DNA, 82 bp, Homo sapiens
aaacaggcttggctggtcttgaaatcggcatcttagatgccatggacaatattaccaggcagaaccaattctacgataccca

SEQ ID NO: 134479 - DNA, 83 bp, Homo sapiens
catgttcttggtgaagtcggccagcctgagcaagcggaggacctacgccggcctgggtttggtgcacctcgatttggaggaag

SEQ ID NO: 134480 - DNA, 98 bp, Homo sapiens
catcaccctgctcagcttcaccatcgtcagcctcatgtacttcgcctttaccaggaccacctgtagagctgcgccaaagaaaaaagccaaagtcttca

SEQ ID NO: 134481 - DNA, 100 bp, Homo sapiens
tacatggacatatgcagcaaatgttggggaacatgatctgttaaagatatccttggaacagaagatcttattgtggaagtgacttccaatgatgctgtga

SEQ ID NO: 134482 - DNA, 50 bp, Homo sapiens
ggacctccagatttccttactgggtctgcggaagagggagctgctgaagg

SEQ ID NO: 134483 - DNA, 100 bp, Homo sapiens
aaaacatgcagcaaccactattttcttcctgcccctcgttgatgagagcattcgaagtgacctcagcagggcatccagattgatgtacagctatatattt

SEQ ID NO: 134484 - DNA, 90 bp, Homo sapiens
gcccatgactggaaccagaacagagtgtctgctgcacagagctttacatccccgggagcctctacccccaattcagcagcatatttggaa

SEQ ID NO: 134485 - DNA, 90 bp, Homo sapiens
tatgaataacgacccatacatgtcaaatggatctctttctccacccatcccgagaacagagtccaaaactacttacctggaagaccttcc

SEQ ID NO: 134486 - DNA, 96 bp, Homo sapiens
ggtcttacattgctgcatcaagaaacccaagctgctgaggtagtcactttccacatggcatttcaagagtacgaccgcttaagacatgcagtaggc

SEQ ID NO: 134487 - DNA, 50 bp, Homo sapiens
caagcgtttcagcgcctacaattacagagcagatttactatgctgggcct

SEQ ID NO: 134488 - DNA, 75 bp, Homo sapiens
cctggagacaactgctactccgtgggcagcgtcggggatgtccccttcacggccactaaagatgctggccagata

SEQ ID NO: 134489 - DNA, 82 bp, Homo sapiens
aaagtgatcataggagaaaaccatttcagtttgaaggatgacctctaggaagaaagtgttgctgaaggttatcatcctggga

SEQ ID NO: 134490 - DNA, 100 bp, Homo sapiens
caggaggctaagaaagtggtgaatcccctgtttgagaaaaggcctaagaattttggcattgatctttccctagatcattctgacctagttgcagagttgt

SEQ ID NO: 134491 - DNA, 83 bp, Homo sapiens
cattggctaaaacttgacggaaaatggtggttagtttttcagttatgggacaaaaatattatatcaaaacactgaagctttgc

SEQ ID NO: 134492 - DNA, 101 bp, Homo sapiens
acacaccctgggccagcacatctccacctcatcaggaaacagctgagacaggactgcaaaagagcttcctggactcaggatatcggatcctgggagctgtg

SEQ ID NO: 134493 - DNA, 96 bp, Homo sapiens
acgacgacgaggaagaggaggtttctgagatgaacagactagccactttgcattgactggaaacaatggcatttacagaaagagtcaacagcagtg

SEQ ID NO: 134494 - DNA, 98 bp, Homo sapiens
tctctgccacgtccatcttctttgaatctatgccctacaaggttggatggcaagcatgtggtgtttggcaaagtgaaagaaggcatgaatattgtgga

SEQ ID NO: 134495 - DNA, 75 bp, Homo sapiens
acgcagaaggactgcctcactgagcaaccaagagcctagccgcccgtgactctcacactgtctcctgcatgacgg

SEQ ID NO: 134496 - DNA, 90 bp, Homo sapiens
gggaccaggcggaggcgtcgcgggagcctttggggcaccacagagatgcggattcaggaattgtagggcctcaacctatagactttgtcc

SEQ ID NO: 134497 - DNA, 87 bp, Homo sapiens
agtttctgagcatccctgcaatgaagagaacccagggaagttcctttttgaagtagttccaggttatatcttaagtgtggtgctgct

SEQ ID NO: 134498 - DNA, 100 bp, Homo sapiens
ctgcctgaggttgtccgaaggatgccgaggaaaaggatatcaggactggaatggctcttacagcaagatccgtactactgagcgagtgtgcttgatccag

SEQ ID NO: 134499 - DNA, 75 bp, Homo sapiens
catctcttctattgtacctgcagatctcaacagcaacggattcatttgtgactatgaacttcatgagctcttcaa

SEQ ID NO: 134500 - DNA, 75 bp, Homo sapiens
ccccttgaacctgaacagcatcccagacattgagggtggagccagccatcctgagacgtccgtacagcccgtact

SEQ ID NO: 134501 - DNA, 83 bp, Homo sapiens
cttggactgagtcctgcaggacacagtgttttccaagcagtgaagcacttgccgtgttgaactgaatgcactactggagaatg

SEQ ID NO: 134502 - DNA, 100 bp, Homo sapiens
ccatggacgacattcgaaggatggaagaagagacgaagagacagctggatgaatgttcctttctgccgaaattctccattcatatagaaaccaagtatga

SEQ ID NO: 134503 - DNA, 107 bp, Homo sapiens
aaacatccatatcataagtggaattttggagatattcaaaggctgcctctaagaatcaaacttcactcttgggagaaccaccaaaagaaattcggctcagtaaaaat

SEQ ID NO: 134504 - DNA, 97 bp, Homo sapiens
aagttcgtcgtcttcatcgtcgcggttctgctgccgcagtctctggtcccagcccaccccatggcccctcccagtcccagcaccaccagcagtaata

SEQ ID NO: 134505 - DNA, 83 bp, Homo sapiens
agtcgttcctgggcaagctgggcggcaccctggccaggaagcggagggcgcgcgaggcggagctggagtttgttcagatcatc

SEQ ID NO: 134506 - DNA, 74 bp, Homo sapiens
gcctgcagctgggccgcggccgaggaggcagcgcgacctccgcacggatgaccagtgtcccagtgaaggaacga

SEQ ID NO: 134507 - DNA, 74 bp, Homo sapiens
atcaacagatgcccctgataaaggatacgttggtttggaaggtttgcagttgctgctcttcagtccaaagtaga

SEQ ID NO: 134508 - DNA, 83 bp, Homo sapiens
cgtcgtcggcctctgggcagcagatccggccccacatcgcaactcttcgtaagtacacctatggcaagcacattctggccaag

SEQ ID NO: 134509 - DNA, 75 bp, Homo sapiens
ctgtccaaggatctgccgaaagaaaattttcgtgctctgagcactggagagaaaggatttggttataagggttcc

SEQ ID NO: 134510 - DNA, 50 bp, Homo sapiens
ttcgcagtggtcgcttcttctccttgaggctcaaggaactgaaacaaagg

SEQ ID NO: 134511 - DNA, 75 bp, Homo sapiens
gccagggagccaagcgtcctgcccggccacaatgcagatcttcgtgaagactctgactggtaagaccatcaccct

SEQ ID NO: 134512 - DNA, 75 bp, Homo sapiens
aacgtgttggaccttccggagcttctcagaagacagagggttttcttttgagccccgagcctggagatgaggggg

SEQ ID NO: 134513 - DNA, 98 bp, Homo sapiens
ctgcttgtcccagaagcaatttaaggagcagcttatgtttattcagagccaaggccaggtccagctgactattgagcttctggacacagaagaggaga

SEQ ID NO: 134514 - DNA, 87 bp, Homo sapiens
caatttaagcctgatctaacccctagaaacaggctactgcagcactggggtgtcagttgttggtccgacccagaacgcttcagttct

SEQ ID NO: 134515 - DNA, 100 bp, Homo sapiens
aggcgcagaccacagccgtacccatacccttcaaatcaggcatttctccagttttttggagatgaatttcttcgcttgctcctcacaagatttatctttt

SEQ ID NO: 134516 - DNA, 83 bp, Homo sapiens
gatcttcgaacttttgacacggctttggaaacgacgtcatgtgttagcttccaattgaagacttgtgcagtttaacatcccag

SEQ ID NO: 134517 - DNA, 80 bp, Homo sapiens
cctcccgcccaaggagaatgcgctcttcaagcggatcttgctgtcggaaaaggtaacagaagatggaactcgaaatccca

SEQ ID NO: 134518 - DNA, 82 bp, Homo sapiens
ggatgtgatgcctgctagccaaaagggtccaggtgcaggtacagcagtctccgcaacaggtctcggctcagctctccccaca

SEQ ID NO: 134519 - DNA, 50 bp, Homo sapiens
cctctaattcaccgcaggatttccggtgagaatgagatggtgatcatgag

SEQ ID NO: 134520 - DNA, 144 bp, Homo sapiens
gttgagatctccatccatcaaactgcgcaggagtaaggcaggaaaccgacgagaggacctcagctccaaggccaaatttgagtttcatcatggtgactatgaaaaacagtttctgcatgtactgagccgcaaggacaagactgg

SEQ ID NO: 134521 - DNA, 100 bp, Homo sapiens
gcgaaatggtgtagaagaaatcaaacgacatctcttcttcaaaaatgaccagtgggcttgggaaacgctccgagacaacttgtgcaccatggacaatttt

SEQ ID NO: 134522 - DNA, 50 bp, Homo sapiens
tctcatagacaagtttgtacatccaaagttttgcactgctgtgtgtgtgg

SEQ ID NO: 134523 - DNA, 106 bp, Homo sapiens
gctagacctgcagagtgaagaaagctggtaatagatgtctgacaaactaaagaaagacttgtgttacgtgtcatggagaaactccagctgggcccagagattctgc

SEQ ID NO: 134524 - DNA, 75 bp, Homo sapiens
ttcgccgccgcgcacaaccgcacgtgcaggttgcataccctgtcctgagggcgcggcacggagtgcatgcgggcc

SEQ ID NO: 134525 - DNA, 88 bp, Homo sapiens
caaaggctgccgagaaagtctagcctcctgtgcaaaggtcaaaatgaagaaagtgactgagaccgaagatgatagtgatagtgacagc

SEQ ID NO: 134526 - DNA, 105 bp, Homo sapiens
ctcaagatggcggacaaaacgccaggcggatctcagaaggccagttcaaagataaacctgaaaattgggatgtatggtatgaaagcaagtttgatgactgtgata

SEQ ID NO: 134527 - DNA, 96 bp, Homo sapiens
aaatggtggagttggaataaagagcagttgaagacatctcttcatcgaggactaacccctacagttatgcaatgagtactgaagaagccagatttc

SEQ ID NO: 134528 - DNA, 100 bp, Homo sapiens
gccgtcccggctcacctggcggtgcccgaggagtagtcgctggagtccgcgcctccctggtactatactggcaattgctggagaagattttgcaattgtt

SEQ ID NO: 134529 - DNA, 97 bp, Homo sapiens
cggcgacccctcggcgccgatgtccctgatccctggagcgacgacggccgctgcctaagctggaaagtttcccaacagtgatgtcacaagattgacc

SEQ ID NO: 134530 - DNA, 99 bp, Homo sapiens
agagctcggtgctcgagaacttcgtgggcagcctatatatgcaaacagatttgcagtaccaacctatgcagccaagcaacctcagcagttcccatcaag

SEQ ID NO: 134531 - DNA, 83 bp, Homo sapiens
ccccggtgcacccgcaacaggcgttttgcaatgcagatgtagacaatgcagatcttcgtgaagactctgactggtaagaccat

SEQ ID NO: 134532 - DNA, 83 bp, Homo sapiens
ttcatcacaagttgctgaacttaaggtagctacagcaagctgggtagcaggcagatccaaaggatatcatgaagtttccaggg

SEQ ID NO: 134533 - DNA, 83 bp, Homo sapiens
ctttctcctactccataaagacttcaatagtttatgccaacgtgacttcattcatacagatgaaccaaggatcgggatagcag

SEQ ID NO: 134534 - DNA, 82 bp, Homo sapiens
aggagagccaggattcatgctctacatccccatagaggctttgccacaaatgtcagtgcagaactctggctggccccaccaa

SEQ ID NO: 134535 - DNA, 80 bp, Homo sapiens
aaggttaaaggttatggtccagattaacaccagcggagaagagaccagaagatcagctgccatgttacttgactcacacc

SEQ ID NO: 134536 - DNA, 100 bp, Homo sapiens
agcgtgatcccaggaacagccccgtgccccccacaaagaaagatatttcagcagttgaatcagttgaattcacttcatcaagaaactatcatgaaatgcg

SEQ ID NO: 134537 - DNA, 99 bp, Homo sapiens
aggaaatgggacatttgagtgtggcgcgtgcagattattctatgagccagtcacaacaccttgcgggcatactttttgcttaaaatgcctagaaagatg

SEQ ID NO: 134538 - DNA, 50 bp, Homo sapiens
gtcggcggcgcccggatgggcagctgagcatcaagcttctagctgtgcaa

SEQ ID NO: 134539 - DNA, 80 bp, Homo sapiens
accctggagcctcagttggaagcagccgatccagcctgcggagcctgtggggcagcactggccatgggcctctgtgtcgc

SEQ ID NO: 134540 - DNA, 87 bp, Homo sapiens
acggcatctttgatcttcagaaaacttcccttggaggggatgcaccagaagagccagagttggttaccacagagaagcgcttcctca

SEQ ID NO: 134541 - DNA, 100 bp, Homo sapiens
gcctgcacccagtgcctcaatgagcccatgatgtttggagaccgccttacgacagtctgcctacctcacagacctgcttcttccagctgaggctgccccc

SEQ ID NO: 134542 - DNA, 103 bp, Homo sapiens
acatcgtgggcgccaacattgagacctatctgctagaaaaatcacgggcaattcgccaagccagagacgagaggacattccacatcttttactacatgattgc

SEQ ID NO: 134543 - DNA, 100 bp, Homo sapiens
acatccccaacgtggatgacaagaagacgtccaatctgagcgtgctgcggacggcgctgcggtacatccagggtgaggtggctttgaccccgggttgccc

SEQ ID NO: 134544 - DNA, 119 bp, Homo sapiens
gcggagggcttgaggctcgcgagcctccttcgccgcgccccacttgctcgtgcactttacacacatgaggaccgcctgtactttgtgatggagtacgtgaatgggggcgacctcatgta

SEQ ID NO: 134545 - DNA, 75 bp, Homo sapiens
ggccggggccgcttcaccacttacgaaatcagggtcaagggagctcactcagtgggtttgatgtggtggatgctg

SEQ ID NO: 134546 - DNA, 58 bp, Homo sapiens
ctgcgttgacacgtcttatttaatccacatcataggctctgtgtgctccgggatggag

SEQ ID NO: 134547 - DNA, 80 bp, Homo sapiens
agcaaggtgggcccggacggcacaccctacgttaccgtgctcaaggagcttactccacgggaacagcctctagataatct

SEQ ID NO: 134548 - DNA, 74 bp, Homo sapiens
ccctcatcctggttctggaatcctcagttcaagataacgaaggaggcccaacttcattcaataaggagcctgac

SEQ ID NO: 134549 - DNA, 96 bp, Homo sapiens
ccgggataagtagctttagcgatcgggagacagccgggcgctgcaagtattggtaaaggttttcaaggtgtcatgaaaagatggggatttaaaggc

SEQ ID NO: 134550 - DNA, 90 bp, Homo sapiens
agaacagctgttactcaagaagatgtatttaatgcttgacaataagagaaaggccctggccaacgtcaacattgggagcctcatctgcaa

SEQ ID NO: 134551 - DNA, 73 bp, Homo sapiens
tcgggagccgtggccctgatccagacctgggcaggtctgagcgggaaagttccgaagaataggagtggctgag

SEQ ID NO: 134552 - DNA, 74 bp, Homo sapiens
cccggtgcccgaggaggcagccaagctcatggcctgccactgcgtgcgatgaagatttgataaagtggaaggca

SEQ ID NO: 134553 - DNA, 82 bp, Homo sapiens
acagttggccaatactggtgcccaagcctggattaaaaaggttccagaagcggcgactagataaagtccgacggaaaaagga

SEQ ID NO: 134554 - DNA, 82 bp, Homo sapiens
gattcgggcgcctgcttcagtgggctgaaggcctttcggcagcagctgaggaagaccacgcggaccaaagggtttctgggac

SEQ ID NO: 134555 - DNA, 96 bp, Homo sapiens
acgctctatagccaaggaaggcttcgagaagattagcaaaggtgctaatccagtggaaatcaggagaggaacttgccacatcagactcagattccc

SEQ ID NO: 134556 - DNA, 50 bp, Homo sapiens
cgagagatgtattcagtggaggaagctgcaaaagctgatgaagcattgaa

SEQ ID NO: 134557 - DNA, 100 bp, Homo sapiens
aatcaattgcaaaggtacttctttagaaaatctcatcatggaaatcacagcacctgattcccaaggcaagacaggttctgccgatgatgagaggatcttg

SEQ ID NO: 134558 - DNA, 83 bp, Homo sapiens
aagttattcagtctcgtctcctcggtcagtggactcttattcttcaactcagcatgttcctctggtcaaaatgtctttggaag

SEQ ID NO: 134559 - DNA, 75 bp, Homo sapiens
cttgccctggtcttgctcggccgatgaagtgcagaggtttttttctgatggatatggcagtggacgtggatttgg

SEQ ID NO: 134560 - DNA, 50 bp, Homo sapiens
ggaattcatgatcatttgccaggtaagaatgattgatgttggctgatatt

SEQ ID NO: 134561 - DNA, 101 bp, Homo sapiens
ccaaatgtctgactctgactctcggactgagaaacgcaaggcgagcccacaccttaaccgtgctcttcatcctcacctgtacgcttggctatgtgacgctg

SEQ ID NO: 134562 - DNA, 100 bp, Homo sapiens
tgaactatggtgctactggagaatgtcagaactttctggaccctggttgttgcttagaatatgctaccatgttggataaagaagccaaaccatacaaagt

SEQ ID NO: 134563 - DNA, 89 bp, Homo sapiens
ctgcatgctatattgactccttcaaatccagatacacagcttgtctccaatgttctcattttctcctgcaccaacatcgtgggtgtctg

SEQ ID NO: 134564 - DNA, 100 bp, Homo sapiens
aagggatctatcacctctgtacaggcagcctgcttctgcaaagtggtacgatcgaagggactatgtcttcattgaattttgtgttgaagacagtaaggat

SEQ ID NO: 134565 - DNA, 82 bp, Homo sapiens
aaacaagccagcattacaactccaaagccaggtggataatattaatgcagctgtgatggatttgaaaaaaaagaagatccgc

SEQ ID NO: 134566 - DNA, 100 bp, Homo sapiens
tgagagccggacaaactcagacatcgtggaggtggtatcacggaaaacttgacagaacgatagcagaagaacgcctcaggcaggcagggaagtctggcag

SEQ ID NO: 134567 - DNA, 83 bp, Homo sapiens
agacctaagtttgaagattggctttgtaacaagaaaatgtcactgaaattcacaaatgcaaaacggattgaaggacttgatag

SEQ ID NO: 134568 - DNA, 100 bp, Homo sapiens
gaatacagtgaagatgtgcacctgcacacgcccccggcacctggatgaaaactttcggaagagaaagttgcctgtggtaagttcagttgttaaagtaaaa

SEQ ID NO: 134569 - DNA, 100 bp, Homo sapiens
agcccctcagcaacgccgtgcagctgcccatcgaccagctcacgtggaaaatgaagagcagtacacccaggctctggagaagtttggcggcaactgtgta

SEQ ID NO: 134570 - DNA, 75 bp, Homo sapiens
catggcactagaagaacgcttagcccaggctatggagacccacctggcccgagtggaagctatgctgaatgaccg

SEQ ID NO: 134571 - DNA, 100 bp, Homo sapiens
cgcggccctgcagttcttccggagtcagggcgctgagggagcgttgacagggaagcagccggatgtttgcagctctccacccatccacatgaaggtgcag

SEQ ID NO: 134572 - DNA, 96 bp, Homo sapiens
gcttagatgccatttctcctgttcaggatggatagaatgacagaagatgctcttcgcttgaatctgttgaagcggagcttggacccagcagatgag

SEQ ID NO: 134573 - DNA, 99 bp, Homo sapiens
ggggacgggagctgagcgtggaggcctcatggcatgggtagcaagaaactaaaacgagtgggtttatcacaagagctgtgtgaccgtctgagtagacat

SEQ ID NO: 134574 - DNA, 101 bp, Homo sapiens
gcagcgggagctggacggcgagcgcgagcggcgcgagaaacggagcgtgctttggacaccatgaattttgatgttataaagggcaagccagtacgcatcat

SEQ ID NO: 134575 - DNA, 100 bp, Homo sapiens
cattggatatgcgtacagccatcaaatcaatattgtggctactgttgtggaggaagggacaggttgtgggagacaagtagccaacagtatcataactggc

SEQ ID NO: 134576 - DNA, 100 bp, Homo sapiens
agaagttcaagctctacctgaccatcatcctgctcctgggtgccgtggcatgtcgatttgtccttcactacaggaacaagcacatcatgattgacttggg

SEQ ID NO: 134577 - DNA, 75 bp, Homo sapiens
taagaagcagaaagttgagcgcattgcatcacatgattttgaccccacagactccaagaactttcccctcagagc

SEQ ID NO: 134578 - DNA, 75 bp, Homo sapiens
caatgcccaatgcgatgctttgcatcctaaatcaggtctgaatttcctgctgctgttcacaaagatgctttttat

SEQ ID NO: 134579 - DNA, 98 bp, Homo sapiens
aaacagttgtgtgatgtaattttagtcgctggtgatcgcagaattccagctcacaggtttgtggtaaatatgccagctctagaacacatgaatcagat

SEQ ID NO: 134580 - DNA, 75 bp, Homo sapiens
tgggagttgtgtctgccactcggctgccggaggccgaagctggatatgaacctgaatgaggagaaacagcaacct

SEQ ID NO: 134581 - DNA, 82 bp, Homo sapiens
tcgagtatctggtgaagtggaaaggatggcccccaaacatgcagccagtaaagatcccagagaagttcgagaagctagagat

SEQ ID NO: 134582 - DNA, 100 bp, Homo sapiens
ataggttatgaagctaatcctggcgttccaccagcaaccatgagtggttccatgatgggaagtgacatgggtcctgatgaagaagctgttgtggatcttg

SEQ ID NO: 134583 - DNA, 75 bp, Homo sapiens
gcctgctctacgccctcaatctgctcttttgggatctttggaattagacactccttcacagccagtgaacaatca

SEQ ID NO: 134584 - DNA, 100 bp, Homo sapiens
ggccgggggctcagagatccaagtgcgcgccctggcgggtccggaccaaggaccaagaatcgccttcagccctgtctggtgcatccttggcagaaagtga

SEQ ID NO: 134585 - DNA, 75 bp, Homo sapiens
gaaactggaaaatatcaatggtgttacagatggctacttaaatagattgaaaatattgaacttcccatggataca

SEQ ID NO: 134586 - DNA, 100 bp, Homo sapiens
tccacatccaggaactgacaatctgttgatgttaaatgtctgcagccaggagagcagggacgtcctgtgcgaactgtcagaccaccacaaccacactctg

SEQ ID NO: 134587 - DNA, 98 bp, Homo sapiens
cagcagccgccgccagagaggcccgcccaccagttcgcccgtccccctgccccgttcacaataccagcatctcagacatgtcgaaaaagatgttttga

SEQ ID NO: 134588 - DNA, 98 bp, Homo sapiens
tttaaggatggtttagaaatggaaaaatgtagccacctgagctgaagattcccttgagaacaagtactgtcctgtggtttcatggcctttcttccatt

SEQ ID NO: 134589 - DNA, 100 bp, Homo sapiens
atgtggccacacgttggtacagggctccagaaattatgttgaattccaaggagtccttcaataatgttaaacagtggctgcaggaaatagatcgttatgc

SEQ ID NO: 134590 - DNA, 75 bp, Homo sapiens
gtttagaggactaggccccaatttagtgggggtagccccttccagtgatgctattgctgagattagagccatttg

SEQ ID NO: 134591 - DNA, 98 bp, Homo sapiens
ggtggcctgcgtgtcggcggagtcgtcaagtccatcatctccagaaccagctagtcttcctgcagaagatattagtgcaaactccaatggcccaaaac

SEQ ID NO: 134592 - DNA, 85 bp, Homo sapiens
ccaacaagaacaatatccgcagggaaagtgaatcttggcgcctttaggacatacccaaaggtgagcgagatggaagtgaacgggc

SEQ ID NO: 134593 - DNA, 100 bp, Homo sapiens
tagcaattaactggtctggagggtggcatcatgcaaagaaggccaggaaggaatactgggagaatcttcggatagcctcaggccggccatacaacccttc

SEQ ID NO: 134594 - DNA, 76 bp, Homo sapiens
ggcgctgtaagacgggaggatctgttcattgccactaagacagcccacctgaggatattgaccataaggactcata

SEQ ID NO: 134595 - DNA, 75 bp, Homo sapiens
gaggccaggggtgtcgccatgctcacaggtgcagtgcggtcttcagcgcgcttgaaagcacgaagttgttcggca

SEQ ID NO: 134596 - DNA, 101 bp, Homo sapiens
ctcagtggagtgtcagtttctcaaaaccagcatcgagatgtagttcctgagcatgaggctcccagcagtgaggtacagaggtgcagttccatggtacacca

SEQ ID NO: 134597 - DNA, 100 bp, Homo sapiens
attacaggcacccgccaccacgcccagaacattaaccaggtggtatttgttggaaatttcttgagaattaatacgatcgccatgcggcttttggcatatg

SEQ ID NO: 134598 - DNA, 75 bp, Homo sapiens
gaaatgatgggatagcgttgcaaatccttaaaagagtcttaacgggatttgtcttggctgttactatgacacggg

SEQ ID NO: 134599 - DNA, 75 bp, Homo sapiens
ggagacctcgctgcgctcatggcgtcgcccggttacatggacacagaacagtatgaagaagcagtacgagactat

SEQ ID NO: 134600 - DNA, 75 bp, Homo sapiens
tctcgtcagcctcccgccggccgtctccttaacaccgaacaccgttaattatagaaaatgccaagtaggaaattt

SEQ ID NO: 134601 - DNA, 127 bp, Homo sapiens
ctcaaagacagtgagaagaaccgcaagctctttgatctcttggatgtgctggagtttaaccaggggagatggaaccctgagcagcccatgtacatggaagatctttattgcagagatcttcaaacca

SEQ ID NO: 134602 - DNA, 100 bp, Homo sapiens
cagagcgcctgcgaccccagtcggtgctccggggaggtcacctgacgaggagttctgtgatatgagcaacaatggaccagaagattttatctctagcagc

SEQ ID NO: 134603 - DNA, 73 bp, Homo sapiens
tctccttatgtataatgaaacaagtgagtaaaattggcctggatacagaaggagaaacctgtggaaatgcaga

SEQ ID NO: 134604 - DNA, 75 bp, Homo sapiens
gtagccctgatgtgctgaggtgctcgagtcagtttgacaagtatgcgcccaagctggacagcccctacttccgac

SEQ ID NO: 134605 - DNA, 90 bp, Homo sapiens
caaggtgtacatgggggagatgggccggctgaagagctacgagaaccagaagcctctcgcccaagaacttcaaggtgaaaatgatcatga

SEQ ID NO: 134606 - DNA, 75 bp, Homo sapiens
ccacagctgcctacagaaccgtcccaaaatatggcaaagaaacctattctgagggaacgcagctgttgttctccg

SEQ ID NO: 134607 - DNA, 100 bp, Homo sapiens
gtgcccaccttctcctggcccagctggagcactcggaacccattgaggcagagcctgagggcatttggctttatgtcccgagttgccctacaagcagaga

SEQ ID NO: 134608 - DNA, 80 bp, Homo sapiens
ggatggatgtccctggggacaaactcttagagcctgtggtttgcatggctgtcattatttgtatcaaaaacaaagaattt

SEQ ID NO: 134609 - DNA, 97 bp, Homo sapiens
aaaatgaactgagtgcctggaagtttacgcctgataggtttgtggtaaatatgccagctctagaacacatgaatcagattttacacatcttgtttgt

SEQ ID NO: 134610 - DNA, 75 bp, Homo sapiens
ggatatgaagaaattgagggttcttgccatggtaaagtaccttttattcatgtgggaaatcaagtagtatcagaa

SEQ ID NO: 134611 - DNA, 95 bp, Homo sapiens
gaaccagaacaaaaccgagtcaacagggaagcagaggagaaccgggagccattcagaaaagggccgagatggacgaaaaaatgtggttccttgtg

SEQ ID NO: 134612 - DNA, 101 bp, Homo sapiens
tgagtcactgcctgcgcagctccggccgcctggctccccatactagtcgccgatggagaaggatgaaactgtgagtgactgctccccacacatagccaaca

SEQ ID NO: 134613 - DNA, 102 bp, Homo sapiens
cgacctcttaggcgccgggaccctcaggctcagatcagtggccgaggccccagagcatccctctctacctgccaacatcctgtattagagaacttgtggccg

SEQ ID NO: 134614 - DNA, 75 bp, Homo sapiens
ccacgagcgggcgctgctggatgccgagcgcctcaagcgcgagtgggctcgggatgagtttgaaggcctcttcaa

SEQ ID NO: 134615 - DNA, 78 bp, Homo sapiens
tccgccaggccctgcaggacctgctttcggagtacatgggcaatgctcacagaacatttcctgcctgttgctcacact

SEQ ID NO: 134616 - DNA, 96 bp, Homo sapiens
attctatttgaagaataccagtttcaagcagtattaagagtaaatgttaagcatgattgggacagaatgatagaagctgtacagaatcacattggc

SEQ ID NO: 134617 - DNA, 100 bp, Homo sapiens
cagaaaacgagaggctcaccgcagtcgtgcaggatctgaaggagggtgtgattaggcccactgggggatacgctgtcatgctacactggtcaatgtcttc

SEQ ID NO: 134618 - DNA, 83 bp, Homo sapiens
ggcctcctccaagccggccaattccccccgcaccaaattgcatcgtttcccaggtgaaatgtgaccattactggccattcacg

SEQ ID NO: 134619 - DNA, 96 bp, Homo sapiens
cagacaagtaactcaagacttaatgtgcccaacaaccagcatgtgaaggtgcgcttcaaattcttctacctgctggagcccggcgtgcctgcgggc

SEQ ID NO: 134620 - DNA, 51 bp, Homo sapiens
gctgctgctgctactacttacaagtgtgagttcttgatacgaatgaaaggc

SEQ ID NO: 134621 - DNA, 75 bp, Homo sapiens
tttgtatggacaggcttgtccatctgtaacttcattaagcatatgggtgattttggaagcattcatagacccgga

SEQ ID NO: 134622 - DNA, 100 bp, Homo sapiens
ggtgggagcctggagggcaaagcgtggtgcgagcagcccagctccatgaccttctccagctgaggcaggagaatgcctacctgaccaccatcaccaagca

SEQ ID NO: 134623 - DNA, 97 bp, Homo sapiens
aagttacgcgaagtccacccagcgtttctgaggtgatgctgtgtaaccccatctgcggcgtcagctatgccctgacagtgtggcgattcttccgcga

SEQ ID NO: 134624 - DNA, 100 bp, Homo sapiens
gtccaggcctgacagctctgcggctcgggccctgagacttaattcagtgcacaaatgagatgaatgtgaacatcccacagttggcagacagtttatttga

SEQ ID NO: 134625 - DNA, 90 bp, Homo sapiens
gcatttcagtaacactggactggatcggaacaaaggtgccatgcgggccagcgagacagtgtcggaggccagccccggctccaccgccag

SEQ ID NO: 134626 - DNA, 122 bp, Homo sapiens
aaaagtttgaacgaagtgagagtggtgggaagattatgacccctgaaagttcacacaaaagatgttggacaatttctacaattttgcttcatcatttgctgtctctcaggcccagatgacac

SEQ ID NO: 134627 - DNA, 82 bp, Homo sapiens
cggagctggaacggccgggggcggcggcagcggcggcgctgaggggacgcgcatgaaatttggtgccgtgactcggatcggc

SEQ ID NO: 134628 - DNA, 108 bp, Homo sapiens
tcagcgctgagcgaaagagaggcctcccggctcgacaagttcaagcagctgcttgccggccccaacacggaccttgcttttcgctgtggcctgcagtttttaggcaac

SEQ ID NO: 134629 - DNA, 74 bp, Homo sapiens
ttgggaggaaagccgtctgccaaagcctgaagcctccaagtgttgtcatgactggatcttacaataatttcttc

SEQ ID NO: 134630 - DNA, 100 bp, Homo sapiens
cttcgacaaggacgagttcatgaagaaaaagcttgtggtgaaggggggcaaaaaaaagaagcaagttctgaagttcactcttgattgcacccaccctgta

SEQ ID NO: 134631 - DNA, 75 bp, Homo sapiens
cctccaagagcacattgcctggtaagatggaacgacttagctgaatatcagagaacttgtgaagatcttaaagag

SEQ ID NO: 134632 - DNA, 50 bp, Homo sapiens
cttcccaaagcctggccacagaaagttttaagaagaggagaggtcactca

SEQ ID NO: 134633 - DNA, 80 bp, Homo sapiens
ctcaatgcctgcagtgactttgtctccaaatgacgcagtaaaacgcaggactcttcccgcttggattcgcgaaggtcttg

SEQ ID NO: 134634 - DNA, 75 bp, Homo sapiens
ccgggcccgggctgggggtctggcggatgtcaatagtgatggattcctggatgaacaagaattagaagccctatt

SEQ ID NO: 134635 - DNA, 100 bp, Homo sapiens
cgcggacctagacctggaatcgcccaagtccctctactcgcgaggtcatcgtattgaggaagttcctgaacttcctttggtagttgaagataaagttgaa

SEQ ID NO: 134636 - DNA, 100 bp, Homo sapiens
atgttcttcttcgagtatttgtagaaggcacagatttgcgttccaattatcttcttaatactacaattgctggtgtggaagaggcagatgttgttcttct

SEQ ID NO: 134637 - DNA, 48 bp, Homo sapiens
cagcaagaagaagccatattagctcctctggtgcaagtgtggtagcta

SEQ ID NO: 134638 - DNA, 100 bp, Homo sapiens
gagcgcggggcgacgctggctgcagggacccggtgacagcgtgagagctccatggctacatggaaaacaagcctctgggacttcagatcttcattgggac

SEQ ID NO: 134639 - DNA, 82 bp, Homo sapiens
tccgggtcttccagagcgtgaagatcaagatcgggtggcccagttgaaatccttcccttcctctaccttggaagtgcctacc

SEQ ID NO: 134640 - DNA, 101 bp, Homo sapiens
ctgatcttcgatgagctctcggattccttatgcagagtggccgacttggtgggaatggaagtggccccacatctcaaagaaaccctaaataagaacttttt

SEQ ID NO: 134641 - DNA, 100 bp, Homo sapiens
gatctgcacttcgcattttggcattgacatttaattttagggtcctttatatagaagggagagtaggacatcagcacagtatatcagatttttcctgatg

SEQ ID NO: 134642 - DNA, 73 bp, Homo sapiens
cggaagagcgctcccaggagaaacaagtctataagaaggagaaagctcgagtcatcactgaggaagagaagaa

SEQ ID NO: 134643 - DNA, 101 bp, Homo sapiens
ccgagagatgcagccatgaaaacatcatctcttatgcagcctattgtcagcaggaagcaaacatggacaggaacccttcctcacagcaatggtggaaacgc

SEQ ID NO: 134644 - DNA, 98 bp, Homo sapiens
accagatcatgtcagagagagagcttggttaacttgggagaaagtttcatctgtggatggagtattgccaaaactggacaagccaaggcatctgtagc

SEQ ID NO: 134645 - DNA, 75 bp, Homo sapiens
acagtcacaattttgtaataaggttagcactctacgtatatgaatatctgctccatgtaggagctcagaaatcag

SEQ ID NO: 134646 - DNA, 74 bp, Homo sapiens
cagaggccaaggggtggccgctgccaagcaggtgatgtttttaggagaaattgaagaaatcttagatgtcattg

SEQ ID NO: 134647 - DNA, 113 bp, Homo sapiens
gtctggcaacggcgaccgcctctgcttcaatgtgggccgggagctgtacttctatatctacaagggggtccgcaagatgttcctcctgctgatcaagagaagctttttatcca

SEQ ID NO: 134648 - DNA, 103 bp, Homo sapiens
ccggaaggggcaagacgggttcagttcgtcatggggctgtttggaaagacccaggagaagccgcccaaagaactgaattttgattctgacattagcagtgtgg

SEQ ID NO: 134649 - DNA, 82 bp, Homo sapiens
gctgagcgggcggtcattcgcatcgcagtcaccttcaggccattcagaggaggaaagagaggggaatatgaagtcagccaag

SEQ ID NO: 134650 - DNA, 82 bp, Homo sapiens
ccagatatagccgttggtacaaagagtgcctggtgaagaatgtgatgggatcactagcatgtctgcggagagcggccctggg

SEQ ID NO: 134651 - DNA, 71 bp, Homo sapiens
agcctctgccttgtacagttcccatcacactgaaactgttgaggagcccatggaggaagaagaagcagcca

SEQ ID NO: 134652 - DNA, 90 bp, Homo sapiens
cctcaagactctggtgttcaaagcttacaggatggccatgagctacccccaccaattgcctttgatgttgaagcccccacgacgttaccg

SEQ ID NO: 134653 - DNA, 100 bp, Homo sapiens
agccctgcatggagcaagtctgtcagcaccatctttctaacagctgaagtggagagatcgcctgagcccaggaggtcaaggctacagtgagccgtgactg

SEQ ID NO: 134654 - DNA, 73 bp, Homo sapiens
ctgggcgttcatctaccacgctttcgtggcagcccaatggatccaatggtgatgaagagacctcagttgtatg

SEQ ID NO: 134655 - DNA, 75 bp, Homo sapiens
ccagtaacatacaggagctgcaggctcagatttctcggcatgaggtatctgaacttaggactggagctgcagaag

SEQ ID NO: 134656 - DNA, 100 bp, Homo sapiens
cgaggacgaggctggcgggcccgagggcgaccccgaggaggaggattcgcaagccgagaccaaatccttgagtttcagaaccagacgtcctgggtcctct

SEQ ID NO: 134657 - DNA, 83 bp, Homo sapiens
ggtcccagtggccctcggcgcggcagcgctccagctcgctctccaccttcaggtgagaagccctaccactgcaactgggacgg

SEQ ID NO: 134658 - DNA, 50 bp, Homo sapiens
ttcacttttgagtgcaactgccttccagactctgaagttcttcagttttg

SEQ ID NO: 134659 - DNA, 75 bp, Homo sapiens
agttcctgcgcggctgcggggcttccctgcggctggagacttttggaacagcgatcgtaatcaatcctgagaaag

SEQ ID NO: 134660 - DNA, 75 bp, Homo sapiens
gaggccgcactgcacagccaccaggccgtcctgtctgacgctgagagcggcagcctgcgtccaacagcgtccgac

SEQ ID NO: 134661 - DNA, 101 bp, Homo sapiens
tggtcctctatcatctaccacggtgtggcatgcagcattttggaaggaaaattgaagacgtgttcaagaaaacatgaacagaagcaaatgatgaaaatgag

SEQ ID NO: 134662 - DNA, 81 bp, Homo sapiens
attctctgaagttacacccatcacagaattttcatagagctggactattggaaggacccttcaaaaaatgatacatgcaaa

SEQ ID NO: 134663 - DNA, 75 bp, Homo sapiens
gtggttccacctaatgtcagggaccttctggatattttacgggaaagaggcggctgagccagaggccaactgcag

SEQ ID NO: 134664 - DNA, 75 bp, Homo sapiens
agagactgatttgcaacccttccgggaagccatagctctgcatgaaagttggagtgactggtccccctgatccac

SEQ ID NO: 134665 - DNA, 82 bp, Homo sapiens
caacatcacggctgccagaggctgctcctacctacaatgcagatcttcgtgaagactctgactggtaagaccatcaccctcg

SEQ ID NO: 134666 - DNA, 75 bp, Homo sapiens
cggcctccggcgcagcccggaaatgtccggcaagatcgagaaagcaggttctcagaggcactgtgactgacttcc

SEQ ID NO: 134667 - DNA, 98 bp, Homo sapiens
atctgcaaaagaagagaagcagaattatacctagaagtctactaatggacagttagtcacccacctacatgttgagacctttggtcacctcgtttact

SEQ ID NO: 134668 - DNA, 90 bp, Homo sapiens
ggttgcatcagtgtaagactccaataattcaccgggatctgaagtcattatttagaagcaaggtccttgaatgagcgagattatcgggac

SEQ ID NO: 134669 - DNA, 87 bp, Homo sapiens
agttgagaccgagaatgtggaaacaggtgagaattatgaagatgatgacctagtaaattctgatgaggttatgaagaaaccatgtcc

SEQ ID NO: 134670 - DNA, 82 bp, Homo sapiens
aatcgacacacaaagaatagagttgagcctgtgggacacttcggatgccatggacaatattaccaggcagaaccaattctac

SEQ ID NO: 134671 - DNA, 51 bp, Homo sapiens
gagaaacatgaagttcgggactatcttctgatgaaggaactgagacacaga

SEQ ID NO: 134672 - DNA, 100 bp, Homo sapiens
ggagctggacagcctggatgggcggaaggacccccagcggtgcacgctgctggtcagccagttccgctcctgtcagggtctcttgcaacgtgtgagctgc

SEQ ID NO: 134673 - DNA, 90 bp, Homo sapiens
cgcagaccacagttacatgtatggagaatggctggtctcctactcccagatgcatccgtgtcatgatggaatggggagaagatattaaag

SEQ ID NO: 134674 - DNA, 75 bp, Homo sapiens
aagaccccattcggaaagacacctggccagcggtccagagctgatgcagtggacagtttgcggttgtgaagaaat

SEQ ID NO: 134675 - DNA, 75 bp, Homo sapiens
cggcccaaggccagttctccgcaggatgtgatcttcgtggtggaaagctaaattttaaaaccaccccaatggatg

SEQ ID NO: 134676 - DNA, 96 bp, Homo sapiens
ttttgcctcccaccgtgattctgaggcctccccaaccatgtgcaattgagcatcagatccatgctgctgctgactcggagccccacagcttggcac

SEQ ID NO: 134677 - DNA, 75 bp, Homo sapiens
agccagagggcattgacctggaggtggtgactgagagcacagtaggtcaagaagcaggtctcgatcccggaccag

SEQ ID NO: 134678 - DNA, 82 bp, Homo sapiens
ccgctcaccccgcggccgcaccttcccgccttctcagatgatatcatcaagttgaatcgaaaggaagggaagaagcagaatt

SEQ ID NO: 134679 - DNA, 82 bp, Homo sapiens
ctgccccgccatgaatgaggagtacgacgtgatcgtgctgggcaccggcctgacggttcaagcgattctccagcctcagcct

SEQ ID NO: 134680 - DNA, 75 bp, Homo sapiens
tcgctcggctgcgggaaatcgggctgaagcgactgagtccgcgatggagatgtgttcagagcaacattgttttgt

SEQ ID NO: 134681 - DNA, 76 bp, Homo sapiens
gattctgatgaagaagttattcaagatgccaaatttgtatcctactgtggggcttcaaacaccaggagaagtggtc

SEQ ID NO: 134682 - DNA, 95 bp, Homo sapiens
gaacctgaaaaattcaagaagttgaaaaacgcttttcacgtcacctggagagatgcacaggtaaaataccatgaagattttgaaaaaacaaaggg

SEQ ID NO: 134683 - DNA, 100 bp, Homo sapiens
ggaacttcctgttctgatagcgtggaagaatggtcctagtgccagatcgtgtcataaaatgtgcattgatattcaacggaggcaaatctacacattgggg

SEQ ID NO: 134684 - DNA, 102 bp, Homo sapiens
ctgacctcggtttcctggacccattccgactcaggccttagaaaatttacgtgtatacctgtgtgagaaaatcatagctgagagacattttgatcatctacg

SEQ ID NO: 134685 - DNA, 97 bp, Homo sapiens
gggaaccgccgtcccaacatcacaaaaagcgtggagggcattagcatctggaggctctgccctggatgcagtggagagcggctgtgccatgtgtgag

SEQ ID NO: 134686 - DNA, 82 bp, Homo sapiens
ccagaccctggagcctcagttggaagcagccgatccagcctgcggagcctgtggggcaggctggtccagggaccctcatcat

SEQ ID NO: 134687 - DNA, 100 bp, Homo sapiens
tcgttctatttctctagctattgccttattttttctcatggatgttcttcttcgagtatttgtagaaggggtgtcaaattgagaaccaggtagatcccca

SEQ ID NO: 134688 - DNA, 75 bp, Homo sapiens
tcctgcaagccactcgctgacgacctgatggccaaaagaaaggaagaaaatttttcctctcctaaaaatgccaaa

SEQ ID NO: 134689 - DNA, 73 bp, Homo sapiens
ggctccaaatccttagctcagagctggaggatgaaggatcgggcaaaagtcaacaactctagcttaattggag

SEQ ID NO: 134690 - DNA, 98 bp, Homo sapiens
tagatgaggtcttaatcatggaacatttgaagtcacgtaaagaagatgaacagactagccactttgcattgactggaaacaatggcatttacagaaag

SEQ ID NO: 134691 - DNA, 90 bp, Homo sapiens
cattataccttcacccagcatttcatccctcgtcgaaaggattggattggcatctttagagaaagcagatggtggagctgaatatgccac

SEQ ID NO: 134692 - DNA, 100 bp, Homo sapiens
gagaggaggccgtccagcagatggcggatgccctgcagtacctgcagaaggtctctggagacatcttcagcagataaaccgagaaaactggtgtacaata

SEQ ID NO: 134693 - DNA, 96 bp, Homo sapiens
tcgcttggtgtcctcctggcctcagcaacctgacaattctgtcgtgtcccgtccagttacaacacagggatcacaacaaacacaaccgccacagaa

SEQ ID NO: 134694 - DNA, 75 bp, Homo sapiens
gggaaatctccaagtcagaaaggacttcgtcttctatgctccccggctgcggattaacaagcggatcttggcctt

SEQ ID NO: 134695 - DNA, 97 bp, Homo sapiens
cgccgccgccgccgctgccgctgccgctgccgcacctccgtagctgactcggcctccggtgtggctgtctctgatggtgtcatcaaggtgttcaacg

SEQ ID NO: 134696 - DNA, 83 bp, Homo sapiens
cgagtttgagagctacccggagctccaagacaggggtttggtgcacctcgatttggaggaagtagggcagggcccttatctgg

SEQ ID NO: 134697 - DNA, 51 bp, Homo sapiens
ccacctgcaaggattcaaagaaggtggataattactgtaccttcctcatgg

SEQ ID NO: 134698 - DNA, 100 bp, Homo sapiens
aggcagagtggaaaaaagagaggatttgcttttgtaacttttgatgatcatgatacagttgataaaattgttgaccattgccctcttgaacatttaccgt

SEQ ID NO: 134699 - DNA, 110 bp, Homo sapiens
acttacagcaagatggttcatcttttgccctagagcaattgaaggaacggaaaacagttcttccttcaaagcatgcagtacctgaagtaatagaagactttctctgcaat

SEQ ID NO: 134700 - DNA, 100 bp, Homo sapiens
cgcgggcgagctgcggctcggacgccagcggacacgcgggcgagtccgtagttcgtggtccttcgccggtgtccccggagcccagcggctgtggatggca

SEQ ID NO: 134701 - DNA, 83 bp, Homo sapiens
acatcagtttctggaagaagaagaagagcatgatcggcatgtccaccaaggcagctgtgagccgtgagctttgaggcggtggg

SEQ ID NO: 134702 - DNA, 98 bp, Homo sapiens
tgcagcggaagtgggaaacctgtagggtatggtccagctgtgccgcaccgaggcgagcaggagcagggaacagtctgctgctgtgaaggagatactga

SEQ ID NO: 134703 - DNA, 75 bp, Homo sapiens
gagagatcataatttggggttcaagattccagcatcaacaaagagagcattgtggatgtagaaggtgttgtgaga

SEQ ID NO: 134704 - DNA, 75 bp, Homo sapiens
tagcagatagccagcccatacaagatcgtacaaaactgtgtggagttttatcctatattcataattacattgtgg

SEQ ID NO: 134705 - DNA, 100 bp, Homo sapiens
cttacgtgtactttaccaacgagctgaagcagcactgccctgggaagaactaggatgaggtattgacttgctgttgccacataacaaaccctgccagaac

SEQ ID NO: 134706 - DNA, 75 bp, Homo sapiens
tggaaccgggatggcgacgtctacactgagtcggaggcgaagcggccctccaggcactgaagcgtaagaagaggt

SEQ ID NO: 134707 - DNA, 100 bp, Homo sapiens
gagacaatagtgaaggcaaaaactctaataaagactctggttaccttccgaacaagaatctatcactgtaatattaacagccaaggtgtgatctgtctgg

SEQ ID NO: 134708 - DNA, 96 bp, Homo sapiens
gtggtgcacccagaggccggggaccttgccaaccctcccaagaagttcagaggtagacgttacatccaagaggaaataatccaggcaaggaagcac

SEQ ID NO: 134709 - DNA, 100 bp, Homo sapiens
agctacctgtcgcctcagggccggcggtactatgtcaacacgaccaccaatgcagtgactcttcgagaagacagtgccaagaggttggagaggagggcac

SEQ ID NO: 134710 - DNA, 60 bp, Homo sapiens
agaagcagtgcctgctgcggctgggggtgctgcgccagatcagggtccaggtgatcgagg

SEQ ID NO: 134711 - DNA, 100 bp, Homo sapiens
tggatgagaagatattctgctgtcatggagatgttccagaaggagaaggcggtgctggacgagctgggccgacgcacggggacccggctgcagcccctga

SEQ ID NO: 134712 - DNA, 74 bp, Homo sapiens
tggagatctaaggaaacttctcacctatgagtttgtaaagcagaaacggagtttcgctcttgttacccaggctg

SEQ ID NO: 134713 - DNA, 75 bp, Homo sapiens
gcgagagttcctggccgagttcatgagcacatatgtcatgatggaagctgaagagggaactacccttttcattcc

SEQ ID NO: 134714 - DNA, 100 bp, Homo sapiens
tcaacactgttattgtaaacaaaggtcattatccagctcaggaaaacctgatgttccttgttctctgtacatgaaggagctacaaggtttcattgccaga

SEQ ID NO: 134715 - DNA, 90 bp, Homo sapiens
aaccaagaggtgcaaaaacgaaagcaactggagctcagcaatggccaatgtacatggtggactatgccggcctgaacgtgcagctcccgg

SEQ ID NO: 134716 - DNA, 75 bp, Homo sapiens
gcaagaggcaaagagaatcggttgattgctcgagactttaatcccaactggatgagtgctgtggaaatcttggat

SEQ ID NO: 134717 - DNA, 82 bp, Homo sapiens
cctcataaagagtaacaaccatgagaatgtgtctcttgccaaagcgaagattttggactggtttgtacagatatgtttggcc

SEQ ID NO: 134718 - DNA, 110 bp, Homo sapiens
gggatgtcggtcagtgcgagatccgctgctgctgaggagaggagcgtcaacagcagcaccatgggatcttatggttggtgatgaggcaagtgaattacgatcaatgttag

SEQ ID NO: 134719 - DNA, 75 bp, Homo sapiens
aacctcagcaccgagaacatctactctttcaactacaccagccagcccgaccagaataccgtgactgatctaacc

SEQ ID NO: 134720 - DNA, 100 bp, Homo sapiens
gtttttgtggaagatgtcaagaatgttcctgttggcaagggtgctttcttctgcgacctggtactcatctacctcatcaaaaagagagagttttaccgtg

SEQ ID NO: 134721 - DNA, 102 bp, Homo sapiens
caaaggataaacttgaccaggtttccagtgaaataagagcatttcctccctctgctatttatacacggaaagacttactacagcgatctacccatattgcca

SEQ ID NO: 134722 - DNA, 50 bp, Homo sapiens
cagaatacctgaaactggagtttatcaagtcgtcattgaattttgagaag

SEQ ID NO: 134723 - DNA, 51 bp, Homo sapiens
atgtccttcctggactgtgggcatacgatgctgctggtggagttctacaag

SEQ ID NO: 134724 - DNA, 101 bp, Homo sapiens
aaagaggcaggtacggaagctgagctgcagagttagccggcatctgacagaaaaatgtttgcccaaaggaccagccaaaacctcacctcaagccacgcata

SEQ ID NO: 134725 - DNA, 74 bp, Homo sapiens
tataactacaatcacctaatgcccacaaggagccaaggcaaagagggaccactgtgctcatggacccatcgctg

SEQ ID NO: 134726 - DNA, 115 bp, Homo sapiens
cttgaaaagactgggcttgtccttgctggtgcatgcgtcgtcggcctctgggcagcagattttaggtgatgggcaagtcagaaagtcagatggatataactgatatcaacactcc

SEQ ID NO: 134727 - DNA, 100 bp, Homo sapiens
ttggaaaatgccaacgccgtgtctgaagactcagacgatgccctgctgaagatgaccatcagccagcaagagtttggccgcactgggcttcctgacctaa

SEQ ID NO: 134728 - DNA, 75 bp, Homo sapiens
gtcactcctggtgaccagcattcaaggttatggccacaccgtgcccttgtcagatggaggtaaggccttctgcat

SEQ ID NO: 134729 - DNA, 88 bp, Homo sapiens
tttgctcagcgactgtttgatgacgtcccgcagtgacatattcgatgccatgttccctgtcactcacatcgctggggagactgttata

SEQ ID NO: 134730 - DNA, 74 bp, Homo sapiens
gctggtgacggacagtgcagggaagcaactgcagagcagaaacactatggagtgttctgggccacaagattcca

SEQ ID NO: 134731 - DNA, 98 bp, Homo sapiens
cagcaccttgtccaggcgggcctcccgtttctggctccgggctgagcttcctggagaagaggaagttccaagatgagatgggattctccaacatggaa

SEQ ID NO: 134732 - DNA, 75 bp, Homo sapiens
cacagatgtccaagctgccaatggcgggaccactggatgcagtgtgtgtacttcctgccacaagaggagcctgtg

SEQ ID NO: 134733 - DNA, 99 bp, Homo sapiens
ggtggttaaagccatattggagtagcgaggaatctgattccaagcaaaaaccagcttttcatgcaacacccaacacttataagcggaagaacacagaaa

SEQ ID NO: 134734 - DNA, 100 bp, Homo sapiens
caccagcaatgagaggacccgcgtgggcaccctgcaggtggtcagacatgtcatcaactcagctgggaaagcaggcaggatgggagagtcgccgatagaa

SEQ ID NO: 134735 - DNA, 100 bp, Homo sapiens
gcgctgccaggagcccttcaattctatcaccaaacgcaggcaccactgcaaggcctgcgggcatggctctgtgacctctgccccagcctggagaagcaac

SEQ ID NO: 134736 - DNA, 50 bp, Homo sapiens
cgcgcccgcgccctccgcgcgacgccagtaagactttgaccccgacgcag

SEQ ID NO: 134737 - DNA, 114 bp, Homo sapiens
gattcaaacaaccaaccctgatttcctgcttctccttttcatgagtgttcctgtggtctctgcacctcctttctctccagttctccctggatccagaacccattgctatcaact

SEQ ID NO: 134738 - DNA, 100 bp, Homo sapiens
ttttcttcagcgagactggccaggaatttgagttctttgagaacaccattgtgtcccgcattgcccgcatctgcaagtttctggagcagcagagctgaag

SEQ ID NO: 134739 - DNA, 100 bp, Homo sapiens
acagagcaacgtgctccaaagtctgttactgattatggagtacttgattcttcagaaaacctccaaagtagatgtggactcaagtggaaagaaatgcaaa

SEQ ID NO: 134740 - DNA, 100 bp, Homo sapiens
ccaatgggtattactttgcaatcgatcctaatggttatgttttattacatccaaatcttcagccaaaggaaacttttgagaagaactttgaaagagaaac

SEQ ID NO: 134741 - DNA, 75 bp, Homo sapiens
gtgcggctgctggacgacagcgagtacacctgcaccatccagatgacttcctgaagccacagatcatcacccagc

SEQ ID NO: 134742 - DNA, 98 bp, Homo sapiens
tgagttacaagcccaggaaggattgtctaatgatggagaaacaatggtaaatgtgccacatattcatgcaagctattgcagatcccaaccccctgcta

SEQ ID NO: 134743 - DNA, 75 bp, Homo sapiens
gagaagctgaaggacatgaaagtgctgtacaccaaccgagcccagcttcgtggctggtgtcattaaccgggagcg

SEQ ID NO: 134744 - DNA, 99 bp, Homo sapiens
tgctgttcctgagtgtcaactatctgggggggacattcccaggatgttgcttcagagtgtgaagtcaaatgcatgccaacattccagttttttaagaag

SEQ ID NO: 134745 - DNA, 75 bp, Homo sapiens
ctgtggttggagaaaagggtgttctcctctcaggtgaccttatatccagctgtgaaaagtctgctgcaggagggc

SEQ ID NO: 134746 - DNA, 83 bp, Homo sapiens
tgcacaagttccaaggttacgtttcagctcagcagggagctgctggatgagaaagggcctgaagtcttgcaggactcactgga

SEQ ID NO: 134747 - DNA, 100 bp, Homo sapiens
aaaaaggcgagtttgtcttttcttacctgagactgggcctgaagggagagtttcagttcttcattgacggctgaaaatgatgagaatggacaagcagaaa

SEQ ID NO: 134748 - DNA, 97 bp, Homo sapiens
tgaaaatcaacgacaacttgagcacaggaggattatattgaaacagatgataaaaaagttttccctctgcgatggactgctccagaattagtaacca

SEQ ID NO: 134749 - DNA, 96 bp, Homo sapiens
tctgtctgatgagctaaggatttccttggggatgccagtaggaccactggatcagatctgcatttcttttgacgaaggcaagaccacaatgaactt

SEQ ID NO: 134750 - DNA, 100 bp, Homo sapiens
ggcggttgggtgcccgcggccacttttgccttcccgggcttgaacatgacaagcagatttgggagtccaaggcccagacagaggtccagcttcagcagaa

SEQ ID NO: 134751 - DNA, 88 bp, Homo sapiens
aagatggcggcgcagaggaggagcttgctgcagagtgcccagctgagagccagcctggaggttacccagcagcaggccacccaggccg

SEQ ID NO: 134752 - DNA, 100 bp, Homo sapiens
gacaggacggcggggcgagccagctacaaggctttggccgaccaagtgtgtaccatgctgctattgtcatcttccttgaattctttgcgtggggcctgtt

SEQ ID NO: 134753 - DNA, 100 bp, Homo sapiens
cctgtgctgaggttcacagtgacgtacctgagagagaaagcaagaggtggaaacatacagaagaagcaaggaaattacagttagaggtcacaactgcccg

SEQ ID NO: 134754 - DNA, 100 bp, Homo sapiens
gaaacctgaaacaaggtgatctggggaaccaaagactctgggactcttggtgccaacagagttactctttgaacaagagatttttcaatcaagactttgg

SEQ ID NO: 134755 - DNA, 90 bp, Homo sapiens
caggcctccgccggcgcctggtgtgcttcaccatggaggagagagttcccaggagaaaaaagcaaaaggctgcgctaccatgatgaagcc

SEQ ID NO: 134756 - DNA, 83 bp, Homo sapiens
gtgagcgagatgctgcagatgccgttaaacaaatcctggaggcagttgctcctaccgtatgtgaacgggagctgtgtgtgttt

SEQ ID NO: 134757 - DNA, 74 bp, Homo sapiens
acccaccttagcacctttagtttcacgaaggtcgacgtgggccagcaggtttctgacgtagaagagcttacccc

SEQ ID NO: 134758 - DNA, 98 bp, Homo sapiens
cctcttataattaatgcaataaaacgcttccatctttatccagaggtttgcctgcaatgagatttcattctctacatttaaaggacatcctttctgag

SEQ ID NO: 134759 - DNA, 82 bp, Homo sapiens
cggctgaggagcgccgctgcctcgcctcggaatactcccccagttgcaagaggcgcaggaccgtggaagacttcaacaaatt

SEQ ID NO: 134760 - DNA, 95 bp, Homo sapiens
aactctgcgaccttcaagtcgtttgaggaccgagttgggaccataaagatcctagaagacagtatgatattttctctggccagttgcataataac

SEQ ID NO: 134761 - DNA, 75 bp, Homo sapiens
gttcaagcaattttcatgccgcagcctcctagctgggattacaggaactcatgtcgtgtcccattttgtaaactg

SEQ ID NO: 134762 - DNA, 100 bp, Homo sapiens
cgggcgaggaagaccagccccggggccccggttttactgggacctgatcatgctgctgctgatggtggggaacctcatcgtcctgcctgtgggcatcacc

SEQ ID NO: 134763 - DNA, 75 bp, Homo sapiens
gaggatcaaaatcttcgaaggagggcacttttaaatcaacttagagctgtgtttgatcaaattattgaacttcag

SEQ ID NO: 134764 - DNA, 100 bp, Homo sapiens
ctgcgatcccgggtcatctccagatgctagggttatgggcttgaacatgacaagcagatttgggagtccaaggcccagacagaggtccagcttcagcaga

SEQ ID NO: 134765 - DNA, 100 bp, Homo sapiens
tcaagaagctggtcccacggaaagtggtatctcgggaatcaggtatctagaagagcagaagacagagaatggaaaagataaggaacagaaacaaacaaat

SEQ ID NO: 134766 - DNA, 75 bp, Homo sapiens
atttgatttcacaaaagtgaagagaggaaatgcactcggtgatggaaagagagccactattctgaagaacacttg

SEQ ID NO: 134767 - DNA, 100 bp, Homo sapiens
ggcaccgggatcgtgaccgagaccgtgaccgagagcgtgaccgagagcgcgaatatcgtcatcgttagaagatctccaagaaggagaagcttctctcgca

SEQ ID NO: 134768 - DNA, 100 bp, Homo sapiens
cttctgaaaaggcgatcttcctgtttgtggataagacagtcccacagtccaggccaagtcaaattcctgcagagctttggcaactgggatgagaagaaag

SEQ ID NO: 134769 - DNA, 100 bp, Homo sapiens
ccgtcgagatcgccgccgacgccgctgctgtggccgctgctgctgctgctgctcctggaaaccgctgcagcagttgccacgatgatcgtgcccgtgccca

SEQ ID NO: 134770 - DNA, 100 bp, Homo sapiens
gcgaggcagccttctgaggcgaaacttccccttccggcgaccgcggacgacgtgaccagaagtcccgccgcttaaaggcatgatgccttcttctgtagag

SEQ ID NO: 134771 - DNA, 98 bp, Homo sapiens
ttacgtctgcggaagtgcagctgcctcagttcttagcgcagcgaggggctacgagtatgtgttggagccctcacccgtctccctgcctctggacagac

SEQ ID NO: 134772 - DNA, 75 bp, Homo sapiens
cccggaagctgccagtcttcaagtccctccggcacatgaggcagagaatggatcttggagaatgtctgaaagtcc

SEQ ID NO: 134773 - DNA, 75 bp, Homo sapiens
taaatgaagacttaaaagatatattacatgctgcaaagcagatagatctgactgcagccatgagcagcaatgagt

SEQ ID NO: 134774 - DNA, 99 bp, Homo sapiens
ccgatgtgaacatgctgcacgtgtttgttctgggcgaatggcagcccatcgaggacacatgacggaagtgtgtatttttgggccactccacggcaggtc

SEQ ID NO: 134775 - DNA, 98 bp, Homo sapiens
cttgccactcagctgacatatgaaggactcattgatgaaatttatggcattcagaacagctatgaaaatgattctgtagaagacctgaaggaggtgac

SEQ ID NO: 134776 - DNA, 83 bp, Homo sapiens
ccagcaaggtcggcagagcaaggggcttacgcagaaggacctggccacggccagcatccttcagaaaaagcatccccgaggag

SEQ ID NO: 134777 - DNA, 82 bp, Homo sapiens
gggagctgctgctgctgaagcacatgcagcatgagaacggtggagagattcaaccagttagcgtgaaagttggagataaagt

SEQ ID NO: 134778 - DNA, 80 bp, Homo sapiens
caaggtgagatcagccgcccggccaagctatcttctcgctagcaggacaatataaggcttcaagattgctcagcactatg

SEQ ID NO: 134779 - DNA, 74 bp, Homo sapiens
ccgcgtccgccgattcctcctccttggtcgccgcgtccttggctggcgtctgcccaaaaggtgtcccatctctt

SEQ ID NO: 134780 - DNA, 100 bp, Homo sapiens
ccaagatgaagggctacccacactggccggcccggggaaacctcaaatgaattctgaaggggagataccttccctgccatcaggcagccaatctgcaaaa

SEQ ID NO: 134781 - DNA, 100 bp, Homo sapiens
tccgtgcggagaagaagctgcggccgcacctggccaaggtggagcatatgacccgtcacctggaggagagtgagaaggccatgcaggagcgggtgcagag

SEQ ID NO: 134782 - DNA, 110 bp, Homo sapiens
tacaagttccttccatcacagaggatcaatgaaggggaacaaagatttgggagcatctactttgtgccaggtggctcaatcccttgtttaaaattggccataaacggaga

SEQ ID NO: 134783 - DNA, 90 bp, Homo sapiens
cagttatacgtgtgttcagtgactccgcagctgcaggaagaactgctgcccgagctacactggaaatcctcatccctgactttgttaaac

SEQ ID NO: 134784 - DNA, 103 bp, Homo sapiens
cccagtgacgggtctggagtgcgtgggggaccggctgttggcggatggaaatcatattatgtagaatacttgggtgacatctgcctgagagatctccaagaat

SEQ ID NO: 134785 - DNA, 75 bp, Homo sapiens
gcaaaacgctgatactaacctcttattcagaatgtcccaacaggtcatgatgatgggcagcgcccgagtggcgga

SEQ ID NO: 134786 - DNA, 75 bp, Homo sapiens
caaacgagggttcccgggattggaccgacgcagccatgggagagtcacaccgggacagctcatgtcctatattca

SEQ ID NO: 134787 - DNA, 75 bp, Homo sapiens
gagagtcttaaaatcctgctctggccggattccagactcgtgggggaaaggctgacctgcttttttaaaggctgc

SEQ ID NO: 134788 - DNA, 73 bp, Homo sapiens
gatcatgtctggtggctccgcggattataacaggaagaattgtatttgcaacgggtagcagaattggacaaaa

SEQ ID NO: 134789 - DNA, 50 bp, Homo sapiens
cggccgggactctgaactatggcgagatgccctgtatccaagcccaatat

SEQ ID NO: 134790 - DNA, 100 bp, Homo sapiens
ggttacttcttcctcaacaccagcaccgcagatgttgtcaaggtggcctaccaggaggccaggggtgtcgccatgagctctgaggaacatgaatacagtg

SEQ ID NO: 134791 - DNA, 140 bp, Homo sapiens
gtcatctttaactgcttggccgtgcttgccctgtcatcccacctgagaaccatgctcaccgaccctatgtactgcagtgccatgctgggtatcttaaagaacaaggcattgtcctctgcagacacccaggctgcagactt

SEQ ID NO: 134792 - DNA, 100 bp, Homo sapiens
gtgtctcttagcagcgcgcggagaagaacggggagccaggatgactcactggttgtgtggaaggaagtcgatttgacccggctgtctgagaaggaacgtc

SEQ ID NO: 134793 - DNA, 114 bp, Homo sapiens
gtgaagctcaccgagacggcgatccgggcgctcgagacttaccagagccacaagacctgcctagagctggaacgttacctccagagcgagccctgctatgtttcagcctcagaa

SEQ ID NO: 134794 - DNA, 97 bp, Homo sapiens
tacttcttgcctggaatcccatttgtttggggttggtagaaggtgttattgggaaaattcaacttcattcagcggtcccagtctccagctgcctctg

SEQ ID NO: 134795 - DNA, 100 bp, Homo sapiens
atttaagcgtggtgatgtgatttacattcttagcaagggtgctgataagactgtgaaaggcccagatggactgaccgcctttgaagccactgacaaccag

SEQ ID NO: 134796 - DNA, 97 bp, Homo sapiens
accgcggcatcaagcaggtccggacccactggctgctggagcttgtcaccaccagcctcacagaatgaggttcctgcggcacccctggaagaactgg

SEQ ID NO: 134797 - DNA, 50 bp, Homo sapiens
agtaaagaactgagggtcagattgtacttgtcttgggccttagacacaaa

SEQ ID NO: 134798 - DNA, 74 bp, Homo sapiens
gatgacatgggacttggaaaaacagtacaggctaatgcagagtcaagtaaaacctggctgaaggggaaattcac

SEQ ID NO: 134799 - DNA, 74 bp, Homo sapiens
gcatccagtaagaaaggagagcccgtcagtgccgaagatctgggttattggggctgtgccatcggcaaagccag

SEQ ID NO: 134800 - DNA, 100 bp, Homo sapiens
cacagtctttgcacactcggacttcaaaactgttccagggccagtatcggagtttggactttctgaagaccttttcccccgatgtcttccggttcttctg

SEQ ID NO: 134801 - DNA, 100 bp, Homo sapiens
tatgcgaccacagaaggaaattcaacagaacttagcataaatgctgaagtttgggcttcctgtagacacccttttcctgcgcaacagagctgggcctccc

SEQ ID NO: 134802 - DNA, 50 bp, Homo sapiens
ccaggacaggtggcactctttcaggctaggcagctggaagagaaagaccg

SEQ ID NO: 134803 - DNA, 97 bp, Homo sapiens
catgcccatctggaagtttccagatgaggagggcgcatgccagccttgccccatcaactgcacccactcattcttggtgccaccattgagaactcca

SEQ ID NO: 134804 - DNA, 90 bp, Homo sapiens
gggagaagcagcgcctgttcccggggcagatccaggttcagccactgaggcggctcccagctgcgttggcgacatggccgacacccccag

SEQ ID NO: 134805 - DNA, 100 bp, Homo sapiens
gtgccctcgtctctcggaatgcagagtcagatcagcaaggatggctactttgcttagcaagttccggatagacttttctgatatcatggttctaggagat

SEQ ID NO: 134806 - DNA, 100 bp, Homo sapiens
gaggtggaggggaggattttgaggacacttgtggagagctcgaattccagaatgatgaaattgtacgggctcatcttcgcttgtgcctggagaagttgaa

SEQ ID NO: 134807 - DNA, 127 bp, Homo sapiens
gggagcccggccggagctgggtctggagacgccgtggcagcctgaacggagtgtgcgacggattgggaggaaacattggcaaatttggagcgacagatctatgcttttgagggaagctacctggaag

SEQ ID NO: 134808 - DNA, 95 bp, Homo sapiens
tcgcagcgagctggagccgccggaggtggaggagaatgagattgagtgctgactttaagcctggctgagaaacatactggcatcgatgtcattaa

SEQ ID NO: 134809 - DNA, 87 bp, Homo sapiens
acgcgcaagggctgcggagccgcgggccggcgagcgcgtcgccaccatgactacgtctactttgagaactcctccagcaacccatac

SEQ ID NO: 134810 - DNA, 83 bp, Homo sapiens
gtcagagcccggggacggcgaggccctcatgtaccacacgggtttcgtggctgtcccaacaaaaaatcccgatggcacgatga

SEQ ID NO: 134811 - DNA, 75 bp, Homo sapiens
catgaaatgattgaatctggtgttatcaacttaaaagatgccacctctaaggatggcacatttcctagaggcaga

SEQ ID NO: 134812 - DNA, 100 bp, Homo sapiens
atcgccagcgcttcctgtattccttgtatcgacatacacactgggtacgctgtgccaagcgaacagctgcttggagaactacaagtgaagaaaagaaagc

SEQ ID NO: 134813 - DNA, 100 bp, Homo sapiens
cctgagggaacgagaaaccacaatggctccatgctgcccttcaaacgtggcgccttccatcttgcagtgcaggcccaggcttcttcagatagtcaccacc

SEQ ID NO: 134814 - DNA, 100 bp, Homo sapiens
cgtgtctgcaagagtcaccttctggactgctgcccccatgacatcctggctgggacgaggaccagctgccctctggcttccccaacatcgacatgggccc

SEQ ID NO: 134815 - DNA, 74 bp, Homo sapiens
acgcatccgcgtgaccaccatcgcccgaaagaccttgcctcatagtattcgatcagattcagaagatatctgtt

SEQ ID NO: 134816 - DNA, 150 bp, Homo sapiens
agagactgaaacacacagtccaatgaaaacaaacaaccaagaccacaatgggaatatccctaaacccgcttccaaagaaaatgcatccgatgcagatttatggctcctgaacagttgcactgtaaaaaacccagctgaagaccactttag

SEQ ID NO: 134817 - DNA, 100 bp, Homo sapiens
gctcaggcagtagccattcttcagaagcactgtcgcatcatcaaaaacgtccaggttctctacagtgaacagcccattgcagatgcaaaggctcctgaga

SEQ ID NO: 134818 - DNA, 100 bp, Homo sapiens
gaaagaccgattttctgcagaagatgaagctttgagtaacattgccagagagcttaagagttggacagtggaggaccttcagaagaggctcttggccctg

SEQ ID NO: 134819 - DNA, 100 bp, Homo sapiens
gggcagccacggccgggggcgtctttcagagcattacgtcctattttgtaacggattatgatccaaccattgaagattcttacacaaagcagtgtgtgat

SEQ ID NO: 134820 - DNA, 75 bp, Homo sapiens
cggagcaagacaccctgactgggatgcgcacaggaaagatgaatgggagggctgattttcgagagccgaatgcag

SEQ ID NO: 134821 - DNA, 113 bp, Homo sapiens
ctccccttggaccgagccgatcgccgcggggcagttcgggccggctgtcctggcgcggaatgtatcctgtcaggtataatgtcagtgaatggcaagaaagttcttcatatgga

SEQ ID NO: 134822 - DNA, 100 bp, Homo sapiens
gaaagcgagaaaggaacaggcgccttcaaaagcccacttggcgatgggttacagtaagagaggtctgcggggtttccgagaggctcgccgggatttctgg

SEQ ID NO: 134823 - DNA, 96 bp, Homo sapiens
ccagacagctgggccggagcagccgcgggcgcccgaggggccgagcgagaaacttgtggtggagaatgttgatgtgttaacacaaatgaggaccag

SEQ ID NO: 134824 - DNA, 96 bp, Homo sapiens
gtgctggaaaggagataccactcactcacagggggcaggcctttcccgaagaccacatcgaccctcaaagaggtgtccccaggtgtcattgccaac

SEQ ID NO: 134825 - DNA, 75 bp, Homo sapiens
attgggagatccacagctaagacgccgggactccctggaaacctagaaatggtcagatgggcagacctggaagag

SEQ ID NO: 134826 - DNA, 82 bp, Homo sapiens
ctactgcctggaggccggggagccgacgcctggacttctgccatgggcaagtgatgtggccacccctcagcgccctacaggt

SEQ ID NO: 134827 - DNA, 74 bp, Homo sapiens
ggaaaagactcaggacggacaagcacagtcttcggaaggtgacagagctgaatgaacctctctccaatgaagat

SEQ ID NO: 134828 - DNA, 100 bp, Homo sapiens
ctgcccctcggggatgggacgtcaggagaagacgcagagactgcttgagagctcaccggagcccctgtccttcatcgtgttcatccctgagtggcgggaa

SEQ ID NO: 134829 - DNA, 83 bp, Homo sapiens
taatgctggggaccctgagatcgtcaagtctcccagcgaccccaagcaataccgcttccgacttcgactccttaccttaaaag

SEQ ID NO: 134830 - DNA, 82 bp, Homo sapiens
ggacggtgtggggcggtcccggccccgcagggagtgcatccgccccaacccttttccccctcgtctcctgtgagaattcccc

SEQ ID NO: 134831 - DNA, 100 bp, Homo sapiens
cacagattgagccgagttgtcgccccgctgggagaagtgaccctcctgcgcctgcctttctgagaaaagtctacagcattctttctctgcaggttctctt

SEQ ID NO: 134832 - DNA, 82 bp, Homo sapiens
gtggtggtgaaaaatgaccctgaactggaccagcaggctgaccccgcactacatctacccaccagccatcgtgcagcccagc

SEQ ID NO: 134833 - DNA, 100 bp, Homo sapiens
aaggatatcctgacggccatcgccgccgacctgtgcaaggctgtgggtgagcgtggaggatgctcagatgcacaccgtcaccatctggctcacagtgcgc

SEQ ID NO: 134834 - DNA, 90 bp, Homo sapiens
gggctggcgatggaagatggaaggaaggagcgcagcggcatattaatgaggataagagaaaaacagaagctcaaaagcaaatttttgatg

SEQ ID NO: 134835 - DNA, 75 bp, Homo sapiens
gcctaccccaaactcatggaaattgatcaggaatgtatcctgtcaggtataatgtcagtgaatggcaagaaagtt

SEQ ID NO: 134836 - DNA, 100 bp, Homo sapiens
agtcccgtgacggcctcatcaccacggtctacttctatgaattgcaggagaacctggagaagctccttcaagacctcatcctgtttgggctcagtaatca

SEQ ID NO: 134837 - DNA, 98 bp, Homo sapiens
cccggcgggagcggcggcaagaaaaatgccagccagaagaggcgttcgctgcgcgtgcacattccggttggtttgttggaccttgaactcaatcggct

SEQ ID NO: 134838 - DNA, 76 bp, Homo sapiens
atgactaagcagcatcaaaccagattagattttgcctgagaatacagatcaacccacagaacaaagcggatttcca

SEQ ID NO: 134839 - DNA, 100 bp, Homo sapiens
gtggtgagagagctccacaaggtgaaggaggagatcatcgacgcaggttcaggagaagtggcacctggtggaggacctgtcgcgactgctgccggagcca

SEQ ID NO: 134840 - DNA, 90 bp, Homo sapiens
atccttgaaaaacagtaagaaatatgctcccaccggtggcggacgtgtgaaaattgagagtgtaaaactagatttcaaagaaaaggccca

SEQ ID NO: 134841 - DNA, 100 bp, Homo sapiens
cagctgtggaaagaagttgcaaaacactgggtgcagtagacattgttgcaatcatgatcggcaatctgaaaggcacaaaaattctgcaatctattcaaag

SEQ ID NO: 134842 - DNA, 97 bp, Homo sapiens
tgatgagagaaatcgcccactttctgatgaggaattagatgctatgttcccagaaggatataaggtgtttggagaagagggattgaccctgaatctt

SEQ ID NO: 134843 - DNA, 50 bp, Homo sapiens
atccgccagctcaagtggaaggagatcacagattctgctggccatattct

SEQ ID NO: 134844 - DNA, 83 bp, Homo sapiens
agccgcggcggcagcagcagtgagaggaacaagatcactcaaggtgaaggataatctactaataccagcactttgaatgaaaa

SEQ ID NO: 134845 - DNA, 100 bp, Homo sapiens
tgctgagccccggcactgcctggctgcgagcacatgatggcgatacgggagctcaaagtgtgccttctcgggatatcctcatacctctgcgacttttctg

SEQ ID NO: 134846 - DNA, 99 bp, Homo sapiens
gttattaaagtctgttggtgcacaaaaagacacttatactatgaaagagctaaattgtgagcgcccccatggcagggacctggactcccccttcttcgg

SEQ ID NO: 134847 - DNA, 100 bp, Homo sapiens
ccagcgccggcacgcgcgaggcccggaatgggtactgttcaaaaaggaatgccccacaagtgttaccatggcaaaactggaagagtctacaatgttaccc

SEQ ID NO: 134848 - DNA, 75 bp, Homo sapiens
aaaggtccaaactcctatctccttacagcccgcagacacaagaggctgataaaataccagtaatgcgtggacagt

SEQ ID NO: 134849 - DNA, 74 bp, Homo sapiens
gaggagccaccaagagtccttttataccacggttacgggcaggacttgagtggcttcggacagggcttctcaga

SEQ ID NO: 134850 - DNA, 100 bp, Homo sapiens
cacgagcagatcctggtcctcgatccgcccacagacctcaaattcaaaggtatcagcagatgttgcacacaaacttggtataccttgctacaatagcaga

SEQ ID NO: 134851 - DNA, 101 bp, Homo sapiens
ctctgggggagcacggatccaagaaggagtggagtctttggctggctatgcagacatctttctggatccagccgcagaagccaggatgaaggtagcctgca

SEQ ID NO: 134852 - DNA, 83 bp, Homo sapiens
gttcgagaacgaccccgagacgacatgcaagaaagcacttcagccaagcagaagggagccagctggacgaggtgcgccaggcc

SEQ ID NO: 134853 - DNA, 100 bp, Homo sapiens
ccgcgccgggagcggcgctggccccaaggcgctgccctgcgcaggatgccgcatcctcgaaggtaccactcctcagagcgaggcagccgggggagttacc

SEQ ID NO: 134854 - DNA, 51 bp, Homo sapiens
cctccaaataaaacatgactggctctccccggaggctcagccccctctgct

SEQ ID NO: 134855 - DNA, 100 bp, Homo sapiens
ccaagtcaagtttgaagacctcataaaagatttgagaaaactgaagaggcaactagaagggggccgtggagcccatgcagatcgacgtggacccccagga

SEQ ID NO: 134856 - DNA, 100 bp, Homo sapiens
gagcccttgggtgaaattgttaggcgtggagagggagtgatgtcttccagactcggtgctgtacccgccctggggtatggccgtcaatgtgtactccaca

SEQ ID NO: 134857 - DNA, 98 bp, Homo sapiens
acagtgtggcccgccatgttcttctccgcggcgctccgggcccgggcggctggcctcaccgcccactggtcactcagcctctgaagaagcttcgggtt

SEQ ID NO: 134858 - DNA, 100 bp, Homo sapiens
tcggaagatgccggccgtgtccaagggggacgggatgcggggcctggcggtcttcatctcggatatccgcaactcgcaaatgggagttggcgaaggcaag

SEQ ID NO: 134859 - DNA, 50 bp, Homo sapiens
cgcgggcctgcggcagcgggagaacctatgagaaccccaaagacattaaa

SEQ ID NO: 134860 - DNA, 98 bp, Homo sapiens
ttcagaagaaattctgtgtggcttcaagagactgatcaaattgtgagaggaaaacagcctacccgtttcaaggagaagctggggccagcaggcccagg

SEQ ID NO: 134861 - DNA, 100 bp, Homo sapiens
tgctggcctccctggccaagattgttgcccagaagattgttgccacaaggaagaagcagcagctgtccataggaccctgcaagtcgctacctaattctcc

SEQ ID NO: 134862 - DNA, 51 bp, Homo sapiens
cctctgcctcccagaaactcaggtaggaaacatgagcggcaccaacttgga

SEQ ID NO: 134863 - DNA, 89 bp, Homo sapiens
agaacatgggtccgtggtcgtttgtttctccaaggtttgaaaagcagctggcctgcaagacctctgtgagtgaaagccttcagagggaa

SEQ ID NO: 134864 - DNA, 98 bp, Homo sapiens
ctgagagtatttatgaactgccaatccaaactttctgacatgcctttaaaaagactgggatcagatccagacaatagactccttgctcaggaaaggtg

SEQ ID NO: 134865 - DNA, 82 bp, Homo sapiens
tgaatttatacaaggagaagcactggatccaaagcatgtctgcaacccagccattttcagggatgtccgtcgcttggtagtg

SEQ ID NO: 134866 - DNA, 100 bp, Homo sapiens
ggaggagcagttgtctgatgaagagaaggcaaggtgaccccatggcaaggcgcaagccagaagggtccagcttcaacatgacccacctgtccatggctat

SEQ ID NO: 134867 - DNA, 88 bp, Homo sapiens
gcagaaagcaggcgaacccgcggcgcaataacgaatagcctaacatggcagaccagagacagcgctcactgtctacctctggggagtc

SEQ ID NO: 134868 - DNA, 75 bp, Homo sapiens
ctttactgagaattttccacctcctgacacaacaccactcaaccctgtacccaagcctgtcatcaaaattgagaa

SEQ ID NO: 134869 - DNA, 100 bp, Homo sapiens
aattttaaccatgagggaaatcgtgcacatccaggctggtcagtgtggcaaccagatcggtgccaaggaagtgagctcacaatgactcaagctgccacat

SEQ ID NO: 134870 - DNA, 136 bp, Homo sapiens
ctgaagttactgaaaaggaggtagaaatactcttcattcaagtcaatcagtttgcattgaattttgattcagctaaagttccatcagatgagtattgccctgcttgtagagagaagggaaagttaaaagccttaaa

SEQ ID NO: 134871 - DNA, 100 bp, Homo sapiens
ggcacaggaatatccatgtcggcttgtagagagattgcagtctgacggtaactgctgtaaaagactcaggagaatggaatttggaggctggggcattagt

SEQ ID NO: 134872 - DNA, 90 bp, Homo sapiens
tccgcccggcagccaccccatctgggaagttgtcctggtgacagacggctgtcttggcattggtagagggtcactgcgacattccctagc

SEQ ID NO: 134873 - DNA, 83 bp, Homo sapiens
cagatctggcccaacgatggcgagggcgccttccatggagacgcaggtgaagggctggatgcacagtgggagccggaggcggg

SEQ ID NO: 134874 - DNA, 100 bp, Homo sapiens
gcggaatgtcaactattcaacatggaggcggaggtcgataagctggaactgatggtaattttaaccaatcagatgacaacaaagattgatagaaatcagg

SEQ ID NO: 134875 - DNA, 89 bp, Homo sapiens
gctgctgtgcgcggtcctggcgctcagccatacaggaggaactctctggaatgaaaaataaaatacaagtagttgtgcttgaaaacgaa

SEQ ID NO: 134876 - DNA, 99 bp, Homo sapiens
gcctcctgagcagctgggattacaggtttctatgatcagagatattcgagagagggagattcggatctatacggatgcaggccgtatttgtagaccact

SEQ ID NO: 134877 - DNA, 83 bp, Homo sapiens
gggtgaagatggcggcagccgaggccgcgaactgcatcatggagggcgccatgttttggaagtttgacctgcacacaagctcg

SEQ ID NO: 134878 - DNA, 98 bp, Homo sapiens
agctgggcccagcagcgtgaacacttcatgtcagaactatgacatggtcagtgggatctactcatggagcagacgcctccgcctagacctgaagccta

SEQ ID NO: 134879 - DNA, 90 bp, Homo sapiens
cagcctctggtttccagcaccacacctgggccgagctgaagcagatgctgggctcttgcactgtttggtggaaatggtgagacaggattt

SEQ ID NO: 134880 - DNA, 82 bp, Homo sapiens
ttagccagccagtgttgcccttggccccctcgtcgtctgccccagacaatgcagatcttcgtgaagactctgactggtaaga

SEQ ID NO: 134881 - DNA, 100 bp, Homo sapiens
gtctgtgttaaagcatatgcctcagaagtatggtcctgatgccttttttaactttccaggaaagagtgctgcagttctcaacaggaggtgtgtagaagcg

SEQ ID NO: 134882 - DNA, 100 bp, Homo sapiens
cgcaagctgacagtggatgtgcaattcttaaagaatgggcagttgaaagaatttgccaactttgactttgatgtctggaggaaaaagtatatgcgttgga

SEQ ID NO: 134883 - DNA, 100 bp, Homo sapiens
cagtgacaccccagaggccctcatcaacgcgggagacttccacggcctgcaggtatgctttactcagaataattatattcaagtcagagtacacagtgaa

SEQ ID NO: 134884 - DNA, 82 bp, Homo sapiens
gaggatgtcccgaaaggggccgcgagcggaggtgtgtgcggactgcagcgccccgggtgttggtggaaataacccagatgaa

SEQ ID NO: 134885 - DNA, 82 bp, Homo sapiens
cgggagctgggcggccatttaccagggctgaaggcctttcggcagcagctgaggaagaccacgcggaccaaagggtttctgg

SEQ ID NO: 134886 - DNA, 75 bp, Homo sapiens
ttccctgtcttgggaaaaggagaactcctgactgattagcattcacaccaggtacttcgtactggatttcgaggc

SEQ ID NO: 134887 - DNA, 74 bp, Homo sapiens
gtgggcacagacaaggagctcagtgacctcctggacttcagcatggaccctcactacgtccagcaggcgctgac

SEQ ID NO: 134888 - DNA, 50 bp, Homo sapiens
gctccttctcctggagacgcaactcaagcatcttcatgatacagttaaga

SEQ ID NO: 134889 - DNA, 50 bp, Homo sapiens
ctcccaaggtgctgggattacaggaaatctatacctttggaagaatattg

SEQ ID NO: 134890 - DNA, 100 bp, Homo sapiens
cgaggagagccggagtcggggacccaggagtttcctgtgtccagcgctgccggagccgcctgaggatagtggccaaagcctccaagaacctcatgtccac

SEQ ID NO: 134891 - DNA, 75 bp, Homo sapiens
ccacacgggcctccgaagagctgccgcgacgcccggcccgcagggcaggtatgatctcgtgaaatcttgagagaa

SEQ ID NO: 134892 - DNA, 100 bp, Homo sapiens
ttgattgagaaagaaaatatggaaattgaggaaagagagagagcagaaaagaagaaacgggcaactaaaactccaatgtctcagaccagtatccttcagg

SEQ ID NO: 134893 - DNA, 100 bp, Homo sapiens
gtatgcagtcccccaggatacagggtcaaaggagagcacaaccatcgcagttggaagcccatggggcagatgaaggatttgggggcagagcacttggcag

SEQ ID NO: 134894 - DNA, 98 bp, Homo sapiens
aggatatgatggttacaatgaaggaggaaattttggcggtgataagatttgtgaccaaatcagtgatgctgtccttgatgcccaccttcagcaggatc

SEQ ID NO: 134895 - DNA, 100 bp, Homo sapiens
gtgacggaacttcccgccttcaaggaccgcgtgcctgagtaccctgccggtacctggatgaggccgagagagagaagcagcagtacatgaaggagctgcg

SEQ ID NO: 134896 - DNA, 74 bp, Homo sapiens
ggcgaagctcaccgaggcccgagtacagagcaaacgaggcccctgagagctccacctagttcacaggataaaat

SEQ ID NO: 134897 - DNA, 75 bp, Homo sapiens
aaatcttgcggcaacgcccccgggacatgcatcgtcccctggactctctcaaatgagattgtggggaacctgggt

SEQ ID NO: 134898 - DNA, 75 bp, Homo sapiens
ctgctagttaccaagctgaagcacttccagctccggacgatgccccgaattcccaccctgaagaacctagaggat

SEQ ID NO: 134899 - DNA, 100 bp, Homo sapiens
tagaatttctacgcagaagtctccctcaggatcagaccgtagcccttccggaaacctccatgtgctgagcttgcaagacctctgctgccgggcggtcgtg

SEQ ID NO: 134900 - DNA, 100 bp, Homo sapiens
ggtcaacaccttctcccagagcgtcagcagcctgttcggcgaggacaacgtgcgcgccgctcagaaggttgccaggcaggaggggaggatcattctgacg

SEQ ID NO: 134901 - DNA, 82 bp, Homo sapiens
ccggcgtcagggacacggggtgctgcgctgcgccgacggctccacctacaaggaactagtcagccggaagctgagtttggtt

SEQ ID NO: 134902 - DNA, 123 bp, Homo sapiens
gacaccaggacagaaaagacagtgttctgctttcatggagttcacagaagagtcgaggaggatttttggcaggtatatcaatgatgttttataaaagcacaacaatttccatgtatttagcgt

SEQ ID NO: 134903 - DNA, 75 bp, Homo sapiens
gatttattaaatttaaatagattagtaactggcatagacaactatgggcagcttttctgggagaagaggctacaa

SEQ ID NO: 134904 - DNA, 82 bp, Homo sapiens
ccatctgaagagggctccaggcatccggtcctggtccctgctggttgataacgaaggaggcccaacttcattcaataaggag

SEQ ID NO: 134905 - DNA, 82 bp, Homo sapiens
ggtaccattaaggcaaaattggttcaggattcaggtgatgtgattacagaaggtaggattcgtgtgattttcagcattccat

SEQ ID NO: 134906 - DNA, 74 bp, Homo sapiens
cagtcacttttcacagaaggactgaagagtctgacaggccaacccatggccagcacagacatgatggaataaag

SEQ ID NO: 134907 - DNA, 50 bp, Homo sapiens
cctggacccctactattgcaacaaggttttaaaatcaaagatgggaaaat

SEQ ID NO: 134908 - DNA, 98 bp, Homo sapiens
caaccacctcgagcggctgctggacgaagacaagttggatggcttgaggactggtactaaaaggaaacgtgactgggaggccattgccagcagaatgg

SEQ ID NO: 134909 - DNA, 100 bp, Homo sapiens
aatatagaggtagaccccaggcatcctactatgcttcctgagtgcttctttcttggagctgaccatggtgggagctgctctaagaccagccttttcacaa

SEQ ID NO: 134910 - DNA, 100 bp, Homo sapiens
ccactctccaggctgctccagtactcaagggaacgggattttttatcaagcagaaatgcatcgaacaacgagaatcaagatcactgagctaaatccccac

SEQ ID NO: 134911 - DNA, 90 bp, Homo sapiens
ggcggccaatgtgggatcgatgtttcaatattggaagcgctttgatttacagcagctgcaggtgtggatgaggtcaccattgtcaacatt

SEQ ID NO: 134912 - DNA, 90 bp, Homo sapiens
agcagatggcggatgccctgcagtacctgcagaaggtctctggagacatcttcagcagagatggagtttcactgtgtcagccaggatggt

SEQ ID NO: 134913 - DNA, 75 bp, Homo sapiens
gggtcctcctagaaattccccccgaagaagactcccccacatctggatgggaataactgggaacacaagtccatt

SEQ ID NO: 134914 - DNA, 51 bp, Homo sapiens
tgagacggcggcagcagcggcattcagaaaataaacagagttgtctttgtt

SEQ ID NO: 134915 - DNA, 75 bp, Homo sapiens
tgatattgaccatgatggaatgcttgacagagatgagtttgcagttgtagaacgtcatgacatgaataccttaag

SEQ ID NO: 134916 - DNA, 100 bp, Homo sapiens
tcagggctgctatcaacgaagagatatcactgcctggatcaaagtggaacagctgaagccatatcatgctcataaagaggaaatgataaaaattaacaag

SEQ ID NO: 134917 - DNA, 75 bp, Homo sapiens
atccactcttgggagaaacgtatgaattaatcaggaggatatgatggttaccgcccttcattctctaacactcca

SEQ ID NO: 134918 - DNA, 100 bp, Homo sapiens
gcagacgttgtggcggagaagggcagtggctgtagctgccctttccgtttccagggttccgaccaggtatccgccgccaaactgcccattgcataaagaa

SEQ ID NO: 134919 - DNA, 100 bp, Homo sapiens
caccttcagagcgtcacggcgtacgccctcatggggaaaatctccccggtgactttcagacggttgatgatgaagcgccggccgtgtaaatgaagatcgg

SEQ ID NO: 134920 - DNA, 60 bp, Homo sapiens
gctgcaatcgtggtttacgacattactaatcagactctggtggagcaacgttcaggtggt

SEQ ID NO: 134921 - DNA, 99 bp, Homo sapiens
gccgaagcaagtctccagctgactcaggcatagttcaacactatgggtcctcctctgaagctcttcaaaaaccagaaataccaggaactgaagcaggaa

SEQ ID NO: 134922 - DNA, 75 bp, Homo sapiens
tggaggaaagagatcttggatgaggaggattttcagacttgggaagacccagggcacaatgataaacatactggc

SEQ ID NO: 134923 - DNA, 80 bp, Homo sapiens
tacttcactcgcactatccttgatgctagacttatgaaaatatgcatcagtttaatactgtcttggaattcatgagatgg

SEQ ID NO: 134924 - DNA, 96 bp, Homo sapiens
gtggtgatcagcagctcggaagactcagatgccgaaaactcggtcaaaatgcagatcttcgtgaaaacccttaccggcaagaccatcacccttgag

SEQ ID NO: 134925 - DNA, 100 bp, Homo sapiens
agcctgaagaccccggagcccctttagccatgtggatacctacggagcacgagaaatacggcgtggagtaattccctcctggtcccagacagtctaagag

SEQ ID NO: 134926 - DNA, 82 bp, Homo sapiens
aaacagaggccttcatgcctttctgaaaaatatgacaggctgaccccgcactacatctacccaccagccatcgtgcagccca

SEQ ID NO: 134927 - DNA, 90 bp, Homo sapiens
gtacttgggatcccccagttccaaagtgtcttaaaggtgtggatgaagcaaccatcattgacattctaactaagcgaaacaatgcacagc

SEQ ID NO: 134928 - DNA, 103 bp, Homo sapiens
aacggggctgctggtgggccgcgtcgaagacatggaccagggctacggaggtttggtgcacctcgatttggaggaagtagggcagggcccttatctggaaaga

SEQ ID NO: 134929 - DNA, 100 bp, Homo sapiens
cgaacttagacttccggaaggactttggcgaggggtctcgctctcacccaggctggagtgcagtgacacagttgcagctcactgcagcctcgacctcctg

SEQ ID NO: 134930 - DNA, 98 bp, Homo sapiens
atgcgtgcaggcttttcgggcccgcaactggaaagtgactgagaccgaagatgatagtgatagtgacagcgatgatgatgaagatgatgttcatgtca

SEQ ID NO: 134931 - DNA, 88 bp, Homo sapiens
tgctggccccgggtggcgcctccctgcgactcctggaccaccgggcgctggtctgctcccagccgcattcttttatacagcaaaatgc

SEQ ID NO: 134932 - DNA, 100 bp, Homo sapiens
ctgcctcttcatgcagttctccatcgtgccagtgccatcgcctgcaggattctttattcagctctgacagtggcttcagcaactaccgtggcatcctgaa

SEQ ID NO: 134933 - DNA, 75 bp, Homo sapiens
gcagctcagccaaggccaggggagacctgggtgccttcagcagaggtcatcgacatcctgagggggaaggccacc

SEQ ID NO: 134934 - DNA, 100 bp, Homo sapiens
tatactctagaatatacaaagacaaaaggagattctgatgaagaagttattcaagatgatgtgtgatattggtgatgcatctagaggcagcttatcatcg

SEQ ID NO: 134935 - DNA, 83 bp, Homo sapiens
gggagacggacgcgtttggcaacagcgagggcaaagagctggtggcctcaggtgaaaaggccatgatccaaaggaaccagagc

SEQ ID NO: 134936 - DNA, 100 bp, Homo sapiens
cgacatcaccacggagaaccagtaccggctgacctcgctgtacgccgagcacccaggcgactgcctcatcttcaagttccagctattcttcagatgctct

SEQ ID NO: 134937 - DNA, 100 bp, Homo sapiens
aaaatttcatggagaagaaggccttgactacggaggggttgccagggaatcttgatcacgtggacaaagggttttaaggcaacagactgcgtgggccacg

SEQ ID NO: 134938 - DNA, 83 bp, Homo sapiens
actcattcacttctagacgacaaaatgcaaaaaaggaggccaaagactttaaggcggtcaccttctccttactatagtcgtgg

SEQ ID NO: 134939 - DNA, 83 bp, Homo sapiens
ggaagaccataaaccagtgggtcaaaggacagacagaagccatcgccatgttgaaggacaaggagccgggctcattcattgtt

SEQ ID NO: 134940 - DNA, 83 bp, Homo sapiens
cttgatcagtttgtgtcagccaccttgttctctaaagaaagaactggttgtcttcttgggcggtgttgcagggttcatcttta

SEQ ID NO: 134941 - DNA, 82 bp, Homo sapiens
agagctttacgtcatcttcgattagctaataaccaactgcaattcctacctccaggatgcatcatctgcagacatcagaaaa

SEQ ID NO: 134942 - DNA, 93 bp, Homo sapiens
ctggggccagggaaccctggtcaccgtctcctcaggcttgggcactgtttaaaggaaagttccgagaaggcatcgacaagccggaccctccca

SEQ ID NO: 134943 - DNA, 100 bp, Homo sapiens
tggccgcatactcggcctccttggaggatgtgaagacagccgtcctggggcttctggtcatccttcaggatcatccagcagctcgtcaacggcatcatca

SEQ ID NO: 134944 - DNA, 100 bp, Homo sapiens
agagtagtaagaactcctacatcaaactctccttcaaagaacatggccagattgaggttaaagaactgaatcattatctggaagctgagaaatcttgtag

SEQ ID NO: 134945 - DNA, 150 bp, Homo sapiens
aggagaatggagaccaaacctgtgataacctgtctcaaaaccctcctcatcatctactccttcgtcttctgggatcgtgtgggtggacgagttgccacatttcgcaaaggaaactatgtagctgatcttggagccatggtggtaacaggt

SEQ ID NO: 134946 - DNA, 97 bp, Homo sapiens
cgggctgaagcgactgagtccgcgatggagggtgagttctgcatcctggtacttcctcaatgtatttgggcttcggagcatttactctctgattctg

SEQ ID NO: 134947 - DNA, 97 bp, Homo sapiens
ccaagaagccagtcaagcggccaggtgtcatggagaaactccagctgggcccagagattctgcagcgggaaaatccaaggcttatttatgccaggct

SEQ ID NO: 134948 - DNA, 90 bp, Homo sapiens
gcccaggtggccggcgcggcgttgtcccaggcgggttggtgagctttccgttgaagaggcgcaggaccctttcctggtcagcatccacat

SEQ ID NO: 134949 - DNA, 100 bp, Homo sapiens
ccatgaatttgttactttttcttgtccgggtgcggataagggacccgacactgatgataagttctgaacgtcgaaaagaaaagtctcgagatgcagccag

SEQ ID NO: 134950 - DNA, 49 bp, Homo sapiens
gaagagggaagacacgcggaaacagatgccttcaattaagttgcagagt

SEQ ID NO: 134951 - DNA, 96 bp, Homo sapiens
gggaaatgcggcggcggccccaatcgaggtgagcacctgcggatctgtccccagggctacacctgctgcaccagcgagatggaggagaacctggcc

SEQ ID NO: 134952 - DNA, 130 bp, Homo sapiens
ctgacgggcgcccggccggctgcggtccgtgcggaggctgagccggccgcgggcgcgaccggaggcaggaatcaaacattttaagtccagtgcaggatggaacaaagaaacctcagattgacagcaacaa

SEQ ID NO: 134953 - DNA, 101 bp, Homo sapiens
ccccagacaagatggacaccgcggaggaagctctttcaccatgcctggatcacttcctttgaatgcagaagcttgctggccaaaagatgtgggaattgttg

SEQ ID NO: 134954 - DNA, 83 bp, Homo sapiens
ctccgttgggtccggccgctctgcgggactctgaggaaaagctcgcaccaggtggaaatgagttctcaacagtttcctcggtt

SEQ ID NO: 134955 - DNA, 85 bp, Homo sapiens
cattttggccaaaccaaccgcacccctgaatttctccgcaaatttcctgccggcaaggccccagcctccaggcccccaactccgc

SEQ ID NO: 134956 - DNA, 90 bp, Homo sapiens
gaataaacatgcaatgaacccaaaaggggagcactcaacatcagtgatagaaccatacctcagccccccattcttcagctttcagtggag

SEQ ID NO: 134957 - DNA, 82 bp, Homo sapiens
cccagagaccctatgcaacgggcagctgggctgcagtgaccccgctttcctcacgcccagatctgactgcagccatgagcag

SEQ ID NO: 134958 - DNA, 75 bp, Homo sapiens
agacactccccagggcagaaatagcgaccatggcgaggtatccgttacagcactgatgtgagtgtagatgaagta

SEQ ID NO: 134959 - DNA, 75 bp, Homo sapiens
ctggccctgaggcaacggctcatcaggttgactatagtcaatggggccaatggagccaagtgtatggaaacccac

SEQ ID NO: 134960 - DNA, 49 bp, Homo sapiens
catccaaagtccctgcccccaaagagtccaaggcccagcgtctggagga

SEQ ID NO: 134961 - DNA, 74 bp, Homo sapiens
gtggtggtctactctgatgtcaatcttgagggctaggcaggaccttaaagaaacattcattgacagtggtgtga

SEQ ID NO: 134962 - DNA, 100 bp, Homo sapiens
aggcttcgaggccgttgagaatggcaccgtctgccgagggcaagcaggaggacttcaagacgacagttctggagggtatggagacggccaagcatcaggt

SEQ ID NO: 134963 - DNA, 74 bp, Homo sapiens
aagaaaagcctcccacaaaagagatgagacaagaggaatggttacacagggtctccctctgttgtccaaggctg

SEQ ID NO: 134964 - DNA, 100 bp, Homo sapiens
agcccacacgcccctccacatggctgccctcctcctgcttccctggctcatgttgctcacaggtggccggactgtgccatgctgctccagacccaaggtg

SEQ ID NO: 134965 - DNA, 75 bp, Homo sapiens
cagcatgaaagcagtaatcagatgtttgccatgaaagaaataaggcttcccaagacttcgcatatcatttaagtg

SEQ ID NO: 134966 - DNA, 101 bp, Homo sapiens
gtgccggatcatggacaatggcttcgagatctataaggacaggcagaaattctcagaacaggttttcaaagtggcctcctcagacctggtcaacatgggca

SEQ ID NO: 134967 - DNA, 75 bp, Homo sapiens
ccgggagcaggagctgggcctaggtctgcgccctgctcctttagcggcagagttttccgagtgaccttcttgatg

SEQ ID NO: 134968 - DNA, 98 bp, Homo sapiens
gagagtcctcatatgtgccacaggaagccatcagcagtgccatccagcttctagaagacccattacagagggtagtacagctggatgtgagagacaac

SEQ ID NO: 134969 - DNA, 74 bp, Homo sapiens
cgggccggaggacgtgctggggctgcagcggatcaccggtgactgtgagaacattctctttgaagggaatgact

SEQ ID NO: 134970 - DNA, 154 bp, Homo sapiens
ctatcggcagacttggaacaagagtgcaggaacggaagcctctatgtgagagataacactggcgtcctgagctgtgagtgcatcgtgagtgttgctggtggggccactcgggctgccctgaccgtgcaccaggctcggaggaacaacatggctg

SEQ ID NO: 134971 - DNA, 82 bp, Homo sapiens
aaacagccgattggagacgggagccaaccagggctgcattggaggtgagaagccctaccactgcaactgggacggctgcggc

SEQ ID NO: 134972 - DNA, 90 bp, Homo sapiens
taattttattggactgtttgtctttgttctctgcctcttgtattctagggatccatatggctttggagacagtcgagattcaaggcgtga

SEQ ID NO: 134973 - DNA, 87 bp, Homo sapiens
ccttctgcctgatggcacattcagctcctgtaagaaggtccattttagcttcctatctcctgaaggaaaagctcaacatcttgggca

SEQ ID NO: 134974 - DNA, 88 bp, Homo sapiens
tgacgttgaagatgtcggccttctgagccgactgcggtggtcaagagaggcgtagaggctccggtgttttttgtgccaattgcctgac

SEQ ID NO: 134975 - DNA, 96 bp, Homo sapiens
ggcccaagcggcccaccacgctcaacctctttccgcaggtgccgcggtctcaggatgacaaggagtatgtgggctttgcaaccctccccaaccaag

SEQ ID NO: 134976 - DNA, 83 bp, Homo sapiens
atcgaccccgttctgcggccgactgatcctttgaaatactccagccatgactaaaagagaagcagaggagctgatagaaattg

SEQ ID NO: 134977 - DNA, 98 bp, Homo sapiens
gcgtttaaacagaaatcaccttcagctgtttcctgagttgctgtttcttgggactgcgaagctatacaggctgtatgaaaatgagtgcgaatgtcaac

SEQ ID NO: 134978 - DNA, 80 bp, Homo sapiens
ggcactgggctacgtgctggacagatgagattgtggggaacctgggtgaaggcacctttggcaaggtggtggagtgcttg

SEQ ID NO: 134979 - DNA, 83 bp, Homo sapiens
ggacggcgctgcggtacatccaggacggggaggtttactgcatcgacgcgcggttctacgggaacgtcagccggttcatcaac

SEQ ID NO: 134980 - DNA, 100 bp, Homo sapiens
ggctacgctcctccatcacgtgggtggccattcagggcaactggggccttcgtcagttgccccttcattccgcccagaggatgagcttgagcacctgacc

SEQ ID NO: 134981 - DNA, 100 bp, Homo sapiens
ggccggaagacgcgccacgacgtgggactgcccggggtgtctcgcgcacgggccctcaggaagggcctgatcaagatccggggggaccggtgctggcgag

SEQ ID NO: 134982 - DNA, 90 bp, Homo sapiens
tgcaaacttcaacctggctctctaccccaagttatgtatgtccctgggaagctgcatgatgtggaacacgtgctcatcgatgtgggaact

SEQ ID NO: 134983 - DNA, 100 bp, Homo sapiens
ggggtgggacagagcggctcttcaccaacctcaaggacacctcctccaaggtcatccagtccgtcgctaactatcatggtgaacttacttcagattgtgc

SEQ ID NO: 134984 - DNA, 51 bp, Homo sapiens
gcctcgcggagcccgcgcgccgagccccacttacacaacagccaatgcgga

SEQ ID NO: 134985 - DNA, 83 bp, Homo sapiens
cttcggacatagaggccaaccaacctttggaggtattgaaatagaagagttacagaatgaggaagaagaactaagtccacctc

SEQ ID NO: 134986 - DNA, 101 bp, Homo sapiens
acacgttcctccgaaaccggtttgcaagtccttgtagagttgggacccctgattttagcaggatggcccaatggaatcagctacagcagcttgacacacgg

SEQ ID NO: 134987 - DNA, 123 bp, Homo sapiens
atggagctttcctaccagaccctgaaattcacgcatcaggcgcgggaagcgggaatgaaggatggcagcatgccgtgcattaaaagctgttttggtagatctcagtggcacacttcacattga

SEQ ID NO: 134988 - DNA, 51 bp, Homo sapiens
cttttaccagtgcatcaggcctgaccccagttttctggatatgccgcagaa

SEQ ID NO: 134989 - DNA, 73 bp, Homo sapiens
atgagttgacaccttttgacatgagcatccaggacgcgggaggacacagtgcggcagattgtggctgggctga

SEQ ID NO: 134990 - DNA, 100 bp, Homo sapiens
attttgcccctggactctgaagaccctggactttgtgaagttgttagagtacatgagcattacttgggctcggatgaggtgcaggttggacagcagcgca

SEQ ID NO: 134991 - DNA, 98 bp, Homo sapiens
atcaaggactatgatcagaatgctttcaaggagtttttgggcacatgatggcagcacacactcacgggacacagtgggaaagtgctgtctgctaagtt

SEQ ID NO: 134992 - DNA, 82 bp, Homo sapiens
cgagcaggctgagcgatacgacggattgtgcacctgtgcctgcgaaaggctgaccagaagctggtgatcatcaagcagattc

SEQ ID NO: 134993 - DNA, 82 bp, Homo sapiens
gtgcagccgcgaggaggcgcgggaggtgttcgagaacgaccccgagacgatatgcacccaatgtccagggagcgtgcaaaat

SEQ ID NO: 134994 - DNA, 100 bp, Homo sapiens
caggaagagaaacggcaacaggaggaaaccaaccgagtgaaagagcgcaagcggaagcgggaaaagtatgcagagaagatctccagtctatgtgctgaag

SEQ ID NO: 134995 - DNA, 100 bp, Homo sapiens
tgtgtcgccgccgcccgcggcgtccccggtttggtgttgcggcgcccaccttcgggaggatcaggatttccaatttccaagcctgatgggatctcccagc

SEQ ID NO: 134996 - DNA, 100 bp, Homo sapiens
caggctcgcctcgactccaaatggttgaaaacagatatacaggcagaatccagagaccacatttgaagtatatgttgaagtggcctatcccaggacaggt

SEQ ID NO: 134997 - DNA, 78 bp, Homo sapiens
gttcttgttatgccaaatttgtatggagacatccttagtgccggtggtggtgtgcacattgagccccggtatagacag

SEQ ID NO: 134998 - DNA, 73 bp, Homo sapiens
gcctcctgtgatgggccttcgcactcccaggccagaacacaaagcgtgaatccggaagaaaagttcaatctgg

SEQ ID NO: 134999 - DNA, 100 bp, Homo sapiens
gagacaggaggcagtagccaaacacccaggaggagacatcacagctttcccagatcgggaggaaaaatatggaatgtgttttaccgctgactgaacacaa

SEQ ID NO: 135000 - DNA, 83 bp, Homo sapiens
ttcgagtgttgcagagcctgcggggcaagatctgtatttaccttgctgtggattgctgactggatggtccatcacttctggag

SEQ ID NO: 135001 - DNA, 100 bp, Homo sapiens
ctggcctggctgtcctagcagttgtggtcatcggagctgtggtcgctgctgtgatgtgtaggaggaagagttcagcctagtgatcgatacactgaaggag

SEQ ID NO: 135002 - DNA, 83 bp, Homo sapiens
gatgataaagatgatgatatccttctcaaccttgtgggatgtgaaaactctgttactgaagtcagctacggtgaagctatcta

SEQ ID NO: 135003 - DNA, 100 bp, Homo sapiens
cttcacccaggccctggagtgcatgcgcagcgccccatcatctccatctgctggggtcaccgggattcgaggctgttgatggcatcaggaccagccctgt

SEQ ID NO: 135004 - DNA, 101 bp, Homo sapiens
aaaaaggatcctgactgaaagctagaggcattgaggagcctgaagattctcagggaccttgctgcaagaaactgcctggtaggtgaaaataatgttctgaa

SEQ ID NO: 135005 - DNA, 99 bp, Homo sapiens
aacagtgaaggatctcactcagaatcctgtccacaatctgtccagtttacaccttaccccaaagagaaactcaacatattgcatgaaggtgtcaatgtc

SEQ ID NO: 135006 - DNA, 83 bp, Homo sapiens
gtccgggcaggggcagcgggagccggccggagctcaaccttcaacaagactacacagaacctggcccagaagaagtgctggga

SEQ ID NO: 135007 - DNA, 78 bp, Homo sapiens
tcctcctcagaattcccccctcaacttcgaagtgtgtgccactgtttataccaggatcatggggttgacagcagcatt

SEQ ID NO: 135008 - DNA, 83 bp, Homo sapiens
gtgaccgtcactgacgtggacatcgtcttcagcaagatcaaaaaaggagaacaacttcccgccactgcccaagttcatccctg

SEQ ID NO: 135009 - DNA, 100 bp, Homo sapiens
cagaactggttcagcggagaataacatatcttcaggcaaaaagggcagctagctgtagaaagagctaaacaagtagaagagttcctgcagcgaaaacggg

SEQ ID NO: 135010 - DNA, 101 bp, Homo sapiens
ttcaccgaccctgggatcctgccccgggccactgtctgtgaagcagccgccctggagaaacagatcggtgtacaagaatttccagaaaacataaagtgctg

SEQ ID NO: 135011 - DNA, 96 bp, Homo sapiens
ggcggctccgcagtgaccggactcgggggaggtcccagatggcttcacagctgtgatgagtgctagcacctgggagaagagaggtccaaataagtt

SEQ ID NO: 135012 - DNA, 100 bp, Homo sapiens
tcgctactacagagcacccgaggtcatccttggcatgggctacaaggaaaacgctttatcttcaagccaggatgaagggagactgggcaagactcttacg

SEQ ID NO: 135013 - DNA, 88 bp, Homo sapiens
ctggacagcccaggatgctgttggccaccctcctcctcctcctccttggaacaagatcactcaaggtgaaggataatctactaatacc

SEQ ID NO: 135014 - DNA, 125 bp, Homo sapiens
ggcgaggctagggaggacctcacttccccggggtgtaataatgttaactgagattcacaatgacatcctttcaagaagtcccattgcagacttccaactttgcccatgtcatctttcaaaatgtg

SEQ ID NO: 135015 - DNA, 100 bp, Homo sapiens
tacattacccaatggtggaatattgtatacctctggtgagagagtgtaaggaggtcctgaagggcggcctgctgatgaagcagtactaccagttcatgct

SEQ ID NO: 135016 - DNA, 100 bp, Homo sapiens
ggtagccacaggctctggctgtgccctggtccagctgcagccactgacagacatccacaagcgctgggccctcgtgtggctggcctgcctactctttgcc

SEQ ID NO: 135017 - DNA, 100 bp, Homo sapiens
gtcaagcgggccacgcacctcgtcaccaaggccaagtctattatcctcccagtccacaacgctgaaccgtggctggacgaatgtttgaggtctgttttgc

SEQ ID NO: 135018 - DNA, 82 bp, Homo sapiens
aagcagccgatgcccgcggccggagagctggaggagaggttcaaccgcgccctgggtttccaggcctgaggtgcccgccctg

SEQ ID NO: 135019 - DNA, 75 bp, Homo sapiens
aacaggactggctacctcatttgcagaatacagtcgctttgaatcgaagatacatgacttacgagaacaaatgat

SEQ ID NO: 135020 - DNA, 99 bp, Homo sapiens
ggactgactggggttctgagactccctgtcccggaccgcagatcatccagcccctcttagaacttgaccaaaatagaagtaaattaaagttgtacattg

SEQ ID NO: 135021 - DNA, 83 bp, Homo sapiens
gggcaaccgggcggccacgttcccgctgcaggtgcccgtggttgacacgagctgtgtccccagctgttcccgtctacaatggc

SEQ ID NO: 135022 - DNA, 74 bp, Homo sapiens
aaccgcccattcagtctacggctggggccgtcccagttcgcaatgagaaaggccgattctttgatgaaaatgaa

SEQ ID NO: 135023 - DNA, 51 bp, Homo sapiens
gattcgcagtggtcgcttcttctccttggcccgataaaagtgaaggatgta

SEQ ID NO: 135024 - DNA, 90 bp, Homo sapiens
ctttaaaaacatggttaaatcagcagatggagtaatcgtttcaggagtaaagctgcctgctgaagatgaagtcttactacagaaattaag

SEQ ID NO: 135025 - DNA, 97 bp, Homo sapiens
aatgatgttgtggaacacgaagactatgcggtggtacaggctttctgttggcaccaacgagaagatccagctgagctccctcattgctgcatttcaa

SEQ ID NO: 135026 - DNA, 74 bp, Homo sapiens
gggcttggtggagaaggctatctcaatttcatgggcggctgagccagaggccaactgcagaggaactggaacag

SEQ ID NO: 135027 - DNA, 82 bp, Homo sapiens
ttggtgctcaggtgccagatgcaaaggacctgctgaagttcccatgatgtcacccaatggatccattcctcccattcatgtg

SEQ ID NO: 135028 - DNA, 98 bp, Homo sapiens
agacaacaagcagcctattatgcccagacaagtccccagggaatgccacagcatcctccagcacctcagtgtgaatgggaaacgctacttcgaatgcc

SEQ ID NO: 135029 - DNA, 100 bp, Homo sapiens
acaaaagagaacatcgttagttgaattcctgggcaaactggtctgaagattgacttggaaggagtggaggacttcaacagacacctggacacactcacgg

SEQ ID NO: 135030 - DNA, 75 bp, Homo sapiens
gcacgtctttccagaattcaaagagagcgatgccatgtttgctgccgagagaatctttgtgaccatgccctgcac

SEQ ID NO: 135031 - DNA, 75 bp, Homo sapiens
cacctcctccctttcatggttccatcagccgccttcatcaaatcaaacagcaggaacgaatttcatatacacctc

SEQ ID NO: 135032 - DNA, 76 bp, Homo sapiens
tgtcaggccggggaacactggggaatggaagttggatacactttgtgacttgtacgagacactgaccattacacag

SEQ ID NO: 135033 - DNA, 100 bp, Homo sapiens
cttctttctggttccgtgttcatcaaggaatccatgtttcttccaagaagcaggttatcttatgatgaggcttttgctatggctaatgatcccttggaag

SEQ ID NO: 135034 - DNA, 74 bp, Homo sapiens
ctattcaattaactacttgcactggctggttgtgagttctttagaagccctggaaagctgctttgccgttggcc

SEQ ID NO: 135035 - DNA, 75 bp, Homo sapiens
aacaaattgaaggttaacaccttaagagttgtagttactgaccagagcgagatgcgagaacacttttggctaaaa

SEQ ID NO: 135036 - DNA, 80 bp, Homo sapiens
atcatcaagctgctgctcgtcttctatgtcaagaagtgagacctcgctacagtggtccagcacctcctcccaacagattt

SEQ ID NO: 135037 - DNA, 100 bp, Homo sapiens
ggcggcgccccggccgaggtggcggcggctcctcagcaggtcaatggccagcaaggaggggggtccgagccggcggcggcggcggcagtggtggcagcgg

SEQ ID NO: 135038 - DNA, 83 bp, Homo sapiens
gccttggaattttaccagatcgaatctgggccaaatagaaagcaaccatgtccaagggacctgcagttggtattgatcttggc

SEQ ID NO: 135039 - DNA, 49 bp, Homo sapiens
atgtgaagatttcctctaaaagcaatggctgccatccggaagaaactgg

SEQ ID NO: 135040 - DNA, 98 bp, Homo sapiens
tcaagactgtctttgctgagcacatcagtgatgaatgcaagaggcgtttctataagaattggccaccagcccctcgggttccaagatgcagctactgg

SEQ ID NO: 135041 - DNA, 95 bp, Homo sapiens
ctgagtggttgtgtggtcgcgtctcggaaaccggtagcgcttgcagcatggttgttcctcaaagtcattcaagctgtactcgccgaaggagcccc

SEQ ID NO: 135042 - DNA, 75 bp, Homo sapiens
acaacttcaagaaaattacggtggtgccgtccgccaaggaattgaatgatctggcacgggaccctccagcacagt

SEQ ID NO: 135043 - DNA, 124 bp, Homo sapiens
gccgcgggagagtgtgcagccgagtcactactgcctgcctgcctgcctgctacggcacagaccccacaggctcctcggacactgggtccatcacctcctgccccatcatccactccaacaccaa

SEQ ID NO: 135044 - DNA, 100 bp, Homo sapiens
gaaacatatgtgtagtgtgctgcagcataagatggaagaacttaaagaaggcctgcggcaaagagatgagcttattgagctcaccgggattattcaagcc

SEQ ID NO: 135045 - DNA, 50 bp, Homo sapiens
tctcatcattggcctgttcgctgtggcgacatgtctaagaatgtgagcca

SEQ ID NO: 135046 - DNA, 98 bp, Homo sapiens
tagcttgtgctgctgctgctgctgctgctgcatgtctaccaggagaggagggaactgcggagcggtatgaaaacaaagttgcagtacgtgacagagtg

SEQ ID NO: 135047 - DNA, 75 bp, Homo sapiens
ggcagaggattcgctcccagagcagctgcggccagacaccattcgcttttcacccaagatgatttgatgtcttat

SEQ ID NO: 135048 - DNA, 83 bp, Homo sapiens
gacttcaccgaagaccagaccgcagattactgtggcatgatcctccaccattcacactctaccctggactctgggaagggaca

SEQ ID NO: 135049 - DNA, 101 bp, Homo sapiens
cccccgacaggcacgcacacccaccccacagtgcccggctcggctgcgatgcctgaggaaacccagacccaagaccaaccgatggaggaggaggaggttga

SEQ ID NO: 135050 - DNA, 50 bp, Homo sapiens
tggcctattctgcatataaccctctcctggtccatacgcagacatagcag

SEQ ID NO: 135051 - DNA, 91 bp, Homo sapiens
caagccgctggcagccgcggatctcaccgccgctcagggagtgcctgtgaagaaaacggggtattgccctgaggcttatattctgcctcag

SEQ ID NO: 135052 - DNA, 75 bp, Homo sapiens
ggattctaaggcaacacttccttgaagaaacaagcttacagctctttcgacgtgtagcagcagctttgccgggaa

SEQ ID NO: 135053 - DNA, 74 bp, Homo sapiens
tattgtggaagaagcatccattaaggtcattgagactgcctcttctcaaagggacactgtcctcagcactttat

SEQ ID NO: 135054 - DNA, 96 bp, Homo sapiens
tccccaagatcaataacttcgactccactatcgggaaaggaatcggtattttttgctgaaccacccttcaagggttacacatcattttggaatgac

SEQ ID NO: 135055 - DNA, 100 bp, Homo sapiens
cctgggattcaaatgaaagtgaaaatgttagaagaactcgtgagccggattgatgcacaacattctgaaattttttggttattgtaatgatgttgatcgg

SEQ ID NO: 135056 - DNA, 100 bp, Homo sapiens
ggactacagtatgcacttaatgtccctgtattaatctctggagaagacacatccacagttagcactttcttcagatgctgacgctcggtgaacagttgcc

SEQ ID NO: 135057 - DNA, 100 bp, Homo sapiens
gagtcttctctgcatcccagccatcacctggatttacctgttttctgggagcttcgaagagtgttgcggagataggaacatgggagagaaacaatctggg

SEQ ID NO: 135058 - DNA, 74 bp, Homo sapiens
ggctgtgtcgcagcctctcgggatgacaccactctgaatgcactgaacacagaaggaccattacgacctgttct

SEQ ID NO: 135059 - DNA, 101 bp, Homo sapiens
agcctgcccgcccggagcggcccaggagcacgccgcggggagcgcgggcgtccggggctggagtcgcgcaggaatgtttacccttgcggaagttgcatcac

SEQ ID NO: 135060 - DNA, 90 bp, Homo sapiens
gtaacagctgaagtgtcttcaatgcctgcttttgtcatggatgcactggtagaagatgatatctgtattctgaatcatgaaaaagcccat

SEQ ID NO: 135061 - DNA, 50 bp, Homo sapiens
ctggatacggtcactttctacaagagctacttcctcagccgagcccagag

SEQ ID NO: 135062 - DNA, 100 bp, Homo sapiens
agacgcccaaatggatgagcaagacctaaatgagcctcttgccaaagtgtcccttttaaaagggtttgccattgaaggcccctctcaggcaaagattgag

SEQ ID NO: 135063 - DNA, 75 bp, Homo sapiens
aagagaaatggagcccttctccaagacaagttggatggcttgaggactggtactaaaaggaaacgtgactgggag

SEQ ID NO: 135064 - DNA, 115 bp, Homo sapiens
caatatctgtcttcggtggactccttcggcagtccacccaccgccgccgcctcccaggcttgggcactgtttaaaggaaagttccgagaaggcatcgacaagccggaccctccca

SEQ ID NO: 135065 - DNA, 83 bp, Homo sapiens
gtttccctttaagcactacttttgcctcatcctacaaattttgccaaaagaatgcaatggtgtaaagattccagttgatgcca

SEQ ID NO: 135066 - DNA, 95 bp, Homo sapiens
cgctctatagccaaggaaggcttcgagaagattagcaaaggtgctaatccagtggaaatcaggagagggcagcggtcttaattctttttatgatc

SEQ ID NO: 135067 - DNA, 50 bp, Homo sapiens
tgataaggaaacactctttggaggtgtaggtgctggctgtaatactaaag

SEQ ID NO: 135068 - DNA, 82 bp, Homo sapiens
tggacattgtgcaggagctgaagcagcagaaccccaggctggtgtacggtatagtcgtctccccctccaccacggcaagtcc

SEQ ID NO: 135069 - DNA, 50 bp, Homo sapiens
aaccacttcattgtctgagagagaaacacaatgcagatcttcgtgaagac

SEQ ID NO: 135070 - DNA, 101 bp, Homo sapiens
cgggaagagctgatgagaatgctggcggaggacgagctccgggatgctgtactccttgtctttgcaaacaaacaggtacagatctatgagctagaagaaca

SEQ ID NO: 135071 - DNA, 100 bp, Homo sapiens
tggagacacagttgcagaagatgaagtggtttgtgagattgaaactgacaagtctaacttctccctggccatcctgaatgtgggggccccggcggctggc

SEQ ID NO: 135072 - DNA, 75 bp, Homo sapiens
tggcgctcgagttcctggaccgtgagagcatcaagctcgtgtccatcgatgtgtgcaacagcaccgatcttccgg

SEQ ID NO: 135073 - DNA, 100 bp, Homo sapiens
cctgaggccccagaactatcttttcgagggagaaccgaagattacaggaggccagcatgaggttggaacaagagaatgatgaccttgcccatgaactagt

SEQ ID NO: 135074 - DNA, 100 bp, Homo sapiens
cgaatatcgtcatcgttagaagatttctggtgttcagcaaattcagttttcatgatctgaagaaatgatggaatggggagtgtagagaaatgagagtctg

SEQ ID NO: 135075 - DNA, 96 bp, Homo sapiens
cactgaactaaaggctgactttccagacaacaaaatttttactactggagatgtcaacaaagatgggaagctggattttgaagaatttatgaagta

SEQ ID NO: 135076 - DNA, 100 bp, Homo sapiens
cgagaacatctactctttcaactacaccagccagcccgaccaggctgccaaacgagggattctttcatctggtcggggcagaggaattcattcaagaggt

SEQ ID NO: 135077 - DNA, 90 bp, Homo sapiens
gaagagaacgacgtggtggagaagctgaacctcttcttggatctgctgcagtcctataaggaggagatgttaaagtaacccatcttgcag

SEQ ID NO: 135078 - DNA, 75 bp, Homo sapiens
gggccgtcaccctgcctcccctgcgtcccgccaccggccgcttctgtcctcgcttgaccacatattatcccctcc

SEQ ID NO: 135079 - DNA, 100 bp, Homo sapiens
gcatcgaagtgttccaagctgtgacttaccttaacatgttcttgaagtaccatggcgtggattaaaagatctgccggaggcgctgggcaatgaccccggg

SEQ ID NO: 135080 - DNA, 50 bp, Homo sapiens
gacagcacttttcaaaaacctgaccaagatcactccatggatgaaatgac

SEQ ID NO: 135081 - DNA, 95 bp, Homo sapiens
ggcaagatggcgcctcccaagaacgctccgagagatgccttgatgtccagctcgccgctgtccaagaaacgtcgcgtgtccgggcctgatccaaa

SEQ ID NO: 135082 - DNA, 100 bp, Homo sapiens
gaagactcatcggagcgtgtggatttgagccgccgcattttttaaccctagatctcgcgggtattcccctacatctcagccatggtgaacaacggctccc

SEQ ID NO: 135083 - DNA, 75 bp, Homo sapiens
cttttccccagaggcgtcggaatggacctgtgccacccaggactggactcgggccatatccgtggtgccgtcaac

SEQ ID NO: 135084 - DNA, 82 bp, Homo sapiens
ttggcccttgttcccccaaatgtctgactctgactctcggactgagaaacgcaagatgtgaagttcatttccaatccgccct

SEQ ID NO: 135085 - DNA, 75 bp, Homo sapiens
gcggcgcctgcttcgccagatcgtcatccagaatgagaacacgatgccacgcccacccctttgctgtgaagttgc

SEQ ID NO: 135086 - DNA, 100 bp, Homo sapiens
aagaaaaagatgagaagttaaagactgtggaagaattacttgaaactggacttattcaggtggagcccagtgacaccatcgaaaatgtgaaggccaagat

SEQ ID NO: 135087 - DNA, 84 bp, Homo sapiens
agcgggggactctttgaagctgcacattctgattcagcaggcctgagattctacatttgtatgtcttctcagaaacaaccggcc

SEQ ID NO: 135088 - DNA, 98 bp, Homo sapiens
ccaagatgagatttgcccacatagatggagatcatctgacactgctgaacgtctaccatgcttttaaacaaaggtttctccaaagaaattaaaatacc

SEQ ID NO: 135089 - DNA, 88 bp, Homo sapiens
cgcggccacgtgaccgacgccaacatggcggcgcccagtggcgtccacctgctcgtccgcagagatgagtgaccgaggaggtggcgtt

SEQ ID NO: 135090 - DNA, 100 bp, Homo sapiens
attggtccacttgatatgaaacaagtagaggaccgaaaacactttggagctgtagaagctaaaccagaattgtccctagaagtacaattgcaggctgaac

SEQ ID NO: 135091 - DNA, 95 bp, Homo sapiens
ggtatcgggctaatcgagaaaaagtccaagaacagcatccagtggaagagaagcagaagctgttggatgagatagagtcgctgacgctgcggctc

SEQ ID NO: 135092 - DNA, 100 bp, Homo sapiens
acgagacgtgattatgagggagtttcgttctggctctagcagagttttgattaccactgacctgctgatgtccggtctgtgctacgacagcaaaatgttc

SEQ ID NO: 135093 - DNA, 100 bp, Homo sapiens
tattgagcacctgtcagtggtattcccatgttacaacagaacgccagggtgacgtaacaattcaaaccatgaagaggtaacagagcccttcgcgcgtctc

SEQ ID NO: 135094 - DNA, 100 bp, Homo sapiens
cttttgaggaagatgtgacaactaccggagggaagaactgctaaagctttgaggtcattacaatttacgaatccaggaaggcaaactgaatttgctccag

SEQ ID NO: 135095 - DNA, 50 bp, Homo sapiens
gggagcagcaggcatggtttggcctctacaactactacgacgacgagaag

SEQ ID NO: 135096 - DNA, 75 bp, Homo sapiens
ccgcagccgcttccggagccgcgggcgaggagattaacgagaccagaaggaagcatgaaacgcgcttggtagagg

SEQ ID NO: 135097 - DNA, 80 bp, Homo sapiens
tctcctacaacagatactggagggataagctcgacacagtcgtagaattcccaatcaggctgaagtgcagtggcacgatc

SEQ ID NO: 135098 - DNA, 137 bp, Homo sapiens
ctggggctccctgtatgcatggtgtggggttggtgtgattagcttcgcagtctggaaagctttaggagttcacagtagacgagttgtactgctgtcacaggaaatggacgctggattacaagcatggcagctcaggc

SEQ ID NO: 135099 - DNA, 85 bp, Homo sapiens
gcctcggagcaacgagcgcagcgccggtaaaatgtcggttccaggaccttaccaggcggccactgggccttcctcagcaccatcc

SEQ ID NO: 135100 - DNA, 111 bp, Homo sapiens
aggaactgtgtgtctagatgtaattaatcaaacttggacagctctctatgggaaatcctcattgacgattcaatttgttgaaggccaatttgtggactcctacgatccaac

SEQ ID NO: 135101 - DNA, 88 bp, Homo sapiens
aatcccagatctacctgacgggcctgcgagggttgaagattgtgaagcaatagcctaaggcctggcagtcatgcattcccagagcacc

SEQ ID NO: 135102 - DNA, 90 bp, Homo sapiens
catgtccactggaagacctggctggccatcaagtgctcgcccagcctgcacgtcgacgacagctacctctacccagatggaaagacccac

SEQ ID NO: 135103 - DNA, 100 bp, Homo sapiens
tgcagaatgcagagattttgttttgaattgtgaaatacttccacctcttttagacggatgtcaatttggatatatcaaagcctttgaaagcaaacctgag

SEQ ID NO: 135104 - DNA, 100 bp, Homo sapiens
gggaccttttttataaactggctgaagcccatccagactgtttgatgctgaacttcaccgttaagccatttgcaggaggtggctaccgccttggggcagc

SEQ ID NO: 135105 - DNA, 83 bp, Homo sapiens
tgcatttcgttagctttctggattatatcaatgactgcaagcacctattatggcaactcatgcagcaattccagaaccccgac

SEQ ID NO: 135106 - DNA, 100 bp, Homo sapiens
ccaacatcactttgacagcccaatcacgatgaagaggaggcggggagaccggcattttggaagtgtcaaaggccagggacatccctgttgtcatcgacgc

SEQ ID NO: 135107 - DNA, 99 bp, Homo sapiens
ccacggccatcctcactcaggactccctgcagatgttcctgccccaggcagctctccatctgcacgtctctccgtgaaccccgtgagcggtgtgcagcc

SEQ ID NO: 135108 - DNA, 74 bp, Homo sapiens
agaccgctcagccgggtgggatggaggcccgtaagcagggatgcagcagtctcggccctggctgctctatgcag

SEQ ID NO: 135109 - DNA, 83 bp, Homo sapiens
ctggcgtgcactccgcacctcggggacattattgcgcgtggaacggctgcttttggaaggtcacgacccccaggagacctgga

SEQ ID NO: 135110 - DNA, 98 bp, Homo sapiens
aacagttcaccaccattaccgatagctgatcagcttccttgggttttgctgatgacacaagagagctttgcctgaagatggaaacactggagtcagaa

SEQ ID NO: 135111 - DNA, 98 bp, Homo sapiens
gcgagggctacccgctctttgccgtgacaacaccgttcccccagccgggctggaacttgctactaccagcaccatgccctaccaatatccagcactga

SEQ ID NO: 135112 - DNA, 95 bp, Homo sapiens
agctgtcatcacaaaagagttgattgaaattatctctggtgctgcagctctccttagattgtaagcaaaagaaatcaaggtcaagatctggaagc

SEQ ID NO: 135113 - DNA, 100 bp, Homo sapiens
ttgctgtataaccaagggccagagtatcactacctccaccagatgttggggacttaattcagtgcacaaatgagatgaatgtgaacatcccacagttggc

SEQ ID NO: 135114 - DNA, 75 bp, Homo sapiens
gcagcggctggagtacagaggctacgactcggcaggggcccatgaagaggttgactacactgaaaagctcaagtt

SEQ ID NO: 135115 - DNA, 103 bp, Homo sapiens
cagccccgcgcctttgctgcgccccctcctcctgctcctctgcgctctggctcccggcgcccccggacccgcaccagagatgggatttcgccatgttgcccag

SEQ ID NO: 135116 - DNA, 50 bp, Homo sapiens
ctgctctttgtatatgaacagaagaagcatcaagtgtacctgatttgtga

SEQ ID NO: 135117 - DNA, 50 bp, Homo sapiens
acttccggaaggactttggcgaggatgagttttgatcatcctgagaaaaa

SEQ ID NO: 135118 - DNA, 98 bp, Homo sapiens
gctcctcgatcgaggacgacttcaactatggcagcagcgtggcctccgccaccgtgcacatccgaatggtgtgctggaattgatgttcgtctgtgtga

SEQ ID NO: 135119 - DNA, 90 bp, Homo sapiens
gccgaggagaagctggaggagcggctgaagcgcgtgcgcatggttctccagagagcgggcatccagagaggagtcctgggagagcgggcg

SEQ ID NO: 135120 - DNA, 96 bp, Homo sapiens
agcgggggtggcgctgggagcaacgggagtgtcctggacccagctgagcgggcggtcattcgcatcgcagtagccacgatggaggtgatgaacctg

SEQ ID NO: 135121 - DNA, 100 bp, Homo sapiens
tccaagaaaagatggtcccaaacgttctgtactgtccaagtcagttcctgggtacaaggttacaggaggttccagtggcatcgggaagtgcattgctatc

SEQ ID NO: 135122 - DNA, 90 bp, Homo sapiens
cttaaatagaatacagtttgacatgacggcaaaaaatatatgttccatttaaggctctgaagatggggagagaattctggatgatccagg

SEQ ID NO: 135123 - DNA, 100 bp, Homo sapiens
ttgctgtgcgctttctgtcactctggctgtggatggagctggaggaaaatcccaggactcacaccacccggcaagaactgctcactacggctccctgccc

SEQ ID NO: 135124 - DNA, 100 bp, Homo sapiens
gcagcagtcatcaaaccgctggcaaggctgcccccagaggagatcatgtttgagaccttcaacaccccagccatgtacgttgctatccaggctgtgctat

SEQ ID NO: 135125 - DNA, 100 bp, Homo sapiens
gcaggatcaggatctggagatggaggagcatttcatactactgaagctgaagctagttctcagagtttgactcagatatatgccttacctgaaattcctc

SEQ ID NO: 135126 - DNA, 122 bp, Homo sapiens
ggacgcgctgacagctcgagtgagcggactgcccaggacttcggaactagacgaggatgaccagtgtcccagtgaaggaacgagtgaaggtgtctcagaactggagactggggcgctgccga

SEQ ID NO: 135127 - DNA, 98 bp, Homo sapiens
gcttaccgcaggatgatggaagcgacggcccgtacaaagacagaagcgttggtttcagttgatgctatgaaactgggagtaaaggaaatgaagaaggc

SEQ ID NO: 135128 - DNA, 100 bp, Homo sapiens
gccgagcctatgccctggcttttgcagaaagaggagcgttagttgttgcgagtaaccagctcataaatcacatcgaacagtttttggatactaatgaaac

SEQ ID NO: 135129 - DNA, 98 bp, Homo sapiens
agattttaatttcagtgactgaattaaaaggtgtcaagaagctcagaatggcctcaagaaaggagaactagttatgaaccgtttcatccaggcccatc

SEQ ID NO: 135130 - DNA, 90 bp, Homo sapiens
gctggccgaagcgaagggcgacgccaagccggaggggcagagcggcttgggtaaatccaccttaatcaacaccctcttcaaatccaaaat

SEQ ID NO: 135131 - DNA, 75 bp, Homo sapiens
tgtaggcggtagcagtttgcacgatgaacttgtacctgtttgaaaatggtagaatagataacatttttactgagc

SEQ ID NO: 135132 - DNA, 100 bp, Homo sapiens
ctggactcatctgcgccacttgtccgcttcacactccgccgccatcatggtgaagctcgcgaagaatgaggaaaatggggagcaggaggctgacaatgag

SEQ ID NO: 135133 - DNA, 98 bp, Homo sapiens
atctggaggagcagttgtctgatgaagagaaggtcttgttcagcgttgcgtaatcatccagaaagatgacaatggatttgggctgacggtcagtggag

SEQ ID NO: 135134 - DNA, 75 bp, Homo sapiens
agccagaatgccttcatcttcagatcacttaatttggttctcatggggtttttaatgaccacaacaagcaagcat

SEQ ID NO: 135135 - DNA, 100 bp, Homo sapiens
ccagaacctgggacacaacgactctcgaccggaagctttcctgaggacctgctggagagtgacaggcttcaacggaccacaccaaaatgccatctcaaat

SEQ ID NO: 135136 - DNA, 98 bp, Homo sapiens
gggacggaggacgcgctagtgtcaaaaggctgagtttcaaattctggataatgtagactcaacgggagagttgatagtgagattacccaaagaaataa

SEQ ID NO: 135137 - DNA, 78 bp, Homo sapiens
ggttcatctctctagggagtgccagacagtgggcgcagacactgggtcaaggagtaagcagaggataaacaactggaa

SEQ ID NO: 135138 - DNA, 89 bp, Homo sapiens
gaggcctctgggtgaaggcagaggctaacatgggctcattgctatggacagtgctatcaccctgtggcagttccttcttcagctcctgc

SEQ ID NO: 135139 - DNA, 100 bp, Homo sapiens
atcagtaaaaacgagtttgcccagagatcagaacaatggcctagttatcaagttatacccaaccagcagcaaaactaccaaggaatagttggagttcagc

SEQ ID NO: 135140 - DNA, 90 bp, Homo sapiens
accgccatgcccaagaataaaggcatgtcgggccccaggcctgtggtgctgagcgggccttcgggagctgggaagagcaccctgctgaag

SEQ ID NO: 135141 - DNA, 74 bp, Homo sapiens
gaaattgtacagtgacatcttctgggatttagtctgggtgtcaaattgagaaccaggtagatccccaccaccta

SEQ ID NO: 135142 - DNA, 100 bp, Homo sapiens
aacttgggagaaagtttcatctgtggatggagtattggtacccactgatggtaatgctggcctgctggctgaaccccagattgccatgttctgtggcaga

SEQ ID NO: 135143 - DNA, 100 bp, Homo sapiens
aggctgcagaagaagcacacctgaaacatgaatttgatgcagacttacagaagttggagcagcagaagctgggaaccagagcttcattcttggaacattg

SEQ ID NO: 135144 - DNA, 101 bp, Homo sapiens
gcggaggcgccgttatcccgggcccgccggccctgagctcccggcggcgcagacaatgcagatcttcgtgaagactctgactggtaagaccatcaccctcg

SEQ ID NO: 135145 - DNA, 75 bp, Homo sapiens
agggaggaaatagtggcaggtgacagtctgcatgtgcagttttcagacaaagccctggacttccctgggttcctg

SEQ ID NO: 135146 - DNA, 82 bp, Homo sapiens
cagatggcgtcttccgtgggcaacgtggccgacagcacaggggcacaagttgaccagtctgtcttcgaggagctcatcaagg

SEQ ID NO: 135147 - DNA, 50 bp, Homo sapiens
caaacccacccggcccaactcactagtctctcttccagcttcttttggaa

SEQ ID NO: 135148 - DNA, 82 bp, Homo sapiens
ctcaatcaaaccagtattcttttcacacaggaaacctcgacctgtctcccagttggttgcacagcaggttactcagcagttt

SEQ ID NO: 135149 - DNA, 80 bp, Homo sapiens
gtttgctgaaattaatcaacgattcttgaagttgaagaaaagacttaattcagtgcacaaatgagatgaatgtgaacatc

SEQ ID NO: 135150 - DNA, 87 bp, Homo sapiens
gggctcggctgcagacttggccaaatggacgggactattaagacacctagctgttgggcagaagagggtgcagaaaagaggtcacat

SEQ ID NO: 135151 - DNA, 83 bp, Homo sapiens
ataactgtcaaccagactaacaaggtgaaatagtggtgaaaaataacccaaatgaatctgtaactgctaatgccgctaccaat

SEQ ID NO: 135152 - DNA, 98 bp, Homo sapiens
cccgtcaaagtctgcttcacgtgtaacaggggacactacacagaaaatgagaactgctcactatcctaccccagccgaattggatgcgtatgctaaga

SEQ ID NO: 135153 - DNA, 75 bp, Homo sapiens
ggtgcaaggggtgtttttccgtaagcatactcaggtggctttcttcctccagaagaaataaaagaaagatttgac

SEQ ID NO: 135154 - DNA, 100 bp, Homo sapiens
atgacatcagtcagttgtttgatttcatcgatgatctggcagacctcagctgcctggtctcctgcccctcctaaagctgaagccaaagcgaaggctttaa

SEQ ID NO: 135155 - DNA, 95 bp, Homo sapiens
cagatgcagtgtggctctggatagcaccttatggacaggtactttacctgtttctggcattggtgagctcatttagttcatgcaaggatgtaaca

SEQ ID NO: 135156 - DNA, 100 bp, Homo sapiens
gaatgagctatatgtgaccatgcactacaaccagatcttcgagtacttccgcagagacacagagaagcgggacttcgtctccgcaggggctgcggccgga

SEQ ID NO: 135157 - DNA, 101 bp, Homo sapiens
aacaaaggaaggggagcccgggacccccgggggcgcagaagatggcagtgaacgtatactcaacgtcagtgaccagtgataacctaagtcgacatgacatg

SEQ ID NO: 135158 - DNA, 75 bp, Homo sapiens
cgggacggctgccggcctgtgtggtggactgtggcacgggacctacgtctaccagtggccctggacgctcctgct

SEQ ID NO: 135159 - DNA, 97 bp, Homo sapiens
cactgcagcactggtggaacttgaggaagacattctggatgagttactgggtaacatggtgttggccccactcccagatccgggacccccaagcctg

SEQ ID NO: 135160 - DNA, 83 bp, Homo sapiens
catcaacccgagtgcagtttcgatggaaaatgaagaactgaaggcagaagctagtctaatggaccagatgagtagttgtgata

SEQ ID NO: 135161 - DNA, 95 bp, Homo sapiens
ttttcacagaaggactgaagagtctgacagtggtggtgctagagaatgaattgatgtatggggttccttttgaatttcctccggaagctcagtca

SEQ ID NO: 135162 - DNA, 100 bp, Homo sapiens
ggaggagcctgatctggttagtgcaatttatggccgagggatagcctatggaaagaagggactacatgctgctatatggcaagcactaaaccactatgct

SEQ ID NO: 135163 - DNA, 96 bp, Homo sapiens
ctttaaagaaggcaaggagagaatgtatgaagaacagtcacaggacaggtggcatggaatattcacatgggagagccgcatgaggccgcccaccac

SEQ ID NO: 135164 - DNA, 88 bp, Homo sapiens
cattgcttcaaagcatggggctaactccagaatcccccattgccatggcaatgacaggctcaacaccttgctcatccatgagtaacca

SEQ ID NO: 135165 - DNA, 101 bp, Homo sapiens
aagaaatggtgcagagattaaatgcggtttccaagcacacgggccggtctaattgaagccaacggagaactcaaggtcttcatagaccagaaccttagtcc

SEQ ID NO: 135166 - DNA, 111 bp, Homo sapiens
cagtacctgcagaaggtctctggagacatcttcagcaggcttgcttccggcgtcatggctcaaagggccttcccgaatccttatgctgattataacaaatccctggccgaa

SEQ ID NO: 135167 - DNA, 82 bp, Homo sapiens
tggacggcgcggccacggagaagggcgcgatcatggaagggaagtggttgctgtgtatgttactggtgcttggaactgctat

SEQ ID NO: 135168 - DNA, 100 bp, Homo sapiens
aagaagctgcagcggaggaaggcgaggaaaccgaatgcggtgctacaactgtggtggaagccccagcagttcttgcaaagaggccgtgaccacctgtggc

SEQ ID NO: 135169 - DNA, 83 bp, Homo sapiens
ggaaaggctctcagtgaaaaaggtacaactccaaaaggagacattggagaagaaccaagctgggtctataaggaattgcacat

SEQ ID NO: 135170 - DNA, 78 bp, Homo sapiens
tgcagcagtcagcccaaaggaagcacaaacgtgcagatatctgatagccctttccgttgcactcaagaggaagcaaga

SEQ ID NO: 135171 - DNA, 74 bp, Homo sapiens
gaaaacaaggatggcaaggtcaacatcgacgacctcgtcaaggccctgggctgcatcttgtacctgctgtgctt

SEQ ID NO: 135172 - DNA, 74 bp, Homo sapiens
cttgagcaaatgaaaaagtttgtagaatggctcaaaaatgctgaagaaggtggtgtttcataagatgtcaccca

SEQ ID NO: 135173 - DNA, 75 bp, Homo sapiens
cggctggcaggtacatcacctaccggctggtgcagtagctaccgcctgacaggctggagtgcaatggcacgatct

SEQ ID NO: 135174 - DNA, 100 bp, Homo sapiens
ctactcgtatccctccacacatgatcatcagtatttgcctcctgtgtcccaaccggcctgagtcaatcttgtgaaaatgccattgtgtgctggaaacctg

SEQ ID NO: 135175 - DNA, 98 bp, Homo sapiens
ggctgcgctgttcgtgctgctgggattcgcgctgctgggcacccacggagcctccggggctggaagggaaaaggccgaggcatcagcgtgtgaagacc

SEQ ID NO: 135176 - DNA, 75 bp, Homo sapiens
ttggcccggaaattccccaaactcacaattataggggaagaggagctttgctggcagtagaacacgtgaaagacg

SEQ ID NO: 135177 - DNA, 91 bp, Homo sapiens
ctgccttccggggacagccagccctcgctggaccagaccatggccgcggccttcggccctgtttgtgctcttcgtcctggcctacatccac

SEQ ID NO: 135178 - DNA, 100 bp, Homo sapiens
tcacaataagagcagaggatggaacacttcagtgcattcaaggctttgtgccttgggcaaagggcagcttactcctggaagaggactgactcaaggaccc

SEQ ID NO: 135179 - DNA, 74 bp, Homo sapiens
cttcattggccacctacagaaacaaaatgtcaacaaattgatggggacactccggacgcaggcccggccaggag

SEQ ID NO: 135180 - DNA, 87 bp, Homo sapiens
ggttacccaggagatttcagatgaaacaagagttttccgcttattaggatcagacagctctgcaagatttgaagggtcccttaatat

SEQ ID NO: 135181 - DNA, 100 bp, Homo sapiens
ctagaggctcggggctgggcgcgctcccgcggagccggagccgcagaggctcccgggctggactcaggcttctcagggagttgaccacatttggccattt

SEQ ID NO: 135182 - DNA, 96 bp, Homo sapiens
cggcggagtagcaagtggccatggggagcctcagcggtctgcgcctggcagcaggtcttctctgttggttgaaatgtctatgattttatctgcctc

SEQ ID NO: 135183 - DNA, 75 bp, Homo sapiens
catcttccgcacgacctcagcaaggcaattcttggtgccaccattgagaactccaggattgtcctgcagatcgac

SEQ ID NO: 135184 - DNA, 90 bp, Homo sapiens
tggaggccctgactaccctggaagtagcaggccgcatgcttggaggatattgtgattcagcaggacgatgagatccgcttaaagattgtg

SEQ ID NO: 135185 - DNA, 101 bp, Homo sapiens
tcgctggctcccgggggctctcccgggttcctctcattgcaggctgaagggagaagatgtcaaccggacactagaaggtggaaggaaacctcttcattatg

SEQ ID NO: 135186 - DNA, 87 bp, Homo sapiens
aaggtgttattgggaaaattcaacttcattcaggacacaactcagatgggaagttcatcgcccgggcacagcggatagagtacgact

SEQ ID NO: 135187 - DNA, 99 bp, Homo sapiens
ctctcatgcttaacatgcatcttactggttctttatgaagagctttctcttgattggtgaaagacaacaagtgttagtaacagaagaatcttttgattc

SEQ ID NO: 135188 - DNA, 75 bp, Homo sapiens
tcaacactgagagttctctctggagtctcgagcccgggaagtgcgttttggtttgtggtaaatatgccagctcta

SEQ ID NO: 135189 - DNA, 90 bp, Homo sapiens
ggaggccctcaccagacgccagtgccatgttcttggacttctcagcctccatattcatgaactaacaacaaggcgtgcaggtattttgat

SEQ ID NO: 135190 - DNA, 75 bp, Homo sapiens
gaagatgttcgacaagggcccagagcagactctaaaatagagctcaagcttgagaagagagaaccactaaagggc

SEQ ID NO: 135191 - DNA, 73 bp, Homo sapiens
agatgcaagcggtttgggaccttgaacaaggcaaatatggttttggaaacaaatggaagactgctgcgaccct

SEQ ID NO: 135192 - DNA, 90 bp, Homo sapiens
cggagccggaggctgggagccgcggcggcctgggtgctgggcctaaaggagataacatttatgaatggagatcaactatacttggtccac

SEQ ID NO: 135193 - DNA, 90 bp, Homo sapiens
gatccggcaaggcgaggtgattgacatccggggccccatcagggacaccttgcaggagcacgagtgcttccaggaggagctgaggaaagc

SEQ ID NO: 135194 - DNA, 83 bp, Homo sapiens
gtttcaaggaactaattctctggatgtggaagatgtgaaatttgtcatcaattatgactaccctaactcctcagaggattata

SEQ ID NO: 135195 - DNA, 101 bp, Homo sapiens
cctcaggagcggaacaacgtcggcgagcggggggtcaggcccagccccaggcccagtggtattactgaattcactgaatgtggatgcagtatgtgagaagc

SEQ ID NO: 135196 - DNA, 96 bp, Homo sapiens
cacgagtcgggtcctgagaccaggaaaatatatgcagatgatgaacattcttaagccaattgcctttgatgttattcatttcatgtctcaactatt

SEQ ID NO: 135197 - DNA, 74 bp, Homo sapiens
ggatattcctcatgtatcatgcaaggatattcctcatatatcatcggagcgtgctttggacaccatgaattttg

SEQ ID NO: 135198 - DNA, 75 bp, Homo sapiens
gcgtgaccgagagcgcgaatatcgtcatcgttagaaggaagccctcaatctagaagagtagaggtccaaaggtgc

SEQ ID NO: 135199 - DNA, 75 bp, Homo sapiens
ttaccaagtacagaggcttcatcttatgaaatggacaagagggacgctattgataacggaatggttgcaattaag

SEQ ID NO: 135200 - DNA, 75 bp, Homo sapiens
cgagatccgaggcaacggtggctcctcgaggtccacggtcccggaaaaatggctacaaacttcctagcacatgag

SEQ ID NO: 135201 - DNA, 78 bp, Homo sapiens
caaaattgaaaaaatggttgacctcacccaggtgctggagaatctggtaaaagcaccattgtgaagcagatgaggatc

SEQ ID NO: 135202 - DNA, 101 bp, Homo sapiens
aagatggcggacagtgcggaactaaagcatcatggcagaacaggatgtggaaaacgatcttttggattacgatgaagaggaagagccccaggctcctcaag

SEQ ID NO: 135203 - DNA, 100 bp, Homo sapiens
ttttcacattggctgttacaagtgcgaggagtgtacaccttaaacaatgagaagcagtggataaataaggctgttggagataaacttcctgaatgtgaag

SEQ ID NO: 135204 - DNA, 98 bp, Homo sapiens
gatttgaagcgcttcaaaggaccggacccagagaagaggaaaactctaccggtgcaggaattgaatgatctggcacgggaccctccagcacagtgttc

SEQ ID NO: 135205 - DNA, 98 bp, Homo sapiens
gttgggagcatgagtgggaagtgctgctcccggaggtgcttggagggtgaatgaggtgtgaagatgccttaagaaaaaataagagcttaattgggccg

SEQ ID NO: 135206 - DNA, 90 bp, Homo sapiens
agacataaaagcccggattcaggattcagatgaaccaggcacacaagccatgccccctcttttctctttgggataccaccagtgccgctg

SEQ ID NO: 135207 - DNA, 100 bp, Homo sapiens
gaggggggcccgaggggagacgccgtgacaactttcgtttccctctgagggaattgggaggtcggcggccccaaaagttcatgtactggacagactgggg

SEQ ID NO: 135208 - DNA, 98 bp, Homo sapiens
ggaaacacatgaaagacttcctcaaggactacagtatgcacttaatgtccctaaggcagggagtgtgtgaactgtggggcaacctcgaccccactgtg

SEQ ID NO: 135209 - DNA, 100 bp, Homo sapiens
gccctgcgccccgctctgctgtgggcgctgctggcgctctggctgtgctgcgcgacccccgcgcatggacccttcaaagttgtacaagaaagcagatgat

SEQ ID NO: 135210 - DNA, 101 bp, Homo sapiens
cagacttcaaaggcgtctaagtcaggcagaagagagagctgcttcagcttcccagcaggttcggaacctcacttacatggtgacccgcagggaaaagatta

SEQ ID NO: 135211 - DNA, 50 bp, Homo sapiens
ccttagccgactctgcgaactaggtacccattcctggcccagtgggtaac

SEQ ID NO: 135212 - DNA, 87 bp, Homo sapiens
cgctgggagcaacgggagtgtcctggacccagctgagcgggcggtcattcgcatcgcagcacttgcacctcctgcgccgccgccccc

SEQ ID NO: 135213 - DNA, 97 bp, Homo sapiens
aaacggcgctgatgagtctgtttgggatcccgctgtggtacttctcgcagtccccgcgcgtggtcatccagggaaagcaggcaggatgggagagtcg

SEQ ID NO: 135214 - DNA, 74 bp, Homo sapiens
ctagtgagtcggcggctgatttagaaggaggttcaggctacggtgagccgaagacctgcgggggatgacagctg

SEQ ID NO: 135215 - DNA, 100 bp, Homo sapiens
cgccgcccgggccccgcggctgccgcagcattcccgggaagatcatggaagggaagtggttgctgtgtatgttactggtgcttggaactgctattgttga

SEQ ID NO: 135216 - DNA, 100 bp, Homo sapiens
cttgcaaggaaaggaacatgtttgaatttcagatgtgttcctcaatgaatcacgtcccagaatggtgcttagatgactggcatccttctgagaaggcaat

SEQ ID NO: 135217 - DNA, 74 bp, Homo sapiens
gtgctcaagatgacttgagaaaagtaactcagagtgcatatgcccaatgagatggaagattttcgaggtatagc

SEQ ID NO: 135218 - DNA, 99 bp, Homo sapiens
gtcagagttggaggcctcaattttaaagaaggcaaagccatggtcatcgttgcggaagcatcagatggtgaaggagaaggagacacagaagtgatgcag

SEQ ID NO: 135219 - DNA, 100 bp, Homo sapiens
gaattggcttatactggttttgtgaaactcactgaagtactaaacaggccggagcctcaacagaaagctcctttagttcctcctcctccaccgccaccac

SEQ ID NO: 135220 - DNA, 90 bp, Homo sapiens
cgcggggaccgctgtgctctcgggatgctgagaacttgctggagtcacagccactgggatcctttctcatcagggtcagtcacagccatg

SEQ ID NO: 135221 - DNA, 75 bp, Homo sapiens
gggttgaactgtggagtgtgtgggtgaggtttatacatggggcgacaatgatgagggacaactgggagacggaac

SEQ ID NO: 135222 - DNA, 82 bp, Homo sapiens
agaaaccagccgaacttcagggtttccaccgttcgttcaaggtggactgcctggaaagtactctagaaaagtcactccaagc

SEQ ID NO: 135223 - DNA, 100 bp, Homo sapiens
tgccagccaacaattctgttacacaaatgtgcttatcccaaaatggcatgatatatggacacggatacaggtaacaattgcttgtgatgcagttctcagc

SEQ ID NO: 135224 - DNA, 74 bp, Homo sapiens
gtcccacttgttcgcggcctatagagaccatggtgagagcaccagcaagctggccagtgtgacccgcagcgtgg

SEQ ID NO: 135225 - DNA, 75 bp, Homo sapiens
tcgaagaacagctgtggaaagaagttgcaaaacactgggcatggattccgtgaaggaacaacacctaaacccaag

SEQ ID NO: 135226 - DNA, 75 bp, Homo sapiens
cagaaagcaggcgaacccgcggcgcaataacgataccatgtttgtgtggaagtgccccgtgtttgctatgccgat

SEQ ID NO: 135227 - DNA, 100 bp, Homo sapiens
gcctctcccgggattttaatccaacagccacagtcaagatgttgccaacattcgtaaggtccattcctgatggctctgatgataacaccctatgcccatt

SEQ ID NO: 135228 - DNA, 106 bp, Homo sapiens
atggaagtgttatgatgcccttcgaaaaatgatcaactattgaccatataggatctagtgaaaagccatttgatgtatgcggtcagagaagaagtggaggtcctca

SEQ ID NO: 135229 - DNA, 74 bp, Homo sapiens
ctcctgagtagctgggattgcagggcttctttcgccgcacaatccagaagaacctccatcccacctattcctgc

SEQ ID NO: 135230 - DNA, 102 bp, Homo sapiens
ctgctcctctagaagatttcacagcaatgctggactgcagtgactatgttctaggcatggaagaggagatggttcgtgttacgcagtggccgtttaactgga

SEQ ID NO: 135231 - DNA, 76 bp, Homo sapiens
tgttcatcctgataagatgcaccttgtcttacaaaacatttacaagctccacaggatccccatatcctgggccatg

SEQ ID NO: 135232 - DNA, 98 bp, Homo sapiens
agaaacctggaagaggaagaggaaagcaaaggagtcagggatggctcttcctcaggccctcaaggatgatgatgctgaaactggattgacagatggag

SEQ ID NO: 135233 - DNA, 75 bp, Homo sapiens
gagaaaattgaaggctccaaatccttagctcagagctggaggatgaaggatcggaccccatatcatgtgaacctc

SEQ ID NO: 135234 - DNA, 100 bp, Homo sapiens
tcacagcattctttcttggcatttttgaatacgcctaccgatgctctggatcaatttgaagactatgctgtggggtacatgttgaggctgggggctcctg

SEQ ID NO: 135235 - DNA, 75 bp, Homo sapiens
gagattttgatgtggatgatgccaaagttttattagaaaaaggtagcagcactgcctaaacaagaggttatacaa

SEQ ID NO: 135236 - DNA, 82 bp, Homo sapiens
tgctgtcaacagtagtgcggactcttgccacccagagataacaacgaacttgatgcaagtgataggtttgccaaggtcagac

SEQ ID NO: 135237 - DNA, 51 bp, Homo sapiens
tctatttggaatttgcagaagcaaggagtgaaacacaaatcttttctaacg

SEQ ID NO: 135238 - DNA, 98 bp, Homo sapiens
aatgtttgtaaattctccttttaccaagtttacacatgaatatgagcaaatttttaaatttaaaatgaaggcatactgaaaaagaatcaagtggcgat

SEQ ID NO: 135239 - DNA, 142 bp, Homo sapiens
tcgagactggaggctgagtgctaaactgtgtggggcgcggatgggatccagctgttagtcgggtaggcataggtctgtgagagccacttcaggaattttttgcttggagttacatgacgaaatttgcatttcagaaaggcca

SEQ ID NO: 135240 - DNA, 83 bp, Homo sapiens
tcgcgctactctctctttctggcctggaggctatccagccatgatgccttcttctgtagagtgggcgctttgcagaatacgtg

SEQ ID NO: 135241 - DNA, 99 bp, Homo sapiens
ccggactgcggttggggcgggaagagccggggccgtggctgacatggagcagggaccctccattttccatatccaggaaaatgtgatgcgccacaggta

SEQ ID NO: 135242 - DNA, 90 bp, Homo sapiens
caagcggccggagcggcgccatggaggagggggcgccgcggcaggcatttgaccaagccgtgaccaaggacacctgcatggcggttggct

SEQ ID NO: 135243 - DNA, 101 bp, Homo sapiens
ctgacagccgagaaaggcagacacaagagcaagcccgcacgtgtgaaggcatccactgcgatgtgcattttgtaagcactttggagccactatcaaatgct

SEQ ID NO: 135244 - DNA, 98 bp, Homo sapiens
tgtgaggtgctggactacttcttgcggcgcctcggctcctcccaggtggcctcccgcgtgctggccatgaaggactcagaattcatgattgaagaaat

SEQ ID NO: 135245 - DNA, 87 bp, Homo sapiens
cgtccgccgattcctcctccttggtcgccgcgtccttggctggcgtaaaaggagaacaacttcccgccactgcccaagttcatccct

SEQ ID NO: 135246 - DNA, 75 bp, Homo sapiens
agatgggggtgaagctggagatatttcgggattactacagcatcccatttcccacacccactactccgctgactg

SEQ ID NO: 135247 - DNA, 90 bp, Homo sapiens
gtctctcttcaccctgccgtcatgtctaagtcagaggaaagaaagaaatctcgttttgggaatgctttccacctgtgtcgggaagttctg

SEQ ID NO: 135248 - DNA, 83 bp, Homo sapiens
cgcctcggtgcagggctccaccccgtcgcctcgacagggcgtgatggtgggcatgggtcagaaggattcctatgtgggcgacg

SEQ ID NO: 135249 - DNA, 100 bp, Homo sapiens
gtcaagaaatttctagtaccgatgccacaccacatgaagcccttgccatattacagctatgaccagcctgtgatcgggtactgccaggcccaccagccac

SEQ ID NO: 135250 - DNA, 85 bp, Homo sapiens
acgcgcccctcggggctccagtggagagttcttacgacacgatgaggcgagtggtacgacagagcaagtttcggcatgtatttgg

SEQ ID NO: 135251 - DNA, 74 bp, Homo sapiens
gacgttttccaccaccaaggaaacagccacctagccaacgtattctaccttgtaaatactgttatttgtatata

SEQ ID NO: 135252 - DNA, 90 bp, Homo sapiens
gagagagtcagggggcgcgtgctgaagttattagaggaagtaacacaaggggatatgagtgcagcagacacatttctgtccgatctgcca

SEQ ID NO: 135253 - DNA, 100 bp, Homo sapiens
gctaatggctagcaaaaaagatgatccgggtataataatgaagttaaaagagcagcactccaagattggccaggtgaaacaggagctgtccagaaaggac

SEQ ID NO: 135254 - DNA, 89 bp, Homo sapiens
gtgggaacccaggccccgccgaggcggccaggcgggcaaaactgttccgatttgcctctgagaacgatctcccagaatggaaggagcga

SEQ ID NO: 135255 - DNA, 82 bp, Homo sapiens
cggagcgcggtccctgtattggtctcctgctcctagaggttgcacgatgggaacacaagacccgcaagctgagcagggcctt

SEQ ID NO: 135256 - DNA, 75 bp, Homo sapiens
caagactgcgactctaaacggactcatgtactttgtcagtgattacagtggcgagatcttgaacaactgctgcgt

SEQ ID NO: 135257 - DNA, 100 bp, Homo sapiens
ttggctctgctgacaggaattataagtaaagcagcacttcctgggccgtaggcagccatggcgcccagccggaatggcatggtcttgaagccccacttcc

SEQ ID NO: 135258 - DNA, 100 bp, Homo sapiens
atctcccagttggacagcggatgcctgggactcgtttcattgctttcaaagttcctttgcaaaagctccagtgatccacaagctcagaaatacatcgcgg

SEQ ID NO: 135259 - DNA, 75 bp, Homo sapiens
ctgggcctcgggcacctccttgcaggactccggccagaacaggtaacagtatgactaaatatactgagaagctcg

SEQ ID NO: 135260 - DNA, 90 bp, Homo sapiens
ggatcatggccgcagccgctctggggcaggactatggtgcagccctgcggggcctgtgcgaagacgccctggaaggcctgctcttcctgc

SEQ ID NO: 135261 - DNA, 90 bp, Homo sapiens
aaataccacaccttcctgcgctgccgggaccagggtggctttgtccactatggtgaagtgaccaatgactttgtcatgctgaaaggctgt

SEQ ID NO: 135262 - DNA, 100 bp, Homo sapiens
ggtcccttccttttggggctctcactctggaggatggggtggatgggagagtgcctggtgaagaatgtgatgggatcactagcatgtctgcggagagcgg

SEQ ID NO: 135263 - DNA, 100 bp, Homo sapiens
ggaagagacaccacctcctgttgaaccaggtagtgggcagcagtcagtgacaggtgtaacctctgtggatgacagcaacagttactggaggatacggggg

SEQ ID NO: 135264 - DNA, 98 bp, Homo sapiens
gctgacctctgacgagctgcaatttggttatgagttggatatgtcaagtgaccagatagctgccaatctgcaagcagttattaatgaagtttgtaggc

SEQ ID NO: 135265 - DNA, 100 bp, Homo sapiens
tcgccacttactttaatgagaagatctccattcctgaggaggaggctgttttggagtcagcggaagatcaccaaggccagggagtggttccaccgcactg

SEQ ID NO: 135266 - DNA, 100 bp, Homo sapiens
tcacttggcatcacttgtattgaattgggaaacaaaccatcaggcctcccagaaagtatccgggatctgaaaatcaccaaatcaccacatccggacagtg

SEQ ID NO: 135267 - DNA, 76 bp, Homo sapiens
agcaatagcacgaggcctgttgtctaccaagtgcagtttaaatattataggatattccaagataaatgcatgaata

SEQ ID NO: 135268 - DNA, 75 bp, Homo sapiens
cgccatgaacaactcgggcgccgacgagatcggacaatgcagatcttcgtgaagactctgactggtaagaccatc

SEQ ID NO: 135269 - DNA, 82 bp, Homo sapiens
ggcgcaggaggcggtgcacagcgccaaggtgtttcccattaaacactaccaggacaaaatcaggccttacatccagctgcca

SEQ ID NO: 135270 - DNA, 98 bp, Homo sapiens
atagatgtggttccacctaatgtcagggaccttctggatattttacgggaaagaggagccaaaaacctgtatatcatctccgtgaaggggatcaaggg

SEQ ID NO: 135271 - DNA, 99 bp, Homo sapiens
ccccagtgtgtgccggagaacacgggctacacgtatgcgctcagctggagatggagctgaagatgctgaagtctcagtccagctctgccgaacagagct

SEQ ID NO: 135272 - DNA, 98 bp, Homo sapiens
cgagcggcggtttccttgcccggggccgcgggaaggccgaccgactgccgcgacgcatcttctctccagactgccgatcccagaaagccaggtgatca

SEQ ID NO: 135273 - DNA, 50 bp, Homo sapiens
ggaagtggatgcctccatttttaagtgtactaatggtcacttgatgtgcg

SEQ ID NO: 135274 - DNA, 89 bp, Homo sapiens
attattaatggtcagaagatgtggataaccaacggaggaaaagctaattgggccaggaaggaatactgggagaatcttcggatagcctc

SEQ ID NO: 135275 - DNA, 98 bp, Homo sapiens
tcccgcccagcagttcctccacgcaggggctccggaatcgcccgaccgcacacgttgccaccctgagatcggcttcaccaccgaccctcggatggccc

SEQ ID NO: 135276 - DNA, 101 bp, Homo sapiens
ggtggacctgcaggacctgcccagcgccaccatcgcctgtcacctggacccgcgcgtgttcgtggacggcctgtgccggcaacattgaaggaactcatctc

SEQ ID NO: 135277 - DNA, 74 bp, Homo sapiens
gaagagctatggtgaaacaccactgaagcattgccaagctccaaagacaacaggccctccctctgccctcccgt

SEQ ID NO: 135278 - DNA, 90 bp, Homo sapiens
aggaagacgacgagtttgaagagttccctgccgaaggtcgtcacgctgtggtacagagcacccgaagtcttgctccagtccagctacgcc

SEQ ID NO: 135279 - DNA, 82 bp, Homo sapiens
gcctcccggctctcgtcagcctcccgccggccgtctccttaacaccgaacaccgctcttgtcaggatggtgaagctgttcat

SEQ ID NO: 135280 - DNA, 100 bp, Homo sapiens
acacccagcctgagcaagcgccacagaagcctcgtctcctggaggaaaatggtgatgctactaggaggtggagcctttgggaggtgattagttcatgaaa

SEQ ID NO: 135281 - DNA, 96 bp, Homo sapiens
gagtagcaaggaaggtcaacgagacggtggagagcggctctgacactctggatcagcaagttgctcggatggaaaaactagctggtttggtagaag

SEQ ID NO: 135282 - DNA, 102 bp, Homo sapiens
tgccctacgcctggtcaaacctggaaatcagctcttagaacaagctctggtgattgaggaacagctgcgccgggctgcttacttgaacatgtcagaagaccc

SEQ ID NO: 135283 - DNA, 90 bp, Homo sapiens
catggatacacctgtttctgtcctctaggaaccactggaatctactgtgaacaagggtcttgctacgtacgttgcccaggttggaatgca

SEQ ID NO: 135284 - DNA, 76 bp, Homo sapiens
gagacagccatgttttctgtctacgatggacatggaggtactggtgtggcatactcggacagagaagcccaagatg

SEQ ID NO: 135285 - DNA, 75 bp, Homo sapiens
ccggaggcccaggtctccgtgcagcccaacttccagcaggacaagctgaagaataagttcatgaaaaaattgcca

SEQ ID NO: 135286 - DNA, 75 bp, Homo sapiens
cagctgggccggagcagccgcgggcgcccgaggggccgagcgaggcctctggctgtacctggcagggagcagcct

SEQ ID NO: 135287 - DNA, 100 bp, Homo sapiens
aagaccttgacctgactggaaatacaaatctggttctggaacacaagacactggacatatttaggtcctggacccaagccagaagcctctgcaaagcttc

SEQ ID NO: 135288 - DNA, 87 bp, Homo sapiens
ttctcagaggacgccttcaacaccaccttcatctccaccatcgaacattctagtatgccagtagaaaaaaatatcactttagaaagg

SEQ ID NO: 135289 - DNA, 87 bp, Homo sapiens
aggcagagagatccaagcgcacagaaaaacacaagaagattcagccctgtcatcttgtgcaaaacatcaactagtcaggcagtcttc

SEQ ID NO: 135290 - DNA, 101 bp, Homo sapiens
ggaaggagggcgagcgaggaggatggcggagtcggggctcctgacggattttgtgtcatgtatagagaactacagaagaagaggacaagagctatatgcat

SEQ ID NO: 135291 - DNA, 100 bp, Homo sapiens
agaaattcaaaaagcaggtctagggagcaacaaagctcctaattctattacccactacatgacatgtgggccaagtgagatccggaaaatgaggcccata

SEQ ID NO: 135292 - DNA, 135 bp, Homo sapiens
tttattcccaggcttggcaccagcgctgtcactagcgccgcctgctcccgcgggcccgcggacccagctgtcaggcaagaacatacatatgatagttgagaaagacacatattctgatcatgaagaaataaacac

SEQ ID NO: 135293 - DNA, 50 bp, Homo sapiens
gcgtggaacggctgcttttggaaggtaagaatgattgatgttggctgata

SEQ ID NO: 135294 - DNA, 100 bp, Homo sapiens
agcggcgggactgagctgttgagttagagccaacatgagtgaggttcgagaacttgtcttggacaattgcaaatcaaatgatggaaaaattgagggctta

SEQ ID NO: 135295 - DNA, 74 bp, Homo sapiens
gcctgcagcgggagctggacggcgagcgcgagcggcgcgagaaaatcaatgtccgagttaccaccatggatgca

SEQ ID NO: 135296 - DNA, 98 bp, Homo sapiens
ccaggaatgaaagacattcaggatcaacttgaacgaatatttctggctctctatgagaacatgctggtggagctgccctttgcaggcttctttctttc

SEQ ID NO: 135297 - DNA, 83 bp, Homo sapiens
ttccatcgctgccagatattccacccatacaggctgtattcatcaccaaagaaaaaacttacaccaatgcagaaatcggttag

SEQ ID NO: 135298 - DNA, 75 bp, Homo sapiens
cccaggcggccttcgagaaaatgcaggagaagcgggtgttggagcgggccggagagaagtagagtgggctgcgag

SEQ ID NO: 135299 - DNA, 82 bp, Homo sapiens
gaagcactccccccagctccatgaatggaaatcggctccgcaggcactgaaggatagcacagaagtagaaattgtggatgag

SEQ ID NO: 135300 - DNA, 100 bp, Homo sapiens
caacatccccaaacagcggcgtttcacggtggcacatacatggaaatgggtcctgatgaatatgaagagatggaagaagaggaggaggaggaagaggagg

SEQ ID NO: 135301 - DNA, 90 bp, Homo sapiens
gatcttcgccgttaccttcttgctggcgttggtgggagccgtgctctacctctatccgcattcacagctctgatggagggcaaaatcaat

SEQ ID NO: 135302 - DNA, 75 bp, Homo sapiens
tggttgcgatttcttgataaagtcttggttgctgccaacaagggcatatcgatgcatttacttcaaaactttttc

SEQ ID NO: 135303 - DNA, 100 bp, Homo sapiens
ctgcagctggagctgagcaaagtgcgtgaggagtttaaggagctgaaagcgcgatccggccccacatcgcaactcttcgtaagtacacctatggcaagca

SEQ ID NO: 135304 - DNA, 83 bp, Homo sapiens
ctgggcggccgccgcgcttctgctctcagtgtcccggacttcagcaaacggggattcagcgtccgatcctttggaacagggac

SEQ ID NO: 135305 - DNA, 80 bp, Homo sapiens
cggattcatttagagctgcggaacaggacgccctctgatgcttaactggcatgggctgagccccttgggctggccatcat

SEQ ID NO: 135306 - DNA, 82 bp, Homo sapiens
cggagaaggccgccgggcccgggcatggtggtctggggcaacgcggaaggtgttgacttcaaaatcaaaactgtagagctaa

SEQ ID NO: 135307 - DNA, 75 bp, Homo sapiens
gcgattctgcaaccaagcacctgaaacagcagctattcaaggatgcttggttgttgcacatgcattctggtcctt

SEQ ID NO: 135308 - DNA, 76 bp, Homo sapiens
aggctgctattgaaagagagtatgcacagctgaacaaaaggttcatcctcagttttctccatgcccatgggaagct

SEQ ID NO: 135309 - DNA, 90 bp, Homo sapiens
agagctaggaaaaaagctgaaggcaactatggatgctgggaaactggaagccctcctatgacactgaaacagatcctagtgagggattga

SEQ ID NO: 135310 - DNA, 82 bp, Homo sapiens
cgcgctttatcaagattatcgagaatgccttccctgtgtctggtcaactctatacaacacacctactatctcttgatgccct

SEQ ID NO: 135311 - DNA, 88 bp, Homo sapiens
aaacagtcggtgtgtgctgagcaaatggaagaacaaatatgtctgtcagtgtcttcattggctgctctggcatggagctgatatcaca

SEQ ID NO: 135312 - DNA, 82 bp, Homo sapiens
cgacaagccgctggcagccgcggatctcaccgccgctcagggaagttctccagcagctgattgtaatgaatttgcccaatgt

SEQ ID NO: 135313 - DNA, 101 bp, Homo sapiens
ctctgcgggaagcgggcggccccggccgcctccgcgagggcaccatggaggtgaatgcaggatttttagactctgaggagcagttggagctaatccacatt

SEQ ID NO: 135314 - DNA, 100 bp, Homo sapiens
gggacgtgatgctggagaattataggaacctggtctccctggggcagagcggcttgggtaaatccaccttaatcaacaccctcttcaaatccaaaatcag

SEQ ID NO: 135315 - DNA, 82 bp, Homo sapiens
cgtgtactttaccaacgagctgaagcaggttgcctgttcactctgatcgtagtattggaagttctggccaaggcaatcagac

SEQ ID NO: 135316 - DNA, 83 bp, Homo sapiens
agacagttactgtctcagctctaggatgtgcgttcttccactagaagctcttctgagggagcaacggcagcctttaacagttg

SEQ ID NO: 135317 - DNA, 75 bp, Homo sapiens
tgaatcccctgtttgagaaaaggcctaagaattttggcattgaggatctgaagaggcaaaatgcagtattacaag

SEQ ID NO: 135318 - DNA, 88 bp, Homo sapiens
catcgtgatagtacccaaggacgggacgggatgggcaaacaagcaggatcagcaagacccaaagagcccagatggctacctgtatgag

SEQ ID NO: 135319 - DNA, 99 bp, Homo sapiens
tggcctgcttggcaaggcaagtagcggcggcgcttcaaggttaatgttcgtgaagaaattgaagagttttttccaagaatgtggaagataaatcaagat

SEQ ID NO: 135320 - DNA, 82 bp, Homo sapiens
ggaagagaagaaagacgcagctgaaccattaaaaatctcaagtgacgactttgggaaactctggttatccttcgcaaatgat

SEQ ID NO: 135321 - DNA, 100 bp, Homo sapiens
gttagtgtggggccgtgtctcagtccacccaaggtctcctcggatcgcctggagaggcactcggacctggaagctgccacttttgctagagagcaaggct

SEQ ID NO: 135322 - DNA, 98 bp, Homo sapiens
ccgcgcgacgagcaggtggcggcggctgcagtaagactttgaccccgacgcaggcttcagtgattgccgcggatcagaagcctgagcactttggctcg

SEQ ID NO: 135323 - DNA, 82 bp, Homo sapiens
acttcctagcatttggacctgtggccagtgttgtcatggacaaggacaaggttaagaatagacccaccagcatttcgtggga

SEQ ID NO: 135324 - DNA, 90 bp, Homo sapiens
gtagagtgaagtcctacagagttatcaggttccagaccctgccttctcttctgaaaggaatcccagtcagaagttccagcctgccactgt

SEQ ID NO: 135325 - DNA, 82 bp, Homo sapiens
tattgtaagtgcagatggaacacaacaggtcaaaatgcagatcttcgtgaaaacccttaccggcaagaccatcacccttgag

SEQ ID NO: 135326 - DNA, 100 bp, Homo sapiens
gcaggaggaggtggcggcggcgggaagataggcatttcatccttcatgaagccattcaggattttgaattgcatatgagtgcttggctcttccttctgtt

SEQ ID NO: 135327 - DNA, 82 bp, Homo sapiens
cctcctacacctacctctctctgggcagagcggcttgggtaaatccaccttaatcaacaccctcttcaaatccaaaatcagc

SEQ ID NO: 135328 - DNA, 95 bp, Homo sapiens
gccttgtcctgactatgtttcacatttgtgaattagtccttcagtgaatctacagacctattttctcaggagctcagcctggccttacttcagtg

SEQ ID NO: 135329 - DNA, 90 bp, Homo sapiens
cctcgcctcccggccgagctgacggctcttgcagccaatgccggaacaggatttgctgttgctgagcctcaaatcgcaatgttttgtggg

SEQ ID NO: 135330 - DNA, 100 bp, Homo sapiens
ggagaaccgcttcattggaatgaagtcccgaggtacttttacccatttccagttccacctttactttatcaagtggaactttctgtgggaggacagcaat

SEQ ID NO: 135331 - DNA, 98 bp, Homo sapiens
tgcaacttgcaagggaactggagacaatgaaaatcttgtcagcctcttgttgctgtaccacatagaattcactcaacaagtagaaacgtgagagaaga

SEQ ID NO: 135332 - DNA, 85 bp, Homo sapiens
ctgcggccggagcgggcggctgagacaaaggcgacgcttccagctgatcttaccaagatgcatctcacagaaaaccctcatccac

SEQ ID NO: 135333 - DNA, 100 bp, Homo sapiens
aggcttctcaagctggctgttctggatgggggcagcaggataccgcctggcacccacttagccaaacagtgttttaactcaaatgggtgatgaaaaggac

SEQ ID NO: 135334 - DNA, 98 bp, Homo sapiens
tcggcacgcctggcgatcctgggcggcgtggaggggcagcctgacctcctgccccccgaggtctgcagtctcctgaacccagcagccatctacgccaa

SEQ ID NO: 135335 - DNA, 100 bp, Homo sapiens
agacgagcggccccgggacgggcagctagcgcgaccctgagccggcgcccgtggtccggccatggacgacctcggatagctgtgcccctctgctccgata

SEQ ID NO: 135336 - DNA, 82 bp, Homo sapiens
gtggaacagctggaactcatacatttctggggggaaatcctcattgacgattcaatttgttgaaggccaatttgtggactcc

SEQ ID NO: 135337 - DNA, 100 bp, Homo sapiens
aagaagattatgacagattacgccccctatcctatccgcaaacagatctcatggtccggaatgacaccccctgtggaaccaccattggacctatcttggc

SEQ ID NO: 135338 - DNA, 75 bp, Homo sapiens
gaactgtttctcttctgcagaaaaagaggctcttcctcctcctcccgcgacggccaagatgctgaattatcaggg

SEQ ID NO: 135339 - DNA, 75 bp, Homo sapiens
ttgccaggtgtttgttaccttgctgaacatactgacttgtggagtcattggctcctattcggtggttttagccat

SEQ ID NO: 135340 - DNA, 82 bp, Homo sapiens
tcagttggtcaaaccaaagtctgaacctcagcctaataaggtgaaatgtctagaagatgaacgattaagaacagaagatgaa

SEQ ID NO: 135341 - DNA, 75 bp, Homo sapiens
ggaaaaacatcgtctcactcctgctgagcatgctgggacacgatgagatgctgagggttggaaaagcaaaagcag

SEQ ID NO: 135342 - DNA, 90 bp, Homo sapiens
gccagggaagattttgtaccatattccgctcctactcccggggcgcacaggcattatattgtacttctagcaagtgcaccaacagaaaaa

SEQ ID NO: 135343 - DNA, 100 bp, Homo sapiens
ctggtgatccactgccagacaacaggtcagcccaaggccaaccccactgtcactctgttcccgccctcctctgaggagctccaagccaacaaggccacac

SEQ ID NO: 135344 - DNA, 90 bp, Homo sapiens
gtcgatggtcggcggcgcccggatgggcagctgagatgaggtttatataactttccaagacaaggaagttgtgcaaagcctcacagctac

SEQ ID NO: 135345 - DNA, 101 bp, Homo sapiens
atcccactattattttggcacaacaggaaggtgctccatacttgcttgcagtgcctacgtggctctggctttgggtgataacctcatggctttgaatcatg

SEQ ID NO: 135346 - DNA, 100 bp, Homo sapiens
tgtcaggctacatcagcaaaggggaccttcgtggggatccaggcctctgaggcctccaggatggaggatgccaccaacgtcgtgcgtggcctcatcgttg

SEQ ID NO: 135347 - DNA, 112 bp, Homo sapiens
cccagaccctggagcctcagttggaagcagccgatccagcctgcggagcctgtggggcagaataccaagctgctattttacacttgaagagggagcacaaagaagaaattga

SEQ ID NO: 135348 - DNA, 100 bp, Homo sapiens
cgctgctcatccccaaggaggacggcgtgatcacggccagcgaggacagggttctgagcaaggttcaaccagtcaagaacaggccttatctgctcagcaa

SEQ ID NO: 135349 - DNA, 100 bp, Homo sapiens
tgacgcggcgttagtattggccgtgtacccgaaaaactgattgactgggctggcgttaactgtgcggaggcagcatcctatggctctactttgagacggg

SEQ ID NO: 135350 - DNA, 50 bp, Homo sapiens
cggaattcatggggtgaaccatgggtggttggaggcaaagtaaagaagcc

SEQ ID NO: 135351 - DNA, 101 bp, Homo sapiens
ttctccagcagctgattgtaatgaatttgcccaatgttttgatgattggcagagacccactgtctggtgtggccgacgacgatgccctcgctgaggagcgc

SEQ ID NO: 135352 - DNA, 74 bp, Homo sapiens
caattaccgcctctgccaccgaggaattggccttctctagaagactcttactagacgcttgaagcaaagctgcc

SEQ ID NO: 135353 - DNA, 83 bp, Homo sapiens
aataattgggcagaagagaagcagtgaaggagtgcagaggcatcacctgaaagctcctgaaactgggcactggtctcctggaa

SEQ ID NO: 135354 - DNA, 100 bp, Homo sapiens
accatcaggagcagcccctacaaaattttctctgtgaaggtcatgtgctcccagctgctgaaactggaggagccgaggaaggtctgcttcacctacgacc

SEQ ID NO: 135355 - DNA, 75 bp, Homo sapiens
taccgaagcgggctgtgtgccccttctccacccagagaaactgccaagttttggaccttatctggaacagcgcaa

SEQ ID NO: 135356 - DNA, 75 bp, Homo sapiens
gaacgatgtgcgagaactgcgcagacctggtggaggtgttaaatgaaatatacagaagatgaagctaggaaaata

SEQ ID NO: 135357 - DNA, 100 bp, Homo sapiens
tggaaaacgccctctgcggtgaaggagagacctgcaggctgggacaatgaaaagaaaatagctattttacatgaaaattttacaaccgtgaagccggaag

SEQ ID NO: 135358 - DNA, 87 bp, Homo sapiens
ctggcctgccatgtccgggagaagacagttaatttggagtggcccctggagtcagtttcctacaccatccgaggccccacccagcac

SEQ ID NO: 135359 - DNA, 75 bp, Homo sapiens
ttggacttctcagcctccagaatggttcgagaacttgtcttggacaattgcaaatcaaatgatggaaaaattgag

SEQ ID NO: 135360 - DNA, 82 bp, Homo sapiens
tgttttgaccaacggaaaagagcaaatgcagcatttttgataggtgcctatgcaacctgaaggcattgaacgacagtacagg

SEQ ID NO: 135361 - DNA, 50 bp, Homo sapiens
ccacccattgtgtcttctcaagaagtgggtaattccagaattgattggcc

SEQ ID NO: 135362 - DNA, 73 bp, Homo sapiens
cggaccgcgtcctgcgccggagcaggtcaactttgtagtgtgccaactctttgccttgctagcagccatttgg

SEQ ID NO: 135363 - DNA, 74 bp, Homo sapiens
ccgcggtgcgcgctgtgggctgcctccccgtgctgtgtagcgggacggcagtagagacgggggttcaccatgtt

SEQ ID NO: 135364 - DNA, 88 bp, Homo sapiens
gggactagtggaccagctggtgaaggcagacagcgagtggcgacgatacttaattcagtgcacaaatgagatgaatgtgaacatccca

SEQ ID NO: 135365 - DNA, 50 bp, Homo sapiens
ggctgtttgaagaaagggagaagacagcagaggatgtgctgactgtagcc

SEQ ID NO: 135366 - DNA, 99 bp, Homo sapiens
atatgtgaacaaatccaggcctctcaaggaaaagacttcaaccaggcttccttgtacccacaggtgaaaaatgacatggatttgattgacatactttgg

SEQ ID NO: 135367 - DNA, 97 bp, Homo sapiens
tcagcatcaaacctcttcaattccatatttttgctgaagatcagctacatcatagctttaaaggcagaacatatctgaagagatggattaagaatgc

SEQ ID NO: 135368 - DNA, 100 bp, Homo sapiens
aaaaggccgttcatgcagacttttttaacggttcatctgcagaagccagcggacgcctctgttcaacttgtgggttacctggctcatgagaccttgccgg

SEQ ID NO: 135369 - DNA, 51 bp, Homo sapiens
gtcttctaccttggaatagtgaatggaactttgtgagaattttaatgcatg

SEQ ID NO: 135370 - DNA, 96 bp, Homo sapiens
taagacgccaggacccactggaagcctagaaatggtgtgatgaatgcagactctgctaccattttggctgtttggatcctcctttgaaaaagtctc

SEQ ID NO: 135371 - DNA, 111 bp, Homo sapiens
cagcggccgagcgggcggcttcctggcctgggcgctccggtggcggcggaggagccttcacgtaaatgggtccagtcatgcctcccagtaagaagccagaaagctcaggaa

SEQ ID NO: 135372 - DNA, 100 bp, Homo sapiens
ctttaattcgccaggatcttataaaacaaatgctgctgctatgaatatgggtcgaccattccaaaaaaatcggcaaatcgtacttgcccaatttgccgag

SEQ ID NO: 135373 - DNA, 100 bp, Homo sapiens
tgccagccccaagaaggagaccctcatccagctgatgcccttcttcgtgtcagtaacagatccaagagatggaaagagagtagcgctcaaaaagatgccc

SEQ ID NO: 135374 - DNA, 75 bp, Homo sapiens
ggaccacatcagtaattattcttggcatttcagaagatggacacaaagaagaaggaggaacagttgaagcttctc

SEQ ID NO: 135375 - DNA, 110 bp, Homo sapiens
tctgaactcaggacttggcaaacaccattcgcttttcacccaagatgatttgatgtcttataaaactctgatgaaccatgatggctacacagacattaagtatagacagc

SEQ ID NO: 135376 - DNA, 75 bp, Homo sapiens
caaccacatcaagagcagcgtggtgggcagtgagcggaagcgatcctcctccgcctcctcctctctgcatgcgcg

SEQ ID NO: 135377 - DNA, 100 bp, Homo sapiens
agagacaatcctaaacccaatgtatcgggaaaattgcctggcagcaaaagcactttttcctgacttctgcctaccagctttatgcctccaaactcagcta

SEQ ID NO: 135378 - DNA, 95 bp, Homo sapiens
cgatagcgtccgctaggctgtctgcctcggtacctgttactgctgctacttcctcgtttgacaccttcctgggagttgatccccctcatattgtg

SEQ ID NO: 135379 - DNA, 78 bp, Homo sapiens
ttctgagcaaggtagttttgatggtgattttacaacgagatgctgctctccatagggatgctcatgctgtcagccaca

SEQ ID NO: 135380 - DNA, 76 bp, Homo sapiens
gtgaggaaaggcacctccaccagggtcctgatgaagaagctgttgtggatcttggcaaaactagctcaactgtgaa

SEQ ID NO: 135381 - DNA, 90 bp, Homo sapiens
atcattacggacattaagagctttaagacctctaagagccttatcccggtttgaaggcatgaggatacagaattcgttgttgggaaggac

SEQ ID NO: 135382 - DNA, 74 bp, Homo sapiens
cgacattgccgtcgacggcgagcccttgggccgcgtctcctttgagcctgagaaatgccagtggcctgacagca

SEQ ID NO: 135383 - DNA, 82 bp, Homo sapiens
gacgaggaggcagccacggggcccctgggccagctgcgggccgtccagcggctgtgccacttctacagcgccgtcatgccca

SEQ ID NO: 135384 - DNA, 75 bp, Homo sapiens
gccggttgcgccacccgaggacaagggtgttcctgaaaagaaggtacttccaatcaccgtccccaagtcaccagc

SEQ ID NO: 135385 - DNA, 80 bp, Homo sapiens
aagggaaatgagcaaacctctcggattgggtgtcaagaatgattacggacctgaagccaaagaacaagatgcgctagtgg

SEQ ID NO: 135386 - DNA, 101 bp, Homo sapiens
gaactgaggttcaacactctggcaaaatgcccacactgcaaaaaaatttgtggacatcggatacccaaggagacgaagctgaagcaggagaaggaggggaa

SEQ ID NO: 135387 - DNA, 74 bp, Homo sapiens
gccggtctagatccaagcaaccaggaggcggcgacggcggcggcggggggagaggaagagaaagaagcgtctcc

SEQ ID NO: 135388 - DNA, 100 bp, Homo sapiens
cgggcaagagaccgactggcggagcaccgccttccggcagaagctggtcagtcaaatggaaggaaagtacgggcacgcggcctgctttggcctgcagccc

SEQ ID NO: 135389 - DNA, 83 bp, Homo sapiens
aattccgatggcaaagccgttgccaaggggacaagggcctgtccgacacgccctacgacagcagcgccagctacgagaaggag

SEQ ID NO: 135390 - DNA, 100 bp, Homo sapiens
ttcctggaaaaagaagtccaagaagcaaaaaagggactgctaagaagataccaccaggtgagcgagtgctgtgctttcatgggcctcttctttatgaagc

SEQ ID NO: 135391 - DNA, 100 bp, Homo sapiens
cctgaagccgccatgcgacctctccatgcagtcagtggaagtggcggacccagatgatgtggtaccagttggccaaagaagagcctggtgttggtgcatg

SEQ ID NO: 135392 - DNA, 75 bp, Homo sapiens
tgctgtaggacggttgctccgagcgtcggctgttagagaaacgctagcatccagaatagtgctgtttgggacctc

SEQ ID NO: 135393 - DNA, 88 bp, Homo sapiens
gctcccacagccgggcgttgggggaaagaatgatggtcgactgaggttgagccgtcagggcatcatcttcaagaatagcaagacaggc

SEQ ID NO: 135394 - DNA, 83 bp, Homo sapiens
cccctcagtgtttctccggggcaaagcagcaaatgcattccacgtgtatcaggtgccgccgccggacgggactttaagatgaa

SEQ ID NO: 135395 - DNA, 75 bp, Homo sapiens
cacagatgtccaagctgccaagccagaagcctgtcttagatgttcatgcagaactagacagaattacacgaaaac

SEQ ID NO: 135396 - DNA, 75 bp, Homo sapiens
agatgtctgacagccctgtgtgacaccaagataagtaacacttaattcagtgcacaaatgagatgaatgtgaaca

SEQ ID NO: 135397 - DNA, 88 bp, Homo sapiens
aaatataatatcatgttagtgaggctggagtgtcttcagcgcatcgtgaccaagctgcagatggaggcggggctgtgtgaggagcagc

SEQ ID NO: 135398 - DNA, 100 bp, Homo sapiens
tgtgtgccacctgctctttgccaaccagaacctaggtccctctgtcctggctggagtcgctttcatggtcttgctgattccactcaacggagctgtggcc

SEQ ID NO: 135399 - DNA, 96 bp, Homo sapiens
ctgtctcatccaaaaagtctgagcgaggagtgactgccaaaaaggagtatgtgtgccagattcgaatgcaggctcaaggaagcttgttccaaggga

SEQ ID NO: 135400 - DNA, 50 bp, Homo sapiens
aaaacccttccttaccttcgaaggtcagcgccaacggcaatgtcctgcgc

SEQ ID NO: 135401 - DNA, 100 bp, Homo sapiens
ttacctttataccaagaaggttgggaaagcaccaaaatctgcatgtggtgtgtgcccaggcagacttcgaggggtgccgtgagcgatgtggagatgcagg

SEQ ID NO: 135402 - DNA, 75 bp, Homo sapiens
ctgccggccctgcgcggtttccagccaggaagcttcgggaagcctgaaatggaagcaactgtcgagattgcagcg

SEQ ID NO: 135403 - DNA, 75 bp, Homo sapiens
cagttcgctctagcagacaagatcagatccacagatatttgaatggtggtacttccataagcatggcacatcttt

SEQ ID NO: 135404 - DNA, 80 bp, Homo sapiens
catggatttgtttctcattctcatatttcaccaataaagatccctttgttgatctagcaagtggccaagttcctttgcct

SEQ ID NO: 135405 - DNA, 50 bp, Homo sapiens
tgaggcctccccagccacgtggaactatgacattaaagtatcagtaaatg

SEQ ID NO: 135406 - DNA, 100 bp, Homo sapiens
aagatggctgcagacaagcctgcagacgttatcaggactaccagaccaagacaccttctacgacgtcgtggactgcctggaggagctgggcattgctgct

SEQ ID NO: 135407 - DNA, 83 bp, Homo sapiens
agcgcgggcagcggcagccgtgcggtgagggcggtggcgcccgcgggacctgcgacaatgcagatcttcgtgaagactctgac

SEQ ID NO: 135408 - DNA, 95 bp, Homo sapiens
ctagtccctcttacttgaagcatgtctttcagagcccggcaccacccatcttgagtatctggttgaaaatctttctaaacgatacgaagaaattt

SEQ ID NO: 135409 - DNA, 100 bp, Homo sapiens
gaaattattgatgggctctctgagcaggaggctctacagattctcccctgcccctggagaaggaggagcaggtccgacttcaggctcggaagtggctgga

SEQ ID NO: 135410 - DNA, 100 bp, Homo sapiens
caagctctccaagtccaaagacttctaccccggctccaggaggccagagctctactgaagcggcggcggccccgggggccagggggccggggactactga

SEQ ID NO: 135411 - DNA, 100 bp, Homo sapiens
gcagaaggattccgggagcacagttccgccgagaaacttccattttagaagaatacagtatcaattggactcagaagctgggagctggaattagtggtcc

SEQ ID NO: 135412 - DNA, 78 bp, Homo sapiens
gccgggagttcaagaagaacactccagaggttacacgcatggggagatactctggaggaagcatttgagcaatgtgca

SEQ ID NO: 135413 - DNA, 51 bp, Homo sapiens
ctagggggcggctaccccgtgggatgcatatgaaacagccaagatgctgtg

SEQ ID NO: 135414 - DNA, 78 bp, Homo sapiens
gtgctgcaggatcctgggcaggagcgaaggctgtggaaaatctctgttctcacaaagtctccccaatgctctacaagc

SEQ ID NO: 135415 - DNA, 100 bp, Homo sapiens
ccgccaaccctgggcagctcttcggccgcatccccatgcgcttctcggtgctgacagccctcagcgcctttttccaggagaccaacatcccctacagcca

SEQ ID NO: 135416 - DNA, 98 bp, Homo sapiens
cgcgccgctgctcccggaccgggccgcgcacgccgcctcagtgaaggagaacgacctgctcagaatgagaagaggaaggagaaaaacataaaaagagg

SEQ ID NO: 135417 - DNA, 98 bp, Homo sapiens
ttcattattaagacagtccaacataaagaggcggaatttctgcagaagctgcttccaggatactacatgctcatcatactggctagtggtggacccca

SEQ ID NO: 135418 - DNA, 100 bp, Homo sapiens
gccgatccagcctgcggagcctgtggggcaggtccgaggaggcaaacaaagccttctctgcagctgtgcagatgcacgatgtgctggtgaaagcctgggc

SEQ ID NO: 135419 - DNA, 100 bp, Homo sapiens
gtggatgacaggctagtcacaatgcagaatcccgcccattgtcagttcctgttaaagccatgttgaatatatctgaaagctgtagaagtcctgaagaaag

SEQ ID NO: 135420 - DNA, 89 bp, Homo sapiens
agcctgctgcgcaggataaaaggcaaactcttcacctggcacttcctggacctcactactacacatggggagaccacggcggaatcatc

SEQ ID NO: 135421 - DNA, 100 bp, Homo sapiens
acactggaggcctcagcatcaaagggaagggcatgacgtccttgatgaaggccgcgctggacctcacctaccccatcacgtccatgttctccggagccgg

SEQ ID NO: 135422 - DNA, 100 bp, Homo sapiens
caaggccggagaaggccgccgggcccgggcatggtggtctggggcaacgcggaaggtcatctccgcggtgtcgaggctctccctgcacagcatcgcgcag

SEQ ID NO: 135423 - DNA, 90 bp, Homo sapiens
gcaaaccacatacacagcacaaagaatgtcagacaggtgatgaaagccatcaatgatggcttccggctccccacacccatggactgcccc

SEQ ID NO: 135424 - DNA, 100 bp, Homo sapiens
tcttgagtctactctgtcgctcttgtgccctagcaccccgagaaccgtcagtttgagccagatgatgactcctcctctgagagtggcagcggcaatggct

SEQ ID NO: 135425 - DNA, 83 bp, Homo sapiens
gaagaagccaaagataaaaatttcaggatcaccattaacacttaagtctgttcggcacttgaagtactccttgtttaagaaat

SEQ ID NO: 135426 - DNA, 100 bp, Homo sapiens
gtcctgtttcccagaggaacagttcatttcaacagccagggagaaagcctggatgctcaaggtcgcgtggggcaggcagtggcgctgcgggccaaggcct

SEQ ID NO: 135427 - DNA, 75 bp, Homo sapiens
gggaagtcatgctcgcttcacggaggcaatagctagccgacatccacgacagcgatggcagttccagcagcagcc

SEQ ID NO: 135428 - DNA, 75 bp, Homo sapiens
ttacgatgtcttctctttgctacggtcctcagaatggttggaatgaccctccagctttgaacagagtacccaaaa

SEQ ID NO: 135429 - DNA, 83 bp, Homo sapiens
gatcgctgtgatcgtcacttggttttgattcccaccatggccatcacccagtttcggttatttaaattttgtacctgcctagc

SEQ ID NO: 135430 - DNA, 100 bp, Homo sapiens
cgcctgcacagatcagctccggagaggggaaaaccacgctcctcggaccaagcctcgggagctaaggactgaagattttgagggtaataaatgaacccac

SEQ ID NO: 135431 - DNA, 98 bp, Homo sapiens
gaacagtcctgtggaaaggccaagcagtgaccaggaagagggagaaacttctgctcagcaactccgaagtcaagcccgcactctgattacctttgctg

SEQ ID NO: 135432 - DNA, 75 bp, Homo sapiens
gtggtaaatgtcagctacaggccagcttatgaccaggaagagacaaggaggagtcagctgagaaaacaggaaaat

SEQ ID NO: 135433 - DNA, 82 bp, Homo sapiens
gttggaagcagccgatccagcctgcggagcctgtggggcagggtcgataaagacaggagtggagtgatatcagacaccgagc

SEQ ID NO: 135434 - DNA, 50 bp, Homo sapiens
gctggccttctacagcagcactgaaacaccagtttctcaggaggatgcct

SEQ ID NO: 135435 - DNA, 82 bp, Homo sapiens
caccctccctgacctgtctcggcctcccgactcctacagtggtgcgcgcggagccatggttatcatgtcggagttcagcgcg

SEQ ID NO: 135436 - DNA, 100 bp, Homo sapiens
atcgcaacttcatcacagtattagctcagtgaagggaatttggctacaaagcagatcgtattccttcagaggccagttatgtggaattcagctgctcaaa

SEQ ID NO: 135437 - DNA, 100 bp, Homo sapiens
catgcaagattacaggaatttcagaattttgaacaaatctttgaggtggtgaagtgtctgttagattcgaatgcaaaacccaataagaaggacctcagtg

SEQ ID NO: 135438 - DNA, 83 bp, Homo sapiens
atcggctgttttagtgctttttatttttccccaattcagcagagaatattttcaaggggggctttccatctgatggtcccctg

SEQ ID NO: 135439 - DNA, 97 bp, Homo sapiens
cgcccagcagcacaacacagggaagcttggggagctttcccaggcagcagccagcattgataacagagtccctaccccctcctcggtggccagcgca

SEQ ID NO: 135440 - DNA, 100 bp, Homo sapiens
gcgctgagcacgttcttccaagaaaccaacattcccaacagccaccaccaccaccagatggcgtccgagctgggccacagcctgaacgagaacgtcctca

SEQ ID NO: 135441 - DNA, 90 bp, Homo sapiens
cttccgaggcgccagcggcgagtgcgactgcagagcccgaggccggggaccaggacagtcgcgaggcctttgcaagacaatgcttccaat

SEQ ID NO: 135442 - DNA, 75 bp, Homo sapiens
cgcgaccgagtcatggctgagacctacgctttcctgctctgggaccctaccaaggtgcccccacgactgcaggct

SEQ ID NO: 135443 - DNA, 82 bp, Homo sapiens
ttggcattaactttgacagactcacacttttggccctgtttgataggtatcagcggcagggaaggaggctttgccatcttgg

SEQ ID NO: 135444 - DNA, 100 bp, Homo sapiens
tgtccttctttgtggagagcaaggagggcctgaggctatggcaggaggagcaggagaggaaggtgcaagccctctcggagatggcatctgaacaactgaa

SEQ ID NO: 135445 - DNA, 80 bp, Homo sapiens
tggaaacattatataccttggggaaagctgatacatatctgaagagatggattaagaatgctttggattaaggattgtgg

SEQ ID NO: 135446 - DNA, 75 bp, Homo sapiens
agaactgatattttatattgaaatggatcctccaggcattgacaaaggatccccaggattaccctgataaaaaaa

SEQ ID NO: 135447 - DNA, 101 bp, Homo sapiens
agagaatttaaaaagagttttgatttctttctggaagaaactttaggtggcaggtggaagccattacctactgttggaccgggtgtctcagattcttcaag

SEQ ID NO: 135448 - DNA, 75 bp, Homo sapiens
cttccttgcttctttggagaatgatatcaaaccatttccacgggctcccttgctcagcagtatgcgcaccctaac

SEQ ID NO: 135449 - DNA, 98 bp, Homo sapiens
agtgcagaagatctgggtgcccgtggaccacaggccctcgttgcccagatgtcatcatcagatttgaaatatttaaagtggatacaaaactatttcag

SEQ ID NO: 135450 - DNA, 98 bp, Homo sapiens
cagaagaaggacttcggaatgcactacaacaggaaaatcatattatagatggagtaaaggattcactccttctccagttgcacagccacacccttcag

SEQ ID NO: 135451 - DNA, 96 bp, Homo sapiens
tgccagaagcaaagaggctactgataaatctttacaagcttgtaaaatctcaggtccccgcggaagccgcggtgtcggcgccatggcggagctgac

SEQ ID NO: 135452 - DNA, 101 bp, Homo sapiens
atttgaatcagtcttcccactcagtcatcttcagtacttctacccggaggaagttgttgatcattatgaaaatcctagaaacgtggggtcccttgacaaga

SEQ ID NO: 135453 - DNA, 100 bp, Homo sapiens
tctttgaccttctggatgtccttgagttcaaccagagcgtcacggggttcggacgtcagatgatcgagaaaaccaagcagctggtggagtctaagtacac

SEQ ID NO: 135454 - DNA, 82 bp, Homo sapiens
gtggaccacatagacatttacgcggatgtcggcgaagagttcaaccagatgatatcatcaagttgaatcgaaaggaagggaa

SEQ ID NO: 135455 - DNA, 100 bp, Homo sapiens
gagaatatttaatggaaaatcgcttggttaaaacctgacacttttaacaggttgacctgacagttcaagaaaaggagaaatatcttaatgtgtctcgctg

SEQ ID NO: 135456 - DNA, 90 bp, Homo sapiens
gaggatttcgaggaggaacccacatcccccataggtcactgtgtggccatctaccactttgaagtcaccgagacttggagccagaatctg

SEQ ID NO: 135457 - DNA, 83 bp, Homo sapiens
ctgcgcggctactacaaccagagcgaggacggtactctcgcctccgccagtggaacaccctctatctgtgtgggacagatgag

SEQ ID NO: 135458 - DNA, 83 bp, Homo sapiens
tggggcggcagcgcggacccgcccggagatgagattgtagaaggcatgaaacaaaaaatgtggagtattgaaaatattgcctt

SEQ ID NO: 135459 - DNA, 82 bp, Homo sapiens
cgagcacagagcctcgcctttgccgatccgccgcccgtccacacccgccgccagggggcgacgcttcagagactgacaacct

SEQ ID NO: 135460 - DNA, 82 bp, Homo sapiens
ctccgtcgtggaagcaggactgcgccgcgtcttcctcaagaaggaagaatcctgctcaaaaatgaggtgaattaatacttgg

SEQ ID NO: 135461 - DNA, 75 bp, Homo sapiens
gtggtcagtgaacctatcgaaggacatgaagactaccacatgatgttgctgaacctgtttgcatgagttgctcct

SEQ ID NO: 135462 - DNA, 100 bp, Homo sapiens
gacggtttcgccggcagtctcgctctatggctactgctaccaggacagcgaggacatcccagacaccctgaccaccatcacggagctgggcgcccctgta

SEQ ID NO: 135463 - DNA, 51 bp, Homo sapiens
ggctatgacacaaagtcggacatctgggcttttttccagacttcaagctcc

SEQ ID NO: 135464 - DNA, 130 bp, Homo sapiens
ggatactgttcttccacatctttacaatgaaacaaaagttagaaaggagcttataagagaggccaaagtaatgattcatggattcagcacactttcctttgttgaaaagcactgcttgttccccctcaaa

SEQ ID NO: 135465 - DNA, 80 bp, Homo sapiens
aagtctgatgaagatgatgataaagaggtgatttcctcacctttctgagaaggaagaaggatgaactaaaactcaaacag

SEQ ID NO: 135466 - DNA, 76 bp, Homo sapiens
cccacttcgttcaagacaggtgtttaagcctccttgaggagaatgaccagctgatccgctgtattgtggagtatca

SEQ ID NO: 135467 - DNA, 98 bp, Homo sapiens
tgaaaacgacagcgaggagaagctcaagggcaccgtagaagtgcgaacggcaaaacaaatatggtctctttagaaggccttaccaaagtagttgatcc

SEQ ID NO: 135468 - DNA, 100 bp, Homo sapiens
tgccgagcgtgaggagactcagcagaaggtgcaggccacgtggagtgtgtcaactctcttatagcttatgggggcaacattgaccataagatcagccacc

SEQ ID NO: 135469 - DNA, 100 bp, Homo sapiens
gcctgacccagagccacttctcaccgagatgattcatgaagtcaagaaagtagtgaagactgtgacaacacggacagtacagccagtcgctatgggacca

SEQ ID NO: 135470 - DNA, 100 bp, Homo sapiens
tcctcaaacccccttggacacaggcataccctttcccccggtcttctctacatcctcagcagttgccaacttggcctgttccatctcaaataatgaagaa

SEQ ID NO: 135471 - DNA, 98 bp, Homo sapiens
gcagccttttgtgtgttcttcactgttacaggcctagaatatcctgcagtggtagagtttgctccattccagaagatagccaaaaagaagctgagaaa

SEQ ID NO: 135472 - DNA, 82 bp, Homo sapiens
cggagcttatactcctcccagtgacgggtctggagtgcgtgggggaccggctgttggcgggccagctgcgggccgtccagcg

SEQ ID NO: 135473 - DNA, 51 bp, Homo sapiens
gtgaggaactcttcaggctccagaacacttttcaggattagaagaggctgt

SEQ ID NO: 135474 - DNA, 94 bp, Homo sapiens
tctggggagtcctggcggtttttattaaggctgttcatgtgaaaggaactgtggctgcaccatctgtcttcatcttcccgccatctgatgagca

SEQ ID NO: 135475 - DNA, 51 bp, Homo sapiens
ttgctcctaacttgctcttggacagttgcatccaagaattgatgcccggag

SEQ ID NO: 135476 - DNA, 90 bp, Homo sapiens
gcttcgccatctctaccatctccttcagcttcatggtcagcaccttcttcagcaaagggtcagttaaatgaaagcatggaccatggggga

SEQ ID NO: 135477 - DNA, 74 bp, Homo sapiens
cgttactgatggtgctgctcacatctgtggtccagggcagggccactccaggctctccagcagaactatctcct

SEQ ID NO: 135478 - DNA, 83 bp, Homo sapiens
cggacgccgacgaaagccagcgagctcctcagcctcagtaagactttgaccccgacgcaggcttcagtgattgccgcggatca

SEQ ID NO: 135479 - DNA, 75 bp, Homo sapiens
aacgtggttggaatgtatctggctcagaactatgatagaatggatcttggagaatgtctgaaagtccatgacctg

SEQ ID NO: 135480 - DNA, 101 bp, Homo sapiens
aaaagatgagcaggaatgttttgctacaaatggaggaggaggaggacgacgacgatggggatatcgtctttaacacctctgtgtgaagatgacaaccaggc

SEQ ID NO: 135481 - DNA, 98 bp, Homo sapiens
acggagagaacacgagcccatcaggagtggaagtgttagtggattgacacttaaactgatccgaacatctgtctccgaaatgttagaaaccctctcag

SEQ ID NO: 135482 - DNA, 80 bp, Homo sapiens
aggagtcggaagaggtctcacgaggctgtcatcaccgccatgcccaagaataaaggcagacctgttatcctaaactaggt

SEQ ID NO: 135483 - DNA, 100 bp, Homo sapiens
atcagctgaccattgacaatcagccatgtcatccaggcctcttgaaagtccacctccttacaggcctgatgaattgtgctggagaatctggtaaaagcac

SEQ ID NO: 135484 - DNA, 90 bp, Homo sapiens
tgccaccaaacacgacagtgagggcaagaccgcatttctcactatgtgcaatagacactttggcagtgttgtggcacaaaccattcggac

SEQ ID NO: 135485 - DNA, 51 bp, Homo sapiens
gagacagctgccatccactgactcgtaaaggaagaggagagtaatgcaaag

SEQ ID NO: 135486 - DNA, 100 bp, Homo sapiens
cccaaagcaattacacccagaagattacctttgactcttgtcccaggaaagcgtctctagcagctgatatccccagacttggatatagttcctcatccca

SEQ ID NO: 135487 - DNA, 76 bp, Homo sapiens
tcgtgttcctcgctcgccccacagactacgtctactttgagaactcctccagcaacccatacctgatccggagaat

SEQ ID NO: 135488 - DNA, 100 bp, Homo sapiens
ataaaggatattcatttgttcgtcccatgaagctgaggtcttgaagcagctggctgagaaacgagagcacgagaaagaagtgcttcagaaggcaatagaa

SEQ ID NO: 135489 - DNA, 82 bp, Homo sapiens
tgtgaaggccaccattaaggatgcatctcttcagccaagatccgcaaggatgctctccgggcgctcaactttgcgtacacgg

SEQ ID NO: 135490 - DNA, 82 bp, Homo sapiens
ggatgagcagctgacttccctgaaggttctttacaatgacctgggcgcacagattgttcctgcctgattcataaacatcgtg

SEQ ID NO: 135491 - DNA, 100 bp, Homo sapiens
ggagcccgggaggggccgcgccgccaccgtctgaactaggatgtcccgacatgaagggcattaacctgtctgggggccagcggcagcgggtcagtctggc

SEQ ID NO: 135492 - DNA, 82 bp, Homo sapiens
atggaggcgaagacaagagagctcattgagatgcttcctgggaattagaggaaaacgcttatcaagagcttctgcagcacta

SEQ ID NO: 135493 - DNA, 96 bp, Homo sapiens
gctattgtctcatctgagaaatgaagcgacacgtccaagaatcagagcagaaccaagcgggaagctcagaatcagagagacctcatcaagtttttg

SEQ ID NO: 135494 - DNA, 87 bp, Homo sapiens
actatgctagacagctgcaagctgaaaagtgcctgcaatttgccatttatttgtaataagaaaaaatgcctgtcttaaaggctgaag

SEQ ID NO: 135495 - DNA, 82 bp, Homo sapiens
agcggaaaggggcccggcgtctgcctcgagactgaagaccgtggaagatagatgataagcctgtaaaaattgacaagtggga

SEQ ID NO: 135496 - DNA, 82 bp, Homo sapiens
caccgaccggcctcgagcgccccggcgggagatgccgacaaaaggatcaaggtggcgaagcccgtggtggagatggatggtg

SEQ ID NO: 135497 - DNA, 74 bp, Homo sapiens
gctccagatgacggtggaatctagaattttggagagtaaaaggctgaaccttgttaaagagaaaaccattaatc

SEQ ID NO: 135498 - DNA, 101 bp, Homo sapiens
agttataaaagcaaacacaggattcaccacagtacttcacatcgtcgttcacatggggcaagaaaattggatgtatattttgaatatgaagaaaaaataat

SEQ ID NO: 135499 - DNA, 119 bp, Homo sapiens
aaaccacttctctacatcccatctcaatcagaattactagattttctctcaaactacgaggatcaggtctcctgggcatggctaacattgacctggaaaagagcaggactggtgatgaa

SEQ ID NO: 135500 - DNA, 100 bp, Homo sapiens
gagaggccacacccccagttggttgcagttccagaaattcttatgccggtctagatccaagcaaccaggcggccttctgatctgtttaccacgtgagcaa

SEQ ID NO: 135501 - DNA, 99 bp, Homo sapiens
tttggcctcctccagaccttccccttcatcatgctgacctcgcctaacttcatcctgtcgtgtgaaacttgaagattgtgacagaaaagccgttcacca

SEQ ID NO: 135502 - DNA, 51 bp, Homo sapiens
cttcagggtttccaccgttcgttcaagccacattgtaaatcaccttgtgag

SEQ ID NO: 135503 - DNA, 99 bp, Homo sapiens
aggaggtcttctcagccaccctcgcccatgtcaacagccttgtcctccagcccctgctcccagccggtgtggatgaggtcaccattgtcaacattttga

SEQ ID NO: 135504 - DNA, 82 bp, Homo sapiens
cccctgggcgtctcctacatcgacgaccacgtgcggaggaaggactcctcgctctatatagcttcagtatcagacacagcac

SEQ ID NO: 135505 - DNA, 82 bp, Homo sapiens
gagcatcgactggaccaagatcgagcccagcgtcaacttcctcaagtcgcccaaaggagcatcagatccatgctgctgctga

SEQ ID NO: 135506 - DNA, 88 bp, Homo sapiens
gcaatttatccgtgtgcagccccaaactggaaagaagatgctaattaaagtgaagtttgcctgagaatacagatcaacccacagaaca

SEQ ID NO: 135507 - DNA, 100 bp, Homo sapiens
gaaaacatggtattttgaaatatgattaaactcctgatgctgcagcagaggctaagaatattaatggccagatctaggtggtgaaattgcctctaccttt

SEQ ID NO: 135508 - DNA, 142 bp, Homo sapiens
ctttggcagtctcggcccgagccttagagccttagacaccggggaggagaccctggtcctgttcctaggatcatgcggccagatgatgccaacgtggccggcaatgtccacggggggaccatcctgaagatgatcgaggagg

SEQ ID NO: 135509 - DNA, 147 bp, Homo sapiens
atcctgctgcatcacagaagctggaagttctgatgttccactgaaatcacaatggaaagtcttgacttgactgtcaggtcaattcagtgaagatatgatacccacagtgggcttcaacatgaggaaggtaactaaaggtaacgtcac

SEQ ID NO: 135510 - DNA, 95 bp, Homo sapiens
gatgaatccaagttaacccttaccacccagcagcagggcatcaaggatctagtgaaaagccatttgatgtatgcggtcagagaagaagtggaggt

SEQ ID NO: 135511 - DNA, 100 bp, Homo sapiens
agtcatcgtgcctgaaggagtacatgccctttatgaagatattcttgaggcttatcatggatacaaccaaatgatggaatgcctaccgggttataagcgg

SEQ ID NO: 135512 - DNA, 100 bp, Homo sapiens
cgcggctttgcctcccggagaagggccgttgctccagggagaactgcaaatatcttcatccacccccacatttaaaaacgcagttggagataaatggacg

SEQ ID NO: 135513 - DNA, 83 bp, Homo sapiens
gtcagcactgactttcagctatggaatcgcctgtgggccaaagctgaccaactcccccaccgtcatcgtcatggtgggcctcc

SEQ ID NO: 135514 - DNA, 75 bp, Homo sapiens
cgcggccatggctcacctccggggatttgccaaccaggtgaaaggtgtagcagtcactcggcctacacccacagc

SEQ ID NO: 135515 - DNA, 100 bp, Homo sapiens
gtcgcagcgccagacccaaggcccccgagtgagcgcgggcgccgagatagaagatggtgagatttttgcaagtattaaccagaaggacggtatggtcagt

SEQ ID NO: 135516 - DNA, 100 bp, Homo sapiens
cctggccttaccgaggagatgatccagcttctcaggagccacaggatcaagacaggagaacatttcaggataggaataggccaagtgctgagaagatgag

SEQ ID NO: 135517 - DNA, 100 bp, Homo sapiens
caccgcagatgttgtcaaggtggcctaccaggaggccaggggtgtcgccatggcaagataacccctgtgacagaaggctactgttgctgtaacaaagggc

SEQ ID NO: 135518 - DNA, 74 bp, Homo sapiens
caaaatattggagttgcaacctttataggtttagataaggacagcagaactgcattgcactgggcatgctcagc

SEQ ID NO: 135519 - DNA, 90 bp, Homo sapiens
ccgctgccgctgccgcacctccgtagctgactcgatgacgtccggttgtttgccttcgtgcgcttcaccaccggggatgccatgagcaag

SEQ ID NO: 135520 - DNA, 97 bp, Homo sapiens
ggaggggattttgtcagcttgtcgtcaagattgccaaacaatccttgcgacccttctgcaccgtttgcaaccgctacttcaaaacccctcgcaagtt

SEQ ID NO: 135521 - DNA, 83 bp, Homo sapiens
cttagactaccccaggaacccgcgccgcgagggctccttccctcaggtgagaagccctaccactgcaactgggacggctgcgg

SEQ ID NO: 135522 - DNA, 83 bp, Homo sapiens
gtcgcggtgggtcctcgcttgcagttcagcgaccacgaaaccaagcagcaacagcccttggaaagaggctaaatttttcttga

SEQ ID NO: 135523 - DNA, 75 bp, Homo sapiens
cggcgctcctcagcctccgtcttggctcagacgctcatgactttgacccctggtggacaaacgactgtgagcaga

SEQ ID NO: 135524 - DNA, 75 bp, Homo sapiens
ctatacagggacgtgatgctggagaattataggaacctggtctccctggatgcggtgatgggagccatatacaca

SEQ ID NO: 135525 - DNA, 89 bp, Homo sapiens
tgatacctgtgtctcctacccaaggacagggggacagggctctgtctcgcacttcccagatgagtgtgggtcagagagccaaactgact

SEQ ID NO: 135526 - DNA, 75 bp, Homo sapiens
gccatgtgagcactgggggtggtgccagtttggagctcctggaaggacaagatccagaagctttatgaacgaaag

SEQ ID NO: 135527 - DNA, 90 bp, Homo sapiens
agaagatgcagcacttacttttccagtccttttccaagatgtcatttatcaggagtatctgtgaaggaacagaccaggagacaccctgag

SEQ ID NO: 135528 - DNA, 97 bp, Homo sapiens
attggtattgttggattgccaaatgttggagtgaagtcaccctgctgagaaatgaagtggcacagctgaaacagcttcttctggctcataaagattg

SEQ ID NO: 135529 - DNA, 100 bp, Homo sapiens
tatgatgagagtactgatgaggaaagtgaaaaccaaactgatctctctgggttggcttcagggcttccagggcagcgattgaggagaccttaccaaggag

SEQ ID NO: 135530 - DNA, 82 bp, Homo sapiens
gaaatggcgaactcggcaaatacaaacaccgtggtggatggaagtttgcttagttgaagaattgccaccaaccactgaattg

SEQ ID NO: 135531 - DNA, 100 bp, Homo sapiens
tgcatcaataccaatggctcctacagatgtctttgcccccaggggcatcggctggtgggtggcaggaaatgccaaggcatttgaccaagccgtgaccaag

SEQ ID NO: 135532 - DNA, 73 bp, Homo sapiens
tgtcgttggaagagtacaagctgatcctgtccacaggtgtgagtgatgtagactatagtctgtatccagatag

SEQ ID NO: 135533 - DNA, 87 bp, Homo sapiens
acactcttctttgcctttacgtgacgggggaagtgacagatccatcaggaaaagtccactttgctcttctggggacgtgggatgaga

SEQ ID NO: 135534 - DNA, 75 bp, Homo sapiens
agatccatgtggtttcccagtttaagattctggtcagcttgttaggtgaccccaaaggagccatgataacccatc

SEQ ID NO: 135535 - DNA, 75 bp, Homo sapiens
cgtgcggtctgggccttttgggcagcttttccggcctgacaacttcatctttgggtatctgtgcagatcaagtga

SEQ ID NO: 135536 - DNA, 89 bp, Homo sapiens
gtaaaaggagtggcttgcaggatggagaagctgcaccagtgttattggaaagtgttgcggagataggaacatgggagagaaacaatctg

SEQ ID NO: 135537 - DNA, 83 bp, Homo sapiens
aaggagtgcttctaccagcccatgcccctgaaggcctcgctggagatcgagtaccaagtaagaatgattgatgttggctgata

SEQ ID NO: 135538 - DNA, 100 bp, Homo sapiens
gcggctcggggtgctctactggaagagctgcagaaactggagggcagcagtggacctgtgcggacgtctcctcacagcccacggccagggctacggcaag

SEQ ID NO: 135539 - DNA, 75 bp, Homo sapiens
cctgcttgagatggagaagcatcaagacagctgatatggaggagatgtatttaactgcttttcaggaagccttgg

SEQ ID NO: 135540 - DNA, 89 bp, Homo sapiens
ccacccctgaagaaattgcacaggaattgaaagatgttggccatcgtgatcagatggctgcagctagaggaatcctgcagaagaacgtt

SEQ ID NO: 135541 - DNA, 100 bp, Homo sapiens
gcagcctgagtcccagtgatgacctctggaagcaactactcctgattaacctcggtgaagttaaggaaaacttcgtggctgaagatgtgaatgaagaaca

SEQ ID NO: 135542 - DNA, 83 bp, Homo sapiens
acactcaagtgaagcaaaagccttccatgattacaatcttatggcaagggccttatatgacaatgtcccagagtgtgccgagg

SEQ ID NO: 135543 - DNA, 85 bp, Homo sapiens
gaagagctcacgggcgtgcggttcaaggctcagctgaaggacccgcagggccccgggccagttgttcttcctaacataaaatcag

SEQ ID NO: 135544 - DNA, 90 bp, Homo sapiens
cggaacgatgccggccgtgagcctcccgcccaaggagaatgcgctcttcaagcggatcttgtggaagcatcagttcacagcagtaatgca

SEQ ID NO: 135545 - DNA, 75 bp, Homo sapiens
ctccgacctttccttccaggcggtgagactctgctaataatcacaagaagttgtcagaatttggaattagaaatg

SEQ ID NO: 135546 - DNA, 101 bp, Homo sapiens
agaccaatggacaccttctaagagtttggcgagtcagtgactgaagcgcccgtccattccaagttggggaatggcggtcaatgtgtattctacctcgataa

SEQ ID NO: 135547 - DNA, 101 bp, Homo sapiens
tcctctggcaggatgaggcgtgcaggcctggcctttggaatgagtacacatccaggagtgaagaagacaagctcaactgccattctctgagcagttcaagg

SEQ ID NO: 135548 - DNA, 80 bp, Homo sapiens
tgatttgctttctcggagcaaaagtaaccttctgataacttaagagagattctccaaaatgtggccagattgcagggagt

SEQ ID NO: 135549 - DNA, 75 bp, Homo sapiens
gcgggcctgtcagttatcgggtgtgaccgccgccgcccagtaaggacttcaactgaccttcctcagactgaggac

SEQ ID NO: 135550 - DNA, 50 bp, Homo sapiens
ggaaagccaggagaacaaggcttgatgcaaatggttatgagccttagagt

SEQ ID NO: 135551 - DNA, 75 bp, Homo sapiens
cgccgagctgcgcccgctgccttcacaccccggacatccgcgccacacgaggcaagatccaaactgagatggaga

SEQ ID NO: 135552 - DNA, 76 bp, Homo sapiens
gtcgccagggccatgctttctgataaacattgacgatcttgaggatgaccctgtggtgaacggggagaggtctggc

SEQ ID NO: 135553 - DNA, 83 bp, Homo sapiens
caagagggtgttcgactgctagagccgagcgaagcgatcagttcgaggtgctcgagcgccacacgcagtgggggctggacctg

SEQ ID NO: 135554 - DNA, 100 bp, Homo sapiens
ctccagtgaccctgagcgcaccctggaccccaactcagccttcctgcataccctggaccagcagaaacctagagtggtcaccgagaccaggaccggtcct

SEQ ID NO: 135555 - DNA, 96 bp, Homo sapiens
ggcggggcagaccgctggggactgcgggcggcgctgtgtccgtcgccatgacaggtgcagcagtaccgcgtcgccatgactgccaaggactgctcc

SEQ ID NO: 135556 - DNA, 101 bp, Homo sapiens
atttcagtgactgaattaaaaggtgtcaagaagctcagaatgagacatcatctcattatgttgcccagactgatcttgaacttctggactcaagcaatcct

SEQ ID NO: 135557 - DNA, 100 bp, Homo sapiens
ctcagcaggagctggctgcggagcggcgagggacctcgcagggagccatccgataaactcgcattgtctactggatcaaggacagacagctcaccaaccg

SEQ ID NO: 135558 - DNA, 100 bp, Homo sapiens
agaaagcgagaaaggaacaggcgccttcaaaagcccacttggcgatgggttacagtaagaggtactggaagttggaccctgctcaggtctatgctagcgg

SEQ ID NO: 135559 - DNA, 76 bp, Homo sapiens
tttgaagaaagatgacaccacctttgatgaggatggagctatgacattgaagagaggaaggttccaaaacccaagt

SEQ ID NO: 135560 - DNA, 49 bp, Homo sapiens
cttgagtgataaaggagtagagctgacctcaagagaatttgcaagacaa

SEQ ID NO: 135561 - DNA, 100 bp, Homo sapiens
gggcctgcagcgggagctggacggcgagcgcgagcggcgcgagaaagtctggccgtgggcctgggcttcggggcactggcagaggtcgccaagaagagcc

SEQ ID NO: 135562 - DNA, 75 bp, Homo sapiens
ctgcccctgcccagatccggaagaacggtgaatttcccccgcaggtgcccacagtttgtgtgctgcggagatcgc

SEQ ID NO: 135563 - DNA, 134 bp, Homo sapiens
cccctccccgacacaggcacacaccccccgacaggcacgcacacccaccccacagtgcccggctcggctgcggtgtcatggagaaactccagctgggcccagagattctgcagcgggaaaatccaaggcttatt

SEQ ID NO: 135564 - DNA, 100 bp, Homo sapiens
tggctactctgcctcggggacgaaagcaggtttttagaacttcagccataaaaatgggcagaattttccttgatcatatcggtggtacccgtctgttttc

SEQ ID NO: 135565 - DNA, 101 bp, Homo sapiens
tcttagtcgacatttttatggtatccaaagcgactgcatttgcctccagacttgtcagacacagtgagccgctcaagcaaaatggatctggcagaatccgc

SEQ ID NO: 135566 - DNA, 73 bp, Homo sapiens
tgcacgtgagggaagcctttggccagaagatcggccacttccagatatcccgttgttacagcaccgtttgtag

SEQ ID NO: 135567 - DNA, 50 bp, Homo sapiens
gggaaggttccctcaagtccaagtgttaaaagatcactgaagttggatgg

SEQ ID NO: 135568 - DNA, 101 bp, Homo sapiens
aaacagtgccgacttgcaaacgattctgctcctaagtgtaggagagaacttggtgcctcttccactctggagtgaagttaatgaaagtctttttccttttc

SEQ ID NO: 135569 - DNA, 49 bp, Homo sapiens
ctgattcacaattatggagactgtgctaactcaggtgagatggagccgc

SEQ ID NO: 135570 - DNA, 97 bp, Homo sapiens
gaggacctcacttccccggggtgtaataatgttaactgagattacctctctagtgacccttcagctgttaaccctggttggccatgacgatcagctt

SEQ ID NO: 135571 - DNA, 76 bp, Homo sapiens
gcgctactctctctttctggcctggaggctatccagcgctgctcccggcagatcggcttctcctttgtacgaccca

SEQ ID NO: 135572 - DNA, 83 bp, Homo sapiens
cgacgaccctagtgctcgtcgccgtggcgccatgggtgttgtccgcagccgcaggttttaaaatcaaagatgggaaaatcgga

SEQ ID NO: 135573 - DNA, 100 bp, Homo sapiens
cgggttttgagctgccgcggtcccgggactgagagcgcatcagcgaggaggtggggctgctgcagctccttggggaccccccgccccagcaggtcaccca

SEQ ID NO: 135574 - DNA, 100 bp, Homo sapiens
gctccctcgggcacctccggtaccgctgcagccaccgcggcccccgcgggaaaaccaattctgtgtcctcggaggaccacagcccagttgggccccaggc

SEQ ID NO: 135575 - DNA, 87 bp, Homo sapiens
ccagcccgactccggccgtcgccgtcgccgccggggggaggaggagccttcacgtaaatgggtccagtcatgcctcccagtaagaag

SEQ ID NO: 135576 - DNA, 80 bp, Homo sapiens
gagccgagcacgcgggtctgtcatcatgtcgcgttacgggcggtacggaggaggacatggatttgattgacatactttgg

SEQ ID NO: 135577 - DNA, 83 bp, Homo sapiens
ctgcggaggagaccggcgaggagaagcagcacgagtacacgagacaggattgagaaaggagagattcaaattgtgacttcaga

SEQ ID NO: 135578 - DNA, 82 bp, Homo sapiens
ttgtttcctggtagcaatgccactttcaggatactagagtcaagtccatcatctccagaaccagctagtcttcctgcagaag

SEQ ID NO: 135579 - DNA, 90 bp, Homo sapiens
ttatctgcatatcagagatattacagtttacaggctgactactggaagtcactgtgtgcccagtattctgcagacaaacgagaagatgag

SEQ ID NO: 135580 - DNA, 75 bp, Homo sapiens
ttttagggtcctttatatagaagggagagtagggccctgttggaggaagccagaaagcgaagactgctggaggac

SEQ ID NO: 135581 - DNA, 75 bp, Homo sapiens
ctgttaaccaggatacaagattagacaacagagtcattgatcttaggccctgccataggacaggctgaggctgag

SEQ ID NO: 135582 - DNA, 100 bp, Homo sapiens
gtgcgagaactgcgcagacctggtggaggtgttaaatgaaagatgctgaaaacgccattcaacagatgggtggccagtggcttggtggaagacaaatcag

SEQ ID NO: 135583 - DNA, 82 bp, Homo sapiens
ggggagcgtcctggggctgtgctccatggcgagctggaacatggtccaagacaattcctgggaaagttcagttcttctcaag

SEQ ID NO: 135584 - DNA, 135 bp, Homo sapiens
tcatttctgagtattgtctttatatcctgacactatgaatgctacttggatgcctcttaagaatggtagataacgcagatcatctctggaaaggatattgatccgcctcatgtaaagtatgcttagttcctttcc

SEQ ID NO: 135585 - DNA, 82 bp, Homo sapiens
tttggtcattttccccggagcctttgactggtttctggaggcagtggagctactgctgtggttcaggcagccctatgcaaac

SEQ ID NO: 135586 - DNA, 100 bp, Homo sapiens
aagcaaccacctctggctagtggtggaactctgcacagacatgccaatatttggtttctgtccagcccatgatgatttctacttggtggtgtgtaacgac

SEQ ID NO: 135587 - DNA, 83 bp, Homo sapiens
cctcaccctcatctatatcctttggcagctcacagcaggggaaatgctgtctgtagctgagcacttcctggagcagcagatgc

SEQ ID NO: 135588 - DNA, 103 bp, Homo sapiens
ggttaaaacctgacacttttaacaggattccagacagcattggaaaagacatagaaaaggcttgccaatctatttatcctctccatgatgtcttcgttagaaa

SEQ ID NO: 135589 - DNA, 100 bp, Homo sapiens
gtgatccatgaaaaacagacagctgtgtcagtagaaaacttcattgcagaattgctgcctgacaatcgggaacatgccctgtgtgccgccgtcatttccc

SEQ ID NO: 135590 - DNA, 101 bp, Homo sapiens
cgcggagtcccgcggagtctcgggccccggagacgggcgaggagcacggcagcagccaggagtcatgcttttctccccatcattccaaacacccagagagg

SEQ ID NO: 135591 - DNA, 101 bp, Homo sapiens
cactgcttctccgtgggcagcattggcgaccagcgcttcacgacttaattcagtgcacaaatgagatgaatgtgaacatcccacagttggcagacagttta

SEQ ID NO: 135592 - DNA, 90 bp, Homo sapiens
gtcccgttaacgtctctgttagttcagagaactctaagaaggagctgatgtggaggagcagctgagacagttcaagatgacgaccacagt

SEQ ID NO: 135593 - DNA, 142 bp, Homo sapiens
cctggttgtaaacaagctcggagcgggagtagacagtggccggcagggcagccgggggacagctgtagtgaagagacggtctcgccacattgcccagactggtctgaaagtcttgggctcaagagatcctcccgcttccgcc

SEQ ID NO: 135594 - DNA, 100 bp, Homo sapiens
caatcggaaaccacgcgtcctactacaaagatgctctgcggtttttgggctgtgttgacatcaaggatctaccagattcattcagctgaaactggagcgt

SEQ ID NO: 135595 - DNA, 100 bp, Homo sapiens
cgagtctcggagaagatgtggtggcttccgtttgttggtggaggaggtggcaggcctcggcgccgctatgtgaaacagcctttacctgatgagtttggca

SEQ ID NO: 135596 - DNA, 100 bp, Homo sapiens
gccctggtcttgctcggccgatgaagtgcagaggtttttttctgcctgtggtgactgtccagactccatccccgaatgtcaagaaggggaggcgctcact

SEQ ID NO: 135597 - DNA, 100 bp, Homo sapiens
tcttcttcggcttcgaggagaataagtgcagtatgagctacatgtttgagtacccggagtatcaggacgatttcctgttcagtgtctccattttaagtgg

SEQ ID NO: 135598 - DNA, 75 bp, Homo sapiens
taaattagagtaaagctgttcgacaagacccctcatacgcgtgagaaggcaaccaaagtgcaggacatcaaaaac

SEQ ID NO: 135599 - DNA, 74 bp, Homo sapiens
atggcaccactggttatgaggaagctgcagctcaatccctggctatcttcttcagtgactgctccatccatggt

SEQ ID NO: 135600 - DNA, 110 bp, Homo sapiens
gcctctgtaggcattggcgttgagttcacagtccacgtggctctgggtgtgggccgaagatatgctcatgtggtgttgaggaaagcagacattgacctcaccaagagggc

SEQ ID NO: 135601 - DNA, 88 bp, Homo sapiens
gggcaaggcggcggacggctgcgtcgcccgaggcgaggaggagcgctggcgtgcgacttcatgatagcatatcagaagagggctttca

SEQ ID NO: 135602 - DNA, 100 bp, Homo sapiens
agctacatggatgcctcccttatctccctcattgaggattttgggagccttggagaggatgaagctggaggcagattcgtcgctttctctggagaaggac

SEQ ID NO: 135603 - DNA, 75 bp, Homo sapiens
atattcccaagtccttcacccgggctgctctttggcgtaaattgcaatcgattagggatcgtttctcagaatcaa

SEQ ID NO: 135604 - DNA, 100 bp, Homo sapiens
ttaattattttcgtccccagaggaaggcgagttgtggaaagtaaaaatgtagccctaccaaaaggaactattgtactggcttctccaggctggacaacgc

SEQ ID NO: 135605 - DNA, 51 bp, Homo sapiens
attgactgctggattgacaatatcaggcaaggatatcctgaaggatactat

SEQ ID NO: 135606 - DNA, 50 bp, Homo sapiens
gggctccaccccgtcgcctcgacaggtgatccgcaggggctggctgacca

SEQ ID NO: 135607 - DNA, 90 bp, Homo sapiens
cccagaggagaaactcgctcgccttcagaagacaggtgttggagcgggccggagagaagtagagtgggctgcgaggagaaggaaacaggc

SEQ ID NO: 135608 - DNA, 100 bp, Homo sapiens
gacgccgacgccacggagtcagcacaagtctcatcaggtccagccctgctgggagttttctgccacacagatttgcggaagaacctgaccgtggacgagg

SEQ ID NO: 135609 - DNA, 75 bp, Homo sapiens
agaacgagcacctcctcgaagtcatcccagtgtgaaagaccttttatgtgtgaaacatgtggcaagagttttgct

SEQ ID NO: 135610 - DNA, 100 bp, Homo sapiens
agtgcaggcaaagccggctgttaccctgcacagccgtcaccctcaactttcccttcaggagccaaaaacctgtatatcatctccgtgaaggggatcaagg

SEQ ID NO: 135611 - DNA, 83 bp, Homo sapiens
aagaaattgagggttcttgccatgggcagctgcaatgactctccgcacggtattattgtcattgcaagcactattggcagctg

SEQ ID NO: 135612 - DNA, 100 bp, Homo sapiens
tgaaaagcaaggcatgacacaagaatcctttgcccccattcactggggagaatagaaagaaaacaattgacaaaatcctcaaatgtaaactcaatttgcc

SEQ ID NO: 135613 - DNA, 98 bp, Homo sapiens
tgcgcttccgacggggcggccgggggctcagagatccaagtgcgcgccctggcgggtccggaccaaggtctttaaggaggagaagtacttgaaagagg

SEQ ID NO: 135614 - DNA, 100 bp, Homo sapiens
gaacagactagccactttgcattgactggaaacaatggcatttacagaaagagtcaacagcagtggcaacagcttcgaggcagagaatgggccgacacca

SEQ ID NO: 135615 - DNA, 100 bp, Homo sapiens
tccgaaacccctcggcggcgttcttctgtgtggcccgcctgcaggatttaagtgccctgtatgctcaaaatttgtatcctcagatgaaatggatttgcat

SEQ ID NO: 135616 - DNA, 100 bp, Homo sapiens
aacttgacactcaccctgaccgctgtgaatggatacacttttggaagtctcccaggactctccatgtgtgctgaagacagagtaaaatggtacctttttg

SEQ ID NO: 135617 - DNA, 98 bp, Homo sapiens
ttaaaagacagtcctcgtcagcactgactttcagctatggaatcgaacagcacattagttccagaagaaagatggaaattctgaaaactgaatgtcaa

SEQ ID NO: 135618 - DNA, 100 bp, Homo sapiens
aagaacctgcgggaggacggagagaaggcggcgcgggaggtgaagttgctgctgttgggagctgggctgaggatgagaaacagaaggcagagacagtaca

SEQ ID NO: 135619 - DNA, 74 bp, Homo sapiens
cgtggacatcccatttaattctcagaagccgatcacaaggatgaacgtgaagccagagaaaatgtgaagagaga

SEQ ID NO: 135620 - DNA, 100 bp, Homo sapiens
gcggaggcgacggtggcggctctcggagccggcgcgaatccggcccccgcagcgggacccggaaccgtgggtaccgatggatgtggccgagagccctgaa

SEQ ID NO: 135621 - DNA, 100 bp, Homo sapiens
ccccgggcaaagcccatctggtccgccgagcagatgcggtgacggatcttgcctcacaccctggttactacgggaatctggtggaggagtccctggggaa

SEQ ID NO: 135622 - DNA, 51 bp, Homo sapiens
gtggaactaaggggaacttaatttactggaactgtggctgcaccatctgtc

SEQ ID NO: 135623 - DNA, 90 bp, Homo sapiens
gctatcctcccgccttagcctcctgaatagctaggaccacagtccaaaagaaactcttccttcaaaacctgtgaagaaagagaaggaaca

SEQ ID NO: 135624 - DNA, 50 bp, Homo sapiens
ggaggccaaggcgggcggatcacgaggcggaggttgcagtgagccaagat

SEQ ID NO: 135625 - DNA, 50 bp, Homo sapiens
gggatccttcacccgtgtctgccttcatcctccccaaggcagaggtgtgc

SEQ ID NO: 135626 - DNA, 100 bp, Homo sapiens
aggctcagtctgcggccaagactccgtcctgcaagaagttttcatgggctgagctgctgagttcagcctgggaactgaggccaacaagggagtctcctcg

SEQ ID NO: 135627 - DNA, 82 bp, Homo sapiens
gttcttccaagaaaccaacattcccaacagccaccaccaccaccagatggtgtctgtgacctttgaggatgtggctgtgaca

SEQ ID NO: 135628 - DNA, 100 bp, Homo sapiens
ctgcagagtgaagagaaaatagcaaacgatccagacggcagggagtgcatcaaaggtgtgaacacaggcatttgcatcaagtgtgggcttggcatctacg

SEQ ID NO: 135629 - DNA, 89 bp, Homo sapiens
catccagaagccgcggggcctcgaccctgtggagatcctgcaggagcgcgagtacagactgcttttggcttctggatgccctcctccag

SEQ ID NO: 135630 - DNA, 74 bp, Homo sapiens
taactcccatgtgcattctactgacgctattggaatcagatgcaaagatggtgttgtctttggggtagaaaaat

SEQ ID NO: 135631 - DNA, 102 bp, Homo sapiens
tggcggaggacgagctccgggatgctgtactccttgtctttgcaaacaaacagagagaagcgaagggcaatcattccttctcacttggcctatggaaaacgg

SEQ ID NO: 135632 - DNA, 100 bp, Homo sapiens
gacagggaccctacagtcttcgcccccatcctcaacttcctgcgcaccaaagagttggatcccagtacccagaaaccaggactggcttggtgtctcaagg

SEQ ID NO: 135633 - DNA, 100 bp, Homo sapiens
ggaatattaagtgaacttgacgttgatgtaaatgaagggtctctaatggagctacagggacatattggaagattccagccaccttgggtgttgaggttca

SEQ ID NO: 135634 - DNA, 95 bp, Homo sapiens
caaggtcaacaatcaccttttccacagatatgaaaaacagtagctccgtatcgaatacattgacaaatggatgtgtcatcaatggacatttggac

SEQ ID NO: 135635 - DNA, 83 bp, Homo sapiens
aggccaaaaccggcgtgaacaggagcttcatcgctcttggtggcagtagagaagagcatcacagaagttgctcaggagctgac

SEQ ID NO: 135636 - DNA, 50 bp, Homo sapiens
gcggcatcgccggcctcgctatgggctcacccacctcattggatctcctt

SEQ ID NO: 135637 - DNA, 50 bp, Homo sapiens
ccccggagaaaaagttgaagcgttatgaaagtccatcagcttgataatgg

SEQ ID NO: 135638 - DNA, 73 bp, Homo sapiens
caagagaggctaaaggaagaacaacagatggatcccttcaggtttgtaaaagaatggacttggtctgccagag

SEQ ID NO: 135639 - DNA, 75 bp, Homo sapiens
tgcgagtctgcggcccgcaggtgacggagctcacggtcttccacagcgcggcacctgtacctccggggtggcgct

SEQ ID NO: 135640 - DNA, 90 bp, Homo sapiens
gtcgtccaggagggtcgacaaggcaaagaacctgaagacgacccaaaagggtacctaggagtgtttctcaggagctatcagaaactatcc

SEQ ID NO: 135641 - DNA, 90 bp, Homo sapiens
gaaaatggcggacgggaaggcgggagacgagaagcctgaaaagtcgcagcgagctggagccgccggagaacaaaaagagcctggtagcct

SEQ ID NO: 135642 - DNA, 75 bp, Homo sapiens
cacattttggacctacaactcttagatcaactcttgcctatgggatgctcagtaaatggggagcaggagaaccga

SEQ ID NO: 135643 - DNA, 73 bp, Homo sapiens
agctgctttgaagacttagcagaggtgaagaaggtcattgtatatttaggtagagataaaacaatgcagttgc

SEQ ID NO: 135644 - DNA, 50 bp, Homo sapiens
ggctgccatctccttcccccgtatgtgcaggtgaaatttgtctgcattcg

SEQ ID NO: 135645 - DNA, 98 bp, Homo sapiens
tggatatgtctattctgaactcaacttctgaaatttacagaaacaaactacatctcaggtcctggaatcaagatgtgagaccaagaaattatttctga

SEQ ID NO: 135646 - DNA, 90 bp, Homo sapiens
gagatacctactcaggcggcagctcgggcaggggccgtacacggccttccctcccgcagtgcccgggctgcctccgggcctcccgccggc

SEQ ID NO: 135647 - DNA, 77 bp, Homo sapiens
gataataacataattcacagggatgtgaaggttcgagctcatcagctggttcttcctccctgtgacgtggtgatcaa

SEQ ID NO: 135648 - DNA, 50 bp, Homo sapiens
gagaattctggctccctgtaaggttaatttggagtggcccctggagtcag

SEQ ID NO: 135649 - DNA, 75 bp, Homo sapiens
tcttgtcgctgcagtggaactattggaaaggccttcactgcacaggtggatagatacttctcaagacatcacaca

SEQ ID NO: 135650 - DNA, 75 bp, Homo sapiens
caggacaacccagatgtgcaacaaagtgcgatgatcgcaccccctccctccctggcggagcccctgaaggagctg

SEQ ID NO: 135651 - DNA, 75 bp, Homo sapiens
actggaaatataggacatgcgtttgagatctactgtgagaattttggagagtaaaaggctgaaccttgttaaaga

SEQ ID NO: 135652 - DNA, 103 bp, Homo sapiens
caggaatctacatgacctgctattttcagatttctgaaatgtcaccttatcactcaccatctgctacctggatatgctgatgaccagtgaggagcgccggaag

SEQ ID NO: 135653 - DNA, 102 bp, Homo sapiens
tagggaaacctgggggctccctggacaactccgagcagggtttccaggcctgaggtgcccgccctggccccaggagaatgaaccagccgcagaggatggcgc

SEQ ID NO: 135654 - DNA, 100 bp, Homo sapiens
ccgcagggcgatcaaatggtcccggctgctgcagggcgggggcgtccccaggagccggacagcagagaagcctgtgttcttcccagccttcgcagccgag

SEQ ID NO: 135655 - DNA, 100 bp, Homo sapiens
cagcctggtgcagatcatctacgacgagaaccggaaaatgaaactgaagccgtggtcacgtgacaggacatgtagtatatagcaggctgccagcgactcc

SEQ ID NO: 135656 - DNA, 100 bp, Homo sapiens
gcggcggcgggagcttccgggagggcggctcgcagacaccattcgcttttcacccaagatgatttgatgtcttataaaactctgatgaaccatgatggct

SEQ ID NO: 135657 - DNA, 96 bp, Homo sapiens
ttttggaacacatccaggaaaagataactttcgacacacctgtagacgttcgccaggtaaagatatcagttttagagaatgtggcgtggagaaatt

SEQ ID NO: 135658 - DNA, 100 bp, Homo sapiens
ctacgaggtttgcgcctctgggcatgtagtctacacaggacctgagaatctgagaaactgcaggtgaaagaacttgtcctggacaacagtcggtcgaatg

SEQ ID NO: 135659 - DNA, 75 bp, Homo sapiens
tgcgccctgggacaggacctctgcaggaccacgatcgtgcgcttgtgggaaggcaggccagaaagcagacccagg

SEQ ID NO: 135660 - DNA, 83 bp, Homo sapiens
ctcggaaaccggtagcgcttgcagcatggtgtctgcttttggggcagagttttcatcggaggcatgcagagagttaggctttt

SEQ ID NO: 135661 - DNA, 82 bp, Homo sapiens
taaacatgcaatgaacccaaaagggaaaccatcttcatcggtactccaaggttctggaggcccatttgggagacccaaaacc

SEQ ID NO: 135662 - DNA, 83 bp, Homo sapiens
caactggttcaagaaccgccggcagcgcgacaggaacccctccgagacccagtccaaaagcagaaaaatatggctcaggagac

SEQ ID NO: 135663 - DNA, 85 bp, Homo sapiens
tgggaggagccgatactgagcttcttcctatttgccatggggtaaggtagccgaacgtggtacccaccatggtttgcttgctaac

SEQ ID NO: 135664 - DNA, 100 bp, Homo sapiens
ccgtctccttaacaccgaacaccaatttaagaagtgcaacatggccaggggctgcctctgctgcttgaagtacatgatgttcctcttcaatttgatattc

SEQ ID NO: 135665 - DNA, 50 bp, Homo sapiens
agatcatcgagcatttcaaacggctgatcagctgaccgaagaacagattg

SEQ ID NO: 135666 - DNA, 90 bp, Homo sapiens
cgtgggtgttccccggcccctctgagcaccagcacctgggcagctggtggaatttttgaagaaaatggaatctcgaggccccctttcgtg

SEQ ID NO: 135667 - DNA, 75 bp, Homo sapiens
aaaatgtcaacaaattgatggtgcacagccagaggacaacacatcacacacaagaaacagttgtgctcatgtgat

SEQ ID NO: 135668 - DNA, 99 bp, Homo sapiens
cggaaaacctaaccatgaagacttgaacttaatacagcaagaaagaccatcaagtttaccacttcacttaaaggacaagaagcgatttgaaaaagctaa

SEQ ID NO: 135669 - DNA, 90 bp, Homo sapiens
acagcagattttggtttaatatctgattgggacaacattcagacccatttccagtcatgagaggaaatgagtctcaaccagacagccagg

SEQ ID NO: 135670 - DNA, 100 bp, Homo sapiens
gaatccctttggtgtggacatctgctgccggaaggggtcccgaagccccctgcaggaactctacaacccaatccagctccaggccatgcccgcagccgga

SEQ ID NO: 135671 - DNA, 58 bp, Homo sapiens
agatgagcctcaagtgcttctgcattacacctcccagtgcaacgtcagcttaaagaag

SEQ ID NO: 135672 - DNA, 100 bp, Homo sapiens
agctggactatggcatctatgttatcaaccaggcagctgcagttgcactttcctccctgattcatgctttggatgacttagacatggtggccatagttcg

SEQ ID NO: 135673 - DNA, 75 bp, Homo sapiens
cggagctcccccaagagccggaaaggtggtccattatggctgacatgcaaaatctggtagaaagattggagaggg

SEQ ID NO: 135674 - DNA, 75 bp, Homo sapiens
ctgccctgtggcctcgctcctcggagggtgcaagaaagcctttgaggtgaaggtgtatgaaagtcatcataacag

SEQ ID NO: 135675 - DNA, 73 bp, Homo sapiens
tttggtttgaggaggctgaggagccaagcaggttgagtatctggtcaatgaaaagcacatctacctgctgcca

SEQ ID NO: 135676 - DNA, 100 bp, Homo sapiens
caaactttactttgcctcatttgaggagtgggaacaggcttcggcgaacacaaagcaaagcttcgaggcgcaccaggacgaggcagtgagcgtgacacac

SEQ ID NO: 135677 - DNA, 108 bp, Homo sapiens
cagattcgcagtggtcgcttcttctccttggttataactcgaaacgaactcatgctggaagaaactagaaacaccattacagttccagcctctttcatgttgaggatg

SEQ ID NO: 135678 - DNA, 74 bp, Homo sapiens
tcctatgatcatgcacacaagcagcctcccccactggcaggattgccatgagttgtggagtaagaaacggcgac

SEQ ID NO: 135679 - DNA, 75 bp, Homo sapiens
tcccagaagatgtcggagcccatagcagattccaactccacagagtgaccagagagaggacgtggctgaagacac

SEQ ID NO: 135680 - DNA, 83 bp, Homo sapiens
cttgactggtcttacattgctgcatcaagaaacccaagctgctgaggtgtggaaacaggaagagaactagaactggaagtaaa

SEQ ID NO: 135681 - DNA, 75 bp, Homo sapiens
gcttggtggatggtcacgatgtagttataggtgatgatgaacagtctacacagatggctgcaagttgggaagatg

SEQ ID NO: 135682 - DNA, 83 bp, Homo sapiens
ctgggatctgagcctatcgccctggcctggagcccccctttgtacctagcgaggcggctttgcacaaggtggacattcccagg

SEQ ID NO: 135683 - DNA, 75 bp, Homo sapiens
agacgcggtgggccgcccctccggtatggcctcacaagtcttggtctacccaccatatgtttatcaaactcagtc

SEQ ID NO: 135684 - DNA, 100 bp, Homo sapiens
caggccccggcagcgcctgggacaagagcccataggcagcatgtcatccatggaagtgaacgtggacatgctggagcagatggacctgatggacatatcg

SEQ ID NO: 135685 - DNA, 100 bp, Homo sapiens
ggaatcatggcggctgcgctgttcgtgctgctgggattcgcgctgctgggcacccacggagcctccggggctgaggaacccatttactgttacaccccgc

SEQ ID NO: 135686 - DNA, 75 bp, Homo sapiens
gacggcccggctgcagcgagcgctggacggagaggaaagcgatgtcatgggaacagacatgtcttggagaggtgc

SEQ ID NO: 135687 - DNA, 100 bp, Homo sapiens
tctttttgaaggcagtggagtcccgtatggcccaatcaacaacatgaagaatgtatttgcagaacctcagtcggccgtatactaacaaggtaattacttt

SEQ ID NO: 135688 - DNA, 83 bp, Homo sapiens
acaaggatgaccaggaatgggaaagccccaggttcaccctgaaaatgaagattggacctgttttgaacagtctgcaagtttag

SEQ ID NO: 135689 - DNA, 80 bp, Homo sapiens
aagatctaccttctggaagctactactacgtggtgcttggaaaggcgtccgagctgggccacagcctgaacgagaacgtc

SEQ ID NO: 135690 - DNA, 51 bp, Homo sapiens
cctctgtttggggagacgtccgccaagagtgttgcggagataggaacatgg

SEQ ID NO: 135691 - DNA, 90 bp, Homo sapiens
gtgtgaaggtgtcagaccacgagatcctggcagggactcagtggcctctgaggatgtggctgtgaacttcacacttgaggagtgggcttt

SEQ ID NO: 135692 - DNA, 101 bp, Homo sapiens
aagcccaaaggagccttcaaagccttcactggcgagggtcagaaactgggcagaatgtgaaagatgttgcagaagtgttccagaagtggctgaagatagaa

SEQ ID NO: 135693 - DNA, 98 bp, Homo sapiens
gctggtcctggccttgctgtcctccagctctgctgaggagtacgtgggcctgtacaaatttacatgtattggagaccagaccagaagcccttctgaat

SEQ ID NO: 135694 - DNA, 98 bp, Homo sapiens
gcagaggacgccggaacaccctggaagccgagaaatgtgcccttccgagaggccccggcgtactccaaccgccggcggcggccccccaacacgctggc

SEQ ID NO: 135695 - DNA, 117 bp, Homo sapiens
ttcttgcaaaccttgctttggattttatgtgctacagtctgcggaacggagcagtatttcaatgtggagcatgttggcagataaattgaacatgactccagaagaagctgaaaggtg

SEQ ID NO: 135696 - DNA, 82 bp, Homo sapiens
cctcggcttgcatttgtttctgctgaccgcgggccctgccctgggctggaacgaccctggagagcaagccctggaggttcac

SEQ ID NO: 135697 - DNA, 74 bp, Homo sapiens
aaagatgcaagacatgtagtaaaagtggatgggaaggtgatcgtgtgggattccttcaccacaaacaaggtgag

SEQ ID NO: 135698 - DNA, 75 bp, Homo sapiens
ggcgtactccaaagttgttcaggaacggagcaggagaaggaggcccggagcagggcggcctacatctctgcactc

SEQ ID NO: 135699 - DNA, 99 bp, Homo sapiens
ctcctttcccacctccagcctctccagagagacaagatggtgaaggaactgagcctgatgaagatgtcaagccctccaacatcctagtcaactcccgtg

SEQ ID NO: 135700 - DNA, 75 bp, Homo sapiens
cgccctggagctccgcaagggggagctgcgctcggcggacctgcccgcgatcctcatgatggagcagtccaagaa

SEQ ID NO: 135701 - DNA, 83 bp, Homo sapiens
tcttatactctagaatatacaaagacaaaaggagattctgatgaagaagttattcaagatgttcgtaatggacctgaaagtgg

SEQ ID NO: 135702 - DNA, 112 bp, Homo sapiens
cccaatgtcatcaccctgcacgaggtctatgagaacaagacggacgtcatcctgatcttggaactgtggagtttgtccatatgctcaatgctaccatgtgcgccactacccg

SEQ ID NO: 135703 - DNA, 100 bp, Homo sapiens
gaatgtggtatgctgacatttaaacaggacaaaacttggaggagacatcacagctttcccagatcgggaggaaaaatatggaatgtgttttaccgctgac

SEQ ID NO: 135704 - DNA, 98 bp, Homo sapiens
gccgaagcgcccggagcgggagcgagcggcgcggcccgtaagactttgaccccgacgcaggcttcagtgattgccgcggatcagaagcctgagcactt

SEQ ID NO: 135705 - DNA, 90 bp, Homo sapiens
acaaaggctatgaaaagaagccctattgtaatgccacctgtgagaatatgaacttctcttggaggaatgaatgcaaccagtgtaaggccc

SEQ ID NO: 135706 - DNA, 100 bp, Homo sapiens
aaattaactacccttgcagatctattccggccacccattgatttgatgcataaaggcagctttgaaacagaggttgtgcccagacatttccttcttccag

SEQ ID NO: 135707 - DNA, 74 bp, Homo sapiens
tcagaatgagctcaccagggagctgaaactcaatttttccactactcccaagggcaagtgtaccttgggaatta

SEQ ID NO: 135708 - DNA, 75 bp, Homo sapiens
gttggaccttccggagcttctcagaagacagagggttttcttttgaggtgtaccttgaaagacttttaacatacg

SEQ ID NO: 135709 - DNA, 75 bp, Homo sapiens
ccgacacaaggcagcttcccacagcaggttggacagttcacagttgctgatcatctgggctgtgatccacaaacc

SEQ ID NO: 135710 - DNA, 90 bp, Homo sapiens
ctgcgctttgagctactgggctgtgagctgaacgataatcaccagaatgggagtgaatgacttgtggcaaattttggagcctgttaagca

SEQ ID NO: 135711 - DNA, 80 bp, Homo sapiens
gaagtgcagcagaccccgaaactccccatccccaggatgtcaacctcagtccctcaaggccatacctggacccaacgggt

SEQ ID NO: 135712 - DNA, 50 bp, Homo sapiens
gggaactctgaacctcaataacgagagttgtctgctggttctcagcttga

SEQ ID NO: 135713 - DNA, 82 bp, Homo sapiens
aacgaccaagagggtgttcgactgctagagccgagcgaagcgtcactatcatatgacaaaggctttgccgcagttcatcttc

SEQ ID NO: 135714 - DNA, 90 bp, Homo sapiens
tgtgaaggacatcactaacgccttcaggaggaacccacacattacatcgggtgattcttctcggtcaaacctttttgaagatgcaacgag

SEQ ID NO: 135715 - DNA, 98 bp, Homo sapiens
ctgattacgaggatgtatctgtggcccttccaaataagcggcataaagcaattgagaattcaggcagcacgctggctcttctcctgaacttcctcgcc

SEQ ID NO: 135716 - DNA, 100 bp, Homo sapiens
gacaagactgaggatagtttagaaggatgcttggattgtctgcttcaagccctggctcaaaatagtgtgctgggcatcaaggtgaagatcatgctgccct

SEQ ID NO: 135717 - DNA, 100 bp, Homo sapiens
gcaacagcgagggcaaagagctggtggcctcaggtgaaaatcctcctcgccctctgactaatatgaatgacaccatggttagccacatgtcctctggagt

SEQ ID NO: 135718 - DNA, 90 bp, Homo sapiens
agaccaagaggcgggggctgcacttgacaaccagcatgccgagatgcctcccagtgcaacgtcagcttaaagaagcagaggagccgcagc

SEQ ID NO: 135719 - DNA, 98 bp, Homo sapiens
ggatcgcagcttggatggccacttacctgaatgaccacctagagccttggatccaggagaacggcggctgggtctcggcgcggaagatggccggcggc

SEQ ID NO: 135720 - DNA, 100 bp, Homo sapiens
ctttggttataaattatgatctacctaccaatcgtgaaaactatattcacagaaccagaggaaggggcattcagacgaaaactccaatgccaaaatcaaa

SEQ ID NO: 135721 - DNA, 75 bp, Homo sapiens
ttttggctcacaattatcctagagtgaggacttacacagctccgaattgattccttctttagattagcacaacag

SEQ ID NO: 135722 - DNA, 75 bp, Homo sapiens
gtgggtgatatttgcctttagtgcactcttctccttcacagtaaagtggctgaaactaattctgaagcaagccct

SEQ ID NO: 135723 - DNA, 97 bp, Homo sapiens
ccgggagcggcggcagcggcggcgcggaggcggctgaggtgcgagccggtgtgggccatgtttgaggattgccccagcattcagttctatgagtaat

SEQ ID NO: 135724 - DNA, 98 bp, Homo sapiens
actccccgctggacagcgccgacgtccgggtgcacgtgccacgcacgggggggccctcagcctcttggccttgaacgggctgttcatcttgattcaca

SEQ ID NO: 135725 - DNA, 76 bp, Homo sapiens
cggacactgaaagcagagaccatggagcttcttgtgactccttgagtgaactatgtgaaaataagcgtgacaatgt

SEQ ID NO: 135726 - DNA, 97 bp, Homo sapiens
agcggcctggcgccgaggcggcggtacgcaaggctggagccgcagcgggagcccccggaaccactcgttttgactattattttatcactctttgtga

SEQ ID NO: 135727 - DNA, 100 bp, Homo sapiens
tgatcctggaaccgttgattggagatatgcccttagttggagctttgtctatcttcttccttaggaaaccaacctgcctagagctggaacgttacctcca

SEQ ID NO: 135728 - DNA, 75 bp, Homo sapiens
ggaggctgaggaggcggcggcggagatctgggatctcaaagatttcatgagacaagctggggaagtaacgtttgc

SEQ ID NO: 135729 - DNA, 75 bp, Homo sapiens
cacggcgtacgccctcatggggaaaatctccccggtgactttcaggtgacttaagagattaaaattaatttggtt

SEQ ID NO: 135730 - DNA, 74 bp, Homo sapiens
caagacttcccgcaacatccactccttggaccacctcaaagtttaaagcctgcaccccacttatttgcccagct

SEQ ID NO: 135731 - DNA, 111 bp, Homo sapiens
gggaccggctgtatgattaggccacaatcttcaatgagtaaacatattcctcgggctgacgcacgaggcacacaggaaggaggtggagcaggtgtatctgcgctgtgcggc

SEQ ID NO: 135732 - DNA, 89 bp, Homo sapiens
caaaaattgttttttctacctgttgacgtgtcaagcactaactgttttcgtaacaccccagggcctgtaaggtttggtgtttccctttc

SEQ ID NO: 135733 - DNA, 75 bp, Homo sapiens
aagagctcaaagatttggtttgaatgtctcttcaatctccagaaaggcccggcagccatggcggtggaaggagga

SEQ ID NO: 135734 - DNA, 88 bp, Homo sapiens
tttgctggtgattacactattgcaaatgccagaaaactaattgatgaggtgagggcctgggacagacgcagcagactgggatatgcaa

SEQ ID NO: 135735 - DNA, 83 bp, Homo sapiens
attccagcccggccggggcctgcgggcgcccagagccgcgccgtccgcgccgcccgttctgggtcggcactcttcaccctccc

SEQ ID NO: 135736 - DNA, 100 bp, Homo sapiens
agctcaaacgcacgctggacgccaagccagagaatctgctgtactacagcctggatgaagactccaaaatcatgatctccgactttggcctctccaagat

SEQ ID NO: 135737 - DNA, 75 bp, Homo sapiens
attgctgcctacctgcccctcaagtgttgaagttggagttcgcgtggaggcctttgactgtcaggaatgggccga

SEQ ID NO: 135738 - DNA, 100 bp, Homo sapiens
cccccgcagcaccgctactcggagggcgagcggacctccctggagaaggttctctcaagtagtgctgccagtagtaccatcacagcactgtcacctggag

SEQ ID NO: 135739 - DNA, 75 bp, Homo sapiens
gtcaccgaaatccagggcatcccgggcgcggccagtggtgtcttcctggccaacacaagccatcagccccatgct

SEQ ID NO: 135740 - DNA, 75 bp, Homo sapiens
gtggggacagaaatctgactcctcgctggacgctgagagcaggaggaggcagcggaagaggatgctgaagcagag

SEQ ID NO: 135741 - DNA, 96 bp, Homo sapiens
gctggttcctgtgcctaacctcgacaggctttggaggagaagatacggaccacggagacacaggtgcttgtggcatctgcacagaagaagctgcta

SEQ ID NO: 135742 - DNA, 100 bp, Homo sapiens
agggcctgaggaccgagatgaaggcgccaccgaccgggatggaatccgacgtggtaggcccagagcagatactgtccgcgatttaataaatgaaggagag

SEQ ID NO: 135743 - DNA, 50 bp, Homo sapiens
ggagtgcatcaaaggtgtgaacacaggctggagtgcaatggtgcaatctc

SEQ ID NO: 135744 - DNA, 82 bp, Homo sapiens
caaggatttcagcaacaatgcctctgttcaaactcccagcgccctcacaaagccaatgctgaggagatgaccaagtaccaca

SEQ ID NO: 135745 - DNA, 75 bp, Homo sapiens
agccttgagctcccagtcgcaggtgaaatgacaatggatgctctgttggctcgattgaaacttctgaatccagat

SEQ ID NO: 135746 - DNA, 50 bp, Homo sapiens
gaggaaaacaacttcgagggcagagaagtgtttggattgtgagctatttc

SEQ ID NO: 135747 - DNA, 100 bp, Homo sapiens
taatgctgtttctgcttaagttggcaagacactccaagtttggcatgaaaggtatccatcacgaattgaaaaaattgactatgaggagggcaagatgttg

SEQ ID NO: 135748 - DNA, 75 bp, Homo sapiens
gcgggagccggcgtgggcggcggcaacggggcactgacctgggtgaaaacctcggatcaattctcagctggtggc

SEQ ID NO: 135749 - DNA, 100 bp, Homo sapiens
gtggttaaagccatattggagtagcgaggaatctgattccaagcaaaaaccaggtaagaatgattgatgttggctgatattggagtgctcattcacatga

SEQ ID NO: 135750 - DNA, 75 bp, Homo sapiens
atttatgtcatcaagaagaatgacgatgctgtcccctttcctccaacccaacggcttactttcaaggaagtattt

SEQ ID NO: 135751 - DNA, 100 bp, Homo sapiens
ggtcggctacagggagggacccaccgtagagactaagtgtgaagcctcagtttaggtcatctggtggttcagaacactcaacagagggctctgtatcctt

SEQ ID NO: 135752 - DNA, 75 bp, Homo sapiens
tgcttggcaaaatcgagcgggccattgtgtgaagcagtattctggaaagtttttctaagactagtgaagaactga

SEQ ID NO: 135753 - DNA, 139 bp, Homo sapiens
gccccgtcagaggtcagacccattgcacttcagtatctcaggcggcaccctgtccccgaggaggggaccatgacacagtgctgacctcgctatcaaatacccaagttggatgttgctgccacagatcctgtgggctgag

SEQ ID NO: 135754 - DNA, 100 bp, Homo sapiens
aagggtgcaaagtgggacgcggcacctacggtcacgtctacaaggcgaggcggaaagatgggaatttagataatgggctgtgtgcaatgtaaggataaag

SEQ ID NO: 135755 - DNA, 100 bp, Homo sapiens
aagcacattaacatcagcttccacaggttcaaagtttccttctgcacttttggcaaggaatgccgccccacatgctgcctgtgctgggctcctccacggt

SEQ ID NO: 135756 - DNA, 87 bp, Homo sapiens
tgatcatcatggacacagttttgacagtaattcttttgggccggagcatattaatgaaaagtgccataaactgaaaaaccaaacatg

SEQ ID NO: 135757 - DNA, 75 bp, Homo sapiens
gttcgtgctgaataagaagaacaaactgacgcagagtaagcctacgaggacaagcagaaactcaagcggaccgag

SEQ ID NO: 135758 - DNA, 72 bp, Homo sapiens
tccttgctggtgcatgcgtcgtcggcctctgggcagcaggcaggtgacagcagggacatgtctcgggagatg

SEQ ID NO: 135759 - DNA, 101 bp, Homo sapiens
agctgctgccgcgccttggagtccggagtaacttggccaggctggccccgagcggaactggagaaagctgaggtatggtttgaagtggtgaacatggattt

SEQ ID NO: 135760 - DNA, 75 bp, Homo sapiens
tgacagaagaggaagcagccctctacattcaatccttctggagagcctgtgtgacacctggatttcattagcatc

SEQ ID NO: 135761 - DNA, 85 bp, Homo sapiens
gcaactgttgaactcagctgcctgtaggctcaggctgcacgaagaaaaggttattaaagatagacgtcatcatctcaagacctac

SEQ ID NO: 135762 - DNA, 74 bp, Homo sapiens
agtaaactccttggatcattggacgaggaactgtggctgcaccatctgtcttcatcttcccgccatctgatgag

SEQ ID NO: 135763 - DNA, 83 bp, Homo sapiens
cagcagatgaatggacaccttgaagcagaggagcagcaggaccagaagaagcctgagaagatgatgcacagatagagaggcac

SEQ ID NO: 135764 - DNA, 95 bp, Homo sapiens
ccaggcatcctactatgcttcctgagtgcttctttcttggagctgaccatgatatgaagagcattttaagaggtgcagcctctggaagtggatca

SEQ ID NO: 135765 - DNA, 88 bp, Homo sapiens
aacaaagaaaaacatactccagaattcctaatagaacagttcgtgctggccgtgggcagcgccgtctttgatgccatgttcaacgggg

SEQ ID NO: 135766 - DNA, 82 bp, Homo sapiens
cacggactgcaagcgaggcacttgctaactcttggagatgcgctggcagctgagcgagcagctgcgctgcctggagctgcag

SEQ ID NO: 135767 - DNA, 75 bp, Homo sapiens
tgcaccacaaggtgtacgatttgaccaaatttctggaagagcatcaagatggtgctcatgtggaccagtggtgac

SEQ ID NO: 135768 - DNA, 50 bp, Homo sapiens
gttttgccggaggagcccctcaggccatcctccatgaaatgatggaagaa

SEQ ID NO: 135769 - DNA, 75 bp, Homo sapiens
cgggaaggggcacgggcacccccgcggtccccgggaggctagagctctctgaacaacggggcccagagctgatgg

SEQ ID NO: 135770 - DNA, 98 bp, Homo sapiens
cgggaactgctgacgcttgatgagaaggacccacggcgtctgttcgaagcttccacagcgcggcacctgtacctccggggtggcgctggggttggctc

SEQ ID NO: 135771 - DNA, 109 bp, Homo sapiens
tggtgagcacagcacttgacccagacatgatccaggccctggaggacacgcatgtttctccacagtcgaactcctctaggcccacctgtgcccgtcacctcaccttggg

SEQ ID NO: 135772 - DNA, 99 bp, Homo sapiens
aggaggagctggagacagattgtaggaccgagcgcgggcaggcgggaggcaacggagctaccagccggtctcggcgcggaagatggccggcggcgtgga

SEQ ID NO: 135773 - DNA, 76 bp, Homo sapiens
ggggagcggagccatggcctccgatgaggaaattgaggcacagagattaactaatctgaaccagataatgccataa

SEQ ID NO: 135774 - DNA, 98 bp, Homo sapiens
attcccccactggcggcggtggcggaggtggcagtggcggtaccagaatgcgaggccctagactggagctggttacagacggaagaagaagagcacag

SEQ ID NO: 135775 - DNA, 82 bp, Homo sapiens
cgcatttgtgggcgcgcggcacgcagccgggaggccgaggactcggagttcacctgcaggatagaatttttgcggcatttga

SEQ ID NO: 135776 - DNA, 100 bp, Homo sapiens
ggccaccccctggtcctctgccctcgcgccccgctagggccagtaattcgccaaaatgacgaacacaaagggaaagaggagaggcacccgatatatgttc

SEQ ID NO: 135777 - DNA, 97 bp, Homo sapiens
tttcagttgagctgaccagctctctcttcagaacagagccaatggcttggaatgagatttgcctgcaatggataacccagtgtttttggaattactt

SEQ ID NO: 135778 - DNA, 82 bp, Homo sapiens
ggagtatgaccacatgaatggatccaggctcagtagatgaaggcgtttctgagggcttgcctacacttcaaagcacgtctag

SEQ ID NO: 135779 - DNA, 100 bp, Homo sapiens
ctgcctccgggcgcctgggcttcaggatgaaggaccgtctggagcagctgaaggccatggtatagctgcatgctgggaaagaaatgcagcctggcgcctc

SEQ ID NO: 135780 - DNA, 100 bp, Homo sapiens
atgcctactacagcaacattgccaccaagacaccccttgaccagcacacactgcaaggagatcagtttcctattctgtgaaacagaagacattgtgatgg

SEQ ID NO: 135781 - DNA, 80 bp, Homo sapiens
gctactactacgtggtgcttggaaagtttggtgccctggttgtcagatgttggaaagcagtaggacggaacatactcttc

SEQ ID NO: 135782 - DNA, 89 bp, Homo sapiens
tccgcctcccgattgactggcctgcttggcaaggcaagtagcggcggcgcttcaaggttcgtgctggccgtgggcagcgccgtctttga

SEQ ID NO: 135783 - DNA, 76 bp, Homo sapiens
ctctgaggtctcctccatcaactccgacctggagggttattttggagctgttggagcactccttgagctgttgaag

SEQ ID NO: 135784 - DNA, 83 bp, Homo sapiens
ggcactatgtcgtccgaggcccagagatgaccccttatgaagacctcctgccccccgaggtctgcagtctcctgaacccagca

SEQ ID NO: 135785 - DNA, 75 bp, Homo sapiens
acagaaaatcggtgaagagaggttttgaattcacgcttatggtagtggcatacatctgtggatggatatactgaa

SEQ ID NO: 135786 - DNA, 75 bp, Homo sapiens
cagggaataggagctggggagcccttctgcgccacaggcccagcttatactctacctgaaggactcccctgacaa

SEQ ID NO: 135787 - DNA, 90 bp, Homo sapiens
tagtatcttggccagggaactcaaacagcagatgcaggaagccagttgagggaagttctccatgaatgtacgtcacaatgatgatgaccg

SEQ ID NO: 135788 - DNA, 83 bp, Homo sapiens
caaaggctttctcgcttgtcaccttgccatgtggaagaaactggttgatgcgatgaagagagttgaagaaatcaaacagaagc

SEQ ID NO: 135789 - DNA, 98 bp, Homo sapiens
tttgcaccacaaggctcaagagtttgacattggagtttattttgaagcaaatgggcatggcactgcttccagttgtgcagctctggaaatgccaatac

SEQ ID NO: 135790 - DNA, 101 bp, Homo sapiens
tcgtctccctgtacgccgagggctccgtcaatggcttcatcagcactttggggaatgtatcctgtcaggtataatgtcagtgaatggcaagaaagttcttc

SEQ ID NO: 135791 - DNA, 98 bp, Homo sapiens
gaacttcgttgcttgcttgcctgtgcgcgcgtgcgcggacatggcctcaaacgttgctgatagtccaactccaccgccaccacctccaccagatgaca

SEQ ID NO: 135792 - DNA, 76 bp, Homo sapiens
cggggttcggtggcctctagtgagatctggaggtcaaaatgcagatcttcgtgaaaacccttaccggcaagaccat

SEQ ID NO: 135793 - DNA, 75 bp, Homo sapiens
gaggcggcggcggcggcggggatcgtctccggcagtgagcgagtgctgtgctttcatgggcctcttctttatgaa

SEQ ID NO: 135794 - DNA, 100 bp, Homo sapiens
cttggtctcaaagggaacttggaaatgacattggcatccagattatccactgcagatcttagtaagagccctaagaccatgaaaaagctgctgcccaagc

SEQ ID NO: 135795 - DNA, 100 bp, Homo sapiens
tcttctgccgcaccaggctcatcctgtccatcgtgtgcctgatgatcacgcagctggctggcttcagtggaccaggctgtgcttcctggaagtggtatta

SEQ ID NO: 135796 - DNA, 75 bp, Homo sapiens
ggttccatctcccaacttgtccatcattccaaaatatgcccggtgctatccgcccagctgctcctagaccaccat

SEQ ID NO: 135797 - DNA, 101 bp, Homo sapiens
cggcagcccaccgccgccttcttggcgcgaccccaacccagccccagggtccctgtgaaggtgaccaacgtcaaggatggcaccacccaccagacctcctt

SEQ ID NO: 135798 - DNA, 75 bp, Homo sapiens
ctggattgtgtccacatgttgctgcaaatgggtgctaatcacaccagccagagacagagtcttgctttgtcaccc

SEQ ID NO: 135799 - DNA, 97 bp, Homo sapiens
aagagccatgggtcctcgacctgcagggagcagaggggacagaggcaccaaggacctccaagacaggtccttgtcatgcccagcctcagaactcgcc

SEQ ID NO: 135800 - DNA, 75 bp, Homo sapiens
cggcagcggagggacggcagtctcgcgcggtacatgtcccagagcaagcacacggaggcccgggagctcatgtac

SEQ ID NO: 135801 - DNA, 98 bp, Homo sapiens
ctcagagcggtatccctgtctcagcgaagtggtgaaagagcatcagagttttccgtctgatgaaggttggccatttgcaaagtatcttggagcttgtg

SEQ ID NO: 135802 - DNA, 101 bp, Homo sapiens
gatgacaaattacgaaagtgctcccccatccccacagtataaaaagagttaaacatgaagtttctggagagacagtggtatttcaagggggagctcttggc

SEQ ID NO: 135803 - DNA, 90 bp, Homo sapiens
atctattatcgtttcaacacggtctcgaaggccacattgcaggagatcctgccggaggtcctcaaagccgacttgaatataatactcagc

SEQ ID NO: 135804 - DNA, 101 bp, Homo sapiens
ggcgaagatcgccaagactcacgaaggtaaacactacacgtgaagagtggtgaaagggaacattgattactgaagtgccctggagagggaaagcactggtc

SEQ ID NO: 135805 - DNA, 75 bp, Homo sapiens
tcgaattctgcttcaagttcccggctcccaggtttattctcccatagcatgtgtgtaaacaggaacatcgataag

SEQ ID NO: 135806 - DNA, 82 bp, Homo sapiens
ctatctgccactctcagaacttcctctctctcctcgctcctctctgctgagccaggacactcccagttgccgggatgacctg

SEQ ID NO: 135807 - DNA, 50 bp, Homo sapiens
ggctgctattgaaagagagtatgcacagggagggcaatgagccaggggag

SEQ ID NO: 135808 - DNA, 100 bp, Homo sapiens
gagagtgaagatgaagatgaggagggagctacagcgttgaacaaccacagctctattcccatggacccaggcctcaggcccaggcccaaggccaagtgag

SEQ ID NO: 135809 - DNA, 95 bp, Homo sapiens
gccaggagcatcctgaagctgacccaggtaggaaacactactatgaagtatcctgtcatgaccaagggttatgcagggtcgggtggtctaccatg

SEQ ID NO: 135810 - DNA, 101 bp, Homo sapiens
gggtggcttacagacgctgccagcatcgccgccgccaggattttttatcaagcagaaatgcatcgaacaacgagaatcaagatcactgagctaaatcccca

SEQ ID NO: 135811 - DNA, 75 bp, Homo sapiens
cgtgttccaagaactgcctgtgcgccctcaacctgctttacaccaaaacgttgtgtgacgtgatcctcatggtcc

SEQ ID NO: 135812 - DNA, 100 bp, Homo sapiens
agtggaaggagtacagggaagtctataagctttgcaacagaattacagagtatgatcactgtgacttctgccgtgttcaccgtgggagacaacgtggttt

SEQ ID NO: 135813 - DNA, 100 bp, Homo sapiens
taggagatggctacgtgatccatctggctcctccaaaccccaccaacaactgaacgctttggtcaggctgctacaatggaaggaattggggcaattggtg

SEQ ID NO: 135814 - DNA, 82 bp, Homo sapiens
ggccgccgagccctacgagaccattgccttcaagttccagggtctccctccactgctgtagtaacccgggtccggggcctcg

SEQ ID NO: 135815 - DNA, 82 bp, Homo sapiens
tctccagcgggcctggactgtgggctggtgtgtggaactggcccggattgcatttctacaaggcgaaagaaaaggtcaagag

SEQ ID NO: 135816 - DNA, 100 bp, Homo sapiens
gaggggctgagagacggcggcggccgaaagcggagagatgctgggcgtggcggccgggatgacccacaggggaaagcaagatagtttcatttggatttgg

SEQ ID NO: 135817 - DNA, 73 bp, Homo sapiens
ggaaactaggaagaggaaattaactatctgtacttataagatgtgttcagagcaacattgttttgttgacaca

SEQ ID NO: 135818 - DNA, 75 bp, Homo sapiens
ctcaagatggcgtgcttgttggagaccccaatccgcatgagcgtcctttcgatctgactgcagccatgagcagca

SEQ ID NO: 135819 - DNA, 77 bp, Homo sapiens
gacaagggaccatcttgactgtccatccaagtcagaaagcaacattgaatgcagaagaaatggcggacttctacaag

SEQ ID NO: 135820 - DNA, 90 bp, Homo sapiens
cagggactccacggccagagccctggatgtcatttggaaaaacactagagacagacggctggcaggaatcccagtcagaagttccagcct

SEQ ID NO: 135821 - DNA, 80 bp, Homo sapiens
ctggctcagcggggccggaacatggctgcgtccggtctgcaaaatgatgcttcaacacccaggccaggtctctgcctcgg

SEQ ID NO: 135822 - DNA, 74 bp, Homo sapiens
gctggctgtcctgaaatattataagatggatgagcagattagactgatggaccagaacctgaagtgtctgagtg

SEQ ID NO: 135823 - DNA, 75 bp, Homo sapiens
aagcatggagttggctaatggatgctgacgaagttatacggaagcgtctcctcattgatggagatggtgctggag

SEQ ID NO: 135824 - DNA, 100 bp, Homo sapiens
ctccagggccctgcgccttgctccttttgtctaccttcttctgatccagacaggctgtgggcagaatcctgttagacaagccagtgtgggtgcaggaatt

SEQ ID NO: 135825 - DNA, 84 bp, Homo sapiens
caagaagccggactacaaggtcgcctacgtgcagctgggggatatgagactttctactcggaatatcctgagtgttgcgtggat

SEQ ID NO: 135826 - DNA, 105 bp, Homo sapiens
ctgggtttgaacggaatgctggagtcagtggaagacggagctggtcggcccgaaggtgagaagccctaccactgcaactgggacggctgcggctggaagtttgcg

SEQ ID NO: 135827 - DNA, 101 bp, Homo sapiens
cggcgacaagggtgttcccgaactagagtggggttcaggataagtttgaggtgctgaattacacaagcattcctatctttctcccggaagtcaccattgga

SEQ ID NO: 135828 - DNA, 71 bp, Homo sapiens
gccgcttggaaagtgcagccttctacaggcccgacaacaagctcaaatacgtcaccaaatggcagaggaca

SEQ ID NO: 135829 - DNA, 96 bp, Homo sapiens
atgaacaacttttgcagacagaaaaccttcctgcacaagtaaaagcaactgtattgcaacagttaggtttacaggtacatacattacacccctatt

SEQ ID NO: 135830 - DNA, 50 bp, Homo sapiens
caacagctagctttattgagtgggtctatgttaacaatgaatgggcaacc

SEQ ID NO: 135831 - DNA, 48 bp, Homo sapiens
tgtgcctgtaaaagaatacccagatggggcagctggcattttatgcta

SEQ ID NO: 135832 - DNA, 83 bp, Homo sapiens
gagaaagagctctctatacactttgttcccgggagctgtcggctggtggagggggatatgagactttctactcggaatatcct

SEQ ID NO: 135833 - DNA, 100 bp, Homo sapiens
ccgagcctgggaggccggccggtgccagcacctttcggcttctgagacggcggcagcagcggcattcaggagtgtacctcacagccttctaggatctcca

SEQ ID NO: 135834 - DNA, 88 bp, Homo sapiens
agctgccagggccggacacctaggctgagccctcagtatgaaaactgcctccgaaagttctataagcaccaaaacactgaagttgtac

SEQ ID NO: 135835 - DNA, 50 bp, Homo sapiens
cccggtgcagctagaagtccatatcgaatggctggtgctccagacccctc

SEQ ID NO: 135836 - DNA, 83 bp, Homo sapiens
ctgccctctgaggagatggtcatgacagacttcccaagtaagaagcggaagaggagccgctggaaccaagacacaatggaaca

SEQ ID NO: 135837 - DNA, 100 bp, Homo sapiens
tcaacctttcaggacggaacccccagaaacaggcccggacctcctcctctaccacccccaatcgaaaggccacatccacgtcctccgagcctacatcaag

SEQ ID NO: 135838 - DNA, 87 bp, Homo sapiens
aggctctttgaagttgggttcaggagtgtagaattggcaaagttattgccagcttcctgctgaaacagctttaagagaatttcaaag

SEQ ID NO: 135839 - DNA, 75 bp, Homo sapiens
atgttcatagcctctatggatacagcatggctatagccacagagcagctgagactcgggctgagtttgcggagag

SEQ ID NO: 135840 - DNA, 51 bp, Homo sapiens
aaggatttgatgctcatctgttggagttggcaaacatgaattgactgggca

SEQ ID NO: 135841 - DNA, 90 bp, Homo sapiens
caccatccgcgaggtggcggtgctgaggcacctggagaccttcgagcaccccaacgtggtcaggggactttgtgcaactgcctgtgcccg

SEQ ID NO: 135842 - DNA, 90 bp, Homo sapiens
cagccttcagggagcgtggagacagacagggtctcactttgtcacccatgctggagtgtagtggagtgaacttagctcactgcagcctag

SEQ ID NO: 135843 - DNA, 97 bp, Homo sapiens
agatccgagctcgccatccagtttcctctccactagtccccccagttggagatctgtatgatctcgtgaaaccttgagagaaactgaatgacgaatg

SEQ ID NO: 135844 - DNA, 100 bp, Homo sapiens
ctgataatcataaaggcaattcaaccctttctgtgccaaagagatgtgatgcagatgctcctgaagaacaagtaagaagtttgcgacagagcactattgc

SEQ ID NO: 135845 - DNA, 50 bp, Homo sapiens
gctaaacacgtggaaagaatcaatttgggatacaaggcagatccaaccat

SEQ ID NO: 135846 - DNA, 82 bp, Homo sapiens
aaggacttacgacgggagatcagctatgccattaagaacatccatggagtcaggaccatgaatggcacctacaacacctgtg

SEQ ID NO: 135847 - DNA, 100 bp, Homo sapiens
gctcatatgacattaacagacaagacacttttcagaaagacagcatcccttcgtcagcagcatcaccagtaacaaggctctgcgggagctggtggctgag

SEQ ID NO: 135848 - DNA, 100 bp, Homo sapiens
ccagcagcctgtgggatttattattttgaagtaaaaattgtcagtaagggaagagatggggtgataaaagaaaatgtggctgaagttacccgaagttcag

SEQ ID NO: 135849 - DNA, 102 bp, Homo sapiens
agatatgccaaatttgttaaagagaggatagaaattgaacagaactatgcgaaacaattgaggagctatcgaaaaaccttgaactgagtactaacagtttcc

SEQ ID NO: 135850 - DNA, 75 bp, Homo sapiens
gaaagtccaagctcgtggtgggtggaaaagtgttcgccgaggataatctacaggggtacaaaacccaaaacaaat

SEQ ID NO: 135851 - DNA, 90 bp, Homo sapiens
ggagtttgatgaggagcgagcccaggattttggcattagagaagctcggtgctgtcttcaatcaagtagccttcccactgcagtacacac

SEQ ID NO: 135852 - DNA, 82 bp, Homo sapiens
acctggccatcgccctgcgcaccaacgcccaggaccagttcctgctgaagcagatgacagtcatgtccctttccagggacct

SEQ ID NO: 135853 - DNA, 75 bp, Homo sapiens
tgactttaaaactgaactaagtcaatctgatatgtttgatcaggcctgaattattggaacaactttggaaagcca

SEQ ID NO: 135854 - DNA, 100 bp, Homo sapiens
acaacatttgttgtctgtaatgaatgtggaaatcgatggaagctctattatcaagtcctaaattttggaatgattgtctcatcggcactaatgatctgga

SEQ ID NO: 135855 - DNA, 90 bp, Homo sapiens
tatccaccccatttggcgtggcggccatctggatcctggactccgtcgggctccgtgcggcggagaactacgatgacccgcacaaaaccc

SEQ ID NO: 135856 - DNA, 75 bp, Homo sapiens
ggcggccacgttcccgctgcagggggatatgagactttctactcggaatatcctgagtgttgcgtggatgtaaaa

SEQ ID NO: 135857 - DNA, 100 bp, Homo sapiens
gaaaaagaactgcctcctgaactccagataagtccccagaagaccatgtctgtgttgagctgtatctgtgaagccaggcaagagaatgaggctcgaagtg

SEQ ID NO: 135858 - DNA, 100 bp, Homo sapiens
ttttgccttcatgatggacctccttatgcaaacggtgaccctcatgttggacatgctttaaataagcattgcactttgactatggaaacagaggctattg

SEQ ID NO: 135859 - DNA, 90 bp, Homo sapiens
tttaaacttaaggaagattgctttggaaggagcaaatgtaatttataaacgtgatgttggagaccctgatgctcccataagacagaaaat

SEQ ID NO: 135860 - DNA, 100 bp, Homo sapiens
cattaacggaccttttaccatgaatagttctactccttctacaggtgtgtatgtgagcgtcaccctggacccacagtcggccagtgggtacctgcagctg

SEQ ID NO: 135861 - DNA, 98 bp, Homo sapiens
tgtgacgtgaatcacgctacactggcggagaacgggctcggttcctgcctacactgtggccctgaacctgccctcccatcagtgtatctgccacttgg

SEQ ID NO: 135862 - DNA, 100 bp, Homo sapiens
tcagaagatcaggtacacaaatgcacgcgacaggaaccagctcctgagaaccatgtctatgcccaaaggtagagttctggataaaaacctggatgaggaa

SEQ ID NO: 135863 - DNA, 100 bp, Homo sapiens
ccagaccagctcggctacctggtactgagtgaaggtgcagtgctggcgatggtagtgaaaacctttatggatatggatcaggactcagaagatgaaaaac

SEQ ID NO: 135864 - DNA, 101 bp, Homo sapiens
ggagcgggcggctgagacaaaggcgacgacatccacgacagcgatggcagttccagcagcagccaccagagcctcaagagcacagccaaatgggcggcatc

SEQ ID NO: 135865 - DNA, 98 bp, Homo sapiens
ttcgtgggtgcctggaggcaggtgcggaggtcaaggtcagcatctcctcgacgatcaagatctatctctcttcgtagatcaagatcagcttcactcag

SEQ ID NO: 135866 - DNA, 50 bp, Homo sapiens
gagaccgggaagccatcgtggcaggtcaccttccgcaaccctgtcattga

SEQ ID NO: 135867 - DNA, 100 bp, Homo sapiens
aagttccgaatagggatgaggcatacgtggtgacggccctgctcgggaggccctccagtctctgagccagcggcttcgggtgcaggagcaggagatggaa

SEQ ID NO: 135868 - DNA, 125 bp, Homo sapiens
gtagaaattcaaaccctagtgaataaagccaagagagaccttggagtaattcgtcgacaggttgaaaggattgttgacaaaaggaaaaataaaaaagggaagacagagtatttggttcggtggaa

SEQ ID NO: 135869 - DNA, 100 bp, Homo sapiens
caaagaaggagccagctgtacttgaactggagggcaagaagtggagagtggaggagatgttaaagtaacccatcttgcaggacgacattgaagattggtc

SEQ ID NO: 135870 - DNA, 82 bp, Homo sapiens
ttaacgaatggggttgtgatggcccaggttcttcaaaagatggtgatcagcccatgacctaaacctccagacaaaataaaac

SEQ ID NO: 135871 - DNA, 80 bp, Homo sapiens
ccgcagccatggcaaaaagctaccacctgccagtctgaagcaccgagatggccaaaaagcaaatggatttccacctgaca

SEQ ID NO: 135872 - DNA, 100 bp, Homo sapiens
ctcataggagttcccgctgacgctgaggccttaagtgaaagaagtggaaacacccctaactctcccaggaatccttaccagagatccagaaagaacatcg

SEQ ID NO: 135873 - DNA, 83 bp, Homo sapiens
aggtggatgtgacccaaggagagtgctacccggtgtactggaaccatttccaccaagaaaaatggatctatgttcacaaagga

SEQ ID NO: 135874 - DNA, 73 bp, Homo sapiens
acatttcactgttacctgaaagagcaatattacaggtgctggatagtttactagtccagtatggagtggtgga

SEQ ID NO: 135875 - DNA, 100 bp, Homo sapiens
ccagggtgtgcggagcttccctgtactgcagccaaggtgacaatctccaatagacttgtgtcttcaccttgctgcattgtgaccagcacctacggctgga

SEQ ID NO: 135876 - DNA, 75 bp, Homo sapiens
cgtttgggcaaagtacttgttcaaattattctgtaacaagacttcaagttccttgactcattctgaatgcagagc

SEQ ID NO: 135877 - DNA, 100 bp, Homo sapiens
acgagacgtgtgctacatacgggctgaatgtggagagggtcttccaggacggatattaccttccaaatgatgatggagaattttatcagttctgttacgt

SEQ ID NO: 135878 - DNA, 100 bp, Homo sapiens
cagcccattccagtctcgacaacagcgcatttcccctatatgacgcacccttcagtacaagcatcagctggaggagaccaaaaaggaaaagagaaccaga

SEQ ID NO: 135879 - DNA, 100 bp, Homo sapiens
ctcaggctcaaggggtcctcccacctcagccttcctagtagctgggaccacaggtgtatgccaccacacccaggtccggtttatcactaaaatatggcat

SEQ ID NO: 135880 - DNA, 98 bp, Homo sapiens
tcaactcagcgatgacatccctttccgagtcaactggcccggcaccgagttctctctggaaggaatgcagctcatttcagaaaagcctgagacggaag

SEQ ID NO: 135881 - DNA, 100 bp, Homo sapiens
cgggagtctgcggtcgttccctcggctgtggaccgggcggcacgcacgcggtgcagggtaacatggcggatgcggaagctaacaggcctcacctcttcca

SEQ ID NO: 135882 - DNA, 96 bp, Homo sapiens
tgtaattcttaatcagcctttggacaactattttcgtcatctttggaacaaagtgacccccatctcactgtggaagatgcaacagttgaaagaaat

SEQ ID NO: 135883 - DNA, 75 bp, Homo sapiens
cgagcagaggcttaaggtcttcagcggggcgctccaggaggcactcacaggatgctataaaatcaccacggtctt

SEQ ID NO: 135884 - DNA, 99 bp, Homo sapiens
aaaatattctgatgaaagcaagcattgtagaacaccattgggcagcttattcaagcacgtaaatgtgaattggtctctaattaacagaagatggcaaag

SEQ ID NO: 135885 - DNA, 75 bp, Homo sapiens
caaggtcactacagaattagcccaagcagattcctcccaggaccctaataggagtattcataccagcagcagcag

SEQ ID NO: 135886 - DNA, 82 bp, Homo sapiens
aatcaaccggtcaggctggacgtgcacgcagcccggcgggaggataaagaccaccacgagctccacgcaggagatcggtgag

SEQ ID NO: 135887 - DNA, 78 bp, Homo sapiens
aacagcgcaacagctgagtcaggcactgggtcaggatatgaatatcactgggcagatggtactaatattaaaaagcca

SEQ ID NO: 135888 - DNA, 100 bp, Homo sapiens
ctgatcacctgtctggagcaaggaaaagatccctggaatatgaagagacacagtatggtagccacacccccaggttatggaggttttgatgactatggtg

SEQ ID NO: 135889 - DNA, 90 bp, Homo sapiens
ccattcagagtgtaaaaggaaagtggaatgcagtagccctctgggcctgggatattgtggttgataactgtgccatctgcaggaaccaca

SEQ ID NO: 135890 - DNA, 100 bp, Homo sapiens
ctacaatgtcagtctccgggctctgtcttcggaacttcctgtggtcatctccctgacaacccagataacagggactttcagttaccttgatgatgtccca

SEQ ID NO: 135891 - DNA, 98 bp, Homo sapiens
ggcgctgtgtcgagggcgatccccccaaagcagcgtcccgtgctaaaggtacaagaaaattccccaggacacagagctggtttggagcctttctttga

SEQ ID NO: 135892 - DNA, 100 bp, Homo sapiens
agacagcagagccaacctcatctggaggaagtttgtgtgtcccggcatcaatgtgaaatgtgttcaggaagcaatgaggctccccaagaacacacctgag

SEQ ID NO: 135893 - DNA, 100 bp, Homo sapiens
tccaggctgatctcaaactcccacggtcaagcgatctgctggcctcggcctctcaaggtcccttcaataatcaggagatggcagaatggtttcaggcggg

SEQ ID NO: 135894 - DNA, 100 bp, Homo sapiens
gagaccgcgaggccctgatggcctctgggagtggtggcccgctgcaagcagctgatctgtgaccccagctacatcccggaccgtgtgcggaaggctggcc

SEQ ID NO: 135895 - DNA, 83 bp, Homo sapiens
aaaagacttattgatctccatacaaatgttgccactgctgttttagaacatataaaggttctgtacagagtaatgagatgtgt

SEQ ID NO: 135896 - DNA, 75 bp, Homo sapiens
tcagggccacagccccaacctcacaggaaacagtcctcctgcccctgctcgagtcttgcagtgtgcggcccgacg

SEQ ID NO: 135897 - DNA, 90 bp, Homo sapiens
cttcgatctgcttctgatgaagttcttgatagtccacaatgggtgaaccacagcaagtgagtgcacttccaccacctccaatgcaatata

SEQ ID NO: 135898 - DNA, 100 bp, Homo sapiens
ctcccctctcaggacaacccagatgtgcaacaaagtgcgatggttcatgatcaagagggcccaaggacggaagcgctttgggatgaagaattttaagaag

SEQ ID NO: 135899 - DNA, 100 bp, Homo sapiens
tccagttctccctggattccaggaacaccatctccttcctcgtcccttccatcccagggaagggatcagctttatttcttggaggcaatgaagtgaagag

SEQ ID NO: 135900 - DNA, 71 bp, Homo sapiens
acccactgcagagtgctgaagacggggtagccacgaggtcagaatggcggcagtggagcatcgtcattctt

SEQ ID NO: 135901 - DNA, 82 bp, Homo sapiens
gcatggtggtctggggcaacgcggaagcgtcagcctcgagtttgaccagcagcaggggtcggtgtgtccctctgaatctgag

SEQ ID NO: 135902 - DNA, 82 bp, Homo sapiens
tggaatatgccaaggaaaaactggagagcttcatcaaaaatagtgatagctttgataagagcttccatgtaccagtctcaaa

SEQ ID NO: 135903 - DNA, 82 bp, Homo sapiens
cctccccgcgccccctccccctcgccatgaaggtacctggccaagctgtcgtcggtggggagcatctcagaggaggagacgt

SEQ ID NO: 135904 - DNA, 101 bp, Homo sapiens
ctgcagtacctgcagaaggtctctggagacatcttcagcagaattttcccactgtaaaaaaccgagcaagtctggataagtgaggctggctccatgtatcc

SEQ ID NO: 135905 - DNA, 75 bp, Homo sapiens
atccatttctcctattgaggagtcaacgacgcaaatcaatttcacagtggctattgattttacagcatcaaacgg

SEQ ID NO: 135906 - DNA, 74 bp, Homo sapiens
tatcgggttggggtcttcccgaagccaggtccaagacaggtgctctagttcacagctataggggaacaggtgga

SEQ ID NO: 135907 - DNA, 75 bp, Homo sapiens
ccgcagatgcccaccggaatggagaaggaagaggagtcggtaaagtgttgagagaggagaaccagtgcattgctc

SEQ ID NO: 135908 - DNA, 90 bp, Homo sapiens
acccgggacccacttcactccagtgcctccgacgcctcctgatgcgcgagcccagcattgacctgctgcaggccttcgtggagcactgga

SEQ ID NO: 135909 - DNA, 100 bp, Homo sapiens
atggcaataatttgcttgatggcttagaactctccacagccatcactcatgtccataaggaggagtgattcgggaaagttacctcaaaggccacgaccag

SEQ ID NO: 135910 - DNA, 101 bp, Homo sapiens
ggaaatgcggggctccctggtggacaatattcagcaacacttcctcctctctgaccggttggccagatttcctcgtcctgtgactgtggagcccatggacc

SEQ ID NO: 135911 - DNA, 88 bp, Homo sapiens
tctttgcagactacgaagcctatgtcaagtgtcaagataaagtgagtcagctgtacatggtacattttgaccaatttaaagaagcatt

SEQ ID NO: 135912 - DNA, 80 bp, Homo sapiens
ctgctcttcctcccttcgctcgcaccatgatgccgtagggccaggtgagctgctgtgaaggactcattcttggtagccgg

SEQ ID NO: 135913 - DNA, 98 bp, Homo sapiens
cggcctgggcaggtgtcttcctcgagaggcaggcaggggatcccggacagataaaagcaacagtgtttgatgactgcaagaaagaaggcgaatggaag

SEQ ID NO: 135914 - DNA, 73 bp, Homo sapiens
agcgcctggaggagcttagagaccccagccgggcgtgatctcaccatgggtttagatgtagattctctggtca

SEQ ID NO: 135915 - DNA, 100 bp, Homo sapiens
tggaactttctatgatcaggcagttgtcagccactggacggatgtccaggtgaaggggacgtcgctgccccgagcactgcactgctgggacaggagcctc

SEQ ID NO: 135916 - DNA, 101 bp, Homo sapiens
cagcactggccactccagagcctcctccccagtgcaccaattccagctggacatcactgtgaaaatgggacgggataaagtccgagaaatgtttatgaaga

SEQ ID NO: 135917 - DNA, 80 bp, Homo sapiens
gaagccgaggtagaagaagatgaacccacagatttgctacaggccaaatttgagcaccttaagagacttcaccaagaaga

SEQ ID NO: 135918 - DNA, 90 bp, Homo sapiens
atcgacaccgaaaactccaccgtagcccttgccaaagtattctaccttgtaaatactgttatttgtatatactgtaaatgatgacatcgg

SEQ ID NO: 135919 - DNA, 90 bp, Homo sapiens
ccctggatggtgaagaaggagggaacaagaggcccatgccctggcttgggatgatgtagtacgtaaagaaaaacctaaagaggatgcata

SEQ ID NO: 135920 - DNA, 83 bp, Homo sapiens
cagggcagacgttagcgtgagtgatcactctcaatcccggaaagggctattgcaagacacgaagtccgagaaattgagcagcg

SEQ ID NO: 135921 - DNA, 98 bp, Homo sapiens
ctgggaccaacctacttagatgacaatgtcaagaaagaaaactcctccttgtacctagcataagcagtactataatggatgtagacagcacaatttcc

SEQ ID NO: 135922 - DNA, 51 bp, Homo sapiens
acagacaagacacttttcagaaagacagcacttttccagccattaactcca

SEQ ID NO: 135923 - DNA, 75 bp, Homo sapiens
cccaaccagtcccagcgctgtcgtgctcctctactcggatttcttacaatctccagctacaacctgcttagcttg

SEQ ID NO: 135924 - DNA, 97 bp, Homo sapiens
ggagagtcaccgcggcggcgccgggtggtggttaaaccatgttaaggaggattttacagaggagaggtaaagcattatttgacagatgtatggattc

SEQ ID NO: 135925 - DNA, 149 bp, Homo sapiens
agagaggcaccgggatcgtgaccgagaccgtgaccgagagcgtgaccgagagcgcgaatatcgtcatcgttagaaggctgcctttaatattggttgggaacaaatctgatctggtggaatatagtagtatggagaccatccttcctatt

SEQ ID NO: 135926 - DNA, 78 bp, Homo sapiens
gcttgaggacttggaggtcctgtctaggtggaagttgatgggtcgaaactaaatgtgaccagcacgtggaacctggct

SEQ ID NO: 135927 - DNA, 105 bp, Homo sapiens
gtaccacatttccaatttgctggaaaaaatgacatccagcgacaaggactttagacaatgcagatcttcgtgaagactctgactggtaagaccatcaccctcgag

SEQ ID NO: 135928 - DNA, 82 bp, Homo sapiens
aactgaatcctctaaaggccccatacaatgaagtagacattggtggaaacatttagttatgtgcagagtctgattagacgag

SEQ ID NO: 135929 - DNA, 50 bp, Homo sapiens
tgccgctgctgtcctgcgaccccaagcagaccctgaggggcgagctgcgc

SEQ ID NO: 135930 - DNA, 90 bp, Homo sapiens
gttttcttccttatcaaccccaccaaaactttctactataaatcccggttttggctgcttaaactgctgtagacccaaatgatttgtaca

SEQ ID NO: 135931 - DNA, 87 bp, Homo sapiens
tcttgctcacagagctctgtaaagcttcggaaccaaaaagaagcttcccagagccggggccaggagccccaagcgccctctagcagc

SEQ ID NO: 135932 - DNA, 100 bp, Homo sapiens
gctcaccaggcccaggcaggagggacgtgctgctggcctcctgacaaggtgatccgggcgggccccgcaggaattttatcccctcaccggcctcacacta

SEQ ID NO: 135933 - DNA, 82 bp, Homo sapiens
ccccagcgcagtgaagtggtgagcctttttgtcactggcgttgacccggacgacacctataatgagaccccctacgagaaag

SEQ ID NO: 135934 - DNA, 75 bp, Homo sapiens
ggaatttgtggctggctggatctctggcatccagggcattgtggatgcctaccgccaagccctgccccaagttcg

SEQ ID NO: 135935 - DNA, 101 bp, Homo sapiens
cggagagtgctagttcttatggcctcgaagcatgctttcttggcattattgcacgcgttactttggctaaaaggaggtgagcggcactctgcccttccaga

SEQ ID NO: 135936 - DNA, 100 bp, Homo sapiens
ccaaataagctatatactttggttacctatgtacctgttaccactttcaaaatccaatatcagatggaaatgatgcggagccttcgccatgtaaacattg

SEQ ID NO: 135937 - DNA, 75 bp, Homo sapiens
tacatcttgcagcatgtgcacagtcagagttggtagctggcagtgttgtgatggcttttgaagaagtatgcccgg

SEQ ID NO: 135938 - DNA, 98 bp, Homo sapiens
gaggactcagttttgaccaaggcaagaggaggcctaccagaaactggccagcgagaccctggaggagctggactggtgtctggaccagctagagaccc

SEQ ID NO: 135939 - DNA, 75 bp, Homo sapiens
ctgccttcaccaaaatccactatcccaggtagcacaggcggagtgcagcggaggcccctgccgctgccgtcatgc

SEQ ID NO: 135940 - DNA, 82 bp, Homo sapiens
cccaactcagccttcctgcataccctggaccagcagaaacctagagtgtttggtgccctggttgtcagatgttggaaagcag

SEQ ID NO: 135941 - DNA, 74 bp, Homo sapiens
ctcggagaggtgctcggattctcgtagctgtgccgggatttttagactctgaggagcagttggagctaatccac

SEQ ID NO: 135942 - DNA, 80 bp, Homo sapiens
gggaaggtggagccaccagcctctccttgcttttctgggagaagaggctacaaggacttagtgcatcagatgtaacagaa

SEQ ID NO: 135943 - DNA, 90 bp, Homo sapiens
ctgccgacggcttcacagtcctctccaccaagagcctcttccttggccagaaggtggcagtgctccttttggacttttctctaggtttgg

SEQ ID NO: 135944 - DNA, 100 bp, Homo sapiens
tgattacttgttacccatttgtgcaggaaaaccagtccaatagggagcaagctttattcgttgcatcaaacctaacttaaagatgacaagccaccacttt

SEQ ID NO: 135945 - DNA, 50 bp, Homo sapiens
gccggggttcgtggcagcgctggtggcctgtggaaatcgaatcaagggtt

SEQ ID NO: 135946 - DNA, 75 bp, Homo sapiens
agggcctccgtctggatttccaaggaagaatttcctctgaagcaccgttacagaatgtctgaaggggacagtgtg

SEQ ID NO: 135947 - DNA, 75 bp, Homo sapiens
cagattaaggtgctggaggtgacggaggctgggatgaaagcagctccatcagtagtggactcagcgatgcctcag

SEQ ID NO: 135948 - DNA, 75 bp, Homo sapiens
cggcgagcgagctcctgaggtacggcgtcggggttgtgcagcctgactctgaagaagctggtggtcttcaaggag

SEQ ID NO: 135949 - DNA, 75 bp, Homo sapiens
cctgggttgcttctggcggccatggtgttgctgctgtactccttctccggagctttgctggcagtagaacacgtg

SEQ ID NO: 135950 - DNA, 75 bp, Homo sapiens
ctccgctccccatacggcggccccaggtgtacgaagccatcgacagcagagatggagcatcttgtgcagagttgg

SEQ ID NO: 135951 - DNA, 90 bp, Homo sapiens
gcggagtgcgtggaggaggtccagtgtaagcccagggacagccaggcagaaagtgaagtcactgcttttgctgtcttggatcaagaccag

SEQ ID NO: 135952 - DNA, 100 bp, Homo sapiens
cttcccgtcacaatttcatttgttgatcccggcaccgccaggtgacagagctgaatgaacctctctccaatgaagatcgaaatctcctctctgtggccta

SEQ ID NO: 135953 - DNA, 100 bp, Homo sapiens
cagtgttaagttatgctgtggaggaagaacatgcatatttgggtccaactgtgaagccagatgataagagtcaaacagatgaaatccctgtattgacatt

SEQ ID NO: 135954 - DNA, 50 bp, Homo sapiens
gaactggttctacacgcgagctgggtttcctatcgctgaagtgttcacgc

SEQ ID NO: 135955 - DNA, 75 bp, Homo sapiens
tgagattcctgatgaagatgatgatgtcctcagtattgattcagggatccatctgtctctaagtctgtagaacga

SEQ ID NO: 135956 - DNA, 100 bp, Homo sapiens
atggagccttcctgtggcaggagagacaacaaagcgctattatcctaaggcctccgcttctgcaaccccggctgggacgccttccagggcgcctgctaca

SEQ ID NO: 135957 - DNA, 96 bp, Homo sapiens
gtttagtgaacttggaccctacatgaaggatcttggtgcacagcatagattccagcctcaaaatcctctctcaggagcccagcaatttgtggcaaa

SEQ ID NO: 135958 - DNA, 75 bp, Homo sapiens
attcaagctgataggctgcgctaccggaatgtcatccagcgagtgattaggcagcctggcatcctcgctacaacc

SEQ ID NO: 135959 - DNA, 75 bp, Homo sapiens
ttcgctgtggtgaagctggggcggcaccggatcaccaagacggagctggctccaaggctgcatctctccactgga

SEQ ID NO: 135960 - DNA, 100 bp, Homo sapiens
cgtttgcgctctcgccgaggcacaggctgctcgcggaccaccctgctccgaaaactaaggatgacagagattgtgagccgtgtgtcgaagcgaaagctgg

SEQ ID NO: 135961 - DNA, 100 bp, Homo sapiens
gggggtcatctctggattcaagctggagtgcaggaagaccacctgcaacccctgccccctgttcctgggccaccttacctgggtgacttcctcactgaac

SEQ ID NO: 135962 - DNA, 51 bp, Homo sapiens
agattatactttgactttgcgagtgatagattcgtgtggcctttcaaatga

SEQ ID NO: 135963 - DNA, 51 bp, Homo sapiens
cctggtcgagccggaggaagccaccagaaaagcacttggttctgcttcgag

SEQ ID NO: 135964 - DNA, 101 bp, Homo sapiens
gactggcctagccagcccccacaatcatacatatgtagagtgtgtcggtcagaaggaacacctgagaaaccgctttatcatccttgtgtatgtactggcag

SEQ ID NO: 135965 - DNA, 75 bp, Homo sapiens
gaagattcacaggtaattgtagaagatgttcctcctgctgatcaagagaagctttttatccagaagttacgtcag

SEQ ID NO: 135966 - DNA, 83 bp, Homo sapiens
cctgggagcttgctgcagcttcagggttgtgagtcccggcccagcccctccacccccctgcccccccgatgcgaccatgggct

SEQ ID NO: 135967 - DNA, 82 bp, Homo sapiens
ccagaatcccaatgttcgatggaggaaacaccaattggaagcctccgctcaactgtaagatttataactacctgaacaggat

SEQ ID NO: 135968 - DNA, 87 bp, Homo sapiens
ctgcagccgcttgtcagtgtgatgaagattggcacccaggtgcgcgcggagccatggttatcatgtcggagttcagcgcggaccccg

SEQ ID NO: 135969 - DNA, 100 bp, Homo sapiens
actgaactttgaaaaaaatgttggaagccattggcagtatatggttctggtcccctccctgctccacactgagaccactgagaagggctgtgtccttctg

SEQ ID NO: 135970 - DNA, 100 bp, Homo sapiens
ttatctttatctgtggcatgcaactggagatatacgactaaggggtcagacgggggttcgtgctgaacgccgtggctcctacccattcattgacttccgc

SEQ ID NO: 135971 - DNA, 97 bp, Homo sapiens
agccagcccgcggagcctgagccggagcagaaggttgtcggggccaaagtggtaacgaacgcccgcagcccgggggctcgatgctatggattcgtca

SEQ ID NO: 135972 - DNA, 98 bp, Homo sapiens
gtaccggctctggaaaatccgcaagaccatcatgcagcctccgaaagccgccaggactctgctgtgaacctgacgggcaccaacggcagcaacagcat

SEQ ID NO: 135973 - DNA, 83 bp, Homo sapiens
ccacctcacagattccagcttcggaacaagagaccctgcacatgcagatgacaatccaggctctccaggatgaattgcggatc

SEQ ID NO: 135974 - DNA, 89 bp, Homo sapiens
cggagactagaggctggataccaaatagcagtggaaaccggaaacctgtccagtttaagtcgtcttggtctgagatataacagactgtc

SEQ ID NO: 135975 - DNA, 90 bp, Homo sapiens
accaaataagctatatactttggttacctatgtacctgttaccactttcaaaaagtgtgaacatggctacgcctcttcattcccgtccat

SEQ ID NO: 135976 - DNA, 100 bp, Homo sapiens
atcgacaagctgcccatcgaggagacgctggaggacagcccgcaggtacaatgactcttcttgcttttcacctaagttgaataagcaccctgtgcacttt

SEQ ID NO: 135977 - DNA, 100 bp, Homo sapiens
ggcttcatgccctatttgcaagaaagagattcagctggttattaaggtagctacagcaagctgggtagcaggcagatccaaaggatatcatgaagtttcc

SEQ ID NO: 135978 - DNA, 50 bp, Homo sapiens
tcgctgcagagaccccgctatggcttacctggagtagaacagaaaaatta

SEQ ID NO: 135979 - DNA, 93 bp, Homo sapiens
gaggagctgtgcagccgcgaggaggcgcgggaggtgttcgagaacgaccccgagacgccaacatgcccatcactcggatgcgcatgagaccct

SEQ ID NO: 135980 - DNA, 100 bp, Homo sapiens
tcgagcctcaccaacaccgccgggcaacgtggctggagtaggaacaagctgaaagctggatacctaatgtcagtggagtcttctgagtgtttcctggaag

SEQ ID NO: 135981 - DNA, 74 bp, Homo sapiens
tcatttcagcattctggccttccctatgaggaggaagatcaacgaagtcacagaacccacagatctggaggacc

SEQ ID NO: 135982 - DNA, 83 bp, Homo sapiens
tgaagagttattctcaagctgtcacaggagatattgggagtgtgtggcatgcatcctcatcatcaggaaactctaaaaaagaa

SEQ ID NO: 135983 - DNA, 83 bp, Homo sapiens
ccaaacaggacgatggaggggcccctattttggaatacattgtgaaatatagaagtcttttctgggagaagaggctacaagga

SEQ ID NO: 135984 - DNA, 75 bp, Homo sapiens
ggaacgccctctttttaaaaaaggtgccaaaagaacatcttttagtctcgattcctctcttgattaatcatcttc

SEQ ID NO: 135985 - DNA, 96 bp, Homo sapiens
accagtggccacagcatctttgtctagccccagtgcaggtcacatgtgccaatttaacgaacggtggaaagtcagaacttctgaaatcaggaagca

SEQ ID NO: 135986 - DNA, 80 bp, Homo sapiens
gagaccaataaaaataaactgcttgaacatcctttgactggttagccagttctttctacaacttcaacaggctgcactgg

SEQ ID NO: 135987 - DNA, 83 bp, Homo sapiens
cgaaatcaacttggaaagtcaaattacgtgtggcatatggactcctgacgaccaacagaacaagttgaaatcatcgcagaagg

SEQ ID NO: 135988 - DNA, 116 bp, Homo sapiens
cgcccgggaggaaggaacgaggcaaggagctaaagcagcgtgcgttcagccctgggcaagagtgagccatggagctacgtgtggggaacaagtaccgcctgggacggaagatcggg

SEQ ID NO: 135989 - DNA, 75 bp, Homo sapiens
actcagttgttctgctgctttcagacccccccaacaggaaggccgggtgtgcagtcacatctctgctagcttcgg

SEQ ID NO: 135990 - DNA, 74 bp, Homo sapiens
tgtggcagtggaaaatgcgctcgggctggaccagcagatgatgataattccgaagaaggcttccacactattca

SEQ ID NO: 135991 - DNA, 101 bp, Homo sapiens
tacattctcctatactgttagaatagcagctcaagacttgttgctgatcgaccttcagaagatgcccttggggaagctgagcaaaaggcagatccaggccg

SEQ ID NO: 135992 - DNA, 89 bp, Homo sapiens
accgtcccgcgcggggcacgatgttgaacatgtggaaggtgcgcgagctggtggacaaagcgcatcctctggtatcacgattccaaaac

SEQ ID NO: 135993 - DNA, 90 bp, Homo sapiens
gtttggcagatggagaacctgatcgaacttcgatcgataaagaattggctagtggtgaatactttttgaaggcaaatcagaagaagcggc

SEQ ID NO: 135994 - DNA, 98 bp, Homo sapiens
cgctgcagaaccagatccgggagcacgtcatctccatcgaggtaatctatgccagcaattatgacaatgttagcagaccatgcagctcgtcagctgct

SEQ ID NO: 135995 - DNA, 95 bp, Homo sapiens
caaaggcgcaagtcgagaggaaactgttgtgcctcttcatattggcgatcctgttgtgttaaacactttaagatgagaaaaattgatctctgtct

SEQ ID NO: 135996 - DNA, 82 bp, Homo sapiens
ctcggcggctgaggaaagcaggaggaggtggcggcggcgggaagatgaatcttgtcgattggcctggctgctgcctactaca

SEQ ID NO: 135997 - DNA, 75 bp, Homo sapiens
ggcaagcattggtgccatctggagctccacgtccccggacttcggtgtgaatttcctccgtgtcacaaagcagta

SEQ ID NO: 135998 - DNA, 100 bp, Homo sapiens
aaaaattatttatccaacagctcctcccaggctggccagctaaactatgtggatccagctactggctatgtggtgctcacacagattgcccacttgcaaa

SEQ ID NO: 135999 - DNA, 100 bp, Homo sapiens
gctgaaaggcatggtcacaaagaactcaagaaaatcttcgaagacttttcagtgatacacttgggtgttgaaggacatttttgaaatcatgagaactcaa

SEQ ID NO: 136000 - DNA, 100 bp, Homo sapiens
aagaggtagcaagaaagaaaattagagtgaatgtagttgcaccagaaaatggacccaagtggggtcaaagtgctggaaacagcagaggacatccaggaga

SEQ ID NO: 136001 - DNA, 98 bp, Homo sapiens
aaatgcttgctctactagtggaaattctaatctttcacagacacagagtcacactggtgctacgaggttcaagccgagtcctccaactacccctgctt

SEQ ID NO: 136002 - DNA, 75 bp, Homo sapiens
tgccgtcttcctatccttacccgacctcagatgctcccttctgctcctgatctgttacctaaagcaataaaaaat

SEQ ID NO: 136003 - DNA, 75 bp, Homo sapiens
ggccgagcggcgacggaccgcgagctaaaccatttacacagctggtgaaagaaatgcagcttcatcgagaagact

SEQ ID NO: 136004 - DNA, 80 bp, Homo sapiens
cacacgcttcctctccagagtgatcaagtgtgacccggcttctcacggcattcagcagcagcgttgctgtaaccgacaaa

SEQ ID NO: 136005 - DNA, 75 bp, Homo sapiens
caagagttcatacaagcagagctaaaggtttgaagatgccgcatttggattggatgaattccaaattctgcttgc

SEQ ID NO: 136006 - DNA, 75 bp, Homo sapiens
ctcacctgtgacgggcacgacacctggggcagcatgcaagagctctgcgaggggatgaagctgctggcatctgac

SEQ ID NO: 136007 - DNA, 75 bp, Homo sapiens
ctcaagggagagccagagcaagattccaacatgccatgggaggagtacctgcctgggcagagactactaagcgga

SEQ ID NO: 136008 - DNA, 100 bp, Homo sapiens
cggcgatatggaagaggagggcaagaagggcaagaagctgaagtcctgagcgaggagcccattttgaagtggtataaagatgcacatgttgcaaagggga

SEQ ID NO: 136009 - DNA, 89 bp, Homo sapiens
agggcctagatgacgacacgcctttgcacgacgctgccaacaacgggcactacaaggtcagattatccttgtagaggccccctggatgg

SEQ ID NO: 136010 - DNA, 102 bp, Homo sapiens
actattacaatcgcttgtacaaaggagagtttaaacagccaaaacagttcattcatattcagcggaggctgccggcgtggaccgcgggaaggcggggctggg

SEQ ID NO: 136011 - DNA, 100 bp, Homo sapiens
gttggaaacgccaagccagctgcgtcctaatccaaaagcggagctggagtttgttcagatcatcatcatcgtggtggtgatgatggtgatggtggtggtg

SEQ ID NO: 136012 - DNA, 98 bp, Homo sapiens
cagccgagacaaagctgaaaaacttcttttggacacatcgttgctgctcctagcttacctcataaggaatggatcagagcgtgttgttacaagtgcca

SEQ ID NO: 136013 - DNA, 51 bp, Homo sapiens
aggactcaggagcaaatcagtaatggcaattccacatcctcgtggtcatgc

SEQ ID NO: 136014 - DNA, 82 bp, Homo sapiens
gccacctgggaggtggaccggagctcgtccagctgcgtgcctagttttccaagagataacttcaccaagatgtccagtgata

SEQ ID NO: 136015 - DNA, 98 bp, Homo sapiens
ctcgatcagggcatacatctttcttcgacaaagggggtgagtcaggtgctgggaagacagaaaatacaaagaaagttattcagtaccttgcccatgtt

SEQ ID NO: 136016 - DNA, 75 bp, Homo sapiens
ggcagcggagggacggcagtctcgcgcggatggtgattgctcacaccaaagccttggacccctcccagcctgtga

SEQ ID NO: 136017 - DNA, 100 bp, Homo sapiens
ctcggagcttatactcctcccagtgacgggtctggagtgcgtgggggaccggctgttggcggactgattcttgctattccaaatcctcttccacgttgac

SEQ ID NO: 136018 - DNA, 101 bp, Homo sapiens
ggaggacaggggcggggggcgggaggcttgccaccttcagcccccccgcgaacgcccaagcaacatggccaatctttcctaagctgctcagcttacaagaa

SEQ ID NO: 136019 - DNA, 75 bp, Homo sapiens
gaccaaagctgagctcctccagtctgaggagaaggcagagcccccccaggctatgaatgccctgatgcggttgaa

SEQ ID NO: 136020 - DNA, 83 bp, Homo sapiens
ccaagatcccagtcacaattatcaccgggtatttaggttacttgagtttgtccaaagtggtgccgttttctcactatgctggg

SEQ ID NO: 136021 - DNA, 100 bp, Homo sapiens
tgctggtgcatgcgtcgtcggcctctgggcagcagcctggcgctggccaacaatagcaccctcaccattggcaccatcgatgagatccagaagctgcaca

SEQ ID NO: 136022 - DNA, 83 bp, Homo sapiens
tagcttcagagttctttgtggatggacttgattctgatgagaggtgtgatgaatgcagactctgctaccattttggctgtttg

SEQ ID NO: 136023 - DNA, 99 bp, Homo sapiens
cgagtgggtctacaccgaccagccgcacgccgaccggcgccgggagatcctggccaaactgaaatcggtaaaggaggttttacacttttctggaccaga

SEQ ID NO: 136024 - DNA, 50 bp, Homo sapiens
acgaagagacctgaagtcagtcaagactcagtggcatttgaggatgtggc

SEQ ID NO: 136025 - DNA, 100 bp, Homo sapiens
ctcctgagtagctggtattacagatcattaaaatccgtgcccagacggaaggaatcaacatcagtgaggaggcactgaaccacctgggggagattggcac

SEQ ID NO: 136026 - DNA, 89 bp, Homo sapiens
gggcgagcatggggcgcctggcctcgaggccgctgctgctggcgctcctgtcgttggatggtccccatccctgctggagtatttacaat

SEQ ID NO: 136027 - DNA, 90 bp, Homo sapiens
gggctgtgccgggcggagagaactcagcgaggattctgaggacctcggacagtgatccaccctaaagcaagaattattgcggaagccggg

SEQ ID NO: 136028 - DNA, 101 bp, Homo sapiens
ggccgtggcctttaacaagcggatcctgtgcctgttccgcccgcagtctggccgcggatgcagtcatgctgcacagcttcactctgcgccagcagctgcag

SEQ ID NO: 136029 - DNA, 102 bp, Homo sapiens
tgttaacattggtcatgaggttggctacgtgatccctttcgagaactgctgtaccaacgaaacaatcctgagacggagtctcgctctgttgccaggctggag

SEQ ID NO: 136030 - DNA, 80 bp, Homo sapiens
aacacaaattgcctccttatgtctccaacatggaccgcctgggggactcggaactccctggtttcctgaggtttgtgagg

SEQ ID NO: 136031 - DNA, 100 bp, Homo sapiens
ctctttgaggagtggatgggtgctctggagatgcaggacgaggaggacagaatcgaggccctgaaacaagagaagaagaaggaggttcctgctgtgccag

SEQ ID NO: 136032 - DNA, 88 bp, Homo sapiens
gtttttaaagtaggagagcctacatattcttgcagtggatatgctgctgatgaaatcactcactgcatacggcctcaggacatcaagg

SEQ ID NO: 136033 - DNA, 75 bp, Homo sapiens
ttgaagcaacccttaatgtgcatgatggttgtgagatcatgaatcagacagataaaaatcaacaagaaatcccat

SEQ ID NO: 136034 - DNA, 75 bp, Homo sapiens
acttagctcagcaattcttaccttgctatggagttactagtagagaaagcaatcagcagtgcttctagccctcag

SEQ ID NO: 136035 - DNA, 75 bp, Homo sapiens
gccttgccctcttttattaaggagcctcaaacaaagccttccagacaaatttacatgtattggagaccagaccag

SEQ ID NO: 136036 - DNA, 90 bp, Homo sapiens
gctcagcatggtcatcctgctgccggatgacattgaggacgagtccacgggcctgaagaagatggagtttcactcttgctgccaaggctg

SEQ ID NO: 136037 - DNA, 103 bp, Homo sapiens
ggtggagtatggcaaggacagttgcatcatcaaagaaggagacgtggggtcactggtgtatgtcatggaaggttgcacgttttcaaaaaatacctaatggtga

SEQ ID NO: 136038 - DNA, 75 bp, Homo sapiens
caagcattcaaattgctcacagctgatcctaagggatggatgaatgagatttacaactatgatccagaaacctac

SEQ ID NO: 136039 - DNA, 121 bp, Homo sapiens
catgaaaaagatgagcaggaatgttttgctacaaatggaggaggaggaggacgacgacgatggggatatcgctcctcagtgggtagtgcacttccacgaagacgctgctgtgcatatatta

SEQ ID NO: 136040 - DNA, 75 bp, Homo sapiens
gcggcctccgagcgcgcgggatttgcagagatctgagtagaaacctgatacatgaaattcacagtagagcttttg

SEQ ID NO: 136041 - DNA, 87 bp, Homo sapiens
agatcgaatatgatgttccttgtcaccttcaaggaaagatgaatgggagggctgattttcgagagccgaatgcagaggttccaagac

SEQ ID NO: 136042 - DNA, 75 bp, Homo sapiens
tgcacccagaggccggggaccttgccaaccctcccaagaagttcagagatgacgtccggttgtttgccttcgtgc

SEQ ID NO: 136043 - DNA, 129 bp, Homo sapiens
cggcagcggaagatggtgttgctgagagtgttaattctgctcctctcctgggcggcggggatgggagactgggactcttcaattaatctgacatttcacaaatccaaaattgccgtggatgaactcttt

SEQ ID NO: 136044 - DNA, 51 bp, Homo sapiens
agtggaagatgatcacatcccagcgatgtgcattttgtaagcactttggag

SEQ ID NO: 136045 - DNA, 50 bp, Homo sapiens
cagcgcgagatgtggaggctcatgtcgagatcaacagtacaaattctgaa

SEQ ID NO: 136046 - DNA, 82 bp, Homo sapiens
tggattcgtggcgccacaagctcattcactgtgtaggtagttagaaacaaacctgtggcaaggcaggctcctggcaaacgga

SEQ ID NO: 136047 - DNA, 99 bp, Homo sapiens
ctgtgacggtccattcccgggctcgatgccggaaaaacaccttggcccgccggaagggcaggcacatgggcataggttcggaggcgcagaccacaaaag

SEQ ID NO: 136048 - DNA, 74 bp, Homo sapiens
gaaccaccaaaagtccattatgaaactgtactatactggcaattgctggagaagattttgcaattgttgcttct

SEQ ID NO: 136049 - DNA, 74 bp, Homo sapiens
ctcaagacttctttgtggctttgctaaaggacagagctgcgatatgcccagattgttttaagccagccaaaaac

SEQ ID NO: 136050 - DNA, 101 bp, Homo sapiens
gggaagatcctggaggtggatctgaagaacgggatgtgatcttcgtggtggaaagctaaattttaaaaccaccccaatggatgcagacagtgatgttgcat

SEQ ID NO: 136051 - DNA, 75 bp, Homo sapiens
gtcatacaccagtactaccaaggacagcttttttcctgcaagaatccaactcaagtcggaacagctcttcaggtt

SEQ ID NO: 136052 - DNA, 100 bp, Homo sapiens
ccatcgttgctgccttcttcgtcaagggcaaatgtgagaaacgagtacaggatgtaattgaacgattttgggatttcattgaccagctgagcatcaatac

SEQ ID NO: 136053 - DNA, 82 bp, Homo sapiens
cactgactttcagctatggaatcgctggccactgccccaacccaggcatttcactgggcgcagtgcggacaggcttccgctt

SEQ ID NO: 136054 - DNA, 50 bp, Homo sapiens
cagcagccacatcattgctttatgtgaccctggaggaggagctatttggg

SEQ ID NO: 136055 - DNA, 50 bp, Homo sapiens
cttggttccgcgttccctgcacagatggagtccacagagaagtgtgaagc

SEQ ID NO: 136056 - DNA, 137 bp, Homo sapiens
gacaaggaagatgagctgtcctttcaggaaggagccattatttatgtcatcaagaagaatgacgatggaaagaccacagcaagattctttcattcgtctcctcctagcctgggggaccaggctcgaactgaccctgg

SEQ ID NO: 136057 - DNA, 101 bp, Homo sapiens
ctgcgccccgctctgctgtgggcgctgctggcgctctggctgtgctgcgcgacccccgcgcatgggtacagccaaagaccggagctttggagagatgaagt

SEQ ID NO: 136058 - DNA, 50 bp, Homo sapiens
cgactttggggcccgtcaccctcagacccctgaggagttggatgactctg

SEQ ID NO: 136059 - DNA, 83 bp, Homo sapiens
catgagagcgcggccggaggacaggtcaaaatgcagatcttcgtgaaaacccttaccggcaagaccatcacccttgaggtgga

SEQ ID NO: 136060 - DNA, 75 bp, Homo sapiens
tggcagatggcttatgaaccacaggtgccaaactgcggtaaattttttatcagtgaagtggaagcatgtgttttg

SEQ ID NO: 136061 - DNA, 50 bp, Homo sapiens
aaagacatcaactcactgaagtagtgtgccggtccaacaaaagcccttgg

SEQ ID NO: 136062 - DNA, 100 bp, Homo sapiens
gtctgtggtgggattttgccttttggtaatgctgtttctgcttaagttggcaagacactccaagtttggcatgaaagctccatcaagtatgatggtgaag

SEQ ID NO: 136063 - DNA, 98 bp, Homo sapiens
tcatgtctgaggtgatccaggcctatgaaactctgcatggcggggagacaaccccttccccaagaatgctgatgggactatatgctacgactccaccc

SEQ ID NO: 136064 - DNA, 75 bp, Homo sapiens
acatgtggagacccccctgagaggttctgctcccatctgtggacatcggaaaaccagggagacgaaggagacgct

SEQ ID NO: 136065 - DNA, 82 bp, Homo sapiens
attccgggaaattcaacaggagctttccaggaagaggatcacctagcccgggtagaagaggcaatcacccgtatgcttgtgt

SEQ ID NO: 136066 - DNA, 100 bp, Homo sapiens
ccatggtgaagtataggctgaggctacctgtgaacagtacgcagtgaatgttcttgtagaaacttcattaaaaggagaaattgcctttgatcccagaagc

SEQ ID NO: 136067 - DNA, 75 bp, Homo sapiens
tggctctccaggtcagagttgctccaagcaagtactatactggcaattgctggagaagattttgcaattgttgct

SEQ ID NO: 136068 - DNA, 50 bp, Homo sapiens
ggatattgtagaaactgtctttaacctgatgcctgaaatgtgcagatgcc

SEQ ID NO: 136069 - DNA, 75 bp, Homo sapiens
ggctgggggggccggctctgcgacaaagctgggtcttactggggatctggccagccttgggggcccttggagccc

SEQ ID NO: 136070 - DNA, 100 bp, Homo sapiens
tgctggattcaattacaaaaaagaggatttctctgaagcaacgctgaaattcaccaaaggacacggagttgcagaggaagctagaccatgagatccggat

SEQ ID NO: 136071 - DNA, 101 bp, Homo sapiens
ttcctgtctcaacgatacctattttctagtgctgagatcctgagacaatggatatctatagagaaatggggtttggtcactatgaagaagaagaaagctgt

SEQ ID NO: 136072 - DNA, 75 bp, Homo sapiens
aaacctggccagctctctatcggcattatgccagtacatacaggcttctaaagccagggatggtgccagcccttt

SEQ ID NO: 136073 - DNA, 90 bp, Homo sapiens
ctcttgctaaagaggtagcaagaaagaaaattagagtgaatgtagttgcaccagatccctttcagctccctgcaaaaacagaaccaataa

SEQ ID NO: 136074 - DNA, 111 bp, Homo sapiens
gagctgggtcagtccgccgctcaccccgcggccgcaccttcccgccttctcagggggatatgagactttctactcggaatatcctgagtgttgcgtggatgtaaaacccat

SEQ ID NO: 136075 - DNA, 98 bp, Homo sapiens
aggaatctggaattttattaaacatgtcacccacaaaagctgtatataatgccagacattggaatcatccagattcagaagaactgcctgggccacca

SEQ ID NO: 136076 - DNA, 75 bp, Homo sapiens
gaagttcttcgatgtatctaaacttggcaccaagtatgagtcttgctgtgtcgcccaggctggagtacaatggca

SEQ ID NO: 136077 - DNA, 100 bp, Homo sapiens
aaagtccagcacagaccctcgggcctcatcatggccaggaagagatgctgttgtcggggccctgatgccggccgccatgatcgccccggtggagtgcccc

SEQ ID NO: 136078 - DNA, 100 bp, Homo sapiens
cttgactatctagtgatcgtaggggccaggagatcgatgccataacagctcctcagcctgcagctcctgtaggagcttctgctccacctccaactccacc

SEQ ID NO: 136079 - DNA, 82 bp, Homo sapiens
caagagcagcggcgcagaaaggtggaggccgggaggacgaagtgcctccggagccagcgtggtggccatagacaacaagatc

SEQ ID NO: 136080 - DNA, 98 bp, Homo sapiens
ggaagagtcctgtgccattaaaaacaacaaggaagctttcagtgcgatatgaaaggtgaggtctatccatttggcatcgttgggatggccaacaaagg

SEQ ID NO: 136081 - DNA, 127 bp, Homo sapiens
ccgtgctgaatttgcagagagaacggttgcaaaactggaaaagacaattgatgacctggaaggacctgatcccaaccttgaagaaagtcctaaaagaaaaaatattacatatgaggaattaaggaat

SEQ ID NO: 136082 - DNA, 98 bp, Homo sapiens
catcgacatcagtgaagaagatcaggaagattgttgatcgaatcgacaatgatggggatggctttgtcactactgaggagctgaaaacctggatcaaa

SEQ ID NO: 136083 - DNA, 75 bp, Homo sapiens
cccccaggtagctgagacctacagcgttgggaattcaagcatcctcagcctttcctacgtactcgtgaatttctt

SEQ ID NO: 136084 - DNA, 80 bp, Homo sapiens
gtgatggagcacatggacatgaggcatctgagcaggtacatcgagtacatgtgtgacatggtggcggaggagcccatcac

SEQ ID NO: 136085 - DNA, 100 bp, Homo sapiens
caacgctctgctgcccgctgtgagggaaaaggtggccataaaagtcattgataagaagagagccaaaaaggacacctatgtcaccaaaaacctgcggcga

SEQ ID NO: 136086 - DNA, 100 bp, Homo sapiens
ctggatgtttgccttagacagtatcattcggaaggcggtacagacagccattaccatcctggttccaggtttttgactaaaggccagaatgcattggtag

SEQ ID NO: 136087 - DNA, 100 bp, Homo sapiens
gatttggtttgaatgtctcttcaatctccagaaagttcctctgtgacgagggtgcaggtatctctggggactacatcgatcgcgtggacgagcccttgtc

SEQ ID NO: 136088 - DNA, 100 bp, Homo sapiens
atcccgtcctttcgctatgaagagagcgacctggagcggggatacacgatgacaacggcaacacgacaagaagtccttggcctctaccgcagcattttca

SEQ ID NO: 136089 - DNA, 96 bp, Homo sapiens
tgaagttcgagcactaatatttaagaaagaagatgttaactttcaggtcaaaatgcagatcttcgtgaaaacccttaccggcaagaccatcaccct

SEQ ID NO: 136090 - DNA, 82 bp, Homo sapiens
tggagcttggtttcgggatctcggtgctgcagacggcgagacctcctgcacaggtgatgtgtccaatctagatcccaacttc

SEQ ID NO: 136091 - DNA, 75 bp, Homo sapiens
tgtgtaccattccgacgttacaatggtggagttggcaggtgtgcgcaggaaggaaaatcacctcggcagtgtttg

SEQ ID NO: 136092 - DNA, 75 bp, Homo sapiens
gactgctgctggggctgggctcgccagtcttggggacagtgtcagcgtgcatttcctgatgcccagcttccttct

SEQ ID NO: 136093 - DNA, 75 bp, Homo sapiens
cggagatcctggtccggaggcccacagagatggggtttcactgtgttagccaggatggtctcgatctcctgacct

SEQ ID NO: 136094 - DNA, 95 bp, Homo sapiens
ctcaaccaccagcaggattttaaaaaggctatctaaatatttggttttcctttggaatatggataaatacaccatgatacggaaactagaaggac

SEQ ID NO: 136095 - DNA, 75 bp, Homo sapiens
agtttgtggcctcccaccctatccaaatgtaccaggttttggcggcagatgggaggccacctgcggatggtggag

SEQ ID NO: 136096 - DNA, 74 bp, Homo sapiens
ggaagccaacaatgcctttgaccagtatcgagaccttgcctccggagccagcgtggtggccatagacaacaaga

SEQ ID NO: 136097 - DNA, 101 bp, Homo sapiens
cccagttttaacatttcgccacctactgaagacatcatttgggaccaagctgatgagcccttgaagcacagcaggttgttggaagaggagcctttggagtt

SEQ ID NO: 136098 - DNA, 100 bp, Homo sapiens
catgtacctgaaggactacgagaggaaggttatcttggagaaggcagggcaaaatacatatctcagtgcattgatgagatcaagcaggagctgaagcagg

SEQ ID NO: 136099 - DNA, 75 bp, Homo sapiens
ccatttctcatgaacagaaacacctaggaagggagaactggaatccagacgctctgcagtgtcccatcgtcttat

SEQ ID NO: 136100 - DNA, 129 bp, Homo sapiens
caccaccgcactgtcgctgcccgcctgccctgaggagtccccgctgcttggtactccaaagattcaggtttactcacgtcatccagcagagaatggaaagtcaaatttcctgaattgctatgtgtctgg

SEQ ID NO: 136101 - DNA, 96 bp, Homo sapiens
ggacgccttccagcacggcatctgctttgaggccaaggacttttccagatttctcagaataaagtagcagttcttcttctagctggtgggcagggg

SEQ ID NO: 136102 - DNA, 101 bp, Homo sapiens
acaagaaactccttcacatctggaagaacttgaagggtgttgatgatgccttctatacattagttcgagaaattcgaaaacataaagaaaagatgagcaaa

SEQ ID NO: 136103 - DNA, 82 bp, Homo sapiens
cctgaacgtgcgcctcagcctgcgggagcccccggccgacctgcctagagctggaacgttacctccagagcgagccctgcta

SEQ ID NO: 136104 - DNA, 100 bp, Homo sapiens
gggtggcttccagggcaccggcggccgcggcccggactccgcggtgggcgagcgccctgtgagatggtatcacggagccatcagcagaggagacgccgag

SEQ ID NO: 136105 - DNA, 82 bp, Homo sapiens
ttctgcgggatcttcaaccacctcgagcggctgctggacgaaggaagttctccagcagctgattgtaatgaatttgcccaat

SEQ ID NO: 136106 - DNA, 73 bp, Homo sapiens
tgtggcccacaatcctcaacatgggatgctgaaaacgccattcaacagatgggtggccagtggcttggtggaa

SEQ ID NO: 136107 - DNA, 74 bp, Homo sapiens
cgccaggacgaaggccctactgggcaagcactattcctgatcagagaactccagttgcttcaacacacagtatc

SEQ ID NO: 136108 - DNA, 50 bp, Homo sapiens
ggcggcggctccagcgtcctaagagaggccacaagaggaagctgaatgaa

SEQ ID NO: 136109 - DNA, 98 bp, Homo sapiens
cgctgcccacgattcgcttctgagcttttgcgagaattgaagcaccctaatgtgattgcattgcagaaggtgttcctttctcacagtgacaggaaggt

SEQ ID NO: 136110 - DNA, 87 bp, Homo sapiens
ccaagttcagcatccccaagcagggggaggcctttttgcaaatgtgtaacttgcctatcaaagtagtttgtagggcaaatgcagaat

SEQ ID NO: 136111 - DNA, 74 bp, Homo sapiens
aatttgcagcaccatcaacagatgcccctgataaaggatacgttgattcttcctttatacccctgggacacatg

SEQ ID NO: 136112 - DNA, 90 bp, Homo sapiens
ccttgggccggggatttaacacaggcccccagtatggcacactggagaaggcctggcatgcctttttcacggcggctgagcggctgagcg

SEQ ID NO: 136113 - DNA, 75 bp, Homo sapiens
gcattgacatttaattttagggtcctttatatagaagggagagtagaaatgcactcggtgatggaaagagagcca

SEQ ID NO: 136114 - DNA, 100 bp, Homo sapiens
gtggaccattacttaggcaagcagggtgccaaagcatgctttctgcgggacattcctttctcggccatctactttccgtgctatgctcatgtgaaggctt

SEQ ID NO: 136115 - DNA, 51 bp, Homo sapiens
tcggttacctaggagagagaacgcagagatacttgccagaactaatacagc

SEQ ID NO: 136116 - DNA, 102 bp, Homo sapiens
acagttcggatagagaggagtccctgttctttagaagattgggatatagctgttcagaaaactgaaacccgattagctcgtgtcaatgagcagagaatgaag

SEQ ID NO: 136117 - DNA, 96 bp, Homo sapiens
cgctaaccctttactcgcgacctttcgcttcaccttcacagcagccctgcgagacaaccaggattggagttgctgttaatggggtccgcaagcact

SEQ ID NO: 136118 - DNA, 100 bp, Homo sapiens
tccggccggagccacgcagccgcggcttccggagccctcggggcggcggactggctcgcggtgcaggctcagaacgcccagcagctccatgaacgaatcc

SEQ ID NO: 136119 - DNA, 50 bp, Homo sapiens
gatgagaaggacgacaagcccatccgagatgttaaggacatgttcacttc

SEQ ID NO: 136120 - DNA, 100 bp, Homo sapiens
ggaaaattaactataaaggagagcgccaaaccattactgatgatgtggaggttaacagctatctttctgtgacttaagagattaaaattaatttggttgc

SEQ ID NO: 136121 - DNA, 74 bp, Homo sapiens
tggaagcgaagccgaaaaaggcagcagcgaaggaggagatgttaaagtaacccatcttgcaggacgacattgaa

SEQ ID NO: 136122 - DNA, 96 bp, Homo sapiens
aataacttcataagccagggagagatacgtttggatcaggagttagtgataacagtttcctcttaataagctcactgaacttctccgacatgacat

SEQ ID NO: 136123 - DNA, 99 bp, Homo sapiens
cgagcggaactggagaaagctgaggcagccattgtttgatgtcctgtgactgagaaaccaggctttaaactttatgcctttggagatggagcccaagat

SEQ ID NO: 136124 - DNA, 82 bp, Homo sapiens
catttatcctgtgttaacttcctatgttaacgtgctgtgacaccagagtttttgaaatcatgaatcctgtttatagtcctgg

SEQ ID NO: 136125 - DNA, 100 bp, Homo sapiens
ggagcggatggagaagcagcaggttcgagtctccacgccgtcagctgagaagagtgagggtgcacccaccctatccccaagtcttctcggcttactgctg

SEQ ID NO: 136126 - DNA, 100 bp, Homo sapiens
tgccaagacagtggagtgggactggaaactgctcacctatgtcatggaggaagagctccattacttaccacagcccaggcgaaaccaggagagacccagg

SEQ ID NO: 136127 - DNA, 75 bp, Homo sapiens
aaggagggaaaaaagagcaggtggaaaaggaaagttcaaggagcagggacaagttacaggaatgttctccaagca

SEQ ID NO: 136128 - DNA, 100 bp, Homo sapiens
gccctacatcatcgacctgcagtccatgcaccagtttcgccaggacacaggtttggtgcacctcgatttggaggaagtagggcagggcccttatctggaa

SEQ ID NO: 136129 - DNA, 75 bp, Homo sapiens
aagtccagctgctcgcccgtctacattggggtcgggccccggctcagtggtcccaggcagctcgggtgtcggaac

SEQ ID NO: 136130 - DNA, 83 bp, Homo sapiens
agcagatgtaccctcagtacgccacctactattacccccagtatctgcaagccaagattttcttcaatcacatctgaataaat

SEQ ID NO: 136131 - DNA, 100 bp, Homo sapiens
ggcatgggagtcattgtccacatcatcatggcctgtatgagaagaaaaagacctcaagaaagcaacgaaaggaacgcaagaacagaatgaagaaagtcag

SEQ ID NO: 136132 - DNA, 100 bp, Homo sapiens
tgggtgcgtggggctgcctcgccgcgtctcgccacgcaatgaagcagctgctgacccagctctagttttcgggaagtcagatgaccttttccctcccgcg

SEQ ID NO: 136133 - DNA, 51 bp, Homo sapiens
gagaacagcctggccaacatgatccatagccgggtggatgtcatcagacac

SEQ ID NO: 136134 - DNA, 74 bp, Homo sapiens
ctttccatcagtctcaacatagaagatttgcagatttacagaatggctgcacattaatggaaagagaagcataa

SEQ ID NO: 136135 - DNA, 97 bp, Homo sapiens
agcaggatccgagcgttctgcacaccgaggaaatgcgcttcctgagggagtgggtggagaggtgacttcatggtcatgacgattttcttcaatgtga

SEQ ID NO: 136136 - DNA, 96 bp, Homo sapiens
ggtgctgaatggcaatggcacaaagttctctcgatcagggcatacatctttcttcgacaaaggctcgcagacctctgaagagagtgccattgagac

SEQ ID NO: 136137 - DNA, 99 bp, Homo sapiens
cagaggaataatgtggggaggccagccagtcggtctaatttgaaaggagatcatgaatcagacagataaaaatcaacaagaaatcccatcataccttaa

SEQ ID NO: 136138 - DNA, 75 bp, Homo sapiens
ccagagacctacgtggcagctgtgaaaaaagccatttccgaagcttcagtatcagacacagcacagcagccatct

SEQ ID NO: 136139 - DNA, 100 bp, Homo sapiens
ggaagaccacctgagtcaccagttaactatggtagcccacccagcattggagcagcatttctttctattactactatctatgctgagactggttcaggtt

SEQ ID NO: 136140 - DNA, 100 bp, Homo sapiens
gctcatctggatcaagaagaatttgctaaaagagcggccagagttgttcatccagggagacagcgtggagcgtccccggatttcgacatccaccctcgac

SEQ ID NO: 136141 - DNA, 75 bp, Homo sapiens
ccagtggacaagtggagacagacctggccctgaccttctccttgcagggcgaccattgacgaggtggagacggac

SEQ ID NO: 136142 - DNA, 98 bp, Homo sapiens
ctcggaaggcgcgggcaggagcctggcgaggatgcaccttcccctgccttggaaagtcagggcgacccttgggcgctggagtacgcttgggactgggg

SEQ ID NO: 136143 - DNA, 100 bp, Homo sapiens
ctccgctcgtcccgctcgtcatggcctacccgggatacggaggaggggtatggagaagatcaacttttcaggtggagagccatttcttcaagaccgggga

SEQ ID NO: 136144 - DNA, 83 bp, Homo sapiens
agaaagtccaagctcgtggtgggtggaaaagtgttcgccgagctcatgatggagcagtccaagaagtcctccctcatggtggc

SEQ ID NO: 136145 - DNA, 83 bp, Homo sapiens
ggatccgggccaagcagtgggccgagggtgctttcttctgcgacctggtactcatctacctcatcaaaaagagagagttttac

SEQ ID NO: 136146 - DNA, 90 bp, Homo sapiens
gagccttcctgctcatctccaccctgaaggacaagcgcgggacccgctatgaggctgcctgctgtttcccggggagatcatgaaacgagg

SEQ ID NO: 136147 - DNA, 100 bp, Homo sapiens
cgacagtgctccaggacttggtgacttcctccagcttcacatagcaggtaacttgcagactcacttacgacggcattctggtgaaaaaccatacatctgc

SEQ ID NO: 136148 - DNA, 80 bp, Homo sapiens
caaatgaagttgatggaattacactgtgatacgactgactgtgaaaggtgtagcagtcactcggcctacacccacagcat

SEQ ID NO: 136149 - DNA, 108 bp, Homo sapiens
atcgtgaagacccttgctgctaccgggacaggatttgactgtgctagcaaggatatagtttctttggtcccacgcctgcggcacatcatcactgttgatggaaagcca

SEQ ID NO: 136150 - DNA, 76 bp, Homo sapiens
agagaagtggatttgggagacatttaggaggaggaagacaatggtcctataatgcccttggataagaaaaggaaac

SEQ ID NO: 136151 - DNA, 88 bp, Homo sapiens
caaaggcacgggcagccggaaggacaccaagatgcggatccgggcctttccgggtgatcagcccatgacctaaacctccagacaaaat

SEQ ID NO: 136152 - DNA, 75 bp, Homo sapiens
tgctatatcacaagatgaacaatgagaagcaggcagaagattgcatcacacggcattttgttcccaacatcacct

SEQ ID NO: 136153 - DNA, 50 bp, Homo sapiens
aaaagggatggaactacattcttgaggcgaggcaaacctctctacatttg

SEQ ID NO: 136154 - DNA, 75 bp, Homo sapiens
gcggggcgacgctggctgcagggacccggtgacagcgtgagagcccacacatcttgctgacttcactcaagtgca

SEQ ID NO: 136155 - DNA, 80 bp, Homo sapiens
agggctgaggaccgcaaaaatcaatcgagtacgagagggcctccaaagtggaccagtttgtgacgcgcttcctgctgcgg

SEQ ID NO: 136156 - DNA, 51 bp, Homo sapiens
tgacaagagcatcaaccctctggattccagacagcattggaaaagacatag

SEQ ID NO: 136157 - DNA, 101 bp, Homo sapiens
caacatacaatgtggctgtcggcagagctggtagaggtgttacacataatattgcattacttcgagaggtgataatcaactcacgctttgtaaaaggagac

SEQ ID NO: 136158 - DNA, 100 bp, Homo sapiens
tggaggcaaaccctgacactggagtgctcacagtctcctgggagaggagcaccaccccagggtctactgctgagccagtttctcagtctaccacttctga

SEQ ID NO: 136159 - DNA, 90 bp, Homo sapiens
gctgacaaaaggcatggtgatccttcgggacaagattcgcttctatgaggggtgcttcaaggatgaccgcatcgtcttctggacttggat

SEQ ID NO: 136160 - DNA, 100 bp, Homo sapiens
agatgcagatgagaaggttcagttggcaaaccagatatatgacttgtttcgagaggcccgtgccatgagaccgcctggggtgagcaaggcgacctgggct

SEQ ID NO: 136161 - DNA, 75 bp, Homo sapiens
ggtaaagtcgagtatctggtgaagtggaaaggatggcccccaaaggggaccccattcccgaggagctttatgaga

SEQ ID NO: 136162 - DNA, 100 bp, Homo sapiens
taggcggccatggtccaaccttgaagtgaatggtagtgtctagaaagggtatgtcccttcaagagagaggtgccaatgtccaaccggcctaataacaatc

SEQ ID NO: 136163 - DNA, 100 bp, Homo sapiens
cagagcagctccgcaggagcatgcaagatgcaacccagaaaccagcctggacaccaagtctgtgtcagaaggccacctcaagaggaacatcgtggtgaag

SEQ ID NO: 136164 - DNA, 90 bp, Homo sapiens
catcctgcagccattaatgatcccaagatactggagaagaagcaggcgctccctccattccagccacagatcacagacgactacggtctg

SEQ ID NO: 136165 - DNA, 75 bp, Homo sapiens
ctcaccgttctgcccccagaactaggtaaagtcagtgataaatcttttgtttgctgcatatactggagatgtgtc

SEQ ID NO: 136166 - DNA, 100 bp, Homo sapiens
aagctgtctatggaggactccaagagccctccccccaaaggttcaagcactgtcttcctgttggccctgacaatcatagccagcacctgggctctgacgc

SEQ ID NO: 136167 - DNA, 74 bp, Homo sapiens
aggagacacaagaagcggatccagaataccctctaccatctgctttggtcagggtgccgctcgaggatttaaaa

SEQ ID NO: 136168 - DNA, 83 bp, Homo sapiens
cgacaccatggtggaggagcagtacggccagatgtacatcaaggcctccggcagctatgcagcagaaagatgaaggtcttaga

SEQ ID NO: 136169 - DNA, 100 bp, Homo sapiens
aacaaaaatggtgtctcaatcacagcaatgatatggaacctagcaaagctgttccactgaatgcatctaagcaagatggacctatgccaaaaccacacag

SEQ ID NO: 136170 - DNA, 95 bp, Homo sapiens
agccacaactgaggaccgcaacacggccttggagacgctgcaccagaatagcatcacatgaaaaagcgggacctggagccctcggacgccaccta

SEQ ID NO: 136171 - DNA, 75 bp, Homo sapiens
tcgggagctggctgaagatggctactctggagttgaggtaattgatcaccctagacccagggacacccaattcat

SEQ ID NO: 136172 - DNA, 100 bp, Homo sapiens
gcggacgatggacagccagggcaggaaggtggtggtgtgcgacaacggcaccgggggaattgctagatgtgtggactgagctacaggatatccatgatgc

SEQ ID NO: 136173 - DNA, 97 bp, Homo sapiens
gaagaataactgggtgttgctgtccaccgtggccgcggtggtgctaggtgctggagaatctggtaaaagcaccattgtgaagcagatgaggatcctg

SEQ ID NO: 136174 - DNA, 100 bp, Homo sapiens
aaagccatagttggtaaaaacttacctgatgaagaggtgagcatacttgattcagaggaggtgtgtgtggagcttgtaaaggagtatgcatctcaagaat

SEQ ID NO: 136175 - DNA, 100 bp, Homo sapiens
cctcaggcgtgcgcggacggtgtgcgggaccctcctggaggctgagaactcccggctgcaaacacctggcggtggctccaagacttccctcagctttcag

SEQ ID NO: 136176 - DNA, 83 bp, Homo sapiens
taaaaaaaagattgggcctgttatgctcacaatgacttcaggtgacctgcctagagctggaacgttacctccagagcgagccc

SEQ ID NO: 136177 - DNA, 101 bp, Homo sapiens
aaataccagctcgacaaagatggggttgtcctctttaagaaggtggtctttgggaagaagcttcctgcctttgccaccatccccatccaccagctgcagca

SEQ ID NO: 136178 - DNA, 75 bp, Homo sapiens
aaaatgcttccactggaaccttgtcgaagacctaattttgagatgggaaactcttgtctagtgatgtgactcatt

SEQ ID NO: 136179 - DNA, 75 bp, Homo sapiens
aagcaagagatggctagtgcttcatccagccaaagagaattggcagagggggtcgatttgggaggaaaggtgtgg

SEQ ID NO: 136180 - DNA, 101 bp, Homo sapiens
ccgagctcgatccgctgctcgcacgggagccagctgggtgatctttaatctcatgaagtacgacagctacagccgcttcttaaagtctgacttgtttttaa

SEQ ID NO: 136181 - DNA, 89 bp, Homo sapiens
aaaataaccgtccccgccagtcagaagttgagtcacccacaaaagctgtatataatgccagacattggaatcatccagattcagaagaa

SEQ ID NO: 136182 - DNA, 98 bp, Homo sapiens
gaagcgagggtctgaagttcacgactactagaaggggaggggagtggaaaggctctcagtgaaaaaggagtccaatgtgctgattgctgctaacagtc

SEQ ID NO: 136183 - DNA, 88 bp, Homo sapiens
gcgaggctagggaggacctcacttccccggggtgtaataatgttaactgagagtatgttggataaaggacattgttgtggcagtaact

SEQ ID NO: 136184 - DNA, 127 bp, Homo sapiens
ttctaatttgaaccatgtttggattgaagccgcctctgtattacttaccaggttctgcggggagtgtctccagccctgcctgcaggtgccatccccgctgtgcccactctgccgcctgcccttcgac

SEQ ID NO: 136185 - DNA, 100 bp, Homo sapiens
tcggcgggagccagcgagccacgggagcgagccaggtgtcatggagaaactccagctgggcccagagattctgcagcgggaaaatccaaggcttatttat

SEQ ID NO: 136186 - DNA, 117 bp, Homo sapiens
tccgttgctttactttttgcttcaccgacatagtcattatgccgaagagaaagcggatactctgttttcaaggaagctgaatgggaaatacagacttgagcgacttgttccaactgc

SEQ ID NO: 136187 - DNA, 144 bp, Homo sapiens
gttcctggagaagaaaatcgagcaggagctgacggccgccaagaagcacggcaccaaaaacaagcgcggcattgacaagactccatcaactgaaacttttaggtcatactttagtcgttgaatttgcaaaagagcaagatcgag

SEQ ID NO: 136188 - DNA, 84 bp, Homo sapiens
cgccgccgaagaagcatcgttaaagtctctcttcaccctgccgtcatgtctaagtcagagcaaaatgatgcttcaacacccagg

SEQ ID NO: 136189 - DNA, 100 bp, Homo sapiens
atgattcgtagctaagacttcgcgacacccttgaagctgagaaatgaaactggcgatggaatatgagaggagccctctggaaagaaaaggacagaccctg

SEQ ID NO: 136190 - DNA, 75 bp, Homo sapiens
gcctccccagccatgtggaactgttgcttcaaagatggtcaacattatgaagagggatcagtaattaaagaaaac

SEQ ID NO: 136191 - DNA, 100 bp, Homo sapiens
aaacattcgtctcggaaaccccgcctcttacagtcacgagggctggagcggctctgggctccggaatcgcccgcagccggtactgcgggacccactgcgg

SEQ ID NO: 136192 - DNA, 128 bp, Homo sapiens
tgggaagggtgccctggtcacaggggccatggccttcgtcgggggtttggtgggcggcccaccgggactcgccgttggtgtcatggagaaactccagctgggcccagagattctgcagcgggaaaatc

SEQ ID NO: 136193 - DNA, 100 bp, Homo sapiens
cccgggtagcttcccgacttatcgacatgagcaggcaccaaggtgctgccttcacctgcctggagactgccttccgcctggacgccctgcaccggcagat

SEQ ID NO: 136194 - DNA, 98 bp, Homo sapiens
acaccgaagaaaccatcacgtacacggaggagatccttgtttacttggagaagacctgtgactggcttccgaaaccgaacatgtctgcttcatgcaag

SEQ ID NO: 136195 - DNA, 50 bp, Homo sapiens
gccatcccctatctccccgggcggtgtaatgttcaagctcagaaatgcct

SEQ ID NO: 136196 - DNA, 94 bp, Homo sapiens
tggggatcgctacggaccttaaaatacccgcaacagccccttcgtcccaaacattagaccagctcccactcaccaaccctgagcattttggcac

SEQ ID NO: 136197 - DNA, 100 bp, Homo sapiens
ggaatccggaatgctgcccgatggccctgggtcctcgctgtggggcaatccgggcttgcagacgagctaaaccatttacacagctggtgaaagaaatgca

SEQ ID NO: 136198 - DNA, 98 bp, Homo sapiens
tcaaagcacctagtacctcctaccattgtcaactgaatgaaactagtgatcgagaagatggcctccccaaaggacatcatgtgacagactctgagaac

SEQ ID NO: 136199 - DNA, 75 bp, Homo sapiens
aagctattccagaagaggacctaaagaaacgactaggtgctaaaatgatgtattttctggacaagtcaaggcagg

SEQ ID NO: 136200 - DNA, 89 bp, Homo sapiens
ggacacactgtttgcagggaggtgtagacgctgatcaccgtttccagtcattttaaaaattcagtgtctttggtgcaacactaacaagg

SEQ ID NO: 136201 - DNA, 100 bp, Homo sapiens
gacacagcgggtcaggaaagattccgaacaatcacgacagcgtactacagaggagccatggtggcacaagatctctgtaaagtagcaggcatagcaaaag

SEQ ID NO: 136202 - DNA, 88 bp, Homo sapiens
cggcagtacggcaaatatggcggagacggtcctaaaatctctacacttgccaaaaaacaacagtctttatgtccttacaccagatttg

SEQ ID NO: 136203 - DNA, 100 bp, Homo sapiens
tcccagctccctcgcaattccagccttctgtagggtgagaaggactggcagaaatacgagactgctcggcggctgaaaaaatgtgtggacaagatccgga

SEQ ID NO: 136204 - DNA, 100 bp, Homo sapiens
cacaaaactgatctccaggaaaatacacctgttgttgagaaccttcaacaactagtactgcttcaaattatccagatgtgttaacaaggccttctcttca

SEQ ID NO: 136205 - DNA, 50 bp, Homo sapiens
cagggccgcaggaagacgcaggagaactaatgccgacgtgatgaccgccc

SEQ ID NO: 136206 - DNA, 96 bp, Homo sapiens
gacaagtcctgcgcttggggatcctctgtacgcccgttcactgtgagaaggcaaccaaagtgcaggacatcaaaaacaacctgaaagaggcgattg

SEQ ID NO: 136207 - DNA, 100 bp, Homo sapiens
gatggagaagctagagcaggacttcgtctcccgggacccgtacttcatgaagaaccacctgggctcctatgaatgcaaactctgcctgacacttcacaac

SEQ ID NO: 136208 - DNA, 100 bp, Homo sapiens
tcggccaagaaattagacaagaaacattggaaaagaaatcctgataagaactgctttataagctccgaagaagtatgcctaacctagcccggatgccaag

SEQ ID NO: 136209 - DNA, 100 bp, Homo sapiens
gacaccagcacagcaaacccgccgggatcaaagtgtaccagtcggcagcatggggtacagccaaagaccggagctttggagagatgaagtttaaacagtg

SEQ ID NO: 136210 - DNA, 83 bp, Homo sapiens
gacgagggcaccccaaccctgtcgggggatatgagactttctactcggaatatcctgagtgttgcgtggatgtaaaacccatt

SEQ ID NO: 136211 - DNA, 90 bp, Homo sapiens
ctaagactcccgaatacttcagaagtggggaaatggtgccctacgagacgctgaacaaacgctttcgcgccgctcagaagaacattgacc

SEQ ID NO: 136212 - DNA, 100 bp, Homo sapiens
aacaacagccggccagagcttctggacccggagcccggcggcctcctcaccagccaagagtgtgagaattttgaacaaggagccctagagctggatgcaa

SEQ ID NO: 136213 - DNA, 83 bp, Homo sapiens
actgcgcagggcggctgggcagctatgtcatcaacgggcgcaccaagttgatattcactgatggactccaaagaatcattaac

SEQ ID NO: 136214 - DNA, 100 bp, Homo sapiens
agcagatatgcctgctaacatggataagcatgccctgaaaaagtatcgtcgagaagcctatcatcgcacgagtacacgagacaggattgagaaaggagag

SEQ ID NO: 136215 - DNA, 78 bp, Homo sapiens
tgggtcgatgtctgtctatggaataaagccccgtcaggatggttcatatcatgaagatgttggttatggtgttagtga

SEQ ID NO: 136216 - DNA, 96 bp, Homo sapiens
tttgtccaggggctgactgtgggcagagaagttgcaaaccgagtttccaagacaaggcgcctctgtcgaagagccttctgctggtccccagtgccc

SEQ ID NO: 136217 - DNA, 100 bp, Homo sapiens
tgaaagtagtgcatccacttgcacaacccaaggcagaagatgacacttgggagcctgtttctggcccccaaagacaaaccaagtggagacacagcagctg

SEQ ID NO: 136218 - DNA, 50 bp, Homo sapiens
ccccgggacacccccgcaagcgagcagatgatgtgatgccagccacttac

SEQ ID NO: 136219 - DNA, 75 bp, Homo sapiens
acggcggccccgcgcagcccccggccgcagcgcaggcagcccagcagcaaccatgtccaagggacctgcagttgg

SEQ ID NO: 136220 - DNA, 101 bp, Homo sapiens
aagtcattcctcctaaggagctggtgtcttcatccagaagggacagtttgtgccagctctccagagagaaaagatattattgataataaggcctctgtaac

SEQ ID NO: 136221 - DNA, 100 bp, Homo sapiens
aactacaccctggaggatgaggaagactcccagatatgcaccgtgggccgcctttggatctctgtggccaggtgttatgaagcggagattgaggagatag

SEQ ID NO: 136222 - DNA, 75 bp, Homo sapiens
aagaaatctgttgcttcttgcatgggaaatgcttccagactgcacacttttacttagaggacagtacatccccta

SEQ ID NO: 136223 - DNA, 115 bp, Homo sapiens
ctgcgggggggagagccactgacgccgggaccgggaccgccgccgccgccgccaccatgacaatgcagatcttcgtgaagactctgactggtaagaccatcaccctcgaggttga

SEQ ID NO: 136224 - DNA, 100 bp, Homo sapiens
cgcctttgatcgtcttcctcttcagccatccagcaagtctcaaggtgacaatagtcctcaggcagacaagaaggaataagggtttgagatgaatggctac

SEQ ID NO: 136225 - DNA, 51 bp, Homo sapiens
tcccagagccctccgtgattgttggaatttactgaatcaaatggatggatt

SEQ ID NO: 136226 - DNA, 98 bp, Homo sapiens
caggagctggtggaggaggcgattgcctatggccggaagctgggcgggtcactgcagccagaggggtccagaagagagaggaggcactgcctccacta

SEQ ID NO: 136227 - DNA, 82 bp, Homo sapiens
agaacaagccgaaaggaagccacgtggtgggtttggaggatttgggacaacatctacaactgcaggttctgcattcagcttt

SEQ ID NO: 136228 - DNA, 100 bp, Homo sapiens
ctgggggcccacacgccatggagcccgactcccttctggaccaagacgactcctacgtactatactggcaattgctggagaagattttgcaattgttgct

SEQ ID NO: 136229 - DNA, 100 bp, Homo sapiens
gagagatccccctaactccaccgaacgatacacacgttggatcaaccagctgacgccggagcagctcctaacccagatgacctacagtgactctgacgct

SEQ ID NO: 136230 - DNA, 76 bp, Homo sapiens
tatctaccttcaaggttcagcccttaaagatcaagacctattgagagcaaacactgccagtgaaagatgtagaaga

SEQ ID NO: 136231 - DNA, 98 bp, Homo sapiens
gctgaggagccctcgttttcgagatcaggcctgaccgggataagctccagtgtgtggacctgagctgtaatgagctaagtgaagtcacattaccagaa

SEQ ID NO: 136232 - DNA, 80 bp, Homo sapiens
cgagcgaggaggatggcggagtcggggctcctgacggtcatcatcagatttgaaatatttaaagtggatacaaaactatt

SEQ ID NO: 136233 - DNA, 90 bp, Homo sapiens
gagctgatgaaacaatggcaagtgtctgcattattgggccgaatcccttctgctgtgggctatcagcctaccctggccactgacatgggt

SEQ ID NO: 136234 - DNA, 82 bp, Homo sapiens
tctggatcaccacacttcccaaaattgacagacactgccctctcggtgccaccagtgtgtgattgtcagcagctccagccac

SEQ ID NO: 136235 - DNA, 83 bp, Homo sapiens
atgagctggggcaccgagctctggcttccccgggcgctgcctggacaggcctgcctgcgtgctgggacatgtctggcctccaa

SEQ ID NO: 136236 - DNA, 101 bp, Homo sapiens
gcgcggagcccggctcccgcaccatggaggaggacgacagctacgggtactggaagatgaaagagactatacaagggaccgggtcctgggggcctgagcct

SEQ ID NO: 136237 - DNA, 100 bp, Homo sapiens
ccggccgctaccgctcaggtgctgcaggcacagcccgagaaaccgcagcactacacgccgtcatttccctgatggagatggggttcgacgagaaagaggt

SEQ ID NO: 136238 - DNA, 50 bp, Homo sapiens
cacagggctactgttttccaatcctcagtattctaccttgtaaatactgt

SEQ ID NO: 136239 - DNA, 90 bp, Homo sapiens
accaaaagtccattatgaaactgcgggcagttgcaggagatgcctctgagtcagcactcttaaagtgcatagagctgtgctgtggttccg

SEQ ID NO: 136240 - DNA, 97 bp, Homo sapiens
agatggccgacttcgatgatcgtgtgtcggatgaggagaagacagttcagtttgttcagggaatttttgttgaaaaatatgacccaacgatagaaga

SEQ ID NO: 136241 - DNA, 99 bp, Homo sapiens
tggaactggccgggctgagctgtgctacagccatcgccaagtgccaccaagtggttggtgtagacgtggagtggacacctgtgtttgttgctgggggcc

SEQ ID NO: 136242 - DNA, 50 bp, Homo sapiens
cacttttcagccatggccacaagggaagatcagttttcctgccatccagg

SEQ ID NO: 136243 - DNA, 117 bp, Homo sapiens
cctacttccctcctggcaaagaacccaaggaaggcgagcggaagatttacttggcaattgaaaatttgggaatggatgatgaaggagatgatgacccagttcctctaccaaatgtga

SEQ ID NO: 136244 - DNA, 82 bp, Homo sapiens
cgacggacactccctacgagtgggacctggacaaaaaggcttggttccccaagtttctggcctggatatctaattctctgtt

SEQ ID NO: 136245 - DNA, 100 bp, Homo sapiens
ggctcccagtgccgcgcgccaagatccattcgttgccgccggaggggaagcttgggatcatgggctccattggcctccagaggactgggagcctgccccg

SEQ ID NO: 136246 - DNA, 82 bp, Homo sapiens
caaacatccatatcataagtggaattttggagatattcaaaggttccagcaacagatagaaatgctttaagttcactctggg

SEQ ID NO: 136247 - DNA, 83 bp, Homo sapiens
aaacagaaattctggaacacctatatgttctgggaggtgatcagtgatgaacatggcatcgaccccaccggcacctaccacgg

SEQ ID NO: 136248 - DNA, 75 bp, Homo sapiens
gacagcaaaggctttgatgaatacatgaaggagctagcactcaggaggccttgaagagcgggcactttgtcaacg

SEQ ID NO: 136249 - DNA, 98 bp, Homo sapiens
gaggaccgggggtggaggtggtgcctctggcagtgacgaggacgaagtgtccgagattcatgttacatgtaaagctgtcctcatttgtgactatggac

SEQ ID NO: 136250 - DNA, 74 bp, Homo sapiens
tacgattgcagcgcagtggaagtcaagagcaaggactcacagaaaacactggacttccccggaagctacttgaa

SEQ ID NO: 136251 - DNA, 100 bp, Homo sapiens
gagcggagtctgccaggtggtgtccatcatgcagcaaagtggggcaccaaggccctgtgctaagcactcataatcctctgggggtgctacccctacaaac

SEQ ID NO: 136252 - DNA, 98 bp, Homo sapiens
gtcagtttttgagcagtcacttagtcaacaagatactccatcttctaaaccaacactcctagccaatggtggtcatggagtagaagggagcgatacta

SEQ ID NO: 136253 - DNA, 102 bp, Homo sapiens
tgaaagaagcccagcttttccatcctggagatctacaggatttatcaaatcgagtcactgtcaagcaccaagtatagatgagaaagtagatcttcattttat

SEQ ID NO: 136254 - DNA, 50 bp, Homo sapiens
ggtacgcctcctgacttcatcctcaaggctccagcccccttttggacatc

SEQ ID NO: 136255 - DNA, 76 bp, Homo sapiens
gaaccattgaaaaatttgagaaggaggctgctgagttcgtaagaaggcaacaagttcttctcctctacagaaggat

SEQ ID NO: 136256 - DNA, 73 bp, Homo sapiens
ttggcagttggtgaaaattactgatggctctccttccaaactcgcaaaggatctccttcatccctctccagaa

SEQ ID NO: 136257 - DNA, 98 bp, Homo sapiens
tgtcctctgtgggaatattcctcctgacttatttgctagaatgacagcagagtcatccgtccttggctcaggatttggagagcttgcaccaccaaaaa

SEQ ID NO: 136258 - DNA, 90 bp, Homo sapiens
gttactggaccattatcagaattgcaaatagcctatgtatgcagagaaaccttacagaccacctgttcagaacattgcttacagaaatat

SEQ ID NO: 136259 - DNA, 75 bp, Homo sapiens
ggaatttacatctaaagtcaattcctgtctcattagctgacaagctctctactgatgatctgaactccctcattg

SEQ ID NO: 136260 - DNA, 82 bp, Homo sapiens
cgggggctgcaggctgagtatgagacgcaagtcaaagagctccacgcaggagatcggtgaggagctgatcaacggagtcatc

SEQ ID NO: 136261 - DNA, 82 bp, Homo sapiens
agccgtggcctcctctccgccctagcgctgagttgtacctcttagaagctgctgttttccatttggatctaaacactggacc

SEQ ID NO: 136262 - DNA, 51 bp, Homo sapiens
cagtcctccagtgtttggatattcagataagaactccattttctgttgatg

SEQ ID NO: 136263 - DNA, 83 bp, Homo sapiens
tggcagccgcggatctcaccgccgctcaggatagcagaccccacgttagctgaaatgggaaaaaacttgaaggaggcagtgaa

SEQ ID NO: 136264 - DNA, 100 bp, Homo sapiens
gaccacatcaaagacagctttcacagtttgcgggactcagtcccatcactccaaggagagaagatattcaatgcaggaaatgtatgatgtagtatcggga

SEQ ID NO: 136265 - DNA, 46 bp, Homo sapiens
ggatccggaggcgccagctcaaccgcaacagcattattgagaaaag

SEQ ID NO: 136266 - DNA, 96 bp, Homo sapiens
gcggggcagagccgggggagcccagcccagccagcctccagaaactaaagttacagagtggagaggtaacaaaagaagagaggcagcctgcatcag

SEQ ID NO: 136267 - DNA, 100 bp, Homo sapiens
agaagacagagggttttcttttgagggtcccgggattcttgagctgtgcccagctgacgagcttttgaagatggcacaataaccgtccagtgatgcctga

SEQ ID NO: 136268 - DNA, 100 bp, Homo sapiens
tatgatctacctaccaatcgtgaaaactatattcacagcattgatatgaaccatggacaagtatattctgctgccacaaagactgtaaagtgcttcattt

SEQ ID NO: 136269 - DNA, 97 bp, Homo sapiens
cttcctccatgattgtgaggcctccccagccacgtggaactaatatactgatgataatgctctgattcctaagaattcttctgtaattgttagaaga

SEQ ID NO: 136270 - DNA, 96 bp, Homo sapiens
gtgggtactgtcgcggaggcttgtcattctgacccggggattcctcacagcgtctggcagaacccagtgacttgattgtaaaaatttacagagcgg

SEQ ID NO: 136271 - DNA, 100 bp, Homo sapiens
gggctcccgcaccgcccggtgctccccatctgcctggcgttgtgcgcagagctggaaagcatggctgttgtcatgcttctcatcgatatcgagctggctt

SEQ ID NO: 136272 - DNA, 82 bp, Homo sapiens
cggggttgaggcgaggagcccgcgggcggccggtcgggcggggcggcggcgctgacagatcttcagtttagatcttggaggc

SEQ ID NO: 136273 - DNA, 82 bp, Homo sapiens
aaaagctgatgatcggaatgattacaggatagagactcttaatggaacaatgattctgaaaagaacggagcttgaagcaaag

SEQ ID NO: 136274 - DNA, 82 bp, Homo sapiens
agcacctacgtcccgctgccgtcgccgccgccaccatgcccaagagaaagagttcggaatccagcattaagaagaaatttct

SEQ ID NO: 136275 - DNA, 49 bp, Homo sapiens
ggcatgatctccatcaccgaatggcagatgctgcttttgacacaaaaac

SEQ ID NO: 136276 - DNA, 96 bp, Homo sapiens
ggtagatcatgaaagagatcctggacctatgaatatccagtttgagccatcggatctaagatccaaaagatacttggatgatattgatgatgagat

SEQ ID NO: 136277 - DNA, 89 bp, Homo sapiens
aagacgccaggaacccctggaagcctagaaatggcacattcaggaccccgcgagccagcggctgacgtggaacaagtccccaaagagcg

SEQ ID NO: 136278 - DNA, 75 bp, Homo sapiens
ctgggagagaggtacctctccttttccctctccctttccctaagccactgtatgatgctgcttaccttacaatgt

SEQ ID NO: 136279 - DNA, 75 bp, Homo sapiens
gcggcagtatccttggggcactgtgcagggacagtcattttgtttactcattcagccctgttgcaggtcccaata

SEQ ID NO: 136280 - DNA, 100 bp, Homo sapiens
aactgggcagggaaggacattggtatggagtttcactatgttgcccaggctgatctggaactcctgacctcaagcaatccacctgcctcagcctcccaaa

SEQ ID NO: 136281 - DNA, 75 bp, Homo sapiens
ctccacagagaggagcagcctatttgcctctgcaacttgactctcctctaggaagagtactccagagagcaggga

SEQ ID NO: 136282 - DNA, 80 bp, Homo sapiens
cccacggccgcctccggagcccgacgcgacctctgtgagtgaaagccttcagagggaagctgctaagaagcaggccatga

SEQ ID NO: 136283 - DNA, 75 bp, Homo sapiens
gtgattatgggcaatgtcctgcaggacggtgatgaatcatctccaattttaacaagttttgaattagtgaaagtt

SEQ ID NO: 136284 - DNA, 100 bp, Homo sapiens
cctcttctctccccgaaggcctgccagcacccctggagaagcgcgttaaggagctggctcaggtatctatgccagcagctcatgcaacatcatctgctcc

SEQ ID NO: 136285 - DNA, 98 bp, Homo sapiens
tctgaggggacccgcatcaagaaaatctccatcgaagggaacatcgagtcaatgcatgtgttgatgtggtgctctcaggggtgaagctcttgcaggca

SEQ ID NO: 136286 - DNA, 88 bp, Homo sapiens
ccaactagaggcagggtcatccttgcccttgtcctcccctttcatccctatgtggaaaacgaccattcctcaagaattttgtatccaa

SEQ ID NO: 136287 - DNA, 82 bp, Homo sapiens
acatccaggcgaactcggcctatcgctaccctccgaagtccgatggagttttaacattgaatgcggagaacactaattatgc

SEQ ID NO: 136288 - DNA, 100 bp, Homo sapiens
cagagctggtcaccaaaggaagagtgccatacccaggcactaaggtaaagtcaataagaacacagactgacttctatgcaacaaaacctaagaagatgga

SEQ ID NO: 136289 - DNA, 100 bp, Homo sapiens
ctactctttaagctctgttagcttggcctctgtccctgaagatcgtcaacacctgcagtggcccagacatcgcacgctccgtctcctgcccactgctctc

SEQ ID NO: 136290 - DNA, 100 bp, Homo sapiens
gtgcggaagggcacctccacccggatttgcagatttacagaatggctgcacattaatggaaagagaagcataaacctatcttctttcattatggagggag

SEQ ID NO: 136291 - DNA, 105 bp, Homo sapiens
tgtaactgaaagatacatggcttgcaaaaagtaaaccacgatcgttatgctgaaacaccttccaccatgaccacctcagcaagttcccacttaaataaaggcatc

SEQ ID NO: 136292 - DNA, 98 bp, Homo sapiens
tccagaagaaatccagtatctgagtaatttgcagtactttgctgtgaccaacaacaattgcatttatggcagacctggtgggccagttttcacaagaa

SEQ ID NO: 136293 - DNA, 100 bp, Homo sapiens
tggaacttccacaaggacagctttttctgcgacgttccaaggccaagccacagacattgccatccaggcagaggagatcatgaagctcaagaagcagctc

SEQ ID NO: 136294 - DNA, 90 bp, Homo sapiens
gaagccgtcacagaggagtcaccagcacccccgaatgaagtccaatatcagatggaaatgatgcggagccttcgccatgtaaacattgat

SEQ ID NO: 136295 - DNA, 88 bp, Homo sapiens
aaggagccatcctgcttcaggataagaagctcatggccatgttcctaggttggaccaatctgacactcctccagcactgccggagaga

SEQ ID NO: 136296 - DNA, 74 bp, Homo sapiens
agctcctggcatcagctctattcaaatctggttcagattttacagctctggattctggaacttttcaaagcctg

SEQ ID NO: 136297 - DNA, 100 bp, Homo sapiens
tcattggccacctacagaaacaaaatgtcaacaaattgatggatatgagatcctgactccaaactccattcccaagggtttcatggacgggaagcaggcg

SEQ ID NO: 136298 - DNA, 98 bp, Homo sapiens
tccaaacatgatcgtttactgcaaaactacatgaggaaataattgacttttataacttcatgtccccttgtcctgaagaagcagctatgagaagagag

SEQ ID NO: 136299 - DNA, 83 bp, Homo sapiens
cggagctgggcgcggattcgccgaggcaccgaggcactcagaggaggcttcaacggaccacaccaaaatgccatctcaaatgg

SEQ ID NO: 136300 - DNA, 98 bp, Homo sapiens
aaggctgcctataatcaagtaaaaacaatagctcaaggaaacctttccaacacagatgtccaagctgccaacctaaatgcgatggccaggtattactg

SEQ ID NO: 136301 - DNA, 140 bp, Homo sapiens
gataaacggagagcagcagccgcccgcttcaaccccaggggaccagaggaactcagccctgattgcggtcctgagggagtctaacaagttagcagaaatggaagaaccacccttgcttccaggagaaaatattaaagaca

SEQ ID NO: 136302 - DNA, 95 bp, Homo sapiens
ccgggtggttaaacttcgcaaaatggttgaagtctgtacaaataccagcagtcctcatgctggcctctttcctaaagataactcgacactggctg

SEQ ID NO: 136303 - DNA, 100 bp, Homo sapiens
aaagaagcctctcactttcagtccaagctaattacacctcctcctccaccaccctcaccagaaagggcggcgactggcggcgcgatggacctgaccgggc

SEQ ID NO: 136304 - DNA, 75 bp, Homo sapiens
tggagccctgcatatgattggctctttagctgaaatacttctgaagtgaaacaaagagtcctcttcgtggaaaag

SEQ ID NO: 136305 - DNA, 82 bp, Homo sapiens
tgtggacattggtttctccattgaagagctggaggacctttacatggtgtttaagttactaaaagatgtaactgaactgcag

SEQ ID NO: 136306 - DNA, 88 bp, Homo sapiens
tgctgctggacgccactttccggggtgcacagcaagtggcatattaatgaggataagagaaaaacagaagctcaaaagcaaatttttg

SEQ ID NO: 136307 - DNA, 90 bp, Homo sapiens
aagaagaggacctgtgcagggcagagcaggaggccccccgaggagccaaggcaaagagggaccactgtgctcatggacccatcgctgcct

SEQ ID NO: 136308 - DNA, 126 bp, Homo sapiens
aaaccttataccctcatgagcatggtggccaacctcttgtatgagaaacggaggagagcattcccattgctttatctggtagggatatcttagctagagcaaaaaatggaacaggcaagagcggtg

SEQ ID NO: 136309 - DNA, 50 bp, Homo sapiens
cagagccaaggaggaagggttgtccggaaatttggagagcttgtaatgac

SEQ ID NO: 136310 - DNA, 76 bp, Homo sapiens
tagccctctacttttcaagacaccaagtgagaggccaaccaggtgtgaaagctgtggagccgttttccattctgaa

SEQ ID NO: 136311 - DNA, 76 bp, Homo sapiens
tacattatgaacccaccactgggcaaagaaagtatccctttaggacagttatgggatggatgggaaggttaatcag

SEQ ID NO: 136312 - DNA, 75 bp, Homo sapiens
ccacagtaccctattcacgctctgtgcttgtgccaaggattatatgcgtcaggcaggagaagtgacttatgcaga

SEQ ID NO: 136313 - DNA, 100 bp, Homo sapiens
gcagcagcagccagtattcgggaaaggcagacaggttatacattggctcttcaaagacgttcacctcatcagagaaatccctgactcctttgcagtggtg

SEQ ID NO: 136314 - DNA, 100 bp, Homo sapiens
gatacacaccaaccaaccagtcaaccagccattgctgtttactggatacctgctgaagaaacacttaaattctggaaatagcgactcagtatcatggcca

SEQ ID NO: 136315 - DNA, 100 bp, Homo sapiens
tgatgaagaagttattcaagatgccattgctgtgaattacgtgagggaaagatattgaagaggagttggacactccgagagtgcagctgttctccccccg

SEQ ID NO: 136316 - DNA, 100 bp, Homo sapiens
ccagtggaatgcaccacagccatctcacatttccaagtacattctcaggtggagacctctcctatgacttctagaagtacatctacttggagaataccca

SEQ ID NO: 136317 - DNA, 74 bp, Homo sapiens
aatacgatcatattgatggttgaaatagcccctcttggagtctgtgccttatgaagaagcactggcaaaccgcc

SEQ ID NO: 136318 - DNA, 100 bp, Homo sapiens
gtgcacgtttgccacctagtgaccaaactgagtaacccaggtttttctgccttttatgtgccatttgcaaaggctttatactctttgacaaacagacgct

SEQ ID NO: 136319 - DNA, 100 bp, Homo sapiens
cgcgcccgccagctgctccggagatacggtgacttaagagattaaaattaatttggttgctgttggttctgaacaaataatgagttcttttatttgaggt

SEQ ID NO: 136320 - DNA, 100 bp, Homo sapiens
cacgaaaaaacttccagaacatctgggagaatatttaatggaaaatcgcttggttaaaacctgacacttttaacaggtttctgctttgggacaaccatac

SEQ ID NO: 136321 - DNA, 75 bp, Homo sapiens
gcatttgtatgttatggtgaatgccaaatttgaaggtggacaacgcgtactggctgtggactttccagggacgcc

SEQ ID NO: 136322 - DNA, 100 bp, Homo sapiens
atggtccacgagacttctggagctccagccagcacatctccattgagggccagaaggaagaggaaagattaaatcggatttctttgaactattatctaat

SEQ ID NO: 136323 - DNA, 95 bp, Homo sapiens
cagagggttctttccattgtgtctgccagcagggtttctcaatctctgcagatggccgtacgtgtgaagggtcagtgaagatatgaaattaactg

SEQ ID NO: 136324 - DNA, 100 bp, Homo sapiens
cgccaggccgttgccgcactgtgtgcacttggaggcttcaaagagacaatcaagataggatccgaggttcagccagatgaaaactcgctggatttttcct

SEQ ID NO: 136325 - DNA, 82 bp, Homo sapiens
ctgtggggccgccggcggcccggcttcagaactgccattggatgtccagaatcccctgtagttgataatgttgggaataagc

SEQ ID NO: 136326 - DNA, 50 bp, Homo sapiens
tgggaatgaagcgatgtagccttttaagacgatgttcaactttggctctc

SEQ ID NO: 136327 - DNA, 100 bp, Homo sapiens
ctgacgctccgcattgcagactgcggagtcagacggcgctatgtacgccctcttcctcctggccagcctcctgggcgcgggcttgacacaactctcatag

SEQ ID NO: 136328 - DNA, 83 bp, Homo sapiens
caatcccccactctttccgccctaatggaggtctccagtttcgacttcccaagtaagaagcggaagaggagccgctggaacca

SEQ ID NO: 136329 - DNA, 90 bp, Homo sapiens
cgagtgcaagcagctgtccgagtcccaggtcaagagcctctgcgagaaggttcgagaacttgtcttggacaattgcaaatcaaatgatgg

SEQ ID NO: 136330 - DNA, 73 bp, Homo sapiens
gttggctgataaaattgccctgaaactggttggtgaagaaggatttgtagacaaagtggtgaagaaagggaag

SEQ ID NO: 136331 - DNA, 100 bp, Homo sapiens
atggcagcatctacaaccctgaagtgcttgatatcacagaggaaactctgcattctcgcttcctggagcatggaggagcaggacttggagcgaaggttcg

SEQ ID NO: 136332 - DNA, 75 bp, Homo sapiens
attacgccgtctccaagatgtagctaatgaccgtggttcccactgagaaacctctgtagaggagcaggatgcaac

SEQ ID NO: 136333 - DNA, 100 bp, Homo sapiens
aaattcttctcccagtctccgggcgcaagtgcctccccagtttatttccccccagatatccttggaacagaagatcttattgtggaagtgacttccaatg

SEQ ID NO: 136334 - DNA, 75 bp, Homo sapiens
ggcgacatggccagctccggagaggtgtccctggccagtgtccttccacctgtccacaagcatggggaacatctt

SEQ ID NO: 136335 - DNA, 83 bp, Homo sapiens
tggatcgctgtgatcgtcacttggagaaggagaggaacgcgcggaggaagaagaagaaagcgccggcggcggccagcgaggag

SEQ ID NO: 136336 - DNA, 121 bp, Homo sapiens
gggattaatgctaaatttgtgaatgctgtgtatgataccttacttaatactgtgactctgacatcattagaagcatgccagaacagactggtgaaaagtaaaccttttcacctacaaaatt

SEQ ID NO: 136337 - DNA, 75 bp, Homo sapiens
cggaaggacaccaagatgcggatccgggcctttccgggcgaggaggcttccgaggaggcagaggaggaggaggtg

SEQ ID NO: 136338 - DNA, 83 bp, Homo sapiens
gtgaggttcagctgatgaagcttctgaaccatccacacatcataaagctttaccagaatccacattcatctcaatggaaggat

SEQ ID NO: 136339 - DNA, 100 bp, Homo sapiens
ccatatttaaacttgaattacctttgaagcagaagggtatacgccatccgagaagctgccaccaacaacctcatgaaactagttcagaagtttggtacag

SEQ ID NO: 136340 - DNA, 100 bp, Homo sapiens
agttttaatgggaacatacgatgatggagcaaccaaagatcagggaagatgtgccttggagaggaagcatgtcttaaatctggaaatgatatgaagaggg

SEQ ID NO: 136341 - DNA, 76 bp, Homo sapiens
tagagatgtgatgttggagaactacagaaacctcgtctccctggtttttggctttcacccccaaccagtgaccaaa

SEQ ID NO: 136342 - DNA, 75 bp, Homo sapiens
ggggcctctgtgagcaaaacttggatgaatttttagatgtgatctactggttccgacagatcattgctgtggtcc

SEQ ID NO: 136343 - DNA, 82 bp, Homo sapiens
gagggcgcccgacccgggactagaggacggaagggtctggaagcggggccttttccgaagtggttttagctgaagagaaggc

SEQ ID NO: 136344 - DNA, 100 bp, Homo sapiens
gtaacttacgtgtactttaccaacgagctgaagcagaacaagttgaaatcatcgcagaaggataaagttcgtcagtttatgatcttcacacaatctagtg

SEQ ID NO: 136345 - DNA, 51 bp, Homo sapiens
ctcggaagagcgctcccaggagaaacaaatgaagactcttaagatgacaga

SEQ ID NO: 136346 - DNA, 100 bp, Homo sapiens
atccactgcgaaggggagcctatcaaacgagaggtggacccccaaaagtacaagggcatatttaacggattctcagttacacttaaagaggatggtgttc

SEQ ID NO: 136347 - DNA, 75 bp, Homo sapiens
tggccctctagtcagaggcgaggctcatagagaaataagcgggttttgaaaacaaaaaaaagaaggagtggaaga

SEQ ID NO: 136348 - DNA, 97 bp, Homo sapiens
ctctgggtctccaggcccgcgaccgtccgccagtcgtcccgagatgtgaagttcatttccaatccgccctccatggtggcagcggggagcgtggtgg

SEQ ID NO: 136349 - DNA, 100 bp, Homo sapiens
cctgggtcccgccgggtctgaagcctgaacaggaaggatttttactgggagaggtaagacaagaggaaacgtttagcatcagtgactcacaaatcagcaa

SEQ ID NO: 136350 - DNA, 100 bp, Homo sapiens
gcgctgatagagcaattcaacagttcgagacgagttgtactgctgtcacaggaaatggacgctggattacaagcatggcagctcaggcagcagaagttgc

SEQ ID NO: 136351 - DNA, 75 bp, Homo sapiens
gcggcggcggcggaggatgagcctgcagagcgcgcagtacctccgattgttctctggggccggactgagaaatgc

SEQ ID NO: 136352 - DNA, 87 bp, Homo sapiens
ggagttcgtctcttacgtctgcggaagtgcagctgcctcagttcttagcgcaggtgggtgacatcaccatcctggtgaacaatgccg

SEQ ID NO: 136353 - DNA, 50 bp, Homo sapiens
ttgaatggcttagggctcaagtgtccctggccagtgtccttccacctgtc

SEQ ID NO: 136354 - DNA, 76 bp, Homo sapiens
agagcctcagtttgtgcaggacaccgacatggaacagggactcactgggggtattaataggggaccctattaccac

SEQ ID NO: 136355 - DNA, 50 bp, Homo sapiens
attttccagcccgtgtctgcagtctccaaaaaaagttggtgatgacattg

SEQ ID NO: 136356 - DNA, 89 bp, Homo sapiens
accagctcgtcccagacactcagtgggagcagctgcagacagagctggtcctggactcccagaagcgagtcttctcctggggctttggt

SEQ ID NO: 136357 - DNA, 114 bp, Homo sapiens
cgaccttgaggctgccgccgcgagtctgccatcgtccaaggaggtggcagcccccaggaccactggctgcccatgagagatgaaggatggcatccaagggggccggcatgtctt

SEQ ID NO: 136358 - DNA, 50 bp, Homo sapiens
ctgagcgctcagactcagaccaagaaactggcgatggaatatgagaggag

SEQ ID NO: 136359 - DNA, 75 bp, Homo sapiens
ccttccacagggtgatcccttccttcatgtgccagattgacgagatgcctgaggctgccgtgaaatcaacagcca

SEQ ID NO: 136360 - DNA, 100 bp, Homo sapiens
catagttcacaatgttgattctgatgacctcattagcatgggatccaacgacagtgttatccacgtgaccaaggaagtgaaagaagtggcaacgctgtcc

SEQ ID NO: 136361 - DNA, 132 bp, Homo sapiens
gctccgccgcccgcaggctccggcttccgtcccggacagagcccgtggtcgcgcaggtctccgtgaggccgggtgacgctccagaatgggagacaagccaatttgggagcagattggatccagcttcattca

SEQ ID NO: 136362 - DNA, 98 bp, Homo sapiens
ccatcatggacgcactggtccgcatcagtggaccctgtatctggcaccggacagcacctggctgctcaggacgaatgaatgacggcgtgatcctccac

SEQ ID NO: 136363 - DNA, 74 bp, Homo sapiens
caccagcactgtctccaccctagagaatttctctgcaaagaatgtccaaaaattcatattcacattgatcgtat

SEQ ID NO: 136364 - DNA, 83 bp, Homo sapiens
cggaaccgacagcctcctccgagaaggggtgaggtggctttgaccccgggttgcccggccagcacgaccgaggaggtggctgg

SEQ ID NO: 136365 - DNA, 100 bp, Homo sapiens
ggtggtgcagcttcttcagttccaggaagatgcctttgggaagcatgtcaccaacccggccttcaccaaactccctctgtttggggctcagctaagtgac

SEQ ID NO: 136366 - DNA, 83 bp, Homo sapiens
ctcggtgcggctctcggactctgctcctcactcaccgcgtggacacgatcggtgtcgtgaaaactacccctaaaagccaaaat

SEQ ID NO: 136367 - DNA, 74 bp, Homo sapiens
ccaggagaggaagacccagtacagctggacgtttgccgtccactctgaggtgggttcagtagaagaattccaag

SEQ ID NO: 136368 - DNA, 100 bp, Homo sapiens
ccctctcaggacaacccagatgtgcaacaaagtgcgatgagtgtgaacatggctacgcctcttcattcccgtccatgccgagcccccgactgcagcattc

SEQ ID NO: 136369 - DNA, 101 bp, Homo sapiens
cgcgcagccacctggagaaggcggaggagaaggagaagcggcgcctcgaccagctggaacgtaagaaggagacgcagcgcctactggaggaggaggactcc

SEQ ID NO: 136370 - DNA, 100 bp, Homo sapiens
ccgaccctgccctgcttcctggggactgctgctcttcctgtccagcatccaggatattgcagtcctcttcaacatcatcatcattttcctcatgttcttc

SEQ ID NO: 136371 - DNA, 83 bp, Homo sapiens
caggagtacgtggaccagcacctgggcaggctcatcggaacctgtcccagctccctaattttgccttctctgttccactggcg

SEQ ID NO: 136372 - DNA, 97 bp, Homo sapiens
ggaagggcaggacgaggtgtcggcgcgggagcagcacttccacagccaagtgcgggagtccacgcaaagtgcctgcattcgtgaggatgattgctcc

SEQ ID NO: 136373 - DNA, 97 bp, Homo sapiens
gtgttgagcccatcaacgtggaaggaagttgctgcccaatgtgtccagtatttgactacagtcattccttatgagaaaaaaaacggaccaccgtctg

SEQ ID NO: 136374 - DNA, 100 bp, Homo sapiens
cgcaagggcggagggggcccgaaggacttcggcgcgggactcaagtacaactcccggcacgagcacaggttggagctgaaggagtgcccaggctgcggat

SEQ ID NO: 136375 - DNA, 48 bp, Homo sapiens
attcggttctctacttccaacagaagcatgttggaacaggattccagg

SEQ ID NO: 136376 - DNA, 82 bp, Homo sapiens
tgtacgaaggcctgaggctgaacaacatgaataaatatgactacgtgctcacaggatgcgggctccgggtgcgggcgcggcc

SEQ ID NO: 136377 - DNA, 98 bp, Homo sapiens
ggacctctatctcgcttttcccctggccttctgtatcttcatggtgcggctcatcttcgagaggttgatgccggcccaggatggatcagacctgtgaa

SEQ ID NO: 136378 - DNA, 75 bp, Homo sapiens
gagcctcaaaatgaagatggcacatggcccaggcagaccttgcagtcaaagtccggtttatcactaaaatatggc

SEQ ID NO: 136379 - DNA, 101 bp, Homo sapiens
gcgaagctggccaaagcctgcccagacggctcacctgtgcgggatggaacaaaaggagtctccccaggacagtgctatcacccgggatattaaccgaacat

SEQ ID NO: 136380 - DNA, 50 bp, Homo sapiens
agttaccatttacagacactgagcagtccttctacaggaagcactttgac

SEQ ID NO: 136381 - DNA, 75 bp, Homo sapiens
gggaacaaagcccacaagcaccgatgtggtggtacagtgggagctattctgacatgtccactggaagttgtaaaa

SEQ ID NO: 136382 - DNA, 75 bp, Homo sapiens
aaaacagcagatttcccaagagcagcggaaaatgatccagtcacaggtaaagagaaatgtgtatgaccttacaag

SEQ ID NO: 136383 - DNA, 101 bp, Homo sapiens
aaattggagcaaggagaagagccgtgggtaggagatggagaaattccaagttcagattctccaggtggaccccaagttcctgaggaacatgcgctttgcca

SEQ ID NO: 136384 - DNA, 74 bp, Homo sapiens
ctcatggaggctgagcatttattcaggctttcctcggagacgggtggcatggggagcagctagaacaatgcaga

SEQ ID NO: 136385 - DNA, 76 bp, Homo sapiens
gagttgccaatcattatcacaggttcagaagatggacacagcattgttggttttgccatgtactattttacctatg

SEQ ID NO: 136386 - DNA, 75 bp, Homo sapiens
gcggaatcggggagcgtccggagctagctggatcctctaggcaggtgctggagaatctggtaaaagcaccattgt

SEQ ID NO: 136387 - DNA, 74 bp, Homo sapiens
tgggctactttgtatctggatgtgatccctctatcatgggtattggccaagcaatggggctggacacaaggtcg

SEQ ID NO: 136388 - DNA, 98 bp, Homo sapiens
atcgcccaagtccctctactcgcgagaaactgaggcttcttgaagagcttgaagacacttggctcccttatctgacccccaaagatgatgaattctat

SEQ ID NO: 136389 - DNA, 134 bp, Homo sapiens
cattgacagggatggaaccatcaacctctctgagttccagcacgtcatctcccgttctccagactttgccagccgagaccgacccgcccgcccgcggccccgcagcagctccaagaaggaaccaagagaccgag

SEQ ID NO: 136390 - DNA, 74 bp, Homo sapiens
aatttgttgatactgcaggaaacttctcctttccagttgggacagaaataacccagagccctggaacaaactgg

SEQ ID NO: 136391 - DNA, 100 bp, Homo sapiens
aagaaggggcttataaatgcgtggacagctgcagaaaatgacagatggccgtggattcaggtacgtcagcctgtcatatgcatcaacaaccatgtatttt

SEQ ID NO: 136392 - DNA, 100 bp, Homo sapiens
gaggcgcctccgtcgccaagccgcgccgtcgcggggctcccgggagcggcccttagcgaccccgcccgggccccctcagtcaaaccggcacgatgtccag

SEQ ID NO: 136393 - DNA, 80 bp, Homo sapiens
atatgtgatgccattccagcactggactcatggaggctgagcatttattcaggagagagcaagccacatcagtgctcctg

SEQ ID NO: 136394 - DNA, 100 bp, Homo sapiens
ggagacgctccggactcgtcgccgcaggactcacaccacccggcaagaactgctcactacggctccctgccccagaagtcacacggccggacccaagatg

SEQ ID NO: 136395 - DNA, 80 bp, Homo sapiens
gacagattcgcagtggtcgcttcttctccttgctgctgaatgccatggtggcaaaactggggaaccgggaggacccactc

SEQ ID NO: 136396 - DNA, 75 bp, Homo sapiens
ggaatctggctggataggtccaaaacctacaagttcccaagtggggcccaggctcggaccatcctgtgtgtgaaa

SEQ ID NO: 136397 - DNA, 50 bp, Homo sapiens
ggacaagaacgcagacctttgttgatgctgaaaacgccattcaacagatg

SEQ ID NO: 136398 - DNA, 75 bp, Homo sapiens
cttgttcacatgtggcaaatgtaaaaagaagaattgcacttacacacagtgctactatatcggggccacagatga

SEQ ID NO: 136399 - DNA, 82 bp, Homo sapiens
gagccatggggctccctggaatgagaggcccctcaggaccagatccgcgtccgagtgattgagggccgacagttaagtggta

SEQ ID NO: 136400 - DNA, 98 bp, Homo sapiens
gtggaccggagctcgtccagctgcgtgcctaggtgtgagttcttgatacgaatgaaaggccaagagtttgttgatgagattcaaggtagatatcctca

SEQ ID NO: 136401 - DNA, 75 bp, Homo sapiens
gaatctatagttaatcttggcgacattgacaatgatggctttgaagggaaaagaatcccgcccactaagacgcga

SEQ ID NO: 136402 - DNA, 82 bp, Homo sapiens
cctgcaggaaacaagctcctacttccagaaaaagtgctcctgggactccaggataccaggagctgctaagacacatggttgc

SEQ ID NO: 136403 - DNA, 100 bp, Homo sapiens
ccggaacgggagccaacatggcagcggggttcgggcgatgctgcaggggcccttaagtgagaagcaggaggctttgatgaccaagagccccgcatccaat

SEQ ID NO: 136404 - DNA, 100 bp, Homo sapiens
ctcgccgcctccgctgggagccgcagatcagtccaagttgacggacaggaggcgaaatgtgcaaatgtttatgggtgtctgcttttggggcagagttttc

SEQ ID NO: 136405 - DNA, 50 bp, Homo sapiens
aggaaacacatttcatatactgcagagggaagtggaatcccgattgcttg

SEQ ID NO: 136406 - DNA, 104 bp, Homo sapiens
cccggctctcgtcagcctcccgccggccgtctccttaacaccgaacaccgtatttctgggaaaagccagcttctgtttgcactggtcttcacaactcgttacct

SEQ ID NO: 136407 - DNA, 100 bp, Homo sapiens
ggagaagtaccggaagatcaagctgcagaacaaggtgtttcagagaagtgtttccaatgctgcgacccgggtgtgtaggacggggaggtcacgatggcgc

SEQ ID NO: 136408 - DNA, 75 bp, Homo sapiens
gcagatcgggagcgcaaggtcgccctcaaggccatgatcaaaacccctgggcgctgcctatggcacagccaagag

SEQ ID NO: 136409 - DNA, 100 bp, Homo sapiens
tcacctgcttcatccttgtttaatgactttggtgccctcaacatctctcagagacgaaagaacctaaaggcagacccagaagagctttttacaaaactag

SEQ ID NO: 136410 - DNA, 101 bp, Homo sapiens
aacctctggacatgaagctcatgaggtggctgggagcccgagccccacacctgccgggcagcaggtgctggacgtcgacagctgcctggactcatccgtgc

SEQ ID NO: 136411 - DNA, 75 bp, Homo sapiens
aggcgtcttggcccgggcagcagtggcggcagcgcccgagagagattatgatgcatcattatcacagaagaaatt

SEQ ID NO: 136412 - DNA, 48 bp, Homo sapiens
ctcctatgagctcctctctggcagatgtacttgaaggatataatggaa

SEQ ID NO: 136413 - DNA, 100 bp, Homo sapiens
gttacaaaaccagttggtggtgacaagaacggcggtacccgggtggttaaacttcgcaaaatgcggacgcccgtggtttactgtgtgaggttagccaagg

SEQ ID NO: 136414 - DNA, 82 bp, Homo sapiens
gcctaattaccttcaaacctgtgtactaatggtcacttgatgtgcgctggctgttttatccacctactagcagatgcccggc

SEQ ID NO: 136415 - DNA, 100 bp, Homo sapiens
tacgagtgcaacatctgcaaggtccgcttcaccaggttctgattgggacaatcttatagtgcactcgaggcagccgcaaaagaagcctcacagtgtgtct

SEQ ID NO: 136416 - DNA, 90 bp, Homo sapiens
gattctataagcagttaggatctggagattccagaggggtgactaccatattgatgtctgtatcaatgactacctggatgttttctgccc

SEQ ID NO: 136417 - DNA, 89 bp, Homo sapiens
gcacggaggtggggtcggccaggccggtgcgggctccttgcggcaggtcccaagagcacttccgttccggcgcccctccggtcatcaac

SEQ ID NO: 136418 - DNA, 76 bp, Homo sapiens
acaattgaggatgaagatgtgaaagataggaaccaaggctttagccttctcaactcattgactggaacaaaccata

SEQ ID NO: 136419 - DNA, 100 bp, Homo sapiens
gtgtacccctgaagtgagtcaggagctgtatgaccttaacgtggagctctccaagctcctactccaatgtggccagatgacctgcaaaaccacacattcc

SEQ ID NO: 136420 - DNA, 90 bp, Homo sapiens
ggcggccatggtgttgctgctgtactccttctccgagataattgacgaccttgccaacctagtggagaacacagatgaaaaacttcgcaa

SEQ ID NO: 136421 - DNA, 83 bp, Homo sapiens
gtgtatcaagtcccactatcaaggataagccacccaagaagatgaaaggattgttcttgttgacaacaaatgtaagtgtgccc

SEQ ID NO: 136422 - DNA, 100 bp, Homo sapiens
cctaggtcatccttcagcagctcctcagagctgtccagcagccacggcccggggttttcaaggcttaatcgaagagatgtggctgacaagattttgaaaa

SEQ ID NO: 136423 - DNA, 90 bp, Homo sapiens
tatgtgctgtgtccggacaacggctgcggcgacaattttaaggacagaataacgggctcccagattcacaagccccaccaagaggatcac

SEQ ID NO: 136424 - DNA, 75 bp, Homo sapiens
gtttctggctccgggctgagcttcctggagaagaggaaggtgtgcaactgaggaacatggctcaagaaactaatc

SEQ ID NO: 136425 - DNA, 90 bp, Homo sapiens
aagagaaacaattctgggtgactcagcttcgagcttgtgccaaataccacatggaaatgaattctaagagacggggtttcgccatgttgg

SEQ ID NO: 136426 - DNA, 101 bp, Homo sapiens
gaggggccactgctgggccctgaggctgcaccaagtggcgaaggagccggctccaagatgccttcaattaagttgcagagttctgatggagagatatttga

SEQ ID NO: 136427 - DNA, 97 bp, Homo sapiens
tggcggagctaggagctggcggcgacggccacaggggcggcgacggcgcagtgcgaagcgaaacaggtggctgtacttttgatgatggtccaggggc

SEQ ID NO: 136428 - DNA, 100 bp, Homo sapiens
gagtttgcatatatcaactgtggccttaatgagcatgttgacagcatcgatgctagacagacaattaagtattggagccatgggaataaaggttcaacgt

SEQ ID NO: 136429 - DNA, 90 bp, Homo sapiens
gcacggagagcggtgcccgcgtcaggtggtgatctttgtgaagtctgtgcagcggtgcattgccttggcccagctactagtggagcagaa

SEQ ID NO: 136430 - DNA, 100 bp, Homo sapiens
tttgtgactcacaagatgctgatcttgctcaggttgaaagcttccaggaactgaatgatatggaacctagcaaagctgttccactgaatgcatctaagca

SEQ ID NO: 136431 - DNA, 98 bp, Homo sapiens
ccggatgagtacgataccgaagcgggctgtgtgccccttctccacccagaggatattcttggtgatcttggaagtgtccgtatcatggaatcaatctc

SEQ ID NO: 136432 - DNA, 75 bp, Homo sapiens
tgagaatgatgggcgagatcgtctccgccttggaagggaagattcgattttgccgacggatggggcaaaagaagc

SEQ ID NO: 136433 - DNA, 100 bp, Homo sapiens
gcgcgccctggcgggtccggaccaaggtatgagcacattcttttagaacctgacccagtaccagcatatgctctgaaactgctagtcgcgatgactgaac

SEQ ID NO: 136434 - DNA, 100 bp, Homo sapiens
ggatcaaggacagacagctcaccaaccgtgacagcaccatactggaacttcaaaaagttctgaaaacatgttgcaggctctccccggaggctcagccccc

SEQ ID NO: 136435 - DNA, 82 bp, Homo sapiens
gtcccctgccccgggcaaagcccatctggtccgccgagcagccctattcaggcaggagctgctcttctggggtatcgcgatc

SEQ ID NO: 136436 - DNA, 50 bp, Homo sapiens
aaaatacgaaggtttctggctggtggccaatccgccatggtatagttgaa

SEQ ID NO: 136437 - DNA, 75 bp, Homo sapiens
ttaactttgcattggttggacaccttttaaaaggaaatgggtcctgatgaatatgaagagatggaagaagaggag

SEQ ID NO: 136438 - DNA, 75 bp, Homo sapiens
gtcaaattccctgagttgaattatcagcttaaaattaaagtgtgcattgacaaggcaattgaaggaacagactaa

SEQ ID NO: 136439 - DNA, 101 bp, Homo sapiens
gtacccccgtagcggaaaaacactcagcccacctgcacccaggtgaaataaacagctttattgctcacacgaagcctgtttggtggtctcttcacacggat

SEQ ID NO: 136440 - DNA, 113 bp, Homo sapiens
gtggcgaagggaatcgcaaggctcttccctgaccattttctactgtccctgcgcgagttacagaatgtctgaaggggacagtgtgggagaatccgtccatgggaaaccttcgg

SEQ ID NO: 136441 - DNA, 83 bp, Homo sapiens
aatgaaaccggcttgttgtcttcaattaaaaaatttattaaaggaagcacacctaagttttcagtgtggacagcagatgaagg

SEQ ID NO: 136442 - DNA, 82 bp, Homo sapiens
tgccaatgttggagccgtctgcaaagtgtccccggcaagaagaacactctgctccagccaaggtggtgagggcagctgttcc

SEQ ID NO: 136443 - DNA, 100 bp, Homo sapiens
aaatcagcaagagctttctggaagaaaggaaatgttaggatcactttattctgagcgtcagaagccatgatgcatgtagtgtgtgtgtactgcagctgga

SEQ ID NO: 136444 - DNA, 100 bp, Homo sapiens
atcaaaaggagttcatgcttatgaatgctcgacttcagatcgtctggggaatatttttcatcttagttgcattgctgtttgtaatttctctcttcttgtc

SEQ ID NO: 136445 - DNA, 75 bp, Homo sapiens
tgaaattcttaaggatgctttcaaatcaaatgactcacagcagattcaaccctatgaaaagataaaggccagggg

SEQ ID NO: 136446 - DNA, 110 bp, Homo sapiens
cggagattgacaatcaatgggccatcttggacgccattacagcagcagatcatcagactccaccaagagcttgggagacagaagtctctgtgggctgatgttcatggaaa

SEQ ID NO: 136447 - DNA, 74 bp, Homo sapiens
atgcctgcagagctgtggcttaccaggtgttggagcgggccggagagaagtagagtgggctgcgaggagaagga

SEQ ID NO: 136448 - DNA, 98 bp, Homo sapiens
gggtactacacaaccgtctccagccttggtctgagtggactgtcctgcaggtttcccatccacataccaagctgatgaggatcccatcgttcttcccc

SEQ ID NO: 136449 - DNA, 100 bp, Homo sapiens
ctggggaggagaaaatttggaaatatcatttcgggtctaggctgtatagaagacaatgaaatatttgacaatgcaatggctggagtctggattaagacag

SEQ ID NO: 136450 - DNA, 98 bp, Homo sapiens
ctctgagggagggtccgagccagccgctgttttgccggaggagcccctcaggccgaagaaaaaatgctgggcatcttggtgcagcacaaagtccggag

SEQ ID NO: 136451 - DNA, 101 bp, Homo sapiens
cccttcttcctctcagttcctagagtccgaccgccgccgccgccgagagagaggagaaggaggtacgagtgcttccatatccatttacccaccattggcaa

SEQ ID NO: 136452 - DNA, 98 bp, Homo sapiens
ggtttcggcctggaggagttgtacggcctggcactgcgcttcttcaaaggactacaggaatatgtggaagctgtctcttttcaacacttcatcaaaac

SEQ ID NO: 136453 - DNA, 119 bp, Homo sapiens
gttttgctacaaatggaggaggaggaggacgacgacgatggggatatcgggctccaaggtcctggccaagaaagagctggcctatgtcccaattatcggctggatgtggtacttcaccg

SEQ ID NO: 136454 - DNA, 75 bp, Homo sapiens
aaataattgtcagtctaacagaatcctgtcggagttgtagccatgccctaggtttctttacctccagaaagaaga

SEQ ID NO: 136455 - DNA, 82 bp, Homo sapiens
ctagtggccatttacaggaatcagccacttcagttcaggtctcataacaacaaactgcagtctacagcttcttaaagttcag

SEQ ID NO: 136456 - DNA, 98 bp, Homo sapiens
acgcatctatctaacgtttaccctagcaaaccagccagagatcctcagcaggagcctatggaagagatagaaaatttgaagaaacaacatgatttatt

SEQ ID NO: 136457 - DNA, 99 bp, Homo sapiens
attttcttatggagaactgtccttgttggcaccatgccggtggaaaggatgcgcatgcgcccgtggctggaggagcagataaactccaacacgatcccg

SEQ ID NO: 136458 - DNA, 100 bp, Homo sapiens
ggcttccgtcccggacagagcccgtggtcgcgcagtggaagagaaagccaatacccacctcctcttgggcatgtgcttagacgcctgtgctcgctacctt

SEQ ID NO: 136459 - DNA, 83 bp, Homo sapiens
agccgatccagcctgcggagcctgtggggcaggatgagttagatgaactccgtgctgagatggaagagatgagagacagttat

SEQ ID NO: 136460 - DNA, 50 bp, Homo sapiens
ctgctttattgcaggtgctgatatcaactgactttggcctggcaaagcaa

SEQ ID NO: 136461 - DNA, 100 bp, Homo sapiens
ctggactacaatgcaggactgctctcctactacacggatcaaacagagcatactgaatcagcaggactggctggtggtgcagcagacatcatgagtaagc

SEQ ID NO: 136462 - DNA, 75 bp, Homo sapiens
ctgcaggtgtacctgccgcgacaccgaggggcattgacgttgtgaggaataaaattaaaatgtttgctcaacaaa

SEQ ID NO: 136463 - DNA, 74 bp, Homo sapiens
gcgccagtggaagcgggaggcagttgcagctttcaggtagttctcactggaattggtgcagatgagcaacttgc

SEQ ID NO: 136464 - DNA, 75 bp, Homo sapiens
caacattccagttttttaagaagggacaaaagtatgtccgtggttcagaccctgtattaaagcttttggacgaca

SEQ ID NO: 136465 - DNA, 88 bp, Homo sapiens
aggatgattattgtatttcgccgtcaacagggtaagcttgatgattaccaggaacgaatgaacaaaggggaaaggcttaatcaagatc

SEQ ID NO: 136466 - DNA, 97 bp, Homo sapiens
agttgtgcgttgcggccagtcgccactgctgaatagagctgtgcccccctggaaaacggttcatgattacgatggtggcgagcttcgtggccatggc

SEQ ID NO: 136467 - DNA, 75 bp, Homo sapiens
cgggactggtcagatgaacccatcaaagagtgcggttatcaatagtctggctgtctatcgtcatcgtgagactga

SEQ ID NO: 136468 - DNA, 96 bp, Homo sapiens
ccgcccctggtgcacacaccctcgtattctcctgcccttccccagggtgccaagtaccggggctccatccatgacttcccaggctttgaccccaac

SEQ ID NO: 136469 - DNA, 76 bp, Homo sapiens
aggaccgtgggcagccagggtcggtgaagccttcacttaacttaagggaccttggattatctgaactaaaaattgg

SEQ ID NO: 136470 - DNA, 100 bp, Homo sapiens
tgtctgttgtgtcttgttgcgggcaccgcagtcgccgtgaagatggcgtctaccagccgatcatgcaacagatgagtgaccaccgctacgacaaactcac

SEQ ID NO: 136471 - DNA, 100 bp, Homo sapiens
ataagccaatgccattcctcatttggcctgagcagctcagagtcaggaagtcagagcgcaggttgctgaaaagccaggagtcaaaatgactgagcgcttt

SEQ ID NO: 136472 - DNA, 75 bp, Homo sapiens
cctggaagcactcatccagcacttagtacctaatgtggattactatccagatgaatttatcatggcatccagcat

SEQ ID NO: 136473 - DNA, 75 bp, Homo sapiens
tctggactttgggcgtcccattgccatgcatctactgccgaggatgttccaagccgctgtgctgctcgtgcgcgc

SEQ ID NO: 136474 - DNA, 90 bp, Homo sapiens
caccatgcgcccggtagccctgctgctcctgccctcgctgctggcgctcctggctcacgctttgtggattatggcagccaaatgggaaat

SEQ ID NO: 136475 - DNA, 90 bp, Homo sapiens
aagtcaattcaaaggacctgcccccagagagaaaaccatctgcttatactctgaataaaattcaagaaagcatagattctacataaacag

SEQ ID NO: 136476 - DNA, 50 bp, Homo sapiens
aagagcttctgtcgccgctctaggatacttccaggctttggtgaataata

SEQ ID NO: 136477 - DNA, 99 bp, Homo sapiens
caccatacaggaacagggcagacgttagcgtgagtgatcactctcaatcccgggaatgatttcctgaaagaggtgaagatcatgtcgaggctcaaggac

SEQ ID NO: 136478 - DNA, 71 bp, Homo sapiens
cgccgctgctacctgcagcgccgtgtggcacgacacaaaaatcagccccaggatgggtgagttcaacgaga

SEQ ID NO: 136479 - DNA, 75 bp, Homo sapiens
tcgggagaaagtggagtccgagctgagatccatctgcaccacggtgctgcaactccgatccaatatccgagaaat

SEQ ID NO: 136480 - DNA, 106 bp, Homo sapiens
ggaagttcaagatggccgccgcggagacccagtcgctacgggagcagccagaatctctggaaacatggctacagaacatgttaatggaaatggtactgaagagccc

SEQ ID NO: 136481 - DNA, 75 bp, Homo sapiens
cgcgggagcacggcgacgccagcggcggtgcccatgacgcttccggagacaaccctggaaacactgaagcataaa

SEQ ID NO: 136482 - DNA, 100 bp, Homo sapiens
gatcgtgaccgagaccgtgaccgagagcgtgaccgagagcgcgaatatcgtcatcgttagaagtaaaggcatgacttcctggcaccacagggaaaatcgg

SEQ ID NO: 136483 - DNA, 90 bp, Homo sapiens
atcctaagtggattgcagttgggagactttctcattaagggcatgagccagaaggagagctctaagtctgccatgatgtatattcaggag

SEQ ID NO: 136484 - DNA, 101 bp, Homo sapiens
tggaggtttatctcatacatgctggtacatgctggggagttctgggaaatcgttcattcatttacagatgaacagaaaagactcttcttgcagtttacaac

SEQ ID NO: 136485 - DNA, 100 bp, Homo sapiens
taaagacaactcctacacaaccatctgaacaaaaagctgctttccccccacctgaacagaaaactgcatttgacaagatctgaagaggaatgattatacg

SEQ ID NO: 136486 - DNA, 100 bp, Homo sapiens
cggaagctggttttcaggccacaaatgctttcacagggacacagcaggtcaggagagattcaacagcattacctcagcttattacagaagtgccaagggg

SEQ ID NO: 136487 - DNA, 50 bp, Homo sapiens
cctcctgagcagcttggattgcagtgaaacccagggccccaggaaacctg

SEQ ID NO: 136488 - DNA, 82 bp, Homo sapiens
gacaagaaactagagcaaataaccgttttgaaattgaagaggatcacctagcccgggtagaagaggcaatcacccgtatgct

SEQ ID NO: 136489 - DNA, 82 bp, Homo sapiens
agctaaagcagcgtgcgttcagccctggggcttcagtttcacattcttggtacctcctggtggtgcctgggagggagccact

SEQ ID NO: 136490 - DNA, 96 bp, Homo sapiens
agcagatccaggttcagcagccgcagcaggttcagggactggttaaatatgttgagcccaccaatcgttcctcccagtcaacagccggctgagcag

SEQ ID NO: 136491 - DNA, 82 bp, Homo sapiens
gaggagtcctccacctcgtcgcagacgtcttgctgccctccaaaaaagaagagaacttcgagcagctggcatagaaattcag

SEQ ID NO: 136492 - DNA, 75 bp, Homo sapiens
cccgagtgcacgtgtctgaggagggcactgagcccgaggcgatgctccaggtggaccttcaggggatcaaagcaa

SEQ ID NO: 136493 - DNA, 75 bp, Homo sapiens
ccccgcgcagctggctggcggagcatgagcgccccaggtgtgggccatgtttgaggattgccccagcattcagtt

SEQ ID NO: 136494 - DNA, 83 bp, Homo sapiens
ctgaaaagaacggagcttgaagcaaagctgcaggttttaaaggaggaatgccagctcctgagcaggcctcattggtggaggag

SEQ ID NO: 136495 - DNA, 100 bp, Homo sapiens
ggaggcttcgcccggctttgcagcggggacttcggcggcggcgcctcaggcacctcggcccggttcctctgtgacgagggtgcaggtatctctggggact

SEQ ID NO: 136496 - DNA, 100 bp, Homo sapiens
atgaaagtcaccgtgaagaccccgaaggaaaaggaggaattcgccgtgcccgagaatagctccgtccagcagcggacaaggcaaaatctcagcaagttcg

SEQ ID NO: 136497 - DNA, 118 bp, Homo sapiens
gccaccgcaaggagatgcagctgtacaacagcatcttcagcctgctcagcttcgagaagattggctacacaggactccctggaggaaaagcggaagcggcagcggtctgaacgcctgg

SEQ ID NO: 136498 - DNA, 101 bp, Homo sapiens
gctgtacatccgcatcgtggaggggaagaaccttcccgccaaggacatgcatacgaggagcggcagcggcactggcagcgagagcgtgaggccctgcgaga

SEQ ID NO: 136499 - DNA, 101 bp, Homo sapiens
gccctcgcctcctgcagccgcatcgcccgccgagccacagccacgatgatcgcgggctcccttctcctggtttattcttcagtccaaggaagcaattcaca

SEQ ID NO: 136500 - DNA, 83 bp, Homo sapiens
ccctcggcgtgctactgtgcgctcgatccagcaccatggggaagcgggacaatcgggtgatggtgatggaatttcctgataat

SEQ ID NO: 136501 - DNA, 75 bp, Homo sapiens
gcttgggccgccgagctggacccggaccggttttggatggcttaagcaaaatcagactaaactatagcgatgaat

SEQ ID NO: 136502 - DNA, 75 bp, Homo sapiens
gcccggattggggatgagtatgcggaggacagctctgatgaggaggttctgcggggagtgtctccagccctgcct

SEQ ID NO: 136503 - DNA, 76 bp, Homo sapiens
acttttgatgatcatgatacagttgataaaattgttgcccagtgtgccatcataatgtttgatgtaacatcgagag

SEQ ID NO: 136504 - DNA, 90 bp, Homo sapiens
cccttaccttgatgagcagctacagaagttttcatgggctgagctgctgagttcagcctgggaactgaggccaacaagggagtctcctcg

SEQ ID NO: 136505 - DNA, 100 bp, Homo sapiens
atcaccaacatagccatcgacttcggggagcaggtattcacttacaagcagagcacaattacccaccagaaggtgactgctatgcaccccacgaacgagg

SEQ ID NO: 136506 - DNA, 50 bp, Homo sapiens
tagacctggatgtcttcctgaagtgcctgtatggagtggaatgaatgttg

SEQ ID NO: 136507 - DNA, 75 bp, Homo sapiens
agctctttgacttcttgcatgcgagggaccattgcgaagatgagaatgtgcctactgctcctgatcctccaagtc

SEQ ID NO: 136508 - DNA, 100 bp, Homo sapiens
ggcaggacctcgaacccgcctgcgatggggcgagaaaggtcccactgcagccctccaagcaggccatcagcatcagcaaagccatcaacacccaggaggc

SEQ ID NO: 136509 - DNA, 53 bp, Homo sapiens
aaacactggaatcctactttttctattgtgcttcaagaagaccatagggaaga

SEQ ID NO: 136510 - DNA, 50 bp, Homo sapiens
tgctccattcaccgagtctaaaaacagcagagtcacctgatatgaaaaag

SEQ ID NO: 136511 - DNA, 87 bp, Homo sapiens
aggagtttaaggagctgaaagcgcgaatccacattcatctcaatggaaggatcctgccttaagtcaacttatttgtttttgccggga

SEQ ID NO: 136512 - DNA, 99 bp, Homo sapiens
cagaattatacctagaagtctactaatggacagttagtcacccacctacatgttgagcaaaagatacagatattgtggatgaagccatctattacttca

SEQ ID NO: 136513 - DNA, 75 bp, Homo sapiens
ggccccagaaagtttcggttctgcccggcggtggacccacgagcgcgccggaagctgagaggaaaagccttttat

SEQ ID NO: 136514 - DNA, 84 bp, Homo sapiens
ctgccccggcaactccagggtgtctggtccacgacctatcctaggcgccatggtaagaatgattgatgttggctgatattggag

SEQ ID NO: 136515 - DNA, 100 bp, Homo sapiens
aagattgggcaagagaagaattcagaagaaacaaaagtgccaccgaagaggtgagaacaaaatcatgtgctccctaccctcacctcaagacgaccatggc

SEQ ID NO: 136516 - DNA, 50 bp, Homo sapiens
caacatcacttcttctgtttgcagtgtttgcgtgtgaacttggacatggg

SEQ ID NO: 136517 - DNA, 75 bp, Homo sapiens
gccaggcattagcgcagctcgagaaggccaagatcaatgagctgagcaatgttcctgttcctgtcatgctaatgc

SEQ ID NO: 136518 - DNA, 83 bp, Homo sapiens
cgtggacttctacaaggcccgcatggagaggctgtggccaggccagctgggctcggggagcgccagcctgagaggagcgcgtg

SEQ ID NO: 136519 - DNA, 96 bp, Homo sapiens
ccttcatggtgtcactgaatccaggaggagacccttctacgcctggttacccaagtgtcggtcgtttatacgcaatgcagactggaatgaagatcg

SEQ ID NO: 136520 - DNA, 83 bp, Homo sapiens
ggctgagatgggcaccgcggatctggggccgtcctcaggtggcacaagaatggctcaactctccaaatagagagaatttctat

SEQ ID NO: 136521 - DNA, 128 bp, Homo sapiens
gtggggagaacttatagcccttgaagtcaaccatctcacacctttccaaaggacgcgaccataactctaaaagcctcgaagcggaggatccctgtgtcccagccgggcatggccgacccccaccagct

SEQ ID NO: 136522 - DNA, 95 bp, Homo sapiens
gaaggtgaagtaggaccgaattcctgtgccgaagaggcctgcagtgggagagcaggacaatgcagatcttcgtgaagactctgactggtaagacc

SEQ ID NO: 136523 - DNA, 75 bp, Homo sapiens
cgtgctgggaatcctggccctgtcccacaccatcaggaacggcagagtcgaaacaaacaatgagggcgaaccagt

SEQ ID NO: 136524 - DNA, 100 bp, Homo sapiens
ggcgaggctagggaggacctcacttccccggggtgtaataatgttaactgagagtgaattactggaactgaaacggcagcagcaagagcaagaaagagcc

SEQ ID NO: 136525 - DNA, 100 bp, Homo sapiens
tgaaatccatgctcagagatgccaagaagaatctagacagacaggcctttctaggtatgctggtatcctcctgggcatcacaaatacatttgccactatt

SEQ ID NO: 136526 - DNA, 100 bp, Homo sapiens
tttctgttatatttgcctatgtagctgatgtcactcaggagcacgagcgaagtacagcttatggatgggtggtaaagccaaaatctccagaacccgaagc

SEQ ID NO: 136527 - DNA, 101 bp, Homo sapiens
tgggccagagttccaggggctctgggagtggctgccaggagcatccccttagtgcaggtgctgcggactacggccctgaccagcgcctgcgcggagcactc

SEQ ID NO: 136528 - DNA, 130 bp, Homo sapiens
acagccaggcgggacgcgcacagtccctccacgcggaaagaagtaccttcgccggtcaccggctcctgcagggctgaaaatgatgagaatggacaagcagaaaacttttccatggacccacaattggaga

SEQ ID NO: 136529 - DNA, 74 bp, Homo sapiens
cgcatcttcgccgtctggaaagaggtggggctggtgtccgagcacttctcgcaggccccgcagaggctgtcctt

SEQ ID NO: 136530 - DNA, 100 bp, Homo sapiens
gtgatgatgaagaaccgcagatccaggccttcatcccagaataatcactgaaggatttgaagctgtgaaggaaaagcccttcattttttggaagaagtca

SEQ ID NO: 136531 - DNA, 76 bp, Homo sapiens
caaactgaataatgagtacctcgaggatatgaacgagactgccaaacaagaagatattttggaatccacaacagat

SEQ ID NO: 136532 - DNA, 75 bp, Homo sapiens
aagaggctccattgtctctaaattgctggcttccatgatgtgcaaagctggtgccgtgagcgatgtggagatgca

SEQ ID NO: 136533 - DNA, 109 bp, Homo sapiens
ccggaacccgagctggagctgaagcgcaggctgcggggcgcggagtcgggagatggacaatctaaaatatgtaaatcagttgaagaaggaaaatgaacgtgcccagggg

SEQ ID NO: 136534 - DNA, 100 bp, Homo sapiens
cccggggcatctatgccagtgagaggcccaagtccctaggtacggaatgagccctggaacatttctatttcagcagaatatattgcccaggtgaaaggga

SEQ ID NO: 136535 - DNA, 75 bp, Homo sapiens
gtcatggatgaatgtactcatgtagcaaatttctcaggctttgatgcggcctggaagaattgatagaatcatcta

SEQ ID NO: 136536 - DNA, 75 bp, Homo sapiens
tgccggaatttgaaaagtgcctacctaatctgggagcctgcaagtgacaacagcctttgcggtccttagacagct

SEQ ID NO: 136537 - DNA, 100 bp, Homo sapiens
tgtgatttccttactggagcaagggaaagagtcctgcatggtttcaagggacgtaccaggaggatggtgcccagacagtccctcagccccagtgaacgtc

SEQ ID NO: 136538 - DNA, 107 bp, Homo sapiens
ctctctgctcctctagaagatttcacagcaatgctggactgcagtgactatgttctagacttaattcagtgcacaaatgagatgaatgtgaacatcccacagttggc

SEQ ID NO: 136539 - DNA, 100 bp, Homo sapiens
aaagactgcgttcgaatccataacaagttccgatcagaggtgaaaccaacagccagtgatatgctatacatggtttccgccagctgtggatgcctttgac

SEQ ID NO: 136540 - DNA, 100 bp, Homo sapiens
caacagtacctcattgctctttggcgactcttattggatggcaaccttgttcctcggtggcacctgggacctggagatcctttctccacttacgtttagc

SEQ ID NO: 136541 - DNA, 110 bp, Homo sapiens
tttcacagcactctgggcgaaaattggatgtgaaaatgaagccagaccgaggttgatgataattagaagcatgctttccactgaacttcccgacaacatttgttatgcag

SEQ ID NO: 136542 - DNA, 50 bp, Homo sapiens
cggacaagcacagtcttcggaagaaagttggccctaaaatgctggatcat

SEQ ID NO: 136543 - DNA, 83 bp, Homo sapiens
ccgggaggctcccgggcttgcgtggggctgaaatctctttaatgatggagggaagcaggcagacgcgagtgtctcggccatac

SEQ ID NO: 136544 - DNA, 90 bp, Homo sapiens
agtttgctaaatttgaaaaggagaaaatgaatgccaaatgggacacgaattcttccatctctatgacaacaagcccattttagctttctg

SEQ ID NO: 136545 - DNA, 83 bp, Homo sapiens
cttcaacaccaccttcatctccaccatcgggaaatcctcattgacgattcaatttgttgaaggccaatttgtggactcctacg

SEQ ID NO: 136546 - DNA, 76 bp, Homo sapiens
atctgtggacaaagcagtacctgaaacagaagatgtgcagggaaagatgaatgggagggctgattttcgagagccg

SEQ ID NO: 136547 - DNA, 109 bp, Homo sapiens
gggagaccttccggaggatgtggaagtggctgcaggagccggagttccagcgcatgtccgcgctccgcttagcagggatcgcttacacctgagacgaactacagaacag

SEQ ID NO: 136548 - DNA, 88 bp, Homo sapiens
ccgaccctggccgccccgagcggagcctggagataacgaaggaggcccaacttcattcaataaggagcctgacggatttatcccagac

SEQ ID NO: 136549 - DNA, 74 bp, Homo sapiens
aaactgtgagatatgagagacacgaagcaaatgaagttttatactacaattaccagctctggctgggtcgccac

SEQ ID NO: 136550 - DNA, 82 bp, Homo sapiens
cccagaccctggagcctcagttggaagcagccgatccagcctgcggagcctgtggggcaggacacaggttgaacatcacggc

SEQ ID NO: 136551 - DNA, 51 bp, Homo sapiens
ggcggatgcggtcgtgaagatagagcacctccaatcataggatacctgcct

SEQ ID NO: 136552 - DNA, 100 bp, Homo sapiens
tgcctccgacgcctcctgatgctgccaaggggccaagggatgagctggggccctccttcccaatggcatctccccctggtctggaactgaagacactgag

SEQ ID NO: 136553 - DNA, 100 bp, Homo sapiens
cgcggctctaacggggctttctacaaggggattgcagtggcaaagctaggctaggtcttggaggctggtgtaaggcgatgtgggtgaaggcaggaggctg

SEQ ID NO: 136554 - DNA, 102 bp, Homo sapiens
gacgtccatttaccagtcttccctggcaagattcttctgaattgtgctgccttggccaaaagaggtacatcaggaacgtctctatcaagaatacaatttcag

SEQ ID NO: 136555 - DNA, 75 bp, Homo sapiens
tggaaggcgcttttcaccgcggccatcctgcaggcacagttgccgattacagctccagaaacatgacaaggagga

SEQ ID NO: 136556 - DNA, 75 bp, Homo sapiens
tgtatgcaagttttcacttatctcgaaagcctatcagcatagttaagtagtattattgattccacagaatacagc

SEQ ID NO: 136557 - DNA, 83 bp, Homo sapiens
tgagacacaatttatcattgaataagtgttttaagaaagtggacaaagagaggagtcagaccaaatacacgctgatcgatgag

SEQ ID NO: 136558 - DNA, 122 bp, Homo sapiens
gagaaaagtcttttgagatcgtgattatggtgctgaaggacaaattccaggaggcaagtgaggcctatctggttggcctttttgaagacaccaacctgtgtgctatccatgccaaacgtgta

SEQ ID NO: 136559 - DNA, 98 bp, Homo sapiens
catctcagcttctggtttctaagtccatgtgccaaaggctgccaggaaggaggctcgggttatgtatgattttgctgctgaacctggaaataatgaac

SEQ ID NO: 136560 - DNA, 92 bp, Homo sapiens
tgggaagacgacatgcctggaattcttctccaacgcgacagacgtcgaggatttggtcaacactggactcagcgctttccttttctttattg

SEQ ID NO: 136561 - DNA, 82 bp, Homo sapiens
ggaatagaagcagttccttggacagcaggttttcctttggaatatggataaatacaccatgatacggaaactagaaggacat

SEQ ID NO: 136562 - DNA, 101 bp, Homo sapiens
tgctagtcacgtttccaaagctgtgtgctcaacctacttacagtcacgttactacagtgcagtcattggagaaatcgatgaagaaacagattctgcgcttg

SEQ ID NO: 136563 - DNA, 50 bp, Homo sapiens
gcgtgcgcggacggtgtgcgggagctgactaaggctttggaacagaaacc

SEQ ID NO: 136564 - DNA, 100 bp, Homo sapiens
acgggctcccccgggatgatctacaggccaactgagctgcatttccttcccacctaaggaagagaagtacctccagcagattgtggactgcctcccttgc

SEQ ID NO: 136565 - DNA, 100 bp, Homo sapiens
gctcccttaggaatgacagcagtagcagtaatagatctgggattggcacaagactctgctaccagcacaaagagcccaatccttcttggcagtctggccc

SEQ ID NO: 136566 - DNA, 82 bp, Homo sapiens
cccctcccccctgagcccgaggtgctgacgtcgcaaaaaaattggatagaactgtggctgcaccatctgtcttcatcttccc

SEQ ID NO: 136567 - DNA, 100 bp, Homo sapiens
cctgacctctgacccgtattgtctccagattaaagtacaaaattggacagctgtacatgatcagcaaacacagccatgaacagagtgaccggggagaagg

SEQ ID NO: 136568 - DNA, 75 bp, Homo sapiens
cttcatggtgcggctcatcttcgagaggcaccagtctgctgagtggcggtcgtgaatctgtacttgtagagtggc

SEQ ID NO: 136569 - DNA, 98 bp, Homo sapiens
gccactcagctgacatatgaaggactcattgatgaaatttatggcattcagaacaggaactctaatgatccaggacaaagaagttaccctggagtatg

SEQ ID NO: 136570 - DNA, 75 bp, Homo sapiens
ggcttatgaggatggctgcaagactgtcgacctaaagcctgactggggcaaggccataggaaaaggatacagagt

SEQ ID NO: 136571 - DNA, 99 bp, Homo sapiens
ctgcccggctgccttccacctccagtgctggttccagcaacagatagaaatgctttaagttcactctggggaaagctggcctctgaaatcttaatgcag

SEQ ID NO: 136572 - DNA, 98 bp, Homo sapiens
agagcagccctcatcgggagcacatcctggccacgggaaggttccccctcagcccttcctggagatgcagcagctccgcctggcgaggcagctggaag

SEQ ID NO: 136573 - DNA, 82 bp, Homo sapiens
tcgcggtgggtcctcgcttgcagttcagcgaccacgccttggcaaatgcaacattatgtattcttgaacctattatggctgt

SEQ ID NO: 136574 - DNA, 96 bp, Homo sapiens
acgacgacgtgcggacgcagcggcgggggctgcggaaacaggaaattataaaagtgacagagcagctgattgaagccataagcaatggagattttg

SEQ ID NO: 136575 - DNA, 100 bp, Homo sapiens
attcagaagaaacaaaagtgccaccgaagagtcctgacacagctctccctgaggagcagccacattccagctcccagtgcgcccctctccactgtctctc

SEQ ID NO: 136576 - DNA, 88 bp, Homo sapiens
tgcttttgtaacttttgatgatcatgatacagttgataaaattgttggtggatgccctaaacccacccaaattattgctggtgatagg

SEQ ID NO: 136577 - DNA, 50 bp, Homo sapiens
acaagttccatcccacctttgagtcaggaacagtaagaggaccttgtgca

SEQ ID NO: 136578 - DNA, 100 bp, Homo sapiens
agctcatcgagatggggaacaggctccgtgcagagctgggccgacccgaaagctattcagcttgaccctgaagaaactcgtcatgctaaaagaaatggac

SEQ ID NO: 136579 - DNA, 100 bp, Homo sapiens
cagacacctcagtttttctggatcaggcattgatgatgatgaagattttatctccagcaccaatccaaggattaatgtcgtgcttgctggtggccacgtt

SEQ ID NO: 136580 - DNA, 75 bp, Homo sapiens
aggattacaccttcgtatttcaaccggattttaagagtggacttggtattaccataattcctatgaatgtagcaa

SEQ ID NO: 136581 - DNA, 75 bp, Homo sapiens
tttcctgctgatagatgacataaaggaatggaagttggatacactttgtgacttgtacgagacactgaccattac

SEQ ID NO: 136582 - DNA, 82 bp, Homo sapiens
cctacatcgcggggcagcagcccatgtaccagcagctgctgaatgaactgagtgtagttgaggctgagctgcttctcaaatc

SEQ ID NO: 136583 - DNA, 95 bp, Homo sapiens
ctggtcacctgtctggagcaaataaaagagccctgcaatttgaagatacatgagacagcagccaaacccccagttctgcaggctggaaatccaag

SEQ ID NO: 136584 - DNA, 76 bp, Homo sapiens
atcgagccttggcggcggacgtgcaggtggatccataaagaacccagccaacccgcagagggaggggaggggctga

SEQ ID NO: 136585 - DNA, 83 bp, Homo sapiens
cggacatggccgccaacatgtacagggtcggagctgcctgtggaggaaccgattgtgtccacagatgaggtcatcttcccact

SEQ ID NO: 136586 - DNA, 100 bp, Homo sapiens
ctggacactgctcagcagatcgtgtacagaaatgtgatgctggagaactataagaacctggtttccttggtttcagagtcaagtggtgagatcaaagact

SEQ ID NO: 136587 - DNA, 74 bp, Homo sapiens
ccgagatgacctctatgctgagcagtcttactactttgaccgcgatgatgtggctttgaagaactttgccaaat

SEQ ID NO: 136588 - DNA, 89 bp, Homo sapiens
aagatcgccagccttacaggttttacgtgaaatgaaagccattggaatagattgtcaagacattgccaataagggagctaaacagagcg

SEQ ID NO: 136589 - DNA, 74 bp, Homo sapiens
gggtgacactcaacaggattcccggtatctcgggggagctttgtgccttgatggatcaagttcatcatatgcag

SEQ ID NO: 136590 - DNA, 51 bp, Homo sapiens
ccatccggcgctcagctgggcttgaggttctccaaaatacttatcattcag

SEQ ID NO: 136591 - DNA, 100 bp, Homo sapiens
gagtacgtcgttcccgctgcgctaggggaagcgggcagggccgttgctccagggagaactgcaaatatcttcatccacccccacatttaaaaacgcagtt

SEQ ID NO: 136592 - DNA, 75 bp, Homo sapiens
acgggatcctcatgttcactacccttcatgcatgaaagacaaagctactcagtcagccataatggcaggtgaaga

SEQ ID NO: 136593 - DNA, 90 bp, Homo sapiens
cgcggtcggtcggcgcctgttctcgggctgtttggcgggaaggttgtgcaggaccagcgttccctgtgcaggcgccactgcgtttcctgc

SEQ ID NO: 136594 - DNA, 75 bp, Homo sapiens
aatcgggctgaagcgactgagtccgcgatggaggcgcctgtgtctggcagagctggtgtgagacgagacaatcct

SEQ ID NO: 136595 - DNA, 75 bp, Homo sapiens
cagagattgaaatgttccttagaaaggagcagcagattcatgatgttgctatcaaaagttgagaaattgtcagaa

SEQ ID NO: 136596 - DNA, 98 bp, Homo sapiens
ctccctggaccgctgtgtaggcacctgagttaacggacgctaagcggggtaggggaaggtctgagaaacatcttacctattacaacagcaaaggtgcc

SEQ ID NO: 136597 - DNA, 137 bp, Homo sapiens
cggaagaccgcgcgcagggcctgcagcgggagctggacggcgagcgcgagcggcgcgagaaagttcgtgctggccgtgggcagcgccgtctttgatgccatgttcaacgggggaatggccacaacatccacggagat

SEQ ID NO: 136598 - DNA, 75 bp, Homo sapiens
gagctgaggttcttctctgccaccccctcctgtcttgcagttgatgctattgggcccatctcaagctgatcttgg

SEQ ID NO: 136599 - DNA, 83 bp, Homo sapiens
gggagcgctacggccccaacggattttttatcaagcagaaatgcatcgaacaacgagaatcaagatcactgagctaaatcccc

SEQ ID NO: 136600 - DNA, 75 bp, Homo sapiens
cattttagaggcatctgttctatcttcccatcataaaaaagacgccaggaaagcatgtgcagatgcaactctctc

SEQ ID NO: 136601 - DNA, 100 bp, Homo sapiens
agtcagaacgaggttccggtgtgtccaattttgctcaacttattgtgagaggtatctgaaaactgaagagtggagaatatgttcagcagggaacaagagg

SEQ ID NO: 136602 - DNA, 80 bp, Homo sapiens
ctacaggcctccaggaatggctaaaaatgtttcaggtttaccgacaagactgtgaaactttcgggatggtggtgaaaatg

SEQ ID NO: 136603 - DNA, 100 bp, Homo sapiens
tggcgctggccggatggaaatcctaatgacagtctccaaattcgcctccatctgtaccatggacagacccacgaagtcaagcatgcggagtgcagccaag

SEQ ID NO: 136604 - DNA, 100 bp, Homo sapiens
gcacacggcgctctccgacctctacctggagcatttgctgcagaagcgtagtcggccagaggtgacagagctgaatgaacctctctccaatgaagatcga

SEQ ID NO: 136605 - DNA, 100 bp, Homo sapiens
caaacttacttccctttctccgagacagtacccattgcccacttgaaaagggcttgcagtgggtgcagctctcagcagaggagatcccgtcgaggattca

SEQ ID NO: 136606 - DNA, 83 bp, Homo sapiens
tgtactcagcccacatgcccgctcacctgcgctgtgatgcctgcagagctgtggcttaccagcagtgcctgatttgagatggg

SEQ ID NO: 136607 - DNA, 83 bp, Homo sapiens
ttcctgctgtaccagtacctgctgtgcctggggatgcccccggccctgtgcattgcatccgcagtgtcatgcagaagtacctg

SEQ ID NO: 136608 - DNA, 100 bp, Homo sapiens
acaccagcgtctccgccctcccccgagggcggcgagaggagccccccggggcggaggcagtaatctatgccagcaattatgacaatgttagcagaccatg

SEQ ID NO: 136609 - DNA, 127 bp, Homo sapiens
atcacccacacccacacgtgttcaatacacctcccacctgtcctcaggcatatcaaagttatttctcaaactctgaggctgcggagttcacacattgaaatctgtcatctttttcagagagaaactt

SEQ ID NO: 136610 - DNA, 100 bp, Homo sapiens
tgtaagaagtgcatttaccccaagccagcccgaacacaccactgcagcatctgcaacaggttttatgaatgaagctatggctacagattccccaagaaga

SEQ ID NO: 136611 - DNA, 100 bp, Homo sapiens
ctcacattagccagtgtgaagacctccgaaggaccataggaatcctgaagtgggtaaaactgattgacaactttgaaggggaatatgactacgtgaccaa

SEQ ID NO: 136612 - DNA, 90 bp, Homo sapiens
cttccaaagtcgcccaggcaccttctccatgcattgcaagtaatccttcccctctaccaccggatatggctcctgggcagagttatcaac

SEQ ID NO: 136613 - DNA, 82 bp, Homo sapiens
caagattacatatgtagctaatgatatcattctctgctggaactgggtgagaagcgtaaaggcatgttggagaagagttgca

SEQ ID NO: 136614 - DNA, 76 bp, Homo sapiens
tatggagcctgcttgaatccatgagggtcgctgtctgcccattgatagaggccagattgtcttggaagttccaaag

SEQ ID NO: 136615 - DNA, 100 bp, Homo sapiens
accaattcccttggtcaaagaagtgaccaaaaagtcatctacatttcaggttggtacccggaggtacatggctccagaggtattagagggtgctataaac

SEQ ID NO: 136616 - DNA, 100 bp, Homo sapiens
tcccggccttcctgaccaagctgtggaccctcgtgagcgacccggacaccgacgcgctcatctgctggagcccggttcccacatcccatccccctcacca

SEQ ID NO: 136617 - DNA, 74 bp, Homo sapiens
cgcactcctggtcctgctcggggctctgttcccaggccagaagaatgtttgaaggtgagatggcaagtttaact

SEQ ID NO: 136618 - DNA, 100 bp, Homo sapiens
ctaaaggaactgcttatttaatacatttgaacaacttttggggtacttagaagtcagagcaccataacatggtgtgggaagtgaagacaaatcagatgcc

SEQ ID NO: 136619 - DNA, 100 bp, Homo sapiens
caagttcatgtcacgctgggtaatgaggatttgactgtgaagaattggcagagggggtcgatttgggaggaaaggtgtggctataaactttgttactgaa

SEQ ID NO: 136620 - DNA, 140 bp, Homo sapiens
ccgggatcgtgaccgagaccgtgaccgagagcgtgaccgagagcgcgaatatcgtcatcgttagaagcaattttccagattattcaaagtatcaggatgggcatgtgaagtgactgaccttaagatgtttccattctcct

SEQ ID NO: 136621 - DNA, 100 bp, Homo sapiens
ggagcatatattatggaacacaactcctttctacgaaaccgttcaagttctgaccatgaagctacagccatgatgaaagctcagtttatgagtctctggg

SEQ ID NO: 136622 - DNA, 75 bp, Homo sapiens
tcgccagcagccgtccggagccagccaacgagcggacgcaatgagcccctgaagaaagagcggcttaagtggaag

SEQ ID NO: 136623 - DNA, 100 bp, Homo sapiens
cttctaagctgaataaagctgttttggaactgtcaggtacctcaaagcagtgtcaatccatatctacaaggacagagactggataatgttgttgcaaaga

SEQ ID NO: 136624 - DNA, 49 bp, Homo sapiens
ggaaaatctccccggtgactttcaggttcttctgtgtggcagttcagaa

SEQ ID NO: 136625 - DNA, 83 bp, Homo sapiens
caagaaaaagcacctggactccgcggcgagtcctttgcacatgttggcaacacacgcatccgcatcggcctccctgcccacaa

SEQ ID NO: 136626 - DNA, 101 bp, Homo sapiens
tgagtctatatatcctggggaatttaagatgccaaagcagctcattcacatacagcgtggttgtgtcaaaccgattggtgacatctccatgctgtattgtc

SEQ ID NO: 136627 - DNA, 104 bp, Homo sapiens
ctttgttggtggactactctcagcctactatctgtctggagaagaggaatactcccccagttgcaagaggcgcaggaccgtggaagacttcaacaaattctgca

SEQ ID NO: 136628 - DNA, 100 bp, Homo sapiens
gggaagtgaccacgggtgcagacagcaatggtgagatgagtcccgcagagctgctgcacttccagcagcaacaggtaaatgaaattgcctttataaatac

SEQ ID NO: 136629 - DNA, 100 bp, Homo sapiens
tgcacagagccggaggatcgcggaactgggaacagccaggtgccccaaagcaaatacgcggagctgctggccatcattgaagagctggggaaggagatca

SEQ ID NO: 136630 - DNA, 75 bp, Homo sapiens
ctggcagccgcggatctcaccgccgctcaggtgcactggtgattgctgcggtgtttgaccgagacataaactgca

SEQ ID NO: 136631 - DNA, 92 bp, Homo sapiens
ccctcaccacccctatccagacggctgcccttcaagtaccacttcgccgacacgaggtgaccatctgcaattacgaagcatctgccaaccca

SEQ ID NO: 136632 - DNA, 100 bp, Homo sapiens
gaggtagaggtggcgctcatgcatatttgagacaacatctggatggttggggagaacgaatacagtcgctttgaatcgaagatacatgacttacgagaac

SEQ ID NO: 136633 - DNA, 80 bp, Homo sapiens
gtagcaaaggcaagaaggcaacgacgttccatctgtggaaggacctaccaaccagctggaggaaagcaggaatgttcaga

SEQ ID NO: 136634 - DNA, 100 bp, Homo sapiens
gtctactatattgatacccttggaagaattatgaatttaacagtaatgctggagaactgtgtttatgaaactgtagttttgcctttggatgaaagggcat

SEQ ID NO: 136635 - DNA, 98 bp, Homo sapiens
cggagcccctttagccatgtggatacctacggagcacgagaaatacggcgtggcatcaacaaagagagcattgtggatgtagaaggtgttgtgagaaa

SEQ ID NO: 136636 - DNA, 75 bp, Homo sapiens
cccggcgcccctgagccggccgagcggcgacggaccgcgagcttcgcctcaacagcatcaagaagctgtccacca

SEQ ID NO: 136637 - DNA, 74 bp, Homo sapiens
aaagtaaaattcactgttcacacaaagataccccagaatcttccatgctccgtcacactgcagccaggcccaga

SEQ ID NO: 136638 - DNA, 100 bp, Homo sapiens
cattgtggcccacttccctgcccatgagaagccagtgtgctgcatggcttttaatacaagtgtggaggaatcagacatcattgatcttgagaaacgctat

SEQ ID NO: 136639 - DNA, 74 bp, Homo sapiens
caacgccgccggggacacagggcagcccgcagaggacagcgaccacggtgttaagccccacctacaagcagaga

SEQ ID NO: 136640 - DNA, 89 bp, Homo sapiens
tcttcggtggactccttcggcagtccacccaccgccgccgcctcccagctctacgaactcgacggggaccccaagaggaaggaattcct

SEQ ID NO: 136641 - DNA, 96 bp, Homo sapiens
cggcctgctcagctccctggcccagagcgtgtctctgctgcttttcaccggctgctacttcctgctggggagccagatggggactgtgcatcttcc

SEQ ID NO: 136642 - DNA, 100 bp, Homo sapiens
gaaggctgcagtgagccctgtttttgccaccacactccagcttgggtgacgcatccaaagaagacattgacactgctatgaaattaggagccggttaccc

SEQ ID NO: 136643 - DNA, 50 bp, Homo sapiens
ggcgcgctcacccgccccgttcaggttacacgcatggggagatactctgg

SEQ ID NO: 136644 - DNA, 50 bp, Homo sapiens
ctggcacttatgtcctccctggattctggaagttacggtcagtctggggg

SEQ ID NO: 136645 - DNA, 75 bp, Homo sapiens
gagttggggcttgatgaaggcgtggatagcctgaaggcagccattcaggcccatctgctaaacatcccgagctgg

SEQ ID NO: 136646 - DNA, 98 bp, Homo sapiens
ggagagtcataacatatcactgactgacttaattcagtgcacaaatgagatgaatgtgaacatcccacagttggcagacagtttatttgaaagaacta

SEQ ID NO: 136647 - DNA, 100 bp, Homo sapiens
cgagacctacccgaacgacgcgggcgagcggggctttggacgccggtggagacgcaggcgagtgtgctggaattgatgttcgtctgtgtgatgttggtga

SEQ ID NO: 136648 - DNA, 100 bp, Homo sapiens
tctggtacttggatagcatcaaactcagaacttactcctagtgagagccttgctactactgatgattggtctggaactgaaagtgatgcgtatttctgag

SEQ ID NO: 136649 - DNA, 75 bp, Homo sapiens
atcagattttgcattggatattcgcatgcctggggttacacctaaacaggttagcatggcctcattgaaagaact

SEQ ID NO: 136650 - DNA, 86 bp, Homo sapiens
cgacaagccgctggcagccgcggatctcaccgccgctcaggatgaagatctccttcaacgacaaaagcctgcagaccacatttgag

SEQ ID NO: 136651 - DNA, 90 bp, Homo sapiens
cggcccggagcccccagcgcagcggccgcggaactctttccagttaacagacagagtgtggatcattttgctaaatacttcactgacgca

SEQ ID NO: 136652 - DNA, 73 bp, Homo sapiens
ccagccccacagaccagcccagcattcaggttctgcggggagtgtctccagccctgcctgcaggtgccatccc

SEQ ID NO: 136653 - DNA, 80 bp, Homo sapiens
ccaaggtcattttcgtggagaaagccccagggggatatgagactttctactcggaatatcctgagtgttgcgtggatgta

SEQ ID NO: 136654 - DNA, 82 bp, Homo sapiens
gattctctctgaaagtatgaagcagctccatttatcttaaagaaattggacagcatatgaagacaggacatcacatatgaat

SEQ ID NO: 136655 - DNA, 75 bp, Homo sapiens
gggatcagcgcagccgagccaccttgtatgcgctgagccacgcggtcaacaaggctgatgcaaatcgtactgccc

SEQ ID NO: 136656 - DNA, 87 bp, Homo sapiens
atggcatgcctgtaaagaacttgcagttgaaggagtataacacagaaattatggatccggatgagcaattggaaacccttcatgaag

SEQ ID NO: 136657 - DNA, 75 bp, Homo sapiens
aaggcatcaaagctgacagagaaactgttgcagtgaagatccccgtcgaggtcaagatcaagatccaggtctatt

SEQ ID NO: 136658 - DNA, 82 bp, Homo sapiens
cctgctctacgtgaagctgctcatccagtgccctctggtggtcagaagatgctgtgctgtctcgttaggatgaatggattaa

SEQ ID NO: 136659 - DNA, 100 bp, Homo sapiens
ctcagcctccagagtagctgggattacaggaggtgctcctgtaccctggccacagcccaatcctgccactgctgacatctggggagactttaccaaatct

SEQ ID NO: 136660 - DNA, 75 bp, Homo sapiens
gtacgccctcatggggaaaatctccccggtgactttcagataacaacgaacttgatgcaagtgataggtttgcca

SEQ ID NO: 136661 - DNA, 100 bp, Homo sapiens
caagagacgatcattctgcaagcaggcaacctgaatacagagatttacaaacgaggaccacctggcagttcataaacacaagcatgagatgacattgaaa

SEQ ID NO: 136662 - DNA, 83 bp, Homo sapiens
gagaaaaccagctgagacagggcgccacttactagcctgtgggccaaagctgaccaactcccccaccgtcatcgtcatggtgg

SEQ ID NO: 136663 - DNA, 89 bp, Homo sapiens
gtttgagaccagcctgaacaacatagttctctacttaaaagacaatgactactgatgaaggtgccaagaacaatgaagaaagccccaca

SEQ ID NO: 136664 - DNA, 74 bp, Homo sapiens
cccagacggctcacctgtgcgggatggaacaaaaggtgatcatggagctcagcttggtctccatggggctggtg

SEQ ID NO: 136665 - DNA, 99 bp, Homo sapiens
atggggaaggccctggtcgaccagagggagctgtacctgggcctgctctaccccacggaggactacaaggcagtttgaagagaacacatgaagaagagg

SEQ ID NO: 136666 - DNA, 82 bp, Homo sapiens
gcctgcagcgggagctggacggcgagcgcgagcggcgcgagaaaggcagcctggacaacatgacctgcatcctggtctgctt

SEQ ID NO: 136667 - DNA, 89 bp, Homo sapiens
tactcctgtgaggcagacaatggtctggaggcccagcgcagtgagatggtgacactgaaagttgcagatggtgctggatctttgccttg

SEQ ID NO: 136668 - DNA, 100 bp, Homo sapiens
aagaaccggctcatggagtcgaggatgctcccataatactctcagatagtgaagaagaagaaatgatcattttggaaccagacaagaatccaaagaaaat

SEQ ID NO: 136669 - DNA, 73 bp, Homo sapiens
cagaagaagggaaggcgcgagtgaggaaaggaggtactgtaggaattcctcctgatcagcagagactgatctt

SEQ ID NO: 136670 - DNA, 90 bp, Homo sapiens
gcagggtctgaggtcatcggggatgtggacgaaggggccgacctcctaggtctcggcgcggaagatggccggcggcgtggacggccccat

SEQ ID NO: 136671 - DNA, 51 bp, Homo sapiens
cttcaacagaatgtggcaaccagagcttgatgcattagatgccaatgatga

SEQ ID NO: 136672 - DNA, 100 bp, Homo sapiens
ctggctgactacttcatcgtggtaggctatgaccacgagaagccagaaataaactatcaatcttgcccagactggagaaaggactgcagcaacaaccctg

SEQ ID NO: 136673 - DNA, 75 bp, Homo sapiens
ggctttggatcagattattcacgaagctctagaaagcctctacggcagacacatgcaggccaacccagaaccacc

SEQ ID NO: 136674 - DNA, 96 bp, Homo sapiens
gcaggagaagatcacccggaccaaggaggaggccctggagctgatcaacggtgtcatcttcaacgatgtctatgcagcttccaagttcgccctgga

SEQ ID NO: 136675 - DNA, 75 bp, Homo sapiens
gccagatctgccagtgagcctcaggctttaggaactgaagagtatttaaaccgaggctgcactagatactttgct

SEQ ID NO: 136676 - DNA, 100 bp, Homo sapiens
ggagccggtagcggagcacccgcaccggcggcggccggagagcggggttgactttcttcagcaagctaataaagacctggagaagcgtatacgagagctt

SEQ ID NO: 136677 - DNA, 82 bp, Homo sapiens
cgacaagccgctggcagccgcggatctcaccgccgctcaggtccctgaagaggaaggagaaggaatatgagcatgaaatgga

SEQ ID NO: 136678 - DNA, 58 bp, Homo sapiens
tcagtcatttatctcagcagctattgaaccaggcatgtcggtgtaaacctgattgtct

SEQ ID NO: 136679 - DNA, 75 bp, Homo sapiens
gagagcagtaccctgatggagtcccttgcaggagggtgaggacaaaatcttcttaatcaacaagcttcactccat

SEQ ID NO: 136680 - DNA, 75 bp, Homo sapiens
gctcagacaatttctgtccagcaacatgacagcaagctcaggctggttcattttccagacactgaaagagcagaa

SEQ ID NO: 136681 - DNA, 75 bp, Homo sapiens
cagatgggatctttccggatcaatccagatggcagccagtcagtggtggaggagcttcctggacgatttaacagg

SEQ ID NO: 136682 - DNA, 100 bp, Homo sapiens
ccgtgtacgagcgcaccagcgaccacaagatcgtcttctttaaagaggagaaggcagagcccccccaggctatgaatgccctgatgcggttgaaccagct

SEQ ID NO: 136683 - DNA, 100 bp, Homo sapiens
atcacaacttggttcaatgggtagcctcaccatgaaatcacagcttcagatcactgctctttcgacgtgtagcagcagctttgccgggaatggaaagcac

SEQ ID NO: 136684 - DNA, 100 bp, Homo sapiens
aggaaaaggaggctttaaaacaagaagtgatgtctttacataagcaacttcagaatgctggtggcaagctccaactaccgtgaatgtaacacatcgtcca

SEQ ID NO: 136685 - DNA, 82 bp, Homo sapiens
aatcgggctgaagcgactgagtccgcgatggagggactggtgattgcagctggaagtgcccatgaccgagctggcgtcctcc

SEQ ID NO: 136686 - DNA, 75 bp, Homo sapiens
agagtggcatgcacctgactttgcctgatgcccatgatgcagactctggtacaggtttgcagattccgccagcag

SEQ ID NO: 136687 - DNA, 110 bp, Homo sapiens
ggatacagcctggaaggtgcgtgtggggctgggtctcggagtgggagacgtggagtgcagaaagcatcacagtgcagactatgatgaacaccttacgggacaaagccagc

SEQ ID NO: 136688 - DNA, 98 bp, Homo sapiens
agcgaggaggatggcggagtcggggctcctgacgacagcccacctgaggatattgaccataaggactcatatctcattacaagaagcatcatggccga

SEQ ID NO: 136689 - DNA, 75 bp, Homo sapiens
ggaactccccatcgcgttttgccagcgataatacgcctcaggttttgcggctagttggctattcaagaaacctcg

SEQ ID NO: 136690 - DNA, 74 bp, Homo sapiens
cttcgcccaggtagcggtacatggccacaagcggaggggaggccaagtcagaacttcgagcagccattgatcgg

SEQ ID NO: 136691 - DNA, 100 bp, Homo sapiens
cagagagttaacttctgtttacatggaactcagacatctgcaaatcatgggaagcagctcgagagtgtcgtagaaagaagaaagaatatgtgaaatgttt

SEQ ID NO: 136692 - DNA, 100 bp, Homo sapiens
gccggtcgaccccagccagcgcagcgacggggcgctgcctggcccaggcgcacacggaagtggtatcattgcccagtgcctaagatcttttatgttcagc

SEQ ID NO: 136693 - DNA, 90 bp, Homo sapiens
cagtctgactgcgagagttgtgaaaaattgggatgtgcttctgaggtgggctgtggaatgccatgctgatgaattcatccgagcaaatgc

SEQ ID NO: 136694 - DNA, 118 bp, Homo sapiens
aacatttttgtgcgcccatccttagtagcagtagcattgcagatgacaccagggttcaggaaagatccaggtccagagagcatcgcagacatcgatctcgctccatgtcacgtgaacg

SEQ ID NO: 136695 - DNA, 100 bp, Homo sapiens
ctgacggcaacctctacaaggccaagttcatctcctccgtcaccagccacatctaccaggccacagttgtaagggatcttgtggctgtcaggatggcaga

SEQ ID NO: 136696 - DNA, 100 bp, Homo sapiens
aggccgaagtggctaaccaagaaactaaagaagacttacctgcggaaaacggggaaacgaagactgaggaggtggtgatgatggtgatgaggtgccacaa

SEQ ID NO: 136697 - DNA, 50 bp, Homo sapiens
acctgcagctggcgcctctgcagtgggatatcagttttagagaatgtggc

SEQ ID NO: 136698 - DNA, 90 bp, Homo sapiens
attgtccaggccttcgccaacagcggcaacgccatcaagcccgtctccttcatccgagacctgaaaagtccccgttctccgtgtcctgct

SEQ ID NO: 136699 - DNA, 98 bp, Homo sapiens
ttcagagcaggaccttgacgagatgaacatcgagatcatccgcaacaccctctacaaggcctttccacagaagaaaacctgtctgcctccatcaccaa

SEQ ID NO: 136700 - DNA, 83 bp, Homo sapiens
gagaacaacaaaggtctacaaactcgtcatccacaagaagggctttgggggcagtgctcctggggagtttgcttcacctacgg

SEQ ID NO: 136701 - DNA, 75 bp, Homo sapiens
ggatgacctgtaccacaagaggctaactccacccttcaacccaaatgtgcggagcgggcactggacacaatgaac

SEQ ID NO: 136702 - DNA, 82 bp, Homo sapiens
tcaatcttgaaaataaaacttgccaggttccagactctatgacatctgctgcctgcaggatgaagttaaaggaagtagatcg

SEQ ID NO: 136703 - DNA, 97 bp, Homo sapiens
ccagggtccaggattttattcccaacgcatggcaggccccttcacagatgtagtcactacaaatcttaaattgcgaaatccatcggatagaaaagtg

SEQ ID NO: 136704 - DNA, 100 bp, Homo sapiens
ttcttttggagcagcagagactgctctacattaatcatactcctccaccactgtccaagagtaaggagagagaaatggacaagaaagatttggacaagtc

SEQ ID NO: 136705 - DNA, 90 bp, Homo sapiens
gttccatgccgcagtaggacagcaggcccaagtctgcacatcccagtgatcagggccaaagcggtcagtgagaaggaagtggactctgga

SEQ ID NO: 136706 - DNA, 83 bp, Homo sapiens
cctgccgcccctgcgccgccgagccagctgccaggttttaaaatcaaagatgggaaaatcggagaaaattgcccttccccatg

SEQ ID NO: 136707 - DNA, 50 bp, Homo sapiens
cactggttcctgggcaccgaaaggactttttttatgaagacatggagtcc

SEQ ID NO: 136708 - DNA, 100 bp, Homo sapiens
agcatgaacgcccctccagccttcgagtcgttcttgctcttcgagggcgagaacaattctgtggtgttcttggtcacacatttatggagtttctgaaggg

SEQ ID NO: 136709 - DNA, 98 bp, Homo sapiens
aagaactcaaactttttgtatctcgacactctgcaagattctctcctgaagtcccagcttctaagtgccagatgatggaggagcgtgccaacctgatg

SEQ ID NO: 136710 - DNA, 75 bp, Homo sapiens
agacattgacctcaccaagagggcgggagaactcactgaggatgaggtggaaaaggagggagctgctctcaggct

SEQ ID NO: 136711 - DNA, 75 bp, Homo sapiens
gggggagtgcgcggcggccgcagctgccacaaaccaggttctgaatgatgactgacgcgggtttgggtgataccc

SEQ ID NO: 136712 - DNA, 82 bp, Homo sapiens
cgagctgagtggttgtgtggtcgcgtctcggaaaccggtagcgcttgcagcatgagcctggagacacaggccccatccttcc

SEQ ID NO: 136713 - DNA, 75 bp, Homo sapiens
gaggaacatggcgttgctggtgcgagtccttgtggttatcactaggctaaaactggacaaagaccgcaaaaagat

SEQ ID NO: 136714 - DNA, 50 bp, Homo sapiens
ggaacaggacgccctctgatagcatccaggatgtgaggagtgatgacgag

SEQ ID NO: 136715 - DNA, 98 bp, Homo sapiens
agagaaggccgtgccaatgggcagaggtctgggagttttctggatatgccgcagaaggatccgtgccagaagcaagcctgtgagatacagaaatgttt

SEQ ID NO: 136716 - DNA, 75 bp, Homo sapiens
ggctacatgccttatttaaacaggttcattttggaaaaggtggattcaccaatgaacttgaagcatcctcatgac

SEQ ID NO: 136717 - DNA, 131 bp, Homo sapiens
ccatcaggtaggctgcgttgaggatctttgctcttccatccgcctttgatcgtcttcctcttcagccatccaggaggaatacgcagttgagggcctggagtggtcattcatcaactaccaggacaaccagc

SEQ ID NO: 136718 - DNA, 75 bp, Homo sapiens
tgacatcaaccatcccatgtctgttgtcagctcaaccaagagcagatgtgttcagagcaacattgttttgttgac

SEQ ID NO: 136719 - DNA, 100 bp, Homo sapiens
ggggctgctgcttgtgtctgcgctgtccggggtcctaggagaccgcgccaatcccgacctccgggcacacccaggtacaagaactgcaaagccctccaag

SEQ ID NO: 136720 - DNA, 89 bp, Homo sapiens
tgggacggcgcactggtgcaagagccgcttctggagtctggtggactcgggtgccaagtcctgccctgccaacttcttggcagctgccg

SEQ ID NO: 136721 - DNA, 75 bp, Homo sapiens
ccagcgatgaagagagtgccgaggccctgaaagcagcagatctcacctgcattggaggatgagacgccacatgaa

SEQ ID NO: 136722 - DNA, 101 bp, Homo sapiens
tggaattctgcccactctgcggagttagcagtcacgacctccagcacagagctacttcctcagccgagcccagagcctgtgtggccccgagcacagtgctg

SEQ ID NO: 136723 - DNA, 98 bp, Homo sapiens
gtgctattcctggtctacatcctgcgggtgcctttgaaaatcaacgacaacttgagcacagattacctctctagtgacccttcagctgttaaccctgg

SEQ ID NO: 136724 - DNA, 82 bp, Homo sapiens
gagagggcctgggagcttgctgcagcttcagggtgagaactctgtctcagtcgacgggaagtgcagtgactccacgctactg

SEQ ID NO: 136725 - DNA, 100 bp, Homo sapiens
ggcccgagagggtgctcggcgccagcagcccggaggcccggcccgcgcaggaggcgctcctccttcccaccgatgactctggggacgacgacgaggctac

SEQ ID NO: 136726 - DNA, 100 bp, Homo sapiens
gcttgtggaaaagctggatgtgctctccttgcattagtgaccagaaggatcccaaggatcgaatggttcaggttgtgaaatggtacctctcagcctttca

SEQ ID NO: 136727 - DNA, 98 bp, Homo sapiens
gaagcctgagctgccggcattgccgggcaccctgctgcggagcagacgtgaaggtgtctttcctgaagactatcttcccgtctcaaaatggacatgat

SEQ ID NO: 136728 - DNA, 89 bp, Homo sapiens
ctgctgctgctgctgacgctgctgctgcccggcctcggggtagaacgtcatgacatgaataccttaagcctgcccctgaacatacgccg

SEQ ID NO: 136729 - DNA, 82 bp, Homo sapiens
ggtggccctaggggcagcgagcaagacagcaagcagttccagggtctccctccactgctgtagtaacccgggtccggggcct

SEQ ID NO: 136730 - DNA, 90 bp, Homo sapiens
aaacaaggttattcttaatcctgtaaatacgaatctttccaaaggagatgcccggttttaaaaagttgcagaaagaagaaaggaaaggga

SEQ ID NO: 136731 - DNA, 82 bp, Homo sapiens
tgcgcaccatcacctatagcatcaacttcttctccaaggtctgactgtgtccatccctggtctggagagggctctgcagcag

SEQ ID NO: 136732 - DNA, 74 bp, Homo sapiens
acacccccaagcaacttagaatgcagcttcagcagaggctgcagggccagcagatttggagcaagaggtggtgg

SEQ ID NO: 136733 - DNA, 98 bp, Homo sapiens
ctacgaggacacgtacaacaccctcaaatatgccgaccgggccaaggagatcaggctctcggagaggaaggcaagcctgagattaatcagcagttaag

SEQ ID NO: 136734 - DNA, 100 bp, Homo sapiens
gtgacaacgacggcggtggtgacgggcaccgggctcgcggggaggaaataatgctggccatacagttgttgtggattctgtggaatatgattttcatctc

SEQ ID NO: 136735 - DNA, 75 bp, Homo sapiens
cagcaagcaactttgagctgcacgttgcacaagaatgaactctggaagcccagccagggacaatgcaccttcaca

SEQ ID NO: 136736 - DNA, 83 bp, Homo sapiens
acgagttctctgactttgaccgactccgcacggcactgccgacctccgggagcagcgcaggtcttctcagtacagcatggtgg

SEQ ID NO: 136737 - DNA, 82 bp, Homo sapiens
ccatggggaagcgggacaatcgggtgacctattcaacgaattgcttgaaaactgaacaggcttttcccctgcaaaacaaaat

SEQ ID NO: 136738 - DNA, 74 bp, Homo sapiens
ccaactcagccttcctgcataccctggaccagcagaaacctagagtgctcaagagggccagcagtgaggacacg

SEQ ID NO: 136739 - DNA, 75 bp, Homo sapiens
attctacgttagagagactgaaaagacatctaatttcattgctcggcaggtatcattgcccagtgcctaagatct

SEQ ID NO: 136740 - DNA, 75 bp, Homo sapiens
tctatcgtttacgagtttactgcatcagtgatggaggacagagtgcgacacatcaactggatcattctgctcatt

SEQ ID NO: 136741 - DNA, 75 bp, Homo sapiens
tacactacttgtggatgttgaacctaaggtgaaatctaagaaaagggaagctgacagagtctcgctctgtcaccc

SEQ ID NO: 136742 - DNA, 89 bp, Homo sapiens
gacccaagccttccccctctcaccatcagcaaccatgaccgttgccgagagatggatgagcagattagactgatggaccagaacctgaa

SEQ ID NO: 136743 - DNA, 124 bp, Homo sapiens
tatgcatggtgtggggttggtgtgattagcttcgcagtctggaaagctttaggagttcacagtgacatgtctcaggaaggctatggaactagatctcaacctcctctggcccccggaaaaccta

SEQ ID NO: 136744 - DNA, 100 bp, Homo sapiens
gtgcatgacgccatcctgccgcagctggcgcagcccacgctcatgatcgacttcctcacccgcgcctgcgacctcggttctttcagagcacggcttcggc

SEQ ID NO: 136745 - DNA, 82 bp, Homo sapiens
tgtcttcgttagaaaagtaaaaatgctgaagaagcccaagtttgaatgaaagaaacgtccactctgctccagtcaaccccac

SEQ ID NO: 136746 - DNA, 94 bp, Homo sapiens
cccggggggagcgcggggcgacgctggctgcagggacccggtgacagcgtgagaggtttggtgcacctcgatttggaggaagtagggcagggcc

SEQ ID NO: 136747 - DNA, 74 bp, Homo sapiens
aaaattgttctatagtttaaactttcagacaccattcgcttttcacccaagatgatttgatgtcttataaaact

SEQ ID NO: 136748 - DNA, 100 bp, Homo sapiens
gtaaattccgggaaattcaacaggagctttccagaacatccagtcatggataaaaatgagctggttcagaaggccaaactggccgagcaggctgagcgat

SEQ ID NO: 136749 - DNA, 74 bp, Homo sapiens
atcccaggaatacagctttgcattaggagctggtcaggctcaccatcgagaagcagggacgtccgtctccgacg

SEQ ID NO: 136750 - DNA, 98 bp, Homo sapiens
cggtgtgtggcgcgcccagagccccgcgtttcagccctagggaagacaagttggatggcttgaggactggtactaaaaggaaacgtgactgggaggcc

SEQ ID NO: 136751 - DNA, 75 bp, Homo sapiens
attccaagtaactcttatttggtggaccccaagttcctgaggaacatgcgctttgccaagaagcacaacaaaaag

SEQ ID NO: 136752 - DNA, 100 bp, Homo sapiens
catggtgttgctgctgtactccttctccgctggttcccgagcctcatacagcagccagcatgggcacctgggcccagagttgcgggccctgcagtcccca

SEQ ID NO: 136753 - DNA, 75 bp, Homo sapiens
aaggaagggaagctgatcatgggcattggtcaccgagtgaagtcgagttcccgattttgaaatgctgggctcact

SEQ ID NO: 136754 - DNA, 74 bp, Homo sapiens
aaaaccagctcaggagacgccaaggaaagatgggacctcccggcccagggatgaagatgcccctgctaagattc

SEQ ID NO: 136755 - DNA, 50 bp, Homo sapiens
ctactttgacacatgtggctttctcagccagcaatagaacatcagatagc

SEQ ID NO: 136756 - DNA, 97 bp, Homo sapiens
gaggatgggggtgaaaccgagatctcccagccagtgtggctcacggtagaagctgagctccttgccaaaaaacagccattaaaaaccagtgaggtct

SEQ ID NO: 136757 - DNA, 107 bp, Homo sapiens
ggactggcctggcgtgcactccgcacctcggggacattattgcgcgtggaacggctgcttttggaagctcaaactggaggattataaggatcgcctgaaaagtggag

SEQ ID NO: 136758 - DNA, 83 bp, Homo sapiens
ctggctgcacccgcctccgcgctcgtcagggcgtgatggtgggcatgggtcagaaggattcctatgtgggcgacgaggcccag

SEQ ID NO: 136759 - DNA, 90 bp, Homo sapiens
gcggcgggaaggagcgggcgacccggtgtgtgggccagcggagctccggaagatgagaatgtgcctactgctcctgatcctccaagtcaa

SEQ ID NO: 136760 - DNA, 100 bp, Homo sapiens
ctgcttttcttcttcctgttatcatgcgagctttattcgagattgctcatttagaaagtggatgtgtgggataacatgtccaatgtgtccgaggagagaa

SEQ ID NO: 136761 - DNA, 100 bp, Homo sapiens
atacaagtttatttcccaaaagaaggtcgtaaaattttgacaccaataattttcaaggaagaaaatcttagggtgctaactgccaaagaaaggaaaactc

SEQ ID NO: 136762 - DNA, 99 bp, Homo sapiens
agatggaggaatcctggatccagatgatgtcttggcagatgttgttgaagataaagacaagttggatgaaaaatctgacaaacagtatgctgaaaatta

SEQ ID NO: 136763 - DNA, 139 bp, Homo sapiens
ccgctgaccattgggacagtaaaaatgtgtcctgcaagaactgcagtattcagcggggctccaaaaagcaatgtttttggaacagtgccagtggttgcttctgcacagacacagcctgcttcatcaagtgtgcctgctc

SEQ ID NO: 136764 - DNA, 74 bp, Homo sapiens
ttgtttgcaacgaccgtctggggaagaaggtccgcgttaaatgctgggagtcctccgtcagcatcagctccggc

SEQ ID NO: 136765 - DNA, 100 bp, Homo sapiens
tgaaggcgaacgcttcgctggccatttaggagctctgctcaaagccagacgatctgaagaaaacccttgctgtgttattagataacattttgcagcgcat

SEQ ID NO: 136766 - DNA, 100 bp, Homo sapiens
tgttaaattgacaacaatggccatgtatccaatgggttgacacagtgtgggaactggatttcacagagactgagcctttggatcccagcatagaagcaga

SEQ ID NO: 136767 - DNA, 100 bp, Homo sapiens
tgcctgtgctctgcctcgggccatcgctcctccccagggcccagtgcggactcgcctccgtgaaggtgctggagaatctggtaaaagcaccattgtgaag

SEQ ID NO: 136768 - DNA, 75 bp, Homo sapiens
acactgcaatgtttttgtggaacatggaagaaaggcgaaggttgaaaaatgcaataattatccagtcatttattc

SEQ ID NO: 136769 - DNA, 98 bp, Homo sapiens
ccagatcacgtggagccggggcgccgacaagatcgagggggccagtgccatttggattgtactttagtggcacgatgtactctgagtggaggtcactg

SEQ ID NO: 136770 - DNA, 50 bp, Homo sapiens
ccctggaacagagcgagagtatcgtcatcatcagatttgaaatatttaaa

SEQ ID NO: 136771 - DNA, 101 bp, Homo sapiens
actttagtggttcaatccaaaggaagagagaagggcacagttacctaagtatcaacgtaatcttcctcggccaggacaggcccccatcggtaatccaccag

SEQ ID NO: 136772 - DNA, 74 bp, Homo sapiens
gaaaatggaccagtttgttcgttacgaggtgggtttggaggatttgggacaacatctacaactgcaggttctgc

SEQ ID NO: 136773 - DNA, 80 bp, Homo sapiens
tccacactgacagcaggacctgcctgggtctcctctgagcctccggcctccataagacccaaaacagatgacacctcttc

SEQ ID NO: 136774 - DNA, 75 bp, Homo sapiens
tggaaatgtcatccgatggcacaatcaggtttggtgcacctcgatttggaggaagtagggcagggcccttatctg

SEQ ID NO: 136775 - DNA, 100 bp, Homo sapiens
gctccatcctgaaggaactgaggcgggtgcagaaacagctggaaggtgaaggagcttggcgctgtcatctataactgcagccacctggcccaagacctgg

SEQ ID NO: 136776 - DNA, 100 bp, Homo sapiens
gacattcacttacgccaccgccatcactttcatcacatggatcctcatccagtttgcatttaggaatggatcgtgattatggccctggatcttatggagg

SEQ ID NO: 136777 - DNA, 75 bp, Homo sapiens
cagtggacccttggagccatcctctacaggacccgctttctaccattaaggtggagaacgaccaggagcggttcc

SEQ ID NO: 136778 - DNA, 82 bp, Homo sapiens
ctctcatctcgctcggctgcgggaaatcgggctgaagcgactgagtccgcgatggaggaaagattcagatgaggcagacttg

SEQ ID NO: 136779 - DNA, 97 bp, Homo sapiens
aatcttccaagtctaatagacctaaagccacagtcttcaagagcccacggacaccacctcaacgcaatcatttggggaagaatctacagttgctgat

SEQ ID NO: 136780 - DNA, 87 bp, Homo sapiens
attccagaatgccatcttgaatgtaaaagaacttggaggtagttacttttggtgacgctgtccagttcccacaatgtatcattcctt

SEQ ID NO: 136781 - DNA, 100 bp, Homo sapiens
gtgaggagctgctatggtgctgagtttcctggtagagccggccgagctgaggcggtcgcggccatgaaggtgattgtagagaaggctccaaaagccaggg

SEQ ID NO: 136782 - DNA, 85 bp, Homo sapiens
gacttcggcggcggcgcctcaggcacctcggcccgggtgtacgaagccatcgacagcagagatggagcatcttgtgcagagttgg

SEQ ID NO: 136783 - DNA, 98 bp, Homo sapiens
gccgctgggcctgcaggtctctgtcgagcagcggacgccggtctctgttccgcaggatggcttgaaaaggaatacactacaataaaaacgaaagaaat

SEQ ID NO: 136784 - DNA, 74 bp, Homo sapiens
atgtgaagatgatcactagcctctccaaggatcagcagatcggagagaagcagagcatcctggccagaacaagc

SEQ ID NO: 136785 - DNA, 98 bp, Homo sapiens
ggcgcgcaggccgcggggagcacctgggtatactgcaacatccagatggcacagttttgaaacagttacaaccacctccaaggggcccaagagagctg

SEQ ID NO: 136786 - DNA, 100 bp, Homo sapiens
gacttgtctcttatttagttctggggagcgcctcgtcgacatgagtgatgtggaggaaaacaacttcgagggcagaggaactgcagcccggagttaaagc

SEQ ID NO: 136787 - DNA, 100 bp, Homo sapiens
ggggagcatgggtgccaaggagtcacggatcggattcctcagctacgaggaggcgctgaggagagacaatgcagatcttcgtgaagactctgactggtaa

SEQ ID NO: 136788 - DNA, 78 bp, Homo sapiens
tccagtcggtgttgagcacggcgagcagtctcaggcctttagtgatgatgaaattgatgcttcagatgaatgctaagc

SEQ ID NO: 136789 - DNA, 101 bp, Homo sapiens
gatgtccggctgcagcagcaagtcccatcggaggacctccctgccctgtataccgagggaacagagatcctacaagccataagactttgcagaaatgtcct

SEQ ID NO: 136790 - DNA, 100 bp, Homo sapiens
cagacaatgccggtggaggaatttgtggctggctggatctctggaattcctcctgatcagcagagactgatctttgctggcaagcagctggaagatggac

SEQ ID NO: 136791 - DNA, 98 bp, Homo sapiens
gccgcctcggccgaccagggacctgcccgcctgcggctgctccggatatgaggccccaggattcctggcgaggtcctcctccccttttccagcagcaa

SEQ ID NO: 136792 - DNA, 111 bp, Homo sapiens
gcctgacatatctgagggagaagcacaagatcatgcacagaggtatgggcactaggaaaagacttcttccatcaagcttaattgttttgttattcatttaatgactttccc

SEQ ID NO: 136793 - DNA, 75 bp, Homo sapiens
ggacttggccgagcggatcctaataaggggaaaatggtaagttctcttctacgctgtatgagactggtggctgtg

SEQ ID NO: 136794 - DNA, 100 bp, Homo sapiens
caggccttacctcgtgcacatacctagcaatcactgcttgagaagcagagagtcctgatccagcagcacgaggacgccaaggagctcaaggagaacctgg

SEQ ID NO: 136795 - DNA, 96 bp, Homo sapiens
taaaggtcaatgcgtaggggtagagtaagggccatgaagcccccaggaggagaatcgagcaatctttttggaagtccagaagaagctactccttcc

SEQ ID NO: 136796 - DNA, 74 bp, Homo sapiens
ctcaagccactttagccagtgtagccccagtatttactgtggaaaaagtgttaatcgaagcttacaagaaatgt

SEQ ID NO: 136797 - DNA, 100 bp, Homo sapiens
cgcgagccgacaccatgcgatccaaggcgagggcgaggaagctagccaaaagtatcattccttggaatgctttccccggaaaaatatgtggctctgccct

SEQ ID NO: 136798 - DNA, 90 bp, Homo sapiens
tcctcgccatcatcttgctactgctcaaaatctggaagtcccgctcgtgcgccgcggagcccatcgtggtgaggcttaaggaggtccgac

SEQ ID NO: 136799 - DNA, 99 bp, Homo sapiens
ctgacactgggtctctgtcacctccatgggaccaggaccgtaggatgatgtttcctccgccagagtgaagtaattgggaaactgttcatttgaggataa

SEQ ID NO: 136800 - DNA, 100 bp, Homo sapiens
cgggcgcatcactgctcagcctgtgactcagaaagctctgggcttgtactcctctccagctgtccccagacagctagtcgcctccagaagtacttcaccc

SEQ ID NO: 136801 - DNA, 75 bp, Homo sapiens
agagaccacctgtccttcgagcaggttggtttcagtgctgatgaaacttgggactctgcaatagatacatggagc

SEQ ID NO: 136802 - DNA, 90 bp, Homo sapiens
gtcgttttccgtgagagacgtagagctgagcgacccagcccgcgagcgagttaattggccttggtcctcacagctccaaaaagaaacagg

SEQ ID NO: 136803 - DNA, 80 bp, Homo sapiens
agacggcgctatgtacgccctcttcctcctggccagcctcctgggcgcgggggctccatgggccttaccccttcggccag

SEQ ID NO: 136804 - DNA, 103 bp, Homo sapiens
ctgaacaaaaagctgctttccccccacctgaacagaaaactgcatttgacaagtgagaaagatcagtctaaagaaaaggagaagaaagtgaaaaaaacaattc

SEQ ID NO: 136805 - DNA, 89 bp, Homo sapiens
aaaaagagaagatgaagaaacccagcttgatatgttggcatttctcattgcaattgtggtaccagatgttgagacattatgttcctggg

SEQ ID NO: 136806 - DNA, 100 bp, Homo sapiens
aggaggccgagccgggatctcaggtcctcgggggcggcggccacgccaaggacgggcctggcgtttccttgaccatgcaggcattttccgaagaggaaag

SEQ ID NO: 136807 - DNA, 100 bp, Homo sapiens
ctccagatgaaccgacgtcaccggatgcctggatatgagaccatgaagaacaaagacacaggtcactcaaataggcagctatcagttgagggatttgcag

SEQ ID NO: 136808 - DNA, 100 bp, Homo sapiens
ttcgtgactggaaagtgggaagatgataaagatgcagccaaggtcttagcagaagatggatttccagatgtgacttgcactcagaagatcagtggtcaac

SEQ ID NO: 136809 - DNA, 48 bp, Homo sapiens
cagaattttccagtgccctgaaaaatattgggacccctgattttagca

SEQ ID NO: 136810 - DNA, 76 bp, Homo sapiens
gcagccgcctccgaagatgggggatttctacgacccggagcacccgacccctgatctgctccatctggacacaagc

SEQ ID NO: 136811 - DNA, 78 bp, Homo sapiens
ctcttgaccgtgcacaaactctcctactatgagtatgactttgaacgtggggcatcaacttctaactcatctcgccag

SEQ ID NO: 136812 - DNA, 100 bp, Homo sapiens
ctagcaggaatgcttactgttgcgtggttcgttattaacagacatggagattaagtagcttgcccaagatcacccagccagtaaagtggcagagctgaag

SEQ ID NO: 136813 - DNA, 75 bp, Homo sapiens
ggaagagattcagccagcacactcctcgcgagcaaggcgggcgctaatattgacacctgctcagaagaccagagg

SEQ ID NO: 136814 - DNA, 82 bp, Homo sapiens
agaagagccaaggaataaacatgcaatgaacccaaaaggaattctggaattgaaaaggcatttctatttgatgtggtcagta

SEQ ID NO: 136815 - DNA, 90 bp, Homo sapiens
gtttatcaaggctgtcacacatcaagttaaatttggtcaacaaaatccacgtcaggaggtagatgacttctttgagcaagagaagaactt

SEQ ID NO: 136816 - DNA, 101 bp, Homo sapiens
ttttcagacattcctgggataaacagtgtgaccgatgtcatatgctaggccactatacagatgcagcacagcattctcagaagcagtctactgagctcttc

SEQ ID NO: 136817 - DNA, 90 bp, Homo sapiens
ataaaggaggaggtgcgccagcgagccctggctctggatgaagccgtgtcccagtccacacaggtgaaatctggaggagcagtagaaccc

SEQ ID NO: 136818 - DNA, 101 bp, Homo sapiens
gagaccgtgaccgagagcgtgaccgagagcgcgaatatcgtcatcgttagaagcttaccctgaaagaagcagatcccagttcaaaagtagccataagaagg

SEQ ID NO: 136819 - DNA, 50 bp, Homo sapiens
cggggatagtgtcatcggttcgggggcacccaagccaattgccattgaac

SEQ ID NO: 136820 - DNA, 99 bp, Homo sapiens
caatatctgtcttcggtggactccttcggcagtccacccaccgccgccgcctcccagtggacatcctcatcatggatgatgacgacgtccccagctggc

SEQ ID NO: 136821 - DNA, 50 bp, Homo sapiens
atcaggtgtctgtcggtccaagctagaagagaattaccttttccagggac

SEQ ID NO: 136822 - DNA, 82 bp, Homo sapiens
gcccggggcagcggctgccgggccgggactggtgcgcgagggctgctggagccagttctgcttctcggcaaggagcgatttg

SEQ ID NO: 136823 - DNA, 100 bp, Homo sapiens
ctgctgctcatctcgctggccttcgcgcaggagatctcgattgaggcctctctgactaaccacacagaaaccatcaccgtggaggaaggccagacgctca

SEQ ID NO: 136824 - DNA, 73 bp, Homo sapiens
ggggtggggggatcgggcctggatcggctgccggtgcctgccagtggggagaactacgatgacccgcacaaaa

SEQ ID NO: 136825 - DNA, 75 bp, Homo sapiens
atgatttcctcaggactccagattatctacaacactgatgagcttcatgattgtatccaaaaaaccttgaatgaa

SEQ ID NO: 136826 - DNA, 100 bp, Homo sapiens
cagcatcaagatccgtctgacaggcaggatgacgcaaaacacggtgattgtgaatggagttgctatggcctctaggccatcccagcccacccacgtcaac

SEQ ID NO: 136827 - DNA, 100 bp, Homo sapiens
cattgccaccaagacaccccttgaccagcacacactgcaaggagatcaggaacagatgttgttattgtaaagaatggaagaagaatatgtggaacaggag

SEQ ID NO: 136828 - DNA, 100 bp, Homo sapiens
ccccagtcagaaacgggaccctgaagctgggatttaggtcaaaatgcagatcttcgtgaaaacccttaccggcaagaccatcacccttgaggtggagccc

SEQ ID NO: 136829 - DNA, 75 bp, Homo sapiens
gatggaggccgtggcgacggcgacggcggcgaaggaacccgataaggataactgcgacctccacttcaaggtggc

SEQ ID NO: 136830 - DNA, 82 bp, Homo sapiens
aatttatccaaagattaaaacttgaagcaacccttaatgtgcatgatggttgtagactctacaggggcaggtaattcactgg

SEQ ID NO: 136831 - DNA, 97 bp, Homo sapiens
cacagattgagccgagttgtcgccccgctgggagaagtgaccctcctgcgcctgacaatgcagatcttcgtgaagactctgactggtaagaccatca

SEQ ID NO: 136832 - DNA, 98 bp, Homo sapiens
ctggctggtgtacgtgcactactcgtcctactcggagcgctgtcgcggccatgtctgccaggtggtcattatcatcagccatgacacccggcgcttcc

SEQ ID NO: 136833 - DNA, 75 bp, Homo sapiens
caccaagaatcagccacagacggaacaagcatgcagagatgtgaatacagctgtgatggagttgctcatcatggc

SEQ ID NO: 136834 - DNA, 76 bp, Homo sapiens
tattcagcgactagtaagcctatgtcatttcatccaccacattacttaggtcccgatcacacagcaagaatccaaa

SEQ ID NO: 136835 - DNA, 94 bp, Homo sapiens
gttctccctgatgtctttattggaaagcctggacccagttcgttgctcatcctaactgtcagcagcaattgcttaccatgtggtatgaaaatct

SEQ ID NO: 136836 - DNA, 82 bp, Homo sapiens
ggagtctgctttaaagcgcataagaatgtcctggcagcattcagccagtattttagtgttctaagaacggaagcatctgggc

SEQ ID NO: 136837 - DNA, 100 bp, Homo sapiens
cagcaaccctgaggggcggccgggcagcgccgccaccatgttcctgggcaccggggagccggccttggacacgttacaggcccaaaaactgcgactggca

SEQ ID NO: 136838 - DNA, 75 bp, Homo sapiens
cagcctcgattcattcaactctttcaggtccagcctagggtgaatgtttccccctccaagaaggggcccttgcag

SEQ ID NO: 136839 - DNA, 95 bp, Homo sapiens
ctgaaaagcctccttcagcatcaacttgatacttctgtctccattgaggagtgttgacagctcttctaccacaagcagtgcttctccaatgccca

SEQ ID NO: 136840 - DNA, 75 bp, Homo sapiens
ctcttattctagaaggggaacataacattgaggtcaaagagcagccaagacaatgcaaactccagtgaacattcc

SEQ ID NO: 136841 - DNA, 74 bp, Homo sapiens
caaccctaagaacatggcctacacggggtttgaaagtattcttgaagggctgtttggacctgcattattaaaag

SEQ ID NO: 136842 - DNA, 98 bp, Homo sapiens
gagcagtcagcccgcgcgccggccggctccgttatggcgacccgcagccctggcgtcgtgaccagattacagaggggtattgatttgccttgcccccg

SEQ ID NO: 136843 - DNA, 82 bp, Homo sapiens
atgctcgtggccagtgactacccctaacgcacaataatatggctccgatgggctcaaagtttgcaggcctttcagatatatc

SEQ ID NO: 136844 - DNA, 87 bp, Homo sapiens
agatgcccaccgggatggagaaggaggaggaatcggtacaagaaaattccccaggacacagagctggtttggagcctttctttgatt

SEQ ID NO: 136845 - DNA, 95 bp, Homo sapiens
actccttcggcagtccacccaccgccgccgcctcccagtgccggtggtggtgtgcacattgagccccggtatagacagttcccccagctgaccag

SEQ ID NO: 136846 - DNA, 100 bp, Homo sapiens
acaccctgagtgcggatttctgctatgatgacagctctctatcaatatcagctcacatcattgaaaagataattttgaagacatgttttgctgaaaagac

SEQ ID NO: 136847 - DNA, 100 bp, Homo sapiens
ctggattatagcctgcacaaggagaggaccggcagcaatcgatttgccaagaattaaacaaccaccatgtcgagcaaaaaggcaaagaccaagaccacca

SEQ ID NO: 136848 - DNA, 83 bp, Homo sapiens
gagttcctcctctcaccatcgaagctctgcagacacctcgctggagaccccatgaaatgctttgtggtctacagccacaccac

SEQ ID NO: 136849 - DNA, 83 bp, Homo sapiens
gggaagatggcggcgccgctcatccccctctcccagcagggcatcgggttcccaaaccagagttggtccacctgctagagcat

SEQ ID NO: 136850 - DNA, 82 bp, Homo sapiens
gcctctacaggggcctcccgcgccccccgggacccccacgccgccgccaggcctcgggccagcggccaggagctgcctcccc

SEQ ID NO: 136851 - DNA, 88 bp, Homo sapiens
aagaccaagctgacgcctggcaaagcaggtctttcccgcggtgacttcccttgggctgaatgaacaggagctgttatttctcacccag

SEQ ID NO: 136852 - DNA, 100 bp, Homo sapiens
ccgggcaggggtgtcggacgcagggcgctgggccgggtttcggcttcggccacagagatttaccgcattgtttctcagaagcaaatgtcagacagacgcg

SEQ ID NO: 136853 - DNA, 82 bp, Homo sapiens
tgccggagccgcggggcgcgggcggcggacagattgaccttcagagcgagccgccaccggcacggccaggccagcatggtgg

SEQ ID NO: 136854 - DNA, 90 bp, Homo sapiens
gtaaccgaaacacagaaaaatgagcgtgttaagaagcaacttcagctgtctgtgatcctggaaacatacgtgtgactgaagctcccaaac

SEQ ID NO: 136855 - DNA, 97 bp, Homo sapiens
tgctcactttagcagacagcgtccacaatgtgaatcctacagtttccagatgccccttggtgtggccactgcaaggctctggcccctgagtatgcca

SEQ ID NO: 136856 - DNA, 96 bp, Homo sapiens
gaaggccctatcaggacatggagtatgaaagacggagccaaaaacctgtatatcatctccgtgaaggggatcaagggacggctgaacagacttccc

SEQ ID NO: 136857 - DNA, 97 bp, Homo sapiens
cacaaccatgaggaaatgtagctgtatgcctggagggatctacagccagaccaggctgtgggtgagcgtggaggatgctcagatgcacaccgtcacc

SEQ ID NO: 136858 - DNA, 83 bp, Homo sapiens
caaattagctgagaccacagataaagtcaaacaaggcttttgggaagaatttgagtatcctaagaaatccggtaaccaataag

SEQ ID NO: 136859 - DNA, 90 bp, Homo sapiens
aagcggaggacctacgccggcctggggttccccactgaaggacttggtccagctgtctggcagggaggagagacagaagctctggcccgc

SEQ ID NO: 136860 - DNA, 109 bp, Homo sapiens
cgacgcccatccagctgaacccggcccccgacggctctgcagttaacgggaccagctctgcggagggctatcaacagcaggacgcccatgaattcatgcgctacctttt

SEQ ID NO: 136861 - DNA, 83 bp, Homo sapiens
caagtcatgaagccgacaagcccgggagacacagtgtcagaattacaagggcgtgatggtgggcatgggtcagaaggattcct

SEQ ID NO: 136862 - DNA, 75 bp, Homo sapiens
cctgtggacatcagcgccatccccgagcagcggtggaagctgcctgtcaggattggagctgctttccgagcacct

SEQ ID NO: 136863 - DNA, 50 bp, Homo sapiens
cgcagtggtcgcttcttctccttgtcagtacctccgaaatgcttccagac

SEQ ID NO: 136864 - DNA, 75 bp, Homo sapiens
tgacctcaccaagagggcgggagaactcactgaggatgaggaggaggaagccaagaatctggtgagcgaagccat

SEQ ID NO: 136865 - DNA, 90 bp, Homo sapiens
tgagacggtgtcccgccgaaaggttgtcctttgtggagggtcttctcgaatcccaaagctacagcaactgattaaagatcttttcccagc

SEQ ID NO: 136866 - DNA, 75 bp, Homo sapiens
ccgacctcagatgctcccttctgctcctggaaaatcctgccttgcttcgttgggcctatgcaagaacaataaatg

SEQ ID NO: 136867 - DNA, 100 bp, Homo sapiens
gggatctttccggatcaatccagatggcagccagtcagtggtggagtgcaaaatggcaactcttaaggaaaaactcattgcaccagttgcggaagaagag

SEQ ID NO: 136868 - DNA, 100 bp, Homo sapiens
tgatgatcctgaagataacaagccactcttgtctgcttctccaaagcatggattcaccattatgaataggctgagcatggaaaataggacagaacctatt

SEQ ID NO: 136869 - DNA, 80 bp, Homo sapiens
cagcccgtgccgcgagcgcggcctgcaggaggaaggaagcagccaccctcgccatggcctccccgcccgcctgcccctcg

SEQ ID NO: 136870 - DNA, 82 bp, Homo sapiens
cgcgggacctctccgggccatgggtcagctggccgccggcacctgtgagattgtgaccttggaccgggacagcagccagcct

SEQ ID NO: 136871 - DNA, 100 bp, Homo sapiens
ctcggggcctccgcagcgacaacatggaggccgtgaagaccttcaatagcgaggtggatagatacttctcaagacatcacacagcgtgagtcaatcaagg

SEQ ID NO: 136872 - DNA, 75 bp, Homo sapiens
aagcttggaaaatttatccaccagaatttgccgtggagatactttttggtgaaaagaaacttggtactgttatca

SEQ ID NO: 136873 - DNA, 51 bp, Homo sapiens
gagaacaacgccctgcacaaggagaagtaacagagtatgcaagaggaggag

SEQ ID NO: 136874 - DNA, 82 bp, Homo sapiens
aaagccattcccaaattatagagctaattacaactttcggggcatgtacaatcagagttgcatccttaatgtccagtcaagg

SEQ ID NO: 136875 - DNA, 82 bp, Homo sapiens
aaggagctgtacgcccgagacaaacgcttccagcaattcatccggcactgctccgtgtggagatggcgccctctttgacaag

SEQ ID NO: 136876 - DNA, 75 bp, Homo sapiens
cagactcagactggccaaaattcaatccctgctttagctcaggttttttgcatgtctgacacccatgactccacc

SEQ ID NO: 136877 - DNA, 83 bp, Homo sapiens
gtgagaaacattaagacctactaccagaatggagctaccacatggtcaggaggaagagactcacaaagaaagatgaaggttgc

SEQ ID NO: 136878 - DNA, 100 bp, Homo sapiens
taaagtctgagagagggaagtcgcctctgtgctcggacaagaatccttcaagaaacaggaaaaaactcctaaaacaccaaaaggacctagttctgtagaa

SEQ ID NO: 136879 - DNA, 98 bp, Homo sapiens
aagagcgtgccctacttcaaggataagggtgacagcaacagctcggcgggctggaaggaatacatggtttacaggaagcatacctacatgaggcttga

SEQ ID NO: 136880 - DNA, 105 bp, Homo sapiens
atcatgcatgctctcactaagcagttggaggctgtgtctgttccaaagaggtgtttgaaagctcgagaacattttggtacagtaaaaacacatctaacatctttg

SEQ ID NO: 136881 - DNA, 100 bp, Homo sapiens
ccagcctcgggaggtggtggagtgacctggccccagtgctgcgtccttatcagccgagccgataagaccatcatcatgtggaaactgaccagggatgaga

SEQ ID NO: 136882 - DNA, 100 bp, Homo sapiens
ggtgacttcacttttgagtgcaactgccttccagcttacaccaacaaccaagcggacatcgccacccagggctggttcattgggcttatgtgcgccatcg

SEQ ID NO: 136883 - DNA, 100 bp, Homo sapiens
gccgccggccgctagcgtcagcgccagccagagtattcacatactggagaggactgcttcctctagcaccgagccctctgtaagtcggcaattgctagaa

SEQ ID NO: 136884 - DNA, 82 bp, Homo sapiens
acatcatggattaacgcagaaagcaagggcaagtattttgtaaccttcccatatccatatatgaatggacgccttcatttgg

SEQ ID NO: 136885 - DNA, 98 bp, Homo sapiens
gcggctgttcagcagaagaactcactgcagagcgagtctggaaacctcccactgtggctgcataaggaatgaatgtgatttgaactcattcatgttga

SEQ ID NO: 136886 - DNA, 112 bp, Homo sapiens
ccttcgtggtcgtctggtcctactacgcgtacgtggtggagctctgcgtgtgttataaacaacttgtgaaatgagtgatttggaagatgatgagacaccccagctttctgcc

SEQ ID NO: 136887 - DNA, 100 bp, Homo sapiens
gcccaaccagcagtttctggagcgaggtcatcatcagatttgaaatatttaaagtggatacaaaactatttcagcaatgcagacaattaagtgtgttgtt

SEQ ID NO: 136888 - DNA, 83 bp, Homo sapiens
ccaagatgatgtctttaatgaaaagggatggaactacattcttgaggtttggtgcacctcgatttggaggaagtagggcaggg

SEQ ID NO: 136889 - DNA, 74 bp, Homo sapiens
ctgtgactgggccacgtgtggaggaggccatgtacagatggcccactgcgtgaccttggttcagctgtccattt

SEQ ID NO: 136890 - DNA, 90 bp, Homo sapiens
gccctgcccggccccggaggacttgcaacactccgaggccaggaacgctccgtctggaacggcgcagctgcggttggatttctcacgatg

SEQ ID NO: 136891 - DNA, 90 bp, Homo sapiens
tgagaggattacctttccaagccaatgcccaagacattataaactgattacagtggcgagatcttgaacaactgctgcgtcatggagtac

SEQ ID NO: 136892 - DNA, 89 bp, Homo sapiens
aagaaatcctgataagaactgctttttggctggatctattattggcaaaggtggtcagcggattaaacaaatccgtcatgagtcgggag

SEQ ID NO: 136893 - DNA, 100 bp, Homo sapiens
gcaagatctgtttccctgatcgcgaagtaaaacacgatgaggcgagtggtacgacagagcaagtttcggcatgtatttgggcaagcggtgaaaaatgacc

SEQ ID NO: 136894 - DNA, 75 bp, Homo sapiens
caaagcctgcccagacggctcacctgtgcgggatggaacaaaaggtgaaaggtgtagcagtcactcggcctacac

SEQ ID NO: 136895 - DNA, 50 bp, Homo sapiens
gagagccgcctgaggagcggcacaggttggagtgcaacggtgcgatctcg

SEQ ID NO: 136896 - DNA, 75 bp, Homo sapiens
gagtcggctgagggaaaagcgaggcaaggcaggcggctctactgagatgaagaaagaaaaagaatacctgctcag

SEQ ID NO: 136897 - DNA, 83 bp, Homo sapiens
gccgaggcaccgaggcactcagaggagagagcgcctgctcgctgtgcccccgggttatgacgacccccaataaaggaaacaag

SEQ ID NO: 136898 - DNA, 98 bp, Homo sapiens
taggtacttgggaatcatcagtgaacaaaacaaagatcctgcccttgtggaccttatgtgccagagttccaagagcctctgagttcctgccttttttc

SEQ ID NO: 136899 - DNA, 80 bp, Homo sapiens
ggcgccataaacgcccccaatttcccagctgctaaaggaagaggaagatatattcgactttatgggagaaaatttagcaa

SEQ ID NO: 136900 - DNA, 50 bp, Homo sapiens
cgcgcctccatctgggccatggatgggtgaaaggtgtagcagtcactcgg

SEQ ID NO: 136901 - DNA, 100 bp, Homo sapiens
ctcttctgacctccgcgcgacgtacccgccgccgccgttggctggagaggcagaggaggtggacacggtggacgtctccggcgtgcccgcagaggtgctg

SEQ ID NO: 136902 - DNA, 98 bp, Homo sapiens
agtatcttcagaaaacccagcagctcagccctgaggtggagagagagaccaccgactacctagtacaaggtgacaacatccgggaattcttgctgagc

SEQ ID NO: 136903 - DNA, 75 bp, Homo sapiens
ctggcctgcgcggcttccggatccttggtctgcggaagctcttcgtgggcggtcttgactggagcacgacccaag

SEQ ID NO: 136904 - DNA, 100 bp, Homo sapiens
gcgggccgcggacttgcaggctgcgcgtcctttgcggagtctgccccggccccacggacaggccccgcagtgagcaggtcctgtatggtggaagagtcgg

SEQ ID NO: 136905 - DNA, 122 bp, Homo sapiens
catgatccccgagctgctggagaactgaaggcggacagtctcctgcgaaaccaggcaatggacaatgcagatcttcgtgaagactctgactggtaagaccatcaccctcgaggttgagccca

SEQ ID NO: 136906 - DNA, 82 bp, Homo sapiens
agtgcttgacaaaaagcaagaggagacagccgtactggaagaaatttaagatccgcattgaagacccaccccgcagaaagca

SEQ ID NO: 136907 - DNA, 100 bp, Homo sapiens
gagaactggagggcccagacaggactggacatccgagaatcctatggccagacagaaacggctggccactcagtactccttgtccctggcctcgcagccc

SEQ ID NO: 136908 - DNA, 50 bp, Homo sapiens
gaggtgaagttgctgctgttggtgatcagggccaaagcggtcagtgagaa

SEQ ID NO: 136909 - DNA, 110 bp, Homo sapiens
tcatctctaaatcccatcctctttcgaggtgttggggagcccacctacgatgcagaattccagcacttcttgagaggaaatgagattgtcctgagtgctggctccacccc

SEQ ID NO: 136910 - DNA, 95 bp, Homo sapiens
gcagacgcgggatggtcgcgcgtcccctgcacagcacagaggggcagccggagagcctgggaaaggttaatttggagtggcccctggagtcagtt

SEQ ID NO: 136911 - DNA, 83 bp, Homo sapiens
tcatcctggttctggaatcctcagttcaagggtgcagaagctgccaatgtgactggcccggatggagttcctgtggaagggag

SEQ ID NO: 136912 - DNA, 87 bp, Homo sapiens
cgtagatacaaatttttggatgatgatggatccatttctcctattgaggagtcaacggaaatcctcattgacgattcaatttgttga

SEQ ID NO: 136913 - DNA, 74 bp, Homo sapiens
gaagttacatcccgagaagtagctcagatctctggcataatgattataaagtggtttctcctgctttgcgagct

SEQ ID NO: 136914 - DNA, 83 bp, Homo sapiens
gctactctctctttctggcctggaggctatccagcgttacttcttgctgcagattctgcgcaggatcggagctgtgggccagg

SEQ ID NO: 136915 - DNA, 100 bp, Homo sapiens
gccggaatcattcccttggctgttaatttctcagaggagtaaaatttcaagagactgaaaccagatctgagtttcgctgttccagtctggacctctttgg

SEQ ID NO: 136916 - DNA, 95 bp, Homo sapiens
gaatgcatttgtcacgggcattgcaaggtacattgagcaggctacagtccactccagcatggggagcttttggaagagtcccagatggaagcgac

SEQ ID NO: 136917 - DNA, 75 bp, Homo sapiens
gatttttaaagcttcaaaatcctaagactcagcactgttgcgggatctgactgcagccatgagcagcaatgagtg

SEQ ID NO: 136918 - DNA, 76 bp, Homo sapiens
cgcctccaggccaagagggatccttcacccgtgtctgaggaattacggaggttgagctggtccggaatccctaagc

SEQ ID NO: 136919 - DNA, 50 bp, Homo sapiens
caaattcaagagtgaccagggatgtggaatcccccaaagaaggtaaaggg

SEQ ID NO: 136920 - DNA, 75 bp, Homo sapiens
acagcctggaccaccacagccaccccagcagaggccttatggatatgaccagaactgatagtgcatcagccgacc

SEQ ID NO: 136921 - DNA, 75 bp, Homo sapiens
caaatcagcaacacagaatttctgcaagtaattgtcagggcgacccttgggcgctggagtacgcttgggactggg

SEQ ID NO: 136922 - DNA, 90 bp, Homo sapiens
cggggacccaggagtttcctgtgtccagcgctgccggagccgcctgagggaccgacgtcatggttcggtgcctcaagctgctgaaggaat

SEQ ID NO: 136923 - DNA, 75 bp, Homo sapiens
gggccaaatgctcctttaatttttgaacgagtgtctgcactgcttggggaggaagatgaagaggcactgcattat

SEQ ID NO: 136924 - DNA, 97 bp, Homo sapiens
ggcagcagcagccgcggagcagtagccgccgtgggagggagccatgaagcattacgaggcccagctgagagccagcctggaggttacccagcagcag

SEQ ID NO: 136925 - DNA, 83 bp, Homo sapiens
cggagcctggcgggcgtgggaacccaggccccgccgaggcggccagaactgcatgaacttgcccccagacaaggtccagctgc

SEQ ID NO: 136926 - DNA, 100 bp, Homo sapiens
cccacagtgggggtgtgcaaacccgagagaactgggtgaatcagttcagacagctgtattccaaagtcatcaatgataagcatgatgatgtcatggccaa

SEQ ID NO: 136927 - DNA, 87 bp, Homo sapiens
caacatctgcttctcctcctcagaggacagagcgggatgccaccagcttgtccaaagggaagttccaggagctcctggtgggcatcg

SEQ ID NO: 136928 - DNA, 90 bp, Homo sapiens
cggacggtacttctgccactgctgctccgtggagatcgtcccgcgcctgccggtactccaaagattcaggtttactcacgtcatccagca

SEQ ID NO: 136929 - DNA, 74 bp, Homo sapiens
cgaaattgtcacctatgggaaaattccctacccagttgatcgaatctacagatgcagaacccatggatacagag

SEQ ID NO: 136930 - DNA, 98 bp, Homo sapiens
gcaaacgagagctgaggctaatgaaaaacagcatgaacaggctgaacactttgccacgaggcttcggctccctgccagctcttgaggttctggacttg

SEQ ID NO: 136931 - DNA, 80 bp, Homo sapiens
tatgtgcacccagatgagttcttccagtcccctgaggtgatggcaggcattgaagttgatatcgatgtggagcacggagg

SEQ ID NO: 136932 - DNA, 100 bp, Homo sapiens
ctgagtgaaaatacagccaagatcttggcaaagcttctccctcagtatttagaccagagagtttcattctgtcgcccaggctggagtgcaatggcgcgat

SEQ ID NO: 136933 - DNA, 73 bp, Homo sapiens
ggagcctgaggatcccatgttcctgatgcctgcacccccatgttccgggagtactccctgcaggttctgaaga

SEQ ID NO: 136934 - DNA, 80 bp, Homo sapiens
caaagatgaaagaacaacctgtcttggagcgcttgcagggcaagttaaagtcttcagagccctgtatacgtttgaaccca

SEQ ID NO: 136935 - DNA, 75 bp, Homo sapiens
gctgcataagaccttgtcagaggagggatttgttcgtgttgaccgagattatgtgctgaagtctgcagagctggc

SEQ ID NO: 136936 - DNA, 83 bp, Homo sapiens
ctcgactcggtcctgtttcgacagcgaacatgtcgcggcctgtcaggtgtggatgaggtcaccattgtcaacattttgaccaa

SEQ ID NO: 136937 - DNA, 98 bp, Homo sapiens
taccatgatggaagcatgtgccaaggagaactgttcacccacaattccagcttcaaatacaggaagtgaaaataactctctctacctgtactataaag

SEQ ID NO: 136938 - DNA, 50 bp, Homo sapiens
ctcagcaaggagaactgctggtccaagtgtgacttcaccgaagaccagac

SEQ ID NO: 136939 - DNA, 88 bp, Homo sapiens
atcgtatggaacgccccaaaatccaacagcagttctcagacctcaagtttgggcttcctgtagacacccttttcctgcgcaacagagc

SEQ ID NO: 136940 - DNA, 100 bp, Homo sapiens
cttcggctaggtcgtcacaggctccggctcatggcatcaagtggcatccatcataagcaatcatttggggaagaatctacagttgctgatggacagagtg

SEQ ID NO: 136941 - DNA, 82 bp, Homo sapiens
cggcggagtagagcggagcctggcgggcgtgggaacccaggccccgccgaggcggccagctttagatagtgacgggggcaga

SEQ ID NO: 136942 - DNA, 100 bp, Homo sapiens
ctggattcacgggtagagattggcttcgggctgagctagcagtgagcaccttttggcccaatgaatatcagagtgaagtcaccctgctgagaaatgaagt

SEQ ID NO: 136943 - DNA, 95 bp, Homo sapiens
ctgcaggggatcctctctgctttcctgttgcatttgctggtctggcctttgcgtccttctacctggcagggaagttacactgcttcacaccacaa

SEQ ID NO: 136944 - DNA, 75 bp, Homo sapiens
ctcgggatggtgccacaggaggctgtgcgggccccgctccgcttcgaatgggatgatcctttcaaaaataaagcc

SEQ ID NO: 136945 - DNA, 75 bp, Homo sapiens
gcagtcgggaccatcgccggagcctgaggacacttctctgtcgtcacagttagggaagatggaagagttgagtca

SEQ ID NO: 136946 - DNA, 82 bp, Homo sapiens
tacgggcggccgtgcgcgaggcgagggttttggccaaattgggcgagggcacaaaataaccacttaccccttctcaccgagg

SEQ ID NO: 136947 - DNA, 75 bp, Homo sapiens
caacctgaggtggcactgaagaggaaggagcagcagagagagcggcgttttggtgctcagggaacagactgacgc

SEQ ID NO: 136948 - DNA, 88 bp, Homo sapiens
gattcgcagtggtcgcttcttctccttgtccatgctgctcctggccccaaagctgaacgaggccaacctcaatgtggagctgatgaag

SEQ ID NO: 136949 - DNA, 75 bp, Homo sapiens
tttatgtatggcttggctcgtggaccatgttcacacaaaagatgttggacaatttctacaattttgcttcatcat

SEQ ID NO: 136950 - DNA, 123 bp, Homo sapiens
aagactccaagtaaggaagaaattgagaaagaatgtgaagataccagtttgcgtcaggagacacagggccgcttgaagatgccattgaagatgaggaagaagaatgtccatcagaggaaacag

SEQ ID NO: 136951 - DNA, 75 bp, Homo sapiens
ccggccagaagcgggcggcgcgggggagatgccgccaagctgagccaccaaagaaggaggctgccaccacggggc

SEQ ID NO: 136952 - DNA, 75 bp, Homo sapiens
attccaagtaactcttatttggtattctctactgccgctgatggtcaaacgcaagtggaaattaaagtgtgtcag

SEQ ID NO: 136953 - DNA, 100 bp, Homo sapiens
cctcggcagtgtgtggggtctcgctggacgttggaggaaagaaggaatatctcattgcaggtattgtcaatatggactcgccatatggttctgtaacacc

SEQ ID NO: 136954 - DNA, 82 bp, Homo sapiens
tccctcacgcgggcgcggatcgaccggagcagagagctggcgagcaaggcagtcgatgatgtgaagaaaggttacatcaaag

SEQ ID NO: 136955 - DNA, 87 bp, Homo sapiens
gtcacggtccagcggtcacctacccccagcaccacctccagcccctgcgcctcggagaatgcagttgaaactaattttgtggataga

SEQ ID NO: 136956 - DNA, 124 bp, Homo sapiens
agtgaattggcaccaagccttcccagttatcataaccttgaatggcgactagatgtacaggactcagcccaaaaccatgtttgcccaagttgaatctgatgatgaggaagcaaagaatgagcca

SEQ ID NO: 136957 - DNA, 74 bp, Homo sapiens
ccaactctgccagtcacactggggtccccaaagaagtcaaggtggcgacatgtctaagaatgtgagccagtcac

SEQ ID NO: 136958 - DNA, 76 bp, Homo sapiens
acagaaactatatgccaccatggagaagcataaagagttgctgagagatggatgttaaaaatcaacaccaggacta

SEQ ID NO: 136959 - DNA, 51 bp, Homo sapiens
ctttagaagagcccacagtcatcaaaaagactgcctcaacttcagtggaac

SEQ ID NO: 136960 - DNA, 98 bp, Homo sapiens
gaacacaaagcgtgaatccggaagaaaagttcaatctggaaacatcaatgctgccaaggctaaatttattgtgaagaaatcagaagatgaagaagacg

SEQ ID NO: 136961 - DNA, 74 bp, Homo sapiens
gatcggccatcacaacagcagcctcttcgaaatcaggaccaacttggaggccttgcagaagaagctggaggagc

SEQ ID NO: 136962 - DNA, 80 bp, Homo sapiens
tgctgaggatcgaggaacgttgtctggttatggaaacaaaggacatgctttacatcgtcactgaatttgctaaaaatgga

SEQ ID NO: 136963 - DNA, 82 bp, Homo sapiens
cgcagtcagccggggacctcgtccgagcccacccgcctttggaggactccctggaggaaaagcggaagcggcagcggtctga

SEQ ID NO: 136964 - DNA, 74 bp, Homo sapiens
cggtggaatgggtccaggccgtggtcagccgcttcgacgagcagattgctcgagactttaatcccaactggatg

SEQ ID NO: 136965 - DNA, 75 bp, Homo sapiens
tgcagtgaaaacatctccactctgaagaagacactggagggcaattgaaggaacagactaaaaatcgtgtcctgg

SEQ ID NO: 136966 - DNA, 107 bp, Homo sapiens
aggaaaagaggactggagtggtttgtctgtgatggctggaagttcctctgtaccagaaatggatgaaaagaggctgctggatccagggttgaaggttcataaaggcc

SEQ ID NO: 136967 - DNA, 100 bp, Homo sapiens
gtgatggagattttgatgtggatgatgccaaagttttattagcatatagcactttctacattgtgggtttaatattatcaatgcagataccttttgtggg

SEQ ID NO: 136968 - DNA, 82 bp, Homo sapiens
taagaactgcctttcacctcccacaatgattctgaggcctccccagacatgtggaattaaataaactatcaatcttgcccag

SEQ ID NO: 136969 - DNA, 90 bp, Homo sapiens
gaactgaaccagatgagagccttcaaaagcagtgcaactggctcagtattcacagggaaagctgtgaggaatggcttcagttctgtgcag

SEQ ID NO: 136970 - DNA, 90 bp, Homo sapiens
cctacctgtttggtccttattattcttctgtttattagcattatcttgacttttaaggttgcaagaaagctcaagtagcctatggagagg

SEQ ID NO: 136971 - DNA, 51 bp, Homo sapiens
ctgctgctggctgcccttgtctcctttatatctcttccaaatgcatgatga

SEQ ID NO: 136972 - DNA, 75 bp, Homo sapiens
gggccttcgagagctaccgcgccagacagctgccgcagcgggaaccgcaagagcttggtggtaggaacgccctcc

SEQ ID NO: 136973 - DNA, 100 bp, Homo sapiens
gttgcctacagtcctcagcagttcccaaatcagccccttgttcagcatgtgccacattatcagtctcaggaactgcaagcacatgttgaccagataactg

SEQ ID NO: 136974 - DNA, 74 bp, Homo sapiens
tgagcaccgcctggtctctttcctgtggccagcccagattcagtttaaggagaaagtgctgtggaccgctatca

SEQ ID NO: 136975 - DNA, 116 bp, Homo sapiens
ctgacatggaggatgatttcatgtgcgatgatgaggaggactacgacctggggaacacttaagaatctgtcctcaggaatatacatgctgcaccacagaaatggaagacaagttaa

SEQ ID NO: 136976 - DNA, 83 bp, Homo sapiens
cggatgatgccttcaatactacctttatttccaccatagctaaaccaggtggacaggtgaaatgtcagtatatctctgctgtg

SEQ ID NO: 136977 - DNA, 100 bp, Homo sapiens
acccagccagagcaacttccagtcctgaaagctgcattcatgtgaaagagtttctagccaaagccaaagaagactttttgaaaaaatgggagaatccaac

SEQ ID NO: 136978 - DNA, 107 bp, Homo sapiens
cggaggcatcggaggcggctgcgagagtggcagaggagctggcggagagcggcctgcgggcgatcgggccgagaggagcaggagcggcttcgcttggagcaggagcg

SEQ ID NO: 136979 - DNA, 82 bp, Homo sapiens
cacactcttcggcctgacgcccaccctcaatggcgggtggccagaatggatttgtggccaggggcatggatgctgctgctgc

SEQ ID NO: 136980 - DNA, 100 bp, Homo sapiens
cttggttaacttgggagaaagtttcatctgtggatggagtattgggctgcttccccaagcccacagtctgtaagaagggtctcatcctcccgatctgtct

SEQ ID NO: 136981 - DNA, 100 bp, Homo sapiens
atggacctcccagccatcatggtgtccaacatgctagcacaggacagccacctgctgtcgggccagctgcccacgattctgaaggaagatttccattagg

SEQ ID NO: 136982 - DNA, 50 bp, Homo sapiens
cgacccttcctggccatcctgggcgggtctacatgttcaagtgcgtgtgg

SEQ ID NO: 136983 - DNA, 75 bp, Homo sapiens
cgcagtgacgagcggccgaagcagctttgcggtgtccctggccagtgtccttccacctgtccacaagcatgggga

SEQ ID NO: 136984 - DNA, 98 bp, Homo sapiens
tctgatctatgacaccaagggtcgctttgctgtacatcgtattacacctgaggaggccaaggtttatgtagaagtttctaaaatgaaaatcaatgtta

SEQ ID NO: 136985 - DNA, 75 bp, Homo sapiens
aaccaattccggacacataacaagcagcagtgaggacaccaaagaaggagctggcaaacagccctgactgtcccc

SEQ ID NO: 136986 - DNA, 88 bp, Homo sapiens
catctcactgcagccttgtcctcctaggctcagtgaaggactaccagctggtccagaagggaggaggacaagagtgtggtgactctcg

SEQ ID NO: 136987 - DNA, 100 bp, Homo sapiens
ccctattttacatgaagattttgttagcaataatggcttcattgaggaccctgagaggaagtatcactttgagtgcagcagcgaggagcagtgtcaggag

SEQ ID NO: 136988 - DNA, 100 bp, Homo sapiens
ctgaggaggaaaagaaagcgaatgactgaccccaccaggaggcttgggcctggaacaggacaggcaggggcccgaagaaagtgatgaatttcagagctga

SEQ ID NO: 136989 - DNA, 74 bp, Homo sapiens
tgcgtgtggtgatgatcgaaaacgagtcaaattgactttatcagctttaatcgatgggaagaacttcagtgcag

SEQ ID NO: 136990 - DNA, 90 bp, Homo sapiens
gtggttcaacagctccggctggaggccggactcaaccgcgtaaaaaggcccagaaatctaaagatctttgttctataactgtaagtggag

SEQ ID NO: 136991 - DNA, 76 bp, Homo sapiens
tgatgtttgataaaactaccaacaggcacagaggttggagtgctggagtgcagtagcatgatctccgttcactgca

SEQ ID NO: 136992 - DNA, 98 bp, Homo sapiens
aagcttagagcgtctggccaagaatcagaggaagtgggttatgaagacagtatggagtttccagaccatagtagacatttgctacagtgtctgagcga

SEQ ID NO: 136993 - DNA, 100 bp, Homo sapiens
cttcaaaaactgggtctgtgactacaacatattgctgcaatcaggaccattgcaataaaatagaacttccaactactgcggaacggaagccgcccctttt

SEQ ID NO: 136994 - DNA, 75 bp, Homo sapiens
atgaagagacatgagatggtggtagccaaacattcagaggccagtaatagtagccatgagtctcgtattggtcta

SEQ ID NO: 136995 - DNA, 100 bp, Homo sapiens
cattgaagacgtcattgcccagggccaaacgtaccaagaaagtcgggatcgtcggtaaatacgggacccgctatggggcctccctccggaaaatggtgaa

SEQ ID NO: 136996 - DNA, 105 bp, Homo sapiens
ctgttcctggaggaatccgagaagagcagagcggagggagccccagacacgttacagaatgtctgaaggggacagtgtgggagaatccgtccatgggaaaccttc

SEQ ID NO: 136997 - DNA, 100 bp, Homo sapiens
cttacagaaaaccagtgctgagaagagagaaatagaggaaaagttgcacaaactcttcagccaagaccacctagtggtatcaattcagtgctaggaggcg

SEQ ID NO: 136998 - DNA, 51 bp, Homo sapiens
ctcagatgctcccttctgctcctggtataagtgtgctagcggagtgtctag

SEQ ID NO: 136999 - DNA, 100 bp, Homo sapiens
tccaaaccagacccctgtgtcatcctcaagatgcagtctcatgggcagtggtttgagaattacttactgtcatctacctttccagagtaaatggctttat

SEQ ID NO: 137000 - DNA, 100 bp, Homo sapiens
ggacagccccaggatgccgtgggccgcagccactcaggactgtcaaaggttagctttatacgtctacgaatatttactgcacgtaggagcacagaaatct

SEQ ID NO: 137001 - DNA, 88 bp, Homo sapiens
caaaggctgggatgggtatgatgtacaggcttcacaggctgctcaagaagccgagatcaatgccagaaaagccaaaaactctgttact

SEQ ID NO: 137002 - DNA, 101 bp, Homo sapiens
cccgggcccaggccccggcagcgcctgggacaagaccaagccaccctggtagaacaagtaaaaagagtaaaagaaattgaagctattgaaagtgattcttt

SEQ ID NO: 137003 - DNA, 75 bp, Homo sapiens
tggagggtgtccattatttgcacagtaatatgattgtccatagagatatcaaagtgctgacttgctcatcagttt

SEQ ID NO: 137004 - DNA, 50 bp, Homo sapiens
acagtcagcgtgatacctctgatattaagattgattacacagtacctacc

SEQ ID NO: 137005 - DNA, 73 bp, Homo sapiens
agcctcccaagaagctgggactacagaagacagacatcttcctgtgaagggcttgtggcaaacctatccaact

SEQ ID NO: 137006 - DNA, 100 bp, Homo sapiens
tgggatactgcctgacctcattcgaagctgccattgaatatattcggcaaggaagcctctctgctaaaccccctttatcaggaactgttgccgttattac

SEQ ID NO: 137007 - DNA, 144 bp, Homo sapiens
ctcttcttgggaacctacacctcttccatggctctgaaaaaattcaaaactagtccttattttccaaccacagagtccaaaactacttacctggaagaccttccaccaccccctgagtatgaattggccccgtccaagttagaa

SEQ ID NO: 137008 - DNA, 75 bp, Homo sapiens
attcacttccttctcatccttttccaccagctaaaggtattgttgcagcatctggcagtgagactgaggatgagg

SEQ ID NO: 137009 - DNA, 100 bp, Homo sapiens
gaagctcatgagcagcctgcccaacttctgcgggatcttcaaccacctcgagcggctgctggacgaagtacccggcagtgtcacctgctcctggatgtct

SEQ ID NO: 137010 - DNA, 73 bp, Homo sapiens
ggagagtgtgcagccgagtcactactgcctgcctgcctgcctgctacggcacgtctgagaatggtggatgtgg

SEQ ID NO: 137011 - DNA, 83 bp, Homo sapiens
agccggctgggctcggtattccccttcctgctagtcctggtggatctgcagtacgaagagatcctgaaggagctagacgagtg

SEQ ID NO: 137012 - DNA, 115 bp, Homo sapiens
gcgattcctgcaggcgttggttcccctctttgacctggtaaatgcaggcttttatgcgagagaatggtggcgaacaactgatgctcatactcgtacaggagcaaccttctttcca

SEQ ID NO: 137013 - DNA, 51 bp, Homo sapiens
agaaaagctggggacttctggaacaagcgggagcctgtgtcaggaaagcat

SEQ ID NO: 137014 - DNA, 100 bp, Homo sapiens
ctgcccggctgccttccacctccagtgctgcagcaaagtggggcaccaaggccctgtgctaagcactcataatcctctgggggtgctacccctacaaaca

SEQ ID NO: 137015 - DNA, 90 bp, Homo sapiens
ggtgatcctgatggcctgtcgagagatagagaatgggcgggtgatgcaggttctgaatgctgatgccattgttgtgaagctgaactcagg

SEQ ID NO: 137016 - DNA, 99 bp, Homo sapiens
gataaaagaagatctcggtcaagggacaggaagcgtctgagggccctggaaatacaaggataaatggaggatggtgctcatcttgaaacttgaaactaa

SEQ ID NO: 137017 - DNA, 100 bp, Homo sapiens
tttgaggactttgtctctgatgagctgagaaacaaagccacccagccaatgaagatgccgctcctacgaggactgctgtggctccaggtgctgtgtgcgg

SEQ ID NO: 137018 - DNA, 82 bp, Homo sapiens
caagaaaatccacaagaacgcactttcctcccagctccctgtgctgtcaggaatctacaggacttggctcgtatttacattc

SEQ ID NO: 137019 - DNA, 75 bp, Homo sapiens
gtatgactgggaccgagatggaagagatgctgcctatggaagttgcaatttctacattacacttcttgactgttt

SEQ ID NO: 137020 - DNA, 101 bp, Homo sapiens
tggaaactctttgggaaagccactcgaaaaggatcctgtagcatggagtgacgttaccagttttgatatttctgatgctgctgcttctcctatcaaatcca

SEQ ID NO: 137021 - DNA, 90 bp, Homo sapiens
ggacagcatgcctcaccaagtcacatgacaagcaggaaatgaggcaagttatcctttggaaatgtgctcacactgtaagtcatattcttg

SEQ ID NO: 137022 - DNA, 83 bp, Homo sapiens
ctggaagcagaaggagtctttgaaaaagggggatatgagactttctactcggaatatcctgagtgttgcgtggatgtaaaacc

SEQ ID NO: 137023 - DNA, 50 bp, Homo sapiens
gttttgatggagcggctgaagaaggggctttgaccacgacctttgaagag

SEQ ID NO: 137024 - DNA, 82 bp, Homo sapiens
aagatggaaaaccagttattgaatatcaagaggaggagttgttggatgttgacaatgcgtctctggcacgtcttgaccttga

SEQ ID NO: 137025 - DNA, 75 bp, Homo sapiens
aatctccttgaatcgctctctcccagatatccggcacccaaatggctttcctggagatggcatgcagcagccagc

SEQ ID NO: 137026 - DNA, 82 bp, Homo sapiens
tcgactttggagaaaccaccgtgctggaccgcttttacaatgcagatacactgaagagatggtgccttggcacccttgcctg

SEQ ID NO: 137027 - DNA, 100 bp, Homo sapiens
tggtgtcacctatcagtaaaaggcaacagaatttatcaagcagaacattgtgatatccagtggatttgtgggaggctttttgctcggacttgcatcttaa

SEQ ID NO: 137028 - DNA, 90 bp, Homo sapiens
cgggctggtcctgctgcgagccggcggcccggagtggggcggcggatgaagcgttctgtcagccaccctggttcttgcagttcagagagg

SEQ ID NO: 137029 - DNA, 73 bp, Homo sapiens
tcggcagctccagagcgacgggaaacgaaagatttggtgcttccagatgtgagttatcaggtggaatccagtg

SEQ ID NO: 137030 - DNA, 80 bp, Homo sapiens
atctgtcttttactataaccatcctaacagatggctcatgatgccctcaatgcccctctgcacattctccgggccatata

SEQ ID NO: 137031 - DNA, 75 bp, Homo sapiens
atggaaatgagatcacctttacttgcagggtttcctatcgctgaagtgttcacgctgaagcccctggagtttggc

SEQ ID NO: 137032 - DNA, 75 bp, Homo sapiens
agctggtgatgcccaactacccattcatcaacattcggtcaagtgattttcatcttcattggagagaccctcctg

SEQ ID NO: 137033 - DNA, 50 bp, Homo sapiens
tatgaatgcactggaatctataaagaggcattttcagatgaatttgccag

SEQ ID NO: 137034 - DNA, 90 bp, Homo sapiens
ccggagtgtatgtctttggagaacttctggagctggccaacgtgcaggagcttgtgagacccagctgcctgtctccttccggcacctgat

SEQ ID NO: 137035 - DNA, 101 bp, Homo sapiens
agcatggcttggagcacttcctattccactggattgggaaagaccatggcagcgttttgctgctgacatcatctccgttttggccatgaccatgagtgggg

SEQ ID NO: 137036 - DNA, 82 bp, Homo sapiens
ctcccgagtagctgggactgcagatggtggagttaccttaggaatggtgcttttatgtgaagctgctacctctgacatggat

SEQ ID NO: 137037 - DNA, 86 bp, Homo sapiens
caaatagcttgccctttcttaaggggaaacaagtcaatttggaaaggtcccagcgttgtgccatcagcatcagcaaagccatcaac

SEQ ID NO: 137038 - DNA, 80 bp, Homo sapiens
gggcgacgctggctgcagggacccggtgacagcgtgagagtggcatgccctctcccgtgaagagcaggctaaatattatg

SEQ ID NO: 137039 - DNA, 128 bp, Homo sapiens
gcaggagctgctttttcaatgagaagaatgaacagacctagtgggcgttgcctttagacccaggtcaagagcaatctgaatccaaatgcaaaggagtttgttcctggggtgaagtacggaaatatttg

SEQ ID NO: 137040 - DNA, 98 bp, Homo sapiens
gccctgggcgcgggggcggcgtgtcaggtggttgcggagctggtaagaacaccgaaaatctctcccagcactttagaaaggggaccctgactgtgtta

SEQ ID NO: 137041 - DNA, 100 bp, Homo sapiens
gcgtggtgcttctgttgctcacagatagccttggataccagttactggactttcattaatcacgtcttcatctgggggagcattgccatttatttctcca

SEQ ID NO: 137042 - DNA, 90 bp, Homo sapiens
tggactcggaatattacagcggcgaccagtcaggtccaagccttgtcatcggccagtaagtttgaagcagagttgaaagctgagcaagat

SEQ ID NO: 137043 - DNA, 80 bp, Homo sapiens
ctgggcaccaggaagcgaaggctggactgatcctttgaaatactccagccatgactaaaagagaagcagaggagctgata

SEQ ID NO: 137044 - DNA, 50 bp, Homo sapiens
gacgagtccacgggcctgaagaagcactgggaggtgttcagaaaagttac

SEQ ID NO: 137045 - DNA, 75 bp, Homo sapiens
aggaagagcaaagccgagctgcagttaagtgggcagaccaacatccacctcagcaaaaacttcttcctgacgaat

SEQ ID NO: 137046 - DNA, 83 bp, Homo sapiens
ggcggatgttcatgggcagcaccatcgagccagaagcagtatttgtcctggctactgcagcactggggtgtcagttgttggtc

SEQ ID NO: 137047 - DNA, 100 bp, Homo sapiens
caggcgtctgtgggcaaaacttcaatcctggagcagcttctgtatgggaaccatgtagtggctggacccacaaaccgtggagaccaagaactggcacacg

SEQ ID NO: 137048 - DNA, 83 bp, Homo sapiens
ctttgttttcccacgctaggagctaccacaacagtttcactgttacatgccttgaagtgatgaggaggtttctgttactatat

SEQ ID NO: 137049 - DNA, 75 bp, Homo sapiens
taaagcccgagcccaaaccccgccaccatcatagaaacgcttcgttaagggactcaggcagtacgggaagaactt

SEQ ID NO: 137050 - DNA, 100 bp, Homo sapiens
ctatattctgcggcctgttttccagcagagggtggaattgcgtttgttgccataaaaggagcatttaaagtttacttcaaacagcagcaatatttacgac

SEQ ID NO: 137051 - DNA, 50 bp, Homo sapiens
ggggaacaacaacgagatcctcagtgctggagaagaagcaggcgctccct

SEQ ID NO: 137052 - DNA, 82 bp, Homo sapiens
tggagttgctactaaaaagagaggtgcctttatctgatgatgatgaaagttacacagatggtcctagaacaattggagattc

SEQ ID NO: 137053 - DNA, 90 bp, Homo sapiens
gggagttcaaggaggtgctgaagagcgaggagatttggtgcttccagatgtgagttatcaggtggaatccagtgaggaggatcagtctca

SEQ ID NO: 137054 - DNA, 50 bp, Homo sapiens
aggatgacttctctaatcagttacggaacttgccacatcagactcagatt

SEQ ID NO: 137055 - DNA, 90 bp, Homo sapiens
cctgcctacagttttcacaaatctatatttgtcaggatacgaatcaggttctcttcaagtgctgccagggatctgaagaggtaccctgca

SEQ ID NO: 137056 - DNA, 83 bp, Homo sapiens
ccagctcaagcagttcaccaccgtggtggccgacacgggcgacttccacggaatgaattcagatatttccagagaatgaccac

SEQ ID NO: 137057 - DNA, 119 bp, Homo sapiens
ccgcccgcaactccgccgcccaccatggcttccgaggagctgtacgaggtggccctcatgacactgacgctcttcccggtccggctcctggttgccgctgccatgatgctgctggcctg

SEQ ID NO: 137058 - DNA, 98 bp, Homo sapiens
taacccaggggaagttacacgaggttggtcatgaaagagattccttgcagagacagctcaacacggcacttccacagcagcccacccatgtgcccgtg

SEQ ID NO: 137059 - DNA, 82 bp, Homo sapiens
cccagacgctgcccgcgggcccggccacggcggagccaagggggatatgagactttctactcggaatatcctgagtgttgcg

SEQ ID NO: 137060 - DNA, 100 bp, Homo sapiens
actttggaaatagttccctttcgagttgcagcttacaacaagaaaaagaagcgtatggactactatgactctgaacacctctgacctttttgagcctggg

SEQ ID NO: 137061 - DNA, 100 bp, Homo sapiens
aagatggcggatctggaggagcagttgtctgatgaagagaagggtgaagttgaacaaattgctatgatgaaaccaaaaggccagactgaacacgatgagg

SEQ ID NO: 137062 - DNA, 87 bp, Homo sapiens
gcgcccgcgccaccatcttcggctgaagatattgaaatggattccaggcgtgtgcctcgagacaagctggcctgcatcaccaagtgc

SEQ ID NO: 137063 - DNA, 75 bp, Homo sapiens
cgctcaacatgcacctagtcaagagccaccgcctgcaggtaagaatgattgatgttggctgatattggagtgctc

SEQ ID NO: 137064 - DNA, 121 bp, Homo sapiens
tgactgtttattttttggttcactgatgtctgctacagatccagcaccagcattggatgttgattggcagagcaacaacacctttgcttcttgtagtacagatatgtgcattcatgtctgt

SEQ ID NO: 137065 - DNA, 101 bp, Homo sapiens
gtcagatgctgactgtgtggagttacttctggaaaaaggagccgaggaaacattggcaaatttggagcgacagatctatgcttttgagggaagctacctgg

SEQ ID NO: 137066 - DNA, 100 bp, Homo sapiens
tcaacgccaggcgccgctcctttacagtggaatgcagtagccctctgggcctgggatattgtggttgataactgtgccatctgcaggaaccacattatgg

SEQ ID NO: 137067 - DNA, 98 bp, Homo sapiens
acgctccggggcatcatcaagagcatgctgcccaacatgtttgggaacctgcgctccacgttaatggccctcatgattggctcttacgcctcttctgc

SEQ ID NO: 137068 - DNA, 92 bp, Homo sapiens
cgcgggaggtgttcgagaacgaccccgagacgtacctggagtagaacagaaaaattattatgtctgtgttcccttgggactcattggaaatt

SEQ ID NO: 137069 - DNA, 87 bp, Homo sapiens
gacaccatctggaggaggcgttgccgtgagggttatgaagacagtatggagtttccagaccatagtagacatttgctacagtgtctg

SEQ ID NO: 137070 - DNA, 117 bp, Homo sapiens
gagttgtgagtctctttcctgtttacctccagtgtcccttcttccacatgaaaaggataaggtccacgctgcttttatgagctgtaacactcaccgcgaagatctgcagcttcactc

SEQ ID NO: 137071 - DNA, 75 bp, Homo sapiens
ggagaagggctgcgggttagggggccggcgcccgcggttcaggccagctttgctccaatggaggacaaactcaac

SEQ ID NO: 137072 - DNA, 75 bp, Homo sapiens
agagcacacacctcttgataaggaagctgcccttcagccgcctgatgcctggagttactgtaaaagacgtgaacc

SEQ ID NO: 137073 - DNA, 80 bp, Homo sapiens
aagcccaccggtccccaacgcatcatgccagggagccaagcgtcctgcccggccgtgagaagccctaccactgcaactgg

SEQ ID NO: 137074 - DNA, 90 bp, Homo sapiens
cgggacgcgcgtacgccctgctgcttctcctgcatgcttgagagttcaaaccggcttgatgaagaacacaggctaattgccaggtatgcg

SEQ ID NO: 137075 - DNA, 83 bp, Homo sapiens
tagatttgaagcgcttcaaaggaccggacccagagaagaggaaaactctaccggtgcagatatcagttttagagaatgtggcg

SEQ ID NO: 137076 - DNA, 75 bp, Homo sapiens
taacaagcagcagtgaggacaccaaagtgatggaatggggagaagatattaaagcagtttcaaaagatgaagcag

SEQ ID NO: 137077 - DNA, 89 bp, Homo sapiens
agccgcggcccggaatcggggcgcttcgccccgggccccccagcatgaagaccccggcggacacaggttgtggcagcactgcctgaagg

SEQ ID NO: 137078 - DNA, 76 bp, Homo sapiens
aatatacgttgtgaaggaatgaccctaggagagctgctgaaggcaaaagatgtgattgaagagcatggtccttcag

SEQ ID NO: 137079 - DNA, 100 bp, Homo sapiens
tgagaccatccgccgatttggccgcctggattgtgttgtcaacaacgctggccaccggctccaaggtgggcaaactgaccctcaagaccacagagatgga

SEQ ID NO: 137080 - DNA, 100 bp, Homo sapiens
cgggccgggggacccgcccgccatggccaccaaggtgtcatggagaaactccagctgggcccagagattctgcagcgggaaaatccaaggcttatttatg

SEQ ID NO: 137081 - DNA, 75 bp, Homo sapiens
agagaagatcgtcaagaagttgtgggtagatacaacaagaattgaatactccattcctttaagagaaaactgggc

SEQ ID NO: 137082 - DNA, 74 bp, Homo sapiens
aagagaaagccaagatccactaccggaagaagaaacagctcatggtaaccttacctgtctacctgaacttcacc

SEQ ID NO: 137083 - DNA, 100 bp, Homo sapiens
cgcggacttcgctttgggccatgaccagaataaaggttctcttcagtttgaagacaaatgggattttatgcgcccgattgttttgaagcttttacgccag

SEQ ID NO: 137084 - DNA, 50 bp, Homo sapiens
agcgcgaatatcgtcatcgttagaagaactggttagtactgcagaaaaac

SEQ ID NO: 137085 - DNA, 50 bp, Homo sapiens
gtagagaagaacctgctcatctttgggcagtatttggcagtcgtattcag

SEQ ID NO: 137086 - DNA, 89 bp, Homo sapiens
gaacagaaagaggcagaaggggccgtggccgaggcagagggttaaagcacgaattgggagctctcagcgacatcaccagtcagcagcca

SEQ ID NO: 137087 - DNA, 108 bp, Homo sapiens
gcaactccgccgcccaccatggcttccgaggagctgtacgagccgcggcgagtcctttgcacatgttggcaacacacgcatccgcatcggcctccctgcccacaaagc

SEQ ID NO: 137088 - DNA, 83 bp, Homo sapiens
ctttgccattggggtgcagcagctgcaccccaccttgatccagcggacttacgggagggtgtgaagacagagaatgaccacat

SEQ ID NO: 137089 - DNA, 90 bp, Homo sapiens
cgagactgtaggcactgccatggcccctgtgctcagtaaggactcggcggacatcgagcttccagaggagattggaaaacttgaagataa

SEQ ID NO: 137090 - DNA, 75 bp, Homo sapiens
gccatggatatcagagggagaaatccaacgacctttctatccagattggttttcacagaattccatggactttaa

SEQ ID NO: 137091 - DNA, 100 bp, Homo sapiens
atggctttgctgctgaattcaagttggtcgaccagtccggacctcctcacgagcccaagctattcagcttgaccctgaagaaactcgtcatgctaaaaga

SEQ ID NO: 137092 - DNA, 98 bp, Homo sapiens
ctcgattttgcaggctgctctttgttagaaaagaacatgattttgggactgctcttcattaaaaggtgaccattgtgaggtagatattttgttctaat

SEQ ID NO: 137093 - DNA, 101 bp, Homo sapiens
tggcggatttcgaagagttgaggcttgccttgcgccatggactggcagccagacgagcagggcctgcagcaggtcctgcagctgctcaaagactcacagtc

SEQ ID NO: 137094 - DNA, 100 bp, Homo sapiens
atattacattaggaagtgttcatggcaccacaacaaccctgtgggcactgaatggcggtagaagatggaccagcctgaaatgatcttgaaggaagccatt

SEQ ID NO: 137095 - DNA, 82 bp, Homo sapiens
aggccctgagcacgctgctgtgtgagcagcaggttgtgaccgagattcccgacgagagagactgaggggaagagaggaagga

SEQ ID NO: 137096 - DNA, 83 bp, Homo sapiens
cttgaatgttgaagatgtccttaccagctttgacaatacaggaaatgtttcactgccagtgaaagatgtagaagataaacctg

SEQ ID NO: 137097 - DNA, 50 bp, Homo sapiens
cactaagcagttggaggctgtgtctggtcctggacccaagccagaagcct

SEQ ID NO: 137098 - DNA, 89 bp, Homo sapiens
tcggtgcccttcccgttcttcggtgccgagcactccggactctacgagttcgcagcacttactaaagaactcaatgtatgcagggaaca

SEQ ID NO: 137099 - DNA, 90 bp, Homo sapiens
gaggaagaacttgtccagaatggaacactggtctgtcaagaactacaccaaatgtcatgtgagaaatgagcagatttgtaacaaacttac

SEQ ID NO: 137100 - DNA, 90 bp, Homo sapiens
ttctgagtttacctgttgggctcctggctgcgcaggcctgtctcctccctcctacacatttccagctcctgctgcagttattcctacaga

SEQ ID NO: 137101 - DNA, 101 bp, Homo sapiens
gcggctgccggggacccagcagcgggcgcgcgggctcctctgctgaacagcccctgggcgggagactcaggaagctgagcctggggcagtacgacaacgat

SEQ ID NO: 137102 - DNA, 100 bp, Homo sapiens
cacatccccaccccacaggatctgccccagagaaagtcctcgctcgtcaccagcaagcttgcgggacccaacatgagtgaagtttcctgcaagaaacggg

SEQ ID NO: 137103 - DNA, 98 bp, Homo sapiens
gaggcagctgtactaggactgggaacgggtatcatgatattagctggtttgacatcaagtcatttgtgagtcatcagatcttctcctgaaaatgggag

SEQ ID NO: 137104 - DNA, 75 bp, Homo sapiens
tggagccgtctgcaaagtgtccccggcaagaagatggcccactgcgtgaccttggttcagctgtccatttcctgt

SEQ ID NO: 137105 - DNA, 100 bp, Homo sapiens
acgcgactgatcgcagtggggcgaagcggggccggagccgcccgcggtcaggttcatacgttttatgaagctgtggggtacatgattggtgcacaaacag

SEQ ID NO: 137106 - DNA, 98 bp, Homo sapiens
agctcgggaaccgggactgcgagcgggaagaaaaaatgctgggcatcttggtgcagcacaaagtccggagtggcgtctcgggcatcgtgggcatggag

SEQ ID NO: 137107 - DNA, 80 bp, Homo sapiens
aacacggtgctactcaaggcccgggaaggggacaggggaggcctcctcaggatccacagatgcccagtctcccaagaggg

SEQ ID NO: 137108 - DNA, 83 bp, Homo sapiens
aggaaaaatcgagcagaaagaatgtctttcaggtgatgatgaacagtctacacagatggctgcaagttgggaagatgataaag

SEQ ID NO: 137109 - DNA, 100 bp, Homo sapiens
gtttaaagatatcagcctgtctgactacaaaggtgatatttgtgatcccaatccatgtgaaaatggaggtatctgtttgccaggattggctgatggttcc

SEQ ID NO: 137110 - DNA, 75 bp, Homo sapiens
tttgatgaaatggacagtacactagctgttcaacagtgaagggaatttggctacaaagcagatcgtattccttca

SEQ ID NO: 137111 - DNA, 100 bp, Homo sapiens
cctggtcaatgcagacggacagtacctcttctgcaggtactggaaacccacaggcacacccaagtactccaaagattcaggtttactcacgtcatccagc

SEQ ID NO: 137112 - DNA, 77 bp, Homo sapiens
ttatttgagatgagttacatcttggaggtcccactctatgaccagtgggaggatgtgatgaaagggatgaaggtgga

SEQ ID NO: 137113 - DNA, 101 bp, Homo sapiens
aaactgaagattgtcatgattgtttatcctaatcccaatgctgaagtaagattgtcttggaaatactaagttggatgccgaatataccaactctcctttgg

SEQ ID NO: 137114 - DNA, 100 bp, Homo sapiens
gaaagtgaaattttcctttggccaacgtgacaggttacctacctgggcaaagtctccaccactggcatgcagtttttgtcaggctgcacagaaaagccag

SEQ ID NO: 137115 - DNA, 90 bp, Homo sapiens
ggaccagttgaagaaggaagattcacactgtaacattattcacactgaggtgtgatccctcacatccacaaatctctgattggaaagaag

SEQ ID NO: 137116 - DNA, 75 bp, Homo sapiens
gtaaaactcaagatgtttaccatgacaagtcccctcctggtatcttgggcacctgtgctggttgcacttgctttg

SEQ ID NO: 137117 - DNA, 98 bp, Homo sapiens
cagtgaagcgaagaaaaggatcccagaaagtttcagaaagatcaactgaaatcggcaaacttctgagttcctacttgcaaaagaaaagtgacgtggag

SEQ ID NO: 137118 - DNA, 100 bp, Homo sapiens
caagagcggcgaggaggcgctcatcatcccccccgacgccgtcgcggtggactgcaagtgggatggagtaggacctcttccagactgtgctgaaccacca

SEQ ID NO: 137119 - DNA, 101 bp, Homo sapiens
cacatcctgaccaccttgcaagagccacatgacaaggtcaagaagatcatgaaccaggtgttccagtccttacggagagagtttgagctggaggaatctta

SEQ ID NO: 137120 - DNA, 78 bp, Homo sapiens
gttaaggattccaagtaactcttatttggtgccgtgagcgatgtggagatgcaggaacactatgatgagttttttgag

SEQ ID NO: 137121 - DNA, 95 bp, Homo sapiens
ctgtggtattgtggaaattcccagaggactttggagaccagtaactctcaggagccttctccgcagttggcttcctcggtagcttccacacggag

SEQ ID NO: 137122 - DNA, 101 bp, Homo sapiens
aaaaacagataccgagatattcttccatatacacctatgaagattataagaacactgcagaatggcttctgtctcacactaagcaccgacctcaagttgca

SEQ ID NO: 137123 - DNA, 76 bp, Homo sapiens
tcaagtaccgcatgatcctgtcaaaaatgtgctggaaatcatattattcaaacacagttgatgaatgacttactgg

SEQ ID NO: 137124 - DNA, 73 bp, Homo sapiens
tgacatggaggatgatttcatgtgcgatgatgaggaggactacgacctggttttcctcctccaccaggcgctc

SEQ ID NO: 137125 - DNA, 100 bp, Homo sapiens
gctgcagccgccgagccggacgtgtccgcgaagatggcgggccggtgagatggaagattttcgaggtatagcagaagaatcatttccaagctttctcacc

SEQ ID NO: 137126 - DNA, 74 bp, Homo sapiens
atgttctacaactcataccctcaacaggatggaaaaagtgatggtttgtactacagaaagtgccagttaatttc

SEQ ID NO: 137127 - DNA, 80 bp, Homo sapiens
gacctcctggtgcgcatcctgctgctggctgcccttgtctcctttggtctgttcctggtttcccagatgcataaaggaag

SEQ ID NO: 137128 - DNA, 98 bp, Homo sapiens
gtttgctgactacctcgcccacgagagtcggagactggacgccgggcatggcagtgccacgggacattgcagccgcctacctgctccagggaagcttc

SEQ ID NO: 137129 - DNA, 97 bp, Homo sapiens
tctcttccagatcagaactgaggaacaaaaacccccatcctgggaaaaatggggaagctggggtgcacagagcgttttgtatgtagtccagatgaag

SEQ ID NO: 137130 - DNA, 75 bp, Homo sapiens
gggccccagccccacagaccagcccagcattcagttcattcggctcctaaagaagtagcagtgtccaaggaacaa

SEQ ID NO: 137131 - DNA, 50 bp, Homo sapiens
ggcagacagcgagtggcgacgattgttatagttttgccgctggactcttc

SEQ ID NO: 137132 - DNA, 101 bp, Homo sapiens
gcctgatgctgtgggacctattgttcagttacaagagaaactttatgtgcctgtaaaagaatacccagatatagcatagaagccaatgtggaaaatgcaga

SEQ ID NO: 137133 - DNA, 90 bp, Homo sapiens
tcgtttgagagaaggacaaacttttggcaggatggaaatctagatgagcctgtccggagcaggccgccagatcccacccttggaccccca

SEQ ID NO: 137134 - DNA, 101 bp, Homo sapiens
gaaaatattccatgacttggatatgctgacgactgtgcaggaagaaaacgagccagtgatttacaatagagcaaggttgaatctccagtgatctgtaaaat

SEQ ID NO: 137135 - DNA, 83 bp, Homo sapiens
aacagctccagcctgcagtgccagaattcctcgtgatcccggccgctgatctgtcgcagcagatctccactgcaggcaccgag

SEQ ID NO: 137136 - DNA, 95 bp, Homo sapiens
tcagtggcagacagatgaagaaggcgttcgcaccggaaaatgtagcttcccggttaagcagccaacagggaagagtgtcgcacccaggagaaagt

SEQ ID NO: 137137 - DNA, 100 bp, Homo sapiens
cctcatgctggtcatggagatggctgggggcgggccgctgcacaagttcctggtcggcaagaggtccactcatgcctgctgagcgtgcgggccggcaaag

SEQ ID NO: 137138 - DNA, 100 bp, Homo sapiens
tcgaacttgtggctattcatttattctcaccaggagccttgcaaaggaccatcgcatgaaacttatgcaacaacaacaggaagtggctggactctctaaa

SEQ ID NO: 137139 - DNA, 87 bp, Homo sapiens
aagacatttcctgctcggaaccttgtttactaattgccaaatttgagtttcatcatggtgactatgaaaaacagtttctgcatgtac

SEQ ID NO: 137140 - DNA, 89 bp, Homo sapiens
caagaccatcatcgacaaatccagcgagatggggattgagaatgtcatcttggggatgccacacaggccagtccctgagacgaatagga

SEQ ID NO: 137141 - DNA, 100 bp, Homo sapiens
caaggatggtgggctgcccatcaatgcttactttgtgaagtatcgaaagggtctttacggaataaaggatgatgtcttccttagtgttccttgcattttg

SEQ ID NO: 137142 - DNA, 100 bp, Homo sapiens
ctggacagagatgtgatcctggagaaccacagggacctagtctcttgggatgacttcctgaagccacagatcatcacccagccagaaaccaccatggcta

SEQ ID NO: 137143 - DNA, 100 bp, Homo sapiens
ctacctgagagagctaaatgtcattactgaaactcagtgcactctaggatggtgccatgacaatggtgtgaactacaagattggagagaagtgggaccgt

SEQ ID NO: 137144 - DNA, 100 bp, Homo sapiens
tttccaagctacccaaaatactcgatgaagataaagaaagcacatttggttatgtgcatggggtctcaggacctgaaattaatgcagagaactcctagtt

SEQ ID NO: 137145 - DNA, 73 bp, Homo sapiens
ctgctgaaggatgaacggagaggaagaattctttgatgccgtcacaggctctgaccaagaatgacaggagcac

SEQ ID NO: 137146 - DNA, 82 bp, Homo sapiens
atggagatgggcagacggattcatttagagctgcggaacaggacgccctctgatgtccggcctctttggcctacccccgttg

SEQ ID NO: 137147 - DNA, 101 bp, Homo sapiens
gatcaaatggcacttcattggccacctacagaaacaaaatgtcaacaaattgatggctgtcacgggaagtctttttaggataaacgtaggcctgcgtggcc

SEQ ID NO: 137148 - DNA, 51 bp, Homo sapiens
cgacaaatttagagaaacctcggcagcttcagccccaggaaatcagccccc

SEQ ID NO: 137149 - DNA, 100 bp, Homo sapiens
ggggaaaagggaagtgaaaagagatctgttttcaggaaggatttgatgccctggatccctttattcccatcctggtttccaactataacccaaaggaatt

SEQ ID NO: 137150 - DNA, 76 bp, Homo sapiens
gaagcagcagtccaggaatgcagtcagtctgttgatgaaactatgagaatgaagtttctagattagaagacataat

SEQ ID NO: 137151 - DNA, 75 bp, Homo sapiens
gagcttcaaaaggggggacatcctcaagagaaccatggagtctggcagtaccgccgccagtgaggaggcacgcag

SEQ ID NO: 137152 - DNA, 97 bp, Homo sapiens
agaaatacctgcagactcgggccgtggccgcctacagctctactgagatgaagaaagaaaaagaatacctgctcagctccagagacacgtaaaggga

SEQ ID NO: 137153 - DNA, 100 bp, Homo sapiens
gaatccacgagcatgccagcattgacttaccaggcatcaaagccaacttctctttgcctgaaaaatgcgactatatggatgaggtgacatatggggagct

SEQ ID NO: 137154 - DNA, 100 bp, Homo sapiens
acatacaggagacaccaaagaagagaaagacaaggatgaccaggaatgggaaagccccaggtttctaagcatgaattgaggaacagaagaagcagagcag

SEQ ID NO: 137155 - DNA, 75 bp, Homo sapiens
atccgaggcaagcgttggttctgtgcgcctcagttgtggaagctgatcgaggaagcctaagcaggctctgtgaag

SEQ ID NO: 137156 - DNA, 75 bp, Homo sapiens
cgacatttcacccccccagcaccccagtcggcacagactattgcagatatcatccgaacatgtttgggacccaag

SEQ ID NO: 137157 - DNA, 83 bp, Homo sapiens
tggagcctcagttggaagcagccgatccagcctgcggagcctgtggggcagggaagcagagactttcaaggaacaaggaaatg

SEQ ID NO: 137158 - DNA, 75 bp, Homo sapiens
catactgcgttatagcggccgtgaggatgatgtgcattgtgaaaccagatggacctccccagctctgcaaaacag

SEQ ID NO: 137159 - DNA, 99 bp, Homo sapiens
tcagaagcaggcggaggagacggcggccttcgaggaggtcatgaaggacctgagcctgacgcgggccgcgcggagtgcgcgcgcaggatgaagaagtgc

SEQ ID NO: 137160 - DNA, 100 bp, Homo sapiens
acgtcattttcacccgcatggaaaaccaagtggtccagatggctgtggaggccaagtttgtccaggacaccctgaaaggagacggtgtgacagaaatccg

SEQ ID NO: 137161 - DNA, 90 bp, Homo sapiens
tgcagcgagtaaaggagaaagaagccatattgaaagaagctgagagagaggttgactatagtcaatggggccaatggagccaagtgtatg

SEQ ID NO: 137162 - DNA, 132 bp, Homo sapiens
ggcgccgctgcgcgcatgggcctgttcctggcccgcagccgccacctacccagtgaccatgataggtgctggagaatctggtaaaagcaccattgtgaagcagatgaggatcctgcatgttaatgggtttaa

SEQ ID NO: 137163 - DNA, 96 bp, Homo sapiens
cctctgcttccaggacaagtcctgcgcttggggatcctctgtacgcccgttcactgagtcaagtaaagaacagtttgccagtacaaacattgctga

SEQ ID NO: 137164 - DNA, 100 bp, Homo sapiens
cttcgtggcgtccgcgtacgcgagcggccgcaaaggcgcggaggaagcggagcggcgcgcgcgggacaagcagagctcaggccccggggcctccagcggc

SEQ ID NO: 137165 - DNA, 100 bp, Homo sapiens
ttggactacagaagagcagcttctcgccgtacaagatggggtcttcttatgttgcccaggctggtctcaaattcctaggctcaagtgattccgcccacct

SEQ ID NO: 137166 - DNA, 100 bp, Homo sapiens
tcgagaatcaaagggccgggagcgatggcttaatattctcgtccttggaggaagctctggatttattgagctttatgcttatggaatgtttaaaattgct

SEQ ID NO: 137167 - DNA, 82 bp, Homo sapiens
gctactctctctttctggcctggaggctatccagcgtactaccgtggtgcagtgggcgccctgctggtgtacgacatcgcca

SEQ ID NO: 137168 - DNA, 83 bp, Homo sapiens
tgtggcctgccagagctgcattcttatctggaccctggaccctacctccttgtctacccgagacggggtttcaccatgctggc

SEQ ID NO: 137169 - DNA, 100 bp, Homo sapiens
attttctctaacaattacaaaggtggaactccagggaagatatcaatgatgtcaaacggctgaaacctggctacttagaagctactgtggactggtttag

SEQ ID NO: 137170 - DNA, 99 bp, Homo sapiens
cctcagctccagctgcactgctcagacgagatggcccactgcgtgaccttggttcagctgtccatttcctgtgaccatctcattgacaaggacatcggc

SEQ ID NO: 137171 - DNA, 100 bp, Homo sapiens
gtcactcataagcgcgctcaagaatctacaactcttgaaaaagaagttcctgtcatcttcatccaccctttaaacactggattattccggataaaaattc

SEQ ID NO: 137172 - DNA, 96 bp, Homo sapiens
taccaggagaggagggaactgcggagcgggtaggtgatgctctgatgctgctgcctcttatgaattgacgacaggtgcagagagagaataaactgt

SEQ ID NO: 137173 - DNA, 100 bp, Homo sapiens
ttctccagcagatggcaagccaaggcttagcctccatgaagaagaggggtccagtgggtctgagcaaaaggtcactacaggaaaagatatcttcattaaa

SEQ ID NO: 137174 - DNA, 89 bp, Homo sapiens
ctgaggctcattttgcagttgttgaaattgtccccgcagttttcaatcatgggccaaatccttgtagctgtcttcttgccccggtcagt

SEQ ID NO: 137175 - DNA, 83 bp, Homo sapiens
ctcggggcgggcgccgcgggacctctccgggccatgggtttgcctgcaatgagatttcattctctacatttaaaggacatcct

SEQ ID NO: 137176 - DNA, 90 bp, Homo sapiens
ctgccgcacctccgtagctgactcgcgctgataaagcagtttgtgtccgacgtggcctggggggagctggactacctggtggtggacacg

SEQ ID NO: 137177 - DNA, 100 bp, Homo sapiens
aaagaaagctgcggcctgtatcaccagaggagattagacgtagcagattaggactctcgttggggagatagagattcagaaggcacctggagaaaaggac

SEQ ID NO: 137178 - DNA, 82 bp, Homo sapiens
gctctttgccagagaaattcacataatttgaaccagcagcaacgtgagccacataaagaagatccctaatagtcatttctca

SEQ ID NO: 137179 - DNA, 83 bp, Homo sapiens
cgctgtgctcgctggcaccccgaacgggttgcttcccccgctgcgagaagtttgcctgcaatggtactgtaattgagcatccg

SEQ ID NO: 137180 - DNA, 100 bp, Homo sapiens
caaccctcgcattgaccttcctcttccaagctagagaggtcagaggaggatgttgagaaagagaaggaaacccacagttacctcagcaaagaggagatca

SEQ ID NO: 137181 - DNA, 100 bp, Homo sapiens
aaatacttgaaggagtttattatctacatcagaataacattgtacaccttgatttaaagaaaatcccgttttgtcaacctaatgaagcattcaaagaaga

SEQ ID NO: 137182 - DNA, 100 bp, Homo sapiens
aagaaggattcccgcctcagaataactccgaccagattattagaggcctcagagaatgtcaaagagttcaacctggtcattgctatcatctgtataatgg

SEQ ID NO: 137183 - DNA, 130 bp, Homo sapiens
gtgctgggcgctgtcatgatcgtgatggtgccgtcgctcatcaagcagcaggtccttaaggaccgtagcctgacgggcaagctggaaccggtgtctccccccagccccccgcacactgaccctgagctgg

SEQ ID NO: 137184 - DNA, 50 bp, Homo sapiens
gaactggatgtcagcaagaatggtactccaaagattcaggtttactcacg

SEQ ID NO: 137185 - DNA, 100 bp, Homo sapiens
cggcgtcctctcccggccctctcgcgctgcactgtctctccgacgcaagactgtcccggcccggggaaagcaggcaggatgggagagtcgccgatagaac

SEQ ID NO: 137186 - DNA, 100 bp, Homo sapiens
aagcgcccgccaccacgcccggctaatttgcaatacggaaattttaatagaggtatcaaggaatgactcctgctcggatttacccgagatccagaatggc

SEQ ID NO: 137187 - DNA, 95 bp, Homo sapiens
aaatccgcaaccatgagcaggagaggcggccctggtggggaagaggccaccaacatctggacggcaggatgtgggctctcttgatgagaagatga

SEQ ID NO: 137188 - DNA, 82 bp, Homo sapiens
ctcagcgcagccctgcaggccaagcgcagcctccaccagagtccctgcaggaagcatcacccaggctggcagatcatggtag

SEQ ID NO: 137189 - DNA, 98 bp, Homo sapiens
cgagttgccgccggagaggagtggcctcgcccgcttggtccagatgtgaaaaagctttgcatcctttgccagattttgaaggatacatccatagccat

SEQ ID NO: 137190 - DNA, 82 bp, Homo sapiens
ggtccctggagctgcagacgcgacctacattgccccaccagctgccattttttacccatcgggtgctcatgacacgtcgaat

SEQ ID NO: 137191 - DNA, 99 bp, Homo sapiens
cggaccttacggggacatgcgtctgggttctgcccgcacacattcctcgccaccttcttggtgtctgagaacctccagcttcacctccttttctggacc

SEQ ID NO: 137192 - DNA, 85 bp, Homo sapiens
aagaagaggagggaatggctctttctcagctcatgcaccctgtgctggagtccctgaggaatactgaccggcagtggctgattga

SEQ ID NO: 137193 - DNA, 74 bp, Homo sapiens
attctttcactggcccaaggagacgaaatcagggctcttggtggtatcgctcaatacgctatagtggagaccag

SEQ ID NO: 137194 - DNA, 100 bp, Homo sapiens
ggctgcagccttggatatagccatgattaaaatggtcgccccgtccatggcctcccgagtgattgatcgtgcgattcagtggatcaatcttcctgtccta

SEQ ID NO: 137195 - DNA, 83 bp, Homo sapiens
ctactgtggggccgcggccggaccgagcgcctcgacctcggtctgagcaattctgtggtgttcttggtcacacatttatggag

SEQ ID NO: 137196 - DNA, 101 bp, Homo sapiens
gctagcgcggcctgggatgcgcttgggctccctggctggctacagcaaacatcattcaagatgtccagcaaagggagcagcacagatggcagaacagactt

SEQ ID NO: 137197 - DNA, 82 bp, Homo sapiens
ggcaggagagtccggccgcgacaggacgatgcggcattccaaaagaactcactgtcctgattgggatagcagagaaagctgg

SEQ ID NO: 137198 - DNA, 74 bp, Homo sapiens
caatttcaaaagcatcacaaaaaatttctagaaactaatctggattcactccctctggttgatacccactcaaa

SEQ ID NO: 137199 - DNA, 83 bp, Homo sapiens
atttgcgtgggcattcctcctggtgagcccaagaagatgaaaggattgttcttgttgacaacaaatgtaagtgtgcccggatt

SEQ ID NO: 137200 - DNA, 80 bp, Homo sapiens
ataaacaggcctgccgatgttatccaggtcatcatcagatttgaaatatttaaagtggatacaaaactatttcagcaatg

SEQ ID NO: 137201 - DNA, 75 bp, Homo sapiens
gaagcctgaaaagtcgcagcgagctggagccgccggagagcaatatactttgctgcttattcaaactgcaaggaa

SEQ ID NO: 137202 - DNA, 73 bp, Homo sapiens
ggtcaaaggctatgacaacctctttgctatgctgctggagccagttctgcttctcggcaaggagcgatttgct

SEQ ID NO: 137203 - DNA, 101 bp, Homo sapiens
tacatcactgtcgtctcatgggagaaagacactgtttcacttgtctcagggctctggaggccacgggcatgatgcttcgggtcctggtgggggctgtcctc

SEQ ID NO: 137204 - DNA, 96 bp, Homo sapiens
gctgatgaagagagagcagagacagctcgtctgatatgtgttgagacggattctccgccgagctgtccgatacgcccatgaaaagctcaatgccag

SEQ ID NO: 137205 - DNA, 100 bp, Homo sapiens
gtgcggctgcgtggggctcggccgcgcggactgaaggagactgaaggagtgtggccatctggggccgtgtggtatttgccactcaggagacatgtcccta

SEQ ID NO: 137206 - DNA, 100 bp, Homo sapiens
ctctctggaccgatcccactgcacaacacacccatgacgccatcacagaggccgcccagttgatgaaggaagccgtggatgacatcatggtgacgctgaa

SEQ ID NO: 137207 - DNA, 100 bp, Homo sapiens
ccattaccagatcctgctgaccagttttccgcacatggagaaccacagttgctttgagcacatgcaccacatacctgcgaattatatccagatcgagaga

SEQ ID NO: 137208 - DNA, 90 bp, Homo sapiens
gccgagaatttgagatgggaaggttgtatttgtcaagtgaccacaggaccctcctgaaatcgtctaagaggtcttggctccaggaagtgt

SEQ ID NO: 137209 - DNA, 74 bp, Homo sapiens
cccccaagtctcctgaagaggaaggagcggtgtcctcttaagaaaatggactcagaattcatgattgaagaaat

SEQ ID NO: 137210 - DNA, 90 bp, Homo sapiens
cgctgctggcgctctggctgtgctgcgcgacccccgcgcatggtgtactattgactggaagaaaggaaagaatgttactgtcaaaaccat

SEQ ID NO: 137211 - DNA, 90 bp, Homo sapiens
gggaattccacctgctcgattcagccgtgtatgagagccacgagccaaggtgggcacttgatgtcggatctcttcaacaagctggtcatg

SEQ ID NO: 137212 - DNA, 75 bp, Homo sapiens
atcgaggggtctggacgcacagaacacatcaaggctgacgcgccactatgtagcgggtttcgggcgggccacgcg

SEQ ID NO: 137213 - DNA, 100 bp, Homo sapiens
agcactaccaccctggcttgccgccgccggacgtcgcaggacccctcgtccagtcattgtggaacccatggagcagtttgatgatgaagatggcttgcca

SEQ ID NO: 137214 - DNA, 87 bp, Homo sapiens
caagttagatgccgattacccacttcgagtcctttattgtggagtggtgtccgcaaagcccaaggtgcataatcgtcaacctcgaat

SEQ ID NO: 137215 - DNA, 97 bp, Homo sapiens
ctatagaagatcgtatagtcctagaaacctctcgagctcctgtgtgagaaatccattggcacggccaacagaccgatgggtgctggcgaggccctgc

SEQ ID NO: 137216 - DNA, 100 bp, Homo sapiens
ttccgatgtcattaaggaagaatttccaaatgaaaatcaagtagtgtttgccagagttgattgtgatcagcactctcaaagatcctctcaagacagtatc

SEQ ID NO: 137217 - DNA, 100 bp, Homo sapiens
ttcggcttctgagacggcggcagcagcggcattcagaattaaacaaccaccatgtcgagcaaaaaggcaaagaccaagaccaccaagaagcgccctcagc

SEQ ID NO: 137218 - DNA, 153 bp, Homo sapiens
ctcatacatggccattgtcaacaagaccgtgagggacctcatgcccaagaccatcatgcacctcatgattaacaatttgagagaatatcagcagaggaatagccctggtgttcctacaggagcgaaaaagaagaagaaaataaaaaatggcag

SEQ ID NO: 137219 - DNA, 90 bp, Homo sapiens
cactttgcattgactggaaacaatggcatttacagaaagagtcaacagcagtggcaacaggaaattcagttcatgaagataagaagtttc

SEQ ID NO: 137220 - DNA, 82 bp, Homo sapiens
gactgcacttcttttttgagaaaggaaggaatatatcctgactgattcccttgccctgttggatgaataggcacctctggaa

SEQ ID NO: 137221 - DNA, 75 bp, Homo sapiens
atagcgtggcaacccagctgttcattggaggtgtcactggatggacatctggaggacctgttgatgctagttcag

SEQ ID NO: 137222 - DNA, 100 bp, Homo sapiens
acgggctataaaccagctcctggagatctggcatatcccgataagttagtcatgatggaggtgaaaggggggaccctaccctcagaacatgagggaataa

SEQ ID NO: 137223 - DNA, 100 bp, Homo sapiens
tcgggactgcgatgcacccgggatggggccctggatagcctccaccacctgcccggcgcagagaacctgactgagcttgtgccccagcctggatattcgc

SEQ ID NO: 137224 - DNA, 90 bp, Homo sapiens
cacagatctgttgatcaaaccagtgcagagaatcatgaagtatcagctgttactgaaggatgaaaatggattgcctcaggatcaacagga

SEQ ID NO: 137225 - DNA, 97 bp, Homo sapiens
ctttccgcgcgggactccggggcgccacgggggccatgtaagcagaaagcaagccagactcttccacaagccaccatgaatcaccgcgacattgccc

SEQ ID NO: 137226 - DNA, 75 bp, Homo sapiens
ctgcagcgtcccgcacacctggcagcaaaagaggttgagaacttgttgcttagtaaccaagggaccattaagctg

SEQ ID NO: 137227 - DNA, 100 bp, Homo sapiens
caacacttctccgagccagcgagccagcgagccgccgacccgccgagcaaaatgacaatgcagatcttcgtgaagactctgactggtaagaccatcaccc

SEQ ID NO: 137228 - DNA, 51 bp, Homo sapiens
ccgccccagacctgtcggcgaaaggtataaaagaacgtgtggatcactttg

SEQ ID NO: 137229 - DNA, 46 bp, Homo sapiens
accaaattgtcgccattaagaaatgacaaatggcctacagctgtga

SEQ ID NO: 137230 - DNA, 97 bp, Homo sapiens
caagctgaaaaagatactcgacaagactcggatcagtatcttgccacagaaaccatacaagcagctgcaatatttaattcagcctttggaagttttt

SEQ ID NO: 137231 - DNA, 100 bp, Homo sapiens
tgacattgcccggcagacggctcagggaatggacttttgcgagaattgaagcaccctaatgtgattgcattgcagaaggtgttcctttctcacagtgaca

SEQ ID NO: 137232 - DNA, 100 bp, Homo sapiens
ttgaaggtagatgattgtgactgtcatcctgaattttcaccaccatcaagaggttgtgcccagacatttccttcttccagagggccactgactacccttg

SEQ ID NO: 137233 - DNA, 51 bp, Homo sapiens
gccgccaccacccactccggacacaggactgatcctttgaaatactccagc

SEQ ID NO: 137234 - DNA, 50 bp, Homo sapiens
aatagctctgaccacccggcgaaggctttcattaaagatagaaccaggga

SEQ ID NO: 137235 - DNA, 100 bp, Homo sapiens
ttcctgaacctgttgccagatggtgcaatgttcaaagtactcaagatgaatttgagatacatcgagatatttccaagcagaaggaatgaagttcgaacac

SEQ ID NO: 137236 - DNA, 97 bp, Homo sapiens
acagtatttacttacaagattcggaggtaacagtgaagggattcaggatatacggtgcaccttggcctggcagctgcgattcagccacctcgtgggg

SEQ ID NO: 137237 - DNA, 76 bp, Homo sapiens
tttaggctggaagcgccttagaggagccatttttccaggaaagtctttgggttcggaggattccagaaacatgaag

SEQ ID NO: 137238 - DNA, 100 bp, Homo sapiens
tgtcgccgcggtcctgctgttgagtgcctggtgaagaatgtgatgggatcactagcatgtctgcggagagcggccctgggacgagattgagaaatctgcc

SEQ ID NO: 137239 - DNA, 75 bp, Homo sapiens
ttcctgtacagcctgcagaactcactatcctgaggagcgacatgtggttgaacgccatggacgggacacaagcgg

SEQ ID NO: 137240 - DNA, 89 bp, Homo sapiens
gacacttgtgaacattcaagtgaagcaaaagcctttcatgattatccacacccactcgcccgggtctatggccacggtcggagagtggt

SEQ ID NO: 137241 - DNA, 100 bp, Homo sapiens
cctgacattggcgtccccatcatggtctgcccggggagagaggtaccccaggattgcccgggcccaagggcgatgatgggaagctgggggccacaggacc

SEQ ID NO: 137242 - DNA, 98 bp, Homo sapiens
gaaacatgcagattatatcgcatcctatggctcaaagaaagatgattatgtcatcatcagatttgaaatatttaaagtggatacaaaactatttcagc

SEQ ID NO: 137243 - DNA, 50 bp, Homo sapiens
gcgccttcggcaaggtttacaagggtggcccggtggaaatcctgcccttt

SEQ ID NO: 137244 - DNA, 100 bp, Homo sapiens
taccgctgcggcacttgtgagaagaccttccgcatcgagagcgcgctggagttccacaactgcaggacagtttctctcctgtcacaatggcatgatctcg

SEQ ID NO: 137245 - DNA, 100 bp, Homo sapiens
atgcaacagccacggaagattaagcagaggggtctggttgctgcttacagtggtgacagtgacaatgaggaggagctggtggagagacttgagagtgagg

SEQ ID NO: 137246 - DNA, 75 bp, Homo sapiens
gtcatggagatggctgggggcgggccgctgcacaagttcctggtcggcaagagatgctatctgtgagcagcagtt

SEQ ID NO: 137247 - DNA, 82 bp, Homo sapiens
cagcggaggagcccgaccgacccggactgcaatgtgccgatcttagctgctgcctgagaggatgtctggggtgtccgagccc

SEQ ID NO: 137248 - DNA, 123 bp, Homo sapiens
agcgccgttgctgcgggggattgtgggagtctccgcgtcccgctcgctgggagagagttgatattcactgatggactccaaagaatcattaactcctggtagagaagaaaaccccagcagtgt

SEQ ID NO: 137249 - DNA, 100 bp, Homo sapiens
ccctccaataccccacagctattctagtgataggattcacagcttgagctcaaataagacagaaagaatttactttcaggttttcttacctaaagggagc

SEQ ID NO: 137250 - DNA, 95 bp, Homo sapiens
ccgtccagcagatggcggatgccctgcagtacctgcagaaggtctctggagacatcttcagcagcgtgtcaggaggggagctgtttgagcgcatc

SEQ ID NO: 137251 - DNA, 97 bp, Homo sapiens
atgcagaatttgatgctgtggttggatatttagaggacattatcatggtacgtagagaaatcgacactcttaatgaacgtttagctgctgaaggaca

SEQ ID NO: 137252 - DNA, 90 bp, Homo sapiens
tttgctgcaggctcttttcctcattcaggatgcgaaggtcatgtcctggtgggattatggctatcagattacagctatggcaaaccgaac

SEQ ID NO: 137253 - DNA, 96 bp, Homo sapiens
gggaaggtgaagaaggcgcgggagagctcggggcgcctgactcctgggagagttggctctcaaggttctgatttagattcatcagcaactcctata

SEQ ID NO: 137254 - DNA, 50 bp, Homo sapiens
acttggaaagtccaagaggcccaagtgcccagcagaggagcacgcagctg

SEQ ID NO: 137255 - DNA, 78 bp, Homo sapiens
ggcatttcagtcactggtttgcagagtccaggctggctacagcaaacatcattcaagatgtccagcaaagggagcagc

SEQ ID NO: 137256 - DNA, 100 bp, Homo sapiens
aggaggaacagatttggggtgaaaaggctttcttcgagagtcacccagctccttcagctgagcgtaccatccagcagtgttgtgaaaatattctgctgaa

SEQ ID NO: 137257 - DNA, 95 bp, Homo sapiens
caatctgatccagcctggggacattatccggctcaccaaaggtttaaaattggtggtgaatggtggacatggatcgattataaccgcttccagga

SEQ ID NO: 137258 - DNA, 112 bp, Homo sapiens
gaagaccgcgcgcagggcctgcagcgggagctggacggcgagcgcgagcggcgcgagaaaaacccagcgggtgccgcttctccacccgaggcttccacctccaacgagccat

SEQ ID NO: 137259 - DNA, 82 bp, Homo sapiens
gctcgacggagaccagctaggaaagaagatgctgatatgctacaacacggatgaacctggaggacgtggtgcagtgaaataa

SEQ ID NO: 137260 - DNA, 100 bp, Homo sapiens
accagaagaaactgcaccggaaatgtgcctaccagaatgaaactagtgatcgagaagatggcctccccaaaggacatcatgtgacagactctgagaacga

SEQ ID NO: 137261 - DNA, 82 bp, Homo sapiens
gcctatggaaaacggggatttccaccatctgtcccagtcctcatcaccgggggcatcgtggccacagctgggcgcttcaccc

SEQ ID NO: 137262 - DNA, 101 bp, Homo sapiens
aagcggcttatcgaacagagccgggagttcaagaagaacactccagagagtaaagccaatcccagctgaaggaatcaagtcaaatccttccaagcggcata

SEQ ID NO: 137263 - DNA, 100 bp, Homo sapiens
atccacaaactggtgcagaagagagacttcctggtggacgatgcggaggtcgagcggttaaggcatctggtgtcgaaggctcagatattcctgatgatgg

SEQ ID NO: 137264 - DNA, 100 bp, Homo sapiens
aaatgcagttgcggagaccttctgaccaggaagttagtgaatctatggattttagatatctgccagatgaaaaagcggttgctgatgctattagaacaag

SEQ ID NO: 137265 - DNA, 75 bp, Homo sapiens
tctgactccacctttacttttacctacgttggcggccccagaaggtgtctgtgggaggttatgtttatttgagac

SEQ ID NO: 137266 - DNA, 75 bp, Homo sapiens
tggaacagggactcactggggagattcatgttctggagaaatgaaaatgctgtctcagtggaatgttgattagct

SEQ ID NO: 137267 - DNA, 90 bp, Homo sapiens
agtttaatagagtatgaattcagggtggcgagaggggcctgtctgggccctcggggccggggcacatggcaagccgcggtggagtggcgg

SEQ ID NO: 137268 - DNA, 100 bp, Homo sapiens
ctccagccccatgggccggacatctactgggtcagcttcatcctcggcggcggtggccgctagctccaaggaaggtgactctgacatcattagaagcatg

SEQ ID NO: 137269 - DNA, 82 bp, Homo sapiens
aaagagccgagcacgcgggtctgtcatcatgtcgcgttacgggcggtacggaggaggattatatgcgtcaggcaggagaagt

SEQ ID NO: 137270 - DNA, 96 bp, Homo sapiens
catgagtattcatacgaagaccaccagcggctatgcagcacgagtacacgagacaggattgagaaaggagagattcaaattgtgacttcagattca

SEQ ID NO: 137271 - DNA, 98 bp, Homo sapiens
ggagcggctgcagctacagtccgggaacttctgcaggacgatcatctcctgtacacatcatagccactagcaaaagtttacattcctatgcacgccct

SEQ ID NO: 137272 - DNA, 100 bp, Homo sapiens
tgagggcctgggctcagtgctataacaccacctggagtgagtggagccccagcaccaagtggcacaactttcgttcccacatgcagggcagcacaaggag

SEQ ID NO: 137273 - DNA, 100 bp, Homo sapiens
cacggtgccccacaggccactgtgcaggatctccactcggccctgacacagtccccacagagaccacctatcacacgctggaggagggcgtggtggagta

SEQ ID NO: 137274 - DNA, 108 bp, Homo sapiens
atttgtaaagctccttgtcgtacagttttgctttcaaagcatgtgatggaaaaccccagcccggccgccgccctgggcaaggccctctgcgctctcctcctggccact

SEQ ID NO: 137275 - DNA, 75 bp, Homo sapiens
atgtcctcagtcttctgctgcatgacagctatgactacgacctgcaggaacagcagttcctacagaggttgacag

SEQ ID NO: 137276 - DNA, 73 bp, Homo sapiens
atatatttaacccccctccaaaaactggagaatgctggaggagaccttaaggatggccaccaccactatgaag

SEQ ID NO: 137277 - DNA, 100 bp, Homo sapiens
tgacatggccaccaacacacgtgggatcatagacggtatttctatgtaaacgaacagtcgggcgagtctcagtgggagtttccagatggtgaagaggaag

SEQ ID NO: 137278 - DNA, 111 bp, Homo sapiens
gcgacccggtgtgtggcgcgcccagagccccgcgtttcagccctagggaagcaattctgtggtgttcttggtcacacatttatggagtttctgaagggcagtggagattac

SEQ ID NO: 137279 - DNA, 74 bp, Homo sapiens
ggctgccgccacggccgcccggaggatgaccagtgtcccagtgaaggaacgagtgaaggtgtctcagaactgga

SEQ ID NO: 137280 - DNA, 100 bp, Homo sapiens
gcaagtcagagtaccttgggtctgaaggggtcactcaagcgctctgctatctctgcagctaaaacgggtgtcagcaagtccacgaagtcagatgctccaa

SEQ ID NO: 137281 - DNA, 75 bp, Homo sapiens
ggattccaagtaactcttatttgattagatttcggtaaacgagttcagatgtttgtgacgtgacgaaattgctgt

SEQ ID NO: 137282 - DNA, 100 bp, Homo sapiens
attttggaaaatgtgataaaaacaaggtggaagattcttccaaggaaccagtgcgaagctgtggaggaagatgcagagtcagaagatgaagaggaggagg

SEQ ID NO: 137283 - DNA, 119 bp, Homo sapiens
ggtgatggccaaggtggatattgatgaccacacagacctcgccattgagtatgagcttcgtgctctgtctgatgatggagtatctgatcttgaagacccaaccttgactcccctgaaag

SEQ ID NO: 137284 - DNA, 74 bp, Homo sapiens
tgtccagttactctaacaagtctggagtattggtaaaggttttcaaggtgtcatgaaaagatggggatttaaag

SEQ ID NO: 137285 - DNA, 75 bp, Homo sapiens
ttttttttttcccctgaccacgttcgcgatgtactatactggcaattgctggagaagattttgcaattgttgctt

SEQ ID NO: 137286 - DNA, 104 bp, Homo sapiens
cttggcagctggacaggcagagtgctgatgtgaaaaataccacgacaaaaccaccctagtttttagaacttcagccataaaaatgggcagaattttccttgatc

SEQ ID NO: 137287 - DNA, 100 bp, Homo sapiens
gcattggcatttttgtcacctccaacaacatccgcgagatcgaggctggacgtaaagaaagaagtgatgcactcaattctgcaatagataaaatgaccaa

SEQ ID NO: 137288 - DNA, 73 bp, Homo sapiens
aagattgagctgcactgtattcctggcggcgactggcggcgcgatggacctgaccgggctcctgctggacgaa

SEQ ID NO: 137289 - DNA, 83 bp, Homo sapiens
gaggcagattggtatggccgaggctgagaactgataaatttcaaacggaagagagtggcagcatttagaaagaatctaattga

SEQ ID NO: 137290 - DNA, 98 bp, Homo sapiens
agcgtgaccgagagcgcgaatatcgtcatcgttagaaggcagaaacggaattacagagagctgcaatggatgctagccgaacaagtcgtcatctggag

SEQ ID NO: 137291 - DNA, 73 bp, Homo sapiens
gccgcctctgcaggctcctgcaaacttcttggacacttaatgattgttggcaagaaatgtgctgctgatctgg

SEQ ID NO: 137292 - DNA, 97 bp, Homo sapiens
agactacggtgtgctgttagaaggttctggtcttgcactaagaacctgcaaccatggtcgtgccactagccagctcggaagcccaggtactttttaa

SEQ ID NO: 137293 - DNA, 75 bp, Homo sapiens
tgtgccctagcaccccgagaaccgtcagtttgagccagatggcaggagtagggctgattggagccattgtacagt

SEQ ID NO: 137294 - DNA, 100 bp, Homo sapiens
ctcctgctgcgcggggacggctcggtcggggcgcgggagcccgaggccgcggccacaatggtgcgcatgaatgtcctggcagatgctctcaagagtatca

SEQ ID NO: 137295 - DNA, 100 bp, Homo sapiens
tccggagtccctggagaaggggacgcggagggcgactgccgagggtctcagcgggatctggagtcagggtaatctatgccagcaattatgacaatgttag

SEQ ID NO: 137296 - DNA, 100 bp, Homo sapiens
gccaaaatgggaaaggaaaagactcatatcaacattgtcgtcattggacacgtagattcgggatgctataaaatcaccacggtctttagccatgcacaaa

SEQ ID NO: 137297 - DNA, 90 bp, Homo sapiens
atgcaattaaaaacttcagagcaaaacatcactgtaattcttgctgtagaaagcttaaacttccagatactccgacttcgttgttcatga

SEQ ID NO: 137298 - DNA, 131 bp, Homo sapiens
tgccattgaaaaccctgctgatgtcagtgttatatcctccaggaatactggccagcaacacagtcactcctggcggcaaaccaaacaaaaccagagtcatctggggaaaagtaactcgggcccatggaaac

SEQ ID NO: 137299 - DNA, 89 bp, Homo sapiens
gtgctgctctgcatggatttcatgacgttatgaaagcccacaactggagttttatataaagaagataattatgtcatcatgacaactgc

SEQ ID NO: 137300 - DNA, 76 bp, Homo sapiens
catcagcagatatcctgtctcagatgaagagaaatgcactcggtgatggaaagagagccactattctgaagaacac

SEQ ID NO: 137301 - DNA, 83 bp, Homo sapiens
gaggctgaggatgatggtagattgccagattgaggacgagacgcaggtgtcacgggccactcagggtgaacaggacaattacg

SEQ ID NO: 137302 - DNA, 100 bp, Homo sapiens
tgaaccagaggttcacaaaacaagtgtagtaggcccgcagccgtgccgggtgctcttcagcatgtccttcatcccggtggccgaggattccgacttcccc

SEQ ID NO: 137303 - DNA, 98 bp, Homo sapiens
cgaagatgggggatttctacgacccggagcacccgacccctgagcagttgcagtggtgcagaatggctgacctcagtcttgcagatgcattaacagaa

SEQ ID NO: 137304 - DNA, 75 bp, Homo sapiens
agcccttcctgtttgacaccaagcctctcattgttcatgacaacactgcagctgaaggaggagttgctggatgga

SEQ ID NO: 137305 - DNA, 83 bp, Homo sapiens
cccctcccactgtggctcccgcatctgcctccctgccccagcccatcctctctaaccaaggttcgaccttgaaactacaagag

SEQ ID NO: 137306 - DNA, 82 bp, Homo sapiens
tgaattctgtaggtggtgcatccaaaacagtactgccaaatctgtcgaaagggagataatgaagaactgcttcttctttgtg

SEQ ID NO: 137307 - DNA, 140 bp, Homo sapiens
ggagaagaggattggaggtgtcagtgttaaaggaacctctacaacgaaggtgaagccacggaagataagggcagctgcaatgactctccgcacggtattattgtcattgcaagcactattggcagctgcagagccagatg

SEQ ID NO: 137308 - DNA, 97 bp, Homo sapiens
tttcggcgcgcggccgggctggcgatggaagatggaaggaaggagcgcagcggtgtcatggagaaactccagctgggcccagagattctgcagcggg

SEQ ID NO: 137309 - DNA, 88 bp, Homo sapiens
ccggttccccggcccacagtgggggtgtgcaaacccgagagaactgggattttcagtcaatgcatcatcggagcgactcaacatgggt

SEQ ID NO: 137310 - DNA, 50 bp, Homo sapiens
ggagaactacaggaacctggagtctgtggagttttgctcttgtcgcccag

SEQ ID NO: 137311 - DNA, 116 bp, Homo sapiens
gaagaaatgaaaaaacaggctgctgtccagtgtcttcgatctgcttctgatgaatgtaatggagagagggctaaagaagaagcaattacacattttgaaaagctctttgaagttct

SEQ ID NO: 137312 - DNA, 75 bp, Homo sapiens
gctcctaagcctgcacagccgcggcggcagcagcagtgagaggatgaccgagtgggagacagcagcaccagcggt

SEQ ID NO: 137313 - DNA, 88 bp, Homo sapiens
atcctggcctggagaagactgctgatcttagaaacagggcctactctaggtgcggtacttcactatagtttataaaagatggtccctg

SEQ ID NO: 137314 - DNA, 74 bp, Homo sapiens
cagtctttagaagaatgcaccaagaatttatgcaaatattctcatgaggttctctcagaagagaacttcaaagt

SEQ ID NO: 137315 - DNA, 83 bp, Homo sapiens
gtaccggctgggccggaagatcggcagcggctccttcggagacatctatctcgtgcctacaccaactaatgttacaattgaat

SEQ ID NO: 137316 - DNA, 100 bp, Homo sapiens
cagaaggccgagatgacctctatgtctcagatgcattccataaggcatttcttgaggtatggtgctgggtgcagatgcagtgtggctctggatagcacct

SEQ ID NO: 137317 - DNA, 100 bp, Homo sapiens
tgcactttgggttcaaggcgacagtcttgggcgtctttggtactggcttttttaggggtctgcctggggattacccttgctgtggatagaagcaacttta

SEQ ID NO: 137318 - DNA, 50 bp, Homo sapiens
tttgacgacactgatggtttgggactatgttcggagtgaactggagtttg

SEQ ID NO: 137319 - DNA, 96 bp, Homo sapiens
attaaagatgttgatcatttgggaaactggcagtttcaaggcatccgcttcgatcctgaaattccgcaaacactacgactagagtttgctaaggca

SEQ ID NO: 137320 - DNA, 98 bp, Homo sapiens
agatagacaggctgctgaagcaaacaaaaacgccagcattttgttagaggagttagacttggaaaaggtaggagcattgcttttcgtggtgaaagagg

SEQ ID NO: 137321 - DNA, 100 bp, Homo sapiens
cgggaccccggcgcccccaccccatccccgggagaagcagcgctatgcaaacaagcactgaagaggaatcggagtagaatgcgtcagttggacacaaatg

SEQ ID NO: 137322 - DNA, 100 bp, Homo sapiens
cctacaagtagggagcagggaaagaagagtgagcctgcatgccaattctaagctcttcaggatcaaatactatactggcaattgctggagaagattttgc

SEQ ID NO: 137323 - DNA, 78 bp, Homo sapiens
cgagcgcaaggacagcgcgaggtccgcgcagcccagcgcagccatttacagaatgtctgaaggggacagtgtgggaga

SEQ ID NO: 137324 - DNA, 100 bp, Homo sapiens
cggagaaaaccggcatctgcaaaattcggccgcccaagctgcccatagtggcttcttccatcgtatccttgtacttcctggagctgaccgacctcttcaa

SEQ ID NO: 137325 - DNA, 100 bp, Homo sapiens
ggccccagacttgtcgcacggatgcagaaaacttaatggaggaggctgagacatatctgaagagatggattaagaatgctttggattaaggattgtggag

SEQ ID NO: 137326 - DNA, 100 bp, Homo sapiens
gccgtgacctgtacaggtcgcgggagtcgtagggaggacgccgggacacctggaagccgagaaatgcttcactgcacggtgcctgcttacaatttcccag

SEQ ID NO: 137327 - DNA, 74 bp, Homo sapiens
gaacaatgataaagaagaagaagagaagaaagatgaaacttcgagctcctctgaaccttctaagtctcagacac

SEQ ID NO: 137328 - DNA, 90 bp, Homo sapiens
aggaacccaacagagatctcttctgttctccactgctaggaattagaaggtgacgaggagggagaagacgaggatgatgcggaaattaac

SEQ ID NO: 137329 - DNA, 100 bp, Homo sapiens
aagcatcccattacagatagaagagagagaactcgatgccaccgcaacggtattggcgaaccggcaggatgaaagtgagcagtccagaaagcggcttatc

SEQ ID NO: 137330 - DNA, 82 bp, Homo sapiens
atacagtcgctttgagaaggagcagcaacaactcaactggaagcaggatactgaggaagatgaggaggaagatgagaaggac

SEQ ID NO: 137331 - DNA, 50 bp, Homo sapiens
cagcactgactttcagctatggaatcgagctctttcaacgtcctgtgctg

SEQ ID NO: 137332 - DNA, 75 bp, Homo sapiens
gaagcaagcggaacttcctgagatgatgtctttctacctaaagatattgacctagacagtgtggatatggatgag

SEQ ID NO: 137333 - DNA, 75 bp, Homo sapiens
agatggagaagaaatagttacctatgatctgaccaaagacttgaccactcaaagtccagctccccagaacactgc

SEQ ID NO: 137334 - DNA, 103 bp, Homo sapiens
tggtggtgggcagcgacggcaggtactttagcaggacggccatcgagatcgtggtgcagatggccgcggccaacgggattggacgactgattattggacagaa

SEQ ID NO: 137335 - DNA, 100 bp, Homo sapiens
caggctcagggtatccaagtatttgatcctggggagtctgattcagatgacaactgtacagatgtcactgatatgagggaaggcaccattggagatatgg

SEQ ID NO: 137336 - DNA, 75 bp, Homo sapiens
ggagctagctgaaataacccttgatcctcctcctaattgcagaagtccaaggcttgcgagaaggtcatttccgtg

SEQ ID NO: 137337 - DNA, 101 bp, Homo sapiens
caagccctactgagcgtgctcccctctgagactggagtgagagggtcttctggagtgggaatagctttgcgaaaaatgggcgcaatggccaagccagattg

SEQ ID NO: 137338 - DNA, 83 bp, Homo sapiens
ggccgccgcctgtgcgcctctgctgagtcaactgataaatttcaaacggaagagagtggcagcatttagaaagaatctaattg

SEQ ID NO: 137339 - DNA, 101 bp, Homo sapiens
cagcatctttgtctagccccagtgcagatggagtgaaggtacctgagcgcaggaaccatggtcttcattgctgcctcagcattagcggaagtgccacgggc

SEQ ID NO: 137340 - DNA, 115 bp, Homo sapiens
gaacggcaaagtcatgggagcagagctcagacatgttctcaccacccttgaaaccagcctggacaccaagtctgtgtcagaaggccacctcaagaggaacatcgtggtgaagacc

SEQ ID NO: 137341 - DNA, 75 bp, Homo sapiens
gagatcttccgccactacgacagttggaattgatcacaccttttcagttgtacttcaatcctgaattaatcttta

SEQ ID NO: 137342 - DNA, 83 bp, Homo sapiens
caaagccatcaaggagagctgcacctgggccctgggtgttggagagcacaatggctgaacaagtccttcctcaggctttgtat

SEQ ID NO: 137343 - DNA, 90 bp, Homo sapiens
gccaaggagcagcatttgcagccattctggaggaaaacaaggagaagctgccacttgacatcaaccccgtggtgcacccccacggccaca

SEQ ID NO: 137344 - DNA, 100 bp, Homo sapiens
caaagccacaggacggacgcaaccatctgcggaaaggataggggggaggaagacttaacactgcaacaacagatatttcagcagttgaatcagttgaatt

SEQ ID NO: 137345 - DNA, 75 bp, Homo sapiens
tggcgctctggctgtgctgcgcgacccccgcgcatgggcgaccattgacgaggtggagacggacgtggtggagat

SEQ ID NO: 137346 - DNA, 98 bp, Homo sapiens
aaattgcccgcaccgagctggagggcgctgtcgggcttgctgccccccgacaccgctatcctaacccctgaacagtgcccaagtgttgtctctttgtt

SEQ ID NO: 137347 - DNA, 82 bp, Homo sapiens
agatgcctggcagccccgctctctgcatcagactcagtcacatgcccactcgaagtcgcactgctatggaaagtgggtgcag

SEQ ID NO: 137348 - DNA, 80 bp, Homo sapiens
ccgcgcggccctggaggccaggctgtgggagaccgaggcttgttagcagtggcacaagatcttacagaggatgaagaaac

SEQ ID NO: 137349 - DNA, 75 bp, Homo sapiens
tcgagcgacagagacaagctgagcttgccgcacaaaaagctagagaggtcaatgtgacggtggactacattagac

SEQ ID NO: 137350 - DNA, 75 bp, Homo sapiens
ccgagcgcaaggacagcgcgaggtccgcgcagcccagcgcagccatacctccgcgctctggcagctcctcttccg

SEQ ID NO: 137351 - DNA, 100 bp, Homo sapiens
caggcggacgaggcggaagaccgcgcgcagggcctgcagcgggagctggacggcgagcgcgagcggcgcgagaaaacctccgcgctctggcagctcctct

SEQ ID NO: 137352 - DNA, 83 bp, Homo sapiens
gaaacttatacaggccgcttttgagaggacaagcccagattccaaaacttatgtcaatctgatgatttgaagaagagaagaga

SEQ ID NO: 137353 - DNA, 90 bp, Homo sapiens
ctgttttagtgctttttatttttccccaattcagcagagaatattttcaaggggggaaaattgcctaagaattatgacccaaaagttacc

SEQ ID NO: 137354 - DNA, 96 bp, Homo sapiens
tgggcagcccccaccacccgcccaggccagccccagcagcaacagcagcacagggtatttgaagtataccatacaactgttttgaaaatccagcgt

SEQ ID NO: 137355 - DNA, 95 bp, Homo sapiens
atgccagctttgtcaacgggatctgggagtgacactgtccaagccttatgcatttgatcgggtgttccagtcaagcacatctcaagagcaagtgt

SEQ ID NO: 137356 - DNA, 100 bp, Homo sapiens
cagagaagaggaatcattccgccttttggggaccagagagtcaaatcattcctgtgatgccagatgttcccacaagcctgcatttccagagcatgctgaa

SEQ ID NO: 137357 - DNA, 82 bp, Homo sapiens
cttggccactacaagttcggcatgagcaagaaggagatggagcagggaaccagcggggaaactgaggctcggggtggagcgc

SEQ ID NO: 137358 - DNA, 90 bp, Homo sapiens
catcgctcagacaccatggggaaggtgaaggtcggagtcaacgggtgcgggaatgcagatggctgagtaggtcagattgaggacatggca

SEQ ID NO: 137359 - DNA, 73 bp, Homo sapiens
gcagtggtcgcttcttctccttggtacagtagcagagggagctcccattattccaatttcagctcagctgaaa

SEQ ID NO: 137360 - DNA, 100 bp, Homo sapiens
gcctgcgtggggggccgccaccggccgccgccgccgccgcccaggcgcaggagtcctaagcagacttaaagccaagaaaataagaagaggaaagagagag

SEQ ID NO: 137361 - DNA, 51 bp, Homo sapiens
cttggatcttgcacaggaaggaattaaagagagtgattgactgcctggagg

SEQ ID NO: 137362 - DNA, 82 bp, Homo sapiens
ccaccgctgccctcagctccgagtccagggcgagggtgctttcttctgcgacctggtactcatctacctcatcaaaaagaga

SEQ ID NO: 137363 - DNA, 82 bp, Homo sapiens
cttattcagagaaggaaggatcttctcatgcacagaggcaacaaatggcaactttctgaggctggagcggctctgggctccg

SEQ ID NO: 137364 - DNA, 100 bp, Homo sapiens
ttctacccaagtacatatgatttcagctgcaatggcagtaccaaatatgccccaacagcggcaagaccagcatcatcagagtgccatgatgcacccagcg

SEQ ID NO: 137365 - DNA, 75 bp, Homo sapiens
cactgtcctgagaggacgtgggtgaggggcagctcagagtcaagatctccactgaagttggcatcacaaatgttg

SEQ ID NO: 137366 - DNA, 75 bp, Homo sapiens
gagagcttaccattcctcagacttcttcacatggtgctaacagatttgaattggctattcatcatggctggagac

SEQ ID NO: 137367 - DNA, 83 bp, Homo sapiens
cttgaactctgccgaattcctgtgccacctcctcctttagaaaactgatcttaatacagagatcctgagtcatgtgttccagt

SEQ ID NO: 137368 - DNA, 50 bp, Homo sapiens
ccgcgccgcgcctcagctctgggtagatatggattcccagtttctccagc

SEQ ID NO: 137369 - DNA, 100 bp, Homo sapiens
aaatctcccaagaggaatgacaaacaaccagctcttcaggtgactattatatggttaaaaagattttggaggaaaacagttcaggtgacttgaacataaa

SEQ ID NO: 137370 - DNA, 90 bp, Homo sapiens
aacagaattaaaacagacggtgctggtgaagattgtccccagtggatggtccctatcacaatctctactagtgaagaccccaaccaggcc

SEQ ID NO: 137371 - DNA, 75 bp, Homo sapiens
ctgtggactgtcttgggcagcatgcagtgctttctgggccaacccatggccagcacagacatgatggaataaaga

SEQ ID NO: 137372 - DNA, 98 bp, Homo sapiens
tggtgatatggatatgccttgttgccatgggatacctgttcatgtgttttggaggcaccgtctctccctgggaccagattctgtttctggcgtctgca

SEQ ID NO: 137373 - DNA, 82 bp, Homo sapiens
accgccttcaaagacaggagcgtcccggtgcggctgcacgtctcgcggatcatgctgattttttatcaagcagaaatgcatc

SEQ ID NO: 137374 - DNA, 75 bp, Homo sapiens
tccaatcacagagaacttaagactgacaatctacctaatcaagctcttattccactaagctcaacaaatttcctg

SEQ ID NO: 137375 - DNA, 100 bp, Homo sapiens
cagataagaagacgtgccccatgaaggtgttcatgaagtctgtgaagctggagtgggtgcaagacaacatcagggcagcccaagatctgtgcgaggaggc

SEQ ID NO: 137376 - DNA, 75 bp, Homo sapiens
ccttacgctcacttaccatgttgcctctgcacacctggccatcgctactgccttcctcatcaacaaagtgcccct

SEQ ID NO: 137377 - DNA, 75 bp, Homo sapiens
attggatattgattgccagtttttaaggatgaaacaggcgcctatttaatcgacagagaccccacctactttggg

SEQ ID NO: 137378 - DNA, 76 bp, Homo sapiens
gctctccgctgtgtccacagcgttcaagttgtggaagatatcaataagcgcagagagccgctccccagcctggagg

SEQ ID NO: 137379 - DNA, 100 bp, Homo sapiens
ccgattgtcgctcggcggcgggagtcgtgtggggtgatcagccccagatttgacgtgcaactcaaagacctggaaaaatggcagaataatctgcttccat

SEQ ID NO: 137380 - DNA, 49 bp, Homo sapiens
cttgcgctacgccctggatgagatgggacaatggtgacagatccaggca

SEQ ID NO: 137381 - DNA, 99 bp, Homo sapiens
agcactgactttcagctatggaatcgaggtcctgctgtactagccaccaaagcagctgctggtactaagaaatatgatcttagtaaatggaaatatgca

SEQ ID NO: 137382 - DNA, 75 bp, Homo sapiens
tgctcctggctctgcgcaccggtgctgcgtttggtggaggcccaggctacccatttccagcagggccatgaggag

SEQ ID NO: 137383 - DNA, 82 bp, Homo sapiens
atggatcccagcaactggagcagcttcatcttccaggtgaaatgacaatggatgctctgttggctcgattgaaacttctgaa

SEQ ID NO: 137384 - DNA, 96 bp, Homo sapiens
ccagcctcgtggccagctctgcgtctgcggtcaccaccaaggtaagaaacgttttcactatgactgcgaaagagggaagaaagaaatcgatccgtg

SEQ ID NO: 137385 - DNA, 75 bp, Homo sapiens
cctggcggcgctgcggatccagggggtcggctgccaggtacaggtgcacacatcttgaccaactcagcagcaagg

SEQ ID NO: 137386 - DNA, 100 bp, Homo sapiens
ggagaagccactgttgccaggacagacgcctgaggcggccaaggaggttcgggaactccaggagcagctggcccgacagcaggtccatgtggagcttgac

SEQ ID NO: 137387 - DNA, 100 bp, Homo sapiens
ggagacggacgtggtggagattgaggccaaactggacaagccgggaagaagtccctgacctacttccaccgtgaccccagggctgccttgcaggaggcca

SEQ ID NO: 137388 - DNA, 50 bp, Homo sapiens
ggagccaagcccctcttcaggagtaaggtcacagaagatgtgaattcaag

SEQ ID NO: 137389 - DNA, 109 bp, Homo sapiens
gatttcttctctcagtgcctccatgaggagtataggagcaagggcgtctttgtgcagtggcaccctgtgctgcgcacactaaagaaccgcattgaagagaacactggcc

SEQ ID NO: 137390 - DNA, 100 bp, Homo sapiens
gagatcgtgagttgtgggtgcagcgactgaaggaggaatatcagtcccttatccgggtgttatccacgtgaccaaggaagtgaaagaagtggcaacgctg

SEQ ID NO: 137391 - DNA, 83 bp, Homo sapiens
ccggcccatagccgagcagactggcatctgtaaggtgcggccgccgccgcccggaagttatgagatccgacactatggaccag

SEQ ID NO: 137392 - DNA, 48 bp, Homo sapiens
agctttcttatagaactagaaaagctgtatgccactgggtatggtgca

SEQ ID NO: 137393 - DNA, 75 bp, Homo sapiens
ggcgcctcattcgggtggagctgagccggagacaggtacatgtcccagagcaagcacacggaggcccgggagctc

SEQ ID NO: 137394 - DNA, 98 bp, Homo sapiens
agttgagcctgatgaagaagaaatgatcgttgccagcccaacagaaaatggacaggtacttcgtgtaattccacctacccagacaggaatggcacaag

SEQ ID NO: 137395 - DNA, 75 bp, Homo sapiens
tgatcgtgtgtcggatgaggagaaggtggtctcatggattataaccatttggatatttggttcactaacaatttt

SEQ ID NO: 137396 - DNA, 82 bp, Homo sapiens
gtccacccaccgccgccgcctcccaggaaaggacttagaagccttacaaatacatctgtgcattcttgcttcagactttaca

SEQ ID NO: 137397 - DNA, 83 bp, Homo sapiens
tggaaaagacaattgatgacctggaaggtttttagaacttcagccataaaaatgggcagaattttccttgatcatatcggtgg

SEQ ID NO: 137398 - DNA, 80 bp, Homo sapiens
acatctgggaggagctgaagagcgagaaggagcagcgccggcggctggaggcgccatgtcagaaccggctggggatgtcc

SEQ ID NO: 137399 - DNA, 100 bp, Homo sapiens
ttgcctttagtgcactcttctccttcacagtaaagtggctgagaatctggacgaggctagagaacagaaagaaaagagtcctccagaccagcctgcggtc

SEQ ID NO: 137400 - DNA, 96 bp, Homo sapiens
ggtggaggccaaggaccccaagctccgagaagaccggcggccaatcacagtccactttggacagggttttggccaaattgggcgagggcacaaaat

SEQ ID NO: 137401 - DNA, 51 bp, Homo sapiens
ggggaggcagcggaaggcggcaggtcagccagagcagcctccccatgctgt

SEQ ID NO: 137402 - DNA, 138 bp, Homo sapiens
cccgaacattgtttaccttggaagaactccgtgcccagatgctcataaggattgtcctctttctacaaaaggctgctttgactctcccgcgaagacctttccttcactgttctactgtgattcccgttgtggttctga

SEQ ID NO: 137403 - DNA, 98 bp, Homo sapiens
tcggatttcgacagtaacccgtttgccgacccggatctcaacaatcccttcaaggaattgaatgatctggcacgggaccctccagcacagtgttcagc

SEQ ID NO: 137404 - DNA, 90 bp, Homo sapiens
ccttgtcatggaaaatcttttctacgggagaaagatggcacagggatctatttgtgatgactatatggcaactctttgctgtcctcattg

SEQ ID NO: 137405 - DNA, 51 bp, Homo sapiens
tcctgctgtcaggctacatcagcaaaggggccaagatagccaggttaacca

SEQ ID NO: 137406 - DNA, 100 bp, Homo sapiens
gcgcgaatatcgtcatcgttagaagcaagatgagtatcatatggttcatctagtatgtacttctcggactcctcccagttctccaaaatccagcaccaat

SEQ ID NO: 137407 - DNA, 100 bp, Homo sapiens
gtgtttcacttaccagaatactacgttcagctaaattaaggtgtgatgaatgcagactctgctaccattttggctgtttggatcctcctttgaaaaagtc

SEQ ID NO: 137408 - DNA, 100 bp, Homo sapiens
tccagtaccaagagttggtgggagacgggtgaggtacaggctcagtctgcggccaagactccgtcctgcaaggaagctgccacttttgctagagagcaag

SEQ ID NO: 137409 - DNA, 82 bp, Homo sapiens
caaaaatcccatctaccgcaactctcagttcgagagtaaagggttttggccaaattgggcgagggcacaaaataaccactta

SEQ ID NO: 137410 - DNA, 100 bp, Homo sapiens
ttggaccttttttcatttccatttctaccttgtatgcctcaatttgctggatttaagcactgctgcactttatgagtccacagacaaacgaatttaaagg

SEQ ID NO: 137411 - DNA, 100 bp, Homo sapiens
taaaccatgtgctggcaatcaagggacccagatcacgggctgaaaacacagttaaatcactttcaaagttaaaagactattaagaacacaagatggggac

SEQ ID NO: 137412 - DNA, 100 bp, Homo sapiens
tcgttaagggactcaggcagtacgggaagaacttcttcagaattagaaaggagctgcttcccaataaggaaacaacagaaccaagttgtattgttagaca

SEQ ID NO: 137413 - DNA, 75 bp, Homo sapiens
ctgcagcctcgtgcggacgctcgtgcacagatacgggacaggcaaatggtatgaattacaagacctccaggtgac

SEQ ID NO: 137414 - DNA, 100 bp, Homo sapiens
tggcccggctccttagcacctctccaggtgtgtgccggagtcccctcggtggctgttatcacaaaaaagaaacactgaagcaataaagataatggaccac

SEQ ID NO: 137415 - DNA, 100 bp, Homo sapiens
ggccttcccgaatccttatgctgattataacaaatccctggccgaaggctactttgatgctgccgggagggaactgatttcatctgaaattgaagagaca

SEQ ID NO: 137416 - DNA, 131 bp, Homo sapiens
gctgtgacatcatactcgtgatggaaatcaaggacagcaacaacaggatctgccccatactgatggagaagctgaacagacccccgccagcaactggccaccagctccttcctcctcttcttgctgacggg

SEQ ID NO: 137417 - DNA, 83 bp, Homo sapiens
ctttccagttgactgaacctggaaaagagccggctttgatgacagtagggaaagaaccatttcctaccatttacgtagattca

SEQ ID NO: 137418 - DNA, 90 bp, Homo sapiens
ggaaattgtcaagaggtgcaaaaatcttagctctctcaatctctgtctgaactggatcataaatgacagagacccagggccctgtggagc

SEQ ID NO: 137419 - DNA, 82 bp, Homo sapiens
tccaacctgggagcagctggctctgggccttgaacattccgaaactgtcaagattggcaagcggagcgtgctttggacacca

SEQ ID NO: 137420 - DNA, 100 bp, Homo sapiens
ctgaagtcggtgtctgctgcgttcacggcaggattcggttagcatcaggatactcaaagtggaaaggatcacagatttttggtagtttctgggtctacaa

SEQ ID NO: 137421 - DNA, 82 bp, Homo sapiens
aggtctccaacaaagccctcccagcccccatcgagaaaaccatctccaaagccaaaggtcccgcagcccccggaagccaata

SEQ ID NO: 137422 - DNA, 100 bp, Homo sapiens
ggaccgagtaccctccggccggagccacgcagccgcggcttccggagccctcggggcggcggactggctcgcggtgcagaaataagcgggttttgaaaac

SEQ ID NO: 137423 - DNA, 100 bp, Homo sapiens
aattcaaatgactatggttatgggggacaaaaaagacctttagaagatggaggtgccgtgagcgatgtggagatgcaggaacactatgatgagttttttg

SEQ ID NO: 137424 - DNA, 100 bp, Homo sapiens
ctatgaggccagcaagcggaggtgctgggagcgagttggctggctccagcccccttttggacatcgttggcggccggaaggcgaggccccgccagttccc

SEQ ID NO: 137425 - DNA, 50 bp, Homo sapiens
tgagactcctgctcagtgtagcattaagagtcactttgtggcatgtatga

SEQ ID NO: 137426 - DNA, 100 bp, Homo sapiens
cctgttcatcgaccagctcagcaaccgcgtgaaggacctgatggtttcacgcatgtgtgctgcagctcccatttcatcagcaagtttggaagaaccccac

SEQ ID NO: 137427 - DNA, 90 bp, Homo sapiens
gggaaatccatagctaagatgccaggaccccctgaaagcctagacatggatgctaatgaatgttggatacaaatgatgcgagtattgcaa

SEQ ID NO: 137428 - DNA, 100 bp, Homo sapiens
ggcgctggcgctggccaaggcgatggatgatgatgacgacgacgatgacgtaggagatcatgacgatgaccaccctgggatggaggtggtgctgcatgag

SEQ ID NO: 137429 - DNA, 100 bp, Homo sapiens
ggcggactgaccacggcccgggcatgggctgcaagggagacgcgagcgattaacccttcctggaagaattgtagaaaatggaagtgagcaagggtcctat

SEQ ID NO: 137430 - DNA, 96 bp, Homo sapiens
acgaccttcgcttcgtgggccgcagtgggcgaggctgagtcatcactagagagtgggaagggcagcagcagcagagaatccaaaccctaaagctga

SEQ ID NO: 137431 - DNA, 119 bp, Homo sapiens
ccggacagtttcgactacgtgaaggccctgcggcagcgcatcgcggagaccagaaggggaaactgaggcccaaggaaattgagtatctctgcaaagtcaccagctgagttcgaaccaga

SEQ ID NO: 137432 - DNA, 75 bp, Homo sapiens
tggggccagggaaccctggtcaccgtctcctcaggagcatcagatccatgctgctgctgactcggagccccacag

SEQ ID NO: 137433 - DNA, 82 bp, Homo sapiens
agagaagacgctttacccgactctttgggccgttatctcacgacctatatccagactttgcctgacactgcagggtccaaga

SEQ ID NO: 137434 - DNA, 103 bp, Homo sapiens
gttcccgttaaccttagccacaaagtcaaaggattttttatcaagcagaaatgcatcgaacaacgagaatcaagatcactgagctaaatccccacctgatgtg

SEQ ID NO: 137435 - DNA, 98 bp, Homo sapiens
aggaaccacacgctgatcatggacacattcagctaacgtattttagcaggtggagtgaggttgaagattcctgtgacagcgatgccatagagagaatg

SEQ ID NO: 137436 - DNA, 104 bp, Homo sapiens
accaggactcagaggccgccatcaaccgccagatcaacctggagctctacgcctcctacgtttacctgtccatgacagccagctaaaggtgtggatgagcaaat

SEQ ID NO: 137437 - DNA, 98 bp, Homo sapiens
ggctgaagcgactgagtccgcgatggagcccgtgctttgaagaagaggagcacttcaaggtgctggtgaagatgaccgcccaggagctcgccaatgga

SEQ ID NO: 137438 - DNA, 100 bp, Homo sapiens
gaagtggatgagttccacctcattttagagtatcaagcagacttgccttcaaggtgtgcaagtaaggacttatctccagaaaagaacacttatgaaacag

SEQ ID NO: 137439 - DNA, 75 bp, Homo sapiens
gagacaaagttgaaaacaaagtgctgatcagtgtactgttacccggacatacctattccttcacaagttctggtt

SEQ ID NO: 137440 - DNA, 75 bp, Homo sapiens
agtacctgcagaaggtctctggagacatcttcagcaggtattagaaaactactcggatgctccaatgacaccaaa

SEQ ID NO: 137441 - DNA, 75 bp, Homo sapiens
agcgtggactacgagttggcgcccaagtccagaatccgcgcgcaccgcgattgcagagggaatggcatacatcga

SEQ ID NO: 137442 - DNA, 88 bp, Homo sapiens
gctctacgcctcctacgtttacctgtccatgtgtcctctcgcatggcagagcaagtgggaaggcccagaagatcccttacaatacctg

SEQ ID NO: 137443 - DNA, 98 bp, Homo sapiens
aaatggagcaacttcgaccccaccggcctggagcgcgccgccaaggcggcgcgcgagctggagcactcgcggggggccctcagcctcttggccttgaa

SEQ ID NO: 137444 - DNA, 100 bp, Homo sapiens
tcccgtggccgcgtgctgggaggagactggagcccggttaggaagaatggagttggcgactcgctaccagaaataagcgggttttgaaaacaaaaaaaag

SEQ ID NO: 137445 - DNA, 100 bp, Homo sapiens
gaggagagccggagtcggggacccaggagtttcctgtgtccagcgctgccggagccgcctgagaatggagatgtatgcatttcgattcttcatccgcctg

SEQ ID NO: 137446 - DNA, 75 bp, Homo sapiens
cttgctcttttgagttcaatgaagcattccttgaagatgagaatgtgcctactgctcctgatcctccaagtcaac

SEQ ID NO: 137447 - DNA, 80 bp, Homo sapiens
ccgacctcgacgtcttgcctgtgtcccacttgttcgcggcctataggatagctagcggccaggagaaatacagtggaaaa

SEQ ID NO: 137448 - DNA, 51 bp, Homo sapiens
gttgattttgactatcttcttagtggccgatccctttgttgatctagcaag

SEQ ID NO: 137449 - DNA, 90 bp, Homo sapiens
agtacagggaagtctataagctttgcaacagaattacagagtatgattactatactggcaattgctggagaagattttgcaattgttgct

SEQ ID NO: 137450 - DNA, 82 bp, Homo sapiens
gccggtatgacccaagcatttctttttctggaatgtcattatcagacacaatggtatcgaaggatgatcgcagtgatgtgga

SEQ ID NO: 137451 - DNA, 74 bp, Homo sapiens
caccaccggatcaacttcgacaaatagtgttcagtgaatgcgactcctcagcagatgcctcagacagaaaaagc

SEQ ID NO: 137452 - DNA, 90 bp, Homo sapiens
ggggcacccacagccaacttccaacaagatgtgggcacaaaaactaccattcgcctgatgaactctcagactgcaagtggcaacgtggaa

SEQ ID NO: 137453 - DNA, 75 bp, Homo sapiens
atcacgaccagcttttcagagatgagtatgcgctgtatagaccactgcagaaatgaagctgttgtcatttctgga

SEQ ID NO: 137454 - DNA, 74 bp, Homo sapiens
ctggtttcaagaccctacccgcttcactggcaccatgaggagaaggcagagcccccccaggctatgaatgccct

SEQ ID NO: 137455 - DNA, 100 bp, Homo sapiens
ggatatctctactcgctccaaagtacatcgatgctgagctgcccccagaatccccctacctctatggcctccacccgaacgcagagattggcttcctgac

SEQ ID NO: 137456 - DNA, 90 bp, Homo sapiens
gacagggtccagaaactggcgagccacgagggacatgtgtaggtatcggcacaactatccgacctcctgccccccgaggtctgcagtctc

SEQ ID NO: 137457 - DNA, 98 bp, Homo sapiens
tgggaggagactggagcccggttaggaagaatggagttggcgactcgctaccagtactatactggcaattgctggagaagattttgcaattgttgctt

SEQ ID NO: 137458 - DNA, 75 bp, Homo sapiens
cggaaacttaggggccacgtgagccacggccacggccgcatagaggagaaggcagagcccccccaggctatgaat

SEQ ID NO: 137459 - DNA, 50 bp, Homo sapiens
ctgcgatggacaaggactctttttctggactgagcagggggaggaacatt

SEQ ID NO: 137460 - DNA, 50 bp, Homo sapiens
gcagtggtcgcttcttctccttgatgtgtcttgctgaatcagggctctct

SEQ ID NO: 137461 - DNA, 75 bp, Homo sapiens
cataatatggtgaacggccgcctggcagagacttttcttggtctcctggtggtaacataatcgccttctgggtgc

SEQ ID NO: 137462 - DNA, 100 bp, Homo sapiens
ggccgtcaaggagctggacctctacctggcctacttcgtgcgtgagcgaggtattgttgcagcatctggcagtgagactgaggatgaggacagcatggac

SEQ ID NO: 137463 - DNA, 98 bp, Homo sapiens
tgatgtctgtggggccgccggcggcccggcttcaggaggagccgaggaaggtctgcttcacctacgacctgttcctgaacctggaaggcaacccgccc

SEQ ID NO: 137464 - DNA, 98 bp, Homo sapiens
tcccgcctgaaggcaccttggccaggtccccgtccattgatagcattcagaaagatcccaggttctgcttccttcggtgctgcggctgtgtgttttct

SEQ ID NO: 137465 - DNA, 99 bp, Homo sapiens
tgtcaagcttttactgcaacttgtgcctctcattcctgccagaggtggcatctgtgaactgtggctgaagccatactattttatagaattaatggaaag

SEQ ID NO: 137466 - DNA, 83 bp, Homo sapiens
cctcgggtctcgggggccgctctgggatcccggccaccagcaattgtccgaaaaagcttgtggtgaaggggggcaaaaaaaag

SEQ ID NO: 137467 - DNA, 89 bp, Homo sapiens
taataatggagcccacagaatgctcagaattaagtgaatttgtgtctagagacatagtcttgctctgttacccatgctggagtacggtg

SEQ ID NO: 137468 - DNA, 100 bp, Homo sapiens
caaccctgaaaaattactgaatgtgaagaaatgtgcttcctttcacaactttttccagagggcaggcgtcctagctccagttgctccatcccttgggccc

SEQ ID NO: 137469 - DNA, 82 bp, Homo sapiens
ccggccttggggaccccagctcccacctgcgccctgccttccagatcagagcactacaaacaccactggtttcccgaaaagc

SEQ ID NO: 137470 - DNA, 90 bp, Homo sapiens
agcccgggacccccgggggcgcaggtaaatcttacaaaccattgtggttttatgggaggactacaaaaaaacaaaagcactggattgacc

SEQ ID NO: 137471 - DNA, 89 bp, Homo sapiens
tcagcatctacgggaggcaaacttgtaaaacctggaacagcagcatcattgtcaaaggcatgtactggcattgaaaacattgacgaagc

SEQ ID NO: 137472 - DNA, 100 bp, Homo sapiens
ggagaaactgccacatgaaaaacaccacaatcaaccttattgtggcattgcgccgtacattcgagagtttgaggacctgcaagcgcaggaccgagcccac

SEQ ID NO: 137473 - DNA, 74 bp, Homo sapiens
cagggtgatcccttccttcatgtgccaggacttgggaccctggaggactgacgctgctggcctgggcgtcccct

SEQ ID NO: 137474 - DNA, 100 bp, Homo sapiens
gccattgaggagagagatgaagcaattgcacgagccaagcatatggaaatgtctctaaaagtaattctggggagacattgccaaggaattttactggaag

SEQ ID NO: 137475 - DNA, 107 bp, Homo sapiens
gagcagtgactccaagcccccgtcctgcagcgagaggcccctgacgctcttccacaccgttcagtcaacagagaaacatgcctcaggagcagtacactcaccaccgg

SEQ ID NO: 137476 - DNA, 103 bp, Homo sapiens
ttcttctatttcttgtggatattatggctaataacacaacaagtttagggagtccatggccagaaaacttttgggatcgtcagtatttaaacagatcacatca

SEQ ID NO: 137477 - DNA, 75 bp, Homo sapiens
gcctctcgaggtacggactaagattgagaggatccagaatccagatctctggaatagctaccaggcaaagaaaaa

SEQ ID NO: 137478 - DNA, 100 bp, Homo sapiens
aaggaggaggaataatatttatggagcatatattatggaacacagatgcaatgcagtatgcttctgaatctaaagatactgaattggctgaagaactcct

SEQ ID NO: 137479 - DNA, 100 bp, Homo sapiens
gactgccgctgtgtacagcgcagccatcctggagtacctcaccgcagagcactattggaaataattatgaaaaatggaagcacggctggaaatagccctc

SEQ ID NO: 137480 - DNA, 76 bp, Homo sapiens
tgaagagggaagacacgcggaaacaggagaggaaggcaagcctgagattaatcagcagttaagcctagagtctatg

SEQ ID NO: 137481 - DNA, 51 bp, Homo sapiens
atagagacgtcggacttcacgagttgcatgctgagaatttgaaaaatgaag

SEQ ID NO: 137482 - DNA, 82 bp, Homo sapiens
cagggacacagcatcgtctcgctgtcagagctgctcagagagggaggaagcagggcatcttctctttctgaagaattgaaac

SEQ ID NO: 137483 - DNA, 75 bp, Homo sapiens
gaggtgcgggcggctgctgaagaacagattaaggtgctggaggtgacggagggttaaacccatccagagtaatgg

SEQ ID NO: 137484 - DNA, 100 bp, Homo sapiens
caccgcccaggaccgccggccgggggacgagctcggagcagcagccaggtatgaaattgaaggctgtgaagtgatttgggccattaaagataaagctata

SEQ ID NO: 137485 - DNA, 75 bp, Homo sapiens
gttcctggccgagttcatgagcacatatgtcatgatggttgatgctatgaaactgggagtaaaggaaatgaagaa

SEQ ID NO: 137486 - DNA, 100 bp, Homo sapiens
cggtaacaaacgagggttcccgggattggaccgacgcagccatgaacatccatgatagcagtcttctgtaaatcgaacttttcaagaattctctgaagga

SEQ ID NO: 137487 - DNA, 74 bp, Homo sapiens
ccgggagtgtgggcgcggctgggacatggatttgattgacatactttggaggcaagatatagatcttggagtaa

SEQ ID NO: 137488 - DNA, 74 bp, Homo sapiens
tgcttacagatgcatgcttcaagtaaagcccaatctgcaggtgttgcgagcccgattctctgagatcacacccc

SEQ ID NO: 137489 - DNA, 89 bp, Homo sapiens
ggggaaccaaagactctgggactcttggtgccaacagagttactctgtgctggagaatctggtaaaagcaccattgtgaagcagatgag

SEQ ID NO: 137490 - DNA, 97 bp, Homo sapiens
aactcttagctgagcaggcgagagatctgaacataaagtctggtctcctctggtgacggaggaagggaagcgtcatccatacaagatgaatttagcc

SEQ ID NO: 137491 - DNA, 100 bp, Homo sapiens
agtatttcagatatcaaggagaagagtaagtttcgcatgtcagaattgtctagctcccgccccaaaaggagattatttggtagcaattgaagagaaaaac

SEQ ID NO: 137492 - DNA, 98 bp, Homo sapiens
cggcggcgaggaggggaatttccttgtgcctccattcccgggaggggggagcggcgttggaggccaccgtttccagtgtttcctgaggttataggcgg

SEQ ID NO: 137493 - DNA, 90 bp, Homo sapiens
ggcggaagaccgcgcgcagggcctgcagcgggagctggacggcgagcgcgagcggcgcgagaaatgacatgaagtccgagaggagacccc

SEQ ID NO: 137494 - DNA, 90 bp, Homo sapiens
ggctgtttggaaagacccaggagaagccgcccaaagaactgacttaattcagtgcacaaatgagatgaatgtgaacatcccacagttggc

SEQ ID NO: 137495 - DNA, 100 bp, Homo sapiens
cacagactcctatttgaagtatttgacgaaaatagactgtcctggagtttgaactacggaaagccaaggagaccattcaggccctccgagccaacctgac

SEQ ID NO: 137496 - DNA, 97 bp, Homo sapiens
gaataccggctctcagcggctgtgaagtgtcagactctgacagcaacagctcctcttccagttcagattcagactcttcctcagaagatgaagagtt

SEQ ID NO: 137497 - DNA, 90 bp, Homo sapiens
ctgccatcaccaaggatgctgaggtcaccatagcatttgattatgagtatagtaactggtggttgaagatggatatgaattttttgcaaa

SEQ ID NO: 137498 - DNA, 75 bp, Homo sapiens
caagagcaagcccgcacgtgtgaaggcatccactgccctggcctcccacgactacatcctgaagattgtgcccac

SEQ ID NO: 137499 - DNA, 82 bp, Homo sapiens
gtggagtggtggatcagaccaaagatgggcctatatgaacccaatagcaatggcgagatcaaggggtccaatccagtcttca

SEQ ID NO: 137500 - DNA, 75 bp, Homo sapiens
gcgtagcattcctgccgtccctggaaaagctgtctctgcttggaggtgccctgcccatgtttgagctggtggagc

SEQ ID NO: 137501 - DNA, 75 bp, Homo sapiens
tggggccagggaaccctggtcaccgtctcctcagaatttggcaatgcagccacttctctgacagcaaacccagat

SEQ ID NO: 137502 - DNA, 75 bp, Homo sapiens
gaaggaagctctttatgccttaacgattgagaggatccagaatccagatctctggaatagctaccaggcaaagaa

SEQ ID NO: 137503 - DNA, 75 bp, Homo sapiens
gcctggtgcataatggctgggacgacctggagtttctcagtgacatgtacgagaaagtgctgtgcaccagctgtg

SEQ ID NO: 137504 - DNA, 100 bp, Homo sapiens
cccccagatctgtgtggtgggcagtggcccagctggcttctacacggcccaacacctgctaaaggcccaacagcgccctggaatcctgctccttcgcccg

SEQ ID NO: 137505 - DNA, 74 bp, Homo sapiens
taacggggttcgggtgtctcgtgtgtgaacatcacaggtgtatgcaacagcgttattgcaacaggctaacgaaa

SEQ ID NO: 137506 - DNA, 96 bp, Homo sapiens
tgattcacgaaggagagcgtttcaaccgtggcatttgctctctgcattccagttagcaaatgggaatgtgagcatttgatccgccatatgttggtg

SEQ ID NO: 137507 - DNA, 90 bp, Homo sapiens
tcatgggccctggcggtggacgagcaggaagctgcggctgagtcgaaagtggtggagagagagctggatgctcttttggaacagcaaaac

SEQ ID NO: 137508 - DNA, 75 bp, Homo sapiens
gaaggagatgaggaaaatgatccagactatgacccaaaggcaatgaatcgctccctggctaatgtgattcttgga

SEQ ID NO: 137509 - DNA, 101 bp, Homo sapiens
gcagcgctgccatggagcccagcagcaaggttatgaagacagtatggagtttccagaccatagtagacatttgctacagtgtctgagcgagcagagacacc

SEQ ID NO: 137510 - DNA, 100 bp, Homo sapiens
actttgcagaaatgtgtgcagactacatggcatctaccataggggtccttatgtcgtcagaagatcgagaagctcaggaggatgaattgctggccctggc

SEQ ID NO: 137511 - DNA, 75 bp, Homo sapiens
tgtttcttccaatacagtcaaaatccaagtccaaggtcagatgtaccaacagtaccagcaacaggccggctatgg

SEQ ID NO: 137512 - DNA, 100 bp, Homo sapiens
taagaatgttaaagatgctatggctaagggagctgaatatgtatctgcaagagagtggatgaggatttgctttgagcttttagagctcttaaaagcccac

SEQ ID NO: 137513 - DNA, 100 bp, Homo sapiens
ttttgatggtggaagtggtgaaacccaaacaacatctcctgctattccttgggctgcctttcctgcagaaactccccaacttttaaatcatttgaagaaa

SEQ ID NO: 137514 - DNA, 100 bp, Homo sapiens
ggataacaagttttgtgcagattgccagtctaaaggtttttcgttggaatatacgttgcacatttatggcgattctgagtgtgagggcagacttctgcca

SEQ ID NO: 137515 - DNA, 101 bp, Homo sapiens
cggcgcagacgaggcctgaggcggcggcgcgagaaacttcagtgctctcaagaaggaaaatatttatgaaaacaataaactggtgagtggcccccgccccg

SEQ ID NO: 137516 - DNA, 74 bp, Homo sapiens
ggcagcgggacccggcgaagacgcgaccgcggcgcgagtcaccatgatgcatcactgtaagcgataccgctccc

SEQ ID NO: 137517 - DNA, 75 bp, Homo sapiens
cagtacttgggatcccccagttccaaagtgtcttaaaggagtcgatagcagcagttggtgacgagatggcactca

SEQ ID NO: 137518 - DNA, 103 bp, Homo sapiens
ctggactgtgggctggtgtgtggaactggttgcttatggaaccacagagaacagtcccgtgacattcgcgcacttccctgaggacactgtggagcagaaggca

SEQ ID NO: 137519 - DNA, 96 bp, Homo sapiens
aaaaacctatcgttagagtcttcctgcccaacaaacagaggacagtgaatctgatgttccagcagaaatccaggtgttaaaagaacccctacaaca

SEQ ID NO: 137520 - DNA, 82 bp, Homo sapiens
tcttccaagaaaccaacattcccaacagccaccaccaccaccagatgaaaccaaggtgtatgttggtaacctgggaactggc

SEQ ID NO: 137521 - DNA, 100 bp, Homo sapiens
ggaagaacagtgtcatcagtggctgcatcacgggaggagctattggtttcagagctctcctgccacagctcctcaccccctgaaaatgttcgcctgctcc

SEQ ID NO: 137522 - DNA, 80 bp, Homo sapiens
cgccaaccggctggacctgttcgagatcagccagccgaccgaggttttaaaatcaaagatgggaaaatcggagaaaattg

SEQ ID NO: 137523 - DNA, 50 bp, Homo sapiens
tgcaggcgcttcaccacagacggacagtcattttgtttactcattcagcc

SEQ ID NO: 137524 - DNA, 100 bp, Homo sapiens
cgtccatctgcccgccgcccgcgcctgttccgcagcccgcgtccgcgccggccccacagctctgcgtccgggttcgaccttgaaactacaagagtgaatc

SEQ ID NO: 137525 - DNA, 98 bp, Homo sapiens
tatcgggaccagcagggacagatgcgccggatggatcctgtgctttccgagcccgtctatgacaagaccaagacaatgcaaactccagtgaacattcc

SEQ ID NO: 137526 - DNA, 102 bp, Homo sapiens
tgagccacgtgcatgaaccaaacccacttcgttcaagacaggtgtttaagcagacgagttgtactgctgtcacaggaaatggacgctggattacaagcatgg

SEQ ID NO: 137527 - DNA, 90 bp, Homo sapiens
cgctacaccaacctctcgtacatcggcgagggcgcctacggcatggtgtgtagtttatgccaacgtgacttcattcatacagatgaacca

SEQ ID NO: 137528 - DNA, 90 bp, Homo sapiens
agtcggcggagcttcgccaaggctggcgcagtcggatgactcactggttgtgtggaaggaagtcgatttgacccggctgtctgagaagga

SEQ ID NO: 137529 - DNA, 75 bp, Homo sapiens
gtggagcggcaggaaggccactcacagggcttcaacaagctagctgaggtttggagaaaattgaagttttacagc

SEQ ID NO: 137530 - DNA, 73 bp, Homo sapiens
gcttccccacgtcgcttgggggccacggcgcggacgccatggatgatgattggggaaacatcaaaataaaaaa

SEQ ID NO: 137531 - DNA, 99 bp, Homo sapiens
ctacgctatcaggaggccctgagtgagctggccactgcggtaagaaggtggatggctctgtaaatgcctatgccataaatgtctctcagaagaggaagt

SEQ ID NO: 137532 - DNA, 102 bp, Homo sapiens
attttgggtggagttgataatcagcaaagactgctacacattgtctggcctcacaggtgcaagtctggaaaagtttgaaattccagtaaaaattcgtttgag

SEQ ID NO: 137533 - DNA, 74 bp, Homo sapiens
ttgaggatcgaatcttcactcccgctgtctcagcagtctacagcacggcatgcttccagaagagtggtgcatca

SEQ ID NO: 137534 - DNA, 99 bp, Homo sapiens
atgcacctccgaagggcctacatgagtggtgtacaactatgagcctttgacacagctcaagaatgtcagagcaaattactatggaaaatacattgctct

SEQ ID NO: 137535 - DNA, 95 bp, Homo sapiens
ggttttggctcccccatggacatctttgatatgttttttggaggaggaggaaggatgcagagagaaaggagagacggagtttccctcttgttgcc

SEQ ID NO: 137536 - DNA, 51 bp, Homo sapiens
ccctgagcagctttcagcactggagccatccgggtgacctgcataggttcc

SEQ ID NO: 137537 - DNA, 50 bp, Homo sapiens
gtgggcccagaaaacaagccagtcagatgaggaaacagacttggagaggt

SEQ ID NO: 137538 - DNA, 98 bp, Homo sapiens
tctggtgttatcaacttaaaagatgccacctctaaggtgacaatctccaatagacttgtgtcttcaccttgctgcattgtgaccagcacctacggctg

SEQ ID NO: 137539 - DNA, 100 bp, Homo sapiens
aaaacttcagcatgtgccaggaacacaacctcaccttgatcaggaaggaagagctactgttaaccaggatacaagattagacaacagagtcattgatctt

SEQ ID NO: 137540 - DNA, 101 bp, Homo sapiens
gtagagctgagcgacccagcccgcgagcgagatgtgaatcccgatggagcggcccgaggaaggcaagcagtcgccgccgccgcagccctggggacggctcc

SEQ ID NO: 137541 - DNA, 75 bp, Homo sapiens
ggaagccatcagcagtgccatccagcttctagaagacccattacagagggaagcagccccaggggccgtgtacca

SEQ ID NO: 137542 - DNA, 100 bp, Homo sapiens
aataccaaggaggatcttttaggaccaaaagatctcagattgctataactgaaggtatatttgaacttccaaatctcacaattcaagctacaagagcaca

SEQ ID NO: 137543 - DNA, 50 bp, Homo sapiens
atccgtctggatcacggatgtaggaagtgaatgcgataagttgcggcatg

SEQ ID NO: 137544 - DNA, 87 bp, Homo sapiens
tagagagccgtctcccctctctggagccgagagaggccggtttcccccaccgagaaaggatcctgggttatgctgaggagccctgct

SEQ ID NO: 137545 - DNA, 100 bp, Homo sapiens
ccagcgggagtcgcggaacagcaggcccgagcccaccgcgccgggccccggacgccgcgcggaaaaggctgcaaggtgtgactgttgtaaatctcaagga

SEQ ID NO: 137546 - DNA, 82 bp, Homo sapiens
caaggcagctgccttcgagaagcaggtcctgcagctgcaggagaacatattgtgatgttcgtgcctcagagctaaaactatg

SEQ ID NO: 137547 - DNA, 75 bp, Homo sapiens
gaccaggagcagaagaggaagaggttaaccccaaagattggctttccttggagtgaaatcaggaacatctctttc

SEQ ID NO: 137548 - DNA, 90 bp, Homo sapiens
ggcggatttcgaagagttgaggggcgcaccctacgacgcgcacaccaccggcatgaccggcgccatcagctaccacccgtacggcagcgc

SEQ ID NO: 137549 - DNA, 100 bp, Homo sapiens
gagtgcatttataacctcatacccagtgacttgaaggagcctccccagcctcctagccacctgtctttaccagtttccaagactatgttactgggcttca

SEQ ID NO: 137550 - DNA, 90 bp, Homo sapiens
accaccccgtgtagcatgtgttcaggtggtggacatcatgagggtgaacgtggacaaggtcctggagcgagaccagaagctgtcggagct

SEQ ID NO: 137551 - DNA, 80 bp, Homo sapiens
gatcgggtggagtgtaggtcatatcgccgcgggaccattgcaatttagagatgtggccatagaattctctctggaggagt

SEQ ID NO: 137552 - DNA, 107 bp, Homo sapiens
ccgcccccgccggttcgcgtctctctgctgcggcgcggggaccgctgtgctctcggactttctgcagggcgactgcaccaaagcgaaacagaagctgaactggaagc

SEQ ID NO: 137553 - DNA, 100 bp, Homo sapiens
cggctccattcattcgcgcggctccgcctcctttcccgggctcttccagcggctcccggggcgcgtctgagtcttcccaagggattgttgaagaaacttc

SEQ ID NO: 137554 - DNA, 75 bp, Homo sapiens
tgaccacactccaggaatgccagtgcatcttttgcacagctttgattatggaagattcccacaagagtaccacgt

SEQ ID NO: 137555 - DNA, 100 bp, Homo sapiens
gattccttcaacactgtagcagagatcactgggagcaaatatccagaacagccaagttctatagaaattttagagtattcatcagatagtgaaaaagaag

SEQ ID NO: 137556 - DNA, 98 bp, Homo sapiens
caagacggacctcaagctctgggggatcgaccgggacagctaccggcgcatccttatgggagtgaggattctttggacaccagcctgagagctcacgg

SEQ ID NO: 137557 - DNA, 100 bp, Homo sapiens
gagtgaattctggttgtgtttcaactgctgtattgcagaacagcctcagcctaaagctgtatacctgcacaagtggtggctgccattgatgtcaacactg

SEQ ID NO: 137558 - DNA, 101 bp, Homo sapiens
cagtgttatatcctccaggaatactggccagaacctcaagaaggcatgaagccagcccctgcagtgccgtccacccgcccctctgggcctgcctgtggctc

SEQ ID NO: 137559 - DNA, 82 bp, Homo sapiens
gcaccagtaaaatatggtgaactcattgtcttagggagtgtgctgaaaaacaaggccaaattgaacgagtcattaaggaaaa

SEQ ID NO: 137560 - DNA, 75 bp, Homo sapiens
caagagttggatcaacccagagctattgccttagatccttcaagtggacagagcccagatagtgggaggactcgg

SEQ ID NO: 137561 - DNA, 50 bp, Homo sapiens
aagcaggagccatgacttttcaaaaataaacagagttgtctttgttggaa

SEQ ID NO: 137562 - DNA, 80 bp, Homo sapiens
gcctcaggccagtcgcctccaggccaagagggatccttcacccgtgtctgtctatccttcactggagtctgatgatgatg

SEQ ID NO: 137563 - DNA, 98 bp, Homo sapiens
tccaatatggcaattgacctcacctcaagcacacccaatggacagcatgcctcaccaagtcacatgacaagcatgccaaacccaagtctgaaatccac

SEQ ID NO: 137564 - DNA, 102 bp, Homo sapiens
gcaataagctgctgttcaggtaccccttccagagaagccaggagcacccggcgtcccagacaagcccggaaacaaaactcatgctgtgccatcatgtgatgc

SEQ ID NO: 137565 - DNA, 75 bp, Homo sapiens
tcccgccaccgccggacttcaatgcccagtccccagctcgccagctcaacgttggtgaggactgtccagtattcg

SEQ ID NO: 137566 - DNA, 100 bp, Homo sapiens
gagacggtcctcctgggcgtggatttccctgacagcaggaagcgtcagcccccgtagcacctctgttaccacgacttctagtgcctctgttaccaccacc

SEQ ID NO: 137567 - DNA, 75 bp, Homo sapiens
tacctcagctgggagaaatgttggaaatggtttaaacacattatcagggagaaaactggttgtcctggatgtttg

SEQ ID NO: 137568 - DNA, 90 bp, Homo sapiens
ctgaacgaagggacggacgcagcccgggccgccatcgccttctcctttttctccatcttcacctggaccattcccggagtaataaatcca

SEQ ID NO: 137569 - DNA, 88 bp, Homo sapiens
agaaattctcatgatagcttccaagggacaaggtgtcaacaatgtgccgacaatgcagatcttcgtgaagactctgactggtaagacc

SEQ ID NO: 137570 - DNA, 101 bp, Homo sapiens
gtttatcttcatggagatgatcaccaggactctgatgagttttgtcggtacttggattatggagaagagaattggaagaaacagacatctcagtgcttgaa

SEQ ID NO: 137571 - DNA, 98 bp, Homo sapiens
taaaccaaacttcacagactgtaataggcatacacaagtgtgcattaatggggaacttagtgatttggcccgtgaccctccagcacaatgttctgcag

SEQ ID NO: 137572 - DNA, 51 bp, Homo sapiens
gctgtactaggactgggaacggaacccttaggagaaatcttgagagtggac

SEQ ID NO: 137573 - DNA, 100 bp, Homo sapiens
acagcgattggacagaatttgtgaaggatctatctggttcaatagatgacctccccatggggacagaaggagctctgagtcctggagtgagcacatcagg

SEQ ID NO: 137574 - DNA, 87 bp, Homo sapiens
ccacgggttttagaaaaacaagaattacagcagccaacctatgttgccctgagttacataaataggaagaagccatggatttaataa

SEQ ID NO: 137575 - DNA, 89 bp, Homo sapiens
cgggaaatcgggctgaagcgactgagtccgcgatggagatcgaaagctgctttgcgtcgcagttggagcagcacccccaccgcaggtgg

SEQ ID NO: 137576 - DNA, 100 bp, Homo sapiens
atctttacatgttgaatccttgcagcactaaaatttgatgagaaattggacttgaatgacagtaaatgggaagatattcatgtcattactggagccctca

SEQ ID NO: 137577 - DNA, 72 bp, Homo sapiens
agacgcacccgtccatcttcgggatcttcgacgggcacgggggagaggtgtttgaggaactgtggaagaggg

SEQ ID NO: 137578 - DNA, 90 bp, Homo sapiens
gtgcttttatattcatctcaaaaacaaaattctgaactcaggacttggcaaatgtatcctccactcctcgctggccaccatcctgctgcc

SEQ ID NO: 137579 - DNA, 100 bp, Homo sapiens
cagcaatatctctgggctttcacagattttggaaataatcagggttattttaaaactatatgagcagtggaagaatttcgatgagagaaaagagatggca

SEQ ID NO: 137580 - DNA, 75 bp, Homo sapiens
acctctcctctggccgagtccttgcaagaagtgaattacccgaccctgcacgttcacgtccatgttcttcccagg

SEQ ID NO: 137581 - DNA, 80 bp, Homo sapiens
atgcaatggaagaggcaaatgaagagatttttatcacagactggtggtaactataactacccaatattgcagccatggag

SEQ ID NO: 137582 - DNA, 50 bp, Homo sapiens
gatctggggatcttcgcactatcccaaggcagatcgggagcggtgccgag

SEQ ID NO: 137583 - DNA, 75 bp, Homo sapiens
tcacacagcagtcaagtatgtcccaaacgtctgccttcaatcaagcaggggcagggccgtacagtgaacttgtcc

SEQ ID NO: 137584 - DNA, 80 bp, Homo sapiens
gttcgagcactaatatttaagaaagaagatgttaactttcaggtctgggaccaagtaaaggcttccaaccctgacctaaa

SEQ ID NO: 137585 - DNA, 100 bp, Homo sapiens
aggttcccatgaactcagaagtaattgtggaccctatacagccacgacagcccaaccctgactggcgttactctgcctccctgagagcaggcatgcacag

SEQ ID NO: 137586 - DNA, 100 bp, Homo sapiens
aggaggaggaggaggaggaaagagaaccagggctccggggtccctgtgtcgggccccaacctgtcaaccacccggccaatccagcaggacctgggccgcc

SEQ ID NO: 137587 - DNA, 50 bp, Homo sapiens
cgtctaagaaacttggagaactccaggcagcgattattagtagagttcag

SEQ ID NO: 137588 - DNA, 82 bp, Homo sapiens
gaagagaagatcatcgagcatttcaaacgtgtactaatggtcacttgatgtgcgctggctgttttatccacctactagcaga

SEQ ID NO: 137589 - DNA, 75 bp, Homo sapiens
agtagagagataacaaaagctgctcagagtctcaatgaacttggaacattttagtggacaaaccaaatgaccaat

SEQ ID NO: 137590 - DNA, 100 bp, Homo sapiens
ggaacgtgtcccggggccgacccggcccgtagtgtggaagcagcttcaggaaacatgccctgaactgtcacagaatgaaaccagcgctcttcagcgtcct

SEQ ID NO: 137591 - DNA, 86 bp, Homo sapiens
tcggaccccccaacaccctctacgaaggcggctacttcaagtgccggtggtggtgtgcacattgagccccggtatagacagttccc

SEQ ID NO: 137592 - DNA, 74 bp, Homo sapiens
tcttccgcgttctgaaccttaacaaggaactactataatgtctccagggatcctgtggtcatcaacaaagtctt

SEQ ID NO: 137593 - DNA, 75 bp, Homo sapiens
acctagaacagtttcaggcagatataaaagatatgaattgagaattcgttatttgccaaaaggatttctaaacca

SEQ ID NO: 137594 - DNA, 83 bp, Homo sapiens
gaccagccgaacccgctccaggttaccgctatcgtcaagtactgatgcctggagttactgtaaaagacgtgaaccagcaggag

SEQ ID NO: 137595 - DNA, 100 bp, Homo sapiens
gctcccgttccccagaccctacccctatccccagtggagccggagtgcgggcgcgccccaccaccgccctcaccatgatttctggagctccccagctgac

SEQ ID NO: 137596 - DNA, 75 bp, Homo sapiens
gctgagaacaaggctggcgagcaggatgcgaccatccacctcaaagtctttgagtcaagggtccagagaaggagg

SEQ ID NO: 137597 - DNA, 80 bp, Homo sapiens
cttttgcttgcagttaggtcaagtggagtactatactggcaattgctggagaagattttgcaattgttgcttctgatact

SEQ ID NO: 137598 - DNA, 83 bp, Homo sapiens
ggaatctgcttttcaagtatgccaccaacagtgaagaggtcaaaatgcagatcttcgtgaaaacccttaccggcaagaccatc

SEQ ID NO: 137599 - DNA, 95 bp, Homo sapiens
agatgatcctgtaagaatgttgcaaactgttgcaaagaaattcgacttcagtaatttgagtagtaggtgtcccatttcccaaaaactttatgtct

SEQ ID NO: 137600 - DNA, 82 bp, Homo sapiens
caacttcctcaaggcatccattgacaagatgcttcaggactgccccaaggcccgcagggaggtggagctgcactggcgggcc

SEQ ID NO: 137601 - DNA, 141 bp, Homo sapiens
gtaacaactgctctgaaaagaagatatttttcaacctgaacttgcagtagctagtggagaggcagcacccttacccttctgaagaacagaaaaagcagttggcacaagacacgggactcaccatccttcaagtgaacaatt

SEQ ID NO: 137602 - DNA, 100 bp, Homo sapiens
ggacaaaggaacaggtatctcaggtgtggaatatcaaacaaatgattaagttgacacaggaacatatagaggccctattggacaaatttggtggggagca

SEQ ID NO: 137603 - DNA, 118 bp, Homo sapiens
ggtcctggggctgggcatcaacggcaaagttttgcagatcttcaacaagaggacccaggagaaattcgccctcaaagcatgaagttacagtgtgtttccctttggctcctgggtacaa

SEQ ID NO: 137604 - DNA, 90 bp, Homo sapiens
tggagagtcacagaggggaacagatttcagtgtcctccttagctctgcagcacccagtcagcttgaagagtttcaaatggaccctaccac

SEQ ID NO: 137605 - DNA, 100 bp, Homo sapiens
ttgtcagtggagagagtggtgctggaaagcccctgcgaggaattggcatccttaagcaagccatagacaagatgcagatgaatacaaaccagctgacctc

SEQ ID NO: 137606 - DNA, 100 bp, Homo sapiens
catcttgaaagagaagctcttcctgtgagcacgagctttcagatggagatctggatctggatcttgtttatgaggatgaagtaaatcagctcgatggcag

SEQ ID NO: 137607 - DNA, 98 bp, Homo sapiens
gttgctcccgcctgagcccagcccccagaaaggattgtgacatatcgttggacccagaattgagggctatgtgacctttgaggacgtggctgtctact

SEQ ID NO: 137608 - DNA, 95 bp, Homo sapiens
gacagcttcccgatctaaactattggataaacttcagacaatcccacagagtattgatgaggaaactgaagtttggagcgatcacatcattttcc

SEQ ID NO: 137609 - DNA, 88 bp, Homo sapiens
ctctcccaggggctgtctctacctcaaagactggcacttgtgcaggatgatcctttcaaaaataaagccttgttatttagcaacaaca

SEQ ID NO: 137610 - DNA, 100 bp, Homo sapiens
gaaggaatactacaccctcatggacatcgcctacatctacccctggcggcgggtgcgctacaaggaggagtttgagaagaacaagggcaaaggtttcagc

SEQ ID NO: 137611 - DNA, 100 bp, Homo sapiens
tggaggtctcctacctattaaaaggaccatacgagtcctagatgtcaataaccagtccttcagagaacaagagactgagccccgctttgagttacactgt

SEQ ID NO: 137612 - DNA, 100 bp, Homo sapiens
ccgagatgctgagctatctggagacagctgactactccatccgagaagagattgtatcgaaggatgatcgcagtgatgtggagagcagctcagaggaaga

SEQ ID NO: 137613 - DNA, 75 bp, Homo sapiens
aatgtgccacatattcatgcaagagaatccaggagtcctgccaaagtggcaccaagtggctggtggagacccagg

SEQ ID NO: 137614 - DNA, 100 bp, Homo sapiens
gcatctttggcttcagcgtgtccccgtcatctccagcagtattcagctgctggttcaggatctggatgctgcctgtgatcctgccctgactgccatgagc

SEQ ID NO: 137615 - DNA, 98 bp, Homo sapiens
caagtatcgaaaggggttgattttgaatcaagtgaggtgctggagaatctggtaaaagcaccattgtgaagcagatgaggatcctgcatgttaatggg

SEQ ID NO: 137616 - DNA, 75 bp, Homo sapiens
cgcgcccaagtggcggggactactggtgcctgcgctgaaaaaggaacattttagtggacaaaccaaatgaccaat

SEQ ID NO: 137617 - DNA, 101 bp, Homo sapiens
cggcaagatcatcgtgggcgacgccacagagaaaggtcagaatggcggcagtggagcatcgtcattcttcaggattgccctactggccctacctcacagct

SEQ ID NO: 137618 - DNA, 82 bp, Homo sapiens
caagatgaagggctacccacactggccggcccggacaatgcagatcttcgtgaagactctgactggtaagaccatcaccctc

SEQ ID NO: 137619 - DNA, 88 bp, Homo sapiens
gaggccaaaggcagttgtattgttgctgccaaacaaggtgaatccgacccagagaggaaagaaacaaggcagaaagtagacgacgaca

SEQ ID NO: 137620 - DNA, 99 bp, Homo sapiens
gtcactattaaatatgactttcatgaaatatgtggattccaatctctgttgcttcatcccaggaaaggtacaatgtgagctgtagccatcagttccggc

SEQ ID NO: 137621 - DNA, 101 bp, Homo sapiens
gctgggaaaaagagaccaccggaggccagagccgaggagcaatttacagcaatgagggatttatacatgaaaaatggacaaggatttgcattagtttattc

SEQ ID NO: 137622 - DNA, 100 bp, Homo sapiens
cggacatcggcttctgcctggtgctctgcgtcctcatcgggcttatgttcgaggtgtcgtgaaaactacccctaaaagccaaaatgggaaaggaaaagac

SEQ ID NO: 137623 - DNA, 75 bp, Homo sapiens
gtgaaaactgcaaaaccactctgggctggaaatacatacagatccacgggttttagaaaaacaagaattacagca

SEQ ID NO: 137624 - DNA, 100 bp, Homo sapiens
aggcatcatccgctatgcaattggggtaaactcctccctgctgacctcagactgcagcgagcgctgttcctgttcctcaagctctggcctgacatgccag

SEQ ID NO: 137625 - DNA, 83 bp, Homo sapiens
gacaagaagaaatccattctcatgaagcagctgcagcagcagcagcacagcgacaagacgacaatgcagatcttcgtgaagac

SEQ ID NO: 137626 - DNA, 90 bp, Homo sapiens
agaaaatgaatccatacaagattgatataggcgcagtatattctcacagagtggcaaaggaaaccagagaaaacaagtatcggggctctg

SEQ ID NO: 137627 - DNA, 100 bp, Homo sapiens
tgaagctttgagtaacattgccagagaggtgaagatggagctggaaaaacaagcttaataagaaaaattcagggaatagaggagtataagaaaggaagag

SEQ ID NO: 137628 - DNA, 75 bp, Homo sapiens
ttgatttgctcttacgtatttgtgtgacttgactcttcaaacacaaaggttcaaatggttgtcctgatcctgatt

SEQ ID NO: 137629 - DNA, 100 bp, Homo sapiens
cgagatcatcaagttgtatagctgtatcattggcaacatgatttcgacctacagcttactccttgatgtggaggactatgaaagacgttatctcctaagt

SEQ ID NO: 137630 - DNA, 102 bp, Homo sapiens
ctatgagcgcctggctcatgcctccattatgaaactgaaccaggccagcatggataaggacaaagcccacaaacgctatctgctaatgagcattgaccagag

SEQ ID NO: 137631 - DNA, 100 bp, Homo sapiens
aaccaccttttctataaaagttgctgtttactgttgctgtccgtaaactggaacctctgttcactcaaggatctagtgaaaagccatttgatgtatgcgg

SEQ ID NO: 137632 - DNA, 75 bp, Homo sapiens
tctgtctgtccacgatagtgccaggcctatgttggaggagcagcagccaagctggacagatgacctgcctctctg

SEQ ID NO: 137633 - DNA, 75 bp, Homo sapiens
gaaatgtcatccgatggcacaatcaggaggatcccttttcccccagaaattactcaatgctgaaacctctcaaag

SEQ ID NO: 137634 - DNA, 96 bp, Homo sapiens
acatcctggaagctgggaaatggaaggagatcgccttagcgatgaagacttattcaagtttttagctgactacaaaagatcatcatccttacagag

SEQ ID NO: 137635 - DNA, 100 bp, Homo sapiens
aagagatcttggatgaggaggattttcagtgcagggacttcacagcccacacgggctacgaggtgctgctgcagcggcttctggatggcaggaagatgtg

SEQ ID NO: 137636 - DNA, 90 bp, Homo sapiens
cgtgtgcgcgcccgccagctgctccggagatacggtgaaaggtgtagcagtcactcggcctacacccacagcatcgaccttgtgaaccca

SEQ ID NO: 137637 - DNA, 82 bp, Homo sapiens
gctgctcaacaaggagctgggctgcatcaactcgcgcgagcccagcattgacctgctgcaggccttcgtggagcactggaag

SEQ ID NO: 137638 - DNA, 82 bp, Homo sapiens
tggtgccaacagagttactcttgaatggtagtgtctagaaagggtatgtcccttcaagagagaggtgccaatgtccaaccgg

SEQ ID NO: 137639 - DNA, 100 bp, Homo sapiens
aggagctgcgcgagcgggtgtgggcgctgttcgacgtgcggcccgaatgccagcgcctcttctaccggggcaagcagtaagactttgaccccgacgcagg

SEQ ID NO: 137640 - DNA, 90 bp, Homo sapiens
cacagcaatatctctgggctttcacagtctctagtgatccctgaaaagttccagcatattttgcgagtactcaacaccaacatcgatggg

SEQ ID NO: 137641 - DNA, 100 bp, Homo sapiens
ctgagccccagagtcagctcccctttctcgcccagcgcccccaggccgctcccggggctcacgatgtgagaagggtgttatgtctctagtgaatgtcagg

SEQ ID NO: 137642 - DNA, 98 bp, Homo sapiens
ttgccagctgggatgcagaagaatttggacttctgggttccacagaatgggctgagattttacatcctgaagtccaaactctagatctacggagctgc

SEQ ID NO: 137643 - DNA, 99 bp, Homo sapiens
gctccctgcggccccgggatgacttctcagcgttcccctctggcgcctttgctgctcctctctctgcacgggaatctctgcatatagctacaaagtcac

SEQ ID NO: 137644 - DNA, 100 bp, Homo sapiens
cacggatgagaacacggacagtgaggaacaccaggagcctcctgatctgccagtccctgagctcccaggcaccatggagtgctatactgaggagaaggcc

SEQ ID NO: 137645 - DNA, 75 bp, Homo sapiens
tgcttgtgaccctgcagctcctcaaagcccagcgctggcgcagtgagaacttcgagagacccgtggacctggagg

SEQ ID NO: 137646 - DNA, 100 bp, Homo sapiens
gaggagttgataggatagatgagaattacagccttcctacctgtaaagggttcttcaatatttatcatccggctgctttgctggctctgcaagaaaatgg

SEQ ID NO: 137647 - DNA, 101 bp, Homo sapiens
agcgacatggtccacttccaggcctcggaagtccagcagctgctacacaacaagttcgtggtcatcttgggggactccagagttcctgaagaaggagttca

SEQ ID NO: 137648 - DNA, 51 bp, Homo sapiens
actgtgtccaagtggccacaaaagtgcttgcgctccaggcccgaaagaaaa

SEQ ID NO: 137649 - DNA, 100 bp, Homo sapiens
cgctgaggatgaactggcgggtgtggacgccactacagttcatcaacatcaactacgtccctctgaagatatttggcatgatcttcagtatgatcttgtg

SEQ ID NO: 137650 - DNA, 83 bp, Homo sapiens
ggctgcggccgccctgggccgggccccaccggacgccgccgccatgtctgcgcatctgcaatggatggtcgtgcggaactgct

SEQ ID NO: 137651 - DNA, 100 bp, Homo sapiens
accagtggcctggacaacagacctctgtttggggagacgtccgccaaggtgcgtatagcagcaaaattcatcattcatgcccctcctggagaatttaatg

SEQ ID NO: 137652 - DNA, 74 bp, Homo sapiens
aagaaagaaaattagagtgaatgtagttgcaccagctgtcattcttctctacagaagagcttctcctcatcaac

SEQ ID NO: 137653 - DNA, 99 bp, Homo sapiens
cctggggagaagcgccccaagtttttggaaaatggatataccttatttgattatgatgttggactgaatgatataattcagctgctagttcgcccagac

SEQ ID NO: 137654 - DNA, 74 bp, Homo sapiens
ggagctgtggataacgggaggtgaatttccatgtcaacatagtcctgctctggacttattggacaaaatgttga

SEQ ID NO: 137655 - DNA, 100 bp, Homo sapiens
tccggcttctccaacacggaggaggagcagacgctcaaccagcttctggtagaaatggatgggactttgaacatgtcggggatcgccctcagcagactcg

SEQ ID NO: 137656 - DNA, 90 bp, Homo sapiens
gactgggaccgggacctgctgctggacccggcctgggagaagcagcagcgcaagtgtttgaaagatgtatggtgatcttgaaacctccag

SEQ ID NO: 137657 - DNA, 80 bp, Homo sapiens
gtgaacctccgaaagctcagcacacactcccgcaggatcccgccattgttcagggggatatgagactttctactcggaat

SEQ ID NO: 137658 - DNA, 85 bp, Homo sapiens
tacctgctgacacggaaccctcacctcaacaagtgcactgacaggcagaactcaccagtcacatcaccaggatcctctccccttg

SEQ ID NO: 137659 - DNA, 100 bp, Homo sapiens
cccctcgcccgccccccgcccccccagtctcggagatctcagaggcaccgactgggaggtgttggagcgggccggagagaagtagagtgggctgcgagga

SEQ ID NO: 137660 - DNA, 100 bp, Homo sapiens
tagaatcgtgtcgcggctcgagagcgagagtcacgtcccggcgctagcccagcccgacccaggtttctacgataaagacagttcagggtggagttctagc

SEQ ID NO: 137661 - DNA, 100 bp, Homo sapiens
cgcctcctggggctgctggcggagggtctgaggcggcgcggccatggctcacctccggggatttgccaaccaggccaacatagccgaggtagaggtctcc

SEQ ID NO: 137662 - DNA, 75 bp, Homo sapiens
tcggtcccgcgctgcgcatccccgcggacgccacagcgctgtgccgaggtaaacagagcatccacggaaggggaa

SEQ ID NO: 137663 - DNA, 50 bp, Homo sapiens
ccaaattcgcctccatctgtaccatggtttcagccatgccacagagctcc

SEQ ID NO: 137664 - DNA, 75 bp, Homo sapiens
tggaagaggcatgccagaggtagagcagtcctgaggctttctaccaatgcaggccagtggaaggaagcagctagc

SEQ ID NO: 137665 - DNA, 75 bp, Homo sapiens
ttggaagaactccgtgcccagatgctcataaggattgtcctctttctacaaaagctccataatgggagaagtaaa

SEQ ID NO: 137666 - DNA, 100 bp, Homo sapiens
gatggccactccgaaccagaccgcctgtaatgcagagtcaccagtggccctggaggaggccaagatcataggtatattgaactgttcctgaattcatgtc

SEQ ID NO: 137667 - DNA, 74 bp, Homo sapiens
gcctttacccgctccctaggattcccgggccctgacagctaacccccgcatcggtgacgtgatccagaagctgg

SEQ ID NO: 137668 - DNA, 82 bp, Homo sapiens
aattagcaggaccacttcgtcaaatgcagattattcttggagaaaccctgtctgtttactgtaaccttttgcactcaaattc

SEQ ID NO: 137669 - DNA, 97 bp, Homo sapiens
cacctggcctcttcatatcttacaacgaggcatttgacaatgaatatggaattgcatacaatagtctgtcttcagagattcttgaaaggttgcagaa

SEQ ID NO: 137670 - DNA, 100 bp, Homo sapiens
ggtcatctccagatgctagggttatggatctctcgtggaagaggaagaccaacacatgaaattgtcccttggaggcagcgaaatgggcctctcatcccat

SEQ ID NO: 137671 - DNA, 100 bp, Homo sapiens
tgtggactttttgaatttcaagaacagtaaagttggaacacagcagagggtgtgtaataaaatacagctctattaccaggttttaaacttcgccatgatc

SEQ ID NO: 137672 - DNA, 100 bp, Homo sapiens
tgaggacacctgaggttcagattaagaaatctgccccaaagtcttagaactggtcagtcatatcatttggatcaaaaaatagaacaatcggagttgcagc

SEQ ID NO: 137673 - DNA, 97 bp, Homo sapiens
cctgaagtgcttgatatcacagaggaaactctgcattctcgcttcctggagaattacatgatgcgtaatgctgtgctggcagccatggcggagatgg

SEQ ID NO: 137674 - DNA, 100 bp, Homo sapiens
gcccacaagaagcagctggactctctgcgggagaggctgcagcggaggcggaagcaggactcggggcacttgggtaatagcctgcagctggtgttttgag

SEQ ID NO: 137675 - DNA, 100 bp, Homo sapiens
ctagaatcaactgagagagatgcttaaaaatcaccagttactttaatgagacaaattgatggccaggagatcactgccaccgccgtgctggccccctggc

SEQ ID NO: 137676 - DNA, 99 bp, Homo sapiens
gggaggaaaagacacacccttggtttcaggctctgtataactatactcccaggaatgaagatgagctggagctcagagaaagtgatgtcattgatgtca

SEQ ID NO: 137677 - DNA, 83 bp, Homo sapiens
gggaggcagagggaggaacctggacgccggaagccgggaaatggtttggtgcacctcgatttggaggaagtagggcagggccc

SEQ ID NO: 137678 - DNA, 98 bp, Homo sapiens
ctgctgctgctgggacgtgcggctggaccagccccaaaagaggaggttggatggcaagcatgtggtgtttggcaaagtgaaagaaggcatgaatattg

SEQ ID NO: 137679 - DNA, 75 bp, Homo sapiens
tcccagtcggctttaccctatcgacgcagcgtccccactgacgagattgaggagctgcgggccgagatgctggag

SEQ ID NO: 137680 - DNA, 51 bp, Homo sapiens
caagcttcaagaactgatgaagtctcacagaaagttctccgctcccagaca

SEQ ID NO: 137681 - DNA, 100 bp, Homo sapiens
tgctacaggagaagcctattgaaagttttaatgagtatttatttgctttacaaagccatctatgctactgcgtggtgatggtggatgaggcacacgaaag

SEQ ID NO: 137682 - DNA, 90 bp, Homo sapiens
cgggccatggccgccgccgatgccgaggtccctccttgtggtccatttctgggcaccatgggctccacagtgtgcacagatgaacgaagt

SEQ ID NO: 137683 - DNA, 98 bp, Homo sapiens
tgaagtcacagggctactgttttccaatcctcagatttatcagcaagactgttgaacgcataactgcccaagatgcctgtccctccccctccagcacc

SEQ ID NO: 137684 - DNA, 80 bp, Homo sapiens
cgggaacagaaagaaaagtccgaaagagctggatttttagactctgaggagcagttggagctaatccacattatggaaat

SEQ ID NO: 137685 - DNA, 96 bp, Homo sapiens
tgggagccgcaccacctaacgctggccgacaacagcctggcgtccgccacggaacttgctactaccagcaccatgccctaccaatatccagcactg

SEQ ID NO: 137686 - DNA, 147 bp, Homo sapiens
ttttgggaacctgtgcctggaaaagtgcgtaaatatattgttcgatacaaaacaccagaagaggatgtcaaagaggcttcaggtgagaccacaggagttgacatcactaaaattcaagtcaagagatgtgagaccatgagagagaag

SEQ ID NO: 137687 - DNA, 87 bp, Homo sapiens
aggaacagcctatgtgggcttccacggagcaacagctgcgaatgcggatcaagcttacatataatcacaagggctcagcaatgcaag

SEQ ID NO: 137688 - DNA, 75 bp, Homo sapiens
cctgggaatatgattatggctttcagcaacttggcagagagaatcaaggacttatcaaactggtttcaaagcaca

SEQ ID NO: 137689 - DNA, 98 bp, Homo sapiens
tccagctgaatcttgacaagaccatagagagttgcaaagcacaattaggatttggagttccatggagtgatgagattttattttcaagataaagctgc

SEQ ID NO: 137690 - DNA, 100 bp, Homo sapiens
ccccttgcactttgttttcaatgacaccaagttggacgctatgctggaagaatttaagaaagagccaaggattgtcaccagtgaagaggtcattattcga

SEQ ID NO: 137691 - DNA, 134 bp, Homo sapiens
cagcttaaagagctccacattcaggggaaccgcctcaccgttctgcccccagaactaggtactccaaagattcaggtttactcacgtcatccagcagagaatggaaagtcaaatttcctgaattgctatgtgtc

SEQ ID NO: 137692 - DNA, 90 bp, Homo sapiens
tgcagccgcacctggccaaggatacactggaattcgcaataaatccagtatggtggttatagatgtaaaaatgctatcaggatttactcc

SEQ ID NO: 137693 - DNA, 100 bp, Homo sapiens
ggggagtcatcatgagcgatgttaccattgtgaaagaaggttgggttcagaagagggaggcgtgcaaagactccagaattggaggcatgatgaagactct

SEQ ID NO: 137694 - DNA, 75 bp, Homo sapiens
tccaaactgtgttgtttcagctgtattaggggccgacgagattgaaatgatcatgacggaccttgaaagggcaaa

SEQ ID NO: 137695 - DNA, 74 bp, Homo sapiens
gagagcttcatcaaaaatagtgatagctttgataagataacaaagccattgacctttgccgattgtgttgggga

SEQ ID NO: 137696 - DNA, 100 bp, Homo sapiens
ctgtgattcagattctagtcccatggctgttcaaaccttgtactactcagctgatcacaagctgcttgatgggaacctactagatggacaggctgaggtg

SEQ ID NO: 137697 - DNA, 73 bp, Homo sapiens
tttggcattgacatttaattttagggtcctttatatagaagggagagtagggttttctccagggatttaaggg

SEQ ID NO: 137698 - DNA, 82 bp, Homo sapiens
gaatcttctggtcactgttaccttcctccgtacttacctgcctcatggagaaacaatgtgatgagaaccattcatggggtgg

SEQ ID NO: 137699 - DNA, 82 bp, Homo sapiens
atgtctacgggaaactgatgcctccctcagccgcatggaggagcaggacttggagcgaaggttcgagctgctgagccgcgag

SEQ ID NO: 137700 - DNA, 100 bp, Homo sapiens
gtgggcttggggctaggagtactggccgagatggctaagaagtccatgccaggaggtcgtctgcagtcagcctacaaggagaagatgaaggagctgtcgg

SEQ ID NO: 137701 - DNA, 80 bp, Homo sapiens
taatactaaagatgggcccagtggataagcggaagctaacaggccctattcaagtcatccatcttgcaaaagcttgttgt

SEQ ID NO: 137702 - DNA, 98 bp, Homo sapiens
caaaaacggcccttggatgatggagattattgtggatgatgatgacagtaagatatggtcgctctatgacgcgggcccccgaagtatcaggtgtcctc

SEQ ID NO: 137703 - DNA, 100 bp, Homo sapiens
agttgacatgggaacactgaggccagcaatttaaggatttcacatttgcttgcagtggcctgtcccaggctctctatcttctctgctacatctccacaac

SEQ ID NO: 137704 - DNA, 83 bp, Homo sapiens
cgcctgtgagaccggctgccggctgacgtctccttgcgatggagcatatccggacgaccaagaggtccttggccagacagagg

SEQ ID NO: 137705 - DNA, 82 bp, Homo sapiens
gagagagcgagctgagtggttgtgtggtcgcgtctcggaaaccggtagcgcttgcagcatgcccctgtcaaagggaacagga

SEQ ID NO: 137706 - DNA, 75 bp, Homo sapiens
gtggaacaggaatctctgttgacagggagtgcatccgccccaacccttttccccctcgtctcctgtgagaattcc

SEQ ID NO: 137707 - DNA, 135 bp, Homo sapiens
cgacataatgatgagggacaacctctttgaaattgtaacaacgtctcgaactttctatgtgcagggtccaaagccaatgagaagctcacagctaatgcagagcagcggccgctctggaagcagcctagtgtcccc

SEQ ID NO: 137708 - DNA, 50 bp, Homo sapiens
atccgcggcatggagaatggcaacatggattcctcatggtgcaaaatggc

SEQ ID NO: 137709 - DNA, 50 bp, Homo sapiens
gcaactcccccatcgtatgaatctacagggaaaaatgcattttttgtggg

SEQ ID NO: 137710 - DNA, 74 bp, Homo sapiens
gcccggatcgtggcctctcgagagcaagtaagactttgaccccgacgcaggcttcagtgattgccgcggatcag

SEQ ID NO: 137711 - DNA, 100 bp, Homo sapiens
tggccctgaatgcccacaccttcctgcgtaatggaggacactttgtgatttccattaaggtcctagctggtgcattaaaacaagaaataagagatacaag

SEQ ID NO: 137712 - DNA, 88 bp, Homo sapiens
ttgatgttggtggctaagctcatccagtgtattgtgtttggccctcttcgagtgagtgagagacagcaccctggaggagaagaggttc

SEQ ID NO: 137713 - DNA, 98 bp, Homo sapiens
gagaccacgcccggggcccaggaaggcaagaagcagtataagatgatctgccatgtgttcgagtcggaggataattcttccatctctatgacaacaag

SEQ ID NO: 137714 - DNA, 127 bp, Homo sapiens
atcaatccaaactggaaatgcttcaactacatcaagaatttatcaaatctttagcagagatgggcctttgggtccccgaggattagctgaagctacagagatgtgcactcaagagtgcttggttttg

SEQ ID NO: 137715 - DNA, 100 bp, Homo sapiens
aagaacactgttgttgccacagggtctatagaagaggagggaaaaacacacctaggagtaagttatcctgtgctttaaagactagcaaacaatgtcaggc

SEQ ID NO: 137716 - DNA, 87 bp, Homo sapiens
gagacggcccggctgcagcgagcgctggacggagaggaaagcggttgtcttttggaaatgcaggtttaaggacaaattatctgctta

SEQ ID NO: 137717 - DNA, 51 bp, Homo sapiens
cctgctaacagaactggaccttttcgctcctactccaatgtggccagatga

SEQ ID NO: 137718 - DNA, 100 bp, Homo sapiens
ctcttatgatgcctgcagtttttcatactgttgcttcaaggacacagcttgcattgggaggagctttatctttatatactgcccttaccacacagcagaa

SEQ ID NO: 137719 - DNA, 98 bp, Homo sapiens
ccttattggatgatcttctgacagaatctgaggacatggcacagcgcaggaaagaagcagctgatatgctaaaggaaaatgtttataggaggccttag

SEQ ID NO: 137720 - DNA, 100 bp, Homo sapiens
ccaagaatgccttcttggcacctgcctgccttccagattgtctaaagccccaggaaaaatggtggaaaattcaccgtcgccattgccagaaagagcgatt

SEQ ID NO: 137721 - DNA, 101 bp, Homo sapiens
cttgagcctgtcccaagccctggtgccaggtgtccatccccgtgctgaggttaatgttgaagaaggaaaatgcggaagtcgtcatttgacaagttttataa

SEQ ID NO: 137722 - DNA, 100 bp, Homo sapiens
gtggtgttggcgctgaggacccggacagccggatcaagcaccccaacattgtagccctggatgacatctatgagagtgggggccacctctacctcatcat

SEQ ID NO: 137723 - DNA, 82 bp, Homo sapiens
ttgcgagctgcagctgcgatctctgtggtaggcccagagcaaatttttcagaacataaaacaagaatatagtcgttatcaga

SEQ ID NO: 137724 - DNA, 100 bp, Homo sapiens
ctaactggtgtgatggcgtgtcacactgccccggcggggaggacgagaatcggtgtggatgctcaccccatttagagaaagaaatccacctccccaaccc

SEQ ID NO: 137725 - DNA, 75 bp, Homo sapiens
gtcccaagcaggagaacattgcaggatgctgaaatttctggaaaagacaatggaaatcaggggcaggaagagaac

SEQ ID NO: 137726 - DNA, 98 bp, Homo sapiens
caaaggctgtgaaatggcccgtcaggcacaccaaaaattggctgccatctcagggatcattttacttctccagatgaatatgatgaccctactgtgct

SEQ ID NO: 137727 - DNA, 75 bp, Homo sapiens
tgtggatcgctgtgatcgtcacttgggacaggagagagtggcaagagtacgtttatcaagcagatgagaatcatc

SEQ ID NO: 137728 - DNA, 75 bp, Homo sapiens
catgcccctgtggcattgcttaatgatataccacagtcaacagaacaggcagatgatgttgagggcaaaattaga

SEQ ID NO: 137729 - DNA, 75 bp, Homo sapiens
gggatcttcttcactgcctctggcatggatgaggactcagcccaggagagtgttattactcgagatattcatcgt

SEQ ID NO: 137730 - DNA, 82 bp, Homo sapiens
cgcaccaaattgcatcgtttcccagattggtttatcttggaagctaaagggcattgctcatcctgaagatcagctgaccatt

SEQ ID NO: 137731 - DNA, 50 bp, Homo sapiens
gttaaggattccaagtaactcttatttgggtgcaactggaaactgacttg

SEQ ID NO: 137732 - DNA, 99 bp, Homo sapiens
caccgccagcacgcgcctgcttcccgtctgcgcgagtccacgcagctccccagagtgcttgtgatttcacgtatttttgctgaactcgtaaaagagaca

SEQ ID NO: 137733 - DNA, 96 bp, Homo sapiens
cacggagagaagctaagaagtctttcaatgatgatgctatgctgatcgagaagtttgtagacacaccgagcttactgaaacaaatgcaggtatcaa

SEQ ID NO: 137734 - DNA, 82 bp, Homo sapiens
aggccaaggcgccagtgagaggcgacaatgcagatcttcgtgaagactctgactggtaagaccatcaccctcgaggttgagc

SEQ ID NO: 137735 - DNA, 100 bp, Homo sapiens
ggctgagcagggcggggctgagtaaatgccggcttaccatctctaccatcatccggaaaggcctaaagaatgtatttgacgaagcaatattggctgccct

SEQ ID NO: 137736 - DNA, 101 bp, Homo sapiens
aggaacatcgagaagccaaggctagtggctgggttactgatggattactgatggattcttctcagttggtgcttcccgtgctgctgttgatgctggctttg

SEQ ID NO: 137737 - DNA, 100 bp, Homo sapiens
gaaaaagcggatgatgacaagtagagagcaaatgtgcgcatgtctgatgcttgactttctggctgatcaagctgcatgttatgttcaggcaatacagtgg

SEQ ID NO: 137738 - DNA, 75 bp, Homo sapiens
ggaacttctgcccagctctccttggtacctagtcgatagtcgctggttcaaacagtggaaaaaatatgttggctt

SEQ ID NO: 137739 - DNA, 74 bp, Homo sapiens
aacactggaatcctactttttctgtggtttcagacaccctcacaggttttctaccatgcagcaactgaacatgg

SEQ ID NO: 137740 - DNA, 90 bp, Homo sapiens
agcctccggtgagtcccgggacagcgctggtagggagtcagaaatacaggtatcaggatgaagatacacctcctcaagagcatatttccc

SEQ ID NO: 137741 - DNA, 51 bp, Homo sapiens
ggatctcagttctcctttcttgtaaatatcaccttttgccatgatagcatt

SEQ ID NO: 137742 - DNA, 100 bp, Homo sapiens
ctgaattcttggccttgtaaaagcaaggaggagtggaatgaaatacggcaccagattggaaacacactgatccggtccagaatggctacaacagtccctg

SEQ ID NO: 137743 - DNA, 95 bp, Homo sapiens
agctgctgttgcagcacttgttccccaaacaagtgctcctacattctggactgagcagggggaggaacatttaagctgatggaagtggaagtgga

SEQ ID NO: 137744 - DNA, 100 bp, Homo sapiens
tcactgtatttgaccttaaaaaatgaccgcacctcgagcaggagtggggatgccacgtctgcccccagcgcccggccctctgtccaccacggtcattccc

SEQ ID NO: 137745 - DNA, 82 bp, Homo sapiens
tacatgtcgcaggtgctggagaaggaaatgaaggcacaggagcagaggacatgaagagtatttctggagaagaatcatccca

SEQ ID NO: 137746 - DNA, 74 bp, Homo sapiens
tttgtctgactacaatattcaaaaggcccttcataacacaaggcttttatctgcttattccgccattgatccca

SEQ ID NO: 137747 - DNA, 89 bp, Homo sapiens
atcaaaccaatcaaggcaccaagacgcaggggggatatccacagttcgatcaagccatcaagttttatcgtagggctatgcaacttgta

SEQ ID NO: 137748 - DNA, 75 bp, Homo sapiens
caaggaaaaactggagagcttcatcaaaaatagtgatagctttgataaggcatggtgctgatgtgaaatgtgtag

SEQ ID NO: 137749 - DNA, 100 bp, Homo sapiens
agcgagctgagtggttgtgtggtcgcgtctcggaaaccggtagcgcttgcagcatggttaatttggagtggcccctggagtcagtttcctacaccatccg

SEQ ID NO: 137750 - DNA, 51 bp, Homo sapiens
tgagccacaatgcatcgctggaagtagccaaagcatcagatggtgaaggag

SEQ ID NO: 137751 - DNA, 82 bp, Homo sapiens
gatttgctccaagctatggctatcagttcccaggctgctgagaactagccctagacctctgcgtgagggttcttctgccgaa

SEQ ID NO: 137752 - DNA, 90 bp, Homo sapiens
tgtgccgtggagggcctcgccatgtcctgctgcccggccgacttaacattacctatcccatgctgttcaaactgaccaataagaattcgg

SEQ ID NO: 137753 - DNA, 83 bp, Homo sapiens
aactaccacctatatagatccccgcacaggaaaatctgccctgaacttgcttgctagaaaacaaagtgcaaggcttgacaaac

SEQ ID NO: 137754 - DNA, 100 bp, Homo sapiens
gacaacatcaccgtgaggcagggggacacagccatcctcagcttccttcttcttcaacgtggggccagcagtccaatacaacagcatgtcagtcccaggc

SEQ ID NO: 137755 - DNA, 51 bp, Homo sapiens
gcgtgcgtttggcgggatcctggtgtcttggtgatgccttggacagcagca

SEQ ID NO: 137756 - DNA, 100 bp, Homo sapiens
cggcagatcttcagttgcggtgcggagctgagcagagtgtggaaggagaacaccatgagaaagctgtggaactactcaaggctgctaaagacagcgtcaa

SEQ ID NO: 137757 - DNA, 131 bp, Homo sapiens
tcgtgttcgtccgcggagatctctctcatctcgctcggctgcgggaaatcgggctgaagcgactgagtccgcgatggagtactatactggcaattgctggagaagattttgcaattgttgcttctgatact

SEQ ID NO: 137758 - DNA, 100 bp, Homo sapiens
ggaggctggaccagagtcgagttccctcctcctgcaccaaagggagccgccaccgtctggtgtctaaaccgcctcggcaaactgcctagttgggctagag

SEQ ID NO: 137759 - DNA, 76 bp, Homo sapiens
aacgtcgccccggtttgacgcacacggcaccaaactgaaggatatggagtaatagtactaaatcccaatgaaaact

SEQ ID NO: 137760 - DNA, 90 bp, Homo sapiens
agaaatatctgagctttactcctcctgattggaggtggacacaaaggaagaggcagccagacagctacttcagcgtcctcaacgcattca

SEQ ID NO: 137761 - DNA, 119 bp, Homo sapiens
tttcacaataagagcagaggatggaacacttcagtgcattcaaggcacattgcaagcaacccgtgccttgatggtggttggcatcctcctgggagtgatagcaatctttgtggccaccg

SEQ ID NO: 137762 - DNA, 100 bp, Homo sapiens
cactgcaacctctgcctcccgggttggcaggggaccctcttctcccgtctgccctgcgggttgcccgcctcctccagagacttgcccaagggcccatcac

SEQ ID NO: 137763 - DNA, 100 bp, Homo sapiens
ggaggacagttcgctacacagcaatgcatcgaggttcgtcacaaggcatcgcagaaggtttatgctatgaagcttcttagtaagtttgaaatgataaaaa

SEQ ID NO: 137764 - DNA, 80 bp, Homo sapiens
aactacaggaacctgctttctctcgatgaggataacatccctccagaagatgatcccctgtttttggagcacagctttca

SEQ ID NO: 137765 - DNA, 130 bp, Homo sapiens
ggagcccctgcgggtgctggagctatacagcggcgtgggcggcatgcaccacgcgctgagaggaaacttggatttaactggccagaagcaggtattcaaagcagagaacaatccctgggtgacccccatt

SEQ ID NO: 137766 - DNA, 50 bp, Homo sapiens
gcgtcaatcagagcgtcctgtgcggtttttagaacttcagccataaaaat

SEQ ID NO: 137767 - DNA, 90 bp, Homo sapiens
agaggacccgcgtgggcaccctgcaggtggtcagacatgtcatcaactcagctggcatctgcatctgggaccgacctcctgggctggctg

SEQ ID NO: 137768 - DNA, 83 bp, Homo sapiens
ggctgcgctcctggcagaaggctgtcttctactgcgggtcatttggatccaggattcctagcaagtgacaaaacatctggcaa

SEQ ID NO: 137769 - DNA, 69 bp, Homo sapiens
ggtgactggtgtggatagctacacctgtgaaaatggtaacaaatttgttatgagttgcagaaacgaatt

SEQ ID NO: 137770 - DNA, 74 bp, Homo sapiens
ccgccgtccgcaccgggaccggagaggaagcggaggccaggtcagagcagcccaccatgggatggggagggggt

SEQ ID NO: 137771 - DNA, 95 bp, Homo sapiens
ccgagagtcaccacaaggccaagggcaagtgatttgacagaggcgtagaggctccggtgttttttgtgccaattgcctgaccacaaagacctctc

SEQ ID NO: 137772 - DNA, 100 bp, Homo sapiens
cagacatctacaaccttcgatctcctgacgacgctttgaacttcaagattcaggaagctctctacttcctaaagagattgtaaaagtagagaagatgatg

SEQ ID NO: 137773 - DNA, 89 bp, Homo sapiens
agtcatgtgcatagtacccaggcggtgcaacgacatgatgaacgtggggcggctgcaaggattcgacacaacatgccaatttggctggc

SEQ ID NO: 137774 - DNA, 83 bp, Homo sapiens
ggcggcgggacagagcgcctgcgaccccagtcggtgctccggggaggtcacctgacgaggagagtggctgtaccattttacat

SEQ ID NO: 137775 - DNA, 80 bp, Homo sapiens
gccagcggccgagcgggcggcttcctggcctgggcgctccggtggcggcggagattcttcgctgctgctgccttaccgcc

SEQ ID NO: 137776 - DNA, 100 bp, Homo sapiens
ggtgcacattggaggcgtgatgcttaagctggtggagaaactcggtgaaaggtgtagcagtcactcggcctacacccacagcatcgaccttgtgaaccca

SEQ ID NO: 137777 - DNA, 75 bp, Homo sapiens
ggcctcactgggacccccaggaggtgaccctgcagtaatttctatgcagcccccgacccagagccgagctccact

SEQ ID NO: 137778 - DNA, 100 bp, Homo sapiens
cagaggctgcttcacgccttggctcgacactgccagctggaaccagaccatggggcagtacccaaaggaaacgctacgaaagaatacatggagagcttgc

SEQ ID NO: 137779 - DNA, 75 bp, Homo sapiens
actggattgggaaagaccatggcaggattttgagtctgagaagagaaaggtaatatgcaagacacttcgatttgt

SEQ ID NO: 137780 - DNA, 95 bp, Homo sapiens
caaggagatcgaggacgccgagaagtactccttcatggccaccgtcaccaaggcgcccaagaagcatgtgtttgatgatctcagaggctcagtat

SEQ ID NO: 137781 - DNA, 82 bp, Homo sapiens
acgagctacagctataaaagtcactgacatttcagccttatgccagcctggaccatcttggaggcagtgtaggatcatggaa

SEQ ID NO: 137782 - DNA, 101 bp, Homo sapiens
gggacctgcccgcctgcggctgctccggttacagaatgtctgaaggggacagtgtgggagaatccgtccatgggaaaccttcggtggtgtacagatttttc

SEQ ID NO: 137783 - DNA, 98 bp, Homo sapiens
gggccggaggagtcagctgtgtgtccagaacgtgccatggagacgcttaacgcaaatggttatgagccttagagtttctgaactccaagtactgttgg

SEQ ID NO: 137784 - DNA, 100 bp, Homo sapiens
atcgaggcatgggggtccacactgcaatgtttttgtggaacatggtgagactgtggagatgagaaggtggtggacactcgtgatggaatggaaatcgtcc

SEQ ID NO: 137785 - DNA, 75 bp, Homo sapiens
tctcattctccagggatcagtgggttatgtaccgaaggactctaccgtgtcagcgggaataaaactgaccaagac

SEQ ID NO: 137786 - DNA, 123 bp, Homo sapiens
cttctttaactataatcttcatagtagtgtatttatttggcgctgtgttacaggttatcttatgatgaggcttttgctatggctaatgatcccttggaaggcttccatgaagtaaaccttgct

SEQ ID NO: 137787 - DNA, 50 bp, Homo sapiens
acacagtggaacttggtcatggagaaggcttctcgtcagtgcctcgcagg

SEQ ID NO: 137788 - DNA, 50 bp, Homo sapiens
cgccgaggcaccgaggcactcagaggagaagtttccaagggtcacttgtg

SEQ ID NO: 137789 - DNA, 100 bp, Homo sapiens
actctaccaagtctgaacccctgaagggatcaccagaggaagatgatccctatgatcttgaagatgtttctgcacagaaatgagggaaatacaaagaacc

SEQ ID NO: 137790 - DNA, 98 bp, Homo sapiens
acaggccagtggatcggaatggtggagaacttcaaccaggcactcaagatcacctgctggctgatgcctactctggccacgacgggtcccccgagatg

SEQ ID NO: 137791 - DNA, 75 bp, Homo sapiens
cccttatttatccagaagattgatcatcatatgggttgccacagttgtaagggatcttgtggctgtcaggatggc

SEQ ID NO: 137792 - DNA, 95 bp, Homo sapiens
tgctaggggatgatccgcaactgatgaagattctggatgaaattgaagaacataacatcaaaatctatcacttacctgatgcagaatcagatgaa

SEQ ID NO: 137793 - DNA, 98 bp, Homo sapiens
tgtacttctatatctacaagggggtccgcaagggcaatttgcatatttctccaaagaaccatccagaacctgagcagcctgtcttcagacagagagag

SEQ ID NO: 137794 - DNA, 90 bp, Homo sapiens
gccaggagtcatgagcgacagcggcgagcagaactacggcgagcggaaacttgtggtggagaatgttgatgtgttaacacaaatgaggac

SEQ ID NO: 137795 - DNA, 83 bp, Homo sapiens
ggagacttttggggggaaactaggtcgatggtcggcggcgcccggatgggcagctgaggtctcggcgcggaagatggccggcg

SEQ ID NO: 137796 - DNA, 97 bp, Homo sapiens
ccgctcaagcgtgatgaaacagttcctggaaactgccattaacctccagctttttaagcagaaaccaatagagccatggcgactccctctgctgcct

SEQ ID NO: 137797 - DNA, 83 bp, Homo sapiens
ctgggtcagtccgccgctcaccccgcggccgcaccttcccgccttctcagctgcatcttcctcccgtgaggctggccgagctc

SEQ ID NO: 137798 - DNA, 100 bp, Homo sapiens
tatggaaatggaaattaaatgggttccagtggaatttctgtggagccacacgacggagagcatgtgtgtcggatatatgtcagcccaggatgggaaagcc

SEQ ID NO: 137799 - DNA, 89 bp, Homo sapiens
gtggacttgaaagaagctgcagcggaggaaggcgagttttctggatatgccgcagaaggatccgtgccagaagcaagcctgtgagatac

SEQ ID NO: 137800 - DNA, 98 bp, Homo sapiens
agatatgcccttagttggagctttgtctatcttcttccttaggaaaccagttaatttggagtggcccctggagtcagtttcctacaccatccgaggcc

SEQ ID NO: 137801 - DNA, 100 bp, Homo sapiens
cctggatccagatgatgtcttggcagatgttgttgaagataaagacaagtaaacggagttccctctcgaagtccaagattagttgcttctggggatgact

SEQ ID NO: 137802 - DNA, 76 bp, Homo sapiens
actctcgccaaagccgctctgggcaagtttcagaagctatctcctgagcagtgtgtaattctctcctggctgtttg

SEQ ID NO: 137803 - DNA, 95 bp, Homo sapiens
cgggagtgcagaaaccaacaagtgctgctacccccgtatgatgatgccactgtgaatggtgctgccaaggagccaccgccaccttacgtgtctgc

SEQ ID NO: 137804 - DNA, 75 bp, Homo sapiens
ctcgcccgtggtcgtccgcaccgacgaggatgccaccttctgggtgaaccctcagttcaagatccggctggatga

SEQ ID NO: 137805 - DNA, 100 bp, Homo sapiens
ccccagaagcagatgctgtcgtgcttcctgtatagctgcagaactgagaacatttcaggataggaataggccaagtgctgagaagatgagtcttaggatt

SEQ ID NO: 137806 - DNA, 75 bp, Homo sapiens
agatgggatctttccggatcaatccagatggcagccagtcagtggtggagatttatgtgatcagtttggctgaac

SEQ ID NO: 137807 - DNA, 82 bp, Homo sapiens
agagccctttgcaggatgcagaagaagccaaaaacattctggagtctctggtaagaagagtgaaagcaaagaagccaagaag

SEQ ID NO: 137808 - DNA, 101 bp, Homo sapiens
agcccagacactgagagccgctttcatcaaggtactaggttttgacaagcttgcatcatgcgtgagtataagctagtcgttcttggctcaggaggcgttgg

SEQ ID NO: 137809 - DNA, 83 bp, Homo sapiens
aagcaccaccaccaccacccccagctactacacaaaactaccaggaccacatggtgacaatgcatgatgtgcttgatgctcag

SEQ ID NO: 137810 - DNA, 50 bp, Homo sapiens
cacgccatgcccattgggagaatagcagagacggggtttcaccacgttgg

SEQ ID NO: 137811 - DNA, 100 bp, Homo sapiens
gaagattcaaacaaccaaccctgatttcctgcttctccttttcatgagtgttcctgtggtctctgcacctcctttctgagcccagtttcctccaattgca

SEQ ID NO: 137812 - DNA, 87 bp, Homo sapiens
tatgtctgcggaagtccccgaggcagcctccgcggaggagcagaagaaatgcactcggtgatggaaagagagccactattctgaaga

SEQ ID NO: 137813 - DNA, 50 bp, Homo sapiens
ctcggggactcccccaaagacaagggagatacttcaggggattaccggaa

SEQ ID NO: 137814 - DNA, 82 bp, Homo sapiens
agaatttcctgcgctgttccacctcattcaacttcagcactggcttctctggactttgcacacctccaggagaagaacccag

SEQ ID NO: 137815 - DNA, 75 bp, Homo sapiens
gtcgcgataatattattgacctcttcctttatcagccacaataagaaaggaggtattcgaacttctggaaatggg

SEQ ID NO: 137816 - DNA, 74 bp, Homo sapiens
agcagatcctggtcctcgatccgcccacagacctcaaattcaaaggcattgtttccaagtcgtacgagtgccgt

SEQ ID NO: 137817 - DNA, 85 bp, Homo sapiens
aatttaaactcagcaaagtctggcgtgatcaacattttgttaagattcaggtcaaagacagcagcaccagatgaagacagtacaa

SEQ ID NO: 137818 - DNA, 106 bp, Homo sapiens
attgaagctcaagcagagcttacagtgcaaggttttggcttgtggttaacgggcatgttgataaacatccattcagatcatatcctaaggaatctcagaaaaccag

SEQ ID NO: 137819 - DNA, 74 bp, Homo sapiens
agaagataaagaccatccaacaacttctactctgacatcaagcaaactttcagccccccaaacggcctttcaaa

SEQ ID NO: 137820 - DNA, 83 bp, Homo sapiens
tcgacctgctaacagaactggaccttttcggtggtgttcccactgatgaagagcaggcgactgggttggagagggagatcatg

SEQ ID NO: 137821 - DNA, 96 bp, Homo sapiens
cgaaggccccacggaggaacccttttccagtggcggcggcggcagtgtgcaggggcagagcagtggtggatctccttacgtagcagccaaaataaa

SEQ ID NO: 137822 - DNA, 98 bp, Homo sapiens
ctaacgttctgcaccgtgacctcaagccttccaacctgctgctcaacaccacctgtgatctcaagttcacctaatgttgccaaaaaatttcatgttgg

SEQ ID NO: 137823 - DNA, 82 bp, Homo sapiens
gcccggaggccatgggcacgccttggacagtcgagttgaactgaaaagattatgtgaaattttcacaagaatgtttgctgac

SEQ ID NO: 137824 - DNA, 74 bp, Homo sapiens
ccaggtggcctccatgaaccagaagaggtattctctgaaaccaaatgaccaaatcttggctgaagacaaacaca

SEQ ID NO: 137825 - DNA, 100 bp, Homo sapiens
acaccccaacaggccttggatactccagctgtcgtcacctgcttcttggccgtgcctgttattaaaaaggtgcaccctgaagaccacaaattaaataaat

SEQ ID NO: 137826 - DNA, 80 bp, Homo sapiens
tgtatctaccgtcatcgtaaagattatgacaaatcacaacttgtagagagcttactcacatagcatattggtatatcaaa

SEQ ID NO: 137827 - DNA, 82 bp, Homo sapiens
aagaaggtggcactggccaagaagctcctggcaaaactgcgctttctggctgaggagctggcagagaggctgatgacatcgt

SEQ ID NO: 137828 - DNA, 82 bp, Homo sapiens
aggatagcacagtgcctcaatttgaagctccttctccatcacacagctgtcgcctggttgggcccggaaatgggacgtcgcg

SEQ ID NO: 137829 - DNA, 100 bp, Homo sapiens
cttctttggcaagtggacattttactggctcaatttaaggaagaaatctctaaacgttttaaatcacatactgaccaacttgtgttgatatttgctggaa

SEQ ID NO: 137830 - DNA, 75 bp, Homo sapiens
gacttatacttctcaaatcttaatttcctaaaggtcttcaaggtcacaagggggccatgggcatgcctggtgccc

SEQ ID NO: 137831 - DNA, 82 bp, Homo sapiens
gtctatatatttccccattcactgcccgagcgggaagaagttccgcagcaagccgcagctggcgcgctacctgggcggctcc

SEQ ID NO: 137832 - DNA, 83 bp, Homo sapiens
cgcaaccccagatccatttacactttacagtcttattagtaggtaagaaacagctgctcctccacctccaccccagccccatg

SEQ ID NO: 137833 - DNA, 100 bp, Homo sapiens
gcggcctgtgctcattgggaacgagtccatctcaggttttgcgcacagctgcttccagtatgccatccagaagaaatggccgctgtacatgagcaccaag

SEQ ID NO: 137834 - DNA, 101 bp, Homo sapiens
gtttgcagaatctgtcacagagggagatgtcaggtgggagaaaggctataaactgtacttcctgctgtctcataccagtttccctggagatccaggtattg

SEQ ID NO: 137835 - DNA, 100 bp, Homo sapiens
caagatctgtgctgaccacaggaattggatctactagtgcaggaccgccgggagagcctgcccacctccccaccctggacgccgggcgcgtcccggcccc

SEQ ID NO: 137836 - DNA, 100 bp, Homo sapiens
cattgatgccccaggacacagagactttatcaaaaacatgattacagggacatctcagctggggtgaagaatggggcatgggtggctacgtaaagatggc

SEQ ID NO: 137837 - DNA, 99 bp, Homo sapiens
aacaggaaggcatgcatgtgacacctcaggaaattatcagttcattgcctagcatagtaaatgacaaatatggaaggaaggtcctattgtacttactaa

SEQ ID NO: 137838 - DNA, 100 bp, Homo sapiens
ccgccgtccccagccctgcctctccctgggctctgattccaagaaaggtggtgtatgaccagctcaatcagatcctggtgtcagatgcagccctcccaga

SEQ ID NO: 137839 - DNA, 73 bp, Homo sapiens
cagcatttcatccctcgtcgaaaggattggattggcatctttagagtgtttatacgggagctgatctccaatg

SEQ ID NO: 137840 - DNA, 100 bp, Homo sapiens
gcggaggcggaggcggccggcccggtcaagagaatccatcccattaaatgacctgaagtcagaagtatcaccacggatttcagcagaggacctgattgac

SEQ ID NO: 137841 - DNA, 113 bp, Homo sapiens
tcgagctgtgcgggcgggcggtgagcgcccatatgggggttctggagagcggggtgtgggcaaacggggattcagcgtccgatcctttggaacagggactcacgtgaagcttc

SEQ ID NO: 137842 - DNA, 100 bp, Homo sapiens
cagaaagtgaaatgagaacatcacatgaagccagagaccttctctcaccatgccccataggaatctgacaggaagctgcaacgttaattgtggttgtaaa

SEQ ID NO: 137843 - DNA, 74 bp, Homo sapiens
aggccttccagctgtttgaccgaacagacatcgctattgcggttccgaggcagtgggaagagatgcggcccctg

SEQ ID NO: 137844 - DNA, 100 bp, Homo sapiens
cagactctcaacgatgaggttccaaaataccgtgaccagattcctagcccagccctactgccaataaagggaaaataagagatgctcatcgacgaattat

SEQ ID NO: 137845 - DNA, 75 bp, Homo sapiens
gacaacatgtcacccgcgctccaagacctgtcgcaacccggaatgtttacccttgcggaagttgcatcacttaat

SEQ ID NO: 137846 - DNA, 82 bp, Homo sapiens
agaaggttaagctggctgtcctgaaatattataaggtatggcccatctcctgtacgcttggagcgacctttggctacgtggc

SEQ ID NO: 137847 - DNA, 82 bp, Homo sapiens
tggagtccgaatacctggattacctttttgaagatacttggcatatcgaaattttatgattgacacgtatcgtctaaacccc

SEQ ID NO: 137848 - DNA, 100 bp, Homo sapiens
agaaaaatgcacaacagagggacaacaaaagcctcctacaagagtcctaccaaaagagcaatttacagcaatgagggatttatacatgaaaaatggacaa

SEQ ID NO: 137849 - DNA, 90 bp, Homo sapiens
gcaattgtgatgagatattctgctgagtggaagaccattgccctcttgaacatttaccgtaaccctcaaaactcttcccagtctgctgac

SEQ ID NO: 137850 - DNA, 83 bp, Homo sapiens
gtaacagcagcgccgtcccgtccgacagccaggcccgggagaagtagacgaagttcctgatggagctgtaaagccacccacaa

SEQ ID NO: 137851 - DNA, 83 bp, Homo sapiens
tcaccttcacgatgtttcccttggtcaaaagcgcactaaatcgtctccaagaatccaggagtcctccagctgagaacgaggtg

SEQ ID NO: 137852 - DNA, 116 bp, Homo sapiens
accttggcaccccagcggctgctcttcgaagtgaccagcgctaacgttgtcaaggacccgccctccaagtatgtgcaggtgaaatttgtctgcattcggacccaatcaaacaggaa

SEQ ID NO: 137853 - DNA, 75 bp, Homo sapiens
cggggttcctcgaagcagttttcaggacttaaggctctgggatgggctcgggatgagtttgaaggcctcttcaag

SEQ ID NO: 137854 - DNA, 100 bp, Homo sapiens
cacagtacactgaaaaggagccagcagctagaggaaatgacagagcttgaatctcctaaatgtaaaaggcaggaaaatgagcagctactggatcaaaatc

SEQ ID NO: 137855 - DNA, 97 bp, Homo sapiens
ttgcagatagtctctgcccatcaacctctcttctgtatcttgggcgaacagccgctgtgagcgcttgccttgccatgagaatcgggagtgctccaag

SEQ ID NO: 137856 - DNA, 75 bp, Homo sapiens
ttcaggctggaatgaacctggaagctacaaaagaccccacagctgtagagagagcaaacttgttaaacatggcta

SEQ ID NO: 137857 - DNA, 75 bp, Homo sapiens
ttgagtggccagtaagagaaggctgtcaccaatacagcttaacactgtgcaaccatattgcttctgggaaaaaat

SEQ ID NO: 137858 - DNA, 100 bp, Homo sapiens
ttttaggcacttttgtggtacagagagcagcacttgaggcatgtcacaagggctggggcgtcagcgtcgtggttggagtagctgcttcaggtgaagaaat

SEQ ID NO: 137859 - DNA, 75 bp, Homo sapiens
aactttgcacttatggcctctctgggtttcgcgtctcgcatcttcccagaccctcgggcgcgatgtggaggagct

SEQ ID NO: 137860 - DNA, 100 bp, Homo sapiens
gaaggaccctgatgaccacactgtgtgccacctgctctttgccaaccagccccaggaccaaattaccatcacagggtacgaaaagaacacagaagctgcc

SEQ ID NO: 137861 - DNA, 100 bp, Homo sapiens
tggtgggccgcgtcgaagacatggaccagggctacggaggatccacacacatcctcaccccacagaaactgctggacacactgaagaaactgaataaaac

SEQ ID NO: 137862 - DNA, 100 bp, Homo sapiens
tgctcccattcggccccggaacagcaggcgcgcacgcggggctaactgccaggcggccaaaggacagtatgttcacacgggttcttctggggctgcttcc

SEQ ID NO: 137863 - DNA, 83 bp, Homo sapiens
atcgatagttttagagcctatctattggaattcctcgaactccaagtcaaaatgcagatcttcgtgaaaacccttaccggcaa

SEQ ID NO: 137864 - DNA, 75 bp, Homo sapiens
gttgacagagctttgatagtcgtaccatatgcagaagcctcagcaggtagagcagatggaaataccacctgtaga

SEQ ID NO: 137865 - DNA, 100 bp, Homo sapiens
atgacatcagacaagagagaaccgcctggaaggcttggccttcgtgcctctgcagatctggtccaaagtcctggccatctcaggaatcttcaccatgggc

SEQ ID NO: 137866 - DNA, 50 bp, Homo sapiens
attagtgatactttctctgaaccagttgcagaggaaagtggtcgcttatg

SEQ ID NO: 137867 - DNA, 98 bp, Homo sapiens
ccaaacccctgaagccgccatgcgacctctccatgcagtcagtggaagtggcgattcctgcaagctggacaaatccctcaggcaaatatcatattggc

SEQ ID NO: 137868 - DNA, 98 bp, Homo sapiens
ttggaacgcagggcctgtttgccagaggacacagcattgttggttttgccatgtactattttacctatgacccgtggattggcaagttattgtatctt

SEQ ID NO: 137869 - DNA, 100 bp, Homo sapiens
ctttgccctggcaaacactggaatcctactttttctgtaaactacgaactgggagttctgaagaatgggtaaagactttcgttactatttccagcatccc

SEQ ID NO: 137870 - DNA, 50 bp, Homo sapiens
gtactggaaccgctttcgagacggtcgacatgttaaaacgggtcagttgg

SEQ ID NO: 137871 - DNA, 100 bp, Homo sapiens
ttctaggcaaggaccacacgcaggtggttaaacccatccagagtaatggctgcggccttacccaggaccctgggggagttgcagctgtatagaatattac

SEQ ID NO: 137872 - DNA, 157 bp, Homo sapiens
gagattgctatggctgttactgcttgggagaagggcctagaaagtttgcccccgctgcggccccagcagaatccagtccctgtgaagccagaggagatggactggtctgagctatacccagagttcttcgctccactcactcaaaatcagagccacg

SEQ ID NO: 137873 - DNA, 83 bp, Homo sapiens
caggatgggggacaggaggctgcggggcctcagattcgtattttacatggagaagtgaacaaagtgaaactggatcagaaaag

SEQ ID NO: 137874 - DNA, 75 bp, Homo sapiens
gaagaattcatgctcatccgggcagtgctcggaatgtgaccaggcagggagcagtgacatggaagcagatatggc

SEQ ID NO: 137875 - DNA, 75 bp, Homo sapiens
tctgagggagatggtgacaagctcaaggcctgcgaggttatgaagacagtatggagtttccagaccatagtagac

SEQ ID NO: 137876 - DNA, 83 bp, Homo sapiens
ccgggttccccggctcgcggggcccggcgaagggcagcagccccgggctcagctcctggttcccagtatggcacaatgaccag

SEQ ID NO: 137877 - DNA, 100 bp, Homo sapiens
cttggatcccattcacctgaggcacccgaagaagagaccatccatatttccagtgtttctgaaagatctatccagcactccgatggccagcaacaacacc

SEQ ID NO: 137878 - DNA, 84 bp, Homo sapiens
gacatttaattttagggtcctttatatagaagggagagtaggtggccactaacacggacaccagccgaaatgccggaaatgcgg

SEQ ID NO: 137879 - DNA, 83 bp, Homo sapiens
atccagccttagcaaaccagaggtggacacctgcgcaggtgtgtgccctccggcccctgaagcatggccagcagcggcatggc

SEQ ID NO: 137880 - DNA, 75 bp, Homo sapiens
cagaagtctacctttgtggggcttacaggttatcaatactctggctgaccatcatcatcgtgggactgactttgg

SEQ ID NO: 137881 - DNA, 82 bp, Homo sapiens
agccgatccagcctgcggagcctgtggggcagaatatggttgagccccttatacccacgaattgctgatggaacccacaaat

SEQ ID NO: 137882 - DNA, 100 bp, Homo sapiens
gagtcaaatgttcagccagtatcaacaccagtaacagtgtgtggagatatccatggacaggaccgctcaggaagtggcagcgaagaagactgagccccga

SEQ ID NO: 137883 - DNA, 111 bp, Homo sapiens
caggtacccgggtaggctcctccctgcgacagaccttcagcttcctctcgggcatgaccggaaaggccaagattgacgagatgcctgaggctgccgtgaaatcaacagcca

SEQ ID NO: 137884 - DNA, 104 bp, Homo sapiens
gacgctctcagctctcggcgcacggcccagacaatgcagatcttcgtgaagactctgactggtaagaccatcaccctcgaggttgagcccagtgacaccatcga

SEQ ID NO: 137885 - DNA, 131 bp, Homo sapiens
ccgctgttgtgacaagaaaagctgtggcaaccgaaatgagactccctcagatccagtgataattgacagggtgcaacaccggaggatttcagcaacctcccacctgaacaaagaaggaaaaagctgcagca

SEQ ID NO: 137886 - DNA, 75 bp, Homo sapiens
cggggacctgaagaagatgaacaagcgccaggtgcctggaatacttattaagaaacgatgcaaatccagggatcc

SEQ ID NO: 137887 - DNA, 104 bp, Homo sapiens
gtggccaactgctgtatccgcatcgcccttcctgcccctcgaggctcaggaactggtacgaatgtgaagaatcttttacgaccctaaacgtagacattagaaat

SEQ ID NO: 137888 - DNA, 100 bp, Homo sapiens
aaaaagagatgccaggcagatttataaccctcccagtgggaaatatagcagcaatttgggcaactttaattatggcctgaatatgcattggctgcgaaaa

SEQ ID NO: 137889 - DNA, 83 bp, Homo sapiens
cttacgtctgcggaagtgcagctgcctcagttcttagcgcagaattcagaaggagctggcggacatcactttagaccctccac

SEQ ID NO: 137890 - DNA, 82 bp, Homo sapiens
tgcacttcgtgagctccgacaaaggaagagaggcagtacgtccgagacacagtcgtgggcaccatgggcctgaaggccacgg

SEQ ID NO: 137891 - DNA, 135 bp, Homo sapiens
aggcagagtggaaaaaagagaggatttgcttttgtaacttttgatgatcatgatacagttgataaaattgttgggacagatatggcttttctaaagactgctttggaaatggcaagaacagcagtatattcctta

SEQ ID NO: 137892 - DNA, 100 bp, Homo sapiens
ggagccggagctttggaacgaggagtggcgcccattaagcgtcataaacgcaaggactcagaaccccgcaccaaatgcctcctgaacaatgccgacctcg

SEQ ID NO: 137893 - DNA, 100 bp, Homo sapiens
gtttttagtccattgactatgcagcctaatggcttcaacggaccacaccaaaatgccatctcaaatggaacacgccatggaaaccatgatgtttacattt

SEQ ID NO: 137894 - DNA, 73 bp, Homo sapiens
ttaagaactttaagactttgcagctggataacaactttgaggcagtcgatgatgtgaagaaaggttacatcaa

SEQ ID NO: 137895 - DNA, 100 bp, Homo sapiens
cattctcacaggactaatagctggcaaatttctgttccatcagcgtttgtttggaggtcgagttgtgtcgtgttagcagtcaagagaagctgggcctgac

SEQ ID NO: 137896 - DNA, 75 bp, Homo sapiens
ccatgggtgccgttaatcccctcctctcccaagctgagagcagccacacaggaatttgctgacacaatatcttcc

SEQ ID NO: 137897 - DNA, 100 bp, Homo sapiens
ctgtctcctgcaagaactggctcaagaaatttgcctcgaaaaccaaaacactatggctatgcatcctccaacgtcagccccgccctgccgctccccacgg

SEQ ID NO: 137898 - DNA, 50 bp, Homo sapiens
tgttgctggacccctggcaggaattcaaagaagctttttcactatttgac

SEQ ID NO: 137899 - DNA, 100 bp, Homo sapiens
agaatcagcaaagaggaggccatgcgctggttccagcagaaggtccccagtctatgtgaggatctcctgtcttctgttgaccagccactgaaaattgcca

SEQ ID NO: 137900 - DNA, 100 bp, Homo sapiens
aaaattttatgagctggagttaaatatccaaggccacaaacagttaacagattgtatctcggaatttttgaagaccccatatcatgtgaacctcctcctg

SEQ ID NO: 137901 - DNA, 83 bp, Homo sapiens
gttggattattggagaacatggtgattctagtggtgtgggcagaagaaaaagctagtgatcaacagtggcaatggagctgtgg

SEQ ID NO: 137902 - DNA, 100 bp, Homo sapiens
ttcaagcgaaaacatgaccgctgagcccatgagatgccttcaattaagttgcagagttctgatggagagatatttgaagttgatgtggaaattgccaaac

SEQ ID NO: 137903 - DNA, 100 bp, Homo sapiens
ttccctcatggctggtcgtctccagactccacactcctagcaagaggcatacaccatacatggtacagccagagtaccgaatctatgagatgaacaagag

SEQ ID NO: 137904 - DNA, 100 bp, Homo sapiens
acagtcttcaagagcccacggacaccacctcaacggtacaaatcaagacctaccagctcctacattccatctttcagtatccaaatccagctgtttccta

SEQ ID NO: 137905 - DNA, 75 bp, Homo sapiens
catttcgttagctttctggattatatcaatgactgcaagcacctattatgatattaaaaggagaatgcctcctgg

SEQ ID NO: 137906 - DNA, 100 bp, Homo sapiens
gagatcttatacaaaaaggagaaggaagaagcagatcttcttttggagcagcagagactgaaaccagcctggacaccaagtctgtgtcagaaggccacct

SEQ ID NO: 137907 - DNA, 51 bp, Homo sapiens
caaaaatagtgatagctttgataatataaccccgttttcacacgaatggcc

SEQ ID NO: 137908 - DNA, 100 bp, Homo sapiens
accagaggtggggactgttgttggaggaacactttccaggtactggtcttcttggacattaatctttgaatacttgctgactgctaagaaatgaccagag

SEQ ID NO: 137909 - DNA, 110 bp, Homo sapiens
cgtccgccttctctgtcagctctttccccgtcagcatcccagccgtgctcacggcctccggtgtggctgtctctgatggtgtcatcaaggtgttcaacgacatgaaggtg

SEQ ID NO: 137910 - DNA, 75 bp, Homo sapiens
tgtcccaggttttgctcttctagaatgtgaaggctgtgtctgagactcctgcagtgccaccagtttcagaagatg

SEQ ID NO: 137911 - DNA, 98 bp, Homo sapiens
gagccgtgagatgcgtggtccaccatcggtgacctcaccgcctcggttcgccctcagccgccccgtcaccttcaggccattcagaggaggaaagagag

SEQ ID NO: 137912 - DNA, 75 bp, Homo sapiens
agtgggttcgttgtatttgtgacatctgtgggtttaatccaacagaagaaggatgtacagttacccagcacgtgt

SEQ ID NO: 137913 - DNA, 108 bp, Homo sapiens
gttcacataagaagttcttcgatgtatctaaacttggcaccaagtatggaactttatattgctgttggaatatctggagccatccaacatttagctgggatgaaagac

SEQ ID NO: 137914 - DNA, 90 bp, Homo sapiens
ggatcccccagttccaaagtgtcttaaagcccctcatatggaaaatttgaaatgcagaggggaaacagtagcaaaggagatcagtgaagc

SEQ ID NO: 137915 - DNA, 82 bp, Homo sapiens
tggacagtggagaaggcccagccaatgaagatgaagacataggagtggcggagcgagggctactgcacagctagcagagtcg

SEQ ID NO: 137916 - DNA, 100 bp, Homo sapiens
ccattggttcgacggccttgccctgctccacagcttcaccatcagagacggtcctggcattgatgtgcctgctccagacatgagcacaggtgagcgggag

SEQ ID NO: 137917 - DNA, 75 bp, Homo sapiens
cgccaagactggagaggaagcgactgcgggtggaaactaattctaagccagactgctggagatcaccctgttcta

SEQ ID NO: 137918 - DNA, 90 bp, Homo sapiens
gccattacgttcccaggaatcaagaatgatggtcgactgaggttgagccgtcagggcatcatcttcaagaatagcaagacaggcaaagtg

SEQ ID NO: 137919 - DNA, 100 bp, Homo sapiens
ctagatttggatcattgcccaaagttgcaccttttcaggctgcctttcgagctcaggggcccctggctatgctgcagcactttgatactatctacagcat

SEQ ID NO: 137920 - DNA, 95 bp, Homo sapiens
tcatgctgtgtgctggacgctggacagggggcaaaagcacctgctcgagcttgcatggagatggtcccctgcggctgctgctgctgccctctatc

SEQ ID NO: 137921 - DNA, 82 bp, Homo sapiens
ttggtccccagcgcagtgaagtggtgagcctttttgtcactgtttgcaggcctttcagatatatccatctcacaagacatcc

SEQ ID NO: 137922 - DNA, 100 bp, Homo sapiens
ggacgccactacagttcatcaacatcaactacgtccctctgaaggccccctcttctctcctggaggtcagccggccccttgtggctctcaggccagctgg

SEQ ID NO: 137923 - DNA, 100 bp, Homo sapiens
ttttatagaagtacgtccaggaatagaagtgacctgctttttcgcaagagcatctttccttgaagaagtacattattgacattgtggttgaaagtacagc

SEQ ID NO: 137924 - DNA, 82 bp, Homo sapiens
cacagccacaagttacaatgcaacagtttcgtgtggctgatcaaagaaagaaggcatacgcagatttctacagaaactacga

SEQ ID NO: 137925 - DNA, 50 bp, Homo sapiens
aaaggcggaaatattggggctaagtggatgattgacgacacaaccaaaga

SEQ ID NO: 137926 - DNA, 90 bp, Homo sapiens
ccggttccccggcccacagtgggggtgtgcaaacccgagagaactgggtatccaattggtttggcaacaaacgaatcaggtacaagaaga

SEQ ID NO: 137927 - DNA, 100 bp, Homo sapiens
gaaacatggcggcggcgggtgttgtgagcgggaaggggacaagatgccaactggcaagcagctagctgacattggctataagaccttctctacctccatg

SEQ ID NO: 137928 - DNA, 75 bp, Homo sapiens
gtattttcttgccaatcctgcgcactgggttccgacaggtggtacagaatggcaacatcacagagctcctcctga

SEQ ID NO: 137929 - DNA, 50 bp, Homo sapiens
gcggcggcgggtgttgtgagcgggaaggggacagagactgagacacttgc

SEQ ID NO: 137930 - DNA, 100 bp, Homo sapiens
gagattccagtcgctgctcctgcttctcgggctgctggtgctgtgcgcgaggctcctcactgcagcgaagggtaagaatgattgatgttggctgatattg

SEQ ID NO: 137931 - DNA, 50 bp, Homo sapiens
agtttctaggaaaggccggacaccagatggtcatcatgggccagtgctac

SEQ ID NO: 137932 - DNA, 75 bp, Homo sapiens
aggagctgcttcccaataaggaaacagcttctaaccctcctttatgtgactcagagaaaggagacctcattccaa

SEQ ID NO: 137933 - DNA, 100 bp, Homo sapiens
aactcctatgagctcctctctggcagccaaaatgaagtttaatccctttgtgacttccgaccgaagcaagaatcgcaaaaggcatttcaatgcaccttcc

SEQ ID NO: 137934 - DNA, 96 bp, Homo sapiens
aataatatttatggagcatatattatggaacacagtcagaatggcggcagtggagcatcgtcattcttcaggattgccctactggccctacctcac

SEQ ID NO: 137935 - DNA, 100 bp, Homo sapiens
gattgggaagtggttcctgaacctgttgccagatggtgcaatgttcaaagtactcaagatgaatttgaggttctgtggagatttgatgggaataaaccag

SEQ ID NO: 137936 - DNA, 98 bp, Homo sapiens
tgctcttccatccgcctttgatcgtcttcctcttcagccatccaggacctgaaggagaagaaggagaaggtggaggagaaggcaagccggaaagagcg

SEQ ID NO: 137937 - DNA, 90 bp, Homo sapiens
acagccgcggcggcagcagcagtgagaggggttcggtccgagcccggtgggaggctcccggagcgcagcctgggcccagcccaccccgcg

SEQ ID NO: 137938 - DNA, 90 bp, Homo sapiens
atggcacagaaatggtatcaagaaaccccgatcacaaagatacgaatctcttaagggggagcctgatcaggtgtacgaggggatcacctt

SEQ ID NO: 137939 - DNA, 92 bp, Homo sapiens
cagcccccgaaggccctatcaggacatggagtatgaaagacgattaaaaggagcccaagccccatctcatcctagcacaccctcctccactg

SEQ ID NO: 137940 - DNA, 83 bp, Homo sapiens
gttcccccaaatgtctgactctgactctcggactgagaaacgcaagcggacaaggcaaaatctcagcaagttcggacctctag

SEQ ID NO: 137941 - DNA, 100 bp, Homo sapiens
tgttccttccgctagtgatcctttgcaccctgcttggagacggacttgcttccgaaaagagtagttgaacagctacggaagaacctgatagtaaagcaag

SEQ ID NO: 137942 - DNA, 101 bp, Homo sapiens
ggcacaggccgggagaagcctgctccaggacacgcgcgccccgagcctgggaggcatgctgaagccaggcggccggcaggatgagtgtgaaagaggcaggc

SEQ ID NO: 137943 - DNA, 98 bp, Homo sapiens
gacagtgcccagggctctgatgtgtccctcacagcttgtaaagcaaaccagtccagctacgggggcccagccagccagcagctgagtgggggttacgg

SEQ ID NO: 137944 - DNA, 90 bp, Homo sapiens
gccatgccgggcactattactgctacgtgaagatcgataaagaattggctagtggtgaatactttttgaaggcaaatcagaagaagcggc

SEQ ID NO: 137945 - DNA, 75 bp, Homo sapiens
gcagccgccgggaccctggcccctgtcgaggcatacccagagtatcttatcacttaccagatcatgaagccagaa

SEQ ID NO: 137946 - DNA, 75 bp, Homo sapiens
catccacaggaggggcaggaaattctttgaagccatccaacatattctttacaatggatgatgtggtcaaggttg

SEQ ID NO: 137947 - DNA, 100 bp, Homo sapiens
tatctatggagaaaatcattcaagtggccaagacctctgctgcacagggtcaaatagaaattgacgatcaggtggaaggactccaatatctagcttctcg

SEQ ID NO: 137948 - DNA, 100 bp, Homo sapiens
cctagcttccattcatcagcaaacacatcggatcgatgctacgctaacctatcgggttctctctccgcgcgttcaggttacctacctgggcaaagtctcc

SEQ ID NO: 137949 - DNA, 90 bp, Homo sapiens
aagaagccaaagagaaaggtacctgggttcaactaaagcgccagatgcagacaatctctttgaacatgaattgggggctctcaatatggc

SEQ ID NO: 137950 - DNA, 90 bp, Homo sapiens
ctcggcaggaagtgggaccggtgtctggcggatgcggtcgtgaagatagggtgtcaaattgagaaccaggtagatccccaccacctacag

SEQ ID NO: 137951 - DNA, 82 bp, Homo sapiens
gtcagctgcaaatattctcttctgttctacagacctctctcctcttcctgctcatggtttgtctttgtcagcgccacgtgag

SEQ ID NO: 137952 - DNA, 100 bp, Homo sapiens
ttctccgccgcggcactgatccccacaggtatctctggagacaaagtagagatagaccctgttacgaatcagaaagccagcactaagttttggattaagc

SEQ ID NO: 137953 - DNA, 74 bp, Homo sapiens
gacgacattcgaaggatggaagaagagacgaagagacagctggatgaagaatgtatcctgtcaggtataatgtc

SEQ ID NO: 137954 - DNA, 101 bp, Homo sapiens
cctgcatctgcccctcggccttccgacgtgggcggtgggccccagccccacagaccagcccagcattcaggagtacgagagggcctccaaagtggaccagt

SEQ ID NO: 137955 - DNA, 82 bp, Homo sapiens
ctggttaggaggcacagggcgtcggacctgcacgagctgtctgaaggatatggccctgaagccacatgagcggaaggagaag

SEQ ID NO: 137956 - DNA, 74 bp, Homo sapiens
aaaacagagttcctacatgtgaagagggagaagcagtgcgtctatccagacaattacccatgtacttatcaaaa

SEQ ID NO: 137957 - DNA, 100 bp, Homo sapiens
ggaaaccgatctgcccgttgtgtttgtgaaacagagaaagataggcggccatggtccaaccttgaagtctggagttgatcaaggaacctgtctccacaaa

SEQ ID NO: 137958 - DNA, 100 bp, Homo sapiens
accagcattctagaagctgaaagaggagaagttcttggaagactaagaagtccaacattcgggacttgccatgaggtgttgaagccttgtttcactgagt

SEQ ID NO: 137959 - DNA, 90 bp, Homo sapiens
ccaaagtgctgggattgcaggggctgcatagagcctggacctgggcactggggtgagctgagccggacaccagtcccatctaaaccccag

SEQ ID NO: 137960 - DNA, 82 bp, Homo sapiens
gtaaatctgtctgcagcccagacactgagagccgctttcatcaagatggatggtgacagttctacaacagatgcttctcaac

SEQ ID NO: 137961 - DNA, 101 bp, Homo sapiens
cgcttcacggaggcaatagctagccggtttcatatacactggagaagtcgtacatcgaatgctaacagccacacagtacatagcacctttaatggcaaatt

SEQ ID NO: 137962 - DNA, 82 bp, Homo sapiens
gggcacctccgagcgcaaggacagcgcgaggtccgcgcagcccagcgcagccatgttttaaaatcaaagatgggaaaatcgg

SEQ ID NO: 137963 - DNA, 100 bp, Homo sapiens
cgcgccggcgctcccttgtcacgcctcgggaagcgcgcacctgccaagcagattcaaccctatgaaaagataaaggccaggggcttgcctgataatatat

SEQ ID NO: 137964 - DNA, 75 bp, Homo sapiens
caaactcacacctcccgggaggagctgtgctggcgccgggtcccgcggggaaaaacgtgcgcatcgaccccagta

SEQ ID NO: 137965 - DNA, 100 bp, Homo sapiens
ctccggggacccttccgtatctgcctaggcattttgctgtctcctcctaatacgaagcgattattggaagccatggagacatgtaaccactccctcaaaa

SEQ ID NO: 137966 - DNA, 74 bp, Homo sapiens
gccagtatgaatctctgcccgcaacacatatcaggtcttgtccaataagcatgtggctcctgatcatcttttgc

SEQ ID NO: 137967 - DNA, 75 bp, Homo sapiens
aaacaattgacagaagagctccagaatgtgaaacaaattatgatgtgttccatgtatggcatatgcaaagtgaag

SEQ ID NO: 137968 - DNA, 101 bp, Homo sapiens
agtgggggaggagcgttccttgtcctccctctgcacaagatctttaatctcatgaagtacgacagctacagccgcttcttaaagtctgacttgtttttaaa

SEQ ID NO: 137969 - DNA, 100 bp, Homo sapiens
gttgaagttgttaaatttttgctggaagcctgcaaagtaaaccctttccccaaggacagggacaggcattagagcccaaacaggatgctttccaaggcca

SEQ ID NO: 137970 - DNA, 50 bp, Homo sapiens
agaaaataatcgcagatacgtgcaaaaagttgtatcacggactgattcac

SEQ ID NO: 137971 - DNA, 83 bp, Homo sapiens
ctttccgggagactggagtcgaaggccgtgagaatcctgcaatgataaggcgaagttgagaggccctttgccctactctggtc

SEQ ID NO: 137972 - DNA, 50 bp, Homo sapiens
aaggctcaacgagaacaagctatcagatacctcggatctgcattttcaag

SEQ ID NO: 137973 - DNA, 90 bp, Homo sapiens
caagttcttaattattcagaatgctgcggttttccaaggtatgttaagctactgcgacagatacagcgaaggcataaaacatgtcctaca

SEQ ID NO: 137974 - DNA, 50 bp, Homo sapiens
taggggggttcaaaagcatcaagtttgttgcatattctaaggacccagac

SEQ ID NO: 137975 - DNA, 76 bp, Homo sapiens
caaagaagaaactgcaacaatggccaagctgacagaatccatgaatatcagttttagagaatgtggcgtggagaaa

SEQ ID NO: 137976 - DNA, 100 bp, Homo sapiens
cttcaccacacctgccttagttgtggaaaaggatgccgtttttatcatatcagtgctttcatgccttaaaaattaagaaaaattatctacctctatgtgc

SEQ ID NO: 137977 - DNA, 80 bp, Homo sapiens
agcatggcatttcagtcactggtttgcagagtccaggcaaatgttctgaaaaagactctgcatgggaatggcctgcctta

SEQ ID NO: 137978 - DNA, 75 bp, Homo sapiens
cgtagggagccgtgggcgctcggtgcccgggccgggcaggtggagggaagctgtcacagcccgcaagaaactgag

SEQ ID NO: 137979 - DNA, 82 bp, Homo sapiens
ataacttttcaagttctgaactgggaggtgactttgagttcatggatgatgccagtggctatggaccgccccctgcaggaag

SEQ ID NO: 137980 - DNA, 83 bp, Homo sapiens
gtttaaacagccaaaacagttcattcatattcagcgtaactaaatgaccatggaatctggagccgagaaccagcagagtggag

SEQ ID NO: 137981 - DNA, 50 bp, Homo sapiens
gtcaatcagagcgtcctgtgcgatggcaggaaagggacacagccggcgct

SEQ ID NO: 137982 - DNA, 88 bp, Homo sapiens
gatttactataaccaaactcaaaatgatgatgctttcaaggttctaagaattttagatccagttacctgcaaagagagttcacctgat

SEQ ID NO: 137983 - DNA, 74 bp, Homo sapiens
agatcgtgtatcccacggagaaggtgaactgtctggataagaaggaagaggcccagcagaagggactcgctgag

SEQ ID NO: 137984 - DNA, 75 bp, Homo sapiens
cttgtttgagaaccccgatcagaatgccaaatgtgtttgcatgctgggaatactctgaagatagtaactccgagc

SEQ ID NO: 137985 - DNA, 98 bp, Homo sapiens
ctgtggaactgctctggcagtcatcgtgcctgaaggagtacatgccctttatgaagatattcttgagggggaactgatcacagccgcacatgagcttg

SEQ ID NO: 137986 - DNA, 82 bp, Homo sapiens
ctcctcccacacggattctgtgtagaaatccacggttctccttactatgacaatgtccgccccctctcttaccctgattcgg

SEQ ID NO: 137987 - DNA, 76 bp, Homo sapiens
ggaagaggccctgcggaggcggcggtgcagcgctccgatggtatagctgcatgctgggaaagaaatgcagcctggc

SEQ ID NO: 137988 - DNA, 83 bp, Homo sapiens
ctcagagataactggaccgatgcagaaggctattatccctccagctctgagctttccaatccccagagtagcaaatgttgaaa

SEQ ID NO: 137989 - DNA, 83 bp, Homo sapiens
caaacagatctggcaaaatttggggtgtcagttgtacccgaggcgttctcagcagcagcaagtacctgtggtggatttccagg

SEQ ID NO: 137990 - DNA, 101 bp, Homo sapiens
tggcggtggtgtgctcgagcaaccagaaccggagcatggaggcgcacaacatcctcagaatcccctactttgaaactagtgctgccaatgggacaaacata

SEQ ID NO: 137991 - DNA, 82 bp, Homo sapiens
cgagaaccgcagggactggccgaggattttttatcaagcagaaatgcatcgaacaacgagaatcaagatcactgagctaaat

SEQ ID NO: 137992 - DNA, 100 bp, Homo sapiens
ttcttcatcgtgctattcctggtctacatcctgcgggtgcctttgaaaatcaacgacaacttgagcacagaaccacgaagctgccctgagacgctcactc

SEQ ID NO: 137993 - DNA, 100 bp, Homo sapiens
gcacaaagagcttgctccctacgatgagaactggttctacacgcgagctgataactgcgacctccacttcaaggtggcccgagatcggagtagtggctat

SEQ ID NO: 137994 - DNA, 90 bp, Homo sapiens
aaaaagacttattgatctccatacaaatgttgccactgctgttttagaacatataaaggtaggataattgcggactgaaccctcgggctg

SEQ ID NO: 137995 - DNA, 76 bp, Homo sapiens
cgggagtttgggacagagttcacagaccattacatcgagtggtgggggaaaagtagctccagctcaaccatctgag

SEQ ID NO: 137996 - DNA, 96 bp, Homo sapiens
agactgtcctccacatttagctgtgggagactggtcgaaggtgaaagaaaagatgttgtcccggttaagagtagtttccaccacttgtactttggc

SEQ ID NO: 137997 - DNA, 98 bp, Homo sapiens
tttgaaccggacagaagcgctggtcggcgtctggcgatcgtcagtatttaaacagatcacatcatgcgtgagtacaagctagtggtccttggttcagg

SEQ ID NO: 137998 - DNA, 100 bp, Homo sapiens
ccccagagagcatacctgatacttttgaagatgcagtgaatatactgaagccttcaactataattgctccatcaagtatgatggtgaaggatgaatatgt

SEQ ID NO: 137999 - DNA, 90 bp, Homo sapiens
ggacaaggagccagtgctggtcgtgtccttcgtcgtcgggggcctcggtgtgggcccatcgctggatggatctgtcagaacacggctttg

SEQ ID NO: 138000 - DNA, 96 bp, Homo sapiens
gagccttggtttaaaatcacaggggggacaccagacacctcacttcttacacttggctggttgaaaggattgttgacaaaaggaaaaataaaaaag

SEQ ID NO: 138001 - DNA, 82 bp, Homo sapiens
gataaaggccatgcaaaagatgcctgtgttattagtctctggatgagggggatattgccttgttgaaaacttatgtaagtcc

SEQ ID NO: 138002 - DNA, 111 bp, Homo sapiens
atggcctgtcgctggagcacaaaagagtctccgcggtggaggtctgcgttgctcttgcttttcctcgctggggtgtacgcctctacggcagacacatgcaggccaacccag

SEQ ID NO: 138003 - DNA, 51 bp, Homo sapiens
gagctggagctgccgcggcgcagccagaacgacaaatcctccacccctggg

SEQ ID NO: 138004 - DNA, 90 bp, Homo sapiens
ctgcgctacgagaccttcatcagtgacgtgctgcagcgggacttgcgcacttttccagccattaactccaggctctcgagaatttgaaga

SEQ ID NO: 138005 - DNA, 95 bp, Homo sapiens
caccgatgatgtgcagatcaatgacatttccctgcaggtacaccaggggttggaaaaaccacactaggcaaagaacttgcgtcaaaatcaggact

SEQ ID NO: 138006 - DNA, 90 bp, Homo sapiens
ctatgagttcaagatcacatggtgggaaaagaagatctcccggagcagtgccctgaaagtgctggaccatgccatgattggccccgaagg

SEQ ID NO: 138007 - DNA, 75 bp, Homo sapiens
acacaccaggccggcaggctgagaaaagcgagaccgcgtgcgaggaccggaccaagaatcgccttcagccctgtc

SEQ ID NO: 138008 - DNA, 87 bp, Homo sapiens
caagcttagagcgtctggccaagaatcagaggaagtgggtgagcgacctgtgagagtttatgccgatggaatatttgacttatttca

SEQ ID NO: 138009 - DNA, 49 bp, Homo sapiens
tgcgtctgaagcctacaagaaagatgtggcagatgtggtcgcattcttg

SEQ ID NO: 138010 - DNA, 104 bp, Homo sapiens
ttctgtttacatggaactcagacatctgcaaatcatgagtttatgtggccgaggcagacaagtggaattaggccttgctgcaggggacttcatttccttctcag

SEQ ID NO: 138011 - DNA, 102 bp, Homo sapiens
ttatatgtgatgccattccagcactggactcatggaggctgagcatttattcagctacaggccaaatttgagcaccttaagagacttcaccaagaagagaga

SEQ ID NO: 138012 - DNA, 75 bp, Homo sapiens
ccaggctggtcagtgtggcaaccagatcggtgccaaggagtacttcttgcaagcagagctgacaagcaacgtctt

SEQ ID NO: 138013 - DNA, 75 bp, Homo sapiens
ggcagtacaagcttacgtctctgctcttcagtacaatccttttaagctatgaagaaggacatccctcacactctg

SEQ ID NO: 138014 - DNA, 90 bp, Homo sapiens
tatgatgacaaaagattttgagccaatcctggagcagcagatccatcaggatgattttggtgaaaatgttcatttggatttggaagaccg

SEQ ID NO: 138015 - DNA, 97 bp, Homo sapiens
ctttgccacattcagccgccaatgatcccatttttgtgcctatatatgcaaacagatttgcagtaccaacctatgcagccaagcaacctcagcagtt

SEQ ID NO: 138016 - DNA, 85 bp, Homo sapiens
ctcagcctcccaagtagttgggattacagtattgactcggagacaaaaagaggccaagaccaagagtgacagtgggacagctgcc

SEQ ID NO: 138017 - DNA, 75 bp, Homo sapiens
gtgtggattcttcagaaagtgaacttggcattttagatctaattcaagaattggattcaagtacgtggctctggg

SEQ ID NO: 138018 - DNA, 75 bp, Homo sapiens
cgaaggcagttctgcaagaggagctattctgatcttgggagaaaactggttgtcctggatgtttgaaaagttggt

SEQ ID NO: 138019 - DNA, 75 bp, Homo sapiens
cctcaagctgcggaaattcatctttaaggacgaagagagtatctctcagaagatagaagtgtgcaagaagtacta

SEQ ID NO: 138020 - DNA, 96 bp, Homo sapiens
gagagcgcgaatatcgtcatcgttagaaggagccaggaggaactctctcccagtccgcctttgttgaatccatccacgccacagtccacagagagt

SEQ ID NO: 138021 - DNA, 74 bp, Homo sapiens
ccagtaaaatatggtgaactcattgtcttagggttgaagaaatatggagatcaacacaaaactgctcatcagtg

SEQ ID NO: 138022 - DNA, 74 bp, Homo sapiens
aggcacgggctggctctgtgcggctcatcaaggttgtgattgaggacggaatggctgctttaaatggtggcctg

SEQ ID NO: 138023 - DNA, 51 bp, Homo sapiens
tgcagctcgcggtttcctggcttctagagcctgtgtcggacagccagatgg

SEQ ID NO: 138024 - DNA, 90 bp, Homo sapiens
ttttgccatggtggattttgatgaaggctctgatgtatttcagatggtaaagctacttcttcttctaatccaagcagcccagctccagac

SEQ ID NO: 138025 - DNA, 80 bp, Homo sapiens
cctgcctcagcctccggagtagctgggattacaggccattgcaatcatggaagtagctcacggcaaagatcatccatata

SEQ ID NO: 138026 - DNA, 51 bp, Homo sapiens
gagcatgaaacgagacgacaccaaggaaaggccgagggggacggcaagatg

SEQ ID NO: 138027 - DNA, 90 bp, Homo sapiens
cctttcgacctggagaacatcatcttccgcttttttgggagggcgtttgagaaggcagcggaaagcaccagctcccggatgctgcacaac

SEQ ID NO: 138028 - DNA, 75 bp, Homo sapiens
gtccaggccttccagtacacagacgagcatggggaagttggaaagacttcaaatcatgcaatagttcttgcccag

SEQ ID NO: 138029 - DNA, 101 bp, Homo sapiens
cagcttccaaagagatacagggcagaggaaaatgcaagaagactgatggagcaggcttgcaatattaaaatggagttcaatgagaaagaattgcgaagaga

SEQ ID NO: 138030 - DNA, 95 bp, Homo sapiens
cagcttcagaagaccgaagcgttcgtatctggaagcaaattgtggctactaatttgccccctgaagatcaagatggctctggggatgactctgac

SEQ ID NO: 138031 - DNA, 75 bp, Homo sapiens
cgggacaccccggaagctgggaaatggctcatgagaggctagaagattccaaactagaagctgtcagtgacaata

SEQ ID NO: 138032 - DNA, 87 bp, Homo sapiens
acggggcgccggcgccgccgcccccgggctcgcggcctgcagtgcttcaccgatatagacacattttgggattgtggcagccagata

SEQ ID NO: 138033 - DNA, 75 bp, Homo sapiens
agaaagtggtgaatcccctgtttgagaaaaggcctaagaattttggcattgcgcgatgtacaatacggtgtggag

SEQ ID NO: 138034 - DNA, 88 bp, Homo sapiens
cagagagagagcttggttaacttgggagaaagtttcatctgtggatggagtattgatgagacgtgcaggtaccatcaggaagcagcgg

SEQ ID NO: 138035 - DNA, 90 bp, Homo sapiens
cacttcattgcagttgtgactgagtgtgctggtggaggggccttcctcgtcatccccctgcaccaggttcgagaacttgtcttggacaat

SEQ ID NO: 138036 - DNA, 100 bp, Homo sapiens
ggagaaatctaagagcctcgccaagctcaagaacaagcatgaggcaatgatcactgacttggaagcccgattactgaggctgcaagaaagttcacaaggg

SEQ ID NO: 138037 - DNA, 82 bp, Homo sapiens
ctccaacatctccttgtccttccatatcttcccagcactctcgagtggaccctgaggagctcttcaccaagctcgaccgcat

SEQ ID NO: 138038 - DNA, 105 bp, Homo sapiens
gagtctgtcaaagagaaagtaacaagaatcattcttgcagcatttcgttccacaagaatcggaatgtcagttaatgctattcgcaagcagagtacagatgaggaa

SEQ ID NO: 138039 - DNA, 82 bp, Homo sapiens
cctgcagtaccccactctacgatcagagcaatggtggaacaaagcggcaaaagatatcccatcaaaattatatagcctatca

SEQ ID NO: 138040 - DNA, 100 bp, Homo sapiens
aaacactgtgatgaaattttggagatgaatcacctgctacccagctgtcaatgaagactccatcattggtggatctgaacgtctatgacactctttcgag

SEQ ID NO: 138041 - DNA, 90 bp, Homo sapiens
gcgcgcctccatctgggccatggatgggtctctcaggcagctgcagagcttcaacagtactgtatgcagaatgcctgcaaggatgccctg

SEQ ID NO: 138042 - DNA, 73 bp, Homo sapiens
agaatggagatcattcaggttccagttaatggagaatcatcctcatttgcaccaactgataatgcgtctgtca

SEQ ID NO: 138043 - DNA, 80 bp, Homo sapiens
agaccctggagcctcagttggaagcagccgatccagcctgcggagcctgtggggcaggtgtgtttgtcaaagtgtctctg

SEQ ID NO: 138044 - DNA, 101 bp, Homo sapiens
ggctcagccgggcagtttgaggagctgctgcgcctcaaagccaacgccatcatgaccgggtcctataacaacttcttcaggatgtttgatagagacacgcg

SEQ ID NO: 138045 - DNA, 75 bp, Homo sapiens
gatcccaaaattattgaaaacactcgaaggcttgcccagtttcgacaaagaaaagctcagtcggatgggcagagt

SEQ ID NO: 138046 - DNA, 83 bp, Homo sapiens
gtcatcctgctgctgaagatctggaagacgcgctcctgcgccgcgagcatgtttgcggtgggctgcagcatgggtcccttcct

SEQ ID NO: 138047 - DNA, 100 bp, Homo sapiens
ggcagatgacacctgtttggagaagctcctggactggtttaaaacggtcactgaaggagctgctgggcatgctgtgtgcttgcatcgtgttgtgcagaag

SEQ ID NO: 138048 - DNA, 100 bp, Homo sapiens
cagggcagagcaggaggccccccgagattactacaagggaagacataaattcaaagcaggttgctacagtgaaagcagacctggagtctgaatcttttcg

SEQ ID NO: 138049 - DNA, 100 bp, Homo sapiens
agaaactcagccactggttgccttggtaggcaataaaaatgagtttgatgcctacatcattgtgtctttcgtgaatgccaccctagtgttgtccattgga

SEQ ID NO: 138050 - DNA, 83 bp, Homo sapiens
tgggcgaaaattggatgtgaaaatgaagccagaccgagattgccatcacgaaagccaaagtggatttctccagtgtggtgtgc

SEQ ID NO: 138051 - DNA, 83 bp, Homo sapiens
cagcatacagcatttctcccaccagtgaggtctgccagtctttagtgaaacacagctctggaataaaaggaagtttaccacta

SEQ ID NO: 138052 - DNA, 50 bp, Homo sapiens
ccgggaccggccgaaaggcgaggaaccgtcaccttcaggccattcagagg

SEQ ID NO: 138053 - DNA, 100 bp, Homo sapiens
gaagttctgatgttccactgaaatcacaatggaaagtcttgacttgactgcttgaccacatattatcccctccacccatgccgtttcggaaatgcagcaa

SEQ ID NO: 138054 - DNA, 51 bp, Homo sapiens
cacattggaccctcctcccaactgtaggttatgcattagacccttcattag

SEQ ID NO: 138055 - DNA, 101 bp, Homo sapiens
cgacggctacgccgaagcactcgttccgggggtgaagcctcctgcgccggccttgcctcggaacctaaaggcagacccagaagagctttttacaaaactag

SEQ ID NO: 138056 - DNA, 82 bp, Homo sapiens
agaagacgtccaatctgagcgtgctgcggacggcgctgcggtacatccaggctgaaggggatgctaagggagataaagcaaa

SEQ ID NO: 138057 - DNA, 75 bp, Homo sapiens
tctgtcggagccgtgggaacctggtggtgcaggcagaagaaattagaagtggccatggaagaagaaggattagca

SEQ ID NO: 138058 - DNA, 103 bp, Homo sapiens
caagaaaatcacagcctttgtacccaatgacggttgcttgaactttattgaggaaatctgaaatagagtactatgctatgttggctaaaactggtgtccatca

SEQ ID NO: 138059 - DNA, 75 bp, Homo sapiens
cggcgagagtgggcgagaacgtccactgcgggccggcgaaagctgttttctggatatgccgcagaaggatccgtg

SEQ ID NO: 138060 - DNA, 73 bp, Homo sapiens
accggtgtctggcggatgcggtcgtgaagataggagttgtaagacgttcatcgccgtgttatccttgagtaaa

SEQ ID NO: 138061 - DNA, 83 bp, Homo sapiens
ctcgcttctttcggttctacctgggagaatccaccgccatccgccaccatgggactggtgattgcagctggaagtgcccatga

SEQ ID NO: 138062 - DNA, 100 bp, Homo sapiens
gggaaaatctgcagccctgggattggcgattgctggggcggtggcatttgggtatgctccagaatgtttaatgcaatctaaattttatattgcctctgac

SEQ ID NO: 138063 - DNA, 51 bp, Homo sapiens
cacgacctatcctaggcgccatgtgttttagagcactttgctgcaagggac

SEQ ID NO: 138064 - DNA, 98 bp, Homo sapiens
gggtgccttcgttccccccgagttcgacgtgaccgggaacacctttgagccgatcgggtcaggcaagtccatcccgtcctgagagccccaggcccccc

SEQ ID NO: 138065 - DNA, 83 bp, Homo sapiens
cagaggtgtgctgacgacctgctacaacagaagaatcccagtcagaagttccagcctgccactgttctctgatgccatgccag

SEQ ID NO: 138066 - DNA, 100 bp, Homo sapiens
ctcccggcccctggcgccgacgtcaaggtccacagggcacgcaagaccatgccgaagtccgtcgtgggcctggcttcagggatgacttcttagggggcag

SEQ ID NO: 138067 - DNA, 73 bp, Homo sapiens
ccaaagtgctggaattacagggattgaccctcttgctggaatgacatctcttagtataggtggttcagctgcc

SEQ ID NO: 138068 - DNA, 83 bp, Homo sapiens
aaagtcactgatgaaaggaatggcaggaattcttcagatcttgttgctccttctcctgatgctttccgatctactccttttat

SEQ ID NO: 138069 - DNA, 91 bp, Homo sapiens
gtcaggtgaagactgggggctgcaggcgcgctagacaatgcagatcttcgtgaagactctgactggtaagaccatcaccctcgaggttgag

SEQ ID NO: 138070 - DNA, 88 bp, Homo sapiens
gacaagccgctggcagccgcggatctcaccgccgctcaggtcctcctgcatatgcccaagaggattgggagtggaatggacaccagca

SEQ ID NO: 138071 - DNA, 90 bp, Homo sapiens
atctcattgaagcttggaattacatagctggaaaggatcttacagattgctgctctctgaacactatagtcgtcgaatctcacaagcgta

SEQ ID NO: 138072 - DNA, 82 bp, Homo sapiens
aagatggtgacttctacgaaaaagccctggtggagctgaaggttgcagagctggaagtcgagtgtgctactcaactcaggag

SEQ ID NO: 138073 - DNA, 100 bp, Homo sapiens
ggagaacgtcccgctggatctgacccgagtcctcctccgcctcctcctctctgcatgcgcgtcagagcccgtgccaagaacaagcagcagtcctgaactc

SEQ ID NO: 138074 - DNA, 90 bp, Homo sapiens
cttggatgaagaaatctttgatgatgatgacttttaccaccaggcacgtgacacaagctgacctcaagagctccacgttttggcttcgag

SEQ ID NO: 138075 - DNA, 100 bp, Homo sapiens
ccaccatgtccgtggccttcgcgtctgcccggccaagaggcaaaggggaggttacgcagcaaaccatccagaagttttgggaggtcatcagtgatgagca

SEQ ID NO: 138076 - DNA, 75 bp, Homo sapiens
aggatccctggacacttacgtacaatgatggtggatgcttccaaaagcatcgaagctgtccatgaggacatccgc

SEQ ID NO: 138077 - DNA, 90 bp, Homo sapiens
ccttggagcccagagccacgtcaaagttgtcccagttttggtgcatctcctgtctgctatcagcagtgttaggctttacattcctaaaga

SEQ ID NO: 138078 - DNA, 58 bp, Homo sapiens
cggagttccgcgtccgaggtgtgaaggttgactatagtcaatggggccaatggagcca

SEQ ID NO: 138079 - DNA, 51 bp, Homo sapiens
gccagcaccgtcctggccacgttaagtgtcctgaaggaagctattcccaag

SEQ ID NO: 138080 - DNA, 88 bp, Homo sapiens
ggaaggcacatgaactgaagcttctgtcagaatgccaatacaagcagttggaacatctggattatgagattatccagtctctaaatcc

SEQ ID NO: 138081 - DNA, 83 bp, Homo sapiens
cgcctcctaatccctagccactatgcccgcggcgccatggctcacgtcggctcccgcaagcgctcgaggagtcgcagccggtc

SEQ ID NO: 138082 - DNA, 100 bp, Homo sapiens
cggggggccagccgcggaactggaggtgccctgagctctgccgcaccagcagcatcctggcaggcactgccctggctgccttgcagcgagccgcaggccg

SEQ ID NO: 138083 - DNA, 100 bp, Homo sapiens
cgccctgaagaagtgcaagagcagaggccttctctagaccttgccaagatggcacagcagtgcctgatttgagatggggtcccaggtctcggtggaatcg

SEQ ID NO: 138084 - DNA, 101 bp, Homo sapiens
atggaaaccgctctggtcacaccaatactgttgcagattgggctctgtgtatgaatgacaaggataccttcagccagctcattctggatgaatgaatgatt

SEQ ID NO: 138085 - DNA, 74 bp, Homo sapiens
ttggcattgacatttaattttagggtcctttatatagaagggagagtagtgctactatatcggggccacagatg

SEQ ID NO: 138086 - DNA, 80 bp, Homo sapiens
cgtccgtccgccgccaccacccactccggacacaggtcttaaccatgaacttctctggaggagggaggcaggaagcagca

SEQ ID NO: 138087 - DNA, 100 bp, Homo sapiens
aggaagaggcattgaggactttccttacctgtttttccagctcacccactgccagcagagattcatgttacatgtaaagctgtcctcatttgtgactatg

SEQ ID NO: 138088 - DNA, 75 bp, Homo sapiens
caaggagtccacccagggccactggagctatttgctgactcactgccacaacgacattgtcaaccttctcctgga

SEQ ID NO: 138089 - DNA, 83 bp, Homo sapiens
cacggcccgggcatgggctgcaagggagacgcgagcgtgttatagttttgccgctggactcttccctcccttcccccacccca

SEQ ID NO: 138090 - DNA, 82 bp, Homo sapiens
tccacccaccgccgccgcctcccagattggaggtggacacaaaggaagaggcagccagacagctacttcagcgtcctcaacg

SEQ ID NO: 138091 - DNA, 83 bp, Homo sapiens
atcatgtctgcgagccaggattcccggtgtccctggccagtgtccttccacctgtccacaagcatggggaacatcttcgccaa

SEQ ID NO: 138092 - DNA, 93 bp, Homo sapiens
accctggagcctcagttggaagcagccgatccagcctgcggagcctgtggggcagaattcagaaggagctggcggacatcactttagaccctc

SEQ ID NO: 138093 - DNA, 99 bp, Homo sapiens
gctccatcccactactctcaagatacgccaatgcgctcaaaggcaaaaaggaaagggttcaaagacaccagtcagtatgtagtaggagaattggcagca

SEQ ID NO: 138094 - DNA, 98 bp, Homo sapiens
aaaaggagagcatcttggacttgtccaagtacatcgacaagacgatccgggtaaagttccagggaggccgcgaagtgcaccaattccagctggacatc

SEQ ID NO: 138095 - DNA, 75 bp, Homo sapiens
cagatcctggtcctcgatccgcccacagacctcaaattcaaaggtgagcgagtgctgtgctttcatgggcctctt

SEQ ID NO: 138096 - DNA, 112 bp, Homo sapiens
aaagaattagggtccttgccccttcccttatctacttcagaacagaaactgattattgatgagaagaagtattacttatttgggagaaaccctgatttgtgtgactttacca

SEQ ID NO: 138097 - DNA, 116 bp, Homo sapiens
cagaggcgctggagctgggtcagtccgccgctcaccccgcggccgcaccttcccgccttctcaggtgagaagccctaccactgcaactgggacggctgcggctggaagtttgcgcg

SEQ ID NO: 138098 - DNA, 83 bp, Homo sapiens
cacccaccacaaaaccccagtggagtttggaacttgcacggaagggaacagggaagagcaagaagagacgtctgcaattcgag

SEQ ID NO: 138099 - DNA, 130 bp, Homo sapiens
gctctccgggctcttctctagctctcagcggctgcgaagtctgtaaacctggtggccaaagaatggatcttggagaatgtctgaaagtccatgacctggctttaagagcggattatgaaattgcatccaa

SEQ ID NO: 138100 - DNA, 99 bp, Homo sapiens
gccgactctgggatgaactgatgaagacaaggccttccagtttggaagtgaccaagaatatggcccaggtgaccaaagccctggacaaggccctgagca

SEQ ID NO: 138101 - DNA, 75 bp, Homo sapiens
cgggatactgctcagcaaggtgttgtgaatttcccatatgatgatactgaaactgttgaggagcccatggaggaa

SEQ ID NO: 138102 - DNA, 82 bp, Homo sapiens
tcctggccagcctgctcatcgcctactgcagcgagaaccactgtctctgatcaacgtgcggaagaggaacgtggaatctggg

SEQ ID NO: 138103 - DNA, 100 bp, Homo sapiens
gcgaaccgcagtatcatgctggccaagaagatcatcattaaggacggaggcacggggaccctcacaatgatcccaatgctcagggggatgccttcaagac

SEQ ID NO: 138104 - DNA, 100 bp, Homo sapiens
gtgctcatctcctactgtcccacggccaccgaagagggaactgctcgcagaaagaagaaggtggttcatagaacagccacagcagatgacaaaaaacttc

SEQ ID NO: 138105 - DNA, 80 bp, Homo sapiens
tcggcagcaagaacagagagagaggtggacagatctgagagatactgaggggactttgtgcaactgcctgtgcccgtcat

SEQ ID NO: 138106 - DNA, 100 bp, Homo sapiens
tgagctacaggccagtcgtgtctccagtgatgtcattgaccagaaggtgtatgagatccaggacatctatgagaacaggggcactatgaacgaagaggag

SEQ ID NO: 138107 - DNA, 83 bp, Homo sapiens
cgactctaaacggactcatgtactttgtcagacaatgcagatcttcgtgaagactctgactggtaagaccatcaccctcgagg

SEQ ID NO: 138108 - DNA, 75 bp, Homo sapiens
ttgaagtggaaaatcaagctaagcgcctactagagcagggtttggagactcagccctttctaaggcacaaaatga

SEQ ID NO: 138109 - DNA, 75 bp, Homo sapiens
cctctgtgcggtgctgctcagtgcagttcagatgcttgctctgtcaaggcacagcctattgtctcctttgctcag

SEQ ID NO: 138110 - DNA, 90 bp, Homo sapiens
agcagccctggtgtcacctatcagtaaaagtttcaccagtgatcattaaagaatgggcagcttacaaaggaaagtctcctcaaaccccgg

SEQ ID NO: 138111 - DNA, 75 bp, Homo sapiens
ccgcggggcgcgcagctcgcgggtctttggacaccaccggtcctgagtccgcgatgacagagcacgtagatcgcc

SEQ ID NO: 138112 - DNA, 100 bp, Homo sapiens
aactctagggagccgggttgatttttaaagcttcaaaatcctaagactcagcactgttgcggggactggggttttaaggggtgtggcaggaggttttgga

SEQ ID NO: 138113 - DNA, 97 bp, Homo sapiens
caagttacaggaatgttctccaagcagcaatccaaaagagtctcaaggatccttcaaataacttcaggataacagtgttttatggacaggcacagtg

SEQ ID NO: 138114 - DNA, 100 bp, Homo sapiens
gcccgggtagcttcccgacttatcgacatgagcaggcaccaaggaggagtttgtttacgaggacatggaggccctctgcagtgtcctgcgcactctggcc

SEQ ID NO: 138115 - DNA, 73 bp, Homo sapiens
gcgcttcaagcaggagggtgtcctgaacagcaaggtggctatggcggttccagcagcagcagtagctatggca

SEQ ID NO: 138116 - DNA, 96 bp, Homo sapiens
ataaaacagatatattgttcccatttcccaaataatgaaacggaagcgccgaaaaccccgtcgcagaatttagtctcaaaggaaacttcaaccaca

SEQ ID NO: 138117 - DNA, 100 bp, Homo sapiens
taattcagaggcagacagacaattgctggaagctgcaaaggctggagatgtcgaaactgtaaaagccttggacaagattcgctatgagagcctgacagac

SEQ ID NO: 138118 - DNA, 75 bp, Homo sapiens
aatcatccacgcacctgcagctctgctgagagagtgcaagccgtgggattgttgtgtccactgtatcctggcttg

SEQ ID NO: 138119 - DNA, 82 bp, Homo sapiens
cagtgcccccctcccgccgctctactcagccaggcagacagactgacagactcgctaccgcttacaaacacgcagatggcaa

SEQ ID NO: 138120 - DNA, 50 bp, Homo sapiens
caagtacccgtttgagctggtcatggcgtggacagaggactgcagaaaat

SEQ ID NO: 138121 - DNA, 100 bp, Homo sapiens
cctagggctcagggagcaggagcttcaggttgtccgagcatctgggaaagacgagttgtactgctgtcacaggaaatggacgctggattacaagcatggc

SEQ ID NO: 138122 - DNA, 83 bp, Homo sapiens
ctcctggggctgctaatgctctgggtctctggtggctacagtttcagaaaagtcacgtataatggaactggagaaagacctag

SEQ ID NO: 138123 - DNA, 50 bp, Homo sapiens
agcgcctcttctaccggggcaagcagccagagactgctgctactttgaaa

SEQ ID NO: 138124 - DNA, 82 bp, Homo sapiens
gtggactccttcggcagtccacccaccgccgccgcctcccagaccgtggtagggaccgacattgcggagcttctgttacgag

SEQ ID NO: 138125 - DNA, 100 bp, Homo sapiens
ccatgtcatccgcaaaggcctcaatgcctacctggaaggttcatgatcccaaactgatcttccaggctagccttgcaaatgctcagattttgattcccac

SEQ ID NO: 138126 - DNA, 83 bp, Homo sapiens
gtttcattctggacagctggtaaaagtctgtgccccaatggttcgatattcaaagttgcagatgctgctaaaaacacagaagt

SEQ ID NO: 138127 - DNA, 75 bp, Homo sapiens
tgcaatagcccttcagtactgttgtacgataacaacgaacttgatgcaagtgataggtttgccaaggtcagacct

SEQ ID NO: 138128 - DNA, 83 bp, Homo sapiens
agaagagatatataaagcatttgtgcattcagatgctgctaaacaaggtctgccaatttccatgtatggaggcaccataatac

SEQ ID NO: 138129 - DNA, 95 bp, Homo sapiens
ccttctactctagtacagtagtatctctattgcaaagtgcagaggaaagttccacttccagaaaaagaactacagaagacgatatccccacactg

SEQ ID NO: 138130 - DNA, 100 bp, Homo sapiens
gtccggtgcaggtgaggggcgcgcgcctgcccagctttgcagcccccgaacgcggcctcgcacaggcccctccagccagcgtcaggtgcagaatggcccc

SEQ ID NO: 138131 - DNA, 100 bp, Homo sapiens
gaagccatgtttcgaagacctgtattacagttcctgctcattttccacaaggccgcggcaggggagctgcaggaggacagtgggctgatggcgctggcaa

SEQ ID NO: 138132 - DNA, 81 bp, Homo sapiens
tgaaaattctgtataatacttcgcaagttatcaatactctggctgaccatcatcatcgtgggactgactttggtggaagtc

SEQ ID NO: 138133 - DNA, 98 bp, Homo sapiens
gcagctctcttgatttcacacattgtgcaatgtgctggagaatctggtaaaagcaccattgtgaagcagatgaggatcctgcatgttaatgggtttaa

SEQ ID NO: 138134 - DNA, 100 bp, Homo sapiens
gaaggctctccatcgaaggcaacattggagaagttgccccagtgcaaggcactgcattcgacctgagaaagccagtggagcttggaaaacacctgcagga

SEQ ID NO: 138135 - DNA, 75 bp, Homo sapiens
tctggccgcctctgccgcagctggagagccccccaagatgaacccagtggtggagccactgtcctggatgctggg

SEQ ID NO: 138136 - DNA, 90 bp, Homo sapiens
taaataagattgaggaatttcttgaagaagtcttatgccctcccaaggttccattcagagccgatacatcagcatgagtgtgtggacaag

SEQ ID NO: 138137 - DNA, 100 bp, Homo sapiens
agtggtctaaggcgccagactcaaggaggatttgttggtattgaggaaaacggtgaaatcctttttggctgtttgccagcagtgcctgtctaatgttaat

SEQ ID NO: 138138 - DNA, 100 bp, Homo sapiens
gtttcggtcatctaaaggaggttttaaacagtataacaggagatacaactcgtcaacgaatcaaattcagtgatgacagagtatgcaagagtcaccttct

SEQ ID NO: 138139 - DNA, 75 bp, Homo sapiens
caggtcagagttgctccaagcaaggttaaacccatccagagtaatggctgcggccttacccaggaccctggggga

SEQ ID NO: 138140 - DNA, 98 bp, Homo sapiens
gagcggcggcggcggcagcgggtcttgggtcctccgagagcagcagcgtttgcagaaaaaacttcagcatgtgccaggaacacaacctcaccttgatc

SEQ ID NO: 138141 - DNA, 100 bp, Homo sapiens
taccggccgtggaagcggccaccgactactgtcagcagctgtgccaggtgtcatggagaaactccagctgggcccagagattctgcagcgggaaaatcca

SEQ ID NO: 138142 - DNA, 100 bp, Homo sapiens
ggaaattctgaatatagggacaccacaggcaagtgtccagagaatggctgggatgaaagtacacttgaactctttttacatgaacttgcaatcatggaca

SEQ ID NO: 138143 - DNA, 50 bp, Homo sapiens
ataagactgcatctgttcatatgagctcctacgactttcctgctcttcag

SEQ ID NO: 138144 - DNA, 100 bp, Homo sapiens
ccaggaagccaccttactctgagggtcaagaattgccgcttccttttagttactgtgtgatgaatgcagactctgctaccattttggctgtttggatcct

SEQ ID NO: 138145 - DNA, 74 bp, Homo sapiens
cgaagatggaagacttcgagacccatttaggatcacggcgctacgggtcagcaaagtggaacgcgagaagaacc

SEQ ID NO: 138146 - DNA, 89 bp, Homo sapiens
ttggattcagacgccgattcgcccaggccaaagtttggagggaaatattgcactggagaaagaaaacgctatcgcttgtgcaacgtcca

SEQ ID NO: 138147 - DNA, 100 bp, Homo sapiens
gttaatgtagtagcagtgattgttgcttttacgggcgcctgcattactcaaggtcagttaaatgaaagcatggaccatgggggagttggaccatatgaac

SEQ ID NO: 138148 - DNA, 80 bp, Homo sapiens
gaacttcctggagaaactgaagcgggacgttgaggcccagccgcagccccagccccagccccagccccaagcccagtctc

SEQ ID NO: 138149 - DNA, 100 bp, Homo sapiens
cccaaatcggaagtgaattcggattgtttgctgcccccaggctccgctcttgccagagggacaggagccatggctcagaaaatggactgtggtgcgggcc

SEQ ID NO: 138150 - DNA, 75 bp, Homo sapiens
tcctggagcagctgcgtaaaacatacaggccggagcttatcaaagggccaggagctgactatccgccagatctcc

SEQ ID NO: 138151 - DNA, 100 bp, Homo sapiens
caaaggtgtcgtggtggtcattaagcggagatccggagccaaaaacctgtatatcatctccgtgaaggggatcaagggacggctgaacagacttcccgct

SEQ ID NO: 138152 - DNA, 100 bp, Homo sapiens
ttctttatccattattgagacgagatctggttgctcaagttgcaggacgaggagcggaggcggcagcagcagttagaagagatgcgcaagcgggaagcgg

SEQ ID NO: 138153 - DNA, 51 bp, Homo sapiens
gttgcacttaactgatattcaggtaaatattgcagattttcaagagaatca

SEQ ID NO: 138154 - DNA, 50 bp, Homo sapiens
aggaggaggaggaggaggaagaggatgtcgtgactccaaaaccaggcaag

SEQ ID NO: 138155 - DNA, 101 bp, Homo sapiens
ctgctcttgcctcagcggctaccaaagccaagtgttctggacttggtgcctctttctgttatatgctttcctatttagttgggagaccagttgtatacaaa

SEQ ID NO: 138156 - DNA, 100 bp, Homo sapiens
gaaggaacgctgcctggcgaaccctggtgttcaagttccagaggaacgggatgagctcctgagatggaagggaacagagttcagaggcagcagaaactgg

SEQ ID NO: 138157 - DNA, 74 bp, Homo sapiens
tacacccgtgcccaggagcttgacgccttagataacagccatcctattgaaagtggaacagatgtgcattcaga

SEQ ID NO: 138158 - DNA, 99 bp, Homo sapiens
ctgagacaaccacttctggtggttgccactcacctgaggatattatcgaatgtctgaaagaaaacaagaagcagctaagcacccgctgccaccaaaaag

SEQ ID NO: 138159 - DNA, 100 bp, Homo sapiens
ctgaattttacccttcaggttattcttccagttacacactttatcttcaagccaggatgaagggagactgggcaagactcttacgccccacactgcaatt

SEQ ID NO: 138160 - DNA, 98 bp, Homo sapiens
tcgagctgaagaatgttaaggaggacagtgagatgaagcacctggtcaccatgaccttggactatgggatggaccagtctatattcaagagctcacca

SEQ ID NO: 138161 - DNA, 100 bp, Homo sapiens
tttgcagatgcatctctcaagaacctctactaaggaaatgagtgaatcagacacaagtttggcagaaggaagtgtcagctgcttagatgaaagtcttgga

SEQ ID NO: 138162 - DNA, 74 bp, Homo sapiens
cgggagcgcaggaggaacaaatggaaaggactagacattgttcatatccagctttcagagtggcaccgtgcaat

SEQ ID NO: 138163 - DNA, 83 bp, Homo sapiens
ccagaattcaattaaagtggctcaggattgtgcagactggtgcttaaaatggaagtcgatattaatggagagtctagaagtac

SEQ ID NO: 138164 - DNA, 118 bp, Homo sapiens
ccaaactggaggatgcctatgtattccctggggatggcgcatcacacaccaaagctggtttggctggggttgaacgtcttcctctttgtctggtattaccgggtttatgatattccac

SEQ ID NO: 138165 - DNA, 50 bp, Homo sapiens
gccaggcctgcgccggcatcctccgagcttcacattgcagaacatcctgc

SEQ ID NO: 138166 - DNA, 100 bp, Homo sapiens
attaggtggtctgactaccagtggctctgcagagctctggaaaggaagagaaatggaagtgagaaagttgagcatttcctggcagttcttgatagttctg

SEQ ID NO: 138167 - DNA, 83 bp, Homo sapiens
ggccaccaacttccctctgcggccgtttgtcattcccttcctgaagtgtcaacagcatctccaccctggagcctgtgagccgg

SEQ ID NO: 138168 - DNA, 88 bp, Homo sapiens
gctctgacggcgttactgatggtgctgctcacatctgtggtccagggcagggccactccaggtgttggagagcacaatggctgaacaa

SEQ ID NO: 138169 - DNA, 83 bp, Homo sapiens
aaagttgtgcattggcccgatcaagcctgacttctagccaagcaaccatgtccaagggacctgcagttggtattgatcttggc

SEQ ID NO: 138170 - DNA, 82 bp, Homo sapiens
ctttgtgctaaagccctgcgggctggaggagttcctgcagaagtatcatgatattagctggtttgacatcaagtcatttgtg

SEQ ID NO: 138171 - DNA, 96 bp, Homo sapiens
tgggcgtggggatggccaccagtttccggacagcttcgtgctgggtcgagtctatgctgtcttgtcaaagagagaaggtcgggtacttcaagaaga

SEQ ID NO: 138172 - DNA, 83 bp, Homo sapiens
ctggccgatgaggaagtactgagcctgttggaggaactggcccggaaacaggaggacactgattcttgctattccaaatcctc

SEQ ID NO: 138173 - DNA, 90 bp, Homo sapiens
ccgtccttctgtattctctgtgggcacacacggaactgcatcatgcctacaagaagggcggcgactggcggcgcgatggacctgaccggg

SEQ ID NO: 138174 - DNA, 100 bp, Homo sapiens
cagcgcgatgcccaaatccaagcgcgacaagaaagatctcacattcttgaaggtggcattgaagagcactaagatcggaagatgagtgagcttgaccagt

SEQ ID NO: 138175 - DNA, 100 bp, Homo sapiens
tggaagtcttagttcgagatgtgtgtatttcatgttcatcatgcctagtggcgtataagaagaccccgccaccggtccctccacgcaccacttcaaagcc

SEQ ID NO: 138176 - DNA, 74 bp, Homo sapiens
tcggcctcggggctccgcagggggcacccggcaggccggcgatgaatttgtggagaagaccctgagcaccatag

SEQ ID NO: 138177 - DNA, 90 bp, Homo sapiens
atttagagatggtgaagaagcaggtgcttatgatggacctaggactgctgacctgcctgaccagtgcacgcccaacccctgcgataggaa

SEQ ID NO: 138178 - DNA, 100 bp, Homo sapiens
ctatactggaagaggcatgccagaggtagagcagaaaactgtggatttagttactccactctgccatgtctttccaccactgcctgcacatttgagacca

SEQ ID NO: 138179 - DNA, 98 bp, Homo sapiens
gttcaatctggaaacatcaatgctgccaagagctcacaacgacctggggctgaggacaatgtcctcaatgagatcgtgagtatcttgcagcccaccca

SEQ ID NO: 138180 - DNA, 50 bp, Homo sapiens
tagcagatagccagcccatacaagatcgtcttaacattggtatcccttcc

SEQ ID NO: 138181 - DNA, 98 bp, Homo sapiens
gggcttcatggagtcgtcttagatgttgattcacctcttagcaatgcataccacgagttagcacaagtgtattcaaccaacaacccctcagaactccg

SEQ ID NO: 138182 - DNA, 100 bp, Homo sapiens
gggacctgccgtcagactttcactggccacgagtcggacatcaacgccatctgtttgaagaagctggatctggcagctgcggcagcacacaccttctttg

SEQ ID NO: 138183 - DNA, 100 bp, Homo sapiens
actgcagctactctgatgaatgcatactctagtgcccaccagaagtatgtccgacaagcctggcagaaggcagacatcaatacaaaatgggcagccacac

SEQ ID NO: 138184 - DNA, 75 bp, Homo sapiens
tgtttcgaagacctgtattacagtcttccaggttttcattgaatggtggtgccaacattgaagccatcattgcct

SEQ ID NO: 138185 - DNA, 82 bp, Homo sapiens
gaagaccgcgcgcagggcctgcagcgggagctggacggcgagcgcgagcggcgcgagaaatgtaaatgagcaaagatggatc

SEQ ID NO: 138186 - DNA, 90 bp, Homo sapiens
ccgcactccggagactcgcggttgctacgcgcaccatggctggagcactgccctgggaagaactaggatgaggtattgacttgctgttgc

SEQ ID NO: 138187 - DNA, 100 bp, Homo sapiens
accattgtcaccatgaccacactgggcaccaatcatgtggccctgagggacacagggaaccagctcattgtcactatgtcctgcctgaccaaagaggaca

SEQ ID NO: 138188 - DNA, 83 bp, Homo sapiens
aagacaccaagtgagaggccaaccaggtttctgagtcccttcaacatgatcctgggaggaatcgtggtggtgctggtgttcac

SEQ ID NO: 138189 - DNA, 100 bp, Homo sapiens
gccatggcgaagcacgagcagatcctggtcctcgatccgcccacagacctcaaattcaaaggagtacaagcgcaagctagccagagtttccctggtgcgc

SEQ ID NO: 138190 - DNA, 90 bp, Homo sapiens
agtgccaagttagatgccgattacccacttcgagtcctttattgtggagggctgtgcttcctggaagtggtattatccatttcattatgc

SEQ ID NO: 138191 - DNA, 98 bp, Homo sapiens
gggagtggtgcctcgcatgctgataacaattctgggcacggtgaagcccaatgcaaacagtggatccaaacttctacagcaaaaacttacttctttta

SEQ ID NO: 138192 - DNA, 51 bp, Homo sapiens
agaagaagccctactgcaacgcatcgtactgagaagcactccacaatgcca

SEQ ID NO: 138193 - DNA, 75 bp, Homo sapiens
tcagccacgaatgatgggaatacaacaggatccaatgcaccatcaggtcatagaaggttatgaaatagcctgcag

SEQ ID NO: 138194 - DNA, 82 bp, Homo sapiens
aacagagtcttcacccttctgattacaattcctagaccttctgtggcatctacacagtcaacttcaggaagctttcactgtg

SEQ ID NO: 138195 - DNA, 50 bp, Homo sapiens
caccccggaagctgggaaatggtaccagaggtttgaaaaggcatttctcc

SEQ ID NO: 138196 - DNA, 83 bp, Homo sapiens
aaagaacacactctggtcatcatctgtcctcaaggcagggcttgagcaattcagtttccctgcctgagtgttggtgacctgtg

SEQ ID NO: 138197 - DNA, 100 bp, Homo sapiens
gatcaaggccaagtatccgccagtcaataggaagtacgagtgatgtttgccacacgagtcactcgagagaatctctgagtcctggcgagggctttctgag

SEQ ID NO: 138198 - DNA, 51 bp, Homo sapiens
cctgttacatacatttcagaaacagggcgaacctttcctacacacccatac

SEQ ID NO: 138199 - DNA, 90 bp, Homo sapiens
gccctgcagtacctgcagaaggtctctggagacatcttcagcaggggaagtcatctacaataagaccgaccgagccggctgccatttcta

SEQ ID NO: 138200 - DNA, 121 bp, Homo sapiens
agcagatgacaaaacttcaagccaaacatcaagcagaatgtgatttgcttgaagatatgagcagcctcccgcgacgatgcccctcaacgttagcttcaccaacaggaactatgacctcgac

SEQ ID NO: 138201 - DNA, 82 bp, Homo sapiens
cttctttatccaagttatcattctgtcttttaattggggtgtgcattcaagagccctaatttgtttagaactgtaatatgca

SEQ ID NO: 138202 - DNA, 90 bp, Homo sapiens
ctcccaaagtgctgggattgcagccatcattggctagtgagtccaaccttctccagcagcgtgagtctggtctcagctccagcagctatg

SEQ ID NO: 138203 - DNA, 59 bp, Homo sapiens
tttggccctgtatcaggagcacagttatcaaatgcttgatggaaaatcttgaggaagaa

SEQ ID NO: 138204 - DNA, 83 bp, Homo sapiens
tgaccttcccaccaacagggaaaactatatccacagaacaagagccccaagacccgggacatccaggaggaggagctggaggt

SEQ ID NO: 138205 - DNA, 90 bp, Homo sapiens
cagtgatatgaatatcatcttggctggaggccaggtggacaacctgtcatcactgacttctgaaaaggcactatatttgtatgtgtcttg

SEQ ID NO: 138206 - DNA, 101 bp, Homo sapiens
gcaatttcctagacaatgaccagtggctgagcaccgtctcccagtacgaccgggacaagtactggaaccgctttcgagacaatgcagagccagagccccgg

SEQ ID NO: 138207 - DNA, 110 bp, Homo sapiens
agaggatttgcttttgtaacttttgatgatcatgatacagttgataaaattgttgcgcctgcctccagcaccctgaagatgctgtgtgatatgtcctccttaccaagttg

SEQ ID NO: 138208 - DNA, 82 bp, Homo sapiens
ctcagatctcctgaacctgtttctgctcagattgaggaaacaatggaagagtttggtgccctggttgtcagatgttggaaag

SEQ ID NO: 138209 - DNA, 82 bp, Homo sapiens
gaggcggctaaggaaaggtgccacagcagagacgcgaaggagaggccctagaaccgcaatgcatgaaccattgcaaacttgg

SEQ ID NO: 138210 - DNA, 75 bp, Homo sapiens
tcagcttgctttactctttcattgttgggacatgtatattgagttcaaagaggccttttcattgtttgaccggac

SEQ ID NO: 138211 - DNA, 100 bp, Homo sapiens
atgttcttaacccagaagtagctgaatgtgttactccattgctgaggagtgcaggttcaggagaagtggcacctggtggaggacctgtcgcgactgctgc

SEQ ID NO: 138212 - DNA, 101 bp, Homo sapiens
gcgctgctggcgctctggctgtgctgcgcgacccccgcgcatgaatgctgagatgtataaactgtcttcagagcaattccatgaggcagcctcaaagatgg

SEQ ID NO: 138213 - DNA, 76 bp, Homo sapiens
tgcagacattctggagctggatgttgagttggctactcctggcttcccctcctgaaagacggaagggtggtgacaa

SEQ ID NO: 138214 - DNA, 100 bp, Homo sapiens
ctgccctggccctgctcagcgccagcggcactggctccgccgcccaagccagcaatacaggaatgcacaggaggcaaatcactgaccttttagaccaaag

SEQ ID NO: 138215 - DNA, 100 bp, Homo sapiens
cggcggcgctggggcccccagaagtgatcgctcagctggagaacgcggctaaagttctgatggtattagaaaactactcggatgctccaatgacaccaaa

SEQ ID NO: 138216 - DNA, 102 bp, Homo sapiens
ggtttatcaaaatcacgttataatcagattttgaccaagcattttgtaagaagctaaaccagccccagaaatatttgaaaatgaagtcatggccctgctgag

SEQ ID NO: 138217 - DNA, 83 bp, Homo sapiens
acaggaatcatgactcctggagaacggatcaagtgcttattacagattcgacggaggcgccttgcacgacttgctggtggaca

SEQ ID NO: 138218 - DNA, 100 bp, Homo sapiens
atcagaatcgagagggcctgagggccctgcagaaggatctcagcctctctggtgttgctctcttgccattcgtggatgagcgaaggctacgagctgccct

SEQ ID NO: 138219 - DNA, 50 bp, Homo sapiens
gtgaaatttgaaaactgtacattcggcttaccactcttctctcatggatc

SEQ ID NO: 138220 - DNA, 50 bp, Homo sapiens
tcctgctcctgctcatggacgacgagttcaaagaaggacgcagagccagc

SEQ ID NO: 138221 - DNA, 101 bp, Homo sapiens
ggtggtggcaggggaggccgaggaggaggaagaggaggaggtggaggcttccattctggtggcaaccggggtcgtggtcggggaggaaaaagaggaaacca

SEQ ID NO: 138222 - DNA, 83 bp, Homo sapiens
tgggaatttccgtcccccaccaagtccggatgctcactccaaagtctcagcaggattttttatcaagcagaaatgcatcgaac

SEQ ID NO: 138223 - DNA, 74 bp, Homo sapiens
gggccttactccttcacagatcggggcctttacaacaactaaacggacaggcattccagccccacgggaatttt

SEQ ID NO: 138224 - DNA, 90 bp, Homo sapiens
ggacgccgccgaagaagcatcgttaaagtctctcttcaccctgccgtcatgtctaagtcagaggttctgtggatggagttataaaggaag

SEQ ID NO: 138225 - DNA, 83 bp, Homo sapiens
cagctgctgtcagcatggcccaggctcctgctgacccgggcagagaagattcctgacattcagacaactgacttgtaactgac

SEQ ID NO: 138226 - DNA, 100 bp, Homo sapiens
gtatgaccacaaacagccatcaagactctgtttgctggctacacggacaacctggtgcgagtgtggcaggtgaccattggcacacgctagaagtttatgg

SEQ ID NO: 138227 - DNA, 80 bp, Homo sapiens
tcggatcatgtctggtggctccgcggattataacaggtgctttgcaagatatcaccttgtcacagcagaccccctccact

SEQ ID NO: 138228 - DNA, 74 bp, Homo sapiens
ccccgggtgaaagagtctatgcagatgcaggtgaagatggagctggaaaaacaagcttaataagaaaaattcag

SEQ ID NO: 138229 - DNA, 100 bp, Homo sapiens
cgagagatggtcaggtctggagctcgaccgggccaggtaatcttcagcaagtactgcaactccagcgacatcatggacctgttctgcatcgccaccggcc

SEQ ID NO: 138230 - DNA, 100 bp, Homo sapiens
gctacaacttggagaatggaaaagaaccattgaagcttgagagaaaagcccccaaaagcagctattcaggacacaactcagatgggaagttcatcgcccg

SEQ ID NO: 138231 - DNA, 100 bp, Homo sapiens
ctcccgtcgcagccgcgcagccgccgcagagtccgcggcgccaccgctcgccctccaggaagactatgaccgtctgaggcctttatcttacccaatgacc

SEQ ID NO: 138232 - DNA, 90 bp, Homo sapiens
gagctcccacctgctgaactggtgcagagggacgtggatgcctctccctcgcctctgtcagctccaggacacgcgcgccccgagcctggg

SEQ ID NO: 138233 - DNA, 50 bp, Homo sapiens
gacctctcggacacggtgcaggcagtaatggaggggaaagttccagtcgc

SEQ ID NO: 138234 - DNA, 75 bp, Homo sapiens
cgttgacctgccccttgtcctggccccggacttgggaccctggaggactgacgctgctggcctgggcgtcccctt

SEQ ID NO: 138235 - DNA, 99 bp, Homo sapiens
gtaaatggagctcctgtttatgttgttcgaagtggtggccttgtaaaaactagatcaaaaaacattcggattgaagataaaactttccaagtccttggt

SEQ ID NO: 138236 - DNA, 100 bp, Homo sapiens
cacgtcataaagtcagatcttgtgaatgaagaagcaactggccagttccgggtataccggtggctacggaccacaacatggataacacgtcaactgtgct

SEQ ID NO: 138237 - DNA, 76 bp, Homo sapiens
gcgggagctgggcttcccgtacatgacgccggtgcaggctggaaaacattttcagacactgtgctttatcctgaaa

SEQ ID NO: 138238 - DNA, 82 bp, Homo sapiens
gtcctgaccaccgtgaacggacagtcccccccagtggcattctgggactcgccttggatgacttctccattagtgttctgga

SEQ ID NO: 138239 - DNA, 80 bp, Homo sapiens
gcggacggtggcgttaagggaacgctgaggtcccgcgctccccgaccgaggtcaaaatgcagatcttcgtgaaaaccctt

SEQ ID NO: 138240 - DNA, 98 bp, Homo sapiens
agtgttcatggagttcattgaattatggcatagatcttgggaaaattgcggactcagcccaggagagtgttattactcgagatattcatcgtacattt

SEQ ID NO: 138241 - DNA, 100 bp, Homo sapiens
ctgtctgggaccttctccctgcctggacccctactattgcaacaagtgataacaatattgcccaagtacctaagcaaacagataacaaccctacggagcc

SEQ ID NO: 138242 - DNA, 75 bp, Homo sapiens
gctcagcaggagcttcatcaacgatatatgtcagatctaaaggtggaagaactcagtaaaatactccaacgtggg

SEQ ID NO: 138243 - DNA, 75 bp, Homo sapiens
acaagtccccagggaatgccacagcatcctccagcacctcagtacgaatgtaaagttatcgcagaaaaatctcat

SEQ ID NO: 138244 - DNA, 83 bp, Homo sapiens
ttggctgccgtccccgctgctgtgcattgggagacgcaggtcagaatggaaatgggctgcagaccgggcagctattgtcagcc

SEQ ID NO: 138245 - DNA, 101 bp, Homo sapiens
caagaggctaggtattcctgacagtgatgtccttgcattgcccatttttaagcaagaagagtcgagtttgcctcctgataatgagaataaaatcctgcctt

SEQ ID NO: 138246 - DNA, 100 bp, Homo sapiens
aagcggcgagtaagatggaagatgaggaggtcgctgagagctgggaagaggcggcagacagcgggacaactcgagagatgatcgctcgttctgctgctac

SEQ ID NO: 138247 - DNA, 75 bp, Homo sapiens
aaggtcccggaccccccggatctgacggggcgggacctggcgccaccttgcagaatactgggatcttcagtggca

SEQ ID NO: 138248 - DNA, 50 bp, Homo sapiens
gcgtgaaccacatgcccagcacgggtactccaaagattcaggtttactca

SEQ ID NO: 138249 - DNA, 80 bp, Homo sapiens
gcgagctgagtggttgtgtggtcgcgtctcggaaaccggtagcgcttgcagcatgtgttctaagaacggaagcatctggg

SEQ ID NO: 138250 - DNA, 77 bp, Homo sapiens
ggaaatgttatgcagctcagcaaggtgaaggtggtgctggctagagtgtatacgtttggacccaagcttaacttttc

SEQ ID NO: 138251 - DNA, 100 bp, Homo sapiens
ctggcaggaatcccaatttgcctccacttagtgagcggaagaatgacattgggtttgcctatcacagatgaacaaatccaggagatgaaatcaaacctgg

SEQ ID NO: 138252 - DNA, 87 bp, Homo sapiens
aaattcacgcatcaggcgcgggaagcggtcagcccaaggccaaccccactgtcactctgttcccgccctcctctgaggagctccaag

SEQ ID NO: 138253 - DNA, 97 bp, Homo sapiens
ggtgcagggcctgattgaggactgccagctggcgctgcaggtgctggacgtcattgctcctccttatacctctgacttcgtgcaacttttcctcccc

SEQ ID NO: 138254 - DNA, 90 bp, Homo sapiens
cattcctattacagaccgaagaagtacttttcaggcacacttggctccagtggtttgtcccaaacagatacgtaggtaacctttccagag

SEQ ID NO: 138255 - DNA, 75 bp, Homo sapiens
acccgtgggacgcggctgagacagatgaagggcgccctaatggagatcatccagctcgccagcctcgactcggac

SEQ ID NO: 138256 - DNA, 96 bp, Homo sapiens
cacctttataacaaccgctatgctgggtgtaccaacagtaccgttattgccaccacaagtaaaccagtccctcacttctgtgccaccaatgaatcc

SEQ ID NO: 138257 - DNA, 75 bp, Homo sapiens
tggcttttactaaaaatggacgcctggcaaccaaggccgttgctccagggagaactgcaaatatcttcatccacc

SEQ ID NO: 138258 - DNA, 51 bp, Homo sapiens
tctctggtcttcaacaacactatcatcagatgggttgttgttgtcccagag

SEQ ID NO: 138259 - DNA, 83 bp, Homo sapiens
ttactggtcccaccccatcgacctgcacttcgccaccaaaggtcttcaaggaaaacattgctggggtcttcaacaagtcctgt

SEQ ID NO: 138260 - DNA, 100 bp, Homo sapiens
gcattctccagggaaaggatgacatatttttggacctgaaacagaaattctggaacacctatatgggtcccctcctaaccgcaagcgtcctgctaacgag

SEQ ID NO: 138261 - DNA, 83 bp, Homo sapiens
ttccaggaatgctaattattgatactcctgggcatgaatctttcaggtataatgggtctctcccaaatggcgatagaggaagg

SEQ ID NO: 138262 - DNA, 75 bp, Homo sapiens
gatcttcacagcacagttcctgggaaggtggagccaccagcctctccctggtgttgagagagaaaagaattcctc

SEQ ID NO: 138263 - DNA, 101 bp, Homo sapiens
gaaattttgtggaaagcctgtatgacaccacgctggaactttcttctcgaaagaagcattccttggcttgagtttgaagaaacagaagaacctgattttac

SEQ ID NO: 138264 - DNA, 83 bp, Homo sapiens
gggctggagcagcttcaccactggagccagccggtttgcctcggcagccaaggagggcgtgtttccccccgggccggcctgcc

SEQ ID NO: 138265 - DNA, 75 bp, Homo sapiens
gagcttgccgccctgtaggcttggcgctgggctctcggtatcatgatattagctggtttgacatcaagtcatttg

SEQ ID NO: 138266 - DNA, 75 bp, Homo sapiens
gcctgcagcgggagctggacggcgagcgcgagcggcgcgagaaagactttccttatcccagttgattgtgcagaa

SEQ ID NO: 138267 - DNA, 75 bp, Homo sapiens
tcctagttggcattgaaggttcactcaaaggcaggaatgacatctttgtgttcctgttaagcacacgagctggag

SEQ ID NO: 138268 - DNA, 98 bp, Homo sapiens
cacaagttccaaggttacgtttcaggtcagtatagaccttctgatttgctgtgccctgagacatatgtttgggtacccattgagcaatgcctgccttc

SEQ ID NO: 138269 - DNA, 100 bp, Homo sapiens
ctgtcatcaagccctttgccaccattccttcaaatgagatatggctcgtggacagcagaaaattcagtctcagcagaaaaatgccaaaaagcaagctgga

SEQ ID NO: 138270 - DNA, 104 bp, Homo sapiens
gctctgtggggctctggccgcgcctggcctggccgggaccatgacaatgcagatcttcgtgaagactctgactggtaagaccatcaccctcgaggttgagccca

SEQ ID NO: 138271 - DNA, 90 bp, Homo sapiens
gaacagacgcatcactggccgagcccactggggctcacaccacgcagttgtccaaccaaaatctagtactttgctattcaaaagtgtctg

SEQ ID NO: 138272 - DNA, 144 bp, Homo sapiens
tgggctggggctccctgtatgcatggtgtggggttggtgtgattagcttcgcagtctggaaagctttaggagttcacagtaatgtgacagtgatgataacatgggtgccaaaaatacttcaataggagaagaatttatatccac

SEQ ID NO: 138273 - DNA, 100 bp, Homo sapiens
tccgcggttcctcctcctgtcgctgcccgtgtgattactgagactcaggcaattaagttggaatatgcaaggttggttaagttggcccaagaagacaccc

SEQ ID NO: 138274 - DNA, 98 bp, Homo sapiens
atggaggaggggcggcgctgcggccacccggcaggtactataagatctccgtggtgctcatgtgctttgtggtccccacgctggtgccctggtacatc

SEQ ID NO: 138275 - DNA, 89 bp, Homo sapiens
tggagcccacctgctttgagaagagcaatgacattgggggcctgtggaaattttcagtaatcaaatgcaaagcagctgtgctatgggag

SEQ ID NO: 138276 - DNA, 100 bp, Homo sapiens
gacgacaagatataagaaatggagacccactgactcactgttcagacttacaccatggttctggagatatatcttcagattctattgaccacagcccagc

SEQ ID NO: 138277 - DNA, 116 bp, Homo sapiens
cggcctcttcctgttgcaccaggttcttcgaaaactgaagcagatgttgaacaacaagaattaaatatgggtgatgttgagaaaggcaagaagatttttattatgaagtgttccca

SEQ ID NO: 138278 - DNA, 50 bp, Homo sapiens
atgatgacagagaagatctttttgcaggccctcgggaccaaggatcacgt

SEQ ID NO: 138279 - DNA, 100 bp, Homo sapiens
caggaagctcagcggtgggcagtcctagtccgaggtgccaccgtggaaggacagaatggtcccaggtgtgacaccttcagcaggtctcagggaagatggc

SEQ ID NO: 138280 - DNA, 82 bp, Homo sapiens
cgcgcgctatggcaccttcgcctggcccaccactcccagagtgacctagagtcccgcagggatgtgaagagagaagaaggag

SEQ ID NO: 138281 - DNA, 75 bp, Homo sapiens
accagcccatgcccctgaaggcctcgctggagatcgagtaccaacaaatccagtttgctgatgacatgcaggagt

SEQ ID NO: 138282 - DNA, 100 bp, Homo sapiens
atcgccagagagttctgtgtttcatcaccgccgaaaggtgctgctgttttttcaaacgaaggaaaaggaaaaccatacagcgccacaaatgactctggac

SEQ ID NO: 138283 - DNA, 100 bp, Homo sapiens
tgcttttccaacatcaagatcttcctggtgtccgagtgcgccctgatgctggcgcagggcacggtgggcgcctacctgccagaactgtgtagatgcgtac

SEQ ID NO: 138284 - DNA, 90 bp, Homo sapiens
gttttatcctagaggataaaggaaatctttgggaaagtcagtattttatatagcaagaggacccagacagcgtgccccccatcgatgtcc

SEQ ID NO: 138285 - DNA, 98 bp, Homo sapiens
acttcccaagctgaaccggcggctctcccaccctggacacttctggaagtcagctgagttagctgctgaatcaaagcttcaaacagaagttaaagaag

SEQ ID NO: 138286 - DNA, 98 bp, Homo sapiens
tttctacaggaacacgaggaaactccacatttgataatgggctgcattaaaagtaaagaaaacaaaagtccagccattaaatacagacctgaaaatac

SEQ ID NO: 138287 - DNA, 74 bp, Homo sapiens
tgctgtctccttagctgctcacatatggatactttcacagttcagtcatcagtgagttctgcctcagtcagctc

SEQ ID NO: 138288 - DNA, 75 bp, Homo sapiens
tgattgatgctcgtgactgcccacatataggcttctatgaggaggtggccaacccactgctgacgggtgtggaga

SEQ ID NO: 138289 - DNA, 98 bp, Homo sapiens
agatgtctgacagccctgtgtgacaccaagataagtaacatgaggtttatataactttccaagacaaggaagttgtgcaaagcctcacagctactaag

SEQ ID NO: 138290 - DNA, 83 bp, Homo sapiens
gttggtgattctctgctagatgttgtggttgaaaataatctagatattgatggctttgttccagtgtctcgccccatcctcac

SEQ ID NO: 138291 - DNA, 100 bp, Homo sapiens
catggaggacgaggagagacagaagaagctggaggccggcaaagccaaggttcggctttccagtttggcagcagcactacaaatttcaacttcacaaaca

SEQ ID NO: 138292 - DNA, 100 bp, Homo sapiens
cgagtacgactacctattcaaagacctcctgccccccgaggtctgcagtctcctgaacccagcagccatctacgccaacaacgagatcagcctgcgtgac

SEQ ID NO: 138293 - DNA, 100 bp, Homo sapiens
ctaagaggccatctgtgaggctcagtctcccaacacctctgtttcaccagtgatcattaaagaatgggcagcttacaaaggaaagtctcctcaaaccccg

SEQ ID NO: 138294 - DNA, 100 bp, Homo sapiens
tcacccttccgctcctccgcactcatgacatatctgaagagatggattaagaatgctttggattaaggattgtggagcacatttcaatcattttaggatt

SEQ ID NO: 138295 - DNA, 50 bp, Homo sapiens
cttcaccaggggagatggcacaggagggcactccacagaaggatgttatt

SEQ ID NO: 138296 - DNA, 50 bp, Homo sapiens
ccgagaaaccgcagcactacacggagtggagcttggtttcgggatctcgg

SEQ ID NO: 138297 - DNA, 74 bp, Homo sapiens
cagccgcggagcagtagccgccgtgggagggagccatgaagcattacgaggcttttatcttgagaacatggtgt

SEQ ID NO: 138298 - DNA, 50 bp, Homo sapiens
ctgactttcagctatggaatcggaggatttgttggtattgaggaaaacgg

SEQ ID NO: 138299 - DNA, 102 bp, Homo sapiens
gtgaggagtggctgggacaactacgagtttgacatcaatgaaggtctggatgtaccgactgcttttggaataaaaagattcccaggatgtgagcaacacggg

SEQ ID NO: 138300 - DNA, 82 bp, Homo sapiens
tgatccgcggcctggggcaggaatgcgtcctgagcagcagccccgcggtgctgggtagacatagctgacattgagaatgaag

SEQ ID NO: 138301 - DNA, 100 bp, Homo sapiens
aaagagtaccgtgagaagatagaggcagaactgcaggacatctgcaatgatgttctgatgagtgaccgaggaggtggcgttcctttgaggaaaattgaca

SEQ ID NO: 138302 - DNA, 92 bp, Homo sapiens
cttcaaggagggccagaccatcaagctcaacatcgcaaccccatgccacagctggatgtgactgaggccaacaaggagttcatggaacagag

SEQ ID NO: 138303 - DNA, 83 bp, Homo sapiens
cgcagcaacaccaggagaggccgggggcagccgccatcggcagcgccaggctgaaggggatgctaagggagataaagcaaagg

SEQ ID NO: 138304 - DNA, 100 bp, Homo sapiens
ctggacaccacacacatcatcagtctgactctgagatttgcccacctgatgaccttgccagcttgccatcatgcaaagaaaatcctgaagatgttctgag

SEQ ID NO: 138305 - DNA, 75 bp, Homo sapiens
atgggctggcatggtcatattacatcggatatctgcggctgatcctgccaggttgggtatctacagccattggtt

SEQ ID NO: 138306 - DNA, 75 bp, Homo sapiens
acttccagctctcagtagactggccagaaagagtatggaagagttggagaagaatcatgataatctacttactgg

SEQ ID NO: 138307 - DNA, 100 bp, Homo sapiens
tagctttagtgaaatgggctaataatgctggcaaagtggaaaaatgtgcgaaatacaaacctggtcgatgtgatgatattttgaaatggaagcctcccag

SEQ ID NO: 138308 - DNA, 98 bp, Homo sapiens
ccaactcaagcaagtaactcccagttcatccccattcatcaccctggagccttccctcctcttcccagcaggccaggggccagtgtcattcaaggacg

SEQ ID NO: 138309 - DNA, 82 bp, Homo sapiens
ataagtggaattttggagatattcaaagataaacaggggtcacatgacgacagaagccaagagggctgcaaagatggaaaag

SEQ ID NO: 138310 - DNA, 100 bp, Homo sapiens
cgcgtttcccgcaacccgataccatcggacaggatttctccgcctcagcccaacggggagctaaaccaggtggacaggtgaaatgtcagtatatctctgc

SEQ ID NO: 138311 - DNA, 51 bp, Homo sapiens
tggagccgccggagtctgagaagtgatcttccattgtttgaagcactggac

SEQ ID NO: 138312 - DNA, 83 bp, Homo sapiens
agcagccgatccagcctgcggagcctgtggggcagatggtgtgggagagcggctgcgtggtgatcgtcatgctgacacccctc

SEQ ID NO: 138313 - DNA, 83 bp, Homo sapiens
atgttgtggggagagccaggggatggttttccatactggaacccaaaggtaaagacactcaaggacagacatttttggcagag

SEQ ID NO: 138314 - DNA, 106 bp, Homo sapiens
ggagtgcgtggaggagctgtgcagccgcgaggaggcgcgggaggtgttcgagaacgaccccgagacgcagggagagcaacaagccccggccctcagagctcagccg

SEQ ID NO: 138315 - DNA, 88 bp, Homo sapiens
cggcggcaagctggctgcgagcggctgagattagaagcccaggacccaggaaggagacacaggaaatttattcaaagtccccacgctg

SEQ ID NO: 138316 - DNA, 96 bp, Homo sapiens
aggaacatcgatgtcccaaagagactttgggtcacttggaaaaagcagtggttcttgaacttaccttgaagcatgtgaaagcactaacaaacctaa

SEQ ID NO: 138317 - DNA, 122 bp, Homo sapiens
ccaccaccaccatctccatcacccaccaacaacaccacaataatccacagccaagaagtccaaggcttgcgagaaggtcatttccgtgggtcaaacggtcatcacgaagcatcggaacaccc

SEQ ID NO: 138318 - DNA, 75 bp, Homo sapiens
cacgtgttcagtcatcacaaccctcaaaggacatgaaggggccctggtgaaaacagatgaacaagaagtaatcaa

SEQ ID NO: 138319 - DNA, 98 bp, Homo sapiens
agtggacactccaggaagagcggccccgcggggggcgatgaccgtgcgctgaccctgactcactccagatgggaatttcttagccataggctcacatg

SEQ ID NO: 138320 - DNA, 98 bp, Homo sapiens
ggccacggcgctggtcaccggggtctgcctggcgggacctggacttcaccatcgacctggacttcaagggccagctgtgcgagctgtcctgctccacc

SEQ ID NO: 138321 - DNA, 75 bp, Homo sapiens
cggccgcgcgggccgggaggggacggccgccggagccgcgaggccaaggactggtgattgcagctggaagtgccc

SEQ ID NO: 138322 - DNA, 75 bp, Homo sapiens
ggctgtgcgcgctggcgctgagcctgcagccggccctgccgggctggaccccaatggagaacaggtggtgtggca

SEQ ID NO: 138323 - DNA, 97 bp, Homo sapiens
gacagtatgaggcaagcgcagggggacggggaccagcagctgtcgccgccgctctcagccagcgtcccatgctcggtggccccagaaaagtcagtgt

SEQ ID NO: 138324 - DNA, 101 bp, Homo sapiens
gccggggccgcctcctcccgcacggacccatgaaccagccgggcggcgcggcggctccgcaggataaggaagcctgtgtgggtaccaacaatcaaagctac

SEQ ID NO: 138325 - DNA, 75 bp, Homo sapiens
gttggctgggtcctctccgaaatcgacagcctcaaccttcataaacaggtaactaggatttctacctcaaccgcg

SEQ ID NO: 138326 - DNA, 83 bp, Homo sapiens
cggagcgcaacactcgcttggttggggagatcggcgcttggccgggctgcccttgagatggagttgctgcctctttggctctg

SEQ ID NO: 138327 - DNA, 74 bp, Homo sapiens
tggagcagaatttatcagatcatatcaaactctcagcagcttcatggagtttggccacaagatgttgttgacgg

SEQ ID NO: 138328 - DNA, 100 bp, Homo sapiens
aatgtgaaaatttatctgcacatacagaaccagtccataatacagaccgagtgacggttctctacaggagcaaagccattcgctatacctggccttgtcc

SEQ ID NO: 138329 - DNA, 100 bp, Homo sapiens
ctgtgagaaaaacgatcctttgtctttgttagatgattcgaagtttcctatagaggataccccattggttccagtgagggacttgtgcattgcttatatg

SEQ ID NO: 138330 - DNA, 100 bp, Homo sapiens
ggttacagctgtttccacgtgcggtgctcgtcgggagtgatcacctaccctacaggagtctccccaggacagtgctatcacccgggatattaaccgaaca

SEQ ID NO: 138331 - DNA, 100 bp, Homo sapiens
ctgccgcggtggtcgccgttgagtccgtccgtgccgctggggccgaggcagctggagggctgttgataatcaggtgtatgtggccacagcctctcctgcc

SEQ ID NO: 138332 - DNA, 100 bp, Homo sapiens
aagactgattttatgggaaaattaagcagatgctccagtttgagaaacctggatctgcgatctgtttgtgtctgaagttgcagccggagtgaagaagagc

SEQ ID NO: 138333 - DNA, 100 bp, Homo sapiens
ccttggtggttgtagaagatgatgatcagatgaggtttatataactttccaagacaaggaagttgtgcaaagcctcacagctactaagaggctgggctgg

SEQ ID NO: 138334 - DNA, 99 bp, Homo sapiens
ctttggatcagattattcacgaagctctagaaaggattacctgagctggaattggaagcaattgataaccaatttggacaaccaggaacaggcgatcag

SEQ ID NO: 138335 - DNA, 78 bp, Homo sapiens
ggatggctggaggtgcagggccaggaggaacatgagccgttcgaggctccatccagcaagttacccacgagcctgagc

SEQ ID NO: 138336 - DNA, 98 bp, Homo sapiens
ccggatctggtaacatggcaaaagatacatgcaagaaagcacttcagccaagcagaagggagccagctggacgaggtgcgccaggccatgggcatgct

SEQ ID NO: 138337 - DNA, 100 bp, Homo sapiens
gctgctcacgcccgacgggttcacgccgcccctgccccgtgaaggaccgcgctgcggtgcggaggttcaagctgaagttcctggatctcccatatttgtg

SEQ ID NO: 138338 - DNA, 74 bp, Homo sapiens
gttagtcaccagctgctcctccgtcttctcaggagaccagctggtccaacttgttttgacagggcaatggaaga

SEQ ID NO: 138339 - DNA, 92 bp, Homo sapiens
catgatctacaggaacttggtagtagtcaatcagcaggcttatggtgctgctatctggagtaatagctttcatggtgaacttatcaatttat

SEQ ID NO: 138340 - DNA, 82 bp, Homo sapiens
tacgggatccgctttgacgtgatggtgaacggcaagggtgaggtggctttgaccccgggttgcccggccagcacgaccgagg

SEQ ID NO: 138341 - DNA, 75 bp, Homo sapiens
cacatcactcggaagccccccatcaaggaaggtgatgaagacgtatacggggaggttcgagaagaggcatctgat

SEQ ID NO: 138342 - DNA, 90 bp, Homo sapiens
gctttcagccggagaagcgagtttcagctgaggatgaaagtcctggacagacttatcacagagagagaagaaacgcaatcactatgcagc

SEQ ID NO: 138343 - DNA, 75 bp, Homo sapiens
aattgccacacggtggggcccaacgaggcgctggtggtttcaggttgaagaagcctcagcggaggcgatacggcc

SEQ ID NO: 138344 - DNA, 75 bp, Homo sapiens
ttctcagtttctcggtttatgtgctcttccagacctagaggatcaagacataatgggagcatttttagacaagcc

SEQ ID NO: 138345 - DNA, 80 bp, Homo sapiens
ccccggacaagggcagcttcccgctggatcacttagacaatgcagatcttcgtgaagactctgactggtaagaccatcac

SEQ ID NO: 138346 - DNA, 100 bp, Homo sapiens
cggcactgctactgcgaagacagctggcagggctgggtataagtaagcaagaagagggcctgggagaagagtctgacgagcaaggggaaggtagccaagg

SEQ ID NO: 138347 - DNA, 50 bp, Homo sapiens
ggatgtaccacctttctggcaatgaggctgaccaactgactgaagagcag

SEQ ID NO: 138348 - DNA, 74 bp, Homo sapiens
ttaaaaaggctcagaaagatggatttttgcatgagacgcttctggacagattatatctgattaactcccctgtg

SEQ ID NO: 138349 - DNA, 80 bp, Homo sapiens
aaggaagcaggcccgttggaagtggttgtgtagcagtagctgatgtgcagtttggccccatgagatttcatcaagatcaa

SEQ ID NO: 138350 - DNA, 83 bp, Homo sapiens
ggggaagcggcggggtgctgttcacccactcccagatggctggcagcaggcaccatgggcaccgtgactgtgatcagccccct

SEQ ID NO: 138351 - DNA, 82 bp, Homo sapiens
gttcggttaaaggagcctcctgtggatatctgtctaagtaaggtttttcacgactgaaaacaacatagcaaaataagccaag

SEQ ID NO: 138352 - DNA, 83 bp, Homo sapiens
caggtcgcagggcggcctgcagctgggccgcggccgaggaggcagcgcgacctccgcacgacaatgcagatcttcgtgaagac

SEQ ID NO: 138353 - DNA, 80 bp, Homo sapiens
ggctgtgccgttggtcctgtgcggtcacttagccaagaacatgctgtttgagagcatccaggagggcaagtacgagttcc

SEQ ID NO: 138354 - DNA, 100 bp, Homo sapiens
aaggacaaggagttggtcctcgagtaaagagacggccacgccgacagaaacctgggctgatcccttatccaacatggttctaaccttcagtactaaagaa

SEQ ID NO: 138355 - DNA, 101 bp, Homo sapiens
ataggctgcgctaccggaatgtcatccagcgagtgattagttccgccatggagtcatagttgcagctgactccagggctacagcgggtgcttacattgcct

SEQ ID NO: 138356 - DNA, 94 bp, Homo sapiens
gagctttttggaggcaaaagcagaaaacttacacagaggggctcatcattatacaggggatctgtggttgtggttccggagaatctggttgtgc

SEQ ID NO: 138357 - DNA, 75 bp, Homo sapiens
ggagctggttatccaacagaagcttctggtgcccaaagaatcttatgtggaatctatggatttcctgaaatatgt

SEQ ID NO: 138358 - DNA, 90 bp, Homo sapiens
ccccacgtcccccaaagaagaagtatcagaaagcagggctgtattctgacgtttacaaaactacagaacgccacaggtcatcatctggat

SEQ ID NO: 138359 - DNA, 82 bp, Homo sapiens
cacacgtcctcgtctcgttcctgatcgaacgtggtgatgagatcgtggggctcaccagcgtcccccatggcttctgagtagc

SEQ ID NO: 138360 - DNA, 82 bp, Homo sapiens
attacctgcaaatcaatatacttggtcttctagaggacctagacattcactactttcactgcctaagaatcctggaccttct

SEQ ID NO: 138361 - DNA, 98 bp, Homo sapiens
aaattgtcactggatttaatgggtctctaattaacagaagatggcaaagcccagccacagcagctatgtccttcagcagctaaacaaccaaagagaat

SEQ ID NO: 138362 - DNA, 75 bp, Homo sapiens
atgaaatacgaagatgcagtacaattcataagacagtgttggggatgtcctttgcactgaccctgaactgccaga

SEQ ID NO: 138363 - DNA, 96 bp, Homo sapiens
tacacccccaaagagcaactgaagattcatacgcagctggcagatattatcatagttgctgcaggccattatgctgctggattggacctcaatgac

SEQ ID NO: 138364 - DNA, 83 bp, Homo sapiens
caccaccccaggtactgcagggtggggcacttccgccacaggagccgacatctgaatgggactccgagtgccttacatccctg

SEQ ID NO: 138365 - DNA, 98 bp, Homo sapiens
ggagaaggaatatcccaaccgggataagttctgaacgtcgaaaagaaaagtctcgagatgcagccagatctcggcgaagtaaagaatctgaagttttt

SEQ ID NO: 138366 - DNA, 75 bp, Homo sapiens
gagtgtagttgagagctcggccccaggagccaataacctgcagattgcccgtgaggcagaggctgccatctacca

SEQ ID NO: 138367 - DNA, 100 bp, Homo sapiens
atataatgaagactagttttccagaccaaactgcagctggaatacccagtacagttctgcttactacacttcaagaaagatctgaaagcggaaaaagaac

SEQ ID NO: 138368 - DNA, 98 bp, Homo sapiens
gtcttattggctaaataactaaccaagagccactgagagaggaagactctgatttcatcctgaccgaaggcgacctgacattgacctacggggacagc

SEQ ID NO: 138369 - DNA, 89 bp, Homo sapiens
cggagccagaggagaggcgcccccgccggccgccgcgccgcccggcagcctcggcaggtcgaaatgagaaggggcagctgggacatggt

SEQ ID NO: 138370 - DNA, 80 bp, Homo sapiens
atggcagccagtcagtggtggaggtggtagacttgctgctggctcgaggtgcaaataaagaacataggaacgtatctgat

SEQ ID NO: 138371 - DNA, 100 bp, Homo sapiens
gaaaagagatattgactcctgtggcagtggaaagacccaagaatgccagtcaagaagacagatattaataaggcagcggaaagaagaaatatgaatacgg

SEQ ID NO: 138372 - DNA, 100 bp, Homo sapiens
atttgtgactttgtcaatcagtgccatgatcccaacgaagcagcccatgcggtgactgaacaggtgttcgaaatccgcaccactgatgacctcactgagg

SEQ ID NO: 138373 - DNA, 100 bp, Homo sapiens
ctgcctactgggtcgtcttctcggcgacaactgccctgctcttcatcccaggattctttctactaatccagatacttgttgaagtgctgactagtttctt

SEQ ID NO: 138374 - DNA, 82 bp, Homo sapiens
ctcaaggacacggtctacaccgacttcgacggttctgcggggagtgtctccagccctgcctgcaggtgccatccccgctgtg

SEQ ID NO: 138375 - DNA, 90 bp, Homo sapiens
ctgtaccacactgaggagcgcggccagccctgctcgcagaattaccgcctcttctttaagggagacgtggtgggcggtccttcctgtgac

SEQ ID NO: 138376 - DNA, 88 bp, Homo sapiens
caaggagccagacttcctgtgttaactccttcctctgccactttttaccttggggacctcagcttcgggctcagaatcaggttctgaa

SEQ ID NO: 138377 - DNA, 80 bp, Homo sapiens
cggatcatggccgcagccgctctggggcaggtgtgccttgcacatacaaaaaagaacctgttcgtatatctaatggaaat

SEQ ID NO: 138378 - DNA, 75 bp, Homo sapiens
ctccagctccgctctcttcggctgccccaatccccggcagctctctcagaggcgacaggaagaagggtattacag

SEQ ID NO: 138379 - DNA, 82 bp, Homo sapiens
ccagggcagagccagaaaagcaagagtttctgtttagatgaccagtctcctggagttgggctgttcctacacagatgttgct

SEQ ID NO: 138380 - DNA, 104 bp, Homo sapiens
tccaccaccacctgctcctggccgcctgcatgcacagtggctttaagatcctcaactgccaaaaggcaatggtggagacctttggcgacttggcctttggcgac

SEQ ID NO: 138381 - DNA, 75 bp, Homo sapiens
ggccgaaccaaccgagtcggatcctgaccctaaaacctagtgtagaagacgcattcagtttcacctccaaagtca

SEQ ID NO: 138382 - DNA, 100 bp, Homo sapiens
cgtgctggtgtctgagtggatggggacctgcctgctgcggttaagaagattgtctaccaaatatagaacagaaaagatatatcccacagccactggagaa

SEQ ID NO: 138383 - DNA, 76 bp, Homo sapiens
caacatgtgcatggggaggaccagtcgtggccgcttggacaccaggcccttctgtagcggtcggggcaacttcagc

SEQ ID NO: 138384 - DNA, 100 bp, Homo sapiens
tcttgtggacaaatccaggggaaggtcaaaatgcagatcttcgtgaaaacccttaccggcaagaccatcacccttgaggtggagcccagtgacaccatcg

SEQ ID NO: 138385 - DNA, 76 bp, Homo sapiens
ttcagtgcccttccttgataagctgtttaaaccagtgccggtggtggtgtgcacattgagccccggtatagacagt

SEQ ID NO: 138386 - DNA, 86 bp, Homo sapiens
tggcacctgagctgacctttgatttccccatcgagactgtggacttcccaagtaagaagcggaagaggagccgctggaaccaagac

SEQ ID NO: 138387 - DNA, 101 bp, Homo sapiens
gaggacaaagaagcagagacggcgcgactactcattatcgccagcattggccagctgaagacgctgaacaaatgtgagatacgatgaatggattaaagcag

SEQ ID NO: 138388 - DNA, 100 bp, Homo sapiens
tcagatgtggtggaatatgccaaggaaaaactggagagcttcatcaaaaatagtgatagctttgataaacacaacacttacctccaggaatgtacaggcc

SEQ ID NO: 138389 - DNA, 100 bp, Homo sapiens
atgaactcgaacacttgcaggataattacgacaatgcagatcttcgtgaagactctgactggtaagaccatcaccctcgaggttgagcccagtgacacca

SEQ ID NO: 138390 - DNA, 50 bp, Homo sapiens
ctacactgagtcggaggcgaagatgacgacaacccccccgtgtcttttgt

SEQ ID NO: 138391 - DNA, 75 bp, Homo sapiens
gtttgcgacgttccctcagcctctgcccaaagaaagaaggaggattaaggctgctgtcccaagcatcaaattctg

SEQ ID NO: 138392 - DNA, 96 bp, Homo sapiens
ggagccccaaccgcgctgccggcacccagattggctgaaaacttctgtgtctgccatttagctactggggacatgctgagggccatggtggcttct

SEQ ID NO: 138393 - DNA, 100 bp, Homo sapiens
cgcttgaacctgggaggcggaggttgtggtgagccaagaaccaagcgcctccaggtctctacacgaagacccaggacccagccaaagcccccaacacccc

SEQ ID NO: 138394 - DNA, 83 bp, Homo sapiens
ggaatacattgccagaacttggaatactctactggacaaacatttcctccaaggaactgtggctgcaccatctgtcttcatct

SEQ ID NO: 138395 - DNA, 48 bp, Homo sapiens
ccaaagtgctgggattacaggtagcactgcagtttcctcctgaaggct

SEQ ID NO: 138396 - DNA, 82 bp, Homo sapiens
gggcgctggcggcctgcgcagccacctcaagctagatgaggaagaggagcgaaggaaaaggcgccgggagaagaacaaagtc

SEQ ID NO: 138397 - DNA, 75 bp, Homo sapiens
gagaccgcgggtttccaccccggcgggagctgtcaggttggctccgcccagatgaattatactttgaggaaggtg

SEQ ID NO: 138398 - DNA, 100 bp, Homo sapiens
ctttgaagtagaagaagctgatgattgccatcagtttccaaacttaatggcagcgttgttactgatggtgaacgagaagattctgagagattttttattc

SEQ ID NO: 138399 - DNA, 75 bp, Homo sapiens
tgaaaccataatgctacaaactctagcccgaatccgaggtatttgagatcacggacttcaccactgcctcggaat

SEQ ID NO: 138400 - DNA, 100 bp, Homo sapiens
aggaattaccttggagaggctgtgagccacaatgcatcgctggaagtagccaatgtcatacttgtaacaccacagatcgaaatgccatatgtgtgaactg

SEQ ID NO: 138401 - DNA, 98 bp, Homo sapiens
ccaaccttcaccgggcagtgtcgggacacatcagctggcttctggagggcaccacatagaagaggacaaaagcatgtcttcccttcctgggtgcattg

SEQ ID NO: 138402 - DNA, 101 bp, Homo sapiens
gagctgccgccgcctgcagtcggtgaccgcgcgactcggcgcccgcccgcggccccttcacagatgtagtcactacaaatcttaaattgcgaaatccatcg

SEQ ID NO: 138403 - DNA, 100 bp, Homo sapiens
agtctgccttcgaccccccggacatcccctggagaagaagcaggcgctccctccattccagccacagatcacagacgactacggtctggacaactttgac

SEQ ID NO: 138404 - DNA, 50 bp, Homo sapiens
gtctgccatctctactaccctaaggagttcaaagaaggacgcagagccag

SEQ ID NO: 138405 - DNA, 115 bp, Homo sapiens
ccggcagcagcccgacgcaaaccaaggatctggggatcttcgcactatcccaagcagcaagcatctaaagttgagaaggtgttttttaccactgcagtaccagtagccagtagcc

SEQ ID NO: 138406 - DNA, 50 bp, Homo sapiens
gggccactcagagtcgcccgagaagaatccctggaagtccctgctgtgtg

SEQ ID NO: 138407 - DNA, 100 bp, Homo sapiens
ggatgagcctgcagagcgcgcagtacctccggggcctttatcatctgctggactcctggattggttttgttacttctagacgtgtgctgtccacagtgcg

SEQ ID NO: 138408 - DNA, 100 bp, Homo sapiens
gggcccccagccgcatcttctggcggaccgtgcgagcaaagtctctcgcgacaccctgtacgaggcggtgcgggaagtcctgcacgggaaccagcgcaag

SEQ ID NO: 138409 - DNA, 75 bp, Homo sapiens
ggtcatgaaggagtacttgacaaagatgacctacagtgactctgacgctaaatctgcaagttcttttaacaccac

SEQ ID NO: 138410 - DNA, 101 bp, Homo sapiens
caagcagaatgtgatttgcttgaagatatgagagatgctgcaatttgtcagtaatcaagtgggagagttccctgacttgttttcagaacagctgtgtagct

SEQ ID NO: 138411 - DNA, 80 bp, Homo sapiens
ccaaagaaagtgacctctgagaaagtgagccagaaacatgctgagcctttgacaggtctagatgttgatggaatatatcg

SEQ ID NO: 138412 - DNA, 98 bp, Homo sapiens
aggccctcttcccgggaagcgactatctccttaggtgatgcacagtccaactacctgctaaccaccgccgagaacgagctgggagtggtggtagccca

SEQ ID NO: 138413 - DNA, 101 bp, Homo sapiens
gggcccaagtccttggctgctgagtggtgacagtagcccagcccgccggccagaatgtgtctgtgaaaactacaagctggccgtaaactgctttgtgaata

SEQ ID NO: 138414 - DNA, 98 bp, Homo sapiens
tgcccagcaaagacaacagccagaagacgtctgtgtatcctggctctgcagagagaacagcccagaaaagaaagttccccagccctccacattcttcc

SEQ ID NO: 138415 - DNA, 82 bp, Homo sapiens
ctgggattacagatgtgagccacttcgcccagcccaccgttttatttttatggtgggcagtggtggtgctggctgcgttccc

SEQ ID NO: 138416 - DNA, 100 bp, Homo sapiens
ctgaattcttacaacctctctacgccaaagaaatccagtcccgaccagtatgcatcgtgcagaagcgagacactaagaaaatgtatgcaatgaagtacat

SEQ ID NO: 138417 - DNA, 101 bp, Homo sapiens
gagaagagtgaaccacaaagatcctcacgttgctatgcaggctttgactgtctttgcaaaaacagaagcacagaagggagcctatatagaactaacactgc

SEQ ID NO: 138418 - DNA, 50 bp, Homo sapiens
agaaattcagacggctcccgagggaatgatgcaaaaactgtcaatgttat

SEQ ID NO: 138419 - DNA, 51 bp, Homo sapiens
cccttgggccgcgtctcctttgagtgagcagtagccaacatgtcagggtgg

SEQ ID NO: 138420 - DNA, 50 bp, Homo sapiens
ctggggttgaggaactgcctgccttcctgatgcgcttgcctgctccctgg

SEQ ID NO: 138421 - DNA, 50 bp, Homo sapiens
gccccagcagcaacagcagcacagtggccacagatgtctttaattccaaa

SEQ ID NO: 138422 - DNA, 50 bp, Homo sapiens
aagtccaagtgtcctcgattaagagacagaagttgttatttatgttgttg

SEQ ID NO: 138423 - DNA, 100 bp, Homo sapiens
cgcccactgcagattcctttcccgtgcagacatggcctctggcaccaccaccaccgccgtgaagatttattcaggagattgagcatgctctgggtcttgg

SEQ ID NO: 138424 - DNA, 100 bp, Homo sapiens
tgctgggctgaagggactggggccattttataccaggcctctctctggaacgcctacccaactccatcgcctcccgcttccgcctgacagagagggagga

SEQ ID NO: 138425 - DNA, 82 bp, Homo sapiens
gcatagctgctacactgaagatgaagcaaggcccaatgacccaggcgcttccttcaaaatgtctactgttcacgaaatcctg

SEQ ID NO: 138426 - DNA, 83 bp, Homo sapiens
agttactcccggaccggcggcgtgaaagtcgtgatatcatcgttgaactctgccccagagcacatcagctatgtgccccagct

SEQ ID NO: 138427 - DNA, 75 bp, Homo sapiens
agctgcaagccggtgcagcagccttcagcttttggcagcatgaaagttagcagctgaccaactgactgaagagca

SEQ ID NO: 138428 - DNA, 96 bp, Homo sapiens
ccagccaggagagtgaagagaacacaggacttgcaattgtgaccaaatatattacaaagggctggaaagaagttcatgaattgtataaagaaaaag

SEQ ID NO: 138429 - DNA, 90 bp, Homo sapiens
ggcctcgcggcgacggcggcggtggcggcttggacgactcggagagccggtatgtccgaccaggtggaggctttgtccctaatttccagc

SEQ ID NO: 138430 - DNA, 90 bp, Homo sapiens
aatagtgctcagactggtagcttcaaacagctcacagttaagacaagtcatcaattgctggctcagaagatgctgaacctcttgctccac

SEQ ID NO: 138431 - DNA, 82 bp, Homo sapiens
gggctccggctccggcttctgctgttgctcttctccgccgcggcactgatccccacaggtgtcagaacctcaaagataacac

SEQ ID NO: 138432 - DNA, 75 bp, Homo sapiens
gttttggaactgtcaggtacctcaaagcgctttattgaacaactctcattattaccatatggcccatggaaaaga

SEQ ID NO: 138433 - DNA, 97 bp, Homo sapiens
ggaatcaaagataaatccaaatactgcatatcagaaacaacaggatggtcatccagaggataagccaacgcacatcatcttcggttctgacagtgaa

SEQ ID NO: 138434 - DNA, 75 bp, Homo sapiens
gcctattcagcgccggatctgctgggacaatgcagatcttcgtgaagactctgactggtaagaccatcaccctcg

SEQ ID NO: 138435 - DNA, 98 bp, Homo sapiens
agtgacactgatggtgctgagctccccactggctttgtctggggacacccgacaggatttcgtgttccagtttaagggcatgtgctacttcaccaacg

SEQ ID NO: 138436 - DNA, 98 bp, Homo sapiens
gttctcctgtgtgcatggctttccaaaaggagatttttgtgagcatggaacaaagtctgggttaaaccagggggccatttctactcttcaaagtagtg

SEQ ID NO: 138437 - DNA, 105 bp, Homo sapiens
cgccttcctcaacgacgcggacatggtcatgagctttgtgaacctggcagcctcccgcgacgatgcccctcaacgttagcttcaccaacaggaactatgacctcg

SEQ ID NO: 138438 - DNA, 83 bp, Homo sapiens
gtcctggactcctctgagaaacagacttcccaagtaagaagcggaagaggagccgctggaaccaagacacaatggaacagaag

SEQ ID NO: 138439 - DNA, 82 bp, Homo sapiens
aattttgtggccttagctacaggagagccgtgcttcctcaaagactgggaaatgcacgtccacttcaaagtccacggcacag

SEQ ID NO: 138440 - DNA, 75 bp, Homo sapiens
ctggggcttcgcgctcttcttcttcttccagggactcagcacctggcaggggctggctgtgggcaatggactctc

SEQ ID NO: 138441 - DNA, 100 bp, Homo sapiens
ctggtgtgtcatgcttctggtcataatgtgcttaactggcgcagtaggacctgatcccaaccttgaagaaagtcctaaaagaaaaaatattacatatgag

SEQ ID NO: 138442 - DNA, 100 bp, Homo sapiens
aaactacccattttcttttttggaactcatgagacggccatgaagcccccaggaggagaatcgagcaatctttttggaagtccagaagaagctactcctt

SEQ ID NO: 138443 - DNA, 75 bp, Homo sapiens
gtatacgaacggctctgcggcgaggagcatggcggacaccgacctgttcatggaatgtgaggaggaggagttgga

SEQ ID NO: 138444 - DNA, 95 bp, Homo sapiens
tattatttatagcacaatctggtctccccacatccctggttgttttgcttcagcctcaggacccatgccccctttgtgatgaagccaaggaagta

SEQ ID NO: 138445 - DNA, 100 bp, Homo sapiens
ttggatgattcaaaatgggacactaattgaaagccgctacatctgttacttttgttggtgttatgggaatgagatcctactactatggaaaattcatgcc

SEQ ID NO: 138446 - DNA, 75 bp, Homo sapiens
ccaccaattctggacacattgggattaaagaacaaagaactttgagtctggcaaggcttataagacaacatgggg

SEQ ID NO: 138447 - DNA, 82 bp, Homo sapiens
gccatcaacctgcgtgaggtcaacctgcgcccccagatgtcccagccagaagatcagctgccatgttacttgactcacacca

SEQ ID NO: 138448 - DNA, 100 bp, Homo sapiens
tacggtccgcggctggggttccctcctccgtttctgtatccccacgagagttttgcggcctccaggtggtggatccaatttttcattaggttttgatgaa

SEQ ID NO: 138449 - DNA, 82 bp, Homo sapiens
agagtcacagaggaaggacagtggagtctggcatcttattgtccagttacaacacagggatcacaacaaacacaaccgccac

SEQ ID NO: 138450 - DNA, 75 bp, Homo sapiens
agtgcaaacctggttatcagggagacggcttccgttgcgtgcccggagctgccccagagcacatcagctatgtgc

SEQ ID NO: 138451 - DNA, 74 bp, Homo sapiens
gtctgcccctattgtaagtgcagatggaacacaacaggttggactccatgaaagaattgcacaaaacaaatcga

SEQ ID NO: 138452 - DNA, 89 bp, Homo sapiens
acctaccgggccctgtctgtgccggccgtgagctgcggcaggacggctggagaagatggctgtgccacccacgtatgccgatcttggca

SEQ ID NO: 138453 - DNA, 75 bp, Homo sapiens
gtggaagccatcgagatcgactgttacaacagcctggcagttcaaatctgaacatcaatgatgtactagggaact

SEQ ID NO: 138454 - DNA, 101 bp, Homo sapiens
gttgatgatttagttgattctctgaagttggagtcattcgttgcccagtttgcagccaagaatgtgcagagagacacatcatagataacttttttgtgaag

SEQ ID NO: 138455 - DNA, 109 bp, Homo sapiens
cggacctcaagctctgggggatcgaccgggacagctaccggcgcatccttatggctcagatccggaacctgaccgtgctgacccccgaaggggaggcagggctgagctg

SEQ ID NO: 138456 - DNA, 75 bp, Homo sapiens
gcgagtgcagcggcggccgccgaggagatttattcctgacgacattgaatgccaccactagtaccttccagtttg

SEQ ID NO: 138457 - DNA, 50 bp, Homo sapiens
tgaggctcggcggctggctaaggaggtgaggcttcgagctctgaggaaga

SEQ ID NO: 138458 - DNA, 110 bp, Homo sapiens
ccgtagacaccagctccgaaatcaccaccaaggttgacatcatggacatatgtgagtccatcctggagaggaagcggcatgacagcgaaaggtctacttgcagcatcttg

SEQ ID NO: 138459 - DNA, 75 bp, Homo sapiens
cccgcctccagctccaggccggtccgctgccaggtcagactatgatgactggagaccgtctctggccagtttgct

SEQ ID NO: 138460 - DNA, 101 bp, Homo sapiens
gtttttccaaatattcatctgtacaggctgatcccaaagaactaatcaagatggtcaccaggcatgtgactcgacatgagcacgaagcctggcctgaagac

SEQ ID NO: 138461 - DNA, 75 bp, Homo sapiens
ccccgctaggagccacctagactggatgcagagcatgaggagaaggcagagcccccccaggctatgaatgccctg

SEQ ID NO: 138462 - DNA, 100 bp, Homo sapiens
ctttcaccgcagtgggctaccataaacacatcaccttgatttttaatcccacggctttatcctgtggataaacgcagagtgaacgagtttggggagtcct

SEQ ID NO: 138463 - DNA, 100 bp, Homo sapiens
tccacttgtgcaaccaagtaagaatgataatggcaaaccagattctgtgggactccgtatcagtctccctgaaggtgtggacccctcttttctggctgcc

SEQ ID NO: 138464 - DNA, 73 bp, Homo sapiens
cttcagagaccaagggttaacaaggcccaagcaggtctttcccgcggtgacttcccttgggctgaatgaacag

SEQ ID NO: 138465 - DNA, 112 bp, Homo sapiens
cgcactttttggatcggcatctagtctttccgcttcttgaatttctctctgtaaaggaggagcagcatttctttctattactactatctatgctgagactggttcaggtttt

SEQ ID NO: 138466 - DNA, 139 bp, Homo sapiens
tccagacacaacccggccatcgaggccctgctgcacgacctcagctcccagaggatcaccagcgtggcacttctccttcctgcccttgtatgaagaaggatgtgtttgcttccccttgtgccatgattgtaaatttcct

SEQ ID NO: 138467 - DNA, 100 bp, Homo sapiens
cagttactgaaactagaaaccaatgaattccaacaacttcaaagtaaaatcagtttaatttcagaaaagactctaaaatagagctcaagcttgagaagag

SEQ ID NO: 138468 - DNA, 109 bp, Homo sapiens
atactgctgctctgacgtgctgaagaaatttgtgtggagcgaggaaaggtgtgctgtgcctgaggccagagcatcctggccagaacaagccaaggagccaagacgagag

SEQ ID NO: 138469 - DNA, 100 bp, Homo sapiens
gagctggcgaagatgggcgacccggatctcctggaagtgttggcggaggaagaacgaagtcggcctactggagttcttccaaaatgtgataaaagaaact

SEQ ID NO: 138470 - DNA, 101 bp, Homo sapiens
ctctgtagtgtttgccaatgttggagccgtctgcaaagtgtccccggcaagaagagagacaagagagacacctccaacttcgacaaagagttcaccagaca

SEQ ID NO: 138471 - DNA, 75 bp, Homo sapiens
gagtatctctgtatgaaaaccttactgcttctctcttcaggttcccacgtaacatcacatcagacccaagggccc

SEQ ID NO: 138472 - DNA, 100 bp, Homo sapiens
ctggtccccaaggtgtcaaaggtgaacgtggcagtcctggtggacctggtcctccaggcccagttggtccttcaggtaaagaaggaaaccctgggccact

SEQ ID NO: 138473 - DNA, 82 bp, Homo sapiens
accgagccgggcccacctccccaccaaggaagatgaaggatttgggggcagagcacttggcaggtcatgaaggggtccaact

SEQ ID NO: 138474 - DNA, 100 bp, Homo sapiens
ggaaaagtccatggaaccatctctcaagtatatcaacaagaaatttcccaacatagatgtccgaaacagcacgcatttcatttagatagaagaaattcac

SEQ ID NO: 138475 - DNA, 136 bp, Homo sapiens
ggcacgacctgcggatccccttgcacaacgaggacgccttccagcacggcatctgctttgaggccaagctagtggaggttccactcttctgaaccttgatttctttgggcccgtggatgacagtagctctagcagc

SEQ ID NO: 138476 - DNA, 98 bp, Homo sapiens
cgggagtttggctggccaggaacttgagtgacattgacctcatggcacctcagccaggggtgtagccaagtagctgtacccaagaattaaaccaagac

SEQ ID NO: 138477 - DNA, 100 bp, Homo sapiens
gaccaggagatcctgcatagccttcacagagagtccagttgccaaggtactggtcttcttggacattaatctttgaatacttgctgactgctaagaaatg

SEQ ID NO: 138478 - DNA, 76 bp, Homo sapiens
ccgactgatccagctggtggtcctggtctacgtcatcggtctgcgctcctcagaccaccggcaggtgaacagcctg

SEQ ID NO: 138479 - DNA, 82 bp, Homo sapiens
ccagctcccgggacccgctcagcgatatgctgtgtgctgtggacccacctggggttcatggagtgggccacggggcccagcc

SEQ ID NO: 138480 - DNA, 100 bp, Homo sapiens
gggcaccagaatgctccctctccaaaggatctaaggaccaaagctgacagtttctttacttgatggcttgttcaatcagtatatcagtcaacaggaatat

SEQ ID NO: 138481 - DNA, 75 bp, Homo sapiens
cagagacagaagcagatggattcgtccttttagggatcgtgggactttaccagatcggtttgtaataacacctcg

SEQ ID NO: 138482 - DNA, 100 bp, Homo sapiens
tccacaccccctccgtgggtgtgtgattgacgagatgcctgaggctgccgtgaaatcaacagccaacaaataccaagtcttttttttcgggacccacgag

SEQ ID NO: 138483 - DNA, 100 bp, Homo sapiens
cagaaccttagtcccgggaaagtgtacaagtccccagagtatgagtcccttggttttgagcttactgtggagagattagtttctattggctatccccagg

SEQ ID NO: 138484 - DNA, 90 bp, Homo sapiens
ggccggcaggctgagaaaagcgagaccgcgtgcgaggaccgagacctggaggatgccgacctgctgatccagctggaggctttcgaggag

SEQ ID NO: 138485 - DNA, 101 bp, Homo sapiens
gcggcgcgggagcccgaggctgagactcaccggaggaagcggcgcgagcgccccgccatcgtcccgggtgaatttggaagtgaaaagaaaactgctttgca

SEQ ID NO: 138486 - DNA, 90 bp, Homo sapiens
ggaaaattaactataaaggagagcgccaaaccattactgatgatgtggaggttaacagctatctttctagcctggagaaagttcttgtgg

SEQ ID NO: 138487 - DNA, 115 bp, Homo sapiens
cttgggaatctgcgtcagaagtcactcgcagtcccgtcagcccaggtactccaaagattcaggtttactcacgtcatccagcagagaatggaaagtcaaatttcctgaattgcta

SEQ ID NO: 138488 - DNA, 95 bp, Homo sapiens
agccggtgtggtggaggctgctgtgtcggaggaggtggtccagctgctcacctgtgacctgctactgtcgctacggacagcgctctggcaaaaac

SEQ ID NO: 138489 - DNA, 82 bp, Homo sapiens
cagaatttgaccatcttggtgagaaacattaagacctactaccagctgctgatgcaaggaatcccctgggctcccgtccact

SEQ ID NO: 138490 - DNA, 115 bp, Homo sapiens
ccagcggccccggggacaccagcagctctgctgcggagcgggaggaggaccgaaagtcctcctcgccctctgactaatatgaatgacaccatggttagccacatgtcctctggag

SEQ ID NO: 138491 - DNA, 100 bp, Homo sapiens
gcccctgagcctcgggctccggcccggacctgcagcctcccaggtggctgggaaggtatgcttcagaagtgtccttctgttgatgacttcgtaagtgccc

SEQ ID NO: 138492 - DNA, 77 bp, Homo sapiens
atcagtttctggaagaagaagaagagcatgatcggcatgtccaccaaggcagagtcttgctctgtcgcccaggctgg

SEQ ID NO: 138493 - DNA, 50 bp, Homo sapiens
tcatgatgaactaatttccaaggtaggcgaaaaccaagagtacatcggcc

SEQ ID NO: 138494 - DNA, 100 bp, Homo sapiens
taatttcaatttgaaaacaagtggaatagtgctgtcttccttggaatggctacaagtttctgtactgctcggctcgtgccatcggcatggccgacatgac

SEQ ID NO: 138495 - DNA, 90 bp, Homo sapiens
gttataaaggatgaagccctcagcgatggggatgacctcaggaactggatgcatttcagccataccccattgaaatcgtgccagggaagg

SEQ ID NO: 138496 - DNA, 74 bp, Homo sapiens
tcggaaagcttgaattcatcagcaccacgtggagaacgttcgagagcttgcggtcccctcaggagcagatcatc

SEQ ID NO: 138497 - DNA, 100 bp, Homo sapiens
taaatcaaaaatttctgtgaaggcagcacagcattctcagaagcagtctactgagctcttccagtgcatgtacttcaaagacaaagaccctgccaccgag

SEQ ID NO: 138498 - DNA, 100 bp, Homo sapiens
tgaagaaaaaaaacacatagcaattaaaaatgggcttcctgctccagattttaaagtgaatgcccaattcttagaggaaaggaaacagattcattgtctg

SEQ ID NO: 138499 - DNA, 100 bp, Homo sapiens
aaacagcagtatgatgaactggaggctgagtacgacagcctcaaacaggagctggagcagctcaaagagcactattcctgatcagagaactccagttgct

SEQ ID NO: 138500 - DNA, 50 bp, Homo sapiens
gctttatggaaactgcaatggatgttgtggctgacaagattttgaaaaag

SEQ ID NO: 138501 - DNA, 75 bp, Homo sapiens
ttgtatgtggggagaatatgtggacaacacaaacctggtccccaggctctgctactgcgactactaccggccccg

SEQ ID NO: 138502 - DNA, 75 bp, Homo sapiens
aatgtgctgagctgctggagaaattggaaaagctatttctcaacgtttcaccagtgatcattaaagaatgggcag

SEQ ID NO: 138503 - DNA, 101 bp, Homo sapiens
gctgtcagcagaggaaggaggcgacagcgccggagcagatggtgagaacaagaccaagattggaaagccagcttcagaggagggaattacagcaaaaattg

SEQ ID NO: 138504 - DNA, 100 bp, Homo sapiens
ccggaacccagagactgcatcagagccactgtctgagctcggcatcatttaccgagacctgaaactggagaatgtgctgctggactccgagggccacatt

SEQ ID NO: 138505 - DNA, 95 bp, Homo sapiens
cagcctccgcagacaccgcaaagcgatctggggacgcggggcgggccccccaggtgagaagccctaccactgcaactgggacggctgcggctgga

SEQ ID NO: 138506 - DNA, 90 bp, Homo sapiens
gcggaaatctggaaccgggatggcgacgtctacactgagtcggaggcgaagaactgaagcgctgcggcatggcgcgcgcctgcctccagg

SEQ ID NO: 138507 - DNA, 114 bp, Homo sapiens
acgactgggaccgggacctgctgctggacccggcctgggagaagcagcagcgcaagacaatgcagatcttcgtgaagactctgactggtaagaccatcaccctcgaggttgagc

SEQ ID NO: 138508 - DNA, 101 bp, Homo sapiens
gccatccttggaggagcagaggtgaaaattgaactagatcacgccagtctggaggaggatgcaggaataagtttgtggagtttgacatgaagccagtctgt

SEQ ID NO: 138509 - DNA, 82 bp, Homo sapiens
cgggagccgtggccctgatccagacctgggcagcaaaaaatggccccatttatgatgtagtttggaattctagttctactga

SEQ ID NO: 138510 - DNA, 90 bp, Homo sapiens
gtccagcaagactatgaatctctgttccaaatgctttgctgtggtattggaaggaactggccctgggcctctggaggcagcagtattctg

SEQ ID NO: 138511 - DNA, 82 bp, Homo sapiens
ccccaccatgtcagacgcagccgtagacaccagctccgaaatcaccaccaaggagatcatgaatcagacagataaaaatcaa

SEQ ID NO: 138512 - DNA, 100 bp, Homo sapiens
tttaataagcctgtcactcaacaggtacgacaagggtgtgggccgaagatatgctcatgtggtgttgaggaaagcagacattgacctcaccaagagggcg

SEQ ID NO: 138513 - DNA, 87 bp, Homo sapiens
tctccggtactggagccggcggctgcggccggcagccggcagctttgcagcgggtgcagaggtaaatgcttctcctctttggaatct

SEQ ID NO: 138514 - DNA, 73 bp, Homo sapiens
gtcccacccacccaggaggatggtgtggaccctgttgaggcctgctgggaacgggacttctaaaaggaactat

SEQ ID NO: 138515 - DNA, 75 bp, Homo sapiens
aaaaattaagcgtggcttttgaggaagatgtgacaactaccggagtggaggccatagtggagtttgactaccagg

SEQ ID NO: 138516 - DNA, 51 bp, Homo sapiens
tgtgttgactgaagagctaactacaagcgtcttcactcgaggacagctggg

SEQ ID NO: 138517 - DNA, 90 bp, Homo sapiens
ggaagatggtgctgatcaaggaatttttctcccgtacatcccagtccagccccagcctctggagttatctttctacaccatggatctgat

SEQ ID NO: 138518 - DNA, 100 bp, Homo sapiens
gagggtctggagggctgagcagtcaactcaaatgcaagtccaagaggaggaggaggcggaggtccaagcggaaagatgttagtaggcaggaagaggcgga

SEQ ID NO: 138519 - DNA, 98 bp, Homo sapiens
gcagcccacccggcccctccgcatccgagcagctctgcctgcagttgaacacaaagacctggaggagactcccacctccttcagggagaagaaaggag

SEQ ID NO: 138520 - DNA, 75 bp, Homo sapiens
acgacctgttccgcttcaacaacatttggaggagagcagattagtgccattggaaggggcatatgtgtgttgctg

SEQ ID NO: 138521 - DNA, 75 bp, Homo sapiens
gaaggtggagccaccagcctctccctgtaagactttgaccccgacgcaggcttcagtgattgccgcggatcagaa

SEQ ID NO: 138522 - DNA, 82 bp, Homo sapiens
ccctcctcctgctactctcgggggccctggccctgacccagacctgggcgggggcaacaccctccactaaagagtcaagcca

SEQ ID NO: 138523 - DNA, 100 bp, Homo sapiens
gattcgtgttcgtgagggccttttctgagccagtcttggtgctctgtgttcacctggttcatctgaggagctgcatctaccctgcccatgccatagatcc

SEQ ID NO: 138524 - DNA, 75 bp, Homo sapiens
aatgaactgtatccatccccatcatgatgtacagaaccaagtctcttcactactgcaagtgtccactgcttggga

SEQ ID NO: 138525 - DNA, 83 bp, Homo sapiens
aagcatccccgaggaggaagacgaatcgttaaacatcttaggtcagatttccacaagacggcaccctatgtcgtcactggcag

SEQ ID NO: 138526 - DNA, 82 bp, Homo sapiens
caaatttgatgaagtgcaaagttcaggcggtatgattttgagtgtctgcaaaggtggggaagaaaacatgacagaaacagat

SEQ ID NO: 138527 - DNA, 100 bp, Homo sapiens
ggaaattcagcctcaaaaccgtcctgctgcttgctgaccaaatgcaacatctgaatgaattgatgacgaagaagtggctattagggtcaaacgctgtaga

SEQ ID NO: 138528 - DNA, 51 bp, Homo sapiens
ccgctttcggctcgggcctcaggtcgctacgcatttcggatctggaaacct

SEQ ID NO: 138529 - DNA, 51 bp, Homo sapiens
ccaggaaccattggataaggataaagtgtattctggaggtcgaatggtcac

SEQ ID NO: 138530 - DNA, 90 bp, Homo sapiens
gacgtgaaacatgtgaacactcaagtgaagcaaaagccttccatgattacgtgtcagcttcctctggtgcaaccagcaagtcttccagta

SEQ ID NO: 138531 - DNA, 100 bp, Homo sapiens
cgccgctgctacctgcagcgccgtgtggcacgacacaaaaatcagttctgaaacagctggaagaactgctgagtgacatgaaagctgatgtgactcgact

SEQ ID NO: 138532 - DNA, 120 bp, Homo sapiens
cggcaacaacatgggggtggagtgtctgcggcttctcaacgagatcatcgccgactttgacgagatgatggacttccaaaaccagaactaatatcctggattgaacacgggggagagccc

SEQ ID NO: 138533 - DNA, 50 bp, Homo sapiens
atctggtcaaatttcagccatcagcaactctacgtggccacggaggccat

SEQ ID NO: 138534 - DNA, 99 bp, Homo sapiens
gagagaccctctgctcaggcttctgcctctggcgcgagggggaccagctgaccaaggaagaggagttgtacgcatgtcagagaggttgcaggctgtttt

SEQ ID NO: 138535 - DNA, 82 bp, Homo sapiens
aaaatggcagacgatattgatattgaagcaatgcttgaggctccttacaagaagaaaggacctaagtgtgaaataccccgaa

SEQ ID NO: 138536 - DNA, 80 bp, Homo sapiens
cccaaggcaattgatcccaagttgtcgacgaccgacagggtggtgaaagggactggtgattgcagctggaagtgcccatg

SEQ ID NO: 138537 - DNA, 97 bp, Homo sapiens
gcctccgcctgccttctgccgccggccggcgcgtcgtccccacaggtgagaagccctaccactgcaactgggacggctgcggctggaagtttgcgcg

SEQ ID NO: 138538 - DNA, 58 bp, Homo sapiens
ctacgagctgtttctcatctttatactcttccaggttgacctgacagttcaagaaaag

SEQ ID NO: 138539 - DNA, 51 bp, Homo sapiens
cagctttcacaatgtcattccagtaaatatgacagtcgtctagaggagctc

SEQ ID NO: 138540 - DNA, 75 bp, Homo sapiens
atagtgcctttcagccctaccagaagtgatccagttgagtctgccagaagatcagaaactaagcatcactgcagc

SEQ ID NO: 138541 - DNA, 97 bp, Homo sapiens
tgcatgcacgagccaggaactgcgcagcctcttcgagcgccgcggacgcgtcatcgagtgtgacgtggtgaaaggtcctcagaatggttggaatgac

SEQ ID NO: 138542 - DNA, 100 bp, Homo sapiens
ctgtcctaaatgtggcgacttgtgcacacatgtagagacctttgtatttgacccaccttcagacttgaattttaaaattatagatgaaaatactgttcat

SEQ ID NO: 138543 - DNA, 101 bp, Homo sapiens
cgggagccctcgcgacgcgcccggcccggagcccccagcgcagcggccgcgatattttctaaatttggcacagtcttgaagattatcacctttacaaagaa

SEQ ID NO: 138544 - DNA, 82 bp, Homo sapiens
gagaacttaaaggacatgatcttccttctgaaagactcgcttcccaaaactgaaatgattttgaagacattttggctacaat

SEQ ID NO: 138545 - DNA, 97 bp, Homo sapiens
aagaagaattctgcttttctcgtgatttcagaaagtatggatatactcttcagaataagaggaggccttgatttggcttttcagctagctactccta

SEQ ID NO: 138546 - DNA, 82 bp, Homo sapiens
gctgacgcagggccaggaggccggggggcggccaggggccgactgtgaaggtggttttagaaatttgcacactattgttctg

SEQ ID NO: 138547 - DNA, 76 bp, Homo sapiens
tctttccaaaaggtcaaggttcacaaggcacagtaaccttggtgcacgaccgaaagggctgtctactctggtgaag

SEQ ID NO: 138548 - DNA, 80 bp, Homo sapiens
acgtgagctgagggcgcagaggcaggcagaagtttgcctgcaatggtactgtaattgagcatccggaatatggagaagta

SEQ ID NO: 138549 - DNA, 73 bp, Homo sapiens
caaacagctgtataaactcttgtaaacagaatgaagaatccctccattgttggagtcctgtgcacagattcac

SEQ ID NO: 138550 - DNA, 100 bp, Homo sapiens
tggacatctactccaagtttgatgttatcgcctccggtgtggctgtctctgatggtgtcatcaaggtgttcaacgacatgaaggtgcgtaagtcttcaac

SEQ ID NO: 138551 - DNA, 100 bp, Homo sapiens
ggctcggagctgctcatcaccaaggccaagaacgggcacctggctgtgcatcctaatgtcctatgatcacgtggaactcacattcaatgacatgaagaac

SEQ ID NO: 138552 - DNA, 90 bp, Homo sapiens
cgccgccgcgcgtcgcggaggcacgtgtggagccccggcagcaggagcgtcgcaggctcattggtgggcagtattacttatgggaattgc

SEQ ID NO: 138553 - DNA, 75 bp, Homo sapiens
ctcgggcttctcgccccggccgcggccgggtcctcaggtatgcaaccactcatgtattcggttcaggaagcatta

SEQ ID NO: 138554 - DNA, 82 bp, Homo sapiens
ctctgctgcggcgcggggaccgctgtgctctcgcctcttcgagcactactgctactcccggggcggcatgcgccacagctcc

SEQ ID NO: 138555 - DNA, 100 bp, Homo sapiens
aacaacattactcagttgccagaagatgcatttaagaactttccttttctagaagagctgttgcccgaagctcagcagagagtcggaggctgctttttaa

SEQ ID NO: 138556 - DNA, 51 bp, Homo sapiens
caggcccggcctttctgacaagaggaacttgcttgctagaaaacaaagtgc

SEQ ID NO: 138557 - DNA, 114 bp, Homo sapiens
ctggtgtaccaggcgaagctggccgagcaggctgagcgatacgacgcctctgaagagccaatccattcaggatgggaaaccacgcaggcaaacgagaattaaatgccgagaagg

SEQ ID NO: 138558 - DNA, 83 bp, Homo sapiens
tgaggttcagctgatgaagcttctgaaccatccacacatcataaagctttaccagcaaaatgatgcttcaacacccaggccag

SEQ ID NO: 138559 - DNA, 83 bp, Homo sapiens
ctcctaatccctagccactatgttcgtgccctcgtgaggctggcatgcaggatggcaggacagcccggccacatgccccatgg

SEQ ID NO: 138560 - DNA, 75 bp, Homo sapiens
gaggtgggagactgaaccatctccacatctagttgccccaggttcaaaccttgtactactcagctgatcacaagc

SEQ ID NO: 138561 - DNA, 123 bp, Homo sapiens
tgaagatgacacaccctgggccagcacatctccacctcatcaggaaacagctgagacagcctgcctagggtagttaaaagacgagtgaatgctctcaaaaacctgcaagttaaatgtgcacag

SEQ ID NO: 138562 - DNA, 75 bp, Homo sapiens
gaagagctctcctccttcttcctcaactatctcgctgacacgcagcaaacggggattcagcgtccgatcctttgg

SEQ ID NO: 138563 - DNA, 100 bp, Homo sapiens
ggttacctggggggccgctgggacgtcaacagccagagccagaggcattgatgtgcagcaggtttctttagtcatcaactatgaccttcccaccaacagg

SEQ ID NO: 138564 - DNA, 89 bp, Homo sapiens
ggcaaaaaaagggctggaaacttcgctatcatggagatcgtttttgccaatccagaagactgtgtagcatttggcaaaggagaaaatgc

SEQ ID NO: 138565 - DNA, 100 bp, Homo sapiens
ggagaagagattgaaagattctttaaattacatcaggaaaaagaagccgtttttcttttggatgataaattcataaatgaaattaatttgctatcaggaa

SEQ ID NO: 138566 - DNA, 90 bp, Homo sapiens
taccaggaggtgtgcgcacagagagatgcctaccagcagaagctggtacaacttcaggaaaagtgtcccttttgatgagaagaataagcc

SEQ ID NO: 138567 - DNA, 98 bp, Homo sapiens
taagcttttggcatcgtgttgcaaaatgacagatcttctagaagaagttctttccttatggagacgcctccaagtttgcccagcatgccttccgaacc

SEQ ID NO: 138568 - DNA, 75 bp, Homo sapiens
ctgaaatacaatacagagcgcattcatgttcttagtgggtatctgaacttaggactggagctgcagaaggactag

SEQ ID NO: 138569 - DNA, 100 bp, Homo sapiens
gtgatgttggagaactatagcaatctggttttcttggatcttcctctgatggcgctgcctccatgccatgccctctgccagttctatgtggtgaacagtg

SEQ ID NO: 138570 - DNA, 100 bp, Homo sapiens
gagcagtacgtgcctgatgtgttttataagataaaggataggttacagttacgggtgctcttgcgtcgggaagacgtcgtcctggggaggcctatgaccc

SEQ ID NO: 138571 - DNA, 101 bp, Homo sapiens
ggggaagggcagccagatcttgtcgcccatccctgctggggcgatcccgggctgaaagaggcgtcaggttgacatcatggacatatgtgagtccatcctgg

SEQ ID NO: 138572 - DNA, 98 bp, Homo sapiens
cggccgcccagacgctgcccgcgggcccggccacggcggagccaagacaccattcgcttttcacccaagatgatttgatgtcttataaaactctgatg

SEQ ID NO: 138573 - DNA, 100 bp, Homo sapiens
atgagcaagagcttctgcctgttcagaagcattaccaacttgatgatcaagagggcatttcagccataagtgtgatccttggtgacaggtggaagaaaat

SEQ ID NO: 138574 - DNA, 83 bp, Homo sapiens
gggggatccagtgacgtgcccaaccacagagaccagccgcggcgagtcctttgcacatgttggcaacacacgcatccgcatcg

SEQ ID NO: 138575 - DNA, 82 bp, Homo sapiens
acaagccgctggcagccgcggatctcaccgccgctcagggaagtgctctctggcgtggtggtcatatcgagtaaggattcag

SEQ ID NO: 138576 - DNA, 90 bp, Homo sapiens
agagcactcaggagaccaggaaaatggccacagggctcctgagagccaaaaaagaggattacattgcagtgaaggagaagtatgccaagt

SEQ ID NO: 138577 - DNA, 98 bp, Homo sapiens
aaaaattctaccttcatacatgggtgaaatcaaaattgctgtttctattgaagatgaagccaacaaggacctgcctccggccgctctgctctataggc

SEQ ID NO: 138578 - DNA, 100 bp, Homo sapiens
cactaaatgagatctataactggttcacacgaatgtttgcttacttccgacgcaacgcggccacgtggaagggctccgtaggcaccaactgcaaggaccc

SEQ ID NO: 138579 - DNA, 100 bp, Homo sapiens
ttccaaagcacaggaatctcactctgttaaagctggtctgttctaactgaggtggttttggaatgtatgcttaaaaaagacctcatttataataaggtca

SEQ ID NO: 138580 - DNA, 90 bp, Homo sapiens
tggggggaaactaggtcgatggtcggcggcgcccggatgggcagctgagtgaccatgcagcaggtggccaggacagtggctaaagtggag

SEQ ID NO: 138581 - DNA, 98 bp, Homo sapiens
gccagtgggggtgcctcaacttccgcgggcgtttaaatagcagcctctctcccctcccaccggaagatgagaatgtgcctactgctcctgatcctcca

SEQ ID NO: 138582 - DNA, 100 bp, Homo sapiens
aggcccgaggggtgaggcccaggccactccggagcgcgcgctgttcccgcgaagcgagtcgccgtctcgtagtggccagagaacacagacaaaaagtgga

SEQ ID NO: 138583 - DNA, 74 bp, Homo sapiens
gcctgttctgaaagtttgtaaccatgctccaattgattggtaacagaagatgaagacaacagcataactaaatt

SEQ ID NO: 138584 - DNA, 98 bp, Homo sapiens
tctctccatcgccttgtctgtggggtgcactggctggattctagtgacatttataacgaattgaaagaaacatatcctaattatcttcctctgtacgt

SEQ ID NO: 138585 - DNA, 100 bp, Homo sapiens
gaagattgtgaagcaatagcctaaggttattaatgctgcactggctttagcagcaaaaccacagagtaaactggcccaagagaacatggatctttttaaa

SEQ ID NO: 138586 - DNA, 90 bp, Homo sapiens
ggggtcatcgacagctgcaaggaggccgtcaccttcaaggccgtcagacaagaaggtagaagatagcaccatgccgattcgtcgaactgt

SEQ ID NO: 138587 - DNA, 98 bp, Homo sapiens
agactgtggacatcagtagcagtcctgaagtgagagcgaacgctactgcaaagatgttcagaaaatcattggtaaagatgtttgaagataaaggatta

SEQ ID NO: 138588 - DNA, 99 bp, Homo sapiens
ccgggagatcccaggcggtgacagagtggagccatggctagaggtgtggacactgccagcggctgcagccgacttggaatgacctgggagacaaataca

SEQ ID NO: 138589 - DNA, 96 bp, Homo sapiens
gagcaacgcgttcccggcgacttctgacacagccaactgtaaaaggtggaatttctgaaacaagaattgagaaacgcattgtgatcacaggagatg

SEQ ID NO: 138590 - DNA, 100 bp, Homo sapiens
ccaggctggaaagtggagtgtgtgggggatgatattgcttggatgaggtttgacagtgaagagtttcaagaagtttttaaccgaagtgtcatgattattg

SEQ ID NO: 138591 - DNA, 100 bp, Homo sapiens
cttcactcgctttgttcgcgttggagttccgactgttgaccttgatgctcaagggagagccagagcaagcattcatcacagccagcctgcccaatgtgac

SEQ ID NO: 138592 - DNA, 96 bp, Homo sapiens
tcgacctcaaggacatcaacttccggccgcagatgtcccagatctggtggctggacccagagctgacctatggctgcgccaagcccttcgtcttca

SEQ ID NO: 138593 - DNA, 100 bp, Homo sapiens
cttgaacaagtctcgagagtggaaacaactctcacgcatctgtcatcagttctggggaataagtttgaccatggagctgaagccattatgccaactatct

SEQ ID NO: 138594 - DNA, 83 bp, Homo sapiens
caggaattcagcaacctggaagaggccggtggatgcagaggccagtccatataccacccaggcctgcgaggagcgtggtcccc

SEQ ID NO: 138595 - DNA, 74 bp, Homo sapiens
tccgctactctcacctgtgtgcctttgggaaacctgattgttgtaaatgggaacttatagaaatgctggcaatt

SEQ ID NO: 138596 - DNA, 101 bp, Homo sapiens
taataacatttgagaaacacgaagaatggctaaccacctcccctaagacaagaaatgagccgtcagactgctacagcattacctaccggtacctcgaagtg

SEQ ID NO: 138597 - DNA, 126 bp, Homo sapiens
gctaagtggatcctctggccagctgactgcacttcttttttgagaaaggaaggaatatatcctgactgattgtttgataacccagctgctgtaagcccaactcctacaaggcaactaacttttaac

SEQ ID NO: 138598 - DNA, 75 bp, Homo sapiens
cggaacagcacgagcacgtagcaggtctccttgcaagacttcgaaagcaaatccagtttgctgatgacatgcagg

SEQ ID NO: 138599 - DNA, 101 bp, Homo sapiens
ctccgctgcctttgccgccaccatgcccaaaacggtgtattccagagcaaatgaaaaagagccttgctgttggtggttagctaaagtgaggatgataaagg

SEQ ID NO: 138600 - DNA, 98 bp, Homo sapiens
gggggtaccacacaacaccccagcaaacctccgggcccccaggcatggctagctcggtggtgatgatgtccagcaactctgtgaagcaggagaagagg

SEQ ID NO: 138601 - DNA, 82 bp, Homo sapiens
cgatgtctgcgggaataggacctatggcgtggtggcccagtactaccggcccctgcatcaaatctctagaagatgacggtgt

SEQ ID NO: 138602 - DNA, 75 bp, Homo sapiens
ggtgaagtaggagacatcgtagtgggacgaatcacagagggaaggttgggtgtggctctccaagaatacattttg

SEQ ID NO: 138603 - DNA, 100 bp, Homo sapiens
ggccaggcttcagtcactggacacaagctttctgggtattatgccggctgggctgataagtaccacgggaaaaccatccccattgacggagacttcttca

SEQ ID NO: 138604 - DNA, 107 bp, Homo sapiens
ggagctgtgcagccgcgaggaggcgcgggaggtgttcgagaacgaccccgagacggttgatgataattagaagcatgctttccactgaacttcccgacaacatttgt

SEQ ID NO: 138605 - DNA, 100 bp, Homo sapiens
gtttatctcaaggcctgagtagccggtaacaaacgagggttcccgggattggaccgacgcagccatggtagagtacagagagatggatgaaagcttggcc

SEQ ID NO: 138606 - DNA, 50 bp, Homo sapiens
acagcatctttgtctagccccagtgcagatgaagactggcccatttgcag

SEQ ID NO: 138607 - DNA, 80 bp, Homo sapiens
ttgtgaacattcaagtgaagcaaaagcctttcatgattatgtttttagaacttcagccataaaaatgggcagaattttcc

SEQ ID NO: 138608 - DNA, 134 bp, Homo sapiens
atatttgtctttctgtgcctggcttatttcagttaacatcgtgacctccagttccatccatgttgctgcaaatgaacaaattggagctctggcagatcagcatatcattcatgtggcatgtggcgagtcccaca

SEQ ID NO: 138609 - DNA, 101 bp, Homo sapiens
gtaacagagcagaggaccagcagatgaatggacaccttgaagcagaggagcagcaggaccaggaatgggtaccacagaccatgtcatcgtcctggcgtcca

SEQ ID NO: 138610 - DNA, 98 bp, Homo sapiens
tggctccccatactagtcgccggtggtattaaagataatcaaacattatcaagaagaaggacaaggaactgaagttgttcaaggagtgcttttgggtc

SEQ ID NO: 138611 - DNA, 100 bp, Homo sapiens
cgccgcccgggtgtccccgcggcgcaggaggcggtggagcgcagagcgggcgagcgcggtgctgactgggttacttttttaaacactaggaatggtaatt

SEQ ID NO: 138612 - DNA, 90 bp, Homo sapiens
ggcatctgtaaggtgcggccgccgccgccctccagaatacccatcatatagcccctgaggtggcatggtgatgtctccatgagggaaccc

SEQ ID NO: 138613 - DNA, 75 bp, Homo sapiens
ttgatcatgcttatggtaactatatgatcactgtgtccactactatgatcttcgtaacactaaacagccaatcat

SEQ ID NO: 138614 - DNA, 83 bp, Homo sapiens
gctacgggcctttacctgcgacgacctgttccgcttcaacaacatgcttctcacggcattcagcagcagcgttgctgtaaccg

SEQ ID NO: 138615 - DNA, 99 bp, Homo sapiens
agaaactggcatgaggattctgccaccatggaagggctcctgtctccgatgaggacgaaggaagtggttctgaaagatggaagaattgaaagactaaag

SEQ ID NO: 138616 - DNA, 98 bp, Homo sapiens
gagaagagcagcggcgatttgccgccctcagtgaccgagagaagccccaaggaggcccgcctgacgactgaccagttgccatggcatcctactacgag

SEQ ID NO: 138617 - DNA, 75 bp, Homo sapiens
agaagcgctttgcttacctgtccgagatcctgaaggagctagacgagtgctacgagcgcttcagtcgcgagacag

SEQ ID NO: 138618 - DNA, 83 bp, Homo sapiens
ctctcagtggtcctacctggggatattatcaaatctactactgttcatggcaggagattacctggggcaattgatgttatcgg

SEQ ID NO: 138619 - DNA, 82 bp, Homo sapiens
ctcatccattctcctgccacccccagacctcctcagctccaggtggaacgtgtgatcaccattatgcagaatccacgccagt

SEQ ID NO: 138620 - DNA, 98 bp, Homo sapiens
atatcgacgtcgtgatccagaagtccagagctgaggactgcctgtttgcaggtcgttgaggacttccacatggagattggcacaggaccagactcaag

SEQ ID NO: 138621 - DNA, 100 bp, Homo sapiens
atgttgtttgatttattggtgaactgtaaaaactcacattgtgctcagactgtcagcagtgtttttaaaggggcatcctctggtatcacgattccaaaac

SEQ ID NO: 138622 - DNA, 116 bp, Homo sapiens
tcagaagagtgagagagagctattagagattgtgaagaagaatttcgatctccgccctggggtcattgtcaggcttgaagtagaaaatgccatgatgagaaaaactattaaaaaac

SEQ ID NO: 138623 - DNA, 100 bp, Homo sapiens
aaagcagcgaacctcgagaccaacgtggaggagctgtgggtggaagattactcttgtctctgctgctcctgggaaagtgatttgtgaaatgaaagtagaa

SEQ ID NO: 138624 - DNA, 75 bp, Homo sapiens
ggagatggtgcagaagatggaggagtatacgctcaacggcaagaaagtggaagttgccgtcaaacagatcatcgc

SEQ ID NO: 138625 - DNA, 100 bp, Homo sapiens
tgatgctgaaagaagaaagtgtgaagaagaaattgctaaattatacaaacagcttgatgacaaggtgatcatggagctcagcttggtctccatggggctg

SEQ ID NO: 138626 - DNA, 74 bp, Homo sapiens
gagattcatctttcatgcagtgacatgttgataaaaaatgatgaaaaatggctacaaacttcctagcacatgag

SEQ ID NO: 138627 - DNA, 100 bp, Homo sapiens
accaaattgtcgccattaagaaaaataattgtgtgcccaagaagatgctgcagctggttggtgtcactgccatgtttattgcaagcaaatatgaagaaat

SEQ ID NO: 138628 - DNA, 100 bp, Homo sapiens
agaagaaatacaggatgcctctcagctgccacctgcctttgacctttttgaagcctttgcaaaatcccttcagtctgaatatgttcattactaaggcctt

SEQ ID NO: 138629 - DNA, 118 bp, Homo sapiens
gtttctgcttaagttggcaagacactccaagtttggcatgaaagggataccaataactagtgcctcgtactacgcgacagtgaccctggatcaggttcggaatatacttcgttctgac

SEQ ID NO: 138630 - DNA, 75 bp, Homo sapiens
agcccccaaaagcagctattcagggtctggaacagaatctgacagtgatgaatcagtaccagagcttgaagaaca

SEQ ID NO: 138631 - DNA, 51 bp, Homo sapiens
ctataagcctcggcctccacaggcattctgtgaaactttagaagagacaaa

SEQ ID NO: 138632 - DNA, 85 bp, Homo sapiens
atcagacaactggagaaccacagtgtgaagttgcccgaaggaagcttcaggagattgaggacagatgactttgaagaagccaagg

SEQ ID NO: 138633 - DNA, 82 bp, Homo sapiens
ggcggtgagcgcccatatgggggttctggagagcggggtgtggggttgattcttcaccacactgaaaccattaggaaaaatc

SEQ ID NO: 138634 - DNA, 74 bp, Homo sapiens
gggcaggagctggtgcacacctggaggagagtgctggtgaatggcaggctccaggaggccagagctctactgaa

SEQ ID NO: 138635 - DNA, 74 bp, Homo sapiens
tccgggctgtgagcaagaggaagctgcagcccacccgggcagccctcaccctgatatggatcagaaactttcga

SEQ ID NO: 138636 - DNA, 100 bp, Homo sapiens
ggtgttctggtgcacccccagtgggtcctcacagctgcccactgcatcaggaagcacaatgacctcccctggcagctgctggatatgttcaacaaccggc

SEQ ID NO: 138637 - DNA, 100 bp, Homo sapiens
ctaattcaaatgggagcagcggtggaagcgaaggcgcagttgtgtagcagttgagtaatgctggttagctgttaaggtggcgtgttgcagtgcagagtgc

SEQ ID NO: 138638 - DNA, 100 bp, Homo sapiens
gaggaactgggtgctcctgcccgctggcccctcgcgcgtgaggatctatctcagccgggtcccaatgataagaagtcagaactgctgccagctgggtgga

SEQ ID NO: 138639 - DNA, 87 bp, Homo sapiens
tcctgagacccggacagtggcagtgaaacaggatgctcacaactgtattcctgagctggacagtgagacagccatgttttctgtcta

SEQ ID NO: 138640 - DNA, 83 bp, Homo sapiens
tgtgggtgctgggacttcccgtccgcggcgtggagggagtgaaacctcggtccggctgggctattgatccctttggacactca

SEQ ID NO: 138641 - DNA, 101 bp, Homo sapiens
tcgagagcagcatccaaccaaaatcccggtgtcagttgtacccgaggcgttctcagcagcagcaagtacctgtggtggatttccaggctgaactgaggcag

SEQ ID NO: 138642 - DNA, 82 bp, Homo sapiens
gggaggggggagcggcgttggaggccaccgtttccaggtagaacctctgctagccagacaactatattattttgctcaacaa

SEQ ID NO: 138643 - DNA, 87 bp, Homo sapiens
tggacgcggcgctgctgaccgacatcgaagggatccatatggctttggagacagtcgagattcaaggcgtgatcgatccccaattcg

SEQ ID NO: 138644 - DNA, 75 bp, Homo sapiens
tggatagccccgaagatgcagagttcattgttgccaagatatacgagaacgccatgattgctgctggacttgttg

SEQ ID NO: 138645 - DNA, 90 bp, Homo sapiens
gaggatcccaaggttatgatcactacctcccgagaccccagttcccgcctcaagatgtttgcaaaggccctggccaacgtcaacattggg

SEQ ID NO: 138646 - DNA, 100 bp, Homo sapiens
aagacttcatcgctagtggcagtgaagctgttccatttcctccaagtcaccggcttacagcaaaagaagtgtttgataatgatggaaaacctcgtgtgga

SEQ ID NO: 138647 - DNA, 83 bp, Homo sapiens
cccgcgagcacagagcctcgcctttgccgatccgccgcccgtccacacccgccgccaggaacgcggcaggcaaagatggcaaa

SEQ ID NO: 138648 - DNA, 50 bp, Homo sapiens
ctggagccctgcattcgcggcgtgtgcagtggatggaactgaggttcaac

SEQ ID NO: 138649 - DNA, 75 bp, Homo sapiens
aaaaactggaacaggaacttaaaagattgtcttcaaatttacagcaccatttcagtttgtcatctgtttattcac

SEQ ID NO: 138650 - DNA, 98 bp, Homo sapiens
gctgacaagaggctggacgcacaagatagcctgggctggaagctcttctacgtcacaggctgcctgtttgtggctgtgcagaacttggaggactggga

SEQ ID NO: 138651 - DNA, 87 bp, Homo sapiens
gtcgaagaaggggacgccgacaagtttgcttgcctaaactggacttgaagcaatttaaactactggagatctgccattttataatat

SEQ ID NO: 138652 - DNA, 83 bp, Homo sapiens
gcgaagagctgcttctgtatcttaaggtggaggtttttgatctgctttttgtcactaatgagagtaattcacgaaagacctac

SEQ ID NO: 138653 - DNA, 75 bp, Homo sapiens
tctcaggaagcagtactattcaagagatccggagttctgtaactcacttgttgtgtgcatcaaaagatttcagtt

SEQ ID NO: 138654 - DNA, 83 bp, Homo sapiens
cggtaatggaactcagcacatgtttgaggatgaccccagctctggattaatcgaattacagctgctagccaggaacatggact

SEQ ID NO: 138655 - DNA, 75 bp, Homo sapiens
cttccactgatatctcaaaaggtgatctggacaaaggaacaggtatctcaggtggagagacttatccaagaacgt

SEQ ID NO: 138656 - DNA, 100 bp, Homo sapiens
tgtggggactggagagacaagtaaactctcagagtaactgtcccctctgactaccatttctaaggctccttgccagaggcctccactcactccagacccc

SEQ ID NO: 138657 - DNA, 49 bp, Homo sapiens
ggccgcggcgatgactcggacccagacagtgacaataccctcccctccc

SEQ ID NO: 138658 - DNA, 89 bp, Homo sapiens
cagaaagacctccactcttcaaacagttcggatagagaggagtccctgcgaacagctgcttggagaactacaagtgaagaaaagaaagc

SEQ ID NO: 138659 - DNA, 110 bp, Homo sapiens
aagacaccaagtggattctgcttcccctgggacagcactgagcgagtgtggagagaggtacagccctcggcctacaagctctttagatgccttcaattaagttgcagagt

SEQ ID NO: 138660 - DNA, 50 bp, Homo sapiens
tgtgaaggtgaaagtggagaaatcaggtacaggtttgcagattccgccag

SEQ ID NO: 138661 - DNA, 100 bp, Homo sapiens
gtcaaaaacgccacctctcaacatgtgatggttgtgtgtgtcccgctgtggattctcatgtcctttctgtgcctggtggtcctctactacattgtgtggt

SEQ ID NO: 138662 - DNA, 82 bp, Homo sapiens
tgctgctgctgctgacgctgctgctgcccggcctcgggtgagagggtccaagcctggtaagaatgtccagcttcaggagaat

SEQ ID NO: 138663 - DNA, 98 bp, Homo sapiens
tgaatacacgatttggtgcagccggggtttggtaccgagcggagaggagatgcacacggcactcgagtgtgagcccgtggaccgggagcccgtggacc

SEQ ID NO: 138664 - DNA, 75 bp, Homo sapiens
aagcctttgaaagatgtcataggtgtacttttcccaacactggtgctcgtatcatgatgttcattggtggtcctg

SEQ ID NO: 138665 - DNA, 50 bp, Homo sapiens
gaagagggaagacacgcggaaacagtgctcttaaagttccgtacagataa

SEQ ID NO: 138666 - DNA, 75 bp, Homo sapiens
aaattggaggccgaagctgacaaaattggactactgcttgctgcaaagctgcagacattcaatactgcctcacct

SEQ ID NO: 138667 - DNA, 75 bp, Homo sapiens
tgccctgaggttggacgtggggaatttctcctggggctcagagtgtgttcagtggaatcacacttacaaaatttg

SEQ ID NO: 138668 - DNA, 82 bp, Homo sapiens
ctttacctgtggaggcaacactggccaagaagaggaaagttggtagctggcagtgttgtgatggcttttgaagaagtatgcc

SEQ ID NO: 138669 - DNA, 100 bp, Homo sapiens
aaaatcgtggcctccatgtgggacagcctgggagaggaacagaagcagcatttctggattaaaagtggtgggggagtccctttctccagcctttcaccta

SEQ ID NO: 138670 - DNA, 50 bp, Homo sapiens
ctcactcttactggaggactgtcaagggttttggccaaattgggcgaggg

SEQ ID NO: 138671 - DNA, 100 bp, Homo sapiens
cttccctcctgggatcatgactcaatatggaagggtgttaatctttatgtgaaaaatcttgatgatggtattgatgatgaacgtctccggaaagagtttt

SEQ ID NO: 138672 - DNA, 83 bp, Homo sapiens
cttttctctgccttgcttgcttgagcttcagcggaattcgaaatgcagcccctgtcaaagggaacaggaagcagtccacggag

SEQ ID NO: 138673 - DNA, 98 bp, Homo sapiens
gcggcgcgtcgagctgcgatgcctcgagctggaggagatgatggaagagcagggaaataacattccagctaattttaccaggagtggaaataaattaa

SEQ ID NO: 138674 - DNA, 75 bp, Homo sapiens
tggaggaagcccatcgagagaagagcaaaggagactgcaccatccgtccttatgccagcctggaccatcttggag

SEQ ID NO: 138675 - DNA, 100 bp, Homo sapiens
tttttggtgcccacaggagaggtttttgaacagcagctgtcggaaaaggtaacagaagatggaactcgaaatcccaatgaaaaacctacccagcaaagaa

SEQ ID NO: 138676 - DNA, 98 bp, Homo sapiens
ggagagagctgtggcagtggttgtggatcccattcagagtgtaaaaggaaagaagctaaatgcaactagttcatctgaaggcagcacggttgatattg

SEQ ID NO: 138677 - DNA, 74 bp, Homo sapiens
cagcatagagccaatcacattttgcacaagggcagtcaccatgaaagacactggctctgagaccccgactgccc

SEQ ID NO: 138678 - DNA, 86 bp, Homo sapiens
tgccaggctgtgtgagcaggagcccgctgctcttccccactcaggacggcacccacacacaaagaggatgatttcccttaactcaa

SEQ ID NO: 138679 - DNA, 80 bp, Homo sapiens
ccgggagagaatacacagagccagttacgaagtgacagtgctggtgcgggactcctccaggctgccatcagaggggcccc

SEQ ID NO: 138680 - DNA, 100 bp, Homo sapiens
tgacagcatggggctgtactgaataccgcagaccattgtaattcatgccttgcatccaagggtccttaagccgttgtcttcattgattcatcttcaggca

SEQ ID NO: 138681 - DNA, 100 bp, Homo sapiens
ctcaaccctaccccaggcagcaatgctatctcagaaaacccatatagacagctgccttgtaactgtcatggaagcatgcctggaaagacagcaatagaac

SEQ ID NO: 138682 - DNA, 90 bp, Homo sapiens
gcagctacgaggaggccttcgaggctctggagtcctccacggctacgacaccaatgggaatcccaatggggaagtcgatgctggtgcttc

SEQ ID NO: 138683 - DNA, 82 bp, Homo sapiens
ccaaccgtgggcgagctctgggtgtgcgggcggcctggcgcggcgctccgaatatatacagccctgctctgggacacacctc

SEQ ID NO: 138684 - DNA, 100 bp, Homo sapiens
ctgggtagatgcaggcttcaaaaagattgagcaagcatcctctgcagatttaatgatcaggaacatccttctgatgcatgctgggagatatggctgcagg

SEQ ID NO: 138685 - DNA, 75 bp, Homo sapiens
gagatcggccgctccatctccaccctcatgtcagacaaggaaaatcaggaaaatgtttccaacctggtgattgag

SEQ ID NO: 138686 - DNA, 75 bp, Homo sapiens
tcaacttcagataccactggagaagaaaatgctgacccaccaagtgggaagaagagcgctatcctgaaggcatca

SEQ ID NO: 138687 - DNA, 98 bp, Homo sapiens
aaggcaggggaccccttcagccatgccatttctgcaaccttcattcagtatcacaactctgctgaggcctatggcatgtctgcgttacctttaaatct

SEQ ID NO: 138688 - DNA, 137 bp, Homo sapiens
cgctctccaaggagctgcggcagaagtacaatgtccgctccatgcccatccgcaaggacgacgaggtccagcaaatatttccatggttcaagctgcttcagcaggacccccatctctgagaaaagattcgactccag

SEQ ID NO: 138689 - DNA, 50 bp, Homo sapiens
gcgaagccgaaaaaggcagcagcgaagctcagcgttttcttcccgattgt

SEQ ID NO: 138690 - DNA, 83 bp, Homo sapiens
agaccctggagcctcagttggaagcagccgatccagcctgcggagcctgtggggcagggggctagagagctgaaggagagcca

SEQ ID NO: 138691 - DNA, 74 bp, Homo sapiens
tccgtcacaggggctatttgtttggatatcctgaaagatcaatgaattcggttccctcaaaattataaaggcag

SEQ ID NO: 138692 - DNA, 100 bp, Homo sapiens
gcgccgacggctgctcaaacatcagggctaactatatgtcagaaagcatcagcttttctcgatggacccattcatctaatgaaatatgcctgtactattt

SEQ ID NO: 138693 - DNA, 90 bp, Homo sapiens
gatgccaaaaccacagtaggaaaggccaagggcaaattgtggctctttggaaagaagccaaagcaggaggagccagaggccagagtcccg

SEQ ID NO: 138694 - DNA, 100 bp, Homo sapiens
aaagtggagtccatattcctgaacgtggctgctgtgaacacgcaccgggacaggcctcagcatgtggctgcgacctggccgagggcggcttcttcgtgcg

SEQ ID NO: 138695 - DNA, 75 bp, Homo sapiens
cggcggcgcccggatgggcagctgaggggacggcaaaacagaacagaaaggcggagataaaaagaggggtgttaa

SEQ ID NO: 138696 - DNA, 97 bp, Homo sapiens
atgtgtatggaccttcagttccaaagatgatgaatctgaaaggaaatccggaattatcacagagtgtgcctgcacaggagacagcaccagccaagct

SEQ ID NO: 138697 - DNA, 90 bp, Homo sapiens
ctggtgtggaagagcagcctaagcttggcagaagcagggaggatatgacagaggcattcccagctctggcttaactggatgccataagac

SEQ ID NO: 138698 - DNA, 50 bp, Homo sapiens
gagcagtcctctcagcccacttgcacgatcactaaggaggaagagcgaga

SEQ ID NO: 138699 - DNA, 100 bp, Homo sapiens
tctttgaggacacagcctcgctggaggcagtttctgagcttactcacatagcatattggtatatcaaaatgaaatgcaaggaaccaaaaataacataatt

SEQ ID NO: 138700 - DNA, 75 bp, Homo sapiens
cttcttatccatcccatctcttggacagatgatgccagttaattactttgaatgatcatctttctttcatccggc

SEQ ID NO: 138701 - DNA, 51 bp, Homo sapiens
cggcgtcttttgtgagttcagtgccgaggtaaacagagcatccacggaagg

SEQ ID NO: 138702 - DNA, 82 bp, Homo sapiens
gtcgccgggaccctcgcgcgcgaccgccgaatcgctcctgcagcagaggaattatgggcccaccgtgttagtgcaacaggag

SEQ ID NO: 138703 - DNA, 138 bp, Homo sapiens
aagaaaatctctgccaagcccaagcttgagttcctctgtccaaggccagggacctgtgaccatggaagcaggtgacagagctgaatgaacctctctccaatgaagatcgaaatctcctctctgtggcctacaagaatg

SEQ ID NO: 138704 - DNA, 100 bp, Homo sapiens
gggagctcctcaaagagctcaggaacggacaggacatgtgatgaaactacagaatctgtttgtagatgattcaggtcgatatttggctattcaattccat

SEQ ID NO: 138705 - DNA, 74 bp, Homo sapiens
agattcgcagtggtcgcttcttctccttgatgatgaataaggtatttggaggtactgtgcacaaaaaaagtgtc

SEQ ID NO: 138706 - DNA, 101 bp, Homo sapiens
aagcctcctcatcccgcctgcaccaaagactgggaggctgtggaggttggggcctccagccatgacagtgatgagaaaggccagtactaaagtggaagtgg

SEQ ID NO: 138707 - DNA, 126 bp, Homo sapiens
ttctcattcccaaaatgaaaatttctccaaaaaggatgtcatgttcctggcctggtcacaaacatgtcagacaaaagtgaattaaaggctgagttggaacgtaagaagcagcgactggcccaaatc

SEQ ID NO: 138708 - DNA, 131 bp, Homo sapiens
cgcgcgcagggcctgcagcgggagctggacggcgagcgcgagcggcgcgagaaacattttgaaagcgaagcagaagccgtagaatcagcggcgagcctgttgaaagaacccacaggtgcatttcacagcac

SEQ ID NO: 138709 - DNA, 124 bp, Homo sapiens
cgactactagaaggggaggggagtggaaaggctctcagtgaaaaaggacatggatttgattgacatactttggaggcaagatatagatcttggagtaagtcgagaagtatttgacttcagtcag

SEQ ID NO: 138710 - DNA, 74 bp, Homo sapiens
attcttacctctttgatctcgacaataagtcaggatggctaaaggtgaccccaagaaaccaaagggcaagatgt

SEQ ID NO: 138711 - DNA, 100 bp, Homo sapiens
agagatctggacagaatcgccggacagagagaactcgatgccaccgcaacggtattggcgaaccggcaggatgaaagtgagcagtccagaaagcggctta

SEQ ID NO: 138712 - DNA, 121 bp, Homo sapiens
gaagggtgggaagccagagccgcctgccatgccccagccagtccccacagcataacagggtctggaacagaatctgacagtgatgaatcagtaccagagcttgaagaacaggattccaccc

SEQ ID NO: 138713 - DNA, 97 bp, Homo sapiens
tctttgccaaatcaagagagatatcaacagaaggagagccatgcgtactttctaaaaactgatgcaggatcaggcaaaaatgatcatgccgaaaaag

SEQ ID NO: 138714 - DNA, 83 bp, Homo sapiens
ctccgacagccaggcccgcgagaacttccccgggcgctgcctggacaggcctgcctgcgtgctgggacatgtctggcctccaa

SEQ ID NO: 138715 - DNA, 100 bp, Homo sapiens
cctgcgggtgcctttgaaaatcaacgacaacttgagcacaggaacattttagtggacaaaccaaatgaccaatcttcaagatggtcttcagagagcaact

SEQ ID NO: 138716 - DNA, 100 bp, Homo sapiens
ctcggatctgctggacgaggtcttcttcaacagcgaggtggacgagaaagtgaatgagtctgcaggtcttaaacgacaaaaatgtcagcaatgaaaaaaa

SEQ ID NO: 138717 - DNA, 71 bp, Homo sapiens
cgagcttttgactctggccagaacctcagcccggacaggaacaagctgaaagctggatacctaatgtcagt

SEQ ID NO: 138718 - DNA, 80 bp, Homo sapiens
tgaagtggcaggaggaggaggaggggctccggctggtctgtggtgaggcaagtagcctgcagtatgaaatgctgctgctg

SEQ ID NO: 138719 - DNA, 75 bp, Homo sapiens
ccggtgcccgaggaggcagccaagctcatggcctgccactgcgtgcgccctgggaggagcggggacactgaggac

SEQ ID NO: 138720 - DNA, 97 bp, Homo sapiens
tggccgcggcggggaagatgttcagcgtagagtcgctggagcgggcggagctgtgcgagagcctcctcacttgggctccttcgagagcagtggatcc

SEQ ID NO: 138721 - DNA, 50 bp, Homo sapiens
gaccacaaaccgctgccagaaaagaaactggccaagaagcggaaagagac

SEQ ID NO: 138722 - DNA, 101 bp, Homo sapiens
tggacctctcggctttcctggtcagcagcgacttgttgaaaccaagactgaagactgaacctgaagaagtttccatagaagacagtgcccagagtgacctc

SEQ ID NO: 138723 - DNA, 74 bp, Homo sapiens
agttcgaggccctgcggagctgcttcgccgctgcgggcaaacctggtggacctgcagaagaagctggaggagct

SEQ ID NO: 138724 - DNA, 100 bp, Homo sapiens
ctgtcttcagaaggagaagtttactcttggggtgaggcagaagatgggaagttggggcatggcaacagaagattaatactgaggaacacgtggatgcagc

SEQ ID NO: 138725 - DNA, 98 bp, Homo sapiens
atttttggacctgaaacagaaattctggaacacctatatgaattgtctatttcacagcaatattaccagtgacttgaaagcatttacagacaagtttg

SEQ ID NO: 138726 - DNA, 101 bp, Homo sapiens
atcatggagccgctggggtcccttttgcctcagatactattttgaaggctttcaaggggggctgcaaagctcctcatgctatgatatcttcttgtggaaca

SEQ ID NO: 138727 - DNA, 100 bp, Homo sapiens
tggagcagttaggaccgaaggtctccggagagtcgccggcggtgccaggttaaacccatccagagtaatggctgcggccttacccaggaccctgggggag

SEQ ID NO: 138728 - DNA, 129 bp, Homo sapiens
agagagcgagctgagtggttgtgtggtcgcgtctcggaaaccggtagcgcttgcagcatgtgggtaattccagaattgattggccataccattgtcactgtattactgctcatgtcattgcactggttc

SEQ ID NO: 138729 - DNA, 100 bp, Homo sapiens
ggggcttctatttcaacacggtcctgtcactggcccgctccctggcggtgcagagaccagcatccttggagaagtttttgaagagccggaagatccaagc

SEQ ID NO: 138730 - DNA, 100 bp, Homo sapiens
gcggcgggactgagctgttgagttagagccaacatgagtgagagtgcctggtgaagaatgtgatgggatcactagcatgtctgcggagagcggccctggg

SEQ ID NO: 138731 - DNA, 80 bp, Homo sapiens
ccagcattgcctccaggggagctccaggattgaagccaaaggcagatgccttcttcgttatgatgtttacccttatgatg

SEQ ID NO: 138732 - DNA, 117 bp, Homo sapiens
cctctcgcctcgggtctcgggggccgctctgggatcccggccaccagcaattgtccgacaatgcagatcttcgtgaagactctgactggtaagaccatcaccctcgaggttgagccc

SEQ ID NO: 138733 - DNA, 82 bp, Homo sapiens
gccgcactccggagactcgcggttgctacgcgcaccatggctggaggggttgtgtccactgtggtccccgactctgcccaca

SEQ ID NO: 138734 - DNA, 82 bp, Homo sapiens
cggcaacagcagaggatttggtggaggaggcaggtggaagtcatcataaagtttctgtttcacccgtcgtccatgttcgagg

SEQ ID NO: 138735 - DNA, 93 bp, Homo sapiens
ctcaaacaccagttctaccccactgtggtgtacctgaccaagtccagccccagcatggcagaccatcagcacgtgcccatcgacatccagacc

SEQ ID NO: 138736 - DNA, 90 bp, Homo sapiens
gacaaaacttcaagccaaacatcaagcagaatgtgatttgcttgaagatatgagcaccaatgttgttatgaattattcagagatcgagtc

SEQ ID NO: 138737 - DNA, 83 bp, Homo sapiens
gctgatgaagcttctgaaccatccacacatcataaagctttaccagacgagatgatgcctattggccagaaggaaagcgtgtg

SEQ ID NO: 138738 - DNA, 75 bp, Homo sapiens
tggatagacttcgaacatttaaacagtgagaaggcaaccaaagtgcaggacatcaaaaacaacctgaaagaggcg

SEQ ID NO: 138739 - DNA, 100 bp, Homo sapiens
tggactgtcctctacagaaggaagcacaaaaagggacagtcgatcatggaagggaagtggttgctgtgtatgttactggtgcttggaactgctattgttg

SEQ ID NO: 138740 - DNA, 82 bp, Homo sapiens
ctccaggcccagaacggagccgccttggcctcggggtctccctacaccaacgcaaattgtggctactaatttgccccctgaa

SEQ ID NO: 138741 - DNA, 100 bp, Homo sapiens
gctcgagtcccgcgtcgccatggccgcggttcccgagttgctgcagcagcaggaggaggaccgcagcaaggatgtggagagcatcttgtgcgcaccatac

SEQ ID NO: 138742 - DNA, 90 bp, Homo sapiens
cccgcggcgcccctcggcctcggagcaacgagcgcagcgccggggcatggtctagtggcccagtcaggacgcggaaacactccctggagg

SEQ ID NO: 138743 - DNA, 100 bp, Homo sapiens
cgtgtaccctgtctaccagcctgtggcagagatcctacaagaatccaggatgatgatcccagattgccagcgcaggttggaagccgcatatttggatctt

SEQ ID NO: 138744 - DNA, 80 bp, Homo sapiens
gtcagagcccggggacggcgaggccctcatgtaccacacggcagttgtgaaaaacttcaggacaaaaatgtttcatttaa

SEQ ID NO: 138745 - DNA, 74 bp, Homo sapiens
ttcttcatcttcaaaaatgaacagtttggccattctggaggaaaacaaggagaagctgccacttgacatcaacc

SEQ ID NO: 138746 - DNA, 95 bp, Homo sapiens
tctcccggcgcgagaggcccgggagccgccggccaggacgcccccgagggtgtagaccgcgcccctggaggtatggtggatattgcccgacagac

SEQ ID NO: 138747 - DNA, 95 bp, Homo sapiens
atccttcaaaattaaaagaggagcagcatggcatttcagtcactggtttgcagagtccaggtgcttttgaagatgatgatatcacgcacgttgaa

SEQ ID NO: 138748 - DNA, 74 bp, Homo sapiens
ggtggactgatttcaaagggacacccactaggcgctacagccctactgccaataaagggaaaataagagatgct

SEQ ID NO: 138749 - DNA, 98 bp, Homo sapiens
ccctggaccatcacagaagccgagcttcgggtaactctcacagtggaggatgacgggtctaagccgacacccacgatggagacccagccggtgttcga

SEQ ID NO: 138750 - DNA, 100 bp, Homo sapiens
ttcagtgaaagtaaaagaaccttcagtacaagaggctacttctactagatatgccagcctctacttctgctgcgccatcgagggccaagacaatgagctc

SEQ ID NO: 138751 - DNA, 95 bp, Homo sapiens
cttgcctcaagtttctttcaccgcagtgggctaccataaacacatcaccttgatttttaatcccacgtctcttcaagaaaatgaggaggaggaga

SEQ ID NO: 138752 - DNA, 90 bp, Homo sapiens
ctggtactttgtatctcagttaaagaagatgaagaagtcttcaggggagattgtctactgtgggcagtgcccgtccgtgatgatgggaac

SEQ ID NO: 138753 - DNA, 100 bp, Homo sapiens
gaaatgactcggacgtttggcctcgaattacttgagtcagtcctcaatgattttccgcaggtctttttacaaagtggagactgctgcacggactctggaa

SEQ ID NO: 138754 - DNA, 87 bp, Homo sapiens
gaggagccgctggggctgccgccacggccgcccggagcaaactcagtcgtggctttggagatcactttaagcttgtctccagctggc

SEQ ID NO: 138755 - DNA, 73 bp, Homo sapiens
tcttcttctctataggattcggaaggacgttggatggatcttctcctgaactcccaagtcttgagagaaaaaa

SEQ ID NO: 138756 - DNA, 98 bp, Homo sapiens
cagattatgactcttcagaggaagcaattcgtacgcttgatcaggagagaagcctcatcagtgccaagtctgtgggaagaccttctctcagagtggaa

SEQ ID NO: 138757 - DNA, 75 bp, Homo sapiens
ctcatcacagatttccttgcacttatgccaatgaagatttgggaaggtctgaccttgaggtttcatcgggtgatt

SEQ ID NO: 138758 - DNA, 82 bp, Homo sapiens
gtcccaatcccccactctttccgccctaatggaggtctccagtttcggttaaacactttaagatgagaaaaattgatctctg

SEQ ID NO: 138759 - DNA, 75 bp, Homo sapiens
gctccatggtcttgcctccttgcaggctttatgaaggcaaagaacagatggagtttgaagaatccatgagacggc

SEQ ID NO: 138760 - DNA, 75 bp, Homo sapiens
ttaaggaacaggaggaaaccattcagagaaccatccgggtatggctgaaaagagacagtggtcaatactggccca

SEQ ID NO: 138761 - DNA, 50 bp, Homo sapiens
gggaagaagggcccaggagaatgtgcactgggaactacacctttgttcct

SEQ ID NO: 138762 - DNA, 100 bp, Homo sapiens
tgctctcgggggagcagacagactcacctccaaccatacagttgtctcctccagctgctgtaccagtttagactacatcgtcacctacctcttcaagcac

SEQ ID NO: 138763 - DNA, 100 bp, Homo sapiens
cagcgaactccgggccaagtaccagaaactgctggaaatggtgttcacactggccctgaatcaagggaacaccagttttcacatgctggcagaagcaatg

SEQ ID NO: 138764 - DNA, 75 bp, Homo sapiens
cagaggtgctgatggagaacttccgcagggccattggcacgtgtggttctcaaatataggcattctgatgggaac

SEQ ID NO: 138765 - DNA, 100 bp, Homo sapiens
gtcgcgggagcctttggggcaccacagagatgcggatggactagaggcttttaccagatttcttaaaactgaattcagtgaagaaaatattgaattttgg

SEQ ID NO: 138766 - DNA, 99 bp, Homo sapiens
tggatctctttgaaaaaatgatggtcagtcatatgaaattcggatgctggataatcggaaaatgggtgatatgcctgagatcaatggaaaattagtaaa

SEQ ID NO: 138767 - DNA, 100 bp, Homo sapiens
ctgagcactgctctcagtgagaagcgcacgctggagggcgagctgcatgatctgcggggccaggtggccaagggtcggcccgaaataggcggagttggga

SEQ ID NO: 138768 - DNA, 51 bp, Homo sapiens
ggtgaccggctgtgatgcttttgaggaggcatccaaacaattgactctacc

SEQ ID NO: 138769 - DNA, 51 bp, Homo sapiens
gggtgatttctgcatttccaactgagtgctgtatctgtgtcctgctgcctc

SEQ ID NO: 138770 - DNA, 90 bp, Homo sapiens
cactccagctctcctggaagcagatccctctctgggcgcattgttggaggtgtgtggtggttctttaccctgatcataatctcctcctac

SEQ ID NO: 138771 - DNA, 90 bp, Homo sapiens
ttcagacagcatatttgagtcatttccttcgtacccacagtgcttcatgagagagaatgtaactggtcactacatttccccctttcatga

SEQ ID NO: 138772 - DNA, 75 bp, Homo sapiens
agcgagcggcagctggctctctggaatccggtgaagaagatgggcgggcttgggcttctggccatggacgtgccc

SEQ ID NO: 138773 - DNA, 82 bp, Homo sapiens
agctggggcccgcgctgcagcgtggatgagcctcggggacactgtgccgaatgaaatcaccgaagtggccttggagtacaac

SEQ ID NO: 138774 - DNA, 90 bp, Homo sapiens
ggagattacgttccacctgagaagctgaagctgctggctctgcagcggggagaggacccagggagcatttcctgaagacgtagtcatgca

SEQ ID NO: 138775 - DNA, 75 bp, Homo sapiens
cggacgcacctctgtttgggggtcctcagactggcatcagtactatgacatagtttatatgaagcctcatgggag

SEQ ID NO: 138776 - DNA, 100 bp, Homo sapiens
gcgggagccgtcacggtgctcaaggaatgtatcctgtcaggtataatgtcagtgaatggcaagaaagttcttcatatggatcgaaacccttactacggag

SEQ ID NO: 138777 - DNA, 50 bp, Homo sapiens
ctggccaaccagacggtgggcaggaccctctttgcaagttcagtgcttaa

SEQ ID NO: 138778 - DNA, 97 bp, Homo sapiens
acagcgcaaagtgtttgatccagtaccagttggagtaaccaaggtctgaatttcctgctgctgttcacaaagatgctttttatctttaactttttgt

SEQ ID NO: 138779 - DNA, 75 bp, Homo sapiens
cgactgcaactgctggattgctgcaaggctgagggacgagaacgagcaacagggagctgccaccaccgtgtactg

SEQ ID NO: 138780 - DNA, 75 bp, Homo sapiens
cgtggagctccgccgccccgaaactttcaccgcgagcggaaataaactatcaatcttgcccagactggagaaagg

SEQ ID NO: 138781 - DNA, 75 bp, Homo sapiens
cggtgattgaggacaagaccatcgagctcatggtcaaaatgcagatcttcgtgaaaacccttaccggcaagacca

SEQ ID NO: 138782 - DNA, 133 bp, Homo sapiens
gctgccagctccaaaactagctcaggcgatgcctcctcactcagcatcgaggagactaaggcaggaactgctgccacaacctcaggctgggcaccaaacacccgtgcccgccaatgcggcccagcccccggag

SEQ ID NO: 138783 - DNA, 71 bp, Homo sapiens
gcagcttcggaaaggagccaatgaggcgtctcccttctctcctggacagaaggccgtgtcctgggacttct

SEQ ID NO: 138784 - DNA, 100 bp, Homo sapiens
ggccaaccagatgaggagctcaagcccaagaagaaagtcttcgagaagttgcaggctgccctgtcagtgagccaggaaaatccagagatggagggccctg

SEQ ID NO: 138785 - DNA, 75 bp, Homo sapiens
tcgtgctgctgggattcgcgctgctgggcacccacggagcctccggggctggtccaaccgtgactgccagatcga

SEQ ID NO: 138786 - DNA, 98 bp, Homo sapiens
acagatgatacctttgatccagaacttgcagcaacaataggagatacaactcgtcaacgaatcaaattcagtgatgacagagtatgcaagagtcacct

SEQ ID NO: 138787 - DNA, 80 bp, Homo sapiens
cagagaaggtacagtacttcttccttccaaggaccagcggtagctcccgggatgcaaataatacggcactccgaacagac

SEQ ID NO: 138788 - DNA, 91 bp, Homo sapiens
cgaggggctccgggtcttccagagcgtgaagatcaagatcgcaaattgtggctactaatttgccccctgaagatcaagatggctctgggga

SEQ ID NO: 138789 - DNA, 97 bp, Homo sapiens
gaaataagaagtgccctgaatgacgagagaaagcatgctagggtctctgcctaactgatcactcagatgggtcccacccaggcgtataacagccaat

SEQ ID NO: 138790 - DNA, 90 bp, Homo sapiens
ggctattgtgaaggagggttggctgcacaaacgagtcgcaatgtatctgctgagcaaaaagatgaaaacaaagaagcaaagcctcgatcc

SEQ ID NO: 138791 - DNA, 82 bp, Homo sapiens
agagaagggtttacctggacctccagggagaaaagggcccactggtcttccgggaaataatgaagatgtttcattttcaaga

SEQ ID NO: 138792 - DNA, 98 bp, Homo sapiens
ccgcagccctcacccctcccgccagtctccagccatgggcgtataccagatgtctgtgtcagaagcagccgtccctggggaggaagtaggaagagtga

SEQ ID NO: 138793 - DNA, 90 bp, Homo sapiens
gttgaaaaacgcttttcacgtcacctggagagatgcacagtattggtaaaggttttcaaggtgtcatgaaaagatggggatttaaaggcc

SEQ ID NO: 138794 - DNA, 73 bp, Homo sapiens
aaaagaagccctattgtaatgcgctcttcgcggccaagtgcagcggctgcatggagaagatcgcccccaccga

SEQ ID NO: 138795 - DNA, 84 bp, Homo sapiens
aagacgctaaacgtgccctactctgccccgggggagagggtttccaggcctgaggtgcccgccctggccccaggagaatgaacc

SEQ ID NO: 138796 - DNA, 96 bp, Homo sapiens
cgcctcgcctcgggacccgcggtccccgctcttgctgatccagacatttaatgtggatgcaccatgccagaccgtggaagatttaacgaatggggt

SEQ ID NO: 138797 - DNA, 98 bp, Homo sapiens
aaaagacaccttatcacccacacccacacgtgttcaatacacctcccacctgtcctcaggcatatcaaaggttggacgtgataagtatgagcctgcag

SEQ ID NO: 138798 - DNA, 100 bp, Homo sapiens
gcggccgccgccgctgccgcttccaccacagggtgagaaggactggcagaaatacgagactgctcggcggctgaaaaaatgtgtggacaagatccggaac

SEQ ID NO: 138799 - DNA, 101 bp, Homo sapiens
cctgggcacaagccagcgtcacccatggagcacatggagatgcacgagggccgggaggaggatcagcggttgatcaacttggtaggggagagcctgcgact

SEQ ID NO: 138800 - DNA, 80 bp, Homo sapiens
gacttagaagctaccgagttaccctaagaaagccctatttttgaggaagatacaccctctgttatggaaattgaaatgga

SEQ ID NO: 138801 - DNA, 75 bp, Homo sapiens
agcgacccaccatggagacccgctacaacctgaagagtccggtgttagatgatgaagatagcaacaacatcacag

SEQ ID NO: 138802 - DNA, 96 bp, Homo sapiens
agccaaggaataaacatgcaatgaacccaaaagggtaccaggtcatcagtacaccatctgatattttcatggtgatggaatatgtctcaggaggag

SEQ ID NO: 138803 - DNA, 100 bp, Homo sapiens
cttgattggaatgttctccctgcagcagtcagcccaaaggaaggaggtgtcattaacttgtcagtacctatagttctgactgcgactcatgaagataaag

SEQ ID NO: 138804 - DNA, 98 bp, Homo sapiens
gatgcttcagctcatcttaggctgtgctgtgaactgtgaacagaagcaagtggtcaaatgtcgatttccagtagtcgaaaatggaaaacagatatcag

SEQ ID NO: 138805 - DNA, 88 bp, Homo sapiens
gggatcctctgtacgcccgttcactggtatctagaagagcagaagacagagaatggaaaagataaggaacagaaacaaacaaataccg

SEQ ID NO: 138806 - DNA, 82 bp, Homo sapiens
ggtggaggttcgagcgctgttctcgctccggagccgctgcacatttcggacccagatgatgtggtaccagttggccaaagaa

SEQ ID NO: 138807 - DNA, 100 bp, Homo sapiens
aaaagcctttcgctctaaagtggagttgattgcgtacttcgaaaagggacagtggccttagagctattgagaatttgatgcaaaagaaggggaaatttga

SEQ ID NO: 138808 - DNA, 83 bp, Homo sapiens
atctcaatcagaattactagattttctctcaaactacgaggaacatggagctgatccaggacacctcccgcccgccactggag

SEQ ID NO: 138809 - DNA, 100 bp, Homo sapiens
aaattcatccattcctgtgctaaggaatccatgtcagtgaacgcctcacatggaaaaggattttcccgacctgctagaccagcaaatcgtcgtctcccct

SEQ ID NO: 138810 - DNA, 100 bp, Homo sapiens
gtacctgcgctatgaagacacgcttcttctggaagaccagccaacaggctcttgggaaagctggtgctgctgctgcctgattcccgccgacagaccttgg

SEQ ID NO: 138811 - DNA, 75 bp, Homo sapiens
cggagcgtgccctcgccgctgttctgttttgaacccaaagtggatgatgctgtcagagctgaaccactgaaagga

SEQ ID NO: 138812 - DNA, 100 bp, Homo sapiens
atcgtgtgcctgatgatcacgcagctggctggcttcagtggaccataacaaatgtggcaattattttggatctatcacctgtcatcataactggcttctg

SEQ ID NO: 138813 - DNA, 100 bp, Homo sapiens
attacggacattaagagctttaagacctctaagagccttatcccggtttgaaggcatgaggctccagagcaccgattccttggaatgccttgaacgtctc

SEQ ID NO: 138814 - DNA, 74 bp, Homo sapiens
ggctgagcaggccacttccctggagctgaccccacagctgtccatctgcctgcccaaccagttccggtgtgcga

SEQ ID NO: 138815 - DNA, 75 bp, Homo sapiens
gggatcgatgtttcaatattggaagcgctttgatttacagcagctgcaggtgccagaaccctgtggagcatcatg

SEQ ID NO: 138816 - DNA, 90 bp, Homo sapiens
ggcattttaggtgtcggttgggtagaataactgtgcttgaagaagaaaattcccaacatggacaaaccacgcaaagaaaatgaagaagag

SEQ ID NO: 138817 - DNA, 100 bp, Homo sapiens
ttcgatgtgttcacaaagggggagaacgtcagtccacgactatgtgaaagggtttggaggaaaatttggtgtgcagacagacagacaagacaaatgtgcc

SEQ ID NO: 138818 - DNA, 83 bp, Homo sapiens
cgagcatgtgtcccgggcgctgtgcatccacactggacgcgagctgcgctgcaagctggtaggtgagtgctgtcctcggctca

SEQ ID NO: 138819 - DNA, 100 bp, Homo sapiens
gggacaagtcggcgccccagagcggacgagctgaagaaatcaggggagaaacccctgcttggtggaagcctgatggaatatgcaatcttgtctgccattg

SEQ ID NO: 138820 - DNA, 50 bp, Homo sapiens
tgattttcaaaatgccctgcgtagaattagatcctgtgctgaaagagaaa

SEQ ID NO: 138821 - DNA, 90 bp, Homo sapiens
gaaacaggatgctgatagtctccagcgggcctggactgtgggctggtgtgtggaactggaaatcaaagagcaggaggttgtggacaaagt

SEQ ID NO: 138822 - DNA, 100 bp, Homo sapiens
ctaaactcatccttaaaggggtcatactgctggtttcagcgttaaaaacaatggccagtcagggaggccccaagtatactctctcacagcagccttgggc

SEQ ID NO: 138823 - DNA, 89 bp, Homo sapiens
ctttgcattgactggaaacaatggcatttacagaaagagtcaacagcagtggcaacagtttcagctcaaattctcaagagcaaccttgc

SEQ ID NO: 138824 - DNA, 98 bp, Homo sapiens
acaagaatttttagaccctctgtgccagagagaatccaattctcagttttgaactacctatgaatttggcaaactggtttcctccaccaagaatgaga

SEQ ID NO: 138825 - DNA, 100 bp, Homo sapiens
aaaaggcaatcactagggaagcacagatgtggaaagtgaatgtgcggaaaatgccttcaaatcaggaatccttcaactgctttctaccaagcgttccatt

SEQ ID NO: 138826 - DNA, 80 bp, Homo sapiens
ccctggagcctcagttggaagcagccgatccagcctgcggagcctgtggggcaggtaaatttggaaggcaaagccagccc

SEQ ID NO: 138827 - DNA, 85 bp, Homo sapiens
agcaagcagttcagaagagccaaggaataaacatgcaatgaacccaaaaggtggctttctgataggaagaagagagcgctacaga

SEQ ID NO: 138828 - DNA, 74 bp, Homo sapiens
ccaagtcttgaagagcttgctggagaatgtccagaggaggtttatgaccctcgatctctatatgaaaggctaca

SEQ ID NO: 138829 - DNA, 75 bp, Homo sapiens
cgctccccgccccgccgcggccatggaggacgagcggaaaaacggagcctacgacctactccaatgaagtccatt

SEQ ID NO: 138830 - DNA, 75 bp, Homo sapiens
ctcctgagtagctgggattacagagttgccatggagaaaattccagtgtcagcattcttgctccttgtggccctc

SEQ ID NO: 138831 - DNA, 75 bp, Homo sapiens
ggccaagtatccgccagtcaataggaagtacgagtgtgtaattgaaaagtgatcctctcttcagagatgtcaaaa

SEQ ID NO: 138832 - DNA, 100 bp, Homo sapiens
tgaatcacaggagatatttccagctgtctgtggaagcccgtaaagagatgactagaaaggctattaagacagtcaaacattttattgagaagccaaggaa

SEQ ID NO: 138833 - DNA, 75 bp, Homo sapiens
acacctccatgttatggacacggtctttcttattcagctttcttcacagaagtcagtgccgtgggtacccatttt

SEQ ID NO: 138834 - DNA, 100 bp, Homo sapiens
gagagtgtggaaagactcacaggcgtgagcatctcccaggagggccgtgtagccatcacccgagtggccaaccttctgctgtgtatgtatgccaaggaga

SEQ ID NO: 138835 - DNA, 100 bp, Homo sapiens
gaagctctaccagcactgccattctgtcccgtcttgaaacatcatgccctggttgccctctcctggaatagggcaggcctggcctcgccctgtggatgat

SEQ ID NO: 138836 - DNA, 100 bp, Homo sapiens
ccgagttcaacatcctcctggccaccgactcctacaagatctgtgactttggcctggcccgtgttgcagatccagaccatgatcacacagggttcctgac

SEQ ID NO: 138837 - DNA, 83 bp, Homo sapiens
tcaggatagtatcttggccagggaactcaaacagcagatgcagataaacaggggtcacatgacgacagaagccaagagggctg

SEQ ID NO: 138838 - DNA, 51 bp, Homo sapiens
ctccatcctgctcttcttccacaggtaagaatgattgatgttggctgatat

SEQ ID NO: 138839 - DNA, 75 bp, Homo sapiens
aggaacgtgaccgtcactgacgtggacatcgtcttcagcaagatcaactgagcttcagtcattgtctattcctgg

SEQ ID NO: 138840 - DNA, 83 bp, Homo sapiens
gaggaagctgcagcatgtcctgggtttcaggctcatcgagaggtaccagacaatgcagatcttcgtgaagactctgactggta

SEQ ID NO: 138841 - DNA, 101 bp, Homo sapiens
tgttcaggaaccaccagtgacagaactctgttacggcatggtgcaaatccagatctgagagatgaagatgggaaaactccattagataaagctcgagaaag

SEQ ID NO: 138842 - DNA, 83 bp, Homo sapiens
caaactgctcctggaaaaccggtccaaatttcttcaggcagaagctcctcctggggtagagacagatcttattgatgttggat

SEQ ID NO: 138843 - DNA, 75 bp, Homo sapiens
aatttccgatgctcctattaatgaagtagcacgatttaatctgatgcagggggcatagatatggacgcatttcag

SEQ ID NO: 138844 - DNA, 78 bp, Homo sapiens
ggtggagaccctgcggcgcgggagtaagttcatcaaatgggacgaggaagccaatcgcctggctgaggagctggtggc

SEQ ID NO: 138845 - DNA, 100 bp, Homo sapiens
gtaagtgctcgcaacattatgctgttgaaaaagaaacaagcccgctgtcagggagtagtttgtgccatgaaggagcctgggaaactaaaattagtcacag

SEQ ID NO: 138846 - DNA, 83 bp, Homo sapiens
cgtgtccctgcagcgaaggatcctgaagatggctgtgccacccacgtatgccgatcttggcaaatctgccagggatgtcttca

SEQ ID NO: 138847 - DNA, 75 bp, Homo sapiens
cctggagaagcagatggaaaaggtgcagaaaagccctgtgttccggagggacggcgcagacatccactccgacct

SEQ ID NO: 138848 - DNA, 100 bp, Homo sapiens
ccaggagcctcaaggcggcccggcgggcgactggacggccggacaggctaagtcctatcagccatggaaacaccattgctctcttcttccggtcactgtt

SEQ ID NO: 138849 - DNA, 100 bp, Homo sapiens
cccaactaccaccaagtcctctccatctgatcccatgaccacctccagagctaatcaggtcagaagagatcaattctacagaaatttccagtggttctgt

SEQ ID NO: 138850 - DNA, 100 bp, Homo sapiens
acttggccgagcggatcctaataaggggaaaatggttaatttggagtggcccctggagtcagtttcctacaccatccgaggccccacccagcacgagcta

SEQ ID NO: 138851 - DNA, 75 bp, Homo sapiens
gctatgcagtatttctttggcatcactgcagctagtaatttgccttctggattaaccaccgggaggaactgggcc

SEQ ID NO: 138852 - DNA, 75 bp, Homo sapiens
agaggactctgttggctgttggaaattgcagagtaatgcctcagttcccagtgggaaaagctacagaaagatgac

SEQ ID NO: 138853 - DNA, 100 bp, Homo sapiens
tccatccaagatacaagagaacgcattgccactgatgcttgctgagcccgggaagagaggcagagcacttgtcctccccttggggagaatcctcaccaga

SEQ ID NO: 138854 - DNA, 75 bp, Homo sapiens
gctgcctcctgcagcccccatagcaggtctggagcccccaactcccttgacagtgtacgctggagcaggttccag

SEQ ID NO: 138855 - DNA, 100 bp, Homo sapiens
gctgcgcagtattggaggggacagaatgaccttccggccttgagtccctgggagaagatgagcgtgggctgcccagagcctgagccgccccgctccctga

SEQ ID NO: 138856 - DNA, 98 bp, Homo sapiens
agaatggtccgagcatgcattgccattatctgtgaactaggcaccatggctgaggaaacagctccagcagttcttgagcggcaccagggggccctgta

SEQ ID NO: 138857 - DNA, 82 bp, Homo sapiens
ctacaatcagtttctaatccagttcacagaaagggcagctgcaatgactctccgcacggtattattgtcattgcaagcacta

SEQ ID NO: 138858 - DNA, 50 bp, Homo sapiens
tgggttacaaaaatccagaccagcatgacgtatcccagactttactcaag

SEQ ID NO: 138859 - DNA, 75 bp, Homo sapiens
tctgccttgacccttactgtggacttggcttcgcgctctggtgtctctgcaggaattacatgaatgacagtcttc

SEQ ID NO: 138860 - DNA, 50 bp, Homo sapiens
gccctgagctgccacggatactgagtgcctccggagccagcgtggtggcc

SEQ ID NO: 138861 - DNA, 100 bp, Homo sapiens
agctccggcgccgcggcgagacggagacggaccgagccacgggcccccgcggccgcagcatctcggaggactgggtgagctatgaacaggccaactgcaa

SEQ ID NO: 138862 - DNA, 100 bp, Homo sapiens
cgacgtccgcgtccgcccgggtcgtggcggcgggcgcccagcgcgtgcctcccaaagtgaaatgcctgaccaagatctggcaccccaacatcacagagac

SEQ ID NO: 138863 - DNA, 74 bp, Homo sapiens
ttactactgctagtcgctgcaacactcctctacagtttgaggaactgtggctgcaccatctgtcttcatcttcc

SEQ ID NO: 138864 - DNA, 88 bp, Homo sapiens
ctcgggcaagttctatcatactggacctgctgtcctttgagctgttggatataaacattgttcaagagttggagagagtgccccacaa

SEQ ID NO: 138865 - DNA, 82 bp, Homo sapiens
gcactgctttccactcggctcctgtcgtccgttctctcaggctcccgttcagttgaggagctcaagcttgggaaaatggtgt

SEQ ID NO: 138866 - DNA, 100 bp, Homo sapiens
taccgtcctcggccagccaacccagatgaaatcggcaactttataattgagactccaagaatgaaaaggctctgggccgcaaaataaactcctgggaatc

SEQ ID NO: 138867 - DNA, 101 bp, Homo sapiens
tttgaagctgatgaggaaaattggcaaatctgttactgcagacagatgggaaaaatatttgatcaaggatgatgatgctgaagctatccttgctgcagact

SEQ ID NO: 138868 - DNA, 100 bp, Homo sapiens
tcactgcgcagcagcgccaggcctgggaccgataacgaaggaggcccaacttcattcaataaggagcctgacggatttatcccagacggtagaacaaaag

SEQ ID NO: 138869 - DNA, 74 bp, Homo sapiens
agttgctgcccttccggagtccgccccgtgaggagaatgtgccggatggagtgctgtgatgtgccagccgagac

SEQ ID NO: 138870 - DNA, 75 bp, Homo sapiens
tcccctgatactgccctcaaaaatattgtaaaagtcattcgaccccagcctttctgagaaaagtctacagcattc

SEQ ID NO: 138871 - DNA, 90 bp, Homo sapiens
acagattggaaattaattgctatcaatgcgaatgatcctgaagcctcaaagtttcatggaccgcagctgaatgcacagctagaaggttgg

SEQ ID NO: 138872 - DNA, 82 bp, Homo sapiens
atttttttctattttccctacgaaaaacagatctttttaagatgatatcatcaagttgaatcgaaaggaagggaagaagcag

SEQ ID NO: 138873 - DNA, 100 bp, Homo sapiens
gaagccgagctcatcagtgatgaggcccaggccgacctggcgctgcggagcatcaacaacagcaacttgtgattggcggtgaccggatattcagttgcac

SEQ ID NO: 138874 - DNA, 90 bp, Homo sapiens
caaggcgccgcggcgactcaacaagcggcgcttcccggggctgcggctcttcgggcacagtgccctcccgaagcctcctattctacgatg

SEQ ID NO: 138875 - DNA, 87 bp, Homo sapiens
caagcttatcatctttgatgctcgacaaaacagtgtcgctgataccaacaagtattataatgactatggagatatcatcaaagaaac

SEQ ID NO: 138876 - DNA, 100 bp, Homo sapiens
cgagaatggaccctgatggacttggacatggagctgtccttgcaagctgcctcgtacccagccagacggcaccagcgtccctggagaaccagcctcacct

SEQ ID NO: 138877 - DNA, 83 bp, Homo sapiens
agttaacccttaccacccagcagcagggcatcaagtttggtgccctggttgtcagatgttggaaagcagtaggacggaacata

SEQ ID NO: 138878 - DNA, 100 bp, Homo sapiens
cgccgcccgcaggctccggcttccgtcccggacagagcccgtggtcgcgcagcgtctcgctcgaaccgggatcatagtgaccacgagtgaggctgttctg

SEQ ID NO: 138879 - DNA, 95 bp, Homo sapiens
tctgtgccatcatcgtggtagttattgtaactgccagccttgccctggctctgaatggcgtctttaccaacacaataaaactgatcgtagggagg

SEQ ID NO: 138880 - DNA, 82 bp, Homo sapiens
ctgtgcagccgcgaggaggcgcgggaggtgttcgagaacgaccccgagacgatagcctgggctggaagctcttctacgtcac

SEQ ID NO: 138881 - DNA, 90 bp, Homo sapiens
aatatttgtgttttggctcatgttgaccatggttcttgatagtccacaatgggtgaaccacagcaagtgagtgcacttccaccacctcca

SEQ ID NO: 138882 - DNA, 100 bp, Homo sapiens
cgacgccccagaggaagctggagagggatgtgtggctgcgatcctcggggaaaccgaggcctgggcaatatttaagggaaagtataaggagggggacaca

SEQ ID NO: 138883 - DNA, 75 bp, Homo sapiens
gcaaaccggggtctccctcccaggacacaggagtcaagctgacatagcccagagatacaggataagcaaataccc

SEQ ID NO: 138884 - DNA, 124 bp, Homo sapiens
ctgtaaccagcatgaacgacaccctgttctcccactctgttccctcctcaggaagtccttttattaccaggagattgtagaaacactgtttaatgctctcaaccaaaatttggtccagtttgag

SEQ ID NO: 138885 - DNA, 92 bp, Homo sapiens
cctgaagcggcgcatacggaaaggttggggtgctggaggactgcttcaccttcctgggcatcttcctggccatcatcctcttcccctttggg

SEQ ID NO: 138886 - DNA, 100 bp, Homo sapiens
ggtgaagctctacgtgtacgacctgtccaaaggcctggcccggcggctcagccccatcatgctggctctggacttattggacaaaatgttgacattcaac

SEQ ID NO: 138887 - DNA, 82 bp, Homo sapiens
ctcgcttcgtcctacacttgcgcaaatgtctccgaccagagtctcactgtcgcccaggctgcagtgcagtggtgccatcacg

SEQ ID NO: 138888 - DNA, 82 bp, Homo sapiens
gagaaaacttgactgtatacagaatcttgaatcagaaattgagaagctggaactgtggctgcaccatctgtcttcatcttcc

SEQ ID NO: 138889 - DNA, 51 bp, Homo sapiens
cagattcgcagtggtcgcttcttctccttgaaggtagaagatagcaccatg

SEQ ID NO: 138890 - DNA, 100 bp, Homo sapiens
cttcctccagtctgaatgacatttctgataaaccggagaaggaccaggtggagtctttcattttggatcaggatgatttggaaaatccaatgctggaaac

SEQ ID NO: 138891 - DNA, 148 bp, Homo sapiens
tgtggagccgaaatttgagggtgtgacctatcttatgcggagcggacctttgaggatctctgagtggaaggcttctgttttggaaaatctgaggctagcggtacgatctcagcttggatttacttcagtcaggcttcctatggcaggc

SEQ ID NO: 138892 - DNA, 71 bp, Homo sapiens
acagcgacgactatgacctcgagtctgacatggactccctggaggaaaagcggaagcggcagcggtctgaa

SEQ ID NO: 138893 - DNA, 89 bp, Homo sapiens
ctcaagatggcggcgcagccaccccgcgggatacgcctcagcgcgtacctggagtagaacagaaaaattattatgtctgtgttcccttg

SEQ ID NO: 138894 - DNA, 100 bp, Homo sapiens
ccggggtagctcttcactcctcagcgcgacgtcgtgtcgagttcccaaaaagctccgcaggggctgtagggaggttgaaaggattgttgacaaaaggaaa

SEQ ID NO: 138895 - DNA, 100 bp, Homo sapiens
cctagaccctgcccaacagaatttatatagagatgtgatgttggagaactacagaaacctcgtctccctgggtcactgaactgatgcaggagcagtcata

SEQ ID NO: 138896 - DNA, 90 bp, Homo sapiens
ccgggttggtggcctgaatgtattagcttcgctgcgtctgcccaagaggctacagcatgctggccatagggattggaaccctgatctacg

SEQ ID NO: 138897 - DNA, 74 bp, Homo sapiens
aggaacataaaattgaaacatggagggatatgtgtcacaaagatgtctacacggaactgccagggaatggactc

SEQ ID NO: 138898 - DNA, 75 bp, Homo sapiens
acaatcagtttatgatgggaggccggtattataacagatatgattctataacagactcttccagaaatgatatga

SEQ ID NO: 138899 - DNA, 90 bp, Homo sapiens
tgccggagaagcgcgcgggcgcgcaggccgcggggagcacctggttggaaaatggatataccttatttgattatgatgttggactgaatg

SEQ ID NO: 138900 - DNA, 76 bp, Homo sapiens
ggctcctggctgatcccactggggcctttgggaaggagaggagccaagagcaggcaaagaggaatctggagtttca

SEQ ID NO: 138901 - DNA, 50 bp, Homo sapiens
aagaataactgcgaactacttggggcttgtacatgacagctggaatagcc

SEQ ID NO: 138902 - DNA, 125 bp, Homo sapiens
cgtcttcggtctcctggggtcggcgccgagtgggaggatggcggaacttcgagagctgtgcccaggagtgaacaaccagccctacctctgtgagagtggtcactgctgcggggagactggctgct

SEQ ID NO: 138903 - DNA, 74 bp, Homo sapiens
ctgtttttgcactgagggcctttaatgtggaactggctcaggctgtgagggtcgctgtctgcccattgatagag

SEQ ID NO: 138904 - DNA, 74 bp, Homo sapiens
cagatggagacctgccgccggctcatcaaaggctccgcagacaggccttgaaggacctgaagggccggatggaa

SEQ ID NO: 138905 - DNA, 78 bp, Homo sapiens
agggaagctattgctgggattttgaggaggagtggcagaagctcaactatgatatccataccctgcggcaggttcgaa

SEQ ID NO: 138906 - DNA, 100 bp, Homo sapiens
gcccaccggaatggagaaggaagaggagtcgatcagtcgcatcgaatacattcattcaaagaacttcatccaccgggatgtgaagccagacaacttcctc

SEQ ID NO: 138907 - DNA, 90 bp, Homo sapiens
acatgaccgtccacctcccgatcatcgagatccgcatcgtggagtgccgagttcaatctcatccctcccagcagctccccttccaccccc

SEQ ID NO: 138908 - DNA, 75 bp, Homo sapiens
atacattatattcattaattcagccttccaggaaggccaaggatgcaggacagagaaccactatttacaaacgag

SEQ ID NO: 138909 - DNA, 83 bp, Homo sapiens
gggaggccgagcgcgccgagttacagccattgacctcatcaacaacctgctgcaggtgaagatgcgcaaacgctacagcgtgg

SEQ ID NO: 138910 - DNA, 112 bp, Homo sapiens
cttgtctcttatttagttctggggagcgcctcgtcgacatgagtgatgtggaggaaaacaacttcgagggcagaggtatttgaagtataccatacaactgttttgaaaatcc

SEQ ID NO: 138911 - DNA, 75 bp, Homo sapiens
gcgagcgatcgagcgagcgcgcgcgcgaaaactccgggcagctagaacaacagaggcagcagttgcttactgaac

SEQ ID NO: 138912 - DNA, 96 bp, Homo sapiens
ggcaacacagaatcgtcctctttggcaatgttttcttggacgctatgtatgccgaaagggctggcattcaagacccaggctgatcccagggagccc

SEQ ID NO: 138913 - DNA, 74 bp, Homo sapiens
ggccaataccaccgtcggccgcatccgtttccacgactttctgggagactccccctcccagttcccccagggac

SEQ ID NO: 138914 - DNA, 75 bp, Homo sapiens
ggcttaactcatatatttaacccccctccaaaaaacaaggtctcgctgtgttgcccaggctgatcttgaactcct

SEQ ID NO: 138915 - DNA, 83 bp, Homo sapiens
catgtctcattaatcacaccaacaaaaagatcctgtggtacaggcctgtcccctcagttcccaggtgccatgaggaagcctcg

SEQ ID NO: 138916 - DNA, 100 bp, Homo sapiens
tcatgtgtctcttctaagctgaataaagctgttttggaactgtcaggtacctcaaagcgtcactttcatgaattcaaaggcaatttaccagtgatttctg

SEQ ID NO: 138917 - DNA, 51 bp, Homo sapiens
gcaaacttgacactcaccctgaccggattaacacagattcctcagatccag

SEQ ID NO: 138918 - DNA, 132 bp, Homo sapiens
gaaaattgtgaactaaggccccctgcccccttttcctggtgcatgtgaagttatcaaaaacagatcagaccccaacaccaacaagattcttgaaaaactgtgaagaagtgggtttgtttaatgagttggcga

SEQ ID NO: 138919 - DNA, 101 bp, Homo sapiens
ataactgtcaagacaacagtgatgaggaaagctgtgaaagttctcaaggtttattttcttgaaaaggctccaggcttcggcttggaaaatcccaccgccaa

SEQ ID NO: 138920 - DNA, 90 bp, Homo sapiens
accacatgttcctgagcttgagatgctaggaagacttggggatgatcatggtgattttactgctgcttgtggctatcgtggttgttgcag

SEQ ID NO: 138921 - DNA, 97 bp, Homo sapiens
tgcagctggccaaacaactggctggaatattgcaggtgcctttagagttgagcaacttgcatcttaaggaagagaaaatcaaaccagataccaatgg

SEQ ID NO: 138922 - DNA, 83 bp, Homo sapiens
ctgctcccggaactggcaggaagattggtacaagcgcaattttgccatcaccttcttcatgggaaaagtggccctggaaagga

SEQ ID NO: 138923 - DNA, 71 bp, Homo sapiens
ccagagaacatgctggctacaactaatctcggtgtctataccatccctgctggcgtcgtctgcctgctgtc

SEQ ID NO: 138924 - DNA, 100 bp, Homo sapiens
ggcaaagcctggagctgcagaagtgtgaagagatcctccacaagatcgtgaagtaccgcttcagctggcccttcaggtttttctctgtcagtgcagttgc

SEQ ID NO: 138925 - DNA, 75 bp, Homo sapiens
agcatctgcgatgtgaggaaaggcacctccaccagaaatcttcttcctattactcatgtgtgtatagaagaagga

SEQ ID NO: 138926 - DNA, 100 bp, Homo sapiens
gcctgggtgggcaaaggcatcgtctatgacactggaggcctcagcatcaaagggaaggaacccaagacagaccaggatgaggagcattgccggaaagtca

SEQ ID NO: 138927 - DNA, 90 bp, Homo sapiens
agtgggacaatatcctctgtggagaacacccccccatggaggcgagggtagtcagcagagtgcacacagcagctgtcatccctccttcgc

SEQ ID NO: 138928 - DNA, 50 bp, Homo sapiens
cctcaccgttctgcccccagaactaggttcgatacaagaggctgttttcc

SEQ ID NO: 138929 - DNA, 111 bp, Homo sapiens
agcgcatccaaccccggtagcaaactgatgacttttccgtgctgatttctttcaacctcgtgtgcaacttgctttggtgtttgctgttttattgccacagatgacattact

SEQ ID NO: 138930 - DNA, 88 bp, Homo sapiens
cggatcgtggtgacgtttaagacttttgaagaaatctggaagttttccacctaccatgctctcggtcctagctggtgcattaaaacaa

SEQ ID NO: 138931 - DNA, 75 bp, Homo sapiens
gagcggcgactcagggtcgcccgcccctcctcaccgaggaaggccggttttcccatcatatgattcccggtcctc

SEQ ID NO: 138932 - DNA, 83 bp, Homo sapiens
cttgagctgaacgtcttgcaacagtggccgcacgcatagctggaaaggcagctcatcatgcagagtgaaatgagggaaagaca

SEQ ID NO: 138933 - DNA, 100 bp, Homo sapiens
ttctcctggagacgcaactcaagactttgaaatactcgtgggatatgaagtggaggtgcctagagggttgaagataatgaggacagatgaagaaatgttt

SEQ ID NO: 138934 - DNA, 100 bp, Homo sapiens
ttggtgcctggagggtgaatggaagtctgtcggtttccagagctattgtggaagagaaagccaatacccacctcctcttgggcatgtgcttagacgcctg

SEQ ID NO: 138935 - DNA, 95 bp, Homo sapiens
ccgacagaaaatatgttacgctaagagaaagttagcaggtgccaatccagcagtcattacttgtaaccctccactgagtgaagaaatgttgcctc

SEQ ID NO: 138936 - DNA, 75 bp, Homo sapiens
gcaccaaggatgtgaaagaggctgtcagaaagctggcttatcaggagtgaaagggaagcaatgcagaaatcagag

SEQ ID NO: 138937 - DNA, 75 bp, Homo sapiens
cggagctcgaccagttgcctgacgagagggccaaaccagtgctcctgccacctctctggctgccccctagagcct

SEQ ID NO: 138938 - DNA, 75 bp, Homo sapiens
caagaagaataaagggcagctcactaactgtttcattcaattcagagaacctgtctggacttatcgaaagcaatt

SEQ ID NO: 138939 - DNA, 99 bp, Homo sapiens
gtcaggatatgtgcctttcagctttaaagagaattgaaggtttaacatgtcaggaagtaaaggctctcagagagaaggcatggtcaaggacaaatgaag

SEQ ID NO: 138940 - DNA, 100 bp, Homo sapiens
atgttgccgaagatttagtggaaaagctgagaaagtttcgttttcgcaaagaaacgaacaacgctgctattataaacctagaggatcaagacataatggg

SEQ ID NO: 138941 - DNA, 51 bp, Homo sapiens
tacgtcctcctgctggccttttgcgtttgactttgagggtctggaaagtgg

SEQ ID NO: 138942 - DNA, 100 bp, Homo sapiens
ctacacgttacgctattcgttgtggtccaaaacagtttacctcttatctaacaggtgctgggtcttcagctctaaagaggccatttgaagatggattagg

SEQ ID NO: 138943 - DNA, 82 bp, Homo sapiens
gtagtcctgggagcacagcagaagtatgagattgtggggaacctgggtgaaggcacctttggcaaggtggtggagtgcttgg

SEQ ID NO: 138944 - DNA, 107 bp, Homo sapiens
gtttattttcactgtgcagctgttacaccacaagcaaagagacttcctgtaagcggcaaagcaaagacagtgcctgggatccctcacaaacaatgaagaaaccaaag

SEQ ID NO: 138945 - DNA, 75 bp, Homo sapiens
tttgtgtgcaatgccccgggctgtggacagttttctggatatgccgcagaaggatccgtgccagaagcaagcctg

SEQ ID NO: 138946 - DNA, 75 bp, Homo sapiens
tggtggtcattaagcggagatccgttctgttccacatgtacgactcggacagcgacggccgcatcactctggaag

SEQ ID NO: 138947 - DNA, 50 bp, Homo sapiens
cggaggtgctgggagcgagttggctggtgctggagaatctggtaaaagca

SEQ ID NO: 138948 - DNA, 100 bp, Homo sapiens
gccatggcctcctggtgagctgtcctcatccactgctcgctgcctctccagcgacatcaagaggattggggtgcggctgcccggccaccagaagcgcatc

SEQ ID NO: 138949 - DNA, 89 bp, Homo sapiens
cggagcgcggtgctgccggtggagcttcaggccgattcaacagtcattgagaagtggatggatggcgtgaaagacttcttaatgaaaca

SEQ ID NO: 138950 - DNA, 132 bp, Homo sapiens
gaggatgtgcggggtgcgccggcagaggatccagtgttcaccatcctggccccggaaggaatccctttgcccacgtccagctgaagccgacagtgaccaacgacaggtctgcccccctcctcagctgatggc

SEQ ID NO: 138951 - DNA, 100 bp, Homo sapiens
tttgtgttaatggggggcactttaaatcgaaatggcttatccccaccgccatgtaagttaccatggtggttctcttcccaaagtggaagccaaattcatc

SEQ ID NO: 138952 - DNA, 100 bp, Homo sapiens
gtctgagtcagacacttcccgagaaaacaaagttcaagcaaaaccaccgaaagttgatggagctgagcatgcctcttccgatgtcgaaagaatgatcctg

SEQ ID NO: 138953 - DNA, 83 bp, Homo sapiens
ccgcgcgctgagggtctcggggcgggcgccgcgggacctctccgggccatggcggctggctgtcggcaattggattcttccag

SEQ ID NO: 138954 - DNA, 82 bp, Homo sapiens
attcctgcgggacatagaacaggtgccacagtcttctcaagtcttaggattgcagcaacacgctcggctgcccaaacccaag

SEQ ID NO: 138955 - DNA, 100 bp, Homo sapiens
tcccaggtcccggcctccgtaatgagagcccggaaccactctttgtgccgcagcttcgcaggttacctgtcctgctgccgattcctggatgacaatcaga

SEQ ID NO: 138956 - DNA, 50 bp, Homo sapiens
cggagctcccccaagagccggaaaggcataatcaccagcaacacccggga

SEQ ID NO: 138957 - DNA, 95 bp, Homo sapiens
caggagagacccaagtgatttcagtccacaatgtgtccttcgcctttgagctgatgctggacggaggcctcaagaaacccaaggctcgtcctgaa

SEQ ID NO: 138958 - DNA, 74 bp, Homo sapiens
gaactggacgccctcttctctcagtatgtggtcaacttcggggccggggcttcagtatcagacacagcacagca

SEQ ID NO: 138959 - DNA, 100 bp, Homo sapiens
ctggatgcagactctggactgaccctcagccggagaatccgccgggcccagcttgcccactacaattttcagtttgataacaacgaacttgatgcaagtg

SEQ ID NO: 138960 - DNA, 50 bp, Homo sapiens
ggtagatcctgaggatccttacaaggtgctatcagtgctaaagcattcat

SEQ ID NO: 138961 - DNA, 101 bp, Homo sapiens
agggagaagcacaagatcatgcacagagcgactgcatttgcctccagacttgtcagacacagtgagccgctcaagcaaaatggatctggcagaatccgcca

SEQ ID NO: 138962 - DNA, 101 bp, Homo sapiens
ccggcgccgagggcttggaatctcgagcgggaaaaggttgtctgcattcaaaagagcattctattaaagctaccttaatttggcgcttatttttcttaatc

SEQ ID NO: 138963 - DNA, 100 bp, Homo sapiens
accagtgacccagtcagtgcccttcagttaaagaccaccaggagcacacttccaaataggaagagctctggtctgcagctcccagtgtgatcaatgcaag

SEQ ID NO: 138964 - DNA, 100 bp, Homo sapiens
ctggagagggtcaactcgttacataccctttaccttttgagtttagagctatagaagcactcctgcaatattggggtgtccgcaatgttgccagtgtctg

SEQ ID NO: 138965 - DNA, 90 bp, Homo sapiens
cgtgaaggagcagatttacaaactggccaagaagggccttactccttcacagatcggcttcagggatgacttcttagggggcaggggagg

SEQ ID NO: 138966 - DNA, 100 bp, Homo sapiens
gggcctcccagccgacatgtctctagtggcggaagccttcgtctcccagattgcaggagtctccccaggacagtgctatcacccgggatattaaccgaac

SEQ ID NO: 138967 - DNA, 98 bp, Homo sapiens
aaagaaacaagccgtggaataggtgtatcaagtaatggtgcaaagcctgaagcaggcattcaacaacatgttttgctgtaccttgcagtgttccgagt

SEQ ID NO: 138968 - DNA, 82 bp, Homo sapiens
ctttggctgatttcatgcaagaagtaggctatggcttttgtgcaagtcgagcaaaagatgtgataataccagcaaagccacc

SEQ ID NO: 138969 - DNA, 51 bp, Homo sapiens
ccaagtccctcgtcactgtgctagataagtatgctgtgcgcttcatccctc

SEQ ID NO: 138970 - DNA, 50 bp, Homo sapiens
taaacccatcgacaagaaggcacctactctttttgatcagaacaatgctg

SEQ ID NO: 138971 - DNA, 82 bp, Homo sapiens
tttaggagctctgctcaaagccagacgagaccatgaaacgtatggtgcaatagccctacttttggtgggaaaaatatacagc

SEQ ID NO: 138972 - DNA, 96 bp, Homo sapiens
gaggagaagctgcggcggacagaagccatccggatggagagagaaaaggaacagttccgtaagctctttattggtggcttaagctttgaaaccaca

SEQ ID NO: 138973 - DNA, 100 bp, Homo sapiens
gattttgatgtggatgatgccaaagttttattagaacgtactcaggaaaagtggggatttccaatgtgccactatttaaaggaagagagatggtgctgtg

SEQ ID NO: 138974 - DNA, 50 bp, Homo sapiens
ctcccctggacccgccgcagagccaggtggaagttgatgggtcgaaacta

SEQ ID NO: 138975 - DNA, 110 bp, Homo sapiens
cttcctcaaaccattctgataactttttcaggatgggtagcagtcccctggaggtccccaaacccagtggtggtgctttacacgcagagccgggccagccaggagtggcg

SEQ ID NO: 138976 - DNA, 50 bp, Homo sapiens
cgaggagatcatcctgcagtgtggatcctgagacccattgtcatgcagaa

SEQ ID NO: 138977 - DNA, 100 bp, Homo sapiens
aaaggtcaactaaaagcattgtttctagaacatgaggagtgaaaaggctctcagtgtctgagttaaatgaaatcctggaagaaattgagactgccattaa

SEQ ID NO: 138978 - DNA, 82 bp, Homo sapiens
cgacttctacatcctgggcagtgggctggcagtgaaaaagcagtctggctcccgaggtccaccccttataccccaaggtcca

SEQ ID NO: 138979 - DNA, 100 bp, Homo sapiens
agtctcatctggcctggagctgctcactcttccccatggacaccacttgaggttggaactgctggagagtaacaaatgtggcaattattttggatctatc

SEQ ID NO: 138980 - DNA, 75 bp, Homo sapiens
gctgctgctgctgcttcgcggagaattatatccagatcgagagacagaagattctgaaagggttcaatgaaatga

SEQ ID NO: 138981 - DNA, 120 bp, Homo sapiens
cgacatggcggcagcggtggcggctgcgctggcgcggcttttggcggcctttctgctcctcgcggcccaggtgagaagccctaccactgcaactgggacggctgcggctggaagtttgcg

SEQ ID NO: 138982 - DNA, 50 bp, Homo sapiens
aactgccccaaggatttgcaaggttgttcttttgggccacatctaagaaa

SEQ ID NO: 138983 - DNA, 76 bp, Homo sapiens
aagaccaaagagtcaggaatgcttggacctaagcagcaacgctatgggaaaggaatcatagcccatgccaccccac

SEQ ID NO: 138984 - DNA, 88 bp, Homo sapiens
ggagctagctggatcctctaggcaggtctgccatcatggatgttctcgcagaagcaaatggcacctttgccttaaaccttttgaaaac

SEQ ID NO: 138985 - DNA, 75 bp, Homo sapiens
ggatcgctgtgatcgtcacttggccgaatgggtaatagccgaagtgccctgaagatgattatggaggaattacat

SEQ ID NO: 138986 - DNA, 51 bp, Homo sapiens
cctatgtacctgttaccactttcaaaatttgttgcatattctaaggaccca

SEQ ID NO: 138987 - DNA, 100 bp, Homo sapiens
cccaaccatggccaaggtggctgaactcaaaggccaaaaagcaaatggatttccacctgacaaatcttcgggatccaagaagcagaaacaatatcagcgg

SEQ ID NO: 138988 - DNA, 50 bp, Homo sapiens
attcagacatgaatgatgcttacttgggagggtcacgcagcacaatgcca

SEQ ID NO: 138989 - DNA, 83 bp, Homo sapiens
agaggaggaggaagccgagtttggcgaggaggatcttttccaccaacaggagaagctgaaggactttcctgtgtgcgtgagca

SEQ ID NO: 138990 - DNA, 50 bp, Homo sapiens
gccgtctgcaaagtgtccccggcaagaagaacatccagtcatggataaaa

SEQ ID NO: 138991 - DNA, 82 bp, Homo sapiens
gagaccgcggccgggaccgagggttaaacccatccagagtaatggctgcggccttacccaggaccctgggggagttgcagct

SEQ ID NO: 138992 - DNA, 74 bp, Homo sapiens
caacaaacagcagcaatcaccacccaaggttttgacctgtagcagagaaccaattctggagaacagcctcactt

SEQ ID NO: 138993 - DNA, 82 bp, Homo sapiens
caaagtgtgtgcaagcaaatgcttttattcagcttttagtaaaacatggaggagacttgtttgctgagaatgaaaataaaga

SEQ ID NO: 138994 - DNA, 100 bp, Homo sapiens
acacagatgctaatcctcgatacaagatcccagtggaagctgacttcctcttcgcctattccacggttccaggttcagaggtccaaagaggtgacatttt

SEQ ID NO: 138995 - DNA, 100 bp, Homo sapiens
aatgggaatgccaaataagaaatttctggttaaacaaaatccttctgaaacaagaaaccagcctggacaccaagtctgtgtcagaaggccacctcaagag

SEQ ID NO: 138996 - DNA, 96 bp, Homo sapiens
cttgcagagaatgaaatcactttgtgtcaaaaagaaataactcagctgaagcatcagatatgaagagcattttaagaggtgcagcctctggaagtg

SEQ ID NO: 138997 - DNA, 90 bp, Homo sapiens
gacgtcatcatgctgaccaccaatcagatccgtaagatggccgccctgctcccccaatgaaaggccagcttcgaagaaaagctgaaaggg

SEQ ID NO: 138998 - DNA, 100 bp, Homo sapiens
gaagatgacagaccggagtcatcggcagaagctgcagctgaaggctctggatacagtgctctttgggcctcctctctgctcagatcaccatgaaagtaat

SEQ ID NO: 138999 - DNA, 100 bp, Homo sapiens
ttgtgaaattttcagcatgtggcaaaacctaggttgtgaaacagctattttattcccaatgcgttccaagaagatttttggaagcgtgcatccagtgaga

SEQ ID NO: 139000 - DNA, 82 bp, Homo sapiens
aatgaaaaaaggggagacactgcgaaagcaaaccgaggaggggacggcaaaacagaacagaaaggcggagataaaaagaggg

SEQ ID NO: 139001 - DNA, 75 bp, Homo sapiens
gggaagatggtgctgatcaaggaattatgatgctggagggtcttgaaatctttacagtaaaacctgcaacttgaa

SEQ ID NO: 139002 - DNA, 75 bp, Homo sapiens
ctaaagcagcgtgcgttcagccctgggatgatgattattctccaccgtctaagagaccaaaggccaatgagctac

SEQ ID NO: 139003 - DNA, 82 bp, Homo sapiens
acgcggttcttctccagcgccctggcctccctcaccttggacacctcgcttgggagacagatcagttggaggaagaaaaagc

SEQ ID NO: 139004 - DNA, 100 bp, Homo sapiens
ttcatctgggcggtatctggaacttggtgagcacctgcggatctgtccccagggctacacctgctgcaccagcgagatggaggagaacctggccaaccgc

SEQ ID NO: 139005 - DNA, 100 bp, Homo sapiens
gacaggcttgctgcttcctcctcctcggcctcaccagttgtggaaagtaaaaatgtagccctaccaaaaggaactattgtactggcttctccaggctgga

SEQ ID NO: 139006 - DNA, 74 bp, Homo sapiens
cggaggcgttcagctgcttcaagatgaagttatggctgcagcttcgattgccaatattgtaaaaagttctcttg

SEQ ID NO: 139007 - DNA, 87 bp, Homo sapiens
ccttattattggccctccagatacactttaagatttaccgcattgtttctcagaagcaaatgtcagacagacgcgaaaatgacatgt

SEQ ID NO: 139008 - DNA, 100 bp, Homo sapiens
acctctacctggcctacttcgtgcgtgagcgaggaaagtaatggaccagtgaaggtgtggggaagcattaaaggactgactgaaggcctgcatggattcc

SEQ ID NO: 139009 - DNA, 85 bp, Homo sapiens
acatcatgcggtcattctctttgtccttgtgccagtcgcacagtgtaagctggagctacagggcgtcaagggtggggtggaccat

SEQ ID NO: 139010 - DNA, 100 bp, Homo sapiens
tcggatcatatctcatgaggctgtaggctccttcaacccgtggctgatagctgaaagtacctggagtagaacagaaaaattattatgtctgtgttccctt

SEQ ID NO: 139011 - DNA, 50 bp, Homo sapiens
ggcaaatattacacttctctccttaggaagtccacaaatgaaggggacac

SEQ ID NO: 139012 - DNA, 100 bp, Homo sapiens
tgacatatcactgcattcaatacctagatgatattggcagtatggagttactcaggccttccctcacacagaggaggaggtggaagttgattcacacgcg

SEQ ID NO: 139013 - DNA, 100 bp, Homo sapiens
tgtatatactactgaaatgaatggcaaaaacacattctgggatgtggatggaagcatggtgcctcctgaatgtgaaaaatgtgaggttttacaatattct

SEQ ID NO: 139014 - DNA, 83 bp, Homo sapiens
gtgggagtctccgcgtcccgctcgctgggagagaggggaaagaatttcagctcctgaaagggaaatctactgtcattattgca

SEQ ID NO: 139015 - DNA, 82 bp, Homo sapiens
gcctgacgaaatatcacaatatttgaacgacaccgtaactatccgcactagaaagttcatgaccaaccgactacttcagagg

SEQ ID NO: 139016 - DNA, 82 bp, Homo sapiens
cccgctgtctcagcagtctacagcacgtgttctaagaacggaagcatctgggctggatggaatttagcatcaagcagagtcc

SEQ ID NO: 139017 - DNA, 50 bp, Homo sapiens
tggaaatgtcatccgatggcacaatcagtctccagagaatacagagggca

SEQ ID NO: 139018 - DNA, 75 bp, Homo sapiens
tattagacaggaagccagaagatgtagacacagtgcagccaaaagagaatgtaaagctgtacagttatggcgacc

SEQ ID NO: 139019 - DNA, 100 bp, Homo sapiens
aaagaagtgttaagaattgcctttgggactctgaaggctgaagagctccactggttcaacagcctctcctccagtttcgaccccagtcacaggacacaag

SEQ ID NO: 139020 - DNA, 93 bp, Homo sapiens
ctcaatatctgtcttcggtggactccttcggcagtccacccaccgccgccgcctcccaggaggcatacacggaatacctgaggagcatccact

SEQ ID NO: 139021 - DNA, 100 bp, Homo sapiens
atgacttcaaagctactgcagacgacgagctgagcttcaaaaggggggacatcctcaagagctttgtcaagcaagttggagatggagggagattagttcc

SEQ ID NO: 139022 - DNA, 100 bp, Homo sapiens
ttccctccagatattcaatcaaaattagatgagatgcagattgctgcagcaaaaccaactccaccaaaaagccaggtaacattaacaaaagaattccctg

SEQ ID NO: 139023 - DNA, 117 bp, Homo sapiens
atggactatgtggagatcaacatcgaccacaagttccacaggcacctcattgggaagagcggtgccaacatgagtgagatcattggccgagacctgagtggcttccctgcacctcct

SEQ ID NO: 139024 - DNA, 100 bp, Homo sapiens
gttccttctactactcctttaagatggaggtgacacgagcagtgatgaggataaagaagaacatgaaactcctgtggaagtagaactcatgactcaggtt

SEQ ID NO: 139025 - DNA, 100 bp, Homo sapiens
gttggggtctctatctgggagctgggccagggcctggactacttctacgacctgctctaggcaatgcggtgtgcagagggtgcttggtggttctctcctg

SEQ ID NO: 139026 - DNA, 75 bp, Homo sapiens
aaacaacagaagaactgagctatttttgaaagaacatgaccaccttcgaaagcagaccatgtggaccctggtgag

SEQ ID NO: 139027 - DNA, 83 bp, Homo sapiens
tcaccaagaactgggaggtggacgtggcggcccagctgggcgagtatctggaggagggtgggctttgacagcgagaatcccgg

SEQ ID NO: 139028 - DNA, 100 bp, Homo sapiens
ggcaaacagcttcgcagtcactaatgcttaccagttggaatgccaaaaatggaaaaagtctacttacataatcctagttctgaagaaacgattactttag

SEQ ID NO: 139029 - DNA, 100 bp, Homo sapiens
tgcatggtgtggggttggtgtgattagcttcgcagtctggaaagctttaggagttcacagtgttaagaatctaaccctgcaactggagcaggaatcaaat

SEQ ID NO: 139030 - DNA, 87 bp, Homo sapiens
attgaaattatctctggtgctgcagctcttatgttgcccatattatgaccctgaagttagtaagcacctctgttacgataagagaaa

SEQ ID NO: 139031 - DNA, 96 bp, Homo sapiens
gcccatcctccgcttccttcagctcctgtgtgaaaaccacaaccgagacctgcaggacattgacagtagtgataggaaaagcccaacagggcaaga

SEQ ID NO: 139032 - DNA, 101 bp, Homo sapiens
gagagagagcgcagaatatcaagtgctgaattgaccttgctgttctgctggggaagacaccatctacaatggagaatgattcatctaatctggatccgtct

SEQ ID NO: 139033 - DNA, 87 bp, Homo sapiens
ggtgcccaccgcgcactcggagatgcagccgctggctggtggatgaccgctgtgtggtggagcccgcggccggggacctggacaacc

SEQ ID NO: 139034 - DNA, 75 bp, Homo sapiens
cctgaagagggaagacacgcggaaacagcagaaggtgatttactacctctgcatcttattgaaagatccagtgga

SEQ ID NO: 139035 - DNA, 74 bp, Homo sapiens
cccggattggggatgagtatgcggaggacagctctgatgaggaggccacacggagaagatctgctccctgcgct

SEQ ID NO: 139036 - DNA, 100 bp, Homo sapiens
tattctgcttcgttatttcgggcactccacagattctgttgcgaaggcagccatctttagttcgtctttcctagagagctgggacatcggggagtggtct

SEQ ID NO: 139037 - DNA, 128 bp, Homo sapiens
ttcattccacttaaaacctgaaaacattggaccacacaaagtcttactgattctgagcattccctctgagacagccagccctgaagcttccctgagagcagtgctgagcagagccatggaaaaatcag

SEQ ID NO: 139038 - DNA, 51 bp, Homo sapiens
aggagacgctgcagcgcgcgggtggaaaaggagggagctgctctcaggctg

SEQ ID NO: 139039 - DNA, 78 bp, Homo sapiens
cagtaatggtggatgaagttgttcattgtttgtcaccacaaaaaggacagatcaaagaaatcggctggacagatgtcg

SEQ ID NO: 139040 - DNA, 90 bp, Homo sapiens
ccgccatgagctggggcacggagctgtgggtgtcatagagacgtcagatcgactggaccgtgaatcgacctcccattattggctaacagt

SEQ ID NO: 139041 - DNA, 83 bp, Homo sapiens
ggactaagaacgcattgccgccggtcctgaccaccgtgaacggacagtcccccccaggtgatgtgtccaatctagatcccaac

SEQ ID NO: 139042 - DNA, 75 bp, Homo sapiens
cctcgtggtcccccaccgccccctggagatgagaacagagagaatgatctctgcctttcacaaagaccacctttg

SEQ ID NO: 139043 - DNA, 76 bp, Homo sapiens
caaaaagttctgaaaacatgttgacgccatttggaatgaacaggaaaaggctgaactttttacagataagttttgt

SEQ ID NO: 139044 - DNA, 83 bp, Homo sapiens
ctgccatactacattcgcttaaattttgcagagaaaggagtcttttagtcctgctatacagctgcaccttgtacatcaagctc

SEQ ID NO: 139045 - DNA, 75 bp, Homo sapiens
gaactaaacaaattcatcccagaaatctaagaggcgtcgaccagaagattatgatattcataacagcagaaagaa

SEQ ID NO: 139046 - DNA, 131 bp, Homo sapiens
aggctttgagaaattttgagtcctcgagtgaatgggcggatctcatatcttcacttggcaaactcaacaaggttgtttacattcagagctctatcaataagaggaatacatattacagtgaattcgacaac

SEQ ID NO: 139047 - DNA, 100 bp, Homo sapiens
caaagatgaggtcctttatgtcttcccatctgacttttgcagatttgagttctgtgaacctgcatttgttgttggtaattgcctccagatagcttctgac

SEQ ID NO: 139048 - DNA, 60 bp, Homo sapiens
aacctaagaaggaagcaaatcaggccccgagctttggtgaagcacgtgcagtctaaagga

SEQ ID NO: 139049 - DNA, 90 bp, Homo sapiens
agacgacgtgatatttccaacacacttataatgctcgcagataagcatgctagagtggaggcagcacagacagtgaggacgaagaagagg

SEQ ID NO: 139050 - DNA, 100 bp, Homo sapiens
ctgtcttcggtggactccttcggcagtccacccaccgccgccgcctcccaggccctgaaaaggagcctttaaaagtcaattctactccatttggcaaaga

SEQ ID NO: 139051 - DNA, 100 bp, Homo sapiens
aatttccaaggggattcaaacttcaacagaatgtggcaaccagataacatttggtcagccaggcttggacattcagagcagaagtatggaatacgtacag

SEQ ID NO: 139052 - DNA, 90 bp, Homo sapiens
ccgcttcgtgcaactctccgggcggccgcacctgccaggtgctggagaatctggtaaaagcaccattgtgaagcagatgaggatcctgca

SEQ ID NO: 139053 - DNA, 100 bp, Homo sapiens
cttgacaacacagcccatggcaacatggcctggtgccttagctggaccaattattgtggagccacatgtcacagcagtatggggaaagaatgtttcatta

SEQ ID NO: 139054 - DNA, 101 bp, Homo sapiens
cggcgccccggccgaggtggcggcggctcctcaggtttacccaaggtccagcctagcccctaggcaccatgtcggacagtgatctaggtgaggacgaaggc

SEQ ID NO: 139055 - DNA, 100 bp, Homo sapiens
ccattgatgaaggaaatgctaaagcgattccaagcctggcatcctcgctacaacctcattgttgtgggccgatacccagatcctaatttcaaaagttgta

SEQ ID NO: 139056 - DNA, 100 bp, Homo sapiens
ctgccctgtggcctcgctcctcggaggatctaatgaggcgtcaagaagaactcagacgcttggaagaactcagaaaccaagagttgcaaaaacggaagca

SEQ ID NO: 139057 - DNA, 75 bp, Homo sapiens
gaagcatcgttaaagtctctcttcaccctgccgtcatgtctaagtcagagacactcctatcttaaagccagtatc

SEQ ID NO: 139058 - DNA, 86 bp, Homo sapiens
agaccctggagcctcagttggaagcagccgatccagcctgcggagcctgtggggcaggtcagaagagatcaattctacagaaattt

SEQ ID NO: 139059 - DNA, 75 bp, Homo sapiens
cccggcagctgtctgcgcacgccgagctccacggcacacatcaaagaacctcaaggcacctcccccagaaagctg

SEQ ID NO: 139060 - DNA, 115 bp, Homo sapiens
ggcaaaggcaagagtaacagcagcgccgtcccgtccgacagccaggcccgggagaagctgaaggtgatgtggccgccctcaaccgacgcatccagctcgttgaggaggagttgga

SEQ ID NO: 139061 - DNA, 75 bp, Homo sapiens
ctgctgcgcacgaccggcgcctcggacaccttcgagggttgggttcgctttgtgaacagcacatggatatttggg

SEQ ID NO: 139062 - DNA, 48 bp, Homo sapiens
ttcacagggaaagctgtgagggtcgcgtctccttcttcacctcggggt

SEQ ID NO: 139063 - DNA, 90 bp, Homo sapiens
tgcaacccctctccttgatgccagctcactggagtatctgtttgctcaggctgcctctaagaatcaaacttcactcttgggagaaccacc

SEQ ID NO: 139064 - DNA, 99 bp, Homo sapiens
tggatggtccgtactgtaccctacttcaaggacaagggtgacagcaacagctcagcaggatggaagatgtgtatccgccttctatccagccggcaccct

SEQ ID NO: 139065 - DNA, 75 bp, Homo sapiens
gcctatcatttgaagacgttccttgaggaggtttgaaaaaatatatgggcaataggttgtatatttgctgaattg

SEQ ID NO: 139066 - DNA, 75 bp, Homo sapiens
gtgcagccgccacgctcacctgcaactgtggaggctaatcaagacaagccctgaactggctgagtcctgcacatg

SEQ ID NO: 139067 - DNA, 82 bp, Homo sapiens
tcaacagaaaagattttgctgtcaaagttgtgtcagtgaatacaaacagcttctgcagaaagccgtcattacacctgatttt

SEQ ID NO: 139068 - DNA, 100 bp, Homo sapiens
gccacccaggccttggtcctagcacccactcgagaattggctcagcagatctcactgatgaaaaggcctccaggtttttcacctttccgatcatcacgaa

SEQ ID NO: 139069 - DNA, 100 bp, Homo sapiens
cgttgaacaaccacagctctattcccatggacccagaaagtgccagcgatgccgcccctctgcagaggtcccagtctctcccacactcggccaccgtcac

SEQ ID NO: 139070 - DNA, 50 bp, Homo sapiens
gtcagaccctttatcacatacagctaaggctttggtatcaggatgatgct

SEQ ID NO: 139071 - DNA, 98 bp, Homo sapiens
ggccagaagatacaaagacagaccatcccagttgaatgctgtcttccaagaacagaagaaaatgatccaggcccagcatgtacagaagcatattccca

SEQ ID NO: 139072 - DNA, 101 bp, Homo sapiens
ggaaccccgtcacaggctacaccagcaggcctgccagctgcccctgttttcttacatcgtggagcgcctgtgtgcatgttgttatgaacaggcgtggtatg

SEQ ID NO: 139073 - DNA, 82 bp, Homo sapiens
cggctgccgggccgggactggtgcgcgagggacagaggtgttccaggccttgcagcggctccatatgaccatcttctcccag

SEQ ID NO: 139074 - DNA, 98 bp, Homo sapiens
gttgcctcatcacatcctagccgatgtctctctgaagattgcagaactaaatctagaagcactagctaatcaccaagaaatacaagcagcaggccaag

SEQ ID NO: 139075 - DNA, 50 bp, Homo sapiens
ctgctacaggactctactatggagggatttcaaggatttggatttggaga

SEQ ID NO: 139076 - DNA, 75 bp, Homo sapiens
atatcaggaattattcttaaaacgggagagagtcagaatcaactagagtcatttgatgtggtcacaaaatgtgtg

SEQ ID NO: 139077 - DNA, 97 bp, Homo sapiens
attttagccctgatgaattcaatcaattctttgtgactcctcgatcttcagttgagaaatgcactcggtgatggaaagagagccactattctgaaga

SEQ ID NO: 139078 - DNA, 100 bp, Homo sapiens
ccaggagttcgtctcttacgtctgcggaagtgcagctgcctcagttcttagcgcaggaccgtagcatcctgagacattttgaattgacacttctcaagat

SEQ ID NO: 139079 - DNA, 51 bp, Homo sapiens
aacctcctgcgtatctgggaccacagtggcttacagaagagacgaaatgtg

SEQ ID NO: 139080 - DNA, 51 bp, Homo sapiens
ctacagcatcccacattaagtcaacgtgagaaagatcagtctaaagaaaag

SEQ ID NO: 139081 - DNA, 83 bp, Homo sapiens
gaaattgctctcacactcagagcttttgagcaattctgtggtgttcttggtcacacatttatggagtttctgaagggcagtgg

SEQ ID NO: 139082 - DNA, 75 bp, Homo sapiens
cgagaaaggaaagaaacaagtttgctctcagcgggggtcgccagaggccacagggaccgaggccaggcttctagg

SEQ ID NO: 139083 - DNA, 74 bp, Homo sapiens
gacatctgggggccacaaatgctccttctcctggagacgcaactcaagctgccagagaaactacgcataggctg

SEQ ID NO: 139084 - DNA, 99 bp, Homo sapiens
agggtttggcgctatagctattgctgtattgtgctcaggatttgcaggagcgagaacccgagcagcgccatgagcaacactaccgtcgtccccagcact

SEQ ID NO: 139085 - DNA, 80 bp, Homo sapiens
ttcacggtgatcatgtctcggatgattctgggggagtacacagaatcttatggcaagggccttatatgacaatgtcccag

SEQ ID NO: 139086 - DNA, 79 bp, Homo sapiens
tcgcctttgccgatccgccgcccgtccacacccgccgccaggttcatgatcaagagggcccaaggacggaagcgctttg

SEQ ID NO: 139087 - DNA, 75 bp, Homo sapiens
aggcacctgagttaacggacgctaagcggggtaggggaaggtaaatgagctggatggtatcccgttgatcctgga

SEQ ID NO: 139088 - DNA, 97 bp, Homo sapiens
ccagggcaagccccgctccggccaacaagttgaaatcacaaagattagacacctttttagataggtgttcttcagcaccactgacaacacggttctg

SEQ ID NO: 139089 - DNA, 101 bp, Homo sapiens
atctgtacctggctggaaatcaaagtccaccatgtgcttttgcacatccagtgcctggtgcacatcgtccgctccacctccctcaagtactccaagatccg

SEQ ID NO: 139090 - DNA, 74 bp, Homo sapiens
caagcccctaggaatctgcctgataatcgattgcattggcaatgagacagaaacctgctctacgaactgtcaga

SEQ ID NO: 139091 - DNA, 75 bp, Homo sapiens
tattcaagttcatgtcacgctgggtaatgaggatttgactgtgaagattgagaggatccagaatccagatctctg

SEQ ID NO: 139092 - DNA, 89 bp, Homo sapiens
ggatttgtggaccagtaaagttctcccacaagaatgcatctactcatgcctcgaaatctcctgacagtgttaatggaagtgaaccaagc

SEQ ID NO: 139093 - DNA, 95 bp, Homo sapiens
cctcccgagtagctggggttacagggagtcaaggtggacgcgagagaccacagtggagccacagcccggatgctggccaagcagtacggacacat

SEQ ID NO: 139094 - DNA, 75 bp, Homo sapiens
tgggctgcatgggctctatcaaggaaaacaagtgtctgcttatgtcgactctgtccctacctgtggttgtcatcg

SEQ ID NO: 139095 - DNA, 82 bp, Homo sapiens
cctgaagtggcggccctgtattttcccaaaaagttttacacatccataagtagacctttttggagcctcaccagccaattca

SEQ ID NO: 139096 - DNA, 101 bp, Homo sapiens
gattgcaaggtgaataaagaagtggagcgtgtcctgaaggagttccaccaggccgggaagcccatcggaacccttaggagaaatcttgagagtggacagca

SEQ ID NO: 139097 - DNA, 83 bp, Homo sapiens
cctggcctgggcgctccggtggcggcggagaaaaatggctacaaacttcctagcacatgagaagatctggttcgacaagttca

SEQ ID NO: 139098 - DNA, 75 bp, Homo sapiens
cggccaaggacctggccgacatcgcggccttcttccgatccggggcggatgtccacgcgagggacccccgccgtg

SEQ ID NO: 139099 - DNA, 100 bp, Homo sapiens
cagattagttgaagacaagccaggttccagacgacgccggtcctactccagaagccggagtcattcaagaataatgcatatactgccatgtcagattcct

SEQ ID NO: 139100 - DNA, 100 bp, Homo sapiens
ctaccctattttccaccagctggaggccgtgcggctcttctccaagcatgaggcctatggcatgtctgcgttacctttaaatctgataaaaggcactaga

SEQ ID NO: 139101 - DNA, 82 bp, Homo sapiens
ggagattatagctctgtatgagaaggacaacacctacttaggtgctggagaatctggtaaaagcaccattgtgaagcagatg

SEQ ID NO: 139102 - DNA, 83 bp, Homo sapiens
gacggttgtgtcgcaggtgctcccccacccccattctcttcaggggggcttcctctagtattgttgcagcatctggcagtgag

SEQ ID NO: 139103 - DNA, 74 bp, Homo sapiens
cggacccccgcaaggtcaacctgggagtgggagatttgatgcagtttgatgataaaggaaacaagaccaatata

SEQ ID NO: 139104 - DNA, 101 bp, Homo sapiens
ggcaaccaaaggaggaaatgagcttgcgggagatacagatgacccaccaagaattactcagaaccctgtgatcaatgggaatgtggccctgagtgatggac

SEQ ID NO: 139105 - DNA, 101 bp, Homo sapiens
gccgccgctctgccacggtctgcccacccaacgcgaagacggtaacccgtgtgactttgactgggagtgtgaggaagaggctgtctgtgtcattatgtgtg

SEQ ID NO: 139106 - DNA, 88 bp, Homo sapiens
gagaagaattttccaaatgaatttgcaaaacttactgtagaacatatgcagtaatgtcacctcaaaagagagttaagaacgtccaggc

SEQ ID NO: 139107 - DNA, 82 bp, Homo sapiens
ggcggaggacgcgcccggcgcccctgagccggccgagcggcgacggaccgcgaggctgctgacttgagtaaaccaatagata

SEQ ID NO: 139108 - DNA, 90 bp, Homo sapiens
ctacagcaacattgccaccaagacaccccttgaccagcacacactgcaaggagatcagggcaagtgtccagagaatggctgggatgaaag

SEQ ID NO: 139109 - DNA, 100 bp, Homo sapiens
tacgtccagtaccagaatgtcccaaggaacacctgggcaacagaatattggtcaagttgctgaccttgaaatgaggtttatataactttccaagacaagg

SEQ ID NO: 139110 - DNA, 74 bp, Homo sapiens
ggaggcacagaaactgttattcgggcattctacggagggagatattcttgagctgaagaaatcaggggagaaac

SEQ ID NO: 139111 - DNA, 90 bp, Homo sapiens
ccgacctcgtaacgccacaaggaataatgggaagagagaagggcacagttacctaagtatcaacgtaatcttcctcggccaggacaggcc

SEQ ID NO: 139112 - DNA, 75 bp, Homo sapiens
cgtacaggttgagggatgggactggaaatcaaatgttacaggtggtattaaagataatcaaacattatcaagaag

SEQ ID NO: 139113 - DNA, 100 bp, Homo sapiens
ataagcccccggggctaaaatggaagcacctgcgggatacagtggagctacaacttctgaaggaggaacttcctgaagtgctccgaagacaacccgctct

SEQ ID NO: 139114 - DNA, 101 bp, Homo sapiens
caaaattgtggaaaagtcactctggaacgtcaaggtcgtgggaaataaaaggcagttctacacagactgcagcaacggttgcatctgcatatcctaagagg

SEQ ID NO: 139115 - DNA, 90 bp, Homo sapiens
aacaactttgaggatgagccacctttattagaagagttctaaagttcctgttgcttcagacaatggatgagcaatcacaaggaatgcaag

SEQ ID NO: 139116 - DNA, 75 bp, Homo sapiens
ccggcccagagctcccgggtcgtctttcgtgtggccgcgaggtcctctcctggaagcttgtgcctgacaattacc

SEQ ID NO: 139117 - DNA, 75 bp, Homo sapiens
ggtcaaccgcacctaccaaatggtatttgtaggcaaaataccaagggatttatatgaggatgagttggtgcccct

SEQ ID NO: 139118 - DNA, 75 bp, Homo sapiens
ccagatgtgcaacaaagtgcgatggcatatcacacctgaaaaattttatgtggaagcttgtgatgatggagcaga

SEQ ID NO: 139119 - DNA, 82 bp, Homo sapiens
cgagcgcccctccgagctggggttggacgctgccagtttgcacagcagcagcatcatcggctggttcgtgcgaagcttcaag

SEQ ID NO: 139120 - DNA, 124 bp, Homo sapiens
ctagtagccacggtgtggcagctgctctgaaccaggacctggacccggacccaaagtgccatgtctttaataggctgaggggatctggcggtggagcgctaggatcagacgcccccgcgatgac

SEQ ID NO: 139121 - DNA, 100 bp, Homo sapiens
caggaagcttcatggctgggcaccaggccctgactaccaggatgttttagaagaatgtatgtctcttcccaagctatcttcttattctggatgggtggta

SEQ ID NO: 139122 - DNA, 96 bp, Homo sapiens
gcaacagccacgatgtgaagcggggcagagccgggggagcccagcccagccagcctccagaaccgcatgcacgagtctctcatgctcttcgactcc

SEQ ID NO: 139123 - DNA, 100 bp, Homo sapiens
ataacacaacatttcctgatgctgaagataaaggagtcatgctatactgaaaagacacttcatcaagataactctgggagaagcagaaaaccctgtgcca

SEQ ID NO: 139124 - DNA, 76 bp, Homo sapiens
atgtaaccctgtccagtaatggctttctactctaccaccccagtattaacgcctccaagcagcatcgtcttaaacg

SEQ ID NO: 139125 - DNA, 82 bp, Homo sapiens
ctggatttacctgttttctgggagcttcgaaggtgacagagctgaatgaacctctctccaatgaagatcgaaatctcctctc

SEQ ID NO: 139126 - DNA, 75 bp, Homo sapiens
caggatggctgcgttgacacgtcttatttaatccacatcataggctgaaggggatgctaagggagataaagcaaa

SEQ ID NO: 139127 - DNA, 97 bp, Homo sapiens
aggctcaagcaatcctaccatgtcagccttcccagtagctggaactacagagttcccgattttgaaatgctgggctcactcagaagtggcagcccct

SEQ ID NO: 139128 - DNA, 98 bp, Homo sapiens
atggacggtcactcagcctatggaggtacctgtttcccaggcaactactgatcaggcatttctggaccccaaaacaacaaactgatttcttagatatc

SEQ ID NO: 139129 - DNA, 99 bp, Homo sapiens
cgggaccccgccctcgacggagagagtcggaccccacaggcccacagagacaggacgtggcccagtggaacatcgggagcctccggaccatcctggaca

SEQ ID NO: 139130 - DNA, 75 bp, Homo sapiens
tgacagcgagagcggcccggacgacaaggacctggaggaacttgctttgtaccagatccagctgctgaaggacct

SEQ ID NO: 139131 - DNA, 100 bp, Homo sapiens
aggctgaccccgcagcggccgggctgtcgcggcccccacctcagaaaaatggctacaaacttcctagcacatgagaagatctggttcgacaagttcaaat

SEQ ID NO: 139132 - DNA, 87 bp, Homo sapiens
ggttctctctcgaccccttctgcccggcgcttcggcccgggccgctcaggtgcagttcctacaacagcagccagtacccctgatgcc

SEQ ID NO: 139133 - DNA, 75 bp, Homo sapiens
tcctggatattagccgccccaagatgcaggaggtggtggcaaacctacaggagtacgagagggcctccaaagtgg

SEQ ID NO: 139134 - DNA, 100 bp, Homo sapiens
ccgaagacactgcgactccggagacagcccaaatatcctcggaagagcgctcccaggagaaacaagaactgtggctgcaccatctgtcttcatcttcccg

SEQ ID NO: 139135 - DNA, 80 bp, Homo sapiens
ctgtcgagaagcagctacccaagctccaggagcttccggttatcaatactctggctgaccatcatcatcgtgggactgac

SEQ ID NO: 139136 - DNA, 74 bp, Homo sapiens
gcagcccagacgcggcacagagagggcctgggagcttgctgcagcttcagccctggacacatccaacgtgatgg

SEQ ID NO: 139137 - DNA, 90 bp, Homo sapiens
gcctggatgggaagttcaagtttactgcgaagtccacccagcgttccggaggccactgcagaacaaattagacttgcacagatgatttcg

SEQ ID NO: 139138 - DNA, 51 bp, Homo sapiens
gggaagatggcggctgggttcaaggcttccgagtggacctgccaatcaagt

SEQ ID NO: 139139 - DNA, 75 bp, Homo sapiens
tgaggactctctacaggacccgatatggcatccctcctacttctgcttcctcctggccgctctgggtgtgacagc

SEQ ID NO: 139140 - DNA, 100 bp, Homo sapiens
cacgacgaggcggtgcaggcgttgaagcgcgcgggcaaggaagtgctgctggaagacgtccttctatggccgcttcaggcacttcttggatatcatcgac

SEQ ID NO: 139141 - DNA, 75 bp, Homo sapiens
ttgacatgcatgggttcctgaccaatgtcatccttgcagacctcaacctctcagcttcgccgacacgaggtgacc

SEQ ID NO: 139142 - DNA, 100 bp, Homo sapiens
caatcggcttggtccacagataagcgtgttcaactccccgacgagtggtgtccgcaaatatggtaaagattttcaagctattgcagatgtaattggcaac

SEQ ID NO: 139143 - DNA, 98 bp, Homo sapiens
taaaaactcaaaatctcttcttctaagagcacactgtcagacatctggatggtcacttactgagcaggacttctgtaacgataagagttatatttcag

SEQ ID NO: 139144 - DNA, 101 bp, Homo sapiens
agagcgacaagccgctggcagccgcggatctcaccgccgctcagggggggtcctgtggagatccttcccttcctctacctcggcagtgcctaccatgctgc

SEQ ID NO: 139145 - DNA, 83 bp, Homo sapiens
atgggccccgagaacctcgaagtatggcccatctcctgtacgcttggagcgacctttggctacgtggctggccttgttatttc

SEQ ID NO: 139146 - DNA, 101 bp, Homo sapiens
ccatgaagagtcctgaccacaatggggaggacaacttcgcccgggacttcatgaggaaaactttgagttcctgatcgtgtccagcacgggtcagacgtggc

SEQ ID NO: 139147 - DNA, 83 bp, Homo sapiens
gtcgtccgttctctcaggctcccgttcagggtcggcactcttcaccctcccgagccctgcccgtctcggccccatgcccccac

SEQ ID NO: 139148 - DNA, 82 bp, Homo sapiens
cggcggccactgggcgcagcacccagcttcctgcctgacacagctcacttcaagaagtgcacaatgtcagaacgtggaatta

SEQ ID NO: 139149 - DNA, 80 bp, Homo sapiens
caaaccttgcttctaggagataaaaaggcgccatgtcagaaccggctggggatgtccgtcagaacccatgcggcagcaag

SEQ ID NO: 139150 - DNA, 132 bp, Homo sapiens
atggaggtctgacattcaaggatatttatctaaaaattcttcttttgagtgccagtaaaggtgctggagaatctggtaaaagcaccattgtgaagcagatgaggatcctgcatgttaatgggtttaatggag

SEQ ID NO: 139151 - DNA, 100 bp, Homo sapiens
gcgtggagtgacggtgccaccgcggcgctgatatcagtatcaagataaaagtttggaatgggagaaaaattctcaaagcctgaaagaaaatctgtaagaa

SEQ ID NO: 139152 - DNA, 75 bp, Homo sapiens
ctgggctcaagcgatctacccaccttaccctcccaaagtggtgagattacaggtttctaccatgaatgaaatgaa

SEQ ID NO: 139153 - DNA, 82 bp, Homo sapiens
ctgcccccccttccccacgcaaccccagatccatttacactttacagtactccaaagattcaggtttactcacgtcatccag

SEQ ID NO: 139154 - DNA, 75 bp, Homo sapiens
ggggccgtgaggtgagagagtccgggagcccgagcttgaggtgctggatgtgtctggggcagacatgttggccaa

SEQ ID NO: 139155 - DNA, 96 bp, Homo sapiens
aagatatattacatgctgcaaagcagataggtgctggagaatctggtaaaagcaccattgtgaagcagatgaggatcctgcatgttaatgggttta

SEQ ID NO: 139156 - DNA, 90 bp, Homo sapiens
gataaaaagagcattaaattcagttccagtaattattgctgctgttggtaccagacaaaatggactccatgttttcgttggccctgaaat

SEQ ID NO: 139157 - DNA, 71 bp, Homo sapiens
gttcgtttccagcctcaggaatttatggtcgcctttttgaatgagattctctttgtggccagatgggtttg

SEQ ID NO: 139158 - DNA, 100 bp, Homo sapiens
cgttcaacaagctagtgagcacaatgaaggcaagtgggactttgccttctcagcccaaagtcagcgtgttgacttcaaaatcaaaactgtagagctaaga

SEQ ID NO: 139159 - DNA, 98 bp, Homo sapiens
cggtgctcttcatcaccttcgtggtcgtctggtcctactacgcgtacgtggtggagctctgcgtgtgagctgtccaagatcacgatgccaatcgcctt

SEQ ID NO: 139160 - DNA, 82 bp, Homo sapiens
gggaacccgcggtggagcgggacacgaacgtggtgtccctggccagtgtccttccacctgtccacaagcatggggaacatct

SEQ ID NO: 139161 - DNA, 82 bp, Homo sapiens
cgctcattggccggaggaagctcaccttcgacgaggaagcttataaaaatgtgcaattctgtggtgttcttggtcacacatt

SEQ ID NO: 139162 - DNA, 74 bp, Homo sapiens
agtgagcgaggaagagtttcgtgaaggttttgactctgatatcaacaatcggagcgcctgccaacggtaccgct

SEQ ID NO: 139163 - DNA, 82 bp, Homo sapiens
aggctggacacgtggacatctgccacatgctggttcagggggatatgagactttctactcggaatatcctgagtgttgcgtg

SEQ ID NO: 139164 - DNA, 97 bp, Homo sapiens
ttgcatttgccaacatcttgggactggagaaatgttcatggtatcaattttgtcagtcctgttcgaaaccaaggttggagatgcttgatgctgcaaa

SEQ ID NO: 139165 - DNA, 98 bp, Homo sapiens
gagcttccgcgcggagccctcgcgggctgccgggagcggcccagcgccaccgcagggggggccctcagcctcttggccttgaacgggctgttcatctt

SEQ ID NO: 139166 - DNA, 75 bp, Homo sapiens
gaaattcggcagcgaccacacgggagtggggcgctccatcgtgtacggttgggacaaacattcctatggttacca

SEQ ID NO: 139167 - DNA, 75 bp, Homo sapiens
tcaagcccaaggtcctcctcaaccacttcatgctgtgcatcaggccctgctgctcctgggggccgccgccctggc

SEQ ID NO: 139168 - DNA, 50 bp, Homo sapiens
agagacagttatgacagttacgggttccccactgaaggacttggtccagc

SEQ ID NO: 139169 - DNA, 96 bp, Homo sapiens
agcaggaatactttagcctggaaggggtgatccattcatgttgcagcagtctacaaatccagcaccaggaattctgggacctccacctccctcatt

SEQ ID NO: 139170 - DNA, 100 bp, Homo sapiens
actggggaacaccacctccccacccctcaaccagtctcaggcccagatgtatctacgggaaatgggtcctgatgaatatgaagagatggaagaagaggag

SEQ ID NO: 139171 - DNA, 100 bp, Homo sapiens
cccgcttccgccttccaaagcgctgggataacaggcgtgagccgctgcccgggccatccctcgaggaagtttcatcagggacctgatgcccagaaccctg

SEQ ID NO: 139172 - DNA, 75 bp, Homo sapiens
cagccgcaactgcgagggctggaggcaggggagttcctgcgcctctgggagcagttcagtgacatgggcttccag

SEQ ID NO: 139173 - DNA, 82 bp, Homo sapiens
ttctcagccgcctggcaaaccgggcacccgaacctaccccacagcagacctcctgccccccgaggtctgcagtctcctgaac

SEQ ID NO: 139174 - DNA, 83 bp, Homo sapiens
ctgacgtgaactcattttatctgccacgacccagaagcactatgttggccatggaaatgctatcaatgagctgaaattccatc

SEQ ID NO: 139175 - DNA, 100 bp, Homo sapiens
ggcaaggcggagagtgacggagtcggcgagcccccgcggcgacagctgatgttctaatcatgtcagataaagatgatattgagactccactgctaactga

SEQ ID NO: 139176 - DNA, 50 bp, Homo sapiens
gaactttctaaccttaagaagaataggtttggcctgtcactgctcctcat

SEQ ID NO: 139177 - DNA, 75 bp, Homo sapiens
ttcctttttcgtctgggctgccaacatgaccaagattggagctggccgcctcatgggccccaagggagtggccgt

SEQ ID NO: 139178 - DNA, 100 bp, Homo sapiens
cgggttcagttcgtcatggggctgtttggaaagacccaggagaagccgcccaaagaactggttttgaacgaagaatgtgatcagaactggtacaaggcag

SEQ ID NO: 139179 - DNA, 100 bp, Homo sapiens
gtggggtgtgaagctccggtgctggtgcggcgggggactgcggggccagcctcaggtcttaggggaaaagccagagcttccagatggaggtgatgatgat

SEQ ID NO: 139180 - DNA, 100 bp, Homo sapiens
gtgggtggacccttattattagaagtgatcaggcgctgtcaacagaaagaaaaagggccaaccactggggaaagccagccccagtgcctgctgagccgtt

SEQ ID NO: 139181 - DNA, 101 bp, Homo sapiens
ttttccaacaaaactggatgcaggcatattactattcagatctgctttgcaaagagagtaaatggtccaaggaatacctcaatagcattctccagcatgcc

SEQ ID NO: 139182 - DNA, 75 bp, Homo sapiens
gagctgccagaggttccctccgagccccttcctgagaagatcccaggtgcagaggccaagaccgttttgcccaag

SEQ ID NO: 139183 - DNA, 82 bp, Homo sapiens
gttcagaatcctccaaaaccagtcatgaccactagacccacagctgttaaagcaacaggtcccaggtgtgacaccttcagca

SEQ ID NO: 139184 - DNA, 80 bp, Homo sapiens
ggaagcagccgatccagcctgcggagcctgtggggcagatgaggaagccaaggcccagcagagctgagatgtgactgcag

SEQ ID NO: 139185 - DNA, 100 bp, Homo sapiens
cacacgtgcgcacccccttcgagatctccctctggatccttctggcctgcctcatgaagatagccactgaggcggctcccagctgcgttggcgacatggc

SEQ ID NO: 139186 - DNA, 90 bp, Homo sapiens
ctttgtgtcctgagatcaaatggcacttcattggccacctacagaaacaaaatgtcaacaaattgatggcaatggcaccagcatgatatc

SEQ ID NO: 139187 - DNA, 100 bp, Homo sapiens
taaaaatggatcccaacactggacggtcaagagggtttgggtttatcctgttcaaagatgcagccagtgtggagaaggcccggaaagccctcacagagcg

SEQ ID NO: 139188 - DNA, 90 bp, Homo sapiens
gcagcgctccagctcgctctccaccttcagaattcaaagaagctttttcactatttgacaaagatggtgatggaactataacaacaaagg

SEQ ID NO: 139189 - DNA, 75 bp, Homo sapiens
gtgtcagccgatgcaccgagtccagcccaggaaaatggagagcccccaaatacatcaagatgtttgtactggatg

SEQ ID NO: 139190 - DNA, 96 bp, Homo sapiens
cctggtcctgagggccccccagggctgaaagggcttcagggactgccaggcccgaaaggccagcaaggatggaacaacaggattgagtatgagccg

SEQ ID NO: 139191 - DNA, 74 bp, Homo sapiens
ctacggagtcagattcctgaaaaagcgttacagtgtttctgccacctctgtacaaaagacaattttacttgtgt

SEQ ID NO: 139192 - DNA, 99 bp, Homo sapiens
aggcagtgcccttcccggagcgtgccctcgccgctgtacctgtttgaaaatggtagaatagataacatttttactgagccctattccagatttatgatt

SEQ ID NO: 139193 - DNA, 82 bp, Homo sapiens
ctgccagccctttctgaggcagatacccaggaactaacccaggtttgtttgtaaaaacaatggtgtgttgtttgaaaaccag

SEQ ID NO: 139194 - DNA, 90 bp, Homo sapiens
ctgaatcacacgccgccatccgggaggcccagggaaggaaatctactttcttcaatgtgttaaccaatagtcaggcttcagcagaaaact

SEQ ID NO: 139195 - DNA, 90 bp, Homo sapiens
ctgctgcacccacgaatctgcccacccctcctgtaacccagcctgtttcacttcttgggttccttacctggctgtggcccggacgtttga

SEQ ID NO: 139196 - DNA, 58 bp, Homo sapiens
ggaggatctggagacagccatggagttctacttagagcatcaaagctaagccagaaga

SEQ ID NO: 139197 - DNA, 50 bp, Homo sapiens
cgccaaccccttcgagcaagacgtggaagctgaaacacactgagagtgac

SEQ ID NO: 139198 - DNA, 87 bp, Homo sapiens
ccgcccgccgcagggcgctgacggtcccgcacgtctgccgctgccaccggcgcgcccgacatctacaaatctgaaggacaaaacatg

SEQ ID NO: 139199 - DNA, 99 bp, Homo sapiens
caacattgctacacatgctaaaagatgacagacttggacaacatgtcccaacattacatcccagtgtcaacattgcatacttgaatactggcatcggag

SEQ ID NO: 139200 - DNA, 75 bp, Homo sapiens
gtatgataccttacttaatactgtacaggtatatctcacagatattgtggcctcggatccagaccattgcagtca

SEQ ID NO: 139201 - DNA, 50 bp, Homo sapiens
cgaaagggaccgaaatggagagcaaaggccaacatagccgaggtagaggt

SEQ ID NO: 139202 - DNA, 80 bp, Homo sapiens
cagagctgagcgttccacccgtgccgccccgcaccggacccccccgcctgctggtgaggccggcgaccaccaggggcctg

SEQ ID NO: 139203 - DNA, 83 bp, Homo sapiens
ccaacatgctgtgatgtgtgccgagggaggaattgccatgccttgtgttcaggcgcagtatgggtcctcgcctcaaggagcca

SEQ ID NO: 139204 - DNA, 75 bp, Homo sapiens
ccagcaggctgacctgaggagcatcgtggaggagattgagccgatctgcacaatgcaaccaacctgcggtctcgg

SEQ ID NO: 139205 - DNA, 100 bp, Homo sapiens
atggaaaattataacatagcattaaggtggacagccaaacagaagctttattcgagaacaggaaaattgcctaagaattatgacccaaaagttaccccag

SEQ ID NO: 139206 - DNA, 74 bp, Homo sapiens
tcggatttgaaaatccaatgtttgcttgtctggaaatggattatgaggcggcttacagggagaacacagttggc

SEQ ID NO: 139207 - DNA, 99 bp, Homo sapiens
tcatgtgaactgcacgataaaggaactcaggcgcctcttcttagttgatgatttagttgattctctgaaggactcagaattcatgattgaagaaatgca

SEQ ID NO: 139208 - DNA, 100 bp, Homo sapiens
cgcgggccaagaaactggagaaactcggagtgtactccgcctgcaagtgtcccagaagcttttgttgacaattccagtttccgaacaaaacatttcggca

SEQ ID NO: 139209 - DNA, 96 bp, Homo sapiens
cgcagcacagattggttcctatgttcatgttgggaagaactgtgtgattagccacctgagctgaagattcccttgagaacaagtactgtcctgtgg

SEQ ID NO: 139210 - DNA, 100 bp, Homo sapiens
tcatgactattgcaccacgcccggggggacgctcttctccaccacaccgggaggtgataacccccgtgaggacaggccatggctacgtatacgagtaccc

SEQ ID NO: 139211 - DNA, 75 bp, Homo sapiens
gacttgatggtctggtagaaacaccaacaggatacattgaaagcctgccaggagtgaagaaagctttgggcaaat

SEQ ID NO: 139212 - DNA, 98 bp, Homo sapiens
gtgctgctggggaacgggagctggatgagacttcccaagtaagaagcggaagaggagccgctggaaccaagacacaatggaacagaagacagtgattc

SEQ ID NO: 139213 - DNA, 97 bp, Homo sapiens
gggcggatggtggtgatggaagcaggtggaattatgccctgttggttccaatgctgggattggctgcttttcaaactggcgatggaatatgagagga

SEQ ID NO: 139214 - DNA, 75 bp, Homo sapiens
ccgaagcagcgtgtcctccgtgggagcccgagctgataccccaatgtccttctttgactttgtggttgatcctca

SEQ ID NO: 139215 - DNA, 88 bp, Homo sapiens
agatgtcctcatcatcccgtcagagctgaggtacttcgtgaagcatcggtgtgtggctatttttaaagacaaacagaacaagcctact

SEQ ID NO: 139216 - DNA, 100 bp, Homo sapiens
cgacaaggaagtgaagaaggcgcatcactcccagctgcgcaaagcttgcgaggtggcgttagtactatactggcaattgctggagaagattttgcaattg

SEQ ID NO: 139217 - DNA, 103 bp, Homo sapiens
gcgcggcggggcagaccgctggggactgcgggcggcgctgtgtccgtcgccatgacaggacctgaaggagaagaaggagaaggtggaggagaaggcaagccgg

SEQ ID NO: 139218 - DNA, 82 bp, Homo sapiens
tagagactgatttgcaacccttccgggaagccatagctctgcatggctgttcggctcttgaatcccagcgatgaaaccagga

SEQ ID NO: 139219 - DNA, 88 bp, Homo sapiens
cggccggagcgcagccctgaggcccaggggggggccctcagcctcttggccttgaacgggctgttcatcttgattcacaaacacaacc

SEQ ID NO: 139220 - DNA, 75 bp, Homo sapiens
cacgcagaacgtcaacaccaagtgcatcaccatccccaggatgataatgaagataattcaaatgatgggacccag

SEQ ID NO: 139221 - DNA, 99 bp, Homo sapiens
agacagtcctcgtcagcactgactttcagctatggaatcgaggatgccagcccccatcagattgcgggagctgatccggaccatccggacagcccgaac

SEQ ID NO: 139222 - DNA, 105 bp, Homo sapiens
attcaagatgaccaacgaagaacctcttcccaagaaggcatgcccaagagaatcgtaaatgcaaaaattgcttgccttgacttcagcctgcaaaaaacaaaaatg

SEQ ID NO: 139223 - DNA, 98 bp, Homo sapiens
agtaaccctgagacaaccacttctggtggttgccactcacctgaggataaggccttcctactgaagaaataaaaaatgttctggagaaggtttcatca

SEQ ID NO: 139224 - DNA, 75 bp, Homo sapiens
tgcttcgggcctctggaatttagcgctcgcccagctagccgcagttcaaaaggtgatgacctatcaacagccatt

SEQ ID NO: 139225 - DNA, 85 bp, Homo sapiens
ccaaccagcctgtcgtgatcgacaacatcatcaatgctgtggtactgttgattttattgagtgccctggctgatccggatcagta

SEQ ID NO: 139226 - DNA, 100 bp, Homo sapiens
aagtttataccaagtcttctcatttaaaagctcacctgaggactcacactgatgaacagtgctttgagacaaatgtcatatggtggaaaatttggttctt

SEQ ID NO: 139227 - DNA, 99 bp, Homo sapiens
ctatgtacctgttaccactttcaaaagaatggaccacttcttgtacggcctctcggatgagatgaagcaggcccacagagagcagctctttgctgtcag

SEQ ID NO: 139228 - DNA, 75 bp, Homo sapiens
agctgccacctgcctttgacctttttgaagcctttgcaaaagttatgaagacagtatggagtttccagaccatag

SEQ ID NO: 139229 - DNA, 80 bp, Homo sapiens
gtggggctgaccctgtgaccagtgtggggaaaagagacctgtcggccatggagcctaatgatagtaccagtaccgctgtg

SEQ ID NO: 139230 - DNA, 50 bp, Homo sapiens
tcaagggggaggagtgtccagcaggactttgcctcccgggccaaactggc

SEQ ID NO: 139231 - DNA, 82 bp, Homo sapiens
aaaagaagtggtttatcaaaatcacgttataatcagattttgaccaagcattttgtaaggtggtgtttggactctagaccat

SEQ ID NO: 139232 - DNA, 82 bp, Homo sapiens
cagaggatattattcagttgaaacagttacactgcttgtagctcttaaggaatagctattcagtcagacagaaccacttatc

SEQ ID NO: 139233 - DNA, 90 bp, Homo sapiens
cgaccataagttgcagcggtacgcgcttaaccgcatcacggtgtggaggagcagatctttctcctggcctgccctccatgtcggggagct

SEQ ID NO: 139234 - DNA, 83 bp, Homo sapiens
tcgcagtggtcgcttcttctccttggctaaagtaaataatgccagcctgattggactgggttatactcagacccttcgaccag

SEQ ID NO: 139235 - DNA, 83 bp, Homo sapiens
gtgatccagaagtccagagctgaggactgcctgtttgcaggtctcctccgggctggggctgagcaagccctcggagtgaccgt

SEQ ID NO: 139236 - DNA, 75 bp, Homo sapiens
caatatgatatacaagacaaggtgaagcctcggaagatataatgaagatctggaacttgaagatgccattcatac

SEQ ID NO: 139237 - DNA, 75 bp, Homo sapiens
ctcccaagtagctgggattgcaggttacgactatggctatgtctgcgtggagttttcactcttggaagatgccat

SEQ ID NO: 139238 - DNA, 100 bp, Homo sapiens
agcttgacggcttggacgaagatggggagaaggaagcgagactcatacgcaacctcaatgtttgaagaaaacaggtctgaaacaaggtcttacccccagc

SEQ ID NO: 139239 - DNA, 100 bp, Homo sapiens
ctttctacaacccgttccagttcgagatcaccttcgagtgcatcgaggacctgtctgaaggattttgaattatgggatgatgtaggattaaacattccaa

SEQ ID NO: 139240 - DNA, 75 bp, Homo sapiens
ccgtgtcaccgccggaacctggcgcagtggctgcttcaacccccaactccactgctggtgcagccatgaactcct

SEQ ID NO: 139241 - DNA, 75 bp, Homo sapiens
tgaacaggagccgctcttaggcgacacacctggaagcagataatcagacagctaaatggagtctgagcagctgtt

SEQ ID NO: 139242 - DNA, 75 bp, Homo sapiens
caccaacaggatacattgaaagtgtgaaggtgggctcacggctgactctctgtgcccagggctgtgctgccatcc

SEQ ID NO: 139243 - DNA, 98 bp, Homo sapiens
tccatctttgatgctgatgaagaaaagtccaagatcagtccaaagtgtttgtgaaggtgtttactgaaattgaccggatgccccagctcctggcctac

SEQ ID NO: 139244 - DNA, 75 bp, Homo sapiens
cttcgagtcctttattgtggagtgctgaagctgctgaaagatggcagaagaagtggtggtagtagccaaatttga

SEQ ID NO: 139245 - DNA, 100 bp, Homo sapiens
gtacaagcttacgtctctgctcttcagtacaatcctatcactggggtgatcctgctggctgttggagtctggggcaaacttactctgggcacctatatct

SEQ ID NO: 139246 - DNA, 75 bp, Homo sapiens
cccagcgctttgggaggccgagcaaacggggattcagcgtccgatcctttggaacagggactcacgtgaagcttc

SEQ ID NO: 139247 - DNA, 75 bp, Homo sapiens
cccggacatgatcctctccgcctctcgagcaatgccctgccctaaggaagacactcccaattctgtttgggagcc

SEQ ID NO: 139248 - DNA, 100 bp, Homo sapiens
cagagacgtgtctgatctaaagcatcctccaggacaaatagcaaggaaatacagttcctgctccaccattttcctagatgatagcacagtcagtcaacca

SEQ ID NO: 139249 - DNA, 75 bp, Homo sapiens
gtgaccgtggacggaccccgggagcccagacgtgagacatggaatccattaaaattgcattatcagttaagaaat

SEQ ID NO: 139250 - DNA, 90 bp, Homo sapiens
ccttgtccagttactctaacaagtctggagaggctgcctaccacaaggactttagcttactttttaaagattgaagaaaaaaaagaagac

SEQ ID NO: 139251 - DNA, 100 bp, Homo sapiens
gtttgatatcaccaaactggaggatgcctatgtattccctggggatggcgcatcacacaccaaaggttgtcttgctcttcccaaattgaatttgcagttt

SEQ ID NO: 139252 - DNA, 100 bp, Homo sapiens
agaaaaagaggctcttcctcctcctcccgcgacgatacagcgtggtacccacccagcaatacatgatatcttggctctgagagagtgtttctctaaccat

SEQ ID NO: 139253 - DNA, 100 bp, Homo sapiens
ctgtgacttcagagacactgccaagcagccttagccctagtgtagagactgcttttcaggaagccttggacgctgcaggtgataaacttgtagtagttga

SEQ ID NO: 139254 - DNA, 82 bp, Homo sapiens
gtttttgaccagaaaaccgacaaccttcccagaaagtccaagctcgtgattagaaatgatatttgccaaatttgatgaagtg

SEQ ID NO: 139255 - DNA, 76 bp, Homo sapiens
ctgggcgccgcgccgcacgagcaccagcctagagccaggaactaagcgtcttgtagaaggaactattaatccagga

SEQ ID NO: 139256 - DNA, 88 bp, Homo sapiens
tgcttcctcctcctcggcctcaccctgtcacaagatgaaggtagaggcacattatacaaatacagacctgaagaagtagatattgatg

SEQ ID NO: 139257 - DNA, 75 bp, Homo sapiens
tgtaattttgaggatccttctggtcttaaagccaatttagaaggagtctactcttcatcttgtgttgagacttcg

SEQ ID NO: 139258 - DNA, 122 bp, Homo sapiens
agaagattctacaagtgacttaagaagcaaaaaattcaagaaactgactaaagctatatgtggactggggctggtggcagcagcgtcgtcataggtaatattggtgccctgatgggctacgc

SEQ ID NO: 139259 - DNA, 83 bp, Homo sapiens
tacagtgacggggagatcagcatttgcatggaacacatggctcaccagctggattccctcctgggggcttcattcccaaaacg

SEQ ID NO: 139260 - DNA, 101 bp, Homo sapiens
ggctttgagccaacaggaagaactagcggatttgccaaaagactacctcttgagtgagagtgaagatgaggcccccacagaacacctgaactcaaatgaga

SEQ ID NO: 139261 - DNA, 99 bp, Homo sapiens
ctggcctgcacgagatggacatccgctatgacaacatgcacatcccaggaagccaccattcttcagagggcaatgaaggcacagaaatggaagtaccag

SEQ ID NO: 139262 - DNA, 75 bp, Homo sapiens
ccgcaagtcccccccggagaaaaagttgaagcgttatcttcctgcctgacacagctcacttcaagaagtgcacaa

SEQ ID NO: 139263 - DNA, 75 bp, Homo sapiens
tgctgggctgcttaagaaggaccccaagcagagcaatggtggatgtgatctttgctgatgtggcccagccagacc

SEQ ID NO: 139264 - DNA, 50 bp, Homo sapiens
cgagcggtgtctgtaaatcccggagtctcaggagcaggggctgcggcaga

SEQ ID NO: 139265 - DNA, 83 bp, Homo sapiens
cagaagaaaccagccgaacttcagggtttccaccgttcgttcaaggaggcaacgcacgggccacaggcatgttcctgcagtat

SEQ ID NO: 139266 - DNA, 100 bp, Homo sapiens
aaaatgcataactatactgattggatgctgctcaaaatcagcctacatgccatctttggaatccaaatgagactcagaacaatagcacaagctggcctgt

SEQ ID NO: 139267 - DNA, 83 bp, Homo sapiens
taaagctgctggacaacaccatggaaatatttgacattgagtgacatattcgatgccatgttccctgtcactcacatcgctgg

SEQ ID NO: 139268 - DNA, 75 bp, Homo sapiens
ttgctgactgcaatccgttcgggagaggctgctgccaaattgaaaagggtttaccgacaagactgtgaaactttc

SEQ ID NO: 139269 - DNA, 50 bp, Homo sapiens
aaagaaaattgctcactttgatctcaagtgaacgagataattgggagaga

SEQ ID NO: 139270 - DNA, 75 bp, Homo sapiens
ctggtcgcagatcctgagacccggacagtggcagtgaaacagatcattgagaagcagccaggccacattcggagc

SEQ ID NO: 139271 - DNA, 75 bp, Homo sapiens
gtgccttttgcctcccaccgtgattctgaggcctccccaaccatgtgcaatttgttggctgcaccaattctagaa

SEQ ID NO: 139272 - DNA, 100 bp, Homo sapiens
gaggcagtggccctggtggaagacttgcagaaagaacctggaagacagaggctggaggattcctacaggaagcaagtagtaattgatggagaaacctgtc

SEQ ID NO: 139273 - DNA, 50 bp, Homo sapiens
gggcggtccgttgccaaagccagaacttgatggagagtttggattcattg

SEQ ID NO: 139274 - DNA, 100 bp, Homo sapiens
agaggagaaccaaataaatgagaagcaagagcctgagaatgctggagaaactggtcaagaagagtgggacaattgatgactgtgagttggtggaagggct

SEQ ID NO: 139275 - DNA, 75 bp, Homo sapiens
tttgcttagcactgaaaattctggataatggtgaatgggattttgtgtggatgagggctcggctacagcaagaag

SEQ ID NO: 139276 - DNA, 100 bp, Homo sapiens
gtggagcgcagagcgggcgagcgcgcgggtattcccctacatctcagccatggtgaacaacggctccctcagctatgatcatgagcgggatgggcggcct

SEQ ID NO: 139277 - DNA, 75 bp, Homo sapiens
gggaaaggggaaatgagttcaccagaaaccaacaggcagcacaggaggctttacaggaagtatggtgctggcatc

SEQ ID NO: 139278 - DNA, 98 bp, Homo sapiens
taatgccaagaagcagccgccagttgggatcaaatgtgagcctatggatcaagtcagtggaaaaccgatggggaacctggcccccaaggctggtcccc

SEQ ID NO: 139279 - DNA, 100 bp, Homo sapiens
gaagactatttggagtgcctgggggccccgcagaaaatgagaatggagccctaaagtccagttccaagatgagatgggattctccaacatggaagatgat

SEQ ID NO: 139280 - DNA, 116 bp, Homo sapiens
caagaacctgcgggaggacggagagaaggcggcgcgggaggtgaagttgctgctgttgggaaggtgctcgggtcttcggggcactgggtcccatcggtccctcctcacctgggctc

SEQ ID NO: 139281 - DNA, 74 bp, Homo sapiens
tgggattactgactcataaccagtttcctaccgcatttgaattcaatgagtattttctcattaccattttggac

SEQ ID NO: 139282 - DNA, 83 bp, Homo sapiens
gggagacccaggctgcagcaacaaagggcagcgagcgattggccgggctgcaggcgagctagctgacgtggtggacagtgagg

SEQ ID NO: 139283 - DNA, 75 bp, Homo sapiens
gttatttttagatacttttaaacacccgagcgctgagctgaattcttgccgccaggatggggaaacagaacagca

SEQ ID NO: 139284 - DNA, 100 bp, Homo sapiens
atggtggtcatggagtagaagggagcgatactacaggtcagataccaggcccaggttccatgatgcccgggcagcacatgccaggccgcatgattcccac

SEQ ID NO: 139285 - DNA, 100 bp, Homo sapiens
ctctctgaaatctgacacctgctctcccggcaaggaaacttcgcaggctggggatgccaacagacagatcagcgacctcaaatttaaacttgcaaaatct

SEQ ID NO: 139286 - DNA, 96 bp, Homo sapiens
ttggcctaacgggaagtcgggcaggggtccagggcggtcaccctttccgcccagtctttggatgttgctatcggagctccacaagaagatgacttg

SEQ ID NO: 139287 - DNA, 100 bp, Homo sapiens
cggaactggagccgaggcgcaggtggcgctggctctacgaactcgacggggaccccaagaggaaggaattcctggatgacttgttcagcttcatgcagaa

SEQ ID NO: 139288 - DNA, 95 bp, Homo sapiens
aactgccccttctcgggggtcatgatgggcagcaagatggcgtctgctagtagggtcgttcaggtaatctgtaagtcagatgctccaacagggga

SEQ ID NO: 139289 - DNA, 82 bp, Homo sapiens
tgccacaaacgccgcaccaggtcttgtagcagcgcctcctcgagtctcactgtcgcccaggctgcagtgcagtggtgccatc

SEQ ID NO: 139290 - DNA, 90 bp, Homo sapiens
cacactggtcagttccaaccttcccaggaatcttctgtggccatgttcactccggttttacaggctgagctggagattcagaaagacgcc

SEQ ID NO: 139291 - DNA, 100 bp, Homo sapiens
ttgaaatctaatgaaccgaaactttgggtagctacagcaagctgggtagcaggcagatccaaaggatatcatgaagtttccagggcctttggaaaaccag

SEQ ID NO: 139292 - DNA, 50 bp, Homo sapiens
caaagtgctgggattacagacggcgttttccactgcgccgtggagacagc

SEQ ID NO: 139293 - DNA, 96 bp, Homo sapiens
caagaaaccaacattcccaacagccaccaccaccaccagatgcttgctatggcatcgttcaggtgccaacgggaccctggttctgccggaaatgtg

SEQ ID NO: 139294 - DNA, 88 bp, Homo sapiens
cagccaccctgcccccaagaaggaagtcatcatgggccggcctggaacagagacaagaggagcagcagcggcaccgcccctcaccctg

SEQ ID NO: 139295 - DNA, 100 bp, Homo sapiens
cggatctggaggagcagttgtctgatgaagagaagcacgagtacacgagacaggattgagaaaggagagattcaaattgtgacttcagattcaaaggcaa

SEQ ID NO: 139296 - DNA, 98 bp, Homo sapiens
gccccgcggcctacagcagctcctcgtgcctggcggcgtgggcccgggcgagcagccctgcctccggacggtgtaatggataggtaacagagaagacc

SEQ ID NO: 139297 - DNA, 74 bp, Homo sapiens
ccggctcgacaagttcaagcagctgcttgccggccccaacacggaccttggttctggagatatatcttcagatt

SEQ ID NO: 139298 - DNA, 101 bp, Homo sapiens
ttctcgccataccccgcccaccaggaggggtcctcaggaatcagagatcattgatttcttcctgggggcctctctcaaggatgaggttttgaagattatgc

SEQ ID NO: 139299 - DNA, 82 bp, Homo sapiens
ccgggcgacctgggcaccagcaggacccgaggccaggagccaggggcccagaagggaggaggtacaggagaactgtgtgcgg

SEQ ID NO: 139300 - DNA, 100 bp, Homo sapiens
gctgggcctgtgtgcctggaaaggaattgttttggcctaggatcatccaggctgaacatctttatcttgagagaggaagaggccaagagacatgactatg

SEQ ID NO: 139301 - DNA, 80 bp, Homo sapiens
ctgagctgcgaggaaaatggcggcgggagactccatcaagaatgctggaggaagggtgtttgtccactgccaggcaggca

SEQ ID NO: 139302 - DNA, 100 bp, Homo sapiens
cgagaacgccacccaggctctgggcagagctgccttcgggcaaggaccaagacccctggacctggggcccagtcggccctcagagcccttgcccgctcgg

SEQ ID NO: 139303 - DNA, 100 bp, Homo sapiens
cggaccgcccaaccccaaaagagccaaactcagctcgcccggtttctcggcgaatgacagcacagtgaccacaatatgaatgggaacagcaagatggcaa

SEQ ID NO: 139304 - DNA, 100 bp, Homo sapiens
ccaggacacccctgaagccgagaaatggactttccttatcccagttgattgtgcagaatacactgcctgtcgcttgtcttctattcaccatggcttcttc

SEQ ID NO: 139305 - DNA, 82 bp, Homo sapiens
taatggactgcttggaaatatagcttcttggacacttaatgattgttggcaagaaatgtgctgctgatctgggcctgaataa

SEQ ID NO: 139306 - DNA, 50 bp, Homo sapiens
aggattgtcactccaacctcttttcgctgccttagccccgtgggccccac

SEQ ID NO: 139307 - DNA, 90 bp, Homo sapiens
cctgccaaggattctgcctggccctgggaagagaagcctagatatctggagccggtgaaacctgaagaaggcagagatatggcaaacagg

SEQ ID NO: 139308 - DNA, 95 bp, Homo sapiens
aaggctccccataaacagcctcataagcaggcaggaaaaatactattgtattacaaggctcggaccaaagacatcctgattcgattcactgcttg

SEQ ID NO: 139309 - DNA, 88 bp, Homo sapiens
gaccgtgggagtggggcctttagcctggccctggtatgcgtccaccactaggcttaagagaatttgcaccaggcgttccaccaggaag

SEQ ID NO: 139310 - DNA, 100 bp, Homo sapiens
gaagcggaaacaacgttctcccgcaaaatgggtgattattgaacaaggatgctttgcttattcgatggtgatcgttccactttatgatacccttggaaat

SEQ ID NO: 139311 - DNA, 100 bp, Homo sapiens
caaatattatggatcctatctgaagggtgataaaagaaaatgtggctgaagttacccgaagttcagcttgcagtgtaattcagaagagttaagaccagaa

SEQ ID NO: 139312 - DNA, 83 bp, Homo sapiens
ttgataacaccctgtaacagctgagagtgacagttcatttagattctttgtattcttcttcgtctatatttgtcagtttgctg

SEQ ID NO: 139313 - DNA, 100 bp, Homo sapiens
tttgacaagtgatgagaagctgtcggagcttcccaaggtcagcttttgccaactgttttcaaatcacatgcatgggggatcttacacacactccttgaga

SEQ ID NO: 139314 - DNA, 90 bp, Homo sapiens
cttccacaatggcagctgggtccacctcaccatcaacgctttgtgctgatgaacatggtcaccttgaaaggtgtgttgaatatggcagag

SEQ ID NO: 139315 - DNA, 100 bp, Homo sapiens
tctattacttgttttgtgagaaaatggaaggaaaaggtggcctggccgcggcttaccaaggaggatatcaaggcagctatcaatggtgtaataccacagg

SEQ ID NO: 139316 - DNA, 74 bp, Homo sapiens
gtggggaatttctcctggggctcagagtgtcaagcactgtgactgaagcacccattgctgtagtaacatcacga

SEQ ID NO: 139317 - DNA, 75 bp, Homo sapiens
ctaattgactgcttgtcccagaagcaatttaaggagcagggagtaactattcccagtcagaggcgctatgtgtat

SEQ ID NO: 139318 - DNA, 82 bp, Homo sapiens
tcaacagtttgtggcaagacaagctcagaactgagaagctgtcaccacagcaaaccgtggggaactgtgggtcagagactct

SEQ ID NO: 139319 - DNA, 83 bp, Homo sapiens
agaccgtcctggcgcgatgcgtcaagtacactgaaattcatcctgagatgaggcttgggcactgtttaaaggaaagttccgag

SEQ ID NO: 139320 - DNA, 90 bp, Homo sapiens
tgtgaagctgaatgatggtcacttcatgcctgtcctgggatttggcacctatgcgcctgcagagctgttaggcaattttcttcagtggta

SEQ ID NO: 139321 - DNA, 101 bp, Homo sapiens
aaaattgtaagaagaaatgctactatgatatttggaatcctggcttctaatagttgcaaaagcttctcatttcagagagatgccaggatcctaagtgcctg

SEQ ID NO: 139322 - DNA, 96 bp, Homo sapiens
gagaaggcccagcgcttcctgcagaaggccgagaagctctacccactgccctcggcccgcgggttttgttcctgagtcgatgtttgaccgccttct

SEQ ID NO: 139323 - DNA, 75 bp, Homo sapiens
cgtcctgacagatctccagctattgaagggttgggggccgtcccgctcctaaggcaggaagatggtggccgcaaa

SEQ ID NO: 139324 - DNA, 75 bp, Homo sapiens
cttgctgtcattgattctgaaaaggacatgggtggttctcttcccaaagtggaagccaaattcatcaattatgtg

SEQ ID NO: 139325 - DNA, 83 bp, Homo sapiens
cggagcgggagtgttcgttgtgccagcgactaaaaagaggaactgtggctgcaccatctgtcttcatcttcccgccatctgat

SEQ ID NO: 139326 - DNA, 101 bp, Homo sapiens
gggccatggagaagctgcggcgagtcctgagcggccaggacgacgaggagcagggcctgactgcgcagaacatacatatgatagttgagaaagacacatat

SEQ ID NO: 139327 - DNA, 48 bp, Homo sapiens
ttcgcagccgtgacctgcagctggcggacgtggcccagtggaacatcg

SEQ ID NO: 139328 - DNA, 80 bp, Homo sapiens
ccaagatgtcggagacacggtggaaacgcttatgtacctggagtagaacagaaaaattattatgtctgtgttcccttggg

SEQ ID NO: 139329 - DNA, 100 bp, Homo sapiens
cgtgtttctggaaagtgacagcagggcccagtgttcaccatcataccaggggccagaggcgatggcttgcctccatgagacccgaacaccctctccttcc

SEQ ID NO: 139330 - DNA, 99 bp, Homo sapiens
acgccggccaccttcccgcttccgagctgggtgcgcgccgagcacaggaggccctgggcagtgacggggttcgggtgaccatggagagtgcgctcaccg

SEQ ID NO: 139331 - DNA, 50 bp, Homo sapiens
cctcctcctcctcagtaacgcggcttaattggcttagtgtcgacttcaat

SEQ ID NO: 139332 - DNA, 130 bp, Homo sapiens
gccgccggattccagcccggccggggcctgcgggcgcccagagccgcgccgtccgcgccgcccgttctggtactgtttttcaaccctactctcttgaccaagaatgaaactatttacaaattaagatgcc

SEQ ID NO: 139333 - DNA, 98 bp, Homo sapiens
attcctgggagcacatccatttcattggcaagtttggtgaggattcatcaacctccagtatgatgtctgtgaactttgatgttcaatcaaatcagagt

SEQ ID NO: 139334 - DNA, 98 bp, Homo sapiens
ggtctttcagggcctgagcctggtggccaagactaagcagcagattgaggagcagcgggtgcaggtgcaggtggtggagcgggcccagcaggtggcag

SEQ ID NO: 139335 - DNA, 100 bp, Homo sapiens
cctctaccttaaggatgtgcaggatcttgatggtggcaaggaatctttaatctcatgaagtacgacagctacagccgcttcttaaagtctgacttgtttt

SEQ ID NO: 139336 - DNA, 50 bp, Homo sapiens
aaaaatttcaggattggtactacaagggggaaatttgcagtggtgagaaa

SEQ ID NO: 139337 - DNA, 85 bp, Homo sapiens
tcgatgagatcttgcagcagcacaagctgaagatgacgcaaaatcgaatgaagctaatggccgacaactacgaggatgaccactt

SEQ ID NO: 139338 - DNA, 100 bp, Homo sapiens
tcacatctgtgacttcatccgaaaaacactgaatgctggggcgtactccaaagttgttcaggaacgggaagccctaagtaatctaactgcattgaccagt

SEQ ID NO: 139339 - DNA, 100 bp, Homo sapiens
ctgtggggcaaggtgaacgtggatgaagttggtggtgaggtcccagcttgaagagaaagaaaacaagaagttccctgtgtttaaggccgtgtcattcaag

SEQ ID NO: 139340 - DNA, 75 bp, Homo sapiens
cactgactttcagctatggaatcggctgcctctaagaatcaaacttcactcttgggagaaccaccaaaagaaatt

SEQ ID NO: 139341 - DNA, 100 bp, Homo sapiens
tttaaagacaaaaaacatctggataaattctcttcttatcatgtgaaaactgccttctttcacgcccagaccgagccataattccagaaatggagtggac

SEQ ID NO: 139342 - DNA, 100 bp, Homo sapiens
tagaaggcaactgtgctgatgaattactacaaaactcccatcgcgtcgtggaggagtactttgtggcccccccagtcacagtccagccactgaccgcagc

SEQ ID NO: 139343 - DNA, 100 bp, Homo sapiens
cttgtggcagttgccgaacattcaggagaatttgaaaagattatgcaactttcagaaagctagatcatttgctaaagcagccattgagaaacagaaatca

SEQ ID NO: 139344 - DNA, 90 bp, Homo sapiens
ccaacagacattttgctgctgctacaaatccaagtggtaagaagttcagaagcaagcctcagttggcaaggtacctgggaaatactgttg

SEQ ID NO: 139345 - DNA, 100 bp, Homo sapiens
acctgccttgggatccggagggaggaagctgggacacccgggagtcaggaaatgtacaagcgtgggggacctatcattgccgtgcaggtggagaatgaat

SEQ ID NO: 139346 - DNA, 51 bp, Homo sapiens
aatttctgcattatcacggagtactgtgagacggagtctcactctgttgcc

SEQ ID NO: 139347 - DNA, 113 bp, Homo sapiens
gggcactgctttccactcggctcctgtcgtccgttctctcaggctcccgttcagtatggtttgaagtggtgaacatggatttttctcggcttcacatgtacagtcctccccag

SEQ ID NO: 139348 - DNA, 100 bp, Homo sapiens
cgggcccgctccgacgcggaaggaggcggcgacggcggcggcggggggagaggaagagaaagaagcgtctccagctgaagccaatgcagccctccggctc

SEQ ID NO: 139349 - DNA, 100 bp, Homo sapiens
agccatatctacagtatcagctcaagtggaagagcttgccgtcaaatgtaaatggtcttaaaatggttgatgagccaatggaagagggagaagcagattc

SEQ ID NO: 139350 - DNA, 51 bp, Homo sapiens
cagaaaggaaccagtgtctcccagaagttggaagtccattattgaccatct

SEQ ID NO: 139351 - DNA, 75 bp, Homo sapiens
tctcttccatccccatcttacagatgtattaagaagcctcaggagattgctgcgatgattgacactgagtttgcc

SEQ ID NO: 139352 - DNA, 80 bp, Homo sapiens
gaaggaacttggttccccctccctcagcttccgccccaaaagtgtgttgttggtggctgcaatgccagctttgcttctca

SEQ ID NO: 139353 - DNA, 98 bp, Homo sapiens
catctcctagtattgcatcctacagatgtgctgtaaacatcaaaagaagacggtgggatcaggagatgggggtcctgatgacaacttaattgaaggtg

SEQ ID NO: 139354 - DNA, 50 bp, Homo sapiens
ggaacacctcgccaaagcagagaaatagatgcagcaccgaggcttcctcc

SEQ ID NO: 139355 - DNA, 50 bp, Homo sapiens
tggcgtgcaacatggggcttgagaaaggggcagctgcaatgactctccgc

SEQ ID NO: 139356 - DNA, 80 bp, Homo sapiens
ttggaattgggtaaacctgataataatgatggcttgcttggctcaggaacaacagaagagaataaagaaaatgacctcag

SEQ ID NO: 139357 - DNA, 74 bp, Homo sapiens
ctccacctctccacactcagcctgcagagcccggccaacaatcagaaggaatcgtgtctcctagtgacctggac

SEQ ID NO: 139358 - DNA, 76 bp, Homo sapiens
cgatgaaattccagagcgctactacaaagaatctgaggttgcacagagcattgaggatcaccatcaggaagtgatt

SEQ ID NO: 139359 - DNA, 75 bp, Homo sapiens
cgccaagccaagctcaacctcaaatcagtactgaggggtgactctgttttgagaagtgcaaccagatctctcctg

SEQ ID NO: 139360 - DNA, 100 bp, Homo sapiens
cgtggagtaacaagattcccacctgtaaaaggtttcactccaatcacccaggctggagtgcagtgggatgctctcagttcactgcagcatcaacttcccg

SEQ ID NO: 139361 - DNA, 82 bp, Homo sapiens
agaggcagaaaacggacggaagaaaaggtctggccgtgctttggagaagaggttgttcacaacaggtatccagcaatgagga

SEQ ID NO: 139362 - DNA, 74 bp, Homo sapiens
ggagcctcagttggaagcagccgatccagcctgcggagcctgtggggcagggccgagaactactggtggcgtgg

SEQ ID NO: 139363 - DNA, 100 bp, Homo sapiens
gggggaccttcagcaacctctgggaacacaaccaagcaatcatcaagcacctcctcgtttgtgaagaaatatgggaacctttttagcttggagcttggtg

SEQ ID NO: 139364 - DNA, 83 bp, Homo sapiens
catcgttaaagtctctcttcaccctgccgtcatgtctaagtcagaggcgcctgtgtctggcagagctggtgtgagacgagaca

SEQ ID NO: 139365 - DNA, 83 bp, Homo sapiens
caataaccaggtgcttggcaaaatcgagcgggccattgagacgtctcccacaacctgctccgggcgctggacgttgggctcct

SEQ ID NO: 139366 - DNA, 100 bp, Homo sapiens
cctctgtttggggagacgtccgccaaggtgaatgaaaactttgccattgatttgatagcagagcagcccgtgagcgaggtggagactcgggtgatagcgt

SEQ ID NO: 139367 - DNA, 99 bp, Homo sapiens
cgaggcgacaagaggagctggccctctcccaagaaccgaaggtacttgaagctggtgtgtgtttcctttcagcgtcaagggttccacactgttgggagt

SEQ ID NO: 139368 - DNA, 75 bp, Homo sapiens
agccacaggtggcagtcgggggtggctgtaattggccctgggaggagcggggacactgaggacctctctccaaat

SEQ ID NO: 139369 - DNA, 90 bp, Homo sapiens
ccggcgccggcccagcagctgcagccgcagcctgtggctgtgcagggccccgagccggcccgggtcgagaccaagaggatgctggtggaa

SEQ ID NO: 139370 - DNA, 100 bp, Homo sapiens
cgagagctgcggccacttctcgttttcatctgggccaagatcctcgcagtggacagccccaggatccggttgtggccgtggctgaggatggccgggagaa

SEQ ID NO: 139371 - DNA, 100 bp, Homo sapiens
cgggaaggatcgtccagtggctgaggctggacagagcacaggaatagcgggttttgcagcaattgttgcatatggattatataaactgaagagcagggga

SEQ ID NO: 139372 - DNA, 49 bp, Homo sapiens
ctcaaggagcacaacggacacatcacagatctttgcagattatcctgtg

SEQ ID NO: 139373 - DNA, 100 bp, Homo sapiens
gttgcctatcagaagtcaattcaaaggacctgcccccagagagacagacataaacgtgacccaaaaaagcttcaattttgccaagaagttctccctgccc

SEQ ID NO: 139374 - DNA, 75 bp, Homo sapiens
ccccatttgggacatcaagcctagcatatacgatgaatggattaaagcagataaaatagtaagacctgctgataa

SEQ ID NO: 139375 - DNA, 100 bp, Homo sapiens
cgacaagctgcccatcgaggagacgctggaggacagcccgcagaagttgcatgctccaggcagattccgaaaagctgcgccaggcatggattaaggctgt

SEQ ID NO: 139376 - DNA, 51 bp, Homo sapiens
aggcgcgggagcagtttccagcagataatgttaattcaagactctcgaaga

SEQ ID NO: 139377 - DNA, 82 bp, Homo sapiens
gtcgaaggggtgctggcgagacgggggtgatgcccacccgggcgagaaagggggggccctcagcctcttggccttgaacggg

SEQ ID NO: 139378 - DNA, 100 bp, Homo sapiens
tggagaatgatgtcatcatgcatgctctcactaagcagttggaggctgtgtctggacttcctcgttctgcccatcttcctaacaaggctatggctgataa

SEQ ID NO: 139379 - DNA, 75 bp, Homo sapiens
ccatcaacccgagtgcagtttcgatggaaaatgaaggcaacatttcatttgttgcatttccagtttccaatacca

SEQ ID NO: 139380 - DNA, 98 bp, Homo sapiens
aagatccagcaaatacggtttactccactgtggaaataccgaaaaaggtcaattctttgtgatgatgtcaccacaagaagtactgcagggaggaagcc

SEQ ID NO: 139381 - DNA, 119 bp, Homo sapiens
cttccttcgctaacgcctcccggctctcgtcagcctcccgccggccgtctccttaacaccgaacaccgcatttggctttatgtcccgagttgccctacaagcagagaagatgaatcatc

SEQ ID NO: 139382 - DNA, 83 bp, Homo sapiens
aaagaataccggcctgaaactggttcttgggtgtttaaggcggtctatgcttgcttggtgcttatgctgacagtgatgacgat

SEQ ID NO: 139383 - DNA, 100 bp, Homo sapiens
ttcatcgatcctcttggtttaccaggaaagctgttctataggataacaaagccattgacctttgccgattgtgttggggacgaacttcctttaggatggg

SEQ ID NO: 139384 - DNA, 82 bp, Homo sapiens
ctgggcctccatcagagagccctggcatgctgactaagctccaggtgccaagactggctagaggccctgcactggtacaaca

SEQ ID NO: 139385 - DNA, 74 bp, Homo sapiens
gggcactgacgggcacttgcaccgtgtggacagactctccggttctactttatattcagagcaccaatcaaatt

SEQ ID NO: 139386 - DNA, 75 bp, Homo sapiens
cgtgacctcaagacgtccaacctgctgctgagccacgccggcatcctcaagatgtaaatgtaatggacacgcaag

SEQ ID NO: 139387 - DNA, 100 bp, Homo sapiens
ggcgactgagtactcaacatattgactgtatttgggctgcagcacaggaatttgcaggtgaagacacttctgatttgtttttggaagagagagaaatagc

SEQ ID NO: 139388 - DNA, 100 bp, Homo sapiens
catggatgggcacactgtgggggtgtcctggtgcacccccagtgggtgctcacagctgcccattgcctaaagaaaaccctggaatggcgatttctggcgt

SEQ ID NO: 139389 - DNA, 96 bp, Homo sapiens
gctgctgctgcacgctggaaccatgtgtgggtcggcaccgagactgggatcttgaaaggtgagtgaagatggcagagaggacgtgaccagcactca

SEQ ID NO: 139390 - DNA, 90 bp, Homo sapiens
ggctgaagaagcagttctacaaggcgagccaggcagctgacacacaagagttcaggaccaaactgcacaaagtatttcgtgagatcaccc

SEQ ID NO: 139391 - DNA, 83 bp, Homo sapiens
cagcccacgctcatgatcgacttcctcacccgcgcctgcgacctcggatgccggctccaggagcagcagtggaggtcgggaac

SEQ ID NO: 139392 - DNA, 82 bp, Homo sapiens
caagatccatctgccttctgcataggccaaacaggctccataaaaatacagactcaccagttcctgctttgatgtgacatgt

SEQ ID NO: 139393 - DNA, 82 bp, Homo sapiens
atccttagtacactctggaagtgtgtatttacatagacatttcaacacatcactttactgccaaatctgtcgaaagggagat

SEQ ID NO: 139394 - DNA, 100 bp, Homo sapiens
gcactgagcaccgccaccatggggaaggggatatgaagatcaatgatgcagactgatggttttgatgaagctgggcatttataactagattcattaagga

SEQ ID NO: 139395 - DNA, 100 bp, Homo sapiens
ctcctgagtagttgggactacagggaagtagatcgagattcagatggtcacgtcagctttagagactttgaatatgccctgaactatggacagaaggaag

SEQ ID NO: 139396 - DNA, 83 bp, Homo sapiens
gcgacgtgtgtccaggcgtttgccgccgccaccggcacggccaggccagcatggtggaccacttacttccagtggacgagaac

SEQ ID NO: 139397 - DNA, 75 bp, Homo sapiens
cacgagtgtcacaaagaaccgtgcagataagtctctgctttctatccgtcaagatgataaagtcgtgtgcccgag

SEQ ID NO: 139398 - DNA, 50 bp, Homo sapiens
cctaaactagcagtttagggtgtcagccaggcccagacatgtccgtcctt

SEQ ID NO: 139399 - DNA, 75 bp, Homo sapiens
gaagagtcaactttgatgactatactggtcgaaatgagaaggggcagctgggacatggtgacaccaagagagtag

SEQ ID NO: 139400 - DNA, 100 bp, Homo sapiens
ttgaagatctccaccaagtgaagaaggatgaaaaaagcattgaggttgaggtttgaattttctcggagaaagacaggccggccacgaggaaaacagaaac

SEQ ID NO: 139401 - DNA, 75 bp, Homo sapiens
gtgtgctcaacctacttacagtcacgttactacagatgtgtcttgctgaatcagggctctcttatccctgccatc

SEQ ID NO: 139402 - DNA, 96 bp, Homo sapiens
ctgatggctccgatgaacagcactgcggtcatgtccctgggactcctgtctacagagaaaaagaagatatgtatgacgagattattgagttaaaga

SEQ ID NO: 139403 - DNA, 75 bp, Homo sapiens
ggcagtctgagccagcagcgccccctctagaagtttctgaggaacagagacaaggtttcactttgttgtccagtc

SEQ ID NO: 139404 - DNA, 100 bp, Homo sapiens
ttttccttgacctttaggtgcttttatattcatctcaaaaacaaaattctgaactcaggacttggcaagtggtgtgcagatcctgccttactaaactgtt

SEQ ID NO: 139405 - DNA, 102 bp, Homo sapiens
tttgatgctgaggagctcctggtcgatgaagaggatgatgtttttggtgaaggcgtgcaatggaattgagttttgccctggtaaatgggaataatatccgag

SEQ ID NO: 139406 - DNA, 73 bp, Homo sapiens
agcctcggcccgacgtgcccatcacaggctccagctccagcctctcccttcgggaaaggtggacagtgttcaa

SEQ ID NO: 139407 - DNA, 100 bp, Homo sapiens
ctctcaaactcgtacctttattgtgggggcccaggtgcatacattcagagggccacactggtgtgaatactgtgccaactttatgtggggtctcattgct

SEQ ID NO: 139408 - DNA, 100 bp, Homo sapiens
gttggagttggaatttgtgcaatgtttagccaacccaaattaccttaattgactgatcctttgaaatactccagccatgactaaaagagaagcagaggag

SEQ ID NO: 139409 - DNA, 100 bp, Homo sapiens
cctgcagctgctccccggtgcacccgcaacaggcgttttgcaatgcagatgtagaaaaggcaacagatggctccctgcaaagtgaggattggacgttgaa

SEQ ID NO: 139410 - DNA, 83 bp, Homo sapiens
gtttaaacagccaaaacagttcattcatattcagcgaactgtggctgcaccatctgtcttcatcttcccgccatctgatgagc

SEQ ID NO: 139411 - DNA, 74 bp, Homo sapiens
agcagaggtaccagccgcagcaggaacgcctttttacccaagtcagccggtgtatcagtcagcacctatcatag

SEQ ID NO: 139412 - DNA, 82 bp, Homo sapiens
acttcaaacattcgtctcggaaaccccgcctcttacagtcacgagggtcctaacctgattataaaacaaccagatgagttgc

SEQ ID NO: 139413 - DNA, 100 bp, Homo sapiens
cagagatgctgcagatcaccaagcaagccatgggatcggatttacccataattgagaagaaacttgagaggttttgctgttactgctcagtgtagtcaca

SEQ ID NO: 139414 - DNA, 108 bp, Homo sapiens
cagaaattccatgctcacaaggcagtcctagcagcatgcagtgactatttccggattcagaatggacagtttagaagaacctcagaaaaaagtctttaaggctcgaaa

SEQ ID NO: 139415 - DNA, 98 bp, Homo sapiens
cattagttcagtgcagtgtctgacttgtgacagggcatcctgctatttgaaacaaggaaagttcaagcaagcagaaacactgtacaaagagattctca

SEQ ID NO: 139416 - DNA, 100 bp, Homo sapiens
tcctggtcctgctcggggctctgttcccagtcacccacaaaagctgtatataatgccagacattggaatcatccagattcagaagaactgcctgggccac

SEQ ID NO: 139417 - DNA, 82 bp, Homo sapiens
ctcatggcggccatcggagttcacctgggctgcacctcagcctgtgtggccgtctataagcaagacactaagggcgactacc

SEQ ID NO: 139418 - DNA, 100 bp, Homo sapiens
tgaagatcggccactacattctgggtgacacgctgggggtcggcaccttcggcaaagtgaaggaaattgcctgtgttctacctgtactgatggatggcat

SEQ ID NO: 139419 - DNA, 76 bp, Homo sapiens
agagctgtatgaggaggccgtggacctggccctgcagtattgctgacagacagaacgccttggaggctgagtggag

SEQ ID NO: 139420 - DNA, 100 bp, Homo sapiens
gcagcgggagaacctctacaagtacttctacgccatctccaacatcgaggtcatcggcagattgtaaaccatggctgtgtggatacaagctcagcagctc

SEQ ID NO: 139421 - DNA, 88 bp, Homo sapiens
ttccgtcacaggggctatttgtttggatatcctgaaagatcaatggctgaagacagtgggagcagccgagttcagtccttgctctcca

SEQ ID NO: 139422 - DNA, 75 bp, Homo sapiens
gccgagaagccagtcacgccgggagctggtacacagcctcaggtttgatctgtggatgaaatgaatcatgatttt

SEQ ID NO: 139423 - DNA, 88 bp, Homo sapiens
ccagctgaaccaggtgcgtgagaaggctgccttcaggtggccgggggctccctccagggtccccagccccaccccagccccaaaggag

SEQ ID NO: 139424 - DNA, 100 bp, Homo sapiens
atattagcagagttacttctaaggggtgtccgcaatgttgccagtgtctgtctgcagattggctacccaactgttgcatcagtaccccattctatcatca

SEQ ID NO: 139425 - DNA, 100 bp, Homo sapiens
tgacagatggccgtggattcagatttgaaaaatgtgtgagtgctaaggaagctttggagactgatctttataagcggtttattctggtgttgaatgagaa

SEQ ID NO: 139426 - DNA, 141 bp, Homo sapiens
ctcagaggggagtcatcatgagcgatgttaccattgtgaaagaaggttgggttcagaagagggctttttggagaccacggcatatttcttcatgaaaccaaaacttggagagaaggaggtgtccccaaatgctttcttcag

SEQ ID NO: 139427 - DNA, 100 bp, Homo sapiens
attgggagatccacagctaagacgccgggactccctggaaacctagaaatgaccgagacatgggtgcccggcaccgcgcccgagcccactccattcagat

SEQ ID NO: 139428 - DNA, 83 bp, Homo sapiens
atcctgccgtccttctccactttcgccagcccgtgccgcgagcgcggcctgcaggagggggcaagcgcgatgaagagctggtt

SEQ ID NO: 139429 - DNA, 92 bp, Homo sapiens
gccccgggacctgggctgggaacccgcggtggagcgggacacgaacgtgaattcagaaggagctggcggacatcactttagaccctccacct

SEQ ID NO: 139430 - DNA, 82 bp, Homo sapiens
ccgccgctacggggaagtaatggtatccggccaattgagattcggagttaaaacaggtatcatgatattagctggtttgaca

SEQ ID NO: 139431 - DNA, 90 bp, Homo sapiens
ctcaagttgtctacgctgcgaatgggcaggcgtatgccgtgccctaccagtacccatatgcagggtgcgctggctctggccctgcctgtg

SEQ ID NO: 139432 - DNA, 76 bp, Homo sapiens
cccagctctctctgggcatctggaaaggaattttaaacagctatcaagtaaaatggaatttatgacaattaatgga

SEQ ID NO: 139433 - DNA, 75 bp, Homo sapiens
tgattcacaggtgtttccctctttgaatacttcctgctatatcctgatcatcactattgcaaatattgcaaattt

SEQ ID NO: 139434 - DNA, 98 bp, Homo sapiens
tttctggacgcggatttttggcctcatactctgttatagataaacaagctgcagatctgggacacggccggccaggagcggttccgcaccatcaccca

SEQ ID NO: 139435 - DNA, 100 bp, Homo sapiens
aaggattgtcctctttctacaaaaggtgacttctgggggaacagaaagcatactgatggcctgcaaagcatatcgggatctggcctttgagaaggggatc

SEQ ID NO: 139436 - DNA, 100 bp, Homo sapiens
tggggccagggaaccctggtcaccgtctcctcaggttatcacgctataatagagaatggactcattaatatgggattacagaggaaggaatggttaagaa

SEQ ID NO: 139437 - DNA, 100 bp, Homo sapiens
caaggtggcctaccaggaggccaggggtgtcgccatgaacagtccacaggaagaggttgaactaaagaagttgaaacatttggagaagtctgtggagaag

SEQ ID NO: 139438 - DNA, 82 bp, Homo sapiens
gagaaaaggccaaagagaggtgttctgaacaagttcaaggtatttcatggaaacttggagagagaaaagtgatgaagtgatg

SEQ ID NO: 139439 - DNA, 80 bp, Homo sapiens
ttggagttcgcctcagacgcggtggagccgccggagtctgagaaggcaggttggcgggaccaggagctctgcggtttgtg

SEQ ID NO: 139440 - DNA, 98 bp, Homo sapiens
aggaaagatgaatgggagggctgattttcgagagccgaatgcagaggttccaagaccaattccccatcctgcagctccaccaaagaaaccgcctcgcc

SEQ ID NO: 139441 - DNA, 96 bp, Homo sapiens
tgataaactgaaccctaaaacaattaatccgccttggccaagcatttcccacttggcgaaggactttatagacaaactactgattttggaggctgg

SEQ ID NO: 139442 - DNA, 51 bp, Homo sapiens
ctcagctggaacggcaggcctggggcatgtgtatcgtgtgttgtcaatctc

SEQ ID NO: 139443 - DNA, 102 bp, Homo sapiens
ttcgagtggacaaaatggcgaagatcgccaagactcacgaaggaattgaatgatctggcacgggaccctccagcacagtgttcagcaggtcctgttggagat

SEQ ID NO: 139444 - DNA, 100 bp, Homo sapiens
cccagacagcaaggactcacccaaagacagggaagtggcagaaggaggccttccccgggcggagagcccctctccaggccggatcacctcaacagtcacg

SEQ ID NO: 139445 - DNA, 98 bp, Homo sapiens
gtggaatgatgttccctgcaattaccatctcacctatacgtgcaagaaaggaacaggccgccagatcccacccttggacccccatgaaaatggaaaca

SEQ ID NO: 139446 - DNA, 82 bp, Homo sapiens
gcgcgagcagttcgacaagacccaggtgagaagccctaccactgcaactgggacggctgcggctggaagtttgcgcgctcag

SEQ ID NO: 139447 - DNA, 88 bp, Homo sapiens
cttgttccgtatttaaatcgctgtctccaagtcctttttccaccagctcagatagcacagactttagcagcaccagatgaagacagta

SEQ ID NO: 139448 - DNA, 96 bp, Homo sapiens
acagccacccggagttccttagttgaaaggtgcgccctgctgtgacagtctcggaagggtgctgacctggaccgggagaagaaggctgccgagtgc

SEQ ID NO: 139449 - DNA, 83 bp, Homo sapiens
gccctgatcatcctgctgggcttcgtccagatcgggaagggagtgtggccatctggggccgtgtggtatttgccactcaggag

SEQ ID NO: 139450 - DNA, 74 bp, Homo sapiens
aagcattggtgcacgatgtactggactgggcacttggagtcctgcatgccaaaatcattgcagctataacattg

SEQ ID NO: 139451 - DNA, 98 bp, Homo sapiens
aaaggagccctgaacggtcaaggagccctaaacagccaggaggaagaagaagtcattgtcacagagggtaatctgtaagtcagatgctccaacagggg

SEQ ID NO: 139452 - DNA, 98 bp, Homo sapiens
tgttaagcacaagttcacgaaagcctacaaaagtgtggagaggttccttcaggaggatcaggttgcacagagcattgaggatcaccatcaggaagtga

SEQ ID NO: 139453 - DNA, 100 bp, Homo sapiens
ccggctgcagccccaagacagagcgctactcctggcagtgcgtcaatcagagcgtcctgtgcgactgcttttggcttctggatgccctcctccagtacac

SEQ ID NO: 139454 - DNA, 120 bp, Homo sapiens
gaagcatgggaaggaggccgagccgggatctcaggtcctcgggggcggcggccacgccaaggacggcggggccttttccgaagtggttttagctgaagagaaggcaactggcaagctctt

SEQ ID NO: 139455 - DNA, 95 bp, Homo sapiens
cggcaccagtggcctggacaacagacctctgtttggggagacgtccgccaagggcattatccaagatgttatttttccattgatgtgctatacag

SEQ ID NO: 139456 - DNA, 100 bp, Homo sapiens
atggggaaaatctccccggtgactttcaggaggcaggtggaagtcatcataaagtttctgtttcacccgtcgtccatgttcgaggactctgtgaatctgt

SEQ ID NO: 139457 - DNA, 101 bp, Homo sapiens
aaggtggcaaaggatagcagcagtttgtcccgctggctggaagcctggcagtgacacgattaagcccaacgtggatgacagcaaggaatatttctccaaac

SEQ ID NO: 139458 - DNA, 100 bp, Homo sapiens
tgacacttttgtccatgtcactgatctttctggcaagaatacttttttgatccagatgtgttaactgaaggagagctggccccaaatgatagatgttgtc

SEQ ID NO: 139459 - DNA, 90 bp, Homo sapiens
ctgggcttatgggatacagctggacaagaagattatgacagattacgccccctatcctatccgcaaacaaacagaggaagagttcctaga

SEQ ID NO: 139460 - DNA, 75 bp, Homo sapiens
ggcacagcaaatgctgaggactcagaccagtctctgcaagagttcaagaacatgaagactcgggtgactcagaag

SEQ ID NO: 139461 - DNA, 74 bp, Homo sapiens
ctgttattaaccttactggagtaggaagttttatgcagtcacaggcagctggactacgagaaagccctgttctt

SEQ ID NO: 139462 - DNA, 51 bp, Homo sapiens
ccgccaccctgccctgcccacccgccaggatctcactctgtcacccaggct

SEQ ID NO: 139463 - DNA, 89 bp, Homo sapiens
gaaaatcctgctgtgattgactttgaggctgcagtactttgcacggggcctgcaagtttatatcagacaacttcgcttagctctccagg

SEQ ID NO: 139464 - DNA, 75 bp, Homo sapiens
ggactgcgccgcgtcttcctcaagatctttgtagaatttgatggctgtaactggaagcaacactcctgggtaaaa

SEQ ID NO: 139465 - DNA, 100 bp, Homo sapiens
ttctgaaggataccttgaggttggtgaaggtgaacaggtgaccataactctgccaaatatagaagcctcccatccctggaccgccttatgtggcctcccc

SEQ ID NO: 139466 - DNA, 96 bp, Homo sapiens
ggcaggtgacagtctgcatgtgcagttttcaggacacattcagctaacgtattttagcaggtggagtgaggttgaagattcctgtgacagcgatgc

SEQ ID NO: 139467 - DNA, 50 bp, Homo sapiens
gaacttggctaatgacccaacacctgtggatgaagagccagagtcctctg

SEQ ID NO: 139468 - DNA, 75 bp, Homo sapiens
ccggaagatcgcgatcctgggctaccggtctgtgggagaaggaagccaacatccttttggagccatgaatattgt

SEQ ID NO: 139469 - DNA, 100 bp, Homo sapiens
atctacatccaggcccacatcgacagggacgtcctcattgtcctcgggttgagttccagaataaattctacagcgggaccggtttcaagttcttaccctt

SEQ ID NO: 139470 - DNA, 74 bp, Homo sapiens
agcttcttcttggggaaggtgtgtttcctcgccacaggtggccttctagcaatttctttgtttcttttgaaaaa

SEQ ID NO: 139471 - DNA, 50 bp, Homo sapiens
agctattctgggggcaacagagagtgaagtcaccctgctgagaaatgaag

SEQ ID NO: 139472 - DNA, 83 bp, Homo sapiens
ccagagagttctggccagtgcttgaggctccaggtgtctgtctgctgcaaggagaggaaattttcccactgtaaaaaaccgag

SEQ ID NO: 139473 - DNA, 82 bp, Homo sapiens
ctggaaccctggggactacgacgtccctcaaaccttgcttctaggagataaaaagacatatctgaagagatggattaagaat

SEQ ID NO: 139474 - DNA, 101 bp, Homo sapiens
agatagccatgggaagaaagaaattcaacatggatcccaaaaagatatggctcgtggacagcagaaaattcagtctcagcagaaaaatgccaaaaagcaag

SEQ ID NO: 139475 - DNA, 90 bp, Homo sapiens
caacactggagtcatcaatgccccccagaaggagatctattgggaaactgattataaccactcgggcaccatcgatgcccacgagatgag

SEQ ID NO: 139476 - DNA, 100 bp, Homo sapiens
ctccaaacctgtttctgctggattgcgcaggtctgatgaccctggagctcttggcttccatacgtgtctcagacagtttggaaattttagcattcaggtg

SEQ ID NO: 139477 - DNA, 100 bp, Homo sapiens
ctgtccctagtaattttgatgacaggagttgcttttgtacaggtacttcgtcagtttgtaagacatgagtccgaaacaactaccagtttggttcttgaaa

SEQ ID NO: 139478 - DNA, 100 bp, Homo sapiens
tagatctttcttgaagacttgaattagattacagcgatggggacacagaagatgtgtcttgctgaatcagggctctcttatccctgccatcgacttacag

SEQ ID NO: 139479 - DNA, 80 bp, Homo sapiens
gcctgtaggaaagcggaagcggcctggcaggggaaggatcgagcagcctcccgcgacgatgcccctcaacgttagcttca

SEQ ID NO: 139480 - DNA, 83 bp, Homo sapiens
atgggcatcaccttgatagtggatatgcacccaatgtccagggagcgtgcaaaatttgtcaaaagtggccttttattgtaaaa

SEQ ID NO: 139481 - DNA, 100 bp, Homo sapiens
ctcagatcttaagtagtgatatttctcttttgtctgcccctattgtaagtgcagatggaacacaacagtcactctaggaaagccagctgccatgacataa

SEQ ID NO: 139482 - DNA, 95 bp, Homo sapiens
cgatcagatcgatctaagatggcgactgtcgaaccgcctgtcaggattggagctgctttccgagcacctggaccccaaactcctgtgccgcctga

SEQ ID NO: 139483 - DNA, 75 bp, Homo sapiens
ctgctgcaggaggccaaggacggcgttctggatctcaaagcgagttctatatacccctggccacactgatgatca

SEQ ID NO: 139484 - DNA, 83 bp, Homo sapiens
ctgtgttgattgaggacgttcccttcacggagaaagattttgaggatgcggaaagaaagcggaaagtaaagcagctttttaac

SEQ ID NO: 139485 - DNA, 90 bp, Homo sapiens
gtgaaccggcaaatgctgcaggaactggtgaacgcaggatgcgaccagccaggcccacaactcctctttctgtaggcaccattgtcccac

SEQ ID NO: 139486 - DNA, 98 bp, Homo sapiens
atgaaaacgtcacttttaaaaaataagtaatgccatctgttttcctaaaagactgaaatgggggcgaccattcttagatttgcctgcaatggataacc

SEQ ID NO: 139487 - DNA, 100 bp, Homo sapiens
ataagaaagaaatccttagcaataaagacggaaccacgtatgtcctcctcccctcaccctcagagcctccatccctgtgagatcactgccctgagccaat

SEQ ID NO: 139488 - DNA, 50 bp, Homo sapiens
ccgcggtggagcgggacacgaacgtgctcatgcaccctgtgctggagtcc

SEQ ID NO: 139489 - DNA, 100 bp, Homo sapiens
gtcggcggaagatggcggccggcgaaaggagctggtgcctgtgcaagttgttgagtccagttacaacacagggatcacaacaaacacaaccgccacagaa

SEQ ID NO: 139490 - DNA, 51 bp, Homo sapiens
ctgatgggcgccggcattgcccagcccaagaaagagattccagctagtcct

SEQ ID NO: 139491 - DNA, 82 bp, Homo sapiens
gggaggctcccgggcttgcgtggatagcctgggctggaagctcttctacgtcacaggctgcctgtttgtggctgtgcagaac

SEQ ID NO: 139492 - DNA, 100 bp, Homo sapiens
ggaagagcagtaagggactgagctgctggatatacgccatttctcacagagagatgctctgtctctgcagtttgaaccagtactactacctacttctaca

SEQ ID NO: 139493 - DNA, 108 bp, Homo sapiens
tgaaacggattgccagagaattggcagaagggtcacagtaaatcgatccagtgtctgacggtgcataaaaacggcggcaagtcctacatttactctgggagccacgac

SEQ ID NO: 139494 - DNA, 76 bp, Homo sapiens
ctcagatggagttataaaactgtgaatcagctcccggccgactttaggattcttctggattttaaattttttcttt

SEQ ID NO: 139495 - DNA, 100 bp, Homo sapiens
gaaagagctcaaagatttggtttgaatgtctcttcaatctccagaaaggccaggtcagagcagcccaccatgggatggggagggggtggaggctgcaccc

SEQ ID NO: 139496 - DNA, 106 bp, Homo sapiens
cagaaggatatcgacgtcgtgatccagaagtccagagctgaggactgcctgtttgcagctcaccatggatgatgatatcgccgcgctcgtcgtcgacaacggctcc

SEQ ID NO: 139497 - DNA, 100 bp, Homo sapiens
gacgagaagcctgaaaagtcgcagcgagctggagccgccggaggtgttttattccaaacgtctatgctgctttgttcactgcagctcttgttcctttgac

SEQ ID NO: 139498 - DNA, 90 bp, Homo sapiens
ttataccttattggtgtggacgttgtctaaatttcggtagccatggcacaagaatatagaattacatgaatgacagtcttcgaaccaatg

SEQ ID NO: 139499 - DNA, 83 bp, Homo sapiens
ttattcccttcaattcaagtaacagtacagaacctgctaaggccatcaaacctattgatcggaagtcagtccatcagatttgc

SEQ ID NO: 139500 - DNA, 95 bp, Homo sapiens
aagtaaaattacgaactcactgagctggaagtcattcaacgggaattgaatagctcaaatctaatccaagtgaaaatgaagaaaaggaagcacag

SEQ ID NO: 139501 - DNA, 75 bp, Homo sapiens
aagaagcgtgcggggaccgatgggtcaaaatgcagatcttcgtgaaaacccttaccggcaagaccatcacccttg

SEQ ID NO: 139502 - DNA, 75 bp, Homo sapiens
tacaggaagatgctgagaaactgcggaaagaattgcatgaaggacagtcattttgtttactcattcagccctgtt

SEQ ID NO: 139503 - DNA, 75 bp, Homo sapiens
gaacaaagacttaaggaacagcttggcgctcaacatatttgaatggtggtacttccataagcatggcacatcttt

SEQ ID NO: 139504 - DNA, 90 bp, Homo sapiens
catcctggaagctgggaaatgggtatggacagtggatttgcaggtggagaagatgaaatttataatgtttatgatcaagcctggagaggt

SEQ ID NO: 139505 - DNA, 74 bp, Homo sapiens
caagcagcaagtgcgcggttggggccactgcgaggccgttttagccacccaagatgctaaaacaaaataagacc

SEQ ID NO: 139506 - DNA, 97 bp, Homo sapiens
catggttcagcgctttagcctcaggaggcagctatccaagaaaaaggtagcagcactgcctaaacaagaggttatacaagaagaggaagagataatc

SEQ ID NO: 139507 - DNA, 75 bp, Homo sapiens
gggcatgggcggcaactctttgatgtactactataatgggaaagcggtgttcagattttgcaaatctaaatgtca

SEQ ID NO: 139508 - DNA, 83 bp, Homo sapiens
ttccgagaaaacggctcgagcagcgacaacccgtcctctcccgagtttttcataagccccatgtgccactcccctgatctgca

SEQ ID NO: 139509 - DNA, 83 bp, Homo sapiens
cgaacccgcggcgcaataacgatctggtggctggacccagagctgacctatggctgcgccaagcccttcgtcttcacccaggg

SEQ ID NO: 139510 - DNA, 87 bp, Homo sapiens
agtcacctaaagttaggcggcactccagccccagctcgatgagaacacagacattgctgaaaacctctatcagaaagttagaattct

SEQ ID NO: 139511 - DNA, 50 bp, Homo sapiens
ctggacatgctgccagcagtgaaggtggtgaagtgtctgttagattcgaa

SEQ ID NO: 139512 - DNA, 100 bp, Homo sapiens
ccggggctcaggacagttcccagcgggctccgtttcgtctccagaaccctggacagctcctccagaacctgtctccagagaagattttccacgtcattgt

SEQ ID NO: 139513 - DNA, 74 bp, Homo sapiens
ttaatcctcaatttaagcctgatctaacccctagaaacaggagccaaaaacctgtatatcatctccgtgaaggg

SEQ ID NO: 139514 - DNA, 75 bp, Homo sapiens
ggaggagcgacggaagccagaccccaggagcgtacacagactttactaaaagagtacaaagaaagggataaatcc

SEQ ID NO: 139515 - DNA, 98 bp, Homo sapiens
gcaggatgggatccggctcctccagctaccggcccaaggccatctacctggacatcgatggacgcattcagaaggctcttgtcaggatggtgaagctg

SEQ ID NO: 139516 - DNA, 82 bp, Homo sapiens
aggaggcagccaagctcatggcctgccactgcgtgcctctagccggcccggtccttggactgaaagaatgcaccaggggctc

SEQ ID NO: 139517 - DNA, 83 bp, Homo sapiens
ctctcagctctcggcgcacggcccaggtttggtgcacctcgatttggaggaagtagggcagggcccttatctggaaagaagtt

SEQ ID NO: 139518 - DNA, 50 bp, Homo sapiens
cttcactcttgagaaggggctgataggtgggccatgcacagacacagctc

SEQ ID NO: 139519 - DNA, 96 bp, Homo sapiens
tggagcatctccacccaggaacctcgccatccagaagatcccctaacaacagtgagagagcaatgcgagcagttggagaaatgtgtaaaggcccgg

SEQ ID NO: 139520 - DNA, 98 bp, Homo sapiens
ttttgatgtggatgatgccaaagttttattagtttcaccagtgatcattaaagaatgggcagcttacaaaggaaagtctcctcaaaccccggaactgg

SEQ ID NO: 139521 - DNA, 100 bp, Homo sapiens
ctggactgtgggctggtgtgtggaactggtgcccctgggcgctgggattgctctagcctgtaagtataatggaaaagatgaggtctgcctgactttatat

SEQ ID NO: 139522 - DNA, 75 bp, Homo sapiens
aagaaatggaagcttatacacccaagttaactcaggctacagaagaagtttccaaaaatctggttgccatgaaag

SEQ ID NO: 139523 - DNA, 100 bp, Homo sapiens
ggataagggacccgacactgatagcctggcccaactagagaatctgtgcaaacagctgtatgaaaccacagacacaaccactcgactccaggcagagaaa

SEQ ID NO: 139524 - DNA, 98 bp, Homo sapiens
gcagctgctggccgagcgtcagaagcgcatcgaggagcagaaagagcagaggcggcggctggaggagtgtatcctactcagtacatgtatctgaagat

SEQ ID NO: 139525 - DNA, 51 bp, Homo sapiens
gctgtggccgttacaatggggccaaagtatgtccgtggttcagaccctgta

SEQ ID NO: 139526 - DNA, 48 bp, Homo sapiens
tttctggcctggaggctatccagcagttttgccgaattgacaagcccc

SEQ ID NO: 139527 - DNA, 83 bp, Homo sapiens
gatgggatctttccggatcaatccagatggcagccagtcagtggtggaggaggatgctgaggtgaccaaagcttttgaagaag

SEQ ID NO: 139528 - DNA, 83 bp, Homo sapiens
ccgggaggaaggaacgaggcaaggagctaaagcagcgtgcgttcagccctgggatccaggatgagaagactgataaaagaaga

SEQ ID NO: 139529 - DNA, 90 bp, Homo sapiens
ctgctgcaaagcagtcaatgaccttgggacagtggagattgaatgcaaactggaggtgaaaggtgaatgaaaactttgccattgatttga

SEQ ID NO: 139530 - DNA, 80 bp, Homo sapiens
gatgcgctcctgggctcctaccctgtagatgacggctgccgcatccacgtgccttcaaatctcttgacaaagatggcact

SEQ ID NO: 139531 - DNA, 105 bp, Homo sapiens
gatcaccatccgggagcttggggggtgcatgggccccatctggtccagttactatggaaactgccgttctctcctgaccgcagcaggagggagtccaggagccaa

SEQ ID NO: 139532 - DNA, 75 bp, Homo sapiens
gggatcagaggtccctggagtttctgcttcctccagagccagagtgcctttcaggtggcagtggctgccaatcag

SEQ ID NO: 139533 - DNA, 100 bp, Homo sapiens
cacggtgctggccgccggttgcaagcagatactggtgcctatgtctttggtggacttgggaaagaggttgctagaagcagcaagaaaaggccaagatgat

SEQ ID NO: 139534 - DNA, 100 bp, Homo sapiens
tttcattagcctcagaacgatatgataaagacgatgaagccccctctgatggagatcatcacctccatcctgctgagcgggcggatcgggcccaacatcc

SEQ ID NO: 139535 - DNA, 100 bp, Homo sapiens
ggaccggagcggaaaaccttctgaaggagtgaggattctttggacaccagcctgagagctcacggggtccatgccactaagcatgtgcccgagaagcggc

SEQ ID NO: 139536 - DNA, 83 bp, Homo sapiens
cgctaccggactacatgtcggaggagaagctgcaggagaaagaattaaacaaccaccatgtcgagcaaaaaggcaaagaccaa

SEQ ID NO: 139537 - DNA, 95 bp, Homo sapiens
agtcctcggcaattacgagattctagatgctgcaatttgtcagtaatcaagtgggagagttccctgacttgttttcagaacagctgtgtagctcc

SEQ ID NO: 139538 - DNA, 103 bp, Homo sapiens
caacggccaacttcggcaagatccagatcgggatttacgtggagatcaagcgcagcgatgtgttttagagcactttgctgcaagggaccaccacctgcacgac

SEQ ID NO: 139539 - DNA, 82 bp, Homo sapiens
tcccctgcacagcacagaggggcagccggagagcctgggaaagagacaagaggagcagcagcggcaccgcccctcaccctgg

SEQ ID NO: 139540 - DNA, 50 bp, Homo sapiens
agaagctggaggccggcaaagccaagtatgaatctgatgaacaagaaaag

SEQ ID NO: 139541 - DNA, 100 bp, Homo sapiens
gagatcctgaatttgctgttgaaagatctgggggagataggtggaattattggcaccaatgatgtgaaaactgaacatcatttacagcgagcaatttcag

SEQ ID NO: 139542 - DNA, 100 bp, Homo sapiens
ccagggtgtctggtccacgacctatcctaggcgccatgtctgtgaatttctggtacgtgctggtgatgaatgatgagcacacagagaggcgatatctgct

SEQ ID NO: 139543 - DNA, 100 bp, Homo sapiens
ctctacctttgcacttccttcggagagcatctaagattggagagactttgagaatcactacaagaaaaactccttgtggtgaaggttctaagacgtggga

SEQ ID NO: 139544 - DNA, 100 bp, Homo sapiens
taggctcatggacgagatgggaaggcacagggagaagggataaccctacacccagaccccaggctggcatgactcacatcgtgcgggaagtcgacaggcc

SEQ ID NO: 139545 - DNA, 100 bp, Homo sapiens
gaagaaactttgctacagcctcctttgaccagatccatgactgttggtggttgttgactatatactgccacccttggtgtccttggttcaaagccaaaat

SEQ ID NO: 139546 - DNA, 87 bp, Homo sapiens
tccagctgcgggagcagctgccccgctacctcatgggggagacgcagctgtgcaccacaagattttaggtgatgggcaagtcagaaa

SEQ ID NO: 139547 - DNA, 97 bp, Homo sapiens
ggcctggcacctgctgcacgagtcattgtttggatctgttgctgatgatcagaaacttatgatgtccctttctagagataggagaagagagagatcg

SEQ ID NO: 139548 - DNA, 100 bp, Homo sapiens
atgattttgcagttacctgggatccatggagtcctgctataaggaatccatcaacagcatcaagtccagactaagcaaaagtgggcacatacaaactctg

SEQ ID NO: 139549 - DNA, 90 bp, Homo sapiens
tacggaaccagggccaggcgaggaccaactccacctccgaaggaccatcgagacctgttcttgaatacatcgatctggtctgtggtgatg

SEQ ID NO: 139550 - DNA, 82 bp, Homo sapiens
taataagccgcaactggaagcgtagaggcgagagggcgggcgctttacggcgaactcaggatggagctatgacattgaagag

SEQ ID NO: 139551 - DNA, 75 bp, Homo sapiens
ctgagatccatctgcaccacggtgctgggaggtgttgtagcaggaaatgtggctcatattctggactcaaatcat

SEQ ID NO: 139552 - DNA, 100 bp, Homo sapiens
tccgtgcccctgataaagcagttccctgtaacctgtgagactggaccagacggggtttcaccatctgctgggacgggacaccctctcttcttgatctcac

SEQ ID NO: 139553 - DNA, 87 bp, Homo sapiens
gataagcttcgaatggacagagccatccctgacacccggcatgaccaaaagacaaggcactctctccacagcagccccaacaactag

SEQ ID NO: 139554 - DNA, 83 bp, Homo sapiens
gcctagcggagccgggactggagactcgagttgccgcgtcgggctgggcgcgccgccgggtcccatggagctggaggggcagt

SEQ ID NO: 139555 - DNA, 75 bp, Homo sapiens
ttaaatacttgctttactggaaagacccagaatatgccaagtatctaaagaaaaaacttgctcagcgccttcaag

SEQ ID NO: 139556 - DNA, 100 bp, Homo sapiens
tcttggaaggtgcatctgcagtacaggatatgaagaaattgagggttcttgccatgaatgacaaaggacagatccctgctgatgttgttccagacccagt

SEQ ID NO: 139557 - DNA, 100 bp, Homo sapiens
tccagattccatgttcatagtggctttccagttgtttgacaagagtggaaatggagaggtgacatttgcctctctgatccctcaatttggtctgttttca

SEQ ID NO: 139558 - DNA, 88 bp, Homo sapiens
agctaaggccgcgttggggtgagaccctcacttcatccggttctaagctggtctatgtccatcaccttcttggagaaggagcctttgc

SEQ ID NO: 139559 - DNA, 50 bp, Homo sapiens
tccaagccttatttgattctacagtggatatcactctttatcgcaatggt

SEQ ID NO: 139560 - DNA, 89 bp, Homo sapiens
ggggagtcattaaggattttgtgtaggaatgcttctagtcacaacagacacccttggccatgactttcatgtcttccaaattctgactc

SEQ ID NO: 139561 - DNA, 74 bp, Homo sapiens
tgctgagccagcggagctgcttggagagccagtgtaactccttcaagactggagtgacacacactgcatctgca

SEQ ID NO: 139562 - DNA, 100 bp, Homo sapiens
gttggaaacgatcctttttggatctctgctcctatactttccagtgaccattgtgaggtagatattttgttctaattttccagatgaggaagctgagacc

SEQ ID NO: 139563 - DNA, 100 bp, Homo sapiens
tggaagtgaactctgtagtggatttcttcacggtgccccccgtgtttgtgtctgtgtacttaaacagaagttggcttgggacatggatgaagctggaaac

SEQ ID NO: 139564 - DNA, 82 bp, Homo sapiens
ggcaacctctacaaggccaagttcatctcctccgtcaccagccacatctaccagacctcctgccccccgaggtctgcagtct

SEQ ID NO: 139565 - DNA, 75 bp, Homo sapiens
ctatttctactccacataatctggtgattgatatgcccgagcacaaccctggcaatttgggaggaacaatgagac

SEQ ID NO: 139566 - DNA, 113 bp, Homo sapiens
aaatacgtggttggagagctcatctggaattttgccgatttcatgactaaccagtgtgaaaggtgtagcagtcactcggcctacacccacagcatcgaccttgtgaacccagc

SEQ ID NO: 139567 - DNA, 83 bp, Homo sapiens
aagatattgaaacaaccaccatttcaaattttcacactcagaaacctctgtagaggagcaggatgcaaccgacaggctgtggc

SEQ ID NO: 139568 - DNA, 87 bp, Homo sapiens
gaaaagcaatattatacccagacagtttatgaagaagaaattattcacatgcttgaatactgtggaaattcggttccctcaaaatta

SEQ ID NO: 139569 - DNA, 75 bp, Homo sapiens
gctggaccagctcatgggcacggctcgggacggtgctgatgtatggacagccgtatcgtgttaccttagagcttg

SEQ ID NO: 139570 - DNA, 101 bp, Homo sapiens
tgcccctcggccttccgacgtgggcggtgggccccagccccacagaccagcccagcattcagggaaggtggccatccagaaggaggacttgcagaagtacc

SEQ ID NO: 139571 - DNA, 75 bp, Homo sapiens
gcccgtccccctgccccgttcacaatcaatggctgccatccggaagaaactggtgattgttggtgatggagcctg

SEQ ID NO: 139572 - DNA, 88 bp, Homo sapiens
ttcagaaaagatccaagaccattcttcaagtttgcaaaggtttctaagcatgaattgaggaacagaagaagcagagcagatgatcgga

SEQ ID NO: 139573 - DNA, 97 bp, Homo sapiens
ccctcccggactccagaggaggagccattgaatttagaagggctggtggcccacagggtagcagccacatgaaatgaagatcacctctgcctatcta

SEQ ID NO: 139574 - DNA, 75 bp, Homo sapiens
tgacagtactaacttggcatgccgcaatggacatctccagtcaggaccgcagctgaatgcacagctagaaggttg

SEQ ID NO: 139575 - DNA, 51 bp, Homo sapiens
ggacccttcagaccctcgggctgtgcagagagcagagcaactctccaacac

SEQ ID NO: 139576 - DNA, 50 bp, Homo sapiens
gcagaacccccagaccatcatcttcggaaccaaaaagaagcttcccagag

SEQ ID NO: 139577 - DNA, 75 bp, Homo sapiens
acggggtgacctcatccgtattctgagcaagtctgcgctcctcagaccaccggcaggtgaacagcctgatgcaga

SEQ ID NO: 139578 - DNA, 98 bp, Homo sapiens
ttcaaggcaagaccgaattcagaaggatatcgacgtcgtgatccagaagtccagagctgaggactgcctgtttgcagacccaacatgagtgaagtttc

SEQ ID NO: 139579 - DNA, 100 bp, Homo sapiens
aaagagaggatagaaattgaacagaactatgcgaaacaattgagcaaatggttatgagccttagagtttctgaactccaagtactgttgggctacgccgg

SEQ ID NO: 139580 - DNA, 82 bp, Homo sapiens
acgaggtggataacaaagtgaaaggtgtggacactgccagcggctgcagccgacttggaatgacctgggagacaaatacaac

SEQ ID NO: 139581 - DNA, 100 bp, Homo sapiens
cccagatgcttcagtcaacttctcagagttttctaagaagtgctcagagaggtggaagaaaagccagtgaaggtttgaagagtataaacccaggtgagac

SEQ ID NO: 139582 - DNA, 100 bp, Homo sapiens
gagtggaaccgtaaaagccccaatcttagcaagtgcggggaagagctgggtcgactcaagagtggaatgttggctgtccgtgaaaaccgctacattgtcc

SEQ ID NO: 139583 - DNA, 87 bp, Homo sapiens
gttggaggttatgaaagaccctttgcacaaatcaagtctgtgatcaaaacagggcgactgctaatcagtcacgaggctcccttgaca

SEQ ID NO: 139584 - DNA, 87 bp, Homo sapiens
atgaagtataataccaagaaagccccacttggacaccatgtaaaattgaacctagtataaaccacatcctaagcaccagaaagcctg

SEQ ID NO: 139585 - DNA, 100 bp, Homo sapiens
catggcatcaagtggcatccatcataagaaccttctgataacttaagagagattctccaaaatgtggccagattgcagggagtatcaaatatgagaaagc

SEQ ID NO: 139586 - DNA, 90 bp, Homo sapiens
agtggatccatgccttagaagaaacaattcttcgacatactctccagcttcaatggactgcccctgatggtgattattcataaatcctgg

SEQ ID NO: 139587 - DNA, 97 bp, Homo sapiens
aggggacagcgagtcggaggaggacgaggacttggaaggctttgaaatttctgaaaaccagaagaggcaggctgcaatgactgtgagaaaagtccct

SEQ ID NO: 139588 - DNA, 100 bp, Homo sapiens
gatctttcatcccagcttctgagaaggaatgaacagatacggaagttagaggccagactttctggactgaatttgctcttaaagaaatcatgtcctctgg

SEQ ID NO: 139589 - DNA, 100 bp, Homo sapiens
cagaacaactagaagctttgaaagcttttgtggaagcaagtgggggaccttaggcttgcattgcagcgtacagaacaagcggctgccagaaaggaggatt

SEQ ID NO: 139590 - DNA, 100 bp, Homo sapiens
ggaagctacacaactcctacacagacgtgatgtgcaaccccttctacaacccgggggaccgcatccagtccaggtcaaggccttcttggctgatccatct

SEQ ID NO: 139591 - DNA, 90 bp, Homo sapiens
ctgcatttggagagtcagatgccattttgctcattgctgggatggatatggtgagttttcatgtacattgaccaaatactggaatagagg

SEQ ID NO: 139592 - DNA, 75 bp, Homo sapiens
tgggcgtcatgtctggagctgcagaggaggtggccactggagcagaggtcgacctggccgtctctgtttcccaga

SEQ ID NO: 139593 - DNA, 75 bp, Homo sapiens
gggcgtggcctgaggcttggataagtgggattcagaacttgctttgatgtataatgatgaatctgtgttggaaaa

SEQ ID NO: 139594 - DNA, 83 bp, Homo sapiens
aagtgcatggaggaggaactgttgacaattgaagacagaaaccggcaaaacaagctatcgatcagggaagatctccagttata

SEQ ID NO: 139595 - DNA, 75 bp, Homo sapiens
agagccttctgagaagcgcacacggttagaagagccaatgttttcagttgcaccaagcttagccaccaatgcatc

SEQ ID NO: 139596 - DNA, 100 bp, Homo sapiens
acctacagaaacaaaatgtcaacaaattgatgggtgcactacatcctccaggaggtggtgatgggtgggatggtgttggaaacaaacatgaatgaaatcg

SEQ ID NO: 139597 - DNA, 74 bp, Homo sapiens
ctgtggcgacttcatctggggcgtcgtgcgcaaaggcctgcagtgcgcgctgtggacgaatgtggaacctcgct

SEQ ID NO: 139598 - DNA, 87 bp, Homo sapiens
caggacgaagccggagtgtaggcggcagaggattcgctcccagagcagctgcggccaggtatgctccgtatagtgattgtagctgtt

SEQ ID NO: 139599 - DNA, 134 bp, Homo sapiens
gccgggcagcgccgccaccatgttcctgggcaccggggagccggccttggacacggctaatggaggttggcaggatgctactaccccttcatcagtgacctcccctacagaaggccctggcagtgttcactctg

SEQ ID NO: 139600 - DNA, 100 bp, Homo sapiens
cgattcacctgtccagcatccgaccaccgaggctggagggggagaacacccagatggctattcatatgaaaaggaagcaatggaaaattggatcagcaaa

SEQ ID NO: 139601 - DNA, 96 bp, Homo sapiens
caagaggaagcggaaaccagtggccacagcatctttgtctagccccagtgcagttttctggatatgccgcagaaggatccgtgccagaagcaagcc

SEQ ID NO: 139602 - DNA, 100 bp, Homo sapiens
cgtggttggagagctcatctggaattttgccgatttcatgactaaccagtattagaaatgatatttgccaaatttgatgaagtgcaaagttcaggcggta

SEQ ID NO: 139603 - DNA, 73 bp, Homo sapiens
cgatgcaccgagtccagcccaggaaaatggagagcttcggaaagaacagtcattgcattatggttcggttctt

SEQ ID NO: 139604 - DNA, 82 bp, Homo sapiens
tttccgccctaatggaggtctccagtttcggcggtgcgtctttctacgtgaataggattttgtggctggccagatacactgc

SEQ ID NO: 139605 - DNA, 100 bp, Homo sapiens
aaacaggggtttaaatttaaattgaatacaaaggttactggtgctaccaagaagtcagatggaaaaattgatgtttcgtcgttccaggggtagaggaggc

SEQ ID NO: 139606 - DNA, 75 bp, Homo sapiens
ataatgactttcctccaagagcacattgcctggtaagatgttctcaaaagtctatggtcctgtgttcaccgtgta

SEQ ID NO: 139607 - DNA, 75 bp, Homo sapiens
ccgcgatgtccatacttgccaaaatgggggactggcaggccaaacaccagagcaccctagaaggtttaactaaaa

SEQ ID NO: 139608 - DNA, 97 bp, Homo sapiens
tatgaagccatcgtggacggaggaagctcctgcgctactacagcaagaaccgcccaaccgaggctgtcaggtgctacgagctgctggccctgcacct

SEQ ID NO: 139609 - DNA, 96 bp, Homo sapiens
gtgtggaatgcctggtgtttctttcagttcttggatgccaatctgaggtaaagctccagatggctctggaacttatgaggaaagagttggaggacg

SEQ ID NO: 139610 - DNA, 100 bp, Homo sapiens
ttcaaagtaaaatcagtttaatttcagaaaaggtgaagaacgaggtggagaagctcccccgacagcagcggaaggaaagcatgaagcagaagatggagga

SEQ ID NO: 139611 - DNA, 50 bp, Homo sapiens
ttattggccctccagatacactttatttgcttcagatggtggatttcaaa

SEQ ID NO: 139612 - DNA, 75 bp, Homo sapiens
ctgcattccagccaaattcccagcccatggacacagaggctgatttacagttccgtccccgcacgggaaaagctg

SEQ ID NO: 139613 - DNA, 97 bp, Homo sapiens
gaccctcgaagtgcgcaaacttgacactcaccctgaccgaagacctatttggagactgcttcctgtcaccataaaatcctgaacatttgtcttgaac

SEQ ID NO: 139614 - DNA, 100 bp, Homo sapiens
tggaggggaggattttgaggacacttgtggagagctcgaattccagaatgatgaaattgtatttgagttctgtgaacctgcatttgttgttggtaattgc

SEQ ID NO: 139615 - DNA, 75 bp, Homo sapiens
gccaaggaaaatgcctatgatctggaagccaacctggctgtcctgaagctaagcacctctctccctcgctccgcc

SEQ ID NO: 139616 - DNA, 75 bp, Homo sapiens
cggacccagtggatgtaaaccccttccagtctgcgctcctcagaccaccggcaggtgaacagcctgatgcagacc

SEQ ID NO: 139617 - DNA, 100 bp, Homo sapiens
tccacttaaaacctgaaaacattggaccacacaaagtcttactgggactggtttggctgaaagacaaagaagcaacacattgtaaactttgtgaaaagga

SEQ ID NO: 139618 - DNA, 83 bp, Homo sapiens
ctttgttggtggactactctcagcctactatctgtctggagaagagttgtcactcagcccagtccatcagtttctcagcccag

SEQ ID NO: 139619 - DNA, 99 bp, Homo sapiens
ggagctgccaccacctatggagcgcacgggaggcatcggggactcccgacccccatccttccaaaaactggatgcccaggtgagggccgcggtggagat

SEQ ID NO: 139620 - DNA, 100 bp, Homo sapiens
caaatttcctgcacttcacctggcatgcgaagtccaaggacagtggtgattatcctcttaccatgcctggacctcagtggaaaaaatttcgttcaaactt

SEQ ID NO: 139621 - DNA, 50 bp, Homo sapiens
tccttttcaggacagctgtgatccacgagccagatgaccaagatgctcca

SEQ ID NO: 139622 - DNA, 82 bp, Homo sapiens
cgaagagctgccgtcgctgcagagaccccgctatggctgattttttatcaagcagaaatgcatcgaacaacgagaatcaaga

SEQ ID NO: 139623 - DNA, 75 bp, Homo sapiens
agagcggcctgattgggaagaaactcttagcgcaatggatgtgttttggagatgcagacaaaatatctttgatga

SEQ ID NO: 139624 - DNA, 100 bp, Homo sapiens
gggaacagatgagtgaagcagaggtgggggtgtttgtccagcgactccggggcctgatgaatgacatcggagtgtttctcaggagctatcagaaactatc

SEQ ID NO: 139625 - DNA, 100 bp, Homo sapiens
atggacatgagccccctgaggccccagaactatcttttcggcttgaagtagaaaatgccatgatgagaaaaactattaaaaaacaggatgaccaaattga

SEQ ID NO: 139626 - DNA, 87 bp, Homo sapiens
aaattgttttttctacctgttgacgtgtcaagcactaactgatgctttcattggatttggaggaaatgtgatcaggcaacaagtcaa

SEQ ID NO: 139627 - DNA, 101 bp, Homo sapiens
cgcgcctcgcggcatggcgtcggaggggccgcgggagcccgaaagcgaggaggaggaagccaagaatctggtgagcgaagccatcgcagctggcatcttca

SEQ ID NO: 139628 - DNA, 100 bp, Homo sapiens
tcatgggaaggcccttgggaatctgagatggagcaggcgaaccctttacgtccagatggcgagtccaaaggaggccagttttaccaggaggtgctctggg

SEQ ID NO: 139629 - DNA, 74 bp, Homo sapiens
cctcctcggtcctggacaccatctgcactctgtcagccaggttaatttggagtggcccctggagtcagtttcct

SEQ ID NO: 139630 - DNA, 90 bp, Homo sapiens
cgtcaggcccgatggctcggcttccccagggtgaatcatttgatgtaaaagacttgactccataatctgcatctgtcctaatgctgtcat

SEQ ID NO: 139631 - DNA, 75 bp, Homo sapiens
actatcttctcttcaccagctcttcagatcaatatgatgcagagagaacttgtttatgcaagaggagatggccct

SEQ ID NO: 139632 - DNA, 50 bp, Homo sapiens
cctcagccaccgctccctcttcccacggaactttatattgctgttggaat

SEQ ID NO: 139633 - DNA, 101 bp, Homo sapiens
gtcccagcgccttcccacggagcagcactcttcaccctgcacagccttgttaggactgagcagggggaggaacatttaagctgatggaagtggaagtggaa

SEQ ID NO: 139634 - DNA, 100 bp, Homo sapiens
gatgcccctgaagacaaggacagccctttcgcaaacatgtcttgacggaagacatagtacaccgggaggtgacccctgaccagaaactgctgtcccggcg

SEQ ID NO: 139635 - DNA, 100 bp, Homo sapiens
tttacctgaatcacatcgagccactgaaaattcaggaagatgagaatgtgcctactgctcctgatcctccaagtcaacatttacgtgggcatgggacagg

SEQ ID NO: 139636 - DNA, 100 bp, Homo sapiens
ctggatttgaagtaaacagatgagaattctagattgataggcagcagtttgaagaaacagttcgaactctaaataacctttatgcagaagcagagaagct

SEQ ID NO: 139637 - DNA, 96 bp, Homo sapiens
tcccgtccgttccgatgaaggaagaggttctgaacctgttaagcagattggttaaggccaagcaatggggctggacacaaggtcggtggcccaaaa

SEQ ID NO: 139638 - DNA, 118 bp, Homo sapiens
atgtgccacgccgcccaggagacccctctgctgcaccacttcatgatttgtgacacagactatatccagtacccaaactactgttccttcaaaagccagcagtgtctgatgagaaacc

SEQ ID NO: 139639 - DNA, 75 bp, Homo sapiens
tggaggcacagctgcagtctgacgagagggcacccaccaaggctccggatgtgttccccatcatatcagggtgca

SEQ ID NO: 139640 - DNA, 96 bp, Homo sapiens
tggggctaacaaacttcaccctcaactacctcaggcttctcagatgaccaagatggtgctgcagatggtgctgaggatggagaacccaccaagccc

SEQ ID NO: 139641 - DNA, 83 bp, Homo sapiens
ggcaacttcgctgtggtgaagctggggcggcaccggatcaccaagacggagataacgaaggaggcccaacttcattcaataag

SEQ ID NO: 139642 - DNA, 80 bp, Homo sapiens
aaaatccatcagtgccagcataccaatgaacctctattcaagccaagatcaaggctcgagatcttcgcgggaagaagaag

SEQ ID NO: 139643 - DNA, 100 bp, Homo sapiens
tgctaaggatagtccagctcaaattgtgacatatgatcttctgtcagtcatttgccatcatggaactgcaagtaatttggtgcttccagatgtgagttat

SEQ ID NO: 139644 - DNA, 82 bp, Homo sapiens
gagatgaacccaacctagtgggtgtaatacatcatgaactgcaggaggaagaatacaagcgattgagtgaagcactagcaga

SEQ ID NO: 139645 - DNA, 96 bp, Homo sapiens
agttcgggggccccgggcgcatgaagcagagctgcatcatgcggcagtgcatcgcggttgtgcagcctgactctgaagaagctggtggtcttcaag

SEQ ID NO: 139646 - DNA, 100 bp, Homo sapiens
ttggccggacttttgctaactgcggcgggcgagacgttctcagcttcagacaagcttgactgaaccaatgacattatccaaatcaatatctcttcctcgc

SEQ ID NO: 139647 - DNA, 100 bp, Homo sapiens
aaaaaccgcttgttggacagtgaatctcagtggctggagaatggagctgaagaaggcatcgtcaaatcagctagaagaaccacacctcttttggaatata

SEQ ID NO: 139648 - DNA, 107 bp, Homo sapiens
cccgagtccgcgggaagatggcggcgccgctcatccccctctcccagcaggtcaaaatgcagatcttcgtgaaaacccttaccggcaagaccatcacccttgaggtg

SEQ ID NO: 139649 - DNA, 101 bp, Homo sapiens
gcgtgaaattgttgttcaagataaaaatgcaaatcggaggaggaaattttatatcacacaactgaaaacagattctgagcggtatctgacctcagaggcag

SEQ ID NO: 139650 - DNA, 100 bp, Homo sapiens
aggatcgagtgatccttccacctcagcttcacaagtcatcatcagatttgaaatatttaaagtggatacaaaactatttcagcaatgcagacaattaagt

SEQ ID NO: 139651 - DNA, 96 bp, Homo sapiens
gatattttgacctccttccatgaatcacaaatgttcttaatggcatctagaatggtgccttatgtggatttggaacaccaaggaacctactggtgt

SEQ ID NO: 139652 - DNA, 74 bp, Homo sapiens
gggatctttccggatcaatccagatggcagccagtcagtggtggagggatcatggcccaagttgcaatgtccac

SEQ ID NO: 139653 - DNA, 83 bp, Homo sapiens
ctcattactccaaagggtggtggtggtggaggtccaggagaagagacgagttgtactgctgtcacaggaaatggacgctggat

SEQ ID NO: 139654 - DNA, 82 bp, Homo sapiens
ctcaacttattcccttcaattcaagtaacaggtgaaagtgggagatacattggatcttctcattggagaggataaagaagca

SEQ ID NO: 139655 - DNA, 90 bp, Homo sapiens
taagagatatctgcaatgatgtactggttgggttcaatatacggagagtgccctgtgccaaagccacgagttgatcgtccaagaaaagtt

SEQ ID NO: 139656 - DNA, 75 bp, Homo sapiens
ggaaaacacagatccagagtgttactggcttacaaattggattgaggtggaccaaagaccggcgtgcgatgagag

SEQ ID NO: 139657 - DNA, 98 bp, Homo sapiens
ggaaaatagcctttgccatcactgccattaagggtgacaatgtgttgattaatacctacagtggtgttctcaagatctctgacttcggaacatcaaag

SEQ ID NO: 139658 - DNA, 87 bp, Homo sapiens
tgtgaagatgctgtaaaaagattgaaagctgttctctacttttagagtcgaaaataaatcctaacactgcataccagaaacaacagg

SEQ ID NO: 139659 - DNA, 83 bp, Homo sapiens
actgctcggggaggaggagccacggccggggacagaccattcctcaagaattttgtatccaaggcccaaaagtttgttaccca

SEQ ID NO: 139660 - DNA, 50 bp, Homo sapiens
atccgcatgtgcaagcccccgggtacctaaaacagatccaggacctgccc

SEQ ID NO: 139661 - DNA, 100 bp, Homo sapiens
cggacttcagtggatcttcggatacgaagaacccagctcgatcaagtcatccgccaaagaagcctgtccagtttggaactgttcctctcctgtgcacaga

SEQ ID NO: 139662 - DNA, 75 bp, Homo sapiens
gcaagtacccgtccatcatagtcaactgcgtggaagagaaggcctttgaactggccacaggtgactatttgtttg

SEQ ID NO: 139663 - DNA, 50 bp, Homo sapiens
gtgcagcaggatttcacctccggacaatgcagatcttcgtgaagactctg

SEQ ID NO: 139664 - DNA, 103 bp, Homo sapiens
gacagattcgcagtggtcgcttcttctccttgatgcctgaaaacttcatgcctcctgttcccatcacatcaccaatcatgaacccgttgggtgacccccagtc

SEQ ID NO: 139665 - DNA, 75 bp, Homo sapiens
cagaggtcgtggaggtggccgtggaggcagaggtggcatggggggcctttttatcattgatgataagggtattct

SEQ ID NO: 139666 - DNA, 90 bp, Homo sapiens
cgaggttcgggctggttgttccgttgcgagctgcagctgcgatctctgtggtaggcccaggacagctactaaagcttatccacagtctcc

SEQ ID NO: 139667 - DNA, 100 bp, Homo sapiens
gtgacaagtgtaacaccatcatctgggggctcattcagacctggtacacctgcacagggtttgagaaatactttaagaggagtggaaggaacacaaactg

SEQ ID NO: 139668 - DNA, 71 bp, Homo sapiens
actcacaaatcagcaacacagaatttctgcaagtaattggaagaaatgttggctatttggcgatgagaggt

SEQ ID NO: 139669 - DNA, 82 bp, Homo sapiens
aagtctgggatgtagtagacaaaggttacgggcaggacttgagtggcttcggacagggcttctcagaccccagccagcagcc

SEQ ID NO: 139670 - DNA, 100 bp, Homo sapiens
gcttacgtaccacttaaggacattgtggcaatcatcctgaatgaatttagagccaaactgtccaaggctttggcactcagaattctgcaaatgcagattt

SEQ ID NO: 139671 - DNA, 75 bp, Homo sapiens
gtcatcatgagcgatgttaccattgtgaaagaaggttgggttcagaagaggggcaggcagaagtcctgaaggctg

SEQ ID NO: 139672 - DNA, 128 bp, Homo sapiens
ctaaatatggcagtataaatggagcaacaaggctgactataagaggggaagacagctggaaatgatccctattgttttgtggagtttcatgagcatcgtcatgcagctgcagcattagctgctatgaa

SEQ ID NO: 139673 - DNA, 100 bp, Homo sapiens
cttcgaaggcgacttcaagacgcggcccaaggtgtcccttggcggcgcgagcaggaaggaatcactagatttgatctacttggcgactttggaaggttta

SEQ ID NO: 139674 - DNA, 101 bp, Homo sapiens
cggcggggctggcggtgaaggaagactgcaaagttaccgctgggtggagcagcacctggggccccagttcgtagaacgaattatcctgacaagggacaaga

SEQ ID NO: 139675 - DNA, 100 bp, Homo sapiens
gaaaaagagaaaagaaatgaaccagtattcttaaattgatttcaagtttgaacaaggtgtcatggagaaactccagctgggcccagagattctgcagcgg

SEQ ID NO: 139676 - DNA, 90 bp, Homo sapiens
gcagcggaaaatgatccagtcacaggttcgggaagaataccggaagtgggcctgcctagttgctggggggagcaagtactcagaattcac

SEQ ID NO: 139677 - DNA, 50 bp, Homo sapiens
cagcgcccagagagacaccagaggtgtgatgaatgcagactctgctacca

SEQ ID NO: 139678 - DNA, 100 bp, Homo sapiens
atgagttagtcgcagacatggacaccaaacatttcctgccgctcgggaagtgggaatgtccttggcatcattgtgacgtgtgtggcaaaccttcgacttc

SEQ ID NO: 139679 - DNA, 90 bp, Homo sapiens
gggtccctgaagagggaagacacgcggaaacaggggctgacgtttaccctacgtcctggtgaggtgacggcgctggtgggacccaatggg

SEQ ID NO: 139680 - DNA, 100 bp, Homo sapiens
ctgactgccagaggatggaataggaagacaatgatgggcttaggtcacgagcaaggatttggagccccttgtttaaaatgcaaagaaaaatgtgaaggat

SEQ ID NO: 139681 - DNA, 83 bp, Homo sapiens
gtcttgtccacagctggcaaattcagtgcagatcagatgctgagatgaatcgtcacctgtgtgtttggctttttagacatcca

SEQ ID NO: 139682 - DNA, 99 bp, Homo sapiens
gctgaagagcgacaagccgctggcagccgcggatctcaccgccgctcagggagccttcacgtaaatgggtccagtcatgcctcccagtaagaagccaga

SEQ ID NO: 139683 - DNA, 100 bp, Homo sapiens
gacctctgactgctgctaccttgtttaagaattctatgattgctctagtagacaaccttgcatcaaagggtctaaaattcccaggactccacagctttgc

SEQ ID NO: 139684 - DNA, 100 bp, Homo sapiens
gaaaagcaagagaaaaggtacagatgattttgactttgctggctcatttcaagatgactgtaattgcaaagaagagcttgctgtgatatctgatggcaga

SEQ ID NO: 139685 - DNA, 82 bp, Homo sapiens
gcggatcggctcacgcagcttcaggacgctgtgaattcgacatatctgaagagatggattaagaatgctttggattaaggat

SEQ ID NO: 139686 - DNA, 100 bp, Homo sapiens
gcccgagcggctgctggggacggcggggaccgttctctcctgcgctatggtggaaacctgtccctccaaagtgccatgagtgtacgattcaacagcaacg

SEQ ID NO: 139687 - DNA, 75 bp, Homo sapiens
catgcacgcggatcgagtttgataacgatggtttttctattgggaaagctactgatcggatggatgctttcagga

SEQ ID NO: 139688 - DNA, 75 bp, Homo sapiens
tgtagatattcggccctcggaggacagagggccctcctggacccgggagcggaccctggtggcggtgaagcccga

SEQ ID NO: 139689 - DNA, 75 bp, Homo sapiens
aataaccaggtgcttggcaaaatcgagcgggccattgggctggccctggccttccacgacggcagcgtccacatc

SEQ ID NO: 139690 - DNA, 60 bp, Homo sapiens
ctcccagatatccggcacccaaagttcgagaacttgtcttggacaattgcaaatcaaatg

SEQ ID NO: 139691 - DNA, 74 bp, Homo sapiens
gccgctcaaagccgggagatcgactgtttgagcccggaagcgcagaagctggttggatttggtctagggagtcc

SEQ ID NO: 139692 - DNA, 90 bp, Homo sapiens
cttcgccctttccacctcgcggcagttcgaatttgaaagacatattggctgacctgatacctaaggagcaggccagaattaagactttca

SEQ ID NO: 139693 - DNA, 96 bp, Homo sapiens
ttggttggagatcatgaccaaatatgctgtgggagaagagtgtgacttcgaggttgggacagaagaaaatttggatttcaaagcgattattgatgg

SEQ ID NO: 139694 - DNA, 51 bp, Homo sapiens
ctccctgcttaacgagaaccatagagtctgtagaagaggcgacaccagggc

SEQ ID NO: 139695 - DNA, 152 bp, Homo sapiens
aggggaacaccaccactctcattagtgagaatggtcatgctgccgacaccctgacggccacgaacttccgagtggcagcctacctcccctacgacgcccaacaagcctgtggtacccctggagtgggcattaggggtgatgccaaagccaga

SEQ ID NO: 139696 - DNA, 90 bp, Homo sapiens
gggcgagcgggtgcgtctgccgcagagtcggcacctgaaggacatggagtgtggacaacagtgagtatatgcggaatggagacttcttac

SEQ ID NO: 139697 - DNA, 89 bp, Homo sapiens
agtccttgcagaagtggcccagcattaccaagacacgctgattagagcgaagagagagaaagcccaggcaatggtggcttgctatccgg

SEQ ID NO: 139698 - DNA, 51 bp, Homo sapiens
cgatatatacagagacagtaggtcaccaggagactaaagtccatcaaaaac

SEQ ID NO: 139699 - DNA, 100 bp, Homo sapiens
aatgaaagtcttggtggattttctattgaagatgtccaaaaggaaattaaaagaggcacgaagctgcaagagtgagccatggagctacgtgtggggaaca

SEQ ID NO: 139700 - DNA, 98 bp, Homo sapiens
agctgtcgtgaagaagcaggaggctaagaaagtggtgaatcccctgtttgagaaaaggcctaagaattttggcattgtactaaggctcgtacgtctgc

SEQ ID NO: 139701 - DNA, 50 bp, Homo sapiens
cgtcggggagcaccgagcccaggtctaacataagaccagactatgcagac

SEQ ID NO: 139702 - DNA, 100 bp, Homo sapiens
cacccaccttctcctttcgagaaaggatgactcacaagagtcttgtctacctctggttcctgtgcaggtgcagcggaactgctgcctgacgctctgcaac

SEQ ID NO: 139703 - DNA, 96 bp, Homo sapiens
tcaagtaaaaacaatagctcaaggaaacctttccaacacagatgtccaagctgccaaaccgcgctgagcacgttcttccaagaaaccaacattccc

SEQ ID NO: 139704 - DNA, 75 bp, Homo sapiens
tcctcagtgaggacttcctgcctgagatctgcaacatgatcgcccagaagatctattcggcttagcgactgaaga

SEQ ID NO: 139705 - DNA, 115 bp, Homo sapiens
tcagcgcgacgtcgtgtcgagttcccaaaaagctccgcaggggctgtagggagtgtgcaggatgacagaattcgagtcgaaaggatggataacatttattttgaatacagccatg

SEQ ID NO: 139706 - DNA, 98 bp, Homo sapiens
ctctggactgcagaagaacaaggtggagttggtgccttccagtattatcagttacacaaggtgcagagcattgtagaccaaggagccatggataggag

SEQ ID NO: 139707 - DNA, 82 bp, Homo sapiens
gccgagctcgttggagcttgaacccattgtcacccctccggtgtcgtgaaaactacccctaaaagccaaaatgggaaaggaa

SEQ ID NO: 139708 - DNA, 100 bp, Homo sapiens
gccaaggccacacggcagccacgggggcagccgtcgcagtcgccgtcccacacgggctgcggacaccaagggttgctaaggtgtggcgaaatcttgtttg

SEQ ID NO: 139709 - DNA, 100 bp, Homo sapiens
gcgtgctgtggtcagagtcgctgccagcacaggccagccagaagatgacactgagactacaggtttggaaggcggcgttgccatgccaggtgccgaagat

SEQ ID NO: 139710 - DNA, 82 bp, Homo sapiens
tggtatctttcagagtgtaaagtaatcttggaatataaagccatccaacatattctttacaatggatgatgtggtcaaggtt

SEQ ID NO: 139711 - DNA, 83 bp, Homo sapiens
acgtgccagggtcagatctcgcctccgaggaaggtgagaagccctaccactgcaactgggacggctgcggctggaagtttgcg

SEQ ID NO: 139712 - DNA, 82 bp, Homo sapiens
gaatccccaggataagatcctcttcaccaaggctgaggacaagtctataagaaggagaaagctcgagtcatcactgaggaag

SEQ ID NO: 139713 - DNA, 98 bp, Homo sapiens
cagcctcaggcctgcacggacggtgttggttgggttgtcgccgtgatcctgaaggcgctgacctacgacgagaagcggggtgcctgcagcgtgggcac

SEQ ID NO: 139714 - DNA, 88 bp, Homo sapiens
aaagcaaatggacaaaattgaggagcttcagaaaaacctgttaaatgcaaatttgatacccataatatctgccgaacatctgactagc

SEQ ID NO: 139715 - DNA, 112 bp, Homo sapiens
tcacccaatggtgggcaagtggctggagaaacaagaacagggtgccttcaccagggatggaagaggcaggctgcagcagagagatgcagagttctttcacacgtcgtgactt

SEQ ID NO: 139716 - DNA, 51 bp, Homo sapiens
ctggcagcctttgcttacattagagaacgaggtcactcggacactatggtg

SEQ ID NO: 139717 - DNA, 88 bp, Homo sapiens
gtgaatttaacaaatttacattgtatcctgacacggatcatggagctggaaggcagggtccgcagggcggctgcagagagaggcgccg

SEQ ID NO: 139718 - DNA, 98 bp, Homo sapiens
ccgaattcagaaggatatcgacgtcgtgatccagaagtccagagctgaggactgcctgtttgcaggtaatggagagtgaagagttcatgttgcttcca

SEQ ID NO: 139719 - DNA, 100 bp, Homo sapiens
gtgggctggggactcacggccgggacactcagggcagggtttgccttcccggattgggcctacaagccagagtcgtcccctggctcaaggcagatccagc

SEQ ID NO: 139720 - DNA, 100 bp, Homo sapiens
ggaatttctgcccagatagtgtctgcagctgctttcctcggagacgggtggcatggggagcagctagaacaatgcagattcatccataatccctttctgc

SEQ ID NO: 139721 - DNA, 80 bp, Homo sapiens
cagaagtgagacagctgaagcgtgttggggaaggagctgtaaagagaaaaaagcttgtggtgaaggggggcaaaaaaaag

SEQ ID NO: 139722 - DNA, 98 bp, Homo sapiens
ttctctgccagcttcacacttggccccggcaaactccccatccagctccagggaacaagaggaggatcagatgctgcgggacatgattgagaagctgg

SEQ ID NO: 139723 - DNA, 75 bp, Homo sapiens
tacttcctaaatgtggccactgcccaggcctccccaaagccagtcctgtgtcaccaatcaaaggaaaggaagccg

SEQ ID NO: 139724 - DNA, 51 bp, Homo sapiens
tatgtttccacatcggtcagaaaaagattactatactggcaattgctggag

SEQ ID NO: 139725 - DNA, 100 bp, Homo sapiens
cagcgaaagcatccctgcccttggatggatagctgtgattatgtttgagaccttcaacaccccggccatgtacgtggccatccaggccgtgctgtccctc

SEQ ID NO: 139726 - DNA, 75 bp, Homo sapiens
ttcggtcctgctgttgcggccgctgccccagggctgcggggacggttatcaatactctggctgaccatcatcatc

SEQ ID NO: 139727 - DNA, 87 bp, Homo sapiens
tagtaatcatgacaggaaacatcccaacatggcttactgagctaggaaaaacctggtttcctatcctgggagcaggagagtgtgcct

SEQ ID NO: 139728 - DNA, 100 bp, Homo sapiens
gcctatgtcgttatggtgggaggattgactgctgctggggctgggctcgccagtcttggggacagtgtcagccttcacgagaagtttgaccttctaaagc

SEQ ID NO: 139729 - DNA, 100 bp, Homo sapiens
ctcatccgcacgcacaatatcgggcagaaagataatcacgtgccgcagtgtgtctggagaataaatgtggatatccctgaggaagctaatcagaatcttt

SEQ ID NO: 139730 - DNA, 89 bp, Homo sapiens
ctggctgttgttcttttcttttccatgatatcattatatggacagtttagggacatggatttgattgacatactttggaggcaagatat

SEQ ID NO: 139731 - DNA, 96 bp, Homo sapiens
ccatctcttcctgacagcccctttacaggttacatcattgcagtccaccgaaaaatggagcttcagtttcagcgactcacccgagaactggaagtg

SEQ ID NO: 139732 - DNA, 145 bp, Homo sapiens
atactcaccctgcttgctttgtggctatcatcaaaatcaccaaccaaaagattcacctttggatttcatcgcttaggtgtcatggagaaactccagctgggcccagagattctgcagcgggaaaatccaaggcttatttatgcca

SEQ ID NO: 139733 - DNA, 100 bp, Homo sapiens
cggggtcatcctagggaaaacactatcctctgagatcccagatcatgaggcttctccagggaaagtgaccgaggcagtgaaagaggccattgacgcaggg

SEQ ID NO: 139734 - DNA, 89 bp, Homo sapiens
agcgagattccgtgggcgtaggaccctccgagccaggttgtcttcaataggccgtgtttaagaggcgtcttacactccctgttgccagt

SEQ ID NO: 139735 - DNA, 74 bp, Homo sapiens
tttcaggaccaaaattgtggaaaagtcactctgttttttgtagcatcagatccaacagttaaaacagatcgact

SEQ ID NO: 139736 - DNA, 83 bp, Homo sapiens
cgttgcagtccttcagggccattcagcttctattacttccatacagagcaatatactttgctgcttattcaaactgcaaggaa

SEQ ID NO: 139737 - DNA, 74 bp, Homo sapiens
ctcaccgccacaggctccgatggcggcggccacgctgagggaccccgctcagaacatcagctttccaaaccaga

SEQ ID NO: 139738 - DNA, 87 bp, Homo sapiens
acctaccaatcgtgaaaactatattcacaggcctccccatggccacccatggaccagtcggcattcacttcctcccttctgcggccc

SEQ ID NO: 139739 - DNA, 90 bp, Homo sapiens
cagttgttggggttggtgctgttggcatggcctgtgccatcagtatcttaatgaaggttatcagtgagctgaatggaaaaaacattgaag

SEQ ID NO: 139740 - DNA, 108 bp, Homo sapiens
ggaggccggcagctggcgctggggatccctgctcttcgctctcttcctggctgcgtccctagatgccgctcctacgaggactgctgtggctccaggtgctgtgtgcgg

SEQ ID NO: 139741 - DNA, 100 bp, Homo sapiens
cgacatctcttcttcaaaaatgaccagtgggcttgggaaacgctccgagacaagtttatgtggccgaggcagacaagtggaattaggccttgctgcaggg

SEQ ID NO: 139742 - DNA, 100 bp, Homo sapiens
tcagtatgaccaaaggctcttcaaccaatccaagatcttagatatgtgtgcagcacctggctcaaagaccacacagttaattgaaatgctacatgccgac

SEQ ID NO: 139743 - DNA, 100 bp, Homo sapiens
gatcagatcaagatcctgatgaagaatgctccagcgttctatgagcgccggtcttgtctcccccagctaaattgtgagcgcccccatggcagggacctgg

SEQ ID NO: 139744 - DNA, 50 bp, Homo sapiens
tgaaaaagtgtgacttggcagctgtaagcaagctgtgtgggaagtgcagc

SEQ ID NO: 139745 - DNA, 100 bp, Homo sapiens
cggcccagcagctgcagccgcagcctgtggctgtgcagggccccgagccggcccgggtcgagatatggaatgtgcagatgtcccactattaactccaagc

SEQ ID NO: 139746 - DNA, 82 bp, Homo sapiens
ggctgggtgtgtggttgtgcaggatctgccccttccaaagggccagaatgggaattgaatgatctggcacgggaccctccag

SEQ ID NO: 139747 - DNA, 100 bp, Homo sapiens
gccggatagacctattggatatggagcctttggtgttgtctggaagattcttacctctgaagacaatgttaggaccaagatatgatagtcaagttgctga

SEQ ID NO: 139748 - DNA, 75 bp, Homo sapiens
cttagctcgacggggctgaccgctctggcccagggtggtgcacattcaggttcccgagcacaaacatcaagataa

SEQ ID NO: 139749 - DNA, 83 bp, Homo sapiens
ccgcgtgctaatggtggaaacccacaacggtagttgatgtcacttggcgatattcctgcaaacatgaagaggtgattgccaga

SEQ ID NO: 139750 - DNA, 89 bp, Homo sapiens
agagggaaatgaaagacttgaaggagaagatgaaccaggctgagcggaaggaggagaaaaaggcggctgcccctgctcctgaggaggag

SEQ ID NO: 139751 - DNA, 100 bp, Homo sapiens
ggctacgtggaccccctggatcccagctttgtggctgccgtcatcaccatcaccttcaatccgctctactggaatgtgccctccagaatacccatcatat

SEQ ID NO: 139752 - DNA, 98 bp, Homo sapiens
cgggacccggaggaccgtatccccagcccactgggctacgcagattcttctgatgtagagcgactggaaagattcttcgactcagaagatgaagactt

SEQ ID NO: 139753 - DNA, 100 bp, Homo sapiens
gggtctggagggctgagcagtcaactcaaatgcaagtccaagaggaggaggaggcggaggtccaagcggaaaggttctccagcatttggctcaaggcccc

SEQ ID NO: 139754 - DNA, 100 bp, Homo sapiens
accgacctcgacgtcttgcctgtgtcccacttgttcgcggcctataggttaaacccatccagagtaatggctgcggccttacccaggaccctgggggagt

SEQ ID NO: 139755 - DNA, 80 bp, Homo sapiens
cgacaccgaaaactccaccgtagcccttgccaaagcccctcatatggaaaatttgaaatgcagaggggaaacagtagcaa

SEQ ID NO: 139756 - DNA, 75 bp, Homo sapiens
ctgagctacagagactgaagaggactcaggagcaaatcagtaattctgcgctcctcagaccaccggcaggtgaac

SEQ ID NO: 139757 - DNA, 97 bp, Homo sapiens
aaagggaaagcaccctggatggtagagccagtaagaagacgccgggctcctgggacccagacatggagctgcgggaagaagcctggtctccggggcc

SEQ ID NO: 139758 - DNA, 98 bp, Homo sapiens
atcccagggtggctgaatcacggaatgcaccctggaggagaagaggttctgctggaacaagctggtgtagatgcaagtgaaagctttgaagatgtagg

SEQ ID NO: 139759 - DNA, 75 bp, Homo sapiens
cagcggcggcagcggcgctcgcagcgcccgggagctcaggagggggaattgcactgaagatttgtcccatcgtga

SEQ ID NO: 139760 - DNA, 50 bp, Homo sapiens
aattctgtcttcacaagcagaagtctctgctggatgaaccgaatcctaac

SEQ ID NO: 139761 - DNA, 75 bp, Homo sapiens
gacgccgcccgcggccggaccggtgaaattattttggcccttcatcaattagatcttcttcagaaaactattgtc

SEQ ID NO: 139762 - DNA, 50 bp, Homo sapiens
tgagagagaaatttcttcaagaagcctgcttcagcaaccaggagggattg

SEQ ID NO: 139763 - DNA, 100 bp, Homo sapiens
ccacaagctattgtatgctctggaaattattgaagcactgggaaaacctaatagaagaataaggagggagtctacggatggtaatagctgtaatgtggga

SEQ ID NO: 139764 - DNA, 100 bp, Homo sapiens
aggaggcgcaggagactgaccgcaacggcagggtcagatttaatgtactacaatatgttgtcccagaagtgaaagacctttacaattggcttgaagtaga

SEQ ID NO: 139765 - DNA, 101 bp, Homo sapiens
cttcaagcttaggaccacccaccatgcctatccagcctacaaggagaagatgaaggagctgtcggtgctgtcgctcatctgctcctgcttctacacacagc

SEQ ID NO: 139766 - DNA, 83 bp, Homo sapiens
tgcacagccgcggcggcagcagcagtgagagagctggaagtcgagtgtgctactcaactcaggagatttggagacaaactgaa

SEQ ID NO: 139767 - DNA, 98 bp, Homo sapiens
gactgttggtctcggccctgcggaagataccatgctgtgaagtccaggccacatggaggtgtcctgtgtagatgctccagctgaaatcccaagctaag

SEQ ID NO: 139768 - DNA, 87 bp, Homo sapiens
gtgtgaatccatatcactacgaacgagttgtatcacctggaattgcctctgaagagccaatccattcaggatgggaaaccacgcagg

SEQ ID NO: 139769 - DNA, 101 bp, Homo sapiens
tcgctcggtccaggaccggctctgcgggcgccgccaggcccagaccaagtatctggagtccatctttcaccatcttctcctgagattgtactggaccgtga

SEQ ID NO: 139770 - DNA, 106 bp, Homo sapiens
cttggccgcctgagcccttgagttggtcacttgaaccttgggaatattgagctctgggttcccttcattatcctgtggaagtagcggtagcagttcatccaacacg

SEQ ID NO: 139771 - DNA, 101 bp, Homo sapiens
gggaccctggattttcggacactgagcgccatggccctgcctctgctgccgggcaacagcttcaaccgcaacgaggctgaaagggaaacatcagccgcccg

SEQ ID NO: 139772 - DNA, 100 bp, Homo sapiens
cgcccgccgcagggcgctgacggtcccgcacgtctgccgctgccaccggcgcgcccgaatgagacaccaattattgcggtgatggtggccctgtcctctc

SEQ ID NO: 139773 - DNA, 101 bp, Homo sapiens
atccaaataaattgcaagcattctatccaaatgagttcacatgagactctgaatatagtggaggagaagaagcgggcagaggttgggaaagacgaaagagt

SEQ ID NO: 139774 - DNA, 100 bp, Homo sapiens
ctgtcaaaactttacaagttaattgaagagtcttgtccacagctggcaaattcagtgcagatcagcggaatcccgactgtgcctgggaaggtgaccctgc

SEQ ID NO: 139775 - DNA, 100 bp, Homo sapiens
cctccttgatgaactggcaggcaagctacaaagcctagacctttcagccgctgccgaaatgttcttcctgtccaagatccggtcccacgtggctacttgt

SEQ ID NO: 139776 - DNA, 75 bp, Homo sapiens
tcatctgtcacgccaacgtcatccgctacatcgtgtgcagacaatgcagatcttcgtgaagactctgactggtaa

SEQ ID NO: 139777 - DNA, 101 bp, Homo sapiens
gtccaggaggaacgagtccgagaactggctgaagccgatgaacagcgccgggatccaggtgttggagcgggccggagagaagtagagtgggctgcgaggag

SEQ ID NO: 139778 - DNA, 100 bp, Homo sapiens
cgggtcaccgacctggccgagctgcccagcgagatcctcggggccccagaggccgcggacaccgacctggaggtatgtacaagctgtgaggacaacgcag

SEQ ID NO: 139779 - DNA, 100 bp, Homo sapiens
cagttccgggagctgctggaggctcgcggcgccggctgctctagcgagcagttcgaggaggacagaactgtaccgctctctttttggccagctccaccct

SEQ ID NO: 139780 - DNA, 96 bp, Homo sapiens
tgattcctcctagtgcacaaccaccacgcactcaaacaccacctctgggacaggcattcctgggccctgagaaccctgaagagccctacttggatg

SEQ ID NO: 139781 - DNA, 76 bp, Homo sapiens
cgggaagatttacacagatggaaccagaaaagatacgaggctctaggagagcatatagcactttctacattgtggg

SEQ ID NO: 139782 - DNA, 50 bp, Homo sapiens
taaagcagatcctgggcagaaggggtcttgctcctcagaacaaaccagaa

SEQ ID NO: 139783 - DNA, 100 bp, Homo sapiens
tctttttaatgtggtgtttgcactgaggctgtcggaaaaggtaacagaagatggaactcgaaatcccaatgaaaaacctacccagcaaagaagcatagct

SEQ ID NO: 139784 - DNA, 50 bp, Homo sapiens
gccttggtttcaacactatcggaatggatatgtgatggcgtccagtttgg

SEQ ID NO: 139785 - DNA, 98 bp, Homo sapiens
ctcggagcaggatgaacagacagacacagagaaccttgctcttcatatcagcatggtatgtgaggagcagcgctgtgaggaggaagtcttccccctgg

SEQ ID NO: 139786 - DNA, 83 bp, Homo sapiens
aggaagagaaacttcagcaggcgatagcaatgcacagccaatttcatgctccactatagggacatggatgaacctggaaacca

SEQ ID NO: 139787 - DNA, 75 bp, Homo sapiens
cgacgaggatatcgtgtctggagcagtggagcccaaagacccctggagacatgatcatgagcgtcttgttgttca

SEQ ID NO: 139788 - DNA, 97 bp, Homo sapiens
cttgagagctgggttctattttccctcctcaaactgactttgcagccacggagagaacactcgtgaaactgctcaggccatcaagggtatgcatata

SEQ ID NO: 139789 - DNA, 74 bp, Homo sapiens
tgatgaagaaggtgaagaagcggatgagataataccagaagatttcagcatagcagataaaatacagcaaatcc

SEQ ID NO: 139790 - DNA, 75 bp, Homo sapiens
ccatagcttctcaccctaaggctcatctttgggtgaaaaattgtcgggatcttctgcagtccagctacaacaaac

SEQ ID NO: 139791 - DNA, 82 bp, Homo sapiens
ctctgctgccagtcccctgccccgggcaaagcccatctggtccgccgagcaggtaactaggatttctacctcaaccgcgaga

SEQ ID NO: 139792 - DNA, 101 bp, Homo sapiens
agacatcgcccttaaactacaaagagagactttttgtacttacaaagtccatgctaacctactatgagggtcgagcagagctgcagggaagtcaacatttg

SEQ ID NO: 139793 - DNA, 75 bp, Homo sapiens
tcgcctgcaccccagcagtacatcgtggtcactgtctctgcagtgaaaggactatggatctggttttggaaatgt

SEQ ID NO: 139794 - DNA, 98 bp, Homo sapiens
cgggaactgctgacgcttgatgagaaggacccacggcgtctgttcgaagccattacagcagcagatcatcagactccaccaagagcttgggagacaga

SEQ ID NO: 139795 - DNA, 100 bp, Homo sapiens
ggatcttaaaccctcacgctgcctcttgcacctgtgctgcctgctgcgacgacatgaccttagcaaataagggcgagactgaaaaatcaagtcactcagt

SEQ ID NO: 139796 - DNA, 100 bp, Homo sapiens
aggcaatgagatttaccgcaagggcaccatctccttctttgagattgatggacgtaagaacaagatcgggcccgggacacccagacagatgagattgtcg

SEQ ID NO: 139797 - DNA, 90 bp, Homo sapiens
gagattgaaacccagacagaggggagcacagagaaagagaatgatgaagagaaaggcccggagactgttcctggtacagttcagacagga

SEQ ID NO: 139798 - DNA, 100 bp, Homo sapiens
ttccggacaaggagttccagaatgtcatgacctacctcaccagcatccccaggatcgacccgtacggattcgagcggcctgaggacttcgacgacgccgc

SEQ ID NO: 139799 - DNA, 122 bp, Homo sapiens
gttgcaattaggcattaattaagtattatgaaagttgattatttaagtgaattcggctttcgactctccgactatgtacaaaattggacagctgtacatgatcagcaaacacagccatgaac

SEQ ID NO: 139800 - DNA, 145 bp, Homo sapiens
gctggataaatattccgaggacctgaaggacgcgcaggagaagctggagctcacggagaagaaggcctccgaccttcggaaccaaaaagaagcttcccagagccggggccaggagccccaagcgccctctagcagcaaacacaga

SEQ ID NO: 139801 - DNA, 100 bp, Homo sapiens
acaaaagctgctacttatggaagatacaaaggctccggtgtcggcgggtggcgcggcgcccccggagggggccatatctaacggggtttacgtactgccg

SEQ ID NO: 139802 - DNA, 100 bp, Homo sapiens
atttgtgaaagtcagtttctgaggaatttcatcaggtgtcttctctttagggatggtgaggttggaaaaaggctcctgtaaccctcctccaggatgaacc

SEQ ID NO: 139803 - DNA, 83 bp, Homo sapiens
cttctctgtcagctctttccccgtcagcatcccagccgtgctcacgggaaattcaactactgaggaggttacggcacaaaaat

SEQ ID NO: 139804 - DNA, 90 bp, Homo sapiens
gaggaggaaggagggacttcttggcttctcccagcatagccccaggttagggaaagtttctcctgaagatgtagaatatttcaattgcca

SEQ ID NO: 139805 - DNA, 80 bp, Homo sapiens
tgccttttgcctcccaccgtgattctgaggcctccccaaccatgtgcaattctgagcgggctttggacaccatgaacttt

SEQ ID NO: 139806 - DNA, 98 bp, Homo sapiens
gttgtgttgtgccaatggtggagaagaaaacttcggactgggatggaaaggtgtctgagattaagaagaagatcaagtcgatcctgcctggaaggtcc

SEQ ID NO: 139807 - DNA, 100 bp, Homo sapiens
cgccgccgcagcgcgaacatggacgccgtcaacgccttcaaccaggaggtacaacaaataacactgtgactccaacctcacaacctgtgcgaaagtctac

SEQ ID NO: 139808 - DNA, 88 bp, Homo sapiens
gcggggccatgtgcaggaccctaacgacaggcgcctccggcccatttacggtccagcctttcctgccaaggtggctggctgagcctaa

SEQ ID NO: 139809 - DNA, 82 bp, Homo sapiens
cagggcatcatcaatttcgagcagaagaccctctttcccagctgcccgctcctcagcacccgaagattcgcctgtacaacgc

SEQ ID NO: 139810 - DNA, 75 bp, Homo sapiens
cgttttaatgcagattctggctattccatccattctgattcagaaagtcagatctgccacagcaaaagtggggaa

SEQ ID NO: 139811 - DNA, 89 bp, Homo sapiens
gaagcccaaaggctagggcgggtgcttcgagctaaaaaaggacatggatttgattgacatactttggaggcaagatatagatcttggag

SEQ ID NO: 139812 - DNA, 104 bp, Homo sapiens
actgtcctttcgtggctcactccctttcctctgctgccgctcggtcacgcttgaattaaacaaccaccatgtcgagcaaaaaggcaaagaccaagaccaccaag

SEQ ID NO: 139813 - DNA, 100 bp, Homo sapiens
gccaagaccagcgcgagggccctgggcaaggcccgacaggtatcgagaaccttccctgcgaacttcagaggaacttccagctgatgcgagagctggacca

SEQ ID NO: 139814 - DNA, 100 bp, Homo sapiens
cgagcagtcagctgggggagatgtccctggaagaacacagccagtgtgaatgcaggatcaagcaccccaacattgtagccctggatgacatctatgagag

SEQ ID NO: 139815 - DNA, 75 bp, Homo sapiens
ctcaaagatctcgtacaagatccttctttattccaaatcctttatttgatctggctggaataacgtgtggacact

SEQ ID NO: 139816 - DNA, 100 bp, Homo sapiens
ggttgattgtgtttcccggttaggactcggtgtaggagatccatcgaaccactcgctcagggttctgagatgcagtaaaatcgctggtgtgaaagtagca

SEQ ID NO: 139817 - DNA, 82 bp, Homo sapiens
gggtctacctcctgtggtttttgattcaagtcctgttctacctactgccaattggaaagggacaggctggcctgacatggaa

SEQ ID NO: 139818 - DNA, 100 bp, Homo sapiens
gttcctgtccagccccctcacctcatatctcagccatacagaggcaagtgaggcctatctggttggcctttttgaagacaccaacctgtgtgctatccat

SEQ ID NO: 139819 - DNA, 85 bp, Homo sapiens
aagacggaggcgtcaagcttctgaaagaaagattagagaaattcttccatcgggaaagaccacagcaagattctttcattcgtct

SEQ ID NO: 139820 - DNA, 50 bp, Homo sapiens
cccaggttgacctttctgcgggagcggagcgtgctttggacaccatgaat

SEQ ID NO: 139821 - DNA, 75 bp, Homo sapiens
catggggaagcgggacaatcgggtggcaatgcatgaaccattgcaaacttggcaagatgcaccatacatttttat

SEQ ID NO: 139822 - DNA, 75 bp, Homo sapiens
gtgctgggctggtcccccttggttgggcccgaaggcatcctgcagaacggggctgtggacgacagtgtagccaag

SEQ ID NO: 139823 - DNA, 51 bp, Homo sapiens
ccagctcatgggcacggctcgggacggtaactaggatttctacctcaaccg

SEQ ID NO: 139824 - DNA, 120 bp, Homo sapiens
ggagagcatcgactggaccaagatcgagcccagcgtcaacttcctcaagtcgcccaaagggagtgcatccgccccaacccttttccccctcgtctcctgtgagaattccccgtcggatac

SEQ ID NO: 139825 - DNA, 75 bp, Homo sapiens
cgtcagaggagagctgcgatagttttgactcactagagtcagggaaacaggtgaaaagagatttgaatgcccgga

SEQ ID NO: 139826 - DNA, 74 bp, Homo sapiens
ggacccctgggcagacctcttcagaaatagcagattacttctctaacaggatcaccagtttgctccacaaagca

SEQ ID NO: 139827 - DNA, 75 bp, Homo sapiens
ccttcttcagcaccacctttttggggaagatttacctagctgccagcaagatggaaagttgccttttgttcctcc

SEQ ID NO: 139828 - DNA, 100 bp, Homo sapiens
accacacaggatccctggctgtagcgaacaacaacccaaccattactggaaagaatacccacctcatgtccaaaaagttgaaattaatcctgtaaggtta

SEQ ID NO: 139829 - DNA, 50 bp, Homo sapiens
gtcatctccagatgctagggttatggagactcaccgcactgtgttaaacc

SEQ ID NO: 139830 - DNA, 82 bp, Homo sapiens
cggggctgctggtgggccgcgtcgaagacatggaccagggctacggagtgggcgacagatgcgaaagaaacgagttccagtg

SEQ ID NO: 139831 - DNA, 50 bp, Homo sapiens
cccagatatagccgttggtacaaaggccgccatcaacgtcctcctgagca

SEQ ID NO: 139832 - DNA, 50 bp, Homo sapiens
attcaacataccattaggatcttaccggaacatcatttacagcgagcaat

SEQ ID NO: 139833 - DNA, 98 bp, Homo sapiens
tcttcgcggtagctgggaccgccgttcagatgagcagcaccagcagtaagagggctccgaccacggcaacccagaggctgaagcaggactaccttcgc

SEQ ID NO: 139834 - DNA, 90 bp, Homo sapiens
caattcaagactgtctttcctaccctcttcagtgcccttccttgataagctgtttaaaccagcacaacatgcctttctggcggatatcct

SEQ ID NO: 139835 - DNA, 99 bp, Homo sapiens
gaagggaccccgtttgaggatgcatcccagccatcactcttccacctgctccttagagaagggaagatgagtgagtcgagctcgaagtccagccagccc

SEQ ID NO: 139836 - DNA, 80 bp, Homo sapiens
atttgttaaggattccaagtaactcttatttggtattagaaaactactcggatgctccaatgacaccaaaacagattctg

SEQ ID NO: 139837 - DNA, 100 bp, Homo sapiens
ccaaccacgacggggccgacgagacctcaggtgctggagaatctggtaaaagcaccattgtgaagcagatgaggatcctgcatgttaatgggtttaatgg

SEQ ID NO: 139838 - DNA, 83 bp, Homo sapiens
aaacaaatgctgctgctatgaatatgggtcgaccattccaaaaaaatcgaggacaagaattttgggcagatttgaatgccatg

SEQ ID NO: 139839 - DNA, 74 bp, Homo sapiens
aaccctggtcaccgtctcctcagatccttttatcctgccacaccagcaggttgataaaggagccatcaaatttg

SEQ ID NO: 139840 - DNA, 97 bp, Homo sapiens
tgggaagtttgtctttgaaatcattccaggcatcaagactgaaggtggattgtcacagtctcagtcacctggacagacaggatttctcagctatggc

SEQ ID NO: 139841 - DNA, 73 bp, Homo sapiens
cccctccccgggccacccagcccgcccaactcccagcggagagcaaggagagcacacagctgctacaaatgcc

SEQ ID NO: 139842 - DNA, 99 bp, Homo sapiens
ggcattttggggcagaatacagagatatggaatcagctttgtcacccgaaagaaccgccaagtgtgtgccaacccagagaagaaatgggttcgggagta

SEQ ID NO: 139843 - DNA, 100 bp, Homo sapiens
ctataaacaatccaccaagcttctgggccttgctgagctgctgagggttgcaggagctgagaagaagcctggaacttagtgtaaatctacaaaggaaaca

SEQ ID NO: 139844 - DNA, 75 bp, Homo sapiens
cagccagtactctatatgaacaatccgtctggatcacggatgtaggaagtgagcgacaccacaggcaagctgggc

SEQ ID NO: 139845 - DNA, 50 bp, Homo sapiens
gttcctattgatggtccccccataaagtcggtgacctttgaggacgtggc

SEQ ID NO: 139846 - DNA, 80 bp, Homo sapiens
gcacccaggcgactgcctcatcttcaagggatttcagtcataatcggttgtctaactggaacatcagcttggaatcacaa

SEQ ID NO: 139847 - DNA, 90 bp, Homo sapiens
tggtgatgcaagaagtttctaggaaaggccggacaccagatgtggacgagtgccaccgcgtgccgccgccgtgtgacctcgggcgctgcg

SEQ ID NO: 139848 - DNA, 100 bp, Homo sapiens
gttccatcatgttttccaggctgatctcaaactcccacggtcaagcgatctgctggcctcggcctctcaagattgaaacccacaagctgaccttccgcga

SEQ ID NO: 139849 - DNA, 100 bp, Homo sapiens
ctgccggagctttgcagttgcaatctgcattttagaaataagcatcctcacagcacagtacacgaccagctgtgtgttctcatttcacccaaaacctttg

SEQ ID NO: 139850 - DNA, 100 bp, Homo sapiens
caggattttgcaaggaaacacttcgtattactattgcagatgtatgagaactttgtggaggaggtggatgctgtggacaatgggatctcccagtgggcag

SEQ ID NO: 139851 - DNA, 101 bp, Homo sapiens
cttcagcaagctgaaggaggaccagatcaagaaggaaagaccacagcaagattctttcattcgtctcctcctagcctgggggaccaggctcgaactgaccc

SEQ ID NO: 139852 - DNA, 75 bp, Homo sapiens
cttgggtcctccgagagcagcagcggatgttttagaagaatgtatgtctcttcccaagctatcttcttattctgg

SEQ ID NO: 139853 - DNA, 100 bp, Homo sapiens
ctaagatgccaggacatcctggaagctgggaaaaggggaacgcccttttgcttgtgactggcagggctgcgacaagaagttcgcccgctccgacgagctg

SEQ ID NO: 139854 - DNA, 100 bp, Homo sapiens
gagcgtgaccgagagcgcgaatatcgtcatcgttagaagggaggagatatcaccaaacatgatggaacaggcggacagtccatttatggagacaaatttg

SEQ ID NO: 139855 - DNA, 75 bp, Homo sapiens
gaaatctttgggatgctcaatgatatggtccggcttgctttcacagatgtttcgataaaaaattttgaagagttt

SEQ ID NO: 139856 - DNA, 95 bp, Homo sapiens
gaccacagtggatgccacagcgggcccgaagcggatcagccttgtggggcagaatccagagaccacatttgaagtatatgttgaagtggcctatc

SEQ ID NO: 139857 - DNA, 100 bp, Homo sapiens
gtgtttggtgcagcacctttggagaatgtgggaactctaatgatccaggacaaagaagttaccctggagtatgtatcaagcctggatttttggtactgca

SEQ ID NO: 139858 - DNA, 90 bp, Homo sapiens
aacgagctggaggccctggagtccatctaccctgactccttcacagataccatgtttgtgtggaagtgccccgtgtttgctatgccgatg

SEQ ID NO: 139859 - DNA, 100 bp, Homo sapiens
caccaagtggcgaaggagccggctccaaggttacttcttgctgcagattctgcgcaggatcggagctgtgggccaggctgtgtccaggacggcgtggtcg

SEQ ID NO: 139860 - DNA, 96 bp, Homo sapiens
cgaatatcgtcatcgttagaaggccatccggctgtccttagagcaagccctgcctcctgagccaaaggaagaaaatgctgagcctgtgagcaaact

SEQ ID NO: 139861 - DNA, 100 bp, Homo sapiens
cccagaggggagctccgagggcagggcctgacacatttagggaagggcacccttaccctctgcccctaccacagcgaccggcagcttatgagccaggtgg

SEQ ID NO: 139862 - DNA, 100 bp, Homo sapiens
ctacaacaagaaaaccaaggactctacttttgacctccctgcagactccattgccccatttcatccctctccaagatcctggatgtggccagtttggagg

SEQ ID NO: 139863 - DNA, 75 bp, Homo sapiens
ccgaggtgccaccgtggaaggacagaatgagacgagttgtactgctgtcacaggaaatggacgctggattacaag

SEQ ID NO: 139864 - DNA, 82 bp, Homo sapiens
cccgggcggcgtcggcgactcgggccccggagaggtcaaaatgcagatcttcgtgaaaacccttaccggcaagaccatcacc

SEQ ID NO: 139865 - DNA, 97 bp, Homo sapiens
agcagagctgggggggcggtggccggcaccgcagttttcaaatggaacattttgatgcatcacttagtacctatttcaaggcattgctaggccctcg

SEQ ID NO: 139866 - DNA, 75 bp, Homo sapiens
ggtggaggtgtccgtgtcctgcaggggccacatcagccagcagcctcctccaaggcctcagcttcagcttgcagg

SEQ ID NO: 139867 - DNA, 100 bp, Homo sapiens
tcccgccagactacggcttccccgaacgcaaggagcgcggccgccatggcatcagatgaaggcaaactttttgttggagggctgagttttgacaccaatg

SEQ ID NO: 139868 - DNA, 98 bp, Homo sapiens
aaagttccgtctggtatatttgatgtcaacagcaggaaaagtagcactgagatctggttggagttggagggtgagagaaaatgaattctaatttacct

SEQ ID NO: 139869 - DNA, 75 bp, Homo sapiens
cgctgctgtacttcgtctatgtggcgcccggcatagaaatgagccgtcagactgctacagcattacctaccggta

SEQ ID NO: 139870 - DNA, 100 bp, Homo sapiens
ctccacttgcccgcttccacccggaaagccccccaggctgagtgcggcatgatctccatcaccgaatggcagattcacacaaaagatgttggacaatttc

SEQ ID NO: 139871 - DNA, 83 bp, Homo sapiens
atgtcagagaacccctccgtctatgtgcctggtgtccctggccagtgtccttccacctgtccacaagcatggggaacatcttc

SEQ ID NO: 139872 - DNA, 97 bp, Homo sapiens
aagccggctcgggccccgcccggcagtcgcccgttgccatggaaactgcatccacaggtgtcatggagaaactccagctgggcccagagattctgca

SEQ ID NO: 139873 - DNA, 101 bp, Homo sapiens
ggcttccagtggaggcattttggggcagaatacagagatatggaatcagtgtcttctgggactctcctactcattgcttgcctgtgcattgtggccaatgg

SEQ ID NO: 139874 - DNA, 50 bp, Homo sapiens
atgagttgttcaccttaacccattacggttctcagatactttacgaattc

SEQ ID NO: 139875 - DNA, 90 bp, Homo sapiens
cacctcggggacattattgcgcgtggaacggctgcttttggaagatgcggtggtgctagaatttgttatattttccatgagacttttggg

SEQ ID NO: 139876 - DNA, 100 bp, Homo sapiens
aagtcttctgaactttttgagagtccagtatatttggaggaagctgcagatgtactttgtattttacaagcaggcacgtgccttaacacctcaaactgca

SEQ ID NO: 139877 - DNA, 50 bp, Homo sapiens
ggaaactgtacattgaagcagaggccctgggaggagcggggacactgagg

SEQ ID NO: 139878 - DNA, 75 bp, Homo sapiens
ggaagaccaaagaggatgagaaggacgacaagcccatccgagaatgacagggagagagtttttctctcgtttccc

SEQ ID NO: 139879 - DNA, 99 bp, Homo sapiens
accaactccctcttcaagcatgacccggctgcctgggaggctgcccagagcaagagaggcatcctcaccctgaagtaccccatcgagcacggcatcgtc

SEQ ID NO: 139880 - DNA, 97 bp, Homo sapiens
ggtgcttccagcaggaatgagtgctaaaatgctgggaggtgtctttaaaattgactggatttgcaggcaagaaaactgatcagtgattttgccatta

SEQ ID NO: 139881 - DNA, 75 bp, Homo sapiens
ggcggcggcgcgcagcgtgtcaggcggagagacccgccgccagatggaacagattaaaagggccaataaactgtt

SEQ ID NO: 139882 - DNA, 60 bp, Homo sapiens
agttgttcaccttaacccattacggactccctggaggaaaagcggaagcggcagcggtct

SEQ ID NO: 139883 - DNA, 82 bp, Homo sapiens
gagaccgcggccgggaccgagggctccctggggaagggaatgcagggttgctggggctgggcccagaagcagcagcaccagg

SEQ ID NO: 139884 - DNA, 74 bp, Homo sapiens
caggactccccgcacagtctgaccgacttgcgaatcaccagggtgcccttgctcgtgtgaatgaacagaggcca

SEQ ID NO: 139885 - DNA, 74 bp, Homo sapiens
ctgtgtgagcagaggggagagcggccgccgccgctgccgcttccaccacagaactacatcaagatcgttcttct

SEQ ID NO: 139886 - DNA, 82 bp, Homo sapiens
tgggagctgcctctgaggaacacgccgcagggcaaatccagacagaacctttgacttggtgttgaaagtgaaatgtcatgcc

SEQ ID NO: 139887 - DNA, 75 bp, Homo sapiens
tttcgatctccgccctggggtcattgtcagattcatgatgttgctatcaaaagttgagaaattgtcagaagaaat

SEQ ID NO: 139888 - DNA, 74 bp, Homo sapiens
tgccaatttacgtgtcattatggaactacttatgaggatgatcataaacttagccttgatgaacttcatcgtaa

SEQ ID NO: 139889 - DNA, 75 bp, Homo sapiens
caaggtggcctaccaggaggccaggggtgtcgccatgaaatgcgtgtactgccggaagcggatgaagaaggtgtc

SEQ ID NO: 139890 - DNA, 75 bp, Homo sapiens
gccgtccgccaggaagactccctgcctcctgagtcccagagtgggaatagctttgcgaaaaatgggcgcaatggc

SEQ ID NO: 139891 - DNA, 100 bp, Homo sapiens
caaacagcgttacttaggcaaaggtgtccttaagtttgctcgcttggtcaagtcctacgaagcccaggatcctgagatcgccagcctgtcaggcaagctg

SEQ ID NO: 139892 - DNA, 75 bp, Homo sapiens
ctgctcaacttcaagaagggatggatgtcgatcttggacgagcctggagaggatgtgtgcccctgtgatggtgga

SEQ ID NO: 139893 - DNA, 100 bp, Homo sapiens
gaaaggagctgcttcccaataaggaaacagcctggttgcagtatgcctgaaatttgggatgtagaagatcctgccaatgctgggaaaactcccttatgta

SEQ ID NO: 139894 - DNA, 100 bp, Homo sapiens
atgaaggttgatttcatcagactaaaaagttacaggccagagactgctgctactttgaaacgtacgatagaggccctgatggacagaggagcaatagtga

SEQ ID NO: 139895 - DNA, 82 bp, Homo sapiens
tcggatcatggggttgcccagggggccggagggccagggtctcccggagccatccagtccaatggatcagatgggcaagatg

SEQ ID NO: 139896 - DNA, 99 bp, Homo sapiens
caaccccaaggaggacgagggccggttgccgggcgcgggcgagaaagggctgacagtgagtgacgtggacatcttcgagatcaatgaggcctttgcaag

SEQ ID NO: 139897 - DNA, 74 bp, Homo sapiens
tcggaagagcgctcccaggagaaacaaatcatatctgaagatattagtgagctacaaaagaatcaaactacatc

SEQ ID NO: 139898 - DNA, 96 bp, Homo sapiens
gagcgccccgccatcgtcccggttattgcagccgaaggagaaatgaatgcatccagggctctgaaagaagcctccatggtcatcactgaatctcct

SEQ ID NO: 139899 - DNA, 96 bp, Homo sapiens
agagaggcggcggcgacaccatgtcatctcccagtccgggcaagaggcggatggacacggacgtggtcaagcttaatagctcttcaagtctgcaat

SEQ ID NO: 139900 - DNA, 100 bp, Homo sapiens
ctgacactgtgccgcgagtgtttgtggtggcagctgggactgttgaggtgtgaacgtggaccctgagctgctctggacgtccccaagttcgtccccaaag

SEQ ID NO: 139901 - DNA, 96 bp, Homo sapiens
agaggcctacatcccacagagatacccagacaacaggatcgtctcgtccaagattgcaaatagaagagtcttccaaaccagtgaggctatcacaac

SEQ ID NO: 139902 - DNA, 50 bp, Homo sapiens
aacaatgggacccatgggttggaagatgagaatgtgcctactgctcctga

SEQ ID NO: 139903 - DNA, 101 bp, Homo sapiens
tgacccctttgacctcttcgatgtgcgagactttggaaagcagtggtctcggaaagagggtcgtggtcccgcacggatgcgcttgttgggagaaaccttgg

SEQ ID NO: 139904 - DNA, 82 bp, Homo sapiens
ttagccaccaaagacatgaggaaatcacagggtttctctggaaacccccctggtaagtgtggaggaggcgggacactctgac

SEQ ID NO: 139905 - DNA, 76 bp, Homo sapiens
gaccccagacaccggagactgggaaatggtacaccaggggttggaaaaaccacactaggcaaagaacttgcgtcaa

SEQ ID NO: 139906 - DNA, 75 bp, Homo sapiens
gcaatcaggggacaatgtagtaaaggtttccactgtatccaaaaggaggggagaagttgcagtttgattatggtg

SEQ ID NO: 139907 - DNA, 102 bp, Homo sapiens
ccacctgcatgcggcgcagctccatccaaagcaccttcagcatcaacccaggagcgtcgctggattttctctgagacaagcccacccgtccagcaaaataga

SEQ ID NO: 139908 - DNA, 60 bp, Homo sapiens
gaccactttagaaactcaattaagaataggaaaattgtccacggctgatggtaaagcctt

SEQ ID NO: 139909 - DNA, 82 bp, Homo sapiens
caccaccgccttcaaagacaggagcgtcccggtgcggctgcacgtctcgcggatcatgcttgtcagctgctgctggaagtgg

SEQ ID NO: 139910 - DNA, 100 bp, Homo sapiens
ggggacgggggcgagagtgaacgattcaacccgggggagctcaggctgaccggttccctgatgtgttacctgcttctgctactgatccaaactgcagaac

SEQ ID NO: 139911 - DNA, 100 bp, Homo sapiens
ctattacctggaggtcaatcaacttgagaggccggtttaccatgagaactgtgactgtcctctgcaagatagtgcagcctggctacgggagatgaactgc

SEQ ID NO: 139912 - DNA, 75 bp, Homo sapiens
gtgcaacatggggcttgagaaaggtggacgtgactctggacccagacacggcctaccccagcctgatcctctctg

SEQ ID NO: 139913 - DNA, 83 bp, Homo sapiens
taaggacaaaagccaagaggaggacagttcgctacacagcaatgcatcgaggaggaaagccgagaaggagtcagaaaacacag

SEQ ID NO: 139914 - DNA, 100 bp, Homo sapiens
gctcaagcggtcttcacacctcagcctccccagtagctgatcctacaggtcatactccctgtcacaaactccagctgaactaacttggaggaggatcttc

SEQ ID NO: 139915 - DNA, 80 bp, Homo sapiens
tcacagagccgcccatgcacttcggtcacgaaaactggacaaagatgactgtcttaggtcattgacgagatttgccgcag

SEQ ID NO: 139916 - DNA, 100 bp, Homo sapiens
ctggtgtgcatcagcatcccccctccactcacccggcagatatccgtgaaggctctaggagacctgtcttctggttacctggatgatactaagcaggaaa

SEQ ID NO: 139917 - DNA, 75 bp, Homo sapiens
gcagataaactggactgtcctctacagaaggaagcacaaaaagggacagtcgatatggctcgtggacagcagaaa

SEQ ID NO: 139918 - DNA, 100 bp, Homo sapiens
cacgactcctgaagacacacctgcccctggctctgctcccccagactctgttggatcagaaggtcaaggcttcatcaccatgacgccccagctcttcatc

SEQ ID NO: 139919 - DNA, 74 bp, Homo sapiens
ccggcagagccgccgagacgccgaagagcccgccgcccgcgcgagagtttatgtggccgaggcagacaagtgga

SEQ ID NO: 139920 - DNA, 100 bp, Homo sapiens
tttgtcctggaaggaaaaagatctaaagtcacccggcggccaaaggccagtgactaccaacgtttggaccagaaggttagcatggcctcattgaaagaac

SEQ ID NO: 139921 - DNA, 98 bp, Homo sapiens
ggatgccatcagctttgtggaccagagatctgtggtccaggccactccacaagcgcccaaacccggcccggtgcagccgctgaccgtgcagggcctcc

SEQ ID NO: 139922 - DNA, 80 bp, Homo sapiens
caggaatagattctcttgaccatgtgacatctgatgctgtggaacttgcaaatcgaaggaactgtggctgcaccatctgt

SEQ ID NO: 139923 - DNA, 83 bp, Homo sapiens
ctggactccaacaacaacacagatgatatcatcaagttgaatcgaaaggaagggaagaagcagaattttccaagactaaatag

SEQ ID NO: 139924 - DNA, 82 bp, Homo sapiens
ccctctttgcaacatttcaggaaaacagagaaagaagtgataggagggctctgtaggagggtgtgaagacagagaatgacca

SEQ ID NO: 139925 - DNA, 90 bp, Homo sapiens
gacaacaggaggcgctcccgctccaaaactggacttgaagccatcatggagacatatgcattctggagacctcctgtgcgcacactcacc

SEQ ID NO: 139926 - DNA, 75 bp, Homo sapiens
gtttgctctgagcactatgactagctctgtccagattaatgatgttttgcagcagttttctacgtctgaaatttt

SEQ ID NO: 139927 - DNA, 76 bp, Homo sapiens
gcttgcaacttttgttaccaaaggaatcaggaaaacggacgatgtattactaagctggaaaacatggggtttcgag

SEQ ID NO: 139928 - DNA, 134 bp, Homo sapiens
agaggattggaggtgtcagtgttaaaggaacctctacaacgaaggtgaagccacggaagataagatcgagcctgcgtgctgccgaagcagggcgccgagtccatgcgaactgccatctgatccgctcttatcaa

SEQ ID NO: 139929 - DNA, 83 bp, Homo sapiens
gttggtagagggtttgagtccgcatcgccacagctgaaggctgcgagggactaagagcagaacagccgctgtactgtgttaag

SEQ ID NO: 139930 - DNA, 90 bp, Homo sapiens
gttttcaccagtcacatctcttactactgctagtcgctgcaacactcctctacagtttgagggttccccactgaaggacttggtccagct

SEQ ID NO: 139931 - DNA, 50 bp, Homo sapiens
gagattctgctcacggaactgcagatggaggagatgtataagaaagctca

SEQ ID NO: 139932 - DNA, 50 bp, Homo sapiens
taatcgtgcagtattttctgaatcacagtgtcaatccatatctacaagga

SEQ ID NO: 139933 - DNA, 75 bp, Homo sapiens
tgctgtccttctttgtggagagcaagctgagatctgtatctgtggacctgaatgttgatccctcgcttcagattg

SEQ ID NO: 139934 - DNA, 51 bp, Homo sapiens
tataaatggtggcagaaataccagaaggcccaacacagagatactttcatt

SEQ ID NO: 139935 - DNA, 100 bp, Homo sapiens
cgggccggaaggaacagacccctgtagcgggaattctcacactcaagaaagcaaatgaacttcttctgagcacaggcatgcccggcagttttctcatccg

SEQ ID NO: 139936 - DNA, 82 bp, Homo sapiens
tctccttcagcgcgagccaccgattgtacagttggttgaatctggcgatgtggaacccatggatatggagggctgactatat

SEQ ID NO: 139937 - DNA, 86 bp, Homo sapiens
cggtgaccacttttggaccaaaggcctgtgtgctgcagaacccccagaccatcatctgtttgcagacaaggtcccaaagacagcag

SEQ ID NO: 139938 - DNA, 74 bp, Homo sapiens
aaaaactagttgagaggcttcatatggaagcgttgttgacgaccatggacatcatccacgatggatttggattc

SEQ ID NO: 139939 - DNA, 100 bp, Homo sapiens
ggaccacgagaggaagctgagggagaccgctgaccggttccctgatgtgttacctgcttctgctactgatccaaactgcagaacttctcattcatcccca

SEQ ID NO: 139940 - DNA, 100 bp, Homo sapiens
cagttttcttcagaagaaggacttcggaatgcactacaacaggaaaatcatattatagatggagtaaagaggcctgagggagctcaatcctggtagcaac

SEQ ID NO: 139941 - DNA, 51 bp, Homo sapiens
cgctgcggcccggcccggcgggatatttgatcctgatgacctttattcagg

SEQ ID NO: 139942 - DNA, 74 bp, Homo sapiens
ctaaagagagcagtaccctgatggagtcccttgcaggggacggcaaaacagaacagaaaggcggagataaaaag

SEQ ID NO: 139943 - DNA, 75 bp, Homo sapiens
ggttcgtggctatcccactcttctctggttccgagatgggaaaaagcaagagtgagccatggagctacgtgtggg

SEQ ID NO: 139944 - DNA, 95 bp, Homo sapiens
acgtcatccctgatatccctgaccacttcctgtgtctgtgggagcactgtgagattacagcaacctgcaggattccatccaggaaagtcttcagg

SEQ ID NO: 139945 - DNA, 75 bp, Homo sapiens
gcaaccatcaagacttcacaggccacaaaatcaggaaccccagagccagggaaaaagacctcgatgaagttctgc

SEQ ID NO: 139946 - DNA, 117 bp, Homo sapiens
agttctcctcaagggattctcaggtcactgtggatgttcttgtgccccaggtgctaaagagctgtgcagaatttgtggaggagtatggagtggtggatgggatctaccgcctctcag

SEQ ID NO: 139947 - DNA, 90 bp, Homo sapiens
ggaaagaaagatatagagacaacgactatgtccaattttcatgctcagatgttgatgttagtgaagattcacctcctcccctacctgaaa

SEQ ID NO: 139948 - DNA, 74 bp, Homo sapiens
gagctgagcttcaaaaggggggacatcctcaaggttttgcactgattgcaaaaataaagtcctccgagcataca

SEQ ID NO: 139949 - DNA, 74 bp, Homo sapiens
agaaccaggatgatgacatggatatccgtcagtttgtccacatcaaaaaagaaaattgcctaagaattatgacc

SEQ ID NO: 139950 - DNA, 100 bp, Homo sapiens
gcccattcttctcgggctggcttgtatctcagggttacgctccccaggtcccttgctccaggtcatcttccacgatgttgctgtgctgacggataagctc

SEQ ID NO: 139951 - DNA, 50 bp, Homo sapiens
ctgggatgcactcaaagccgaccgggcagatgagattgtggggaacctgg

SEQ ID NO: 139952 - DNA, 101 bp, Homo sapiens
cccagacctgccaactacagccctggggggctgcccctctgactggatccagttcctcaacaaggcagcctggcatcctcgctacaacctcattgttgtgg

SEQ ID NO: 139953 - DNA, 100 bp, Homo sapiens
aatggattcagtttgcatctctccctcctttaaacagcttctccgggtctcagcatgtactatactggcaattgctggagaagattttgcaattgttgct

SEQ ID NO: 139954 - DNA, 75 bp, Homo sapiens
gatatattacatgctgcaaagcagataggttgctgctgactcagccattctagaagttcttcagtccaacattca

SEQ ID NO: 139955 - DNA, 98 bp, Homo sapiens
tctgtggaaacctacacccctccaggtgctggagaatctggtaaaagcaccattgtgaagcagatgaggatcctgcatgttaatgggtttaatggaga

SEQ ID NO: 139956 - DNA, 100 bp, Homo sapiens
aatcagatcatcaaggacttggcctccatggtgtcagagcaaggagaagctgttggctgaaggtgatgtggccgccctcaaccgacgcatccagctcgtt

SEQ ID NO: 139957 - DNA, 83 bp, Homo sapiens
gcctttgccgatccgccgcccgtccacacccgccgccaggtttttagaacttcagccataaaaatgggcagaattttccttga

SEQ ID NO: 139958 - DNA, 101 bp, Homo sapiens
ccgctgggcgccggagccgaggcgagcgccgcgcgcaccactgttgcctttccccatcttcctggttctgctccttcgtggcctagtcttgtggacaccag

SEQ ID NO: 139959 - DNA, 101 bp, Homo sapiens
gttctccaagcagcaatccaaaagagtctcaaggatccttcaaataacttcagggagactttgcagcaattgatcatgatgtcgttgccaaatgtcttaat

SEQ ID NO: 139960 - DNA, 150 bp, Homo sapiens
ggccgagatgtctcgctccgtggccttagctgtgctcgcgctactctctctttctggcctggaggctatccagcgtgtcatggagaaactccagctgggcccagagattctgcagcgggaaaatccaaggcttatttatgccaggctgag

SEQ ID NO: 139961 - DNA, 100 bp, Homo sapiens
tcgtggagaagaagagctgctgatgaggactgggacaggaatagccaggccagaagaaggaaggcctgtggtgagtgggacaggaaatgacatcaccacc

SEQ ID NO: 139962 - DNA, 83 bp, Homo sapiens
atccagcctgcggagcctgtggggcagagctgtaggtaaaacttgcctactgatcagttacacaaccaatgcatttcctggag

SEQ ID NO: 139963 - DNA, 100 bp, Homo sapiens
atttcttctaatattattggattttgttacgattatcttcatattttgaaacagctatcagttgagggatttgcagttgataaaatggctggagaggtta

SEQ ID NO: 139964 - DNA, 75 bp, Homo sapiens
gaaggactccttcgaaatggaagagaaagatgtgcgggacatcctcaccccaattcagattgaagctgcttacca

SEQ ID NO: 139965 - DNA, 80 bp, Homo sapiens
gcgcgcagggcctgcagcgggagctggacggcgagcgcgagcggcgcgagaaaccagcagaggcctcggaggtggcgggt

SEQ ID NO: 139966 - DNA, 90 bp, Homo sapiens
cagagatgtgatgttggagaactatagcaatctggttttcttgggtatatgaatgacctaaaggtacaaataaagacggagagagaacag

SEQ ID NO: 139967 - DNA, 100 bp, Homo sapiens
gatgaggtgatggcaacggccaacttcggcaagatccagatcgggatttacgtggagatcaagcgcagcgatgcttaacagagcgttccaaaaagaggac

SEQ ID NO: 139968 - DNA, 100 bp, Homo sapiens
ggggtcgtatgacgcacttttccagctcgagccctcacgaggccgtgggtacgaccggaagccgcagattgatcgtgtcctgtgctgaagatgtttccgg

SEQ ID NO: 139969 - DNA, 100 bp, Homo sapiens
aggagcctccaggagcccagacaccagccccccaccatggcaggacagaagacttcagctgccctgtccacagtgggctctgccatcagcaggaagcttg

SEQ ID NO: 139970 - DNA, 100 bp, Homo sapiens
gtacctgtggaccgtgtgctgccactgcgggggcaagacgaagttgttagccgaggagaaaaacatctcttccaaatacgcggatgagagggacagagct

SEQ ID NO: 139971 - DNA, 83 bp, Homo sapiens
gtgcgggcgggcggtgagcgcccatatgggggttctggagagcggggtgtggggagctctttgttcaatgcctagccacctat

SEQ ID NO: 139972 - DNA, 76 bp, Homo sapiens
ggaatctggaggaaagctgaccaggcggcttgtgaacagtcaggacactcatgaggaccatgatacttccactgag

SEQ ID NO: 139973 - DNA, 50 bp, Homo sapiens
gagttattaaaggctttgtagaaccaggatctgtgccagttcagaagcag

SEQ ID NO: 139974 - DNA, 75 bp, Homo sapiens
acatgatggtcgagggccgcctgctcgttcctgacagaatggaccagttactctccacaagaaaattcacacaac

SEQ ID NO: 139975 - DNA, 51 bp, Homo sapiens
gacagcatctgagcacagaaagctacattaacaagctattctgaaaatgtg

SEQ ID NO: 139976 - DNA, 83 bp, Homo sapiens
gccagatggtggaggaatacacttatttatgaaatgcctgtgaggagccaccaacatttgaagctatggagctcattggtaaa

SEQ ID NO: 139977 - DNA, 100 bp, Homo sapiens
tggtgcagagctagttcctctccagctcagccgcgtagtgcatcacatatgattgtctctttagtggaagattatccaaactatatgatcataaatctag

SEQ ID NO: 139978 - DNA, 100 bp, Homo sapiens
aggatcaagtgatgctttttctggaagtgagggtctgaaggggcgtctcgattacctgagctctctgaaggtgaagggccttgtgctgggtccaattcac

SEQ ID NO: 139979 - DNA, 74 bp, Homo sapiens
taaacagctcgttggcagtagcagcttatgaggatggggtttgttaaagttgttaagaataaggcctactttaa

SEQ ID NO: 139980 - DNA, 100 bp, Homo sapiens
cggacctttcccgctggcgcgcagcctcagctaggtgtcatggagaaactccagctgggcccagagattctgcagcgggaaaatccaaggcttatttatg

SEQ ID NO: 139981 - DNA, 100 bp, Homo sapiens
aaacatagagaattctgggcttccacacaactccagtgctaactcaacagatcttagcaaagcaatgtctcaagatggtgcttctcagttccaagaagtc

SEQ ID NO: 139982 - DNA, 96 bp, Homo sapiens
ttttctccacaaccacttcccagggaggaagagatagtcgctctggatcacccatggctagacgctgaaaacccacctggttccggaatcctgtcc

SEQ ID NO: 139983 - DNA, 82 bp, Homo sapiens
gcctcggcctcggcctccgacacgatcatggaagggaagtggttgctgtgtatgttactggtgcttggaactgctattgttg

SEQ ID NO: 139984 - DNA, 73 bp, Homo sapiens
gacagacaaagatggaaggtgcagaaataaatcagagtctactggctactcccatagtgaccctctctggcca

SEQ ID NO: 139985 - DNA, 82 bp, Homo sapiens
tttgggaccaagctgatgagcccttgaagcacagcagtgcctacaccaactaatgttacaattgaatcctataacatgaacc

SEQ ID NO: 139986 - DNA, 75 bp, Homo sapiens
aacaacagaagaactgagctatttttgaaagaacatgaccaccttcgaaaagtcaatgcatgtgttgatgtggtg

SEQ ID NO: 139987 - DNA, 78 bp, Homo sapiens
tgcaactgctcatcctggcctacgtcatcggctttgctctggtgagtgacaagctgtaccagcggaaagagcctgtca

SEQ ID NO: 139988 - DNA, 100 bp, Homo sapiens
ggaagcaccccggcggccgcggtaatgctggtggtctgcatcaccaccggatcaacttcgacaaatactttaatgaagcaccagttgagattcccagtcc

SEQ ID NO: 139989 - DNA, 101 bp, Homo sapiens
cagcccagctcgcgcttcagcgtcccggcgccgtcgcgccactcctccgatgtcaagctgagctcccagactctgatacaggctggggatgatgagaagaa

SEQ ID NO: 139990 - DNA, 51 bp, Homo sapiens
agcggtaaaggcgaggatggagaccgaagaatgaagaagcagtacgacgtc

SEQ ID NO: 139991 - DNA, 100 bp, Homo sapiens
ctgccaatgtccagatgcagctcgtggatacgaaggcgggatagccctggtcctttctccaggtatatttcctgcttcatatattcatcttaaagaagcg

SEQ ID NO: 139992 - DNA, 80 bp, Homo sapiens
ttgcagactgctgtaaatatatagctcagcgagaatcatttgctgtttcaaatagagaactgtgcgatgatgagaaagag

SEQ ID NO: 139993 - DNA, 75 bp, Homo sapiens
caaccaaactggatattcctactgctgctaaatatgagacctcaggatatcattgtgtttgtaattggaggagcc

SEQ ID NO: 139994 - DNA, 90 bp, Homo sapiens
aaaaatagtgatagctttgataacaaaatgcaggcccgaatagcattctctgcctatctccagcatgttcaaattcgcctgatgaaagac

SEQ ID NO: 139995 - DNA, 108 bp, Homo sapiens
ccaataccagttactgaaactagaaaccaatgaattccaacaacttcaaagtaaaatcagtttaatttcagaaaaggaatactctgaagatagtaactccgagccaaa

SEQ ID NO: 139996 - DNA, 52 bp, Homo sapiens
catgagcaccaagcagatcacttgcagcgtcgagggcgaggcccccagcagt

SEQ ID NO: 139997 - DNA, 98 bp, Homo sapiens
cgcatcctggacagcgcgcccaccgccctggactttgtctcacaagatgaaatgttgacgcccctggggagattggacaagtatgctgcaagtgagaa

SEQ ID NO: 139998 - DNA, 100 bp, Homo sapiens
catcttcagaatgctaaaagaaaaggagccgcgtgtggaggaggctgaagtctcacatcagaggtgtcaagaatacaaatggagagatttgcatgggatg

SEQ ID NO: 139999 - DNA, 98 bp, Homo sapiens
tagtccaaagaagcagaagaatgaaagcaactcagcgggatctcccgccgacatggagctcgattcaggtggagccgccaccaaaatgcagattttcg

SEQ ID NO: 140000 - DNA, 50 bp, Homo sapiens
gcgggtccttcggagatatctacctggacaatgcagatcttcgtgaagac

SEQ ID NO: 140001 - DNA, 136 bp, Homo sapiens
gagccgcacgtgctcggcgcggtcctgtactggctgctgctgccctgcgcgctgctggctgccccagtggacaggaaagctaaggcctcagcgatgccggactccccagcggaggtgaagacgcagccccggtcca

SEQ ID NO: 140002 - DNA, 83 bp, Homo sapiens
cctgccgtctgctcttctgcctcttgatctccgccaccgtcttcaggccaggctactgcagcactggggtgtcagttgttggt

SEQ ID NO: 140003 - DNA, 76 bp, Homo sapiens
cagttttatccttttctgtacaacatcacttcttctgtttgcagtgccacagctccggagcaagccccagccccgg

SEQ ID NO: 140004 - DNA, 112 bp, Homo sapiens
acgacctcaagcggcagaatgctcttctggagcagcaaggcctccccatggccacccatggaccagtcggcattcacttcctcccttctgcggcccataaaagccctgggtt

SEQ ID NO: 140005 - DNA, 100 bp, Homo sapiens
gaaacctaaccaatgactgtggaataatatggaagaagatggaaaaaacttgtttaatggcacaaacatttcactgaagatattcaaacaaggcaatatc

SEQ ID NO: 140006 - DNA, 75 bp, Homo sapiens
tcaacgacgcggacatggtcatgagctttgtgaacctgggggacggcaaaacagaacagaaaggcggagataaaa

SEQ ID NO: 140007 - DNA, 80 bp, Homo sapiens
gaacctttgacttggtgttgaaagtgaaatgtcatgcctctgaaaatgaagaatgaagaagcagtacgacgtctcatctg

SEQ ID NO: 140008 - DNA, 80 bp, Homo sapiens
ctcaacccctacaacttattcctgtccggagacagcctaaggactgtgccctgtccacggtgcctcctgcatgtcctgct

SEQ ID NO: 140009 - DNA, 82 bp, Homo sapiens
ggaatatgccaaggaaaaactggagagcttcatcaaaaatagtgatagctttgataatttcagactctctggctcaatctgt

SEQ ID NO: 140010 - DNA, 100 bp, Homo sapiens
cctggatccccagtcatactgcagatgtgcaaccctagagaaggcaagcagtttcgccgtgaggaagatgcggaaaaggctgtgattgacttgaataacc

SEQ ID NO: 140011 - DNA, 82 bp, Homo sapiens
ctcgcgccggctatggccgtgccctggggctgagccctcagaattaaatgtgagggagtctgacgtaagagtttgtgatgag

SEQ ID NO: 140012 - DNA, 100 bp, Homo sapiens
cctccccacccctcaaccagtctcaggcccagatgtatctacggctggaagaagcacgccaaattcattctcgttttgaaaaagaatttagttttaagaa

SEQ ID NO: 140013 - DNA, 100 bp, Homo sapiens
gcgttcccagcccgggtccccgcgttcacagccccagcgcagcctcctgacaaggtgatccgggcgggccccgcaggaattttatcccctcaccggcctc

SEQ ID NO: 140014 - DNA, 98 bp, Homo sapiens
ggccggagagagagggaaggacggggcctggcccccgggactccctgtgccttgcttggagctgacgccgacggtctcatgaagcaaacagcaatgca

SEQ ID NO: 140015 - DNA, 75 bp, Homo sapiens
caagccctgttggagactatgcaaaacaagtttatcacttgctgcccttgaatttcctccaaagaaactatttgg

SEQ ID NO: 140016 - DNA, 100 bp, Homo sapiens
cgtggcctggtctccattatttgagatgagttacatcttggaggttccctctcccagcctgtgctgactcagccatcttcccattctgcatcttctggag

SEQ ID NO: 140017 - DNA, 80 bp, Homo sapiens
aagtgagacatgcacagacagatctggcatctccactggacactggtcaggtaatctgtaagtcagatgctccaacaggg

SEQ ID NO: 140018 - DNA, 100 bp, Homo sapiens
tccggcccggtttccctcggcgtgctactgtgcgctcgatccagcaccatggggaagcgggacaatcgggtggagtgtgaggaagaggctgtctgtgtca

SEQ ID NO: 140019 - DNA, 100 bp, Homo sapiens
accatctggttcaacagggcatcgcgcacagagacctgaaatccgacaacatccttgtggagctggacccagacggtgacaaggcttctcaacatcaacc

SEQ ID NO: 140020 - DNA, 100 bp, Homo sapiens
cctttgacaggagaggctgcttcttgtagagctcaaactttggaacaaataccgaatttccaacattccatcactaatattcctcgacgccaccactggg

SEQ ID NO: 140021 - DNA, 98 bp, Homo sapiens
ccaaactctggctggagtcacacattgttctcctcaaaatctaagtctatggacaaatcagatgaagaactccagtttcccaaagagttgatggagga

SEQ ID NO: 140022 - DNA, 100 bp, Homo sapiens
aacctgttttctccgtgaccacaatattaaccaggatgaatggcgatggagtcccctgtttccacaccagcagtgctgccaatacaccttttggtgccag

SEQ ID NO: 140023 - DNA, 100 bp, Homo sapiens
tttaaaggacagaaggttcaagatgtaaagaagactattcagaaaaagatgattgacgctgggtagtaaaaagaatcattcctgcagtagcttccacaaa

SEQ ID NO: 140024 - DNA, 90 bp, Homo sapiens
gttaagatgacgacagactcagatccaagtcaacagtaaagttgaagttgatggtagtttaagtgatagccacgtatctcctccagccaa

SEQ ID NO: 140025 - DNA, 60 bp, Homo sapiens
ctgtcatcgcaggccagcggggctggtactctgatggctaccgcagctcctccctcctcc

SEQ ID NO: 140026 - DNA, 100 bp, Homo sapiens
agagaactcagcgaggattctgagaccctcagtgcagacgcaagcgtgaacacccttcctgtagtggtctccagagagccctcggtgccggcttcttgtg

SEQ ID NO: 140027 - DNA, 87 bp, Homo sapiens
attcagaaaagtcttcctttgtatctccagagtgtgaacatggctacgcctcttcattcccgtccatgccgagcccccgactgcagc

SEQ ID NO: 140028 - DNA, 74 bp, Homo sapiens
gatgggcacggccgaggacttcgccgaccagggtgtgaagaagtttgatgtgccgtgtggaggaagagattgca

SEQ ID NO: 140029 - DNA, 100 bp, Homo sapiens
agtcggagctcggcaggaagtgggaccggtgtctggcggatgcggtcgtgaagatagattcttgagtatcagaacaccaccttctttggtggaacctgta

SEQ ID NO: 140030 - DNA, 75 bp, Homo sapiens
ggcaggacagcggtggcggcagaattcagtaattggatcataacgagacttctgcggattgcagcaactccctcc

SEQ ID NO: 140031 - DNA, 90 bp, Homo sapiens
ctcggggcctccgcagcgacaacatggaggccgtgaagaccttcaatagcgagaaaagcacttggttctgcttcgagatggaaggacact

SEQ ID NO: 140032 - DNA, 51 bp, Homo sapiens
agaagaccatcgctcagatgatagttcgaggtcaggaaaatggattggatg

SEQ ID NO: 140033 - DNA, 83 bp, Homo sapiens
aggcccgcgaccgtccgccagtcgtcccgaggccaagactaaggggctgcagagcggggtggacattggcgtcaagtactcgg

SEQ ID NO: 140034 - DNA, 75 bp, Homo sapiens
atatactttggttacctatgtacctgttaccactttcaaaagccagtgaagaagcaaaggaagacatgaaaattg

SEQ ID NO: 140035 - DNA, 75 bp, Homo sapiens
agagccgccgaggatgataaacacccaggacagggtcaacacagaaagcatccttgcccaccaccaagctccagg

SEQ ID NO: 140036 - DNA, 82 bp, Homo sapiens
ctcggcctccggcgcagcccggaaatgtccggcaagatcgagaaagcagacccaagaagcttcgcttccacccaaagcagct

SEQ ID NO: 140037 - DNA, 98 bp, Homo sapiens
agctgccggcggcatgatccgacacgccggggcgcccgcgcgcggggaccccacgggagccccggagctatgtggagtctgtggcacggacagcggtg

SEQ ID NO: 140038 - DNA, 90 bp, Homo sapiens
tgatgtggacactgcattgagtttttaccatatggctggagcatctcttgataaaggattcatcaaacgtgaggaagcctttggaaaccg

SEQ ID NO: 140039 - DNA, 82 bp, Homo sapiens
tgccagactgattgtcatgctcagggaccctgtggagaggtgacttaagagattaaaattaatttggttgctgttggttctg

SEQ ID NO: 140040 - DNA, 98 bp, Homo sapiens
tgcatcagtgcccttgtggcgaatggggctcacgtcgaggtgtggtgtctatctgaagaatattttactttcaaaggaaagatgctgtctccaaatga

SEQ ID NO: 140041 - DNA, 101 bp, Homo sapiens
ttcgcgcagaaatctggctacttcctgtgccttagttctctgggcagcctagaggtgcagctcagtggaagatgatgacaaccagaagacatgagctaagg

SEQ ID NO: 140042 - DNA, 100 bp, Homo sapiens
acaagtgctgttagcctgtccaaccacttacgcgcttatgcacgaaagaagagtgctggacttttgactggtacagtttgtgaatagcacaatggaagaa

SEQ ID NO: 140043 - DNA, 100 bp, Homo sapiens
ccatacggaataagctcattttaattgccagaaacaaagcgggagatacagatgacccaccaagaattactcagaaccctgtgatcaatgggaatgtggc

SEQ ID NO: 140044 - DNA, 75 bp, Homo sapiens
aaaaaacaggataaaatcttatgattatgaggcatgggcaaaacttgatgtgtatattccagaagatattcttaa

SEQ ID NO: 140045 - DNA, 96 bp, Homo sapiens
gaggaggacggagaggatgtgttcgaggtggagaagatcctggacatgaagaccgagggggacccagatgatgtggtaccagttggccaaagaaga

SEQ ID NO: 140046 - DNA, 100 bp, Homo sapiens
agcgaaggctgaggtggcagcggcaggagagtccggccgcgacaggacggtcatgactgtccaaagtatgataatcacatgagagtgctcgttgctacgg

SEQ ID NO: 140047 - DNA, 98 bp, Homo sapiens
accttcaggaaaactcgtgtccatcaaaatccagatgctggatgacacccaggaggcatttgaagttccaatgctggcccgcgagagacattgatgca

SEQ ID NO: 140048 - DNA, 75 bp, Homo sapiens
tgtggatttctcttattttatctgtggcttgaatgtacatttctgagagagggcattactacagccgccgtttgt

SEQ ID NO: 140049 - DNA, 75 bp, Homo sapiens
cgggcatctggccgacgccctcgttcctgtggctgacgaggaggacttcatccaacccagcagccgagaagaggc

SEQ ID NO: 140050 - DNA, 75 bp, Homo sapiens
tgccaatttaccagagataattgataacaccctgtaacagctgacgaagctgccgcccatgctgtcgccaccctg

SEQ ID NO: 140051 - DNA, 83 bp, Homo sapiens
tccatatcataagtggaattttggagatattcaaaggctgcagttcatggagctcgtttcaaagggcaagatctaaaactggc

SEQ ID NO: 140052 - DNA, 100 bp, Homo sapiens
caggagaggcctctgagaaggaacccttgaaaggaggctgccggcgtggaccgcgggaaggcggggctggggctcggcgggaggccacccccacagccgc

SEQ ID NO: 140053 - DNA, 100 bp, Homo sapiens
gctggccagtgagcccatcccgttctctgatttgcagcaggtgactgaaaactcctgaggcatttcctggactagaatgggtagtgaagacccatgtcag

SEQ ID NO: 140054 - DNA, 87 bp, Homo sapiens
ggcgtcggcaggttcgaggcgattcgaggagatctattgggaaactgattataaccactcgggcaccatcgatgcccacgagatgag

SEQ ID NO: 140055 - DNA, 103 bp, Homo sapiens
cctctctggccactatggaattctaatttgaaccatgtttggattgaagccgcctctgtattacttaccagttacagaatgtctgaaggggacagtgtgggag

SEQ ID NO: 140056 - DNA, 75 bp, Homo sapiens
ttggcgtcctgtacgtgaagctcgggtgcagagcattgtagaccaaggagccatggataggagaagtatgggtga

SEQ ID NO: 140057 - DNA, 100 bp, Homo sapiens
ctgagccggggaagatgcttcatctgcccctgcccagatccggaagaacggtgaatttcccccgcagaatttcgaggatgtcagatgtaaatgtatctgc

SEQ ID NO: 140058 - DNA, 90 bp, Homo sapiens
ccgttatctgcaggtattgggagatgcacagctaagatgccaggaccacctggaagcctagaaatgtatcaaatcatgggtggataagat

SEQ ID NO: 140059 - DNA, 83 bp, Homo sapiens
cgctgaccgagcgcaccccgcccccggcgccatcttcccgaccgcgagccgtccagcctgcctgctccgcttcagcggactct

SEQ ID NO: 140060 - DNA, 100 bp, Homo sapiens
ggtgcaggtggacggggagccctgggtccaggccccggggcacatgatcatctcagctgctggccctaaggccggatcccagacagcctgaagaactgtg

SEQ ID NO: 140061 - DNA, 82 bp, Homo sapiens
caggactgaacagggagccaactgtttctttgaacagtaaatcagattgggaaaatgaggtacgttagtgttcgcgatttta

SEQ ID NO: 140062 - DNA, 82 bp, Homo sapiens
cccaggtgcccccggcctgcgctcccatccacacgctcggcttcctgtgtccagtaccggttagtggtccgggatgtgaaca

SEQ ID NO: 140063 - DNA, 76 bp, Homo sapiens
tggcgttggtgggagccgtgctctacctctatccggttcagccgtctgtatatctccccagatacctgaaactgac

SEQ ID NO: 140064 - DNA, 51 bp, Homo sapiens
gcccgaggcgaggaggagcgctggcggattctccttttacaaatgcaggaa

SEQ ID NO: 140065 - DNA, 75 bp, Homo sapiens
tagaagtgtccagcgacagcttctgggagaaacacaagttcctgagaagaaaaaaggaatcttcaggagagccta

SEQ ID NO: 140066 - DNA, 82 bp, Homo sapiens
cgaaatcagagacacgtggtttccaaggccccttcgggttgggcccgaaggcatcctgcagaacggggctgtggacgacagt

SEQ ID NO: 140067 - DNA, 98 bp, Homo sapiens
ctggaaggtgcgtgtggggctgggtctcggagtgggagacgtggagtgcagggcactgcacttggctgtgattcatcagcatgaacccttcctggatt

SEQ ID NO: 140068 - DNA, 83 bp, Homo sapiens
gcgcgaccgccgaatcgctcctgcagcagaggctcctctgctgaacagcccctgggcgggagactcaggaagctgagcctggg

SEQ ID NO: 140069 - DNA, 100 bp, Homo sapiens
gaagaggaaagagaagcttgattctgtgattgaattcagcatcccagactctctgctgatccgaagaatcacaggaagcaatggccaatgtacatggtgg

SEQ ID NO: 140070 - DNA, 100 bp, Homo sapiens
caaaatcagtgattctacatctcaagctcatattttgaagtgtttacgggggacggcaaaacagaacagaaaggcggagataaaaagaggggtgttaaaa

SEQ ID NO: 140071 - DNA, 96 bp, Homo sapiens
tgagcccaggccacagtaccctattcacgctctgtgcttgtgccaagcatcctgaggttagcattacacttctcccagtggagcccatgacttctg

SEQ ID NO: 140072 - DNA, 98 bp, Homo sapiens
gcggcagtcgggccagacccaggactctgcgactttacctgaatccttcaaggaatttgctgaattgctcaacgaggtagaaaatgagaggatgatga

SEQ ID NO: 140073 - DNA, 82 bp, Homo sapiens
gagagaattaaagtctaactctccaaataaaaatatgtcgtaactgcaagtgtggccaagaagagcatgatgtcctcttgag

SEQ ID NO: 140074 - DNA, 87 bp, Homo sapiens
aggagggagaagacgaggatgatgcggaaattaaccccaaggttaatttggagtggcccctggagtcagtttcctacaccatccgag

SEQ ID NO: 140075 - DNA, 75 bp, Homo sapiens
agaaaacggctgtcattgaccatcacaactatgacatctcagaccttggccagcgaacacttgccaagtatttca

SEQ ID NO: 140076 - DNA, 83 bp, Homo sapiens
gtgacttgactcttcaaacacaaagattcccaacttcttctggagcctggggatcggtcacactggtgcgtggtggcatactg

SEQ ID NO: 140077 - DNA, 74 bp, Homo sapiens
gacgcgaccataactctaaaagattgacgagatgcctgaggctgccgtgaaatcaacagccaacaaataccaag

SEQ ID NO: 140078 - DNA, 100 bp, Homo sapiens
catgctcacaaggcagtcctagcagcatgcagtgactatttccggcactgtgtttagatcaagatgtctggtaaagcaaatgcttccaagaaaaacgctc

SEQ ID NO: 140079 - DNA, 74 bp, Homo sapiens
gctctggaaagttcttgtcaataccaagctctggattaatcgaattacagctgctagccaggaacatggactga

SEQ ID NO: 140080 - DNA, 96 bp, Homo sapiens
ctgtgcgcgcctccatctgggccatggatggattgggaaaatgaggtacgttagtgttcgcgattttaaaggcaaagtgctaattgatattagaga

SEQ ID NO: 140081 - DNA, 98 bp, Homo sapiens
gagcatctctccctacctagccgtgcagctgcctgccaggctagcttgtcactttctgcaaaggtttccctcagggagcctcctgctgccaggcacca

SEQ ID NO: 140082 - DNA, 100 bp, Homo sapiens
atgaagttcgccgagcacctctccgcgcacatcactcccgagtggaggaagcaatacatccagtatgaggacatgaaagatcagatgtcaacttcatctg

SEQ ID NO: 140083 - DNA, 75 bp, Homo sapiens
gaaggagcctctctgcaggcagaaagctcctggaatcccagctgcagtcacagaagaggagccatgagaatgagg

SEQ ID NO: 140084 - DNA, 75 bp, Homo sapiens
tatgaatcagctcaactctttgttgcagaaggaaaaccttcaaggaaaatcctgccttgcttcgttgggcctatg

SEQ ID NO: 140085 - DNA, 90 bp, Homo sapiens
ccgcgtccgccgattcctcctccttggtcgccgcgtccttggctggcgtcaaattgtggctactaatttgccccctgaagatcaagatgg

SEQ ID NO: 140086 - DNA, 90 bp, Homo sapiens
cttatatttccctgattacagcataggtaaaaaagctccagttttatttaataaagaaatgattgagtcaatgaaggaaggttcagttgt

SEQ ID NO: 140087 - DNA, 82 bp, Homo sapiens
ctgggacagcgagcccttcaccctggtggagcgagacggtttcccaggcagctgcagacttgaaacagttctgtctgcagaa

SEQ ID NO: 140088 - DNA, 71 bp, Homo sapiens
tccctgccgcccaatttggccgtcgcagaacagctgtcctggggcggaggtgaccttgtgcgttctgggct

SEQ ID NO: 140089 - DNA, 50 bp, Homo sapiens
gggagcgtcgctgcctggtgaacgagatcctgaaggagctagacgagtgc

SEQ ID NO: 140090 - DNA, 75 bp, Homo sapiens
cctgcctccaggccgctccccacggtggtgttagcacctcagcccatcccaggaaacttggatttaactggccag

SEQ ID NO: 140091 - DNA, 90 bp, Homo sapiens
ctacgccgaggacgagacagatgtggaggggacggtgaacggcgtcaccctcaccagctctgggatctggacaactctcctctgtcccca

SEQ ID NO: 140092 - DNA, 78 bp, Homo sapiens
gaatgtgcggaaaatgccttcaaatcagagtcgaggtggaaaaaagtttcttcctgtattgaaagaaatcttggacag

SEQ ID NO: 140093 - DNA, 51 bp, Homo sapiens
acatgatcaagggtgttacactggttgcaacaaggacagtgtcagagcagg

SEQ ID NO: 140094 - DNA, 98 bp, Homo sapiens
aacatcacacagaccaagatgagccaaatcgatatttcctcagatttattcaggagattgagcatgctctgggtcttggcccagccaaacagtgtcct

SEQ ID NO: 140095 - DNA, 100 bp, Homo sapiens
tgttggtggtggtcagctttttgtccctgtgtgtcatcctgcctgtcaacctctcaggggacttgctgggtggtgaagcagtattttccaatttgaagat

SEQ ID NO: 140096 - DNA, 98 bp, Homo sapiens
gcatgggcatttatgtgggtgccaaagtcttcctcatctacgagacagtactactggtatgacgagcgggggaagaaggtcaagtgcacggccccaca

SEQ ID NO: 140097 - DNA, 98 bp, Homo sapiens
atttgtcagcagttagagagatatatgggccacatgcagtttctctcaggaatcaagaacccagtctcggttgccaacagactcttatgtgaagggca

SEQ ID NO: 140098 - DNA, 74 bp, Homo sapiens
ttcgcgcccgccgacccgcgccctgctccctctcagcacctgggcggacgggtgttgcaattaataacaccttt

SEQ ID NO: 140099 - DNA, 75 bp, Homo sapiens
ggggcatgtggcaaaacacacagctgagtggatctccagcttgtagctgcatcagcccctcctcctttctcaggt

SEQ ID NO: 140100 - DNA, 100 bp, Homo sapiens
cagcatcatgcagccgccgccgaggaagctctacaccctcgccgtgatcggcccaggaccgccagattgccagccagcccagatctctcgccgttactcg

SEQ ID NO: 140101 - DNA, 74 bp, Homo sapiens
ccggattggggatgagtatgcggaggacagctctgatgaggagcagtggtctcggaaagagggtcgtggtcccg

SEQ ID NO: 140102 - DNA, 51 bp, Homo sapiens
atcttgtacctggcttcaggagacttggtagaagagaatgagtgggtggta

SEQ ID NO: 140103 - DNA, 101 bp, Homo sapiens
gtccttacagccgctcgtcagactccagcagccaagatggtgaagcagatcgagagcaagggcatgcacgaactgttagcacctatagtctttgtccttca

SEQ ID NO: 140104 - DNA, 90 bp, Homo sapiens
gccggagcccgggaggggccgcgccgccaccgtctgaactaggatgtcccgacatgaagattactgatctctcattacccaactatctga

SEQ ID NO: 140105 - DNA, 100 bp, Homo sapiens
aacgttaccagcatccattgcaaaccttattaatctcagggaactggatgtcagcaagaatgaatcatgcagacatttgttacacagcagtggaaacaga

SEQ ID NO: 140106 - DNA, 98 bp, Homo sapiens
ccaaactctgcagtgaaagccccgataacgtcgtgtcgaccacaggtccaggggcaagttcatcctactctcgagtctaatgatgatgctcttcagta

SEQ ID NO: 140107 - DNA, 101 bp, Homo sapiens
cactgaccacaggcaacgagagcctggacatcaccatcgtcaggcacctccagtactgcacccaactcgtgcaggcagctaagaatggagcaacaggcgtg

SEQ ID NO: 140108 - DNA, 80 bp, Homo sapiens
gtacaggactcgcctcctcagggttccctgtgctgccacttttcagccatggccacaagccaagtacccggccatcaagg

SEQ ID NO: 140109 - DNA, 116 bp, Homo sapiens
gcgagcccaccccggtcctcggctctggggccgccgccgcgggccggagccgagcagccgtcggcaggaaacctcctgcaaaagtggaagcgaagccgaaaaaggcagcagcgaag

SEQ ID NO: 140110 - DNA, 90 bp, Homo sapiens
tgtcaatgacatgaaaattgatctcatgagcattagtggtcacaaaatctacggtcccaaaggcacgttgcccctggcctcgcaggagtc

SEQ ID NO: 140111 - DNA, 75 bp, Homo sapiens
ttcccacgctggcgcccggcgaccgggtggggctgcggccggtcagaagtactggggccccgccagcccgaccca

SEQ ID NO: 140112 - DNA, 121 bp, Homo sapiens
gtgacaattgctaggcggagacagtgcagggaagagagaccttagaaaggatcaggactggcggttccaaagaactactggttcagattttagctcttcccaagttgtgaaaatagtgaag

SEQ ID NO: 140113 - DNA, 96 bp, Homo sapiens
gtctttctcaacctcatcttctggggggacttgatctcatcttcatgccaggccttgggtttgacaaacatggcaaccgactggggaggggcaagg

SEQ ID NO: 140114 - DNA, 80 bp, Homo sapiens
actgtcagatggattgactatggaaaagttgccaaattgattactgtggcatgatcctccaccattcacactctaccctg

SEQ ID NO: 140115 - DNA, 98 bp, Homo sapiens
cgagtggattcatttttctacatattaggatataaccctgagacaaggtcattacacctactctgagaatcgtgtggaaaaagacggcctgattctta

SEQ ID NO: 140116 - DNA, 103 bp, Homo sapiens
ttcaggaattttactgggataattatccaaataaattgcaagcattctatccaaatgagttctgccatagaatcatggagtcaacatcccaggacagaagggc

SEQ ID NO: 140117 - DNA, 100 bp, Homo sapiens
gggttcagttcgtcatggggctgtttggaaagacccaggagaagccgcccaaagaactggatttttagactctgaggagcagttggagctaatccacatt

SEQ ID NO: 140118 - DNA, 100 bp, Homo sapiens
ctttccactaaaccagcaagacgtcccagataagtttaaggcttccccatctttctggtgacgctggtggccctggtggatgtggacaactatggcccca

SEQ ID NO: 140119 - DNA, 75 bp, Homo sapiens
tgcaatgtttttgtggaacatggtccttttatgtggaatgcaagagattgatttgaatgactggcaaagacatgc

SEQ ID NO: 140120 - DNA, 100 bp, Homo sapiens
cggcggcagcgacggcagcggcggcggctggactaaacaggtcacctgcagtggacggctgcattcatcgggccgccggccccctgcttaccgacgagtg

SEQ ID NO: 140121 - DNA, 100 bp, Homo sapiens
cagtgcgtctgccccgccggctgggtgggcgagcaatgccagcactgcgggggccgcttcaggagatcatgaatcagacagataaaaatcaacaagaaat

SEQ ID NO: 140122 - DNA, 51 bp, Homo sapiens
agctggaaggggttgcccgaaggatgacggcagcacatggtctcctacagc

SEQ ID NO: 140123 - DNA, 90 bp, Homo sapiens
ccggaggctccgaggctcctgcgctcccgcgccgcgctcccctcgcccgcccgggccgccaggttcgagaacttgtcttggacaattgca

SEQ ID NO: 140124 - DNA, 74 bp, Homo sapiens
ctataagctttgcaacagaattacagagtatgatgctcacttatctaaagaatatgaggaggctaatttcagag

SEQ ID NO: 140125 - DNA, 113 bp, Homo sapiens
ctaaatatagcagaacagaattggagtccggggcagccttctttcctgcaaccacgggaacttcgaggtatatgaatgacctaaaggtacaaataaagacggagagagaacag

SEQ ID NO: 140126 - DNA, 51 bp, Homo sapiens
caatttcccagctgctaaaggaagaggaagttctggacatggcaagacatg

SEQ ID NO: 140127 - DNA, 82 bp, Homo sapiens
cggagaagctgtgcatttacaccgacaactccatcaagcctcaggagctgctgccggcccaggcctttgtggtgaagcgggg

SEQ ID NO: 140128 - DNA, 100 bp, Homo sapiens
acggctcgctggagctgcccggggcggtccctggctgcgtgcacagcgccttgttccagcagggcctgatccaggacctggcgactcccctggcctttgc

SEQ ID NO: 140129 - DNA, 89 bp, Homo sapiens
agatggagagactgtggagtttgatgttgttgaaggagaaaagacctgtcatttactccatcctttatagtgatgctacaggacgaaga

SEQ ID NO: 140130 - DNA, 95 bp, Homo sapiens
ccgcgctctggcgctacggtctggccgtcggctgcggcgccatcgacttcccaagtaagaagcggaagaggagccgctggaaccaagacacaatg

SEQ ID NO: 140131 - DNA, 75 bp, Homo sapiens
agctggagtcgtgagcgcgcgcccgccccgctctgggaggaccgcgaggccccttcacagatgtagtcactacaa

SEQ ID NO: 140132 - DNA, 100 bp, Homo sapiens
gaccgcctatgacttgagcagtgttattgccagtggctccagcgtgggccacaacaacctgattcctttaggacggggctcttcacccccgacatggcct

SEQ ID NO: 140133 - DNA, 98 bp, Homo sapiens
ctgaatcctctaaaggccccatacaatgaagtagacattggtggaaacatttatctgcgggccaggcatcgacatccgcaacgactatcagcagctga

SEQ ID NO: 140134 - DNA, 98 bp, Homo sapiens
ggattaaagctaaagacatagttcctggtgatattgtagaaattgctggtcgaaatgagaaggggcagctgggacatggtgacaccaagagagtagaa

SEQ ID NO: 140135 - DNA, 100 bp, Homo sapiens
tcagctccacattgagagcaaaatctacaagatgatgcagggaggaggacgccaagagtgccgaggatgaggctccttccagacacttgggaaagcacca

SEQ ID NO: 140136 - DNA, 101 bp, Homo sapiens
tccatattcagattggccagtgtggcaaccagatcggagccaagctggttatattctgggcactaaatgaaggcgtttctaggcaatttgattcgttcaga

SEQ ID NO: 140137 - DNA, 95 bp, Homo sapiens
tgcgcgccgctgcccgcgccacagattgtctacatgggctggtgtgaagcccgggagcaagaccccctccaggacagagtgtactccccgacctt

SEQ ID NO: 140138 - DNA, 50 bp, Homo sapiens
gggaaagtgctaaagccgctgagggactgaaaggaggacttcaagaatgt

SEQ ID NO: 140139 - DNA, 51 bp, Homo sapiens
ggcggagcagagttcttctcagacggcaccgaaagcgaaggaagctcctgc

SEQ ID NO: 140140 - DNA, 74 bp, Homo sapiens
aaacgccagccaagaagcatgtgcgactgcaggagaggatctgcctacaaactggtttgctactttaccaactg

SEQ ID NO: 140141 - DNA, 51 bp, Homo sapiens
ccaccggctcagaaccaaaaccaggagagaagtggatgggccctatacctc

SEQ ID NO: 140142 - DNA, 82 bp, Homo sapiens
gtagagtcgctggagcgggcggagctgtgcgagagcctcctcacttggaacccagcttagactagaaagtctagaagacaca

SEQ ID NO: 140143 - DNA, 82 bp, Homo sapiens
cgccggtcctgaccaccgtgaacggacagtcccccccagatgtccagctcgccgctgtccaagaaacgtcgcgtgtccgggc

SEQ ID NO: 140144 - DNA, 97 bp, Homo sapiens
ccccgccctgtgggagaagcacagtccacagacatttgaagacagtgatttgttccatttgattggtgttatctgtggcttagcaatttataattgt

SEQ ID NO: 140145 - DNA, 90 bp, Homo sapiens
caccggagagcgaggacgacgtggaggcggagtggcgcccggcgaggtagcgccaggcgagggaaaggaaaacctcttcagcgcaaggtg

SEQ ID NO: 140146 - DNA, 51 bp, Homo sapiens
tcgcagtggtcgcttcttctccttgcatgtgcagtctttgccaacaaaaaa

SEQ ID NO: 140147 - DNA, 82 bp, Homo sapiens
ggcggctgctgctgctgctgacgctgctgctgcccggcctcgggatgccatggacaatattaccaggcagaaccaattctac

SEQ ID NO: 140148 - DNA, 100 bp, Homo sapiens
gacacacccccaatagtgtcacaatttcccggttaaaaggactactgactcaaactctgcctcttgagttcatggttcaccacttccagcctggtgactt

SEQ ID NO: 140149 - DNA, 102 bp, Homo sapiens
tcttcactcgagagatgaggacactgaaattcagagaggggaagtgatttgcctcagcttgtactgtttttctatatgagtggagaagacagctgttaccag

SEQ ID NO: 140150 - DNA, 100 bp, Homo sapiens
tggccctctcgctgttgctggtctctggctccctcctcccagggccaggcgccgctcagaacgaaacagagagcccaggaccatgaggcttccgcctgct

SEQ ID NO: 140151 - DNA, 50 bp, Homo sapiens
cagctgctggcctctgggccggtggaatgaactaggaggatgtgtgattc

SEQ ID NO: 140152 - DNA, 101 bp, Homo sapiens
gccagccagcaggaaatacagcatattgcatttgcacacgattcaactcgtgtgatccagtgttacattcagtatggtaatgaagaacagagaaaacaggc

SEQ ID NO: 140153 - DNA, 131 bp, Homo sapiens
ctatcaatgggaaggcacggaagcatggtgaaaactatagtgtggactacctgacagatgttttgctaattcaaggtagtgcctggtggtgtggaacaatcattttgaaatttctgacatctaaaatctta

SEQ ID NO: 140154 - DNA, 50 bp, Homo sapiens
gtgcaacaatggcttcatgcaccacgataagtacatgcagatgaatcacg

SEQ ID NO: 140155 - DNA, 100 bp, Homo sapiens
caaggacagcttttttcctgcaaggtctgttgcggttctcccacttttccataagcagaacaagaaccaaatcaaacgtcttaacgcgtatagagagatc

SEQ ID NO: 140156 - DNA, 75 bp, Homo sapiens
gaagcctgcctacagttttcacaaatcttcttagtaaacacttgccatcgtcagatagtatgtctctaaaagtag

SEQ ID NO: 140157 - DNA, 100 bp, Homo sapiens
cttggcagctggacaggcagagtgctgatgtgaaaaataccacgacaaaaccaccctactgccactgggcccaagagatgggtgctctcctaggcgcccc

SEQ ID NO: 140158 - DNA, 82 bp, Homo sapiens
cctggagccaggggggccttcggaacagatgcacacccttcctgggtgatggattatcgagattgcagcctgtcactccaca

SEQ ID NO: 140159 - DNA, 50 bp, Homo sapiens
cccacggagcctccggggctgccactgaggcggctcccagctgcgttggc

SEQ ID NO: 140160 - DNA, 80 bp, Homo sapiens
ccagaaaccaacaggcagcacaggagtgttctaagaacggaagcatctgggctggatggaatttagcatcaagcagagtc

SEQ ID NO: 140161 - DNA, 100 bp, Homo sapiens
accgtcccgcgcggggcacgatgttgaacatgtggaaggtgcgcgagctggtggacaaagcgcttgcagccaatttactggagcagggatgacgtagccc

SEQ ID NO: 140162 - DNA, 98 bp, Homo sapiens
accatccggcccgagcacgtcctgcgcctcagccgggtcaccgagagtgaagaagatgggcgggcttgggcttctggccatggacgtgcccgaggagc

SEQ ID NO: 140163 - DNA, 83 bp, Homo sapiens
tgacgaccctggactccaacaacaacacagggcattgctcagattaacctggctgactatgacagtttgagtgagatgcagct

SEQ ID NO: 140164 - DNA, 75 bp, Homo sapiens
cccggacccaaagtgccatgtctttaatttgtcatttacgtgctgaagcatattgacttgaggaaaacgccttcc

SEQ ID NO: 140165 - DNA, 82 bp, Homo sapiens
caaaaaaggaggccaaagactttgaactgtggctgcaccatctgtcttcatcttcccgccatctgatgagcagttgaaatct

SEQ ID NO: 140166 - DNA, 74 bp, Homo sapiens
gacccagcacgcctgggccgggggctgcagcatggcctgcctcggtctcgcagtcagacgtgcctgccagagct

SEQ ID NO: 140167 - DNA, 50 bp, Homo sapiens
ggctattaagcggcgaccaggtgttgctgtggatgtatggtcgacgctgg

SEQ ID NO: 140168 - DNA, 83 bp, Homo sapiens
acacccgtgcccaggagcttgacgccttagataacagccatcctattgaagtccaatagaaaaagttggtgtgctggagctac

SEQ ID NO: 140169 - DNA, 90 bp, Homo sapiens
cagatgaggacacctgaggttcagattaagaaatctgccccaaagtcttagaactggttttcttccacccctgagatggcaagaccagcc

SEQ ID NO: 140170 - DNA, 98 bp, Homo sapiens
gactccccagaccagaagaaaatcattagcctatggtgagtcctgcaaatgttaagtgatttgctcaaggtgcccatttcgcaggaattggagcccag

SEQ ID NO: 140171 - DNA, 100 bp, Homo sapiens
ggaactcaaagtggatgaggaaagaaaaggccaaagttgttgagcccctggactatgagaatgttattgcccaaagaaaaacccagatttacagcgaccc

SEQ ID NO: 140172 - DNA, 88 bp, Homo sapiens
ccgcctggcggccatcgtggctaaacagccctggaggctgcccgaatttgtgccaataagtacatggtaaaaagttgtggcaaagatg

SEQ ID NO: 140173 - DNA, 101 bp, Homo sapiens
gcctaagagggcagccgcctgaaggaacgcgacggcggcgcccgcagatcatccaggccaccatcgagaagcacaaacagaacagcgaaaccttcaaggct

SEQ ID NO: 140174 - DNA, 75 bp, Homo sapiens
gacagttcgctacacagcaatgcatcgaggtggtcgttctcgttaccggaccacttcttcagccaacaatcccaa

SEQ ID NO: 140175 - DNA, 90 bp, Homo sapiens
cccgcgtgggcgtcccggagcctggccagctgcacttcaaccagagaagagagtgagagtgtgctgacgctgaaaggcttgaccccaact

SEQ ID NO: 140176 - DNA, 88 bp, Homo sapiens
tcagccaatggagtcacatcagcattttctgttgactgtaaaggtgctggtaagatttcttctgccagcgtcccatgctcggtggccc

SEQ ID NO: 140177 - DNA, 100 bp, Homo sapiens
acagcggcaaggtctccaagtcccagctcaagatatgatgcccctccttcataattatgtaacagttgatacagacacacttctgtctgacaccaagtat

SEQ ID NO: 140178 - DNA, 100 bp, Homo sapiens
ggagccatgggggacgctcccagccctgaagagaaactgcaccttatcacccggaacctgcaggttgggtatctacagccattggttgctgttcaggtca

SEQ ID NO: 140179 - DNA, 75 bp, Homo sapiens
gtggaggcagaggtggcatgggtctcgctctgtcgtccaggctggagtccaatgctgcgatcttggatcactgca

SEQ ID NO: 140180 - DNA, 100 bp, Homo sapiens
actgctgtacttcagtgaatgtaacaaatgtgatgacaagaaggagagatctctgctgcctgcattgagggggaaaggcaggtatggtgaggtgtggagg

SEQ ID NO: 140181 - DNA, 101 bp, Homo sapiens
gctgaggaaccatgtctccatccccgaccgccctcttctgtcttggtgtggtggctcacgtctgtaatcccagcactttgacaggctgagcgagggagtgg

SEQ ID NO: 140182 - DNA, 100 bp, Homo sapiens
aaggaactgtggcttgtgatccatgggcgagtctacgatgtcacccgcttcctcaacgagtttagaaacctgctgaagtggtatgctaaggagttcaaag

SEQ ID NO: 140183 - DNA, 75 bp, Homo sapiens
tggaggacgagatgcccaagactcttgggcatccccaccatcagatggtgcggggcagagggggactacaacgtc

SEQ ID NO: 140184 - DNA, 100 bp, Homo sapiens
ggagatctcgctgggccagttcatgaaggccggcagcatcaatgtctggaacatctgtcccttgttcaaaggtgcggtggctactaaagttcgaaggcac

SEQ ID NO: 140185 - DNA, 99 bp, Homo sapiens
cgagatcagccagccgaccgagctcaaatagctataactgtaccaaagacatggaagaaaccaaaagatcggacccgaaccactgaagagatgttagag

SEQ ID NO: 140186 - DNA, 83 bp, Homo sapiens
ctactggctgcgctcctttctggccggagagtccctgcaggaagcatcacccaggctggcagatcatggtagcagcagcgggg

SEQ ID NO: 140187 - DNA, 80 bp, Homo sapiens
aaggtgtcaagaagctcagaatgatcctaagtgtgaacgtgaagtccccagccctgctgctgagccagttgctgccctac

SEQ ID NO: 140188 - DNA, 88 bp, Homo sapiens
cgcagtggtcgcttcttctccttgattttcagctgaactctcatctctcaacactggcaaatattcataagatctaccacacccttaa

SEQ ID NO: 140189 - DNA, 100 bp, Homo sapiens
tggaatccatgtttctggacgcggatttttggcctcatactctgttatagataaacaagtttcagctcctggcatcagctctattcaaatctggttcaga

SEQ ID NO: 140190 - DNA, 83 bp, Homo sapiens
tcagctcctggttcaacgaggccattgacttcatagtgcctggagaagttccctgtgatccagcacttcaagttcgggagcct

SEQ ID NO: 140191 - DNA, 48 bp, Homo sapiens
tccaacacagatgtccaagctgccaattgggcagatgtacagagtcag

SEQ ID NO: 140192 - DNA, 99 bp, Homo sapiens
gtcatcatgagcgatgttaccattgtgaaagaaggttgggttcagaagaggggggggacacagcgattgccacgcgccattggaatgtccctggccaag

SEQ ID NO: 140193 - DNA, 88 bp, Homo sapiens
agcttcgggtaactctcacagtggaagctgagtcagtgctgattctctcaaatagagcttgaaggataaatcttcatttttgtttcaa

SEQ ID NO: 140194 - DNA, 95 bp, Homo sapiens
cccgaagtaccgacccgagttatgcccaccctccaactttgcgacggaaatgtgtcatcgaaagccaggcaatccacctcgaagatccaagtctg

SEQ ID NO: 140195 - DNA, 75 bp, Homo sapiens
cgccttcaggagaatctacacgcataaaccaaggtgtatgttggtaacctgggaactggcgctggcaaaggagag

SEQ ID NO: 140196 - DNA, 100 bp, Homo sapiens
ctgatcgcaaatacctgaaagattgggcaagagaagaattcagaagaaacaaaagtgccaccgaagagagcagcggaaagagctcagtgctagaaagcct

SEQ ID NO: 140197 - DNA, 74 bp, Homo sapiens
tttctgtgggcagacattaacattcaggacttcctgatccatttgctaaggtggtggttgatggatctgggcaa

SEQ ID NO: 140198 - DNA, 100 bp, Homo sapiens
gcgcctgttcccggggcagatccaggttcaggcattcctgcatcgcatccggcagaacgtggccgactcagtggagaagggcctcacggaggagaatgtc

SEQ ID NO: 140199 - DNA, 101 bp, Homo sapiens
ctgtctcttcgtcaccttcgacctgctcttcatctccctgctctggatcatcgaactgaatacaagcatgagacgaagctgaagggagtcatctatttcca

SEQ ID NO: 140200 - DNA, 100 bp, Homo sapiens
atccatgtttctggacgcggatttttggcctcatactctgttatagataaacaagttccatgccattgcagtgtcaactaggcctcagttacttttcagt

SEQ ID NO: 140201 - DNA, 82 bp, Homo sapiens
agtacagatctctgcagttacaggaacatcgtctgcttcatggttagtggatgacagatgtgtggtgcacccagaggccggg

SEQ ID NO: 140202 - DNA, 50 bp, Homo sapiens
ccggagcagagagctggcgagcaaggttttgagcaaaattttggactgtg

SEQ ID NO: 140203 - DNA, 90 bp, Homo sapiens
tgcccacgcccaatgtgctctgggacctggttgacaggataggtgccggtggtggtgtgcacattgagccccggtatagacagttccccc

SEQ ID NO: 140204 - DNA, 130 bp, Homo sapiens
gctgcctctacggctgaggaagcagccaagaaaaaaagacgaaagaagaagaagagcaaagggccttctgcaggtgctggagaatctggtaaaagcaccattgtgaagcagatgaggatcctgcatgtta

SEQ ID NO: 140205 - DNA, 100 bp, Homo sapiens
acctcatggatgggctgcctccaggtgacagcaatcagctggcctggtttgatactgacctgtaaatcatcctttaggtttggaaggtttgcagttgctg

SEQ ID NO: 140206 - DNA, 83 bp, Homo sapiens
ccgagaatagctccgtccagcagcaattctgtggtgttcttggtcacacatttatggagtttctgaagggcagtggagattac

SEQ ID NO: 140207 - DNA, 100 bp, Homo sapiens
agaaaggacatcttatctttgatgcttgctttgaaagtgatgagcctgaagtcttgacagaacctccaagtgccacaaccactactaccataggtatatc

SEQ ID NO: 140208 - DNA, 75 bp, Homo sapiens
gctacggactatgggcgaatagctctgaccacccggcgaagagccccccaagatgaacccagtggtggagccact

SEQ ID NO: 140209 - DNA, 75 bp, Homo sapiens
tagacatgggggcctcaaacgtggagatcaactcctctctgttaatggagtggatttccatttaaacagggttaa

SEQ ID NO: 140210 - DNA, 90 bp, Homo sapiens
gcgaaatcttgtttgagaaccccgatcagaatgccaaatgtgtttgcatgctggataaacaggggtcacatgacgacagaagccaagagg

SEQ ID NO: 140211 - DNA, 97 bp, Homo sapiens
ctccattggatttaaaagacagtcctcgtcagcactgactttcagctatggaatcgatgtggacgagtgctcactagcagaaaaaacctgtgtgagg

SEQ ID NO: 140212 - DNA, 100 bp, Homo sapiens
ggtgccgtctttctgtccttcaaacttgtccaggggggcgtcttccaggaggaggggatttggacatttggtgccatcttcagaagatccaggagtcctg

SEQ ID NO: 140213 - DNA, 87 bp, Homo sapiens
taggcacagctcctccagataccagcacatgcagcccatctgctgacattgggactactactgaggatgaagatgagctggattccc

SEQ ID NO: 140214 - DNA, 100 bp, Homo sapiens
attgatgtctccctgcctctcaataccttgggcccagtcatgaagatggaacctctgaataacctccaggctttcttgatcatggatggtgaagatatac

SEQ ID NO: 140215 - DNA, 89 bp, Homo sapiens
aagctgaagcattgcttcaaagcatggggctaactccagaatcccccattgttggttagtctgctgctaattggaattgctgcgtgggg

SEQ ID NO: 140216 - DNA, 100 bp, Homo sapiens
taatggaaccggtgagcaaatggtctccgagtcaagtagtggactggatgaaagggaaaggtggcccagacagcgtgtatgtcagcttgcaagcatttag

SEQ ID NO: 140217 - DNA, 74 bp, Homo sapiens
gcaccctggaccgccagcagcagtgagaaggttttaaaatcaaagatgggaaaatcggagaaaattgcccttcc

SEQ ID NO: 140218 - DNA, 98 bp, Homo sapiens
gcagtttccccagagctcctcaagaataacggaagggaggggaaggggaggagttacagcccggccagttggagttgtagtaccacgagggacgccaa

SEQ ID NO: 140219 - DNA, 82 bp, Homo sapiens
tgttacaagtcctgaccaaagcagtcaagcagtgtttggccagcgcttggatgagactgtggcctatgaacagaaattcggc

SEQ ID NO: 140220 - DNA, 97 bp, Homo sapiens
agcgaggaggagatgaataagtgggttcgttgtatttgtgacatctgtgggtttaatccaacagaagaagtttgtatctacttgaacaagaatggca

SEQ ID NO: 140221 - DNA, 80 bp, Homo sapiens
gccagggaaccctggtcaccgtctcctcagttccagatttcggaaggttcacgagtgttgccgacacgccctcccaactg

SEQ ID NO: 140222 - DNA, 100 bp, Homo sapiens
ttgtacagagatgtgatgttggagaactatagcaatctggttttcttggaagacttgcactatctgccagatgctgcttcctaaccagtgcagttatgca

SEQ ID NO: 140223 - DNA, 137 bp, Homo sapiens
cgccggggccgccatggagcccgactcggtgattgaggacaagaccatcgagctcatggttgtgaactaaaggccgacaaagattatcactttaaggtggataatgatgaaaatgagcaccagttatctttaagaac

SEQ ID NO: 140224 - DNA, 97 bp, Homo sapiens
atggctaaattacatattccagtaatggtggatgaagttgttcattgtttgtcaccacaaaaaggacaggttgctatcaagatcatagataagaccc

SEQ ID NO: 140225 - DNA, 75 bp, Homo sapiens
acgtcatacttggaaatggctgcaggttcagatgataacattcagcaatatctgatgaccaataatgtaccggag

SEQ ID NO: 140226 - DNA, 76 bp, Homo sapiens
ttgtttctgccagtgaaaaccaccaaaacaatccagctgttccctcagtgtgccggtccaacaaaagcccttgggt

SEQ ID NO: 140227 - DNA, 75 bp, Homo sapiens
aaatgcctgcaatggactagctctgctacagaacaccaaggaggctgaaccgtctgagcccagaagtgctgaggt

SEQ ID NO: 140228 - DNA, 78 bp, Homo sapiens
tccacgcacctggacgacgcccggcgccagcacatcgcaggatgctccagaccttgtatgattacttctggtgggaac

SEQ ID NO: 140229 - DNA, 100 bp, Homo sapiens
tgtcttttgaaaggtgtactgcaaggaacaaaatgtttgtaaattctccttttaccaagatcttgcttctgaaatatctacctgggatggagtgatagta

SEQ ID NO: 140230 - DNA, 100 bp, Homo sapiens
aaaaaacctgagaacttcctgatctctctcgctgtgagacatgtctgagactcctgctcagtgtagcattaaggtgctgtgctggccattggtgacccaa

SEQ ID NO: 140231 - DNA, 50 bp, Homo sapiens
tggtcttgaaacacaaatggtttttgctctcttggcctcctagtttctac

SEQ ID NO: 140232 - DNA, 76 bp, Homo sapiens
tccatcaccttcatggaccaacataactttagtccaagatcacatgccaaaatttaattcaatttcaattagtgga

SEQ ID NO: 140233 - DNA, 100 bp, Homo sapiens
gagtctgcgaaggccgggacccggttccccggcccacagtgggggtgtgcaaacccgagagaactggtggctttgaagcgtatgttgaatttcaatgtgc

SEQ ID NO: 140234 - DNA, 50 bp, Homo sapiens
cgacatccctgaagccgggaaatgacggagtcttcgctgtgtcgccaggc

SEQ ID NO: 140235 - DNA, 96 bp, Homo sapiens
atcatgcagtgttaagttatgctgtggaggaagaacatgcatatttgggtccaactgtgaagccagatgataaggagaacgtatttaccgggcagt

SEQ ID NO: 140236 - DNA, 98 bp, Homo sapiens
cgagtctcaaaggtgttcctggatttgggaatctaagggaggaaattatcaactgtgcacaaggaaaaaaatagatatgtgaaaggttcacgtaaatt

SEQ ID NO: 140237 - DNA, 80 bp, Homo sapiens
gccccacaacatctacctgcactcggccctggtcaagagagtccgttttacgtcctcatcgagacttcaggctccaacgc

SEQ ID NO: 140238 - DNA, 98 bp, Homo sapiens
cctgagttccgtgtgcagttccaggacatgtgtgcaaccattggcgtggatccgctggcctgtttgcaatgagaattccctcttcaaaagtctttctc

SEQ ID NO: 140239 - DNA, 50 bp, Homo sapiens
ttggaaagcagtttttaagacaacttaaagctgaagaggagctttccatt

SEQ ID NO: 140240 - DNA, 98 bp, Homo sapiens
ttccacatcacgttggtgagccttgaagctcaacatcgtattgcacctggctacaacttgattcgcctttgccagtctcatctcgtgtctgctttgtt

SEQ ID NO: 140241 - DNA, 100 bp, Homo sapiens
aattcctgaaaccactcaagagtcataggattagatgatccaagtcaccaagaaattactgtctcaagtgatacggaattctcctactttcaaatcattt

SEQ ID NO: 140242 - DNA, 89 bp, Homo sapiens
cagaaaattgtggaggttttgttggcctcattgctacgatttcagagtaccctggtaatagctgagcatgcaaatgattccctagcacc

SEQ ID NO: 140243 - DNA, 100 bp, Homo sapiens
ctactgcactgtcctggtctgctccaaagagatctcagcgctcaccgacttctctgaatcagcatgattcttcagaggctcttcaggttctcctctgtca

SEQ ID NO: 140244 - DNA, 74 bp, Homo sapiens
caagatcaagaccggcgtggtgaagcgatgatagtatttctgctgcaagtacttctgatgttcaagatcgcctg

SEQ ID NO: 140245 - DNA, 90 bp, Homo sapiens
ctgaagcatcactgtaacaacagacctgcttggactgtaagaaaaatttttgcatgacctgttcgagccaagtagggaatgggccccgcc

SEQ ID NO: 140246 - DNA, 111 bp, Homo sapiens
gcagctcaatgagaaaatctccctgctccgcagcgacatcaccaagctggaggtggacgccatcgtcaacgccggtctctaattaacagaagatggcaaagcccagccaca

SEQ ID NO: 140247 - DNA, 83 bp, Homo sapiens
ccaccatctccatcacccaccaacaacaccacaataatccacagccaagggagaatgctggagaaccagactcctggagcagt

SEQ ID NO: 140248 - DNA, 83 bp, Homo sapiens
tcacctctcaccgcgcatgtttggagtttggtgccctggttgtcagatgttggaaagcagtaggacggaacatactcttcgtg

SEQ ID NO: 140249 - DNA, 50 bp, Homo sapiens
cctgctttgattcattgaaacctgattacatcaaccccagagccgtgcag

SEQ ID NO: 140250 - DNA, 100 bp, Homo sapiens
gggttaatgacatagtatctttaaactacacaaaagtggaacagctttgttcagaacacagatatgtagaactcttcttgaattctacagcaggagcaag

SEQ ID NO: 140251 - DNA, 100 bp, Homo sapiens
actggaggagtcccgctcgaagctaggccaaagatgaagaggaagcctttctggattggagtgatgatgatgatgatgatgatgatggatttgatccaag

SEQ ID NO: 140252 - DNA, 100 bp, Homo sapiens
aacttcctcatcaccaacgatgaggcatacgctgaggagtttggcaacgagacgtggggcgtaacaaaggcagaaccaccccagtgcacctccctggcct

SEQ ID NO: 140253 - DNA, 100 bp, Homo sapiens
ctttcacctataaatatataccaagataatttcagataagaacaccttccaccatgaccacctcagcaagttcccacttaaataaaggcatcaagcaggt

SEQ ID NO: 140254 - DNA, 100 bp, Homo sapiens
ttatggtgcagagattgtctcggctcttgagtacttgcactcgcgggacgtggtataccgcgacatcaagggcattgcctcagccaagacctactatcgg

SEQ ID NO: 140255 - DNA, 101 bp, Homo sapiens
tcaacgtggtcgagtttcaccccaacgagtacctcctggcctccggcagctctgacaggacttggctctgccccaggcccctgccggctgggcctttgctg

SEQ ID NO: 140256 - DNA, 100 bp, Homo sapiens
ttgtcttagcagttctcgctgaccgcgctagctggtttattcagtcaccatgaagctgctgctgctgcacccggccttccagagctgcctcctgctgacc

SEQ ID NO: 140257 - DNA, 98 bp, Homo sapiens
gccgcccccccagacaagatggacaccgcggaggaagctgtggacgtggctggaggagctgcagaaggagctgctggacgacgtgtatgccgagtcgg

SEQ ID NO: 140258 - DNA, 102 bp, Homo sapiens
caagggcgcccttcccctggatacggtcactttctacaaggccctggagagtgaatttgtttcctgccagcttcaccaatggattgatctcatttttggcta

SEQ ID NO: 140259 - DNA, 101 bp, Homo sapiens
gagattgaaacccagacagaggggagcacagagaaagagaatgatgaagagaaaggcccggagactgtaaggagagctgctttgagagaattgtgtcaagg

SEQ ID NO: 140260 - DNA, 100 bp, Homo sapiens
gcagacccagtccctgagagagctcatctcagatctggagcatcggctgcaggggtcagtgatggagctgcttcagcctgattcggactccaccaaacac

SEQ ID NO: 140261 - DNA, 75 bp, Homo sapiens
ggcgaaggcgggcggcagaggcgatcagggagtggagcttggtttcgggatctcggtgctgcagacggcgagacc

SEQ ID NO: 140262 - DNA, 82 bp, Homo sapiens
gctttcccgagaccgtcctggcgcgatgcgtcaagtacactgaaattcatcctgagatgagagaagaagaagttggatggga

SEQ ID NO: 140263 - DNA, 100 bp, Homo sapiens
aaaaggaagacaagaagatgcggcagccctacagactacttcaggaagcccaggaagaagatggcatggcttcaggatgagttagagaaaggtgaacggg

SEQ ID NO: 140264 - DNA, 98 bp, Homo sapiens
gttccctctcctcccaagtgatcagaacactaccgttcaagaggatgctcacttcaaagctttcttccagaaactcagccacctgtgacaaatttgag

SEQ ID NO: 140265 - DNA, 74 bp, Homo sapiens
tgaggcaatgatcactgacttggaagttcgaagcattcagcaaacaatggcaaggcagagccaccagaaacgta

SEQ ID NO: 140266 - DNA, 99 bp, Homo sapiens
tgctgccatcagaaatggatctggacgcatgataacatcataagataaagtcctgtttatgaccacagctgtagatttggtaataacagaagtacagga

SEQ ID NO: 140267 - DNA, 100 bp, Homo sapiens
aacagtaaccgggcttgtgagagggctctgcagtataaactaggagacaagatccatggattcaccgtaaaccaggctccagatggaccctgggaaggac

SEQ ID NO: 140268 - DNA, 74 bp, Homo sapiens
cagacagaacagttaatcctcaatttaagcctgatctaacccctagaaacagaaatgatcctagataattgata

SEQ ID NO: 140269 - DNA, 90 bp, Homo sapiens
cgtcgccggcctggaggggcgaagaggacgagggggccaaggcttcctccggggctcctacccagagattctacccagtgaaactcccac

SEQ ID NO: 140270 - DNA, 51 bp, Homo sapiens
agaaaggaaccagtgtctcccagaaggtgcaggaactgcagggccagcggc

SEQ ID NO: 140271 - DNA, 82 bp, Homo sapiens
ccgagtcccagtgtagatccatatgatacatatggtagatgacattaatgctgataagaatatctcttctgcacagattgtt

SEQ ID NO: 140272 - DNA, 83 bp, Homo sapiens
cagaatttgaacgacagtacttatctggtgaattagaagtggagctgacaccacagttgaatccttggcctgaatatatttac

SEQ ID NO: 140273 - DNA, 100 bp, Homo sapiens
gtccagcccaggaaaatggagagctgcgccttcctgcactgaagcacccctgcagggctcagtgaccaaggaagaatcagagaaagagcaaaccgccgtg

SEQ ID NO: 140274 - DNA, 75 bp, Homo sapiens
gatccatttgtatttattcctgaagatgacccattatttccacctattgactgaaaatgtgtgtctgacatgcaa

SEQ ID NO: 140275 - DNA, 111 bp, Homo sapiens
gaaagatcctactggacatgtcagtgtcctttcacacccatgtgaaagagggtgtggatgaatggaacatagctcgcctcaatacagtcttggatgtggttgaagaagagt

SEQ ID NO: 140276 - DNA, 75 bp, Homo sapiens
cgagtacatctccattgccctgcgcatcgatgaggatgagaaaggacaaaactttcggtttgaagaataagaaag

SEQ ID NO: 140277 - DNA, 51 bp, Homo sapiens
gaacacatgtacatctgatcagttccagatatatttttgccatcatggatc

SEQ ID NO: 140278 - DNA, 108 bp, Homo sapiens
cagcccgcgcacagctgctcccttcgccttcgccctttccacctcgcggcagttcgggctttgttcgcgggggtcacagctctcatggctgcagctagcgtgaccccc

SEQ ID NO: 140279 - DNA, 100 bp, Homo sapiens
tggaactgcatttcttgccctagtgacttaactgccgaaggaaaatgtcactgtcccattggccatattttagcaatgccctgccctaaggaagacactc

SEQ ID NO: 140280 - DNA, 83 bp, Homo sapiens
tttatcgactctcatcaaaaagaaacctggttctaaggacatatggaattggctatggataattcatatgctttcaatcaacg

SEQ ID NO: 140281 - DNA, 100 bp, Homo sapiens
ggcaggccttgtggcccagcacccgcctgccaggcgctcgggggccgaactggccctggactacctctgcaggatcatccagcagctcgtcaacggcatc

SEQ ID NO: 140282 - DNA, 82 bp, Homo sapiens
agggaaccctggtcaccgtctcctcagatgttcctgcatcggaaagtggctgtgaggtctcagagtacagcgtggagatgac

SEQ ID NO: 140283 - DNA, 98 bp, Homo sapiens
cacttctgctgcactgctttcagcatgcaaggaatgagtcagctacacttttacaggttctatttggagtttggatgtcttcgaaaagcattcagaca

SEQ ID NO: 140284 - DNA, 99 bp, Homo sapiens
ttttaagcgacgtgtatccattcagctgtaaggctgtggcagggtacaagtgcactggatataggtccccttcccctgagcccatctacaatagcgagg

SEQ ID NO: 140285 - DNA, 100 bp, Homo sapiens
gataaagatgatgatatccttctcaaccttgtgggatgtgaaaactctgttactgaagcgcggagacccacatcaagggcttcacactgaacgatgctgc

SEQ ID NO: 140286 - DNA, 100 bp, Homo sapiens
gcctctgcctcccagaaactcaggccttcatgccccgaggactagcagacaaacaaggacctgaggaatgtgatgcagttgctcttttaagtctcatcaa

SEQ ID NO: 140287 - DNA, 98 bp, Homo sapiens
gaagtacgcagacgccggccatgtgtgccacctgtgccatccaaactgcacctacgggttctttatagagttggaagcaagacatcagaataatatct

SEQ ID NO: 140288 - DNA, 74 bp, Homo sapiens
ccagatcagtgacaaccatgctggtttgcttcagactgcatcatggcagaacaggatgtggaaaacgatctttt

SEQ ID NO: 140289 - DNA, 100 bp, Homo sapiens
cttggtggaggggtggtgaccatcgaaaggagcaagagcaagatcaccgtgacatccgaggtgcctttctccaaaagagcaacttatgactctcatctct

SEQ ID NO: 140290 - DNA, 82 bp, Homo sapiens
caggaaagccccgtggctatgccttcatcgagtacgaacacgagcgagacatgcactcccgtggaccgggagcccgtggacc

SEQ ID NO: 140291 - DNA, 104 bp, Homo sapiens
aaaaggacgcaaagttctccggcgaggttgttggaagaggagcctttggagttgtttgcaaagctaagtggagagcaaaagatgttgctattaaacaaatagaa

SEQ ID NO: 140292 - DNA, 98 bp, Homo sapiens
cttcgcggacccagtggatgtaaaccccttccagggaacccgagcgtcatgttagggtgaagcagaggacctcagtgctgaacatgctaaggaggttg

SEQ ID NO: 140293 - DNA, 75 bp, Homo sapiens
ctcagagatccaagtgcgcgccctggcgggtccggaccaaggatctcactggcatcgaatctatggatcagtgtc

SEQ ID NO: 140294 - DNA, 51 bp, Homo sapiens
gttggagaagcaggctggcggaaacccttgactcggagccgtgggtcccga

SEQ ID NO: 140295 - DNA, 100 bp, Homo sapiens
gctcggggtgcggcggtggcgaccggcaggcgaggaggcccgcgggcagcagaggttttgtcagctatgattagtgtgctgttggtgtatatacttatgg

SEQ ID NO: 140296 - DNA, 75 bp, Homo sapiens
gacattttggaaggagcgatcacatcagcagcagatcagatctattccagaggggagcttcaccacttcattgac

SEQ ID NO: 140297 - DNA, 90 bp, Homo sapiens
caagtatatgcaaccttctttgaaatttatagtggaaagggatctgctggaggaaggaaaggccacggttccctgcctggcagaaaaact

SEQ ID NO: 140298 - DNA, 83 bp, Homo sapiens
ggaaagaagcgaccgcggcggctggggaaggtgtggctcattgactttaatccatttggtgaagtcacagattcactgctgtt

SEQ ID NO: 140299 - DNA, 119 bp, Homo sapiens
gatggcaacggccaacttcggcaagatccagatcgggatttacgtggagatcaagcgcagcgatgggatcgcttacacctgagacgaactacagaacagcacgtaccagaggtggaagt

SEQ ID NO: 140300 - DNA, 97 bp, Homo sapiens
tgtccagttactctaacaagtctggaggtgtaccttgaaagacttttaacatacgcagagatagatatctgtccggccaactggaagcggattgttt

SEQ ID NO: 140301 - DNA, 82 bp, Homo sapiens
cgcgaggcaggagagaggaggaggagtgcggcgcggcggccccgggaccaaggaggtggaagttaaacgagctgagcctcgg

SEQ ID NO: 140302 - DNA, 99 bp, Homo sapiens
atcaacaacctcctctactaccaaaccaactaccttctctgcttcggcatcggcctcgctctcgccggggatgtggatgagactatcagttggattaag

SEQ ID NO: 140303 - DNA, 75 bp, Homo sapiens
cgcgggtgcaggagcaggacttacggcagtgggggctgacagattgtaaaccatggctgtgtggatacaagctca

SEQ ID NO: 140304 - DNA, 98 bp, Homo sapiens
tgcgaatgagagtcttcggcctgtgctttgtgaggtcagagatgtcatcatcgctgcaagcgttgcaggaatgggcttggcagccatgagccttattg

SEQ ID NO: 140305 - DNA, 90 bp, Homo sapiens
gctgaacttaaaaagcagtctaaacctgtgaccacccctgaagaaattgcacagtgtttaaccagggggaagaaggtacctcctggtaca

SEQ ID NO: 140306 - DNA, 100 bp, Homo sapiens
tagaaactttaactacagttttagctccctgattgcctgtgtggcaaacagtgatatcttcagcgaaagtgaaaccaggctcatcagcatcggatcttcc

SEQ ID NO: 140307 - DNA, 90 bp, Homo sapiens
ctagtcccgttgcaggtgaaatgcaaagactgtgaggagagtcatgagggtcctgtgtggcaagtggcctgggctcaccccatgtacggc

SEQ ID NO: 140308 - DNA, 50 bp, Homo sapiens
gtcagcatcgatcaattattgtccctgctatgtggatatttggtagcaat

SEQ ID NO: 140309 - DNA, 130 bp, Homo sapiens
ctgctattccggcgcctccactccgtcccccgcgggtctgctctgtgtgccatggacggacaatgcagatcttcgtgaagactctgactggtaagaccatcaccctcgaggttgagcccagtgacaccat

SEQ ID NO: 140310 - DNA, 90 bp, Homo sapiens
cggagtgaaaagaaggcacggaaggagtctactcttcatcttgtgttgagacttcgtggtggtgctaagaaaaggaagaagaagtcttac

SEQ ID NO: 140311 - DNA, 100 bp, Homo sapiens
cgtgggcaagactagcctggtggagcgctacgtgcacgaccgctttctggtggggccttatcagaacgtcatcctgtacagttctacagcatgaataggc

SEQ ID NO: 140312 - DNA, 74 bp, Homo sapiens
gcggccaggtccctgctgaatcacacgccgccatccgggaggcccagggaagaaaaactgattgcttatcaacg

SEQ ID NO: 140313 - DNA, 100 bp, Homo sapiens
ggcgcctggagggggatctaccatctcggactcccgacccgccgccggctccggccgcgtttcccgggtaaaggggcaaatctgagtagcctccaagagg

SEQ ID NO: 140314 - DNA, 87 bp, Homo sapiens
gggacggctctgtaggaaggaacttggttccccctccctcagcttccgccccaaaagggtggctttgtccactatggtgaagtgacc

SEQ ID NO: 140315 - DNA, 75 bp, Homo sapiens
accccagatgtctgacagccctgtgtgacaccaagataagtaacggatgtgtcttggtgagctagtcattaaccc

SEQ ID NO: 140316 - DNA, 97 bp, Homo sapiens
tgttttgtccagggcagcatctctggtgcatgctgatgacgaaaaacgtcactacaggaaaagatatcttcattaaagtgcaacagcacactgagag

SEQ ID NO: 140317 - DNA, 99 bp, Homo sapiens
ctgagcaaaggcacgggcagccggaaggacaccaagatgcggatccgggcctttccggtctgtaaacagatttggctaggattatttgatgatagatct

SEQ ID NO: 140318 - DNA, 98 bp, Homo sapiens
aggtgcgcgagctggtggacaaagccatgaatgtcagcatcatcattcaaagaacaagaaacattctaagaaatctaaaaaacatcataggaaacgtt

SEQ ID NO: 140319 - DNA, 100 bp, Homo sapiens
tcctccttcttcctcaactatctcgctgacacgcagggatatgggattagaactgtttagaacccatattattagtgataaaatggttcagagtaaaacc

SEQ ID NO: 140320 - DNA, 95 bp, Homo sapiens
ctgacgaggaagctggtggtgttgatcactcctcaggtgtccagcctgctcaggtgtcatggagaaactccagctgggcccagagattctgcagc

SEQ ID NO: 140321 - DNA, 101 bp, Homo sapiens
caaaatgtgaaaatgaaggtgaagtcctccagattccatttatcacagacaacccttgcataatgtgtgtctgcttgatattgaaatggattccaggcgtg

SEQ ID NO: 140322 - DNA, 80 bp, Homo sapiens
acagagccatgaagaacttggagaggttcaaaccttgtactactcagctgatcacaagctgcttgatgggaacctactag

SEQ ID NO: 140323 - DNA, 100 bp, Homo sapiens
gaagaaagctatctagggacgagatctagaatcaactgagagagatgcttaaaaatcaccagttactttaatgactttgcccgaagtttttacatacaaa

SEQ ID NO: 140324 - DNA, 100 bp, Homo sapiens
tcgtggacaactacatccgctcccgccgagacatccgctccttgcccgagaacatccagtttgatgtttactacaaggaaagccatttaagaagttcctg

SEQ ID NO: 140325 - DNA, 87 bp, Homo sapiens
ttcctaccatctaaaatacgaaggtttctggctgggtgaccaagaatatggcccaggtgaccaaagccctggacaaggccctgagca

SEQ ID NO: 140326 - DNA, 97 bp, Homo sapiens
gctaggactcatgactactgaggattctgtggcagtgcccagatccttgccagcacattacagaatatttttgttgaaccttcttgagaattcagag

SEQ ID NO: 140327 - DNA, 74 bp, Homo sapiens
tagagctgaaggaagagtgcaaagactttgtggacaatgttaaaaagtgctctgggtgatcggattaaagaaaa

SEQ ID NO: 140328 - DNA, 90 bp, Homo sapiens
agatcaccgtgacatccgaggtgcctttctccaaaaggtggctggcctacgtcctcctgctgctcctggagctgctggtctgcctcttca

SEQ ID NO: 140329 - DNA, 80 bp, Homo sapiens
tttcattgttccactggacgctcatcagagggaagatctttttcctcaattgttcacagatgccctgacttatgttcaca

SEQ ID NO: 140330 - DNA, 98 bp, Homo sapiens
aaagactgagtgagaacgaaattatatgtaatgctctgcagagacagaaagagagattggaaggagaaaatgatgtgcagttttgacacacttctgtc

SEQ ID NO: 140331 - DNA, 100 bp, Homo sapiens
aggacactcactgtcccacagggagctcaaagagtgggccagctttgccagcgccgagtaccaggaggccctcagcaggatcacctcggtcgtccagcag

SEQ ID NO: 140332 - DNA, 51 bp, Homo sapiens
ccgttggctatagcaaatgccccaggctccatctactctttgaagcttctg

SEQ ID NO: 140333 - DNA, 100 bp, Homo sapiens
cttagttcccaacttcaccttcaacttgggcttctcgggcaagttctatcatactgatatattgggttgggcccatcataggagctgtcctcgctggtgg

SEQ ID NO: 140334 - DNA, 98 bp, Homo sapiens
cgtctacagccccggggagccgttggctgggaccgtgcgcgtgcgcctgggggcaccgctgccgttccgagaccgagacatgggtgcccggcaccgcg

SEQ ID NO: 140335 - DNA, 100 bp, Homo sapiens
caggagccgccgccgccatatcaggtcaaaatgcagatcttcgtgaaaacccttaccggcaagaccatcacccttgaggtggagcccagtgacaccatcg

SEQ ID NO: 140336 - DNA, 75 bp, Homo sapiens
gaaatgttcaaaggaacaacatctttaccatctcatctcaagaatggaggttcctggtccagaactttacacaga

SEQ ID NO: 140337 - DNA, 97 bp, Homo sapiens
cggcgccacgagagcgggcagcggaggaggctggcagtgatggtgaaagcataggaaactgccccttttcccagaggctcttcatgattctttggct

SEQ ID NO: 140338 - DNA, 97 bp, Homo sapiens
aagctcttcagcaagaggaccgggctgggcgcgcccggccgcgacgcccgggacccagattgcgggttcaggactcctccgtcttgctcatgactgg

SEQ ID NO: 140339 - DNA, 82 bp, Homo sapiens
gctcctacgaaagaaagctcatcgaggtgaatgaaaactttgccattgatttgatagcagagcagcccgtgagcgaggtgga

SEQ ID NO: 140340 - DNA, 82 bp, Homo sapiens
cgccagcaaagaagacgtcatcttcttctaaaagggccgtgactcaaggttttaaaatcaaagatgggaaaatcggagaaaa

SEQ ID NO: 140341 - DNA, 106 bp, Homo sapiens
gaacggtggcttttctaaaccaatttgtggtgcacactgtacagttcctcaaccgcttttctacagtttgtgaggagctggtaatgaatcttgccctcagcctcag

SEQ ID NO: 140342 - DNA, 90 bp, Homo sapiens
gccgacggcctgtccggcactgctgaagaacccagtgacttgattgtaaaaatttacagagcggaatcatatgctggtctccaagagttt

SEQ ID NO: 140343 - DNA, 83 bp, Homo sapiens
ctcgcggcgagcggacggggtcgagtcagtgcgttcgcgcgaggtaactaggatttctacctcaaccgcgagacctatgcaag

SEQ ID NO: 140344 - DNA, 96 bp, Homo sapiens
gaagaatgtggctaccagcgaaggaagttgaagaccatgtggcgtttctaataacagttccaactgccctggcgattttctttgcgatatttatcc

SEQ ID NO: 140345 - DNA, 100 bp, Homo sapiens
gtgtggggacggtgctggccagcagaccgcacacgctagatggccgaaacgatgccaaagaagaccatgaaagaacacatcaaatggtcttactgagaaa

SEQ ID NO: 140346 - DNA, 101 bp, Homo sapiens
agcctgtgcaacagcacatagccaacataaggtgtcatagagacgtcagatcgactggaccgtgaatcgacctcccattattggctaacagtctttgcaac

SEQ ID NO: 140347 - DNA, 100 bp, Homo sapiens
ctttaccccattgccattttcatcaagcccaagtccattgaagcccttatgtggcgacatgtctaagaatgtgagccagtcacagatggcaaaattgaac

SEQ ID NO: 140348 - DNA, 76 bp, Homo sapiens
tatacagggatgtgatgctggagaactatagccacctggtttctcttgacatactttgaagacaaccctagggacc

SEQ ID NO: 140349 - DNA, 83 bp, Homo sapiens
tcttgtttgtggatcgctgtgatcgtcacttgatctattccagaggggagcttcaccacttcattgacggctttaatgaagag

SEQ ID NO: 140350 - DNA, 100 bp, Homo sapiens
atgttcatgaagattcaataacagttgcatttgaaaacaagaatctgtcttggaggacatcagaaggtgaattttccaagttcttggacaacctagctgt

SEQ ID NO: 140351 - DNA, 50 bp, Homo sapiens
ctattacccccagtatctgcaagccaagctccagaaacatgacaaggagg

SEQ ID NO: 140352 - DNA, 75 bp, Homo sapiens
aaggaacgcgacggcggcgcccgcaggttaatccctatatcctgaagaagaacatgatcctcatgacaaatcatt

SEQ ID NO: 140353 - DNA, 75 bp, Homo sapiens
ctgcccctcttcaacacctggacaccttgttagatggaacctacaagcaggaggtgcttgaactcgctttctcca

SEQ ID NO: 140354 - DNA, 75 bp, Homo sapiens
cagtgttctcaccaaagaggactttagacttgcagataatatcgtctactgcattatttttggctgcaaaagtgg

SEQ ID NO: 140355 - DNA, 100 bp, Homo sapiens
cggaaccttccaccatcaagggaccgcagggccgggctggcgcccatgcggctctacacgctctccaagcgccactttgtcctcgtgtttgtcgtcttct

SEQ ID NO: 140356 - DNA, 100 bp, Homo sapiens
ggtcaccgaagtgctgggggcgctggaggccaagaccggggtggagaagcggtatctggctgcagttccagggtctccctccactgctgtagtaacccgg

SEQ ID NO: 140357 - DNA, 75 bp, Homo sapiens
gtttgccatggaccccaggaatggttacatggagccccactaccatgtcaagccctccaacatcctagtcaactc

SEQ ID NO: 140358 - DNA, 107 bp, Homo sapiens
gtcgacatgagtgatgtggaggaaaacaacttcgagggcagagtataagtgtgctagcggagtgtctagattgtcctgaattgaaagcaactgcagatgactttatt

SEQ ID NO: 140359 - DNA, 80 bp, Homo sapiens
cgcccagagtccgatggcggcggcactgagggccccgacccagacaggggcaagtgtccgagtggtgaatcagctactta

SEQ ID NO: 140360 - DNA, 100 bp, Homo sapiens
ctcatcatcccgtcagagctgaggtacttcgtgaagtgggacacagcaggccaggaaagatttcgaacaatcacctccagttattacagaggagcccatg

SEQ ID NO: 140361 - DNA, 80 bp, Homo sapiens
agcctcctgcgccggccttgcctcgggaagatgagaatgtgcctactgctcctgatcctccaagtcaacatttacgtggg

SEQ ID NO: 140362 - DNA, 75 bp, Homo sapiens
agcaccgccgaggactccagcacaccgaggggtcacggagactcaccagttggcagaattaaatgagaagaagaa

SEQ ID NO: 140363 - DNA, 83 bp, Homo sapiens
ctgccccatgtgccagaaggagttcgcccccagacaatgcagatcttcgtgaagactctgactggtaagaccatcaccctcga

SEQ ID NO: 140364 - DNA, 74 bp, Homo sapiens
cccagcgcggcgcggggctgcggagtcgtccggagccgctgcgcggaagagcctaggctggatgtcttgatcaa

SEQ ID NO: 140365 - DNA, 90 bp, Homo sapiens
cctggggatcgctacggaccttaaaatacccgcaacagccccttcgtcccaagtggtaaataaagatgtcctggacgtttacattgagca

SEQ ID NO: 140366 - DNA, 98 bp, Homo sapiens
gatccacgggttttagaaaaacaagaattacagcagccaacctatgttgccctgagttacataaataggctgctggtggtctacccttggacccagag

SEQ ID NO: 140367 - DNA, 80 bp, Homo sapiens
cctttgccatcactgccattaagaacaccttccaccatgaccacctcagcaagttcccacttaaataaaggcatcaagca

SEQ ID NO: 140368 - DNA, 75 bp, Homo sapiens
agcgagggcaccaccgtcctgctcttccagttcgggatgcccagtgtgccatcataatgtttgatgtaacatcga

SEQ ID NO: 140369 - DNA, 82 bp, Homo sapiens
tatcatcccagcagtggagttcagcccactactctgaaccagaagatgctcatgaagcagcaggaccggctggaggagcgag

SEQ ID NO: 140370 - DNA, 75 bp, Homo sapiens
tgaacccaacctagtgggtgtaatacatcatgaactgcaggggggaaatttgcagtggtgagaaaatgtataaag

SEQ ID NO: 140371 - DNA, 50 bp, Homo sapiens
ttgtcaattccagaatacaaatccaagtggtaagaagttcagaagcaagc

SEQ ID NO: 140372 - DNA, 75 bp, Homo sapiens
ggggccctctcagcaagaacgggaacaaaactctggctaactatatgtcagaaagcatcagcttttctcgatgga

SEQ ID NO: 140373 - DNA, 100 bp, Homo sapiens
gcggccccggcgccggcaaggggacccagtgcgcccgcatcgtcgagaggtcctgctgtactagccaccaaagcagctgctggtactaagaaatatgatc

SEQ ID NO: 140374 - DNA, 82 bp, Homo sapiens
gtgaactgagggtatgggacatagcttatctgcaagagtaacaatttggacaagacagcaaatgctattgtcgaagttttct

SEQ ID NO: 140375 - DNA, 100 bp, Homo sapiens
actacccactttgtgcagtacaggcctttggcatcggtctttctagctttgacagtccaacgagcgctcctccaagcggagccttggagggcacggccgg

SEQ ID NO: 140376 - DNA, 82 bp, Homo sapiens
caggacccgaagcctaaattccaggaggatgaaggatttgggggcagagcacttggcaggtcatgaaggggtccaacttctc

SEQ ID NO: 140377 - DNA, 74 bp, Homo sapiens
cctcctccttggtcgccgcgtccttggctggcgtaggctgtggccaggccagctgggctcggggagcgccagcc

SEQ ID NO: 140378 - DNA, 100 bp, Homo sapiens
cctccccgcagtgaatcccagagaccaagagatggcagctgggttctttactgctggatcgcagagtctgaagaagaagtagaggaacctgaagaaagac

SEQ ID NO: 140379 - DNA, 83 bp, Homo sapiens
caccaacaagcgcaagagagacgaagataacgaaggaggcccaacttcattcaataaggagcctgacggatttatcccagacg

SEQ ID NO: 140380 - DNA, 75 bp, Homo sapiens
aagaagtcttaccctcaggtcaaagcagaggttgaaaagataattgcagttgcctgggacatttttcagcccctt

SEQ ID NO: 140381 - DNA, 75 bp, Homo sapiens
aggcactggaaaaatatggcaaagacttcaatgacatacggcaagattttatggaatttcactcttgttgcccag

SEQ ID NO: 140382 - DNA, 82 bp, Homo sapiens
ccccagatccatttacactttacactggatgaaaaagaaagtcggcgtctgttccaacagatcctttctggtgtggattatt

SEQ ID NO: 140383 - DNA, 75 bp, Homo sapiens
tagcaaacttcatgcagctggtggaactagatgtgtctcgaaatgcatccagagctgctgttggcggattgtacc

SEQ ID NO: 140384 - DNA, 90 bp, Homo sapiens
tcctactggacatgtcagtgtcctttcacacccatgtgaaagagggagagcttatggatggagaccaaacatccagatctggagtgccgg

SEQ ID NO: 140385 - DNA, 100 bp, Homo sapiens
ttctaagagtttggcgagtcagtgactgaagcgcccgtccattccaagagtgcctggtgaagaatgtgatgggatcactagcatgtctgcggagagcggc

SEQ ID NO: 140386 - DNA, 100 bp, Homo sapiens
ggagagcggcctgcgggcgatcgggccgaggtacggttcctggagcagcagaacaagatgctggagaccaagtggagcctcctgcagcagcagaagacgg

SEQ ID NO: 140387 - DNA, 100 bp, Homo sapiens
gacagagatgctgaaccagacggacccatcatttaagaggtgcagtagacattgttgcaatcatgatcggcaatctgaaaggcacaaaaattctgcaatc

SEQ ID NO: 140388 - DNA, 76 bp, Homo sapiens
agttcaaggaggtgctgaagagcgaggagatgaagaagatgactttatgtgtaagaaggcggcctctaaatcaaaa

SEQ ID NO: 140389 - DNA, 76 bp, Homo sapiens
agcacggcgagcagtctcaggcctttagtgatgatggtgggaccattcagttgcaggaaaacaagcttaacacgcc

SEQ ID NO: 140390 - DNA, 75 bp, Homo sapiens
cacactctttcaagagaagcttccttgattttatcatgtgggcaacctgctgcaactggttctgcctggatggac

SEQ ID NO: 140391 - DNA, 139 bp, Homo sapiens
caactggcagaaggattgctttctcattatttgccagatctgcagagatcaaaacaagccctccaggaactcacagctacagagacttctgaagtggagagtctgcgacctcctcggttcttcaatgaagatggagtta

SEQ ID NO: 140392 - DNA, 120 bp, Homo sapiens
gttattttaaagcagctgtcagtgacttggacaaactccttgatgattttgaacagaacccaggagccagatgaccaagatgctccagatgaacatgagtcgcctccacctgaagatgcc

SEQ ID NO: 140393 - DNA, 75 bp, Homo sapiens
aggacatcaatgagcaagatgtttgtgaaggcatcaactgtgaaatctgtgttagaattgattcctgaattaaat

SEQ ID NO: 140394 - DNA, 51 bp, Homo sapiens
aagagtatattaagcgtcaaatgcctacaggattatgaagcggcacttaag

SEQ ID NO: 140395 - DNA, 87 bp, Homo sapiens
ccaggggatttcccaggtccaccacctgctccatttgcaagattctaacattttcagagaaccttttggaaagaacaagcctacttc

SEQ ID NO: 140396 - DNA, 90 bp, Homo sapiens
cggcactgttagaatctgggactttcttcgttgccatgaggaaagaattctccgagattactacagcccggccatgctgggcctgaagac

SEQ ID NO: 140397 - DNA, 100 bp, Homo sapiens
tacccaagtgctcatcaactgccgcaacaataagaaactcctgggccgcgtgaaggccttcgatagatggtgtcggacggcatgacaggcagcaatcctg

SEQ ID NO: 140398 - DNA, 100 bp, Homo sapiens
agcaaggagaagagccgtgggtaggagatggagaaattccaagttcagattctccaggcttgctatcagaggaagtggagaatgtgccttcctgaatgac

SEQ ID NO: 140399 - DNA, 100 bp, Homo sapiens
gcctattcccctggtgcggcctgctgctggatacccggaccctggaggtgcagagcgactactccaggaatgcccttcaatcagctgggcaccctggcag

SEQ ID NO: 140400 - DNA, 50 bp, Homo sapiens
tgggtatctacctcatctgtgtgggagtgcatccgccccaacccttttcc

SEQ ID NO: 140401 - DNA, 100 bp, Homo sapiens
cagctcgggggccaactctgaggagtccactgcagcaggtaacatctgccggcacctgctgccccgggtccagtgccccgccttgattgtgcacggtgag

SEQ ID NO: 140402 - DNA, 101 bp, Homo sapiens
gaatttgcaagaaataatctcatgggcgatgacatattctgttattatttcaaacttttccagacagtctgcattgagaaaaatgaaacacttggtggaac

SEQ ID NO: 140403 - DNA, 96 bp, Homo sapiens
aaccccgcctcttacagtcacgaggacgatggcctggggcaatttccctgcagagaaggggcagttgtttcgactaccatctgcacttaacaggtg

SEQ ID NO: 140404 - DNA, 75 bp, Homo sapiens
gcagcaccctccgcttcctctcctaggcgacgagacccagtggctaggaccgtataatagacgctggccccaaag

SEQ ID NO: 140405 - DNA, 100 bp, Homo sapiens
cgtggaataggtgtatcaagtaatggtgcaaagcctgaagttaaacaaacacagttctttacatcaatgcttccgtccctggccatctggtctcctgtcc

SEQ ID NO: 140406 - DNA, 101 bp, Homo sapiens
ccaacttctcactgggcttcctgctggccaccaccatggtgcccactgctgcgcttgccaagcctcatgggccccggctctgaccaagaatgacaggagca

SEQ ID NO: 140407 - DNA, 122 bp, Homo sapiens
aagaccgcgcgcagggcctgcagcgggagctggacggcgagcgcgagcggcgcgagaaagcataatcaccagcaacacccgggacaataatacgggggccacctacccccacctgaacttca

SEQ ID NO: 140408 - DNA, 100 bp, Homo sapiens
ggcgtacgccctcatggggaaaatctccccggtgactttcagctgagatctgtatctgtggacctgaatgttgatccctcgcttcagattgacatacctg

SEQ ID NO: 140409 - DNA, 96 bp, Homo sapiens
tggaggctgtggcaatggaacaggcttgagaaacagttgctgtctctgctggccttcatctgtgaagaagttgtatcacaatgtactttatgtgga

SEQ ID NO: 140410 - DNA, 98 bp, Homo sapiens
gaggtgtcactggccccggcctttgccccaatcttgtgtgggcactgaagggggactacaggttcgagaaatcaggaaacccaggcccaacggcaggt

SEQ ID NO: 140411 - DNA, 100 bp, Homo sapiens
cgagggagttcgacacccaagagcagcttgtgcactactatactggcaattgctggagaagattttgcaattgttgcttctgatactcgattgagtgaag

SEQ ID NO: 140412 - DNA, 100 bp, Homo sapiens
ctaacaaccaccagtcagaacagactttatgccaattctcggaagcaagaagcagagtggaaagaaaaggcaataaaggagctagaagaatggtatgcaa

SEQ ID NO: 140413 - DNA, 101 bp, Homo sapiens
caaaggggaggttacgcagcaaaccatccagaagatgccatggacaatattaccaggcagaaccaattctacgatacccaagtcatcaaacaagaaaacga

SEQ ID NO: 140414 - DNA, 87 bp, Homo sapiens
gcattggaacttcctgttctgatagcgtggaaggtctgccatcatggatgttctcgcagaagcaaatggcacctttgccttaaacct

SEQ ID NO: 140415 - DNA, 51 bp, Homo sapiens
ggtgggcctctgagatatgccgtttacggtcgttgcagttcgataaggagc

SEQ ID NO: 140416 - DNA, 98 bp, Homo sapiens
aggccgccgcgtgtcgagtccgcgcggggagcgcacgcggggcgggcggcgacaggtctctcaggcagctgcagagcttcaacagtactgtatgcaga

SEQ ID NO: 140417 - DNA, 97 bp, Homo sapiens
gcccggccccagccgccgctgcggagcccgccgggaccccccggagcgcggccacggcgcaggagaattcgcacaaccacggggacggtgcagagga

SEQ ID NO: 140418 - DNA, 78 bp, Homo sapiens
ctccccagccatgtggaacttagagacggggtttcaccatgttagccaggatggtctcaatctcctgacctcgtgatc

SEQ ID NO: 140419 - DNA, 82 bp, Homo sapiens
ctgtctgcaggatttacgcgcacgttggaaccgaagagagctctgttgttgcagtacatcgaggaggccattgagaaactaa

SEQ ID NO: 140420 - DNA, 75 bp, Homo sapiens
aaatggagaatggcatgctggtgacggacagtgcagggaagcaactgcagaggaaactggagcacccatcctaac

SEQ ID NO: 140421 - DNA, 98 bp, Homo sapiens
ttgcggccggcagtttccgtgggtctgtgaagaggtcggcggcccctgcgggcgccagtcagagtgggaataaggtgtcaatcactactaccccattt

SEQ ID NO: 140422 - DNA, 114 bp, Homo sapiens
ctgtactgactctaggaagggctggagttgttttgaatgggcgcccgtaagagaggtgagaagccctaccactgcaactgggacggctgcggctggaagtttgcgcgctcagac

SEQ ID NO: 140423 - DNA, 101 bp, Homo sapiens
cggggatgcgcctgcgcaacaagttcggcggggaagatggcggatgacaagattccgtctctagagcctttgaggtcactcctgacgctgacatggctgtg

SEQ ID NO: 140424 - DNA, 100 bp, Homo sapiens
gatgattactacgacaccggcgaggaacttggcagggacaggagagagtggcaagagtacgtttatcaagcagatgagaatcatccatgggtcaggatac

SEQ ID NO: 140425 - DNA, 95 bp, Homo sapiens
tggataccattgtcaagatccctccacatgtactgagagtgggaaaccacccatcaatgatatgttcacagacctcaaagatggaaggaagctat

SEQ ID NO: 140426 - DNA, 83 bp, Homo sapiens
aaatttcctgcacttcacctggcatgcgaagtccaagattgagaggatccagaatccagatctctggaatagctaccaggcaa

SEQ ID NO: 140427 - DNA, 83 bp, Homo sapiens
ccagagcctcagcaggagcctgttctcatcaccatggcaacaggcacaacgaggccctcttggaggaggcgaagatgatgaac

SEQ ID NO: 140428 - DNA, 90 bp, Homo sapiens
cgagaagcccttactaaacaagaatgccagctgatgaagaccgagaggccgcgacccaacacctttgtcatacgctgcctgcagtggacc

SEQ ID NO: 140429 - DNA, 74 bp, Homo sapiens
ctgatctggcctcatctgttccagggaggtgggattgaatcactttgggaagcagtgacatccaacctgtatca

SEQ ID NO: 140430 - DNA, 50 bp, Homo sapiens
cagatgaggaagtacaactttgagggccaatactcccatttggttttact

SEQ ID NO: 140431 - DNA, 100 bp, Homo sapiens
agatgatgtagacactggactattagatcccaactgggccagtttgaacttgggagccctcatgtgcatcgaatgctcagggatccaccggaatcttggc

SEQ ID NO: 140432 - DNA, 51 bp, Homo sapiens
ctgacgacctgctacaacagaagtggagccgccaccaaaatgcagattttc

SEQ ID NO: 140433 - DNA, 76 bp, Homo sapiens
cggacctcgaccctgagctctatctcagtgtacacggtgctggagaatctggtaaaagcaccattgtgaagcagat

SEQ ID NO: 140434 - DNA, 100 bp, Homo sapiens
tcagaatgtcataaacatcaaccaccaaggaagggatgggcacactggttgttgaagattggaaattcatagcccaggttcttgatcggatgtttctgtg

SEQ ID NO: 140435 - DNA, 99 bp, Homo sapiens
gcaggcagcaccggaggcccaggtctccgtgcagcccaacttccagcaggacaagcctgagcggtgcatccccgttcctgggcgagaccaagcaggaga

SEQ ID NO: 140436 - DNA, 97 bp, Homo sapiens
ttaaatttatgaactcgaaatgaagcggaaagcagatatgcgcgtcagcatactttggcgggtttctagagaggaaggatctccccagctgtcttca

SEQ ID NO: 140437 - DNA, 101 bp, Homo sapiens
aaacctcaggacttgagtaacagcaacatggatccagtttatggaaaaggaaaacttggagaaatccagggacttatcttgggaatgttagatacctttaa

SEQ ID NO: 140438 - DNA, 100 bp, Homo sapiens
atcaggaatgtgtttcactgtgaggcacacagaattctctacatttgtgaaagtcagtttctgaggaatttcatcagtgggtgcctgatagacatcctag

SEQ ID NO: 140439 - DNA, 82 bp, Homo sapiens
ccgcgtccgccgattcctcctccttggtcgccgcgtccttggctggcgtcaaccatgtccaagggacctgcagttggtattg

SEQ ID NO: 140440 - DNA, 100 bp, Homo sapiens
tttcgctcgcgttggaggccgccttttcagaagcggctgcgcacggactgctggagatggtggagtccgtcagatcgaatcatcaatttagttgttggca

SEQ ID NO: 140441 - DNA, 100 bp, Homo sapiens
gcgtccctcgccatggcgcggctcgcggactacttcgtgctggtggcgttcgggccgcacccgcgcgcaaaagctggcaggctgacagaggcggcctcag

SEQ ID NO: 140442 - DNA, 100 bp, Homo sapiens
cgggcagcgtctatatcaccttgaagaagtagccagcagccacccccgcccagccaacacctccccaggcccaagggggacgcggccctgaagatgcggg

SEQ ID NO: 140443 - DNA, 74 bp, Homo sapiens
ctgtgaaagcgggcgttttggaagataccggaagtagagtcacggagagacccttctcaggtgcagccagagag

SEQ ID NO: 140444 - DNA, 74 bp, Homo sapiens
ggaggaggaggaagaggaggagaaggcaaagtttgagaacctctgcaagctcatgaaagaaatcttagataaga

SEQ ID NO: 140445 - DNA, 100 bp, Homo sapiens
ctgtaaatagtggtgtaacccgaataagctgtcagactttgataggttatcaactggcaaacatctcttcacattccaccacaagctaaactcagtcctg

SEQ ID NO: 140446 - DNA, 100 bp, Homo sapiens
cggcgaccgctgccgaagcatgaagaaggggtaaggcgtgagcccccaagatttcacggaacttggcattagaattcctcgaccactaggacagggacca

SEQ ID NO: 140447 - DNA, 90 bp, Homo sapiens
tgccatctctaacctaccagctgccactttccaggaaggagtcaagactgagaacaacgatcatattaatttgaaggtggcggggcagga

SEQ ID NO: 140448 - DNA, 50 bp, Homo sapiens
gtctggaaagctttaggagttcacagttttgcagctcaccttgtgaagat

SEQ ID NO: 140449 - DNA, 50 bp, Homo sapiens
cgatgaggagggcaagctcttggaggttacacgcatggggagatactctg

SEQ ID NO: 140450 - DNA, 50 bp, Homo sapiens
gttctgctgaatcctattcctaagaattaaagctatagagagtcccaaca

SEQ ID NO: 140451 - DNA, 100 bp, Homo sapiens
ctctggattaccttgcaccttatgccaaggtggtcgtcggttttctgagggtacttcagctgacagagagattcagagaacgttaatggaggtaatattt

SEQ ID NO: 140452 - DNA, 98 bp, Homo sapiens
ttttttggttgtacaatatactagctctctagttgtctgagggaagtcaaaagcatgcaagcctacagaaaagcattgagaaagctaaaattggccga

SEQ ID NO: 140453 - DNA, 90 bp, Homo sapiens
ctaggagtactacatagacttcctcctgcatatgcccaagaggattgggagtggaatggacaccagcagaagcaccacagttattcctgt

SEQ ID NO: 140454 - DNA, 100 bp, Homo sapiens
catggaaagtcgggggctttcgcccgggtcctcctagaaattccccccgaagaagactcccccacatctgggtgttacacataatattgcattacttcga

SEQ ID NO: 140455 - DNA, 96 bp, Homo sapiens
ctggacagcaagacaggagaccttggatctgccactcactgactgtgaggcatcttattatagaaaactttatccctctggaagaaaaaagtaaaa

SEQ ID NO: 140456 - DNA, 95 bp, Homo sapiens
gaaactagctcatctgtagagactgatttgcaacccttccgggaagccatagctctgcatgcggaatggccaaagactatgacgggtcttcctag

SEQ ID NO: 140457 - DNA, 87 bp, Homo sapiens
cctgcgcggctgcggggcttccctgcggctggagttacagaatgtctgaaggggacagtgtgggagaatccgtccatgggaaacctt

SEQ ID NO: 140458 - DNA, 100 bp, Homo sapiens
ttggattcctccaatagtttttccgtgacaaatgcttgactaatggctgaaggataaatcaacatggcaactatgattccaccagtgaagctgaaatggc

SEQ ID NO: 140459 - DNA, 74 bp, Homo sapiens
cgcctgtctcttccgggctgtagacgaaagacggtcactgcctgggacacagccattgctcccctggatggcga

SEQ ID NO: 140460 - DNA, 97 bp, Homo sapiens
ggatgttacgtggccggaatcattcccttggctgttaatttctcagagacgctgaccggaaaggagattgagattgacattgaacctacagacaagg

SEQ ID NO: 140461 - DNA, 90 bp, Homo sapiens
gggtacggaccccacatgaggccatgaggagcttcgttgcacattgtcctgagctactaactgaagatgtgattcgaaaattgatgaccc

SEQ ID NO: 140462 - DNA, 75 bp, Homo sapiens
gatcaccttttctttataataaggacgtcaatggaaaagtggttctttgggcacctcaacacctttgcttcgaat

SEQ ID NO: 140463 - DNA, 98 bp, Homo sapiens
gttaatgcatgctagaaacacagttcgatcctttggtacagaagacagaccgacagatcgtccaataccacctcgagatgaagtctttgaatacatta

SEQ ID NO: 140464 - DNA, 89 bp, Homo sapiens
aaggaacgaggcaaggagctaaagcagcgtgcgttcagccctggggttgatgccggcccaggatggatcagacctgtgaactacccaga

SEQ ID NO: 140465 - DNA, 90 bp, Homo sapiens
ctggggcgtagcctcctttctccagaaaggaacacgagacattcagaagtgggagtatgtccctctcgggccattccttgggaagagttt

SEQ ID NO: 140466 - DNA, 141 bp, Homo sapiens
gggacgtgatgttggagaactacaggaacctgctttctctcgatgaggataacatccctccagaagatggtgctggagaatctggtaaaagcaccattgtgaagcagatgaggatcctgcatgttaatgggtttaatggag

SEQ ID NO: 140467 - DNA, 75 bp, Homo sapiens
aaaaagtgaatcagcagccaaatacagttgactacagacaaaaagctgctgcagcaggtagaattcccacaaact

SEQ ID NO: 140468 - DNA, 101 bp, Homo sapiens
gtttaaaaatgggtgaagaacggtgggtctccctcactccagaagaatttgaccaactccagaaatattcagaatgggtagaaatatttctgtcatggctc

SEQ ID NO: 140469 - DNA, 90 bp, Homo sapiens
gagaaacctcaagatgtggatttaccttatcccctcaacaacttttcagtggcaagttatggccacaccgtgcccttgtcagatggaggt

SEQ ID NO: 140470 - DNA, 86 bp, Homo sapiens
acctccgtgaaggcgtccgtcctgcgcatcgcatacacattttggaactttatacccaagaatttatttgaacaattcagaagagt

SEQ ID NO: 140471 - DNA, 109 bp, Homo sapiens
gcaccatgccgctcctaagcctgcacagccgcggcggcagcagcagtgagaggttacgggcaggacttgagtggcttcggacagggcttctcagaccccagccagcagc

SEQ ID NO: 140472 - DNA, 100 bp, Homo sapiens
gcgggcataccagcgggccctggccgctcacccgtggaaagtacaggtcctgacagctgggctgaactgtatcgggcctcagggaagtttgagctgcttg

SEQ ID NO: 140473 - DNA, 87 bp, Homo sapiens
attactaacaccagacctctgtcatatacaggtttgtatacagagttcttcagggatccctgtttccatctccaattctgagagcta

SEQ ID NO: 140474 - DNA, 98 bp, Homo sapiens
gggatggtgccacaggaggctgtgcgggccccgctccgcttcgaatggatgagcacctctgaggagttggatgaaatgccagtgccggattctgaaag

SEQ ID NO: 140475 - DNA, 100 bp, Homo sapiens
ggaagtggctttgggtcacgaggcttcacggaggagagttactgaaagctctcgaaattacggttacaatccttctcctgtgaagcctgaaggacttcgc

SEQ ID NO: 140476 - DNA, 82 bp, Homo sapiens
gggaacaacaacgagatcctcagtgatcagtcgcatcgaatacattcattcaaagaacttcatccaccgggatgtgaagcca

SEQ ID NO: 140477 - DNA, 98 bp, Homo sapiens
cttccacaccccctccgtgggtgtgtgttggttgaatctggcgatgtggaacccatggatatggagggctgactatatacaccatgttttttcctggc

SEQ ID NO: 140478 - DNA, 100 bp, Homo sapiens
gcactgctggatgacagcaaggagttgcagcggaaccccaactgaggagacgtggccaggcatcctgtccaacgaggagttcaagacatacaactacccc

SEQ ID NO: 140479 - DNA, 99 bp, Homo sapiens
cttatctgagactagtggcctcggttcttcctgtgtcctgtgtttggagagagatcacaggaggcactcctgtaggaggcctgctgatggcatttcaga

SEQ ID NO: 140480 - DNA, 100 bp, Homo sapiens
ctcccagctgcgcagggcctgccaggtggcgctcggactgaaatgcaactgcagaagcaacatgtgaccttttagagatgcttgtgggactgcataaagt

SEQ ID NO: 140481 - DNA, 100 bp, Homo sapiens
aacagaacctgtccaggagctggcatgacgtgcaggtctctagcgccgggctgacgcacgaggcacacaggaaggaggtggagcaggtgtatctgcgctg

SEQ ID NO: 140482 - DNA, 100 bp, Homo sapiens
ttctggaattgatctcgccaaaaaggacatctttggagccaggtcatcatcagatttgaaatatttaaagtggatacaaaactatttcagcaatgcagac

SEQ ID NO: 140483 - DNA, 75 bp, Homo sapiens
ggatacaaacacaccttgaaccagattgatgaagtaaaggtgtggcctcagcctcccaaagtgctaggattacag

SEQ ID NO: 140484 - DNA, 72 bp, Homo sapiens
attccagtgactggggatagtgaaggtgctacggtgcagcaagacactaagggcgactaccagaaagcgctg

SEQ ID NO: 140485 - DNA, 100 bp, Homo sapiens
gagtctattgccattgcccaagcatcttcatgatacagttaagaggaatcttgacagcgccacttcccctcagaatggcgatcaacagaatggctacggg

SEQ ID NO: 140486 - DNA, 74 bp, Homo sapiens
cattatcctagtgaatgtaagacataaactgacagctattcaggtggttgtgtcaaaccgattggtgacatctc

SEQ ID NO: 140487 - DNA, 100 bp, Homo sapiens
cggaagacctcactgaccccagagtggcagaaaggctgatgcagcagggaactgctcgcagaaagaagaaggtggttcatagaacagccacagcagatga

SEQ ID NO: 140488 - DNA, 80 bp, Homo sapiens
agacactgcgaaagcaaaccgaggagtgggtaattccagaattgattggccataccattgtcactgtattactgctcatg

SEQ ID NO: 140489 - DNA, 90 bp, Homo sapiens
aagctgataggctgcgctaccggaatgtcatccagcgagtgattagttggttgaatctggcgatgtggaacccatggatatggagggctg

SEQ ID NO: 140490 - DNA, 98 bp, Homo sapiens
cttcattctcttggactgaacttaaatactgatagggtgaggacgcttgagcggaagttagaagcaaaaatgatcaaggaggaaagcgactaccacga

SEQ ID NO: 140491 - DNA, 100 bp, Homo sapiens
gtaaagtcagtgacatgcccatgcgagtacctgaggaaggtatcgaaggatgatcgcagtgatgtggagagcagctcagaggaagaagatgtgaccacct

SEQ ID NO: 140492 - DNA, 100 bp, Homo sapiens
agcaccgcagatgttgtcaaggtggcctaccaggaggccaggggtgtcgccatggtaacaaatcggaagtacccaaaactgaaagaagtggatgatgtgc

SEQ ID NO: 140493 - DNA, 100 bp, Homo sapiens
tgacaagtgtttggacaatctctgtgcttctactgaaactaaaattgatgtggccagcatcaaggaaaaggttaagaaagcaaagaataagaaactggga

SEQ ID NO: 140494 - DNA, 75 bp, Homo sapiens
ccatggcagatggcaacagaggatgtcaacaattttttggaggctaaatttggccgaagatggaccaaaatttca

SEQ ID NO: 140495 - DNA, 76 bp, Homo sapiens
caatacagaagctacagactggatattaaaagaagactaattagcccatataagctcgccgcgcatggccgggaac

SEQ ID NO: 140496 - DNA, 82 bp, Homo sapiens
ttgcgatggctgatcgggggaggccgagaaccgcagggactggccgagttcaaaaggtgatgacctatcaacagccattctc

SEQ ID NO: 140497 - DNA, 74 bp, Homo sapiens
agcaaagcgcccagcctgccgcctcgctgtccctgcggcttctgggggtgctggagaatctggtaaaagcacca

SEQ ID NO: 140498 - DNA, 100 bp, Homo sapiens
cctcatggggaaaatctccccggtgactttcagggtcagccagcagccggcccggggtgtcagccaccccacccaagtccccggtctacctggacctggc

SEQ ID NO: 140499 - DNA, 101 bp, Homo sapiens
gctgtatcttcttggggtctccaccgcaggcctcctcgctggggaggcagagtcctcgcgtggtctcctgcctcgagcacagcctgtgcccaggggagccg

SEQ ID NO: 140500 - DNA, 96 bp, Homo sapiens
aggacgaagagcgggacccgagccctgctgctaggggagctgatcctggaccgtcacaactttgccatcatgacaaagtatatcagcaagccggag

SEQ ID NO: 140501 - DNA, 100 bp, Homo sapiens
cctgagcggccaggacgacgaggagcagggcctgactgcgcaggattttttatcaagcagaaatgcatcgaacaacgagaatcaagatcactgagctaaa

SEQ ID NO: 140502 - DNA, 75 bp, Homo sapiens
cgggaccccagttcctccgccaagcgcggccgccgcccccgcctcagcatctggaatcaagagacccatggcatc

SEQ ID NO: 140503 - DNA, 75 bp, Homo sapiens
gaacgacaggacgttggggcggcctggctccctcagctggtaagcgggcccctcagtgctaccccagttccgtca

SEQ ID NO: 140504 - DNA, 82 bp, Homo sapiens
ctaaacgttttagagtaccaaccattgtgtgctgtgaggtaaaggataacaaagccattgacctttgccgattgtgttgggg

SEQ ID NO: 140505 - DNA, 100 bp, Homo sapiens
gacaaggaagtgaagaaggcgcatcactcccagctgcgcaaagcttgcgaggtggcgttagcctttctgagaaaagtctacagcattctttctctgcagg

SEQ ID NO: 140506 - DNA, 75 bp, Homo sapiens
gaacatttgtagcattgatttcccggatctggtaacatggcaaaagatgctgaccaactgactgaagagcagatt

SEQ ID NO: 140507 - DNA, 78 bp, Homo sapiens
gtctacactgagtcggaggcgaaggtttggtgcacctcgatttggaggaagtagggcagggcccttatctggaaagaa

SEQ ID NO: 140508 - DNA, 100 bp, Homo sapiens
accatttccacttgatgtcatcacgcagaaggggtgaaagagactcggtgacagatacagaagaaaaagtcagcactttttgaagtgtctgaggttatac

SEQ ID NO: 140509 - DNA, 95 bp, Homo sapiens
gttaccccttcagacagttctgaaattcagaaggtgatttactacctctgcatcttattgaaagatccagtggaaccacatgggatatcccaagt

SEQ ID NO: 140510 - DNA, 75 bp, Homo sapiens
gctgatgaagatgatgacgatgatgatgaagaggatgatgatgaagaaatcctggttttgacttcagtggagcag

SEQ ID NO: 140511 - DNA, 98 bp, Homo sapiens
gtttattcagaggtttgaaatgaaacgaagccctgaagagaagcaagagatgcttcaaactgaaggcagccaggtggctctggtaggcgaggaggaag

SEQ ID NO: 140512 - DNA, 99 bp, Homo sapiens
tctcacctatacgtgcaagaaaggaacagctaccaagtggcccatccaacaggacttctcaggtgaaagttgtggaggtcaagcccgatatgtttcctc

SEQ ID NO: 140513 - DNA, 100 bp, Homo sapiens
gatcgcctaacttctactgacgaagcttggaagttgcagaagagcctacaaatacatttggcaagtacccaagggcccattgaggtttacttatgtccag

SEQ ID NO: 140514 - DNA, 100 bp, Homo sapiens
cagcagcaaggagcctcagagagggatgggttacatgcccaagaggggacttgatgttaacaaatgtgagattgccaggagcatccccccggtccttcag

SEQ ID NO: 140515 - DNA, 75 bp, Homo sapiens
cacctctacctcctgcgaggcctcccgggctccgggaaaactacactggccagggcaaatccagacagaaccttt

SEQ ID NO: 140516 - DNA, 104 bp, Homo sapiens
gtttctctccctctgcccccccttccccacgcaaccccagatccatttacactttacagaacagattatcagtctggtcaatcagatctgcggcaaagtgtctg

SEQ ID NO: 140517 - DNA, 75 bp, Homo sapiens
catgaaccgcgccgtgcaactgctcatcctggcctacgtcatcggctatcatggtgaacttacttcagattgtgc

SEQ ID NO: 140518 - DNA, 100 bp, Homo sapiens
ggtttgctcgattttgacatattctacaacgtcactggatgcctaaggatcagttccatgacaagaccccttatacgattatgtttggtccagataaatg

SEQ ID NO: 140519 - DNA, 100 bp, Homo sapiens
gtgagctctatttctacccaggctgctgtcgtcgtgggagccaacgggaattgaatgatctggcacgggaccctccagcacagtgttcagcaggtcctgt

SEQ ID NO: 140520 - DNA, 90 bp, Homo sapiens
cgtgttctgatcactactgacttgttgagaatctgctagtcacatggaagcaagtggggctggaactgaagcctcattcctcagctgagt

SEQ ID NO: 140521 - DNA, 98 bp, Homo sapiens
gccgactgtcaatggagctggaaaacatcgtggccaacacggtcttgctgaaagccagggaagtcacccacaaaagctgtatataatgccagacattg

SEQ ID NO: 140522 - DNA, 50 bp, Homo sapiens
gcaagagcgatgtctactacttcaggtgtgcaactgaggaacatggctca

SEQ ID NO: 140523 - DNA, 75 bp, Homo sapiens
cccacaggtgtactcatcgccattgacctggcctataacttgcacagggtaagaaggtggatggctctgtaaatg

SEQ ID NO: 140524 - DNA, 100 bp, Homo sapiens
cgacccccattgctgagccagcggagctgcttgccattgccgaaatctaaaaaaacttgtagcaaaggcagtaaaaaggaacggaacagttctggaatgg

SEQ ID NO: 140525 - DNA, 82 bp, Homo sapiens
cgcctggtctctttcctgtggccagcccagccgcttacaaacacgcagatggcaagaagattgatggcaggagggtccttgt

SEQ ID NO: 140526 - DNA, 75 bp, Homo sapiens
ccacatagacatttacgcggatgtcggcgaagagttcaaccagttggcgttccgggccgcgtggcggtgaatgcc

SEQ ID NO: 140527 - DNA, 98 bp, Homo sapiens
aagcacctctccagcggggacctgctccgggacaacatgctgcggggcacaggagtggaagctggacacactatgtgacttgtatgaaaccctgacca

SEQ ID NO: 140528 - DNA, 75 bp, Homo sapiens
cggtgtggagagcggtgctgaggctacgcgggctggagactcaggacgcaaacatgcagatctttgtgaagaccc

SEQ ID NO: 140529 - DNA, 83 bp, Homo sapiens
cctgggaaggtggagccaccagcctctccttgagatcgagccagcgcagagatgtgcctcgaaccacacaaagcacctcaagg

SEQ ID NO: 140530 - DNA, 100 bp, Homo sapiens
gcatctgcacccggacggtgcagcaccaggactcctttgatacaaccaagtcggatgggcagtttaagaagacagccagtaacagcaagctgaggaccta

SEQ ID NO: 140531 - DNA, 90 bp, Homo sapiens
cagaaacaaaatgtcaacaaattgatgggtaagtggggcagtgtccggaccagtggacgcagcagtggccttggcaccgatgtgggctcc

SEQ ID NO: 140532 - DNA, 50 bp, Homo sapiens
gccatactcctctagtgaccgagaatgagaaattgacacaagattctctt

SEQ ID NO: 140533 - DNA, 100 bp, Homo sapiens
tgctcctctgctcccaggccgacctccctgacctgcaggccctgcgggtaggagcattgcttttcgtggtgaaagaggcaatgatgaatctgccatcgaa

SEQ ID NO: 140534 - DNA, 75 bp, Homo sapiens
ctgcccacgtcgagcgtgcccgagacccgagaatctggcaatgggggcaggagctgttggagctttgcagctgac

SEQ ID NO: 140535 - DNA, 100 bp, Homo sapiens
atctgccccagagaaagtcctcgctcgtcaccagcaagcttgcgggtatgagtttaaagccaagaacatcaagaagaagaaagtgagcattatggtttca

SEQ ID NO: 140536 - DNA, 89 bp, Homo sapiens
agctgcgatcacctccttggacctcagccccaacggcaagcaacttgattcgagtggtgaatgcatttcgtagttctttatatgaaggg

SEQ ID NO: 140537 - DNA, 100 bp, Homo sapiens
cacttcggtggtcagtgttgtaaaagagcttattgaaaactccttggatgctggtgccacaagcgtagatgttaaactgagtattccatttggtatgaag

SEQ ID NO: 140538 - DNA, 83 bp, Homo sapiens
gaaaatgggacattagttcaagtagcaactatatcagcattgcagtgtcgagatggctatgaaccctgtgtaaatgaaggaat

SEQ ID NO: 140539 - DNA, 83 bp, Homo sapiens
atttggggaaatccttcggatggtgaactcattagaacaaaagactgttgaagtagagagcattttgcccagctcactcggat

SEQ ID NO: 140540 - DNA, 75 bp, Homo sapiens
cagacttctgtacagaagagagttgtccagtgatgtcagctggcccaaagcgtgaattacccttcactaagtcgg

SEQ ID NO: 140541 - DNA, 83 bp, Homo sapiens
cttggactgagtcctgcaggacacaggaatgttacgttcataacttactaaggattagtgtatattttccaaccttgaggcat

SEQ ID NO: 140542 - DNA, 100 bp, Homo sapiens
agcaatcagctggcctggtttgatactgacctgtaaatcatcctttaggggcactatgaacgaagaggagcagtttgtaaacattgatttgaatgatgac

SEQ ID NO: 140543 - DNA, 75 bp, Homo sapiens
gaccgtaggatgatgtttcctccgccaggaaccttcagaagtttagtctttttggagacataagtgttctacaac

SEQ ID NO: 140544 - DNA, 100 bp, Homo sapiens
gcggcgagaagccccagctgcactacgcgtggcactatcacaacagagtgacataatggtgggataacatggacacttgtcttcttccttactgtaatgg

SEQ ID NO: 140545 - DNA, 74 bp, Homo sapiens
ggatatgccctgtggacatgacttttgtagaggatgttgggagtcgagagaagcctcatcagtgccaagtctgt

SEQ ID NO: 140546 - DNA, 101 bp, Homo sapiens
ggacttggacacgtcccagctctctctgggcatctggaaagggtccacatatagcctcagttacattagctgcttatgaatgcaattcagttaattttccc

SEQ ID NO: 140547 - DNA, 100 bp, Homo sapiens
cagggactggcctatttgcactcacagaagaagatacacagggacatcaagggaatgggtactgttcaaaaaggaatgccccacaagtgttaccatggca

SEQ ID NO: 140548 - DNA, 100 bp, Homo sapiens
ttgggaacgaggggtgaagcggcccaggtgaggagtttattaaccacttaacctctcagaactgaacaaagacaacattgttcctggaacgccctctttt

SEQ ID NO: 140549 - DNA, 75 bp, Homo sapiens
ccttgatatagttgacctgcttaaaaaggccaaggtagaaaatctttatcctcaaattggctgggtagaaattga

SEQ ID NO: 140550 - DNA, 115 bp, Homo sapiens
gcatcccggacggtacttctgccactgctgctccgtggagatcgtcccgcgcctgccgggagtgcatccgccccaacccttttccccctcgtctcctgtgagaattccccgtcgg

SEQ ID NO: 140551 - DNA, 99 bp, Homo sapiens
gccagcggtccagagctgatgcaggtgtgagatcaaccatgagttccgttgcagttttgacccaagagagttttgctgaacaccgaagtgggctggttc

SEQ ID NO: 140552 - DNA, 76 bp, Homo sapiens
agcacccgcctccgggcatcttcaactgagatgtttcacaaagcagaagaattattttctaaaacaacaaacaatg

SEQ ID NO: 140553 - DNA, 74 bp, Homo sapiens
attgtgaagaagaatttcgatctccgccctggggtcattgtcaggcagacctgttatcctaaactaggtgagtc

SEQ ID NO: 140554 - DNA, 100 bp, Homo sapiens
gtgcacagaagccaaaaagcattgctggtatttcgaaggactctatccaacctattatatcataagcttaaatcgtctcagaaggacaaggtccgccagt

SEQ ID NO: 140555 - DNA, 114 bp, Homo sapiens
tttcatcattactaacaggatattcctcatgacattgctgtctgcatcaacaacagcaacttgtgattggcggtgaccggatattcagttgcacatccccacatcaatgcactg

SEQ ID NO: 140556 - DNA, 75 bp, Homo sapiens
gaccggatccaacccagttagttacttcctgtctagagttgtagcttccacctgaatgtgacagtgatgataaca

SEQ ID NO: 140557 - DNA, 100 bp, Homo sapiens
ggaacgcgcgctgcgcggactgcggcgccccggagtgtgaacatggctacgcctcttcattcccgtccatgccgagcccccgactgcagcattcaaagcc

SEQ ID NO: 140558 - DNA, 100 bp, Homo sapiens
gtcctcaagaagacaggcaaggaggtggtgctggaggctctagccggcccggtccttggactgaaagaatgcaccaggggctcggcagtgtggtgccaga

SEQ ID NO: 140559 - DNA, 82 bp, Homo sapiens
tccagtgtcccttcttccacatgaaaaggataaggtaaacattataccagtgattgccaaagcagatacggtttctaaaact

SEQ ID NO: 140560 - DNA, 100 bp, Homo sapiens
gaaatcttgactgccatccttgcctcgctcactgcacgccagaacctgaggagagaatggcatgccaggattttgacacttcatgacatgtcattattta

SEQ ID NO: 140561 - DNA, 98 bp, Homo sapiens
acaaatcagagagccagtagacttacagaaaaagaagaagcggaaacaacgttctcccgcaaaaccacagacccctttgcttctgtttttgggaatga

SEQ ID NO: 140562 - DNA, 74 bp, Homo sapiens
ccgctgagcgatcccaccgaagcagcgtgtcctccgtgggagcccgagtccagaacacatattacataatggag

SEQ ID NO: 140563 - DNA, 90 bp, Homo sapiens
atccagaccggattatttttccaaatcatgaagcagatgccacgctactaaagaagtcagagaaactgttggcagagttggaccggagcg

SEQ ID NO: 140564 - DNA, 101 bp, Homo sapiens
gcagtgtgcggccagccagcagaggggtgactcaacgcttggaccttcctgaccttcccctctcagatgcgtaagaggggttccgttcgaggcacgtcggc

SEQ ID NO: 140565 - DNA, 101 bp, Homo sapiens
ccttccctgcccccttcccccacccccgactcgggcttggcgcggcggccagaggaaccccgagagttgcatgctgagaatttgaaaaatgaagatgatgt

SEQ ID NO: 140566 - DNA, 90 bp, Homo sapiens
actgtatcaagcaggaacaagctcgtaaatcccaagagttacagagctccaaacgagaatggaagccgctggaggaccgtagctgcacag

SEQ ID NO: 140567 - DNA, 100 bp, Homo sapiens
actgggatgatacaccttttccacagggaattgagttggtcacgaaatggattggagtgaaccggagaccccgaaaacggaagcgcagggagaaggaaga

SEQ ID NO: 140568 - DNA, 82 bp, Homo sapiens
gaacgaggcaaggagctaaagcagcgtgcgttcagccctggggggcaatttgaaattcgatatgcaccgtggttccagtgga

SEQ ID NO: 140569 - DNA, 82 bp, Homo sapiens
atcactgggcatctacttaacactgaccagtcccttaagctcctaggatttttagatgttgaaaatactccctgcgcccggc

SEQ ID NO: 140570 - DNA, 74 bp, Homo sapiens
ttggagaagaagttgcccagtatgatggggcatacaaggaaattgagaggctgactgagcgactagaagaaaaa

SEQ ID NO: 140571 - DNA, 83 bp, Homo sapiens
cggcggccgcagtggcgtcctggagccctcctcaggttcacgcctacatcatcagctccctcaagaaagagatgcccaatgtc

SEQ ID NO: 140572 - DNA, 75 bp, Homo sapiens
ctcaggcaaagagagggacagaagaacggacgatctccttgaacttacagagactctgatgccagtatggactgg

SEQ ID NO: 140573 - DNA, 74 bp, Homo sapiens
gcgactggacttacgaggagcagtttaagcaggaccagctccagcagaagatcatgtgccccgggcctgtcacc

SEQ ID NO: 140574 - DNA, 100 bp, Homo sapiens
ggttgggccttggccgcctgagcccttgagttggtcacttgaaccttgggaatattgagatattgctgtgggagctccgtttgaaggcttgggcaaagtg

SEQ ID NO: 140575 - DNA, 51 bp, Homo sapiens
gaaatgcgtgcactgcgtccctctagagaactacacgcagtacatccctct

SEQ ID NO: 140576 - DNA, 75 bp, Homo sapiens
agagctgggaaaattgttgtgaacctcacaggcaggctaaacaagagtgcctggtgaagaatgtgatgggatcac

SEQ ID NO: 140577 - DNA, 74 bp, Homo sapiens
tagctatggcagtggcagaagattttaattaggatgaagccccacccgcccttcaggatgccagccttggcaac

SEQ ID NO: 140578 - DNA, 100 bp, Homo sapiens
gcaaggaggtcgctgtagccctgttccaggtctatcaagcagcccttctgggtcacccttgcatggttaatggtgcaatgtaagaaacctttaaaagttt

SEQ ID NO: 140579 - DNA, 75 bp, Homo sapiens
cttgtacaaaggagagtttaaacagccaaaacagttcattcatattcagcctgcagaaccttggcctgaaaatgc

SEQ ID NO: 140580 - DNA, 83 bp, Homo sapiens
aagatggcgacggcgaccatagctctcgtctcctccgggctggggctgagcaagccctcggagtgaccgtgggtgacagcggc

SEQ ID NO: 140581 - DNA, 75 bp, Homo sapiens
cccaggcgcgcagctgggcgcctccttcctgcaggccaggatgcctaaatcaaaggaacttgtttcttcaagctc

SEQ ID NO: 140582 - DNA, 75 bp, Homo sapiens
ctattacatcagagacagtggcaacaattcaggcagtttgctggatttcctgaagagcgatgaaggtggcaaagt

SEQ ID NO: 140583 - DNA, 100 bp, Homo sapiens
tcctctgatctacgaaagtcatgttacccaacaccgggccaagtacctggcccagatcattgtgatgggcgtgcaggtggtgggcagggcctttgcacgg

SEQ ID NO: 140584 - DNA, 96 bp, Homo sapiens
gtccgaggctcgcgggcggcgggcccggggatcgcttacacctgagacgaactacagaacagcacgtaccagaggtggaagtccaagtcaaacgca

SEQ ID NO: 140585 - DNA, 89 bp, Homo sapiens
aagaagaccttaaaacctacaaagctattgaaaagaaacctgtttatggaaaaagatggtctagttctgactggacattagatcctcaa

SEQ ID NO: 140586 - DNA, 75 bp, Homo sapiens
cagaaggctagaagaatcagacgtgctccaggaggccagaaggaaataccactgaccgaggcctgtaagcagtat

SEQ ID NO: 140587 - DNA, 75 bp, Homo sapiens
cgaactggaacccactcggggactctgccttttaccggaaagattcataccccgatggagtataagggggagcta

SEQ ID NO: 140588 - DNA, 115 bp, Homo sapiens
cggctccgtggtgaagctactcaatacgcgccacaacgtccgactgcactcacacgacgtgcgctatgggtcagtaactctcgaagtgataaaagctgtttctttgtgaaatatg

SEQ ID NO: 140589 - DNA, 80 bp, Homo sapiens
agatgccaaatcatccgagacatgattggaccggaaaagactttgatgatgaaactgaggcacaaactgcttaatgaact

SEQ ID NO: 140590 - DNA, 100 bp, Homo sapiens
ccccgaccgccctcttctgtcttggtcatggaaaatggaagatttgcaaaatacaaatattttacccatgtcatgatcaataagacagatatgctaatga

SEQ ID NO: 140591 - DNA, 74 bp, Homo sapiens
gaggccgcagcagtcagggacatttctgaagcgagcgtcttcgatggggacccaagtaacagggaggaaagcag

SEQ ID NO: 140592 - DNA, 74 bp, Homo sapiens
aaaggcctgccccagtttgagccagtgccccttgaacaccctcactatgagtctctgctggatgaaccgaatcc

SEQ ID NO: 140593 - DNA, 99 bp, Homo sapiens
ccgcacacagtcggcgccccacacgcaagtacctggaagagaacaagaggacgccagcgggcgcggccgccaaatgtgttccagctgccaagaagccgg

SEQ ID NO: 140594 - DNA, 90 bp, Homo sapiens
gttatattgccattgatgacatccaagtactgagttatccttgtgaccgcccaggtttgctgaatgtgaagcccattgaagacattcaag

SEQ ID NO: 140595 - DNA, 51 bp, Homo sapiens
tagcatggaactttcagaacctattgatggagtttcgctcttgtcgcccag

SEQ ID NO: 140596 - DNA, 83 bp, Homo sapiens
aaatctccccagaagagattcagccaaaccccccatcctctgggatgcttggatcagtttgacaacttagaaaaacacacaca

SEQ ID NO: 140597 - DNA, 75 bp, Homo sapiens
tcgctgggatttttgggtggtgcaaaggtattatacctgaagaaccttagccctcgggtgactgaaagagatctt

SEQ ID NO: 140598 - DNA, 101 bp, Homo sapiens
tgattagcaatttaaagatcctctccaaggtgcccctgggcgctgggattgctctagcctgtaagtataatggaaaagatgaggtctgcctgactttatat

SEQ ID NO: 140599 - DNA, 75 bp, Homo sapiens
gcacaaggacaaggacagcacctgcctagagaacgtgaaggtgctaaaggagaagatagaagctgagaagggtcg

SEQ ID NO: 140600 - DNA, 75 bp, Homo sapiens
aaagccaaggagaagttctcccagctggcagaagcctatgaggtagagtcactgaccacagagctgtcagctgag

SEQ ID NO: 140601 - DNA, 75 bp, Homo sapiens
cagttatttgcctcagtaaaagatcgaggctgtctgtcaacagcgtgactgctggagactactcccgacccctcc

SEQ ID NO: 140602 - DNA, 90 bp, Homo sapiens
ggacatcctggaagctgggaaatgattgatgaactcccagagggcgctgtgaagcctccagcaaacaagtatcctatcttcttttttggc

SEQ ID NO: 140603 - DNA, 80 bp, Homo sapiens
cagagcctcagtttgtgcaggacaccgacatggaacagggactcactggggagattccagacattctaaatgcaagtaat

SEQ ID NO: 140604 - DNA, 100 bp, Homo sapiens
gccggacgcgccgcgccctggcggctctagggaccccccccgcgcctgcacttagccccgcgcccgagaccctacagcttggggcctgggctcctctgac

SEQ ID NO: 140605 - DNA, 74 bp, Homo sapiens
agccaaggaattttgtgtttcttgccatcttacaaggttgcttcatgtgcgaaatggaaactgcaaatatcatt

SEQ ID NO: 140606 - DNA, 75 bp, Homo sapiens
ctgaagaggtggaagcaaagttcaacctcaagtactacagccttccagcagccttcccagacccacagatcacac

SEQ ID NO: 140607 - DNA, 100 bp, Homo sapiens
tcctgactttgcatatctggcatccaaatatccagattttaagcagcatgttcagataaatctgaatggaagagtgagctgcccaacatgttcggcgacc

SEQ ID NO: 140608 - DNA, 100 bp, Homo sapiens
atcaatgtctttgttgtctcagtctttgctgaagcattttttgggaaaaccaacgagcaggtgctatcagttgagggatttgcagttgataaaatggctg

SEQ ID NO: 140609 - DNA, 87 bp, Homo sapiens
tcctctccttgaaaagtcaaggcttggttcaagccagatagcacctgaggacagaacatatcagtgaacagagtatctgccaagccc

SEQ ID NO: 140610 - DNA, 95 bp, Homo sapiens
atacctgtgtctcctacccaaggacagggggacagggctctgtctcgcacttcccaggtccctgtcccaccaattttgggtttttatcaaatgaa

SEQ ID NO: 140611 - DNA, 96 bp, Homo sapiens
ttgttattggagaaacatgcagattatatcgcatcctatggctcaaagaaagatgattatgattttctattgcagcagaccatgctacgagtgaag

SEQ ID NO: 140612 - DNA, 75 bp, Homo sapiens
ggcggaagccttcgtctcccagattgcagggaaacaaaggacccatcgcaaatgttttccatgctgatctccaaa

SEQ ID NO: 140613 - DNA, 75 bp, Homo sapiens
ctggtgcagaacattgcgcggcaggtcaagctgggctccgcgctagggggcccctacctgggagtccacctgaga

SEQ ID NO: 140614 - DNA, 75 bp, Homo sapiens
ctcggcctcccagagtcctgggattacagacatgatcttatgaattcaacacatgaagatttacaacttgataaa

SEQ ID NO: 140615 - DNA, 136 bp, Homo sapiens
ggaagaccctcctgccaaaaggaaatgcatctttatgtcagaaacacaaagcagcccaaccaaagggcaattaagttggaatatgcaaggttggttaagttggcccaagaagacaccccaccagaaaccgattatc

SEQ ID NO: 140616 - DNA, 75 bp, Homo sapiens
ggctttctcgcttgtcaccttgccatgtggaagaaactggctcctcaagagttactgatctatgaaatggcagag

SEQ ID NO: 140617 - DNA, 100 bp, Homo sapiens
actacagttcatcaacatcaactacgtccctctgaagcttcataaacaagcagatatgcaagaagagaaaaaccgaatcgaaagagtccttggcgctact

SEQ ID NO: 140618 - DNA, 50 bp, Homo sapiens
cagccctccatcttgcagcccagaagccaagacaatgcaaactccagtga

SEQ ID NO: 140619 - DNA, 74 bp, Homo sapiens
ggaccttgaagacgacttcgaccctgcccagcacgaccagctcatgcagggcgacatggagtccaatgggaaat

SEQ ID NO: 140620 - DNA, 100 bp, Homo sapiens
atgaaaccaaccagcagggggcttgaaggaggcgtctagggctttgctcccaagggctgtggctgatgatgcatcaacaacagcaacttgtgattggcgg

SEQ ID NO: 140621 - DNA, 51 bp, Homo sapiens
ctggatccaggataacggaggctgggctggagcattggatttgctaaagga

SEQ ID NO: 140622 - DNA, 51 bp, Homo sapiens
gaaccatgaagtacacaacagccacagactcaagaatgaacaatccgtcag

SEQ ID NO: 140623 - DNA, 90 bp, Homo sapiens
gttttcttctacttcattgcttgcaaggaggagtttttacaaggttcagaacttggcagtaaggaatcaacaggcctcagctcaaggacc

SEQ ID NO: 140624 - DNA, 60 bp, Homo sapiens
cagttactctaacaagtctggaggttcttgatcaatatgaacgagaaggatttaacttcc

SEQ ID NO: 140625 - DNA, 100 bp, Homo sapiens
atacagatgaatcaaattgttggtcttggcatttcaacacagagagcaacttttattacgtggaacaagtatgcccaagaggacagagaacgaatgcaca

SEQ ID NO: 140626 - DNA, 74 bp, Homo sapiens
agacaagttctctgcagagtttgttgactttacctcacagtggttatcaccaatctagtgaaaatgttgaagtc

SEQ ID NO: 140627 - DNA, 82 bp, Homo sapiens
atgtcgcgttacgggcggtacggaggaggaggatacgaagcgttttcggcttcctgcccggagctgtgcagcaaacagtcga

SEQ ID NO: 140628 - DNA, 75 bp, Homo sapiens
gtcggcccggtccccgccgcacccagcccagaggtggaggagacactgaagcgactgcagagccagaagggagtg

SEQ ID NO: 140629 - DNA, 75 bp, Homo sapiens
ttggatccaacaaaaacagaccagaagattaccaaggagatgttgcagtaaagatcctaaaggttgtcgacccaa

SEQ ID NO: 140630 - DNA, 75 bp, Homo sapiens
gtaaattgaaaatattggggccatttagtaacttctttgcaagattcattccacttaaaacctgaaaacattgga

SEQ ID NO: 140631 - DNA, 108 bp, Homo sapiens
cagaccctggagcctcagttggaagcagccgatccagcctgcggagcctgtggggcagtgccggtggtggtgtgcacattgagccccggtatagacagttcccccagc

SEQ ID NO: 140632 - DNA, 90 bp, Homo sapiens
cgagcagtctcaggcctttagtgatgatgacaaggcgaccagccagctcctgttggagacagattgggagtccattttgcagatctgcga

SEQ ID NO: 140633 - DNA, 100 bp, Homo sapiens
gcagaaagaagccactgccacttgtcagtgatctggaccacctcagaaaatagtatcacctaaacaagaacatgaagataggaaacatgacaaagtcact

SEQ ID NO: 140634 - DNA, 51 bp, Homo sapiens
agtctttggaggcactcaagcagcaggtttgccaggagagaaaggtgaaag

SEQ ID NO: 140635 - DNA, 82 bp, Homo sapiens
gttcctcttgctcacagagctctgtaaaggaagcggggagaggtggtgagagatgacccctgttgaggatttcattggtgtc

SEQ ID NO: 140636 - DNA, 100 bp, Homo sapiens
gggggcccggggcctcgcgctggggacgttgcgtctgcagctgcggcgcgaagcctggctacagataagggaccaaaatgactgactcaaaatatttcac

SEQ ID NO: 140637 - DNA, 100 bp, Homo sapiens
cacttcacacatggagagatgcaagaccagtccatttggggaaatccttcggatggtgaactcattagaagtggagccgccaccaaaatgcagattttcg

SEQ ID NO: 140638 - DNA, 101 bp, Homo sapiens
ggccagacttggaatcctcagatgagactgatcacagcagcaaggaaacccagcgtttgctggcagaaccagttcctggcatcaaagccgaaccagatgag

SEQ ID NO: 140639 - DNA, 100 bp, Homo sapiens
ctgtcaaaaacaaggttctggaaacaactgggcatatggcaatctgcagagcgctgtgtaagcacattgcttgatctaatccagaccaaagtgaattatg

SEQ ID NO: 140640 - DNA, 100 bp, Homo sapiens
tgaactcaggcgattacaagacgattcacctgtccagcatccgaccaccgaggctggagggggagaacacccaggattaagcatgaaaatattgttgccc

SEQ ID NO: 140641 - DNA, 75 bp, Homo sapiens
cttcgcatgaaatggaagagagggtggtgcggatagcttgaggaaggaatactcccccagttgcaagaggcgcag

SEQ ID NO: 140642 - DNA, 51 bp, Homo sapiens
cttcctcagtcgcgccgtgcagctgtatgcaggagctattcttgaagtttg

SEQ ID NO: 140643 - DNA, 97 bp, Homo sapiens
agttttaagcaaacttaccttgtctgtctttgtacatcatcaccaaatggaaagttaatcgaagagatgggaaccaacaaatgtgccagccaggcag

SEQ ID NO: 140644 - DNA, 75 bp, Homo sapiens
gaactgtgtttgggagcctcatcattggttatgccaggaaccactgtgtctcttgaaacaacaaatagtctcttg

SEQ ID NO: 140645 - DNA, 82 bp, Homo sapiens
gtagtccgatggctgcggctgcgccgaggcgccctactcagattctggctacattggagattggttgctttctaaaactgaa

SEQ ID NO: 140646 - DNA, 75 bp, Homo sapiens
ggaggcagacctggactttgcaaggtggtgaagcagtattttccaatttgaagattcatttgaaggtggctcctg

SEQ ID NO: 140647 - DNA, 82 bp, Homo sapiens
gacaagccgctggcagccgcggatctcaccgccgctcagggttggtactaagaagtgcctttcctgacgtctctgctgcttg

SEQ ID NO: 140648 - DNA, 83 bp, Homo sapiens
ctcagaggcgagagtggccccagccgggccagaagcagggtggttctcttcccaaagtggaagccaaattcatcaattatgtg

SEQ ID NO: 140649 - DNA, 100 bp, Homo sapiens
cagcggagtcctcacctgcaggcacaggtgtgcgcacttcgcatctcgaaggccggccagcaagcttcagttattgccttgtctgtcaagatccgcagtt

SEQ ID NO: 140650 - DNA, 98 bp, Homo sapiens
ccagaaattggtcgtctgagagctttacgtcatcttcgattagctaataaccaactgcaattcctacctccaggtcacggtctagatcacattctcga

SEQ ID NO: 140651 - DNA, 100 bp, Homo sapiens
gggaacccaggatggctgcggacactcacggagcccgcacccaggaacccgctcgtaatgaggacggggacttggttgccttttccagtgacgaggaatt

SEQ ID NO: 140652 - DNA, 100 bp, Homo sapiens
ctttgcgttcgggctgggagcgtgctttccacgacggtgacacgcttccctggattggctatccagtcagttcgctgctattcccatgggtcacaggaga

SEQ ID NO: 140653 - DNA, 82 bp, Homo sapiens
tctcttgagccgctgccttgttaccagctggagcttgacgcagttttcggctttgtgagaaaccttaccatcaaacacgatg

SEQ ID NO: 140654 - DNA, 82 bp, Homo sapiens
cagaaagcaggcgaacccgcggcgcaataacgcacttgcacctcctgcgccgccgccccccatccaaggatatgccttcaag

SEQ ID NO: 140655 - DNA, 75 bp, Homo sapiens
gtggaaccactcaataattgaagaagaatttgtcagccttgtcttaaaagaagaagcatctgattaccttgaatt

SEQ ID NO: 140656 - DNA, 100 bp, Homo sapiens
ttcggggaaagaattgaaccttcaccatataaggtcgagtttgagtggctgaggcagttttggtttcaaggcaatcgatacagaaagtgcactgactggt

SEQ ID NO: 140657 - DNA, 75 bp, Homo sapiens
cccgttagaactcgcgtttccacttcagagatctggtgtggcagtgtggagggaaggtcgagattttgccctgtt

SEQ ID NO: 140658 - DNA, 100 bp, Homo sapiens
ctgtaacgaggtgttgagacgagctccagaaacatgacaaggaggactttcctgcctcttggagatcagaggaggaaatggcagcagaagccgcagctct

SEQ ID NO: 140659 - DNA, 75 bp, Homo sapiens
tgaggcctccccagccatgtgaaactaatgatatggaacctagcaaagctgttccactgaatgcatctaagcaag

SEQ ID NO: 140660 - DNA, 100 bp, Homo sapiens
ctggttactgaggaaacaccttcaggagaagcagctgcagaagatagtaatctcatctcaggttttgatgtccctgagggctcggacaaggtggctgaag

SEQ ID NO: 140661 - DNA, 82 bp, Homo sapiens
ccacaagcaaccacatcaaatatgctgtcaccactgggaaatggcaactgctgacaggaagtttggcatccacctcccccag

SEQ ID NO: 140662 - DNA, 100 bp, Homo sapiens
caggagaacagcctgctccacctacaggttctgttgccactgcgtgtcgtgacccaggggtccccatgaatgggactcgaaatggggatggaagagaacc

SEQ ID NO: 140663 - DNA, 100 bp, Homo sapiens
ccttcagccactacagtatcgtgggacagaagctgccttatgtttgatcatcggccaaggtcctggcgagaactgcctctgcggctagctgattttgggg

SEQ ID NO: 140664 - DNA, 51 bp, Homo sapiens
ctttttgtcagattatcaggatgaggttctgaaagtgtgaagcaaaggaat

SEQ ID NO: 140665 - DNA, 50 bp, Homo sapiens
gcagcagcggcgggaggagcctccggggtactccaaagattcaggtttac

SEQ ID NO: 140666 - DNA, 74 bp, Homo sapiens
ggcggcgttgttcagtcagagcgagaacattccagagatgaggaaaatgaggcccaaagaagtgatgccacttg

SEQ ID NO: 140667 - DNA, 75 bp, Homo sapiens
ggtgtcggggcacagttgaagaagcgaccgagggactgggagtcgttagtgaggcagcggaggaggagaaagaga

SEQ ID NO: 140668 - DNA, 51 bp, Homo sapiens
cgccgagatggcgctcgaccccgcaggttcctaaatatttgtcacagcaat

SEQ ID NO: 140669 - DNA, 82 bp, Homo sapiens
gagcacgagctgtgaggggattcacttgtgtgcggaactcctcggaaccatggctcttgtcaggatggtgaagctgttcatc

SEQ ID NO: 140670 - DNA, 91 bp, Homo sapiens
acctcgacgtcttgcctgtgtcccacttgttcgcggcctatagctcaccatggatgatgatatcgccgcgctcgtcgtcgacaacggctcc

SEQ ID NO: 140671 - DNA, 96 bp, Homo sapiens
gtaagatggcggccccgcggcgagtctcgtttcctctcagtccatccacccttcatggggccagagccctctctccagaatctgagcagcaatgcc

SEQ ID NO: 140672 - DNA, 118 bp, Homo sapiens
ttggagacggtgggcacgccagactcagggcgtgggcgcagtgagaagaaggctatcaaagctccgagaggccttcagagaattcgacaaggacaaggatggctacatcaactgccgg

SEQ ID NO: 140673 - DNA, 100 bp, Homo sapiens
gggaacctagctgatgataggggggttccatctcccaacttgtccatgtattaatcaagaagagctatgaccggaccaaacgtcagcgtcgtagaaactg

SEQ ID NO: 140674 - DNA, 100 bp, Homo sapiens
cacgaggcgttcatcgaggagggcacattccttttcacctcagagtcggtcggggaaggccacccaggcggtgcgtctttctacgtgaataggattttgt

SEQ ID NO: 140675 - DNA, 50 bp, Homo sapiens
gtgatattgtagaaattgctgtccaggatctgtgtgccatggaggaccac

SEQ ID NO: 140676 - DNA, 131 bp, Homo sapiens
ccccgaatgaggaccagggagggaaatatgtcatgtatcccatagctgtgagtggcgatcacgagaacaataagatatgttccatttaaggctctgaagatggggagagaattctggatgatccaggtggg

SEQ ID NO: 140677 - DNA, 97 bp, Homo sapiens
ttacatctaccagcgctttcgagtcttggaggaaaaactggcggagagcctcagaaccacctgtttcctctgctgcaccatgcttgagtgtggaagc

SEQ ID NO: 140678 - DNA, 75 bp, Homo sapiens
cctgaagatctatgctcctctgtacttggtcagtttaggggctggtgcaaaggatgagttgcacattgttgaagc

SEQ ID NO: 140679 - DNA, 95 bp, Homo sapiens
tctgaagtcaagtgctgtaaggaagctgtgtgtgtcattgacatgtcctctttcacaaagtttgagataacatgactgaagcaaggctgtgtgac

SEQ ID NO: 140680 - DNA, 80 bp, Homo sapiens
acagacaccgcctacaggagtatgatgcaaggacaaagtattttggacagatatcatcaacgaagccattttcagtgcca

SEQ ID NO: 140681 - DNA, 97 bp, Homo sapiens
caagaggctctgcaccctggatggaaagcaggatattgtacctgtggatgcatcttatgaagtaaaagaactatatgtgccagaaaataaacttcat

SEQ ID NO: 140682 - DNA, 116 bp, Homo sapiens
gtgaaccttcgcattcagaatttgaccatcttggtgagaaacattaagacctactaccagacaatgcagatcttcgtgaagactctgactggtaagaccatcaccctcgaggttga

SEQ ID NO: 140683 - DNA, 100 bp, Homo sapiens
tctatgaagaaaagagtgtgttgtgaacgaagtcagaatttcctgtgttccctttgccgctcctggagttcactggtgaaaggtgtagcagtcactcggc

SEQ ID NO: 140684 - DNA, 98 bp, Homo sapiens
gcagtggtcgcttcttctccttgtgtttatccaacatatgattttgcctgccccatagttgacagcatcgaaggtgttacacatgccctgagaacaac

SEQ ID NO: 140685 - DNA, 96 bp, Homo sapiens
tcgaccaagaactgtgaagagaggagttgagaacatctctgttgacattcattgtggagaaggaagccaacatccttttggagccatgaatattgt

SEQ ID NO: 140686 - DNA, 100 bp, Homo sapiens
ccttcggagaggtgcacaggatggaggacaagcagactggcttccagtgcgctgtcaaaaaggaagctgaatatggtgggcatgatcagatagatttgta

SEQ ID NO: 140687 - DNA, 100 bp, Homo sapiens
cgccgcatccccggcagcagctccaggcaaagtgacagtcatgacaagaaataattggcttgtgagaatcaacattgaagctggaaaaatgatggcatcc

SEQ ID NO: 140688 - DNA, 96 bp, Homo sapiens
aagagatgtgattaatgtattccaccacctccgccagttaagaggaaaaagagaccctcatggacacaaaatgggtaacatctgagttggcgtgga

SEQ ID NO: 140689 - DNA, 75 bp, Homo sapiens
tgacgggctttctgctgccgcccgcaagcagagaataccctctaccatctgctttggtcagggtgccgctcgagg

SEQ ID NO: 140690 - DNA, 74 bp, Homo sapiens
caagtcctccttgccaggccttcaaccactatctcagtgcaatggctgtcaataccagcaaatatgcagaaagc

SEQ ID NO: 140691 - DNA, 100 bp, Homo sapiens
ggcgaacctcttcccggccgctctggtgcacttgggagccgaggagccggcagggcctcggcttcacaggatggggctgccagtgtcctgggcccctcct

SEQ ID NO: 140692 - DNA, 82 bp, Homo sapiens
ggattccttaccacattgtgaatattgtctcaggtgaaagaactgcctatcctacaaaaagaacttatagaaactaaacaag

SEQ ID NO: 140693 - DNA, 100 bp, Homo sapiens
ttcaagtgtttactcatttgcctagcattacagcattgtgaagaactgattcagcagtacaaccgtgctgaggacagcatatgcttagctgacagtaagc

SEQ ID NO: 140694 - DNA, 101 bp, Homo sapiens
tcgcgggccggccccgcggggagcgcccccggcgcgatgcccttcaggaaaggcgagaaccactgtctctgatcaacgtgcggaagaggaacgtggaatct

SEQ ID NO: 140695 - DNA, 90 bp, Homo sapiens
cgggaggttcggttgtcgcccgttggccgcgcggcgccgcgctcggcggccgccattgcaggaaggacccatgtggaggctgaaactgat

SEQ ID NO: 140696 - DNA, 100 bp, Homo sapiens
aggcgggggtgctgcagaggacacgaggcggcgggctggagacatggaccgcggcgagcaagaggcgtggagctatttcctatgacagttctgatcagac

SEQ ID NO: 140697 - DNA, 100 bp, Homo sapiens
tgagtcggagctcggcaggaagtgggaccggtgtctggcggatgcggtcgtgaagatagtcacattgtcctaatgcttgcagatgatatggcctgtaatc

SEQ ID NO: 140698 - DNA, 83 bp, Homo sapiens
tagctgtgctcgcgctactctctctttctggcctggaggctatccagcgtaaacgcaaagcactgaagttgaattttgcaaat

SEQ ID NO: 140699 - DNA, 97 bp, Homo sapiens
cagttgcctggctcacattcggaggctggtgtccagggtctcagcgcgggggacgactcaggtgctgtgcctgaggaacaataccatttttaagcaa

SEQ ID NO: 140700 - DNA, 75 bp, Homo sapiens
agtgttaattctgctcctctcctgggcggcggggatgggaggttgtatcagagtaagatggacggtagctttgat

SEQ ID NO: 140701 - DNA, 74 bp, Homo sapiens
gagactccagttggacatgatgcagtttccaaaactggttatcaatactctggctgaccatcatcatcgtggga

SEQ ID NO: 140702 - DNA, 85 bp, Homo sapiens
attgtgacatatcgttggacccagaattgagcctccaggggcttccagaacccggagacactggctgacattccggcctccccac

SEQ ID NO: 140703 - DNA, 100 bp, Homo sapiens
ccaaacattcggaacactgatgggaaatcagccctggacctggcagatccttcagcaaaagctgtccttacagatcttgcttctgaaatatctacctggg

SEQ ID NO: 140704 - DNA, 98 bp, Homo sapiens
ctgaacctgcacctccatcacgacccattcaggagcctccaggagcccagacaccagccccccaccatgggatgtgtttggccaaatgggagagtggt

SEQ ID NO: 140705 - DNA, 75 bp, Homo sapiens
caggaacagaaaaccaaacaccacatgttgtctcttagaagtgggagctgaacgcctgattacatcaaccccaga

SEQ ID NO: 140706 - DNA, 101 bp, Homo sapiens
gagaaaggagctgtttccagtcatgaggctgtggtggatctttctgatccagatgcagaggtgtgccttcatgtactgaggcttgtccagtctgtggttct

SEQ ID NO: 140707 - DNA, 90 bp, Homo sapiens
cgcagcctccaccacctgcccggagtatatgagcaacgtggattcatggtgtaaagcttgcggtgaggtagaccttccctcagagctgca

SEQ ID NO: 140708 - DNA, 96 bp, Homo sapiens
ctgttccctcctcaggaagtccttttattaccaggaggtgtaaaacaaaggtgtatccagataatcttcctacaacaagtgtggtgattgttttcc

SEQ ID NO: 140709 - DNA, 82 bp, Homo sapiens
agtgccctgagggccttcgagagctaccgcgccagacagatctttgtggagttcacctctgtgtttgactgccagaaagcca

SEQ ID NO: 140710 - DNA, 100 bp, Homo sapiens
ctgctgggacaggggattgatggcagcctgtgagcagcaagctgtggctctgactctgcaggaggacagagcatccctgacgctttcaggggggccctcg

SEQ ID NO: 140711 - DNA, 74 bp, Homo sapiens
gcttgcagacttatataatgcttcaggttttaacttctagtcatggcgaatgatcgcaggagagcacagactgg

SEQ ID NO: 140712 - DNA, 101 bp, Homo sapiens
ctggatatccaagcctctcagcttcggagaatggagtcttccatcaatcatatctcacagaaaagaggcacagttagatgaagaaggacagtttcttgtca

SEQ ID NO: 140713 - DNA, 100 bp, Homo sapiens
aggaagacgtttgaggattacctgcacaacgtggttttcgtccccaggaactgactcagcacaagaagacagcttcgactccctatgatttcatctctga

SEQ ID NO: 140714 - DNA, 50 bp, Homo sapiens
ctatgccttcagacatcaccagccaggttctagagccttctttccgccag

SEQ ID NO: 140715 - DNA, 100 bp, Homo sapiens
cctctttgactctgatcctgtgttctcactgcctcttgtactgcctctccgtgaactggcacaaaggttaatctcaagatgccgctagtgaaaagaaaca

SEQ ID NO: 140716 - DNA, 100 bp, Homo sapiens
gagcccatcagaatggcagatggcttatgaaccacagttcaaaagacccctttcgtcacccaccctgggtatgacactggaaatggtattcagcttcctg

SEQ ID NO: 140717 - DNA, 51 bp, Homo sapiens
cctcctgcgtagctgggactacaggagaatggccaccagtccttactgagc

SEQ ID NO: 140718 - DNA, 100 bp, Homo sapiens
gaccctgttgcagtggccaaggcccagccgagtgtgccctatttggacttgacttgaacgtgaatgcagccatacaacacgtagacggttgtgtctgaat

SEQ ID NO: 140719 - DNA, 98 bp, Homo sapiens
acaggctgacctggcctatcagcttcaggcgttttaaggatgaacagattgacatcctcgtggccactgatgtggcagcccgtggacttgacattgag

SEQ ID NO: 140720 - DNA, 75 bp, Homo sapiens
aagaacgtgagcaagcccaggcacagccgacgccgcggggagaaccaggtgcatcagcgcattgcggagctgagg

SEQ ID NO: 140721 - DNA, 90 bp, Homo sapiens
tgcaccaaatcttcttcagacaagtgaaggacatgaaaagatgtcttctaacgcagaaaagaagtatctagatcaccatggcgactggac

SEQ ID NO: 140722 - DNA, 100 bp, Homo sapiens
cactgaagtggcctccttgtgtttggaaggcatccgatgtgcaatccgaatcgcctgcatctttggaatgcagagggcagccactacattagatgagaag

SEQ ID NO: 140723 - DNA, 90 bp, Homo sapiens
caagtgtgaggagttgctaaatgctcaggaaataatgcaaaaggtgtcccaaggctcctgaccagtgaacaaagatttgagaaagacagc

SEQ ID NO: 140724 - DNA, 98 bp, Homo sapiens
aaatcaaagacatgtgcataaaatgtttccatttttcaagtgtcaaatctaagattctggaaaatcctgccttgcttcgttgggcctatgcaagaaca

SEQ ID NO: 140725 - DNA, 100 bp, Homo sapiens
cttctccagccaggaagaggatcacgcatgccaaagtccagggtgcaggactccacagaatggagcaagaatgagaggaaaaaggccggcagaaaagcat

SEQ ID NO: 140726 - DNA, 75 bp, Homo sapiens
aggacctttggacaaaactaaaagaatgtcatgatagagaagtacaaggtctataatgacggatctatactacct

SEQ ID NO: 140727 - DNA, 95 bp, Homo sapiens
gcgcgcggaggggaaatggctgccgaaaacaagccggaagtttgcagttaacatgtttcgaacattaccaccttcctccaatcctacgggagcgg

SEQ ID NO: 140728 - DNA, 51 bp, Homo sapiens
cagtctggaaagctttaggagttcacagtgccaagtataaggagcgaggga

SEQ ID NO: 140729 - DNA, 100 bp, Homo sapiens
agcaagattagtggctgctaaacttgaaccgaaaagggtgtccgcaatgttgccagtgtctgtctgcagattggctacccaactgttgcatcagtacccc

SEQ ID NO: 140730 - DNA, 119 bp, Homo sapiens
gggagatgggcgaggcctttgccgctgacatcccccgcatcctggtggccggaaatcttcccaaggctgcagacaccgacggatttgctttgggagccagagtagctgccgccaccaga

SEQ ID NO: 140731 - DNA, 100 bp, Homo sapiens
ccgcagccgcccagaccgcgcagcgcgggaggcaggttccgcacggagcacgtttgccgtggacgggaaagattgcaaggtgaataaagaagtggagcgt

SEQ ID NO: 140732 - DNA, 75 bp, Homo sapiens
cccagatgcccaccgggatggagaaggaggaggaatcggcagttcaattaacctccagaagatggctgaacctgc

SEQ ID NO: 140733 - DNA, 100 bp, Homo sapiens
tggggcagtatcaacggagtctccggggtgtatggttgaagcctggaattttttgcggcaacattgcaataggttgaatatagaggagttactgaagcac

SEQ ID NO: 140734 - DNA, 90 bp, Homo sapiens
cttggctttggaatactatgtattaggagaatcttttgagacttctgctccttgggacaggttgcccacattcccaaatcagatgctttg

SEQ ID NO: 140735 - DNA, 75 bp, Homo sapiens
aacctctcaccccgtcgttgcctccacttggcccgtccatagagccagattggagctggagtgagccttccagga

SEQ ID NO: 140736 - DNA, 100 bp, Homo sapiens
cagtctccctatattttgaaaggatcgaacagaggctgcaaatagaataatatgtactatcagaagtaggagacctcagatggtcagaagtgttgaggca

SEQ ID NO: 140737 - DNA, 50 bp, Homo sapiens
tttgaatccttccttgatgatgaagaggccatggaaatagcatctcaaag

SEQ ID NO: 140738 - DNA, 75 bp, Homo sapiens
agacaaggcaaagcgaaattggtcattctcgctaacaactgcccagctttgagggagcatcgagtacagctgtcc

SEQ ID NO: 140739 - DNA, 49 bp, Homo sapiens
gtggcgcccattaagcgtcattccagggtctccctccactgctgtagta

SEQ ID NO: 140740 - DNA, 83 bp, Homo sapiens
cgccgaggcaccgaggcactcagaggagctgcatcttcctcccgtgaggctggccgagctccacgctgatctgaagatacagg

SEQ ID NO: 140741 - DNA, 74 bp, Homo sapiens
gggagggtccgagccagccgctgttttgccggaggagcccctcaggccccaactgggtacatggaaaactcagt

SEQ ID NO: 140742 - DNA, 100 bp, Homo sapiens
tttgatgacatcaagcacacgactcttggtgagcgaggagctctccgagaagcaatgaggtaagaatgattgatgttggctgatattggagtgctcattc

SEQ ID NO: 140743 - DNA, 98 bp, Homo sapiens
ctgatcgcctaacttctactgacgaagcttggaagttgcagaagatctcgtggctgtgctgtgtcccaaagggcctctgagaatgctggtagaaactg

SEQ ID NO: 140744 - DNA, 96 bp, Homo sapiens
agctccgaggtctgatagtgaagaaagtggctcagaagaagaggaagaggatgtctgagctggagaaggccatggtggccctcatcgacgttttcc

SEQ ID NO: 140745 - DNA, 100 bp, Homo sapiens
gcatcctatggctcaaagaaagatgattatcaggaggccactgtctgcagctcccgtgaagatgtccactccagacccacccctgggcggaactcctcgg

SEQ ID NO: 140746 - DNA, 96 bp, Homo sapiens
cggcccatctacatctctgtgcagccgccttcactgcacgtgctgaagcaggccagagagcagaggcacgtggcatcccagggcgacctcagacgg

SEQ ID NO: 140747 - DNA, 90 bp, Homo sapiens
ggcggcgcggcaggagcgcgttgagggactgccaggtcagagcagcccaccatgggatggggagggggtggaggctgcaccccgcgccca

SEQ ID NO: 140748 - DNA, 98 bp, Homo sapiens
tccaggaccagcactcttctcccagcccttagggtcctgctcggccaaggtcaccatcagaaaagctaagtttgctgtatagtgaggatcaggagatc

SEQ ID NO: 140749 - DNA, 83 bp, Homo sapiens
ggctaccgttcggactatttgtagtcatgtacagaacatgatcaagggtgttacactgtctataggatcgggtgaaccaccaa

SEQ ID NO: 140750 - DNA, 82 bp, Homo sapiens
gtacctgcggccaattcggtggaacgaggacgcggactgcgaaggcagcttacaaaacactacacagcaaaataatgatctg

SEQ ID NO: 140751 - DNA, 99 bp, Homo sapiens
ccaagatgtagctaatgaccgtggttcccactgaggttaatggaaaaggttccttatggtgtgttgatccggaatataaacccaatcttatccaggcac

SEQ ID NO: 140752 - DNA, 100 bp, Homo sapiens
tcgcggtgcagcgaatcaagcgggagttcaaggaggtgctgaagagcgaggagcggaatggccaaagactatgacgggtcttcctagcacatcagggaca

SEQ ID NO: 140753 - DNA, 100 bp, Homo sapiens
ggagagtgacagcagctttctggtcaagacccccctcgacaaccaacattcaccaccaggctggaccttgatgccgctggggccggggctggacggcgag

SEQ ID NO: 140754 - DNA, 82 bp, Homo sapiens
gaggccatcaacgtggagcaggcgttccagacgattgcacggaatgcacttaagcaggaatgtctgatgatgagattctcag

SEQ ID NO: 140755 - DNA, 101 bp, Homo sapiens
gcaagctagaagacctgttgcggaaggttcgcgccaaggagaccaggaagcgagcactcagcagaatgatatggaacctagcaaagctgttccactgaatg

SEQ ID NO: 140756 - DNA, 74 bp, Homo sapiens
ggacacagaagtatttgtgacaggctgagtcatcactagagagtgggaagggcagcagcagcagagaatccaaa

SEQ ID NO: 140757 - DNA, 98 bp, Homo sapiens
tagcatgtggcaatgatgattgcagaattcacatatttgctcaacaaaatgatcaggctgagttggctgtcattcttaaatttgtgctggaccatgag

SEQ ID NO: 140758 - DNA, 121 bp, Homo sapiens
cggcgctcaggcgtctcgacgcgcgcgatttaaaaccagctcaggagacgccaaggaaagatgggacctcccggcccagtgtttaacactgtatacaacagtgacgacaacgtgtttgtgg

SEQ ID NO: 140759 - DNA, 108 bp, Homo sapiens
gacggccagaaagttccgccatgagctggggcacggagctgtggattgcttccaagtatgatcatcaggcagaagaagatcttcgcaattggatagaagaggtgacag

SEQ ID NO: 140760 - DNA, 106 bp, Homo sapiens
tggcgtggcaagccggactaaggaccggggacttcttgattgaggtggaagttgatgggtcgaaactaaatgtgaccagcacgtggaacctggcttcgcccttatt

SEQ ID NO: 140761 - DNA, 88 bp, Homo sapiens
ctgccacagctgtgctggcgagccagccacagagtaaagaggaaacagatgatttgaagagagctgagagtatgcttcaacaagcaga

SEQ ID NO: 140762 - DNA, 100 bp, Homo sapiens
cagaggcgctcatccacagagccacatctgttagtcatattctgttataagtgaaattgggctccaggccaaggagaactttggagaacttttaagtttg

SEQ ID NO: 140763 - DNA, 82 bp, Homo sapiens
agccccaaagcgagcgaagctagggtcgccgccactgccgcaggaggcgtgaggtattagaaaactactcggatgctccaat

SEQ ID NO: 140764 - DNA, 80 bp, Homo sapiens
cgagacttttctcagatgttggatatttgcttggaaaaacgtgtgggtacgaccttgagcaacatcagaattgcctgaga

SEQ ID NO: 140765 - DNA, 75 bp, Homo sapiens
ggcaagctgcaccttgcatgagggacaaagctacacagtcagcagataagcagagagccctagaagaaaccaaag

SEQ ID NO: 140766 - DNA, 100 bp, Homo sapiens
ctttggggcccatgggcgtggtcgcagctactctagaggtggagcccagtgacaccatcgaaaatgtgaaggccaagatccaagataaagaaggcatccc

SEQ ID NO: 140767 - DNA, 82 bp, Homo sapiens
agcttgacggcttggacgaagatggggagaaggaagcgagactcatacgcaacctcaatgttgagccccatatgggggttgg

SEQ ID NO: 140768 - DNA, 82 bp, Homo sapiens
tcacaatcaagaaatgcagaaacgtaaagaaatgcaattgagggtgatcagcccatgacctaaacctccagacaaaataaaa

SEQ ID NO: 140769 - DNA, 98 bp, Homo sapiens
atttctcttgtcttgacaagcaaatatgacatagaggacggtgaagctatagatagccgaagcctcatgataaaatgcttgggatttgctttacattc

SEQ ID NO: 140770 - DNA, 100 bp, Homo sapiens
tactggcgccgcaaaacaccttcctggacaccatcgccacccgttttgacggaacactaactctcgaagtgataaaagctgtttctttgtgaaatatggg

SEQ ID NO: 140771 - DNA, 76 bp, Homo sapiens
cggggtgtaataatgttaactgagtttcagtacaaaacggttcgattcatcaaaaagatgctgtaaatgatgatga

SEQ ID NO: 140772 - DNA, 82 bp, Homo sapiens
ttcctaagaacaaaaaccgaaataggtacagagacgtcagtccctgaattatctatagagtaagtatgctaatcttgactaa

SEQ ID NO: 140773 - DNA, 50 bp, Homo sapiens
ttccacagtgcaaggaagacgccgagggggctgttgtggttccgactata

SEQ ID NO: 140774 - DNA, 57 bp, Homo sapiens
aatgtaaatgccattgattatcttggcagatcagccctcatacatgctgttactctt

SEQ ID NO: 140775 - DNA, 75 bp, Homo sapiens
tcttcttcgagaattacaccggggtccagcctggtccgacccccagtggcactaacgtgggatcctcagggcgct

SEQ ID NO: 140776 - DNA, 75 bp, Homo sapiens
gaggctacaccccggagccaggagggaatactcccccagttgcaagaggcgcaggaccgtggaagacttcaacaa

SEQ ID NO: 140777 - DNA, 75 bp, Homo sapiens
gtacattgccgaagattactttatggccaaagcgatagctgaccgaaactgttcaggttccattatcaaaacgag

SEQ ID NO: 140778 - DNA, 75 bp, Homo sapiens
ccagacgttccgcactccaaattcgggatctccggcgagcaaggcaaccgcagatggcagtggcagcaccatgat

SEQ ID NO: 140779 - DNA, 100 bp, Homo sapiens
ctgaaattgcaggtggaaaggaatttggacaaatgctgcctcaaagaaaaccatatacacatatatcatggcttcaaggaacacccagccagcagagtcc

SEQ ID NO: 140780 - DNA, 76 bp, Homo sapiens
ctgcatccaaatcttctccctggacctcgtgcatacgttctcctgtgcctcctgttggctctctttgcatctggcc

SEQ ID NO: 140781 - DNA, 98 bp, Homo sapiens
gcggcagcggcggcgcggaggcggctgaggtgcgagccgtaggtacaagtagtcaagtttcttcattaaggagacctgaagaggatgatatggctttc

SEQ ID NO: 140782 - DNA, 100 bp, Homo sapiens
gaggtgcactggaggaagcacaccctgtcctatgtggacgtcggcactgggaaggtaacacaagtggcaagacagccgggaacccctaccccatcccctt

SEQ ID NO: 140783 - DNA, 100 bp, Homo sapiens
attgttaagcacaagttcacgaaagcctacaaaagtgtggagaggttccttcaggaggatcagacaactgatcaatactgggttccatgtttacatgatg

SEQ ID NO: 140784 - DNA, 50 bp, Homo sapiens
cgtgctggacacactggaggcgctgggggacttccttccccgcggttcag

SEQ ID NO: 140785 - DNA, 100 bp, Homo sapiens
gactccgagaagtgctcctactctcagcctggtccgacccccagtggcactaacgtgggatcctcagggcgctctcccagcaaagcagtggccgcccggg

SEQ ID NO: 140786 - DNA, 88 bp, Homo sapiens
gcagcggaaaatgatccagtcacagagttttgcggcctccaggtggtggatccaatttttcattaggttttgatgaaccaacagaaca

SEQ ID NO: 140787 - DNA, 74 bp, Homo sapiens
gcctgatccgggagaggtggttccagaattatgggtgcttcaaggatgaccgcatcgtcttctggacttggatg

SEQ ID NO: 140788 - DNA, 75 bp, Homo sapiens
cgagcaggctgagcgatacgacggcgagaaccactgtctctgatcaacgtgcggaagaggaacgtggaatctggg

SEQ ID NO: 140789 - DNA, 75 bp, Homo sapiens
tgaagatggctactctggagttgagccggaagtcggtgcagcccacctcagaggagcgcatccccaagaccatcg

SEQ ID NO: 140790 - DNA, 83 bp, Homo sapiens
gttgcgaaggatccccaacggggaggccaacgtgaagaaagacctgtcggccatggagcctaatgatagtaccagtaccgctg

SEQ ID NO: 140791 - DNA, 50 bp, Homo sapiens
ggagcgcagagcgggcgagcgcggaattgagtgatctacagcgcgatcca

SEQ ID NO: 140792 - DNA, 90 bp, Homo sapiens
ctcaatccggtcctgcacgaaaggctgtaaggactttgactacatcatttcattctcttatggcctacaaggtttctgctgagaaatcca

SEQ ID NO: 140793 - DNA, 76 bp, Homo sapiens
aggtccccagccattaaacacattttacaaagccatgccctacagtgaccgattagcactgctccaggtccgggct

SEQ ID NO: 140794 - DNA, 83 bp, Homo sapiens
attcagtggtgttaaggattccaacaacaattccgatggcaaagccgttgccaagcttatgtccctgatgccaaaaatgcacc

SEQ ID NO: 140795 - DNA, 100 bp, Homo sapiens
cctgagtagccggtaacaaacgagggttcccgggattggaccgacgcagccatggtgaaagaaatcacccgtgatattaagcaattagatcacgccaaac

SEQ ID NO: 140796 - DNA, 80 bp, Homo sapiens
tggagaaggaagcaaaggaccttctggtgaaggggaatgtgaccctgaaggagctgaatgctcgccccatggaagtgttc

SEQ ID NO: 140797 - DNA, 100 bp, Homo sapiens
aagtaccacccggacaagaacccggatgagggcgagaaggctgaagccgacgtagcttctctgaacagacgcatccagctggttgaggaagagttggatc

SEQ ID NO: 140798 - DNA, 75 bp, Homo sapiens
cgcagtggtcgcttcttctccttggaaagctcatcatctgcaatgtcactggcattgcccacaggcgtccccagg

SEQ ID NO: 140799 - DNA, 100 bp, Homo sapiens
cctggcgctgctggctgcgctctgcccggcgagtcgggctctggaggaaaagaaagtctctagtgatccctgaaaagttccagcatattttgcgagtact

SEQ ID NO: 140800 - DNA, 73 bp, Homo sapiens
acacaacgagaagctcctgtccctcaagtatgaggtgaccctggcaaagatgagagtgcacatttcgtcctgc

SEQ ID NO: 140801 - DNA, 98 bp, Homo sapiens
gtcagcaaaaactggagcagaaattggaggctcagcataggatatgctgcaggctgctagtcattatcgccaaaatagaaactctttgtatagaagag

SEQ ID NO: 140802 - DNA, 50 bp, Homo sapiens
ggaggaggtatgcctggactgggccagtgcccaccaaatcttcataagca

SEQ ID NO: 140803 - DNA, 98 bp, Homo sapiens
ggcttgctgtttctagaatcataacctggacaacagaaccaaagagttcagacgtgagaaaggtgttcagattttgcaaatctaaatgtcataaaaac

SEQ ID NO: 140804 - DNA, 75 bp, Homo sapiens
cgccggttttctccccgcttgccggggtggtcctcttccctttgtcggcctcgaaaaagcccaagacagcagaag

SEQ ID NO: 140805 - DNA, 100 bp, Homo sapiens
ggcagctcgtgcaattgttgccattgaaaaccctgctgatgtcagtgttatatcctccaggaatactggccagattatggattggatatgtctacttctg

SEQ ID NO: 140806 - DNA, 83 bp, Homo sapiens
ctgctgcgggggggagagccactgacgccgggaccgggaccgccgccgccgccgccaccatgacctgcctagagctggaacgt

SEQ ID NO: 140807 - DNA, 75 bp, Homo sapiens
agacccgttcagagtcctacagtggcaggcaaggggagagccagttgcgcagagccctgcaaccagcagtccagg

SEQ ID NO: 140808 - DNA, 100 bp, Homo sapiens
ctggagaaatgggtattgtcagcaatgggagaaccatgtctgctaaagagaaaggaaaatttgaagatatggcaaaagcggacaaggcccgttatgaaag

SEQ ID NO: 140809 - DNA, 96 bp, Homo sapiens
aatttgcacatccttcgaaaagctgccaagttgaaaatggacgagtaatcgcctgctttgattcattgaaagtttttcgttggaatatacgttgca

SEQ ID NO: 140810 - DNA, 99 bp, Homo sapiens
agctcacagagacgctgggcttctacgagagcgaccggcggcgggagaggcgccggggccgcacaggtacctgctggaacaggacttcccaggcatgag

SEQ ID NO: 140811 - DNA, 75 bp, Homo sapiens
cagaaaggaaccgggttgtcttgggccgggcagggcggacccagattgatcactatgttggcatcgcccgagatc

SEQ ID NO: 140812 - DNA, 118 bp, Homo sapiens
ggtgagcagtgacaattgctaggcggagacagtgcagggaagagagaccttagaaaggatcaggactggcggaacaagaaactcctttacgagaagatgaagggaggagagagacgaa

SEQ ID NO: 140813 - DNA, 75 bp, Homo sapiens
caccctgcccatgctgacctctgcctgtcctgtttgatgaaggccggaacaactttgaaggggaggtcaccaagg

SEQ ID NO: 140814 - DNA, 90 bp, Homo sapiens
tggacaactggatggactttctagcagtccccccaaaaaatgtgcccgttcaggccatgctatgatagtggaagcttatccaaaataata

SEQ ID NO: 140815 - DNA, 100 bp, Homo sapiens
actgaatgtaacttcaccgagtaaagaggagtgtttttcttcccccagtccctcagctgctgctgctgctcaggaggtcagatctgccactgatggtaat

SEQ ID NO: 140816 - DNA, 83 bp, Homo sapiens
tggggataaaaccatccatcaattactaccaagttacccatgcagttgttactgtaccagcctattttaatgatgcccaacgc

SEQ ID NO: 140817 - DNA, 100 bp, Homo sapiens
aaaacctgacttttatcatcatattgataatctcaggagaactctatgcagaagtccaaaagaaactcttccttcaaaacctgtgaagaaagagaaggaa

SEQ ID NO: 140818 - DNA, 100 bp, Homo sapiens
acttcgacggcaaggtctactacatagaccacacgaaccgcaccaccagctggatcgacccgcgggacaggattatagctgagaaggtaaaggacgttct

SEQ ID NO: 140819 - DNA, 74 bp, Homo sapiens
ccggaaaacatcctctgtgagcaccccaaccaggactccccctttggcttgagttttgtacggtttcatagccc

SEQ ID NO: 140820 - DNA, 75 bp, Homo sapiens
ttatttagcagctagtaacttcacttatttcaggaatagcctaacatggcagaccagagacagcgctcactgtct

SEQ ID NO: 140821 - DNA, 82 bp, Homo sapiens
ttctctcccaggccacaagacatttcctgctcggaaccttgtttactaattgttggtcaaagaaaaagtgatgtatgaaaaa

SEQ ID NO: 140822 - DNA, 82 bp, Homo sapiens
gtaccatgatagctgtatcagtagtaaacctattgatggcaattttgctgactgtggaagtgactcatccaaactccatgcc

SEQ ID NO: 140823 - DNA, 75 bp, Homo sapiens
cagtctttaaccatggcgtccctcttcaagaagaaaaccgtggatggagaaaatgcagaagtctccatggacgtt

SEQ ID NO: 140824 - DNA, 106 bp, Homo sapiens
ttggaaagttccctagagcttttacagaaggatgtggtacagctccatgctcctcgatatcagtctatgagaagggtcctaggcctacttacaagcctccagtctc

SEQ ID NO: 140825 - DNA, 90 bp, Homo sapiens
aatgatgtcgttgatcttttgccgaggacggagatcagtctcaggggccagccaagcccccacccccaaggaagccactgcctgccgacc

SEQ ID NO: 140826 - DNA, 75 bp, Homo sapiens
tcaagttcctgtgtgagcggaatgacaagacccaccctcccaagtgcattcagtgcgggcagtacctggacgacc

SEQ ID NO: 140827 - DNA, 83 bp, Homo sapiens
gaaaagcggaagaatttagacgcacactggaccaaactagagtcagaacgaatactagcatcagtggggaagaaacctcccca

SEQ ID NO: 140828 - DNA, 75 bp, Homo sapiens
cacagcgtttcttgcaagaatgggagattgtgcttgagaacagtagtcgagaagacaagcatgaatgtccctttg

SEQ ID NO: 140829 - DNA, 100 bp, Homo sapiens
cttaaaacctgaaaacattggaccacacaaagtcttactggtgagaattatgaagatgatgacctagtaaattctgatgaggttatgaagaaaccatgtc

SEQ ID NO: 140830 - DNA, 90 bp, Homo sapiens
ggacacggtgtccgagtctttaggtctgcgcgggagccgaggctgcgcacctgggtgatcgtggtggagaagacccaaaccagaaagtaa

SEQ ID NO: 140831 - DNA, 83 bp, Homo sapiens
gccgagtgcagaagatctgggtgcccgtggaccacaggccctcgttgcccagatgtgccaagtcctgccctgccaacttcttg

SEQ ID NO: 140832 - DNA, 75 bp, Homo sapiens
gaaaaagcggccaaagaagtgaagctgctgctactcgctattgacctgaaaagtggttctggaaaagtgtaccaa

SEQ ID NO: 140833 - DNA, 83 bp, Homo sapiens
ggcgcgggaggtgttcgagaacgaccccgagacggtaccacatggaatgcttggacccccctctccaggaggtgccggtggac

SEQ ID NO: 140834 - DNA, 83 bp, Homo sapiens
gcgggcgagaagctgccgccgaacgacaggacgttggggcggcctggctccctcaggtgctgggactgtacaacactctgaac

SEQ ID NO: 140835 - DNA, 75 bp, Homo sapiens
acttgaagactatcccttgatgattgggccctggcctccagtctgagtgctgacctcgaagagcccctgagtgag

SEQ ID NO: 140836 - DNA, 100 bp, Homo sapiens
ggactggttgcggacgctgcgagatgctgataggtcttgctggctacctgagtggatatgatggtacctttttgttccagaagcctggggataaatatga

SEQ ID NO: 140837 - DNA, 100 bp, Homo sapiens
tgcagctcagggtttcagcggatgagcgtcataaactttgagtgcaataaaaccgcaggacaatcatatcctgattcagcccttcctccacaaaggcaag

SEQ ID NO: 140838 - DNA, 100 bp, Homo sapiens
agaggtgccacccgaggagttccgcccctttctggcaaagatgagggggattcttaagagaagatgcaaccagttttgccattttccaagtcacaaacgg

SEQ ID NO: 140839 - DNA, 101 bp, Homo sapiens
ttttatgagcaaatttacctttctctccaagttctcccaaatttggaaaccaaaatatttacaccagcagctccagttcataccaataaagaagatcctgc

SEQ ID NO: 140840 - DNA, 110 bp, Homo sapiens
ctccgtgcagccgtggcgtgcaggactcgggtggctctgaggtcgcctggggaccccagaaggagcttctggaagaggtgaagaaggaattgcagaaagtgaaagaggaa

SEQ ID NO: 140841 - DNA, 98 bp, Homo sapiens
gtatgatgaactggaggctgagtacgacagcctcaaacaggagctggagcagctcaaagaggtactgaacgacacctgggtctccttcccttcctggt

SEQ ID NO: 140842 - DNA, 98 bp, Homo sapiens
cgctgccatgtgcctctggctcaagcccaggctttggtcaccagtgagctggagaagttccagatatataagggatatgttgatgatcctcgaaacac

SEQ ID NO: 140843 - DNA, 74 bp, Homo sapiens
gcacgacctccgactactttctccttcaaggtattattctcactaaggttggttactatactattccatctatg

SEQ ID NO: 140844 - DNA, 100 bp, Homo sapiens
ctaccaccaactcgtccaactgacaagcccttgcgcctgcctctccaggatgtctacaaaattggtgcttgaatcatctaggacttgttcttctggtgct

SEQ ID NO: 140845 - DNA, 90 bp, Homo sapiens
ctcttgtcacactaattgccaacaacaatggccgcaatgtttaccgaatgctttttaagagcaaagcatatgagcggaatgagttgttcc

SEQ ID NO: 140846 - DNA, 75 bp, Homo sapiens
ctactgccggagcttctgccaggtccctgtgcgttttattgcgacctgccggtgggaactttgtctccgagtcgg

SEQ ID NO: 140847 - DNA, 99 bp, Homo sapiens
ggatcatgtctgcgagccaggattcccgcttcggaaccaaaaagaagcttcccagagccggggccaggagccccaagcgccctctagcagcaaacacag

SEQ ID NO: 140848 - DNA, 75 bp, Homo sapiens
ctgccagaggttccctccgagccccttcctgagaagatcccaggagcggtttcaagtcaagaatccccccgcagc

SEQ ID NO: 140849 - DNA, 100 bp, Homo sapiens
ccgcaagtcccccccggagaaaaagttgaagcgttattacttcctcctgtgctggttccaagacacagcgaatataatcctcagcacagcctcttagctc

SEQ ID NO: 140850 - DNA, 60 bp, Homo sapiens
caatgaactgctagacctcccagatactatagtttgcacagcggaaaggggctggccgtg

SEQ ID NO: 140851 - DNA, 75 bp, Homo sapiens
gagaagctgtcggagcttcccaagaaatttaaaagcctgttgattcaagaactttctaaagtatttccggaagac

SEQ ID NO: 140852 - DNA, 100 bp, Homo sapiens
ggtgaccgcgtggcaggggctctcggacatgctgccaacgacgcgagctttgtgacaacaaactgtgctctgcagttttcatcccgtggaatccgacccg

SEQ ID NO: 140853 - DNA, 80 bp, Homo sapiens
catgagcacaggcatcagtcaggcagatgtttgtcgactggaatgggaatgaatctgaagtctgctgcagtaaaacacag

SEQ ID NO: 140854 - DNA, 75 bp, Homo sapiens
cgcagcccaggcgcgggggcgacgacaggattcttactacagatttaatgaccttaactacagatgggtctcttt

SEQ ID NO: 140855 - DNA, 88 bp, Homo sapiens
ccgtggcgctcttcctctctcagctggtgttcgtgattgggatcaaccagacggaaaacccgaccttcccctcctccaatgagtcccg

SEQ ID NO: 140856 - DNA, 101 bp, Homo sapiens
ggttaaaccagcacacaaggaaccgtcaagggcagtcatcagatccaccatctgcttcaacggaaggacttttgactagatctgctcaggaaacagtcaag

SEQ ID NO: 140857 - DNA, 100 bp, Homo sapiens
ggattacttaagatcattcttaaatgattctacaaactttaaacttatttacagatatgcgtttgactttgcacggatgtagattccttcatgaaacagc

SEQ ID NO: 140858 - DNA, 75 bp, Homo sapiens
ccttgaaagagataaaagcggaagtttgccacacgaaggaacccagccagccggcggaatgcaagcagcagtagg

SEQ ID NO: 140859 - DNA, 90 bp, Homo sapiens
gacctgcggaaactcgtgacgtatttggccagcgtgccaaggtctggctctgggagaggagtggacagcagctggttgagatacatcccc

SEQ ID NO: 140860 - DNA, 75 bp, Homo sapiens
attgtgaagaagaatttcgatctccgccctggggtcattgtcaggtgtttaatgaacgctgccgaattcacttca

SEQ ID NO: 140861 - DNA, 75 bp, Homo sapiens
ggcattggaaccgtgtttggcagcttgatcattggctatgccaggggacatcacccagaagggctatgaaaagaa

SEQ ID NO: 140862 - DNA, 75 bp, Homo sapiens
gacacgcttcttctggaagaccagccaacagaggggattcaacttcaatttttctgcagtggctctgggtccagc

SEQ ID NO: 140863 - DNA, 75 bp, Homo sapiens
gagcaagagcaagatcaccgtgacatccgaggtgcctttctccaaaaggctgatgaattcatccgagcaaatgcc

SEQ ID NO: 140864 - DNA, 76 bp, Homo sapiens
caccgctgtcaagctcaacactggggagaacgtatttaccgggcagtcaaagatctattcctacatgagcccgaac

SEQ ID NO: 140865 - DNA, 90 bp, Homo sapiens
gtccgtatgctgagaacctggagcaggaatgcggggaagctggccacagaaagcgaggctggtgatatggacctgagtgggttgccagaa

SEQ ID NO: 140866 - DNA, 98 bp, Homo sapiens
ctgagtctctccaggccaggcgacatcatcagtttcttgagccagccccagcgcctggtgctgcagtgtcctccaccttctgggccccaagttggagg

SEQ ID NO: 140867 - DNA, 80 bp, Homo sapiens
cctacgtcccgctgccgtcgccgccgccaccatgcccaagagaaagctggagcagatccgcagggacatccgagacttcc

SEQ ID NO: 140868 - DNA, 155 bp, Homo sapiens
caggcggacgaggcggaagaccgcgcgcagggcctgcagcgggagctggacggcgagcgcgagcggcgcgagaaaagtgcctggtgaagaatgtgatgggatcactagcatgtctgcggagagcggccctgggacgagattgagaaatctgccag

SEQ ID NO: 140869 - DNA, 83 bp, Homo sapiens
ccgtccccctgccccgttcacaatggggatatgagactttctactcggaatatcctgagtgttgcgtggatgtaaaacccatt

SEQ ID NO: 140870 - DNA, 100 bp, Homo sapiens
tctcgctcaggtacgagggacgtgtgtatcactacaggatcaataccactgcagatggcaagcttggaactgcagttggctttttgctaccaccagtttt

SEQ ID NO: 140871 - DNA, 98 bp, Homo sapiens
agatgcaagcctggcattttttgatgattgtgtagataaacttcagtatcagacacagcacagcagccatctgaagagcaaagcaagtctcttgaaaa

SEQ ID NO: 140872 - DNA, 75 bp, Homo sapiens
atttggtaatttagcagaacttggaaacccagcgtttgctggcagaaccagttcctggcatcaaagccgaaccag

SEQ ID NO: 140873 - DNA, 96 bp, Homo sapiens
cttttttcatttccatttctaccttgtatgcctcaatttgctggatttaagcactgctgcactttatgagcttcctgcctgacacagctcacttca

SEQ ID NO: 140874 - DNA, 100 bp, Homo sapiens
cccaattcgagcggctagaatcttgcctgctccacagtttgggcccggcaggaagatgggctcccgtggacagggactcttgctggcgtactgcctgctc

SEQ ID NO: 140875 - DNA, 97 bp, Homo sapiens
gacagaagcagatggattcgtccttttagcatggaaataaccagcctgcaagaactggcacactgtcgagaacaaatcctcctactcagaaaccgcc

SEQ ID NO: 140876 - DNA, 82 bp, Homo sapiens
aacggagataaattcccggaaccgcgattcggcgtgtcaggatttttagactctgaggagcagttggagctaatccacatta

SEQ ID NO: 140877 - DNA, 100 bp, Homo sapiens
gagcaaaaggtgacagtcacagcttagtaggttgacagactaatggagttgcattttaaatatctgggtgcaatgcaggtggcggacaagaagattgaag

SEQ ID NO: 140878 - DNA, 75 bp, Homo sapiens
acaagatggtccttaaaaccgaagaggaggacggatgggagtcccagcttctggagacggggttcctggggatct

SEQ ID NO: 140879 - DNA, 85 bp, Homo sapiens
ggcgcggattcgccgaggcaccgaggcactcagaggaggtcaccgacgatgagggcgcacctgctgtcctggagcttccgatctc

SEQ ID NO: 140880 - DNA, 98 bp, Homo sapiens
agagaatgagccagagggacacgctggtgcatctgtttgccggaggacaatgcagatcttcgtgaagactctgactggtaagaccatcaccctcgagg

SEQ ID NO: 140881 - DNA, 88 bp, Homo sapiens
ggcgcgcagcgtgtcaggcggagagacccgccgccagtgtggacgaatgtggaacctcgctctgtggctgtgttcccttggcactcct

SEQ ID NO: 140882 - DNA, 83 bp, Homo sapiens
acttgtggcaagtgtcgagtcccttgcagattccacgccatcggctgcctcgagacgatgatgccaggaaagaccaaagcaga

SEQ ID NO: 140883 - DNA, 100 bp, Homo sapiens
atggcgcgtcttctggagcaatgggagaaaaatatgtcgtaactgcaagtgtggccaagaagagcatgatgtcctcttgagcaatgaagaggatcgaaaa

SEQ ID NO: 140884 - DNA, 90 bp, Homo sapiens
tttttaaagtctttagtatgttgaactggaaatataggacatgcgtttgagatctactgtgaaaaacttggaatataacgtggagcctca

SEQ ID NO: 140885 - DNA, 82 bp, Homo sapiens
gtcccggggccgacccggcccgtagtgtggaagcagcttcagagaaaatattctctttggaatgggaaatcctctgcttgac

SEQ ID NO: 140886 - DNA, 83 bp, Homo sapiens
agagatccagcccccttataagccaaaagctgtgagacacagtaacctggttgaactctgcatctggaaagctgaagactgaa

SEQ ID NO: 140887 - DNA, 100 bp, Homo sapiens
gccaataacctgctgatagagcctgctcgcattgaggaggaagagaataactgaagtgaagtgatggactccgatttggagagtagtaagacgtgaaagg

SEQ ID NO: 140888 - DNA, 100 bp, Homo sapiens
ctttccaaaatggcgcgggtgctgaaggctgcagccgcgaatgccgtagccctggcttgaaaaacagtccaattgatgaaagtgaggtgcaaacagcaac

SEQ ID NO: 140889 - DNA, 95 bp, Homo sapiens
tcttctaagtttttggcaccatatactactttttccagaattcatacaaagagtgtatctcagcgtttgagtcagccaggagtagcaataggttt

SEQ ID NO: 140890 - DNA, 75 bp, Homo sapiens
aattattttgggtcttcttcttaatcccatatctggacatctggaacatccatgatcattgagcgcttgaagctg

SEQ ID NO: 140891 - DNA, 74 bp, Homo sapiens
ggaaggagaactaaatgggagaagaggaatgttccctgacaatttcgttaagattctggaacttttcaaagcct

SEQ ID NO: 140892 - DNA, 100 bp, Homo sapiens
gtccttcgaggccagcgtggccctgctggaggcctcgctgaggaacgacgccgaggaagacctaatctgggagcctgcaagtgacaacagcctttgcggt

SEQ ID NO: 140893 - DNA, 100 bp, Homo sapiens
ttcgttaagggactcaggcagtacgggaagaacttcttcagaattagaaaggagctgcttcccaataaggaaacagtgtcatggagaaactccagctggg

SEQ ID NO: 140894 - DNA, 101 bp, Homo sapiens
tcaaggagtatcttaaaatgtatccagttttatgctgatgagagctataacttaatgcttccattgaagattgacatcattaaacatccaaatgaaacaga

SEQ ID NO: 140895 - DNA, 75 bp, Homo sapiens
ccccatggtgtggtgctgcctctttgtccgttcgcaggtggatttgccgctgcagtcaccacccctctagacgtg

SEQ ID NO: 140896 - DNA, 75 bp, Homo sapiens
gcacgctatattaaactgaggacggggaagactcggacgagaaaacaggtatgcatcttctattgatgatatttt

SEQ ID NO: 140897 - DNA, 83 bp, Homo sapiens
ggccaagcagccaaccatgctcaacttcggtgcctctctccagcagactgcgatggaggaacattgggaggctctttattttc

SEQ ID NO: 140898 - DNA, 100 bp, Homo sapiens
agtggcatgctgaaaatacgaatcgggaaaatgtttataggaggccttagctgggacactacaaagaaagatctgaaggactacttttccaaatttggtg

SEQ ID NO: 140899 - DNA, 100 bp, Homo sapiens
gggcgacacgctgcagggcatcgcgctcaagtacggtgtcacgcagctccacagctgggtcctgctcctcagacaagatggggccagaggcggccccagc

SEQ ID NO: 140900 - DNA, 75 bp, Homo sapiens
ggctcagatggctcggtcatcacggtgcagtcattggagaaatcgatgaagaaacagattctgcgcttgatttgg

SEQ ID NO: 140901 - DNA, 75 bp, Homo sapiens
agcacatccatttcattggcaaggcgccccaagttggagaagaaggatgccaaggagatccccagtgccacccag

SEQ ID NO: 140902 - DNA, 82 bp, Homo sapiens
tctgaggaaaagctcgcaccaggagccattccgtagtgccatcccgagcaacgcactgctgcagcttccctgagcctttcca

SEQ ID NO: 140903 - DNA, 74 bp, Homo sapiens
tatagtgggaagcagacccatgagattctgaaaaagagttccacgtcctcccttatcgagtctttgttcccctt

SEQ ID NO: 140904 - DNA, 100 bp, Homo sapiens
agggaggagatcccctcagttctgcgctgctcccgttccccctccccagagcaaggccccttcacagatgtagtcactacaaatcttaaattgcgaaatc

SEQ ID NO: 140905 - DNA, 100 bp, Homo sapiens
accgatcttcttgtgtcaccatgctattatgcatagaaaggctcatgtgtttcctgttcaaccaccatttgcagaagggtcagatgagtgccttccaaaa

SEQ ID NO: 140906 - DNA, 100 bp, Homo sapiens
agtgaaactgatcagacgaactacgaacccctggacgggagagtctgccggcggagaatataaggacttctcccacgtggaaggccttctttctcaatct

SEQ ID NO: 140907 - DNA, 80 bp, Homo sapiens
ctattccacgagaggatccgcgagtgtattattctgaggttgggaccaagaaggaactatctattttaaaccaaaaattt

SEQ ID NO: 140908 - DNA, 100 bp, Homo sapiens
accggaaacccccgatctacaaacggcatgttaagtgggcagaccaacatccacctcagcaaaaacttcttcctgacgaatcgcgccagggagcgctcag

SEQ ID NO: 140909 - DNA, 100 bp, Homo sapiens
acaaatgcagaagtaagaggatttatagatcagaatctcagtccaacaaaaggggctttgttatgcacctaaagccatattggaagctccagaagaaaga

SEQ ID NO: 140910 - DNA, 83 bp, Homo sapiens
ttagaaaggagctgcttcccaataaggaaacaaattcagaaggagctggcggacatcactttagaccctccacctaattgcag

SEQ ID NO: 140911 - DNA, 74 bp, Homo sapiens
acggtcctaagagctgggcaccaggaagcgaaggctgatcatggaagggaagtggttgctgtgtatgttactgg

SEQ ID NO: 140912 - DNA, 100 bp, Homo sapiens
gttggtcccatgggcctccttgtggtcctgctcgttggaggctgtgcagcagaagaaaataatgttgagtttccatgaagaacaggaagtactgccagaa

SEQ ID NO: 140913 - DNA, 50 bp, Homo sapiens
gtgggcggccgcgagatcctcaaggaggaagttaacatccctaataggag

SEQ ID NO: 140914 - DNA, 100 bp, Homo sapiens
tcagcgagggccgagcctacgacacggacgcaggcccagtgttcgtcaaagtcaaccgcaggacgcaggatatgctgcaggctgctagtcattatcgcca

SEQ ID NO: 140915 - DNA, 100 bp, Homo sapiens
agctcacgcccttcgagatgctgatgcaggacatccgggcccggaactacaagctgcgcaaggtcatgggtttgagaaatactttaagaggagtggaagg

SEQ ID NO: 140916 - DNA, 90 bp, Homo sapiens
cggcgcccgcgcctcgggccgtcgggagcggagcctcctcgggaccagttccagatttcggaaggttcacgagtgttgccgacacgccct

SEQ ID NO: 140917 - DNA, 75 bp, Homo sapiens
gaggaggcaggagaagaaagccggaaacttggctgtaacttcaaaagaagatttgattctttatttctggactgc

SEQ ID NO: 140918 - DNA, 98 bp, Homo sapiens
ttgtccctacatcttctcttctgactttggctacatctcatactgagaaacaatggtccaagttcattcagcaaggcaatgctccatcttcagtggcc

SEQ ID NO: 140919 - DNA, 51 bp, Homo sapiens
gaaaactcccctccccttccttgcttagagacggggtttcaccgtgttagc

SEQ ID NO: 140920 - DNA, 100 bp, Homo sapiens
gcagctccggcagcagtgtcctgtgctgatggtgttggcagagttttgccgaattgacaagcccctgtgtcacagtgaggatgagaaactcagcttcgag

SEQ ID NO: 140921 - DNA, 74 bp, Homo sapiens
cggaggaccgaagcttccggacgacgaggaaccgcccaacatggcctcggaggaggtcacaagccccaaagtgg

SEQ ID NO: 140922 - DNA, 50 bp, Homo sapiens
aatatttaacaaagctttggttgatccagatggtgttatctgaaaaggtt

SEQ ID NO: 140923 - DNA, 95 bp, Homo sapiens
aatgaagatgatgcaatggaattgctgggagattatttggtagcaattgaagagaaaaacaaagctacatttctacgtgcttatgtgaactggag

SEQ ID NO: 140924 - DNA, 101 bp, Homo sapiens
tgccatcttcaaagcctttgctatgatcattgacaaactggaagagttaagtgggcagaccaacatccacctcagcaaaaacttcttcctgacgaatcgcg

SEQ ID NO: 140925 - DNA, 100 bp, Homo sapiens
atctgtatactcttcacaggggagaaactgaagccaaaattaaggatgctcaactgcaaaatgctcggtgtgtcctgcaaattgataatgctaaactggc

SEQ ID NO: 140926 - DNA, 90 bp, Homo sapiens
gagagagcgagctgagtggttgtgtggtcgcgtctcggaaaccggtagcgcttgcagcatgtgtggacgaatgtggaacctcgctctgtg

SEQ ID NO: 140927 - DNA, 101 bp, Homo sapiens
aatgaagagaacccagggaagttcctttttgaagtagttccagctgttccatttcctccaagtcaccggcttacagcaaaagaagtgtttgataatgatgg

SEQ ID NO: 140928 - DNA, 100 bp, Homo sapiens
gaagattcaccaaataagctatatactttggttacctatgtacctgttaccactttcaaaaaacattaaccaggtggtatttgttggaaatttcttgaga

SEQ ID NO: 140929 - DNA, 101 bp, Homo sapiens
ctcaaggaagtgaactacatgtgtcccctcaattcagatggctatcctgacaggcgccaagcccatctttgtgtgcttgcatccaactgtgatgagcctat

SEQ ID NO: 140930 - DNA, 100 bp, Homo sapiens
tatactccaagaaaaaaaccacaaatgtttttctgttttgcctgaatacatgatttaaacaagagatttccacagaagtaagactttgaccccgacgcag

SEQ ID NO: 140931 - DNA, 100 bp, Homo sapiens
ccaggacctctccactgcctcctccacccctgtatttcacttggctctccaaattgactcaactccaggaagacaccatggaggagtctgggtggaagtt

SEQ ID NO: 140932 - DNA, 98 bp, Homo sapiens
cgccaccccctccgcccagcagcagtatggcttccagtacccccttgccatggcagcaaaactgtggtacagacctccatgagccggtcccaggtagc

SEQ ID NO: 140933 - DNA, 100 bp, Homo sapiens
gcggcctcgccggggacccggccatggcgctggacttcttggctggatgcgcgggggacgttccatcctcagagcagcctgaactgttcctaaagaaact

SEQ ID NO: 140934 - DNA, 87 bp, Homo sapiens
gagagaagaactgcctgggcatgaaactggataaaagaatcagagtgtctcaacccttgacaagaggaccaagtgcctttattccag

SEQ ID NO: 140935 - DNA, 75 bp, Homo sapiens
gcggcggccgcagctgccacaaaccagttgattatggaagattcccacaagagtaccacgtcagagacagcacct

SEQ ID NO: 140936 - DNA, 74 bp, Homo sapiens
ataaagtcagatcttgtgaatgaagaagcaactggacagttccatgtataccaactgttcgtcaggtggcacag

SEQ ID NO: 140937 - DNA, 100 bp, Homo sapiens
ggcgggctctacatcgtcactgagtacatggccaagggcccttaaagaccttcacccgtgtgaagaaaggcctgcactgaggagctgtccaggatctaag

SEQ ID NO: 140938 - DNA, 93 bp, Homo sapiens
ccgggatttgggtcgcagttcttgtttgtggatcgctgtgatcgtcacttggtctataacttgacccaggagttcttccggcacgataaacca

SEQ ID NO: 140939 - DNA, 100 bp, Homo sapiens
atggcttatgtacctccaccccagtctggtcacttcagcggccaccctgccctccaaaggttcattctgctttggtgaagcacgtgcagtctaaaggata

SEQ ID NO: 140940 - DNA, 98 bp, Homo sapiens
agcagtgggcttttcacagtgggctttactgtgttgaggtgtgactgcacagaaaagttacaaaacaaatttgactttttgcgctcacagttgaatga

SEQ ID NO: 140941 - DNA, 100 bp, Homo sapiens
cttcagcgaccacgcaggcactttcccggtccccaggtggtggagtttgacaccccatcggtccttctgtccaacgacagttcccgattctatgccatgt

SEQ ID NO: 140942 - DNA, 75 bp, Homo sapiens
gaagcgtcgggattaggtgaaaacttcagattttcctgtccttgatcccagctggactgctcaagaagaaatggc

SEQ ID NO: 140943 - DNA, 96 bp, Homo sapiens
ccgtttagtctcctcctcggcgggagccctcgcgacgcgcccggcccggagcccccagcgcagcggccgcgccaccagctgaacaggccaaagcca

SEQ ID NO: 140944 - DNA, 75 bp, Homo sapiens
ggaactagtgaaggaggaagagaatcttcagctttaaggaagcctcctatttcagtttctcaacatgaaagtcat

SEQ ID NO: 140945 - DNA, 75 bp, Homo sapiens
gcgcgggggcgacgcgcgggaacaacgcgagtcggcgcgcgggacgaaggtgaagctttgttctaagaatatttg

SEQ ID NO: 140946 - DNA, 90 bp, Homo sapiens
gacgacggcctcgtgctgtgaaggttgattcttcaccacactgaaaccattaggaaaaatccttgtggttaacagcagaggcttcagagt

SEQ ID NO: 140947 - DNA, 82 bp, Homo sapiens
tgatgaagttcgagcactaatatttaagaaagaagatgttaactttcagattgtcactgctgttccaagggcacacgcagag

SEQ ID NO: 140948 - DNA, 100 bp, Homo sapiens
tgctcttccaacaccagtggaagatgatcacatcccagccatccagtccaatggatcagatgggcaagatgagacctcagccatatggcgggactaaccc

SEQ ID NO: 140949 - DNA, 50 bp, Homo sapiens
cttctggagctagagcttgacagcgggctgattcaccccaagagtggccg

SEQ ID NO: 140950 - DNA, 90 bp, Homo sapiens
ccccagaattctccagtcaaggattactatctgcgagctgtttgaacttctgctccttgggaaattaagatggagtctcgctctgttgcc

SEQ ID NO: 140951 - DNA, 100 bp, Homo sapiens
ttactgtggacttggcttcgcgctctggtgtctctgcagtgccatctgggattgacagctcagcctgaactctatcttctgaacaccatggacgctgact

SEQ ID NO: 140952 - DNA, 100 bp, Homo sapiens
aacaatggcatttacagaaagagtcaacagcagtggcaacagtgggtaattccagaattgattggccataccattgtcactgtattactgctcatgtcat

SEQ ID NO: 140953 - DNA, 100 bp, Homo sapiens
agttgctgcccttccggagtccgccccgtgaggagaatgctttagccacagtagaagacttccagattcgtccacatactctctatgtacattcttacaa

SEQ ID NO: 140954 - DNA, 83 bp, Homo sapiens
cttggactgagtcctgcaggacacaggagtctcgctctcagtcaaaatctccaacgggaactcctgctcgtgtaaaatcggag

SEQ ID NO: 140955 - DNA, 98 bp, Homo sapiens
gaacccttgaaggatgcaggtgatggtgttcgatacttgctcaggctcctgcttacattcgggagtgtgcgagattgcactatttgggatccagaact

SEQ ID NO: 140956 - DNA, 50 bp, Homo sapiens
cctgggagctggaggaaccgcgtgctctggaactgaacccgcagtatctt

SEQ ID NO: 140957 - DNA, 89 bp, Homo sapiens
ggatggagtaccagtagctttaaaaaaagtgcagcctcaaggaataggttctcctagtgtctatcatgcagttatcgtcatctttttgg

SEQ ID NO: 140958 - DNA, 82 bp, Homo sapiens
gcggatctcaccgccgctcaggtgatcagggccaaagcggtcagtgagaaggaagtggactctggaaacgacatttatggca

SEQ ID NO: 140959 - DNA, 96 bp, Homo sapiens
cctagaaaaggccataatgggacaatagagtttaccagcttggatgcccacaagggagtagcgacatctcgaatcagcgatgcacacttggcagac

SEQ ID NO: 140960 - DNA, 100 bp, Homo sapiens
cagcaccgcagatgttgtcaaggtggcctaccaggaggccaggggtgtcgccatggcagtcatggatcaggtaatgcagtttgttgagccaagtcggcag

SEQ ID NO: 140961 - DNA, 100 bp, Homo sapiens
ggaaagctgtgaaagttctcaagacacccatcatactgactccaagccccttgctctccagtatccacttctggagtactctcagtcctgttgctcccct

SEQ ID NO: 140962 - DNA, 100 bp, Homo sapiens
tgagagttcaaagattctttgtagcagacactgcaaatgaagctctcgaggctgctaagagactaacggagctccctgggtcctcagcagtgaggctggc

SEQ ID NO: 140963 - DNA, 50 bp, Homo sapiens
cgagcagaaagaatgtctttcaggacatggatttgattgacatactttgg

SEQ ID NO: 140964 - DNA, 75 bp, Homo sapiens
gtctttgctcccggagcgcttgaaggagctgcggatgtgtatatctcatgattgatatggagaaactagtcatgg

SEQ ID NO: 140965 - DNA, 82 bp, Homo sapiens
cagtgactaccaacgtttggaccagaagggctgaaagaatcaggattcctgaaccttggatcacacctccagatttgcaaga

SEQ ID NO: 140966 - DNA, 100 bp, Homo sapiens
cgggcctctggaatttagcgctcgcccagctagccgcaggtacctccctctgcaggatatcatgtgtatggaatgtctttcccggaagctaaaggaagca

SEQ ID NO: 140967 - DNA, 74 bp, Homo sapiens
tttagggtcctttatatagaagggagagtaggattttaaactgtctacggttcttaacctcatctgttaagttc

SEQ ID NO: 140968 - DNA, 75 bp, Homo sapiens
ctcccaaagtgctagtattacagaggagcccaaggtgggcatcaagaccatcaaggtgtactgccagcgcatgca

SEQ ID NO: 140969 - DNA, 99 bp, Homo sapiens
ctgagacactgcaggactaaccagtttgaagaagaagaggacagtgctccagtgaaagtggaagaacaaaggaagatgagtcaggatagtgtccatcac

SEQ ID NO: 140970 - DNA, 98 bp, Homo sapiens
agaaccagatccgggagcacgtcatcgccatcgaaggttgcagatgaatacatgttttccctagaagagaataagaagtccaagggacgccgtcagcc

SEQ ID NO: 140971 - DNA, 90 bp, Homo sapiens
tgagatcgtggacaagatcatgggcaaaggacagatccaggagctgacatggacccaaatcctcgggccgccctggagcgccagcagctc

SEQ ID NO: 140972 - DNA, 75 bp, Homo sapiens
ctgaccaaggaggtgatggtggatgacaggctagtcacaatgcagatctgactgcagccatgagcagcaatgagt

SEQ ID NO: 140973 - DNA, 99 bp, Homo sapiens
ctgtccgaaggagctccaggaagagcaaagccgagctgcagggtctgcaagtggatgatgagattgtggagttcggctctgtgaacacccagaacttcc

SEQ ID NO: 140974 - DNA, 88 bp, Homo sapiens
ggccgggatccggcccctcccctcgcctcctctcctaggtgccggccgggagggcggccgcagcagaggctgggaggcggcagaatgc

SEQ ID NO: 140975 - DNA, 98 bp, Homo sapiens
catcctcctttgaaaattgatggcaaaactattggggttgattttgcaaaaagtgccagaaaggctcctcctactccagagaggaaacctcatccagg

SEQ ID NO: 140976 - DNA, 88 bp, Homo sapiens
gacggggaggaggagcaggagctggaggaggagccgccgccgccaggtagaacacctgaaggagaagctcattagccaggcccaggaa

SEQ ID NO: 140977 - DNA, 100 bp, Homo sapiens
aggaggaggcgataggccggggtctgcacatgtgcgtgctacagcctgttccacggtgcgtggcgtgcggggcagtagagacgggatttcaccatgttgg

SEQ ID NO: 140978 - DNA, 90 bp, Homo sapiens
cgcgcagctgccgaacgacgtggtcctacagatgctgatggaaagttaagcgtgaaatttggggtcctcttccgtgatgataaatgtgcc

SEQ ID NO: 140979 - DNA, 100 bp, Homo sapiens
gccctgcagtcgcctccaacacccgctgctgcccgcccgctgcctgcctgcctggcatctctctctcccgaaggtagaagatagcaccatgccgattcgt

SEQ ID NO: 140980 - DNA, 82 bp, Homo sapiens
cgcgggcagcgaaccgggggagcgaggcacgagttattaagcctacgctcagatcaaggtagcagctagactggtgtgacaa

SEQ ID NO: 140981 - DNA, 82 bp, Homo sapiens
ggcagccgagaaggtgtccgaggcccgcaaaatctgatcatcggatatcatggagtctggcaagacggcttctcccaagagc

SEQ ID NO: 140982 - DNA, 98 bp, Homo sapiens
ctggatctcatcaaaaaggacaccagcaagctgttcaatgaggagttgaaaacgaggcccactgcgactttgtgaagctgcgggagatgctgattcgg

SEQ ID NO: 140983 - DNA, 100 bp, Homo sapiens
ttgagaaaacctaatggaatgatattaccagtgaccaaaagtgctacaactgtgaggaggaggccatgtaccactgctgctggaacacatcctactgctc

SEQ ID NO: 140984 - DNA, 83 bp, Homo sapiens
cgaatcttcactcccgctgtctcagcagtctacagcacggtgctgggtaggccaggtttcagcatcgcagacaagaagcgcag

SEQ ID NO: 140985 - DNA, 75 bp, Homo sapiens
ctgcagaacccccagaccatcattctgtagatggacggcagatccgagtagaccaggcaggcaagtcgtcagaca

SEQ ID NO: 140986 - DNA, 75 bp, Homo sapiens
agcgggagacaaatggaaacctccacagttacagaatgtctgaaggggacagtgtgggagaatccgtccatggga

SEQ ID NO: 140987 - DNA, 98 bp, Homo sapiens
ccccactcctgctgggctgaagagcatcttggagaaccagccacgcagcaagcctctctggatgtggagaagccggttggtgttgctgcttccttgtc

SEQ ID NO: 140988 - DNA, 98 bp, Homo sapiens
cgaggagggagaagacgaggatgatgcggaaattaaccccaagtactatactggcaattgctggagaagattttgcaattgttgcttctgatactcga

SEQ ID NO: 140989 - DNA, 100 bp, Homo sapiens
gaagatctatgggtcagacagaattgcccagcagcaaagaaacctggataacatcgtcttgcaacaacccagaataggtagcaagaggaaatctaagaaa

SEQ ID NO: 140990 - DNA, 76 bp, Homo sapiens
cccatgtcctctatttcaaaaatggcgcaaatctgtccaaggctgcctggggagcattggagaagaatggcaccca

SEQ ID NO: 140991 - DNA, 75 bp, Homo sapiens
ccaagtttggaaagctcttttaacggttatctaccttgcctgctcctatgccacagtgtacctgatctacctgaa

SEQ ID NO: 140992 - DNA, 98 bp, Homo sapiens
agagtatcaggaatttgaagagatgctggaacatgcagagtctgcacaattttttgaagggaaggagctaagattgaagcaggaatactttgtggtgg

SEQ ID NO: 140993 - DNA, 82 bp, Homo sapiens
ggggacggcagtgctgaggcggaacaggccgggcaccaaggcgcaggacatggatttgattgacatactttggaggcaagat

SEQ ID NO: 140994 - DNA, 75 bp, Homo sapiens
aacagttaatcctcaatttaagcctgatctaacccctagaaacaggatagaactggaggaacctccacttgtttt

SEQ ID NO: 140995 - DNA, 50 bp, Homo sapiens
ctgaacttcatgcttgacaatctcgcaggactggctggacaatggcccag

SEQ ID NO: 140996 - DNA, 78 bp, Homo sapiens
aagcgccttctcattcagaagaactgcctcctcttgctcagctgacaagacctacatgttacgagaatatacgtcacg

SEQ ID NO: 140997 - DNA, 46 bp, Homo sapiens
gacgccggaagccgggaaatggtttacccaaggtccagcctagccc

SEQ ID NO: 140998 - DNA, 90 bp, Homo sapiens
cagattttaagcagcatgttcagataaatctgaatggaagagtgagcatctctggaagttgatggtagaagaatccgatttactgggtca

SEQ ID NO: 140999 - DNA, 100 bp, Homo sapiens
ggtgctgcgctgcgccgacggctccacctacaagccgcaaggaggaagccgtgcgtggactagaggaggcgtccccgctggtcaccagcatcgcactggg

SEQ ID NO: 141000 - DNA, 82 bp, Homo sapiens
catggacctcgcaggccgcaaggtgctgctcttcgtctcaggtgatgaccccacaaggaagaggtactgttgcagccgctgc

SEQ ID NO: 141001 - DNA, 76 bp, Homo sapiens
ggcgctttcactggaccgcgccggctgcgctgcaggtggctgatgccatgaaacagatgcaggagaagaagaatgt

SEQ ID NO: 141002 - DNA, 80 bp, Homo sapiens
tgtggaccctcgtgagcgacccggacaccgacgcgctcatctgctggagcccggtcgcaatggaagaagagatcgccgcg

SEQ ID NO: 141003 - DNA, 100 bp, Homo sapiens
gacagccttcatttctctgaacatactgccttatgggacagatcaaaacagctttgctgagccatcaaggtctaatggaagcatggttcggcattcttca

SEQ ID NO: 141004 - DNA, 71 bp, Homo sapiens
gttcaccatcctggccccggaagctgtcacgggaagtctttttaggataaacgtaggcctgcgtggcctgg

SEQ ID NO: 141005 - DNA, 74 bp, Homo sapiens
aggaattcgccgtgcccgagaatagctccgtccagcaggtattactcagcacagaaattcaggagacacagaca

SEQ ID NO: 141006 - DNA, 73 bp, Homo sapiens
gggcgacccggtgtgtgggccagcggagctccgggagatgcagttaaagacttgatgcttcgctttctgggtg

SEQ ID NO: 141007 - DNA, 96 bp, Homo sapiens
tagccttgcgactggcccagtatccaggtcgaggttctgcagaaggttgtgactttagtatacaggcagatgattctggaccagatgaagcctgag

SEQ ID NO: 141008 - DNA, 99 bp, Homo sapiens
atcctctctgcgagggcagctccgctactctcacctgtgtgcctttgggaaacctgattgttgtaaatgggtgtacaactatgagcctttgacacagct

SEQ ID NO: 141009 - DNA, 75 bp, Homo sapiens
gccatcctggaactgctaaaggtccgcaagcaggtggtgaacatcccgtccttcattgtccgcctggattcccag

SEQ ID NO: 141010 - DNA, 100 bp, Homo sapiens
tgagagaactatttgagcaagctgtggatatgctgcaggctgctagtcattatcgccaaaatagaaactctttgtatagaagagaagaatcactagaaaa

SEQ ID NO: 141011 - DNA, 97 bp, Homo sapiens
ccgggatcgtgaccgagaccgtgaccgagagcgtgaccgagagcgcgaatatcgtcatcgttagaagaactgataaatttcaaacggaagagagtgg

SEQ ID NO: 141012 - DNA, 100 bp, Homo sapiens
caccagcatcaggcttctttccctactgttcgttcaccaacggcgagacttccccaactgtgtccatggcagaattagattggtggaacgagaatgccta

SEQ ID NO: 141013 - DNA, 75 bp, Homo sapiens
tcatttccatcatttcctgctaagccaaacagagaaggacagtcattttgtttactcattcagccctgttgcagg

SEQ ID NO: 141014 - DNA, 90 bp, Homo sapiens
ggcacgagctggagggagaatttcaagaactgcaggaagagttacaggccaacctggacctgatccaaacctacagaatgcatattgccc

SEQ ID NO: 141015 - DNA, 75 bp, Homo sapiens
ggctgctcccatcattgatgtggtgcgatcgttgcaagtcaccaatgttctgtctcagcctctgactcaggccac

SEQ ID NO: 141016 - DNA, 100 bp, Homo sapiens
ccacttcttcacggaccagtttcagttcgccgatgggaaacccggagaccaaatccttgacctgcctagagctggaacgttacctccagagcgagccctg

SEQ ID NO: 141017 - DNA, 100 bp, Homo sapiens
gaggaagtcgcgggagctcacaaattgagggggattctcgcattgtggagttctaggggatgttttcactccagaatgcaaattcaaggaatctgtgttt

SEQ ID NO: 141018 - DNA, 87 bp, Homo sapiens
caggcctttcggaggctcctcatccctcggaggtcatcccttactccaggggacggcaaaacagaacagaaaggcggagataaaaag

SEQ ID NO: 141019 - DNA, 98 bp, Homo sapiens
tttaagcctgatctaacccctagaaacagctcagaattctgcaaatgcagattttgcaaactttgatgcatttggacagtctagtggttcgagtaatt

SEQ ID NO: 141020 - DNA, 76 bp, Homo sapiens
gaggcgggacgtcatggaagtagtttatgtggccgaggcagacaagtggaattaggccttgctgcaggggacttca

SEQ ID NO: 141021 - DNA, 98 bp, Homo sapiens
cccactccggaaatgtcactcccaccgccccaccgtacttgcaagaaagcagccccagagctggatgaagaagccccgatgcggtgtacctgaccaga

SEQ ID NO: 141022 - DNA, 87 bp, Homo sapiens
cagctgcctcagttcttagcgcaggaactcgaatcatttatgacagaaagtttctgttggatcgtcgcaattctcccatggctcaga

SEQ ID NO: 141023 - DNA, 90 bp, Homo sapiens
cgttgcctggctccacgccctgctgggtcctacctgtcagagccccaagaatttcgctaaggagtttgtgatcagtgatcggaaggagct

SEQ ID NO: 141024 - DNA, 51 bp, Homo sapiens
agctgcctcagttcttagcgcagggtgaagccacttcattatatatcctgg

SEQ ID NO: 141025 - DNA, 100 bp, Homo sapiens
acgaactccgcaatgaggacgttcaggttacctgggcttgtatgtgttctatgtggtcactgtgattctctgcacctggatctaccaacggcaacggaga

SEQ ID NO: 141026 - DNA, 50 bp, Homo sapiens
tgccaagcagccttagccctagtgtagagcattctcccagatggtgatca

SEQ ID NO: 141027 - DNA, 50 bp, Homo sapiens
caccgtggtgacattgtatcattggtaggatgttaagcaagtttttggac

SEQ ID NO: 141028 - DNA, 50 bp, Homo sapiens
cattcaactccctactttgtccatcagaaaaccagtctatccaagaccag

SEQ ID NO: 141029 - DNA, 75 bp, Homo sapiens
gtggcgaatggggctcacgtcgagtccaggtcaagacctcgtctccgttctcatagtcgtagcagtgaaaggtcc

SEQ ID NO: 141030 - DNA, 87 bp, Homo sapiens
attatgctgcagcatattgtactggcctgctgctggcccgcaggcactagaaagtttgggatttggctcttacatcagtgaagtaaa

SEQ ID NO: 141031 - DNA, 98 bp, Homo sapiens
gccttcattaacagactactcagtaccattccaccatacgccaatatcaagcatgtcatcagatttgccaggtagtgggcagcagtcagtgacaggtg

SEQ ID NO: 141032 - DNA, 74 bp, Homo sapiens
tgagcctcaggctttaggaactgaagaggttcaggaacaagtgcatcccactctctcagctaatgaagagtctc

SEQ ID NO: 141033 - DNA, 80 bp, Homo sapiens
gggtcgctttgctgtacatcgtattacacctgaggaggccaagagcacctgttccttcaggccttctggcagaccatgaa

SEQ ID NO: 141034 - DNA, 100 bp, Homo sapiens
agcgggtgcgtctgccgcagagtcggcacctgaaggacatggagctatctcccctggttcgaggtattttataagctgcttaacatcctggcagattaca

SEQ ID NO: 141035 - DNA, 74 bp, Homo sapiens
tcctgatccgggagagtgagagctccccaggggagttctctgtgtctgtgaacagcagtgttgtactgctactt

SEQ ID NO: 141036 - DNA, 82 bp, Homo sapiens
aggaaccactcattcacttctagacgacaaaatgcaaaaaaggaggccaaagactttcttctggtagatgaattgagagatg

SEQ ID NO: 141037 - DNA, 98 bp, Homo sapiens
cgcaaagcggggacccagaccctggagcctcagttggaagcagccgatccagcctgcggagcctgtggggcaggtggcagagatgcatggcgagctga

SEQ ID NO: 141038 - DNA, 101 bp, Homo sapiens
cggagcgcctccttcgcaggcttcagcagtgcacagagccggaggatcgcgaattgaatgatctggcacgggaccctccagcacagtgttcagcaggtcct

SEQ ID NO: 141039 - DNA, 82 bp, Homo sapiens
gattgctcctggagcagttgtatgtgtagaaagtgaaatcagaggagatgtaactatcggaatgaaaggaattacccagcct

SEQ ID NO: 141040 - DNA, 111 bp, Homo sapiens
ctggccttctgtatcttcatggtgcggctcatcttcgagaggtaagaagagttcctgggtcaagtggtcaccttcataaaaccgaagacggggactgggagtggagtgacg

SEQ ID NO: 141041 - DNA, 101 bp, Homo sapiens
cgggactgcactcgagtgtccagacctgctcgatggatgtacagttacccagcacgtgtacctcctcctcctcctattgctcgggctgtagtgccctcgaa

SEQ ID NO: 141042 - DNA, 80 bp, Homo sapiens
ggccttgatctactgcaggaaaaagcggatttcagtttggtgccctggttgtcagatgttggaaagcagtaggacggaac

SEQ ID NO: 141043 - DNA, 101 bp, Homo sapiens
agtgtatatcaagccacaatttccatcaaaaagtgattaagcagagaatggagaagaaggttgattccaggagggagaagagattgtgataacaaccacaa

SEQ ID NO: 141044 - DNA, 98 bp, Homo sapiens
gggaagatggcggcgccgctcatccccctctcccagcagttacagaatgtctgaaggggacagtgtgggagaatccgtccatgggaaaccttcggtgg

SEQ ID NO: 141045 - DNA, 83 bp, Homo sapiens
aaagagataaaagcggaagtttgccacacgggtgagcttgtcggccacagactgctacattgtgcatgagatctacaatgggg

SEQ ID NO: 141046 - DNA, 90 bp, Homo sapiens
aagactcctacctgaaacatacggagattgacaatcaatgggccatcttggacgagtgaaccagaggaaatgcctccagaagcaaagatg

SEQ ID NO: 141047 - DNA, 82 bp, Homo sapiens
gcgcgcctgaagtcggcgtgggcgtttgaggaagctggatgaataatacggcagctagtccaatgtctactgcaacttcaag

SEQ ID NO: 141048 - DNA, 127 bp, Homo sapiens
aagtttgagagaagtttaagagaagaaatggacatgattgcctaaatcagccaaacacagggaatcatattgacaggtcatgaaaatgagaccaaaagatctctggaagcgattaatgataaaattt

SEQ ID NO: 141049 - DNA, 96 bp, Homo sapiens
tgaagaagtgaagaaattattggtacctgcaaaacaaagggtcatcctttctagaaagagaaccgctgtgctatcaggagggaaataatccaagtg

SEQ ID NO: 141050 - DNA, 82 bp, Homo sapiens
ggacggcgcggtggtcgggacagactggccgttgctgtggagacgcctggtgttggtggaatgagcgttgcatgtgtcttga

SEQ ID NO: 141051 - DNA, 101 bp, Homo sapiens
ttcacaattgcagcagatgaagatccattggtaaattgatcaggatttttggcctaccctccaaagaaaaggatttccagatgtgacttgcactcagaaga

SEQ ID NO: 141052 - DNA, 50 bp, Homo sapiens
tggaggaatcctgatactgagcggttttaaaatcaaagatgggaaaatcg

SEQ ID NO: 141053 - DNA, 76 bp, Homo sapiens
tacgaaccatgaagatgcgtcaacaagctgaagaaaaggtgactggtctcatgagccctgaagaatgaactcagag

SEQ ID NO: 141054 - DNA, 122 bp, Homo sapiens
gcgcctgggccgccggctgtttaacttcgcttccgctggcccatagtgatctttgcagtgacccaggtctggagcccccaactcccttgacagtgtacgctggagcaggttccagggtgggg

SEQ ID NO: 141055 - DNA, 75 bp, Homo sapiens
gctgccctcccatcctcaagggccagtgggaactctaatattgggacattccagctacatcacacaccttgactg

SEQ ID NO: 141056 - DNA, 100 bp, Homo sapiens
ggattctctcagcccgacagttcggtgactccttgcgtccccgcggtgtccatgaacagaggcagttgcagtggtgcagaatggctgacctcagtcttgc

SEQ ID NO: 141057 - DNA, 100 bp, Homo sapiens
cgatcttatggagagcctcataaacgaccagaagttcagaattcaactgtggagttcattgcttcttcagattacatgtcaatttgctaatgaagacact

SEQ ID NO: 141058 - DNA, 90 bp, Homo sapiens
gttgctcttctccgccgcggcactgatccccacaggactatcctattaagtgtaatctcactgcttaatgagcccaacaccttctcccca

SEQ ID NO: 141059 - DNA, 88 bp, Homo sapiens
agccggctgctgtgggaggtcagtgaaggaggctcagttcatggtattgcgcagcgatgcacggccatcaagtaccacttttctcagc

SEQ ID NO: 141060 - DNA, 74 bp, Homo sapiens
ctcatcctggttctggaatcctcagttcaagatccttctgttttacgaggccctctgctaggccacacggatgc

SEQ ID NO: 141061 - DNA, 74 bp, Homo sapiens
atactgaaatatccttacttgcttctacatgaacgtgttaactctcagcgttctcatctctcttccttcaccat

SEQ ID NO: 141062 - DNA, 97 bp, Homo sapiens
ggcgcgtcaggccgcgacgagggcgctgaggtttgactatgaggggttggatcccaagacgacatattatatcatgagggacctggaggccctggtc

SEQ ID NO: 141063 - DNA, 100 bp, Homo sapiens
ctccagaccgtgaagggcccagcctctctggagagaatgagctggtgttcggggtgcaggtgacctgtcaggtggggaccaatgccatggacagccccct

SEQ ID NO: 141064 - DNA, 82 bp, Homo sapiens
ccttcgttgccctctgtgccacagcttccgccctgcgctgccagtctcctacctgcaggccgagctggccttcgagggcgag

SEQ ID NO: 141065 - DNA, 73 bp, Homo sapiens
acaaattatgctgcagcatattgtactggcctgctgctggcccgcagggttgagtaccttgtacagcagaatg

SEQ ID NO: 141066 - DNA, 98 bp, Homo sapiens
ttggttggtgatggtccacaaaacagttccaatgacaggatttacacagagagcaactattgatccagaactgaatgaaatacacgtcttatctggac

SEQ ID NO: 141067 - DNA, 75 bp, Homo sapiens
tgcgatttttcttcacagccagtttctggtgagaagaaatttgtttgtccagaatgttcaaaacgctttatgaga

SEQ ID NO: 141068 - DNA, 74 bp, Homo sapiens
tacaagttccctcctgctgctttgccccaggaattcagcgccttcttccaaggcgttgacccggacgacaccta

SEQ ID NO: 141069 - DNA, 75 bp, Homo sapiens
ggcacccacggagcctccggggctgagagctgttacaatttgtaaaagcaaatgatgatgtagctcaagagattg

SEQ ID NO: 141070 - DNA, 101 bp, Homo sapiens
ggctggggctccctgtatgcatggtgtggggttggtgtgattagcttcgcagtctggaaagctttaggagttcacagtgttgctggtaaaattcctcctag

SEQ ID NO: 141071 - DNA, 83 bp, Homo sapiens
aactacagtgctggtgagatgtgtaagtggatgttccttcaacttgtgccttcttggaatggatctttaaaacagcttttgac

SEQ ID NO: 141072 - DNA, 100 bp, Homo sapiens
catctttcttacaacgggcattgtcgtgtcagcttttggactccctattgtatttgccagagcacatctgggcattctacttggacaagtcaaattcacc

SEQ ID NO: 141073 - DNA, 74 bp, Homo sapiens
gttttcaggccacaaatgctttcacagaaacgatggaaagaactttctaaggaagacttatctcctgcctttga

SEQ ID NO: 141074 - DNA, 100 bp, Homo sapiens
tgcatcaatccctaccactataagagagtagaaagccctggccataaaattttgagtagaaaaatccagaaatttgaaaatcagtatcgtggtagagagc

SEQ ID NO: 141075 - DNA, 100 bp, Homo sapiens
agcggattgagccaggacacaacaccgcggagccctgcaggcgcaagagtgagccatggagctacgtgtggggaacaagtaccgcctgggacggaagatc

SEQ ID NO: 141076 - DNA, 124 bp, Homo sapiens
gaagcaccagggtgtccccgccgccctcagctcgaagtcagccaccatggaggcgcaggcacaaggaggcagcacccagggtcattcctggagcataaacgatccctgcagaacatgggctaga

SEQ ID NO: 141077 - DNA, 100 bp, Homo sapiens
aagatggttctggagatggaaataagctgagatctgtatctgtggacctgaatgttgatccctcgcttcagattgacatacctgatgcgctcagtgagag

SEQ ID NO: 141078 - DNA, 75 bp, Homo sapiens
gcccagagttggagccaattaaaccaggtacccactgatggtaatgctggcctgctggctgaaccccagattgcc

SEQ ID NO: 141079 - DNA, 90 bp, Homo sapiens
cacagttcctaccttatgagctcggttttcttatgcttataagagtggaacagagccccacagtcttcgttataacctcacggtgctgtc

SEQ ID NO: 141080 - DNA, 51 bp, Homo sapiens
acctcctcctccgcctccaaagtcgcgatttctacctggacaaggactggt

SEQ ID NO: 141081 - DNA, 75 bp, Homo sapiens
caaaatcggagacagagtattggctctacagattctcccctgcccctggagaaggaggagcaggtccgacttcag

SEQ ID NO: 141082 - DNA, 75 bp, Homo sapiens
ccagagcgtcttgatccttttgcagatggagtttcaattactgaaaattacttggaaatagaaggaatggctaat

SEQ ID NO: 141083 - DNA, 90 bp, Homo sapiens
cctttattggtacaccatattgggacctccaggtgcatggattggtgctgcccctcatgctgcccagcttctactcagagctcttcacgc

SEQ ID NO: 141084 - DNA, 100 bp, Homo sapiens
ccagaactctgtcaaatgaagaacactttcaagaaccagagatatagatcagctatcaggaagggacttctgccattcaaagaaaatgacaggaagtaac

SEQ ID NO: 141085 - DNA, 100 bp, Homo sapiens
cttctacccaccctcggacccagggcagccgtgcccatttccccagggcatggaggacactttgccaccatcaccttgaccttcatcgacaagaacggag

SEQ ID NO: 141086 - DNA, 80 bp, Homo sapiens
cgggaataagtaccagaccattgacaactaccagatgaataatacggcagctagtccaatgtctactgcaacttcaagta

SEQ ID NO: 141087 - DNA, 74 bp, Homo sapiens
ggagcttctcagaagacagagggttttcttttgagggcggcgactggcggcgcgatggacctgaccgggctcct

SEQ ID NO: 141088 - DNA, 88 bp, Homo sapiens
tacacttggcctttcgacgacatcatcgtcttcgcctatgcctgccaggctgctgtgtctgcactgcttggggaggaagatgaagagg

SEQ ID NO: 141089 - DNA, 97 bp, Homo sapiens
acggggagcagagcagcaactcacccagcacacaaaatggatctcttacgtccatcaataaagccatggagaaagaccatgaagaatacaacattgg

SEQ ID NO: 141090 - DNA, 87 bp, Homo sapiens
tcttcaggatagtatcttggccagggaactcaaacagcagatgcaggggaaagttgctcagacagcttgcatgtcagcctgccagca

SEQ ID NO: 141091 - DNA, 75 bp, Homo sapiens
gaactcgactcagacgtggataaagataatcccgggcgaagctgtgctcaggcccgggctggacgcagagccaga

SEQ ID NO: 141092 - DNA, 90 bp, Homo sapiens
cagcggaagcccaggaaacacaggcagcggattggagctggagtgagccttccaggaattttggctgccaaatgtggtgcagaagtaata

SEQ ID NO: 141093 - DNA, 100 bp, Homo sapiens
cgagaggcagcgccatggcggagcagacctactcgtgggacagtatgatttggtgaaatgcctggctcctattcgagaccccaagaccgagcaggatgga

SEQ ID NO: 141094 - DNA, 100 bp, Homo sapiens
aagttgatggagattacctttggctctgtgtccagaatagtccccaggaggcacggaacatgttacttcagaaccctcaactggcttatgctttgctgca

SEQ ID NO: 141095 - DNA, 50 bp, Homo sapiens
atgagatggtagccaacccctcagggaccattgacatttagggatgtggc

SEQ ID NO: 141096 - DNA, 100 bp, Homo sapiens
ctccattcctggcctatggcgagaaaggctatggccctgtgcaccaaggtgccggaactgatcagaaccatcatgggctggacattggacttcctccggg

SEQ ID NO: 141097 - DNA, 90 bp, Homo sapiens
ggatgaacggagaggaagaattctttgatgccgtcacaggtggacgccctgcttcatctggcccgccagaatcgggctgtggcccgcaca

SEQ ID NO: 141098 - DNA, 100 bp, Homo sapiens
agacacctggaagccggaaaatgattttcgacaatgaagccaaagacgtggagagagaagtttgctttattgatattgcctgcgatgaaattccagagcg

SEQ ID NO: 141099 - DNA, 75 bp, Homo sapiens
ctggtgacagcaaaaatgacccaccaatggaagcagctggcttcactgctcagggactatggcagttccaagagg

SEQ ID NO: 141100 - DNA, 100 bp, Homo sapiens
gacgatctgcacttcgcattttggcattgacatttaattttagggtcctttatatagaagggagagtagggatgaccaacccggaggtgattcagaacct

SEQ ID NO: 141101 - DNA, 90 bp, Homo sapiens
ccaagtgccaggaatgcaagaagaccatcatgccaggaatcccagtcagaagttccagcctgccactgttctctgatgccatgccagcac

SEQ ID NO: 141102 - DNA, 73 bp, Homo sapiens
tgaggacttaaatgaagccactgattagcaatttaaagatcctctccaagctgagtcagtgctgattctctca

SEQ ID NO: 141103 - DNA, 100 bp, Homo sapiens
gagaatcgaacatgagcacgaacgtactgagcgctttgggcagggaggtgcggggcctgtgggtggacagggtcctagaggaatggggcctggaactcca

SEQ ID NO: 141104 - DNA, 76 bp, Homo sapiens
caggtccccagcttactccagggatgatgtcagaaaatgaggctgggttgcggcccatttgtgaatttatgacctt

SEQ ID NO: 141105 - DNA, 74 bp, Homo sapiens
gggagcgcgcggatgtcggtgttcctggggccaggtttgctggttggctcccgagcagacagcaggaaagaaga

SEQ ID NO: 141106 - DNA, 75 bp, Homo sapiens
gatgatccctacagcagatatgccaaagtcacccttcaaaagacgacgaattggtgaaggaagagcatgttggag

SEQ ID NO: 141107 - DNA, 100 bp, Homo sapiens
cttgaaaagactgggcttgtccttgctggtgcatgcgtcgtcggcctctgggcagcaggctcataaaggactcagtgcagcatttacagaccctgacgca

SEQ ID NO: 141108 - DNA, 90 bp, Homo sapiens
tcgtggggtgaggtgagcaggcccggggagggtggttaccgctgaggagctgcagtctctgtcaagaagcagatgaagtacttagagcag

SEQ ID NO: 141109 - DNA, 86 bp, Homo sapiens
aagatgtgatgctggagaacttcaggaacctgctgtcagtggttccgatgaagttaaattccgtcaagatttaatgaatattgcgg

SEQ ID NO: 141110 - DNA, 90 bp, Homo sapiens
ggggaagctgacagagatacctacagacggagtgctgtgccacattcggaggaacctgagtgcctcagtcatcgccgtcaccatccaggg

SEQ ID NO: 141111 - DNA, 100 bp, Homo sapiens
ctgcagatgaatctggacaggcactgcttgctgctggtcactatgcctcagatgaagtgagggagaaggtgcgatcgacaatcagtgattttgctgtatt

SEQ ID NO: 141112 - DNA, 100 bp, Homo sapiens
ggttcctgcggaggaaggtccaggagggacgcctgagacgcaagcagagtgcgcgcgcaggatgaagaagtgcatcaggtgccaggtggtcgtcagcaag

SEQ ID NO: 141113 - DNA, 75 bp, Homo sapiens
gaagtgcgcaaacttgacactcaccctgaccgctttggggccatttggatcacacgatgttttttcaagatttta

SEQ ID NO: 141114 - DNA, 73 bp, Homo sapiens
tggagttcccttcccttccacagtgcaaggaagacgccgaggttagtggttacttggatgattgtacctgtga

SEQ ID NO: 141115 - DNA, 75 bp, Homo sapiens
ggaaatcaaggacttcctgctcacagcccgacgaaaggatgccaaatgtgaaatccgggtccccggccgtgctgg

SEQ ID NO: 141116 - DNA, 100 bp, Homo sapiens
tgggacttcccagctggaacgagaactgagtctgatgcaaaaagaaccgcctgagggtggctttcgagaatacaaatggagagatttgcatgggatgcag

SEQ ID NO: 141117 - DNA, 98 bp, Homo sapiens
tggcgaagccttgggtttctttcttaaaggactgatttttagaactccacatttgagtttttgaaatcatgaatcctgtttatagtcctggatcttct

SEQ ID NO: 141118 - DNA, 74 bp, Homo sapiens
gctgctatggcgttccctcacctgcagcagcccagctttctactggctttcaactggcttctgtgtaatgtcat

SEQ ID NO: 141119 - DNA, 100 bp, Homo sapiens
agctgaagatgctgccaaaagcataaccaatggcagtgatgatggagctcagccctccacctccacagggaaatgtttcaacgtgcgcaagcgttgcggc

SEQ ID NO: 141120 - DNA, 75 bp, Homo sapiens
cggaaatgtccggcaagatcgagaaagcaggaaattcggcgccttcatcagtatgtgaaatttgctgtccaagat

SEQ ID NO: 141121 - DNA, 90 bp, Homo sapiens
gggggtcgagcacataacggggttcgggtgtctcgtgtgtgaacatcacagacaacagcagttctgtagagagtttaaatatgaaggaat

SEQ ID NO: 141122 - DNA, 100 bp, Homo sapiens
agggcgatggcgctcgcagcaaacccaaggtggttgtgaccaagggagcaggtggtgtggtgaccgcgggcctggccatctacgacacgatgcagtacat

SEQ ID NO: 141123 - DNA, 100 bp, Homo sapiens
agtccataccggagcgcaatggcgtccaaccccgaacggggggagattctgctcacggaactgcagcttagcagtgtctgcaaaaacgaatcttttccta

SEQ ID NO: 141124 - DNA, 100 bp, Homo sapiens
gtgccggccgggattcgcggcccggagctcgggaccggcagactcagtgggatcctcctacttgggaaagcccaggagatgatgccagccttgagcatga

SEQ ID NO: 141125 - DNA, 75 bp, Homo sapiens
cttcggcagtccacccaccgccgccgcctcccagtgcctggagaagttccctgtgatccagcacttcaagttcgg

SEQ ID NO: 141126 - DNA, 71 bp, Homo sapiens
gatgctccagtttgagaaacctggatctgcgatctgtttgtgcgttgccgtccactctctgccagtgatgc

SEQ ID NO: 141127 - DNA, 50 bp, Homo sapiens
attagttcagttaccactaccagactattcagactatgaagacagttccc

SEQ ID NO: 141128 - DNA, 100 bp, Homo sapiens
gtaacgacggcctcagcaggcggggaagatgaaagggtggaatgcaagctttaggacttcacctgacagatccaagtcaacgtcttgttcagaactgtct

SEQ ID NO: 141129 - DNA, 90 bp, Homo sapiens
ggcggctcgggacggaggacgcgctagtaacatccagtcatggataaaaatgagctggttcagaaggccaaactggccgagcaggctgag

SEQ ID NO: 141130 - DNA, 98 bp, Homo sapiens
atatcttcacttggcaaactcaacaagactatgctccaggaagcccaggtgtttcgaggacttgcttctacggtttctttgtctgcggaatcagggaa

SEQ ID NO: 141131 - DNA, 75 bp, Homo sapiens
attccaagtaactcttatttgtgaactaaatgttgctgctgttgatacaaacctcacattagctgtgtcaaaaaa

SEQ ID NO: 141132 - DNA, 100 bp, Homo sapiens
agagatccaagtgcgcgccctggcgggtccggaccaagccaagtatcttcaagaccttctcatggagagtgtgaatttttcccccgccaatctctctagc

SEQ ID NO: 141133 - DNA, 75 bp, Homo sapiens
ctcttgaccatgtgacatctgatgctgtggaacttgcaaatcgaagtgatgtaaattggagtcaaccaggtgaaa

SEQ ID NO: 141134 - DNA, 50 bp, Homo sapiens
gttaaggattccaagtaactcttatttggattccatatggctctcatatc

SEQ ID NO: 141135 - DNA, 82 bp, Homo sapiens
cagaagtcaattcaaaggacctgcccccagagagatgttctggacttggtgcctctttctgttatatgctttcctatttagt

SEQ ID NO: 141136 - DNA, 100 bp, Homo sapiens
ctgatcgagcggcgggagcgaggaaaaacctttcagctctactctcacaatcttatagctttgtttgaacatgccaaaaaaccaggattagctgcccata

SEQ ID NO: 141137 - DNA, 101 bp, Homo sapiens
ccccgcccggcagtcgcccgttgccatggaaactgcatccacaggacgctgtgcagagctgcaagtccgtatcactgaggctgtggccacagccactgagc

SEQ ID NO: 141138 - DNA, 74 bp, Homo sapiens
cagccgccgcgacggcggcctccagctccgacccggaaggatttttactgggagaggtaagacaagaggaaacg

SEQ ID NO: 141139 - DNA, 98 bp, Homo sapiens
gaatgtacacgataattaaagagtaaagttgtgctcaacgtggagaacatgcagctgaccctgaacctgcagacggagaacaaaggcagcgttgtctc

SEQ ID NO: 141140 - DNA, 74 bp, Homo sapiens
ctacgtcctggcaggagttgcagaaagcatccacctgtgggaggcctgtagtggtggagacacgcccagtggat

SEQ ID NO: 141141 - DNA, 100 bp, Homo sapiens
gccggctctggtgctcccagaagagaagtggtgatgaccaggaggtgctttttgatcagattttgatggggcaggtggactttccttctccatactggga

SEQ ID NO: 141142 - DNA, 98 bp, Homo sapiens
tgggttctcgggcctccacgttactgcgggacgaagagctcgaggagatcaagaaggagaccggctgtaaagaaggcgtataggcagaaggccctctc

SEQ ID NO: 141143 - DNA, 83 bp, Homo sapiens
cgagcgcagcaaagagggctctatctggaaccaccagcagcccctgtcaaagggaacaggaagcagtccacggagggtgacgc

SEQ ID NO: 141144 - DNA, 75 bp, Homo sapiens
gtcgccggccgcccgcacgtccgtccggttacgaagtgacagtgctggtgcgggactcctccaggctgccatcag

SEQ ID NO: 141145 - DNA, 83 bp, Homo sapiens
cgcgcagctgccgaacgacgtggtcctacaggctggagcattggatttgctaaaggagcttaagaatattcctatgaccctgg

SEQ ID NO: 141146 - DNA, 96 bp, Homo sapiens
gccaacttcggcaagatccagatcgggatttacgtggagatcaagcgcagcgatgatgagcgggatcgtgtgcagaagaaaaccttcaccaagtgg

SEQ ID NO: 141147 - DNA, 100 bp, Homo sapiens
tcgaggaggtcatgaaggacctgagcctgacgcgggccgcgcgggagttagaagccgctcttcacagagatgacgtggagtttatcagtgacctgattgc

SEQ ID NO: 141148 - DNA, 99 bp, Homo sapiens
ctgaaattgagaagctttgtgagaagggcagaaggactctccagtcctcagtcaccttggacaaagaagtgtggatcctcagattccatcttttccaac

SEQ ID NO: 141149 - DNA, 100 bp, Homo sapiens
cgcgctcccctcgcccgcccgggccgccagatcatcaatgctgtggtactgttgattttattgagtgccctggctgatccggatcagtataacttttcaa

SEQ ID NO: 141150 - DNA, 90 bp, Homo sapiens
ttgggacccaccgctgccctcagctccgagtccagggcgagcacgtgtggagtgagagcgaggactgcctgcctttcttgcagctagcac

SEQ ID NO: 141151 - DNA, 99 bp, Homo sapiens
cagctggtggctggagcgaccccttgttctttggtggcgctgaggcttcgtgacggagttatcagagacattgagaggcaaattcggaaaaaagaaaac

SEQ ID NO: 141152 - DNA, 75 bp, Homo sapiens
ctacgcctcctacgtttacctgtccatgagagttggaaactcaactattggaacaatgtactgttgacacaagtg

SEQ ID NO: 141153 - DNA, 90 bp, Homo sapiens
cgggaactgctgacgcttgatgagaaggacccacggcgtctgttcgaaggggccaatctcaaagtcatcagcaccatgtctgtgggcatc

SEQ ID NO: 141154 - DNA, 97 bp, Homo sapiens
aaggaggctgttggagaccttctggatgccttcaaggaggcgaggaaacgagacctctttcgttccttctagaaggtctggaggacgtagagttatt

SEQ ID NO: 141155 - DNA, 100 bp, Homo sapiens
gtgctattgtgaggcggttgtagaagagtgaagacatttccacctggacacctgaccatgtgcctgccctgagcagcgaggcccaccaggcatctctgtt

SEQ ID NO: 141156 - DNA, 100 bp, Homo sapiens
cggcgcgagctcaagctgctgctgctcggcaaaatacatatctcagtgcattgatgagatcaagcaggagctgaagcaggacaacatagcggtgaaggcg

SEQ ID NO: 141157 - DNA, 82 bp, Homo sapiens
aacggcgagagtgggcgagaacgtccactgcgggccggcgaaagctgcaattctgtggtgttcttggtcacacatttatgga

SEQ ID NO: 141158 - DNA, 100 bp, Homo sapiens
tcatcatatatacgactaagatatcactatcatggtgaacttacttcagattgtgcgggaccactgggttcatgttcttgtccctatgggatttgtcatt

SEQ ID NO: 141159 - DNA, 100 bp, Homo sapiens
caggctgtcctgcacgacctcactagtgaacctgtcactgttcgggaagtcacctaggtctctttattactatccacgatcgagggcatattgcttcagt

SEQ ID NO: 141160 - DNA, 75 bp, Homo sapiens
taacatcctacatcactgaagatgatgtggtctacagaccaggagtttctcttcagcaacgggtagcagaattgg

SEQ ID NO: 141161 - DNA, 98 bp, Homo sapiens
tttacttggtgcaggaaggcagtctttgctacgtacagcaaaagtgtgaagcagtattctggaaagtttttctaagactagtgaagaactgaaggagt

SEQ ID NO: 141162 - DNA, 76 bp, Homo sapiens
cagaggccttctctagaccttgccaagatggcacagccatcactggtgcaagctatatttaacggagatcctgatg

SEQ ID NO: 141163 - DNA, 50 bp, Homo sapiens
cccctcgccaccgcccgagcccagaatgtgacagtgatgataacatgggt

SEQ ID NO: 141164 - DNA, 50 bp, Homo sapiens
tggctcagaccaacaagttcaactatacgcgtacttgctttgtaagtgat

SEQ ID NO: 141165 - DNA, 75 bp, Homo sapiens
ggagattctggggcagtatcaacggagtctccgggtactatactggcaattgctggagaagattttgcaattgtt

SEQ ID NO: 141166 - DNA, 98 bp, Homo sapiens
ctgcacgataaaggaactcaggcgcctcttcttagttgatgatttagttgattctctgaaggaggcaggtggaagtcatcataaagtttctgtttcac

SEQ ID NO: 141167 - DNA, 75 bp, Homo sapiens
gaaaggatcgccatgtgacacactggcatcaagttctggacatggcaagacatgtgccactctatcgggcactgc

SEQ ID NO: 141168 - DNA, 83 bp, Homo sapiens
tcagagctccagcgactgtaccccaatggggtcccctttaagttttctggatatgccgcagaaggatccgtgccagaagcaag

SEQ ID NO: 141169 - DNA, 100 bp, Homo sapiens
gtcctgctcctgctgctcgaggacgctggagcccagcaaggagacttcttggcatcatcacaaaaaaggatgttctgagacatatggcccagatggcaaa

SEQ ID NO: 141170 - DNA, 75 bp, Homo sapiens
caaagatgccaagaaaccctccacaatggtgcgcatgaatgtcctggcagatgctctcaagagtatcaacaatgc

SEQ ID NO: 141171 - DNA, 145 bp, Homo sapiens
ccggcagctggagatgtccgagcccaaggcaattgatcccaagttgtcgacgaccgacagggtggtgaaaggtgtcatggagaaactccagctgggcccagagattctgcagcgggaaaatccaaggcttatttatgccaggctg

SEQ ID NO: 141172 - DNA, 100 bp, Homo sapiens
tacaggatcaataccactgcagatggcaaggcagacaccacccatcctttaaccaagcacagaaaaatagcctcttcttttcgcgattcatcattatttg

SEQ ID NO: 141173 - DNA, 50 bp, Homo sapiens
ccccagaccagctctcaggatgactttaatatggaaagtctcaattccac

SEQ ID NO: 141174 - DNA, 98 bp, Homo sapiens
ttcaaggacaaactagaggagttcttccaaaaagcataaagatgcctatcaagtgatattggatggtgtgaaaggtggtactaaggaaaagcgattag

SEQ ID NO: 141175 - DNA, 90 bp, Homo sapiens
gggctcccacggattctacattatggctggtccattcaggtccaggaaagggatcaccccaggctggtgtggatctgtcctttgcaacgc

SEQ ID NO: 141176 - DNA, 100 bp, Homo sapiens
atgagattcagcaggaaatgaagcgtgctaaagtgtctcaagcactgtttgcaaaggttgcagcaaccaaaagccagctcctggacttctagggatctca

SEQ ID NO: 141177 - DNA, 82 bp, Homo sapiens
ttggacgtgcacagtagatccctcccggcttcccggcttcccgtctcgtcaccctctggcagtcatggatcaggtaatgcag

SEQ ID NO: 141178 - DNA, 96 bp, Homo sapiens
ccgggccctgcagaagaggcatgatgactttgaagaggtggctcaggaggtggatgccagtgtggtacgtgagatctgctccaagtacatctatga

SEQ ID NO: 141179 - DNA, 100 bp, Homo sapiens
gcaggatctcacagctgcagtctaatagtaacacagagctgtattcttcaggacttgtggaatgtgaggatcaggatccacttaatcctgatagaagttt

SEQ ID NO: 141180 - DNA, 97 bp, Homo sapiens
gcgccccgcgcctgccgctgccctacggcttctccgccatgcaaggctggcgcgtctccatggagtggacagaggactgcagaaaatcaacctatcc

SEQ ID NO: 141181 - DNA, 99 bp, Homo sapiens
atgtctctctcagaacttggtgctgctagaatgcaggaacagcagggcggcgactggcggcgcgatggacctgaccgggctcctgctggacgaagaagg

SEQ ID NO: 141182 - DNA, 101 bp, Homo sapiens
gacctggctctttcgcccctcggagaaccgacaagttggatggcttgaggactggtactaaaaggaaacgtgactgggaggccattgccagcagaatggag

SEQ ID NO: 141183 - DNA, 73 bp, Homo sapiens
aggcacctggataaccttttgctaacaaaaacaggcgcagttgtgtagcagttgagtaatgctggttagctgt

SEQ ID NO: 141184 - DNA, 49 bp, Homo sapiens
gtcagtttctgaggaatttcatcagcttcctgcctgacacagctcactt

SEQ ID NO: 141185 - DNA, 121 bp, Homo sapiens
ggatgttgagcactacagacctcacagtgccaaatggagctggaagcagtccagtggaggttggcgatttgaaggagctgcagacactagacatttctaccaatcgtttgctaactttacc

SEQ ID NO: 141186 - DNA, 75 bp, Homo sapiens
tttccttgttgctattttaaaagacaagttggatggcttgaggactggtactaaaaggaaacgtgactgggaggc

SEQ ID NO: 141187 - DNA, 100 bp, Homo sapiens
gcaggtgtggcctgcctccgaggagacctttgaggacgtattctctgaccgctcccttcgcaaagtgccctggtacgtgctagccggaaaccatgaccac

SEQ ID NO: 141188 - DNA, 100 bp, Homo sapiens
gtcccaaacgccagccagccagtcagtgggtcccgcagtcgcccgcaaccggggcgaatcatggcggccgccaagtgccaccatggcaactgcaccatac

SEQ ID NO: 141189 - DNA, 114 bp, Homo sapiens
tggggctcttccccagaactacaggggctctggccatcttcgtgttgattgcttatgcgtcaactgcagatggatattcagcagatctgcccctcccactacccatcagggtag

SEQ ID NO: 141190 - DNA, 74 bp, Homo sapiens
gaaggcagcctcacctttaatgccaacccagatgagttactccacaggatccgctgaacataggatgttgccac

SEQ ID NO: 141191 - DNA, 75 bp, Homo sapiens
ggatgttcttcttcgagtatttgtagaagggtctcttttattcaaaaccttgtattttgtgtggaaagagtttac

SEQ ID NO: 141192 - DNA, 87 bp, Homo sapiens
ggagagctctttggctgatttcatgcaagaagtaggctatggcttttgtgcaagcttcctgcctgacacagctcacttcaagaagtg

SEQ ID NO: 141193 - DNA, 101 bp, Homo sapiens
tttcgatcagagatcggcggagaccctcgaagtgcgcaaacttgacactcaccctgaccgacggatgtttccagtcctaaagattagtgtcacagggttgg

SEQ ID NO: 141194 - DNA, 83 bp, Homo sapiens
gcactgactttcagctatggaatcgtctttaaaccagaggagttacgccaggccctcatgccaaccctagaagcactgtatcg

SEQ ID NO: 141195 - DNA, 98 bp, Homo sapiens
catctaagatcttcattcttcaaaggatctcacttgcttatctgaagaagattgtccaggctcatattgggaatgcttatgaggaaattcatgccgag

SEQ ID NO: 141196 - DNA, 98 bp, Homo sapiens
atggaaatggagggcatcttcaaccacaaaggagcgtgaggatcatccccggagaggacgggaggatcggcagcacagggaaccatcagaacaggaac

SEQ ID NO: 141197 - DNA, 100 bp, Homo sapiens
gacacctttcacagctatcagggaaggcgatatgagtctcatccagtctgtgctgatctgcaggccaaaattcttcagtgttaccgtgagaacacccacc

SEQ ID NO: 141198 - DNA, 51 bp, Homo sapiens
cgtgccgctgagcctggcgcagatcgatgacgtccggttgtttgccttcgt

SEQ ID NO: 141199 - DNA, 78 bp, Homo sapiens
catgaaccctgatcctgaacaggaccggatgaagcctgctgggagcgtgaatgacatggccctggatgccttcgactt

SEQ ID NO: 141200 - DNA, 90 bp, Homo sapiens
ctcaacaaagctgtctgggccaaaggaataaggcacttccaggggctcataccccttcagtcactcaatgaagcctcacctacatccacg

SEQ ID NO: 141201 - DNA, 74 bp, Homo sapiens
ctgaggcctccccagccacgctttctgtacagcctgcagaactggttacacatcattttggaatgactgtatat

SEQ ID NO: 141202 - DNA, 98 bp, Homo sapiens
atcggaaccacgatgtgactccgccgccggggacccgtgaggtttgtgtggaccccgagagagtgaagaagtttatcaaaggcaggtgctgtcaattt

SEQ ID NO: 141203 - DNA, 100 bp, Homo sapiens
ccgcgcctgctgccgggttgcgctccgtgcacctcttgcggggtaagacgtgaccttttgaggtgactataactgaagattgctttacagaagccaaaaa

SEQ ID NO: 141204 - DNA, 80 bp, Homo sapiens
caagccggatgcagacggcagcacgggtgagaagccctaccactgcaactgggacggctgcggctggaagtttgcgcgct

SEQ ID NO: 141205 - DNA, 100 bp, Homo sapiens
cccgccctcgccatgaacgcctcgatgtccagccctctgacgtccatcatctctgcggtggttggcattctgctggtcgtggtcttgggggtggtctttg

SEQ ID NO: 141206 - DNA, 51 bp, Homo sapiens
ggcggatctgggaacagtacaattatagatgttggagtccggggtgacctg

SEQ ID NO: 141207 - DNA, 90 bp, Homo sapiens
aggacggcccggcagacatgcagaaagtacgaatctgctctgagggcggatggaacattcagaagattctcggccttgccccttcacgag

SEQ ID NO: 141208 - DNA, 98 bp, Homo sapiens
ctctcaaggttctgatttagattcatcagcaactcctataaacacagtggacgtcaataatgaaagctcttcagagcttggatttacactgggcaacg

SEQ ID NO: 141209 - DNA, 100 bp, Homo sapiens
ctccaggacagcacctagtcgtggccggaggagtctcagagctgtcagaaaggtgaccaagaatatggcccaggtgaccaaagccctggacaaggccctg

SEQ ID NO: 141210 - DNA, 101 bp, Homo sapiens
atcaatcatagcattttctggacaaacctcagccctaacggtggtggagaacccaaaggtgccttcaaatctcttgacaaagatggcactggacaaatcca

SEQ ID NO: 141211 - DNA, 75 bp, Homo sapiens
agaagcgtatggactactatgactctgaacattttctggatatgccgcagaaggatccgtgccagaagcaagcct

SEQ ID NO: 141212 - DNA, 51 bp, Homo sapiens
ccctcaaagcgggaaatgcgtcaaaggatgaggaagatggagagaatgccc

SEQ ID NO: 141213 - DNA, 83 bp, Homo sapiens
ccggcggccaagcagccaaccatgctcaacttcggtgcctctctccagcagactgcggcgttcccacagctgtgcagaactta

SEQ ID NO: 141214 - DNA, 50 bp, Homo sapiens
aagatgtagatgagagaaatgagacaaaaagtaaccttcctgaagaggac

SEQ ID NO: 141215 - DNA, 82 bp, Homo sapiens
ggccttctccatggcctcaacacgtccctaacttgtgttatcttcaggcagagtgagaagctgcagcaatgtctgattttgt

SEQ ID NO: 141216 - DNA, 95 bp, Homo sapiens
gaagttcgtgaccttttgggcaaggatcagacacaaaggttagagtttgactttggggacaccatggtccaccaggccatccacaccatcgagta

SEQ ID NO: 141217 - DNA, 75 bp, Homo sapiens
accaccacaccagaaactagcaccagccccaaatttcgtgctggagaatctggtaaaagcaccattgtgaagcag

SEQ ID NO: 141218 - DNA, 50 bp, Homo sapiens
tgacatccctatcaatgtctacaagctcaaatctaatccaagtgaaaatg

SEQ ID NO: 141219 - DNA, 101 bp, Homo sapiens
ctgggccagcacatctccacctcatcaggaaacagctgagacaggacacattcagctaacgtattttagcaggtggagtgaggttgaagattcctgtgaca

SEQ ID NO: 141220 - DNA, 75 bp, Homo sapiens
gcagcgaagcacctctttaccagaagatggctgtgccacccacgtatgccgatcttggcaaatctgccagggatg

SEQ ID NO: 141221 - DNA, 122 bp, Homo sapiens
cgagcagcgccagcggccgagcgggcggcttcctggcctgggcgctccggtggcggcggagaactggtcatgctgctggagtggtggtcctgcacggagtgtacactgttcacggaccaggc

SEQ ID NO: 141222 - DNA, 83 bp, Homo sapiens
cgctcccaccttctttcttcagccgaggccgccgccgcctctccttgctgcagccatggatgtctccaagcagccagccatca

SEQ ID NO: 141223 - DNA, 82 bp, Homo sapiens
tcgggcagctgctcaagtggattgacaccacggcttgcctgtccgttgctcttcaaaaaatggactcaatgctttcctcaga

SEQ ID NO: 141224 - DNA, 88 bp, Homo sapiens
gaacggtgcttctatggcaggatatgtgtgttctaggtcagtggcttcaaagactccagttggattcattggactgggcaacatgggg

SEQ ID NO: 141225 - DNA, 75 bp, Homo sapiens
gttgggtgaaggcctgtgagcttgaagcaaatgtcacccttatagtgattggacagtcatcctaccatcatattg

SEQ ID NO: 141226 - DNA, 83 bp, Homo sapiens
tgccgctgtcgtctttgcttcagccgcagtcgccactggctgcctgaggaagtggccatgcgcaagctggtgcgctcagtgac

SEQ ID NO: 141227 - DNA, 100 bp, Homo sapiens
ttctcccatgcctgcaggtcaccctgcggtccccaccaagcctgtggagagagtctacagggagattgaacaggtgattggcccacatcgccctccagag

SEQ ID NO: 141228 - DNA, 83 bp, Homo sapiens
gcttcaatgaccacaagccactggacccagagacaattgctcagagacaggtgccgctgtgttgcctaggatgatctcaaacc

SEQ ID NO: 141229 - DNA, 100 bp, Homo sapiens
ccttccaccaatattcctgaaaatgaagcatcagatggtgaaggagaaggagacacagaagtgatgcagcaggagacagttccagttcctgtaccttcag

SEQ ID NO: 141230 - DNA, 95 bp, Homo sapiens
aactcgggcgccgacgagatcggggactttgaacatgtcggggatcgccctcagcagactcgcccaggagaggaaagcatggaggaaagaccacc

SEQ ID NO: 141231 - DNA, 99 bp, Homo sapiens
ctcccgggctaagcgtcggcaagttctgtagagaaactcgggcaacctttgcttcggaaccaaaaagaagcttcccagagccggggccaggagccccaa

SEQ ID NO: 141232 - DNA, 100 bp, Homo sapiens
ggaagcgatggctgggcccgcgtggatctctaagtacgaattggagcaatgttggcttatacacctctggatgagaagagccttgctttattactcaatt

SEQ ID NO: 141233 - DNA, 100 bp, Homo sapiens
ctagtctgaccctccgccaggcaaaaggaagattgaagaaggtattgttgtaatggaagatgattctccagtggaggctgtgagcacacctaatactccc

SEQ ID NO: 141234 - DNA, 100 bp, Homo sapiens
gatgacaagctcaacaaaattaacgatcgttggcaacatctttttgatgtcatcggatcaagtatcaaaggtgcagaatctgggacaagttgcatgaaga

SEQ ID NO: 141235 - DNA, 74 bp, Homo sapiens
gctttgttgaaaagcgaagccgttagtcccttaatacaaagggagccctctggcacaaatggaagaagaaagaa

SEQ ID NO: 141236 - DNA, 109 bp, Homo sapiens
cccggatctgacggggcgggacctggcgccaccttgcagattcccaacttcttctggagcctggggatcggtcacactggtgcgtggtggcatactgggaggagaagac

SEQ ID NO: 141237 - DNA, 74 bp, Homo sapiens
gggactgttggtctcggccctgcggaaggtgaccattgtgaggtagatattttgttctaattttccagatgagg

SEQ ID NO: 141238 - DNA, 98 bp, Homo sapiens
aactcttttctagcacattggtggtcgcagcagttgtggtagaaatttctgggttagtggactctcttctacaaccagagctacagatttgaagaatc

SEQ ID NO: 141239 - DNA, 100 bp, Homo sapiens
ggctcttctctcaactggcctcatgttcttttatcacttcagcgtcttgcagatcctcggcctgtgctggtcccaaaggcgataacatctatgaatggag

SEQ ID NO: 141240 - DNA, 95 bp, Homo sapiens
cctccccgacctctacgctgctgccggggaatgtatcctgtcaggtataatgtcagtgaatggcaagaaagttcttcatatggatcgaaaccctt

SEQ ID NO: 141241 - DNA, 75 bp, Homo sapiens
ataacttcactttcaggaacaccgtcacttacacttgcaaagaaggccacagttgaggctattgaggctgaaaaa

SEQ ID NO: 141242 - DNA, 90 bp, Homo sapiens
caggtcatggcggtcgcggggcccgcgcccggagctggcgccagataagctgtcattggaaggaatagtggtacaaagagctgaatgccg

SEQ ID NO: 141243 - DNA, 82 bp, Homo sapiens
ctcagcccacatgcccgctcacctgcgctgtgatgcctgcagagctgtggcttaccaggacactgagtgagcctcgacaggc

SEQ ID NO: 141244 - DNA, 95 bp, Homo sapiens
cagaaagaaagtttatgcaaacctttgttctggctcctgaagattattgcatcgagcttttagtgtcttcttattcaacaccgaaaataagcttc

SEQ ID NO: 141245 - DNA, 75 bp, Homo sapiens
cgttagcgtgagtgatcactctcaatcccgggtaaagaaggcgtataggcagaaggccctctcctgccacccaga

SEQ ID NO: 141246 - DNA, 91 bp, Homo sapiens
cccagggggccggagggccagggtctcccggagacaatgcagatcttcgtgaagactctgactggtaagaccatcaccctcgaggttgagc

SEQ ID NO: 141247 - DNA, 50 bp, Homo sapiens
ggaaggcgcctgaagaggacgaagcaggtattaatctctggagaagacac

SEQ ID NO: 141248 - DNA, 75 bp, Homo sapiens
aataattttccctttagaaggcattcctggatatgcacaatgacagatttcctcaaggaccaccatctcagatgg

SEQ ID NO: 141249 - DNA, 82 bp, Homo sapiens
ccgcctccgcccagggccacctaaggagcggaccccgcatcttcgccgtctggaaagacctcctgccccccgaggtctgcag

SEQ ID NO: 141250 - DNA, 101 bp, Homo sapiens
tattgtggttgataactgtgccatctgcaggaaccacattatggatctttagagcacgttttcaatatcataggagcatttgatattccacgctttgtgta

SEQ ID NO: 141251 - DNA, 74 bp, Homo sapiens
aaagtggtgaatcccctgtttgagaaaaggcctaagaattttggcattgtatgaaaacccatggacaatcccga

SEQ ID NO: 141252 - DNA, 97 bp, Homo sapiens
taaatcacacttatccctcaatcaagtcagtgactggatcatctcctaaggtttcacctgctttgcatcagaagaacgcctgtgccatgctgaagga

SEQ ID NO: 141253 - DNA, 99 bp, Homo sapiens
ggaaaaagtggttctggaaaagcggggaaagattgggagagtcatattaataccaaatggtcagcacctcagcagaattttttgcaggggaaaacatcc

SEQ ID NO: 141254 - DNA, 98 bp, Homo sapiens
cgttggaagagtacaagctgatcctgtccacagatgaccgcttcccgaagccccctgagattgcaaatggctatgtggagcacttgtttcgctaccag

SEQ ID NO: 141255 - DNA, 101 bp, Homo sapiens
agatcctgatgaagttcgagcactaatatttaagaaagaagatgttaactttcagacctgtggatgaagagccagagtcctctgaggtcgatgctgctggt

SEQ ID NO: 141256 - DNA, 82 bp, Homo sapiens
ccccctcggaaaatggttcccactgccgggcgagtaagactttgaccccgacgcaggcttcagtgattgccgcggatcagaa

SEQ ID NO: 141257 - DNA, 74 bp, Homo sapiens
ccacgacccacgagatcatggggcccaagaaaaagcacctggactgaatactcccccagttgcaagaggcgcag

SEQ ID NO: 141258 - DNA, 90 bp, Homo sapiens
agactcagctgaaagcatgtgcctcttttatacgaaccagatacttggcatatcgaaattttatgattgacacgtatcgtctaaaccccc

SEQ ID NO: 141259 - DNA, 98 bp, Homo sapiens
agctgaactaaggagaaagtcctacaacagtttggcgtgcaacatggggcttgagaaagggttacattggcgaatttgaaatcattgatgaccacaga

SEQ ID NO: 141260 - DNA, 100 bp, Homo sapiens
gagaatctgaacctcgtctgtattcccacttccttccagacaggatttcaccatgttgcccaggctggtctcaaactcctgggctcaagcagtcctccca

SEQ ID NO: 141261 - DNA, 50 bp, Homo sapiens
tccaccgtagcccttgccaaaggacactcatgaggaccatgatacttcca

SEQ ID NO: 141262 - DNA, 98 bp, Homo sapiens
gcgccccgtggggcttcaccctgaagggcggccgcgagcacggcgagccgctggtcatcaccaagatactgaacggctgtattcagtggtgtttcaag

SEQ ID NO: 141263 - DNA, 90 bp, Homo sapiens
tgacagcaacaccactgcagcatctaatctattaatgagatgaagcggttggaagaaatgtcaaatatgtttcagagctctggagtccag

SEQ ID NO: 141264 - DNA, 100 bp, Homo sapiens
ggctacatccattatggacaaacagtcaaacttgtgtgctcagttactggcatggcactcccaagattgctgttcaacggttttgtgtatagcatttgag

SEQ ID NO: 141265 - DNA, 82 bp, Homo sapiens
gggcagcagctcccagtttcttcttttcgagtaggagagaagtttgctgaggaatgccttcaagcacaaagtgatgaatgac

SEQ ID NO: 141266 - DNA, 88 bp, Homo sapiens
aaagtatcgtcgagaagcctatcatcggatgcagcaccgaggcttcctcctcctcaccctcctcgccctgctggcgctcacctccgcg

SEQ ID NO: 141267 - DNA, 101 bp, Homo sapiens
atatttcttggagttgtgttggtaatgaagaaaagggccctcatctttgtgtcccatggagccggagagcacagtggccgctatgaagagctggctcggat

SEQ ID NO: 141268 - DNA, 75 bp, Homo sapiens
catctctagataacagtctgcactttcacccgtttcaggttgatctgttccagctgcaggtgaacaccctacgac

SEQ ID NO: 141269 - DNA, 80 bp, Homo sapiens
aaatgcaatagcccttcagtactgttgtacggaaggatatggagtaatagtactaaatcccaatgaaaactatattgaag

SEQ ID NO: 141270 - DNA, 83 bp, Homo sapiens
ttctattttccctcctcaaactgactttgcagccacggagagtcgcaatgtatctgctgagcaaaaagatgaaaacaaagaag

SEQ ID NO: 141271 - DNA, 82 bp, Homo sapiens
ggccgaactggccctggactacctctgcagtctctgctttctatccgtcaagatgataaagtcgtgtgcccgagaaccaaag

SEQ ID NO: 141272 - DNA, 50 bp, Homo sapiens
ggacaacgtgcgcgccgctcagaagatcgcgctagcgagcttttatgagg

SEQ ID NO: 141273 - DNA, 75 bp, Homo sapiens
catctcaagctcatattttgaagtgtttacggcttttctgcaattagataaaaaaggaccacaaaaacatcactt

SEQ ID NO: 141274 - DNA, 82 bp, Homo sapiens
gatctagaatcaactgagagagatgcttaaaaatcaccagttactttaatgaccttcaatttgacccagcgcctcgtcgtgg

SEQ ID NO: 141275 - DNA, 100 bp, Homo sapiens
cttctactggcacaagttcgtgagtcccgtgggaaagctaacctcaccaaggtggccgtgaattaagtgattttattagctatctacaaagagaagctac

SEQ ID NO: 141276 - DNA, 75 bp, Homo sapiens
atcgtcactgaggttgcagttggcgtgaagttttgtgcaccgagggcggcctgagcctctggatcttcacttggg

SEQ ID NO: 141277 - DNA, 75 bp, Homo sapiens
gaaatggaagagagggtggtgcggatagcttgaggaagcagaatggggaaatggagagagaacctgaaagagccc

SEQ ID NO: 141278 - DNA, 51 bp, Homo sapiens
aagagatacatggatgactacatttttatgtgtcgtggaggccgaatgttt

SEQ ID NO: 141279 - DNA, 74 bp, Homo sapiens
cttatgcttataagagtggaacagattgaccgactcatcagtcacggggccgacatcctgaagcctgtaatgct

SEQ ID NO: 141280 - DNA, 96 bp, Homo sapiens
gcgcagggggcggctccttcctcgtcatccccctggagcagttctttaaggaaaaacagtagtgctctgcatagtttactgaaacgagtggtcagc

SEQ ID NO: 141281 - DNA, 97 bp, Homo sapiens
cctgcgccccgctctgctgtgggcgctgctggcgctctggctgtgctgcgcggcccccgcgcatgcacctcaatgacctgaagaaggagaacttcag

SEQ ID NO: 141282 - DNA, 100 bp, Homo sapiens
agcgccaaaactgcaggggccaagggaatgggtactgttcaaaaaggaatgccccacaagtgttaccatggcaaaactggaagagtctacaatgttaccc

SEQ ID NO: 141283 - DNA, 97 bp, Homo sapiens
tacacttcttggcagtcatggacaagagctattgatagaaggtgtcatggagaaactccagctgggcccagagattctgcagcgggaaaatccaagg

SEQ ID NO: 141284 - DNA, 89 bp, Homo sapiens
ttgcaggcacagggcccgatgagccagagaagcttgactctttttgatcagaacaatgctgcaaaaaaagaagagtcagaaactgccaa

SEQ ID NO: 141285 - DNA, 75 bp, Homo sapiens
gaaaatggcggtgtctacagtgttctcgacttcgtcgctgccaatggagatcttcgtggatgatgagacgaagtt

SEQ ID NO: 141286 - DNA, 53 bp, Homo sapiens
catgcagatcagtatgtgcaaaaagcctttggagaacatcagcttgccagcag

SEQ ID NO: 141287 - DNA, 100 bp, Homo sapiens
tgctgctgctgcccgcgtccgaggctcgcgggcggcgggcccggggaaaagaagatctcccggagcagtgccctgaaagtgctggaccatgccatgattg

SEQ ID NO: 141288 - DNA, 100 bp, Homo sapiens
accctgagcacaccatcactgtctggcgatggcaggaaggtgtcatggagaaactccagctgggcccagagattctgcagcgggaaaatccaaggcttat

SEQ ID NO: 141289 - DNA, 100 bp, Homo sapiens
tggtattgctgtggagacggtgacagattctagccgctactttgtaatccggatccaggatggtactggcttgttagcagtggcacaagatcttacagag

SEQ ID NO: 141290 - DNA, 85 bp, Homo sapiens
ggaagataccacaatcagaccctccgtcataccctaatgatcccagcaagataatgtcctgtcttctaagatgtgcatcaagcct

SEQ ID NO: 141291 - DNA, 100 bp, Homo sapiens
ggaggcaccatcgggctgctctatgtgtttggacagaaaatgatgcatcctgttgccagcagtaatccagctttctgtgggcctggcaagccttcctgcc

SEQ ID NO: 141292 - DNA, 100 bp, Homo sapiens
ggcgaccagtctctgccgagtaagcccagcaggaggcccctggctcaatgatgccacctgcagctgcccaaccctccgcccatggtgcccttgttccacc

SEQ ID NO: 141293 - DNA, 83 bp, Homo sapiens
aggccggctacgagcccgagaggagcaggccgggctctcgccatgggtcactgtcgcctctgccacgggaagttttcctcgag

SEQ ID NO: 141294 - DNA, 102 bp, Homo sapiens
gacagattgaccttcagagcgagcagcctcccgcgacgatgcccctcaacgttagcttcaccaacaggaactatgacctcgactacgactcggtgcagccgt

SEQ ID NO: 141295 - DNA, 100 bp, Homo sapiens
gcagtttcatgccactcactatcacccaagcaatgctagaggaggaacccgttttcactagacaagacagcaatcgcagtgaaaaggaagccacaccagt

SEQ ID NO: 141296 - DNA, 96 bp, Homo sapiens
agaagaaagattctggaggaaaggtttacaagcaggccacgattgaatctctgaaggttcccaacaaggctacgcagaagaacccccttgactgaa

SEQ ID NO: 141297 - DNA, 98 bp, Homo sapiens
ttatttgtttgggaactcttacctaccaccttagtcgtttatttcttccgagttagaaatcctacaaaggaccttgaattcgaatttagagtttaatt

SEQ ID NO: 141298 - DNA, 100 bp, Homo sapiens
ctgagacccggaatcagttccttgatgagctcatggaggacgggccttacatcacagcggaggaagcagtggcagtatataccaccacagtgcattggtt

SEQ ID NO: 141299 - DNA, 50 bp, Homo sapiens
atgcagctgctgtccttgtgtccagctgaataccactagaaacatacctg

SEQ ID NO: 141300 - DNA, 95 bp, Homo sapiens
ttctgcctgacttggaccctggaaaacctggccctcttcaatttctgacaaaaggtcatcatcagatttgaaatatttaaagtggatacaaaact

SEQ ID NO: 141301 - DNA, 100 bp, Homo sapiens
cctgtcaagtttccagcaaatgccaatagtactaaagaggaggtggaaatgaattgggacatggtacaggcaggggaaatggaaggtgatgcagtcgaag

SEQ ID NO: 141302 - DNA, 74 bp, Homo sapiens
tgatgaagaaagtgttagaaacagtagtggagaatcaaggaaggcgcaatggcgaggaagttatctgtaatctt

SEQ ID NO: 141303 - DNA, 75 bp, Homo sapiens
ttaattttagggtcctttatatagaagggagagtaggtctcggtccagctcgacttccagctcaggctccagcac

SEQ ID NO: 141304 - DNA, 100 bp, Homo sapiens
taggaggctcgggtcgttgtggtgcgctgtcttcccgcttgcgtcagggacctgcccgactcagtgtacatgggctgcatcgaggttctccgctctatgc

SEQ ID NO: 141305 - DNA, 100 bp, Homo sapiens
gtgccgttacggccatcacggcggccgcagtggcgtcctggagccctcctcagttcaacttcctcaattgctttgcctcactcttctatattgcctttgt

SEQ ID NO: 141306 - DNA, 75 bp, Homo sapiens
tcaggacttgagtaacagcaacatgattacaattcctagaccttctgtggcatctacacagtcaacttcaggaag

SEQ ID NO: 141307 - DNA, 73 bp, Homo sapiens
ctcaacctggtgcagtgcgagacgctagaggtgctgctcacggccgtgaactgctacagcgtgaaggccgcca

SEQ ID NO: 141308 - DNA, 82 bp, Homo sapiens
tggaagtcagagctgcacaaagggaaaggaggactactgagcccagccaggctgtatgccattgctgccaaagaaaaagata

SEQ ID NO: 141309 - DNA, 78 bp, Homo sapiens
cttggagcacttcctattccactggattgggaaagaccatggcagagtacagaatgcaggctattctgtgagccggcc

SEQ ID NO: 141310 - DNA, 89 bp, Homo sapiens
aaagctggtcacgaagccctcagcattattgtggatgaatataaggtaatgagaggccctaagatcccagaggatgccataagaggaaa

SEQ ID NO: 141311 - DNA, 75 bp, Homo sapiens
ccgacccttcctgtcgctgacggcgactgcgggaggccaggtggatgggcaggtggtagcactgctggtacagaa

SEQ ID NO: 141312 - DNA, 85 bp, Homo sapiens
ccgcaaggccggagaaggccgccgggcccgggcatggtggtctggggcaacgcggaagggattaaagcctgtggtttccacagaa

SEQ ID NO: 141313 - DNA, 100 bp, Homo sapiens
gagcagaggaagcacattgatgcggccatggttttggaagagtgtgcccagatggaacagattaaaagggccaataaactgtttaccaatgattgtatat

SEQ ID NO: 141314 - DNA, 75 bp, Homo sapiens
cgcgtccgccgattcctcctccttggtcgccgcgtccttggctggcgtgttctagagccttctttccgccaggcc

SEQ ID NO: 141315 - DNA, 75 bp, Homo sapiens
agaatggaatgaccctcctgctgtggctttgaagacaagattcccaaaaggagattctctgagatgcaaaatgaa

SEQ ID NO: 141316 - DNA, 51 bp, Homo sapiens
caagagcagcggaaaatgatccagtcacagagggtgtggaaaaggaaagtg

SEQ ID NO: 141317 - DNA, 50 bp, Homo sapiens
atcccagcagtttgggaggccgaggatgaagatttgataaagtggaaggc

SEQ ID NO: 141318 - DNA, 100 bp, Homo sapiens
tttgagaaaaggcctaagaattttggcattgccatccgggtgacctgcataggttcctgcggggtctccaacaaggctaatgacacagcgtgggtagtgg

SEQ ID NO: 141319 - DNA, 100 bp, Homo sapiens
gctggagaagatggtggccaggaagaacacgaagaaaaagtcagcactttttgaagtgtctgaggttataccagtcatgacaaataattatgaagaaaat

SEQ ID NO: 141320 - DNA, 96 bp, Homo sapiens
cccagcactcgaaagggaccgaaatggagagcaaaggctgtggatctttccattgatgagtccagcttgacaggtgagacaacgccttgttctaag

SEQ ID NO: 141321 - DNA, 74 bp, Homo sapiens
ctggagagcttcatcaaaaatagtgatagctttgataagtcatttgattgcccgcctcagaacgatggatctgc

SEQ ID NO: 141322 - DNA, 90 bp, Homo sapiens
ttcgcagtggtcgcttcttctccttgggcactccagtgtttgtccatgctggcccgtttgccaacatcgcacatggcaattcctccatca

SEQ ID NO: 141323 - DNA, 100 bp, Homo sapiens
cccacgggagcagacaagcctcttcgtatcactggagatgcatttaaagtacagtttttcctacgatggcaggtggaaacaaaaattacagacatctgtg

SEQ ID NO: 141324 - DNA, 100 bp, Homo sapiens
atcaaaaactttggggaagaggtggatgatgagagtctgaaagagctattcagtcagtttggtaatattttcatatctcgaacctcaatcccaaatgctg

SEQ ID NO: 141325 - DNA, 75 bp, Homo sapiens
aaccctgagtgtgcccctgacatgacaaggagccgtcgtcgttaggctgacaaacgggctcatcataatgcactg

SEQ ID NO: 141326 - DNA, 99 bp, Homo sapiens
ttttaaatatcttcgagctgaacctgaggaccattattttttaatgcttcgcaccaggaccgcggagaagtgcaaagtcgcggggagggccgtattgtg

SEQ ID NO: 141327 - DNA, 75 bp, Homo sapiens
cgctcagcgagctcctgggcatcccgctggaccagaattgcctctgcctcgctttatgatgtcaaagaatgatgg

SEQ ID NO: 141328 - DNA, 89 bp, Homo sapiens
tgttatgtgcttagtaatgttctggattataacacagaaattgtctctcaagaccaggcagaggagatatggaacagaatgactctgac

SEQ ID NO: 141329 - DNA, 83 bp, Homo sapiens
gtggaggagcagcagtagtcggagggtgcagcatgtctcagtggaatcaagtccaacagttagaaatcaagtttttggagcag

SEQ ID NO: 141330 - DNA, 100 bp, Homo sapiens
cgacacagtagcatttgtgccaatttctggttggaatggtgacaacatgctggagccaagtgctaacaaggaaggggagttcaccctgcacggccgggcc

SEQ ID NO: 141331 - DNA, 87 bp, Homo sapiens
gggagctccctcgcctggctctcggcggcctgatggagtaagaggggttggctgtgaatgatgtacagttacccagcacgtgtacct

SEQ ID NO: 141332 - DNA, 135 bp, Homo sapiens
gccgcatcccggacggtacttctgccactgctgctccgtggagatcgtcccgcgcctgccgcttgccttgcgccatggactggcagccagacgagcagggcctgcagcaggtcctgcagctgctcaaagactcac

SEQ ID NO: 141333 - DNA, 100 bp, Homo sapiens
gaagaagtgcttcagcgggccaggaagcgcatccaggagatggcccactgcgtgaccttggttcagctgtccatttcctgtgaccatctcattgacaagg

SEQ ID NO: 141334 - DNA, 51 bp, Homo sapiens
gtgaacgagtggcctccattgtagacgatggccccaaagacacatcagtgg

SEQ ID NO: 141335 - DNA, 100 bp, Homo sapiens
gccctcctgtgacctgcatgtactgggggattcgcagggaggatgtcgggacaccccggaagctgggaaatgcatacatctgtggatggatatactgaac

SEQ ID NO: 141336 - DNA, 119 bp, Homo sapiens
cgccatcaaccgccagatcaacctggagctctacgcctcctacgtttacctgtccatgtcataccctaatgatcccagcaagataatgtcctgtcttctaagatgtgcatcaagcctgg

SEQ ID NO: 141337 - DNA, 75 bp, Homo sapiens
ttttatgaaagtctcaaatatgccagagacctcatggcctatgacagaagagggagacctggagaccgttacgac

SEQ ID NO: 141338 - DNA, 82 bp, Homo sapiens
tgctatttgtcttttccagattcaaattcagagctttatttacaagaaacatttaagcctttagtgaatatatctccagatg

SEQ ID NO: 141339 - DNA, 84 bp, Homo sapiens
cggagctgcagtcggcactgctactgcgaagacagctggcagacctgcctagagctggaacgttacctccagagcgagccctgc

SEQ ID NO: 141340 - DNA, 49 bp, Homo sapiens
cgctgcgcaagcacgctgaggagtgacaacactgcagctgaaggaggag

SEQ ID NO: 141341 - DNA, 112 bp, Homo sapiens
agaaggaggtcctgccgtccatgcggaagatcgtcgccacctggatgctggaggatgatcggctgaatgtaacagaggaactaacgtccaacgacaagacgaggattctcaa

SEQ ID NO: 141342 - DNA, 89 bp, Homo sapiens
tcggcacctgaaggacatggagaaggtgcctaccagtaacacagagggaggctggtcctgctctctcgctgagtacatccgccacaacg

SEQ ID NO: 141343 - DNA, 74 bp, Homo sapiens
gctagtgagtcataaagatatacaagattccctaacagtgtctgttggatggcaagcatgtggtgtttggcaaa

SEQ ID NO: 141344 - DNA, 94 bp, Homo sapiens
gagcccggcaatgccgccatccgggagaagctggcctgggccaagattctacttcaaagaaatcctgccacccgatgattaaacagtgaataaa

SEQ ID NO: 141345 - DNA, 75 bp, Homo sapiens
cagcagagggagcttgccttgaaggacaagaacagcgccgtcaccagcaggtgagaagccctaccactgcaactg

SEQ ID NO: 141346 - DNA, 99 bp, Homo sapiens
ctgataccagagaacttcccagcatacctgagaatctccagggcccacaacggcagtgtcctacatgtcggtgaaatgtgtggatgcccgtaagaacca

SEQ ID NO: 141347 - DNA, 51 bp, Homo sapiens
catctgaagcatctgcttacaagctgatctcagtgaaaaccaaattcaggc

SEQ ID NO: 141348 - DNA, 73 bp, Homo sapiens
ctgtgattgcttgcagtgtttctttataatacattccatgggaggaggtttcagccatgccacagagctccgg

SEQ ID NO: 141349 - DNA, 80 bp, Homo sapiens
gtcgaatgctcaagtgcaatgtcaagagctttctgggaatggaagttggatacactttgtgacttgtacgagacactgac

SEQ ID NO: 141350 - DNA, 74 bp, Homo sapiens
gagatggctacgtgatccatctggctcctccaacccaagaagatgaaaggattgttcttgttgacaacaaatgt

SEQ ID NO: 141351 - DNA, 100 bp, Homo sapiens
acgtgccatggagacgcttaacggtgggtttggaggatttgggacaacatctacaactgcaggttctgcattcagcttttctgccccaactaacacaggc

SEQ ID NO: 141352 - DNA, 101 bp, Homo sapiens
aagcgggttaacaacaccttttgccaaggtgagaagccttataagtgctcatgggagggatgtgagtggcgttttgcacgaagcgatgagctcacgaggca

SEQ ID NO: 141353 - DNA, 90 bp, Homo sapiens
tgctcttcgtctgcttcttcctcttcagtcaaggaggaggaagccaagaatctggtgagcgaagccatcgcagctggcatcttcaacgac

SEQ ID NO: 141354 - DNA, 78 bp, Homo sapiens
tcagacctgggcacagcaaatgctgaggactcagaccagtctctgcaagaaaatgcaatggcacatcgtgattctgag

SEQ ID NO: 141355 - DNA, 50 bp, Homo sapiens
gcaacgcggtcacggcccagcgcgttcgacacgaatgcagagtttgagtc

SEQ ID NO: 141356 - DNA, 75 bp, Homo sapiens
ttcggtgaccgcagcactggggaaacgatccgctcccaaaacgggaaaaagacctcgatgaagttctgcagaccc

SEQ ID NO: 141357 - DNA, 75 bp, Homo sapiens
ctgcaacgggctcatcaactcctacgaggacaaaagcaacgacttcgtatgggtgctggaaatgtaaacaagaat

SEQ ID NO: 141358 - DNA, 87 bp, Homo sapiens
ttagcaaggatgtttttaataaggaagtactgaaacaacagggaaaattgttccaagtacaaacggaatttcaaatgcagaaaacag

SEQ ID NO: 141359 - DNA, 75 bp, Homo sapiens
agttcctgggaaggtggagccaccagcctctccttggtatcagaagagcaaggtcaagaaaacccagcagaccac

SEQ ID NO: 141360 - DNA, 90 bp, Homo sapiens
tgcactgttcttgctggagataagaggttacagcaaattacatgatgacctaggagagtttccatatgatggagcagcatattgtatggg

SEQ ID NO: 141361 - DNA, 75 bp, Homo sapiens
aacagagatctcttctgttctccactgctaggatgaatctggttatagatggacaagagacgatcattctgcaag

SEQ ID NO: 141362 - DNA, 100 bp, Homo sapiens
tacagcctggcgcacgtccgcgagatggcttgctccattgtcgaccagaagatccctcatccacctacatcaggcaactggagagcaaagtgaggctgct

SEQ ID NO: 141363 - DNA, 100 bp, Homo sapiens
ttcccctctgatccattcacacctagataccggaggaggatcttctgcggattgttggaatctaccgtcgccccacggctgaattctcggtgataaaggc

SEQ ID NO: 141364 - DNA, 75 bp, Homo sapiens
gcgcaagcacaccctaccgaattacaagatcaggaggagcagcccccacaacatcgatccaagagggggggctca

SEQ ID NO: 141365 - DNA, 100 bp, Homo sapiens
acaaatgctaaactctactgtaatcggggtacggttaattccaaggaacagcatatgccatatatgagctggctgtggcttcatttcccaagaagcagga

SEQ ID NO: 141366 - DNA, 82 bp, Homo sapiens
agcagatggcggatgccctgcagtacctgcagaaggtctctggagacatcttcagcaggagcaaggagcccctgcaggacaa

SEQ ID NO: 141367 - DNA, 97 bp, Homo sapiens
cctgctctacaacgtgcctgcagtggccgaggagattcaggatgaagttggtgaccaagaatatggcccaggtgaccaaagccctggacaaggccct

SEQ ID NO: 141368 - DNA, 100 bp, Homo sapiens
agaggcacccgatatatgttctctaggccttttagaaaacatgtgaaacaaagagtcctcttcgtggaaaagaaaaaaatacgctccctttaaacggtgg

SEQ ID NO: 141369 - DNA, 100 bp, Homo sapiens
ggtttttaaatcaagttcgaagtaaagatcaacatgctatgggtatggaaacctacaaacatcttttcctggagaaggtcgttccaggggtagaggaggc

SEQ ID NO: 141370 - DNA, 74 bp, Homo sapiens
cttgggagatggagcgcttttctactttgggctcaacattgagacaggaaaggaggtggctgatagatggtaca

SEQ ID NO: 141371 - DNA, 76 bp, Homo sapiens
aatttgatcaagaggccagatgatgagcaaagggtttggtgcaattctccattaatgaagataacatttgaattcc

SEQ ID NO: 141372 - DNA, 108 bp, Homo sapiens
cgttgcgtgccctacttcaaggataagggcgacagcaacagctctgccggctggaaggttttaaaatcaaagatgggaaaatcggagaaaattgcccttccccatggc

SEQ ID NO: 141373 - DNA, 100 bp, Homo sapiens
agttactgctatgggaattctgaatacaattgatacacttcttagtgtagttgaagatcataaagaggttttccctgatgaatttcacctccagactttg

SEQ ID NO: 141374 - DNA, 101 bp, Homo sapiens
cagatcttcacagcacagttcctgggaaggtggagccaccagcctctccctggaagaggcagaaatccaggcagaacttgaacgtttggaaagagtcagaa

SEQ ID NO: 141375 - DNA, 80 bp, Homo sapiens
tgtggcagtattggtgaaaaaatcttcaatgccgtggaataaacgtcagccaaaggaggtggtgcggaaggtggagagca

SEQ ID NO: 141376 - DNA, 100 bp, Homo sapiens
ggaagatgcaatgctgatgtttgataaaactaccaacaggcacagaggtgctcacatgccaggagaaataagctggtgatttatgtggcacagcaccatc

SEQ ID NO: 141377 - DNA, 100 bp, Homo sapiens
ttcactacctgcatgctaactgggtgttgcacagagatttggtcctcttcctgatggatgggaacaagccatgactcaggatggagaaatttactatata

SEQ ID NO: 141378 - DNA, 100 bp, Homo sapiens
cgagctgcggctcggacgccagcggacacgcgggcgagatgaaggatttgggggcagagcacttggcaggtcatgaaggggtccaacttctcgggttgtt

SEQ ID NO: 141379 - DNA, 82 bp, Homo sapiens
gtataaaggatgggttttaactacagacccagtctctgccaagcaagctgatgaagaattccagatcctggcaaactcctgg

SEQ ID NO: 141380 - DNA, 98 bp, Homo sapiens
tcaaaatacatctactcatattgagagctgtcgacagttacgtcaacagaggaactctctggaatgaaaaataaaatacaagtagttgtgcttgaaaa

SEQ ID NO: 141381 - DNA, 90 bp, Homo sapiens
caagaccctacccgcttcactggcaccatggccatccgggatggtgtcattgaggccagcatcaaccacgagaagggctatgtccaatcc

SEQ ID NO: 141382 - DNA, 83 bp, Homo sapiens
ctgggttctattttccctcctcaaactgactttgcagccacggagaggctgcttctgatgcttggaagatatcctctcagcca

SEQ ID NO: 141383 - DNA, 90 bp, Homo sapiens
ctgcctacctgtcagccgtgggcaccttcacctgggtctgcacgccctttctggtttttgaaatacggaaatcgagaaaagatggctcaa

SEQ ID NO: 141384 - DNA, 82 bp, Homo sapiens
caagatcaacgcgagcaagaatcagcaggatgacgggaggtgaacacagaaaagctgacagcctttgtaaacacgttgaatg

SEQ ID NO: 141385 - DNA, 90 bp, Homo sapiens
cattaatgagagcacggaagcccagagtgaacagaaagagaagtcgcttgaggcgggatcgctttgttggtcaaagtgaggggaaaaaag

SEQ ID NO: 141386 - DNA, 82 bp, Homo sapiens
cggaggcggaggcagaggtggaggcgctttgaaagggcagctgcaatgactctccgcacggtattattgtcattgcaagcac

SEQ ID NO: 141387 - DNA, 100 bp, Homo sapiens
cagcgagccatgatgatccaaacacctgtactgcataagccgaccacagtataagacttcttgtggcatctcttcattaatttcttgttggaatttctta

SEQ ID NO: 141388 - DNA, 50 bp, Homo sapiens
gaagatctgaaaaagatctgtttttacagtactatactggcaattgctgg

SEQ ID NO: 141389 - DNA, 73 bp, Homo sapiens
gccctgcacgagctcaaaggacactatgcaatcacccgaaaggtggtgatctttgtgaagtctgtgcagcggt

SEQ ID NO: 141390 - DNA, 83 bp, Homo sapiens
ccagatcgctactaccccgcagttcccggacatgatcctctccgcctctcgagctgtgagttctttggaattgtgaacattct

SEQ ID NO: 141391 - DNA, 86 bp, Homo sapiens
cgcgccggggcctgagctgccgcctcctccgccgcccgaaaacccggagtgccccgcacagacaatgcagatcttcgtgaagactc

SEQ ID NO: 141392 - DNA, 100 bp, Homo sapiens
cacaacatgcgatgtttggaaatgatacaattacctgcacgacacatggaaattggactaaattaccagaatgcagggccctcaggcagcccctccacag

SEQ ID NO: 141393 - DNA, 117 bp, Homo sapiens
gccttcgaaacatctgcaagtttttagtcttgctcatcccactcttccttttactaggccaagcgcgcaggggtgacgtgcatcgtcctgccagccgagaacaagaaggacttctac

SEQ ID NO: 141394 - DNA, 100 bp, Homo sapiens
tggttctacttcacactgcagaactgggttctggactttgggcgtcccattgccatgaacttaaagcagcagtattacacaggatacacagagaatgaag

SEQ ID NO: 141395 - DNA, 75 bp, Homo sapiens
gaagacccctggctctataagctgaattatggcagcccagtcaagggtactatttttctgcctggaaataaagtt

SEQ ID NO: 141396 - DNA, 100 bp, Homo sapiens
tatatcccataccccagcatcgacgagatggagaaggaggtgtcagatttcattcaagacagtgggcagatcaagaaaaagtttcagccaatgaacaaga

SEQ ID NO: 141397 - DNA, 83 bp, Homo sapiens
cccgtacctgctggggccggacaagaacctgaccgagagggagctcattgctatggacagtgctatcaccctgtggcagttcc

SEQ ID NO: 141398 - DNA, 119 bp, Homo sapiens
gtaaaagtcaccccccagaatctaaaaatgctgcgtatagtggaaccttatgtgacctggggggacttgcggttaatcgaagtcactgagaccatttgcaagaggctcctggattatag

SEQ ID NO: 141399 - DNA, 101 bp, Homo sapiens
cttcaacatgaagccgcggctgaagagcattttccgcagaggcctggtcaaggtggctcagaccacagctcaggcgctcaggactgccaggacccagagga

SEQ ID NO: 141400 - DNA, 90 bp, Homo sapiens
gccggagggtgcggccgcccagagcgcaccccgagcgccggcgagcggcgcggtgagaccctcgtgcagtagagacgggggttcaccatg

SEQ ID NO: 141401 - DNA, 75 bp, Homo sapiens
ggagctcctggtcatcgagctgtccgacaaccctggcgtccatgagcctggttcccccaagcggcaccacttcca

SEQ ID NO: 141402 - DNA, 90 bp, Homo sapiens
ggaaactttagatagcttcatgcaacatgatgttcaggagctttgtcgagtgctgccagccttgccctggctctgaatggcgtctttacc

SEQ ID NO: 141403 - DNA, 75 bp, Homo sapiens
gaaagtgttaattcccgtaaaacagttccctaagatttttcgaaagaaagcagtggaacttggggtaaaattgct

SEQ ID NO: 141404 - DNA, 100 bp, Homo sapiens
gctctcagggttcccctgatatttcgagaaaaggatggactgggaattaaaaagtatgctgaggccttggattaccaccgtcaggcactggtgttgattc

SEQ ID NO: 141405 - DNA, 100 bp, Homo sapiens
cgatggtcggcggcgcccggatgggcagctgagctgcaggtggagctggagcaagaataccaagacaaattcaaaagactgcccctcgagattttggaat

SEQ ID NO: 141406 - DNA, 111 bp, Homo sapiens
tctgaatctttgtgtttggctgcccaggctcgcctcgactccaaatggttgaaaacagatatacagaataactgaagtgaagtgatggactccgatttggagagtagtaag

SEQ ID NO: 141407 - DNA, 98 bp, Homo sapiens
ttggatgaagatagtttaaccaaacaaccagaagaagtatttgatgtcttagagaaacttggagaaggccaacattggtactcagaccacaggaccca

SEQ ID NO: 141408 - DNA, 75 bp, Homo sapiens
cgcagggttcggatgagaccaggtgaatttttcctgaaaaatctagtggctaaaagaaaaacaaaagacctctaa

SEQ ID NO: 141409 - DNA, 83 bp, Homo sapiens
cttcacagcacagttcctgggaaggtggagccaccagcctctccctggtttttagaacttcagccataaaaatgggcagaatt

SEQ ID NO: 141410 - DNA, 76 bp, Homo sapiens
tcctggctcttgccctcatcctggttctggaatcctcagttcaagggagtatgcggttaatgaagttgtggcaggg

SEQ ID NO: 141411 - DNA, 100 bp, Homo sapiens
cggtgccccgcgcagggtcgcgatgctgcccggtttggcactgctcctgctggccgcctggacggctcgggcgctggagatcctacgctatggagtacag

SEQ ID NO: 141412 - DNA, 80 bp, Homo sapiens
tcaagtacactgaaattcatcctgagatgagactaatagggatgccaaaggaaaaatatgatcctccagatcctcgcaga

SEQ ID NO: 141413 - DNA, 101 bp, Homo sapiens
tccgagtcaccgcagcgggagacctgggtgggggagggaagaagccggagccgccgcaagccacacgaaaatatttacaccagcagctccagttcatacca

SEQ ID NO: 141414 - DNA, 75 bp, Homo sapiens
aaaagcagaaccttagcaaagaggagctgatagcggagctgcaggaatcacatgcagcccaactacagattctta

SEQ ID NO: 141415 - DNA, 50 bp, Homo sapiens
cagggcaactcaaagaatgttctgctggtgtccctcaatgcatggttctg

SEQ ID NO: 141416 - DNA, 98 bp, Homo sapiens
gggaatccatttgatcattttagtgctggagaatctgtaacaaatgtggcaattattttggatctatcacctgtcatcataactggcttctgcttgtc

SEQ ID NO: 141417 - DNA, 90 bp, Homo sapiens
gtctcgggagatgcaggatgtagacctcgctgaggtgaagcctttggtggagaaaggggagcctccttctgaagaaataaaaacaggtga

SEQ ID NO: 141418 - DNA, 102 bp, Homo sapiens
gctgtgagatgaatctctaatcggtggccgccagacacccgcggcgaaggcggctcgggctcgggctccgtaaagatgacggcgccttgaggtaagctacag

SEQ ID NO: 141419 - DNA, 75 bp, Homo sapiens
gggcagtccgcgagccccgcactctctcgatgagtcggagaagtcccgacttgcaccttcgagatcccctgtgtt

SEQ ID NO: 141420 - DNA, 100 bp, Homo sapiens
cagtgcaggcattggcaggacaggtctgaaggggcgtctcgattacctgagctctctgaaggtgaagggccttgtgctgggtccaattcacaagaaccag

SEQ ID NO: 141421 - DNA, 100 bp, Homo sapiens
catctttctgcttttcaagagttccgatttcatcactcgtgacttcactcagcctgccggtggtggtgtgcacattgagccccggtatagacagttcccc

SEQ ID NO: 141422 - DNA, 50 bp, Homo sapiens
tgaaggcgaaatgataacttctaagggatgttccagatgaccttgatggt

SEQ ID NO: 141423 - DNA, 82 bp, Homo sapiens
tggcaggggttgaactgtggagtgtgtggttggattggatgctgctggcaagacaaccattctgtataaactgaagttaggg

SEQ ID NO: 141424 - DNA, 76 bp, Homo sapiens
cagatttgcagatggctctgctgtagtacaggtgtgatccctcacatccacaaatctctgattggaaagaagggac

SEQ ID NO: 141425 - DNA, 124 bp, Homo sapiens
aatgccatccagagctgtgcctcccagcaccacagtccttctgcagtccctcgtccagccacccccaggtggacccaagtggagagattgtggaactggcgaaaggtgcatgtccctggaagga

SEQ ID NO: 141426 - DNA, 90 bp, Homo sapiens
cctcgaggcaaggaaataagaaaactgcctctgatccaagcagagaaggatgacatgaccttgtggtagatcccagaactgaggccccag

SEQ ID NO: 141427 - DNA, 100 bp, Homo sapiens
aaagagaagactgatagagacttcgttaaggtaagaagagttcctgggtcaagtggtcaccttcataaaaccgaagacggggactgggagtggagtgacg

SEQ ID NO: 141428 - DNA, 51 bp, Homo sapiens
ggaaagggggccttgttgagtccgccaggtacaccaggggttggaaaaacc

SEQ ID NO: 141429 - DNA, 83 bp, Homo sapiens
gaccaacctacttagatgacaatgtcaagaaagaaaactcctccttgtacctagcttaccctgaaagaagcagatcccagttc

SEQ ID NO: 141430 - DNA, 100 bp, Homo sapiens
gccctggagctgagtggggcgctccgcttctacgacagatccgacatcgacgcagtctacaggtcttcgcaacagccgggccactgccggggacatcgcc

SEQ ID NO: 141431 - DNA, 87 bp, Homo sapiens
ggcatcgtgttgcaaaatgacagatcttctagaagaaggtattactgaagaagcgctgcaagtacaaaattgaaaaaattgagacca

SEQ ID NO: 141432 - DNA, 97 bp, Homo sapiens
tcagatgtggtggaatatgccaaggaaaaactggagagcttcatcaaaaatagtgatagctttgataaggcttagtgaaagtaatgacactttgccc

SEQ ID NO: 141433 - DNA, 75 bp, Homo sapiens
tgcgcttcctggagagccacctggatgacgccgagccctacctcctcacggaaaatgtttcaacgtgcgcaagag

SEQ ID NO: 141434 - DNA, 75 bp, Homo sapiens
gccgattcctcctccttggtcgccgcgtccttggctggcgtccggcacagtcttcactaccgtagaagaccttgg

SEQ ID NO: 141435 - DNA, 75 bp, Homo sapiens
agaaaatgtaaaggccaagatccaggataaggaaggtcgtggagtcagatttgagtgatgatggcaaagcatctt

SEQ ID NO: 141436 - DNA, 90 bp, Homo sapiens
gtcatgcaggaggagttctcgtatggtctctctggcagtgatgtcctggataatgtagcatatgctcgagcgttcaacacagaccaccag

SEQ ID NO: 141437 - DNA, 83 bp, Homo sapiens
cccctgtggtgagctggaggttggagcctgaagatggcacagctctaatttgccatctgccttagtaagtcatgtactaaatc

SEQ ID NO: 141438 - DNA, 100 bp, Homo sapiens
taaagcccgctgttactttgctaggaaacatacatgctgtcactaagcaggaacgtgttgtgggctttcacgtactgggtccaaatgctggagaagttac

SEQ ID NO: 141439 - DNA, 100 bp, Homo sapiens
ggggcaattgggtttggccggaagtcgcctttgtctaacagcaatctgaagaggatgtaagtcagtttgattccaagtttacacgtcagacacctgtcga

SEQ ID NO: 141440 - DNA, 100 bp, Homo sapiens
tttgccagagtgtggattattctaataatgttcatgaagtcaggacatttctcttgggaagttgtgcatctgacaggaatatagtactgtacgatatgag

SEQ ID NO: 141441 - DNA, 100 bp, Homo sapiens
gcagacgccattatcctctgtttctctgctgcaccgacctcgacgtcttgcctgtgtcccacttgttcgcggcctatagtgaaaatgcctcgtgtaaaag

SEQ ID NO: 141442 - DNA, 90 bp, Homo sapiens
cgcctatctgcgagaacagagaagggagctctatagtcggagtggagaactgcaagttaattcaggacagcagaagagaaactaaaaatg

SEQ ID NO: 141443 - DNA, 74 bp, Homo sapiens
acagaggtggctttggccctggcaagatggattccagggtgtcctcaagaggatagtgacattgccttcttgat

SEQ ID NO: 141444 - DNA, 96 bp, Homo sapiens
atccccagccacagcacacaggaccaggctgcgagaacagagaacactggatctaatgaacggaacatctatattgtggtgggtgtggtgtgcacc

SEQ ID NO: 141445 - DNA, 101 bp, Homo sapiens
cacaataaaggtgctaagaaagagaatgtaagacaggaaaataattaaatattcttaccgaggtatgatctcgtgaaatcttgagagaaactgaatgacga

SEQ ID NO: 141446 - DNA, 75 bp, Homo sapiens
cttgttccacgtttcttccatgtcagttatctggagctttggaaaatgcaaaagctgagattcaaagaatgcaac

SEQ ID NO: 141447 - DNA, 90 bp, Homo sapiens
ccggcctagcgtcctggaattacttcaatcaagctggagcattggatttgctaaaggagcttaagaatattcctatgaccctggaattac

SEQ ID NO: 141448 - DNA, 75 bp, Homo sapiens
acccggtgtgtggcgcgcccagagccccgcgtttcagccctagggaagatgggggctccggaggtggcgcccagg

SEQ ID NO: 141449 - DNA, 90 bp, Homo sapiens
tgcaaggggtaaatgagggtgttgatttctccaaggatctgctgaaatggacagaggactgcagaaaatcaacctatcctccttcaggac

SEQ ID NO: 141450 - DNA, 76 bp, Homo sapiens
ctcagatgctgccagggtccctgaagagggaagacacgcggaaacaggaggtcccagatcccacaaagtattttgt

SEQ ID NO: 141451 - DNA, 82 bp, Homo sapiens
atggcgtctgccctggagcagttcgtgaacagtgtccgacagctctcagctcaaggggctttgaccacgacctttgaagagc

SEQ ID NO: 141452 - DNA, 83 bp, Homo sapiens
gttcgagcactaatatttaagaaagaagatgttaactttcaggtttttctatatgagtggagaagacagctgttaccagggag

SEQ ID NO: 141453 - DNA, 100 bp, Homo sapiens
gccaatgatcttttcaatgctgcgaaagctgccaaaagtgacatgcagaatactagttgatcagcaagtttggaaaatagaagatgtcttcacattacaa

SEQ ID NO: 141454 - DNA, 50 bp, Homo sapiens
acggagaagaaggcctccgacgacctgaaggagaagaaggagaaggtgga

SEQ ID NO: 141455 - DNA, 88 bp, Homo sapiens
gacgttttccggagggattccatcataggtcacggagctgctggacgtctccatggagctgggctgtttcctggctggagcgctcgtc

SEQ ID NO: 141456 - DNA, 82 bp, Homo sapiens
tggagcctcagttggaagcagccgatccagcctgcggagcctgtggggcaggagcctccaaaggccgctgcttctagttggc

SEQ ID NO: 141457 - DNA, 80 bp, Homo sapiens
gggtgacgctcgctccgctcgtcccgctcgtcatggcctacccgggatacggaggagggattaaaattgagcttcccatt

SEQ ID NO: 141458 - DNA, 75 bp, Homo sapiens
cgcgcagccgccggcgtcgccgccatggacctaggatttcaaatatgcgtgcattagagaatgattttttcaatt

SEQ ID NO: 141459 - DNA, 90 bp, Homo sapiens
gtagcagtgcttctctggtcctcaagagacttggatttaaaggagagaaggatattcctggactgactgatactacagtgcctcgccgcc

SEQ ID NO: 141460 - DNA, 99 bp, Homo sapiens
atgagagccttcaaaagcagtgcaactggctcagtattcacagggaaagctgtgaggtatactgcattggaacaaaaactgaaaaaattgacggaagat

SEQ ID NO: 141461 - DNA, 80 bp, Homo sapiens
tagcttcacaaagtgccaaccatacacatggcaccacctcacacagggaaacggactttgccaataccattcctggccat

SEQ ID NO: 141462 - DNA, 88 bp, Homo sapiens
tcctgcactcggacttagagctggacacaccactgggccacattcgctgtgggtcccggccacggcgtgcagctgccctcaggccgcc

SEQ ID NO: 141463 - DNA, 150 bp, Homo sapiens
cgggtgcagaactacctgtacaacgtgctggagagaccccgcggctgggcgttcatctaccacgctttcgtaggaccttatcatgtccttcactgtatccatggcaatcgggctggtacttggaggatttatttgggctgtgttcatttg

SEQ ID NO: 141464 - DNA, 98 bp, Homo sapiens
agcagcctgcccaacttctgcgggatcttcaaccacctcgagcggctgctggacgaaggctgagtcatcactagagagtgggaagggcagcagcagca

SEQ ID NO: 141465 - DNA, 100 bp, Homo sapiens
ggcggctgccgcacaatcccgggttgtccgggtcctgtcaatgtcacattcttgtagacactgtttgggctctgtcatacttgacagatggaggtaatga

SEQ ID NO: 141466 - DNA, 75 bp, Homo sapiens
agcagcgcggcagagtcatggggagatcccatttcattctgaaggccggcatccccgttccttaatgggcaagaa

SEQ ID NO: 141467 - DNA, 98 bp, Homo sapiens
attgcagcagaccatgctacgagtgaaggatcctaagaagtcactggatttttatactagagttcttggaatgacacagcacttttaaacatcgtgtt

SEQ ID NO: 141468 - DNA, 98 bp, Homo sapiens
atcctgtcccactgggaaaagtataacacagggattcttttcctgccatggggatatgacattagccaggtgaatttgccattttcagtggaaaacaa

SEQ ID NO: 141469 - DNA, 90 bp, Homo sapiens
tgggagttgcttttggaatgaatttggaatcttcccttgaagagctttggagtttaacccttctgccaatccagaggcaagcacaatatt

SEQ ID NO: 141470 - DNA, 100 bp, Homo sapiens
ttgaagttaatggagaacatgcaacagtacgttttgctggtgttgtccctcccgtggcaggtcccagctagtccacagggaccagcagtgccatggaagg

SEQ ID NO: 141471 - DNA, 82 bp, Homo sapiens
ttgatacttctgtctccattgaggagacctttcttggccaggactcgcagtgggtaacctgtttcatcgtcctcgggctacc

SEQ ID NO: 141472 - DNA, 87 bp, Homo sapiens
agcacccaaaacgctggggccaagtcagcgaggcctacgtgagcctcctagcaaaccagtccagctacgggggcccagccagccagc

SEQ ID NO: 141473 - DNA, 99 bp, Homo sapiens
gtgaccaaccccaaggaggacgagggccggttgccgggcgcgggcgagaaaggatggatagaatgacagaagatgctcttcgcttgaatctgttgaagc

SEQ ID NO: 141474 - DNA, 88 bp, Homo sapiens
gcatctgaagtgcaggtagaatcagcctcttgttgctgtaccacatagaattcactcaacaagtagaaacgtgagagaagaaaaaaca

SEQ ID NO: 141475 - DNA, 90 bp, Homo sapiens
gccaaactccaggctcagatgtcacaggctcacgaggcccagggaatcctctggaccatcagattaccaatgaaagaggagaatcaagct

SEQ ID NO: 141476 - DNA, 100 bp, Homo sapiens
tcaatccttgagcagagggagagcctgcccatctacaaactgaaggagcaattggtccagcatggccgaaacagaagccctgtcgaagcttcgggaagac

SEQ ID NO: 141477 - DNA, 83 bp, Homo sapiens
cactgctggctgcttccagtgttcgccgagagggctttgttcgcgggggtcacagctctcatggctgcagctagcgtgacccc

SEQ ID NO: 141478 - DNA, 98 bp, Homo sapiens
gtccagagctgaggactgcctgtttgcaggccacagttgtaagggatcttgtggctgtcaggatggcagaggagcaggagttcacccagctctgcaag

SEQ ID NO: 141479 - DNA, 96 bp, Homo sapiens
agggccaggcgccgctcagaacggaatgtctgatcacagatacggggatggtggctctactttccagagcacaacaggacactgtgtacacatgcg

SEQ ID NO: 141480 - DNA, 89 bp, Homo sapiens
aaaaagctgccctgagacggtgtcccgccgaaaggattcccttcaatgaagatcccaatcccaatactcactcatcaggaccctcaacc

SEQ ID NO: 141481 - DNA, 90 bp, Homo sapiens
cttttcccctggccttctgtatcttcatggtgcggctcatcttcgagagtttgaagaaaacaggtctgaaacaaggtcttacccccagct

SEQ ID NO: 141482 - DNA, 74 bp, Homo sapiens
cgaaaaatcaccttctactgggtggataccaccgaatggtctaagctgccactgcagagccccgccatggaaga

SEQ ID NO: 141483 - DNA, 101 bp, Homo sapiens
gtctggccaagaatcagaggaagtggggaaaggcgtaggaggaggagcaggagttcttccagatcgccaagaacatcaaaaaccataaaaaggaaatcttc

SEQ ID NO: 141484 - DNA, 98 bp, Homo sapiens
caaacatgttggacgttctaaaggatatgaataaggttaagcttcgtgcaattgagcggtgaagacattcagtgaagcttgcctgatggtaaggaaac

SEQ ID NO: 141485 - DNA, 82 bp, Homo sapiens
acctggaaatgtacagaaagaagtctcatcttcctttgaccacgttatcaaggagtgctatgctggaaaatgagaagaagaa

SEQ ID NO: 141486 - DNA, 106 bp, Homo sapiens
ccatgccagaccgtggaagatttaacgaatggggttgtgatggcccaggttcttcaaaagatgaaacttttgagaagaactttgaaagagaaacccataaaataag

SEQ ID NO: 141487 - DNA, 74 bp, Homo sapiens
agaatatgacggtggctataccagggactctgttctgattagggatcgcttacacctgagacgaactacagaac

SEQ ID NO: 141488 - DNA, 88 bp, Homo sapiens
cgaccgagggactgggagtcgttagtgaggtgaaaaccggcagaaagacattaagagattttcctgcagtcactgctggcagatgata

SEQ ID NO: 141489 - DNA, 98 bp, Homo sapiens
gaccacggcgcagacgcgggcgagctgcggctcggacgccagcggacacgcgggcgagggggggccctcagcctcttggccttgaacgggctgttcat

SEQ ID NO: 141490 - DNA, 75 bp, Homo sapiens
agtaaagttggaagttaagggagacaaagttgaaaacaaagtgctgaaaaaagcagtcatcgattttaagtccaa

SEQ ID NO: 141491 - DNA, 75 bp, Homo sapiens
ggcggccgcagtggcgtcctggagccctcctcagtgtctttggtgcaacactaacaaggcttgtctggactaccc

SEQ ID NO: 141492 - DNA, 100 bp, Homo sapiens
gtcttcacctgagccctgctctccagcgaggcgcactcctggcttttgcgctccaaagaagaggtgggatagttggaggaagaagaggagtcggagccat

SEQ ID NO: 141493 - DNA, 101 bp, Homo sapiens
aaaacagtgatcgctaagaactttgccgataccttaggatacaacatagaacctattatgctctatcaggacccagatgatgtggtaccagttggccaaag

SEQ ID NO: 141494 - DNA, 76 bp, Homo sapiens
cttggcccgccggaagggcaggcacatgggcataggccagcggaagcctgccacctcctatgtgcggaccaccatc

SEQ ID NO: 141495 - DNA, 51 bp, Homo sapiens
gccagtttggctgaaaataaaaggtgagacatggaatccattaaaattgca

SEQ ID NO: 141496 - DNA, 83 bp, Homo sapiens
atccgggccgtgaacgaaagcagtgacggaggagcttgtaccaccggagaaagtaaagtttctgggcgacaattaccttgagg

SEQ ID NO: 141497 - DNA, 90 bp, Homo sapiens
cttaagggactgagtatcattggggatcaccccttctgtgtcattctctgaggaaaacaagttcttctcaaggaggaaagtctgaacttg

SEQ ID NO: 141498 - DNA, 100 bp, Homo sapiens
ccctgtttcgccacagttcctaccttatgagctcggttttcttatgcttataagagtggaacaggaaatggcaactgctgacaggaagtttggcatccac

SEQ ID NO: 141499 - DNA, 96 bp, Homo sapiens
gatcacctactcttcagaaatttggttcgagaacttgtcttggacaattgcaaatcaaatgatggaaaaattgagggcttaacagctgaatttgtg

SEQ ID NO: 141500 - DNA, 90 bp, Homo sapiens
gtccaccatcggtgacctcaccgcctcggttcgccctcagccgccccggttggggtgactcagtgggaacgccatctgagcggggcatga

SEQ ID NO: 141501 - DNA, 96 bp, Homo sapiens
gctttattgacctcgactcccatgcggcctgagacctgggaggaagctggagaaaagatgccctctgaatctttgtgtttggctgcccaggctcgc

SEQ ID NO: 141502 - DNA, 83 bp, Homo sapiens
ttcatgattctttggctcaaaggagttgtatttagtgtgacgactgttgacctgaaaagttgcagatctgatctcttctgaac

SEQ ID NO: 141503 - DNA, 100 bp, Homo sapiens
aggtgtgagtgccggagtggttatgagtttgcagatgaccggcatacttgcatcttcaccaggagactaaagtccatcaaaaacatccagaaaattacca

SEQ ID NO: 141504 - DNA, 80 bp, Homo sapiens
gtctgcttcgggcctctggaatttagcgctcgcccagctagccgcagatgaaggatttgggggcagagcacttggcaggt

SEQ ID NO: 141505 - DNA, 100 bp, Homo sapiens
tgccggtgctcttcatcaccttcgtggtcgtctggtcctactacgcgtacgtggtggagctctgcgtgtcggcgtcttcgacatcttcggaacattgctg

SEQ ID NO: 141506 - DNA, 102 bp, Homo sapiens
ctgcacgtgcaactgcaaacgctctttgttccagagcatggagatcagctgaccccgcactacatctacccaccagccatcgtgcagcccagcgtggtgatc

SEQ ID NO: 141507 - DNA, 100 bp, Homo sapiens
gcggagttagcagtcacgacctccagcacagcagaaaggacccaggagcgataacagtaaatcaaataagatatttgtcggtggaattcctcacaattgt

SEQ ID NO: 141508 - DNA, 100 bp, Homo sapiens
tccaggccttgagacccagaagggagcgaaggtttttgctgcgccaacgcagtgaccgaaggctccgctcacgcccggggggggccctcagcctcttggc

SEQ ID NO: 141509 - DNA, 75 bp, Homo sapiens
cagctgttgaaacagaagaagttgagcctgatgaagaagaagtattaatattagaaccaaccaaaatctatcaac

SEQ ID NO: 141510 - DNA, 75 bp, Homo sapiens
gtgctgcaacccccatcaccttagccgactctgcgaactaggtcctcaaaggcttcccttccctactggttacaa

SEQ ID NO: 141511 - DNA, 115 bp, Homo sapiens
ccttcttctcttctctgcttggaggggatgtggtttccgttaagctggacaacagacaatgcagatcttcgtgaagactctgactggtaagaccatcaccctcgaggttgagccc

SEQ ID NO: 141512 - DNA, 75 bp, Homo sapiens
ctgccgtctgctcttctgcctcttgatctccgccaccgtcttcaggccagcttgtcgaccaggtttctacaaggc

SEQ ID NO: 141513 - DNA, 95 bp, Homo sapiens
agaccgtgaccgagagcgtgaccgagagcgcgaatatcgtcatcgttagaaggaggaagacaatggtcctataatgcccttggataagaaaagga

SEQ ID NO: 141514 - DNA, 100 bp, Homo sapiens
tctcagctgtgccggcgctacgggacccgagccgtcccagaaaccaaagggcaggcacggcagcaaacgcctgaggaagattgttgatcgaatcgacaat

SEQ ID NO: 141515 - DNA, 83 bp, Homo sapiens
ccggatggctccgcaagtcccccccggagaaaaagttgaagcgttataaatgcttcggttacccacagtctttcgccagatga

SEQ ID NO: 141516 - DNA, 100 bp, Homo sapiens
gatctttacatgttgaatccttgcagcactaaaatttggcgaggcaaacctctctacatttgtaaggaaagatacaaagttcttgagcaacagtggattt

SEQ ID NO: 141517 - DNA, 90 bp, Homo sapiens
caataacaagttggactgaacacattgtatctcaggaattaagaatttttcctaaaagaagccttatttagtgtctctgacaaaaccggc

SEQ ID NO: 141518 - DNA, 82 bp, Homo sapiens
caatattggaagcgctttgatttacagcagctgcaggtgtggacactgccagcggctgcagccgacttggaatgacctggga

SEQ ID NO: 141519 - DNA, 98 bp, Homo sapiens
tatctcatgttctaacacgggataaattcaagttagaaaaagacaaaatattgaaatgcttctctaggttacctaaccaaactcctgcaaaaccacac

SEQ ID NO: 141520 - DNA, 100 bp, Homo sapiens
gcgaggaggcgcgggaggtgttcgagaacgaccccgagacgagctgagctcaatgtgcagcaatggatgacgacagcctggatgagcttgtggcccggag

SEQ ID NO: 141521 - DNA, 97 bp, Homo sapiens
ccgagaaccgtcagtttgagccagatgcactccagttctcgcctgaattaccaaagcagcgttcagggatcctctcagtcccagagcacacttggct

SEQ ID NO: 141522 - DNA, 90 bp, Homo sapiens
gcttggcgcctgaggttctcccattaggacaaccctccatatgataagggagccttcagaatcgaaatcaactttccagcagagtaccca

SEQ ID NO: 141523 - DNA, 75 bp, Homo sapiens
gcgacctatccagaatgatcaagggtatgttagagcccaccaaggaaccactgaaaccactttctgctgcagaaa

SEQ ID NO: 141524 - DNA, 95 bp, Homo sapiens
atctcttcaagtacatcataatcggcgacacagtgtgttttatggaccatgtgctgctatgtatgcctgaagaagtacttgaaatgcaaatttgg

SEQ ID NO: 141525 - DNA, 75 bp, Homo sapiens
gtcaactctaccatgtgctagagacagccaacaaaatattcatggttcttgagtttaattggttggggtcagata

SEQ ID NO: 141526 - DNA, 100 bp, Homo sapiens
ccggctgccctgcagtcgcctccaacacccgctgctgcccgcccgctgcctgcctgcctggcatctctctctcccgtggttctatagatggtaataacca

SEQ ID NO: 141527 - DNA, 75 bp, Homo sapiens
gcaaactgagggagctcaacaagcaaaatgatgcttcaacacccaggccaggtctctgcctcggaagtgagtgct

SEQ ID NO: 141528 - DNA, 87 bp, Homo sapiens
tttcaactgctgtattgcagaacagcctcagcctgttgaccccctgtttacagtgccagcgccaccaccgccgatttccagcagtct

SEQ ID NO: 141529 - DNA, 105 bp, Homo sapiens
aaactttatgtttgggatttagaagtagaagatcctcataaagccaattctaagaagccagaaagataagttggagatgactagcctcataaagtttgtctcttg

SEQ ID NO: 141530 - DNA, 75 bp, Homo sapiens
tgtgcacacatgtagagacctttgtatgaattcctcctgatcagcagagactgatctttgctggcaagcagctgg

SEQ ID NO: 141531 - DNA, 90 bp, Homo sapiens
ggataatggtatcatcaaggccttcagaaacatccctgataaatcctgtttcaatgcattctttaactttgaggatatgcaagagatcac

SEQ ID NO: 141532 - DNA, 75 bp, Homo sapiens
tgaatttggaccaaactgtaaaggaatttatcgtatttctaaagcaaggtattatacctgaagaaccttagccct

SEQ ID NO: 141533 - DNA, 75 bp, Homo sapiens
ccatcgactacgtggaggacgatcccagctctcctgttggcttcgtgcttggggtagatcttcttcacatattcc

SEQ ID NO: 141534 - DNA, 100 bp, Homo sapiens
cgtgctcttgctaaagaggtagcaagaaagaaaattagagtgaatgtagttgcaccaggcagctgagtatgtcccagagaaggtgaagaaagcggaaaag

SEQ ID NO: 141535 - DNA, 98 bp, Homo sapiens
tgagggtgtacaaatacccctttgaattaattatggcttgtctttgcaagatataacaatgaggaaagctttccgaagttctacaattcaagaccagc

SEQ ID NO: 141536 - DNA, 82 bp, Homo sapiens
tttcaggaaaacagagaaagaagtgataggagggctctgtagctgcatcttcctcccgtgaggctggccgagctccacgctg

SEQ ID NO: 141537 - DNA, 100 bp, Homo sapiens
gaggccccgctccccgaaacgtgaccatgtggattcaacagcttttaggactcaggtgcccagatgactatcatgagccaagcttgtgcagaaaggtgta

SEQ ID NO: 141538 - DNA, 98 bp, Homo sapiens
acctgcgcgcccgcctcggcccgcacgccaagcacgtggtgggctatggccaccttgttattcctagacatggcttacagagtcttgggaaagttgct

SEQ ID NO: 141539 - DNA, 50 bp, Homo sapiens
cggcagaatgaaatcgccaagaagcggtgcaatgtagcaggacaactcat

SEQ ID NO: 141540 - DNA, 98 bp, Homo sapiens
ccatgtatattttttgctggaggcataacaatgggaaacattggtcgacaactggcaatggctgttgaagctcaaatccgaagttttggacagactcc

SEQ ID NO: 141541 - DNA, 86 bp, Homo sapiens
ctgcggtttccggctgcaccgcggcatgaatgtgcccttcaagcgcctgtctggcgttgacccggacgacacctataatgagaccc

SEQ ID NO: 141542 - DNA, 88 bp, Homo sapiens
cgccgccgaagaagcatcgttaaagtctctcttcaccctgccgtcatgtctaagtcagagacctgcctagagctggaacgttacctcc

SEQ ID NO: 141543 - DNA, 75 bp, Homo sapiens
cggcgacctccggcggcgggaggcccggcctgggcagcccggccgcaccacctgggtctccgccatgaacgggcc

SEQ ID NO: 141544 - DNA, 90 bp, Homo sapiens
tttgtggctaccgctgttactgcttggagtgcctcaccgagccagctcttttgtgacagggacggcttgttgcgggcacttctcacccct

SEQ ID NO: 141545 - DNA, 76 bp, Homo sapiens
tgcagctgcctcagttcttagcgcagatgagaaacctggatgagtgtgaggtgtgccgggacggaggggagctgtt

SEQ ID NO: 141546 - DNA, 78 bp, Homo sapiens
aatggtctatggtctgtctctgaccaagaatcgccttcagccctgtctggtgcatccttggcagaaagtgaggaggaa

SEQ ID NO: 141547 - DNA, 84 bp, Homo sapiens
gaaagatccaaaacaagtggctgcggccgtcgcccaggagtcatcggacgccagaatctggagaactacgatgacccgcacaaa

SEQ ID NO: 141548 - DNA, 83 bp, Homo sapiens
tccagagctttgccaagttcagcaaatttggagatgatccatttggaggggaccctttcaaagaaagtgacccattccgtggc

SEQ ID NO: 141549 - DNA, 99 bp, Homo sapiens
aactcctgctcctcctcttcgcaatgagtaaacgacgcagctaattcacctaaataagattgatcctcatgctccaaatgaaatgctctatgggcgaat

SEQ ID NO: 141550 - DNA, 75 bp, Homo sapiens
tccgctgatctagtgcttctcgaaaaaaaccttcaggcggcccatggacacagggaatatggaggttctgcacct

SEQ ID NO: 141551 - DNA, 88 bp, Homo sapiens
aacgaccaagagggtgttcgactgctagagccgagcgaagcacattcacggcatggtgtaactcccacctccggaaggcggggacaca

SEQ ID NO: 141552 - DNA, 96 bp, Homo sapiens
tgagactaaggaaagagcctggaaaatggagcagacctggacgaggcaaatcgaagggagagtggttgagatttccagactccaagagatattcac

SEQ ID NO: 141553 - DNA, 100 bp, Homo sapiens
ggtcaatttgttgtatagctgaggcaaccacacctccaaatcaaggaaggccagattctcctgtctatgctaaccttcaagaactgaaaatatcccagtc

SEQ ID NO: 141554 - DNA, 83 bp, Homo sapiens
ccaaggaggagtacaaggacatcctgcgcaaggccgtgcagaagatctgactgcagccatgagcagcaatgagtgcttcaagt

SEQ ID NO: 141555 - DNA, 101 bp, Homo sapiens
cggcggctgtgcgcgcggtccctgagctcgggctctggttagagacagtcaacgacatctcagtcctggctttctctgtctgcttcatcttcactatcacc

SEQ ID NO: 141556 - DNA, 114 bp, Homo sapiens
aaacggggagaaatccttgcccggtacaccactaccgaaaagctgtctattgttctgtacagagtaatgagatgtgtgacggctgcaaaccaggtgtttttttctgaggctgtg

SEQ ID NO: 141557 - DNA, 97 bp, Homo sapiens
ggagccctgaacggtcaaggagccctaaacagccaggaggaagaagaagtcattgtcacagagggcatgaacaaccgggaggtgctggagcaggtgg

SEQ ID NO: 141558 - DNA, 75 bp, Homo sapiens
tggagttcctcaaacgaaaagagaattgtacactgcaggtcctgggaactccaacaagggagcaaatcagagaaa

SEQ ID NO: 141559 - DNA, 75 bp, Homo sapiens
gaggatggcgccctttggaaaggagcacgaggctttaatgggcatggcaccttgggcagtggccgctcctcggac

SEQ ID NO: 141560 - DNA, 90 bp, Homo sapiens
ctccggggacccttccgtatctgcctaggcattttgctgtctcctcctaatacgtggaaattaatctcactaatgactaccgtgtcagcg

SEQ ID NO: 141561 - DNA, 87 bp, Homo sapiens
tgccccgccatgaatgaggagtacgacgtgatcgtgctgggcaccggcctgacggatattaatgcacacgcctgtgttactggtaaa

SEQ ID NO: 141562 - DNA, 90 bp, Homo sapiens
atacagagcccagcccagaaaagaaatctcctgcaaagaagctgagccatgcaattagtaaatctttggggtgtgtacccacgagagaac

SEQ ID NO: 141563 - DNA, 100 bp, Homo sapiens
tacaacctggtgcgcttccggatcgggggcaagcggaaggtgatgcccaagatggaccagataaactcatcctgaaagtcgctgttgttctcctgctgag

SEQ ID NO: 141564 - DNA, 100 bp, Homo sapiens
gaggtggccgaatcttccttcaggatatcaagagatcctacagtaaggaattgtttgaagaagttatttcaaagatgcggaaggcagggatcaaatccac

SEQ ID NO: 141565 - DNA, 82 bp, Homo sapiens
gctgggaggccgagcgcgccgagttacagggccacaggagaatggtatgctgctcggcatggagtgaagaccaccccgtgtg

SEQ ID NO: 141566 - DNA, 100 bp, Homo sapiens
gagccgctgggcgccggagccgaggcgagcgccgcgcgcaccactgctgggagtgtccactcgccttccaccagcatggcaacgtcttcacagtaccgcc

SEQ ID NO: 141567 - DNA, 80 bp, Homo sapiens
tgcaactactgcaaaaattccttttgttcaaaaccagaaatcctggaatgggaggagtgtgtgctctgaatggaaagtta

SEQ ID NO: 141568 - DNA, 75 bp, Homo sapiens
ggggcagaaaggcggcaaattgtatgcagtaaaggcagtcttgattgatatggaagaaggggtagtgaatgaaat

SEQ ID NO: 141569 - DNA, 108 bp, Homo sapiens
gcaggacagcgccttcctcaacgacgcggacatggtcatgagctttgtgaacctgggcttgttagcagtggcacaagatcttacagaggatgaagaaacagtagaaga

SEQ ID NO: 141570 - DNA, 51 bp, Homo sapiens
ctgtgtcagcagctagcccttttcctcaagaatgagtccctggaacgccag

SEQ ID NO: 141571 - DNA, 100 bp, Homo sapiens
tgcagatggagaaggagaggctgcggctgaaacagcaagaactgcttcggcaggtgtctggaaatgaagtatggaaatgaaatcatgaataaagacccag

SEQ ID NO: 141572 - DNA, 106 bp, Homo sapiens
gcctatttgttcatcatttctcgtgttcaagaacttgatagcccagaagagttagggaaaaagcgtatctgcaggattatcacgaaagatttcccccagtattttg

SEQ ID NO: 141573 - DNA, 83 bp, Homo sapiens
cgacaagccgctggcagccgcggatctcaccgccgctcaggctggtcagtgagaaggtcggaggggccgaggggaccaagctg

SEQ ID NO: 141574 - DNA, 100 bp, Homo sapiens
aggcggctcgggagattcagccgtgaagcaagtgcagatagatggccttattggttcgagtgagtaaaaactaccgatcagtcatcagagcatgtatgga

SEQ ID NO: 141575 - DNA, 100 bp, Homo sapiens
ttggcttcgggctgagctagcagtgagcaccttttggcccaatgaatatcagccaaatttgtatcctactgtggggcttcaaacaccaggagaagtggtc

SEQ ID NO: 141576 - DNA, 100 bp, Homo sapiens
caaggagaacaccgaggagagactgtttaaagtcagcaagagcacaatcattgtggagaagacagttcaagacctcctgaacctgatgcatgacttgagt

SEQ ID NO: 141577 - DNA, 100 bp, Homo sapiens
tatttgatgaggtggatctgacagatgccagcgtagctgaatccagtaccaaaaacgtcaacaacagttttacggttacctacctgggcaaagtctccac

SEQ ID NO: 141578 - DNA, 90 bp, Homo sapiens
cagatggcagccagtcagtggtggagctaaacatgaattcagctccaactttcatcaactttcctgcaaaagggaaacccaaacggggtg

SEQ ID NO: 141579 - DNA, 100 bp, Homo sapiens
cggcacattgtgaaggagttcaagagagagaaatggcaagttccaatcctgtgtatatggagatggaaaaaggagatctaccaacaaggttaaagttact

SEQ ID NO: 141580 - DNA, 101 bp, Homo sapiens
acgagacgtgtgctacatacgggctgaatgtggagagggtcttccaggacggctcctgtgacgtttgatgacatcactgtgtacttactccaggaggaatg

SEQ ID NO: 141581 - DNA, 99 bp, Homo sapiens
cctttcatctcagcctcctcagtagctgagactacagaaaaagcttgagtctccacccccatctaccaatcccttcctggaagatgagccaacaccaga

SEQ ID NO: 141582 - DNA, 82 bp, Homo sapiens
ctgcgcgcatgggcctgttcctggcccgcagccgccacctacccagtgaccatgataggtgacttaagagattaaaattaat

SEQ ID NO: 141583 - DNA, 98 bp, Homo sapiens
cagactccagcagccaagatggtgaagcagatcgagagcaaggctcatttttggacagtacatcacccctcctggcaattgctgcctgcacagccctg

SEQ ID NO: 141584 - DNA, 50 bp, Homo sapiens
cagagagggatgcttctgagcggaaggtcctaggcctacttacaagcctc

SEQ ID NO: 141585 - DNA, 100 bp, Homo sapiens
gaagtggtgaaacccaaacaacatctcctgctattccttgggctgcctttcctgcagctgaagaagcatctgtagggaatccagaaggagcgttcatgaa

SEQ ID NO: 141586 - DNA, 90 bp, Homo sapiens
agcgcctcgtcgacatgagtgatgtggaggaaaacaacttcgagggcagacactctccttccacatggaccacaggaggaaaagagccgc

SEQ ID NO: 141587 - DNA, 100 bp, Homo sapiens
ggccagataagatttcaggagctgatattaactccatctgtcaggagatggtgagagatgagaacctcaagtttatgaagaatagagatgtatacagtag

SEQ ID NO: 141588 - DNA, 100 bp, Homo sapiens
cgcagacatggacccctcgcgagccatccagaacgagatcagctccctcaaagttccagggtctccctccactgctgtagtaacccgggtccggggcctc

SEQ ID NO: 141589 - DNA, 98 bp, Homo sapiens
atctctatgttgataaaaatacaaagattatttgccagggtttcactggcaaacagggcactagagaaggcagaggagaatgcccagaggctgaccgg

SEQ ID NO: 141590 - DNA, 100 bp, Homo sapiens
gcgcaggcggcccaggtcgccgacacgctcacgcaccctccctgcctggccgcgcctctgcgaccagcttggtgatccagctatttttcctgccgtaatt

SEQ ID NO: 141591 - DNA, 75 bp, Homo sapiens
cgggtggcggctcgggacggaggacgcgctagttgtactaatggtcacttgatgtgcgctggctgttttatccac

SEQ ID NO: 141592 - DNA, 100 bp, Homo sapiens
tggacagtggagatgaagcctaagaatatgatcagagatatagatcagctatcaggaagggacttctgccattcaaagaaaatgacaggaagtaacactg

SEQ ID NO: 141593 - DNA, 100 bp, Homo sapiens
cacacagcagaaagagcatacgggagagatgaagcagtccactccaagaacattctcatcctacggattacgagattcagaatggacagtttagaagaac

SEQ ID NO: 141594 - DNA, 88 bp, Homo sapiens
tggtcatttcgtacatatgagagggttgccttttcgtgcaactgaaaatgacattgctaatggtgtttgctttgatgtacctaccgca

SEQ ID NO: 141595 - DNA, 90 bp, Homo sapiens
gttgtattcatcaataatgaaatgctgactaaggaacaagggtgttggacctcaggaatatactttactcaaattgaaggtgcttgagcc

SEQ ID NO: 141596 - DNA, 100 bp, Homo sapiens
tgccactagaaacatgtgcaacgagttactgccgataatgaaacctcatgttgtctggcgccgggagtgagaccctaaaacaaagaagaacacaaatcat

SEQ ID NO: 141597 - DNA, 101 bp, Homo sapiens
ctgcactgaaaggaaatgacggattttgaatgaaatggcttgggccataagaactgtttgttcgaccttttgaggaactgtcaaactgctgaaaagtggct

SEQ ID NO: 141598 - DNA, 100 bp, Homo sapiens
ggctgggcccctgcgtggtggtgccccgggcggcggcaaaggagacagacttcggatgggagatcaacttccagccagacccagccaggcacaggctggg

SEQ ID NO: 141599 - DNA, 74 bp, Homo sapiens
tcgcagtggtcgcttcttctccttgattccagcaatggatagaagagtcattacaccatatcaagatggaccag

SEQ ID NO: 141600 - DNA, 75 bp, Homo sapiens
aacatgtgatggaaaattatactcagtggctgcaaaaagttccagcaacagatagaaatgctttaagttcactct

SEQ ID NO: 141601 - DNA, 100 bp, Homo sapiens
cgcagctcctgcctgtccagccgggccaattccaatctcacactcaccgacaccgagcatgaaaacactgagactggaaatgggtcctgatgaatatgaa

SEQ ID NO: 141602 - DNA, 50 bp, Homo sapiens
ctcacggcacctcccaccatgaaggtacatcaggaacgtctctatcaaga

SEQ ID NO: 141603 - DNA, 51 bp, Homo sapiens
ctagccgcgtgtggcgacttaagctctaagcgaaagacatgaggcctcagc

SEQ ID NO: 141604 - DNA, 98 bp, Homo sapiens
aatccagtggaggacttctcgatgccaccccacttagtgagggtcgctgtctgcccattgatagaggccagattgtcttggaagttccaaagttgcaa

SEQ ID NO: 141605 - DNA, 82 bp, Homo sapiens
tggatttcggggccgcccggcggccgaggcgcccgccgaaggccctgctgtaaaaggtgctggagaatctggtaaaagcacc

SEQ ID NO: 141606 - DNA, 118 bp, Homo sapiens
gttatcatgagggaattccggtcagggtcaagtcgtgttctgatcactactgacttgttggtgactggtatagtggtcccgcaactgaacttgatactgaacctgatgatgaatgggt

SEQ ID NO: 141607 - DNA, 100 bp, Homo sapiens
ctagaagaattgttgggacatcaggtcgtcctaaaggtatgtctgattgacccgggctgcttccgagaaattgatgagctaataaaaaaggaaactaaag

SEQ ID NO: 141608 - DNA, 51 bp, Homo sapiens
aatccgtctggatcacggatgtaggaagtgtgcacagccagagaacaacac

SEQ ID NO: 141609 - DNA, 90 bp, Homo sapiens
ttctattacatcatgcggcctgatatttgtctttatggaactcagcaacatcacatacaggggcatccgcttcgatcctgaaattccgca

SEQ ID NO: 141610 - DNA, 58 bp, Homo sapiens
cgagaattaaatgccgagaaggccagtacgattcaaaggattccaaggagaagaataa

SEQ ID NO: 141611 - DNA, 100 bp, Homo sapiens
gaaccagagcctgaacacactgggaaatgccgtgtcagtggggttgttttgggttcaaaatgagcctgtttggaacaacctcaggttttggaaccagtgg

SEQ ID NO: 141612 - DNA, 83 bp, Homo sapiens
atcgtctccctgtacgccgagggctccgtcaatggcttcatcagcactttggggtgtcgtgaaaactacccctaaaagccaaa

SEQ ID NO: 141613 - DNA, 100 bp, Homo sapiens
caacctgcgtgaggtcaacctgcgcccccagatgtcccaggtctctgctgctgatgaagctgtgaccaaacgcacccaacccttggcagccatctgtccc

SEQ ID NO: 141614 - DNA, 100 bp, Homo sapiens
cgaaggagaggccaaagggcaaagtgatcaaggacagcgtcaccctcctgccctgcttttatttcgtcgagggttttggccaaattgggcgagggcacaa

SEQ ID NO: 141615 - DNA, 101 bp, Homo sapiens
agcgggcagcaggatggtggtggatgcggccaactccaatgggcctttccagcccgtggtccttctccatattcgaggaggctgaaagggaaacatcagcc

SEQ ID NO: 141616 - DNA, 100 bp, Homo sapiens
gctaaagtgggttgaattgccatggctgctggaagaagtctcaaaaagctcccgactagattaccccacattcctaagcatgttcatatctcaagctttt

SEQ ID NO: 141617 - DNA, 75 bp, Homo sapiens
taacagttttacgatttaaaacttcgccagaattttgggcaagatatggtgagcatcctccagttagttcagaat

SEQ ID NO: 141618 - DNA, 117 bp, Homo sapiens
gcaggagcagtggtgctgtcagcgcggccgtcggagacatgggagacccggggtcggagacaatgcagatcttcgtgaagactctgactggtaagaccatcaccctcgaggttgagc

SEQ ID NO: 141619 - DNA, 90 bp, Homo sapiens
cctggacccctggttcgccggctcctccaatgtgggcatcaacaggtggcgaaactctgtgaaggcatatttaaagtccttataaaggac

SEQ ID NO: 141620 - DNA, 75 bp, Homo sapiens
accatccacacatcataaagctttaccagaccgcgctgagcacgttcttccaagaaaccaacattcccaacagcc

SEQ ID NO: 141621 - DNA, 83 bp, Homo sapiens
caggagcagacagagaagctgctgcagtttcaggttcatcatgcctagtggcgtataagaagaccccgccaccggtccctcca

SEQ ID NO: 141622 - DNA, 83 bp, Homo sapiens
caccggggagtctgatacacagggaaatcctcattgacgattcaatttgttgaaggccaatttgtggactcctacgatccaac

SEQ ID NO: 141623 - DNA, 100 bp, Homo sapiens
ggcggctgatttagaaggaggttcaggctacggtgagccgaaggtttgtccagaggggttgcgtttatccggtttgacaaacggtcggaggcagaagagg

SEQ ID NO: 141624 - DNA, 75 bp, Homo sapiens
cgtgaagtgagagttggagttacgcaggagtctactcttcatcttgtgttgagacttcgtggtggtgctaagaaa

SEQ ID NO: 141625 - DNA, 72 bp, Homo sapiens
cacggtggggcccaacgaggcgctggtggtttcaggacatggatttgattgacatactttggaggcaagata

SEQ ID NO: 141626 - DNA, 100 bp, Homo sapiens
gctgatggagattggctggttcctcttggaaggtgcatctgcagtacaggatatgaagaaattgagggttcttgccatgacagagtcttgttctgttgcc

SEQ ID NO: 141627 - DNA, 97 bp, Homo sapiens
aagaaaaagagcaggaagtcattacatgggtgtgagatggcagacaggtttgcaggaaaccctcagaaagggggctggaggatttagccactctgtc

SEQ ID NO: 141628 - DNA, 82 bp, Homo sapiens
ggtagcggtaccttgagtggcaacaggtttggtgcacctcgatttggaggaagtagggcagggcccttatctggaaagaagt

SEQ ID NO: 141629 - DNA, 71 bp, Homo sapiens
gaccctgcacctggtcctgcgtctgagaggtggcaggtgtcacagctttagcctgtggaatgatagcagta

SEQ ID NO: 141630 - DNA, 100 bp, Homo sapiens
caaatgctgcaggaactggtgaacgcaggatgcgaccaggtaggcgaaaaccaagagtacatcggcctcgttctcctatattggaagaaaaagacatccc

SEQ ID NO: 141631 - DNA, 100 bp, Homo sapiens
agggcgacggccccacctccggccactgggacggcggcgcggagaaggcagatccgaattcgagatccaaaccaaggaggaaaggatatcacagaggaga

SEQ ID NO: 141632 - DNA, 48 bp, Homo sapiens
gaaggtgtcctgcctggagagagcctgtgactgtgaccccaggggcat

SEQ ID NO: 141633 - DNA, 98 bp, Homo sapiens
tgtctgtgatgcgtccacagccaggagacacggaggagaaagtgcaggccatgccacttcctctcaggagcctagtggatgctcagatcagagacctg

SEQ ID NO: 141634 - DNA, 50 bp, Homo sapiens
ggagcacccggcgtcccagacaagctgtagaagccgcccagctggccgag

SEQ ID NO: 141635 - DNA, 75 bp, Homo sapiens
ggatgaagctgctgctgggcatcgccttgctggcctacgtcgcctaaggactccatgaaagatgacagaagaagt

SEQ ID NO: 141636 - DNA, 82 bp, Homo sapiens
gcggacagattgaccttcagagcgagatgaaggatttgggggcagagcacttggcaggtcatgaaggggtccaacttctcgg

SEQ ID NO: 141637 - DNA, 75 bp, Homo sapiens
cagtaccaggagcaccaggaatgcctccaggtgccagagtgggtcatcgctccttgatgagatactacaaacagc

SEQ ID NO: 141638 - DNA, 75 bp, Homo sapiens
tgacacaccagggttcggggaccacatcaacaacgagaactgctggcagccaaggaggcgaagcttcgagacctg

SEQ ID NO: 141639 - DNA, 100 bp, Homo sapiens
tatcctcggaagagcgctcccaggagaaacaagaaaatttctaccttgaaccgtatctgaaagaggttattcgggaaagaaaagaaagagaagaatgggc

SEQ ID NO: 141640 - DNA, 100 bp, Homo sapiens
cagatgttgttgatgaagtaatacagaactgccccatcgatgtgcggcgcccgctgtataagctcccggagccctgcctgttccctgtccatccaggcca

SEQ ID NO: 141641 - DNA, 87 bp, Homo sapiens
cttggagagcccagagcgacccttcctggccatcctgggcgggttatgtgactacaattctggatgatgcaaaaatttattcgagcc

SEQ ID NO: 141642 - DNA, 100 bp, Homo sapiens
tcaaattgtcaggatcaggaatgtatgttttcttccatctggattctagtgtttgggaaatgggaagtaatgacagctggcacctgaactaagtactttt

SEQ ID NO: 141643 - DNA, 100 bp, Homo sapiens
ccagagacagaagcagatggattcgtccttttaggtggattggactctaaatattggagagcaagcccttgacatatgtattgtctctttcaatcagtcg

SEQ ID NO: 141644 - DNA, 80 bp, Homo sapiens
caatcctcttacctccgctttccaagcagctgggaccacagggctattcacgaaaagcagcagctctagagttcttaaac

SEQ ID NO: 141645 - DNA, 75 bp, Homo sapiens
ccgccagtcaataggaagtacgagtactgtgccctgtccacggtgcctcctgcatgtcctgctgccctgagctgt

SEQ ID NO: 141646 - DNA, 100 bp, Homo sapiens
aatggcatgtgcaaagatacagaggtgcggtctgcctgcagcctttctgccacctgtactggggctgcacccggaccggctgctacggctgcctggcccc

SEQ ID NO: 141647 - DNA, 98 bp, Homo sapiens
caagcgcgacgcccggcgcgagctcaagctgctgctgctcggaaaaccaattctgtgtcctcggaggaccacagcccagttgggccccaggcgaaacc

SEQ ID NO: 141648 - DNA, 87 bp, Homo sapiens
aaaatgcgctcgggctggaccagcagctcactgttaatgaagcggctgctcaactctgtgtgaaggataatgccctgctgacaagaa

SEQ ID NO: 141649 - DNA, 100 bp, Homo sapiens
cttctttgacgtggacacctcacagcagtgttgtactgctacttctataaacggacagccgtaagactaggcgatcctcacttctaccaggactctttgt

SEQ ID NO: 141650 - DNA, 75 bp, Homo sapiens
ttatgatggacctaggactgctgcttggtgttgtggttgccccacatacattaaagttaccagaagagcctatca

SEQ ID NO: 141651 - DNA, 100 bp, Homo sapiens
cacctttgggactggaacaagacttcaggtcacgctcgataagccatcaccaaactcagaaaatgaacaaaattctgttaccctggaagtcctgcttgtg

SEQ ID NO: 141652 - DNA, 98 bp, Homo sapiens
tagcctttcacttattcatctgtccagcatgactcatccccgggagtgttgagtcctcgatgggcttcctggaatattggtgtgtttatttgcatcag

SEQ ID NO: 141653 - DNA, 96 bp, Homo sapiens
ggacgggaaggcgggagacgagaagcctgaaaagtcgcagcgagctggagccgccggagatgacatttgatccagaaatcttcttcaatgttttac

SEQ ID NO: 141654 - DNA, 105 bp, Homo sapiens
aagctgggaatttcaggtcatgtgcacagattaatggctggatccatggcagtttgcgatccccgcgtccaggatggagcagctgaacgaactggagctgctgat

SEQ ID NO: 141655 - DNA, 51 bp, Homo sapiens
ctgcaggaagagctcgatcaggttcaggaccagttgctcttctgtgatgac

SEQ ID NO: 141656 - DNA, 78 bp, Homo sapiens
agagatgatgcgcttctcagaaatgtccaggaatcccttggcaccatgtcctgtgtgcattataaattttcctctaaa

SEQ ID NO: 141657 - DNA, 82 bp, Homo sapiens
agaataatgacagtgactgtggtgcttttgtgttgcagcttaaagcttttcaagccaggccaagaagctgtgaagtaccagg

SEQ ID NO: 141658 - DNA, 98 bp, Homo sapiens
tgtgaagtaacagaattaaccagagaaggtgaaacgatcatcgagctaaaatatcgtgttggccaagctataacatcagaaatggtgaatgaatacaa

SEQ ID NO: 141659 - DNA, 100 bp, Homo sapiens
gtggagctgaacaagatccctaccgtgcgcgccttccttttggacccagatgatgtggtaccagttggccaaagaagagcctggtgttggtgcatgtgct

SEQ ID NO: 141660 - DNA, 90 bp, Homo sapiens
ctcctactgtcccacggccaccgaagagccatgaagctcatgactgctctggtgaatgttgccttaaacctcagtattcatcaggataat

SEQ ID NO: 141661 - DNA, 100 bp, Homo sapiens
agacacctgtgtggaatcaatttgtctttgtcagcgccacgtgagacacctacaacgagatgccttaagccagctcatgaatggccccatcagaaagaag

SEQ ID NO: 141662 - DNA, 100 bp, Homo sapiens
ctcctactatccatttcaactacagatactttgaagtagaagaagctgatggcgcagttgtgtagcagttgagtaatgctggttagctgttaaggtggcg

SEQ ID NO: 141663 - DNA, 50 bp, Homo sapiens
ggattccacagtgtcctctggaaaatggccctggccaacgtcaacattgg

SEQ ID NO: 141664 - DNA, 51 bp, Homo sapiens
ggtcaactcgatccaatacagaccgtaagaatgattgatgttggctgatat

SEQ ID NO: 141665 - DNA, 90 bp, Homo sapiens
cctctgagggaattgggaggtcggcggccccaaaagttttgaacgaagaatgtgatcagaactggtacaaggcagagcttaatggaaaag

SEQ ID NO: 141666 - DNA, 90 bp, Homo sapiens
atcagggccctccagactcaggcgccccaacaatgtgcttgcgatgactgcagtctctcacacatcctcacgtgtggtatcatggacccc

SEQ ID NO: 141667 - DNA, 75 bp, Homo sapiens
gcgagcgaggaggatggcggagtcggggctcctgacggttgtcaccactgggatggaacaactagattttgaaac

SEQ ID NO: 141668 - DNA, 100 bp, Homo sapiens
tggggtttcaggaaggcaggcccagttcaggggtgccttgggagcaaaggtcctgtcattccaacactaaggtgaccttgaggaaccctgggagctcagg

SEQ ID NO: 141669 - DNA, 98 bp, Homo sapiens
ctcctccccttttccagcagcaaaggtttgacaggattcagtggtcccaatttaaaggctattttattttcaaactggagaaagtgatggatgatttc

SEQ ID NO: 141670 - DNA, 98 bp, Homo sapiens
acctggcattgccttttgttgagttcaactagagagaaattgagaagaagcatccactgaagtatcacatggcttcttagaatttattacacattgtt

SEQ ID NO: 141671 - DNA, 100 bp, Homo sapiens
acacacggtccacagctcatcatgatggacttggagctgccgccgccgggactcccgtcccagcagatttatcagcaagactgttgaacgcataactgcc

SEQ ID NO: 141672 - DNA, 76 bp, Homo sapiens
ggatgacattttacgtggggctgcaggtgcaatgaagggcgtgttggtagacattgtgaatgcagcacagatgaag

SEQ ID NO: 141673 - DNA, 82 bp, Homo sapiens
tcgcatcttgcccgaagccgggcggaggagagctcaagctaagaatgacaagggtggacctcaggaattacctcgagggcat

SEQ ID NO: 141674 - DNA, 82 bp, Homo sapiens
gccgggagtcgctgggtgcgtggggctgcctcgccgcgtctcgccacgctacgagttccagggagctctgtcctggtgaccg

SEQ ID NO: 141675 - DNA, 75 bp, Homo sapiens
atttatcctcaagagtcagctggcaggttttcctttggaatatggataaatacaccatgatacggaaactagaag

SEQ ID NO: 141676 - DNA, 75 bp, Homo sapiens
cgagctgtgcacgctcatccacctcctgccccccgaggtctgcagtctcctgaacccagcagccatctacgccaa

SEQ ID NO: 141677 - DNA, 100 bp, Homo sapiens
cgagcttcggagaagcagtggtgggttccatgtgatggtggagtaggaggcaggtctccgcgatatgagatcctgactccaaactccattcccaagggtt

SEQ ID NO: 141678 - DNA, 100 bp, Homo sapiens
tcaggacagctgttccttggccatcccaaagctattctgggggcaacagagtctctgctggatgaaccgaatcctaacagtccagccaatagccaggcag

SEQ ID NO: 141679 - DNA, 74 bp, Homo sapiens
gaccatcaatatgtttgcagtacacaactcccagctgaaaggagatcacaaatcaacatctcacttccgaaccg

SEQ ID NO: 141680 - DNA, 101 bp, Homo sapiens
tggatcaaccaagaacgtcaaacactccaacaattgagagcatttaaagatgtgctggtggtggatcagttaagcatgaggatgctgtcctcctgctgcaa

SEQ ID NO: 141681 - DNA, 74 bp, Homo sapiens
tatagcagaagcagcagcagcaactcctgatttaggggcaatcgatcttcctgcctgacacagctcacttcaag

SEQ ID NO: 141682 - DNA, 51 bp, Homo sapiens
ttacagatgtattaagaagcctcagggaagcgtgacagcaatgacagtgtt

SEQ ID NO: 141683 - DNA, 96 bp, Homo sapiens
caaccagatgtcttccttgcccggattcccagaagctggagaaagcattcgcaacgacaggcgcctcctctgccaaccggtttgtcagcatcggac

SEQ ID NO: 141684 - DNA, 100 bp, Homo sapiens
caaatttttgaagggatttttgacagaagtgaaaaatggggagaaggatatccagacagccctaattaataacgacatgatagtcactgacaacaacggt

SEQ ID NO: 141685 - DNA, 74 bp, Homo sapiens
aggcgaacagtctcgttgctgcctctgtgtacgctgaggggggagattgcaggcctaagtctacctcttcctcc

SEQ ID NO: 141686 - DNA, 96 bp, Homo sapiens
gctgcccgacgagcaggacttcatccaggcctacgaggaggtgcgcgagaagtacaaaggtttgaagactgcttcattctgcctctagtaccagcg

SEQ ID NO: 141687 - DNA, 46 bp, Homo sapiens
gagctggaggagctttatttgtgtgatcttccattgtttgaagcac

SEQ ID NO: 141688 - DNA, 51 bp, Homo sapiens
cgagaccgacatcgacgactgccggcccagacgcaggcctgagcagcgggg

SEQ ID NO: 141689 - DNA, 75 bp, Homo sapiens
tggaagaggaagatgcctagcacagaccttctgatgttgactctcagcgttctcatctctcttccttcaccatga

SEQ ID NO: 141690 - DNA, 83 bp, Homo sapiens
ggacagatcaacggcaggagaggtttgttccctgacaactttgtaagatgctctgcctggcccagaccatccacacgcaggag

SEQ ID NO: 141691 - DNA, 90 bp, Homo sapiens
gggaaaccacgcaggcaaacgagaattaaatgccgagaaggccagtacgactacatgaggaaataattgacttttataacttcatgtccc

SEQ ID NO: 141692 - DNA, 83 bp, Homo sapiens
ctcagagagggaagagattcagccagcacactcctcgcgagcaaggccggatcacctcaacagtcacgtcagacaagtgcact

SEQ ID NO: 141693 - DNA, 83 bp, Homo sapiens
aagaactgaagaagctggagttgctcagacagcacctggctgcagtggaagaaagaaagatcaagtccctggtagctctcttg

SEQ ID NO: 141694 - DNA, 88 bp, Homo sapiens
gcccacgcgcagcgacagggagagaacccttaggagaaatcttgagagtggacagcaattgtgaagatcgccagagagttctgtgttt

SEQ ID NO: 141695 - DNA, 50 bp, Homo sapiens
actacaaccagagcgaggacgtgtaccacatgaaggaagatggttgggtg

SEQ ID NO: 141696 - DNA, 78 bp, Homo sapiens
agcaacagtccaagctcaaagcagcctttcgtccagcaaggcatcccaggaccgaaagctgacgtcgacgcctcgtga

SEQ ID NO: 141697 - DNA, 75 bp, Homo sapiens
cctgtacctgctgccctggaggaaggagttcaccaccatcaagggcagttgggtgagaagcagcttccatcttca

SEQ ID NO: 141698 - DNA, 100 bp, Homo sapiens
tttgtaccattcatagcagtcttgaagaactccatccggcacaacctgtcactgcatagtcgattcatgcgggtccagaatgagggaactggcaagagct

SEQ ID NO: 141699 - DNA, 75 bp, Homo sapiens
acggagtcgccgcggagcgcaggaatcccttggcaccatgtcctgtgtgcattataaattttcctctaaactcaa

SEQ ID NO: 141700 - DNA, 100 bp, Homo sapiens
caagagctgcttctggccaacaactgggtgggagcccaggaagccctgcagctgcatgaaagtctacaggcctcggagctgctcctgccggcggctgcct

SEQ ID NO: 141701 - DNA, 75 bp, Homo sapiens
gctttggaaaagacctattatgagaggcttccatatcgatgctgggctcttgcactgtttggtggaaatggtgag

SEQ ID NO: 141702 - DNA, 76 bp, Homo sapiens
tttgtactttgaaggttttttattaatcaagcggtcaggataccggctttaccgatttgttacaactcaagcaagg

SEQ ID NO: 141703 - DNA, 90 bp, Homo sapiens
ggcttcgggaagcagggattccagtgccaagctgtcaataccagcaaatatgcagaaagctatcggatccaaacctatgctgaatatatg

SEQ ID NO: 141704 - DNA, 100 bp, Homo sapiens
tgcctactgcaccatccccacctaccccagcggccagatcggcttcatgctgtgcagcaagaacccgggccttgggaaaactttacaaacaattgctttg

SEQ ID NO: 141705 - DNA, 50 bp, Homo sapiens
tgtagagagaaagtacttcaagttttgatgtggacaatggcacatctgcg

SEQ ID NO: 141706 - DNA, 83 bp, Homo sapiens
ctcaattacacttcgactctcaaagcaataccaggatagctgttgtttcagagaaaggtctgccatcatggatgttctcgcag

SEQ ID NO: 141707 - DNA, 98 bp, Homo sapiens
gtggcggccgggatgacccacagcaccaaggatgacattgatcttgatgccttggctgcagaaatagaaggagctggtgctgccaaagaacaggagcc

SEQ ID NO: 141708 - DNA, 74 bp, Homo sapiens
gaacctgcgagccgacaacgccttcatgctgctcacgcagggctatggcgtgtgctcggtggggctggagcggc

SEQ ID NO: 141709 - DNA, 75 bp, Homo sapiens
aactgctttctaaaacaccagaactcaacctggtctgggaggggctgaatgtggtgaagacgggccgagtcatgc

SEQ ID NO: 141710 - DNA, 74 bp, Homo sapiens
cctgggtgaagtgctccgccgcccttgcctccagtgtcctactgtccgtggcagagctgtactggcgatcttcc

SEQ ID NO: 141711 - DNA, 100 bp, Homo sapiens
cttttgcagagctgtgatgttttggggattccactctccagtgtaatgattattgacaacaggctgaccggttccctgatgtgttacctgcttctgctac

SEQ ID NO: 141712 - DNA, 100 bp, Homo sapiens
cttctttcagctgttcgttcaaggctatgccctgcaactgcaccagttacagtgacagcctcatcaagggtaagaaatgagcctagtcaccaagaactcc

SEQ ID NO: 141713 - DNA, 51 bp, Homo sapiens
gcaccctccttccacctggccaggaatcagtcccttcagcggctgcacagg

SEQ ID NO: 141714 - DNA, 89 bp, Homo sapiens
cgtggccttagctgtgctcgcgctactctctctttctggcctggaggctatccagcgttattcaaggacacggaaaagccaacaccatg

SEQ ID NO: 141715 - DNA, 90 bp, Homo sapiens
cagtgaaatttgttccacaggatgtgccaccagaacccaagaagattccgataagaaacacggcatcctctggtatcacgattccaaaac

SEQ ID NO: 141716 - DNA, 97 bp, Homo sapiens
atctccagcgccggcctcctcagtgcgaagaagctgcagccgcacctggccaaggcgatgactacctgtccctggagggttcccgctggccaccagc

SEQ ID NO: 141717 - DNA, 74 bp, Homo sapiens
agaatgtgaaatttgttctcaagcacaaggaccgtttggagggagccattcacctacaggagcaggacatggag

SEQ ID NO: 141718 - DNA, 82 bp, Homo sapiens
gagaacaacggaggcagaggagctgaagactccagtatgcaactgactacaaggagggttggggtgctggaggactgcttca

SEQ ID NO: 141719 - DNA, 51 bp, Homo sapiens
ggaagaagtattaaggagacactggcaaggcctggcaacctcattctttaa

SEQ ID NO: 141720 - DNA, 75 bp, Homo sapiens
ttggtgcaaaactgcctccagatggaaggatatctcacgaatttgctttggtggacccccaaaagtacaagggca

SEQ ID NO: 141721 - DNA, 74 bp, Homo sapiens
tatttttggacctgaaacagaaattctggaacacctatatgcaacaccacagcttactaacaagaatcccaaaa

SEQ ID NO: 141722 - DNA, 90 bp, Homo sapiens
cgggtccccaagacccttgtgctcgttgtcgccgcggtcctgctgttgatgccagtatggacagaatagcttatgatgcttatccccacc

SEQ ID NO: 141723 - DNA, 102 bp, Homo sapiens
gaaaaagactgattggctcttcctcaatgcttgtgtggggtgtcgtagtcattcttcagcacaattcttaattggagaccaagaaccctgggcctttagagg

SEQ ID NO: 141724 - DNA, 100 bp, Homo sapiens
cgttcggaggtgaaggctggcatggagcgggaactggaaaacatcatccaggagatgctgaggatgtggtatgagttggatgaggaaagccgaaggaaat

SEQ ID NO: 141725 - DNA, 90 bp, Homo sapiens
cgagtgcaggagccataatgtcgacctgccggagtcgaggattccagggtcgaacactcgccccccctcctctgcacctctcctctcagc

SEQ ID NO: 141726 - DNA, 75 bp, Homo sapiens
caggagcagggcgagttgcagggccggctggcagagagggtaactaggatttctacctcaaccgcgagacctatg

SEQ ID NO: 141727 - DNA, 75 bp, Homo sapiens
atgagctcctgtttagccactgcaggccctgagacgggagttaaaggagaaagaatattctgtcctgaatgctgt

SEQ ID NO: 141728 - DNA, 100 bp, Homo sapiens
tgttccactaccaccaaatcctggcccggctgcaggacttgcatgggtattaggagatgctgaagaactgccctttgatgatgacaagtttgatatttac

SEQ ID NO: 141729 - DNA, 100 bp, Homo sapiens
aacgcagtaagctcatcgacaaacaactccaggacgaaaagatgggctacatgtgtacgcaccgcctgctgcttctaggcaatagccctctggaacaaga

SEQ ID NO: 141730 - DNA, 83 bp, Homo sapiens
ttttaagtgtggcatacaagaaaggatcagttcttaagagcagccccggtaactggaggaatgggagccgttttgatgagaaa

SEQ ID NO: 141731 - DNA, 75 bp, Homo sapiens
cctcagatccagtgataattgacagacatatctgaagagatggattaagaatgctttggattaaggattgtggag

SEQ ID NO: 141732 - DNA, 82 bp, Homo sapiens
cctcggctggtggcaagtattgctgtgggtgctgggacttcccgtccgcggcgtggagggtctgccatcatggatgttctcg

SEQ ID NO: 141733 - DNA, 97 bp, Homo sapiens
gaaatgttacacacggagtatcaaactctgctgccaaggccaaagagtgtggccagatgcaaaataagtggctgatgataaacattcaaaatgttca

SEQ ID NO: 141734 - DNA, 74 bp, Homo sapiens
cgagggttcccgggattggaccgacgcagccatgagtgggttcagatggctccaactctattttctaaatttat

SEQ ID NO: 141735 - DNA, 82 bp, Homo sapiens
ggcgtttgtagaagaggagcatctgctccagatcggcttcagctccccaggaatatgattgaaaacagcatgtttgaggaag

SEQ ID NO: 141736 - DNA, 100 bp, Homo sapiens
aaggaacgcaagaacagaatgaagaaagtcagggggactgcaaaggccaatgttggtgctggcaaaaagctagagcatggactaggctatatgccatgaa

SEQ ID NO: 141737 - DNA, 100 bp, Homo sapiens
ccggtggatcctgtccttcatgcagtctctcattggcttctttgagactgaaatggcaggacacaactcagatgggaagttcatcgcccgggcacagcgg

SEQ ID NO: 141738 - DNA, 100 bp, Homo sapiens
ttggtaatgcagacatgaatacatttcccaccttcaaatttgaaggctaaccttgccgcgggccgagccctgcctcgccatggaccaggactatgagcgg

SEQ ID NO: 141739 - DNA, 110 bp, Homo sapiens
ccgcttcgcacaggtgagctcccgggatgggaaaggcgacctgggggagccgcccccgacacggcccacggtttggggacgacatccctggaatggaaggcctgggaaca

SEQ ID NO: 141740 - DNA, 75 bp, Homo sapiens
aaggaaagcagctgagatccagaggagtggaaggctcccccttgactaaagctgttgatgacaacaagaaactag

SEQ ID NO: 141741 - DNA, 100 bp, Homo sapiens
cctcatggggaaaatctccccggtgactttcaggaatcagagatcattgatttcttcctgggggcctctctcaaggatgaggttttgaagattatgccag

SEQ ID NO: 141742 - DNA, 98 bp, Homo sapiens
tcaaactcctccccacgacactctgaagcagcgacggcacagcgggaagaatgccataaccagcagaccacagcattcaggcatcctgtgacgggaca

SEQ ID NO: 141743 - DNA, 75 bp, Homo sapiens
acctgtgaaaagtgggtggatggcataagacagtttaaacatctcccagatgaccaaaatccacacccttatcac

SEQ ID NO: 141744 - DNA, 97 bp, Homo sapiens
ctggattttacagaacttgactgaggggccacctacagatgctcctgcagtggacacagcagaacaagtctatatctcttccctggcactgttaaaa

SEQ ID NO: 141745 - DNA, 97 bp, Homo sapiens
aagaaggaggccagtatggcttagtggctgcgtgtgcagctggagggcagtacagtgctgtggataccaatccactttctctgtatgtcatgcatcc

SEQ ID NO: 141746 - DNA, 101 bp, Homo sapiens
gtggcctggagcaagaccgctgacaagatcgagggcttctagttgctggagaatgtaaccctaatccataaaccagtgtcgttgcaaccccgtgggctgat

SEQ ID NO: 141747 - DNA, 82 bp, Homo sapiens
gctgcgctctcttccctctgctgggcgtcctgttcttccagggtcttccccagggaggtcctgaactacacagctgagaaca

SEQ ID NO: 141748 - DNA, 60 bp, Homo sapiens
tgtacatcaaggcatttatatgagtccagaaatcatcgagttccccatcctaaagctaaa

SEQ ID NO: 141749 - DNA, 100 bp, Homo sapiens
tacaaagcatgggagtgcagctgcctgacaacaccgatcacagaccaacaaatgcttttactgactctgctatcagtgctaaagtgaatggcgaacacaa

SEQ ID NO: 141750 - DNA, 75 bp, Homo sapiens
tgcttcctcctcctcggcctcaccgatatgggccctcacattttccaaacctgtccatctgctaactattttgac

SEQ ID NO: 141751 - DNA, 100 bp, Homo sapiens
ccctcagcctctgccatggacttcgaggacgcctatttgatggctttgcagatggactaggagttgctgaagctatttcatatgtggatcctcagttcct

SEQ ID NO: 141752 - DNA, 75 bp, Homo sapiens
tcccaatgattttaattggtaataaagcagatctggatcatcaaagacaggtgcacaaatggagtccagaggagg

SEQ ID NO: 141753 - DNA, 83 bp, Homo sapiens
ggccgctgcgtcctcatcggattccgacgcctgcggagctgagagcatgtagagcgcatgaagtacaggacaataaagcttcc

SEQ ID NO: 141754 - DNA, 100 bp, Homo sapiens
tatcatactttttgtcttcaaccagttatgaaatcagtaccaaccaatggctggaaatgcaaagagcatattaatgaaaagtgccataaactgaaaaacc

SEQ ID NO: 141755 - DNA, 88 bp, Homo sapiens
aagcaagtgaatacgagtcagaaggagctgggaatcccaagtgcaaaattgcaattgttttgggaagaactcaaaatacttctctctc

SEQ ID NO: 141756 - DNA, 100 bp, Homo sapiens
ggaaacgctgacagagatgctgcagagctctgatgtaagcaatggtacagtaaagaaagagtcttctaataaagaaggagctagaatgtggataaacgac

SEQ ID NO: 141757 - DNA, 97 bp, Homo sapiens
ttggttaccatgtggtcacctttgactacagagatggagttttcctctagttgtttaggatggagtgcaattgcacgatcttggctcaccgcaacct

SEQ ID NO: 141758 - DNA, 100 bp, Homo sapiens
acgagatcttgggcaccgagagggactacgtgggcaccttgcgcttcttgcagtcggtgggcaccatgtccttgaagcttcaggcaagcaatgtaaccaa

SEQ ID NO: 141759 - DNA, 100 bp, Homo sapiens
aagagatccaaatcttctcctgtcagtaagtaaagatatgagggaaggcaccattggagatatggctatcctgggtataacagaaagttttcaagtgaag

SEQ ID NO: 141760 - DNA, 82 bp, Homo sapiens
agaaagaccatcaagtttaccagctcttgtcaggatggtgaagctgttcatcggaaacctgccccgggaggctacagagcag

SEQ ID NO: 141761 - DNA, 73 bp, Homo sapiens
gtggagaagaatctgcttgtctatgggtcacggtctagatcacattctcgatccagaggaaggcgatactctc

SEQ ID NO: 141762 - DNA, 88 bp, Homo sapiens
atacccgagaggaaataggcccggcagggaaatcctcattgacgattcaatttgttgaaggccaatttgtggactcctacgatccaac

SEQ ID NO: 141763 - DNA, 91 bp, Homo sapiens
ccatgcctacgtgggcttcaccatggacaagctggtgcagaacattgcgcggcaggttcttagactctgtgagtaaagacagcttcatctt

SEQ ID NO: 141764 - DNA, 75 bp, Homo sapiens
atagtgaagatgctggaaaaatacctcaaggtgatctgtgaaaatggttcgctattcacttgacccggagaaccc

SEQ ID NO: 141765 - DNA, 83 bp, Homo sapiens
gcaggctcgagtgcacggagcgtcccttccatcaggagagctgcacgagaagtttgaccgtctgaagaaactgcaccaggacg

SEQ ID NO: 141766 - DNA, 100 bp, Homo sapiens
gctagaccattgtggcactgggacagcagctggacaggagcaagccacaggagagtggcaggttgcacactgggccacagaggatccagcaaggatgaag

SEQ ID NO: 141767 - DNA, 83 bp, Homo sapiens
cttagctgtgctcgcgctactctctctttctggcctggaggctatccagcgccaagactaaggggctgcagagcggggtggac

SEQ ID NO: 141768 - DNA, 101 bp, Homo sapiens
cctccttacgggggctgattgaaggtagcaaaggacgtgacacttcatcaggccttgctgaggctgccccagtaccagactgatctcttgcttaccttcaa

SEQ ID NO: 141769 - DNA, 82 bp, Homo sapiens
aatgcttgacagagatgagtttgcagtttcctggtacctgggataaaagttgcagcgtcccaccatccaccagacagaccac

SEQ ID NO: 141770 - DNA, 100 bp, Homo sapiens
aacgaagctgccagtgaagtggggctggttgggggcatggtggacgccattgcagaagccatgagcaaggacggcaatggatacatagatgaaaatgaac

SEQ ID NO: 141771 - DNA, 100 bp, Homo sapiens
aaaaataacataattgaaggcagtaaaagtgaaattaaataggaagatcatcagtcaaggaagacccactggagaatgtgattgatctcactggagatga

SEQ ID NO: 141772 - DNA, 100 bp, Homo sapiens
cgggatcgtgaccgagaccgtgaccgagagcgtgaccgagagcgcgaatatcgtcatcgttagaagtacacctttgggagcctcactggatgaacaaagc

SEQ ID NO: 141773 - DNA, 100 bp, Homo sapiens
ccacgctccacttgcccgcttccacccggaaagccccccaggctgagtgcggcatgatctccatcaccgaatggcagacaattctgtggtgttcttggtc

SEQ ID NO: 141774 - DNA, 83 bp, Homo sapiens
tgaagacctattttactgataagaaaacacatctttacacactaagatgctgaaaacgccattcaacagatgggtggccagtg

SEQ ID NO: 141775 - DNA, 100 bp, Homo sapiens
ctgaatggaaaaaacattgaagacgtcattgcccaggaataatccagaatggctactctgatctatgttgataaggaaaatggagaaccaggcacccgtg

SEQ ID NO: 141776 - DNA, 100 bp, Homo sapiens
gtcaaacttctgttggtacattgttagccaaaatgaagacctgtgttgatacctataccaaccgtttaaggttcattttccagacactgaaagagcagaa

SEQ ID NO: 141777 - DNA, 83 bp, Homo sapiens
caacgatggtgaaaagggtcctcctgctcacagtgtgaataacaggactcagtggcatttgaggatgtggctataaacttcac

SEQ ID NO: 141778 - DNA, 80 bp, Homo sapiens
atagagcagagtggaccaccccatgaacctcgacagaatgttgctgcgggatgtaaaagctcttaccctccactatgacc

SEQ ID NO: 141779 - DNA, 75 bp, Homo sapiens
caaggcactgctttttcatgacgatgttgaaagtgtgatgaacagtgtggtatccctactcttgatcctggaacc

SEQ ID NO: 141780 - DNA, 93 bp, Homo sapiens
aaggagctaaagcagcgtgcgttcagccctggggttcgtgctggccgtgggcagcgccgtctttgatgccatgttcaacgggggaatggccac

SEQ ID NO: 141781 - DNA, 110 bp, Homo sapiens
aaagaacaactttcaaaagcccagaagcgtaagctggcagacaaaacaggtctttgtgggaagaaacagaaagaaatcacaaaagcaattaagagagctcaaataatggg

SEQ ID NO: 141782 - DNA, 100 bp, Homo sapiens
gagctggaagaggccgctgcggagcctgctcggcttcgtcgctgccaacctgctgttctggcaaaggcagctcgagcatctcatctgacgtgagttcaag

SEQ ID NO: 141783 - DNA, 98 bp, Homo sapiens
aaactgtccagtgtaaagtgaccctcttagatggcaccgaatacagctgtgacctggaggtagttctcactggaattggtgcagatgagcaacttgca

SEQ ID NO: 141784 - DNA, 92 bp, Homo sapiens
gtcctactacgcgtacgtggtggagctctgcgtgtacaatgcagatcttcgtgaagactctgactggtaagaccatcaccctcgaggttgag

SEQ ID NO: 141785 - DNA, 100 bp, Homo sapiens
gtccgggacagccgcacctcccctgccaactgcacctggctcatcctgggcagcaaggaacagactgtcaccatcagtttgcctgagaatacagatcaac

SEQ ID NO: 141786 - DNA, 80 bp, Homo sapiens
ctcattgctcagcgcggacctagacctggaatcgcccaagtccctctactcgcgaggtttccaatacttatctacaggaa

SEQ ID NO: 141787 - DNA, 98 bp, Homo sapiens
acatagacatttacgcggatgtcggcgaagagttcaaccagaccagcatctcagacatgtcgaaaaagatgttttgatccctaaaataatgagagaaa

SEQ ID NO: 141788 - DNA, 80 bp, Homo sapiens
ctctgacaagaccaagtactaccttcaagaacaagagccccaagacccgggacatccaggaggaggagctggaggtgctg

SEQ ID NO: 141789 - DNA, 82 bp, Homo sapiens
tcccagccgtgcttcctgttaagcctgtgaaactgaacatcatttacagcgagcaatttcagcacagcaagtgtttagagaa

SEQ ID NO: 141790 - DNA, 100 bp, Homo sapiens
cgggcactgggcgactctgtgcctcgctgagggagggcacgcgtctgcggctgaaccgcggaagggccggtgaggaaccgggcctcgggagatggccctg

SEQ ID NO: 141791 - DNA, 100 bp, Homo sapiens
gagctggagctggagctgtcggaagaattaaacaaccaccatgtcgagcaaaaaggcaaagaccaagaccaccaagaagcgccctcagcgtgcaacatcc

SEQ ID NO: 141792 - DNA, 75 bp, Homo sapiens
ttcagatgtggaggagaatatatcctctaaatctgattacaagccagctgccatgttgtgagcacataccacata

SEQ ID NO: 141793 - DNA, 90 bp, Homo sapiens
aggaggggcggacagcggaaggtccgggagtgtccgccataaagtcgtttgagaacccagtgacttgattgtaaaaatttacagagcgga

SEQ ID NO: 141794 - DNA, 51 bp, Homo sapiens
ggaacttcagtctataataaagagatgtgcagtttgaaaattgcaaggagg

SEQ ID NO: 141795 - DNA, 75 bp, Homo sapiens
tccaacatccagagctgcatcattccttggggcaaaatgtggacaaggagcccataggcagcatgtcatccatgg

SEQ ID NO: 141796 - DNA, 101 bp, Homo sapiens
ccgccgccgccgcccctgttgcgatggcgcagaaaccccgttgacaaggcactgctttttcatgacggtgtctgacttccagcaactgctggcctgtgcca

SEQ ID NO: 141797 - DNA, 75 bp, Homo sapiens
ccgctatccagaacctccactctttcgccaacaagtcccaaatttggaaaagctgactcatatgaaaagctggaa

SEQ ID NO: 141798 - DNA, 99 bp, Homo sapiens
gaaaatgcaagaagactgatggagcaggcttgcaatattaaatgaagctgtggtctaccaatctagacaactcagtggcaagcattgaggcaaaggcta

SEQ ID NO: 141799 - DNA, 101 bp, Homo sapiens
gtagcatatatcctaaaggagatggaagtgatgtaccatcatgggtagcctttgataaacaggtgtgcaactgaggaacatggctcaagaaactaatcaca

SEQ ID NO: 141800 - DNA, 125 bp, Homo sapiens
tcaatatctgtcttcggtggactccttcggcagtccacccaccgccgccgcctcccagcaattctgtggtgttcttggtcacacatttatggagtttctgaagggcagtggagattactgccagg

SEQ ID NO: 141801 - DNA, 75 bp, Homo sapiens
accattggtctgcaggacatcactttagatgatgagttttgccgaattgacaagcccctgtgtcacagtgaggat

SEQ ID NO: 141802 - DNA, 90 bp, Homo sapiens
aaaaaaccacaaatgtttttctgttttgcctgaatacatgatttaaacaagagatttccacagaaggggttgtgtccactgtggtccccg

SEQ ID NO: 141803 - DNA, 100 bp, Homo sapiens
gggaaccaaggagacgctcctggcactgcagaccaacaggagctccaggcagcaacgagcagtacaatgtgggaatggtggggacgcatgggctggagac

SEQ ID NO: 141804 - DNA, 80 bp, Homo sapiens
ctcagccggctctggagtgcgggcgggggcgacagggccgattccggagtggtattctaccttgtaaatactgttatttg

SEQ ID NO: 141805 - DNA, 99 bp, Homo sapiens
cttgtcagccagggctgaacccccgcaggttccatggagatcaggaatgttattaccaggatgacctacgagtattatctagtcttaccaaaaaggaac

SEQ ID NO: 141806 - DNA, 100 bp, Homo sapiens
cagattcgcagtggtcgcttcttctccttgattgagtctgaaacagcagcttctgaggaaaccttgttcaacgcgtcccagcgcatcagcgagttagaga

SEQ ID NO: 141807 - DNA, 98 bp, Homo sapiens
gatttgggacacggctggccaggagcggtttcgtttaagcggctgcagggcaagaggaaccgagggagagaagaaatcaactttgtggagatcaaagg

SEQ ID NO: 141808 - DNA, 98 bp, Homo sapiens
gtcgagaggaaactgttgtgcctcttcatattggcgatcctgttgtgctgctctttggcgtaaattgcaatcgattagggatcgtttctcagaatcaa

SEQ ID NO: 141809 - DNA, 101 bp, Homo sapiens
gctataaggactctacacttatcatgcagttgttacgtgataatctgacactatggacttcagacatgcagggtgacggttcaagaacatgaagactcggg

SEQ ID NO: 141810 - DNA, 74 bp, Homo sapiens
tgaaaaacagacgagaaacacgggagactcccggtaacccccaacttgccgatgagcagcaccagcagtaagag

SEQ ID NO: 141811 - DNA, 100 bp, Homo sapiens
cggtcggccgccgctccccgcctagtccacggagctcaatggcggcagtcgcgctgagggactcggctcaggacccagatgatgtggtaccagttggcca

SEQ ID NO: 141812 - DNA, 75 bp, Homo sapiens
gtgatgttggagaactacagaaacctggtctccctagcttcttggacacttaatgattgttggcaagaaatgtgc

SEQ ID NO: 141813 - DNA, 100 bp, Homo sapiens
cgcagaaggactgcctcactgagcaaccaagaaaaggagatgtaagattcttgatttgcacagatgtagctgctagaggaattgatatccacggtgttcc

SEQ ID NO: 141814 - DNA, 100 bp, Homo sapiens
gtcggcatcctcctggcctacctggcagaccgagacatgggtgcccggcaccgcgcccgagcccactccattcagatcatgaaggtggaggagatcgcgg

SEQ ID NO: 141815 - DNA, 75 bp, Homo sapiens
ctgcccttgaaatgaagctggacttggagtgctcggccttgttctccccatgtgggccatagccctcatttcctt

SEQ ID NO: 141816 - DNA, 82 bp, Homo sapiens
gtgagaacccgcccatgaagccagatttctcccaggaaaaaagggttgctcattttgggtatcactggagtctgatggaaag

SEQ ID NO: 141817 - DNA, 83 bp, Homo sapiens
ggatcatgtctgcgagccaggattcccgctgcagatctgggacacggccggccaggagcggttccgcaccatcacccagagct

SEQ ID NO: 141818 - DNA, 100 bp, Homo sapiens
gacccaccagctcccagtgacaaaagcgttaagattgaggaacgggaaggcatcactgtctattccatgcagtatatggttctggtcccctccctgctcc

SEQ ID NO: 141819 - DNA, 98 bp, Homo sapiens
cggaggaccaggcgcggcgcggctgcggctgaggcctgtttaaagaagaaaacccgtatgctagatttgaaaacaactaaagcgctccagcacatcag

SEQ ID NO: 141820 - DNA, 98 bp, Homo sapiens
cccagttggaagcccgggaccgtttaaaaaactggtgaaaggggggaccctaccctcagaacatgagggaataatatttacgtggctcacaaagacca

SEQ ID NO: 141821 - DNA, 51 bp, Homo sapiens
acccccagccgcagcccccgctgggttgtgagtcccggcccagcccctcca

SEQ ID NO: 141822 - DNA, 100 bp, Homo sapiens
gtgaaaagcctccttctggttccaaatggtttttcgttggaatatacgttgcacatttatggcgattctgagtgtgagggcagacttctgccaggctcag

SEQ ID NO: 141823 - DNA, 83 bp, Homo sapiens
ctgatgatgaacagtttgtcccagattttcagtctgataaccacatatgtagagtgtgtcggtcagaaggaacacctgagaaa

SEQ ID NO: 141824 - DNA, 75 bp, Homo sapiens
caaagaggaacaaagtcatcaagctagtggacatcacggacatccagaaggtcttgaggaccggcccagctcagg

SEQ ID NO: 141825 - DNA, 100 bp, Homo sapiens
aatctttggatggcttacatcttcctgaatcgagcagagaaactagaatggatcttggagaatgtctgaaagtccatgacctggctttaagagcggatta

SEQ ID NO: 141826 - DNA, 101 bp, Homo sapiens
caggctccggacccataccagagaattatgatcaacttcaaccctcacttcgatttggaggacagagactgcaagattcaagccaaaactcgagaatttag

SEQ ID NO: 141827 - DNA, 101 bp, Homo sapiens
ggggactccgaaaaaacaaaacaaatatgaactatgataagctgagcagagccctgcgatactattatgacaaggcagaagctcctcctggggtagagaca

SEQ ID NO: 141828 - DNA, 75 bp, Homo sapiens
cctgctccctccagagtggatggatgtagaggtacttggaaggctccatcgcccctgaagacaaaggaagctgct

SEQ ID NO: 141829 - DNA, 87 bp, Homo sapiens
atacagaaaatcggtgaagagaggttttgaattcacgcttatggtagtgggcatgattccaacagaactgcagcagctctggaaaga

SEQ ID NO: 141830 - DNA, 89 bp, Homo sapiens
tctacttatacaactttctaaagagacagaaggcaccaagatcaaaattgataagtgtgcttaagtttggatttaggtggcgagtagaa

SEQ ID NO: 141831 - DNA, 119 bp, Homo sapiens
tcaatttgatttaagtggaaatgtgatcacttcctctgaataccttcctacattatgggagacgaaaccagacagagggtcaagtttacagatgaccgtgtctgcaagagtcaccttct

SEQ ID NO: 141832 - DNA, 100 bp, Homo sapiens
ctgtgtccttttcatttgcaaccagtgcctgagtatttattacagtatcaggagccaataccttgtgagcagttggttacagcgctgtgtgatatcaaac

SEQ ID NO: 141833 - DNA, 100 bp, Homo sapiens
aagaggcaaagagaatcggttggttctgattgggacaatcttatagtgcactcgaggcagccgcaaaagaagcctcacagtgtgtctaatgggtctccag

SEQ ID NO: 141834 - DNA, 100 bp, Homo sapiens
cgagctgagtggttgtgtggtcgcgtctcggaaaccggtagcgcttgcagcatggagcagcagccaagctggacagatgacctgcctctctgccacctct

SEQ ID NO: 141835 - DNA, 100 bp, Homo sapiens
aaaccaggcgggtaaacatggtggacagaaagtcagcctcttgtgggaccacttaatagtgagtcttccaaccagagcttgtgcagcgtcggatccttga

SEQ ID NO: 141836 - DNA, 90 bp, Homo sapiens
cgagctgtcagcctctccaaagcctgcgcgagaggagccgggacacgcctagcgcgggctccaggtaagccaagatgggtgcatacaagt

SEQ ID NO: 141837 - DNA, 88 bp, Homo sapiens
ccccctcccccctccggcgcggaccccgcgtgcgccttgctcgcccgcagccccgagaccgcagagacgtctcccacaacctgctccg

SEQ ID NO: 141838 - DNA, 80 bp, Homo sapiens
gttcgcggctctaacggggctttctacaagcccttgaagaaagctgttaggatgatgggagcacctaacctaatagcaga

SEQ ID NO: 141839 - DNA, 100 bp, Homo sapiens
gttcagcgtagagtcgctggagcgggcggagctgtgcgagagcctcctcacttgggtacctggcctcattaccttctcacgtgttgaaaaatgaccatgt

SEQ ID NO: 141840 - DNA, 87 bp, Homo sapiens
attttcactgagggcaagaaccagctggagattcagaatctacaggaagactgggatcactttgggaccgtttggagggagccattc

SEQ ID NO: 141841 - DNA, 75 bp, Homo sapiens
caacgaatacggcgacgacatgtatgggccagaaaagggaggttatattcaaaagaaaaaggaactgtggggaat

SEQ ID NO: 141842 - DNA, 105 bp, Homo sapiens
gtggggacgccggagaactgtgcccattacttctgcctggactgcattgtcgaatggtccaagtattaaaggtggaagaaggtccatatctttttctgtgggtgc

SEQ ID NO: 141843 - DNA, 74 bp, Homo sapiens
cccagccacaaatgtgaacacagttttaagaattcctcctaaatatggtttggagtgcctttttcgatactaca

SEQ ID NO: 141844 - DNA, 76 bp, Homo sapiens
aggctccattgtctctaaattgctggcttccatgatgtgcaaagctggtaaaatgtttcaagcgccggatcttact

SEQ ID NO: 141845 - DNA, 83 bp, Homo sapiens
agcctctcttggccaggatcaaacatgacaggggcaagattcttgccaagagaattaatgtgcgtattgagcacattaagcac

SEQ ID NO: 141846 - DNA, 98 bp, Homo sapiens
gaaaacacatctaccgactgatcttcttcctaaatctttctgggaaaacaattgcaaggtggataagattgtggaccagctgcagcagttaatgcagg

SEQ ID NO: 141847 - DNA, 75 bp, Homo sapiens
gtttgaaagaagctaatgtgaaggctcttaatgatgtagatggtgaagaagaaggaactgttaatagccagtcag

SEQ ID NO: 141848 - DNA, 75 bp, Homo sapiens
gctgctggtttggggactggacccgggcacaggtggaacacctgcagcaggagactgctgctctgaaaaagcaaa

SEQ ID NO: 141849 - DNA, 75 bp, Homo sapiens
tgaccgcgctctacttcctgatccgggcgtttagatgcgagccacccctctggctgctcctgcgggttccctgtc

SEQ ID NO: 141850 - DNA, 51 bp, Homo sapiens
aagctgaagatggatcgagtaaagcaggcctctactacgtggacagtgaag

SEQ ID NO: 141851 - DNA, 100 bp, Homo sapiens
ggactttttgctgccctgatgagtaggtggaaagccactcggattttctcctatggaaccttattttggggagtaaagtcaattgggcagaggatcctgc

SEQ ID NO: 141852 - DNA, 100 bp, Homo sapiens
cagacaggaacaagacccggacattccaggccacagtcctgggaagtcagatgggattgaaaggacatagagacactgcatattttaccaaggctttgac

SEQ ID NO: 141853 - DNA, 100 bp, Homo sapiens
ctaagacgctgtttcagagcgtttgggtcctctgaggccccttgaccagttatatgaagcctacagtaaagtctgtcgcaaacagcaggtggcggctgtg

SEQ ID NO: 141854 - DNA, 100 bp, Homo sapiens
gaaaaattatgtgcaagctgatgaagattgtagacatgcatatagcactttctacattgtgggtttaatattatcaatgcagataccttttgtgggattc

SEQ ID NO: 141855 - DNA, 75 bp, Homo sapiens
gcggcagcagccccagcctcaaggccagcttaatgcagataccgaaagagaagaaggcgaagagtttgaagataa

SEQ ID NO: 141856 - DNA, 83 bp, Homo sapiens
ccgagaatagctccgtccagcaggccactcttcacctccaccatgagcctggacatccagagcctggacatccagtgtgagga

SEQ ID NO: 141857 - DNA, 98 bp, Homo sapiens
aacaagccacctacacccccgctgcaccagttttcatcctggatccgcaaggatgctctccgggcgctcaactttgcgtacacggtgagcacacagcg

SEQ ID NO: 141858 - DNA, 82 bp, Homo sapiens
gagctcatctggaattttgccgatttcatgactaaccagtgttttacacatccataagtagacctttttggagcctcaccag

SEQ ID NO: 141859 - DNA, 76 bp, Homo sapiens
gtgaaagaggaggaagccatagcactcgcagagaaatatgggaggatggactcagacaagttctggaggagatgaa

SEQ ID NO: 141860 - DNA, 80 bp, Homo sapiens
cacagagagggcctgggagcttgctgcagcttcaggctgctctttggcgtaaattgcaatcgattagggatcgtttctca

SEQ ID NO: 141861 - DNA, 98 bp, Homo sapiens
gagactcctgctcagtgtagcattaagtgagcatgcccaccagtgagaccgagtccgtcaacaccgaaaacgtggctggaggtgacatcgagggagaa

SEQ ID NO: 141862 - DNA, 83 bp, Homo sapiens
cactgtcttctcttcctcctccaccgagtcgtgctctcgccccaacccgcgcgccagatctgactgcagccatgagcagcaat

SEQ ID NO: 141863 - DNA, 101 bp, Homo sapiens
gctcaagttcatggagccggtgaccatgcaggaatctgggaccttcgcctttcggaccccaaaggtctgctcaccaggtggccagataccgcccacgtgcc

SEQ ID NO: 141864 - DNA, 82 bp, Homo sapiens
aacagagagatgctggacatcttaataaagcatctggtcaagatactggtatcgggatgacacaggaagagctggtgtccaa

SEQ ID NO: 141865 - DNA, 76 bp, Homo sapiens
ctctgaggattcacagcagctggaagaggcatatagctctgatgggccatcaactgagaaagaccttgacgaaaag

SEQ ID NO: 141866 - DNA, 100 bp, Homo sapiens
gattccaaaatgaagaatttcatcacctgcttcaaagggatttgtcttggctgttactatgacacgggaagcaattgatgaatttcggcgttttcagcgt

SEQ ID NO: 141867 - DNA, 75 bp, Homo sapiens
cttccggagcttctcagaagacagagggttttcttttgaggcacgccccaaaggcgagggcctgactccatacca

SEQ ID NO: 141868 - DNA, 50 bp, Homo sapiens
accgagaccgcggccgggaccgaggacagaagccctgggggatgcggagg

SEQ ID NO: 141869 - DNA, 75 bp, Homo sapiens
gaaaattggatgtgaaaatgaagccagaccgagtgggctcgggatgagtttgaaggcctcttcaagcagccagca

SEQ ID NO: 141870 - DNA, 50 bp, Homo sapiens
tgggcgttgcctttagacccaggtttttggattcaaagcataaaaaccat

SEQ ID NO: 141871 - DNA, 100 bp, Homo sapiens
gatattgtggctggagacatgagcaagaaaagcctctgggagcagaagggaggctccaagacctcatcaacaattaaggaaaatcctgccttgcttcgtt

SEQ ID NO: 141872 - DNA, 100 bp, Homo sapiens
ctctcctgttccagcaattggtttggtgaggattcatcaacctccagtatgatgtctgtgaactttgatgttcaatcaaatcagagtgatatcaatgatt

SEQ ID NO: 141873 - DNA, 100 bp, Homo sapiens
cgccatccctttgcctttatgcccttctctgctgggcccagtttattcaggatgataacatggagaagcttgaggaaattattgaaaaataccctcgtgc

SEQ ID NO: 141874 - DNA, 98 bp, Homo sapiens
cggcatcaacatgctgctcaacaacggcttcagggagtcggaccagcttttcaaacaatacaggttcgatacaagaggctgttttcctagcgtggctt

SEQ ID NO: 141875 - DNA, 82 bp, Homo sapiens
aggttgggtgtacgatgtgtcagcagagcatgcagaagtcctcgctggagtttcataaggactgcctccgggcctgccagga

SEQ ID NO: 141876 - DNA, 50 bp, Homo sapiens
tgagactcctgctcagtgtagcattaagaccattactgggacttccaccc

SEQ ID NO: 141877 - DNA, 90 bp, Homo sapiens
gaaacagtatctcacctccctaaactggttaatagtggcatggaagatccatttggatctttgatgaagtgatgggctgcttctctgact

SEQ ID NO: 141878 - DNA, 100 bp, Homo sapiens
tgtgggagcaaaaccaacgcctggctcggagcagcagcctctgaggtggttgacagagattctgaagaagccgagatcatcaggaagtatgttaagaaca

SEQ ID NO: 141879 - DNA, 82 bp, Homo sapiens
cccgcacccgccttttctctctctcctctggcaggatgaggcgtgcaggcctgggtaaactgtcttgagccccaccctcacc

SEQ ID NO: 141880 - DNA, 93 bp, Homo sapiens
tgactgagtacctgaaccggcacctgcacacctggatccaggataacggaggctggacaatgcagatcttcgtgaagactctgactggtaaga

SEQ ID NO: 141881 - DNA, 120 bp, Homo sapiens
ctcttttgctgtggtattggaatggaaaatgcagtgggattggagataacccaggcaattgcagcaaaaattggaggtgatgcagggacatcactgaattcaaatgactatggttatggg

SEQ ID NO: 141882 - DNA, 90 bp, Homo sapiens
caaaatttgatgaagtccagaaatctggaaacatgatacaatctgcaaatgtgccgcagaatggaattcggcattgttcctacacagctt

SEQ ID NO: 141883 - DNA, 100 bp, Homo sapiens
ccccgtggatccaggaactggcataggtgcactcagcaacgggcccatttggaggccagcgctgagaagtggaacaggttgctgatgtccttagaagaac

SEQ ID NO: 141884 - DNA, 51 bp, Homo sapiens
gcaggcacagttgccgattacaggagaggcagatgcgaaccagaacaatgg

SEQ ID NO: 141885 - DNA, 51 bp, Homo sapiens
cttttgcccttatcagtaacacctgagccaaaagaatgcaatggtgtaaag

SEQ ID NO: 141886 - DNA, 100 bp, Homo sapiens
tgtctgtccccagagcctcagtttgtgcaggacaccgacatggaacagggactcactggggttccaagcttgcatcatgaagatggtgtgtgggaaggcc

SEQ ID NO: 141887 - DNA, 98 bp, Homo sapiens
ggcgacagtggcggcggcgccatggcagggcttgcaggtatctacgagaccccagcaggcaccatcctttaccatgctcatttagacatcgaggcctt

SEQ ID NO: 141888 - DNA, 82 bp, Homo sapiens
cggcggtcgccccggggctccggcggcgggaaaagaatacttgagatccatttgtaaggaaagaaaaggaagcaacaacata

SEQ ID NO: 141889 - DNA, 82 bp, Homo sapiens
cgtcatttcccccgcttctatgtcctgtacacaatcttcatgaaaggtgaacatgtcaaaccttttaagccagagaaagcaa

SEQ ID NO: 141890 - DNA, 101 bp, Homo sapiens
gcaacctgctgacagagaggatccacctccgaaacccctcggcggcgttcttctgtgtggcccgcctgcaggatgacgtagctttgccaaagacttagaag

SEQ ID NO: 141891 - DNA, 89 bp, Homo sapiens
tataagagagggagagataaaccaccgcttacagatattgggttcgcatggctctgaaaaaggccgaaaaagaatttgaactgagaagc

SEQ ID NO: 141892 - DNA, 100 bp, Homo sapiens
ggaccctacagatggagggaatgcaggaaagctaagaagaatcacacctcattgcaggtttcccggtcctctggcgaggatcctccaaggcgtctcacat

SEQ ID NO: 141893 - DNA, 95 bp, Homo sapiens
ccaggctctgacacccaggcagggcctagggtgggacgatggcaggtgggggcagcgacctgagcaccagtgttcctttctgccgaaattctcca

SEQ ID NO: 141894 - DNA, 100 bp, Homo sapiens
tccagcctgcggagcctgtggggcagacttatgaaaatatgcatcagtttaatactgtcttggaattcatgagatggaagcataggtcaaagctgtttgg

SEQ ID NO: 141895 - DNA, 90 bp, Homo sapiens
cagttattaaggagttgaagaagtcactcaagattaaggggaaggagttcgagacacgactgaaggagaagaagccaggagatctgtctg

SEQ ID NO: 141896 - DNA, 75 bp, Homo sapiens
tgttgcggcgcccaccttcgggaggatcaggaaaccacccctactcctaatcccccgactacagaagaggagaaa

SEQ ID NO: 141897 - DNA, 100 bp, Homo sapiens
gggctgaagcgactgagtccgcgatggagcaggttcaggagaagtggcacctggtggaggacctgtcgcgactgctgccggagccaggcccgagcgactc

SEQ ID NO: 141898 - DNA, 51 bp, Homo sapiens
aagtggcgaaggagccggctccaagaacgacaaatcctccacccctgggct

SEQ ID NO: 141899 - DNA, 71 bp, Homo sapiens
gctgccgtatcctgactctgatgctgcagaatgaagtggagctgggggagctgcttctgtcactgaattat

SEQ ID NO: 141900 - DNA, 73 bp, Homo sapiens
tgaatgcatatgtagcctacaaagttacaacacaggcacaagagaacagcaactccgtaaagaagaagacaaa

SEQ ID NO: 141901 - DNA, 80 bp, Homo sapiens
gccaaatggaacagacaagcaggttgtcttggaagagatgtcaggagaaagtgtggtgagctcagcggtgccagcggctg

SEQ ID NO: 141902 - DNA, 90 bp, Homo sapiens
gattaaactcctgatgctgcagcagaggctaagaatattaatggccagatctagctgagtcagtgctgattctctcaaatagagcttgaa

SEQ ID NO: 141903 - DNA, 90 bp, Homo sapiens
acaagatggaacctctccaggtggtgaaaattatggcctttgccgcggatcctgttacagtgcaaagaagaaatggcaaacggataacag

SEQ ID NO: 141904 - DNA, 90 bp, Homo sapiens
gtgaaaaatggggagaaggatatccagacagccctaagacccagatgatgtggtaccagttggccaaagaagagcctggtgttggtgcat

SEQ ID NO: 141905 - DNA, 131 bp, Homo sapiens
tgtctggtttccctgtgacctgcaggtactgggagttacatagctaagatgccaggacaccccgaaagccggaaaacggtgtccctggccagtgtccttccacctgtccacaagcatggggaacatcttcg

SEQ ID NO: 141906 - DNA, 83 bp, Homo sapiens
gaagctcaccgacagtgccctgagggccttcgagagctaccgcgccagacagaagtcggccagagcagcatgtggatctccac

SEQ ID NO: 141907 - DNA, 82 bp, Homo sapiens
ggaggctccaagacctcatcaacaattaagatgttctcaaatagtgatgaagctgtaatcaataaaaaacttcccaaagaac

SEQ ID NO: 141908 - DNA, 100 bp, Homo sapiens
gggagtgatttgcgccatcatcctcatcatcatcataggaactgtggctgcaccatctgtcttcatcttcccgccatctgatgagcagttgaaatctgga

SEQ ID NO: 141909 - DNA, 75 bp, Homo sapiens
gtttggccttatccagtctatgaataaaatgtttattggaggcttgagctgggatacaagcaaaaaagatctgac

SEQ ID NO: 141910 - DNA, 104 bp, Homo sapiens
atagtctccagcgggcctggactgtgggctggtgtgtggaactggagaaaaggcctcggagtaaacttcccagagctctgagaggtctcatgggtgaagccaac

SEQ ID NO: 141911 - DNA, 75 bp, Homo sapiens
caacgtccgcaccaacttgagtggggaagattttgcaggtggcgggacaggcttcattgggacagccctaaccca

SEQ ID NO: 141912 - DNA, 83 bp, Homo sapiens
tcgtagcctgccactccgtgcgcccatgaagcttcccatcaccaacagcaggcagcacagaacagcttgctgcccctcctgag

SEQ ID NO: 141913 - DNA, 74 bp, Homo sapiens
agcagccaaatacaaccactctggccaggtgctactgcaattacaccacagatgtggttgccagcgtcgccttt

SEQ ID NO: 141914 - DNA, 90 bp, Homo sapiens
gggcatgtcctgtgatggccccttcaagccggatcactaccgctactgagagccaggtcacgagaagagaatgccttctagatgcaaaat

SEQ ID NO: 141915 - DNA, 101 bp, Homo sapiens
ccagcagatggcggatgccctgcagtacctgcagaaggtctctggagacatcttcagcaggtacatccagacactgaaggaccacaggccccggatggtgt

SEQ ID NO: 141916 - DNA, 76 bp, Homo sapiens
ggaccccaaatcccagcggacgcaccaggctcaggtggcgttccagattataaagactttggaacacttgcccatt

SEQ ID NO: 141917 - DNA, 102 bp, Homo sapiens
gcagtgggaaaaatggaccaacttctttggcaagtggacattttactggctcaagcatggaagaggagatggttcgtgttacgcagtggccgtttaactgga

SEQ ID NO: 141918 - DNA, 83 bp, Homo sapiens
ctggcattggactcatggtgctgcatgcagagatgctgtggttcggggggtgctcggttcccaacaaggctacgcagaagaac

SEQ ID NO: 141919 - DNA, 72 bp, Homo sapiens
agaatcctcagaagtactcggacaaggagctgcaggaaactatgccccagacgtccgttgtcttctccagca

SEQ ID NO: 141920 - DNA, 75 bp, Homo sapiens
gaaatcatcacaatcacaaatccgatcaatgtccgagttaccaccatggatgcagagctggagtttgcaatccag

SEQ ID NO: 141921 - DNA, 83 bp, Homo sapiens
ctggtggaacagcctcggccaccaaggtgtggatgaggtcaccattgtcaacattttgaccaaccgcagcaatgcacagagac

SEQ ID NO: 141922 - DNA, 98 bp, Homo sapiens
tgatgatgacatcacccttacagacagcagtgaagaccgtttgggtagaaggtttaagtgaagatggttttacctattactataatacagaaacagga

SEQ ID NO: 141923 - DNA, 114 bp, Homo sapiens
gctggacccaacaccctttgatccagaagaaccgccgagtggtgctggcctccttcctgctcctgctgctggggctggacatgtccttccgcaaagtggtccggcagagcaaat

SEQ ID NO: 141924 - DNA, 75 bp, Homo sapiens
ggccggagagagccgtaggcaggaccccgggacaccctggaagccaggaaatgtggtctcacgtgtgaaacatgg

SEQ ID NO: 141925 - DNA, 82 bp, Homo sapiens
gttagggcagacgctgtgctcgctggcaccccgaacgggttgcttcccccgctgcgagatgtgaagttcatttccaatccgc

SEQ ID NO: 141926 - DNA, 82 bp, Homo sapiens
tcggagcttatactcctcccagtgacgggtctggagtgcgtgggggaccggctgttggcggcttcggaaccaaaaagaagct

SEQ ID NO: 141927 - DNA, 98 bp, Homo sapiens
ttgacatctgatctggcgccggagtcaggaagaaggggcaggtgatctatctggttcaatagatgacctccccatggggacagaaggagctctgagtc

SEQ ID NO: 141928 - DNA, 90 bp, Homo sapiens
aaacagtcttccgcaggaaggagatgtggattttttatcaagcagaaatgcatcgaacaacgagaatcaagatcactgagctaaatcccc

SEQ ID NO: 141929 - DNA, 80 bp, Homo sapiens
tggctatgtgacgctgctggaggaaacacctcaggacacggcctacaacaccaagagctctggcaggctgccctgagcac

SEQ ID NO: 141930 - DNA, 100 bp, Homo sapiens
tcatgaaggctagtttggatgtggaggggaatagactccatctatccatatgagtgccctatagaatggttccattatggctgcgttggattgacagagg

SEQ ID NO: 141931 - DNA, 81 bp, Homo sapiens
ggacttggaaacctgggaaacacctgcttcatgaactccgctttgcaggtagagttggctttgtgggacacagctgggcag

SEQ ID NO: 141932 - DNA, 100 bp, Homo sapiens
caacagactgagcgcgtccaggcctgacagctctgcggctcgggccctgagggccaattcctgtccccccagcagcatggcatcgtgtgctgaaccctct

SEQ ID NO: 141933 - DNA, 87 bp, Homo sapiens
ctcaatgacaagctgtacgaaaagcggaaggtggcagcgctggagatcgagaagtctcctttacagaaaggggcttggataaggagg

SEQ ID NO: 141934 - DNA, 58 bp, Homo sapiens
acctgcctggctagccggcgacttgagtgacgagaaagaccacagcaagattctttca

SEQ ID NO: 141935 - DNA, 98 bp, Homo sapiens
ctgagatgcgcaaattcactccccagtacaaaggtccttgctgcgaaagtgctcaaccttgtgctgccaaacttgtccctcgggcccatcgactccag

SEQ ID NO: 141936 - DNA, 50 bp, Homo sapiens
agaacattgcacgatgcctcctggatttaagtgccctgtatgctcaaaat

SEQ ID NO: 141937 - DNA, 100 bp, Homo sapiens
ccgagaccgtcctggcgcgatgcgtcaagtacactgaaattcatcctgagatgagagatcctgaaggagctagacgagtgctacgagcgcttcagtcgcg

SEQ ID NO: 141938 - DNA, 100 bp, Homo sapiens
tgacaaacactgtattcgttgacagagctttgatagtcgtaccatatgcagaaggtaaaattcccccagaaagtacactgatatttaatattgatctcct

SEQ ID NO: 141939 - DNA, 104 bp, Homo sapiens
gtgcgttcggtgtgccgtgggtccgcgctgcttccacccaacttcctgttagatttggaggccaatcactgccaccttttatttccctgtgggtccaggaactg

SEQ ID NO: 141940 - DNA, 100 bp, Homo sapiens
ccagtcttcaccgcggaaagcatgttgtggctgttccaatcgctcctgtttgtcttctgctttggcccagcctttgaagtaaattttatggatgatgtag

SEQ ID NO: 141941 - DNA, 98 bp, Homo sapiens
ttgaatctctgctctggaaagttcttgtcaataccaagtgttcctaaacccaaaggaaagaaaaccaaagatatgaaaaaacctgtcagagtacctgc

SEQ ID NO: 141942 - DNA, 100 bp, Homo sapiens
ggcgctctccatggggaccaccaacgcttctccacctttgcaggattcctgctctttgaaactaagctatggagttactagtagagaaagcaatcagcag

SEQ ID NO: 141943 - DNA, 83 bp, Homo sapiens
ctgttcttcaccgttatcatctatgttcggctggacttctccatcaccaaggccagaagccttttaaaaggtccctgcgaggt

SEQ ID NO: 141944 - DNA, 101 bp, Homo sapiens
ctgaagatgaggttgccatgggaactgctggtactgcaatcattcattttgtgccttgcagagaaagtttcattgtgcaaatctaacttcatggcctcgct

SEQ ID NO: 141945 - DNA, 50 bp, Homo sapiens
ggaagggaagctgctgtgttgaaggcagcaattccatttccgtgagggcg

SEQ ID NO: 141946 - DNA, 75 bp, Homo sapiens
tgatgacacagaggccctgcagtctctcattgacacccataagcgaaccatccaggagctgtttgaagtttattc

SEQ ID NO: 141947 - DNA, 100 bp, Homo sapiens
cgggggctccgcgagcggaattccggcggctgccgtgactccagtgcaagtatgattatcgggaaatgctgcacaatgccactttctgtctggttcctcg

SEQ ID NO: 141948 - DNA, 100 bp, Homo sapiens
gaagatgacgattcagagactgaaaaacctgaggctgatgacccaaaggtacctgaaagaattccgcacagagcagtgcccactctttgtgcaacacaaa

SEQ ID NO: 141949 - DNA, 74 bp, Homo sapiens
gacaaagcagaaaaagttcttcagcatgctctggctcatgaacctggtactttagattgattgccgagcggggc

SEQ ID NO: 141950 - DNA, 83 bp, Homo sapiens
gggcacccggtgtaccgcggcgagaagccccagctgcactacgcggtcccagtcatgcagggaacaggaatgcaaggagcaag

SEQ ID NO: 141951 - DNA, 74 bp, Homo sapiens
gttcatcatggtgcctggctgccaggcagagtacattctgggcactgtgcacaaagccaaaggcctggagtttg

SEQ ID NO: 141952 - DNA, 100 bp, Homo sapiens
catctttcacaaaggccttcacaacggtgtgggccgaagatatgctcatgtggtgttgaggaaagcagacattgacctcaccaagagggcgggagaactc

SEQ ID NO: 141953 - DNA, 109 bp, Homo sapiens
agtttcccaaacagatgttaagacattcttggaagccttaccggaaatttgcgagaatccccgatttatcattgatggagccaacagaactgacatctgtcaaggagag

SEQ ID NO: 141954 - DNA, 98 bp, Homo sapiens
agcgagccaggggccatcgatgaagttgaccatgacaatggcactgagcctcataccagcgatgaaggaaaaatatctccctggacggggcgtttcta

SEQ ID NO: 141955 - DNA, 90 bp, Homo sapiens
cgccagaaggaagatggcggatctggaggagcagttgtctgatgaagagaaggcgaccatggccttgctgggtaagcgctgtgacgtccc

SEQ ID NO: 141956 - DNA, 74 bp, Homo sapiens
tttgatggaacaaaggcggttaaacttgatatggtggaggacacagaagacctaaggattgtcttcggtctatt

SEQ ID NO: 141957 - DNA, 100 bp, Homo sapiens
ctccacctcctgggaggccagccattcccaaatgccccaaggatgaagaacggagacggaacaggaaatatagtggtcattatgattagctatccaaaag

SEQ ID NO: 141958 - DNA, 82 bp, Homo sapiens
tgctcctggctacatagctccagggtcttgctctgttgcccacgctggagtgcagcggcgtgatctctgctcactgcaacct

SEQ ID NO: 141959 - DNA, 98 bp, Homo sapiens
tggctcggactgtggcggcttcggcggctcaggttgtggtagaggcggaggctcaggcagcttgaggatacaagaccctcctgaaaggaatttccggg

SEQ ID NO: 141960 - DNA, 100 bp, Homo sapiens
gccagactcagggatcaaagagcaaacagattcagtggcctgcattgaagactggactttatgagtataaagtctttggtgttctggaggactgctcacc

SEQ ID NO: 141961 - DNA, 96 bp, Homo sapiens
gaagaaaatcaagaaagtacacctgttgtcattcaacaagaaaccactggcaccccacgctcagctgggagtgtccactcgccttccaccagcatg

SEQ ID NO: 141962 - DNA, 75 bp, Homo sapiens
aagctctctttgacagtggtctccacccagctgttaaagaggagatgttaaagtaacccatcttgcaggacgaca

SEQ ID NO: 141963 - DNA, 80 bp, Homo sapiens
tgtgttctatgtggatccagcattacaactgataagggagaagtaggagatcaaggaaatattggaaaaattggtgaaac

SEQ ID NO: 141964 - DNA, 100 bp, Homo sapiens
ccggccgggagccgccgcgggcaggacgcgcgctgcagtctttcctgcagctgcgcaactggacggcctccctgctctgctccgcagccgacctccccgc

SEQ ID NO: 141965 - DNA, 90 bp, Homo sapiens
tgtctttgacgggtcctccctgcctgccgatgtgcatcggtacatgaagatacaatgcagatcttcgtgaagactctgactggtaagacc

SEQ ID NO: 141966 - DNA, 51 bp, Homo sapiens
aaaacatatccattaaatgggtgttgaaaatgagcccatgagcacaagtca

SEQ ID NO: 141967 - DNA, 99 bp, Homo sapiens
caaattttgctactgtcagatggattgactatggaaaagttgccaaattggtcccacgagtcatcctgtggctgatggtggagttggctatcatcggct

SEQ ID NO: 141968 - DNA, 50 bp, Homo sapiens
ccgcctccctgggagctccgcacggacaatgcagatcttcgtgaagactc

SEQ ID NO: 141969 - DNA, 90 bp, Homo sapiens
tcgcaacctggcagccgccgccgtggaagaacaaaatccagtctcatagcagaggagaatataatgtttacagcaccttccagagccatg

SEQ ID NO: 141970 - DNA, 116 bp, Homo sapiens
cagatcttcaggaattttactgggataattatccaaataaattgcaagcattctatccaaatggataagttctgaacgtcgaaaagaaaagtctcgagatgcagccagatctcggc

SEQ ID NO: 141971 - DNA, 83 bp, Homo sapiens
ggacatgttggttgggatccaaatacaggctttgatgcagaacgtgttcatgagttaaatgaagaaattggtaaattgttagc

SEQ ID NO: 141972 - DNA, 82 bp, Homo sapiens
gaggactgggaccgggacctgctcctggacccggcctgggagaagcagcagagaaagtgccctctggtggtcagaagatgct

SEQ ID NO: 141973 - DNA, 90 bp, Homo sapiens
gcccactgcgagtgccacccaggctggctggagcccctcctcagcagaatagctggtgacagattccacaccaaatcatccatcacaaac

SEQ ID NO: 141974 - DNA, 95 bp, Homo sapiens
actgaactccctgatgctgaacttaggaggactttatgggtggggggaatcagatcctgtttgtatgcttatggaattatccagaagtaaaaggg

SEQ ID NO: 141975 - DNA, 100 bp, Homo sapiens
ctcggacgcacggaccaggcccatttccctttcatctgattctttctactaatccagatacttgttgaagtgctgactagtttcttggggaaagatgtca

SEQ ID NO: 141976 - DNA, 90 bp, Homo sapiens
ctgtaatcgtgtctccagtagtagctgcagtgactgtaggtgagcctcacgtggatggggagcctggagatttacggttccgaatcaaag

SEQ ID NO: 141977 - DNA, 75 bp, Homo sapiens
acaaaggcagtctgttgaggcatctggacaccacacacatcatcagtctggtagtgaagctgattttagctcctc

SEQ ID NO: 141978 - DNA, 98 bp, Homo sapiens
ctcactccgcaccggccaatggcaccgccccgtccgccccgctctgggaacgccggttccccctaaaggactcaaaacgtctaatccaatggttaaaa

SEQ ID NO: 141979 - DNA, 75 bp, Homo sapiens
aacgacacacatgttagagcccttctgaaaaaggctgcggtggcttgtgtcggagcattttatgaaaaaatgggg

SEQ ID NO: 141980 - DNA, 100 bp, Homo sapiens
tggggctgtccctctgaatgaagccacaagagcttcaggtgatgataaatctaaggaccctgatgctcccataagacagaaaatgccccttgatgatctg

SEQ ID NO: 141981 - DNA, 100 bp, Homo sapiens
tctctctctcttaagaaaggaaaatatcccaaggactaatctgatcgggtcttccttcatgtgggagagataaacgtggaggtcccattttaacgtttcc

SEQ ID NO: 141982 - DNA, 100 bp, Homo sapiens
cgagtatgaaagtcaagtcaaagagccagtcttggtgctctgtgttcacctggttcatctgaggagctgcatctaccctgcccatgccatagatcctgcc

SEQ ID NO: 141983 - DNA, 98 bp, Homo sapiens
gacttcctgaagccccctgagaggattttccacaagatttacatccagaggcacgacaatgtgaggtaccgatatggccaattaattgaaataaacag

SEQ ID NO: 141984 - DNA, 100 bp, Homo sapiens
gcctcgggctatcctgtcaaggtgccgctcgaagtccaggaggcagatgaagccaagcccccggtccctgagaagcggccccctgaaatacagcatttcc

SEQ ID NO: 141985 - DNA, 82 bp, Homo sapiens
cggccgcttcttccagaagggccaagggacttgcttttatttcggtggcatccttagctgggcctggagggcaagtggaaat

SEQ ID NO: 141986 - DNA, 101 bp, Homo sapiens
acccgactggacacggttctggaggagtttaagaagggaacatgcttgccaactcagccagcgtgaggatcctcatcaagggaggcaaggtggtgaacgat

SEQ ID NO: 141987 - DNA, 75 bp, Homo sapiens
tcggagagagaggtgctagtggctggacttgacctggaaaggagtgacactgctgatcctgtaacatggaggatt

SEQ ID NO: 141988 - DNA, 100 bp, Homo sapiens
ctcaggtgctgaaccagatgatgaagagtatcaggaatttgaagagatgctggaacatgcagagtctgcacaagctggctttgctacagctgaccactcc

SEQ ID NO: 141989 - DNA, 95 bp, Homo sapiens
catccgagcctttgatttgagtgggtgagtacccagaacatgaagatgggtgggctgccgcgtacaacacctccaactcagaagccccctagtcc

SEQ ID NO: 141990 - DNA, 100 bp, Homo sapiens
tgcacatccaggctggtcagtgtggcaaccagatcggtgccaagggagaagagaagtttacctttattgagaaatgtaacaaccctcgttctgtcacatt

SEQ ID NO: 141991 - DNA, 90 bp, Homo sapiens
gtctcagccgccaaagaccccgtccggtaggtgacttaagagattaaaattaatttggttgctgttggttctgaacaaataatgagttct

SEQ ID NO: 141992 - DNA, 96 bp, Homo sapiens
tacgccctcatggggaaaatctccccggtgactttcagtgagatggaagattttcgaggtatagcagaagaatcatttccaagctttctcaccaat

SEQ ID NO: 141993 - DNA, 101 bp, Homo sapiens
ctaaaccagctcacagaaatagcaaccctgtcattgctatgctaagaaggaatctgatcttaatggcgcccagatcaagcttcgagaatatgaagcagcac

SEQ ID NO: 141994 - DNA, 74 bp, Homo sapiens
cccggggccccagggccaaagggagaggcaggtgtcattggagagagagccaaaactggacaagccaaggcatc

SEQ ID NO: 141995 - DNA, 98 bp, Homo sapiens
tgtctctatgaatgtgactaccctggttacctcatataattctccactttaccaatacttacaggatctgggacacacagactttgaaatatgttctt

SEQ ID NO: 141996 - DNA, 83 bp, Homo sapiens
ctccagctcgctctccaccttcaggcgcctgtgtctggcagagctggtgtgagacgagacaatcctgccccgccgccgggata

SEQ ID NO: 141997 - DNA, 100 bp, Homo sapiens
cgctccatcttcagtgactttgtgttcctggaggcgatgtacaaccagggattcatccgaaagcagtcttctgaaccgaatctgaaattacggtccaggc

SEQ ID NO: 141998 - DNA, 100 bp, Homo sapiens
aaacttgcagcaaagccattcgggttggagtaattgaccagcatctcagacatgtcgaaaaagatgttttgatccctaaaataatgagagaaaaggccaa

SEQ ID NO: 141999 - DNA, 80 bp, Homo sapiens
tgccagcctcctcccccatgtaccacacctgtgtggccttcgcctgggctgaggatgtcaccttcctctaccacccctgt

SEQ ID NO: 142000 - DNA, 82 bp, Homo sapiens
agcagagtggctatggtgggcaaactaagccgattttccggaaaaagatccacacaacttaaagatctgctgccgagtgaat

SEQ ID NO: 142001 - DNA, 83 bp, Homo sapiens
gggaatgtggcgctggatccggcagcagctgacagagtttcactcctgttacccaggctggaggacaatgatgtgatctcggg

SEQ ID NO: 142002 - DNA, 113 bp, Homo sapiens
gtttgctgggaacggagggctgcagcgcccaccctgcgccagagaccagataaagttttaaaatcaaagatgggaaaatcggagaaaattgcccttccccatggccagcttgt

SEQ ID NO: 142003 - DNA, 83 bp, Homo sapiens
ggaccaggctgagactcggggcgccagtccgggcaggggcagcgggagccggccgggcgtcctgcatcctgcagctggtcaag

SEQ ID NO: 142004 - DNA, 78 bp, Homo sapiens
ggcgtcactgacgcttcgctccggtcctcggatcccgagcgcggggaggcagaccggcactatgtcgtccgaggccca

SEQ ID NO: 142005 - DNA, 100 bp, Homo sapiens
gttgcacatccccacatcaatgcactgccaatgtatattcggtgctcttcgaactggtgcttatatggtgtacattttgatgaccaaaggcctgaagcag

SEQ ID NO: 142006 - DNA, 100 bp, Homo sapiens
ggaagcgccgcgatgttcgccccccggctgctggatttccagaagacgaaatacgcgaggctgagaagccagactgcatggaacgcttgcagctgcaaag

SEQ ID NO: 142007 - DNA, 75 bp, Homo sapiens
ggattccagaggggtgacagcgaaatgtccccttcccctgagcccatctacaatagcgaggggaagcggcttaac

SEQ ID NO: 142008 - DNA, 60 bp, Homo sapiens
gggatcctctgtacgcccgttcactgttgtgctgcatggaaacaacctgttagtatttgg

SEQ ID NO: 142009 - DNA, 83 bp, Homo sapiens
tgcctttggacagtctatggatctacattataccaataacgaggcagaagctcctcctggggtagagacagatcttattgatg

SEQ ID NO: 142010 - DNA, 50 bp, Homo sapiens
cctttatccagtttcctggatggaccaagagtccgcttagtggaaagagg

SEQ ID NO: 142011 - DNA, 98 bp, Homo sapiens
cagatttcccaagagcagcggaaaatgatccagtcacaggctttcgggtcacctccagcagctcccagttcagctcacgtgattcggcacagctctct

SEQ ID NO: 142012 - DNA, 75 bp, Homo sapiens
gggacccccattcaagttcaagttcacaattggcgttcgagaacttgtcttggacaattgcaaatcaaatgatgg

SEQ ID NO: 142013 - DNA, 97 bp, Homo sapiens
ttttgctccaagggtgcctgatagggttttgactctgggaggagggctgccttatttggagcaccttaatctctctggttgtcttactataactggt

SEQ ID NO: 142014 - DNA, 100 bp, Homo sapiens
ctgccggggcaccgcaggttttggactcgctgaagcgggtttacagagtccacggggaatgggatgcaagccagaagctgtatgtagtcacattattatt

SEQ ID NO: 142015 - DNA, 75 bp, Homo sapiens
atgacagctgtgataaaaaaaaaattcatctgggcggtatctggaacttggtcctgggaactccaacaagggagc

SEQ ID NO: 142016 - DNA, 100 bp, Homo sapiens
gaaccctgaagtcggtgtctgctgcgttcacggcaggattcggttagatcctccaaatgtacatattattggaaatctgccttttagtgtttcaactcca

SEQ ID NO: 142017 - DNA, 75 bp, Homo sapiens
gccagccgagcaccctccaagcagagccatccgggtgacctgcataggttcctgcggggtctccaacaaggctaa

SEQ ID NO: 142018 - DNA, 89 bp, Homo sapiens
tttgccattgtgtattacctcattcaaaggaaatcctcattgacgattcaatttgttgaaggccaatttgtggactcctacgatccaac

SEQ ID NO: 142019 - DNA, 100 bp, Homo sapiens
tgcacatagtactaatgaggtgctccttcagattgaccaagtccttggccacaggtccctgctttgttttccggaaagttcgaagcttgctagggggaaa

SEQ ID NO: 142020 - DNA, 75 bp, Homo sapiens
gaaagacattacaccatctgaattgcctgcaaacccagcgatctagggcagccctgcagaggtacctgttctact

SEQ ID NO: 142021 - DNA, 100 bp, Homo sapiens
aagaaatggcggacttctacaaggaatttttaagtaaaaattttcagaagcacatgtattataacaggtttggtgcacctcgatttggaggaagtagggc

SEQ ID NO: 142022 - DNA, 138 bp, Homo sapiens
actgccctgagccaatccctacagcccttacggaagctgccttttagagcctttcgcacagggtgaatcatttgatgtaaaagacttgactccataatctgcatctgtcctaatgctgtcatctggagtagagactca

SEQ ID NO: 142023 - DNA, 100 bp, Homo sapiens
caaacaaccagaagaagtatttgatgtcttagagaaacttggagaagggactggggcaaacccggggacttgtggaatctgggaatccagtggcatgttc

SEQ ID NO: 142024 - DNA, 100 bp, Homo sapiens
cccaacctcaatgaaaccagcattgtgtctggtggctatgggggctctggtgatggactcatccccacaggcacagaaaactgaatctgtagataacgag

SEQ ID NO: 142025 - DNA, 100 bp, Homo sapiens
gacaacatcaccgtgaggcagggggacacagccatcctcaggccaccaccacctatcatgacagatggtgaagatgcggattacactcattttacaaacc

SEQ ID NO: 142026 - DNA, 74 bp, Homo sapiens
ttagttctgtggatccaaaatttatagcattcttctaccaccacaggggctcatttgcaggggggagccaaaag

SEQ ID NO: 142027 - DNA, 87 bp, Homo sapiens
tcctatggacagacgcacagacacctgcagacaagttggatggcttgaggactggtactaaaaggaaacgtgactgggaggccattg

SEQ ID NO: 142028 - DNA, 100 bp, Homo sapiens
cgagagctcgccccgaacgggggtcttcctcctccgccgttgacagaatgtcgagtggtaaagtccacttcttacaccaaaatagcttcatcatcccgca

SEQ ID NO: 142029 - DNA, 75 bp, Homo sapiens
gcatggcatttcagtcactggtttgcagagtccaggagtttggatcataatacaagagaagcacagggcaaagac

SEQ ID NO: 142030 - DNA, 82 bp, Homo sapiens
ctgccgtctgctcttctgcctcttgatctccgccaccgtcttcaggccagatccgtacaggtttacagcaccaaataatctg

SEQ ID NO: 142031 - DNA, 87 bp, Homo sapiens
tgtggatgaagctcacaggttgaaaaaccaaagctccctgctgcataagaccttgtcagagatagaagaagtgaagcgacggcaata

SEQ ID NO: 142032 - DNA, 104 bp, Homo sapiens
ccgcgagcacagagcctcgcctttgccgatccgccgcccgtccacacccgccgccagatctggtggctggacccagagctgacctatggctgcgccaagccctt

SEQ ID NO: 142033 - DNA, 90 bp, Homo sapiens
ctcgtgtccatcaaaatccagatgctggatgacacccaggaggcatttgaagttccaaacccttaggagaaatcttgagagtggacagca

SEQ ID NO: 142034 - DNA, 105 bp, Homo sapiens
ctccggggacggcgagatgggcaagcccaggaacgtggcgctcatcaccggtatcacaggccagttttgggaggtcatcagtgatgagcatgggattgaccccac

SEQ ID NO: 142035 - DNA, 75 bp, Homo sapiens
gcagctttgccaccggcttatggagcatggcatcatccagcatgctccccagttaaagatctcagatgaccggct

SEQ ID NO: 142036 - DNA, 101 bp, Homo sapiens
taaccaagtaccaagtgaagactttgaacgcactcctcagagtccgactctcccacctgctaagtgaagaaaaaatgactgctgcccgcattagaaaatgc

SEQ ID NO: 142037 - DNA, 50 bp, Homo sapiens
cgcagctccacgagcacatcaagttccaattgctaatccagcatttgtgg

SEQ ID NO: 142038 - DNA, 82 bp, Homo sapiens
cgggaggataaagaccaccacgattatggtgacaagctgaacatggagctgagtgagaaatacaagctggacaaagagagct

SEQ ID NO: 142039 - DNA, 74 bp, Homo sapiens
tggagattccacccaaatcctcttctccaagaaggtgtgatgaatgcagactctgctaccattttggctgtttg

SEQ ID NO: 142040 - DNA, 75 bp, Homo sapiens
agggagggtccgagccagccgctgttttgccggaggagcccctcaggccgactgatcctttgaaatactccagcc

SEQ ID NO: 142041 - DNA, 90 bp, Homo sapiens
acaggattcgttggctgccgtccccgctgctgtgcattgggagagaagatgactgaggaggaggtggagaccgttctggcaggacacgag

SEQ ID NO: 142042 - DNA, 75 bp, Homo sapiens
gagcctggcgaggatgcaccttcccctgccttggaaagcggaaagaacacccggaaatgaaaggccaccaagaag

SEQ ID NO: 142043 - DNA, 50 bp, Homo sapiens
tcaaaatcccaggctgtcggaagcaagctacgaaagtgccaacatcgaga

SEQ ID NO: 142044 - DNA, 50 bp, Homo sapiens
cccgttcagagtcctacagtggcaggctacctcggacctgaacagctgcc

SEQ ID NO: 142045 - DNA, 100 bp, Homo sapiens
gctacaagcggtcagccgccctcagccagttcgtgattcacaggagcctctgtatcagcaccatgcagactaccatgccggggatgaagcgagactgcgg

SEQ ID NO: 142046 - DNA, 114 bp, Homo sapiens
cctggaggtgggcaaggtgatccagcaaggtcggcagagcaaggggcttacgcagaaggacctggccacgctcaccatggatgatgatatcgccgcgctcgtcgtcgacaacgg

SEQ ID NO: 142047 - DNA, 90 bp, Homo sapiens
tggacctccagatttccttactggtgaacggaagagtccttatgttgcagtatgctgtatagtaatggccttcagcatcctcttcataca

SEQ ID NO: 142048 - DNA, 73 bp, Homo sapiens
ttcaaaacaactggaatatttagcaaggattcaaggctttcaggtaaagattatagttcccaacagcacagca

SEQ ID NO: 142049 - DNA, 76 bp, Homo sapiens
tgaacattcacctgtttattaagacaatgaaagcacctctgttggaacggaaaacagttcttccttcaaagcatgc

SEQ ID NO: 142050 - DNA, 98 bp, Homo sapiens
taaaagcagcaaatctacttttgggttacaaaaatccagaccagggccaccatcgaggagacctactcgaaggcgatggcgaaactctccaagctggc

SEQ ID NO: 142051 - DNA, 75 bp, Homo sapiens
cagctgtcccctgctcgcggccaccgcaccacaggccccaggatgccttcaattaagttgcagagttctgatgga

SEQ ID NO: 142052 - DNA, 90 bp, Homo sapiens
ttagaaatgagctgaagaccattcacaggtcgtagatgtatccaaaggaattgttaatgcagttaaggatcctgatgccaatgggaaatc

SEQ ID NO: 142053 - DNA, 96 bp, Homo sapiens
ccgccttcgccgccaagatgccccggtaccgaggggcggcgctggcgcgggaggagagtgatcagcagctggactgtgccttggacctaatgaggc

SEQ ID NO: 142054 - DNA, 100 bp, Homo sapiens
gagacagatcaaagcagctcaaaacaaccctttttgctgcacatgtaagtggagctgtgcttacctttggtatgggctcattatatatgtttgttcagac

SEQ ID NO: 142055 - DNA, 100 bp, Homo sapiens
ggccgttggggcggctcagaggcagatgtatcctccactcctcgctggccaccatcctgctgcccaacagaagaagctcttctgtctccgatttcctgaa

SEQ ID NO: 142056 - DNA, 97 bp, Homo sapiens
aggcgccagcctgcgaaggtggcggcgctgctgctcgggctgctcttggaggagggtttgcatttgtgtatgaagctcaagatgtggggagtggcag

SEQ ID NO: 142057 - DNA, 100 bp, Homo sapiens
aagagctctcctccttcttcctcaactatctcgctgacacgcagggtcctcttgcctgcccagcttgggctgatggagacagatgtaattatggaatttt

SEQ ID NO: 142058 - DNA, 90 bp, Homo sapiens
gtaagcgcagaaagcaggcgaacccgcggcgcaataacgatgctgtcttcgcagtgccatgcctacaatggcaagcgtgaagctgtctac

SEQ ID NO: 142059 - DNA, 100 bp, Homo sapiens
ctggtcctcgcctcctccgctgtctccctggagttcttgcaagtcggccaggatgtctcaggtctgtgtgccattgcccaggcagagtctctgcgttaca

SEQ ID NO: 142060 - DNA, 75 bp, Homo sapiens
ctgaggtccgcggcagggtcccgcatggcggcgcacaggaagcacggatgcctaaatcaaaggaacttgtttctt

SEQ ID NO: 142061 - DNA, 75 bp, Homo sapiens
cgatgggctgcgggaactccaccgccaccagcgcgggcgcgggccaagactctgctaacaccagatagtggaaag

SEQ ID NO: 142062 - DNA, 96 bp, Homo sapiens
ctggaagggatgtcgtctcagcagtgctcgggcgcagcttagcaaagaagcgacttcagaagaagcgatttagtgaaatcgtctcaagctgccgca

SEQ ID NO: 142063 - DNA, 100 bp, Homo sapiens
caaaggggtgcctgtgattagtgtaaaaacgtccgggtccaaagagagagtacttacaagccgatatagaagcctttgacatcagagaactaacacccaa

SEQ ID NO: 142064 - DNA, 83 bp, Homo sapiens
aacggaatgctggagtcagtggaagacggagctggtcggcccgaaggttgcgaggggcggtgttgaagaatgtgtgggcgaac

SEQ ID NO: 142065 - DNA, 87 bp, Homo sapiens
tgaatatttgtagcccttttgcctttactactggaatgattcaggtggcacaagaatggctcaactctccaaatagagagaatttct

SEQ ID NO: 142066 - DNA, 80 bp, Homo sapiens
ccccgaaactttcaccgcgagcggggagtgcatccgccccaacccttttccccctcgtctcctgtgagaattccccgtcg

SEQ ID NO: 142067 - DNA, 100 bp, Homo sapiens
tccctgatatccctgaccacttcctgtgtctgtgggagcactgtgaggagagaagtggatgggccctatacctccagccgtgaatgccagactttaagat

SEQ ID NO: 142068 - DNA, 100 bp, Homo sapiens
ccagcagcccccgaaggccctatcaggacatggagtatgaaagacgggaggaagttttattttgtcttcatcaggaagccaactaattcggttgatacct

SEQ ID NO: 142069 - DNA, 97 bp, Homo sapiens
cgacgttcccgaagcaaaagtccattcagaaaagacaagagccctgtgaggatgaaaactttcggaagagaaagttgcctgtggtaagttcagttgt

SEQ ID NO: 142070 - DNA, 83 bp, Homo sapiens
gtattcaccagttaatagcaccagtgaatgatttgggaggggacttcaaaggagttggtaaaggctccttagctgctgataag

SEQ ID NO: 142071 - DNA, 75 bp, Homo sapiens
tcttcctcaggaaatgtccaccactgtttctcatcatcaccaaacgataaaactgtgggtgtaccaatagagccc

SEQ ID NO: 142072 - DNA, 75 bp, Homo sapiens
tggagattcaaaacctaacatatgctgtcaaattatttaaacagaagcagtgttgccacaaactatatggtggtc

SEQ ID NO: 142073 - DNA, 82 bp, Homo sapiens
cagaaagtctgttcctttttgtagtaaaatgaatctttcaaaggcctggtgatcctcagtcagctcaggataaagcacggat

SEQ ID NO: 142074 - DNA, 101 bp, Homo sapiens
ctcagggccagctggtggagatgaaccgacttcctggtggaaatgagaaagaagttttcccatttccagaagttagccaagatgaacttaatgaaatcaat

SEQ ID NO: 142075 - DNA, 100 bp, Homo sapiens
ctctgctcattgccatgaaggaactcaagtgtacctgaaggaaatcttaaaagaaattggtgttcagaatgtaaaagggatccacaaaaacacatgggag

SEQ ID NO: 142076 - DNA, 82 bp, Homo sapiens
ggcggacggcgtggaccacatagacatttacgcggatgtcggcgaagagttcaaccaggctgaaggtgatgtggccgccctc

SEQ ID NO: 142077 - DNA, 100 bp, Homo sapiens
atgcagttttatccttttctgtacaacatcacttcttctgtttgcagtggttgtggcatcagctgacacttcaggtgcttgattttgtgcaggatccgtg

SEQ ID NO: 142078 - DNA, 90 bp, Homo sapiens
ccgcccgtcccgcagcggcgcgcggagccaggaagtgggaaaactcttgcctttgccatcccaatgattcatgcggtgttgcagtggcag

SEQ ID NO: 142079 - DNA, 96 bp, Homo sapiens
gatgatcgaagccccttcccaggtcctcaactttgaagagatcgactacaaggagatcgaggtggaagaggaagcacaagcctatgcagacgacaa

SEQ ID NO: 142080 - DNA, 80 bp, Homo sapiens
cgcagacatggacaccaaacatttcctgccgctcggatgtcagtgggcccctgagggagctgcgccctcggctctgccac

SEQ ID NO: 142081 - DNA, 98 bp, Homo sapiens
ctgatcatgcagacatctccaactgtgggaactctttccagcttgtgtctggtgatttgatgaaggctgctgcaggagagttcgcagatgatccctgc

SEQ ID NO: 142082 - DNA, 74 bp, Homo sapiens
agcaacagctcggcgggctggaagacatatgtagagtgtgtcggtcagaaggaacacctgagaaaccgctttat

SEQ ID NO: 142083 - DNA, 101 bp, Homo sapiens
caccaagagcagcctcacatggtgtgggccgacatcaagagctgcgagatccaacaggttttatgctgggggctcagagagaagtggacagcagattgttg

SEQ ID NO: 142084 - DNA, 100 bp, Homo sapiens
acgacagacttcgctgtgagtgcccaaggtttcaaagcattatatgaagtttctctgcaggtggatattgttcccagccagggggagatcagcgttggag

SEQ ID NO: 142085 - DNA, 83 bp, Homo sapiens
cgacaagccgctggcagccgcggatctcaccgccgctcaggtgtcgtgtgggagccaatgggagatgggaagaaaatcatttc

SEQ ID NO: 142086 - DNA, 82 bp, Homo sapiens
tcaaccgggaccgtggcttcggcttcatccgcttgtacggaatcagagcccacgagtggatgttcccggtgtgaagctgcag

SEQ ID NO: 142087 - DNA, 82 bp, Homo sapiens
ctgtgatgtaaatgactgtgtccagcaagttgtggaacttctacaggaacggaagcccccaatgcatccaacttgaaaattg

SEQ ID NO: 142088 - DNA, 98 bp, Homo sapiens
catatacagattatgtgattccatgctttgatagtgtaaactcagcacgagccattttgcagttgaccactgaaaaacacacatactatctgactgca

SEQ ID NO: 142089 - DNA, 122 bp, Homo sapiens
ctgagaaaaggatagcttcagaaatcagaaaaacatttgggaggtgtctagcccagtggaccttctgaagatgtggaagtctgtagtgggccatgatgtgtctgtttccgtggagacccagg

SEQ ID NO: 142090 - DNA, 89 bp, Homo sapiens
aaggataagtcgaaggggaaggcgcctgaagaggacgaagttgacaacacttactacaaagaggcagaaaaagaaaatcttgtggaaca

SEQ ID NO: 142091 - DNA, 86 bp, Homo sapiens
ggccctggccctgatcatcctgctgggcttcgtccagatcgggaagggtcaaaatgcagatcttcgtgaaaacccttaccggcaag

SEQ ID NO: 142092 - DNA, 90 bp, Homo sapiens
cctctccaagttcaccagctgctggaagtcgaacatggcacgaaagagatcaaggatctcttccacattcctccttcttataagagcaca

SEQ ID NO: 142093 - DNA, 75 bp, Homo sapiens
ggtgtcaggatctgaagagctatggtgaaacaccactgaagcattgccaaggttggtcaaagaaaaagtgatgta

SEQ ID NO: 142094 - DNA, 90 bp, Homo sapiens
aaactgcactccagacagacaggtgcacagccaggttaccatgccagcaatgattccttttgagtttctgacagaagatagtggttttca

SEQ ID NO: 142095 - DNA, 100 bp, Homo sapiens
tcggagcagcagccctgtccggcatctgtcttgagctcccagcaagctaaaagatggcggcaaggcagcccaggcaaatgtaagaataggcgatgtggtt

SEQ ID NO: 142096 - DNA, 74 bp, Homo sapiens
gggtccatacggcgttgttctggctattcctgcaccaactgacctgaagttcactcaggtcacacccacaagcc

SEQ ID NO: 142097 - DNA, 100 bp, Homo sapiens
tagaaccgtagccagacatgggactggaggacgagcaaaagatgcttaccgaatccggagatcctgaggaggttcgaaaacatggccaaaagaaatgccg

SEQ ID NO: 142098 - DNA, 96 bp, Homo sapiens
atgttgtcggctccgtgttgtgatgacaggagaatgtgtgtgtgtcccgggcccagacgaattggacattagctgtcagcacgcagccctgctgag

SEQ ID NO: 142099 - DNA, 50 bp, Homo sapiens
gtggcaagcgagcccggggtagaggactatcctattaagtgtaatctcac

SEQ ID NO: 142100 - DNA, 100 bp, Homo sapiens
gtgaaggtgcagctccctgcatatctgaagcggctcccagtccctgaaagcattaccgggttcgctaggctcacaggccatcatctctcagcaaggtgac

SEQ ID NO: 142101 - DNA, 75 bp, Homo sapiens
aaggattccaagtaactcttatttgagccgagactgtctgaagctgggcccacctgctgagggagaagtcgtcca

SEQ ID NO: 142102 - DNA, 100 bp, Homo sapiens
ctcgacttcatgctcggcgccaaaggcgttcgtggcattcagggatgtggctgtgtacttcacccaggaggagtggaggttgttgagccctgctcagagg

SEQ ID NO: 142103 - DNA, 98 bp, Homo sapiens
gttcatctgatgggcttcgtgataatgtaccttgtttaaagaccaaactcttacccaggatctactggagcagctgttggagcccatgacgcctgtcg

SEQ ID NO: 142104 - DNA, 50 bp, Homo sapiens
cctcgcctcccggccgagctgacgcacaaacatttcactgaagatattca

SEQ ID NO: 142105 - DNA, 100 bp, Homo sapiens
gtgaagaatgatgatggtgtcattccctgtcaaaataagtatccatttcaggctggcccagaatgccttcattgtgaggaagggtgctccaagtcacggc

SEQ ID NO: 142106 - DNA, 100 bp, Homo sapiens
atgaaagaagctggtaagggaggcgtcgctgattccagagagctaaagccgatggtcatacttacctggttgcttgcgcatctagtaatgttggatcata

SEQ ID NO: 142107 - DNA, 85 bp, Homo sapiens
gagcagcagactcggacgtggacgcctttttccggacagatgtatggtctgctggctgtgtgttggctgagctgttactaggaca

SEQ ID NO: 142108 - DNA, 50 bp, Homo sapiens
cccagaggatcaccagcgtggatgagagtccggagtgttgtcatgtgaag

SEQ ID NO: 142109 - DNA, 100 bp, Homo sapiens
attcaagaaactttgtctttcatacactttctcctgtcaaggctgaggcggcaaaggaatcgtctaagtctcaggttgtagcagataccaatataagcgc

SEQ ID NO: 142110 - DNA, 97 bp, Homo sapiens
tcaaagactttctggagagcatccgcaaacattcagacaaaattggagagactgccatgaagcaaaaaaatgttttacaagggcagcatgaagcgga

SEQ ID NO: 142111 - DNA, 100 bp, Homo sapiens
attgaagaggtggcccccgccccgtcgggcctcacgagatgatgaccactggatcgtcgacacagactacgacacgtatgccgtgcagtactcctgccgc

SEQ ID NO: 142112 - DNA, 90 bp, Homo sapiens
gccggagaaggccgccgggcccgggcatggtggtctggggcaacgcggaaggaagctcttcgtgggcggtcttgactggagcacgaccca

SEQ ID NO: 142113 - DNA, 83 bp, Homo sapiens
agaaaagatggtcccaaacgttctgtactgtccaagtcagttcctgggtacaaggctcgcttctcatatgtgcggatgaaata

SEQ ID NO: 142114 - DNA, 90 bp, Homo sapiens
cctgcgtcgactttccaaagcgctggaattatgggcgtgagccactgtgcccaggaagtggttacctggaaggaaaggagctgcagaact

SEQ ID NO: 142115 - DNA, 100 bp, Homo sapiens
ggaatcggtttctgagtccagccaacagcagaagagaaagccagttatccacggactggaagatcaaaagagggccctttctggttactgtggctttatg

SEQ ID NO: 142116 - DNA, 100 bp, Homo sapiens
tggatttatgcaaacttgggccaaaggacagttagaagacagtagactttgaaatactcgtgggatatgaagtggaggtgcctagagggttgaagataat

SEQ ID NO: 142117 - DNA, 71 bp, Homo sapiens
ttcgacagcgaacatgtcgcggcctgtcagagatccgtgctcagctcacagagcagatgaaatgcctggac

SEQ ID NO: 142118 - DNA, 75 bp, Homo sapiens
tgcaaatgaagttgatggaattacactgtgatacgactgacttataagaagccagccctcgggaaccaccaggag

SEQ ID NO: 142119 - DNA, 73 bp, Homo sapiens
ccccgcatcttcgccgtctggaaagctgaagaagcatctgtagggaatccagaaggagcgttcatgaagatgt

SEQ ID NO: 142120 - DNA, 50 bp, Homo sapiens
cccccgaagaagactcccccacatctggcatttgacattgtgcagcaaag

SEQ ID NO: 142121 - DNA, 74 bp, Homo sapiens
gatagttcaaacttctatatcacagaaaaggcctggcagctgcgattcagccacctcgtggggtatggtgctag

SEQ ID NO: 142122 - DNA, 100 bp, Homo sapiens
gctgccaagggctacattgaggtgatgaggatgcctaaatcaaaggaacttgtttcttcaagctcttctggcagtgattctgacagtgaggttgacaaaa

SEQ ID NO: 142123 - DNA, 75 bp, Homo sapiens
tgaggagaaggcagcggacaaagaggtctcctctgagcctccggcctccataagacccaaaacagatgacacctc

SEQ ID NO: 142124 - DNA, 95 bp, Homo sapiens
cgagaccagacgcggagccatggccgaggtgttgcggacgctggccgggcagtgccaaggagctgtcccctgccgccttggagaaaaggcggcgg

SEQ ID NO: 142125 - DNA, 83 bp, Homo sapiens
gctgcctacagaaccgtcccaaaatatggcaaagaaacctattctgagcctggtccgacccccagtggcactaacgtgggatc

SEQ ID NO: 142126 - DNA, 50 bp, Homo sapiens
ctggaggagccttctcaagaacagagtacctcctaaatggctctactttg

SEQ ID NO: 142127 - DNA, 100 bp, Homo sapiens
tccacctggctgctgctgcggaggatccgggccgagtcgggcaccaagggactctttgcaggtgctggagaatctggtaaaagcaccattgtgaagcaga

SEQ ID NO: 142128 - DNA, 90 bp, Homo sapiens
cagaagtgatcgctcagctggagaacgcggctaaagttctgatgtatcttaaatagtgaagatggagaaatattcaataatgaagagcat

SEQ ID NO: 142129 - DNA, 100 bp, Homo sapiens
ccttgcacaccacgggaatggacagctcagggcgtccctgaaggtgaggctccaggttgggctctatgctgtgtaccttctggactggctcagcgttttt

SEQ ID NO: 142130 - DNA, 100 bp, Homo sapiens
atccaagtcaccaagaaattactgtctcaagtgatacggaaggaccagtacctcctctcgcctgtgaactgttggtatctggttctgcatcagacccggc

SEQ ID NO: 142131 - DNA, 146 bp, Homo sapiens
ctgcacagcgctgtcgcaagagaaaacttgactgtatacagaatcttgaatcagaaattgagaagctggttcaaaccttgtactactcagctgatcacaagctgcttgatgggaacctactagatggacaggctgaggtgtttggc

SEQ ID NO: 142132 - DNA, 75 bp, Homo sapiens
cgcagcggtacagcgcccgactgctgcaggccggctacgagcccgagagggccaattcctgtccccccagcagca

SEQ ID NO: 142133 - DNA, 82 bp, Homo sapiens
ttcaaacccaaagaggtaagcattcaggatttaagtgccctgtatgctcaaaatttgtatcctcagatgaaatggatttgca

SEQ ID NO: 142134 - DNA, 95 bp, Homo sapiens
gctgccagctggggctatttcaacacgcagagccaaagctggaacgtagagactgacctgtgtgaccttgcgctgttgaagcccctgtggcagct

SEQ ID NO: 142135 - DNA, 50 bp, Homo sapiens
actctgggactcgtggggctgcagcaccgatgccttcaattaagttgcag

SEQ ID NO: 142136 - DNA, 83 bp, Homo sapiens
agatcctgttccaggctattctgttccagcagcagaacacaggtataatgggtctctcccaaatggcgatagaggaaggagga

SEQ ID NO: 142137 - DNA, 74 bp, Homo sapiens
taacaaccatgagaatgtgtctcttgccaaagcgaaggtaccgaaagcacagtaatcactggtgtcgatattgt

SEQ ID NO: 142138 - DNA, 101 bp, Homo sapiens
gtacaaggccattgttttccggccatttaaaggggaggtcgtggatgctgttgtcactcaggtcaacaaggttgatgacaacaagaaactaggagaatggg

SEQ ID NO: 142139 - DNA, 50 bp, Homo sapiens
cttaatgatgccacaacccttacgcaaagagattggtgtggggatcaccg

SEQ ID NO: 142140 - DNA, 75 bp, Homo sapiens
gaaaatgccaacattccttctgtgtccctgtccaagcgagaggtcccgcagcccccggaagccaatagactccct

SEQ ID NO: 142141 - DNA, 83 bp, Homo sapiens
cgacctcgacgtcttgcctgtgtcccacttgttcgcggcctatagaaactaatctggattcactccctctggttgatacccac

SEQ ID NO: 142142 - DNA, 74 bp, Homo sapiens
gggaacccaggccccgccgaggcggccaggttagtgcagcagctgatgtgggtaaagctggagctgaaagggaa

SEQ ID NO: 142143 - DNA, 50 bp, Homo sapiens
aaaggattcgttacagccagagattggtgtccagcacatcttcactggaa

SEQ ID NO: 142144 - DNA, 124 bp, Homo sapiens
gaacggttgatcggtgatgccgcaaagaatcaagttgcaatgaaccccaccaacacagtttttgagcaaggaagccacgagcggctgtgccggaacgcggccgtctgcccttactgcagcctca

SEQ ID NO: 142145 - DNA, 96 bp, Homo sapiens
gagaaggcgctgcgcaggcaggcggaggagtggagacctttggcgacttggcctttggcgacatcttcctccacctgctcacgggcaaccttgcgc

SEQ ID NO: 142146 - DNA, 74 bp, Homo sapiens
caaggatctggggatcttcgcactatcccaagaccataatgacttcagcaaataaagcaatcgaattacaacta

SEQ ID NO: 142147 - DNA, 83 bp, Homo sapiens
ctcgctgggagagaggtacctctccttttccctctccctttccctaaggtatcatgatattagctggtttgacatcaagtcat

SEQ ID NO: 142148 - DNA, 96 bp, Homo sapiens
atcgcaaggatatgatatcatggaaccagcagcaaagaagtgctatctggaaagagagggagaagcagaatttgcccgcatcatgagcattgtgga

SEQ ID NO: 142149 - DNA, 87 bp, Homo sapiens
ttgataagcctggcgcggaacggtcgtggagaagaagagctgctgatgaggactgggacaggacccattccaacaatctcgtaaaac

SEQ ID NO: 142150 - DNA, 80 bp, Homo sapiens
acttgtacaccttcacaggacaccgggatgcagtgtcggtggatcagtacaagggaaagcgggatttggagtcactgagg

SEQ ID NO: 142151 - DNA, 97 bp, Homo sapiens
cgggaggcctcggaggaggacctgctggtggtgcacacgaggcgctatcttaatgagctcaagcgtcgagggcgaggcccccagcagtgagactggc

SEQ ID NO: 142152 - DNA, 73 bp, Homo sapiens
gaagtgtgaagcggccaatggcacggaggcctgcgttattggtaaaggttttcaaggtgtcatgaaaagatgg

SEQ ID NO: 142153 - DNA, 74 bp, Homo sapiens
tcctcaccatccctttcgccttcttcctgcccgagctggttgtggcagcactgcctgaaggtatgagaccagat

SEQ ID NO: 142154 - DNA, 83 bp, Homo sapiens
ctcacctgtgcgggatggaacaaaaggcaagaactcccctggagcaggaaattttcaacctcctccataagaacaagcagcca

SEQ ID NO: 142155 - DNA, 100 bp, Homo sapiens
cgggcggctgagacaaaggcgacgctccatcaagtatgatggtgaaggatgaatatgtgcatgactttgagggacagccatcgttgtccactgaaggaca

SEQ ID NO: 142156 - DNA, 99 bp, Homo sapiens
aaggtccgagcgctcaaggatttctggaacctccacgatcccactgctctcaatgtccgggcaggggatgtcatcacgtccctagatgacactgagctc

SEQ ID NO: 142157 - DNA, 87 bp, Homo sapiens
gcacaagtatatggaacctctgcaggagattccatttgttatcccacgacccatccttgaagaaggcaccttctaaaaatgaacaag

SEQ ID NO: 142158 - DNA, 75 bp, Homo sapiens
gattggtgtaaggagcatcacgggaaggagtctcacaactcaagaaagaaacgggaaattactgaaaaacagata

SEQ ID NO: 142159 - DNA, 82 bp, Homo sapiens
ccaccctcgctccctctgctcttcctcccttcgctcgcaccatgatcttcagtgtctattggatttttccaagagaaagttt

SEQ ID NO: 142160 - DNA, 90 bp, Homo sapiens
tagacagccaacaagatgagattgacagaatgattttagaaattcagatgatgaaacatgcttggaataattataaaggttatgcctggg

SEQ ID NO: 142161 - DNA, 87 bp, Homo sapiens
caagacggtggtgggccaaatcactgtggacatgaggtcaaccagaatcaagatgtctgggactgaggaagcaattcttggaggacg

SEQ ID NO: 142162 - DNA, 100 bp, Homo sapiens
gaccctggaaaacctggccctcttcaatttctgacaaaaggaattgaatgatctggcacgggaccctccagcacagtgttcagcaggtcctgttggagat

SEQ ID NO: 142163 - DNA, 148 bp, Homo sapiens
cccgagtgcaggcactgcacacagcctaccatgtgctgcgccagatggagagcggcaaggtggtgctccctgatgaggatggatagaatgacagaagatgctcttcgcttgaatctgttgaagcggagcttggacccagcagatgagc

SEQ ID NO: 142164 - DNA, 100 bp, Homo sapiens
cctacaaagattttaccaaaaaccttaggaccaataaatgtgaatgttggaccccaaatgtgctgaagctgctgaaagatggcagaagaagtggtggtag

SEQ ID NO: 142165 - DNA, 83 bp, Homo sapiens
ggcggggagcacacggagcactgcaggcgccgggttaaagatcgaggtccggaagccactaggagattttttaattggtttta

SEQ ID NO: 142166 - DNA, 100 bp, Homo sapiens
gacatgatgtattgagtaaaaggaacttcggtacacaggcctttagtgatgtggtggtaagatgtatgtggtcctttggcgtgctcctctgggagctgat

SEQ ID NO: 142167 - DNA, 75 bp, Homo sapiens
tttttaagaggcttcgcgcagttccaaccaacaaggaagctcttcgtgggcggtcttgactggagcacgacccaa

SEQ ID NO: 142168 - DNA, 100 bp, Homo sapiens
tgactaccaccagtggagtccaggatgaggctgtattcatcaccaaagaaaaaacttacaccaatgcagaaatcggttagtccattagtttggtgcaggc

SEQ ID NO: 142169 - DNA, 74 bp, Homo sapiens
ctggtttcggaaatgcccttacagcagcagtggagtacgacaaggagttctcccctcgtcagcgacaccacaaa

SEQ ID NO: 142170 - DNA, 98 bp, Homo sapiens
cctgaggagcgggatctaacccaggagcagacagagaagctgctgcagtttcagatgtcatctgggtgattctcagtgtggaggtgggtggactttta

SEQ ID NO: 142171 - DNA, 95 bp, Homo sapiens
gggaccacaagcccaagtcttccactgcagcccaggaggtaaagactctggatggcattttctcagagcagcaggtgcatcccggccccacgccc

SEQ ID NO: 142172 - DNA, 87 bp, Homo sapiens
ggagctgtggataacgggaggtgaatttccatgtcaacatagtcctgattgagaggatccagaatccagatctctggaatagctacc

SEQ ID NO: 142173 - DNA, 89 bp, Homo sapiens
cctcgcggcgacggcggcggtggcggcttggacgactcggagagccgctggagaatgctggaggagaccttaaggatggccaccaccac

SEQ ID NO: 142174 - DNA, 82 bp, Homo sapiens
gaaccgcttcagggtgtccaagttccggcacaccgaggctcggccgccccgccgcgaggccaccagcccctcgggttccaag

SEQ ID NO: 142175 - DNA, 98 bp, Homo sapiens
aagtccccagggaatgccacagcatcctccagcacctcaggcagccaatcctttctttaagttgttgactatgctaatggagtttgctggtggacctc

SEQ ID NO: 142176 - DNA, 101 bp, Homo sapiens
cgtggttccagcgccggttttgaccgccacattaccattttttcacccgagggtcggctctaccaagtagttgagacatttgggaaatgatgaagtgcaca

SEQ ID NO: 142177 - DNA, 100 bp, Homo sapiens
actggcaatatttgggagagcaggcgtgggcaagtcagacaacagcagttctgtagagagtttaaatatgaaggaatggcaggacgggctaagggcactt

SEQ ID NO: 142178 - DNA, 75 bp, Homo sapiens
aagcgacggcgccatgagtctgacttccagttccagcgtacgagaaggacagaataacgggctcccagattcaca

SEQ ID NO: 142179 - DNA, 100 bp, Homo sapiens
cataagtgatttgccccaaaaggattgctgttgaaagctttgcatcgtccctatggttgtgatgttgaaccccaggcactaaatgaggctatcaggtgga

SEQ ID NO: 142180 - DNA, 100 bp, Homo sapiens
ctcgactaatggcctatacatcggagctacagaaattagaagaacagattgcaaatcagactggaagatgtaatagttatgcacgagtgcgagctgtggt

SEQ ID NO: 142181 - DNA, 124 bp, Homo sapiens
cgcactctggagggattctggcatcagggaggctttcagccggagaagcgagtttcagctggtaactgtgacatttgatgatgtggccttatatttttcggaacaagagtgggagatcctggag

SEQ ID NO: 142182 - DNA, 100 bp, Homo sapiens
gagcaaatgcagcatttttgataggtgcctatgcatattcttgccatgagaaaaagaatgtgataagttattcaacttatgaaattcaagttacatgtga

SEQ ID NO: 142183 - DNA, 87 bp, Homo sapiens
tctgtgagtcttctggcaaacagtgtttgcctctggttcagctcatacaacagcttcttagatgcatggagtcatctcccacatttc

SEQ ID NO: 142184 - DNA, 100 bp, Homo sapiens
cgatccagaaccctgctcctcaccccacaggatggggagatcgacctgaaactcctcaccaaagtgctcgcgccggagcacgaagtccgggaggtacagt

SEQ ID NO: 142185 - DNA, 101 bp, Homo sapiens
caaactgtccaaggctttggcagtgtcatggagaaactccagctgggcccagagattctgcagcgggaaaatccaaggcttatttatgccaggctgagtgg

SEQ ID NO: 142186 - DNA, 85 bp, Homo sapiens
tttttgccctcaaaagaaatggcagggttcagcggattcctacacaagcaggccgtctgactccgatgtctctttggaagaggac

SEQ ID NO: 142187 - DNA, 83 bp, Homo sapiens
cttggactgagtcctgcaggacacaggttttttgccctgacatctcttcgtcttgtgtttttacttgcatttggcttgatgat

SEQ ID NO: 142188 - DNA, 83 bp, Homo sapiens
cgactgctagagccgagcgaagcgctgaaggtgatgtggccgccctcaaccgacgcatccagctcgttgaggaggagttggac

SEQ ID NO: 142189 - DNA, 75 bp, Homo sapiens
gcacaaccagctgacagacagtggcctggatgccaccaccttcagatttctcaaggggaagataaaatgactaag

SEQ ID NO: 142190 - DNA, 50 bp, Homo sapiens
gcgccttgcagcactgctggaccagggagaaagagagagcgcgaaagaga

SEQ ID NO: 142191 - DNA, 100 bp, Homo sapiens
gatgaaatttgctctgctaaaaggctccttcagtgagcaaggcatcaacgagtttctcagactagacgcttgaagcaaagctgccatcccagaagacgac

SEQ ID NO: 142192 - DNA, 82 bp, Homo sapiens
acaaactcgaagaacagctgtggaaagaagttgcaaaacactgggtcctcaaaggcttcccttccctactggttacaaaagg

SEQ ID NO: 142193 - DNA, 88 bp, Homo sapiens
aaatatacaacaaggccattttctcaaacgagagtcagcctttaacggtagaagatgacggtgaaatgttccacacactggatgatgg

SEQ ID NO: 142194 - DNA, 100 bp, Homo sapiens
tttcctataaggttagaaggccttgtgctcacccaccaacaatttagtaggtgaatccagaaaaactgtgctgtccaaaccgactgactcttcccctgag

SEQ ID NO: 142195 - DNA, 75 bp, Homo sapiens
gatcactgataagaaatgttctcgacagcaagagtcttgctatggagatacacttcaattcctacttcagtggaa

SEQ ID NO: 142196 - DNA, 90 bp, Homo sapiens
gctaaatgtagacaatggttagagaagaattttccaaatgaatttgcaaaacttactgtagcgattattggagccggaattggtggcact

SEQ ID NO: 142197 - DNA, 100 bp, Homo sapiens
cttgaccagcatcttggctgaccttgagtgcagctccccctataagcctcggcctccacaggagtcagtggatcggtggggaaaatgctgcttaccctgg

SEQ ID NO: 142198 - DNA, 74 bp, Homo sapiens
cagacggggatgtctttggcccagagctggacaccctcctggactcgctggatgaaaagtactggacaagacgc

SEQ ID NO: 142199 - DNA, 74 bp, Homo sapiens
gtactgatgcccagtggggcattcgtcttggtaaacttggtgcatgttatttgaaagcaattgagacgcaaccg

SEQ ID NO: 142200 - DNA, 75 bp, Homo sapiens
agatcgtctctctcatcgaggcccaaaccgccaagatgcattatgttcaagataaattatttgtgggtctagaac

SEQ ID NO: 142201 - DNA, 82 bp, Homo sapiens
caaacagcgacgagagatccgtgcaggcacagccttttacattgatcaggtgacttaagagattaaaattaatttggttgct

SEQ ID NO: 142202 - DNA, 82 bp, Homo sapiens
gcctttcagccaaatgccagactgattgtcatgctcagggaccctgtggagaggccaaggcagaggcttcctcaggagacca

SEQ ID NO: 142203 - DNA, 90 bp, Homo sapiens
tcagagggcttttactcctacctgtgtaccgagccagcctatgtgcttcccaagctgtatgtgaagctacattactgtgtgagttgtgca

SEQ ID NO: 142204 - DNA, 100 bp, Homo sapiens
cggaggtctcatctttgaactactgccggagcttctgccagctccagagtttcctattttggagaagcagaactggttgattcatcttcattatatccgg

SEQ ID NO: 142205 - DNA, 50 bp, Homo sapiens
ggagaatctgggcgtcgctctagagttggagaatctaatgctggacaaag

SEQ ID NO: 142206 - DNA, 100 bp, Homo sapiens
ggccagtagaggaggaggtgaacaaggaggaggtgacttaagagattaaaattaatttggttgctgttggttctgaacaaataatgagttcttttatttg

SEQ ID NO: 142207 - DNA, 78 bp, Homo sapiens
gggaacccgcggtggagcgggacacgaacgtggagcatcagatccatgctgctgctgactcggagccccacagcttgg

SEQ ID NO: 142208 - DNA, 82 bp, Homo sapiens
ccggagctgctggtttcattcgaggtttcgggccggtgacttaagagattaaaattaatttggttgctgttggttctgaaca

SEQ ID NO: 142209 - DNA, 90 bp, Homo sapiens
gcatcaaagtgcggatacagatctggtgatggtttggaagagtaactttgatattgttgatcatggagaagtcacgaaagtgccgaggcc

SEQ ID NO: 142210 - DNA, 74 bp, Homo sapiens
tgttcctggaggaatccgagaagagcagagcggagggagccccagacacgtactgctgcgcacggccactgcca

SEQ ID NO: 142211 - DNA, 88 bp, Homo sapiens
cccaccactgccacaaacgccgcaccaggtcttgtagcagcgcctcctcgaggagcaggagcggcttcgcttggagcaggagcgagag

SEQ ID NO: 142212 - DNA, 82 bp, Homo sapiens
tgctgaatagctggggctacaggcgtgtgtcactgcgcccaggctcttcagagtaacctgaggtactccttgttgccaagac

SEQ ID NO: 142213 - DNA, 97 bp, Homo sapiens
acccatttaccatgcgtgattgttaactcagagtggggtgtagccagacaaaacttgccaatggcacttccagtatgattgtgcccaagcaacggaa

SEQ ID NO: 142214 - DNA, 100 bp, Homo sapiens
aacaagaagagggggatcttccccaaggtggccaccaacatcatgcgagcctggttgttccagcacctctcgctctggattaatcgaattacagctgcta

SEQ ID NO: 142215 - DNA, 74 bp, Homo sapiens
tcagacaacgacggatacagaccaggcaacggacagccaagacgtagatccatccaagacttgactgtaactgg

SEQ ID NO: 142216 - DNA, 100 bp, Homo sapiens
ccaacatcgatgggcggcggaaaatagcctttgccatcactgccattaagttcatcctcaatgtccgcctggattaccgcatatcctacctgctgtctgt

SEQ ID NO: 142217 - DNA, 83 bp, Homo sapiens
atggcccacaagcagatctactactcggacaagtacttcgacgaacactacgagtaccggccctgccctgggagaagccctgc

SEQ ID NO: 142218 - DNA, 100 bp, Homo sapiens
gagaaattcaccgccttctgcaaggcccagggcttcacagaggataccattgtcttcctgccccaaaccggctgtttgtactgatggcaagctcttcaac

SEQ ID NO: 142219 - DNA, 82 bp, Homo sapiens
ctggccctggtggggattgacagccacgggaagaactgaagcgctgcggcatggcgcgcgcctgcctccaggccgtcaagta

SEQ ID NO: 142220 - DNA, 75 bp, Homo sapiens
tacactcattatctgatacttgtaatcaggcagccatgttgttcagttctggagtcttttggatgggcttgttat

SEQ ID NO: 142221 - DNA, 100 bp, Homo sapiens
ttgagctccaggagttcgtctcttacgtctgcggaagtgcagctgcctcagttcttagcgcagagaagatggcgaattagaagatggtgaaatagacgat

SEQ ID NO: 142222 - DNA, 100 bp, Homo sapiens
atttgttaaggattccaagtaactcttatttgacctgtcatttactccatcctttatagtgatgctacaggacgaagaggaatggataaaaacattggcg

SEQ ID NO: 142223 - DNA, 101 bp, Homo sapiens
ccggcaagggggcaacgaggaagctcttaagagcgcggccggaaagcaggagaaggaagccaacatccttttggagccatgaatattgtccgaactccatc

SEQ ID NO: 142224 - DNA, 50 bp, Homo sapiens
aaaatatgtagaagatgaaatggcaaggacaaacttactgcagcttgaag

SEQ ID NO: 142225 - DNA, 75 bp, Homo sapiens
aaggcccctccggccagggccgggagccgggccggcctagccagagaggtggagaagagcgagtacttgagaaag

SEQ ID NO: 142226 - DNA, 50 bp, Homo sapiens
agcgactttggggcccgtcaccctcaggggcataaggaaatggtggcagg

SEQ ID NO: 142227 - DNA, 96 bp, Homo sapiens
aatgtgtttttcgttgctcacagctatggaggacttgcttttgttgaactggttatgtcatggctccctgacggtgaaatatgtgtgaaatccaac

SEQ ID NO: 142228 - DNA, 92 bp, Homo sapiens
catggccctgaaccccagcaggcaggaggacgaggaaagcacagaattttgatttggctgctgggctgctaccttgaaatccaagccctaaa

SEQ ID NO: 142229 - DNA, 74 bp, Homo sapiens
ccatcgttgctgtgatttcttacactggctatgatatggaagatgccatggatttttgtcaaccgcagcctggc

SEQ ID NO: 142230 - DNA, 74 bp, Homo sapiens
gcccgctgggaggccgagcgcgccgagttacagatgagcagcaccagcagtaagagggctccgaccacggcaac

SEQ ID NO: 142231 - DNA, 75 bp, Homo sapiens
tgctatataagatgctctcagaaaatttcatgtcactccagggactgctgagatgtcctctattcttgaagagcg

SEQ ID NO: 142232 - DNA, 90 bp, Homo sapiens
tgaacatttgtagcattgatttcccggatctggtaacatggcaaaagatgacactcatgaggaccatgatacttccactgagaatacaga

SEQ ID NO: 142233 - DNA, 126 bp, Homo sapiens
aaacactggaaaagatgtcagaagattcagaaaaggaagactattcagacagaacaatcagtgatgaagatgaatcgaatcaaagaatcttcaggatggcagcaagtgtttacgagcccatatttg

SEQ ID NO: 142234 - DNA, 96 bp, Homo sapiens
atgtccgcccaggcgcagatgcgggccctgctggaccagctcatgggcacggctcgggacggttgtccttctattcaggccactcttcgttttcca

SEQ ID NO: 142235 - DNA, 80 bp, Homo sapiens
gggggattctcgacctgctaacagaactggaccttttcggagtctcttgcatggctcaggactgtccactccgtacacca

SEQ ID NO: 142236 - DNA, 101 bp, Homo sapiens
cggccgcgggctgcatgggcagcgcccgcgccccgccgctgagccgtcgcggagccgcgcagccctcggagcacggtggaaatgcagtcagcagaaaactg

SEQ ID NO: 142237 - DNA, 96 bp, Homo sapiens
cttatggcggcgctggagagggggcgctgagctgttgggtcttcccaagggattgttgaagaaacttctgaagagggaaactctgtacctgcttca

SEQ ID NO: 142238 - DNA, 82 bp, Homo sapiens
caggactgcgccgcgtcttcctcaagaaattccgggtagatatgcctggctcaggcagtgcattcatccccaccatcaacgc

SEQ ID NO: 142239 - DNA, 100 bp, Homo sapiens
ataaggacacaaaggacatttctgcacccaaaccaggacctctaaaaaaggcacctgctgctaaggacagagcgggatgccaccagcttgtccaaaggga

SEQ ID NO: 142240 - DNA, 95 bp, Homo sapiens
agccactgaacctgaccattggggtcacggtgtttgccgtggggaactgctgatgcaaggaatcccctgggctcccgtccactccactgctgacc

SEQ ID NO: 142241 - DNA, 83 bp, Homo sapiens
gttcatcaacgccgagtacacagaggaggcctatgaaggctcacagaacatttcctgcctgttgctcacactctgttgtccac

SEQ ID NO: 142242 - DNA, 82 bp, Homo sapiens
gaacagggacagcacctcatcccctggatgggggaccacaagatcctcatcgacaggagaactacgatgacccgcacaaaac

SEQ ID NO: 142243 - DNA, 99 bp, Homo sapiens
taggaagctcgggcgctccggctgtaaggagccgcggcggggggaaaatggagcccttcaccaatggactgactgcattgcacagatgatggatattta

SEQ ID NO: 142244 - DNA, 100 bp, Homo sapiens
tggtgtaccaggcgaagctggccgagcaggctgagcgatacgacggtagctacagcaagctgggtagcaggcagatccaaaggatatcatgaagtttcca

SEQ ID NO: 142245 - DNA, 83 bp, Homo sapiens
gagaatgacagctgtgataaaaaaaaaattcatctgggcggtatctggaacttgcatcaagatggtgctcatgtggaccagtg

SEQ ID NO: 142246 - DNA, 96 bp, Homo sapiens
tgagcttcccaccgaagatgaacagggttcctggggcatcgacgatctccatatttcattgcaaggtaaaaccttgttagccaaagcagtagcaaa

SEQ ID NO: 142247 - DNA, 100 bp, Homo sapiens
gtgtcagatgagaagttacgagactacatctggaacacactcaactcaggacggcccctgatggtaagattccaggctgccctgaagaactacctgaacc

SEQ ID NO: 142248 - DNA, 100 bp, Homo sapiens
aataaaaatggatgcaagtttaggaaatctatttgactgctgcctcatatccgggggaatgtgggctttgtgttcaccaaggaggacctcactgagatca

SEQ ID NO: 142249 - DNA, 101 bp, Homo sapiens
tggtggcagcggatcctgcgactgcgagtggctcagcagttacagcagcaggaagatgggtggctttggtggcagccgtggtggtggtggatatggtggca

SEQ ID NO: 142250 - DNA, 87 bp, Homo sapiens
atgtactctgacctgaatcctgaattttccttgatggtcaaaagattaagcaacagccaactcagtttataaatccagaaacacctg

SEQ ID NO: 142251 - DNA, 90 bp, Homo sapiens
gtatgtggccagttatttgcctcagtaaaagattgcctttccccatcttcctggttctgctccttcgtggcctagtcttgtggacaccag

SEQ ID NO: 142252 - DNA, 82 bp, Homo sapiens
gcttcagttctgctctgcaaggatatataataactgatttatgtgatcagtttggctgaaccccgtctgcccctgcagctgg

SEQ ID NO: 142253 - DNA, 90 bp, Homo sapiens
cttcgctgtaacccaagaacaagttcatttatatgaggtgacgagagcagacgtggatgtccagccctatgcgttcacaaccaagtctct

SEQ ID NO: 142254 - DNA, 75 bp, Homo sapiens
gaccgttgtgttgtggaagaatggttatcagaattcaagagacacctctgactctgtcacagctctgcagggtga

SEQ ID NO: 142255 - DNA, 100 bp, Homo sapiens
ctcctttccctttgagaccgtgaagagaaagatgcagaacaatgctaaagtagctgtgctaggggcctctggaggcatcgggcagccactttcacttctc

SEQ ID NO: 142256 - DNA, 83 bp, Homo sapiens
cgacaagccgctggcagccgcggatctcaccgccgctcagggtacacggtcctcttctcgcacggcaatgccgtggacctggg

SEQ ID NO: 142257 - DNA, 74 bp, Homo sapiens
acattttctgacccagcatttcaaggtagtgggcagcagtcagtgacaggtgtaacctctgtggatgacagcaa

SEQ ID NO: 142258 - DNA, 74 bp, Homo sapiens
cgcctggccatcattgagtatatgccgctgctggcaggccagctggcacagactgtggggctcccagtgaccat

SEQ ID NO: 142259 - DNA, 100 bp, Homo sapiens
cctagcgcctggcctgcgcgccgctgcccgcgccacaggaatacggttggacagaatgaactgaagattacaagtgatcaagtgataaattcaggattga

SEQ ID NO: 142260 - DNA, 100 bp, Homo sapiens
aagctgctatgtcacctacctcaccttctcagctctgtccagcaaacctgcagaagtagtggctgacaagattttgaaaaagaaagaataccctctttat

SEQ ID NO: 142261 - DNA, 100 bp, Homo sapiens
ctggcggaggcggcaggaaccgagagccaggtccagagcgccgaggagccggtctaggacgcagcaggtaacagactgggttgacccatcatttgatgat

SEQ ID NO: 142262 - DNA, 74 bp, Homo sapiens
cggatgaagaagatgaacttagggccagagggcaaatccagacagaacctttgacttggtgttgaaagtgaaat

SEQ ID NO: 142263 - DNA, 74 bp, Homo sapiens
ggaggagtatgtgatcagtctgacattcgaggacacagatggagatggacacatggatcatttactgccaggct

SEQ ID NO: 142264 - DNA, 100 bp, Homo sapiens
agcccaaggaacatcttgccaatttcaaatcgggagaacacaaagttatacctcaatttacttgaaatggaatatagtggtgacctcaaacaaaatgaag

SEQ ID NO: 142265 - DNA, 75 bp, Homo sapiens
agcttccgtactgccagtgtcagcatcaaccagacagatcgttctgaagtctccagcctgagttcagaggcccct

SEQ ID NO: 142266 - DNA, 82 bp, Homo sapiens
cttatgctgatatacatccaatgagggtaccttaacatggggaatcttcttaaagttttgacatgcacagaccttgagcagg

SEQ ID NO: 142267 - DNA, 75 bp, Homo sapiens
agcctgcggagcctgtggggcagcctagagccagagtgggctgccgcagcttcagaagtaaaagagcagacgaaa

SEQ ID NO: 142268 - DNA, 50 bp, Homo sapiens
ctgcaggctctggggagtcgccatgtgaggatgaggatgatgaccttcag

SEQ ID NO: 142269 - DNA, 75 bp, Homo sapiens
cgctgaggcttatttgggaaagaagggtgattttgtagacagaggttactatagtttggagaccttcacttacct

SEQ ID NO: 142270 - DNA, 51 bp, Homo sapiens
atcaacaccaaaaagctttctgctagggctcgatcaagtcatccgccaaag

SEQ ID NO: 142271 - DNA, 83 bp, Homo sapiens
gcatttaagcagctcccagcttcagagccttgctgctgttcagatctccactgcactacgctgctgccaactgcaattaccag

SEQ ID NO: 142272 - DNA, 83 bp, Homo sapiens
cgtaaggacaaaacgggactggctagttaaacaaagaggctggatgcctgaggaaacccagacccaagaccaaccgatggagg

SEQ ID NO: 142273 - DNA, 75 bp, Homo sapiens
ctcagaccacattatccactggatctcttatacagacgcaccaaagccctcattgactatgagaactcaaacaaa

SEQ ID NO: 142274 - DNA, 82 bp, Homo sapiens
cccaccggcccccggcgccgtccagcccggagggacctgcttcctttgctccaataagctttgcaatcaaggccaaagaaaa

SEQ ID NO: 142275 - DNA, 51 bp, Homo sapiens
ctggagccaagcccctcttcaggagtaagacctcgcgacctgtgtcagcag

SEQ ID NO: 142276 - DNA, 96 bp, Homo sapiens
gaaagaccttcggtacgttggcaaaattttggatggattttccttggcttctaaacctttatcttctaagaaagttctctacttaaaagacaatga

SEQ ID NO: 142277 - DNA, 90 bp, Homo sapiens
cgggtggcatactgctttgaggtggcagcccagcgaagcccagataagaagacgtgccccatgaagggaccagtccaacgtcaggcggat

SEQ ID NO: 142278 - DNA, 100 bp, Homo sapiens
ccaccccgtccgggagggaggtggggggggtcagccccccgcccggccagccgccccgtccgggagtattttaataagcggaaaacctactttgctcacg

SEQ ID NO: 142279 - DNA, 100 bp, Homo sapiens
ggcggagctgacggtggaggttcgcggctctaacggggctttctacaaggtatgtcttactgaaagaaagaaacatgcttctaaccctagagcaggaggc

SEQ ID NO: 142280 - DNA, 96 bp, Homo sapiens
tcgagcctggtgaacgggtccacgttcgtgctacagaagaagggcatcgtgcgtgccaagcggcgagttttcggctttgtgagaaaccttaccatc

SEQ ID NO: 142281 - DNA, 100 bp, Homo sapiens
tgtctggctaatggcatttacaggagtgcttaattcaccattatgagaaatgcttccagtcacaaaaatgcagcccagctcactctgaggaagaagcagg

SEQ ID NO: 142282 - DNA, 100 bp, Homo sapiens
cggggccgccgagccgctgtcggcgggaagcggcgatcctgccaccgggaggtgtggaagagccggttcctcgtctcctcattatgaaagacatggtcag

SEQ ID NO: 142283 - DNA, 114 bp, Homo sapiens
cagtgtatgaacccagggcactgtggggacagggcgacgtgtgtccaggcgtttgccgatgtggacgagtgctcactagcagaaaaaacctgtgtgaggaaaaacgaaaactgc

SEQ ID NO: 142284 - DNA, 75 bp, Homo sapiens
ctttgccatcactgccattaaggtcttatcgaatgttacttagcctccaacagtattcgagaagcaatggtaatg

SEQ ID NO: 142285 - DNA, 80 bp, Homo sapiens
gcgcgcagggcctgcagcgggagctggacggcgagcgcgagcggcgcgagaaagtcaaacgatcaaggagcaaaggcggg

SEQ ID NO: 142286 - DNA, 100 bp, Homo sapiens
cagccacgcgggcgagcggctgtgtggatgtcggcgaagccgcgggcgagatgaccactgagcagtttacaggagatcatactcagcactttttggatgg

SEQ ID NO: 142287 - DNA, 85 bp, Homo sapiens
gtgcattacaggagtcctccacttgccactgggtaacctggatgaggacatcattgcagaagagaacatcgtttcccgaagtgag

SEQ ID NO: 142288 - DNA, 75 bp, Homo sapiens
atcaagcactggaaccgcttccgagacgccagctgcgggccgtccagcggctgtgccacttctacagcgccgtca

SEQ ID NO: 142289 - DNA, 100 bp, Homo sapiens
cgaagtggaagcagagagcccgggccctgtgccggtgcgtggaagtggtgaaagcttctcaatatgtagagctagccaatgatctggaaataaacaaagc

SEQ ID NO: 142290 - DNA, 98 bp, Homo sapiens
gggggaccgcttgcagcggggacgcgaggacccgggctgggctttcctcacccggattcaagtcaatctgaaagtcccagccagccaagtgacgctga

SEQ ID NO: 142291 - DNA, 96 bp, Homo sapiens
cgagaccgtgaccgagagcgtgaccgagagcgcgaatatcgtcatcgttagaaggtcaaagattctaaactgcctgcatataaggatctcggtaaa

SEQ ID NO: 142292 - DNA, 104 bp, Homo sapiens
atcgacgtcgtgatccagaagtccagagctgaggactgcctgtttgcagcaacgaaggttttgggaacagtaaaatggttcaatgtaaggaacggatatggttt

SEQ ID NO: 142293 - DNA, 137 bp, Homo sapiens
aggagaaagtggaaaaggcagaggtgaaggagagaacagaggaacctatggagacagagcccaaaggtctctgctgctgatgaagctgtgaccaaacgcacccaacccttggcagccatctgtccctgcagccatag

SEQ ID NO: 142294 - DNA, 130 bp, Homo sapiens
tgaaatctggcatattagcgctagccctgcagacagaggtgtgctgacgacctgctacaacagaataatctatgccagcaattatgacaatgttagcagaccatgcagctcgtcagctgcttgatttcag

SEQ ID NO: 142295 - DNA, 82 bp, Homo sapiens
tccagatgtccttctaggctcaacagaatattccacctgccttgacatgtggagttggaattgtacaaagaggaacttcaga

SEQ ID NO: 142296 - DNA, 100 bp, Homo sapiens
gccgcctccgcccagggccacctaaggagcggaccccgcatcttcgccgtctggaaagaaggatatggccctgaagccacatgagcggaaggagaagtgg

SEQ ID NO: 142297 - DNA, 76 bp, Homo sapiens
cgcggagcccgggacgcgcgtacgccctgctgcttctcctgggatttgtcttggctgttactatgacacgggaagc

SEQ ID NO: 142298 - DNA, 82 bp, Homo sapiens
gggcagacggattcatttagagctgcggaacaggacgccctctgatatgatgtgcgaggtgatgccgaccatcagcgaagca

SEQ ID NO: 142299 - DNA, 52 bp, Homo sapiens
agcgcactaaatcgtctccaaggtggacccaaagaaacggatttctatgaaa

SEQ ID NO: 142300 - DNA, 75 bp, Homo sapiens
agcatctaggaggggtgaaaaggtgccagccgggccgccgatgacgccgagcgggagcgcagggaccgagaggag

SEQ ID NO: 142301 - DNA, 83 bp, Homo sapiens
gggcaagtcggcgctcaccatccagttcatccaggattttttatcaagcagaaatgcatcgaacaacgagaatcaagatcact

SEQ ID NO: 142302 - DNA, 73 bp, Homo sapiens
aaaaatgacccaccaatggaagcagctggcttcactgctcaggtggcctaggtggtagtcatgccttgcttct

SEQ ID NO: 142303 - DNA, 90 bp, Homo sapiens
gagagatggtcaggtctggagctcgaccgggccaggttttgatacttatagaggactcccttcaatttccaatggaaattatagccagct

SEQ ID NO: 142304 - DNA, 128 bp, Homo sapiens
gcggagcacggaggacggggccgggcgacctgggcaccagcaggacccgaggccaggagccaggggcccagaagaaacctgatgtgagactctctcgaggcagtattgacagggaggatggaagtctt

SEQ ID NO: 142305 - DNA, 75 bp, Homo sapiens
gcctggatgaaatagatctctcggctctgaggggatataactggtgccatgaccggaatgtagtaacgattttca

SEQ ID NO: 142306 - DNA, 50 bp, Homo sapiens
cgctaagttgctgatcgtggcggcaagtgaaccggagcaaacgacttccg

SEQ ID NO: 142307 - DNA, 98 bp, Homo sapiens
gggagcccggccggagctgggtctggagacgccgtggcagcctgaacggagtgtgcgacggattgggagtctgcgggccaggcatcgacatccgcaac

SEQ ID NO: 142308 - DNA, 100 bp, Homo sapiens
cagccacacgacagattcactgcagagtcttcctaatattctcaccgatgatcgatttaaagttatgtttgagaaccctgacttccaagtagatgaagag

SEQ ID NO: 142309 - DNA, 100 bp, Homo sapiens
gcaactgccaggaaggctgggggggccttttctgcaaccaggacctggaatggccaaatatcaaggtgaagttcaaagtttgaaactggatgatgattca

SEQ ID NO: 142310 - DNA, 100 bp, Homo sapiens
aacttccggccgcagatgtcccaggccaccagcccctcgggttccaagatgcagctactggagacagagttctcacacaccgtgggcgagctcatcgagg

SEQ ID NO: 142311 - DNA, 74 bp, Homo sapiens
ctataataccagaacagagcacgtttaaagtactttcaacaaagacttttggaacagcgatcgtaatcaatcct

SEQ ID NO: 142312 - DNA, 100 bp, Homo sapiens
acgagcccggaacattcttcacaagaaaggttcttgagcacgtgcccctgctgctgtatatcttggcagcaaaaacattaattctctgcctgacatttgc

SEQ ID NO: 142313 - DNA, 78 bp, Homo sapiens
gggcttcgagttcaacatcatggtggtcgggcctcggcttcacaggatggggctgccagtgtcctgggcccctcctgc

SEQ ID NO: 142314 - DNA, 82 bp, Homo sapiens
gctgttttgccggaggagcccctcaggccggaaatcctcattgacgattcaatttgttgaaggccaatttgtggactcctac

SEQ ID NO: 142315 - DNA, 100 bp, Homo sapiens
cgactctggtactgtgacctacagcaggaatccagtggcatcgcggtttggctttggttgaaataagaatttagcctgtatgtactgctttaactcctgg

SEQ ID NO: 142316 - DNA, 101 bp, Homo sapiens
ggagtggaaaaattttcaagtaacattaacgaaaagaagagccatgcaggaaagtgatgaagcattgggcccaacaatgatgagttggaatgcagttgaaa

SEQ ID NO: 142317 - DNA, 100 bp, Homo sapiens
tgcggacatgctgggtggatccggatcgcatggaagacgcagcctggccgcgctctcccaagagaagaagaaggaggttcctgctgtgccagaaaccctt

SEQ ID NO: 142318 - DNA, 140 bp, Homo sapiens
tgcagcgctctcgtcttctgcggctctcggtgccctctccttttcgtttccggaaacatgaagttccacctggtgccaagcatcaacaccatgagtggcagtcaggagctgcagtggatggtacagcctcatttcctggg

SEQ ID NO: 142319 - DNA, 127 bp, Homo sapiens
ctcctgtgacctgcatgtactgggggattcgcagggaggatgtcgggacaccccggaagctgggaaatggggttgagcattcatgatggtacctggaagtcagcaatttatggttttggagatcaga

SEQ ID NO: 142320 - DNA, 82 bp, Homo sapiens
ctccagcgccctggcctccctcaccttggacacctcgcttggatcaccgaagtggccttggagtacaacaactgtcatgggg

SEQ ID NO: 142321 - DNA, 98 bp, Homo sapiens
tgagcaatgcagaatgctttatccagggtgcttggagaagatgtcagaatcagcttgaacgggtctttttacgacttggccatgctgaaacagatgaa

SEQ ID NO: 142322 - DNA, 100 bp, Homo sapiens
ctcagagcatggcgagagggactggatgacagccaagaagttctggaagccagaacactctgctccagccaaggtggtgagggcagctgttcctaaacag

SEQ ID NO: 142323 - DNA, 75 bp, Homo sapiens
tgtgtctttggaaagtgcgtttacagtaaggcaccatacaggaagattacttgagagagctgctgacaaccatgg

SEQ ID NO: 142324 - DNA, 137 bp, Homo sapiens
agatgataaagacttcaaatggaaattagatgcaatattgaaaaacgtgcccaatttgttacacatggggtgttcctgaaaagaaggtacttccaatcaccgtccccaagtcaccagcctttgcattgaagaacaga

SEQ ID NO: 142325 - DNA, 100 bp, Homo sapiens
ctttttagagatcgttttgatggatatatcttccttgacagcaaagttgaccactgaaaaacacacatactatctgactgcagattctcccaatatattg

SEQ ID NO: 142326 - DNA, 107 bp, Homo sapiens
ttgtggcctgaagcctccagcgtccacacgaaaccagatttgcctgaaaatggctcggccaagttcaaccaaatttgtatcctactgtggggcttcaaacaccagga

SEQ ID NO: 142327 - DNA, 50 bp, Homo sapiens
gagaactatagcaatctggttttcttggttgaaaacaatcctcgaacagg

SEQ ID NO: 142328 - DNA, 74 bp, Homo sapiens
gggtcctcaagcagcacgtgggtgaaagaaacttccacgccttctaccaagctcagctgtcgcaggccctggag

SEQ ID NO: 142329 - DNA, 87 bp, Homo sapiens
cgtgagctgcggcaggacggctggaggttttcaaatggaacattttgatgcatcacttagtacctatttcaaggcattgctaggccc

SEQ ID NO: 142330 - DNA, 90 bp, Homo sapiens
gagtcatattatcgacgtagttaaagcccactagcctaaagccgggcggactgcgctgccactgcagagccccgccatggaagacacgcc

SEQ ID NO: 142331 - DNA, 75 bp, Homo sapiens
atggctcaaagaaagatgattatgctttatatgaattggttaaatgcaattttgatacagaagaagcattgagaa

SEQ ID NO: 142332 - DNA, 83 bp, Homo sapiens
gcccgctcacctgcgctgtgatgcctgcagagctgtggcttaccagaaaaagtcgctggagtcgatcaactctaggctccaac

SEQ ID NO: 142333 - DNA, 74 bp, Homo sapiens
acccctccaaaaacagtcctggacgaccacacgcagaccctctttcaggttcgtgctggccgtgggcagcgccg

SEQ ID NO: 142334 - DNA, 100 bp, Homo sapiens
cctgagcccgtgcctgtcttcagatcttcacagcacagttcctgggaaggtggagccaccagcctctccttggtgtggtggacacaggcctattcatcaa

SEQ ID NO: 142335 - DNA, 83 bp, Homo sapiens
acctggtccagctgcccgcaggggtgacaatgcagatcttcgtgaagactctgactggtaagaccatcaccctcgaggttgag

SEQ ID NO: 142336 - DNA, 115 bp, Homo sapiens
gccaaaaatgcacaattctatctcttgggcaatcttcacggggctggctgctctgtgtctcttccaagtggcggagcgagggctactgcacagctagcagagtcgtggcgaggag

SEQ ID NO: 142337 - DNA, 100 bp, Homo sapiens
ctcggggccatgattgcacccttgcacttcctggaggtgaaactgggcaagaggccccagcccgtgaaaagtgagatgccatggacaatattaccaggca

SEQ ID NO: 142338 - DNA, 83 bp, Homo sapiens
ttacagaggagcccatggcatcatagttgtgtatgatgtgacagatcaggtttatttccaaagttgaagaagtcttgaatgac

SEQ ID NO: 142339 - DNA, 105 bp, Homo sapiens
gttacctgctgctgccggccacgcgcctcttccgcgccctctcagcaaaatgatgcttcaacacccaggccaggtctctgcctcggaagtgagtgcttctgccat

SEQ ID NO: 142340 - DNA, 75 bp, Homo sapiens
gcctcgctgtccctgcggcttctggggagccctatgagtttgtctctctggaatggctgcaaaagtggttggatg

SEQ ID NO: 142341 - DNA, 100 bp, Homo sapiens
gaatgggccgaggagatggatttgattctcgtggcaaacgtgaatttgataggcatagtggaagtgatagatcgctacatccacgtgacgcagaccttca

SEQ ID NO: 142342 - DNA, 100 bp, Homo sapiens
taccaggagaccaggtcaagcccgaccaatacactgaggccctggcccagagggacaaagctgggtttagagccttcccttgaatgaagaaccctcccca

SEQ ID NO: 142343 - DNA, 117 bp, Homo sapiens
ggggagtggtgcctcatggaaagcgaccccggggtcttcaccgagctcattaaaggattcggtactttgtttgcaagaagttcaagaagatcattatggagcagagatcaggccaag

SEQ ID NO: 142344 - DNA, 100 bp, Homo sapiens
ccagtatcatcaaccggacgccctctcgattgttgaaggaaatcatcttggtggatgatttcagctcaaatgaaattcatctgttgccatgggagcctca

SEQ ID NO: 142345 - DNA, 74 bp, Homo sapiens
gccacaagacatttcctgctcggaaccttgtttactaatttcccagttgatccaagcctcattatagtggttca

SEQ ID NO: 142346 - DNA, 75 bp, Homo sapiens
gactccttcggcagtccacccaccgccgccgcctcccaggtatataatgtttacatggcagggaggcagctgtgt

SEQ ID NO: 142347 - DNA, 90 bp, Homo sapiens
gacatttcttcggcattctgcaacagaacattctagtatgccagtagaaaaaaatatcactttagaaaggccttctaatgtaaatctcac

SEQ ID NO: 142348 - DNA, 50 bp, Homo sapiens
gctgagcagctgctccaggaatatgtatgtgacgcattcccagactcttc

SEQ ID NO: 142349 - DNA, 100 bp, Homo sapiens
caaaatgccaataagaccagatctccaggattacggggcgctgaaagacatcgtgatcaacgcaaacccggcctcccctcccctctccctgcttgtgctg

SEQ ID NO: 142350 - DNA, 96 bp, Homo sapiens
ctcagcagcaaccccgggacccagatctcacattcttgaaggtggcattgaagagcactaagatcggaagatgagtgagcttgaccagttacggca

SEQ ID NO: 142351 - DNA, 50 bp, Homo sapiens
ggagcacccggcgtcccagacaacctgagaaatgccagtggcctgacagc

SEQ ID NO: 142352 - DNA, 75 bp, Homo sapiens
agtaaggctgaaatcattgaagtgcttggagtgcagaactgaaagagcactctgatctacaaatttggaagaacc

SEQ ID NO: 142353 - DNA, 82 bp, Homo sapiens
cctggaaggtgcgtgtggggctgggtctcggagtgggagacgtggagtgcagatgatgattattctccaccgtctaagagac

SEQ ID NO: 142354 - DNA, 74 bp, Homo sapiens
tgggaatcccctgagctgcgccatggccagaggcgaagctgtgctcaggcccgggctggacgcagagccagagc

SEQ ID NO: 142355 - DNA, 50 bp, Homo sapiens
cgttttgaaaatttcatcacctgaggccataggaaaaggatacagagtag

SEQ ID NO: 142356 - DNA, 51 bp, Homo sapiens
tatagagtttgtggacagatttatattgattctgaaggaagatttccatta

SEQ ID NO: 142357 - DNA, 75 bp, Homo sapiens
gtagagcggagcctggcgggcgtgggaacccaggccccgccgaggcggccagtgcaagaagaaacacacgctgct

SEQ ID NO: 142358 - DNA, 117 bp, Homo sapiens
ggcattatccttcagtggggctattggactgacttttcttatgctgggatgtgccttagaggattatgggagtggttattattgagtcgagaatttttgggaaaagtaacacgtgga

SEQ ID NO: 142359 - DNA, 75 bp, Homo sapiens
ctgaggtgactcgactaagagaattaaccagactctttttgatcagaacaatgctgcaaaaaaagaagagtcaga

SEQ ID NO: 142360 - DNA, 73 bp, Homo sapiens
tttgcactgagtgggacatgtttaagttacggcagtcccagtcctactgcacagacacagagtgtcttcagga

SEQ ID NO: 142361 - DNA, 100 bp, Homo sapiens
ccaagctcaacctcaaatcagtactgagggcgtggggtagagcagcggctgccatgctcttctgtggcttcatcatcctggtgatctgtttcatcctctc

SEQ ID NO: 142362 - DNA, 101 bp, Homo sapiens
agctcctcaagaataacggaagggaggcacgcacagaggctgggctgcggtccagatgcgtttgctccatgaattggtctacgcctcccgaaggatgggga

SEQ ID NO: 142363 - DNA, 100 bp, Homo sapiens
cctcccaagtagctgggatcacagaagaagatccttcagagcaacgattgcatagaagcagccttctgatctgaggacccctgcagatcagatattggcc

SEQ ID NO: 142364 - DNA, 75 bp, Homo sapiens
actgtccgagggccaccaggccgccgggggcctgctgcgcccggctagaagaaccacacctcttttggaatatat

SEQ ID NO: 142365 - DNA, 98 bp, Homo sapiens
gatgaagctaatttattgacttggcaagggcttattgttcctgtccttgaatgggcaagagggcacatgaagtacggcgtcctccacattcacggcct

SEQ ID NO: 142366 - DNA, 88 bp, Homo sapiens
ggcaaccactgcagcaaaagccatataataatcattctgaaatgtctgaccttttaaaaggaaagggctcaaaatctccttcgccaag

SEQ ID NO: 142367 - DNA, 100 bp, Homo sapiens
cataccttctatctttgattctccatatcacctacagatccctgcatgtcactgagtccaccatgctttacagaagaagacagatttagtctggaagctc

SEQ ID NO: 142368 - DNA, 90 bp, Homo sapiens
aggagatgtctctggagttctgattgcaggtggttaagctgaaaggccaagtcctgtcggtcatgtatcgatttcgcaccaagaaccggg

SEQ ID NO: 142369 - DNA, 98 bp, Homo sapiens
gtgagcgcgctccctggcaccgttggcccccggagggtcgggcccagttgcggcgagcggggactttgaacatgtcggggatcgccctcagcagactc

SEQ ID NO: 142370 - DNA, 88 bp, Homo sapiens
agcatggcggtggaggacgaggggctccgggtcttccagagcgtgaagatcaagatcgaacccttaggagaaatcttgagagtggaca

SEQ ID NO: 142371 - DNA, 100 bp, Homo sapiens
tccttgagctcggaaccaggatatcaagaccaaatggcatgttggcagataaattgaacatgactccagaagaagctgaaaggtggattgtaaatttgat

SEQ ID NO: 142372 - DNA, 50 bp, Homo sapiens
ggggtctcagccaagaatcaaggcggcaaaagcaaatccgtggagctgga

SEQ ID NO: 142373 - DNA, 74 bp, Homo sapiens
tttgttcaccgccaaccccttcgagcaagacgtggttgttgacctcctgtactggagagacattaagaagactg

SEQ ID NO: 142374 - DNA, 100 bp, Homo sapiens
acacaccggcagccacagctccgaagctggcaagaagagggcgtcccctgcaggagagcttcatgcgcctggtggaggcctgtggggactcggagcaaag

SEQ ID NO: 142375 - DNA, 90 bp, Homo sapiens
cacatcctctgaagaacactgcatggcctttgagggcattcatctgcctcagggttcccccagaccacgctgtccatcctgtttgtcacc

SEQ ID NO: 142376 - DNA, 97 bp, Homo sapiens
ggtcggccctgcggacccggcaggtgactttgattcagaattcctgggctccctgggtgcattctatcattccagttgaaagtttgcttccttccag

SEQ ID NO: 142377 - DNA, 83 bp, Homo sapiens
gtcgggaggaggagagcttcacctgtcggcttggagagatccagccctgccaggagcccggaagtgggtccgcacgagacaga

SEQ ID NO: 142378 - DNA, 80 bp, Homo sapiens
cagagcgccgcgcacttcgtcatgttcttcgcgccctggccgacggtcgcaaggtcctacggtcaagcatccgggagttt

SEQ ID NO: 142379 - DNA, 51 bp, Homo sapiens
acccagaattcaattaaagtggctcaggggatggagaagtttatgtttggg

SEQ ID NO: 142380 - DNA, 100 bp, Homo sapiens
ctgtgaagaaccaggagcggattctccgcgaggtgtgcagagtgctgagaccgattttgggaaccagtaggacattgacatacatccgagaacattctgt

SEQ ID NO: 142381 - DNA, 98 bp, Homo sapiens
ggctctctggtccgcagcggcaacagtaacgaaaaacagggctatgagtaacgaaagaggctttgaaaatgtagaactgggagtcataggaaaaaaga

SEQ ID NO: 142382 - DNA, 100 bp, Homo sapiens
gggattggaggagacacccactttgactccgatgagccatggacgctaggaaatgccaaccatgacggtggacccaagtggagagattgtggaactggcg

SEQ ID NO: 142383 - DNA, 82 bp, Homo sapiens
cagactggatgagcagcaaagggtcctggaaggaaagaatgaagaggccctgcaagacaatgcagatcttcgtgaagactct

SEQ ID NO: 142384 - DNA, 75 bp, Homo sapiens
gtggaaaggatggcccccaaagtgctcctggagctgttggtgggaatatacccctcaggggttattggactggtc

SEQ ID NO: 142385 - DNA, 75 bp, Homo sapiens
caacttattcccttcaattcaagtaacaggtatttaaagcatgtgatgaagatcacaaaggatatctcagcagag

SEQ ID NO: 142386 - DNA, 100 bp, Homo sapiens
gggaagagaagatcatcgagcatttcaaacgtggagtcattgggcgaagctgggccatgctgtttgccagtggaggcttccaggtgaaactctatgacat

SEQ ID NO: 142387 - DNA, 75 bp, Homo sapiens
gtccggggccggctggtgcgcgagacgccgccgagaggaaaccactatcagcggcctgaccccggagaccaccta

SEQ ID NO: 142388 - DNA, 90 bp, Homo sapiens
ctcgataccaacggcaaaaatctcaagaaagaggtgggcaagatcctgtgcactgactgcggttatcaatactctggctgaccatcatca

SEQ ID NO: 142389 - DNA, 75 bp, Homo sapiens
ggtgattgacaaagcaaaaatggaatcccttgatccccttggaaaggacttccagaactgaccaatgagaatgcc

SEQ ID NO: 142390 - DNA, 103 bp, Homo sapiens
acattgtccgcagcttccggcagaccatggaccaatacagcacggagcccggcagatacaggtacaggtttgcagattccgccagcagcacagcaagctctac

SEQ ID NO: 142391 - DNA, 129 bp, Homo sapiens
catctctatggctgtcagaggtgggcggctttgaccgagaggctgctggagctcgtgtttggacgcatggctctgagagattcctctgcgaatctgtttttagctatcaagtggcatccacgcttaaac

SEQ ID NO: 142392 - DNA, 100 bp, Homo sapiens
tacactgatcgtttctgcagctgcagattctgctgttcgactctggtctaaaaagggtccagaagaaatcctttgatgctctgaattttgttacaatgtt

SEQ ID NO: 142393 - DNA, 83 bp, Homo sapiens
cccacgcaaccccagatccatttacactttacagggacacagacccctggcatgtgctaagtgtaacacaggctttaggatcc

SEQ ID NO: 142394 - DNA, 82 bp, Homo sapiens
gccctggcctccctcaccttggacacctcgcttggacccagccgatgcccaatcctgtggcgtactacctgcaccactcacc

SEQ ID NO: 142395 - DNA, 100 bp, Homo sapiens
ctcctgctgctggcgctgatgaccgtgctcttcactatgtgttctctgcccgtaattcatacctccagataatctctctattcaagagtttcaaagaaat

SEQ ID NO: 142396 - DNA, 74 bp, Homo sapiens
aagagactcttcatttagattggattctgaatatcaggaactctccggagtcctttctgtattgttgtgatttt

SEQ ID NO: 142397 - DNA, 75 bp, Homo sapiens
gggcctactcgcccgccaccctgcgctgccgccgctctgaggagttaaaggtttggaatttcagctgggcagctt

SEQ ID NO: 142398 - DNA, 100 bp, Homo sapiens
ccaggcagagtctctgcgttacaaactcctaggagggcttgctgtgcggaggacaaggtgctgcggatgctgtacgtgtgggcgctctgccgagaccagg

SEQ ID NO: 142399 - DNA, 74 bp, Homo sapiens
ccggcctagcgtcctggaattacttcaatcaaattgagaggatccagaatccagatctctggaatagctaccag

SEQ ID NO: 142400 - DNA, 95 bp, Homo sapiens
aaagatcagcgaggagcagcagcagctccagcaggcgctggctcctgctcagagatttcctgttagacaagacaaattagagttttcctactgac

SEQ ID NO: 142401 - DNA, 100 bp, Homo sapiens
ggattggcattaactttgacagactcacacttttggccctgtttgatagtgaaaatgcctcgtgtaaaagcagctcaagctggaagacagagctctgcaa

SEQ ID NO: 142402 - DNA, 75 bp, Homo sapiens
gacctgggcaccagcaggacccgaggccaggagccaggggcccagaagatggcatccacagcgtcacggccttct

SEQ ID NO: 142403 - DNA, 99 bp, Homo sapiens
ctctgatgagtctgcttcgtgtgtggctttacagtgggtaccctgtcagaaaccagcactgggggccctgccacccccacatggaaggagtgtcctatc

SEQ ID NO: 142404 - DNA, 100 bp, Homo sapiens
cgcccacggggacggattggttgttttttcctgtatgaagcggttggcaccactgaagtgaccgaatgagaagcctaaagaaactgttccaactcttgct

SEQ ID NO: 142405 - DNA, 101 bp, Homo sapiens
tggcaggcagaagaaggggaactcctgctgcccactcagatcttggcatatacagaagggctgcatggaaaatggctgttcacagagatacgatcaatctt

SEQ ID NO: 142406 - DNA, 83 bp, Homo sapiens
tcacggccacggcgctggtcaccggggtctgcctggctgcttccagctgccatggtgatgccaccccagcccgtggtcctgat

SEQ ID NO: 142407 - DNA, 100 bp, Homo sapiens
gaaataaagctcctgggcaaggggacgtctgcagctgagtaatcagatcctgtcccttgggagcctctcaaaagatcagatttatccaatgaaactcaag

SEQ ID NO: 142408 - DNA, 100 bp, Homo sapiens
agacgctgtgctcgctggcaccccgaacgggttgcttcccccgctgcgagatcaggatcctcatgaccagccaaagagaagaagaattaggaagcataaa

SEQ ID NO: 142409 - DNA, 75 bp, Homo sapiens
tcactgttgacggcatcatgtttgttatcgattctggttattgcaaattaaaggcttgacaaattcttatgtggg

SEQ ID NO: 142410 - DNA, 82 bp, Homo sapiens
ccggccccagccccatggacctccgagcaggtgtttcccattaaacactaccaggacaaaatcaggccttacatccagctgc

SEQ ID NO: 142411 - DNA, 82 bp, Homo sapiens
gaaaatgcatattatgccacatcgtgtacagctcaaaaaagggaaacctcaaatgaattctgaaggggagataccttccctg

SEQ ID NO: 142412 - DNA, 82 bp, Homo sapiens
tacgcggagggctcggtcaacggcttcatcagcaccttgggtgcctatgaagtcatcaagctaaaaggatataccaactggg

SEQ ID NO: 142413 - DNA, 100 bp, Homo sapiens
ggtgccgagcagagagatcgacaaggcggagggcaagttctggacacactggaaccgggagaccaagcagggtccgttcgctagcattaaagcttttagc

SEQ ID NO: 142414 - DNA, 132 bp, Homo sapiens
agatagcatattatcagaaatgaagatgctaaaagagaagaggcagcagtcagagaaaaccttcatgcctaaggttttcaaggagaccaaacaaaagagagtgtctgttttagaactgagcagcacttttct

SEQ ID NO: 142415 - DNA, 74 bp, Homo sapiens
tgagagatgttaaccaaattcgagaccaagagcgcgcgggtcaaagagaacttccctcagtgtgtgctagaaat

SEQ ID NO: 142416 - DNA, 82 bp, Homo sapiens
cacaggccaaaatcattgtattggattatatgcgtcaggcaggagaagtgacttatgcagatgctcacaagggacgcaaaaa

SEQ ID NO: 142417 - DNA, 100 bp, Homo sapiens
ctgtcgcacggcgtcacctccttctgccccaccctggtcacttccccaccggaggtttatcacaaggctcgtggtcccaagaagcatctgaagcgggtgg

SEQ ID NO: 142418 - DNA, 82 bp, Homo sapiens
agaggagtttccagaccctcagaggcaaagaaagctcatcacagctcacatcctgtttgaccaaactcagagatcaattaag

SEQ ID NO: 142419 - DNA, 98 bp, Homo sapiens
tttgctgcgccctctcagcttcccaagaaagatggatcagatctggagctaagacttagaggtggaggcagccgctgtgctgggacagttgaggtgga

SEQ ID NO: 142420 - DNA, 51 bp, Homo sapiens
ctttgggcagacagcccatggcacagggcttacctactgcagacacctgtc

SEQ ID NO: 142421 - DNA, 100 bp, Homo sapiens
ctgatgaccatgtatcggcggcggtctcccgaggagttcaacccgaaattgggaatctggagtcctcgaaaaattcctaatccagattatttcgaagatg

SEQ ID NO: 142422 - DNA, 76 bp, Homo sapiens
cagggaaggcactcaaaagtggggggcaggaaaggttctccttactatgacaatgtccgccccctctcttaccctg

SEQ ID NO: 142423 - DNA, 100 bp, Homo sapiens
tgaaacctggcacaaaccagatcttggcacgcaggagaatgtcagaatggcggcagtggagcatcgtcattcttcaggattgccctactggccctacctc

SEQ ID NO: 142424 - DNA, 96 bp, Homo sapiens
cggctgccgtacgtggccctcgatgtgctctgcgtgttgctggcttatcaaatatggagttattagcactaacgttctgattgaagatctcctcaa

SEQ ID NO: 142425 - DNA, 50 bp, Homo sapiens
tttcggtcccccccgccccttccccccagtagaacttcatggaggaacac

SEQ ID NO: 142426 - DNA, 75 bp, Homo sapiens
aaactaacagaacatcacaggactatgatcagcttccttcatgttcaggactggctggacaatggcccagaacaa

SEQ ID NO: 142427 - DNA, 75 bp, Homo sapiens
ctgaaaacctcccctgtggaaggttccatgtatgatggcttggctgacaattacaactatgggaccaccagcagg

SEQ ID NO: 142428 - DNA, 51 bp, Homo sapiens
gcggcgccggcctccggggagaaacgtgggagctggtgaggtggccaactt

SEQ ID NO: 142429 - DNA, 100 bp, Homo sapiens
atacaggtatcgggaaggagacagccaaagagctggctcagagaggagctggagtgccttcaggaccatctggatgacttggtggtggagtgtagagata

SEQ ID NO: 142430 - DNA, 83 bp, Homo sapiens
ccaagtggcgaaggagccggctccaagaaacttcagtgctctcaagaaggaaaatatttatgaaaacaataaactggtgagtg

SEQ ID NO: 142431 - DNA, 83 bp, Homo sapiens
cacctctgagaagggagacgacgctgctgggtccgctgagcggggcgacccgaggtactccaaagattcaggtttactcacgt

SEQ ID NO: 142432 - DNA, 100 bp, Homo sapiens
ctcctcctccccaccaccaccatctccatcacccaccaacaacaccacaataatccacagccaaggaagctcttcgtgggcggtcttgactggagcacga

SEQ ID NO: 142433 - DNA, 90 bp, Homo sapiens
aaacttcagaatacttcaagaatagcagaggagcaggcatttctcattgcaattgtggtaccagatgttgagacattatgttcctgggcc

SEQ ID NO: 142434 - DNA, 90 bp, Homo sapiens
ctatgggatgccaccttcagcctctgcaggtgctggagaatctggtaaaagcaccattgtgaagcagatgaggatcctgcatgttaatgg

SEQ ID NO: 142435 - DNA, 74 bp, Homo sapiens
caatacctcattccctaagacttcaccatgaattctggaactgaagacatgctttggacagaaaagtatcaacc

SEQ ID NO: 142436 - DNA, 100 bp, Homo sapiens
cacctttatatatcaaattgcatctctacttgtgaacagattaaggataaatatatgcagtgtgccctgctttacaccagctgtgcagggcagcgtcggc

SEQ ID NO: 142437 - DNA, 97 bp, Homo sapiens
ccttcatgcccaaatcccggaaactccagcgtgtctccagccgtgaatactaagaagtttcagcagtggaatgcctactcttcttataaccggagtg

SEQ ID NO: 142438 - DNA, 82 bp, Homo sapiens
taaagaacatccacagaatagacctgaagacaaaaatccagaagtacaagcagtctggatcaaaatacttgctggatggtgg

SEQ ID NO: 142439 - DNA, 99 bp, Homo sapiens
cccaccctccaactttgcgacggaaatgtgtcatcgaaagccagacaggggcaagtgtccgagtggtgaatcagctacttacagagatggatggtctgg

SEQ ID NO: 142440 - DNA, 90 bp, Homo sapiens
cccgtggatccgctggagcggagccggccgtacgcggtgctgcgagggcagaacctggggcctgcttccgcgaggccaacatcccaaccc

SEQ ID NO: 142441 - DNA, 89 bp, Homo sapiens
gaaccagactgggggcgagctgagcacctgtagtcaatcacacgcagttttcggctttgtgagaaaccttaccatcaaacacgatggcc

SEQ ID NO: 142442 - DNA, 75 bp, Homo sapiens
ttggcagagacccactgtctggtattgggagagttgctgctacatctttaggaaatttgactaaccatggttctg

SEQ ID NO: 142443 - DNA, 138 bp, Homo sapiens
cgtgcatggcgaagtccccggagaactctaccctggaggagattctggggcagtatcaacggagtctccggggtgctggagaatctggtaaaagcaccattgtgaagcagatgaggatcctgcatgttaatgggttta

SEQ ID NO: 142444 - DNA, 100 bp, Homo sapiens
atgagcaggtgcttcggagtgcttatgccaagaggaacagcagtgtaaatgactcagttgtcgccgtgatcctgaaggcgctgacctacgacgagaagcg

SEQ ID NO: 142445 - DNA, 50 bp, Homo sapiens
aaaaggactgaagtggggttaagaattctggaagttacggtcagtctggg

SEQ ID NO: 142446 - DNA, 98 bp, Homo sapiens
cagacgacaagcacacactatggcgctgaaacggattaataagcacaacaagccgctctactcctttgaagacaatgcagactatgtgtacgatgtca

SEQ ID NO: 142447 - DNA, 100 bp, Homo sapiens
ccctgggctggtgaagtacatgaactcagggccggttgtggccatggacagtggggggtggacgcccatcatctgggctgcagagcacaagcacatcgag

SEQ ID NO: 142448 - DNA, 102 bp, Homo sapiens
tagacttaaatagcaatcagagaacaagaggagagttgaagagagcaatggacatcttttcagcagaccgcccaggtttgctgaatgtgaagcccattgaag

SEQ ID NO: 142449 - DNA, 75 bp, Homo sapiens
gaaaatttcgatattgaagtgtcaaaatccatagatggaaaagatgatgaagttgcggagaataatgaacatgat

SEQ ID NO: 142450 - DNA, 75 bp, Homo sapiens
aagagtccccgatgtttgtagaccttatagtccgatgggtggtccttttattcctgctgctcctgtcaaaactgc

SEQ ID NO: 142451 - DNA, 100 bp, Homo sapiens
cagcagtggcagcatggagaaacgcaagtccatgtacacgcgagattataagaagcttgggttcattgttgaaaggattgttgacaaaaggaaaaataaa

SEQ ID NO: 142452 - DNA, 98 bp, Homo sapiens
ctgtgggctcctggggagatggaggggccggggctgggctcgcaggcttgtctggagcgggaaagactactgtgagcatggccttggaggagtacctg

SEQ ID NO: 142453 - DNA, 82 bp, Homo sapiens
gaaaacctgcagaagaactggcttcgggaattttaccaggcgtccgagctgggccacagcctgaacgagaacgtcctcaagc

SEQ ID NO: 142454 - DNA, 82 bp, Homo sapiens
agtgggcggccagagcgccggcaagagctcggtgctggagaacttcgtgggccgggcgcggatggcgtcggggcgccccgag

SEQ ID NO: 142455 - DNA, 82 bp, Homo sapiens
aatggccgtcctgaacctgttatcacctggagacaccttacaccaactgctggagaatgctggaggagaccttaaggatggc

SEQ ID NO: 142456 - DNA, 101 bp, Homo sapiens
ccatcacctacccgcagggcctggcactggccaaggagattggaagccgcactcagccacaagctgtgcggaaagctataggattatcaagatcaaaaggt

SEQ ID NO: 142457 - DNA, 75 bp, Homo sapiens
cttcttgacaatttgcttgcgcttataaggaatggaagttggatacactttgtgacttgtacgagacactgacca

SEQ ID NO: 142458 - DNA, 96 bp, Homo sapiens
ctggcctgttcaccagagatctcccacctcagtgtgggttccatcttacttgtcaccacaagctccgggtggataaggcagctgctgcagcagcgg

SEQ ID NO: 142459 - DNA, 87 bp, Homo sapiens
cagagattttttagtctaaatgatgggcagtcatggtcccagaaacgtcactatcaagaagttgtggacatcggatacccaaggaga

SEQ ID NO: 142460 - DNA, 97 bp, Homo sapiens
gaaatgtcagctcttccgcagtgattgaagctttgataaatgaaatcttcctaagtatagatggtctgtcttctgctgatcccaactctgattggaa

SEQ ID NO: 142461 - DNA, 100 bp, Homo sapiens
ctcgcccgtcagtggttataataagataacaacgaacttgatgcaagtgataggtttgccaaggtcagacctctcatcatccggatgaactgcaatttcc

SEQ ID NO: 142462 - DNA, 82 bp, Homo sapiens
agcgaatagattatcaaggaaggccatcaggtggtgatcgtggcagaggtggccctggtggcatgcggggaggaagaggtgg

SEQ ID NO: 142463 - DNA, 75 bp, Homo sapiens
aaaaagtatgatggattacagcaacagttgtcttcagtagaaaggagcagtcattatggcgaaccttggctgctg

SEQ ID NO: 142464 - DNA, 100 bp, Homo sapiens
ttctttttgaaagctgcctgcggcaaaggaacaggcctttgagagcagccagaagtacaaagaggggaagtacatcattgaactcaaccacatgatcaaa

SEQ ID NO: 142465 - DNA, 75 bp, Homo sapiens
acagaagtatgatcccactttcaaaggacccatttacaatagtgttgaatatgaaacattcgatatattggagga

SEQ ID NO: 142466 - DNA, 101 bp, Homo sapiens
acttgctgccttgccactatgaaggcctcattgctacgatttcagagtaccctggtaatagctgagcatgcaaatgattccctagcacccattactttaaa

SEQ ID NO: 142467 - DNA, 75 bp, Homo sapiens
gcacaaagaagaaactgcaacaatggccaagctgacagaatccatgagacctgatcccaaccttgaagaaagtcc

SEQ ID NO: 142468 - DNA, 75 bp, Homo sapiens
gccaaccgtcacttctatctgtcgcgccaggaccagcagctgcaagctttcttcctggtggcagatgacatcatg

SEQ ID NO: 142469 - DNA, 82 bp, Homo sapiens
cagcgcagagtgccctacaactacctgcagcgggcctacatcaagaacttggctggagaagtcattttcaaattcaggcaac

SEQ ID NO: 142470 - DNA, 83 bp, Homo sapiens
gtcctcacctcgctactcgcttgcctacccgccggcccgcgggtctacttcctcaaaggttttgagcaaaattttggactgtg

SEQ ID NO: 142471 - DNA, 103 bp, Homo sapiens
ccggcgctctcctggctcccttctgccccagctccgtctcggcggcggcgggttagagcctggcaatgccgtttgggtgtgtgactctgggcgacaagaagaa

SEQ ID NO: 142472 - DNA, 82 bp, Homo sapiens
atctcgcacgtgacccccctccctcttcaaggattttttatcaagcagaaatgcatcgaacaacgagaatcaagatcactga

SEQ ID NO: 142473 - DNA, 101 bp, Homo sapiens
gtctgtgcaacaatggcttcatgcaccacgggatttatttaatggggatgtgttcaaggcaagagcgaattcagaaggatatcgacgtcgtgatccagaag

SEQ ID NO: 142474 - DNA, 75 bp, Homo sapiens
tcacactgcctgaggccaaagataagcagattatgagcttacagaaagcctggcctacattttactctttttgga

SEQ ID NO: 142475 - DNA, 100 bp, Homo sapiens
aagctccgttgactaccgtggagagatcataatttggggttcaagattccaggtgtacacttaaagcgttctgggaatatgaatcccttctgcaccctgg

SEQ ID NO: 142476 - DNA, 83 bp, Homo sapiens
gaagatctgggtgcccgtggaccacaggccctcgttgcccagatgcgatcagtgggtgaccgcggctgcgagggactttgtca

SEQ ID NO: 142477 - DNA, 76 bp, Homo sapiens
caaggaagaaattgttcagttcttctcagagcctgatccggggatggcctctgcctccaccacaatgcatactacc

SEQ ID NO: 142478 - DNA, 51 bp, Homo sapiens
gtgtggggcggtcccggccccgcagtcaccttcaggccattcagaggagga

SEQ ID NO: 142479 - DNA, 90 bp, Homo sapiens
gacggggaggagatcccggtgcagaagaacatcctggcggcggccagcccgtacatcaggtgtaccttgaaagacttttaacatacgcag

SEQ ID NO: 142480 - DNA, 75 bp, Homo sapiens
cttcggcaagatccagatcgggatttacgtggagatcaagcgcagcgatggctgatcagctgaccgaagaacaga

SEQ ID NO: 142481 - DNA, 75 bp, Homo sapiens
tggttagagaagaattttccaaatgaatttgcaaaacttactgtaggggaaggcaaagaggaaattgtgaaggtg

SEQ ID NO: 142482 - DNA, 100 bp, Homo sapiens
agaggaactcagccctgattgcggggaaggtgtggctcattgactttaatccatttggtgaagtcacagattcactgctgttcacctgggaagaactgat

SEQ ID NO: 142483 - DNA, 75 bp, Homo sapiens
tcgacagtaacccgtttgccgacccggatctcaacaatcccttcaaggctgatcagctgaccgaagaacagattg

SEQ ID NO: 142484 - DNA, 75 bp, Homo sapiens
tccagtttgatgtttactacaaggcttacagtggaacacctctaacagaagaaaaggagaaaatagtctgggtca

SEQ ID NO: 142485 - DNA, 82 bp, Homo sapiens
gaatgaaggctgagtacgatgcagtgaaggccaaggcccagctgcaagctttcttcctggtggcagatgacatcatggattc

SEQ ID NO: 142486 - DNA, 75 bp, Homo sapiens
ctaagatgaagggctaccctcactggcctgccagggtcgcaatggaagaagagatcgccgcgctggtcattgaca

SEQ ID NO: 142487 - DNA, 90 bp, Homo sapiens
cggccatggcgtacgcctatctcttcaagtacatcataatcggcgacacaggcctgccgaggaggaactgaagacgaagaacatggatga

SEQ ID NO: 142488 - DNA, 80 bp, Homo sapiens
actgctgcctctgtcactcctggtgaccagcattcaagcctgtggacatctctacagcaatgagtgaacgggcacttgct

SEQ ID NO: 142489 - DNA, 97 bp, Homo sapiens
gatatgtcagctttgtctttaaaaggtgatcaaggatctctctaggagctgacactcgaaccttcacgacccattcggatttttccaggactcagga

SEQ ID NO: 142490 - DNA, 100 bp, Homo sapiens
gtggcaggactttaagtggttgaaatacatcgtctacaaggagagagtggccactccccacctgtcctgcctttgtgtgcctctgtgtctttgctgggtg

SEQ ID NO: 142491 - DNA, 83 bp, Homo sapiens
gcgcaagcccgacggcaccctcgtctccttcaccgccgacttcaagaaggagtgcctgtgaagaaaacggggtattgccctga

SEQ ID NO: 142492 - DNA, 105 bp, Homo sapiens
agaactggaaaaaaacatgtcggatgaagagaaacaggtgaccaagaatatggcccaggtgaccaaagccctggacaaggccctgagcaccatggacctgcagaa

SEQ ID NO: 142493 - DNA, 96 bp, Homo sapiens
atagttatggcaaaagtctatcaaacagcaagcactgacaagcagcacattctcaagagcacacagatatggccgcgtggaaagtgtcaaaattct

SEQ ID NO: 142494 - DNA, 83 bp, Homo sapiens
atcaagcctcaggagctgctggtacaatgactcttcttgcttttcacctaagttgaataagcaccctgtgcactttaatctcc

SEQ ID NO: 142495 - DNA, 73 bp, Homo sapiens
tgcacatcgcacccaggtggttcagctcgcatagtgtggtggacttgctttgtgaagagacagttcatgaaca

SEQ ID NO: 142496 - DNA, 88 bp, Homo sapiens
gggagaggagtcggcctattgcctccattctagaggaagtgaagaagctttctgagcaggatcttaagattgaaagtgatgttcaaga

SEQ ID NO: 142497 - DNA, 80 bp, Homo sapiens
cagcggcatctttggcttcagcgtgtcccggtgccaagaagctctgccctcagtgcaacacgatcacagcgcccggagac

SEQ ID NO: 142498 - DNA, 100 bp, Homo sapiens
tgatacacctaccagtccagttaccagtggacttccattattctttgtgataacagtaactgccataaagcaggccttcaatcaagcaggggcagggccg

SEQ ID NO: 142499 - DNA, 97 bp, Homo sapiens
tgattcccggaccctggaagagaagagggtggctaatgattaaggttcttgattattacagacctctttctgaaaagcccggaattggtacaagcca

SEQ ID NO: 142500 - DNA, 100 bp, Homo sapiens
cagtttcgggaccacctggaggaggtgttgaaaggggtggacgccctgcttcatctggcccgccagaatcgggctgtggcccgcacagcccagaatgaac

SEQ ID NO: 142501 - DNA, 99 bp, Homo sapiens
ttcgctaagaacccagggcagaaaggtttaggtgctcatggaaacaacctcattgctgttctagccaaatacatctaccacaaacatgaccctgctttg

SEQ ID NO: 142502 - DNA, 89 bp, Homo sapiens
cgcgctactctctctttctggcctggaggctatccagccggttcaagctctacgttcgtgacatcaaacctcctgttgggccatttccg

SEQ ID NO: 142503 - DNA, 100 bp, Homo sapiens
gggtccgctgagcggggcgacccgagcaatgtagtagaaaagtgtgttactcatgcctcccgtgctgagagagctttactgattgacgaggtttgctgcc

SEQ ID NO: 142504 - DNA, 96 bp, Homo sapiens
tggcgggtcacagggaggaggtagagggcgtgggggatatgacaaggatggaagaggtcctatgacaggatcaagtccaagtcaaggtccttgttg

SEQ ID NO: 142505 - DNA, 82 bp, Homo sapiens
tggcagccgcggatctcaccgccgctcaggaccatcatcaaagaggggatgctgaccaaacagaacaattcattccagcgat

SEQ ID NO: 142506 - DNA, 100 bp, Homo sapiens
gtggctcaccgggcagcgtgggtgagcggcgcagcggcggcagcggagagcgagagaggggagcagatcctttcccggagttcagttatgggtgtgagag

SEQ ID NO: 142507 - DNA, 78 bp, Homo sapiens
gggagggggcgttagccccgcgcagccgccggcgtcgccgccatggacctagggcagcgggtggcatgagacgtggga

SEQ ID NO: 142508 - DNA, 75 bp, Homo sapiens
tgggcaccttgcgcttcttgcagtcggcagaaaccactaatactagcctcttgcaggtgcaactggaatgcagtt

SEQ ID NO: 142509 - DNA, 100 bp, Homo sapiens
cgggaccgccaggccaccaccggccgcctcagccatggacgcgtccctggagaagaatttcgctaaggagtttgtgatcagtgatcggaaggagctggag

SEQ ID NO: 142510 - DNA, 99 bp, Homo sapiens
gcagttcccgcggcagcacggaggcctggaggctggaacacatgacagctggaggcaattgccagaccttctcatcttccactgtcatctcctactcca

SEQ ID NO: 142511 - DNA, 75 bp, Homo sapiens
caaggacagaatcaccagcactggctgaaggtaaagaagcagattttagatgaaaagatctactgccctcctgag

SEQ ID NO: 142512 - DNA, 100 bp, Homo sapiens
gtcaatgtgacagctcatatgtaacaaaatactatgggtcatatttaaaggtggtaagttttcttcatacagttcttttgtgtgacaaactggatttcag

SEQ ID NO: 142513 - DNA, 100 bp, Homo sapiens
attacttaatattgtttctgtgacagatcgtaaagctgaaaattgaaatcatgaaagtagacaggactaaactgaagaagacacctactgaggctgtaag

SEQ ID NO: 142514 - DNA, 100 bp, Homo sapiens
cccttcatgcatcacacccatccagctggctcctatgaagttcattatgctgacatatcttttcatgttggcctggctgggagtcacggctttcacctca

SEQ ID NO: 142515 - DNA, 75 bp, Homo sapiens
tttaggctgctgtaaaacaggaaatgagatactgtggaacactccctagacaataaagatggtcctgtctgcctt

SEQ ID NO: 142516 - DNA, 96 bp, Homo sapiens
tcaccgccaaccccttcgagcaagacgtggaatgaagaatccccacctgagggccaaactagcagaggtgttggaagcagtgatgccccacctgga

SEQ ID NO: 142517 - DNA, 90 bp, Homo sapiens
ctgagcacaagtacagatcttgaagctgctgttgctgatgctttgtgctgatctgggacgatgcccgggagggcaaggactccaaggaga

SEQ ID NO: 142518 - DNA, 83 bp, Homo sapiens
gaactggaggctgagtacgacagcctcaaacaggagctggagcagctcaaagaggaagttctactacatcaccctgctacgag

SEQ ID NO: 142519 - DNA, 100 bp, Homo sapiens
accagcgccaaggagaatgtcaacgtggaagaggtgggtttggaggatttgggacaacatctacaactgcaggttctgcattcagcttttctgccccaac

SEQ ID NO: 142520 - DNA, 82 bp, Homo sapiens
cctccgcggctgccctgcgccagaagatgctcatgaagcagcaggaccggctggaggagcgagagcaggacattgaggacca

SEQ ID NO: 142521 - DNA, 74 bp, Homo sapiens
tcgcgggcgggagaacggaaaactcccaacttcctgatttctgcatgaatccccagacagtgctgctcctgcgg

SEQ ID NO: 142522 - DNA, 98 bp, Homo sapiens
agcacatcaggtccacccatctggccgggcagtaccttcttcaagagaaatggagcccttctccaagatgaacacaatgacgtacagaagaaaacctt

SEQ ID NO: 142523 - DNA, 103 bp, Homo sapiens
tgacagcaaggctggcatggaggaagatcacacctacgagaggctggaagatggcagcccccggactgggcagatcttcaagcagacctacagcaagttcgac

SEQ ID NO: 142524 - DNA, 75 bp, Homo sapiens
caccctcagctcccagtcctacagacacagctgaagacctaactgcagcatgtctgtatttggagatggggcctc

SEQ ID NO: 142525 - DNA, 101 bp, Homo sapiens
actgctgtattgcagaacagcctcagcctgtttgggccccatggtatccctgtgacagtatttcccaaaagggaatataaggataaaccagaagccatgcc

SEQ ID NO: 142526 - DNA, 90 bp, Homo sapiens
ttctggcggccatggtgttgctgctgtactccttctccgggagtgcatccgccccaacccttttccccctcgtctcctgtgagaattccc

SEQ ID NO: 142527 - DNA, 88 bp, Homo sapiens
cccgcgcggggcacgatgttgaacatgtggaagagttttggaggctggaaaggcaaatgttattttaccaaaaagttcaccaagtgga

SEQ ID NO: 142528 - DNA, 100 bp, Homo sapiens
atctgcccctgcccagatccggaagaacggtgaatttcccccgcagatcatcaatgctgtggtactgttgattttattgagtgccctggctgatccggat

SEQ ID NO: 142529 - DNA, 100 bp, Homo sapiens
ctggctctgacgtctcttcctgggctgctgagccctctttcctgagaacgtcggagcggaaggatgaggacgtagagatgtttctgccctctggggccaa

SEQ ID NO: 142530 - DNA, 100 bp, Homo sapiens
ggaaattcctcaggaaatggaaagctccaggccatgcccgcagccggaggtgtgctctaccagccctcgggaccagccagcttccccagcaccttcagcc

SEQ ID NO: 142531 - DNA, 83 bp, Homo sapiens
cgagcccgggaagtgcgttttgggaaatcctcattgacgattcaatttgttgaaggccaatttgtggactcctacgatccaac

SEQ ID NO: 142532 - DNA, 100 bp, Homo sapiens
gatgatgagcagtttgtttctctgtatggcacagaagaatatttgatgtagatgagtgtgcccaagggctagatgactgccatgccgacgccctgtgtca

SEQ ID NO: 142533 - DNA, 115 bp, Homo sapiens
tggcagaaacagaggactaattttggcagttctaaatttgaatttgagccagatgacgtgtactactgtggaataaagtacatcaaagatgatgtcatcttaaatgagccctctg

SEQ ID NO: 142534 - DNA, 100 bp, Homo sapiens
ggaagcctagcggagctcagtgtggcagctgctggcctctgggccggttgaaatcacaaagattagacacctttttagataggtgttcttcagcaccact

SEQ ID NO: 142535 - DNA, 75 bp, Homo sapiens
cctcaccgcaacattccttatccaatcccttaccgacatatctgaagagatggattaagaatgctttggattaag

SEQ ID NO: 142536 - DNA, 87 bp, Homo sapiens
tgaacaaggccacgaatgtcgcccactggacaacccccagtctcaaatgcattactctgttcactcggagagcccgccggctgcctg

SEQ ID NO: 142537 - DNA, 83 bp, Homo sapiens
cttcaatgagtaaacatattcctataacgaaggaggcccaacttcattcaataaggagcctgacggatttatcccagacggta

SEQ ID NO: 142538 - DNA, 90 bp, Homo sapiens
ctaagtctgtttgcaaagcacctgaactgcgatgtgcattttgtaagcactttggagccactatcaaatgctgtgaagagaaatgtaccc

SEQ ID NO: 142539 - DNA, 75 bp, Homo sapiens
tgccgtccatgcggaagatcgtcgccacctggatgctggaggttatgaagacagtatggagtttccagaccatag

SEQ ID NO: 142540 - DNA, 100 bp, Homo sapiens
ttcggaggcgaattctacagttactacaagtgcaagctggcgctggagcagcagcagcgtcacagactgggatgagcaacgggctgaaggcacgtttccc

SEQ ID NO: 142541 - DNA, 101 bp, Homo sapiens
cgagaacaccttcctgtgtgttatctcatctcatcctcacagcagcccagagaggacttctgcacggacctggccgtctccagtgccaacttcattcccac

SEQ ID NO: 142542 - DNA, 75 bp, Homo sapiens
agcagctaatgttactcccacaaaggttttcctttggaatatggataaatacaccatgatacggaaactagaagg

SEQ ID NO: 142543 - DNA, 100 bp, Homo sapiens
actaattgaaattaacctcagtgagcttcagcgcctgctcctggtcatcactaaccagatttacttggagtacatgtgaaagaaaacgtcagtctgcctg

SEQ ID NO: 142544 - DNA, 100 bp, Homo sapiens
ttccctgagagccatcttcggactcctcagatgccaccaacaactccatccagcagtttcttcaccaagatcctggtgtatagcctggaagcaggacgcc

SEQ ID NO: 142545 - DNA, 100 bp, Homo sapiens
aggggcccggcgtctgcctcgagactgaagaccggtgttcagaatgccaggattccctcaccaactggtactatgagaaggatgggaagctctactgccc

SEQ ID NO: 142546 - DNA, 50 bp, Homo sapiens
gtccggggcccagttttccggagttgcgttttcggctttgtgagaaacct

SEQ ID NO: 142547 - DNA, 100 bp, Homo sapiens
ttcttttttcaagtcccttgtgggcaaggatgtggtcgtggaactaaagaatgacctgagtgatgacgaggacgaggaggaggaggaggaaggagaagag

SEQ ID NO: 142548 - DNA, 75 bp, Homo sapiens
cagggagtcgccgctggagaggggctcggcgcccggcggggactgcagtgaaggtggtgtttttaaggctcatct

SEQ ID NO: 142549 - DNA, 75 bp, Homo sapiens
cccaggttgccttggaaaatgccaacgccgtgtctgaagggattccagcagaagttcaccttccacagcaaggag

SEQ ID NO: 142550 - DNA, 82 bp, Homo sapiens
tgttccgcttctcagaggacgccttcaacaccaccttcatctccaccatcgatatccttggaacagaagatcttattgtgga

SEQ ID NO: 142551 - DNA, 75 bp, Homo sapiens
atgaattggatatcaagccagagaagtgcccgaggagagttaacagttcaaatctgaacatcaatgatgtactag

SEQ ID NO: 142552 - DNA, 145 bp, Homo sapiens
taggaaaactaggaatctatgatgctgatggtgatggagattttgatgtggatgatgccaaagttttattaggtggatatcatccagtgaaaattggagacctcttcaatggccggtatcatgttattagaaagcttggatgggg

SEQ ID NO: 142553 - DNA, 100 bp, Homo sapiens
attggagcaaaaagaggttgattacagcggcctcagggttcaggcaatgcaaataaggtgctctggggccaggtgccaccggccattgtccaggcagctg

SEQ ID NO: 142554 - DNA, 83 bp, Homo sapiens
cggcggaggcggaggcggccggcccgggtcatcatcagatttgaaatatttaaagtggatacaaaactatttcagcaatgcag

SEQ ID NO: 142555 - DNA, 75 bp, Homo sapiens
caagaaatcaaaataaaggaaacacatttcatatactgcagggaaatgtttcaacgtgcgcaagcgttgcggcgg

SEQ ID NO: 142556 - DNA, 100 bp, Homo sapiens
cgacagccaccgccgcccccaacgtccatgcctgattatctacatctgcagctcccctgatgccttcagaaccctcatgctcctggccctggaagctggc

SEQ ID NO: 142557 - DNA, 74 bp, Homo sapiens
caaaatcactcagcagatgccaaagaaaacactttcctggataaaaaagaaaacattccagatgcatgatccag

SEQ ID NO: 142558 - DNA, 83 bp, Homo sapiens
ttcaggcaatttccctgagaaccgtttacttccagaagattggtggagcttgatctgaagtaagactttgaccccgacgcagg

SEQ ID NO: 142559 - DNA, 132 bp, Homo sapiens
ggacagtgaaggaggaagctgagaagccagagagagaggccaaagagcagcaccagaagctgtgggaaggtggccaaacaggagaagaagaagaagaagacaggtcgggctaagcggcggatgcagtacaac

SEQ ID NO: 142560 - DNA, 100 bp, Homo sapiens
cagtgtttaaatcagagccagaattttgcagaagaaatgaaagtgagaaagatcagtctaaagaaaaggagaagaaagtgaaaaaaacaattccttcctg

SEQ ID NO: 142561 - DNA, 75 bp, Homo sapiens
ggaaaacatcgtggccaacacggtcttgctgaaagccagggaaggttacctagggtatgaattaatacagacttg

SEQ ID NO: 142562 - DNA, 123 bp, Homo sapiens
cctggagctgtgaggagattcgggccgtcaccctgcctcccctgcgtcccgccaccggccgcttctgtcctcgggaggagagagcgatggcttttttcacccagaaggccagccccagcggct

SEQ ID NO: 142563 - DNA, 100 bp, Homo sapiens
aatgcttgcctcatgtactggagctatactgacatcagtaataggcagcacacttctgcttttgttccttcatcaggacgaatttactcttttgggcttg

SEQ ID NO: 142564 - DNA, 90 bp, Homo sapiens
caaagatccatttgtcattccactggttcaaaccttgtactactcagctgatcacaagctgcttgatgggaacctactagatggacaggc

SEQ ID NO: 142565 - DNA, 85 bp, Homo sapiens
aagctggccaaagcctgcccagacggctcacctgtgcgggatggaacaaaaggtgcccctgtagacaatggccctcgtgtctgcc

SEQ ID NO: 142566 - DNA, 90 bp, Homo sapiens
aaatcagtgattgtctggagttggagatcagaatctgctgttcacatcccggctgtgacgtcgtgtccgagacggggatttgccatgttg

SEQ ID NO: 142567 - DNA, 100 bp, Homo sapiens
gcgggatcccagcctcaggcgtgcgcggacggtgtgcggactaccatgccggggatgaagcgagactgcgggggtgctgcggccgtcctgggggccttca

SEQ ID NO: 142568 - DNA, 83 bp, Homo sapiens
tgcgctgttccacctcattcaacttcagtaaaatgtttattggaggcttgagctgggatacaagcaaaaaagatctgacagag

SEQ ID NO: 142569 - DNA, 90 bp, Homo sapiens
acctttgataaaagaaaaactttaggagatctccggcagtcaatatttcaggcccttcataacacaaggcttttatctgcttattccgcc

SEQ ID NO: 142570 - DNA, 122 bp, Homo sapiens
tctggataccatcaaagccgagatactggctactgatgtgtctgtggaggatgaggaagggactggaagccccaaggcaatggtggcttgctatccgggaaatggaacaggttatgttcgcc

SEQ ID NO: 142571 - DNA, 82 bp, Homo sapiens
tgagagccggacgggcactgggcgactctgtgcctcgctgaggagttgacgctggtgaagacattcatgatttaaacaccag

SEQ ID NO: 142572 - DNA, 50 bp, Homo sapiens
cctgcttctcacctacctgatagaccttcccctcctccaatgagtcccgc

SEQ ID NO: 142573 - DNA, 90 bp, Homo sapiens
ctgaagaaggccaggtgtgagtcacagcgagggctctacgtagcggcccagggagcctgccgagaacatgctgtttgagagcatccagga

SEQ ID NO: 142574 - DNA, 90 bp, Homo sapiens
cgcgcgaagcgagcgagaaggcacggagtcgccgcggagcgcaggccacggaaaggtatgatatatttgatccaagacagtccattccag

SEQ ID NO: 142575 - DNA, 98 bp, Homo sapiens
agaatgaaaagggagccttgctccttagttctatagagctggaggagctgaaagctgagaatggtattatagctgcaaatgtccttgtattctgttta

SEQ ID NO: 142576 - DNA, 80 bp, Homo sapiens
cggcttgtcctggctcttgccctcatcctggttctggaatcctcagttcaaggcaggtaacttgcagactcacttacgac

SEQ ID NO: 142577 - DNA, 98 bp, Homo sapiens
ggtcacagtaaggccaaaaatgtgcatactcacagagttagagagagggatggtgattggcagtatggagttactcaggccttccctcacacagagga

SEQ ID NO: 142578 - DNA, 82 bp, Homo sapiens
aggccgcgggcgcgcgggcgcgactcggcggcggcgtctttttggatggaagcacagtatatgcagagagtgtgattctgac

SEQ ID NO: 142579 - DNA, 83 bp, Homo sapiens
aaggactcgactttcacattggaacaaccttctttccagtgctaaaggatctctgatctggcatttgacattgtgcagcaaag

SEQ ID NO: 142580 - DNA, 111 bp, Homo sapiens
ctggcatattagcgctagccctgcagacagaggtgtgctgacgacctgctacaacagaagtttttagaacttcagccataaaaatgggcagaattttccttgatcatatcg

SEQ ID NO: 142581 - DNA, 75 bp, Homo sapiens
cggagccccccaccccctcagcagggccggagacctaggatccgggagacagtggaccctggagagaggacccag

SEQ ID NO: 142582 - DNA, 97 bp, Homo sapiens
ccgagagccgcggctccgtgtttctggaaagtgacagcaggtcggcagcttcactcccgagggtgccgcgagcccaggcggcgaacacccggtaccc

SEQ ID NO: 142583 - DNA, 90 bp, Homo sapiens
attgtgggccggcccaccaagaagtaccaaacccagtgccaggagggagccatggatttgctgcgggagctgaaggccatgcctatcacg

SEQ ID NO: 142584 - DNA, 87 bp, Homo sapiens
gaaacctgctcagccccgacaatgtggtccggaaacaggcagaggatttatgagcagcttccagaagtacagaaaaagagagaagaa

SEQ ID NO: 142585 - DNA, 98 bp, Homo sapiens
ggaggtttggttctcccggcagcagcccgacgcaaaccaaggatctggggatcttcgcactatcccaagaaatcatttctaccagttcggagagatcc

SEQ ID NO: 142586 - DNA, 75 bp, Homo sapiens
ggaagagttgtggcgaggcagatcctgccccgtggccgcggccgtctcgtagcgctgtgcctgggcgtcggcaga

SEQ ID NO: 142587 - DNA, 98 bp, Homo sapiens
gaaattgtgtgtccatcttggttttgagctctgctctgcctgtgatgtcgagaacactggggaggtatggaaacattggaacttcaaaaggacatcaa

SEQ ID NO: 142588 - DNA, 82 bp, Homo sapiens
ccgccaccacccactccggacacaggccgtaagttcatcatcgccaacgctcgggtggagaactgcgccgtcatctactgca

SEQ ID NO: 142589 - DNA, 82 bp, Homo sapiens
ccgctggtcgctgccggaaatggccaggtgtggacactgccagcggctgcagccgacttggaatgacctgggagacaaatac

SEQ ID NO: 142590 - DNA, 97 bp, Homo sapiens
ctggacgcgggcaaatgcgaggacaagaccctgacagccagcccccaagcacctgggtccccagaggattctgagggtgtccccctcatcagcctgc

SEQ ID NO: 142591 - DNA, 102 bp, Homo sapiens
ccgggatcgtgaccgagaccgtgaccgagagcgtgaccgagagcgcgaatatcgtcatcgttagaagattgtcctgggtcacataatgccagctgagcgtaa

SEQ ID NO: 142592 - DNA, 83 bp, Homo sapiens
gtcggcttgtcctggctcttgccctcatcctggttctggaatcctcagttcaagtgaaggagaacgacctgctcagaatgaga

SEQ ID NO: 142593 - DNA, 74 bp, Homo sapiens
gctcacctgtgcgggatggaacaaaaggaacaatatgaactggtctacaatgctgtattagaactatttaagag

SEQ ID NO: 142594 - DNA, 80 bp, Homo sapiens
gctccgtgggaaccacgagtgtgccagcatcaaccgcatctatggtttctacgatgagtctttgtgtccctggtgatgtt

SEQ ID NO: 142595 - DNA, 96 bp, Homo sapiens
gctgtactttgccaagcaccaccaagatgcctacatccgggacttaaaatctccaaatcagagagatgaaattgcaggagcccgagcttcactgaa

SEQ ID NO: 142596 - DNA, 100 bp, Homo sapiens
catgcattgtgggttactggaggaacccgacatggattccacaggtttgtggtaaatatgccagctctagaacacatgaatcagattttacacatcttgt

SEQ ID NO: 142597 - DNA, 74 bp, Homo sapiens
gcagctgcttgccggccccaacacggaccttggtctcctgacaaacacagcccctgaggggccccgggagtggc

SEQ ID NO: 142598 - DNA, 75 bp, Homo sapiens
tgatgatcctgaagtacagaaagacatatccacaagaaggtgctgtggtggttctccctgcagactctcagcagc

SEQ ID NO: 142599 - DNA, 82 bp, Homo sapiens
gaagaactgagtgtggacagagcacctgtcctcgccagcgcccagctggaagctgagtaaagatgacggcgccttgaggtaa

SEQ ID NO: 142600 - DNA, 100 bp, Homo sapiens
gccggggcagcgctcctggcgctgctggctgcgctctgcccggcgagtcgggctctggaggaaaagaaagataaactcatcctgaaagtcgctgttgttc

SEQ ID NO: 142601 - DNA, 82 bp, Homo sapiens
cgatgttggactcatagtcactgccagaaagaaatacagtccatactgcccggaatctctgcaaagctgacttggacttcag

SEQ ID NO: 142602 - DNA, 98 bp, Homo sapiens
tgcgtgttgtccacccaagatggagttcctcctggggaacccgttcagcacaccagtggggcagtgcctcggccctcgggaccaaggatcacgtcatg

SEQ ID NO: 142603 - DNA, 100 bp, Homo sapiens
ctgaagattcatacgcagctggcagatattatcatagttgctgcagaggccagtaatagtagccatgagtctcgtattggtctagctgaggggttggaat

SEQ ID NO: 142604 - DNA, 100 bp, Homo sapiens
cagggctccccgccccacccggcctgataaagcgcgccgactgggctacaaggccaagcaaggtcccagcatttgagggtgatgatggattctgtgtgtt

SEQ ID NO: 142605 - DNA, 100 bp, Homo sapiens
gcgcctgatgggtcgaggcggacgcgcggctgcgtcaggaccccttccttctcctcaatcaccagtgccaacagtgttgatcttcctgcctgtttcttct

SEQ ID NO: 142606 - DNA, 50 bp, Homo sapiens
acagtatttactgagagctcatcagctttaccaacagggacgcttatgtc

SEQ ID NO: 142607 - DNA, 100 bp, Homo sapiens
ggccttcctgtcccgcgggaagcggcaggagccgccgccgacacctgaaggtgtggccgacgacgatgccctcgctgaggagcgcatgcggagaggccag

SEQ ID NO: 142608 - DNA, 100 bp, Homo sapiens
ctacaaacggaacttgccgcgtcgaggactgtcgggaccgtataatagacgctggccccaaaggaaactactctcgatttatgaatcacagctgccagcc

SEQ ID NO: 142609 - DNA, 101 bp, Homo sapiens
gaagtactgagcctgttggaggaactggcccggaaacaggaggacgtccagggtggcgcgtggctgctgagcccccgcctgtgcgacgccctcatggccat

SEQ ID NO: 142610 - DNA, 100 bp, Homo sapiens
atactgactagtttcacatctctttggtggcagggcccagccccgaaccagacaagggacccctcaaggagcttcattctagcaggagaaaattgagaag

SEQ ID NO: 142611 - DNA, 100 bp, Homo sapiens
gccttggcgtaccttgagcagagatggagtctcgccctgtcacccaggctggagtgcaatggcgtgatctcggcgcacttcaacctcgcctcccaggttc

SEQ ID NO: 142612 - DNA, 75 bp, Homo sapiens
gttcattgtttgtcaccacaaaaaggacagctatttgatggcattgaatgtgaatttcccatatttttcctttat

SEQ ID NO: 142613 - DNA, 100 bp, Homo sapiens
gtgctgggtgcagatgcagtgtggctctggatagcaccttatggacagggatgtgagctcatttcaactcctgatcaagaccacactgactttactaagt

SEQ ID NO: 142614 - DNA, 50 bp, Homo sapiens
gccaccgtcatcatgtctgaccaggaaatctactttcttcaatgtgttaa

SEQ ID NO: 142615 - DNA, 100 bp, Homo sapiens
tggtattgtggaaattcccagaggactttggagaccaggaaagaaggattgtccaaatgtggaagatgcaagcaggcattttactgcaatgtggagtgtc

SEQ ID NO: 142616 - DNA, 107 bp, Homo sapiens
tctacctcctgcgaggcctcccgggctccgggaaaactacactggccagggggatatgagactttctactcggaatatcctgagtgttgcgtggatgtaaaacccat

SEQ ID NO: 142617 - DNA, 100 bp, Homo sapiens
gacacaggttcccacgctggcgcccggcgaccgggtggggctgcgaaatcgcccggaaatgggagcttgcgcgaagcgctgatcggcccgctggggaagc

SEQ ID NO: 142618 - DNA, 75 bp, Homo sapiens
cctgctgtgcctggggatgcccccggccctgtgcattgcttccccgggcgctgcctggacaggcctgcctgcgtg

SEQ ID NO: 142619 - DNA, 100 bp, Homo sapiens
ctggtcatggcgcagccgggcccggcttcccagcctgacggtcagttgctctcccctgaaggaagagtattctcggatttcacctcagaggaggaagaat

SEQ ID NO: 142620 - DNA, 82 bp, Homo sapiens
ttcgcccctcgcgtccggagtccccgtggccaggcaccatgactcctgtgaggatgcagcactccctggcaggtcagaccta

SEQ ID NO: 142621 - DNA, 100 bp, Homo sapiens
gcaggacccacctcgccttcctcccggcgtggcagatgctccaggggaagacaggaagacccccagcgaatcaaatagcccctcttcatcctccctctca

SEQ ID NO: 142622 - DNA, 101 bp, Homo sapiens
gctgttgctgggctcggcgtgctgcggaagcagttcaggtacttttgaagcattctgcagatgttaatgctcgagacaaaaattggcaaacccctttacat

SEQ ID NO: 142623 - DNA, 75 bp, Homo sapiens
gacctctatagaggagcgtgtggctcatctacgaagagtccaggtgctctgtggatgtgtatagttttaaacccc

SEQ ID NO: 142624 - DNA, 98 bp, Homo sapiens
ccaatcacatccaaagagtggtactggaaccaggcctggagctgctgaagactgctattgggaaagctggctacactgataaggtggtcatcggcatg

SEQ ID NO: 142625 - DNA, 46 bp, Homo sapiens
ggaggacgccagatacctcaaaagtgctctccacctgcctgaagca

SEQ ID NO: 142626 - DNA, 100 bp, Homo sapiens
agtttctagaacgttttccggagttggaagccaggaaacctcggactttgctgaacccaccacctgcctcaccaacaaccagcactcctgaaccggatac

SEQ ID NO: 142627 - DNA, 100 bp, Homo sapiens
ctgggcagaaaggctaccatcaccgcactgagatcaacaagaagaacctagaagtcggaatccggaagaagatcgaacatgacgtggtgatgaaagccag

SEQ ID NO: 142628 - DNA, 100 bp, Homo sapiens
caatcttgtgtgggcactgaagggggactacaggttcgagagagattacacatgctgtgacttggttgtaaaaataaaggaatgtaagaagagtgaggac

SEQ ID NO: 142629 - DNA, 83 bp, Homo sapiens
agccgatccagcctgcggagcctgtggggcagagcctggagacacaggccccatccttcccaatggggacacttcagggagcg

SEQ ID NO: 142630 - DNA, 74 bp, Homo sapiens
tttatcaaaaacatgattacagggacatctcagttggatttatctacgggtacgtggctgaacagttcgggtgg

SEQ ID NO: 142631 - DNA, 50 bp, Homo sapiens
agacagacgctttgcatatggcaggttcctcagtggtgtgctgaatattg

SEQ ID NO: 142632 - DNA, 83 bp, Homo sapiens
ctctctcgctgtgagacatgtctgagactcctgctcagtgtagcattaagtctcaaaccatgaattatgtgggacagctggct

SEQ ID NO: 142633 - DNA, 100 bp, Homo sapiens
ctacgctatgccctgctgtagtcacaggaggtgtagagaggaccccgggacatctgaaagccaggaaatgataggaatgatgtcacaggtggaagaagag

SEQ ID NO: 142634 - DNA, 100 bp, Homo sapiens
cggcggcgctggggcccccagaagtgatcgctcagctggagaacgcggctaaagttctgatgactttgaagattatccaatgagaattttatatgacctt

SEQ ID NO: 142635 - DNA, 100 bp, Homo sapiens
tcatggtgcctggctgccaggcaggttattaatgctgcactggctttagcagcaaaaccacagagtaaactggcccaagagaacatggatctttttaaag

SEQ ID NO: 142636 - DNA, 83 bp, Homo sapiens
ggtcaactttgggcctggtcccgccaagctgccgcactcagtggcagctgccaacaagaagcattagaacaaaccatgctggg

SEQ ID NO: 142637 - DNA, 100 bp, Homo sapiens
gtctacctgttttggggaggctgctgcgacgaagagttccctcagcctccggccttgtgtgtccgactcggcagcagtgagagcagagctgacatctgat

SEQ ID NO: 142638 - DNA, 100 bp, Homo sapiens
gttctatctggtacccaaacaagcaggtccagcggcgactctggctggagtatgaagacatcagtaaagagtcgtccttgtctactccactaccaaatgt

SEQ ID NO: 142639 - DNA, 88 bp, Homo sapiens
gcccttgggcgcgcagatacccgcggtgcaccgcctgctgggagcgccgctcaagaatgattacggacctgaagccaaagaacaagat

SEQ ID NO: 142640 - DNA, 75 bp, Homo sapiens
agtcccttgtgtatggcaaagtggatagcttctggaagcttcagaggatgattccgaagaagacggagaccataa

SEQ ID NO: 142641 - DNA, 82 bp, Homo sapiens
ctttccgccctaatggaggtctccagtttcgatgaggagcgggaaggcctcctgcaccctggagaccgtgtgggaagacaag

SEQ ID NO: 142642 - DNA, 75 bp, Homo sapiens
agattcagaggatgacagttgcaaggaactgtacctggggaatgaattgtaggtttatacaccctggagtgaacg

SEQ ID NO: 142643 - DNA, 75 bp, Homo sapiens
atgaatgcaggcatcttacagactatttcaccttcaaacaggaatggtcactttccgtatcctgatccttcccag

SEQ ID NO: 142644 - DNA, 100 bp, Homo sapiens
tcgagatcccctgtgtggccaagaagctggtgtgcggagatgaaggtttttagaacttcagccataaaaatgggcagaattttccttgatcatatcggtg

SEQ ID NO: 142645 - DNA, 48 bp, Homo sapiens
atggtactgaaagtagaggaactggagaataaaggcagccccgttgat

SEQ ID NO: 142646 - DNA, 51 bp, Homo sapiens
tgagggtggagaagggatcagtgctacgcgttatacgcagagcaatgggcg

SEQ ID NO: 142647 - DNA, 50 bp, Homo sapiens
ctggacatcaatgcctttaggaaacgctatgtattagaggaagctgagca

SEQ ID NO: 142648 - DNA, 100 bp, Homo sapiens
ttggcgcctcattgctgtaattttgggaatcctatgcttggtaatactggtgatagctgtggtcctgggtaccatgggcagccaatcctttctttaagtt

SEQ ID NO: 142649 - DNA, 73 bp, Homo sapiens
taagttcgtcgtcttcatcgtcgcggttctgctgccggccaggtcagagcagcccaccatgggatggggaggg

SEQ ID NO: 142650 - DNA, 98 bp, Homo sapiens
ccccggcaccgcgcctgctgccgggttgcgctccgtgcacctcttgcggacctggcgcactgtcatgcctacctggtagaaatgagccagctcctgca

SEQ ID NO: 142651 - DNA, 100 bp, Homo sapiens
cgctgtccctgcggcttctggggggttctgatgactgtcttgtgaaaatatgggcaacagatgatgggaggttgttagctaccttaagaggacatgctgc

SEQ ID NO: 142652 - DNA, 83 bp, Homo sapiens
ctatttccaaagtatgttgcacccaggttgaaatcacaaagattagacacctttttagataggtgttcttcagcaccactgac

SEQ ID NO: 142653 - DNA, 98 bp, Homo sapiens
cagccaccaaggagatttggagcccattttagaggcatctgttctatcttcccatcataaaaaaaaatgcactcggtgatggaaagagagccactatt

SEQ ID NO: 142654 - DNA, 100 bp, Homo sapiens
gatcaagcggagttcgatgcgagcccccctccatgcgcctgaaggcccgacccagcagccctggcttttccgtgcttacctgcagcgccttctccttcta

SEQ ID NO: 142655 - DNA, 75 bp, Homo sapiens
ccgggagatccgagagctcttcagtgtcagagatggctttggattccccgttctgtgtgctgctgtctggctcct

SEQ ID NO: 142656 - DNA, 83 bp, Homo sapiens
tggtcgttgggaacaagcccacaaggctttaaactccagagaacctcatatgtgtttagtaagagatatttcaaactgctggg

SEQ ID NO: 142657 - DNA, 100 bp, Homo sapiens
atcatggcggatggcccccggtgcaagaggcgcaaacaagccaatcccaggaggaaaaacgatgcctaccttaatgcctctgaaacaaccactctgagcc

SEQ ID NO: 142658 - DNA, 90 bp, Homo sapiens
cccctagaccggtttttagtccattgactatgcagcctaatgattagtgacaagagctggggttaggatccggttggactctgacatcgg

SEQ ID NO: 142659 - DNA, 119 bp, Homo sapiens
ctgcttcaatgtccgcatcgcaaccaccgccctggccatctaccatgtggtctacgacgttcctccatcggtgagcaaggatgtgcccgatggcccactgctgcgtgaggagacctacg

SEQ ID NO: 142660 - DNA, 50 bp, Homo sapiens
gagcaggaggcgcccggcactcgcaggttaacacagaaatctgcctcctg

SEQ ID NO: 142661 - DNA, 75 bp, Homo sapiens
tgagaaccgtttacttccagaagattggtggagcttgatctgaaggaggaggcctcggtggtaccagaagaggag

SEQ ID NO: 142662 - DNA, 50 bp, Homo sapiens
gcaggaatcactaccaagcttctgaccagatctgaaactggacaatgtcc

SEQ ID NO: 142663 - DNA, 100 bp, Homo sapiens
cgtgtccgtggccctcgagttcctcgagcgcgagcacatcaagctcgtgtccatagccaaaactggacaagccaaggcatctgtagccaaagtaaacaaa

SEQ ID NO: 142664 - DNA, 100 bp, Homo sapiens
acatcatgaaggcctgttttgaagagaaggggaataagactgcatctgttcatatgagggcttcctgaagaatgagaaggacaatgccctgctgtctgcc

SEQ ID NO: 142665 - DNA, 83 bp, Homo sapiens
gggtgggttccagctgcccgcacgccccgaccttccatcgtgagaagccctaccactgcaactgggacggctgcggctggaag

SEQ ID NO: 142666 - DNA, 98 bp, Homo sapiens
ttacgggttaattactgtcttctggattcagatcagtggactaaagaggatggacatagaacttccacctctgctgtccctaacctgtttgttccatt

SEQ ID NO: 142667 - DNA, 100 bp, Homo sapiens
tgcaactgctggattgctgcaaggctgagggacgagaacgagaaaatgacagatggcgagacctggacaggaaatgccctcttcagattgaccaaccgag

SEQ ID NO: 142668 - DNA, 100 bp, Homo sapiens
gaatctcaggagagagcagccagagtggtttcccaggcagctgcagacttgaaacagttctgtctgcagaatgctcaacatgaccctctgctgactggag

SEQ ID NO: 142669 - DNA, 98 bp, Homo sapiens
ctgcagcagcaagtcccatcggaggacctccctgccctgtataccgagggaacaggacttcctgatcatgtttgtgcatcacttggtcaccattgggc

SEQ ID NO: 142670 - DNA, 101 bp, Homo sapiens
cagctgttgaaaaatgcggttaaaaaggtgatgggtatctttaagagcagcttattccaagctttgctagggtcgacaagtgcccccaatgatttatggta

SEQ ID NO: 142671 - DNA, 50 bp, Homo sapiens
gaatttccatgtcaacatagtcctggtttcaagacaacagatgaattgtg

SEQ ID NO: 142672 - DNA, 98 bp, Homo sapiens
tgagacccggacagtggcagtgaaacagggcagcaggatgggtgtggaagcagtgatggcacttttggaggggaccccagataccccagcctgtgtag

SEQ ID NO: 142673 - DNA, 100 bp, Homo sapiens
caccttcaaggccgtcagacaaggcgtcttcactcgaggacagctgggcctgatagacatcatcttccagtacattcactgtgatgagatctatgaggca

SEQ ID NO: 142674 - DNA, 75 bp, Homo sapiens
ccgtgtctccaatgacaaacgagatgtaaaagtgtcactgtgatctctctaggagctgacactcgaaccttcacg

SEQ ID NO: 142675 - DNA, 75 bp, Homo sapiens
cgtcatcgagtgtgacgtggtgaaaggattgtcagtggcttcgccccgaggagagctgactgccctgggctgctg

SEQ ID NO: 142676 - DNA, 100 bp, Homo sapiens
gttgagagttcctgtgctgtgtggaattcaacactaatctgctctgaaggaagaggatcaccttccaagacaaaacagtcttcatgggggaaaaatgacg

SEQ ID NO: 142677 - DNA, 100 bp, Homo sapiens
gttttcttatgcttataagagtggaacaggtgttccccccacactggggctcccactactgcgaggagtgacccacgaaggccacagagatggccggggc

SEQ ID NO: 142678 - DNA, 100 bp, Homo sapiens
gccgagtcctagcgcctggcctgcgcgccgctgcccgcgccacaggatcaagcaccccaacattgtagccctggatgacatctatgagagtgggggccac

SEQ ID NO: 142679 - DNA, 95 bp, Homo sapiens
ttcccaaaggtaatgcgatggagataaggttcagggagcaagtttccgaggttggaaagaagtgacttcactgtttaacaaagatgatgagcagc

SEQ ID NO: 142680 - DNA, 71 bp, Homo sapiens
gccgtggtgcgactcatccacctccggctgaagctccaggagctgaagaagaagctaggaaagctcatctg

SEQ ID NO: 142681 - DNA, 98 bp, Homo sapiens
gaaagacaagactggagaccggataatcactataagactgtacaatttgttcaaggaatttttgtagaaaaatacgatcctacgatagaagattctta

SEQ ID NO: 142682 - DNA, 90 bp, Homo sapiens
ggctggtgcttttttatcagggcaagctgtgttccatggcagggaacttttggcagagctcccactatggacaggttgctggaccccgcc

SEQ ID NO: 142683 - DNA, 100 bp, Homo sapiens
tgctaagtgaaaaatcatcaacctttctaatgaaggtcaaggtcagcatctcctcgacgatcaagatctatctctcttcgtagatcaagatcagcttcac

SEQ ID NO: 142684 - DNA, 58 bp, Homo sapiens
gtccacatggagctctcagcataccgtgcaacagctaattatagagatttcttccgtg

SEQ ID NO: 142685 - DNA, 75 bp, Homo sapiens
gtattcgttgacagagctttgatagtcgtaccatatgcagaaggacagtgtgatggtccttagcgcaacccatcg

SEQ ID NO: 142686 - DNA, 84 bp, Homo sapiens
cactttcgccagcccgtgccgcgagcgcggcctgcaggaggtcctgaacgaggctgtgggggccctgatgtaccacaccatcac

SEQ ID NO: 142687 - DNA, 100 bp, Homo sapiens
cttgcccgaggacagagatggcgagcgcccggattggggatgagtatgcggaggacagctctgatgaggaggtaactaggatttctacctcaaccgcgag

SEQ ID NO: 142688 - DNA, 98 bp, Homo sapiens
cggatgatgcagaccatcctgcacttcccccagaaccggaggctgctgccccccgagatgattcctcccaggggttgtgcctatattgttatggttca

SEQ ID NO: 142689 - DNA, 82 bp, Homo sapiens
tcccgccgcgccgcccgtcgggcatggactcgggccgggacttcctgaccctgcacggtatgtgaggagcagcgctgtgagg

SEQ ID NO: 142690 - DNA, 75 bp, Homo sapiens
gaacgggaaggagacgctgcagcgcgcggcctgtgacgagtcctgcaagacgtgctcgggcctgaccaacagaga

SEQ ID NO: 142691 - DNA, 83 bp, Homo sapiens
tccctgtcccgcatcggggacgagctctacctggaacccttggaggacgggctgtccccgccctactccggaccgccccaaag

SEQ ID NO: 142692 - DNA, 97 bp, Homo sapiens
gccgggcccggcttcccagcctgacgatcccaagtgtccttcaagatatcactgtactcatgaagctggtgtacatagtgttgggctaacttggatt

SEQ ID NO: 142693 - DNA, 75 bp, Homo sapiens
aacttgcctggaccagcttaatggttctgacttgaaacccacatgacaccagagatgttccgaacaccattgcat

SEQ ID NO: 142694 - DNA, 100 bp, Homo sapiens
tatgatgattccgttggagtagaagtgtccagcgacagcttctgggagtctgaaccggacggcttttctcatttccacttgtacgtgtgcgctgcttttc

SEQ ID NO: 142695 - DNA, 78 bp, Homo sapiens
tcgccttctgcctggtcgggatcccgccccgcccggagccccggcccccacagtccaaaagaaactcttccttcaaaa

SEQ ID NO: 142696 - DNA, 76 bp, Homo sapiens
cggagctcagttttttcctctcgcacccgacagacgtggactacagggtcatggccaccttcaccgagttctacac

SEQ ID NO: 142697 - DNA, 98 bp, Homo sapiens
cacctcctttgcggagagctgcaagccggtgcagcagccttcagcttttggcagcatgaaagttagcagaactttccgctgtactttttgccatacag

SEQ ID NO: 142698 - DNA, 90 bp, Homo sapiens
gaagatttaacgaatggggttgtgatggcccaggttcttcaaaagatgaaagaccacagcaagattctttcattcgtctcctcctagcct

SEQ ID NO: 142699 - DNA, 100 bp, Homo sapiens
ctgctggcacttcaggctctgtgagccccttcaagatacctatagaggaacttgaggacagagtgtttgtgaattgcaataccagcatcacatgggtaga

SEQ ID NO: 142700 - DNA, 90 bp, Homo sapiens
gcaaacatgctccgccagatcatcggtcaggccaagaagcatccgagcggcgccatgttttggaagtttgacctgcacacaagctcgcac

SEQ ID NO: 142701 - DNA, 114 bp, Homo sapiens
caagccaagtgcagaagcaaagaagcgctggcagtttcaaacgttagagcagccagcgggtacagaatggattttggaagagggagtcaccactggacctccaaggaagccacg

SEQ ID NO: 142702 - DNA, 100 bp, Homo sapiens
ggaagtggtccccgaaggctatttcgccgctggcgtcaggactattttcacgttttaatgccgagaggatgtgatggtggcaggtgggatggagagcatg

SEQ ID NO: 142703 - DNA, 100 bp, Homo sapiens
ctggaattctacacggccttctcccattccttctcccggaacctgattctgacgtacaacttgaggaagagggtttgaattttgggaagattttgaagaa

SEQ ID NO: 142704 - DNA, 100 bp, Homo sapiens
tcaagaatgtgcatgctgctgtggcccgagggaggcagatggaatgggtaccacagaccatgtcatcgtcctggcgtccacgaaccgagctgacattttg

SEQ ID NO: 142705 - DNA, 76 bp, Homo sapiens
ttttattaagactatgtttcacccgtctgaaaagattcctcatttggcgcagttgtgtagcagttgagtaatgctg

SEQ ID NO: 142706 - DNA, 75 bp, Homo sapiens
gtccaggagtacccgaccctcaaggaggaatcattatagattctaaaaatatattttcccttctctgtggacttg

SEQ ID NO: 142707 - DNA, 75 bp, Homo sapiens
aaaacctactgtggatttagcgcataaaattgggaggaagtatgttgagtctaaaaaggacagagtcacagtagt

SEQ ID NO: 142708 - DNA, 75 bp, Homo sapiens
tttatgttgacaaaaattcagctcaggtgtgtgtggtttcagcgcagcatggctgtggtcatccgtttgcaaggt

SEQ ID NO: 142709 - DNA, 113 bp, Homo sapiens
ctcaaaacctggctgctatcagagaagaagggtgtttggggtgtgttttacaaagacacaactcatgtacaaatgggccaagccgaaaatctgtagcgaggaccttgaggggg

SEQ ID NO: 142710 - DNA, 75 bp, Homo sapiens
tgtggaattcagctgctcaaacaccagatggaagaacagtgattattgagcagagttggggaagtcccaaagtaa

SEQ ID NO: 142711 - DNA, 100 bp, Homo sapiens
agcaaaaccatacagggctatgatgctattgtggttgaacaatggacagtcctggaagtttcctgaaatgcagtttttccagcaagaaaatgtgagaaaa

SEQ ID NO: 142712 - DNA, 100 bp, Homo sapiens
agtgtttcgaaaatgtgtgtgaattggatttgatcttccatatggataaggtactccaaagattcaggtttactcacgtcatccagcagagaatggaaag

SEQ ID NO: 142713 - DNA, 100 bp, Homo sapiens
ccctccctgacctgtctcggcctcccgactcctacagtgactccgccgtggtcatggaggagggaagtccgggcgaggttcctgtgctggtggagccccc

SEQ ID NO: 142714 - DNA, 100 bp, Homo sapiens
ctgccgtcttcctatccttacccgacctcagatgctcccttctgctcctggtcatggaaaatggaagatttgcaaaatacaaatattttacccatgtcat

SEQ ID NO: 142715 - DNA, 100 bp, Homo sapiens
gttttctcaaaatggagagaatttctgcaaacaggtcacatctgttcttcagcaaagacttaattcagtgcacaaatgagatgaatgtgaacatcccaca

SEQ ID NO: 142716 - DNA, 50 bp, Homo sapiens
caaccaccagagcactcacacccctgaatcctatgaggaactgagatctc

SEQ ID NO: 142717 - DNA, 50 bp, Homo sapiens
gatgaagtggctccggagatagttgaagtattgataacaccaaggaactc

SEQ ID NO: 142718 - DNA, 100 bp, Homo sapiens
cggcggcgccgaagaggcgactgaggccggacggggcggacggcgacgcagcccgcggcagaaggctgcctgctgtttcccggggagatcatgaaacgag

SEQ ID NO: 142719 - DNA, 75 bp, Homo sapiens
gctggagcgcccagaggcgagccctggtggaggaagagggctgaagtggtactgggaaacatcattaagaagaaa

SEQ ID NO: 142720 - DNA, 82 bp, Homo sapiens
cggcgggtacctgcggccaattcggtggaacgaggacgcggactgcgaaggcagggagtgcatccgccccaacccttttccc

SEQ ID NO: 142721 - DNA, 96 bp, Homo sapiens
tggaagagagcggcggccgctcacaacatgcacagcctggcgacggctgcgatgaagcgttctgtcagccaccctggttcttgcagttcagagagg

SEQ ID NO: 142722 - DNA, 83 bp, Homo sapiens
ggacccctgttagcagagaggacagtctccggaatattctttggagttgaattgctggtccagcagtttaagcaggatccacg

SEQ ID NO: 142723 - DNA, 100 bp, Homo sapiens
accagctacttactgcttatcttcttcatttgaactcatagttcagaagctcctagagactacagacagggtgagttctgcatcctggtacttcctcaat

SEQ ID NO: 142724 - DNA, 75 bp, Homo sapiens
gcctcgtccagcctaggttccacccttttctgggaacgtgagtatcaaccaagggaaggggaagactggcagcgg

SEQ ID NO: 142725 - DNA, 98 bp, Homo sapiens
ggcgaggaggtgggcgcgctggagcaggagcggggccggaactggagccgaggcgcaggtggcgctggagagttaagaaagacgtggacaagggcaca

SEQ ID NO: 142726 - DNA, 75 bp, Homo sapiens
atcgactacaaggagatcgaggtggaagaggcctatggcatgtctgcgttacctttaaatctgataaaaggcact

SEQ ID NO: 142727 - DNA, 83 bp, Homo sapiens
tgcgtgcagaaaagcgaccggcggccacaggtcctgaacgaggctgtgggggccctgatgtaccacaccatcactctcaccag

SEQ ID NO: 142728 - DNA, 100 bp, Homo sapiens
tgttggcctgtaggtttcggcacaagtttcagcgagagaaggagaaaactgccttggttggaaccttgcaggtgcagacaaccatgcgtgaaaacctggc

SEQ ID NO: 142729 - DNA, 75 bp, Homo sapiens
gccaatcacagtccactttggacaggtaaactgtcttgagccccaccctcacctgcctgtgctggcaaccagtgg

SEQ ID NO: 142730 - DNA, 90 bp, Homo sapiens
ggaaaacctggcccattctgtaaataaaggctccactagaaagcagaagccactggagaaaaacggccaagaggcagacctaggaaatgg

SEQ ID NO: 142731 - DNA, 75 bp, Homo sapiens
gtctcagccttctgagtagctgggacaacagctgtgagccgtgagctttgaggcggtgggatgtgtcagcagaat

SEQ ID NO: 142732 - DNA, 75 bp, Homo sapiens
tgatctacaccatggagaacaagcccatcgtcacctgtcctgaacgaggctgtgggggccctgatgtaccacacc

SEQ ID NO: 142733 - DNA, 78 bp, Homo sapiens
accatgtgctgaaatgtttgacgacactgatggtttggccctcagtaccgcctggagaagcagagcgagcccaatgtc

SEQ ID NO: 142734 - DNA, 98 bp, Homo sapiens
cgctgtccctggagcatcctccgctggagctggagcttgacagtccacaggtcctggctaccctgggaagagacaagaagtaaatgaagaaagaggaa

SEQ ID NO: 142735 - DNA, 98 bp, Homo sapiens
cattgagcttgggtcaggacaattccatttggggaccagagatggacggtcactcagcctatggagcagggagaagagcctgctgagtgcagtgaggc

SEQ ID NO: 142736 - DNA, 83 bp, Homo sapiens
gaggaaaagaattaagaggcaagataattgttttcaagtgttggaaggctgctatggagaaatagagacggggtttcaccatg

SEQ ID NO: 142737 - DNA, 90 bp, Homo sapiens
aaaaacagtaaagatggaaaaccagttattgaatatcaagaggaggagttgttggattttctgccgtctcttggcaaaaatggcaaataa

SEQ ID NO: 142738 - DNA, 82 bp, Homo sapiens
ggaagacggaggtcctctttccttgcctaacgcagccatgacaatgcagatcttcgtgaagactctgactggtaagaccatc

SEQ ID NO: 142739 - DNA, 90 bp, Homo sapiens
aaaaaatggcagctctcagaatgggaagaatgagagaagtcatatgcccggcacaatcgaaagctgctttgcgtcgcagttggagcagca

SEQ ID NO: 142740 - DNA, 100 bp, Homo sapiens
aactcttctggggagaccccgacgtggagtgccgagttgatgctgatgtaacagttataggttctggtcctggaggatatgttgctgctattaaagctgc

SEQ ID NO: 142741 - DNA, 98 bp, Homo sapiens
agacctcgtgcccaaggccaaggggcggaagagcctccagcgcctggagaacaggtgattctgggggtccacttgtctgtaatggtgtgcttcaaggt

SEQ ID NO: 142742 - DNA, 82 bp, Homo sapiens
tgcagccagtagcttggatccttgtgggcatgatccataatcggtttcaaggtcagcccaaggccaaccccactgtcactct

SEQ ID NO: 142743 - DNA, 75 bp, Homo sapiens
gggcaaccactcaggacggcccgaggatccggaaccagtgtatgtggtagaagaccaaagaagagatgagctagg

SEQ ID NO: 142744 - DNA, 75 bp, Homo sapiens
aagttccttatttattaatacctcttcgtatggagtcctttcctatcattcaagctacaacttcaagcagaagag

SEQ ID NO: 142745 - DNA, 98 bp, Homo sapiens
ctatactgaggagttcagtgaaaaactagagggtataactccaccagggaatgctccgactgtcacttcaatgagcagcatcaacaacacagttgcaa

SEQ ID NO: 142746 - DNA, 82 bp, Homo sapiens
tgggtgccgtggcatgtcgatttgtccttcactacaggagatggagttctacatgcggaccttcagacatatgcgcccagag

SEQ ID NO: 142747 - DNA, 74 bp, Homo sapiens
cagcgagctggagccgccggagatcactaaggaggaagagcgagagaagaagttttctagaaggctaaatcaca

SEQ ID NO: 142748 - DNA, 90 bp, Homo sapiens
gccacctgtatcaccatggggattgtgcttcagaaggaaagtggaggataggataagaccatcatcatgtggaaactgaccagggatgag

SEQ ID NO: 142749 - DNA, 100 bp, Homo sapiens
cacagttcgtgagtggagtgattgtgaagatcattagcacagagcctctacctggcaggaaacaagtccggctcggcttattccaggggtgtgtttcgtc

SEQ ID NO: 142750 - DNA, 90 bp, Homo sapiens
gctattcttatagaaaatatggatctttacatgttgaatccttgcagcactaaaatttggtgaaggaatttgactcaatatctcgcttgg

SEQ ID NO: 142751 - DNA, 74 bp, Homo sapiens
tgatgatcacgcagctggctggcttcagtggaccagagcatctttccttgaagaagtacattattgacattgtg

SEQ ID NO: 142752 - DNA, 82 bp, Homo sapiens
cacacaggtagccctggacggcattcagtgttttggctccggtagattgcaaatgacctgctttctttctgttcccgggcgt

SEQ ID NO: 142753 - DNA, 50 bp, Homo sapiens
ctccctggccgtgctgacctctatctctgaagggcacaaatcagaaggca

SEQ ID NO: 142754 - DNA, 100 bp, Homo sapiens
atacaattgatacacttcttagtgtagttgaagatcataaagagttctcctgtgcctcctgttggctctctttgcatctggcctcatccaccgagtctgt

SEQ ID NO: 142755 - DNA, 90 bp, Homo sapiens
gccatatgctcagccgggatacctatgagtgcacctgtcaagtcgggtttacagctcatgcggatgatttattcccatttttcttgagac

SEQ ID NO: 142756 - DNA, 100 bp, Homo sapiens
cgcggagccggagccgcagaggctcccgggctggactcaggcttctcaggagaatgactatcttcaagactgcctcgatgccatccagcaagacttcgtg

SEQ ID NO: 142757 - DNA, 75 bp, Homo sapiens
ctggcctccctcaccttggacacctcgcttggggctgggttacgacccctacaaccctgagctgcccaagccccc

SEQ ID NO: 142758 - DNA, 100 bp, Homo sapiens
ggaaggcagtctttgctacgtacagcaaaagcagcctcgtcttacagcgtgactgcaaagaaaaagacttttgttttgcaaaagaaaagcagctcggtga

SEQ ID NO: 142759 - DNA, 82 bp, Homo sapiens
aaatgtcatgcctctgaaaatgaagttaacccagtatccactccagttgcacttcccacaccagctctttctccaagtttga

SEQ ID NO: 142760 - DNA, 98 bp, Homo sapiens
gaaattctgcaagcacgcttcccgatgccacgttacatcaacacggagcatggaggcagtcaggtttgttgataagccggggcccttcgtgggaccct

SEQ ID NO: 142761 - DNA, 101 bp, Homo sapiens
ctaagtttcctgacgcctcccagccgtgcttcctgttaagcctgtgaaacttgaaatccggcccaactccaccgtgcagtgggaagaagtgtgccggccct

SEQ ID NO: 142762 - DNA, 51 bp, Homo sapiens
attcgcagtggtcgcttcttctccttgtgtcttccatctgaaattgaagtg

SEQ ID NO: 142763 - DNA, 95 bp, Homo sapiens
ctcgcctcctcgcagcagcgccatgcaatggctgccatccggaagaaactggtgattgttggtgatggagcctgtggaaagacatgcttgctcat

SEQ ID NO: 142764 - DNA, 100 bp, Homo sapiens
gtcaagcccacagctctccaaggaggaagatggtccaggctgggagcatccccttagcagcagcctctggctgttttggagtcagcggaagatcaccaag

SEQ ID NO: 142765 - DNA, 75 bp, Homo sapiens
gataaaagggcccctttcgactagcctctgctgaaagaatagcctaacatggcagaccagagacagcgctcactg

SEQ ID NO: 142766 - DNA, 116 bp, Homo sapiens
tcggagaagatgtggtggcttccgtttgttggtggaggaggtggcaggcctcggcggctccccatcaacccgggcagccgggatttaaattcacggtggctgagtcttgtgacagg

SEQ ID NO: 142767 - DNA, 50 bp, Homo sapiens
gccaatcccaggaggaaaaacgtgacctgaccaacggtgcagatgggatg

SEQ ID NO: 142768 - DNA, 99 bp, Homo sapiens
cccagaagatgagaccgcaattcgagaatcaaagggccgggagcgatgaactgtcaagtaatccacctctggctaccatccttattcctcctcatgctc

SEQ ID NO: 142769 - DNA, 50 bp, Homo sapiens
attttgaagacaatcgtcacttatacagatgctctctgtgtgggtatgtg

SEQ ID NO: 142770 - DNA, 75 bp, Homo sapiens
gagctgggtcaccggcttgaggggctgcgtgaggcgcggaggcagataagccatcaccaaactcagaaaatgaac

SEQ ID NO: 142771 - DNA, 90 bp, Homo sapiens
tcaacactctcgccggcttcgccaacatcgaccaggagacctaccgctgtgaactcattgtggtctacatagcctgctccttcaccacgg

SEQ ID NO: 142772 - DNA, 76 bp, Homo sapiens
gaaattctgcggtaaaactcatcagacttcatgactgattaaagagctaaagttgcagacaagatccagctcatca

SEQ ID NO: 142773 - DNA, 73 bp, Homo sapiens
tcggcggccccggcgccggcaaggggacccagtgcgcccgcatcgtcgagttcccgatgggtcccggctcgga

SEQ ID NO: 142774 - DNA, 80 bp, Homo sapiens
ctcggctggtggcaagtattgctgtgggtgctgggacttcccgtccgcggcgtggaggacttcccaagtaagaagcggaa

SEQ ID NO: 142775 - DNA, 90 bp, Homo sapiens
ggctgcgaggagccggcgcggtcgcagtctccacggcgcaggcccacggtagcgcagccgctctgagttgaccacgttgttcctgagcct

SEQ ID NO: 142776 - DNA, 72 bp, Homo sapiens
ggcaagagcggcggtagcgcaggggagattacttttctggaagaacgtgctggccaaagcgctctatgacaa

SEQ ID NO: 142777 - DNA, 82 bp, Homo sapiens
tgaggcggaacaggccgggcaccaaggcgcagaaatgcttcggttacccacagtctttcgccagatgagaccggtgtccagg

SEQ ID NO: 142778 - DNA, 101 bp, Homo sapiens
gcgccgcctcctcccaccctgagcagagccgccgaggatgataaacacccaggacaggtgctggagaatctggtaaaagcaccattgtgaagcagatgagg

SEQ ID NO: 142779 - DNA, 74 bp, Homo sapiens
cacacgccatggagcccgactcccttctggaccaagacgactcctacggaaaatgcccagataatcagagaagt

SEQ ID NO: 142780 - DNA, 100 bp, Homo sapiens
ttgcctaaatgaggaatgtctttcctaccatctaaaatacgaaggtttctggctgggccgcaccattattctctctacacaccacatggatgaagcggac

SEQ ID NO: 142781 - DNA, 97 bp, Homo sapiens
gcctagatgagcgaatttatgtgaaaatgagaaatgaccgagagcttcgaggcagattacatgaagagctaaggagcaaatccaagatctgtgccaa

SEQ ID NO: 142782 - DNA, 50 bp, Homo sapiens
tcaagggtcgtgtgtttgaaggcggcgactggcggcgcgatggacctgac

SEQ ID NO: 142783 - DNA, 75 bp, Homo sapiens
aagcagctgtccgagtcccaggtcaagagcctctgcgagaagtttttggctttcacccccaaccagtgaccaaag

SEQ ID NO: 142784 - DNA, 99 bp, Homo sapiens
agcaccaagggcaaagggacttgtggggagcattgtacctgcccacatggttggttcagcccagcacaggtactactgagcgagtgtgcttgatccagg

SEQ ID NO: 142785 - DNA, 101 bp, Homo sapiens
ctcggggcctccgcagcgacaacatggaggccgtgaagaccttcaatagcgaggtccggcctctttggcctacccccgttggctccgctgccccaggtcga

SEQ ID NO: 142786 - DNA, 100 bp, Homo sapiens
ctttcctcatcatcaaggatcaggaccgcaagtcccgtcttatgggacttgaggccctcaagacatgggagtggtgagccggaactgcacggaggatggc

SEQ ID NO: 142787 - DNA, 74 bp, Homo sapiens
caaaaatcaccaactaccttttagagtgggatgagtactgtaagattgatgttaaaggcatggtgttcacccca

SEQ ID NO: 142788 - DNA, 99 bp, Homo sapiens
ccaggactacagtaaggctgaaatcattgaagtgcttggagtgcagaactgaaagagatctggacgttggtggttggctatgtgttgactgtttcattc

SEQ ID NO: 142789 - DNA, 90 bp, Homo sapiens
cagaagcactggaaaatgctggaattttctatgaagcacaatacaaagaagtaaaagtggtggctaatgagggagatactgagagtgaac

SEQ ID NO: 142790 - DNA, 82 bp, Homo sapiens
cagacggcgacagtggcggcggcgccatggcagggcttgcaggtggagtgaccacctttgtggccctctatgactatgagtc

SEQ ID NO: 142791 - DNA, 129 bp, Homo sapiens
caaaaggcaaactatttcatactcctacgtgaacatccttttaccacagcctcagccacagtgtacaaagataatcaatgctgattcggaggacccaaaatacattatcaacgtaaagcagtttgccaa

SEQ ID NO: 142792 - DNA, 90 bp, Homo sapiens
cgaggccgggaggccgtgcccggaggatgacgcggcatggcaagaactgcaccgcaggggccgtctacacctaccacgagaagaagaagg

SEQ ID NO: 142793 - DNA, 95 bp, Homo sapiens
gcacacagacactgtcactggagtggccttcaacccatcagcgccccaggatttaggtcctgaatatgaaggtatatttaacacttcattgcagt

SEQ ID NO: 142794 - DNA, 81 bp, Homo sapiens
ctcacgctccactgcaacatcacgtcaggttttccttgttcccgcatgttcagccaatcgtgtttaaggagaaactaacaa

SEQ ID NO: 142795 - DNA, 83 bp, Homo sapiens
cggcagcatgtcggtggcggggctgaagaagcagttctacaaggcgagccagatcgcaccccctccctccctggcggagcccc

SEQ ID NO: 142796 - DNA, 82 bp, Homo sapiens
gcccgaagcggatcagccttgtgggatcttagcaaagcaatgtctcaagatggtgcttctcagttccaagaagtcattcggc

SEQ ID NO: 142797 - DNA, 90 bp, Homo sapiens
cgaccgtccgccagtcgtcccgagagcttggggcttccttggtcgcacccaccacctgcctgcccactggtcagccttcagggaccctga

SEQ ID NO: 142798 - DNA, 80 bp, Homo sapiens
tcccttcaggggctcctgcccagcaggaagctggagaagcttcgagagaaggagcgtaagaaggaagccaagcggaagat

SEQ ID NO: 142799 - DNA, 100 bp, Homo sapiens
ccgcagaccagcgcccgaaggccgacacgctggccctgaggcaacggctcatcaggtcgtcaaagtcctacattttagctttcagtgctgaacttccttc

SEQ ID NO: 142800 - DNA, 109 bp, Homo sapiens
tttccgtctcccactttgacttgcacgaggagatgctgtgggtggggagccacgggtttcttgcagaacataaattattaggaaacattaaaaatgtggccaagacagc

SEQ ID NO: 142801 - DNA, 96 bp, Homo sapiens
tgaagaagctctgagcggagttgtgttcttccccagggtgtggatgaatggaacatagctcgcctcaatacagtcttggatgtggttgaagaagag

SEQ ID NO: 142802 - DNA, 98 bp, Homo sapiens
gaagagcaaagctgtcctaggccaaccagagattcatctttcatgcagtgacatgttgataaaaaatgatggctctttgcaagagaagatagcaagca

SEQ ID NO: 142803 - DNA, 100 bp, Homo sapiens
atcttgtgaactcagcacttgtcggcagcagctggaattgattcgtttacagatggagcaaatgcaggccggctgcctaccctccagactgtccgctatg

SEQ ID NO: 142804 - DNA, 98 bp, Homo sapiens
tcagaactgagaagctgtcaccacagagacagggcagggcattgttcatgcactgaccgacctcagcagccccggcatgacctcagggaacggaaact

SEQ ID NO: 142805 - DNA, 100 bp, Homo sapiens
ggagagtatcccgctgttcacctacgggcctgatcaaacttgccttcctgttctccaagaccagatcttcaacttgctgctgagcttgggaagacattac

SEQ ID NO: 142806 - DNA, 75 bp, Homo sapiens
tcgcgagcggctgcggaccatttataaccgcgacttcaagatcaggtacatgtcccagagcaagcacacggaggc

SEQ ID NO: 142807 - DNA, 75 bp, Homo sapiens
tgtcagaggcgggcatgaaatcattttatcagcatttgataactttaaagagctttccccacaaataaaccagag

SEQ ID NO: 142808 - DNA, 100 bp, Homo sapiens
aagcctgtgcagagggcagccatctgtcagaacctccagcatggaagcgtcagcccccgtagcacctctgttaccacgacttctagtgcctctgttacca

SEQ ID NO: 142809 - DNA, 74 bp, Homo sapiens
aggtcatcttatgcagatatgctacatgacaaagacagagaagtgaaagtacttagcattgatcaaagaaattt

SEQ ID NO: 142810 - DNA, 75 bp, Homo sapiens
gtggtcttccagcccatctccggggaagacgtgcgcgatgtgacagcccgaactgtggaaggtgcatcagtgaag

SEQ ID NO: 142811 - DNA, 100 bp, Homo sapiens
tagtacctcctaccattgtcaactgaacttcgagaaaccaagacctctgaatacttcagcctttcccaccatcctttagactacaggattttattaatgg

SEQ ID NO: 142812 - DNA, 75 bp, Homo sapiens
ataaacgaggcgcagcgggtgaagatttcaggtatgctgctgaaagtgggaatcctctacattggtgggcagctg

SEQ ID NO: 142813 - DNA, 100 bp, Homo sapiens
cacagatctcccacctcagcctcatcccggagctcgtcaccaacgaccatgagaaggtggagctcacggcactcaggtttggtgcacctcgatttggagg

SEQ ID NO: 142814 - DNA, 90 bp, Homo sapiens
cggcggccttcgaggaggtcatgaaggacctgagcctgacgcgggccgcgcgggctactatgtgggcatgtgccttgcggcttcagaaaa

SEQ ID NO: 142815 - DNA, 100 bp, Homo sapiens
ctggaatttgattaactcattcaaggttacccagttgggagatgaagaagcaaatcttggtctgcccatcagtccattcatggatcgttcttctcctcaa

SEQ ID NO: 142816 - DNA, 74 bp, Homo sapiens
tggttccaatgctgggattggctgcttttcttccttcctgtgtacagcccttctgaggaggagaagaggaaccc

SEQ ID NO: 142817 - DNA, 105 bp, Homo sapiens
ccgggaagagctgatgagaatgctggcggaggacgagctccgggatgctgtactccttgtctttgcaaacaaacagctcttcacggggatttctgctgccgccac

SEQ ID NO: 142818 - DNA, 75 bp, Homo sapiens
gaattttccacctcctgacacaacaccactcaactatcttgctaatcatggccggttaaatgagtctgaagccag

SEQ ID NO: 142819 - DNA, 97 bp, Homo sapiens
tctcgcgagggttggagttttggcgagagtttgtggaagatggcgcctgttgtgacagggtgttggggcgatgtttcctgactgtggtgcaagtcca

SEQ ID NO: 142820 - DNA, 75 bp, Homo sapiens
tttaaagtgtttgaaagattttgcattcaacattcaggctatcagaagtggaacggatagtgaaagccaatgacc

SEQ ID NO: 142821 - DNA, 75 bp, Homo sapiens
gcaagaagatgctcctgctgctgctgctgctgctggtcccactctaatatctttaatgctagccaaggagtcagg

SEQ ID NO: 142822 - DNA, 74 bp, Homo sapiens
aacgcattgaagactaagaatatgagaaacctgaatccagaaggaatccattacattgggcgtatggaagaggg

SEQ ID NO: 142823 - DNA, 75 bp, Homo sapiens
ctcttgaggttcacagatgatacctttgatccagaacttgcagcaacaatagcaagtctggaaaagtttgaaatt

SEQ ID NO: 142824 - DNA, 75 bp, Homo sapiens
atatatacgatgatggaaacctgctctccattgtgaccagtggaggagctgaccagtgctttggtgcatctaaaa

SEQ ID NO: 142825 - DNA, 102 bp, Homo sapiens
gctacatcacagccctgttaaaggatggctttggctttgcagacagcacagtcttacaggacagagcgggatgccaccagcttgtccaaagggaagttccag

SEQ ID NO: 142826 - DNA, 99 bp, Homo sapiens
aaattctgcaggacagaaatcacagttcatatttagaacacacgcaggacttgaaagatgttactaataatgtccactacgagaactatggaatcagaa

SEQ ID NO: 142827 - DNA, 83 bp, Homo sapiens
ctgaggtgattcgctcccagggagggaaggagacggagactgagtacttcgctgctctggcagcagataatggcagctttaaa

SEQ ID NO: 142828 - DNA, 74 bp, Homo sapiens
agccgacagaggcagacacagaaggccgacaccctgcacctgtgttcctttctgccgaaattctccattcatat

SEQ ID NO: 142829 - DNA, 98 bp, Homo sapiens
cggggtggaggccctgactaccctggaagtagcaggccgcatgcttggagggccaaagaatgtggtgcttcgcctagctgtaaaattttttccacctg

SEQ ID NO: 142830 - DNA, 100 bp, Homo sapiens
ctcgaggggagcgggggcagcatggccccaaaggagagaagggctacccggggattccaccagaacttcagttctgcaggctggaaatccaagatgaagt

SEQ ID NO: 142831 - DNA, 100 bp, Homo sapiens
ggttcgacgactccattttcctcggtgggggcttagcgcactggaggagcggcgggcttcagacaggtcacaaggcacttaaagcattgttgaggtcatt

SEQ ID NO: 142832 - DNA, 75 bp, Homo sapiens
ccaccaagatcctgaagcctggaagcacagctctgaagacacctacggctgggagatggcaacatccgctactac

SEQ ID NO: 142833 - DNA, 97 bp, Homo sapiens
ggccgaggcgcgaacagacggacgcaccggcgagcgccgaggggacaggccgagcgcggggcgccggaggcagaacactcgtgaaactgctcaggcc

SEQ ID NO: 142834 - DNA, 90 bp, Homo sapiens
aagtggttggaaatggcacctatggacaagtctataaggatttttacctcctataactccaccagaaaagttttttctttcccagctgat

SEQ ID NO: 142835 - DNA, 100 bp, Homo sapiens
tgcttggcaaaatcgagcgggccattgtctcacacaggtcccacagcacagaacccggcttggtgctgacactaggccagggcgacgtgggccagctggg

SEQ ID NO: 142836 - DNA, 48 bp, Homo sapiens
gtggataatctggaagacatggacagagatgggattttgccatgttgc

SEQ ID NO: 142837 - DNA, 82 bp, Homo sapiens
gaaaaagcaagctgaagacatcaagaagatcttcgagttcaaagagaccctcggaaccaaattgtggctactaatttgcccc

SEQ ID NO: 142838 - DNA, 100 bp, Homo sapiens
ccttctctgctctacctggaggtctccactctggtcagcaagtatccagacatcagttacagaatgtctgaaggggacagtgtgggagaatccgtccatg

SEQ ID NO: 142839 - DNA, 75 bp, Homo sapiens
agggaatggtgcaggcaggcgctgagaaggacgcgcagtccatctctctcaggaggttcgtaaagtgaatgaaag

SEQ ID NO: 142840 - DNA, 75 bp, Homo sapiens
gtggcttttgaggaagatgtgacaactaccggagccactgaggcggctcccagctgcgttggcgacatggccgac

SEQ ID NO: 142841 - DNA, 101 bp, Homo sapiens
atccgggagagccagaccaggagaggccccttcacagatgtagtcactacaaatcttaaattgcgaaatccatcggatagaaaagtgtgtttcaaagtgaa

SEQ ID NO: 142842 - DNA, 90 bp, Homo sapiens
cgattttgtcaccgttatgtgggaagcgaatccagggatcttctctggatcaagcaatggtggtgaaaaatgtttcgcaagggcaaaaaa

SEQ ID NO: 142843 - DNA, 82 bp, Homo sapiens
tcatattcatcatggacgtgatgttggtgtgttcacatttgatcatggcatgtctcttttagcatcctctgagtggccagaa

SEQ ID NO: 142844 - DNA, 98 bp, Homo sapiens
gaggggggagcggcgttggaggccaccgtttccagctcctctctgctatatgaaatatgggagacgacagaccgtttgtgtgcaatgccccgggctgt

SEQ ID NO: 142845 - DNA, 95 bp, Homo sapiens
ctgcccggggccctcatggacggttggatcagggccgaaggggtccccacggagtctggaccatggaggagcgaggtctggcccccaagttcgac

SEQ ID NO: 142846 - DNA, 50 bp, Homo sapiens
actccttctacaggtgtgtatggaagaggaggctgcaaaatgggcccggg

SEQ ID NO: 142847 - DNA, 82 bp, Homo sapiens
atcagacaggtctcctggagatgaaatgctgtcccaaccttactgggtcacctttggctcttcagagatgcagggacacacg

SEQ ID NO: 142848 - DNA, 74 bp, Homo sapiens
ataattgataacaccctgtaacagctgacacttctcagaacttctggatgagttttcccagaacgtcttgggtc

SEQ ID NO: 142849 - DNA, 75 bp, Homo sapiens
tttcttttgtgcaagatgagcctcaagtgcttctgcattacagaagccagttgagggaagttctccatgaatgta

SEQ ID NO: 142850 - DNA, 100 bp, Homo sapiens
ccgtttctgcgatacctgcctgcaggagttcctcaggtcagaatggcggcagtggagcatcgtcattcttcaggattgccctactggccctacctcacag

SEQ ID NO: 142851 - DNA, 101 bp, Homo sapiens
gccgacaaggaagtgaagaaggcgcatcactcccagctgcgcaaagcttgcgaggtggcgttagatgttctcagtgcagctgagtcttggtgagcagacat

SEQ ID NO: 142852 - DNA, 74 bp, Homo sapiens
tgacacccctacccagaacaacatctttaagcaaatacttccctggacaagaaagccagatgaaactgatctac

SEQ ID NO: 142853 - DNA, 83 bp, Homo sapiens
cgtgtgaagaaagaaggaaactagctcggaccgtgcagatcgaccttcagaagatgcccttggggaagctgagcaaaaggcag

SEQ ID NO: 142854 - DNA, 100 bp, Homo sapiens
tgtgtggcaaacagtgatatcttcagcgaaagtgaaaccagggaggaccagtatgatcatttggatgctgctgacatgacaaaggtagaaaaaagcacaa

SEQ ID NO: 142855 - DNA, 75 bp, Homo sapiens
gattcgcagtggtcgcttcttctccttggctcctgaaggtcaaaccggaggagagactcaccatcgagggagtgc

SEQ ID NO: 142856 - DNA, 50 bp, Homo sapiens
ggagcccccagcgcagcggccgcgatgccacttcaaatgaacaacaagag

SEQ ID NO: 142857 - DNA, 93 bp, Homo sapiens
ttggttgggacgcagtctcttaaatatgataatcagactggatgagctgaacctctcctggtgttttgatttcactgaaaagcatgtacaggt

SEQ ID NO: 142858 - DNA, 101 bp, Homo sapiens
gggggagccggagccgcctgggatgttcagaggactggaatgaaattgaccccattaaaaagaaagaccttcatcacagcaatggagaagagaaagcacaa

SEQ ID NO: 142859 - DNA, 111 bp, Homo sapiens
tacagctgcgggagagccgggtaccggccgtggaagcggccaccgactactgtcagcagctgtgccagacaatgcagatcttcgtgaagactctgactggtaagaccatca

SEQ ID NO: 142860 - DNA, 75 bp, Homo sapiens
cagcagtcaagtatgtcccaaacgtctaacaagttgaaatcatcgcagaaggataaagttcgtcagtttatgatc

SEQ ID NO: 142861 - DNA, 50 bp, Homo sapiens
ctcggccaaatcctgcctcaccaggattgccccctgtgggtcactttctc

SEQ ID NO: 142862 - DNA, 80 bp, Homo sapiens
gtgcacacatgtagagacctttgtatgtgcagtctttgcaagccacatttggaacttttgagtccatcttgagaagctcc

SEQ ID NO: 142863 - DNA, 98 bp, Homo sapiens
tttgctcgagacttgttaacatttccagataatgtagaacattgtgaaacagggcatccgcttcgatcctgaaattccgcaaacactacgactagagt

SEQ ID NO: 142864 - DNA, 75 bp, Homo sapiens
aagactcaggacggacaagcacagtcttcggaaggatcaggagcgtctgggcaagcagctcaagttacgtgcaga

SEQ ID NO: 142865 - DNA, 100 bp, Homo sapiens
caaggactctacttttgacctccctgcagactccattgccccatttcagacagagcgggatgccaccagcttgtccaaagggaagttccaggagctcctg

SEQ ID NO: 142866 - DNA, 101 bp, Homo sapiens
cctggcagccgccttggtagcagcgggtgacatggaaggggcagtacaagcttacgtctctgctcttcagtacaatcctctgtggccagaagagctccgaa

SEQ ID NO: 142867 - DNA, 95 bp, Homo sapiens
ccgtaggagcaggaaatccacaacattctagtatgccagtagaaaaaaatatcactttagaaaggccttctaatgtaaatctcacatgccagttc

SEQ ID NO: 142868 - DNA, 100 bp, Homo sapiens
cccaaccctcgtgcctccctgaaccactccactgcctttaaccctcagcctcagagtcagatgcaggcttcaaggttactgactttttatgatgtttggt

SEQ ID NO: 142869 - DNA, 75 bp, Homo sapiens
cccatcactgccagatgcgagcagttcttccacttggtcaactctgagatgcacaaatggtcaatatgtaaagca

SEQ ID NO: 142870 - DNA, 74 bp, Homo sapiens
cacaggccatgctctggcaaaaactactatactggcaattgctggagaagattttgcaattgttgcttctgata

SEQ ID NO: 142871 - DNA, 96 bp, Homo sapiens
gcaaagcgaaattggtcattctcgctaacaactgcccagctttgagtgtctttggtgcaacactaacaaggcttgtctggactacccagttacaag

SEQ ID NO: 142872 - DNA, 116 bp, Homo sapiens
gtctgcgaaggccgggacccggttccccggcccacagtgggggtgtgcaaacccgagagaactggcaggggaaatgctgtctgtagctgagcacttcctggagcagcagatgcacc

SEQ ID NO: 142873 - DNA, 50 bp, Homo sapiens
ggcagacagaacgggacctgtgtcagattggtccagaaaagggcgtggtg

SEQ ID NO: 142874 - DNA, 87 bp, Homo sapiens
tcccaaacttcttaacccctagaccggtttttagtccattgactatgcagcctaatgatcatgatgctgcgattaatagatatagcc

SEQ ID NO: 142875 - DNA, 96 bp, Homo sapiens
ctgtgggtgcgctccatctcatccaagctgcgaaacttggcaatgcgaaggcccagagcatcctaagaacagctttgtctcctcagcactctgctg

SEQ ID NO: 142876 - DNA, 50 bp, Homo sapiens
cgctgtgtccacagcgttcaagatttcttcagaggccccacagtatcaaa

SEQ ID NO: 142877 - DNA, 100 bp, Homo sapiens
agggagcggagtaccagcacttcatccagcagtgcacaggtccttccatagtgacgccccccaaggacatctggaatgtcactggtgcccaggtgtactt

SEQ ID NO: 142878 - DNA, 100 bp, Homo sapiens
acagtgtatggtgcaaggttgtgagctgtatggagcagttgacacgtagtcactgggaaggatttgcctctggcaatttgaatcaacccatagaagtgac

SEQ ID NO: 142879 - DNA, 100 bp, Homo sapiens
gaagatgctcgatgagagttttcagtggaggaaagaaatttctgtcaatggttgaaatcacaaagattagacacctttttagataggtgttcttcagcac

SEQ ID NO: 142880 - DNA, 83 bp, Homo sapiens
tcatcgtggtagttattgtaaacaatgcagatcttcgtgaagactctgactggtaagaccatcaccctcgaggttgagcccag

SEQ ID NO: 142881 - DNA, 80 bp, Homo sapiens
ctgtggtacttctcgcagtccccgcgcgtggtcatccaggaagctcttcgtgggcggtcttgactggagcacgacccaag

SEQ ID NO: 142882 - DNA, 100 bp, Homo sapiens
ttttccctcagcagtcggatgggggaggactgctttatggacttgcatcaggagtagcaagttgcttatcaagtgtcccacaaatgaaaaaaatttctac

SEQ ID NO: 142883 - DNA, 101 bp, Homo sapiens
cggcgcgatgaccacgctacgggcctttacctgcgacgacctgttccgcttcaacaacatgtagcgggaaggatgaccacgctcacacgacaagacctcaa

SEQ ID NO: 142884 - DNA, 83 bp, Homo sapiens
ctgtcataacaagcaactgtacctctaagtctgtcgcagttagaaggtattggctataaaactgccaaatgtcttgaagcact

SEQ ID NO: 142885 - DNA, 80 bp, Homo sapiens
caactgccgcctcgcctactcactctggagccgattgtcagtggcttcgccccgaggagagctgactgccctgggctgct

SEQ ID NO: 142886 - DNA, 75 bp, Homo sapiens
gggatctctggccaaggagtgtacgggaagtcgagacaacatgagtgtgattttgatctgttttccaaatgcacc

SEQ ID NO: 142887 - DNA, 88 bp, Homo sapiens
cccggacgaaggtactcgcagcacttggagcgcagaaccggccgcgcccgctgtgagccgtgagctttgaggcggtgggatgtgtcag

SEQ ID NO: 142888 - DNA, 111 bp, Homo sapiens
gcaggttcggctggaaggaaccgctctcgcttcgtcctacacttgcgcaaatgtctccggtgtcatggagaaactccagctgggcccagagattctgcagcgggaaaatcc

SEQ ID NO: 142889 - DNA, 75 bp, Homo sapiens
cctttccactggagttgcttcacttagctctacaatcaacccatgtggagtcttttagtcctgctatacagctgc

SEQ ID NO: 142890 - DNA, 50 bp, Homo sapiens
tctatttcttaagatccagggttccagaaaactctctgcagaggaattag

SEQ ID NO: 142891 - DNA, 75 bp, Homo sapiens
ctgccgtgggtaggctgggggcggagactatcgggaagagttctctgtggacattgactcggagctggtggagga

SEQ ID NO: 142892 - DNA, 100 bp, Homo sapiens
gggttattcgagtgaccgagaccgcggccgggaccgaggcccgtggaacacagagcattcctaatgacagtcctgcccggggtgagggcacccattctga

SEQ ID NO: 142893 - DNA, 87 bp, Homo sapiens
tgcgagagcctcctcacttggggtgtttctgtggcctgggactggttagcaccaacaagtcctgctcgatgccacccatcagtttcc

SEQ ID NO: 142894 - DNA, 80 bp, Homo sapiens
ctctggaggaattcaatgatgttactatactggcaattgctggagaagattttgcaattgttgcttctgatactcgattg

SEQ ID NO: 142895 - DNA, 50 bp, Homo sapiens
ccacctgccagtaggccagtcatgctagccgcagagcacacaacattgac

SEQ ID NO: 142896 - DNA, 90 bp, Homo sapiens
caacatccgcgagttcctgcgcggctgcggggcttccctgcggctggagtctgatcccccaggaaagcagctggaaaacaagagcatgtg

SEQ ID NO: 142897 - DNA, 100 bp, Homo sapiens
catcttcagatacttacaaaatacctgcctagagctggaacgttacctccagagcgagccctgctatgtttcagcctcagaaatcaaatttgacagccag

SEQ ID NO: 142898 - DNA, 113 bp, Homo sapiens
tggatacagcctcatgttttcaccagtcacatctcttactactgctagtcgctgcaacactcctctacagtttgagccagtagacaagatttgactctggaggtgacgtctga

SEQ ID NO: 142899 - DNA, 99 bp, Homo sapiens
agtaaaagttgtttctggaattgatctcgccaaaaaggacatctttggagccagttgccgaacaagcaaccggaaaagcttaataggcaatgggcagtc

SEQ ID NO: 142900 - DNA, 98 bp, Homo sapiens
gtggataacgggaggtgaatttccatgtcaacatagtcctggattttcagtcaatgcatcatcggagcgactcaacatgggtgaaatcgagacgttgg

SEQ ID NO: 142901 - DNA, 100 bp, Homo sapiens
ttgttgccgtcccttcgcctccttcaccgccgcagaccccttcaagttctagtcatggtgtttcagtcacctccagtaacacgggcgtgccagatatctc

SEQ ID NO: 142902 - DNA, 100 bp, Homo sapiens
tgtattgaagggtacaagcccaatgacgttgtccggatcctgccctgccgcatgcaaggatctcgtggctcctgtccgtgatcgtaaactgaatacactg

SEQ ID NO: 142903 - DNA, 74 bp, Homo sapiens
aaaaatcaaaaggagttcatgcttatgaatgctcgacttcagagtaaagacaagattgcatcctacagcaaaac

SEQ ID NO: 142904 - DNA, 86 bp, Homo sapiens
ggcaacgacgttccatctgtggaaggacctaccaaccaggtgctggagaatctggtaaaagcaccattgtgaagcagatgaggatc

SEQ ID NO: 142905 - DNA, 74 bp, Homo sapiens
gtcccagaaccagggaggcaagaccttcattgtgggagaccaggccagcaggagatggaaccttccagaagtgg

SEQ ID NO: 142906 - DNA, 100 bp, Homo sapiens
tctacctctacgtgctgagcggcatcggggggctgctgctgctgctgctcattttcatagtgctgtacaaggtactacgacgtccccatcgccaccctgg

SEQ ID NO: 142907 - DNA, 75 bp, Homo sapiens
ttttaggcggtatcaaatggaaagtttttccaaatattcatctgtacagagcattggggagtcagcaatgtccgt

SEQ ID NO: 142908 - DNA, 127 bp, Homo sapiens
aaggcagcttgttatgcagcaaacagtcctagaagaattcttcgaaacattggtacaatgaatacatttaaggagagttgtcatcgaaaataacaagactattctggatatgagtaacactgaggaa

SEQ ID NO: 142909 - DNA, 100 bp, Homo sapiens
tggcattacgtagaatccattgatcctgtcactgtcagtataaactcatggattgaactgttgaaatggatgcagtcagaactgaatgttgaagaagtgg

SEQ ID NO: 142910 - DNA, 88 bp, Homo sapiens
aaaggcctaagaattttggcattggtggaacttgcagaaatctgtgccaagagtgagcgttacattggcactgaaggaggaggcatgg

SEQ ID NO: 142911 - DNA, 82 bp, Homo sapiens
caaagttgatgtctattctcctggagacaaccaagcccaggactggaaaatgcctcggcctcccgaggtgccgggattgcag

SEQ ID NO: 142912 - DNA, 50 bp, Homo sapiens
aatacgaaggtttctggctggaaatcatttctcaagaagttcagttgctg

SEQ ID NO: 142913 - DNA, 83 bp, Homo sapiens
agacgacatgcctggaattcttctccaacgcgacagacgtcgaggttacaggaggttccagtggcatcgggaagtgcattgct

SEQ ID NO: 142914 - DNA, 100 bp, Homo sapiens
gccggccgtgagcctcccgcccaaggagaatgcgctcttcaagcggatcttggttgaactcccaccacctgatcttggaccaagttctgcactaaatcag

SEQ ID NO: 142915 - DNA, 100 bp, Homo sapiens
cggagggagatggtgcgctggctggtcagctgtgccacagagattgactataatgtaactgcaaactccaagctggtcattatcacggctggggcacgtc

SEQ ID NO: 142916 - DNA, 75 bp, Homo sapiens
ggatcggtctcagccgcgcgggtccctggtgctgaaccgcctgcgtccagttgccagcgggggtgggaaagccca

SEQ ID NO: 142917 - DNA, 100 bp, Homo sapiens
ctcatttatgccatttcagctacagtgttcacaaacagtccacaggaagaggttgaactaaagaagttgaaacatttggagaagtctgtggagaagatag

SEQ ID NO: 142918 - DNA, 96 bp, Homo sapiens
agacccccgagaagtacttaaaaaaacattggaattctgcttatctaggtttctaagcatgaattgaggaacagaagaagcagagcagatgatcgg

SEQ ID NO: 142919 - DNA, 100 bp, Homo sapiens
ctctgggtgaggagggaaagatggtgcccaccacatggaggccagcctaggtcttgtatgaaacctgtgagaaaaagtttgccaatccctggtctactgg

SEQ ID NO: 142920 - DNA, 75 bp, Homo sapiens
cttcaacctgtcaaagccttcttaattatgtctgagaaaagtgggtgggcctgatagtcctgattcagtggatcc

SEQ ID NO: 142921 - DNA, 98 bp, Homo sapiens
gtggtgcgtttacaagaagacaaagtacgccttctcccctaggaattctcttccacagcacctgaaagagggcactagctgacatgaataatgatgga

SEQ ID NO: 142922 - DNA, 100 bp, Homo sapiens
cttacaacatggcagacattgacaagggtttgtgaccatgactctggaaagcctagaggaaatacaggatgtcagctgtgcttggaaagaacttaacaga

SEQ ID NO: 142923 - DNA, 109 bp, Homo sapiens
aatgctagatgaaaaacgtgttatggtggatgccaatgaagttccaattcaaaagatgtttgaaaagctgggctgctttgctggctctgcaagaaaatggactagacgc

SEQ ID NO: 142924 - DNA, 105 bp, Homo sapiens
acgtctgctcggagatcatttgggagatccaagagattcagtatcactcgctcccttgatgatcttgagctgcatcttcctcccgtgaggctggccgagctccac

SEQ ID NO: 142925 - DNA, 75 bp, Homo sapiens
cttgttccccaaacaagtgctcctacattctggtacatctccgttcatggatgcattaacagccaatgggacaac

SEQ ID NO: 142926 - DNA, 100 bp, Homo sapiens
gtctgtgactcacccagcaaaggctgccagcctcagctatcgccgctgactgtgcccctgtggaaggaggtttgttgaagaggaccatattccttacata

SEQ ID NO: 142927 - DNA, 82 bp, Homo sapiens
ccctttccacctcgcggcagttcgcacatgattaagtaccggtacatcccgttcacacatgggaagagaaggtacagaggca

SEQ ID NO: 142928 - DNA, 78 bp, Homo sapiens
tggccggaaacttccactttgcccctgggaagagcttccagcagtcccatgtgcacgatggcccactgcgtgaccttg

SEQ ID NO: 142929 - DNA, 98 bp, Homo sapiens
gcggcactgactgatgccatccaagataagaagaacttccgccggcgagaggttcccccaaacaggactcttcctttgaagtatatgtggatactgac

SEQ ID NO: 142930 - DNA, 75 bp, Homo sapiens
agaactcaacacctccctacaaggaccttcctcccaagccagtgaagatagtgatccggggagacaggaacacgg

SEQ ID NO: 142931 - DNA, 100 bp, Homo sapiens
gctgagcagtcctcggggagagcgcgccaagaccgctgcagccgctggctgagtgctggagaatctggtaaaagcaccattgtgaagcagatgaggatcc

SEQ ID NO: 142932 - DNA, 82 bp, Homo sapiens
ggggggtcagagtgccggaccccagcacacagaagccgagacgatatccttggaacagaagatcttattgtggaagtgactt

SEQ ID NO: 142933 - DNA, 50 bp, Homo sapiens
ctgaacggagtgtgcgacggattgggagtgggtgattattgaacaaggat

SEQ ID NO: 142934 - DNA, 119 bp, Homo sapiens
ctctcatctcgctcggctgcgggaaatcgggctgaagcgactgagtccgcgatggagataacgaaggaggcccaacttcattcaataaggagcctgacggatttatcccagacggtaga

SEQ ID NO: 142935 - DNA, 75 bp, Homo sapiens
ggccgaacgatgtgcgagaactgcgcagacctggtggaggtgttaaatgaaaatattaaggctaagacatactgc

SEQ ID NO: 142936 - DNA, 75 bp, Homo sapiens
aaggtggatgacagcagtgaagatatttttcggacgccgcccgatactacattccctgagcccacctgcctgtca

SEQ ID NO: 142937 - DNA, 82 bp, Homo sapiens
catgacaatgactttgagccctaccttactggacagtcaaatcagcatttgacattgtgcagcaaagaaatggttatggaga

SEQ ID NO: 142938 - DNA, 83 bp, Homo sapiens
tgctgcttgacacgtgggtttccaggaccagggaacagctgcctgtggaggaaccgattgtgtccacagatgaggtcatcttc

SEQ ID NO: 142939 - DNA, 75 bp, Homo sapiens
aacccgttcagcacaccagtggggcagtgcctcggggcgatgactataaaaaccacgtgaaatgcataagtgaag

SEQ ID NO: 142940 - DNA, 89 bp, Homo sapiens
gaaagtacggaccataataatcaggagtgaagtcccagggatattctgtgctggtggtcaagaagaatacgtcttatcttatgaaccag

SEQ ID NO: 142941 - DNA, 88 bp, Homo sapiens
ttaccccgttggagcccctgctttccactgatttctctatgaatcatcatcaagaactctgggagaacttttgaattcataaccaagc

SEQ ID NO: 142942 - DNA, 75 bp, Homo sapiens
cagcacttccggtcacgccatcgttgctgccttcttcgtcaagggaaagagtatgccaagggagacagccgatac

SEQ ID NO: 142943 - DNA, 95 bp, Homo sapiens
cgctggcgctgctggaagacgaggagcgcgtcgtgcgcctgggggtgcgcgcctgcgacctgcccgcctgggcattgaatgccccagaggagccc

SEQ ID NO: 142944 - DNA, 98 bp, Homo sapiens
gtgaatctcgtgtctggccacgtgaagacccagctgatcgcccatgacaaagagacgaacaggaggcattgaactcaatcatgaacgatctggtggcc

SEQ ID NO: 142945 - DNA, 98 bp, Homo sapiens
tgcatccgctggtcgctgccggaaatggccagctccagggttccttgaaaagaaaacaggtagttaacctatctcctgccaacagcaagcgacccaat

SEQ ID NO: 142946 - DNA, 126 bp, Homo sapiens
agatatctggagaaactactccttggatgaaattgagaggaacttttgtctacaaaactgataaatttcaaacggaagagagtggcagcatttagaaagaatctaattgaaatgtctgaactggaa

SEQ ID NO: 142947 - DNA, 74 bp, Homo sapiens
gagctaaacaaggattctgaactcttgattcatgatgcctgtcttagatgtcaagctgaaaacaaacaagagga

SEQ ID NO: 142948 - DNA, 75 bp, Homo sapiens
ggaatcgcaaggctcttccctgaccattttctactgtccctgcgcgagtttctgatgaagaattgaaaagaagag

SEQ ID NO: 142949 - DNA, 83 bp, Homo sapiens
gccttagctgtgctcgcgctactctctctttctggcctggaggctatccagcggttgtgagtcccggcccagcccctccaccc

SEQ ID NO: 142950 - DNA, 90 bp, Homo sapiens
gtccttcgggagctccagctggacaaagactctgtgtggcacggatgtggggaagtcctaaaagccaatttgagctggacatcgagccca

SEQ ID NO: 142951 - DNA, 88 bp, Homo sapiens
gtgtttctctgctttggcgtcctgtacgtgaagctcgggtgccaacatcgcctctggtgaggaagtcgccatcaagctggagtgtgtg

SEQ ID NO: 142952 - DNA, 101 bp, Homo sapiens
ccgtacttgaagccctacgccgtggacttccagcgcagctcctcagagaaattttgaaattgccttcaagatgtttgatttgaatggagatggagaagtag

SEQ ID NO: 142953 - DNA, 74 bp, Homo sapiens
ttttcttatcactaaaacagcagccgcaggcatggttttggtcaactgatgtttgcagatggtggcacctacct

SEQ ID NO: 142954 - DNA, 51 bp, Homo sapiens
tgttctctaggccttttagaaaacatggttacaaaagtggatgaaaccaga

SEQ ID NO: 142955 - DNA, 99 bp, Homo sapiens
ccaagattccagatgttcctgtggaccccagtccagttactgtaaaatggggaaaggagaaatttgaaggtgtagaattgaatacagatgaacctccaa

SEQ ID NO: 142956 - DNA, 75 bp, Homo sapiens
gcctcctggaggcagcacgggcgaccccccggcgcagcagcatcatcaaggggatgtacgtatttttgcatgcag

SEQ ID NO: 142957 - DNA, 100 bp, Homo sapiens
aagttcacgactactagaaggggaggggagtggaaaggctctcagtgaaaaagctcagagtcaagatctccactgaagttggcatcacaaatgttgatct

SEQ ID NO: 142958 - DNA, 75 bp, Homo sapiens
caggaaataatggaaaaagctgcaatatccagaaggggaaactgaggcccaaggaaattgagtatctctgcaaag

SEQ ID NO: 142959 - DNA, 74 bp, Homo sapiens
ctccactgactatgacctatctgacaagagcatcaaccctctgatgaacaagagaactgggcaacccatgatcc

SEQ ID NO: 142960 - DNA, 100 bp, Homo sapiens
cgtccagaagcctgtaggaaagcggaagcggcctggcaggggaaggatcgagtgaaactggaacgccaagctgaagaagaacgaatacggaagcacaaag

SEQ ID NO: 142961 - DNA, 98 bp, Homo sapiens
caaaggtctggacactgaaaccaccgtggaagtcgcctggtgtgaactgcaggaagagctaaagatggctgaatttctagatgaccaggaaactcgac

SEQ ID NO: 142962 - DNA, 74 bp, Homo sapiens
gttcggtgcttctccactctgcagtggctcttccgcttggacatcaggtgccatgtttcagaacagagtaagac

SEQ ID NO: 142963 - DNA, 87 bp, Homo sapiens
acaatgtgaatcctacagtttccagattggaggtggacacaaaggaagaggcagccagacagctacttcagcgtcctcaacgcattc

SEQ ID NO: 142964 - DNA, 73 bp, Homo sapiens
aacaaagctatcaatatattgctggaagggaattcagacacagttaaatgtgcacagtactggccaacagatg

SEQ ID NO: 142965 - DNA, 51 bp, Homo sapiens
gaaggcctctcttgagacatggagaggtgaacgacgtgaatgagtacgcgc

SEQ ID NO: 142966 - DNA, 75 bp, Homo sapiens
cagagccgccgaggatgataaacacccaggacaggtgtccctacctgcaccggacgacgggggacacagaacgca

SEQ ID NO: 142967 - DNA, 50 bp, Homo sapiens
ttaagcaaacgggaattctcgcctttaccactcctgaaggccctaaaccc

SEQ ID NO: 142968 - DNA, 101 bp, Homo sapiens
ggctttcaaggatatgctgtattcagctcaggaccaggcaccttctgtggaagaccattcctcaagaattttgtatccaaggcccaaaagtttgttaccca

SEQ ID NO: 142969 - DNA, 51 bp, Homo sapiens
gcttaggaccacccaccatgcctatccagaagtgagttgctgaatgagctt

SEQ ID NO: 142970 - DNA, 98 bp, Homo sapiens
gagcgagctgagtggttgtgtggtcgcgtctcggaaaccggtagcgcttgcagcatggcgatatgagtctcatccagtctgtgctgatctgcaggcca

SEQ ID NO: 142971 - DNA, 75 bp, Homo sapiens
gacctccatatgctcataagaacccacacaatggacaagtgaaattgaagccaaggaagcttgtgattggctacg

SEQ ID NO: 142972 - DNA, 100 bp, Homo sapiens
gttgccatggagacgcgggcggcagatcccacccatgtgatgggcctgtaccctgacctgctgcccacagactacagaaagcagttgcagtatcccaacc

SEQ ID NO: 142973 - DNA, 100 bp, Homo sapiens
ctgctaaggaggagtctggtggccgaagccgtagtgggagtattgtggaacttataggtatcactaccattaaagttaacattcgtaatgccaattccct

SEQ ID NO: 142974 - DNA, 100 bp, Homo sapiens
ccagaggccaattcgtcgcggcggcggtggagatcgcaggtcgctcaggccctggagagtgaatttgtttcctgccagcttcaccaatggattgatctca

SEQ ID NO: 142975 - DNA, 100 bp, Homo sapiens
aaacatgcaatgaacccaaaaggcgtgcatcgcttcaaggccgggacagtgtggccgagcagatggctatgtgctagagggcaaagagttggagttctat

SEQ ID NO: 142976 - DNA, 75 bp, Homo sapiens
tctccaacaagcttccaaaatggcctggttggtgttcgaggaagagacattgttgttcttggtgtggagaagaag

SEQ ID NO: 142977 - DNA, 88 bp, Homo sapiens
tacgcaaaccgcgatacattttgctgaacaaatagcaaaggatgggtttccagatttccaggattctgtgcaaacactcttccagcag

SEQ ID NO: 142978 - DNA, 100 bp, Homo sapiens
agccaactcaagagacaaagaaaaactttgaagtagtggatctggtggatgtcaatacccctgatttaatgttcacagggcagtgcccctgtcgggaagg

SEQ ID NO: 142979 - DNA, 100 bp, Homo sapiens
gtcctggtcggggtggtctgtctgctcctggcatgccctgccacagccactggttccacttccaaacatgagttccaggccgagacaaagaagcttttgg

SEQ ID NO: 142980 - DNA, 100 bp, Homo sapiens
accatcgagctcctctccttccagctcaacctcaagaccaacaccgtcatcaactggttccacaactacagattccgtcctatttcagtgttccgggaag

SEQ ID NO: 142981 - DNA, 75 bp, Homo sapiens
gaggcaacagaataccttgtctcagctgctgaagctgtgaaagaaaggatgtcttaagagaagctgaaattttac

SEQ ID NO: 142982 - DNA, 100 bp, Homo sapiens
gttgtattcagtattatttggaaaacaattggcttcaacatgagaaagctccccagttaaagatctcagatgaccggctgactgtggttggagagaaggg

SEQ ID NO: 142983 - DNA, 90 bp, Homo sapiens
gccgagcaggaggcgccatcatgggtacagaagtgcaggtggatgacatcaagcgggtctactcactcttcctggacgagtcccgctcca

SEQ ID NO: 142984 - DNA, 75 bp, Homo sapiens
aacaaccccacagaggactttaggagaaagttgctgaaggcaggaggggcaattaagttggaatatgcaaggttg

SEQ ID NO: 142985 - DNA, 75 bp, Homo sapiens
cagccatgatctccttaacggacacgcagacaaaaaatcgtggaattgccattccagtggatttggacagccaag

SEQ ID NO: 142986 - DNA, 98 bp, Homo sapiens
gggataattatccaaataaattgcaagcattctatccaaatggagaagagctaaccttgggtagctgctgttccttcagtctgagccacacactcagc

SEQ ID NO: 142987 - DNA, 100 bp, Homo sapiens
ttggattttttccagtctgatccttttgttggcagctgctttgactctcccgcgaagacctttccttcactgttctactgtgattcccgttgtggttctg

SEQ ID NO: 142988 - DNA, 50 bp, Homo sapiens
tacgagtctgaggcggagggagtaatgactaagaaaaatggctttgtcag

SEQ ID NO: 142989 - DNA, 74 bp, Homo sapiens
tgaaaatagcttgcaaagctgtttcaagaggcaagaatgtgacagtgatgataacatgggtgccaaaaatactt

SEQ ID NO: 142990 - DNA, 100 bp, Homo sapiens
agacgccgggactccctggaaacctagaaatggtgtgagttcttgatacgaatgaaaggccaagagtttgttgatgagattcaaggtagatatcctcatc

SEQ ID NO: 142991 - DNA, 100 bp, Homo sapiens
cggcgctggagagggggcgctgagctgttgggaataacattgctatggctttggaagttacttaccgggaacgactgtatagagtatataaggaagtaaa

SEQ ID NO: 142992 - DNA, 90 bp, Homo sapiens
ctacgccgacgcgtcgggacgcaacacgcttagcggcttctcctcagcccacatgggcagtcacgtttgtctttgtcagcgccacgtgag

SEQ ID NO: 142993 - DNA, 106 bp, Homo sapiens
ctcagagagggaagagattcagccagcacactcctcgcgagcaagaacatccagtcatggataaaaatgagctggttcagaaggccaaactggccgagcaggctga

SEQ ID NO: 142994 - DNA, 83 bp, Homo sapiens
tcacagcactctgggcgaaaattggatgtgaaaatgaagccagaccgagctgaataccactagaaacatacctgtaaccagag

SEQ ID NO: 142995 - DNA, 75 bp, Homo sapiens
cgctgtgcttgagaccaacctgacgggtaccttctacatgtgcaaagcagccaaaactggacaagccaaggcatc

SEQ ID NO: 142996 - DNA, 100 bp, Homo sapiens
tggactcatggaggctgagcatttattcagctcactccatcactcgatgagataatatgagatttctacttcggagaggccaagtctaatgaagagaaaa

SEQ ID NO: 142997 - DNA, 100 bp, Homo sapiens
aaaagccagcagtgtctgatgagaaaccgcaatcggaagagttcaaagaggccttttcattgtttgaccggaccccgactggagagatgaagatcaccta

SEQ ID NO: 142998 - DNA, 90 bp, Homo sapiens
acccatatgccaacccacctaactacggaaaacctgatcccaaaattattgaaaacactcgaagggtttgcaccttctgctccatctcct

SEQ ID NO: 142999 - DNA, 93 bp, Homo sapiens
gggctgtcagagcctcatggagtacggaaactctgatgaggaagaaagtgcttcagaatctgaactttggaagggtccactaccagagacaga

SEQ ID NO: 143000 - DNA, 100 bp, Homo sapiens
tcaaaggccacaaagctgcgatcacctccttggacctcagccccaacggcaagcaacttgctttttcagccaaccaagtgccggagaagctggatgtggt

SEQ ID NO: 143001 - DNA, 90 bp, Homo sapiens
ctgcggggccctggcatgaaaggtgctgcagggtgcacagctgatcgccgtggcctcctcggaccccgcggcggcgggcgtggatgggtc

SEQ ID NO: 143002 - DNA, 100 bp, Homo sapiens
tgtaactacaaggccatcgaaatgccctcacaccagacctacggagggagctggaaattcctgacgttcattgatctgctgcagaaccttggcctgaaaa

SEQ ID NO: 143003 - DNA, 50 bp, Homo sapiens
gcggactcttcttcgccttcgagtgagttgggaatcagactcttgagttg

SEQ ID NO: 143004 - DNA, 74 bp, Homo sapiens
gttggccaaacaactagcaaaacccaaagagaaaattcccatcattgctttcttgatcatggatggtgaagata

SEQ ID NO: 143005 - DNA, 100 bp, Homo sapiens
tctccaggaaaccgcgagtgcctaggagcccctccccaccttttccggggaagccctggtcggagcgagccgacagggtctcgttctgtcacccaggctg

SEQ ID NO: 143006 - DNA, 128 bp, Homo sapiens
ctgtttgagagtgggaacatgacgcaggtgcaggtgtctcttctcgccctggcggggaaggttctgtgaggtggaattccagggccccctctccatccaggaagagtgggtgcggcacttacagcggc

SEQ ID NO: 143007 - DNA, 100 bp, Homo sapiens
gaagagtttgaaagcgtgctccacaaatatttacagtcggaggagtactcggtgaaatcctgtcctgaagactgtaagatggagtggatgttgaagatga

SEQ ID NO: 143008 - DNA, 90 bp, Homo sapiens
tgcctcagcctcccgactagctgggattacaggtgaagtattacagacacttagcacctgatcacttgctgcaaatatgtcatcgactag

SEQ ID NO: 143009 - DNA, 90 bp, Homo sapiens
gacgaagacagtccctggatcaccgacagcacagacagaatccctgctaccaatgccttattggaggaactggaacgctccacccttcag

SEQ ID NO: 143010 - DNA, 76 bp, Homo sapiens
gttccatctgtggaaggacctaccaaccagctcaaactggaggattataaggatcgcctgaaaagtggagagcatc

SEQ ID NO: 143011 - DNA, 100 bp, Homo sapiens
ccgtccgattatgtctcggatcgaatccctcacgcgggcgcggatcgaccggagcagagagctggcgagcaagatatggatcagaaactttcgaagttgg

SEQ ID NO: 143012 - DNA, 82 bp, Homo sapiens
cggagagcatgcgtggggagctctggctgctgctgtcaggtgatgtccttgcaaatatcaatggtgtgagcacagaaggttt

SEQ ID NO: 143013 - DNA, 90 bp, Homo sapiens
gctgcagttggagcaacagtccaagctcaaaggcagagcggcttgggtaaatccaccttaatcaacaccctcttcaaatccaaaatcagc

SEQ ID NO: 143014 - DNA, 134 bp, Homo sapiens
ctgctgctcccgccctttcgctcctcggccgcgcaatgggcacccgcgacgacgagtacgactacctctttaaaggtgtggatgaggtcaccattgtcaacattttgaccaaccgcagcaatgcacagagacag

SEQ ID NO: 143015 - DNA, 96 bp, Homo sapiens
gctcccagctaccatgccagagccagtttattttcactgtgcagctgttacaccaatcatcatgcatgtattttgcacctaccttgattccagatt

SEQ ID NO: 143016 - DNA, 100 bp, Homo sapiens
atttggatcatacagcagatgtccagaacaagaccctgcagatggagaagatcaaggctcgtttgaaggctgagtttgaggcacttgagtcagaggaaag

SEQ ID NO: 143017 - DNA, 50 bp, Homo sapiens
gagctctccagaaaattgatgcagaatcttgtggaagaagaatgaagttg

SEQ ID NO: 143018 - DNA, 100 bp, Homo sapiens
aaggaagcaagcagttcagaagagccaaggaataaacatgcaatgaacccaaaagggagccagatgaccaagatgctccagatgaacatgagtcgcctcc

SEQ ID NO: 143019 - DNA, 83 bp, Homo sapiens
aatgtggcgacttgtgcacacatgtagagacctttgtatgttctgacttattctggagaggagtaggaagtaatatgagcagg

SEQ ID NO: 143020 - DNA, 75 bp, Homo sapiens
ttccacacaactccagtgctaactcaacagaatgtgagcatttgatccgccatatgttggtgttagatcccaata

SEQ ID NO: 143021 - DNA, 90 bp, Homo sapiens
agcaagtgaacaccttgactaaaccgacttctgatccatggatgccatcaggtgcagctaaatcaagtccagcagctaaaccaggatcca

SEQ ID NO: 143022 - DNA, 100 bp, Homo sapiens
aaaatcatttgtgatgggtcagctagtatgcaggctaggcaaactgtggcttcttctcaacctgtatcttctgagatgtatagggatccatttggaaatc

SEQ ID NO: 143023 - DNA, 99 bp, Homo sapiens
ggttttgtagaagacaagtctgaaaactgtgcttctcactttcagaccatgctgaagtctaaattgaatgtcttaacactgaaaaaggaacctctccca

SEQ ID NO: 143024 - DNA, 141 bp, Homo sapiens
tgcctgtcttcagatcttcacagcacagttcctgggaaggtggagccaccagcctctccttggtactccaaagattcaggtttactcacgtcatccagcagagaatggaaagtcaaatttcctgaattgctatgtgtctgg

SEQ ID NO: 143025 - DNA, 95 bp, Homo sapiens
agcattctccttatctcatctgcacaggaagcaggtctaaggtgtctactatgaaccatcctgtactcagaatgtgaatcatggtgtacttgtgg

SEQ ID NO: 143026 - DNA, 74 bp, Homo sapiens
tggacctctacagaagagagggagctccagattccaggtttttcgttggaatatacgttgcacatttatggcga

SEQ ID NO: 143027 - DNA, 80 bp, Homo sapiens
gccaaaattatcaacaccaaaaagctttctgctagggtttgcaggtcgaagtaagaaggaaaccaaatattctcttaagg

SEQ ID NO: 143028 - DNA, 100 bp, Homo sapiens
aattacctgcacgacacatggaaattggactaaattaccagaatgcaggggtgactctcctattccatctgtttcttcgggatcatcttcacctctttca

SEQ ID NO: 143029 - DNA, 75 bp, Homo sapiens
tggtattgtggaaattcccagaggactttggagaccagcttcatgattgtatccaaaaaaccttgaatgaatgga

SEQ ID NO: 143030 - DNA, 90 bp, Homo sapiens
gaaatatacagcttattaaagacaactgggaagacagacaagtaattgttgaaacaacagggagctgccaccaccgtgtactgtgctgct

SEQ ID NO: 143031 - DNA, 95 bp, Homo sapiens
aatgagatcgtggacaagatcatgggcaaaggacagatccaggagcaggccgggctctcgccatgggtcactgtcgcctctgccacgggaagttt

SEQ ID NO: 143032 - DNA, 74 bp, Homo sapiens
caactctctacgctttgcctccaaggtggtcctgaagagcaaggatgaccaggtgaccgttatcggggctgggg

SEQ ID NO: 143033 - DNA, 100 bp, Homo sapiens
tgtcattattgatcagttcattgacagtgaagtaagaactctgctagagaggaaatggctgcttcatcatcatcctcctcagctggtggggtcagtggaa

SEQ ID NO: 143034 - DNA, 75 bp, Homo sapiens
catgcaaggctggcgcgtctccatggaggattgtcaccagacctgcaatctatggagcagattcggagaattatg

SEQ ID NO: 143035 - DNA, 101 bp, Homo sapiens
accccctgaagactccattcctttggtctttccagaattagaccagcagctacaggtttctgagtcccttcaacatgatcctgggaggaatcgtggtggtg

SEQ ID NO: 143036 - DNA, 100 bp, Homo sapiens
gagtcgaagcgagggtctgaagttcacgactactagaaggggaggggagtggaaaggctctcagtgaaaaaggtgactgaaaactcctgaggcatttcct

SEQ ID NO: 143037 - DNA, 83 bp, Homo sapiens
aagcagcgtgcgttcagccctgggctttgtgtccctggtgatgttggaacattaatgatggaacatggccaaacttcagtcat

SEQ ID NO: 143038 - DNA, 100 bp, Homo sapiens
ccaccatctacagcaacgtgatcaaagagcctttggcaagttcagcctcctcccaccccggaatgagtgacaatgcacctgcttccttggagagcggcag

SEQ ID NO: 143039 - DNA, 90 bp, Homo sapiens
ggcgctgcagcgcttcttcgaaggctgacgccaagatggtgtgtgatgtggtgagtcggatggaagacaccgagcccttctctgcagagc

SEQ ID NO: 143040 - DNA, 83 bp, Homo sapiens
ccatctccatcacccaccaacaacaccacaataatccacagccaaggctgagcaacagaaaaaggcggccatcatctctgctg

SEQ ID NO: 143041 - DNA, 110 bp, Homo sapiens
gaaatgaggccgcccaggagaggctgcgagccctcttttccatgggggctgcaggtgaccattgtgaggtagatattttgttctaattttccagatgaggaagctgagac

SEQ ID NO: 143042 - DNA, 75 bp, Homo sapiens
tgttgacctagagtcactagagataaaatgctctaatccccagctcaatctgaaattgaagtgtctgtctctgca

SEQ ID NO: 143043 - DNA, 99 bp, Homo sapiens
aggtccaaagaggactggtgatctacgtgtgctttttcaagggagctgataaagaacttcttcccaaaatggctaagggagaacattgagcaattcttc

SEQ ID NO: 143044 - DNA, 50 bp, Homo sapiens
cacgagtgtggcacccagcctggtccgggagggcctgaggctatggcagg

SEQ ID NO: 143045 - DNA, 100 bp, Homo sapiens
gtccactggtagcccccacccctctccgtccatggccccagatgacacttcagactatgaagaaatcgggagtgcactttttgactgtagattgttcgaa

SEQ ID NO: 143046 - DNA, 74 bp, Homo sapiens
gcatggagccaaaatcgggtctgaggcagcctggcatcctcgctacaacctcattgttgtgggccgatacccag

SEQ ID NO: 143047 - DNA, 75 bp, Homo sapiens
cgggtggagtgtaggtcatatcgccgcgaacacgatgatgaacgcgttaatttccctcaaagaaagaagaaaggc

SEQ ID NO: 143048 - DNA, 75 bp, Homo sapiens
aggcaaacgagaattaaatgccgagaaggccagtacggtggttgtgggaagagaagtttgcagaactgaaatgga

SEQ ID NO: 143049 - DNA, 90 bp, Homo sapiens
tgcagtgctgcaaggggaagtgtgcagaccaggaacacaccattagggagcttcagggccagtccgaggattactatgacatgaggcggc

SEQ ID NO: 143050 - DNA, 75 bp, Homo sapiens
agtctctgcacctcgcgccccagcagggaactctaatgatccaggacaaagaagttaccctggagtatgtatcaa

SEQ ID NO: 143051 - DNA, 100 bp, Homo sapiens
atggttctaagatgggatctgatttagtcagtcagtggcccatgtgagcaagtttagtgagaacagtggattggggataagcctggaagcgacagtggga

SEQ ID NO: 143052 - DNA, 90 bp, Homo sapiens
cgggaggggggagcggcgttggaggccaccgtttccagctgatgactatcagccagttcgtctgctcagtaaacctggggaactgagaag

SEQ ID NO: 143053 - DNA, 99 bp, Homo sapiens
caaagggacactgtctgtgatggaggactctgcccaggaggtactggtgtggcatactcggacagagaagcccaagatgaagcaggaggagcagctgca

SEQ ID NO: 143054 - DNA, 100 bp, Homo sapiens
ctaatttgtgctgtgcaccaacaagaacctgctttaaatttccatggcaatttacaacccccatactgtaccaggcaagtggaaggaacaagcagtggcg

SEQ ID NO: 143055 - DNA, 88 bp, Homo sapiens
atggagcctcagaggtgcagaagagaaaccttgtctgcatcaggtcagcctcagatgtcacaacctctgtgaagctctccccagctct

SEQ ID NO: 143056 - DNA, 88 bp, Homo sapiens
gctcctcgcttgcctgttccttttccacgcattttccaggataactgtgactccaggataagctgctgcaggcaaagaaagaaattga

SEQ ID NO: 143057 - DNA, 76 bp, Homo sapiens
ctctacaagaagctgctgactcttttcagagctggccacgaccaggcaacctacagctggagtcgagagtctgggg

SEQ ID NO: 143058 - DNA, 96 bp, Homo sapiens
tcacaccagacctacggagggagctggaaattcctgacgttcattgatctgacattgctacaagtggttggtgtggtctctgtggctgtggccgtg

SEQ ID NO: 143059 - DNA, 100 bp, Homo sapiens
cagatgggtttgtatggacaggcttgtccatctgtaacttcattaaggagacagctgttgcaatcccttaagcatgggtgctattaaaaaaatggtggag

SEQ ID NO: 143060 - DNA, 90 bp, Homo sapiens
gaacagggcagacgttagcgtgagtgatcactctcaatcccgggttgtgcattatgtgtgactcttccaatgagtttattaaactttttc

SEQ ID NO: 143061 - DNA, 96 bp, Homo sapiens
ggctcacgcagcttcaggacgctgtgaattcgatctcacattcttgaaggtggcattgaagagcactaagatcggaagatgagtgagcttgaccag

SEQ ID NO: 143062 - DNA, 78 bp, Homo sapiens
accgcagagcggagagcggagcccggagcccgccgccccaggatttaagtgccctgtatgctcaaaatttgtatcctc

SEQ ID NO: 143063 - DNA, 98 bp, Homo sapiens
aagaaacccagcttgatatgttgcttggtgtttcacttagcagtttgggagctataccagcagcagcactagaccccaacattgcaacacttggagag

SEQ ID NO: 143064 - DNA, 75 bp, Homo sapiens
ggaagctctggatataagtttggtgttcttgctaagattgtgaattacatgaagctctctacgagcagtcttgtg

SEQ ID NO: 143065 - DNA, 82 bp, Homo sapiens
aagaaaggattcgttacagccagagattgatgaggctgctgtcatttgtggtgttggctctatttgctgtcactcaagcaga

SEQ ID NO: 143066 - DNA, 51 bp, Homo sapiens
acaagatccgatctactgagagctgcgagaactctactacgatcgcgggaa

SEQ ID NO: 143067 - DNA, 100 bp, Homo sapiens
ctgtccctgaagatgcctacccatgccgtgtgtgtggtgggagtcgaggcacatgtggacattcacagacaatgcagatcttcgtgaagactctgactgg

SEQ ID NO: 143068 - DNA, 75 bp, Homo sapiens
cgttcaacttctgctgactctgcttcctcctccgatacttcccgcagtcggatgagccccaagagcctcaagaac

SEQ ID NO: 143069 - DNA, 50 bp, Homo sapiens
gaagattactctgcaacagctaaagaataaccaagtgctgggaattggaa

SEQ ID NO: 143070 - DNA, 74 bp, Homo sapiens
ctcctgctctccgagaagcccttactaaacaagattacgggcagggacgacctgtcaaagcgcggagtggacca

SEQ ID NO: 143071 - DNA, 101 bp, Homo sapiens
ctgttcagtactgtgggtgatatttgcctttagtgcactcttctccttcacagtaaagtggctgcttgcatcctccagtctactgaaaattggccaggaga

SEQ ID NO: 143072 - DNA, 75 bp, Homo sapiens
cagaaacctcacagaacacagcaaagaatgcagtaatagtggccttgtcttcaaaatcatgggatgtagagactg

SEQ ID NO: 143073 - DNA, 75 bp, Homo sapiens
gccttttttcttagtcatgcccattggcattacagcagaagttctggtggtgacctctttcgatgaactgcagag

SEQ ID NO: 143074 - DNA, 82 bp, Homo sapiens
cagacatggggaacgcggcgaccgccaagaaaggcagcgaggtggagagcggttctcatctcaagttgctctcggtgtagaa

SEQ ID NO: 143075 - DNA, 82 bp, Homo sapiens
aaaggttgatctcatagacaagtttgtacatccaaattggctgattgcaattctggcccaactcaaccctctctttggaccg

SEQ ID NO: 143076 - DNA, 83 bp, Homo sapiens
cagacctctgaagagaagcccaaagacagtgaagaactcgaggatagtaatgatgacactgaagatgtttcactgtttgatgc

SEQ ID NO: 143077 - DNA, 98 bp, Homo sapiens
gggcagcgtggacattctcaggctgactctccagggtgaactgacaggagatgaacttgaacacatagcccagaagcaaattgtggctactaatttgc

SEQ ID NO: 143078 - DNA, 100 bp, Homo sapiens
ctagtggcggaagccttcgtctcccagattgcagatatcaatgatgtcaaacggctgaaacctggctacttagaagctactgtggactggtttagaaggt

SEQ ID NO: 143079 - DNA, 98 bp, Homo sapiens
tggaggagggcaaacactccagccacgaagtcaaggctctgggggccatgtggaaactacataaggtgagcactgtgggctatgggatggatgaggtg

SEQ ID NO: 143080 - DNA, 100 bp, Homo sapiens
ttttggttatgctgaatttgaggacctggattccctgctcagtgccctgagtctcaatgaagagattgaaaaggccaaacctattaaatgtggaacattt

SEQ ID NO: 143081 - DNA, 100 bp, Homo sapiens
ggcggttgggtgcccgcggccacttttgccttcccgggtctacgaccccttccgctttgacccagagaacagcaaggggaggtcacctctggcttttatt

SEQ ID NO: 143082 - DNA, 83 bp, Homo sapiens
agccgtggcctcctctccgccctagcgctgaggagcactcactgtgggcctcgtgcgacagtgtcaaacaatccatggacgag

SEQ ID NO: 143083 - DNA, 82 bp, Homo sapiens
agctggatgaggagggctctgatccccccctgccggggagggcccagcgcatccgacagctggtactcctggttaatcaaca

SEQ ID NO: 143084 - DNA, 90 bp, Homo sapiens
aggagatgaaagctttgtatgaacaaaaccagtctgatgtggttttcagagaaagatgctgatgaggtgaaaggaatttttgtagatacc

SEQ ID NO: 143085 - DNA, 50 bp, Homo sapiens
agctgctgactgatgaggcactggtacactgaggaggggacggctccgtc

SEQ ID NO: 143086 - DNA, 74 bp, Homo sapiens
cagaggggaatacaggtgtcaattgtaggacagtcccatctggacagcaacattgagaatcaagagattgtcac

SEQ ID NO: 143087 - DNA, 98 bp, Homo sapiens
cacgaccaaaggtgtcacctcagtctctcagatcttccacagcccaggaaccctgtggaatctttcatcccatgactcaatcaaaatggagattgtgg

SEQ ID NO: 143088 - DNA, 75 bp, Homo sapiens
cgcaaatgttttccatgctgatctccaaagtggtctctgcatggattcccccagccctatggacccccacatggc

SEQ ID NO: 143089 - DNA, 75 bp, Homo sapiens
cccggagtgaggctgaagggagtggatcagagcactgcctgaggccatccggctgtccttagagcaagccctgcc

SEQ ID NO: 143090 - DNA, 82 bp, Homo sapiens
cgagtgaggaaaggaggtactgtagaatctccctggaaaaggagacatgaatgtctgcaatgatacttcctgacaagaagtt

SEQ ID NO: 143091 - DNA, 75 bp, Homo sapiens
ccggtgacatgtctgtgagctgcggaggctgcggcccccaggtgagacatggaatccattaaaattgcattatca

SEQ ID NO: 143092 - DNA, 75 bp, Homo sapiens
ggacaagcttaataaaataaccgtccccgccagtcagaagttgaggattctcagcaagttacagaagtatctttg

SEQ ID NO: 143093 - DNA, 88 bp, Homo sapiens
tggacagacttcttagacttggaggaggtatgcctggactgggccagaaacctgtttccctccaatcttgtggttgcagctttccgta

SEQ ID NO: 143094 - DNA, 75 bp, Homo sapiens
cggaccagcccagaaggcagcggcggcccaggccagcattcccgcaatgtgtggagacctccaggccgtgcagca

SEQ ID NO: 143095 - DNA, 75 bp, Homo sapiens
acctggcggacaagagctacatcgaggggttgggttaacggcatggagaacagtcaccccccccaccaccaccac

SEQ ID NO: 143096 - DNA, 100 bp, Homo sapiens
gacacaggctgacgaggaagctggtggtgttgatcactcctcaggtgtccagcctgctcaggagtgatttggagaacaatgcatgtaagtctgacatcat

SEQ ID NO: 143097 - DNA, 75 bp, Homo sapiens
gggaaaaacaaagttccagagctacaaaagtttttccaggaagctgagaagtacaaagctgaagatgagaagcag

SEQ ID NO: 143098 - DNA, 83 bp, Homo sapiens
tgagcgaatgtgcttactcacggcgttagttacacaggtgatttccttaagaaaaacactctacacccccaagtgcatatggg

SEQ ID NO: 143099 - DNA, 82 bp, Homo sapiens
agaactttgccgataccttaggatacaacatagaacctattatgctctatcagacagcagtgaagaccgtttgggtagaagg

SEQ ID NO: 143100 - DNA, 82 bp, Homo sapiens
gccaggatacccagctccctcaggaaagcggttcctacaaacttgatgacttttgagtagaagcctgagaaaaaaagagagg

SEQ ID NO: 143101 - DNA, 75 bp, Homo sapiens
ccgccagatcaacctggagctctacgcctcctacgtttacctgtccatggacgcgtgaccaaaaccaaagacggc

SEQ ID NO: 143102 - DNA, 100 bp, Homo sapiens
cttcccgcgtccgccgattcctcctccttggtcgccgcgtccttggctggcgtgcgcccagacaccatgtcacaaccctccagaactgacgttggcagga

SEQ ID NO: 143103 - DNA, 75 bp, Homo sapiens
ggagccgtgctctacctctatccgtactactataattccttgacccagcagtacctttactgggatggggaaaaa

SEQ ID NO: 143104 - DNA, 50 bp, Homo sapiens
agactagtgtgagcaacaaagtgagttgctacagtggctggagagacgac

SEQ ID NO: 143105 - DNA, 100 bp, Homo sapiens
gccatgagggccctgtgggtgctgggcctctgctgcgtcctgctgaccttcgaaatggtggagtcaatgaagaaagtagcagggatggatgtggagctga

SEQ ID NO: 143106 - DNA, 76 bp, Homo sapiens
gcggaggaggaatattcttcgcagcctaaggaggaacactaaggtaagaatgattgatgttggctgatattggagt

SEQ ID NO: 143107 - DNA, 74 bp, Homo sapiens
agttaatgtacttgcacatttctggtcacgtgaactggaaatttcagtttattggcgtgattggcggtctctgt

SEQ ID NO: 143108 - DNA, 74 bp, Homo sapiens
tgcgaggagaccgcgggtttccaccccggcgggagctgtcaggttggctccgcagcttgtcaggaagatcggag

SEQ ID NO: 143109 - DNA, 100 bp, Homo sapiens
acagagcgctactcctggcagtgcgtcaatcagagcgtcctgtgcgggacccagacatggagctgcgggaagaagcctggtctccggggccgctggattc

SEQ ID NO: 143110 - DNA, 75 bp, Homo sapiens
actgaggagccattgatgtgtcaccgacgagagtgctggggaataaaaaggggatcttcactcggcagagacaac

SEQ ID NO: 143111 - DNA, 83 bp, Homo sapiens
gtgagacacaatttatcattgaataagtgttttaagaaagtggacaaagagaggagtcaggatgaccgagtgggagacagcag

SEQ ID NO: 143112 - DNA, 75 bp, Homo sapiens
gccaatgtccaaaacgtgaccactgaggatgtggagaaggccacaggaataagacgagttggaagaagacctgat

SEQ ID NO: 143113 - DNA, 73 bp, Homo sapiens
gagtggtctgccgagaagccagtcacgccgggagctggtacacagcctcagatctattaatgagatgaagcgg

SEQ ID NO: 143114 - DNA, 74 bp, Homo sapiens
ccgccaccatgcccaagagaaagccttgccaacattccactaacccccgagactcagcgggaccaggagcggcg

SEQ ID NO: 143115 - DNA, 98 bp, Homo sapiens
gttgctgccgccatacgcgctctccctgtttagggtacccagtgtgttgaacaaattcaagagttggttctacgcttctgtgagaagaactgtgaaaa

SEQ ID NO: 143116 - DNA, 100 bp, Homo sapiens
cccagaggtgtggcaggtgctgaagacccaccccggagacccccgcttccagtgcagcgcgttccttcacctcgggcagaataactttgcagaagcccac

SEQ ID NO: 143117 - DNA, 96 bp, Homo sapiens
ctgtcttggaggacatcagaaggtgaccaagaatatggcccaggtgaccaaagccctggacaaggccctgagcaccatggacctgcagaaggtctc

SEQ ID NO: 143118 - DNA, 50 bp, Homo sapiens
cagaatctcagtccaacaaaaggtgattttacaacgagatgctgctctcc

SEQ ID NO: 143119 - DNA, 98 bp, Homo sapiens
aagcagagaaaccacacaaatttacttcacactgttgtgtcaacgctgctcataaatataatcccagaggaccacatcccactgaacttatctggaaa

SEQ ID NO: 143120 - DNA, 100 bp, Homo sapiens
ctcctgcgtttggtggatgatttcttgttggtgacacctcacctcacccacgcgaaaaccttcctcagatgagcagcaccagcagtaagagggctccgac

SEQ ID NO: 143121 - DNA, 100 bp, Homo sapiens
acttttcgaggcatttgacttgtttgatgttcgtgactttggaaaggagtggaagctggacacactatgtgacttgtatgaaaccctgaccatcacccag

SEQ ID NO: 143122 - DNA, 100 bp, Homo sapiens
tggggagcgtcctggggctgtgctccatggcgagctgggatttagtcgtccgtgttgtttttattcttggcaacctgacggcaaaaaataaccaggctcg

SEQ ID NO: 143123 - DNA, 51 bp, Homo sapiens
attcgcagtggtcgcttcttctccttgattacagagtcacgggagacaccg

SEQ ID NO: 143124 - DNA, 125 bp, Homo sapiens
gagaccttccacctcagcgacctgccatcctacacaactcatggcaccgtgcacgtggtcgtcaacaaccaggttggatggcaagcatgtggtgtttggcaaagtgaaagaaggcatgaatattg

SEQ ID NO: 143125 - DNA, 74 bp, Homo sapiens
ttccgtgagctgatgcaccagaaagctgaaaagctgacaatggcaccatgcatctttgggactggagaactggc

SEQ ID NO: 143126 - DNA, 74 bp, Homo sapiens
aagcatgaggcaatgatcactgacttggaagggatgatcatggtgattttactgctgcttgtggctatcgtggt

SEQ ID NO: 143127 - DNA, 82 bp, Homo sapiens
gggcgagcggtggtttggacgccggcggagacgcgggcgaggttattcagcttctcaaggctggaaaagcgaaggaagtttc

SEQ ID NO: 143128 - DNA, 74 bp, Homo sapiens
tgactaaagcttgaaatgctacatttccaagatacctcaccaccaaggagcagtttcaccaattcctggaagcc

SEQ ID NO: 143129 - DNA, 127 bp, Homo sapiens
actgcctcgatgccatccagcaagacttcgtgatttttaacagagaaaagtcaccgacgatgagggcgcacctgctgtcctggagcttccgatctctgttcggggaccctgtgagccttctggccgg

SEQ ID NO: 143130 - DNA, 98 bp, Homo sapiens
agtgggggtgtgcaaacccgagagaactgggttttgaggttttgctgaagatattcctgaagaatcatcccaggtgccacactaaaaaaatgatccag

SEQ ID NO: 143131 - DNA, 75 bp, Homo sapiens
gccgccgaacgacaggacgttggggcggcctggctccctcaggactgccattttcattaagaactgccacttaga

SEQ ID NO: 143132 - DNA, 97 bp, Homo sapiens
agctagagcagactcagaatgagctcaccagggagctgaaactcaatggcatattgaatgttcatcccagttgcctcccgagatggcgtggcccagc

SEQ ID NO: 143133 - DNA, 100 bp, Homo sapiens
gggaaattaggaatgcagtggagatgatgattgcacggttagacacacagctgaagaataagcttataacactgatggattcttgctcacttgtggcatc

SEQ ID NO: 143134 - DNA, 83 bp, Homo sapiens
cctcaacgacgcggacatggtcatgagctttgtgaacctgggaggctactcacagtcgaactacaactccccggggtccggcc

SEQ ID NO: 143135 - DNA, 82 bp, Homo sapiens
cagttggaagcagccgatccagcctgcggagcctgtggggcaggagaaactggctcttcgacagcagttgaatgaagcgaag

SEQ ID NO: 143136 - DNA, 100 bp, Homo sapiens
tgttttagtgctttttatttttccccaattcagcagagaatattttcaaggggggtgtcgtgaaaactacccctaaaagccaaaatgggaaaggaaaaga

SEQ ID NO: 143137 - DNA, 100 bp, Homo sapiens
agccctgctccaggaatgggacctcgagtcactgtgggagcatgacttcggcaacttcacctatcattctgaaatgggaccccaaaagtttggaaatccg

SEQ ID NO: 143138 - DNA, 100 bp, Homo sapiens
cccaggagccagtcaaggttgtctgtctgtccatccactcaggacatctgcaggtgggagacctccacagaacccttccagcaagctgtcttctaaagca

SEQ ID NO: 143139 - DNA, 100 bp, Homo sapiens
caaacccttcccaacctgaaaaacttcatggagcatggactaatggtcaggtggagagccggacagggcagcggccggcactaccgcgctgcgatttgcg

SEQ ID NO: 143140 - DNA, 74 bp, Homo sapiens
gaatactgaaaattgtcactggatttaatgggcccgacaacaagctcaaatacgtcaccaaatggcagaggaca

SEQ ID NO: 143141 - DNA, 74 bp, Homo sapiens
tcgagtctacctggatgaaaactacaaatcccaggagcacttcacggtttacccaaggtccagcctagccccta

SEQ ID NO: 143142 - DNA, 75 bp, Homo sapiens
ttatcagcaccttggacagcatacaaatgattctgcatctccaggaagatgttaccgagtacttcagtgaattcc

SEQ ID NO: 143143 - DNA, 52 bp, Homo sapiens
gccccaggcctaccccagtcacggacggttaatgttcgtgaagaaattgaag

SEQ ID NO: 143144 - DNA, 50 bp, Homo sapiens
cgatgacttcgtcacctatgagctggcaaacgcccttctggaaaaggaag

SEQ ID NO: 143145 - DNA, 75 bp, Homo sapiens
gggcatggtggtctggggcaacgcggaagccaaaacctattgatgtacaagtcattacacaccacatgcagcgat

SEQ ID NO: 143146 - DNA, 100 bp, Homo sapiens
gcggacacggccaccgcctcagcgggagaggagtctccaccaggactgaccgctgccgcccagcacgtccagtttggagaacatttataaagagttgtct

SEQ ID NO: 143147 - DNA, 100 bp, Homo sapiens
cagcttctggtctaccagaggaagaagaaaggcgtgtcccccaaaggctgtccttgcagtagctggaagccagctccttcgagaactcatagaacggaag

SEQ ID NO: 143148 - DNA, 100 bp, Homo sapiens
tgacggtgcaggccggagcggcacctacgtcctgatcgacatggttctcaacaagatggccaaaggttattcagcttctcaaggctggaaaagcgaagga

SEQ ID NO: 143149 - DNA, 88 bp, Homo sapiens
gccagaagagacagagcttgaggagagcttgaggagagcaggaaagaccctctttcccagctgcccgctcctcagcacccgaagattc

SEQ ID NO: 143150 - DNA, 80 bp, Homo sapiens
tgtgggatcgatgtttcaatattggaagcgctttgatttacagcagctgcagccgatacggaagatgtgtgcattgtaga

SEQ ID NO: 143151 - DNA, 75 bp, Homo sapiens
ctgcctgctgacctggggaggccattggctctatggaaaacactgggagtgcatccgccccaacccttttccccc

SEQ ID NO: 143152 - DNA, 90 bp, Homo sapiens
ccaactatcggaacacgagcgagattcctctggttctggtgggaacccaggggcctgctttcttccccgggcgatgtgcagagatctttg

SEQ ID NO: 143153 - DNA, 75 bp, Homo sapiens
agccgaggccgcgaactgcatcatggagtcaccttcaggccattcagaggaggaaagagaggggaatatgaagtc

SEQ ID NO: 143154 - DNA, 115 bp, Homo sapiens
tttgaggggtctgaagactgaaagagtcgaatggtttgttggcaggtcattcactggaactcccccaagaagctccgggtgaagaacaagcatgtggagttttttcgcaacctct

SEQ ID NO: 143155 - DNA, 83 bp, Homo sapiens
tcgacctgcagggagcagaggggacagaggcaccaaggacctccaagacagatatgtaactggttcatcaatgcccggcggcg

SEQ ID NO: 143156 - DNA, 83 bp, Homo sapiens
ggttcgtgccaaattccgaagcaatcttcctgctaaggccattggacacagaatccgagtggaaggattacggccaggagata

SEQ ID NO: 143157 - DNA, 75 bp, Homo sapiens
aaagacaagccatcaaaactgccttcagaagcaaaagaattggcagagggggtcgatttgggaggaaaggtgtgg

SEQ ID NO: 143158 - DNA, 82 bp, Homo sapiens
ggagctgtgcagccgcgaggaggcgcgggaggtgttcgagaacgaccccgagacgaattaaatgtgagggagtctgacgtaa

SEQ ID NO: 143159 - DNA, 60 bp, Homo sapiens
tccctgcggtgtgcaagtccgactggaacagtggtcatctccatcagaggcaactgaaag

SEQ ID NO: 143160 - DNA, 75 bp, Homo sapiens
ctgtgggatgcctctgacccctcccacctctccagaacaggctatcctaggtgcagcagctccagcaggtgcccg

SEQ ID NO: 143161 - DNA, 51 bp, Homo sapiens
agggtccgccggctgtgctggtgagaatcacctccctgcagctttccgaca

SEQ ID NO: 143162 - DNA, 82 bp, Homo sapiens
cgccttcctcaacgacgcggacatggtcatgagctttgtgaacctgggattttttatcaagcagaaatgcatcgaacaacga

SEQ ID NO: 143163 - DNA, 78 bp, Homo sapiens
agaacaagacggacgtcatcctgatcttggaactgtaaaagtacacctgtaagccagcttggttccgcagactttccc

SEQ ID NO: 143164 - DNA, 80 bp, Homo sapiens
aagaggctggactcggattcgttgcctgagactgcatcaacaagtatgggtctccgtacaccaaaaactcaggcttcgcc

SEQ ID NO: 143165 - DNA, 97 bp, Homo sapiens
ccgggggcatcgagaccatcgccaatgagttcagcgaccggtgcaccccgttctgcgttagacctgcatcttagcaatgtgaatattgcatccctag

SEQ ID NO: 143166 - DNA, 100 bp, Homo sapiens
ggagaagcactttgggagctgctgtgttaaatggattattatacgctgtgggaggctttgatgggagtacagcttctcaataggtttggcatggacaaga

SEQ ID NO: 143167 - DNA, 100 bp, Homo sapiens
ggagccacgcagaggacgccggaacaccctggaagccgagaaatgaatccggacaatcagatagttcaaaccagcaaggagatgcggacatcaaaccact

SEQ ID NO: 143168 - DNA, 75 bp, Homo sapiens
ggcctattgcctccattctagaggaagtgaagaagctttctgagcagtgtgtactggccacatatggaagcattg

SEQ ID NO: 143169 - DNA, 51 bp, Homo sapiens
aagcaaggcccaatgacccaggcggtgacagattgactgggatcccctcgc

SEQ ID NO: 143170 - DNA, 83 bp, Homo sapiens
ctgagggtctcggggcgggcgccgcgggacctctccgggccatgggaccaccccaggacaattcaggggaagctttaaaggaa

SEQ ID NO: 143171 - DNA, 82 bp, Homo sapiens
ttttcttttccatgatatcattatatggacagtttaggggggatatgagactttctactcggaatatcctgagtgttgcgtg

SEQ ID NO: 143172 - DNA, 75 bp, Homo sapiens
catcagccgcctcatctgctcagccaagcagcagcagactatgctgagaggcccaggcaccaccaccatgactcc

SEQ ID NO: 143173 - DNA, 100 bp, Homo sapiens
tctggattcaagtcccaggagtcctgaccagagagcagagccgaacactgtcagctacagccagtccagcttgatccacctggtggggccttcagactgc

SEQ ID NO: 143174 - DNA, 100 bp, Homo sapiens
caagagaaaaaccttatgatagtaaaagtttgcggacgtgtcagttgtacccgaggcgttctcagcagcagcaagtacctgtggtggatttccaggctga

SEQ ID NO: 143175 - DNA, 73 bp, Homo sapiens
gtgtgtgacggggctcctgatggttacgccaaggaggccctgaatctggcgcagatgcaggagcagacgctgc

SEQ ID NO: 143176 - DNA, 100 bp, Homo sapiens
ctgcagaggctcttcctcatcatctcagccacgaagtacagccggagggtgctgttggcccaaaggttgccctgaagccccccatccagaggaagcaagg

SEQ ID NO: 143177 - DNA, 105 bp, Homo sapiens
tgaccagttcctggaagacgtgcggctacaggagcgcacgagcgggttcatgtgtgcccagctccctaatcaggtcctggagagcatcagcatcatcgacacccc

SEQ ID NO: 143178 - DNA, 100 bp, Homo sapiens
gtttccaggtgccaatggagagaaaggtgcacggcagctaccaagggggtgccagctggaaacagtgacacagaggggggccagcctggtcggaaacgac

SEQ ID NO: 143179 - DNA, 85 bp, Homo sapiens
ggatgacatatttttggacctgaaacagaaattctggaacacctatatgcaattctgtggtgttcttggtcacacatttatggag

SEQ ID NO: 143180 - DNA, 100 bp, Homo sapiens
aggacaagcgcttctcgggcaccgtcaggatccctccccgcggcggcgatggcccgagccatgagagtgaggactttccgcgcccattggtgacccttcc

SEQ ID NO: 143181 - DNA, 98 bp, Homo sapiens
tcagcaacagccagttcttagtaaaaccacttgatatgattgttgggaaggcatggaatatgtttgcttcaaaggagatcttgtgcgaaaactcaaag

SEQ ID NO: 143182 - DNA, 90 bp, Homo sapiens
gaacaagtccaagaggaccttctgattagtccacagtcttcctctatagacgccctgaaagccatcacagaggtgaccaccacactacag

SEQ ID NO: 143183 - DNA, 75 bp, Homo sapiens
acgccgagaagcagaggccccgagctgatttgaataggatgcacagacaaaatatagatgcctaccataacccag

SEQ ID NO: 143184 - DNA, 100 bp, Homo sapiens
aagttctgcagccagtgcggagagaggctgcctcctgcagcccccatagcagtacataccgagcatcaaatattaaggcacccggagaacagacagtacc

SEQ ID NO: 143185 - DNA, 75 bp, Homo sapiens
gatgagcctgcagagcgcgcagtacctccgtactgccaaatctgtcgaaagggagataatgaagaactgcttctt

SEQ ID NO: 143186 - DNA, 95 bp, Homo sapiens
ggaaagacacctggccagcggtccagagctgatgcagcatcaagttcatattgatgagatctgtttatataattgtcactggtgaccagaaccca

SEQ ID NO: 143187 - DNA, 96 bp, Homo sapiens
tcattctgaatggtgatctgtctgagatgtacgctaagactgaacaggatattcagagaagttctcacttgctctgaaatttggggactgagtaca

SEQ ID NO: 143188 - DNA, 102 bp, Homo sapiens
ttggtggaggctgtggcaatggaacaggcttgagaaacagttacatggacacagaacagtatgaagaagcagtacgagactatgaaaaagtataccagacag

SEQ ID NO: 143189 - DNA, 98 bp, Homo sapiens
cgagatcgatgtgcgccaggagtacccacactgcttcatgatgccccagtccctgggcgtcatcggagggaagcccaacagcgcccactacttcatcg

SEQ ID NO: 143190 - DNA, 100 bp, Homo sapiens
aagctgtctaagtccaaagatttttacccagaatggaggctccagagtgaaattaatgacactttgtcgatgaagatcttgattgtgacctctgtggaaa

SEQ ID NO: 143191 - DNA, 74 bp, Homo sapiens
tatttcaaccataaagacatcttaattgggcacgaaagagagctggaagtcgagtgtgctactcaactcaggag

SEQ ID NO: 143192 - DNA, 88 bp, Homo sapiens
tcaagaatgaattgatgtaccagttggaacaggatcatgatttgcaagcagaggcaagtgaggcctatctggttggcctttttgaaga

SEQ ID NO: 143193 - DNA, 75 bp, Homo sapiens
gccttcccagtagctgggaccacagacctcatagttattcctaggagtcaagaagatgatgcacacaatgtacaa

SEQ ID NO: 143194 - DNA, 129 bp, Homo sapiens
caggcgttctccgccccggagaatgcagtgcgcatggacgaggctcgggataacgcctgcaacgacatggctgctaaaggcctggagccctgtttttaggaactacataaagcgcgcagccgaccattt

SEQ ID NO: 143195 - DNA, 100 bp, Homo sapiens
ccgccgcagccgccgcggcctgttcgcccaggatggccaggccatgttatgggatctcaacgaaggcaaacacctttacacgctagatggtggggacatc

SEQ ID NO: 143196 - DNA, 75 bp, Homo sapiens
ggggcttgtgttgatcaggagtgaattcacagtctaccatgaattggaagcagttgcaccaccagcaccaccttc

SEQ ID NO: 143197 - DNA, 100 bp, Homo sapiens
gctggagcagtggcgtttggaggagactcgatgtaaagacgaccgtggtttaccctgccacagagaaacacctgcagaagtacctgcgccaggacctccg

SEQ ID NO: 143198 - DNA, 50 bp, Homo sapiens
tgacaaggcactgctttttcatgacgggcgtctctggccgagcctctttt

SEQ ID NO: 143199 - DNA, 74 bp, Homo sapiens
tgctcgtgactgcccacatatactccgccgcatgcaagagatgattgcaaggatgcaggcgcagatgcagatgc

SEQ ID NO: 143200 - DNA, 99 bp, Homo sapiens
caaccctcgtgcctccctgaaccactccactgcctttaaccctcagcctcagagtcagatgcaggatcttaaaccttactcaggcattgagagacggga

SEQ ID NO: 143201 - DNA, 105 bp, Homo sapiens
tgtcttcggtggactccttcggcagtccacccaccgccgccgcctcccaggtttggaaggcgctttgagtccccgctgctgtggcagagcgccatcatgatcctg

SEQ ID NO: 143202 - DNA, 98 bp, Homo sapiens
tcctccacgcaggggctccggaatcgcccgaccgcacacgttgccaccctgaggtatcatgatattagctggtttgacatcaagtcatttgtgagtca

SEQ ID NO: 143203 - DNA, 100 bp, Homo sapiens
caaacagcccagctcgcgcttcagcgtcccggcgccgtcgcgccactcctccgagtagctgtagccatacctaatagacctcctgatgctgtacttacag

SEQ ID NO: 143204 - DNA, 100 bp, Homo sapiens
tcatgtgccaggacttggaggtccctctcctcggcagagtgcccctggatccgctcatagatgatgaggacagtgattaccaccaggaggcctacaagga

SEQ ID NO: 143205 - DNA, 83 bp, Homo sapiens
ggaggaatccgagaagagcagagcggagggagccccagacacgatgaaggatttgggggcagagcacttggcaggtcatgaag

SEQ ID NO: 143206 - DNA, 101 bp, Homo sapiens
ctcttgcttttcctcgctggggtgtacgtccacaagaatcggaatgtcagttaatgctattcgcaagcagagtacagatgaggaagttacatctttggcaa

SEQ ID NO: 143207 - DNA, 100 bp, Homo sapiens
cgccaggcggccgtcatggcggtgtcggagagccagctcaagaaaatggtgtccaagctcagcgacatgtcctcacctacatggaggatgcagtgtgcca

SEQ ID NO: 143208 - DNA, 78 bp, Homo sapiens
aatgtcagtggaaaggagagctaccatcactaaggctcacttatgtctgtaaagatgggaaaaaaatacaagaacatt

SEQ ID NO: 143209 - DNA, 74 bp, Homo sapiens
tccgggcccccagccgcatcttctggcggaccgtgcgagattcatgatgttgctatcaaaagttgagaaattgt

SEQ ID NO: 143210 - DNA, 97 bp, Homo sapiens
gctcggcctgcaaggctgttgtttcaagaaatgaaaatgaagggcgccctggaataggttcgccgaagagagagtccagttacaacacagggatcac

SEQ ID NO: 143211 - DNA, 75 bp, Homo sapiens
cagtcagatctcaggaatggaagattcgggaactggagcctctcctctgtcacagtgacaatccatctcagctca

SEQ ID NO: 143212 - DNA, 100 bp, Homo sapiens
ggcacaccgaggctcggccgccccgccgcgagttccagctattcttcagatgctctggattttgagacggagcacaaattggaccctgtatttgattctc

SEQ ID NO: 143213 - DNA, 100 bp, Homo sapiens
agacggcggcagcagcggcattcagaccgagtgtgtcagcagccaggactttctctctgggtccccttccaaaacgcagccaccgccgtcaccaatctct

SEQ ID NO: 143214 - DNA, 101 bp, Homo sapiens
ggcctcgcgggtccgggagcgcggcggagacgatgcctgagatcagagtcacgcccttgggactcgggcagccgcaagtagctcctccagcgccagcagcc

SEQ ID NO: 143215 - DNA, 100 bp, Homo sapiens
gtgaacgcgctgcacctctacctgtggctctttctgctgggcctgcccttcaccctctacatgcagagtctccttggaggtgacatggatatgggcaacc

SEQ ID NO: 143216 - DNA, 98 bp, Homo sapiens
atcatggctcaatttggaggacagaagaatccgccatgggctactcagtttacagccactgcagtatcacagccagtttaatggatcgagaagtggcg

SEQ ID NO: 143217 - DNA, 75 bp, Homo sapiens
tgctccccaagaagactgagagtcaccacaaggccaagggtgacctggtactgcttgatgtatgtccccttacac

SEQ ID NO: 143218 - DNA, 100 bp, Homo sapiens
tgaggttgatgccaactccttcttcccacgctgctactgcctgggggctgaggatgacaaaaaagccttcataggagccatccgcaagcagttggcggct

SEQ ID NO: 143219 - DNA, 75 bp, Homo sapiens
ggaggacatgaagatgaagatctctgccctcaagagtgaaatccagaaggagggccaaagaatgtggtgcttcgc

SEQ ID NO: 143220 - DNA, 100 bp, Homo sapiens
ttgcttccaataccgaccccaaatcctttgactacttccaaacccctgatacctcttcaaaaagaaactgattcagagacccagaaaatggtgcttacca

SEQ ID NO: 143221 - DNA, 100 bp, Homo sapiens
caaacagtgccctgatctccgttggctgcttggccatatttgtcactgtgatctccctcttggtgtacaagttatcaatactctggctgaccatcatcat

SEQ ID NO: 143222 - DNA, 75 bp, Homo sapiens
aaagaaagggaagctattgctgggattttgaggaggattgtcaccagacctgcaatctatggagcagattcggag

SEQ ID NO: 143223 - DNA, 74 bp, Homo sapiens
ggagcaagtctgcatcgcagaggccagggtactctctgaagatggcagaagctcaccaagctgtggcctttcag

SEQ ID NO: 143224 - DNA, 88 bp, Homo sapiens
agccggctgagaacggcagcggcgagggctccacgtgcagcgtctctccgggatgactcactggttgtgtggaaggaagtcgatttga

SEQ ID NO: 143225 - DNA, 50 bp, Homo sapiens
cctactatcacgacgggaagctgtggaggctgacccgcggctgattgagt

SEQ ID NO: 143226 - DNA, 100 bp, Homo sapiens
gaagcggcgccgagcgcgtattaacgagagcctcgctcagctcaaaaccctcatcctggacgccctcagaaaagaggggagctccgggggcctgtcccat

SEQ ID NO: 143227 - DNA, 100 bp, Homo sapiens
attggaaggaggagattctgaagataaggaggctttaaatgaagaaattgttaatagaaagaagaatgtagatcaagctattaaaaatggtcaggctctt

SEQ ID NO: 143228 - DNA, 96 bp, Homo sapiens
gacgccaaaatggaacggaagatgaatcttatgaatataggcctcggtctagcacaaagtctaagggtgaaatctattcgaagtatacctgcctac

SEQ ID NO: 143229 - DNA, 75 bp, Homo sapiens
aaagaagaagggggaggatgaagacaaaggtcctgcggccctacagcaacgtgtccaacctgaaggtgtgggact

SEQ ID NO: 143230 - DNA, 75 bp, Homo sapiens
cgtcttggatgagctcagccgggtgtttgctaccaggttttgatggtacagtccaggtctatgatgccacatctt

SEQ ID NO: 143231 - DNA, 82 bp, Homo sapiens
tgcgaggctcggagaaacaggcgccgcgggctccgcgcccggccggacccgggcccgaggagccagggagtaacgaagagat

SEQ ID NO: 143232 - DNA, 71 bp, Homo sapiens
cagatcgaggtgctgcagcacgtggccaccaacctggggcgcaccccggggcccagcgacctgacagttac

SEQ ID NO: 143233 - DNA, 75 bp, Homo sapiens
aaggtgtgtggattctccgcagcccgtcggtcaggtgccatcgcctgcaggattctttattcagctctgacagtg

SEQ ID NO: 143234 - DNA, 78 bp, Homo sapiens
ggacgtgtacaacccgacgaggaacgaatgggacaagatcccgtccatgaatcaggcaacatgagtgagaatgaggaa

SEQ ID NO: 143235 - DNA, 83 bp, Homo sapiens
ccctgcagaagctggaggaggcagaaaaagctgcagatgagagtgagagaactgcttcccaagttcatttaatgaaattttca

SEQ ID NO: 143236 - DNA, 103 bp, Homo sapiens
gtgttctccaaataccagctcgacaaagatggggttgtcctctttaagaaggtggaggcctgaattttgatctatgttctacctacatccagctggctgaaag

SEQ ID NO: 143237 - DNA, 74 bp, Homo sapiens
gctagttcctctccagctcagccgcgtagaccaatgatgcgagctcagagtcaatagcatccttctctaaacag

SEQ ID NO: 143238 - DNA, 100 bp, Homo sapiens
aagtccaagaagcaaaaaagggactgctaagaagataccaccagctcctcagtgggtagtgcacttccacgaagacgctgctgtgcatatattaccattg

SEQ ID NO: 143239 - DNA, 75 bp, Homo sapiens
tgtacagaaattgaaaggcttcaaagctagcaggttcccgtgtggccggtggttagggaagggcatggatgatgg

SEQ ID NO: 143240 - DNA, 100 bp, Homo sapiens
ggccctgtggcatgaggaagctgggggcatcttctccccaggttgggcccatgagatgtgtgctctgtatattccggaggtacaatttgccagtgtttcc

SEQ ID NO: 143241 - DNA, 74 bp, Homo sapiens
ccggggtcttcaccgagctcattaaaggattcggagggtgcatctgcccggaagactcagactcctgcagccca

SEQ ID NO: 143242 - DNA, 75 bp, Homo sapiens
ccggctatggccgtgccctggggctgagccctcagagatgccctgtatccaagcccaatatgggacaccagcacc

SEQ ID NO: 143243 - DNA, 100 bp, Homo sapiens
agacccagcaggcgtctgaggatgtgaagttcatttccaatccgccctccatggtggcagcggggagcgtggtggccgcagtgcaaggcctgaacctgag

SEQ ID NO: 143244 - DNA, 83 bp, Homo sapiens
atgaaaaagaagaaaatgaaggaaagcgaggctgacagcgaggtgcctttactacatgtgtgatctgaaaaccctgcttggtt

SEQ ID NO: 143245 - DNA, 97 bp, Homo sapiens
ctttcaggaaggagccattatttatgtcatcaagaagaatgacgatggtgaccggaatgagaagatgaaaaatcaaattaagcagatgatggatgtc

SEQ ID NO: 143246 - DNA, 82 bp, Homo sapiens
tctgactgctcatgagcccccgctgctctatgacctgtccaaggaccctgtggtgcctgggtcccggcaggaagaagtgatc

SEQ ID NO: 143247 - DNA, 88 bp, Homo sapiens
tggaaacacccctaactctcccaggtcaatgctgctgaatcaaagataacaaatttaatatacttaaaacataccttggaacttgtgg

SEQ ID NO: 143248 - DNA, 50 bp, Homo sapiens
gacatggaacagggactcactggggatggctctgagtaaatcaatgcatg

SEQ ID NO: 143249 - DNA, 120 bp, Homo sapiens
tcgcacaccaagggcatcaaatgaggccagacagagactcatttcgttaatgtcagccaaagaaactctccctgatttggtttccatcattcctgacacagtcccgagtactgaccttct

SEQ ID NO: 143250 - DNA, 101 bp, Homo sapiens
cggacccagcagacatgaacgctctcgctctgggtccctcagaatatgactctctgcctgaaaatagcgagacaggtcagatgtaccaacagtaccagcaa

SEQ ID NO: 143251 - DNA, 83 bp, Homo sapiens
tgggaggacccgggacaccgcacagccgggaaatgattcagagcattcttcactccagaataatgagcaaccctctttggcca

SEQ ID NO: 143252 - DNA, 100 bp, Homo sapiens
ccgagatgcagctgctgtccttgtgtccagtgcatttgaaacgccactttatgtttcgaaaccatctctgtttagtttttgaaatgctgtcctacaacct

SEQ ID NO: 143253 - DNA, 75 bp, Homo sapiens
gtctccaaaatgagtcgcatcttcaacccccatctaaatctgcaactcgacctagcccctctccggaaaggagca

SEQ ID NO: 143254 - DNA, 75 bp, Homo sapiens
tggacagccagatccggagtaagcaaaactggagtcttctgcctgcgcagatggtagtgaaaacctttatggata

SEQ ID NO: 143255 - DNA, 127 bp, Homo sapiens
ggacactttgcgttcgggctgggagcgtgctttccacgacggtgacacgcttccctggattgggtggccttggataagggctgctcccaattccgcctggccgtcctggactggaaccagagggcca

SEQ ID NO: 143256 - DNA, 82 bp, Homo sapiens
aacaccacaataatccacagccaagaagatggctgtgccacccacgtatgccgatcttggcaaatctgccagggatgtcttc

SEQ ID NO: 143257 - DNA, 74 bp, Homo sapiens
gcgcgaagaggctggactcggattcgttgcctgagcggttaagaagattgtctaccaaatatagaacagaaaag

SEQ ID NO: 143258 - DNA, 83 bp, Homo sapiens
ccagctcccgcctccatctgaagagggctccaggcatccggtcctggtccctgctggttgtatacgctcaacggcaagaaagt

SEQ ID NO: 143259 - DNA, 83 bp, Homo sapiens
cagagttgtttcctccatttgctaaaggaatagtgtttggaagatgaagtcctcagtacattctgaagaagatgattttgttc

SEQ ID NO: 143260 - DNA, 75 bp, Homo sapiens
taacaagcggttctctaccctgtaaaggtgtcccaccggccttccgggttccagcgccaggcctggtgcctgccc

SEQ ID NO: 143261 - DNA, 99 bp, Homo sapiens
aatcagggagctcttaacccagtttgaaacgtaactggttccctgaccagctacccgtacagtgaggacgcccgccagggtgagcagtacatgaacacc

SEQ ID NO: 143262 - DNA, 82 bp, Homo sapiens
aaggagcaggatttagaggaccactagttggaccccatcctcgtgctggaggaacagggaaggtgctgagctactggtgctt

SEQ ID NO: 143263 - DNA, 50 bp, Homo sapiens
taaatcttccagagctgcacaccagcgatgtgcattttgtaagcactttg

SEQ ID NO: 143264 - DNA, 75 bp, Homo sapiens
aaggacacaaatagatgtaggcagaatacctttacagaggttaaaattggatcagtttgacaacttagaaaaaca

SEQ ID NO: 143265 - DNA, 100 bp, Homo sapiens
gcccttccagagcaagcatggagcaacaggatcagagcatgaaggaaggggtggaagtttagctgatgctataagtgaaaactacagaatcatgagttac

SEQ ID NO: 143266 - DNA, 50 bp, Homo sapiens
ctgtatcctcagttgactcattcactcagagatgcacaggtgattgagct

SEQ ID NO: 143267 - DNA, 95 bp, Homo sapiens
gttagtgtgctctgagggagggtccgagccagccgctgttttgccggaggagcccctcaggccaatcttgtggaagaagaatgaagttgctgatt

SEQ ID NO: 143268 - DNA, 83 bp, Homo sapiens
tgtgcagaaggaggtcctgccgtccatgcggaagatcgtcgccacctggatgctggaggaagccatcttcgacaagagcacag

SEQ ID NO: 143269 - DNA, 90 bp, Homo sapiens
aagttacaatcgttcctgacaaagatgatgcaaaacctgtgataagtcctcttgaacttcggatggaagaattaaggcatcattttagga

SEQ ID NO: 143270 - DNA, 149 bp, Homo sapiens
caagatctccaacgtcaacaaggccctggatttcatagccagcaaaggcgtcaaactggtgtccatcggagccgaagttctctcctgcgctatggtggaaacctgtccctccaaagtgccatgagtgtacgattcaacagcaacgggac

SEQ ID NO: 143271 - DNA, 82 bp, Homo sapiens
agttttatcctagaggataaaggaaatctttgggaaagtcagtattttatatagcaatgaagcccaaggcctggctgtcccg

SEQ ID NO: 143272 - DNA, 83 bp, Homo sapiens
cagcggaaaggagcgcgcctctttttggcttggggagctgcagcgttcggtatggggaggatgtcaggcaggaccagcagcag

SEQ ID NO: 143273 - DNA, 50 bp, Homo sapiens
taatataatcaactcctctgcctgatggagtgaaggtacctgagcgcagg

SEQ ID NO: 143274 - DNA, 100 bp, Homo sapiens
acacacacgccctcacgcccggcgagcccgcgaggtgctggagaatctggtaaaagcaccattgtgaagcagatgaggatcctgcatgttaatgggttta

SEQ ID NO: 143275 - DNA, 98 bp, Homo sapiens
cattcatcattttctaatcatcagcatttacatgacagaaatcacctatgtttacagcgacagttcccaagaacatactcacagcgattgatccagcc

SEQ ID NO: 143276 - DNA, 82 bp, Homo sapiens
ccgagaagagcagagcggagggagccccagacacggtgcagcggaactgctgcctgacgctctgcaacttcagcatccccga

SEQ ID NO: 143277 - DNA, 98 bp, Homo sapiens
gaagcctgcgcaccaaactgctacttatgtcccgcaatgaagaagctaccaagcacctagagatgactttgaagaagccaaggaaattttgacaaaga

SEQ ID NO: 143278 - DNA, 75 bp, Homo sapiens
tctacagtgctcagtctttgaggaacgtcaaggtcgtgggaaataaaaggcagttctacacagactgcagcaacg

SEQ ID NO: 143279 - DNA, 98 bp, Homo sapiens
cctgttcttcgcccccattcgacgcctgcgcttggctgctttctactcgcaggaagacacagctgcccagagcagcccaggccgtggtgaggaggcgg

SEQ ID NO: 143280 - DNA, 100 bp, Homo sapiens
ctggcaaaagcctctgctctgcctccggggacaagaaactagagcaaataaccgttttgaaattaagatgaatccggcctcggcgccccctccgctcccg

SEQ ID NO: 143281 - DNA, 97 bp, Homo sapiens
gttgatacaatagtgatggcacatcataccaaactagagtcagaacgaatactagcatcagtggggaagaaacctccccaggaaattggaattaaag

SEQ ID NO: 143282 - DNA, 73 bp, Homo sapiens
cggctgtcaagactgctgagactggcgtggtgaccaagatgaagatgcagaggaccattgtcatccgccgaga

SEQ ID NO: 143283 - DNA, 90 bp, Homo sapiens
gtgcctttgcaggggagcctgagagccacagggaggacccatccagaaccgcaagtctaagcgctgtctggagctgcaggagaatagcga

SEQ ID NO: 143284 - DNA, 50 bp, Homo sapiens
cggggacttggggccgcagggaggtggctattatcatggaaaactaattt

SEQ ID NO: 143285 - DNA, 50 bp, Homo sapiens
cgaaaacaaatcagatgatgagaacgaactggtccctaggaaagaccttc

SEQ ID NO: 143286 - DNA, 75 bp, Homo sapiens
cattccaggaagcagctagtcttttctttcttggactccgtactgttggtgtaaccaaggcctggaggtctgggt

SEQ ID NO: 143287 - DNA, 127 bp, Homo sapiens
tctaccagaagagggaggtgaccaaggaggagtacaaggacatcctgcgcaaggccgtgcagaaggggccttcctgctgtgctggacgcccttcttcgtggtgcacatcacgcaggcgctgtgtcct

SEQ ID NO: 143288 - DNA, 100 bp, Homo sapiens
gttcaggaccagttggatgatgagacgttatttccatcaaaaattggacctgctgaagttcccatgatgtcacccaatggatccattcctcccattcatg

SEQ ID NO: 143289 - DNA, 101 bp, Homo sapiens
gctaatgaacctacctcaaagtgcagctacaccagcactctccaatcctcacctcactgctgtgctccagaacaagggtgttagaacaccaaccttacagc

SEQ ID NO: 143290 - DNA, 80 bp, Homo sapiens
gtaaccctacccctcctacattgctcatcggatcacccctaagatctgacaggatggcatctgatgactttgacatagtg

SEQ ID NO: 143291 - DNA, 83 bp, Homo sapiens
gggacatccgaggggcccggcccgagcccagattcggccatgaaaccaaagcaatgctgaacaacagtgggccacggtataag

SEQ ID NO: 143292 - DNA, 50 bp, Homo sapiens
gtgcttgtcgaaatcaggtagcaaaaggttcaaaccttgtactactcagc

SEQ ID NO: 143293 - DNA, 49 bp, Homo sapiens
ttccatgtagagacccctggagcacaaacacagagcagtctaaagcaac

SEQ ID NO: 143294 - DNA, 100 bp, Homo sapiens
cagtcttcgcccccatcctcaacttcctgcgcaccaaagagttggatcccaggagaataaaggcagccccgttgatgactgaaaatgacaaagcatccac

SEQ ID NO: 143295 - DNA, 50 bp, Homo sapiens
ggggaaggtgaaggtcggagtcaacgggaggtggaggttgcagtgagccg

SEQ ID NO: 143296 - DNA, 75 bp, Homo sapiens
ctggagcctcagttggaagcagccgatccagcctgcggagcctgtggggcaggggacaccgtggtgtttaaggat

SEQ ID NO: 143297 - DNA, 83 bp, Homo sapiens
tgtgacgaaggtgctaccatcgtgagagtaagtgtcactgtcaatggcgctacatggactttgtaataaccctttgaggcaca

SEQ ID NO: 143298 - DNA, 100 bp, Homo sapiens
ttgcctactggctgggaagaagcatatacttttgaaggtgcaagatactatataaatggaatcaactatgaaattataatcatagatgatggaagcccag

SEQ ID NO: 143299 - DNA, 100 bp, Homo sapiens
aagaaacgttatttttcaacctgtggcagagctgaagaagcaaacggattttgaagacgcctggagacgctcagggcagtcccccagagctaaagcggcc

SEQ ID NO: 143300 - DNA, 82 bp, Homo sapiens
attgataacaccctgtaacagctgacttaacaaacaacagttgcagttactgaaagaacggttccaggccttcctcaatggg

SEQ ID NO: 143301 - DNA, 82 bp, Homo sapiens
cagcacaggatatgccttgtcagatctgctacttgaactaccctaactcgtcactcagcctctgaagaagcttcgggttcag

SEQ ID NO: 143302 - DNA, 100 bp, Homo sapiens
tccacagccatcactcatgtccataaggagggccttcatcccagaataatcactgaaggatttgaagctgtgaaggaaaagcccttcattttttggaaga

SEQ ID NO: 143303 - DNA, 75 bp, Homo sapiens
atcaaatatgagaaagctaggccatctgaataactttactaaggcccctccagccagcgtcaggtgcagaatggc

SEQ ID NO: 143304 - DNA, 80 bp, Homo sapiens
ggcaaatggagtcgttgggaatctcttttggtacaccagaaggccagaatggaacgacttcaaagagaacttgagattca

SEQ ID NO: 143305 - DNA, 75 bp, Homo sapiens
acggcgtggaccacatagacatttacgcggatgtcggcgaagagttcaaccaggatgataatgaagataattcaa

SEQ ID NO: 143306 - DNA, 75 bp, Homo sapiens
agtgcgagaacgacatcatccccaatgtcctggaggccctggagatgtacaaggatgattggaacaaagtgtcgg

SEQ ID NO: 143307 - DNA, 50 bp, Homo sapiens
ccgggtcccaccatggccgcgaatataaggagtcaggccagggcgggatg

SEQ ID NO: 143308 - DNA, 88 bp, Homo sapiens
aagacatagtccagagagggaagtgtaaagctacaggccctgtctctgcccctggtggtcatcgtccatggcaaccaagacaacaatg

SEQ ID NO: 143309 - DNA, 91 bp, Homo sapiens
ctgctgcaccgacctcgacgtcttgcctgtgtcccacttgttcgcggcctatagactgaaatcgccaagagattgaatacgatttgtgcac

SEQ ID NO: 143310 - DNA, 100 bp, Homo sapiens
ggaagcaagcagttcagaagagccaaggaataaacatgcaatgaacccaaaaggaaaatcccgttttgtcaacctaatgaagcattcaaagaagacatat

SEQ ID NO: 143311 - DNA, 88 bp, Homo sapiens
ctcagttggaagcagccgatccagcctgcggagcctgtggggcaggacgctgtgcagagctgcaagtccgtatcactgaggctgtggc

SEQ ID NO: 143312 - DNA, 82 bp, Homo sapiens
gtagccctgtacttcatcgacaaggaggaggggaccgaggctatggggggaaccggttcgagtccaggagtgggggctacgg

SEQ ID NO: 143313 - DNA, 83 bp, Homo sapiens
cgacatgttcacgcacgggatccagagcgccgcgcacttcgtcatgttcttcgcgccctgaaactaatctggattcactccct

SEQ ID NO: 143314 - DNA, 100 bp, Homo sapiens
gcctcccaaggtgctggaattacagtgatgccatctgcagttttgtgatctgcaatgattcttcccttcgaggtcagcccattatctttaatcctgactt

SEQ ID NO: 143315 - DNA, 98 bp, Homo sapiens
tactgcatgtgcttccagaggagcccaaagatgagtgtgggtcagagagccaaactgactatatctccagattatgcctatggtgccactgggcaccc

SEQ ID NO: 143316 - DNA, 73 bp, Homo sapiens
ttgtgccctagcaccccgagaaccgtcagtttgagccagatgatgtcgtcgtgtgttgatggctcaacatttt

SEQ ID NO: 143317 - DNA, 100 bp, Homo sapiens
ctatcctccctccctggcacccctgggaaaataggtctgcagccagaaaactgaaggtcagagaggtccgtggtggatgactggattgaatcatataaac

SEQ ID NO: 143318 - DNA, 76 bp, Homo sapiens
ccacctccggctgaagctccaggagctgaagaccgctcgggcatggagaattccgcttcggtggagcagctccagg

SEQ ID NO: 143319 - DNA, 82 bp, Homo sapiens
ccgcaagatactgatccggggcctcccgggggacgtgaccaaccaggctaactcaggtgagatggagccgctatagtcctga

SEQ ID NO: 143320 - DNA, 98 bp, Homo sapiens
gcccggcgctttccccgcaagatggacggtttcgccggcagtctcgaactcacgtgctgtgtgtcagactgagctttccctgattcattctacaatcc

SEQ ID NO: 143321 - DNA, 98 bp, Homo sapiens
atgtagcttacagttccaaccagatcaactggcagatcttcaaagggaacagcacaaggaatgtgatggtcaggctgccagatgggacctcactgacc

SEQ ID NO: 143322 - DNA, 100 bp, Homo sapiens
aggcaactgaaaactgttcttggacctgcggtgctatagagcagttcctcagcactttgtttgcccccttaaactttgtcatggagaaagtggagagcat

SEQ ID NO: 143323 - DNA, 100 bp, Homo sapiens
tcctcggttctccatacccgtgacctggggatcgctacggaccttaaaatacccgcaacagccccttcgtcccaaaaggatgccctgcagtggtctcgcc

SEQ ID NO: 143324 - DNA, 97 bp, Homo sapiens
ggtcctgagccgagggctgtttcctggcgtgcggccgctgccaatcactcccattggggtgacagcggccatgagtttgcctgagaatacagatcaa

SEQ ID NO: 143325 - DNA, 100 bp, Homo sapiens
ttgtccaacagaacgacctagtatttgaatttgctagtaacgtcatggaggatgaacgacagacggtctggaaaatcccgaagcagaagcccgtattcat

SEQ ID NO: 143326 - DNA, 100 bp, Homo sapiens
tgaaggtgtattcccttaaaaagacggacagcccatcgtgtgaactatagagtttgtggacagatttatattggactgagcagggggaggaacatttaag

SEQ ID NO: 143327 - DNA, 88 bp, Homo sapiens
gggaattccttatagagttattcacaatgcctccataatgaatgctgtaggctgctgtggtttacagaaagggctattgcaagacacg

SEQ ID NO: 143328 - DNA, 83 bp, Homo sapiens
ccccgctcccggggtccccggccggccaagcagcctcccgcgacgatgcccctcaacgttagcttcaccaacaggaactatga

SEQ ID NO: 143329 - DNA, 101 bp, Homo sapiens
gtggggctgcaggggaagctgcgggccgtgggggccggaggagaagccggctccacgcgcagctgctgagatacaactcgtcaacgaatcaaattcagtga

SEQ ID NO: 143330 - DNA, 83 bp, Homo sapiens
ccactagacagagccgggcctagcccagagacatggagagttgctacaacccagaactcctggaagcaggacatggagcgggg

SEQ ID NO: 143331 - DNA, 75 bp, Homo sapiens
tacaaatcacacgcataatggatgaaaggaaccgacagcaccagtaactccagatagtggttattcatcagccca

SEQ ID NO: 143332 - DNA, 82 bp, Homo sapiens
cgcagagcgccgaggaggctttcctgctggtggcaaccgcctacgagacactcaagattacaccaccaccttcactgtcaga

SEQ ID NO: 143333 - DNA, 119 bp, Homo sapiens
ggaggtgccgcgcggctcggagccctggaagcagcagctcaccgaggacggggactcacaatgcagatcttcgtgaagactctgactggtaagaccatcaccctcgaggttgagcccag

SEQ ID NO: 143334 - DNA, 87 bp, Homo sapiens
atatgaaaatggctcattttattttgctaaaagacatttgatagagatgggttacttgcagggtgagtggaagccccggcagatcga

SEQ ID NO: 143335 - DNA, 100 bp, Homo sapiens
ctgggatgtgaggagcgcctctgcctggccgcgaccccgtctgggagattcagaatggacagtttagaagaacctcagaaaaaagtctttaaggctcgaa

SEQ ID NO: 143336 - DNA, 90 bp, Homo sapiens
aattttagggtcctttatatagaagggagagagagaagatgactgaggaggaggtggagaccgttctggcaggacacgaggacagcaacg

SEQ ID NO: 143337 - DNA, 101 bp, Homo sapiens
taaacaaagacgagcaggactaaacgaattcattcagaacctagttaggtatccagaactttataaccagccgaagataaccagattggattttaagaaga

SEQ ID NO: 143338 - DNA, 83 bp, Homo sapiens
cgccccctgctggttgtgcgaaccccgggcagcccgggaaatctccaagtcagaaagtggatcatctccgaattggcttgtta

SEQ ID NO: 143339 - DNA, 100 bp, Homo sapiens
atttcgtcataagaccgcgaccagacaggcggcgccatcttcgaacttagacttccggaaggactttggcgagggaaggatgccaattctgcgcttctca

SEQ ID NO: 143340 - DNA, 100 bp, Homo sapiens
gccccagccgcggccgccctggggacgcagacgccaaggcccctccggccagggccgggagccgggccggcctagccaggattgacttctaaggactctt

SEQ ID NO: 143341 - DNA, 73 bp, Homo sapiens
tcaaacagaatttcacacagggtattccatggagaatgaggcatatcacacctgaaaaattttatgtggaagc

SEQ ID NO: 143342 - DNA, 100 bp, Homo sapiens
cgggaagatggcggaacaggctaccaagtccgtgctgtttgtgtgtctggaacctaaaggcagacccagaagagctttttacaaaactagagaaaattgg

SEQ ID NO: 143343 - DNA, 100 bp, Homo sapiens
atggatgttcttcttcgagtatttgtagaagggtcacgagaagagaatgccttctagatgcaaaatcacctccaaaccagaccacttttcttgacttgcc

SEQ ID NO: 143344 - DNA, 100 bp, Homo sapiens
gtgtctgctgatcacttggagtgctgtcccttggaacaggaggagtaagattgagagtattccccgcgtagctgctcttggggtagaatgtgtcagttct

SEQ ID NO: 143345 - DNA, 98 bp, Homo sapiens
gccgagctggacccggaccggttttggcagagcactgtccagagcttcctccagtggacaatagcatatttgtcgcaaaggaggtggaaggacagatt

SEQ ID NO: 143346 - DNA, 100 bp, Homo sapiens
tggtggaatatgccaaggaaaaactggagagcttcatcaaaaatagtgatagctttgataagagcttactccacgggaacagcctctagataatctgagt

SEQ ID NO: 143347 - DNA, 100 bp, Homo sapiens
agctcaccgaggacggggactctattggtaaaggttttcaaggtgtcatgaaaagatggggatttaaaggccagcctgctacgcatggtcaaacgaaaac

SEQ ID NO: 143348 - DNA, 88 bp, Homo sapiens
tcagttggaagcagccgatccagcctgcggagcctgtggggcagggcttaaaagacaaccttcttgcttctgggacatccagcctgac

SEQ ID NO: 143349 - DNA, 98 bp, Homo sapiens
ccagttggaccttttggacaggaaagtgtaacatcagttacagaggtgaaaaggtaaactatgaaaagtttagaaattggctttttctaaacaaagat

SEQ ID NO: 143350 - DNA, 75 bp, Homo sapiens
ccgagcgaggccaaccttcaggaggaggagaatttcagaaactgtggaggagtgtcactgtagattccatggacg

SEQ ID NO: 143351 - DNA, 82 bp, Homo sapiens
ggaagagaagaacttctctgctgaagaagcatcttttagggatcagcctgtgttttttaggcagaggtggaggagacactga

SEQ ID NO: 143352 - DNA, 97 bp, Homo sapiens
ccatatggtcagcaccacggcccccatggactccaacctcatccagctcaccatggatgatgatatcgccgcgctcgtcgtcgacaacggctccggc

SEQ ID NO: 143353 - DNA, 100 bp, Homo sapiens
gcctgcgatgcgacaacttcacctccagctggagagacggccgcctcttcaatgccatcatccaccggcacaagggcggaccgcggaacccgaggccatg

SEQ ID NO: 143354 - DNA, 74 bp, Homo sapiens
gcacatcgtggtggtcggatttcaccacaagaagggctgccagaggtaccgaaatgctacatttggctgtgtta

SEQ ID NO: 143355 - DNA, 89 bp, Homo sapiens
ttcattgagacagacttcagtggtattacagaatttggttacaactggacacattgttcatatagaatctttaaatggatgagatggct

SEQ ID NO: 143356 - DNA, 101 bp, Homo sapiens
tgaggtctgtcggagctgcccttcagtgtggtccctccttgtggtccatttctgggcaccatgggctccacagtgtgcacagatgaacgaagttatggcag

SEQ ID NO: 143357 - DNA, 83 bp, Homo sapiens
cttggaaaaacgtgtgggtacgaccttgtattctgaaaaggaggacaaatatgaagaagaaattaaacttctgtctgacaaac

SEQ ID NO: 143358 - DNA, 99 bp, Homo sapiens
gaagttaaaacatttcagggcaagccaattatggaaccttccctgtatactgtcaaagccatcctgattctggacaatgatggagatcgactttttgcc

SEQ ID NO: 143359 - DNA, 49 bp, Homo sapiens
tctgcctcggggacgaaagcaggcttacggagttcctatgctagtcagc

SEQ ID NO: 143360 - DNA, 100 bp, Homo sapiens
gcggccacagattgacaagaaaggacgggctgtctcatggaccttctctgaggtcaaaatgcagatcttcgtgaaaacccttaccggcaagaccatcacc

SEQ ID NO: 143361 - DNA, 98 bp, Homo sapiens
aatgaattggatgaacaaaatggttctgctgtgaatgggaacatagaattggagctcctggagttgaggaaataaaaagtaactctttttttgaaggc

SEQ ID NO: 143362 - DNA, 50 bp, Homo sapiens
gacgagtgctgtgactgtgttggtcatttcttcagatagctccccagctg

SEQ ID NO: 143363 - DNA, 100 bp, Homo sapiens
aagccccggactcgtggagttgtgaacgccgcggactccggagccgcacaaaccagggctcgccatgaagccagatgatcatcgagcccaccagcccttg

SEQ ID NO: 143364 - DNA, 76 bp, Homo sapiens
cagcccctgttgggacacagacagtggggaaaaactggtgcctccagaactcagagtggctgctcttagatcaaca

SEQ ID NO: 143365 - DNA, 100 bp, Homo sapiens
cgcctggaggaccagtatttcccatggagggtgtagcccatcagtgttatcatggtttcatgaaggctgtccaggaaggaaacattcagtgggagagccg

SEQ ID NO: 143366 - DNA, 74 bp, Homo sapiens
ggcgccgccgcccccgggctcgcggcctgcaggttttcaagcctatggctgatgctgctgtgaagattgtggag

SEQ ID NO: 143367 - DNA, 75 bp, Homo sapiens
acagcatcttggaagtccttagctaccaggatgcggtagatgacattaatgctgataagaatatctcttctgcac

SEQ ID NO: 143368 - DNA, 74 bp, Homo sapiens
acttgaaatacagactgttggggaacaagaggttggatggcaagcatgtggtgtttggcaaagtgaaagaaggc

SEQ ID NO: 143369 - DNA, 83 bp, Homo sapiens
ggtttactctgaatcccaatcctacaggagttcaaaacccacacatgccatttcataattctgaatcatgtctgataacggag

SEQ ID NO: 143370 - DNA, 74 bp, Homo sapiens
aacctgatcccaaaattattgaaaacactcgaagggagtcggatggtcagggctgccctttctgtcgttgtgaa

SEQ ID NO: 143371 - DNA, 97 bp, Homo sapiens
gagattatctttaaaatcgtggggaccaaatggctggccaaggacttgtttctgtacagaatctgagttgcaagaactctctgaagtgcttgaactc

SEQ ID NO: 143372 - DNA, 108 bp, Homo sapiens
tcggagcttatactcctcccagtgacgggtctggagtgcgtgggggaccggctgttggcgggtgtcgtgaaaactacccctaaaagccaaaatgggaaaggaaaagac

SEQ ID NO: 143373 - DNA, 50 bp, Homo sapiens
gggcagcggaggggcgacaaacactctggcccccagaagcttctccacat

SEQ ID NO: 143374 - DNA, 100 bp, Homo sapiens
tgtgtcctaccatggtatttgctaacgtttagagagtgcttccccttgccgagcactggcaaatgccagaaaattcttgggaaaaatgcagcactctggg

SEQ ID NO: 143375 - DNA, 75 bp, Homo sapiens
tgagtacacacaagaagaaatagacgccttcccaagattgtggactccctgtccagaccaaaacgaagaagacgt

SEQ ID NO: 143376 - DNA, 75 bp, Homo sapiens
atatactttttggaaatgagacatcaggccttgaaaagaggatagaccaggctgtggaggagtggaatattgaga

SEQ ID NO: 143377 - DNA, 90 bp, Homo sapiens
gttcatcgccgtgttatccttgagtaaagcacgagggccgggaggaggatcagcggttgatcaacttggtaggggagagcctgcgactgc

SEQ ID NO: 143378 - DNA, 75 bp, Homo sapiens
agcatttaaccagcatggctacttcatattttggaaagcagtttttaagacaaaagcagctgacacaggatgatg

SEQ ID NO: 143379 - DNA, 74 bp, Homo sapiens
tgttcttaacccagaagtagctgaatgtgttactccattgctgaggagtggtgatttgatgaaggctgctgcag

SEQ ID NO: 143380 - DNA, 50 bp, Homo sapiens
cttcggaggccagatcaccgatgaggtatccgcccccagatcatgaacgg

SEQ ID NO: 143381 - DNA, 90 bp, Homo sapiens
gccccggggacaccagcagctctgctgcggagcgggaggaggaccgaaaggccatggagagcaagctcctcatcgggggcaggaacatca

SEQ ID NO: 143382 - DNA, 100 bp, Homo sapiens
aatggaaatttcaggaattaagtcaaccacgttctcataccagcctgaagggaagcttgtgggctgtgccatcatccatgtcaatggagacagcccagag

SEQ ID NO: 143383 - DNA, 100 bp, Homo sapiens
cattctcggattctagaacagagtgctaacaggaatgaatgaaacttctgctgtaatcattgctgcaccacagaatttcactccctctgtgatctttcag

SEQ ID NO: 143384 - DNA, 75 bp, Homo sapiens
ctagaagatttcacagcaatgctggactgcagtgactatgttctaggtcccaggtgtgacaccttcagcaggtct

SEQ ID NO: 143385 - DNA, 51 bp, Homo sapiens
aatgaatacttcagggatttgaattgcacagccagagaacaacacatcaca

SEQ ID NO: 143386 - DNA, 75 bp, Homo sapiens
ctgcagactgtccgcctggagcgttacaaggccttctacattaccgaaatgcactcggtgatggaaagagagcca

SEQ ID NO: 143387 - DNA, 87 bp, Homo sapiens
tttgagtcctgaagcgcagagtcttttacgaatgcttttcaagcgaaatcctgcaaacagattagatttgccactgtagaagagcca

SEQ ID NO: 143388 - DNA, 100 bp, Homo sapiens
gccccaccttttcagaacgcattttcatcgctgggtccaaacagtacaggtggacgacccaccggagcccgtgtacgcgaacatagagaggcagccccgg

SEQ ID NO: 143389 - DNA, 80 bp, Homo sapiens
gggttgggagaggaagtggctttggcaaattgagataattggttctacaaatcttataattctgctagaggatgaagtct

SEQ ID NO: 143390 - DNA, 91 bp, Homo sapiens
aaagtcgagtatctggtgaagtggaaaggatggcccccaaagaccaagaatcgccttcagccctgtctggtgcatccttggcagaaagtga

SEQ ID NO: 143391 - DNA, 90 bp, Homo sapiens
catcgtcaaccacgtggcccggtttgcggcccaggccacacaacagcggacggccacggccatgaggtttcctcccaaatcgtacaacaa

SEQ ID NO: 143392 - DNA, 88 bp, Homo sapiens
tcctccagctgctgaccctctataccccacctggtggcccgtcctcacttgggaaccagtcaacatgccttctggaagtctctcttgt

SEQ ID NO: 143393 - DNA, 75 bp, Homo sapiens
atgagacagaagatctggaataatatgccgaaggatcatcctgtacaagttatggaagataaattaaaagcagct

SEQ ID NO: 143394 - DNA, 109 bp, Homo sapiens
gggctcggtgcatgaggccatgactgatctcattttgctgatgggctgcgtccctgctggctgtgctgctgctgctgctggagcgcggcatgttctcctcaccctcccc

SEQ ID NO: 143395 - DNA, 90 bp, Homo sapiens
gcggtcctggtgcggaccctccggccgcagccatgtgggacccgcgggcagctaggagtggtaaaatttcagccttccctttggccttgg

SEQ ID NO: 143396 - DNA, 51 bp, Homo sapiens
tgcatccagtttctgcgcccagaatcaaccttgtcctatgttaggcagctg

SEQ ID NO: 143397 - DNA, 100 bp, Homo sapiens
gtactccccgtactgcctcacccagatagcctgggctggaagctcttctacgtcacaggctgcctgtttgtggctgtgcagaacttggaggactgggagg

SEQ ID NO: 143398 - DNA, 100 bp, Homo sapiens
attttctaccaagaagatccagaatgccagaatcttagtgagaattcatgtccaccttcagagctggaagtcgagtgtgctactcaactcaggagatttg

SEQ ID NO: 143399 - DNA, 75 bp, Homo sapiens
gggacaccaagaagcagggaaatggctaccggctctctgaccagttccacgacatcctcattcgaaagtttgaca

SEQ ID NO: 143400 - DNA, 100 bp, Homo sapiens
gcgggacagagcgcctgcgaccccagtcggtgctccggggaggtcacctgacgaggagaaacgtgttcagttgatcatcaaatacttaaaggaccttgaa

SEQ ID NO: 143401 - DNA, 75 bp, Homo sapiens
ggggatgattacagttcttcctaaaaaagtaccacttccgctgtcacggtaaagtccgccatcagaagactgaag

SEQ ID NO: 143402 - DNA, 74 bp, Homo sapiens
cggtgatgacttcgatggagtgatgaacagcacagccagtactccaagttgctgctggcctctaaggagcaggt

SEQ ID NO: 143403 - DNA, 75 bp, Homo sapiens
tttacacagagcagttgcatcttgtagtgaggtccaggtgcaggtacagcagtctccgcaacaggtctcggctca

SEQ ID NO: 143404 - DNA, 100 bp, Homo sapiens
gcgagatatctggccgcctctgccgcagctggaggtcttgggcgtctttggtactggcttttttaggggtctgcctggggattacccttgctgtggatag

SEQ ID NO: 143405 - DNA, 100 bp, Homo sapiens
tcaacaaataccttgcatacatggagtctaaaggagcccatcgtgcgggtcttgcaaagacgtccttctatggccgcttcaggcacttcttggatatcat

SEQ ID NO: 143406 - DNA, 74 bp, Homo sapiens
tcttcccttacaagggttatatatggaattatggtaccctccctcaggtgctgactgggttacttttttaaaca

SEQ ID NO: 143407 - DNA, 102 bp, Homo sapiens
ctcgcgtttccacttcagagatctggtgtggagccggagccttttgaagttggagaccacctgactgaggctagtgggaagcttcacctgctggataagcta

SEQ ID NO: 143408 - DNA, 100 bp, Homo sapiens
gcttagttcaatggctgaaacacagtcgaaaagaatactgtgaattatgcaagcacagatttgcttttacaccaagcatttgacattatcacagactgac

SEQ ID NO: 143409 - DNA, 50 bp, Homo sapiens
aaacaagagatttccacagaagggcggcgactggcggcgcgatggacctg

SEQ ID NO: 143410 - DNA, 100 bp, Homo sapiens
taggaaaagacaagctttccagagaatgtttcagagaaagttacgtggagcgtgggcgtttcgcagactcctaaggccagaacacaaagcgtgaatccgg

SEQ ID NO: 143411 - DNA, 98 bp, Homo sapiens
ttggtgccaagccgaaccgagccggggcgccgggagctattgggacctgcgggtggaggaaggagaggccagtctaccctcccctgccatgaccctgt

SEQ ID NO: 143412 - DNA, 100 bp, Homo sapiens
cctgggcgtgtggagccaggcagtctcgaatcctctcctggtttagggaggggaagtgtgttaacagggcacaaccattatgtgatgtgtgctcagttcc

SEQ ID NO: 143413 - DNA, 75 bp, Homo sapiens
caatacagacgacaaaaccagcagtcttcatctgggaaaggaaaacctcttcagcgcaaggtgaaaccacctaag

SEQ ID NO: 143414 - DNA, 50 bp, Homo sapiens
cccggcaagacgcccgtgtacgattttccaagatagcctccaacacccag

SEQ ID NO: 143415 - DNA, 51 bp, Homo sapiens
aaacacgccagcttcaaagcaaggcaagtgtcgtggacttcgtactgctag

SEQ ID NO: 143416 - DNA, 50 bp, Homo sapiens
caaacctccaatccacctggctctccggaattacatgaatgacagtcttc

SEQ ID NO: 143417 - DNA, 98 bp, Homo sapiens
ttgcagatcaccaacctcttgaccagaaacctctgtagaggagcaggatgcaaccgacaggctgtggccggacagctgctgcccagcacatggagcct

SEQ ID NO: 143418 - DNA, 78 bp, Homo sapiens
ttccgcagtgattgaagctttgataaatgaaatcttcctaagtatagctgaagtgagtagtgaatatagtatggacaa

SEQ ID NO: 143419 - DNA, 100 bp, Homo sapiens
ggggtccggactgcgagatggaggaggggcggcgctgcggccacccggcagttggtgttggtattaggagatctgcacatcccacaccggtgcaacagtt

SEQ ID NO: 143420 - DNA, 98 bp, Homo sapiens
acaataaaagagacctctacttagctcagcaattcttaccttgtggttatggcagttgctcagctgtattggcacatatcaccaaaatctgaagctgg

SEQ ID NO: 143421 - DNA, 73 bp, Homo sapiens
tggactgcgacaacggctcagacgagcaaggctgtcgtccctcgccggctccctcggggcctccactgcagcg

SEQ ID NO: 143422 - DNA, 46 bp, Homo sapiens
ttgtcctgtgctggggctgacagttttctggatatgccgcagaagg

SEQ ID NO: 143423 - DNA, 82 bp, Homo sapiens
gggacgcgggcgccaggaccggccgaacgcagaggtccggcctctttggcctacccccgttggctccgctgccccaggtcga

SEQ ID NO: 143424 - DNA, 100 bp, Homo sapiens
tttgcattgactggaaacaatggcatttacagaaagagtcaacagcagtggcaacagcaaagtggaagatgctttctacaaaggtgaactcaggctgaat

SEQ ID NO: 143425 - DNA, 75 bp, Homo sapiens
caccagtagcttttctgagaatacttgctgaaaaggaagttttctggaatgggggggacacagcgattgccacgc

SEQ ID NO: 143426 - DNA, 75 bp, Homo sapiens
gcggccgagcgggcggcttcctggcctgggcgctccggtggcggcggagagcctcattttacagatgaggaaact

SEQ ID NO: 143427 - DNA, 82 bp, Homo sapiens
ggacccaggagaaattcgccctcaaaggtttggaaatcccttgtctccaggttgctgggattgacttcttgctcaattgaaa

SEQ ID NO: 143428 - DNA, 90 bp, Homo sapiens
aggtctgatggattctgtggaggagtctccccaggacagtgctatcacccgggatattaaccgaacattcccagcccatgactactttaa

SEQ ID NO: 143429 - DNA, 75 bp, Homo sapiens
gatggcggccgcgaccccggccccggcctcggccgtggcgagcggctatgacagagactccactttcaatgtgtt

SEQ ID NO: 143430 - DNA, 80 bp, Homo sapiens
acctctacctggagcatttgctgcagaagcgtagtcggccagagaacactctgctccagccaaggtggtgagggcagctg

SEQ ID NO: 143431 - DNA, 82 bp, Homo sapiens
agccccccaacatcctgctcctgctcatggacgacgccgggctctcgccatgggtcactgtcgcctctgccacgggaagttt

SEQ ID NO: 143432 - DNA, 96 bp, Homo sapiens
caaattcatcccagaaatctaagaggaaaaatgctggcaggtggtgcaagcaaggacatctatgcatagaattctgacagcagctggaccctcaac

SEQ ID NO: 143433 - DNA, 100 bp, Homo sapiens
gagtgttcgttgtgccagcgactaaaaagagccgattacacctcaacaagaaggcaactgacaaacagccttatagcaagctcccaggtgtctctcttct

SEQ ID NO: 143434 - DNA, 98 bp, Homo sapiens
ctcacccatcacaaccaccagtcccaagcctacctcccagaaacattaaacctccgtttgacctaaagaaggtgggagtcaatcattttgacaagtct

SEQ ID NO: 143435 - DNA, 83 bp, Homo sapiens
gtggtttttcggatcatgtctggtggctccgcggattataacagccatccaacatattctttacaatggatgatgtggtcaag

SEQ ID NO: 143436 - DNA, 75 bp, Homo sapiens
cagagatcaatggaaccatgaacaaatatggctacacacacctttctgcaggagagctgcttcgtgatgaaagga

SEQ ID NO: 143437 - DNA, 96 bp, Homo sapiens
caaactcagtctgtctcttgactggaggaggagaaggaaaagttgagcacattgccaaccggagttccccaaggagatgccaatagacaaattagc

SEQ ID NO: 143438 - DNA, 97 bp, Homo sapiens
ctcggcccgcgggggagccccgggagccgcacgggttctatggcctggatgagtctgacctcgacaaggtcttccacttgcccaccaccactttcat

SEQ ID NO: 143439 - DNA, 100 bp, Homo sapiens
tcggtccttacagccgctcgtcagactccagcagccaagatggtgaagcagatcgagagcaaggtctctcaggcagctgcagagcttcaacagtactgta

SEQ ID NO: 143440 - DNA, 88 bp, Homo sapiens
ttccccttgggatgtagtttttggaacatcaggtgaccaagaatatggcccaggtgaccaaagccctggacaaggccctgagcaccat

SEQ ID NO: 143441 - DNA, 75 bp, Homo sapiens
agcgcagccggcccagagctcgggtctccggggaccgaggttgatgccggcccaggatggatcagacctgtgaac

SEQ ID NO: 143442 - DNA, 83 bp, Homo sapiens
gctacacgcagttgcagtacatcggcgagggcgcgtacggcatggtcaggttctgccggagacttccatttggcctcaatgtg

SEQ ID NO: 143443 - DNA, 100 bp, Homo sapiens
agcagcagcttacagcccaacatgaactccagtgacccagacctggctgtggtcaaacccacccggcccaactcactaaaaggcgacggcggattgacag

SEQ ID NO: 143444 - DNA, 83 bp, Homo sapiens
ggtacccttcaaaaatttaaacaagaatccactgttgctactgaaaggaacatatcctgcattagagacattaacagaacctc

SEQ ID NO: 143445 - DNA, 82 bp, Homo sapiens
gccgaggcaccgaggcactcagaggagcttgatcctctcccagaaaaggttttacagcaaagacccaatgcaaacgctgtcc

SEQ ID NO: 143446 - DNA, 72 bp, Homo sapiens
agagagagccctcaacaggaaggcatgcatgtgacacctcagcttttacaaagttgatcacagtaaatggac

SEQ ID NO: 143447 - DNA, 89 bp, Homo sapiens
aggtgtcctgcagcgcctgggtcaccgtccatgaactttacagactagcatggcaaagcttctctccgatcttagtgtggacagtgctc

SEQ ID NO: 143448 - DNA, 87 bp, Homo sapiens
gtccagcagatggcggatgccctgcagtacctgcagaaggtctctggagacatcttcagcagacctgtggatgaagagccagagtcc

SEQ ID NO: 143449 - DNA, 75 bp, Homo sapiens
cctgccgcgccccatccgcaacctggaggtcaagttcaccaagggaaatcctcattgacgattcaatttgttgaa

SEQ ID NO: 143450 - DNA, 82 bp, Homo sapiens
aagctgccttgtacccacatctcccgccaggggggcatgtgctctgtgtacctgaaggacagtgagaaggttgtcagcattt

SEQ ID NO: 143451 - DNA, 83 bp, Homo sapiens
ccgacgttcgagaggaagattcttacctctttgatctcgacaataaggactgatcctttgaaatactccagccatgactaaaa

SEQ ID NO: 143452 - DNA, 98 bp, Homo sapiens
tgttcatctatggccactacaaacaagcaactgtgggcgacataaatacagaggcgtagaggctccggtgttttttgtgccaattgcctgaccacaaa

SEQ ID NO: 143453 - DNA, 75 bp, Homo sapiens
cgcaatggaaacatctatattctgagaaggttggatggcaagcatgtggtgtttggcaaagtgaaagaaggcatg

SEQ ID NO: 143454 - DNA, 74 bp, Homo sapiens
ccctgagtcgtcactcaagccccacggaggagcgagatggaatgtatcctctagaccaatctgaatataacaat

SEQ ID NO: 143455 - DNA, 83 bp, Homo sapiens
ttgcccagagcctggaacattcctggattaagggagtgcatccgccccaacccttttccccctcgtctcctgtgagaattccc

SEQ ID NO: 143456 - DNA, 82 bp, Homo sapiens
tgtgctcgctggcaccccgaacgggttgcttcccccgctgcgaggcaccatgactcctgtgaggatgcagcactccctggca

SEQ ID NO: 143457 - DNA, 101 bp, Homo sapiens
attttttgcctttgttgattaactggacaaattcaggtgttgactttaagatgaagaccatagaggtagacggcatcaaagtgcggatacagatctggtga

SEQ ID NO: 143458 - DNA, 82 bp, Homo sapiens
agaaacgagttgtggctgaggaccccggcggcagacgcaggttcgggaccatgagctggcatctgcatctgggaccgacctc

SEQ ID NO: 143459 - DNA, 100 bp, Homo sapiens
ctgctgcgctgcgtcctgctcctcgggtgcctgcacctcggccgtcccggcgcccctggggacgccgccctcccggaacctgaaggcggctaacacagac

SEQ ID NO: 143460 - DNA, 50 bp, Homo sapiens
gcacctatggacaagtctataagcatcgagagtaaacatgaggttacgat

SEQ ID NO: 143461 - DNA, 90 bp, Homo sapiens
ccctaggggtcaaaatgtggggcctgggccccctgcccagacaggagaaccaggtgcatcagcgcattgcggagctgaggaaagcaggtc

SEQ ID NO: 143462 - DNA, 98 bp, Homo sapiens
actagatcacgccagtctggaggaggatgcagagataattgacgaccttgccaacctagtggagaacacagatgaaaaacttcgcaatgaaaccaggc

SEQ ID NO: 143463 - DNA, 57 bp, Homo sapiens
acaaccaatgcgagcctgcctcttaaccgatgaggatgaagatgacgctgatctctc

SEQ ID NO: 143464 - DNA, 75 bp, Homo sapiens
caagaacagagagagaggtggacagatctgagagatactgagctgaagacctaactgcagcatgtctgtatttgg

SEQ ID NO: 143465 - DNA, 95 bp, Homo sapiens
caacactattgtcgtgccgcttttggaggatgggagaggccatggcaaagtgttatagttttgccgctggactcttccctcccttcccccacccc

SEQ ID NO: 143466 - DNA, 101 bp, Homo sapiens
agtcgcctccaggccaagagggatccttcacccgtgtctgctttgcccgaagtttttacatacaaattctactagtcacacctggccattcagtgcagttg

SEQ ID NO: 143467 - DNA, 75 bp, Homo sapiens
cagacactgaactttgggcctgaatgttctttcagaatggaaagtatacataataagatgagaggtgctgggaat

SEQ ID NO: 143468 - DNA, 75 bp, Homo sapiens
gagaacccgcccatgaagccagatttctcccaggattgacttctaaagactcttggtacgtgaggaagaaacccg

SEQ ID NO: 143469 - DNA, 90 bp, Homo sapiens
gaacatctatgtcttcccccaatgcatgtggaggcattgccctgatcctttcaggggcctttacaacaactaaacggacaggcattccag

SEQ ID NO: 143470 - DNA, 80 bp, Homo sapiens
atactcctcccagtgacgggtctggagtgcgtgggggaccggctgttggcggcatgatgccttcttctgtagagtgggcg

SEQ ID NO: 143471 - DNA, 75 bp, Homo sapiens
gcgagcggaggagatggctggcacctgggaacgctatgggatgtacagttacccagcacgtgtacctcctcctcc

SEQ ID NO: 143472 - DNA, 100 bp, Homo sapiens
cttttttgagaaaggaaggaatatatcctgactgattaggccagtaatagtagccatgagtctcgtattggtctagctgaggggttggaatccgagaaga

SEQ ID NO: 143473 - DNA, 50 bp, Homo sapiens
gaatgcacttactggctcattcagatttgcagtcctgcttgatttgcgtg

SEQ ID NO: 143474 - DNA, 75 bp, Homo sapiens
ggaaggaagcgactgcactgatccaggcaaataatctccccaaagccatcgccgctgctcacacctttctactga

SEQ ID NO: 143475 - DNA, 74 bp, Homo sapiens
cctcctgctgccttcccgtcgccgctcccgaagcttttccagaacaccttccaccatgaccacctcagcaagtt

SEQ ID NO: 143476 - DNA, 90 bp, Homo sapiens
gtcaagttttacagtcgccagggacaagaacaggtccgtaaaagccctgggctcagccagagcagggcagaggatgacgggatgaccagc

SEQ ID NO: 143477 - DNA, 90 bp, Homo sapiens
ccgggaccctccccttggaccgagccgatcgccgcggggcagttcgggccggctgtcctggcgcggccatttttgggctcccagaatatg

SEQ ID NO: 143478 - DNA, 74 bp, Homo sapiens
gaagacctattttactgataagaaaacacatctttacacactaaatggtttccacggtgatgtgtacctaacag

SEQ ID NO: 143479 - DNA, 75 bp, Homo sapiens
agtttctagacaaagccaaagccaaaaagttttcagcagtcagtaactctgggtggattttaactacaactcttg

SEQ ID NO: 143480 - DNA, 50 bp, Homo sapiens
gctgaggactgcctgtttgcagatgatttgtcattaattcggaagaacag

SEQ ID NO: 143481 - DNA, 100 bp, Homo sapiens
ttcagcatcgtcacggacactcctgagctacagagactgaagaggactcaggagcaaatcagtaatgagctcattaccatgatgctgttggtcgatgtag

SEQ ID NO: 143482 - DNA, 97 bp, Homo sapiens
cgatgaggaagtactgagcctgttggaggaactggcccggaaacaggaggacgggccagacccaagaggacgcagaggctgagcgcggagacctggg

SEQ ID NO: 143483 - DNA, 95 bp, Homo sapiens
gataagaacaccaaccaaattgtcgccattaagaaacatgttgacatagcggctttattgataaaatacaacacgtgtgtaaatgcaacagataa

SEQ ID NO: 143484 - DNA, 96 bp, Homo sapiens
ctggatttctctctggaaaggattttcattcatcatgatcctgtctacctttcatgaccaactacagttttcattgcaacgtctgccatcacagtg

SEQ ID NO: 143485 - DNA, 111 bp, Homo sapiens
gattctgcggggagacaagttcatccccattttccaaggggacgacagcgtcgttattgggtgtccccacaccctcctctgagacgccatgttcaactcgatgaccccacc

SEQ ID NO: 143486 - DNA, 75 bp, Homo sapiens
aatagtggcagaatgagcccaatggcttttctgggagaagaggctacaaggacttagtgcatcagatgtaacaga

SEQ ID NO: 143487 - DNA, 99 bp, Homo sapiens
ctttgccagagaaattcacataatttgaaccagcagcaacgtgaggtgatgatccaatgccctttgacattaaagctgagatgacactgaagacaaatt

SEQ ID NO: 143488 - DNA, 90 bp, Homo sapiens
gtgctggagcaccagccagacaacatcaaggctctcttccgcaagggcaagtgagtgtcttgggaggagccccaggacacaaccccgacc

SEQ ID NO: 143489 - DNA, 98 bp, Homo sapiens
ccggcttctcccctacgcgctacacaagtggagctccttttcctccacctaccttcccgagtgtcagcagttgagtctttggagggccccctgctcca

SEQ ID NO: 143490 - DNA, 90 bp, Homo sapiens
cgtggcctgaccattttcagcatcagcctgtgcaacagcacatagccaacataagattatggaacaaatgttgaaatgcacgaacgttta

SEQ ID NO: 143491 - DNA, 75 bp, Homo sapiens
cgcggaaggagctggagacggtcgtagctgcggtcgcgccgagaaagcaacagctgcgaatgcggatcaagctta

SEQ ID NO: 143492 - DNA, 75 bp, Homo sapiens
gaattgctgcttaaaaaacttgaaggacacattggcgtgagacctgggagtacgttgtgccaaatcattgccact

SEQ ID NO: 143493 - DNA, 90 bp, Homo sapiens
aggagctgagagagggggagaccagcgcaggtctgaggagctgagaagggaggcttacgtgaagggcaacggacagccaagacgtagatc

SEQ ID NO: 143494 - DNA, 90 bp, Homo sapiens
caacactgataaaatccactcattgctggttgtttacattcagagctctatcaataagaggaatacatattacagtgaattcgacaaccg

SEQ ID NO: 143495 - DNA, 100 bp, Homo sapiens
tgagctcgtcaagcagctgtcggccaagctcatcgccaacggaacatgtttgacaagctgaaccgtgatgcctttcatataatttcttattttttgtttc

SEQ ID NO: 143496 - DNA, 100 bp, Homo sapiens
cgacttcgagttcctcttcgagtttaaccagcgcgacgagggcgccgccgcggccgccccaggttcgagaacttgtcttggacaattgcaaatcaaatga

SEQ ID NO: 143497 - DNA, 100 bp, Homo sapiens
aaacccagccgcttctggggcctcctggcggcagaaaaagggcgtgaagcggaaagcagacacaaccactcccacgacgtcggccatcactgccagccgg

SEQ ID NO: 143498 - DNA, 100 bp, Homo sapiens
gtgagcctagggacccatttctcctcctttgacagggacatcagtggagccttctcagacccacaggcatgtcagagcgggagcgacaggtgatgaagaa

SEQ ID NO: 143499 - DNA, 82 bp, Homo sapiens
acaggctatgcaggacccctatttcttagaagacccacttcctacatcagagagtctccaagagcttttagattaccccggg

SEQ ID NO: 143500 - DNA, 99 bp, Homo sapiens
ccggctggctgaggaaatcgcctcccgagaagaagttgaggcgctatagcaaagactcaggtggactgaaggccgctatgatcgaattggtggaaaggt

SEQ ID NO: 143501 - DNA, 71 bp, Homo sapiens
gacggaaatgtgtcatcgaaagccaggtgaatacatcaagacctggaggccacggtacttcctgctgaaga

SEQ ID NO: 143502 - DNA, 75 bp, Homo sapiens
ccgcactccggagactcgcggttgctacgcgcaccatggctggaggattaggaggccagaaggagatcccttcca

SEQ ID NO: 143503 - DNA, 96 bp, Homo sapiens
tgaaggcaatgatttataccatgaaatgattgaatctggtgttatcaacttaaaagatgccacctctaagttctgtggctcctgatggatctgaga

SEQ ID NO: 143504 - DNA, 51 bp, Homo sapiens
ctacgccatccagctgtgcataggatctcatagatcagaacatactggagc

SEQ ID NO: 143505 - DNA, 75 bp, Homo sapiens
aaacctcaggacttgagtaacagcaacatgaaatgacgctcctctcctcccagtcttcatcactggtggcccctt

SEQ ID NO: 143506 - DNA, 94 bp, Homo sapiens
gtgccctctttgcaacatttcaggaaaacagagaaagaagtgataggagggctctgtaggattttttatcaagcagaaatgcatcgaacaacga

SEQ ID NO: 143507 - DNA, 98 bp, Homo sapiens
ctttggaccatggagattctgcagttgttgctctaggagctgaaaccagtgggtagatgtcgttctgaaacgcaggggccagtgtcattcaaagatgt

SEQ ID NO: 143508 - DNA, 74 bp, Homo sapiens
ctggcccctcatgtaacctcagagatctgggcagtgtaaggcaaacattggtgggcaccgatcttcctgttcat

SEQ ID NO: 143509 - DNA, 100 bp, Homo sapiens
cgtcggcgctccctgcgcggccccgctgagcctcggtgcggcggcgagcgcggtcgagatcgccatgcctaccccttagaccatgctcagcctccaagca

SEQ ID NO: 143510 - DNA, 108 bp, Homo sapiens
cgactgggcctgccccccgtgccagacaatgcggacctctctgggctggctattaagatgtggacgagtgctcactagcagaaaaaacctgtgtgaggaaaaacgaaa

SEQ ID NO: 143511 - DNA, 100 bp, Homo sapiens
gggctggcagctaccatgatccaagaggccctgaccctcatcatcttcatctgcttcacggcctccatctctgcctacatggccgcggcgctactggagt

SEQ ID NO: 143512 - DNA, 100 bp, Homo sapiens
taagcgatgatgaatcttttcttcttgaaattaggcagactcttcaaaacgcactcattcagtttgctactagtagccggatcgagctgggagatgtgac

SEQ ID NO: 143513 - DNA, 82 bp, Homo sapiens
caaaagaagaggtagtgaaggcacaaaagtctctgcacatactccaattccagggtttcagaaccgcatcgcagcatctttc

SEQ ID NO: 143514 - DNA, 90 bp, Homo sapiens
cgaggagagaaaggagaaagaggagatgttgggattcgaggggacccgattcttctgatgtagagcgactggaaagattcttcgactcag

SEQ ID NO: 143515 - DNA, 75 bp, Homo sapiens
cttcaatagatcctcaccagatgtcaaatttgtttgtcaggttatcaatactctggctgaccatcatcatcgtgg

SEQ ID NO: 143516 - DNA, 100 bp, Homo sapiens
gtactttatgctagaacccagcgcaggagtaaattgaaagaatcacttgaccttagctggatctccaaaatacaagtgaatcacccggcagttctgaggc

SEQ ID NO: 143517 - DNA, 99 bp, Homo sapiens
cggggggctgtcggggaaccatggctgccccgagagcctgacagaaatgttcgcttacgcagctagccctgcctcagtttgtacatctacctgtcggct

SEQ ID NO: 143518 - DNA, 83 bp, Homo sapiens
ggcagaggcgaagggctggtgggcgatgggcccgtggacatgcgcacctcacacagccacattgtaaatcaccttgtgagggc

SEQ ID NO: 143519 - DNA, 97 bp, Homo sapiens
cctgattctaataagcagagaaagggaccagaagctttgggcaaagtttctttacctctttttgactttaaacgtagaacttcatggaggaacacgg

SEQ ID NO: 143520 - DNA, 83 bp, Homo sapiens
cgtggtcgtaggaggctgtcctgtctgcagactaatagggatgccaaaggaaaaatatgatcctccagatcctcgcagaattt

SEQ ID NO: 143521 - DNA, 83 bp, Homo sapiens
cgtctcgctctgggtctccaggcccgcgaccgtccgccagtcgtcccgagctcagagcccgggcgctgtggaagagattctag

SEQ ID NO: 143522 - DNA, 90 bp, Homo sapiens
tcggcggtgagatcgtcagcgctgactccatgcagaaaagactgtatcttcaccattgacccatcaaccgcccgagacctcgatgatgcc

SEQ ID NO: 143523 - DNA, 83 bp, Homo sapiens
gcatggcccaggctcctgctgacccgggcagagaagaacaccaatcagggtcttcaggcctggaagattgaagacattccagc

SEQ ID NO: 143524 - DNA, 100 bp, Homo sapiens
cgcccagtcgcttcgccgactactttgtcatctgcggactggacacggagaccgggctggagccggacgagctgtcgggcacacaagtctctgaattttg

SEQ ID NO: 143525 - DNA, 90 bp, Homo sapiens
cctgtacagcctgcagaactacagacaaactgagacccagagacggcactgtgtctaagagcaacagaaaaagtggtttgagcagtgtgc

SEQ ID NO: 143526 - DNA, 97 bp, Homo sapiens
ctgaagagcgacaagccgctggcagccgcggatctcaccgccgctcagggtgaaatgacaatggatgctctgttggctcgattgaaacttctgaatc

SEQ ID NO: 143527 - DNA, 96 bp, Homo sapiens
gtggtcccagcctggagctgtgccagcctgacatggccatatcagcagcgacagcttcctgtgtgactgccagctgaagtggctgcccccgtggct

SEQ ID NO: 143528 - DNA, 82 bp, Homo sapiens
aaaggatgcctccacacctaccactacccgtgtgccagcgatgcagcaaacggggattcagcgtccgatcctttggaacagg

SEQ ID NO: 143529 - DNA, 100 bp, Homo sapiens
gacgagaagcagaagcgagaggaggaggagaagaaagcggagttcgagcggcagcgaaaaatgcaattcgaagttttcaagtagcccttcacatctatcc

SEQ ID NO: 143530 - DNA, 98 bp, Homo sapiens
caagcgcctctactacctctggatgttgtggtcccggaacagcaagcccgtgcacaccaccatcctgaatccccacatccacctgatgggcgacgagt

SEQ ID NO: 143531 - DNA, 74 bp, Homo sapiens
ttcagcctctagagtagccgagaccacagatggagtgaaggtacctgagcgcaggaaccatggtcttcattgct

SEQ ID NO: 143532 - DNA, 100 bp, Homo sapiens
gctgaagatttaagaactgaatgtgcaacttgcaagggaactggagacaatgaaaatcttgtcaggaaacatgccctgaactgtcacagaatgaaaccag

SEQ ID NO: 143533 - DNA, 100 bp, Homo sapiens
ccctgtacctcagcatgaactgcagcaaggacaaaaacctgatttatggactagaggcttttaccagatttcttaaaactgaattcagtgaagaaaatat

SEQ ID NO: 143534 - DNA, 100 bp, Homo sapiens
catgcgatgtttggaaatgatacaattacctgcacgacacatggaaattggactaaattaccagaatgcagggaaacatgttccaaatcaagtatagata

SEQ ID NO: 143535 - DNA, 100 bp, Homo sapiens
catgaagagtggcttcaggactgtgagccatctttatggatttggactgatggacgcagaagccatggtgatggaggcagagaagtggaccaccgttccc

SEQ ID NO: 143536 - DNA, 75 bp, Homo sapiens
cccttcgccttcgccctttccacctcgcggcagttcgctggtaggtgagtgctgtcctcggctcactttcctcaa

SEQ ID NO: 143537 - DNA, 114 bp, Homo sapiens
cagaaggatacagttcatgacaatgactttgagccctaccttactggacagtcaaatcaggactgaagatggaggaggaaggcacagaagataatggcctggaagacgattcca

SEQ ID NO: 143538 - DNA, 98 bp, Homo sapiens
ccaaccagggaatgtgagtccctgtctgagctcaagtctatggggtggagctgttcctgaaggttgccggcctgggccctgtggagtacttgtcttcc

SEQ ID NO: 143539 - DNA, 74 bp, Homo sapiens
tgggattactgcacggggtcgcgccgtggcggagcaggccttggacaagattcgctatgagagcctgacagacc

SEQ ID NO: 143540 - DNA, 116 bp, Homo sapiens
agggttcttgagtattttaacacaggatgattctgattttcaagctcagaattctgcaaatgcagattttgcaaactttgatgcatttggacagtctagtggttcgagtaattttg

SEQ ID NO: 143541 - DNA, 74 bp, Homo sapiens
cattggcaggaggggcaaggtggaacagttttgcaggctttggaggtactcccagtagcaccaccacctgagcc

SEQ ID NO: 143542 - DNA, 76 bp, Homo sapiens
tttcagaactgcagggaaacagccatcatgagttctgcagaatcagaagatttggcagtacatttatatccaggag

SEQ ID NO: 143543 - DNA, 83 bp, Homo sapiens
tggtaaaaatcataaggaggtagaacgaggcatcatccctaataagaacaggtgttgacagagtggcctcagacaaaactgtg

SEQ ID NO: 143544 - DNA, 90 bp, Homo sapiens
tggctatccacacagacggcaatgaacagatctcagtggtcagcttctccccagccattcatcggaacagcccccgtcctatgaaggtac

SEQ ID NO: 143545 - DNA, 51 bp, Homo sapiens
ccgagactgacaacgcggtcccacagaatgattacggacctgaagccaaag

SEQ ID NO: 143546 - DNA, 87 bp, Homo sapiens
agcttcaagcttaggaccacccaccatgcctatccagggtcccagtcctatgaggatatgagaggaatcctgtatgcagccccccag

SEQ ID NO: 143547 - DNA, 89 bp, Homo sapiens
tggctaccaatattctactttctgtctctatgaatgtgactaccctggttacctcatatagctccaaacgagaatggaagccgctggag

SEQ ID NO: 143548 - DNA, 98 bp, Homo sapiens
cgcgaagctggccaaagcctgcccagacggctcacctgtgcgggatggaacaaaagacaattggtgtgacctttgcagccatggttggagctggaatg

SEQ ID NO: 143549 - DNA, 73 bp, Homo sapiens
cgcccgcgggcccgggtgcgggcccggcgccgcaccagcagaacggaaaatgtttataggaggccttagctgg

SEQ ID NO: 143550 - DNA, 100 bp, Homo sapiens
gcctcatttgttttctggtgtcatcgtaggtggccacctatggcttttgggccctctgcccgaggagatgctcagctacgcccgggatgacacccattac

SEQ ID NO: 143551 - DNA, 100 bp, Homo sapiens
aggagccagttaccatgactcatccagcggagattctggagctggctggcaatgcagcgagagacaacaagaagggacgggtcacaccccggcacatcct

SEQ ID NO: 143552 - DNA, 74 bp, Homo sapiens
tgagctccgcatggagcctgcagcctttgtttaacttatgaggacgatgtgcacagatgcggccgctgccaggc

SEQ ID NO: 143553 - DNA, 75 bp, Homo sapiens
ggagtttgagccccggaggcagagcggctgccatggtgtcgtgaaaactacccctaaaagccaaaatgggaaagg

SEQ ID NO: 143554 - DNA, 90 bp, Homo sapiens
aaggaaaaaggagcgaggcctttggcgctcgttagagagacaagagagacacctccaacttcgacaaagagttcaccagacagcctgtgg

SEQ ID NO: 143555 - DNA, 75 bp, Homo sapiens
cccgggcccgccggccctgagctcccggcggcgcagaattaaacaaccaccatgtcgagcaaaaaggcaaagacc

SEQ ID NO: 143556 - DNA, 100 bp, Homo sapiens
aactaagtctaaactgcattacaagcagcagtggggacgagctttgaaagaacttgccagacttaaacagaaaaccgtgaggacatactgaatgccggtg

SEQ ID NO: 143557 - DNA, 82 bp, Homo sapiens
agaggaggcactctgagctggagctgaacattgcacagaacatggtttcacaagttaagcttgcattggacacacactactg

SEQ ID NO: 143558 - DNA, 83 bp, Homo sapiens
tgagcagtgacgagaacagcaatccagacctctctggagacgagaattgtggccagactccactgatgatagctgccgaacaa

SEQ ID NO: 143559 - DNA, 51 bp, Homo sapiens
gacacagctactactacatcttgaccaaagacttgaccactcaaagtccag

SEQ ID NO: 143560 - DNA, 80 bp, Homo sapiens
ggagttgtagtcgcgatcctgaggtaacgggagtgaaacctcggtccggctgggctattgatccctttggacactcacca

SEQ ID NO: 143561 - DNA, 100 bp, Homo sapiens
tcctggactgaaacgatcctctcatctcagcctccaaaagtgctggcattacagattttgtacagcagcaatttcttactctctctgcaagttttcttcc

SEQ ID NO: 143562 - DNA, 100 bp, Homo sapiens
cagaagtgtccaaaccacaagttctcaaaactctctgaaaaatggctccctccgagttaagagtgatcagcagctggactgtgccttggacctaatgagg

SEQ ID NO: 143563 - DNA, 89 bp, Homo sapiens
gattatcaagactgtagcaaaaccacttcattgtgcgcaggaccctcagctgtcggaaaaggtaacagaagatggaactcgaaatccca

SEQ ID NO: 143564 - DNA, 101 bp, Homo sapiens
gtgaaaagcagcagagccgatgggtcatgaggatgtaagtgcgtttgaaggcttccacaccctctactccagggctagtgtgagaaacaccaacagcaggc

SEQ ID NO: 143565 - DNA, 96 bp, Homo sapiens
ggcacggcagccaccatggcgctcctgctgtgcttcgtgctcctgtgcggagtagtgggttggattcagatgccgaggacacagtacttcctcaga

SEQ ID NO: 143566 - DNA, 102 bp, Homo sapiens
aaggggctggtgaccctggtgctgtggaacaaccagctcacgcacacaggcatggccttcctgggcatgacactgggcgttttccactgcgccgtggagaca

SEQ ID NO: 143567 - DNA, 98 bp, Homo sapiens
agcatcttctgtcctgaatacagtatctccttaagggcttatttcaaaacctttgtccctcagttccaggaggcagcatttgccaatggaaagctcta

SEQ ID NO: 143568 - DNA, 75 bp, Homo sapiens
attttccaccaccaagcaagcaggttatcaatactctggctgaccatcatcatcgtgggactgactttggtggaa

SEQ ID NO: 143569 - DNA, 96 bp, Homo sapiens
attaaggtggtattgaggatttctgaagcctatgaaaggtgtgtggaggtcattgcaaaggaaggacaaaacctgaaagagctatatttggtgtcc

SEQ ID NO: 143570 - DNA, 96 bp, Homo sapiens
ggagtgtatgaccacaaacagccatcaaggtttgagcacaaaatgaacataattagggaaaataaggatctggcatgtttctacacaacaaaacat

SEQ ID NO: 143571 - DNA, 88 bp, Homo sapiens
actggagcagaaccccaggactgcgcccccgggagcgggcgcccagagaacacagatatgtagaactcttcttgaattctacagcagg

SEQ ID NO: 143572 - DNA, 74 bp, Homo sapiens
gcccaagaaaaagcacctggactgcatcaagcatgatggaaccatgtgtgatacctgccgccagcaaccaatca

SEQ ID NO: 143573 - DNA, 80 bp, Homo sapiens
ggagcgggagtgttcgttgtgccagcgactaaaaagagattcatgacagatgctgcccgccgagagcaggagtccctaaa

SEQ ID NO: 143574 - DNA, 100 bp, Homo sapiens
cagttaactagagaaattgaagctgaagaaaacaatgatattaacattgaaactgacaacgacagtgatttttctaatgatgccaatgggtggaatgatg

SEQ ID NO: 143575 - DNA, 100 bp, Homo sapiens
agaaggtctggttagaccccaatgagaccaatgaaatcgccaatgccaactcccatctcttccgttccctgctggcagttcatcagctggatcagccaca

SEQ ID NO: 143576 - DNA, 74 bp, Homo sapiens
gcctataaaatgcttcaagtagtcctgtgctcaacattgcttatcgggatggtgccttgagtgaatgaccccct

SEQ ID NO: 143577 - DNA, 51 bp, Homo sapiens
gccgctgcccgccagagtggacaggtatctcgggggagctttgtgccttga

SEQ ID NO: 143578 - DNA, 86 bp, Homo sapiens
agaccaataaaaataaactgcttgaacatcctttgactggttagccaggtgaatggaagagaatccgaagaagaaaatctcaataa

SEQ ID NO: 143579 - DNA, 75 bp, Homo sapiens
tagtgtgtggaggcttccaccaggaggttctgagatgcagtaaaatcgctggtgtgaaagtagcagaaattacag

SEQ ID NO: 143580 - DNA, 82 bp, Homo sapiens
agccaaccatgatgctgccatctttccaggaggctttggagcggctaaaaacctacaatgcagatcttcgtgaagactctga

SEQ ID NO: 143581 - DNA, 74 bp, Homo sapiens
cggaggcagaggtggaggcgctttgaaaggttttcaaatggaacattttgatgcatcacttagtacctatttca

SEQ ID NO: 143582 - DNA, 100 bp, Homo sapiens
agatgattctaattcaacaaatcataacttgagtgtgaacatggctacgcctcttcattcccgtccatgccgagcccccgactgcagcattcaaagcccc

SEQ ID NO: 143583 - DNA, 75 bp, Homo sapiens
ctttatcctggtcatcttctatttccaaagtatgttgcacccagattacgtgtgaaaatgaacttgtgcaaaccc

SEQ ID NO: 143584 - DNA, 100 bp, Homo sapiens
cgcgggggagggcggagctggcgcggcccctagctttctccttctggtgtggggcccgaggtgaacaacaacgggatcatctccttcctgaaggaggttt

SEQ ID NO: 143585 - DNA, 98 bp, Homo sapiens
gcagctgcaaggagggcggcgggactgcactcgagtgtccagacctgctcgatggtgctggggagtcagggaagagcaccatcgtcaagcagatgaag

SEQ ID NO: 143586 - DNA, 75 bp, Homo sapiens
cagccgtccggagccagccaacgagcgtgttgacctaaccaatgaagaaacaactgattccaccacttctaaaat

SEQ ID NO: 143587 - DNA, 100 bp, Homo sapiens
cttggagaagcccaaataccgctgtccagcctgccgcgtgccctagaacattttagtggacaaaccaaatgaccaatcttcaagatggtcttcagagagc

SEQ ID NO: 143588 - DNA, 83 bp, Homo sapiens
aagctataccagacgtttaaggatcggggtatactggatacactcaagaatgagtccctggaacgccagatgcgtgaaatgga

SEQ ID NO: 143589 - DNA, 96 bp, Homo sapiens
cgtacatggaacagggcagaactggccattagtactttctggcctaacttttatcagagatcaggaatggaaacctcaaggccattctaggcctct

SEQ ID NO: 143590 - DNA, 74 bp, Homo sapiens
atttgaagtaaacagatgagaattctagacacagagattgactggaaggcctacatggccgaggtagaaggcgt

SEQ ID NO: 143591 - DNA, 98 bp, Homo sapiens
tgctgcccctcccttcctcccccaagccctgtctttccttctcctcctgccactggggtggacgctcttctctggctcctgggattggctgtgaggac

SEQ ID NO: 143592 - DNA, 82 bp, Homo sapiens
aagggctgcctgggtgttagcaaagaaggttaatttggagtggcccctggagtcagtttcctacaccatccgaggccccacc

SEQ ID NO: 143593 - DNA, 100 bp, Homo sapiens
ggcagcggttggaggcttcgcccggctttgcagcggggacttcggcggcggcgcctcaggcacctcggcccggatcttcgtgaagactctgactggtaag

SEQ ID NO: 143594 - DNA, 87 bp, Homo sapiens
cctcagcctcccgattagctgggattacaggtgctgccatggccacgactgatgttacactcgagctgaggaggccggctgcagccc

SEQ ID NO: 143595 - DNA, 73 bp, Homo sapiens
gagagaaggaaattagtgatgatgaggcagaggagatatggaacagaatgactctgacaaccgtagaataatt

SEQ ID NO: 143596 - DNA, 75 bp, Homo sapiens
ggacgtggacgcctttttccggacagactttttaaaactgtggacttaaatgttctgcaaagtcttacacaaaag

SEQ ID NO: 143597 - DNA, 76 bp, Homo sapiens
cacagctaagactccaggaccctctggaagcctagaaatgtttgaaggaagaaagtactgtgaacatgactttcag

SEQ ID NO: 143598 - DNA, 100 bp, Homo sapiens
cctgtgttgaggacctgcaccgccaagccaagctcaacctcaaatcagtactgaggggttaaccccaaagattggctttccttggagtgaaatcaggaac

SEQ ID NO: 143599 - DNA, 82 bp, Homo sapiens
gtcccagaaacgtcactatcaagaaggtgtcagttgtacccgaggcgttctcagcagcagcaagtacctgtggtggatttcc

SEQ ID NO: 143600 - DNA, 82 bp, Homo sapiens
tccatcctggttcttccaaagtgcccggacccaaaacaggaagatggatagaatgacagaagatgctcttcgcttgaatctg

SEQ ID NO: 143601 - DNA, 89 bp, Homo sapiens
ctggggggccccgcgaggccctggaggctgccgagcgtgaggagactcagcagaaggtgcagaacatgaaaatcagcggttatgcaaga

SEQ ID NO: 143602 - DNA, 54 bp, Homo sapiens
agacaggaggcagtagccaaacacccagagttttgctcttgttgcccaggctgg

SEQ ID NO: 143603 - DNA, 100 bp, Homo sapiens
cacaagataatagccagctccccagaaatgaacctgcccacggtgtccgcgctcaggaatcctcactatggatgggctcattgaggacattaagcatcgg

SEQ ID NO: 143604 - DNA, 74 bp, Homo sapiens
ctgtagcctgttggattctgaagattataatacctgtgagggaacagtgttgataaagactgctgaagaattga

SEQ ID NO: 143605 - DNA, 87 bp, Homo sapiens
gaccggcaaagttcacgtgactgtggatctcaagtactaccggccaactgaagtggtttttagaacttcagccataaaaatgggcag

SEQ ID NO: 143606 - DNA, 103 bp, Homo sapiens
tgggaggtggccatcttcggaccccccaacaccctctacgaaggcggctacttcaaggtcacccctcctaatttctcagtgtcacaagtgcccaacatgccca

SEQ ID NO: 143607 - DNA, 100 bp, Homo sapiens
cctcttcaaccatctggggtgccaacaagtggaccatctcagaccaccatacacttactacctacaggtcagatgtaccaacagtaccagcaacaggccg

SEQ ID NO: 143608 - DNA, 101 bp, Homo sapiens
tgctgatggtgatggagattttgatgtggatgatgccaaagttttattaggagcgagaacccgagcagcgccatgagcaacactaccgtcgtccccagcac

SEQ ID NO: 143609 - DNA, 50 bp, Homo sapiens
gttgaccgctcctccaactaaccaggtattgtgtcactctgtctgctgtt

SEQ ID NO: 143610 - DNA, 90 bp, Homo sapiens
ttgactttgatgagaacactgctctggatgatgcagaagaggagtcctttaggaagcttgactacaacacaaatgaatccactcaaatgt

SEQ ID NO: 143611 - DNA, 85 bp, Homo sapiens
tcagagcgcggatggccgtaaccccgaaggaaattgtcttaaagacttttctacatgatcctcttgtggaatggagtaaaccagt

SEQ ID NO: 143612 - DNA, 100 bp, Homo sapiens
cggcagctggagatgtccgagcccaaggcaattgatcccaagttgtcgacgaccgacagggtggtgaaaggtgaccctggcagcaaccccaacaaacgcc

SEQ ID NO: 143613 - DNA, 50 bp, Homo sapiens
gacagggcacaccaaactccatctgctccccgcagccaccgccacccatt

SEQ ID NO: 143614 - DNA, 74 bp, Homo sapiens
gcgtcgagccccctctgagtcaggaaacattttcagacctatggaaactggtcctgaggacaccgtgagccagc

SEQ ID NO: 143615 - DNA, 80 bp, Homo sapiens
aggaggcagaggcacttatgcttgtcagctttcctcttgctgatgacatgattcctgtttgaatctgttgacaagattct

SEQ ID NO: 143616 - DNA, 98 bp, Homo sapiens
gtcaggctcgccgccgagctggtgtctggtggcctgacatgcaccgcctggctgaccgcatccacctggaggagctggcccacatgggcatcctgagc

SEQ ID NO: 143617 - DNA, 100 bp, Homo sapiens
ttaaccaccagcctcacatcaacttccagtgagagtgacacaggtcaggaagcagaatattccttatatggtgatgatgaacagtctacacagatggctg

SEQ ID NO: 143618 - DNA, 100 bp, Homo sapiens
gtcaaatatgtctgccttctctcaagttttctctcacccatccatgggaagccctgctactgctggattagcgccagaattcaattcgtcataatctgtc

SEQ ID NO: 143619 - DNA, 82 bp, Homo sapiens
gcgagctcaagctgctgctgctcgagctccacgcaggagatcggtgaggagctgatcaacggagtcatctactccatctccc

SEQ ID NO: 143620 - DNA, 82 bp, Homo sapiens
ggctgttttagcacagctgctaaaataggccaggcctgcaggacatacggcgctgataaagcagtttgtgtccgacgtggcc

SEQ ID NO: 143621 - DNA, 75 bp, Homo sapiens
gaagacttgtaacctggagaagaggatccggagtgttggaacagcagctgttaatatgtgccttgtggcaactgg

SEQ ID NO: 143622 - DNA, 100 bp, Homo sapiens
ccacgccgcacctgcgcaacctcgccgtggccatgtgcagccgctactgctgcttttgacacaaaaacggggttacgtgtggcagtgaagaagctctcca

SEQ ID NO: 143623 - DNA, 100 bp, Homo sapiens
tgggaagataaatgaaggggtctagatgtaaatgtcagtggaaaggagagctaccatcactaagagaacaccttctgcagtggggaccatgtgtcctggc

SEQ ID NO: 143624 - DNA, 75 bp, Homo sapiens
ggaggattgtaaatgcaccaatcagcatgctgtgtctagctcaagggccaaaagagaaacattggctactttgac

SEQ ID NO: 143625 - DNA, 90 bp, Homo sapiens
ggagcgtctcaccccccgtcccactgctgctgagttagaggagccagctgaggtgggtgtcctggttggcaaagaccggtcaagttttta

SEQ ID NO: 143626 - DNA, 100 bp, Homo sapiens
gcggctggggttccctcctccgtttctgtatccccacgaggtgaatggaagagaatccgaagaagaaaatctcaataaatctgaaataagtcaagtgttt

SEQ ID NO: 143627 - DNA, 75 bp, Homo sapiens
cccactccatcgccaggatctccttcgccaaggagccccacgtagagcagattggaggtggacacaaaggaagag

SEQ ID NO: 143628 - DNA, 99 bp, Homo sapiens
tccgccagtcaataggaagtacgagtgtgatgttctaagaacggaagcatctgggctggatggaatttagcatcaagcagagtcccctttctgttcaga

SEQ ID NO: 143629 - DNA, 76 bp, Homo sapiens
gcacagccgcggcggcagcagcagtgagaggtggtacagaagttggtcctgccctttgggcgactgaactacctgc

SEQ ID NO: 143630 - DNA, 83 bp, Homo sapiens
caagcttccagcagtctgagcacaacagatccaggtcactgggatcgttaccactacagtgctagagtcagggacccccgcac

SEQ ID NO: 143631 - DNA, 49 bp, Homo sapiens
tctattttgaagttgtcaatcaggagtcagagtattcatcgaaaagaaa

SEQ ID NO: 143632 - DNA, 51 bp, Homo sapiens
gattaactcattcaaggttacccagttgctgggatctagcaattgggaggc

SEQ ID NO: 143633 - DNA, 50 bp, Homo sapiens
ggccactcagagtcgcccgagaaacctgcctagagctggaacgttacctc

SEQ ID NO: 143634 - DNA, 51 bp, Homo sapiens
tcaccatcacagagagcgatggttacttgattagctgtgtttggaactgct

SEQ ID NO: 143635 - DNA, 100 bp, Homo sapiens
atataataaggctgagtgcggagccaaggctttatgaaggcaaagaacagatggagtttgaagaatccatgagacggctctttgaatccatcaacaatct

SEQ ID NO: 143636 - DNA, 100 bp, Homo sapiens
cggcagccaccccatctgggaagcattcccatcaagagcaccatggacaaccccaccaccacccagtatgccagcctcatgcacagcttcatcctgaagg

SEQ ID NO: 143637 - DNA, 100 bp, Homo sapiens
tgggtcccagtgtttggtgaaacacagcagcagatgtcccttttctcaagtcaaagaaggccctgtcctagcaactagttcaggagctggtgtttttaag

SEQ ID NO: 143638 - DNA, 100 bp, Homo sapiens
cttcgcggagacggcggaagcggagagcaacagcgcgccggtgtgatgaatgcagactctgctaccattttggctgtttggatcctcctttgaaaaagtc

SEQ ID NO: 143639 - DNA, 75 bp, Homo sapiens
ccacgcccggctaatttgcaatacggaaattttaatagcaattctggggtcagaagccatggagtcagcattatc

SEQ ID NO: 143640 - DNA, 98 bp, Homo sapiens
ctaagaagtctttcaatgatgatgctatgctgatcgagaagtttgtagacacaccgagcgggacgaccctgggacagtctccactggggcagatccag

SEQ ID NO: 143641 - DNA, 101 bp, Homo sapiens
gcctgatgttgctaaatgtagacaatggttagagaagaattttccaaatgaatttgcaaaacttactgtagattactccaaaggtttcggcggcaaatacg

SEQ ID NO: 143642 - DNA, 50 bp, Homo sapiens
gttcacggcaggattcggttagaataccctctaccatctgctttggtcag

SEQ ID NO: 143643 - DNA, 89 bp, Homo sapiens
ggattccaagtaactcttatttgaggaatatgtcacttgtcacacatgccgatcaccggacacaatcctgcagaaggacacacgactct

SEQ ID NO: 143644 - DNA, 101 bp, Homo sapiens
gatcgggatttacgtggagatcaagcgcagcgatgcttagaccatgctcagcctccaagcagccttgtcatcgacaaagaatctgaagtttacaagatgct

SEQ ID NO: 143645 - DNA, 50 bp, Homo sapiens
ggggacttggggccgcagggaggctgcagccacaggtccgcacggaaaac

SEQ ID NO: 143646 - DNA, 100 bp, Homo sapiens
cggatcctaataaggggaaaatgcttgccaagaagtatcaccctgacacaaataaggatgatcccaaagccaaggagaagttctcccagctggcagaagc

SEQ ID NO: 143647 - DNA, 50 bp, Homo sapiens
aggaaaggatgacaagttgggagtcacagcattttgaaagcgaagcagaa

SEQ ID NO: 143648 - DNA, 100 bp, Homo sapiens
gattgctgtaaaaaatttcaggattggtactacaaggtgaaaggtgtagcagtcactcggcctacacccacagcatcgaccttgtgaacccagcgacctg

SEQ ID NO: 143649 - DNA, 90 bp, Homo sapiens
agaagctggaagttctgatgttccactgaaatcacaatggaaagtcttgacttgactgttttggggcagtgccgtgacaatgttgagcca

SEQ ID NO: 143650 - DNA, 83 bp, Homo sapiens
ccggattattctgcctttgaagtaccctgcatgcatatagctgctgattctactcctgctattgctcacaaccctcagagtca

SEQ ID NO: 143651 - DNA, 74 bp, Homo sapiens
cgagaaccgtcagtttgagccagatgcttcctccagattaggccgagcacttgctgagctatttggacttcttg

SEQ ID NO: 143652 - DNA, 82 bp, Homo sapiens
cgggggaggggccgggcccaggagcctcagccccgccggcagccctaagggcaagagttgcatgctgagaatttgaaaaatg

SEQ ID NO: 143653 - DNA, 98 bp, Homo sapiens
gttcagcccaagaaaaaggagggaaaaatatccagcaaaaccgctgctaaattgtcaactagtgctaaaagatatggctcgtggacagcagaaaattc

SEQ ID NO: 143654 - DNA, 100 bp, Homo sapiens
ttttaaacatcctgatgaatggagagcatgacccactcttctgtttgtaaaggtgacccaagggaaagaagaaactcggaggttttatgcctgttcagcc

SEQ ID NO: 143655 - DNA, 119 bp, Homo sapiens
attccttattggtcttgctgtcatcattgtgatatcctttctgaggctcttgttgagatacactctggaaatgattaaactagtaccacataatgaaagtgcatggaactatttgaaag

SEQ ID NO: 143656 - DNA, 100 bp, Homo sapiens
aaccagatgattctgatcccttttcttttgatggaccagaaattatgggttgtacagggtgccagctgctgcccgtgctggtgccattgccccatgtgaa

SEQ ID NO: 143657 - DNA, 83 bp, Homo sapiens
gagcagagcggagggagccccagacacggttttaaaatcaaagatgggaaaatcggagaaaattgcccttccccatggccagc

SEQ ID NO: 143658 - DNA, 100 bp, Homo sapiens
gagagttcttccaaagtcgcccaggcaccttctccatgcattgcaagccccaaagtggaactcacccaaatgtctatcgtctgctgaatggataagagaa

SEQ ID NO: 143659 - DNA, 100 bp, Homo sapiens
acaccctagatggatgtacagccatcaagaggatcttaaagtgtggtctttagtggaaaaaaagggaaatcctcattgacgattcaatttgttgaaggcc

SEQ ID NO: 143660 - DNA, 50 bp, Homo sapiens
ggaacccgtgtgactgtggaaccaagttgatatccctgaaagtacttaat

SEQ ID NO: 143661 - DNA, 100 bp, Homo sapiens
agtatcaaactctgctgccaagttggcacttggcaatgtaataagtgccttgggagacaagagcaagagggccacacatgtcccctatagagattccaag

SEQ ID NO: 143662 - DNA, 75 bp, Homo sapiens
gtaacaagagcatcacagccaaggaagccctcatctgcccaaccgaggcctgcctggagccccagatcacccctt

SEQ ID NO: 143663 - DNA, 95 bp, Homo sapiens
aagccagaagaaatcaacctgctcaccggggagtctgatacacaggtgctgatgtatggacagccgtatcgtgttaccttagagcttgagctgcc

SEQ ID NO: 143664 - DNA, 100 bp, Homo sapiens
gaagatctcccaacctcaggagcctgagcttatgaatgccaacccttctcctccagcaacaattggcattgactttttatcaaaaactatgtacttggag

SEQ ID NO: 143665 - DNA, 99 bp, Homo sapiens
cttcaaggctggaggctcagcaagtgccatgctacagcccctgcttgacaaccagtatggtttgaagtggtgaacatggatttttctcggcttcacatg

SEQ ID NO: 143666 - DNA, 75 bp, Homo sapiens
ctcgcgagccatccagaacgagatcagctccctcaaagctgatccagtgtctctttgggccacttcaggcggggc

SEQ ID NO: 143667 - DNA, 74 bp, Homo sapiens
attatgcttatgattgtcatcgttacagccggcgaagaagaagcaggtggtgaagcagtattttccaatttgaa

SEQ ID NO: 143668 - DNA, 98 bp, Homo sapiens
ctggatgccgcgtctccgcttctgctgcctgccgggcgggctccggtggccgaatgctgtccagtttcaacgagtggttttggcaggacaggttctgg

SEQ ID NO: 143669 - DNA, 98 bp, Homo sapiens
ttacagggaagtactctgaaaattccacatgtggagaggaagatcttggacttatttcagcttaataagtctgttgtccaggctggagtgcagttgcg

SEQ ID NO: 143670 - DNA, 75 bp, Homo sapiens
cccaggcctgcgtccgagtctccgccgctgcgggcccgctccgacgcggaaggctccttctcctgaaaaagccga

SEQ ID NO: 143671 - DNA, 50 bp, Homo sapiens
agaaagtgcagaaatcatctgcccccagggagatgcagaaggctgaagaa

SEQ ID NO: 143672 - DNA, 83 bp, Homo sapiens
ggcggcttccaggcgcactaccgcggtgacaccggaaactggtactcaagtgatgaggatgagggtggaagcagtgtcacctc

SEQ ID NO: 143673 - DNA, 82 bp, Homo sapiens
gtcatcacctcctgggatcagatgtgcattgagaggcagaagaggcctggaccttggcgcacacagacccaggaacagatga

SEQ ID NO: 143674 - DNA, 50 bp, Homo sapiens
ccgggctgcgcccgcttcttgcagcactgggtattgtacccctccaatat

SEQ ID NO: 143675 - DNA, 82 bp, Homo sapiens
tcgccagcccgtgccgcgagcgcggcctgcaggaggcaccaggatcatctacgaccgaaagttcctgctggagtgcaagaac

SEQ ID NO: 143676 - DNA, 50 bp, Homo sapiens
tggccggaggctcgccgacgaccttgattccaactccacagagtgaccag

SEQ ID NO: 143677 - DNA, 100 bp, Homo sapiens
cgaggaggcgcgggaggtgttcgagaacgaccccgagacgatgtggacgagtgctcactagcagaaaaaacctgtgtgaggaaaaacgaaaactgctaca

SEQ ID NO: 143678 - DNA, 75 bp, Homo sapiens
tccggtcctggtccctgctggttgttgcagagtgggcaggatcttaagacccgataggtgcagaacccatctgga

SEQ ID NO: 143679 - DNA, 98 bp, Homo sapiens
ctccgtctcccaggttcaagcgattctcccgcctcagcctcctgagtagcaattacagggagtaccctgacttctaccggaagctctacggcctcttg

SEQ ID NO: 143680 - DNA, 83 bp, Homo sapiens
agtcctcgtcagcactgactttcagctatggaatcggtttattgggcacttcctagcaccaggcactgcaataagaaatggag

SEQ ID NO: 143681 - DNA, 75 bp, Homo sapiens
catgctctggaaatgttcccagaacattgcacgatgcctcctgatgaattacagtttatcgactgggagattgac

SEQ ID NO: 143682 - DNA, 100 bp, Homo sapiens
cctgcatcagctcagccatcgcgaccctacagcttggggcctgggctcctctgaccatcctcattgagaaaggaaagtgagtccagagaagttgatgctt

SEQ ID NO: 143683 - DNA, 100 bp, Homo sapiens
catcgtgctgaatcggccggttttgagaggggaagatggggacaaagccgctccacctcccatgtcggcacagctcacagcgctccttcaccactattac

SEQ ID NO: 143684 - DNA, 75 bp, Homo sapiens
cggcccgccgtgacccacggccgcctccggagcccgacgcgcatttgacattgtgcagcaaagaaatggttatgg

SEQ ID NO: 143685 - DNA, 98 bp, Homo sapiens
ggcgcgcagcgtgtcaggcggagagacccgccgccaggtgctggagaatctggtaaaagcaccattgtgaagcagatgaggatcctgcatgttaatgg

SEQ ID NO: 143686 - DNA, 100 bp, Homo sapiens
agactaacaacagatttcgggaatgctgagaaaacagacagatttgtcatgaagaaactcaatgatcgtgtcatgagagggaactggagcactaccctgg

SEQ ID NO: 143687 - DNA, 100 bp, Homo sapiens
attggacttcaccttcgaggaggctacatcttccccacacagcagccaaatacaaccactctggccagggggaaaagatttgttgcaatgaaagttgtaa

SEQ ID NO: 143688 - DNA, 74 bp, Homo sapiens
attcagccagcacactcctcgcgagcaagggagtgagttttccgggagtccctacagccaccctcagtattcct

SEQ ID NO: 143689 - DNA, 82 bp, Homo sapiens
cttcaccagctattacactttggggaatatatatgcagatctcttccacattcctccttcttataagagcacagtaacacta

SEQ ID NO: 143690 - DNA, 99 bp, Homo sapiens
catgtattgaagaattccaatcccagttcatttttgagttggtccaggtagcaatgatgagacccttttatctgctgttgccagtgctttgcacacaag

SEQ ID NO: 143691 - DNA, 75 bp, Homo sapiens
gggatttctacgacccggagcacccgacccctgagtggctttctagaagatgaccatagaggaccttccagattt

SEQ ID NO: 143692 - DNA, 100 bp, Homo sapiens
ctgaccctgtaacccaaaggaggaaacagctggctaagctcatcattgttactgggggacttgatctcatcttcatgccaggccttgggtttgacaaaca

SEQ ID NO: 143693 - DNA, 50 bp, Homo sapiens
tctcaagtagctgggactacagattcgaattcagaattgtcaaatgaaga

SEQ ID NO: 143694 - DNA, 132 bp, Homo sapiens
tgggaacccctcgctggatgaaagaagcattcttgcccctctctatcagtgttgcattaatctcaggggcgatataatcaatgaggtggtcctaaagttgctcaaggctggatggtcccgggaagaaattac

SEQ ID NO: 143695 - DNA, 76 bp, Homo sapiens
ggctgcttcacgccttggctcgacactgccagctggaaccagaccatgttgaagaattagccctccaatcaatgat

SEQ ID NO: 143696 - DNA, 90 bp, Homo sapiens
gtcctgtggacgcgtatcgccagcacgatcccaccgcacgttcagaagtcggtatatgactctcaacccttctactaagaggaagaatac

SEQ ID NO: 143697 - DNA, 100 bp, Homo sapiens
catgaagaaggtggtgtgtgtggatcagcagacccccaccatccctaaccggctggctgcagacccgatctttggggccgtagaagaggacagctccctg

SEQ ID NO: 143698 - DNA, 74 bp, Homo sapiens
agcgcccctccgagctggggttggacgctgccagtttgcacagcagcaggtttctagaccaactggggagattc

SEQ ID NO: 143699 - DNA, 96 bp, Homo sapiens
cgctggcgttgcagctaggccagcggctcggcggtgagatcgtcagcgctgactccatgcaggccaacaacttcactttccacactcagtgccacg

SEQ ID NO: 143700 - DNA, 96 bp, Homo sapiens
tagcagggctctagagaccacgtgaagtctcctcggaacaagagtttgttcagaaacaacagcaagaattagatggctctctgaaaaagatcatcc

SEQ ID NO: 143701 - DNA, 83 bp, Homo sapiens
cctggatcatggctgccgcgccgccgctacgggaccgcctgagctttctacaccggccgtgttgccgcccgctgtgctatgag

SEQ ID NO: 143702 - DNA, 75 bp, Homo sapiens
cgacgtcttgcctgtgtcccacttgttcgcggcctatagaaggtgttgagctggcgagttcgcggaggctactat

SEQ ID NO: 143703 - DNA, 82 bp, Homo sapiens
ggcgacagcaacagctctgccggctggaagagctccaaacgagaatggaagccgctggaggaccgtagctgcacagacatac

SEQ ID NO: 143704 - DNA, 90 bp, Homo sapiens
tgccgaggtgcgggagagcctggctgagctggagctggagctgtcggaaggtgtccatcctggtcagaagatgaaactctttgtgcccgc

SEQ ID NO: 143705 - DNA, 83 bp, Homo sapiens
gcctgcaattaccaagcttcctgagatctcacatagactagaggaccaaactcttacccaggatctactggagcagctgttgg

SEQ ID NO: 143706 - DNA, 75 bp, Homo sapiens
tcggcagtccacccaccgccgccgcctcccaggcccacccttcctccattctgagcacataaaaaccccacactc

SEQ ID NO: 143707 - DNA, 106 bp, Homo sapiens
cccagcggccgcgacgctatggcgcactggagtaccctgttcctggcagtgctggagaatctggtaaaagcaccattgtgaagcagatgaggatcctgcatgttaa

SEQ ID NO: 143708 - DNA, 78 bp, Homo sapiens
gcagtggtcgcttcttctccttgctgcattcatccgggtcgtgggctcggagtttgtacagaagtatctgggtgaggg

SEQ ID NO: 143709 - DNA, 90 bp, Homo sapiens
caacaccacatgaagagctagagagacttgcagggaggagtctgctactagtcttatcagctcttaaaaacagaaactcatctgtccaag

SEQ ID NO: 143710 - DNA, 104 bp, Homo sapiens
cgcagccccaaagcgagcgaagctagggtcgccgccactgccgcaggaggcgtgaggtaagaatgattgatgttggctgatattggagtgctcattcacatgaa

SEQ ID NO: 143711 - DNA, 101 bp, Homo sapiens
taaacgcggttagtgcaagcatctgggccatcttcaatgatgctgaaaacgccattcaacagatgggtggccagtggcttggtggaagacaaatcagaact

SEQ ID NO: 143712 - DNA, 99 bp, Homo sapiens
cacctgagaagaagatctccatcctgctcaagacctgcaaactcatctacgactccatggccctcggcaacccaggtggttctaactttgatggtttga

SEQ ID NO: 143713 - DNA, 90 bp, Homo sapiens
caaagctacttccattccagaaagatggcatcatttttgccctcaaaagaaatggcagggcaactgtactcctgatgatattggtctgtg

SEQ ID NO: 143714 - DNA, 80 bp, Homo sapiens
ctaatggtggaaacccacaacggagggaaaacccctgatcctaaaatgaatgctaggacttacatggatgtaatgcgaga

SEQ ID NO: 143715 - DNA, 90 bp, Homo sapiens
ctgcgtgctttagaatggatgaacaagagttaaccgatagcagaccccacgttagctgaaatgggaaaaaacttgaaggaggcagtgaag

SEQ ID NO: 143716 - DNA, 152 bp, Homo sapiens
tcttgatgctctctgggctttgttgaggcggcagtatgaccgggtttctttgatgcgacctcaggaaggagatgagtttgggagcctctggtggagcaagtaattgggattcctacagtgaccatttcaccattgaaacctgcaaagagaca

SEQ ID NO: 143717 - DNA, 100 bp, Homo sapiens
cgctgaaccccgcccacttacctcacctctgcgccaggctgcggatgaggatgacaaggggatgaggtatgagtgatttcagtgaagaattaaaagggcc

SEQ ID NO: 143718 - DNA, 51 bp, Homo sapiens
gggtgatacccagtgcagtgaactgcagaaaatgtacaaacagggtgttta

SEQ ID NO: 143719 - DNA, 75 bp, Homo sapiens
taactagctccaggttaggccgagctttgcgggaaagcagcgacccaacatgagtgaagtttcctgcaagaaacg

SEQ ID NO: 143720 - DNA, 113 bp, Homo sapiens
accttttaacactcctttgtccttggattacttaagagttcccagaaatacatttgccaccaacagagtagatgctgggctcttgcactgtttggtggaaatggtgagacagg

SEQ ID NO: 143721 - DNA, 75 bp, Homo sapiens
agcctggatctgagctgcgaggaggggaccccactcagtatcaccaggtgcaaggatggcttgaaaggatttaca

SEQ ID NO: 143722 - DNA, 89 bp, Homo sapiens
acctgtaaactgaagctgcaggaggaccggcgacagcaaggacacagcattgttggttttgccatgtactattttacctatgacccgtg

SEQ ID NO: 143723 - DNA, 98 bp, Homo sapiens
gaggcctggaagccaatgcccctgctttcgacagctgaaaaagatcgggggcgggggctttggtgagatctacgaggccatggacctgctgaccaggg

SEQ ID NO: 143724 - DNA, 75 bp, Homo sapiens
gggggacggggaccagcagctgtcgccgccgctctcagctccaggacacgcgcgccccgagcctgggaggcatgc

SEQ ID NO: 143725 - DNA, 90 bp, Homo sapiens
tccatcctgcagcacgccgtggaggcgggttattttggagctgttggagcactccttgagctgttgaagatcccgtgatcattacctggg

SEQ ID NO: 143726 - DNA, 89 bp, Homo sapiens
ttggaagatgctactctcagacataaggaaggatgttcacggaagaccagggtgtagatgacaggctgctctatgacattgtattcaag

SEQ ID NO: 143727 - DNA, 82 bp, Homo sapiens
gtgatttatgcctagttgttaaggaagaaccactctggatgagggggatattgccttgttgaaaacttatgtaagtcctttc

SEQ ID NO: 143728 - DNA, 50 bp, Homo sapiens
gcttgagcatacttatttcatcggtaatctatgccagcaattatgacaat

SEQ ID NO: 143729 - DNA, 100 bp, Homo sapiens
tatttgccagatctgcagagatcaaaacaagccctccaggaactcactaggcctggaaaatccccagagaggagtcacgtctcttcggagccctacgagc

SEQ ID NO: 143730 - DNA, 82 bp, Homo sapiens
gcgcgcccgccagctgctccggagatacggagaactacgatgacccgcacaaaacccctgcctccccagttgtccacatcag

SEQ ID NO: 143731 - DNA, 75 bp, Homo sapiens
gaggcagaggcacttatgcttgtcaggccgaagaacagttgagaattgttgaagaacaaagaaagattcatgagg

SEQ ID NO: 143732 - DNA, 100 bp, Homo sapiens
cagcgagtcaccgagccaccggccctcggggtttaccaaagatgcaggtcattaggaactattctggaacaccacccccagctctgcatgaaggaccccc

SEQ ID NO: 143733 - DNA, 51 bp, Homo sapiens
aagctgcagcggaggaaggcgagattgagaaaatcatgagttctattggag

SEQ ID NO: 143734 - DNA, 50 bp, Homo sapiens
cccgtagtgtggaagcagcttcagatgatgattattctccaccgtctaag

SEQ ID NO: 143735 - DNA, 75 bp, Homo sapiens
cgatagcgaggtcacctttgcattgcactcagacgcaaacatgcagatctttgtgaagaccctcactggcaaaac

SEQ ID NO: 143736 - DNA, 75 bp, Homo sapiens
tggaaaaccagttattgaatatcaagaggaggagttgttggttcatgacatcttctatcccttcccccaatcaga

SEQ ID NO: 143737 - DNA, 100 bp, Homo sapiens
accctttcctcaccacccgagtgagcgctgccccctcacagagacctctttgccccctgggccaggcagagcagcatcagaagagctaacaattgctgga

SEQ ID NO: 143738 - DNA, 100 bp, Homo sapiens
cgacaacgagcagctcatcacccagtacgagcgggagaaggcgctgcgcaagcacgctgaggaggacaaaccagtgaagccacctacaaagaaatcagag

SEQ ID NO: 143739 - DNA, 100 bp, Homo sapiens
gccagccctcggctccgggtccacaagaccttcaagtttgtcgtcgtcggggtcctgctgcagaatgtgaaagatgttgcagaagtgttccagaagtggc

SEQ ID NO: 143740 - DNA, 87 bp, Homo sapiens
ctccgctacttcactcgcactatccttgatgctaggctgaaggtgatgtggccgccctcaaccgacgcatccagctcgttgaggagg

SEQ ID NO: 143741 - DNA, 100 bp, Homo sapiens
ggaggagtccccaggaaagcgcctggacgcagactccatcaagaatgctggaggaagggtgtttgtccactgccaggcaggcatttcccggtcagccacc

SEQ ID NO: 143742 - DNA, 98 bp, Homo sapiens
gagctgtggtcactggagctgtggtcgctgctgtgatgtggaggaagaagagctcagggagggggctctgcttctgcgggaagtgccgctgccacccg

SEQ ID NO: 143743 - DNA, 96 bp, Homo sapiens
aaaaggtgatctggacaaaggaacaggtatctcaggttctttcatgctggtgaatgcctctgggagacctgaggggcagagagcccacctgctctt

SEQ ID NO: 143744 - DNA, 75 bp, Homo sapiens
cgacttcgaccctgcccagcacgaccagctcatgcaggttctgctccagacgagcccttaccacgttgactcact

SEQ ID NO: 143745 - DNA, 90 bp, Homo sapiens
ccgtccttctccactttcgccagcccgtgccgcgagcgcggcctgcaggagatgagcagcaccagcagtaagagggctccgaccacggca

SEQ ID NO: 143746 - DNA, 83 bp, Homo sapiens
aagggattgctggctacagcttcagaagaccgaagcgttcgtatctggaagggaaggtctgtttctctaacaactttttatcg

SEQ ID NO: 143747 - DNA, 74 bp, Homo sapiens
tgcctgcgggaaggtgcggggagcggagccatggcctccggagatatgtcagtattgaattctcccagacatca

SEQ ID NO: 143748 - DNA, 83 bp, Homo sapiens
cgggagctgtcggccccggcccgactctatcacaagaaggtccagctgggagctccccgacctccaggagggcaagatccaag

SEQ ID NO: 143749 - DNA, 90 bp, Homo sapiens
aaattcactgtggatctcccaaagaaacacgtctctgctggatgaaccgaatcctaacagtccagccaatagccaggcagcacagcttta

SEQ ID NO: 143750 - DNA, 50 bp, Homo sapiens
aagagctgaagtgctcaaatctgaagatacggagtcttgctctgtcaccc

SEQ ID NO: 143751 - DNA, 100 bp, Homo sapiens
cagcggctccctgcccttcgacgggcacaacctcaagttctcctgtgcctcctgttggctctctttgcatctggcctcatccaccgagtctgtgtcacca

SEQ ID NO: 143752 - DNA, 75 bp, Homo sapiens
aggaacatggactgaagtatccagcgctcattgggaatttagttaaggttacagattatgccattgccaggcgca

SEQ ID NO: 143753 - DNA, 50 bp, Homo sapiens
cccctttggccctgtatcaggagcacaggccacagaaacactattcagaa

SEQ ID NO: 143754 - DNA, 50 bp, Homo sapiens
gagagaaccagtgcgtcattatcagatcttgtagaaaatttcagctgtag

SEQ ID NO: 143755 - DNA, 88 bp, Homo sapiens
tggtgtgcgaggagacggccctcatcacccgacccggggcgccgagccggaggaaggagctccaagtacagcccagtatggaattacc

SEQ ID NO: 143756 - DNA, 97 bp, Homo sapiens
gaccctgaagctcaacacagcagcctccacggaaggttcagcagctggacatggagaaccaacgctcatcacctctgtcgttccccagtgttccaca

SEQ ID NO: 143757 - DNA, 96 bp, Homo sapiens
cctcaagatgcagtctcatgggcagtggtttgagaatcatggtgtcatggaaagggatttactttatactgactctgttttggggaagcttttttg

SEQ ID NO: 143758 - DNA, 100 bp, Homo sapiens
cagcaagttcatcggaagcccatggcatcttttgttaccactcctgttccaccagactttaccagccatccctccattcattatgaacactttggaaaag

SEQ ID NO: 143759 - DNA, 98 bp, Homo sapiens
aacttgccaatgtgcaaagctgcagaaaccacagtggtagaggttcatcctaagttccactataaacaggctcatgactcgggcacagacacttcttg

SEQ ID NO: 143760 - DNA, 51 bp, Homo sapiens
cagaaacaaaatgtcaacaaattgatggttgatcatggccttgccaggttg

SEQ ID NO: 143761 - DNA, 90 bp, Homo sapiens
actgctgggccctgaggctgcaccaagtggcgaaggagccggctccaagaattcagaaggagctggcggacatcactttagaccctccac

SEQ ID NO: 143762 - DNA, 90 bp, Homo sapiens
ccatcacctggtataagcgtggaggcagcttacccagccggcaccagggagagcacatctgcctgatccgcaaggtgaacgagaactggt

SEQ ID NO: 143763 - DNA, 99 bp, Homo sapiens
cctcagcactcaagcagcaggagcagcccgcggcgaccaagatcaggaacctgccctggaaacttccattttagaagaatacagtatcaattggactca

SEQ ID NO: 143764 - DNA, 74 bp, Homo sapiens
tctgagggagggtccgagccagccgctgttttgccggaggagcccctcaggccacactctcgaaagcgatggga

SEQ ID NO: 143765 - DNA, 74 bp, Homo sapiens
gaaaaggaatcgtatcgtatgtccgctatccagaacctccactctttcggtccggcgccagctgccagtcgagg

SEQ ID NO: 143766 - DNA, 75 bp, Homo sapiens
cacatagacatttacgcggatgtcggcgaagagttcaaccaggcgaggcggctttgcacaaggtggacattccca

SEQ ID NO: 143767 - DNA, 136 bp, Homo sapiens
aaattccacagggattggtgaccaaccagaaggctcagacatctgattgctgacctgtgaatctggattgggaaagtcgacattaatcaactcattattcctcacagatttgtattctccagagtatccaggtcct

SEQ ID NO: 143768 - DNA, 73 bp, Homo sapiens
gttccaggtcccggatagcgagggcggccgcgccggctccagacaatgcagatcttcgtgaagactctgactg

SEQ ID NO: 143769 - DNA, 75 bp, Homo sapiens
ttgagattgacaagatgtacacccccttgttcttcgccagaaggaaccagactagcatttctcagtgggttccag

SEQ ID NO: 143770 - DNA, 75 bp, Homo sapiens
cgggtacgtgaggagcagcgctgcagccgcagccgcagccgccgccggccaggtcatttatagcaaatacactga

SEQ ID NO: 143771 - DNA, 90 bp, Homo sapiens
caacagagctgggtccgggtgtacggtgctggagaatctggtaaaagcaccattgtgaagcagatgaggatcctgcatgttaatgggttt

SEQ ID NO: 143772 - DNA, 50 bp, Homo sapiens
gacagccaggacacagtggctggatgacatagtgctggatcttggtttta

SEQ ID NO: 143773 - DNA, 100 bp, Homo sapiens
tttcgcaacatcaagggagttttccggggccctctcagcaagaacgggaacaaaactctgatacaaggcagatccaaccatccccaccgtggtcctacga

SEQ ID NO: 143774 - DNA, 99 bp, Homo sapiens
gggcgacctctgtgccatttctttggtggggaacagggctggttgatatgtgaagagccaacctgtcgcaatcgaactcgtcaccttccccttcaattc

SEQ ID NO: 143775 - DNA, 99 bp, Homo sapiens
accaccggataattctttttatgtgcgaacatgtaacaagaatccaaagaaaacaaaatggtggtatcatgatacgtaggtaacctttccagagatgtg

SEQ ID NO: 143776 - DNA, 100 bp, Homo sapiens
ctctgggacctgcaggtcccggaaggtccttagggaggaccccagacaccggagactgggaaatgatttctggacttcaagaaacattgaagaaactgca

SEQ ID NO: 143777 - DNA, 95 bp, Homo sapiens
ggagaatattgatgaccagcgcaaagatggaggagatgtataagaaagctcatgctgctatacgagagaatccagtctatgaaaagaagcccaag

SEQ ID NO: 143778 - DNA, 110 bp, Homo sapiens
cagttataagaaatgcacatctccgctcaaggtcccctgggacagtgcaaggaaagaaagaagcctgcggtgaaagtgacactgaatggagtctcgctctgtcacccagg

SEQ ID NO: 143779 - DNA, 100 bp, Homo sapiens
cctagaataacctgcctcttcggctgggaagcggagggaaccttctcttccttaaaggtcatttgattgcccgcctcagaacgatggatctgcatctctt

SEQ ID NO: 143780 - DNA, 90 bp, Homo sapiens
aacactcgatgaaattttaagacttgcccaggaaaatgaagtggtaagttttcttcatacagttcttttgtgtgacaaactggatttcag

SEQ ID NO: 143781 - DNA, 99 bp, Homo sapiens
tactgtaaagcagagaatggcttggggtctccagcgataaagtcaatcagagtggatgtatacttgtttctgaaagatctatccagcactccgatggcc

SEQ ID NO: 143782 - DNA, 51 bp, Homo sapiens
gaaggaggagattctgaagataaggagtggtaagcatccgtggcattcaag

SEQ ID NO: 143783 - DNA, 100 bp, Homo sapiens
agaaccggaagctctttgaccttctggatgtccttgagttcaaccagctgtggaggaagatgcagagtcagaagatgaagaggaggaggatgtgaaactc

SEQ ID NO: 143784 - DNA, 75 bp, Homo sapiens
gacgtgcggcccgaatgccagcgcctcttctaccggggcaagcagctttggaggaattttttacatcacttgtga

SEQ ID NO: 143785 - DNA, 76 bp, Homo sapiens
ccccagccttggggtcatatgcttctgtggacagctgtgctattcctggcgccctcacaaagccaatgctgaggag

SEQ ID NO: 143786 - DNA, 85 bp, Homo sapiens
cagcgcccagattgagatctgtgtggctgactgatcgagacgctccctccggagctcttccagtgccggaagctgcgggccctgc

SEQ ID NO: 143787 - DNA, 50 bp, Homo sapiens
aactgctgaaccgactctgagaaatttgcaatggctgccatccggaagaa

SEQ ID NO: 143788 - DNA, 100 bp, Homo sapiens
cctcccgtttctggctccgggctgagcttcctggagaagaggaagggcccagcgagcatgatggcctacttggttgtttctgggctattcctaactcgac

SEQ ID NO: 143789 - DNA, 85 bp, Homo sapiens
gaagaatggcagtgctcaaactcaccgaccagttgtcgagatgtccacagaaggaggatttggtggtactagcagcagtgatgcc

SEQ ID NO: 143790 - DNA, 90 bp, Homo sapiens
actctggtttctcttcagcgttcacctctctgcgcccaaacggatctcaaccatgtccaagggacctgcagttggtattgatcttggcac

SEQ ID NO: 143791 - DNA, 98 bp, Homo sapiens
ggacggtttcgccggcagtctcggtggtataagttgaaatccaaaccaggaaagaaggacaaggagcgaggagaaattgaggttgacatccagtttat

SEQ ID NO: 143792 - DNA, 100 bp, Homo sapiens
gagttgttgctcccgcctgagcccagcccccagaaaggattgtgacatatcgttggacccagaattgagagacgtctcccacaacctgctccgggcgctg

SEQ ID NO: 143793 - DNA, 98 bp, Homo sapiens
cccgaaaacggaagcgcagggagaaggaagaggtgtttgaaaagatgtccagggtgctgcagaaggacgcggagcaggagtcacagatgagagcggag

SEQ ID NO: 143794 - DNA, 74 bp, Homo sapiens
tgcaggcaagcaggacttccgggaggaccaggatgctgccttcttcaagatgcctgaaaacttcatgcctcctg

SEQ ID NO: 143795 - DNA, 75 bp, Homo sapiens
ggaattttgcaaaagtaaaattggcaagacatatccttacaggcagagaggtttccttaggaaataaagaaagaa

SEQ ID NO: 143796 - DNA, 100 bp, Homo sapiens
ccacccgatgccccatgaagtggagatcgcacacaccaagaagctgttccgcaggaggagaaatgatcgaagaatcatccagaaccgcatcctgctcgtc

SEQ ID NO: 143797 - DNA, 90 bp, Homo sapiens
gaagcttccaaaatcaccatttggaaggaacagtacagagttgtacaggaggaaaaccaggttcaacagagtttggaaaagatttctaaa

SEQ ID NO: 143798 - DNA, 100 bp, Homo sapiens
gtggagaatgtgtttcagctttttacttgtgcccttctggagtttcaaatcctgctctactcacagcaaaaatcctgggtagaagctggatcagcaagaa

SEQ ID NO: 143799 - DNA, 100 bp, Homo sapiens
gcatttgaaaatggaagagggaaacaacaatgaagaggtaattcacttgaacaactttcactgccatcggggacaagtttcagctcctggcatcagctct

SEQ ID NO: 143800 - DNA, 90 bp, Homo sapiens
ctgagaaaccaaagactgtgcagctgcttttggacttcatgctagatgtccttctgatgccttatggagttgtggaaagtaaaaatgtag

SEQ ID NO: 143801 - DNA, 75 bp, Homo sapiens
tcatacaccagtactaccaaggacagcttttttcctgcaaggatctgcctacaaactggtttgctactttaccaa

SEQ ID NO: 143802 - DNA, 83 bp, Homo sapiens
gagaatacagagagaaaattgagacggagctaagagatatctgcaatgatgtactgccatcactggtgcaagctatatttaac

SEQ ID NO: 143803 - DNA, 75 bp, Homo sapiens
cttggacctaccacttgaaaccattagtgagctgatgagctttgatccaaaccttctccacaacaatggacataa

SEQ ID NO: 143804 - DNA, 105 bp, Homo sapiens
agaggagccgctcttcaccatcccgcacactcaggaggccttccgcacccgggatcatgtttataactactgtactagtgttcaccagtcaaaccaagcacgagg

SEQ ID NO: 143805 - DNA, 100 bp, Homo sapiens
caaggatggtggaggcgagaacactgaggaggctcgacaacctggtgtttcatccagaagagccagaggtgcttgctgtccttgactgggaactttctac

SEQ ID NO: 143806 - DNA, 50 bp, Homo sapiens
agcagtttgtggaagcgatcaggcattttgtcagtgatgctgatctttgc

SEQ ID NO: 143807 - DNA, 82 bp, Homo sapiens
gtgcccgccccacccgcatgctctttgtcactccccggcggcagcacgaaagtaccatggggcctctgggcctggaaagcgg

SEQ ID NO: 143808 - DNA, 50 bp, Homo sapiens
ccttgatggtcaaaagattaagcttcacgaggctgacattgtggtcctag

SEQ ID NO: 143809 - DNA, 90 bp, Homo sapiens
taggcgagaagctggtcttattttaggtgtaaggtctacttccccagcaggacagcatcattctcctatatcttctagacatcactcatc

SEQ ID NO: 143810 - DNA, 82 bp, Homo sapiens
cgtcgctggtcgtgcgacccaagcccctgcattcctgtacggagtaatcaagtcagaggattatatgacttttatctgccta

SEQ ID NO: 143811 - DNA, 100 bp, Homo sapiens
aactcccaggctcaagcagtcctaccatgtcagccttcccagtagctgggaccacagttgacatgaagacaatggagactgcagagaaactggctagatt

SEQ ID NO: 143812 - DNA, 82 bp, Homo sapiens
gaaagaccaaaaatcccagatccagaagctgtcaagccagatgactgtactaaggctcgtacgtctgcatcgattatcttac

SEQ ID NO: 143813 - DNA, 100 bp, Homo sapiens
cggcggggaccatgttgcttccgaacatcctgctcaccgggctttgttcgcgggggtcacagctctcatggctgcagctagcgtgaccccccctggctcc

SEQ ID NO: 143814 - DNA, 100 bp, Homo sapiens
tctgatatcttcctgtcatggttccccttctactacatgctgaagatggccatgctgctgaaacttcaagaagctgccaactacattgagtctccagatc

SEQ ID NO: 143815 - DNA, 97 bp, Homo sapiens
aagcgcagcgcaccgagtggacattttggtctttgtccgcggcctcttcgagcactactgctactcccggggcggcatgcgccacagctcctacacc

SEQ ID NO: 143816 - DNA, 100 bp, Homo sapiens
tcacagacaccatgaggcacatgttatcgtcccggctgagcatgcccgactgccccaactgcaactacaggagaaggactcacttggatagctcactcaa

SEQ ID NO: 143817 - DNA, 80 bp, Homo sapiens
gaagcagccgatccagcctgcggagcctgtggggcaggtggaggcctgaattttgatctatgttctacctacatccagct

SEQ ID NO: 143818 - DNA, 87 bp, Homo sapiens
gacggcgaatggagcaggggcgcgcagatgagactgatcgtggggttgaccaacaagatggaaagaaccacgcaggatcccctgggt

SEQ ID NO: 143819 - DNA, 100 bp, Homo sapiens
ggatatcagagaagaagaaacagagggaggcagtcgaagactctccctccctggattgttgtcacaaggagcaaattcaggacctgacacataagaactg

SEQ ID NO: 143820 - DNA, 100 bp, Homo sapiens
gaactctttgttaaagaagagaataagatttttggaagaaaaggttaaaaacgctctttttgtagaacctacaaaaagacatttctgagcccattgaggc

SEQ ID NO: 143821 - DNA, 101 bp, Homo sapiens
gtgaaaactcggcccttaccctgactgactctgacaacgaaaacaaatcagatgatgagaacgaatgtgacagtgatgataacatgggtgccaaaaatact

SEQ ID NO: 143822 - DNA, 100 bp, Homo sapiens
cgcctccgttccccgtcccggagctgccggcggcatgatccgacacgccggggcgcccgcgcgcggggaccccacgggtttgtacctgttcaagctaggc

SEQ ID NO: 143823 - DNA, 101 bp, Homo sapiens
cccgtgtcctgcaggtattgggagatccacagctaagacaccgggacctcctggaagccaaaaatgatggccgccaagaacgagtcatgtttgacaaaatt

SEQ ID NO: 143824 - DNA, 99 bp, Homo sapiens
tggtatccattacctccatgcaaattgggtgcttcacagagacttggaatttagataatgggctgtgtgcaatgtaaggataaagaagcaacaaaactg

SEQ ID NO: 143825 - DNA, 100 bp, Homo sapiens
agcatccctgcaatgaagagaacccagggaagttcctttttgaagtagttccaggtgttgactttaaggtgaaaacaatttcagtggatggaaataaggc

SEQ ID NO: 143826 - DNA, 98 bp, Homo sapiens
gaggacccaagaagcagaaggagaacaagccaggaaaaccccgaaaacgcaagaagcgttactggtgcgataccagcgggaggatggcaaagtccacg

SEQ ID NO: 143827 - DNA, 98 bp, Homo sapiens
tcctctcggtgttcccgctggcggcgggcatcttcttcgtgaggctgctcttcgagcggaagatgttaccgagtacttcagtgaattccttagtgcag

SEQ ID NO: 143828 - DNA, 98 bp, Homo sapiens
cgctataaaggtgctgagtaacgtggaatctggattctcactgaagccctgtgccctttcagaaattgcccatcacctcttcatgaccactgcctgcc

SEQ ID NO: 143829 - DNA, 100 bp, Homo sapiens
tgacagaatacgacaggaggatctcaggagactcatttcctatctagcctgtattcccaggactcagcccaaaaccatgtttgcccaagttgaatctgat

SEQ ID NO: 143830 - DNA, 74 bp, Homo sapiens
cctgatctaacccctagaaacagatatcagttttagagaatgtggcgtggagaaattctcaaggaaagagtaaa

SEQ ID NO: 143831 - DNA, 75 bp, Homo sapiens
aggaagaaaatggcagagaatacaaatttgatgtttcgtcagagttactagagaagcccctgaatgtgacagtga

SEQ ID NO: 143832 - DNA, 75 bp, Homo sapiens
atttcaggaaaacagagaaagaagtgataggagggctctgtaggctaaagaattacctccaaagccattgtcaag

SEQ ID NO: 143833 - DNA, 122 bp, Homo sapiens
aaggacgtcaaagacgccgtggtgcagcacagccagctcgccgcagccgtggagaacctcaagaacatcttctcagtatttagcgtggactacaatgatgaactggatatcttggtgagcgg

SEQ ID NO: 143834 - DNA, 73 bp, Homo sapiens
gaaattgcaccacagatatatgggttcggagaatccggggcaggaaagactgtgaacaccaaacgggtcatcc

SEQ ID NO: 143835 - DNA, 83 bp, Homo sapiens
tggtggatgctcttcagttcgtgtgtggagacaggggcttttatttcaacaatgtggagctcatactgaaaaccatcaataac

SEQ ID NO: 143836 - DNA, 74 bp, Homo sapiens
agcccaggctgcacatcaggggactgcctcggccctgtctctgcccctggtggtcatcgtccatggcaaccaag

SEQ ID NO: 143837 - DNA, 100 bp, Homo sapiens
ggggcggctcctgctcttcctggactcctgagcagagtttgaacgccatgaccctgtggatgggagaattactgagaggcagtttggtggcatgctactt

SEQ ID NO: 143838 - DNA, 100 bp, Homo sapiens
gttagagattacaatttgactgaagaacagaaggcgatcaaggccaagtatccgccagtcaataggaagtacgagtaccagaagggaaagatttcagcat

SEQ ID NO: 143839 - DNA, 75 bp, Homo sapiens
atctggtctaatgaactttctcctgtcctcaatctctggaagaaactaaaccagccaactcagacagtaatgcca

SEQ ID NO: 143840 - DNA, 75 bp, Homo sapiens
gtccgatggctgcggctgcgccgaggcgccctactcaggcgccatggctgcggagcggacccggccgctgcaagg

SEQ ID NO: 143841 - DNA, 101 bp, Homo sapiens
gcgagacacacctgcactcttcaacttcaccactcaaggtaatggtaactcgggatttgaaggacagagtcgctatgtaccatcctctggaatgtccgcca

SEQ ID NO: 143842 - DNA, 100 bp, Homo sapiens
ctggagtcctccacggctacgggcacagtcgtagtgccaactctggactctgttttgtatgacaaccaagaatttcctgatccagaaaagtttaagccag

SEQ ID NO: 143843 - DNA, 100 bp, Homo sapiens
ctgacctcggtttcctggacccattccgactcaggtggaagaatcaacagccgtgatgtctggatttataactcacagttaaatatttggatcagagttg

SEQ ID NO: 143844 - DNA, 88 bp, Homo sapiens
cgagctcgggatacgctcttcgaagtccgcagatgtgaatcccgatggagcggcccgaggaaggcaagcagtcgccgccgccgcagcc

SEQ ID NO: 143845 - DNA, 100 bp, Homo sapiens
aaactagcagtttagggtgtcaggctccaaccaggaatggagacgccattggatgttttgtccagggcagcatctctggtgcatgctgatgacgaaaaac

SEQ ID NO: 143846 - DNA, 95 bp, Homo sapiens
cggagaggtagccatgatgccccacttggtgaatggagatgcagctcagcaggtcccttcaataatcaggagatggcagaatggtttcaggcggg

SEQ ID NO: 143847 - DNA, 83 bp, Homo sapiens
cgggtgatgagcatgacgcacacaggagagccaggattcatgctctacatccccatagagatgtgcactcccagcaacacccc

SEQ ID NO: 143848 - DNA, 98 bp, Homo sapiens
gacacaagggcgcatatcttcaaagcacctagtacctcctaccattgtcaactgttgctgagacaaaggaaaacccactcccttggaggagcatgacc

SEQ ID NO: 143849 - DNA, 105 bp, Homo sapiens
tgaacaacagctacagttgtggaatgaggatcccaatgaagatacagaatggaatgacattttaagagatttcggcattcttcctcctaaagaagagtcaaaaga

SEQ ID NO: 143850 - DNA, 107 bp, Homo sapiens
gagtcttgttatttcttctttgagaaaaacctgaaagatgtctcagtgaacggaagagtccttatgttgcagtatgctgtatagtaatggccttcagcatcctcttc

SEQ ID NO: 143851 - DNA, 43 bp, Homo sapiens
gccgctcccgaagcttttccagatgatggaccatttggattgt

SEQ ID NO: 143852 - DNA, 75 bp, Homo sapiens
tggacaacatcagccgagccgcgggggtgagcagtaggtcatccagtcccagtgtcagaatgattactacctcag

SEQ ID NO: 143853 - DNA, 100 bp, Homo sapiens
gcctggaaaggaattgttttggcctaggatcatccaggagcaatttacagcaatgagggatttatacatgaaaaatggacaaggatttgcattagtttat

SEQ ID NO: 143854 - DNA, 90 bp, Homo sapiens
tgccgcccctgcgccgccgagccagctgccagacccagagtcccagagaaagaggacagtgcagaatgtcctggatctccggcagaacct

SEQ ID NO: 143855 - DNA, 58 bp, Homo sapiens
gtacaatctaaagtggactgcattttggccccaggcatggaagagctgatatgggaac

SEQ ID NO: 143856 - DNA, 90 bp, Homo sapiens
tgtggaaggctctggataaggaccagtacctgcccaggaaactggtccctgagcgtgagcagcgtctcctcagtgtccagtgctacgtcg

SEQ ID NO: 143857 - DNA, 100 bp, Homo sapiens
ctaccatcgtttcttcctgcctttgggccgtcaggcagttggttgggacccgctccaaccctcggttatcttatgatgaggcttttgctatggctaatga

SEQ ID NO: 143858 - DNA, 98 bp, Homo sapiens
cgcttttttccttcctaggagaaatcgaggagctgcggctctaccccccggagactcatgccaacggctctatcaagcgcgggagcaaagacaatgcc

SEQ ID NO: 143859 - DNA, 100 bp, Homo sapiens
cgctgccacttgtacccgcagacattatgaaaggctggtggaggacaccttcaccatagatgaagtctctgaagtcctcaatggattacaagctgtggtt

SEQ ID NO: 143860 - DNA, 75 bp, Homo sapiens
cgcagccctagtcttcgccctggtgatcgcgctcgttcccgtcggccggggatttgaagcattcattaccatctg

SEQ ID NO: 143861 - DNA, 75 bp, Homo sapiens
agcacctcatacggctgcttctggagaaggtggttgtggaggcagagaatcaggttataccttgaagggactggc

SEQ ID NO: 143862 - DNA, 80 bp, Homo sapiens
cttaaatctgtcgtttgaatttaggaccacctcgttggcaaacatgaattgactgggcataaagtagctgtgaagatact

SEQ ID NO: 143863 - DNA, 49 bp, Homo sapiens
caacaccacaataatccacagccaagaatgccgggtctaagttgtagat

SEQ ID NO: 143864 - DNA, 50 bp, Homo sapiens
aaatgtcatgagattgagagaggtgtcagtgtggaggcagttgatccagt

SEQ ID NO: 143865 - DNA, 75 bp, Homo sapiens
ggatgtgaaaactctgttactgaaggtagcctttccagtaaatatatgactcagggaaaagcctcagcgaagagg

SEQ ID NO: 143866 - DNA, 96 bp, Homo sapiens
cttccagactcagagtgtgagaaaaaaataaactcctatttgtttatggcaaggagggacagcagtgtgataaaagaggaaatcaaagcctttctt

SEQ ID NO: 143867 - DNA, 100 bp, Homo sapiens
tctctggaaatttgacacagagtgctataaaaagtatggaaaaatgtgggggtgcctggtagtggatgaggctgaccggatggttgagaaaggccatttt

SEQ ID NO: 143868 - DNA, 100 bp, Homo sapiens
gagtcaccttctcaactgttgtcctcatgatgtcctttctggaactatgcaaccttaaaatcagtgacaagaaacattccaaacaagcaacagtcttcaa

SEQ ID NO: 143869 - DNA, 50 bp, Homo sapiens
tgtatgagaaggacaacacctacttagactggggcagcacctactccgtg

SEQ ID NO: 143870 - DNA, 87 bp, Homo sapiens
tgaattcagatatttccagagaatgaccacaacctcttcagtagaaggtctagtgacggagcccgcgcgcggcgccaccatgcggca

SEQ ID NO: 143871 - DNA, 82 bp, Homo sapiens
ttcacaccgtcttcggtctcctggggtcggcgccgagtgggaggatggcggaaaaagcgtggatacccatcaacgaagtttt

SEQ ID NO: 143872 - DNA, 98 bp, Homo sapiens
catagactggtgcccacataacgatcaggtcattgccagcggttcagaggactgcacggtcatggaggctgaaagggaaacatcagccgcccgggggg

SEQ ID NO: 143873 - DNA, 83 bp, Homo sapiens
tctgaaccatccacacatcataaagctttaccagaaccagacgtcctgggtcctctccagcatggcagccctctactggaggg

SEQ ID NO: 143874 - DNA, 99 bp, Homo sapiens
aggaactttgggtcctgaatcttctgggagctgaggaaccagatatcttgaaaagctgccagaaagctggctctgaagcaccgacaaggcaagaatcac

SEQ ID NO: 143875 - DNA, 90 bp, Homo sapiens
agaaaatgcacttgaatttggacagtgaaaaggcccttaaaaaggcctgaccgccgctgcctacagagtcacactcaatcctccgggcac

SEQ ID NO: 143876 - DNA, 100 bp, Homo sapiens
ctgcggcccgcgtcaaggtgaccggccgggactgcggcggcggggagagcggcggttcaagggcagacggggtttttgaggaggattcgcaaattgacat

SEQ ID NO: 143877 - DNA, 100 bp, Homo sapiens
aggattccaagtaactcttatttggtggaaattcttgcttctcttcagaaaccaaagaagatttctttaaaaggctcagatggaaagttctacatcatga

SEQ ID NO: 143878 - DNA, 75 bp, Homo sapiens
agagtggatccgacctttggcttcagggtctccaactgaattccttgaagagaaaatggcctaccaggaataccc

SEQ ID NO: 143879 - DNA, 90 bp, Homo sapiens
gggaggaataacccagactaggaatgccagcatctgccaagcagcgcagatccttcagggccttcggaagggtgtggacgtgcagcggtt

SEQ ID NO: 143880 - DNA, 100 bp, Homo sapiens
ctgccttgtcttctccactgttcctggaggaatccgagaagagcagagcggagggagccccagacacgtcctcctgcaaggagaatccttttaaccggaa

SEQ ID NO: 143881 - DNA, 99 bp, Homo sapiens
ccgcagctatggggccacagccacatcaccgggcaatgaccagagtgagattggatttcttggatcaactagcaaaattttgggaacttcaaggatcta

SEQ ID NO: 143882 - DNA, 97 bp, Homo sapiens
atccatgtcggcttgtagagagattgcactcctggacttctagggatctcagccgtggctgaggccacccccagaggagcccctggtccacagaagc

SEQ ID NO: 143883 - DNA, 83 bp, Homo sapiens
caaggagctaaagcagcgtgcgttcagccctgggctccggaaccttctgttggaccctgcctctcacaagctactggtgttgg

SEQ ID NO: 143884 - DNA, 96 bp, Homo sapiens
tctccaaggtttgaaaagcagctggcctgcaaggttctgaagaaggccttccaggccacgctcaggtggctcctgagctcacccaagacccccggc

SEQ ID NO: 143885 - DNA, 74 bp, Homo sapiens
ctgcgtgagtgtggtctacgagctgtttctcatctttatactcttccagattccagacccaggaggagctcaac

SEQ ID NO: 143886 - DNA, 90 bp, Homo sapiens
tggctccttggcagcaatggctgtatttgaagataagtttaggccagacatggagggcagagcggcttgggtaaatccaccttaatcaac

SEQ ID NO: 143887 - DNA, 95 bp, Homo sapiens
agggcctttggaaacttcttggaggttttcaggaaacttgcagcaaagccattcgggttggagtaattgggagaaactgcctacatccgggttaa

SEQ ID NO: 143888 - DNA, 74 bp, Homo sapiens
ctctctgctcattggggcgttgaggagtcgtttatacgcaatgcagactggaatgaagatcgatagtaaaactc

SEQ ID NO: 143889 - DNA, 74 bp, Homo sapiens
gaaaacaacatcatgcagtggaatgcagttatatttgggtgacttaagagattaaaattaatttggttgctgtt

SEQ ID NO: 143890 - DNA, 90 bp, Homo sapiens
tattgtcaacatgtgctgcaatgaaggtccccttcccctgagcccatctacaatagcgaggggaagcggcttaacacccgagagttccgc

SEQ ID NO: 143891 - DNA, 75 bp, Homo sapiens
gtgttcggtgaccgcagcactggggaaacgatccgctcccaaaacggatgaatttacaggaattgaacccttgag

SEQ ID NO: 143892 - DNA, 150 bp, Homo sapiens
tgggaacagaggtgtttaccatgacgataagcaaccagcatttagagctgtttatgaagcactgagaaatcaggaagatagcctggagaaggtgattaaagatacggagtccctgttcaaaacccgggagaaggagtatcaggagaccat

SEQ ID NO: 143893 - DNA, 75 bp, Homo sapiens
ctttcccatccgtgactcctggaatgcaggtttactcatttggggagatgccgtgggacttggcgctgatgcaga

SEQ ID NO: 143894 - DNA, 50 bp, Homo sapiens
ggcagaggcagctcttcagcctatgggatggagtcttgttctgttgccca

SEQ ID NO: 143895 - DNA, 76 bp, Homo sapiens
acggtctcactgggaaacaacagcttcacttggttcactggaacaccaaatatggggattttgggaaagctgtgca

SEQ ID NO: 143896 - DNA, 100 bp, Homo sapiens
cacgacctgtcacggggctggtgccttgcaaagtatctgcctgtcctcccagtatggactttctgtcagattttgagatgatgttgcagcgaaaaaagag

SEQ ID NO: 143897 - DNA, 75 bp, Homo sapiens
gcctatttacccagaagtagtccatatgtttgcaggtcgaagtaagaaggaaaccaaatattctcttaaggctgt

SEQ ID NO: 143898 - DNA, 83 bp, Homo sapiens
cgtttactgggcagctgttacggtggaagaaaaggccaaatttgatgggatttttgaaagcctcttgcccatcaatggtttgc

SEQ ID NO: 143899 - DNA, 75 bp, Homo sapiens
cagaggcctttagcaaagtcgccaaaagctggatgaacttgaaaagcatggcggacaccgacctgttcatggaat

SEQ ID NO: 143900 - DNA, 83 bp, Homo sapiens
gtctttgtggtgcctcattcccataacgacccagctcaaggagaaattgaagccatagtcgtgcctgtttgcttagcattcct

SEQ ID NO: 143901 - DNA, 100 bp, Homo sapiens
catgctcctggccttcatcagcagcagctgcattgctgccctggtctacatcctcacctcctgctcagatcatcactgccctggaggaggatggcacggc

SEQ ID NO: 143902 - DNA, 136 bp, Homo sapiens
agctgtgatctccagtttggagcaggggaaggagccatggatggaggaggaagagataaggacgtggagcttcccagacccagacacttttgaaccccaaaaattcttccagacatcaggcctctccaagatgtca

SEQ ID NO: 143903 - DNA, 95 bp, Homo sapiens
ctagaacaacgcaatatattgcaacgagttcatgatcaagtgttgcccacaccaaatgcttcatccagagtcatagtacatgtggatctggattg

SEQ ID NO: 143904 - DNA, 50 bp, Homo sapiens
cctcactcacttccggtggcagattgcaaaggtcgactgcaaggaagtac

SEQ ID NO: 143905 - DNA, 76 bp, Homo sapiens
gaccgcaggaaggactggggccacgtggagctgctggaggtgaagtacctggggctgctggcaatgtccaagatcc

SEQ ID NO: 143906 - DNA, 83 bp, Homo sapiens
cttgcttggagatcaggacgcaaaggggctatctgatgggttagagtgcctttgagaagaaatcagtggatactggatttgct

SEQ ID NO: 143907 - DNA, 75 bp, Homo sapiens
gatttctaaaccctgatcattgcttaagagatattcactgaggaggatgttaagcaagtttttggacagaccaca

SEQ ID NO: 143908 - DNA, 100 bp, Homo sapiens
tgcaaactcaacttgctgggccggtgcaactattcgcagtccgagcggtacttaaagctttcaccaaaacacccagaatcaaatactgctggaatggaca

SEQ ID NO: 143909 - DNA, 90 bp, Homo sapiens
attatattttccagcccgtgtctgcagggaactctaatgatccaggacaaagaagttaccctggagtatgtatcaagcctggatttttgg

SEQ ID NO: 143910 - DNA, 100 bp, Homo sapiens
ttaaaattgctgttttacagaaggctgttgaagctcaaatccgaagttttggacagactccttctcaactactcatagagccccatcctcccagaggttc

SEQ ID NO: 143911 - DNA, 118 bp, Homo sapiens
agaccctggagcctcagttggaagcagccgatccagcctgcggagcctgtggggcaggcaaccggtgaccaaaaacactttcaggcagtatcgagtgctaggaaaagggggcttcggg

SEQ ID NO: 143912 - DNA, 75 bp, Homo sapiens
tactcggacaagtacttcgacgaacactacgagtaccgaagctccaccatgaggcgaggtggatggaggaagcga

SEQ ID NO: 143913 - DNA, 100 bp, Homo sapiens
ggtggttgctgctgctgccgctgctgctgggcctgaacgcaggagaccaagacacattccaccccagtggggggtcccataccactcatggatctgaatc

SEQ ID NO: 143914 - DNA, 97 bp, Homo sapiens
caccgactcctcgctcagcagcctgtttggctgcttctgatgcttggaagatatcctctcagccacaaagatggtaataaatctttgcctcccacag

SEQ ID NO: 143915 - DNA, 104 bp, Homo sapiens
tgattgacctgagcgaagggttttcagagacgagctttaatgacatcaaagatgggatggaggtggataccacaccaacagttgctggacagtttgaggatgca

SEQ ID NO: 143916 - DNA, 100 bp, Homo sapiens
ggcgatggtaggcgtccctggagcggccgccttccagccattccaagaatcaagcactacaaagtgatgagcgtaggacaaaactacactattgaactgg

SEQ ID NO: 143917 - DNA, 50 bp, Homo sapiens
tggaagtcattaggaacaatggtgcaagatgatcatgacgcagtcctgag

SEQ ID NO: 143918 - DNA, 82 bp, Homo sapiens
ccaggcagggcctagggtgggacgatggcaggtgggggcagcgacctgagcaccagtgataaacaagcaactttgattcctg

SEQ ID NO: 143919 - DNA, 95 bp, Homo sapiens
agtgtggacacgtgaagtgtggcaagtgtgacccacaaaattctcgcccatattcaggtgtggatgaagcaaccatcattgacattctaactaag

SEQ ID NO: 143920 - DNA, 109 bp, Homo sapiens
gctgctgccgccaccactgcgtcgggctggtgcagccccgggccaggccgcggccggggcaggagcgcagacaagttggatggcttgaggactggtactaaaaggaaac

SEQ ID NO: 143921 - DNA, 100 bp, Homo sapiens
cacccacatgacagcaggagcgatggccgggatcctggagcactcggtcatgtacccggtggactcggtgaaggaggaagagttcatcgattggtggagc

SEQ ID NO: 143922 - DNA, 100 bp, Homo sapiens
tggagtcgaaggccgtgaggtatttttctaagtaccttctccaggcaaattccgttcccctgcagcaccatctcctttggctcttcggcaaccagtgaaa

SEQ ID NO: 143923 - DNA, 50 bp, Homo sapiens
cgtcaatcagagcgtcctgtgcgctggctggaggcgtgatcctgggtgtg

SEQ ID NO: 143924 - DNA, 73 bp, Homo sapiens
agattcgcagtggtcgcttcttctccttggcctagttccccgagagcgttcagacagtgggggctcaagctca

SEQ ID NO: 143925 - DNA, 75 bp, Homo sapiens
ggaagatatgcatcagttccatcgagccattactacaggcccaagaaacagatattttcaagaaaaagaagagga

SEQ ID NO: 143926 - DNA, 110 bp, Homo sapiens
aagcagcgcctgatcgagtccctccggaactcacactccaggccagagatcctcagcaggagcctatggaagagatagaaaatttgaagaaacaacatgatttattaaaa

SEQ ID NO: 143927 - DNA, 124 bp, Homo sapiens
agggtgaccctggaggtgggcaaggtgatccagcaaggtcggcagagcaaggggcttacgcagaaggacctggccacgggctttgttcgcgggggtcacagctctcatggctgcagctagcgtg

SEQ ID NO: 143928 - DNA, 116 bp, Homo sapiens
caagtctgtgtcagaaggccacctcaagaggaacatcgtggtgaagaccgtggagatgcgggatggagaggtggcccgctgcaagcagctgatctgtgaccccagctacatcccgg

SEQ ID NO: 143929 - DNA, 74 bp, Homo sapiens
aaagcccctgaaatcaacagagaggtggaatttaatgtatcagaagcatttgtacctctcaccaccccgagttc

SEQ ID NO: 143930 - DNA, 83 bp, Homo sapiens
acttattcgagagcagcatccaaccaaaatcccgccatcactggtgcaagctatatttaacggagatcctgatgaagttcgag

SEQ ID NO: 143931 - DNA, 82 bp, Homo sapiens
agaaattcgactatggcaacaagtacaagcggcgggtgccccgggtccctggtgctgaaccgcctgcgtccagttgccagcg

SEQ ID NO: 143932 - DNA, 74 bp, Homo sapiens
accttggagtaattcgtcgacagggcaaacttgaagataaatcttttgactccagctctttagaggatctaaag

SEQ ID NO: 143933 - DNA, 82 bp, Homo sapiens
caactttctgggcgttcatgatcctggccagcctgctcatcgcctactgcaactaatagggatgccaaaggaaaaatatgat

SEQ ID NO: 143934 - DNA, 98 bp, Homo sapiens
ctcattgaagctatgcagtatttctttggcatcactgcagctagtaatttgccttctggattacatatctgaagagatggattaagaatgctttggat

SEQ ID NO: 143935 - DNA, 90 bp, Homo sapiens
ctgctgacaggaattataagtaaagcagcacttcctgctgtgctccattgaagtgacttgtgaatcagccagtgtgatggctgcgacact

SEQ ID NO: 143936 - DNA, 75 bp, Homo sapiens
gcaacggaggcacagtctacaaatgtcaagccctccaacatcctagtcaactcccgtggggagatcaagctctgt

SEQ ID NO: 143937 - DNA, 100 bp, Homo sapiens
actgattcttgacctctcaatgaaagtgttgaaacaggatgggaaatattttacacagctggaccaagcaacactctccctggccgtgagggaagactac

SEQ ID NO: 143938 - DNA, 133 bp, Homo sapiens
aggagcaaaagaaaaaagaatggatcaaccaagaacgtcaaacactccaacaattgagagcatttaaagatagttgagggaacatgagccatttgcagagcttattgttagacaccctcttgggaaccaagca

SEQ ID NO: 143939 - DNA, 90 bp, Homo sapiens
ggaaggcggccgccccgggcaccgcggtgctgctggtcacggccaacgtgggctcgctcttcgacgactgatggatgtaacagatataat

SEQ ID NO: 143940 - DNA, 100 bp, Homo sapiens
cagctgcaccgcatgcggcagctggcccagacgggcagcttgggacgagtctctggtaagaagagtgaaagcaaagaagccaagaagtctgaagaaccaa

SEQ ID NO: 143941 - DNA, 75 bp, Homo sapiens
aacctcagaggacaacgaagtgttcggtcatcatcagatttgaaatatttaaagtggatacaaaactatttcagc

SEQ ID NO: 143942 - DNA, 97 bp, Homo sapiens
cgccaccgcagctacgaacggagcaggatgcctaaatcaaaggaacttgtttcttcaagctcttctggcagtgattctgacagtgaggttgacaaaa

SEQ ID NO: 143943 - DNA, 90 bp, Homo sapiens
gggctatggggataacctcgggggaggccagatgtacagcccacgggaaatgaggatgaggacggggacttggttgccttttccagtgac

SEQ ID NO: 143944 - DNA, 82 bp, Homo sapiens
gccaggacaatggggacccgggacgacgagtacgactacctattcaaaggccggtctaattgaagccaacggagaactcaag

SEQ ID NO: 143945 - DNA, 100 bp, Homo sapiens
ggagccgcaggcgcagacccacccgccatgaagccccccgcaggccggctgcgtgcacttttcctacaaagcatcgtgtgagatccgcgtgcttatgctc

SEQ ID NO: 143946 - DNA, 100 bp, Homo sapiens
ctacgacgccctggagagaccgcggggctgggcgctgctttaccacgcgttggtccaactgggtacatggaaaactcagtctcctacagcgcaattgaag

SEQ ID NO: 143947 - DNA, 100 bp, Homo sapiens
aaaaatacaaactggaaaataaagattacagagaaaaaaccaacaccttcctgtgcagtcctgttggaatttaccgaccaagaccatcactatgaccgat

SEQ ID NO: 143948 - DNA, 98 bp, Homo sapiens
cgttctaaaaagaggcgaaaggaagcaagcagttcagaagagccaaggaataaacatgcaatgaacccaaaaggtgtctttggtgcaacactaacaag

SEQ ID NO: 143949 - DNA, 89 bp, Homo sapiens
ctgaagcctgcagttacactgacctctacacctacccaggacagtcattttgtttactcattcagccctgttgcaggtcccaataaact

SEQ ID NO: 143950 - DNA, 100 bp, Homo sapiens
cacagccccatccaggttcccatggttgccggctcccctctcaggacaacccagatgtgcaacaaagtgcgatgaggtggggctggtgtccgagcacttc

SEQ ID NO: 143951 - DNA, 116 bp, Homo sapiens
aggagctgtgcagccgcgaggaggcgcgggaggtgttcgagaacgaccccgagacgggcgtgatggtgggcatgggtcagaaggattcctatgtgggcgacgaggcccagagcaag

SEQ ID NO: 143952 - DNA, 51 bp, Homo sapiens
aacaatcaaatggaaacccttaattcgttatcaatactctggctgaccatc

SEQ ID NO: 143953 - DNA, 101 bp, Homo sapiens
gcgcaggagccgcgcccggacccagggtgaaagaacttgtcctggacaacagtcggtcgaatgaaggcaaactcgaaggcctcacagatgaatttgaagaa

SEQ ID NO: 143954 - DNA, 100 bp, Homo sapiens
gtacttggggaactgagaaagaaatagaaaatttgaagggtattgttccagatcttaacagtgagaaactaattcgagatgttgctcattgtcatggaat

SEQ ID NO: 143955 - DNA, 98 bp, Homo sapiens
ttcagcaggcagctgaaaatacaagtggccagtgttcgggctgtggaaaaaccatagagtctattcagctgagtccagaagaatatgaatgtcttaag

SEQ ID NO: 143956 - DNA, 83 bp, Homo sapiens
agaggagctggcggagagcggcctgcgggcgatcgggccgagtttgtttcgacgccggaccgcgtaagagacgatgatgttgg

SEQ ID NO: 143957 - DNA, 100 bp, Homo sapiens
ctggtgtctttgtactttgataccaagaggtaccaggaagcattgcatttggatgagcaacaagcgttccaacagcttccgccaagccatcctgcagggc

SEQ ID NO: 143958 - DNA, 83 bp, Homo sapiens
caaacaacaaccaagccagtttaatgccacagcctggcagctctgatcaggaaagtgaggaacagcaacaattccggaacatt

SEQ ID NO: 143959 - DNA, 74 bp, Homo sapiens
ggaggcctggctgagctgtcatcccccaggaaactcaagagtatacccgaaatgttgttagatattgccttgaa

SEQ ID NO: 143960 - DNA, 101 bp, Homo sapiens
tgctaccagttacgatggcaaaacagcagtgaccgagatcgtcaacaggaaatgctgacttttaacccacacaagcgaatctctgcctttcgagctctgca

SEQ ID NO: 143961 - DNA, 89 bp, Homo sapiens
tacaccttgcttctgtagaccagctccaacaggattccatggtagctgggatgttagggctcagcaaccaaccagtggttcatcccagc

SEQ ID NO: 143962 - DNA, 100 bp, Homo sapiens
gatgactcaactctcagtgaaagtgccaatcaggtctttctgattggaggtggacacaaaggaagaggcagccagacagctacttcagcgtcctcaacgc

SEQ ID NO: 143963 - DNA, 88 bp, Homo sapiens
ccgcgcctggcctggccgggaccatggtgacttcatggtcatgacgattttcttcaatgtgagcaggcggtttggctatgttgccttt

SEQ ID NO: 143964 - DNA, 100 bp, Homo sapiens
gagctgcttatggtgtctgccccaagtggtgagcttcattttctccaaattggaggaacctgtgatgatattgatgaagctgatatactagtggatggat

SEQ ID NO: 143965 - DNA, 74 bp, Homo sapiens
atatcttgccccggtgggccatcattggttggctcctgacaacgtgcacgaaaactacccctgagtgtggtccc

SEQ ID NO: 143966 - DNA, 73 bp, Homo sapiens
accacccctgaagaaattgcacaggctaggcagctggaagagaaagaccgagtgctaaagaagcaggatgcat

SEQ ID NO: 143967 - DNA, 75 bp, Homo sapiens
cagcgcttccttcagccatagcatggacttcttcctgctcaagtgcgaagaaaccaatagagccatggcgactcc

SEQ ID NO: 143968 - DNA, 78 bp, Homo sapiens
gtgaacattcaagtgaagcaaaagcctttcatgattataatgcctaccgcaggaatgggatggcttttctagcctgct

SEQ ID NO: 143969 - DNA, 100 bp, Homo sapiens
aagaggaagccatcgcctggccccggctctctggaccttgtctcgctcgggagcggaaacagcggcagccagaggcacgccccaaaggcgagggcctgac

SEQ ID NO: 143970 - DNA, 100 bp, Homo sapiens
aatggggaaagtcaagaaaatagatgcttctaaatctgttgatgaaatatgcacccaatgtccagggagcgtgcaaaatttgtcaaaagtggccttttat

SEQ ID NO: 143971 - DNA, 89 bp, Homo sapiens
tctccatcagaacatggacaagatcaaggttccgacgcagatcatctgggggaaacaagaccagggaccctccattttccatatccagg

SEQ ID NO: 143972 - DNA, 75 bp, Homo sapiens
cttgccctgagcacccttcagattaagcgtcagcttcctgttttatagtcttgccacttgcctagtgaggctttt

SEQ ID NO: 143973 - DNA, 90 bp, Homo sapiens
tgcagatcttcaacaagaggacccaggagaaattcgccctcaaagattttttatcaagcagaaatgcatcgaacaacgagaatcaagatc

SEQ ID NO: 143974 - DNA, 98 bp, Homo sapiens
gtcctgagaagttcccgcttgtggagcaaacatttttccccaaccataagccaatggagttagaagccgctcttcacagagatgacgtggagtttatc

SEQ ID NO: 143975 - DNA, 100 bp, Homo sapiens
ggcgccaatggggagcagaaggactcggacacagaacatgaacgattggatgcccatcgccaaggagtatgatccactcaaagcgggcagcattgatggc

SEQ ID NO: 143976 - DNA, 83 bp, Homo sapiens
aagccacctgtacatctttctccttttgaattacctgccctccgaagaagaactgtggctgcaccatctgtcttcatcttccc

SEQ ID NO: 143977 - DNA, 90 bp, Homo sapiens
gaagtggtctgctccggatggctccgcaagtcccccccggagaaaaagttgaagcgttatgattatgttgacaaagagaaggcaattgcc

SEQ ID NO: 143978 - DNA, 100 bp, Homo sapiens
ggattccgccttgttggtctgaaattcatgcaagatgagctttctgatgttagccaaggcggatctaaagctaccactccagcatcaacagctaattcag

SEQ ID NO: 143979 - DNA, 75 bp, Homo sapiens
tctgggtgcccgtggaccacaggccctcgttgcccagatgaatatgcactttctggttggaatttgaataacatg

SEQ ID NO: 143980 - DNA, 97 bp, Homo sapiens
cacctgcttcatccttgtttaatgactttggtgccctcaacatctctcagagacgaaagataccctgctttacacattaagaagaccttactttaga

SEQ ID NO: 143981 - DNA, 100 bp, Homo sapiens
ctggccgacatcgcggccttcttccgatccggatgtacagttacccagcacgtgtacctcctcctcctcctattgctcgggctgtagtgccctcgaaacg

SEQ ID NO: 143982 - DNA, 82 bp, Homo sapiens
cgcgagagcatcaaactggtgtccatcgtcaccttcaggccattcagaggaggaaagagaggggaatatgaagtcagccaag

SEQ ID NO: 143983 - DNA, 75 bp, Homo sapiens
atggaccaacttctttggcaagtggacattttactggctcaatgtgtggacctgagctgtaatgagctaagtgaa

SEQ ID NO: 143984 - DNA, 74 bp, Homo sapiens
aggggcagagggaccactctgacagatgccatggacaatattaccaggcagaaccaattctacgatacccaagt

SEQ ID NO: 143985 - DNA, 75 bp, Homo sapiens
ttcaaagggacggtggtcacgcctgttcaagatatgtgtcacaaagatgtctacacggaactgccagggaatgga

SEQ ID NO: 143986 - DNA, 75 bp, Homo sapiens
tgaaaactgaggaatttgaagtgaccaaaacagcagatttgcttgctgaaaatggtcgattaagcaatacccaag

SEQ ID NO: 143987 - DNA, 75 bp, Homo sapiens
ccacgtcgagcgtgcccgagacccgagatattgatgatgttaagaagttcaaaccgggttacctggaagctactc

SEQ ID NO: 143988 - DNA, 109 bp, Homo sapiens
ctaatctcacggatatcctctgttgggggagaaggatggtgccatgacaatggtgtgaactacaagattggagagaagtgggaccgtcagggagaaaatggccagatga

SEQ ID NO: 143989 - DNA, 97 bp, Homo sapiens
ttcgagtcgttcttgctcttcgagggcgagaagctttagttgaaaaatgctctcgtattacatcgctggttttcactggtgcaccgcatatctccga

SEQ ID NO: 143990 - DNA, 140 bp, Homo sapiens
cgccctgctcgtgccccagctcggccccggacggcccggctgctgtgcagagaggaggccgagtcggtatgtgccatcacaagcagatgtggcagtatttgaagccgtgtccagcccaccgcctgccgacttgtgtcatg

SEQ ID NO: 143991 - DNA, 97 bp, Homo sapiens
tgtattaaaagacctgagaacctggtgttaccttccgaacaagaatctatcactgtaatattaacagccaaggtgtgatctgtctggacatcttaaa

SEQ ID NO: 143992 - DNA, 74 bp, Homo sapiens
tgatgatgtgcgggttcaggaggtacccaaactgaaggaggctgtctgcgttagtttgggaagtcagatatata

SEQ ID NO: 143993 - DNA, 83 bp, Homo sapiens
tctttctgctgggcctgcccttcaccctctacatgccctgggcgctgcctatggcacagccaagagcggtaccggcattgcgg

SEQ ID NO: 143994 - DNA, 136 bp, Homo sapiens
cggagatctctctcatctcgctcggctgcgggaaatcgggctgaagcgactgagtccgcgatggagctccctcgtgaaagatgcttctgttcctctgattgatgttacaaacctccctactcctcgaaaattcctt

SEQ ID NO: 143995 - DNA, 99 bp, Homo sapiens
ttccaggggctctgggagtggctgccaggatccagacacattagtcaagctgcagccaaagtcgacgttgaatttgattatgatgggcctctgatgaag

SEQ ID NO: 143996 - DNA, 100 bp, Homo sapiens
aaagctcctgggcaaggggacgtctgcagctgacaaagtgtgggatgctgtctcaggagatgaattgatgaccctggctcataaacacattgtcaagact

SEQ ID NO: 143997 - DNA, 100 bp, Homo sapiens
ctgaagtcagttgttgcatcaaatacttcatatttggcttcaatgtcatattttgggttctcagaggcactgtgactgacttccctggatttgatgagcg

SEQ ID NO: 143998 - DNA, 101 bp, Homo sapiens
ctggaggaagagaaggcagctgtgactgaggcagtgcgggccctgctgaacatagataccctggagcgaatagccgggctggaacaggaggacttggtgga

SEQ ID NO: 143999 - DNA, 76 bp, Homo sapiens
ccaacaacagtgacggaatgcctccatacatgcaaactaggcgtggcaactgctggctgcgtgaatgaagttacag

SEQ ID NO: 144000 - DNA, 60 bp, Homo sapiens
ctcaaacaggagctggagcagctcaaagaggctcagtattctcaccatgtgatccaggag

SEQ ID NO: 144001 - DNA, 97 bp, Homo sapiens
atcttgtatgactcaaactgccaactgaacttcatcgctcctgacaagcatgagatctaaggtcacacattgcctccttgcattaaggagaaaacga

SEQ ID NO: 144002 - DNA, 80 bp, Homo sapiens
ctggctgcggccgccctgggccgggccccaccggacgaattcagaaggagctggcggacatcactttagaccctccacct

SEQ ID NO: 144003 - DNA, 87 bp, Homo sapiens
ttgaggacttggaggtcctgtctagcttctcccgttggcaacggttacatcaagcctccggttccacctgcttctggcacgcacagg

SEQ ID NO: 144004 - DNA, 51 bp, Homo sapiens
tacatcgtattacacctgaggaggccaagtcaaataattggagtctggaag

SEQ ID NO: 144005 - DNA, 100 bp, Homo sapiens
gtataagcagtgatgaggtcaacttcttggtatatagatacttgcaagagtcagatggacccgattcagaaagctgtaataaaccatacattcggggttc

SEQ ID NO: 144006 - DNA, 100 bp, Homo sapiens
ccatgatctccttaacggacacgcagagaaaaccagtagattcccagacatcgcgaagtgaatctgaaattgtgccaaaagttgctaaaatgactgtatc

SEQ ID NO: 144007 - DNA, 150 bp, Homo sapiens
ctcacacctaaagaagaaagaaaatggcttgtgctgagttttcttttcatgtaccaagtcttgaagagcttgctggagctgaataccaagagatatctcctgatatctgcacctctgtggataaaacacatctctgatgaacagatcctg

SEQ ID NO: 144008 - DNA, 100 bp, Homo sapiens
aggaattcttctttgcctttatcagcttgtgaaaaattatgaattaccagagactgatgactgtggcggagacgattacagctctcatgtttcctttcca

SEQ ID NO: 144009 - DNA, 75 bp, Homo sapiens
atgatgggaacattgtggagctggccttccagaccacttgccacattgtcaaaatgtaggcattagacttcctgg

SEQ ID NO: 144010 - DNA, 82 bp, Homo sapiens
tggatgaggagggctctgatccccccctgccggggagggcccagcgcatccgacagctctacgaactcgacggggaccccaa

SEQ ID NO: 144011 - DNA, 83 bp, Homo sapiens
atggcggagctgacggtggaggttcgcggctctaacggggctttctacaagacagagtttcactcctgttacccaggctggag

SEQ ID NO: 144012 - DNA, 75 bp, Homo sapiens
gccgagctggagctgccgcggcgcagccagatcctgggcgcagtgatcctgggcttcggggtgtggatcctggcc

SEQ ID NO: 144013 - DNA, 101 bp, Homo sapiens
cgaggacgcgttgctgcggcgtctgcgaggcccgaggggcttccagtttccaaacctgagagctacaacttggagaatggaaaagaaccattgaagcttga

SEQ ID NO: 144014 - DNA, 100 bp, Homo sapiens
aaccagtcccttgtgtatggcaaagtggatagcttctggaaggtactgtccaagaagctggaacattattatccagcaagaatgttcgtgtcaactgttt

SEQ ID NO: 144015 - DNA, 100 bp, Homo sapiens
cgaatgtgcaggatcaccgaggggaaagtgagcttgacaggttccacttccaaacatgagttccaggccgagacaaagaagcttttggacattgttgccc

SEQ ID NO: 144016 - DNA, 84 bp, Homo sapiens
tcagagactgaggacttaaatgaagccactgattagcaatttaaagatcctctccaagctgccagagaaactacgcataggctg

SEQ ID NO: 144017 - DNA, 100 bp, Homo sapiens
tgggcctgcaggtctctgtcgagcagcggacgccggtctctgttccgcaggatggtgaatgaaaactttgccattgatttgatagcagagcagcccgtga

SEQ ID NO: 144018 - DNA, 51 bp, Homo sapiens
ctcggcgcccggcggggactgcagcttaccgtgacaatcagagctttgttg

SEQ ID NO: 144019 - DNA, 95 bp, Homo sapiens
gccgacatcgacgccgcgtggcaggcgctgcgcacccgaaatgctgagccgattatcaggattagcaaatgttgttttgcatgaattatcaggag

SEQ ID NO: 144020 - DNA, 100 bp, Homo sapiens
agccgcccaccggtttttctgccacttttgcaagggcgaggtcagccccaaactaccgatcgtcagtatttaaacagatcacatcatgcgtgagtacaag

SEQ ID NO: 144021 - DNA, 82 bp, Homo sapiens
ttgttcccccaaatgtctgactctgactctcggactgagaaacgcaaggtcttgaggaccggcccagctcaggctcctgggg

SEQ ID NO: 144022 - DNA, 82 bp, Homo sapiens
cggggcgggggcggggcggcagtgagctcggccggcaaccgagggacccgcgtccagggggccgtggagcccatgcagatcg

SEQ ID NO: 144023 - DNA, 95 bp, Homo sapiens
cacatggtagacaccgtgacatggcacaagatgcgaggtctccaggatagctgcttatgcctacagtgcactttctcagatccgtgtggacgcaa

SEQ ID NO: 144024 - DNA, 100 bp, Homo sapiens
agcaggacctggccagcctcctggagaatatgccaacacccttctcggaggctcaggtgtaaattttgataccaccattgccgccttcccctcaaaaaag

SEQ ID NO: 144025 - DNA, 101 bp, Homo sapiens
ccgggacctcggcaggatggaaggaaataatgcaaaaggtgtcccaaggctcctgaccagtgaacaaagatttgagaaagacagccaagctcatgttttct

SEQ ID NO: 144026 - DNA, 89 bp, Homo sapiens
ccaggccgaaaggcccggaagcagaagggtgccgagacagaactcgtcagattcttgcctgcagggcacaagagactatagtccccggc

SEQ ID NO: 144027 - DNA, 98 bp, Homo sapiens
tgggatcgatgtttcaatattggaagcgctttgatttacagcagctgcagtaagactttgaccccgacgcaggcttcagtgattgccgcggatcagaa

SEQ ID NO: 144028 - DNA, 50 bp, Homo sapiens
cctcgatgtgctctgcgtgttgctggcgccctcacaaagccaatgctgag

SEQ ID NO: 144029 - DNA, 100 bp, Homo sapiens
ctggtctcctactcccagatgcatccgtgtcaggtaagggactgttctgaagaacctttccatttagtgatcaagatatggaagctgatttctgaaaatg

SEQ ID NO: 144030 - DNA, 82 bp, Homo sapiens
gaacgaggcaaggagctaaagcagcgtgcgttcagccctggggagaagacagactgctgctttggacctgttggtaatgatg

SEQ ID NO: 144031 - DNA, 100 bp, Homo sapiens
gacgttctcaagtggggcgatgaggaggtcttgctggagttgctagaacaatgtgtggatggcttatggaaggcagaacgttatgaaataatttctgaga

SEQ ID NO: 144032 - DNA, 100 bp, Homo sapiens
agaagatgatgtaagagataatattttaaaatatgatgaagaaggtggaggagaagaagaccagatggtttcacccaaatatcactggtgtggaggcaga

SEQ ID NO: 144033 - DNA, 100 bp, Homo sapiens
gtggatttatcgctgccacggtctgcgtagctccagaggtttaaccataggatagagaaaccagctgtacgattctgtgaccggtgtcatctgatcaagc

SEQ ID NO: 144034 - DNA, 50 bp, Homo sapiens
ttcctctttcggccgcgctggtgaacagcagttggaattgatcacacctt

SEQ ID NO: 144035 - DNA, 83 bp, Homo sapiens
aacagctcgggggacggcggggcggcgggcgacggcaccgacatccggctccgggttcgagcagagtactgcgagcatgggcc

SEQ ID NO: 144036 - DNA, 82 bp, Homo sapiens
tttctcttcattgacagacagcacttgcagctccgacagttagttaatatgtgcatcaacccagatccagagaagcgaccag

SEQ ID NO: 144037 - DNA, 82 bp, Homo sapiens
ttcacgactactagaaggggaggggagtggaaaggctctcagtgaaaaagacagctttattaaaccgcctggagcgaatttt

SEQ ID NO: 144038 - DNA, 83 bp, Homo sapiens
caaagaggccaagcacattgcggaagaggctgaccgcaaatacgaggagagacaagaggagcagcagcggcaccgcccctcac

SEQ ID NO: 144039 - DNA, 80 bp, Homo sapiens
ggaagagttgtggcgaggcagatcctgccccgtggccgcggccgtctcggtcctcactgagcagcgagtcgtcccccgtg

SEQ ID NO: 144040 - DNA, 100 bp, Homo sapiens
tgggggccacaaatgctccttctcctggagacgcaactcaagggttttggccaaattgggcgagggcacaaaataaccacttaccccttctcaccgagga

SEQ ID NO: 144041 - DNA, 51 bp, Homo sapiens
atcagagtggaggaagtacagccagcaggtggttctcttcccaaagtggaa

SEQ ID NO: 144042 - DNA, 96 bp, Homo sapiens
ccagagctgaggactgcctgtttgcaggaggactggcgttagcccaggtgctctttttctacgtgaagtacttggtgctctttggcgtgcctgctc

SEQ ID NO: 144043 - DNA, 89 bp, Homo sapiens
cggtgcacgctgctggtcagccagttccgctcctgtcagtggcacaaatacaattatgcccacctccacctcagattcccaattctcac

SEQ ID NO: 144044 - DNA, 100 bp, Homo sapiens
gtcaacgcccggcacctggacttggcttccctcaagtctatccgagagtttgcagcaaagatcattgaaggcattgaatgccccagaggagcccgaaacc

SEQ ID NO: 144045 - DNA, 100 bp, Homo sapiens
tctctctctgtctgcctggcatctacagaatttggaaactagtttttcggagcaacatcccctgtcacctggttgatatctcttgcggattaccctgcag

SEQ ID NO: 144046 - DNA, 112 bp, Homo sapiens
cgggtgccctggctaccatggaccatcctgctggtcagcactgcggctggtcatgactgtccaaagtatgataatcacatgagagtgctcgttgctacggatgtcatttgac

SEQ ID NO: 144047 - DNA, 100 bp, Homo sapiens
aaggctgcctataatcaagtaaaaacaatagctcaaggaaacctttccaacacagatgtccaagctgccaaccatgctgtgacctacaagcaaactaaat

SEQ ID NO: 144048 - DNA, 100 bp, Homo sapiens
gacttcgaaggagggctctcctgtctgccaccatcctgggttgacaattctacacaaggaggaccttgtaaagtcaaaaatgtcagaaacttccaggacc

SEQ ID NO: 144049 - DNA, 75 bp, Homo sapiens
aagttcctttttgaagtagttccaggcatctccttggaaacaatgccatctttgaatgtgagagataaacctagt

SEQ ID NO: 144050 - DNA, 100 bp, Homo sapiens
cacagacataccatggctgctgctcttcatcctcttctgcattgggatggacattgccgagaatggctgcgcccccaccccagaagagcagctgccaaag

SEQ ID NO: 144051 - DNA, 105 bp, Homo sapiens
cttagctgtgctcgcgctactctctctttctggcctggaggctatccagcagtgcgatgacatggatcctgcggacaaaccgccccagggcgtacctagcaccga

SEQ ID NO: 144052 - DNA, 100 bp, Homo sapiens
ctccctcagcttccgccccaaaaggttaatttggagtggcccctggagtcagtttcctacaccatccgaggccccacccagcacgagctacagcctccac

SEQ ID NO: 144053 - DNA, 75 bp, Homo sapiens
ccgtgacgcagttggatcagtcggctttaaattactcagacctctcaagctggatccaaggataaaaagatggac

SEQ ID NO: 144054 - DNA, 82 bp, Homo sapiens
ccaggagtcatcggacgccagaatctgtgtactaatggtcacttgatgtgcgctggctgttttatccacctactagcagatg

SEQ ID NO: 144055 - DNA, 83 bp, Homo sapiens
cgccgaggcaccgaggcactcagaggagctctggcaggctgccctgagcacgctcaaccccaaccccacggacagctgtcccc

SEQ ID NO: 144056 - DNA, 100 bp, Homo sapiens
gggcacacttacatttgttgtcaacaagaacaatcctttcatcttcttgggcttgaaagacacgttggtcgtcattgcctccgagcccactttagccctc

SEQ ID NO: 144057 - DNA, 88 bp, Homo sapiens
tcacctatgcaaagaaagggaagctattgctgggattttgaggaggaagatgagaatgtgcctactgctcctgatcctccaagtcaac

SEQ ID NO: 144058 - DNA, 50 bp, Homo sapiens
ttgttttcaacaatgatgactggatcaatgtgactctaagaacaaatgga

SEQ ID NO: 144059 - DNA, 89 bp, Homo sapiens
gaaaggaattgttttggcctaggatcatccaggaaccattggcactggcaagtggggctctgccagactggtgtgaacaattaaccagc

SEQ ID NO: 144060 - DNA, 75 bp, Homo sapiens
cttgaacaacctaccaagtgatgtggctcgttatcggaaagagcaaacattgcttaagcaactgccttgcattcc

SEQ ID NO: 144061 - DNA, 75 bp, Homo sapiens
catgcaagaagtaggctatggcttttgtgcaagagcccacaggcggttttgtgagctgcttccccaggagcagcg

SEQ ID NO: 144062 - DNA, 98 bp, Homo sapiens
ggatatgcagagagagcttgggagactgagacaacagagtattgggaaagggtcgttgtggtgcatagacccagagtatagacaaaatctaattcagg

SEQ ID NO: 144063 - DNA, 100 bp, Homo sapiens
ttggatatgacattggtgtgatcaatgcacctcaacagatatggatcagaaactttcgaagttggtagaagagctcacaacttcaggagaaccccgacta

SEQ ID NO: 144064 - DNA, 83 bp, Homo sapiens
aaaagctgcacgcaagtgttaaacttctgcaatacgaggattctctccaccacatagaatctgcagttttgaagaggcaaagg

SEQ ID NO: 144065 - DNA, 83 bp, Homo sapiens
cgggttcagttcgtcatggggctgtttggaaagacccaggagaagccgcccaaagaactggaatcccttggcaccatgtcctg

SEQ ID NO: 144066 - DNA, 100 bp, Homo sapiens
aacgactgcggcgcgctgctggacgaagagctctcctccttcttcctcaactatctcgctgacacgcaggttgccaacttggcctgttccatctcaaata

SEQ ID NO: 144067 - DNA, 74 bp, Homo sapiens
ccgccaccacccactccggacacaggttgattcttcaccacactgaaaccattaggaaaaatccttgtggttaa

SEQ ID NO: 144068 - DNA, 53 bp, Homo sapiens
tcccatcattgatgtggtgcgatcgctgtcaccactgactaaagaagagaaaa

SEQ ID NO: 144069 - DNA, 83 bp, Homo sapiens
ctgacccactacaaagtgtacaggacatcagtaagactaccacctctcgtgctcattcccccatgatcgccgtaggaagtgat

SEQ ID NO: 144070 - DNA, 108 bp, Homo sapiens
tgaagatgtcgtccaaatagtatcaggattccaagccccgtgctgatcccattccaatatgtagcttctgtttggggactaaagaatcaaatcgtgaaaagaaaccag

SEQ ID NO: 144071 - DNA, 100 bp, Homo sapiens
aattatggcatcctggccgatgccacggagcaagtgggccaggatgtgcccctgattagcctggccaacatcttgcacaatgccaagctctggaatgacg

SEQ ID NO: 144072 - DNA, 97 bp, Homo sapiens
ctgcggcctcactgggacccccaggaggtgaccctgcaggtgggtttgctgagttctctcgttgtttccctggcctctgtgaaggaaaatccactct

SEQ ID NO: 144073 - DNA, 119 bp, Homo sapiens
cttacctccccaccagatcccggagatcgcccgccatggctttacttactgcggccgcccggctcttgggaaccaagctgctgtggaatgaactgggtgcctccagaattcccaactga

SEQ ID NO: 144074 - DNA, 121 bp, Homo sapiens
cttcccctcactccctgtgaagctctccagcatcatcgaggtcccatcaggtgctggagaatctggtaaaagcaccattgtgaagcagatgaggatcctgcatgttaatgggtttaatgga

SEQ ID NO: 144075 - DNA, 89 bp, Homo sapiens
cgaccatgtgactgtgaccttgggggagccttaaacaacagacctctgctcttccaggcaagtgaacatgtagccagtagtcctgcatt

SEQ ID NO: 144076 - DNA, 75 bp, Homo sapiens
gcgggatggaggcggcggccggtgaccctggcaaagatgagagtgcacatttcgtcctgcctgaaggtccaggag

SEQ ID NO: 144077 - DNA, 104 bp, Homo sapiens
gaattacagctgctagccaggaacatggactgaagtatccagcgctcattgggaatttagttaagacaaatttacatgtattggagaccagaccagaagccctt

SEQ ID NO: 144078 - DNA, 75 bp, Homo sapiens
ggagcctgccctcgcatggtggccagggcacgtcactgcaggccaggaactgtggaaggtgcatcagtgaagaaa

SEQ ID NO: 144079 - DNA, 100 bp, Homo sapiens
aggagaagtctgccgttactgccctgtggggcaaggtgaacgtggatgaagttggtggtgagcccattggcaggggtaccaaagtgatcctccatcttaa

SEQ ID NO: 144080 - DNA, 51 bp, Homo sapiens
ggatcctgggaattgagaagcttcagcagggtctcgctctgtcgcccaggc

SEQ ID NO: 144081 - DNA, 85 bp, Homo sapiens
ggtctgaaattcttgaagagacagggatctggtctgagggggcggacggcactgatatcaacgctgtggcccgctctcatgatgg

SEQ ID NO: 144082 - DNA, 71 bp, Homo sapiens
ggtttgtatggacaggcttgtccatctgtaacttcattaaggtagtaagcattaataatgtctttcatctt

SEQ ID NO: 144083 - DNA, 100 bp, Homo sapiens
cttgcttacctacgtgctggccgccacagaacttacctgcctcttcatgcagttctccatcgtgccattcctgagggaagacctcaattaccatgaccca

SEQ ID NO: 144084 - DNA, 100 bp, Homo sapiens
gttcactaaaccctattgaggatgaagcagtcatagcatctttactggaaaaaagtgaagtttttggctttcacccccaaccagtgaccaaagacttgac

SEQ ID NO: 144085 - DNA, 100 bp, Homo sapiens
acaaattcaagagtgaccagggatggtattgggagagttgctgctacatctttaggaaatttgactaaccatggttctgaagatttaccccttcctcctg

SEQ ID NO: 144086 - DNA, 50 bp, Homo sapiens
ggagaatccaccgccatccgccaccatgctgccattcgatttcacatgga

SEQ ID NO: 144087 - DNA, 100 bp, Homo sapiens
gcgggagctggatgaggagggctctgatccccccctgccggggagggcccagcgcatccgacagtctgtccatgtgaatgtgctgtgtggaagagttaaa

SEQ ID NO: 144088 - DNA, 75 bp, Homo sapiens
tcacacctcagttacctcagggaaagttaatgtgtgaaactgtgagatatgagagacacgaagcaaatgaagttt

SEQ ID NO: 144089 - DNA, 75 bp, Homo sapiens
taatcatcaagttccacctcagtctgaacctgagagcaacaggtcatacttacctggttgcttgcgcatctagta

SEQ ID NO: 144090 - DNA, 101 bp, Homo sapiens
ctgaccatcatcctgctcctgggtgccgtggcatgtcgatttgtccttcactacaggtatcagcagatgttgcacacaaacttggtataccttgctacaat

SEQ ID NO: 144091 - DNA, 82 bp, Homo sapiens
agaaagcacggggtgaaactgaccacagtgctcaccacccaccaccactgccgcggcgagtcctttgcacatgttggcaaca

SEQ ID NO: 144092 - DNA, 100 bp, Homo sapiens
aaaatgtccaaatcattaaagaactacattactattaagaaagcgtggatacccatcaacgaagttttgatattggaattcagattggctatcagcgacg

SEQ ID NO: 144093 - DNA, 76 bp, Homo sapiens
cagatgatgcggtggtgggggacctgccggcacgcgactccccccgggcccaaaacctgcctagagctggaacgtt

SEQ ID NO: 144094 - DNA, 100 bp, Homo sapiens
agctgaaacagcttcttctggctcataaagattgccctgtaaccgccatgcagaagaaatctggctatcataagaacactttttacagttggctagaagg

SEQ ID NO: 144095 - DNA, 97 bp, Homo sapiens
ctggcgtccgcgcgctgcacaatggcggctctgaagagttggctgtcgcgcagcgtaacttcattcttcaggcaagaaacctattggaattcgagac

SEQ ID NO: 144096 - DNA, 101 bp, Homo sapiens
atttgccagggcctcgctcgaggaaattttgggaacggtttattgccctgtgtcatgaaaacagtagcctacatggaatcacttttgaacagatcaaagcc

SEQ ID NO: 144097 - DNA, 85 bp, Homo sapiens
gctggacaacaccatggaaatatttgacattgagagccagccccagtgcctgctgagccgtttgacaacactacctacaagaacc

SEQ ID NO: 144098 - DNA, 75 bp, Homo sapiens
taaagctgttttggaactgtcaggtacctcaaagctgtcatcttgcattacaacatataagaagacaccacctcc

SEQ ID NO: 144099 - DNA, 101 bp, Homo sapiens
gccatccccagaggtgcccccaaacagttatacctgaaggggaatgctgcccggtctgctccgctactgacttaattcagtgcacaaatgagatgaatgtg

SEQ ID NO: 144100 - DNA, 102 bp, Homo sapiens
cccgaactccaggacagcatccaggcctcattggacagcattcgagcttcggaaccaaaaagaagcttcccagagccggggccaggagccccaagcgccctc

SEQ ID NO: 144101 - DNA, 87 bp, Homo sapiens
aagataaatccaaatactgcatatcagaaacaacagaaacctctgtagaggagcaggatgcaaccgacaggctgtggccggacagct

SEQ ID NO: 144102 - DNA, 100 bp, Homo sapiens
ctgagggtggaggccggattgtactgtatggggactccaattgcttggatgacagtcaccgacagaaggatttaccatatgagccccccaggagatcagc

SEQ ID NO: 144103 - DNA, 87 bp, Homo sapiens
cgtcctttttcgtttttcggatgatgccttcaatactacctttatttccaccatagccctgggcgctgcctatggcacagccaagag

SEQ ID NO: 144104 - DNA, 90 bp, Homo sapiens
agaaggccgccgggcccgggcatggtggtctggggcaacgcggaaggtgtcagctgtgatgcatgtttaaaaggaaattttcgaggtcgc

SEQ ID NO: 144105 - DNA, 89 bp, Homo sapiens
gtcgccgccgccaccatgcccaagagaaaggttcgagaacttgtcttggacaattgcaaatcaaatgatggaaaaattgagggcttaac

SEQ ID NO: 144106 - DNA, 82 bp, Homo sapiens
tggaccgcctgcgcagggtcagccaccagggctacagcactgaggctggcggtgcgtctttctacgtgaataggattttgtg

SEQ ID NO: 144107 - DNA, 96 bp, Homo sapiens
acgatatgaatatgaaagaattccgagagaacgagcacctcctcgaagtcatcccagtgcctgatcacttgaacggacatatcaagcaggtgcaca

SEQ ID NO: 144108 - DNA, 100 bp, Homo sapiens
acgtctgcggaagtgcagctgcctcagttcttagcgcagaatgaagctgataggaccttgatatatataactctctacatttctgaatgtctgaagaaac

SEQ ID NO: 144109 - DNA, 134 bp, Homo sapiens
ttcctcggagctttcgtcacctgtccttctacattttcgatagagacgttttccggagggattccatcatagctgaaaatgtgtgtctgacatgcaagctcagtggggcagagacccgtggattgctgtgccct

SEQ ID NO: 144110 - DNA, 75 bp, Homo sapiens
caggagctgcggccccgtccggcccgggctggtgcagtacagaaggtttctaaaaaattagaaatgcacgtttac

SEQ ID NO: 144111 - DNA, 100 bp, Homo sapiens
ggctccctgctgttcgagtacctgcccagaggggcccactcgctgtcccggtgaggtggctttgaccccgggttgcccggccagcacgaccgaggaggtg

SEQ ID NO: 144112 - DNA, 101 bp, Homo sapiens
ttttctgcaggtttaatagatgacaatgatctctaccgatgggaagtccttattattggccctccagatacactttaagacccagctaagttcctctgaaa

SEQ ID NO: 144113 - DNA, 100 bp, Homo sapiens
cacaaagggacctgatgaagcgaagatcaaggtgcgggagtatgagttaagaaaaaacaacttctcagatactggaaactttggttttgggatccaggaa

SEQ ID NO: 144114 - DNA, 98 bp, Homo sapiens
ctccaagaggcccagagacatgctgaaacatcgaagccgccgtcagccaatccagtggactcgcagccaaatttgtcatccactgtcacatccctcag

SEQ ID NO: 144115 - DNA, 51 bp, Homo sapiens
cacggtgctactcaaggcccgggaagaccaagatcactccatggatgaaat

SEQ ID NO: 144116 - DNA, 75 bp, Homo sapiens
ggtgacttttatctagaacttcactgggattttcaaagctggggtcttgtcaacggaaaggggtccctatccaga

SEQ ID NO: 144117 - DNA, 90 bp, Homo sapiens
cgagattgcctgacccaggcctgctcggccctcacaggaagggacttcctcgcccgaagagcgcgggcacagcaacgcagatgcggcaaa

SEQ ID NO: 144118 - DNA, 75 bp, Homo sapiens
accgaagttggaagtgtctcttagcagcgcgcggagaagaacggggagccagggcgccctgcgtccggcagagga

SEQ ID NO: 144119 - DNA, 75 bp, Homo sapiens
catctgggagagaagacgtaccattatgtgcccgaattccgaaaaggtgagaaaaactggaagcttgaagaccat

SEQ ID NO: 144120 - DNA, 90 bp, Homo sapiens
cccctcggcactaggcagcggaggagcccgaccgacccgcggagcgtgctttggacaccatgaattttgatgttataaagggcaagccag

SEQ ID NO: 144121 - DNA, 120 bp, Homo sapiens
cgggctgggcaccaaataccaggctaccatggtctacaagactctcttcgctctttgcatcttaactgcagtaaaatgtttattggaggcttgagctgggatacaagcaaaaaagatctg

SEQ ID NO: 144122 - DNA, 98 bp, Homo sapiens
cgggagccgacagcttcgcgccgggctaagtgctatttatggaggtacctatatgctgaataaacccattgaagaaatcattgtacagaatggaaaag

SEQ ID NO: 144123 - DNA, 98 bp, Homo sapiens
tgcgctcgcgcccggatccctcagaatagcctaacatggcagaccagagacagcgctcactgtctacctctggggagtcattgtaccacgtccttggg

SEQ ID NO: 144124 - DNA, 83 bp, Homo sapiens
gttgcgatggcgcagaaaccccgttgacaaggcactgctttttcatgacgggtggactccattatgctggtggaagagggctt

SEQ ID NO: 144125 - DNA, 90 bp, Homo sapiens
gaagaaattagagaagcattccgtgtgtttgataaggatgaacaaggcgcccacggcagggtttgaagctgatgttgggaccaagaccac

SEQ ID NO: 144126 - DNA, 100 bp, Homo sapiens
cgcggagcagaaagcagaacccgcagagatgtggtatggtgtattcctgtgggcactggtgtcttctctcttctttcatgtccctgctggattactggcc

SEQ ID NO: 144127 - DNA, 100 bp, Homo sapiens
ccgactgctgcctggtctgcaaagaagtcctttcaagtctctaggactggactcttcctaagcaagtccgaccagagtctcactgtcgcccaggctgcag

SEQ ID NO: 144128 - DNA, 50 bp, Homo sapiens
cgtggaaggagccttcggatggaaagcgtggatacccatcaacgaagttt

SEQ ID NO: 144129 - DNA, 83 bp, Homo sapiens
cctgaacgaagtggccaagaaggagaagcagctgcggaaaatgctagaaggacatttcattaccatccagaagtgtctcccac

SEQ ID NO: 144130 - DNA, 50 bp, Homo sapiens
ttgttcaggaaccaccagtgacagacatttcttctgaggccctgaagaag

SEQ ID NO: 144131 - DNA, 100 bp, Homo sapiens
gcaacactgtacatcctctgccacatcttcctgacccgcttcaagaagcctgctgagttcaccacagggttccgagtctgaggaagacataaccttgtgc

SEQ ID NO: 144132 - DNA, 50 bp, Homo sapiens
cgaatatcgtcatcgttagaagaaaactttagaaactgttcctttggaga

SEQ ID NO: 144133 - DNA, 75 bp, Homo sapiens
accatgctggcaagtctgaaggtcaaacctcgcgacctgtgtcagcagagccgccctgcaccaccatgtgcatca

SEQ ID NO: 144134 - DNA, 100 bp, Homo sapiens
aagcccgttcggcctggaggagccgcagtgggtcccggacaaggaggacgtgttcctcatgatccggcgccacaagaccaccatcttcacggacgccaag

SEQ ID NO: 144135 - DNA, 75 bp, Homo sapiens
ggacgaagagctctcctccttcttcctcaactatctcgctgacacgcagtataaatcaaagccattctgtgaaaa

SEQ ID NO: 144136 - DNA, 101 bp, Homo sapiens
cccccgtccggcggcctcacggacgaggccgccctcagttgctgctccgacgcggaccccagtaccaaggattacggggcgctgaaagacatcgtgatcaa

SEQ ID NO: 144137 - DNA, 83 bp, Homo sapiens
cctgcattcgcggggcatgttcccgaggctgtcaccaggactccctggaggaaaagcggaagcggcagcggtctgaacgcctg

SEQ ID NO: 144138 - DNA, 50 bp, Homo sapiens
ctgaacctggaagttgtgctttttaaggctgcctttaatattggttggga

SEQ ID NO: 144139 - DNA, 100 bp, Homo sapiens
cctgcctctgcgacccgggctgggtgggggaccagtgccagcactgccagggcaggttcaatggtcagttttctcttgcagtcgtcagcctgaacataac

SEQ ID NO: 144140 - DNA, 75 bp, Homo sapiens
tgcgtgggggaccggctgttggcggacatctgaatgggactccgagtgccttacatccctgcagccccttcctct

SEQ ID NO: 144141 - DNA, 90 bp, Homo sapiens
aggagctaaagcagcgtgcgttcagccctgggacacaagtgagatcagagcctagcaacatgcagtttttcttgatgaagatggatgacc

SEQ ID NO: 144142 - DNA, 100 bp, Homo sapiens
aagacagctttcacagtttgcgggactcagtcccatcactccaaggagagaagtacataccgagcatcaaatattaaggcacccggagaacagacagtac

SEQ ID NO: 144143 - DNA, 75 bp, Homo sapiens
atttgttgagaaatgtgtggaatttattgaagatacaggttcactactgtgatagacaaagtggcaaagagtgtg

SEQ ID NO: 144144 - DNA, 95 bp, Homo sapiens
agtgaggctcagagatgcctgtaccgtgatgtgacgctggagaacctggcacttatgtcctccctggatgcatcaatctcaaataattctacaag

SEQ ID NO: 144145 - DNA, 72 bp, Homo sapiens
agacggaaaaagtcgatctggagcttttcccctccccgggggcttgcttctgacatgtctgatgagcgcatt

SEQ ID NO: 144146 - DNA, 75 bp, Homo sapiens
gtgaagactctgatatagatggtgattatagagtgaattagtaagctgtgtgggctggactactgctgaagagct

SEQ ID NO: 144147 - DNA, 75 bp, Homo sapiens
gcgccccagggcaagccccgctccggccaacaaggccctgtggtaggaggctggtacaaggttttggatcggttc

SEQ ID NO: 144148 - DNA, 82 bp, Homo sapiens
accattaaaggacgagtttaaaaacacaggtaacttacgacctatttctccgtggcgttggctgttttctgttgttgttcct

SEQ ID NO: 144149 - DNA, 100 bp, Homo sapiens
aacgaatccgagtgacatcagaaaggcctgtttaaagaagaaaacccgtatgctagatttgaaaacaactaaagcgctccagcacatcagtcccgacgct

SEQ ID NO: 144150 - DNA, 75 bp, Homo sapiens
atgccgttaaacaaatcctggaggcagttgctccttatgtttgatcatcggccaaggtcctggcgagaactgcct

SEQ ID NO: 144151 - DNA, 100 bp, Homo sapiens
actgcctccattacactgctgagtcacacacaacgcttgttatgttttcatcacttctctccagaaggtgatggcttggacaacagtgtagcttccccca

SEQ ID NO: 144152 - DNA, 75 bp, Homo sapiens
gtaagatcatccgcatgtgggcagaaaaagaaatgcacaatctcgcaagccagctgaggtgggtgtcctggttgg

SEQ ID NO: 144153 - DNA, 100 bp, Homo sapiens
ccctgtgtgcggttcctattgcacagatttaatccagagactgacttcactatagaacccacagttgtatcaatggttggggaaagatagtggcaacagg

SEQ ID NO: 144154 - DNA, 97 bp, Homo sapiens
gttctatttctctagctattgccttattttttctcatggatgttcttcttcgagtatttgtagaagggctcgtggtcccaagaagcatctgaagcgg

SEQ ID NO: 144155 - DNA, 75 bp, Homo sapiens
atgaaacatcagttcttgatcctgatgaggggaaaaaagttgttccatgtagacatgactggcatcagactggag

SEQ ID NO: 144156 - DNA, 135 bp, Homo sapiens
gtcaggtcgggaaccatccttggaaatcctgccgcggacttctctgcacagcatccctgtgacaggtgctggagaatctggtaaaagcaccattgtgaagcagatgaggatcctgcatgttaatgggtttaatgg

SEQ ID NO: 144157 - DNA, 75 bp, Homo sapiens
gcccgcagagcaagcgcggggaaccaaggagacgctcctggcactgcaggctgtccccttttctgggactattca

SEQ ID NO: 144158 - DNA, 75 bp, Homo sapiens
catgtatacaactgtagatgcaaatgggtatctgaaaaatggatcaggaatgctgtctctgcaatttgagaggag

SEQ ID NO: 144159 - DNA, 75 bp, Homo sapiens
gtgacatccgaggtgcctttctccaaaagcccgcctggccagccgcgtctgtgccgccagcctctgactcgagca

SEQ ID NO: 144160 - DNA, 132 bp, Homo sapiens
aatcttcaagccacaatggccctcaccagaacccagccatgtggtcagcctgatctcggacttcacagccagcagaactttcaggcccatgaagttcatcagaaaattctggcaactgatgttagttccaaa

SEQ ID NO: 144161 - DNA, 82 bp, Homo sapiens
cacgcatccatccagatgaacgtggccgagggggatatgagactttctactcggaatatcctgagtgttgcgtggatgtaaa

SEQ ID NO: 144162 - DNA, 75 bp, Homo sapiens
gctcgccctccgacgctgctcagaacattctagtatgccagtagaaaaaaatatcactttagaaaggccttctaa

SEQ ID NO: 144163 - DNA, 100 bp, Homo sapiens
accatctctgtggcaccctcagctgacacctccagcgagaggagcatctacaagtccagaaagcagcccaggcctttaactctgggctgctgtgtgtggc

SEQ ID NO: 144164 - DNA, 82 bp, Homo sapiens
tgggatcctgaacttcttcaactgcaccaccgcctgcctcatctgtgccaaagcagaatgtgggagctgctatttctatgac

SEQ ID NO: 144165 - DNA, 84 bp, Homo sapiens
gtagacatccttatcagcacagcacttattccaggtgcattgacatacaacagagcaacgaggtagagaggacacaagcacttc

SEQ ID NO: 144166 - DNA, 100 bp, Homo sapiens
ggaaatgggaagaggcccagtccagagaggacttgagaccaggagacgtatccagcaagcggaacctctgggaaaagcaatctgtggataaggtcacttc

SEQ ID NO: 144167 - DNA, 87 bp, Homo sapiens
atcaggtgttttcaggttaaccgtcaggtgaagaacaaattggttttgagctagtggagaaattatttcaaggtcagctggtattaa

SEQ ID NO: 144168 - DNA, 51 bp, Homo sapiens
gccgaaagtgttccagattctcagattcctttgtgggtggagtcatcggcc

SEQ ID NO: 144169 - DNA, 90 bp, Homo sapiens
accaatgatagtgaaggaagctcgatatattgccataacaatgatgaagtgtttctaagacctcagagaaatttggaatctatagacccg

SEQ ID NO: 144170 - DNA, 75 bp, Homo sapiens
accgggccgggagagcagacctgagagaggtagtggtggtgcacgaagatccgcactacttgacagcgacgagcc

SEQ ID NO: 144171 - DNA, 50 bp, Homo sapiens
tagaccctccacctaattgcaggaaccatgctgccagttttctgtgtggt

SEQ ID NO: 144172 - DNA, 100 bp, Homo sapiens
ttgaagatcaccagccttaccgaggttgtgtgtgggttagacttgtgcaaccagggcaactctggcctcccagaagttcctgccgaatcgtcttcgtcac

SEQ ID NO: 144173 - DNA, 49 bp, Homo sapiens
ttaaaagcagtaatggaacaagctaggcttcgtgggacacatatgcaac

SEQ ID NO: 144174 - DNA, 50 bp, Homo sapiens
aggcgacccgtactgggcctactctgtgatatcagtatcaagataaaagt

SEQ ID NO: 144175 - DNA, 80 bp, Homo sapiens
tatccgtttgttcaggaaccaccagtgacagaggggtgaatctctacattaagaacttggatgacactattgatgatgag

SEQ ID NO: 144176 - DNA, 80 bp, Homo sapiens
ggaagatggcgcctgttgtgacagggatgtacagttacccagcacgtgtacctcctcctcctcctattgctcgggctgta

SEQ ID NO: 144177 - DNA, 75 bp, Homo sapiens
ttcaagtctcatctgcattaaagctctccattgaaccctctcacaaaagactccctggaggaaaagcggaagcgg

SEQ ID NO: 144178 - DNA, 100 bp, Homo sapiens
tgcccagacggctcacctgtgcgggatggaacaaaaggaaactcgaaggaaggaaggcattgtaaagctgaaacctcatgaggaacctcttcgttctgag

SEQ ID NO: 144179 - DNA, 100 bp, Homo sapiens
ctcaaccagctgtcactgcaggagctgcagaccatcagggctggtgaattaccagatctctgtcaagggcagtaacctgttcaagttggaagtgcgtctt

SEQ ID NO: 144180 - DNA, 90 bp, Homo sapiens
caattactgaagctataaggagattttttaaaaattaaacttcaacacaatgaggtgcagcggaactgctgcctgacgctctgcaacttc

SEQ ID NO: 144181 - DNA, 101 bp, Homo sapiens
acggccgggagaagcatgggaaggaggccgagccgggatctcaggtcctcgggggcggcggccacgccaaggacgggttcacaataaaggtgctaagaaag

SEQ ID NO: 144182 - DNA, 99 bp, Homo sapiens
gctgatgaagcttctgaaccatccacacatcataaagctttaccagttgcagaactgctttattcactgcagtggtgtgaagaattagataacccacct

SEQ ID NO: 144183 - DNA, 100 bp, Homo sapiens
agaagaggcaccacacccggctcttctgcactgacaagaacgagcggaacaccttccaccatgaccacctcagcaagttcccacttaaataaaggcatca

SEQ ID NO: 144184 - DNA, 74 bp, Homo sapiens
ggcaagttgttctccgtaaccagaaacaggttcattcattgaaatgcactcggtgatggaaagagagccactat

SEQ ID NO: 144185 - DNA, 75 bp, Homo sapiens
ggatcgctgtgatcgtcacttgtgcacgatctgattttctggagagatgtgaagaagactgggtttgtctttggc

SEQ ID NO: 144186 - DNA, 100 bp, Homo sapiens
atttggctacacacttatagatcttctgcactgtttacaggcacaggttttggaaggaaggatgttgtagaacacttactacagatgggtgctaatgtcc

SEQ ID NO: 144187 - DNA, 101 bp, Homo sapiens
gaaggacgaggctgaggcgagaaacgaggtactccaaagattcaggtttactcacgtcatccagcagagaatggaaagtcaaatttcctgaattgctatgt

SEQ ID NO: 144188 - DNA, 82 bp, Homo sapiens
ttttctaatcatcagcatttacatgacagaaatcacctatgtttacagcgacagcaattctgtggtgttcttggtcacacat

SEQ ID NO: 144189 - DNA, 114 bp, Homo sapiens
ctagcacccagaagatgagaccgcaattcgagaatcaaagggccgggagcgatggtcaatgagctgaaggagaaaggcaacaaggccctgagcgtgggtaacatcgatgatgcc

SEQ ID NO: 144190 - DNA, 75 bp, Homo sapiens
agatccacagccaagagccaggaccccctagaagtctagaaatggctgaaggtgatgtggccgccctcaaccgac

SEQ ID NO: 144191 - DNA, 83 bp, Homo sapiens
aaaagaacttcgtgtgaaaattttcctggggttatgaagacagtatggagtttccagaccatagtagacatttgctacagtgt

SEQ ID NO: 144192 - DNA, 100 bp, Homo sapiens
cgccgtccggccgcacggagagcccagccaccgccgcagcaaaccagtccagctacgggggcccagccagccagcagctgagtgggggttacggaggcgg

SEQ ID NO: 144193 - DNA, 82 bp, Homo sapiens
ccttcttgctggcgttggtgggagccgtgctctacctctatccggtccggcctctttggcctacccccgttggctccgctgc

SEQ ID NO: 144194 - DNA, 97 bp, Homo sapiens
caagtgtcacagcctggttggaaaacccaagatatttatcattcagccctggtacctgacagtgtaaagaaggagctcctacaaagaataagaacat

SEQ ID NO: 144195 - DNA, 96 bp, Homo sapiens
atcgctgcccgccgccagcatgttgggcgccccggacgagagctccgtgcgggtggctgtcagccttcgcagccgaggcccagaagctgcctgggg

SEQ ID NO: 144196 - DNA, 75 bp, Homo sapiens
ccagttctaccacagccctgcggacaacaagcgggagttattcctgatgaagctaaagctttgtctctgttggca

SEQ ID NO: 144197 - DNA, 82 bp, Homo sapiens
agcctcctgagtagctaggattacagtatttagcatttacgtgtggcttaatcagaggtggcttatcaaacttgggaataaa

SEQ ID NO: 144198 - DNA, 75 bp, Homo sapiens
ctggaattttgccgatttcatgactaaccagtaaatggaatctagttcatcagactactataataaagacaatga

SEQ ID NO: 144199 - DNA, 75 bp, Homo sapiens
ctctgatgtcaatcttgagggctaggctgaccggttccctgatgtgttacctgcttctgctactgatccaaactg

SEQ ID NO: 144200 - DNA, 75 bp, Homo sapiens
agatggacttgaaaaaaactttgctgccaatactctggctgatgaccaaacacccagccaagcggctgggctgtg

SEQ ID NO: 144201 - DNA, 74 bp, Homo sapiens
cttaaggaaggatggggaaaatgtgggttgtgctgtgttacaggtcagcccagtgactgaaacacgtacttacc

SEQ ID NO: 144202 - DNA, 100 bp, Homo sapiens
cttgaaaagcccatggccccccagaacgacaagaatgaggtgctgggtaggccaggtttcagcatcgcagacaagaagcgcaggacaggctgcattgggg

SEQ ID NO: 144203 - DNA, 74 bp, Homo sapiens
tcagcgaccgggagaacatagacggcatgttatgttacccagagaactttccaaacaagtacctaaaactcatc

SEQ ID NO: 144204 - DNA, 115 bp, Homo sapiens
cactgaagtaacagcagcaatgaccttccctcgggaattccacctctgcgtttttccctccaggtgtcatggagaaactccagctgggcccagagattctgcagcgggaaaatcc

SEQ ID NO: 144205 - DNA, 96 bp, Homo sapiens
cagcaacaggaggagcaggaggagcgacctgatgacatttgaagatgtggctgtggaattcagccagtgggagtgggggcagctgaaccctgctca

SEQ ID NO: 144206 - DNA, 82 bp, Homo sapiens
gaactctggtgactcattcaaatcatctggaggtggtgaagctaatcaaatgtgactctcctattccatctgtttcttcggg

SEQ ID NO: 144207 - DNA, 86 bp, Homo sapiens
ttacctgtgagatgtttcatcccaacattggattggatgctgctggcaagacaaccattctgtataaactgaagttaggggagata

SEQ ID NO: 144208 - DNA, 73 bp, Homo sapiens
cgaatcaagcgggagttcaaggaggtgctgaagagcgaggagactggtgtcgttcagtatttctacattgaag

SEQ ID NO: 144209 - DNA, 101 bp, Homo sapiens
cctgggacccgcggaagccggcatgctggagaagctggagttcgaggacgaagggggggccctcagcctcttggccttgaacgggctgttcatcttgattc

SEQ ID NO: 144210 - DNA, 100 bp, Homo sapiens
agaattgttacagtatatcaatgtggattgtgcaaaattaaaacgactcctgaagggatttttacctcctataactccaccagaaaagttttttctttcc

SEQ ID NO: 144211 - DNA, 74 bp, Homo sapiens
agaaggacctgcccgagagggtagagggcatagggtcaagatcaaggtggagctggccctgctacagcgctcct

SEQ ID NO: 144212 - DNA, 100 bp, Homo sapiens
attacaatagcaacttctgttgataagttggccatgtttgaccgtgagaacaaggccggcgtgaacttcagcgagttcacgggtgtgtggaagtacatca

SEQ ID NO: 144213 - DNA, 75 bp, Homo sapiens
cgcgtccgccgattcctcctccttggtcgccgcgtccttggctggcgtggtttcatcaccttaaatggttttgaa

SEQ ID NO: 144214 - DNA, 100 bp, Homo sapiens
ccaagcagccttagccctagtgtagaggtcatcttccacgatgttgctgtgctgacggataagctcttccccatcgtggaggccatgcagaagcacttca

SEQ ID NO: 144215 - DNA, 100 bp, Homo sapiens
atgaatgacaggcttactgaatatcctcttataattaatgcaataaaacgcttccatctttatccagaggaattacatgaacgacagccttcgcaccgac

SEQ ID NO: 144216 - DNA, 125 bp, Homo sapiens
gaaggtaaccgggtccagacccacgcggcgccagttctccggcgggaaggaaaaccgcgcagagaggatggatggtcacaataccactttgtagcctcgtcttcaaccatcgagagggaccggca

SEQ ID NO: 144217 - DNA, 100 bp, Homo sapiens
cacgagcattgggtgtactggcacagctcatctggagccgagccttaggcttccctctagaaaggcaccaagatgataccctgtgacttcctcatcccgg

SEQ ID NO: 144218 - DNA, 97 bp, Homo sapiens
ctccttttccctctccctttccctaaggctaaaataaatgaagctgtagaatgcttactgtccctgaaggctcagtataaagaaaaaactgggaagg

SEQ ID NO: 144219 - DNA, 100 bp, Homo sapiens
gccgcgggcaggacgcgcgctgcagaggtggcgagaggcgtgctgaccagtctgccaggagacagcgtgactctgacctgcccgggggtagagccggaag

SEQ ID NO: 144220 - DNA, 111 bp, Homo sapiens
gcgggccctggctcaggaacagggacagcacctcatcccctggatgggggaccacaagatcctcatcgacaggtacatgtcccagagcaagcacacggaggcccgggagct

SEQ ID NO: 144221 - DNA, 100 bp, Homo sapiens
cagcgatcccacattttatatgaccgggcagcggttgtggaacaggaaatgaaaaaggactggctttttgcccctcattatcgatactatgtaagagaaa

SEQ ID NO: 144222 - DNA, 74 bp, Homo sapiens
tcgattgggctgctttaacctcagcatccgagggcatggtctctcagcaaacctgctgggcgacagcggactca

SEQ ID NO: 144223 - DNA, 98 bp, Homo sapiens
tttttgcggaacctgaaaaattcaagaagttgaaaaacgcttttcacgtcacctggagagatgcacagaatgctgtccgtgtcccacgagactttgag

SEQ ID NO: 144224 - DNA, 133 bp, Homo sapiens
cgagctccaaagaagatgactatgaaagtgacgcagctacaattgtccagaaatgtggcttccgagtggacctgccaatcaagtcggcccgctaccgtggccagtacaacacctatcccatcaagctcttcta

SEQ ID NO: 144225 - DNA, 83 bp, Homo sapiens
taaagatgatgatatccttctcaaccttgtgggatgtgaaaactctgttactgaagcattttgaaagcgaagcagaagccgta

SEQ ID NO: 144226 - DNA, 90 bp, Homo sapiens
ggtagatggaaccctccttttactcctctcggaggccctggcccttacccagacctgggcggggcatttgcacgccaaaggcaaagaaga

SEQ ID NO: 144227 - DNA, 74 bp, Homo sapiens
agccttcagcttttggcagcatgaaagttagcagtgatgaaggtggagaatcagaacttcttggagaggatctt

SEQ ID NO: 144228 - DNA, 82 bp, Homo sapiens
gccaatttatcgtagaccatatgaaaagggtcgcctaatcatcgaatttaagggccccgtgaagcacgtgtacagagtcctg

SEQ ID NO: 144229 - DNA, 58 bp, Homo sapiens
aagacctccaggtgattataatgcaaggttttgcgtgtgaagctgtgtggaaatgtga

SEQ ID NO: 144230 - DNA, 98 bp, Homo sapiens
tttcgggctgccgagggtgttcttgacgattaatcaacaggtgatctgcaactctttcaccatctgtaatgcggagatgcaggaagttggtgttggcc

SEQ ID NO: 144231 - DNA, 101 bp, Homo sapiens
gtcggacccgcaccggcccgcccgcccgcccgcaccgcgtcggggcgccctctccactgcgcgcggttctgcttccttcggtgctgcggctgtgtgttttc

SEQ ID NO: 144232 - DNA, 97 bp, Homo sapiens
aaaaattctttacacaggatatgaataatattcttctggagttgcccccaagtttcctggcagtgtgtgatactgaggaggtgagcttgtttctgga

SEQ ID NO: 144233 - DNA, 82 bp, Homo sapiens
ggccgccctgggccgggccccaccggacggccctgggaggagcggggacactgaggacctctctccaaattggcctctcaac

SEQ ID NO: 144234 - DNA, 82 bp, Homo sapiens
aggggaagaggcccaccctggagtaaccctcactggagaatccagaggaagaaatgttggctatttggcgatgagaggtggt

SEQ ID NO: 144235 - DNA, 98 bp, Homo sapiens
caaataagcggcataaagcaattgagaattcaggtgttacagggtcttgattatttacataccaagtgccgtatcatccacactgacattaaaccaga

SEQ ID NO: 144236 - DNA, 98 bp, Homo sapiens
tgaatctggctgacccttgtttctcggagaaggaactggaccagccagcagcctctaagagctcctagacgcttccttcaaaatgtctactgttcacg

SEQ ID NO: 144237 - DNA, 90 bp, Homo sapiens
gcggaagtgcagctgcctcagttcttagcgcagcggcgtcttcgacatcttcggaacattgctgcccggaacattgttaatagaaatggc

SEQ ID NO: 144238 - DNA, 75 bp, Homo sapiens
agccatttgaactgcctatgaattttccagctcaaatctaatccaagtgaaaatgaagaaaaggaagcacagtct

SEQ ID NO: 144239 - DNA, 83 bp, Homo sapiens
ctctgctcttcctcccttcgctcgcaccatgcaaccatgtccaagggacctgcagttggtattgatcttggcaccacctactc

SEQ ID NO: 144240 - DNA, 100 bp, Homo sapiens
caacaaccttctgtgagcctagggacccatttctcctcctttgacagggacatcagtggagccttctcagacccacaggccatcagcatcagcaaagcca

SEQ ID NO: 144241 - DNA, 98 bp, Homo sapiens
gaaaaggaagtgaaaggggccgtgtactctatggtggaatttaacgggaagctgttagccagcatcaatagcacgcttaaagatggagcctaagaaca

SEQ ID NO: 144242 - DNA, 98 bp, Homo sapiens
cttaccccattaaagcagtcaaatcagctgatgaccaaacacccaggcaaacgtctgggttgtggacctgaaggcgaacgtgatatcaaagagcatgc

SEQ ID NO: 144243 - DNA, 90 bp, Homo sapiens
ctcgtagtcctgggagcacagcagaagtatcctggtgtatagcctggaagcaggacgccgcctcttgaagctgggtaacgttctccgtga

SEQ ID NO: 144244 - DNA, 50 bp, Homo sapiens
ggagaagtgctggaagctcatggacaaggctcttgcagccaatgccggaa

SEQ ID NO: 144245 - DNA, 90 bp, Homo sapiens
ggccgagcaggaggcgccatcatggcgtggtgaccaagatgaagatgcagaggaccattgtcatccgccgagactatctgcactacatcc

SEQ ID NO: 144246 - DNA, 73 bp, Homo sapiens
ggaagctgctgatgtccagcaccaaggggctctactcagacactgagaggtcctgtaataaagagggatccga

SEQ ID NO: 144247 - DNA, 101 bp, Homo sapiens
ttaccattgaagcccaggaactgtctttatctgctgtcaaggatcttgtgtgctccatagtttatcaaaaggatttctggtaggtcctactttaggacaag

SEQ ID NO: 144248 - DNA, 75 bp, Homo sapiens
ttacctcacctctgcgccaggctgcggatgaggatgacaaggggatgagatctggagaagggactcctgaaagcc

SEQ ID NO: 144249 - DNA, 100 bp, Homo sapiens
gccccgaaggctctccatcgaaggcaacattgcagcagccgctcttctaaaacattcaaaccaaagaagaatatccctgaaggatctcatcagtatgaac

SEQ ID NO: 144250 - DNA, 117 bp, Homo sapiens
atactctagaatatacaaagacaaaaggagattctgatgaagaagttattcaagatgattcagaatggacagtttagaagaacctcagaaaaaagtctttaaggctcgaaaaacgat

SEQ ID NO: 144251 - DNA, 75 bp, Homo sapiens
tccagtagtgattcctgctcagttcctggaggttgttaccccttctacaaaactgacccgttcatcttcccagag

SEQ ID NO: 144252 - DNA, 75 bp, Homo sapiens
tcggtgtcaaagccaagacataaactcaaccccttctcttccaaaaggaatttatcatggcatccagcattgacc

SEQ ID NO: 144253 - DNA, 75 bp, Homo sapiens
gttccatcatggcgtcaatgcaggtgttggtaaatcatgcttattgctacagtttacagacaagaggtttcagcc

SEQ ID NO: 144254 - DNA, 100 bp, Homo sapiens
ctgccggcagccctgcggctacggagacagaaacagcgggagccacggaagggccgcctcatcgtgtgtggccatgggacgctggagcgggacggagtct

SEQ ID NO: 144255 - DNA, 98 bp, Homo sapiens
tgggagcggctggcgcggcggaatccagggccgacccgggccggaccgaccccaggcggcggcacattcaggaccccgcgagccagcggctgacgtgg

SEQ ID NO: 144256 - DNA, 100 bp, Homo sapiens
tcttacgtctgcggaagtgcagctgcctcagttcttagcgcagtggtcagtatatatccgagccgctgtccgaaaagagaaaggcctgcccatcctcgtg

SEQ ID NO: 144257 - DNA, 101 bp, Homo sapiens
cgggcggccgcggcgcggcgggaccatggagctcagagcgcagccccggcgccggcggcgggaccgcggaccgataacggcaaaagcttctatcatttttg

SEQ ID NO: 144258 - DNA, 98 bp, Homo sapiens
ttcaacgggactattatgatagatgggacgcctatgcctgacagctacccaacaaccccatcttcaactgatgcagctacatctgagtccaaggagac

SEQ ID NO: 144259 - DNA, 100 bp, Homo sapiens
ctattcgtaagcaacagacaaataatcaaacagaagtagttaaaataattgaaaaagatgttatggaaggtgttcttcagatgatgcagacgagaattgg

SEQ ID NO: 144260 - DNA, 90 bp, Homo sapiens
cttgcatgttggctagactagaaatcaaacaacttggaaatcgatcacaaccaggcattaagttcacattggtgtggatgactacagctc

SEQ ID NO: 144261 - DNA, 101 bp, Homo sapiens
caggaagctggtgatcctggaaggagagctggagcgctcggaggagagggctgaggtggccgagaggtgggctacgaactgaaggatgagatcgagcgcaa

SEQ ID NO: 144262 - DNA, 49 bp, Homo sapiens
cttaatccacagcaagctcccttatatgacaacaccatcgacttcctgg

SEQ ID NO: 144263 - DNA, 100 bp, Homo sapiens
ctgcttcgtcctctgctggctgccttttttcttagtcatgcccattggtcctaaaggggatccaggtcagactataacccagccggggaagcctggcttg

SEQ ID NO: 144264 - DNA, 95 bp, Homo sapiens
ggacgataattcaaaaacactatcccagggagtgcaagcttagagcgtctggccaagaatcagaggaagtgggaacatgtttgacaagctgaacc

SEQ ID NO: 144265 - DNA, 74 bp, Homo sapiens
ggaggggctggaggccaatgagggcagttgtcacaggtagtactgatggaattggaaaatcatatgcagaagag

SEQ ID NO: 144266 - DNA, 97 bp, Homo sapiens
ttccggcctgacaacttcatctttgatagtagttcctcagggaagaacagaaaagaggaaagttatatatttgagtcaaagggtgatggaggaggag

SEQ ID NO: 144267 - DNA, 75 bp, Homo sapiens
aggattttgaggcctctcttcagtttatgcaggttatcaatactctggctgaccatcatcatcgtgggactgact

SEQ ID NO: 144268 - DNA, 75 bp, Homo sapiens
tctcccatcgaaccttctagttgcttattgcagcctcttccttggttgtgccactactgagttctccagttctct

SEQ ID NO: 144269 - DNA, 98 bp, Homo sapiens
aaccaggcattaagttcacagtacaagaaaattccccaggacacagagctggtttggagcctttctttgattttattgtttctattaatggttcaaga

SEQ ID NO: 144270 - DNA, 75 bp, Homo sapiens
aggtctgagctagaggctgcacaccatgccagtgcagtcagattctccaagattcgccatgaagtcagcgtaaat

SEQ ID NO: 144271 - DNA, 100 bp, Homo sapiens
tggtggacgtgcacccagaggaccaggcggcggaacctagaaagattgtacaatgaatggtgattctcgtgctgcggtggtgacctcaccacccccgacc

SEQ ID NO: 144272 - DNA, 145 bp, Homo sapiens
tggacttcagaaatatgaatatgttttacatccaagaactacaggctttacttttgtggtagaccgtctaagagaagacatcgctattgcggttccgaggcagtgggaagagatgcggcccctggacatcgtcgagctggcggaa

SEQ ID NO: 144273 - DNA, 82 bp, Homo sapiens
gttggctcctgacaacgtgcacggagtccaaaactacttacctggaagaccttccaccaccccctgagtatgaattggcccc

SEQ ID NO: 144274 - DNA, 75 bp, Homo sapiens
caaactttccgagaatatggagatacaggtgaaatctgacgcaaacatgcagatctttgtgaagaccctcactgg

SEQ ID NO: 144275 - DNA, 97 bp, Homo sapiens
aacatggactcatcttcatggaaacgtctgctaagactgcttccaatgtagaagagaatttcgctaaggagtttgtgatcagtgatcggaaggagct

SEQ ID NO: 144276 - DNA, 100 bp, Homo sapiens
ttcttaggaggaggaggaagaggaggaaggagggcgagcgaggaggatggcggagtcggggctcctgacggttgccaagctgttctgcctttctggaatg

SEQ ID NO: 144277 - DNA, 124 bp, Homo sapiens
cgccatcttgtgggagcaaaaccaacgcctggctcggagcagcagcctctgagagcaaggctgaagaggacgtggagtctggggaggatgccggggccagcagacgcaatggccgcctcgtcgt

SEQ ID NO: 144278 - DNA, 90 bp, Homo sapiens
gcgcagaaagcaggcgaacccgcggcgcaataacggatcccctgtggccttctatgccagcttttcagaagggacggctgccctgcagac

SEQ ID NO: 144279 - DNA, 87 bp, Homo sapiens
cctgcggcggagggaaaaaggaagaggagaaggaaattgtcccgaatccctgcaggccaggtcagagcagcccaccatgggatgggg

SEQ ID NO: 144280 - DNA, 74 bp, Homo sapiens
ccggcctcgcctcctcgcagcagcgccatggtgtcgtgaaaactacccctaaaagccaaaatgggaaaggaaaa

SEQ ID NO: 144281 - DNA, 75 bp, Homo sapiens
gtggaaggttgcagttacaggtaactggtgtctttcaggttgcagaaaagatggaaaaaaggacatgtgcactct

SEQ ID NO: 144282 - DNA, 100 bp, Homo sapiens
gctggctgggcctccacaccttcatccggcacaagcggaccatggtcaaggtcgacaaagatgctgaattagtggcccaatggaactattgtactctaag

SEQ ID NO: 144283 - DNA, 100 bp, Homo sapiens
gcaaactggaccgggaggaaatcaaaccaactcccgaggcttgccgacaggcccgaagctaccttgagttttctgaggactcagtgcaagtgcccaggaa

SEQ ID NO: 144284 - DNA, 86 bp, Homo sapiens
tcgagtagagagacgattccacttttcacagtctctaacaccgattccacgactcttctttgcgggagaacatacgatccgtaact

SEQ ID NO: 144285 - DNA, 97 bp, Homo sapiens
ttgaagattgtgaagcaatagcctaagggccatgaagcccccaggaggagaatcgagcaatctttttggaagtccagaagaagctactccttccagc

SEQ ID NO: 144286 - DNA, 97 bp, Homo sapiens
atgacttggagatggctgctcaggacttagcatccaagaagcagcagtgtgaggaactggtaactgggatagtagttcctcagggaagaacagaaaa

SEQ ID NO: 144287 - DNA, 74 bp, Homo sapiens
gacggtcaagctggatttcgaggagtgtctcaaggactcaccccgtttccgatgttgatgcctaagaagaaccg

SEQ ID NO: 144288 - DNA, 82 bp, Homo sapiens
acctgcactttggggagcctaagtcctgtacctggagtagaacagaaaaattattatgtctgtgttcccttgggactcattg

SEQ ID NO: 144289 - DNA, 82 bp, Homo sapiens
ggcagcgccatggcggagcagacctactcgtggtgaaatgacaatggatgctctgttggctcgattgaaacttctgaatcca

SEQ ID NO: 144290 - DNA, 95 bp, Homo sapiens
cagttcgctacacagcaatgcatcgagattgtggatttcttaaagaagaagcatgattttgtagaccttattataaagcacataggaacttctgc

SEQ ID NO: 144291 - DNA, 100 bp, Homo sapiens
ccaaccagagattcatctttcatgcagtgacatgttgataaaaaatgatgaaactggcgatggaatatgagaggagccctctggaaagaaaaggacagac

SEQ ID NO: 144292 - DNA, 82 bp, Homo sapiens
aacatcttcgagcatcggcagctccggaggccggggtaactggcaggcaatgtgaagtattcatccggccaaccaatgtttc

SEQ ID NO: 144293 - DNA, 83 bp, Homo sapiens
cgccggcgaaggaggaggcgttgccggaacatccagtcatggataaaaatgagctggttcagaaggccaaactggccgagcag

SEQ ID NO: 144294 - DNA, 50 bp, Homo sapiens
gtggaggcagaggtggcatgggttttaagaagaggagaggtcactcaatt

SEQ ID NO: 144295 - DNA, 87 bp, Homo sapiens
caaagaagatgcctcgaactaaacaaattcatcccagaaatctaagagtactatactggcaattgctggagaagattttgcaattgt

SEQ ID NO: 144296 - DNA, 75 bp, Homo sapiens
ggagcaagatgagttgcagcaagtcatacgggaggggccacctacagatgctcctgcagtggacacagcagaaca

SEQ ID NO: 144297 - DNA, 82 bp, Homo sapiens
gaaaactgccctcctggcgtggaatttgaatacatctggcaagacaacttcaagtacagatggacccaaattccctggagat

SEQ ID NO: 144298 - DNA, 100 bp, Homo sapiens
acactttgtttcccccatggctcactatgtgcctgatatcatgccaattgaatctgttattgcaaggccagtgacatatcaggcatttcgggaatgtaca

SEQ ID NO: 144299 - DNA, 101 bp, Homo sapiens
ctgttacgcatatatgacttgaacaaacctgaagcagatttccacaagacggcaccctatgtcgtcactggcagcgtagatcaaacagtaaaagtgtggga

SEQ ID NO: 144300 - DNA, 90 bp, Homo sapiens
tcgctgaggaacgacgccgaggaaggaaacaatgtgatgagaaccattcatggggtgggagagatgatgacccagatggtactcagtaga

SEQ ID NO: 144301 - DNA, 98 bp, Homo sapiens
gcatgagttagtcgcagacatggacaccaaacatttcctgccgctcgtttctgcaggactgtaaactggattcctggaacctttgatattcctggctg

SEQ ID NO: 144302 - DNA, 101 bp, Homo sapiens
aggttttgcatcttgaatttctctataaggagaacaaggaaggaatgcagctcatttcagaaaagcctgagacggaagctgtggtgaaggagaaactcact

SEQ ID NO: 144303 - DNA, 100 bp, Homo sapiens
ctttcttccagcttctgctgtccttctttgtggagagcaagccagctgttgcactgcctacaagccttagcctgtctactcctcagccaacagcacaaat

SEQ ID NO: 144304 - DNA, 82 bp, Homo sapiens
ggggattcgcagggaggatgtcgggacaccccggaagctgggaaatgacctgcctagagctggaacgttacctccagagcga

SEQ ID NO: 144305 - DNA, 99 bp, Homo sapiens
gggaggaccagtccattctatgcacatacttggcatatcgaaattttatgattgacacgtatcgtctaaacccccaagagtatttaactagcactgctt

SEQ ID NO: 144306 - DNA, 100 bp, Homo sapiens
ccgaatatctttgcctatgcctgtgatttttctccaagagccattgaatatgttaaggacttacttctctggatccagaaacacacagaagtagaaacag

SEQ ID NO: 144307 - DNA, 74 bp, Homo sapiens
gacagacttggacaacatgtcccaacattacatcccagatgaaacaggcgcctatttaatcgacagagacccca

SEQ ID NO: 144308 - DNA, 82 bp, Homo sapiens
tctccctgtacgccgagggctccgtcaatggcttcatcagcactttgggggcgaactttctgaccaagtatacaactaccca

SEQ ID NO: 144309 - DNA, 90 bp, Homo sapiens
acaacattcagacccatttccagtcatgaagtctccgggaccattatggcagtcaagtggacgggtgggcattcttctcctgtcctctgc

SEQ ID NO: 144310 - DNA, 82 bp, Homo sapiens
tccccacctgcccggtgcccgaggaggcagccaagctcgtggcctgcctctgcgtgccccgtgcagcctgccaggactcttc

SEQ ID NO: 144311 - DNA, 82 bp, Homo sapiens
aagctctcctagaaatgttgaagaagctgcacagggtatgaaataatgtactcttgctggagaaccgatcccttagaccgcc

SEQ ID NO: 144312 - DNA, 49 bp, Homo sapiens
tggcaagtctcaaagtcgccacagttggaggacaacagcacacctgaac

SEQ ID NO: 144313 - DNA, 50 bp, Homo sapiens
ctttctgctgccgcccgcaagcagagtttgcagagcagtctctgatgaag

SEQ ID NO: 144314 - DNA, 100 bp, Homo sapiens
cctactctgactccactgcaaagctgaagcggaccctgccctgccaagcctacgtgaaccaaggcgagaacctggaagaagaggaccgagaagtagcagc

SEQ ID NO: 144315 - DNA, 100 bp, Homo sapiens
ctttgggaaagccactcgaaaaggatcatcatgcctagggttcataacataaaaaagtctcttacacctcacatttcttgtgtgacaaatgaatctgata

SEQ ID NO: 144316 - DNA, 89 bp, Homo sapiens
gtgagctgagccggtgggtgagcggcggccacggcatcctgtgctgtgggggctacgaggaaagaccctttgcagaaatctgcaatgat

SEQ ID NO: 144317 - DNA, 100 bp, Homo sapiens
atgggccatacgctggagtcatgacagcttatgggcacattcgcctcccaggtgacgctggagggggacaagttgaaagtggagcgggagatcgatgggg

SEQ ID NO: 144318 - DNA, 100 bp, Homo sapiens
gcggaccacggcctgtcagcacgtcttgctgcccttgaatttcctccaaagaaactatttggaaataaggatgaacgtgtgattgctgagagacgaagtc

SEQ ID NO: 144319 - DNA, 82 bp, Homo sapiens
ctaaagttgagaaggtgttttttaccactgcagtaccagtagccagtagcccaggtcgtagatttaaaggaaaaggaaaggg

SEQ ID NO: 144320 - DNA, 100 bp, Homo sapiens
aaacaccttagtttgcaccgagagaccatttgcagcgggtggtgatgatgtccagcaactctgtgaagcaggagaagaggagtttttggaaatcatggca

SEQ ID NO: 144321 - DNA, 90 bp, Homo sapiens
cgctgcctcggcccggacgcgcccgcgcccccgcggctggagggtggtgggagcacagcatggccgtgggaacgagtgctctcagcaagg

SEQ ID NO: 144322 - DNA, 100 bp, Homo sapiens
tgaaaacatcatcgttttgaagagttctgcgttttgccagtcacctctcaactgtgtgccaaagatattaaggctaagacatactgcatttgtaatacca

SEQ ID NO: 144323 - DNA, 100 bp, Homo sapiens
gtatgtaggagtgaatataaaaggacttcatctcctcaacatggaaactaaggtggagcagttctggaggttttatagccacatggtacgtcctggggac

SEQ ID NO: 144324 - DNA, 90 bp, Homo sapiens
ctgtagggaccactttggatggagagagtatcccgagggctggagaaaattgaacaacttcaaaatcatgaaaatgaagacatctacaaa

SEQ ID NO: 144325 - DNA, 83 bp, Homo sapiens
gcgaggcgctcaacggcgagccagagctggacctcaccagcaagagcccgcggagctgagcagcggggagacggaagagttac

SEQ ID NO: 144326 - DNA, 88 bp, Homo sapiens
gggataagtagctttagcgatcgggagacagccgggcgctgcaaggttgggggccgtcccgctcctaaggcaggaagatggtggccgc

SEQ ID NO: 144327 - DNA, 75 bp, Homo sapiens
cacaagtggtcagtttggttgtggaaagagggtgtaaatccatctgttggaagatcaacaattggaacgagtttt

SEQ ID NO: 144328 - DNA, 75 bp, Homo sapiens
cagagcgagtctggaaacctcccactgtggctgcataagtgcttagatgagtacgaagatgatgaagcagggcag

SEQ ID NO: 144329 - DNA, 78 bp, Homo sapiens
agaaagtgagcgaggagtcagaaactcagccactggttgccttggtaggcaataaaaaaccctcggcctcaggaaagt

SEQ ID NO: 144330 - DNA, 83 bp, Homo sapiens
cgggggtggaggacatcgacatccaggcgaactcggcctatcgctaccctccgaagtccggaagctcttcgtgggcggtcttg

SEQ ID NO: 144331 - DNA, 100 bp, Homo sapiens
taacctatgcacttgtggaatgagagaaccgaggaacgaagaaacagacattcaacatgattgcatttgaagagtcagtggatcggtggggaaaatgctg

SEQ ID NO: 144332 - DNA, 100 bp, Homo sapiens
gaagacaggcagagtggaaaaaagagaggatttgcttttgtaacttttgatgatcatgatacagttgataaaattgttgtactgccaaatctgtcgaaag

SEQ ID NO: 144333 - DNA, 100 bp, Homo sapiens
gctccggctccggtgtcctccttctctcgcacttctatcacgccatccagccaggacatctgcagggatagctgggagtatggccaccctgctccacgat

SEQ ID NO: 144334 - DNA, 100 bp, Homo sapiens
gttaggaaaatgtgatgcatgtctcagtggttctacacatgttttaacacccaaaaagctgttggatgatataaagatgctgaataaacccaaggataaa

SEQ ID NO: 144335 - DNA, 98 bp, Homo sapiens
ccgagcccggcgggaccatgttcaccagcaccggctccagtgggctctcctacaacacagcagtcccctcaggatgagcaggaaaagctcttggatga

SEQ ID NO: 144336 - DNA, 75 bp, Homo sapiens
ggaaggccgtgttgtttgtctacctgggactaggagcagattaagcgagtaaaagactcggatgatgtacctatg

SEQ ID NO: 144337 - DNA, 75 bp, Homo sapiens
gacccctgccctcgtgtgcctcagtcagctgctcaccaaggtggacccaagtggagagattgtggaactggcgaa

SEQ ID NO: 144338 - DNA, 80 bp, Homo sapiens
gcccgcttccccatcatcgccagctgcacactcttggggctctacctctttttcaaagtctcttttattcaaaaccttgt

SEQ ID NO: 144339 - DNA, 100 bp, Homo sapiens
aagcaagcagttcagaagagccaaggaataaacatgcaatgaacccaaaaggaagatgcttataagatcaggatccgtattgatgatgagcctgccaatc

SEQ ID NO: 144340 - DNA, 50 bp, Homo sapiens
gctcatcgggcagggctagccaaggaaatcatcgagttccccatcctaaa

SEQ ID NO: 144341 - DNA, 75 bp, Homo sapiens
aggcagaggtggaggcgctttgaaaggagctctacggtgactttgaagacttggaaacaggggacgtgcacaagg

SEQ ID NO: 144342 - DNA, 97 bp, Homo sapiens
ggagtgttccttccgctagtgatcctttgcaccctgcttggagacggacttgcttccgatgtcatctgggtgattctcagtgtggaggtgggtggac

SEQ ID NO: 144343 - DNA, 75 bp, Homo sapiens
ccaaccagcagcccgaggtcttctgcaaccaggtcttgccccagaagctgcgggcacatccacgcctgaaatgcg

SEQ ID NO: 144344 - DNA, 100 bp, Homo sapiens
tagcagggaataatttcaatttgaaaacaagtggaatagtgctgtcttccttgggccatgtgaaactttctgactttggtctttgcacaggactgaaaaa

SEQ ID NO: 144345 - DNA, 100 bp, Homo sapiens
caccttggaagttgttttcaaccatatccagcctttgccgaatacatcctatctgccacacatccagcgtgaggattgaaccagctgccctttgaccctg

SEQ ID NO: 144346 - DNA, 98 bp, Homo sapiens
tcaaaatgaagatggcacatggcccaggcagaccttgcagtcaaattaatcagctgtgttcagcgaatacttatgaacagaaggctccagcagcagta

SEQ ID NO: 144347 - DNA, 75 bp, Homo sapiens
gcgccgccgggacccccaggacgacgtgtacctggacatcaccgaaaactgtggatttagttactccactctgcc

SEQ ID NO: 144348 - DNA, 75 bp, Homo sapiens
taacatcagcagatatcctgtctcagatgaagagcacttttcaggattagaagaggctgtgtatagaaacataca

SEQ ID NO: 144349 - DNA, 50 bp, Homo sapiens
gacctgcacatccactcccggcaggagatactaatggaccatactaccaa

SEQ ID NO: 144350 - DNA, 100 bp, Homo sapiens
agcagtgaagctttggccactgtcacaggaattgtggatggttcggggagcattggagctgcagtgggccaggtccaagacaagctgctgctatctgcgt

SEQ ID NO: 144351 - DNA, 51 bp, Homo sapiens
gtggagtgttctgcacttacacaggcatgggtagcaagaaactaaaacgag

SEQ ID NO: 144352 - DNA, 100 bp, Homo sapiens
aggccgcgagcgactgcggcgccgagccggtactccaaagattcaggtttactcacgtcatccagcagagaatggaaagtcaaatttcctgaattgctat

SEQ ID NO: 144353 - DNA, 83 bp, Homo sapiens
cctggagcggcgcagccggagtggggccgtgagacaatgcagatcttcgtgaagactctgactggtaagaccatcaccctcga

SEQ ID NO: 144354 - DNA, 51 bp, Homo sapiens
gactggggtagctgaagctgttgtagctgttaatcatgttatcagccctct

SEQ ID NO: 144355 - DNA, 83 bp, Homo sapiens
gcacgcgactccccccgggcccaaagcttgcagatgggtcaagggttgtggagagtggtcagaaaccagcagctgcaacaaga

SEQ ID NO: 144356 - DNA, 51 bp, Homo sapiens
ggcatagtggctgccctgctgggacaaaactttcggtttgaagaataagaa

SEQ ID NO: 144357 - DNA, 82 bp, Homo sapiens
gccacagaacttacctgcctcttcatgcagttctccatcgtgccaacaatgcagatcttcgtgaagactctgactggtaaga

SEQ ID NO: 144358 - DNA, 51 bp, Homo sapiens
gcaagatttaccagagcaaccagggaaggtgtggctcattgactttaatcc

SEQ ID NO: 144359 - DNA, 82 bp, Homo sapiens
ttgaagaaagacagatcctgtgtcacccggcaactcagaaacatcaggtccaagatctgagtgggacatacttttgaaggat

SEQ ID NO: 144360 - DNA, 100 bp, Homo sapiens
aagagtgtgttgtgaacgaagtcagaatttcctgtgttccctttgccgctcctggagttcactgtaatagctcttcaagtctgcaataaaaaatggcctc

SEQ ID NO: 144361 - DNA, 100 bp, Homo sapiens
ggacagatctgagagatactgagaagagtcaagtaccattggccaggatcaaacgcttatggaacgtgatacagagggtggtgcagcagaaattaattgc

SEQ ID NO: 144362 - DNA, 94 bp, Homo sapiens
attgatacccttggaagaattatgaatttaacagtaatgctgattgatatcagtaaatgccattatttagtggatttggacaccatgagagaaa

SEQ ID NO: 144363 - DNA, 90 bp, Homo sapiens
acagcccgcagagagttaacttctgtttacatggaactcagacatctgcaaatcatggaagccattaatttgctagaaccaatgacaaac

SEQ ID NO: 144364 - DNA, 82 bp, Homo sapiens
gctaagaaagaatcttgtcactttagccactgctactacagaatctccctggaaaaggagacatgaatgtctgcaatgatac

SEQ ID NO: 144365 - DNA, 100 bp, Homo sapiens
tactatccgtttgttcaggaaccaccagtgacagagtttttcttcccccagtccctcagctgctgctgctgctcaggaggtcagatctgccactgatggt

SEQ ID NO: 144366 - DNA, 90 bp, Homo sapiens
tttagtgggggtagccccttccaggctagagtaccgtggcacaatctcagctcattgcaacctctgcttcctgggctcaagcactctgcc

SEQ ID NO: 144367 - DNA, 97 bp, Homo sapiens
gtttctgcagcatggctgggcctaacctgatcgcaattgggtctagtgaatctgcacagaaggcccttaagggggagctgatcaccttctattacta

SEQ ID NO: 144368 - DNA, 80 bp, Homo sapiens
cactcttactggaggactgtcaagagtgggaaactgtgaaaagctcagaacctgttaaagagacggtccagacaactcag

SEQ ID NO: 144369 - DNA, 82 bp, Homo sapiens
caaaggtctgggaccattgtacaggatcattaatatacagttcatctgtgttatcagtaatagctcttcaagtctgcaataa

SEQ ID NO: 144370 - DNA, 79 bp, Homo sapiens
ctgcagtacctgcagaaggtctctggagacatcttcagcagggccaattcctgtccccccagcagcatggcatcgtgtg

SEQ ID NO: 144371 - DNA, 83 bp, Homo sapiens
cttggcccttgttcccccaaatgtctgactctgactctcggactgagaaacgcaagaaaaccgtgaggacatactgaatgccg

SEQ ID NO: 144372 - DNA, 100 bp, Homo sapiens
acaggcttctgtgctttatgattgtaaaagagttacagaatgagtccctggaacgccagatgcgtgaaatggaagagaactttgccgttgaagctgctaa

SEQ ID NO: 144373 - DNA, 100 bp, Homo sapiens
aggccgtgagggccccactggactgggcgctgccgctttctgaggaaggggccctggaccttctgaagaagctgcacagctgccagatgtccatccagct

SEQ ID NO: 144374 - DNA, 96 bp, Homo sapiens
cgcgaatatcgtcatcgttagaagcaaaagttcaaacagaccctccctcagttccaatatgtgacctgtatcctaatggtgtatttcccaaaggac

SEQ ID NO: 144375 - DNA, 100 bp, Homo sapiens
aacagaacgacctagtatttgaatttgctagtaacgtcatggaggatgaacgacagaattgagcccctgagtcctgagttggtggcagctgcatctgctg

SEQ ID NO: 144376 - DNA, 98 bp, Homo sapiens
ggcgttggaggccaccgtttccagtgaagaaagttacaacgtcaatgattattccttaagagatcagctattggtggaatcttgtgacaatgaagagc

SEQ ID NO: 144377 - DNA, 98 bp, Homo sapiens
gagcagccgccggcgcctaagaggttccagcaacagatagaaatgctttaagttcactctggggaaagctggcctctgaaatcttaatgcagaattgg

SEQ ID NO: 144378 - DNA, 100 bp, Homo sapiens
cgaagccccctgcaggaactctacaacccaatccagttcaaggagcagggacaagttacaggaatgttctccaagcagcaatccaaaagagtctcaagga

SEQ ID NO: 144379 - DNA, 50 bp, Homo sapiens
agatgacctgcctgcagagcctcagtctcactatgtcgcccaggctggag

SEQ ID NO: 144380 - DNA, 90 bp, Homo sapiens
aggatctgcaaattgaagtgcagctagatgctggtgtgccagaaaaaataagcctgatttccagagatgagaagagtgtacttgtggtga

SEQ ID NO: 144381 - DNA, 82 bp, Homo sapiens
gcaaagtggggctcatgaaccgcgccgtgcaactgctcatcctggcctacgtcatcggacggagtctcactctgtcaccagg

SEQ ID NO: 144382 - DNA, 100 bp, Homo sapiens
aggacatggagtatgaaagacggaatggttagactctccgaactcaaatcgacagttcagaattccaggcccatcaaaacggccaccaccttgcccgatg

SEQ ID NO: 144383 - DNA, 90 bp, Homo sapiens
aaactcccgggcctgcggacgctatgcacaggtacgtgccctggaggaggccaatgctgacctggaggtgaagatccatgactggtacca

SEQ ID NO: 144384 - DNA, 96 bp, Homo sapiens
tttggttcttacagtagtcggcgtaggccttaggaactgtggaaggtgcatcagtgaagaaatggaccaatgtgtataatcatggaatctccttgc

SEQ ID NO: 144385 - DNA, 110 bp, Homo sapiens
ccccgcggccgctcaaagccgggagatcgactgtttgagcccggaagcgcagaagctgacctgcctagagctggaacgttacctccagagcgagccctgctatgtttcag

SEQ ID NO: 144386 - DNA, 74 bp, Homo sapiens
gcggcttatcgaacagagccgggagttcaagaagaacactccagagagccctcaggactgcccccggaccctgc

SEQ ID NO: 144387 - DNA, 83 bp, Homo sapiens
gaagagtccggttctgggacagctggagacagtggtggtgactgaatccacattcatctcaatggaaggatcctgccttaagt

SEQ ID NO: 144388 - DNA, 100 bp, Homo sapiens
ctgcaaggaatcaaagacaggaaatctggacccgttatcttgcataaggatttgtcttggctgttactatgacacgggaagcaattgatgaatttcggcg

SEQ ID NO: 144389 - DNA, 82 bp, Homo sapiens
cttggactgagtcctgcaggacacagttggctggggaacagaccagggaattggtggatttggagaagagccgggaattaaa

SEQ ID NO: 144390 - DNA, 76 bp, Homo sapiens
ggcgaggggcgaacgacccgacgcaagatggcgagtaaagagagactgcatcgacgtaggctggtgggaaggagag

SEQ ID NO: 144391 - DNA, 100 bp, Homo sapiens
tcccacgagcaggcagctgctgcactaaagggggctggacagacagtgacgattatagcacaatatcaacctgaagacttaattcagtgcacaaatgaga

SEQ ID NO: 144392 - DNA, 73 bp, Homo sapiens
cctgggccgcgtccatcacctggcactcaaggaccagttacagaagtggatccgcggtaatgtgagtgcatgt

SEQ ID NO: 144393 - DNA, 100 bp, Homo sapiens
gaaaattgctgtcaaagccattgaagactctgatatgttacaggagaatagttctgtcccaagaagaactctgaagatgattcagccttctgcatctgga

SEQ ID NO: 144394 - DNA, 101 bp, Homo sapiens
gctccgtggccttagctgtgctcgcgctactctctctttctggcctggaggctatccagctgagtaaccacactggccgcatcaaggtggtctttactccg

SEQ ID NO: 144395 - DNA, 87 bp, Homo sapiens
gaagctgttttttccttcccagaggagccttcatttataatacgcttacagatttcatacgagtcatactactagatattacactgg

SEQ ID NO: 144396 - DNA, 90 bp, Homo sapiens
aatatgaagagacacagtatggtagccacacccccagcagcctcgtcttacagcgtgactgcaaagaaaaagacttttgttttgcaaaag

SEQ ID NO: 144397 - DNA, 75 bp, Homo sapiens
ctggagtctgagaactggaaaaaattggtttatataggagaacagagtgtgaggtgtgagacaagtacttcagtt

SEQ ID NO: 144398 - DNA, 100 bp, Homo sapiens
aagaactggacatcaagtcagaggttttgtgactcacaagatgctgatcttgctcaggttgaaagcttccaggaactggcaacagcattattgagaaaag

SEQ ID NO: 144399 - DNA, 100 bp, Homo sapiens
aagaaggacttcggaatgcactacaacaggaaaatcatattatagatggagtaaaggttcctgcgtgaagaccagctgggagcccactgcctgctgccac

SEQ ID NO: 144400 - DNA, 100 bp, Homo sapiens
gaacagtaaaatggttcaatgtaaggaacggatatggtttcatcaacaggttgaaggtcgaggagctggaaggcgagcggagtcggctggaggaggaaaa

SEQ ID NO: 144401 - DNA, 75 bp, Homo sapiens
cagacaggctgtgtgcatgcaccaaaggggctatctgatgggttagagtgcctttgagaagaaatcagtggatac

SEQ ID NO: 144402 - DNA, 75 bp, Homo sapiens
cctacagaaacaaaatgtcaacaaattgatggtagtcgtgaaaggtgccaaattggcagaggctcacgtttcttc

SEQ ID NO: 144403 - DNA, 51 bp, Homo sapiens
cgtggatgccctgcaccgggtccggcaggctcttgagatctgtcaacagag

SEQ ID NO: 144404 - DNA, 83 bp, Homo sapiens
ctgggattggagattccacccaaacttgctggtcactgggaggcacgttgcccctggcctcgcaggagtcggccgtggtggag

SEQ ID NO: 144405 - DNA, 100 bp, Homo sapiens
cccactgatgaggatcagcccatggtgcttgtttaaactgccaggaaaatagcaaaggaaatcactgtgaagaatgtaaagaaggattttatcagagtcc

SEQ ID NO: 144406 - DNA, 83 bp, Homo sapiens
ttctggagagacagtggtatttcaagggggagctcttggcaaaacaccagatgggggcagttcattgaactgtgtaagacaat

SEQ ID NO: 144407 - DNA, 80 bp, Homo sapiens
gaaccgcgcgggaagccccagcccgcagccctcggggaccatggtgaatccgggcagcagctcgcagccgcccccggtga

SEQ ID NO: 144408 - DNA, 100 bp, Homo sapiens
tcatcgacgccaccacggtgaccgagtgtctgcacaccttgatagactggagtgatgttagaaaacacaaatatggtcacctatcagagtctgcatccca

SEQ ID NO: 144409 - DNA, 100 bp, Homo sapiens
ctcagatcttgttgtcacccccattattgacaatccaaaggtgcagaaagcactctgacaagcagcacaaggaggtggccacaggaccctgttatacggc

SEQ ID NO: 144410 - DNA, 100 bp, Homo sapiens
attaacaccttgataaatatcatgtcacgccttggccaagatgacccaactccctcgaggactgactgcattgcacagatgatggatatttacgtatgtt

SEQ ID NO: 144411 - DNA, 100 bp, Homo sapiens
gaaaagactcatatcaacattgtcgtcattggacacgtagattcgggcaagtccgccctgcactgggccgccgccgtgaacaatgtggatgccgcagttg

SEQ ID NO: 144412 - DNA, 75 bp, Homo sapiens
ttcgcgcccgccgacccgcgccctgctccctctcagcacctgggcggacggaagcgttgttgacgaccatggaca

SEQ ID NO: 144413 - DNA, 75 bp, Homo sapiens
cacaatattgtgcagcccacagatatcgaggaaaatcgaactatgctcttcacgaattccttaactttggaggca

SEQ ID NO: 144414 - DNA, 100 bp, Homo sapiens
cttggaatcaaagataaatccaaatactgcatatcagaaacaacaggtactgaacgacacctgggtctccttcccttcctggtctgaggactccacgttc

SEQ ID NO: 144415 - DNA, 100 bp, Homo sapiens
ggccgcgggaggacactgagggcatcctgctcatctcacaccctgcatggaatcaggctcctcagccaggacacaggcccagcaaccaccattctttctg

SEQ ID NO: 144416 - DNA, 144 bp, Homo sapiens
gcacggaggacggggccgggcgacctgggcaccagcaggacccgaggccaggagccaggggcccagaagagaaacagcacccaggactatcttccaaagagttctggatatcctaaagaaatcttctcatgctgttgagcttgc

SEQ ID NO: 144417 - DNA, 98 bp, Homo sapiens
ctttggctacacagcactggttgtttctggtgggatcgttggctatgtaaaaacagtgtctgagcagcaggagagagccttcacgctggggctagcag

SEQ ID NO: 144418 - DNA, 100 bp, Homo sapiens
ctcctgtgacctgcatgtactgggggattcgcagggaggatgtcgggacaccccggaagctgggaaatgagagaaaaggaacagttccgtaagctcttta

SEQ ID NO: 144419 - DNA, 100 bp, Homo sapiens
gaaacaagtgttgaaaatgttaaaggctgtgctgaagaagagccgagagggaggaaagggaggcaagaaggaagcaggaatacggggtgctttgcattca

SEQ ID NO: 144420 - DNA, 90 bp, Homo sapiens
cattgatgatgatatcattatgctgacctctgacgagctgcaatttggttatgaggtatggcctcacaagtcttggtctacccaccatat

SEQ ID NO: 144421 - DNA, 97 bp, Homo sapiens
aggaggcaggagaagaaagccggtggttgaccagattgacaccctgacctctgacctacagctggaggatgagatgactgacagctccaaaacggac

SEQ ID NO: 144422 - DNA, 76 bp, Homo sapiens
gcgggggaacagctagcggcaaggcaagaaactatattcagtctttgactcagatgccgaagatgaactttgcgaa

SEQ ID NO: 144423 - DNA, 100 bp, Homo sapiens
gctactctccagaaaggagcaaatcatactctttccatcagtctcaacatagaagagccaaaaacctgtatatcatctccgtgaaggggatcaagggacg

SEQ ID NO: 144424 - DNA, 74 bp, Homo sapiens
ggacaactggatcagtttcattaaaaaggtaagaatgattgatgttggctgatattggagtgctcattcacatg

SEQ ID NO: 144425 - DNA, 96 bp, Homo sapiens
ttcttgctcttgttttgccctcaattgtaattctggataacaacgaacttgatgcaagtgataggtttgccaaggtcagacctctcatcatccgga

SEQ ID NO: 144426 - DNA, 89 bp, Homo sapiens
gcgagtgaggaaaggaggtactgtagggtggtgacttcacacgccataatggcactggtggcaagtccatctatggggagaaatttgaa

SEQ ID NO: 144427 - DNA, 101 bp, Homo sapiens
gattttttaactgaagatagtgcctttcagccctaccagcagggagaaggttttaaggtgaaaacgaagaaagaaatccggcatgtggaaaagaagagcca

SEQ ID NO: 144428 - DNA, 74 bp, Homo sapiens
tttaacaatagatcaagctagtgacttgaccatttaatttggcagagcggaaagctagcgcccattcaatagta

SEQ ID NO: 144429 - DNA, 97 bp, Homo sapiens
cccggaggcagagcggctgccatggtgtggcgctcttggccaatgcccctgagcgggttgtcgagcggcgacggcggccccgggacagcccaaccct

SEQ ID NO: 144430 - DNA, 88 bp, Homo sapiens
tatatatttgagtcaaagggtgatggaggaggaggggaacacccagccccagaaacagcttccttcaaaatgtctactgttcacgaaa

SEQ ID NO: 144431 - DNA, 90 bp, Homo sapiens
accgtgttgtatgtgagtggaggaaatacgcaggtgatcgtgcagtccggccgccaccccacagtgctgcagaagctctgccagttgccc

SEQ ID NO: 144432 - DNA, 100 bp, Homo sapiens
gctcctgctgctcatcccggtggccgccgcgcaggagcctcccggagctgacttgtgcaccatggacaattttgctgagggagatttcactgtggcggat

SEQ ID NO: 144433 - DNA, 50 bp, Homo sapiens
atcgtacagtatctccgacgcacagctggcctgccactcctcctgctatg

SEQ ID NO: 144434 - DNA, 100 bp, Homo sapiens
cttggaagcaatgtttgaacaaactcgaagaacagctgtggaaagaagttgcaaaacactggaggagcaagtccggagctttcaggtcccaacctgcgtt

SEQ ID NO: 144435 - DNA, 100 bp, Homo sapiens
ccaagatagttgacagtgggcctgcagccaaggaaggaggcctgcaaattcatgacaggattattgagccaaaagatatcgctcacttttgggaactcgg

SEQ ID NO: 144436 - DNA, 116 bp, Homo sapiens
cagagcgctactcctggcagtgcgtcaatcagagcgtcctgtgcgagatgcctcggcagtggaatccaatttctttccagccacaacctaccccatgggtcgacctatcagatgcg

SEQ ID NO: 144437 - DNA, 100 bp, Homo sapiens
ttatatgatgcaagatgtggcagaagaacaagaagttgagaccgagaatgtggaaacaggcatgtacatggaccgccgctgtgtctactaccggaagcca

SEQ ID NO: 144438 - DNA, 100 bp, Homo sapiens
tggccatcttcggaccccccaacaccctctacgaaggcggctacttcaaggtgaatgaaaactttgccattgatttgatagcagagcagcccgtgagcga

SEQ ID NO: 144439 - DNA, 75 bp, Homo sapiens
tttgcatatgagtgctgctgcagcttcccgagacatcaccttggatgaagatttgataaagtggaaggcactgtt

SEQ ID NO: 144440 - DNA, 101 bp, Homo sapiens
gatgctcttcttggaaaaccagatccagaaactggaggagtcccgctcgaagctagagtgatagattcgtgtggcctttcaaatgattgtgaagtggtgga

SEQ ID NO: 144441 - DNA, 101 bp, Homo sapiens
agaacctgagacatcagcatatatgtcaactctaccatgtgctagagacagccaacaaaatattcatggttcttgagactcagcccgcctgcacccaggtg

SEQ ID NO: 144442 - DNA, 83 bp, Homo sapiens
cgagccgagcgaggcagctctgagccgcgcgggggatatgagactttctactcggaatatcctgagtgttgcgtggatgtaaa

SEQ ID NO: 144443 - DNA, 90 bp, Homo sapiens
ggtgcaaggtgccattgagctcctggccaatcaatacagcatccagattcagcgtttgttggaagcacagtctctgatgccctgttcccc

SEQ ID NO: 144444 - DNA, 83 bp, Homo sapiens
cattccttctcacttggcctatggaaaacggggatttccaccatctgtcccagaaaacatgtctcaacttagcgaggaagaac

SEQ ID NO: 144445 - DNA, 95 bp, Homo sapiens
gttgggccaggaagttggttactccattcgatttgaagactgcagtagtgcaaaaaccattcttaaagttttccgtctgatgaaggttggccatt

SEQ ID NO: 144446 - DNA, 95 bp, Homo sapiens
tgggtcctcgacctgcagggagcagaggggacagaggcaccaaggacctccaagacaggcacattttacaatatgggataagctattggaaagat

SEQ ID NO: 144447 - DNA, 100 bp, Homo sapiens
ctactctgtcgctcttgtgccctagcaccccgagaaccgtcagtttgagccagatgatcctggattagaaattctgaatatggcttcttgtgaccttgac

SEQ ID NO: 144448 - DNA, 75 bp, Homo sapiens
gacatcgggagcagtgtgccaggcccgcagtcctaccccattgtgacaggcttgcacagaaatctggaggcagta

SEQ ID NO: 144449 - DNA, 82 bp, Homo sapiens
ggacgccgtgtacgagcgcaccagcgaccacaagatcgtcttctttaaagccatgcgcacgctgagcgaggacaccatcagg

SEQ ID NO: 144450 - DNA, 100 bp, Homo sapiens
tggcgctgctggctgcgctctgcccggcgagtcgggctctggaggaaaagaaaggctggaggctcccaggtgattttcacaaatcctttagaaatcgtca

SEQ ID NO: 144451 - DNA, 72 bp, Homo sapiens
agcagtagctatggcagtggcagaagattttaattaggcatctccttggaaacaatgccatctttgaatgtg

SEQ ID NO: 144452 - DNA, 100 bp, Homo sapiens
catcacccccatggaggccctggcagagcaggtacatcaggaacgtctctatcaagaatacaatttcagcaaggctgagggccatctgaaacagatggag

SEQ ID NO: 144453 - DNA, 100 bp, Homo sapiens
gacgcgctgcagccggcagcccaccgccgccttcttggcgcgaccccaacccagccccaggcgatgccagtccctccactccagaggagaacgaaaccac

SEQ ID NO: 144454 - DNA, 74 bp, Homo sapiens
gcacaaggccaggttcccaagagctcagcattccatggactttttgctatttcagtttggcctttgcactttta

SEQ ID NO: 144455 - DNA, 75 bp, Homo sapiens
ccagcagcgcgcgcgggagcccggggaacagcgggtccctgatgggcctgggtgacattatctcacagcagctgg

SEQ ID NO: 144456 - DNA, 80 bp, Homo sapiens
cccggggcatctatgccagtgagaggcccaagtccctagagacagaagagatgggtgatgaagaagttttctcctggttg

SEQ ID NO: 144457 - DNA, 100 bp, Homo sapiens
tgtactgttgacacaagtgttgctaaagaacagagccttccctcagtgatggtgacttttttgaacgaaccattctgtgcaacagccttgtgtggagttg

SEQ ID NO: 144458 - DNA, 141 bp, Homo sapiens
gatcaagcaggttttaaatcaagatttaacattccaacacataaaaattatttatccaacagctcctcccagtttgtccacactagaaattgaaaatagagcccaagaccttcatctctttgagactttgaagactgatcc

SEQ ID NO: 144459 - DNA, 100 bp, Homo sapiens
cgcaagatggcggacagtgcggaactaaaggcagacatctggtccctgggcataacagctattgaacttgcaagaggggaaccacctcattccgagctgc

SEQ ID NO: 144460 - DNA, 97 bp, Homo sapiens
tggagcccaactgataatccttgaacatgatttgcttggaacggtagaagaaatccttccaagcctctcagaaaatatcagtgtttgggggatgaaa

SEQ ID NO: 144461 - DNA, 82 bp, Homo sapiens
ttcgccagcccgtgccgcgagcgcggcctgcaggagctctctgaacaacggggcccagagctgatggcagacaatgtcagcc

SEQ ID NO: 144462 - DNA, 75 bp, Homo sapiens
cggaagaccaagatcatcgagatgaactgataaatttcaaacggaagagagtggcagcatttagaaagaatctaa

SEQ ID NO: 144463 - DNA, 100 bp, Homo sapiens
gagctggtgaagaatatccgagggaaggtaaaaggccttcagcctggagataagaatctgatattgatgctgctgctgcaatgatgcttttaaatacttc

SEQ ID NO: 144464 - DNA, 100 bp, Homo sapiens
gaaaatggcggacgggaaggcgggagacgagaagcctgaaaagtcgcagcgagctggagccgccggagggggcagtgcccaaaggaaatgccactaaaga

SEQ ID NO: 144465 - DNA, 83 bp, Homo sapiens
ccatgagggaaatcgtgcacatccaggctggtcagtgtggcaaccagatcggtgccaagggggatatgagactttctactcgg

SEQ ID NO: 144466 - DNA, 100 bp, Homo sapiens
aacatgctggatgtcaacggcctctacagcccacctgaggatattgaccataaggactcatatctcattacaagaagcatcatggccgagccagactaca

SEQ ID NO: 144467 - DNA, 75 bp, Homo sapiens
ttttaggaaagtccttagagtttcatagacagctggacaagttttctggatatgccgcagaaggatccgtgccag

SEQ ID NO: 144468 - DNA, 100 bp, Homo sapiens
ctgttcatttgacctggcaattaaaggtgttaaatctccttggtgtgatgtttttgacatagatgatgcaaagtggctacacaaacaagctgaggcacga

SEQ ID NO: 144469 - DNA, 98 bp, Homo sapiens
aacaccaatgatgccaactcctgccagatcattattccacagaaccaagtcaatcgaaagtcaggtatgaacgctgccgtccgtgccgtggtgcgcat

SEQ ID NO: 144470 - DNA, 51 bp, Homo sapiens
ggaggtgtacgtggccatctgcagtgtgattcttggagcaaatacccggcc

SEQ ID NO: 144471 - DNA, 78 bp, Homo sapiens
cagccaagctcgtagcctgccactccagagatcgatgtcttattgtgatgagtctcgactgtcatatcttcttcggag

SEQ ID NO: 144472 - DNA, 100 bp, Homo sapiens
tcgcaaaatcaaccagctttcggaggagaatggagacctttcctttaagaaacaccaagggacccacgacaggcctgccccgcatcgcagggcatgctgc

SEQ ID NO: 144473 - DNA, 76 bp, Homo sapiens
catcaacaagatgttgtcctgtgctggggctgacagctatgagatcatgcagaagtgctgggaagagaagtttgag

SEQ ID NO: 144474 - DNA, 78 bp, Homo sapiens
aagtaggggtgcacctcagcactatcccaagactgctggcaacaggtggaacggcacatgtgtgatggggacattgtt

SEQ ID NO: 144475 - DNA, 100 bp, Homo sapiens
caggaggagagcccacaggtgctaaagagagcagtaccctgatggagtcccttgcagacaaggcgcctctgtcgaagagccttctgctggtccccagtgc

SEQ ID NO: 144476 - DNA, 100 bp, Homo sapiens
cacctgtgagctaatctttgaagactgcaagattcctgctctcacctgtgcacagttccaccctgacggactcatctttggaacaggaaccatggactct

SEQ ID NO: 144477 - DNA, 100 bp, Homo sapiens
tgctcccacacacatgcccattcttctcgggctggcttgtatctcagggttacgctccccaggtcccttgctccagatgccggtgcagctgacgacagcc

SEQ ID NO: 144478 - DNA, 80 bp, Homo sapiens
ctctcgctgcttcaggaggacctgcaggaggacgcagacggatgacatgatccacatcgcggacaccaaggtcgccaggc

SEQ ID NO: 144479 - DNA, 83 bp, Homo sapiens
acaacacagggaagcttggggaggtactccaaagattcaggtttactcacgtcatccagcagagaatggaaagtcaaatttcc

SEQ ID NO: 144480 - DNA, 82 bp, Homo sapiens
ttcgaaaagctgccaagttgaaaatggacgagtaatcgcctgctttgattcattgaaagttatccagtgaatctagcagcca

SEQ ID NO: 144481 - DNA, 108 bp, Homo sapiens
acaagatccagtcatctgggggcccactgcaggtactaggttttgacaagcttgcatcatgcgtgagtataagctagtcgttcttggctcaggaggcgttggaaagtc

SEQ ID NO: 144482 - DNA, 98 bp, Homo sapiens
ggccttcgaggaggtcatgaaggacctgagcctgacgcgggccgcgcgggaaggtgctcgggtcttcggggcactgggtcccatcggtccctcctcac

SEQ ID NO: 144483 - DNA, 75 bp, Homo sapiens
tcggccctcattctgcacgacgatgaggtgacagtcacgggcactgaaggctttgtggaactacctgagccagaa

SEQ ID NO: 144484 - DNA, 82 bp, Homo sapiens
gaatgtggaacgacctgtctgagaagaagaaggccacactggtgtgtctcataagtgacttctacccgggagccgtgacagt

SEQ ID NO: 144485 - DNA, 97 bp, Homo sapiens
gtgaggccggcatcgtctttccgtcctctgaggcgacggccgcggctgcacaggctgaactccagtgcacccagttagacttggagcggaaactcaa

SEQ ID NO: 144486 - DNA, 78 bp, Homo sapiens
aaatcccatctaccgcaactctcagttcgagagtaaagtgatggaatggggagaagatattaaagcagtttcaaaaga

SEQ ID NO: 144487 - DNA, 90 bp, Homo sapiens
ctttccgggagactggagtcgaaggccgtgaggcacttcaggtggcaagacagctccttcttcagcagcaacagcagcagcaagttagtg

SEQ ID NO: 144488 - DNA, 100 bp, Homo sapiens
ctcgccgatcaaagcctgagatactacagggattcagtggctgaggagaactgtaagagtaaatgggtccagtaattggaatgactccagataagagagc

SEQ ID NO: 144489 - DNA, 75 bp, Homo sapiens
ggagtgtcctggacccagctgagcgggcggtcattcgcatcgcagcatgcttttcacttccactgcatctctcgc

SEQ ID NO: 144490 - DNA, 82 bp, Homo sapiens
aaatgtaggcttgatctcagtttcaaatctccccaagctgcctaaattgaaaaagattcatggaaacagctattctcataaa

SEQ ID NO: 144491 - DNA, 75 bp, Homo sapiens
cagctgattgactgtgcacaataccctggactttgtctcacaagatgaaatgttgacgcccctggggagattgga

SEQ ID NO: 144492 - DNA, 83 bp, Homo sapiens
gcactggtcgtgggagtcacctgaaaggcaagaaatgctcacaattgtaaagcagcgagaacaaccagaaatggttttccgac

SEQ ID NO: 144493 - DNA, 75 bp, Homo sapiens
gaaaacaaaagctgctacttatggaagatacaaaggatgcctgaaaacttcatgcctcctgttcccatcacatca

SEQ ID NO: 144494 - DNA, 75 bp, Homo sapiens
gcgtcttccgtgggcaacgtggccgacagcacaggcgtccgagctgggccacagcctgaacgagaacgtcctcaa

SEQ ID NO: 144495 - DNA, 100 bp, Homo sapiens
agcaacgtgcggcgagtcatggccgagttcttcttcagcactgtggcctcggccacagctggcatgctctgcctgatcgccatcctgctgtatgtcctcg

SEQ ID NO: 144496 - DNA, 83 bp, Homo sapiens
ctcactaaaatgaaagaaaccgctgaggcttatttgggaaagaagcctcttagcaaatatccggctgtgatcaatgatatttc

SEQ ID NO: 144497 - DNA, 100 bp, Homo sapiens
gcgagtgcagccggtgacccggcgagaggcggcgccgctcccaagatgtcgcagacggccatgtccgaaacctacgggcttgcgtttcaagaaagcccat

SEQ ID NO: 144498 - DNA, 75 bp, Homo sapiens
tggatcaccgacagcacagacagaatccctgctaccagcatccgtgtcattctggaccttactcccaactaccgg

SEQ ID NO: 144499 - DNA, 82 bp, Homo sapiens
ggcgaggttcagactcttggagccagaagctacatgacccctaaacgccccatggctgggggttatggagtgatgggtgacg

SEQ ID NO: 144500 - DNA, 75 bp, Homo sapiens
cgcccgcagagcaagcgcggggaaccaaggagacgctcctggcactgcaggttgaaggtcgaggagctggaaggc

SEQ ID NO: 144501 - DNA, 100 bp, Homo sapiens
ctgcctaaagtggtcaacacaagtgatcctgacatgagacgggatgattatgtacttgaagtgaggcactttcagtgtcctaaatggccaaatccagata

SEQ ID NO: 144502 - DNA, 98 bp, Homo sapiens
agtgtaagcagctgaacgagaaccaagtgcggacgctgtgcgagaaggtggcgacatgtctaagaatgtgagccagtcacagatggcaaaattgaacc

SEQ ID NO: 144503 - DNA, 75 bp, Homo sapiens
atctttaagagcagcttattccaagctttgctagtatgccgagattttgctgtcctggaggaccacaccctggct

SEQ ID NO: 144504 - DNA, 90 bp, Homo sapiens
ggaactattacagaattctgcactgaagcaagctgtccagtcatgtctgcaggtccgaggtaagcaaactatgggctttccacttctcac

SEQ ID NO: 144505 - DNA, 75 bp, Homo sapiens
gcctgtgtcccacttgttcgcggcctatagtgcctccggagccagcgtggtggccatagacaacaagatcgaaca

SEQ ID NO: 144506 - DNA, 90 bp, Homo sapiens
caccgtgtgggagcgggagctgcggaaagaagaataactgtgtgatgcctgaagatgtgaagaacttttacctgatgaccaatggcttcc

SEQ ID NO: 144507 - DNA, 95 bp, Homo sapiens
agcctaagagaactatggcaacatcaggtgactgtcccagaagtgaatcgcaggtacccactgatggtaatgctggcctgctggctgaaccccag

SEQ ID NO: 144508 - DNA, 98 bp, Homo sapiens
ccgtccttcctgcagaaaatggcggacaagatcctcagcacagtgtacctggatggaacaaaatctgaagaggacctctttttgcaagtatatgaaga

SEQ ID NO: 144509 - DNA, 100 bp, Homo sapiens
gcccagctgcctcagagcctgtcctgcctccgctccctggtcctcaaagacaaagacctgcggaccaagggcttcagcctagagtcgtgccgcagcatgg

SEQ ID NO: 144510 - DNA, 82 bp, Homo sapiens
atgaagatggagatgatggggatgatacagccagcgaatcttatttgcctggagaattaaatatgggtgatgttgagaaagg

SEQ ID NO: 144511 - DNA, 100 bp, Homo sapiens
gagatggaggagaagtactatcgttttggcatcaagccagagtggatgaccgtccaccgcatcatcaaccacaggccacggcatatgcctccaaggacgg

SEQ ID NO: 144512 - DNA, 121 bp, Homo sapiens
atgtctcagaaaaacatcggaaaccgtcaagtacctgacgcggggcaagattctgctgtgcacaggtgtgagatgcacaatgcgaaacctaggccccagcttttacaccatgatgcgcagg

SEQ ID NO: 144513 - DNA, 98 bp, Homo sapiens
gggcaccagcaggacccgaggccaggagccaggggcccagaaggttttaaaatcaaagatgggaaaatcggagaaaattgcccttccccatggccagc

SEQ ID NO: 144514 - DNA, 100 bp, Homo sapiens
ggaggatccacctggagctgaggaaccggaccccggcagctagccagcccctgggcaacaaagtggaaatggagattgtgagcatgttggaaaaaaacgc

SEQ ID NO: 144515 - DNA, 75 bp, Homo sapiens
aaacccacactaacgagttcatcacctggagccagtggggccgacttgcttgctgtcaactcggatgggaacatg

SEQ ID NO: 144516 - DNA, 98 bp, Homo sapiens
cgacaataaaagccgtggtcatgttggaatacgtcgaaagagcaacatggaatgaccgtttctctaatagctcttcaagtctgcaataaaaaatggcc

SEQ ID NO: 144517 - DNA, 100 bp, Homo sapiens
ctatggcggagaacaacaaacaggatttggaacttggaaggagtgcaaacagctcattttgttcttcattctcctggcatgagtgtgtgctggcatcctg

SEQ ID NO: 144518 - DNA, 100 bp, Homo sapiens
caccgctgtcccgcggcctggagtacaacgaggtcaacgtcaccctggacctgggccagtcctcgtcccgccgcgccggcctctgctgcaccaactgcca

SEQ ID NO: 144519 - DNA, 100 bp, Homo sapiens
cggtcgcgatgggggcgcaggaccggccgcagtgccacttcgacatcgagatcaaccgggagccggagtactattaatcccgtagatgcaatatatcaac

SEQ ID NO: 144520 - DNA, 50 bp, Homo sapiens
tggtgatggcaaatgtcgtggacatggcttctcacggcattcagcagcag

SEQ ID NO: 144521 - DNA, 100 bp, Homo sapiens
ctccgcagccccgggcacggcggaggcagcggagccctgggccatcgatcaatgaactgagccatgttcaaatccctgttatgttgatgccagatgactt

SEQ ID NO: 144522 - DNA, 90 bp, Homo sapiens
gtggcaccgggatcggttgccttgagcctgtggtgcttcatgccccacctccaaccaagatcaaacgggagctgcacagcccctcctctg

SEQ ID NO: 144523 - DNA, 97 bp, Homo sapiens
cctgggactcctcgctccttggatggcagtggttctgagccagagactgatggagaggcagaaacggaaggcggacatcgagaaagggctgcagttc

SEQ ID NO: 144524 - DNA, 75 bp, Homo sapiens
tcttaaaagcaattatgatgcttggtttggtgcaagtgccaaagttgtgcatttcctgggacgagtcaaaccatg

SEQ ID NO: 144525 - DNA, 130 bp, Homo sapiens
cggcctggtctacgtgctgaaccacgctgaggggctgggagccgcgcacaccaccatcacaaccatcgtatcactgatctacaatgtgctcaagaccttcatggagatgaatgggaagctgtttgatgag

SEQ ID NO: 144526 - DNA, 98 bp, Homo sapiens
ccaagggctaggcctgggggaccagaagcaagaggtactccaaagattcaggtttactcacgtcatccagcagagaatggaaagtcaaatttcctgaa

SEQ ID NO: 144527 - DNA, 100 bp, Homo sapiens
aagcacaggaatctcactctgttaaagctggtctgttctaactgagatgcatccaagaagtcagattcaaatccgctgactgaaatacttaagtgtccta

SEQ ID NO: 144528 - DNA, 99 bp, Homo sapiens
gctcggccgatgaagtgcagaggtttttttctgagaagaagctggaggagttctccgtggaagaggccgaggtgctacagatcctcacacaggtcaacg

SEQ ID NO: 144529 - DNA, 83 bp, Homo sapiens
ctgtgaattctttttgaaagctgcctgcggcaaaggagccaagccgccatggcctaccacagcttcctggtggagcccatcag

SEQ ID NO: 144530 - DNA, 75 bp, Homo sapiens
cccattgctaacccaaaggctaacacatcagcaatcccacagagtattgatgaggaaactgaagtttggagcgat

SEQ ID NO: 144531 - DNA, 100 bp, Homo sapiens
cagagcttccatgtgccatggccatgggcacacccagcaccacggagaggatttccacctctggccaggaaacagagcaaatgcagcgttacaatcaaag

SEQ ID NO: 144532 - DNA, 100 bp, Homo sapiens
gcctttcctcaagagaagagcccccaggagaaaagccagtattgcttgtgctcctaacaacctgtctcttgctcagcaaaacccagcagctcagattcct

SEQ ID NO: 144533 - DNA, 75 bp, Homo sapiens
gtggctgtctcctctctccgccatggtaataaaaggcctgacatatctgagggagaagcacaagatcatgcacag

SEQ ID NO: 144534 - DNA, 75 bp, Homo sapiens
cgggctgaagcgactgagtccgcgatggaggaatacaatagatatggctggtgggtaggagaaatgaagggagcc

SEQ ID NO: 144535 - DNA, 98 bp, Homo sapiens
ctaacgtttagagagtgcttccccttgccgagcactggctttaaggaagcctcctatttcagtttctcaacatgaaagtcatcaagcaatctcccatc

SEQ ID NO: 144536 - DNA, 101 bp, Homo sapiens
cttgtttcttatatgtgatgccattccagcactggactcatggaggctgagcatttattcagacaagttggatggcttgaggactggtactaaaaggaaac

SEQ ID NO: 144537 - DNA, 98 bp, Homo sapiens
tgataaagccactatcatggcctttgatgccctggtgaccttctgtgaagaactggggtttccacttcaagcgtgacccttttgcctgtgggatgagc

SEQ ID NO: 144538 - DNA, 98 bp, Homo sapiens
ccccgctggagagggagccagaacagggaagaacggattcacacaggatggcttgcagaagacgctattttaagactttgaccccgacgcaggcttca

SEQ ID NO: 144539 - DNA, 83 bp, Homo sapiens
ggaaggcttggaccaggtggtagtggtgtcagattttgatctcatggttgcagtgggtgaataggtggccttttgtgatctcc

SEQ ID NO: 144540 - DNA, 76 bp, Homo sapiens
tgttagccaaaatgaagacctgtgttgatacctataccaaccgtttaagattacaggctgtgccagccctggaaaa

SEQ ID NO: 144541 - DNA, 100 bp, Homo sapiens
ctttccctggaggaaattcagaagaaattagaagctgcagaagaaagacgcaaggttctgacatccacggagacccaggcttcccaggccctcctgggga

SEQ ID NO: 144542 - DNA, 83 bp, Homo sapiens
gccgcggatctcaccgccgctcagggtcatggttctacttcagcgtccggggaggaatgccaggaaaactcatcaagatcaac

SEQ ID NO: 144543 - DNA, 75 bp, Homo sapiens
cggacgaggccgggacttggccgagcggatcctaataaggggaaaatgaaccgcatgcacgagtctctcatgctc

SEQ ID NO: 144544 - DNA, 98 bp, Homo sapiens
gagtcttccatcctggagacagtcactgctgtggctgcgggaaagcctctctcttgcccaaaccacgatgggaatatcggacagctggcttttaaagg

SEQ ID NO: 144545 - DNA, 82 bp, Homo sapiens
cggcgggagccagcgagccacgggagcgagccagggggggccctcagcctcttggccttgaacgggctgttcatcttgattc

SEQ ID NO: 144546 - DNA, 100 bp, Homo sapiens
aaggcccacgacggtgggatttacgcaatgagatcgtggggctcaccagcgtcccccatggcttctgagtagcgtgggagtggagtcagcaccaagccag

SEQ ID NO: 144547 - DNA, 100 bp, Homo sapiens
aaaagctgaggaagcaggcggagaagagacaagccgctgttgtgacaagaaaagctgtggcaaccgaaatgagactccctcagatccagtgataattgac

SEQ ID NO: 144548 - DNA, 74 bp, Homo sapiens
ccgccgcccccggagctgctggtttcattcgaggtttcgggccgaacggtgtgctgctgaggactgtcttggac

SEQ ID NO: 144549 - DNA, 83 bp, Homo sapiens
agcatttgcagacgttgtctcatgggtaccgcttgccaactttggagagtccgtgtatctgtcagctaaaggggcccttcctg

SEQ ID NO: 144550 - DNA, 100 bp, Homo sapiens
ccaaacaagctgaagatgctgccaaaagcataaccaatggcagtgatgatggagctcagccctccacctccacaggtattgtcaatatggactcgccata

SEQ ID NO: 144551 - DNA, 82 bp, Homo sapiens
gcttccttcgttattggagccaggcctacaccccaggtcagtatgggaatcctttaaataaatatatcagacattatgaagg

SEQ ID NO: 144552 - DNA, 83 bp, Homo sapiens
atctggaagcggctcaatgaccatggcaagaactggcgtcacgtttacaaggtttggtgcacctcgatttggaggaagtaggg

SEQ ID NO: 144553 - DNA, 75 bp, Homo sapiens
gcggccgccctgggccgggccccaccggacggtgtaggagctgcacgatctgggaacctcacgtttatggtggga

SEQ ID NO: 144554 - DNA, 75 bp, Homo sapiens
aaggacgtggaccccgtacgcaccacgtccaatgacattgtggagatcttcacgtactacgagatgtcctacggc

SEQ ID NO: 144555 - DNA, 74 bp, Homo sapiens
gcgtcctcttgtcaccgacagggcgattgcagtgcgttccggttatatatgccgcaattttacagggtcttctg

SEQ ID NO: 144556 - DNA, 82 bp, Homo sapiens
gtcttcgcgctctggctggtctcccctctgctggctgaagaaacacttaaattctggaaatagcgactcagtatcatggcca

SEQ ID NO: 144557 - DNA, 101 bp, Homo sapiens
tttgtctgtttgatatcaccaaactggaggatgcctatgtattccctggggatggcgcatcacacaccaaaggatctaccatacccattgactaactatgg

SEQ ID NO: 144558 - DNA, 75 bp, Homo sapiens
cacctttcggcttctgagacggcggcagcagcggcattcagcacctgttccgcgagcctgagaagaggcccccca

SEQ ID NO: 144559 - DNA, 75 bp, Homo sapiens
caagttttgtgcagattgccagtctaaaggcaccaccaggaccagctgatcattccagcccacagcaatggagcc

SEQ ID NO: 144560 - DNA, 100 bp, Homo sapiens
catcaaaacaaaagctattttgaattcaaaatccagtccacagtccctacagatgaagaagatgaaatggaggagtccacaaatcgaccaagaaagaaac

SEQ ID NO: 144561 - DNA, 75 bp, Homo sapiens
aaaactttgtgaggttatatatccgcagcaatccagatctctatgatttggtacacacagaggggcagcttcaaa

SEQ ID NO: 144562 - DNA, 82 bp, Homo sapiens
gacaaatcctagcgaatttttggagcatctccacccaggaacctcgccatccagaagttgaaatcacaaagattagacacct

SEQ ID NO: 144563 - DNA, 50 bp, Homo sapiens
caagcttacagtgattgttccagatggaaaaagacctcgatgaagttctg

SEQ ID NO: 144564 - DNA, 75 bp, Homo sapiens
ccaaaattaagccatcataccagtgccttatctgttgtggcctactgaacttgacgcactggtatttggccatct

SEQ ID NO: 144565 - DNA, 78 bp, Homo sapiens
tcgcactaccctgactacagctggagcgcccagaggcgagccctggtggaggaagagtatatacaagctgaaccaccc

SEQ ID NO: 144566 - DNA, 90 bp, Homo sapiens
ggctcaatgaccatggcaagaactggcgtcacgtttacaaggaccatggccaacctggagcgcaccttcatcgccatcaagccggacggc

SEQ ID NO: 144567 - DNA, 100 bp, Homo sapiens
ggtgatatacgtgcctttaacagataaagaaaagcagtggtccaggtgatttggaagcaccttctaacttagttatttctgagcgaacccatcgttcttt

SEQ ID NO: 144568 - DNA, 74 bp, Homo sapiens
tgatcttcgatgagctctcggattccttatgcagagtggccgacttggaagatgagaatgtgcctactgctcct

SEQ ID NO: 144569 - DNA, 83 bp, Homo sapiens
agcctgcagccggccctgccggagcatcagatccatgctgctgctgactcggagccccacagcttggcacaggctctctcagc

SEQ ID NO: 144570 - DNA, 100 bp, Homo sapiens
gtgtggagaaaactgacttcgaggaattctttctaaaattctggggagacattgccaaggaattttactggaagactccatgccctggcccattccttcg

SEQ ID NO: 144571 - DNA, 75 bp, Homo sapiens
ctacgggcctgatcaaacttgccttcctgttctccaagaccagatggtctcctgatcctggctgataagctccag

SEQ ID NO: 144572 - DNA, 75 bp, Homo sapiens
gccaggcccagctgctggtctatgagaatgaggctgccttcgaccagcgcatgaagacatggcagcgctggcagg

SEQ ID NO: 144573 - DNA, 75 bp, Homo sapiens
ctgagctcattaactaccatcagcacaactctgcagataagtatgctgtgcgcttcatccctcgggagaatggcg

SEQ ID NO: 144574 - DNA, 75 bp, Homo sapiens
acgaggctgtcatcaccgccatgcccaagaataaagaatgccagctgatgaagaccgagaggccgcgacccaaca

SEQ ID NO: 144575 - DNA, 74 bp, Homo sapiens
atggaaagtttttccaaatattcatctgtacagttaatgacagttcggactatcacaggaaatatctactatgc

SEQ ID NO: 144576 - DNA, 75 bp, Homo sapiens
ggagcggctctgctcggtcctcaaaggctactgcagcactggggtgtcagttgttggtccgacccagaacgcttc

SEQ ID NO: 144577 - DNA, 74 bp, Homo sapiens
cacctcctggaatgaccttaaatgagaagagtgttcaaaattcaattacacaattcacaatgacatcctttcaa

SEQ ID NO: 144578 - DNA, 98 bp, Homo sapiens
ggcttcctcatcgtggccgagatccttgtcgaccaggtttctacaaggcattggatggtaatatgaagtgtgctaagtgcccgcctcacagttctact

SEQ ID NO: 144579 - DNA, 98 bp, Homo sapiens
gctgctgcgtgctcagccccagagcaggcttactgtggatttctccgtcctggagtttcttcagagaatctttctgcagtggccacaggaaactgggg

SEQ ID NO: 144580 - DNA, 100 bp, Homo sapiens
cttgtgaaaaaaattttggagacgaagaaagattatgagaaattgcagcagtcacccaaacctggggagaaggctgttcttgccttagctgcatcttgga

SEQ ID NO: 144581 - DNA, 76 bp, Homo sapiens
cagagccgggagttcaagaagaacactccagagacatgtcatgctgcccaaggacatagccaagctggtccctaaa

SEQ ID NO: 144582 - DNA, 75 bp, Homo sapiens
ccgggaggccccatcccgccaggtttctttcagcaaatccagtttgctgatgacatgcaggagttcaccaaattc

SEQ ID NO: 144583 - DNA, 98 bp, Homo sapiens
gccgctgccgccggtgatctacaccatggagaacaagcccatcgtcacctggcgaagctgtgctcaggcccgggctggacgcagagccagagctgtcc

SEQ ID NO: 144584 - DNA, 48 bp, Homo sapiens
tactaaaaatggacgcctggcaaccaaacttaattcagtgcacaaatg

SEQ ID NO: 144585 - DNA, 87 bp, Homo sapiens
cgcgcgcagggcctgcagcgggagctggacggcgagcgcgagcggcgcgagaaagttggtgttcgaggaagagacattgttgttctt

SEQ ID NO: 144586 - DNA, 82 bp, Homo sapiens
cgccgcgcgcccgcgccctccgcgcgacgccagatctggtggctggacccagagctgacctatggctgcgccaagcccttcg

SEQ ID NO: 144587 - DNA, 83 bp, Homo sapiens
ggcgggccaggcgcgggatgcccaggacgtccagagaggaggttcagatgagcccctgctgacttgagagagacagagagacc

SEQ ID NO: 144588 - DNA, 90 bp, Homo sapiens
gcgatctgctggcctcggcctctcaagtcctcctgcccctgctcgagtcttgcagtgtgcggcccgacgccagcgtttccagtcaccgct

SEQ ID NO: 144589 - DNA, 101 bp, Homo sapiens
tatcaaagccatcggatggatgagcagtcacacagactttggaacctctttcaggagctataaaagaaagggaggaatcatgtccacaattgcagctttct

SEQ ID NO: 144590 - DNA, 100 bp, Homo sapiens
tggcggatggcccccggtgcaagaggcgcaaacaagccaatcccaggaggaaaaacgacaggtgatttggcttctgcacagttaggaggagcaccaaacc

SEQ ID NO: 144591 - DNA, 83 bp, Homo sapiens
caacagtttgtggcaagacaagctcagaactgagaagctgtcaccacaggttgtcatttagtaaaaacggagtagttagaata

SEQ ID NO: 144592 - DNA, 82 bp, Homo sapiens
ccatgaaaacctctcaccccgtcgttgcctccacttggcccgtccatagagccaggctgacccagctggatgttgacagcca

SEQ ID NO: 144593 - DNA, 85 bp, Homo sapiens
agtacctgcagaaggtctctggagacatcttcagcagctatccccagctttttgcagctgggatgttatctggcgtattcaccac

SEQ ID NO: 144594 - DNA, 98 bp, Homo sapiens
caacttctggcagaaacagaggactaattttggcagttctaaatttgaatttgaggtgcacttacagagtgctacgatgaactggggaacagatatca

SEQ ID NO: 144595 - DNA, 75 bp, Homo sapiens
gctactgctgtgaccacctcaaacatcccagtcggagtttgctataaaatgggagttctggttgtactcactgtt

SEQ ID NO: 144596 - DNA, 99 bp, Homo sapiens
ggagctggagcagaggctgctggaggcagagcagagagcagagaacgctgagacccaggtatcatgatattagctggtttgacatcaagtcatttgtga

SEQ ID NO: 144597 - DNA, 89 bp, Homo sapiens
gcgaggtcgatgaggactcggagcctgagcgggaggattctttctgaactaccttttttcgggaatggatgatgatggtatggaatcca

SEQ ID NO: 144598 - DNA, 100 bp, Homo sapiens
tttgattttgagatttgagaacttggacatacatacttcctatggaaggaggatggcagactgtcagtatcatacataacagaggaatgcctgaagaagc

SEQ ID NO: 144599 - DNA, 112 bp, Homo sapiens
ctaactacttcatggttctgcctgcacattgactcacctgtcttccgttgattgaattccttcaatctttgtaaaattctctgtggagttttcaacttgaccaacaatgtgg

SEQ ID NO: 144600 - DNA, 100 bp, Homo sapiens
cacttactttaatgagaagatctccattcctgaggaggaggttcctaggagaatgttaacagtccagacctttttcactacatcaaccacggatgattgg

SEQ ID NO: 144601 - DNA, 75 bp, Homo sapiens
gcactgcagccagtgaaaccactgaggaggactcggaggagagtgaaattgacatggaagatgatgatgacgagg

SEQ ID NO: 144602 - DNA, 101 bp, Homo sapiens
tgcctcaatttgctggatttaagcactgctgcactttatgaggaatcatattgacaggtcatgaaaatgagaccaaaagatctctggaagcgattaatgat

SEQ ID NO: 144603 - DNA, 83 bp, Homo sapiens
ctggattatgttataatgtggaacctggatgaatgtagagagaaagtacttcaaggctgaccaactgactgaagagcagattg

SEQ ID NO: 144604 - DNA, 100 bp, Homo sapiens
cgtatttcgtcgagaatttttggtgctgatgagctccttctaactgagatgatgtttaatggccttttcaatgacctttctgcagaacaggcaacagcat

SEQ ID NO: 144605 - DNA, 100 bp, Homo sapiens
tgaacatgtgcttggtgtcgtttttccttgagctgaacgtcttgcaacagtggccgcacgcatagataattctatccagaccatgatcacttttgaccaa

SEQ ID NO: 144606 - DNA, 101 bp, Homo sapiens
ggcgttcttccgctggctcagccgcaagtacccgtccatcatagtcaactgcgtggaagagaaggactcacaccacccggcaagaactgctcactacggct

SEQ ID NO: 144607 - DNA, 86 bp, Homo sapiens
ccgccgcgagcctccggacagacgccagagcgaggagggcgctacgcggctgaaactgccgccaaccggatctgtaaggtgctggc

SEQ ID NO: 144608 - DNA, 90 bp, Homo sapiens
aggagaggccctgaaaagtaactggaaagtcacagaccgttctggcaagtggagttgatgagaaacaggcatggattccgtgaaggaaca

SEQ ID NO: 144609 - DNA, 83 bp, Homo sapiens
cgaagatggcgaccgccatgtacttggagcactatctggacaaccagaatccgtagaagctagccctgtggtagttgagaaat

SEQ ID NO: 144610 - DNA, 82 bp, Homo sapiens
tagctcccactttcaagaagcaatagacttcattggtgggcattcacgctgatcatcatctcatcctacacggccaacctgg

SEQ ID NO: 144611 - DNA, 100 bp, Homo sapiens
caggttgaatgagaaccctacttgcctaaatgaggaatgtctttcctaccatctaaaatacgaaggtttctggctgggacgactgggtttggattcagaa

SEQ ID NO: 144612 - DNA, 74 bp, Homo sapiens
attcagcaaatgggatcaatatttcacctgatgataaatccgttcttccccctctccttcctggtcaacagctg

SEQ ID NO: 144613 - DNA, 98 bp, Homo sapiens
agaagcgggcgcccgccgccgagccgtctcctgcagcggcccccgccggggtgataaaagaaaatgtggctgaagttacccgaagttcagcttgcagt

SEQ ID NO: 144614 - DNA, 75 bp, Homo sapiens
agcaagcgtttcagcgcctacaattacaggaattgcattttgtgaaaaaagaacaagaattttctgcaaggatca

SEQ ID NO: 144615 - DNA, 101 bp, Homo sapiens
caagtgatttcttccaaagcacaggaatctcactctgttaaagctggtctgttctaactgaggatgcacagacaattagaacattaactctcatctcaaaa

SEQ ID NO: 144616 - DNA, 83 bp, Homo sapiens
cgggctacggggcagatggactcggagcgccccgccgacccaacatgagtgaagtttcctgcaagaaacgggacgactatttg

SEQ ID NO: 144617 - DNA, 90 bp, Homo sapiens
gccatggacgcgtccctggagaaggaccagaggagcgagagcagcaagaaccacacccagcagcaatgtcagcggaagtggaaacctcag

SEQ ID NO: 144618 - DNA, 75 bp, Homo sapiens
ctacgacgtccctcaaaccttgcttctaggagataaaaagatgatgataattccgaagaaggcttccacactatt

SEQ ID NO: 144619 - DNA, 90 bp, Homo sapiens
gtctggccgtcggctgcggcgccatcgatgagcctgaagtcttgacagaacctccaagtgccacaaccactactaccataggtatatctg

SEQ ID NO: 144620 - DNA, 115 bp, Homo sapiens
gcgagttacaccaaccaggacagaaatcattatcttagccaccaggcatgaattgctggaggaagcccggagacaaggtttaccttttgcccaatgggacgggccaacggttgtg

SEQ ID NO: 144621 - DNA, 101 bp, Homo sapiens
gtgcacctctcagcaggcctttgctggacagatgaagagtgacttgtttctggatgattctaagagaacaagcgagtgagcatcaataaagatgagctgaa

SEQ ID NO: 144622 - DNA, 82 bp, Homo sapiens
tgactttcctccaagagcacattgcctggtaagatgtttttgaaatcatgaatcctgtttatagtcctggatcttctggggt

SEQ ID NO: 144623 - DNA, 100 bp, Homo sapiens
ggagcccatcccgcttcctggtgttcttctacccggaggacgggtttcagaagctgccagaggaggagccagaaacagatctcagccccgggctcccagc

SEQ ID NO: 144624 - DNA, 100 bp, Homo sapiens
ctgccggagatccctcagccctggctggttggacgtgataagtatgagcctgcagctgtttcagaacaaggtgataaaaagggcaaaaagggcaaaaaag

SEQ ID NO: 144625 - DNA, 75 bp, Homo sapiens
gcgctatggaggagctcgatggcgagccaacagtcactatatgtgcagcgggggctacagcgagtggggctagat

SEQ ID NO: 144626 - DNA, 100 bp, Homo sapiens
ggactgcgggcccagcggcttggtgcgggagctggaggagctgcgctcggagaacgactatctcaagcatataggtaatctcaaagaagctgcaaagtgg

SEQ ID NO: 144627 - DNA, 128 bp, Homo sapiens
agcgagctgagtggttgtgtggtcgcgtctcggaaaccggtagcgcttgcagcatggtgcaatggatgagcttcatagtctggatccaagaaggcaagagttattggaagctagatttactggagttg

SEQ ID NO: 144628 - DNA, 76 bp, Homo sapiens
gcaggtggattcctcgggatgtgtgactcagtgttcctgaaagtacacctttcacagcagtcttaaagtttgcagc

SEQ ID NO: 144629 - DNA, 96 bp, Homo sapiens
acactactaccaccgccacacgcgcagcatcttctgggagctccagggtaccatgatcctgaccaatttgacggcgctgcacagggaccccacaga

SEQ ID NO: 144630 - DNA, 100 bp, Homo sapiens
gtcgccgaacccgcctggctagccggcgagttgagtggcgaggatgtccttcctgagatccgtgctatctgcattgaggaaattgggtgttggatgcaaa

SEQ ID NO: 144631 - DNA, 100 bp, Homo sapiens
aaaaatctctcgggaagaatctgagcaaattgtcctgataggatcaaagacaaatggaaagttcctagccagcagccacccccgcccagccaacacctcc

SEQ ID NO: 144632 - DNA, 75 bp, Homo sapiens
gagagacatttgaaatttctacagcaacttggcaaggagtacgagacccaatctagtgcagaagccaaatttgtg

SEQ ID NO: 144633 - DNA, 100 bp, Homo sapiens
cagaagcagattgccaacattgaccgtattacaaagtcctgggaactccaacaagggagcaaatcagagaaatgaacccaaactacacagaatttaaatt

SEQ ID NO: 144634 - DNA, 93 bp, Homo sapiens
agtgacgggtctggagtgcgtgggggaccggctgttggcgggctgaccccgcactacatctacccaccagccatcgtgcagcccagcgtggtg

SEQ ID NO: 144635 - DNA, 98 bp, Homo sapiens
ctcggagctcacggagagccgcctgaggagcggcacagattctctcgggcctagccgtccttggaacccgatattcgggctgggcggttccgcggcct

SEQ ID NO: 144636 - DNA, 99 bp, Homo sapiens
aggaaccaattccggacacataacaagcagcagtgaggacaccaaaggtgtggtcactcacctgtctaccactcccgtgaaatggcagctcgtgccttg

SEQ ID NO: 144637 - DNA, 100 bp, Homo sapiens
aattgactgcttttacagtgagtggagccaaaaacctgtatatcatctccgtgaaggggatcaagggacggctgaacagacttcccgctgctggtgtggg

SEQ ID NO: 144638 - DNA, 99 bp, Homo sapiens
cttgctgtataaccaagggccagagtatcactacctccaccagatgttggggattgggctaatggatactacagacaacagagaaaacttgttgaagag

SEQ ID NO: 144639 - DNA, 90 bp, Homo sapiens
tgaaggtccatattggttatcttcctaacaagcaagtccttggcctcagcaaacttgcgagtgtactaatggtcacttgatgtgcgctgg

SEQ ID NO: 144640 - DNA, 96 bp, Homo sapiens
agcaggtggagcaccctttgctgagtggcctcttataccccggactgcaggtaatctttggtaaatctagctgttcagaattttcaaaggaagcct

SEQ ID NO: 144641 - DNA, 100 bp, Homo sapiens
ggaaaatcatggaagttgattactcagtctctaaaaagctaagccccttcatgaataagttttttccagccagctttccaaatcgacagtaccagctgct

SEQ ID NO: 144642 - DNA, 100 bp, Homo sapiens
aaggggaggcgccgcggactgtcctttcgtggctcactccctttcctctgctgccgctcggtcacgcttggtgaaaaaccttttgaatgtccaaattgtc

SEQ ID NO: 144643 - DNA, 100 bp, Homo sapiens
cgtgcgcgccctcaatgacaagctgtacgaaaagcggaaggtggcagcgctggagatcgagaaggcgtctctggccgagcctctttttgtggaaaacgac

SEQ ID NO: 144644 - DNA, 75 bp, Homo sapiens
gaataagtgttttaagaaagtggacaaagagaggagtcagataacgaaggaggcccaacttcattcaataaggag

SEQ ID NO: 144645 - DNA, 100 bp, Homo sapiens
gaccgtgatggatgtcgtcgaatattttactgaggctggattcccggagcaggcgacagctttccaagagcaggatttctctgcctcttccaaacttttc

SEQ ID NO: 144646 - DNA, 90 bp, Homo sapiens
gaagagcatctcgcagaagaaactcaagctggacatcgacaagagctggaagagaaagccaatacccacctcctcttgggcatgtgctta

SEQ ID NO: 144647 - DNA, 50 bp, Homo sapiens
tgaagcaaggcccaatgacccaggcgttgattatggaagattcccacaag

SEQ ID NO: 144648 - DNA, 100 bp, Homo sapiens
gtgcccttcaaggtcagaaaaactcggcaaggtgctggagaatctggtaaaagcaccattgtgaagcagatgaggatcctgcatgttaatgggtttaatg

SEQ ID NO: 144649 - DNA, 74 bp, Homo sapiens
aagaagaccacacactgggaaacatcattaaatcaaatgcgtgtactgccggaagcggatgaagaaggtgtcag

SEQ ID NO: 144650 - DNA, 98 bp, Homo sapiens
ttccagcagcatggacacaagaagcatagcacatctccctaacacttcctgccaccttccgaggcaggaacagcacccggacggactacgagtaccag

SEQ ID NO: 144651 - DNA, 90 bp, Homo sapiens
cggctccgtggggccgtcttcccggcgagtccgcgacggtcgccgcccacggcgaggtcatggaggcggagcagaccaagaccaggagcg

SEQ ID NO: 144652 - DNA, 82 bp, Homo sapiens
ctgcggccaattcggtggaacgaggacgcggactgcgaaggcagcccagggccttgctgccgccatgactgaggaatcagag

SEQ ID NO: 144653 - DNA, 75 bp, Homo sapiens
agaaatggggcacactcacagattgtgtggccgctttgtagttcagaatgtttctgcacagaaagatggagaaaa

SEQ ID NO: 144654 - DNA, 75 bp, Homo sapiens
tctcacccaattactctgctcagattgtaaaccatggctgtgtggatacaagctcagcagctccaaggagaagcc

SEQ ID NO: 144655 - DNA, 75 bp, Homo sapiens
ggagccgaggcgcaggtggcgctgggttttaaaatcaaagatgggaaaatcggagaaaattgcccttccccatgg

SEQ ID NO: 144656 - DNA, 75 bp, Homo sapiens
cgggatcctgtctggagagaagcagcggatcagcagagaccctctttcccagctgcccgctcctcagcacccgaa

SEQ ID NO: 144657 - DNA, 96 bp, Homo sapiens
tcaaacattcgtctcggaaaccccgcctcttacagtcacgaggcagctgctcccaaccccagaacctttgctgtcttgggacggatcaccgctgca

SEQ ID NO: 144658 - DNA, 50 bp, Homo sapiens
tttttccaaatattcatctgtacaggttctgccggagacttccatttggc

SEQ ID NO: 144659 - DNA, 90 bp, Homo sapiens
cgcagggctgcgggactacaatcttcgcatgaaatggaagagagggtggtgcggatagcttgaggaaggcccgatgagagaaagggaaag

SEQ ID NO: 144660 - DNA, 74 bp, Homo sapiens
cgcgggagttcgaggccctgcggagctgcttcgccgctgcgctccctgtgctgtcaggaatctacaggacttgg

SEQ ID NO: 144661 - DNA, 76 bp, Homo sapiens
cagaagtgaaatacaggctgaacaggacagaaaggaacagctttctcaagttctcgatgccatgtttgaaaggata

SEQ ID NO: 144662 - DNA, 90 bp, Homo sapiens
aaccgggccaagcccaccacggtgcgccggcccagcgccgcggccaaaccctcagacactcgcctatggggacatgaaccacgagtggat

SEQ ID NO: 144663 - DNA, 88 bp, Homo sapiens
ttaattttagggtcctttatatagaagggagagtaggctctacttgaacctggtcctcggcaatgtgaacgtgaccctcctcagcaac

SEQ ID NO: 144664 - DNA, 100 bp, Homo sapiens
taagaaaggaatgaacatgtatttaaccaagttccaacaaaagaatgctgccgcaggtccacgctgcttttatgagctgtaacactcaccgcgaagatct

SEQ ID NO: 144665 - DNA, 75 bp, Homo sapiens
acagaccacagtggaccacttctggggtgctgacgtacagaaaggcaaatattgggatactccattacatgctgc

SEQ ID NO: 144666 - DNA, 83 bp, Homo sapiens
ctgggatcccggccaccagcaattgtccgcaccgaacaagatttgtgatgaaatggagcctggaacaaactcttttcgggtag

SEQ ID NO: 144667 - DNA, 100 bp, Homo sapiens
agctgctagccaggaacatggactgaagtatccagcgctcattgggaatttagttaagggagagctggtgacggcctccaaggccatcattgaaaaggag

SEQ ID NO: 144668 - DNA, 73 bp, Homo sapiens
ctattcttcttatggccagagccagaacagttccacttccaaacatgagttccaggccgagacaaagaagctt

SEQ ID NO: 144669 - DNA, 75 bp, Homo sapiens
tgatccggaggaggattcgcagttcaacatcaaggtgctgggcgtcctcttctttgccatagcctgcttcttata

SEQ ID NO: 144670 - DNA, 98 bp, Homo sapiens
tgaacaggttaatctgttggattctaatgcagttcatcacatcattcatgattttcagggaactcttgcagcagacaagaatgagattttgttttctg

SEQ ID NO: 144671 - DNA, 50 bp, Homo sapiens
cgtctacactgagtcggaggcgaagctgggccccaacgtctccatcggga

SEQ ID NO: 144672 - DNA, 90 bp, Homo sapiens
cgccatagtatccacttcatcattaagagggcagcaggatgggtgtggaagcagtgatggcacttttggaggggaccccagataccccag

SEQ ID NO: 144673 - DNA, 52 bp, Homo sapiens
tcttcataggcacctggaacatgggtaacgccccccctcccaagaagatcac

SEQ ID NO: 144674 - DNA, 104 bp, Homo sapiens
ggattccggcgggaactcgactcttggcgccaccgcctcatgcactgtgtaggattttttatcaagcagaaatgcatcgaacaacgagaatcaagatcactgag

SEQ ID NO: 144675 - DNA, 90 bp, Homo sapiens
ggtgatggaagcaggtggaattatgccctgttggttccaatgctgggattggctgcttttcttcctctgtgacgagggtgcaggtatctc

SEQ ID NO: 144676 - DNA, 82 bp, Homo sapiens
aaaggacacacagggattttgaaaatgctgcacatcccttaatagtcatctacatagagtttatatcccctgtatctatgtg

SEQ ID NO: 144677 - DNA, 100 bp, Homo sapiens
cttcttgatctgtttcttgatatggaagcagctacagggcaggaggtcgacaaagatgctgaattagtggcccaatggaactattgtactctaagtcagg

SEQ ID NO: 144678 - DNA, 75 bp, Homo sapiens
cgaccagtgcctggaggagaacaaccaggaggaattgaatgatctggcacgggaccctccagcacagtgttcagc

SEQ ID NO: 144679 - DNA, 73 bp, Homo sapiens
caaatgcatgccaacattccagttttttaagaagggacaaaaggccactcgctctggtgggaccctcgtgctt

SEQ ID NO: 144680 - DNA, 101 bp, Homo sapiens
ggacggccggactccagcaccttggcccggcccgcgaacgctgagcacgcgcggaaaccctttaaagatttggaagtcaaaccagaaacttcaggctctac

SEQ ID NO: 144681 - DNA, 75 bp, Homo sapiens
aaggattccaagtaactcttatttggcgaaggaggtggaggagaccatcgagggcatgctcctcaggctggaaga

SEQ ID NO: 144682 - DNA, 90 bp, Homo sapiens
aagtccacaggaggcccccctgttgctttggctgattgcaattctggcccaactcaaccctctctttggaccgcaattgaaaaatgaaac

SEQ ID NO: 144683 - DNA, 75 bp, Homo sapiens
gagcctggagggcaaagcgtggtgcgagcaggtcttcatctgcggcccctcccctcactggctcttggtgaccgg

SEQ ID NO: 144684 - DNA, 75 bp, Homo sapiens
ctcctgaagaggaaggagcggtgtcctcttaagaaaatgttccagtctcatcagattttccatgtcctggtggtg

SEQ ID NO: 144685 - DNA, 51 bp, Homo sapiens
ggggagcggcgcggcggcgcgggagagctgaagaagcaggtggagagtgcc

SEQ ID NO: 144686 - DNA, 90 bp, Homo sapiens
gtctgagactcctgctcagtgtagcattaaggtagaatggaagaatctcacttcaattctaacccgtacttctggccttctatccccaca

SEQ ID NO: 144687 - DNA, 85 bp, Homo sapiens
cggcgggcggcgacggcggcaaatctaagaaatttgtttgacatctacaggaaggtgcccaaggaccttacgcagccaacgtaca

SEQ ID NO: 144688 - DNA, 89 bp, Homo sapiens
gttttacatacataacatgggaattgtgcaccgagatctgaagcttagcagtgtctgcaaaaacgaatcttttcctacaacctgttaac

SEQ ID NO: 144689 - DNA, 90 bp, Homo sapiens
ccttagctgtgctcgcgctactctctctttctggcctggaggctatccagccaacacagtcactcctggcggcaaaccaaacaaaaccag

SEQ ID NO: 144690 - DNA, 90 bp, Homo sapiens
aatgaacagccaggcctctgtggcctaagtaacttgggaaatacgtgtttcatgaactcagctattcagaaaccactcaagaaggttatt

SEQ ID NO: 144691 - DNA, 100 bp, Homo sapiens
atagaacagcccttcagaaagtgaagaagtctgtaaaagcaatatataattctggtcaagcttgggcaatggtagatggtggttcaaatgtgaaagcccg

SEQ ID NO: 144692 - DNA, 75 bp, Homo sapiens
acctggaaaacaacccagctctggagaacagaatggggaaatggagagagaacctgaaagagccccaaactcgag

SEQ ID NO: 144693 - DNA, 75 bp, Homo sapiens
ggtggagaaggcttgggctcgcgccgctgaagggttcatagtggcgtcatgcacgcagactcctgcaagttcccc

SEQ ID NO: 144694 - DNA, 96 bp, Homo sapiens
cgacaaagtgcagctggccatgcagacctacgagatggagccaaggcaaagagggaccactgtgctcatggacccatcgctgccttccaaggacca

SEQ ID NO: 144695 - DNA, 50 bp, Homo sapiens
atgaaggtacacccaatagagaggcagtcatggatcaggtaatgcagttt

SEQ ID NO: 144696 - DNA, 101 bp, Homo sapiens
gtacacacaggagagctggctgcagtaaaaatcattaaattggagcctgaatgtatgacaacatgtccacaatggtgtacataaaggaagacaagttggag

SEQ ID NO: 144697 - DNA, 100 bp, Homo sapiens
aggccagggacctgtgaccatggaagcagttttgcgtttggctccctaatatctgctgtcgatccagtggccactattgccattttcaatgcacttcatg

SEQ ID NO: 144698 - DNA, 74 bp, Homo sapiens
ttccgtcacctccgctcccccgatcctattcccagtcgtctgtccccgccctactccggaccgccccaaagact

SEQ ID NO: 144699 - DNA, 98 bp, Homo sapiens
tgtgcaggcctgctcctccgtttgcaagtttcatgatcaacatgggagactcccacgtggacaccagctccaccgtgtccgaggcggtggccgaagaa

SEQ ID NO: 144700 - DNA, 82 bp, Homo sapiens
cggggcgggcgccgcgggacctctccgggccatgggacacctgctccacttcaccttttgccatgagtaaaagctccctgag

SEQ ID NO: 144701 - DNA, 115 bp, Homo sapiens
atatactcaactccacagcagctgatgaggtgacagctcatctggcagctgcagacagattatgagggacaagccaagaaactcctggaactgatggaaaacacggatgtgatca

SEQ ID NO: 144702 - DNA, 98 bp, Homo sapiens
gtctgtgtgtgcaccctcggagcagctcctgcatctcatcaaactcggaagtccatgaagacccagggcaggccaccttgagcaccacacaccctgag

SEQ ID NO: 144703 - DNA, 78 bp, Homo sapiens
cgcttggttaaaacctgacacttttaacagaaggcctttgagccctacttagagattttggaagtatactccacaaaa

SEQ ID NO: 144704 - DNA, 101 bp, Homo sapiens
gccggggcggtgattgcagccccagacagccggcgctggctgtggtcggtgctggcggcggcgcttgggctctgtcccagaacagttttcttctgggctcc

SEQ ID NO: 144705 - DNA, 85 bp, Homo sapiens
caagatgaagaaacggggggatttgcagacaggccaggagatatgatggcagaaacggtggacacaagcgaaatggtcaacggcg

SEQ ID NO: 144706 - DNA, 82 bp, Homo sapiens
gcagagctagttcctctccagctcagccgcgtagcttcatggcggctgaagagatgcattggcctgtccctatgaaggccat

SEQ ID NO: 144707 - DNA, 83 bp, Homo sapiens
ttttcaggccacaaatgctttcacaggttgaaatcacaaagattagacacctttttagataggtgttcttcagcaccactgac

SEQ ID NO: 144708 - DNA, 102 bp, Homo sapiens
taatgaagttagattaccaccaccacctgatataaaaaaagaaattagtgaaggagatgaagtagaggacctagatgacatagaagatgaaaatgaacagct

SEQ ID NO: 144709 - DNA, 50 bp, Homo sapiens
ggaagcgagggatggaggttgtgcagaattcagcttagagaactatcaac

SEQ ID NO: 144710 - DNA, 100 bp, Homo sapiens
gttggttcgtgctggactacaatgcaggactgctctcctactacacggttcggctttccagtttggcagcagcactacaaatttcaacttcacaaacaac

SEQ ID NO: 144711 - DNA, 74 bp, Homo sapiens
tagcacctcctcaggccagccacccctgcaggacatgctttcagcatcatcatcaagccgctgtttgagtcgtt

SEQ ID NO: 144712 - DNA, 90 bp, Homo sapiens
cgcttggcctggatgaaggtgcccctcgtcacagtaatctaagttggcaggtgaggggccgtgagacttatgaaatgctgttgaagatca

SEQ ID NO: 144713 - DNA, 50 bp, Homo sapiens
gtggattatggatcagatccaaatcagctccagcaggaggaaatggtgca

SEQ ID NO: 144714 - DNA, 87 bp, Homo sapiens
cctgcagggacagtatggctgagggtcaggtgtgctgccagtttggagacttgaaggaggacaaagtgacgcgtcatgatggagcca

SEQ ID NO: 144715 - DNA, 83 bp, Homo sapiens
tccgcagacagaagtggggagaagcggagcttctcagatgaccaagatggtgctgcagatggtgctgaggatggagaacccac

SEQ ID NO: 144716 - DNA, 100 bp, Homo sapiens
actgcaagccaaaggttcatagagctgggagcagagattaaaagagttcggcgaggaactccagaatacaaggcccactattccacagggaaggtcagcg

SEQ ID NO: 144717 - DNA, 50 bp, Homo sapiens
gctgttactaaagcctgcctttccagaccttctctgatggatgacctctg

SEQ ID NO: 144718 - DNA, 123 bp, Homo sapiens
ctgagttccgtgtgcagttccaggacatgtgtgcaaccattggcgtggatccgctggccttgtgtttcctgtaacaaatcgttcaagaaactctggtcccttcatgaacatatcaagatcgtc

SEQ ID NO: 144719 - DNA, 100 bp, Homo sapiens
cccagacgggccggcccagagctcccgggtcgtctttcgtgtggccgcgagaacaacgactatcgtctattccacaagatgagtaacagccaccctcttc

SEQ ID NO: 144720 - DNA, 100 bp, Homo sapiens
cgaagaacagctgtggaaagaagttgcaaaacactggcccgagtgattgatgtatctaatgggaaagttcatgttgctgaaagctgtttggaagaaacag

SEQ ID NO: 144721 - DNA, 90 bp, Homo sapiens
gttcgagcagatcgacaagtccgggagctgggcggccatttaccaggaaagaactggcgggggcacacagaaccaataagccatgtggga

SEQ ID NO: 144722 - DNA, 74 bp, Homo sapiens
ggcagtctgttgaggcatctggacaccacacacatcatcagtctgtgtgaaatatgagttggcgaggaagatcg

SEQ ID NO: 144723 - DNA, 120 bp, Homo sapiens
aggagaggaggatagcagcagaagagaagaagaagcaggatgaactgaaacggattgccagagaattggcagaaggctcaccagctggattccctcctgggggcttcattcccaaaacgg

SEQ ID NO: 144724 - DNA, 82 bp, Homo sapiens
gcctggcacgatcgcccgtcggggacctggagccccggacagagagggttaaccccaaagattggctttccttggagtgaaa

SEQ ID NO: 144725 - DNA, 83 bp, Homo sapiens
tgagagtcggcccaaaaagcggcggccgttggaggtggctgcggcagctgtacttggaccatgagactgtttcagccactttc

SEQ ID NO: 144726 - DNA, 87 bp, Homo sapiens
cccggcgagaggcggcgccgctcccaagatgtcgcagacggccatgtccgaaacctacgggcaccaagggaaaggacccgacgtccg

SEQ ID NO: 144727 - DNA, 48 bp, Homo sapiens
aagactcttccagattggaaaagcatactaaataagcttactcctgaa

SEQ ID NO: 144728 - DNA, 75 bp, Homo sapiens
aacagaagaagagcttgagtttggggccttctgcagctgaaatcaatcaaggtcttgactcagatgaagaactgg

SEQ ID NO: 144729 - DNA, 75 bp, Homo sapiens
cgaggcctacgtcctggcctgcactgatcagcagtaccttgttcccaaggtgcaaattgagcatgacccagaatt

SEQ ID NO: 144730 - DNA, 98 bp, Homo sapiens
tgtatccaccatgtactacctctggatgtattggctctaccagtgcacctggacagggaggaatcctggctcagcgggagtttgacaggcgattctcc

SEQ ID NO: 144731 - DNA, 122 bp, Homo sapiens
ctcgtgccgttacggccatcacggcggccgcagtggcgtcctggagccctcctcaggtgctggagaatctggtaaaagcaccattgtgaagcagatgaggatcctgcatgttaatgggttta

SEQ ID NO: 144732 - DNA, 74 bp, Homo sapiens
aggtgctgcgcaagggctgtctccgcttccagacgttggacctctcgaacaaccagctgagcgagatccctgca

SEQ ID NO: 144733 - DNA, 100 bp, Homo sapiens
ctccaaaaaagacaggggagtattaaagcacgcctctgcagacgtcgaaaagatgatactcgggaacaagtgtgatgtgaatgacaagagacaagtttcc

SEQ ID NO: 144734 - DNA, 75 bp, Homo sapiens
tcaccttggtgctacttcttgctatgttggagacaatactggtggagagattcaaccagttagcgtgaaagttgg

SEQ ID NO: 144735 - DNA, 100 bp, Homo sapiens
ccatgagctggggcaccgagctctgggtatgtgaggagcagcgctgtgaggaggaagtcttccccctggccatgaactacctggatcgctacctgtcttg

SEQ ID NO: 144736 - DNA, 75 bp, Homo sapiens
ttacttctcctaccaatacatcacagaatactttatctccaagcctttgttacctcctgggcctttagaaatgac

SEQ ID NO: 144737 - DNA, 51 bp, Homo sapiens
ctacagaaacctggtctccctaggatggtgccatgacaatggtgtgaacta

SEQ ID NO: 144738 - DNA, 100 bp, Homo sapiens
ggggtctttaggatttgcagctccaggaagcgagatgtcgaagccgccacccaaaccagtcaaaccaggagtacgagagggcctccaaagtggaccagtt

SEQ ID NO: 144739 - DNA, 74 bp, Homo sapiens
acgcacactggagaaaagccttttcagtgtgatagctggggtttcaccatgttggccagactggactcgagttc

SEQ ID NO: 144740 - DNA, 76 bp, Homo sapiens
attcacttgcagaccaatgccgagaaaggcaccatcaccatccagatggtgggcagtggtggtgctggctgcgttc

SEQ ID NO: 144741 - DNA, 50 bp, Homo sapiens
caagaaagccttattgatctattactccacaggatccgctgaacatagga

SEQ ID NO: 144742 - DNA, 74 bp, Homo sapiens
tgatcatgcagacatctccaactgtgggaactctttccagcttgtgtctgcaatggcaccagcatgatatcatt

SEQ ID NO: 144743 - DNA, 100 bp, Homo sapiens
gtcctgggagccgcctccgtcgccgccgtcagagccgccctatcagggcgaactttctgaccaagtatacaactacccagagggcctaggagaagtgctg

SEQ ID NO: 144744 - DNA, 100 bp, Homo sapiens
cagctatgaaactcaagtcagactaactgcagatggttgctgtactttgccaacaagaaatggactcagaactcaaggaagaaattcctgtgcatgagga

SEQ ID NO: 144745 - DNA, 51 bp, Homo sapiens
gagaaggaagaggtgtttgaaaagggaaactgaacagccaagactcctata

SEQ ID NO: 144746 - DNA, 75 bp, Homo sapiens
gcggtgtctacagtgttctcgacttcgtcgctgtcttactactttgaccgcgatgatgtggctttgaagaacttt

SEQ ID NO: 144747 - DNA, 100 bp, Homo sapiens
ctggtgtaccaggcgaagctggccgagcaggctgagcgatacgacgagacagggcagggcattgttcatgcactgaccgacctcagcagccccggcatga

SEQ ID NO: 144748 - DNA, 100 bp, Homo sapiens
tcgccgtccgagtcgtttattggtactccaaagattcaggtttactcacgtcatccagcagagaatggaaagtcaaatttcctgaattgctatgtgtctg

SEQ ID NO: 144749 - DNA, 100 bp, Homo sapiens
gctgggcgttcatctaccacgctttcgtggtgtgctgggtgcatcatgtaactggcatgtgggtgtaccctttcctggaacacattggcccaggagccag

SEQ ID NO: 144750 - DNA, 51 bp, Homo sapiens
tcctttttctccatcttcacctgggatcataaaaggattcctctgtactag

SEQ ID NO: 144751 - DNA, 97 bp, Homo sapiens
ccgctgtgtccacagcgttcaaggccaggacgactggaatgggaccaggccgtcgctgaaggcccctcctgctaggccagtgaagggagcatacaga

SEQ ID NO: 144752 - DNA, 100 bp, Homo sapiens
tgctggagtgcttccatcggcgcactggacagaagtgtgccctgaaggctagcatcccattctctgtggttggatccaatcagttgattgaagccaaagg

SEQ ID NO: 144753 - DNA, 100 bp, Homo sapiens
aacttaaaagcagcgtgcctggttacagctgtttccacgtgcggtgctcgtcgggagtgatcacctaccctacagaccatggcaaaagttataaccaccg

SEQ ID NO: 144754 - DNA, 98 bp, Homo sapiens
acgagggccagctgacggagatggtgcagaagatggaggagggagtgcatccgccccaacccttttccccctcgtctcctgtgagaattccccgtcgg

SEQ ID NO: 144755 - DNA, 51 bp, Homo sapiens
tgctccagtactcaagggaacggtgatgatgatgatgattttgatgatgag

SEQ ID NO: 144756 - DNA, 100 bp, Homo sapiens
tgtctctgcagacagatgaagatgaacacagtattgaaatgcatttgccttatacagctaaagccatggaaaggaattgaggaagctcagataggaaaac

SEQ ID NO: 144757 - DNA, 99 bp, Homo sapiens
gagcttcatctgcgatggacagaataactgtcaagacaacagtgatgaggaaagctgtgaaagttctcaagacccgagagggactcacttatgggaatt

SEQ ID NO: 144758 - DNA, 100 bp, Homo sapiens
aaggccggcagagccaaggctcagtcatgagaactctccagggcacaccgtattcagctctgagcggtctttgctagtgaggccaaggagccaccctgag

SEQ ID NO: 144759 - DNA, 87 bp, Homo sapiens
atcagagagtgcttcgagatggcagatgttctggctacacaggaaccctggattgcttgttacaggcaacagctgtttaccaagcga

SEQ ID NO: 144760 - DNA, 89 bp, Homo sapiens
cacccaaaaaagcaaggccttctgagactggatctgatgattgcctaagtgtctagagagctgagtgggttgcctcggatcggccaggc

SEQ ID NO: 144761 - DNA, 98 bp, Homo sapiens
tgctgttagaaggttctggtcttgcactaagaggtgcagtactgctgtgcttggcaagtggattgatgcttccatcttgtttgtggtttcgtggtact

SEQ ID NO: 144762 - DNA, 80 bp, Homo sapiens
aattgctgacccaagaggaaacactctaggacggggaacgacaattacggtctgttcctggtttcccagatgcataaagg

SEQ ID NO: 144763 - DNA, 76 bp, Homo sapiens
cctcgagcggcctctgttagaggaagaagcatccctggggctgcggagaagggaagtcctcgctggggatggccct

SEQ ID NO: 144764 - DNA, 75 bp, Homo sapiens
aggcggatcttagatggaagtcttggctttgctgcagggtgaagatagtgatccggggagacaggaacacgggca

SEQ ID NO: 144765 - DNA, 75 bp, Homo sapiens
ccttggggacaagctgcgcatgatcgtcatgggacacagaagcccagcccctgtggaggtgaatctgaagctccg

SEQ ID NO: 144766 - DNA, 87 bp, Homo sapiens
aatgataatacaccttttggataaggaacacatataactgtggtttcccattcaagacctgtgggccactgcttagaagctgcagca

SEQ ID NO: 144767 - DNA, 75 bp, Homo sapiens
gtatgaagaacagtcacaggacagatgctgcagttggagaagaaacttgaacgtgaacttgaggatgatgcacga

SEQ ID NO: 144768 - DNA, 96 bp, Homo sapiens
ggccgtggaagcggccaccgactactgtcagcagctgtgccaggtgacagtggatagtggaaacaggagatcgtggatcctccttcaaaaatggag

SEQ ID NO: 144769 - DNA, 82 bp, Homo sapiens
ccgggacagctcgcggcccccgagagctctagccgtcgaggagctgcctggggacggtgagcgagtgctgtgctttcatggg

SEQ ID NO: 144770 - DNA, 75 bp, Homo sapiens
cgccctcctgcagtgaccagtaatggcactttacactcggctcttgtcaggatggtgaagctgttcatcggaaac

SEQ ID NO: 144771 - DNA, 82 bp, Homo sapiens
tacgaagactatggaatgactcccccgacgggtccattgccaagatttgagttctgtgaacctgcatttgttgttggtaatt

SEQ ID NO: 144772 - DNA, 50 bp, Homo sapiens
cacaggccctcgttgcccagatctcaccatggatgatgatatcgccgcgc

SEQ ID NO: 144773 - DNA, 86 bp, Homo sapiens
cacgtcagcctctaccagcctcagctggccaccaggaagtgaaagtacttagcattgatcaaagaaatttcaaattacgatcaatt

SEQ ID NO: 144774 - DNA, 100 bp, Homo sapiens
catcatcatgaaggacgtgcccgactggaaggccatgtcaaaggacgccctgaatctggcgcagatgcaggagcagacgctgcagttggagcaacagtcc

SEQ ID NO: 144775 - DNA, 74 bp, Homo sapiens
gctcaagttgctactcgggacgctgcacctcccgcgccgcacggtggacgaggcttcctgtgtccagtaccggt

SEQ ID NO: 144776 - DNA, 90 bp, Homo sapiens
ctcccctttctcgcccagcgcccccaggccgctcccggggctcacgattggagctggagtgagccttccaggaattttggctgccaaatg

SEQ ID NO: 144777 - DNA, 74 bp, Homo sapiens
ctgaccctacatgatgagaggtttgagaagagaatggatcttggagaatgtctgaaagtccatgacctggcttt

SEQ ID NO: 144778 - DNA, 98 bp, Homo sapiens
acggcgacagtggcggcggcgccatggcagggcttgcagattgatatcagtaaatgccattatttagtggatttggacaccatgagagaaacaccccg

SEQ ID NO: 144779 - DNA, 137 bp, Homo sapiens
aaggaattttcagatattttccgacgagcatttgcttcccgagtatttcctccagagattgtggagcagatggataattcgtgtccagtccccggatggagtgaagcggatcacagcaacaaagagagaaacagcag

SEQ ID NO: 144780 - DNA, 100 bp, Homo sapiens
ttggagcgaacaaggaggtgcaggagctgctggagcggggcctactgcagctggatcacaggttctcagtcaacaagcgcatcttcgtggtgggatttgg

SEQ ID NO: 144781 - DNA, 90 bp, Homo sapiens
cagattcgcagtggtcgcttcttctccttgttcccagtgttcacaggctcggccgcgctgattgccgtcgtgcactactgtaacttctgc

SEQ ID NO: 144782 - DNA, 100 bp, Homo sapiens
tttcccactgatgaagaaacggtggcagagattaacgcaacaatgagtggctctctaaatacgtacagattctgcgataatgtgtggacttttgtactga

SEQ ID NO: 144783 - DNA, 100 bp, Homo sapiens
attagaaaacaaagtgtcaattatttcaagaattaccatagtttaaaattggtggtgaatggtggacatggatcgattataaccgcttccaggagctcat

SEQ ID NO: 144784 - DNA, 83 bp, Homo sapiens
cccaaattgtagctgacgaagcattttgcaacgcagttcggagttattatgaggaagaggatcacctagcccgggtagaagag

SEQ ID NO: 144785 - DNA, 75 bp, Homo sapiens
cagatcaaccaccaaagtgggaaacattgaaatcaaggtccggtttatcactaaaatatggcatcctaatattag

SEQ ID NO: 144786 - DNA, 73 bp, Homo sapiens
aaaggaagcaaatgagctgatggaagatctgtttgaaactggaagaaggagaaagggccaacccctgaagaag

SEQ ID NO: 144787 - DNA, 100 bp, Homo sapiens
cagaaaaatacaaagttggaagcaataccaaacagtggcatggaccacacccagcggaaggatatcatgataacacattttgaaccttccatctcctttg

SEQ ID NO: 144788 - DNA, 74 bp, Homo sapiens
tcagaagagagaatatagtaaaaatacgcagtacagtcccagattctgaaggaagatttccattaggtaatttg

SEQ ID NO: 144789 - DNA, 51 bp, Homo sapiens
tgaacactggcctcatatttgcacgaaagcataaaggatgttattggcaga

SEQ ID NO: 144790 - DNA, 75 bp, Homo sapiens
ggccagcctgagcaagcggaggacctacgccggcctggatgtgaagttcatttccaatccgccctccatggtggc

SEQ ID NO: 144791 - DNA, 75 bp, Homo sapiens
tcaagcagttcgcactacagcgggagcaggagctggagaaggtgttgagctggcgagttcgcggaggctactatt

SEQ ID NO: 144792 - DNA, 101 bp, Homo sapiens
ttatcttactgctttgaacaggaggattagaagaaggaatcatatatggctcacatgtttatgttctgacttcgtattagaatcactgagcttcagctcaa

SEQ ID NO: 144793 - DNA, 75 bp, Homo sapiens
ctctctagtagctgggactacagatgaatcagaactccttacggttcctgatggttggaaggaaccagctttttc

SEQ ID NO: 144794 - DNA, 101 bp, Homo sapiens
tctattttccctcctcaaactgactttgcagccacggagagccatatccagaagacccagcagtttataaaccactctcccaggaagagctgcaaaggata

SEQ ID NO: 144795 - DNA, 82 bp, Homo sapiens
tggactcatggtgctgcatgcagagatgctgtggttcggggggtgctcgcaattctgtggtgttcttggtcacacatttatg

SEQ ID NO: 144796 - DNA, 100 bp, Homo sapiens
ctgggttccccgttcgacgtgcccgtggacatcaccccggacaggctgcagctcgtgtgcaacgcgctactggcccagagagtgcctgcctggaatgccc

SEQ ID NO: 144797 - DNA, 82 bp, Homo sapiens
aaaaaggaagaggagaaggaaattgtcccgaatccctgcaggtgctggaggatgaggcccgggagcagggccggggcatcca

SEQ ID NO: 144798 - DNA, 98 bp, Homo sapiens
ggaaaatggcggtgtctacagtgttctcgacttcgtcgctggttttataggatcacattgacaaaagtaccatggagttttatgagtcagcatatttt

SEQ ID NO: 144799 - DNA, 95 bp, Homo sapiens
cccttcccctggatacggtcactttctacaagccccatggctgggggttatggagtgatgggtgacgatggttctattgattatactgttcacga

SEQ ID NO: 144800 - DNA, 82 bp, Homo sapiens
gtggctccatggacacagacctgctgtgtgtgcttctgcgccccaggtctcctctgagcctccggcctccataagacccaaa

SEQ ID NO: 144801 - DNA, 101 bp, Homo sapiens
cgcaggcccacggtagcgcagccgctctgagggaatcaatttcgagcaaattacttcttacaaccagagctcatgccttcacaactggccttcagagatct

SEQ ID NO: 144802 - DNA, 100 bp, Homo sapiens
tgtaccctgtctaccagcctgtggaatggaagttggatacactttgtgacttgtacgagacactgaccattacacaggctgttatttttctcaatacgag

SEQ ID NO: 144803 - DNA, 83 bp, Homo sapiens
ggcggcgcggcccagctcgttccaggtgtcgtgaaaactacccctaaaagccaaaatgggaaaggaaaagactcatatcaaca

SEQ ID NO: 144804 - DNA, 87 bp, Homo sapiens
gagaaggggggcatcccaggcaaggcagctaccaagcacaggtgtgaagtgctggtcccaaaggcgataacatctatgaatggagat

SEQ ID NO: 144805 - DNA, 53 bp, Homo sapiens
gagcgagggcgagcccgtgaccgccgcagcctgtgaacttatgaatcaaggca

SEQ ID NO: 144806 - DNA, 90 bp, Homo sapiens
gccagttccgtctgtgtgttcgagtggacaaaatggcgaagatcgccaagactcacgaaggtgagaccaaggaccaggtagctaactcag

SEQ ID NO: 144807 - DNA, 98 bp, Homo sapiens
tgtgatccctcaagactggtccacggagtgtatgaccacaaacagccatcaagcaacctttcccctggatctcacaaaaactcgactccaaatgcaag

SEQ ID NO: 144808 - DNA, 100 bp, Homo sapiens
gtggatgagggcgcctgcagatcccggctagggcacggaccgcctaggccgagggatgtcagagacgcccatgctcccatcctccctcatgctgctgaac

SEQ ID NO: 144809 - DNA, 101 bp, Homo sapiens
aaagctaaaagaatggccaagttatttgcaaaacagagatccagggatgcagtggaaactaatgagaagaggtctctctgaagaggctatcatggagctga

SEQ ID NO: 144810 - DNA, 100 bp, Homo sapiens
cagatggcagccagtcagtggtggaggagagctggaggtgtttcagaaagatggggaacgaaaaattcagagtcgacagcaacttccagtgggaacaacc

SEQ ID NO: 144811 - DNA, 90 bp, Homo sapiens
gaagtacgcaagcccacggggagcagagcagcaactcacccagcacacaaaatggatctcttacgccccgagccatgatgaagactttgt

SEQ ID NO: 144812 - DNA, 100 bp, Homo sapiens
gtgagcgagcagaggcttaaggtcttcagcggggcgctccaggaggcactcacagcaatggctgccatccggaagaaactggtgattgttggtgatggag

SEQ ID NO: 144813 - DNA, 98 bp, Homo sapiens
gcgtaccaggacagcgagaggaaggcgcacaggcagaagagcagcagcgtcaggaaggtgcagtggctactggggaagacccaaccagtgtggctatt

SEQ ID NO: 144814 - DNA, 83 bp, Homo sapiens
gaatcctgcggcagaagccgagttcaacatcctcctggccaccgactcctacaaggcctccggtgtggctgtctctgatggtg

SEQ ID NO: 144815 - DNA, 97 bp, Homo sapiens
cgttcttgcctcaggccagtcgcctccaggccaagagggatccttcacccgtgtctgcaaagcttcgaggcgcaccaggacgaggcagtgagcgtga

SEQ ID NO: 144816 - DNA, 90 bp, Homo sapiens
cgaacgatccagaatggggatatgtggctgaccccgcactacatctacccaccagccatcgtgcagcccagcgtggtgatcccagccgcc

SEQ ID NO: 144817 - DNA, 74 bp, Homo sapiens
atgcaaatagataatttcatgtcacatgataaacaggtgtttgagaagtcccccctgcgggtgaagaacttcgg

SEQ ID NO: 144818 - DNA, 90 bp, Homo sapiens
cgtggactccctttaatccagtgactgtcaggtcgatcatatatgaagatgtgtgtgtctttaagtgctcagtgtcccgagagacagagt

SEQ ID NO: 144819 - DNA, 90 bp, Homo sapiens
gaagaatttgttcacataaacagattggctgcggaatttctcggcacctacctgtagtatggggcacttggtttggttgcagagtaagaa

SEQ ID NO: 144820 - DNA, 74 bp, Homo sapiens
atcgccgtgttatccttgagtaaagagcacgaacttccaggagccggtgcagccgctgacacagcagcaggtgg

SEQ ID NO: 144821 - DNA, 95 bp, Homo sapiens
gacagagaaaacctggaaggactttacgataaaacgtgtcaattccttagcattggccgaagagttaagaatccaagaaaacaggggcccgaaac

SEQ ID NO: 144822 - DNA, 100 bp, Homo sapiens
gttggtgcttttccctttggctttttcaccaccgtcttcaatgcccatgagcctttccgccggggtacaggtgtggatgtggaagcagccaagcgggcag

SEQ ID NO: 144823 - DNA, 100 bp, Homo sapiens
ccgatatcaacgaatggagcctcatcacctccagtccacatccaggagtgggaatagctttgcgaaaaatgggcgcaatggccaagccagattgtatcat

SEQ ID NO: 144824 - DNA, 50 bp, Homo sapiens
cagggctgcgcctctctgcagcaggagcttgtggtgctttgccacctcca

SEQ ID NO: 144825 - DNA, 51 bp, Homo sapiens
cacaccctgtctgagtgctactttaaattttagagacaggatttcaccatg

SEQ ID NO: 144826 - DNA, 75 bp, Homo sapiens
acccgcctgctgagtggacccgggtgagagaagatgactgaggaggaggtggagaccgttctggcaggacacgag

SEQ ID NO: 144827 - DNA, 75 bp, Homo sapiens
ttttagtgccggactccgggccgcaggcagtcccgcggcagcaggatcacagggacaagaatccttcaagaaaca

SEQ ID NO: 144828 - DNA, 96 bp, Homo sapiens
gaaagatgtgtcatatcatgtgccctctatgaggagttttggattaaggtacatgggacagtaggagaaccttggtggatttgggtagaagatcct

SEQ ID NO: 144829 - DNA, 98 bp, Homo sapiens
aaggagtactcccagaacctcacctcagagcccaccctcctgcagcacagggtggaggttccagcaacagatagaaatgctttaagttcactctgggg

SEQ ID NO: 144830 - DNA, 100 bp, Homo sapiens
accaagctggggcttccaaagctgggaatcctattttttattatgctgcacgggggggattcccgaagtcttccgttttctgagaatgtgagtgctgttc

SEQ ID NO: 144831 - DNA, 83 bp, Homo sapiens
ccgcggatctcaccgccgctcaggattgtctaaagccccaggaaaaatggtggaaaattcaccgtcgccattgccagaaagag

SEQ ID NO: 144832 - DNA, 75 bp, Homo sapiens
tctttcactgtgatgcctggacagacacttgccctgataccccagaatcttccatgctccgtcacactgcagcca

SEQ ID NO: 144833 - DNA, 51 bp, Homo sapiens
ccgcagtgaccggactcgggggagatgtggcaccatttattgagtttctga

SEQ ID NO: 144834 - DNA, 80 bp, Homo sapiens
ccagacgaagacagtccctggatcaccgacagcacagacagaatccctgctaccatcctccacaagcaacccagagaagt

SEQ ID NO: 144835 - DNA, 100 bp, Homo sapiens
gcagggcggcctgcagctgggccgcggccgaggaggcagcgcgacctccgcacggatattaatgcacacgcctgtgttactggtaaacccatcagccaag

SEQ ID NO: 144836 - DNA, 87 bp, Homo sapiens
agctgaggaaccagatatcttgaaaagctgccagaaagtgtaaacaggaacatcgataagtagtgtaaaaacttgcacaatgaaatc

SEQ ID NO: 144837 - DNA, 98 bp, Homo sapiens
acgccagtgcctccctttacctactaatgaggcaaaactttgagattgggaatgtggcgcctggactctcgccctcagagggaggcccgtcccacggt

SEQ ID NO: 144838 - DNA, 96 bp, Homo sapiens
gcgccatgggccagtgcggcatcacctcctccaagaccgtgctggtctttctcaacctcatcttctggggccctgtggccgagtgtgtccagccca

SEQ ID NO: 144839 - DNA, 74 bp, Homo sapiens
gcagcaccatcgagccagaagcagtatttgtcctgagaaccatggagtctggcagtaccgccgccagtgaggag

SEQ ID NO: 144840 - DNA, 126 bp, Homo sapiens
cttggatcttggaggtggtgtaaaggaagctcaagtatatcaagcattcaaattgctcacagctgatcctaagaagacataatcccctcagagagtagctctttgtctgacaccaccacctatgat

SEQ ID NO: 144841 - DNA, 98 bp, Homo sapiens
agagatttctgcagtgaagattgctgtaaaaaatttcaggattggtactacaagcttgataaagatgacatggtatacatggaagcatatgataaatt

SEQ ID NO: 144842 - DNA, 83 bp, Homo sapiens
cgacgagcgctgcactaacgcaggatccggctgccgaaggtcctcgccagacaatgcagatcttcgtgaagactctgactggt

SEQ ID NO: 144843 - DNA, 100 bp, Homo sapiens
gcagggttgaccctcagcagagacggctgtgtccccttccctccagtgccccgcggtctcaacccagttaaccggagcggtggtgccccccccgggcacg

SEQ ID NO: 144844 - DNA, 100 bp, Homo sapiens
ccttcatgcccaaatcccggaaactccagcgtgtctccagccgtggtgaaaggtgtagcagtcactcggcctacacccacagcatcgaccttgtgaaccc

SEQ ID NO: 144845 - DNA, 74 bp, Homo sapiens
tcctggtgtggcacgctctcctcctacccgacttaaccaccaccatgtcgagcaaaagaacaaagaccaagacc

SEQ ID NO: 144846 - DNA, 75 bp, Homo sapiens
ctcacacacagttacttgccaagacgattgaagagaatctgataatcggaaccagcagaagatggagatgaaggt

SEQ ID NO: 144847 - DNA, 100 bp, Homo sapiens
ccagcctcgtaccctgccagccacctctcggccatctgcaggagcctcctcaacaagcccaagagtgagatgaccccagaggagctgcagaagcgagagg

SEQ ID NO: 144848 - DNA, 50 bp, Homo sapiens
cggcgccgtcgcgccactcctccgacgttacagtgtttctgccacctctg

SEQ ID NO: 144849 - DNA, 75 bp, Homo sapiens
catcggtttcccttccagccattggaacaggtatatttggcccgaaaggaaggatcatcttttgcttatatttcc

SEQ ID NO: 144850 - DNA, 83 bp, Homo sapiens
aacacctttgccagagactgagacagccgagctgcaagctacagcgactgcagacgatgccccgaattcccaccctgaagaac

SEQ ID NO: 144851 - DNA, 100 bp, Homo sapiens
cggaggacgagctgcgggtgcggcacctggaggaggagaaccgaggttctggctccttggcagcaatggctgtatttgaagataagtttaggccagacat

SEQ ID NO: 144852 - DNA, 75 bp, Homo sapiens
aggccaacagatgagggaagccatttttctgcaatggaattaaatggccaagtatctgatggtataattgcccca

SEQ ID NO: 144853 - DNA, 78 bp, Homo sapiens
gctgaagacagagggctctgatctgtgcgacagagcattctgaaggcaaatcctgtttagacccaggcaaaggttcct

SEQ ID NO: 144854 - DNA, 100 bp, Homo sapiens
ttcagaatgaatctggatcaaagtattataagtgggtcattgacagcggtgctgtttctgactggaacgtgggccggtccccagacccaagagctgtgag

SEQ ID NO: 144855 - DNA, 75 bp, Homo sapiens
gcatcaatccctaccactataagagagtagaaagccctggtgctggagaatctggtaaaagcaccattgtgaagc

SEQ ID NO: 144856 - DNA, 75 bp, Homo sapiens
ccgagtacgaagcgggcgtttgcgaagagacgaggaggagctgagacgctctctgtctgagttggccgaccccaa

SEQ ID NO: 144857 - DNA, 101 bp, Homo sapiens
gctggacctgaaggaggccggtgactttcacttccagccagctgtgaagaagggctgttttgctgcagcttctgaagtgttaaagcacttgaaggaacgat

SEQ ID NO: 144858 - DNA, 89 bp, Homo sapiens
gcagtggaggccacatcaactcggcgccttgggaaccgctcgagcctaccaggtggtgaaaactattggcttgagggaagtttggttct

SEQ ID NO: 144859 - DNA, 96 bp, Homo sapiens
caacaagatgctgactgggacagcgttctgtcatctcagcaaagaatgtgattcgcctttgccagtctcatctcgtgtctgctttgttaagttcca

SEQ ID NO: 144860 - DNA, 51 bp, Homo sapiens
aaatggtggagttggaataaagacatcgctattgcggttccgaggcagtgg

SEQ ID NO: 144861 - DNA, 50 bp, Homo sapiens
cggagcgggcggctgagacaaaggcgacgccctgcagagcccagggagat

SEQ ID NO: 144862 - DNA, 75 bp, Homo sapiens
gaatcctgcaaaaatgtctctctatccatctctcgaagacttgaagggccaagggccccatctcctactaagcct

SEQ ID NO: 144863 - DNA, 83 bp, Homo sapiens
aacccatcctgccgtccttctccactttcgccagcccgtgccgcgagcgcggcctgcaggagacgcaaacatgcagatctttg

SEQ ID NO: 144864 - DNA, 83 bp, Homo sapiens
gattgttccagcagtccataactccaggcttgtaaacatataacataaaaatggcttccaaaagagctctggtcatcctggct

SEQ ID NO: 144865 - DNA, 101 bp, Homo sapiens
ctcagccaccggggcctgccgcgcctgtcctggatcgacaccctctacagcaccggcacagtcttcactaccgtagaagaccttggctccaagatactcct

SEQ ID NO: 144866 - DNA, 97 bp, Homo sapiens
gagttggacatcgggcagcactgccaggtggagcattgccggcagcgagatctcttccgttccctgctggcagttcatcagctggatcagccacatg

SEQ ID NO: 144867 - DNA, 96 bp, Homo sapiens
acccacacccacacgtgttcaatacacctcccacctgtcctcaggcatatcaaagttatgccccgtggtgccctgcttgtcaaaatcttcaaccgg

SEQ ID NO: 144868 - DNA, 100 bp, Homo sapiens
ccgacatggtgattgaagctgtgtttgaggaccttagtcttaagcacagagtgctaaaggaagtagaagcgttcctgagactggcccagacgctgcggca

SEQ ID NO: 144869 - DNA, 90 bp, Homo sapiens
ccccagcacacagaagccgagacgcattaggtggtctcttcagtcagcctacacaagctcctacccagtccaaccagctgataaatactg

SEQ ID NO: 144870 - DNA, 74 bp, Homo sapiens
taaatgggggcctctccagggagtgctctgttcacggctccatcgctgttaaagaaagaatttgactgatgggc

SEQ ID NO: 144871 - DNA, 100 bp, Homo sapiens
ctccactggaaaaaaagatcttgacatatctgaagagatggattaagaatgctttggattaaggattgtggagcacatttcaatcattttaggattgtca

SEQ ID NO: 144872 - DNA, 100 bp, Homo sapiens
ctagaagataatgatgtctcagacattttaaaattactagcattacaggcaatttgtgtatggtgattggtggagccaacctcggtcgtgttggtgtgat

SEQ ID NO: 144873 - DNA, 75 bp, Homo sapiens
gtttggtgccattgtatcagcaactgatccagggactgctgagatgtcctctattcttgaagagcgtattcttgg

SEQ ID NO: 144874 - DNA, 87 bp, Homo sapiens
aaaagaccctgtctcaattgaagaaagagcggcccgccaagctgccccctgtgtgctattctttgatgagctggattcgattgccaa

SEQ ID NO: 144875 - DNA, 88 bp, Homo sapiens
acgccgtggcagcctgaacggagtgtgcgacggattgggaggcttgggaacaatgggccgaggcattgtcatttcttttgcaagggcc

SEQ ID NO: 144876 - DNA, 75 bp, Homo sapiens
atttcccaagagcagcggaaaatgatccagtcacaggtcttcaaagcttcacctttctccaaaggcagatgtgaa

SEQ ID NO: 144877 - DNA, 88 bp, Homo sapiens
agcacgtcttcatcattgtccgagtccacaacccctgcactgataacgtctgttacaggtacagagcatgccagcgcctcagctaatg

SEQ ID NO: 144878 - DNA, 97 bp, Homo sapiens
gcacagcacggtactggagaacacggatggtgctgctagctgaggaggggatagctcctctttcttctgcaggaccagggaaagaggagaaactcct

SEQ ID NO: 144879 - DNA, 101 bp, Homo sapiens
cagaagcgaagtggagagcgccagagtaatggctgtcaataccagcaaatatgcagaaagctatcggatccaaacctatgctgaatatatggggagaaaac

SEQ ID NO: 144880 - DNA, 100 bp, Homo sapiens
tggtgtcacctatcagtaaaagaaacctctgtagaggagcaggatgcaaccgacaggctgtggccggacagctgctgcccagcacatggagcctgcacgc

SEQ ID NO: 144881 - DNA, 87 bp, Homo sapiens
tctacgctctccatcgggcagccagaggcccagcgtctccgatgacactggttggagtccgtgcggctggagtaccgtgcggggctg

SEQ ID NO: 144882 - DNA, 95 bp, Homo sapiens
cagaagtgaaaaatggggagaaggatatccagacagccctaactctcgtggcattatccttcagtggggctattggactgacttttcttatgctg

SEQ ID NO: 144883 - DNA, 100 bp, Homo sapiens
aagaagagaaaattccagccagatggtagaagcgatgagaacctcatctacaatcaatttgtcaccaggagaagtggaagaagaggatgatgatgaaaat

SEQ ID NO: 144884 - DNA, 76 bp, Homo sapiens
ctggactcgccctcctatgtcctgtacagtctgcatgaagaaatcagtgatttttatgaatacatgtctccaagac

SEQ ID NO: 144885 - DNA, 83 bp, Homo sapiens
tgagtagccggtaacaaacgagggttcccgggattggaccgacgcagccatgggtgacggagctgctccccccgttccagaga

SEQ ID NO: 144886 - DNA, 75 bp, Homo sapiens
ggaaaaactgtgggtggtgaacagagagaacagatgtttcagaaagaacaagtggatcctcttcagatgaaattg

SEQ ID NO: 144887 - DNA, 88 bp, Homo sapiens
cgaccggcgccgggagatcctggccaaaccactgagcatattgttaaactagtggaacaacacggcagtgatatctggtggactcttc

SEQ ID NO: 144888 - DNA, 97 bp, Homo sapiens
ggggcgctgtgtgtacatcacccccatggaggccctggcagagcagcctccactccagctctccactggatatcagcatcaaaggccagatgattcg

SEQ ID NO: 144889 - DNA, 122 bp, Homo sapiens
tgatgaagttcgagcactaatatttaagaaagaagatgttaactttcaggtcaatgtgacggtggactacattagaccagccagcccagccacagagacagtgcctgccttttcagagcgta

SEQ ID NO: 144890 - DNA, 74 bp, Homo sapiens
tttattcccagccagtaaaacaagtggcctttacacagggcaggtggttgtgtcaaaccgattggtgacatctc

SEQ ID NO: 144891 - DNA, 83 bp, Homo sapiens
ggatttcagtgtcttttctgcctgctcagttccagttgtcacatccaggatgagaagactgataaaagaagaagctagctgaa

SEQ ID NO: 144892 - DNA, 100 bp, Homo sapiens
gaggaagaagtcaagccgatcttgcagaaattgcaggtctgcgcaggcatggcactaagtgtcccatggcacatttggccctcatggaggcctcaaaagg

SEQ ID NO: 144893 - DNA, 75 bp, Homo sapiens
aaaagcggaagtttgccacacgaaaccgaaccctcaccaaacagatctgcttgcacatccacttgcacgtagacc

SEQ ID NO: 144894 - DNA, 119 bp, Homo sapiens
ctgccatcgcccggcccggccgcgcccgcggaaccagaccagaagcccttcagcggccagtagcatctgactttgagcctcagggtctgagtgaagccgctcgttggaactccaaggaa

SEQ ID NO: 144895 - DNA, 100 bp, Homo sapiens
ccattgagaaattgttgaggcagttaatagaagatgaaattgcaaccattcttaaatctacattgaaaggactagaatatttgcactttatgagaaaaat

SEQ ID NO: 144896 - DNA, 75 bp, Homo sapiens
aatcctggagaccaccaccttcttccaaagagcggtgtacttgctatcagttgagggatttgcagttgataaaat

SEQ ID NO: 144897 - DNA, 100 bp, Homo sapiens
atggcagccagtcagtggtggagctgagacaggaggtggtggcctgcatgcgcagggacacgaccctggagacggctctcaactccaaagcatacaaacg

SEQ ID NO: 144898 - DNA, 75 bp, Homo sapiens
ctctgtgctcgtgagtgcatggggtataaggcaggtgacagcagggacatgtctcgggagatgcaggatgtagac

SEQ ID NO: 144899 - DNA, 100 bp, Homo sapiens
gaacaatccgtctggatcacggatgtaggaagtggggcaacaccctccactaaagagtcaagccagccggacgcattctcatctggtgggggaagcaaac

SEQ ID NO: 144900 - DNA, 74 bp, Homo sapiens
tcaagatgaatatgaccctatggaagcagaagaagctgaggatgaagaagatgaaaagacagctttgatttctg

SEQ ID NO: 144901 - DNA, 80 bp, Homo sapiens
atatgaccctatggaagcagaagaagctgaggatgaagaagatgatgaggaaggtgtgagatatgtcccagtgcgtccaa

SEQ ID NO: 144902 - DNA, 74 bp, Homo sapiens
agtatctcacctccctaaactggttaatagtggcatggaagatccatttgccacccaggctactttgggaaagt

SEQ ID NO: 144903 - DNA, 90 bp, Homo sapiens
acaccatggtggacacttttcttcagaagctggtcgccgccggcaggagctcgaggccatgagcagatataccagcccagtgaacccagc

SEQ ID NO: 144904 - DNA, 97 bp, Homo sapiens
aggatacctacaatttggatacagataccatctcaaagggtaatcttccaggtgtcatggagaaactccagctgggcccagagattctgcagcggga

SEQ ID NO: 144905 - DNA, 74 bp, Homo sapiens
cgcggggctaccggatcggtcggaaatgttatgtgtctcggtaccacgtgaaagactcctcacgccacgtcatc

SEQ ID NO: 144906 - DNA, 90 bp, Homo sapiens
ctgagatcaaatggcacttcattggccacctacagaaacaaaatgtcaacaaattgatgggagacaaggatgatgatgacgatgatgatg

SEQ ID NO: 144907 - DNA, 101 bp, Homo sapiens
tgcagggccaggaggaacatgagctgttccgatggccccactatggggctccactggctggggagtgtctgtctgtgcaggtggtcaactgcagccgtgta

SEQ ID NO: 144908 - DNA, 51 bp, Homo sapiens
ggcaccttgcgcttcttgcagtcgagttgctggagaatgtaaccctaatcc

SEQ ID NO: 144909 - DNA, 100 bp, Homo sapiens
cagctctctgcccagcatctgaccctaaaccaaacttcacagactgtaataggcatacacaagtgtgcattaatgggagtcctgatgggaaatacctagc

SEQ ID NO: 144910 - DNA, 83 bp, Homo sapiens
ctttgagcacggcttccgtgtgcatggaaagaactttcacctgatccaggccaacaaggggtggccgtgactggggagagcac

SEQ ID NO: 144911 - DNA, 100 bp, Homo sapiens
ggctctcgccgtccgagtcgtttattgtaaaggcatgacttcctggcaccacagggaaaatcgggtgcaagcccagaaactatttccccaccaccacttg

SEQ ID NO: 144912 - DNA, 100 bp, Homo sapiens
ctttacctctccactcacaatgggaacatgtacacctcatccctgtacgggtgcctggcctcgcttctgtcccatgcttatgaggtgatcaaactcaaag

SEQ ID NO: 144913 - DNA, 100 bp, Homo sapiens
ggaggaaaaccttgagaccctgagactttcagaaacttattcacagttaccaaagctggaattcatgatttgttcctgtagctgaaacatacattgaatg

SEQ ID NO: 144914 - DNA, 74 bp, Homo sapiens
tggatatgaagggagccccagaaaagcggaagaatttagacgcacactggaaataacatctgctttgctgccga

SEQ ID NO: 144915 - DNA, 49 bp, Homo sapiens
tcagctcatacaacagcttcttaggtaaggggcctggataccaagaagt

SEQ ID NO: 144916 - DNA, 96 bp, Homo sapiens
gatgtctacctggtaatagaggacttgaagcagaaagcaagtgaatacgagtcagaaggttacctgtcctgctgccgattcctggatgacaatcag

SEQ ID NO: 144917 - DNA, 100 bp, Homo sapiens
cccggagcagccggagagcaggcgtcgggacgcagcaaagagaggagagggtgaggcattcactctttggggaagtgaggaagctcatcacagacgagtt

SEQ ID NO: 144918 - DNA, 100 bp, Homo sapiens
gacgggactgccaggagacgagtccccggttgtcatgtttgctgacctctctgaggctgccaaccggaacaatgacgccctgcgccaggcaaagcaggag

SEQ ID NO: 144919 - DNA, 100 bp, Homo sapiens
ggagaggctgtgagccacaatgcatcgctggaagtagccaaaatgctgagccgattatcaggattagcaaatgttgttttgcatgaattatcaggagatg

SEQ ID NO: 144920 - DNA, 82 bp, Homo sapiens
gtccggatgagatcgcacttcctgcagtgggcattagccacgtccagggtcctgcagttctgagcttgggttccctttgcct

SEQ ID NO: 144921 - DNA, 51 bp, Homo sapiens
tggacagtgatgatgaaattcctatcagaattggcagagggggtcgatttg

SEQ ID NO: 144922 - DNA, 74 bp, Homo sapiens
tcagccaggggcagccggctctggtgctcccagaagaggatgaacgtgaagccagagaaaatgtgaagagagag

SEQ ID NO: 144923 - DNA, 75 bp, Homo sapiens
ccgtatcacacatccttgaccaacgagaaaaggtggactacatcatgcagccgcccgaatttccggtgacggtgt

SEQ ID NO: 144924 - DNA, 100 bp, Homo sapiens
agaaggtggatttgatccctgtgaatgtgtttgctctcatgaacatgcaatgagaagactgatcaatctgaatcttcagctacttggagcaacagccatt

SEQ ID NO: 144925 - DNA, 100 bp, Homo sapiens
ctccaggatttctgaagactattgtggaagaagcatccattaaggctcacttatgtctgtaaagatgggaaaaaaatacaagaacattgttctactaaaa

SEQ ID NO: 144926 - DNA, 49 bp, Homo sapiens
cgccggtggagacgcaggcgaggagacccatcggctctaccgcctgaag

SEQ ID NO: 144927 - DNA, 75 bp, Homo sapiens
atacaccagtactaccaaggacagcttttttcctgcaaggtttcagcgttaaaaacaatggccagtcagggaggc

SEQ ID NO: 144928 - DNA, 100 bp, Homo sapiens
gatggtccagtaatttcagagagtactcccatagctgaaactataatggcttcaagcaacgaatccttagggttacatctcagatctttggactctcgtg

SEQ ID NO: 144929 - DNA, 74 bp, Homo sapiens
atgagatggtagccaaacccccaggatccctccccgcggcggcgatggcccgagccatgagagtgaggactttc

SEQ ID NO: 144930 - DNA, 87 bp, Homo sapiens
aacaccaagatgaaagcagcagttttcatcatctaagtgaaagatacaagaaacccactgactttaaaagaaagaaattgcaattat

SEQ ID NO: 144931 - DNA, 50 bp, Homo sapiens
ggatgaaacactaatgtgttcttttcagaatctgaattatccagaacaga

SEQ ID NO: 144932 - DNA, 90 bp, Homo sapiens
cgctgcggggcgctgctggcgtgtctcctcctagtgcttcccgtctcagaggcaaactgatatcaatgcttacaattgtgaagagcccac

SEQ ID NO: 144933 - DNA, 75 bp, Homo sapiens
aggagtttattggagcgcagactgatggcgcaaagggaattactctcacttccaccacccgatgtatggaaactg

SEQ ID NO: 144934 - DNA, 82 bp, Homo sapiens
cgcggatctcaccgccgctcagggaaggtgctcgggtcttcggggcactgggtcccatcggtccctcctcacctgggctcac

SEQ ID NO: 144935 - DNA, 71 bp, Homo sapiens
caagcatgcagcttactgcttgaaagtcggcagcctctgtgaagaagattttatgtgaagcccctgtggaa

SEQ ID NO: 144936 - DNA, 75 bp, Homo sapiens
tctatggtactcggaccatggagccatacaggtgtttgatcagtatgtaaagaccagggcagaggaagaacgcag

SEQ ID NO: 144937 - DNA, 87 bp, Homo sapiens
gtagagccggccgagctgaggcggtcgcggccatgaaggtagctacagcaagctgggtagcaggcagatccaaaggatatcatgaag

SEQ ID NO: 144938 - DNA, 100 bp, Homo sapiens
gctgctgcttctcttactcgtgttccctgccactgtcttgttccgaggcggccccagagtcaaaccggcacgatgtccaggcaccagaaccagaacacca

SEQ ID NO: 144939 - DNA, 100 bp, Homo sapiens
cggaggcccggccacctctgagaagggagacgacgctgctgggtccgctgagcggggcgacccgaggagtttccagatgtcttggaatgcactgtatctc

SEQ ID NO: 144940 - DNA, 83 bp, Homo sapiens
cttagctgtgctcgcgctactctctctttctggcctggaggctatccagcataagaccatcatcatgtggaaactgaccaggg

SEQ ID NO: 144941 - DNA, 96 bp, Homo sapiens
aagaagtgggtgactgtgggtgacacgtccctgaggatatttaagtgggttcctgtgacagacagcaaggagtttcagctcctggcatcagctcta

SEQ ID NO: 144942 - DNA, 82 bp, Homo sapiens
gaggttccctccgagccccttcctgagaagatcccaggcagcaatgaatgtggatcacgaggttaacctcttagtggaggaa

SEQ ID NO: 144943 - DNA, 97 bp, Homo sapiens
gaactttttcaacaaagcaaggtcaatatgcagaaaatgctcccagctcgccgcgcatggccgggaacgcggagccgccgcccgccggagccgcatg

SEQ ID NO: 144944 - DNA, 75 bp, Homo sapiens
ttagagaagacgttcatatcattgtcttccacagatgtgtcaccaaaccaggtggacccccaaaagtacaagggc

SEQ ID NO: 144945 - DNA, 100 bp, Homo sapiens
aatcccactgatgaggatcagcccatggatcctgtaataacaagtatttcgccgaaatacggtcctatggctggtggcactttacttactttaactggaa

SEQ ID NO: 144946 - DNA, 82 bp, Homo sapiens
ggcaaagcacccagctttcttcactcttccgagcagtcattatggcgaaccttggctgctggatgctggttctctttgtggc

SEQ ID NO: 144947 - DNA, 90 bp, Homo sapiens
gcccatcctccgcttccttcagctcctgtgtgaaaaccacaaccgagacctgcaggtgctggagaatctggtaaaagcaccattgtgaag

SEQ ID NO: 144948 - DNA, 107 bp, Homo sapiens
ctgcctcagcctcccgagtggctgggactacaggagccgggtgtgggctgagccctgcctgattgatgctgccaaggaggagtacaacggggtgatagaagaatttt

SEQ ID NO: 144949 - DNA, 100 bp, Homo sapiens
gatctgtgcttgtgaaaggctccatggtcttgcctccttgcagatgcaaccttaaaatcagtgacaagaaacattccaaacaagcaacagtcttcaagaa

SEQ ID NO: 144950 - DNA, 100 bp, Homo sapiens
caaacatgtttttcctcctcctgcttccccctattatctttgagtctggatattcattacacaaggattatgatgttgatgaagaggacatgatgaatca

SEQ ID NO: 144951 - DNA, 80 bp, Homo sapiens
cagagtatgaccaccactattaactcagagtcaagatctccactgaagttggcatcacaaatgttgatctttccaccgtg

SEQ ID NO: 144952 - DNA, 98 bp, Homo sapiens
aaccaggacactgtgcagattttcatccaagtggcacagtggtggccataggaacgcactcaggcaggtgcccaaatgtgagtctgcaaaagctgcca

SEQ ID NO: 144953 - DNA, 75 bp, Homo sapiens
tcccaggaatacagctttgcattagaatggatgatgaacttgttgttggacatagtgcaagatcagacatctcca

SEQ ID NO: 144954 - DNA, 90 bp, Homo sapiens
cactgtacagggatgtgatgctggagaactgcaggaacctggcctcactagctatgtcttctcattacactgaagaccttttgccagaac

SEQ ID NO: 144955 - DNA, 75 bp, Homo sapiens
aagaccacggcgtagcagaagccattccgacaatgataggtgagcgagtgctgtgctttcatgggcctcttcttt

SEQ ID NO: 144956 - DNA, 75 bp, Homo sapiens
tgaaacttacctctttgaatctgaaggtttaggtcgcagaaccctagctgtaatcactaaacttgatctcatgga

SEQ ID NO: 144957 - DNA, 95 bp, Homo sapiens
cgtcttcccaggctgtcatataactcctgagaatagtggttcttaactctgtgcatggaggactgcaacagaggagtgggggactgaagattgga

SEQ ID NO: 144958 - DNA, 100 bp, Homo sapiens
tctgaagccgtgcccgttcttcctggagggaaagtgccgctttaaggagaactgcagggacaaagtggccttcatcacaggaggcggctctgggattggg

SEQ ID NO: 144959 - DNA, 74 bp, Homo sapiens
aggagtactcggtgaaatcctgtcctgaagactgtaagtaattcgccaaaatgacgaacacaaagggaaagagg

SEQ ID NO: 144960 - DNA, 75 bp, Homo sapiens
tgacgccatgtcgggttattcgagtgaccgagaccgcggccgggaccgaggggatccaggtccggcacgatcaag

SEQ ID NO: 144961 - DNA, 103 bp, Homo sapiens
ctcgggtcgccggagccgcgccccaccccgccagctccagagccacgtacgatgagattgtggggaacctgggtgaaggcacctttggcaaggtggtggagtg

SEQ ID NO: 144962 - DNA, 80 bp, Homo sapiens
cggaatctgggtgcagttcctgcagtaccccactctacgatcagacaatgcagatcttcgtgaagactctgactggtaag

SEQ ID NO: 144963 - DNA, 100 bp, Homo sapiens
cgggtgtctcgtgtgtgaacatcacaggagccaagccgccatggcctaccacagcttcctggtggagcccatcagctgccacgcctggaacaaggaccgc

SEQ ID NO: 144964 - DNA, 82 bp, Homo sapiens
gaacgaagaaacagacattcaacatgattgcatttgaagtggagtacatcctgctgcttcaagggtagaagactcctcactg

SEQ ID NO: 144965 - DNA, 88 bp, Homo sapiens
aaatcgacaatctaaggacaaatcatcaggttgtggcagcactgcctgaaggtatgagaccagattctaatctttatggttttccatg

SEQ ID NO: 144966 - DNA, 128 bp, Homo sapiens
atggtcgactacaagaagagggcggagcggagacgggagtattatgaaaagatcccaagcccaagaaccaagctgaggcccagaaggtcacgttcagccaggaccctacgacagtggccctctgcatc

SEQ ID NO: 144967 - DNA, 100 bp, Homo sapiens
ggagcttcttctccggagtgcgccggcggtggcgcctgcggacctaactagctccaggctctgagcccccagaagcagagctttgttttggaggttctgt

SEQ ID NO: 144968 - DNA, 58 bp, Homo sapiens
gcagaaccttccctgattacagaatcttggagagcagagctgacatctgataaagaca

SEQ ID NO: 144969 - DNA, 100 bp, Homo sapiens
gacgggttcagttcgtcatggggctgtttggaaagacccaggagaagccgcccaaagaactgatgtgtatatctcatgattgatatggagaaactagtca

SEQ ID NO: 144970 - DNA, 89 bp, Homo sapiens
aacttacaaacaaccccatctccagacaaagaaagaagagatccctcccaaatcccaaccagtttccttacctgaagaattgaatcggg

SEQ ID NO: 144971 - DNA, 101 bp, Homo sapiens
tatgcattgggaaatgatcttcatcaaattttgaaaagccatggtaaagatgaagaatgtgttttggaagcagaaaataaaaaactagtagaagaccagga

SEQ ID NO: 144972 - DNA, 145 bp, Homo sapiens
agaggtcaataatgaaagtggagagtcacagaggggaacagatttcagtgtcctccttagctctgcaggtactccaaagattcaggtttactcacgtcatccagcagagaatggaaagtcaaatttcctgaattgctatgtgtct

SEQ ID NO: 144973 - DNA, 90 bp, Homo sapiens
atcctgctcctgggtgccgtggcatgtcgatttgtccttcactacagatatgagatcctgactccaaactccattcccaagggtttcatg

SEQ ID NO: 144974 - DNA, 83 bp, Homo sapiens
cacacacgccctcacgcccggcgagcccgcgagaggttgacggatatattcagacgttacgacacggatcaggacggctggat

SEQ ID NO: 144975 - DNA, 100 bp, Homo sapiens
tatcaagccaaactttgtgattcaggagaactggtcgccatcaagaaagtattgcaggacaagagatttaaggatcagctcagctactatttaataaaac

SEQ ID NO: 144976 - DNA, 100 bp, Homo sapiens
gactcagccaagttccccaacggctccccgtcgtcctggtgctgcagcggcatttgatctaacagagcaaagatacgtagctgtgaaaattcaccagtta

SEQ ID NO: 144977 - DNA, 75 bp, Homo sapiens
gtactgtccatcaaacatcttccaccacagcttagagaatggtagtcgaagaagaacaccaggtggagtttttct

SEQ ID NO: 144978 - DNA, 100 bp, Homo sapiens
gcacagcgtttcttgcaagaatgggagtgccggtggtggtgtgcacattgagccccggtatagacagttcccccagctgaccagatcccaggtgttccag

SEQ ID NO: 144979 - DNA, 100 bp, Homo sapiens
gggcttcgttttcatgttgctggtggaccagattggtaactcccatgtgcattctactgacgcatttaaatcaaacggtattgagatggattgggttatg

SEQ ID NO: 144980 - DNA, 75 bp, Homo sapiens
ttactcaagactacccaggaacctcttgcccgagatcctgttaaacggtcatctagtagcaggcacccaaatcag

SEQ ID NO: 144981 - DNA, 50 bp, Homo sapiens
ggaaaacaacttcgagggcagagttttaaaatcaaagatgggaaaatcgg

SEQ ID NO: 144982 - DNA, 100 bp, Homo sapiens
aggaagatcaagaaagtgggaaccactgagaaggaacatgaagtctcttgcatggcaccaagaatgttaccaattcaagcagtttaagattgccaagaca

SEQ ID NO: 144983 - DNA, 75 bp, Homo sapiens
ctccttttcatgagtgttcctgtggtctctgcacctcctttctttcttcaccaaaggacatggatgaaaatgaaa

SEQ ID NO: 144984 - DNA, 82 bp, Homo sapiens
attcatttagagctgcggaacaggacgccctctgatgggtcgggccccggctcagtggtcccaggcagctcgggtgtcggaa

SEQ ID NO: 144985 - DNA, 75 bp, Homo sapiens
aggggagaagagtggaattgagatcttatccctatatgatgctgaggtttgaagatgccgcatttggattggatg

SEQ ID NO: 144986 - DNA, 80 bp, Homo sapiens
ggaggaacgctcactgtcagcgcctggaaacttgctcacgtgtggacactgccagcggctgcagccgacttggaatgacc

SEQ ID NO: 144987 - DNA, 100 bp, Homo sapiens
aatgcctcccccctactcttcatctcgtctgtacccagattggccttaagagaaggacggagccacatactgctgacggcccagaactggcagagagaag

SEQ ID NO: 144988 - DNA, 76 bp, Homo sapiens
ccgaaagggttgtagacatggcggccatcaggaaactggcagacctttcacttcgtatccaacaaattgaaacaac

SEQ ID NO: 144989 - DNA, 90 bp, Homo sapiens
ggactgaaggggacagcccctttgcagtggctcggcgaggagacccctgcaccctagggccattttcgaccagagtttattcgtccaccg

SEQ ID NO: 144990 - DNA, 82 bp, Homo sapiens
ccttcccgtcgccgctcccgaagcttttccagattatgatgcatcattatcacagaagaaattcgtgtctatagcttttaag

SEQ ID NO: 144991 - DNA, 96 bp, Homo sapiens
cttcccccggcggacctgcagctgccggactggacggagtgtgagctctccggctacggcaagcatgaggcctatcacttctccctgggctcccag

SEQ ID NO: 144992 - DNA, 98 bp, Homo sapiens
ttctactggaggcctttgggccatgtcttcctgatccaaagctttgcccgaagtttttacatacaaattctactagtcacacctggccattcagtgca

SEQ ID NO: 144993 - DNA, 139 bp, Homo sapiens
ttgtggactacgtctgtgcggctgcgtggggctcggccgcgcggactgaaggagactgaagacaatgcagatcttcgtgaagactctgactggtaagaccatcaccctcgaggttgagcccagtgacaccatcgagaat

SEQ ID NO: 144994 - DNA, 75 bp, Homo sapiens
caatggacttctggctttggccactttacttcctgccaggcatgaagttacagtgtgtttccctttggctcctgg

SEQ ID NO: 144995 - DNA, 71 bp, Homo sapiens
gcctttccagcccgtggtccttctccatattcgagatttccatggtgtcagtgattcatattcctgatagg

SEQ ID NO: 144996 - DNA, 100 bp, Homo sapiens
gttagtcggaaagagtgcatctgtagatgctgaaaaatcaatgctgtccaaacttaaacatggttccacttccaaacatgagttccaggccgagacaaag

SEQ ID NO: 144997 - DNA, 50 bp, Homo sapiens
tcgtgaagaacctgaaggacacactagtatgaagcaaaattctaacgttc

SEQ ID NO: 144998 - DNA, 74 bp, Homo sapiens
aaaaggcgcagctccggcagagggaggtggtggacctggccggaccagaatatggccaagggatgaaccctatt

SEQ ID NO: 144999 - DNA, 51 bp, Homo sapiens
ctagatcctgtgctttactctgaagactccttcttccagaccagctggtct

SEQ ID NO: 145000 - DNA, 97 bp, Homo sapiens
aagctttagagcctggctactcacagttgaagcctgattgcagggtagaagagcagaggatggctctgtcattgattatgaactgattgaccaagat

SEQ ID NO: 145001 - DNA, 152 bp, Homo sapiens
tttacaactgtgtaactgtcttcatctttacagaggaatagtctacaaaggaagacttgtaacctggagaagaggtgttcaaactggatccaaacaataaagaaggccctgtattaatcctgggaaggagcatgcaaccaggcagtgaccag

SEQ ID NO: 145002 - DNA, 96 bp, Homo sapiens
tcgatcttgggacccaccgctgccctcagctccgagtccagggcgagaagtccattggaatattaagcccaggagttgctttggggatggctggaa

SEQ ID NO: 145003 - DNA, 100 bp, Homo sapiens
cagctcggcagcatggcgtccgtgacgctgagcgaggcggagaaggtgtacatcgtgcatggcgtccaggtatattttcctggagtacgcgtcccctgcc

SEQ ID NO: 145004 - DNA, 75 bp, Homo sapiens
gactgtctcacattggccggcaacttgttccaggcaagatcacgtctctggataccagcaccatgagagcagcca

SEQ ID NO: 145005 - DNA, 80 bp, Homo sapiens
cattcacttctagacgacaaaatgcaaaaaaggaggccaaagactttttgctctatatgcaatcagtgctgtctactttg

SEQ ID NO: 145006 - DNA, 76 bp, Homo sapiens
gaaaactaagcagtgatgaagacctcgaaataattgttgatcaaaagcagtttgcagtcctgatgtggctcctgac

SEQ ID NO: 145007 - DNA, 77 bp, Homo sapiens
cggcctagcgtcctggaattacttcaatcaagtgaaaggtgtagcagtcactcggcctacacccacagcatcgacct

SEQ ID NO: 145008 - DNA, 83 bp, Homo sapiens
cttgtggagccggagctgggcgcggattcgccgaggcaccgaggcactcagaggagggagtggggaaggccagggccagattc

SEQ ID NO: 145009 - DNA, 74 bp, Homo sapiens
gccacattctcaacaccacggaattccatagtgatcagcagctggactgtgccttggacctaatgaggcgcctg

SEQ ID NO: 145010 - DNA, 82 bp, Homo sapiens
atctgcagtacaggatatgaagaaattgagggttcttgccatggtgcctggaatacttattaagaaacgatgcaaatccagg

SEQ ID NO: 145011 - DNA, 75 bp, Homo sapiens
gccaacagtgtaccagcagggcgttggctatgtgcccatcacagcaaaagactgttgaagtagagagcattttgc

SEQ ID NO: 145012 - DNA, 82 bp, Homo sapiens
ctcagttggaagcagccgatccagcctgcggagcctgtggggcaggaaccctaaggactctgcaatatgaataattccctag

SEQ ID NO: 145013 - DNA, 97 bp, Homo sapiens
tcagactgctgtgctagcaatcagtgagactccgtgggcgtaggactctccaagccaggttgaaatcacaaagattagacacctttttagataggtg

SEQ ID NO: 145014 - DNA, 100 bp, Homo sapiens
gaggctcccgccgccgattgacccgcgctccgcccgtagtcgggccgatggctcaatcacaaaggagtgagacagaaacgcctgaatgtctggctgggaa

SEQ ID NO: 145015 - DNA, 74 bp, Homo sapiens
taagaaatctgccccaaagtcttagaactgaaaagaatttctgcttggacactgcatagctgctgggaaaatga

SEQ ID NO: 145016 - DNA, 75 bp, Homo sapiens
tcgcagcgccgcgtgcggcccactcacgggccgtacctggagtagaacagaaaaattattatgtctgtgttccct

SEQ ID NO: 145017 - DNA, 75 bp, Homo sapiens
actcgccggccgagggtggccctaggggcagcgagcaagacagcaagcaggatggatagaatgacagaagatgct

SEQ ID NO: 145018 - DNA, 87 bp, Homo sapiens
ggagctgagggtttaccccgtgagggctgacgcgccactatgtagcgggtttcgggcgggccacgcgtgcgggacaggaacccaacc

SEQ ID NO: 145019 - DNA, 83 bp, Homo sapiens
gtgcgaggccgggcacagccttcctgtgtggttttaccgcccagagagcgtcatggacctggctgcagcttatcttctggtgt

SEQ ID NO: 145020 - DNA, 129 bp, Homo sapiens
cgatcgttggcgggagatgtcgaaccccgggacacgcaggaacggctccagcatcaagatccgtctgacaggtccgaggaggcaaacaaagccttctctgcagctgtgcagatgcacgatgtgctggtg

SEQ ID NO: 145021 - DNA, 80 bp, Homo sapiens
ggacagcaacctagtcagtctgcatttggctctggaacaactcctaattctagtagctacagcaagctgggtagcaggca

SEQ ID NO: 145022 - DNA, 76 bp, Homo sapiens
acggattgccagagaattggcagaaggttgtacatcctggagacctgaagaattctgttgaagtcgcactgaacaa

SEQ ID NO: 145023 - DNA, 87 bp, Homo sapiens
ctggccccgggcaacgatcggaactcggacacgggggagaagcgagcggacatccagctgaacagcttcggtttctacaccaatggc

SEQ ID NO: 145024 - DNA, 100 bp, Homo sapiens
ctttgaagccttgtcggagagagctgtggcagtggttgtggatcccattcagagtgtaaaaggaaagaaccttctgaggaaaggaggccatacagaaatt

SEQ ID NO: 145025 - DNA, 100 bp, Homo sapiens
gctgctgaccctggccttcaaccccgagccgctggtgctacaggacatgaaagatcagatgtcaacttcatctgtgcaggcattagctgaaagaaaaaat

SEQ ID NO: 145026 - DNA, 90 bp, Homo sapiens
gcttaattcaaggtcacacaatgtcggggatggacctccagatttccttactgtctcaaatatctatcagtgtagaagagtgggaagaca

SEQ ID NO: 145027 - DNA, 75 bp, Homo sapiens
atctgatcaagccaacaacagtgacggaatgcctccatacatgttccagcaacagatagaaatgctttaagttca

SEQ ID NO: 145028 - DNA, 50 bp, Homo sapiens
gaccccgagaatatattcagctacacaggaacttgaacatcagagaggag

SEQ ID NO: 145029 - DNA, 75 bp, Homo sapiens
caggccgcggggagcacctggactctcagcgttctcatctctcttccttcaccatgaagctgatggacaaattcc

SEQ ID NO: 145030 - DNA, 90 bp, Homo sapiens
gctcaggacatctgtaggaccagttccagctccagtgggcaccgccagcacgcccaggccttcatggtgaaacacctcttggagtatacc

SEQ ID NO: 145031 - DNA, 100 bp, Homo sapiens
aaaaaaattaaattttaaccatgagggaaatcgtgcacatccaggctggtcagtgtggcaaccagatcggtgccaaggtgagggttcagagtatggtgcc

SEQ ID NO: 145032 - DNA, 99 bp, Homo sapiens
aaaggcacgggcagccggaaggacaccaagatgcggatccgggcctttccgaaccatccgggtatggctgaaaagagacagtggtcaatactggcccag

SEQ ID NO: 145033 - DNA, 100 bp, Homo sapiens
ccaggcagtgggaaccgcacgtgtgatggcgcagagggaagaaataaagcggccgctttgggaaactgaggagatgttaaagtaacccatcttgcaggac

SEQ ID NO: 145034 - DNA, 103 bp, Homo sapiens
ctcttccgctcggatcccttggcgtacacggtgtgcaaggggagtcgtggcgtcgtctgcgaccgctgccttctcgggctgagtcatcactagagagtgggaa

SEQ ID NO: 145035 - DNA, 97 bp, Homo sapiens
gcctccaaaagtgctgggattacagaaaggagaatcacttgaacccaggaggaggaggttgtggtgagccgagattgcgccattgccctccagcctg

SEQ ID NO: 145036 - DNA, 80 bp, Homo sapiens
cgcagggcctgagcgggcgccggagggaaggggaagcggcgggtcagcccaaggccaaccccactgtcactctgttcccg

SEQ ID NO: 145037 - DNA, 82 bp, Homo sapiens
agtcattcaactcaagcagatcaaagttgttttgagataacgaaggaggcccaacttcattcaataaggagcctgacggatt

SEQ ID NO: 145038 - DNA, 96 bp, Homo sapiens
ggggaagtttcctccgaagctgcgctcctggaacagcagcacctgcaagcgcccggcagcggcccgcgagaagctaactggggacgtgggcagccc

SEQ ID NO: 145039 - DNA, 75 bp, Homo sapiens
agagtttgatgaaaccactgcagatgatagaaactgtaagattgtttccagcaagaagctaactcgaccactggt

SEQ ID NO: 145040 - DNA, 75 bp, Homo sapiens
cctcagtgcgaagaagctgcagccgcacctggccaaggtcttctcattcacaggttaaggctacctttccagata

SEQ ID NO: 145041 - DNA, 82 bp, Homo sapiens
ttgctaagacttggcgaagcgctgcgctcgcgcccggatccctcaggtgtggacactgccagcggctgcagccgacttggaa

SEQ ID NO: 145042 - DNA, 100 bp, Homo sapiens
gagtgacggtgccaccgcggcgcgaaagatctaggagagagggagaaattgatgctgccagaaagaggggacagttacagaagcgaagaccttgagaagg

SEQ ID NO: 145043 - DNA, 95 bp, Homo sapiens
aagtcttttgagccccaagaaaactcagaggcgacatgttagtacagcagaagaggttgctgtgagtctaggtactccaattatgaagccagaat

SEQ ID NO: 145044 - DNA, 100 bp, Homo sapiens
gtagaggaggaggtgaacaaggaggagattgataagaacctgaagtcgctggagcggtgccagtccctggaggagattcagcggctgtatgaagcaggcg

SEQ ID NO: 145045 - DNA, 50 bp, Homo sapiens
tgaggcctccccagccacgtggaactggcaagaagttgcaggaaaaatgg

SEQ ID NO: 145046 - DNA, 100 bp, Homo sapiens
cctggaacgcctggagcgcctcccactgcagacgtctgtccgcctccagccgctctcctctgacgcccaggccagacccgatcgtctatggtccagtggc

SEQ ID NO: 145047 - DNA, 83 bp, Homo sapiens
tttggattcacccacagcggggcggcggcggcggcggctgcggcccaatatagatgatgataattccgaagaaggcttccaca

SEQ ID NO: 145048 - DNA, 75 bp, Homo sapiens
caacagttcaccaccattaccgggcagctttggaagaagtagaaggtgatgtggcagaattggaactaaaacttg

SEQ ID NO: 145049 - DNA, 50 bp, Homo sapiens
cctgaggaacatggaggccacgctaatgatggagtctcactctgtcgccc

SEQ ID NO: 145050 - DNA, 76 bp, Homo sapiens
ttcatggtatcaattttgtcagtcctgttcgaaaccaaggcaaactaggcgtggcaactgctggctgcgtgaatga

SEQ ID NO: 145051 - DNA, 80 bp, Homo sapiens
ggtgctgttttctgccggctgtaaagtcatcacctcctgggatcagatgtgcattgaggagttgatccctgaattttatt

SEQ ID NO: 145052 - DNA, 101 bp, Homo sapiens
catgatagctttgttgcagttggaaaagatgcccccggttgtctaccttcataacaacaatatctctgtagttggatcaagtgacttctgcccacctggac

SEQ ID NO: 145053 - DNA, 78 bp, Homo sapiens
tcagacgcagccgtagacaccagctccgaaatcaccaccaagaccctctttcccagctgcccgctcctcagcacccga

SEQ ID NO: 145054 - DNA, 50 bp, Homo sapiens
gccaagatgctgcggaatctgctggatattggtgctggaaaaggcaaata

SEQ ID NO: 145055 - DNA, 100 bp, Homo sapiens
agcctcaagtcccgcctgaggaggcaggacgtgcccggccccgcgtcgtctggcgccgccgccgccagcgcggaggtgctaatgatgctggataactatg

SEQ ID NO: 145056 - DNA, 88 bp, Homo sapiens
ccccaggactgcgcccccgggagcgggcgcccagaggtggtccattatggctgacatgcaaaatctggtagaaagattggagagggca

SEQ ID NO: 145057 - DNA, 83 bp, Homo sapiens
ttatctgatgacaagcatgattgggagcagagagtaaatgctgaagaggatcacctagcccgggtagaagaggcaatcacccg

SEQ ID NO: 145058 - DNA, 101 bp, Homo sapiens
ctgtggttttgatcatgttgttaccctcggacgtagcccggcttgtattgggcatttatgtttgaatcatctttaagtctggcggtcacaaagtggggact

SEQ ID NO: 145059 - DNA, 75 bp, Homo sapiens
cctcgctgtacgccgagcacccaggcgactgcctcatcttcaagacctgcctagagctggaacgttacctccaga

SEQ ID NO: 145060 - DNA, 85 bp, Homo sapiens
ggcccgatcccagcaggacattgaaagtctgcgctcctcagaccaccggcaggtgaacagcctgatgcagaccgaggagtgccca

SEQ ID NO: 145061 - DNA, 100 bp, Homo sapiens
atcgttaaacatctgaaagggtcagggggaaatttgcagtggtgagaaaatgtataaagaaagattctgggaaagaatttgctgcaaagttcatgagaaa

SEQ ID NO: 145062 - DNA, 114 bp, Homo sapiens
acccatcctgccgtccttctccactttcgccagcccgtgccgcgagcgcggcctgcaggagtgcctccggagccagcgtggtggccatagacaacaagatcgaacaggccatgg

SEQ ID NO: 145063 - DNA, 50 bp, Homo sapiens
gagatcttatccctatatgatgctgagatgggaaagggctccttcaagta

SEQ ID NO: 145064 - DNA, 82 bp, Homo sapiens
cctgtgcttcaacaaaggacactacatcaaggactgcccccagataagaaggctgactgcacaatcacaatggctgactcag

SEQ ID NO: 145065 - DNA, 83 bp, Homo sapiens
gtctgatagcatggaagaaggagagattacgtcagatggaactgtggctgcaccatctgtcttcatcttcccgccatctgatg

SEQ ID NO: 145066 - DNA, 90 bp, Homo sapiens
tttgggatctccctgtcctacctcacgggggcggcgggactttgaacatgtcggggatcgccctcagcagactcgcccaggagaggaaag

SEQ ID NO: 145067 - DNA, 75 bp, Homo sapiens
gaaaactcaaaaaccatctggtgctgtggattgcaaccttgaatacccctgaatggttggacagtgattcctgcc

SEQ ID NO: 145068 - DNA, 50 bp, Homo sapiens
ttgcacatggggaaggcctggtaaagtggcctatggcatgtctgcgttac

SEQ ID NO: 145069 - DNA, 99 bp, Homo sapiens
cggcgacctcaagaagcagctccacgaaaggcagccgcggatcgccgcgctcagcgacaaacaaatgatgctggagggtcttgaaatctttacagtaaa

SEQ ID NO: 145070 - DNA, 75 bp, Homo sapiens
aggaagcgtgcaaatgccagaaagaggatttggccagagcgttttgtatctccagatcacactaagtttgtggga

SEQ ID NO: 145071 - DNA, 74 bp, Homo sapiens
gcaagtgcagcgcctgtaatgtttggcgagtctgttgggatgctgtctatgagagagaactgcaaactttccga

SEQ ID NO: 145072 - DNA, 51 bp, Homo sapiens
tctccccagaaatccaacttctcaaggaatggaagttggatacactttgtg

SEQ ID NO: 145073 - DNA, 83 bp, Homo sapiens
cccagccaccagcaaccccccagcattttgaaagcgaagcagaagccgtagaatcagcggcgagcctgttgaaagaacccaca

SEQ ID NO: 145074 - DNA, 90 bp, Homo sapiens
gctaggtcgtcacaggctccggctcatggcatcaagtggcatccatcataagatatgaggccccaggattcctggcgaggtcctcctccc

SEQ ID NO: 145075 - DNA, 82 bp, Homo sapiens
cacagtcaaagcaacagaaacaaaagcaggcaaatggagtcgttgggaatccgtgctggtatagaggactctaagaagtggg

SEQ ID NO: 145076 - DNA, 75 bp, Homo sapiens
catcatcaagtacaagggctgctgcgaggaccaaggagcaggccgggctctcgccatgggtcactgtcgcctctg

SEQ ID NO: 145077 - DNA, 75 bp, Homo sapiens
cggtcggtgtccccggctgaggcagcgcggccgcagcagccctttcatagccctgatgaagcaagttactctgct

SEQ ID NO: 145078 - DNA, 100 bp, Homo sapiens
aggggtgctgagtgatcaagcaaggtacctgcaggacccatttgtgtccattgatctcttggagcagctggggatcatgatttcgggcagacaacttgaa

SEQ ID NO: 145079 - DNA, 76 bp, Homo sapiens
agcatgacgtgaggccgtggatgcaggcattaagtatgagcccagaggacctggtcggcccttgtaccaaagaaga

SEQ ID NO: 145080 - DNA, 74 bp, Homo sapiens
gggaaatcgggctgaagcgactgagtccgcgatggaggctcagctgtcgcaggccctggaggagctgggaggcc

SEQ ID NO: 145081 - DNA, 98 bp, Homo sapiens
tctgactcctattaccaggataactgtgcgaacatcacatttacctttaacaaggagatgatgtcaccagatgacaaggagtatgtgggctttgcaac

SEQ ID NO: 145082 - DNA, 75 bp, Homo sapiens
cgcgaggcgggcagccggggcgtccaggaccctgatgctcccataagacagaaaatgccccttgatgatctggat

SEQ ID NO: 145083 - DNA, 75 bp, Homo sapiens
atgccctgaaaaagtatcgtcgagaagcctatcatcgagacctcatggcctatgacagaagagggagacctggag

SEQ ID NO: 145084 - DNA, 96 bp, Homo sapiens
ccgagctggacccggaccggttttggagaggcaatatcaaggttttaaatctcggagaaatggctttcgtttgcttggctatcggatgcttatata

SEQ ID NO: 145085 - DNA, 82 bp, Homo sapiens
cgacggctgctcaaacatcaggcgtccgtctccaagagagtatgaagagagtgcgtctgtagggcagggaagatggcggaca

SEQ ID NO: 145086 - DNA, 101 bp, Homo sapiens
gtcttggattcgtgaacagaccacagtggaccacttctggggagcaggacatcgagactttacatggctctgttcacgtcacgctgtgtgggactcccaag

SEQ ID NO: 145087 - DNA, 101 bp, Homo sapiens
ctgaaggttgtgactgaggaggtcaccaccaccaccacagtccagtggcattgcagagcacggatggttgcaggagccaacttttacattgttggacgaga

SEQ ID NO: 145088 - DNA, 83 bp, Homo sapiens
cttcaaccccaggggaccagaggaactcagccctgattgcgggctgacgcgccactatgtagcgggtttcgggcgggccacgc

SEQ ID NO: 145089 - DNA, 100 bp, Homo sapiens
gaaagtcatgcccttctctacggcatgtaacactccactttccaacttcgagtcacaccagaattataagaaagtcccattacagaatcctcccattaag

SEQ ID NO: 145090 - DNA, 90 bp, Homo sapiens
gggttcctgtgacagacagcaaggagagagtatgaagcccgcttggaaaggtacagtgagcgcatttggacgtgcaagagtactggaagc

SEQ ID NO: 145091 - DNA, 82 bp, Homo sapiens
ggcctccgtctggatttccaaggaagaatttcctctgaagcaccggatgcctaaatcaaaggaacttgtttcttcaagctct

SEQ ID NO: 145092 - DNA, 100 bp, Homo sapiens
accgagaggccacggggagccccagagcacttctgcttccagaacctcggaggcgggggatgatgcagtgtgtgattgcagtcgcggacaaagtattcga

SEQ ID NO: 145093 - DNA, 75 bp, Homo sapiens
ggggcctggcccccgggactccctgtgccttgcttggagctgacgccgacgggatgatcaggatggtgctttcac

SEQ ID NO: 145094 - DNA, 100 bp, Homo sapiens
catcatctactacttgaagccagatttgttccgcctcaaggaccctcaggtgggatggatagcagggtctcaggcacaaccagtaatggagagacaaaac

SEQ ID NO: 145095 - DNA, 100 bp, Homo sapiens
ggatgatttcatgtgcgatgatgaggaggactacgacctggacccagatgatgtggtaccagttggccaaagaagagcctggtgttggtgcatgtgcttt

SEQ ID NO: 145096 - DNA, 95 bp, Homo sapiens
ggagagcagatcagaggcaggggaaaaccacgcagaagcaggagctgaagacctcagaccggcaccagaatcagacacaagtttggcagaaggaa

SEQ ID NO: 145097 - DNA, 75 bp, Homo sapiens
tggctctcctggtccagctctcaggacaagaacaaagtgtgctgttggtgtggatgactacagctcagagtctga

SEQ ID NO: 145098 - DNA, 90 bp, Homo sapiens
atgtggtggacttggacacgtcccagctctctctgggcatctggaaagctcaggaatcttgcttttaagaaaattccccagaaatcctcc

SEQ ID NO: 145099 - DNA, 50 bp, Homo sapiens
ctgcaaccctgaaaaagatgcatgacgagtagcacagcccctctatggtt

SEQ ID NO: 145100 - DNA, 72 bp, Homo sapiens
ggccaccgggatagccgggggtctggcaggaatgggagattcttctttactgccaaccaggtaaagatttac

SEQ ID NO: 145101 - DNA, 75 bp, Homo sapiens
ttgttctgtatcagaagacaatatcatgcaagtgtggcaaatgttgctctcaccagaagatttagtgaatgcgtg

SEQ ID NO: 145102 - DNA, 101 bp, Homo sapiens
atgaccaagatgcccgagtgctacttctactccaagttcgatgttttctggcaaaggccttcctgcatttatgaattctctctcaagaagcaagagaacac

SEQ ID NO: 145103 - DNA, 100 bp, Homo sapiens
ggcccggcgcggcccagcgccctcagtgttatccaagataaattctgtgggattataaacatttcagtagaaggcctgcatgatgtcatgacggaagatc

SEQ ID NO: 145104 - DNA, 109 bp, Homo sapiens
atgtggttgtggagtacttagcatcggaactgcaatgttaggagcagggataaagtagccaatatttggtgcagcttcaatgtctttctgaagattaaggatattttgc

SEQ ID NO: 145105 - DNA, 83 bp, Homo sapiens
agaaacacctaggaagggagaactgctacattattgagcagggggtgtgtgatttggttttatgtgaagctgccttccctaag

SEQ ID NO: 145106 - DNA, 87 bp, Homo sapiens
agaagaatgagaactataagagcctggtgagacggagctatcggcgccgcggcaagagccagcccccctcccaactcccaaatcccc

SEQ ID NO: 145107 - DNA, 83 bp, Homo sapiens
aaactaacacaatttgtaagaagtgtgctcaaaatgtgaagcaatttgggacgacccctctgtgcccctggatccaatctcag

SEQ ID NO: 145108 - DNA, 75 bp, Homo sapiens
ggctgtgtgcccggtgcaaaagaaatgcgtggacagcactcctcagagaaattttgaaattgccttcaagatgtt

SEQ ID NO: 145109 - DNA, 100 bp, Homo sapiens
tgcagatgaagacgatgaggaggaagatgattctgtggtaaaaccaatcccagttaaaggagatggatctgaaatgaatcacttagcagctgagtctcca

SEQ ID NO: 145110 - DNA, 80 bp, Homo sapiens
gtgaagatggcggcagccgaggccgcgaactgcatcatggaggagtgtggccatctggggccgtgtggtatttgccactc

SEQ ID NO: 145111 - DNA, 83 bp, Homo sapiens
gacctccaggggaacaatgaggcctacgcagagctcatcgtccttgccgcttacaaacacgcagatggcaagaagattgatgg

SEQ ID NO: 145112 - DNA, 90 bp, Homo sapiens
agggacaggagtatctgaggatggagaactcagcagaagctgaatatggtgggcatgatcagatagatttgtatgacgatgtcatatctc

SEQ ID NO: 145113 - DNA, 100 bp, Homo sapiens
aaacaacagtgacaagaacagtgggccacaggggccccgaagaactcccacaatgccacaggaggaggcagcagttttcaaattgctgcaaacctcagca

SEQ ID NO: 145114 - DNA, 100 bp, Homo sapiens
cgtgaccgagaccgtgaccgagagcgtgaccgagagcgcgaatatcgtcatcgttagaaggatctacggattttggaaatgttagttttgtggttcctgg

SEQ ID NO: 145115 - DNA, 100 bp, Homo sapiens
ccgtccatcatagtcaactgcgtggaagagaagggaagtaccactgcccagtgctgtttaccgtgttcaccaacaacacccacatcgtggctgtgaggac

SEQ ID NO: 145116 - DNA, 50 bp, Homo sapiens
gatgaatcccttgaagaccctgaaacaatgatgaggctgagacaccaaaa

SEQ ID NO: 145117 - DNA, 90 bp, Homo sapiens
ccactactgcacagtcaaggaagaagtgggctgaagaatttaatgatgaaactaatgtgagaaattccgggtagatatgcctggctcagg

SEQ ID NO: 145118 - DNA, 90 bp, Homo sapiens
ccggagtcggagactgagtttagctttactgaggagctctaaatttaggcgggtgcagctatcttctttgaattcaaacactacaagcct

SEQ ID NO: 145119 - DNA, 75 bp, Homo sapiens
acctcaacaagtacatcctggacaagatgtggtggtacagtgggagctattctgacatgtccactggaagttgta

SEQ ID NO: 145120 - DNA, 50 bp, Homo sapiens
tcagcctcccgaatagctgggattacagaatccaaaggactgcatgacac

SEQ ID NO: 145121 - DNA, 82 bp, Homo sapiens
gcaggagcttcgggacagcctgtggtctttgggaagaagcttcctgcctttgccaccatccccatccaccagctgcagcatg

SEQ ID NO: 145122 - DNA, 100 bp, Homo sapiens
agagacttgttttgcctcagtgttgaagccattgaaaggcactggtgaggtggattgatgatgaatcttctggcacacctggagcaactccagaacacag

SEQ ID NO: 145123 - DNA, 88 bp, Homo sapiens
caataattacctgaccaaggaggagtgcctcaagaaatgtgccactgtcacagagcccccctccatgcgcctgaaggcccgacccagc

SEQ ID NO: 145124 - DNA, 100 bp, Homo sapiens
tactgacctgtaaatcatcctttagagatacaatcttgcttgaccgtttgggacatcaatcttccacatgaagtgcaaaatttagaaaaacacattgaag

SEQ ID NO: 145125 - DNA, 98 bp, Homo sapiens
ccgccgcggccaggccccccaacatggactgtctctgtatagtgacaaccaaggacctgaaggagaagaaggagaaggtggaggagaaggcaagccgg

SEQ ID NO: 145126 - DNA, 100 bp, Homo sapiens
ctcagccgcccgctggccgggagcggagcccctgtggtaagagatgctaaaaaccttgtacctatggaccccaatggcctgtcagatccctacgtaaaac

SEQ ID NO: 145127 - DNA, 100 bp, Homo sapiens
gccaaagtggtgatgctacttgaggggaatttctgcaacccatagtcaacgattacatgtgattcgcctttgccagtctcatctcgtgtctgctttgtta

SEQ ID NO: 145128 - DNA, 50 bp, Homo sapiens
caagcaaagggactaccaccagcaggtgttggggatgtcctttgcactga

SEQ ID NO: 145129 - DNA, 100 bp, Homo sapiens
tctattttaacgtatgccttcttgggaactgccatctcctgcatcgtcataggaggaagttattgtcccaaagttgtgtgtcatgcccgaagtgtctggg

SEQ ID NO: 145130 - DNA, 74 bp, Homo sapiens
tgaaacgatatgaaaaagccattggccacctcagcaaatgtggacctggcctgggccgtcagctactacatccg

SEQ ID NO: 145131 - DNA, 75 bp, Homo sapiens
gtttctaggaaaggccggacaccagattccaaaggttttcctaaaaatataaccaacaacagggggaaaaaaaga

SEQ ID NO: 145132 - DNA, 74 bp, Homo sapiens
cggcaacatggcagagaccgcggccggagtgggccgcttcaagaccaaggtgtgggccgaagatatgctcatgt

SEQ ID NO: 145133 - DNA, 82 bp, Homo sapiens
gagcagcatggcatttcagtcactggtttgcagagtccagatccatatgtcaaacttctgcttgatgctatgaaacactcag

SEQ ID NO: 145134 - DNA, 75 bp, Homo sapiens
caataggtgacattcaatgagctttatcctgtggataaacgcagagtgaacgagtttggggagtcctacgaggag

SEQ ID NO: 145135 - DNA, 100 bp, Homo sapiens
cggacggttccgaggcgttgccgggagccgggcgcggctctgtgtggactcggagaaacgcggaacccttaggagaaatcttgagagtggacagcaattg

SEQ ID NO: 145136 - DNA, 145 bp, Homo sapiens
gcggcgaatgctgggagagtccgacgagcgctgcactaacgcaggatccggctgccgaaggtcctcgccaggttatgaagacagtatggagtttccagaccatagtagacatttgctacagtgtctgagcgagcagagacaccag

SEQ ID NO: 145137 - DNA, 100 bp, Homo sapiens
ctcctaccacctggtgcagaagcccttctctctgacgaaagatgtgctcttggacgtggcctatgcctatgaagtgctggatgaagaagacgacgtcgaa

SEQ ID NO: 145138 - DNA, 75 bp, Homo sapiens
tgagctgcgactgcagaactgggcccacgagaaggatccacaggcaccgaggaactgtgctgtgtagctgaactc

SEQ ID NO: 145139 - DNA, 105 bp, Homo sapiens
ccctgtccagaaaagctgccttatatgcgtgaccaagaatatggcccaggtgaccaaagccctggacaaggccctgagcaccatggacctgcagaaggtctcctc

SEQ ID NO: 145140 - DNA, 97 bp, Homo sapiens
acgtctctgaaatcaagtccggatgaagccctaccacttatgtcttggatgaagatgaacctcgattccttgaagaagttgattacagtgcagaaag

SEQ ID NO: 145141 - DNA, 100 bp, Homo sapiens
agacgatctgcacttcgcattttggcattgacatttaattttagggtcctttatatagaagggagagtagctgcaccaccaccgcctgtgctgatgcacc

SEQ ID NO: 145142 - DNA, 90 bp, Homo sapiens
gttcgtaagctaaaagctgaaaaatcccctaagattctgaaaaagagttccacgtcctcccttatcgagtctttgttccccttcctggat

SEQ ID NO: 145143 - DNA, 125 bp, Homo sapiens
gatgcagaagctactcaaatgcagtcggcttgtcctggctcttgccctcatcctggttctggaatcctcagttcaagacatatctgaagagatggattaagaatgctttggattaaggattgtgg

SEQ ID NO: 145144 - DNA, 75 bp, Homo sapiens
cagaacacagcagggcggaggaaagtgcagatgtacgatcgggcgatcagtgcccctaccagccccacccgcctg

SEQ ID NO: 145145 - DNA, 100 bp, Homo sapiens
gctatgatgtggaccgggccatctccgggggctccattcagtcggaccctttcctggggatgattatgggcctcggaggaggcatggactttgactccaa

SEQ ID NO: 145146 - DNA, 75 bp, Homo sapiens
accgatgtcctgctagaacgtcctggcagacaatgcagatcttcgtgaagactctgactggtaagaccatcaccc

SEQ ID NO: 145147 - DNA, 90 bp, Homo sapiens
gaggaggaagatggcgggacggctgccggcctgtgtggtggactgtggcacgggcaaaaaatcccagaagtgggatgaaatgaacatctt

SEQ ID NO: 145148 - DNA, 82 bp, Homo sapiens
gttgtcgtggccggagcggcccgcgcctgggctgccggcacttcgcggcagttcaaatctgaacatcaatgatgtactaggg

SEQ ID NO: 145149 - DNA, 100 bp, Homo sapiens
gtgatatacgtgcctttaacagataaagaaaagcagtggtccaggaagctgagaagtacaaagctgaagatgagaagcagagggacaaggtgtcatccaa

SEQ ID NO: 145150 - DNA, 98 bp, Homo sapiens
ctcagcccgccacagaagcgcatgaggagagactgtgattacccaaagaaggaggactacatcgtctacctgggtcgctcaaggcttaactccaacac

SEQ ID NO: 145151 - DNA, 82 bp, Homo sapiens
ggggagccccgggagccgcacgatgccgacaaaaggatcaaggtggcgaagcccgtggtggagatggatggtgatgagatga

SEQ ID NO: 145152 - DNA, 89 bp, Homo sapiens
gaagaaaagaaggggaagaagatcaaaacccaccatgccccagactatgtgaaaatgagcttagcccctggtgttgtgttggaacttca

SEQ ID NO: 145153 - DNA, 100 bp, Homo sapiens
gtctaaatttcggtagccatggcacaagaatatagcaaaaagccctcccacgtttgaggggagtcatgagccgtttcctgaatgtgttaagaagttggct

SEQ ID NO: 145154 - DNA, 76 bp, Homo sapiens
catataaagcccgagcccaaaccccgccaccatcataggctggcatggctctatataagattgtccccaaaaatcc

SEQ ID NO: 145155 - DNA, 75 bp, Homo sapiens
gttctctgctgctactgtaaaaacgaaatgagtggaattacatgaacgacagccttcgcaccgacgtcttcgtgc

SEQ ID NO: 145156 - DNA, 75 bp, Homo sapiens
ctgctgctgctgctgctggtggcccctttgcaggagttgaggagtgctgaaacaattggtcgtaccatcatatct

SEQ ID NO: 145157 - DNA, 90 bp, Homo sapiens
ctctagtggcggaagccttcgtctcccagattgcagtgaatggtagtgtctagaaagggtatgtcccttcaagagagaggtgccaatgtc

SEQ ID NO: 145158 - DNA, 80 bp, Homo sapiens
tcctcgagaggcaggcaggggatcccggacggctccagtttgtgttttcagctgcctactagacctcactacctggatgg

SEQ ID NO: 145159 - DNA, 100 bp, Homo sapiens
aggatgtggactgcagtgctgcagtgccaggaaagaccacagcaagattctttcattcgtctcctcctagcctgggggaccaggctcgaactgaccctgg

SEQ ID NO: 145160 - DNA, 100 bp, Homo sapiens
taacctgtgtggtctttgtgggaggaataacccagactaggaatgccagcatctgccaagcagatcttaattcatatcttgaagataaagtctaccttac

SEQ ID NO: 145161 - DNA, 75 bp, Homo sapiens
tttcaagattgatggacttactagcggattccagggaagttatacgtaatgattatgatgcaatcagaatcaatc

SEQ ID NO: 145162 - DNA, 87 bp, Homo sapiens
tgtacagagatgtgatgttggagaactatagcaatctggttttcttggatgtacctgtgtggtctaagctggaatctggtcaccttc

SEQ ID NO: 145163 - DNA, 98 bp, Homo sapiens
cccaactacacttggcctttcgacgacatcatcgtcttcgcctatgcctgccaggctgctggccactcccagaagagacgggggtggaactgcttggc

SEQ ID NO: 145164 - DNA, 74 bp, Homo sapiens
acgagaccgggctggccatgatctatggtcccttaatatggactttgaaaatcaagataaggagaaagacagta

SEQ ID NO: 145165 - DNA, 100 bp, Homo sapiens
tgaagacatcaagggaaaatggggtgaggaagattttgaagacaatcgtcacttatacagcggagcccagggagaatatgctggactggccactatccga

SEQ ID NO: 145166 - DNA, 100 bp, Homo sapiens
cttcactcaagtcctgtcaagtcaaggcagccgggatttgtccacatcggccgcctgggcagaatgtcacgatggacgagggcggcacgcccctgctccc

SEQ ID NO: 145167 - DNA, 74 bp, Homo sapiens
cagtgtgttagctttccccaatggatgcttatagaattttatgagtcaccagatccagaaagaagaaaaagatt

SEQ ID NO: 145168 - DNA, 88 bp, Homo sapiens
cgtctcggagaccccgcgccgacggctgctcaaacatcagggagcagctgacagacgaagaaaagtgctggacaggaagggagaattc

SEQ ID NO: 145169 - DNA, 50 bp, Homo sapiens
cctggccagcctcctgggcgcgggtactccaaagattcaggtttactcac

SEQ ID NO: 145170 - DNA, 100 bp, Homo sapiens
gaagaacatgccccaagttattcgtcagtgaggcggaaattgtggtgtacttgtgcagttatttggcagaaaagcagagtatcagatcacaagatggctc

SEQ ID NO: 145171 - DNA, 100 bp, Homo sapiens
tggactcaacagtttgtggcaagacaagctcagaactgagaagctgtcaccacagatttcttctggtgaatacattcagatgtctggtcgtgctggaagg

SEQ ID NO: 145172 - DNA, 100 bp, Homo sapiens
ttagcaagcaatgtggcaaaacgaaaaagctcaatgcctcagaaattcattgagactgtgcagttgatccaacttgtgttttgtgcatggagtgcttttt

SEQ ID NO: 145173 - DNA, 100 bp, Homo sapiens
atgcaggcaggccctgagcacgctgctgtgtgagcagcaggtgcatctgcagacgcagcaggaggtgaagctgcgcatgacgggcatggcgctgcgggtg

SEQ ID NO: 145174 - DNA, 75 bp, Homo sapiens
agaaataatggcaaataacttttccttggagagtcataacatatcactgactgcagtccggagtaacactggcca

SEQ ID NO: 145175 - DNA, 98 bp, Homo sapiens
cttcaactggggccgggttgtcgcccttttctactttgccagcaaactggtgctcaaggagcgcctggaccatgctgctgagcgcctactggcacggc

SEQ ID NO: 145176 - DNA, 98 bp, Homo sapiens
ctaccatgtcagccttcccagtagctgggaccacaggttgctccttgagggcaggacagttcttatggctttatccgttgcgtaagcacagagaggtc

SEQ ID NO: 145177 - DNA, 75 bp, Homo sapiens
tcacaggccgcgtctttgacgaataatccagaatggctactctgatctatgttgataaggaaaatggagaaccag

SEQ ID NO: 145178 - DNA, 75 bp, Homo sapiens
cgatttcatgactaaccagtttggccagtcagtgctgaaagatgtaagcaaagtgaagaagctgaagcaatctgg

SEQ ID NO: 145179 - DNA, 83 bp, Homo sapiens
gtgcacgttctgtgaagcttttggatcgtatccacaatcctgtaatctatgccagcaattatgacaatgttagcagaccatgc

SEQ ID NO: 145180 - DNA, 126 bp, Homo sapiens
cgagggcgccgcacccacaccgcgctgcgcagttttgttctgctccagctgttcgaaggtgatccaggtgacagagctgaatgaacctctctccaatgaagatcgaaatctcctctctgtggccta

SEQ ID NO: 145181 - DNA, 100 bp, Homo sapiens
cgtctctctgctgcggcgcggggaccgctgtgctctcgcaaaaaagggagacgctgtccccgctgtgcctcatccccatggtgacatctccccgggagga

SEQ ID NO: 145182 - DNA, 75 bp, Homo sapiens
ccaagagaggccctttgggacccaactggaaggcaatttgaatcaacccatagaagtgacagcgctgtattcatt

SEQ ID NO: 145183 - DNA, 95 bp, Homo sapiens
tgcactttgttttcaatgacaccaagttggacgctatgctggaagaatttaagaaaggtttttggattcaaagcataaaaaccattacaagatat

SEQ ID NO: 145184 - DNA, 90 bp, Homo sapiens
tcagaaatgcaatcacagacgtcacaaggtttttacagtctctagtgatccctgaaaagttccagcatattttgcgagtactcaacacca

SEQ ID NO: 145185 - DNA, 75 bp, Homo sapiens
tattgtcttaacatgcttcaaataaatcaggctccgtgtgtttgacagtggcgtcatggtaattgagcttcagtc

SEQ ID NO: 145186 - DNA, 116 bp, Homo sapiens
aaaacacactggaaacaaacagtatttctactggaaaaaccattttcagttaaagcagaatgcagagagctggaattccttgtccaacagttgtactactgaagaaacacatttta

SEQ ID NO: 145187 - DNA, 101 bp, Homo sapiens
aggagaaagaaaagaaaacaaagcaagatagaactcctcttaccaaagatgtttcacttctagatctggatgattgttggtcaaagaaaaagtgatgtatg

SEQ ID NO: 145188 - DNA, 83 bp, Homo sapiens
ctacaccccaagcatgtgagctgtggaggatccctccattcgtgggtccaggaggtgctcgcggtgaggatcgatgacctgga

SEQ ID NO: 145189 - DNA, 75 bp, Homo sapiens
ttcgcctcagacgcggtggagccgccggagtctgagaagaatcttgccctgtcgctcaagctggggtgcagcggt

SEQ ID NO: 145190 - DNA, 100 bp, Homo sapiens
gatgactgttgaactggaaaaactgagagctgatagtattcattccactcttttcataattggtcagaacagttagaaattgcttttaactatagtcatg

SEQ ID NO: 145191 - DNA, 80 bp, Homo sapiens
aatcaaactgcaaatctgggatacgacctgcctagagctggaacgttacctccagagcgagccctgctatgtttcagcct

SEQ ID NO: 145192 - DNA, 100 bp, Homo sapiens
tgcactcataggctcgtctggtgctatcctgtcatacatcatgtgtgtgggttccccactgaaggacttggtccagctgtctggcagggaggagagacag

SEQ ID NO: 145193 - DNA, 100 bp, Homo sapiens
ctgtatttcctcatgatactactgctaagtggtccaaaggcaaagttcgggacaagctcaataacttagtcttgtttgacaaagctacctatgataaact

SEQ ID NO: 145194 - DNA, 100 bp, Homo sapiens
gatgaatctcagtgttgatgtggaaagtagtcaggatggagacagtgatgaagataccacaccatccctggtgaaaaaccatacaagtgtcaaatttgca

SEQ ID NO: 145195 - DNA, 75 bp, Homo sapiens
ccaagttcatctcctccgtcaccagccacatctaccaggctgcaggccaacttcaccatccgggaagatgccaac

SEQ ID NO: 145196 - DNA, 96 bp, Homo sapiens
tgtttcggaatagtctcaagatgctgcttactggtgggaaatcaagtcgtaaaaacaggtcaagtgctccagaacctgggtatcaacccagcaaac

SEQ ID NO: 145197 - DNA, 90 bp, Homo sapiens
gtgacagggtccaacagggcctggtccgtgtccggtcccccaaatctgtcgtccctgcccccaggttgggacccctgattttagcaggat

SEQ ID NO: 145198 - DNA, 100 bp, Homo sapiens
cgcaacacgcttagcggcttctcctcagcccacatgggcagtcacgacatggctccttactatgaagccttgtgcaaatccctcgactggcagatagacg

SEQ ID NO: 145199 - DNA, 90 bp, Homo sapiens
gttgcttggcctggtgggcccagtcctcggtgcggcgcggccagattatgtctactttgagaattcctccagcaacccatacctaataag

SEQ ID NO: 145200 - DNA, 90 bp, Homo sapiens
gactatgttgcatatgtggctaaggaccctgttaatcgcagagggatttagtgcaagaagaagaacagttgatggaagaaaagaaaaaga

SEQ ID NO: 145201 - DNA, 75 bp, Homo sapiens
accaaatgtgagccagctgcggagcagtgcgtcagagtttcagcttccttcaaaatgtctactgttcacgaaatc

SEQ ID NO: 145202 - DNA, 75 bp, Homo sapiens
aagaaagcatcaggccaagccatcggaaagttctccaaagcttcgtaccttggccagaggcttgtctcctgcgta

SEQ ID NO: 145203 - DNA, 97 bp, Homo sapiens
tgctcagagatgccaagaagaatctagacagacaggcctttctagacatttatgcagtgtgtgattctttctaaaacaactccctggaagagaggac

SEQ ID NO: 145204 - DNA, 90 bp, Homo sapiens
ctcatgcaatagaagccctgattttggatccagaatcagcaagattagcctgaggcctgctcagtcgttcctaatgaataaaaatcaagt

SEQ ID NO: 145205 - DNA, 75 bp, Homo sapiens
gctggagagaccccgcggctgggcgttcatctaccacgctttcgtgtatcatttatcactgtgatcttaccaaag

SEQ ID NO: 145206 - DNA, 100 bp, Homo sapiens
agccaacagcagaagagaaagccagttatccacggactggaagatcaaaagaggcgagtggcatcgtgttccagtgggggactggtttggcatcatgtgg

SEQ ID NO: 145207 - DNA, 78 bp, Homo sapiens
tcaaagcagaagaagaccgaagggaagacttccagtagctccaaggaggttaaggaagtttatcggaattctatgcca

SEQ ID NO: 145208 - DNA, 90 bp, Homo sapiens
ctccgccaccgtgcacatccgaatggggctcagggaggactgacaggactagagttgacaaccattcatccaacaaacatttactgcacg

SEQ ID NO: 145209 - DNA, 98 bp, Homo sapiens
gtccagtaatgtcccggcggatatggttgcacgttttcaaaaaatacctaatggtgaaaatgagacaatgattcctgtattgacatcaaaaaaagcaa

SEQ ID NO: 145210 - DNA, 100 bp, Homo sapiens
tgctgggcacccacggagcctccggggctgatttctccacccaggtgaactcctccctcacctccccgacggggcgaggctccatggctgccccctcgct

SEQ ID NO: 145211 - DNA, 75 bp, Homo sapiens
aattgccggcaagagggagttaaggacattccaggcagaggcaaggtactccaaagattcaggtttactcacgtc

SEQ ID NO: 145212 - DNA, 106 bp, Homo sapiens
tcatcctcattgctactgccctctgcgctcctgcatctgcctccccatgtgaattcatcattggccgagttatcaaagccatgaataacagctggcatccggagtg

SEQ ID NO: 145213 - DNA, 96 bp, Homo sapiens
agcaatcagctggcctggtttgatactgacctgtaaatcatcctttagtatgtccgtggttcagaccctgtattaaagcttttggacgacaatggg

SEQ ID NO: 145214 - DNA, 50 bp, Homo sapiens
ccgccgccggacgtcggcaacggagaaggagaatgatccatctgtgagac

SEQ ID NO: 145215 - DNA, 101 bp, Homo sapiens
caccagcaaccactgggtggtcaatccgcggcacaacctgggcctgcagctctcggtggagacgctggatgatcgccggggagtggcctgtacagcaacct

SEQ ID NO: 145216 - DNA, 82 bp, Homo sapiens
caaatatcagagcaaggcaagaaggacaatgcagatcttcgtgaagactctgactggtaagaccatcaccctcgaggttgag

SEQ ID NO: 145217 - DNA, 74 bp, Homo sapiens
ttttgttctgctccagctgttcgaaggtgatccagatgaaccagaaactcgagatgcatggtgggcagaaatca

SEQ ID NO: 145218 - DNA, 101 bp, Homo sapiens
ttcacatccttgtctgtgaagctaaactcaatgctgctgtgtgggaagaagatttgtaaagaaaactcttaggtttgttggcatccaaagctgttggggtt

SEQ ID NO: 145219 - DNA, 99 bp, Homo sapiens
ggaggagagagcaagcagggaaagagagcgccaggtgcttagcaggctggaaagacagaccgaaaagaatttgtgaggaagaaaaccaaaacaaatcca

SEQ ID NO: 145220 - DNA, 131 bp, Homo sapiens
cctgctttcattttgccccctcggaacctctgcatcaaagaaggagccaccgccaagttcgaagggcggaacccttaggagaaatcttgagagtggacagcaattgtgaagatcgccagagagttctgtgt

SEQ ID NO: 145221 - DNA, 100 bp, Homo sapiens
agaaggataagtcgaaggggaaggcgcctgaagaggacgaaggctggatcaggtgcaacaccaccataaggaagagtggattcggtggcatcacgatgct

SEQ ID NO: 145222 - DNA, 83 bp, Homo sapiens
agtttgtgcaggacaccgacatggaacagggactcactgggggttggtcaaagaaaaagtgatgtatgaaaaagaggcaaaac

SEQ ID NO: 145223 - DNA, 50 bp, Homo sapiens
aaattcatcccagaaatctaagaggaaaatggctttgtaaagaagtttga

SEQ ID NO: 145224 - DNA, 100 bp, Homo sapiens
tcttgtgtccacccaagcccagggctgtgaacgtggctttcctcggtgtcatggagaaactccagctgggcccagagattctgcagcgggaaaatccaag

SEQ ID NO: 145225 - DNA, 75 bp, Homo sapiens
aaattattgattgctacttacgtgaccctctgcgagaggcgcttgactttggcagatattgagagaatagcccca

SEQ ID NO: 145226 - DNA, 50 bp, Homo sapiens
ctcagatgctcccttctgctcctggttttaaaatcaaagatgggaaaatc

SEQ ID NO: 145227 - DNA, 83 bp, Homo sapiens
caaagagtcacctaaagttaggcggcactccagccccagctcgctattaattgatggcaaagttattttggctttgtttacct

SEQ ID NO: 145228 - DNA, 87 bp, Homo sapiens
acaagatattttacagcgtgactcaaacaagagccagaaactgctaaagaaactcatgtcagggatgtattcttggcctgggtagcc

SEQ ID NO: 145229 - DNA, 82 bp, Homo sapiens
tcagcctcccaagtacctaggactacaggccaacagagattttgagaaacacattgaaggatctgttaacacttgatatacc

SEQ ID NO: 145230 - DNA, 75 bp, Homo sapiens
tgaggcctccccagccacgtggaactgaccagtccaccatgcctgaagtcaaagacctctcagaagccttgccag

SEQ ID NO: 145231 - DNA, 50 bp, Homo sapiens
agacaagttcaccccgaagtctgccgagattacctaagcaaattgaagaa

SEQ ID NO: 145232 - DNA, 98 bp, Homo sapiens
tttaactcagatcttgctgagaccaggagcatctgatttaacaggaagtttcaggaggaagaagccagacgacagtcaggagctcagtatggctcttt

SEQ ID NO: 145233 - DNA, 75 bp, Homo sapiens
gccgggagttacaccgccaccgccagaatggtcctagtgccagatcgtgtcataaaatgtgcattgatattcaac

SEQ ID NO: 145234 - DNA, 50 bp, Homo sapiens
catggggaagcgggacaatcgggtgcgtgaggtcgaccgcaaccaggagc

SEQ ID NO: 145235 - DNA, 90 bp, Homo sapiens
cggggccgctccggcccgctccgagcaaagcgagctgaattccttcttgtggaccattaagcgagacccaccatcttacttctttggcac

SEQ ID NO: 145236 - DNA, 82 bp, Homo sapiens
gacaaggtgttacacagcaacaattcaaggcaatcatcaaatgcttagaagatcgagggtttttcattttacttacatcatc

SEQ ID NO: 145237 - DNA, 100 bp, Homo sapiens
gagacccggacagaggcaagcaggggcgccgtgggtgccagagaggcggaagaggaggcctgatgggagagacaagagagacacctccaacttcgacaaa

SEQ ID NO: 145238 - DNA, 100 bp, Homo sapiens
cgaaattccggatttccttgggtcttccggtaggagctgtaatcaattgtgctgacaacacagagagaaatagcccggaaacttgcaaatcctaagcaac

SEQ ID NO: 145239 - DNA, 51 bp, Homo sapiens
agtgggaggtgctgagccgctcagctgagatctgtatctgtggacctgaat

SEQ ID NO: 145240 - DNA, 78 bp, Homo sapiens
gcagccaaccatgctcaacttcggtgcctctctccagcagactgcgggcttttgttgtaacaccctgactttaaaagt

SEQ ID NO: 145241 - DNA, 75 bp, Homo sapiens
ctgagatcgtcaagtctcccagcgaccccaagcaataccgtccaaggacaaaatgatgagaggctctcgcagagg

SEQ ID NO: 145242 - DNA, 83 bp, Homo sapiens
gtggaacggctgcttttggaagccctgggcgctgcctatggcacagccaagagcggtaccggcattgcggccatgtctgtcat

SEQ ID NO: 145243 - DNA, 90 bp, Homo sapiens
agaggggacagaggcaccaaggacctccaagacagtaacaaatgtggcaattattttggatctatcacctgtcatcataactggcttctg

SEQ ID NO: 145244 - DNA, 75 bp, Homo sapiens
gctgtccatgaaaccccttggtgaaggccctccagacccaaaagtttgacataaagagcttctgcaagatcctgg

SEQ ID NO: 145245 - DNA, 75 bp, Homo sapiens
ttcatcatgcacatcttcaagcatgctcagcggccctccaggcactgaagcgtaagaagaggtatgagaagcagc

SEQ ID NO: 145246 - DNA, 100 bp, Homo sapiens
agcctccggagtagctgggactacagaactcatcccaagaacagtatccataaggaagatggaaaagggggacagaataaatgttaccctaagaagtcca

SEQ ID NO: 145247 - DNA, 82 bp, Homo sapiens
ctccactccgtcccccgcgggtctgctctgtgtgccatggacggtgcagagcagagcgggcggaggaccccgggcgcgggcg

SEQ ID NO: 145248 - DNA, 78 bp, Homo sapiens
ttatctatgctttaacagaccttatgacagaagctgaggtgactgaaaatacagagctggccaactcagccaatccgc

SEQ ID NO: 145249 - DNA, 50 bp, Homo sapiens
cttcatctgagagtacttcttcaacaggttttgagcaaaattttggactg

SEQ ID NO: 145250 - DNA, 101 bp, Homo sapiens
cttcatctcagctccagagcccgccctctcttcctgcagcctgggaacttcagccggctggagtggtggggtcagatgctgtggactctgggacctgcagc

SEQ ID NO: 145251 - DNA, 100 bp, Homo sapiens
ggaggaaaacaacttcgagggcagacaagagtgagccatggagctacgtgtggggaacaagtaccgcctgggacggaagatcgggagcgggtccttcgga

SEQ ID NO: 145252 - DNA, 75 bp, Homo sapiens
cacccgcgaaaattcggccagggttctcgctcttgtttgcagaaaaaacttcagcatgtgccaggaacacaacct

SEQ ID NO: 145253 - DNA, 50 bp, Homo sapiens
ctgacggcgtgaccgacccgagccgggctgcgtccaaagaggactctgcg

SEQ ID NO: 145254 - DNA, 98 bp, Homo sapiens
ggcaaatggcggacttcgacacctacgacgatcgggcctacagcagcttcggcggcggcagaggaaccttcgagatctgcggtctggggtctggttga

SEQ ID NO: 145255 - DNA, 98 bp, Homo sapiens
tgtgaagaaggattttttacgaacattttatactcaccaagaactgtggtgtaaagcgcctgtaaaaccagggtctgctcttgataaaataacagcaa

SEQ ID NO: 145256 - DNA, 75 bp, Homo sapiens
cggcggagaccgcctctgctcccgcctggggtctctaattaacagaagatggcaaagcccagccacagcagctat

SEQ ID NO: 145257 - DNA, 90 bp, Homo sapiens
ctgcgaggaaaatggcggcgggagtttccaacatggctagatccatcagaaactgaagccgtggagaacgctctcggggcctttgccact

SEQ ID NO: 145258 - DNA, 100 bp, Homo sapiens
ctccctctaccggcggggtgaagaagcctcatcgctacaggcccagagcaagagaggcatcctcaccctgaagtaccccatcgagcacggcatcgtcacc

SEQ ID NO: 145259 - DNA, 83 bp, Homo sapiens
tggtgcaggcgctgcgccgcaacgccgagcgcaccgacatctgcctgctcaaaggttcagcagctggacatggagaaccaacg

SEQ ID NO: 145260 - DNA, 100 bp, Homo sapiens
cggggacccgctgtcactgcgcctcccgctgccgacgccgcctggacggccgcactctccctgcccgagacccggcatcttcttctgaagacatgggcag

SEQ ID NO: 145261 - DNA, 90 bp, Homo sapiens
gaaattactgtctcaagtgatacgggcaaggagctgctggcgcagaagctgccgctgtggcaacaggcctgtgccgaccccagcaagatc

SEQ ID NO: 145262 - DNA, 146 bp, Homo sapiens
aaacagctctcacaggacctggctgtcaacctccttgttgcccccactgttgccttgagaattgaagacatgccttcctgatgcgcttgcctgctccctggtctctctgcatggggaaggagtgttcccagcttgcaaactccagc

SEQ ID NO: 145263 - DNA, 98 bp, Homo sapiens
aggcctcacgcagctccacagacagccccagctcggtgttcctcagggaagcagtgcgttatatcaatgaaaacctaattgttaacacagatgaactg

SEQ ID NO: 145264 - DNA, 100 bp, Homo sapiens
gccgccagacacccgcggcgaaggcggctcgggctcgggctccggccgggccttcggaagcatgttgtgtgagggatgtcacagaaccaggcgccctgag

SEQ ID NO: 145265 - DNA, 126 bp, Homo sapiens
ccgccgcccccgcacgccgcgcccgcgcccccgctccgccgcggagtttctgcatgactgtcacaaaggacatagttgacggcaaggaaaaagaaggacaagaacttggaactgcggattgctctg

SEQ ID NO: 145266 - DNA, 75 bp, Homo sapiens
gcaggcagtggccacaagagcgaggagaagcgagaaaagatgaaacggaccctcattttgaaagcgaagcagaag

SEQ ID NO: 145267 - DNA, 50 bp, Homo sapiens
ggaacttggtagtagtcaatcagcaggatcttggcatcggaaatggaacc

SEQ ID NO: 145268 - DNA, 90 bp, Homo sapiens
ggtgaactttcacggacaacctcagaggacaacgaagtgttcggtgaatctggattgggaaagtcgacattaatcaactcattattcctc

SEQ ID NO: 145269 - DNA, 100 bp, Homo sapiens
gtctttgatgaaactagaaagaccacgaacttcaaaggggaaagcaaggccaaagacagggagaagacccaacatgagtgaagtttcctgcaagaaacgg

SEQ ID NO: 145270 - DNA, 83 bp, Homo sapiens
ggaagaaaaagatacaacgaactagcacaacgagggtcttcaggtcaagttactcttggagatgcttgttctgcaagtaccag

SEQ ID NO: 145271 - DNA, 74 bp, Homo sapiens
gttggaggaactggcccggaaacaggaggacacctgcgaccgcatcaagcagtccgccagcggaaccaagcggc

SEQ ID NO: 145272 - DNA, 99 bp, Homo sapiens
aaggtggaatttctgaaacaagaattgagaaacgcattgtgatcacaggagatggagatattgatcatgaccagtgcctttgttccattgaatgttccc

SEQ ID NO: 145273 - DNA, 100 bp, Homo sapiens
aagatccctgctggccaaaacattctgattaccgttggaaagacttcaaatcatgcaatagttcttgcccagctcatcactaaggggaaatgctatggat

SEQ ID NO: 145274 - DNA, 74 bp, Homo sapiens
cgctatctgcagtggtgctgaaacgaccggagatactgacagatgagagcccccatcacctcaggcttctcagt

SEQ ID NO: 145275 - DNA, 90 bp, Homo sapiens
gcgtctggaggaggctgcagcagcggaagaccccagtccaggagactgagtgccctttgcggcttgctgtctgccagcactgtgatttag

SEQ ID NO: 145276 - DNA, 74 bp, Homo sapiens
tcctgatggacagtctcagccccccctccaacagaatcagggcttgccaaatgagagttggaaaatatccaaaa

SEQ ID NO: 145277 - DNA, 99 bp, Homo sapiens
agaggctcttcctcctcctcccgcgacggtggcggcggaagagctaagcaacgtggcttagtccatcagcatcttattctgggtaataaaaaataaaaa

SEQ ID NO: 145278 - DNA, 100 bp, Homo sapiens
gccagcgccagctgcagccctggccgcgcactcgcctcagctgagcctgggttgtactcgtaaaacaaggatcatcgatgttgtctacaatgcatctaat

SEQ ID NO: 145279 - DNA, 83 bp, Homo sapiens
tgaagagcgacaagccgctggcagccgcggatctcaccgccgctcaggcgagtgatagacagccaagcagagaaactgaagga

SEQ ID NO: 145280 - DNA, 83 bp, Homo sapiens
agactgcgggggtgctgcggccgtcctgggggccttcagagccgcaatcaagcagtccttgctggtgcagacgaagcggcggg

SEQ ID NO: 145281 - DNA, 100 bp, Homo sapiens
agcaccactggttccatagtgtgtggttacaatggttggtctgatttacccatatgttatgtctcaaatatctatcagtgtagaagagtgggaagacacc

SEQ ID NO: 145282 - DNA, 89 bp, Homo sapiens
aaacaagtggctgcggccgtcgcccaggagtcatcggacgccagaatctgggggatatgagactttctactcggaatatcctgagtgtt

SEQ ID NO: 145283 - DNA, 75 bp, Homo sapiens
gcgaggctgcgggaccccaggatgggggacaggaggctgcggggcctcaggttcttggcatggagtagagggtga

SEQ ID NO: 145284 - DNA, 100 bp, Homo sapiens
ctgcaaaagagccttgaaggaagttagcaagacactgtgcatcttagccaacatagcggatgggacaacagcaaaagatcttattatgaccaatgatgat

SEQ ID NO: 145285 - DNA, 74 bp, Homo sapiens
agatctccgaccagtctgggggcgctggcggcctgcgcagccacctcaagatttgaggcttaagcaacttcttc

SEQ ID NO: 145286 - DNA, 74 bp, Homo sapiens
cagccggaagccgctggacagccgggtcctgaacgctgtgaaattacctggagtagaacagaaaaattattatg

SEQ ID NO: 145287 - DNA, 101 bp, Homo sapiens
gaagccccccttcgagctgccagacttcatcaaacgcacaggcatccaggagatgcgagaggccctgcaggagaaggatgacagtcctccacagaaatggc

SEQ ID NO: 145288 - DNA, 97 bp, Homo sapiens
tggcggcttcctagtgagtcggcggctgatttagaaggaggttcaggctacggtgagccgaagggaagccggagcttccccggcagcctggctccac

SEQ ID NO: 145289 - DNA, 50 bp, Homo sapiens
ggagacattctgatggaatttggcttgaatgcaccaaggaaaggccattt

SEQ ID NO: 145290 - DNA, 76 bp, Homo sapiens
tctcagtagccatgctcatgatcggcgtgtttggatgtactttacaggtattggaaattatgcccttgctcagcac

SEQ ID NO: 145291 - DNA, 87 bp, Homo sapiens
ctccgggccccgtacccggagagcggcaactcgcgcactcaaagactgtgaattgttacctcatagacaataatggatttattttgg

SEQ ID NO: 145292 - DNA, 90 bp, Homo sapiens
ggctccgtcgtggaagcaggactgcgccgcgtcttcctcaaggagaactacgatgacccgcacaaaacccctgcctccccagttgtccac

SEQ ID NO: 145293 - DNA, 75 bp, Homo sapiens
ggcccggggtgtcagtgtggaggagactgaggtaagaatgattgatgttggctgatattggagtgctcattcaca

SEQ ID NO: 145294 - DNA, 100 bp, Homo sapiens
cttctctacagaaatgccagatatgatagcaagttttcagaggctatcacagtgctgctttcctggattgaacgaggggaagtgaatcggcgctctgcaa

SEQ ID NO: 145295 - DNA, 90 bp, Homo sapiens
agccaagactgcctttctatttattttacctcagtataacattagcgtgcctacagcagggaagaaggagaaagggccaacccctgaaga

SEQ ID NO: 145296 - DNA, 98 bp, Homo sapiens
gtctttgttggcaaacagttctgggggtcgtccgatcctgcagcttcctgcctgacacagctcacttcaagaagtgcacaatgtcagaacgtggaatt

SEQ ID NO: 145297 - DNA, 92 bp, Homo sapiens
catgaacggaagcgtctttgctcaaggatcccagttttctctggatgacgtgacttcccaagtaagaagcggaagaggagccgctggaacca

SEQ ID NO: 145298 - DNA, 90 bp, Homo sapiens
aaaacttgaaagtaacagcagtgcctacactacttaagtatggaacaatgcagaggccaggatgtgggcccagccctgtgccaggaggct

SEQ ID NO: 145299 - DNA, 109 bp, Homo sapiens
cacttatgtttgtaaatgtgagtggaagccatgaggccaaaggcagttgtattggttgctccttgagggcaggacagttcttatggctttatccgttgcgtaagcacag

SEQ ID NO: 145300 - DNA, 82 bp, Homo sapiens
cctggtgtcgccatgggccgccgccccgcccgttggccacggcatatgcctccaaggacggggtcctcactgaggccatgat

SEQ ID NO: 145301 - DNA, 75 bp, Homo sapiens
gtttgcagatcgggagcgcaaggtcgccctcaaggccatgatcaaaacgtgagaagccctaccactgcaactggg

SEQ ID NO: 145302 - DNA, 50 bp, Homo sapiens
caggagccggcgcccccgccctgtaggcaaagtactagctctgtgattag

SEQ ID NO: 145303 - DNA, 100 bp, Homo sapiens
cgtcctgcggccccgaggacgacgcccagctccagctggcccttagtttgagccgagaagagcatgataaggtacttagaagttttgattcaatgatcag

SEQ ID NO: 145304 - DNA, 98 bp, Homo sapiens
gaaatggggcctgggggacggtaggagcctccgtgcggagaccactgttcaaggccacagaggcttcgtgacggagttatcagagacattgagaggca

SEQ ID NO: 145305 - DNA, 75 bp, Homo sapiens
gtcctcctggcctcagcaacctgacaattctgtcgtgtcccggagagaagcaatactgcagagaaactgtatgac

SEQ ID NO: 145306 - DNA, 147 bp, Homo sapiens
gttccttgagggactcaagtctgcagtggacgtcgtcttccaggctcaaaaggagccacaccccctgcagtttctcagctacccactgctgaaactccccttgccaggaacaggacctgtggaattcaccacccctgtgaaggatta

SEQ ID NO: 145307 - DNA, 100 bp, Homo sapiens
tgctgccaagggctacattgaggtgatgaggtctctaattaacagaagatggcaaagcccagccacagcagctatgtccttcagcagctaaacaaccaaa

SEQ ID NO: 145308 - DNA, 89 bp, Homo sapiens
cctcgatctaaggatgaccctggaaaggaatcccgttctgcttccagaagtggaagtgctcacggatcggggaaatctgcaaggcatac

SEQ ID NO: 145309 - DNA, 75 bp, Homo sapiens
gaagcagccgatccagcctgcggagcctgtggggcagactaaacttcagtggctctgtgaggaactgaaagagag

SEQ ID NO: 145310 - DNA, 75 bp, Homo sapiens
cattacaccatctgaattgcctgcaaacccaggctggtgagattggagagatgaaggatggagtcccagagggag

SEQ ID NO: 145311 - DNA, 82 bp, Homo sapiens
cctcctggccaccgactcctacaagacttcccaagaaggacaacccgaggcgaggcttgtggctggccaactgccagcggct

SEQ ID NO: 145312 - DNA, 100 bp, Homo sapiens
cggggaccttgccttgcccgggcctctgcgcttagataccttcatgaaaacagaatcatccatcgggatctaaagccagaaaacatcgtcctgcagcaag

SEQ ID NO: 145313 - DNA, 98 bp, Homo sapiens
ataacaagcggttctctaccctgtaaaggtggggaccaaggcatactgaacacattttttagcagctgggcaacaacagatatcagaaaacacctgcc

SEQ ID NO: 145314 - DNA, 100 bp, Homo sapiens
ctgcagttgctggccgagcctggcctgggccgcgtccatcacctggcactcaaggtcacccctcctaatttctcagtgtcacaagtgcccaacatgccca

SEQ ID NO: 145315 - DNA, 82 bp, Homo sapiens
agcaaggggcttacgcagaaggacctggccacgataacgaaggaggcccaacttcattcaataaggagcctgacggatttat

SEQ ID NO: 145316 - DNA, 75 bp, Homo sapiens
attggagaaaatttgcctcaaagcgagtctcaaaggtgttcctggatttggtgccgtgtggacaggcgacaacac

SEQ ID NO: 145317 - DNA, 100 bp, Homo sapiens
cagcagagctttgaagccttgtcggagagagctgtggcagtggttgtggatcccattcagagtgtaaaaggaaaggctgctggaaagtacagacaacaag

SEQ ID NO: 145318 - DNA, 75 bp, Homo sapiens
tcgcttctttcggttctacctgggagaatccaccgccatccgccaccatgggaaatcctcattgacgattcaatt

SEQ ID NO: 145319 - DNA, 98 bp, Homo sapiens
ccgctcccagccacagcctcccgcgcctcgctcagctccaacatgggacccagacagcgtggtcctctgcctcttggccattgacgaggaggaggagg

SEQ ID NO: 145320 - DNA, 100 bp, Homo sapiens
ctcctgagtagctgggactgcagaaaaccatgataaattctggacaaaatacagaaaacccacaactctctgaaggcactggagagtgaccatagcaggc

SEQ ID NO: 145321 - DNA, 49 bp, Homo sapiens
ggcgcgctcgagacgctcctgagggaggttcccctgaaggatgctaagg

SEQ ID NO: 145322 - DNA, 98 bp, Homo sapiens
tggattcatggtcacgcgatccctcggacctggttagggtgtatgtttccccaggttactccattgccgctaaaatcactggtccaacaacagtgaat

SEQ ID NO: 145323 - DNA, 50 bp, Homo sapiens
caaccttctgcgtaacccgtgtggggaagctgcaatccagaccacaagca

SEQ ID NO: 145324 - DNA, 90 bp, Homo sapiens
cccatcgacggtcagtgcgcacgttgtaatcagctgaggccatgtcaggagacggagccacggagcagatactgtggcctcatgaatagg

SEQ ID NO: 145325 - DNA, 93 bp, Homo sapiens
taaccgacaaaaagccttatacgaggacgttatcctgcaacctggacaatgcagatcttcgtgaagactctgactggtaagaccatcaccctc

SEQ ID NO: 145326 - DNA, 80 bp, Homo sapiens
cggatacttctgaagaacaaattaaagaatattttggagcctttggagaggcactcagaatggtccagcgtttgacatac

SEQ ID NO: 145327 - DNA, 75 bp, Homo sapiens
atccagatgaatgatgtcatcaccgtcatcgagggaaggttttgggatttgagattgacgcggtgaactctgtcc

SEQ ID NO: 145328 - DNA, 50 bp, Homo sapiens
actcatcacgtctctatagtgtcttctgactaatctggtagcttctggtg

SEQ ID NO: 145329 - DNA, 100 bp, Homo sapiens
tcgggaagaagtttcagactacaaggtgctgacagctgcagaagaaattgtacatggtgctgtacagaaggtatttctccactgtgccatctgcagagtg

SEQ ID NO: 145330 - DNA, 97 bp, Homo sapiens
cagccggaccagcccagaaggcagcggcggcccaggccagcattcccgcaaacaccttccaccatgaccacctcagcaagttcccacttaaataaag

SEQ ID NO: 145331 - DNA, 76 bp, Homo sapiens
ggggactgcaaaggccaatgttggtgctggcaaaaaggtggccgtttgttgcatctgtttttttgttattcttcct

SEQ ID NO: 145332 - DNA, 83 bp, Homo sapiens
accgcctccttcccagccgcgcggcttcctccagacctctcggcgcgggatgagctcatggcggaattagaagaactagaaca

SEQ ID NO: 145333 - DNA, 98 bp, Homo sapiens
tgaacatgaagaatactggaaagttgctatgttttggatttcgaactcaacaatgaactaaagatgaatgtcctaaatttgctagaagaagttttgcg

SEQ ID NO: 145334 - DNA, 74 bp, Homo sapiens
aggcgagttctcggaaggctacgatcctacagtggagaatagcccgccaagctgccccctgtgtgctattcttt

SEQ ID NO: 145335 - DNA, 50 bp, Homo sapiens
gccgggcgaccccgcccgggcctcggccatgtgaagacgtgcctgcctcc

SEQ ID NO: 145336 - DNA, 106 bp, Homo sapiens
tcgcgtgtctaggtgagtcgcggtgggtcctcgcttgcagttcagcgaccacggcattgaagttgatatcgatgtggagcacggagggaaaagaagccgcctgacc

SEQ ID NO: 145337 - DNA, 75 bp, Homo sapiens
ttctgatgaagaagttattcaagatgaactgataaatttcaaacggaagagagtggcagcatttagaaagaatct

SEQ ID NO: 145338 - DNA, 100 bp, Homo sapiens
cagccctccatctgcctctgttccctggaggactttctctgaaaccccgagactcttcagttgaagttcgtagtgattgggaagtgaaagaggaaatgga

SEQ ID NO: 145339 - DNA, 97 bp, Homo sapiens
caagattccagatgttcctgtggaccccagtccaggaccaagaatcgccttcagccctgtctggtgcatccttggcagaaagtgaggaggaaaacac

SEQ ID NO: 145340 - DNA, 82 bp, Homo sapiens
tcccgagtagctgggactgcagtttgccagggtttggatacctgatccagaggaagtctggaagtcagcagagctgctcaaa

SEQ ID NO: 145341 - DNA, 82 bp, Homo sapiens
ggcggaacgcaggagacacaagaagcggatccagcctcccgcgacgatgcccctcaacgttagcttcaccaacaggaactat

SEQ ID NO: 145342 - DNA, 75 bp, Homo sapiens
gggcgtcgctgaagctgtgtctgcggggaggcagcggaaggcggcaggtcgcgtggggcaggcagtggcgctgcg

SEQ ID NO: 145343 - DNA, 119 bp, Homo sapiens
tgtccgggctgtgagcaagaggaagctgcagcccacccgggcagccctcaccctgcaaaatgatgcttcaacacccaggccaggtctctgcctcggaagtgagtgcttctgccatcgtc

SEQ ID NO: 145344 - DNA, 88 bp, Homo sapiens
agaggcggcggacgggccggagggaggatgttaaagccccgcgcctcctccagctggtgatctcgggtcccgtgcagcagtcgcctca

SEQ ID NO: 145345 - DNA, 74 bp, Homo sapiens
aacatggggtttcgagtgggacaaggattgatagaaaggacagtcattttgtttactcattcagccctgttgca

SEQ ID NO: 145346 - DNA, 51 bp, Homo sapiens
tacagaaacctcgtctccctgggaaaacgtccctttggtgtttcattgctg

SEQ ID NO: 145347 - DNA, 100 bp, Homo sapiens
cccttctggatggtactgatgttagtgtggacttgccatactatactggcaattgctggagaagattttgcaattgttgcttctgatactcgattgagtg

SEQ ID NO: 145348 - DNA, 88 bp, Homo sapiens
ctccatcgtggcgcccctgctgctgagaaacacatcagcccgggccagctcttccgaggctccagcctgcttttccgccgggtgtcat

SEQ ID NO: 145349 - DNA, 90 bp, Homo sapiens
gcctcccgagtagctgagactacaggcatcgtcatgtgatcatcacctaagaactagaacatcagcaggccctagaagcctcactcttgc

SEQ ID NO: 145350 - DNA, 100 bp, Homo sapiens
agatgatgcggtggtgggggacctgccggcacgcgactccccccgggcccaaagactggcattgcggactgacctccagggagaggcccagatctgatct

SEQ ID NO: 145351 - DNA, 100 bp, Homo sapiens
aaaacaagaccggttcctttctaatcagagaaagtgaaagccaaaaaggagaattctctctttcagtttcaccagtgatcattaaagaatgggcagctta

SEQ ID NO: 145352 - DNA, 100 bp, Homo sapiens
ggaattgagcaagggagtgatgccggttatctctgtgaatctcaggcaccagaatttcctgagtttgccactaaagtccaggaagctatcaattccctcg

SEQ ID NO: 145353 - DNA, 100 bp, Homo sapiens
cctgctacggcgaatgctcctgactaataatgctaaaaatcattctcccaaacaactccaagaaggtgctggagaatctggtaaaagcaccattgtgaag

SEQ ID NO: 145354 - DNA, 90 bp, Homo sapiens
cgaacacacaatgtgactgagaaagtgacccaggtcatccagaaatttatcctttagtattaaccaccaagacccaagaaatatttaact

SEQ ID NO: 145355 - DNA, 96 bp, Homo sapiens
tggtgcttgagaacttgtgccccagttgctgtgctccaaggacacacaggatcaattacatctttacaggccagaagcggactcctagaagagggg

SEQ ID NO: 145356 - DNA, 110 bp, Homo sapiens
aggttaaactacagaacaacatatcgtatcagatggcagacatacatcatttaaagggcaccggcttttccgtgaacattgtgtttgtgtacaaggaaactatataaagg

SEQ ID NO: 145357 - DNA, 100 bp, Homo sapiens
tgacagattacttgtggaacttggattctcaaaggtttacttttggacatcaagcccatcactgccagccagtgaagaaggattccagcctatgccctca

SEQ ID NO: 145358 - DNA, 100 bp, Homo sapiens
agatgggatctttccggatcaatccagatggcagccagtcagtggtggagatgtatgagaactttgtggaggaggtggatgctgtggacaatgggatctc

SEQ ID NO: 145359 - DNA, 100 bp, Homo sapiens
ggaaatctctccaaccaggaacaaacacctgccttgcaatattagggtgagcagggcagcatttccttctcccactgctgctgagatggcagaaattagt

SEQ ID NO: 145360 - DNA, 100 bp, Homo sapiens
cgcagaatgacagaactgaaaggaacttttagaggcaatcacttagtcaacctcttgctgttacaggtaaaaatgtctccatcgtatcatcagtccaaag

SEQ ID NO: 145361 - DNA, 96 bp, Homo sapiens
ggacactgaaattcagagaggggaagtgatttgcctcagcttgtacttgcctggatcaaagtggaacagctgaagccatatcatgctcataaagag

SEQ ID NO: 145362 - DNA, 51 bp, Homo sapiens
cctcagccaacagagctgtggttggtcaaaatgcagatcttcgtgaaaacc

SEQ ID NO: 145363 - DNA, 75 bp, Homo sapiens
atgggtctccgtacaccaaaaactcaggcttcgccacctgcgtgcaaagctcacagaacatttcctgcctgttgc

SEQ ID NO: 145364 - DNA, 100 bp, Homo sapiens
agcaggtgccggtgcctgtccccgggggcgccatggcgaccggagcgaacgccacgccgttggggagcatcgagtacagctgtccggcctccaacgagtg

SEQ ID NO: 145365 - DNA, 100 bp, Homo sapiens
gattacttccaggatcatccgttcttccgaagatcctaatgaggacattgtggagagaaacatccgaattatattcaattagcagagcctcacagacaat

SEQ ID NO: 145366 - DNA, 117 bp, Homo sapiens
tgtttctctccctctgcccccccttccccacgcaaccccagatccatttacactttacagtgtggacactgccagcggctgcagccgacttggaatgacctgggagacaaatacaac

SEQ ID NO: 145367 - DNA, 96 bp, Homo sapiens
cccagaacaaagtgggaaagggaagcttagcccgccgctgccgcctccgagcagcccgccagctacaagagccaaatactgatcgacaacttattg

SEQ ID NO: 145368 - DNA, 82 bp, Homo sapiens
cagtggtcatcgatgggagcaacgtggccatgagacaatgcagatcttcgtgaagactctgactggtaagaccatcaccctc

SEQ ID NO: 145369 - DNA, 51 bp, Homo sapiens
actatcccaagactgctggcaacagtgacaaatggcctacagctgtgagag

SEQ ID NO: 145370 - DNA, 100 bp, Homo sapiens
agaacttcctcgcactgtgacatgtctgatcccttgctcccatccctgcagcatgaacaagctccaaagacaacaggccctccctctgccctcccgtctg

SEQ ID NO: 145371 - DNA, 82 bp, Homo sapiens
gccacgagcgcatcaccaagctggcagacagtctagcagtgcttccttggagaccctgttagcacttcttcaggcagaaggg

SEQ ID NO: 145372 - DNA, 100 bp, Homo sapiens
ccggcccggtcccgggaggaagatggcgctgcgaattcgctatgacagtgatagctggtgcccaccattgccagtacaaacttacttacaccaaggtctg

SEQ ID NO: 145373 - DNA, 83 bp, Homo sapiens
ctatgacgccgagaagcagaggccccgaggttttaaaatcaaagatgggaaaatcggagaaaattgcccttccccatggccag

SEQ ID NO: 145374 - DNA, 83 bp, Homo sapiens
aatgaggctccctgctcagctcctggggctgctaatgctctgggtctctggagcatcagatccatgctgctgctgactcggag

SEQ ID NO: 145375 - DNA, 83 bp, Homo sapiens
cgcgggcgccccgagcccggctccgcgcgcctggcggctacatggagagtgtcagtgtaaacaggaacatcgataagtagtgt

SEQ ID NO: 145376 - DNA, 74 bp, Homo sapiens
agaaaagggatttatatggggcttccttggacctgtctgcgccatcttctcttgctatgctggaaaatgagaag

SEQ ID NO: 145377 - DNA, 90 bp, Homo sapiens
gtgaacatcatggatcagaacaacagcctgccaccttacgctcagggcttggcctcccctcaggccagaagcctgtcttagatgttcatg

SEQ ID NO: 145378 - DNA, 100 bp, Homo sapiens
aattgtatctgtttttctcagaagagaattccacaaggcgtccctttcccttgcacctgttaacatctttaaggcaggagctgatgaagagagagcagag

SEQ ID NO: 145379 - DNA, 97 bp, Homo sapiens
ccctacatgcccttccccgtggccgtcatctgcctcttcctcaacactttcgtgccgggactgggtgtcatggagaaactccagctgggcccagaga

SEQ ID NO: 145380 - DNA, 90 bp, Homo sapiens
gatggcggatgccctgcagtacctgcagaaggtctctggagacatcttcagcaggcccacccttcctccattctgagcacataaaaaccc

SEQ ID NO: 145381 - DNA, 49 bp, Homo sapiens
ctgcagaacccccagaccatcatgactcctcctattttgaggacttctc

SEQ ID NO: 145382 - DNA, 75 bp, Homo sapiens
tgtcagattatcaggatgaggggcttgctttcagaaatcctccgaaaggaagaggaccccaagactgcatcccag

SEQ ID NO: 145383 - DNA, 102 bp, Homo sapiens
cctaatagaaacagaactactggcagaatatgtgataagaacatttgctgttgaaaagtggaaagaggcaaaacctgatgaattaatggattccaaattgag

SEQ ID NO: 145384 - DNA, 151 bp, Homo sapiens
gcttggacagtctccgcaaggataaggagcaacagaaggactcacctgtgttttgccgcttctttcacttcaggagcaaaacccttgaagatcgtttgaaaattgaagcaaaaaatgggacattgagtgtatccgacaccaccgttggcag

SEQ ID NO: 145385 - DNA, 80 bp, Homo sapiens
actgcatttccagcgaccctcgctactggtacggttcaaggagcagggacaagttacaggaatgttctccaagcagcaat

SEQ ID NO: 145386 - DNA, 80 bp, Homo sapiens
agcatggtcccgctgccataagagaagctggcttgatgaaaaggctctccagtttgggttcatgaaccatcgagctccag

SEQ ID NO: 145387 - DNA, 100 bp, Homo sapiens
acagacaaataaaaagaagtgttaagaattgcctttgggactctgaaggctgaagaataactgaagtgaagtgatggactccgatttggagagtagtaag

SEQ ID NO: 145388 - DNA, 136 bp, Homo sapiens
tgatctacagcctggaaagaaatatcctactgtgctgttcatatatggtggtcctcaggggagctgctgttgccccaggagacgactgtggagctgagctgtggagtggggccactgcaagtgatcctgggcccag

SEQ ID NO: 145389 - DNA, 100 bp, Homo sapiens
cgtccaaagtcacagatgctatagtctggtatcaaaagaagtctgtgcagataataatcatgtccggacgtggacagtaacacgattcagaggaatgatc

SEQ ID NO: 145390 - DNA, 101 bp, Homo sapiens
gatcagagagggctaccttgtgaagaagtgaggagctggtttcacctgaggacctgctggagtggctgcggcctttctgtgctgatgacgcctggccggtg

SEQ ID NO: 145391 - DNA, 80 bp, Homo sapiens
tgctactgtgcgctcgatccagcaccatggggaagcgggacaatcgggtgaacgatgccaacgggactgcaaagccgcct

SEQ ID NO: 145392 - DNA, 51 bp, Homo sapiens
ttaaaccggataaactgggctgtctggcagcacctgtgtggagactcagtg

SEQ ID NO: 145393 - DNA, 100 bp, Homo sapiens
ctcatggcccaccagctagaaagggaatgaaagctactggttgattttaaagtgcctgggcctcacaggtttggagatgtcccagaataaggcacaatgt

SEQ ID NO: 145394 - DNA, 100 bp, Homo sapiens
ccgaattgccaaagttttggaaaaggagggctctgggccaccatccgaggctctagtttggaaggtgttagcctgatattatttggatcttactcgtgtg

SEQ ID NO: 145395 - DNA, 100 bp, Homo sapiens
cacctcgccgtgctctctcgcggcggccggcggggcccgcgctgcagccggagacccggagaaagggaatcccgttctgcttccagaagtggaagtgctc

SEQ ID NO: 145396 - DNA, 99 bp, Homo sapiens
gcgcgggcaggcgggaggcaacggagctaccagccgggacctggtggccttagtctttcaggtggaacggtgtgcgacatgggaaagaaaaccaagcgg

SEQ ID NO: 145397 - DNA, 75 bp, Homo sapiens
gacttgattaaagtaattgaggattttccagcaaaggtcagcccaaggccaaccccactgtcactctgttcccgc

SEQ ID NO: 145398 - DNA, 82 bp, Homo sapiens
ggccgacgagtccggaggggctgccgcgggaggatcccaggagggcactcatggtggtttatgggactctggactcctgaga

SEQ ID NO: 145399 - DNA, 75 bp, Homo sapiens
ctcagttggaagcagccgatccagcctgcggagcctgtggggcaggtgactctgacatcattagaagcatgccag

SEQ ID NO: 145400 - DNA, 50 bp, Homo sapiens
cttcttctaaaagggccgtgactcaagatttaggcctattaaaggaaggc

SEQ ID NO: 145401 - DNA, 100 bp, Homo sapiens
tggaagagtatgcctgggtcccgccgggtctgaagcctgaacagcaacatctgaatgaattgatgacgaagaagtggctattagggtcaaacgctgtaga

SEQ ID NO: 145402 - DNA, 75 bp, Homo sapiens
cagcggtatattagttcagttaccactaccaggttttgctgttactgctcagtgtagtcacaccttgaataagaa

SEQ ID NO: 145403 - DNA, 100 bp, Homo sapiens
caccatccgcgaggtggcggtgctgaggcacctggagaccttcgagcaccccaacgtggtcaggaaaaacatccaggcaagtggacagcatttgcaacag

SEQ ID NO: 145404 - DNA, 74 bp, Homo sapiens
ggcccgggacatgctcatgcaacccaacatgagtgaagtttcctgcaagaaacgggacgactatttggaatggc

SEQ ID NO: 145405 - DNA, 100 bp, Homo sapiens
caagccagccatcctgggaccccaggcgtgcaggttctctttgaggtgaagcccaagagccaaaggaatcaccaccaccttctaaaacgtcagcagctgc

SEQ ID NO: 145406 - DNA, 90 bp, Homo sapiens
ttgctttttgatggccatggcataaggaactctatcccaggaatacagctttgcattaggtacaggtgaacaaaggcagagtaaactgtc

SEQ ID NO: 145407 - DNA, 100 bp, Homo sapiens
cgcacctgaagcaacagcccatctggttggtttcttcaaacggaacctgaaggagaagatggaggctggcagaggtgtcccgaatggaatccctgcagaa

SEQ ID NO: 145408 - DNA, 90 bp, Homo sapiens
ctcatcactaagcgggatcttgccctcagtgaaggagatattcacactttggggatgtacgtatttttgcatgcagtgaaaggaacacct

SEQ ID NO: 145409 - DNA, 100 bp, Homo sapiens
gacacccctggtggatggcgaggatgagagattaacgtgacagtgtcaggtggacccacagccatcccacctccccctctggggagtgctgagagtgagg

SEQ ID NO: 145410 - DNA, 74 bp, Homo sapiens
ccctggatgaagatggacggagcttgttatcgccaactccatcaaggtggagatgtacagcgatgaggagtcaa

SEQ ID NO: 145411 - DNA, 100 bp, Homo sapiens
cgaggtcattgagatcctcatggaagaacctcaagaaggcatgaagccagcccctgcagtgccgtccacccgcccctctgggcctgcctgtggctctgtt

SEQ ID NO: 145412 - DNA, 75 bp, Homo sapiens
tacaagccctggaccaaaacgctggagaacaaacactcgccctctaccaggtgatgttgcaagagcaattgaatt

SEQ ID NO: 145413 - DNA, 75 bp, Homo sapiens
cacctgaggtgaaccttcgaccttggacttctcagcctccagaatggatagtggccaaagcctccaagaacctca

SEQ ID NO: 145414 - DNA, 88 bp, Homo sapiens
gccgacttcgatgatcgtgtgtcggatgaggagaaggccctggccaacgtcaacattgggagcctcatctgcaatgtaggggccggtg

SEQ ID NO: 145415 - DNA, 75 bp, Homo sapiens
ctggttattatcaagctaatgagcgagtaaaggatgccaggctgagtccagaaatcttcctgaaacgcccagtgg

SEQ ID NO: 145416 - DNA, 83 bp, Homo sapiens
caaggcccccgagtgagcgcgggcgccgagactgtgccctgtccacggtgcctcctgcatgtcctgctgccctgagctgtccc

SEQ ID NO: 145417 - DNA, 90 bp, Homo sapiens
cggcgaacatgcgcttttgacacattggaggctgctatccatgtccagggccaaacatgaatcctattgctcttgggagccgctggcttg

SEQ ID NO: 145418 - DNA, 76 bp, Homo sapiens
atttgttaaggattccaagtaactcttatttggtaaggggcctggataccaagaagtgactgctcatctaatccat

SEQ ID NO: 145419 - DNA, 83 bp, Homo sapiens
cctcggatggttttatctctgaaaggagaccaagacacattccaccccagtggggggtcccataccactcatggatctgaatc

SEQ ID NO: 145420 - DNA, 83 bp, Homo sapiens
tgtaaagccacccacaaacaaactacccattttcttttttggaactcatgagaccacccatatatctcccatcagcatcctac

SEQ ID NO: 145421 - DNA, 100 bp, Homo sapiens
aaaagggtgaaggaggcgaattttcagttgatagctccagggcccacaacggcagtgtcctacatgtcggtgaaatgtgtggatgcccgtaagaaccatc

SEQ ID NO: 145422 - DNA, 100 bp, Homo sapiens
tccaacctgggagaggagctggaggtcatcttctcactctttgacagtaaagagaaccggccaatcagtgaggactcagaagacaaagatgtgaagacca

SEQ ID NO: 145423 - DNA, 75 bp, Homo sapiens
cctgagcggccaggacgacgaggagcagggcctgactgcgcagatgaggtggaaagtgagaaatggtacctgtct

SEQ ID NO: 145424 - DNA, 100 bp, Homo sapiens
ggcgccgaccaggcctggctcgcgcctctcccaggacccgcctggctgcgagatatgcctccggtgtggctgtctctgatggtgtcatcaaggtgttcaa

SEQ ID NO: 145425 - DNA, 100 bp, Homo sapiens
cgcgtggcaggggctctcggacatgctgccaacgacgcgaggagcgagcccagggcgtggtgctgaaagtgctcacaaacttcaagagcagtgagattga

SEQ ID NO: 145426 - DNA, 98 bp, Homo sapiens
agctgatgatcgaggccaaagccaactattaccagctcaaatctaatccaagtgaaaatgaagaaaaggaagcacagtctcaacttataaaatctgat

SEQ ID NO: 145427 - DNA, 98 bp, Homo sapiens
gctctgtcattgattatgaactgattgaccaagatgctcgggacattggctccctggattatcaagagtttgtagttgacattgaatccaggctgagg

SEQ ID NO: 145428 - DNA, 99 bp, Homo sapiens
cacgaagctgtacgacatcctgggcgtcccgcccggcgccagcgagaacgagctgaagaagttacagcaattggaacttgcacagatacagcatagaga

SEQ ID NO: 145429 - DNA, 91 bp, Homo sapiens
ggcggctcctgccctctcgctttccctctcgcgtctctggctgcaggctactgcagcactggggtgtcagttgttggtccgacccagaacg

SEQ ID NO: 145430 - DNA, 100 bp, Homo sapiens
agccgttcgaactgtctcaccacttccctgcagctcccttttttgtagcatcagatccaacagttaaaacagatcgactgtggcacgacaagtatacttt

SEQ ID NO: 145431 - DNA, 75 bp, Homo sapiens
tcggctgccccaatccccggcagctctctcaggataagttctgaacgtcgaaaagaaaagtctcgagatgcagcc

SEQ ID NO: 145432 - DNA, 98 bp, Homo sapiens
caaagacagtgtccagctaaaggaggatgctccaaagtgacctgcatcagcttgacccgggaggcctccattaaactgtcacccttgcatggcaaaca

SEQ ID NO: 145433 - DNA, 82 bp, Homo sapiens
accaagtacctgcagatcctgacctctctgatgagatggatcgcagttggaattgatcacaccttttcagttgtacttcaat

SEQ ID NO: 145434 - DNA, 50 bp, Homo sapiens
attatgaatcactgctggaaagaggtgatcgccatgatcaaaggcctgca

SEQ ID NO: 145435 - DNA, 100 bp, Homo sapiens
aatcttggcgacattgacaatgatggctttgaagggaaaagcttcactctgaccatcactgtcttcacaaacccaccgcaagtcgccacctaccacagag

SEQ ID NO: 145436 - DNA, 97 bp, Homo sapiens
aagtccaagaggaccttctgattagtccacagtcttcctctataggtcctcttcctgatggatgggaacaagccatgactcaggatggagaaattta

SEQ ID NO: 145437 - DNA, 96 bp, Homo sapiens
cggacatctaaccatggtcatgccaggaaaagagccaaggtgcaggtgatggtcctaccagtgtgtctgttgaggtcacccgtcctaaagtgacct

SEQ ID NO: 145438 - DNA, 75 bp, Homo sapiens
taaaaggcctgacatatctgagggagaagcacaagatcatgcacagagaccttgaagcatgacactgctgcagtc

SEQ ID NO: 145439 - DNA, 50 bp, Homo sapiens
atggcagccagtcagtggtggaggagagaagatggggctctcaatctttg

SEQ ID NO: 145440 - DNA, 97 bp, Homo sapiens
tggtgagggcttcgatcccttctctgatttgctgtcagccatgaacggatggatgtgatgcctgctagccaaaaggcgggaatgcatatcagtccac

SEQ ID NO: 145441 - DNA, 89 bp, Homo sapiens
caaataccagctcgacaaagatggggttgtcctctttaagaagcgagacggtcatctgttccagccgggccactgtgatgctttatgat

SEQ ID NO: 145442 - DNA, 107 bp, Homo sapiens
aggatgccatcattgccctttccaattacagacttcacatcaagttcaaggagtctcttgttaattggaatgcagtagccctctgggcctgggatattgtggttgat

SEQ ID NO: 145443 - DNA, 82 bp, Homo sapiens
gtgaatgtggaaaggagattgacagtcacaattttgtaataagctgctgtacaagcctttaaagaagcaagacaaaatgttg

SEQ ID NO: 145444 - DNA, 74 bp, Homo sapiens
cccggcccacagtgggggtgtgcaaacccgagagaactggggggaaatttgcagtggtgagaaaatgtataaag

SEQ ID NO: 145445 - DNA, 76 bp, Homo sapiens
ctttatcaaaaacatgattacagggacatctcagtgctaaggaaattcctgaagatgtagatatggaagaagaaaa

SEQ ID NO: 145446 - DNA, 104 bp, Homo sapiens
gttgtgtggtcgcgtctcggaaaccggtagcgcttgcagcatggtgaccttgggaaaggtgttgaaagtgatcgtcgtcatgcggagcctgttcattgatcgaa

SEQ ID NO: 145447 - DNA, 75 bp, Homo sapiens
cggagctggaacggccgggggcggcggcagcggcggcgctgagggctgatcagctgaccgaagaacagattgctg

SEQ ID NO: 145448 - DNA, 82 bp, Homo sapiens
cccccggcaacccggagaaggtctacagagcggcctgcgccagcgagagacagaagaaattctggcagatgtgctcaaggtg

SEQ ID NO: 145449 - DNA, 100 bp, Homo sapiens
ctgggacacccgggagtcaggaaatggagggccctcctggacccgggagcggaccctggtggcggtgaagcccgatggcgtgcaacggcggctcgttggg

SEQ ID NO: 145450 - DNA, 75 bp, Homo sapiens
gccggcctagcgtcctggaattacttcaatcaagaaatactcctttacaccttgctgtgatgttaggaaataaag

SEQ ID NO: 145451 - DNA, 78 bp, Homo sapiens
ccccaactctacttccctctgctccttcccagaattgctcctgcgttgctaagacaagcatcatatggcaccattaaa

SEQ ID NO: 145452 - DNA, 87 bp, Homo sapiens
gaggcgaattctacagttactacaagtgcaagctggcgctggagcagcagcagcttcaggacctcaaggggctcggctatgagaagg

SEQ ID NO: 145453 - DNA, 100 bp, Homo sapiens
cccatcgacaagaaggcacctcacaacaccatggagtctctgttagagcgaggtgagaagctagatgacttggtgtccaaatccgaggtgctgggaacac

SEQ ID NO: 145454 - DNA, 82 bp, Homo sapiens
ccagatccgggagcacgtcatctccatcgagggattttttatcaagcagaaatgcatcgaacaacgagaatcaagatcactg

SEQ ID NO: 145455 - DNA, 100 bp, Homo sapiens
cacagctaagatgccaggaccacctggaagcctagaaatgactgcttttcaggaagccttggacgctgcaggtgataaacttgtagtagttgacttctca

SEQ ID NO: 145456 - DNA, 80 bp, Homo sapiens
gcccccgtgcgcacccccgccccgctcaccttagccccgcgcccgaggtgtcgtgaaaactacccctaaaagccaaaatg

SEQ ID NO: 145457 - DNA, 81 bp, Homo sapiens
cagagcccggggacggcgaggccctcatgtaccacacgtttatatcctggaacctggagatcctcctttgttacagcaacc

SEQ ID NO: 145458 - DNA, 80 bp, Homo sapiens
tggagcgctgcgcggcgcggcggccgggccctcgagacggggacgggcagcgggtggcatgagacgtgggaacatgggcc

SEQ ID NO: 145459 - DNA, 100 bp, Homo sapiens
gcgccaggaaattgaaggaatttccccgtaccgcagcccccgggcacgacctctcggacacggtgcaggcaggcttgttgattggtgctggctgtgccct

SEQ ID NO: 145460 - DNA, 82 bp, Homo sapiens
tcacttactccaggatgaggggcatggtggcaattctcatcggacactcaatcacttgtcggaagtccctcaacccgtatag

SEQ ID NO: 145461 - DNA, 100 bp, Homo sapiens
ttcaagaaggcggtggtactgcatgtgcttccagaggagcccaaagattgcagagggaatggcatacatcgagcggaagaactacattcaccgggacctg

SEQ ID NO: 145462 - DNA, 50 bp, Homo sapiens
ttcacaggcccgggagcggcgcggacaagttcaccgattcagccattgcc

SEQ ID NO: 145463 - DNA, 100 bp, Homo sapiens
cttaacaaaacatcaaacggcatacaaatgatctcagtggttcaatagcatccccagatgtcaaattaaatcttggtggagattttatcaaagaatctac

SEQ ID NO: 145464 - DNA, 90 bp, Homo sapiens
gccctgtggcctcgctcctcggaggcattccccgtcggagccctttctagagaaaccagtgccggatatgactcaggttagtggaccgaa

SEQ ID NO: 145465 - DNA, 96 bp, Homo sapiens
gcctggagatgcagttataatgccattcagagaagtagccaagccaacagagcctgatgagcatggtacaaaattggaaatgttggcttcaccaga

SEQ ID NO: 145466 - DNA, 80 bp, Homo sapiens
gaacatctttcagagttgtatccgatattgacggccaagcactcctgcttctgacccttccgacggtgcaggagtgcatg

SEQ ID NO: 145467 - DNA, 100 bp, Homo sapiens
cacccctcgctgggcttgctttggcaacagagtgcctgacccaggtcagctgctgaaatgggttgcggattgaacaagttagagaaacgtgatgaaaaac

SEQ ID NO: 145468 - DNA, 100 bp, Homo sapiens
gagaagctgaaagctgccgactgcgacctgcagatcaccaatgcgcagacgaaagaagaggaagcaagggaagagttgagagaacaggtttatgacgcca

SEQ ID NO: 145469 - DNA, 83 bp, Homo sapiens
ctcggagcccgagtccgcgggaagatggcggcgccgctcatccccctctcccagcagcggacaaggcaaaatctcagcaagtt

SEQ ID NO: 145470 - DNA, 75 bp, Homo sapiens
ggaaactgttgtgcctcttcatattggcgatcctgttgtgtgtctttgcattgctgcaagcttatgctttcttgc

SEQ ID NO: 145471 - DNA, 100 bp, Homo sapiens
caagaccatggactttgggaagttcgaccagatctatgtatcctccatgaaatgtgggatccttccaatttctcaagagtctcttcttctgggagatgtt

SEQ ID NO: 145472 - DNA, 100 bp, Homo sapiens
gcctgcgcttgtagagactgcatccccgagacgatggcggagggagataatcgcagcaccaacctgctgatcaagaagctactctagaagtcggagcaga

SEQ ID NO: 145473 - DNA, 100 bp, Homo sapiens
agatttgaaaattcacccttgtagagtcattcctgcctttgagcggactcccttttaaggtttgatccagatcggtttgatgatgaattagtaatgaaaa

SEQ ID NO: 145474 - DNA, 76 bp, Homo sapiens
caagatgcggaggctgcctcggcggagcagaggaaccacacgctgatcatgcattttgaaagcgaagcagaagccg

SEQ ID NO: 145475 - DNA, 146 bp, Homo sapiens
catatttaggaggggagaatctggaacttcgagattatcagctagaaggtctaaactggctagctcattcctggtgcaaattgatcattcttagaagagctgctgtaacacataggggaagtgaaaactaacagatgaaagttttg

SEQ ID NO: 145476 - DNA, 74 bp, Homo sapiens
gccaagatgctgcggaatctgctgagattatggagaagtctggcgaggaaggaatgcctgatcttgcccatgtc

SEQ ID NO: 145477 - DNA, 97 bp, Homo sapiens
ttagctgctgccgcgccttggagtccggagtaacttggccaggctggccccgagcggaactggagaaagctgagggcaagtatatcgcgtcaacaca

SEQ ID NO: 145478 - DNA, 100 bp, Homo sapiens
cgacagcgaacatgtcgcggcctgtcagaatcatgtgagggccaaccggggaaggtggagcagatgagcacacacaggagccgtctcctcaccgccgccc

SEQ ID NO: 145479 - DNA, 101 bp, Homo sapiens
acaccggaggcgacggccatggccacagatgttaactcattccagcaaactacaaagtggattgatgatgtcagaacagaaagaggaagtgatgttatcat

SEQ ID NO: 145480 - DNA, 57 bp, Homo sapiens
gaactggagggggacacctatgaccggttgtcggacaagtaaccgcaagagcttgat

SEQ ID NO: 145481 - DNA, 74 bp, Homo sapiens
aggagcagcccaagcgccttccctcacacccaacatgagtgaagtttcctgcaagaaacgggacgactatttgg

SEQ ID NO: 145482 - DNA, 98 bp, Homo sapiens
cgcagcccaccatgtctcgccgcaagcaaggcaaaccccagcacttaagcaaacgggaattctcgcgatgaatttcacccattcatcgaggcacttct

SEQ ID NO: 145483 - DNA, 90 bp, Homo sapiens
ctcgcgctgcaaggatgctcctgggatttcggagaggccgcaggagtcatttcctgcaagctttcttcctggtggcagatgacatcatgg

SEQ ID NO: 145484 - DNA, 75 bp, Homo sapiens
gagcaactaactgatgctgacaccaaagatgaacacaatgacgtacagaagaaaacctttaccaaatggataaat

SEQ ID NO: 145485 - DNA, 49 bp, Homo sapiens
aacactgtccttcaaaacgagccaagctataacatcagaaatggtgaat

SEQ ID NO: 145486 - DNA, 100 bp, Homo sapiens
ccgggttatgacgacccccaataaaggaaacaaggccttgaagggtgagaactctgtctcagtcgacgggaagtgcagtgactccacgctactgagcaac

SEQ ID NO: 145487 - DNA, 98 bp, Homo sapiens
agccatcaggtaggctgcgttgaggatctttgctcttccatccgcctttgatcgtcttcctcttcagccatccagacatccacgacagcgatggcagt

SEQ ID NO: 145488 - DNA, 100 bp, Homo sapiens
tgatagcagtttatcttcgtatacgtattatgccggctgggctgataagtaccacgggaaaaccatccccattgacggagacttcttcagctacacacgc

SEQ ID NO: 145489 - DNA, 51 bp, Homo sapiens
atttttagtggccccaaacgggagaaccagcagaaatccaccaatgtagtc

SEQ ID NO: 145490 - DNA, 75 bp, Homo sapiens
gctgtcatggctgccatctctacttccatccctgtaatttcacagccccaggtggacgtgcttatggaagcagcc

SEQ ID NO: 145491 - DNA, 100 bp, Homo sapiens
cgggagtggacccgcgtccggaacagtggaaggaaatagcaacagtggtgaaggtattagtcactgtaccactggctttactacagaaaggtgccattca

SEQ ID NO: 145492 - DNA, 75 bp, Homo sapiens
tgacgaggtctgagcgaccatggaccggccggggttcgtggcagcgctggtgtttgaagaaaacaggtctgaaac

SEQ ID NO: 145493 - DNA, 86 bp, Homo sapiens
gcagccggcacctgacggcgtgaccgacccgagccgggcgaactttctgaccaagtatacaactacccagagggcctaggagaagt

SEQ ID NO: 145494 - DNA, 100 bp, Homo sapiens
agaagaaaaaagcaagagagactattttacacagttggtattagcatgtttggtatttctcaagccatgttcccatgtggtatcttgtcaacaagttgag

SEQ ID NO: 145495 - DNA, 78 bp, Homo sapiens
aataccaccggaactggtcgaatgaggcacctaaaaattgtataccgcagattcaggccaagaagacgctggagggag

SEQ ID NO: 145496 - DNA, 100 bp, Homo sapiens
ggtgattgttgcaaagagcaaagaagaggcctgcaaagctgtacaagagatcatgcagctttgtgtccctggtgatgttggaacattaatgatggaacat

SEQ ID NO: 145497 - DNA, 100 bp, Homo sapiens
aatggacagtggagatgaagcctaagaatatgatcagggaaggtggccatccagaaggaggacttgcagaagtaccacaacagggacacctggttccagc

SEQ ID NO: 145498 - DNA, 89 bp, Homo sapiens
ttcaagtagtcctgtgctcaacattgcttatcgcacttttccagccattaactccaggctctcgagaatttgaagatgttgtaaatatt

SEQ ID NO: 145499 - DNA, 90 bp, Homo sapiens
cgcgaggattccgggacccgcgagcggagcggcgcgtgggtcggttgcggtcggccccggcagagaatggaggtgttgtccaagttggag

SEQ ID NO: 145500 - DNA, 101 bp, Homo sapiens
ccctgcagtacctgcagaaggtctctggagacatcttcagcagcagcctcccgcgacgatgcccctcaacgttagcttcaccaacaggaactatgacctcg

SEQ ID NO: 145501 - DNA, 100 bp, Homo sapiens
gccgctcatgagcgccttcgcgcgctcgcggaaccccgtggcttccccgacgcagcccagcggcacggagaaagcgggaatgcatatcagtccacgtggg

SEQ ID NO: 145502 - DNA, 100 bp, Homo sapiens
cgcccccagcacggggcgctgagacccccgcgtcgctgcccagcccggtccggcgcgccacgccgagggccggatcgtggcacccagaggctgccaggac

SEQ ID NO: 145503 - DNA, 75 bp, Homo sapiens
ggcatcttattgatcctccagtcgagaatatcctccgaatcctaaatctagagctccaaggatgctggtcattaa

SEQ ID NO: 145504 - DNA, 74 bp, Homo sapiens
gcggctccaagcagctgggcatccccacagtttggtggtaatccatttgcttccttggtgagcaatacatcctc

SEQ ID NO: 145505 - DNA, 100 bp, Homo sapiens
aggaccatggctgcctccgagcgccgcgccttcgcgcacaagatcaacagatccgagtgaagcctgacaggaccggtgtggtcacggatggtgtgaagca

SEQ ID NO: 145506 - DNA, 90 bp, Homo sapiens
gcgcagggcggtcctcgggtccgcggaggctgcgctctgcggcattccccctggacttgtgcacagacagcttcttcacaagcagacgcc

SEQ ID NO: 145507 - DNA, 95 bp, Homo sapiens
cgtaccacttaaggacattgtggcaatcatcctgaatgaatttagagccaaactgtccaaggctttggcagtaaagcagctgagcagccattttc

SEQ ID NO: 145508 - DNA, 83 bp, Homo sapiens
ggaagaaggaggaaaattacccggtatcgttagaggtgcaactgacatgggtgaaccccagggatccatgcggattctagtga

SEQ ID NO: 145509 - DNA, 100 bp, Homo sapiens
ctgacgtggagcggtacatcgcctcggtgcagggctccaccccgtcgcctcgacaggctgaagggtatgtgattggcagctgtattaaacacattccaat

SEQ ID NO: 145510 - DNA, 74 bp, Homo sapiens
atcttttctgaggttggacctgttgttagtttcagaacatatgcagtaatgtcacctcaaaagagagttaagaa

SEQ ID NO: 145511 - DNA, 75 bp, Homo sapiens
ccagcgcccggagcaagcggagctcccccaagagccggaaagatcatatctgaagatattagtgagctacaaaag

SEQ ID NO: 145512 - DNA, 100 bp, Homo sapiens
agacaacttactaccaaacagcacttcctggcaatgatagatacatcagtgtgggaagccaagcagatacaaatgagctgcttcagaaagagcaaaacta

SEQ ID NO: 145513 - DNA, 75 bp, Homo sapiens
gaggggccgacccgcagcgtccctggtctctccagccctcactcggaaccgcactcaagtcctaattcgaagcag

SEQ ID NO: 145514 - DNA, 100 bp, Homo sapiens
cagctcctttatggaaatcatactattgtgtttgatgatggtgatgagcgaacattgagacgtacctcactttgtctgaaaggagagagacattttgcag

SEQ ID NO: 145515 - DNA, 98 bp, Homo sapiens
gctgccgccgccgcctcgggtcgtggagccaggagcgacgtcaccgccatggcaggcatcaaagttacccagataatatcactcctgacactgaagat

SEQ ID NO: 145516 - DNA, 87 bp, Homo sapiens
gacagacgggaaaaatagtagcaccagacagcccagaaacttgcaggacctgtgccgaattaaaattcgacaatgtataggccttca

SEQ ID NO: 145517 - DNA, 100 bp, Homo sapiens
tccactgaggatatgtgtcacactttggagtcggctggtcttagccctcagctgttgttgacaatgaatgattttgactatttgaaactactaggtaaag

SEQ ID NO: 145518 - DNA, 82 bp, Homo sapiens
gaagacatcactgattatgtctctggtcagtgaagaatttccagaagagcactgctcagcacgcaggcatgtgaggaagctg

SEQ ID NO: 145519 - DNA, 96 bp, Homo sapiens
ggaaggtggctgctgcgaagaaggttgctaggaagaggctcaatgtttgtgttttcaccagatcagtttcagagactgcttaaaattaatccagac

SEQ ID NO: 145520 - DNA, 100 bp, Homo sapiens
cggcgcagcccggaaatgtccggcaagatcgagaaagcagaaagctctgggtgtgcggcagtaccatgtggcctcagtcctgtgccaacgggccaaggtg

SEQ ID NO: 145521 - DNA, 100 bp, Homo sapiens
cgcggagcccggctcccgcaccatggaggaggacgacagctacggatgagaaatactggagccggcggtacaagaacaacgaggcagccaagcggtcccg

SEQ ID NO: 145522 - DNA, 50 bp, Homo sapiens
ccggaacaccctggaagccgagaaatgagacggggttttgccatgttgcc

SEQ ID NO: 145523 - DNA, 97 bp, Homo sapiens
gaatttgtggctggctggatctctggaatccggagatgatgagtatcaaggggaccagtcagacacagaggacgaagtggactctgactttgacatt

SEQ ID NO: 145524 - DNA, 100 bp, Homo sapiens
actgctaccgatacatcaatggtaggaactcctctgatgtcctggtttatgttaccagcaatgacactacggctgaccggttccctgatgtgttacctgc

SEQ ID NO: 145525 - DNA, 83 bp, Homo sapiens
ctgctcccttcgccttcgccctttccacctcgcggcagttcgacttcccaagtaagaagcggaagaggagccgctggaaccaa

SEQ ID NO: 145526 - DNA, 90 bp, Homo sapiens
ggaaaaagaagaccagcgacaaatttagagaaacctcggcagcgtggggtagagcagcggctgccatgctcttctgtggcttcatcatcc

SEQ ID NO: 145527 - DNA, 87 bp, Homo sapiens
ttggagcacttcctattccactggattgggaaagaccatggcaggctccttctcctgaaaaagccgaggaggagagtgagaggcttc

SEQ ID NO: 145528 - DNA, 101 bp, Homo sapiens
ctagctcagaaccattagacacatcagtggagtccatgctacctgattgcccccgggtctcagcaggattctgagaaacgaacccctcttcatgtggccgc

SEQ ID NO: 145529 - DNA, 100 bp, Homo sapiens
ccgtggacagcaacatttcccacaggacacgaagtttgtcggcccttgccttggcagagctgagcatgttggcagataaattgaacatgactccagaaga

SEQ ID NO: 145530 - DNA, 100 bp, Homo sapiens
cccgcgtcttcagggcccagtccctcggacccatcgccgcttctagaccctactgcggtctcggatattgccggtagagacggggtttcgccatgttggc

SEQ ID NO: 145531 - DNA, 74 bp, Homo sapiens
gccgagaagccagtcacgccgggagctggtacacagcctcagggaaatgaggcaagttatcctttggaaatgtg

SEQ ID NO: 145532 - DNA, 90 bp, Homo sapiens
ctctcgggaagagatagatcatgcagagtattacctttacaactcagatttcttttatccaagatattggaaggctccctctgaagcgac

SEQ ID NO: 145533 - DNA, 50 bp, Homo sapiens
atgagacctactgatgtccctgatacaggcattatattgtacttctagca

SEQ ID NO: 145534 - DNA, 87 bp, Homo sapiens
ctccccagccatgtgaaactggagagccataatgcaagccattcctagtggaaaagttgagaaggaagaacagcttattccagacca

SEQ ID NO: 145535 - DNA, 100 bp, Homo sapiens
ggagaaccaggcagccccggatgacacccaagatgccgatggtcctgctccccttgaactacccaaccagtggctctgggatattatcgatgagttcatc

SEQ ID NO: 145536 - DNA, 106 bp, Homo sapiens
atctccatgtcctgttgtggggcttttacagcctttgggtagaagagtcagcaatgatgggagtaagtggctatgtggagtatctccgagagcaggaagtatctga

SEQ ID NO: 145537 - DNA, 90 bp, Homo sapiens
ttgggatagcagattgtttgcctactccagtttaatagaaaatggtcagcttgaaattgtgacaggtggctgggttatgcctgatgaagc

SEQ ID NO: 145538 - DNA, 90 bp, Homo sapiens
cctttatcatgacgtgatgctggagaacctgacacttatatcttctctaggggcatcccaagccaccaatcgggagaacatccagaaggc

SEQ ID NO: 145539 - DNA, 95 bp, Homo sapiens
atgggccctggcggtggacgagcaggaagctgcggctgagtcgatctccagtctatgtgctgaagaagcagcagcccaagagcagacaggtcagg

SEQ ID NO: 145540 - DNA, 83 bp, Homo sapiens
gaccatacagacctaccggtctgtcagtgagatggcttctaacaagaactccatccggcacaacctgtcactgcatagtcgat

SEQ ID NO: 145541 - DNA, 100 bp, Homo sapiens
gtcacccccgacgaagatgaccacctgctctcacccacgaaaggcatctgtcccaagcaggagaacattgcagagtttatgtggccgaggcagacaagtg

SEQ ID NO: 145542 - DNA, 82 bp, Homo sapiens
ctcagttggaagcagccgatccagcctgcggagcctgtggggcagattgcagcaattctccggaaacggaaattagactatt

SEQ ID NO: 145543 - DNA, 100 bp, Homo sapiens
atcctgacttgccagctttctactttgaccctttgatcaacccaatctcccataggcactcagtcaaggaagagagaagggcacagttacctaagtatca

SEQ ID NO: 145544 - DNA, 74 bp, Homo sapiens
cgaactccaggacagcatccaggcctcattggacagcattcgagatgccatggacaatattaccaggcagaacc

SEQ ID NO: 145545 - DNA, 82 bp, Homo sapiens
cgacgactggctgttgaccctgttcaggcctcggtgaaggggacggaaaatatagtcgcggtgatgataagcaacctgaaag

SEQ ID NO: 145546 - DNA, 96 bp, Homo sapiens
tctgcccaaactggaacttatgctgtagacatttctttgtggtttatctaaaaaccaaagtgagaaagatcagtctaaagaaaaggagaagaaagt

SEQ ID NO: 145547 - DNA, 74 bp, Homo sapiens
aatggggttgccagctccggggtcccccaggaggcagagaatgaggtcacaaatggatacttttcatggggcag

SEQ ID NO: 145548 - DNA, 99 bp, Homo sapiens
gtaccagacgttaacagactatgatattcgattttacatgtatgagattctgaaggcaagaaacctattggaattcgagacttaattaatgaagctttg

SEQ ID NO: 145549 - DNA, 100 bp, Homo sapiens
gagagcaagcgtttcagcgcctacaattacagacctttccaaagtgaaactgatgagatttgatgatccactgttggggcctcgacgagttcctgtcctg

SEQ ID NO: 145550 - DNA, 100 bp, Homo sapiens
gcaggagcgactcgctctacccggccccagggtacgctgccggtgtgcacagatgtggaggtgctgaaggtggggaggacccagctgatcgacgccgttc

SEQ ID NO: 145551 - DNA, 90 bp, Homo sapiens
atttaaactggaggacctgaagaagctagaaccaaggatgcttcctttggaaattgcacttacaatctcaccattctcgactgtttgcag

SEQ ID NO: 145552 - DNA, 75 bp, Homo sapiens
gaaagcgaagattcaaacaataatgttcccaggctatgaaaggagaaaagggaattggtggagcagtcacagcta

SEQ ID NO: 145553 - DNA, 100 bp, Homo sapiens
ttgggtctctagctcagaaccattagacacatcagtggagtccatgctacctgattgcccccgggtctcagcaggtgccagagtgggtcatcgctccttg

SEQ ID NO: 145554 - DNA, 51 bp, Homo sapiens
cctgtgctttactctgaagactcgagtgacactgctgatcctgtaacatgg

SEQ ID NO: 145555 - DNA, 100 bp, Homo sapiens
ggtgataatgacagccaccaaggagatttggagcccattttagaggcatctgttctatcttcccatcataaaaaagctggagtgtaatggcacgatctcg

SEQ ID NO: 145556 - DNA, 74 bp, Homo sapiens
aacacacttataatgctcgcagataagcatgctagctgacttgacaggaattaagtggaaaaaatatgtatggc

SEQ ID NO: 145557 - DNA, 83 bp, Homo sapiens
aaggcctgcgtcagttgcactgtagcctcggcagtgaaccgggaggtactaccagggacgactggagtgagcactggcctggg

SEQ ID NO: 145558 - DNA, 59 bp, Homo sapiens
ttcgcagtggtcgcttcttctccttggtcttctgggaactggcttccagctgtttggct

SEQ ID NO: 145559 - DNA, 82 bp, Homo sapiens
gcgcgaagctggccaaagcctgcccagacggctcacctgtgcgggatggaacaaaagacacgttggtcgtcattgcctccga

SEQ ID NO: 145560 - DNA, 101 bp, Homo sapiens
tgaagagagagaagagggcagagccgtgcatggggctgctccccaggacctgagcaggaacctggagttttcaggactccaacctgtctgtgcacacagaa

SEQ ID NO: 145561 - DNA, 83 bp, Homo sapiens
ccctggagctgctctgtcaccttgacaacacagcccatggcaacatggcctggttctaaatgagaagaaacttcaagaggttg

SEQ ID NO: 145562 - DNA, 91 bp, Homo sapiens
gccgagtgcagaagatctgggtgcccgtggaccacaggccctcgttgcccagatctctacgaactcgacggggaccccaagaggaaggaat

SEQ ID NO: 145563 - DNA, 82 bp, Homo sapiens
accagcaagcggcattggctgcggaatcatatcgacaggtcatgaaaatgagaccaaaagatctctggaagcgattaatgat

SEQ ID NO: 145564 - DNA, 102 bp, Homo sapiens
gtgatatttgtttgtgcaactacaggccaaggagacccccctgacaacatgaagatcgtggggatcatcacacggcacaacctcacctatgaatttctgcag

SEQ ID NO: 145565 - DNA, 88 bp, Homo sapiens
agcaacggcggcctccaggcctcaggccccctcaccatcctagaggtcaagatcagctctggctaggacgctgtgcagagctgcaagt

SEQ ID NO: 145566 - DNA, 74 bp, Homo sapiens
gcaaaataaaagacacttgtattcagtcaccaagcaaagagatttgggatgatgaaattgttgcagacttttac

SEQ ID NO: 145567 - DNA, 75 bp, Homo sapiens
tttgcttatgcaaatcagaaaaacagaatggactaggactcagtataatccttcctcagacagttttcttggctc

SEQ ID NO: 145568 - DNA, 83 bp, Homo sapiens
tgagcacatcagtgatgaatgcaagaggcgtttctataagaattgctacaacagatgaggatgaggaagggaaattacctgag

SEQ ID NO: 145569 - DNA, 75 bp, Homo sapiens
cgccgcctggcaggccctgcgcaccaggtcccgcagcccccggaagccaatagactccctcagggactctcggtc

SEQ ID NO: 145570 - DNA, 100 bp, Homo sapiens
gctcctgtagctgttacaacacctactgtgtcatcaggtcaagcaacacctacatcacctattaaaaagagctccagcattgactttctagcaagccagg

SEQ ID NO: 145571 - DNA, 75 bp, Homo sapiens
cgtgacaaaatgtgttccatggtcaaaaaatggcaggtggtaaattcactccagcagcaacctcaggctgcatcc

SEQ ID NO: 145572 - DNA, 75 bp, Homo sapiens
tcatgaacatgtggagtgagcaggagaaggagaccttccgggagaagcatcgttggcttcacagtatgactgatg

SEQ ID NO: 145573 - DNA, 90 bp, Homo sapiens
gcctggcctgggccgcgtccatcacctggcactcaagagcacgaacttccaggagccggtgcagccgctgacacagcagcaggtggcgca

SEQ ID NO: 145574 - DNA, 100 bp, Homo sapiens
caagaagaaagaatgcgtgtattttgtggaaagttccaaactgtctgatgctgggatgacatggaagcttaccggacccagaactgcttcctcaactccg

SEQ ID NO: 145575 - DNA, 96 bp, Homo sapiens
cttcaaagtgagcgccaatgtccaaaacgtgaccactgaggatgtggagaaggccacagtgtgcctacaagacagtgtgctagctttctggaaaca

SEQ ID NO: 145576 - DNA, 82 bp, Homo sapiens
ccgtgccctggggctgagccctcagatctctgttgaggagctggcgcggaatctggtcatcaaggtcaacagggatgctgtc

SEQ ID NO: 145577 - DNA, 98 bp, Homo sapiens
caaaagaggaagatagtcttgggacccttgcatggtgtttcaaagggtggtgaagaactaaggtacttgctaaagaagctcctccagcttcaggctct

SEQ ID NO: 145578 - DNA, 50 bp, Homo sapiens
ggagatcagcatttgcatggaacacatgataaacttctgcactggagggg

SEQ ID NO: 145579 - DNA, 82 bp, Homo sapiens
cttgggctacgcgtatgtgaacttccagcagccggcggacggccacagttgtaagggatcttgtggctgtcaggatggcaga

SEQ ID NO: 145580 - DNA, 80 bp, Homo sapiens
gtttatctggagtgaggtggccggttcttggtgggatctgagcagagcccaggctaccagagcacctgtccctcggccgc

SEQ ID NO: 145581 - DNA, 100 bp, Homo sapiens
aaaaccagaatgctttgaagttctgtaatttggctttattgcttcctactgttaccaaagagattttggtttcagtaacctcttcactcctgggcagctg

SEQ ID NO: 145582 - DNA, 105 bp, Homo sapiens
aaagatggaaaaccagttattgaatatcaagaggaggagttgttgctctctgatgtaaaggatggagtaaatcaagcagcacctgcatttggatttggcagcagt

SEQ ID NO: 145583 - DNA, 100 bp, Homo sapiens
ggtcccgcacgtctgccgctgccaccggcgcgcccgagttgcaaaagcttctcatttcagagagatgccaggatcctaagtgcctgccaaacttaccaat

SEQ ID NO: 145584 - DNA, 83 bp, Homo sapiens
aggagctaaagcagcgtgcgttcagccctggggtgttcaggcgcttcgtggaggttggccgggtggcctatgtctcctttgga

SEQ ID NO: 145585 - DNA, 100 bp, Homo sapiens
tcacagtttgctctgctcttccaacaccagtggaagatgatcacatcccaggcaaaagactggtttaaaagaattagagttcttgaaaaaacttaatgat

SEQ ID NO: 145586 - DNA, 90 bp, Homo sapiens
actttgtgaacattcgcccagccaagttgaagaacctaatcttgctggtgaagcactggtaccaccaggaactgaaatacgacgttggtg

SEQ ID NO: 145587 - DNA, 100 bp, Homo sapiens
tgttttttcatattacatctacaagaggggacaagtacctttatgaaccagtgtatcccaaagtggtggatatgttcttggctttaaaatagatcctgtg

SEQ ID NO: 145588 - DNA, 75 bp, Homo sapiens
atcagcttcttaccaaatacagaagggtctttttggagttcctgagctgagtgccccagaaggatttcatattgc

SEQ ID NO: 145589 - DNA, 80 bp, Homo sapiens
ttcagatcatccaagtggaggttcctacagagattcatatgagagttatgacatatctgaagagatggattaagaatgct

SEQ ID NO: 145590 - DNA, 74 bp, Homo sapiens
tgactatgtacacacagctttatcatcggtcaccaggagactaaagtccatcaaaaacatccagaaaattacca

SEQ ID NO: 145591 - DNA, 97 bp, Homo sapiens
ttaaagacgctctaccggaaatcggcatcactagacagtcctgtcctattggtcatcaaagatatggataatcagaaaaagcttgtggtgaaggggg

SEQ ID NO: 145592 - DNA, 97 bp, Homo sapiens
ggtagaagttgtggaggagacaattaaagggcaccgaggaagagaaccaatggcagaggccacatgtgcaagcaagatgggagtctggagagcctca

SEQ ID NO: 145593 - DNA, 51 bp, Homo sapiens
ggcagtatgattgaagtttctaagccaggtggagccgccaccaaaatgcag

SEQ ID NO: 145594 - DNA, 50 bp, Homo sapiens
cagcctcccgaggagctgggactacagaaagctggagagggccgccggac

SEQ ID NO: 145595 - DNA, 74 bp, Homo sapiens
ccggtgcccgaggaggcagccaagctcgtggcctgcctctgcgtgcacgagctggagccggtggtgcaggatgg

SEQ ID NO: 145596 - DNA, 80 bp, Homo sapiens
ccagtgacgggtctggagtgcgtgggggaccggctgttggcgggctccctggggaagggaatgcagggttgctggggctg

SEQ ID NO: 145597 - DNA, 75 bp, Homo sapiens
gagggacgtatagatgatttgctcagggtgaagtggatcctaaagagaggatagcacgccaacgaaaattattac

SEQ ID NO: 145598 - DNA, 95 bp, Homo sapiens
cattggaaattgtacagtgacatcttctgggatttagtctgatttgaaaaatgtgtgagtgctaaggaagctttggagactgatctttataagcg

SEQ ID NO: 145599 - DNA, 75 bp, Homo sapiens
caaagtcacagatgctatagtctggtatcaaaagaaggttcttgattattacagacctctttctgaaaagcccgg

SEQ ID NO: 145600 - DNA, 100 bp, Homo sapiens
tacttgtgggaagattttgattatccatgagattacagttgtaacttcatagactcccaaagggaaattcttggcagtcgatgatgtgaagaaaggttac

SEQ ID NO: 145601 - DNA, 83 bp, Homo sapiens
ctgccgctgccgctgccgcacctccgtagctgactcgcaggatgatgggcaggacagggagaggctgacctacttccagaacc

SEQ ID NO: 145602 - DNA, 75 bp, Homo sapiens
cttagaaggaaaaacagatgcatgccaggtgtttgaaatgatcattaatcctggagataatgtcctcctagatga

SEQ ID NO: 145603 - DNA, 100 bp, Homo sapiens
ggtgctggctgtcaaccaagagaacgagcacctgatggaggactacgagaagctggccagcgacataagcatggattcctggttcattcttgttctgctc

SEQ ID NO: 145604 - DNA, 100 bp, Homo sapiens
tattttcttcctgcccctcgttgatgagagcattcgaagtgacctcagcagggcatccaggccatgccctcctggaggaggagaaccgggtgtggcacct

SEQ ID NO: 145605 - DNA, 50 bp, Homo sapiens
ctggcttcaggatgtagagggcctgcagtcagatatgtacagcttgggtg

SEQ ID NO: 145606 - DNA, 100 bp, Homo sapiens
cccagcggaggttcccgcttctgaagcgtgggaggcggaagagactgcagatctccagcgttctagacatggaggccatcactttcaagaagttggtgaa

SEQ ID NO: 145607 - DNA, 83 bp, Homo sapiens
gtgaagacctccgaaggaccatagtttttcagaagaagtgaagtcaagatgaagaaccatttgcttttctggggagtcctggc

SEQ ID NO: 145608 - DNA, 75 bp, Homo sapiens
aggggggattttggaacctggggcagccaagaacgagcagccaagggtgagagatcaagcccagcgctgttcacg

SEQ ID NO: 145609 - DNA, 75 bp, Homo sapiens
cgggaccgcatcgaccgcctggagatgaagactggcccatttgcagagcactccaaccagctgtggaacatcagc

SEQ ID NO: 145610 - DNA, 97 bp, Homo sapiens
cgaaatagaagatggagttgaatttaagaatatttttgggacgccggaatttgttggaagtaccaccaagaacagggaaggacaagccagaggctgg

SEQ ID NO: 145611 - DNA, 76 bp, Homo sapiens
aggctttcagccggagaagcgagtttcagctgatcctgacaggcgaagactggaatgctgtgatgtacgatggcat

SEQ ID NO: 145612 - DNA, 75 bp, Homo sapiens
tatgcctcgtttgttgggaacctactgatgaaccttggtctttgatttgcgtcagtgtcatcgacagatgcagca

SEQ ID NO: 145613 - DNA, 100 bp, Homo sapiens
cgggatcgtgaccgagaccgtgaccgagagcgtgaccgagagcgcgaatatcgtcatcgttagaagaaataggaaggttgttgattactcacagtttcag

SEQ ID NO: 145614 - DNA, 51 bp, Homo sapiens
ccacctcctgagcagcctgctcctggagtctgtgtgaagcagcacaagcgg

SEQ ID NO: 145615 - DNA, 75 bp, Homo sapiens
attagcctggaggaactccgaacccaaatcctgagtccaaacactcaagatgcactattcatggccgaattgatc

SEQ ID NO: 145616 - DNA, 50 bp, Homo sapiens
aaaaatcctaggagaaatctaaggtctgactggtttctctacgactgccg

SEQ ID NO: 145617 - DNA, 85 bp, Homo sapiens
cttagctgtgctcgcgctactctctctttctggcctggaggctatccagcgtgatgtgtccaatctagatcccaacttctcattt

SEQ ID NO: 145618 - DNA, 100 bp, Homo sapiens
cagcccagacaagctccctggattcaagatgtaccccattgactttgagaaggacaaagactttggaaagcaggcgctgcggaaggagcatgtgaacccg

SEQ ID NO: 145619 - DNA, 90 bp, Homo sapiens
gcccggcagctggagaggtctccaacaagcttccaaaatggcctggatacagttgatatattagttggatggcatatagatcatactcag

SEQ ID NO: 145620 - DNA, 100 bp, Homo sapiens
tgggggaaccactatgatcaaagctgagtatctatggtgacttggagtttatgaatgaacaaaagctaaacagatatccagcttcttctcttgtggttgt

SEQ ID NO: 145621 - DNA, 75 bp, Homo sapiens
tgggcacaggcagtgtctggaattggtttctaagcatgaattgaggaacagaagaagcagagcagatgatcggag

SEQ ID NO: 145622 - DNA, 100 bp, Homo sapiens
acccgtgacctggggatcgctacggaccttaaaatacccgcaacagccccttcgtcccaaggtttagatgtagattctctggtcattgagcatatccaag

SEQ ID NO: 145623 - DNA, 76 bp, Homo sapiens
aaatggaccacttaaaaagtacttcttacaggtaagcagaattttgtacagtttctgtacagcattcaaacgttct

SEQ ID NO: 145624 - DNA, 100 bp, Homo sapiens
tccactgccactacagggaagtgcatcacatgtcaggccaaatttgagtttcatcatggtgactatgaaaaacagtttctgcatgtactgagccgcaagg

SEQ ID NO: 145625 - DNA, 83 bp, Homo sapiens
cagaccttcattgctctgtgtgccaccgtatttgataggtacaagagttacagcccttatgacatgttggaaagcatcaggaa

SEQ ID NO: 145626 - DNA, 97 bp, Homo sapiens
cgggcgctgacagacctatggagagtcagggtgtgcctcccgggccttatcgggccaccaagctggagagctcaaaggatggctactgacatgcaga

SEQ ID NO: 145627 - DNA, 50 bp, Homo sapiens
ctgaagtcagagagagacacgttctggacttcagtgaccccttcagcact

SEQ ID NO: 145628 - DNA, 82 bp, Homo sapiens
aaattttgtggcgctctgcgtcccctgaaggggtctcgccaactcctgggctcaagtgattctcctgcttccacctccccac

SEQ ID NO: 145629 - DNA, 97 bp, Homo sapiens
tccggagctagctggatcctctaggcagggcgccctgcgtccggcagaggaggcgagcatcccgctcaggtgatgaggaacccctcgcgcacccagc

SEQ ID NO: 145630 - DNA, 82 bp, Homo sapiens
gatcaacagcaacctgaggagcataggccaaaaataggactaagtcttaaactggggatgcccgggtagttaaagacatggc

SEQ ID NO: 145631 - DNA, 50 bp, Homo sapiens
tacagaaacaaactacatctcagggagaggcgggagatttttgagcagca

SEQ ID NO: 145632 - DNA, 100 bp, Homo sapiens
gtatggttggcatggaattgaatttcatctgtctgtgggaattgtaagcaaggtcatcatcagatttgaaatatttaaagtggatacaaaactatttcag

SEQ ID NO: 145633 - DNA, 100 bp, Homo sapiens
cttcgatgatcgtgtgtcggatgaggagaagggatcagtgtccttcagtgatgtggctgtgggcttcacccaggaggagtggcagcatctggactctgct

SEQ ID NO: 145634 - DNA, 75 bp, Homo sapiens
aaatgtgtgtgaattggatttgatcttccatatggataaggttttgagagattacctgaagttgcactcaaaagc

SEQ ID NO: 145635 - DNA, 112 bp, Homo sapiens
agacagcccaaatatcctcggaagagcgctcccaggagaaacaactgtcttgtcgacggtctcactgatgcctcttctgcattcaaagttcctcgacccgggccagatacac

SEQ ID NO: 145636 - DNA, 101 bp, Homo sapiens
ggctttgtctcctttttcaacaaatgggttgagttgttacaacaaaagttgagagaaaagttggatgaatttaatgaattggctatacagaaagagtcggc

SEQ ID NO: 145637 - DNA, 75 bp, Homo sapiens
cagtccagcagctaaggatattttgtgcagatgaaggcttgactattgacctgaagaattttagaaaaccaggag

SEQ ID NO: 145638 - DNA, 100 bp, Homo sapiens
caaccccaccatcccaccaaagggggctgctgaccgagagagctcactcagccagattgtctaaagccccaggaaaaatggtggaaaattcaccgtcgcc

SEQ ID NO: 145639 - DNA, 100 bp, Homo sapiens
tatatttcggcaccagcatgattttgatgaaaatggaatcatttactggattggaacaaatgcaaattttaagcagggtctgaaaacccttggtgttttg

SEQ ID NO: 145640 - DNA, 99 bp, Homo sapiens
ctcatggggaaaatctccccggtgactttcaggcaggggaaatggaaggtgatgcagtcgaagccattgtggaggagtccgaaacttttattaaaggaa

SEQ ID NO: 145641 - DNA, 96 bp, Homo sapiens
ggggcctctgggagcatcttcagcaagttcacctccaagtttgtacgcagctccccctccggggctccgcgggacactggatctccaggttatccg

SEQ ID NO: 145642 - DNA, 100 bp, Homo sapiens
ggagacagaggcccccctggattcagaggaaagaccacagcaagattctttcattcgtctcctcctagcctgggggaccaggctcgaactgaccctggac

SEQ ID NO: 145643 - DNA, 75 bp, Homo sapiens
attgatcaatggaagaacaaaatctggcctgaaataaaaggtggaggtggaggaagcgtccctgggatcgagagg

SEQ ID NO: 145644 - DNA, 100 bp, Homo sapiens
accaaaaccgtgaatggtgtctggaggagtgagagccggcagccagctgaggtgggtgtcctggttggcaaagaccggtcaagtttttacgtgaatgggc

SEQ ID NO: 145645 - DNA, 74 bp, Homo sapiens
ggaataaccagcgatggattttttcagctggaagaattgcccggcattatggatccaagcctgttgagagaaag

SEQ ID NO: 145646 - DNA, 96 bp, Homo sapiens
tgggatctacctgaataacaaggaagcaggaatgtatcattgcgtgtgctgcgacagtccactcttcagatgggaatttcttagccataggctcac

SEQ ID NO: 145647 - DNA, 83 bp, Homo sapiens
ggatcgctgtgatcgtcacttggcctaccagacttgaagaaagtggtggtgattccttatgtgtcctccagagagaacataga

SEQ ID NO: 145648 - DNA, 89 bp, Homo sapiens
gctgctgaaggatgaacggagaggaagaattctttgatgccgtcacagctgtctgtgatcctggaaacatacgtgtgactgaagctccc

SEQ ID NO: 145649 - DNA, 102 bp, Homo sapiens
atggatgggacgctgcaggccctgagctcccagctcctccagcagccgacaggaggcccgtcaagatgcaggcaggcattgccaccccagggatgaagacag

SEQ ID NO: 145650 - DNA, 89 bp, Homo sapiens
cgtgtactgctccaagtacaacgaagccaccggcgtgtgccccgacggcgacgaggaagatttaggattcagatttatatcggaacagg

SEQ ID NO: 145651 - DNA, 73 bp, Homo sapiens
cggggtccaggtcggaaatgtagccagtggggccgccaggtggaagatacatttcagaagggtcaagaaaaag

SEQ ID NO: 145652 - DNA, 100 bp, Homo sapiens
gaagtctgggggccgagaccacacaggtgggtttggaggatttgggacaacatctacaactgcaggttctgcattcagcttttctgccccaactaacaca

SEQ ID NO: 145653 - DNA, 98 bp, Homo sapiens
tgggattaaaaggctattacatcagagacagtggcaacaattcagactttgagaatcactacaagaaaaactccttgtggtgaaggttctaagacgtg

SEQ ID NO: 145654 - DNA, 83 bp, Homo sapiens
ggaggaactggcccggaaacaggaggacatgtgaagttcatttccaatccgccctccatggtggcagcggggagcgtggtggc

SEQ ID NO: 145655 - DNA, 94 bp, Homo sapiens
tgatccagaagtccagagctgaggactgcctgtttgcagaccatggtgaatccgggcagcagctcgcagccgcccccggtgacggccggctccc

SEQ ID NO: 145656 - DNA, 96 bp, Homo sapiens
ccagcttccttcaaaatgtctactgttcacgaaatcctgtgcaagctcagcttggagggtgatgaaaatgttggggcttttcaggaagcataataa

SEQ ID NO: 145657 - DNA, 90 bp, Homo sapiens
cccaggcaccacacctgttggtgttcagatggagcggcacactagtcatcctaacagaaaagcctggagagtgtgtttccactcatagcc

SEQ ID NO: 145658 - DNA, 100 bp, Homo sapiens
tgggacgtctagtccacaggaagacctgcaccactgtcgccttcacacaggtgttggtaaatcatgcttattgctacagtttacagacaagaggtttcag

SEQ ID NO: 145659 - DNA, 75 bp, Homo sapiens
tcctcagtgcgaagaagctgcagccgcacctggccaaggtgcctgcagctctacgccccagggctgtcgccagac

SEQ ID NO: 145660 - DNA, 75 bp, Homo sapiens
tgtgagtggaagccatgaggccaaaggcagttgtattgggttttggactgacaaggaggaactaaagaaactgag

SEQ ID NO: 145661 - DNA, 74 bp, Homo sapiens
gcaacacgcaaacgagagctgaggctaatgaaaaacaggttttgctgttactgctcagtgtagtcacaccttga

SEQ ID NO: 145662 - DNA, 74 bp, Homo sapiens
ctccgtgttggcctctctgccgtggattttaaatgaggaagcggtgcagaggggcaggatgccgccgacccagc

SEQ ID NO: 145663 - DNA, 83 bp, Homo sapiens
ataaattcccggaaccgcgattcggcgtgtcaggcagcaatgaatgtggatcacgaggttaacctcttagtggaggaaattca

SEQ ID NO: 145664 - DNA, 74 bp, Homo sapiens
tcagaggtggccaataagttcgccaaagcgacaggagctgttatcaatactctggctgaccatcatcatcgtgg

SEQ ID NO: 145665 - DNA, 88 bp, Homo sapiens
tactacaacctcgggcgtctggaagaggatgaaatggattctggcacgatggttcgagcagtgggtgatgagatgggcactgtccgag

SEQ ID NO: 145666 - DNA, 98 bp, Homo sapiens
gctgcccgatggccctgggtcctcgctgtggggcaatccgggcttgcagacgaggtctaccccgagccccggagcgagagcgagtgcctgagcaacat

SEQ ID NO: 145667 - DNA, 75 bp, Homo sapiens
ggaaatttggcttgcaattcatcactttgaaaaggtgaaagaaaagatgttgtcccggttaagagtagtttccac

SEQ ID NO: 145668 - DNA, 75 bp, Homo sapiens
cgcttgaggaggagagaggagagggaacgggaggagcgtctgagcaggagaaatgattctggggaccattctgac

SEQ ID NO: 145669 - DNA, 74 bp, Homo sapiens
gaagcgctttgcttacctgtccgccgtgttgccgcccgctgtgctatgagcagtcagagcgccgtctccacaag

SEQ ID NO: 145670 - DNA, 82 bp, Homo sapiens
tggcgctgagcctgcagccggccctgccggtcgcgtggggcaggcagtggcgctgcgggccaaggccttcggcttcaacgtg

SEQ ID NO: 145671 - DNA, 75 bp, Homo sapiens
ttccatccgccagctgccatgagcgagcgcctccgtcccaggcagcccatggaggacaggcatctctaatgaaaa

SEQ ID NO: 145672 - DNA, 83 bp, Homo sapiens
taggccacaatcttcaatgagtaaacatattcctcttcgttccagagcccagcatgaatggatacgcggaatttccgcccagc

SEQ ID NO: 145673 - DNA, 95 bp, Homo sapiens
atccagatgctggatgacacccaggaggcatttgaagttccaggaagaaacccttttttcttggagccagcaataattatcacaattactgatgg

SEQ ID NO: 145674 - DNA, 76 bp, Homo sapiens
cactcttctgttaacagggtcctggcaggaattagaaggtgacgaggagggagaagacgaggatgatgcggaaatt

SEQ ID NO: 145675 - DNA, 75 bp, Homo sapiens
aaaaacagaatcagctgttccctgcgaaaggaaatacaactggagcacgcaaagcaagcctttgtgcaacgggac

SEQ ID NO: 145676 - DNA, 88 bp, Homo sapiens
tcgcgtggagtgacggtcacaccgcggcggcattgtgtggctgctcaattaatgtaccaacactggatggaagaaacatacctatgtc

SEQ ID NO: 145677 - DNA, 117 bp, Homo sapiens
aaccatccttggaaatcctgccgcggacttctctgcacagcatccctgtgacagggcatcttttatgaccaaaactgtgccttgtggaaatgaacttcacaagttcctcatctggga

SEQ ID NO: 145678 - DNA, 74 bp, Homo sapiens
aggagaggagcactttgaggacatggcctccgacgaggacattctgtagatggacggcagatccgagtagacca

SEQ ID NO: 145679 - DNA, 96 bp, Homo sapiens
ctacaaacataggatgttttggcgagagatgtattcagtggaggaagctgggcgttacctactgcggagaaagttcagcaagcagtcttaccatgg

SEQ ID NO: 145680 - DNA, 89 bp, Homo sapiens
cagaggagatccggatgctcatccataaaactgaagatgtgaatactctggctcaggccacagggtcaccacatacatcgcccacccat

SEQ ID NO: 145681 - DNA, 75 bp, Homo sapiens
gggagcttgagctgttctataccttttccgggaaggacaactgaggaaatggctagtgatgagctgaaagagatg

SEQ ID NO: 145682 - DNA, 98 bp, Homo sapiens
agcttgaaatgctacatttccaagatgatgaggacagtgattaccaccaggaggcctacaaggagtcctacaaagaccggcggcggcgcgcacacact

SEQ ID NO: 145683 - DNA, 100 bp, Homo sapiens
actgtctttgcctatggtcagacgggctcagggaagacatacaccatgggggaggccagtgtggggtcgaacaatcttatcagaaggttatggccctttg

SEQ ID NO: 145684 - DNA, 96 bp, Homo sapiens
tttcgtaaccgcaccacacccgagatctatttaggtccacctgaggaaagcgctgcaccgccagtgcctccgcctcgggtgacagcaagaaggcac

SEQ ID NO: 145685 - DNA, 98 bp, Homo sapiens
gtgaatgagccctacgagaaggacggtgagaaaggccagtacacacacaagatctaccacctgcagaggcatgctgcagacagacctttccgtccttc

SEQ ID NO: 145686 - DNA, 100 bp, Homo sapiens
tgaagagggtctggaggagccttctcaagaacagagcttggatcctagcatgactatacattgtgacatggtcattacatatggattagaccaactggag

SEQ ID NO: 145687 - DNA, 100 bp, Homo sapiens
gggggccttatttctcagccatggtacctgggttctggctgaatgaaggtggtcagagcgttactggaaaattggagaaggtacagattcagagacaaaa

SEQ ID NO: 145688 - DNA, 124 bp, Homo sapiens
tgtccgtggcgctcgagttcctggaccgtgagagcatcaagctcgtgtccatcggaactgggaagtaacagccctccacagagaaactggaagggaattgctattgctctgctggtgattttag

SEQ ID NO: 145689 - DNA, 100 bp, Homo sapiens
cagttcgtggttgcattgtggatgcaaatctgagcgttctcaacttggttattgtaaaaaaaggtgctggagaatctggtaaaagcaccattgtgaagca

SEQ ID NO: 145690 - DNA, 100 bp, Homo sapiens
cttctgcctaagaagaccgagagtcaccacaaggccaagggcaagtgatttgacaggtaaaatctgtaaaaactgggtcagttttttggacaatgtgctg

SEQ ID NO: 145691 - DNA, 127 bp, Homo sapiens
tgccatccgcaaaggctttctcgcttgtcaccttgccatgtggaagaaactggattgaaaaggaagatcaggccaaccccaaagaagaagtgaccaaggaggagtttaaactgaatgaacaacctcg

SEQ ID NO: 145692 - DNA, 100 bp, Homo sapiens
aggagtgtggactttttgaatttcaagaacagtaaagttggaacacagcagagggtgtgtaataaaatacaggaggattctctatgggaggatgcatggc

SEQ ID NO: 145693 - DNA, 100 bp, Homo sapiens
ctgcaggagaagatggcggtctccacagattgagaggatccagaatccagatctctggaatagctaccaggcaaagaaaaaaactatggatgccaagaat

SEQ ID NO: 145694 - DNA, 50 bp, Homo sapiens
acaccgtctgtcttcacaaatctctcagcaaacctgctgggcgacagcgg

SEQ ID NO: 145695 - DNA, 100 bp, Homo sapiens
cggcgagcagatgatcctggcctgcctattcggagctgagccctgcaactaccgacaaagccacagacccaagcatgtcggaacaggattggtcagctat

SEQ ID NO: 145696 - DNA, 100 bp, Homo sapiens
cggcgtgtcaggtggttgcggagctggtaaggtggatcgcatgtcctttccatgtggctgctcccgggatggctgtgggaacatggcaggacgcattgaa

SEQ ID NO: 145697 - DNA, 103 bp, Homo sapiens
cagccttcagcttttggcagcatgaaagttagcagtggtgactctcaaaaggaaataggatcatggcagcagatgatgacaatggtgatggaacaagtttatt

SEQ ID NO: 145698 - DNA, 98 bp, Homo sapiens
agtggaacctgggacccccaagcggtgtctctcatcctgactggggatccagagtaggagggagcctttggtggggtctcctctgagcctccggcctc

SEQ ID NO: 145699 - DNA, 76 bp, Homo sapiens
taggtgtatcaagtaatggtgcaaagcctgaacagcaccagatgaagacagtacaaccaatataacaaaaaagcag

SEQ ID NO: 145700 - DNA, 96 bp, Homo sapiens
gaaacttcagaatgctgtttatagtgaactgagtgtgaataggaggccttcaagattttgtgctgaaatctgcaacactgtgtagcctgccatcct

SEQ ID NO: 145701 - DNA, 80 bp, Homo sapiens
cctaaaggcatccgggccgtgctgctggggcctcccggggccggtaaagggacccagaggactgattacggtgagcagca

SEQ ID NO: 145702 - DNA, 48 bp, Homo sapiens
ttgtagatgttattgatcagaacagggacgccaggaaagcatgtgcag

SEQ ID NO: 145703 - DNA, 100 bp, Homo sapiens
caacttggttcaatgggtagcctcaccatgaaatcacagcttcagatcactggtaagccgtaactttgagctggttggacgggttaacttggatcagctg

SEQ ID NO: 145704 - DNA, 100 bp, Homo sapiens
tgggactgaagagggacgggtcccgcggcgagcgagctcctgaggatgtgatcttcgtggtggaaagctaaattttaaaaccaccccaatggatgcagac

SEQ ID NO: 145705 - DNA, 75 bp, Homo sapiens
gtggaagcggcaagcagagaaaacctgccaatcaagatgagtatggctgtaaaggtgcctcccactacggcctga

SEQ ID NO: 145706 - DNA, 75 bp, Homo sapiens
cctgcctcgccttgtggagggccttgatcagttcacagagaatcagatatcaccaaggagagaattcagaagatc

SEQ ID NO: 145707 - DNA, 100 bp, Homo sapiens
ccggagtcagcgatggtgcccggcgaggagaaccaactggtcccgaaagaggagtccaaaactacttacctggaagaccttccaccaccccctgagtatg

SEQ ID NO: 145708 - DNA, 75 bp, Homo sapiens
agataaaaggggtctctgcgtctgtagttcatttgaccaaacgggcaagtgtccagagaatggctgggatgaaag

SEQ ID NO: 145709 - DNA, 100 bp, Homo sapiens
ttcagcggtgatccagaggagatccggatgctcatccataaaactgaagatgtgaatactctgaggcacagagctttggcctgctggatcccaaactctg

SEQ ID NO: 145710 - DNA, 98 bp, Homo sapiens
taattggctacgtgctcttgtttgggattaacatgatgagtacctctccactcgactccatccatacaatcacaggttgacgccgctgtcaccccaga

SEQ ID NO: 145711 - DNA, 83 bp, Homo sapiens
atgcatgctgcttttgatgtctgacaacgtggatcgttgttttgaaaccctcctgacaaggtgatccgggcgggccccgcagg

SEQ ID NO: 145712 - DNA, 90 bp, Homo sapiens
ctctggggcgtcttgcagccctatgagcatctcatctgcggcaagaacgccaatgtcctgatcacccgagaggatgacttcaacaacagg

SEQ ID NO: 145713 - DNA, 75 bp, Homo sapiens
ggagaacccaccaagccccgctaggagccacctagactggatgcagagcatgttaagtgggcagaccaacatcca

SEQ ID NO: 145714 - DNA, 98 bp, Homo sapiens
ccagcaacggggtggccgatgaatcacccaacatgctggtgtacagaaaggttgcacagagcattgaggatcaccatcaggaagtgattggtttctgc

SEQ ID NO: 145715 - DNA, 75 bp, Homo sapiens
gcgcggcagcagctgacctcgcaggtggataattactgtaccttcctcatggaaaaagttttatttaaagtgtta

SEQ ID NO: 145716 - DNA, 100 bp, Homo sapiens
catcagaaaccctgatttgagccagacgtccaaagtgaaacctccgggtggacattcccctcagaatagcctaacatggcagaccagagacagcgctcac

SEQ ID NO: 145717 - DNA, 100 bp, Homo sapiens
cccgtttacaggtccttggctggaagaggctggataaaatactgcatttaatggaggggaaagttccagtcgcagcgctgagaagcgatcagctgaagaa

SEQ ID NO: 145718 - DNA, 98 bp, Homo sapiens
gccccttccatgaccagccacatctgaaaagggtggagtccaagactgtattctcaatggagctactgctggggagaactaggtgtgggaaatttgaa

SEQ ID NO: 145719 - DNA, 83 bp, Homo sapiens
atttcgggacagctctctagaaactcgctctaaagacggaaccgccacagcactcaaggggatatgagactttctactcggaa

SEQ ID NO: 145720 - DNA, 74 bp, Homo sapiens
gcttttagaaagaacagacttccaccagaataaataaggatctggcatgtcaacacaaacataggaagttgagg

SEQ ID NO: 145721 - DNA, 75 bp, Homo sapiens
ccttagactatttttcaaacagtcacagtgctgtcgatatcaccaaggtggctagaagacatcgcatgtctcctt

SEQ ID NO: 145722 - DNA, 101 bp, Homo sapiens
ggcagcaagggcggcggtggcggcggcggcagctgcagtgacatgtccagcatgaatcccgaataatgtctcagagcatgtcttcagtatcttcaaggcat

SEQ ID NO: 145723 - DNA, 76 bp, Homo sapiens
gcttgtcctggctcttgccctcatcctggttctggaatcctcagttcaaggctcccacatcaggacgagaaggagc

SEQ ID NO: 145724 - DNA, 83 bp, Homo sapiens
cgcggccggcccggcgcggcccagcgccctcagggcgtgatggtgggcatgggtcagaaggattcctatgtgggcgacgaggc

SEQ ID NO: 145725 - DNA, 101 bp, Homo sapiens
gggggaagaaaaaggcaatcgggcactggaccagtttaccctggcgagatgtgtcttgctgaatcagggctctcttatccctgccatcgacttacagtggg

SEQ ID NO: 145726 - DNA, 100 bp, Homo sapiens
acagcgacgtgggcaagggcgagatcctggagagcctgcaggacggcgcggcagagtccccgtacgcctacagtaacggaaaaccaattctgtgtcctcg

SEQ ID NO: 145727 - DNA, 90 bp, Homo sapiens
atgtcttaagagaaggggctaatgccacaagtgatatgttctattttgcagttgaagatggtggaggtacagcatgtgtactgaccgggc

SEQ ID NO: 145728 - DNA, 51 bp, Homo sapiens
ctcccgagtagctaggattacagatgcatggagtcatctcccacatttctc

SEQ ID NO: 145729 - DNA, 100 bp, Homo sapiens
ccagcgcccggagcaagcggagctcccccaagagccggaaaggcatgatttcaccttcacttgaactgcttcattcaggactctgcaaattccctgaagt

SEQ ID NO: 145730 - DNA, 82 bp, Homo sapiens
tgctggctacagcttcagaagaccgaagcgttcgtatctggaagccgagaggccccagcaacatgcagctacaattccagag

SEQ ID NO: 145731 - DNA, 100 bp, Homo sapiens
tgggagttagcgaggcgaccacgaaaacggtgaaggtcggaaccgacagcctcctccgagaagggttacaccggatgacatcaattgaaagagaagaaaa

SEQ ID NO: 145732 - DNA, 101 bp, Homo sapiens
gctcttctctcaactggcctcatgttcttttatcacttcagcgtcttgcagatcctcggcctggtgggtgtacatggcattagaatagaattcatcaatga

SEQ ID NO: 145733 - DNA, 80 bp, Homo sapiens
acagccagtcttctatgtttccacatcggtcagaaaaagatgaacagatggagtcggataactgttcaggaggagatgat

SEQ ID NO: 145734 - DNA, 99 bp, Homo sapiens
cgaatgccaagacagagcatgggtggtgctcgcacacagcaggatttaagagagggtctcgctgttggagttggatttggggctatagaaaagacggca

SEQ ID NO: 145735 - DNA, 100 bp, Homo sapiens
tgcacaggcctcccagcgcctgaagtcacccggaattgggaagtgctcagaagcttacaaagctgcctcgaggtaatacctagcaaatacagaaagagag

SEQ ID NO: 145736 - DNA, 100 bp, Homo sapiens
atgaaacaatgaggcgatttgcaagaattgtggggccagtggaacatgacaaattcattgaaagccatgcatggtgtccgcaatgttgccagtgtctgtc

SEQ ID NO: 145737 - DNA, 90 bp, Homo sapiens
gaactgcctgtgcgccctcaacctgctttacaccatgtttctttctcagcaaaatagaggagaagcttacccctcttccagaagataata

SEQ ID NO: 145738 - DNA, 122 bp, Homo sapiens
aaggagacttggaacgcacagaggaacgagctgagctggcagagtccctcctgacaaggtgatccgggcgggccccgcaggaattttatcccctcaccggcctcacactagtatcgcatgtc

SEQ ID NO: 145739 - DNA, 100 bp, Homo sapiens
cagcggcggcggttgcgggggggaagtgactgggcggtgccggcgccggagacgatgccgttttgctgattgttggaggttcttttggtcttcgtgagtt

SEQ ID NO: 145740 - DNA, 100 bp, Homo sapiens
gcaaaatcaacaacagtttcctgcgcgaccacagctatgcgaccgaagacaaattggagacaatctgattgttcctggaggagtgaagaccattgaagcc

SEQ ID NO: 145741 - DNA, 126 bp, Homo sapiens
aacgagctgctggaggacgagggccagctgacggagatggtgcagaagatggaggaggtactaggttttgacaagcttgcatcatgcgtgagtataagctagtcgttcttggctcaggaggcgttg

SEQ ID NO: 145742 - DNA, 75 bp, Homo sapiens
gccgatccagcctgcggagcctgtggggcagataggtgatcttcagctttgcaaactggatgaactagattgctt

SEQ ID NO: 145743 - DNA, 82 bp, Homo sapiens
gagagaactgctggaaggagactggatgatagaattatcgaaattgcccagaagcatcctgatatctatgcagttccaatca

SEQ ID NO: 145744 - DNA, 82 bp, Homo sapiens
ggccgagggcggcgacaagaaccgcgtccgtctccaagagagtatgaagagagtgcgtctgtagggcagggaagatggcgga

SEQ ID NO: 145745 - DNA, 114 bp, Homo sapiens
aacacggtgggcgccgacatcatccagctgcctcaaatcgtcgtagtgggaacgcaggatgacgtagctttgccaaagacttagaagctaagcagaaaatgagcttaacatcct

SEQ ID NO: 145746 - DNA, 112 bp, Homo sapiens
ggcgggggtgctgcagaggacacgaggcggcgggctggagacatggaccgcggcgagcaagtgtttgaaagatgtatggtgatcttgaaacctccagacacaagaaaacttc

SEQ ID NO: 145747 - DNA, 76 bp, Homo sapiens
ggaaaacatcgtggccaacacggtcttgctgaaagccagggaaggtaagaatgattgatgttggctgatattggag

SEQ ID NO: 145748 - DNA, 96 bp, Homo sapiens
tccatctggatgttgctgtgatcagtctgaaatacaaatggaatgactcctctaatgcatgcagcatataaaggaaaactcgatatgtgcaaatta

SEQ ID NO: 145749 - DNA, 100 bp, Homo sapiens
tggacaagtttcatacatttctccgccaattcaccttgactctgagctagaaagaccctctgttaaaggtaatatgcacgtgtcactagctgaggccctg

SEQ ID NO: 145750 - DNA, 90 bp, Homo sapiens
ctgagctttgtggaagcatttggcggcataccaccctgcactgtgaggtacaccaggggttggaaaaaccacactaggcaaagaacttgc

SEQ ID NO: 145751 - DNA, 100 bp, Homo sapiens
ctttacagagaacaatggcagatggatcgagcaatggcaccagcatgatatcattgatcattcctcccaaagaccagatttcacgagtggcaaaaatgtt

SEQ ID NO: 145752 - DNA, 100 bp, Homo sapiens
gctttgcagttgtgtgcgagtgtgtacaggcaggaaactgcatatcttctggtttacatgaagatggagtgctaatggaaatgcccaaaaccttcagaga

SEQ ID NO: 145753 - DNA, 100 bp, Homo sapiens
accagaaggaaccaattccggacacataacaagcagcagtgaggacaccaaagaaccaagactcagagcttctgccgaaatgaatatagcctgactggac

SEQ ID NO: 145754 - DNA, 100 bp, Homo sapiens
tatggattccattgaatgggctgaagtggtgatcaatgtgaacaatattctcaagggaatggccttaagtcttggagataaaatcaacttgtcacagaag

SEQ ID NO: 145755 - DNA, 98 bp, Homo sapiens
aggagatcgaggacgccgagaagtactccttcatggccaccgtcaccaaggcgcccaagaaggtgctaaagagattgatatcgcagcgaccctggagc

SEQ ID NO: 145756 - DNA, 74 bp, Homo sapiens
tacttctcctccttctttgttcaagactgggcttccaccgagcaggctcagtttatgaacctcttaaaagcatt

SEQ ID NO: 145757 - DNA, 99 bp, Homo sapiens
actgtgatgaccagtctgatgagcgcaactgcattaagtgggcagaccaacatccacctcagcaaaaacttcttcctgacgaatcgcgccagggagcgc

SEQ ID NO: 145758 - DNA, 100 bp, Homo sapiens
gcgcaggattataatatgctttctgatgatgcccgtctcttcacagaggtcaattttgataaagatccaatggaaatgcgcctccctattcgtagcccta

SEQ ID NO: 145759 - DNA, 100 bp, Homo sapiens
aaccatcgaagaatgaaaccggcttgttgtcttcaattaaaaaatttattaaaggaagcacacctaagctctttcgacgtgtagcagcagctttgccggg

SEQ ID NO: 145760 - DNA, 105 bp, Homo sapiens
tctgtcttcggtggactccttcggcagtccacccaccgccgccgcctcccaggcaccatgactcctgtgaggatgcagcactccctggcaggtcagacctatgcc

SEQ ID NO: 145761 - DNA, 51 bp, Homo sapiens
gtacaagcacctcctgctccagtaattggtcacagacatgatgcagaaggc

SEQ ID NO: 145762 - DNA, 82 bp, Homo sapiens
tctggaggagtgagagccggcagcaaattgtggctactaatttgccccctgaagatcaagatggctctggggatgactctga

SEQ ID NO: 145763 - DNA, 98 bp, Homo sapiens
aactgcaaaccataatcctgtcttaatactgcaaacaaatcatagtggaactaaggggaacttaatttactgattccaacaatgtctcacccatcttg

SEQ ID NO: 145764 - DNA, 50 bp, Homo sapiens
cctggctgttcctccaccaagattttctattatcctcccagtccacaacg

SEQ ID NO: 145765 - DNA, 100 bp, Homo sapiens
tctgtcttcactccaattccaccaagttctccctctttgctggaggcatgctgatggagtttcactatgttgcccaggctgatctggaactcctgacctc

SEQ ID NO: 145766 - DNA, 124 bp, Homo sapiens
ggggaatcaagacgacaagaacccggggactttgtgaagcaggacattggcggttgcctaaaatagacttttttgactattctaaattgacccctcttgaccagcgctgcttcatccaagctgc

SEQ ID NO: 145767 - DNA, 90 bp, Homo sapiens
agaggatctggtgtaccaggcgaagctggccgagcaggctgagcgatacgacgcatacacgtcgtgacttggaacgtggcttcggcagcg

SEQ ID NO: 145768 - DNA, 100 bp, Homo sapiens
ggaaggctatgtgaacgtgacagtcaagccaggtcatgccacctcagaacctggaaagggcagatgaaatttgcattgctggctcccctttgactcccag

SEQ ID NO: 145769 - DNA, 100 bp, Homo sapiens
attaagaccacaagctctggagccaaactgcctggttcaaatcccagctccaatacaggacaggaagatgtcacccaagcgcatagctaaaagaaggtcc

SEQ ID NO: 145770 - DNA, 96 bp, Homo sapiens
ttattcaccatcaacaaagaagaccacacactgggaaacatcattaaatcgcattcagatttgggagaagtagccccagaaataaaagcatcagag

SEQ ID NO: 145771 - DNA, 132 bp, Homo sapiens
acaaaatggaaaggtggaacattacaaattcaactagcaaaagaaagctttctgcacagcatggcctgtatgagaagaaaaagacctcaagaaagcaacgaaaggaacgcaagaacagaatgaagaaagtca

SEQ ID NO: 145772 - DNA, 90 bp, Homo sapiens
gaagatgctgaagctgaggacacacccaggaaaagactcaggacggacaagcacagtcttcggaaggtcagctgcaatttggaacctcac

SEQ ID NO: 145773 - DNA, 83 bp, Homo sapiens
gaaatctcaagatattaaagttactgctgttaaaaagacaatgcagatcttcgtgaagactctgactggtaagaccatcaccc

SEQ ID NO: 145774 - DNA, 98 bp, Homo sapiens
tccctctggagtttcaggatgaatttggtcataccagtcaactagtaactgatattcagccagttcttgaagcaagtgatgtccttgcattgcccatt

SEQ ID NO: 145775 - DNA, 75 bp, Homo sapiens
tctatgccgacatcgacgccgcctggcaggccctgcgcaccagtgcttcaggcaccgtgtacacagcaatggatg

SEQ ID NO: 145776 - DNA, 76 bp, Homo sapiens
tttcgatatgcaaaaaatcaaatctctcatgacccgacagatcatggaagggaagtggttgctgtgtatgttactg

SEQ ID NO: 145777 - DNA, 114 bp, Homo sapiens
tagtagatactgcttggttggagatcatgaccaaatatgctgtgggagaagagtgtgacttcgagtatgattcatccagccttccagctctgttatttaaagcaagaacacttc

SEQ ID NO: 145778 - DNA, 50 bp, Homo sapiens
gtgatttctgcatttccatctgagcaaaagcaacagtggggatcagcatc

SEQ ID NO: 145779 - DNA, 83 bp, Homo sapiens
gttcgagctgcggctcacggaccctgtgcccaaccccaacccccacgagtccaagccgtttttagaacttcagccataaaaat

SEQ ID NO: 145780 - DNA, 133 bp, Homo sapiens
cgacggcgagccgcagccctacccaacgctgccgcctggcacgggccgccgcatccacagctaccgaggtgacaaaaggtgagacactcacctagaacagtgccgtgctgctgctgggaagttgctttacaca

SEQ ID NO: 145781 - DNA, 75 bp, Homo sapiens
tttacatgagcatctgtggggagaatgaaaactgccctcctggcgtgggttatggaggttttgatgactatggtg

SEQ ID NO: 145782 - DNA, 51 bp, Homo sapiens
tcagaagacagagggttttcttttgaggttatcaagttatacccaaccagc

SEQ ID NO: 145783 - DNA, 98 bp, Homo sapiens
gaacccactcggggactctgccttttaccgctggaagctctttgacatcctttggaacagaaacatcaaacagtggtaccttaccccaaagtagtgcg

SEQ ID NO: 145784 - DNA, 100 bp, Homo sapiens
cactccagatggaactccagcagatcatgaaggttatggctgcagcttcgattgccaatattgtaaaaagttctcttggtccagttggcttggataaaat

SEQ ID NO: 145785 - DNA, 99 bp, Homo sapiens
cccctgagccaggcgccgcgacacagcggggaccctccggccgggcccccagaggcgggagcgcggggaaatcctcattgacgattcaatttgttgaag

SEQ ID NO: 145786 - DNA, 89 bp, Homo sapiens
gggactgatggtgccattttcttttagtatatttccacagattggacaggtctcggtccagctcgacttccagctcaggctccagcacc

SEQ ID NO: 145787 - DNA, 74 bp, Homo sapiens
ggacgctcggtcccgcgctgcgcatccccgcggacgccacagcgctgcacagcgtcaccttcgtcccctccgga

SEQ ID NO: 145788 - DNA, 76 bp, Homo sapiens
gctcacgacagaaggcgtctcatggcgttggaataccggctctcagcggctccctgtgcctaaggatagagataaa

SEQ ID NO: 145789 - DNA, 83 bp, Homo sapiens
cgcagtggtcgcttcttctccttgatcagcggtttgagtgctacgtttgcagaaattttcttggaaataatccaaagcagtct

SEQ ID NO: 145790 - DNA, 100 bp, Homo sapiens
ttctcagagcgggaggccagctttgtcctgcacaccattggcaaaactgtggagtatctgcactcacaggggaggttggaaagaaccatgactgtattca

SEQ ID NO: 145791 - DNA, 100 bp, Homo sapiens
accccccgactcttcccactcaaaatccgttgccgggctgacctggtcagattgcccctcaggatggcggatgacccggacgacgggccagtgcctggca

SEQ ID NO: 145792 - DNA, 98 bp, Homo sapiens
ccgctggccccggggatccgaagaggaagggcggtccgggctccacacttagcttcattaagcctgatcaagatgacaacctcccaaaagcaccgaga

SEQ ID NO: 145793 - DNA, 108 bp, Homo sapiens
ccggaggaggaggagaggatgatttttggatcctgagaattgatctatgttggatcaagtttgctctccaaagctcggggaattgattccagctctgttaaactccgg

SEQ ID NO: 145794 - DNA, 100 bp, Homo sapiens
aaaggcccagatgataggaatcccatctcatttagtgttttccaagcagtgaagcacttgccgtgttgaactgaatgcactactggagaatgttctgggt

SEQ ID NO: 145795 - DNA, 88 bp, Homo sapiens
tgggcaccggcggacagtcaagagcccggcccaggtcatgttccagtgtctgtggaagagctgcgggaaggtgctgagcacggcgtcg

SEQ ID NO: 145796 - DNA, 100 bp, Homo sapiens
gtgacagcgtgagaggttcgcagagtttattcttcagtccaaggaagcaattcacagtcagctgttagagaagcagaaaatagcagaagaaaaaattaaa

SEQ ID NO: 145797 - DNA, 82 bp, Homo sapiens
gttcacctccaacaagctcccattggatcttaagaaacacccgccgggcagcagaggtctggatggatgaatacaaaaattt

SEQ ID NO: 145798 - DNA, 96 bp, Homo sapiens
gaaacaataggacggaaacgccgaggaacccggctgaggcggcaggcatgtcgggccccaggcctgtggtgctgagcgggccttcgggagctggga

SEQ ID NO: 145799 - DNA, 74 bp, Homo sapiens
tattttactgataagaaaacacatctttacacactaagtaacctgtgtatggtgactggaggtgctaacctagg

SEQ ID NO: 145800 - DNA, 90 bp, Homo sapiens
aaagaacttgcagttgaaggagtataacacaggtcctggcattgatgtgcctgctccagacatgagcacaggtgagcgggagatgtcctg

SEQ ID NO: 145801 - DNA, 75 bp, Homo sapiens
ggccgtgcggggctccgtggtgctgcttctaaccgaaaatcttcagttggcgtaaaaaagaatagcaagagcaga

SEQ ID NO: 145802 - DNA, 50 bp, Homo sapiens
tttgacctttttgaagcctttgcaaaagaatcccagtcagaagttccagc

SEQ ID NO: 145803 - DNA, 100 bp, Homo sapiens
gtaaacctggccactggaaaacgaagccacagcagaacgggatctctccgcgcatgtttaaggcctttgtaagcaagagccacccggaattctcctctaa

SEQ ID NO: 145804 - DNA, 100 bp, Homo sapiens
cagactctgaagatgatcagacaaggcaaagcgaaattggtcattctcgctaacaactgcccagctttgaggagaatacttatctctggcgcacatcact

SEQ ID NO: 145805 - DNA, 80 bp, Homo sapiens
gtaacaagagcatcacagccaaggaagccctcatctgcccaacatgtggatgccatggagactggaagaccattccaact

SEQ ID NO: 145806 - DNA, 82 bp, Homo sapiens
ggcaaagtagaaaaacactatctcttctatgacggagaatccgtttcaggaaagcatggaaataaccagcctgcaagaactg

SEQ ID NO: 145807 - DNA, 100 bp, Homo sapiens
cccaaatcgtggccccttcgacctgcgctccgcgctctggcgctacggtctggccgtcggctgcggcgccatcggtatgagggtgctggttgatgctcga

SEQ ID NO: 145808 - DNA, 75 bp, Homo sapiens
gtcagagctgacagagcggctgaaggtgctggaggccaaggacaaattgatggccaggagatcactgccaccgcc

SEQ ID NO: 145809 - DNA, 75 bp, Homo sapiens
tgctggcgctctggctgtgctgcgcgacccccgcgcatgggatccatatggctttggagacagtcgagattcaag

SEQ ID NO: 145810 - DNA, 100 bp, Homo sapiens
tacctttagagtttgtgaaacagctttgtttaaagatacaatctgaaagaccagatttcaatgggacagatgttacaagattttggaaaatttcttggga

SEQ ID NO: 145811 - DNA, 83 bp, Homo sapiens
tggccacaacttcctgcaggactccaaggtcattttcgtggagaaagccccagccactgaggcggctcccagctgcgttggcg

SEQ ID NO: 145812 - DNA, 101 bp, Homo sapiens
cctgctactcccgcatgcgggccctgagccaggagatcacccgcgacttcaacctcctgcaggtctcggagccctcggagtcaactgagagttcaaataca

SEQ ID NO: 145813 - DNA, 80 bp, Homo sapiens
gaaataactcagctgaagcatcagtacttggaccatgagactgtttcagccactttcatcgacagcagtggacagtttgt

SEQ ID NO: 145814 - DNA, 105 bp, Homo sapiens
caaggtgatccagcaaggtcggcagagcaaggggcttacgcagaaggacctggccacggcgtccgagctgggccacagcctgaacgagaacgtcctcaagcctgc

SEQ ID NO: 145815 - DNA, 82 bp, Homo sapiens
ctgggccgcagcgggaccccagttcctccgccaagcgcggccgccgcccccgcctcaggtgagaagccctaccactgcaact

SEQ ID NO: 145816 - DNA, 87 bp, Homo sapiens
aggagattccctgggcctgcaggaagcccttccgcggaccgaaaggccacaccatgaggccccagccccaccagaggccccgcgctg

SEQ ID NO: 145817 - DNA, 100 bp, Homo sapiens
ggattatcttagaattttaagatacttcagcatcgccctgagcaactggtggtttgtggcccacctgacagacctgctggaccactgcaagctcctccag

SEQ ID NO: 145818 - DNA, 75 bp, Homo sapiens
ggaaaaactgcttgatattagaaagaagagattgccgtggaggtcctgaataaccatggtggctgctgtttgtca

SEQ ID NO: 145819 - DNA, 100 bp, Homo sapiens
tgatgctagcctgtccgggatcggccaggaactgggtgctggtgcctatagcatgagctcctcaagagttactgatctatgaaatggcagagaatggaaa

SEQ ID NO: 145820 - DNA, 50 bp, Homo sapiens
gccgtggaggcagaggtggcatggggtcgccatgggctactcacactcct

SEQ ID NO: 145821 - DNA, 51 bp, Homo sapiens
cgccagcctcctcactggcctgccccagacctgtgaccgcatcaagcagtc

SEQ ID NO: 145822 - DNA, 120 bp, Homo sapiens
ggccggggaccaggacagtcgcgaggttcgagtgttgcagagcctgcggggcaagatctacaatgcagatcttcgtgaagactctgactggtaagaccatcaccctcgaggttgagccca

SEQ ID NO: 145823 - DNA, 101 bp, Homo sapiens
ataatgtggaacctggatgaatgtagagagaaagtacttcaagtgatgccacgcttcgctgaacaagtagaggttgccattgaagccctgagtgccaacgt

SEQ ID NO: 145824 - DNA, 75 bp, Homo sapiens
cttctccaccaggatcacgtttgagtgtgctcagatatcggtttgatgctataagtgcagagctgttgaactgga

SEQ ID NO: 145825 - DNA, 82 bp, Homo sapiens
cgtgggcttctccagctatgagcttgtggccacaccccacaacacctctaaagcccatttctaccgtcctgcaggggctgcg

SEQ ID NO: 145826 - DNA, 100 bp, Homo sapiens
cagccaggacgagaggatgcggagcccgcagaacctccacagtcaagaggacggtggaggctccaacccattccagcaccttgagaagagtgcggtactc

SEQ ID NO: 145827 - DNA, 74 bp, Homo sapiens
ctccaaaaatgccacccagctccaactcaccaaggaaggtggaggagtctgtgctcaacctgggcaaattccac

SEQ ID NO: 145828 - DNA, 126 bp, Homo sapiens
ccacattcaagaggagctttcaggcgatctggagaaagaacggcagaacacacagcaagctgtgacctctacaagttccagagactactctctgacttttggtgcaatcaaccaaacatggtccta

SEQ ID NO: 145829 - DNA, 75 bp, Homo sapiens
cgctcttgtgccctagcaccccgagaaccgtcagtttgagccagatgacaggggcaagtgtccgagtggtgaatc

SEQ ID NO: 145830 - DNA, 101 bp, Homo sapiens
gataccgaagcgggctgtgtgccccttctccacccagagtttttgaaatcatgaatcctgtttatagtcctggatcttctggggttccctatgcaaatgcc

SEQ ID NO: 145831 - DNA, 100 bp, Homo sapiens
cgccggcgcctcagctcacagagacgctgggcttctacgagagcgaccggcggcgggagaggcgccggggccgcacagatatgaggccccaggattcctg

SEQ ID NO: 145832 - DNA, 103 bp, Homo sapiens
ctccctctgcccccccttccccacgcaaccccagatccatttacactttacagcgtccgagctgggccacagcctgaacgagaacgtcctcaagcctgcgcag

SEQ ID NO: 145833 - DNA, 90 bp, Homo sapiens
gtcttctgctggaggttccttcactgtgcgtgctgaccatgggtgaagatggttttccaggattcaaaggtgacatgggtctaaaaggtg

SEQ ID NO: 145834 - DNA, 101 bp, Homo sapiens
ggcggcggcaagacctctccccctcggaggcggcgggcggaggcggcggatcatcaatgctgtggtactgttgattttattgagtgccctggctgatccgg

SEQ ID NO: 145835 - DNA, 74 bp, Homo sapiens
gatttttgctcattaacagaaaagaagaggagaatgctaagcagagagacttggacacagttgcagggctggaa

SEQ ID NO: 145836 - DNA, 83 bp, Homo sapiens
gtcgcggactctccccgcgatgatgccgacaatgcagatcttcgtgaagactctgactggtaagaccatcaccctcgaggttg

SEQ ID NO: 145837 - DNA, 96 bp, Homo sapiens
tcatcttcacatttggtttctagaccatctacctcatctagaaggagagcaattagtgagacaggggaagccatatgtttttgaccgtgtattccc

SEQ ID NO: 145838 - DNA, 100 bp, Homo sapiens
cggattcaggattcagatgaaccagatgggagttttgtggttcatgatataccttctggatcttatgtagtggaagttgtatctccagcttacagatttg

SEQ ID NO: 145839 - DNA, 100 bp, Homo sapiens
agtgtgtggttacaatggttggtctgatttacccatatgttatggtggtgaactggctagaagggcctggatcagaacaactaagagcccagtggggcat

SEQ ID NO: 145840 - DNA, 80 bp, Homo sapiens
ggatccacctggagctgaggaaccggaccccggcagctcattactctactgactggcagagacaggagaggtagatgtcc

SEQ ID NO: 145841 - DNA, 82 bp, Homo sapiens
ctccgtgggcgtaggaccctccgagccagcttgccctgcagggacattcaaggccagccaggaagctgaaggctgctcccac

SEQ ID NO: 145842 - DNA, 98 bp, Homo sapiens
tcaaataaagttgatgtgtggtcggtgggtgtgatcttctatcagtgtctttatggaaggaagaatcaggaaacccaggcccaacggcaggtggatgc

SEQ ID NO: 145843 - DNA, 50 bp, Homo sapiens
gccgagcaggctgagcgatacgacggtgggacagtcacttcctcctccct

SEQ ID NO: 145844 - DNA, 100 bp, Homo sapiens
ccccaaggtctgctgtgattacgccctccacgtggggatcacctggtgggcacccaaggagtatgtccagagagtgctgctggttgtcacagcattgtct

SEQ ID NO: 145845 - DNA, 51 bp, Homo sapiens
tttatattgaaatggatcctccaggtctcctttacagaaaggggcttggat

SEQ ID NO: 145846 - DNA, 100 bp, Homo sapiens
attgtttatgtaataaagcagatcacaaaggaatttccagagttagtagcaagacgcatctagatgtagtgaacaacccagtatttcagatatcaaggag

SEQ ID NO: 145847 - DNA, 83 bp, Homo sapiens
accacatagacatttacgcggatgtcggcgaagagttcaaccaggtcatcatcagatttgaaatatttaaagtggatacaaaa

SEQ ID NO: 145848 - DNA, 100 bp, Homo sapiens
ggattcatttagagctgcggaacaggacgccctctgatgtgagccgttctccaaccctttggcccccgatggccacgatgtggatgatcctcactccttc

SEQ ID NO: 145849 - DNA, 101 bp, Homo sapiens
tgcagccttaaacgacttgttctctatcgaacaaaagtagaggtaccgaagacactgggattattaaggatgttaagtgtcaagttttacagtcgccaggg

SEQ ID NO: 145850 - DNA, 148 bp, Homo sapiens
ggaatatttaaactcggatcagagggatttgtacagagatgtgatgttggagaattatactaacttggtctcattggggtcccaagccctgcagtgctacagctttgagcacacctactttggcccctttgacctcagggccatgaag

SEQ ID NO: 145851 - DNA, 83 bp, Homo sapiens
catttctttcacaaaccttgtgtctcaatttggctacaaaagtcctcctgcatatgcccaagaggattgggagtggaatggac

SEQ ID NO: 145852 - DNA, 100 bp, Homo sapiens
agcaccagttacacaaggacttctttatccgagcgctggattgcatgagaagatgttgatggcatggacctgggcaaaaaggtcagcatccccagagaca

SEQ ID NO: 145853 - DNA, 115 bp, Homo sapiens
cagattctgtgtatcagcatttggttcaggatcgacataatgaaaatgggtgatttcacctggaacagcatgtcaggccgcagtgtacggctgaggtcagtccccatccagagtc

SEQ ID NO: 145854 - DNA, 88 bp, Homo sapiens
cagcgacggcagcggcggcggctggactaaacaggtcacctgcaggctctctatgagaacatgctggtggagctgccctttgcaggct

SEQ ID NO: 145855 - DNA, 82 bp, Homo sapiens
ttcgagtgaccgagaccgcggccgggaccgaggccttgccaacattccactaacccccgagactcagcgggaccaggagcgg

SEQ ID NO: 145856 - DNA, 50 bp, Homo sapiens
ctggagcactcatttgagatcggttctcccctggacccggcctccaccac

SEQ ID NO: 145857 - DNA, 75 bp, Homo sapiens
ctggcctcagcaacctgacaattctgtcgtgtcccggatgagagggccttaccaaaaggagatttcttccctcct

SEQ ID NO: 145858 - DNA, 83 bp, Homo sapiens
gctgcagcagccgcaccagcgccgggacgggggtggccgtgcagaggacaaaagcatgtcttcccttcctgggtgcattggtt

SEQ ID NO: 145859 - DNA, 100 bp, Homo sapiens
aagaaataataaaatgggagagaatgaagcaagtttacctaacacgtctttgcaaggttcctcatgagagtgctggactcctacggggatgactaccggg

SEQ ID NO: 145860 - DNA, 125 bp, Homo sapiens
tccttcttcgccctctgtggaccccagatgcttgtcttcctgagagtgattggaggtctccttgccttggctggtttctagagaggaaggatctccccagctgtcttcagcaaggccgtctcctg

SEQ ID NO: 145861 - DNA, 152 bp, Homo sapiens
cagtgtccaggaacacctgcaacaacaggattcacggatcagcctgagatgatcccagctgtgctctggacagggtatctgtaccacgttttgaccaaaaacaccacagtcacagaacagaaccggaacctgctagtggagaccatccgttc

SEQ ID NO: 145862 - DNA, 83 bp, Homo sapiens
cccgctcccagcggccgcgattcggggaggtaggcgctgggccgaggaggtgacttaagagattaaaattaatttggttgctg

SEQ ID NO: 145863 - DNA, 97 bp, Homo sapiens
gtggatttggggatggctataatgggtatggaggaggacctggaggagtttatacagagaaatcctcttcttatcattagtgtctctaggaagagag

SEQ ID NO: 145864 - DNA, 85 bp, Homo sapiens
gcgaggaagctacacttttcaccaaggaactggtgctgcagcgagagttcctcagcactttgtttgcccccttaaactttgtcat

SEQ ID NO: 145865 - DNA, 75 bp, Homo sapiens
aggacagttcgctacacagcaatgcatcgaggtcagtcaccacgaacaggggcactcggcatgctgccccagcac

SEQ ID NO: 145866 - DNA, 75 bp, Homo sapiens
ggaagtgaggccaatgaagaactgcggcagaaatttgagccttgccttacacccagacaaaactctcgttgcaac

SEQ ID NO: 145867 - DNA, 133 bp, Homo sapiens
catcattttcacctcgcgtcgcgcccgggaggaaggaacgaggcaaggagctaaagcagcgtgcgttcagccctgggggacccagacatggagctgcgggaagaagcctggtctccggggccgctggattctg

SEQ ID NO: 145868 - DNA, 82 bp, Homo sapiens
ccatggccgacgaaaagcccaagtgacttctgacagctctctccatggaaggaggcggcggccgcgatgagccttcagcctg

SEQ ID NO: 145869 - DNA, 75 bp, Homo sapiens
gcctcacctcaccatttctagcttgttgaaacccaaaactagcgcagttgtgtagcagttgagtaatgctggtta

SEQ ID NO: 145870 - DNA, 95 bp, Homo sapiens
gctgaaggccgggccccgcgagtgccatggcggccgccctgggagcgagcggaggagcaggcgccggagaattgcagaatatgtatagagtgtgg

SEQ ID NO: 145871 - DNA, 74 bp, Homo sapiens
gtacttcctgaagcagctgctctagtgaactgcacttagtgcattggaacgcagtcaaatttgaaaactttgag

SEQ ID NO: 145872 - DNA, 100 bp, Homo sapiens
gacaggaaaaaaatttgctggatattgatgcgccagtcactggaattactctgcttaatgtaagcaagctgaacattttgaagcttgctcctggtgggca

SEQ ID NO: 145873 - DNA, 100 bp, Homo sapiens
ctcatctggcttggcgcctgaggttctcccattaggattgcctacagcgctcctttaaggcacaggttttctcctgccctgcttgccggcatgatcttgg

SEQ ID NO: 145874 - DNA, 90 bp, Homo sapiens
ctcttcgagttcttcgtgctgctcaaggttgaatcgctcctagctgacccctcacgtctcttatgatacgtacagaaagcaagagcagcc

SEQ ID NO: 145875 - DNA, 100 bp, Homo sapiens
ttctgtcccccgctgcgctttgactaccacccccatgatggggatgagcaggttcaggagaagtggcacctggtggaggacctgtcgcgactgctgccgg

SEQ ID NO: 145876 - DNA, 75 bp, Homo sapiens
aagtgggagcactggaagtacgggcagttgcagtgttggagctaaagttaaggctacctttccagataatccaac

SEQ ID NO: 145877 - DNA, 82 bp, Homo sapiens
caagaaggaagtcatcatgggccggcctggaacaggtcgagtcccagacaccagaagtctgaatttggagaaggctggggta

SEQ ID NO: 145878 - DNA, 100 bp, Homo sapiens
cagaggacgccttcaacaccaccttcatctccaccatcgacattctaagtgagactgtccacatcatctaggaaaatggtggccctgtccttaaagattt

SEQ ID NO: 145879 - DNA, 73 bp, Homo sapiens
ccgagtggtctaaggcgccagactcaaggaagtttgtctgccatgcgtttcctcaccgccgtgaacttggagc

SEQ ID NO: 145880 - DNA, 75 bp, Homo sapiens
gtttaacctttattgtggtggagtccaccccgctgtgacaccattcgcttttcacccaagatgatttgatgtctt

SEQ ID NO: 145881 - DNA, 75 bp, Homo sapiens
cctgaagtcggtgtctgctgcgttcacggcaggattcggttaggacttgattattcttagaaatgcacttgacct

SEQ ID NO: 145882 - DNA, 100 bp, Homo sapiens
cctctgcctcccaggtacaggtttcgagatttgctgctaggggaccaaggatggcaaaacgacgacaggacttgcaattgtgaccaaatatattacaaag

SEQ ID NO: 145883 - DNA, 76 bp, Homo sapiens
cggccggtcaggctcgccgccgagctgcaagccctggatgaaaacatggacctcttggaaggtataactggctttg

SEQ ID NO: 145884 - DNA, 117 bp, Homo sapiens
cacaggaggctgtgcgggccccgctccgcttcgaatgggtgtatgtgctcaagaggccttatgtggatgagttcctgagacgcatgggggaactctttgaatgtgttctcttcactg

SEQ ID NO: 145885 - DNA, 75 bp, Homo sapiens
ggatttcacacaaagaaagtagtccgtggctctgccagtgattggtatatcaagttactgtgtatcaggcagggg

SEQ ID NO: 145886 - DNA, 74 bp, Homo sapiens
cattggaccctcctcccaactgtaggtggagccgccaccaaaatgcagattttcgtgaaaacccttacggggaa

SEQ ID NO: 145887 - DNA, 100 bp, Homo sapiens
agggggactgctgcgtcaaggtggccgtcaggtgtcatctgaagacagaagtgccctgtgggctttggttacgttctatgggggagattgccagctaacc

SEQ ID NO: 145888 - DNA, 100 bp, Homo sapiens
gcatctgcggccatggcggcgactactgccaaccccgattatggtgacaagctgaacatggagctgagtgagaaatacaagctggacaaagagagctacc

SEQ ID NO: 145889 - DNA, 49 bp, Homo sapiens
ctgctgctgctggtggcccctttgcagggttttggccaaattgggcgag

SEQ ID NO: 145890 - DNA, 74 bp, Homo sapiens
cctccccagccatgtggaactggtgtcgaagtgcagacagactacgtgcccctgctgaactcgctggcggccta

SEQ ID NO: 145891 - DNA, 100 bp, Homo sapiens
ctgggagcctagaatgcatcagtgcccttgtggcgaatggggctcacgtcgatgtcttcgtcaaattacagaagccaaatgctgccatccgagactgtga

SEQ ID NO: 145892 - DNA, 49 bp, Homo sapiens
atcggcagctgagacggccttggccggtctataagaaggagaaagctcg

SEQ ID NO: 145893 - DNA, 100 bp, Homo sapiens
aggtgtcggcgcgggagcagcacttccacagccaagtgcgggagtccacgtttctgatgaagaattgaaaagaagagtagctgaggagctggcattggag

SEQ ID NO: 145894 - DNA, 83 bp, Homo sapiens
acggcgagcgcgagcggcgcgagaaacccagctcaacattggcaatgtgctccctgtgggcaccatgcctgagggtacaatcg

SEQ ID NO: 145895 - DNA, 88 bp, Homo sapiens
cgagtgtgcgaagctagccaaggtcatataaaagtgggtctggagtaaacaacagaagaactgagctatttttgaaagaacatgacca

SEQ ID NO: 145896 - DNA, 100 bp, Homo sapiens
gtgaaaggccagccaccagttcaggagcacttgggagtgatctagctatcatggtgaacttacttcagattgtgcgggaccactgggttcatgttcttgt

SEQ ID NO: 145897 - DNA, 75 bp, Homo sapiens
cgaaggaggaggcgttgccgggctcagctggaagctcagaaagccacgcaggacttccagagggccacagaggtg

SEQ ID NO: 145898 - DNA, 113 bp, Homo sapiens
cttagctgtgctcgcgctactctctctttctggcctggaggctatccagccataagcttaaatcgtctcagaaggacaaggtccgccagtttatggcgtgcactcaggctggc

SEQ ID NO: 145899 - DNA, 100 bp, Homo sapiens
gtggacttcatggtggacaatgcccagctgggttttctggcccagctcaacattggcaatgtgctccctgtgggcaccatgcctgagggtacaatcgtgt

SEQ ID NO: 145900 - DNA, 50 bp, Homo sapiens
cgtcagcgagggcgccgagcaacttcggaacaggaaatatagtggtcatt

SEQ ID NO: 145901 - DNA, 99 bp, Homo sapiens
cagaaagtgcgtcaccgcatgaacgatgactgggcttacgggaatggtggagaaaatccgttactgcatcaccaaacttgacagggagcttcgaggact

SEQ ID NO: 145902 - DNA, 100 bp, Homo sapiens
tggaggccacacccgggaggctcggatccagacactggagcctgacaactggatgaaggagctaccatatttgcagatgattctctgttgccagcgccag

SEQ ID NO: 145903 - DNA, 99 bp, Homo sapiens
gaaggcaaaggaggacagtggcaacaaacccatgtcaaagatggcatagttcttggagcagatacaagagcaactgaagggatggttgttgctgacaag

SEQ ID NO: 145904 - DNA, 100 bp, Homo sapiens
ccctgtacgcggagggctcggtcaacggcttcatcagcaccttgggagctccttaataagcatttatagtcagtttttggcagcaatagaatcactaaag

SEQ ID NO: 145905 - DNA, 100 bp, Homo sapiens
tgcaacacggctacggtctacaagatctgcgcctggatgcagctcttggcaggctgctctttggcgtaaattgcaatcgattagggatcgtttctcagaa

SEQ ID NO: 145906 - DNA, 82 bp, Homo sapiens
ccgggctccgggaaaactacactggccaggaagccgagatcccccgcgaggtgatcgagaggctggcccgcagtcagatcca

SEQ ID NO: 145907 - DNA, 82 bp, Homo sapiens
cgaaggacccagaaaagctgcaggccatgcacctggagcgatggttttggcttgtggttaacgggcatgttgataaacatcc

SEQ ID NO: 145908 - DNA, 83 bp, Homo sapiens
cctggcccttacccagacctgggcgggctgaccagtgcaccggtcttcagggcttcttggttttccacagctttggtggggga

SEQ ID NO: 145909 - DNA, 80 bp, Homo sapiens
cggattctcgtagctgtgccgggtcttgagagctgatgacaataacatgggcaatggctgctctcagaagctggcgactg

SEQ ID NO: 145910 - DNA, 100 bp, Homo sapiens
ggaacttaagcgcaaatttgaacagatgaaacaagataggatcaccagataccaggtgtctgagctgggtgaattccagcctggggagaggactttgatc

SEQ ID NO: 145911 - DNA, 90 bp, Homo sapiens
gcaaacagtacaagtactacactccctaccaggagcatgtggccttacacgcccccatcagatgccgcagctgagcctgtcctggctggg

SEQ ID NO: 145912 - DNA, 98 bp, Homo sapiens
gcagcctgtggcaatagtccggcctttggagagacaagttaaaaaaggaaaattggacactgtcccaacctataaagaaaggtgtgttcctgctctcc

SEQ ID NO: 145913 - DNA, 50 bp, Homo sapiens
gccaggaacacaacctcaccttgatcagaggaaccagactagcatttctc

SEQ ID NO: 145914 - DNA, 100 bp, Homo sapiens
gtgacgactgtgaagggggtcatcaaggctgtgctggatggagtgaagcaatcatcctcttccagtggtagcgtgtttgggtctggaaacactggaagag

SEQ ID NO: 145915 - DNA, 74 bp, Homo sapiens
ggaaattaactatctgtacttataaggaatgcctgaactagatgaatacaccatggagagggtcctagaggaat

SEQ ID NO: 145916 - DNA, 75 bp, Homo sapiens
ggcttcgagtgacccgggtgccgaggagcgggaagagttgctggggtctcggcgcggaagatggccggcggcgtg

SEQ ID NO: 145917 - DNA, 100 bp, Homo sapiens
gatatggaagatgggcagctttccgactcggattccgacatgacggtcgcacccagcgacaggccgctgcaattgccaggagaagtctgttggaacttgg

SEQ ID NO: 145918 - DNA, 100 bp, Homo sapiens
ttcaagaaaggagagaagatgaaagtcctggaggaaaaaagcttgtggtgaaggggggcaaaaaaaagaagcaagttctgaagttcactcttgattgcac

SEQ ID NO: 145919 - DNA, 51 bp, Homo sapiens
ccgcggtaccatgaggcgccggtttggaaggtttgcagttgctgctcttca

SEQ ID NO: 145920 - DNA, 100 bp, Homo sapiens
gagtgaagaaagctggtaatagatgtctgacaaactaaagaaagacttgtgttactatctggagtccatctttcaccatcttctcctgagattgtactgg

SEQ ID NO: 145921 - DNA, 75 bp, Homo sapiens
tggatgggaaggcagatgtatctttcgttctcttttttgactgtaataatgaggatgaccggaaagaagggatga

SEQ ID NO: 145922 - DNA, 90 bp, Homo sapiens
cttcaagagaagaatgttacttgggcgtcataacttagagcaggaccttgtcagggaggctgaggatgtcaccttcctctaccacccctg

SEQ ID NO: 145923 - DNA, 123 bp, Homo sapiens
aggcgctggagctgggtcagtccgccgctcaccccgcggccgcaccttcccgccttctcagagacaagaggagcagcagcggcaccgcccctcaccctggagggtcctgtacaatctcatcat

SEQ ID NO: 145924 - DNA, 83 bp, Homo sapiens
gcagcgtgtcaggcggagagacccgccgccagggcgtgatggtgggcatgggtcagaaggattcctatgtgggcgacgaggcc

SEQ ID NO: 145925 - DNA, 50 bp, Homo sapiens
tagacaccagctccgaaatcaccaccaagaaatctatgacaagttcaagc

SEQ ID NO: 145926 - DNA, 96 bp, Homo sapiens
cgcacacggtgcgcgaccacctcgtgggccgctggatccgcacgcagcagcactactacgagcgcgaccccaaggacctgcaggaccgcaacgatg

SEQ ID NO: 145927 - DNA, 95 bp, Homo sapiens
tgtttgacaagacgcggctgccgtacgtggccctcgatgtgctctgcgtgttgctgggctggacgtaaagaaagaagtgatgcactcaattctgc

SEQ ID NO: 145928 - DNA, 100 bp, Homo sapiens
aaccagcaacaatggatgcagtcattccagcaccaacaggatccaagtcacctggcggtagacccattcataagaggaaaagacagaattcacattggga

SEQ ID NO: 145929 - DNA, 90 bp, Homo sapiens
cgtggagatatggcgcaactgcggcgcccatccgggtgacctgcataggttcctgcggggtctccaacaaggctaatgacacagcgtggg

SEQ ID NO: 145930 - DNA, 75 bp, Homo sapiens
aagcaactggattttttaactgaagatagtgcctttcagccctaccaggttcgatggatgatgtactggattgtt

SEQ ID NO: 145931 - DNA, 100 bp, Homo sapiens
tggaattgtagttgtgtggaatgcccaggtggacaagatcgaggaacttgatcaagaaaacgaagcagcgttggaaaatggaattaaaaatgaggaaaac

SEQ ID NO: 145932 - DNA, 101 bp, Homo sapiens
cctgccttttgagaagtctcagctcactttgaaaggtctggctctgggagaggagtggacagcagctggttgagatacatccccatctggagacaggactg

SEQ ID NO: 145933 - DNA, 75 bp, Homo sapiens
ggtccctgaagagggaagacacgcggaaacaggatgactttgacaacgatgtggatgctctgctggaagaaggcc

SEQ ID NO: 145934 - DNA, 101 bp, Homo sapiens
ttatgctttcattctcctcctgagcactgtcgtatcctatatcatgcagagaaaagagatggaaacttacttgaagaagggttgagttccagaataaattc

SEQ ID NO: 145935 - DNA, 75 bp, Homo sapiens
gtgaaagtgtataactacaatcacctaatgcccacaagtccttcagtgaatctacagacctattttctcaggagc

SEQ ID NO: 145936 - DNA, 75 bp, Homo sapiens
ctcgacctgctaacagaactggaccttttcgctccataatgggagaagtaaagaacaaagacttaaggaacagct

SEQ ID NO: 145937 - DNA, 100 bp, Homo sapiens
tttgaagagttctgcgttttgccagtcacctctcaactgtgtgccaaaggtactaggttttgacaagcttgcatcatgcgtgagtataagctagtcgttc

SEQ ID NO: 145938 - DNA, 83 bp, Homo sapiens
cggagccaagccagcgacccaccatggagacccgctacaacctgaagagtccgggtgtcgtgaaaactacccctaaaagccaa

SEQ ID NO: 145939 - DNA, 98 bp, Homo sapiens
acccggcttatgaaaggagagatcacactttcccaggactcacaccacccggcaagaactgctcactacggctccctgccccagaagtcacacggccg

SEQ ID NO: 145940 - DNA, 52 bp, Homo sapiens
cagtccctgagccgcccctacacccacagctttcccatggtttggcatggac

SEQ ID NO: 145941 - DNA, 74 bp, Homo sapiens
agaagctggtcgccgccggcaggtcaaaatgcagatcttcgtgaaaacccttaccggcaagaccatcacccttg

SEQ ID NO: 145942 - DNA, 83 bp, Homo sapiens
gatcgggagcgcaaggtcgccctcaaggccatgatcaaaacgcaacggggtggtcatccacttgccaggcttgtttgaggaag

SEQ ID NO: 145943 - DNA, 88 bp, Homo sapiens
gcatccaggagatgcgagaggccctgcaggagaaggtggtctggacttggctattgagggcccctcaaaagcagaaatcagctgcatt

SEQ ID NO: 145944 - DNA, 98 bp, Homo sapiens
agggagcggagtaccagcacttcatccagcagtgcacagaggaactgacaccattgattttggcaactcagaagcagttcaattacacacacatctgt

SEQ ID NO: 145945 - DNA, 101 bp, Homo sapiens
tccaagccaccccccacaatagggtatcatttttacgggccttctggagatgcttccgaactgtgggcaaaaatggcgagatggggtttcgccatgttgcc

SEQ ID NO: 145946 - DNA, 86 bp, Homo sapiens
ccgaacatctgactagccacaagtatgttacccagatgtagaattttcatcactaaacaatggagtctcgctctgtctcccaggct

SEQ ID NO: 145947 - DNA, 90 bp, Homo sapiens
ggacgtcgtgcttcagcctcaccaactgcgggcacgtgtactgcgacgcctgcctcggcaaaggcgtccgacctccgatcatgaacgggc

SEQ ID NO: 145948 - DNA, 75 bp, Homo sapiens
ctctccacagccatcactcatgtccataaggaggttagcatggcctcattgaaagaactagatcaaagactcttt

SEQ ID NO: 145949 - DNA, 75 bp, Homo sapiens
ggaattacataacatcaaacgtggtgagtccattcttgcacaccgagaaaatatgcgacagatgataagaagttt

SEQ ID NO: 145950 - DNA, 74 bp, Homo sapiens
gacacagaaggccgacaccctgcacctggagagcgaagaggaactttactcctcctgtcgccagctgaggaggc

SEQ ID NO: 145951 - DNA, 51 bp, Homo sapiens
caactttctcagtgtagagcccagaaattggctcttcctcctgctggtcct

SEQ ID NO: 145952 - DNA, 111 bp, Homo sapiens
tggactgttgcgggccccgggacctgggctgggaacccgcggtggagcgggacacgaacgtgacaatgcagatcttcgtgaagactctgactggtaagaccatcaccctcg

SEQ ID NO: 145953 - DNA, 124 bp, Homo sapiens
tggccggcgaaggagatcagcaggacgctgcgcacaacatgggcaaccacctgccgctcctgcctgaataactgaagtgaagtgatggactccgatttggagagtagtaagacgtgaaaggaat

SEQ ID NO: 145954 - DNA, 75 bp, Homo sapiens
gcaggtcctcgcggtgcgcaccgtttgcgacttggaagcaaaatgtggattcagcaaacaaattctggaaatact

SEQ ID NO: 145955 - DNA, 90 bp, Homo sapiens
gggagacactgcgaaagcaaaccgaggaggctttcgtgaaggaatccaaggaggagaccccaggcacagagtgggagaaggtggcccagc

SEQ ID NO: 145956 - DNA, 98 bp, Homo sapiens
tcactcccccgggccggtgggcgaaggacacccgcaggaactcggcagaggagaaattcagacggctcccgaggccacgaaggaagacaggaggtccg

SEQ ID NO: 145957 - DNA, 100 bp, Homo sapiens
cttcatcaccccctacctcctggggcccgacaagaacttcacgcgggagcagctacgagttccagggagctctgtcctggtgaccgtgcccgggttatga

SEQ ID NO: 145958 - DNA, 96 bp, Homo sapiens
tcatgacaatgactttgagccctaccttactggacagtcaaatcagttacatggacacagaacagtatgaagaagcagtacgagactatgaaaaag

SEQ ID NO: 145959 - DNA, 75 bp, Homo sapiens
gctccggccgcctggctccccatactagtcgccgactgggctggcttagatgaagatgaagatgcacatgtctgg

SEQ ID NO: 145960 - DNA, 101 bp, Homo sapiens
cgactcggtcctgtttcgacagcgaacatgtcgcggcctgtcaggtcagattgaagttatcatggatcgaagactcatgcaagatgataatcgtggccttg

SEQ ID NO: 145961 - DNA, 137 bp, Homo sapiens
cccagccccgccgtcgccccgccgcgccgcgctccaaccgcctcctcctcctcagtaacgcggatcgagttttggttcgggttagagacttgacaatacaaaaagctgatgaagttgtttgggtacgtgcaagagtt

SEQ ID NO: 145962 - DNA, 99 bp, Homo sapiens
aggaatgaagatggtgaaagaagagctatgataactcctgctctccgagaagcccttactaaacaaggttctagggacgtatacttgagcaagagagac

SEQ ID NO: 145963 - DNA, 75 bp, Homo sapiens
ggagctgaagccaacctcccgagcagagctctgcgtgcctcttgctgtgccctacctggacaaacccccaactcc

SEQ ID NO: 145964 - DNA, 75 bp, Homo sapiens
gtatacatgaaacccccagcacacgaagaggccaaggaggcgggtttggtgcggccactccaaggccaaagcgag

SEQ ID NO: 145965 - DNA, 50 bp, Homo sapiens
cttcacgcagtcaagaacgacttccaggagacagaggagctggaggagga

SEQ ID NO: 145966 - DNA, 83 bp, Homo sapiens
ggagaagccgcccaaagaactgttcaaatctgaacatcaatgatgtactagggaactactcattgactcttgttgatgcattg

SEQ ID NO: 145967 - DNA, 88 bp, Homo sapiens
cagacgcgggcgagctgcggctcggacgccagcggacacgcgggcgaggtgtggatgaggtcaccattgtcaacattttgaccaaccg

SEQ ID NO: 145968 - DNA, 103 bp, Homo sapiens
ctaatttgaaccatgtttggattgaagccgcctctgtattacttaccagcacagacgcagtcttcagcaaggaagtgctgggaacgccctggagtgaacccag

SEQ ID NO: 145969 - DNA, 100 bp, Homo sapiens
gtactacctcagctgggagaaatgttggaaatggtttaaacacattatcaggtccttatgtcgtcagaagatcgagaagctcaggaggatgaattgctgg

SEQ ID NO: 145970 - DNA, 100 bp, Homo sapiens
ttggacatgactgaagaggaggtgcagatggcactttccaaagtggatgcctccggggagagtgcctggtgaagaatgtgatgggatcactagcatgtct

SEQ ID NO: 145971 - DNA, 106 bp, Homo sapiens
cgcatgcggaggcagcccgccagctcctggctggagccagccggcaccaagtcatcatcagatttgaaatatttaaagtggatacaaaactatttcagcaatgcag

SEQ ID NO: 145972 - DNA, 83 bp, Homo sapiens
gtttgtggatcgctgtgatcgtcacttggtctgggaagatccgaggtatctcctggagaagccatctatgatgtcattgggga

SEQ ID NO: 145973 - DNA, 90 bp, Homo sapiens
cggcgccccggccgaggtggcggcggctcctcagaccctcgttttggctggggaatgaaaccctgaaggtgccgctggcgctctttgcct

SEQ ID NO: 145974 - DNA, 100 bp, Homo sapiens
caaatttattgtgttctggttccagtcaagcaaaattattcagcaccaaatttcttgaggttggcaaaaagcagcctgctctggatgttctttatgatgt

SEQ ID NO: 145975 - DNA, 74 bp, Homo sapiens
atcatcgtggtagttattgtaaagctgtccgaggttctgtgggccatggtgatgcgcataggcctgggcctggg

SEQ ID NO: 145976 - DNA, 76 bp, Homo sapiens
caaggtgctcttctgggacaacgcgtacgagttcaacctcagcgctctgaagaaagaccacagcaagattctttca

SEQ ID NO: 145977 - DNA, 98 bp, Homo sapiens
cacaatgaagctgttagtcattacaagttgctgcttcagcaaaacaagaaatttcaaaacttgatcaagatacatcgagatatttccaagcagaagga

SEQ ID NO: 145978 - DNA, 98 bp, Homo sapiens
gaacctgcaattacatcgcagaacagccctgaggcaagagaagaaagaatcttgacaaaacttttggaagtgtcagatgatccccaagtcttagctgt

SEQ ID NO: 145979 - DNA, 98 bp, Homo sapiens
ccgagactctccttgcttggaattctgcccactctgcggagttagcagtcacgacctccagcacaggaggttgtggctcactggattgctgaaagccg

SEQ ID NO: 145980 - DNA, 100 bp, Homo sapiens
attactacaaaactcccatcgcgtcgtggaggagtactttgtggcccccccaggtggataattactgtaccttcctcatggaaaaagttttatttaaagt

SEQ ID NO: 145981 - DNA, 101 bp, Homo sapiens
taatgtctgtctcaagatacaggacagctgtttgctcatcaacctcaactgtgcctcattgctacgatttcagagtaccctggtaatagctgagcatgcaa

SEQ ID NO: 145982 - DNA, 100 bp, Homo sapiens
gggagcttggctttgtgatgataattttccagatgatgaatctcgtcacgattctaacattttcagagaaccttttggaaagaacaagcctacttcaata

SEQ ID NO: 145983 - DNA, 100 bp, Homo sapiens
ataaaatgtcaagtgaattccagtgttgaagaaagaggttttctagttacaggaaatacaggaggcagaggaacaaataaaagacaccacgagaaacaga

SEQ ID NO: 145984 - DNA, 75 bp, Homo sapiens
gtcatggtctggagagacacgccaggatggagagagcaaaaactatgctgaacaggtccgaaacttgcagaagat

SEQ ID NO: 145985 - DNA, 75 bp, Homo sapiens
gaaaaagaaggtgacaggcgttgagaccaccgaagggaacccatggctaggcaaagcataattgatttgaaggag

SEQ ID NO: 145986 - DNA, 90 bp, Homo sapiens
cagaaagacctgatgtggacgagaaacgatctgatcttcttaaacttcaaggagtatcagtgtcttcaagcaccactggtctacctgata

SEQ ID NO: 145987 - DNA, 90 bp, Homo sapiens
gaaaggcaaaggcaaaggcggctcgggagattcagccgtgaagcaagtgcagatagatggccttcaggcattttggagatcaaagatggg

SEQ ID NO: 145988 - DNA, 51 bp, Homo sapiens
ccctgctgcataagaccttgtcagagatttttggagcatatgcaactcatc

SEQ ID NO: 145989 - DNA, 100 bp, Homo sapiens
aaaccacctcctcctaccaaaatttggtttggagcgaccattctcagatattggtgaatgaactttgctaagtatggattcaggcggtggaagtcttgga

SEQ ID NO: 145990 - DNA, 83 bp, Homo sapiens
cgtcttgcctgtgtcccacttgttcgcggcctataggccctgtttgtgctcttcgtcctggcctacatccacatcgtcttctc

SEQ ID NO: 145991 - DNA, 101 bp, Homo sapiens
tatggctcattgtagcctcaaactcccaggctcaagcagtcctaccatgtcagccttcccagtagctgggaccacaggtgcagttggtgaataatcggttt

SEQ ID NO: 145992 - DNA, 101 bp, Homo sapiens
agcagtgccatccagcttctagaagacccattacagaggattctggatgaaattgaagaacataacatcaaaatctatcacttacctgatgcagaatcaga

SEQ ID NO: 145993 - DNA, 73 bp, Homo sapiens
gactcctcgggcagcctcaacgagaactcggagggcaccggagctgatgttctaatcatgtcagataaagatg

SEQ ID NO: 145994 - DNA, 138 bp, Homo sapiens
caggttcacacctgaagtcctatcagccagaaacaaactcttcttttcaaccaaatggtatccatgtccatgagaccatcatgcagacatcagagactgggtcggacacaggctcgacagtgaccttacaaacatctg

SEQ ID NO: 145995 - DNA, 50 bp, Homo sapiens
gaagtcagctccctaaagaacaagctcagaaaggagaagatgagtatgcc

SEQ ID NO: 145996 - DNA, 100 bp, Homo sapiens
ccctttgaattaattatggcttctctagtgatccctgaaaagttccagcatattttgcgagtactcaacaccaacatcgatgggcggcggaaaatagcct

SEQ ID NO: 145997 - DNA, 100 bp, Homo sapiens
ggccaagactccatcctgcaaggacttgttctttaagtacacctggaataactttttgcacttccaagtggaactatgcatagccgctattctctcccac

SEQ ID NO: 145998 - DNA, 100 bp, Homo sapiens
tggtcgcactgagggtgaagtggcaggaggaggaggaggggctccggctggtctgtggtgaggcattctgtgaaactttagaagagacaaactaccgctt

SEQ ID NO: 145999 - DNA, 83 bp, Homo sapiens
ccgctggggactgcgggcggcgctgtgtccgtcgccatgacagacaatgcagatcttcgtgaagactctgactggtaagacca

SEQ ID NO: 146000 - DNA, 85 bp, Homo sapiens
cggtgacccgctaccggaaggccatcgccaagtgtctttggtgcaacactaacaaggcttgtctggactacccagttacaagcgt

SEQ ID NO: 146001 - DNA, 100 bp, Homo sapiens
gcgatcggcggcgttgaggcgggatccgggcgagccgagtgaagattggactggctaaggacgatcagctgaaggttcatgggttttaagtgcttgtggc

SEQ ID NO: 146002 - DNA, 90 bp, Homo sapiens
ggagacgataacactctttaccatcggaaatacaggtatcaggatgaagatacacctcctcaagagcatatttccccacaaatcacaaat

SEQ ID NO: 146003 - DNA, 82 bp, Homo sapiens
ggctcagcaagactctcgagcccatctacaggaccgcactcagttcagtgaccgagacttagccacccttaagaagtattgg

SEQ ID NO: 146004 - DNA, 74 bp, Homo sapiens
gagcaattgtgatgagatattctgctgagtggaaggatgagacttcagcactcaagtttgaaataagagcaaca

SEQ ID NO: 146005 - DNA, 100 bp, Homo sapiens
ttttgatttggaatttaacaaacctgccaacccaggagctgatgggaaaaagatggttgcattactcattgagagactctccaacatgtgccttctgacc

SEQ ID NO: 146006 - DNA, 80 bp, Homo sapiens
ccttcagcaattgaactcccagattatttgatagatgtacggcttttaatcttggaatatgcccgttggtctatgattga

SEQ ID NO: 146007 - DNA, 99 bp, Homo sapiens
tttgaggtcactttccagcagtccagcacggccaagtcagccacctggacgtgtactaatggtcacttgatgtgcgctggctgttttatccacctacta

SEQ ID NO: 146008 - DNA, 90 bp, Homo sapiens
tctggtgatgaacttagcagcagctccactgaacagataagggttcaaaccttgtactactcagctgatcacaagctgcttgatgggaac

SEQ ID NO: 146009 - DNA, 104 bp, Homo sapiens
gcggccgcggggaggaggatgggggctaaccagttagtggtgctcaacgtgtacgacatgcttagaccatgctcagcctccaagcagccttgtcatcgacaaag

SEQ ID NO: 146010 - DNA, 76 bp, Homo sapiens
gcgggtctggctagtcaggcgaagtttgcaggaagcaaaatgtggattcagcaaacaaattctggaaatactaaat

SEQ ID NO: 146011 - DNA, 51 bp, Homo sapiens
gtcgccgccactgccgcaggaggcgtgagctatctcccctggttcgaggta

SEQ ID NO: 146012 - DNA, 75 bp, Homo sapiens
cattaggttgcagtatgtggccagttatttgcctcagtaaaagagaatctttcaaagaagtaccaacctaaaaag

SEQ ID NO: 146013 - DNA, 98 bp, Homo sapiens
atttccgagaactcccatcagtttctgtatagtgtaaaagcgggagatacagatgacccaccaagaattactcagaaccctgtgatcaatgggaatgt

SEQ ID NO: 146014 - DNA, 100 bp, Homo sapiens
ctgggagctggaggaaccgcgatgaggtttatataactttccaagacaaggaagttgtgcaaagcctcacagctactaagaggctgggctgggactcagg

SEQ ID NO: 146015 - DNA, 100 bp, Homo sapiens
cttggaggtggtgtaaaggaagctcaagtatatcaagcattcaaattgctcacagctgatcctaagagagctgtagtacacatggatgaacgacgagaag

SEQ ID NO: 146016 - DNA, 100 bp, Homo sapiens
aggctcagttcttccttcctatatggtggatgcttccaaaagcatcgaagctgtccatgaggacatccgcgtgctctctgaggacgccatccgcactgcc

SEQ ID NO: 146017 - DNA, 96 bp, Homo sapiens
gtcatggagtagaagggagcgatactacaggttcttgggtgtctctggggagtccctgggccagaccttcctccagactccagcccacctcttcgg

SEQ ID NO: 146018 - DNA, 100 bp, Homo sapiens
cccaccctgagcagagccgccgaggatgataaacacccaggacaggtacgtgcagcactacggcctgggcagtgcctgtgacaacgtagagcgcgtgctg

SEQ ID NO: 146019 - DNA, 100 bp, Homo sapiens
ctggtgtgggatgggagaactccgctgagaccctgcaggaacacgaaacagatgccaaccgagagggtcaatgagctgaaggagaaaggcaacaaggccc

SEQ ID NO: 146020 - DNA, 77 bp, Homo sapiens
ttctccctgcactcacaggcgttctggacagtcattttgtttactcattcagccctgttgcaggtcccaataaactc

SEQ ID NO: 146021 - DNA, 80 bp, Homo sapiens
cccgggacctgggctgggaacccgcggtggagcgggacacgaacgtggttttttattggcacctcagtctcaacattttc

SEQ ID NO: 146022 - DNA, 75 bp, Homo sapiens
gggtgatgaagatggttatgaagaagaagaagatgagaacagtagacagtcggaggcggcgacggcggcggcggg

SEQ ID NO: 146023 - DNA, 83 bp, Homo sapiens
ggagccgggggcctgggacccgtcgcgtcagagccagggggatatgagactttctactcggaatatcctgagtgttgcgtgga

SEQ ID NO: 146024 - DNA, 83 bp, Homo sapiens
aaaataccacgacaaaaccaccctagtggtggcattgggggacgtgccggatggtacggtggtgactgtgatggcaggcaatg

SEQ ID NO: 146025 - DNA, 90 bp, Homo sapiens
aaataaaccaccaactgttaggtttttatccaaaatgtttcatccaaatgatgttctcgtccgtggcgcacctggcgcgggcgaacccct

SEQ ID NO: 146026 - DNA, 83 bp, Homo sapiens
ggagtactggtttgtgctgactgccgagtcactgtcctggtacaaggatgaggagatgatcatcgagcccaccagcccttgcc

SEQ ID NO: 146027 - DNA, 90 bp, Homo sapiens
aaagcggcttatcgaacagagccgggagttcaagaagaacactccagagagccttgcttcctgttttacatcacaaatctaaaaaaggac

SEQ ID NO: 146028 - DNA, 75 bp, Homo sapiens
gcctaggcattttgctgtctcctcctaatacgtttgtgcagtcgcagtaaggaattgcttggagtgtcaacagca

SEQ ID NO: 146029 - DNA, 82 bp, Homo sapiens
aagaaagtggtgaatcccctgtttgagaaaaggcctaagaattttggcattgacatggcccatgaacatggacatgagcatg

SEQ ID NO: 146030 - DNA, 73 bp, Homo sapiens
gaagatgatacctttctaacagcccaacaactattggatgattatccgaaatgtttcattgtgggagcagaca

SEQ ID NO: 146031 - DNA, 88 bp, Homo sapiens
ttcacaattatggagactgtacctgaaggaaaagattatgcccttcattggctagtgctggggactcatacgtctgatgagcagaatc

SEQ ID NO: 146032 - DNA, 75 bp, Homo sapiens
aagtctcctgaagaggaaggagcggtgtcctcttaagaaaatggatcgctacggttcctactgatccgagctctg

SEQ ID NO: 146033 - DNA, 75 bp, Homo sapiens
gcagttccattcccagatagcagcccaggacaagagatggccacgtccagttctggacagctcctagggtcctgt

SEQ ID NO: 146034 - DNA, 83 bp, Homo sapiens
tcttcggtggactccttcggcagtccacccaccgccgccgcctcccagatctttgtggagttcacctctgtgtttgactgcca

SEQ ID NO: 146035 - DNA, 101 bp, Homo sapiens
ggtttaaagccctaaatgccatgcgtatctttaagaaattttatcttttgaaacacgttctgattaaccaaggaagtgtcggaggaaggcttccagattcc

SEQ ID NO: 146036 - DNA, 95 bp, Homo sapiens
tccagaacatctgggagaatatttaatggaaaatcgcttggttaaaacctgacacttttaacagtacaaaattggacagctgtacatgatcagca

SEQ ID NO: 146037 - DNA, 80 bp, Homo sapiens
gtgctgccgcaggagctggaggagcgcaggcagcttggtctgaaggggcgtctcgattacctgagctctctgaaggtgaa

SEQ ID NO: 146038 - DNA, 50 bp, Homo sapiens
agcagtagatgatgatgtagcagaaggagctgccactccgaaaccagtcc

SEQ ID NO: 146039 - DNA, 50 bp, Homo sapiens
cttgaaagcagagatagtggcatcattgggtaagaaggtggatggctctg

SEQ ID NO: 146040 - DNA, 90 bp, Homo sapiens
agaatgtgttccctgtctacttgaaacacagataacaacgaacttgatgcaagtgataggtttgccaaggtcagacctctcatcatccgg

SEQ ID NO: 146041 - DNA, 100 bp, Homo sapiens
agcctcaggcgtgcgcggacggtgtgcgggtttattgttggccaaaaccaggctttgattgaaccaggatgaatgcgggtgttggaagtagaatatatat

SEQ ID NO: 146042 - DNA, 71 bp, Homo sapiens
tgattttcctgttgcaatgcagatgccctccaaatccttggttatggaatatttggctcatcccagtacac

SEQ ID NO: 146043 - DNA, 100 bp, Homo sapiens
ttgaaagtttgaatatggaactccagcaactaagagactcgactcttggttacacatagcatgcactttcttcctcaagtggatgagattgtagttctgg

SEQ ID NO: 146044 - DNA, 90 bp, Homo sapiens
gcaaagaactgccgcagacttccgcctgggtgccaaccacgtgatcacgcgagcgttggagaggcagatcctgaaggagctagacgagtg

SEQ ID NO: 146045 - DNA, 51 bp, Homo sapiens
gggacggcgaggccctcatgtaccacacgctgtcgacagggtgaagaggcc

SEQ ID NO: 146046 - DNA, 100 bp, Homo sapiens
gagccaaggaggaagggttgtccgggaacagatggagtcggataactgttcaggaggagatgatgactggacccatctgtcttcaaaagaagtggacccg

SEQ ID NO: 146047 - DNA, 83 bp, Homo sapiens
ctgacaaattatgctgcagcatattgtactggcctgctgctggcccgcaggatgtctcagagcatgtcttcagtatcttcaag

SEQ ID NO: 146048 - DNA, 75 bp, Homo sapiens
atgctgctcaaggccaagatggacgccgagcaggatcccagacctgaaggagaagaaggagaaggtggaggagaa

SEQ ID NO: 146049 - DNA, 50 bp, Homo sapiens
tctcacactcagagcttttgaggttttcaaatggaacattttgatgcatc

SEQ ID NO: 146050 - DNA, 105 bp, Homo sapiens
cagcagcacagtcaacaaatggcacgcatgcgtcctatggacccttctacctggaatactctcttcttgcagaattatggagtctcgctgtgtcgcccaggctgg

SEQ ID NO: 146051 - DNA, 74 bp, Homo sapiens
gcagacgcagggcacccggaggaaagtctgttactactacgacggtgctggggagtcagggaagagcaccatcg

SEQ ID NO: 146052 - DNA, 83 bp, Homo sapiens
cgccgctctccagcccgcttgaacgtggtggtatctccatcaaggcttctgcaaatatggacctcatgagggctgacatggga

SEQ ID NO: 146053 - DNA, 50 bp, Homo sapiens
cttccaaacatctacaactcctcaggctgcaataggatctgtggctttgg

SEQ ID NO: 146054 - DNA, 101 bp, Homo sapiens
cagcagcccccgaaggccctatcaggacatggagtatgaaagacgaaattcattgagtttgaagatgctctggaacaagagaagaaagagctgcaaatcca

SEQ ID NO: 146055 - DNA, 100 bp, Homo sapiens
ctacaagcggatcccgatccctccagaactgcagaaagctgaccccagcgacccatttgagtgtggagcagaggatcatgtggaagcagtgaaaaagctc

SEQ ID NO: 146056 - DNA, 99 bp, Homo sapiens
cgcgcccgggaggaaggaacgaggcaaggagctaaagcagcgtgcgttcagccctgggatccagagacaatggccccgatgggatggagcccgaaggcg

SEQ ID NO: 146057 - DNA, 75 bp, Homo sapiens
ggctattctgttccagcagcagaacacagtgaaattggagcgatttgaaattccaatcaaggttcgattaagccc

SEQ ID NO: 146058 - DNA, 80 bp, Homo sapiens
tggaaactgctcacctatgtcatggaggaagagggacaagaatccttcaagaaacaggaaaaaactcctaaaacaccaaa

SEQ ID NO: 146059 - DNA, 75 bp, Homo sapiens
gaaagacattacaccatctgaattgcctgcaaacccagtttcagacccaaagtttacgcctatcagacctacaca

SEQ ID NO: 146060 - DNA, 97 bp, Homo sapiens
tgccaatctctgcttgaaaggagaagacttggattctcaggcagagtgtctctggcacagtttgccttggccttcgtgacggacacgtgcgtggcgg

SEQ ID NO: 146061 - DNA, 75 bp, Homo sapiens
tggccagtcatttaccaccaatgggaacatgcacagccaaaagaatgcaatggtgtaaagattccagttgatgcc

SEQ ID NO: 146062 - DNA, 118 bp, Homo sapiens
gcctgctctccagtgtctgaaaacaaatgtttttctggtcttcacttttttgaggcaggaaggaacttggcattagaattcctcgaccactaggacagggaccaagcagattcatccc

SEQ ID NO: 146063 - DNA, 75 bp, Homo sapiens
tcctccatgataaaggaatcatctatagacaaatccgggacacagtcagctggattttcagtgagcaaatgttgg

SEQ ID NO: 146064 - DNA, 50 bp, Homo sapiens
cctggacctggaaaccatttttctccccccacccgctgcctgcggttttg

SEQ ID NO: 146065 - DNA, 82 bp, Homo sapiens
caaccgcctacgtatcagctccatccaggccaccactgcggcgggctctgggtaattttttctgcaggatgaattaagagaa

SEQ ID NO: 146066 - DNA, 100 bp, Homo sapiens
actgctacctgctcagcccggccgccagagcacccgtgcacagcagcatgttccgcttcctggttccagaaacgccgctggactgcgaggtctccctgtg

SEQ ID NO: 146067 - DNA, 83 bp, Homo sapiens
aggaggtcctgccgtccatgcggaagatcgtcgccacctggatgctggagcttcctgcctgacacagctcacttcaagaagtg

SEQ ID NO: 146068 - DNA, 96 bp, Homo sapiens
cgccaccgagagccccgcctccagcagccggtacatgagaagctggggtcagagctgccaggcctggagccagccctgcaggtggacctggtgtgg

SEQ ID NO: 146069 - DNA, 101 bp, Homo sapiens
cggacagccgcgcgctgagggtctcggggcgggcgccgcgggacctctccgggccatggcctgacatttaccccggtaactgctgggcatttaaaggctcc

SEQ ID NO: 146070 - DNA, 106 bp, Homo sapiens
atcattcgagaccatggagacatgaccaacaggaagttccgccatgacaaaagggtttacttggggtatcttggagatggccgcttccatctggagtctgtcatga

SEQ ID NO: 146071 - DNA, 83 bp, Homo sapiens
cttacagccgctcgtcagactccagcagccaagatggtgaagcagatcgagagcaagcggagctggagtttgttcagatcatc

SEQ ID NO: 146072 - DNA, 75 bp, Homo sapiens
gggcttccactgattctacattatgaatatcctccgaatcctaaatctagagctccaaggatgctggtcattaag

SEQ ID NO: 146073 - DNA, 82 bp, Homo sapiens
gtcttcctgctggggctcatgtttgaggtgaacttcacggtagaccagatccgcgccatcatggacaagaaggccaacatcc

SEQ ID NO: 146074 - DNA, 76 bp, Homo sapiens
gataaggcaattgaaagggaagaagatattgcaatggcaaaatcagcaaagttaattcaacagcagctggagaaag

SEQ ID NO: 146075 - DNA, 140 bp, Homo sapiens
tgctcgccgcgttgaccgcgctcctcgccgccgccgctgctggcggagatgccccgccgggcaaaatcgatctttaatctcatgaagtacgacagctacagccgcttcttaaagtctgacttgtttttaaaacacaagcg

SEQ ID NO: 146076 - DNA, 90 bp, Homo sapiens
aaggatctttccctggaggaaattcagaagaaattagaagctgcagaagaaagacgcaaggttgtcaatagggtgactggaaatttcaag

SEQ ID NO: 146077 - DNA, 93 bp, Homo sapiens
ccatggatagcgacgacgagatggtggaggaggcggtggaagcgggctgacgcacgaggcacacaggaaggaggtggagcaggtgtatctgcg

SEQ ID NO: 146078 - DNA, 76 bp, Homo sapiens
cgctgagcttggcgcacgggccgaccaggaagtacatgacctgctcagtgactatgagctcaaatactgttttgtg

SEQ ID NO: 146079 - DNA, 85 bp, Homo sapiens
atcgacgtcgtgatccagaagtccagagctgaggactgcctgtttgcagagtccaggcagaatataattctataaagggaactcc

SEQ ID NO: 146080 - DNA, 75 bp, Homo sapiens
ctttcatggagttcacagaagagtcgaggaggatattatcaactcactggtaacaacagtattcatgctcatcgt

SEQ ID NO: 146081 - DNA, 51 bp, Homo sapiens
aaatgcactctttcgaaagaaagagtcactgctagttggattgaagcacac

SEQ ID NO: 146082 - DNA, 80 bp, Homo sapiens
ctgcgaccccagtcggtgctccggggaggtcacctgacgaggaggttgtttttgagcacgttcactctcgcagtgtcagc

SEQ ID NO: 146083 - DNA, 96 bp, Homo sapiens
tgaagacgttacgtgctagcaaaacgggttttggccaaattgggcgagggcacaaaataaccacttaccccttctcaccgaggaagagcgggagaa

SEQ ID NO: 146084 - DNA, 49 bp, Homo sapiens
tatcatactggctattatatgctccattccgacttagacaagggagagg

SEQ ID NO: 146085 - DNA, 99 bp, Homo sapiens
agggatgaagcagctgtatgttctcatgtcctggacactaccacgttgatggctttctaaatccagggcataagggccatgtgttctgaaattattttg

SEQ ID NO: 146086 - DNA, 100 bp, Homo sapiens
aacagctccccacactgcaccatgagctcagttggctgcaggagcagctagcacagggcggcgactggcggcgcgatggacctgaccgggctcctgctgg

SEQ ID NO: 146087 - DNA, 82 bp, Homo sapiens
accacccctaaaagcacctggccccgctacagcaaaccagacaatgcagatcttcgtgaagactctgactggtaagaccatc

SEQ ID NO: 146088 - DNA, 100 bp, Homo sapiens
acggcgcccaggccccctgccgcggcgtccccgcggccccagcccagaatgttcgtggcatcagagagaaagatgagagctcaccaggtgctcaccttcc

SEQ ID NO: 146089 - DNA, 82 bp, Homo sapiens
cgacacgccccacaggtcttgggaggattaagtgaggggacatgaggtgagcgagtgctgtgctttcatgggcctcttcttt

SEQ ID NO: 146090 - DNA, 100 bp, Homo sapiens
tatttgatcctgattctacccaagtacatatgatttcagctgcaatggcaggtatcacgctcattgctgtggatgaggctcactgtatttctgagtgggg

SEQ ID NO: 146091 - DNA, 105 bp, Homo sapiens
gcgagctgagtggttgtgtggtcgcgtctcggaaaccggtagcgcttgcagcatgaaaccaaggtgtatgttggtaacctgggaactggcgctggcaaaggagag

SEQ ID NO: 146092 - DNA, 100 bp, Homo sapiens
gtagtatgcttttatagacgacgtgatatttccaacacacttataatgctcgcagataagcatgctaaggagaattctgcctaagccaactcgaaaaagc

SEQ ID NO: 146093 - DNA, 98 bp, Homo sapiens
agttacacaagtgacaagaaatgttccaccaggacttgatgaatataatccattctcggattctagaacaacagagatttgggattagaatctacctt

SEQ ID NO: 146094 - DNA, 90 bp, Homo sapiens
agaggcattgaggactttccttacctgtttttccagctcacccactgccagcagagacaaatttacatgtattggagaccagaccagaag

SEQ ID NO: 146095 - DNA, 75 bp, Homo sapiens
gcctcctgagtagctgagaccacagttgcagtatccagtttattgggaccatctcgagttctgtgatggattcag

SEQ ID NO: 146096 - DNA, 100 bp, Homo sapiens
tgctgtgggccgaagctggccgcctgcggcatcgtcctcagcgcctggggagtgatcatgttggacagtcattttgtttactcattcagccctgttgcag

SEQ ID NO: 146097 - DNA, 74 bp, Homo sapiens
attatgaggaagatgtacgaatccaaaatgcaatcaatatagctcaggtcaaaatgcagatcttcgtgaaaacc

SEQ ID NO: 146098 - DNA, 73 bp, Homo sapiens
tgctgcctctgccacgttactacagccaaccgtgcagtacagaaggtttctaaaaaattagaaatgcacgttt

SEQ ID NO: 146099 - DNA, 51 bp, Homo sapiens
agatcttctgcactgtttacaggcacagattggccatctgcaagcttccct

SEQ ID NO: 146100 - DNA, 82 bp, Homo sapiens
gtattaggcagtgctacaagggatcaagatcagctccaggcctgggaaagtgaagatactctggatgaatattttgaatatg

SEQ ID NO: 146101 - DNA, 97 bp, Homo sapiens
atggctccgagcagggaccgcctgctgcactttgggttcaaggcgacaggtgaggtggctttgaccccgggttgcccggccagcacgaccgaggagg

SEQ ID NO: 146102 - DNA, 73 bp, Homo sapiens
acaagtgtgaggagttgctaaatgctcagctgagtcagtgctgattctctcaaatagagcttgaaggataaat

SEQ ID NO: 146103 - DNA, 100 bp, Homo sapiens
ggcagagaaagatagcctggatccatcttttgtgcatgcgtcgcgccttttggcagaagacagaccatggattcttacagtgcaccagagtcaactccta

SEQ ID NO: 146104 - DNA, 100 bp, Homo sapiens
agacatcttctccctcccttgcctcaggggccaccttatcttagttccagaatttagtcttcctttggaatactacctaattcccttccttatcatagtg

SEQ ID NO: 146105 - DNA, 83 bp, Homo sapiens
caacaacaccacaataatccacagccaaggctctgacgcccgctctgcggcttcggtgtttgaacaggccacagtccaggagc

SEQ ID NO: 146106 - DNA, 75 bp, Homo sapiens
ttactgtgttttgtgagagctcgctaggcgccctaagcaacagagcaagtgctctcagaagaggagattgacgag

SEQ ID NO: 146107 - DNA, 100 bp, Homo sapiens
gccgaacagcatgacgtccgctttggagaactacatcaaccgtatcctcaagctggccgccgcgggcaaaaatcatcagcaacctgtttctgggccgcgc

SEQ ID NO: 146108 - DNA, 97 bp, Homo sapiens
ttcgacaccaaccccttcgcggacccagtggatgtaaaccccttccagctggccactgccccaacccaggcatttcactgggcgcagtgcggacagg

SEQ ID NO: 146109 - DNA, 100 bp, Homo sapiens
aagaatgctgacccttgtagaagttattggagtgatgagtaaagaatacataccaaagggcacacgttttggacccctaataggtgaaatctacaccaat

SEQ ID NO: 146110 - DNA, 75 bp, Homo sapiens
tcgccacttactttaatgagaagatctccattcctgaggaggagggttcttgtggtgcttgctgggctttcagtg

SEQ ID NO: 146111 - DNA, 50 bp, Homo sapiens
ctcaaggatcagttggctttagcaattgactggagacgggctgaaggcca

SEQ ID NO: 146112 - DNA, 51 bp, Homo sapiens
attggtactaatggccaactcaagtcagtactgctccccagcctaaaccag

SEQ ID NO: 146113 - DNA, 100 bp, Homo sapiens
atggccttgctgtgctacaaccggggctgcggtcagcgcttcgatcctgagaccaattccgacgcacagtttaatggcaacgagaagcggcagtcatccc

SEQ ID NO: 146114 - DNA, 82 bp, Homo sapiens
cgaggctgaagaaggccaaggctgcagaagccaaagccacgttacagaatgtctgaaggggacagtgtgggagaatccgtcc

SEQ ID NO: 146115 - DNA, 89 bp, Homo sapiens
gactctgacggtgaccaacttattagaaaagggagaatgaagtttctagattagaagacataatgcagcatttaaaatcaaagaagcgg

SEQ ID NO: 146116 - DNA, 88 bp, Homo sapiens
cgcagtggtcgcttcttctccttgttccaggaccgtctgcagccctaacaacaatgcagctcttctccaagcaaaatccttcaagaca

SEQ ID NO: 146117 - DNA, 83 bp, Homo sapiens
actccagtcaatatcccacttaaatcattccaggatgttccctttctacagctgctggaggactggactgctactactactcc

SEQ ID NO: 146118 - DNA, 89 bp, Homo sapiens
tactacgacaccggcgaggaacttggcagtgaatggtagtgtctagaaagggtatgtcccttcaagagagaggtgccaatgtccaaccg

SEQ ID NO: 146119 - DNA, 100 bp, Homo sapiens
ggagagtaatgcaaagggtggcgtatggaagatgaaagtccccaaggacagcacgaacccgaaagtttgtaagaggaagagagcgcgcggcgagcgagcg

SEQ ID NO: 146120 - DNA, 75 bp, Homo sapiens
acacaattggtactgcctggcatggtggaaagcctctgacctttttgagcctgggaaatgcttaccttgctctga

SEQ ID NO: 146121 - DNA, 75 bp, Homo sapiens
cggaggcagaggtggaggcgctttgaaaggtttttagaacttcagccataaaaatgggcagaattttccttgatc

SEQ ID NO: 146122 - DNA, 90 bp, Homo sapiens
ctgaaggaccttgtgatgctggatgcagcctccaaggatgagttggagtttgcctatctggggcgcctggctcacgaggttggctggaag

SEQ ID NO: 146123 - DNA, 96 bp, Homo sapiens
ctctgtaacatcttgtcaggctagtctttggatgggaagggttatgtggtccgaatcagtggtgggaacgacaaacaaggtttccccatgaagcag

SEQ ID NO: 146124 - DNA, 100 bp, Homo sapiens
ggcgcgggctgcagacggctgcgaggcgctgggcacaggagaaggaagccaacatccttttggagccatgaatattgtccgaactccatctgttgctcag

SEQ ID NO: 146125 - DNA, 83 bp, Homo sapiens
cggccacggcgctggtcaccggggtctgcctggaaaggacccaggagcgataacagtaaatcaaataagatatttgtcggtgg

SEQ ID NO: 146126 - DNA, 72 bp, Homo sapiens
caagaacacggatgaggagatagtggaatgctggcacaaaggacaagaagcttatgtgcagaaaatggttaa

SEQ ID NO: 146127 - DNA, 98 bp, Homo sapiens
cacagggcgtcggacctgcacgagctgtctggcacttccgttccggcgcccctccggtcatcaacccgctgggcaccagcttcccggacgacaccgcg

SEQ ID NO: 146128 - DNA, 90 bp, Homo sapiens
ctggagcctcagttggaagcagccgatccagcctgcggagcctgtggggcagattacttctctaacaggatcaccagtttgctccacaaa

SEQ ID NO: 146129 - DNA, 51 bp, Homo sapiens
aaggggtgtttttccgtaagcatactcagtggaaggagaacatgaatctct

SEQ ID NO: 146130 - DNA, 100 bp, Homo sapiens
ccccacctacagccggcagggcatgtcccccaccttctcccgctcacctcaccactactaccgctctggtagcccagcagaattttctcagctacaagta

SEQ ID NO: 146131 - DNA, 98 bp, Homo sapiens
caagaaggccaagggcaaggccagtacgctggccaccttgaagtacgccctcaggagcgtgaagcaggtgaaaggagatgtaatcagtgtagagaaaa

SEQ ID NO: 146132 - DNA, 88 bp, Homo sapiens
cgtgggtatcgaggcggacgacgaccggctcaacaaggtggagctggccctgctacagcgctcctaccaggacctggcctcgcagatc

SEQ ID NO: 146133 - DNA, 75 bp, Homo sapiens
tcagttggaagcagccgatccagcctgcggagcctgtggggcagtaatggaggggaaagttccagtcgcagcgct

SEQ ID NO: 146134 - DNA, 96 bp, Homo sapiens
acactagctgtagcaaagcctatgtaaatcatatgatgagagtggaacagatgtgcattcagattaaagaagttggagatcgtgtcaactacataa

SEQ ID NO: 146135 - DNA, 97 bp, Homo sapiens
tagctgagaaggctctagggaaacacaaggagaggatagggcacaggtacatcgagtgaaagcattcctcaaactgccacacaaccagccatttctc

SEQ ID NO: 146136 - DNA, 100 bp, Homo sapiens
ctcgctctggccgacgagtggagaaaaacatccagtcatggataaaaatgagctggttcagaaggccaaactggccgagcaggctgagcgatatgatgac

SEQ ID NO: 146137 - DNA, 109 bp, Homo sapiens
gctgatgggacgcctggcttcccagtgcatggcgctcaagtctgtgcgccgtacaggtttgcagattccgccagcagcacagcaagctctacagatgagtggctctttg

SEQ ID NO: 146138 - DNA, 82 bp, Homo sapiens
cctgctctgggctcctggaggccacacgatcgcctgggatgtcatcaccctgaacaaaatccagtctcatagcagaggagaa

SEQ ID NO: 146139 - DNA, 120 bp, Homo sapiens
gctccaggagttcgtctcttacgtctgcggaagtgcagctgcctcagttcttagcgcagatgactctggggacgacgacgaggctaccaccccagccgacaagagcgagctgcaccacac

SEQ ID NO: 146140 - DNA, 90 bp, Homo sapiens
atttcgctgagcggcacggctacatcaagggcatcgtcaaggagcccatgatgctgcccaaacctgggacctattacctcccctgggagg

SEQ ID NO: 146141 - DNA, 80 bp, Homo sapiens
agttacgttgttagaatgtagcaggtggttgtactacaatcccagagtcagacctagaagaaagatcagtagaacaagac

SEQ ID NO: 146142 - DNA, 100 bp, Homo sapiens
atgttggagaactacagaaacctcgtctccctgggatttaagtgccctgtatgctcaaaatttgtatcctcagatgaaatggatttgcatcttgtaatgt

SEQ ID NO: 146143 - DNA, 74 bp, Homo sapiens
gcacgtgggccgaggccgcgcgcctggcaaccacagttgtgtgcccaatgcagagacctcctttccagaaaaca

SEQ ID NO: 146144 - DNA, 75 bp, Homo sapiens
acagaagttgctgctgacgctctgggtgaagaatggaagggagttcccattagacttgaagttgggccacgtgat

SEQ ID NO: 146145 - DNA, 74 bp, Homo sapiens
cgaaaactgaagcagatgttgaacaacaaggtgagcgagtgctgtgctttcatgggcctcttctttatgaagca

SEQ ID NO: 146146 - DNA, 100 bp, Homo sapiens
ggatttcaacatgcctctgacaatctctagtgcagaaggagaagacagcctgaagaagatgcagctgatggagcttgcgattctgaatggcacctacaga

SEQ ID NO: 146147 - DNA, 100 bp, Homo sapiens
atcctgccggttgcgccttcttcctggacatgaccaactggttgaacaagatctgtagtggtctctcctttcagaggaaaaaccagtttatgcagcggct

SEQ ID NO: 146148 - DNA, 87 bp, Homo sapiens
gcatcatggagcccacagcatcctcagatggcagaaacggtggacacaagcgaaatggtcaacggcgctacagaacaaaggacgagc

SEQ ID NO: 146149 - DNA, 90 bp, Homo sapiens
ctacttccgggggagcggcgcggcggcgcgggagccaagaaggatcaagaaggtggagaagaaaagaaatctgtgcaaaagaaaaaagta

SEQ ID NO: 146150 - DNA, 75 bp, Homo sapiens
atgaaacgtttcagctacgaaagtgagctttttccaacttttaaggatatcaggatgctttcattggatttggag

SEQ ID NO: 146151 - DNA, 90 bp, Homo sapiens
tttagaggaaaaattttcatccaaggacagatcagagagatggaaaacttgatgactagctccaccctaccgcccctttttgcagatgaa

SEQ ID NO: 146152 - DNA, 83 bp, Homo sapiens
ccccgctccagacgccacagctggagcttgtcatggggaccaacttgctctgcctgccaagggggatatgagactttctactc

SEQ ID NO: 146153 - DNA, 50 bp, Homo sapiens
aagaccgaggaaaagctgcgggaagttgacaaaagtgttgaagaactacg

SEQ ID NO: 146154 - DNA, 75 bp, Homo sapiens
ccaagtttggccatggccgcttccagaccatggaggagaagaaagcattcatgatgtatcggcaagcagtgtaaa

SEQ ID NO: 146155 - DNA, 100 bp, Homo sapiens
tgcaagagtcaccttctggactgctgcccccatgacatcctggctgggacggttggccgttgtccaatgtgttgctgttatctggaactcctacctgtcc

SEQ ID NO: 146156 - DNA, 100 bp, Homo sapiens
gaacttttagaggcaatcacttagtcaacctcttgctgttacaggtctggaggcggctggtggaaatccaattccccgcggagcatggctggaaggagtc

SEQ ID NO: 146157 - DNA, 82 bp, Homo sapiens
gcttctgctgttgctcttctccgccgcggcactgatccccacagctgtcccctttcctccaacccaacggcttactttcaag

SEQ ID NO: 146158 - DNA, 90 bp, Homo sapiens
atcactttagaccctccacctaattgcagaatagcctaacatggcagaccagagacagcgctcactgtctacctctggggagtcattgta

SEQ ID NO: 146159 - DNA, 83 bp, Homo sapiens
ctctacacggcagagatgatagcaaaaatgcacatccggggcattgtcaaggccgctttgtagttcagaatgtttctgcacag

SEQ ID NO: 146160 - DNA, 50 bp, Homo sapiens
gaacaccttctccgacagcagcacacccgaagttggtgaaccatctaaag

SEQ ID NO: 146161 - DNA, 74 bp, Homo sapiens
tgggcctaggtctgcgccctggacaggttgcttggaagcgagctgtcaaaggtgttcgagaaatgtgtgatgtg

SEQ ID NO: 146162 - DNA, 74 bp, Homo sapiens
gaagggaagacttccagtagctccaaggaggttaagggtgtccgcaatgttgccagtgtctgtctgcagattgg

SEQ ID NO: 146163 - DNA, 100 bp, Homo sapiens
ccgcaaccattgacgccatgtcgggttattcgagtgaccgagaccgcggccgggaccgaggcagggagagcaacaagccccggccctcagagctcagccg

SEQ ID NO: 146164 - DNA, 74 bp, Homo sapiens
ctgcaaaagtggaagcgaagccgaaaaaggcagcagcgaagctaggacttctctcaaacttgtgtgctgaggag

SEQ ID NO: 146165 - DNA, 82 bp, Homo sapiens
gtctcgctgagctcgaggaggtggcgcgatggagggactggaagatcctcctactactaccacccttcagcctacaattcag

SEQ ID NO: 146166 - DNA, 100 bp, Homo sapiens
catgtgcctccaggttatatctcacagcattagtgccagcagtagttcccaagggctgtctcagccatccacccagacgactcagtatctgagagcagac

SEQ ID NO: 146167 - DNA, 73 bp, Homo sapiens
ctgcccaactaagacctatctccctaccaggagtttctagcactgaagacagcttatctcctgtgctgcaccc

SEQ ID NO: 146168 - DNA, 75 bp, Homo sapiens
atgagaggaatatactcatcatcagtctatttagaagagcagctgcaggtggtgccccttttcggcgacatgcag

SEQ ID NO: 146169 - DNA, 83 bp, Homo sapiens
cgagctcgcctgcatctactcggccctcattctgcacgacgatgaggtgacagtcacggtggtctacatagcctgctccttca

SEQ ID NO: 146170 - DNA, 100 bp, Homo sapiens
tctggacatctgtagctgtcgtttggtttgatcttgttgactatgaggaagttctagaaacagattgtctcagtttacctagctttgaaaatgccatacc

SEQ ID NO: 146171 - DNA, 80 bp, Homo sapiens
cgtcgtggagaacaagtttggcagcatccggcagacgtacacgctggacgtgctggagcggtccccgcaccggcccatcc

SEQ ID NO: 146172 - DNA, 51 bp, Homo sapiens
ctgcataaatggaagcagggtaccgcatcacccagctgaaaattgagaaca

SEQ ID NO: 146173 - DNA, 100 bp, Homo sapiens
gagaatgaccagctgatccgctgtattgtggagtatcagaacaagggccgcgggaacgagtgcgtgcagtggacccaagtggagagattgtggaactggc

SEQ ID NO: 146174 - DNA, 97 bp, Homo sapiens
aagggagacggcgagacgcgcagcgccggcgcccgggagacccaggaggagcccgcagaaacgcttcgttaagggactcaggcagtacgggaagaac

SEQ ID NO: 146175 - DNA, 76 bp, Homo sapiens
ttggaatcaaagataaatccaaatactgcatatcagaaacaacagttcttccctgtggaacagtagagacctagtc

SEQ ID NO: 146176 - DNA, 100 bp, Homo sapiens
ggcagggcacagtttctagagggcccgtccccagcccgggccgtccatcctcgcattgctgttgaatgatgaagacggttccaaggagagtaatgatctg

SEQ ID NO: 146177 - DNA, 82 bp, Homo sapiens
tgatggctatgcaccacctgatatcaccaactgtataagtgtgctagcggagtgtctagattgtcctgaattgaaagcaact

SEQ ID NO: 146178 - DNA, 98 bp, Homo sapiens
cgaggtgactgtgactgaggaagagtggatcagtttgacaacttagaaaaacacacacagtggggaattgatattcttgagaaatatatcaagtttgt

SEQ ID NO: 146179 - DNA, 75 bp, Homo sapiens
tgtacaagccaagatttcatctattgaatttgggtacatgttacaggaaaccaacttacgagagttatgaactgc

SEQ ID NO: 146180 - DNA, 75 bp, Homo sapiens
caacgcccatcgaggtcctctgcaaaggctatccctccttggtcatctataatttcctgagcctgtgctatgagt

SEQ ID NO: 146181 - DNA, 110 bp, Homo sapiens
cggcagcgagcggcgccttccaactccgggtctgcgcaggcatggcactaagtgtcccatggcacatttggccctcatggaggcctcaaaagggcaggaccagcaccctc

SEQ ID NO: 146182 - DNA, 75 bp, Homo sapiens
tcggcctcaagaagcgcaggttgcggcgccaagccaataggagctctgaacccaaaaagagcagcattcttcgct

SEQ ID NO: 146183 - DNA, 97 bp, Homo sapiens
gaccatcggagagcagtgcagcgtgtgtggggtcgagcttcctgataacgaggctgtggagcagcacagataacgaaggaggcccaacttcattcaa

SEQ ID NO: 146184 - DNA, 83 bp, Homo sapiens
cgacaagggtgttcccgaactagagtggattttggaaataatcagggttattttaaaactatatgagcagtggaagaatttcg

SEQ ID NO: 146185 - DNA, 74 bp, Homo sapiens
cgcgtccgccgattcctcctccttggtcgccgcgtccttggctggcgtagctggcctccaccctgctggacgcc

SEQ ID NO: 146186 - DNA, 75 bp, Homo sapiens
agagcaacagccccctcaccatggctctgtgcggctccaaaggttacctgggcttgtatgtgttctatgtggtca

SEQ ID NO: 146187 - DNA, 87 bp, Homo sapiens
gctactcttgatcctctccggctgcttggtctacggcacagaggactttggatttaagcatcgtctctgggtatattctggaaggag

SEQ ID NO: 146188 - DNA, 75 bp, Homo sapiens
gcggatctggaggagcagttgtctgatgaagagaaggccttgcttgagagaactggttatactctggatgtaacc

SEQ ID NO: 146189 - DNA, 83 bp, Homo sapiens
ctcttccgctcctgttttatactgcttccatatttacagtcagccaccatccgcctatctctgcgtgtcatgctgagtctaga

SEQ ID NO: 146190 - DNA, 82 bp, Homo sapiens
ggacgagctgacggtcaagaccaaggatggcgtggtggagatcaccggtgagaagccctaccactgcaactgggacggctgc

SEQ ID NO: 146191 - DNA, 83 bp, Homo sapiens
cagcagtcagaaggggaacggatctgtgtgcccacagctcctggagccccacaggaagcgccgcggagccatcaacagcaagc

SEQ ID NO: 146192 - DNA, 100 bp, Homo sapiens
ggaattctgcccactctgcggagttagcagtcacgacctccagcacaggtggctggcagagtctgctcggtggctcattatcaacaacaaaccagaagag

SEQ ID NO: 146193 - DNA, 73 bp, Homo sapiens
ggggacctccaaagactaaactgacaagccttcaaggagcccaggggataaaagaatcagagtgtctcaaccc

SEQ ID NO: 146194 - DNA, 74 bp, Homo sapiens
tggaacttgccctgtctcctcgcagatgaggcaggctaacaagaagggagatacaagatgattttagtaaagag

SEQ ID NO: 146195 - DNA, 101 bp, Homo sapiens
tggagggagacgtgctggacacactggaggcgctgggggatcgcttacacctgagacgaactacagaacagcacgtaccagaggtggaagtccaagtcaaa

SEQ ID NO: 146196 - DNA, 73 bp, Homo sapiens
ttttgacaaagcactactggctattggaaattctctggctgatgaacttgctcttgtggatgttttggaagat

SEQ ID NO: 146197 - DNA, 75 bp, Homo sapiens
gtcaacgaatcatccacgcacctgcagctctgctgagagagtgcaagccgtgggatactggtagacacagtctgg

SEQ ID NO: 146198 - DNA, 50 bp, Homo sapiens
catgagagggaaggaaacaagccagacacgaagatcgattgagaagttat

SEQ ID NO: 146199 - DNA, 75 bp, Homo sapiens
tgacactccacgccacccggggggctgcactcctctcttggcggggatctgatgagcttctttcttctggcatca

SEQ ID NO: 146200 - DNA, 51 bp, Homo sapiens
ctcactagaaaaggggctgtgaactttcctgagggaagacctcaattacca

SEQ ID NO: 146201 - DNA, 89 bp, Homo sapiens
ggggtctgaagactgaaagagtcgaatggtttgttggcagaacagctttgctgagccatcaaggtctaatggaagcatggttcggcatt

SEQ ID NO: 146202 - DNA, 83 bp, Homo sapiens
tgttttaactgtttaccgatagcagccatcgtggatgagaagatattctgctgtcatggagctttctacaagttctgattaaa

SEQ ID NO: 146203 - DNA, 90 bp, Homo sapiens
tgaggaggcgtcgcgcgcgcctgtagctcgcgggcctcgcaggttgaaaggattgttgacaaaaggaaaaataaaaaagggaagacagag

SEQ ID NO: 146204 - DNA, 96 bp, Homo sapiens
caactggcagatcttcaaagggaacagcacaaggaatgtgatgagctaaagttgcagacaagatccagctcatcaataatatgctggacaaagtca

SEQ ID NO: 146205 - DNA, 108 bp, Homo sapiens
gcagggaggatgacggagctgcagtcggcactgctactgcgaagacagctggcaggtgagaagccctaccactgcaactgggacggctgcggctggaagtttgcgcgc

SEQ ID NO: 146206 - DNA, 85 bp, Homo sapiens
tcgggcaaggcgagtggagcgagtggagcccggaggccatgggcacgccttggacaggcctgcagtactcaactgacaatcaatt

SEQ ID NO: 146207 - DNA, 75 bp, Homo sapiens
tgctccttctcctggagacgcaactcaaggagtccaggcatgataaagaaaagatagaaaagaaagagaaacggg

SEQ ID NO: 146208 - DNA, 97 bp, Homo sapiens
atcttcccatgcttgtcaaaaatcagaggcaactaacactgcggcttcctgagttggcaaacatgaattgactgggcataaagtagctgtgaagata

SEQ ID NO: 146209 - DNA, 50 bp, Homo sapiens
tggaatactgcttgacatatctctcacaccattttgctggtacagcctac

SEQ ID NO: 146210 - DNA, 90 bp, Homo sapiens
ccacaacccctgcactgataacgtctgttacagatagtttccaccatgaggtgcaaaacgagacagaagagtgagaagcagatggaggag

SEQ ID NO: 146211 - DNA, 90 bp, Homo sapiens
ctgattttcttctatgagtggaacatcaaactgggctggaaaggcagcaattctgcatttcttcgagtggtaagatgtcgatccttagct

SEQ ID NO: 146212 - DNA, 111 bp, Homo sapiens
aaggcaccaacttgggcaaaatatatgccatgaaagtcctaaggaaggccatcaccatcgaggctgagccaagagctgatggcagccgccggaccacccgctatgacatcg

SEQ ID NO: 146213 - DNA, 90 bp, Homo sapiens
gagatcaaaaaaggaagtacaggaagtttctgcctcttacaatggagtcgatggaaatccttttgtactattgctcattcatacttgttc

SEQ ID NO: 146214 - DNA, 50 bp, Homo sapiens
cactgtccggatcttccctccctggttcagtatctgaacacttttgctaa

SEQ ID NO: 146215 - DNA, 74 bp, Homo sapiens
gaggaggaagacctggaagacagatctgggccggtcactccgcgcaagtttgggttcctgttttagaactgcca

SEQ ID NO: 146216 - DNA, 96 bp, Homo sapiens
cagcacggatggaaagatggagatgaacctctaacacagtggaaaggaaccgttctggatcaggaaaatgttggggcttttcaggaagcataataa

SEQ ID NO: 146217 - DNA, 75 bp, Homo sapiens
gaaaatatggatctttacatgttgaatccttgcagcactaaaatttgagatctggttggagttggagggtgagag

SEQ ID NO: 146218 - DNA, 83 bp, Homo sapiens
gagcaggcgcgcagccacctggagaaggcggtggggcatgaggacactggccactccttgcatgactacaaggaagctctgat

SEQ ID NO: 146219 - DNA, 80 bp, Homo sapiens
gttggaacttcgttgcttgcttgcctgtgcgcgcgtgcgcggacatggcctcaaacgtcatacacgtggacctaactgca

SEQ ID NO: 146220 - DNA, 96 bp, Homo sapiens
tagcgccgctgggcctgcaggtctctgtcgagcagcggacgccggtctctgttccgcaggatggatgatgatgctgaagctatccttgctgcagac

SEQ ID NO: 146221 - DNA, 100 bp, Homo sapiens
cttgaagaccttcatatttcccaagatgccactggtgaagaaggtaccaaggaccccagccggaaccgctacaagctgtttctggagtgcaccctgatcc

SEQ ID NO: 146222 - DNA, 100 bp, Homo sapiens
aagagatagagcttcgcggagacggcggaagcggagagcaacagcgcgccgatggggcattctcttctcccaccctcgggactttaccccagtgtgcacc

SEQ ID NO: 146223 - DNA, 101 bp, Homo sapiens
aactctgaacacatctgaacatcagaagggacagactccagacgcgccacccttctagggacctattaaaagagttcccacagcccaaaaatcttctcaac

SEQ ID NO: 146224 - DNA, 100 bp, Homo sapiens
cctttcctgaggacggcgtacggagtgtgggattatcgagattgcagcctgtcactccacacacacgtctgcggccaagacgcagggtgggcacgtgtac

SEQ ID NO: 146225 - DNA, 83 bp, Homo sapiens
cccagaaacaagaagaagagaaccctgcggaggagaccggcgaggagaagcaggatttctctctgatcaaacggacagttcag

SEQ ID NO: 146226 - DNA, 83 bp, Homo sapiens
gcacgagaccggctacttctcggcgctgccgtctctggaggagtactggcaacagccggtggctgctggcagcggaatccccc

SEQ ID NO: 146227 - DNA, 75 bp, Homo sapiens
gtccgagttgccgccggagaggagtggcctcgcccgcttgttttacatgtggcacccataaaagatgaggctgag

SEQ ID NO: 146228 - DNA, 100 bp, Homo sapiens
gccgtcaagtgcattaagaacgacgccactgcccaggccttcctggctgaagcctcagtcatgaccttcctggagatgatggaggctcgcagccgtggcc

SEQ ID NO: 146229 - DNA, 75 bp, Homo sapiens
ctcaatcagaattactagattttctctcaaactacgagaaaaggcgacggcggattgacagaagtatgattggag

SEQ ID NO: 146230 - DNA, 50 bp, Homo sapiens
ctcagcttggagcaggaggtccagggagggatataagaccttcttcaaca

SEQ ID NO: 146231 - DNA, 99 bp, Homo sapiens
cacggatgacatcgtgaaggttgaagtctgggatgtagtagacaaaggccgccacaaaggattttgtggagtcgccccaggcctgacggcgttaattat

SEQ ID NO: 146232 - DNA, 101 bp, Homo sapiens
gctcctggaaaggaccgtccacccctccgcgctggcggtgtggacgcggaactcagcggagaaacgcgattgaggtactccaaagattcaggtttactcac

SEQ ID NO: 146233 - DNA, 101 bp, Homo sapiens
ggcgggccggcgggcggggcgcagagccaggcagcgcagtggagacctttggcgacttggcctttggcgacatcttcctccacctgctcacgggcaacctt

SEQ ID NO: 146234 - DNA, 50 bp, Homo sapiens
gaggagcgggaagagttgctggggtgacagcggcatggacatatgcccca

SEQ ID NO: 146235 - DNA, 90 bp, Homo sapiens
gacccttggtgctacctggagatccctctacttgttgatgggcagcttcccgggccactcctctcaggctgttcggctcttgaatcccag

SEQ ID NO: 146236 - DNA, 82 bp, Homo sapiens
gggggtgtgcaaacccgagagaactggcctgagaatctcttatacacctccaaaaggcccaacgccatcctgaaactcactg

SEQ ID NO: 146237 - DNA, 97 bp, Homo sapiens
tactatgagtctatatatcctggggaatttaagatgccaaagcagctcattcacatacagcactcgctctccgtctccagcaatgacgccagtccac

SEQ ID NO: 146238 - DNA, 75 bp, Homo sapiens
ttttcggatcatgtctggtggctccgcggattataacagcagcccatgacccatcgagaaactgcacctgtttcc

SEQ ID NO: 146239 - DNA, 87 bp, Homo sapiens
gaagatgacgattcagagactgaaaaacctgaggctgatgacccaaaggtttggtgcacctcgatttggaggaagtagggcagggcc

SEQ ID NO: 146240 - DNA, 96 bp, Homo sapiens
ctgggagagaggtacctctccttttccctctccctttccctaagggcagcttttggcaaggagtctgaagttcttattgggaacctgggtgataaa

SEQ ID NO: 146241 - DNA, 90 bp, Homo sapiens
tcacagaaactatatgccaccatggagaagcataaagaggtaaaaggattgagagggaagaagaggaagaagaagaagcccttcctttag

SEQ ID NO: 146242 - DNA, 75 bp, Homo sapiens
gacgtatctgccgtgccaggggtctaggctccagaaacaggggtgtgagtcatcctgttctaaagcaagttgctg

SEQ ID NO: 146243 - DNA, 88 bp, Homo sapiens
aacataagttggaggttctggaatctcagttgctctatatgcaatcagtgctgtctactttgctggagtgatggtgcgactgatgttg

SEQ ID NO: 146244 - DNA, 100 bp, Homo sapiens
tgctgcatttgttctgcctgacttggaccctggaaaacctggccctcttcaatttctgacaaaagacaccaaaggctctattccctgctggacaggtttc

SEQ ID NO: 146245 - DNA, 74 bp, Homo sapiens
ggctgggcagttgaatgtcgggtttatgctgagtattctttgaaactggagaaaggagattatacaattcgact

SEQ ID NO: 146246 - DNA, 100 bp, Homo sapiens
ggaggcaacaaacgcaagctctctacagccatggctttgatcggcgggcctcctgtggtgtttctgcactatgtaggaggaaatgcagctttaattggac

SEQ ID NO: 146247 - DNA, 101 bp, Homo sapiens
acgggtcacgccccaacgaaaagtctttcgttccctcaagtatgctgaatatgctggactgcagccttatctggatcagatcaatgtcattgaagagcagg

SEQ ID NO: 146248 - DNA, 82 bp, Homo sapiens
gtagccatgatgccccacttggtgaatggagatgcagctcagcagatgcaggacaagtactccaaaagtggcattgcttgtt

SEQ ID NO: 146249 - DNA, 107 bp, Homo sapiens
cgagttatgcccaccctccaactttgcgacggaaatgtgtcatcgaaagccagatgatatcatcaagttgaatcgaaaggaagggaagaagcagaattttccaagac

SEQ ID NO: 146250 - DNA, 73 bp, Homo sapiens
caggaactctacaacccaatccagacattaggtatgcatcagttaacttttgcccatagaactcgagctcttc

SEQ ID NO: 146251 - DNA, 75 bp, Homo sapiens
agcatatttgagtcatttccttcgtacccacagtgcttcatgagaggtatcacggttacatttatacataccgag

SEQ ID NO: 146252 - DNA, 50 bp, Homo sapiens
tacctcggggcagatccggaccaagcattgtacaagaagaagacccaaat

SEQ ID NO: 146253 - DNA, 73 bp, Homo sapiens
ctgaagatggctactctggagttgagacgcatcttctctccagactgccgatcccagaaagccaggtgatcac

SEQ ID NO: 146254 - DNA, 87 bp, Homo sapiens
ctggagttcattctttaccacattttaagccagctgactcttttggtgatcccttcttcccccggactacacagatactattagaat

SEQ ID NO: 146255 - DNA, 100 bp, Homo sapiens
ggggcagctgcggagcatgtcgaccccggcccggaggaggctcatgcgggatttcaagcgattatttgacttccaacgggcacctgagtgagaacgaggc

SEQ ID NO: 146256 - DNA, 75 bp, Homo sapiens
cagaactacaggggctctggccatcttcgtgatacagctgcccgtctttcatatcagaaaaatgctggatttcaa

SEQ ID NO: 146257 - DNA, 100 bp, Homo sapiens
cacaagcggttgctgcctaccaaggctgtcattttataggcatgcctgaatgtgagatgtgtatatctcatgattgatatggagaaactagtcatgggcc

SEQ ID NO: 146258 - DNA, 100 bp, Homo sapiens
ctcagctcgggccacggagaggagcagcccccggagacagcggcacagaggtgcttctgccaggggctttgttatgcacctaaagccatattggaagctc

SEQ ID NO: 146259 - DNA, 100 bp, Homo sapiens
gcctatcgctaccctccgaagtccggtgtcatggagaaactccagctgggcccagagattctgcagcgggaaaatccaaggcttatttatgccaggctga

SEQ ID NO: 146260 - DNA, 74 bp, Homo sapiens
aagctgggccactcccgggcatctgtgatctggcatcggacacagcaaatgcagccctgaggatttggctactg

SEQ ID NO: 146261 - DNA, 83 bp, Homo sapiens
tgatgacctcaaggaagagatgacccttatggtggtggattctccacagttttcctcgtgcgtactcacggtggaatccgatg

SEQ ID NO: 146262 - DNA, 87 bp, Homo sapiens
attctcacagacaagcatggagcctggggaaattctgcagtgaggcctgctggtgggtacccttgatgttgtgttggactccagcgc

SEQ ID NO: 146263 - DNA, 90 bp, Homo sapiens
ggacctgcccaaattctacccacccgtggagcccccggctgcagcttggggggagccccatgttatagtacattgtgcagcagagagaag

SEQ ID NO: 146264 - DNA, 51 bp, Homo sapiens
atcgctctcgcccaccgcccgaaccgtaacttgggtttttactcctgtaac

SEQ ID NO: 146265 - DNA, 82 bp, Homo sapiens
gagcggcggccgaggcggcggtgtgggcgcgtcaggccgcgacgagggcgctgagatccacctccgacccttaagccagaga

SEQ ID NO: 146266 - DNA, 100 bp, Homo sapiens
atctgcatggaattctgtggggctggttctctccaggacatctaccaagcaattaccagctctggctgggtcgccacaacttgtttgacgacgaaaacac

SEQ ID NO: 146267 - DNA, 97 bp, Homo sapiens
ctttaagggctacgggaagatcctggaggtggatctgaagaacgggtatgccattgcattggccttaagggaaaagcagcgtgtaatatttaccagc

SEQ ID NO: 146268 - DNA, 74 bp, Homo sapiens
gccacaatctactgctccatacggaaacctcagggtgtccgcaatgttgccagtgtctgtctgcagattggcta

SEQ ID NO: 146269 - DNA, 104 bp, Homo sapiens
tgaggtggaggcaggctgcggcagacggcgacagtggcggcggcgccatggcagggcttgcaggttcaagcactgtcttcctgttggccctgacaatcatagcc

SEQ ID NO: 146270 - DNA, 101 bp, Homo sapiens
cgccaacatgcttctcatggctgccctgtggggcctctacatgtccctggttaatgtgggccatgtctggttcatcatgcctagtggcgtataagaagacc

SEQ ID NO: 146271 - DNA, 99 bp, Homo sapiens
ctttgatccagaacttgcagcaacaataggaagatgatccctatgatcttgaagatgtttctgcacagaaatgagggaaatacaaagaaccaaatacag

SEQ ID NO: 146272 - DNA, 100 bp, Homo sapiens
tggagggaaatgggaatgtacacgataattaaagagtaaagttgtgctcaacggatcagattttattaagacctctactggaaaagaaacagtaaatgcc

SEQ ID NO: 146273 - DNA, 90 bp, Homo sapiens
cggagggagccgcgggatggaccgcagagcacgaacttccaggagccggtgcagccgctgacacagcagcaggtggcgcagatgcagctg

SEQ ID NO: 146274 - DNA, 82 bp, Homo sapiens
cggagccgcgcagccctcggagcacgggcgccatgttttggaagtttgacctgcacacaagctcgcacctggacacgctgct

SEQ ID NO: 146275 - DNA, 83 bp, Homo sapiens
cgggtggcggctcgggacggaggacgcgctagtgtttggtgcacctcgatttggaggaagtagggcagggcccttatctggaa

SEQ ID NO: 146276 - DNA, 100 bp, Homo sapiens
gggcaggtcactgactcttcgggcgctttggcatcctcgtttgaaaggggctgttatcctgcagccttgctgctatgaccaagaaatgccatgtcccgtg

SEQ ID NO: 146277 - DNA, 97 bp, Homo sapiens
cccatctaccgcaactctcagttcgagagtaaaggatctaagcctttcccacgttatggttataaaccctccccaccgaatggatgtggctctccac

SEQ ID NO: 146278 - DNA, 75 bp, Homo sapiens
ctttacttggtgcaggaaggcagtctttgctacgtacagcaaaaggtaccgaggagaaggcattgtatatgggac

SEQ ID NO: 146279 - DNA, 75 bp, Homo sapiens
aaccctcactggagaatccagagcactctcgagtggaccctgaggagctcttcaccaagctcgaccgcattggca

SEQ ID NO: 146280 - DNA, 101 bp, Homo sapiens
cgggaacagaaagaaaagtccgaaagagctgcccatcacctcttcatgaccactgcctgccaggaggctaactacggtgccctcctccgggagctctgcct

SEQ ID NO: 146281 - DNA, 100 bp, Homo sapiens
gctatatctgtaaagggtatctgatcaagccaacaacagtgacggaatgcctccatacatgatctaagcctttcccacgttatggttataaaccctcccc

SEQ ID NO: 146282 - DNA, 74 bp, Homo sapiens
ttttatacactcttagtgctgtccaggtacatcaggaacgtctctatcaagaatacaatttcagcaaggctgag

SEQ ID NO: 146283 - DNA, 100 bp, Homo sapiens
tgggtcatgaaacttaatccacagcaagctcccttatatgacacaggttgaacatcacggcggagaacgactgccggcggctgcactgctccctgagaga

SEQ ID NO: 146284 - DNA, 82 bp, Homo sapiens
tttaggtgcttttatattcatctcaaaaacaaaattctgaactcaggacttggcaagcataaacttggaggaggcagtggag

SEQ ID NO: 146285 - DNA, 100 bp, Homo sapiens
agggaagatgagaagcccctggtgctggagatgctgaaggttaacacagaaatctgcctcctgggccatgccgcttctaaggcctgtttcttctcatgag

SEQ ID NO: 146286 - DNA, 100 bp, Homo sapiens
attgcttgggcacttagattatattcgcaccacgttttttcatcatgggacattctggagaaggtcagcgtgcattgccctgtgtttgactacgttcccc

SEQ ID NO: 146287 - DNA, 127 bp, Homo sapiens
cctcgagggatttttgtggtcagaggagaaaatgtggtcctactaggagaaataaattatatccagatcgagagacagaagattctgaaagggttcaatgaaatgagagtcatcttggacaatgagg

SEQ ID NO: 146288 - DNA, 90 bp, Homo sapiens
gcacgggatggcggaggcgcctcctgtctcaggcgggagacactatattcaatcgtgctaagctcctcaatgttggctttcaagaagcct

SEQ ID NO: 146289 - DNA, 75 bp, Homo sapiens
ttttgcagttacagcctgtgcaacaagggaaaactgtggtatgtctgtgtgtaatggtaaaatatatatcctggg

SEQ ID NO: 146290 - DNA, 100 bp, Homo sapiens
cacagactgccaagtgggacaactttctggcttttgaaaggctccttcttcaggatcttgaagcagcctatcacattacagatatccatgaagctttggc

SEQ ID NO: 146291 - DNA, 82 bp, Homo sapiens
gttggaagcagccgatccagcctgcggagcctgtggggcagccattgctccagtcctcctggatgccctgacggatccctcc

SEQ ID NO: 146292 - DNA, 75 bp, Homo sapiens
cagaagcgtttggtgttggtgtggaattcattgatcaaccgttacataactgaagactcccaccttcaggcagga

SEQ ID NO: 146293 - DNA, 96 bp, Homo sapiens
ttctaccttgtatgcctcaatttgctggatttaagcactgctgcactttatgaggaacggctggaggcgatgatgcgccggtccctggagcgcaca

SEQ ID NO: 146294 - DNA, 90 bp, Homo sapiens
ccgccactgcgtggcctgcgggctcctgcgcacgccgcggccgaaaccgggctggtttccagccaagttcgtggaagtcctggatgagcg

SEQ ID NO: 146295 - DNA, 75 bp, Homo sapiens
gcgacaggctaagctggattatcagccagcgtcccatgctcggtggccccagaaaagtcagtgtgtaggcctcag

SEQ ID NO: 146296 - DNA, 101 bp, Homo sapiens
caaactttgaggacaggaatgcatttgtcacgggcattgcaaggtacattgagcaggctacagtccactccagcatggtacagagaactacaacttagtac

SEQ ID NO: 146297 - DNA, 100 bp, Homo sapiens
gacagaaaagacagtgttctgctttcatggagttcacagaagagtcgaggagcatctactacaagccttagtgggtctgatagtgagaccgaggggaaac

SEQ ID NO: 146298 - DNA, 82 bp, Homo sapiens
tgacctgtggagacacggccagatctgccctccagtgtttcccattaaacactaccaggacaaaatcaggccttacatccag

SEQ ID NO: 146299 - DNA, 75 bp, Homo sapiens
cgcgtacgagttcaacctcagcgctctgaatgccggtggtggtgtgcacattgagccccggtatagacagttccc

SEQ ID NO: 146300 - DNA, 95 bp, Homo sapiens
gttgcagtgtatggaatgctaaatcttaccccaaagggcaagcagggttaaagcacgaattgggagctctcagcgacatcaccagtcagcagcca

SEQ ID NO: 146301 - DNA, 82 bp, Homo sapiens
gccagagaggcccgcccaccagttcgcccgtccccctgccccgttcacaatgtggaggtggaggaagcgtccctgggatcga

SEQ ID NO: 146302 - DNA, 74 bp, Homo sapiens
gctgagccggccgcgggcgcgaccggaggcaggagaatggtgttgaacgcgtgtgtcctgagagcctgctgcag

SEQ ID NO: 146303 - DNA, 100 bp, Homo sapiens
cggccgtgtcagtttggggcatctccgcggtccggcccggggccccgggatctcggctgtccttcctcccgacagcccacctgaggatattgaccataag

SEQ ID NO: 146304 - DNA, 100 bp, Homo sapiens
taccagagataattgataacaccctgtaacagctgagtggatcacacaataataatgtacttgattggaccagatggtgagtttctagattattttggcc

SEQ ID NO: 146305 - DNA, 50 bp, Homo sapiens
gcagtctttgctacgtacagcaaaagtggctgtttggtggccattctccg

SEQ ID NO: 146306 - DNA, 96 bp, Homo sapiens
atctgttactgcaacttcagcgaattgctctgctgcccaaacacccagtttcatgtatttgaatcgacaagacagctccctcgattctccatgtat

SEQ ID NO: 146307 - DNA, 87 bp, Homo sapiens
ggggatggttccatcatggcgtcaatgcaggagcagcatttctttctattactactatctatgctgagactggttcaggttttgtag

SEQ ID NO: 146308 - DNA, 100 bp, Homo sapiens
cccaacttcagggttggcaagaagataggatgtgggaacttcggagagctcagattagaagcaatatccaaggcagtgtcatctgcaacaatgctgtgat

SEQ ID NO: 146309 - DNA, 50 bp, Homo sapiens
gcctgcgaggctggccgagaaatcccgtattttgtggaagtataatactt

SEQ ID NO: 146310 - DNA, 74 bp, Homo sapiens
gctattggactgacttttcttatgctgggatgtgccttagaggattatgggttgcaacaaggacagtgtcagag

SEQ ID NO: 146311 - DNA, 98 bp, Homo sapiens
aaatgttcccagaacattgcacgatgcctcctgggtgaagaagctgaaggagacctttgcttttattcagcagttggacaaaaacatgagcaaccttc

SEQ ID NO: 146312 - DNA, 119 bp, Homo sapiens
gttgaactctcagtggtcctacctggggatattatcaaatctactactgttcatggcaggaaataatgcaaaaggtgtcccaaggctcctgaccagtgaacaaagatttgagaaagaca

SEQ ID NO: 146313 - DNA, 83 bp, Homo sapiens
cccctccggcgtgttcatgcccccggggaaactcccagtacagccagcagcaggccgggtaccagcagggtgccgcgcagcag

SEQ ID NO: 146314 - DNA, 100 bp, Homo sapiens
gagcctcagcacctgcttgtttggaagcacacagcatgcctctgcaatgccatcattgctttgctgaaagttcccctttctttccagagatattttttcc

SEQ ID NO: 146315 - DNA, 75 bp, Homo sapiens
ttggtgtggacgttgtctaaatttcggtagccatggcacaagaatatatggccaagttgaatgatgctgcccggg

SEQ ID NO: 146316 - DNA, 100 bp, Homo sapiens
atgtacgatgcagaccttttagaagaagaggtcatcatcagctggtcggaaaaggctgacagctgggtggagaaggaggagccggcacctagcaactgac

SEQ ID NO: 146317 - DNA, 90 bp, Homo sapiens
cagatgttcattcatctggatcttcagatgcacatatctcaaggcttttgagaggagacttactgaatatattcattgtttgcaacctgc

SEQ ID NO: 146318 - DNA, 100 bp, Homo sapiens
gtccgccccgcgagcacagagcctcgcctttgccgatccgccgcccgtccacacccgccgccaggccaaacgtaccaagaaagtcgggatcgtcggtaaa

SEQ ID NO: 146319 - DNA, 75 bp, Homo sapiens
cagagcgcctgcgaccccagtcggtgctccggggaggtcacctgacgaggagctgtgtcagcgtgttatgatgcc

SEQ ID NO: 146320 - DNA, 128 bp, Homo sapiens
ggaatttatataggaatgtgatgttagagaactacagaaacctggtcttccttgatggaattaaattcacctgtctcggccttccaaaatgctgggataacaggcatgagccaccgcacccagcccag

SEQ ID NO: 146321 - DNA, 98 bp, Homo sapiens
tttaagcgactgtgactctgctgcaagttccccagatcttgagaatgagtccctggaacgccagatgcgtgaaatggaagagaactttgccgttgaag

SEQ ID NO: 146322 - DNA, 76 bp, Homo sapiens
cagtctgcgtggctcactgtcaccagacctgtggcaaaaggcttcttctcatatcggtaattccactcaggccact

SEQ ID NO: 146323 - DNA, 97 bp, Homo sapiens
aagtgagccagaaacatgctgagcctttgacagggcgaactttctgaccaagtatacaactacccagagggcctaggagaagtgctgtatagagagc

SEQ ID NO: 146324 - DNA, 98 bp, Homo sapiens
tgtttttctcagaagagaattccacaagtatgtctggatttggaatgaacaggaatcaggcatttggaatgaataactccttatcaagtaacattttt

SEQ ID NO: 146325 - DNA, 75 bp, Homo sapiens
gctgaccctctctcgtcgccgctgccgccgccgcagctgccaaaatgcctcttctgaagagctgaaagctgccta

SEQ ID NO: 146326 - DNA, 95 bp, Homo sapiens
taagaagcacctggatgagacatttgctacagcatcccacattaagtcaacggctggacgtaaagaaagaagtgatgcactcaattctgcaatag

SEQ ID NO: 146327 - DNA, 100 bp, Homo sapiens
tgagattggggagaaggtgcggactcttgttcttgcactggtgtggaatcaactatgaaattataatcatagatgatggaagcccagatggaacaaggga

SEQ ID NO: 146328 - DNA, 100 bp, Homo sapiens
gccaagttaaaagttacagtcaaaaagcaaatggacaaaattgaggagcttcagaaaaacctgttaaatgcaaatttgtagagacagggtttcgccgtgt

SEQ ID NO: 146329 - DNA, 98 bp, Homo sapiens
ctggccgctgcatggttaccacagaccacaaacaacaaatctgacacgctgcccctggccactcggtacaacgtcaagtgcgtggggctgtccccgga

SEQ ID NO: 146330 - DNA, 83 bp, Homo sapiens
agccgggcgcgtgctgccgctcgtggcgggccgaggcagcggaggaggagaaagagatggacctcccggactcggcctcgagg

SEQ ID NO: 146331 - DNA, 100 bp, Homo sapiens
cgagagcgctcgaggtcgtatgaacgcacaggccgtcgctatgagcgggaccaccctgggcacagcaggcatcggagtatttgtgtggaagtaatcgaaa

SEQ ID NO: 146332 - DNA, 101 bp, Homo sapiens
tggtgccccggggcgtcaacctgcaagagtttcagattgccaaaagacaaaacgggtaccacaaggattggtgacctcgcaccccaggacatgaagaaagt

SEQ ID NO: 146333 - DNA, 100 bp, Homo sapiens
agcgcgaatatcgtcatcgttagaaggtaatcctcccacttcttaaaagtgatctttatgaagtgattcagtccaccttagatggactgctctgcacatc

SEQ ID NO: 146334 - DNA, 96 bp, Homo sapiens
gtggtggaatatgccaaggaaaaactggagagcttcatcaaaaatagtgatagctttgataaccctggcctcccacgactacatcctgaagattgt

SEQ ID NO: 146335 - DNA, 74 bp, Homo sapiens
ccgaatccgccgggtcccactcacgcccgccggccgccgattttaccaaatgttgcaagaactctggagttctt

SEQ ID NO: 146336 - DNA, 97 bp, Homo sapiens
gccgccgccttgctgctgctcaaagctgctgccgccccttgggctaaaaggtggatgaaatcaaggcttgctgctgacaaaatataaatcatgccat

SEQ ID NO: 146337 - DNA, 51 bp, Homo sapiens
gtggatatctccatgctcagctctctgggcgttgacccggacgacacctat

SEQ ID NO: 146338 - DNA, 86 bp, Homo sapiens
ctcattgaccacaacgaaattatgtccaggctgacgctcaagcaggaggtcaaaatgcagatcttcgtgaaaacccttaccggcaa

SEQ ID NO: 146339 - DNA, 82 bp, Homo sapiens
gtctgcgagccaggattcccgggaaatgatggcgggaacacagcaaaggagaccatgtcctggagagggtcccgggccccac

SEQ ID NO: 146340 - DNA, 80 bp, Homo sapiens
agaactgcctgtgcgccctcaacctgctttacaccgtgtgatgaatgcagactctgctaccattttggctgtttggatcc

SEQ ID NO: 146341 - DNA, 90 bp, Homo sapiens
ggtgttcttttggggtagtgtctgggatccagtacgagttgaatcattgttcaaataaggaacgtcaaggtcgtgggaaataaaaggcag

SEQ ID NO: 146342 - DNA, 101 bp, Homo sapiens
aagcggggacccagaccctggagcctcagttggaagcagccgatccagcctgcggagcctgtggggcagaggtcctcaaagagggcagcgggctgttccca

SEQ ID NO: 146343 - DNA, 100 bp, Homo sapiens
caacaacagagccggggaaaggaggacgcagcaagcgctgaatattaaccagcaaaggaagagcctaaaaggcggcaacaccaacacctcttgacatgga

SEQ ID NO: 146344 - DNA, 83 bp, Homo sapiens
cacctccaaggtcttggattatgttacaagaaccagataggacaaggccaactggagaaaagccttacagatgctcatgggaa

SEQ ID NO: 146345 - DNA, 75 bp, Homo sapiens
ccaagatgcatggacccagctcagcgggacgcgccgctggagaatgaagacagcaaatcacccaccttgaggtca

SEQ ID NO: 146346 - DNA, 101 bp, Homo sapiens
ttttgacatcagttatattccatctactgtctttttcttcaatgggcagcatatgaaagtggattatgggtcacttcctcctaacccatctgctgctagag

SEQ ID NO: 146347 - DNA, 100 bp, Homo sapiens
aggtgaaggagcggctggagcccaggcattctgaaggcaaatcctgtttagacccaggcaaaggttcctggtgacccaggctctcatgagcagattgtcc

SEQ ID NO: 146348 - DNA, 83 bp, Homo sapiens
caacaaccagaaggtctacatgccccgggaggggaagctcatctctgacatcaacaaggtggtggaggtggatacagcagtcg

SEQ ID NO: 146349 - DNA, 100 bp, Homo sapiens
actccaccaagcatcccattacagatagaagagggcttccgttacaagatgaggtctgtgtatgctcacttccccatcaacgttgttatccaggagaatg

SEQ ID NO: 146350 - DNA, 83 bp, Homo sapiens
tatagccaacagagcagcagctacgggcagcagaattgtcactgctgttccaagggcacacgcagagggatttggaattcctg

SEQ ID NO: 146351 - DNA, 90 bp, Homo sapiens
atcatccaccactggaacgccaaccggctggacctgttcgagatcagccagccgaccgagggtcaggagacaaacaaccagtcggcctcc

SEQ ID NO: 146352 - DNA, 100 bp, Homo sapiens
ggcttttctagaaatagataaagccttttcgagtcatgcccgcctgtctgctgatgtgcagtaccggtttgactgtatcttcaagttaagagaattgctg

SEQ ID NO: 146353 - DNA, 105 bp, Homo sapiens
gtttaaccaaacaaccagaagaagtatttgatgtcttagagaaacttggagaaggtaaaagaagccttgagccctataaaatttaacagatggggtctcccagaa

SEQ ID NO: 146354 - DNA, 50 bp, Homo sapiens
ggcaccactgaagtgaccgaatgaggtaggccctgctaattgcagatttc

SEQ ID NO: 146355 - DNA, 74 bp, Homo sapiens
tgcacatttcactcccccaggccacagtcacaccccccaggaaggaatcagagatcattgatttcttcctgggg

SEQ ID NO: 146356 - DNA, 50 bp, Homo sapiens
agtaatcgcctgctttgattcattgaaagccagggagctggagagcagag

SEQ ID NO: 146357 - DNA, 82 bp, Homo sapiens
gaaaggtcccactgcagccctccaagcaggtctcctctgagcctccggcctccataagacccaaaacagatgacacctcttc

SEQ ID NO: 146358 - DNA, 98 bp, Homo sapiens
gggccccgggctagcagagcggaggcgctgccacgaaactcgtacctgcggctaagagcaggacctgaaggagaagaaggagaaggtggaggagaagg

SEQ ID NO: 146359 - DNA, 74 bp, Homo sapiens
ggcgaaggtctcagagctttacgatgtcacttgggaagaaatgcactcggtgatggaaagagagccactattct

SEQ ID NO: 146360 - DNA, 97 bp, Homo sapiens
caggacacctttatccagtttcctggatggaccaagatccaggaggctgcaagccagggcctgaaattcgttggtgttatacctcagtaccattcct

SEQ ID NO: 146361 - DNA, 90 bp, Homo sapiens
gtcagtcgtgtggaacggcaactttgtcattgacaacccacagaacatccaggatttgttcccgacaaggagttttctggttcagaccgt

SEQ ID NO: 146362 - DNA, 100 bp, Homo sapiens
cctccaactgatgcttattacaagctgcgccacattgtggatgaggtcaatggattaataaggtgtgtccagcatcatggcctcctcccagtaacttcag

SEQ ID NO: 146363 - DNA, 98 bp, Homo sapiens
caggcagcaaggccggaggacgccgtgcagcacgtctgtgaatttctggtacgtgctggtgatgaatgatgagcacacagagaggcgatatctgctgt

SEQ ID NO: 146364 - DNA, 119 bp, Homo sapiens
gccgccatcgcgacggccaaaaggagcggcgcggtcttcgtggtgttcgtggcagaaactgctggagcgaacccgtgccaggcgagagaatcttcagagaaaaatggctgagaggccca

SEQ ID NO: 146365 - DNA, 87 bp, Homo sapiens
cctcagttacttcatcgtctccatcctctacctcaagtatgagccaggcttttggaaatgccaagacagcccacaacaacaactcca

SEQ ID NO: 146366 - DNA, 100 bp, Homo sapiens
agtcctcagaagcatgtgtcttccccagctctgcagccacatactatccgtttgttcaggaaccaccagtgacagagctgcagatcaaattacgaagctg

SEQ ID NO: 146367 - DNA, 74 bp, Homo sapiens
cactattccaggaatggttgggcccgtcattgctaaaagtctgacccctgatgctggagtgcaatggcgcaatc

SEQ ID NO: 146368 - DNA, 100 bp, Homo sapiens
aggagctggaaggacaggaaccagaacccaggcccacggaggaagagccgggcagtccctggagcgggccaggtgtctcgtgcctctgctggaccctgac

SEQ ID NO: 146369 - DNA, 75 bp, Homo sapiens
gaggccattcagctgtgcgaccgggacgttgcagcatgagaaagccgaactagaacagcatcttgaacaagagca

SEQ ID NO: 146370 - DNA, 51 bp, Homo sapiens
ccctgctgacatgggagcacatcaggtcaggctgccagatgggacctcact

SEQ ID NO: 146371 - DNA, 100 bp, Homo sapiens
ccccaagcttgcctccgcaaggacttgtgtactcagcaatgccgactgcctacaacactgtaatagttatgcacgagtgcgagctgtggtgatgacccga

SEQ ID NO: 146372 - DNA, 51 bp, Homo sapiens
cccgccagtatctgatgaaggtaagaggtgactcctgcacctgcgccggct

SEQ ID NO: 146373 - DNA, 75 bp, Homo sapiens
tcttctttgaaagcctctcaagtgatggaatggggagaagatattaaagcagtttcaaaagatgaagcagtgatg

SEQ ID NO: 146374 - DNA, 80 bp, Homo sapiens
ttccggcgcatcctccacaccgacaccatctggaggaggcgttgccgtgaggggagtgcatccgccccaacccttttccc

SEQ ID NO: 146375 - DNA, 98 bp, Homo sapiens
cggccagcctggcgtgggtgctgcgggccgcgttcgggggcgcagcaaccaaccagtggttcatcccagccgtgaggggggacattccccctgggtgt

SEQ ID NO: 146376 - DNA, 90 bp, Homo sapiens
tcgacagcgaacatgtcgcggcctgtcagatttgctttgtcagctatggacatggaacagcgggactatgattctagaacagcactccat

SEQ ID NO: 146377 - DNA, 75 bp, Homo sapiens
agtagatgctagtggaaagccccaggaagctgtttatggccaaaatgttgaagaagaggatgaacttgaatctgg

SEQ ID NO: 146378 - DNA, 104 bp, Homo sapiens
ggagctgagtctccccagaagaggaagtttgacccagatgatgtggtaccagttggccaaagaagagcctggtgttggtgcatgtgctttggactagcatttat

SEQ ID NO: 146379 - DNA, 50 bp, Homo sapiens
gcagagcaaggaaaatttgcgttagaggttcaaaccttgtactactcagc

SEQ ID NO: 146380 - DNA, 75 bp, Homo sapiens
gggatcacttcatccgaaccctcagcctcaagccgctgctcttcgaactaaagatgactcagagccatctggaga

SEQ ID NO: 146381 - DNA, 100 bp, Homo sapiens
ctttcctgtaccgaacagatttgcttgttgggtcgaacttgtggctattcatttattctcaccaggcggcaacctttggcactgcatccatgagcatgcc

SEQ ID NO: 146382 - DNA, 83 bp, Homo sapiens
ggccgcgggagccgcacgcggcgatatggaagaggagggcaagaagggcaagaagttgctggatttgtgcgactcggtgaagg

SEQ ID NO: 146383 - DNA, 78 bp, Homo sapiens
cagcatcctgagcagcatggatgctgagaatgagcctaagagtttattgacattcagtacaaagtctccagaagaaaa

SEQ ID NO: 146384 - DNA, 82 bp, Homo sapiens
gccccgcccgcgccggaagagccacgccgagacacctatggctgccgatgaaggctcagcagagaaacaggcaggagaggcc

SEQ ID NO: 146385 - DNA, 75 bp, Homo sapiens
gtctatgacgcgcgccatagagaccaccgatatcatcagccggcacctgccagccgagagtgcagcctggtgccc

SEQ ID NO: 146386 - DNA, 90 bp, Homo sapiens
ggcggccaccccctcttcctcacttccctgtactctcatcgctctcggcctccgacacggtcaaagctcagattcacagttgcataagcc

SEQ ID NO: 146387 - DNA, 101 bp, Homo sapiens
acggcgacgacgggggaatgtggcgctggatccggcagcagctggtatctagaagagcagaagacagagaatggaaaagataaggaacagaaacaaacaaa

SEQ ID NO: 146388 - DNA, 100 bp, Homo sapiens
gacgcctgcaaggactggttccacggcagtactatactggcaattgctggagaagattttgcaattgttgcttctgatactcgattgagtgaagggtttt

SEQ ID NO: 146389 - DNA, 50 bp, Homo sapiens
aacctgcactgtggacttttcgggcatccgtttccgaggctttagtatcc

SEQ ID NO: 146390 - DNA, 50 bp, Homo sapiens
gttcgataaaagtgtgcagaccaaggttcagccctatgtagctacaacct

SEQ ID NO: 146391 - DNA, 50 bp, Homo sapiens
gcttggtactgagctcttcattgtcaggagcatggtagaatcaattaaac

SEQ ID NO: 146392 - DNA, 74 bp, Homo sapiens
ggctccctcgtgaagaacctgaaggacacactaggaaaaactggtctacttcctggattgttctttctagtcga

SEQ ID NO: 146393 - DNA, 73 bp, Homo sapiens
tctatgaacttatgaaaaccttcagttacaggaaccagtgacctttgaagatgtaacactgggttttaccccg

SEQ ID NO: 146394 - DNA, 100 bp, Homo sapiens
cctgtccatggctaatgctggtcctaacaccaacggctcccagttcttcatctgcaccataaagacagactggcgctgagcaacagtgtgtacaagggcg

SEQ ID NO: 146395 - DNA, 75 bp, Homo sapiens
gcattttccttcccaacgatgaatctctgaacatcatcataaatgcaatctttggcagccagacactacctaact

SEQ ID NO: 146396 - DNA, 75 bp, Homo sapiens
ccgtgtggacccgtaaaataaaatggggaaagacattcccggtcaggcatctctggtgtttgatgttgcattatt

SEQ ID NO: 146397 - DNA, 82 bp, Homo sapiens
aactcccatcagtttctgtatagtgtaaaagaagctgaaacctatcaacactcttcaaaatgcaatggaatgtaccacggac

SEQ ID NO: 146398 - DNA, 82 bp, Homo sapiens
cgacgagcgctgcactaacgcaggatccggctgccgaaggtcctcgccaggcagtgaaatcaactgtgcagaccatcactgt

SEQ ID NO: 146399 - DNA, 82 bp, Homo sapiens
gctcttcggcctagtgcgccagggcctcaagtgcgatgacagcacccaagaaaacctcatttggctcgctgaaggatgaaga

SEQ ID NO: 146400 - DNA, 97 bp, Homo sapiens
gcaactttgaggagacagtgcggttaatttggagtggcccctggagtcagtttcctacaccatccgaggccccacccagcacgagctacagcctcca

SEQ ID NO: 146401 - DNA, 100 bp, Homo sapiens
agtgtgttgtgaacgaagtcagaatttcctgtgttccctttgccgctcctggagttcactgcatggaaataaccagcctgcaagaactggcacactgtcg

SEQ ID NO: 146402 - DNA, 100 bp, Homo sapiens
aaatgctttatgaacagctacagtctaattctcttttcaacaacagacgtagtaatcggaaatttgtgaaggagcagaaacaagttcaagaagaaattag

SEQ ID NO: 146403 - DNA, 82 bp, Homo sapiens
ggcgaatggggctcacgtcgataagcctgatactgtgattgcaaatggagaagatacgacatcttctgaagaggaaaaggaa

SEQ ID NO: 146404 - DNA, 98 bp, Homo sapiens
tgtggatgtcggcgaagccgcgggcgagtctaagaaggccaccagctgtttcccacgccccatgactccccgagaccgacatgaagggcgcaaacaga

SEQ ID NO: 146405 - DNA, 83 bp, Homo sapiens
atccctcccctggtcactacagattgcatgatacaagaccaagaaaccagggtggttatgaccgctactcaggaggaaattac

SEQ ID NO: 146406 - DNA, 100 bp, Homo sapiens
cggagccatgggggacgctcccagccctgaagagaaactgcaccttatcacccggaacctgcaggtgtccttaagtttgctcgcttggtcaagtcctacg

SEQ ID NO: 146407 - DNA, 100 bp, Homo sapiens
cacctgcccggtgcccgaggaggcagccaagctcgtagcctgccactccgtgcgtttggaattggccgcttcactacagaggaggaagtggactacacag

SEQ ID NO: 146408 - DNA, 74 bp, Homo sapiens
ccaaggaggtgacccaacagggacaggccaagtcatcaaggcatgggacattggggtggctaccatgaagaaag

SEQ ID NO: 146409 - DNA, 90 bp, Homo sapiens
gacaagtccacagaagaccggatggagagcttctttctcagtgagacctgtaaatatttgtatctggattaataagaaaattccccgggg

SEQ ID NO: 146410 - DNA, 100 bp, Homo sapiens
gctcaggacagggctgaggaaccatgtctccatccccgaccgccctcttctgtcttgggcagctgcaatgactctccgcacggtattattgtcattgcaa

SEQ ID NO: 146411 - DNA, 75 bp, Homo sapiens
tgttgctttagtaaatttttatgctgactggctgaagggtatgtgattggcagctgtattaaacacattccaatc

SEQ ID NO: 146412 - DNA, 75 bp, Homo sapiens
tctggggccaagggacaatggtcaccgtctcttcaggagaactacgatgacccgcacaaaacccctgcctcccca

SEQ ID NO: 146413 - DNA, 100 bp, Homo sapiens
gaaggacacagctactactacatctcctgcggcgagagggctacaccgtgcaggtgaacgtgaacgactatctggatatttactgcccgcactacaacag

SEQ ID NO: 146414 - DNA, 82 bp, Homo sapiens
tggccgccccgagcggagcctggagctctctatcaatatcagctcacatcattgaaaagataattttgaagacatgttttgc

SEQ ID NO: 146415 - DNA, 90 bp, Homo sapiens
caaatatccagattttaagcagcatgttcagataaatctgaatggaagagtgagaggagaagaagatgattctttggccatcaaaccacc

SEQ ID NO: 146416 - DNA, 50 bp, Homo sapiens
ctataaccacctagtatcactgggcggaggtcactgagtcctccaatcag

SEQ ID NO: 146417 - DNA, 100 bp, Homo sapiens
cccgcgtcctagcaacaggcgggcgccgactgcggggggcagggtgctgcaggaaggagatggataaagcagatgtttattggggcattccttatcccag

SEQ ID NO: 146418 - DNA, 73 bp, Homo sapiens
gcaagagcaagatcaccgtgacatccgaggtgcctttctccaaaagaaagtttcctacactactgaggtttag

SEQ ID NO: 146419 - DNA, 98 bp, Homo sapiens
accccatctccggggacactcactttgacgatgaggagacctggacttttgggtcaaaagatgttgaaatgcttcaggccagtacatctaacccaatc

SEQ ID NO: 146420 - DNA, 83 bp, Homo sapiens
ctaaaaccttcctcaccgtgtactgcacttctccttgctgctgccacatgaagaaggacgtgtttgcttccccttccaccatg

SEQ ID NO: 146421 - DNA, 100 bp, Homo sapiens
gttacttcttcctcaacaccagcaccgcagatgttgtcaaggtggcctaccaggaggccaggggtgtcgccatgctgagatctgtatctgtggacctgaa

SEQ ID NO: 146422 - DNA, 79 bp, Homo sapiens
atttgcttttctggggagtcctggcggtttttattaaggctgttcatgtgaaagatgcagagaggtgttcataaagagc

SEQ ID NO: 146423 - DNA, 75 bp, Homo sapiens
accacagcacccatcctgactgtgccttaaagtcatgctttgctgactaatgttgaccagattgtccaggaaaca

SEQ ID NO: 146424 - DNA, 74 bp, Homo sapiens
gtgctaaaaagcaccaccaagatgtctctaaatgagcgtcaccaggagactaaagtccatcaaaaacatccaga

SEQ ID NO: 146425 - DNA, 75 bp, Homo sapiens
aagaaggtcagtgtgcttgcttggagatcaggacgcaaagaaatgcactcggtgatggaaagagagccactattc

SEQ ID NO: 146426 - DNA, 100 bp, Homo sapiens
tctgaagatccacatcccggagccggacctccggagcatggtcagccccgtcccctccccgacgggcaccatcagagctgtaggtaaaacttgcctactg

SEQ ID NO: 146427 - DNA, 75 bp, Homo sapiens
tccacccaaacttgctggtcactgggagggagacattagagaagcaagtattttctctctggaggcagaagatgt

SEQ ID NO: 146428 - DNA, 90 bp, Homo sapiens
catggacaagttttggtggcacgcagcctggggactctgcctcgtgccgctgagcctggcgcagatcgggcacattcactgaaatccccg

SEQ ID NO: 146429 - DNA, 100 bp, Homo sapiens
cgggacccccgggcagaggcgccgcggccgcccgccagctgagatctgtatctgtggacctgaatgttgatccctcgcttcagattgacatacctgatgc

SEQ ID NO: 146430 - DNA, 76 bp, Homo sapiens
tcaagcaatcctcccatctcagcctcctgagtagctaaggactacagagatgaccaagcgagacgtgcctggcttc

SEQ ID NO: 146431 - DNA, 77 bp, Homo sapiens
cagacacaggctgaggatcggcacgggagcatggcagccaacgtctcgggtgcccctgggcgctgggattgctctag

SEQ ID NO: 146432 - DNA, 86 bp, Homo sapiens
atgttttccttcagcaaggacaaaggggagattctcaagcttccaggtgctaccatatggagcctaaggataaagccaataccaaa

SEQ ID NO: 146433 - DNA, 83 bp, Homo sapiens
tgtcaatgtctatggtgttgtgaagttctttaagcccccatatctaagcaaaggaactggtgtggaccactacaacgaggtga

SEQ ID NO: 146434 - DNA, 82 bp, Homo sapiens
cttcaatgagtaaacatattcctgcaagaattggatccatgtaacgctgagctgactattttagggaggaatacacaaatat

SEQ ID NO: 146435 - DNA, 75 bp, Homo sapiens
atgcgcccagcggattctacattgcctccggagatgaaggatttgggggcagagcacttggcaggtcatgaaggg

SEQ ID NO: 146436 - DNA, 100 bp, Homo sapiens
aaggaaagaatgaagaggccctgcaaggatcacagaagaactgcagcttcctggggagcagtttcacctccacaggcatcgcttcatactcctcactgtc

SEQ ID NO: 146437 - DNA, 82 bp, Homo sapiens
gaaggatgagaagatccagaagcatcttcaggactccttggcagatctgaagagtatctaactatcaagttgaagaagatat

SEQ ID NO: 146438 - DNA, 98 bp, Homo sapiens
ggttctgcagcgctgtatcgtgtcgccggcagggaggcatagcgcctctctgatcttcctgcatggctcaggtgcactttacaggtccccgatgaacc

SEQ ID NO: 146439 - DNA, 100 bp, Homo sapiens
tacgagaccctccctgctgagatgcgcaaattcactccccagtacaaaggcagaatccagagaccacatttgaagtatatgttgaagtggcctatcccag

SEQ ID NO: 146440 - DNA, 90 bp, Homo sapiens
gaaaggattcgttacagccagagattgagcccccctccatgcgcctgaaggcccgacccagcagccctggcttttccgtgcttacctgca

SEQ ID NO: 146441 - DNA, 95 bp, Homo sapiens
ggaaatagtggcaggtgacagtctgcatgtgcagttttcagaatgtggccccgtcccagagcaccacccgagacatcaggagcccatcgtgggct

SEQ ID NO: 146442 - DNA, 100 bp, Homo sapiens
gggcggtggacacctatgatacaatctttgcaaaatacaattggccagatcgaaaggagtacatcgatgcccaccctgagaccatcgtcctggacccgct

SEQ ID NO: 146443 - DNA, 126 bp, Homo sapiens
ggagatgtcgaaccccgggacacgcaggaacggctccagcatcaagatccgtctgacagcaccatatgaaggcggagtatggaaagttagagtggacctacctgataaataccctttcaaatctcc

SEQ ID NO: 146444 - DNA, 90 bp, Homo sapiens
ctggggctgacaccttccgttctgagtggagtgacttgttgagtgacctccagaaagcaggtatgaaaatgaaagtcttcagaatggaag

SEQ ID NO: 146445 - DNA, 89 bp, Homo sapiens
gggcgagctgggcgacggcgccttcggcaaggtttacaagctttacagctgcagaaatcgcaccgtttgttgagattctgctaacaaac

SEQ ID NO: 146446 - DNA, 100 bp, Homo sapiens
cagaacaacccccacgccagctacagcgcccctccgattggtgctgaagacatggacggcttccaggcagacacggaggaggaggaagaggaggagggcg

SEQ ID NO: 146447 - DNA, 100 bp, Homo sapiens
cagggacatgatgaagcagctcatgtggctcagcagtcaccaggaggggcccaggagctcagttcctgagactggcccagacgctgcggcactatggcta

SEQ ID NO: 146448 - DNA, 75 bp, Homo sapiens
aagaagcggaggcttgttcgacccaacagcatcgttcctctttccaagaagatggaatttcactcttgttgccca

SEQ ID NO: 146449 - DNA, 75 bp, Homo sapiens
aggtcaattcagtgaagatatgatacccacagtgggcttcaacatgaggaagtactggagagacccagaagtgtt

SEQ ID NO: 146450 - DNA, 75 bp, Homo sapiens
tgatccagaagtccagagctgagaaggactgcctgtttgcagggccgattcacgattgcggccaagcaccacatc

SEQ ID NO: 146451 - DNA, 75 bp, Homo sapiens
atcttcaacctgccaaaaaagtctcaccatgcaaactcccccacagcaggtgatgctgtggagtcttcaaaaagc

SEQ ID NO: 146452 - DNA, 100 bp, Homo sapiens
tgatgtacaggaagtggaaagagagcaaggggaaggatcgggagtacacagacatcatccggaccgtgtttcttcgcctcgcctccctggtggtcctgct

SEQ ID NO: 146453 - DNA, 75 bp, Homo sapiens
cctctacaccgacaagatcaaatacccacggaaagagggtattgaaagtgccgagatcctgcaggctgtgccgtc

SEQ ID NO: 146454 - DNA, 100 bp, Homo sapiens
gtcaccatagaagcggatacttatttgcctgtggatgaaaccctgattcctacagtagtattattgattccacagaatacagccaacctccaggtttcag

SEQ ID NO: 146455 - DNA, 80 bp, Homo sapiens
ctcaagtgatcctctcgtctcagcctctcaaactgctgggattacaggttttgcactgattgcaaaaataaagtcctccg

SEQ ID NO: 146456 - DNA, 75 bp, Homo sapiens
cagccgcccgctggccgggagcggagcccctgtggaggactgattacggtgagcagcaacctcagctacgtcatc

SEQ ID NO: 146457 - DNA, 100 bp, Homo sapiens
aggtagcttatgtccaacaggatgctacagctcagcagctttgaagatactgctataatttgaaaatttgaaattagtgtttcagctgaaccatccgttc

SEQ ID NO: 146458 - DNA, 100 bp, Homo sapiens
gagaaagccccccagcatcaaggagacctgtcggccatggagcctaatgatagtaccagtaccgctgtggaggagcctgacagcttggaggtgttggtga

SEQ ID NO: 146459 - DNA, 50 bp, Homo sapiens
cgagtctcaaaggtgttcctggatttgaattggcagagggggtcgatttg

SEQ ID NO: 146460 - DNA, 50 bp, Homo sapiens
gtgatggggagagccatagcgacttaattcagtgcacaaatgagatgaat

SEQ ID NO: 146461 - DNA, 88 bp, Homo sapiens
tccagagctgaggactgcctgtttgcagaaacatgccaagggacaagtgttatttgacaaagtgtgtgaacacctcaatctcttggag

SEQ ID NO: 146462 - DNA, 50 bp, Homo sapiens
aacgaaccctggccacactctcagatggagtctcattctgtcgctcaagc

SEQ ID NO: 146463 - DNA, 110 bp, Homo sapiens
atatgatgattccgttggagtagaagtgtccagcgacagcttctgggagcttcagtatcagacacagcacagcagccatctgaagagcaaagcaagtctcttgaaaaacc

SEQ ID NO: 146464 - DNA, 108 bp, Homo sapiens
cgcagttccgacaaaggtcgcctttgctactaccgcgactggctgctgcggcgcgaggccagctttgctccaatggaggacaaactcaaccaggcacacctcgaggtc

SEQ ID NO: 146465 - DNA, 50 bp, Homo sapiens
gtggaacttggtcatggagaagtcggatcctgacctcccagccgatgtgc

SEQ ID NO: 146466 - DNA, 83 bp, Homo sapiens
cgtcaaccagctcaagaagatcatcaagcgcaagcacaccctaccgaattacaagatcagatcctgataacttaagtgactct

SEQ ID NO: 146467 - DNA, 90 bp, Homo sapiens
tctacaaccttcgatctcctgacgagtggcttctggcacagcagcttaattgaccggaacctcattgattattttgttcccttcctcccc

SEQ ID NO: 146468 - DNA, 111 bp, Homo sapiens
ggcgaggtggtcatcaaaatagctacaaaccatactaaattattccatttgcaacttatccccaacaggtggttgaagatggatatgaattttttgcaaagaggcagttgg

SEQ ID NO: 146469 - DNA, 97 bp, Homo sapiens
ggccggcccccgagagccgccgacatgaagaaagacgtgcggatcctgctggtgggagaacgtgtcatggagaaactccagctgggcccagagattc

SEQ ID NO: 146470 - DNA, 99 bp, Homo sapiens
gaagttactgccgcgccaccgagtccggaccggagactttggggcctaactagctgtcaattccatgccagtggataacaggaaccacaatgaaggaat

SEQ ID NO: 146471 - DNA, 95 bp, Homo sapiens
ccttcaatgtttggaaaagctatatggagataaatggaattcttttaccatcttattaattcactctgagatggagtttcactgtgtcagccagg

SEQ ID NO: 146472 - DNA, 80 bp, Homo sapiens
ctgcatctactcggccctcattctgcacgacgatgaggtgacagtcacgatgtgttcagagcaacattgttttgttgaca

SEQ ID NO: 146473 - DNA, 100 bp, Homo sapiens
gtagatacaaatttttggatgatgatggatccatttctcctattgaggagtcaacccaccaattaccctagttatgggcccatcatctcacctggactat

SEQ ID NO: 146474 - DNA, 101 bp, Homo sapiens
aagcagctacacaaagagggtcatctcttctattgtacctgcagatttcgccagaagtttgagtatcactactcctgaagagatgattgaaaaagccaaag

SEQ ID NO: 146475 - DNA, 122 bp, Homo sapiens
tgggagaatccgtccatgggaaaccttcggtggtgtacagatttttcacaagacttggacagtgggtgaatttgtaagtgatgtcctgctagttccagaaaagtgccagtttttccacaaag

SEQ ID NO: 146476 - DNA, 96 bp, Homo sapiens
ggtgttcaccgtcgagatggttttgaaagtcatcgcatttaagcctaaggaagggaaaaggccgaggcatcagcgtgtgaagaccgcaaagacgat

SEQ ID NO: 146477 - DNA, 75 bp, Homo sapiens
agtaccgcctccttcccagccgcgcggcttcctccagacctctcggcgcgggcttcagggatgacttcttagggg

SEQ ID NO: 146478 - DNA, 97 bp, Homo sapiens
atgccctgcagtacctgcagaaggtctctggagacatcttcagcagggatgttctgttcttgaaggactgtgtaggcccagaagtggagaaagcctg

SEQ ID NO: 146479 - DNA, 100 bp, Homo sapiens
gctggtgggcactcagcaccctctgcttaccacagccagtgagccccatgcacggttctatgcagctcagatagtgctaacattcgagtacctccattca

SEQ ID NO: 146480 - DNA, 101 bp, Homo sapiens
gagcctgttccagaactgctggaagctgaggttaatagtcctaggatggatctgactcttgctgaacttcaggaaatggcatctcgccagcagcaacagat

SEQ ID NO: 146481 - DNA, 51 bp, Homo sapiens
caggatttaaaaagaatgggtttgaaggcattcactcatacggcacaatat

SEQ ID NO: 146482 - DNA, 100 bp, Homo sapiens
tttaggagacataagaccgttggttctgacgaggcacagcgtttcttgcaagaatgggagacctgtcgcgaaatcgcctttcagaaattcctatagaagc

SEQ ID NO: 146483 - DNA, 90 bp, Homo sapiens
cggcagtgctgaggcggaacaggccgggcaccaaggcgcaggtttccaatacttatctacaggaatcgccatgaccccagctctgaggga

SEQ ID NO: 146484 - DNA, 126 bp, Homo sapiens
ctgatttcagactcagaagccgacgttcgagaggaagattcttacctctttgatctcgacaataaggccaccagcttgggctccccacggagggcagcaagtgggacttggggaacccggctgtca

SEQ ID NO: 146485 - DNA, 78 bp, Homo sapiens
aagggcaggtcgtccccgaccttctatgaggattgcccagctcaagaggaccattcttagtggcactggggaaatctt

SEQ ID NO: 146486 - DNA, 83 bp, Homo sapiens
gggcagttgcagtgttggagctaaagtagcacaggcggagtgcagcggaggcccctgccgctgccgtcatgccgttcccgttt

SEQ ID NO: 146487 - DNA, 96 bp, Homo sapiens
attttatcaaaggagcagggaagaaggaatcatcgaggcatgggggtccacactgcaatgtttttgtggaacatgatggagtcttgctctgttgcc

SEQ ID NO: 146488 - DNA, 143 bp, Homo sapiens
gagcacgtgggcacggaccaattcgggaacaaatactactacatcccgcagtacaagaactggagagggaggtaccttcttccaaacccggtggcgggacaggcctggccggcctctgcagagacgtccaacctcgtgcgcat

SEQ ID NO: 146489 - DNA, 90 bp, Homo sapiens
tgcgaatattctggcccaccaaaaccattgccaaaggatggatatgacttagtgcagttgatgcggcagttatatcatgaatgtacgctt

SEQ ID NO: 146490 - DNA, 98 bp, Homo sapiens
ggtgattgtgatgtttgcctggtctatagttggtcaagagcaatctgaatccaaatgcaaaggagtttgttcctggggtgaagtacggaaatatttga

SEQ ID NO: 146491 - DNA, 100 bp, Homo sapiens
ctgttcgcctgctgctgggcgcccggcggggccaacctctcccaggacgagtgtgaacatggctacgcctcttcattcccgtccatgccgagcccccgac

SEQ ID NO: 146492 - DNA, 75 bp, Homo sapiens
tgcaatgtgaagagtccttcaaaaatgccagaaatcaacgccaagcctgcagcacaaaactgtgatcttcatgtt

SEQ ID NO: 146493 - DNA, 100 bp, Homo sapiens
ttctctcgatcagggcatacatctttcttcgacaaaggaagaagctcattcacacagaagacccatttaatgatgaacatcaggagaggcaagaggtgga

SEQ ID NO: 146494 - DNA, 100 bp, Homo sapiens
tatggcttgaacattgaaatgcacaagcaggagtacgagacccaatctagtgcagaagccaaatttgtgaagcagctagaccaatgtgaaatgattcttc

SEQ ID NO: 146495 - DNA, 100 bp, Homo sapiens
agcagatgaagcttcgagtgatgaattcccaggagcaggtgggatgtgtgtgggctgaaattccgagctgcggttgtgcatgagaatacacccttcgtgg

SEQ ID NO: 146496 - DNA, 96 bp, Homo sapiens
aaagggacggtggtcacgcctgttcaaggggactcagaagaagatccttgacattgccaacatgctgggcttgtccaacacagtgatgcggctcat

SEQ ID NO: 146497 - DNA, 89 bp, Homo sapiens
cggacatggtcatgagctttgtgaacctggcatgatgccttcttctgtagagtgggcgctttgcagaatacgtgttgaatgaaatcact

SEQ ID NO: 146498 - DNA, 82 bp, Homo sapiens
ccggagccaagccagcgacccaccatggagacccgctacaacctgaagagtccgggatgattacatggaagccctggccagg

SEQ ID NO: 146499 - DNA, 82 bp, Homo sapiens
ctccaagacgtagaggaagtggagatcggcagagacaccttctggcccggccacgcccagatttcttctaccgctgcttccc

SEQ ID NO: 146500 - DNA, 90 bp, Homo sapiens
ggagaatcttcagccagactttaatgaagactatctagtgcgacgtactgtaagacgatattactttaatcatcttcacatcagtattta

SEQ ID NO: 146501 - DNA, 100 bp, Homo sapiens
gccagtacaacagccacaaggggtcttcctgtggccctcaaacaaaaaatcactgcattacatcagcaggaaaaggggaagatagtgatgtactcagtat

SEQ ID NO: 146502 - DNA, 75 bp, Homo sapiens
ggctccgccaagaggcgccgcaggagccaaagaagcctaaagccccagacaatccatttcatggcattgtttcca

SEQ ID NO: 146503 - DNA, 79 bp, Homo sapiens
catggaagaaatgatgatggaaatgaagtataataccaagaaagccccacttggctcggacatcatcatgcagctggac

SEQ ID NO: 146504 - DNA, 50 bp, Homo sapiens
gcctgtgcacatcctcgctgtcagatccagacatttaatgtggatgcacc

SEQ ID NO: 146505 - DNA, 136 bp, Homo sapiens
gtcactagccgcgggaccatcaaagtcatcgacggcacctcgggggccacactgcaggcctccgcgctcagtgatctcagtggttcaatagcatccccagatgtcaaattaaatcttggtggagattttatcaaag

SEQ ID NO: 146506 - DNA, 75 bp, Homo sapiens
tccgggtgctgcagggtgtccggcactggcctgtgtttgtggaggtgaaagaccttttgacattggtgccgcccc

SEQ ID NO: 146507 - DNA, 82 bp, Homo sapiens
gcgacaagccgctggcagccgcggatctcaccgccgctcaggcctaaattatacagatctgtgattgaagatgtcattaatg

SEQ ID NO: 146508 - DNA, 75 bp, Homo sapiens
tgacatttaattttagggtcctttatatagaagggagagtaggtctgtccacgttctctgtgggttcattgccgg

SEQ ID NO: 146509 - DNA, 76 bp, Homo sapiens
ggagcccgctcacttttacctgtttggattaatatgtctctgttcaggtcatgcttcaccccttcctccatctgct

SEQ ID NO: 146510 - DNA, 75 bp, Homo sapiens
catccactggacctaaaatatgaccctgatccagattatctttctcaaggaatagatctttctggaatagaagtg

SEQ ID NO: 146511 - DNA, 82 bp, Homo sapiens
atccccccgaaaggaccccccagcacttcaaatgcttcaccttcagaaggcgcaccactagcaggaagttatggatgtactc

SEQ ID NO: 146512 - DNA, 100 bp, Homo sapiens
ggaatgtgcaagggtttgtcataaaggtcatgattgcaagagctaaattgaagaaggagcgagcgcagcttttggtcaaccccaaaaaaataataaagaa

SEQ ID NO: 146513 - DNA, 100 bp, Homo sapiens
gcctcccgggctccgggaaaactacactggccaggggacggcaaaacagaacagaaaggcggagataaaaagaggggtgttaaaagaccacgagaagatc

SEQ ID NO: 146514 - DNA, 90 bp, Homo sapiens
cggctgtcttgaatcctttctacaaggagtggctgcaagctttcttcctggtggcagatgacatcatggattcatcccttacccgccggg

SEQ ID NO: 146515 - DNA, 90 bp, Homo sapiens
attagatttctcaacaactgaaactcaaggaaaagattttacatttgtgatgcctgaaaacttcatgcctcctgttcccatcacatcacc

SEQ ID NO: 146516 - DNA, 100 bp, Homo sapiens
aagtgaaggcacagacgcacgggacaggagagcctgggcaagactggagaggcttcagggatgacttcttagggggcaggggaggtagtcgcccaggcga

SEQ ID NO: 146517 - DNA, 94 bp, Homo sapiens
cttgggacccaccgctgccctcagctccgagtccagggcgagtttccaacatggctagatccatcagaaactgaagccgtggagaacgctctcg

SEQ ID NO: 146518 - DNA, 90 bp, Homo sapiens
aaagcagccgtcccctctgcagcctctctgacaagtggaaacccagcgtttgctggcagaaccagttcctggcatcaaagccgaaccaga

SEQ ID NO: 146519 - DNA, 100 bp, Homo sapiens
cgacaggttgccctgagacatcttattcacttccttaaggaaataggggatcaaaagttgcttttagacctcttcagaaggccccctggtaaggccagcc

SEQ ID NO: 146520 - DNA, 50 bp, Homo sapiens
cgcgagtgaggaaaggaggtactgtaggcatccttctttaaaagagaaat

SEQ ID NO: 146521 - DNA, 50 bp, Homo sapiens
ccatgtggcacctcgcatgttcaaagctatgagatcaccttcagtttact

SEQ ID NO: 146522 - DNA, 83 bp, Homo sapiens
cagatggccagtcacgagaacccaggctgaaggtgatgtggccgccctcaaccgacgcatccagctcgttgaggaggagttgg

SEQ ID NO: 146523 - DNA, 75 bp, Homo sapiens
accctgagagctttattaccagacatgatctttcagatgcctgaggaaacccagacccaagaccaaccgatggag

SEQ ID NO: 146524 - DNA, 51 bp, Homo sapiens
ccgagcccgagcgccccagcccggatgaagactggcccatttgcagagcac

SEQ ID NO: 146525 - DNA, 80 bp, Homo sapiens
acgaagaagaggaagaaggtggggaggaagaggaggaggaagaagaaggtgatggtcaggagttcaagaccagcctggcc

SEQ ID NO: 146526 - DNA, 75 bp, Homo sapiens
cgagagtttgaaagtgcgattgtggaagctgctcgggatgaaaactttcggaagagaaagttgcctgtggtaagt

SEQ ID NO: 146527 - DNA, 75 bp, Homo sapiens
tgcgcttctacccagtggccttcttttgctgctggggcccaggtcattcccaaaagcaagttcgtcttggtgaag

SEQ ID NO: 146528 - DNA, 75 bp, Homo sapiens
ggatcatgtctgcgagccaggattcccgccggcacagtcttcactaccgtagaagaccttggctccaagatactc

SEQ ID NO: 146529 - DNA, 100 bp, Homo sapiens
cacctgtcagccttctaccccatgagaaagaccagtgcacaagggtctggatccctgaccctgatgaggtatggcgctcagctgagttaaccaaggacta

SEQ ID NO: 146530 - DNA, 90 bp, Homo sapiens
gctgagggaaaagcgaggcaaggcaggcgggccccttcacagatgtagtcactacaaatcttaaattgcgaaatccatcggatagaaaag

SEQ ID NO: 146531 - DNA, 100 bp, Homo sapiens
cgaaaagagccctggaatgtgaagagacaggaggcagcagacggacatccaggtggaaccgtcccaaaatgtcccttgctcagaagaaggatcgggtagc

SEQ ID NO: 146532 - DNA, 50 bp, Homo sapiens
gggatccttcacccgtgtctgatgaggacggggacttggttgccttttcc

SEQ ID NO: 146533 - DNA, 76 bp, Homo sapiens
tggcattgacatttaattttagggtcctttatatagaagggagagtagtactcccctgccctcaacaagatgtttt

SEQ ID NO: 146534 - DNA, 98 bp, Homo sapiens
tgaggagcagggaagcatggctattgtggatgtaaaagccatgttcaagccttcatctcctcgtcctccaggcagcacaagccattgtggaatctcca

SEQ ID NO: 146535 - DNA, 75 bp, Homo sapiens
ggaaaatagcctttgccatcactgccattaagatccagtttgctgaccagaagcaagaattcaacaaacgtccca

SEQ ID NO: 146536 - DNA, 87 bp, Homo sapiens
aatctatggcttcccttccgttttcgcgtggttcttttgcaagcaccttgcagagtgaagtcaagcccatcctagagaagctgaccc

SEQ ID NO: 146537 - DNA, 76 bp, Homo sapiens
ccgagagcgcgaatatcgtcatcgttagaagcctcccgcgacgatgcccctcaacgttagcttcaccaacaggaac

SEQ ID NO: 146538 - DNA, 98 bp, Homo sapiens
gttttgacacaagaacagttggccaatactggtgcccaagcctggattaaaaaggtgactacggcacagaggagagttactgagtgcctctggggagg

SEQ ID NO: 146539 - DNA, 136 bp, Homo sapiens
gcgaagtccccggagaactctaccctggaggagattctggggcagtatcaacggagtctccgggatttgatggtagagtggtggcaaagcttccttttacccctctttcttacatccaaggactgtctcatcgaaa

SEQ ID NO: 146540 - DNA, 90 bp, Homo sapiens
gtcacctacccccagcaccacctccagcccctgcgcctcggttgaaatcacaaagattagacacctttttagataggtgttcttcagcac

SEQ ID NO: 146541 - DNA, 82 bp, Homo sapiens
cccgccgcgcggagcgccccttcgcgtcccctgcaccatgagctggggcaccgagctctggaaaaagatgttgctggtccat

SEQ ID NO: 146542 - DNA, 90 bp, Homo sapiens
gaagacttgaggcgaatggccgaatctctccgctgtaccgatgggagatgtaccaatggatggtatctctgttgctgatattggagcagc

SEQ ID NO: 146543 - DNA, 51 bp, Homo sapiens
cggggaagggggcggtgtccgcagagcagtgctgttcctttgggaaccacg

SEQ ID NO: 146544 - DNA, 101 bp, Homo sapiens
acaacatcacacccctgcgcagggccacagtggaatgtgtgaaagatcagtactgggctttctctgacatccagacagggcgtgtgctcaccaaggtgaca

SEQ ID NO: 146545 - DNA, 100 bp, Homo sapiens
ctctcgcgttagtgagaaccagagtgctcagctatcctactctgtggagtcggagtctagccagtcagaggcgtctgtccggagggaggaatcacccatg

SEQ ID NO: 146546 - DNA, 51 bp, Homo sapiens
gaacaaggaagcggagaggcaagaggtctggctctgggagaggagtggaca

SEQ ID NO: 146547 - DNA, 98 bp, Homo sapiens
cctgcctctcaataccttgggcccagtcatgaagatggaacctctgaataacctccagctgctggaacccaatgtgaatattggactggcggagcctt

SEQ ID NO: 146548 - DNA, 89 bp, Homo sapiens
gactcctgaagacacacctgcccctggctctgctcccccagactctgttggatcagaaggtcaagggaaatgcaataccttatttccag

SEQ ID NO: 146549 - DNA, 100 bp, Homo sapiens
ttgagcctgtgaaggacactgacattcagtcaccttcaggccattcagaggaggaaagagaggggaatatgaagtcagccaagccccaagtgaaccacag

SEQ ID NO: 146550 - DNA, 88 bp, Homo sapiens
gtccaaagttcttccagtcctcctaggcatcttattgatcctccagtcgagtggtcctttggcgtgctcctctgggagctgatgacaa

SEQ ID NO: 146551 - DNA, 74 bp, Homo sapiens
gttaaggattccaagtaactcttatttgatttcaacgacaagattttgaatgagcccctcaagcactctgactt

SEQ ID NO: 146552 - DNA, 82 bp, Homo sapiens
ctcttacgtctgcggaagtgcagctgcctcagttcttagcgcagaccttcacggcatggtgcaactcccacctgcggaaggc

SEQ ID NO: 146553 - DNA, 75 bp, Homo sapiens
ttacacttgtcaacttcctcttcagtcatcagtgaagtgctctctggcgtggtggtcatatcgagtaaggattca

SEQ ID NO: 146554 - DNA, 100 bp, Homo sapiens
tgtttttcctgaagtgctacttaccgaaattcatctgtcacctggaaaatttgaggcgcatattaaatttcctattgactacccctattcaccacctacc

SEQ ID NO: 146555 - DNA, 144 bp, Homo sapiens
cggcgccccgcgcctgccgctgccctacggcttctccgccatgcaaggctggcgcgtctccatggaggactgaaactcagactacaggtgcagaaaacaaagctaaaaagcttacattgcctctatttggtgccatgaaaggag

SEQ ID NO: 146556 - DNA, 100 bp, Homo sapiens
ttttggtttaatatctgattgggacaacattcagacccatttccagtcatgaggattgaggaatgatttgaaagcagccttggataagattgatcagcag

SEQ ID NO: 146557 - DNA, 98 bp, Homo sapiens
ggcgacagggccgattccggagtgggacagagcgggatgccaccagcttgtccaaagggaagttccaggagctcctggtgggcatcgttgtggagaat

SEQ ID NO: 146558 - DNA, 129 bp, Homo sapiens
cgactccgccgcgatggtgacccggttcctgggcccacgctaccgggagctggtcaagaactggctgcaagatcaaggccctgcgggccaagacaaacacctacatcaagaccccagtgcggggcgagg

SEQ ID NO: 146559 - DNA, 100 bp, Homo sapiens
gcaggaatgctgcccgcctttgcttcatctacagtcaggatgctggatgttcatggagtgagggacagatatggcttttctaaagactgctttggaaatg

SEQ ID NO: 146560 - DNA, 98 bp, Homo sapiens
gagcaaccgccaagcttggtgggagtcaagatgcggttcatgctattattcagccggcagggaaaactgcggctgcaaaaatggtacctggccacttc

SEQ ID NO: 146561 - DNA, 58 bp, Homo sapiens
ccgaataccaagctcggatccctgaatttgatccagataccagctgacagtcccacag

SEQ ID NO: 146562 - DNA, 90 bp, Homo sapiens
tgctgccattagggcagaataatatgacagatacctagcatctagcaaaataatggcagctgcttaccttgaccccaacttgaatcacac

SEQ ID NO: 146563 - DNA, 111 bp, Homo sapiens
ccttccctcgccctaatcccccaacgaggaaggaaggagcagttggttcaatctctggacttcacatgtatcattctccgagcctgatattccgtcctcaaaaagtactga

SEQ ID NO: 146564 - DNA, 100 bp, Homo sapiens
tagtaagaaaacaaaaactgatgaccaagagaatgtgtcagccgatgcaccgagtccagcccaggaaaatggagagaaggagcatttctaccagaggcag

SEQ ID NO: 146565 - DNA, 75 bp, Homo sapiens
agcacgtttgcagcggaaattcaggaaaccatcacagcactcagagagcagcccagcccgtgttgtactggtgtg

SEQ ID NO: 146566 - DNA, 75 bp, Homo sapiens
tccgtgcgtgagcgccggcaggcaccttgcgcgcgcggttttctgaaaatggtaaccagaagaatttgagaattc

SEQ ID NO: 146567 - DNA, 82 bp, Homo sapiens
ccgaaagtggctctacaaacccaagggaaagcaggcaggatgggagagtcgccgatagaaccacctcttccctgcctcctgg

SEQ ID NO: 146568 - DNA, 100 bp, Homo sapiens
tagactgttggtgcatgctacaaaaagaggacagtcattttgtttactcattcagccctgttgcaggtcccaataaactcttcataaggttgacagaagc

SEQ ID NO: 146569 - DNA, 89 bp, Homo sapiens
gacttgcatcaggagtagcaaagtatgtagagaagcccttgaagctggtcctcaaagtaggagggaacgaagtcaccgaactctccacg

SEQ ID NO: 146570 - DNA, 75 bp, Homo sapiens
ggacaacctgtcatcactgacttctgaaaagtcaactgcaacttggcctcttgatccaccaaaggatgagaaaca

SEQ ID NO: 146571 - DNA, 100 bp, Homo sapiens
gccctatttctacctgagcccgctgcagctctccgtgagcaacctgcaggatgacactcctgtccaggacactaaaatgtgaagaacagctcattgtgcc

SEQ ID NO: 146572 - DNA, 90 bp, Homo sapiens
aagatgtgcctgcttctccttctgccatgattgtaagtttcctgaggcctccccagccgtgcaaacctatctcattcgtcggttcggatc

SEQ ID NO: 146573 - DNA, 100 bp, Homo sapiens
agttccattctcagttcttcctcccagagctgcagcggcgcctggacgactgagacgagttgtactgctgtcacaggaaatggacgctggattacaagca

SEQ ID NO: 146574 - DNA, 101 bp, Homo sapiens
ctcctggcgctcgtcctccacccctggaatccctgtctgggtgcggactcggagaagccctcgagcatccccacagggtgcatgtagtctttggactggtt

SEQ ID NO: 146575 - DNA, 100 bp, Homo sapiens
gtgcctggagaggacatggggaaggccgtgacttggcgagcacgaccctccccgggtaccctccacacgtcccccccgctggacagggcagctactcagc

SEQ ID NO: 146576 - DNA, 100 bp, Homo sapiens
ctgtgaagagaaagcaaagtcctattccaacagtcatgaggtgttacacataatattgcattacttcgagaggtgataatcaactcacgctttgtaaaag

SEQ ID NO: 146577 - DNA, 80 bp, Homo sapiens
gcttcagtgtaacgctcaggcgatgaccaccatacaacacacagcccaagacctgcaaaatttacagagcgccctcggcc

SEQ ID NO: 146578 - DNA, 83 bp, Homo sapiens
ccacagtccttctgcagtccctcgtccagccacccccaggtcccgcagcccccggaagccaatagactccctcagggactctc

SEQ ID NO: 146579 - DNA, 75 bp, Homo sapiens
gttaatatcattaagattctgcttaatgctggggcagaaattaattcaagatattactgcaatgtctgtgactgt

SEQ ID NO: 146580 - DNA, 75 bp, Homo sapiens
gccaaaaatgtgcatactcacagagttagagagagggatggtggattcaagttcgaaatatggcaactttgaaag

SEQ ID NO: 146581 - DNA, 76 bp, Homo sapiens
atgatgccccacttggtgaatggagatgcagctcagcaggtaagaatgattgatgttggctgatattggagtgctc

SEQ ID NO: 146582 - DNA, 100 bp, Homo sapiens
ccacattcaggggaaccgcctcaccgttctgcccccagaactaggtgaatctggattgggaaagtcgacattaatcaactcattattcctcacagatttg

SEQ ID NO: 146583 - DNA, 83 bp, Homo sapiens
cggagaccccgcgccgacggctgctcaaacatcagggtacgcccctgtgggcatcatgttcctggtggctggcaagatcgtgg

SEQ ID NO: 146584 - DNA, 98 bp, Homo sapiens
agagtgttagagacggtctggaaaagcggtacattgcttcttatttagcactcacaggtgagaaaactgaggtttcaagtgtttagtaacttttccat

SEQ ID NO: 146585 - DNA, 100 bp, Homo sapiens
cgggtggagtgtaggtcatatcgccgcgaatgtatgacaacatgtccacaatggtgtacataaaggaagacaagttggagaagcttacacaggatgaaat

SEQ ID NO: 146586 - DNA, 82 bp, Homo sapiens
atgccatgaaagtcctaaggaagatttataccatggacacagagatcccctaaggtcctggcccaggcctgcccaaagagaa

SEQ ID NO: 146587 - DNA, 90 bp, Homo sapiens
tatgagaaggtgcttgtggaagggggcccggctccctaggcgtcccatctcgcgcacataaaatccaaatcccacttgaaccaactgaag

SEQ ID NO: 146588 - DNA, 98 bp, Homo sapiens
gtcatcgacagctgcaaggaggccgtcaccttcaaggccgtcagacaagcaatggtacaacagctccatgaacgtgatctgcacctggttgacggacc

SEQ ID NO: 146589 - DNA, 100 bp, Homo sapiens
tgtgcgccaccattgcagccaaagatcttggcatatacagaagggctgcatggaaaatggctgttcacagagatacgatcaatcttttctcgtcgttatc

SEQ ID NO: 146590 - DNA, 75 bp, Homo sapiens
cggccggcggcggcggcggcggcggcggcggcgcagggcttaaaagacaaccttcttgcttctgggacatccagc

SEQ ID NO: 146591 - DNA, 130 bp, Homo sapiens
gccgccgccgccgccgctgccgctgccgctgccgcacctccgtagctgactcgatcgcccaggaccacaccgcagcgtaactgcaggcctctcagcgaaaaagggggaaagcaaagacccgggtgtgcat

SEQ ID NO: 146592 - DNA, 109 bp, Homo sapiens
ctgaacttagctcgacggggctgaccgctctggcccagggtggtactccaaagattcaggtttactcacgtcatccagcagagaatggaaagtcaaatttcctgaattg

SEQ ID NO: 146593 - DNA, 75 bp, Homo sapiens
gattttggtttaatatctgattgggacaacattcagacccatttccagtcatgatggattctgctgcgaaccgga

SEQ ID NO: 146594 - DNA, 100 bp, Homo sapiens
gggagcctagaatgcatcagtgcccttgtggcgaatggggctcacgtcgaggcactgaaggctttgtggaactacctgagccagaagggagtcaatagcg

SEQ ID NO: 146595 - DNA, 74 bp, Homo sapiens
caaatgcaactagccaatgccatgatgcctggtgccccattacaacccgtggcaaatcctgatcctaactgttg

SEQ ID NO: 146596 - DNA, 83 bp, Homo sapiens
agaacagttaatcctcaatttaagcctgatctaacccctagaaacagatcattgctgaaggtgccaatgggccaacaactcca

SEQ ID NO: 146597 - DNA, 100 bp, Homo sapiens
aataaagtctcccttaaaatgcaccctccttccacctggccaggaatcaggaggagatgttaaagtaacccatcttgcaggacgacattgaagattggtc

SEQ ID NO: 146598 - DNA, 107 bp, Homo sapiens
caaggcttcaccaagagtcttaatgccttcaacgtaggcgatgactggaggcaagtgaggcctatctggttggcctttttgaagacaccaacctgtgtgctatccat

SEQ ID NO: 146599 - DNA, 82 bp, Homo sapiens
agacacccgcggcgaaggcggctcgggctcgggctccggaaggagatgattcactacttataactgtggtacctgtcaaatc

SEQ ID NO: 146600 - DNA, 82 bp, Homo sapiens
ggaaccctggtcaccgtctcctcaggtgcagaccatgaattacgtggggcagttagccggccaggtgtttgtcaccgtgaag

SEQ ID NO: 146601 - DNA, 100 bp, Homo sapiens
gagttgctggtgatccgcaattacggccccgaggtgtgggaagacatcaatatcttcaaccaatcttgtcactcctccagcagttgtcagtagtcaacct

SEQ ID NO: 146602 - DNA, 90 bp, Homo sapiens
gggaagttcctttttgaagtagttccagatatcattctctgctggaactgggtgagaagcgtaaaggcatgttggagaagagttgcaaga

SEQ ID NO: 146603 - DNA, 100 bp, Homo sapiens
gatttcctgcttctccttttcatgagtgttcctgtggtctctgcacctcctttctgatgaggatgggacagaagaggataacagtcgtgttgaacctgtt

SEQ ID NO: 146604 - DNA, 74 bp, Homo sapiens
ccctcacctttgccaggaactggggggccgactatatcctgacttggcagtggatcaacccagtggacttccag

SEQ ID NO: 146605 - DNA, 83 bp, Homo sapiens
ccgctctgggatcccggccaccagcaattgtccggatatccgacatgaagccagtgacttcccatgtagagtggccaagcttc

SEQ ID NO: 146606 - DNA, 75 bp, Homo sapiens
gaagactttttcagctactatcgtcattgaaactttcctctgtgacgagggtgcaggtatctctggggactacat

SEQ ID NO: 146607 - DNA, 75 bp, Homo sapiens
ctggatgttggtagaaaaagcaagagtttgttatatagcatggccacagatgtctttaattccaaaaacctggcc

SEQ ID NO: 146608 - DNA, 100 bp, Homo sapiens
ttggaaccaggtgatggaccaattgcagtgattgtgtgtcctaccagggagctttgccagcagatacagaaggtggtcatggcactaggagactacatgg

SEQ ID NO: 146609 - DNA, 99 bp, Homo sapiens
aagagaagacctcagatgtgaagtccattaaagtatctccagatgaaatggccactgcttgatgtccaggcagggagcctccagagtagacaagccctc

SEQ ID NO: 146610 - DNA, 50 bp, Homo sapiens
caagagaagccttgaggatgagccaagctacgtggtgaacatgggtctga

SEQ ID NO: 146611 - DNA, 89 bp, Homo sapiens
gagaagggtcacacacggacggccttcgtcaagatggttggacaccacgtcgccttcctggaagcagacgtgcttcaggctgagcggga

SEQ ID NO: 146612 - DNA, 75 bp, Homo sapiens
agtcctggctgaagccacggctgggacaggaagccacagtttctctggaaacccccctggtaagtgtggaggagg

SEQ ID NO: 146613 - DNA, 111 bp, Homo sapiens
aaaagcacaaggattctcgctgtgacagagacaacaccgagtatgagaaatttttgcctttatgacgacagcttgttatggttgcagtttgggtctggctttacgaagatg

SEQ ID NO: 146614 - DNA, 90 bp, Homo sapiens
cttaaaagcaaaatctgctagcatcagtactatactggcaattgctggagaagattttgcaattgttgcttctgatactcgattgagtga

SEQ ID NO: 146615 - DNA, 100 bp, Homo sapiens
ctaagactcacatctacaagcaatgaactggtttgatgaacttgtgaaaaaattcaaagtcgaatatcatgctggtggctctacccagaattcaattaaa

SEQ ID NO: 146616 - DNA, 50 bp, Homo sapiens
gacagaatcaccagcactggctgaagctcacggataaaacgttctcccaa

SEQ ID NO: 146617 - DNA, 100 bp, Homo sapiens
gcgacacaattgtctgtgacagtaacagtacttgggatcccccagttccaaagtgtcttaaaggtggataatattaatgcagctgtgatggatttgaaaa

SEQ ID NO: 146618 - DNA, 73 bp, Homo sapiens
tttattccagcaatctacagtcctggcctgaggaaggctctccctgcatgtcctatccaggccacctgtgagg

SEQ ID NO: 146619 - DNA, 100 bp, Homo sapiens
cctcgatcgaggacgacttcaactatggcagcagcgtggcctccgccaccgtgcacatccgaatgggtatcagacttggtgataattctgaattatgacc

SEQ ID NO: 146620 - DNA, 82 bp, Homo sapiens
ctgttcctggaggaatccgagaagagcagagcggagggagccccagacacggtggaacacctgcagcaggagactgctgctc

SEQ ID NO: 146621 - DNA, 83 bp, Homo sapiens
ctcggttttcccaccacctccaaatcatgcaagacacaggggctgggttacgacccctacaaccctgagctgcccaagccccc

SEQ ID NO: 146622 - DNA, 100 bp, Homo sapiens
tcttcgccttcttgatctcactcatcttcatctatgagaccttctacaagctggtgaaggtgacccaggcctctctccggtctcacattggagttgtgcc

SEQ ID NO: 146623 - DNA, 75 bp, Homo sapiens
catacttggaatgaatccttctagagacgtccacgaacatccagtcatggataaaaatgagctggttcagaaggc

SEQ ID NO: 146624 - DNA, 100 bp, Homo sapiens
acctgaaactgaattggagactgttaggcccagaagaacaattagggtgacgtgtgcattgagtaaacctgtgaaagttgtgtagatttactgtttgtga

SEQ ID NO: 146625 - DNA, 89 bp, Homo sapiens
atgaaggagaagcagagcaccaaggactggagtccagagttgccaccagatgggatattcaaaaatacgccagagaggcctacaacctg

SEQ ID NO: 146626 - DNA, 100 bp, Homo sapiens
ctttcccatcaggtttcctgatgtgagcagacttgtgtatgcggatacctgcttcagtaccatcaagttaaaagcagaagatgcttctggtagagagcat

SEQ ID NO: 146627 - DNA, 76 bp, Homo sapiens
ctggagcctgacgagctggcgggtcagcccaaggccaaccccactgtcactctgttcccgccctcctctgaggagc

SEQ ID NO: 146628 - DNA, 50 bp, Homo sapiens
accacgtacaagtatgagatggcaccatcatgggagcagcattgctggag

SEQ ID NO: 146629 - DNA, 99 bp, Homo sapiens
ccgctgccgcccagcacgtccaggctttgaagacaagattcccaaaaggagattctctgagatgcaaaatgaaagacgagaacaggcacagcggactgt

SEQ ID NO: 146630 - DNA, 95 bp, Homo sapiens
tggcatggaaaccagagtctccactctgggaaaaaattagagacaatgaaaacagagttcctacatgtgaagagagctgaactagagaaacatgg

SEQ ID NO: 146631 - DNA, 50 bp, Homo sapiens
aaaggaactcctcaagaaccacgctgtggaatattccctgggcttttgag

SEQ ID NO: 146632 - DNA, 100 bp, Homo sapiens
gcccttggagtgaggcgagcagcacagagacggctgaaagctgagctaggaattcccttggaagaggaaacattggcaaatttggagcgacagatctatg

SEQ ID NO: 146633 - DNA, 100 bp, Homo sapiens
gaactttcacggacaacctcagaggacaacgaagtgttcggtcagggccctttgaagtacgagcagaccttgaggagtccatggaatttgtggatcccgg

SEQ ID NO: 146634 - DNA, 98 bp, Homo sapiens
actggaagcgctgtgacggccaccaagattgccaggatggccgggacgaggccaattgccattatgtttgagaccttcaacaccccggccatgtacgt

SEQ ID NO: 146635 - DNA, 83 bp, Homo sapiens
ggctccttcaacccgtggctgatagctgaaaggactggcattgcggactgacctccagggagaggcccagatctgatctgcag

SEQ ID NO: 146636 - DNA, 101 bp, Homo sapiens
cttagcaggaaagggtgcctaaggctgaaggtgatgtggccgccctcaaccgacgcatccagctcgttgaggaggagttggacagggctcaggaacgactg

SEQ ID NO: 146637 - DNA, 100 bp, Homo sapiens
ctgaagtatccagcgctcattgggaatttagttaagttaagtgggcagaccaacatccacctcagcaaaaacttcttcctgacgaatcgcgccagggagc

SEQ ID NO: 146638 - DNA, 75 bp, Homo sapiens
ggacctcgaatgtgggaccccagcccctctccagctcgaaatcaggaatgtttgctgggggattgaaggagatgg

SEQ ID NO: 146639 - DNA, 100 bp, Homo sapiens
gaacccaacagagatctcttctgttctccactgctaggtgatgcagaagatggggaagaatatgatgacccttttgctgggcctccagacactatttcat

SEQ ID NO: 146640 - DNA, 90 bp, Homo sapiens
aagcagattacttccatcagtattgagccaggagttgaggtgatgtcagagtttaataacaacttccggcagcagatggagaattacccg

SEQ ID NO: 146641 - DNA, 100 bp, Homo sapiens
acccgcgacctcggtacctcggaccagctctgtaaaagccccgcctctgccttcggatagtgttctaagaacggaagcatctgggctggatggaatttag

SEQ ID NO: 146642 - DNA, 88 bp, Homo sapiens
actggtcagatgaacccatcaaagagtgcggtacaccaggggttggaaaaaccacactaggcaaagaacttgcgtcaaaatcaggact

SEQ ID NO: 146643 - DNA, 100 bp, Homo sapiens
tggacagtacatctgtggacaaagcagtacctgaaacagaagatgtgcagggactatgctgagaaggaaaataccatagcaaaagctctggaagatctga

SEQ ID NO: 146644 - DNA, 73 bp, Homo sapiens
caggcgagattgcctgacccaggcctgctcggccctcacaggctaccaagatgaatgaactaatggagaaata

SEQ ID NO: 146645 - DNA, 80 bp, Homo sapiens
caggagcgacgtcaccgccatggcaggcatcaaaggaacatacattgatagggtcagcaaattcccaagatatccaactg

SEQ ID NO: 146646 - DNA, 125 bp, Homo sapiens
tgctaccaggacctacggcaccagtggcctggacaacagacctctgtttggggagacgtccgccaagctttctcctgtgcttctggagagtatctagaaatgaagaaccaggtatgcagtaagtg

SEQ ID NO: 146647 - DNA, 85 bp, Homo sapiens
tggtcgatgaagaggatgatgtttttggtgaaggttgcataccctgtcctgagggcgcggcacggagtgcatgcgggccgctgcc

SEQ ID NO: 146648 - DNA, 139 bp, Homo sapiens
ggctgactggaagtctcgggaaatgaagacgagacagcgggcggtggccctgtatttcatcgataagtcggttcaggccctgatcaaagacttccaggggaccccgactttcacctacaaagcggcccatatcttcttc

SEQ ID NO: 146649 - DNA, 138 bp, Homo sapiens
cgaacgtacagctgtatccactgcagagcacacctggccaatcatgacgagctcatctccaagcatcctaatgtcctatgatcacgtggaactcacattcaatgacatgaagaacgtgccagaagccttcaaagggac

SEQ ID NO: 146650 - DNA, 98 bp, Homo sapiens
cactgaggaggcggcggccgacggtggcggcgggatgcagaagaagctcattcacacagaagacccatttaatgatgaacatcaggagaggcaagagg

SEQ ID NO: 146651 - DNA, 75 bp, Homo sapiens
caagattgtccccattgccatccaggctactgcagcactggggtgtcagttgttggtccgacccagaacgcttca

SEQ ID NO: 146652 - DNA, 50 bp, Homo sapiens
cgggcttacgccccgccgacaggtggctttcttcctccagaagaaataaa

SEQ ID NO: 146653 - DNA, 100 bp, Homo sapiens
ccggagacgagaccagaggccgaactcgggttctgacaagatggccgggctgccccgcaggatcatcaaggcgatcagtgggtgaccgcggctgcgaggg

SEQ ID NO: 146654 - DNA, 49 bp, Homo sapiens
ctgtgctgcgcggcccccgcgcatggtgctggagaatctggtaaaagca

SEQ ID NO: 146655 - DNA, 82 bp, Homo sapiens
ggcgtgccccaccatgtcagacgcagccgtagacaccagctccgaaatcaccaccaaggattatatctgtccaagatgcgag

SEQ ID NO: 146656 - DNA, 76 bp, Homo sapiens
ctttactctggggtcccggctgccctgtggcctcgctcctcggagggtattctctgaaaccaaatgaccaaatctt

SEQ ID NO: 146657 - DNA, 82 bp, Homo sapiens
actatcggggccgcactgtggtattcgccggcacgcgaagtggccgcatccgcaaggctgatcagctgaccgaagaacagat

SEQ ID NO: 146658 - DNA, 100 bp, Homo sapiens
atccagcattacacgatgcacttaatgaccctaaaaatggcgattctgcaaccaagcacctgaaacagcagatcaacaacccctccccgtcgtaaacgct

SEQ ID NO: 146659 - DNA, 100 bp, Homo sapiens
gccccccgggacccggagaagatgtcttcgcggacggtgctggccccgggcaacgatcggaactcggacacggtgctggagaatctggtaaaagcaccat

SEQ ID NO: 146660 - DNA, 98 bp, Homo sapiens
gcagtccgacttggccttcttcaggttcccgcgggaccctgccaggatgatgaagataaactgacctggaaggatcgtttcccaggttacctgatgaa

SEQ ID NO: 146661 - DNA, 97 bp, Homo sapiens
tcgtcgagttcttcgccccctgttagaagaacccgaagaacctaaagtgctaacaccagaagaacaattagcagataaactgcggctaaagaaatta

SEQ ID NO: 146662 - DNA, 100 bp, Homo sapiens
agtggtgggataaacggagagcagcagccgcccgcttcaaccccaggggaccagaggaactcagccctgattgcggcagctatcaatggtgtaataccac

SEQ ID NO: 146663 - DNA, 99 bp, Homo sapiens
acccacgcccctcaccccccgagagccggggtgagcccctccagactccgaataggagatcaagagtttgattcattgcctgctttactggaattctac

SEQ ID NO: 146664 - DNA, 100 bp, Homo sapiens
aatacctttcagtttttctccattgattatgatagcagtgggcttttcacagtgggctttactgtgttgaggaatctggggtattggtgttgcaactcag

SEQ ID NO: 146665 - DNA, 97 bp, Homo sapiens
ggccgggtccgggagccccagggcagccgccccgccgagtcgcagttccagatttcggaaggttcacgagtgttgccgacacgccctcccaactgca

SEQ ID NO: 146666 - DNA, 90 bp, Homo sapiens
ggccgtccccgaccttgcctgaacaaggtgaccctggcagcaaccccaacaaacgccagaggcagccccctctcctgggagatcaccccg

SEQ ID NO: 146667 - DNA, 82 bp, Homo sapiens
tgaggcctccccagccatatggaactagtggttcagatttactttcccggagtagtcacaggactgggcagtgaaaacaggt

SEQ ID NO: 146668 - DNA, 75 bp, Homo sapiens
attgccacttcaatttggtaggataactgcacataaggattttgagggtcctatcggtggtgctaatagagatat

SEQ ID NO: 146669 - DNA, 100 bp, Homo sapiens
ccagctaattgacattgcccggcagacggctcagggaatggatctttcccagggaactccgatgaagtgttccaacaaaatgagcgagtgaaccaagaag

SEQ ID NO: 146670 - DNA, 98 bp, Homo sapiens
gcgggagctcctgccgcccgccgctggcttcaagtgcaagggaactctaatgatccaggacaaagaagttaccctggagtatgtatcaagcctggatt

SEQ ID NO: 146671 - DNA, 75 bp, Homo sapiens
gcctggtaggaattgctagcgttgcccctgccaactctcagggagtggagcttggtttcgggatctcggtgctgc

SEQ ID NO: 146672 - DNA, 75 bp, Homo sapiens
aggtggtgaggcttcccgtcatattccagctgtgatgcagatccatccgccctagcaaaatatgttctggctttg

SEQ ID NO: 146673 - DNA, 101 bp, Homo sapiens
gcctatgtattccctggggatggcgcatcacacaccaaagttgttgaatgttgggtcacgaagatctcaacctggccaaagaagagaacccagaaagatca

SEQ ID NO: 146674 - DNA, 82 bp, Homo sapiens
gattttgtcagcttgtcgtcaaggttatcaccaatctagtgaaaatgttgaagtccagagacacgaggagaaatttttgtcc

SEQ ID NO: 146675 - DNA, 75 bp, Homo sapiens
gttgcacatccccacatcaatgcactgccaatgtttttcagaagaagtgaagtcaagatgaagaaccatttgctt

SEQ ID NO: 146676 - DNA, 100 bp, Homo sapiens
tgtttgaacaaactcgaagaacagctgtggaaagaagttgcaaaacactgggttacaagcctgatgaagggaaacgaggggatgcctgtgaaggtgacag

SEQ ID NO: 146677 - DNA, 83 bp, Homo sapiens
tccagggctgagtcacagggaagaaagcgatttcctccgcctcttccaaagcgattcaagaaatccatggtgaaaggtttgga

SEQ ID NO: 146678 - DNA, 83 bp, Homo sapiens
tgagtccccaaagccctgcaagatgcccaagaatggtgcagatgtgaatgccaaggacatgctgaagatgacagctttgcatt

SEQ ID NO: 146679 - DNA, 104 bp, Homo sapiens
agagcgaggcctgagcctctgcgtctaggtgccctaatgcatgagttatcaaatgatggtgctcgtagacaatttgaattttatctggaagaaatgatcctccc

SEQ ID NO: 146680 - DNA, 74 bp, Homo sapiens
atcttgctcctaagaaatctcaagcttcttttgtgattccgaagaggctcaatctgtaaatccttctagtgttg

SEQ ID NO: 146681 - DNA, 100 bp, Homo sapiens
cattttcagcatcaaacctcttcaattccatatttttgctgaagatcagctacatcatagctttaaaggcagagttcactactgtgatagacaaagtggc

SEQ ID NO: 146682 - DNA, 101 bp, Homo sapiens
tgatcttggacttccagcctccagaactgatgcaaagcactgtgctaggcaccaggagaatgcagaaagggcacatccccttccttcaaggagtttacagc

SEQ ID NO: 146683 - DNA, 101 bp, Homo sapiens
atttgatacgactgccataaacaaaagctattacaatgtgggagaccctcacgcagggcttagagttctgtcggcggcagcagagggccgatggctcctgg

SEQ ID NO: 146684 - DNA, 97 bp, Homo sapiens
gtgtgggagcgggagctgcggaaaggaagccagttgagggaagttctccatgaatgtacgtcacaatgatgatgaccgaccaaatccctctggaact

SEQ ID NO: 146685 - DNA, 100 bp, Homo sapiens
accgactgacctggatagtagttgttcttcagcacctggctgcagtggaagaaagaaagatcaagtccctggtagctctcttggttgagacacaaatgaa

SEQ ID NO: 146686 - DNA, 101 bp, Homo sapiens
ctctgtcactttaagtacagctggagccgtcaaaatgcagatcttcgtgaaaacccttaccggcaagaccatcacccttgaggtggagcccagtgacacca

SEQ ID NO: 146687 - DNA, 96 bp, Homo sapiens
tctaccccgtgggcatcttccagaaacgcaagaagtacaacgtgccggtccagggcagctggtggaatttttgaagaaaatggaatctcgaggccc

SEQ ID NO: 146688 - DNA, 100 bp, Homo sapiens
tgaccaacagataactgaggacaatggacctgcctgggcatagacttccttaaggcccgatgagagaaagggaaagttaaggatgctggagcagaacaat

SEQ ID NO: 146689 - DNA, 100 bp, Homo sapiens
aatcagccctggacctggcagatccttcagcaaaagctgtccttacagggtgtttgccagcttcccagtaaaaatgatgaaaaagaatatccacacagaa

SEQ ID NO: 146690 - DNA, 97 bp, Homo sapiens
aggaatgtcagcaccagaccaagagagcgacttgcagttgtggaggtacagtgtgaacggctgaggatgctctaccgggactgtgctcggcccccac

SEQ ID NO: 146691 - DNA, 50 bp, Homo sapiens
ccagaagcgggcggcgcgggggagatggatgtgataggccaggttctgcc

SEQ ID NO: 146692 - DNA, 100 bp, Homo sapiens
gttactacgtggggcacaagggcaagttcggccacgagttcctggagtttgagtttcgaccggacggtgtgtatcctggctccatcaccccccataacgg

SEQ ID NO: 146693 - DNA, 51 bp, Homo sapiens
tcgggacccgcggtccccgctcttgctggaattgaagccattttttatgaa

SEQ ID NO: 146694 - DNA, 80 bp, Homo sapiens
acaacaagtactgcgccgactgcgaggccaaagggactttataattgatggcttatcagtggagagaaatcatgttcttg

SEQ ID NO: 146695 - DNA, 74 bp, Homo sapiens
ccagcacacgactacttcgagttcttcgccgccgacctgagatagctttggctctgcggcactgtcacttgtta

SEQ ID NO: 146696 - DNA, 75 bp, Homo sapiens
gcgagaaggagcgcgagcttgaacgcagcgtgatcgcctcaggcatggcgtacgtggagcggatgaactacgtcc

SEQ ID NO: 146697 - DNA, 100 bp, Homo sapiens
tcacagcagtgcgcaaattcaccaagagagacgtcttcctggagcggacagccgatcgccagtacatggagggcttcaacgacgagctggaagccttcaa

SEQ ID NO: 146698 - DNA, 98 bp, Homo sapiens
accgaaaatggcagatattcaaaacgtcagcaaccaaaggcaccggccttgatgaggcaatggaatggattatacttactcagctgttaagagtaggc

SEQ ID NO: 146699 - DNA, 101 bp, Homo sapiens
tgcttgccgcagccagcaactatttcagggaacctcagaacctgttctggatccacagcaaatccaagcatttgatcagctttgccgtctctaccgaggaa

SEQ ID NO: 146700 - DNA, 98 bp, Homo sapiens
tggaacatctgtcccctgttcaaaggaatagccaggtctggctgggtcggcacaacctgtttgagcctgaagacacaggccagagggtccctgtcagc

SEQ ID NO: 146701 - DNA, 74 bp, Homo sapiens
acagacgtcggaaaccttggaagtgggatttatttcagtgattcgctcagtactatactggcaattgctggaga

SEQ ID NO: 146702 - DNA, 80 bp, Homo sapiens
gatgcttgtgaccctgcagctcctcaaaataacgaaggaggcccaacttcattcaataaggagcctgacggatttatccc

SEQ ID NO: 146703 - DNA, 115 bp, Homo sapiens
aatcaacaacctggaaacattctttgaattggattatcccaaagcttgttgattggtgctggctgtgccctctaccccttgggctgggacagtgaggaagtccggcagacttgtg

SEQ ID NO: 146704 - DNA, 71 bp, Homo sapiens
tcagcctggtgagggtgatgttcgggaggaggccttgtccacaggtatggcgtgagtcccgagaacattat

SEQ ID NO: 146705 - DNA, 90 bp, Homo sapiens
gtcgtacctgatggtaggaggcagtagttccccgcttcccttccgcgggagggagagttaggtggaaaaccatgaattccttgtaaaacc

SEQ ID NO: 146706 - DNA, 75 bp, Homo sapiens
gggcttgccctggtcttgctcggccgatgaagtgcagaggtttttttctggagcacggtctgaatctgcacagag

SEQ ID NO: 146707 - DNA, 127 bp, Homo sapiens
accccaatttttggactgtgctctcaaactttactttgcctcatttgaggagtgggaacaggcttcggcgaacacaaagttacagcagatgaatggaacagcaaccatacgatagaaatagagataa

SEQ ID NO: 146708 - DNA, 100 bp, Homo sapiens
cacaaatgtttttctgttttgcctgaatacatgatttaaacaagagatttccacagaagatgcggttcatgctattattcagccggcagggaaaactgcg

SEQ ID NO: 146709 - DNA, 51 bp, Homo sapiens
tcgtgtggtccatcaagtccttcccgtttcaggaccacgtcaagacttgtg

SEQ ID NO: 146710 - DNA, 99 bp, Homo sapiens
ggggccgtggcccctgcagcggaaccggacccagtccctgagccgcccctacacccacagctgggctcaaaatgcagagaactcaaagatattcatttc

SEQ ID NO: 146711 - DNA, 75 bp, Homo sapiens
caccaggaagtttgtgcatgaagacagcagccacatcattgctttatgtgaaatcgagctatagcagattatctt

SEQ ID NO: 146712 - DNA, 83 bp, Homo sapiens
aaggattccaacaacaattccgatggcaaagccgttgccaaggggatgaacgtagggcacttagcttcttccaccagaagggc

SEQ ID NO: 146713 - DNA, 75 bp, Homo sapiens
cgtccgccttctctgtcagctctttccccgtcagcatcccagccgtgctcacgatctcctgggaggcccccgtgg

SEQ ID NO: 146714 - DNA, 80 bp, Homo sapiens
agatgctgctgcttgacaatccacacaaatctattatcctcccagtccacaacgctgaaccgtggctggacgaatgtttg

SEQ ID NO: 146715 - DNA, 73 bp, Homo sapiens
tgagcgcgcggctgaaagcgactgggacctggggcaccatgccggtggaaaggatgcgcatgcgcccgtggct

SEQ ID NO: 146716 - DNA, 83 bp, Homo sapiens
cgagtttccgatttaaagctgagctgcgaggaaaatggcggcgggagggggatatgagactttctactcggaatatcctgagt

SEQ ID NO: 146717 - DNA, 90 bp, Homo sapiens
ggggagcacttcctggacccaggaagggagagtcttcttccaagatcctgataacttaagtgactctctcttttccggtgatgaagaaaa

SEQ ID NO: 146718 - DNA, 76 bp, Homo sapiens
ccagcattttcggcaaccgctgctggcagttttgccaggtgtttgttaccttgttttcggctttgtgagaaacctt

SEQ ID NO: 146719 - DNA, 50 bp, Homo sapiens
tcatcaaacaaactgcacccttggcactactgcagtcttcagttaagcaa

SEQ ID NO: 146720 - DNA, 100 bp, Homo sapiens
tctacatgatgaaagcgttcgacctcatcgtggaccgacccgtgaccctcgtgagagtacttgctggaaaataaccggatggtgaacattttcacggacc

SEQ ID NO: 146721 - DNA, 100 bp, Homo sapiens
aggagaaacccagcagcagattcaagcagctatgggattcaagattgatgacacgatgaggcgagtggtacgacagagcaagtttcggcatgtatttggg

SEQ ID NO: 146722 - DNA, 100 bp, Homo sapiens
tgctgaagatgaaggcctgtggcttgaacaccctcaccactgaactgcctcattcacctcagaacctcctggtcagccctaattcttcccacagccacgc

SEQ ID NO: 146723 - DNA, 100 bp, Homo sapiens
gggcaattgggtttggccggaagtcgcctttgtctaacagaacatccatgatagcagtcttctgtaaatcgaacttttcaagaattctctgaaggaacca

SEQ ID NO: 146724 - DNA, 100 bp, Homo sapiens
gtaaatagagcctacattgatgaactgtgggaaatggcactttcaaaaaccatcgcagcactccgtacccactcgctggacagtgccacatcgcttatcc

SEQ ID NO: 146725 - DNA, 100 bp, Homo sapiens
ctggaggcgctcatggaggtgtctgtgtctgatcctccaatgagagggccggaaaccactccgccgcagcctccaactccttcaaaaagttacgtgaaca

SEQ ID NO: 146726 - DNA, 100 bp, Homo sapiens
tccaggcctgcaccgacgaggaggcagccgtggtccaaagtggtttgaacatcctcatccctgtgttagaccggatccgatatgtgcagagtctcaagga

SEQ ID NO: 146727 - DNA, 90 bp, Homo sapiens
ccggtcttggggggatggttccatcatggcgtcaatgcaggttactataacaacagtaccaaggtggctgtgaaaaccctgaagccagga

SEQ ID NO: 146728 - DNA, 132 bp, Homo sapiens
ttcttctatttcttgtggatattatggctaataacacaacaagtttagggagtccatggccagaaaacttttggggatttctctctgatcaaacggacagttcaggactcagaatctaaggatgaatgttca

SEQ ID NO: 146729 - DNA, 75 bp, Homo sapiens
cgcagctgcccttgtgcccgaggcccaggacagccaggtcaccagcaccaagaagacaggatttcaccatgttgg

SEQ ID NO: 146730 - DNA, 75 bp, Homo sapiens
tattcctaaagtccagcatgtcatccattaccaggcaatgcatgaaccattgcaaacttggcaagatgcaccata

SEQ ID NO: 146731 - DNA, 74 bp, Homo sapiens
ggagccagagggcagggacctgctcatgcttgatactgatggacattgtgtgggccagaggcagggatggttgg

SEQ ID NO: 146732 - DNA, 101 bp, Homo sapiens
ggcggccaacgggccaggtaggatttccgggagaggctgctgtggaggctgaggaggcggcggcggagatctgggtacggggctgatgttgacgtcaacca

SEQ ID NO: 146733 - DNA, 100 bp, Homo sapiens
ctttaattctacccagcaaaatgaaactgagcctaatcagcagttgatccaaaagactacatgttcagtggactgaaggatgaaacagtaggtcgcttac

SEQ ID NO: 146734 - DNA, 83 bp, Homo sapiens
gtacgtcctgatctaggacccaggttgtgcagtgcctatgtccagaacacatattacataatggagccgggagacagactagg

SEQ ID NO: 146735 - DNA, 82 bp, Homo sapiens
cgtcagcctcccgccggccgtctccttaacaccgaacaccgctgaactcacgggaatcaaatggcgtaggtacaattttgga

SEQ ID NO: 146736 - DNA, 83 bp, Homo sapiens
atttgcaatccccttatgccataattcaataccaagaaggagggtgacctgatagctgctcaggctcggctgaaggacctgga

SEQ ID NO: 146737 - DNA, 75 bp, Homo sapiens
gcctgatggagtaagaggggttggctgtgaatgagctcttgtccctggcaaagcgaaagcgcagtgactctgagg

SEQ ID NO: 146738 - DNA, 82 bp, Homo sapiens
aagaggacgccgggacaccaagaagcagggaaatgctccaaatgagaagatgaagcaagtgttaaagaagactatagaagaa

SEQ ID NO: 146739 - DNA, 75 bp, Homo sapiens
agcgccaggacaatggggacccgggacgacgagtacgactacctattcaaaggcttcttccccgggagctcgcag

SEQ ID NO: 146740 - DNA, 75 bp, Homo sapiens
tggacaagcttaataaaataaccgtccccgccagtcagaagttgaggatgccttccgcgccttccaccctgacct

SEQ ID NO: 146741 - DNA, 98 bp, Homo sapiens
gctcactccctttcctctgctgccgctcggtcacgcttggaatcctatgaggatggttgtgaggattatcctactctatcagaatatgttcaggattt

SEQ ID NO: 146742 - DNA, 87 bp, Homo sapiens
atcttggagctggattatcaaggaaaatggaatcctgaagggcttcgacccactcctcaaccttgtgctggacggcaccattgagta

SEQ ID NO: 146743 - DNA, 100 bp, Homo sapiens
ctggtcacagtcctggggctgggctacttcgcggccctggccaacgtcaacattgggagcctcatctgcaatgtaggggccggtggacctgctccagcag

SEQ ID NO: 146744 - DNA, 107 bp, Homo sapiens
agcaccgcagccttgggcctcgcgccggctatggccgtgccctggggctgagccctcagacctgcctagagctggaacgttacctccagagcgagccctgctatgtt

SEQ ID NO: 146745 - DNA, 115 bp, Homo sapiens
accagctgaagagcgacaagccgctggcagccgcggatctcaccgccgctcagggttttaaaatcaaagatgggaaaatcggagaaaattgcccttccccatggccagcttgttc

SEQ ID NO: 146746 - DNA, 90 bp, Homo sapiens
gaaagtgttaagcacatggtggagaggcaagcacggattccaggtacccggaaattaaagaggagctggaggagctggaccgcatcacag

SEQ ID NO: 146747 - DNA, 50 bp, Homo sapiens
cctgctcggaggaatggcgccgccgggaggctgaaccgtctgagcccaga

SEQ ID NO: 146748 - DNA, 83 bp, Homo sapiens
tttacattctcttggaatactgcagtagaaggcacttgcacctcctgcgccgccgccccccatccaaggatatgccttcaagc

SEQ ID NO: 146749 - DNA, 97 bp, Homo sapiens
agatcctggagagcctgcaggacggcgcggcagagtccccgtacgcctacagtaacgctgcatccagatctcattatgcatcagaaaaatgaaaaaa

SEQ ID NO: 146750 - DNA, 74 bp, Homo sapiens
ttgcttgtatttgtgaatcccaagagtggaggcaaccagctctctatcaatatcagctcacatcattgaaaaga

SEQ ID NO: 146751 - DNA, 100 bp, Homo sapiens
ggaaggcactcaaaagtggggggcaggaaaggatttttcaagccacattcaattgataggatgaaaaaatttaagagaaggctatccctcacactccgag

SEQ ID NO: 146752 - DNA, 76 bp, Homo sapiens
gctttgtctccttcgacttggagtctttgtccaggacggtaaagtcagtgataaatcttttgtttgctgcatatac

SEQ ID NO: 146753 - DNA, 83 bp, Homo sapiens
ccctactggagatggagcactcaccaggtgcctctgagcctcggaacatgatctacatgagccgcttgggtatctggggcgag

SEQ ID NO: 146754 - DNA, 88 bp, Homo sapiens
ctgtcgctcttgtgccctagcaccccgagaaccgtcagtttgagccagatggattctgaaaccttccttgtatccctcctgagacatc

SEQ ID NO: 146755 - DNA, 100 bp, Homo sapiens
gggcagggagaggtgcggctctgcgacggaaacaatcgccagagatgccggggctagccttccccaccaggtgaagtgctgcggctgggtcagcttctac

SEQ ID NO: 146756 - DNA, 74 bp, Homo sapiens
ctggggggcaccacgggaagacatgacacccctgaacctgtacgtggacgaatgtcgcgagcgaggcccagccc

SEQ ID NO: 146757 - DNA, 99 bp, Homo sapiens
tgccatcaacctgcgtgaggtcaacctgcgcccccagatgtcccagaaggtagaagatagcaccatgccgattcgtcgaactgtgaattctacccggga

SEQ ID NO: 146758 - DNA, 82 bp, Homo sapiens
agctggcagctctctgtaagaaatatgctgatcttgactcaccatctctgcctcccatgaggcttacagagttcaatgttgg

SEQ ID NO: 146759 - DNA, 74 bp, Homo sapiens
caacattgtcgtcattggacacgtagattcgggctgggctgggcgagtatctcttcgaaaggctcactctcaag

SEQ ID NO: 146760 - DNA, 75 bp, Homo sapiens
tgcaccctggggaggagagctctgggaacagccgctcacaatatggccatcagaaatcttctctacatataccct

SEQ ID NO: 146761 - DNA, 100 bp, Homo sapiens
agatgccagaatggttatctacacacccttctcatggcaatcgagttgagtacttggatagacttatacctcagttaaaggactgcaatgtcatagcaac

SEQ ID NO: 146762 - DNA, 75 bp, Homo sapiens
acaccaagtgagaggccaaccagggagaccaaattttgaggaaggtggaccaacatcagtagggagaaagcatga

SEQ ID NO: 146763 - DNA, 75 bp, Homo sapiens
gttcgagcagatcgacaagtccgggagctgggcggccatttaccagaagtcacctgcaccggtgcccgtgacgta

SEQ ID NO: 146764 - DNA, 74 bp, Homo sapiens
tgagcatcttgattagaagcaggatccagggcagcgacgccggctggactttgggctacatgctgaacctgacc

SEQ ID NO: 146765 - DNA, 82 bp, Homo sapiens
gatgagagtgcgatggggaatccaacagaattctggaactgtggctgcaccatctgtcttcatcttcccgccatctgatgag

SEQ ID NO: 146766 - DNA, 100 bp, Homo sapiens
atcagtggcgtgtaactatgctcatcattgttcttgtcaatgcctttgtgtctatcacagtggagagaacgccagatcaagtgtcccaagtgtgataagc

SEQ ID NO: 146767 - DNA, 144 bp, Homo sapiens
tctaggctgccgggcgctggtcgtcagcgccgaggctgggctgaggcgccgcggtaccatgaggcgccgggatcgcttacacctgagacgaactacagaacagcacgtaccagaggtggaagtccaagtcaaacgcagaaggac

SEQ ID NO: 146768 - DNA, 89 bp, Homo sapiens
cagcctggcttcatctggtcctcataatcttacttatcctctaggtcccaggaatgaaggctttgatgaactaggtggacttctcaaac

SEQ ID NO: 146769 - DNA, 100 bp, Homo sapiens
agtgatgaatcagcccatggcttacgctgcacttccatcccacggtcaggccatccagctgagccgagatgggcagtacctgctcacaggaggagacaga

SEQ ID NO: 146770 - DNA, 80 bp, Homo sapiens
ttgtagatctagaagtcactttggaagaagtatatgcaggaaattttgtggaagtggatattccatctattataaccaag

SEQ ID NO: 146771 - DNA, 100 bp, Homo sapiens
ctcatcatgaccttccagaattacgggcaagcgctgttcaaacccatgaaacatccggctccgggttcgagcagagtactgcgagcatgggccagccttg

SEQ ID NO: 146772 - DNA, 50 bp, Homo sapiens
tgtaatgcctggaaagtatacaatgagtctgccatcatggatgttctcgc

SEQ ID NO: 146773 - DNA, 88 bp, Homo sapiens
gaagaagtctttgaaagaatatttggtgatccaaattctcatatggtatttaatacaaggctgtttaaggtcaaagaaagacacttgt

SEQ ID NO: 146774 - DNA, 100 bp, Homo sapiens
caatggacaccttctaagagtttggcgagtcagtgactgaagcgcccgtccattccaagctcctgcccctcctaaagctgaagccaaagcgaaggcttta

SEQ ID NO: 146775 - DNA, 100 bp, Homo sapiens
tttgtttttaactaccgggaagatttacacagatggaaccagaaaagatacgaggctctaggagagcttcaaggtattgcagcatgctgattgaagaagg

SEQ ID NO: 146776 - DNA, 119 bp, Homo sapiens
ccatttccaagagaagagcacagaagagggagaagtggctgctctgcgcctcacggccagatcccaggaagtttcacggctataactccctgaaggaatactatgaggaagaaagttgc

SEQ ID NO: 146777 - DNA, 82 bp, Homo sapiens
ggatcatgtctgcgagccaggattcccgggtgctttcttctgcgacctggtactcatctacctcatcaaaaagagagagttt

SEQ ID NO: 146778 - DNA, 90 bp, Homo sapiens
gccttggtcctctctctatcctagacatgtcaccttcaggccattcagaggaggaaagagaggggaatatgaagtcagccaagccccaag

SEQ ID NO: 146779 - DNA, 96 bp, Homo sapiens
gcactctagatgccctcaactatgctctccgctgtgtccacagcgttcaaggaaggtgtatgattttctctccacgttcatcacctcagggatgcg

SEQ ID NO: 146780 - DNA, 98 bp, Homo sapiens
tcgcgaccgcgggtgcatccagtttctgcgcccagtggttggaataaaaacagggttgaatgagttccagaaagcagggttctcaacctcgtggacag

SEQ ID NO: 146781 - DNA, 50 bp, Homo sapiens
gttaaatagcatatctgataccaccaaagtcttaggaaaagtcctcagtg

SEQ ID NO: 146782 - DNA, 98 bp, Homo sapiens
ccaagtagctgggattacaagccatttcataattctgaatcatgtctgataacggagaactggaagataagcctccagcacctcctgtgcgaatgagc

SEQ ID NO: 146783 - DNA, 50 bp, Homo sapiens
gacagaccaacctgtcagtgctgcaaaattgggaagcacgtctactgctg

SEQ ID NO: 146784 - DNA, 155 bp, Homo sapiens
acaatctggtgtatttggacctgtcatctaataaaattcgtagcttacccgcagaactcggaaacatggtatcactcagtgtcttctccccgggtttggtggcctgcttctggagtggtcagttctgctgccgacatgcccacccagctcgagat

SEQ ID NO: 146785 - DNA, 75 bp, Homo sapiens
cagacctgccaatttaccagagataattgataacaccctgtaacagctgaagacaaggcagacagaacgcagacc

SEQ ID NO: 146786 - DNA, 74 bp, Homo sapiens
catctttaccatctcatctcaagaatggagggcctaatgggattgtttgaaaaacgtcgcttcaggaaattcct

SEQ ID NO: 146787 - DNA, 101 bp, Homo sapiens
aagaggacatggccatgaatgcccaacaagataatgcttgttagcagtggcacaagatcttacagaggatgaagaaacagtagaagattccataattgagg

SEQ ID NO: 146788 - DNA, 75 bp, Homo sapiens
ctactgccgcttcagttctcccggtgtggccacgagtcggagatcctgaactttcaactgtttgccggaagtctg

SEQ ID NO: 146789 - DNA, 90 bp, Homo sapiens
gcagagacatcccgatctggggaagtgtgctgggcatcaaggtgaagatcatgctgccctgggacccaactggtaagattggccctaaga

SEQ ID NO: 146790 - DNA, 100 bp, Homo sapiens
ctctacagagatgtgatgctggaaaacttccagaacctggcctcactagaaacgttcctggatccgaacactgccccctgacgacctagagagatcccgg

SEQ ID NO: 146791 - DNA, 99 bp, Homo sapiens
tctgctgctcctgctggtggccacagcttggcatggtggcgacatgtctaagaatgtgagccagtcacagatggcaaaattgaaccaacaaatggccaa

SEQ ID NO: 146792 - DNA, 74 bp, Homo sapiens
acagcagcctcccaaggagtctgcaagttgtctacaaataagaaacctcgaaaatctccaggtgagaagagcag

SEQ ID NO: 146793 - DNA, 100 bp, Homo sapiens
ggagttttccggggccctctcagcaagaacgggaacaaaactctggttcaaaccttgtactactcagctgatcacaagctgcttgatgggaacctactag

SEQ ID NO: 146794 - DNA, 88 bp, Homo sapiens
gactggtgatgacaggctcttcagctccctgcaagtgaccgggcctggggaacaggctgtgggtgagcgtggaggatgctcagatgca

SEQ ID NO: 146795 - DNA, 82 bp, Homo sapiens
tgaagctcaagatgtggggagtggcagagagtatgcattaaaggtttggtgcacctcgatttggaggaagtagggcagggcc

SEQ ID NO: 146796 - DNA, 100 bp, Homo sapiens
ctgtgggcggtaaacgcggttagtgcaagcatctgggccatcttcaatctcatgatggagcagtccaagaagtcctccctcatggtggcccgcagtattc

SEQ ID NO: 146797 - DNA, 75 bp, Homo sapiens
gcgagtgggagcaccaggatctcgggctcggaacgagactgcacggtctcttgccctgtgcagcttcctgcagac

SEQ ID NO: 146798 - DNA, 75 bp, Homo sapiens
atgtgaagcactcagcacagtccttggaacaagtgtcgtgtgggagccaatgggagatgggaagaaaatcatttc

SEQ ID NO: 146799 - DNA, 100 bp, Homo sapiens
ctgcttcaccgaacagcacctcaggagcagatacacaatcatcatcttactagttctctgtgttgctcgctaaccagtcccccagttcagtagactggag

SEQ ID NO: 146800 - DNA, 82 bp, Homo sapiens
ttgcccaacccacagacatattttacaacaaagaatactgaatggctcttctaacaggcatcacgttgggtggtttccattt

SEQ ID NO: 146801 - DNA, 90 bp, Homo sapiens
cagccgtgtgacagtaactgaacattggtctaaagtctttccaaaaggtcaaggttcacaaggtggtgcggttgtgtcagaacccaaagc

SEQ ID NO: 146802 - DNA, 75 bp, Homo sapiens
gcaaaactgtgagaacactccgacgtcaattgaggagggcctggagagtgtgctgaagattctggtgaatcagct

SEQ ID NO: 146803 - DNA, 100 bp, Homo sapiens
ctggtcctcatgctgccgaggctgttgctgttgatctgtgtgacagctggagtatcagccttggaagtatatacgccaaaagaaatcttcgtggcaaatg

SEQ ID NO: 146804 - DNA, 75 bp, Homo sapiens
cggcgtggaccacatagacatttacgcggatgtcggcgaagagttcaaccagccatgcgcacgctgagcgaggac

SEQ ID NO: 146805 - DNA, 97 bp, Homo sapiens
gcgttcatctaccacgctttcgtggatccaggtccggcacgatcaagacccaggctacatgcatcacaagtttgccatcgtggacaagagggtgctc

SEQ ID NO: 146806 - DNA, 87 bp, Homo sapiens
ggaagtcaagtgcggtgctatgatccttaagctgagcagctggatccgcctcagaaggagcagctggggagtgctcttgccgagatg

SEQ ID NO: 146807 - DNA, 124 bp, Homo sapiens
cggcgagtttccgatttaaagctgagctgcgaggaaaatggcggcgggaggcaccaccaggaccagctgatcattccagcccacagcaatggagccacatgactcctcccacatggactctgag

SEQ ID NO: 146808 - DNA, 90 bp, Homo sapiens
aagaactcgagcgacagagacaagctgagcttgccgcacaaaaagctagagagggatcatagacggtatttctatgtaaacgaacagtcg

SEQ ID NO: 146809 - DNA, 80 bp, Homo sapiens
gggcctggctaaggaaaccctattacctccaggcatcctgattttcaactgctaaaggaagaacaaaggtatggttgaat

SEQ ID NO: 146810 - DNA, 90 bp, Homo sapiens
ggatttgtatggaatactgtggtggcggatcacttcaagatatttaccatgcaaaagttcaaacagaccctccctcagttccaatatgtg

SEQ ID NO: 146811 - DNA, 98 bp, Homo sapiens
tgaagtcagttgttgcatcaaatacttcatatttggcttcaatgtcatattttggtgggaaatatgagtgagcatgtgagaacaagatcccaatcctc

SEQ ID NO: 146812 - DNA, 82 bp, Homo sapiens
gaaagatttttgatgatgtctccagtggggtctctcagttggcgtccaaggcccagtaacccgcaggtcaccgcgctcccca

SEQ ID NO: 146813 - DNA, 75 bp, Homo sapiens
acgcgcagccccggcctctcggcctctgccggagaaacaggtttttctatatgagtggagaagacagctgttacc

SEQ ID NO: 146814 - DNA, 82 bp, Homo sapiens
ggaatgctcctggctggtgcggacacaacccaatagggggatatgagactttctactcggaatatcctgagtgttgcgtgga

SEQ ID NO: 146815 - DNA, 100 bp, Homo sapiens
gctctgtctcagcgccgcctccctgcttcttaacaggtacctttaaaacagggcagaagccttatggattggattcgactgaccaaaagtggaaaggatc

SEQ ID NO: 146816 - DNA, 97 bp, Homo sapiens
gcccggggccctcatggacggttggatcagggccgaaggttgctattgctggggccccagtcactctgtggatcttctatgatacaggatacacgga

SEQ ID NO: 146817 - DNA, 97 bp, Homo sapiens
agaaaatcaggctctttgcacaataacttcatttcccaggaatcccagtcagaagttccagcctgccactgttctctgatgccatgccagcaccaac

SEQ ID NO: 146818 - DNA, 90 bp, Homo sapiens
cttcattggccacctacagaaacaaaatgtcaacaaattgatgggccgtggatccaggacatcgagggagccagcgccaaggacctttgc

SEQ ID NO: 146819 - DNA, 99 bp, Homo sapiens
ctttctgcctgatcatcccattgtactgcaaaaaccaaggcgtagaggctccggtgttttttgtgccaattgcctgaccacaaagacctctctctggcg

SEQ ID NO: 146820 - DNA, 83 bp, Homo sapiens
cgccggaccaagcgggcccagaagcggttctgggaggtgatcagtgatgaacatggcatcgaccccaccggcacctaccacgg

SEQ ID NO: 146821 - DNA, 100 bp, Homo sapiens
aaacaggctccaggccctgcctgccctgtgcctctgcgtgctggtcctggcctgcattggggagatcatcgacgagtacatcaaggagaacggcttcggc

SEQ ID NO: 146822 - DNA, 90 bp, Homo sapiens
aaccaacgcctggctcggagcagcagcctctgaggtttggtgcacctcgatttggaggaagtagggcagggcccttatctggaaagaagt

SEQ ID NO: 146823 - DNA, 100 bp, Homo sapiens
aatttttgtagataccaacttatacttcctggcgctgaccttctttgtcgcagcgttccatgaagatcccagtgtctgagtgaactaacagtcctgcttt

SEQ ID NO: 146824 - DNA, 82 bp, Homo sapiens
atcaactgtcaaagcaagaagcccgaacccaccagtttgcctgagaatacagatcaacccacagaacaaagcggatttccaa

SEQ ID NO: 146825 - DNA, 75 bp, Homo sapiens
cctgtacctgttttatacttgcttttgcttcagcgttctgtggttgtcaacaggcccagaccttctctttccctt

SEQ ID NO: 146826 - DNA, 98 bp, Homo sapiens
ccgtctgcaaagtgtccccggcaagaaggttgtttttcaccattcagaacattgcctgaagcaggtccaccatgccgttagtaacgaggaacatcgag

SEQ ID NO: 146827 - DNA, 98 bp, Homo sapiens
gcagctcaaggctgcaacggaagcactgggggagaagtcccctgacagtgccacggtgtccggatatggtatgatctcgtgaaatcttgagagaaact

SEQ ID NO: 146828 - DNA, 50 bp, Homo sapiens
cgtgatcctgttagatatcgaaggtactccaaagattcaggtttactcac

SEQ ID NO: 146829 - DNA, 88 bp, Homo sapiens
agcagcattggtgaagttgaatctgcaaaacttattcgggataaagtagcagtgtgtactgtaagcacggtcacctgtgtcccatcga

SEQ ID NO: 146830 - DNA, 100 bp, Homo sapiens
tatggtgcttatgttgtctaattaacaaagaaccacagaattctggacaatcaaaacttaactcctggatacagactaccatggctgcaggagtcttgcc

SEQ ID NO: 146831 - DNA, 80 bp, Homo sapiens
gctcctaagcctgcacagccgcggcggcagcagcagtgagagtattctaccttgtaaatactgttatttgtatatactgt

SEQ ID NO: 146832 - DNA, 90 bp, Homo sapiens
ggactacaaaggttctcgacagagaagaaactccatggtacaacatcacagtcactgcttcagaaattgaaataaattctactgggtgcg

SEQ ID NO: 146833 - DNA, 75 bp, Homo sapiens
tggctggcagtcaggacatattcgatgccatcgtgatggcggatgagaggggaaaaggctagcagcctttgggag

SEQ ID NO: 146834 - DNA, 50 bp, Homo sapiens
gccgccgctgtccggagccccacagtgatcctgccatgaagcagtttctg

SEQ ID NO: 146835 - DNA, 82 bp, Homo sapiens
gaatggcaagcgcagcaacaacagagagcacgtggagtgtggccatctggggccgtgtggtatttgccactcaggagacatg

SEQ ID NO: 146836 - DNA, 100 bp, Homo sapiens
gggaccaaggtggagatcaaacacggaattggaaaatattgaagtgacacaaggcatgtcagctgagacagcagtaactttcctcagccggctgatggct

SEQ ID NO: 146837 - DNA, 96 bp, Homo sapiens
ggcagctgctagcaggctgtcataacaatgaccacctggtagagaaataccgcattcttatcacaaagattgtagaaggcatgaaacaaaaaatgt

SEQ ID NO: 146838 - DNA, 100 bp, Homo sapiens
cacatgaaaaatgccacgattgtaatgtctgtgaggagagagcaaggcagttcttcaggggagacatatggaaagttgatcatgtgctggagcgcttgca

SEQ ID NO: 146839 - DNA, 76 bp, Homo sapiens
cttctcgcatgattgaatgcctaagatttggaagtcaaaccagaaacttcaggctctactacgatggcaagcactt

SEQ ID NO: 146840 - DNA, 50 bp, Homo sapiens
cgggagagtagcagtgccttggaccccagaaatggtggagtcaatgaaga

SEQ ID NO: 146841 - DNA, 75 bp, Homo sapiens
ccaccgctgcagcgcgggccccgcagaggaaggaagccggcgggcggggaaccaaagaggttgttgtaaatgtgg

SEQ ID NO: 146842 - DNA, 75 bp, Homo sapiens
gccatgacaaccaggcaatgctggatagataccgaattcttatcacaaaggttgaattctcttacccgcccctga

SEQ ID NO: 146843 - DNA, 90 bp, Homo sapiens
ctcgcgttagtgagaaccagagtgctcagctatcctactctgtggagctctgctggccgtccgctctgactaccactgtgccgtgtggaa

SEQ ID NO: 146844 - DNA, 101 bp, Homo sapiens
aagaaaggcaaggaaacatcttttgacaagatgtcacctgaaagtggtcacagccgcatctttgaaggtgtatctcccgaacataaacaagatatcaatgc

SEQ ID NO: 146845 - DNA, 100 bp, Homo sapiens
ggcggggatgatggggccctcaagatctgggaccttcggcagttcaagaacccccagacctgactccggaggagcggatggagctggagaacatccggcg

SEQ ID NO: 146846 - DNA, 75 bp, Homo sapiens
gcaagatccaccgagacatcaaagatgatgaggagtctgatgaggaagctgtgaagaaaaccaacaaatgtgtac

SEQ ID NO: 146847 - DNA, 80 bp, Homo sapiens
ccaccatgtcagacgcagccgtagacaccagctccgaaatcaccaccaaggttctgggccggagaaggggcgacgttcgg

SEQ ID NO: 146848 - DNA, 101 bp, Homo sapiens
cccaatccccggcagctctctcaggactcacaccacccggcaagaactgctcactacggctccctgccccagaagtcacacggccggacccaagatgaaaa

SEQ ID NO: 146849 - DNA, 89 bp, Homo sapiens
ttgtgagcagggtctgcacgaaataaagctcctgggcaaggggacgtctgcagctgagttacaaatgctgctgccaactgtcctggcca

SEQ ID NO: 146850 - DNA, 98 bp, Homo sapiens
gacctctggttctacttcacactgcagaactgggttctggactttgggcgtcccattgccatgcttcccatcgacggtcagtgcgcacgttgtaatca

SEQ ID NO: 146851 - DNA, 90 bp, Homo sapiens
agctcacatttctcatattgctcaacagcaggaacgaatgcaggaatttgggaactgagctgtgcaagtgctgaagaaggagatttgttt

SEQ ID NO: 146852 - DNA, 89 bp, Homo sapiens
gccgagcatctgggccgagaccattccgtatggagagccgggtttcagtgttgactggtgggctcttggagtgctcatgtttgagatga

SEQ ID NO: 146853 - DNA, 100 bp, Homo sapiens
tgacttaaagaaacagcttcatgaactccaagccaaaatcacagctttgagtgagaaacagaatccaactcaagtcggaacagctcttcaggttttctat

SEQ ID NO: 146854 - DNA, 100 bp, Homo sapiens
ctccagtagagggttctgattctgtttcttcagtaagccaggaatcccaaaacattgtggggatgtgccaactgccgagtggttttgtccaacccttctg

SEQ ID NO: 146855 - DNA, 75 bp, Homo sapiens
gagaagtaccaggaggcgttggccaagggtggtgttcccactgatgaagagcaggcgactgggttggagagggag

SEQ ID NO: 146856 - DNA, 75 bp, Homo sapiens
gagctgaggaaccggaccccggcagctgcatgaacgctgctgtccgggctgtgacgcgcatgggcatttatgtgg

SEQ ID NO: 146857 - DNA, 97 bp, Homo sapiens
atctacgccatgcactggggcacagactccaggcttcctgctgtgaagacagggtgcactgctgtccgcacggtgccttctgcgacctggttcacac

SEQ ID NO: 146858 - DNA, 100 bp, Homo sapiens
ctcgggcaggccttccgagaggaacctctatgccgacatcgacgccgcctggcaggccctgcgcaccaggatgttgcttcagagtgtgaagtcaaatgca

SEQ ID NO: 146859 - DNA, 74 bp, Homo sapiens
cagattgtcttggaagttccaaagttgcaacgatttctgctatggaagaaatgaatggcaaagacttggaggga

SEQ ID NO: 146860 - DNA, 83 bp, Homo sapiens
aaagaagtggagcgtgtcctgaaggagttccaccaggccgggaagcccatcgggggcagccgcctcacagatgtaagtattgc

SEQ ID NO: 146861 - DNA, 82 bp, Homo sapiens
ccccagtgagggtgtacaaatacccctttgaattaattatggctacagtgacaataccctcccctcccttgggctggacccc

SEQ ID NO: 146862 - DNA, 100 bp, Homo sapiens
gagagaactcagcgacactacctgggccatacagactgtgtgaaatggtattgaagcccctgggtgataatttgatggaggaaaacataaggcagtctgt

SEQ ID NO: 146863 - DNA, 100 bp, Homo sapiens
agccaagaaaccatcaaagtgctcttgggggtcattcaggagttggaaaaaggagaggcccatcgggaaggagccatgttcgactacgacaagagcaagg

SEQ ID NO: 146864 - DNA, 99 bp, Homo sapiens
ttctgaggctgaactcatgagaagtatgggattgccacttcaatttggtaggataactgcacataaggattttgagcctagatctgttgatcttagtaa

SEQ ID NO: 146865 - DNA, 83 bp, Homo sapiens
ggcgacatgatggcgggagagaagaagcgcaggcacaggaagctggtgacggcgatgaacggcaatagccctctggaacaaga

SEQ ID NO: 146866 - DNA, 82 bp, Homo sapiens
cttaagttcatgaattccagagttttcaagaaaattcaaggtatgttatgcataaaagtggataatttacatgataaatgaa

SEQ ID NO: 146867 - DNA, 97 bp, Homo sapiens
ttcctgctgccctcaaggtcgtgcgtctgaagcctacaagaaaggcaagtgtcgtggacttcgtactgctaggaagctccgtagtcaccgacgagac

SEQ ID NO: 146868 - DNA, 100 bp, Homo sapiens
tctattactgtattatcaccaccccagatgacctggaggggaaaaatgaggactcagtggaactgctggtgttgggacggggaggtttactgcatcgacg

SEQ ID NO: 146869 - DNA, 101 bp, Homo sapiens
gactgcggagtcagacggcgctatgtacgccctcttcctcctggccagcctcctgggcgcggtttgaacgccatgaccctgtggatgggagaattactgag

SEQ ID NO: 146870 - DNA, 80 bp, Homo sapiens
cagaatgaagacttgaggcgaatggccgaatctctccgatgttcctcctgctgatcaagagaagctttttatccagaagt

SEQ ID NO: 146871 - DNA, 100 bp, Homo sapiens
ctcatgtggggggtaaaccactcgcacatggattaattgatgtatgttgagtttatggagctgccttttggtggcttgctttatctgcagtttttaagaa

SEQ ID NO: 146872 - DNA, 110 bp, Homo sapiens
gttcacgcacgggatccagagcgccgcgcacttcgtcatgttcttcgcgccctgacatgaagacatcttatccatcctcactgctgtcaacgatgatgtgagtcgaagag

SEQ ID NO: 146873 - DNA, 90 bp, Homo sapiens
gaccggctccgcagcaagatggcggacgagaaggacagggaagatgagattgtggggaacctgggtgaaggcacctttggcaaggtggtg

SEQ ID NO: 146874 - DNA, 73 bp, Homo sapiens
ccgtgagcctcccgcccaaggagaatgcgctcttcaagcggatcttgtatggaagctccaaaaggaaagatac

SEQ ID NO: 146875 - DNA, 75 bp, Homo sapiens
tggtcagtgccatttcgcctttatcgtggtggagtccaccctggctgtggaaaataattgctgccttttgcatcc

SEQ ID NO: 146876 - DNA, 96 bp, Homo sapiens
atattctaggatcttccggagctgccgtgcatacctgtgtgaaagcaaccttccacgtgtccaaggcagctgcagatttgatggcctactgtgaag

SEQ ID NO: 146877 - DNA, 101 bp, Homo sapiens
aaaatatcccaaggactaatctgatcgggtcttccttcatctggtcacctgacttttgaatgccgcaattttctccgagtagaccctaaaagggacatagt

SEQ ID NO: 146878 - DNA, 100 bp, Homo sapiens
tgggttcccaaacactaacttgtttccctgggaatttggaggtgggttcgaaaaagtgtaactgtgtggaaccgcataatcccagcaatggcacattgaa

SEQ ID NO: 146879 - DNA, 100 bp, Homo sapiens
cgctcgtcatggcctacccgggatacggaggagggggctgaaaaactgggtggtagctgaagacgtggtgtttaaacctgtggctgccccctggaacccg

SEQ ID NO: 146880 - DNA, 80 bp, Homo sapiens
gttcctcctctgatgccaggaatgccaccagttatgccaggcatgccacctggtgagggtcgctgtctgcccattgatag

SEQ ID NO: 146881 - DNA, 75 bp, Homo sapiens
gggatacccttccatttcaaagaacagaatgctaaggaagctgtggcaagagctggctcctccacagctctcagg

SEQ ID NO: 146882 - DNA, 97 bp, Homo sapiens
ctggagcctcagttggaagcagccgatccagcctgcggagcctgtggggcagggatcgtgggactttaccagatcggtttgtaataacacctcgaag

SEQ ID NO: 146883 - DNA, 82 bp, Homo sapiens
ctggagcctcagttggaagcagccgatccagcctgcggagcctgtggggcaggggagtctctcaggaaaaagaagcccagat

SEQ ID NO: 146884 - DNA, 80 bp, Homo sapiens
atcctggtcatcttctatttccaaaacctcctgccccccgaggtctgcagtctcctgaacccagcagccatctacgccaa

SEQ ID NO: 146885 - DNA, 76 bp, Homo sapiens
tgccttctgccgccggccggcgcgtcgtccccacagggtcttgtcctgtcactctggctggaatacaatggcgtaa

SEQ ID NO: 146886 - DNA, 88 bp, Homo sapiens
aggatagcattgctgaccagatggagatcagcaaggacaactcctgcaaagaaaactgtacttgttcctcctgcttgctccgggcccc

SEQ ID NO: 146887 - DNA, 82 bp, Homo sapiens
taagaagaccgagagtcaccacaaggccaagggcaagtgatttgacagctgagatctgtatctgtggacctgaatgttgatc

SEQ ID NO: 146888 - DNA, 100 bp, Homo sapiens
cttgataagaggcgcaaaagaaaagaatctcaaagtgaaaggaccagttcgaatgcctaccaagactgagaacaacgatcatattaatttgaaggtggcg

SEQ ID NO: 146889 - DNA, 75 bp, Homo sapiens
tgttctagttcaccagtgcagtgaggggctcagtatccgggcctcccgagaggagcttcagtttcagcgactcac

SEQ ID NO: 146890 - DNA, 76 bp, Homo sapiens
ttttgacatctgtacttcaagaaaggattggccatttgatgatggagctccaccccctaatcagatagtagatgat

SEQ ID NO: 146891 - DNA, 83 bp, Homo sapiens
gcctgatcctggaagagactcggggccccccagcctccgccaacccagatgacagatttgaagatctggaagaggcaaatcca

SEQ ID NO: 146892 - DNA, 80 bp, Homo sapiens
tggtcgtggtcattgttgcttccttcttcatattgaagaacttcaaccccacagttcttagtaaacacttgccatcgtca

SEQ ID NO: 146893 - DNA, 100 bp, Homo sapiens
ctggtgctgaggacggacgccattggagttcccgagaagaaatgctgagagatatcatccgtgaatacactgatgtttatccagaaatcattgaacgtgc

SEQ ID NO: 146894 - DNA, 51 bp, Homo sapiens
gagcgcgcctagccggctcgcgaatgagacaccaattattgcggtgatggt

SEQ ID NO: 146895 - DNA, 90 bp, Homo sapiens
gaaagaatagcacttggagtgcttttcatgcaacacccaacacttataagcggaagaacacagaaacagctctagacaacaaaccttgtg

SEQ ID NO: 146896 - DNA, 58 bp, Homo sapiens
ctcttggaaagctggaaacatagtccgttttatggtcccaggattggcgcactttata

SEQ ID NO: 146897 - DNA, 50 bp, Homo sapiens
gctccagtggagagttcttacgctccccagaggcccatctcaacacagag

SEQ ID NO: 146898 - DNA, 97 bp, Homo sapiens
cggcggcgggagatcgcgggcgagcggagcgcaacactcgcttggttggggagatcggcgcttggccgagaacagcccatcttcaccacccgagcgc

SEQ ID NO: 146899 - DNA, 76 bp, Homo sapiens
gtctcttggtactggattatcatccttgctctgtcatccaggctggagtgcagtggcacaatcttggctcactgct

SEQ ID NO: 146900 - DNA, 100 bp, Homo sapiens
atggccgtgggcatctcctacattagcgtctacgaccaccaagtgaagccttctccttccaaaaagtttcggtctggctcatctttctctcggcgagcag

SEQ ID NO: 146901 - DNA, 139 bp, Homo sapiens
tgtggccccgtgtcctgcaggtattgggagatccacagctaagacaccgggacctcctggaagccaaaaatggtgtcatggagaaactccagctgggcccagagattctgcagcgggaaaatccaaggcttatttatgc

SEQ ID NO: 146902 - DNA, 90 bp, Homo sapiens
tggtgattgtgaaggacatagacatgttttccatgtgtgagcatcacttggttccatttgttggaaaggaattgagtgatctacagcgcg

SEQ ID NO: 146903 - DNA, 83 bp, Homo sapiens
cgtgcgcctgggggcaccgctgccgttccgagtgttctaagaacggaagcatctgggctggatggaatttagcatcaagcaga

SEQ ID NO: 146904 - DNA, 82 bp, Homo sapiens
agaatctcgatgctggcctggagcagaaactgagctggaccactggagcctcggagcatcagatccatgctgctgctgactc

SEQ ID NO: 146905 - DNA, 100 bp, Homo sapiens
ggaagacggaggtcctctttccttgcctaacgcagccatgtttgaccttgtctgtgtcaatgcgtggatgctggacctcacccaagccatcctgaacctc

SEQ ID NO: 146906 - DNA, 101 bp, Homo sapiens
cgacctctggttctacttcacactgcagaactgggttctggactttgggcgtcccattgccatgtgatggcaacaaactcatagagtttaataatggccaa

SEQ ID NO: 146907 - DNA, 116 bp, Homo sapiens
cactcagaaggtgccctctttgcaacatttcaggaaaacagagaaagaagtgataggagggctctgtagaagagacggaggatgcaaatgaagaagccccattgagggaccgctcc

SEQ ID NO: 146908 - DNA, 98 bp, Homo sapiens
ggaggcaggacgtgcccggccccgcgtcgtctggcgccgccgccgccagcgcggtacaggattatcatggtcataaaatttgtgacccttacgcctgg

SEQ ID NO: 146909 - DNA, 128 bp, Homo sapiens
tgtcacaggtccagggcagaggaccaacatgggcattttgtttatgagcaaggtggtcctgaagagcaaggatgaccaggtgaccgttatcggggctggggtgaccctgcacgaggccttggccgctg

SEQ ID NO: 146910 - DNA, 82 bp, Homo sapiens
ggcgaacatggcggcggccaccgggtttttagaacttcagccataaaaatgggcagaattttccttgatcatatcggtggta

SEQ ID NO: 146911 - DNA, 82 bp, Homo sapiens
caaatgttcgcttcaatgtggccaaatctctacaaaagattggaccaattctagataccaaataatccgcaagatgggatta

SEQ ID NO: 146912 - DNA, 100 bp, Homo sapiens
cagtgagcccatcccgttctctgatttgcagcagagaaaacatgccgagccatttcaagtttaaggaatactgcccgatggtcttccgtaacctgcggga

SEQ ID NO: 146913 - DNA, 128 bp, Homo sapiens
gaaatggcagtagagctagaagatcaagactggcttgatatgagcaatgttgagcaggatagaactattcagagaagctgtaactccccagggacaggtcttgtgattcagcaaccagctgtaccgct

SEQ ID NO: 146914 - DNA, 82 bp, Homo sapiens
gtgaatttgcctcggggacgcctctccaggtcagaagttgagtagcaggggcctaggagggctcgaagccttcacagcgatg

SEQ ID NO: 146915 - DNA, 90 bp, Homo sapiens
tggatgagccctatgacagacgcttcgtcaagtggatgatcaagaacaagctggcagccaggaggcaggagcagcgggcgacagtgcggg

SEQ ID NO: 146916 - DNA, 98 bp, Homo sapiens
tcgatgaagaggatgatgtttttggtgaaggtgtgaaatccagacaattgaagatggggcatatcagagcctaagccacctctctaccttaatattga

SEQ ID NO: 146917 - DNA, 98 bp, Homo sapiens
cggggctgaccctgcccaccaggaccgccatggggacacggcactgcatgctgctgcccgccagggcccagatggtggtgatctttgtgaagtctgtg

SEQ ID NO: 146918 - DNA, 100 bp, Homo sapiens
cctggcgctgctggctgcgctctgcccggcgagtcgggctctggaggaaaagaaagaaatacactttcgggaaatggcctctaaatcctggctgaatttt

SEQ ID NO: 146919 - DNA, 80 bp, Homo sapiens
gcaacaagttaagctgaagaccgaagcaagagctggttcagggattaaagcctgtggtttccacagaagcaccacctatc

SEQ ID NO: 146920 - DNA, 113 bp, Homo sapiens
cttgatgaatatgtggctttggtggatggggtattcttgaaccaggtcatgctccaaattgccgcagaatggaattcggcattgttcctacacagcttctcggcaacatctct

SEQ ID NO: 146921 - DNA, 83 bp, Homo sapiens
cacttaatgaccctaaaaatggcgattctgcaaccaagcacctgaaacagcagacaaagccacagacccaagcatgtcggaac

SEQ ID NO: 146922 - DNA, 75 bp, Homo sapiens
gaagagccatggaaacaggaggaagaattcccaagccaaagctttccaggaagggaaaaggccgaggcatcagcg

SEQ ID NO: 146923 - DNA, 78 bp, Homo sapiens
ctccgagtcagattggagcatttgtgttgatgaagatgaaagagactgcagggtgttgaaagcagcaggggcctagaa

SEQ ID NO: 146924 - DNA, 75 bp, Homo sapiens
gtgatgctggaaaatctcaggaatctggtctcattgggcagtcgatgatgtgaagaaaggttacatcaaagcaga

SEQ ID NO: 146925 - DNA, 83 bp, Homo sapiens
aatcgaatctcttctccctccccttcttggttcgtgagccacacatctccccacaccaagctcctccatacaagacctcggac

SEQ ID NO: 146926 - DNA, 100 bp, Homo sapiens
aaaaaagcgtccgcttccagctttgcgcagttacctagaaaagtacgagaaagttcatcattttggggaggatgatgatgaggtaccaccaggcaatcca

SEQ ID NO: 146927 - DNA, 98 bp, Homo sapiens
cggtagatttgaagcgcttcaaaggaccggacccagagaagaggaaaactctaccggtgcaggttgaagcactggacaatgccacatactttgtggat

SEQ ID NO: 146928 - DNA, 100 bp, Homo sapiens
cagctttagcccacatttctggtgcatcaagctttgaaccacgatctttgatcacctctgataagaaagacgagaatccaggacttgaatcgtatcttcc

SEQ ID NO: 146929 - DNA, 83 bp, Homo sapiens
tggacacggacgtggtcaagctaatggcagtaatgtgtgtggctggcttattcttcatccctgtagctggcctcacgggattt

SEQ ID NO: 146930 - DNA, 75 bp, Homo sapiens
attgcgagggagcgatgcggtgcagcgcggtgaacctgagcaaggtgggcgagtattggtggaacgccatcctgg

SEQ ID NO: 146931 - DNA, 101 bp, Homo sapiens
ctcgggcctcatcatggccaggaaggtgcatctgcagacgcagcaggaggtgaagctgcgcatgacgggcatggcgctgcgggtggtgcgtaccgacggca

SEQ ID NO: 146932 - DNA, 103 bp, Homo sapiens
ctacggacctgtctgggtctcagccgccaaagaccccgtccggaacttagtgatttggcccgtgaccctccagcacaatgttctgcaggtccagttggggatg

SEQ ID NO: 146933 - DNA, 75 bp, Homo sapiens
gaaaatcgcagactttctcaactcgttcggcaaggggagagccagttgcgcagagccctgcaaccagcagtccag

SEQ ID NO: 146934 - DNA, 100 bp, Homo sapiens
cggctgccacaaggtcaactactgctccaccttctgccaacgcaagggcgaagagagcctccggatcctggtggagcccgaaggggacagcttcccgctg

SEQ ID NO: 146935 - DNA, 82 bp, Homo sapiens
atcttgtgatcccatctgtcctgcagggtttgaaggcacttggatatttgcttgaagccaggatctctgaacttatacccca

SEQ ID NO: 146936 - DNA, 75 bp, Homo sapiens
tgaatatcagctcctgggtcatttttctccctgaggacaacctgaggtactttggtcaataatgtccgactccca

SEQ ID NO: 146937 - DNA, 96 bp, Homo sapiens
gaagaaagatgttttgcctactgttgatccgggtggttctcttcccaaagtggaagccaaattcatcaattatgtgaagaattgcttccggatgac

SEQ ID NO: 146938 - DNA, 50 bp, Homo sapiens
cttagactatttttcaaacaaaactgaaggctcagaagaggatgataaag

SEQ ID NO: 146939 - DNA, 103 bp, Homo sapiens
ggagcacggagaaccattaatcatctctaagaatgaagagcttcgaaacttgtctttgtctggccatgtgggatttgacagcctccctgaccagctggtcaac

SEQ ID NO: 146940 - DNA, 100 bp, Homo sapiens
aagtagctttagcgatcgggagacagccgggcgctgcaaggaacaggaaatatagtggtcattatgattagctatccaaaaggaagagaaattttggagc

SEQ ID NO: 146941 - DNA, 75 bp, Homo sapiens
ctggactcggattcgttgcctgaggtgaaagcagccttcacaagagcttacaataaggaagcccaccttactcca

SEQ ID NO: 146942 - DNA, 100 bp, Homo sapiens
caggagcaggatctgcagaagacgcagggctcaagagtgcctggaagagctgggatgtctggttgagtcctatggcatgaatgtttgccaaccaacccca

SEQ ID NO: 146943 - DNA, 74 bp, Homo sapiens
atcatgtctgcgagccaggattcccgggcccagataaaggccactgtgaaacgcaaggtatatgaagattctgg

SEQ ID NO: 146944 - DNA, 96 bp, Homo sapiens
gcagcgctctggggctcgccttgtatctcaacaccctgagtgcggatttctgctatgatgacagtttgaaagctgaatggctctatagtcaaggca

SEQ ID NO: 146945 - DNA, 82 bp, Homo sapiens
ctccactatgttgaagaaattcgacaagaaggatgaggagtcaggcaaggggagagccagttgcgcagagccctgcaaccag

SEQ ID NO: 146946 - DNA, 83 bp, Homo sapiens
ctcctcttccagaatgcctttgcgcagattctgatgctcacagtaccacctcaagtgcctccccagctcaatctccttgttac

SEQ ID NO: 146947 - DNA, 95 bp, Homo sapiens
gacctacacgcatctttaccagcaatacccacagttctgtggtgttacaggcccacctgccgtttgctgtcattggcagcacagaagaactgaag

SEQ ID NO: 146948 - DNA, 96 bp, Homo sapiens
ttaaggaatgcaattctgccaccatgatggaaggctttcagtccagtgtaaagctgttggagcgcgggagcaaaggtaaagaatgatgtaatgcgc

SEQ ID NO: 146949 - DNA, 96 bp, Homo sapiens
caagtccgtgctgtttgtgtgtctggattctggatgaaattgaagaacataacatcaaaatctatcacttacctgatgcagaatcagatgaagatg

SEQ ID NO: 146950 - DNA, 83 bp, Homo sapiens
ggtgcccgaggaggcagccaagctcgtggcctgcctctgcgtgcaaacgaagtctcactgtgttgtccaggctggtctcaagc

SEQ ID NO: 146951 - DNA, 100 bp, Homo sapiens
aagcagcagtggggacgagctttgaaagaacttgccagacttaaacaggctggtgcagtggtgtcatcttggctcagtgcagcctcgacttcctgggatc

SEQ ID NO: 146952 - DNA, 82 bp, Homo sapiens
gctgtctccttgaaggttctccctgttggttctgattaggtttttagaacttcagccataaaaatgggcagaattttccttg

SEQ ID NO: 146953 - DNA, 73 bp, Homo sapiens
ctgactgcccgcctggcactgaagccgagctcaaagattatactgacctggccatgagcacggtgaagcagac

SEQ ID NO: 146954 - DNA, 74 bp, Homo sapiens
gccgcccccccagacaagatggacaccgcggaggaagggtcttgaacttggtttcctgccctggacttaacctg

SEQ ID NO: 146955 - DNA, 107 bp, Homo sapiens
tccagcatgccgatagttcaaacttctatatcacagaaaagatcagtgtactgttacccggacatacctattccttcacaagttctggttcttcagtgctgcttact

SEQ ID NO: 146956 - DNA, 50 bp, Homo sapiens
ccgagggcctgggcgatgtagaaaaggaactgatgactcggttgtttctg

SEQ ID NO: 146957 - DNA, 100 bp, Homo sapiens
tccctactggatggcaccagaagttattgcctgtgatgaaaacccagatgccacatatgatttcaagctggagaatgctggaggagaccttaaggatggc

SEQ ID NO: 146958 - DNA, 100 bp, Homo sapiens
gcagaaaccaacagacaatgccaatttacgtgtcattatggaactacttatgagctcctggtaacgtttttatccatggatgacttgcttgggtaaggac

SEQ ID NO: 146959 - DNA, 51 bp, Homo sapiens
ctcgcaggctatcctggaccagctggtgagttctgcagtcagggtgtccgt

SEQ ID NO: 146960 - DNA, 96 bp, Homo sapiens
ggccggtttgtgggcgatgctgaccttgaaagacagaaattttcagatttgaaactcaacggaccccagagtgatccagagtttgtgcagtggaag

SEQ ID NO: 146961 - DNA, 80 bp, Homo sapiens
agcccccggccctgtggaggaaactagacgcttgaagcaaagctgccatcccagaagacgacatgctctcagcaaccccc

SEQ ID NO: 146962 - DNA, 89 bp, Homo sapiens
cttgacattacagccaagatggtgctgtcccagagacaacgagatgaactttacaggcccaaaaactgcgactggcatacacaaggagc

SEQ ID NO: 146963 - DNA, 100 bp, Homo sapiens
cgagtccagcccaggaaaatggagaggccttgaaccggggcattgctgctgtcaaggaggatgcagtcgagatgctggccagctacgggctggcgtactc

SEQ ID NO: 146964 - DNA, 100 bp, Homo sapiens
catggctcaggagagagttcagctccactgcgagtagaaacacaacctgaggaatctaaacagtgggaatgtttgacatctgaatgcagagtgctcctaa

SEQ ID NO: 146965 - DNA, 90 bp, Homo sapiens
cttctctggagaaggatcagatgaacttacgcagggttacatatattttcacaaggttacaagtgaacctgaaatgattggagctgaagt

SEQ ID NO: 146966 - DNA, 72 bp, Homo sapiens
gggcttggcgcggcggccagaggaaccccgaggtgaaatgacaatggatgctctgttggctcgattgaaact

SEQ ID NO: 146967 - DNA, 96 bp, Homo sapiens
atcacttgtctggagcaagggaaagaggcctggagtatgaagagacatgagatcatggtggccaaacccacaggctggagtgcaatggcgtgatct

SEQ ID NO: 146968 - DNA, 50 bp, Homo sapiens
tccagttgttttctgggaatgagtatgagggtctcttcttaagtaatggg

SEQ ID NO: 146969 - DNA, 75 bp, Homo sapiens
cacaaatccattgaactcttttataaattcgttcctttattgccagttaagcaaaactggctctaaggatgatga

SEQ ID NO: 146970 - DNA, 88 bp, Homo sapiens
cgctgcagccggtgcgccagaagaagcggatggacagcaggccccgcgccgggggaggcgccacctgctgcagaagtttcctcatctt

SEQ ID NO: 146971 - DNA, 75 bp, Homo sapiens
agaaggctgctattgaaagagagtatgcacaggtgctgcagaaattggggaaagctgtagaaaccaaagatgaac

SEQ ID NO: 146972 - DNA, 96 bp, Homo sapiens
cattaagacttcccagcattcctacagatataaataggtaatcatagcctcctggtgtcgcacatccatgggaataatgaatttatttggactaga

SEQ ID NO: 146973 - DNA, 100 bp, Homo sapiens
gctgtgtactttgccctcagcatctcccttcatgtctgggtcatgaaaccatactcaggaggtctttgtctccaagaaacagcccgggaaggcagcagca

SEQ ID NO: 146974 - DNA, 100 bp, Homo sapiens
ctttagaaggcggaagctctatcctcctgaagataccacaagatgctttggaatactgacggccaaacccatacctcagcccaccttgggacaccttgac

SEQ ID NO: 146975 - DNA, 75 bp, Homo sapiens
tatagatcttctgcactgtttacaggcacagggaagatcttatcgtgaccaacagctgctgcttctcaagaagca

SEQ ID NO: 146976 - DNA, 74 bp, Homo sapiens
actcagtttgtgcagaagaaagaagagagggacctggtggaccgactaaagggctaattgactataattttcat

SEQ ID NO: 146977 - DNA, 80 bp, Homo sapiens
actgtgggtgatatttgcctttagtgcactcttctccttcacagtaaagtggctggtggtcctgccgtcctacgaggaag

SEQ ID NO: 146978 - DNA, 83 bp, Homo sapiens
agaatttcttttggcacctcctctccgcgcgttcttgggctattgacctgaaaagtggttctggaaaagtgtaccaaggccct

SEQ ID NO: 146979 - DNA, 100 bp, Homo sapiens
cgggctcgaacccggcaccttccgggcccaccttgtgaactcctcgtgcccagggctgatgtgcgtcttccagggctactcatccaaaggcctaatccaa

SEQ ID NO: 146980 - DNA, 82 bp, Homo sapiens
gggagatcccaggcggtgacagagtggagccatggctagagactgtgccctgtccacggtgcctcctgcatgtcctgctgcc

SEQ ID NO: 146981 - DNA, 128 bp, Homo sapiens
gttcttttggggtagtgtctgggatccagtacgagttgaatcattgttcaaataagaccccatatcatgtgaacctcctcctggctggctatgatgagcatgaagggccagcgctgtattacatggac

SEQ ID NO: 146982 - DNA, 82 bp, Homo sapiens
cgagcggcgagccggagcgcggagcccggctcccgcaccatggaggaggacgacagctacgaacttcagcgagagggaagca

SEQ ID NO: 146983 - DNA, 100 bp, Homo sapiens
gtgtctgagtggatggggacctgcctgctggcactttgatccggttttccagttcttgcacaagcaagtttgtgtcagccacgccctggggaggatccac

SEQ ID NO: 146984 - DNA, 76 bp, Homo sapiens
cggagctgctgctgtgcggagaacaacggagtgggaaaccacccatcaatgatatgttcacagacctcaaagatgg

SEQ ID NO: 146985 - DNA, 51 bp, Homo sapiens
atactgacctgtaaatcatcctttaggagaaatgctctcatatggagacag

SEQ ID NO: 146986 - DNA, 100 bp, Homo sapiens
gtcctaccgggccaagctgcctctgaggatatttctggctgtcgccaactccatggctttccagattgaatgtggtcatgtagttcttaacaagaacatg

SEQ ID NO: 146987 - DNA, 100 bp, Homo sapiens
atccgaagcctgaagatggttccaagtattccctatctagcttggatcctagcatgactatacattgtgacatggtcattacatatggattagaccaact

SEQ ID NO: 146988 - DNA, 100 bp, Homo sapiens
aacgcgagtgggagcaccaggatctcgggctcggaacgagactgcacggttatcctaccttgcggatagagaagaacgacttgagaagtgtcactctttt

SEQ ID NO: 146989 - DNA, 98 bp, Homo sapiens
gagcccggggacggcgaggccctcatgtaccacacggtcagtttaggggctggtgcaaaggatgagttgcacattgttgaagcagaggcaatgaatta

SEQ ID NO: 146990 - DNA, 82 bp, Homo sapiens
acggacaagcacagtcttcggaagatgagtgaccgaggaggtggcgttcctttgaggaaaattgacagacttttcaactaca

SEQ ID NO: 146991 - DNA, 98 bp, Homo sapiens
cgggggatgactgattctcctccgccagtacatgggctgcatcgaggttctccgctctatgcgctccctggactttaacacgcgcacgcaggtgacca

SEQ ID NO: 146992 - DNA, 100 bp, Homo sapiens
caagttcatcaaagagctcattaaggacgggaagaacctcatcgctgcgacgaaaagattgttaaaatgagtcttcggaagcaaacccctagtgacttct

SEQ ID NO: 146993 - DNA, 98 bp, Homo sapiens
aaggcttgtaatccaaagttactttgtcaggacaatcatctactgtgattgagaacattcatactattattgctgcagcggctgtgaaatttaattca

SEQ ID NO: 146994 - DNA, 83 bp, Homo sapiens
cgtggcagcctgaacggagtgtgcgacggattgggaggttagctttatacgtctacgaatatttactgcacgtaggagcacag

SEQ ID NO: 146995 - DNA, 75 bp, Homo sapiens
atcacctacccgcagggcctggcactggccaaggagattgggcagcgggtggcatgagacgtgggaacatgggcc

SEQ ID NO: 146996 - DNA, 83 bp, Homo sapiens
gccagctgccgcgactgggaggagcgccggaacgccgaggcccaggccgactgcagctcccgcccactccttctggccggcta

SEQ ID NO: 146997 - DNA, 83 bp, Homo sapiens
ccagcatgttgcaaggtctcctgccagtcagtctcctcctctctgttgcagtctctgcaccaccttgtcactgcagtgggaac

SEQ ID NO: 146998 - DNA, 75 bp, Homo sapiens
gtaccgggattccttgccccagttgattcctcagttccttttagatgattgctttaaaaatggtatcccctgccg

SEQ ID NO: 146999 - DNA, 51 bp, Homo sapiens
cggggacctggagctgacgcctagcagcagcctccttggaaagacgaaaag

SEQ ID NO: 147000 - DNA, 75 bp, Homo sapiens
cccggaaccgcgattcggcgtgtcagcacaaacacagagcagtctaaagcaaccgagcactgagaaaaatgaact

SEQ ID NO: 147001 - DNA, 90 bp, Homo sapiens
ggaggatgctcctgcctcccagagaggggagccggcgaggatcaaaatcttcgaaggaggttatcaggaactgttgccgttattacatca

SEQ ID NO: 147002 - DNA, 75 bp, Homo sapiens
tggcccaaatgaggccatggtggtctccgacacgggtcctggaaaacggaagagagaagatgaagcccctatctt

SEQ ID NO: 147003 - DNA, 98 bp, Homo sapiens
atccttcaggagtctgtcaaagagaaagtaacaagaatcattcttgcagcatttcgttcctgccattgactctaccagaggagattcttcaagcttag

SEQ ID NO: 147004 - DNA, 75 bp, Homo sapiens
agtgatttgcgccatcatcctcatcatcatcatagaggacgtctttgatgaattatttaagctggctccggagaa

SEQ ID NO: 147005 - DNA, 100 bp, Homo sapiens
cgcagatccagcaggaggttatcaaagcctatggcttcagctgcgacggggaaggttctctgtgaaaacgctgctggagaagtacacagcggagcccatc

SEQ ID NO: 147006 - DNA, 100 bp, Homo sapiens
gaaaccagaatgtgccaaagagttcaacttgtatttctatcacttttcaagggcagaacagtccaaggtggcgggaaatgttttttaaagtgaagaaaac

SEQ ID NO: 147007 - DNA, 100 bp, Homo sapiens
cccgcacccgggcccgcaggccaggtggatggaagtttgcttagttgaagaattgccaccaaccactgaattggaagaagggctccggaatggagtttac

SEQ ID NO: 147008 - DNA, 100 bp, Homo sapiens
aacggctccccgtcgtcctggtgctgcagcgttgttgacctcctgtactggagagacattaagaagactggagtggtgtttggtgccagcctattcctgc

SEQ ID NO: 147009 - DNA, 74 bp, Homo sapiens
ctggagaggataaatcctcaaaaaatcttcttggttctgctacaaaccttgccaccatggaagaaagagtacaa

SEQ ID NO: 147010 - DNA, 98 bp, Homo sapiens
ccatgcagttcatcagccaccgattcccagaagatcatgatcccaccattgattaccagttgaccagtgcagagctctcctccttaccagcctttagt

SEQ ID NO: 147011 - DNA, 100 bp, Homo sapiens
atgagcgacgtggctattgtgaaggagggttggctgcacaaacgaggccctgggctgcatcttgtacctgctgtgcttccggcagcacccttttgaggat

SEQ ID NO: 147012 - DNA, 101 bp, Homo sapiens
cgccctccgtctgggccgccgtccccgggaaaacgttcgtcaacatcacgcccgagggcaacatccttcgagaccggttcaagagcttccagaggaggaat

SEQ ID NO: 147013 - DNA, 82 bp, Homo sapiens
ggcggctcctgccctctcgctttccctctcgcgtctctggctgcagatatgaggccccaggattcctggcgaggtcctcctc

SEQ ID NO: 147014 - DNA, 90 bp, Homo sapiens
actactgtgacaacattaacgcctgtcccaagccagatgatttaccattttccacagtggtcccgttaaaaacattctatgagccaggag

SEQ ID NO: 147015 - DNA, 87 bp, Homo sapiens
ctctaggaaacatatgttacgatagccgatgctttaatctggatcccaatagagttttggatgtcattttagaagtgtttgaatgca

SEQ ID NO: 147016 - DNA, 130 bp, Homo sapiens
agacattgttcttgccggctccctacggtgccgtgtgtgcgtgagagaagaccagtctttcctctagctatatcgagaagtttactgactttcttcggctctttgtgagtgttcacctaagaagaatcga

SEQ ID NO: 147017 - DNA, 98 bp, Homo sapiens
gtcgttctgcagcttcttcgggggcgaggttttccagaatcactttgaacctgacaatgcagatcttcgtgaagactctgactggtaagaccatcacc

SEQ ID NO: 147018 - DNA, 100 bp, Homo sapiens
cttcacactgcagaactgggttctggactttgggcgtcccattgccatgcaatctgcacatcgtgctgccacacgaggcttcattcgttatggctggcgc

SEQ ID NO: 147019 - DNA, 82 bp, Homo sapiens
gagtccccgtacgcctacagtaacggtcatcatcagatttgaaatatttaaagtggatacaaaactatttcagcaatgcaga

SEQ ID NO: 147020 - DNA, 100 bp, Homo sapiens
cagctttggataatgacgacagcaacccgaagacagggaaatttaggctggagtacaatggcgagatctcagctcacggcaacctccgcctcccgggttc

SEQ ID NO: 147021 - DNA, 98 bp, Homo sapiens
ccactgcggtccacggccaggtgaacaatgtcagcctgggcttctgcccaccacagccctaccgggagccggaaccctctgtggccgaacccccttcc

SEQ ID NO: 147022 - DNA, 100 bp, Homo sapiens
ggaacgccgtgctgcctcgggctatcctgtcaaggtgccgctcgaagtccaggaggcagatgaagccaagatagcagaggcagcaggccgtgccgggggg

SEQ ID NO: 147023 - DNA, 98 bp, Homo sapiens
ctcctgaaggaggggaagggacgtgggggcggccacggcaggtctctgaaagaagatgaatttggctgagatttgtgataatgcaaagaaaggaagag

SEQ ID NO: 147024 - DNA, 97 bp, Homo sapiens
ccggcctgggagaagcagcagagaaaggagtaaacatggaagtactaacttcattccagaacaatttttggatgacttcattgatcttgttatctgg

SEQ ID NO: 147025 - DNA, 98 bp, Homo sapiens
gggtgtaatacatcatgaactgcaggaccaagatcactccatggatgaaatgacagctgtggtgaaaattgaaaaaggagttggtggcaataatgggg

SEQ ID NO: 147026 - DNA, 100 bp, Homo sapiens
gagcaaggaaaaaaacctctgaccgtgaagagacatgagatgattgccaaacccccaggtaaaccccagtgataggtaccatcttatgcctataattaca

SEQ ID NO: 147027 - DNA, 74 bp, Homo sapiens
atttaatggaaaatcgcttggttaaaacctgacacttttaacagatctggacgttggtggttggctatgtgttg

SEQ ID NO: 147028 - DNA, 101 bp, Homo sapiens
agctactctccagaaaggagcaaatcatactctttccatcagtctcaacatagaagtgttactgcggaaatgcaaaacttagtccatcggcggatttatcc

SEQ ID NO: 147029 - DNA, 75 bp, Homo sapiens
tgacatggaaggggcagtacaagcttacgtctctgctcttcagtacaatcctgcttgctatcagaggaagtggag

SEQ ID NO: 147030 - DNA, 90 bp, Homo sapiens
cctagactctacaaatgtagaagctgcttttcagacaattttaacaggcatgcccaagagaatcgtaaatgcaaaaattgcttgccttga

SEQ ID NO: 147031 - DNA, 97 bp, Homo sapiens
gcagaaagcatttaaccagcatggctacttcatattttggaaagcagtttttaagacaacttaccgtgacaatcagagctttgttgcagaacctgaa

SEQ ID NO: 147032 - DNA, 97 bp, Homo sapiens
ttattgggcttttccaagtaaagctcttcatgcaaggaaacataagttggaggttctggaatctcaggtggtcttcgagggatagcacgaggtggtc

SEQ ID NO: 147033 - DNA, 75 bp, Homo sapiens
caacaacccactcaggcacttccgggacttgccatgaggtgttgaagccttgtttcactgagttggagagactgg

SEQ ID NO: 147034 - DNA, 83 bp, Homo sapiens
cttcgctgtggcatggcggacgaggggaagtcgtacagcgattgcaacacctgctcggtataccgtgactttgggaggaacat

SEQ ID NO: 147035 - DNA, 94 bp, Homo sapiens
gttaagaagcacctcatgcaagcgagggacctgggactgctcacagccagaattaaacaaccaccatgtcgagcaaaaaggcaaagaccaagac

SEQ ID NO: 147036 - DNA, 100 bp, Homo sapiens
attagtggagctggaatggtgagaccaacatccgtgacacctggactctttcaggttctgaattatcctcctggattccaaagcctcccaggccgagctg

SEQ ID NO: 147037 - DNA, 101 bp, Homo sapiens
ctccatctccagatcggatcacggtgagggaaagatgagcgaggagacggcgacttctgacaacgagtacccactgatggtaatgctggcctgctggctga

SEQ ID NO: 147038 - DNA, 49 bp, Homo sapiens
gcctggcctcgcttctgtcccagccaccaccacctatcatgacagatgg

SEQ ID NO: 147039 - DNA, 100 bp, Homo sapiens
ctccaagagcacattgcctggtaagatggtgaagtggatcctaaagagaggatagcacgccaacgaaaattattacagaagaaacttggccttaatatgg

SEQ ID NO: 147040 - DNA, 88 bp, Homo sapiens
tttctatagaaactgggttggaagtcagagctgcacaaagggaaaggcctgtacaggtcagaaaagagtgaaagatgctcagggagga

SEQ ID NO: 147041 - DNA, 97 bp, Homo sapiens
tggccgcgcctggcctggccgggaccatgtttggtaactctcattcgacatccatctgaactaatgaatgttcctcttcagcaacaaaacaaatgta

SEQ ID NO: 147042 - DNA, 50 bp, Homo sapiens
tgagaagctcttacgttatgcccagcagccagagccgaagtgtgcagcgg

SEQ ID NO: 147043 - DNA, 75 bp, Homo sapiens
ggaagattctcatgcacagattgaaaccctctgagatatcaaccccctagtgagaaagatcagtctaaagaaaag

SEQ ID NO: 147044 - DNA, 100 bp, Homo sapiens
agaagaagaagcagctgctcagatgaagtgctcagatggaagtagattatacagagcaactgaatttcagtgatgatgatgaacaaggaagtaacagtcc

SEQ ID NO: 147045 - DNA, 75 bp, Homo sapiens
aacgacaggacgttggggcggcctggctccctcaggttgtggcagcactgcctgaaggtatgagaccagattcta

SEQ ID NO: 147046 - DNA, 83 bp, Homo sapiens
ctccgagccccttcctgagaagatcccaggggaacgcccttttgcttgtgactggcagggctgcgacaagaagttcgcccgct

SEQ ID NO: 147047 - DNA, 100 bp, Homo sapiens
acaatagctcacagatacacccccaaagagcaactgaagattcatacgcagctggcagatattatcatagttgctgcagtactatactggcaattgctgg

SEQ ID NO: 147048 - DNA, 100 bp, Homo sapiens
aagctgctgcaccgcggcgccgacatcaattacgccaatgtggacggactcactgccctgcaccagatcgtaaagctgaaaattgaaatcatgaaagtag

SEQ ID NO: 147049 - DNA, 100 bp, Homo sapiens
aggaggctgaagtctcacatcagaggtgtcaagtgtctatgaaccagatagaaatgcattacggaggaaagaacgagaaagaagaaatcaagaaactcaa

SEQ ID NO: 147050 - DNA, 100 bp, Homo sapiens
gcccagtctggtgtttggaatgacgacagtatggtgacagagctgaatgaacctctctccaatgaagatcgaaatctcctctctgtggcctacaagaatg

SEQ ID NO: 147051 - DNA, 90 bp, Homo sapiens
tgtctcttctgaggaactggatcgtgccctgcgcaaggttgttggggagttcaaggtgatcaactgggagaacacgctccacattccagc

SEQ ID NO: 147052 - DNA, 75 bp, Homo sapiens
aggaaaccttggagagcgctctcatcgccctcgactcggaaaagttcagggtcggagggagaagatggctttcag

SEQ ID NO: 147053 - DNA, 74 bp, Homo sapiens
tggccaagcgtccggagcacaatagatctgaagccttgaagtttgaaattgttcctgaagatgacccccagaat

SEQ ID NO: 147054 - DNA, 100 bp, Homo sapiens
gttgaaagtgatcttcctggagaactaccgtgtgtccttggctgagaaaggtgatcaacaagtatggagatctctacggagcagaacgcattgctgaact

SEQ ID NO: 147055 - DNA, 74 bp, Homo sapiens
caccagcttccagttagtggatatagcacaccatccccagccaatggtgatggaatttcctgataatgtgttaa

SEQ ID NO: 147056 - DNA, 83 bp, Homo sapiens
ccgcctccctcccgcgcgtgctgcgggtctgctcgggggtctacttcgagggtgtggatgaggtcaccattgtcaacattttg

SEQ ID NO: 147057 - DNA, 82 bp, Homo sapiens
ggcagtggagcgcgccaagcaggtcaccatgacggagctgaacgccatcatcgggactccatcaagaatgctggaggaaggg

SEQ ID NO: 147058 - DNA, 101 bp, Homo sapiens
gaggaggaggaggaggcgaggaggagagactagccatgggaccacaccaccaccaccacaaccaataggccaggaaccaccagagctccggcaaaacctcc

SEQ ID NO: 147059 - DNA, 75 bp, Homo sapiens
acagcacctcatcccctggatgggggaccacaagatcctcatcgacagccatggcaatgacaggctcaacacctt

SEQ ID NO: 147060 - DNA, 75 bp, Homo sapiens
ccgcttttctctaaggaacccggaaaatcctgccttgcttcgttgggcctatgcaagaacaataaatgtctatcc

SEQ ID NO: 147061 - DNA, 84 bp, Homo sapiens
cttgaattagattacagcgatggggacacagaaggggccaccttatcttagttccagaatttagtcttcctttggaatactacc

SEQ ID NO: 147062 - DNA, 75 bp, Homo sapiens
gcaagaggtactgtccatcaaacatcttccaccacagcttagaggttatcaatactctggctgaccatcatcatc

SEQ ID NO: 147063 - DNA, 100 bp, Homo sapiens
tgagaactcagagctggcagacgagcaggacaaggagacggtcagagtccaaggtccgggtatcttaccaggttgaagctttctaacgaggagatccggc

SEQ ID NO: 147064 - DNA, 100 bp, Homo sapiens
ccttctcaaccttgtgggatgtgaaaactctgttactgaaggaattacatgaatgacagtcttcgaaccaatgtgtttgttcgatttcaaccagagacta

SEQ ID NO: 147065 - DNA, 100 bp, Homo sapiens
tattaaaggaagcacacctaaggtttatgttccagatgaaaataatactattttggggagaaatacaaataaacaagtttttgaaggcttgacaactgga

SEQ ID NO: 147066 - DNA, 75 bp, Homo sapiens
tgagaatttgaaaaatgaagatgatgtagacactggactattagattccatcacccagcacaaggtctgtgcccc

SEQ ID NO: 147067 - DNA, 100 bp, Homo sapiens
ccgattccacaactacatcctcccgcacctgcggggcgaggaccgcgtctgccactgcaactgtggccgatctcacattcttgaaggtggcattgaagag

SEQ ID NO: 147068 - DNA, 87 bp, Homo sapiens
gaaactcaatgatcgtgtcatgagagtcacgagaagagaatgccttctagatgcaaaatcacctccaaaccagaccacttttcttga

SEQ ID NO: 147069 - DNA, 76 bp, Homo sapiens
tcatgctctggaattttggcatcaaggacaaacccaccttcatcaaagggggctggtgaattaccatatctccgtc

SEQ ID NO: 147070 - DNA, 122 bp, Homo sapiens
tttgaactggaccccgcgagcaccagagtcggcgtaactatcgcctgacaggctggagcaggctctgcggctggagcctggggagctggagacgcaggagcccagggggctggtacggcaga

SEQ ID NO: 147071 - DNA, 75 bp, Homo sapiens
aaaacctccttatgctgatatacatccaatgaggcaccagaattatggaacatttatcaacagcctaaaataaag

SEQ ID NO: 147072 - DNA, 100 bp, Homo sapiens
aggtgccttgagagcttcaggggaaatggcttcagcgcagtatattactgcagaaatcatagcccactaatgagttttggagccagctttgtcagttttt

SEQ ID NO: 147073 - DNA, 100 bp, Homo sapiens
ggccgtccagcagatggcggatgccctgcagtacctgcagaaggtctctggagacatcttcagcaggagatcgagcgattgaaaagtgagaagcccacat

SEQ ID NO: 147074 - DNA, 118 bp, Homo sapiens
acgaggtggcctgcaaagatcgcctgcaccttcaaggccaaactatgcaggtggggtggaagacaacccgtgagtattacaccttcatgtgggttactttgcccattgacctaaacaa

SEQ ID NO: 147075 - DNA, 87 bp, Homo sapiens
ggcgggggcaccgagggctaccacgttctgcggatgttcaagacagagttccttcatattcacaaggagcaagaccaaaagaaaact

SEQ ID NO: 147076 - DNA, 82 bp, Homo sapiens
gcggggcggagccgagagccacactttcaagtaaaccagggcctacttggaagtgcaccagcaggagcaagagaaactccag

SEQ ID NO: 147077 - DNA, 98 bp, Homo sapiens
acgcggccaggtgtgccgaggcggcggcgcccgggagctcggggaccgtgcgcagcggctggagggttcccagcaccatgagggcctggatcttcttt

SEQ ID NO: 147078 - DNA, 50 bp, Homo sapiens
ggcggggacaggacggcggggcgagccagttttcggctttgtgagaaacc

SEQ ID NO: 147079 - DNA, 100 bp, Homo sapiens
aggacatggccgcgcacaggccggtggaatgggtccaggccgtggtcagccgcttcgacgagcagatcgaacggttggaagtaagcagccttgcccaaac

SEQ ID NO: 147080 - DNA, 75 bp, Homo sapiens
cggagcccggcgctttccccgcaagatggacggtttcgccggcagtctcggccatccttcttgcctggatatgac

SEQ ID NO: 147081 - DNA, 100 bp, Homo sapiens
tgcaaagattcgaatatggaactactttatgaacaagatgtgtgcaacagcaccgatcttccggaagtcgagatcattagcctgctggaggagcagctgc

SEQ ID NO: 147082 - DNA, 90 bp, Homo sapiens
gagggctcaggccgagacaccttgcagctgccgccgccgccaccgagccgccgctactatactggcaattgctggagaagattttgcaat

SEQ ID NO: 147083 - DNA, 100 bp, Homo sapiens
ctcggggctcctctttgccctgtacttctcggcggtgcagcggtacccggggccagcggccggagccagtaacgaatccagaaaactctggagagccctt

SEQ ID NO: 147084 - DNA, 96 bp, Homo sapiens
cccaggccttggtcctagcacccactcgagaattggctcagcagctgattgggcagaaagtggcccatgctctggcagagggactcggagtaatcg

SEQ ID NO: 147085 - DNA, 80 bp, Homo sapiens
gtcgggacaccccggaagctgggaaatggtgtcgtgaaaactacccctaaaagccaaaatgggaaaggaaaagactcata

SEQ ID NO: 147086 - DNA, 89 bp, Homo sapiens
ttgcaaatcttgaatttgctaatgccacacctctctcaactctctcccttaagcactgggatcaggtttcctggaagtggcggatgagg

SEQ ID NO: 147087 - DNA, 75 bp, Homo sapiens
tcttccaggttacatacagcttacatcttgcatcctcaagcgctgatgtagaaggccaatccttaagacaccgag

SEQ ID NO: 147088 - DNA, 82 bp, Homo sapiens
ggctttcctgctggtggcaaccgcctacgagacactcaaggttaatttggagtggcccctggagtcagtttcctacaccatc

SEQ ID NO: 147089 - DNA, 100 bp, Homo sapiens
gttcgcagtgacctggggaacctgctcaaagccctgggtcgcttggaagaagccaaggatgcgtattggatagcaatgaatagttctctgaaatgtaaaa

SEQ ID NO: 147090 - DNA, 82 bp, Homo sapiens
gacaggaattgagagtcacagaggaaggacagtggagtctggcatcttattgttcaaatctgaacatcaatgatgtactagg

SEQ ID NO: 147091 - DNA, 75 bp, Homo sapiens
cgagtatatatctgggatccacataatggagacattctgatggaatttggggtgccttcaccagggatggaagag

SEQ ID NO: 147092 - DNA, 98 bp, Homo sapiens
ctatgacattgagcaacagcagataaggaacgccctggaaaacatcagggaaagggtgccacactgggaatgcaagctgtccttgcttctgaaccaag

SEQ ID NO: 147093 - DNA, 98 bp, Homo sapiens
aaatacttttagcagcactagtattgcccaagctgactatggccttgaacacttgatgctgcagttggagaagaaacttgaacgtgaacttgaggatg

SEQ ID NO: 147094 - DNA, 88 bp, Homo sapiens
tgacgcaatcagaaaatcaagtaaaggaacccaacagagatctcttctgttctccactgctagaatgggtaaaggacgaggaagatga

SEQ ID NO: 147095 - DNA, 74 bp, Homo sapiens
gggagatccacagctaagacgccaggacccactggaagcctagaaatgtactatactggcaattgctggagaag

SEQ ID NO: 147096 - DNA, 87 bp, Homo sapiens
gagctagagactgccggtgccttcatgggcaggactaggccgaaaactccccaggtcatcatcagatttgaaatatttaaagtggat

SEQ ID NO: 147097 - DNA, 74 bp, Homo sapiens
gcggatgccctgcagtacctgcagaaggtctctggagacatcttcagcagatgtgaggtgaggatgagccgcag

SEQ ID NO: 147098 - DNA, 82 bp, Homo sapiens
cccagaccctggagcctcagttggaagcagccgatccagcctgcggagcctgtggggcagggttatgtaccgaaggactcta

SEQ ID NO: 147099 - DNA, 89 bp, Homo sapiens
cccagataggtcattccacattggtgcctcatgatgttgctgacaaaaatgcttctaacagaaattctgctggatgtcacagatgaaga

SEQ ID NO: 147100 - DNA, 80 bp, Homo sapiens
aaccacgagacggccttccaagcagcctcccgcgacgatgcccctcaacgttagcttcaccaacaggaactatgacctcg

SEQ ID NO: 147101 - DNA, 98 bp, Homo sapiens
tttggatacctaacattttacggtccccttcccctgagcccatctacaatagcgaggggaagcggcttaacacccgagagttccgcacccgcaaaaag

SEQ ID NO: 147102 - DNA, 87 bp, Homo sapiens
gattgtcgtttttacccggccaaagtcactgctgttaacaaggatggctgtcattatttgtatcaaaaacaaagaatttgaaaaggc

SEQ ID NO: 147103 - DNA, 100 bp, Homo sapiens
gggaaattgtattctccgagtcagattggagcatttgtgttgatgaagatgaaagagactgcagagaaaaaagagtgccggcgggaccaccgcccaccgt

SEQ ID NO: 147104 - DNA, 101 bp, Homo sapiens
ccggccagaagcgggcggcgcgggggagatggtatccaagcccaccaatgggatctgtctcagcacccaacctgcctacagcagaagataacctggaatat

SEQ ID NO: 147105 - DNA, 80 bp, Homo sapiens
ccgccatgtcatccacttcgcccaacctccaggcataagatgcacatttttctgctctggagccgggaatgaaatattct

SEQ ID NO: 147106 - DNA, 85 bp, Homo sapiens
agggagcattggagaaaatcaggtaaagatgatgattcttttgatcggaaatcagtgtaccgaggctcgctgacacagagaaacc

SEQ ID NO: 147107 - DNA, 90 bp, Homo sapiens
ggaagcacaacgtggctgagccgtgttccatcaaagtccttgacaaggctacggaaggttgtgcaggaccagcgttccctgtgcaggcgc

SEQ ID NO: 147108 - DNA, 100 bp, Homo sapiens
agctggaggtggcttggactccaggcctgagcggcatctaccccctgacccactgcaccctgcaggaggcccgggcagtcctgacctttgccctggacag

SEQ ID NO: 147109 - DNA, 88 bp, Homo sapiens
ccagagtctctttccaaatctccaggttttccctgcgctgggtaatcatgactattggccacagatctatgggaccccctccagcagc

SEQ ID NO: 147110 - DNA, 75 bp, Homo sapiens
cccagtcgctacgggagcagccagagtttgtcctggttgtggtcaagactggatgatgtaactggctctctagga

SEQ ID NO: 147111 - DNA, 100 bp, Homo sapiens
aagtattttaagaatggagagaaatacgcagtgcctgtgctcaggacaaagaagaagtttctcgagtggatgcaaaaatgagtcagccttgaagatggac

SEQ ID NO: 147112 - DNA, 90 bp, Homo sapiens
gggagtgatgccggttatctctgtgaatctcaggtgacaatctccaatagacttgtgtcttcaccttgctgcattgtgaccagcacctac

SEQ ID NO: 147113 - DNA, 90 bp, Homo sapiens
aggggccccgaagaactcccacaatgccacaggaggaggcagcaggttgcctgtggctggagaaaggaatgtgctcatcaccagtgccct

SEQ ID NO: 147114 - DNA, 82 bp, Homo sapiens
cattctttgagggacccccattcaagttcaagttcacaattggcgtgtttgagaagtcccccctgcgggtgaagaacttcgg

SEQ ID NO: 147115 - DNA, 82 bp, Homo sapiens
gcctaaaaaatgtcatttttaccaactgtgtaaaggatgaaaatgtcaagcagccaagaagtatgatgcgtttttggcctca

SEQ ID NO: 147116 - DNA, 113 bp, Homo sapiens
aggctagtctcaggctggggatggctcctgtctatttcttctctctcagagactgcagcattttgaaagcgaagcagaagccgtagaatcagcggcgagcctgttgaaagaac

SEQ ID NO: 147117 - DNA, 75 bp, Homo sapiens
cgcgtgcggaggaccaggcgcggcgcggctgcggctgaggtcacgaacgagatcacgccggtgctgtcgtactcc

SEQ ID NO: 147118 - DNA, 83 bp, Homo sapiens
atcagtacaaaaattcttcaagaaatctaagatgactttgaagaagccaaggaaattttgacaaagatgagatacttttcaaa

SEQ ID NO: 147119 - DNA, 100 bp, Homo sapiens
gcagcccagacgcggcacagagagggcctgggagcttgctgcagcttcagaacatacggtccctaatgagcacagagaagaccaagggcttctgccagct

SEQ ID NO: 147120 - DNA, 50 bp, Homo sapiens
gcggtcaccaagtacaccagctcgaagttatgaagacagtatggagtttc

SEQ ID NO: 147121 - DNA, 80 bp, Homo sapiens
atgccctgcagtacctgcagaaggtctctggagacatcttcagcagctttctgtatgagcccaatagccaagggtacaag

SEQ ID NO: 147122 - DNA, 76 bp, Homo sapiens
gtggatgattactacgacaccggcgaggaacttggcaggtagagatggattcctggaaatacctcctcaaggccag

SEQ ID NO: 147123 - DNA, 75 bp, Homo sapiens
ccgactcttccagcgtctcgggctccttgcagcagggcacgaccataataacatccctgacttctgtgctgcaca

SEQ ID NO: 147124 - DNA, 100 bp, Homo sapiens
tgcggagcgcaggcgggcggcctgggaggccaagctgaagccacacatcaatgggcccttcacccctgacctggctcaccctgtggcagaagtgggcaag

SEQ ID NO: 147125 - DNA, 100 bp, Homo sapiens
acagtgaagcttggtggattaaatgtggcatatagtccctactacaaaatttttcaacctgtgacttttttgaacgaaccattctgtgcaacagccttgt

SEQ ID NO: 147126 - DNA, 97 bp, Homo sapiens
gggggagccccgggagccgcacggtgtcatggagaaactccagctgggcccagagattctgcagcgggaaaatccaaggcttatttatgccaggctg

SEQ ID NO: 147127 - DNA, 100 bp, Homo sapiens
gagcttttcgtaaagggaagtcatttctactggacttcatgcttagatacatgtataacaaggtgcagaccatgaattacgtggggcagttagccggcca

SEQ ID NO: 147128 - DNA, 100 bp, Homo sapiens
tacaggacggactcctctctgtaaagaggatgctgaaaacgccattcaacagatgggtggccagtggcttggtggaagacaaatcagaactaactgggca

SEQ ID NO: 147129 - DNA, 100 bp, Homo sapiens
cccgcgagcacagagcctcgcctttgccgatccgccgcccgtccacacccgccgccagcaaaattctgtggcatctctggaatactacctgagaattttt

SEQ ID NO: 147130 - DNA, 98 bp, Homo sapiens
gtaaatcatcctaccatgttacaggaccctgacgtcagagagttcttggaaaaagaagaggatatgggccctcacattttccaaacctgtccatctgc

SEQ ID NO: 147131 - DNA, 75 bp, Homo sapiens
gtttgacggcatcccaccgccctacgacaagacaggcaatctatacctgcgggggcccctgaagaagtccaatgc

SEQ ID NO: 147132 - DNA, 100 bp, Homo sapiens
gtggaaccggggccgccttcagccaagcggcctaaactctcatctccggccctctcggcgtccgccagcgatggcacagcttatcaaccagcccagccgt

SEQ ID NO: 147133 - DNA, 100 bp, Homo sapiens
ggctacccctgtcctggcctctgatgttatccatgcccaatccagggacctgccacgcatctttaggccccaggatgggtgagttcaacgagaagaagac

SEQ ID NO: 147134 - DNA, 82 bp, Homo sapiens
ttccaaagcacaggaatctcactctgttaaagctggtctgttctaactgagaactgaaggcagaagctagtctaatggacca

SEQ ID NO: 147135 - DNA, 100 bp, Homo sapiens
tcatcctttggaaactgaacaggcaggattagaatcggccatgtttatgagtggactaagtgaaagcaaacaaacccatgtacacctgaggaatgtcgat

SEQ ID NO: 147136 - DNA, 88 bp, Homo sapiens
caaagatgaccgtcttaacaaagaccgggtgctggtcaagataaactaggaatctatgtgaagtcggttgtgaaaggaggtgctgcag

SEQ ID NO: 147137 - DNA, 75 bp, Homo sapiens
taaagcagcgtgcgttcagccctgggacttcctagcatgggctgttgtgctggagagaacgagagctacgaagag

SEQ ID NO: 147138 - DNA, 76 bp, Homo sapiens
tgtgcccgtggaaatccccagctcccctctggtatgaaagttttcaagacgcctacaagtggaaaatgcactcctc

SEQ ID NO: 147139 - DNA, 83 bp, Homo sapiens
agctaactgaagagggcacctttaaggtggtggatgaagaggccatggagaaggaagctcttcgtgggcggtcttgactggag

SEQ ID NO: 147140 - DNA, 75 bp, Homo sapiens
ggagcctatggagttgtacttaaatgcagacacaagaatgatatggaacctagcaaagctgttccactgaatgca

SEQ ID NO: 147141 - DNA, 50 bp, Homo sapiens
ctgagacccggacagtggcagtgaaacagataccccagaatcttccatgc

SEQ ID NO: 147142 - DNA, 100 bp, Homo sapiens
cacaggcagagcacccaactgctggcacagagactcagccggacctgcttccgccagtggagacaacaggcggacctacgtgggcgccatgcccgggaag

SEQ ID NO: 147143 - DNA, 49 bp, Homo sapiens
cgatgaggagggcaagctcttggaggcagtagcagaatcccatggtagc

SEQ ID NO: 147144 - DNA, 87 bp, Homo sapiens
cctactgatgagacaagatgtggtgatgacagaatcagcttttgtctcggcgcggaagatggccggcggcgtggacggccccatcgg

SEQ ID NO: 147145 - DNA, 75 bp, Homo sapiens
ctgaccttggaaatgcttgttgggtggctggccgtctagatgaacaactacccaagcaaattcctttcaccatcc

SEQ ID NO: 147146 - DNA, 51 bp, Homo sapiens
gagcgaactgaagaggttctacacaattgcatgttggcagataaattgaac

SEQ ID NO: 147147 - DNA, 90 bp, Homo sapiens
gggagcactatgtctgcggaagtccccgaggcagcctccgcggaggagcagaagaatttggtgttcacttggcagaactgactgtagatc

SEQ ID NO: 147148 - DNA, 100 bp, Homo sapiens
ccaagatcggccccctgggtctggagacagtgttggacatgctccgggatgccatggtggccaaagtcaatacttccaaaggcttcctgattgatggcta

SEQ ID NO: 147149 - DNA, 51 bp, Homo sapiens
ggggctgtcgtgctgaagtcctgagtggatgattcaacagccacacaaagc

SEQ ID NO: 147150 - DNA, 100 bp, Homo sapiens
attatattccagtgataaaaagagcattaaattcagttccagtaattattgctgctgttggtaccagacaaaatgaatcctcactatggatgggctcatt

SEQ ID NO: 147151 - DNA, 90 bp, Homo sapiens
gcgcgcaggacagcgccttcctcaacgacgcggacatggtcatgagctttgtgaacctggttctggagaccagaaggccaaaatcaaaag

SEQ ID NO: 147152 - DNA, 101 bp, Homo sapiens
ccggcggagagaccgtccgaggtaattgtctgccacgagtgcacattctgaaaacaggtgctggagaatctggtaaaagcaccattgtgaagcagatgagg

SEQ ID NO: 147153 - DNA, 83 bp, Homo sapiens
cttcggcagtccacccaccgccgccgcctcccagcttgttctaaagacgaaggggaactccctagtgctacaggctgtttcag

SEQ ID NO: 147154 - DNA, 80 bp, Homo sapiens
atgctcttcatcatcagcctgagcctactgatcggcgtagtcaagctcgggttcatgacgctctcgatattcctgtgcag

SEQ ID NO: 147155 - DNA, 83 bp, Homo sapiens
gaagaggaaagaaagacaagtcaggcatggctctcacccaggtgcccaccagctgacctctcctccttctcagtcagagtctc

SEQ ID NO: 147156 - DNA, 101 bp, Homo sapiens
gggagagctgaagattgctgacttcggctggtctgtgcatgcgccctccctgaggtactacgacgtccccatcgccaccctggacttctcctcgctgtacc

SEQ ID NO: 147157 - DNA, 100 bp, Homo sapiens
atgtttataggtgggaccaattttgcctattggaatggtgtctttgcattgctgcaagcttatgctttcttgcagtatctgagagaccgattaacaaaac

SEQ ID NO: 147158 - DNA, 100 bp, Homo sapiens
ctctcctttccctttgagaccgtgaagagaaagatgcagggtaaaaaggaactccaggtctctctttttcaaacactggtgctgctaatgtttaatgagg

SEQ ID NO: 147159 - DNA, 100 bp, Homo sapiens
gccctctccgccgtcatggcccggcatcggaatgttcgaggctataactacgatgaaggtactccaaagattcaggtttactcacgtcatccagcagaga

SEQ ID NO: 147160 - DNA, 83 bp, Homo sapiens
cgaggctcggagaaacaggcgccgcgggctccgcgcccggccggacccgggcccgagctcccgcctcaggccgagatgaggag

SEQ ID NO: 147161 - DNA, 74 bp, Homo sapiens
agaactgctggaaggagactggatgatagaattagtacccaagtggccttggaccatctggagtctgtgcctga

SEQ ID NO: 147162 - DNA, 100 bp, Homo sapiens
tctgcatactcgctgcccgccggctccctcccccgcgtccctgcgaccgccgcggcgaagatggtactactgagcgagtgtgcttgatccagggaacggt

SEQ ID NO: 147163 - DNA, 100 bp, Homo sapiens
gggagaagacgaggatgatgcggaaattaaccccaagcacatggattaattgatgtatgttgagtttatggagctgccttttggtggcttgctttatctg

SEQ ID NO: 147164 - DNA, 75 bp, Homo sapiens
ggcggcggcacgatgccctttgacttcaggagttcctaaggacggtctgaagagccaagagctatttgatgaaat

SEQ ID NO: 147165 - DNA, 51 bp, Homo sapiens
ttcgcagtggtcgcttcttctccttggtttttgtggaaactctggataagt

SEQ ID NO: 147166 - DNA, 75 bp, Homo sapiens
gaaccggcacctgcacacctggatccaggataacggaggctgggtgccaatgggtcatgtttggttagaaggtga

SEQ ID NO: 147167 - DNA, 90 bp, Homo sapiens
gcctggaacatcacatctgtacgttgcaatctgtggatcagctacgagctcgaggccacagtcatgccctaccttcaggtgttatcagaa

SEQ ID NO: 147168 - DNA, 97 bp, Homo sapiens
cctgctagtgactggcgcgtacgagatctccgaccagtctgggggcgctggcggcctgcgcagccacctcaagctccatgatgcgttatctgggtct

SEQ ID NO: 147169 - DNA, 88 bp, Homo sapiens
tcctgggcaggggccctgcaccacagctctccaggacataagaccaagcttggggcttccttggtcgcacccaccacctgcctgccca

SEQ ID NO: 147170 - DNA, 100 bp, Homo sapiens
ttaagtgtggcatacaagaaaggtgtgaagcttacactctctgctctggtagatgggaagagcattaatgctggaggccacaaggttgggctcgccctgg

SEQ ID NO: 147171 - DNA, 82 bp, Homo sapiens
caccaggaaccctcatctcaacaaggaagaagctgtttgttttgattctgagctagatgaacatattaagtggttccagcaa

SEQ ID NO: 147172 - DNA, 75 bp, Homo sapiens
cagtgtttgggaatgattctgatgatgatgatgaggcacgagatgtgcgtaccaatgaagtggtggccatcaaga

SEQ ID NO: 147173 - DNA, 75 bp, Homo sapiens
ccatggcatcatatataccttcttgtcaaaattcccaaaaatgatcccctcaatgaagttcataactttaacttt

SEQ ID NO: 147174 - DNA, 75 bp, Homo sapiens
caccaccggccgcctcagccatggacgcgtccctggagaaggtacaggtttgcagattccgccagcagcacagca

SEQ ID NO: 147175 - DNA, 50 bp, Homo sapiens
gcctcttctacagatagagctgttaagcaccaagccaaaggacagtgtct

SEQ ID NO: 147176 - DNA, 80 bp, Homo sapiens
ctcgccgtggtcaagttcaccatgagagggttcgatacaagaggctgttttcctagcgtggcttgctgcctttggtaaga

SEQ ID NO: 147177 - DNA, 100 bp, Homo sapiens
gcctatgagatcatgagggagctcgatgtcagctatgtgctggtcatttttggaggcctcactgggtattcctctgatgacgaagatgagtcgagtgagc

SEQ ID NO: 147178 - DNA, 97 bp, Homo sapiens
tggattccaaagagcgtttggatcaggacggacgcttgctgtgtattcttattacaaccaaggcattttaccagagcaaggcatacaagattcattc

SEQ ID NO: 147179 - DNA, 82 bp, Homo sapiens
ccctgcagtacctgcagaaggtctctggagacatcttcagcagaaatcgtgagatcctggaaaatgtgttagctgtcatcct

SEQ ID NO: 147180 - DNA, 121 bp, Homo sapiens
ggcgttgcggcgaaaggaacggctgaaggccctacgggagaaaaccgggcgcaaggtacctgcacatgttgttctttgtcagtgctgtcaagtgtgtgccagggtgatccatggtcacttt

SEQ ID NO: 147181 - DNA, 96 bp, Homo sapiens
ttactcagatgctgaacgtcattttcacccgcatggaaaaccaagtggaagcagatgaagccaccctggcccgtctggatctggagaggaagattg

SEQ ID NO: 147182 - DNA, 110 bp, Homo sapiens
ctcctgatcatgagctccagcagaccataagggataacctttaccgccatgctgtgccttgatcgcagtatgtggtagggaagtgatgctgtctgaaggtgacatcctgt

SEQ ID NO: 147183 - DNA, 50 bp, Homo sapiens
actactacgtggtgcttggaaaggaacgtcaaggtcgtgggaaataaaag

SEQ ID NO: 147184 - DNA, 75 bp, Homo sapiens
cctcatctgggacactgctggtcaggaacggtgcacctggtggacatatggaatgtcatagaagcattgcgggaa

SEQ ID NO: 147185 - DNA, 100 bp, Homo sapiens
ggaccttccaaggcagcttctgatgatggcagcttaaagagttccagctcaatgacctggagaagaagcatgctatgcttgaaatgaatgcccgaagctt

SEQ ID NO: 147186 - DNA, 97 bp, Homo sapiens
tctttcccagaaataactttaccaaaggaaagctattttgcgaactatcttctccagcggagatggccaatggcagtggcactggagctgcaggcta

SEQ ID NO: 147187 - DNA, 98 bp, Homo sapiens
gttggcctgcatgcctgactgccacacacctccagaatcaggtgtctgaaaagtacttaagagattatggcatcagaaacccacaatgttaaaaaacg

SEQ ID NO: 147188 - DNA, 96 bp, Homo sapiens
cagctaagtattacgttttaaaaacttgatggagagtttggattcattgctttgtgcagaaggttctgaaagtctgaagagtttatgtctgaaact

SEQ ID NO: 147189 - DNA, 100 bp, Homo sapiens
gcggcatacagaatgcctatgaccggcgtcgagaatttcaactggcttgaaaaacccttgcccagttttgatcccttcaagactttgtcacagcctctat

SEQ ID NO: 147190 - DNA, 96 bp, Homo sapiens
tgaaaaagatggtggacacactcagcattttgaggagtctccaagagcttttagattaccccggggaggatgtggaggagactttctgcctcaact

SEQ ID NO: 147191 - DNA, 97 bp, Homo sapiens
ctgctgttcagcaggagaaaatttcagagctgcaaaattatcagaaaccctggccctggatgcccatgttggctgccctggttgcagtaacagccat

SEQ ID NO: 147192 - DNA, 132 bp, Homo sapiens
acttgccctgcaccgccccctgggatccgcaggttccctacacggtctcctgggtcaagctgaactagatgcagagcacgcccagaaggtcctggaaatggagcacacccagcaaatgaagctgaaggagcg

SEQ ID NO: 147193 - DNA, 82 bp, Homo sapiens
gtcgtgatccagaagtccagagctgaggactgcctgtttgcagtactatactggcaattgctggagaagattttgcaattgt

SEQ ID NO: 147194 - DNA, 75 bp, Homo sapiens
cccagaagtgatcgctcagctggagaacgcggctaaagttctgatgatagtggccagaactatagtgccagtagt

SEQ ID NO: 147195 - DNA, 75 bp, Homo sapiens
caaagtgtgtgcaagcaaatgcttttattcaggtagtccatcctttctacgcttattggcagagtttctgcactc

SEQ ID NO: 147196 - DNA, 122 bp, Homo sapiens
ctggagagtcgaagcagcagctctcgctccagaagcttcactttgatatgcctcttcatgttcgacgcagtagtgacccagctctaattggcctctccacttctgtcagtgatagtaatttt

SEQ ID NO: 147197 - DNA, 100 bp, Homo sapiens
gcaaactgacacctcagggacaaagagatctggacagaatcgccggacagggtctgactgcgtaccatgatatctccctggacaagtgctatgtcatcga

SEQ ID NO: 147198 - DNA, 51 bp, Homo sapiens
cggtctttggcgttatcggcagccaaaaagctcctgcccctcctaaagctg

SEQ ID NO: 147199 - DNA, 100 bp, Homo sapiens
gagaagcagctgggggccttggctgtaaggacccctaaggtttaagtgctgtggggctgctaactacacagattgggagaaaatcccttccatgtcgaag

SEQ ID NO: 147200 - DNA, 98 bp, Homo sapiens
tcaagatacgccaatgcgctcaaaggcaaaaaggatcagtcgcatcgaatacattcattcaaagaacttcatccaccgggatgtgaagccagacaact

SEQ ID NO: 147201 - DNA, 90 bp, Homo sapiens
ggtcaccgactatgcagaggagaaggagatccagagttccaatctggagacgattcttctgatgtagagcgactggaaagattcttcgac

SEQ ID NO: 147202 - DNA, 75 bp, Homo sapiens
cttcatctctaaaggtccttctaggagagaggtgaaagttgaatgcaatgataacagaaagcaagagaagtgtga

SEQ ID NO: 147203 - DNA, 75 bp, Homo sapiens
tgaactcaacttctgaaatttacagaaacaaactacatctcaggctctggattgagagatcacgatgtaattgtc

SEQ ID NO: 147204 - DNA, 75 bp, Homo sapiens
caagccgtgtgaaataagagaactgagccaccagctggtgtttggaatgctttatcctgcatattattcatacaa

SEQ ID NO: 147205 - DNA, 98 bp, Homo sapiens
acctggagctgcagctcgatgcctcagaaaggggcgaagaaggctggttgggaaggcacctacaaaggcagcacctaagcaaaagattgtgaagcctg

SEQ ID NO: 147206 - DNA, 82 bp, Homo sapiens
gttttgagtcatctgattccaggcctatctctggcacacgtcttagtccactagagctgtcaagctgcagtttcagctcagg

SEQ ID NO: 147207 - DNA, 75 bp, Homo sapiens
atgttggatctacactttctcaagcactgtgatcttcaaataggtaaacctcctttgcggtggacaaacttcgac

SEQ ID NO: 147208 - DNA, 76 bp, Homo sapiens
cgaagcctcggaaggagcggcccacggcaaagattgcccccgaggaattagcacttgttcacaacttgaggaaaat

SEQ ID NO: 147209 - DNA, 100 bp, Homo sapiens
cgggatttgggtcgcagttcttgtttgtggatcgctgtgatcgtcacttgaagaaaaagtcagcactttttgaagtgtctgaggttataccagtcatgac

SEQ ID NO: 147210 - DNA, 101 bp, Homo sapiens
ggtgttcacccccgtggtgcagcgaatcctcaagcataacatggatttctctctgatcaaacggacagttcaggactcagaatctaaggatgaatgttcac

SEQ ID NO: 147211 - DNA, 51 bp, Homo sapiens
gcaacgccccccttcacacacagtaagtgtcagagatggctttggattccc

SEQ ID NO: 147212 - DNA, 88 bp, Homo sapiens
gcagtcatgagtcgcttcaagtttatcgattcaagaaatccatggtgaaaggtttggattcctatgaagaaaaggaggataaagtgat

SEQ ID NO: 147213 - DNA, 90 bp, Homo sapiens
aggagtaagagcccatagcagtctgccagacaatagagcatatggtgagacggtttaagcggaagcatcttactgccattgactgccagc

SEQ ID NO: 147214 - DNA, 75 bp, Homo sapiens
cgtggagctccgccgccccgaaactttcaccgcgagcgggccaacagagattttgagaaacacattgaaggatct

SEQ ID NO: 147215 - DNA, 100 bp, Homo sapiens
ctcagagattatagggagcatgggtaaggacgacatggagatgtgtgagctgaatcttgaggagactggcctgactcggaagcgtggtgctgagatcttg

SEQ ID NO: 147216 - DNA, 75 bp, Homo sapiens
ctgctggacaacaccatggaaatatttgacattgaggcaattcttcagttagatagtcctgaatctgctcagtca

SEQ ID NO: 147217 - DNA, 82 bp, Homo sapiens
aacagttctgggggtcgtccgatcctgcagactctggatgggcacatggtggtgcgtagccatgcccgtgtgtcgtcgctga

SEQ ID NO: 147218 - DNA, 80 bp, Homo sapiens
ctgagggaacaaacacttctggatgcatccgttgtactggtcagtggacatctggacagctgggatgttgggcagggtgc

SEQ ID NO: 147219 - DNA, 100 bp, Homo sapiens
gaaaaaagaaaactctagaagtctggatgtcggtgggcctctgagatatgccgtttacggaggttgacggatatattcagacgttacgacacggatcagg

SEQ ID NO: 147220 - DNA, 82 bp, Homo sapiens
cgtcgccatcttggatccgcgggacaagaaaattcatgcggcccagaggcagagctacacaaccatggaatccaaattaatt

SEQ ID NO: 147221 - DNA, 75 bp, Homo sapiens
ctagtagatagagccaaacaatcttttcaagctttggctagatcagagtctaagagagatggaggttttaaaaat

SEQ ID NO: 147222 - DNA, 78 bp, Homo sapiens
agctcagcactctctaaaggagcaacagtttacagcccttccagatacagctaccagagtcactttgtggcatgtatg

SEQ ID NO: 147223 - DNA, 101 bp, Homo sapiens
agcggagcgaacccgagagcgtggagcgggctgggccaggttgaaccatgattccggtgacagagctccgctactttgcggacacgcagccagcataccgg

SEQ ID NO: 147224 - DNA, 90 bp, Homo sapiens
gctcttccctgggtggactggaggaggccgcgccgatgaacctgaccgagatcatgattctggaaggaggtggtgtaatgaatctcaacc

SEQ ID NO: 147225 - DNA, 100 bp, Homo sapiens
cgaggggcggagccgctgctcgagctgctgctggattgaactcagagaagccggggttgggagccacgtgtaccagtgtgtgttgatcttggcttgattc

SEQ ID NO: 147226 - DNA, 75 bp, Homo sapiens
ttctgccccagctccgtctcggcggcggcgggtgcgtctgccgatggccccctgaagttgctgcccgagagctac

SEQ ID NO: 147227 - DNA, 75 bp, Homo sapiens
ctctgctgcggcgcggggaccgctgtgctctcgctggttatattctgggcactaaatgaaggcgtttctaggcaa

SEQ ID NO: 147228 - DNA, 67 bp, Homo sapiens
tgtggttggcttctgttacgctaggaatatggcaaacgcaaacatgagacagttggagggcagctct

SEQ ID NO: 147229 - DNA, 75 bp, Homo sapiens
taggccaaggagctactgcaaatgtctttcgtggaagacataagggcccagaatgtgttcagtatcttcaacaag

SEQ ID NO: 147230 - DNA, 50 bp, Homo sapiens
gggccggagcggctctttgactcgcaccgagagtttgaggagacaatgga

SEQ ID NO: 147231 - DNA, 82 bp, Homo sapiens
cgtggggctcggccgcgcggactgaaggagactgaaggttaatttggagtggcccctggagtcagtttcctacaccatccga

SEQ ID NO: 147232 - DNA, 75 bp, Homo sapiens
gatggtgatgggatattttctcctgtgggttgtcttctggcctcagagtatcccttatcagaaccttgggcccct

SEQ ID NO: 147233 - DNA, 75 bp, Homo sapiens
aaggagctggactggtctacaccgctgaagagctcaggccccggggcctccagcggcaccagcggagaccacggt

SEQ ID NO: 147234 - DNA, 83 bp, Homo sapiens
atgatcgacaagtgggaagaccgatgggaatggttaagactgagttcacagcaaacaggattcctaaatgcccttaaggacag

SEQ ID NO: 147235 - DNA, 83 bp, Homo sapiens
taaacttattcaaaatgtatttgaaatcaaactacaggtcccgttcaagaagttcttccagttcgcagtcaagatctcgttcc

SEQ ID NO: 147236 - DNA, 100 bp, Homo sapiens
tcgcctgctttgattcattgaaagattatgtatatcacgtagtgagtgcgatctgtgaatggacagtggcctttggttttattttctacttcctaacttt

SEQ ID NO: 147237 - DNA, 75 bp, Homo sapiens
ggacaacatagcggtgaaggcgaacgcggtctgcaagctgacgtatgctttccatctgatggtcccctggtgtgt

SEQ ID NO: 147238 - DNA, 75 bp, Homo sapiens
ggcgaaacgaggaggagataacgcggccttgggctctgtaagtgacgaaaattccaagaggctgtctagtcgtgc

SEQ ID NO: 147239 - DNA, 95 bp, Homo sapiens
cgcggtgccatggcccccgcccgtctgttcgcgctgctgctgttcttcgtaggcggagtcgccgagtcggtgctgctgcatgaggaggcgggtga

SEQ ID NO: 147240 - DNA, 100 bp, Homo sapiens
tgtcggtgcccaccacacccaccctgggcttcagcactggcagcccccaggaaagccgtggagagctgctccgacgtcacccgcctggtggtgtacgttt

SEQ ID NO: 147241 - DNA, 75 bp, Homo sapiens
gctccccgtcgtcctggtgctgcagcggacttgggaccctggaggactgacgctgctggcctgggcgtccccttc

SEQ ID NO: 147242 - DNA, 100 bp, Homo sapiens
cggcgaggagaaccaactggtcccgaaagagatacgtaggtaacctttccagagatgtgacagaagtccttatacttcagttgttcagtcagattggacc

SEQ ID NO: 147243 - DNA, 100 bp, Homo sapiens
cctaccccagtgaagaagccaaagaggagctggccaagaaatgcagcatcacagtgtcacaggtggctcatccacaataagcttaaactctaaccaggct

SEQ ID NO: 147244 - DNA, 100 bp, Homo sapiens
ggcagctggtgcacgagctggatgaggcagagtaccgggacatccggctgatggtcatggagatccgcaatgcttattcaccttcaggccattcagagga

SEQ ID NO: 147245 - DNA, 104 bp, Homo sapiens
gaagccaagaaaaattaaagaagatgatgctccaagaacaatagcttgccctcataaatgagtcagatggcaaccccagcactgaagatgaatccagcaaggga

SEQ ID NO: 147246 - DNA, 83 bp, Homo sapiens
cggagctgcagtcggcactgctactgcgaagacagctggcagacctaatctgggagcctgcaagtgacaacagcctttgcggt

SEQ ID NO: 147247 - DNA, 98 bp, Homo sapiens
gtcactgcctgcgcagctccggccgcctggctccccatactagtcgccgtatgttggtgagagtgaacgtgctgtgcgacaagtttttcaacgagcca

SEQ ID NO: 147248 - DNA, 98 bp, Homo sapiens
agctgtcttccagctctgaaagaggtctgaatttcctgctgctgttcacaaagatgctttttatctttaactttttgttttccccacttccgaccccg

SEQ ID NO: 147249 - DNA, 75 bp, Homo sapiens
ccgatccagcctgcggagcctgtggggcagagcagtgtgacctttgaagacgtggctgtaaacttttccctggag

SEQ ID NO: 147250 - DNA, 95 bp, Homo sapiens
ttgaggctgcggtcatggagggagcaggagctggatccggcttccggaagtgggagagtcccaatgtcttatgtctcgtctatgatgtgaccaat

SEQ ID NO: 147251 - DNA, 50 bp, Homo sapiens
cgaggactccgctcctgcccagggccgttgctccagggagaactgcaaat

SEQ ID NO: 147252 - DNA, 109 bp, Homo sapiens
cagtagtttcaaaaggtggcctttccactggagttgcttcacttagctctacaatcaacccatgtggaggaatgccagctcctgagcaggcctcattggtggaggaggg

SEQ ID NO: 147253 - DNA, 127 bp, Homo sapiens
gaccctccagcagcagaccttcaagatagacattgaccccgaggagacgactactgtcagaggatgtaggaatggacatcccctttgaagagggcgtgctgagtcccagtgctgcagacatgaggcc

SEQ ID NO: 147254 - DNA, 83 bp, Homo sapiens
cagaaacgggactggcagtgcccacacgtgtgcgttctccccgtccgcccgaaggtgagaagccctaccactgcaactgggac

SEQ ID NO: 147255 - DNA, 83 bp, Homo sapiens
gaaaagtggcactgaggctctggaacttctgcccagctctccttgacaaaacttacctggggtccctacttatggttttacat

SEQ ID NO: 147256 - DNA, 100 bp, Homo sapiens
aaagactacgaagagaaagccagtaccaagagaaccgcggcagtttggtagtaacaaacggcggaggacatttttattccttccccaagtctggaagaac

SEQ ID NO: 147257 - DNA, 50 bp, Homo sapiens
ggaagtcgcctggtgtgaactgcagccttaatacagatattggcagctgc

SEQ ID NO: 147258 - DNA, 75 bp, Homo sapiens
tgagacggtgtcccgccgaaagtgcaaattggagttccatgcttgttctactggcaaaagcctcgccaccctctg

SEQ ID NO: 147259 - DNA, 100 bp, Homo sapiens
tcgcgtcgcgcccgggaggaaggaacgaggcaaggagctaaagcagcgtgcgttcagccctgggccgaatatgtgggagtccatgtcctgcagtgtggcc

SEQ ID NO: 147260 - DNA, 100 bp, Homo sapiens
tgtgccttctgtcctgccgccttctctcagaaagggaatcttcagtcgcacgtgcagcgagtccactcagagggaggagtctgctactagtcttatcagc

SEQ ID NO: 147261 - DNA, 100 bp, Homo sapiens
ctaatgctctgcgtgttccgagggagaatatggaggccatttcacctctaaaaaatgggatgggacagtcattttgtttactcattcagccctgttgcag

SEQ ID NO: 147262 - DNA, 75 bp, Homo sapiens
gggggccttggctgtaaggacccctaaggataaggaagctgaggcacacagaggtagggaactaacccaacatca

SEQ ID NO: 147263 - DNA, 100 bp, Homo sapiens
tagccgagcagactggcatctgtaaggtgcggccgccgccggccagaggcattgatgtgcagcaggtttctttagtcatcaactatgaccttcccaccaa

SEQ ID NO: 147264 - DNA, 97 bp, Homo sapiens
cctggtcatcgagctgtccgacaaccctggcgtccatgagcctggaagacagagatgtcaatgaccccatgcccaaccgaggcggcaatggactagc

SEQ ID NO: 147265 - DNA, 90 bp, Homo sapiens
cactgctggcgctgaccttcatcacagacaacagcctggtggcagcgacatctccagttacagcccgaacactggaaactctgattcgac

SEQ ID NO: 147266 - DNA, 90 bp, Homo sapiens
gcgcgtaggtcgcggggagctccgaaccgccggcgcccggccatggcggtctccagaatgtactcaagactgatcttctaagttcactgg

SEQ ID NO: 147267 - DNA, 98 bp, Homo sapiens
acggaggcaccatgaagaagtcttactcagaacccttaggagaaatcttgagagtggacagcaattgtgaagatcgccagagagttctgtgtttcatc

SEQ ID NO: 147268 - DNA, 100 bp, Homo sapiens
aaaggctggaagctttatttctctgaaggctgcgaagttgtgcccgatgtaaatgtagcaggaagaaaatttggaatcaagttactaatccctgttgccg

SEQ ID NO: 147269 - DNA, 75 bp, Homo sapiens
tccagagattgtggagcagatggataagtaatggaacatcatctgtgatcgtctccagaaagaggccatcagaag

SEQ ID NO: 147270 - DNA, 97 bp, Homo sapiens
gtggggcgacgaggctgacggcggccagccaagacaatgcaaactccagtgaacattcccgtgcctgtgctccggctgccccggggccctgatggct

SEQ ID NO: 147271 - DNA, 90 bp, Homo sapiens
atccctggatctggtggactttgtgaggcaacatcggataccactggggggtccactggacggggcctgagctacaacttcacccacctg

SEQ ID NO: 147272 - DNA, 100 bp, Homo sapiens
gcggcgctgtttaaagatggcggcggaggaacctcagcagcagaagcaggagccgctgggcagcgactccgaagtgacccaacaggagaagaccccaccg

SEQ ID NO: 147273 - DNA, 82 bp, Homo sapiens
ttggaagcagccgatccagcctgcggagcctgtggggcaggtgaagtattacagacacttagcacctgatcacttgctgcaa

SEQ ID NO: 147274 - DNA, 98 bp, Homo sapiens
ggactcagagaccaataaaaataaactgcttgaacatcctttgactggttagccaggcaaagatgccttttgatgccaacaaactgtattgcagtgaa

SEQ ID NO: 147275 - DNA, 75 bp, Homo sapiens
tggccaagaatcagaggaagtggatttggtgcttccagatgtgagttatcaggtggaatccagtgaggaggatca

SEQ ID NO: 147276 - DNA, 98 bp, Homo sapiens
accattatatgctggaatggttcctttctattatcctcccagtccacaacgctgaaccgtggctggacgaatgtttgaggtctgttttgcaacaggac

SEQ ID NO: 147277 - DNA, 97 bp, Homo sapiens
tcaaacagctatggtgatgattagagacatactaatgtacatggtttatctggcaagactgaggcaaataagactacagaatttcaatgagcgccaa

SEQ ID NO: 147278 - DNA, 82 bp, Homo sapiens
ctcagaggagtacttgcagctgagatctaagatcacagattctgctggccatattctctactccaaagaggatgcaaccaag

SEQ ID NO: 147279 - DNA, 82 bp, Homo sapiens
agaaaatggcagacgatattgatattgaagcaatgcttgaggctccttacaagaaggctgctgctcctgctgccctgtgggc

SEQ ID NO: 147280 - DNA, 100 bp, Homo sapiens
atctcaagcacaaggacaagcaggaaaacggcgagaggactggaggggtgcctctgatcaaagcccccaagagagcatccttccatggcaataataaaag

SEQ ID NO: 147281 - DNA, 100 bp, Homo sapiens
ttttcctgcatggattgggagatactgggctgctttgctggctctgcaagaaaatggactagacgcaactacagtgaaacaagagcactttctaaaatca

SEQ ID NO: 147282 - DNA, 100 bp, Homo sapiens
ggaattacgagtctactattcatcctttgtgtcagcaaagaagccttaaacagtaaaaatcctcaactccataaagaagatgaaccagcatggaaacctg

SEQ ID NO: 147283 - DNA, 100 bp, Homo sapiens
aatgggaatgtacacgataattaaagagtaaagttgtgctcaacgactattgcccagaagaaaagatgtttggttttcacaagccaaagatgtaccgaag

SEQ ID NO: 147284 - DNA, 98 bp, Homo sapiens
cggctgcctccgcgctcgcccgggctgcgctgggcgctgccgctgctgctgctgctgctgcgcctgggccaggattggttgccgtggtctttactgct

SEQ ID NO: 147285 - DNA, 90 bp, Homo sapiens
gcggacgacgaccggctcaacaagcaacacagtcactcctggcggcaaaccaaacaaaaccagagtcatctggggaaaagtaactcgggc

SEQ ID NO: 147286 - DNA, 90 bp, Homo sapiens
cttagacctcgtggcgctcgcagagcaggtgcagaagcaacacagtcactcctggcggcaaaccaaacaaaaccagagtcatctggggaa

SEQ ID NO: 147287 - DNA, 100 bp, Homo sapiens
ggggactgagcatccggctcagagcggcttggcagagacaccaatgggaatcccaatggggaagtcgatgctggtgcttctcaccttcttggccttcgcc

SEQ ID NO: 147288 - DNA, 100 bp, Homo sapiens
gtcggcttgtcaggtggtggaggaaaaggcgctccgtcatggggatccagacgccaggcccagacatgtccgtccttgtaagttaaaagcttccatggga

SEQ ID NO: 147289 - DNA, 100 bp, Homo sapiens
aagtccgaggcccttcgcaactggcaaggctctgctgccatgaaggtgaagattaagtgctggaacggcgtggccacttggctctgggtggccaacgatg

SEQ ID NO: 147290 - DNA, 87 bp, Homo sapiens
ggattaaaatctcccaagaggaatgacaaacaaccagctcttcagtgttttccaagcagtgaagcacttgccgtgttgaactgaatg

SEQ ID NO: 147291 - DNA, 75 bp, Homo sapiens
gccaggactaaggacaagcaggagctgggagccccagggcagctgcaatgactctccgcacggtattattgtcat

SEQ ID NO: 147292 - DNA, 75 bp, Homo sapiens
ctgagttcaaagccttttatggagacacattagttacagctatggaagagagagcaattcaacgagctgaatgta

SEQ ID NO: 147293 - DNA, 113 bp, Homo sapiens
ttgctgttggggactcggaaggccgtatttgggtctatgacgttggagaggtcatacttacctggttgcttgcgcatctagtaatgttggatcatattctggatgttttgaat

SEQ ID NO: 147294 - DNA, 101 bp, Homo sapiens
gtcccatggcccacccaaggagagacccagcacaccctgcctgcatggcgctgcgctgcaccttcactctggtcacgggtctggcagtcggctcaccaatt

SEQ ID NO: 147295 - DNA, 98 bp, Homo sapiens
gatgcctcagaaaggggcgaagaaggctggttgggaagggtctagacagtttcaaagtgaaacagaagttcttcgctggcagccaggagccaatggcc

SEQ ID NO: 147296 - DNA, 100 bp, Homo sapiens
gcgacaagcaacaacaatcatagctgtgtggacaagaagggccacgtccactacttgatcaagtggcgggacttaccttacgatcaggcttcttgggaga

SEQ ID NO: 147297 - DNA, 100 bp, Homo sapiens
cggcagggcggagaggagcggccggagtcagcgatggtgcccggcgaggagaaccaactggtcccgaaagaggtggcacaagatctctgtaaagtagcag

SEQ ID NO: 147298 - DNA, 100 bp, Homo sapiens
cttatatatgagaattgctccagaactctatcataaggatggcttctggaaacttacaccagaactgggacttatattaaatcttaatacaaatggtttg

SEQ ID NO: 147299 - DNA, 90 bp, Homo sapiens
gcggtgtctacagtgttctcgacttcgtcgctgctcaacgttgacagtaatgaacaaggctcctatgtagtggccatggaaacctttacc

SEQ ID NO: 147300 - DNA, 122 bp, Homo sapiens
gaggaacgagatcttgagcgccctctactcagcatggatatccaggtgctgagccaggagcagcagcctttctacaatgcagatcttcgtgaagactctgactggtaagaccatcaccctcg

SEQ ID NO: 147301 - DNA, 100 bp, Homo sapiens
gctgctcaaaacctcgctccggaaaggggacacctggttgctgcagcaactggtcacacagtagtgttggtagaccagacagaggacatcctggcaaaat

SEQ ID NO: 147302 - DNA, 98 bp, Homo sapiens
cccgccgctctactcagccaggcagacagactgacagactcgctagatggatagaatgacagaagatgctcttcgcttgaatctgttgaagcggagct

SEQ ID NO: 147303 - DNA, 76 bp, Homo sapiens
aaaattccagcagatggagtccacaggatcagagtggactttaagtctgaacaacccagtcctgccagctccagct

SEQ ID NO: 147304 - DNA, 102 bp, Homo sapiens
gagggccgaacgggcgaggttgggctgccgtgctgctcggcggcgctgagggatggaagaagcgagcctgtgccttggagtgtcttcggcggagccggaagc

SEQ ID NO: 147305 - DNA, 75 bp, Homo sapiens
gtcaaacgcagaaggactgcctcactgagcaaccaagagactccctggaggaaaagcggaagcggcagcggtctg

SEQ ID NO: 147306 - DNA, 100 bp, Homo sapiens
actaaccagagccggctctttctcgggaaagaatatggcaaagctgatgcaagatgggtttattttgatccaaccattgtgtctgtggaaattctgaccg

SEQ ID NO: 147307 - DNA, 100 bp, Homo sapiens
gtcaagctggccaagcacaaagagcttgctccctacgatgagaactggttctacacgcgagctggatcttctggtcgaccagaccatcgaaaaggtctcc

SEQ ID NO: 147308 - DNA, 96 bp, Homo sapiens
gcattttggaacacatccaggaaaagataactttcgacacacctgtagacgttcgccaggtaaagctacccaggtggatttagacaagtaacagct

SEQ ID NO: 147309 - DNA, 100 bp, Homo sapiens
gcggcgagaggaggccgtccagcagatggcggatgccctgcagtacctgcagaaggtctctggagacatcttcagcagacacgctttcaccagcttcgag

SEQ ID NO: 147310 - DNA, 96 bp, Homo sapiens
cgagataacacggaagccaggggaggtctgaagcctgagtatgatgcggtggtgataggagcaggctcatgcaagcggtcctggaccacaccattc

SEQ ID NO: 147311 - DNA, 100 bp, Homo sapiens
agcccccggaagttgccatcctcagcctccaccttcctctccccagcattgacaagatatctaaagtcacctctcctgtgttggtcattcatggtacaga

SEQ ID NO: 147312 - DNA, 83 bp, Homo sapiens
ccttaagaaggggcaggctgtagactacgagggctccagaacccaggaaggtgcagaaaatgcttttaaagtgagacttagta

SEQ ID NO: 147313 - DNA, 75 bp, Homo sapiens
ttcttaacccagaagtagctgaatgtgttactccattgctgaggagtggagccttttgtggcagatgaatatatt

SEQ ID NO: 147314 - DNA, 83 bp, Homo sapiens
gtgcggttctcagatggtggcactcaatttccagacggcagaaactgggcacatttgggcccctgcgctgccaggaggcatgg

SEQ ID NO: 147315 - DNA, 74 bp, Homo sapiens
cggcggcggcggcagcgggtcttgggtcctccgagagcagcagcgaatagttctgtcccaagaagaactctgaa

SEQ ID NO: 147316 - DNA, 97 bp, Homo sapiens
gcacagataatagacgtgtggtgcagagcagcagcagtgagcggggttcccggagaggccagcgtggggacagccgctcccccagccacaagcgcag

SEQ ID NO: 147317 - DNA, 90 bp, Homo sapiens
aaattctgtattgctggtcagcaacctcaacccagagcagaaaggacccaggagcgataacagtaaatcaaataagatatttgtcggtgg

SEQ ID NO: 147318 - DNA, 98 bp, Homo sapiens
aagaaagagaaaaagcagaaagtagatgaagatgagattcagaagatgcacctatgagagagccttgtctattgttgaatcggagcaagacaaagccc

SEQ ID NO: 147319 - DNA, 50 bp, Homo sapiens
aagtaatggtgcaaagcctgaagactttgcagatattttggtgcagccaa

SEQ ID NO: 147320 - DNA, 75 bp, Homo sapiens
tgtaactgccaaacccaagttggttggagatgtggattttgaagataaagaaatgggggctccgagcagtcaaga

SEQ ID NO: 147321 - DNA, 100 bp, Homo sapiens
acaagcaggaaccatctataacttcaggattatttctctggatgaagagagaacagtggtcttgcaaacagaaatgtgtgctatactggccggaaaagag

SEQ ID NO: 147322 - DNA, 100 bp, Homo sapiens
tccccagaagaagattgtggttgaattcagattcaccagaccagagcacttgggcagcagcgccaagatcaagtgcagcggttgccatagctaccaggag

SEQ ID NO: 147323 - DNA, 100 bp, Homo sapiens
cggcacgatggtcatggcgtatttcgtcgagaatttttgggttggtcaaagaaaaagtgatgtatgaaaaagaggcaaaacaacaagaagaaaagattga

SEQ ID NO: 147324 - DNA, 90 bp, Homo sapiens
tttgtttttaactaccgggaagatttacacagatggaaccagaaaagatacgaggctctaggagagatatttggagttcttacaacatgg

SEQ ID NO: 147325 - DNA, 116 bp, Homo sapiens
agctgtgctcgcgctactctctctttctggcctggaggctatccagcagtgaagacatttccacctggacacctgaccatgtgcctgccctgagcagcgaggcccaccaggcatct

SEQ ID NO: 147326 - DNA, 100 bp, Homo sapiens
ccagcgctgggcaccgcggccggagctgtgggctgaatacagattctgttcatcttgctctgaaattaaataattctgaactcatggggagaaaactcag

SEQ ID NO: 147327 - DNA, 51 bp, Homo sapiens
aggttcagaggctgcaccaagagcaggcaagtagcctgcagtatgaaatgc

SEQ ID NO: 147328 - DNA, 75 bp, Homo sapiens
aagaggtttggctttccagagggcagtgtagagactttatattcagagcaccaatcaaattaagcaagcctgggg

SEQ ID NO: 147329 - DNA, 74 bp, Homo sapiens
ggcctttccagcagcctgtggatgccgtcaagctgaacctccctcacccaccaaggctccggatgtgttcccca

SEQ ID NO: 147330 - DNA, 100 bp, Homo sapiens
cagtaacagtacttgggatcccccagttccaaagtgtcttaaaggttcctacctgatcccgctcccagcagcagaactggccagctgtgcagacctgggg

SEQ ID NO: 147331 - DNA, 100 bp, Homo sapiens
tgtgaacctggaactagcgtcaaccttgaaggcatcgtgtggcaggaaacagaagatggttgcaattgtagctcaagacttggcagcattccatactgcc

SEQ ID NO: 147332 - DNA, 98 bp, Homo sapiens
tctggtgagacatttttcttccttctgtcacatcacacccaatggtacactgatgctgaagtactatgagccttcggaacttgtggagagactacaaa

SEQ ID NO: 147333 - DNA, 82 bp, Homo sapiens
gcagggcctgcagcgggagctggacggcgagcgcgagcggcgcgagaaatacatatccagccatactcatggaccccagtga

SEQ ID NO: 147334 - DNA, 100 bp, Homo sapiens
ttacgtctgcggaagtgcagctgcctcagttcttagcgcagatcatcacgaagtatgtatatgagctcctggaaaaggattgtaatttgaaaaaagtatc

SEQ ID NO: 147335 - DNA, 89 bp, Homo sapiens
ttgacctgaccatggacgacattcgaaggatggaagaagagacgaagagacagctggatgaaatgacacctttgaggccctgtgcatcg

SEQ ID NO: 147336 - DNA, 97 bp, Homo sapiens
agtcatgattttgaatcacccagataaagtgccctgaaactctaatctcattgcctggccagaaaaggaagtaatccctagtgtcagcagattcagc

SEQ ID NO: 147337 - DNA, 98 bp, Homo sapiens
acacatcagtctatcagtgttcggctccagcctgtgaagaagttaactggtacgcatagctgctaaattcatcactcatgcacccccaggggaattta

SEQ ID NO: 147338 - DNA, 95 bp, Homo sapiens
ggggacactcactttgacgatgaggagacctggacttttgggtcaaaagcagaggggactcaccagagatcactgggccagaaaaacaacaacaa

SEQ ID NO: 147339 - DNA, 75 bp, Homo sapiens
tttgagaaaaggcctaagaattttggcattggcttccactgcagccatgtcactcctcttgctggtggtctcagc

SEQ ID NO: 147340 - DNA, 101 bp, Homo sapiens
ctgcttccctgggctgggcgtcagccgccaccggcagcagcagcaccaccggacgctctttgagtccagatgttgatccagttcttgcttttcaacgagaa

SEQ ID NO: 147341 - DNA, 101 bp, Homo sapiens
cgacgggccggcccgcgagcagccggaggccccggtcccgggcagagcggcttgggtaaatccaccttaatcaacaccctcttcaaatccaaaatcagccg

SEQ ID NO: 147342 - DNA, 75 bp, Homo sapiens
ccaagcctctacaggggcctcccgcgccccccgggacccccacgccgccgccagcttgagtattcaaagacagta

SEQ ID NO: 147343 - DNA, 100 bp, Homo sapiens
actccagctgtgaaagcaacataaatgatcacatgtacatgaagacaatggaaagttatttccttcatccagtctacaaatacccaaggaccataatgca

SEQ ID NO: 147344 - DNA, 98 bp, Homo sapiens
agtttgggatcatccagaagcatctgaagaccatggatcacaaccggaaccgcaggttttgcacagtaataagttgactcacacagacttaaagcctg

SEQ ID NO: 147345 - DNA, 75 bp, Homo sapiens
gccctctctgagcccagcgctactgtgaccattgaggagctcgaagttggtgagatggcaaagcagtatatagag

SEQ ID NO: 147346 - DNA, 82 bp, Homo sapiens
ggcgatgggcgggggtagagccccgccggagaggctgggcggctgccggtgacagagtttatgtggccgaggcagacaagtg

SEQ ID NO: 147347 - DNA, 115 bp, Homo sapiens
gggcggcaaaggagcagccatgagggccgggcccagtcaccgaccggggctgttgtggttccgactataaacagtacgtgtttggcggctgggcctgggcctggtggtgtatctc

SEQ ID NO: 147348 - DNA, 100 bp, Homo sapiens
actacgaagtgctatccgtgcgagaacagctattccacgagaggatccgcgagtgtattgacctgaaggagaagaaggagaaggtggaggagaaggcaag

SEQ ID NO: 147349 - DNA, 98 bp, Homo sapiens
ggaagtagagcccgggaccgccaggccaccaccggccgcctcagccatggacgcgtccctggagaaggtaagaatgattgatgttggctgatattgga

SEQ ID NO: 147350 - DNA, 75 bp, Homo sapiens
aaatgctttggcagggcaagaaagaagggccttgtcctgccaagaagttactgatgatgaggtcttagatgcaag

SEQ ID NO: 147351 - DNA, 101 bp, Homo sapiens
ttgcagtctcccgaattccagtcacttttcacagaaggactgaagagtctgacagatgccctccaaatccttggttatggaatatttggctcatcccagta

SEQ ID NO: 147352 - DNA, 107 bp, Homo sapiens
cctgcttttcggttccgggtcttggccccgtccttacctcacagattgcccgtgaggcagaggctgccatctaccacttgcaattatttgaggaactccgccgcctg

SEQ ID NO: 147353 - DNA, 75 bp, Homo sapiens
cgttctcccgactctggaccgacgtgatgggtatcctggtatttatgagcctccatttcttatactactgcagtg

SEQ ID NO: 147354 - DNA, 75 bp, Homo sapiens
aggcaggcggaagacagtgagctgttcgagctggattattgcctcaaagttgtcgagatgtccacagaaggagga

SEQ ID NO: 147355 - DNA, 74 bp, Homo sapiens
agcctcaaacaggagctggagcagctcaaagaggtctccagaaatgctttgggttcatctttcattgctgcaag

SEQ ID NO: 147356 - DNA, 75 bp, Homo sapiens
gcaggacaatcgcactttataccacctgcgattactgaaccagcagcacaaacactgttggggcaacagtgaaca

SEQ ID NO: 147357 - DNA, 100 bp, Homo sapiens
gacactgagcctttggagttaggaggtcctggagcagcacctgaactcctggggggaccgtcagtcttcctcttccccccaaaacccaaggacaccctca

SEQ ID NO: 147358 - DNA, 80 bp, Homo sapiens
ggaggaggtggcggcggcgggaagatgtatcatgatattagctggtttgacatcaagtcatttgtgagtcatcagatctt

SEQ ID NO: 147359 - DNA, 51 bp, Homo sapiens
cgcagaggcccccgacggagacaaggacgatgaagttgcggagaataatga

SEQ ID NO: 147360 - DNA, 83 bp, Homo sapiens
cccgctgtggtacttctcgcagtccccgcgcgtggtcatccaggtattagaaaactactcggatgctccaatgacaccaaaac

SEQ ID NO: 147361 - DNA, 100 bp, Homo sapiens
tggtggcctggaagagacaattgatcctgtttggtggcttccatgaaagtacacgaatcctcactatggatgggctcattgaggacattaagcatcggcg

SEQ ID NO: 147362 - DNA, 76 bp, Homo sapiens
gagaaggcaatgagccgacccatcttgtacagcaactggctgtcaaaggtgccaaatcaatcattcaggagtttcc

SEQ ID NO: 147363 - DNA, 76 bp, Homo sapiens
ctgacccacgagctgtcaaccaagataaaaagaacatgctgttttctgcgctggcgtgctggttaccacagtggtg

SEQ ID NO: 147364 - DNA, 75 bp, Homo sapiens
agataaagttgctttttactgaaacgtgttcagttgatcatcaaatacttaaaggaccttgaaagcttgtctggc

SEQ ID NO: 147365 - DNA, 101 bp, Homo sapiens
atttttccctctaccttaaggatgtgcaggatcttgatggtggcaaggaatcatggaagggaagtggttgctgtgtatgttactggtgcttggaactgcta

SEQ ID NO: 147366 - DNA, 90 bp, Homo sapiens
gaagaaatcattgtacagaatggaaaagtaattggtgtaaaatctgaaggagaagttacaggaggttccagtggcatcgggaagtgcatt

SEQ ID NO: 147367 - DNA, 98 bp, Homo sapiens
caagacaagctcagaactgagaagctgtcaccacagcatacgtgagaaggctgttcgagagctgcttacccggcactgccagctgttggagacccctg

SEQ ID NO: 147368 - DNA, 75 bp, Homo sapiens
gccagaaggatttcttctcccagagagcagatcctgaaacctgcaagtgcccactctccgacccaagtgagaagc

SEQ ID NO: 147369 - DNA, 100 bp, Homo sapiens
tcaacaagacagccattggtacctacctgggggagagattccaactccacagagtgaccagagagaggacgtggctgaagacaccaaagatgggggaggg

SEQ ID NO: 147370 - DNA, 75 bp, Homo sapiens
acaccatatcaaattgcctgtggaattaggtggggcatgaggacactggccactccttgcatgactacaaggaag

SEQ ID NO: 147371 - DNA, 75 bp, Homo sapiens
cctatcaagacctgtatccaggaaaagcctcttccttggttgtgccactactgagttctccagttctctttcagc

SEQ ID NO: 147372 - DNA, 51 bp, Homo sapiens
tggactcggattcgttgcctgaggacaactgtcatctgggaagtaacaacg

SEQ ID NO: 147373 - DNA, 97 bp, Homo sapiens
agaaataagaagaagcaactgtacaaaccatgatcagttcagtgatatgagaatcagcataaaccagacgcctgggaagagtcttgactttgggttt

SEQ ID NO: 147374 - DNA, 100 bp, Homo sapiens
acgagatcttgggcaccgagagggactacgtgggcaccttgcgcttcttgcagtcggtggacccccaaaagtacaagggcatatttaacggattctcagt

SEQ ID NO: 147375 - DNA, 100 bp, Homo sapiens
aaagccccttcgtctccccagcacccactctctgggggcaggtgggcccggtgacagcggggatctgatgagcttctttcttctggcatcattaacggac

SEQ ID NO: 147376 - DNA, 90 bp, Homo sapiens
ggagctgaacgtggacagcctcatcacccggctgctggagggtcatcatcagatttgaaatatttaaagtggatacaaaactatttcagc

SEQ ID NO: 147377 - DNA, 100 bp, Homo sapiens
atcagacccagcagctcccctcccactgtggctcccgcatctgcctccctgccccagcccatcctctctaaccaaggctgttcacggaagaccaggatgt

SEQ ID NO: 147378 - DNA, 98 bp, Homo sapiens
ccgtcccgcgcggggcacgatgttgaacatgtggaaggtgcgcgagctggtggacaaagcggctcacacagtcgacaaaagaaaacgtttttcttggg

SEQ ID NO: 147379 - DNA, 50 bp, Homo sapiens
taaaaagaccactgaggagcaggtgcagacctccttgaggcccgccgccc

SEQ ID NO: 147380 - DNA, 74 bp, Homo sapiens
ggccctgatgcaggccatcaagtgtgtggtggtgggagacgggttggatggcaagcatgtggtgtttggcaaag

SEQ ID NO: 147381 - DNA, 97 bp, Homo sapiens
ggagtgtttggattccagatttgtattcgatagaccactgcctgtgtctcgtcttgtatctctaattggaagcagttgggaagtcattgctgaagat

SEQ ID NO: 147382 - DNA, 100 bp, Homo sapiens
cagaattccagagaactgacttgggagcttggctttgtgatgataattttccagatgatgaatctcgtcacggagtatgcggttaatgaagttgtggcag

SEQ ID NO: 147383 - DNA, 108 bp, Homo sapiens
cgctactcctggcagtgcgtcaatcagagcgtcctgtgcggctgatctactggctgacctttgccgtgggccgctccttccgaggcttcggctacggcctgacgtttc

SEQ ID NO: 147384 - DNA, 147 bp, Homo sapiens
atccctattactaatagcagtcaatttaaacaccaggaagcaatggatgtgaaggagttcaaagttaataaggaccctaataggagtattcataccagcagcagcagcagcagcagcagtagcagcagcagcagcagcagcagcagc

SEQ ID NO: 147385 - DNA, 98 bp, Homo sapiens
gatgtgcgagaactgcgcagacctggtggaggtgttaaatgaaagcgtaatagattggaactcagtgaagacacagatgttcctgttcagagcaacca

SEQ ID NO: 147386 - DNA, 100 bp, Homo sapiens
ttccctgcactctcatcgctctcggcctcggcctcggcctccgacacgattacctggctggtgtttgcttgttctggagtgatcttctgactggaaaaga

SEQ ID NO: 147387 - DNA, 75 bp, Homo sapiens
ggaagcagggattccagtgccaaggcccctccagccagcgtcaggtgcagaatggcccctctcctgatgagatgg

SEQ ID NO: 147388 - DNA, 82 bp, Homo sapiens
aaggaaatgtgaaacgaataacatgatggaatatgtgtctgtgacctttgaggatgtggctgtgacattcacccaggaggag

SEQ ID NO: 147389 - DNA, 98 bp, Homo sapiens
ggacagttcgctacacagcaatgcatcgagattagaaatgatatttgccaaatttgatgaagtgcaaagttcaggcggtatgattttgagtgtctgca

SEQ ID NO: 147390 - DNA, 76 bp, Homo sapiens
aaagagattccttgcagagacagctcaacacggcacttccacagatttggtgcttccagatgtgagttatcaggtg

SEQ ID NO: 147391 - DNA, 100 bp, Homo sapiens
cctggttctgcctcagctaccatatttgcagatgattctctgttgccagcgccagcaggaggagcaggaagtggcggtgcgagggctgctgcacagcgag

SEQ ID NO: 147392 - DNA, 82 bp, Homo sapiens
cgcctcgctgtccctgcggcttctgggggattttctattgcagcagaccatgctacgagtgaaggatcctaagaagtcactg

SEQ ID NO: 147393 - DNA, 98 bp, Homo sapiens
gatgcccctgtgcccatcatccaccgggacctcaagtccatcaacacccgagtgattgatgtatctaatgggaaagttcatgttgctgaaagctgttt

SEQ ID NO: 147394 - DNA, 80 bp, Homo sapiens
atggataagcatgccctgaaaaagtatcgtcgagaagcctatcatcgacccctcctcctgtagagagtggtgctgccctc

SEQ ID NO: 147395 - DNA, 100 bp, Homo sapiens
gtgctgaagcctttaaatgcagcatctgcgatgtgaggaaaggcacctccaccagcttaaccagctcgaaaaagcagtggaagcagctcacacatttttc

SEQ ID NO: 147396 - DNA, 88 bp, Homo sapiens
tctcaaaccacttctcagacaagttccatcccacctttgagtcaggtgaaaggtgtagcagtcactcggcctacacccacagcatcga

SEQ ID NO: 147397 - DNA, 101 bp, Homo sapiens
cccaccttctgggcaaagaatgtagtcaatttagttggaggtaatgcttgaagataatgtttgcttgcccagcaatggcaaattatatacaaaggtaatca

SEQ ID NO: 147398 - DNA, 100 bp, Homo sapiens
caacactaaaccacaaatatacaacaaggccattttctcaaacgagagtcagcctttaacgtgaacaacgtgggaatgtcgtatgagtatcctgaatact

SEQ ID NO: 147399 - DNA, 100 bp, Homo sapiens
caaggaccccctccggctcaagtgtgtcaagcaagggaaatcctcattgacgattcaatttgttgaaggccaatttgtggactcctacgatccaaccata

SEQ ID NO: 147400 - DNA, 89 bp, Homo sapiens
agaagataacaatcaagatgaatatgaccctatggaagcagaagaagctgaggatgaagaagatgctttgctgcaagataacatcgctg

SEQ ID NO: 147401 - DNA, 74 bp, Homo sapiens
cgtgccgcgagcgcggcctgcaggagggtgaggtggctttgaccccgggttgcccggccagcacgaccgaggag

SEQ ID NO: 147402 - DNA, 50 bp, Homo sapiens
ttgctgaagagactttccgttacatgaacgccgtttcccatggaacatca

SEQ ID NO: 147403 - DNA, 83 bp, Homo sapiens
cgcattttcttattaggactggctgataacgaagcagctattgtccagagaagaagaagttggatgggataccgagattaagg

SEQ ID NO: 147404 - DNA, 80 bp, Homo sapiens
tgcagcgcaaccacgagacggccttccaaggtcagcccaaggccaaccccactgtcactctgttcccgccctcctctgag

SEQ ID NO: 147405 - DNA, 100 bp, Homo sapiens
tcgcagcgccagacccaaggcccccgagtgagcgcgggcgccgaggcctccggtgtggctgtctctgatggtgtcatcaaggtgttcaacgacatgaagg

SEQ ID NO: 147406 - DNA, 98 bp, Homo sapiens
ctggacacttctggaagtcagctgactggcaaaactcaaggctcagaaactgcagggcccccaaaaaagaaaaggaagaaaacacaaaagaaattccg

SEQ ID NO: 147407 - DNA, 136 bp, Homo sapiens
agtggttacaagtacagactctggagccagactgcctgggtttgaattgtgcggtttcaggtactccacatcagcattctcaagactggagaagttaggcctcagacatcccaagccttctcctttcattggaaac

SEQ ID NO: 147408 - DNA, 49 bp, Homo sapiens
ctgaaacaatgggacccatgggttgccggatcgagctgggagatgtgac

SEQ ID NO: 147409 - DNA, 100 bp, Homo sapiens
cccagctgagacgatcacttttctgtaggccatttgtccagcaaacttccttgataacatgcttttgcgaagtgcaggaaaattaaatgtgggcaccaag

SEQ ID NO: 147410 - DNA, 75 bp, Homo sapiens
caggtggaattatgccctgttggttccaatgctgggattggctgcttttcacgcatcttctctccagactgccga

SEQ ID NO: 147411 - DNA, 75 bp, Homo sapiens
ggttgttccgttgcgagctgcagctgcgatctctgtggtaggcccaggtgagatttgtggatttaaaattcacgg

SEQ ID NO: 147412 - DNA, 100 bp, Homo sapiens
gtggagcggcgctgggggacacaggtgtgagagggtccagcagaaggaaacatggctgccaaagtgtttgagtccattggcaagtttggcctggccttag

SEQ ID NO: 147413 - DNA, 95 bp, Homo sapiens
gaacagcgagctgtttgacccctttgacctcttcgatgtgcgagactttggaaagtgctcggcgtgggacatggatgcaggctcctcaccgatat

SEQ ID NO: 147414 - DNA, 75 bp, Homo sapiens
gatttaaaagacagtcctcgtcagcactgactttcagctatggaatcgaattttgattcagctaaagttccatca

SEQ ID NO: 147415 - DNA, 98 bp, Homo sapiens
ggcagtttgtcgaacgatgttggactcatagtcactgccagaaagggggcagagtccccaaggccaagaagaaggcgccgctggccaagggcggcagg

SEQ ID NO: 147416 - DNA, 87 bp, Homo sapiens
gctccctcacacaccggcctcagcccgcaccgcaaattcaacacccaacagcttccttaatagcaaaggtagcaacagcccaggatg

SEQ ID NO: 147417 - DNA, 95 bp, Homo sapiens
cgccgggcgggagaagagcggagcagtggtcggagatgtggcgaccggctctgtgtgctccgggatggagcaggtgtgcagagggtgagaaccca

SEQ ID NO: 147418 - DNA, 82 bp, Homo sapiens
aagcgaacaggattctttggaaaactgtggatattcataaggagaaagtggcacgaagagagattggtattttgacaacaaa

SEQ ID NO: 147419 - DNA, 75 bp, Homo sapiens
catcaagcgcaagcacaccctaccgaattacaagatcaggaagctgccacttttgctagagagcaaggctttgag

SEQ ID NO: 147420 - DNA, 83 bp, Homo sapiens
gtcggtggagatcaacggcatcatgtacacaggtacaggtttgcagattccgccagcagcacagcaagctctacagatgagtg

SEQ ID NO: 147421 - DNA, 100 bp, Homo sapiens
ctacagcacactcagactcaagatctgcaagttttcctaaaaatatgaaaaacagtagctccgtatcgaatacattgacaaatggatgtgtcatcaatgg

SEQ ID NO: 147422 - DNA, 50 bp, Homo sapiens
agaggacttacagaaccgaggtccctcctgctttttagccggtctttgga

SEQ ID NO: 147423 - DNA, 121 bp, Homo sapiens
ctcattccggagaagaagggcctcttcctgaagcatgtggagtatgaggtttccagccaggagcgggacggtatgcgggccatcctggggtcctacgacagcgagctgaccccggccgagt

SEQ ID NO: 147424 - DNA, 82 bp, Homo sapiens
agacgctaaacgtgccctactctgccccgggggagagggcgtgatggtgggcatgggtcagaaggattcctatgtgggcgac

SEQ ID NO: 147425 - DNA, 83 bp, Homo sapiens
tgcacattatgaaaagcgtcaagaagaggaggaagccatgcgtaggctcctcttttgacttggactatgactttcaacgggac

SEQ ID NO: 147426 - DNA, 100 bp, Homo sapiens
acggtctatggaatatctacgatttagagagctgccagcagtggccctgaagctgcactatgttggaggtttccttgactaagagaaccacatgcggcat

SEQ ID NO: 147427 - DNA, 85 bp, Homo sapiens
ccaatcatgatgaactaatttccaaggacatggatttgattgacatactttggaggcaagatatagatcttggagtaagtcgaga

SEQ ID NO: 147428 - DNA, 123 bp, Homo sapiens
gcgaggtggtcatcaaaatagctacaaaccatactaaattattccatttgcaacttatccccaacaggtggtggaagctacaatgattttgggaattacaacaatcagtcttcaaattttgga

SEQ ID NO: 147429 - DNA, 98 bp, Homo sapiens
agctcagccaggggcagccggctctggtgctcccagaagagcacgtcagctaactgttcagatgatgcaaaatcctcagattcttgcagcccttcaag

SEQ ID NO: 147430 - DNA, 90 bp, Homo sapiens
gacgactccccgggctcagcttggctgcctgcctccttctgtgacaaaacacgacagccttcttcaagcccctccagtattatccgacgc

SEQ ID NO: 147431 - DNA, 98 bp, Homo sapiens
tgcaaatccgtgtttgttcacaactaagcccagctgagacgatcacttttctgtaggccatttgtccaggaacttaaaaggagtctagaaaatccagc

SEQ ID NO: 147432 - DNA, 100 bp, Homo sapiens
cattggccaggccttcgagttgcgcttcaaacaatacctcaggaacccacccaaactggtcacccctcatgacagtaaatgtggggacctagaggaggag

SEQ ID NO: 147433 - DNA, 90 bp, Homo sapiens
gtgaaggtccctcagcggcgccgattattggagccggaattggtggcacttcagcagcctattacctgcggcagaaatttgggaaagatg

SEQ ID NO: 147434 - DNA, 80 bp, Homo sapiens
ctgcaaatgaagctctcgaggctgctaagagactaagttcccgtgtcagtggctatgatgacacctcaagttatcactcc

SEQ ID NO: 147435 - DNA, 83 bp, Homo sapiens
ctgtgcttggctggaaaaccccaaaagtgtacataaggaattacatgaatgacagtcttcgaaccaatgtgtttgttcgattt

SEQ ID NO: 147436 - DNA, 92 bp, Homo sapiens
gggaaatcgtgcacatccaggctggtcagtgtggcaaccagatcggtgccaagttttcggctttgtgagaaaccttaccatcaaacacgatg

SEQ ID NO: 147437 - DNA, 100 bp, Homo sapiens
aactctatatccaaaatatgagctacaagagactgtgaaaaggaagttggaaggagctcgatcaccacttaatggagaccagcagaatggtgcttgtgat

SEQ ID NO: 147438 - DNA, 75 bp, Homo sapiens
gtggaagtggatcaaggggaaggattcttacagaagcagagattgatgctcaccttgttgctctagcagagagag

SEQ ID NO: 147439 - DNA, 78 bp, Homo sapiens
aaaaaatcccaaggtctgcaaaggtgtctcccagtctgctaaagccctaaggccatcaccatggacttccagcatcgc

SEQ ID NO: 147440 - DNA, 76 bp, Homo sapiens
aaagactatggtttaatgaaaatagatgaaccaagcactccttaccatagggcatcttctctgcattcagtttcat

SEQ ID NO: 147441 - DNA, 82 bp, Homo sapiens
tgtgacagtaacagtacttgggatcccccagttccaaagtgtcttaaaggacccatggatgaaggaccagatcttgatctag

SEQ ID NO: 147442 - DNA, 100 bp, Homo sapiens
tgcctggaacagatacgggagatggaaaagcaggtcccgacactaagctgatgcaaaacagcggcagaacaaagttcaaaagaacgagtatcgatcgcct

SEQ ID NO: 147443 - DNA, 100 bp, Homo sapiens
acatgaagcagatgagttgagtggagatgcttctgtggaagatgatgcttttatcaagattttgaacacagcacgaaaacattttggagctggtggaaat

SEQ ID NO: 147444 - DNA, 82 bp, Homo sapiens
cccctttcaactctacttcaacccgcaccttgtgttccggaagttccagctgagcgggctttggacaccatgaactttgatg

SEQ ID NO: 147445 - DNA, 100 bp, Homo sapiens
ctcggctacagcttcggcggcgaaggtcagcgccgacggcagccggcacctgacggcgtgaccgacccgagccggtcagaagacatgtcttcatctacat

SEQ ID NO: 147446 - DNA, 97 bp, Homo sapiens
ctgactcgggccaaatttgaagagctcaacatggatctggtggaacgagactgcaatggggacacgccaaacctgagtttctacagaaatgagatcc

SEQ ID NO: 147447 - DNA, 100 bp, Homo sapiens
atcgaggcgagccagagcctgcagtcccacacgatggaggagatgtataagaaagctcatgctgctatacgagagaatccagtctatgaaaagaagccca

SEQ ID NO: 147448 - DNA, 100 bp, Homo sapiens
atggctgaccagatagttacagtgtgtgccaccttggatgaaaatcccggagtaagatataaaaggactaaaatgtagcagttgtgaaccttttccagat

SEQ ID NO: 147449 - DNA, 75 bp, Homo sapiens
ggtggccactgcgcagaccagacttcgctcgtactcgtgcgcctcgcttcgggtgtactctgtgtgaccgcgcct

SEQ ID NO: 147450 - DNA, 88 bp, Homo sapiens
actcaggtccttgactccatgaagcttaccccctcaggcaggctggcagagagcaggctgcttctgatgcttggaagatatcctctca

SEQ ID NO: 147451 - DNA, 75 bp, Homo sapiens
tgagaacaccagccttgcacctgaagaccccacctttcctggttgaaaatcgatgactttaatgatgaactcaat

SEQ ID NO: 147452 - DNA, 88 bp, Homo sapiens
gctgatgaagattcacctgtgcatggtggcacgcactacccttcttcctggcctcctgaagaccatagcagcaaatcgtaagatgccc

SEQ ID NO: 147453 - DNA, 50 bp, Homo sapiens
agagcttctcagactatccacctttggggagagcttatggatggagacca

SEQ ID NO: 147454 - DNA, 76 bp, Homo sapiens
cgcaagaatgaactggagacagagaatagagttgtctgctggttctcagcttgaagaagattctgcagtccttatt

SEQ ID NO: 147455 - DNA, 100 bp, Homo sapiens
cgacgccgggcagcgggagcggcggccgcgccatgtggctgctggggccgctgtgcctgctgctgagcagcgccgcgggaacgaatgacctgaagatcct

SEQ ID NO: 147456 - DNA, 90 bp, Homo sapiens
ttcagaaggagcaggattaccaaaggacaggggcaagtgtccgagtggtgaatcagctacttacagagatggatggtctggaagcacgcc

SEQ ID NO: 147457 - DNA, 74 bp, Homo sapiens
tctacaatttttagtggagttgccatctatgttaatggatacacagttgccaccttccagagaagaggtacgag

SEQ ID NO: 147458 - DNA, 100 bp, Homo sapiens
cacaatgtagaggaaatggcatcgcctggcaggtatcatcagagagtcttatatattgatatagatattcatcatggtgatggtgttgaagaagcttttt

SEQ ID NO: 147459 - DNA, 89 bp, Homo sapiens
tttgaaaaatgaagatgatgtagacactggactattagcggaagatccatccaaaagctatgtgaaattacgagactttgtgcttgtga

SEQ ID NO: 147460 - DNA, 100 bp, Homo sapiens
catttttgttccagaggatgatgatgatgatgactaacagcccaccttgggacaccttgactccaagcccagcagtaagtccaacatgattcggggccgc

SEQ ID NO: 147461 - DNA, 74 bp, Homo sapiens
ccaggagttctctaacattgtcatacctctcatcaagaaggcttacatcaaaatctatcaaggagaagaacttc

SEQ ID NO: 147462 - DNA, 90 bp, Homo sapiens
cgacggcgttgatatcggtggtaacgacggcctcagcaggcggggaagatgaaagggcacttcaggtggcaagacagctccttcttcagc

SEQ ID NO: 147463 - DNA, 100 bp, Homo sapiens
cagcctcaggaaagctttaccaattcaggcacccagtcaggaaaaagaagatgtccctgtggaaatgtccaatggtgaaccaggttgccactactttgag

SEQ ID NO: 147464 - DNA, 82 bp, Homo sapiens
cccaacggggaggccaacgtgaagaagtgaaatgacaatggatgctctgttggctcgattgaaacttctgaatccagatgac

SEQ ID NO: 147465 - DNA, 90 bp, Homo sapiens
cgcagagcgaggctgcgggaccccaggatgggggacaggaggctgcggggcctcagcttcaaggttactgactttttatgatgtttggtg

SEQ ID NO: 147466 - DNA, 83 bp, Homo sapiens
tatgaccgggtttctttgatgcgacctcaggaaggagatgaggttactataacaacagtaccaaggtggctgtgaaaaccctg

SEQ ID NO: 147467 - DNA, 107 bp, Homo sapiens
ccaccccctcttccccacttccctgcactctcatcgctctcggcctcggcctcggcctccgacacgtgcaaggatgatgctgaaaggaataacaaggcttatctcta

SEQ ID NO: 147468 - DNA, 82 bp, Homo sapiens
ggagtggcctcaagatggatgaagacggcggcggcgagggtggtggcgagtctgtagaagaggcgacaccagggcttccaaa

SEQ ID NO: 147469 - DNA, 100 bp, Homo sapiens
ctctgaggtagatcatgaaagagatcctggacctatgaatatccagtttgagccatcggatctaagatccaaaagagacaaaatctggctctgtcaccca

SEQ ID NO: 147470 - DNA, 50 bp, Homo sapiens
gaactattcattcttatcaagggcaggactcaaaagcttattaccacctg

SEQ ID NO: 147471 - DNA, 96 bp, Homo sapiens
acacacgctacctctttctgggtgactatgtggacagaggctatttcagtatagagggcgccaatgcttcggcattagagaaagagattggtccag

SEQ ID NO: 147472 - DNA, 120 bp, Homo sapiens
ggaagctctttgcggtggcgttggtgctgtttgcggatgctgatgcagtcctcctgcatatgcccaagaggattgggagtggaatggacaccagcagaagcaccacagttattcctgtag

SEQ ID NO: 147473 - DNA, 74 bp, Homo sapiens
gctgctcaaggacacggtctacaccgacttcgacggtggccaggagccccctgaaggagttcgacaaggagaaa

SEQ ID NO: 147474 - DNA, 75 bp, Homo sapiens
ggcggccgcggcgcgggccccgcgggggttagaggggcatcgtgaggagggaggagaaaacctggaccaggcacg

SEQ ID NO: 147475 - DNA, 90 bp, Homo sapiens
caccaggatctcgggctcggaacgagactgcacggtgcagtagacattgttgcaatcatgatcggcaatctgaaaggcacaaaaattctg

SEQ ID NO: 147476 - DNA, 98 bp, Homo sapiens
cgggcagctagcgcgaccctgagccggcgcccgtggtccggccatggacgacctcgagtgcttgtgatttcacgtatttttgctgaactcgtaaaaga

SEQ ID NO: 147477 - DNA, 50 bp, Homo sapiens
caagacactccaagtttggcatgaaagcatggcttctcgctgtttctggg

SEQ ID NO: 147478 - DNA, 83 bp, Homo sapiens
cacggtctgtgagcaaggaatcagttgcctcaatgggagctgactcaggagatgactttgagcaatttacagcaatgagggat

SEQ ID NO: 147479 - DNA, 83 bp, Homo sapiens
gtgatgccattccagcactggactcatggaggctgagcatttattcaggtcctaggcctacttacaagcctccagtctcaaat

SEQ ID NO: 147480 - DNA, 140 bp, Homo sapiens
tttgaaatatgttcttctttgtcaccaaaaacagaaaaatgcacaacagagggacaacaaaagcctcctacaagagtcctaccaaaacttcacctgaacctaaaatggtgagcgagagtcaccatgaggccctggcagcc

SEQ ID NO: 147481 - DNA, 87 bp, Homo sapiens
tctcctgagtttttcaagtctgccctgcaagcgataggagtggaagcccaccaggatgtcacatgtacttcagtttgaggataaaag

SEQ ID NO: 147482 - DNA, 103 bp, Homo sapiens
atgatctctaccgatgggaagtccttattattggccctccagatacactttaggccactgtttgtggaagatataatgacaatggtgctgtgtaaacccaaac

SEQ ID NO: 147483 - DNA, 97 bp, Homo sapiens
ggagacagcccaaatatcctcggaagagcgctcccaggagaaacaacaacacagtcactcctggcggcaaaccaaacaaaaccagagtcatctgggg

SEQ ID NO: 147484 - DNA, 83 bp, Homo sapiens
ccagctgaagagcgacaagccgctggcagccgcggatctcaccgccgctcaggatcctgataacttaagtgactctctctttt

SEQ ID NO: 147485 - DNA, 75 bp, Homo sapiens
attggcatccagattatccactgcaattcaagaatggctttgtttaaattgccaaacccagagagcaatatcagg

SEQ ID NO: 147486 - DNA, 100 bp, Homo sapiens
ttgcttgcttgagcttcagcggaattcgaaatggcacgtctgagaatggtggatgtggtggagaaagaagatgtgaatgaagccatcaggctaatggaga

SEQ ID NO: 147487 - DNA, 100 bp, Homo sapiens
caagacttatcgatgcggtatgaaaccaaatactgctattaagaaaagagtctcatcgtggaaggcaagagggaaaagaaaaaagtagagaggttgacaa

SEQ ID NO: 147488 - DNA, 75 bp, Homo sapiens
cggacagcagcctcgggtgcaatcctggagccccccagtgaggattcccgacagttaagcaatggggagacattt

SEQ ID NO: 147489 - DNA, 76 bp, Homo sapiens
ggggctgtttggaaagacccaggagaagccgcccaaagaactgcacctcaatgacctgaagaaggagaacttcagc

SEQ ID NO: 147490 - DNA, 75 bp, Homo sapiens
cccaggtccgcccagcagccgcgcttcagccagacatgtagactgccaaagtgtatgggatgctttcaagggtgc

SEQ ID NO: 147491 - DNA, 82 bp, Homo sapiens
gaggggctccgggtcttccagagcgtgaagatcaagatcggccttccggagcagtactacagcctcacctggttcctgagcc

SEQ ID NO: 147492 - DNA, 96 bp, Homo sapiens
acactgcaaggaccccctccggctcaagtgtgtcaagcaaggaagagcccgatgcccttggtttgactctactaagagcccctcagttgctgaacc

SEQ ID NO: 147493 - DNA, 96 bp, Homo sapiens
ggatacgtacctgtggagttttggaaaaaaacaggaatggacaatcagaccgttctggctgtccagtcattattggatggccaaggagcagtccct

SEQ ID NO: 147494 - DNA, 114 bp, Homo sapiens
ctttaaccatggcgtccctcttcaagaagaaaaccgtggatggtgctggagaatctggtaaaagcaccattgtgaagcagatgaggatcctgcatgttaatgggtttaatggag

SEQ ID NO: 147495 - DNA, 143 bp, Homo sapiens
gctcgcaggaggaggaggtcatcgacggcttcgccatcgccagcttcagcaccctggaggccctggagacaatgcagatcttcgtgaagactctgactggtaagaccatcaccctcgaggttgagcccagtgacaccatcgag

SEQ ID NO: 147496 - DNA, 118 bp, Homo sapiens
atttcatgtatctgaacattgacacaaaggagataccttatggtgccagtttctacagcagtataatcactacaaatccaatgtggagattttcaaattgcaaccaaataaacccagc

SEQ ID NO: 147497 - DNA, 75 bp, Homo sapiens
agtgaccggccccgcttcaccgagctggtgtgcagcctcagtcatgatgctatggactcctactacgactacata

SEQ ID NO: 147498 - DNA, 101 bp, Homo sapiens
agagggagaaaggggtgttggtggctttgcccaaatccaaatggatgaatgtagaccatcccattcatctaggagccgtttccctggggagatggtaacca

SEQ ID NO: 147499 - DNA, 75 bp, Homo sapiens
atctggacaaaggaacaggtatctcaggaagggaaaaggccgaggcatcagcgtgtgaagaccgcaaagacgatc

SEQ ID NO: 147500 - DNA, 75 bp, Homo sapiens
aaagagagagctttgtcacagatgagcaaaggttagcactctacgtatatgaatatctgctccatgtaggagctc

SEQ ID NO: 147501 - DNA, 100 bp, Homo sapiens
ccgccctgctgccgaccgaggactgaccactcgaccaggttcctggactacctctctgacctgtgtgtgtccaaccacatcgccatccccgtcacccaag

SEQ ID NO: 147502 - DNA, 75 bp, Homo sapiens
cagaaaagagatccagggcttcctcgattgtgccgcgagggctcagttttctggatatgccgcagaaggatccgt

SEQ ID NO: 147503 - DNA, 100 bp, Homo sapiens
gcccaagctcgaatattcccaagaggatctggggagatgatgacacgttctccagttaaggtttctaagcatgaattgaggaacagaagaagcagagcag

SEQ ID NO: 147504 - DNA, 78 bp, Homo sapiens
tggaagaaaattctcatccttgtggaaggaatatatagcatgcagggctctggtggatgaactagaatgggaaattgc

SEQ ID NO: 147505 - DNA, 50 bp, Homo sapiens
gtttgcaaagcacctgaactggatgtcaaaaaagctatcctcgaagatat

SEQ ID NO: 147506 - DNA, 83 bp, Homo sapiens
gggagtttgctaaatttgaaaaggagaaaatgaatgccaaatgggacacgcttaagactgctgtaagcgagaaaatgttgaag

SEQ ID NO: 147507 - DNA, 95 bp, Homo sapiens
ttgaggattcagcaaatgaagattcagtggatgctaagccagaccggtcctcgtttgtaccgtccctcttcagaaagctgtagaggaacccctta

SEQ ID NO: 147508 - DNA, 101 bp, Homo sapiens
caagaagaccattcagatgggatctttccggatcaatccagatggcagccagtcagtggtggagaataaaagccgccctcattctaggggagaatataatg

SEQ ID NO: 147509 - DNA, 82 bp, Homo sapiens
aagaccttcgaccagctcaccccggacgagagcaaggagaggctagggtttgttgataagccggggcccttcgtgggaccct

SEQ ID NO: 147510 - DNA, 100 bp, Homo sapiens
agaagactccaagggagtaaaagagctgatgaaacaatggcaagaatagcgggttttgcagcaattgttgcatatggattatataaactgaagagcaggg

SEQ ID NO: 147511 - DNA, 82 bp, Homo sapiens
ccttccccacgacggggcgcctctgcaactcacaggaggagatatcaccaaacatgatggaacaggcggacagtccatttat

SEQ ID NO: 147512 - DNA, 83 bp, Homo sapiens
tgcgaggctcggagaaacaggcgccgcgggctccgcgcccggccggacccgggcccgagggtgacggagctgctccccccgtt

SEQ ID NO: 147513 - DNA, 75 bp, Homo sapiens
gtgcttttatattcatctcaaaaacaaaattctgaactcaggacttggcaatctcttgttttcagcagccactgt

SEQ ID NO: 147514 - DNA, 73 bp, Homo sapiens
acattgggggtttggacaagcagatccaggagcaattggtgctgaaaattcagaaaaaatagatgagaattca

SEQ ID NO: 147515 - DNA, 110 bp, Homo sapiens
ccatcctggataacccggtggtgcagctgggcctgaccaacccgaaaacattgctagtgaagatagtgatccggggagacaggaacacgggcaagacagcgctgtggcac

SEQ ID NO: 147516 - DNA, 75 bp, Homo sapiens
ataagtcaaaggaggaatttgcctcttctacagatagagctgttaagaaagaacattggagctatcatgtctgga

SEQ ID NO: 147517 - DNA, 100 bp, Homo sapiens
cccgcccgaccccgtcccgaccctggccgccccgagcggagcctggagctcattgctatggacagtgctatcaccctgtggcagttccttcttcagctcc

SEQ ID NO: 147518 - DNA, 98 bp, Homo sapiens
tgactcctgtggcagtggaaagacccaagaatgccagtcaagaagacaggtagtgggcagcagtcagtgacaggtgtaacctctgtggatgacagcaa

SEQ ID NO: 147519 - DNA, 82 bp, Homo sapiens
gaaaaaaccaagtggctggatatcaaaggaaatcatgggtcgtcgggctgttaaagcgggagcttatgctgcttgccaggaa

SEQ ID NO: 147520 - DNA, 98 bp, Homo sapiens
gtccccgtacgcctacagtaacggtacctgcaccagtcaggggccctgaccatggaggccctggaggacccttcccccgagctcatggagggcccaga

SEQ ID NO: 147521 - DNA, 75 bp, Homo sapiens
taacgtgtatggcgtgtgcgtgccagacatggagcagagtaaccctgcctacaccatcagtgctgcgctgtgcta

SEQ ID NO: 147522 - DNA, 75 bp, Homo sapiens
atcggtttcagctacagctcctcagggagaggagaaatatggggagttgatgagcatcagaaaaaccaggacaga

SEQ ID NO: 147523 - DNA, 102 bp, Homo sapiens
cctggcgtgcactccgcacctcggggacattattgcgcgtggaacggctgcttttggaagggtgtaccagtgatggcaataagaaacaaaatgatatcagaa

SEQ ID NO: 147524 - DNA, 82 bp, Homo sapiens
caagaagaaatgggctcgaccccccatttccatgaactttgaggtggccaagcacttcaaacctcatgggttctccagcgac

SEQ ID NO: 147525 - DNA, 98 bp, Homo sapiens
ggaggcactaacagagtctggattaacctcccaggatatcgactgcattgcatacaccaaggcctctcctctcaggctggagcgcagtggcacgattc

SEQ ID NO: 147526 - DNA, 83 bp, Homo sapiens
ctcaaagaaaactgtcaggagcatacaagaggctccagtagacccaaatgatttgtacattgtagaacccctcaagttttctc

SEQ ID NO: 147527 - DNA, 74 bp, Homo sapiens
aacaagccctccaggaactcacgcaaaagatgtgattgaagagcatggtccttcagaaaaggcaataaacggcc

SEQ ID NO: 147528 - DNA, 83 bp, Homo sapiens
gacagtgcccaggggtctgagtctcacagcttgtaaagagctccaggcccggattcgaacttacaatcagcattacaacaacc

SEQ ID NO: 147529 - DNA, 100 bp, Homo sapiens
agcgtcctcagcacccccaagccgaagctgcggagtcctccctcctgaacctgatctcctatagagcgcagtccatccacccggccaaggacggctggat

SEQ ID NO: 147530 - DNA, 100 bp, Homo sapiens
gctgcttactggaaactggatgcagcaaggaaataggatttaaccgctctctgcctcccaggcgcctgtgtctggcagagctggtgtgagacgagacaat

SEQ ID NO: 147531 - DNA, 75 bp, Homo sapiens
gaaggacgtgcccgactggaagagacaagaggagcagcagcggcaccgcccctcaccctggagggtcctgtacaa

SEQ ID NO: 147532 - DNA, 101 bp, Homo sapiens
aaggagacagaagcagccatggaaaaattaatcaacagagtgggacctaatggtgagagggcaataaactttcttcggtgagaccaaccaatgtattagag

SEQ ID NO: 147533 - DNA, 100 bp, Homo sapiens
atggatgttcttcttcgagtatttgtagaaggtataattaatggatttgccttaccactaaaagaagagcacaagattttcttattgaaggtgttactac

SEQ ID NO: 147534 - DNA, 75 bp, Homo sapiens
gtttcaatattggaagcgctttgatttacagcagctgcagattttcagctgaactctcatctctcaacactggca

SEQ ID NO: 147535 - DNA, 100 bp, Homo sapiens
ggtgaacagtgtggcccgccatgttcttctccgcggcgctccgggcccgggcggctggcctcaccgcccactggtgatgccatctgcagttttgtgatct

SEQ ID NO: 147536 - DNA, 74 bp, Homo sapiens
cgagcagcgtcatgtacccctgcgaagtggtgaacacccatggccccgtggagcctgacaaggacaatatccgc

SEQ ID NO: 147537 - DNA, 74 bp, Homo sapiens
agagttcaaggaggccttccagctgtttgaccgaacagcctctactcaatagtccccccagctttgtgtgctgg

SEQ ID NO: 147538 - DNA, 96 bp, Homo sapiens
tgagtgaatgaacacccattgactgaagtgagaagagaagccagattgctccaaggcccgctgtgaagtccagttctctccacgttgtcctgaaga

SEQ ID NO: 147539 - DNA, 75 bp, Homo sapiens
gccaatgtcagagaaatctttgacaaggttgatgctatgaaactgggagtaaaggaaatgaagaaggcatacaag

SEQ ID NO: 147540 - DNA, 87 bp, Homo sapiens
ttcagatctcttagaacaaacactggaactcataggaacaaatatcaatggaaacccatatgttactctttcaacctgatcagaacg

SEQ ID NO: 147541 - DNA, 50 bp, Homo sapiens
ggatcgccacctggtggctaagagttttttgctccactcaagcctgttag

SEQ ID NO: 147542 - DNA, 100 bp, Homo sapiens
tacccccataccgccccagcctggaggaggacagcgccagcctgtctggggagagtctggatggacatttgcagggctctccacagatagagaacatcca

SEQ ID NO: 147543 - DNA, 75 bp, Homo sapiens
ctcctggtcagcacttaccggctgccccagatcgcgcgcctggacaacggtcaaaatgcagatcttcgtgaaaac

SEQ ID NO: 147544 - DNA, 80 bp, Homo sapiens
ggcagatatgggaattgcgatccgtgttgcctcacccaaactggttatggaagagatggctcggactcaaaagaacaagg

SEQ ID NO: 147545 - DNA, 98 bp, Homo sapiens
ctcccgctcggccccgccagcagcactgtggaggccgtcctcggtcgcctgcgaggccgctggccaggcctgagcctctgccaccatggccattgtgc

SEQ ID NO: 147546 - DNA, 100 bp, Homo sapiens
gggcctccatcccgtgccctcgctctgagctgcgcctggacctggttctgccttctggacaatctttccgtgacgagtagcacagcccctctatggttta

SEQ ID NO: 147547 - DNA, 82 bp, Homo sapiens
cctggcctgggcgctccggtggcggcggaggtacggacattgctgcaggagaagaggttgccatcaagcttgaatgtgtcaa

SEQ ID NO: 147548 - DNA, 50 bp, Homo sapiens
cagaaacatatctattatatcacaggttgtttacattcagagctctatca

SEQ ID NO: 147549 - DNA, 100 bp, Homo sapiens
gaagaccccggagcccctttagccatgtggatacctacggagcacgagaaatacggcgtggtattttaataagcggaaaacctactttgctcacgatgcc

SEQ ID NO: 147550 - DNA, 98 bp, Homo sapiens
cttctagggactcttgaagatggggacccaagtggttatgagattcaataactccttgctgccaacagagccttcttgcaaggatgatgctgaaagga

SEQ ID NO: 147551 - DNA, 75 bp, Homo sapiens
ctagagggctggaggtggaaccgacctggagacagaattcttgacatagggctgtgcttaagagtaaaacttcag

SEQ ID NO: 147552 - DNA, 100 bp, Homo sapiens
ccaccagacggagacagcttggactaccagatcaaatttggaccccttcaaccagtacactgaagaccagatttgggatgccctggagaggacacacatg

SEQ ID NO: 147553 - DNA, 95 bp, Homo sapiens
cagaaaaatttgttttcttcattggcagtaaaaatgggggaagtcgagataacatgagtattgtactagtttgcttttcaaatgctcccaaggtc

SEQ ID NO: 147554 - DNA, 100 bp, Homo sapiens
tggctttgtggaatattcccatctcctgcctcctaatagctttgagggccacgacatcaacggtgccctggagccctccaacatagacaccagcatcctg

SEQ ID NO: 147555 - DNA, 83 bp, Homo sapiens
ctgaccaccaatcagatccgtaagagccttcacgaagtcagtaaaagtgatctcggccggaaaatcaaggagggcgtggagga

SEQ ID NO: 147556 - DNA, 101 bp, Homo sapiens
cggattttctgttttcggaagttgctgggttcgttttattcagcggcagtggtgctttcccgaatctcagaatgccgatgaatttcatcctttcatcgaag

SEQ ID NO: 147557 - DNA, 100 bp, Homo sapiens
ccggaggagatgtggctctaccggaacccctacgtggaggcggagtatttccccaccaagccgatgtttatttaaagaagtaccggcgctatgaagtaat

SEQ ID NO: 147558 - DNA, 92 bp, Homo sapiens
cctcatcattaatgcaagtggaaggaaactcttcaccaaagaattgatcacatcatgaaagcacatgcagatgacaatccaggctctccagg

SEQ ID NO: 147559 - DNA, 100 bp, Homo sapiens
cggggttcgtggcagcgctggtgacgaagttatacggaagcgtctcctcattgatggagatggtgctggagatgatcggagaattaatctgctagtgaag

SEQ ID NO: 147560 - DNA, 100 bp, Homo sapiens
aaacgggtcaggattggcctggaggatatttggaatagcctctcttcagtgttcacagagatgcaaccatgccggatggagtgctgtgatgtgccagccg

SEQ ID NO: 147561 - DNA, 98 bp, Homo sapiens
ttccttgaagaaacaagcttacagccgggggccatcaagtataagaccacaggaccacgtgattcataaagaactactgtcaaaactagggccgccat

SEQ ID NO: 147562 - DNA, 100 bp, Homo sapiens
aggacggcgcggcagagtccccgtacgcctacagtaacggagaagtacagcatcggggagcccacagtgccatccaccctggcagaggagtttacctaca

SEQ ID NO: 147563 - DNA, 99 bp, Homo sapiens
acctgtcgcctgctgctgcagtgaacaaaaaggattatagcagtctttgtgacaagcaaccgataggaagacgtctcttcaggcagttctgtgatacca

SEQ ID NO: 147564 - DNA, 76 bp, Homo sapiens
atgccgtttgtgccaaagtggacgctgccaacagggacctccacaaaaagtactcgtacatccgcaagaccaggcc

SEQ ID NO: 147565 - DNA, 100 bp, Homo sapiens
ttcgatcttttaacatcacatcacatgctgacagcacaagaaggcgtctgtagaggcttctggtgaaatcgcattatgcaagactggatttcctgaagat

SEQ ID NO: 147566 - DNA, 75 bp, Homo sapiens
ctttctccaccaaggaaaaaacgagaagaccccaaaaccagcatgtcagctgaactgttccgaccatggccactg

SEQ ID NO: 147567 - DNA, 75 bp, Homo sapiens
cctaccaatcgtgaaaactatattcacagatactaatggaccatactaccaaggaccagtccacctgaaccacac

SEQ ID NO: 147568 - DNA, 98 bp, Homo sapiens
tgatctctctcgctgtgagacatgtctgagactcctgctcagtgtagcattaaggtatccgttacagcactgatgtgagtgtagatgaagtaaaagct

SEQ ID NO: 147569 - DNA, 82 bp, Homo sapiens
gttgcaacggagataaattcccggaaccgcgattcggcgtgtcaggggacggcaaaacagaacagaaaggcggagataaaaa

SEQ ID NO: 147570 - DNA, 100 bp, Homo sapiens
gggcgctgttcgacgtgcggcccgaatgccagcgcctcttctaccggggcaagcagtagccacgatggaggtgatgaacctgatggagcagcctatcaag

SEQ ID NO: 147571 - DNA, 100 bp, Homo sapiens
tctgctggtgggactcaatgttctcgatgccaatctctgcttgaaaggagaagacttggattctcagatatttggagttcttacaacatggcagacattg

SEQ ID NO: 147572 - DNA, 75 bp, Homo sapiens
atgtattccctggggatggcgcatcacacaccaaagagactgatggagaggcagaaacggaaggcggacatcgag

SEQ ID NO: 147573 - DNA, 82 bp, Homo sapiens
gtgcagccgcgaggaggcgcgggaggtgttcgagaacgaccccgagacggacacctgctccacttcaccttttgccatgagt

SEQ ID NO: 147574 - DNA, 100 bp, Homo sapiens
ggagccgttcgaactgtctcaccacttccctgcagctcccgaagcagaatctggtaatataagtcaaaagtctgatgaagaagattttgtaaaagttgaa

SEQ ID NO: 147575 - DNA, 82 bp, Homo sapiens
ggaagccgcccgccccccaccgccgccccctccggcgtgttcatgcccccggggagacagatcagttggaggaagaaaaagc

SEQ ID NO: 147576 - DNA, 100 bp, Homo sapiens
ctcaggggccatggcgaagcacgagcagatcctggtcctcgatccgcccacagacctcaaattcaaagaaagatgtgtcatggcaatgctgagaaggagg

SEQ ID NO: 147577 - DNA, 101 bp, Homo sapiens
gctgttctgcttcctgctgctctgtctcagcgccgcctccctgcttcttaacagaacatacatatgatagttgagaaagacacatattctgatcatgaaga

SEQ ID NO: 147578 - DNA, 102 bp, Homo sapiens
ctcccggcccggattatagtctctcgccacagcggcctcggcctccccttggattcagacgccgattcgcccagaggagaccttgcctattttgatggactt

SEQ ID NO: 147579 - DNA, 50 bp, Homo sapiens
ggatgtgaaacttaaatttgaagaggcagcctggcatcctcgctacaacc

SEQ ID NO: 147580 - DNA, 130 bp, Homo sapiens
ttcgtaacacaccttcagaacctatacattgcatcgtttgggcaaagtacttgttcaagtatttgagtacagcatcccagacaaacagtatacagattggagccggactgtccagaagcagggctttcac

SEQ ID NO: 147581 - DNA, 82 bp, Homo sapiens
gcagtcctaccatgtcagccttcccagtagctgggaccacagatactattcgttacttgtccttgcatgacaacaaatacat

SEQ ID NO: 147582 - DNA, 82 bp, Homo sapiens
gttgacctatgatctgcagggagacgcacagccaggacatcctggaacctgggaaagggactggcacgacaggcccacggca

SEQ ID NO: 147583 - DNA, 97 bp, Homo sapiens
gcggagggcgactgccgagggtctcagcgggatctggagtcagggatgggccatcaactgagaaagaccttgacgaaaagaagaaagaacctgcaat

SEQ ID NO: 147584 - DNA, 100 bp, Homo sapiens
tctgttgattccaagtttcctatagaagacacccctttggttccgttgatattcactgatggactccaaagaatcattaactcctggtagagaagaaaac

SEQ ID NO: 147585 - DNA, 145 bp, Homo sapiens
gttgtattgcaatcatggtgcagaaataccagtccccagtgagggtgtacaaatacccctttgaattaattatggctgccataggaaaaggatacagagtagagtttcatgaacctgaaacttggtggaaatttgatcctgaaga

SEQ ID NO: 147586 - DNA, 75 bp, Homo sapiens
ggttcaagcaattctcctgcctcagcctcctaagtagctgggactacaggtacttcaactcccgcccccacctgt

SEQ ID NO: 147587 - DNA, 50 bp, Homo sapiens
ccccagtgcagcatagctcccacagaaatacccgcagcccaaagggcaga

SEQ ID NO: 147588 - DNA, 75 bp, Homo sapiens
tggagaactgcaggaacctggcctcactaggacagtcattttgtttactcattcagccctgttgcaggtcccaat

SEQ ID NO: 147589 - DNA, 75 bp, Homo sapiens
tgcagagcgcgcagtacctccgattgcagccttcttcgctgagtctctgcccagtgtgggagggcagatcattcc

SEQ ID NO: 147590 - DNA, 83 bp, Homo sapiens
cactcgctcccttgatgatcttgaggtttttagaacttcagccataaaaatgggcagaattttccttgatcatatcggtggta

SEQ ID NO: 147591 - DNA, 80 bp, Homo sapiens
gagagcgtgaccgagagcgcgaatatcgtcatcgttagaagacactggctctgagaccccgactgcccgacggctctaca

SEQ ID NO: 147592 - DNA, 82 bp, Homo sapiens
ggtgttcgtcggtcaccctctggacacggtcaagggggtccactggacggggcctgagctacaacttcacccacctggacgg

SEQ ID NO: 147593 - DNA, 100 bp, Homo sapiens
ggactcgtttcattgctttcaaagttcctttgcaaaagctggacagtgccacatcgcttatccaggcagctaaaaacctgatgaatgctgttgtcctcac

SEQ ID NO: 147594 - DNA, 82 bp, Homo sapiens
gcctcctacgtttacctgtccatgatgaaggatttgggggcagagcacttggcaggtcatgaaggggtccaacttctcgggt

SEQ ID NO: 147595 - DNA, 100 bp, Homo sapiens
aaagaattcagaaggaacttgcagaaatcacattggaccctcctcccaactgtagaattacctggcaaccagaggtttgacatggaaaaacatgttgacc

SEQ ID NO: 147596 - DNA, 75 bp, Homo sapiens
ccgccgcggtggcagtcagcagccggcagcagcagcggttcagagaagccgaactgggattaccatgcagaaata

SEQ ID NO: 147597 - DNA, 99 bp, Homo sapiens
caatattcaggttcagaagctgctgaatgccttttttgcaattctgtggtgttcttggtcacacatttatggagtttctgaagggcagtggagattact

SEQ ID NO: 147598 - DNA, 75 bp, Homo sapiens
cctggagagccccggtttaagatctccaggatagtaatgatgacactgaagatgtttcactgtttgatgcggaag

SEQ ID NO: 147599 - DNA, 100 bp, Homo sapiens
attggatgaagaaaggaaggaacctgggatggttgtgagggaagggacaagaagatactgccctggtgtggatgtggaagcagccaagcgggcagaagag

SEQ ID NO: 147600 - DNA, 108 bp, Homo sapiens
tgaagagcgacaagccgctggcagccgcggatctcaccgccgctcaggggaaagcaggcaggatgggagagtcgccgatagaaccacctcttccctgcctcctgggct

SEQ ID NO: 147601 - DNA, 83 bp, Homo sapiens
gccgtctcttcgagttcttcgtgctgctcaaggtgatgtgtccaatctagatcccaacttctcatttgaaggcaccaaactgg

SEQ ID NO: 147602 - DNA, 83 bp, Homo sapiens
ctttggttggtggaggctgtggcaatggaacaggcttgagaaacagggagtgcatccgccccaacccttttccccctcgtctc

SEQ ID NO: 147603 - DNA, 88 bp, Homo sapiens
attttacttcagcaagctgaaggaggaccagatcaagaaggactcagtggcctttgaagatgtggctgtgaacttcacacaagaggag

SEQ ID NO: 147604 - DNA, 74 bp, Homo sapiens
cttcaacaagcagcccagatggactacctgcatcagaagagctaacaattgctggaatgacctttacaactttt

SEQ ID NO: 147605 - DNA, 98 bp, Homo sapiens
tggagaaggactactttggcattcgctatgtggacccagagaagcaaaggctagtatgttcaacacaccaggaatgcagagcttgttgcaacaaataa

SEQ ID NO: 147606 - DNA, 83 bp, Homo sapiens
tgtgctgtcgctgccgtggcaccccttctagaaggcatggaagaggagatggttcgtgttacgcagtggccgtttaactggag

SEQ ID NO: 147607 - DNA, 76 bp, Homo sapiens
gcctgcgcagggtcagccaccagggctacagcactgaggctggccccccaaagatggcggacaaggtggtcccacg

SEQ ID NO: 147608 - DNA, 100 bp, Homo sapiens
tgaagaagaccgccactgccggagccatctcggagctcacggagagccgcctgaggagcggcacaggagcccagtttcctccaattgcagcacaagacct

SEQ ID NO: 147609 - DNA, 97 bp, Homo sapiens
agagcttcatctgcgatggacagaataactgtcaagacaacagtgatgaggaaagctgtgaaagttctcaagcatctgcaaacatagagaattctgg

SEQ ID NO: 147610 - DNA, 100 bp, Homo sapiens
gtgctcgcgctactctctctttctggcctggaggctatccagctggttagcaggaagaagatgagccttaagtctgaacgccgaggaattcatgtggatc

SEQ ID NO: 147611 - DNA, 50 bp, Homo sapiens
atgggctggcctggaattgacgatggtctgagaaacatcttacctattac

SEQ ID NO: 147612 - DNA, 75 bp, Homo sapiens
acttgctagttaggattttattactggcagcatgtatatcttttgtgtttaatgacgaccttaccaagccaatca

SEQ ID NO: 147613 - DNA, 83 bp, Homo sapiens
cagatggcggatgccctgcagtacctgcagaaggtctctggagacatcttcagcagcttgatggaccagacaaataggatgat

SEQ ID NO: 147614 - DNA, 74 bp, Homo sapiens
ctcactgcagaggtgctggagctggcaggaacaagcacatcatgattgacttggggactggcaacaacaacaag

SEQ ID NO: 147615 - DNA, 97 bp, Homo sapiens
ttgtatgcctcaatttgctggatttaagcactgctgcactttatgaggtgtcatggagaaactccagctgggcccagagattctgcagcgggaaaat

SEQ ID NO: 147616 - DNA, 83 bp, Homo sapiens
ccattatttgagatgagttacatcttggaggcacggatgggcagaagcctttgcaggtatcagaagttcacatatcaaatata

SEQ ID NO: 147617 - DNA, 83 bp, Homo sapiens
tggatcgctgtgatcgtcacttgaaaccaaggtgtatgttggtaacctgggaactggcgctggcaaaggagagttagaaaggg

SEQ ID NO: 147618 - DNA, 100 bp, Homo sapiens
ctcaaggacaacaagagaacctgcaaccgtttccgcctcctgctagagcggcgaaccgtgggcagtgaggactcaaatggatgctaaaaagccaaggaaa

SEQ ID NO: 147619 - DNA, 75 bp, Homo sapiens
ccagagggaatggaccccgatggtgtcatcgagccgccgagtgcctatcagagaaggagacggaggagctcatgg

SEQ ID NO: 147620 - DNA, 100 bp, Homo sapiens
caggactgtgctttccctttggatggaactgaactttgtatatggaacactaaggatccttctcatcaggttggcagtggcaatgacccctggtcagcct

SEQ ID NO: 147621 - DNA, 107 bp, Homo sapiens
caggaaagaaaacagaaggatcgaaaggcactccatgagctaaaactggaagagtgggctgttgataatcaggtgtatgtggccacagcctctcctgcccgggatga

SEQ ID NO: 147622 - DNA, 73 bp, Homo sapiens
gggtgctggcggctgcagccggagttcaaacctaagcagctggaaggttgaaatggatgcagtcagaactgaa

SEQ ID NO: 147623 - DNA, 100 bp, Homo sapiens
gacaggaacgtggagatctggaagatcaagaagctcattaagagcttggaggcggcccgcggaattcggttccctcaaaattataaaggcaggaaagctc

SEQ ID NO: 147624 - DNA, 90 bp, Homo sapiens
ccattttcttcagcctccttgtcctagccgacatcggcctggctgcctggggacgcaaggccctggacattgctgagaacgagatgccgg

SEQ ID NO: 147625 - DNA, 100 bp, Homo sapiens
gttgagtctctcctgcgccgagccttcggggcgatgtgtagtgccttccatagggctgagtctgggaccgagaatagcctaacatggcagaccagagaca

SEQ ID NO: 147626 - DNA, 90 bp, Homo sapiens
gacctgctggaggcgcaggccctcaagctggtggaggggccggacgtccgggagaatgactatcttcaagactgcctcgatgccatccag

SEQ ID NO: 147627 - DNA, 100 bp, Homo sapiens
caggtggcatttttctgaagttgttcattaagacttcccagcattcctacagatataaatagcctccaccaggcggtgtgaagatgcctaatgtacccaa

SEQ ID NO: 147628 - DNA, 90 bp, Homo sapiens
cacattagacggcctcctgcatctgatggaggcggggtttcaccatgttgcccagactggtcttgaactcctgagcttaagcaatccacc

SEQ ID NO: 147629 - DNA, 99 bp, Homo sapiens
tgagaccgaaatagactctgaagtaatatctggactttgaaattatctagatactgatgacgatttaaatagcgacgattatgaatatgaagatgaagc

SEQ ID NO: 147630 - DNA, 101 bp, Homo sapiens
gaccccttgtccagttactctaacaagtctggaggctttgatgagaaatccagaagaaagagtgtatgaaagaaaaagatgacatctatgcatagcaaaca

SEQ ID NO: 147631 - DNA, 75 bp, Homo sapiens
agccatcgtggatgagaagatattctgctgtcatggagaattggcagagggggtcgatttgggaggaaaggtgtg

SEQ ID NO: 147632 - DNA, 75 bp, Homo sapiens
aaacatcatccctgccctggatcggcctggagccagtgcccaagtacggtttggagggcatcctggctgtttcac

SEQ ID NO: 147633 - DNA, 75 bp, Homo sapiens
ggaagagccggggccgtggctgacatggagcaggtgagaagcgccactgctttgatgtcaactataattcaagtt

SEQ ID NO: 147634 - DNA, 100 bp, Homo sapiens
cgccgagcacaggctgacctggcctatcagcttcaggtaccacgaaaggcagtggtagaaaagccagctcgggcagcagagcgagaggcccgggccctgc

SEQ ID NO: 147635 - DNA, 50 bp, Homo sapiens
ccgacagccaggcccgcgagaaggcaccggcagaagctggaggaccagac

SEQ ID NO: 147636 - DNA, 88 bp, Homo sapiens
atgttttggggattccactctccagtgtaatgattattgacaacaggacgctgccaaggtctgcagagaattcaccgagcgtgagcaa

SEQ ID NO: 147637 - DNA, 51 bp, Homo sapiens
tgggtatggaggaggacctggaggtctaccagccacagtctctgcacgttt

SEQ ID NO: 147638 - DNA, 102 bp, Homo sapiens
catgcgtaaatgccctttctacgctgctgaacaagacaaagtcaatgcagaccctgcaggacttgctcactgatcttcatgcactccaggtcaccatcacag

SEQ ID NO: 147639 - DNA, 80 bp, Homo sapiens
aggccggacgcacctctgtttgggggtcctcagagaacagcccatcttcaccacccgagcgcatgtcttccagattgacc

SEQ ID NO: 147640 - DNA, 101 bp, Homo sapiens
cttcggaccccccaacaccctctacgaaggcggctacttcaagatgccaattctcggaagcaagaagcagagtggaaagaaaaggcaataaaggagctaga

SEQ ID NO: 147641 - DNA, 75 bp, Homo sapiens
atgtggctgataagtctagattcaccaatgtcaaacagtttattgcaccaggaaaatatatgcagatgatgaaca

SEQ ID NO: 147642 - DNA, 51 bp, Homo sapiens
tggactgctcagggtgccagacctcatcgtgagcgacctgtgagagtttat

SEQ ID NO: 147643 - DNA, 51 bp, Homo sapiens
atcagtttggtttcactcagaccgagtgttcttatcagctgtacaacctgc

SEQ ID NO: 147644 - DNA, 89 bp, Homo sapiens
ttgcagagtggcagctttgcaaggcatccgtgtccagaggaggtggagcacagtgaaagaattcaagatgccacctaatataaactgga

SEQ ID NO: 147645 - DNA, 75 bp, Homo sapiens
cccggagaagcaggagccctactcggcaggctcttgtcaggatggtgaagctgttcatcggaaacctgccccggg

SEQ ID NO: 147646 - DNA, 83 bp, Homo sapiens
gttccagttgcacatttcctgcaaggactccaaagtggtgagcttgtagattttcagtggaaactgggtatggctgtgagctc

SEQ ID NO: 147647 - DNA, 97 bp, Homo sapiens
aagaaacgacaccattgtttttagatatattcgactttatgggagaaaatttagcaaagaagatcatgttctttttattaagttattgtatgagctg

SEQ ID NO: 147648 - DNA, 100 bp, Homo sapiens
ccagccttcagaaattgccggtctgggagttgggggcaaggagaagatcctgggtgcggcgctgggctccatggtgggcctcatgacctacgggcggcgc

SEQ ID NO: 147649 - DNA, 100 bp, Homo sapiens
cgggcatggtggtctggggcaacgcggaagggtgttcagacttacatctcttggatatgttgaccccaactgaaagaaagcgacaaggatacatccacga

SEQ ID NO: 147650 - DNA, 98 bp, Homo sapiens
gatcccaactgggtcattcgccatcaaggcaaggagctggttcagacagccaactcggaccccggcatcgctgtagctgtcggaaaaggtaacagaag

SEQ ID NO: 147651 - DNA, 100 bp, Homo sapiens
aggaacaggcgccttcaaaagcccacttggcgatgggttacagtaagagcgcgatgtacaatacggtgtggagtatggaccgcgatgacgcagactggag

SEQ ID NO: 147652 - DNA, 82 bp, Homo sapiens
cggcgcagaaaggtggaggccgggaggacgaaggattttttatcaagcagaaatgcatcgaacaacgagaatcaagatcact

SEQ ID NO: 147653 - DNA, 96 bp, Homo sapiens
tggcgctctggctgtgctgcgcgacccccgcgcatgggggattcccgaagtcttccgttttctgagaatgtgagtgctgttcaaaaattagacttt

SEQ ID NO: 147654 - DNA, 87 bp, Homo sapiens
agcttgaaatcctcattaaagatactctcggttggacgtgataagtatgagcctgcagctgtttcagaacaaggtgataaaaagggc

SEQ ID NO: 147655 - DNA, 90 bp, Homo sapiens
catctcacaactgctcgcgtgacgaccgcattcgtggcaggtgctggagaatctggtaaaagcaccattgtgaagcagatgaggatcctg

SEQ ID NO: 147656 - DNA, 101 bp, Homo sapiens
gactcagaggccgccatcaaccgccagatcaacctggagctctacgcctcctacgtttacctgtccatggaggctctgtcggtggtgagcgacgaccagtc

SEQ ID NO: 147657 - DNA, 100 bp, Homo sapiens
catggctgagagtaggctccgggccccggacctagggtcaaggtgtcacgggcatgaatgttatcagctccttggttgcgataactgggattactttcac

SEQ ID NO: 147658 - DNA, 74 bp, Homo sapiens
ccaaaggctcccatggagagctcagtaaaggcatgacttcctggcaccacagggaaaatcgggtgcaagcccag

SEQ ID NO: 147659 - DNA, 147 bp, Homo sapiens
gcggcgtgagggctccgggtcgctggcggcgtggacacctgagtcccggggtaggggtctcccgcgagcacatatctgaatgagaagtcgctccaactgacggagaaatgcaaaaatctgcaatatggcattgagtctttctctaac

SEQ ID NO: 147660 - DNA, 89 bp, Homo sapiens
cataaacacaagcatgagatgacattgaaatttggcccagcccgaactgactcagtcatcattgcaggcaggggaaatggaaggtgatg

SEQ ID NO: 147661 - DNA, 50 bp, Homo sapiens
cggggcgccacgggggccatgtaagcaggagtgccagcttctctcagggc

SEQ ID NO: 147662 - DNA, 51 bp, Homo sapiens
attgtccccgcagttttcaatcatggtgggtcatgataactgggtacgtgg

SEQ ID NO: 147663 - DNA, 100 bp, Homo sapiens
aaaacgatacgtcctatgtaattgagagtgatgaagatttagaaatggagatgcttaagagttttaaaagctcagtctgatcacaggtctagacatgaag

SEQ ID NO: 147664 - DNA, 51 bp, Homo sapiens
tgcttcgggacctcataaaggaaagcaggatacagacgtccctcaccagtg

SEQ ID NO: 147665 - DNA, 75 bp, Homo sapiens
atattggggccatttagtaacttctttgcaagctatttagctggtacctactgctatatcacctagtgtgacatt

SEQ ID NO: 147666 - DNA, 75 bp, Homo sapiens
aagcgggctgtgtgccccttctccacccagagcagccattgtttgatgtcctgtgactgagaaaccaggctttaa

SEQ ID NO: 147667 - DNA, 90 bp, Homo sapiens
cccgcgccccgcggcatgagccggtgaccaagctcggggccgagcgggaggcagccgtggccgaggggtcacgggcgtcagcggtccagg

SEQ ID NO: 147668 - DNA, 100 bp, Homo sapiens
gtttgatcttgttgactatgaggaagttctagcacaaccagtgtctctgaagaagatgtctcaagtagatattctcgaacagatagaagtgggttcccta

SEQ ID NO: 147669 - DNA, 89 bp, Homo sapiens
ctcatcatcccgtcagagctgaggtacttcgtgaaggatctctgctgtctcttggatcccatctgcctagatggaagaggatcctatcc

SEQ ID NO: 147670 - DNA, 100 bp, Homo sapiens
gtcttggcttcggagcattcagcaggtgttacaggtgggtcatgataactgggtacgtggagttctgttccattctggggggaagtttattttgagttgt

SEQ ID NO: 147671 - DNA, 98 bp, Homo sapiens
ttccctatccatgctatgacccagccacacgcgaaggtgaccttaaacttttacaggcctggcaaaaagcacgaagtgatgggtgggagcgagccttt

SEQ ID NO: 147672 - DNA, 74 bp, Homo sapiens
tccacttctaccccaccttccgggcatgactccacagtttctgcaacaacagagccggggaaaggaggacgcag

SEQ ID NO: 147673 - DNA, 82 bp, Homo sapiens
gggccgtgggcccccggaacgagcatttcctgtgttacatctgcaaggaatacgtagaggatctggccaaaatccccaggag

SEQ ID NO: 147674 - DNA, 74 bp, Homo sapiens
gtgagatgacgatggtgaacgtgggaatgaacgaccagggttggggtgctggaggactgcttcaccttcctggg

SEQ ID NO: 147675 - DNA, 96 bp, Homo sapiens
ggaagagctccaagcccagacccgggaaccccgagaggtcatatttgaggatgttctgcttcggagacccaatagagacggggttttgccatgttg

SEQ ID NO: 147676 - DNA, 89 bp, Homo sapiens
aaatgattcagtccttgaaaacaaggtattctctactgccgctgatggtcaaacgcaagtggaaattaaagtgtgtcagggtgaaagag

SEQ ID NO: 147677 - DNA, 90 bp, Homo sapiens
ggaggatgtgcggggtgcgccggcagaggatccagtgttcaccatcctggccccggaagtattctgaaaaggaggacaaatatgaagaag

SEQ ID NO: 147678 - DNA, 90 bp, Homo sapiens
gggagccctcctggctgggggcaaggtgttggagagcacaatggctgaacaagtccttcctcaggctttgtatttgagcaatatgcggaa

SEQ ID NO: 147679 - DNA, 73 bp, Homo sapiens
cttttgagtgacatttatttagcagctagtaacttcacttatttcagggttctggcccatctttgataccttc

SEQ ID NO: 147680 - DNA, 100 bp, Homo sapiens
gtgccttaagagaggatcgcccaatccacatgcttttccagggcagcgaggtcacaggccccacctttgctgatggcgagctcatccccagggaacccgg

SEQ ID NO: 147681 - DNA, 75 bp, Homo sapiens
gtcctgacagattcagcaacactgtgccactgattaatgaacttgaatcagcaatacatcagctgtacaaacagc

SEQ ID NO: 147682 - DNA, 74 bp, Homo sapiens
agctgcctgaaaatgcactcggatgccgccgctgtcagtgctggagaatctggtaaaagcaccattgtgaagca

SEQ ID NO: 147683 - DNA, 74 bp, Homo sapiens
tcagagcaaggtcgtgcggtgtgtgtagaagtccactgcttttaaggccctgcactgaaaatgcaagctcaggc

SEQ ID NO: 147684 - DNA, 101 bp, Homo sapiens
gacacattcatttttacaccccagggccttgatacaaagcatgcttgaaaaatgcgatcggtttctctggtcccagcaggcctagtgggagaagattcagc

SEQ ID NO: 147685 - DNA, 75 bp, Homo sapiens
gcctgccctcagtggttaacttttttgctgcaatcacaaagtgacagagctgaatgaacctctctccaatgaaga

SEQ ID NO: 147686 - DNA, 100 bp, Homo sapiens
gagatccataagcacgtgcatttcagcagcagcttcacctccatcgcctcggagtctcttgttttcagcagccactgtaaagcagtgagtggctactcag

SEQ ID NO: 147687 - DNA, 100 bp, Homo sapiens
tggtcttcggcgacgtcgagaacgacgaggacgcgttgctgcggcgtctgcgaggcccgagggtgctgctacccccgtatgatgatgccactgtgaatgg

SEQ ID NO: 147688 - DNA, 109 bp, Homo sapiens
cacttcacatagtcctcgagtccctgaagagagaaggcaaagaacctctggtgttgaaagccatcactggtgcaagctatatttaacggagatcctgatgaagttcgag

SEQ ID NO: 147689 - DNA, 97 bp, Homo sapiens
tctcagaagagtgagagagagctattagagattgtgaagaagaatttcgatctccgccctggggtcattgtcagcatgttggcagataaattgaaca

SEQ ID NO: 147690 - DNA, 100 bp, Homo sapiens
agcgcgaatatcgtcatcgttagaaggtgctgacagctgcagaagaaattgtacatggtgctgtacagaaggtatttctccactgtgccatctgcagagt

SEQ ID NO: 147691 - DNA, 98 bp, Homo sapiens
ctcaagtgcttctgcattacagcttttgacctttatgaacaaagatatgctgctgtgaagatacatcagcttaataaaagctggagagatgagaagaa

SEQ ID NO: 147692 - DNA, 101 bp, Homo sapiens
ccagactggttcttgaacagacagaaggatgtaaaggatggaaaatacagccaggctaggcagctggaagagaaagaccgagtgctaaagaagcaggatgc

SEQ ID NO: 147693 - DNA, 100 bp, Homo sapiens
cctgtgacccacacggagatctccccagaacaggcgcactccctctgctccgcggcgctggctcccgagtgtggcttcgggcgtctgcgctccctggtcc

SEQ ID NO: 147694 - DNA, 98 bp, Homo sapiens
ccaggatgtgagcaacacgggaccgactcagctttgcactccagggctgcgtaccaccagccactgtcatgttaaccccttcccaggccaatgtgtcc

SEQ ID NO: 147695 - DNA, 75 bp, Homo sapiens
gataggccaggttctgcctgaagcaacaactacagcatttgaatgcttcagcgattagccaaagatcttctaaaa

SEQ ID NO: 147696 - DNA, 83 bp, Homo sapiens
tgtctccagaaaccagcagatattcctgcgggacatagaacaggtgccacaggccaaacgtaccaagaaagtcgggatcgtcg

SEQ ID NO: 147697 - DNA, 101 bp, Homo sapiens
gcaccgcggatctggggccgtcctcagatcgtcagtatttaaacagatcacatcatgcgtgagtacaagctagtggtccttggttcaggaggcgttgggaa

SEQ ID NO: 147698 - DNA, 51 bp, Homo sapiens
gggcagcggcggagccgcctcggacggaggagaagcagccccaaaagacga

SEQ ID NO: 147699 - DNA, 75 bp, Homo sapiens
gcccagagagcgtcatggacctggccattgagacccagagcagcagttctgaagagatagtgcccagccctccct

SEQ ID NO: 147700 - DNA, 75 bp, Homo sapiens
atcctgagacccggacagtggcagtgaaacaggtcctggacattggcgagtgcctgacagtgccggacgagttct

SEQ ID NO: 147701 - DNA, 101 bp, Homo sapiens
tggtgctcaacgtgtacgacatgattctcaagtccaaagatttaacatctccaacccagcgctacatcgacagcaaagttgtgaaaacaagagcagaaggc

SEQ ID NO: 147702 - DNA, 75 bp, Homo sapiens
tcccttgccaggaccagggctgcgacggccatgctggggcaggttggagaaacgtacggtaaggatataacctcc

SEQ ID NO: 147703 - DNA, 100 bp, Homo sapiens
gaagatgacgacgaggacgccagttactccacggaaagcagcttcagcagcactccagatctttgatgatgcgtacaaatcccagctcagttgtgtggtt

SEQ ID NO: 147704 - DNA, 99 bp, Homo sapiens
taacgtcaagtacttcctgcacatgtgtgagcgggcctgcatgcacctggggcacctcaagttctcctgtgcctcctgttggctctctttgcatctggc

SEQ ID NO: 147705 - DNA, 100 bp, Homo sapiens
aatccaggggggtcactgcgacgttcacagaggaacactgccggggcccaaccacaagacgactcaataggaggaagtaaaaggcaatcgcaaatgtgag

SEQ ID NO: 147706 - DNA, 75 bp, Homo sapiens
cacaagagcatctttgctggattatcttcaatggtgaccattgtgaggtagatattttgttctaattttccagat

SEQ ID NO: 147707 - DNA, 100 bp, Homo sapiens
aaagttctgagaacattacagcagatcaagaaatccagctcaagactatggtgcagccctgcggggcctgtgcgaagacgccctggaaggcctgctcttc

SEQ ID NO: 147708 - DNA, 101 bp, Homo sapiens
cgcgctccaaccgcctcctcctcctcagtaacgcggagtttgaaacagctgagacacttctaaattcagaagttcatatgcttctggaacatcgaaagcag

SEQ ID NO: 147709 - DNA, 74 bp, Homo sapiens
acgtccaagcaaaccgggaaaggagaggatcccggagccggatcagggagcttccaaggcatttgatacctttt

SEQ ID NO: 147710 - DNA, 51 bp, Homo sapiens
gtaccatcacagtaaccatgaagggggacttgatctcatcttcatgccagg

SEQ ID NO: 147711 - DNA, 100 bp, Homo sapiens
ctggataggcttaggaattttgtcttctgttgggcttggaacagggctgcacacctttctgctttatctggcatgtggagaccccaaggcaaaaccatcc

SEQ ID NO: 147712 - DNA, 75 bp, Homo sapiens
cagctcttgtggatcctcagtggcggaggctcggtcacccgggagtggacctaccctatgagacgagagatgcag

SEQ ID NO: 147713 - DNA, 50 bp, Homo sapiens
tgctcaaaatgtgaagcaatttgggacgacagtgatgtgtgttctgaaat

SEQ ID NO: 147714 - DNA, 96 bp, Homo sapiens
agcaggaggacaggtgccggagcagctcgtgcagctaagcagccaactgcagaaacgtcagatctctgttgaggagctggcgcggaatctggtcat

SEQ ID NO: 147715 - DNA, 51 bp, Homo sapiens
gttccagaccctgccttctcttctgaaagggggcagctggcattttatgct

SEQ ID NO: 147716 - DNA, 100 bp, Homo sapiens
cggggagctgcaggaaccagactgggggcgagctgagcacctgtagtcaatcacacgcagacaaattggagacaatctgattgttcctggaggagtgaag

SEQ ID NO: 147717 - DNA, 100 bp, Homo sapiens
tctgtgcctccaaccagcagagagggattgagcttcattgaactcaacagagccaacatttcatagcaccatgccgcaagaggccggagctgcccagggc

SEQ ID NO: 147718 - DNA, 88 bp, Homo sapiens
ggccacgatgaagaagcagttcaatcgcatgcgccagctggccaaccagacggtgggcagggggggccctcagcctcttggccttgaa

SEQ ID NO: 147719 - DNA, 50 bp, Homo sapiens
gagctcggcctgagtgaggcacagaacaatatgatgcgtttgtgaagttt

SEQ ID NO: 147720 - DNA, 97 bp, Homo sapiens
ggggctgctcccatcattgatgtggtgcgatcgttaattggccttggtcctcacagctccaaaaagaaacaggatctcgataagctctatgagctga

SEQ ID NO: 147721 - DNA, 75 bp, Homo sapiens
gcgggaagcggcaggagccgccgccgacacctgaaggtactccaaagattcaggtttactcacgtcatccagcag

SEQ ID NO: 147722 - DNA, 100 bp, Homo sapiens
cagagatggcattacgaacctttggccacttgattgatgtggacatcttcgagccccaggggatcagcaagctggatgcccaggcctctttcctgccgaa

SEQ ID NO: 147723 - DNA, 97 bp, Homo sapiens
atcgcttgtacaaaggagagtttaaacagccaaaacagttcattcatattcagcgtcttcatcctccaggtccacctttagcaagacctattctccc

SEQ ID NO: 147724 - DNA, 100 bp, Homo sapiens
ctcagcatggtcagtgccgtttaacctttattgtggtggagtccaccccgctgtgttacatggacacagaacagtatgaagaagcagtacgagactatga

SEQ ID NO: 147725 - DNA, 73 bp, Homo sapiens
ctgtccgccaggccctgcaggacctgctttcggagtacatgggcaatgtcctgcatctccagtatggaatgta

SEQ ID NO: 147726 - DNA, 75 bp, Homo sapiens
agcctctctcctctgcaacctgataggatttggctacccagcctacatctcgtccagcctgatgagtgaagaggc

SEQ ID NO: 147727 - DNA, 75 bp, Homo sapiens
acccggacgcgaccaggggaggcagaagaggcggggtttcaccatgttgcccagactggtcttgaactcctgagc

SEQ ID NO: 147728 - DNA, 82 bp, Homo sapiens
agcaaatcgagaaaaacctcagcgacctgatcgacctgcattttgaaagcgaagcagaagccgtagaatcagcggcgagcct

SEQ ID NO: 147729 - DNA, 100 bp, Homo sapiens
gacaggccggtggtcgtgtccaactgctcctgcacccgggaggactatgagtggtgtttgtggccagtcctcacaaaacacagcctattgtggagatcct

SEQ ID NO: 147730 - DNA, 100 bp, Homo sapiens
attgtcttttccgcccgcttcgatcgcctcgcgccggctgctctttccggagcgcatcagcgaggaggtggggctgctgcagctccttggggaccccccg

SEQ ID NO: 147731 - DNA, 75 bp, Homo sapiens
gcaggcggcgcagtacaccaacgcggtgcgcgaccgggagctggacctccggggccaagatgctgaattatcagg

SEQ ID NO: 147732 - DNA, 83 bp, Homo sapiens
gtgagatggcagtgtgtgcaaaaaagcgccccccaggtgtgaacccacatccctgcccccagggccacctgcaggacgccgac

SEQ ID NO: 147733 - DNA, 101 bp, Homo sapiens
gccagattgcagggagtatcaaatatgagaaagctaggccatctgaataactttactaagtcctgccattgactctaccagaggagattcttcaagcttag

SEQ ID NO: 147734 - DNA, 100 bp, Homo sapiens
agaagttcttccttgaagaaatacagcttggtgaagagttactagctcaaggagcgagaacccgagcagcgccatgagcaacactaccgtcgtccccagc

SEQ ID NO: 147735 - DNA, 83 bp, Homo sapiens
aatccaacagcccagtgcttctgtctcgactgcactttgagaagttggttaccacagagaagcgcttcctcaaagacagtttg

SEQ ID NO: 147736 - DNA, 100 bp, Homo sapiens
cggggctcaagtgatcctttcatctcagcctcctcagtagctgagactacagattgtagttcatctcactgaggacctgctttcccgagcgtcaatgaca

SEQ ID NO: 147737 - DNA, 73 bp, Homo sapiens
agagctttacgatgtcacttgggaagggattcatggcgaagggtccaccttcagcaccctgtatggcctcctc

SEQ ID NO: 147738 - DNA, 74 bp, Homo sapiens
aactgcgaggaaaatgagcagtctctgcccccgccggccggcctcaacagaggactgacaaatggtagtggtcg

SEQ ID NO: 147739 - DNA, 75 bp, Homo sapiens
gttacccaaatgaagaaaaggatgcttgggatgtgaagatgttgctagagggcagaagtgatagttcaagtaaga

SEQ ID NO: 147740 - DNA, 50 bp, Homo sapiens
ttacctgtagccctggagagaggaaaagacggagtctcgctctgtcaccc

SEQ ID NO: 147741 - DNA, 90 bp, Homo sapiens
acatgttgtacctggaaaacaatgcccagactcaatttagtgagtcttattgttacaggtatcgctgtgctgctcggagccagaacacac

SEQ ID NO: 147742 - DNA, 98 bp, Homo sapiens
tctggaggattccgtcctcaaaggtgaatgattccaattgtgaccaagaacttctttccctgctcctggatgccaagctgctggtgaagtgtgtctcc

SEQ ID NO: 147743 - DNA, 80 bp, Homo sapiens
cgggagagtgagagctccccaggggagttctctgtgtctgtgaaaacgtgctggccaaagcgctctatgacaatgtggcc

SEQ ID NO: 147744 - DNA, 100 bp, Homo sapiens
acccactcaccttgtttgtcccaggactcctctatctcctccagccttcacagttgttgatcacatagcatggtcatccactcacagcttaaaaaaatac

SEQ ID NO: 147745 - DNA, 75 bp, Homo sapiens
cttctccctgcctggacccctactattgcaacaaggttttggaaggaaggatgttgtagaacacttactacagat

SEQ ID NO: 147746 - DNA, 75 bp, Homo sapiens
atttgatgaagtttttacaaagaaaatgattgagtctatgaccgagatctcactcagcagacagcagcagcccgg

SEQ ID NO: 147747 - DNA, 90 bp, Homo sapiens
ccacaacatggcctcctccgcctcctcctctcccgcgggcaccgaggactccgctcctgcccaggctaaaataaatgaagctgtagaatg

SEQ ID NO: 147748 - DNA, 101 bp, Homo sapiens
caacccccaggagcctgtgcaggaggagcccaagacccgcctcctgagtatgacagtccggagaggcccacggaatgagttttgatcatcctgagaaaaat

SEQ ID NO: 147749 - DNA, 80 bp, Homo sapiens
ggctgctatcagagaagaagggtgtttggggtgtgttttacaaaggtccaagtgggttccccggggcgactacatcgcct

SEQ ID NO: 147750 - DNA, 95 bp, Homo sapiens
ggggtttggtaccgagcggagaggagatgcacacggcactcgagtgtgaggccccccggacagaccacccagccctgtacagggacctgctgagg

SEQ ID NO: 147751 - DNA, 100 bp, Homo sapiens
agacattcccgccgtgcaacgcggagtggagctcagccaggggcagccggctctggtgctcccagaagaggacagtcattttgtttactcattcagccct

SEQ ID NO: 147752 - DNA, 82 bp, Homo sapiens
aagagaggcttgagactcaaaactgtagattcctgcttccaagacctcaaggagagcagacggagtctcactctgtcgccca

SEQ ID NO: 147753 - DNA, 75 bp, Homo sapiens
ctttgctctcgatgtagcctgagtctactgctaagatttcagcatgtcctgtggctgagttaatcagagttatga

SEQ ID NO: 147754 - DNA, 75 bp, Homo sapiens
cgtcgcgatgtgtggcgactgtgtggagaaggaatatcccaaccggcatcctggtggggaagaagttttaaggga

SEQ ID NO: 147755 - DNA, 76 bp, Homo sapiens
cacagcactctgggcgaaaattggatgtgaaaatgaagccagaccgagtttcaccagtgatcattaaagaatgggc

SEQ ID NO: 147756 - DNA, 100 bp, Homo sapiens
gggagttcgaagagttggatactcagcgtcgctggcagccgctgtacttgggcagctgcaatgactctccgcacggtattattgtcattgcaagcactat

SEQ ID NO: 147757 - DNA, 82 bp, Homo sapiens
gctggacgtgctcctctccatggggttccccagagcccgcgctacctggagtagaacagaaaaattattatgtctgtgttcc

SEQ ID NO: 147758 - DNA, 146 bp, Homo sapiens
cctattcccagaggcaggtggtgctgaccctgtaacccaaaggaggaaacagctggctaagctcatcattgttactggcattcccatcaagagcaccatggacaaccccaccaccacccagtatgccagcctcatgcacagcttca

SEQ ID NO: 147759 - DNA, 75 bp, Homo sapiens
gatgaattaatgaaccttgacccacaccaaggtccggtgtctaaaagactatggagaatttgaagttgatgatgg

SEQ ID NO: 147760 - DNA, 75 bp, Homo sapiens
gcgctagccctgcagacagaggtgtgctgacgacctgctacaacagaagctgcatttgatgccagaaggcaaaca

SEQ ID NO: 147761 - DNA, 100 bp, Homo sapiens
gtatgtctattacacagactttgtcatggagctcactctcctgtccctggacctcatgcaccatattcacatgttggccaacgagtgcatgcgaatcaag

SEQ ID NO: 147762 - DNA, 82 bp, Homo sapiens
gcaaccccagatccatttacactttacagaaatctggcattttttaaagtttgcgccccacaaagaggaaatattccaaagg

SEQ ID NO: 147763 - DNA, 100 bp, Homo sapiens
ggatgccattgcacaagctgtgaggggcctcatcaccaaggcctagggcggctcgcatgtggaagactctcaccttcttcgtcgcgctccccggggtggc

SEQ ID NO: 147764 - DNA, 80 bp, Homo sapiens
cgggagcgcaaggtcgccctcaaggccatgatcaaaacggaagacaggcgcgatgatggactccccgttcctggagctgt

SEQ ID NO: 147765 - DNA, 51 bp, Homo sapiens
agattataagaagcttgggttcattctgatggtgagaccattctaaaaggc

SEQ ID NO: 147766 - DNA, 100 bp, Homo sapiens
ggctggttctggggctgggattggaactgtgtttgggagcctcatcattggttatgccaggtggaggccacaagcaggaaagaaaaggccaagcagaggc

SEQ ID NO: 147767 - DNA, 74 bp, Homo sapiens
gcacccgcctccgggcatcttcaactcactggcctgtgtttgtggaggtgaaagaccttttgacattggtgccg

SEQ ID NO: 147768 - DNA, 75 bp, Homo sapiens
gcccgagccccgcccggcccgggccatgtcggtgggcgagctctacagccagaaattcattgagtttgaagatgc

SEQ ID NO: 147769 - DNA, 98 bp, Homo sapiens
gctgcattggggccaaacacagaatcagcaaagaggaggccatgcgctggttccagcagaaggacttatcaaactggtttcaaagcacagagctcaag

SEQ ID NO: 147770 - DNA, 80 bp, Homo sapiens
gccaggccgtgttccgtgtctctggattcaagtcccaggagtcctgaccagagagcaggctgttgtagtgactgatggag

SEQ ID NO: 147771 - DNA, 75 bp, Homo sapiens
acgagctgaccctgggagacatcgacggacagctggcctgaagctcagagccggggcgtgcgccatggccccaca

SEQ ID NO: 147772 - DNA, 90 bp, Homo sapiens
ccgggagtggagccgacttggaaactcaaggccaatctcaggttgagacatggatttaggtcctgaatatgaaggtatatttaacacttc

SEQ ID NO: 147773 - DNA, 75 bp, Homo sapiens
gctgactcaggagatgactttgagcgagcccagggcgtggtgctgaaagtgctcacaaacttcaagagcagtgag

SEQ ID NO: 147774 - DNA, 83 bp, Homo sapiens
cactcgcctgcgccccgcacccctccgagcagcccggggatccagcacgcaggtcccaggtctccccgctgcgctgcttgagg

SEQ ID NO: 147775 - DNA, 101 bp, Homo sapiens
ggtacttcattctggacacccaggctaactgcctcctctggtatatggacaacccccagaaagaacacccaggttaatgcctgataaagaaagcatgtatt

SEQ ID NO: 147776 - DNA, 100 bp, Homo sapiens
gcaaaaccagaggatgtccatgttcaatcaccactgtccaaattcagaagctcagaacgctggactctccctttgcaggaactgaccaacactggatgaa

SEQ ID NO: 147777 - DNA, 80 bp, Homo sapiens
tgctcggccgatgaagtgcagaggtttttttctgatgcctgaggaaacccagacccaagaccaaccgatggaggaggagg

SEQ ID NO: 147778 - DNA, 101 bp, Homo sapiens
ggcttcacctggtgtttgaatattgtgaccacacagttctccatgagttggacagataccaaagagggtatcgtgatttccgatacccacctggacacccc

SEQ ID NO: 147779 - DNA, 98 bp, Homo sapiens
ccagactgtttgatgctgaacttcaccgttaagttggtcagatgagatgaacccaccacaggtaattcggacactgctacctcttcttttggaatcaa

SEQ ID NO: 147780 - DNA, 90 bp, Homo sapiens
gtgtggggctgggcctgccatcattcaaaccagggccgctccagcctcaatgccaagccccatgacagccttgacctgaactgcgacagc

SEQ ID NO: 147781 - DNA, 99 bp, Homo sapiens
cgcgtctccgcttctgctgcctgccgggcgggctccggtggccgggggctgttgtggttccgactataaacagtacgtgtttggcggctgggcctgggc

SEQ ID NO: 147782 - DNA, 80 bp, Homo sapiens
ggacgcgggcgccaggaccggccgaacgcagaggagcgtgaggatcatccccggagaggacgggaggatcggcagcacag

SEQ ID NO: 147783 - DNA, 90 bp, Homo sapiens
cgcacgcgggtgccggcccagctaggcggagaatcgaggaggggttcccgtttgcagatggcgtgtacctggttctgctcatgggccttc

SEQ ID NO: 147784 - DNA, 100 bp, Homo sapiens
ctgctgcaccggacgctgctcgctcatctgcctctgcgcgctgcagttgtcgtcctcttgagttctggcgccttgactactgggaagatgacttgcggcg

SEQ ID NO: 147785 - DNA, 90 bp, Homo sapiens
aagttgttcattgtttgtcaccacaaaaaggacagatcttggcatatacagaagggctgcatggaaaatggctgttcacagagatacgat

SEQ ID NO: 147786 - DNA, 110 bp, Homo sapiens
atgccaaggaaaaactggagagcttcatcaaaaatagtgatagctttgataagattttttatcaagcagaaatgcatcgaacaacgagaatcaagatcactgagctaaat

SEQ ID NO: 147787 - DNA, 74 bp, Homo sapiens
aagaaagtggtgaatcccctgtttgagaaaaggcctaagaattttggcattgtacaagccagctgccatgttgt

SEQ ID NO: 147788 - DNA, 51 bp, Homo sapiens
aagagatgcaagagtgtactgctttgctctctgtacatgatactgtggctc

SEQ ID NO: 147789 - DNA, 87 bp, Homo sapiens
atgattttaattacatcattgcatttttccttggaacagcagcctgcctttaccaggattgttaaaatgagtcttcggaagcaaacc

SEQ ID NO: 147790 - DNA, 99 bp, Homo sapiens
tgcagagaatatgatacagatgtattcaaatggatcttcaaaggtgaccaagaatatggcccaggtgaccaaagccctggacaaggccctgagcaccat

SEQ ID NO: 147791 - DNA, 100 bp, Homo sapiens
acgtggctgcaaccttagcgacatcaggaagaacagggtcgaggatcgaggtaaagtgaacagagttatctgtgacattccatcaggcacctatgtaacg

SEQ ID NO: 147792 - DNA, 98 bp, Homo sapiens
cgctgggcctgtccgctggcgtcatgagctcagagggtacttctccagctcagcaacaggtagctctgcttgatcttcagagtgctttattctgcagc

SEQ ID NO: 147793 - DNA, 100 bp, Homo sapiens
gttactggaacctgccgattgccagtaggaggatttgctgatctcatgggcagaggtggaggagacactgaagcgactgcagagccagaagggagtgcag

SEQ ID NO: 147794 - DNA, 74 bp, Homo sapiens
gctttggcaaagctggggattggccagctgactgctcaggaagtaaaatcgtggcggacctgctgtactggaag

SEQ ID NO: 147795 - DNA, 98 bp, Homo sapiens
acttgtcaacttcctcttcagtcatcagtttggtggttggtgcagtggagatgccatttccagtgttgaacgatatgatccacagaccaatgaatgga

SEQ ID NO: 147796 - DNA, 74 bp, Homo sapiens
cgctgaggagctgcagtctctgtcaagcaatggctgccatccggaagaaactggtgattgttggtgatggagcc

SEQ ID NO: 147797 - DNA, 74 bp, Homo sapiens
ccgccgagatggcgctcgaccccgcagtacgaggatgtcgtccaggaaagattgtgcagatgactgaagcagaa

SEQ ID NO: 147798 - DNA, 96 bp, Homo sapiens
cagtttggcaatgacatctcccctgagattggggagaaggtgcggactcttgttcttgcactggtgcctgacaggagcaatggccaccagcaggtg

SEQ ID NO: 147799 - DNA, 90 bp, Homo sapiens
ctgagacagtggtcacaggctccctagatgacctggtgaaggtctggaaatgattatgtttgagaccttcaacaccccggccatgtacgt

SEQ ID NO: 147800 - DNA, 76 bp, Homo sapiens
cccaacgcgaagacggtaacccgtgtgactttgactgggccgttaattaaggaaaagttgagccagggcgtgaccc

SEQ ID NO: 147801 - DNA, 100 bp, Homo sapiens
cagacggccagaaagttccgccatgagctggggcacggagctgtggatggctattcatatgaaaaggaagcaatggaaaattggatcagcaaaaagaaac

SEQ ID NO: 147802 - DNA, 101 bp, Homo sapiens
gacacagtccctccctcggtttgcctactgaagagcttatcagagctctacttgggaaagtcagagatgtcatcatcgctgcaagcgttgcaggaatgggc

SEQ ID NO: 147803 - DNA, 82 bp, Homo sapiens
gagccgggcgcggctctgtgtggactcggagaaacgcgggccctgggaggagcggggacactgaggacctctctccaaattg

SEQ ID NO: 147804 - DNA, 80 bp, Homo sapiens
cttcatcgacatcagtgaagaagatcaggcggtgcgtctttctacgtgaataggattttgtggctggccagatacactgc

SEQ ID NO: 147805 - DNA, 142 bp, Homo sapiens
gaagatcggcttgaaattaccaactgctttcctttccctcagcacacagaggatgatgctgactttgatgaagggaacaatggcaaaagcctttgatgaagcattttcctctgagacaacagcggcaatacctgaagaccat

SEQ ID NO: 147806 - DNA, 82 bp, Homo sapiens
tccgggaaaactacactggccagagtccactgccagctggttcgactctttgcacgaggaattgaagagaatccgaagccag

SEQ ID NO: 147807 - DNA, 100 bp, Homo sapiens
gcgggaggcagcggccgcgcggcgctggactggagcagaaccccaggactgcgcccccgggagcgggcgcccagaggttcgagaacttgtcttggacaat

SEQ ID NO: 147808 - DNA, 74 bp, Homo sapiens
agtgaaatacttcatacattacagtggttggaataaaaaggacatggcttgcagtgtggcaggcataacttctg

SEQ ID NO: 147809 - DNA, 51 bp, Homo sapiens
cacggtgcctccggaacacagggtgccgtgagcgatgtggagatgcaggaa

SEQ ID NO: 147810 - DNA, 50 bp, Homo sapiens
agaatgcagggcgttggctttaggaccgtgtgtatgtacaacaaaataat

SEQ ID NO: 147811 - DNA, 80 bp, Homo sapiens
ggcggcgctatgaagggcacaagggcgtctctggccgagcctctttttgtggaaaacgacagcagcagcagtggcctgga

SEQ ID NO: 147812 - DNA, 90 bp, Homo sapiens
tccaagaccgtgctggtctttctcaacctcatcttctgggtgcactacatcctccaggaggtggtgatgggtgggatggtgttggaaaca

SEQ ID NO: 147813 - DNA, 90 bp, Homo sapiens
gattcagagttggataagcacttggaatcacgggttgaagactgcagttcgtcatgaatcatgcagtggtctctataagttatccctgtc

SEQ ID NO: 147814 - DNA, 105 bp, Homo sapiens
agcaaagccatcaacacccaggaggcccccgtgaaggagaagcacgcccggcatgtatgtccctgggaagctgcatgatgtggaacacgtgctcatcgatgtggg

SEQ ID NO: 147815 - DNA, 100 bp, Homo sapiens
cgaggttgtgtgtgggttagacttgtgcaaccagggcaactctggagctgttggacaaatatcttattcccaatgctacacaaccagaaagtaaggtgtt

SEQ ID NO: 147816 - DNA, 75 bp, Homo sapiens
cttttaccttccttaaggtgctcaacaacatggaggaaggtgtcttgctgcaggtaactaatgaagaagtggtca

SEQ ID NO: 147817 - DNA, 110 bp, Homo sapiens
gtccagagctgaggactgcctgtttgcaggtggaagcagggaaaggcctggagatgaggaagctggttctctcggggttcttggccagcgaagagatctacattaaccag

SEQ ID NO: 147818 - DNA, 88 bp, Homo sapiens
agagacagagccaggatttgaaaccaggacatggtccggcgaggagagatcatcgacaatgacaccgaggaggagttctacctccggc

SEQ ID NO: 147819 - DNA, 76 bp, Homo sapiens
ccagatgtctgacagccctgtgtgacaccaagataagtaacgaagatgttaccgagtacttcagtgaattccttag

SEQ ID NO: 147820 - DNA, 100 bp, Homo sapiens
atcactttcattgtctcggacgtgcggggcctgggcctcccggtccgcaagcagaatatgccttccgcatgtctcgtctcagtgcccggctatttggtga

SEQ ID NO: 147821 - DNA, 90 bp, Homo sapiens
ttttccctaacatcaagaatggtctcagccaatttcttctccagtcatcctccagtttggtcatgcagagactcttcttccactgctttc

SEQ ID NO: 147822 - DNA, 50 bp, Homo sapiens
ggatgaggcgtgcaggcctggaagacccttttgaggacttctttgggaat

SEQ ID NO: 147823 - DNA, 83 bp, Homo sapiens
accttgtacccaagcatgcaaaggaaggaaatggtttccaaggaagattgatccaagtggtgtttggccattgggatgtcgtc

SEQ ID NO: 147824 - DNA, 75 bp, Homo sapiens
cgtggctgcaaccttagcgacatcaggaagaacagggtcgaggatcgaggaacctagaaagattgtacaatgaat

SEQ ID NO: 147825 - DNA, 73 bp, Homo sapiens
gaacatcggtctgggcttcaagacacccaaggaggctattccggttaaattggtccatgatagcttagaggat

SEQ ID NO: 147826 - DNA, 100 bp, Homo sapiens
gtgtggttgcaacggagataaattcccggaaccgcgattcggcgtgtcaggtaaggaaactgaggcataaagaagttaaaatgcctgaacaaaagcacac

SEQ ID NO: 147827 - DNA, 100 bp, Homo sapiens
cccggcccctggcgccgacgtcaaggtccacagggcacgcaagaccatgccgaagtccgtcgtgggcctgggagatgtgcattgagcaggatgggagagt

SEQ ID NO: 147828 - DNA, 51 bp, Homo sapiens
ggcaacattagatccacctcatacaggtcaccatcagaaaagctaagtttg

SEQ ID NO: 147829 - DNA, 99 bp, Homo sapiens
ctggataccactacatgcagcagcttcctgtggatatcttgatattgcagacatttatgacattaacagagaacaggactatgtcaagaattctgaggg

SEQ ID NO: 147830 - DNA, 50 bp, Homo sapiens
cccgctgcgctaggggaagcgggcagtgtcaaatcaacagtgccttgaca

SEQ ID NO: 147831 - DNA, 88 bp, Homo sapiens
tcaactggaagccgtttgtgtacggggggctggcctccatcactgctgagtgcgcttccaattgaagacttgtgcagtttaacatccc

SEQ ID NO: 147832 - DNA, 75 bp, Homo sapiens
gaaaaaggaagaggagaaggaaattgtcccgaatccctgcagcttcatgtttcctgttgcaggtgggataagacc

SEQ ID NO: 147833 - DNA, 51 bp, Homo sapiens
atgagatggtggatgaacccccaggtgaacggaagagtccttatgttgcag

SEQ ID NO: 147834 - DNA, 75 bp, Homo sapiens
gatactctgactccacctttacttttacctacgttggcggccccagaagacttcatctgcagagagaaagagacg

SEQ ID NO: 147835 - DNA, 87 bp, Homo sapiens
tttgaaaacaaaataaaagaagctggaggaatagatctttttgttggagaaatgcactcggtgatggaaagagagccactattctga

SEQ ID NO: 147836 - DNA, 90 bp, Homo sapiens
ctgccggctgcttccctgggctgggcgtcagccgccaccggcagcagcagcaccaccggacgaagatggctgtgccacccacgtatgccg

SEQ ID NO: 147837 - DNA, 50 bp, Homo sapiens
gaggactcaggagcaaatcagtaatgagggagccatggatttgctgcggg

SEQ ID NO: 147838 - DNA, 50 bp, Homo sapiens
catgaatgaccacggctttgtgcgcgcagggaccatgtcggcggagaccg

SEQ ID NO: 147839 - DNA, 83 bp, Homo sapiens
gcaacaacctctcctcttcgtctccgccatcagctcggcagtcgcgaagcagcaaccatggaccctggtttgatatgtaccta

SEQ ID NO: 147840 - DNA, 75 bp, Homo sapiens
cgagttcaacatcctcctggccaccgactcctacaaggatttgcctcaaagggcactgcaaaaattgaacagagg

SEQ ID NO: 147841 - DNA, 90 bp, Homo sapiens
ttgatattgaagcaatgcttgaggctccttacaagaaggacatgaacaagctgagtggaggcggcgggcgcaggactcgggtggaagggg

SEQ ID NO: 147842 - DNA, 80 bp, Homo sapiens
tatgttgatggcattccagaatatctcagatgagcaggatctgtctggctccattgatgacctccccacgggaacggaag

SEQ ID NO: 147843 - DNA, 75 bp, Homo sapiens
ggatgacatatttttggacctgaaacagaaattctggaacacctatatggaaccctaaggactctgcaatatgaa

SEQ ID NO: 147844 - DNA, 95 bp, Homo sapiens
cccctcttcctcacttccctgtactctcatcgctctcggcctccgacacgactctcagcgttctcatctctcttccttcaccatgaagctgatgg

SEQ ID NO: 147845 - DNA, 75 bp, Homo sapiens
tctgcagtgtcttccacaacctggaccaagatcactccatggatgaaatgacagctgtggtgaaaattgaaaaag

SEQ ID NO: 147846 - DNA, 100 bp, Homo sapiens
tgcgccgtggccaagaactccgcggcctaccactccaaggcacaggagacgatggactcactggccatggtggagggtgtcagcagctgccaggacctct

SEQ ID NO: 147847 - DNA, 90 bp, Homo sapiens
ccgccttccgaggaggactcagcagaggcagagcgcctcaaaaccgaaggaatgggtaccacagaccatgtcatcgtcctggcgtccacg

SEQ ID NO: 147848 - DNA, 101 bp, Homo sapiens
cggcagcggcgctcgcagcgcccggctttttagaccccgagaagaagcttttttctcaccgaatattatcaagggatgaatgtattgacccattttctaaa

SEQ ID NO: 147849 - DNA, 75 bp, Homo sapiens
gaattttaagtcatcgttctaggatagcgaatggtttccaggtggataattatggaacccagctcaatgctgtga

SEQ ID NO: 147850 - DNA, 98 bp, Homo sapiens
cgcgcggccgcccacagcccacccggccaaagcctctgccagacccggagtgcatcatcgacgaggactgtgggcccagcatgtactgccagtttgcc

SEQ ID NO: 147851 - DNA, 83 bp, Homo sapiens
ccacccaggcctgagcgaagcccacaaccccgccgggcacatgtgaaaggtcgtggagtcagatttgagtgatgatggcaaag

SEQ ID NO: 147852 - DNA, 51 bp, Homo sapiens
cgcgaatatcgtcatcgttagaagtaccatggggcgcaagttggaccctac

SEQ ID NO: 147853 - DNA, 99 bp, Homo sapiens
cctgggtcctggacaggaagggggctaagaagagccagggcctgtggagtgactactcaggttatcaatagtctggctgtctatcgtcatcgtgagact

SEQ ID NO: 147854 - DNA, 50 bp, Homo sapiens
gaatgagatagccgtcctgagaaagctttttctcctccgtgacagccaga

SEQ ID NO: 147855 - DNA, 100 bp, Homo sapiens
ctgcgactatgccagcaagagctatgatgccgttgtcttcgatgtcttgaaagtgaccccagaggagtttgctggtcctggcggcagagaccacgtccca

SEQ ID NO: 147856 - DNA, 100 bp, Homo sapiens
gcctcctggccccaccttcctagtcctttcctgctgatgacgctactgctggggagactcacagatgcccagcctacagagtctgagaaggaaatttata

SEQ ID NO: 147857 - DNA, 76 bp, Homo sapiens
attaaaagcagcgaacctcgagaccaacgtggaggagctgtgggtggaagatggtggagccagggcaagatttact

SEQ ID NO: 147858 - DNA, 96 bp, Homo sapiens
tatcctggataaagccctacaaaaacggcctactaccagaaacattgctgaggctcttgtcagcaaaggtctagccacagtgatcagataccggca

SEQ ID NO: 147859 - DNA, 50 bp, Homo sapiens
cattcgaagtgttggcagtcacagggcaaatcctgatcctaactgttgtc

SEQ ID NO: 147860 - DNA, 111 bp, Homo sapiens
cggcgccgcggcctcttcggctgcggaccctgccattccggaggaggtttgcctgcaatgagatttcattctctacatttaaaggacatcctttctgagctgctgtgaata

SEQ ID NO: 147861 - DNA, 83 bp, Homo sapiens
cctgaagccagtgggctggggactcacggccgggacactcagggcagacaatgcagatcttcgtgaagactctgactggtaag

SEQ ID NO: 147862 - DNA, 74 bp, Homo sapiens
ggagcccctggcctgcccggacgagttcgatgacttcgtcacctatgagaagtggtccaaaggcaaagttcggg

SEQ ID NO: 147863 - DNA, 83 bp, Homo sapiens
ctctgaagcaacaaggggaatggggtcaaaatgagcaggagctagagttaatgccaaagacagcaaatggttgacacctttac

SEQ ID NO: 147864 - DNA, 82 bp, Homo sapiens
gccaccacccactccggacacaggttgacatcatggacatatgtgagtccatcctggagaggaagcggcatgacagcgaaag

SEQ ID NO: 147865 - DNA, 100 bp, Homo sapiens
acttctcgcagtccccgcgcgtggtcatccaggcagtttcccagctacctcgagacggtgacaaaggacatcctggcccccaatctgcagtggcatgcgg

SEQ ID NO: 147866 - DNA, 101 bp, Homo sapiens
cacatccttactggttgcctaattttatggatgtcttcacgtggtctttaccgtttgttggagaaaaagtttttggtgttgagccagacttgaccagggaa

SEQ ID NO: 147867 - DNA, 100 bp, Homo sapiens
ctcgtactaaagagggagtgggctcccctaaactggggcctggaaaaggatgcatcaaattgcaatttggaggagaggcagcacaagcagaagcctgggc

SEQ ID NO: 147868 - DNA, 75 bp, Homo sapiens
cgcgagcgtctgggcgggtggtagccactgaggcggctcccagctgcgttggcgacatggccgacacccccagag

SEQ ID NO: 147869 - DNA, 100 bp, Homo sapiens
ccagaaatggctgcaggccaagcgcctcacgccggacctggtgcagttggttgaatctggcgatgtggaacccatggatatggagggctgactatataca

SEQ ID NO: 147870 - DNA, 98 bp, Homo sapiens
gcctattccacgccctccctggggaaatggtgtcctgctggagggagaactgatcgatgtatctcggcacagcatcttggacactcatggcaggaagg

SEQ ID NO: 147871 - DNA, 90 bp, Homo sapiens
gtgggtattgctgcggctggtgcgtcgtcgctctaggttatgatgtgattgctcaagcccaatctgggactgggaaaacggccacatttg

SEQ ID NO: 147872 - DNA, 83 bp, Homo sapiens
cttgagcgctgagcaagcaaaggcaagagtgagccatggagctacgtgtggggaacaagtaccgcctgggacggaagatcggg

SEQ ID NO: 147873 - DNA, 100 bp, Homo sapiens
cgtacacatggagcgggcagaggatgcagtggaggccatcaggggccttgataacacagagtttcaaggtggaagtgctgcatcagtaaatgctaatttt

SEQ ID NO: 147874 - DNA, 100 bp, Homo sapiens
cgacctgcgagcgccgcccgggcatgcgaagccgtccctccccgggaaatggaagttccagtattaccgaaaatctctctaccgatcaccagttcttcac

SEQ ID NO: 147875 - DNA, 74 bp, Homo sapiens
gccaccctgcccccaagaaggaagtcatcatgggccggcctggaacagcgtgagtgcatctccatccacgttgg

SEQ ID NO: 147876 - DNA, 75 bp, Homo sapiens
tccaaatgaaaatcaagtagtgtttgccagagttgattgtgatcagcactgccctcgggaccaaggatcacgtca

SEQ ID NO: 147877 - DNA, 90 bp, Homo sapiens
ctcagggcgcctcggaaaccaggagatcatgaggtcctcttcctgatggatgggaacaagccatgactcaggatggagaaatttactata

SEQ ID NO: 147878 - DNA, 100 bp, Homo sapiens
cctactggataggcttaggaattttgtcttctgttgggcttggaacagggctgcacacctttctgctttatctggactcagaattcatgattgaagaaat

SEQ ID NO: 147879 - DNA, 75 bp, Homo sapiens
ttactgaagaggaggaagcccaggttgggggccgtcccgctcctaaggcaggaagatggtggccgcaaagaagac

SEQ ID NO: 147880 - DNA, 100 bp, Homo sapiens
caggacatcatgtgggccctgcacgagctcaaaggacactatgcaatcacccgaaagttatttcaagtaccattggaagaggaaggacaacgtggtggac

SEQ ID NO: 147881 - DNA, 97 bp, Homo sapiens
cagttctaaaaaaccatgccccacgtgcactacatcctccaggaggtggtgatgggtgggatggtgttggaaacaaacatgaatgaaatcgtggctc

SEQ ID NO: 147882 - DNA, 100 bp, Homo sapiens
caggagtcctccacttgccactgggatgcagaaaatgcgattgtgcatatgggcggtcagtggttgggtggtcgtcaaatccgaaccaattgggccactc

SEQ ID NO: 147883 - DNA, 98 bp, Homo sapiens
caccggcagggcttctcctatgactacgtctttgactggaacatgctgaaattcatccgcctcacggacacgctgggcaggctctcgcacatcctgga

SEQ ID NO: 147884 - DNA, 100 bp, Homo sapiens
tcaagcctccccaaccccaccatcccaccaaagggggctgctgaccgagagagctcactcagccagaattgatgaattgcaagtttgtgccccatagctg

SEQ ID NO: 147885 - DNA, 101 bp, Homo sapiens
aaaatcagataacttgtactggagagaaatcctacaagtgtggtgagtacccagaacatgaagatgggtgggctgccgcgtacaacacctccaactcagaa

SEQ ID NO: 147886 - DNA, 98 bp, Homo sapiens
ggcggacgggaaggcgggagacgagaagcctgaaaagtcgcagcgagctggagccgccggaggcttgaaaaggaatacactacaataaaaacgaaaga

SEQ ID NO: 147887 - DNA, 90 bp, Homo sapiens
cttctctgtcagctctttccccgtcagcatcccagccgtgctcacggataaaagaatcagagtgtctcaacccttgacaagaggaccaag

SEQ ID NO: 147888 - DNA, 100 bp, Homo sapiens
ccggtgtaacgttcgggctccgtctcaggggctgaagtttgtgagatttgaagaccttgcttctcatcacccactggattatgccccaggcttccctacc

SEQ ID NO: 147889 - DNA, 100 bp, Homo sapiens
caagaaatgaagaacgagattcagacacaggtgtagctagcttgaaccagagtgcactgagccgtccaatgcaaaggaaactggtgacacttgtaaactg

SEQ ID NO: 147890 - DNA, 121 bp, Homo sapiens
aggggccccagcagcccccgaaggccctatcaggacatggagtatgaaagacgttaattggccttggtcctcacagctccaaaaagaaacaggatctcgataagctctatgagctgaagtc

SEQ ID NO: 147891 - DNA, 83 bp, Homo sapiens
cttggagctcaaggtgacaggccagagcccaggtccccaggacagtgcaggatcttacacatttgttccatggcttctcagct

SEQ ID NO: 147892 - DNA, 97 bp, Homo sapiens
ggctatgcctacagcttcaccaaggagccggaatgcatccatgtgatgagactgggagactagacctgaaatgaaagagttggatccaaagaatgac

SEQ ID NO: 147893 - DNA, 100 bp, Homo sapiens
cagcccctccaaagatttactttcccatccgtgactcctggaatgcaggtactggtgtggcatactcggacagagaagcccaagatgaagcaggaggagc

SEQ ID NO: 147894 - DNA, 98 bp, Homo sapiens
gagttatgcccagtatgttcacaacctctgcaactctctctccattaaagtcgaggaaagatggcgttcaggaagtggcttatattcactcaaaccag

SEQ ID NO: 147895 - DNA, 90 bp, Homo sapiens
ctcgtaagaagatcatggtcctgggagactttgtgcccattgacctagacgagtggtgggcgcagcagttcctggcgagaatcaccagct

SEQ ID NO: 147896 - DNA, 100 bp, Homo sapiens
tcatttcactgcctgagctgaagggctgcctgggtgttagcaaagaagggtaacaagatgctcaactatagtgctcccagtgcagggggttgcctgctgg

SEQ ID NO: 147897 - DNA, 75 bp, Homo sapiens
ttccaatggggaaattatagacatcttcaagccagtgcgcaagggacttgccatgaggtgttgaagccttgtttc

SEQ ID NO: 147898 - DNA, 100 bp, Homo sapiens
aagggggcccagacccagacagaggaggagatgaccagatatgtccaggagctccaaaagcatcagattcgcttcaagctcagcttatcaatatgggtgt

SEQ ID NO: 147899 - DNA, 90 bp, Homo sapiens
ggatccttgtcatgccactggaagagaaggaaatctgaaatagagtactatgctatgttggctaaaactggtgtccatcactacagtggc

SEQ ID NO: 147900 - DNA, 100 bp, Homo sapiens
gaggagacgacagggtcaaagatgttcattctgggtgacacagcctacggcaggctgtacaatggccgagccaagggccgccagtttgggtcaaagtgca

SEQ ID NO: 147901 - DNA, 51 bp, Homo sapiens
gagcctgaagacaaggatgtgactgtccaagggcagccattaatggtgcag

SEQ ID NO: 147902 - DNA, 75 bp, Homo sapiens
gaaaatacaaatcacacgcataatggatgaaaggaaccgacagacatgcgtcgggatgtccaggaaatttttcgc

SEQ ID NO: 147903 - DNA, 127 bp, Homo sapiens
gctgaagcctttaaatgcagcatctgcgatgtgaggaaaggcacctccaccagagctgacttttttgaagatgaggcgattgaacagattttgaagtataatccttggtggactgacaaatattcaa

SEQ ID NO: 147904 - DNA, 100 bp, Homo sapiens
gtctgtggagagaatctgcctcctttaacttatgaccagaatgtgaaagatgttgcagaagtgttccagaagtggctgaagatagaaggaaaaaagtgcc

SEQ ID NO: 147905 - DNA, 100 bp, Homo sapiens
gagactctcaacgggggaatcaccgacatgctcacagggcatcacatttgatgaattcaggtcatttttccagtttttaaacaacctagaagactttgca

SEQ ID NO: 147906 - DNA, 100 bp, Homo sapiens
tcgccccggacgagctgacggtcaagaccaaggatggcgtggtggagatcaccggtgtccggctttgctggcccagcaagcctgataagcatgaagctct

SEQ ID NO: 147907 - DNA, 75 bp, Homo sapiens
cgcgaaccaacggttagcggtggcaggggctgactgagagcgtctgcttgtgttctaatcttaggcgcttcaggc

SEQ ID NO: 147908 - DNA, 101 bp, Homo sapiens
ctggattctcaaagtcatgaacttcacaattgaagagagaagggcacagttacctaagtatcaacgtaatcttcctcggccaggacaggcccccatcggta

SEQ ID NO: 147909 - DNA, 100 bp, Homo sapiens
atccccgcccaggaagcccctctgaagcctcctcgccgccgtttctgagaaggtgtgggaaccgctgagcagaacaccctcccccagcgggaaatccggg

SEQ ID NO: 147910 - DNA, 50 bp, Homo sapiens
cccacccgatgcccatgaactacgctcaccaaccaccaggagctgtgggc

SEQ ID NO: 147911 - DNA, 100 bp, Homo sapiens
ccctggtgatccccatgaaccacgagacagatgtgaacttccagggcaagaacctggacaccgtgaaggtgcggtggatgatgtactggattgtttttgc

SEQ ID NO: 147912 - DNA, 98 bp, Homo sapiens
cctccccaaccccaccatcccaccaaagggggctgctgaccgagagagctcactcagccaggtctgaatttcctgctgctgttcacaaagatgctttt

SEQ ID NO: 147913 - DNA, 75 bp, Homo sapiens
caggagtcctccacttgccactggaccccaccaacaactgaacgctttggtcaggctgctacaatggaaggaatt

SEQ ID NO: 147914 - DNA, 100 bp, Homo sapiens
cgttcttgagtcgggaaatggccgctgtgtggttgcaacggagataaattcccggaaccgcgattcggcgtgtcaggctcgagtgcagtagcgagatctc

SEQ ID NO: 147915 - DNA, 83 bp, Homo sapiens
cgcccactggggatggcaaagacgacatccggtgcgccgaggctgctcacaaaatatttaggtcagttaacgtccataccagg

SEQ ID NO: 147916 - DNA, 100 bp, Homo sapiens
ttcaggattatgaccatcatttttgggaagagtgttagagtaaggcatcaggaacttagtgatttggcccgtgaccctccagcacaatgttctgcaggtc

SEQ ID NO: 147917 - DNA, 97 bp, Homo sapiens
tagtattaagtgtgagtaaaagaggatgccagcccccatcagattgcgggagctgatccggaccatccggacagcccgaacccaagctgaagaacga

SEQ ID NO: 147918 - DNA, 104 bp, Homo sapiens
gtggaacttctacccgacacttacatgccatggccttctacgttgtgaaaatggcttgggcactgtttaaaggaaagttccgagaaggcatcgacaagccggac

SEQ ID NO: 147919 - DNA, 99 bp, Homo sapiens
atcacacgtaccacctggatgttgtgggtgctggagaatctggtaaaagcaccattgtgaagcagatgaggatcctgcatgttaatgggtttaatggag

SEQ ID NO: 147920 - DNA, 75 bp, Homo sapiens
gtgtgatctcgagagacctgcgtacattcggggtgccagaaggaaagcatagatgtggaaacaacttctgtgcat

SEQ ID NO: 147921 - DNA, 75 bp, Homo sapiens
ttcgtcatgttcttcgcgccctgttgatattcactgatggactccaaagaatcattaactcctggtagagaagaa

SEQ ID NO: 147922 - DNA, 90 bp, Homo sapiens
agtcacagtgttgctgcaacatagagctgacattaactgtcaggactcagcccaggagagtgttattactcgagatattcatcgtacatt

SEQ ID NO: 147923 - DNA, 83 bp, Homo sapiens
cgggattggaccgacgcagccatgatgtatcctccactcctcgctggccaccatcctgctgcccaacagaagaagctcttctg

SEQ ID NO: 147924 - DNA, 100 bp, Homo sapiens
atattcagttgcacatccccacatcaatgcactgccaatgcattcagagagaagaatcgacctgcactgccatccacacagatatcatggacgactggct

SEQ ID NO: 147925 - DNA, 101 bp, Homo sapiens
atggcccaggaatttataccagctgtagcaaaagtgggaagccaagcctttcctcccgggaagcaggctgctttagatccattcatactgttgaaccttct

SEQ ID NO: 147926 - DNA, 100 bp, Homo sapiens
agagatattctactccatctcattcattgtacaggcctgcgggatacaacgggaatacaaaaatgcgctagagcggtccgcaacgctgtagcctgcgtaa

SEQ ID NO: 147927 - DNA, 100 bp, Homo sapiens
gtcgcgcggcgtgccctgcttgtcacaggtgaggacaccagtgatgaattctgaagcaaaagttctggtgcctgggattcctggtcatcatgcagctatc

SEQ ID NO: 147928 - DNA, 95 bp, Homo sapiens
ccgcctgcctccgccggctacagcgggaagagcggcgtccgacctccgatcatgaacgggcccctgcacccgcggcccctggtggcattgctgga

SEQ ID NO: 147929 - DNA, 100 bp, Homo sapiens
gtttgtggatgaaaattgggaaggttccctcaagtccaagaattttcctgcatggagtgctacatcctcttgttccagtctcagctggctgctccgtggg

SEQ ID NO: 147930 - DNA, 90 bp, Homo sapiens
ggcaagctgggcttcctggccgtcagcccaagactaccccgtcggtcattctgttcctgccgtcctgtgaggagccccaagccaacaagg

SEQ ID NO: 147931 - DNA, 75 bp, Homo sapiens
gtataaaataggctgagatatagtgactgtaagctgtgatctcagtatacaaagctacaccacctgaaactcagc

SEQ ID NO: 147932 - DNA, 76 bp, Homo sapiens
ctgtaatcccagcactttgggaggccgagctcgagtgtcagtcttacggaaacggagcccacctggcatctatcct

SEQ ID NO: 147933 - DNA, 100 bp, Homo sapiens
tgtccatattcagattggccagtgtggcaaccagatcggagccaagagagacaagagagacacctccaacttcgacaaagagttcaccagacagcctgtg

SEQ ID NO: 147934 - DNA, 90 bp, Homo sapiens
gatttgttaaggattccaagtaactcttatttggctgcagaagatgtcaatgttactttcgaagatcaacaaaagataaacaaatttgca

SEQ ID NO: 147935 - DNA, 82 bp, Homo sapiens
caccctgatgaaagcctacgggatccgctttgacgtgatggtgaacggcaaggaagctcttcgtgggcggtcttgactggag

SEQ ID NO: 147936 - DNA, 75 bp, Homo sapiens
atgctttttattacaagactacggagcataggaggaaaattcatcatctggctgaagggtatgtgattggcagct

SEQ ID NO: 147937 - DNA, 100 bp, Homo sapiens
acatcttcaggagaaaactcttaaagaatgcagcagcttggtgtaccgccggaagcaccaggagctgcaagccatgcagatggagctgcagagccctgag

SEQ ID NO: 147938 - DNA, 75 bp, Homo sapiens
gctaggagccccccagggtctgggaccccgctcagcatggctgcaggttgtgggctgcacactgcagaaagatac

SEQ ID NO: 147939 - DNA, 100 bp, Homo sapiens
tgaagggccatgcctactctgtgaccggggccaagcaggtactggtgtggcatactcggacagagaagcccaagatgaagcaggaggagcagctgcagcg

SEQ ID NO: 147940 - DNA, 80 bp, Homo sapiens
tgccgcctatgggcacaggcagtgtctggaattggacatggatttgattgacatactttggaggcaagatatagatcttg

SEQ ID NO: 147941 - DNA, 101 bp, Homo sapiens
tgggccccagccccacagaccagcccagcattcagaaggacagaataacgggctcccagattcacaagccccaccaagaggatcaccccaggaacgcttgg

SEQ ID NO: 147942 - DNA, 75 bp, Homo sapiens
tgaacagaaaactgcatttgacaagctctctgatgtaaaggatggagtaaatcaagcagcacctgcatttggatt

SEQ ID NO: 147943 - DNA, 100 bp, Homo sapiens
aggaggacgatttcctggggggcatggagtgcaccctggggcaggagccggtgaaacctgaagaaggcagagatatggcaaacaggattggcgcttttgg

SEQ ID NO: 147944 - DNA, 146 bp, Homo sapiens
aatggattgtaccgctgtgagaagtgcgacaccgaatttcccaatttcaagtaccgcatgatcctgtcactgtgtcagcgtgttatgatgccgtcccgtaccaacctggctactggaatccccagtagtaaagtgaaatattcaag

SEQ ID NO: 147945 - DNA, 100 bp, Homo sapiens
tttggagtcactctgaaatatatcctggaataagtgtgtttgactagaaccacatcttatgaggtccccaaggtaacaacattgactcaggaagtttctc

SEQ ID NO: 147946 - DNA, 74 bp, Homo sapiens
tataagaccatttatttctttggagacaaaactatgccaatgcctgtgaggagccaccaacatttgaagctatg

SEQ ID NO: 147947 - DNA, 90 bp, Homo sapiens
cgccgaccgcgttcctatggacagacgcacagacacctgcagatagctgatcagcttccttgggttttgctgatgacacaagagagcttt

SEQ ID NO: 147948 - DNA, 100 bp, Homo sapiens
acaagacctggagttgtctgtgcagatgtacgcccaagccgccctggatggagactcccaggttactataacaacagtaccaaggtggctgtgaaaaccc

SEQ ID NO: 147949 - DNA, 74 bp, Homo sapiens
ggagctgggcgcggattcgccgaggcaccgaggcactcagaggaggtttaactatagatcaacacatcatcttg

SEQ ID NO: 147950 - DNA, 101 bp, Homo sapiens
tccaaggctgagaacgacttcggtctggagtggaagcagcctgaggccctcatccaatgcagatgtctgtgccgtgcgtcttgtccagcctgcagaaccat

SEQ ID NO: 147951 - DNA, 86 bp, Homo sapiens
tggcctacgcccagcatcactgtggatctgcttaccaaaagtggctttacagtgggtaccctgtcagaaaccagcactgggggccc

SEQ ID NO: 147952 - DNA, 117 bp, Homo sapiens
ttcactggcaaagtggttgtggtcactggagctaattcaggaataggtgctggagaatctggtaaaagcaccattgtgaagcagatgaggatcctgcatgttaatgggtttaatgga

SEQ ID NO: 147953 - DNA, 82 bp, Homo sapiens
caagcagctatggaggaaaatcagagaaaccctaaagcaggcagcagctcagaagtcccagcagctttcagcgttgcaagaa

SEQ ID NO: 147954 - DNA, 87 bp, Homo sapiens
gaatatttaatggaaaatcgcttggttaaaacctgacacttttaacagtctaatactagtaatgagatgaagctaccgtcactgaag

SEQ ID NO: 147955 - DNA, 100 bp, Homo sapiens
atggaccctctggagacccctatcaaggatggcatcctctaccagcagcatgtcaagtttggcaagttctggagagtcttggcttctgggaggaagtcag

SEQ ID NO: 147956 - DNA, 75 bp, Homo sapiens
gggcacaaggccaggttcccaagagctcaggatcaagcagtgcacacgggtcacgatggaccagctctccacagt

SEQ ID NO: 147957 - DNA, 75 bp, Homo sapiens
cttagctgtgctcgcgctactctctctttctggcctggaggctatccagcgaactgcaagcacatgttgaccaga

SEQ ID NO: 147958 - DNA, 88 bp, Homo sapiens
acaaaagaagagttaaatgccctcaagtcgacaggggatgggaccctagataaagatgatattgagactccactgctaactgaagcag

SEQ ID NO: 147959 - DNA, 100 bp, Homo sapiens
gcatttgccatcttcaagtttgttcaggtgtttcccattaaacactaccaggacaaaatcaggccttacatccagctgccatcgcacagcaacattactg

SEQ ID NO: 147960 - DNA, 82 bp, Homo sapiens
agatgctgaaaagagaaggtcaaacagctgaaggtgctggagaatctggtaaaagcaccattgtgaagcagatgaggatcct

SEQ ID NO: 147961 - DNA, 74 bp, Homo sapiens
ggaaagaaatcccactgggcagagcttgaaataagtggcactggagatattattgctgtcatgataacagaatt

SEQ ID NO: 147962 - DNA, 83 bp, Homo sapiens
tgtgatcctagggaaacactcaagaggttatcactacatgctcgctaacctgatgtggaagatgtcaagtttgtgatcaacta

SEQ ID NO: 147963 - DNA, 75 bp, Homo sapiens
tggtggacgaccggtggctgtggcgacatgtcgacctgacgctctacacggtcaaaatgcagatcttcgtgaaaa

SEQ ID NO: 147964 - DNA, 100 bp, Homo sapiens
caagcagagaaaacctgccaatcaagatgagtatggatgatctcaatgccacccaccaacactgtgttttggccggttcacaacctcggtttagttccac

SEQ ID NO: 147965 - DNA, 74 bp, Homo sapiens
tgccttccagcaccttctgctcctcgtgggcatccacctcctcaaggtggaacggcacatgtgtgatggggaca

SEQ ID NO: 147966 - DNA, 98 bp, Homo sapiens
attattactcagaacatctgttatacaaggtattcacacagaccacaatacactgacagcccttgccttttctcttgcagcaacagcccaggctgctc

SEQ ID NO: 147967 - DNA, 75 bp, Homo sapiens
ggcagcgggagggcgcgcggccgagcggaggcggagtcggcgccgagaacatggagtggaagctggacacactat

SEQ ID NO: 147968 - DNA, 80 bp, Homo sapiens
tacattgggagatatttacacacaacttaaaaatcttgttcgaactttcaggtgtcatcaatcttacagaagaagtgctg

SEQ ID NO: 147969 - DNA, 75 bp, Homo sapiens
accagcttagcttctgtcctaaaggtacagagtgaagacagtgtcctcctgtttgttattgcatggacgatcacg

SEQ ID NO: 147970 - DNA, 75 bp, Homo sapiens
ctcccgctccgccctcccttttccctggcctcccagaagttcctgccgaatcgtcttcgtcacccccggggtccg

SEQ ID NO: 147971 - DNA, 101 bp, Homo sapiens
actatttgaaacttttatctcatctggcttggcgcctgaggttctcccattagggagcagctgcccaccctgacagtgaggagcagcagcagcggctgcgg

SEQ ID NO: 147972 - DNA, 75 bp, Homo sapiens
gtgaaatgtcatgcctctgaaaatgaagtgcgacttcatgatagcatatcagaagagggctttcactacttggtg

SEQ ID NO: 147973 - DNA, 79 bp, Homo sapiens
ggttgggatcttcttcactgcctctggcatggatgagcttgaactcagtgaaaatagaatctttggaggtctggacatg

SEQ ID NO: 147974 - DNA, 50 bp, Homo sapiens
ctggggccggggaggagagccaggtgaatttgacaggcaagaagatgaca

SEQ ID NO: 147975 - DNA, 74 bp, Homo sapiens
ggcggctgaggaaagcaggaggaggtggcggcggcgggaagatgagcatcagatccatgctgctgctgactcgg

SEQ ID NO: 147976 - DNA, 100 bp, Homo sapiens
ctggatatttattataagactcttgaccagaggaagaacgtgcaaaacgtgaggagctagagcgaatactggaagagaataaccgaaaaattgcagaagc

SEQ ID NO: 147977 - DNA, 75 bp, Homo sapiens
agaaaactggtcaaggaagctaaagtgaagtcactgcttttgctgtcttggatcaagaccagaaagaaattattg

SEQ ID NO: 147978 - DNA, 100 bp, Homo sapiens
gaacccgtgggcctgtggactgcagcctcggcggtcagcaggtcatctccgcggtgtcgaggctctccctgcacagcatcgcgcagaacaaagggatcag

SEQ ID NO: 147979 - DNA, 100 bp, Homo sapiens
tcatctttgcgcgtcgcagtcgcgcggagcccggcttccgacgtgcagcctggcagtgcagtggcttcatccctccacccctcatcttcggggctggcat

SEQ ID NO: 147980 - DNA, 98 bp, Homo sapiens
gagaccagcctgggcaacatgatttcttcagaggccccacagtatcaaatatccgcctggctggattagagtatgttctgcacttcactgcactgaat

SEQ ID NO: 147981 - DNA, 100 bp, Homo sapiens
gaatgtgtccgtggcgctcgagttcctggaccgtgagagcatcaagctcgtgtccatcgcgtcgagggcgaggcccccagcagtgagactggcacatccc

SEQ ID NO: 147982 - DNA, 98 bp, Homo sapiens
agaagagcgaccagctcactaagaacatgttactaaaagatgtaactgaactgcagatccttggtgaaatatctttcaacaaatctctatatgaggga

SEQ ID NO: 147983 - DNA, 100 bp, Homo sapiens
ccactgaaggcatccgtggttgtttttaagtccaagccttatgcatttgatcgggtgttccagtcaagcacatctcaagagcaagtgtataatgactgtg

SEQ ID NO: 147984 - DNA, 50 bp, Homo sapiens
gctggctatggtacagccctagagtattgggaaagggtcgttgtggtgca

SEQ ID NO: 147985 - DNA, 82 bp, Homo sapiens
cggggaagccgggcgcgtgctgccgctcgtggcgggccgagattgctgtcgtggctgtgatgtgcaaaccccacagatgtcc

SEQ ID NO: 147986 - DNA, 82 bp, Homo sapiens
gcccgccccccaccgccgccccctccggcgtgttcatgcccccggggcctccggtgtggctgtctctgatggtgtcatcaag

SEQ ID NO: 147987 - DNA, 98 bp, Homo sapiens
cacacgcgcagccccggcctctcggcctctgccggagaaacagaagggagaattccacaagttggctgatgccaagatatttttgagcgactgcctgg

SEQ ID NO: 147988 - DNA, 80 bp, Homo sapiens
acggagataaattcccggaaccgcgattcggcgtgtcagtattgcctaagtgtaatcttgaacatgggcggtgctgtgag

SEQ ID NO: 147989 - DNA, 96 bp, Homo sapiens
ccgggttgggctgtgacgctgctgctggggtcagctctagccggcccggtccttggactgaaagaatgcaccaggggctcggcagtgtggtgccag

SEQ ID NO: 147990 - DNA, 100 bp, Homo sapiens
ggagactgtgccgtggagggcctcgccatgtcctgctgcccgggacagtatgatttggtgaaatgcctggctcctattcgagaccccaagaccgagcagg

SEQ ID NO: 147991 - DNA, 90 bp, Homo sapiens
ccaagctctgccggacatggtggtgtcccacctttttgggaagatcctaagtgtgaacgtgaagtccccagccctgctgctgagccagtt

SEQ ID NO: 147992 - DNA, 86 bp, Homo sapiens
gcccgaggacccagaggaaacccagccgcttctggggcctcctggcggcaggctggaagattatatctggatcaccaccagagcaa

SEQ ID NO: 147993 - DNA, 101 bp, Homo sapiens
agattcaaacaaccaaccctgatttcctgcttctccttttcatgagtgttcctgtggtctctgcacctcctttctgaatcaaagatcaactcccactgagg

SEQ ID NO: 147994 - DNA, 74 bp, Homo sapiens
aacgccggggcgcccgaggtctggaaggcgcaggtttttacccagtcttgctaggtcagcattagaaaaaaatc

SEQ ID NO: 147995 - DNA, 100 bp, Homo sapiens
ataacctctacaagaaagttgataaacatttatgtgaagaagagaacttacttcaggtcttgagagctgatgacaataacatgggcaatggctgctctca

SEQ ID NO: 147996 - DNA, 98 bp, Homo sapiens
acatagggatcggccatcacaacagcagcctcttcgaaatcaggaagagagaagggcacagttacctaagtatcaacgtaatcttcctcggccaggac

SEQ ID NO: 147997 - DNA, 78 bp, Homo sapiens
tcccagtttttccctgaggccatttctttcataggtgcagtctttgcaagccacatttggaacttttgagtccatctt

SEQ ID NO: 147998 - DNA, 110 bp, Homo sapiens
cagcacttcacggactgcaagcgaggcacttgctaactcttggttctccaaggatgtcctagtaaacatctattctgcctatatcgataacttcctcaatgcaaaggatg

SEQ ID NO: 147999 - DNA, 75 bp, Homo sapiens
atggcaaacagataaagtccatagatgcaggacctggtatcatgatattagctggtttgacatcaagtcatttgt

SEQ ID NO: 148000 - DNA, 50 bp, Homo sapiens
gaaatctgaatgctgttatcacaaatgcaatggcacatcgtgattctgag

SEQ ID NO: 148001 - DNA, 100 bp, Homo sapiens
cttgcaagagccacatgacaaggccataggaaaaggatacagagtagagtttcatgaacctgaaacttggtggaaatttgatcctgaagaattagaaaag

SEQ ID NO: 148002 - DNA, 100 bp, Homo sapiens
tcaccttaccttaaaccttttaagcaaggaaattgaactaagaaatggagagagccctatgagtttgtctctctggaatggctgcaaaagtggttggatg

SEQ ID NO: 148003 - DNA, 83 bp, Homo sapiens
aatctttagcgttggtcaaatcggaagcgattaagtgccagcaaggtccatattcaagcctttcatctttgttgatgacgtaa

SEQ ID NO: 148004 - DNA, 74 bp, Homo sapiens
gccagcgccgtctacgtgctggacctgaagggcaaggtggaagatggtatcttgaagttgaggaatgctggcaa

SEQ ID NO: 148005 - DNA, 90 bp, Homo sapiens
ggagttcgtctcttacgtctgcggaagtgcagctgcctcagttcttagcgcagtaattcgccaaaatgacgaacacaaagggaaagagga

SEQ ID NO: 148006 - DNA, 100 bp, Homo sapiens
agaggatggctactatttcaccaatctggccgccatggcatcagatgaaggcaaactttttgttggagggctgagttttgacaccaatgagcagtcgctg

SEQ ID NO: 148007 - DNA, 74 bp, Homo sapiens
ggttcctcaccctcggggagcaacatgggctcttgcagccaatgccggaacaggatttgctgttgctgagcctc

SEQ ID NO: 148008 - DNA, 82 bp, Homo sapiens
cgcctgaagccccccttccccgcagacgtgggagtgtctggaccacccaacctgcttgctgtctaggttggttcctttccct

SEQ ID NO: 148009 - DNA, 83 bp, Homo sapiens
gtccccggcgcgaagaggctggactcggattcgttgcctgagtgtgctggagaagagaaacgagttggcacacgcacagtgtt

SEQ ID NO: 148010 - DNA, 76 bp, Homo sapiens
cttgccacagtccacatgtcccggagacagtcattttgtttactcattcagccctgttgcaggtcccaataaactc

SEQ ID NO: 148011 - DNA, 90 bp, Homo sapiens
ctcatgaactcaaagctgcctcttgatgtcctgggcagggttgatgctatgaaactgggagtaaaggaaatgaagaaggcatacaagcaa

SEQ ID NO: 148012 - DNA, 82 bp, Homo sapiens
tgcgggccatctaccagtgcttcgtgtggagcggcacggctgaggcccgcaagcgcaaggtcaaaatgcagatcttcgtgaa

SEQ ID NO: 148013 - DNA, 90 bp, Homo sapiens
gattatttacaatgctaccctgctttttctggtgtcctgaacctggaagttgtgctttttaaggtatatgtctcgagtccacggtatgca

SEQ ID NO: 148014 - DNA, 98 bp, Homo sapiens
tgcttcaggctcctctctttactgctgaagctttacttcgagctcatggaagaagaatttggtgttgatgattcttattctgaacaaggagcacaaga

SEQ ID NO: 148015 - DNA, 101 bp, Homo sapiens
ccacgccgcccaggagacccctctgctgcaccacttcatggacacacacctcctctacgtactggcagctgccaacctgtatgcccagatgcatgggctgc

SEQ ID NO: 148016 - DNA, 75 bp, Homo sapiens
cccctgtcaagaaggtgccggtggtgcgagtcttcggagcgaccccggcagacaaactgggaagattgagcctgt

SEQ ID NO: 148017 - DNA, 100 bp, Homo sapiens
tttctccgcagaatttctgaaggtgttcattccatctctcttcctttctcatgttttggctttggggctagggtacaaacccgtagtgctgatgaaccaa

SEQ ID NO: 148018 - DNA, 88 bp, Homo sapiens
tatccatttcaactacagatactttgaagtagaagaagctgatgcggtgaaggagacctgtgcttggttcactgacaactacgagcag

SEQ ID NO: 148019 - DNA, 82 bp, Homo sapiens
gctcggtagccgtctggctcttggtcgggctcagcctcggtgtcccccagttcggcaaagcctctacagctttacgttccag

SEQ ID NO: 148020 - DNA, 82 bp, Homo sapiens
ccttccatcagtcggatacacacatattcatcatcatgggtgcatcggttatcaatactctggctgaccatcatcatcgtgg

SEQ ID NO: 148021 - DNA, 75 bp, Homo sapiens
ctaaatttgaaaaggagaaaatgaatgccaaatgggacacgcaagccagggctgagcaggaagaagaattcatta

SEQ ID NO: 148022 - DNA, 100 bp, Homo sapiens
tgcttcagaattgattgtatatacatacttcttttctgcctcagaagaagtggttcctgaggatctaccatacccattgactaactatggaagattatac

SEQ ID NO: 148023 - DNA, 100 bp, Homo sapiens
ttgctactgcacggtgaacctggaccaggaggaggttttcaggaccaaaattgtggaaaagtcactctgtattctaccttgtaaatactgttatttgtat

SEQ ID NO: 148024 - DNA, 90 bp, Homo sapiens
cacgtggctcccttggtgttccccttttactgccaggacactgagatttggagaggattgacgtgtctcagaatgaccttccttgggaat

SEQ ID NO: 148025 - DNA, 82 bp, Homo sapiens
gtgaaggcccagggggtcctggggctctggaatggattgacagccaatttactgaaggaatgcttccggatcccaagaacac

SEQ ID NO: 148026 - DNA, 90 bp, Homo sapiens
ctgacatggaggatgatttcatgtgcgatgatgaggaggactacgacctggtatggcatttcaaatatagatacaaccattgaaggaacg

SEQ ID NO: 148027 - DNA, 100 bp, Homo sapiens
atgtggccagttatttgcctcagtaaaagagtggagtctttcattttggatcaggatgatttggaaaatccaatgctggaaacagcttccaagttgctct

SEQ ID NO: 148028 - DNA, 95 bp, Homo sapiens
tcgggaccctcaccgcgactggacttcgctcagcttcagaccctgggctgcagctgcctaatgaggcgtcctgcctctgcggctctgccccctgc

SEQ ID NO: 148029 - DNA, 82 bp, Homo sapiens
cagcaaggcggtgacagaagtgctggccaggaccatcgagtacctgcagcccaacccaggtatgtgaggagcagcgctgtga

SEQ ID NO: 148030 - DNA, 83 bp, Homo sapiens
gacagcgcgaggtccgcgcagcccagcgcagccatacttcccaagtaagaagcggaagaggagccgctggaaccaagacacaa

SEQ ID NO: 148031 - DNA, 100 bp, Homo sapiens
cttcttctccttaagcctgacggaatcacctgactcggaggcgctccctcagaaggaagctttctgaaaaggatatgagcatgctcgaggagaggattaa

SEQ ID NO: 148032 - DNA, 90 bp, Homo sapiens
aagacatttatgaaagcccaaatcacctgtacttggtcatgcagctcagatccagagccagagctctacctcgatcctttctgccctccg

SEQ ID NO: 148033 - DNA, 83 bp, Homo sapiens
attctctgtcatcgtggtggggtccgggctgtggcagtagattctacaggcacgatccgagccaggagacactgagcctttgg

SEQ ID NO: 148034 - DNA, 83 bp, Homo sapiens
aagcagaatgtgatttgcttgaagatatgagaccctcctcatcttttccctgccttccatcctcctgtaccaattgatgccag

SEQ ID NO: 148035 - DNA, 100 bp, Homo sapiens
gggtgaaagctcatgaactcaaggagcacaacggacacatcacagaactctaagaaggagctgatgtggaggagcagctgagacagttcaagatgacgac

SEQ ID NO: 148036 - DNA, 75 bp, Homo sapiens
cgtgaggaggacccgtacatggacaccaccctgaagtataactttgaaaatgcatctcagacatttgatgacctc

SEQ ID NO: 148037 - DNA, 100 bp, Homo sapiens
ggagagaagtggatttgggagacatttaggaggaggatctcctgatgcagtccagcaaagaactttcacatgtggacctccctgaagattttctaaggag

SEQ ID NO: 148038 - DNA, 95 bp, Homo sapiens
ttggaattgcttatgaaggaaaagccatagcaggagttattaaccagccatattacaactatgagacctctgctccttttaaggaaagaccaaca

SEQ ID NO: 148039 - DNA, 100 bp, Homo sapiens
acctggccgccctgcctcccttccaggtgcatctgcagacgcagcaggaggtgaagctgcgcatgacgggcatggcgctgcgggtggtgcgtaccgacgg

SEQ ID NO: 148040 - DNA, 82 bp, Homo sapiens
ggagctgcagtcggcactgctactgcgaagacagctggcagggcagttgggtgagaagcagcttccatcttcaacctcggat

SEQ ID NO: 148041 - DNA, 50 bp, Homo sapiens
caggacccgaagcctaaattccaggaggctctaatggtaccaagtgacag

SEQ ID NO: 148042 - DNA, 100 bp, Homo sapiens
actcacagcattctttcttggcatttttgaatacgcctaccgatgctctggatcaatttgaagttctcagagacggaggcttatcccagcactatccctg

SEQ ID NO: 148043 - DNA, 75 bp, Homo sapiens
ggatcatggccgcagccgctctggggcaggccaaacgtaccaagaaagtcgggatcgtcggtaaatacgggaccc

SEQ ID NO: 148044 - DNA, 75 bp, Homo sapiens
cggacgggccggagggaggatgttaaagccccgcggttctttcagagcacggcttcggccccatcactaccgaca

SEQ ID NO: 148045 - DNA, 71 bp, Homo sapiens
gcagacagacttatgctggaactgggttttagcaagctttggacatcagacagtgcaggagaagaatgtga

SEQ ID NO: 148046 - DNA, 75 bp, Homo sapiens
ggacattatgtaaattgtgaggattcttatgtggctagtttgcagggagatgttaatctctgtggccctaggcca

SEQ ID NO: 148047 - DNA, 90 bp, Homo sapiens
gggccggcccagagctcccgggtcgtctttcgtgtggccgcgaggcggccatcgtgagaatcatgaagatgaggaaggttctgaaacacc

SEQ ID NO: 148048 - DNA, 73 bp, Homo sapiens
gagagatcccgtccgccccagccgcgtctgggccaggagaaaaggtgtgaaatccccgggggagaagtcacgc

SEQ ID NO: 148049 - DNA, 99 bp, Homo sapiens
ccgggactagtggaccagctggtgaaggcagacagcgagtggcgacgatataagaccatcatcatgtggaaactgaccagggatgagaccaactatgga

SEQ ID NO: 148050 - DNA, 82 bp, Homo sapiens
ccaccgctgccctcagctccgagtccagggcgagcacaggaagtcctggagaacctgaaggaccgctggtaccaggcggaca

SEQ ID NO: 148051 - DNA, 75 bp, Homo sapiens
cctcgtgtctgccaccatcttcgacttgagcgaagttttatgcaagcgtgagtgcatctccatccacgttggcca

SEQ ID NO: 148052 - DNA, 97 bp, Homo sapiens
tttgatgtgactcgtcggcgaatgcaattaggaactgttctgccggaatttgaaaagtgcctagctctgatccagccacacgccaaatgctaattgg

SEQ ID NO: 148053 - DNA, 100 bp, Homo sapiens
ccgctgctggcagttttgccaggtgtttgttaccttggagccaaaaacctgtatatcatctccgtgaaggggatcaagggacggctgaacagacttcccg

SEQ ID NO: 148054 - DNA, 98 bp, Homo sapiens
agagttcaaggaggccttccagctgtttgaccgaacagaatagcctaacatggcagaccagagacagcgctcactgtctacctctggggagtcattgt

SEQ ID NO: 148055 - DNA, 75 bp, Homo sapiens
tatgggagcatgggttaccagcgacgcaccctgaaccactcgttttgactattattttatcactctttgtgaaac

SEQ ID NO: 148056 - DNA, 83 bp, Homo sapiens
cacacctggatccaggataacggaggctggcaattctgtggtgttcttggtcacacatttatggagtttctgaagggcagtgg

SEQ ID NO: 148057 - DNA, 73 bp, Homo sapiens
tgcttgcggagcactttgggtttcatttgtaaaggagccggagccccagtggtcctcgcggaggtgatccagg

SEQ ID NO: 148058 - DNA, 83 bp, Homo sapiens
agaagctgaaaaatgtaatcactcaatgggagaatgatttcaaaacttgaagctcaggtcaagcaagtagaacatgaaaatat

SEQ ID NO: 148059 - DNA, 100 bp, Homo sapiens
catgtacagtcagaatattcctgttcctactacagttcctgttcctcttttatcaaaatacaactcaaacctagctactccaatagcaattaaagcagtg

SEQ ID NO: 148060 - DNA, 80 bp, Homo sapiens
ttcagccctggtattcctgcctatcctcgaacctgcactgtggacttttcgctggagaagcgactggaggagtggttggg

SEQ ID NO: 148061 - DNA, 90 bp, Homo sapiens
gacaaggaggacctgcacgacatgctggcctcgctggacctcctgccccccgaggtctgcagtctcctgaacccagcagccatctacgcc

SEQ ID NO: 148062 - DNA, 100 bp, Homo sapiens
cctgcttcttcctgtagagggtgagcgagagccggacccaccggatgaccgggatgcctcagacagacgccagctacccccaccaccaacaccagccaat

SEQ ID NO: 148063 - DNA, 110 bp, Homo sapiens
gacaaccttcaaggatggaacaagaccatggatgggaaggcagatgtatctttcgttctcttttttgactgtaataatgagagggtcattttcaacattgttaacttcag

SEQ ID NO: 148064 - DNA, 83 bp, Homo sapiens
gcaaatttacatacgagaatggcttgtgaaatcatgcctctgcaaagtttaatggatcgagaagtggcgttgcttgctgaaat

SEQ ID NO: 148065 - DNA, 80 bp, Homo sapiens
gaagctggcggagcaggaggatgggcgaaagaactggttgtcttcttgggcggtgttgcagggttcatctttacttttta

SEQ ID NO: 148066 - DNA, 100 bp, Homo sapiens
cctgctgtgattaaacaagactgctgtattttgttatgggtgctacatgtgtgctttcagagcagtagtgtgaggaagcttggagtgggatggcaggacg

SEQ ID NO: 148067 - DNA, 100 bp, Homo sapiens
attggaccctcctcccaactgtagaaaggcctaaagaatgtatttgacgaagcaatattggctgccctggagcctccagaaccgaagaagagccgcaggt

SEQ ID NO: 148068 - DNA, 75 bp, Homo sapiens
tttatgcaatgactttggtgaacaagggtaaaccagacttgaatacaacattgccaattagacaaacagcatcaa

SEQ ID NO: 148069 - DNA, 117 bp, Homo sapiens
gtcgcgcccgggaggaaggaacgaggcaaggagctaaagcagcgtgcgttcagccctggggtgtcgtgaaaactacccctaaaagccaaaatgggaaaggaaaagactcatatcaac

SEQ ID NO: 148070 - DNA, 75 bp, Homo sapiens
tcctccccggctttctcctcctcctccagttaccaccctcctccctagcataaaattggatttgtcctgtatccc

SEQ ID NO: 148071 - DNA, 83 bp, Homo sapiens
ctgtcagcatggcccaggctcctgctgacccgggcagagaagtgtgtcccggcatggatatccggaacaacctcactaggttg

SEQ ID NO: 148072 - DNA, 87 bp, Homo sapiens
tggagcccagagccacgtcaaagtctatgaaaattatcctacttatgatttaactgaaagaaaagatttcataaaaacaactgtaaa

SEQ ID NO: 148073 - DNA, 75 bp, Homo sapiens
aaccacctacatcagagctgactgcctctcggtcgtcacgctgtggtacagagcacccgaagtcttgctccagtc

SEQ ID NO: 148074 - DNA, 100 bp, Homo sapiens
ggaaactgacagctgtggatcctgaaacaaacatgaatgtgttctgggaggtgatcagtgatgaacatggcatcgaccccaccggcacctaccacgggga

SEQ ID NO: 148075 - DNA, 75 bp, Homo sapiens
agtctgcggccaagactccgtcctgcaaggaggagcatattatttaatatctagaagtctagggccagaatttgg

SEQ ID NO: 148076 - DNA, 82 bp, Homo sapiens
ctcatcaggaagcgcggggcggcggcgaaaggacgtttggtgccctggttgtcagatgttggaaagcagtaggacggaacat

SEQ ID NO: 148077 - DNA, 98 bp, Homo sapiens
cggggcaatgcactagaaaagaagtctaactatgaagtattagaccaaagtttaattaatctcctgctgacgggacatgctgtttctaatgtatggga

SEQ ID NO: 148078 - DNA, 100 bp, Homo sapiens
ggatgctgatagtctccagcgggcctggactgtgggctggtgtgtggaactgaatgagctgaaagccagtggtggcgaaatcaaaattcataaaatggag

SEQ ID NO: 148079 - DNA, 100 bp, Homo sapiens
ggcccatgaaagagtaccacggaaactcaaatgcaccttcacatctcccaagctcctctggtgcaagtgtggtagctattgacaacaaaatcgagcaagc

SEQ ID NO: 148080 - DNA, 100 bp, Homo sapiens
gcggtgttcccggctccgtggggccgtcttcccggcgagtccgcgacggtcgccgcccacggcgaggtcctaggcctacttacaagcctccagtctcaaa

SEQ ID NO: 148081 - DNA, 75 bp, Homo sapiens
cactggaaaagataaactccttttcgccacagaaaaatgttgtaccatctttgggtaggcagacttccctgacga

SEQ ID NO: 148082 - DNA, 48 bp, Homo sapiens
ttcatcactcgtgacttcactcagccatcgaaagctgctttgcgtcgc

SEQ ID NO: 148083 - DNA, 90 bp, Homo sapiens
ccgacatcttcctgcacatctctgaggtggcaatgaccatgagatcttcacagaccccagaaccatgggctactccgtgacagcgcctga

SEQ ID NO: 148084 - DNA, 75 bp, Homo sapiens
gcctaacttctactgacgaagcttggaagttgcagaaggcaagaaactatattcagtctttgactcagatgccga

SEQ ID NO: 148085 - DNA, 100 bp, Homo sapiens
actttctcctggggaacccgttcagctctccagtgggacagcgcatcggaccttgcagatgcttcgggagaacctggaggaggaggccatcatcatgaag

SEQ ID NO: 148086 - DNA, 80 bp, Homo sapiens
tattttgaataaatcagaaactggtatctcagatgaagacatcatcaacattactcttcctactggagtccccattcttc

SEQ ID NO: 148087 - DNA, 98 bp, Homo sapiens
caagaccatggagacgctccatctggagtactttgaagaagccatgaactacttgctcagtcatcccgagcctccacagccacggggacaccctgcac

SEQ ID NO: 148088 - DNA, 75 bp, Homo sapiens
caaccacgcactcctcaacaagaaggacgtggaagaggcagtctcgatgcttgctctgtcaaggcacagcctatt

SEQ ID NO: 148089 - DNA, 99 bp, Homo sapiens
cgagtcccgcgtcgccatggccgcggttcccgagttgctgcagcagcaggaggaggaccgcagcaagtactatactggcaattgctggagaagattttg

SEQ ID NO: 148090 - DNA, 83 bp, Homo sapiens
gaacgaggcaaggagctaaagcagcgtgcgttcagccctggggaattgcattttgtgaaaaaagaacaagaattttctgcaag

SEQ ID NO: 148091 - DNA, 100 bp, Homo sapiens
tattggtgtcccatggagctagtctcagtgcaaggacatccatggatgagatgccaatagctaggtcttgactccactaacggggacttctcatacggct

SEQ ID NO: 148092 - DNA, 75 bp, Homo sapiens
caaaattaaaagaggagcagcatggcatttcagtcactggtttgcagagtccagctccttgaggagaatgaccag

SEQ ID NO: 148093 - DNA, 100 bp, Homo sapiens
aagtttcacatccttgtctgtgaagctaaactcaatgctgctgtgtgggaagaagatttgtaaagaaaactcttagatgcctttgagtaatggacagatg

SEQ ID NO: 148094 - DNA, 100 bp, Homo sapiens
attcaaacttcaacagaatgtggcaaccaggttacaaaagcaggttggtcactggaagatgttgacatatttgaaatcaatgaagcctttgcagctgtct

SEQ ID NO: 148095 - DNA, 96 bp, Homo sapiens
tcgactcggtcctgtttcgacagcgaacatgtcgcggcctgtcaggagacggtggctcagggagtaaaggaaggccagttgagcaaacagaagtgt

SEQ ID NO: 148096 - DNA, 125 bp, Homo sapiens
aaaagagtctccgcggtggaggtctgcgttgctcttgcttttcctcgctggggtgtacggtgctgctacccccgtatgatgatgccactgtgaatggtgctgccaaggagccaccgccaccttac

SEQ ID NO: 148097 - DNA, 75 bp, Homo sapiens
gttcacccgctgccgggcaccgaggaccagctcaatgacaggactcaaatggatgctaaaaagccaaggaaatgt

SEQ ID NO: 148098 - DNA, 50 bp, Homo sapiens
ggatggcgcatcacacaccaaagatcctgcagctccaccaaagaaaccgc

SEQ ID NO: 148099 - DNA, 110 bp, Homo sapiens
ggcccaccctacatttagcgcatcatgtgatccggtgagatggaagattttcgaggtatagcagaagaatcatttccaagctttctcaccaattcattatttggtaacag

SEQ ID NO: 148100 - DNA, 50 bp, Homo sapiens
gcaggagcaggatgcagaggagaacgatgaccacctaagaaaggaggaac

SEQ ID NO: 148101 - DNA, 100 bp, Homo sapiens
gttaaaaaacaggggccaaatttacataattggagtggtgactggagcttttggctgaatgcaatatccatacatctccttctccgggaattcaagtaag

SEQ ID NO: 148102 - DNA, 83 bp, Homo sapiens
gtcaacagaaagttctgaggatctccaagtaaaagccttggacaagattcgctatgagagcctgacagacccttcgaagttgg

SEQ ID NO: 148103 - DNA, 100 bp, Homo sapiens
ttttgaaagaacatgaccaccttcgaaagtgctggagaatctggtaaaagcaccattgtgaagcagatgaggatcctgcatgttaatgggtttaatggag

SEQ ID NO: 148104 - DNA, 50 bp, Homo sapiens
aaggattccaagtaactcttatttgatgtgccgtttgggggtgctaaagc

SEQ ID NO: 148105 - DNA, 50 bp, Homo sapiens
gcggcggcggcggcggccctccggttcagcagatagatcgtgtggtagaa

SEQ ID NO: 148106 - DNA, 82 bp, Homo sapiens
taattcagtggataaaactaccacagatgaggctgccagccttgagagcaccaccgttacctggttgaagaggggaggggaa

SEQ ID NO: 148107 - DNA, 75 bp, Homo sapiens
attactgcgagaacaactacatacagaaggcaacagactactgcaacagaaactatccttagatgggaaccccaa

SEQ ID NO: 148108 - DNA, 82 bp, Homo sapiens
tgctggccggggtgcagtaccccagctccatcaacctcacgctgcacctgggttatgaagacagtatggagtttccagacca

SEQ ID NO: 148109 - DNA, 73 bp, Homo sapiens
aaagaaccattgaaaaatttgagaaggaggctgctgagatgagaaagggcaacaccatgcagcagttcctgca

SEQ ID NO: 148110 - DNA, 83 bp, Homo sapiens
tgggaaagaagctcgcaaaagcagcaaacaggcagtaatcgaggctttatcctgtggataaacgcagagtgaacgagtttggg

SEQ ID NO: 148111 - DNA, 75 bp, Homo sapiens
gcaatatggcggaggcggaaggggaaagcctggagtcctggctcacctccttttctgaaagagttcggaacatgt

SEQ ID NO: 148112 - DNA, 80 bp, Homo sapiens
tctcctcagggaaggggcagcacaacactgtcacatgaacccaaagtccttcaagagggtctccttcagttggactccat

SEQ ID NO: 148113 - DNA, 101 bp, Homo sapiens
ctgtaatgttccaggacacctgccatcatggagggttatccagcacctggaggatacctgctaccttaatctatgccagcaattatgacaatgttagcaga

SEQ ID NO: 148114 - DNA, 90 bp, Homo sapiens
tgggtcaggacaattccatttggggaccagagatggacggtcactcagcctatggaggtgcagtagacattgttgcaatcatgatcggca

SEQ ID NO: 148115 - DNA, 75 bp, Homo sapiens
aactcgtcatgctctttgtagcgtggtgcttctgttgctcacaggtgcatggctgcctcctaatcccatagtcca

SEQ ID NO: 148116 - DNA, 100 bp, Homo sapiens
ctgccttccttgcagaggccatggaggacgaggagagacagaagaagctggaggccggcaaagccaaggaaggatgccaattctgcgcttctcagtaact

SEQ ID NO: 148117 - DNA, 90 bp, Homo sapiens
ggttcgggctggttgttccgttgcgagctgcagctgcgatctctgtggtaggcccagcctcccctggtgaagacacaaactgtcaccatc

SEQ ID NO: 148118 - DNA, 100 bp, Homo sapiens
ttttgtcaattaggtcacttcaacctcttattggaagattatccaaaaggtgttttgaagtcttctgcatctactttcagtcaggcaacaatgaagagcc

SEQ ID NO: 148119 - DNA, 95 bp, Homo sapiens
caggtcactgccggctgaacggagctgccgtcgccatgtttggctgcttggtggcggggaggctgaagtctctattatctgggggaatgtatcag

SEQ ID NO: 148120 - DNA, 101 bp, Homo sapiens
aaagagcagtgggggttgctgacccagaggagagttctccaaacatgatcgtttactgcaaaagagcagagctgacatctgataaagacatgtaccttgac

SEQ ID NO: 148121 - DNA, 82 bp, Homo sapiens
aagggaagagatgatttctccatcctgaacgtgcagcgacctgcctagagctggaacgttacctccagagcgagccctgcta

SEQ ID NO: 148122 - DNA, 96 bp, Homo sapiens
attggaaactctttgggaaagccactcgaaaagggaggtggggaagacagggctccagctaccacaggacgggctctgggtatagccgttccagtc

SEQ ID NO: 148123 - DNA, 101 bp, Homo sapiens
tggatgtcggcgaagccgcgggcgaggtgaagcaaatcatggaggaggctgtcaccaggaagtttgtgcatgaagacagcagccacatcattgctttatgt

SEQ ID NO: 148124 - DNA, 88 bp, Homo sapiens
aacatggcgaaggtggagcaggtcctgagcctcgagccgcagcacgagctcaaattccgaggggatcccaacaagccctcaggattca

SEQ ID NO: 148125 - DNA, 100 bp, Homo sapiens
aaacagtggataattttgtggccttagctacaggagagatttggattcctagacttgcccaagcacttctgtctgctgtagcagatgtgagactttactc

SEQ ID NO: 148126 - DNA, 100 bp, Homo sapiens
cgacgcggctggcaagactgtttgtgttgcgggggccggacttcaaggtggggaccaaggcatactgaacacattttttagcagctgggcaacaacagat

SEQ ID NO: 148127 - DNA, 100 bp, Homo sapiens
actaacaagctgcgtgatcttcggtgtgatgaatgcagactctgctaccattttggctgtttggatcctcctttgaaaaagtctcctaaacagacaggct

SEQ ID NO: 148128 - DNA, 96 bp, Homo sapiens
tcgtgttccaaatcatcgcctttctggtgggaggcttgattgacctagaggatcaagacataatgggagcatttttagacaagccaaagatggaaa

SEQ ID NO: 148129 - DNA, 50 bp, Homo sapiens
ccagccaatgaagatgaagacataggagcacaaacgtgcagatatctgat

SEQ ID NO: 148130 - DNA, 75 bp, Homo sapiens
ggttccctggccgcggcgaccggtggtcccacgtccagccgggctcagtgaggcatgaagaactcttgactgaca

SEQ ID NO: 148131 - DNA, 73 bp, Homo sapiens
cggagtccgccccgtgaggagaatgtactatactggcaattgctggagaagattttgcaattgttgcttctga

SEQ ID NO: 148132 - DNA, 76 bp, Homo sapiens
gaagcacctggatgagacatttgctacagcatcccacattaagtcaacggaacgaatgcaggaatttgggaactga

SEQ ID NO: 148133 - DNA, 100 bp, Homo sapiens
aaataaaacagctgttttgcagattggactacaaggtggaatacatgttggtatcttttgatcatgaaaataaaaaagtccggttggtcctgtctgggga

SEQ ID NO: 148134 - DNA, 100 bp, Homo sapiens
ccaagcgttccatttgaacacgttaaaggaatcaaagagcctctgggatagggcatcaagttatcagcagatgtcaaaccatttgtccccagatttgccg

SEQ ID NO: 148135 - DNA, 100 bp, Homo sapiens
gcaagagtgacataggagaagtgattcttgtgggtggcatgactaggatgcccaaggaattgaatgatctggcacgggaccctccagcacagtgttcagc

SEQ ID NO: 148136 - DNA, 100 bp, Homo sapiens
gcgcctttgtgcgcgcgccgaggtgtctggagtagatttgcagaatgcctcacacagcgaagcagttgaggccattaagaatgcaggaaaccctgtggtg

SEQ ID NO: 148137 - DNA, 75 bp, Homo sapiens
ggcgggaagaagcaggtgcagaagctggaggccaaggtaactactccagacccccagcgtatagtggggtgccca

SEQ ID NO: 148138 - DNA, 100 bp, Homo sapiens
tttggaagacccttctgcctcccatggagggcagactgacgcttacctgactctgaccaggctttttgaaagcaaagatgagcaacactcaagctgagag

SEQ ID NO: 148139 - DNA, 100 bp, Homo sapiens
gggatgatggggaggccctgcctgctcacagcggggcgcccctgcttgtggaggagaatggcgccatccctaaggctgcaggtgcaccaggagctgcgag

SEQ ID NO: 148140 - DNA, 90 bp, Homo sapiens
ttctcacagacaccgttcaccttgtcactgactcccccatctactgacctcccagggacgtccagatcggtgacatcgtcacagtgggcg

SEQ ID NO: 148141 - DNA, 135 bp, Homo sapiens
gatggtgtggccagagcgttcctcaaggcccaggctgctttcttcggtagctaccgaaacgctctgaaaatcgagccgggtgggagggatgaaggaaattatctggacgatgctctcgtgagacaggatgcccag

SEQ ID NO: 148142 - DNA, 82 bp, Homo sapiens
aagacactccccagggcagaaatagcgaccatggcgaggtaatcattaccaaatgaggaggaaaggacgatgtcatcgaggc

SEQ ID NO: 148143 - DNA, 100 bp, Homo sapiens
ggaaggctttattggcagaaggtgtcattttaagacgagtaggcgaagcaaggactgtctatgttaacaatgaatgggcaaccagtgttggggaaggagg

SEQ ID NO: 148144 - DNA, 90 bp, Homo sapiens
tactgatatatcatatagcataccacaccgggcacggagtgtgaatgtgaagacacaagctctttctggatacagagaccaatttagttt

SEQ ID NO: 148145 - DNA, 83 bp, Homo sapiens
cccctacatttggagcctggacacgcagtacagcaaggaggaattctaaggaaaggtgcaaagctgttcttccgccggcggca

SEQ ID NO: 148146 - DNA, 98 bp, Homo sapiens
gccgcggggcagttcgggccggctgtcctggcgcgcaagttgccttatgatgtgaccacagaacaagctctaacatacccagaagtgaaaaataaact

SEQ ID NO: 148147 - DNA, 90 bp, Homo sapiens
acgtgaccgtcactgacgtggacatcgtcttcagcaagatcaaaggttgacggatatattcagacgttacgacacggatcaggacggctg

SEQ ID NO: 148148 - DNA, 100 bp, Homo sapiens
cgcatgtttgctgactacctcgcccacgagagtcggagagcaagctataccagagaatcagatagcaagccctccctcagaggccaagggagcagaagag

SEQ ID NO: 148149 - DNA, 96 bp, Homo sapiens
ctgaagaggaattgcctcacctgctcaccgaaaggatttctctatgaatcatcatcaagaactctgggagaacttttgaattcataaccaagccaa

SEQ ID NO: 148150 - DNA, 76 bp, Homo sapiens
ctacaagggatcaagatcagctccaggcctgggaaagtgaagactccagttccaacaccatcttctgagatgatcc

SEQ ID NO: 148151 - DNA, 90 bp, Homo sapiens
gtcgccggacccggtgtggagagcggtgctgaggctacgcgggctggagactcagggaaaatgttggggcttttcaggaagcataataag

SEQ ID NO: 148152 - DNA, 74 bp, Homo sapiens
gcctgcagagctgtggcttaccaggtggataagattgtggaccagctgcagcagttaatgcaggtgtatgactt

SEQ ID NO: 148153 - DNA, 126 bp, Homo sapiens
ccccgggtcgcccgcagctcccggtccagctccgcccacagactcggatggcgaccgcactgagggacccggcttcggacccagatgatgtggtaccagttggccaaagaagagcctggtgttggt

SEQ ID NO: 148154 - DNA, 50 bp, Homo sapiens
cctttcgccttcttcctgcccgagctggaagagaatggagactacacata

SEQ ID NO: 148155 - DNA, 51 bp, Homo sapiens
tcaagagcacagtcttatgtaagattgacatatttgaggatagaatccgag

SEQ ID NO: 148156 - DNA, 98 bp, Homo sapiens
catagaggcagacctccagaactacctgtaaattatgtgaaacctccaaatgtgggcagtcgatgatgtgaagaaaggttacatcaaagcagaagaaa

SEQ ID NO: 148157 - DNA, 100 bp, Homo sapiens
ctaagagcctgcagccaagcggccccagcggaaaggcgcagatacccggagacttcccagagagactcgacccaccaaaaagcgcaccgcggccgcgcag

SEQ ID NO: 148158 - DNA, 75 bp, Homo sapiens
gttaatacaaggcaaatcatatcttggatcagagcttcaaggttactgactttttatgatgtttggtggctatga

SEQ ID NO: 148159 - DNA, 75 bp, Homo sapiens
ttgcgcaggcgcatccgatcgactcgccttagattgtaagcaaaagaaatcaaggtcaagatctggaagcaagaa

SEQ ID NO: 148160 - DNA, 75 bp, Homo sapiens
attcaggatttcttaaaggatagccaattgcagtttgaggctgtgattcggtctgggcaaaaattaaggaaaaag

SEQ ID NO: 148161 - DNA, 87 bp, Homo sapiens
cgtaccttacccaactctactgctgcttccagaccaagcatgacgtatcccagactttactcaaggcaacactggacagtgttgtag

SEQ ID NO: 148162 - DNA, 100 bp, Homo sapiens
gagaaatacggcggggacgtgctggccggccccggcggcggcggcggccttgggccggtggacgtacccagcgctcggctgagagcacagacaaaacaac

SEQ ID NO: 148163 - DNA, 83 bp, Homo sapiens
cctagaagtctactaatggacagttagtcacccacctacatgttgagatccgtgagagatttgtaaaagagccagcatttgag

SEQ ID NO: 148164 - DNA, 98 bp, Homo sapiens
tcagaagagccaaggaataaacatgcaatgaacccaaaaggatggccatgctgctgaaacttcaagaagctgccaactacattgagtctccagatcga

SEQ ID NO: 148165 - DNA, 75 bp, Homo sapiens
accagtgatgtgtcagccatcgaaaagttatcaatactctggctgaccatcatcatcgtgggactgactttggtg

SEQ ID NO: 148166 - DNA, 83 bp, Homo sapiens
tgtagcaaggaattaccttggagaggctgtgagccacaatgcatcgctggaagtagccagtggaaattcttgcttctcttcag

SEQ ID NO: 148167 - DNA, 75 bp, Homo sapiens
caaggcactgctttttcatgacgttcaaatctgaacatcaatgatgtactagggaactactcattgactcttgtt

SEQ ID NO: 148168 - DNA, 100 bp, Homo sapiens
ggagtcatcatgtacatcctccaagcagctgatccgcctcctgttgaagacagaccccacagagaggctgaccatcactcagttcatgaaccacccctgg

SEQ ID NO: 148169 - DNA, 158 bp, Homo sapiens
ctgttgtattgcaatcatggtgcagaaataccagtccccagtgagggtgtacaaatacccctttgaattaattatggctgaattacatgaatgacagtcttcgaaccaatgtgtttgttcgatttcaaccagagactatagcatgtgcttgcatctac

SEQ ID NO: 148170 - DNA, 51 bp, Homo sapiens
ctctggtaccattaaggcaaaattggccctagactacttggccattggcat

SEQ ID NO: 148171 - DNA, 100 bp, Homo sapiens
atgtaaagaagttcctcgagcgatctggacccttcacacaccctgatttcgaaccgagcactgaaatgccggtggccgtgggtccctacggacagtccca

SEQ ID NO: 148172 - DNA, 101 bp, Homo sapiens
catgaccagtgctctgcccatcatccagaagctagagccgcaaaattttgttggcccccatttgaccaaaaaagtgacactgaattccgaaaacattgctg

SEQ ID NO: 148173 - DNA, 49 bp, Homo sapiens
ctgcgatctctgtggtaggcccagatcatgagcgtcttgttgttcatcg

SEQ ID NO: 148174 - DNA, 100 bp, Homo sapiens
atatgccaaggaaaaactggagagcttcatcaaaaatagtgatagctttgataatcttagagtttgaaagagtctatcttgataatctccccagtgcatc

SEQ ID NO: 148175 - DNA, 90 bp, Homo sapiens
ggcaggtacacttcttcaggctgtgtcctctgtgcagcatcccagccatcactcttccacctgctccttagagaagggaagatgagtgag

SEQ ID NO: 148176 - DNA, 80 bp, Homo sapiens
ctggaaccgtctgagcggcctaacccgcgcccgggtagagccctggacccatccaaggacccctgcctgaaggtaaaatg

SEQ ID NO: 148177 - DNA, 126 bp, Homo sapiens
cctctgcaagcgttagacttctttgggaatgggccaccagttaactacaagaattatatccagatcgagagacagaagattctgaaagggttcaatgaaatgagagtcatcttggacaatgaggag

SEQ ID NO: 148178 - DNA, 97 bp, Homo sapiens
tctgacatggaggatgatttcatgtgcgatgatgaggaggactacgacctgggtaattttgggagtgtggagatgtgccggtatgaccctctacagg

SEQ ID NO: 148179 - DNA, 121 bp, Homo sapiens
ttccaaagagatacagggcagaggaaaatgcaagaagactgatggagcaggcttgcaatattaaacaactggaacagatccagaaggagctaagtgttttggaagaggatattaagagagt

SEQ ID NO: 148180 - DNA, 102 bp, Homo sapiens
ttgcaacacagtagtggtttctgctcctaaccaaccccgacaaaagataagaaaggaggtattcgaacttctggaaatgggagtgctcagtctgtgcaagtc

SEQ ID NO: 148181 - DNA, 121 bp, Homo sapiens
ggcaaatgtcagatccagcctgctcaggtgaagatcagaagccgtctcatcccctttgtgcccaaagaaacatgaagcgtgccagctctctgaatgtccttaacgtgggtggcaaggctgc

SEQ ID NO: 148182 - DNA, 74 bp, Homo sapiens
accccttcgagcaggtggtcgccagctttctccgaaagatgtgatgctgatccttcagccttagccaactatgt

SEQ ID NO: 148183 - DNA, 75 bp, Homo sapiens
gtgcgcagcctcgagtttgagagctacccggagctccaagacaggggtgtgggccatcggcgagtacctgtcggt

SEQ ID NO: 148184 - DNA, 50 bp, Homo sapiens
aaacgaccggagatactgacagatgagtgtacacaggcccctgcccctgc

SEQ ID NO: 148185 - DNA, 142 bp, Homo sapiens
gcttggtgagatccccgctgacttcttcgtagacattgtctcccaagacaacttcctcaccagcaccttacaggatagctgccgcccgggagaggtgacccgggcgccctgctagggtgaaggcccctgccctcggcccggg

SEQ ID NO: 148186 - DNA, 98 bp, Homo sapiens
ggaacaggaccttaaggagaaggaagatactattaaacagaggacaagtgaggttcagataagaaggctgactgcacaatcacaatggctgactcaga

SEQ ID NO: 148187 - DNA, 100 bp, Homo sapiens
cctggatctgaggatgtgaaacttaaatttgaagagaacttttgagcatgctgttctagctgcaggaacagatttccgttctgacagactgtgggaaatg

SEQ ID NO: 148188 - DNA, 100 bp, Homo sapiens
ctccaaggcccgcccgggagggccggggccgcgctcagggccaattcctgtccccccagcagcatggcatcgtgtgctgaaccctctgagccctctgccc

SEQ ID NO: 148189 - DNA, 82 bp, Homo sapiens
acctatggccgtggctaccccggatttgctccaagctatggctatcagttcccaggtactccaaagattcaggtttactcac

SEQ ID NO: 148190 - DNA, 82 bp, Homo sapiens
cttttctacagcttctgataatcaaccaactgttacaatcaaggtctatgaagatccaaaattaacgggacaggctcttatt

SEQ ID NO: 148191 - DNA, 104 bp, Homo sapiens
ctgttttctgccggctgtaaagtcatcacctcctgggatcagatgtgcattgaggaactgtggctgcaccatctgtcttcatcttcccgccatctgatgagcag

SEQ ID NO: 148192 - DNA, 50 bp, Homo sapiens
atcatgaaggacgtgcccgactggaagcgagtgatagacagccaagcaga

SEQ ID NO: 148193 - DNA, 96 bp, Homo sapiens
gggtatgtccagggaattaatgacctggtcactccattctttgtcgtcttcctctcagaatatgtggctacttccatatttgcactaaaggagatt

SEQ ID NO: 148194 - DNA, 50 bp, Homo sapiens
cagatggcagccagtcagtggtggagaagaatggttgagaccggtgatga

SEQ ID NO: 148195 - DNA, 99 bp, Homo sapiens
cattcaaatcacataccccagttgcaagctaagggcccagtcccttctttcagtgaacttatggaaggtctctcgggtattgaggcagaagaaaacttt

SEQ ID NO: 148196 - DNA, 101 bp, Homo sapiens
ttgccaatgttggagccgtctgcaaagtgtccccggcaagaaggaatgaatctgaagtctgctgcagtaaaacacagaaggctttaaaatgttttcttgca

SEQ ID NO: 148197 - DNA, 74 bp, Homo sapiens
cagatttccaaagagtcttccatggagcgcaatccttattttgataagattcagaaacacgagttgatctgaaa

SEQ ID NO: 148198 - DNA, 100 bp, Homo sapiens
gcctgaattaccacagtatgatcaggataatctaaagtcatacggagatgaagaagaagagccagccttagcgtcctccaggctttgaccgtgtccgaaa

SEQ ID NO: 148199 - DNA, 75 bp, Homo sapiens
acgatgtgaacatcgaatcatggaatcccttgcatggctctcagtcctcatgctgataccgccagtggatgccag

SEQ ID NO: 148200 - DNA, 82 bp, Homo sapiens
gcaaaggagtcagggatggctcttcctcagtccctgcactaggtcagacaatcccctttggggtacaggaaacaaagcagga

SEQ ID NO: 148201 - DNA, 75 bp, Homo sapiens
cccagaccctctcctttccctttgagaccgtgaagagaaagatgcagaaaaatagtagtctagtcattcaagtga

SEQ ID NO: 148202 - DNA, 82 bp, Homo sapiens
cgagcatctgggccgagaccattccgtatggagagccgggatgtcagtgggggaggacccgcacgttcttacccagttggag

SEQ ID NO: 148203 - DNA, 95 bp, Homo sapiens
cacagatacagcagaccaagtcatggcttccttcaagatcctggctggggacaagcatggagatatggaccaaaaggaacgagacgtgattatga

SEQ ID NO: 148204 - DNA, 100 bp, Homo sapiens
tgcaggcagaagctgagacggctaaggttatgaagacagtatggagtttccagaccatagtagacatttgctacagtgtctgagcgagcagagacaccag

SEQ ID NO: 148205 - DNA, 83 bp, Homo sapiens
ctgaagaacaaccgcaggtcgaattgttcgtgaaggcacctgaatggacagaagaggacctcagccaactgacaagaagtatg

SEQ ID NO: 148206 - DNA, 100 bp, Homo sapiens
cccgaggtccccgccccgcccgcctggctctctcgccgcggagccgccaagatggggagcttggggcttccttggtcgcacccaccacctgcctgcccac

SEQ ID NO: 148207 - DNA, 50 bp, Homo sapiens
agaagcagaacccagctgaaggactggaggagatgttaaagtaacccatc

SEQ ID NO: 148208 - DNA, 100 bp, Homo sapiens
ctggacatttgaagttagcagattttggtacttgtatgaagatgaataagcaaagaacagtctgaacttgatcaagatttggatgatgttgaagaagtag

SEQ ID NO: 148209 - DNA, 87 bp, Homo sapiens
gggaaacaaggcttccagtgccaagtggttggatttcatcccttactggtctcaaccaaaatattcctgttggaatcatgatgataa

SEQ ID NO: 148210 - DNA, 50 bp, Homo sapiens
gcctcccgaatagctgggactacagggctgcaagtggaattcatcaaccc

SEQ ID NO: 148211 - DNA, 101 bp, Homo sapiens
ccgaggtctgcagcgacttcctcaaaggctactgccccctgggtgcaaaggaaatggcggtggaagagagggaagtcatcaagagcctggacaagtgtgac

SEQ ID NO: 148212 - DNA, 75 bp, Homo sapiens
aggaggagcagatcatcctggaggaccagaactgcaagctggccaagggcttctacaagagtgggaagtttgtgt

SEQ ID NO: 148213 - DNA, 50 bp, Homo sapiens
cggagctcgtccagctgcgtgcctaggatcaacggccaccccgggaagtc

SEQ ID NO: 148214 - DNA, 50 bp, Homo sapiens
gcctcctgcagcccccatagcaggttatcaatagtctggctgtctatcgt

SEQ ID NO: 148215 - DNA, 98 bp, Homo sapiens
cgccccaccccgccagctccagagccactatgacctgtcagcctctacattctctcctgacggaagagtttttcaagttgaatatgctatgaaggctg

SEQ ID NO: 148216 - DNA, 100 bp, Homo sapiens
tgacctcggacacttcaggcatctgcaacctccgtggcagtaagaaagggaagacaaaggcgctttggctaagctggtggaagctatcaggaccaattac

SEQ ID NO: 148217 - DNA, 100 bp, Homo sapiens
cgggcacggagccgcccgcgcacttccaggtgcacagcgcgggagccgtcacggtgctcaagtggatgcctggactttggccttttctcctgattcccag

SEQ ID NO: 148218 - DNA, 100 bp, Homo sapiens
ccctacatttagcgcatcatgtgatccggcgggagatacagatgacccaccaagaattactcagaaccctgtgatcaatgggaatgtggccctgagtgat

SEQ ID NO: 148219 - DNA, 110 bp, Homo sapiens
gatctttccggatcaatccagatggcagccagtcagtggtggaggtggggtggaagacaacccgtgagtattacaccttcatgtgggttactttgcccattgacctaaac

SEQ ID NO: 148220 - DNA, 100 bp, Homo sapiens
gaggagcgccagatggtggaggaatacacttatttatgaaccaccagtggtaaaaacagagatggtaacaatttctgatgcctcacaaaggacagaaatc

SEQ ID NO: 148221 - DNA, 100 bp, Homo sapiens
aaggcgaccttccttgctttcagaatttcacccaggttctgacagaaatgcactcggtgatggaaagagagccactattctgaagaacacttggccaaag

SEQ ID NO: 148222 - DNA, 98 bp, Homo sapiens
gacggttcctgctgtggctgcccaccccctcattgcaccagactgaggaatcagagttctgattgtggagtgcctctctctaggacggggctgcagca

SEQ ID NO: 148223 - DNA, 100 bp, Homo sapiens
atggaaaatcgcttggttaaaacctgacacttttaacaggattgaaagccacaaccactgatgtcaggaagaatgactccatcatttcaaacgtaacagt

SEQ ID NO: 148224 - DNA, 100 bp, Homo sapiens
aacgccattatgggcagtgggattttgggactcgcctttgccctggcaaacactggaatcctactttttctctcattgctatggacagtgctatcaccct

SEQ ID NO: 148225 - DNA, 75 bp, Homo sapiens
caatgtcaacattgcccagcaagtggtgttgctggaagaagccaaggatttgctctctgactggctggattctac

SEQ ID NO: 148226 - DNA, 90 bp, Homo sapiens
accgagggggagccccgcgcgcggcgtcggtgtgaccatgaagctcatggatgaggtcgccgggatcgtggctgcacgccactgcaagac

SEQ ID NO: 148227 - DNA, 100 bp, Homo sapiens
aactgtgagacatgcacttgctacgaaacagaaatttcatgttgcaccctgtacaaatgatgcaaaatgtgcacctggctccagagacagatgaagatga

SEQ ID NO: 148228 - DNA, 50 bp, Homo sapiens
gttggggcggcctggctccctcagattgtcacagaccagcagacaggaca

SEQ ID NO: 148229 - DNA, 75 bp, Homo sapiens
gctgcagcgcccaccctgcgccagagaccagataaagacttaaccaccaccatgtcgagcaaaagaacaaagacc

SEQ ID NO: 148230 - DNA, 135 bp, Homo sapiens
agctcaggacagggctgaggaaccatgtctccatccccgaccgccctcttctgtcttggtactccaaagattcaggtttactcacgtcatccagcagagaatggaaagtcaaatttcctgaattgctatgtgtct

SEQ ID NO: 148231 - DNA, 75 bp, Homo sapiens
aagaagacaagcccacacttccagaaatttcaggggccagtgtcattcaaagatgtggctgtggatttcacccag

SEQ ID NO: 148232 - DNA, 100 bp, Homo sapiens
cgacactaagaaacatctagtggtgccgggggatacaatcactacggacacaggattcatgcggtaacctccgaggctatggcatggcatccccaggcct

SEQ ID NO: 148233 - DNA, 93 bp, Homo sapiens
gtccggcgctgccaggatccgcggggagaccttgggcatcatcggacttgggggatatgagactttctactcggaatatcctgagtgttgcgt

SEQ ID NO: 148234 - DNA, 100 bp, Homo sapiens
gggcggcttcctggacatcgacgtggagattggcacttctctgtttgatgaagagggagccaagattgtcaaagacctaatgtccaaagctgagaagaat

SEQ ID NO: 148235 - DNA, 75 bp, Homo sapiens
atggggaaaatctccccggtgactttcaggagctgaagaagaagctgttcaaacgccggcgggtgttgaatcggg

SEQ ID NO: 148236 - DNA, 76 bp, Homo sapiens
gatgaagcttcgagtgatgaattcccaggagcagtgtacacttgactgtgaagtggctgtgagagtgggtggagag

SEQ ID NO: 148237 - DNA, 100 bp, Homo sapiens
ctcgcctcgggtctcgggggccgctctgggatcccggccaccagcaattgtccggcagcagtgaggatgccagagttcatgggtttctagaagacaagtt

SEQ ID NO: 148238 - DNA, 90 bp, Homo sapiens
ggccgggccctcgagacggggacgattgctacgctttacatatggtccttcatttcctgcatttaaagttcccgatgaagatgccagtct

SEQ ID NO: 148239 - DNA, 74 bp, Homo sapiens
gggagagtgagagctccccaggggagttctctgtgtctgtgaagtctgctcaccaggtggccagataccgccca

SEQ ID NO: 148240 - DNA, 83 bp, Homo sapiens
agcaatgaggtgaacccaggggccgaagcccacccagggagttgatggtggctgaatccacagaggagcctgctggttctaat

SEQ ID NO: 148241 - DNA, 100 bp, Homo sapiens
aggtgaccaagcccaaagaggagaaagatgcttctaaggctcgaattacatctttacaagaggaggtgaagcatctcaaacataatctcgaaaaagtgga

SEQ ID NO: 148242 - DNA, 100 bp, Homo sapiens
ccagatagaggccgccatcagcaaaatctttggctcgaagctgcaggatgctgaaattgcaaggctgatggaagacttggaccggaacaaggaccaggag

SEQ ID NO: 148243 - DNA, 75 bp, Homo sapiens
ttacattggctgttttcctcacattcctcaagcaggtccttccatagtgacgccccccaaggacatctggaatgt

SEQ ID NO: 148244 - DNA, 99 bp, Homo sapiens
gccatcacaactggattgtagctgcatatgcccattttgctgtgtgttacagggctacttctacaagtccgaacagccagtccagcaaaatgaacagca

SEQ ID NO: 148245 - DNA, 90 bp, Homo sapiens
aggatccccaacggggaggccaacgtgaagaactctggattaatcgaattacagctgctagccaggaacatggactgaagtatccagcgc

SEQ ID NO: 148246 - DNA, 74 bp, Homo sapiens
atgctgcgggagcgggagggggccccagagcctgcatcctgcgtgaagcagccgagaccgacccgcccgcccgc

SEQ ID NO: 148247 - DNA, 101 bp, Homo sapiens
ggatgaaagtgagcagtccagaaagcggcttatcgaacagagccgggagttcaagaagaacactccagagaatgattacggacctgaagccaaagaacaag

SEQ ID NO: 148248 - DNA, 90 bp, Homo sapiens
tcggcatgtccttcgcctgccagtccaaacggggattcagcgtccgatcctttggaacagggactcacgtgaagcttccaggaccagctc

SEQ ID NO: 148249 - DNA, 90 bp, Homo sapiens
gtcttcttcgacatggaggcctacctgcccaagaagaacggtacactaccagaagatcatccaccgtgacatcaaaccttccaacctcct

SEQ ID NO: 148250 - DNA, 100 bp, Homo sapiens
gtcggcatcatcgagataaagaaagacagtctccatttcatggcaaccatgcagctattaaccagtgtcagatgatgattattccccaccttctaagaga

SEQ ID NO: 148251 - DNA, 75 bp, Homo sapiens
ggccttcgaggaggtcatgaaggacctgagcctgacgcgggccgcgcggtggatccggattggtgccaatgtctc

SEQ ID NO: 148252 - DNA, 75 bp, Homo sapiens
ttctgctcagcctaccacgctaccctccccctgctaagccacacccagatgcacttttgtcttcctggccagtgt

SEQ ID NO: 148253 - DNA, 100 bp, Homo sapiens
gagtccgggtccagctcaaacaggaagatgggagcctctgccttgtacagttcccatcacgtgtcatggagaaactccagctgggcccagagattctgca

SEQ ID NO: 148254 - DNA, 100 bp, Homo sapiens
tccagggtgtcaggactaagagaagtcacaaaacagcagatttcccaagagcagcggaaaatgatccagtcacagatgcaaataatacggcactccgaac

SEQ ID NO: 148255 - DNA, 83 bp, Homo sapiens
cccaatgtgctcatggttcacaaaagaagccacactggtatgaaaactttcaaagacgactagcacagaaccctctcttttgg

SEQ ID NO: 148256 - DNA, 83 bp, Homo sapiens
atgtcattatcagacacaatgaacatccatgatagcagtcttctgtaaatcgaacttttcaagaattctctgaaggaaccaag

SEQ ID NO: 148257 - DNA, 100 bp, Homo sapiens
ggaaaacctccttatgctgatatacatccaatgaggatcctgggaagactctgcctgaagcccttgattattgcactgtttggctacagacagtgcctgg

SEQ ID NO: 148258 - DNA, 75 bp, Homo sapiens
ccccagccccagccctacagaggatgctgacagacagcaccaagaagtaattgcaatttatcggacacaccttct

SEQ ID NO: 148259 - DNA, 50 bp, Homo sapiens
cttctggtgaaaacaccagatcaggcatagaatgtcaagctaaccaggcg

SEQ ID NO: 148260 - DNA, 75 bp, Homo sapiens
ccagcaaggacaggagcctgctgcgtgggccagagtcacagagtactattaatcccgtagatgcaatatatcaac

SEQ ID NO: 148261 - DNA, 90 bp, Homo sapiens
ataaacctgcgctttgactgagacctgtcacgtgaggtcaggcaatgtggagaggtggaaaagtcacaagctttgagtcagaaacacgtg

SEQ ID NO: 148262 - DNA, 100 bp, Homo sapiens
gaggcggaggttgtggtgagccaagatacacttatgggaagcctgtcccaggacttgcaactgtgagcctgtgtagaaaattatctcgtgttcttaattg

SEQ ID NO: 148263 - DNA, 131 bp, Homo sapiens
ctcatgagctggcctatgacccaaattatatgtcaccttttgcacagtttgcatgtgacaatggattgaatgtgagagacacgatgaggcgagtggtacgacagagcaagtttcggcatgtatttgggcaa

SEQ ID NO: 148264 - DNA, 83 bp, Homo sapiens
tgaaaggaaatgacggattttgtgtttcccattaaacactaccaggacaaaatcaggccttacatccagctgccatcgcacag

SEQ ID NO: 148265 - DNA, 75 bp, Homo sapiens
ggcggcggctgcggtcgaagaaggggacgccgacaaggttcttgggtgtctctggggagtccctgggccagacct

SEQ ID NO: 148266 - DNA, 100 bp, Homo sapiens
gcacaagacacgtcggatgttgcagcagagccagcagctagcgcaggcaaccacacctccaaatcaaggaaggccagattctcctgtctatgctaacctt

SEQ ID NO: 148267 - DNA, 98 bp, Homo sapiens
cgaggaaagactagtcgagagacagaccccccccggaattctgagcaccaaaaggtgctggagaatctggtaaaagcaccattgtgaagcagatgagg

SEQ ID NO: 148268 - DNA, 100 bp, Homo sapiens
gtcagccttcccagtagctggaactacagacctttccagctcacccccagggccttatggtcaagaaatgtatgcgtttcgatctgaggaaagattcaaa

SEQ ID NO: 148269 - DNA, 74 bp, Homo sapiens
aagtgcttgatatcacagaggaaactctgcattctcgcttcctggagggtggagagattcaaccagttagcgtg

SEQ ID NO: 148270 - DNA, 100 bp, Homo sapiens
gaggaggaggaggaggaggaagaggaaaatggcaaatgcacgacagcggcctcctgaacatcaccaaggtatccttctcagaccgaggtaaatacacgtg

SEQ ID NO: 148271 - DNA, 82 bp, Homo sapiens
cagcacttggagcgcagaaccggccgcgcccggctcccagcgctacgcggtcatgagagcggcggaaatgcaccagttgaag

SEQ ID NO: 148272 - DNA, 90 bp, Homo sapiens
gagcgggtggcagcgacagagccaaaatcagagctggaacctgaggagagagcctgggttactaggtgtctttcagaagctgattgcatc

SEQ ID NO: 148273 - DNA, 75 bp, Homo sapiens
ccttatttccactttgtaattccagtgaattgacttcccatcagataacctacagagagtggaaactcctgcgat

SEQ ID NO: 148274 - DNA, 82 bp, Homo sapiens
gtattaactatcaccgccatccgggttgaaaaaggacatggatttgattgacatactttggaggcaagatatagatcttgga

SEQ ID NO: 148275 - DNA, 75 bp, Homo sapiens
cgaacatcttctggacctttgtccagctggccagacctgtgtccatggtgcccaacattcctggtatccctggcc

SEQ ID NO: 148276 - DNA, 129 bp, Homo sapiens
gagctgaggtggaggcaggctgcggcagacggcgacagtggcggcggcgccatggcagggcttgcagtaagactttgaccccgacgcaggcttcagtgattgccgcggatcagaagcctgagcactttg

SEQ ID NO: 148277 - DNA, 100 bp, Homo sapiens
acggccgcactctccctgcccgagacccggaggtcctgcacataggaagcgcccacaaccgaagtgccatgccctttaccgcctcgcctgcctccagcac

SEQ ID NO: 148278 - DNA, 90 bp, Homo sapiens
ccgaagcctaaattccaggaggggtaacaagatgctcaactatagtgctcccagtgcagggggttgcctgctggacagaaaggcagtggg

SEQ ID NO: 148279 - DNA, 49 bp, Homo sapiens
gtggacagatctgagagatactgaggtcctgtatggtggaagagtcggg

SEQ ID NO: 148280 - DNA, 51 bp, Homo sapiens
gctgacatgcccgtcctatatgacaggactcattctgaccagtttctggtg

SEQ ID NO: 148281 - DNA, 82 bp, Homo sapiens
cctccgcgagggcaccatggaggtgaatgcaggtgagaagccctaccactgcaactgggacggctgcggctggaagtttgcg

SEQ ID NO: 148282 - DNA, 75 bp, Homo sapiens
gctccggctggaggccggactcaaccgcgtaaaaggacagcaatcagacctattgctttgagagctgtgacctcc

SEQ ID NO: 148283 - DNA, 82 bp, Homo sapiens
ttgacttagtggaggaggtgcagctcaacttctaccagttcctcggggtgcagcagttctcaaaagtctatggccctgtgtt

SEQ ID NO: 148284 - DNA, 83 bp, Homo sapiens
gtggatggcgtggagatatggcgcaactgcggcgcatcggatcaacatcaagaggaagggagcgtggccctccaccctcctgt

SEQ ID NO: 148285 - DNA, 100 bp, Homo sapiens
accatctcagaagccatgcccctcaggctggaacttgccctgtctcctcgcagatgaggttaaacccatccagagtaatggctgcggccttacccaggac

SEQ ID NO: 148286 - DNA, 96 bp, Homo sapiens
ggcgccagatagaaaacggcgagagtgggcgagaacgtccactgcgggccggcgaaagctgggggaaactcggccgatatcctccttggccaggaa

SEQ ID NO: 148287 - DNA, 83 bp, Homo sapiens
ctggctgcagggacccggtgacagcgtgagaggttcgcagagctcacagaacatttcctgcctgttgctcacactctgttgtc

SEQ ID NO: 148288 - DNA, 100 bp, Homo sapiens
ttttgatcaagatgcggtgaacatgcaaggagctgtacctccaaccagttcagttcctcctgttgccggggccccatcggttggacaacctggagcagga

SEQ ID NO: 148289 - DNA, 100 bp, Homo sapiens
gtcgccttgctcctcgccgcggcggggactgcaggtcctggaccggatcaaaggctcactgctgccccggcctggccacaactttgtgcggcaccatctg

SEQ ID NO: 148290 - DNA, 100 bp, Homo sapiens
aaaagaatacattcctgattacctgccacccattgtgtcttctcaagaagtaacggcacagccaacaagatgaacggagctttggatcactcagaccaac

SEQ ID NO: 148291 - DNA, 100 bp, Homo sapiens
agtggcgaagggaatcgcaaggctcttccctgaccattttctactgtccctgcgcgagacccctttgctgatgcaagtaagggtgatgacctgcttcctg

SEQ ID NO: 148292 - DNA, 76 bp, Homo sapiens
agagcgcatccatcaaagctttgcgcaacgccaacctcaggcgagatgcggagctccctgggtcctcagcagtgag

SEQ ID NO: 148293 - DNA, 83 bp, Homo sapiens
caagatccggcccatagccgagcagactggcatctgtaaggtgcggccgccgccgccttatgccagcctggaccatcttggag

SEQ ID NO: 148294 - DNA, 75 bp, Homo sapiens
gaggcacccgaatgctgcccgggtgaggtggtcaagaggccccggaaggtccaggtggccgcacttcaggccagc

SEQ ID NO: 148295 - DNA, 100 bp, Homo sapiens
gttttaacagcaggccccggggtcgcgtctacagtgcctcattagcttactattgccatccccctacatcttggactcctcctccatattttaatgagag

SEQ ID NO: 148296 - DNA, 100 bp, Homo sapiens
gtggaagtcgcctggtgtgaactgcaggaggaggcaaaacagattcagaatctgcagaaagcaggcactcgtacagactcaagggaggatgagatttctc

SEQ ID NO: 148297 - DNA, 112 bp, Homo sapiens
aaggcgggagacgagaagcctgaaaagtcgcagcgagctggagccgccggaggaagatgagaatgtgcctactgctcctgatcctccaagtcaacatttacgtgggcatggg

SEQ ID NO: 148298 - DNA, 100 bp, Homo sapiens
ctcttaatgaatctgagcctcctggggtcagagacaggagggattctggtgtaggggcctctctgaccaggccaaacagtaaaatgtttattggaggctt

SEQ ID NO: 148299 - DNA, 75 bp, Homo sapiens
ggctgctccagtactcaagggaacggctttgctctggtgagtgacaagctgtaccagcggaaagagcctgtcatc

SEQ ID NO: 148300 - DNA, 75 bp, Homo sapiens
tcttcatgatgaaatttctgtaaatggcctggccgtgcagtggggcgccatcggcgacgtgggcattttggtgga

SEQ ID NO: 148301 - DNA, 98 bp, Homo sapiens
tttggatgactttaacaattggatttctaaagccataagttctcgagaaactgatcgcctcatcaattctggtaatctacagttgctgcagaactgcc

SEQ ID NO: 148302 - DNA, 100 bp, Homo sapiens
cgccggcgtccgcggcagctgataccagagtcttgctccggccgcggccagcggagccctgggctggggcaggagccgtggacagaggactgcagaaaat

SEQ ID NO: 148303 - DNA, 75 bp, Homo sapiens
ggcggacagtgcggaactaaaggtttggtgcacctcgatttggaggaagtagggcagggcccttatctggaaaga

SEQ ID NO: 148304 - DNA, 101 bp, Homo sapiens
ggatgccctgaagatcagcatccgccagctcaagtggaaggaggagaatgaagtttctagattagaagacataatgcagcatttaaaatcaaagaagcggg

SEQ ID NO: 148305 - DNA, 100 bp, Homo sapiens
cggaggcgttggagcgcggaaatctggaaccgggatggcgacgtctacactgagtcggaggcgaagtagccacgatggaggtgatgaacctgatggagca

SEQ ID NO: 148306 - DNA, 83 bp, Homo sapiens
gtcggcttcaaagagaaaaggcaacatcctgtcacaggccatgctctggcaaaaacgccctgggaggagcggggacactgagg

SEQ ID NO: 148307 - DNA, 103 bp, Homo sapiens
gcaacctggagaacgccaagcgcttcgccatcgacataggtgctggagaatctggtaaaagcaccattgtgaagcagatgaggatcctgcatgttaatgggtt

SEQ ID NO: 148308 - DNA, 74 bp, Homo sapiens
caggacggacaagcacagtcttcggaaggaatgtatcctgtcaggtataatgtcagtgaatggcaagaaagttc

SEQ ID NO: 148309 - DNA, 101 bp, Homo sapiens
gaggaaagcaaaggagtcagggatggctctttctcagaatatgtgagatccaggctgttgactgtactacaatatcctcatttacagtgagggaatgtgag

SEQ ID NO: 148310 - DNA, 82 bp, Homo sapiens
ccttcggaacgctcctctgcattgccattgttctgaggtgggagtggatccaccaccttgagcttcagtttcctccagtgcc

SEQ ID NO: 148311 - DNA, 90 bp, Homo sapiens
attacagcacatctcagtgaatttgcaagtgagtgtgaacatggctacgcctcttcattcccgtccatgccgagcccccgactgcagcat

SEQ ID NO: 148312 - DNA, 100 bp, Homo sapiens
gaaaaacactatctcttctatgacggagaatccgtttcaggaaagggctgctcttcacctatcgtggtgaagtttgctgacactcagaaggacaaagagc

SEQ ID NO: 148313 - DNA, 75 bp, Homo sapiens
ctcggcctgagtcgggatggagctgcctgctgtgaacctgaaggtaatcaaatgcaaagcagctgtgctatggga

SEQ ID NO: 148314 - DNA, 117 bp, Homo sapiens
gagggcgaaagcctggacctgtgcctgcagcagctctacaaatatgcggttaaaatcggaactgatatgctagaattggactgccatatcacaaaagatgaacaagttgtagtgtca

SEQ ID NO: 148315 - DNA, 101 bp, Homo sapiens
gtcggcttctctacgcagaacccgggagtaggagactcagaatcgaatctcttctccctccccttcttgctgtagcaccagttgtacccgatttaagtagt

SEQ ID NO: 148316 - DNA, 101 bp, Homo sapiens
tcatcattgacaccctcgagcttcgaagtgacatgtacattctcaatgagagcctcacagacccagccatcgttaagtttggaaattttagcattcaggtg

SEQ ID NO: 148317 - DNA, 74 bp, Homo sapiens
tccacccaccgccgccgcctcccagcaaacctttgaccagaggcgctaaagaggagcacggtggactgatgtga

SEQ ID NO: 148318 - DNA, 100 bp, Homo sapiens
cggcaacgggctgctctacgccggcttcaaccaggaccacggcacattcaggaccccgcgagccagcggctgacgtggaacaagtccccaaagagcgtcc

SEQ ID NO: 148319 - DNA, 100 bp, Homo sapiens
atttgcagctcggagcctgtggcggatggtgggactctccggccctgtgcagtggctgggagagggttctgccctccttcatccagacagcaggtctcat

SEQ ID NO: 148320 - DNA, 100 bp, Homo sapiens
caaagcctgaacaggcagggccagacccaggcccagggccccggccagtgcccagccccgctgggagacccggccagcaccacggacggcgcccaggaag

SEQ ID NO: 148321 - DNA, 75 bp, Homo sapiens
ctgacttgcgttggggttggagacgtgtgtaataaaggaaaggcctcattgctacgatttcagagtaccctggta

SEQ ID NO: 148322 - DNA, 76 bp, Homo sapiens
aaggccccctgcccccttttcctggtgcatgtgaagttatcaaaaacagaacctcccgtgagttgttcctggcagg

SEQ ID NO: 148323 - DNA, 75 bp, Homo sapiens
attctgtcaactagaattgtatgtagaagaatctggtcaacctgtagttccgttggacagacagtttctcatcca

SEQ ID NO: 148324 - DNA, 75 bp, Homo sapiens
gagtaaaggtggaaacataatggaacagaattttgagatccagctccaggtcccacaggggctcttcttccccac

SEQ ID NO: 148325 - DNA, 87 bp, Homo sapiens
tgagttaagtaaagccaaatattcgagaaatattgttaagaaatttctcatgtatggagtcgccaacatccagcagcagctggcccg

SEQ ID NO: 148326 - DNA, 75 bp, Homo sapiens
tggctcaaagaaagatgattatgggcaccaccacgaggcgatttgtgggccataccaaggatgtgctgagtgtgg

SEQ ID NO: 148327 - DNA, 85 bp, Homo sapiens
gcggatagctccaaactgggatatctacctggcctatcgaaactttatgattgacacttaccgactgaacccccaagagtatctt

SEQ ID NO: 148328 - DNA, 80 bp, Homo sapiens
cgtcatggggctgtttggaaagacccaggagaagccgcccaaagaactggtgtggaaacaggaagagaactagaactgga

SEQ ID NO: 148329 - DNA, 101 bp, Homo sapiens
attggaatctacagagaggacaactaatgtgagtgaggaagtgactgtatgtggactgtggagaaatctttcccagggaactccgatgaagtgttccaaca

SEQ ID NO: 148330 - DNA, 85 bp, Homo sapiens
aagatgctgattaccttgtttacaaagtcacagatagatttggctttttacaattgtcctgggtcacataatgccagctgagcgt

SEQ ID NO: 148331 - DNA, 100 bp, Homo sapiens
ttgtgccctggacattaaacaccactgcgcagccatcacccctggccgcgggcgtcgtacttcttgcaagggatatgcattagcacatactcaagaaggg

SEQ ID NO: 148332 - DNA, 76 bp, Homo sapiens
ccacgcagtctgcttcagtgcagtgaagtgggtgcctgatagacatcctaggactatacagaaggaaaaggcccac

SEQ ID NO: 148333 - DNA, 98 bp, Homo sapiens
attccatttggggaccagagatggacggtcactcagcctatggaggctaggtcccactcagctcaaaatcttcacttgtgaatactgcaacaaggtct

SEQ ID NO: 148334 - DNA, 75 bp, Homo sapiens
tggggagcagttgggaatcaggtctggaatactcctaaccaagaagttgcccagtacctggagtagaacagaaaa

SEQ ID NO: 148335 - DNA, 75 bp, Homo sapiens
aaggcggattaattagcccaagaaacattatattcatcgttttaccaacgaggatcatttggctgtccataaaca

SEQ ID NO: 148336 - DNA, 73 bp, Homo sapiens
ctggcgctcatccgcttccacgtcaaggttcgagaacttgtcttggacaattgcaaatcaaatgatggaaaaa

SEQ ID NO: 148337 - DNA, 80 bp, Homo sapiens
cccaagcacctgggcgtccccaacgggcgcatgggacaagaatccttcaagaaacaggaaaaaactcctaaaacaccaaa

SEQ ID NO: 148338 - DNA, 75 bp, Homo sapiens
gatttctcatcaggcacaccaaccagcaggaccagtgctctggtctggggtctctctgtgaaacacaatcctcag

SEQ ID NO: 148339 - DNA, 139 bp, Homo sapiens
aagaaacccgggatgcccaatgtatctaacgacctctcacagaaactatatgccaccatggagaagcataaagaggagaccccatcttcagaaccaatggaggaagaggaagatgacgacttggagctgtttggtggct

SEQ ID NO: 148340 - DNA, 99 bp, Homo sapiens
ttccgggagactggagtcgaaggccgtgaggtccttctctgcattccaggcagctccaccaaagtctgcgtgcaacgcccttcatttgcatggacacac

SEQ ID NO: 148341 - DNA, 89 bp, Homo sapiens
caaattcaaaaaggataaggagatcatagcagagtacgatactcaggtcaaaggtgtctgctttttcaacgtgggagaaggagttgcac

SEQ ID NO: 148342 - DNA, 75 bp, Homo sapiens
cttcggagtacctgcgctatgaagacacgcttcttctggaagaccagccaacagtgacttctgacagctctctcc

SEQ ID NO: 148343 - DNA, 100 bp, Homo sapiens
gccgctgctgtcctgcgaccccaagcaggaagatgagaatgtgcctactgctcctgatcctccaagtcaacatttacgtgggcatgggacaggcttttgc

SEQ ID NO: 148344 - DNA, 83 bp, Homo sapiens
aaaatcacgttataatcagattttgaccaagcattttgtaagacctgcctagagctggaacgttacctccagagcgagccctg

SEQ ID NO: 148345 - DNA, 87 bp, Homo sapiens
acccaccacaaaaccccagtggagtttggaacttgcacggaagggaacagtgttatagttttgccgctggactcttccctcccttcc

SEQ ID NO: 148346 - DNA, 100 bp, Homo sapiens
aggcttgaagatttctatgcaggaccccaaaatgcagaaagctgtatgtgatggcttctgtgtttgtctgtctactcctttctggattggctgtgttttt

SEQ ID NO: 148347 - DNA, 51 bp, Homo sapiens
agcaaatgcattccacgtgtatcaggcgattgtggaaaaatgtgacagact

SEQ ID NO: 148348 - DNA, 80 bp, Homo sapiens
ttcacaaccttcaagaaattcgggtggaaaggacagtgctattggggcctttcttacatggggaccaacatgcattcact

SEQ ID NO: 148349 - DNA, 83 bp, Homo sapiens
tggatcacggatgtaggaagtggtcctcgaggccacacgggttaatcgaagaaagagcgcactggctttgcgctgggaagcag

SEQ ID NO: 148350 - DNA, 90 bp, Homo sapiens
ggggacgcccgcgcgacgagcaggtggcggcggctgcagagcccaatgacgaaagtggagctaacgtggatgcgtccaaaatgtggcgcg

SEQ ID NO: 148351 - DNA, 100 bp, Homo sapiens
cagactctcctgcagaccttcccaggaagccagagccacacacaccatcatggtcctggcatcagcttctggtgatgtgagctgtgtggatgaaatccta

SEQ ID NO: 148352 - DNA, 98 bp, Homo sapiens
agaatatccttcctgctgctcctgccgtccatccaccagcacagccagttcccagctgtggaacacacagtcatcttagtctactgtgctgaatacat

SEQ ID NO: 148353 - DNA, 95 bp, Homo sapiens
aatactgctgctctgacgtgctgaagaaatttgtgtggagcgaggaaaggtgtgctgtgcctgaggccaggaatgatgagaagacagcagctgat

SEQ ID NO: 148354 - DNA, 74 bp, Homo sapiens
aaaatgctattgccctgtcttcatcaacatttaatcaactaagtcagtgctacactttgaggattttgaaagca

SEQ ID NO: 148355 - DNA, 50 bp, Homo sapiens
atagaacaattggaagtggagctagtgtggatgaggtcaccattgtcaac

SEQ ID NO: 148356 - DNA, 90 bp, Homo sapiens
ccgccgccgggctcggggcctccgcagcgacaacatggaggccgtgaagaccttcaatagcgaggacatgtctcaggaaggctatggaac

SEQ ID NO: 148357 - DNA, 100 bp, Homo sapiens
gatgtggccaaggtcaacaccctgattcggtctctaattaacagaagatggcaaagcccagccacagcagctatgtccttcagcagctaaacaaccaaag

SEQ ID NO: 148358 - DNA, 100 bp, Homo sapiens
gatgaaaccacagtagaccctaatgatgaagagataccagatgacaattttagcatcccagaaggtgaagaagatctggcaaaagcaattcagatggccc

SEQ ID NO: 148359 - DNA, 105 bp, Homo sapiens
gagaagcactggatccaaagcatgtctgcaacccagccattttcagcataagcagtactataatggatgtagacagcacaatttccagtgggcgttcaactccag

SEQ ID NO: 148360 - DNA, 97 bp, Homo sapiens
gcgagtacttcgttccaacatggacatcctgaagccaatcctggtaaaaggcccaggcattgggcttttgggcatttctctaggagctgatatttgt

SEQ ID NO: 148361 - DNA, 90 bp, Homo sapiens
ccatgatctgtggctgggataagagaggccctggttgaaatcacaaagattagacacctttttagataggtgttcttcagcaccactgac

SEQ ID NO: 148362 - DNA, 100 bp, Homo sapiens
ggaatagtagcaggcggcggcggcggaacgccaggcagttttcggctttgtgagaaaccttaccatcaaacacgatggccagcaacgttaccaacaagac

SEQ ID NO: 148363 - DNA, 51 bp, Homo sapiens
cgtggatccaagatggcgacggcgatggatggggtgcatgaagtccaagtt

SEQ ID NO: 148364 - DNA, 100 bp, Homo sapiens
tgcagacatcatgaaatcacctatgtggcccttgtctcggataaagaaggaagccatgtcaagtgaagccatgtccctggagggagatgaatgggaactg

SEQ ID NO: 148365 - DNA, 75 bp, Homo sapiens
aagcgccgcggttaaccacgtctcgtccacgacctccctagctaaaccaggtggacaggtgaaatgtcagtatat

SEQ ID NO: 148366 - DNA, 100 bp, Homo sapiens
tctgaagaggctgtttaaaagctttggcccagtccagtcaatgacttttgttcttgaaacccgtcagggtggttctcttcccaaagtggaagccaaattc

SEQ ID NO: 148367 - DNA, 100 bp, Homo sapiens
atgggacaagatcccgtccatgaatcagtttcatgttagggtcttacagtgtgaatgacggtgcgcaactctacatgattgacccatcaggtgtttcata

SEQ ID NO: 148368 - DNA, 102 bp, Homo sapiens
gctccctcctcccagggccaggcgccgctcagaacgcaaatggttatgagccttagagtttctgaactccaagtactgttgggctacgccgggagaaacaag

SEQ ID NO: 148369 - DNA, 73 bp, Homo sapiens
aggtgcaaggtatcgagcaggacctggtgataggttcaaaatcaaaggaagcccagaagggaggtcattttta

SEQ ID NO: 148370 - DNA, 74 bp, Homo sapiens
cccagaccggccgctctcccctcctctcacggcacctcccaccatgaaggaactctgcgaccttcaagtcgttt

SEQ ID NO: 148371 - DNA, 90 bp, Homo sapiens
tcggtcggtacagtctctgcacctcgcgccccagcagacagagggataaattggaagaaatcttgcggggattaactccaaggaaaaatg

SEQ ID NO: 148372 - DNA, 50 bp, Homo sapiens
atttaccacgtgaaatacgacgagtgcataaggcaaatccaatacgcaag

SEQ ID NO: 148373 - DNA, 98 bp, Homo sapiens
tgagtctcctgggagaatggatgagcctaagcaacccagctcccagagatctaaaattgcagtgtttgataaaatgtggacctacatgcggagtgcgg

SEQ ID NO: 148374 - DNA, 100 bp, Homo sapiens
aacgaaagtccagatctctcagctacaccaagagattcagaggctgcagagtcagactgagaacctcaagaagcagtgccagactcttcaggtatccgtg

SEQ ID NO: 148375 - DNA, 83 bp, Homo sapiens
aggagctcctccaccaggccaaagacttcggcagaactgtggctgcaccatctgtcttcatcttcccgccatctgatgagcag

SEQ ID NO: 148376 - DNA, 75 bp, Homo sapiens
tgctgctctctcatttgctggccatcggattggggatatggtggtaccaggagacgataaagtagaaagttggag

SEQ ID NO: 148377 - DNA, 100 bp, Homo sapiens
ttggagccaactagaggcagggtcatccttgcccttgtcctcccctttcatccctatgtggaaaacggcagctaagaatggagcaacaggcgtggagttg

SEQ ID NO: 148378 - DNA, 107 bp, Homo sapiens
ggcgcccgctggccgggctggctgcggccgccctgggccgggccccaccggacgacctgcctagagctggaacgttacctccagagcgagccctgctatgtttcagc

SEQ ID NO: 148379 - DNA, 75 bp, Homo sapiens
aagcagagaccatggagcttcttgatataattggtgattacaactttcctctataaattaactcttgacactcct

SEQ ID NO: 148380 - DNA, 98 bp, Homo sapiens
ggatggatgtgatgcctgctagccaaaagggttacgaagtgacagtgctggtgcgggactcctccaggctgccatcagaggggccccggccggcccac

SEQ ID NO: 148381 - DNA, 83 bp, Homo sapiens
ctttaatccagctactctacctctaacacagtacctgttaacaacgtggtcgtgtgatggtaacagatgctgacaggtcaata

SEQ ID NO: 148382 - DNA, 100 bp, Homo sapiens
cagcagcagcttacagcccaacatgaactccagtgacccagacctggctgtggtcaaacccacccggcccaactcacttactatactggcaattgctgga

SEQ ID NO: 148383 - DNA, 100 bp, Homo sapiens
agggccttccccctagcacctcctcaggccagccacccctgcaggacatgctatatcgttactgtcgaatgctagaagaaggctctttccgaggtcggac

SEQ ID NO: 148384 - DNA, 100 bp, Homo sapiens
ctttgtttgccagtaaggaggagaggctgtctcagctgcagaggtcacgggatggatagccggcctgccatggccatctttgaactcctggactatattg

SEQ ID NO: 148385 - DNA, 75 bp, Homo sapiens
gttaaggattccaagtaactcttatttggccctctttggattccagtacgatgcatcagaccataccatggcgtg

SEQ ID NO: 148386 - DNA, 100 bp, Homo sapiens
ggcggcttccaggcgcactaccgcgggctccctgcggactgccgtggccgctgggagagcttcgtggaggagacgctgacggagacgaaccgcaggaaca

SEQ ID NO: 148387 - DNA, 109 bp, Homo sapiens
gcaacttgctgcctatcaagaggaagcagaacgtctgcacaagcggcatcagccactatgtgattgtcatgtccatgaccatctttttggtgttcctcaatggcctggc

SEQ ID NO: 148388 - DNA, 100 bp, Homo sapiens
cagaaatgtcatcctcaggcacgccagacttacctgtcctactcaccgatttgaagattcaatatactaagctcctggagcctgtctgccatcagctgtt

SEQ ID NO: 148389 - DNA, 100 bp, Homo sapiens
tggtgtatagagaacaaaaaacaccacagtactatcgtctatcattggatgaagtggctccggagatgctgccccgggagacgctggccttcagggagga

SEQ ID NO: 148390 - DNA, 100 bp, Homo sapiens
ctcgcgcgaacgcacaggatgaccaccaccctcgtgtctgccaccatcttcgacttgagcgaagttttatgcaagttttcggctttgtgagaaaccttac

SEQ ID NO: 148391 - DNA, 75 bp, Homo sapiens
gctggaacacacatcagtcacgggtgaaagatttgaaagttgaagatgacatctcaatgaaggtgatacctattt

SEQ ID NO: 148392 - DNA, 74 bp, Homo sapiens
aactccacagcagctgatgaggtgacagctcatctggcagctgcagggaaacaaaggacccatcgcaaatgttt

SEQ ID NO: 148393 - DNA, 100 bp, Homo sapiens
tttttcactgtcctggaaaaggcctgaagtggcactgaaatgaggcatagatgaggtcctagaccagaaggagcacaggctggatggccgtgtcattgac

SEQ ID NO: 148394 - DNA, 82 bp, Homo sapiens
agtttatttgggattacaacagtttatagtcacttcagggtcagttggcaatctgacagctcatacatcctatgagatttct

SEQ ID NO: 148395 - DNA, 75 bp, Homo sapiens
agagtcattaacaaggagcatgtactggccgcagcaaagcgtcatcacgtagacataaccaagaaacttcaccca

SEQ ID NO: 148396 - DNA, 50 bp, Homo sapiens
tgcgtcaatcagagcgtcctgtgcgtgtactaatggtcacttgatgtgcg

SEQ ID NO: 148397 - DNA, 75 bp, Homo sapiens
ctccgctggcgttacactcggctgattcagcgccctataaagaccagctgtcctcgaaggaacaacccagctttc

SEQ ID NO: 148398 - DNA, 75 bp, Homo sapiens
ttaccgaattagttttcaagaatctatctttttgtgtgaggatctgcaggtccccgtggtgccctcaaagcagac

SEQ ID NO: 148399 - DNA, 101 bp, Homo sapiens
ttgctagtaacgtcatggaggatgaacgacagggagaagatgtcaaccggacactagaaggtggaaggaaacctcttcattatgcagcagattgtgggcag

SEQ ID NO: 148400 - DNA, 75 bp, Homo sapiens
aggagccgcacccggccggcccggccccagccccatggacctccgagcagaccgagacatgggtgcccggcaccg

SEQ ID NO: 148401 - DNA, 82 bp, Homo sapiens
gggctgggtctcggagtgggagacgtggagtgcaggtttactcctggcttgggggcattaggaagcactggaggctcttcgg

SEQ ID NO: 148402 - DNA, 73 bp, Homo sapiens
ggaggaccagaaggagatcggtgacctccgtgcccagcagcagcagggtgctgacggagcttgtgtccaagat

SEQ ID NO: 148403 - DNA, 100 bp, Homo sapiens
cggccagcccgtactgccccactcatcgccaccaggatgctccagaccttgtatgattacttctggtgggaacgtctgtggctgcctgtgaacttgacct

SEQ ID NO: 148404 - DNA, 75 bp, Homo sapiens
gcatcgactggaccaagatcgagcccagcgtcaacttcctcaagtcgcccaaagatcaggcctttgtgacactaa

SEQ ID NO: 148405 - DNA, 100 bp, Homo sapiens
ctccttagctgctggcttggccctgggcatggtctgcttggggaatttacatagtacatgacgaagttaaggataaagcttttgaactagaactcagctg

SEQ ID NO: 148406 - DNA, 83 bp, Homo sapiens
cctttggggaaatgcgtgcactgcgtccctctagagattgtccagaacatcgtgggcacagctctgatgattttagtggccat

SEQ ID NO: 148407 - DNA, 90 bp, Homo sapiens
gcatttcatggctatcatctacacgccaagcagatagaacttcagttcactattggcgaagccattaccagtgctgcaataggaactagt

SEQ ID NO: 148408 - DNA, 50 bp, Homo sapiens
cgtcatcacgccctaccggaagcagtagagacgggggttcaccatgttag

SEQ ID NO: 148409 - DNA, 82 bp, Homo sapiens
tttgtggagggtacttcattgatgccacaaccataatagaatgtctacattccttgagaaagatcagtctaaagaaaaggag

SEQ ID NO: 148410 - DNA, 80 bp, Homo sapiens
atgtgaaactgctttctaaaacaccagaactcaacctggttgcccccaagtttcctggcagtgtgtgatactgaggaggt

SEQ ID NO: 148411 - DNA, 102 bp, Homo sapiens
ggaaaggctacagtgatgacagaccgacttaagttcggattcggcttccaccgcttcttagtgatgctgttgatggagtaatgaatggtgaatactaccagg

SEQ ID NO: 148412 - DNA, 88 bp, Homo sapiens
tctgagactcctgctcagtgtagcattaagctggccctgaaggaccctgttcatacagtgtcactgcagcagttcatctacgagaagc

SEQ ID NO: 148413 - DNA, 90 bp, Homo sapiens
cattctcaacaccacggaattccatgttatgaagacagtatggagtttccagaccatagtagacatttgctacagtgtctgagcgagcag

SEQ ID NO: 148414 - DNA, 50 bp, Homo sapiens
gtttgagcccggaagcgcagaagctggttatgaagacagtatggagtttc

SEQ ID NO: 148415 - DNA, 100 bp, Homo sapiens
ctgacgggggccttgtggtacatctattctcacacagttcttttagatcagcctgagatatggggttcaggccaaccaattaatccaagcatggagtcgc

SEQ ID NO: 148416 - DNA, 82 bp, Homo sapiens
tatgtcgtccgaggcccagagatgaccccttatgaaggtttacccaaggtccagcctagcccctaggcaccatgtcggacag

SEQ ID NO: 148417 - DNA, 100 bp, Homo sapiens
aggaggaggagtgcggcgcggcggccccgggaccaaggaggtaagtaaggaggtctctgtaccatggctcgtacaaagcagactgcccgcaaatcgaccg

SEQ ID NO: 148418 - DNA, 100 bp, Homo sapiens
cagccgtcctgcggagactcaggctcctggtacagtttgttcagaatacgtccatcccattgggacaggggcttgtagaatcagaagctaaagatattac

SEQ ID NO: 148419 - DNA, 100 bp, Homo sapiens
taaagaggctgcccagaaagcagttaacagtgccaccggtgttccaactgtttaaaataaaggagatgggtgagatgcatagggaactcaatgcataact

SEQ ID NO: 148420 - DNA, 82 bp, Homo sapiens
cagcactggaagaaaatggtttggctgtgataggagtatttttaaaggcatggaagaggagatggttcgtgttacgcagtgg

SEQ ID NO: 148421 - DNA, 100 bp, Homo sapiens
ctgtgcacctaccatcaccctgaaaacatccagctcccaccgggaggagcacccccagtcccgtgctgcagccccgtgacccctcgtccacacttgaaaa

SEQ ID NO: 148422 - DNA, 100 bp, Homo sapiens
aaaagcgtcattgatacttcaacagcagatacttcaggctaccgttaaaaacaaggagaggggcaccctcttgaccacccattacatgtcagaggctgag

SEQ ID NO: 148423 - DNA, 100 bp, Homo sapiens
tttgaccaccccaatatcattcgactggaaggagttgttaccaaaactagtatgttcaacacaccaggaatgcagagcttgttgcaacaaataactgaaa

SEQ ID NO: 148424 - DNA, 90 bp, Homo sapiens
ccaaaataaaactaacagtctatgatgtcaaggataagtctcatgacacctctttccatctacagcccactggcactccaggcacctacc

SEQ ID NO: 148425 - DNA, 82 bp, Homo sapiens
cggcgtctctggccggccttggtgcggcgagccgagcgaggcagctctgagccgcgcggtgctggagaatctggtaaaagca

SEQ ID NO: 148426 - DNA, 101 bp, Homo sapiens
cgggccaggtaggatttccgggagaggctgctgtggaggctgaggaggcggcggcggagatctggtgagtgttgcagagagctgctggacacagtggataa

SEQ ID NO: 148427 - DNA, 104 bp, Homo sapiens
tttgcctccgctgtcgcccccgcagcaccgctactcggagggcgagcggacctccctggagaagaaatgcactcggtgatggaaagagagccactattctgaag

SEQ ID NO: 148428 - DNA, 100 bp, Homo sapiens
cctactattacccccagtatctgcaagccaagatgagtgaccgaggaggtggcgttcctttgaggaaaattgacagacttttcaactacatgtattcaac

SEQ ID NO: 148429 - DNA, 75 bp, Homo sapiens
catccatctggagtaaaaactgagtcagctgtgctgatgacatcagataaggatctccccaataatatgatttac

SEQ ID NO: 148430 - DNA, 100 bp, Homo sapiens
ttccctcctccgtttctgtatccccacgaggccaaccctttaaattggatcccaaaatgactcacaagaagttgaagatctccaatgatggattgcagat

SEQ ID NO: 148431 - DNA, 80 bp, Homo sapiens
ttggtgacccacagctatcccctgaggcccgacccagcctctacggcagacacatgcaggccaacccagaaccaccgaag

SEQ ID NO: 148432 - DNA, 100 bp, Homo sapiens
gcggtagcgaaggccgccgaacctgcctggctagccggcgacttgagtgacgaatggcccactgcgtgaccttggttcagctgtccatttcctgtgacca

SEQ ID NO: 148433 - DNA, 99 bp, Homo sapiens
tgacatttaattttagggtcctttatatagaagggagagtagtagtcgtgaaaggtgccaaattggcagaggctcacgtttcttctctttacaccaaac

SEQ ID NO: 148434 - DNA, 100 bp, Homo sapiens
ggaggcgtcgcgcgcgcctgtagctcgcgggcctcgcagatggaggagatgtataagaaagctcatgctgctatacgagagaatccagtctatgaaaaga

SEQ ID NO: 148435 - DNA, 110 bp, Homo sapiens
tcctggaaccttcttttgtttgtcagcagccaaggtgtttccaggaagttcagagagaacaggacccagatgatgtggtaccagttggccaaagaagagcctggtgttgg

SEQ ID NO: 148436 - DNA, 100 bp, Homo sapiens
ggggcttttgaaaaattcaattctttagacgctcatgaagaaatcagggatttcctcagattcccgacagttaagcaatggggagacatttggctttgct

SEQ ID NO: 148437 - DNA, 97 bp, Homo sapiens
ctcacaggttgaaaaaccaaagctccctgctgcataagaccttgtcagaggtctatagtgagcgagagctgctactttttacttgggcattcattca

SEQ ID NO: 148438 - DNA, 80 bp, Homo sapiens
gatgatgccccctatgggagggccaccaatgggacaagaagatgatccctatgatcttgaagatgtttctgcacagaaat

SEQ ID NO: 148439 - DNA, 73 bp, Homo sapiens
tcgaatgggcacacctgtgtaggagctgaagaagaagctgttcaaacgccggcgggtgttgaatcgggagcgg

SEQ ID NO: 148440 - DNA, 82 bp, Homo sapiens
ggtgaaggtcggaaccgacagcctcctccgagaaggatgtgaagttcatttccaatccgccctccatggtggcagcggggag

SEQ ID NO: 148441 - DNA, 131 bp, Homo sapiens
gaccaccaaatatcggaacccctccttgaagctgatggtgaatgtgtgcggacacactctcctgcctgctccaggctgagctggtaaactatgaacgagtcaaggaatattgcctcaaagtcttgaagaag

SEQ ID NO: 148442 - DNA, 100 bp, Homo sapiens
gggcccaggcgacggcatgcaggtgctcatggacctgcctctgaatcagttgctcaactaccgttctgccatttcaaatcatggatcaaaaatagaaggc

SEQ ID NO: 148443 - DNA, 82 bp, Homo sapiens
ttgtcaccataggagacatggacgaagccttcaaatccatcaagctcatcaaaagatatttggagttcttacaacatggcag

SEQ ID NO: 148444 - DNA, 83 bp, Homo sapiens
cgggactagtggaccagctggtgaaggcagacagcgagtggcgacgatacaatgcagatcttcgtgaagactctgactggtaa

SEQ ID NO: 148445 - DNA, 83 bp, Homo sapiens
agacaggtgtgcgcatctacaacgtggagcccttgatggagaaggggcatctggtaccacaaagcctgctccacacctggatg

SEQ ID NO: 148446 - DNA, 129 bp, Homo sapiens
cccgcaacacctccctcaaccctcaggagctgcagcgggagcggcagctgcggatgctggaagatgcgagccacccctctggctgctcctgcgggttccctgtccaggaagaagcggttggagttggat

SEQ ID NO: 148447 - DNA, 99 bp, Homo sapiens
gatatggtggtggaggacctggatatggcaaccagggtgggggctacggaggtggttatgacaactatggaggaggctgagaatcaggctgaaagccgg

SEQ ID NO: 148448 - DNA, 97 bp, Homo sapiens
taagggaaaggccataaaaatagcagatatatctggcctaccatccttctgctgctgaaccaatgccaacaggcgcattctacattctaaaggggag

SEQ ID NO: 148449 - DNA, 88 bp, Homo sapiens
ggcgcagcggcggcagcggagagcgagagaggggagcagccgagaccgacccgcccgcccgcggccccgcagcagctccaagaaggaa

SEQ ID NO: 148450 - DNA, 75 bp, Homo sapiens
gtggatggtacctgagaatgtggacatctctgtgaccctctacagggtctgggcccctgctgctgacatccccca

SEQ ID NO: 148451 - DNA, 100 bp, Homo sapiens
ttgcggccgctgccccagggctgcggggacgatatacatcaggggatgtgagagtgtgggacacccgcacctgggactacgtagcccccttcctggaatc

SEQ ID NO: 148452 - DNA, 100 bp, Homo sapiens
ctccagaagccggagtcattcaaggtatggaacctggctaactgcaagctgaagaccaaccacattggccacacaggctatctgaacacggtgactgtct

SEQ ID NO: 148453 - DNA, 100 bp, Homo sapiens
tcgtggtcgcgctggatcaggagtgaagctgcagaccttcgcggtttccatcgtgtgggaagaacggagtaacgagtctcacgcagaaaaaggtcttgag

SEQ ID NO: 148454 - DNA, 100 bp, Homo sapiens
ggaggaagagcatgaccttgttgacgatgacatcaccactggtttagtccttatgagtggtataatccacacccttgcaaccctgactcagacgtggtgg

SEQ ID NO: 148455 - DNA, 90 bp, Homo sapiens
ggcgtccgctcctcagcggatgtggcagccccgagccatggctctcgccgtccgagtcgtttattgcggttgatcgacaagaccaaggtg

SEQ ID NO: 148456 - DNA, 98 bp, Homo sapiens
cctctcctaagagacccaggggaagacccaaaggcagcaaaaacaagagtccctctaaagcagctcaaaagaggcagtaatgaaccaggaaaaaagaa

SEQ ID NO: 148457 - DNA, 100 bp, Homo sapiens
tatacttttgagccagacttattagatgaccctaattcagaaaagaagaagaagagggatactcccatgctgccaaaggagctccgagttgccacccagg

SEQ ID NO: 148458 - DNA, 97 bp, Homo sapiens
ggagcttcacgacatgtttatggacatcgccatgctggtggagaatcagatcatcaatttctacatgaatatgctgatggagcgaagtaaagagaag

SEQ ID NO: 148459 - DNA, 100 bp, Homo sapiens
ttgtagagtcattcctgcctttgagcggactcccttttaaggcagagtcacggtggcagcattgagagttggacacccgggtccttgaagtgatctctag

SEQ ID NO: 148460 - DNA, 100 bp, Homo sapiens
cgccgaagaagcatcgttaaagtctctcttcaccctgccgtcatgtctaagtcagagactctttggcagttgcactgggtactggctgagttctggaaaa

SEQ ID NO: 148461 - DNA, 75 bp, Homo sapiens
ctcaaatactggaagggaaaacacctagttttaaagagacagcacatggattaattgatgtatgttgagtttatg

SEQ ID NO: 148462 - DNA, 75 bp, Homo sapiens
tctcccacttcttgccccagaaagccccagacggaaagagctacttgctgaaaaagcctgccattgctccgcccg

SEQ ID NO: 148463 - DNA, 75 bp, Homo sapiens
cgagggctggaggatgcgttccctggggtccggagttacactgttagaccttatgatagccaagataacgagtga

SEQ ID NO: 148464 - DNA, 50 bp, Homo sapiens
cttttttcagagaccttggcgataaagaatttcagaaactgtggaggagt

SEQ ID NO: 148465 - DNA, 90 bp, Homo sapiens
cccgaggaccggtccgaactggcgcaggggccgctgcggcaaggctcttatcacgcgatggcatccactgtggaaggaggcgacacagct

SEQ ID NO: 148466 - DNA, 75 bp, Homo sapiens
caaccccagttaagctgcgctccgggagacttatctaaaaacagactggttgaagttccaatggaattgtgccat

SEQ ID NO: 148467 - DNA, 100 bp, Homo sapiens
gcagctcgtcctgaacctcacaggaaacaccctctgtggtttactctcagaaacctacctggaagcccatcggattgtgaagatgaacaagagtgaggat

SEQ ID NO: 148468 - DNA, 83 bp, Homo sapiens
tcacacagctgcttccattggccagtatgaagtggtgaaggagtgtgtgcagcggcagctcactttgctggtggccagtgagg

SEQ ID NO: 148469 - DNA, 100 bp, Homo sapiens
caaggacgggaagtcactcataagcgcgctcaagaaatcctgctgcatcacagaagctggaagttctgatgttccactgaaatcacaatggaaagtcttg

SEQ ID NO: 148470 - DNA, 90 bp, Homo sapiens
tggggcaggagcacgacatcaccctcttcgtcaaggttgtttacattcagagctctatcaataagaggaatacatattacagtgaattcg

SEQ ID NO: 148471 - DNA, 75 bp, Homo sapiens
tgtttcagggacaagtgccatcctctttacagggatggaatccgacgtggtaggcccagagcagatactgtccgc

SEQ ID NO: 148472 - DNA, 100 bp, Homo sapiens
gggaagcttagcccgccgctgccgcctccgagcagcccgccagcagtacctgacacgtccacttaccagtatgatgaatcttcaggatattactatgatc

SEQ ID NO: 148473 - DNA, 101 bp, Homo sapiens
gcctataatcaagtaaaaacaatagctcaaggaaacctttccaacacagatgtccaagctgccaaactctaaaatagagctcaagcttgagaagagagaac

SEQ ID NO: 148474 - DNA, 75 bp, Homo sapiens
ccgagcccagggtggcagcagtgacagcagcctggctctacatcttcttggacacttaatgattgttggcaagaa

SEQ ID NO: 148475 - DNA, 82 bp, Homo sapiens
cagaaatcaatgttagcagatagccagcccatacaagatcgtgcatggaagaggagatggttcgtgttacgcagtggccgtt

SEQ ID NO: 148476 - DNA, 82 bp, Homo sapiens
cagaaagcaggcgaacccgcggcgcaataacggggatttgggagcagcttgtcttacacaaggacgaaggaaaaggtcaggg

SEQ ID NO: 148477 - DNA, 96 bp, Homo sapiens
gaaagaagtggtaccttccttccaggcgattgtagtctagactacaaactgggaagtgaatcgtattaaacacagcaagcctggatctgtgccact

SEQ ID NO: 148478 - DNA, 110 bp, Homo sapiens
caacattggatgtgaaaattgccttttgtcaggctgcaaagttggctttcacagtgcaagcctttgattcccaatgggggactcaggatcaagacgatctaccctggtct

SEQ ID NO: 148479 - DNA, 51 bp, Homo sapiens
ggtgtttccaggaagttcagagagaacagtgtcttccatgaagaaatgatg

SEQ ID NO: 148480 - DNA, 101 bp, Homo sapiens
ctgtcgggctggccatggcgaggggtgcacggcggccacctgagtggcgcggcggtgtcaggaagtaacagctagcagtcgccactatgttgacaggctat

SEQ ID NO: 148481 - DNA, 100 bp, Homo sapiens
cacagcccttctgaggagctcccaaacgcttctgggaacttggcagacgcagcttagagagactcaccagcgagcgtcattgttgtctttctgggaactc

SEQ ID NO: 148482 - DNA, 50 bp, Homo sapiens
attaaacctgctgttctgaaagccaagaagtatgatgcgtttttggcctc

SEQ ID NO: 148483 - DNA, 96 bp, Homo sapiens
tccaggccgtggtcagccgcttcgacgagcagatgctgcagttggagaagaaacttgaacgtgaacttgaggatgatgcacgagttattgcttgcc

SEQ ID NO: 148484 - DNA, 87 bp, Homo sapiens
gcgttggaggccaccgtttccagaaatgaagctgttgtcatttctggaaggaaactggcccagcagatcaagcaggaagtgcggcag

SEQ ID NO: 148485 - DNA, 75 bp, Homo sapiens
catgttccctccgaaggacccagaaaagctgcaggccatgcacctggagcgatgagccgacgcgcagcctccagg

SEQ ID NO: 148486 - DNA, 97 bp, Homo sapiens
gtattgggagatccacagctaagacgccaggacccactggaagcctagaaatggttgaaatcacaaagattagacacctttttagataggtgttctt

SEQ ID NO: 148487 - DNA, 88 bp, Homo sapiens
tttcaagcgattatccagtacacattgataaggtgtaaagcaggccctctggctcaccaagaccaagttaatagaaggccttcccgag

SEQ ID NO: 148488 - DNA, 99 bp, Homo sapiens
accggccggcgtcacagcgaatgtggaggatagactacagtgccgctgcgcacgtaccgggtgccgaaggaggtccgcgtggagcctcagaagttcgcg

SEQ ID NO: 148489 - DNA, 88 bp, Homo sapiens
gcgtcgggctggtgcagccccgggccaggccgcggccggggcaggagcgcaggatgtacagttacccagcacgtgtacctcctcctcc

SEQ ID NO: 148490 - DNA, 100 bp, Homo sapiens
ggacctctatctcgcttttcccctggccttctgtatcttcatggtgcggctcatcttcgagagctattgtacacatgtgacaacctatgaagaatcaaat

SEQ ID NO: 148491 - DNA, 75 bp, Homo sapiens
actgcaagcacccctttcttgaaccgaacagagtcaagtggaatcaaagagcagatttactatgctgggcctgtc

SEQ ID NO: 148492 - DNA, 100 bp, Homo sapiens
ctcacgctgcaggccatggccgatggcgtgaacaagctgagatctgtatctgtggacctgaatgttgatccctcgcttcagattgacatacctgatgcgc

SEQ ID NO: 148493 - DNA, 100 bp, Homo sapiens
ggtgctcctaagggaccacaaatacgtgatttggagagaggtcattaaggagtccaagcaggagcacaaggatgtgatgtgaggcaggacccacctggtg

SEQ ID NO: 148494 - DNA, 100 bp, Homo sapiens
tatcggatgaaccagaagctgtgggaggtgtattccggattgtggccaagaaataccgcaactatgatatcccggctgagatgacaggcctgtggcggta

SEQ ID NO: 148495 - DNA, 75 bp, Homo sapiens
gcgaccgcggcgcgagtcaccatgcccgagcgggaagaagttccgcagcaagccgcagctggcgcgctacctggg

SEQ ID NO: 148496 - DNA, 83 bp, Homo sapiens
gaagcgggcggccccggccgcctccgcgagggcaccatggaggtgaatgcaggctgaccaactgactgaagagcagattgcag

SEQ ID NO: 148497 - DNA, 100 bp, Homo sapiens
gcttcccaatcccactgatgaggatcagcccatggtctgacagcagccgctgcagcagctgctgctgctaccaatgcagctattgctgaagcaatgaagg

SEQ ID NO: 148498 - DNA, 83 bp, Homo sapiens
cctctcggtgtccttcgggaaacaggaggagcaagttcgactccagcgagggaaaacggaggctctgagttccttggatgaag

SEQ ID NO: 148499 - DNA, 100 bp, Homo sapiens
ctcatagggagcttttggagagcaactttactttagtgggtgggtcatgataactgggtacgtggagttctgttccattctggggggaagtttattttga

SEQ ID NO: 148500 - DNA, 100 bp, Homo sapiens
gctagtggaggggaaatatttgaactgataaatttcaaacggaagagagtggcagcatttagaaagaatctaattgaaatgtctgaactggaaataaaac

SEQ ID NO: 148501 - DNA, 99 bp, Homo sapiens
aaatggtcttgtcacctttcaacttcgaggactggaattccgaggatgaatttcacccattcatcgaggcacttcttccacatgtccgtgcaattgcct

SEQ ID NO: 148502 - DNA, 51 bp, Homo sapiens
agataccacaatcagaccctccggcatgcccaagagaatcgtaaatgcaaa

SEQ ID NO: 148503 - DNA, 83 bp, Homo sapiens
ctcatggcaagggacaagcacccaccagaggacagagcgggatgccaccagcttgtccaaagggaagttccaggagctcctgg

SEQ ID NO: 148504 - DNA, 83 bp, Homo sapiens
tacgagctcaacggcggcctgcctccgggcacacccggctccccggacgcctcgttcaaatctgaacatcaatgatgtactag

SEQ ID NO: 148505 - DNA, 100 bp, Homo sapiens
tgaagatgtggatctggcccaggtactggcctatctcctccgcagcatttggccaagagacgaatgtccctttgaacaacttcagtgctgatcaggtaac

SEQ ID NO: 148506 - DNA, 90 bp, Homo sapiens
gaagattcgaggcggcgggggacaagtcggcgccccagagcggacgagtgtcatcctgtgaccaagagcaccagtctgccctggaggaag

SEQ ID NO: 148507 - DNA, 83 bp, Homo sapiens
tcttgataaaaagagatgtggggggattctcgacctgctaacagaactggaccttttcgggccatgctgtaggacttgtgaag

SEQ ID NO: 148508 - DNA, 82 bp, Homo sapiens
ttcgagtgttgcagagcctgcggggcaagatctcggagctggagtttgttcagatcatcatcatcgtggtggtgatgatggt

SEQ ID NO: 148509 - DNA, 75 bp, Homo sapiens
ccaaagtccagcacagaccctcgggcctcatcatggccaggaaggttatcctacgcggagagccaggtaccaatg

SEQ ID NO: 148510 - DNA, 74 bp, Homo sapiens
gatcaccgtgacatccgaggtgcctttctccaaaaggcttctttgctaaagaatgatgagactaaggccctcac

SEQ ID NO: 148511 - DNA, 75 bp, Homo sapiens
atttgggacgcacatactggtgaagccaagcaacagtttccttttcattcaggaacaggagtacagctgtgtagt

SEQ ID NO: 148512 - DNA, 100 bp, Homo sapiens
ctcgcggccccagtggcgcggccgcgatgcgctccatggcatctggagggtgtccgcaatgttgccagtgtctgtctgcagattggctacccaactgttg

SEQ ID NO: 148513 - DNA, 76 bp, Homo sapiens
gaggaagttttctggtagctgcagatgctgtgcaaaacagataacgaaggaggcccaacttcattcaataaggagc

SEQ ID NO: 148514 - DNA, 83 bp, Homo sapiens
ggcggacatcactttagaccctccacctaattgcagaccatggcaaaagttataaccaccgtactgaagttccctgatgatca

SEQ ID NO: 148515 - DNA, 101 bp, Homo sapiens
ctgagctgcgaggaaaatggcggcgggagcttataggctttatactgtggtgcctcgcctggtcaagtttgtagatattctgaccaattggtatgttagaa

SEQ ID NO: 148516 - DNA, 100 bp, Homo sapiens
cgcatcgcgcactttttggatcggcatctagtctttccgcttcttgaatttctctctgtaaaggagatgtccctggtagatttgggaaagaagcttttag

SEQ ID NO: 148517 - DNA, 110 bp, Homo sapiens
agaggcccaccctggagtaaccctcactggagaatccagagatgtatcctccactcctcgctggccaccatcctgctgcccaacagaagaagctcttctgtctccgattt

SEQ ID NO: 148518 - DNA, 98 bp, Homo sapiens
atcgtctctgcaggggcgcaggactcctttgagattttcgtgtggtccatgcagacaggcaggctccttgatcggctgagggaccaaatcaagacatg

SEQ ID NO: 148519 - DNA, 100 bp, Homo sapiens
aatgaatgggggtaccacggagagggcaataagagcctggtggtggcccacgcgcaggcggtgcgtctttctacgtgaataggattttgtggctggccag

SEQ ID NO: 148520 - DNA, 82 bp, Homo sapiens
tagaatcaactgagagagatgcttaaaaatcaccagttactttaatgagtggccagcatcgaaatgttcagccttttagtga

SEQ ID NO: 148521 - DNA, 111 bp, Homo sapiens
gaaaaattattttagttttggaaagatcctcttcagaaataccactatcttcctgaagtatgatgaagaacgagagcttcaaatggatcctgcagactatggaaagcaaca

SEQ ID NO: 148522 - DNA, 100 bp, Homo sapiens
ggcagcagcagcagcggagggagctcggtggctgggagtcagagcaccctgtttaaagacagtcctctcagaaatctgggggtctgccatccctggggct

SEQ ID NO: 148523 - DNA, 100 bp, Homo sapiens
ctgcacacctgcacagggcctgatctgattgtcctccagccccgggggccctcggtgccttctgcagggaagaccatgacattgggtgacattgtcttca

SEQ ID NO: 148524 - DNA, 101 bp, Homo sapiens
ccgtgggcgtaggaccctcagagccaggattcaagccaaaactcgagaatttagggaacgacaagctcgagagcgtgactatgctgaaattcaagattttc

SEQ ID NO: 148525 - DNA, 82 bp, Homo sapiens
cgtcatgggggagtgctgatcaactaaaagagaaatacactttcgggaaatggcctctaaatcctggctgaattttttaacc

SEQ ID NO: 148526 - DNA, 50 bp, Homo sapiens
ggctgcctaatttacagcaaccatgagcttgttctcagaacacaaacaaa

SEQ ID NO: 148527 - DNA, 75 bp, Homo sapiens
atcctgaaagccatgcagcggagctccacgcaggagatcggtgaggagctgatcaacggagtcatctactccatc

SEQ ID NO: 148528 - DNA, 100 bp, Homo sapiens
accgttccaatggggtagcgctccccccattggacaagtggaagattccctcccaggctgtccctcgccgccttgctacagcccccaagactgaaaaacc

SEQ ID NO: 148529 - DNA, 100 bp, Homo sapiens
agcaaatccctgcataattctgaaggagctgacatggatgtgtgccttacaaactatggtcactgtaactacgtgtccgggaaacatgcctgcatattct

SEQ ID NO: 148530 - DNA, 75 bp, Homo sapiens
tcggtgggggcttagcgcactggaggagcggcgggcttcagacagatgtctttggtggacttgggaaagaggttg

SEQ ID NO: 148531 - DNA, 75 bp, Homo sapiens
gaagcccccagaaccaggcccccaactcagccatctgcggaggtcaaggctaccaagcagtttctcgaagagatt

SEQ ID NO: 148532 - DNA, 82 bp, Homo sapiens
ggagcggcggccgagttctccagcctgctgcgcaggataaaaggcaaactcttcacctggatgatcggctgaatgtaacaga

SEQ ID NO: 148533 - DNA, 100 bp, Homo sapiens
tgggcatcgaggacccggtgcggccagagggactggcacatcttcacattcatcatgtgattcaccgggatatcaagggccagaatgtgttgctgactga

SEQ ID NO: 148534 - DNA, 100 bp, Homo sapiens
ctgatggtgatggagattttgatgtggatgatgccaaagttttattaggtgtcaccacagtgatggcagtggaggacagcacgctgcaagtagtggtacg

SEQ ID NO: 148535 - DNA, 74 bp, Homo sapiens
gttctcgtcagctcaggagagggcaaggatggttattgcaagttccaacctggaaaggccatcggctttgtcaa

SEQ ID NO: 148536 - DNA, 84 bp, Homo sapiens
aaagcagcgaacctcgagaccaacgtggaggagctgtgggtggaaggcgcagtcatgcaggaaaacctcagatttgcttcatca

SEQ ID NO: 148537 - DNA, 100 bp, Homo sapiens
aacacggtgttccagaatacagcaggagcatctgggcatttttgtggctgtctcatcacaactacgtcaaggaagctagaccgagaacagcaagatgaac

SEQ ID NO: 148538 - DNA, 82 bp, Homo sapiens
ctcgctggcaccccgaacgggttgcttcccccgctgcgaggtattagaaaactactcggatgctccaatgacaccaaaacag

SEQ ID NO: 148539 - DNA, 95 bp, Homo sapiens
gggaatgaattggatgaacaaaatgagtacagttgtgaatttggctccgcgaagtattatgcactgtgtggctttggtggggtcttaagttgtgg

SEQ ID NO: 148540 - DNA, 82 bp, Homo sapiens
cttctccactttcgccagcccgtgccgcgagcgcggcctgcaggagctttgggataggcatctcgaccctcgctctctaccc

SEQ ID NO: 148541 - DNA, 72 bp, Homo sapiens
ggagcgagctgggagggagccgcgcgcctttgtgcgcgcgccgagataacgaaggaggcccaacttcattca

SEQ ID NO: 148542 - DNA, 98 bp, Homo sapiens
gcggtggtttggacgccggcggagacgcgggcgaggtgattgtgaagacaagaacggaatatcagccggaacagaagaacaaagggaagttccgggtg

SEQ ID NO: 148543 - DNA, 100 bp, Homo sapiens
ccctgaggacttgcggctgctcttctacgatgaggttcaaaccttgtactactcagctgatcacaagctgcttgatgggaacctactagatggacaggct

SEQ ID NO: 148544 - DNA, 75 bp, Homo sapiens
gctcaagacttctttgtggctttgctaaaggacaggcccgggaccgtggcgcttcgagagattcgtcgttatcag

SEQ ID NO: 148545 - DNA, 100 bp, Homo sapiens
gccggcgaaaggagctggtgcctgtgcaagttgttgagccccgtcgcagaatttagtctcaaaggaaacttcaaccacagcactgcaggcctctgttgcc

SEQ ID NO: 148546 - DNA, 124 bp, Homo sapiens
agccgtgcatggggctgctccccaggacctgagcaggaacctggagttttcaggtactgaagaagacctggaattttatgtcaggaagtgtggtgatattcttggagtaaccagtaaactacca

SEQ ID NO: 148547 - DNA, 90 bp, Homo sapiens
tgctcttcgagggcgagaagaagagaattcgcacaaccacggggacggtgcagaggacttcaagcagcaggtgccgtataaagaggacaa

SEQ ID NO: 148548 - DNA, 74 bp, Homo sapiens
cgacggcgccttcggcaaggtttacaaggtccccggcaacttccacgtgtccacacacagtgccacagcccagc

SEQ ID NO: 148549 - DNA, 100 bp, Homo sapiens
cgcgaagacggtaacccgtgtgactttgactgggttgccaatttggcctgttccatctccaacaatgaagaaggggtgaaattagttcggatggcagcca

SEQ ID NO: 148550 - DNA, 94 bp, Homo sapiens
ctctgtagtgtttgccaatgttggagccgtctgcaaagtgtccccggcaagaaggtttacccaaggtccagcctagcccctaggcaccatgtcg

SEQ ID NO: 148551 - DNA, 100 bp, Homo sapiens
ttggatgaggaggcacaggctggtaccagttcactacagttctttaaggaaaaacagtagtgctctgcatagtttactgaaacgagtggtcagcacattt

SEQ ID NO: 148552 - DNA, 49 bp, Homo sapiens
ctaattcaacaaatcataacttggtaagaatgattgatgttggctgata

SEQ ID NO: 148553 - DNA, 74 bp, Homo sapiens
caaaagttctcagccaaaaccagtgatagatgaatgccagctgatgaagaccgagaggccgcgacccaacacct

SEQ ID NO: 148554 - DNA, 100 bp, Homo sapiens
gaagactccctgcctcctgagtcccagagtcagaaataccatcagaggaggggtactgtgactttaatagtaggccaaatgagaactcttattgctatca

SEQ ID NO: 148555 - DNA, 76 bp, Homo sapiens
cagagctgaggactgcctgtttgcagtgtacatatgaagattgaagaaaagataacattaacctgtggacgagacg

SEQ ID NO: 148556 - DNA, 90 bp, Homo sapiens
ggtttttgggtgcgacttgcaggagcacctgcagcactcaggccaggaggcagtcctgcgttaactgcggccgggaggctatgagcgagt

SEQ ID NO: 148557 - DNA, 74 bp, Homo sapiens
cagattccagtcatcctcctgcctcagccacccaagaagctgggaccacagccatcatcgtctacagactgccg

SEQ ID NO: 148558 - DNA, 101 bp, Homo sapiens
cttttgatgaccatgatcctgtggataaaatcgtatgttaatgttcgtgaagaaattgaagagttttttccaagaatgtggaagataaatcaagataaaag

SEQ ID NO: 148559 - DNA, 75 bp, Homo sapiens
ggaggacagttcgctacacagcaatgcatcgaggttcctggtagagttacacagttgtgccgccagtatagcgac

SEQ ID NO: 148560 - DNA, 100 bp, Homo sapiens
gagaaagcacatttggcatcacaagtagagacaagcctgtgccggaggagtcggagggccctggcagccctcccccctacaagatgatccagaccattgg

SEQ ID NO: 148561 - DNA, 100 bp, Homo sapiens
cctccctgggaacggcgttcacacagcatcaccgacctgtcattacaggacccagagtttcctgttttccagcacccaacataacttgtaaggattccag

SEQ ID NO: 148562 - DNA, 83 bp, Homo sapiens
gctcagccagcggcagacagaacgggacctgtgtcaggtgggaatgatggttagatgctgccgaacatacgaagaagtgtgcg

SEQ ID NO: 148563 - DNA, 100 bp, Homo sapiens
ttgtacagcaatctcctcctccactgccactacagggaagtgcatcacatgtcagggcaccagaactagcacctctgaaaagtaaaatgatctatgcaag

SEQ ID NO: 148564 - DNA, 75 bp, Homo sapiens
cggggtccgggccggagtacgtcgttcccgctgcgctaggggaagcgggcagaaaccaatagagccatggcgact

SEQ ID NO: 148565 - DNA, 82 bp, Homo sapiens
aacctgtttccctccaatcttgtggttgcagctttccgtacggagtctctaccacccgtccagtttgactggagtagcagtg

SEQ ID NO: 148566 - DNA, 88 bp, Homo sapiens
gaaatcaggaacatctctttcaatgacaaaaagtttgtcattaaacccatcgacaagaaggcacctagattctagactttggctaccc

SEQ ID NO: 148567 - DNA, 74 bp, Homo sapiens
gcggatgtcagaccagagaagagcacagaatgtaccagagagtgcctggatcaaagtggaacagctgaagccat

SEQ ID NO: 148568 - DNA, 100 bp, Homo sapiens
gggagacgcacagccaggacatcctggaacctgggaaaggataaagactatttcctgattgtgattcagaatccaaccgaataagccactctcttggctc

SEQ ID NO: 148569 - DNA, 75 bp, Homo sapiens
tcggcctggcccgcggcgccgcgggagcgccgggccccgacggcaattatttgggatatacctgtaagtgtgggg

SEQ ID NO: 148570 - DNA, 74 bp, Homo sapiens
attgccttattttttctcatggatgttcttcttcgagtatttgtagaaggatttccagaactacctacggacac

SEQ ID NO: 148571 - DNA, 75 bp, Homo sapiens
ccgccgcagaccccttcaagttctagtcatgagtggagactgctgcacggactctggaaccatgaacatatttga

SEQ ID NO: 148572 - DNA, 83 bp, Homo sapiens
gggctggggacacacccagtatggaggctactgcagcactggggtgtcagttgttggtccgacccagaacgcttcagttctgc

SEQ ID NO: 148573 - DNA, 101 bp, Homo sapiens
tttagtggcttcacgcagaagttggcaggagcatgggcttcggaggcctatagcccgcagtgacatattcgatgccatgttccctgtcactcacatcgctg

SEQ ID NO: 148574 - DNA, 76 bp, Homo sapiens
tccatcttcatcctaccgctccgcccagtccacatgtgttcccccaaacaatgtatcagtcccactgctgatgccg

SEQ ID NO: 148575 - DNA, 82 bp, Homo sapiens
cgattataagaagagaaactcagcgctggggaagaaggataattcagctccttatggggcccggtatgtgggctccatggtg

SEQ ID NO: 148576 - DNA, 82 bp, Homo sapiens
agaagtgctgcctggtgcagaggatcctggaggcctgggaagccaacgaccacacgcaggcgtgatggtgggcatgggtcag

SEQ ID NO: 148577 - DNA, 98 bp, Homo sapiens
ttggactgagtcctgcaggacacaggttctcctgaaaagaaagctgaacattcatctataaatcaagaaaatggcactgcaaaccctatcaagaacgg

SEQ ID NO: 148578 - DNA, 100 bp, Homo sapiens
gggagatccagaagtgaaacgccaggctctctggaggccaggagatgatggagtttcactcttgtctcccaggctggagtacaatggcatgatctcagct

SEQ ID NO: 148579 - DNA, 75 bp, Homo sapiens
ttttgagggaagaaacacagttcacagatcctctgtcgatgggtcctcagaaagctctggaaaccatcggtgcaa

SEQ ID NO: 148580 - DNA, 50 bp, Homo sapiens
aaaagctgtaaaatgataacagaggttgagacggaagctagaaaaaaatg

SEQ ID NO: 148581 - DNA, 90 bp, Homo sapiens
ggattttgaaaatgctgcacatcccttaatagtcatctacataggtgtgatgaatgcagactctgctaccattttggctgtttggatcct

SEQ ID NO: 148582 - DNA, 100 bp, Homo sapiens
gtgagcgagcagaggcttaaggtcttcagcggggcgctccaggaggcactcacagggcgaacgctgttggagaagctgttcagccagcaggagaacgggc

SEQ ID NO: 148583 - DNA, 100 bp, Homo sapiens
gaagagacaggaagatggtgcccagcactagaaagtttgggatttggctcttacatcagtgaagtaaaagaagtcttgcaagagtgtaaaacagtagcat

SEQ ID NO: 148584 - DNA, 101 bp, Homo sapiens
cctacaccctggtccggcagccgcacaccatcctgcgcgtcgtgtcttgggtgaagccaaaaaccttccctcttacccggggccgagcaagatgagggatt

SEQ ID NO: 148585 - DNA, 83 bp, Homo sapiens
gattgtacaccctggagtgacatcgaatgtgtccacaaagaatcaggaactgtggctgcaccatctgtcttcatcttcccgcc

SEQ ID NO: 148586 - DNA, 85 bp, Homo sapiens
cagagttccaggggctctgggagtggctgccagctggtaagcgggcccctcagtgctaccccagttccgtcaactctgccaggac

SEQ ID NO: 148587 - DNA, 95 bp, Homo sapiens
tttattcagcggcagtggtgctttcccgaatctcagaatgccgctttatgaaggcaaagaacagatggagtttgaagaatccatgagacggctct

SEQ ID NO: 148588 - DNA, 75 bp, Homo sapiens
aaagaagtggagcgtgtcctgaaggagttccaccaggccgggaagcccatcggaccctctttcccagctgcccgc

SEQ ID NO: 148589 - DNA, 83 bp, Homo sapiens
agatcatgatgtttaagaacatgacgccgtcacccttcctgcgattctacttaggtcagctggccgccggcacctgtgagatt

SEQ ID NO: 148590 - DNA, 51 bp, Homo sapiens
agtttaggtcatggcaagaacaagacatgggaaagcggaaccaccaaaagg

SEQ ID NO: 148591 - DNA, 89 bp, Homo sapiens
ctcttccaagtggagtacgcgcaggaggccgtcaagaagggctcgaccgcgacaatgcagatcttcgtgaagactctgactggtaagac

SEQ ID NO: 148592 - DNA, 50 bp, Homo sapiens
cggagcagaacggattgcaggatccttttcatccttgtggatgcagacga

SEQ ID NO: 148593 - DNA, 101 bp, Homo sapiens
gattacatgtttagtggccacacagtcgtcctaactatgctgaatttctttgtcaccgaatgcaaaagtcaacaactctagcttaattggagtaggctata

SEQ ID NO: 148594 - DNA, 75 bp, Homo sapiens
aggtgaccggcgcgcgggagcgctacggccccaacggtactgctctccatctaccccagagtacagaaggctgtg

SEQ ID NO: 148595 - DNA, 100 bp, Homo sapiens
atttaccctagaaatctgggataaaacttgcaactgcacactggatatcttcaaaaccacaatcccacatgcaaaagcagcatctgttatagcaaaatac

SEQ ID NO: 148596 - DNA, 82 bp, Homo sapiens
gtcagtttcgctttgattgctaccctggtatatgcacttttcagttttgtcttcaagagctgagaagacagttccctggcag

SEQ ID NO: 148597 - DNA, 74 bp, Homo sapiens
gggcaaggagttcaaagaaggacacagctactactacatctactccgccgtggtcatggaggagggaagtccgg

SEQ ID NO: 148598 - DNA, 51 bp, Homo sapiens
gattgaacagatgctcgtcaatgatcagaaacactttgtgctactctgtgg

SEQ ID NO: 148599 - DNA, 90 bp, Homo sapiens
agcgcgcgcagagcgtcgtccaggctctgggcgtggggaggctgagacacgggagtgcatctactacaacgccaactgggagctggagcg

SEQ ID NO: 148600 - DNA, 76 bp, Homo sapiens
agatggtgctgtcccagagacaacgagatgaactgtgtttttcatgcaccatctcactgagacctcaacaaagttt

SEQ ID NO: 148601 - DNA, 100 bp, Homo sapiens
cacagctggctgctccgcgtggtatatgctcgcaaaggatctccttcatccctctccagaagaggagaagaggaaacacaagaagaaacgcctggtgcag

SEQ ID NO: 148602 - DNA, 90 bp, Homo sapiens
gcgtcttcggttgtgtccccgtcttttgtaccaacagtgaacaaggggagaagaattgccttcagctccacgtcgttactgaaaatggcc

SEQ ID NO: 148603 - DNA, 75 bp, Homo sapiens
ccagagataattgataacaccctgtaacagctgagagtggcaaaattctattcagaagaatgcaggccttgcttt

SEQ ID NO: 148604 - DNA, 98 bp, Homo sapiens
tccagcgagcggcgcggagctggacgccgcgatcgtggggcccgcgaggcgggcagccggggcgtccagggtctcagcttcttggaagtgaaagacca

SEQ ID NO: 148605 - DNA, 75 bp, Homo sapiens
ggcgccctgggcgggctcttccaggccatagtcaacgacatgaagacatgggagtcccaccgtattgtccaggct

SEQ ID NO: 148606 - DNA, 75 bp, Homo sapiens
acaggtgctgtctctagcatcacctctcagcacgattttcccgagagttcacagcctcccgcgacgatgcccctc

SEQ ID NO: 148607 - DNA, 95 bp, Homo sapiens
ggcttccatgcagcctgccttaccggtatgtgaaagcaagaacagagctaacatgggattatggctatgaagctgggactgtgcctgagaaggaa

SEQ ID NO: 148608 - DNA, 80 bp, Homo sapiens
tacaaactggccaagaagggccttactccttcacagatcggccatgccatgcccattcgctccttgaccttttccccgga

SEQ ID NO: 148609 - DNA, 97 bp, Homo sapiens
cggcccgcccctcaaggacaacctcggcctgagacaccggaggaccgggattttttatcaagcagaaatgcatcgaacaacgagaatcaagatcact

SEQ ID NO: 148610 - DNA, 85 bp, Homo sapiens
agattgacgcggtgaactctgtccagttttcaaaccacacaggtgctggagaatctggtaaaagcaccattgtgaagcagatgag

SEQ ID NO: 148611 - DNA, 80 bp, Homo sapiens
ctggttaccccggagacaagctctgtccgcggagaggagtgggacaactcctaaaggtactccaaagattcaggtttact

SEQ ID NO: 148612 - DNA, 100 bp, Homo sapiens
atcttctccatccaggtatgtagggtgcgaagtaccacattactgtcatctccctgtgagtgggattggcaccccggctgcagctccaggagcaagtact

SEQ ID NO: 148613 - DNA, 100 bp, Homo sapiens
cctccatgcgcagtcatgagtcgcttcaagtttatcgactgtgccctgtccacggtgcctcctgcatgtcctgctgccctgagctgtcccgagctaggtg

SEQ ID NO: 148614 - DNA, 100 bp, Homo sapiens
atcgccaggccccaggcctcctgtgggacgccagtcaccagcaggagcagccaaccagcagcagccatcatggagctgaactgctcattttcagtgtccc

SEQ ID NO: 148615 - DNA, 100 bp, Homo sapiens
cgaacagcaaaaggtcacaaattacattacccaatggtggaatattgtatacctatttggccagaccccagtacaagaaagactcagctgcctggccaag

SEQ ID NO: 148616 - DNA, 74 bp, Homo sapiens
tgatccccaaggccaatgacctatggcttgaaacccctccttcctgtgtctgtgcggagtcagatagacatgct

SEQ ID NO: 148617 - DNA, 98 bp, Homo sapiens
tcgccccctacccgcttctcgtagtcctgggagcacagcagaagtgtagctacagcaagctgggtagcaggcagatccaaaggatatcatgaagtttc

SEQ ID NO: 148618 - DNA, 50 bp, Homo sapiens
cgcgatcctgggctaccggtctgtgggcggcgctggcggcggccctggga

SEQ ID NO: 148619 - DNA, 50 bp, Homo sapiens
caggaggcagtagccaaacacccaggcaatttttcacagcaaaagtcttt

SEQ ID NO: 148620 - DNA, 80 bp, Homo sapiens
agtcagttaaagaggactcagtccccacaggtgcggaggagaatcagtggccggtgtccagctgcctactttctgcccgg

SEQ ID NO: 148621 - DNA, 83 bp, Homo sapiens
aggcggtgacagagtggagccatggctagagtgcctatgattacacaataccacctatggagaaagctgttgtgaaaacggac

SEQ ID NO: 148622 - DNA, 101 bp, Homo sapiens
aaaagcaggaaatactggtggaaccagaaccattatttggtgcatggcttctcgctgtttctgggatgctgacactgacaactatactcatgatgttttca

SEQ ID NO: 148623 - DNA, 82 bp, Homo sapiens
cgagcacataacggggttcgggtgtctcgtgtgtgaacatcacagttcccgatgggtcccggctcggacggtccgatgggcg

SEQ ID NO: 148624 - DNA, 100 bp, Homo sapiens
aacaagaaaatttgggtgcagctgaagaccttccagtgacagaagctgaaatatgttctagtgaaacagatgcctttaaatctacaagacagcagccttc

SEQ ID NO: 148625 - DNA, 75 bp, Homo sapiens
ggagataaattcccggaaccgcgattcggcgtgtcaggcaacaagattgacctggctgaaaggagagaggtttcc

SEQ ID NO: 148626 - DNA, 83 bp, Homo sapiens
cgaccctggccgccccgagcggagcctggagtgatcagggccaaagcggtcagtgagaaggaagtggactctggaaacgacat

SEQ ID NO: 148627 - DNA, 98 bp, Homo sapiens
tccagcaggaggtcatggacagccctatggaagagtatgagaccagggcccgcctagagaggctgtcggcaagttcctccataagctcggctgatctg

SEQ ID NO: 148628 - DNA, 100 bp, Homo sapiens
cgcccaaggtctctcgcgggcgggagaacggaaaactcccaacttcctgtattggtaaaggttttcaaggtgtcatgaaaagatggggatttaaaggcca

SEQ ID NO: 148629 - DNA, 87 bp, Homo sapiens
tgggactggtttgaatccttccttgatgatgaagaggagctatcgaaaaaccttgaactgagtactaacagtttccaacgacagttg

SEQ ID NO: 148630 - DNA, 97 bp, Homo sapiens
atggagagctgtgtctgaggagccttggaacattcacccaggtttttagaacttcagccataaaaatgggcagaattttccttgatcatatcggtgg

SEQ ID NO: 148631 - DNA, 74 bp, Homo sapiens
tccaactggaacgggccatagtagatgcagccaggcattgcgacttgcaggagtctatgggtaaaacatcaggg

SEQ ID NO: 148632 - DNA, 75 bp, Homo sapiens
ttgaagacatagtagggggtggagaatacaaacctgacaagggtaaagaactgataaatttcaaacggaagagag

SEQ ID NO: 148633 - DNA, 100 bp, Homo sapiens
accatgaacttggctattgataaatactctcttgatgtggaatcagggagaagaaatgggtgaccgttggtgacacatccctacgaatctacaaatgggt

SEQ ID NO: 148634 - DNA, 90 bp, Homo sapiens
gattcgcatgtgcaaggacctgaagcatctcatctattatcgtttcaacacggtttatgatagttctcaatctcatgagagcttctcaga

SEQ ID NO: 148635 - DNA, 100 bp, Homo sapiens
ggaagatccaggtcccaactggaagctgaagaacctcaagaaggcatgaagccagcccctgcagtgccgtccacccgcccctctgggcctgcctgtggct

SEQ ID NO: 148636 - DNA, 100 bp, Homo sapiens
tgcactaatgcttacatgttagtctacatcagggaatcaaaactgagctttcttgatcatggatggtgaagatataccagatttttcaagtttaaaggag

SEQ ID NO: 148637 - DNA, 83 bp, Homo sapiens
gtggccatcttcaccgtgtacctgggctcgagcctgcacatgaagtgaacttgctgactgagaaggcaccttggaactctctg

SEQ ID NO: 148638 - DNA, 83 bp, Homo sapiens
agaagatctgggtgcccgtggaccacaggccctcgttgcccagatgagtgcctgtgaagaaaacggggtattgccctgaggct

SEQ ID NO: 148639 - DNA, 100 bp, Homo sapiens
tctcctgccagcctgaatgagaaaacaccgaagggacattctgtcttcatggacatttttgaacttgtgtgtggaaaagccactggcagtgattcaagtg

SEQ ID NO: 148640 - DNA, 98 bp, Homo sapiens
gagatttccacagaaggactgggatgatacaccttttccacagggaattgagttgccctacctgaacccatccttccatccctccaaaaaatttaccc

SEQ ID NO: 148641 - DNA, 99 bp, Homo sapiens
ttggagccaactagaggcagggtcatccttgcccttgtcctcccctttcatccctatgtggaaaacggtaagaatgattgatgttggctgatattggag

SEQ ID NO: 148642 - DNA, 74 bp, Homo sapiens
gaaattgttccactgttcactagtctagcttcagatgaacaggactcattaccagagaagctggctgtgcatga

SEQ ID NO: 148643 - DNA, 100 bp, Homo sapiens
tgaagagtgttgtcactagcatttttggtgtgaaaaatacagagctggctgtcttccatgatgaaacaggcctttgccctttttgtcaaaaccaaagaag

SEQ ID NO: 148644 - DNA, 98 bp, Homo sapiens
gaagatcgcttgcaagaaattgcagacgcaaacatgcagatctttgtgaagaccctcactggcaaaaccatcacccttgaggtcgagcccagtgacac

SEQ ID NO: 148645 - DNA, 100 bp, Homo sapiens
atttcgaggagtgtctgaaggactcgccccgcttcaggttttctaaatagctttgaggagttacaggctgaggaatgcggcatcctcaatggatgtgaaa

SEQ ID NO: 148646 - DNA, 100 bp, Homo sapiens
ggaactgtcgcccttccaggatgtggctccctgctcttgtcctggccactctcgctgcttccgcggcttgggaactgccattggatgtccagaatcccct

SEQ ID NO: 148647 - DNA, 73 bp, Homo sapiens
agcaaaggcctgcaaggtgctggtggagaaatgatgctatctgtgagcagcagttgataatgtgcataaaatc

SEQ ID NO: 148648 - DNA, 51 bp, Homo sapiens
caaggactcacagtggctgcaaggaccgtataatagacgctggccccaaag

SEQ ID NO: 148649 - DNA, 96 bp, Homo sapiens
tctgcagcttctcctgtcatcggaaatgccaggccaagatttcgatggggtcctctatcatatttcaaatcctaatggagacaaaacaaaagtgat

SEQ ID NO: 148650 - DNA, 75 bp, Homo sapiens
ctctgtgtcctggggccatccgagccaacggagaggaacatgacatcgagacaccctacggccttctgcatgtag

SEQ ID NO: 148651 - DNA, 100 bp, Homo sapiens
cttgtggtgcggcctcaccatacaggaacagggcagacgttagcgtgagtgatcactctcaatcccggccgcagggccgtaggcagccatggcgcccagc

SEQ ID NO: 148652 - DNA, 83 bp, Homo sapiens
ggagtggattaagtgcattaagctgtctgtccccagaccccagagcacgtccggcaccaccatgactgggctgttgaagagga

SEQ ID NO: 148653 - DNA, 100 bp, Homo sapiens
tgggcctcgcgccggctatggccgtgccctggggctgagccctcagggcagcctggacaacatgacctgcatcctggtctgcttccctggggcccctagg

SEQ ID NO: 148654 - DNA, 100 bp, Homo sapiens
gatacatgacattgaatgtacagtcaaagaaaaggagttctgcccaaacatctcaacttacatttaaagtaagactttgaccccgacgcaggcttcagtg

SEQ ID NO: 148655 - DNA, 100 bp, Homo sapiens
tgaaattagacctaatcacagtggaagcttttaagcctatactttctaccagaagcttgaagggtttggttaagggatttgtcttggctgttactatgac

SEQ ID NO: 148656 - DNA, 123 bp, Homo sapiens
aaggccctgagtcaaagaagatgcctcgaactaaacaaattcatcccagaaatctaagaggtcactctgtgagactgctgggtcagaaaaaggataatggaaggcggcttgggggagcacgat

SEQ ID NO: 148657 - DNA, 96 bp, Homo sapiens
gaaacttatttaaggatggctgacttaccgtatcagactgaaggggctggacttgctacctgtatagaactgtgtgtaaaggctcttcgcttggag

SEQ ID NO: 148658 - DNA, 74 bp, Homo sapiens
cggaaggatgctcctcttacacttttccgaagataatgagcccagccaaggtgccctttcccaccatggtggct

SEQ ID NO: 148659 - DNA, 83 bp, Homo sapiens
gtctccagatgaagaggtttcccctgaagtactagcaaagatattcttactgattctccgggctctgcagctcttgacccggc

SEQ ID NO: 148660 - DNA, 75 bp, Homo sapiens
tacaacatcacttcttctgtttgcagtggtggatcagtacaagggaaagcgggatttggagtcactgagggagta

SEQ ID NO: 148661 - DNA, 98 bp, Homo sapiens
cacctcgacacagtccctccctcggtttgcctactgaagagcttatcagagctctacttgggaaagtggaacacctgcagcaggagactgctgctctg

SEQ ID NO: 148662 - DNA, 75 bp, Homo sapiens
cagctgctcagaagcaccactggaaactcaggaccatgacttcttccagcatgtggaaatgcacctgcggtctga

SEQ ID NO: 148663 - DNA, 74 bp, Homo sapiens
ctcacggccgggacactcagggcagggcagctggtggaatttttgaagaaaatggaatctcgaggccccctttc

SEQ ID NO: 148664 - DNA, 75 bp, Homo sapiens
attgaatacatctgttcctacttgcaccgtcttgataataagtgctgcattagacgtggaactatctgatgattc

SEQ ID NO: 148665 - DNA, 73 bp, Homo sapiens
gacgtgcggcccgaatgccagcgcctcttctaccggggcaagcagtactatactggcaattgctggagaagat

SEQ ID NO: 148666 - DNA, 75 bp, Homo sapiens
ctgataaagaacttcttcccaaaatggtgaagcgtgacattcaggaaaacgatgaagaggcagtgcaagtcaaag

SEQ ID NO: 148667 - DNA, 78 bp, Homo sapiens
tttattacccaagtggaagaagagatttcccgacactacagtgtttcagaaatacaccaagtacagtaagcatgacat

SEQ ID NO: 148668 - DNA, 82 bp, Homo sapiens
ccgggatcccagagctacccttcttggagcccacagggcttgctggtgaaaaggaccccacgaagtgttggatataagccag

SEQ ID NO: 148669 - DNA, 83 bp, Homo sapiens
accgcgcgactcggcgcccgcccgcggctcttttccacaatggcccccctgaccagcgcgtcgaccgcggccgcgctcctgag

SEQ ID NO: 148670 - DNA, 98 bp, Homo sapiens
aagggggcaagtggataccctggggctgagaggaatcttctggagtactcttattttgaaaaggacggctgtcctcagcgaggggccgtgcacccgct

SEQ ID NO: 148671 - DNA, 75 bp, Homo sapiens
gacttgaagcagaaagcaagtgaatacgagtcagaaggtgaaagaaaagatgttgtcccggttaagagtagtttc

SEQ ID NO: 148672 - DNA, 75 bp, Homo sapiens
ccgactccaggggagccgtggcctcctctccgccctagcgctgagcctacaacacagcagtcccctcaggatgag

SEQ ID NO: 148673 - DNA, 83 bp, Homo sapiens
gaagaattcatgctcatccggttccagctattcttcagatgctctggattttgagacggagcacaaattggaccctgtatttg

SEQ ID NO: 148674 - DNA, 82 bp, Homo sapiens
aacacttaggcaggaggatcactcgagcccagaagatcaagactagtgtgagcaacaaattttccaagagataacttcacca

SEQ ID NO: 148675 - DNA, 74 bp, Homo sapiens
gtcctggtacaaggatgatgagggcccaccagctctgagcagatcatgaagacaggggcccttttgcttcaggg

SEQ ID NO: 148676 - DNA, 74 bp, Homo sapiens
tcggaggaggacgaggacttggaagcaaacggggattcagcgtccgatcctttggaacagggactcacgtgaag

SEQ ID NO: 148677 - DNA, 100 bp, Homo sapiens
gcatgttttcccacgaccctctgaccgaagagacgagggagctcttggataagggtgtgtccgcagccggccaggtggtatccctgaaggtgtggctgat

SEQ ID NO: 148678 - DNA, 100 bp, Homo sapiens
ctttctctttaccctcattggcgcttctctcctgcagtccgcctctgggccctgccgttatccaagcattaggtgaacatcttaaattaagacaacaagt

SEQ ID NO: 148679 - DNA, 82 bp, Homo sapiens
aggcagcaactgaggcagcggcaggctcaggtgcagccgctggtgtcccgacccaggctaagcttgagcatggctgagcagg

SEQ ID NO: 148680 - DNA, 101 bp, Homo sapiens
caccagtagcttttctgagaatacttgctgaaaaggaagttttctggaatggaaatgagccgtcagactgctacagcattacctaccggtacctcgaagtg

SEQ ID NO: 148681 - DNA, 100 bp, Homo sapiens
ggaggcgcaggccctcaagctggtggaggggccggacgtccggagtaagaaggcagtgctttccatcaccactggtggcagtggctccatgtactctctg

SEQ ID NO: 148682 - DNA, 82 bp, Homo sapiens
cagattcgcagtggtcgcttcttctccttgattcgccatgaagtcagcgtaaataatgtaacacataaactgtgcagtaacc

SEQ ID NO: 148683 - DNA, 80 bp, Homo sapiens
tgacccatttggagttcctcttcacggacagtgggaccgtataatagacgctggccccaaaggaaactactctcgattta

SEQ ID NO: 148684 - DNA, 111 bp, Homo sapiens
gacagcatatttttttagtcacaagcttattgaattgatcggccacatcaggtaaacactacacgtgaagagtggtgaaagggaacattgattactgaagtgccctggaga

SEQ ID NO: 148685 - DNA, 75 bp, Homo sapiens
cgtgttctgatcactactgacttgttgaacccagcgggtgccgcttctccacccgaggcttccacctccaacgag

SEQ ID NO: 148686 - DNA, 82 bp, Homo sapiens
cgcgtcccgctcgctgggagagaggtacctctccttttccctctccctttccctaaggctgcatttgatgccagaaggcaaa

SEQ ID NO: 148687 - DNA, 108 bp, Homo sapiens
aagttcgctgacaggtccagttgcagatacaaacttggattttttccagtctgatccttttgttggcactctagaggacaaaatcccagtccttggcacaaactcagg

SEQ ID NO: 148688 - DNA, 74 bp, Homo sapiens
aaaaaagagcaggtggaaaaggaaagaggcagaggaggtggacacggtggacgtctccggcgtgcccgcagagg

SEQ ID NO: 148689 - DNA, 83 bp, Homo sapiens
gcggtaaaggcgaggatggagaccgaaggtgcagattcactttataggaacagcttcagcttcagtgatgaaaaactgaattc

SEQ ID NO: 148690 - DNA, 98 bp, Homo sapiens
gccgtcagcgtggtgtggggcgtcttccgcaacgaggaccagagcatggggaagtgattgactgtgtgcaggagctgagccactccgtgaacaagctg

SEQ ID NO: 148691 - DNA, 101 bp, Homo sapiens
atcatatgacaaaggctttgccgcagttcatcttcctccctgtgtactttccatttgccttcctggccacataaagaagatccctaatagtcatttctcaa

SEQ ID NO: 148692 - DNA, 99 bp, Homo sapiens
atggcctacccgggatacggaggaggggcgacattgactacagcaccgtgctcctcggcatgctggtgacgcaggacgtgcagctcgggctcttcatgg

SEQ ID NO: 148693 - DNA, 90 bp, Homo sapiens
tccagaactacctgtaaattatgtgaaacctccaaatgtgggtcgtggttcaattccagaattctttcatattatgaaaagaaagtttac

SEQ ID NO: 148694 - DNA, 82 bp, Homo sapiens
ggggcctcccgcgccccccgggacccccacgccgccgccaggtactccaaagattcaggtttactcacgtcatccagcagag

SEQ ID NO: 148695 - DNA, 100 bp, Homo sapiens
tttgaagtgggagcccagttggaagcccgggaccgtttaaaaaactgaagtcacctgcaccggtgcccgtgacgtacgagctgcccacactgtataggac

SEQ ID NO: 148696 - DNA, 75 bp, Homo sapiens
ctcctagcggcgcggcgctcgctcctacggatgatgcacgccaactctttgtgctagctggagctgctgaagaag

SEQ ID NO: 148697 - DNA, 82 bp, Homo sapiens
aagtcaatttcatacagaaccttgtgttttacattgaagctgcatataaaactgctatgataacaccctatgcccattgtcc

SEQ ID NO: 148698 - DNA, 99 bp, Homo sapiens
gaattaagtacaaacaaaaaccaactgaagcagctgacagaggaatcaaacttgacgtatggagccaagaaagcccttggaaaaactggcctcatattt

SEQ ID NO: 148699 - DNA, 75 bp, Homo sapiens
aaccctcctgaccatgaggtggtggccatggcccgcaagctccaggagctcgaggccatgagcagatataccagc

SEQ ID NO: 148700 - DNA, 100 bp, Homo sapiens
gctacggctacctgaaggattacgctgttcagcagtacgtgcgggactccagggtccaccagattctagaagaccattaaaaatctcaagtgacgacttt

SEQ ID NO: 148701 - DNA, 90 bp, Homo sapiens
catcgggtgttctctactccagagctccgacttatttctgtgggcagacattaacattcagaaatttctgaataaattggcagaagaacg

SEQ ID NO: 148702 - DNA, 98 bp, Homo sapiens
ccttcagaagaagatatcaacttcattttgaatgaagtgcgtaattacctgagttgtgatgttgaaggagaaaatgcagaagtctccatggacgtttc

SEQ ID NO: 148703 - DNA, 98 bp, Homo sapiens
tgaaacagtgttaaaaaatcaagaagtagaattcggcagaaatcgagagaggcttcagttttttaagttggatccttatgactatgaaatgattgaag

SEQ ID NO: 148704 - DNA, 75 bp, Homo sapiens
cagcagctccggcagcagtgtcctgtgctgatggtgttggcagggattttatattggaagacatggatcttgctg

SEQ ID NO: 148705 - DNA, 89 bp, Homo sapiens
tggggcctcgctaaggaattcccggcccctcagggccacggctttagcggtgtcttttgcgatattgatgatgctcaaatacttccccg

SEQ ID NO: 148706 - DNA, 75 bp, Homo sapiens
gaggaagagaaaagggcagcagaggagaggcttccgaggaggcagaggaggaggaggtgaccacaagccacaagg

SEQ ID NO: 148707 - DNA, 75 bp, Homo sapiens
cctgattctacccaagtacatatgatttcagctgcaatggcaggaattacatgaacgacagccttcgcaccgacg

SEQ ID NO: 148708 - DNA, 82 bp, Homo sapiens
gggcgctccggtggcggcggaggaagcggggagaggtggtgagagatgacccctgttgaggatttcattggtgtctgccaca

SEQ ID NO: 148709 - DNA, 100 bp, Homo sapiens
aacccgtacgtgcggaaggccctcaacatcccggagcagctgccacaatgggacatgtgcaagctgttttggagtcagcggaagatcaccaaggccaggg

SEQ ID NO: 148710 - DNA, 88 bp, Homo sapiens
agatggctactctggagttgagcaacacagtcactcctggcggcaaaccaaacaaaaccagagtcatctggggaaaagtaactcgggc

SEQ ID NO: 148711 - DNA, 74 bp, Homo sapiens
ccgagctggagctgaagcgcaggctgcggggcgcggagtcgggaggtttgctggggctttcactctgcggcagc

SEQ ID NO: 148712 - DNA, 100 bp, Homo sapiens
cgcggggcccgccatggctgcgtcggagctctacacaaagaggttggcgatttgaaggagctgcagacactagacatttctaccaatcgtttgctaactt

SEQ ID NO: 148713 - DNA, 100 bp, Homo sapiens
cgaagatgggggatttctacgacccggagcacccgacccctgacagaaaaagtcctacctggagcgaagcgttaaggaagctgaggacaacatccgggag

SEQ ID NO: 148714 - DNA, 75 bp, Homo sapiens
cagccccctcctggcgacccgcaagtgacttaagagattaaaattaatttggttgctgttggttctgaacaaata

SEQ ID NO: 148715 - DNA, 100 bp, Homo sapiens
gctcaaagaaagatgattatgtatccatcatcccacgtggcaaaggactaggttatgctcagtatttaccaaaagaacaatacctctataccaaagagca

SEQ ID NO: 148716 - DNA, 100 bp, Homo sapiens
gaagaatctgaagtgaaatgacatcaagagacctatcaagacctgtatccaggaaaagcagaagaatcccagtcttcttagagaacccagtgactttttg

SEQ ID NO: 148717 - DNA, 100 bp, Homo sapiens
gcagctcttgggacctcccaatccagaaggagataacccagaaagcatcaccagtgtgtttattaccaagttttctggatatgccgcagaaggatccgtg

SEQ ID NO: 148718 - DNA, 50 bp, Homo sapiens
gggaactcaaacagcagatgcagattgtaaaccatggctgtgtggataca

SEQ ID NO: 148719 - DNA, 100 bp, Homo sapiens
ttgcggagagcttctggagtaagctggaggtcaccttcaacctgcgggacatgttggagtccggggtgacctggtctcagtgaagaaatctttaggccgg

SEQ ID NO: 148720 - DNA, 90 bp, Homo sapiens
attttcttcccaggaagctcctctcgctccccggccgcccacccccagcctggatgtccagaaggcttcttgggggaatattgtcaacat

SEQ ID NO: 148721 - DNA, 83 bp, Homo sapiens
gaaagatctccttccagaaaccacctaccgttgtatatgaacacagatcaagattagagaaatccttgcaaaaagaaagactt

SEQ ID NO: 148722 - DNA, 94 bp, Homo sapiens
cattgctccggcgcgttctcaagggcttgcagctgaactcccccactggaaaggattctgaaagaaatgaagtcagccctcagaaatgaagttg

SEQ ID NO: 148723 - DNA, 90 bp, Homo sapiens
tagcgtctgagatcataggattactgatgctggagtcagactatgacatggtggattatctgaatgagctaagggaaagctgcttggaag

SEQ ID NO: 148724 - DNA, 100 bp, Homo sapiens
cttcgtggtcgtctggtcctactacgcgtacgtggtggagctctgcgtgtgaaggatgataaagactatgctttaaaacaaatagaaggaactgggatct

SEQ ID NO: 148725 - DNA, 83 bp, Homo sapiens
gagactccgggcactggggagcccagagaataccctctaccatctgctttggtcagggtgccgctcgaggatttaaaagcaac

SEQ ID NO: 148726 - DNA, 88 bp, Homo sapiens
actgatctttgctggcaagcagctggaagatggacgtactttgtctgactacaatattcaaaaggagcctcagggaacccagccagca

SEQ ID NO: 148727 - DNA, 143 bp, Homo sapiens
agtgacagcacaggtcacagtaaggccaaaaatgtgcatactcacagagttagagagagggatggtgtttaaggaagaaatctctaaacgttttaaatcacatactgaccaacttgtgttgatatttgctggaaaaattttga

SEQ ID NO: 148728 - DNA, 100 bp, Homo sapiens
agtctttgctacgtacagcaaaaggacatttgatacgttaaggaatcacccatccttttatgtatttaatcatcgtggtcgagtacttttccggccttcg

SEQ ID NO: 148729 - DNA, 100 bp, Homo sapiens
gatcatgtcagagagagagcttggttaacttgggagaaagtttcatctgtggatggagtattggcagacagtccagaagacatgcacagctggattaagg

SEQ ID NO: 148730 - DNA, 98 bp, Homo sapiens
gcagcctcacctgctgcccattctctacctgaacggcgtcgtcgggccgccgcagcccgccgaaggcgcggatgagggaattggggcttggagtgcaa

SEQ ID NO: 148731 - DNA, 97 bp, Homo sapiens
caccaccgtcagctcggccagggatgataaggatgccttctatgtggcagacctgggagacattctaaagaaacatctgaggtggttaaaagctctc

SEQ ID NO: 148732 - DNA, 75 bp, Homo sapiens
gtcagtggaaaggagagctaccatcactaagatatccatgacgacattgaaaatgaattttttgtattcaccaga

SEQ ID NO: 148733 - DNA, 98 bp, Homo sapiens
gttgaaagaacccacaggtgcatttcacagcactctgggcgaaaattggatgtgaaaatgaagccagaccgagggtcagtatagaccttctgatttgc

SEQ ID NO: 148734 - DNA, 90 bp, Homo sapiens
ccaagtggatagtagaacttatctactggatttccgtagtattgatgacatcgctattgcggttccgaggcagtgggaagagatgcggcc

SEQ ID NO: 148735 - DNA, 132 bp, Homo sapiens
atcaagttagcatgctttctccagctgccctatcacctgccagctcatcacaaaagcattgaatgaaatgtggaaatgtcaaaatctgctccgacatcaagtaaaggatttgcttgacttgattaagcaacc

SEQ ID NO: 148736 - DNA, 100 bp, Homo sapiens
cgctgcccgcgggcccggccacggcggagccaaggggttcagtcggctgccgtcaatgtcatctgcgagctggccagacgcaaccctaagaactacctgt

SEQ ID NO: 148737 - DNA, 74 bp, Homo sapiens
gaagacttctctacgtcggaggaggacgaggactacgtgccgtcggtgagctgaagagacgcctgaaagctgag

SEQ ID NO: 148738 - DNA, 50 bp, Homo sapiens
ccgagaccgcggccgggaccgagggactcgctcagcagcagcctgaaaac

SEQ ID NO: 148739 - DNA, 100 bp, Homo sapiens
cgagctcccttcaagaagagcagaagtgcccaccaagcctcccctgccaccggccaggacacagggcacaccaggagatggggaagaagatgaaggtgat

SEQ ID NO: 148740 - DNA, 100 bp, Homo sapiens
tattagcagaaaacttttaaatgcaaaacactcagagaaatcaccaccttctacaggctcagtttatgaacctcttaaaagcattaatcttccaagacct

SEQ ID NO: 148741 - DNA, 90 bp, Homo sapiens
gagcatgtcgaccccggcccggaggaggctcatgcgggatttcaagcgctgtgagtaccagagtgcccactggttccaacagttcttctc

SEQ ID NO: 148742 - DNA, 98 bp, Homo sapiens
tgcagccgagatgccgggggagcggggccttccacaccccctccgtgggtgtgtgacctgcgaccgcatcaagcagtccgccagcggaaccaagcggc

SEQ ID NO: 148743 - DNA, 95 bp, Homo sapiens
gccccagccaggacgagaggatgcggagcccgcagaacctccacagtcaagaggacgcctcctgcccgaaggccacctgaacctaacggctccct

SEQ ID NO: 148744 - DNA, 82 bp, Homo sapiens
aggacctcctggacttaaaggaaccatcggtgatatgggttttccaggacttccgccttatctagtagccctacgtatccgg

SEQ ID NO: 148745 - DNA, 98 bp, Homo sapiens
gcctggggcgggaagaaggagaacctgaaggctgcgcaggaggagtatgtcaagcgagccctgccagctgaggtgggtgtcctggttggcaaagaccg

SEQ ID NO: 148746 - DNA, 50 bp, Homo sapiens
gaaatcttagataagaaggttgagaagtatgacaacagcctcaagatcat

SEQ ID NO: 148747 - DNA, 100 bp, Homo sapiens
cgagttataggaagatgtagtccaacccacatcagcagatatgattctataacagactcttccagaaatgatatgaagaggaaatttgccctgacaatgg

SEQ ID NO: 148748 - DNA, 75 bp, Homo sapiens
tatccattttcgagacattcagctaaagttgcagacaagatccagctcatcaataatatgctggacaaagtcaat

SEQ ID NO: 148749 - DNA, 100 bp, Homo sapiens
gcggctgttgccatgtccgcaccgggacgatcatcctggggacctggtacatggagagattaaacagattctagaaaatgaacttcagatacctgtgtcc

SEQ ID NO: 148750 - DNA, 96 bp, Homo sapiens
caacaaaggccgaccgaaggcggagaacttgaaaagaacttgttttgttccaggtgcaaagtggaaacaattaaacttaacgtggaggctgtgaac

SEQ ID NO: 148751 - DNA, 80 bp, Homo sapiens
catcccctggatgggggaccacaagatcctcatcgacagatgatatcatcaagttgaatcgaaaggaagggaagaagcag

SEQ ID NO: 148752 - DNA, 100 bp, Homo sapiens
ctgcggcgcgctgctggacgaagagctctcctccttcttcctcaactatctcgctgacacgcaggtttgacatctacaggaaggtgcccaaggaccttac

SEQ ID NO: 148753 - DNA, 128 bp, Homo sapiens
gggagaagaggattggaggtgtcagtgttaaaggaacctctacaacgaaggtgaagccacggaagataaggaaaccgaatgcggtgctacaactgtggtggaagccccagcagttcttgcaaagaggc

SEQ ID NO: 148754 - DNA, 100 bp, Homo sapiens
gggccggaggccactgtcttctcttcctcctccaccgagtcgtgctctcgccccaacccgcgcgccaggaagaagaaattgtcgagacgaataacatgag

SEQ ID NO: 148755 - DNA, 75 bp, Homo sapiens
cgcgtcctcagacgcagcgtctagtccctggccatagctccgccgctgcccgggggcaatggcggcttcctgtgt

SEQ ID NO: 148756 - DNA, 83 bp, Homo sapiens
agccgcagctggactggcaggcccgagggcgaggatgataatgaagataattcaaatgatgggacccagccatccaaaaggag

SEQ ID NO: 148757 - DNA, 100 bp, Homo sapiens
gagagcgtgaccgagagcgcgaatatcgtcatcgttagaagctgccttacctcaaagccagagaagctcgacaccgtcaagtgaaattggagccaccccc

SEQ ID NO: 148758 - DNA, 82 bp, Homo sapiens
gcgtcttccgtgggcaacgtggccgacagcacagctcatcagcatcggatcttcctataactacggcaatgaggatcaggca

SEQ ID NO: 148759 - DNA, 153 bp, Homo sapiens
gggccatgagcggtccattacgcagattaagtataaccgcgaaggagacctcctctttactgtggccaaggaccctcgccctcacaaagccaatgctgaggagatgaccaagtaccacagcgatgactacattaaattcttgcgctccatccg

SEQ ID NO: 148760 - DNA, 75 bp, Homo sapiens
cgggacccacttcactccagtgcctccgacgcctcctgatgtgtggacgaatgtggaacctcgctctgtggctgt

SEQ ID NO: 148761 - DNA, 98 bp, Homo sapiens
gcaccaagctggatgccagccctagaacgcctcatcgagcacatcaaccccgacaaggtggtcgagatatccagtctgacggagcacttgctgacgga

SEQ ID NO: 148762 - DNA, 102 bp, Homo sapiens
ctggagcctcagttggaagcagccgatccagcctgcggagcctgtggggcagaatgtcatacccaggctatcccccaacaggctacccacctttccctggat

SEQ ID NO: 148763 - DNA, 99 bp, Homo sapiens
aaggagcgactcttacatgatgaacaaagtactgatgacagggtacagccaaagaccggagctttggagagatgaagtttaaacagtgtcctacagaga

SEQ ID NO: 148764 - DNA, 100 bp, Homo sapiens
agatgtcaaagacttagcttttaaattaaaaaggaagctattcaccattgaggctatgtccaaactgggtcttcggcaggttacaggagttactagagtc

SEQ ID NO: 148765 - DNA, 98 bp, Homo sapiens
gtccatctcactgttgtttactttgggaaagaagaaataaatgaagtcaaaggaatacttgaaaacacttccaagaaaaatttgagggactgtttcgg

SEQ ID NO: 148766 - DNA, 118 bp, Homo sapiens
cggggacccaggagtttcctgtgtccagcgctgccggagccgcctgagttccttcctgtgtacagcccttctgaggaggagaagaggaaccccgcgctgtatgccagcaacgtgcggc

SEQ ID NO: 148767 - DNA, 90 bp, Homo sapiens
cagagctgaggactgcctgtttgcaggtgaatgaaaactttgccattgatttgatagcagagcagcccgtgagcgaggtggagactcggg

SEQ ID NO: 148768 - DNA, 80 bp, Homo sapiens
acagcacctatcacttgttccctccaagacaactgaatggctggttggaaggaaaatcatgcaacattcatgagcgaact

SEQ ID NO: 148769 - DNA, 87 bp, Homo sapiens
acgagtctgaggcggagggagtaatgatgctcagccagcattgggcagcccccgcttcctgctcccctacccccttcacatggcagt

SEQ ID NO: 148770 - DNA, 74 bp, Homo sapiens
gtccgacagccaggcccgggagaagtttggacatatttgactcttttccccccaggttgaattgaccaaagcaa

SEQ ID NO: 148771 - DNA, 82 bp, Homo sapiens
agtgaccccgctttcctcacgcccagaggctgaggggatctggcggtggagcgctaggatcagacgcccccgcgatgaccag

SEQ ID NO: 148772 - DNA, 100 bp, Homo sapiens
caaggccttctgacaattcagcccgggcagcctgcccttccccttcaacctcttgctcaaggaggaatatcagggcgaggggatcacgtggcacaacatc

SEQ ID NO: 148773 - DNA, 75 bp, Homo sapiens
ttggaagcagccgatccagcctgcggagcctgtggggcagttcattcggctcctaaagaagtagcagtgtccaag

SEQ ID NO: 148774 - DNA, 100 bp, Homo sapiens
gcctcgcacattcagttggacaggacagtcattttgtttactcattcagccctgttgcaggtcccaataaactcttcataaggttgacagaagcaccctc

SEQ ID NO: 148775 - DNA, 90 bp, Homo sapiens
gacggacagtgcagggaagcaactgcagagcaagacactaagggcgactaccagaaagcgctgctgtacctgtgtggtggagatgactga

SEQ ID NO: 148776 - DNA, 101 bp, Homo sapiens
ggcggcaaaggagcagccatgagggccgggcccagtcaccgaccgttcgagaacttgtcttggacaattgcaaatcaaatgatggaaaaattgagggctta

SEQ ID NO: 148777 - DNA, 74 bp, Homo sapiens
agcgaggcactcatcctgcacgccggcgagtgccagcgacacgatgaggcgagtggtacgacagagcaagtttc

SEQ ID NO: 148778 - DNA, 75 bp, Homo sapiens
aagtatcagcatttaataacaaatagctttgtagaggacctcagcagccatgtcgaagccccatagtgaagccgg

SEQ ID NO: 148779 - DNA, 100 bp, Homo sapiens
tcccggacatgatcctctccgcctctcgaggtggatgggaagagagtcccaagggatgcagggcatcctctgtacccctttaatgacccgtactgagacc

SEQ ID NO: 148780 - DNA, 90 bp, Homo sapiens
agaaaatcgacttggactcagatggctttctcactgaaatacgaattggagcaatgttggcttatacacctctggatgagaagagccttg

SEQ ID NO: 148781 - DNA, 100 bp, Homo sapiens
atgtgaagaatcagaaatctttactgattccaatttaacagccaggtccttgcctgctgtgcagtctgatgaaagacttcagcctctgctcaatcacctc

SEQ ID NO: 148782 - DNA, 96 bp, Homo sapiens
atttcttacaagaagtcacaaacatttgaagacagtgatttgttccatttgattggtgttatctgtggcttagcaatttataattgtaccattgtg

SEQ ID NO: 148783 - DNA, 50 bp, Homo sapiens
atttggcacatcacatatgatggtcaggcgaacagtcagcttcaacaagc

SEQ ID NO: 148784 - DNA, 51 bp, Homo sapiens
cagcgtttcttgcaagaatgggagaatccagcaactatcacaagaatactc

SEQ ID NO: 148785 - DNA, 100 bp, Homo sapiens
ggagactttggatcggttggtgccactgaatggctagagaaccgggcggcccgagtacgcgtaagcaagggggacaagccggtgacctacgaggaggcac

SEQ ID NO: 148786 - DNA, 82 bp, Homo sapiens
caggactgcctgagacaagccacaagctgttcccagtgacctgacagcagaggagcgtcaagaactggagaacatccgacgg

SEQ ID NO: 148787 - DNA, 75 bp, Homo sapiens
ctatggcctccaggcttccgacggcctggtcctgtattttacatcctgaagtccaaactctagatctacggagct

SEQ ID NO: 148788 - DNA, 49 bp, Homo sapiens
atgttttactcttggtagaaaaagggagagacggggttttaccatgttg

SEQ ID NO: 148789 - DNA, 75 bp, Homo sapiens
agctattctgggggcaacagagggtatgttggagctagaggctgagcatgaccaggacctgagtaaacaggataa

SEQ ID NO: 148790 - DNA, 75 bp, Homo sapiens
aaaagctatcacccaagatagatcgagacctaagagaaggtggtcctgccgtcctacgaggaagccctgtctttg

SEQ ID NO: 148791 - DNA, 90 bp, Homo sapiens
gcaaactatcagaatgggaagaacaatgtgccaaggctgaaattatcctacaaagcattcctctgaatattgatttgctgaatagcccag

SEQ ID NO: 148792 - DNA, 96 bp, Homo sapiens
tttgccagacgccatcaccatactcttggacttcttagcctccagaattgacatgtctcaggaaggctatggaactagatctcaacctcctctggc

SEQ ID NO: 148793 - DNA, 100 bp, Homo sapiens
tgccgggggctttgccattgtgtattacctcattcaaactgtacctcccacaaggattaccccttccatgaagagttttgaagctgtggttgcctgctcg

SEQ ID NO: 148794 - DNA, 100 bp, Homo sapiens
ggttgttccgttgcgagctgcagctgcgatctctgtggtaggcccagaagtcctggagggtatttgggagccaaaaagaaaaagaagaaacagaagagaa

SEQ ID NO: 148795 - DNA, 100 bp, Homo sapiens
cttggttctcagaacatgggccctcgtttaaagatgctgggctcttgcactgtttggtggaaatggtgagacaggatttgagcaaaattctacttattca

SEQ ID NO: 148796 - DNA, 75 bp, Homo sapiens
accagccgactggagcaggcagcagcccaggagacaaggacggcagcaaggtgacaacagtggtggcaactcctg

SEQ ID NO: 148797 - DNA, 75 bp, Homo sapiens
acgttttccggagggattccatcatagggctccacgtgttccccacgtttgtggcgtacgagctcacggtgctgg

SEQ ID NO: 148798 - DNA, 98 bp, Homo sapiens
gggactccctggaaacctagaaatggccagaggcattgatgtgcagcaggtttctttagtcatcaactatgaccttcccaccaacagggaaaactata

SEQ ID NO: 148799 - DNA, 75 bp, Homo sapiens
atgtcttctaacgcagaaaagaaggatgggtttgtggagttcttccatgtagaggacctagaaggtggcatcagg

SEQ ID NO: 148800 - DNA, 50 bp, Homo sapiens
aggaggttcttcagtgtatgcctgatccgaaagcccccaatgtcgttgtc

SEQ ID NO: 148801 - DNA, 50 bp, Homo sapiens
agaaacaaaatgtcaacaaattgatgggaggaattttggggaaattaaaa

SEQ ID NO: 148802 - DNA, 75 bp, Homo sapiens
ggcaagcaggaggtgatccgaggctgggaagaaggggttgcccaggtgcccctgggcgctgggattgctctagcc

SEQ ID NO: 148803 - DNA, 95 bp, Homo sapiens
aaggttcagttggcaaaccagatatatgacttgcaacatctgaatgaattgatgacgaagaagtggctattagggtcaaacgctgtagacattat

SEQ ID NO: 148804 - DNA, 100 bp, Homo sapiens
ggaccggtttggaagactttgccggcctgcaggaagagagaagggcacagttacctaagtatcaacgtaatcttcctcggccaggacaggcccccatcgg

SEQ ID NO: 148805 - DNA, 75 bp, Homo sapiens
gcgcgcgcctcgaggccgagtcaaggcgaacagttgtctccaaacgtggtgttgccgtcagtggtcccaccaaga

SEQ ID NO: 148806 - DNA, 100 bp, Homo sapiens
tctccaggaagagcactcaggagaccaggaaaatggccacagggctcctgagagccaaaaaagaggtggtgggcgccaaggttgtgacaaatgcccggag

SEQ ID NO: 148807 - DNA, 101 bp, Homo sapiens
ctggtgaccattcagagctgtcccagaaccccaagcagggcggcattgacacccgggttcggggtgtggaggtcctgggccctaagcccacattctggcca

SEQ ID NO: 148808 - DNA, 74 bp, Homo sapiens
gctcggccggcaaccgagggacccgcgtccaggtgtggacactgccagcggctgcagccgacttggaatgacct

SEQ ID NO: 148809 - DNA, 85 bp, Homo sapiens
ttccccggcagcgggacccggcgaagacgcgaccgcggcgcgagtcaccatggaacctacaagcagcaattggcgcctattatga

SEQ ID NO: 148810 - DNA, 99 bp, Homo sapiens
cgaggagtctctgtccgggggcctggctaaggaaaccctattacctccaggggagcggccgttccattgcacgctttgtgagaaagccttcaaccagaa

SEQ ID NO: 148811 - DNA, 100 bp, Homo sapiens
agctcatgaaacgcaggaaagaggagcttgcacaaagccagcatgctcaggggtatagaacaggctatgcttacaggcatcctctcattcgagagaagcc

SEQ ID NO: 148812 - DNA, 90 bp, Homo sapiens
tgctgcactgctttcagcatgcaagtacggctcctacctggtctggaaagagctgggaggcttcacagagaaggctgtggttcccctggg

SEQ ID NO: 148813 - DNA, 101 bp, Homo sapiens
ttttaacgagtattccaaatttgatggcaaggaccagtccaccatgcctgaagtcaaagacctctcagaagccttgccagaaacgtcaatggatcccatca

SEQ ID NO: 148814 - DNA, 71 bp, Homo sapiens
gctcctcaagtgcaacaagtcccacttccgaaaccacaagtttgccgatgcgcaccacgaggtctgcccca

SEQ ID NO: 148815 - DNA, 50 bp, Homo sapiens
ggattttcccgggcggcgagagcggagctgcagcagctgctgtgctgcac

SEQ ID NO: 148816 - DNA, 96 bp, Homo sapiens
cccgattcccctggcgcggactctggcaccaacaaaactatctctttgaggtatataggtaccattttcaaagaaatgatgttctgagccctataa

SEQ ID NO: 148817 - DNA, 80 bp, Homo sapiens
gcttccgtcacctccgctcccccgatcctattcccagtcgtgtgctcttacagcctgttccaagtgtggcttaatccgtc

SEQ ID NO: 148818 - DNA, 83 bp, Homo sapiens
agctgaccctgggagacatcgacggtttggtgcacctcgatttggaggaagtagggcagggcccttatctggaaagaagtttg

SEQ ID NO: 148819 - DNA, 75 bp, Homo sapiens
tgggagcggccgagccatcccaattaaacaggtcatttgattgcccgcctcagaacgatggatctgcatctcttc

SEQ ID NO: 148820 - DNA, 75 bp, Homo sapiens
tcgtggggatcttggcagcgctgcaggctggagaagcgactggaggagtggttggggaggacattgcctggcagt

SEQ ID NO: 148821 - DNA, 75 bp, Homo sapiens
ttcaccaaggaactggtgctgcagcgagaggactcacaccacccggcaagaactgctcactacggctccctgccc

SEQ ID NO: 148822 - DNA, 100 bp, Homo sapiens
tcgaactatgtggaggagatgtactgtgcttggctggaaaaccccaaaagtgtacataagatatgaagagaaggctactaaagacttggaacgatacaat

SEQ ID NO: 148823 - DNA, 100 bp, Homo sapiens
gaacactgtactgaactacatcttctctcacgctcaagtcaccaagaagaatcttctggtcacaatgcttattaactgccattggatgtccagaatcccc

SEQ ID NO: 148824 - DNA, 100 bp, Homo sapiens
ctgctctggcctcgcttgttgctcttcggggactccatcacccaggactttgaagaatatcctgaacatagaacgaactttttcttactacttcaggctg

SEQ ID NO: 148825 - DNA, 50 bp, Homo sapiens
cctactcccccaccggggatttcagtcaggatggctaaaggtgaccccaa

SEQ ID NO: 148826 - DNA, 98 bp, Homo sapiens
aacaagaaaagaaatgtcttctagtactttaaatttagtggttgctggagcacctaaaagtcagattgttctttatagctccaagctctacagattct

SEQ ID NO: 148827 - DNA, 82 bp, Homo sapiens
cgatggttctcgaaggcccgcggcgccccgtgctgcagatttcctttgacctcgctgagtacactgcggacgttgacggagt

SEQ ID NO: 148828 - DNA, 80 bp, Homo sapiens
cgcttttgctcctcctgaagtgtctttggtccaacgttgttccagaaagacgcttctggggccagcttatggttccccta

SEQ ID NO: 148829 - DNA, 75 bp, Homo sapiens
cgacgtcttgcctgtgtcccacttgttcgcggcctataggttctccttactatgacaatgtccgccccctctctt

SEQ ID NO: 148830 - DNA, 98 bp, Homo sapiens
ccagtggatacgttcagggtataaatgatctcgtcactcctttctttgtggtcttcatttgtgaatacatagactgcttttggcttctggatgccctc

SEQ ID NO: 148831 - DNA, 100 bp, Homo sapiens
gcccgctaggcgcgccgtccccagccccgccgccggccctcggtgcgcccggccgcctgcacccccagcatgacctgcaggggaagctgcagctacgcta

SEQ ID NO: 148832 - DNA, 83 bp, Homo sapiens
tttgtcgaacgatgttggactcatagtcactgccagaaaggttatgatgtgattgctcaagcccaatctgggactgggaaaac

SEQ ID NO: 148833 - DNA, 98 bp, Homo sapiens
ctgccgtccttctccactttcgccagcccgtgccgcgagcgcggcctgcaggagctacgagttccagggagctctgtcctggtgaccgtgcccgggtt

SEQ ID NO: 148834 - DNA, 75 bp, Homo sapiens
tcgacatgagtgatgtggaggaaaacaacttcgagggcagagacaaattgatggccaggagatcactgccaccgc

SEQ ID NO: 148835 - DNA, 75 bp, Homo sapiens
gcagtggtcgcttcttctccttgattgttttacaaggacatgctacaagagtaactgctaaatctcaacagagtg

SEQ ID NO: 148836 - DNA, 100 bp, Homo sapiens
gagcgcttgaaggagctgcgggattggaggctgttgtcattggagaagttcatgagaatgttactctgcactgtggcaacatctcgggactgaggggcca

SEQ ID NO: 148837 - DNA, 82 bp, Homo sapiens
cgggaccggagaggaagcggaggtctgaagggggacaggtgagaagccctaccactgcaactgggacggctgcggctggaag

SEQ ID NO: 148838 - DNA, 102 bp, Homo sapiens
ttggcattttagatctaattcaagtgtcacaacataatgaaagttgctcaagccaaactggaaatgataaaacctgaagaagtaaacttggaggaatatgag

SEQ ID NO: 148839 - DNA, 50 bp, Homo sapiens
aaagtatcccacatgacgagtgatgagggaatctcgctgggaagctgaca

SEQ ID NO: 148840 - DNA, 75 bp, Homo sapiens
ctgaagatcctactgaggtgcctggtggatttttaagtgacctgaacctggaaccctaaggactctgcaatatga

SEQ ID NO: 148841 - DNA, 90 bp, Homo sapiens
ttctacagcagagaccttgagggatatctttcttcactcctcttcacttcttcagaagaggagcaggacttggatggtgagaaggggcca

SEQ ID NO: 148842 - DNA, 101 bp, Homo sapiens
taaactttcctgctgggtatataaagacagagtaatcaagtcagaggattatatgacttttatctgcctagagaagaactatggatctacaacatggagac

SEQ ID NO: 148843 - DNA, 83 bp, Homo sapiens
cccagaccctggagcctcagttggaagcagccgatccagcctgcggagcctgtggggcagctaaaccatttacacagctggtg

SEQ ID NO: 148844 - DNA, 75 bp, Homo sapiens
tggagagctcatctggaattttgccgatttcatgactaaccagtagatgtatctctaaagaacgaatgattgcag

SEQ ID NO: 148845 - DNA, 100 bp, Homo sapiens
ctgtaatactaaatgtgttaccataccaagaattctgcttggtcagaatcgtgatggcattgtgttcagcactgatgactattttcaccatcaagatggg

SEQ ID NO: 148846 - DNA, 75 bp, Homo sapiens
ctgctccgcaccccggggtcccaggaagggcggcccaggaaactactttgcttcgcactttttcatgggaggaga

SEQ ID NO: 148847 - DNA, 97 bp, Homo sapiens
ggtgggcccagtcctcggtgcggcgcggccagaggacagttatgggatggatgggaaggttaatcagccccgtctcactgcagacatcaactggcaa

SEQ ID NO: 148848 - DNA, 83 bp, Homo sapiens
gccgcgcacttcgtcatgttcttcgcgccctgatggtgtcggacggcatgacaggcagcaatcctgtgtcccctgcctcatcc

SEQ ID NO: 148849 - DNA, 74 bp, Homo sapiens
attctgagcaagagaatgggctgggcagcctgagtcccagtgatgactaatggctgaaggataaatcaacatgg

SEQ ID NO: 148850 - DNA, 75 bp, Homo sapiens
gactccaggacacccctgaagccgagaaatgattgagaggatccagaatccagatctctggaatagctaccaggc

SEQ ID NO: 148851 - DNA, 100 bp, Homo sapiens
gtcggcgacagcggccggggcgcaggcgcccgtgcggaatggcagtgggtaattccagaattgattggccataccattgtcactgtattactgctcatgt

SEQ ID NO: 148852 - DNA, 100 bp, Homo sapiens
cctggacctgagtcacaatggattgctggttgtggacaatctgcaggaggaagaagacctggcggcaggtgtgggccgcagccgagttccagtccgccca

SEQ ID NO: 148853 - DNA, 100 bp, Homo sapiens
ggagtatcttcagaggtaccacatcatccacaggcttgcttccggcgtcatggctcaaagggccttcccgaatccttatgctgattataacaaatccctg

SEQ ID NO: 148854 - DNA, 75 bp, Homo sapiens
ccggacggtacttctgccactgctgctccgtggagatcgtcccgcgcctgccgccctgggcgctgcctatggcac

SEQ ID NO: 148855 - DNA, 105 bp, Homo sapiens
gatggatgtcttcatccccaagccattcagggcctttgcctttgttacatttgcagatgatcaggtaccattgttggatactggtgacatcatcattgacggagg

SEQ ID NO: 148856 - DNA, 90 bp, Homo sapiens
gaaacaaaggcaaatacagccccactgtgcagacccggaggacatagtggaagatgaagatgatgactttctgaaaggcgaagtgcccca

SEQ ID NO: 148857 - DNA, 76 bp, Homo sapiens
cctcccgaagctacagactacagatcgggcactttctgtgtctaggaatgggtaccacagaccatgtcatcgtcct

SEQ ID NO: 148858 - DNA, 100 bp, Homo sapiens
gaaagtaacgcatttttgtttttggaaggagaaggatagacttggctttgaggactctgaaaaggaatcttgcccaagcagtgatgaagttgatgaggag

SEQ ID NO: 148859 - DNA, 75 bp, Homo sapiens
atgccacagaatcaggggaggcatgcttcaggtgcaaagttccccatcaagtggacggcccccgaggcagccctg

SEQ ID NO: 148860 - DNA, 98 bp, Homo sapiens
tacaaggatgtgatgatggggacctatgggaacctactctcattaggaaatctgaaatagagtactatgctatgttggctaaaactggtgtccatcac

SEQ ID NO: 148861 - DNA, 100 bp, Homo sapiens
ggaaggtgactattttggcctcgagtttcctgatcacaaaaagatcacgaaaactacccctgagtgtggtcccacaggatatgtagagaaaatcacatgc

SEQ ID NO: 148862 - DNA, 101 bp, Homo sapiens
cgcaatggacaagctgaagaaggtgctgagcgggcaggacacggaggaccggagcggcctgtccgagattgtaaaccatggctgtgtggatacaagctcag

SEQ ID NO: 148863 - DNA, 75 bp, Homo sapiens
tagggacgaattggagaagaaggatggaggttatgatgtgattgctcaagcccaatctgggactgggaaaacggc

SEQ ID NO: 148864 - DNA, 100 bp, Homo sapiens
actcgggtggggaggcccaagccaagaagttaggaaacaactgcgttttcgccccagccgacaacggccggtttgtgggcgatgctgaccttgaaagaca

SEQ ID NO: 148865 - DNA, 100 bp, Homo sapiens
ccgtatctcagcaggaggacaggtgccggagcagctcgtgcagctaagcagccaactgcagaaacgtcagacgcagtaaaacgcaggactcttcccgctt

SEQ ID NO: 148866 - DNA, 80 bp, Homo sapiens
cacagagcctcgcctttgccgatccgccgcccgtccacacccgccgccaggaaccaggtgcagatgggtctcttccttcc

SEQ ID NO: 148867 - DNA, 83 bp, Homo sapiens
caatcccccactctttccgccctaatggaggtctccagtttcgccgcggcgagtcctttgcacatgttggcaacacacgcatc

SEQ ID NO: 148868 - DNA, 100 bp, Homo sapiens
agacaacttcctcaccagcaccttacaggatgagcagcagcaagagatggccgcttctgccgccttcatagaccggcattacgggcacctggtagacgcc

SEQ ID NO: 148869 - DNA, 133 bp, Homo sapiens
atgatggagccctttaccacaacaatgaagagaaaaataggctgccagcaaacagtcttccgcaggaaggagatgtggcagtttgaagagaacacatgaagaagaggatgattttggaaccatgcaagtggcg

SEQ ID NO: 148870 - DNA, 100 bp, Homo sapiens
gatgggatgtcaggtcgggaaccatccttggaaatcctgccgcggacttctctgcacagcatccctgtgacagaatacgctgccatcaactccatgctgg

SEQ ID NO: 148871 - DNA, 100 bp, Homo sapiens
ggaactggatcgaggctctgagaaagaccgtacgtccaacttcagccccagatgtcaccaagtttcatggcatgatctccagagaagcagccgaccagct

SEQ ID NO: 148872 - DNA, 83 bp, Homo sapiens
ctgtttcttgatatggaagcagctacagggcaggagaatgaacactccatgagagcagggacctgctttgccttgttcaccac

SEQ ID NO: 148873 - DNA, 100 bp, Homo sapiens
cgcaaaccaaggatctggggatcttcgcactatcccaagactggatgttgaatttgttctctcagcacctatttctgaatggaatggcaaacagggacat

SEQ ID NO: 148874 - DNA, 74 bp, Homo sapiens
gccgttctcagccagaatcacaaagttcctgccatctccctggcttatgagcaggctgagagtgacatcatgaa

SEQ ID NO: 148875 - DNA, 50 bp, Homo sapiens
ccgggactgactttgcctacggcaagatgagttccacccgttcatcgagg

SEQ ID NO: 148876 - DNA, 101 bp, Homo sapiens
ggtggcatgggcagtgggcagcccctgccaatggcctggcaacagctggtcctccagaacccttaggagaaatcttgagagtggacagcaattgtgaagat

SEQ ID NO: 148877 - DNA, 100 bp, Homo sapiens
tagtggatatagcacaccatccccagccagtatggacctgtctgccaatcaggacgaggagaccgaccaggagaccttccagctggagatcgaccgcgac

SEQ ID NO: 148878 - DNA, 73 bp, Homo sapiens
acttcatcgtctccatcctctacctcaagtatgagccagtttgtagatgcggacaacctgatcctcaaccctg

SEQ ID NO: 148879 - DNA, 98 bp, Homo sapiens
tgtcctcctccgtcatcgagcagctcttcttcgtccgtttgatgtttggtcagctggctgtgtactggcagagctcctcttgggccagcccatcttcc

SEQ ID NO: 148880 - DNA, 88 bp, Homo sapiens
cctctgggtcctcggtcggtacagtctctgcacctcgcgccccagcagtataaggatgcatttatgaaagcaaatcctggctacaaat

SEQ ID NO: 148881 - DNA, 98 bp, Homo sapiens
gtgaagagtgaggagaccatagctgcacagccaggtctggtgagctgtaccttctttctggcagtgaatggtctgtattcctctagtgatgatgtgat

SEQ ID NO: 148882 - DNA, 98 bp, Homo sapiens
tggcacagtggagaaaccgcctcgaaaacggagaagcagggtaccgtgagggttttctctggaagcgtggccgggacaacgggcagtttttgagccgg

SEQ ID NO: 148883 - DNA, 90 bp, Homo sapiens
cgttaatacctgttggaaatggattatcattggctgggacgattgattgtgaaagtcaccatggatatccatttgaatgaaatggctgga

SEQ ID NO: 148884 - DNA, 141 bp, Homo sapiens
tggacgtcaacagcaatggcggaaggagaagatgtgccgccgctgccaacgtcgagcggcgacggctgtgccggtggtggtgtgcacattgagccccggtatagacagttcccccagctgaccagatcccaggtgttccag

SEQ ID NO: 148885 - DNA, 100 bp, Homo sapiens
acggcctcaggacatcaaggagcgccgagcagtcatcatcctcaggaatgggcatccccaccatcagatggtgcggggcagagggggactacaacgtcat

SEQ ID NO: 148886 - DNA, 96 bp, Homo sapiens
aaaggaaagccgggtatctgtggtctttaagatgtggcagcacacttctgcttttgttccttcatcaggacgaatttactcttttgggcttggtgg

SEQ ID NO: 148887 - DNA, 100 bp, Homo sapiens
gaagatcatcattaaggacggaggcacgttatataagtttggagagacagtttctattgttttttggacagacacttggagaccagaaagcttctttgac

SEQ ID NO: 148888 - DNA, 74 bp, Homo sapiens
accgagagcgcgaatatcgtcatcgttagaaggcatctgggtcacaggccccagttccaccccctgaagcacgg

SEQ ID NO: 148889 - DNA, 75 bp, Homo sapiens
ttccagaaagctggttgtgggaagttcatcttgttcccagaaggattaggcagaatctgaaggaaaagcatgctc

SEQ ID NO: 148890 - DNA, 51 bp, Homo sapiens
aatgagatgatagccaaaccctcaggtatctcagatgaagacatcatcaac

SEQ ID NO: 148891 - DNA, 75 bp, Homo sapiens
atgattgcaactgggtgggtcaaaggtgagacgtggtcttgtaacacagtggttaagaatgtgactttggagcca

SEQ ID NO: 148892 - DNA, 82 bp, Homo sapiens
tgctctctttgcaaacctgtttggagtgctcgccctctttcagtcaggtcggctggtgaagatccactcagtacaccagcgc

SEQ ID NO: 148893 - DNA, 75 bp, Homo sapiens
ctttgccagcaaaaccgaaacagatgaagactggcccatttgcagagcactccaaccagctgtggaacatcagcg

SEQ ID NO: 148894 - DNA, 75 bp, Homo sapiens
gttgcctatcagaagtcaattcaaaggacctgcccccagagagagtatgggaggacatggctatggtggagctgg

SEQ ID NO: 148895 - DNA, 75 bp, Homo sapiens
aaggattccaagtaactcttatttgttgactggattgttgctgacatcttggccatcaggcagaatgcgctagga

SEQ ID NO: 148896 - DNA, 88 bp, Homo sapiens
gcgggctccatcagcatggctgaggcttgctgggtacttcactatttttgtgaagtgaagttcaaaagtgatcagaaccttcaaacag

SEQ ID NO: 148897 - DNA, 75 bp, Homo sapiens
gcagccgatccagcctgcggagcctgtggggcagccaaaacagagtggagtacgagaaaagggtccgagcacaag

SEQ ID NO: 148898 - DNA, 75 bp, Homo sapiens
tttttattgacgaaaatggaacagcaacaattagagagagaaaaggaacagttccgtaagctctttattggtggc

SEQ ID NO: 148899 - DNA, 75 bp, Homo sapiens
gctcctgctaccagttacgatggcaaaacagcagtgaccgagatcgtcaacagggtattctcccaacagaaatga

SEQ ID NO: 148900 - DNA, 100 bp, Homo sapiens
cagaagggacagtttgtgccagctctccagagagaaaaggtggaagcagggaaaggcctggagatgaggaagctggttctctcggggttcttggccagcg

SEQ ID NO: 148901 - DNA, 100 bp, Homo sapiens
tcacgttataatcagattttgaccaagcattttgtaagatgccttattggaggaactggaacgctccacccttcaggacagtgatgaatattccaaccca

SEQ ID NO: 148902 - DNA, 100 bp, Homo sapiens
agacatgggactggaggacgagcaaaagatgcttaccgaatccggagatcctgaggaggttgaaatcacaaagattagacacctttttagataggtgttc

SEQ ID NO: 148903 - DNA, 83 bp, Homo sapiens
gacggcgatccgggcgctcgagacttaccagagccacaagatcaatgtccgagttaccaccatggatgcagagctggagtttg

SEQ ID NO: 148904 - DNA, 100 bp, Homo sapiens
agaatgcatcagtgcccttgtggcgaatggggctcacgtcgagttggatggcaagcatgtggtgtttggcaaagtgaaagaaggcatgaatattgtggag

SEQ ID NO: 148905 - DNA, 75 bp, Homo sapiens
cgcacctctgtttgggggtcctcagatgatgaggagtctgatgaggaagctgtgaagaaaaccaacaaatgtgta

SEQ ID NO: 148906 - DNA, 100 bp, Homo sapiens
aatggacgagtaatcgcctgctttgattcattgaaaattctgattcccagcatagccacgaagtgatgcctctcctctatcctctctttgtctacctcca

SEQ ID NO: 148907 - DNA, 75 bp, Homo sapiens
cggatttctgctatgatgacagggctttgtgaaggatgtccatgaagactctgtcaccatcttctttgaaaacaa

SEQ ID NO: 148908 - DNA, 83 bp, Homo sapiens
aggcaagagctgatttggcctctgtgctcccctccgcaaggggatcgttttctccaggtgctgactgggttacttttttaaac

SEQ ID NO: 148909 - DNA, 100 bp, Homo sapiens
gcttgtggtgcggcctcaccatacaggaacagggcagacgttagcgtgagtgatcactctcaatcccgggcctcccagaagttcctgccgaatcgtcttc

SEQ ID NO: 148910 - DNA, 74 bp, Homo sapiens
ggggacctgccggcacgcgactccccccgggcccaaagccaggggttatcaccatgcaagctttgtcggaagag

SEQ ID NO: 148911 - DNA, 74 bp, Homo sapiens
gctcgcggaacactcgcctgtccccgccggcttcggcttcagcgccgcggatatgagggaaggcaccattggag

SEQ ID NO: 148912 - DNA, 83 bp, Homo sapiens
ggggcgacgaggcgattgcgggggcctgggctagcgtccagaggaccagaggttaatttattctgggaagctgttgttggatc

SEQ ID NO: 148913 - DNA, 83 bp, Homo sapiens
gtctgatcagctgctgcgtgctcagccccagagcaggtactaggttttgacaagcttgcatcatgcgtgagtataagctagtc

SEQ ID NO: 148914 - DNA, 100 bp, Homo sapiens
cccggatgttgcggacagtatgaggcaagcgcagggggacggggaccagcagctgtcgccgccgctctcaggagaataaaggcagccccgttgatgactg

SEQ ID NO: 148915 - DNA, 89 bp, Homo sapiens
cttctcttcctcagggctcccgtgtctgctcgccctccgacgctgctcagcatcaagcttctagctgtgcaagaactgcttgacagaga

SEQ ID NO: 148916 - DNA, 100 bp, Homo sapiens
gacctgcacgacgttcatagttgactccacagatccgggtatcatcgagaaaggagaagaacactgtggacatctaattgaggcccacaaggaatgcatg

SEQ ID NO: 148917 - DNA, 96 bp, Homo sapiens
gtccagccagggtcctgggccgcgacctggttctcccggagtctacagggaacgcccttttgcttgtgactggcagggctgcgacaagaagttcgc

SEQ ID NO: 148918 - DNA, 90 bp, Homo sapiens
cctcgcctcccctctgaggaccgaagatgagcttcctctttttggcctgtcactgctcctcatcctcctgagccgtggtgaagacctaca

SEQ ID NO: 148919 - DNA, 75 bp, Homo sapiens
gtggactttgaacaggtggtggatcgcattcgcagcactgtggctgagaagtttccaagggtcacttgtgtctcg

SEQ ID NO: 148920 - DNA, 100 bp, Homo sapiens
ccagatcgggatttacgtggagatcaagcgcagcgatggtattgttgcagcatctggcagtgagactgaggatgaggacagcatggacattcccttggac

SEQ ID NO: 148921 - DNA, 86 bp, Homo sapiens
actgcgtcgggctggtgcagccccgggccaggccgcggccggggcaggagcgcagtgtttgatgatggtgatgagcgaacattgag

SEQ ID NO: 148922 - DNA, 73 bp, Homo sapiens
ctggcttagctattcattgcatgcagacatttgaagacagtgatttgttccatttgattggtgttatctgtgg

SEQ ID NO: 148923 - DNA, 74 bp, Homo sapiens
cactggctaattatttatactgacccaacatgagtgaagtttcctgcaagaaacgggacgactatttggaatgg

SEQ ID NO: 148924 - DNA, 75 bp, Homo sapiens
tttcttaaaggactgatttttagaactccacatttgaggccgacgcccccaacccatccctcatcccagagactg

SEQ ID NO: 148925 - DNA, 50 bp, Homo sapiens
ctactacaccgcctgggtgattctcttgggcttctgcactgactcctgag

SEQ ID NO: 148926 - DNA, 100 bp, Homo sapiens
aacatttcatgagagaagaaatacaggatgcctctcagctgccacctgcctttgacctttttgaagcctttgcaaaaatgcagagagaacttgtttatgc

SEQ ID NO: 148927 - DNA, 50 bp, Homo sapiens
tttcagaccaatgccagaggagcaacaggagacaaggacggcagcaaggt

SEQ ID NO: 148928 - DNA, 76 bp, Homo sapiens
tatctgcgcaccttggagtccaagcttgtgctctttggtgctggagaatctggtaaaagcaccattgtgaagcaga

SEQ ID NO: 148929 - DNA, 52 bp, Homo sapiens
agcagccccggggcccggagagggctcaaaatctccttcgccaagaccaaac

SEQ ID NO: 148930 - DNA, 95 bp, Homo sapiens
aaatctggcatattagcgctagccctgcagacagaggtgtgctgacgacctgctacaacagaatgaagtacctggctttcctccgcaagcggatg

SEQ ID NO: 148931 - DNA, 82 bp, Homo sapiens
ctgaagaccactttagaaactcaattaagcttgttagcagtggcacaagatcttacagaggatgaagaaacagtagaagatt

SEQ ID NO: 148932 - DNA, 83 bp, Homo sapiens
cagcgcgtgtgcatccagcgcaagcccctcagtggtcttgctgcggagcccgaggccccaatgactggaacctcaatatctac

SEQ ID NO: 148933 - DNA, 90 bp, Homo sapiens
cacgagtgcccggagagaagcctgagctgccggcattgccgggcaccctgctgcggagcagacgtgaagctgcagcccgaggactggaca

SEQ ID NO: 148934 - DNA, 87 bp, Homo sapiens
gagatccacagctaagacgccaggactccctggaagcctagaaatgacactacaacaacaggagtgcaaacttctctacagccgaaa

SEQ ID NO: 148935 - DNA, 90 bp, Homo sapiens
cgccctgggcgcggccctgctcctgtcttccattgaggcagaagcttgcagttccccacaatgatgaatggacccgatttgccaggaccc

SEQ ID NO: 148936 - DNA, 75 bp, Homo sapiens
tttggaattgaccctcaaaacatgttcgagttctgggatctgtccgcaggcttgtccaaaaggaaacatcggaat

SEQ ID NO: 148937 - DNA, 78 bp, Homo sapiens
cagagccccagtcagccaagtttcagacagaccgtgagcagtgtcgtgaaaactacccctaaaagccaaaatgggaaa

SEQ ID NO: 148938 - DNA, 80 bp, Homo sapiens
tgctgcggcgcggggaccgctgtgctctcggatacaatgtctctttgctatatgaccttgaaaatcttccggcatccaag

SEQ ID NO: 148939 - DNA, 100 bp, Homo sapiens
agggcagaggaaaatgcaagaagactgatggagcaggcttgcaatattaaataaaggcatgacttcctggcaccacagggaaaatcgggtgcaagcccag

SEQ ID NO: 148940 - DNA, 75 bp, Homo sapiens
ggggaagaccagagcattgaagatcagtacaaaaattcttcaagaaatctaagtttgaacaaaaaagtggtgcag

SEQ ID NO: 148941 - DNA, 98 bp, Homo sapiens
agggcattcgagtctccattgcacaatggccagccctgtgtgtttcctgtaacaaatcgttcaagaaactctggtcccttcatgaacatatcaagatc

SEQ ID NO: 148942 - DNA, 117 bp, Homo sapiens
cgagcgtcgccgccgccgccgccatgaacaactcgggcgccgacgagatcggagttctctgtggcccatgaccttcggcctggcctgctgcgccgtggagatgatgcacatggcagc

SEQ ID NO: 148943 - DNA, 83 bp, Homo sapiens
gggggtcccccacacctgtcttccagctgggcatatctcttctcaccctgaaacgcttcgttaagggactcaggcagtacggg

SEQ ID NO: 148944 - DNA, 50 bp, Homo sapiens
tggtgcggctcatcttcgagaggttcaggaacaagtgcatcccactctct

SEQ ID NO: 148945 - DNA, 90 bp, Homo sapiens
cgacgacggtccctcagcccagccaccatgagcaccaagcagatcacttgcagggtgcaacaccggaggatttcagcaacctcccacctg

SEQ ID NO: 148946 - DNA, 82 bp, Homo sapiens
gattcagtatcaccgtgtgtgtaaagctctttctaagaatcgtaagcatccagagctgctgttggcggattgtacccacggg

SEQ ID NO: 148947 - DNA, 85 bp, Homo sapiens
tgctatacaacacaattataaaatgtcagcttttaaggaggcaaggtctcactcggtcatccaggttggaatgcagtggtgtgat

SEQ ID NO: 148948 - DNA, 100 bp, Homo sapiens
aatagcagtgctatgttactgcaatggcatgaaaagctgcgactttaggtggggtatattttcttctcctaagagaatagacagtttttccagattcatc

SEQ ID NO: 148949 - DNA, 127 bp, Homo sapiens
aacctccacatctgcggtgaggcatgcctacctgcagtgcatgttggcctcttaccgggatgttcaactgcatcacggagctggtcctccgagcaaagaaagacaacctggcaaaacagcagcagca

SEQ ID NO: 148950 - DNA, 97 bp, Homo sapiens
agcggagtgactgggacctgggaacctactgtggggccgcggccggaccgagcgcctcgacctcggtctgagacaagttggatggcttgaggactgg

SEQ ID NO: 148951 - DNA, 100 bp, Homo sapiens
tttttgaagactgttgcccaaaactacagttctgtcactcacttacacagtattgggaaatctgtgaaagctcagcgacatgtcctcacctacatggagg

SEQ ID NO: 148952 - DNA, 98 bp, Homo sapiens
aggagcagctgaagctgaagcaactgcagaaagaggagaagcttcggaaacagctttggcctatggtatcggggtaaagctgaatcctctgaggatga

SEQ ID NO: 148953 - DNA, 97 bp, Homo sapiens
ccgtcgctctgtgacctgctggcattgaatgatttatagctaagactccaggacacccctgaagccgagaaatgccatatcctgcaaatgagagttc

SEQ ID NO: 148954 - DNA, 97 bp, Homo sapiens
gctccgggcaagcagcaggctgcctgacacaggagagggccccagcagggccaccgggcggcaaggctatgctcctgtcaccggcatgtgccatccg

SEQ ID NO: 148955 - DNA, 100 bp, Homo sapiens
ccaatggggtagcgctccccccattggacaagtggaagccccaggaccaaattaccatcacagggtacgaaaagaacacagaagctgccagggatgctat

SEQ ID NO: 148956 - DNA, 75 bp, Homo sapiens
gttgtctccagctgttagccagaagcctcccttccagtcagggcactatcctgaggagcgacatgtggttgaacg

SEQ ID NO: 148957 - DNA, 90 bp, Homo sapiens
cgcagccacagcgcccacttctttgagtttctcaccaaggagctagccctgggccaggaccggatgacgcggcatggcaagaactgcacc

SEQ ID NO: 148958 - DNA, 82 bp, Homo sapiens
ccggtgcccgaggaggcagccaagctcgtggcctgcctctgcgtgctgtctgcgagattaatctctcatggccgctgcacaa

SEQ ID NO: 148959 - DNA, 75 bp, Homo sapiens
ccggcgcaactccgcaccgcagagccggcgcctcctcggcaggttattcagcttctcaaggctggaaaagcgaag

SEQ ID NO: 148960 - DNA, 83 bp, Homo sapiens
gcggaaagctctggaagccaaggcagctgccttcgagaagcaggtcctgcagctgcagttcaaatctgaacatcaatgatgta

SEQ ID NO: 148961 - DNA, 83 bp, Homo sapiens
ggataaaggagctgggaggtcctgattatggaggaactctaatgatccaggacaaagaagttaccctggagtatgtatcaagc

SEQ ID NO: 148962 - DNA, 82 bp, Homo sapiens
ttgggatcttcttcactgcctctggcatggatgagaatgtgacagtgatgataacatgggtgccaaaaatacttcaatagga

SEQ ID NO: 148963 - DNA, 75 bp, Homo sapiens
tcgcgtttccacttcagagatctgactgtgagctgcttgtccccatcctgcggccgtcctggggacacagagccc

SEQ ID NO: 148964 - DNA, 80 bp, Homo sapiens
ctcgacctgctaacagaactggaccttttcgtttcagagactcctccactctctgggaatgacacggactccctctcctg

SEQ ID NO: 148965 - DNA, 100 bp, Homo sapiens
cagttgggtaccgggaggggcgaaggcgggcggcagaggcgatcagaacaggccgcccgcctgaagaaactacaagagcaagagaaacaacagaaagtgg

SEQ ID NO: 148966 - DNA, 100 bp, Homo sapiens
aagagaatagtaggctgcatctatatggctcgtggacagcagaaaattcagtctcagcagaaaaatgccaaaaagcaagctggacaaaagaagaaacaag

SEQ ID NO: 148967 - DNA, 80 bp, Homo sapiens
gaggcggtggctgcggttgcgggaccggtaactaggatttctacctcaaccgcgagacctatgcaaggacggtgtggacc

SEQ ID NO: 148968 - DNA, 75 bp, Homo sapiens
tacagcgccggtcaacatcgcggtcatcaagtactagagaaaattcatgaaccctttcaacatgcctaatctgta

SEQ ID NO: 148969 - DNA, 100 bp, Homo sapiens
agcagtactgattatgctaagattctgtggaagaaaggagaggccattgggttttattcagttaagcctacaggcactttggaaagacatgagacaggag

SEQ ID NO: 148970 - DNA, 75 bp, Homo sapiens
ggtgccctgaagggagctgtggatggaggcttgtctatccctcacaggcgtgcaatggaattgagttttgccctg

SEQ ID NO: 148971 - DNA, 98 bp, Homo sapiens
aacctcttgaggatcgaatcttcactcccgctgtctcagcagtctacagcacgatctacagacagtcaatgtggatgagaactaatcgctgatcgtca

SEQ ID NO: 148972 - DNA, 120 bp, Homo sapiens
ctgcagaaattggggaaagctgtagaaaccaaagatgaacgatttgaacaaagcgctagcaacttctaccaacaacagaaaatggatattccagctaaattgattgtttgtggaatgaca

SEQ ID NO: 148973 - DNA, 58 bp, Homo sapiens
aaacaaatagaggaagaagatctaatcatatgtatcactggacaggccatggctccac

SEQ ID NO: 148974 - DNA, 105 bp, Homo sapiens
tgcctgtggcccgggcggctgggagaagcggagtgttgcggccgccagctcctgctcggtgtccaaaacaaaatggccgccacgtccagtgcttgtctgaccggc

SEQ ID NO: 148975 - DNA, 75 bp, Homo sapiens
cggaagaccaaagaggatgagaaggacgacaagcccatccgaggagtgatttgggccccgatgttggctatgaag

SEQ ID NO: 148976 - DNA, 58 bp, Homo sapiens
gtggagtgtaggtcatatcgccgcggcagtagacccaggcctgccttctgtgaagcaa

SEQ ID NO: 148977 - DNA, 95 bp, Homo sapiens
atggcaggacgaagatcttcccaggatgagttccacccgttcatcgaggccctgctgcctcacgtccgcgccttcgcctacacctggttcaacct

SEQ ID NO: 148978 - DNA, 89 bp, Homo sapiens
gcgccccccgcccgtgccctcccgctcggccccgccagcagcactgtggaggccgtcctcggcatgcggatcctggtcactctgctgct

SEQ ID NO: 148979 - DNA, 95 bp, Homo sapiens
cgtggagaattttgcttgtgcaagattatttcagagcaaggtcgtgcggtgtgtgtagaaggtcagcccaaggctgccccctcggtcactctgtt

SEQ ID NO: 148980 - DNA, 100 bp, Homo sapiens
gtgtgattagcttcgcagtctggaaagctttaggagttcacagtgaaccactcgttttgactattattttatcactctttgtgaaacttcacaatgttcg

SEQ ID NO: 148981 - DNA, 129 bp, Homo sapiens
aaaaaggctcaacaagaaacaggagaacgggaagcctcctgccgagataaagccaccacgtctgaaagtttcctacactactgaggtttaggggcactgtgaagcaaaagccacgcctcagaatcccag

SEQ ID NO: 148982 - DNA, 100 bp, Homo sapiens
tacctgaagtatgccattagttcccaggtgtcagcggtgcccactgtgctggccatgaagaatggggacgtggtggacaagtttgtgggcatcaaggatg

SEQ ID NO: 148983 - DNA, 100 bp, Homo sapiens
agaaaggagccaaggatgactcaagtttttggccagaacctactgaacgtgaacgaacagaaaggctaattaaaaccaaattaagggagatcatgatgca

SEQ ID NO: 148984 - DNA, 75 bp, Homo sapiens
aaccgtggtggagttgcttaagggacaagaatccttcaagaaacaggaaaaaactcctaaaacaccaaaaggacc

SEQ ID NO: 148985 - DNA, 96 bp, Homo sapiens
tgaatggtatatacgtggacaaacaatatgtattgataaaaaagatgaatgtcctacaagagccttgcttcctgttttacatcacaaatctaaaaa

SEQ ID NO: 148986 - DNA, 74 bp, Homo sapiens
agggactgagtttggcccaggaacagcttatgggaatgggtactgttcaaaaaggaatgccccacaagtgttac

SEQ ID NO: 148987 - DNA, 75 bp, Homo sapiens
gtgcttccaccctggacgaagccacccccaccctcaccaaagctgccaaacggaggcccgaagaaaaagaacctg

SEQ ID NO: 148988 - DNA, 75 bp, Homo sapiens
actggaactgcaaaggcttcagaggatgaatgctatcaagtaagacaagtgtttgcccagaaacttcacaaaggc

SEQ ID NO: 148989 - DNA, 73 bp, Homo sapiens
gggacgttgctgctgcccttgacttcctgcataccaaagggcatgaagaagagtgtggggctgccggtggccg

SEQ ID NO: 148990 - DNA, 74 bp, Homo sapiens
gaaatcgcctcccgagaagaagttgaggcgctatgtgtgactgcacagaaaagttacaaaacaaatttgacttt

SEQ ID NO: 148991 - DNA, 98 bp, Homo sapiens
ccgtcttcctatccttacccgacctcagatgctcccttctgctcctggcctctccttccgatgaaaagagaaaggaagaatggactacagccaccaaa

SEQ ID NO: 148992 - DNA, 89 bp, Homo sapiens
gggcggagcggccaacatggcggaacgcaggagacacaagaagcggatccaggctggacgtaaagaaagaagtgatgcactcaattctg

SEQ ID NO: 148993 - DNA, 98 bp, Homo sapiens
cgattctgccaccactcagttcacaacagatgggcctttgggtccccgaggattagctgaagctacagagatgtgcactcaagagtgcttggttttgg

SEQ ID NO: 148994 - DNA, 100 bp, Homo sapiens
cctccaggcgctgcccagccccttgtcagccagggctgaacccccgcaggatcatggggttgacagcagcattttccagaatcctaaaaagcttcatcta

SEQ ID NO: 148995 - DNA, 96 bp, Homo sapiens
cgggcctgaggcgaaggagcggccgggagcccgccgcgctggtagcggccctgtttgtgctcttcgtcctggcctacatccacatcgtcttctccc

SEQ ID NO: 148996 - DNA, 82 bp, Homo sapiens
gggtctgctctgtgtgccatggacggatgtacggagcgcaagaggacggcagcgtcggcgaaggtgacctgtcctgcatcct

SEQ ID NO: 148997 - DNA, 75 bp, Homo sapiens
atgctggccaagaagatcatcattaaggacggaggcacgatgctcctgccagcatttgtcttcattgggctggaa

SEQ ID NO: 148998 - DNA, 82 bp, Homo sapiens
cgaggaggtgcgcgagaagtacaaagtacctggagtagaacagaaaaattattatgtctgtgttcccttgggactcattgga

SEQ ID NO: 148999 - DNA, 96 bp, Homo sapiens
agaggccaaccaacctttggagtcaatcctttcccatggtaccgtggcagactgtgctgttgttggcaaggaagatcccttaaaaggtcatgtccc

SEQ ID NO: 149000 - DNA, 100 bp, Homo sapiens
agggccccctggcattgactggcatagacttcacagagaatgcagttgtcttgacttcaggtctgtctgttctgttggcaagtaaatgcagtactgttct

SEQ ID NO: 149001 - DNA, 90 bp, Homo sapiens
ccggtctccatcgccctggcccagtacctcatcactgcctgcgccccgggatgccgtctggagcccggatgccccaccagggggcgccca

SEQ ID NO: 149002 - DNA, 75 bp, Homo sapiens
caagcttaggaccacccaccatgcctatccagcttatcacacagactttcagccaccacaatcagctggcacaga

SEQ ID NO: 149003 - DNA, 75 bp, Homo sapiens
gcttcagccatcacgaggatgatttcggaacctggagaaaatgcatctaataggattcaggaatcaaagaatcag

SEQ ID NO: 149004 - DNA, 115 bp, Homo sapiens
tgatgaaggcgtggatagcctgaaggcagccattcagggtgaaaatcctatttataagagtgccgtaacaactgtggtcaatccgaagtatgagggaaaatgagtactgcccgtg

SEQ ID NO: 149005 - DNA, 75 bp, Homo sapiens
cagaccctggtctatgagaactacaacaagttcatctcagccacagggtgagaactctgtctcagtcgacgggaa

SEQ ID NO: 149006 - DNA, 100 bp, Homo sapiens
gtttactccatgcagttgtcaggaggtagaagatcagtcaattacttacaccaatataatcaccttttctgcatcctcaacttctgaagtgatcacccgt

SEQ ID NO: 149007 - DNA, 102 bp, Homo sapiens
acgcggccgcgggctgcatgggcagcgcccgcgccccgccgctgagccgtcgcggagccgcgcagccctcggagcacgaaaactttagaaactgttcctttg

SEQ ID NO: 149008 - DNA, 74 bp, Homo sapiens
aagaggcgggggctgcacttgacaaccagcatgccgagatggccccaggcatggaagagctgatatgggaacag

SEQ ID NO: 149009 - DNA, 83 bp, Homo sapiens
ctcaattacacttcgactctcaaagcaataccaggatagctgttgtttcagagaaaggaatccagatgcaggccaagtacagc

SEQ ID NO: 149010 - DNA, 75 bp, Homo sapiens
cccggcggcagacgcaggttcgggaccatgagctggtattggtttgccttaaaaaggggttaccatgcagctttt

SEQ ID NO: 149011 - DNA, 83 bp, Homo sapiens
tttataaggagcctcctccaggaatgttcgttgtacctgatactgttgacatgactaaggatgggactgaggaagacccacag

SEQ ID NO: 149012 - DNA, 74 bp, Homo sapiens
cccagcccaaaggcccatgaggggatgcagttatgggctctgtcgccgtggctattcaggattatgaaactgct

SEQ ID NO: 149013 - DNA, 74 bp, Homo sapiens
ctggaacttgccctgtctcctcgcagatgagaggcgtagaggctccggtgttttttgtgccaattgcctgacca

SEQ ID NO: 149014 - DNA, 100 bp, Homo sapiens
ttgcaagtgcatgggggaagcagatccatccattcagcttcatggagcaaagagcattgaatgaaatgtggaaatgtcaaaatctgctccgacatcaagt

SEQ ID NO: 149015 - DNA, 76 bp, Homo sapiens
ttggtcgggaacaaggcagatctggagtcacagcgccaggtcctgttccctcttctcccagccaggagcctcccac

SEQ ID NO: 149016 - DNA, 95 bp, Homo sapiens
ttctcacccacactttcaacagagaattcagccaggtgcacggcagcgtcagtgactgtaagagatcccactggcattgttggtggtaggcctgg

SEQ ID NO: 149017 - DNA, 98 bp, Homo sapiens
ttcattccgcagcagcactccgacaggaactcagcgagatgctgtacacagaccggcccgactggcagagtgtgatgcagtacgtggcccaaatctac

SEQ ID NO: 149018 - DNA, 82 bp, Homo sapiens
tgacaaccttggaacagaacaagaggacaggaggtgtcgttccagctagaaattggcaatctagaaaaaactcgatcaataa

SEQ ID NO: 149019 - DNA, 99 bp, Homo sapiens
cctctcgggctcttgggcgctgctctgagtgtcttgggacaaggtgcgcattcctggtgtgctgcagcgattgggagtgacatactttgtggttgctgt

SEQ ID NO: 149020 - DNA, 50 bp, Homo sapiens
ccgcccatctaattggctttggtctaggtctgccatcatggatgttctcg

SEQ ID NO: 149021 - DNA, 101 bp, Homo sapiens
ggcaagacgaagtgggatgtgctcgatggggtggttagacggctgttcaaagtcctcagtctcctccaacccctctggctcccggccaagaaaaaggtgga

SEQ ID NO: 149022 - DNA, 74 bp, Homo sapiens
aaaatcatagcatatcaacagaaacttctaaacactcgtgaaactgctcaggccatcaagggtatgcatatacg

SEQ ID NO: 149023 - DNA, 91 bp, Homo sapiens
cgcttcagcgtcccggcgccgtcgcgccactcctccgaaaaaggcgacggcggattgacagaagtatgattggagagcccacaaactttgt

SEQ ID NO: 149024 - DNA, 83 bp, Homo sapiens
caagatggcagccaccacgggctcggcaaaatgatgcttcaacacccaggccaggtctctgcctcggaagtgagtgcttctgc

SEQ ID NO: 149025 - DNA, 98 bp, Homo sapiens
gcagggtggtgtgatagcggcagcgaggggctcggagaggtgctcggattctcgtagctgtgccgggccccttcacagatgtagtcactacaaatctt

SEQ ID NO: 149026 - DNA, 73 bp, Homo sapiens
tggggatggctataatgggtatggaggaggacctggaggtctgtcagctgctgctggaattggtgttgatgac

SEQ ID NO: 149027 - DNA, 100 bp, Homo sapiens
agataaggaagcttgcgtccacaagatattacgtcaacagcagccatggccctacgctaccctatggccgtgggcctcaacaagggccacaaagtgacca

SEQ ID NO: 149028 - DNA, 84 bp, Homo sapiens
tgtatggaggatggcctagagggctgaactgatgcttgaaggttatccggtgttggctcctgctgcttactatgaccaaactgg

SEQ ID NO: 149029 - DNA, 75 bp, Homo sapiens
cgcagtggtcgcttcttctccttgatgacttcaaacctgcttctattgacacttcttctgaaggataccttgagg

SEQ ID NO: 149030 - DNA, 100 bp, Homo sapiens
ctcagctcaaatacacacacctgttgccattatagagctggaattaggcaaatatggacagagccctaagctgccgtgtaaggcatctgactacgctgaa

SEQ ID NO: 149031 - DNA, 82 bp, Homo sapiens
cctggtgcacacaccctcgtattctcctgcccttccccaggttttactgcaatcacagcaaccaaccccatttggcttataa

SEQ ID NO: 149032 - DNA, 75 bp, Homo sapiens
ggaggagctgcaggaagcgatccggagggcgcagatcagggagcagagaaacatgaaggcacaggtcagtcctct

SEQ ID NO: 149033 - DNA, 100 bp, Homo sapiens
ggagcatattaatgaaaagtgccataaactgaaaaaccaaacatgagggtagcagtgatgctattgctgagattagagccatttgtattgaagaaattgg

SEQ ID NO: 149034 - DNA, 75 bp, Homo sapiens
gtcttacagactttacaggatgaatttgggcaaatgagcttaaaaggcgacggcggattgacagaagtatgattg

SEQ ID NO: 149035 - DNA, 75 bp, Homo sapiens
aaagaaacaagtaaaactggatgagcagctcatggagatatgaccacattctgaagtgggaactcttccagctgg

SEQ ID NO: 149036 - DNA, 112 bp, Homo sapiens
tggctctggaattgctactgctgcctctgtcactcctggtgaccagcattcaagcctcttcagaagaaacttgactccttcccagctcaggacccttgcaccaccatatatg

SEQ ID NO: 149037 - DNA, 110 bp, Homo sapiens
accacagatttcagcagcacaatcaacgcaaccacagaaacaagtggtacagctcctctccaccaaactgccatattgccgtgagaatgtgtgtctggcttatggtagtg

SEQ ID NO: 149038 - DNA, 75 bp, Homo sapiens
gttgcaggaaaacaagttcagggctcccactgattctacattatgacttaattcagtgcacaaatgagatgaatg

SEQ ID NO: 149039 - DNA, 83 bp, Homo sapiens
cgcagcttcaggacgctgtgaattcgtcttctcaagtcttaggattgcagcaacacgctcggctgcccaaacccaaggcgaag

SEQ ID NO: 149040 - DNA, 75 bp, Homo sapiens
agagcaagcttcaagaaagtttccagggtgcccccgatgtgatcagccccagtgttgaattcaactgaaggcgag

SEQ ID NO: 149041 - DNA, 75 bp, Homo sapiens
atcgcatcctatggctcaaagaaagatgattatgcactgcaacatggtgctggagaacgtgaaggagatgtggac

SEQ ID NO: 149042 - DNA, 95 bp, Homo sapiens
agacatggagattctcttaaaaagagatggagtttcactgtgtcagccaggatggtctcgatctcctgacctcgtgatccgcccgccttggcctt

SEQ ID NO: 149043 - DNA, 82 bp, Homo sapiens
gtctcacctgaggtgaaccttcgaccttggacttctcagcctccagaatgacctagaggatcaagacataatgggagcattt

SEQ ID NO: 149044 - DNA, 51 bp, Homo sapiens
cgctcggctgcgctgggcgggccccaggaatttatccgagaacaactggag

SEQ ID NO: 149045 - DNA, 82 bp, Homo sapiens
gctagggaagatcgcaccgcggacgcccgctgagcttggcgcacgggccgaccaggggacggcaaaacagaacagaaaggcg

SEQ ID NO: 149046 - DNA, 74 bp, Homo sapiens
cttcgcagtctggaaagctttaggagttcacagtgcgcagttgtgtagcagttgagtaatgctggttagctgtt

SEQ ID NO: 149047 - DNA, 82 bp, Homo sapiens
cttcagaagaccgaagcgttcgtatctggaaggtatcttctgtatgacgtcaaccccccggaaggcttcaacctgcgcaggg

SEQ ID NO: 149048 - DNA, 98 bp, Homo sapiens
gctggacacacggagctcagggaggcagcagtggcagtccatcgaggggaccaaactctccatcacccaggatgagtctggaagtgttagttgcaaag

SEQ ID NO: 149049 - DNA, 51 bp, Homo sapiens
ggattctgaactcttgattcatggctaaagtaaataatgccagcctgattg

SEQ ID NO: 149050 - DNA, 82 bp, Homo sapiens
tgatgtggaggttaacagctatctttctgtcctggacccaagccagaagcctctgcaaagcttccttccagacctgcagata

SEQ ID NO: 149051 - DNA, 90 bp, Homo sapiens
gtgtttttccgtaagcatactcagttaattggccttggtcctcacagctccaaaaagaaacaggatctcgataagctctatgagctgaag

SEQ ID NO: 149052 - DNA, 80 bp, Homo sapiens
ctcacttttcttccaaggataagttgcaagagactttggggttcttcatgaaagatgcaatcaagaaatttgttgtgact

SEQ ID NO: 149053 - DNA, 100 bp, Homo sapiens
ggcagagctaagacgccgtgacaccttctacaaggagcagctggagcgtattgagaggaagaaactaatctggattcactccctctggttgatacccact

SEQ ID NO: 149054 - DNA, 75 bp, Homo sapiens
ctcctgctgctcgaggacgctggagcccagcaagagatgctgcaatttgtcagtaatcaagtgggagagttccct

SEQ ID NO: 149055 - DNA, 80 bp, Homo sapiens
tagcttggatccttgtgggcatgatccataatcggtttcaagggtcacgatcgtggagtaaactgggctgccttccaccc

SEQ ID NO: 149056 - DNA, 82 bp, Homo sapiens
tgtgcagccgcgaggaggcgcgggaggtgttcgagaacgaccccgagacgggtgtttctgtggcctgggactggttagcacc

SEQ ID NO: 149057 - DNA, 80 bp, Homo sapiens
gttaaagatgctcattttacttacaggttaactgaagtccaaaagatgtctagacccccagaggagcccaccacctggac

SEQ ID NO: 149058 - DNA, 98 bp, Homo sapiens
caaaggtcaccagtcccaagtcgtccccctctccgccccccaggaggggcgagagggagccgcagctgatgtcagggccgccgtcccacccccacctc

SEQ ID NO: 149059 - DNA, 96 bp, Homo sapiens
cgccgggcgacgacgaggaggaggcggccgccgcagccggggcccccgccgccgccggagcgctgcagaaccttggcctgaaaatgctacattata

SEQ ID NO: 149060 - DNA, 96 bp, Homo sapiens
aggatacagggtcaaaggagagcacaaccatcgcagttggaagcccatggggcagcgcaagcaccaggaaatccgagccatgagaagtcagctcaa

SEQ ID NO: 149061 - DNA, 75 bp, Homo sapiens
agaagattagcaaaggtgctaatccagtggaaatcaggagagcaggctatggaactcagtcaactccccagggat

SEQ ID NO: 149062 - DNA, 90 bp, Homo sapiens
cgtcaaccccttcctcccgtatatcagatgatgagaagatcctggtggagcccgcctgcggggcagccctggccgctgtctatagccacg

SEQ ID NO: 149063 - DNA, 83 bp, Homo sapiens
ctttgtcctgcacctatcctgaataaagctggagaactaatagggatgccaaaggaaaaatatgatcctccagatcctcgcag

SEQ ID NO: 149064 - DNA, 55 bp, Homo sapiens
ctttaatcctgaaagccatgcagcgggttttacaagatgaattagaaaaccgttc

SEQ ID NO: 149065 - DNA, 83 bp, Homo sapiens
ctcaagtcagagggcttttactcctacctgtgtaccgagccaggccctatgatgccaagtagagaaatccagcaataaaaggc

SEQ ID NO: 149066 - DNA, 98 bp, Homo sapiens
attatggattggcaacctggaccccaaaattaccgacaaagggttaccttccagttcaacatttaccttggaagaggggaccatctacttgaccgctg

SEQ ID NO: 149067 - DNA, 80 bp, Homo sapiens
gatgatgatgatgatgaaattgatgatgatgatacaatttctgactggaatctaagaatctcagcaaatgcttggaagac

SEQ ID NO: 149068 - DNA, 51 bp, Homo sapiens
gaggccttctatgtgaaagcccgagatgaacgcaacgccgagagtgccatc

SEQ ID NO: 149069 - DNA, 101 bp, Homo sapiens
gtgtgcgctcagtgcttccagcagttcccagaaggactcttctatgagctctctattggaggcatcatcattctgaaggataccagtgaagacattgagga

SEQ ID NO: 149070 - DNA, 82 bp, Homo sapiens
ctggcgtagctaagaacagggaactgcttgccaaatttttccaaagcgggagatacagatgacccaccaagaattactcaga

SEQ ID NO: 149071 - DNA, 98 bp, Homo sapiens
ctcaccagtaacaggagactgcagcagacccaggcccaggtggatgagtccgtaattgagcaggtctcgtgggatacctgaaatgcacccgcttcccg

SEQ ID NO: 149072 - DNA, 100 bp, Homo sapiens
ccccgcgggccgcaggggctcatgcagccgccaaggtctcctctgagcctccggcctccataagacccaaaacagatgacacctcttcccagtcccccgc

SEQ ID NO: 149073 - DNA, 75 bp, Homo sapiens
gagcagcacttccacagccaagtgcgggagtccacgggaccttgctgcaagaaactgcctggtaggtgaaaataa

SEQ ID NO: 149074 - DNA, 98 bp, Homo sapiens
tgagcagtagcccactctatagccgaggtttgatattaaactgctctcagaattttcctcttgcctagcagatcagcatttgtattttagtccattaa

SEQ ID NO: 149075 - DNA, 82 bp, Homo sapiens
cggagatcctgatgaagttcgagcactaatatttaagaaagaagatgttaactttcaggtagttttgcagaagtgcaaagtc

SEQ ID NO: 149076 - DNA, 88 bp, Homo sapiens
gccccagccagtccccacagcataacagggtctacatcaactattacgacatgaacgcggccaatgtgggctggaacaactccacctt

SEQ ID NO: 149077 - DNA, 101 bp, Homo sapiens
cggtagcatctctcaaggcaaatggcgtgcaggcacagatggctaagaatccagaacccttgatgtgtccacagatgaagaggataaaatacatcactcct

SEQ ID NO: 149078 - DNA, 98 bp, Homo sapiens
ttggctgaggcacaccagcaggagtgctgccagaaatttgaacaactttccgaatctgcaaaagaagctatgtcttctcattacactgaagacctttt

SEQ ID NO: 149079 - DNA, 75 bp, Homo sapiens
accccgcggcgcccctcggcctcggagcaacgagcgcagcgccgtgagaaggcaaccaaagtgcaggacatcaaa

SEQ ID NO: 149080 - DNA, 87 bp, Homo sapiens
gagccctgggctggggcaggagccggaatactcccccagttgcaagaggcgcaggaccgtggaagacttcaacaaattctgcacctt

SEQ ID NO: 149081 - DNA, 116 bp, Homo sapiens
atttaatggaaaatcgcttggttaaaacctgacacttttaacagaataactgaagtgaagtgatggactccgatttggagagtagtaagacgtgaaaggaatacacttgtgtttaa

SEQ ID NO: 149082 - DNA, 90 bp, Homo sapiens
tgaatatcaagaggaggagttgttgggatttagtgctggcagcatctgcggcttcaacagaagttagtatccttgctcgacaaagtgatc

SEQ ID NO: 149083 - DNA, 108 bp, Homo sapiens
gcagaccaggaacaagagagaaagagtggatttcagcctgcacggatggtcttgaaacacaaatggtttttggtcatggcaaaaccccaaaagatgccgcgtcagttc

SEQ ID NO: 149084 - DNA, 100 bp, Homo sapiens
gaggtgaatttccatgtcaacatagtccaggtgaattgggacgaagaaaaggaatgttttgaaagcctcagtaaagaatgcgctatgttctattccatcc

SEQ ID NO: 149085 - DNA, 100 bp, Homo sapiens
cacaggagtggccgttatggaacgcaggttgcttagccagacaatgaaggatcatctagtaagagtagcaaatgaagctgaatttatcctgagcaggcag

SEQ ID NO: 149086 - DNA, 90 bp, Homo sapiens
gtccagtggctgaggctggacagagcacaggccggtctaattgaagccaacggagaactcaaggtcttcatagaccagaaccttagtccc

SEQ ID NO: 149087 - DNA, 88 bp, Homo sapiens
tgtggtgccggtgggaactgaggaagcgcccaaggcagaactggggctcccttgcatcttccagttacaaattcagtgccttctgcag

SEQ ID NO: 149088 - DNA, 75 bp, Homo sapiens
gccgcgggcgcgcgggcgcgactcggcggcggcgtcttttctaatggttgcagagaagaatggaacaatccggtt

SEQ ID NO: 149089 - DNA, 75 bp, Homo sapiens
cctgggtgattctgtccgacggcgacggcaccgtggagaaagctgagatctgtatctgtggacctgaatgttgat

SEQ ID NO: 149090 - DNA, 100 bp, Homo sapiens
cggaaaaccgaagttggaagtgtctcttagcagcgcgcggagaagaacggggagccagatgactcttctacaaaagtggacattaaggagacctacgagg

SEQ ID NO: 149091 - DNA, 117 bp, Homo sapiens
tcacctcgcgtcgcgcccgggaggaaggaacgaggcaaggagctaaagcagcgtgcgttcagccctggggatgaaacaggcgcctatttaatcgacagagaccccacctactttggg

SEQ ID NO: 149092 - DNA, 82 bp, Homo sapiens
cgccggggccgccatggagcccgactcggtgattgaggacaagaccatcgagctcatgagaagaaatgttcccatgaagcct

SEQ ID NO: 149093 - DNA, 83 bp, Homo sapiens
caagcatgcccaccactgccacaaacgccgcaccaggtcttgtagcagcgcctcctcgagaaccatggagtctggcagtaccg

SEQ ID NO: 149094 - DNA, 103 bp, Homo sapiens
cccagcgccaccatccacgccagccgcaccatgccgctcctaagcctgcacagccgcggcggcagcagcagtgagagcattttgaaagcgaagcagaagccgt

SEQ ID NO: 149095 - DNA, 100 bp, Homo sapiens
cagatgaatacaaggtcatcagcacaggatatgccttgtcagatctgctacttgaactaccctaactcgggaagctgccaaagaatgtcgacgtcgaaag

SEQ ID NO: 149096 - DNA, 100 bp, Homo sapiens
gcagacaatgtcttcaccacgtctgtggcgaacgcggcatccatctcaggacatgttctggttatcaatactctggctgaccatcatcatcgtgggactg

SEQ ID NO: 149097 - DNA, 108 bp, Homo sapiens
ccagggccaccaactctccaccctagacgaagcctttgaagaattaagaatggagtctggctctgtcgcccaggctgcaatgcagtggtatgatctaggctcactgca

SEQ ID NO: 149098 - DNA, 90 bp, Homo sapiens
cggtgcccgaggaggcagccaagctcgtggcctgcctctgcgtgcgttacgggcaggacttgagtggcttcggacagggcttctcagacc

SEQ ID NO: 149099 - DNA, 51 bp, Homo sapiens
acaccattttctgccgctggacgcaagaaggaagaatcctgctcaaaaatg

SEQ ID NO: 149100 - DNA, 98 bp, Homo sapiens
ggggaccggcggcgctggaggagcgaggcagctgtactaggactgggaacggggatggaagcttcctggcgccaggtggccggtggccgaggccgatc

SEQ ID NO: 149101 - DNA, 101 bp, Homo sapiens
ggacaaaatgatcttgcttgggcacaacctaggtggattcttggctgctgcttactcgctgaagtacccatcaagacatgcgaggattcatgacagcgcat

SEQ ID NO: 149102 - DNA, 75 bp, Homo sapiens
cgagttcaaagagctggttacccagcagttgccccatctgctcaaggtcttcaaagcttcacctttctccaaagg

SEQ ID NO: 149103 - DNA, 89 bp, Homo sapiens
aaatacgtggttggagagctcatctggaattttgccgatttcatgactaaccagtgtaaataccagctgtcccctacagtgaatatgcc

SEQ ID NO: 149104 - DNA, 87 bp, Homo sapiens
tagcctatcagctggggctggatgagttgagatggaagattttcgaggtatagcagaagaatcatttccaagctttctcaccaattc

SEQ ID NO: 149105 - DNA, 74 bp, Homo sapiens
ggcacgcgctcctacatggctgtggctgggagcccgagccccacacctgccgggcagcaggtgctggacgtcga

SEQ ID NO: 149106 - DNA, 83 bp, Homo sapiens
ggacaccatctgcactctgtcagccaggaattcgaatttagagtttaatttctcagagcattctctccaggaagaatttttac

SEQ ID NO: 149107 - DNA, 75 bp, Homo sapiens
caaccctccagtcgtccactccgctttgcttaaaactctctgcagaggaattagagcgaaaacggcaagagatga

SEQ ID NO: 149108 - DNA, 98 bp, Homo sapiens
gaagacatggccactccagtcggtgttgagcacggcgagcagtctcaggcctttagtgatgatggtatatttgaaggctcccatgattctgaatggag

SEQ ID NO: 149109 - DNA, 50 bp, Homo sapiens
caggtgactcttaactcccaggacagagctgggacgatgccggagtgtga

SEQ ID NO: 149110 - DNA, 133 bp, Homo sapiens
ggactatacacatctacaagtgttcaggcatcacagagcattggaggttccagtgctttcggatttgggagtaaggcatgtcgaggctttggctatgtcactttttcaatgctggaagatgttcagagggccc

SEQ ID NO: 149111 - DNA, 100 bp, Homo sapiens
ctcaaacccctcagacaatgaattcacaacctcaaacccgttctccggtaattatgtggtgacagatcacggctcgtgcgtccgagcctgtggggccgac

SEQ ID NO: 149112 - DNA, 50 bp, Homo sapiens
cttggtgactccagtggcccaggaactcaccttcgaggcttggaaaccac

SEQ ID NO: 149113 - DNA, 96 bp, Homo sapiens
cttcgtggatgagcacaccatcaacatctccctcagtctgcaccgcaaatacgccatgcgagacctagtccacaggcttccaggagggaacaacag

SEQ ID NO: 149114 - DNA, 82 bp, Homo sapiens
gcagagacgtcatacttggaaatggctgcaggttcagacatcccagccatcactcttccacctgctccttagagaagggaag

SEQ ID NO: 149115 - DNA, 100 bp, Homo sapiens
gttgcagactggtctgaaggtgtacaggtgccctctgtgcctattcagcaattccctactgaagaaagccccgcccccacctccaacctcgatgcccaag

SEQ ID NO: 149116 - DNA, 100 bp, Homo sapiens
atgggagacgctgggagcgagcgcagcaaagcgcccagcctgccgcctcgctgtccctgcggcttctgggggtcccagaacagttttcttctgggctcca

SEQ ID NO: 149117 - DNA, 100 bp, Homo sapiens
ctgacgcaggacttcatccacgcctttcagccaaatgccagactgattgtcatgctcagggaccctgtggagagtgaaattggagcgatttgaaattcca

SEQ ID NO: 149118 - DNA, 100 bp, Homo sapiens
cgacgagcgcagctgtcggggccgcgagtcggacgaaggcaaaggtagctgcagcagatgagaagaagttccagcaacagatcttggcccagcagaagaa

SEQ ID NO: 149119 - DNA, 100 bp, Homo sapiens
tgaagcagtgggaagtcactagcaggttctgtttggattctgcaaagcagactcgtcagaaagttgctgtgaactggaccaacttcagcctcaagaaaac

SEQ ID NO: 149120 - DNA, 106 bp, Homo sapiens
cggccaatgaaacccccaagatgggcatctattacattccaggcaatggagatcttaaaagaaagtggacctgggcagtggaatggcttggagatgaacttgaaag

SEQ ID NO: 149121 - DNA, 96 bp, Homo sapiens
gccccagagccaagtgcgagcccagcgggagaaaatcaaggagaaacaagtgttgaaaatgttaaaggctgtgctgaagaagagccgagagggagg

SEQ ID NO: 149122 - DNA, 74 bp, Homo sapiens
acaaaacagcagatttcccaagagcagcggaaaatgatccagtcacaggttttgagcaaaattttggactgtga

SEQ ID NO: 149123 - DNA, 100 bp, Homo sapiens
cggttcctgggcagagagaaagatgcggtgacggatcttgcctcacaccctggttactacgggaatctggtggaggagtccctggggaaatgctgcctgg

SEQ ID NO: 149124 - DNA, 83 bp, Homo sapiens
aggaatcgtatcgtatgtccgctatccagaacctccactctttcgagggaagtgatgagctttcctttgatccggacgacgta

SEQ ID NO: 149125 - DNA, 76 bp, Homo sapiens
tttagtgaatgcgtgcaagatgctggaagcactgaaattacctctcagtagagatcagagagttgtgacatctgag

SEQ ID NO: 149126 - DNA, 75 bp, Homo sapiens
tgaggactcagaccggtctctgcaagagttgggcccatgagatgtgtgctctgtatattccggaggtacaatttg

SEQ ID NO: 149127 - DNA, 51 bp, Homo sapiens
cttcaaccccgagccgctggtgctacagccaaactcaggctctgaattggt

SEQ ID NO: 149128 - DNA, 100 bp, Homo sapiens
ctggctgctatcagagaagaagggtgtttggggtgtgttttacaaaggtgctacaaagtacacagataaagacaatggagggatgcttgtatggtctcca

SEQ ID NO: 149129 - DNA, 100 bp, Homo sapiens
ctggtcacagccacactctgcaccgctaggccgtccccgaccttgcctgaacaaggagccctctggcacaaatggaagaagaaagaagggagcaagtagc

SEQ ID NO: 149130 - DNA, 75 bp, Homo sapiens
tacgtgtgctttttcaagggagctgataaagaacttcttcccaaaatggtcgggaacatgccctgtgtgccgccg

SEQ ID NO: 149131 - DNA, 100 bp, Homo sapiens
gacgaggcctacgacaccatggtggaggagcagtacggccagatgtacatcaaggcctccggcagctatgcaggttcttcctcaagttcttcctcaaatg

SEQ ID NO: 149132 - DNA, 97 bp, Homo sapiens
cagaaaaacaaggactgggaggtgtcctgacttgcccaggcagagactggctctgtgtgctccgggatggagcaggtgtgcagagggtgagaaccca

SEQ ID NO: 149133 - DNA, 83 bp, Homo sapiens
cgagaacgtgcgggaagagaagatcatcgagcatttcaaacgaacactactgagcctgtggcggccaccgagaccctggctga

SEQ ID NO: 149134 - DNA, 100 bp, Homo sapiens
ggggtctgctgttgaaccagaacaaaaccgagtcaacagggaagcagaggagaaccgggagccattcagaaaaggtttgcctcagtgaaatgagggcaca

SEQ ID NO: 149135 - DNA, 50 bp, Homo sapiens
tccgctttgaaatgcagcgggatttggagcgagaacccgagcagcgccat

SEQ ID NO: 149136 - DNA, 85 bp, Homo sapiens
cgcaaccattgacgccatgtcgggttattcgagtgaccgagaccgcggccgggaccgagggattatttttacccaagatacttag

SEQ ID NO: 149137 - DNA, 104 bp, Homo sapiens
ggaatccgagaagagcagagcggagggagccccagacacgggcgccatgttttggaagtttgacctgcacacaagctcgcacctggacacgctgctggagcggg

SEQ ID NO: 149138 - DNA, 97 bp, Homo sapiens
ccgagaaccgtcagtttgagccagatggctcctggccagaagctggagggggcttggccaaaaagagggagaaacaactcagctgttctttctagct

SEQ ID NO: 149139 - DNA, 100 bp, Homo sapiens
catggcgtcttctcaagctagaaattctagttgaggataaggaaacaggaggtacaggtttgcagattccgccagcagcacagcaagctctacagatgag

SEQ ID NO: 149140 - DNA, 75 bp, Homo sapiens
aatcatgggtcaccaagagaggctgagagaccaggtgtctgtgggaggttatgtttatttgagacttctccatcg

SEQ ID NO: 149141 - DNA, 104 bp, Homo sapiens
gtgatctcgagagacctgcgtacattcggggtgccagaaggaaagcataggaaatctgagaatgaagatgacagcgagtgggaagatgtggatgatgagaaggg

SEQ ID NO: 149142 - DNA, 74 bp, Homo sapiens
tggaactgaatgggacagaagcgaaattagtgcggaaagttgccggggaaaataccactccagttgcggagaga

SEQ ID NO: 149143 - DNA, 74 bp, Homo sapiens
tggagaactagtcctcgactcacggatgtacagttacccagcacgtgtacctcctcctcctcctattgctcggg

SEQ ID NO: 149144 - DNA, 100 bp, Homo sapiens
gtcaccgaccagtctatcaacctgctcactgctgttggcaccaccacccgagactccttaaccgagatcaacctgtctgttgctctatatgcaatcagtg

SEQ ID NO: 149145 - DNA, 100 bp, Homo sapiens
tgggacgttggggagggggctgtgccgggcggagagaactcagcgaggattctgagaaccaaaaacttttgctagaaaatcagcttttacgagagaaaac

SEQ ID NO: 149146 - DNA, 100 bp, Homo sapiens
gaagttcatcgccaggactgtgatggtacaggaagggaacgtggaaagcgcatacaggaccctaaacagggatccatctgtctctaagtctgtagaacga

SEQ ID NO: 149147 - DNA, 100 bp, Homo sapiens
atgctgatgaatccagcagcagcatcctaaaacctctcaactgcagaatccgcaacggtgagaatggaatacattttctcctaaacagagatgggaaacg

SEQ ID NO: 149148 - DNA, 75 bp, Homo sapiens
aaaaactggagagcttcatcaaaaatagtgatagctttgataagatcagctgctgctctctgaaaagccacagtt

SEQ ID NO: 149149 - DNA, 100 bp, Homo sapiens
gcttcctgcttgtctcagaaggttctaggacaaggaaaatggaccatgctcgacagctgaccaaggccatgatgcgaaaggccacggccagccgcctggt

SEQ ID NO: 149150 - DNA, 90 bp, Homo sapiens
caggtatctgctcctcatggcgcaggagcatctggagttccgcctgccgaattgttcaggagacaacttttgatttgggaggagatattc

SEQ ID NO: 149151 - DNA, 100 bp, Homo sapiens
accgggatcctatccccagtacaggaggtgcgggcggctgctgaagaacagattaaggtgctggaggtgacggagggcattctggaagttttacactgtg

SEQ ID NO: 149152 - DNA, 100 bp, Homo sapiens
ccaaaatttgccatccgagggatgctgaaaacctttgggcttcatggagtcgtcttagatgttgattcactttctgaaacaaaggtcttcactgcctcat

SEQ ID NO: 149153 - DNA, 100 bp, Homo sapiens
cagtacatgatcccatatagggcagggacactcatgaggaccatgatacttccactgagaatacagacgagtccaaccatgaccctcagtttgagccaat

SEQ ID NO: 149154 - DNA, 100 bp, Homo sapiens
tggacatcaaatgctgaaatatgtttcaacatctgaatcagatggtacagattgctgcagtggaaaatcagtgattcgcctttgccagtctcatctcgtg

SEQ ID NO: 149155 - DNA, 98 bp, Homo sapiens
ggcgggcgagggcgactacgaccagtgaggcggccgccgcagcccaggcgcgggggcgacgacagataaccagttcaggatgtccatcctggaacgac

SEQ ID NO: 149156 - DNA, 100 bp, Homo sapiens
cacactctgaaattaatttgattttgagatttgagaacttggacatacatacttcctatggaaggttcctaaagagaaagatgaaatggtagagcaagag

SEQ ID NO: 149157 - DNA, 49 bp, Homo sapiens
cgacgacgaggaagaggaggtttctgagagcatctgctgcacccaagcc

SEQ ID NO: 149158 - DNA, 88 bp, Homo sapiens
aaggattccaagtaactcttatttggttctgcaccagtattgtggctcaagactccagaggccacatttaccatggtcggaatttgga

SEQ ID NO: 149159 - DNA, 75 bp, Homo sapiens
gacttagcttcaaagaaggcaatcaggtggtagagaaaacgaaccctacagaaccagttggagtggtttgccgag

SEQ ID NO: 149160 - DNA, 95 bp, Homo sapiens
ctacatcactcgtctgggatctgacaagaggaccccgctgctaactcggctacaacatttggcagagggcaatgtgtatgtgaagtgcccatcaa

SEQ ID NO: 149161 - DNA, 122 bp, Homo sapiens
gccagggataactggaactatacacctctgcatgaagctgctattaaagggaagatcgatgtgtgcattgggagaaaagactattcagacagtgccaacaggagcaaagccagctatcctta

SEQ ID NO: 149162 - DNA, 75 bp, Homo sapiens
cgctcacctgcgctgtgatgcctgcagagctgtggcttaccaggtcccgcagcccccggaagccaatagactccc

SEQ ID NO: 149163 - DNA, 83 bp, Homo sapiens
tgaaggagcgggatatgacataattcttattgaaaccgttgtttggtgccctggttgtcagatgttggaaagcagtaggacgg

SEQ ID NO: 149164 - DNA, 75 bp, Homo sapiens
gcaaaaccaaagccctgctgcaagatgacctgatcagagccatcaagaaactaaaggcacttggcactggcttcg

SEQ ID NO: 149165 - DNA, 100 bp, Homo sapiens
ggggattcgcagggaggatgtcgggacaccccggaagctgggaaatgattacttctctaacaggatcaccagtttgctccacaaagcacaatgtctcgat

SEQ ID NO: 149166 - DNA, 98 bp, Homo sapiens
ccaacctctacccttgaaagcagagatagtggcatcattgagggtcgccgcttcatctccgaccagagccggagaaaggacctctccgaccggccact

SEQ ID NO: 149167 - DNA, 100 bp, Homo sapiens
ctgggccagtgcggggtggaggccctgactaccctggaagtagcaggccgcatgcttggaggtgaaatccgagaacagaatggagacagtcttgtccatg

SEQ ID NO: 149168 - DNA, 100 bp, Homo sapiens
ggaagggaggcagaagcatgctaagaacaacagtcaggccaagccttctgcctgtgatgattcgacacctcttagaggctgcaatcccagagagagttga

SEQ ID NO: 149169 - DNA, 75 bp, Homo sapiens
atgagcaggtctgaagactaacattttgtgaagttgtaaaacaggttcacagagtgtttccaaatgggctggcct

SEQ ID NO: 149170 - DNA, 100 bp, Homo sapiens
ccattcaggagcctccaggagcccagacaccagccccccaccatggagctggccctaaagcaaggacctgagtgcaagtaatttttttgggaagtaataa

SEQ ID NO: 149171 - DNA, 130 bp, Homo sapiens
gtataagatgcgtgatattttaaacatggaaaagacactgaaaggcctcaacagataccagatgacaattttagcatcccagaaggtgaagaagatctggcaaaagcaattcagatggcccaagaacagg

SEQ ID NO: 149172 - DNA, 100 bp, Homo sapiens
tgaagactgttgcccaaaactacagttctgtcactcacttacacagtattgggaaatctgtgaaagtgctcggccttgttctccccatgtgggccatagc

SEQ ID NO: 149173 - DNA, 75 bp, Homo sapiens
ttgccagctgggaggaggccgtggtgtctctacctgttcaactcggaggaagagcaagcaggccctgagggacta

SEQ ID NO: 149174 - DNA, 90 bp, Homo sapiens
aacgccagcaaccccctggctcactacgacaccaccgctgatgagatcctgcagcagtgtgatgcagtaagccgaaaggatgaagagtta

SEQ ID NO: 149175 - DNA, 76 bp, Homo sapiens
tgtgtctcaatttggctacaaaaggactcagcccaggagagtgttattactcgagatattcatcgtacatttcccg

SEQ ID NO: 149176 - DNA, 100 bp, Homo sapiens
agtgaccaacagttgaatcaaagtatggacacagttgtattccctgaatgactataaaccacccatttcgaaagcgaaaatgacccaaattactaaggca

SEQ ID NO: 149177 - DNA, 96 bp, Homo sapiens
caactcatgttcaactatgtgtgttgtcagaatgctcttaatgagaacaatcaaccatgacgaccgaatctggatcagactcggaatccaagccgg

SEQ ID NO: 149178 - DNA, 75 bp, Homo sapiens
cttctcgatggatcagaatatacctgtgatgtagagatggacctccagttgtagctcattatgatatgtctgaca

SEQ ID NO: 149179 - DNA, 100 bp, Homo sapiens
gaccccgagcaccgggccctctgcgacctggggccctgggtgaagtgctccgccgcccttgcctccagaactgtataatgatgactgcacaagataccaa

SEQ ID NO: 149180 - DNA, 75 bp, Homo sapiens
gtgcaaggtcaaatggacccatgaggaggagagatgcaggggacggtgcacaggttgctgctggagacgtgccag

SEQ ID NO: 149181 - DNA, 83 bp, Homo sapiens
attgtttctctccctctgcccccccttccccacgcaaccccagatccatttacactttacagaagcggtgactttcaaggatg

SEQ ID NO: 149182 - DNA, 82 bp, Homo sapiens
ttcgcgtctgcccggccaagaggcaaaggggaggttacgcagcaaaccatccagaagggcgtgatggtgggcatgggtcaga

SEQ ID NO: 149183 - DNA, 100 bp, Homo sapiens
ccgcaaagcggggacccagaccctggagcctcagttggaagcagccgatccagcctgcggagcctgtggggcaggagtctgcactatggaaacaacctgt

SEQ ID NO: 149184 - DNA, 49 bp, Homo sapiens
accgggtgctgggccccgtcagagggaagacaaaggcgctttggctaag

SEQ ID NO: 149185 - DNA, 100 bp, Homo sapiens
tgtgggagcggccagctaggagcgctctgtggtgcctggggctgaacgcggctttctgttggaggtccccctccccactaagtgcctctttgcatagcac

SEQ ID NO: 149186 - DNA, 49 bp, Homo sapiens
tggagagcctctctacaatgctgtgggatctcatagatcagaacatact

SEQ ID NO: 149187 - DNA, 82 bp, Homo sapiens
ccaaagagtggtactggaaccagttgttcttcctaacataaaatcagaagatacaccatgccttctgtctatagatctgttt

SEQ ID NO: 149188 - DNA, 74 bp, Homo sapiens
ttgtttgtggatcgctgtgatcgtcacttgagaggccaatgagacttgaaccctgagcctaagttgtcaccagc

SEQ ID NO: 149189 - DNA, 75 bp, Homo sapiens
cacctgaggccggatgaggacctggacttgaaagaggagattgatattcgactctccagggttcaggatatcaag

SEQ ID NO: 149190 - DNA, 83 bp, Homo sapiens
gcacggagacggcggcagcgctggactaggtggcagaagaggatgtggagaactttgacgtgaccaacttgtctcaagacatg

SEQ ID NO: 149191 - DNA, 100 bp, Homo sapiens
tgttttcacctcctgtgagcagtgggaaaaatggaccaacttctttggcaagtggacattttactggctcaaccttgcagtctcatcctactcaagtgtg

SEQ ID NO: 149192 - DNA, 75 bp, Homo sapiens
tgcctcagcctcctaagtagctgggactacagttggaatcgaagcctcttaaaatggcagatgacttggacttcg

SEQ ID NO: 149193 - DNA, 74 bp, Homo sapiens
agtgaagtgcctcattccagacaggctgctttcagtagccccattccacgctccagaacagcatcagtgttttt

SEQ ID NO: 149194 - DNA, 51 bp, Homo sapiens
ctctgttccaaatgctttgctggtgctgctgttttttcaaacgaaggaaaa

SEQ ID NO: 149195 - DNA, 75 bp, Homo sapiens
gtcggaagaggtctcacgaggctgtcatcaccgccatgcccaagaataaagtattcaagtcaaacaacgttgaaa

SEQ ID NO: 149196 - DNA, 90 bp, Homo sapiens
tttgtgatcgaccgaattggagatattttggtacaacagctcactccatcactcgatgagataatatgagatttctacttcggagaggcc

SEQ ID NO: 149197 - DNA, 100 bp, Homo sapiens
tctgtctctccaaggaaaactaggcccctgcgcggccaacgcccaggatccgcaagctgcgcgcccacgagctcccctcccacccggtcactccgtccag

SEQ ID NO: 149198 - DNA, 87 bp, Homo sapiens
ggtgcaggtggggaaaatggcggtgtctacagtgttctcgacttcgtcgctgatgcctgtgaggagccaccaacatttgaagctatg

SEQ ID NO: 149199 - DNA, 100 bp, Homo sapiens
aggacacacctaaacatgtggaatcccaatgccggtggggaacgccaagcacaacgtgcatgtcatgaacatctccacaggcaagaaagtgaaggggggc

SEQ ID NO: 149200 - DNA, 75 bp, Homo sapiens
tgatggtccagaattatgagaacctggtctctgtagagttttaagaggaaacctgggcaggctgacaatgaacgt

SEQ ID NO: 149201 - DNA, 107 bp, Homo sapiens
ggaagacgtccaagccttaaacatcagtgtgccgtatggtccaattcctgtggactttcagacaatgcagatcttcgtgaagactctgactggtaagaccatcaccc

SEQ ID NO: 149202 - DNA, 73 bp, Homo sapiens
agcattaggttttattctaggtccaggtctgataccacaacttataggggttgctccagaaaaggccattaaa

SEQ ID NO: 149203 - DNA, 90 bp, Homo sapiens
cagccaacactgatcttgcaaactcagatgcgctgaagctagctaaagaagttgatcctcaagttgatgcggatgaaattaaaaggctag

SEQ ID NO: 149204 - DNA, 99 bp, Homo sapiens
caccacgctcgcgtgctgatccgccagcgccatatcaggggagcggttacctaagccggagcgggggaagatgagagtgcacaaaatcaacaatgtgaa

SEQ ID NO: 149205 - DNA, 100 bp, Homo sapiens
ggagcagcgcagcctccggaggaggaggcggaggccgaggttcgagaacttgtcttggacaattgcaaatcaaatgatggaaaaattgagggcttaacag

SEQ ID NO: 149206 - DNA, 101 bp, Homo sapiens
cgtgccgcgagcgcggcctgcaggagcacatgattaagtaccggtacatcccgttcacacatgggaagagaaggtacagaggcaaggaggatgccggcaag

SEQ ID NO: 149207 - DNA, 100 bp, Homo sapiens
gtcatccacctgcccttcatcatcgtcaacaccagcaagaagacggtcatcgactgcagcatctccaatgacaagttttcacacaacagaaaccacctga

SEQ ID NO: 149208 - DNA, 90 bp, Homo sapiens
tgaagaataccagcaaaggcaccgtgacaggccaagtgcaggggccagaagacaaagtcaattccatgttttgcgtgtgaagctgtgtgg

SEQ ID NO: 149209 - DNA, 90 bp, Homo sapiens
caccttttggcccaatgaatatcagagcgatcgcctcaccggcccatcctccaagccggactgccggcaaatgcctccacagtggtcgga

SEQ ID NO: 149210 - DNA, 100 bp, Homo sapiens
tctcaatcaagttagcatgctttctccagctgccctatcacctgccagctcatcacaaaaagaagctcattcacacagaagacccatttaatgatgaaca

SEQ ID NO: 149211 - DNA, 50 bp, Homo sapiens
gcagccgggggacagctgtagtgaaggttgaaatcaaggaagcaggtggt

SEQ ID NO: 149212 - DNA, 100 bp, Homo sapiens
agctcgatctgctcttcgtctgcttcttcctcttcagtcaagattctgacaatggagatattaattatgattatgttcatgaattgtcattggaaatgaa

SEQ ID NO: 149213 - DNA, 120 bp, Homo sapiens
cagagcagtgcttgctgctttttctaactatttcaagatgatatttattcaccaaacaagggatttcagtcataatcggttgtctaactggaacatcagcttggaatcacaaacattaca

SEQ ID NO: 149214 - DNA, 100 bp, Homo sapiens
gcaaacattgcgtatactcctgatattattatagcctcaatactgaggctgattggtattgaagcccctgggtgataatttgatggaggaaaacataagg

SEQ ID NO: 149215 - DNA, 90 bp, Homo sapiens
ggacgatttaaggatttttaccagtttacttttaattttgcaaagaatccaggacaaaaaggattaggtgctgtgattgtctccacgccc

SEQ ID NO: 149216 - DNA, 82 bp, Homo sapiens
gcgggtctgtcatcatgtcgcgttacgggcggtacggaggaggtagatgacattaatgctgataagaatatctcttctgcac

SEQ ID NO: 149217 - DNA, 100 bp, Homo sapiens
gcctatgtaacgctccacatttggctgattatttcaaccgaaactgttatcaggatgatattaacaggttgccaactttgcaacaatggaagatgaagaa

SEQ ID NO: 149218 - DNA, 98 bp, Homo sapiens
aatagatgggaagacatatcaagtgtttgaagaacctgaagatcccagtaacaggtcatttttttccgaaatcatctcctctatttcggatgtaaaat

SEQ ID NO: 149219 - DNA, 89 bp, Homo sapiens
gatatttagagatggtgaagaagcaggtgcttatgatggacctaggactgctgtggacatttgggagcaataaaaataagaagaaagga

SEQ ID NO: 149220 - DNA, 100 bp, Homo sapiens
caggcaaacgagaattaaatgccgagaaggccagtacgcaagatctctgtaccttcttgatatcgagagcctgcaaaaactcaacactggctaattattt

SEQ ID NO: 149221 - DNA, 110 bp, Homo sapiens
aagaaatgaaggaagactatgacactatggggccagaagccacgatccagaccgcaattaacaatggtacagatctcagtgaccagctgctggaggtggtcggcttggaa

SEQ ID NO: 149222 - DNA, 100 bp, Homo sapiens
gacctgctgctggacccggcctgggagaagcagcagcgcaaggctgaaggtgatgtggccgccctcaaccgacgcatccagctcgttgaggaggagttgg

SEQ ID NO: 149223 - DNA, 100 bp, Homo sapiens
tgaagagctatggtgaaacaccactgaagcattgccaagttgaaaacgaggcccactgcgactttgtgaagctgcgggagatgctgattcgggtcaacat

SEQ ID NO: 149224 - DNA, 90 bp, Homo sapiens
tacctaccaccttagtcgtttatttcttccgagttagaaatcctacaaaggaccttgtctctaattaacagaagatggcaaagcccagcc

SEQ ID NO: 149225 - DNA, 48 bp, Homo sapiens
taatacccagttcattgagaatgtgcaccagggacctgtccctctgtc

SEQ ID NO: 149226 - DNA, 51 bp, Homo sapiens
gctttctgtacagcctgcagaactggcaagtgtccagagaatggctgggat

SEQ ID NO: 149227 - DNA, 100 bp, Homo sapiens
ctccctgaccctgtccctcctgaaggtgactctcctattccatctgtttcttcgggatcatcttcacctctttcagccacttctgccccaccaacgttgg

SEQ ID NO: 149228 - DNA, 99 bp, Homo sapiens
ctaaaccactatgcttaccgagatgcggttttcctcgcagaacgcctttatgcagaagatgctgttagagaaatttgttgaagaatgcaagttccctcc

SEQ ID NO: 149229 - DNA, 90 bp, Homo sapiens
tcgagagcagcatccaaccaaaatcccgtccatgaacatcctgacctccgtgctgctgctgtacaccaaggaggaggaagccttctggct

SEQ ID NO: 149230 - DNA, 75 bp, Homo sapiens
gagtcaaatgaagaacggcaggatacagacatgcttgaagtacatctggattccttatgtgtgcatgttagcagc

SEQ ID NO: 149231 - DNA, 132 bp, Homo sapiens
gtcaacaggcccgggacctggttattacaaccccagtgattgcacaaaagttccaaaaaagactcttttcccgtgctgggtaggccaggtttcagcatcgcagacaagaagcgcaggacaggctgcattggg

SEQ ID NO: 149232 - DNA, 136 bp, Homo sapiens
attgcaatcatggtgcagaaataccagtccccagtgagggtgtacaaatacccctttgaattaattatggctgtgctggagaatctggtaaaagcaccattgtgaagcagatgaggatcctgcatgttaatgggtt

SEQ ID NO: 149233 - DNA, 100 bp, Homo sapiens
aacatttacatgggacaaaaagcttgagatggttgtgaaatcaacaggaattttaggtggacaaggtatggcctcacaagtcttggtctacccaccatat

SEQ ID NO: 149234 - DNA, 126 bp, Homo sapiens
gaggcaccgggatcgtgaccgagaccgtgaccgagagcgtgaccgagagcgcgaatatcgtcatcgttagaaggaaacaaaccatcaggcctcccagaaagtatccgggatctgaaaatcaccaaa

SEQ ID NO: 149235 - DNA, 99 bp, Homo sapiens
ctctggttctacttcacactgcagaactgggttctggactttgggcgtcccattgccatggttggatgtactggaaaagtcataggaattgatcacatt

SEQ ID NO: 149236 - DNA, 90 bp, Homo sapiens
gggagcacgtggtcaagatccccctgaagaggtgccagttctaccgcacacgcaggtctcggtgattcagaatacacctacttttgcaat

SEQ ID NO: 149237 - DNA, 83 bp, Homo sapiens
gcgagctcaaggcggcgcggcggccactgggcgcagcacccaggaacctggcttctgtatttaccatgtacctggagcattgg

SEQ ID NO: 149238 - DNA, 50 bp, Homo sapiens
tggaagaccacgtgaaaaactttagctgctggccttcctgcaaggactct

SEQ ID NO: 149239 - DNA, 100 bp, Homo sapiens
cttctccgaagactgaaggttcaagatcagatgactaagcagcatcaaaccagattagatggtcccaagcaagacagaactgcagaagggcaagcactaa

SEQ ID NO: 149240 - DNA, 75 bp, Homo sapiens
ccgtcatatccctctccacgacctcggtcgagcatgttcaccagggcccagatcgactgctagagagtatgctct

SEQ ID NO: 149241 - DNA, 100 bp, Homo sapiens
cgggagagggggagtgcgcggcggccgcagctgccacaaaccaggctgtaccagtgcaggtcctcactttaatcctctatccagaaaacacggtgggcca

SEQ ID NO: 149242 - DNA, 98 bp, Homo sapiens
aactttcccagcaaaatgccaaggacttcttccgcgttctgaaccttaacaaggcctttttgcaaatgtgtaacttgcctatcaaagtagtttgtagg

SEQ ID NO: 149243 - DNA, 95 bp, Homo sapiens
cctcggacttcatctcattgctcagcgcggacctagacctggaatcgcccaagtccctctactcgcgagagcattggctgtgatgactacttagg

SEQ ID NO: 149244 - DNA, 100 bp, Homo sapiens
atctatttagaaaatgggatgcaggattcaaggaagaaattagaccagatgagaagtcaagaaaatcagaggctccttaaaaatatgttcaaaatcggtg

SEQ ID NO: 149245 - DNA, 100 bp, Homo sapiens
gatctcctgtgctgcgaccactgcccggctgccttccacctccagtgctggtggacatcgagcagctggatccccgcggccggactcccctgcacctggc

SEQ ID NO: 149246 - DNA, 100 bp, Homo sapiens
ggggtccgggtgttcgcggtcggccgccaccaggtcaccctggaagagtcgctggccgaaggtgctgaccttaaggaaagagccaaaatgagttccagtg

SEQ ID NO: 149247 - DNA, 82 bp, Homo sapiens
tggagattgcttgaatcaaaccttagaacttaaatctatcaatgtgtttcatcattacgattagcctataaggatcttgaaa

SEQ ID NO: 149248 - DNA, 53 bp, Homo sapiens
acgggagccaaccagggctgcattggaggctccaggcaggctggtccgtccac

SEQ ID NO: 149249 - DNA, 82 bp, Homo sapiens
ctcgccgcagggcctgggcgccttcacccccgtggtgcggcagcgcacgctgcagtccaacaatgcagatcttcgtgaagac

SEQ ID NO: 149250 - DNA, 90 bp, Homo sapiens
gttcaaaaactgaaggactctgaagctgagccaacagaagctgttcttccctctcctcccactgtccctgtgatccctgtcctgccagtc

SEQ ID NO: 149251 - DNA, 89 bp, Homo sapiens
caaggtgaataaagaagtggagcgtgtcctgaaggagttccaccaggccgggaagcccatcgggatttgtgaagaggtgacccaaattt

SEQ ID NO: 149252 - DNA, 90 bp, Homo sapiens
cagagctctttaactgtaccaccatctccttcgtggacctcagggccatgccgcttacaaacacgcagatggcaagaagattgatggcag

SEQ ID NO: 149253 - DNA, 100 bp, Homo sapiens
ctgctggctcgagaacgaagtaggccgtctcgctctgggtctccaggcccgcgaccgtccgccagtcgtcccgagctcaacagtaaagatcaaggtttac

SEQ ID NO: 149254 - DNA, 75 bp, Homo sapiens
gggacatatgttgcctcagactggagctcgaagataaagaggccagatgctccagtgcctgatggcgaaagtgag

SEQ ID NO: 149255 - DNA, 97 bp, Homo sapiens
aaagccaagccttttcactgggaagccctagctgcttaccttttggatactagagctgaagaagaagctgttcaaacgccggcgggtgttgaatcgg

SEQ ID NO: 149256 - DNA, 98 bp, Homo sapiens
cgcagcatccccaacggcctgcacgatgttcctcctgctgatcaagagaagctttttatccagaagttacgtcagtgttgcgtcctctttgactttgt

SEQ ID NO: 149257 - DNA, 100 bp, Homo sapiens
gaccctgcgataacctgcatctctgcaaactcaacttgctgggccggtgcaactattcgcagtccgagcggttctggcctataggaacaagacattttca

SEQ ID NO: 149258 - DNA, 100 bp, Homo sapiens
gaggaggggccccagcagcccccgaaggccctatcaggacatggagtatgaaagacggtgttggagcgggccggagagaagtagagtgggctgcgaggag

SEQ ID NO: 149259 - DNA, 95 bp, Homo sapiens
tccatcatagtcaactgcgtggaagagaagccatccaggggtctttaaccagaagagagaggagagcctcaggagttaggaccagaagaagccag

SEQ ID NO: 149260 - DNA, 75 bp, Homo sapiens
ctccaaattcgcctccatctgtaccatggtgtcgtgaaaactacccctaaaagccaaaatgggaaaggaaaagac

SEQ ID NO: 149261 - DNA, 148 bp, Homo sapiens
caagctggagcagagatacttacctatccttcagcttttggatccattacaggcccagcccactgggagacatcagactgcgggttcgggctgaatactgccagcatgagactgctctgcagggcaatgtcttctctaacaagcagga

SEQ ID NO: 149262 - DNA, 115 bp, Homo sapiens
ctccaggagaagttagcttcagagttctttgtggatggacttgattctgatgagaggtactccaaagattcaggtttactcacgtcatccagcagagaatggaaagtcaaatttc

SEQ ID NO: 149263 - DNA, 75 bp, Homo sapiens
aggaaggaagtgcggagccagcctgagttgggagaagagctccagagacacttgcacctcctgcgccgccgcccc

SEQ ID NO: 149264 - DNA, 75 bp, Homo sapiens
aacggctcctggacagatatggacacacccagccgctgtgaacctgcacttgttgccaagtcttccatcttacta

SEQ ID NO: 149265 - DNA, 75 bp, Homo sapiens
atttcaccaacaactatttattgagggctaggctatggagttactagtagagaaagcaatcagcagtgcttctag

SEQ ID NO: 149266 - DNA, 100 bp, Homo sapiens
tcgctggatcagaaagacagaagaaaaccaaggctgaaggggatcgtctaaaagagggtgtggatgaggtcaccattgtcaacattttgaccaaccgcag

SEQ ID NO: 149267 - DNA, 90 bp, Homo sapiens
agaaacatggaacagttttcttggaatccaggtactccaaagattcaggtttactcacgtcatccagcagagaatggaaagtcaaatttc

SEQ ID NO: 149268 - DNA, 78 bp, Homo sapiens
accagtcaactgatattgatagtacattggccaacttcctagcggctgttcggctcttgaatcccagcgatgaaacca

SEQ ID NO: 149269 - DNA, 83 bp, Homo sapiens
tctccaaattcgcctccatctgtaccatgtgcaccgtccaggtgaggttagagctggggcatcgcgcccaactgcgcaagaag

SEQ ID NO: 149270 - DNA, 75 bp, Homo sapiens
aaaaccatctggtgatgatagatacaatcagtttcacataagcggcagtacatacctgtgaaaatgaagagcaaa

SEQ ID NO: 149271 - DNA, 89 bp, Homo sapiens
ctctcccagcgcagcgccgccgcccggcccctccagcttcccggacacattggcgtgagacctgggagtacgttgtgccaaatcattgc

SEQ ID NO: 149272 - DNA, 98 bp, Homo sapiens
gtactttgtctgactacaatattcaaaagcttcagctttagctgcagctgcctctgttcagccacttgcaacacaatgtttccaactctctaacatgt

SEQ ID NO: 149273 - DNA, 95 bp, Homo sapiens
taaagctgcgaggcccgcggccgccgactgctgcgaggagcaggccgggctctcgccatgggtcactgtcgcctctgccacgggaagttttcctc

SEQ ID NO: 149274 - DNA, 131 bp, Homo sapiens
tatatttttatcacgttcagtgtgctgggatgaggttacgagtagccatgtgccatatgatttatcggaagcctgcctagggtagttaaaagacgagtgaatgctctcaaaaacctgcaagttaaatgtgc

SEQ ID NO: 149275 - DNA, 100 bp, Homo sapiens
ctggggccgaagcagcatgtgacaccgaccagaaaccaatagagccatggcgactccctctgctgccttcgaggcccttatgaatggtgtgacaagctgg

SEQ ID NO: 149276 - DNA, 96 bp, Homo sapiens
cccggtggtgctgcacagcttcacgcagctagaccccgacctgccgcgcccggagggactttgaacatgtcggggatcgccctcagcagactcgcc

SEQ ID NO: 149277 - DNA, 50 bp, Homo sapiens
cataattcctatctttaaaagagggtctcactctctgacctcagctggag

SEQ ID NO: 149278 - DNA, 120 bp, Homo sapiens
caggctccggaggcggcgggacagagcgcctgcgaccccagtcggtgctccggggaggtcacctgacgaggaggtgaaaggtgtagcagtcactcggcctacacccacagcatcgacctt

SEQ ID NO: 149279 - DNA, 88 bp, Homo sapiens
ggggtgcgtgggtgcctggagatgaagctggaaagctcacggatgattgatatccagaccaggatggctgggcgagcattggagcttc

SEQ ID NO: 149280 - DNA, 100 bp, Homo sapiens
ggccgctgtgcctgctgctgagcagcgccgcggctatatgttctcctttcagccaagacctttcaccagtgcaggggatagaagattcattccacaaact

SEQ ID NO: 149281 - DNA, 90 bp, Homo sapiens
ctctgaactgactgccccgcatcaccggagcgtcccagctgcgaggagtttgatggtgacagtgcctacgtggggatgagtgacggaaac

SEQ ID NO: 149282 - DNA, 100 bp, Homo sapiens
agaaccatcattccgtccagcaatcccaccactggtcatctacccaaaggacttgcgagccctggtcagagaggagcctggaggggccacctaagctctg

SEQ ID NO: 149283 - DNA, 50 bp, Homo sapiens
gagctctcagcataccgtgcaacaggtaaaaatgtctccatcgtatcatc

SEQ ID NO: 149284 - DNA, 100 bp, Homo sapiens
gaggagcatgtggccagtcgcctcacctctcctatcgtctccacccacctggacactcgtaatgtggcctttgagagaagaactccactgaacattcatt

SEQ ID NO: 149285 - DNA, 98 bp, Homo sapiens
ctttgtctccttcgacttggagtctttgtccaggacggctgttactgaggcggagacacgggtgatgattggctttctggggagagaggaagtcctgt

SEQ ID NO: 149286 - DNA, 101 bp, Homo sapiens
aaggagctcatcaacaatgagctttcccatttcttagaggtgttctttgcagaagatgtgggttcaaacaaaggtgcaatcattggactcatggtgggcgg

SEQ ID NO: 149287 - DNA, 83 bp, Homo sapiens
cgttgatgagagcattcgaagtgacctcagcagggcatccagttctggagtgtttgaaatcgccgaagcttcgggagttagaa

SEQ ID NO: 149288 - DNA, 82 bp, Homo sapiens
ctcagtccaagtttaaagttaaggtgtttaagatagaagtgctaatgaatggaagaaaacattttgttgaaaagagatacag

SEQ ID NO: 149289 - DNA, 100 bp, Homo sapiens
gtcagacggcgctatgtacgccctcttcctcctggccagcctcctgggcgcgggcatcctctggtatcacgattccaaaacccccaaagccaccagataa

SEQ ID NO: 149290 - DNA, 96 bp, Homo sapiens
gccccatgaggagggacgtgaacggagtgaccaagagcaggtttgagggtgaggtggctttgaccccgggttgcccggccagcacgaccgaggagg

SEQ ID NO: 149291 - DNA, 98 bp, Homo sapiens
cttccctaacatcgacagagagaaggcaatgagccgacccatcttgtacagcaactggctgtcaaagagacaagctctcgccatgttgcccaggctgg

SEQ ID NO: 149292 - DNA, 82 bp, Homo sapiens
ctgggaccgtgcgcgtgcgcctgggggcaccgctgccgttccgagaaagtttcctacactactgaggtttaggggcactgtg

SEQ ID NO: 149293 - DNA, 90 bp, Homo sapiens
gttccgcacccgctcccggcgcctgccggagaggccagattataagcgccatggctatggctagtgttaaattgcttgccggtgttttaa

SEQ ID NO: 149294 - DNA, 75 bp, Homo sapiens
taatctctgtcagtctgctgtttgcaggcgtcattgctgctagaatcggtttactttatcatcatcaagaaataa

SEQ ID NO: 149295 - DNA, 89 bp, Homo sapiens
attggatctctttgaaaaaatgatgccccctgcctgggatgcgccagccactgagccttcagggacccagcagccagccccgtctacag

SEQ ID NO: 149296 - DNA, 90 bp, Homo sapiens
cttgttttttcatattacatctacaagaggggacaagtacctttatgaaccagtgtatcccaagaaattgaacttagctcattaagggaa

SEQ ID NO: 149297 - DNA, 98 bp, Homo sapiens
ccgtattctcagagtaaaagttgtttctggaattgatctcgccaaaaaggacatctttggagccagcagagtctccttggaggtgacatggatatggg

SEQ ID NO: 149298 - DNA, 75 bp, Homo sapiens
gaactgaaaagggaagcccggaatttgctcaaatctcatcttaaccttgatctgactgcagccatgagcagcaat

SEQ ID NO: 149299 - DNA, 75 bp, Homo sapiens
cgggagtggaccacatgttcttctcagcaccgaaggtcgcctgtggctacgcacacacattagtattaacagatg

SEQ ID NO: 149300 - DNA, 88 bp, Homo sapiens
atgagtttggtttccgtgtgtacaaggaaggtgaaaggtgtagcagtcactcggcctacacccacagcatcgaccttgtgaacccagc

SEQ ID NO: 149301 - DNA, 84 bp, Homo sapiens
agagcctcagtttgtgcaggacaccgacatggaacagggactcactgggggtgacatcactcaaaaaggatatgaaaagaaaag

SEQ ID NO: 149302 - DNA, 100 bp, Homo sapiens
gatttacctgtgagatgtttcatcccaacagttgggtatctacagccattggttgctgttcaggtcagctttgctcctaacaacactgggaaagaagtaa

SEQ ID NO: 149303 - DNA, 75 bp, Homo sapiens
gggtcttgcgagatatctggccgcctctgccgcagctggaggttcaacgccctctagatcgcctgttctcctcta

SEQ ID NO: 149304 - DNA, 90 bp, Homo sapiens
ggacaattccatttggggaccagagatggacggtcactcagcctatggaggctgaccggttccctgatgtgttacctgcttctgctactg

SEQ ID NO: 149305 - DNA, 100 bp, Homo sapiens
ggccaaagtccttatcaaaaactggaagcggctgctagggatttggaatgcctatgttctgaagtctgaagaaaatttacaaatctggaactctattatt

SEQ ID NO: 149306 - DNA, 100 bp, Homo sapiens
agaggtggaccggctgcggacccagattcaactttcacgtatcaaaccaccctgggtggttaaaggtcagcccacttaccagatatgcccccggatcatc

SEQ ID NO: 149307 - DNA, 75 bp, Homo sapiens
cggagatcttaataggaaccatcccagatgacaccaaggctgaggagaaggagcccattgaaacacagcaaaatg

SEQ ID NO: 149308 - DNA, 100 bp, Homo sapiens
gcctccaggccaagagggatccttcacccgtgtctgaaggacagaataacgggctcccagattcacaagccccaccaagaggatcaccccaggaacgctt

SEQ ID NO: 149309 - DNA, 50 bp, Homo sapiens
tggagagcagactacagggaccccattggagcagctgatgagccagatcc

SEQ ID NO: 149310 - DNA, 82 bp, Homo sapiens
caaggacttcctgctcacagcccgacgaaaggatgccaaattacctggagtagaacagaaaaattattatgtctgtgttccc

SEQ ID NO: 149311 - DNA, 82 bp, Homo sapiens
aagttccaacaaaagaatgctgccgcagcatgtagatgtagcagctctactaataaagtataatgcatgtgtcaatgccacg

SEQ ID NO: 149312 - DNA, 100 bp, Homo sapiens
gagcagccatgagggccgggcccagtcaccgaccgagaactagtggctctgaagaaggtgagactagacaatgagaaagagggcttcccaatcacagcca

SEQ ID NO: 149313 - DNA, 80 bp, Homo sapiens
accgacagcacagacagaatccctgctaccagagaccaagggcagcgtggccgtgcgcgtggctctgggggaaacccagc

SEQ ID NO: 149314 - DNA, 100 bp, Homo sapiens
gactctcaccctggcgctgccccgagaggcctgcgggccactcctggacaacctcaggttatgatgtgattgctcaagcccaatctgggactgggaaaac

SEQ ID NO: 149315 - DNA, 76 bp, Homo sapiens
cacctttgccaggaactggggggccgactatatcctggtttccatcgtgtgggaagaacggagtaacgagtctcac

SEQ ID NO: 149316 - DNA, 100 bp, Homo sapiens
gtccgcggagatctctctcatctcgctcggctgcgggaaatcgggctgaagcgactgagtccgcgatggagtcaagtctctatttatgaggtggacaagc

SEQ ID NO: 149317 - DNA, 101 bp, Homo sapiens
gcgtagttggcgctgctctggaacaccttcacccgcttccgcagcccgctcgtgcccggcttctggtcctgatgcacagtaatcaaaagggcttacttcca

SEQ ID NO: 149318 - DNA, 98 bp, Homo sapiens
gctacttcaacggaaactagctcatctgtagagactgatttgcaacccttccgggaagccatagctctgcatggctacccacctttctgttctgagac

SEQ ID NO: 149319 - DNA, 83 bp, Homo sapiens
ggcgatggtgatggcagcagttactcgcacaaccccagttaagctgcgctccgggagatattgatgatgctcaaatacttccc

SEQ ID NO: 149320 - DNA, 75 bp, Homo sapiens
cttaaatagaatacagtttgacatgacggcaaaaaatttgaagactgggatagtttccaagctattttggatcat

SEQ ID NO: 149321 - DNA, 98 bp, Homo sapiens
caaccattgtactcagtagaggagtatcagttcagtatcgctacttcaaagggtactttttagaaccaaagaccgttgaaaactgtgtgtgcatttta

SEQ ID NO: 149322 - DNA, 98 bp, Homo sapiens
tcgggccggcggacagtgagggcgcggcacccaggcatgtggaatatgctcatagtggcgatgtgcttggcccttctgggctgcctgcaagcccagga

SEQ ID NO: 149323 - DNA, 100 bp, Homo sapiens
tcctctggtgagaaggtggtgaggcttcccgtcatattccaggcagcagaagatgtcgttttcattggacctgacacacatgctattcaagccatgggcg

SEQ ID NO: 149324 - DNA, 75 bp, Homo sapiens
ccttgtcctcccctttcatccctatgtggaaaacggtactccaaagattcaggtttactcacgtcatccagcaga

SEQ ID NO: 149325 - DNA, 75 bp, Homo sapiens
cggagaccccgcgccgacggctgctcaaacatcaggccaaaacagagtggagtacgagaaaagggtccgagcaca

SEQ ID NO: 149326 - DNA, 100 bp, Homo sapiens
agctgctgcatcaggcagtttcccttcccaaggcatctctgacacgctgtgggccatcgagatgtgggaccctgcggcccaggcgttccggctgaacaac

SEQ ID NO: 149327 - DNA, 100 bp, Homo sapiens
aggattccaagtaactcttatttggatagcagtgagattcacttcaaagtgaaaatgacaacacatctcaagaaactcaaagaatcatactgtcaaagac

SEQ ID NO: 149328 - DNA, 100 bp, Homo sapiens
cttggcaagagtcttctggtccctgttgacgctgccaaacgagggattctttcatctggtcggggcagaggaattcattcaagaggtcgaggtgcagttc

SEQ ID NO: 149329 - DNA, 82 bp, Homo sapiens
cccaccatggagacccgctacaacctgaagagtccgggtcaaaatgcagatcttcgtgaaaacccttaccggcaagaccatc

SEQ ID NO: 149330 - DNA, 87 bp, Homo sapiens
agcacagagcctcgcctttgccgatccgccgcccgtccacacccgccgccaggttgtgaccgagattcccgacgagagagactgagg

SEQ ID NO: 149331 - DNA, 80 bp, Homo sapiens
gcagatggcggatgccctgcagtacctgcagaaggtctctggagacatcttcagcagttcctctgtgacgagggtgcagg

SEQ ID NO: 149332 - DNA, 75 bp, Homo sapiens
cgggcacggtcagggcgtgacgtcgggaggagggcagctatccagacagagcagctaccctcagctctagctgat

SEQ ID NO: 149333 - DNA, 80 bp, Homo sapiens
aaggaatcgtatcgtatgtccgctatccagaacctccactctttcgttcaaaagaatgctgaaccgggagctgacacacc

SEQ ID NO: 149334 - DNA, 100 bp, Homo sapiens
agaatacagagagaaaattgagacggagctaagagatatctgcaatgatgtactgattcagaatggacagtttagaagaacctcagaaaaaagtctttaa

SEQ ID NO: 149335 - DNA, 100 bp, Homo sapiens
gtgcgccgcagcccgggcccaggccccggcagcgcctgggacaagcaatggaagagttaatagttgaacttcgtctctttcttgaactcctggaccatga

SEQ ID NO: 149336 - DNA, 98 bp, Homo sapiens
gatcctaagtcctgacctttcatgagcccagtggcacccgactcgctctcctctccctcaccgacgcccctgagtcgaaataatctgctaccacctat

SEQ ID NO: 149337 - DNA, 97 bp, Homo sapiens
ataagctgaattatggcagcccagtcaagcatggactggaggaaacagctgccaaatgcaagggactgggtgccaaggttcatacctttgtggtaga

SEQ ID NO: 149338 - DNA, 78 bp, Homo sapiens
tctaagactctgggacactcctgaagtcgggaaatgcaacatggccaatctttcctaagctgctcagcttacaagaaa

SEQ ID NO: 149339 - DNA, 100 bp, Homo sapiens
tggagaactttacacttctggcctctctggcttgaagctcaactagagaaaaaggaccaacaatttaaagaacaagaaaagactatgtccatgttgcaac

SEQ ID NO: 149340 - DNA, 50 bp, Homo sapiens
gatggaactatcttatgcacggtcaaggaggaggtcaagttggcctgaat

SEQ ID NO: 149341 - DNA, 99 bp, Homo sapiens
gatcctgctgggatttttgagctggtggaagtggttggaaatggcacctatggacaagtctataaggctggacgtaaagaaagaagtgatgcactcaat

SEQ ID NO: 149342 - DNA, 100 bp, Homo sapiens
aggggagccaagctggagtttacacaggcaaactgtcagaaaagagtagcctgggctgtctggaaatctgagatgccttcaattaagttgcagagttctg

SEQ ID NO: 149343 - DNA, 100 bp, Homo sapiens
gaccctgcccagcagaatttgtatagagatgtgatgttggagaactacagaaacctggtctccctaggtacatcaggaacgtctctatcaagaatacaat

SEQ ID NO: 149344 - DNA, 75 bp, Homo sapiens
ctggagtgaagaagcaagtgggatcacctatgaagataggcaattgaaggaacagactaaaaatcgtgtcctgga

SEQ ID NO: 149345 - DNA, 123 bp, Homo sapiens
agaaggtaaccgggtccagacccacgcggcgccagttctccggcgggaaggaaaaccgcgcagagagcaattctgtggtgttcttggtcacacatttatggagtttctgaagggcagtggaga

SEQ ID NO: 149346 - DNA, 90 bp, Homo sapiens
ggcgtctgccctggagcagttcgtgaacagtgtccgacagctctcagctcaagtcaccattactttaagtactgcaaaatctcagcattg

SEQ ID NO: 149347 - DNA, 83 bp, Homo sapiens
atcaccaagttcgcatgttggctgcagagtcaatcaataggtgtgactgcacagaaaagttacaaaacaaatttgactttttg

SEQ ID NO: 149348 - DNA, 75 bp, Homo sapiens
tgcacttgaggcccagaatgcactgcacaatattaaaactttacctgggggccgttgctccagggagaactgcaa

SEQ ID NO: 149349 - DNA, 100 bp, Homo sapiens
tggaccagatcgccgtcaccatcgtcggcggccacctcggcctcaactccatatagcatagattcagattctttgggaatggagtgtattatttcgggaa

SEQ ID NO: 149350 - DNA, 75 bp, Homo sapiens
tgaacacctgagtgcccgggcaggcttcactgtgggttggtcacttctgtgcaaattaatagaagtctgtccagg

SEQ ID NO: 149351 - DNA, 83 bp, Homo sapiens
tgcgtgccctacttcaaggataagggcgacagcaacagctctgccggctggaaggcacagccaaaattggtcagaaaggggag

SEQ ID NO: 149352 - DNA, 75 bp, Homo sapiens
ctttgccactcgactttccaacatttttgttattggcaaggccaaggatgcaggacagagaaccactatttacaa

SEQ ID NO: 149353 - DNA, 83 bp, Homo sapiens
gagaaggataagtcgaaggggaaggcgcctgaagaggacgaaggttgaatttttaggagaagaaggaactggcttgggaccca

SEQ ID NO: 149354 - DNA, 98 bp, Homo sapiens
gtggctgctcccagctctactccttctctgcctctcagaatcaggaaacccaggcccaacggcaggtggatgcaagaagaaatgttccccaaaacgac

SEQ ID NO: 149355 - DNA, 50 bp, Homo sapiens
caaaatgatcccttgaaagacagttacgggagtctgaagatacagtattg

SEQ ID NO: 149356 - DNA, 88 bp, Homo sapiens
gtgaaggtccggggcttgccctggtcttgctcggccgatgaagtgcagaggtttttttctggtggtgttcccactgatgaagagcagg

SEQ ID NO: 149357 - DNA, 82 bp, Homo sapiens
caacttcagataccactggagaagaaaatgctgacccaccaaagactctccaacatgtgccttctgaccatacaaatgaaac

SEQ ID NO: 149358 - DNA, 83 bp, Homo sapiens
caggcctgcgtccgagtctccgccgctgcgggcccgctccgacgcggaaggctgcaaggtgtgactgttgtaaatctcaagga

SEQ ID NO: 149359 - DNA, 137 bp, Homo sapiens
tactgccttgagtctcattttgtttccctctggaaaccacatgtgtaccttgtttgcaacagtatggatgttgatgttagtgaagattcacctcctcccctacctgaaagaactcctgaatcgtttgtgttagcaag

SEQ ID NO: 149360 - DNA, 100 bp, Homo sapiens
tacgtttagcttcaaaaatgacaagttcgataaaagtgtgcagaccaagggatttgtcttggctgttactatgacacgggaagcaattgatgaatttcgg

SEQ ID NO: 149361 - DNA, 100 bp, Homo sapiens
gcccgtgccgcgagcgcggcctgcaggaggtgaacttcacggtagaccagatccgcgccatcatggacaagaaggccaacatccgcaacatgtctgtcat

SEQ ID NO: 149362 - DNA, 100 bp, Homo sapiens
ggtctggtcggatggggcaggatggctgcgttgacacgtcttatttaatccacatcataggtgtcatggagaaactccagctgggcccagagattctgca

SEQ ID NO: 149363 - DNA, 113 bp, Homo sapiens
gttcacgcacgggatccagagcgccgcgcacttcgtcatgttcttcgcgccctgttccagggtctccctccactgctgtagtaacccgggtccggggcctcggtggtgctcct

SEQ ID NO: 149364 - DNA, 100 bp, Homo sapiens
tgtgtgagggaaagaaaacaatttctcctgctctgcagcttctgttcagctccctgtgctgtcaggaatctacaggacttggctcgtatttacattcgac

SEQ ID NO: 149365 - DNA, 100 bp, Homo sapiens
ggcccgcttcctggaatggcaagcgcagcaacaacagagagcacgtgatgagcgggatcgtgtgcagaagaaaaccttcaccaagtgggtcaacaagcac

SEQ ID NO: 149366 - DNA, 75 bp, Homo sapiens
cgccgggaccgggaccgccgccgccgccgccaccatgggcaccggcagaagctggaggaccagaccaagccgttc

SEQ ID NO: 149367 - DNA, 101 bp, Homo sapiens
gcctgccgcctcgctgtccctgcggcttctgggggatctcaaagatttcatgagacaagctggggaagtaacgtttgcggatgcacaccgacctaaattaa

SEQ ID NO: 149368 - DNA, 83 bp, Homo sapiens
tggccacaagagcgaggagaagcgagaaaagatgaaacggaccctgatgagccccaagagcctcaagaacccaacaaggtgcc

SEQ ID NO: 149369 - DNA, 90 bp, Homo sapiens
accatggacagcgtgcggtctgggccttttgggcagcttttccggcctgacaacttcatctttgtctcacaccattttgctggtacagcc

SEQ ID NO: 149370 - DNA, 100 bp, Homo sapiens
gaccgagagcgcgaatatcgtcatcgttagaagaccatgaaatggaggctcagggggtgaagggactgatcaagatcattcagcaataaatgctggaacc

SEQ ID NO: 149371 - DNA, 74 bp, Homo sapiens
tgcagtcccttctggccaggataatatacacaggcagcaagccaatcactgaggtgatgcgttttgcaagggag

SEQ ID NO: 149372 - DNA, 100 bp, Homo sapiens
taaagccacagtcttcaagagcccacggacaccacctcaacggcagagacatttgtttgggtgaacaatgcatctgcacattcccagagtgttgccaagg

SEQ ID NO: 149373 - DNA, 100 bp, Homo sapiens
cagtgtggaagcaattgagcagttcagttactggtcttaccaatattgaggaagaaaactgtcagaggcagcctgcttctgcaaagtggtacgatcgaag

SEQ ID NO: 149374 - DNA, 86 bp, Homo sapiens
caacgcctggctcggagcagcagcctctgagtcaggatggctaaaggtgaccccaagaaaccaaagggcaagatgtccgcttatgc

SEQ ID NO: 149375 - DNA, 100 bp, Homo sapiens
cccacacctatcaaagccccctgctctactgtgacctggagaaagacgagaggaccttcgaggaggatttatgctttgctttttggatgatggagcagga

SEQ ID NO: 149376 - DNA, 98 bp, Homo sapiens
agtccaactcggagatggaggctgccatggtgcagctgcagtcccagcaccagtggcagttcgcagcctccaggacttggctcgcatcgccatccggg

SEQ ID NO: 149377 - DNA, 75 bp, Homo sapiens
gaaatacatccaggaaagacatggagattctcttaaaaagccacgaaggaagacaggaggtccgaggagaaagcg

SEQ ID NO: 149378 - DNA, 90 bp, Homo sapiens
gaatccctggagccggaagatttctttcatcattggtcggcataaagttcgaactgagaaacttcctgaagtactaaatatggaatccct

SEQ ID NO: 149379 - DNA, 83 bp, Homo sapiens
ccactttggcttttaatcttggctgtgaccccctggaaatgggagagctcagaattcagtttgctgacctctctgaggctgcc

SEQ ID NO: 149380 - DNA, 75 bp, Homo sapiens
gtcttccacttgcacgaaagctttcctaggccaaaaagagatgcgagccacccctctggctgctcctgcgggttc

SEQ ID NO: 149381 - DNA, 74 bp, Homo sapiens
aaaacactatcctctgagatcccagatcatgagtgagtctgccaaaaaagaggtggttgctgaagtggtaaaag

SEQ ID NO: 149382 - DNA, 100 bp, Homo sapiens
gccggacaaactcagacatcgtggaggaaggatatggagtaatagtactaaatcccaatgaaaactatattgaagtagaaaagccgaagatacacgtaca

SEQ ID NO: 149383 - DNA, 100 bp, Homo sapiens
agtttcctgcatgttcattcctgatgggcgggtgtctgtctctgctcgaattgacagaaaaggattctgtgaaggtgatggtggatataatggatttgga

SEQ ID NO: 149384 - DNA, 75 bp, Homo sapiens
gccggtgcagcagccttcagcttttggcagcatgaaagttagcagtgcccctacagacatacaaggagattgttc

SEQ ID NO: 149385 - DNA, 76 bp, Homo sapiens
tcccagaagcaatttaaggagcagtgtttggtgtataaaacagaccaagctcaagatgtaaagaagattgagaaat

SEQ ID NO: 149386 - DNA, 151 bp, Homo sapiens
acctttcgtccttaaatattgccgatacttgacctacgcaagagacaatgtcatgtgattcagcctaatatctcagtcacagtaatgaaaggcagtaatagaaataaggatcattcagcagaaggagaaggggttggaaaacgaccaaaac

SEQ ID NO: 149387 - DNA, 83 bp, Homo sapiens
ctactgtgctatcctagaatcaaggatttcagcaacaatgcctctgttcaaactcccaggtggtatgcaagattacaattatg

SEQ ID NO: 149388 - DNA, 100 bp, Homo sapiens
cgagtccccgtacggccacccggcggctgctggttgcgcagccacctcgggatactgcacacggagaggagggaaaataagcgaggcaccgccgcaccac

SEQ ID NO: 149389 - DNA, 83 bp, Homo sapiens
ttttggggttgccatcggcccgtagtatgtgaaaaggagtgcatccgccccaacccttttccccctcgtctcctgtgagaatt

SEQ ID NO: 149390 - DNA, 50 bp, Homo sapiens
ggctgataacgaagcagctattgtccagggtttgagaaatactttaagag

SEQ ID NO: 149391 - DNA, 80 bp, Homo sapiens
tcatctccggcgcttctagggctggttcccgtcatcttcgggagccgtggaggaactgtggctgcaccatctgtcttcat

SEQ ID NO: 149392 - DNA, 74 bp, Homo sapiens
atattgtagaataatgtatgatatatttcctttcaaaaagctgcttaatgcagataccgaaagagaagaaggcg

SEQ ID NO: 149393 - DNA, 96 bp, Homo sapiens
gaagagcccgggcggcgctcgtacttctggccactgggcgagcgtctggcaggtcctccagcagcctgacctgagtgggttagtgatccagagaaa

SEQ ID NO: 149394 - DNA, 85 bp, Homo sapiens
gcaatctgccattgagaactggctctgtggatattattgtaacagatttgccatttggaaaaagtgctgtcaaagggaaaacccc

SEQ ID NO: 149395 - DNA, 100 bp, Homo sapiens
gccggcctccggggagaaacggaaaagagcactggttgccattggtacccatgatttggacactttgtcgggcccatttacttatactgcaaagcgtcct

SEQ ID NO: 149396 - DNA, 75 bp, Homo sapiens
ttcccctgccctgggagcgggttcaggaccgcggatcggaagatgtccatgaggagccccatctctgcccagctg

SEQ ID NO: 149397 - DNA, 75 bp, Homo sapiens
gttggtgattggcaggatcctggtatccgctaacagaccgtgaacgccatcctgatcgtgatcatggtcccgatc

SEQ ID NO: 149398 - DNA, 76 bp, Homo sapiens
ggaacacctcgccaaagcagagaaatagcctccggtgtggctgtctctgatggtgtcatcaaggtgttcaacgaca

SEQ ID NO: 149399 - DNA, 100 bp, Homo sapiens
caagagcagcggaaaatgatccagtcacagagagtgactcagacatctcctctacaagtacctaacccatcctggatgcaccaccattcatacctcatgc

SEQ ID NO: 149400 - DNA, 51 bp, Homo sapiens
gcaagaggaccctgcggactactgcaaagtcaaaacttctttgagacgatg

SEQ ID NO: 149401 - DNA, 100 bp, Homo sapiens
ggaggatgcccccatgatcgaaccacttgtccctgaagaggttatacattggctcttcaaagacgttcacctcatcagagaaatccctgactcctttgca

SEQ ID NO: 149402 - DNA, 82 bp, Homo sapiens
gagcactaatatttaagaaagaagatgttaactttcaggaattgaatgatctggcacgggaccctccagcacagtgttcagc

SEQ ID NO: 149403 - DNA, 100 bp, Homo sapiens
ttgttcgtactctttttagtgctgcacagctaacagctgaatgtgcaatagtaactttgcttcgcagaatcaagaacggctatgtgcgtttaaagatccg

SEQ ID NO: 149404 - DNA, 75 bp, Homo sapiens
aattgcatcacagagacaccaaggctgaactccagtgcacccagttagacttggagcggaaactcaagttgaatg

SEQ ID NO: 149405 - DNA, 83 bp, Homo sapiens
atgagatcttgcagcagcacaagctgaagatggtgaaatgacaatggatgctctgttggctcgattgaaacttctgaatccag

SEQ ID NO: 149406 - DNA, 75 bp, Homo sapiens
gcggggaaggtcaccattgacagcagctatgacattgccaagatatcccacatggaggagcaggacttggagcga

SEQ ID NO: 149407 - DNA, 90 bp, Homo sapiens
gctttactttttgcttcaccgacatagtcattatgccgaagagaaaggtattttgaaggtggcgtctcatctgtctacctctgggatctg

SEQ ID NO: 149408 - DNA, 75 bp, Homo sapiens
gaagatcgtggcccctacggtgtcccaaatcaatgcggagttcgtgacccaggcctgagacctgggaggaagctg

SEQ ID NO: 149409 - DNA, 99 bp, Homo sapiens
tcccattcacaaggcagctcgctctgggagcctagaatgcatcagtgcccttgtggcgaatggggctcacgtcgagctttggccaaagagttgcaaaat

SEQ ID NO: 149410 - DNA, 98 bp, Homo sapiens
ggaatgctgcccgatggccctgggtcctcgctgtggggcaatccgggcttgcagacgagttctagacctggaaggcctcctaagaggactcaaagtgt

SEQ ID NO: 149411 - DNA, 100 bp, Homo sapiens
aacaagacgcacccgtccatcttcgggatcttcgacgggcacgggggagagatattcccactctggccactgcccaaaggggctcttatctgaggaatac

SEQ ID NO: 149412 - DNA, 74 bp, Homo sapiens
tccgggacaaaacccagccgcacagcaaaaaccagggaagctatgcgaaattatttaaaagagcgaggggatca

SEQ ID NO: 149413 - DNA, 83 bp, Homo sapiens
gagagtgattgctcttgaaggagatattgtcagaacctgagccagcagaagagtacactgagcaaagtgaagttgaatcaaca

SEQ ID NO: 149414 - DNA, 100 bp, Homo sapiens
gcacatcctccaagggccctgctggaacccctggagcaggaggaagcggtgattctccaggccttggcctcctctattggcccaggaagcccacccagcc

SEQ ID NO: 149415 - DNA, 90 bp, Homo sapiens
agaccctgggccaagaggcctccagggggatccagggataccaggtcctccgggaataaaagtcttgctggtggatgccctccttactcc

SEQ ID NO: 149416 - DNA, 100 bp, Homo sapiens
cagatgtatgctcatcagtattatatgcagtagtatctcagatgaagacatcatcaacattactcttcctactggagtccccattcttctggaattggat

SEQ ID NO: 149417 - DNA, 100 bp, Homo sapiens
attactttagtatcaatatctgctacaacatcacattttcatgcatcattttttcaaaataggattaacgtgacagtgtcaggtggacccacagccatcc

SEQ ID NO: 149418 - DNA, 100 bp, Homo sapiens
aacagtacagagttgtacaggaggaaaaccaggaggcaaaaccttcaactgaggacttgggggataagaaggaaggtgaatatattaaactcaaagtcat

SEQ ID NO: 149419 - DNA, 100 bp, Homo sapiens
gacacgctggattccacagctgcccagcaggagctcagatgaggagcaggagaagggcagcagcagtgagaaggagggcagtgaagatgagcactcgggc

SEQ ID NO: 149420 - DNA, 102 bp, Homo sapiens
tgctccgtggtctcagcccaggacctccaggggaacaatgaggcctacgcagagctcatcgtccttggaagtggagagactgattttggacctcagctcaag

SEQ ID NO: 149421 - DNA, 75 bp, Homo sapiens
ccgcgggcaaactcagactcgaagggctgggttacgacccctacaaccctgagctgcccaagccccccgcgcaga

SEQ ID NO: 149422 - DNA, 100 bp, Homo sapiens
tgggttggacctttacctgtggaggcaacactggccaagaagaggaaagttgccgaacaagcaaccggaaaagcttaataggcaatgggcagtcaccagc

SEQ ID NO: 149423 - DNA, 100 bp, Homo sapiens
ggacacccagcggtctgacatcgcgacgctgctcaaaacctcgctccggaaaggggacacctgttgactaatctccttcagaatcaagcagtgaaaggaa

SEQ ID NO: 149424 - DNA, 51 bp, Homo sapiens
tgtgcgaccctggctatctatatttatcagacagagtcttgctctattgcc

SEQ ID NO: 149425 - DNA, 88 bp, Homo sapiens
tagcacagaggccctgaatgacagccaggagttccccttccccgagacgcccaccaaagcccctagaggcggacacacagcgaccccc

SEQ ID NO: 149426 - DNA, 82 bp, Homo sapiens
ttctccaaaacgtggattgaggtctcaggttcctctgccaaagatggaaatgtttcaacgtgcgcaagcgttgcggcggcgg

SEQ ID NO: 149427 - DNA, 75 bp, Homo sapiens
aagaaactagagcaaataaccgttttgaaattgaacttgatactaaatttgggactctttgctgcgggagtttgg

SEQ ID NO: 149428 - DNA, 100 bp, Homo sapiens
catgggaactgctggtactgcaatcattcattttgtgccttgcaggaactgttgacattcagggatgtgaccatagaattctctctggaggagtgggagt

SEQ ID NO: 149429 - DNA, 88 bp, Homo sapiens
gcggccgcgtcccggaggcgccgccagcacagccaggactttccttatcccagttgattgtgcagaatacactgcctgtcgcttgtct

SEQ ID NO: 149430 - DNA, 90 bp, Homo sapiens
cgcagcagggtgagccccacccggagttcagcgcggactcccccagcccaggaaactcccagtacagccagcagcaggccgggtaccagc

SEQ ID NO: 149431 - DNA, 96 bp, Homo sapiens
ctgcgccatctgtcaggccgagttccgagagcctctgattctcctgtgccaggttgtggcagcactgcctgaaggtatgagaccagattctaatct

SEQ ID NO: 149432 - DNA, 75 bp, Homo sapiens
gaaaggattgtgacatatcgttggacccagaattgagatgggacccaggtgagcccgggtgcccactactgcagc

SEQ ID NO: 149433 - DNA, 82 bp, Homo sapiens
ctgctctgtggggctctggccgcgcctggcctggccgggaccatgccggcacagtcttcactaccgtagaagaccttggctc

SEQ ID NO: 149434 - DNA, 100 bp, Homo sapiens
gcaactgccgcctcctctcccgccgcggcggccggcgatagcccggcgctcatgacaggctcttctaacatataagagtgacccagccatgagaaaaatg

SEQ ID NO: 149435 - DNA, 73 bp, Homo sapiens
tcgagaccgcttaccgcatctggctggagccctgcattcgcggcgtgtgcagttcttttagaactcatcaaat

SEQ ID NO: 149436 - DNA, 75 bp, Homo sapiens
tggcaagggcgagtgaagcagtgtcacgcattttagaagaatggacatatgtagagtgtgtcggtcagaaggaac

SEQ ID NO: 149437 - DNA, 73 bp, Homo sapiens
gggagcccgccgcgctggtagcggtgacaaacagcatgtttggtgcttcaagaaagaagtttgtagagggggt

SEQ ID NO: 149438 - DNA, 100 bp, Homo sapiens
cccagccaagcctgctacacgcttgatgtggaaatcccagtatgttccatatgatggaatcccatttgttaatgcagccatgctgtgacctacaagcaaa

SEQ ID NO: 149439 - DNA, 108 bp, Homo sapiens
ggctacgtggtgcaagagtcaggccagaacttcagcaccctggctgagaaggacagagcgggatgccaccagcttgtccaaagggaagttccaggagctcctggtggg

SEQ ID NO: 149440 - DNA, 49 bp, Homo sapiens
gccgctgccaccggcgcgcccgagtgctggagaatctggtaaaagcacc

SEQ ID NO: 149441 - DNA, 100 bp, Homo sapiens
agagaattggaagctaaagctaccaaagacgtagaaagaaatcttagcagaactgccattggatgtccagaatcccctgtagttgataatgttgggaata

SEQ ID NO: 149442 - DNA, 75 bp, Homo sapiens
ctgagagagagcaagcgtttcagcgcctacaattacaggtgccatgctatgtgtttgatgaagagttgaggaagc

SEQ ID NO: 149443 - DNA, 100 bp, Homo sapiens
agctttacaggagcgacttgacaatgtccctcacaccccttccagctacatcgaaacctttcccaggcagcagccagcattgataacagagtccctaccc

SEQ ID NO: 149444 - DNA, 82 bp, Homo sapiens
gctccggcttctgctgttgctcttctccgccgcggcactgatccccacaggcctgccttgctctgccaggaaccatgagtga

SEQ ID NO: 149445 - DNA, 133 bp, Homo sapiens
gcgaatgctgctgcagagctcggaggggcgctgtgtgtacatcacccccatggaggccctggcagagcagggcttccgttacaagatgaggtctgtgtatgctcacttccccatcaacgttgttatccaggag

SEQ ID NO: 149446 - DNA, 75 bp, Homo sapiens
catgagtggttccatgatgggaagtgacatggtggttgaccagattgacaccctgacctctgacctacagctgga

SEQ ID NO: 149447 - DNA, 82 bp, Homo sapiens
tctggagctgcacagcgagggcaccaccgtcctgctcttccagttcgggatggtttggagagaagatggcttttatccctca

SEQ ID NO: 149448 - DNA, 100 bp, Homo sapiens
gtttgttggtggaggaggtggcaggcctcggcggaccctgatgctcccataagacagaaaatgccccttgatgatctggatagagaagatgaagttagat

SEQ ID NO: 149449 - DNA, 100 bp, Homo sapiens
cagcttcaatcccatcaccaaagggcacattcagatgtttgttgtatcacggactgattcaccgagcccaaccgtactcaactcacatatttctacccca

SEQ ID NO: 149450 - DNA, 90 bp, Homo sapiens
caggggggccttcggaacagatgcacacccttcctgggtgatgcaccacaccccactctggccggagcacgccaagcagctccccatcgc

SEQ ID NO: 149451 - DNA, 100 bp, Homo sapiens
ctgcaaggaaggcagctacctagtgcggctcagtgagaccaacccccaggactgctccttgtctctcaggggtccccacggagtctggaccatggaggag

SEQ ID NO: 149452 - DNA, 98 bp, Homo sapiens
aatgatcttgacaaagcaaataaagacaaagccaaccgatacttttctccaaattttaaggctccaggcaggctggtccgtccaccccggtggtcagc

SEQ ID NO: 149453 - DNA, 75 bp, Homo sapiens
aaaaaatggaagaatttgtttgtaagggaaccctactctggaaactgtcagtcccagggcactggggagggctga

SEQ ID NO: 149454 - DNA, 122 bp, Homo sapiens
ctgggacctccacctccctcatttcatcttgggggaccagcagttggaccaagaggaaatctggacccctgaggagttggatgactctgactttgagacagaagattttgatgtcagaagca

SEQ ID NO: 149455 - DNA, 75 bp, Homo sapiens
agtggaatgagaaagtgacccagtcagacctcaaattcaacacccaacagcttccttaatagcaaaggtagcaac

SEQ ID NO: 149456 - DNA, 90 bp, Homo sapiens
cagcattttcggcaaccgctgctggcagttttgccaggtgtttgttaccttgctgattgtgaatgataagagccaaaacctccggaggct

SEQ ID NO: 149457 - DNA, 83 bp, Homo sapiens
cgcatctacacgtgggcccgaggaagagacaatgcagatcttcgtgaagactctgactggtaagaccatcaccctcgaggttg

SEQ ID NO: 149458 - DNA, 75 bp, Homo sapiens
agatcagtcattacaatagcaacttctgttgataagttggaccaaccctggaatggtccccagccatggattcag

SEQ ID NO: 149459 - DNA, 100 bp, Homo sapiens
agaagatgctaactaactggttcaccttcctcttgtataagttcctcaaggtgaaaggtgtagcagtcactcggcctacacccacagcatcgaccttgtg

SEQ ID NO: 149460 - DNA, 97 bp, Homo sapiens
caagattgaaagcaaattattagctaagaaagcagaggttaatacaatccctggctttgatggagtagtcaagaatttctacagacagttcaaggaa

SEQ ID NO: 149461 - DNA, 75 bp, Homo sapiens
atcaaaacaagaatgctatcaataatggtgttcgaatatctggaagaggaaaaaaccctgatccatgggctaaga

SEQ ID NO: 149462 - DNA, 100 bp, Homo sapiens
gctgaagccacggctgggacaggaagccacagagagaagtggatgggccctatacctccagccgtgaatgccagactttaagattgcccggaggaagcaa

SEQ ID NO: 149463 - DNA, 75 bp, Homo sapiens
cctactacagcgccgcggggcccaggccgggagccgaccggcacagcagacttcgacccccaccacttctggcag

SEQ ID NO: 149464 - DNA, 100 bp, Homo sapiens
gtcaacgtcttgaaaggagtgcttatagaatgctcttttggtacaccagaaggccagaatggaacgacttcaaagagaacttgagattcaaaagaaaaag

SEQ ID NO: 149465 - DNA, 73 bp, Homo sapiens
caatcactgcattcagttttgagatttgtcatcaaacaaactgcacccttgcaaacttccttgataacatgct

SEQ ID NO: 149466 - DNA, 100 bp, Homo sapiens
gttttagattcagctaaacgtgggtttcttactaaggacgagctgatcaagtatatgactgaagaagatctgcgatgagctgggagtgaagcggccatct

SEQ ID NO: 149467 - DNA, 75 bp, Homo sapiens
gccagccatcccttgaaccccctatggctgctgcttttggctcagtttatgaacctcttaaaagcattaatcttc

SEQ ID NO: 149468 - DNA, 88 bp, Homo sapiens
tgccattgaagaaaagatcatcattgctgaagtcgtgaacaaaattaaccgtgctaatgggaagatggcccactgcgtgaccttggtt

SEQ ID NO: 149469 - DNA, 76 bp, Homo sapiens
ggaaaagttacgcgaagagaaaacattgaagcttcagaaattgttagaaagggtgtggatgaggtcaccattgtca

SEQ ID NO: 149470 - DNA, 100 bp, Homo sapiens
ctggacatgggcgccgccgagagaagcagggagccgggcagcccgcgactgacggagggctctgacgcccgctctgcggcttcggtgtttgaacaggcca

SEQ ID NO: 149471 - DNA, 88 bp, Homo sapiens
tgtttggaaagacccaggagaagccgcccaaagaactgccccatggctgggggttatggagtgatgggtgacgatggttctattgatt

SEQ ID NO: 149472 - DNA, 98 bp, Homo sapiens
gccgctccccgcctagtccacggagctcaatggcggcagtcgcgctgagggactcggctcaggaagctgccacttttgctagagagcaaggctttgag

SEQ ID NO: 149473 - DNA, 73 bp, Homo sapiens
ggatcttctggggttccctatgcaaatgccaaaggaattggttatccaggtagaaaatctttatcctcaaatt

SEQ ID NO: 149474 - DNA, 96 bp, Homo sapiens
tttcctacagatgatgagtcggtggcagagatcaatggaaccatgaacgaaaaaagggttgctcattttgggtatcactggagtctgatggaaaga

SEQ ID NO: 149475 - DNA, 90 bp, Homo sapiens
cttatatctagcaatggaatcatctccagccgcctagcaggcaagctccaggtgctccttcagctccaaggagagggcgtgggggtcatc

SEQ ID NO: 149476 - DNA, 95 bp, Homo sapiens
tgtctggaaagaatgatgtggatgatgaggaagttcatggaagttcaggtggagtctttcattttggatcaggatgatttggaaaatccaatgct

SEQ ID NO: 149477 - DNA, 95 bp, Homo sapiens
cgggggccgctctgggatcccggccaccagcaattgtccgccgagcctcttgaagccattcttacagatgatgaaccagaccacggcccgttggg

SEQ ID NO: 149478 - DNA, 90 bp, Homo sapiens
aaggggaagaggcccaccctggagtaaccctcactggagaatccagaggttgcaaaggagtttggcttccaaaataatggcttctcggtt

SEQ ID NO: 149479 - DNA, 88 bp, Homo sapiens
aatcctaatgacagtctccaaattcgcctccatctgtaccatgggatccatatggctttggagacagtcgagattcaaggcgtgatcg

SEQ ID NO: 149480 - DNA, 75 bp, Homo sapiens
ttccaagaccaaagtgaagagccaggagagaagatgactgaggaggaggtggagaccgttctggcaggacacgag

SEQ ID NO: 149481 - DNA, 100 bp, Homo sapiens
acacgtccgttcgagctctgactgcagacctaccaaaacaggtcaatgagtggtcattgaagataagaaaggaaatgagagttgttgacaggcaaataag

SEQ ID NO: 149482 - DNA, 89 bp, Homo sapiens
cagaacctccacagtcaagaggacgctttccccagacatggccaacaagggtccttcctatggcatgagccgcgaagtgcagtccaaaa

SEQ ID NO: 149483 - DNA, 98 bp, Homo sapiens
ccaaacaacgcacaagtgacaggagcgctgctgcagagtgagagtgggactgcgccaggatgtatgttgtgttcacagcgaaggtactcccttcagcc

SEQ ID NO: 149484 - DNA, 101 bp, Homo sapiens
gctgccgtgaataggcagcctaaagtacgtagagaaatcgacactcttaatgaacgtttagctgctgaaggacaagcgattgatggagcagagctgagtaa

SEQ ID NO: 149485 - DNA, 98 bp, Homo sapiens
cggaggctcgcgagatccgcatgaaggagctggagcggcagcagaaggaggccatggcacaaaaggaagatatggaagaaagaattacaacccttgaa

SEQ ID NO: 149486 - DNA, 100 bp, Homo sapiens
ggacccaatggcctctggatgaaacgtcaggaatttactacacagtttggaaattttagcattcaggtgccaggaatgcagatgggacagccagtgccag

SEQ ID NO: 149487 - DNA, 82 bp, Homo sapiens
gatgatgatcatgctgggagccatctgtgccatcatcgtggtagttattgtaaaagtcttcgaccctgagaaggagagggag

SEQ ID NO: 149488 - DNA, 102 bp, Homo sapiens
cagctgttgacaagactgaggatagtttagaaggatgcttggattgtctgcttcaagccctggctcaaaatactgttccatttcctccaagtcaccggctta

SEQ ID NO: 149489 - DNA, 100 bp, Homo sapiens
cccgggcccaggccccggcagcgcctgggacaagtggcttttcatggcctgccactgaaaatcaagaaagaaccccacagtccatgttcagaaatcagct

SEQ ID NO: 149490 - DNA, 82 bp, Homo sapiens
gaaggctctcccaagggacagactgcaaatttagcgatcaacccagcggccttgctgcccacagcggcttcccagatctctg

SEQ ID NO: 149491 - DNA, 100 bp, Homo sapiens
tactgcgacgccaaatacgtctgggcagccacggccgggggcgtctttcagagcattacgatccaacttagaaataatgtttcattcaagataaggctcg

SEQ ID NO: 149492 - DNA, 74 bp, Homo sapiens
tcgaggcatgggggtccacactgcaatgtttttgtggaacatgatgacgattcctgggacctcgtgacctgctt

SEQ ID NO: 149493 - DNA, 100 bp, Homo sapiens
cgagcagcaagtcagggagcttaagacaggccgacggtcgcaaggtcctacggtcaagcatccgggagtttctatgcagcgaagccatgttccacctggg

SEQ ID NO: 149494 - DNA, 100 bp, Homo sapiens
gagagtctgtgccgacaagatggcggacggggagctgaacgtggacagcctcatcacccggctgctggaggggattttttgccaggtggtaggagagatt

SEQ ID NO: 149495 - DNA, 74 bp, Homo sapiens
aaaaacagagagaagattgtagaggaagactatgaccgtctgaggcctttatcttacccaatgaccgatgtctt

SEQ ID NO: 149496 - DNA, 90 bp, Homo sapiens
gcaaggactagagttcctgacctccaggccagtccctgatccctgacctaatgttatcgcggaatgatgttcaaagaggaaatctcccgg

SEQ ID NO: 149497 - DNA, 100 bp, Homo sapiens
agcttccgggagggcggctcgcagaaccgggggcggctggcagacaagaggacagtcgccctgcctgccgcccggaacctgaagaaggagcgaactccca

SEQ ID NO: 149498 - DNA, 75 bp, Homo sapiens
ttatcatgccttccagactctgacacattttaaaattggtggtgaatggtggacatggatcgattataaccgctt

SEQ ID NO: 149499 - DNA, 50 bp, Homo sapiens
gtcgtgcacgcgggccagaggcgggacaatgactcattcttcccaggaca

SEQ ID NO: 149500 - DNA, 100 bp, Homo sapiens
aaagaacatccacagaatagacctgaagacaaaaatccagaagtacaagcagtctgttgtcgacaacagtagcaactgggcagtgtgtgggaaaagctgc

SEQ ID NO: 149501 - DNA, 100 bp, Homo sapiens
ggctacggcaccatgtacatgaagacacggcttttccaggtctatcagccacagtctctgcaagtttccaagagcagcagaaaatgaacacattgcaggt

SEQ ID NO: 149502 - DNA, 98 bp, Homo sapiens
cggcggcaagggcgcgcccgggccgggcggcgcgctgcccacttgcccagcctgccacaagaatagcattcctttcgaacaccacggcaagtagctgc

SEQ ID NO: 149503 - DNA, 50 bp, Homo sapiens
gaacgggttgcttcccccgctgcgagctcttcagtgggtcatctgtgtgt

SEQ ID NO: 149504 - DNA, 100 bp, Homo sapiens
tcaggacaattccatttggggaccagagatggacggtcactcagcctatggaggatcaacactctgtggtaggccagaacacaggccccagtccaagtcc

SEQ ID NO: 149505 - DNA, 87 bp, Homo sapiens
cctgtgtacttgctgtagatgaaaatgggatcatagacggtatttctatgtaaacgaacagtcgggcgagtctcagtgggagtttcc

SEQ ID NO: 149506 - DNA, 100 bp, Homo sapiens
gcttatgccaggccgatcccgacctggactcagacaaggccgccatggcatcagatgaaggcaaactttttgttggagggctgagttttgacaccaatga

SEQ ID NO: 149507 - DNA, 100 bp, Homo sapiens
ccactatccacttcatgccagatgccccagaccacgagagcctcaagcttctccagagagtgtctgagcagcaggagagagccttcacgctggggctagc

SEQ ID NO: 149508 - DNA, 100 bp, Homo sapiens
tgaagacgtctgcgtgagaatagagaccaccgaggaaagccatcaccaagtcgggcctccagcacctggccccccctccgcccacccctggggccccgtg

SEQ ID NO: 149509 - DNA, 75 bp, Homo sapiens
ggaccgccctggacatcaagattaaaagagcgaataaagtttatcacgccgggtctccacaaaccggaggactac

SEQ ID NO: 149510 - DNA, 74 bp, Homo sapiens
cgtggtactcagcaagctcgagttaaagttggatgtgctggaacagttgaagactgggatagtttccaagctat

SEQ ID NO: 149511 - DNA, 97 bp, Homo sapiens
ctggaaccgggatggcgacgtctacactgagtcggaggcgaagaaatgactgctgtccatgcaggcaacataaacttcaagtgggatcctaaaagtc

SEQ ID NO: 149512 - DNA, 100 bp, Homo sapiens
gatcacaaacactcagagtggaaaaagtaccatcatttgaaacagctccctgtgctgtcaggaatctacaggacttggctcgtatttacattcgacgcac

SEQ ID NO: 149513 - DNA, 100 bp, Homo sapiens
tgaagcttggaattacatagctggaaaggatcttacaggtcccagtagggatggcacaatcagcgaggacaccatccgagcctctctcatctctgcggtc

SEQ ID NO: 149514 - DNA, 75 bp, Homo sapiens
ccggcgcccgggagacccaggaggagcccgcaggtatggacctgtctgccaatcaggacgaggagaccgaccagg

SEQ ID NO: 149515 - DNA, 83 bp, Homo sapiens
ctgaaccagggggagaagaaagcagatgtgtcagaacaagaaatcgagctatagcagattatcttcgttcaaatggctatgaa

SEQ ID NO: 149516 - DNA, 101 bp, Homo sapiens
agcttctgtcgccgctctaggcagtgtatgtatgaggaagtgcccacaggagtgtgcctccgggatgaagcaaagcaacagagatccaagcaggagaggct

SEQ ID NO: 149517 - DNA, 82 bp, Homo sapiens
gctcctgcaggcactggcacagctacagcgagggcctcggccatccaagggtctcccaggtgctcagagccagaccctggtt

SEQ ID NO: 149518 - DNA, 100 bp, Homo sapiens
gaagttttgctcctggatgaatccaagttaacccttaccacccagcagcagggcatcaagcttagaccatgctcagcctccaagcagccttgtcatcgac

SEQ ID NO: 149519 - DNA, 99 bp, Homo sapiens
caacagctcggcgggctggaagacaagcaagcagttggcagcagccttccaagaggagttcacagtgcgagaggacctgatgggactggcaattgggac

SEQ ID NO: 149520 - DNA, 75 bp, Homo sapiens
tatagctaagactccaggacacccctgaagccgagaaatgtaaaggcatgacttcctggcaccacagggaaaatc

SEQ ID NO: 149521 - DNA, 90 bp, Homo sapiens
ctggagcagagccgctgggcgccggagccgaggcgagcgccgcgcgcaccactgtgagtccatgacagaagaaaccctgaaaagggcaaa

SEQ ID NO: 149522 - DNA, 82 bp, Homo sapiens
cggacagccgcgcgctgagggtctcggggcgggcgccgcgggacctctccgggccatggatcctgcccggcctgtacatcgg

SEQ ID NO: 149523 - DNA, 75 bp, Homo sapiens
ctgcttatggctataaaattacagggcttttttccagacttcaagctcccattccaacagtaagagcttcttcca

SEQ ID NO: 149524 - DNA, 100 bp, Homo sapiens
gcgggactcaagtacaactcccggcacgaggattggcagccaccatttgcatgtgatgttgataaacttcattttacgccacgtatccagagactgaatg

SEQ ID NO: 149525 - DNA, 75 bp, Homo sapiens
actctgactccacctttacttttacctacgttggcggccccagaaggaggctttcgagctacccttggatgattg

SEQ ID NO: 149526 - DNA, 100 bp, Homo sapiens
ggaggaggggggggtaccacacaacaccccagcaaacctccgggcccccaggcatggctagctcgtatacaattggaccgtggatgaggtggtacagtgg

SEQ ID NO: 149527 - DNA, 83 bp, Homo sapiens
tagatgatccaagtcaccaagaaattactgtctcaagtgatacggggtttgttaaagttgttaagaataaggcctactttaag

SEQ ID NO: 149528 - DNA, 82 bp, Homo sapiens
cccgcgcgtgctgcgggtctgctcgggggtctacttcgaggtgccaggtggagctcaacaggaaagtcctagcggatctggc

SEQ ID NO: 149529 - DNA, 98 bp, Homo sapiens
gtgactcagacatggaggagagaagacctcatctggatgccaggcccaggaattcccataccaaccacagagatctggaatcaatgtgtgagaccaaa

SEQ ID NO: 149530 - DNA, 100 bp, Homo sapiens
agcggcgactcagggtcgcccgcccctcctcaccgaggaaggccgtctacatcggtaaactctgcaaaactccagcagttacagagcctgtgctaggagc

SEQ ID NO: 149531 - DNA, 75 bp, Homo sapiens
gttcctccaggtttgccatcttcattggctggggaacagaccagggaattggtggatttggagaagagccgggaa

SEQ ID NO: 149532 - DNA, 51 bp, Homo sapiens
caagacctcatcaacaattaaggttttttgcatgtctgacacccatgactc

SEQ ID NO: 149533 - DNA, 50 bp, Homo sapiens
caggcgtcatgttgggaatcgggaatgttgaagagaactccaaaaagaaa

SEQ ID NO: 149534 - DNA, 90 bp, Homo sapiens
ggagcgttgcgagcgcgaatggcacgagctggagggagaatttcaagaactgcagatgctgagggttggaaaagcaaaagcagatgtgtg

SEQ ID NO: 149535 - DNA, 98 bp, Homo sapiens
gttcatagttgactccacagatccgggtccctcctgctttttagccggtctttggacaccaatggtgactgctcccgcctggtggccgatggctggct

SEQ ID NO: 149536 - DNA, 100 bp, Homo sapiens
cccagaacagtctcatctaccacagcaagaaagccagtcacaagagctgctaatggtctcctttacagaaaggggcttggataaggaggaaagaccatca

SEQ ID NO: 149537 - DNA, 75 bp, Homo sapiens
aaagctgagaatcctcagtgtttgctaggagattccaggtatccattacttggccagccactgcagtacaatcct

SEQ ID NO: 149538 - DNA, 112 bp, Homo sapiens
cattgacatttaattttagggtcctttatatagaagggagagccatcaccatcgaggctgagccaagagctgatggcagccgccggaccacccgctatgacatcgacatgac

SEQ ID NO: 149539 - DNA, 96 bp, Homo sapiens
aacccctaaggacctagaggagtccatagtacaggaagaaaagaagaagctgacccctgaaggaaacaaaggagttagtccttgaccactagtttg

SEQ ID NO: 149540 - DNA, 100 bp, Homo sapiens
ggagagggagtgatgtcttccagactcggtgctgtacccgcccttccaccaacactttcttccaaatatcctgaagatgacccagactactgtgtgtggg

SEQ ID NO: 149541 - DNA, 100 bp, Homo sapiens
cttttaagtatcttacaggagaacagactgaaaaaatgtggcagcgcctgaaaggaatcaacagcttgcacaactacagaaagaaaaatcagagattctg

SEQ ID NO: 149542 - DNA, 75 bp, Homo sapiens
ggagacgctccgtgcctgcgaggagtatctgcggcagcatgacaagttggtgcttcccgtgctgctgttgatgct

SEQ ID NO: 149543 - DNA, 101 bp, Homo sapiens
atcactggctacacatttccagcaggctgcagatacgagtggacaaacatatcaagtggatttgaagcccaatgggtcagaaataatggtcacaaatgaaa

SEQ ID NO: 149544 - DNA, 100 bp, Homo sapiens
tggctatattactatgcttacaaggactttctctggggcactcttccacgccttgtagaccatgtctggcatcaccctgttcgaaggaataaattcaaat

SEQ ID NO: 149545 - DNA, 83 bp, Homo sapiens
cctgtattctgtctgggaaatactagtgaatgtttccaaaacttcagtcagagccacaactcccgaaaagcccgtgaaacaag

SEQ ID NO: 149546 - DNA, 82 bp, Homo sapiens
gcgccgcgagggctccttccctcaggttgtatcagagtaagatggacggtagctttgattgtgattgtggtgagctggagcc

SEQ ID NO: 149547 - DNA, 75 bp, Homo sapiens
agactatgaatctctgttccaaatgctttgctggtatacaaaactaggatatgctggaaatacagaaccacagtt

SEQ ID NO: 149548 - DNA, 96 bp, Homo sapiens
atttgtggctggctggatctctgttaagtgggcagaccaacatccacctcagcaaaaacttcttcctgacgaatcgcgccagggagcgctcagaca

SEQ ID NO: 149549 - DNA, 88 bp, Homo sapiens
ccttcaaactacgttaagatgacgacagactcagatccaagtcaacagtgggggacacagcgattgccacgcgccattggaatgtccc

SEQ ID NO: 149550 - DNA, 105 bp, Homo sapiens
atgactgatgtgcagattgctaccaaactccgaggctggaaggtctgggacatggagaacgacccctcgagacgaagagagtccatctctctcacacctgtggcc

SEQ ID NO: 149551 - DNA, 101 bp, Homo sapiens
cccaaataagttcagatcttcttcaagtgatgacgcacttccaaatgggttagacgttacctttgaagtaactgaattgaggagattaacgggcagttata

SEQ ID NO: 149552 - DNA, 94 bp, Homo sapiens
gcgcgatgcgtcaagtacactgaaattcatcctgagatgagacctgcctagagctggaacgttacctccagagcgagccctgctatgtttcagc

SEQ ID NO: 149553 - DNA, 83 bp, Homo sapiens
cagaaggatatcgacgtcgtgatccagaagtccagagctgaggactgcctgtttgcaggtttttagaacttcagccataaaaa

SEQ ID NO: 149554 - DNA, 83 bp, Homo sapiens
gggatagtgtcatcggttcggtaaagtttctgttctctgctcattgctatggacagtgctatcaccctgtggcagttccttct

SEQ ID NO: 149555 - DNA, 80 bp, Homo sapiens
gacggcgagcgcgagcggcgcgagaaatcgagcaaaagatgtgataataccagcaaagccacctgtcagctttttctcct

SEQ ID NO: 149556 - DNA, 98 bp, Homo sapiens
ggagctgcagcaggacgacgcggccggcgcggcagacggccacggctcggtgtcctgatggcaaatttcaagggccacgcgcttccagggagtttctt

SEQ ID NO: 149557 - DNA, 80 bp, Homo sapiens
gggcgagtaagccagcggcaggaccagcgggcgggggcccacgagaacttgctactaccagcaccatgccctaccaatat

SEQ ID NO: 149558 - DNA, 74 bp, Homo sapiens
aggaagtggaaagagagcaaggggaaggatcgggagtacacagacatcatccgattatacccaacaagcaaccc

SEQ ID NO: 149559 - DNA, 74 bp, Homo sapiens
aaacatcttcaaggagttaacccaaaaggactggattactaacatggcctgcactgcccaaagtcttggaaact

SEQ ID NO: 149560 - DNA, 90 bp, Homo sapiens
ccgctggaagtgagggttctgggcccacgaggcacagaaaactgaatctgtagataacgagggagaatgaattgtcatgaaaaattgggg

SEQ ID NO: 149561 - DNA, 90 bp, Homo sapiens
atgaagttgattgactatggtctctccggctaccagagcaaagactcaggtggactgaaggccgctatgatcgaattggtggaaaggttg

SEQ ID NO: 149562 - DNA, 50 bp, Homo sapiens
tggagtcgcccgcagtgaccaggtatcatgaactgatcactaaatatggg

SEQ ID NO: 149563 - DNA, 75 bp, Homo sapiens
cggggatctaggggtgggcgacttcgcgggaccgtggcgcatggtgatcatggagctcagcttggtctccatggg

SEQ ID NO: 149564 - DNA, 82 bp, Homo sapiens
gccgcgagcgcggcctgcaggagccccatcttcccgggaagccagccgcccaccagaggagcccagcgccccgagccccacg

SEQ ID NO: 149565 - DNA, 100 bp, Homo sapiens
tatttctgcaacgtctttgacaatagatggaatcaggacctcagcagccatgtcgaagccccatagtgaagccgggactgccttcattcagacccagcag

SEQ ID NO: 149566 - DNA, 75 bp, Homo sapiens
ccctctccgtccatggccccagatgacacttcaggtgattgcatactcggaacatcgttaccgtatctttgggga

SEQ ID NO: 149567 - DNA, 96 bp, Homo sapiens
ccgagaccgtgaccgagagcgtgaccgagagcgcgaatatcgtcatcgttagaagaagcgggcccaggatgctgtgatcatcctggggggaggagg

SEQ ID NO: 149568 - DNA, 74 bp, Homo sapiens
gaacatggactgaagtatccagcgctcattgggaatttagttaaggcactatgtcgtccgaggcccagagatga

SEQ ID NO: 149569 - DNA, 100 bp, Homo sapiens
cttggcgattatgtggacagaggttattttagtatagaggctctacagtgccatatatgtagcaaagattccttggactgtggtaagctgctttccctaa

SEQ ID NO: 149570 - DNA, 90 bp, Homo sapiens
tattgggagatccacagctaagacgccgggactccctggaaacctagaaatggtgacagaccatgccaccactgccctgctccactatca

SEQ ID NO: 149571 - DNA, 50 bp, Homo sapiens
ccaaactcttcattttctctatattttggagtgtatacaataatatccct

SEQ ID NO: 149572 - DNA, 148 bp, Homo sapiens
ggagattacagtgagggggggagatgtttgtcctaaacccgtgtttgccttccatcatgctaacttcccacgggtcaccagtcgttggcacaccaagaagctgccccgcaagacccaccgaggcctgcgcaaggtggcctgtattggg

SEQ ID NO: 149573 - DNA, 100 bp, Homo sapiens
ctcctgccacccccagacctcctcagctccaggggcagcctcacctgggcatggcatccaagagaagctccaagtggtggataaggtgactcaaaggaaa

SEQ ID NO: 149574 - DNA, 75 bp, Homo sapiens
cacagcgctcactcgccttctgatggtagatctggtaataatttttcaccatgcatcggaaaaaggtggataacc

SEQ ID NO: 149575 - DNA, 100 bp, Homo sapiens
cctcaggacttgagtaacagcaacatgatcattgagactgaaaatatgatggaccgaattgtgactggcttgtctgagtctagtgtcaaggtgcggttag

SEQ ID NO: 149576 - DNA, 83 bp, Homo sapiens
ctgcccggtgcccgaggaggcagccaagctcgtagcctgccactcctgtactaatggtcacttgatgtgcgctggctgtttta

SEQ ID NO: 149577 - DNA, 50 bp, Homo sapiens
ggtgtacatcgtgcatggcgtccaggtgccccctgataagtgccgatgtg

SEQ ID NO: 149578 - DNA, 97 bp, Homo sapiens
tcagcgaagatgggccgggcagggaccatggcggtggcagcagaggagaagatggagttccggacggcatctatccgcctctttgggcaccttaaca

SEQ ID NO: 149579 - DNA, 100 bp, Homo sapiens
ccagctctttgtgaactacaaggtatggctttcccaacgaaaggctaagaattcaagaacggtcttaactgaaccctcatcagatctgaatttaacaaat

SEQ ID NO: 149580 - DNA, 82 bp, Homo sapiens
gttgattctgaccatttctcatgaacagaaacacctaggaagggagaactggtatgacctggacgcgtgtgacattcaagaa

SEQ ID NO: 149581 - DNA, 88 bp, Homo sapiens
ctcagccgctgtgggctcctggggagatggaggggccggggctgggctcgcaggttgaagctccattcataccaaagtttagaggctc

SEQ ID NO: 149582 - DNA, 89 bp, Homo sapiens
tctggcctggcaggtcccggcccgcttcacagtcgaggagagaaaggtctcggcgcggaagatggccggcggcgtggacggccccatcg

SEQ ID NO: 149583 - DNA, 82 bp, Homo sapiens
aacgagcgacggcggaacccgtgggcctgtggactgcagcctcggcggtcagcagccacggagaccgcccagcagttgaagc

SEQ ID NO: 149584 - DNA, 80 bp, Homo sapiens
ggacaagcaggtctaccgggccacgcaccgcctgctgctgctggctcgagcccagaaaactatcctctaagaccagacgt

SEQ ID NO: 149585 - DNA, 75 bp, Homo sapiens
ttgctgcatactatgttgccacaggaaccattaaagagatcctggggactgcccagtcagtgggctgtaatgttg

SEQ ID NO: 149586 - DNA, 98 bp, Homo sapiens
tgaaccagctgtgggagaaggcccagcgaaatgtcgaggtcttggcgagcaggagcaacacttcagagcaagaccaggcggggactgaaatgcgcgtg

SEQ ID NO: 149587 - DNA, 100 bp, Homo sapiens
tttgagagcagttgctgatggagatctagaaatgttggatataaagtacctgtcaccattgttgctggcttatgaagatatgatgaaagagaaggacgag

SEQ ID NO: 149588 - DNA, 98 bp, Homo sapiens
aaagaacatgattttgggactgctcttcattaaaagatcgtcagtatttaaacagatcacatcatgcgtgagtacaagctagtggtccttggttcagg

SEQ ID NO: 149589 - DNA, 101 bp, Homo sapiens
acgagcacaacctccagggccgcatcgggggcgactcaggcctgtccagccggggcaagaaggttctggaaacgagctggatttgttcctgtttatctgag

SEQ ID NO: 149590 - DNA, 76 bp, Homo sapiens
aactgctctgcccagtgccacaaccatgggctgattgggcagaaagtggcccatgctctggcagagggactcggag

SEQ ID NO: 149591 - DNA, 75 bp, Homo sapiens
acgtccatgttctatgtgaccagactgcacaggagagaagtggatgggccctatacctccagccgtgaatgccag

SEQ ID NO: 149592 - DNA, 90 bp, Homo sapiens
aaagttcagcacacagtatgtatggattgcagtagctacagtacatactggaaatgtggctttagataatctacagataaaagaaaatgc

SEQ ID NO: 149593 - DNA, 98 bp, Homo sapiens
gtcgctgattccagagagctaaagccgatggaaactggaggtatacttcgatctttagaagatgctcttgcagaggctcagcgagttaatactaaatc

SEQ ID NO: 149594 - DNA, 74 bp, Homo sapiens
tacagcaacttactctcactggggaaatcctcattgacgattcaatttgttgaaggccaatttgtggactccta

SEQ ID NO: 149595 - DNA, 88 bp, Homo sapiens
gcaaaatggcggaccgcttctcccgcttcaacgaagaccgagactttcaggtggagccgccaccaaaatgcagattttcgtgaaaacc

SEQ ID NO: 149596 - DNA, 95 bp, Homo sapiens
cttggtgtcctcctggcctcagcaacctgacaattctgtcgtgtcccggtacccactgatggtaatgctggcctgctggctgaaccccagattgc

SEQ ID NO: 149597 - DNA, 75 bp, Homo sapiens
tgctgtgcaggctgtctctctgagaacccgagctatccgtcagtccatctccaaagccctggtggcctattacca

SEQ ID NO: 149598 - DNA, 100 bp, Homo sapiens
gcaagttatggcaatgtgatcgtcatcacagtcaactatcgacttggagtactcgcagcaggtggggaatcagctctggctcccagtgtatttaaacagg

SEQ ID NO: 149599 - DNA, 90 bp, Homo sapiens
agagctattattccctgtattaaagggaatagcttatcttgttaaagtgtcagaaggagacttaagaaaagccattacatttcttcaaag

SEQ ID NO: 149600 - DNA, 75 bp, Homo sapiens
caggagctggatccggcttccggaagtgcctccggagccagcgtggtggccatagacaacaagatcgaacaggcc

SEQ ID NO: 149601 - DNA, 74 bp, Homo sapiens
tggtggctccgcggattataacagtgcacgaaggcagccctctgggtgaactccatcgctgtatccgtgagggg

SEQ ID NO: 149602 - DNA, 98 bp, Homo sapiens
ggagatgacaacttgacttctctggggactctgaacttccctggtcgaacagttttttctaatggctattcaaggtctctgcttggggtggttatgta

SEQ ID NO: 149603 - DNA, 90 bp, Homo sapiens
tttgagtatttcaacactgctcctcttgcacatgacctgacatttagaaacaagaacctggactggttcccccggatgcgggccatgtcc

SEQ ID NO: 149604 - DNA, 100 bp, Homo sapiens
gggagccgcctcccgcgtgggcgtcccggagcctggccagctgcacttcaaccagagctgcatcctgtggccctataacactcttctccaaaaggacctg

SEQ ID NO: 149605 - DNA, 82 bp, Homo sapiens
aattttcagagacaagcagtggtccaacataggagttgaaatgatgaagaactttacccccattgaggtcataccatgcaac

SEQ ID NO: 149606 - DNA, 75 bp, Homo sapiens
tgcacgtggactgaagctgaccttcgattcatccttctcacctaacactgggcagaatccagagaccacatttga

SEQ ID NO: 149607 - DNA, 100 bp, Homo sapiens
gaacggctgggccatagaaaagaacctaacaccggtgcctggggctccttcgcagacctgcttcgtgacctctttcgaaatcctcactatggatgggctc

SEQ ID NO: 149608 - DNA, 128 bp, Homo sapiens
caacgagggacctgggtctacgataacgcgcttttgctcctcctgaagtgtctttggtccaacgttgttccaggatcttgaaaatatttgtgcagccatttggacctcagtatgaggtagtgttaaaa

SEQ ID NO: 149609 - DNA, 100 bp, Homo sapiens
gttctgcctgacttggaccctggaaaacctggccctcttcaatttctgacaaaagtgtttcctgaggttataggcgggtgtttgaggagtacatgcgggt

SEQ ID NO: 149610 - DNA, 74 bp, Homo sapiens
ccgagtcttcggcgggctcgcgagcccggccgcggcctgctggtttcagatgcttgtggttggtggcatcgacc

SEQ ID NO: 149611 - DNA, 97 bp, Homo sapiens
acacgcattggaaaagtgcattgcttattctccaccttttggtgattatgcacaggatttggtgctatggagaaatttttggtagaatataagagtg

SEQ ID NO: 149612 - DNA, 90 bp, Homo sapiens
cgggtctggctgggcaagcactacaagaaggctattattcgtgaattgggtggtattccaattgttgcaaacaaaatcaaccattccaac

SEQ ID NO: 149613 - DNA, 100 bp, Homo sapiens
cgacattccattgaaaaggaaacgcctactaacgtgaggcagttcctgccgccttccaggcagagttcccgctctcttcaactttcatcctttgaaacgt

SEQ ID NO: 149614 - DNA, 82 bp, Homo sapiens
cgaggggctccgggtcttccagagcgtgaagatcaagatcgttcaaatctgaacatcaatgatgtactagggaactactcat

SEQ ID NO: 149615 - DNA, 110 bp, Homo sapiens
ctgaagaaggtaaccgggtccagacccacgcggcgccagttctccggcgggaaggaaaaccgcgcagagaggttttaaaatcaaagatgggaaaatcggagaaaattgcc

SEQ ID NO: 149616 - DNA, 83 bp, Homo sapiens
ttgaagatccccgagatgcagctgatgcagtccgagagctagatggaagtgttgttacagatcttataacagtcggtttaaag

SEQ ID NO: 149617 - DNA, 100 bp, Homo sapiens
caacagatttcgggaatgctgagaaaacagacagatttgtcatgaagaaactcaatgatcgtgtcatgagatacgtgccgaccactggagcgatcattga

SEQ ID NO: 149618 - DNA, 101 bp, Homo sapiens
agcggcggcagcggcggcgcggaggcggctgaggtgcgagccgacccaagcaccagccgccgcttcacacctccctccccggccttcccctgcggcggcgg

SEQ ID NO: 149619 - DNA, 98 bp, Homo sapiens
gaggccttccagctgtttgaccgaacaggatgaaacaggcgcctatttaatcgacagagaccccacctactttgggcctgtgctgaactacctgagac

SEQ ID NO: 149620 - DNA, 115 bp, Homo sapiens
gaaaggatcctacaagaccctcaggctggtagtgcgcagatatgcttcttctgtaaaggatggctcccagtattttgtgcttctgattgttacagatggtgttatctcagatatg

SEQ ID NO: 149621 - DNA, 100 bp, Homo sapiens
agctggaaaccacttggatgactgcagttggtctttcagagatggcagcagaagctgcatatcaaactgctgccaatttgtggtgtctgaagaccaagac

SEQ ID NO: 149622 - DNA, 97 bp, Homo sapiens
tgggacccaatggcctctggatgaaacgtcaggaatttactacacaggttgcacactgggccacagaggatccagcaaggatgaagaaatggagcag

SEQ ID NO: 149623 - DNA, 90 bp, Homo sapiens
catgacaaaggataacaacctgcttggcaagtttgaactcacagcaatgcctcctgcaccaccaactgcttagcacccctggccaaggtc

SEQ ID NO: 149624 - DNA, 90 bp, Homo sapiens
cgccgccaccatgcctcggggaagccgcagcgcggcctcccggccagccagggagcttctgataattggaggtgttgcagcccgggatca

SEQ ID NO: 149625 - DNA, 50 bp, Homo sapiens
cttttgttggattgaaacagctaatcgctgatcagctgaccgaagaacag

SEQ ID NO: 149626 - DNA, 87 bp, Homo sapiens
cgctgctgggcacccacggagcctccggggctgtcttgctatgttgctcaggctggtcttgaacccctgagctcaagtgatccaccg

SEQ ID NO: 149627 - DNA, 96 bp, Homo sapiens
tgtctgggtatttggaggaggaacaacccccatgttgacttggcttcagatcagcagaaaaagtcctacctggagcgaagcgttaaggaagctgag

SEQ ID NO: 149628 - DNA, 96 bp, Homo sapiens
ctccagagtgaggagggtccagaccatgcagacaatatgccctttttctccaaacaccatttcaagttaatgaaggagttcccccttctgagtatg

SEQ ID NO: 149629 - DNA, 110 bp, Homo sapiens
agtgggacgcggcacctacggtcacgtctacaaggcgaggcggaaagatggaaagcataaaggatgttattggcagaaagataaaaatttcagtgaagaagaaagtaaag

SEQ ID NO: 149630 - DNA, 99 bp, Homo sapiens
cttccatccgccagctgccatgagcgagcgcctccgtcccagggcgtctctggccgagcctctttttgtggaaaacgacagcagcagcagtggcctgga

SEQ ID NO: 149631 - DNA, 100 bp, Homo sapiens
ctgaagactccagtatgcaactgactacaaggagggttccaggcccggccggagctcctggaggtgttcagcacggagttccagatgcgccttctctggg

SEQ ID NO: 149632 - DNA, 100 bp, Homo sapiens
cggggcccgcgtcgcgatcgcgacggctacagctacggaagccgcaatcactgtattttggaaagagttgattgacccaagactgattattgaatctcca

SEQ ID NO: 149633 - DNA, 90 bp, Homo sapiens
cgcgggcaacggcggggtggtcaccaaagtccagcacagaccctcgggcctcatcatggccaggaagcaaaagtactttgactcaggaga

SEQ ID NO: 149634 - DNA, 80 bp, Homo sapiens
tttccaccccgaaattcgccccgattaaagactgtgttgcattatcagcaacagggagctgccaccaccgtgtactgtgc

SEQ ID NO: 149635 - DNA, 75 bp, Homo sapiens
gacaccatggtggacacttttcttcagaagctggtcgccgccggcagtcctggacgcacaatatccagcgagaga

SEQ ID NO: 149636 - DNA, 96 bp, Homo sapiens
gaagcggcgctatcgcttcctagcagagaagcacctgctactttccaacaccttcctgcagttcttcggccgggaatggaagttggatacactttg

SEQ ID NO: 149637 - DNA, 102 bp, Homo sapiens
catgggtccgtggtcgtttgtttctccaaggtttgaaaagcagctggcctgcaaggtgctggagaatctggtaaaagcaccattgtgaagcagatgaggatc

SEQ ID NO: 149638 - DNA, 82 bp, Homo sapiens
aatacattgtcttaacttccaaacatcatgaagaggcacagttgaatgctgttgatgctttgattgactccatgagcttggc

SEQ ID NO: 149639 - DNA, 100 bp, Homo sapiens
gcctttgaccttctgccatgattgtgaggcctccccagccacgtgaaactctctggcccctcctcaggccgaatggatcagcttccccagaagaatctcc

SEQ ID NO: 149640 - DNA, 80 bp, Homo sapiens
cagcgaagtccacccagcgtttccgagaacacagaatgttcttggtgagaagggccggcggattcgggaactgactgctg

SEQ ID NO: 149641 - DNA, 75 bp, Homo sapiens
tcagcatgagcaaaaactccaaactcctctccaccagcgccaagagtgatatcagtatcaagataaaagtttgga

SEQ ID NO: 149642 - DNA, 85 bp, Homo sapiens
cggagaaatagccccaaggacagttgtcagtggcctggtgaatcatgttcctcttgaacagatattgatgatgttaagaagttca

SEQ ID NO: 149643 - DNA, 100 bp, Homo sapiens
aagacacaaagcctgcgaaagtgctcgggaagagggagagcaaacttggctcagcccagatcacagaagaactgcagcttcctggggagcagtttcacct

SEQ ID NO: 149644 - DNA, 50 bp, Homo sapiens
cattaccgggttcgctaggctcacagagatcctcaccatggagaaggaag

SEQ ID NO: 149645 - DNA, 82 bp, Homo sapiens
ctgcagtctgtgcaggtcttcggacgcaaggcatggaagaggagatggttcgtgttacgcagtggccgtttaactggagatc

SEQ ID NO: 149646 - DNA, 75 bp, Homo sapiens
cagcctcccgagtggctgggactacagctcctattaaggaaccaaaaaagttgatgcccaaaacatccctcccca

SEQ ID NO: 149647 - DNA, 73 bp, Homo sapiens
taataccaagaaagccccacttgagcactgcagtttcctcctgaaggctggctccggctctccctcaataatg

SEQ ID NO: 149648 - DNA, 114 bp, Homo sapiens
ttccttgtggagccggagctgggcgcggattcgccgaggcaccgaggcactcagaggaggaaggtgctcgggtcttcggggcactgggtcccatcggtccctcctcacctgggc

SEQ ID NO: 149649 - DNA, 100 bp, Homo sapiens
aacttcttcagaattagaaaggagctgcttcccaataaggaaacaattgcttccaagtatgatcatcaggcagaagaagatcttcgcaattggatagaag

SEQ ID NO: 149650 - DNA, 95 bp, Homo sapiens
gccttggatgttctttctcagatactagagctggccacactgcaggacattgggaagaatttcttcaggttgaattacctagaagtttgtcactg

SEQ ID NO: 149651 - DNA, 100 bp, Homo sapiens
gggaccgccgggcggcggaaagcaggtattagtcactgtaccactggctttactacagaaaggtgccattcagtttaatccaccgttgtcagagaagaag

SEQ ID NO: 149652 - DNA, 80 bp, Homo sapiens
ttcctgtacagcctgcagaactgattttttatcaagcagaaatgcatcgaacaacgagaatcaagatcactgagctaaat

SEQ ID NO: 149653 - DNA, 100 bp, Homo sapiens
ggacccgggactagtggaccagctggtgaaggcagacagcgagtggcgacgatgtaacgatgggaaaggaactcctgtattcacaggggaggttgactgc

SEQ ID NO: 149654 - DNA, 101 bp, Homo sapiens
ggcgcacgagggcaccatggcccagacgcccgccttcgacaagcccaaaggcggcgactggcggcgcgatggacctgaccgggctcctgctggacgaagaa

SEQ ID NO: 149655 - DNA, 83 bp, Homo sapiens
ggcgtgcatcatccacggggtgctgcagatcctgttccagacaatgcagatcttcgtgaagactctgactggtaagaccatca

SEQ ID NO: 149656 - DNA, 75 bp, Homo sapiens
gttggaagcagccgatccagcctgcggagcctgtggggcagacatgtagactgccaaagtgtatgggatgctttc

SEQ ID NO: 149657 - DNA, 97 bp, Homo sapiens
cagggaagtctataagctttgcaacagaattacagagtatgatgcatataaaacctttgctaaccgagtaaacaatttaaagaagaagttggatcaa

SEQ ID NO: 149658 - DNA, 51 bp, Homo sapiens
gctacaggactctactatggagattttggatttagtaaaggggacacatta

SEQ ID NO: 149659 - DNA, 100 bp, Homo sapiens
gttggaaattctggcattctgttagacagtgaatgtggaaaggagattgacagtcacaattttgtaataagatccctcatgtccatgatccggaaacgat

SEQ ID NO: 149660 - DNA, 80 bp, Homo sapiens
ccagcctcctccatgaagcccagttctatgggctcactcctctgggcttcaccatcatcatcgagccctttgacgacaga

SEQ ID NO: 149661 - DNA, 74 bp, Homo sapiens
aagaagcatatacttttgaaggtgcaagatactatataaaacaattgtggcaattaataaagacccagaagctc

SEQ ID NO: 149662 - DNA, 74 bp, Homo sapiens
ggatggacaacagcaaacagcaccaaccactgtatcaaacgtcccccccaaagacccaaactgaatctaaagcc

SEQ ID NO: 149663 - DNA, 50 bp, Homo sapiens
ctggacatccttggggctgctgagacaggattctaacattttcagagaac

SEQ ID NO: 149664 - DNA, 103 bp, Homo sapiens
tgctaagtggcttgcttgagttgacacagggagctccaggactcaccctcagacagccgatcgccagtacatggagggcttcaacgacgagctggaagccttc

SEQ ID NO: 149665 - DNA, 75 bp, Homo sapiens
tcaagaaccacgtgatcaagtaccttgagacactcctttactcacagcagcaggcataatcaccagcaacacccg

SEQ ID NO: 149666 - DNA, 90 bp, Homo sapiens
gtcacagaagtctctaccaatggtgcttcagaagtttcatactttcaggaaattgatgaagcctgtaagagaataaagcgtgaagttgat

SEQ ID NO: 149667 - DNA, 50 bp, Homo sapiens
cgctctgaaaccgatttctaacagagagacggagtcttgctctgtcgccc

SEQ ID NO: 149668 - DNA, 83 bp, Homo sapiens
tatcacctttgccactgacattgcagagctgtgggctgtgttccacaagttcaaaggattttttatcaagcagaaatgcatcg

SEQ ID NO: 149669 - DNA, 100 bp, Homo sapiens
aagccccaggaagctgtttatggccaaaatgggtggcactgaatcaacaagacaagcaactcaattgattaatgctttgatcaaggatccagacaaagaa

SEQ ID NO: 149670 - DNA, 75 bp, Homo sapiens
gcttaaggaagtaaaatggcggacctggcgaacgaaggagggctccccgaggactttctgaactccctggagaag

SEQ ID NO: 149671 - DNA, 96 bp, Homo sapiens
ccccctcagtgggcaggtccttcagcatccgctttggacgcaaaccctccctcatcggccttgacccggagcaagaattggcagagggggtcgatt

SEQ ID NO: 149672 - DNA, 73 bp, Homo sapiens
ggttgccgggtcatgttaattgggaaaaagatggcgtcccgcaaggaaggtaccggctctactgccacctctt

SEQ ID NO: 149673 - DNA, 75 bp, Homo sapiens
gttcagttggcaaaccagatatatgacttgccaacaagtcccaaatttggaaaagctgactcatatgaaaagctg

SEQ ID NO: 149674 - DNA, 83 bp, Homo sapiens
ctttcgccagcccgtgccgcgagcgcggcctgcaggagacacttggcatttcacctgaagaaaaatttgttattacaacaaca

SEQ ID NO: 149675 - DNA, 100 bp, Homo sapiens
caccttcgtcccctttgatccctgtgtgctgaagaggacactgcccatctctaagataagaacctggaaaggggactctgttggccattggaaattgcag

SEQ ID NO: 149676 - DNA, 50 bp, Homo sapiens
tactgacgaagcttggaagttgcagaagcttttctgggagaagaggctac

SEQ ID NO: 149677 - DNA, 90 bp, Homo sapiens
ctgcatctttgacaagtttgagtgttgctggaacggttcggatagggccaattcctgtccccccagcagcatggcatcgtgtgctgaacc

SEQ ID NO: 149678 - DNA, 90 bp, Homo sapiens
cgagcggcggcggcggcagcgggtcttgggtcctccgagagcagcagcgaatctgaattatccagaacagaaagttgtgactgttggaca

SEQ ID NO: 149679 - DNA, 75 bp, Homo sapiens
accgcggctgggcaagaagctgatcgagcccctcaccaatctcatccacaggattgtcagtggcttcgccccgag

SEQ ID NO: 149680 - DNA, 100 bp, Homo sapiens
gctatggtgaaacaccactgaagcattgccaagcaatcagccatgactgcctttgcactgtccatgctctcagcccaccacctcctccccctgccattgc

SEQ ID NO: 149681 - DNA, 50 bp, Homo sapiens
atgttcttcttcgagtatttgtagaaggttactgaacatgctaatcaggc

SEQ ID NO: 149682 - DNA, 75 bp, Homo sapiens
gaaggaggaggtgaccacgcgcgagcaaaatgatgcttcaacacccaggccaggtctctgcctcggaagtgagtg

SEQ ID NO: 149683 - DNA, 142 bp, Homo sapiens
agctagacagcagcgactagggctcgggcgccggcgagatgcctttgttcaccgccaaccccttcgagcaagacgtgggaactttatattgctgttggaatatctggagccatccaacatttagctgggatgaaagacagca

SEQ ID NO: 149684 - DNA, 100 bp, Homo sapiens
aatgtttagccaacccaaattaccttaatttcttggaagtggatccttgcaccggtcattctttatatctgtgaaaggatcctccggttttaccgctccc

SEQ ID NO: 149685 - DNA, 75 bp, Homo sapiens
agcagatatactattgtactatggacttcatcgctttatagagcatattaatgaaaagtgccataaactgaaaaa

SEQ ID NO: 149686 - DNA, 98 bp, Homo sapiens
ctgccgtgccacctgctgcacccacgaatctgcccacccctcctgtaacccagcctgtttcacttcttggagacaacaaccggatcccagtcatcggg

SEQ ID NO: 149687 - DNA, 90 bp, Homo sapiens
ctggatggtggcgttgctgctgctgctctcagaacctagagctgctccgcatctccctgctgctcatccagtcgtggctggagcccgtgc

SEQ ID NO: 149688 - DNA, 98 bp, Homo sapiens
aggcatgccccgctacgagctggctttaatcctgaaagccatgcagcggactggtgaattttcagctcgtttccttttgaagctgcccgtagatttca

SEQ ID NO: 149689 - DNA, 133 bp, Homo sapiens
cgacgaggaagttttctactgtaaagtcaccaacgagatcttccgccactacgagttatgaagacagtatggagtttccagaccatagtagacatttgctacagtgtctgagcgagcagagacaccagggttt

SEQ ID NO: 149690 - DNA, 52 bp, Homo sapiens
agaaactcagcaacacttcgtaccaggtcccgggcgaggcgcccgcgccgtc

SEQ ID NO: 149691 - DNA, 90 bp, Homo sapiens
gagaaattggccatggaagctttggagcagtgtattttgatggcactggatctttaaaacgcagtggttcctttagcaaactccgggctt

SEQ ID NO: 149692 - DNA, 97 bp, Homo sapiens
tgaatttccttttggatctaagcaaaaagaagtttgtatcaacccataccactataagagagtggagagtccaggtttattcttcagtccaaggaag

SEQ ID NO: 149693 - DNA, 90 bp, Homo sapiens
ccaacaagaatttgagaactgtaaataccaagccttgaaagggaccatggtgcggcctgtgaggggccctcctcgccaaagacagcctag

SEQ ID NO: 149694 - DNA, 100 bp, Homo sapiens
ggaatttccttgtgcctccattcccgggaggggggagcggcgttggaggccaccgtttccagaacaagttgaaatcatcgcagaaggataaagttcgtca

SEQ ID NO: 149695 - DNA, 100 bp, Homo sapiens
tccccacccattcctttaaatccggagggggaaaaaatcccaaggtctgcaaaggctttcagtccagtgtaaagctgttggagcgcgggagcaaaggtaa

SEQ ID NO: 149696 - DNA, 89 bp, Homo sapiens
tgcctgaagatttacaactgaagaatgcaaggaattcctcctgatcagcagagactgatctttgctggcaagcagctggaagatggacg

SEQ ID NO: 149697 - DNA, 75 bp, Homo sapiens
tcttctgcatggtgggtacccccatgctgtggcacggcttcagatgatggtggtgctaccccagtacaggatgaa

SEQ ID NO: 149698 - DNA, 100 bp, Homo sapiens
gtcagtaatgcctggaatgatgatgtctcatatgtctcaggcttccatgcagcctgccttaccgatttgcctatgatgggctaaaacgtcaaagacttac

SEQ ID NO: 149699 - DNA, 98 bp, Homo sapiens
caggctttcaatcaacccaaggtgatgcttttgctacgacctcattttctgctggaactggatcagttcttaagagcagccccggtaactggaggaat

SEQ ID NO: 149700 - DNA, 115 bp, Homo sapiens
atcaattcggaaccgaagattaaaaaactggagccagtccttttgccaggaagaagaaattgtcgagacgaataacatgaggtcatatagaatcccacttttggtgatttcaagt

SEQ ID NO: 149701 - DNA, 75 bp, Homo sapiens
gttccttgacggtgtcctgcgtgctggagaatctggtaaaagcaccattgtgaagcagatgaggatcctgcatgt

SEQ ID NO: 149702 - DNA, 97 bp, Homo sapiens
ggatccaatcatcgaatgggctgagaaaagaacttctcacctcagccctaaagagggagcctgtgggttctcagagagatatcacaatttgagtccc

SEQ ID NO: 149703 - DNA, 99 bp, Homo sapiens
gtggcaaccagatcggtgccaagaaagctacttctccagtgaaatctactacatctatcactgatgctaaaagttgtgagggacaaaatcctgagctac

SEQ ID NO: 149704 - DNA, 49 bp, Homo sapiens
acaccacaataatccacagccaaggtctgaatttcctgctgctgttcac

SEQ ID NO: 149705 - DNA, 100 bp, Homo sapiens
ctactatcggggtgccaaggctgccatcgtctgctatggtgcagtagacattgttgcaatcatgatcggcaatctgaaaggcacaaaaattctgcaatct

SEQ ID NO: 149706 - DNA, 100 bp, Homo sapiens
agcaagaaatgttcaaaggaacaacatctttaccatctcatctcaagaatggagggtgaggctgctgtcagaaaggaacttttacacagtttgccttcag

SEQ ID NO: 149707 - DNA, 98 bp, Homo sapiens
tcaagccccacagctatggccgcttcattaggtggctcaacaaggagaaggctccctgccgtggcctttaatgtgaacaacctgcccttcacagagcc

SEQ ID NO: 149708 - DNA, 82 bp, Homo sapiens
ccctgctggaccagctcatgggcacggctcgggacgggtgctgttggcccaaaggttgccctgaagccccccatccagagga

SEQ ID NO: 149709 - DNA, 128 bp, Homo sapiens
gaatcttacatgagtatgtgtgaaccgcaaacactgtgtcatattcttgggttcaaattcaagttttaccaggccttcactattctgtgtgatattttgatgatcttcagccatcagattatgtcagg

SEQ ID NO: 149710 - DNA, 111 bp, Homo sapiens
cgagggcgtgctcagcaaatacaccaacctcctccagggctggcagaacaggttatgaagacagtatggagtttccagaccatagtagacatttgctacagtgtctgagcg

SEQ ID NO: 149711 - DNA, 83 bp, Homo sapiens
cgcagaaggtgaaggtgctcacgggcacggggggatatgagactttctactcggaatatcctgagtgttgcgtggatgtaaaa

SEQ ID NO: 149712 - DNA, 75 bp, Homo sapiens
ctcctaaagtgctgggactgcaggtcacgacatttagtgagcatggactggaggaaacagctgccaaatgcaagg

SEQ ID NO: 149713 - DNA, 50 bp, Homo sapiens
cagagatcaatggaaccatgaacgtgccacacctccctggatgatccaag

SEQ ID NO: 149714 - DNA, 82 bp, Homo sapiens
gagggaaaaaggaagaggagaaggaaattgtcccgaatccctgcagggcacagactccatcaagatggagaacgggcagagc

SEQ ID NO: 149715 - DNA, 96 bp, Homo sapiens
ccacctcttcaagtgcaagccaattagcatggtgggagcagaacagctgcatccagtggaactaaagccgttccaggattatcaaaaactgagcag

SEQ ID NO: 149716 - DNA, 75 bp, Homo sapiens
gtcaaagaccaacaccagaagaactagaacaacgcaatatattgcaacattttccgcagatttccagtggcccca

SEQ ID NO: 149717 - DNA, 51 bp, Homo sapiens
gaaaggaccagttcgaatgcctaccaagctggagtttatccagaaattttc

SEQ ID NO: 149718 - DNA, 75 bp, Homo sapiens
cggggatttctggctctttcctcttcgccttaaattcggttcctgacggagacttcgcccttcatgtggtccaac

SEQ ID NO: 149719 - DNA, 74 bp, Homo sapiens
gaaatatctctggagaagccctcactccaaaggctgtccaggcgcaatgtaatagcctgcagctggtgttttga

SEQ ID NO: 149720 - DNA, 100 bp, Homo sapiens
gacctggccaaggcggctggaataatgagcagcagctgctcagggctgagcagggtcctggtggccgtggctacagccctggtgtctgcctcctccccct

SEQ ID NO: 149721 - DNA, 96 bp, Homo sapiens
agaaaacacttgatcctgatcctgccatccgacgtccagaaagcataacccctactgtagaactaaatgcactgtgcatgaaacttggaaaaaaac

SEQ ID NO: 149722 - DNA, 75 bp, Homo sapiens
gcccccggtgcaagaggcgcaaacaagccaatcccaggaggaaaaacggagctgacatggacccaaatcctcggg

SEQ ID NO: 149723 - DNA, 75 bp, Homo sapiens
atccagagctgagtaatcatctcaatgagattggtttcattccagatgtgaccaagaatatggcccaggtgacca

SEQ ID NO: 149724 - DNA, 101 bp, Homo sapiens
aaaggctgtttttccaagaggaagaataagatagccacgagaaatgtctccttctgtgttagaaaagggggccgaaggccagagaccaggatttggctacg

SEQ ID NO: 149725 - DNA, 100 bp, Homo sapiens
atcacaactctgtagaatgtttgcaaatgttaattaatgcagcattgagaactgatgtgccttcacaggaaacttggcccgtgtgtttccaggattcttg

SEQ ID NO: 149726 - DNA, 74 bp, Homo sapiens
ttcgggagccagcgggtgctggtggagccggacgcgggcgcaggttttgtcctggtcatcgggctcgtgacttt

SEQ ID NO: 149727 - DNA, 107 bp, Homo sapiens
tgaagagcaagaggaggacatggagatgaagaagaagattaacctggagttaaggaacagatccccggaggagggggatatgagactttctactcggaatatcctga

SEQ ID NO: 149728 - DNA, 87 bp, Homo sapiens
gtgaagcgtgaggccggcatcgtctttccgtcctctgaggcgacggccgcggctgcacagttttcggctttgtgagaaaccttacca

SEQ ID NO: 149729 - DNA, 75 bp, Homo sapiens
cagaaagccaggcatggaaggatgcagaaacgtgacgagcaatgatgaagctcagcttgtcaatcggaaacagaa

SEQ ID NO: 149730 - DNA, 99 bp, Homo sapiens
cactccattctgcctgggtgacaatgccttggtttcaacactatcggaatgcctagagaaactaagactgaaagaagacaaaaaattgaagagaaagat

SEQ ID NO: 149731 - DNA, 98 bp, Homo sapiens
caccctgcgctgccctgtcctgcgcgagtggagctctgaagaagctctgagcggagttgtgttcttccccaggtttactcatggggtagcaatacctt

SEQ ID NO: 149732 - DNA, 100 bp, Homo sapiens
cacagcaggcaaagagctggccctgtgttctgggtccaggtgctcctggctggccttgtggtccccctcctgcttggggccaccctgacctacacatacc

SEQ ID NO: 149733 - DNA, 90 bp, Homo sapiens
attagtcaactggctaatccgaaatgggcatattgccacaagggtaaaatatttggagtaccttttaatgcactgccccattctgctgta

SEQ ID NO: 149734 - DNA, 100 bp, Homo sapiens
tgaggggacccgcatcaagaaaatctccatcgaagggaacatcgttcatcagagaagatatgaaatataaagatgctactaataaacacagccatctgca

SEQ ID NO: 149735 - DNA, 83 bp, Homo sapiens
gggctttcgcccgggtcctcctagaaattccccccgaagaagactcccccacatctggaggctgggaggcggcagaatgcagc

SEQ ID NO: 149736 - DNA, 74 bp, Homo sapiens
atgagatgggttgcacctggggaatggttacagaggaaagccatgaagagccagcattccagaattttatgcaa

SEQ ID NO: 149737 - DNA, 98 bp, Homo sapiens
gggaccccaggatgggggacaggaggctgcggggcctcagctcgccgcgcatggccgggaacgcggagccgccgcccgccggagccgcatgcccccag

SEQ ID NO: 149738 - DNA, 101 bp, Homo sapiens
gacagagtatggagagagctgagagccccacaccaggaatggcccagggaatggagccaggtgcgggcggcacccagagactcacccgtgctgttgggaag

SEQ ID NO: 149739 - DNA, 134 bp, Homo sapiens
tcgtcaaccagcagagcttccaggacatcaagcccatgcgggaccagatcatccgcgtgaagcggaggaagaacgtgcaaaacgtgaggagctagagcgaatactggaagagaataaccgaaaaattgcagaag

SEQ ID NO: 149740 - DNA, 123 bp, Homo sapiens
tgcagttcttggacttggccatgtgagatacaaggctacacagagacagatcaaagcagctcgtctcctctgagcctccggcctccataagacccaaaacagatgacacctcttcccagtccc

SEQ ID NO: 149741 - DNA, 76 bp, Homo sapiens
ggaagattggggccttctgattattttggtgtgtgtgtgcaggccacagcagcatgcccttggtgtagtcagtgcc

SEQ ID NO: 149742 - DNA, 100 bp, Homo sapiens
ttgtccacactccccagctgcactgaccagtgtttccggcaaaaccacattcatgggacacttctccagattcgccaaagtgaggacaaaaggaaccatg

SEQ ID NO: 149743 - DNA, 51 bp, Homo sapiens
ggctgtggcagatgcaactgcaggtatattgagatcttcagaagtagcagg

SEQ ID NO: 149744 - DNA, 97 bp, Homo sapiens
atgcatgctgcttttgatgtctgacaacgtggatcgttgttttgaaacgccgtcgctttcgggttctctcatcgcttcgtcgttcgccaatgtttga

SEQ ID NO: 149745 - DNA, 90 bp, Homo sapiens
ccgctgtagtacacaatgtgaattccaatgaacttctgaacatggtgtggaatagtggtggttatcactaggctaaaactggacaaagac

SEQ ID NO: 149746 - DNA, 90 bp, Homo sapiens
acgacctgtctcgccgagcgcacgccttgccgccgccccgcaggcatcgttggcttcacagtatgactgatgatcctccaacaacaaaac

SEQ ID NO: 149747 - DNA, 75 bp, Homo sapiens
cgggcatgagttagtcgcagacatggacaccaaacatttcctgccgctcgccgccccgggggaaggtgcggagga

SEQ ID NO: 149748 - DNA, 82 bp, Homo sapiens
gtgtacaacccgacgaggaacgaatgggacaagatcccgtccatgaatcaggtttggtgcacctcgatttggaggaagtagg

SEQ ID NO: 149749 - DNA, 88 bp, Homo sapiens
gtctggaaccttctgtctggctgatacctgcctcttgctgaaaggacccaggagcgataacagtaaatcaaataagatatttgtcggt

SEQ ID NO: 149750 - DNA, 100 bp, Homo sapiens
tggcgagtaaaggccatagcgagaaggaggttgccgacgccatcaggctcaacgaggaactcaaagtggatgaggaaaataaacccgggacccacttcac

SEQ ID NO: 149751 - DNA, 102 bp, Homo sapiens
ggagaggcccggggcacgtgcagaaaggagccccgcgagtggcgcgccggggatgtgagaagccctaccactgcaactgggacggctgcggctggaagtttg

SEQ ID NO: 149752 - DNA, 100 bp, Homo sapiens
aacagaataattctgaaagaaagaaaacaaagaaaaacatactccagaattcctaatagaacagctagtgaaaactttagtggctgacactcctctaact

SEQ ID NO: 149753 - DNA, 105 bp, Homo sapiens
gtgaccccaacaaggataagcacatcaccctgaaggagtggggccactgctttggaattaaagaagagcctactgggatgttagatgtctggtacatgaaacggc

SEQ ID NO: 149754 - DNA, 51 bp, Homo sapiens
caaagtgccatgtctttaatgtcctggtccgcgccagagcccagcgcgcct

SEQ ID NO: 149755 - DNA, 88 bp, Homo sapiens
tggtacccattggcaactgcctatgcaacgctgggcatgaggagcggagcggagaatgccaagacgcagtaaaacgcaggactcttcc

SEQ ID NO: 149756 - DNA, 100 bp, Homo sapiens
atggacatgcctgaggtcctcaagtccctgctggagcactctctgccttggccagagaagagaacaggtgtggatgtggaagcagccaagcgggcagaag

SEQ ID NO: 149757 - DNA, 74 bp, Homo sapiens
aggaggagcttgctgcagagtttgaggagctcaagcttgggaaaatggtgtgcattccttgtatcgtcattcca

SEQ ID NO: 149758 - DNA, 75 bp, Homo sapiens
atgtcgtatttataatatgtggaggagagagagctcaccatgctcaggaccattgccaactatttggtgtggaga

SEQ ID NO: 149759 - DNA, 98 bp, Homo sapiens
gtgggtctggtgtgtccaactacgcggagctgatcgtgaaagggttttggccaaattgggcgagggcacaaaataaccacttaccccttctcaccgag

SEQ ID NO: 149760 - DNA, 75 bp, Homo sapiens
cggtgtaaatgttgagcctttttggcctggcttgtttgcaaagcagcaggcaaaaggaagcagtgtccatgttct

SEQ ID NO: 149761 - DNA, 99 bp, Homo sapiens
ttttatattcatctcaaaaacaaaattctgaactcaggacttggcaagtggtcattgggactcccacacttaaacaaagaaaggaaattctgcaagtga

SEQ ID NO: 149762 - DNA, 74 bp, Homo sapiens
caatgttggagccgtctgcaaagtgtccccggcaagaaggttttaaaatcaaagatgggaaaatcggagaaaat

SEQ ID NO: 149763 - DNA, 51 bp, Homo sapiens
cttacatcttgcatcctcaagcggccaaacgtaccaagaaagtcgggatcg

SEQ ID NO: 149764 - DNA, 100 bp, Homo sapiens
ccccttcgagaggaggcagattcccctctacatagacgacaccctgacggaagccaccattcttcagagggcaatgaaggcacagaaatggaagtaccag

SEQ ID NO: 149765 - DNA, 99 bp, Homo sapiens
tacaatgtgaagatacataagatcgtagccagacccccagtaggtggcaagtgggagaaaccatcagaaattttggaaatcaaaggacagaactgggaa

SEQ ID NO: 149766 - DNA, 100 bp, Homo sapiens
ctcccagcaccacagtccttctgcagtccctcgtccagccacccccagccccatcttcccgggaagccagccgcccaccagaggagcccagcgccccgag

SEQ ID NO: 149767 - DNA, 90 bp, Homo sapiens
ctgagaagagaagtggagcaccaggagactgcctatgtacaaggcgagtggataattccaacacaagactggcagtccaaattgaaagag

SEQ ID NO: 149768 - DNA, 96 bp, Homo sapiens
tttaattttagggtcctttatatagaagggagagtagcagcagtggacgtcagctcagcgaggtcttcatccagctgccctcgcgaaaggagctgc

SEQ ID NO: 149769 - DNA, 100 bp, Homo sapiens
ggctctatcaaagaaagcaagagatggaaaattgttgcctgaagaataccaaggaggatcttttagattttgtggaagtataatactttgtcattatgag

SEQ ID NO: 149770 - DNA, 75 bp, Homo sapiens
gggaggacccccagccacatgtggaccctcagcctggggaagaactgaacctggcagtgctccatgcttttgtgg

SEQ ID NO: 149771 - DNA, 83 bp, Homo sapiens
gtcgagccaaacagacgctccctgtgatttatgtcaaggatcagctcagctactatttaataaaacaaaatctgtagaattca

SEQ ID NO: 149772 - DNA, 100 bp, Homo sapiens
ggctttgcttttgttgaatttgaagatccccgagatgcagctgatgcagtccgagagctagatggaagaaccacacgatgagccagcacgcacagtgagg

SEQ ID NO: 149773 - DNA, 75 bp, Homo sapiens
gcagtctggagcagtggctggatttaaggtgctggacgtcattgctcctccttatacctctgacttcgtgcaact

SEQ ID NO: 149774 - DNA, 75 bp, Homo sapiens
tgcaagtcatcagactgcataaaatcagacctagaggatcaagacataatgggagcatttttagacaagccaaag

SEQ ID NO: 149775 - DNA, 74 bp, Homo sapiens
tgcacaatattaaaactttacctgggcctgctcaatgtgaagagacaaggatgaagaccttgatgatgatccac

SEQ ID NO: 149776 - DNA, 75 bp, Homo sapiens
taacaatccacctaagaaattcagaggttctccttactatgacaatgtccgccccctctcttaccctgattcgga

SEQ ID NO: 149777 - DNA, 83 bp, Homo sapiens
ggaaggggcctccagggtctgcagacaaggcaggactgctctggcccatttagagtctcttgcagtggatgttgaggtggcca

SEQ ID NO: 149778 - DNA, 88 bp, Homo sapiens
cctgagcgccccaggtagaatttcaaactttaggattcaatttggaaagtggttggggctctggaagagctggaccaagctatagtat

SEQ ID NO: 149779 - DNA, 80 bp, Homo sapiens
gaaagaccatcaagtttaccacacccgacagctacaaagtgcaagataagaaaaatgcctccagccgccctgcctctgca

SEQ ID NO: 149780 - DNA, 75 bp, Homo sapiens
gagaagatgaatcatacaatatttcagaggtcatgtcaaaagaggatggaatccgacgtggtaggcccagagcag

SEQ ID NO: 149781 - DNA, 88 bp, Homo sapiens
aactcttagataaaatgacgacgtccttctggaagaggcgaaactgactgggctggcttagatgaagatgaagatgcacatgtctggg

SEQ ID NO: 149782 - DNA, 75 bp, Homo sapiens
gcctgcaagctctgcgaggccatctgccccgcccaggtgaaaagtagtgatgaggcagtgatcctgtgtaaaaca

SEQ ID NO: 149783 - DNA, 99 bp, Homo sapiens
ctttgccgacacattccttcgagatgaaaccagcctggacaccaagtctgtgtcagaaggccacctcaagaggaacatcgtggtgaagaccgtggagat

SEQ ID NO: 149784 - DNA, 85 bp, Homo sapiens
tgaattccggagttgccatgaaatatggaaacgactcctcggccgagctgagtgagataagatgctcccaagtcccttgcagctc

SEQ ID NO: 149785 - DNA, 75 bp, Homo sapiens
gacgaggaggagacgtaccggctctggaaaatccgcaagaccatcatgcaggtggtctttgggaagaagcttcct

SEQ ID NO: 149786 - DNA, 75 bp, Homo sapiens
gctcattgacaaggccatgaagaaagatggactcgactgccaacgaggtggaggccgtcaaagtgcacagcttcc

SEQ ID NO: 149787 - DNA, 98 bp, Homo sapiens
acccaggacacactatggtgcttcagccaagtgaaaggcactatcgagattggaaccacagaagtggcccgttgccgacaagccctggtgccgcgtgc

SEQ ID NO: 149788 - DNA, 100 bp, Homo sapiens
gaaaaagcgaaggaatttcgcagagctgaagatcaagcgcctgagaaagaagtttgcccaaaagatggtcctgaatctgtgcctccttcccttcttaaag

SEQ ID NO: 149789 - DNA, 101 bp, Homo sapiens
gcgaaattattattgacgatggacaatttggaatccacactcagatcatcctgcacttgaaaaatgaagttttaccaccatcaaaactatcattatttaac

SEQ ID NO: 149790 - DNA, 75 bp, Homo sapiens
atctcaaaaggtgatctggacaaaggaacaggtatctcagacggtctggaaaatcccgaagcagaagcccgtatt

SEQ ID NO: 149791 - DNA, 87 bp, Homo sapiens
gattcgtgaccctcagcgccggtgcatgtcgatcggaccatgtgtcaacttatgccgcgtttgtacagacgcatagaccaacagggg

SEQ ID NO: 149792 - DNA, 82 bp, Homo sapiens
gagttgagcctgtgggacacttcggtcccacagaacaacgagaagcttcaggagagcccgtgcatcttcgcattgacgccaa

SEQ ID NO: 149793 - DNA, 95 bp, Homo sapiens
ggagaattggagatggggaccgccctggacatcaagattaaaagagcgaataaagtttatcacgccgggctcttcagccgtctatgaaaggggga

SEQ ID NO: 149794 - DNA, 90 bp, Homo sapiens
ccagagcttccatgtgccatggccatgggcacacccagcaccacggagaggatttccacctctggccagaatctccagccaagtcctccg

SEQ ID NO: 149795 - DNA, 100 bp, Homo sapiens
acccagcatttcatccctcgtcgaaaggattggattggcatctttagagctcgattccttttgtccaaagtgaacccatctcagacacacaataacctgt

SEQ ID NO: 149796 - DNA, 83 bp, Homo sapiens
aggaggagagcttcacctgtcggcttggagagatccaggtgatggctggaccggcggaggaggcgggagcccattgtcccgag

SEQ ID NO: 149797 - DNA, 100 bp, Homo sapiens
gagagaaccgaggaacgaagaaacagacattcaacatgattgcatttgaaattttaacctttgagaccaagaacccgtcggaattagcagaacgtttgcg

SEQ ID NO: 149798 - DNA, 83 bp, Homo sapiens
ctaccagataataatccaatgactatcagaagctttgagatcagcagggctaccatctcactcttctgtaatttcacaacatt

SEQ ID NO: 149799 - DNA, 100 bp, Homo sapiens
gctcccccagactctgttggatcagaaggtcaaggcccagatgaaggactgcatgcgcgagctggatgacacccgcgcctctcgtgaggagatcctggcc

SEQ ID NO: 149800 - DNA, 50 bp, Homo sapiens
cgcagtggtcgcttcttctccttggggcctgcaaccagaagataccactg

SEQ ID NO: 149801 - DNA, 98 bp, Homo sapiens
cccggcccacagtgggggtgtgcaaacccgagagaactggcgtggtgacccgggctgtgtggaaattcactgggcctgatggagctggatgcagcctt

SEQ ID NO: 149802 - DNA, 83 bp, Homo sapiens
gccagggaaccctggtcaccgtctcctcagcccatgacagacctggacacaaagatccaagaaaaggccatgaaggtggacat

SEQ ID NO: 149803 - DNA, 100 bp, Homo sapiens
gttcggccgtgccctccgacagccaggcccgcgagaagccaggtcagagcagcccaccatgggatggggagggggtggaggctgcaccccgcgcccaccc

SEQ ID NO: 149804 - DNA, 75 bp, Homo sapiens
agaatgctaaggaagctgtggcaagtatgagacagagttgaacctgcgcatgagtgtggaagccgacatcaatgg

SEQ ID NO: 149805 - DNA, 83 bp, Homo sapiens
ttcttcctctaccacatccacctgtggatcactgatccagtgtctctttgggccacttcaggcggggccgagcaatgcaggag

SEQ ID NO: 149806 - DNA, 75 bp, Homo sapiens
ggagccatgatgctgctggaatctcctatagatccacagcctctcaggatagtggccaaagcctccaagaacctc

SEQ ID NO: 149807 - DNA, 75 bp, Homo sapiens
cgcagccggagtggggccgtgaggatgaccagtgtcccagtgaaggaacgagtgaaggtgtctcagaactggaga

SEQ ID NO: 149808 - DNA, 52 bp, Homo sapiens
tcctccaccaccctcaccagaaagtgagaaagatcagtctaaagaaaaggag

SEQ ID NO: 149809 - DNA, 90 bp, Homo sapiens
gacaggtttgcaatgaagaagttttatgatgacaaagtttcagctttaatgcagccttcccaaaaacgattctacttcaaagaaatcctg

SEQ ID NO: 149810 - DNA, 98 bp, Homo sapiens
tgcactccgcacctcggggacattattgcgcgtggaacggctgcttttggaaggtttttagaacttcagccataaaaatgggcagaattttccttgat

SEQ ID NO: 149811 - DNA, 118 bp, Homo sapiens
tccagtatgttgccatctctaacctaccagctgccactttccagggagaaacaaaggcagcgctgccctcgggggagcattggccctggcggaacgcagcagccgcgaaggatccagc

SEQ ID NO: 149812 - DNA, 82 bp, Homo sapiens
atgagacagggcacaccaaactccatctggtcaaaatgcagatcttcgtgaaaacccttaccggcaagaccatcacccttga

SEQ ID NO: 149813 - DNA, 87 bp, Homo sapiens
acaccaccggcacagtgacggcttcagagggaacgtcaaggtcgtgggaaataaaaggcagttctacacagactgcagcaacggttg

SEQ ID NO: 149814 - DNA, 98 bp, Homo sapiens
tgctcagcgccagcggcactggctccgccgcccaagagccgagactgtctgaagctgggcccacctgctgagggagaagtcgtccaagtcaagtggcc

SEQ ID NO: 149815 - DNA, 74 bp, Homo sapiens
ttacgtctgcggaagtgcagctgcctcagttcttagcgcaggtagaacgtcatgacatgaataccttaagcctg

SEQ ID NO: 149816 - DNA, 100 bp, Homo sapiens
agccccagacagccggcgctggctgtggtcggtgctggcggcggcgcttgggctctcattgcagtgtcgagatggctatgaaccctgtgtaaatgaagga

SEQ ID NO: 149817 - DNA, 74 bp, Homo sapiens
ggaaactgggacaatatttcagacggagcaaagacttggattgggaatcgaagaaggaaatatcgtttaatggg

SEQ ID NO: 149818 - DNA, 76 bp, Homo sapiens
ctccgtcatgatcaacaaggccacgccctacaactacccagatgatgaggagtctgatgaggaagctgtgaagaaa

SEQ ID NO: 149819 - DNA, 75 bp, Homo sapiens
ccattcccatcagtgagcattacaggtatgaatctccagaaatagctctaaattgtggaataatgttaagagaat

SEQ ID NO: 149820 - DNA, 83 bp, Homo sapiens
agaagacctagagtacaagttgaagggattaattgacctaaccctggataagaggcatgttatttgaaagcaattgagacgca

SEQ ID NO: 149821 - DNA, 97 bp, Homo sapiens
gctaacaatggacacccagaaggacgttcaacctccaaagcagcaaccaatgatatatatctgtggagaacatccatgatagcagtcttctgtaaat

SEQ ID NO: 149822 - DNA, 100 bp, Homo sapiens
atattttattcctcttcctatccaatccctgccttttgagtccaggtgagtcccctgatgaagccaccgcggctgaccaggagtcagaggatgacctgag

SEQ ID NO: 149823 - DNA, 98 bp, Homo sapiens
ccaggatgtggagtggacttcctagcagaggtcttgagagctgatgacaataacatgggcaatggctgctctcagaagctggcgactgctaacctcct

SEQ ID NO: 149824 - DNA, 100 bp, Homo sapiens
gcatcattcgtccttatgacagacaggaatctgagggctctgacttacttgagttggtgttggtattaggagatctgcacatcccacaccggtgcaacag

SEQ ID NO: 149825 - DNA, 97 bp, Homo sapiens
actggtattttccaataccaacaggctctagccaacatgcagttacaacagcatacagcatttctcccaccaggttatgatgtgattgctcaagccc

SEQ ID NO: 149826 - DNA, 82 bp, Homo sapiens
tagcgctatgcctgcggcggagactgcatcaggctctcggtttggtgcacctcgatttggaggaagtagggcagggccctta

SEQ ID NO: 149827 - DNA, 96 bp, Homo sapiens
cagcatcaagatgatttatggtaataagaattatatccagatcgagagacagaagattctgaaagggttcaatgaaatgagagtcatcttggacaa

SEQ ID NO: 149828 - DNA, 98 bp, Homo sapiens
ggcttcctcgattgtgccgcgagggctcagggctctggacgctactctatctacattgccaattacgcctacggtaatgtgggccctgatgccctcat

SEQ ID NO: 149829 - DNA, 96 bp, Homo sapiens
agctgtggataacgggaggtgaatttccatgtcaacatagtcctggtgcctgactgacagaagttcttgcccccggggagctggtgtggacagagg

SEQ ID NO: 149830 - DNA, 142 bp, Homo sapiens
gcagaatgatgatgatgaaaacaaaatagcagagaaacctgactgggaggcagaaaagaccactgaatctagaaatgagtttcgccgtgaggaagatgcggaaaaggctgtgattgacttgaataaccgttggtttaatgga

SEQ ID NO: 149831 - DNA, 99 bp, Homo sapiens
gtggctcggttcttgtgagcgaagctttgtccggttcggcaatggacggataatttgcggtaaaagcctttcagtgaatgaaatgactcttagcacttt

SEQ ID NO: 149832 - DNA, 74 bp, Homo sapiens
cgagaactggagagaactgctggaaggagactggatgatagaatttggctgcttcaacccccaactccactgct

SEQ ID NO: 149833 - DNA, 100 bp, Homo sapiens
tgtcagccatgaacggatggatgtgatgcctgctagccaaaaggcaaatgcagccctgaggatttggctactgcatataacaacagggggcaaatcaagt

SEQ ID NO: 149834 - DNA, 82 bp, Homo sapiens
gaaagaaagatatagagacaacgactatgtccaattttcatgctcagactatatcatcatgtacatagaaaaatccaaagga

SEQ ID NO: 149835 - DNA, 80 bp, Homo sapiens
gcaacccctactggatggcacctgagatgatcaacggttggatggcaagcatgtggtgtttggcaaagtgaaagaaggca

SEQ ID NO: 149836 - DNA, 113 bp, Homo sapiens
caatatctgtcttcggtggactccttcggcagtccacccaccgccgccgcctcccaggtctggcggcttctctgttgacaactcagctggttccacaccctggcaattgtgaa

SEQ ID NO: 149837 - DNA, 100 bp, Homo sapiens
gtctcctgtgtggcgatggtcttcctgctggggctcatgtttgaggtcaaaatgcagatcttcgtgaaaacccttaccggcaagaccatcacccttgagg

SEQ ID NO: 149838 - DNA, 80 bp, Homo sapiens
cagggatccatatgtcttgcctgcagccagcgatgaagcccggggcaagaactgtggtgtcttggtacattgcttggctg

SEQ ID NO: 149839 - DNA, 82 bp, Homo sapiens
ttttctggtccaggaattaatcaagagcaagactcccaagcagctgtgttaaaaagtaatcgaagtacgaagaggacatggt

SEQ ID NO: 149840 - DNA, 83 bp, Homo sapiens
cgcggagagcaatcgccgggacagctgcaagctattactataacaagcgcattctgcacaagaccaaggggaaacggttcacc

SEQ ID NO: 149841 - DNA, 101 bp, Homo sapiens
ggcttcaagcgttctcgaacccttgaggggaagttaaaggaatttgctgacacaatatcttccgcctggtgctgggcatatcctaagaacttacaactttc

SEQ ID NO: 149842 - DNA, 156 bp, Homo sapiens
gcaggacttcgtgcgcgccttggaccccgcctccctcccgcgcgtgctgcgggtctgctcgggggtctacttcgaggattgaggtggtgccttctgcctctgccctgatcatcaaagccctcaaggaaccaccaagagacagaaagaaacagaaaa

SEQ ID NO: 149843 - DNA, 100 bp, Homo sapiens
actgaaaaacctgaggctgatgacccaaaggagatgagtatgatgtatgtgccatttgtttggatgagtatgaagatggagacaaactcagaatccttcc

SEQ ID NO: 149844 - DNA, 76 bp, Homo sapiens
gctacggcggcgcagaaatgaggcagaagcggaaaggaactctaatgaatcattgattgaccagcactattttacc

SEQ ID NO: 149845 - DNA, 100 bp, Homo sapiens
ccctagcagcagccgccgccagagaggcccgcccaccagttcgcccgtccccctgccccgttcacaatgtattgttgcagcatctggcagtgagactgag

SEQ ID NO: 149846 - DNA, 100 bp, Homo sapiens
actggttcgaggaaggcggcctcagaggagagggaagggacatcgataaagttgatgagttaatgcaggacattgctgaccagcaagaacttgcagagga

SEQ ID NO: 149847 - DNA, 51 bp, Homo sapiens
tggcttgtgaaatcatgcctctgcaaagtttgaaggatgacctctaggaag

SEQ ID NO: 149848 - DNA, 90 bp, Homo sapiens
atgatggggcagcaagtggccaagaagcatgagtgggaaaagcatgggacctgcgccgcccaggtggatgcgctcaactcccagaagaag

SEQ ID NO: 149849 - DNA, 75 bp, Homo sapiens
ctggaatttagcgctcgcccagctagccgcaggtgagcagaagtggcctatatcgctccccgtcgatgccagaga

SEQ ID NO: 149850 - DNA, 74 bp, Homo sapiens
cctcagccccgtcctcttgtcctcctcagcctcggtctgttgccacagttattgggagttgccccagagaaggc

SEQ ID NO: 149851 - DNA, 90 bp, Homo sapiens
gggatatgtgtaaccacaccaacggcctggacggggaggtttactgcatcgacgcgcggttctacgggaacgtcagccggttcatcaacc

SEQ ID NO: 149852 - DNA, 80 bp, Homo sapiens
tctctcccaggccacaagacatttcctgctcggaaccttgtttactaatttttcaccagtgatcattaaagaatgggcag

SEQ ID NO: 149853 - DNA, 121 bp, Homo sapiens
gccaggatgtgggagggcatttgccagtgcaacaaattataaaaaccatgtgaggatacacacagagatagctgttctccagcctttctggagggatgcagagcctttccttaggacaaac

SEQ ID NO: 149854 - DNA, 100 bp, Homo sapiens
gagcagccatgagggccgggcccagtcaccgacctttagaaacctgctgaagtggtatgctaaggagttcaaagacccactgctacaggagcccccagcc

SEQ ID NO: 149855 - DNA, 50 bp, Homo sapiens
tggtaccacggcctcctgtcccgccagagacggggttttgccatgttgcc

SEQ ID NO: 149856 - DNA, 100 bp, Homo sapiens
tgaccatcgaaaggagcaagagcaagatcaccgtgacatccgaggtgcctttctccaaaaggaaagtaatggaccagtgaaggtgtggggaagcattaaa

SEQ ID NO: 149857 - DNA, 74 bp, Homo sapiens
tcagtcagcatgtctatgagcagttcctgctgcagcttcagggatctgaaacttgcccacccttcgggatattg

SEQ ID NO: 149858 - DNA, 100 bp, Homo sapiens
caccacggcacggaaggtggggcggcctgggaggaagcgcaagcaccccccggaatcccttggcaccatgtcctgtgtgcattataaattttcctctaaa

SEQ ID NO: 149859 - DNA, 98 bp, Homo sapiens
gacattcgaggatttcgcagcccaagtcttttctccctctcccagctactccctcagcggaacggtcaggttgattatcgagcaaaactttgggcctg

SEQ ID NO: 149860 - DNA, 74 bp, Homo sapiens
tgttctgaaagtttgtaaccatgaaatctggatggagaagcagtatttatctcaaagagaagtggacctagagg

SEQ ID NO: 149861 - DNA, 98 bp, Homo sapiens
gacgaccctagtgctcgtcgccgtggcgccatgggtgttgtccgcagccgcagatccgaattcgagatccaaaccaaggaggaaaggatatcacagag

SEQ ID NO: 149862 - DNA, 75 bp, Homo sapiens
agggggaaccgccgtcccaacatcacaaaaagaaatgactgctgtccatgcaggcaacataaacttcaagtggga

SEQ ID NO: 149863 - DNA, 108 bp, Homo sapiens
ccttaaggatgtgcaggatcttgatggtggcaaggagctgttaaattccaaaagtttcaagcctttgactggggaagcagtgccaagaattattttcattacaaccag

SEQ ID NO: 149864 - DNA, 96 bp, Homo sapiens
taaaatgaaagggttcagcttcaaagaagacactttgctgttgatagctgaggtgtgtgtggtttcagcgcagcatggctgtggtcatccgtttgc

SEQ ID NO: 149865 - DNA, 98 bp, Homo sapiens
acaagggcgaggggctgaacaagacagccatcggggactacctgggggagagctgaagacctaactgcagcatgtctgtatttggagatggggcctct

SEQ ID NO: 149866 - DNA, 88 bp, Homo sapiens
aaagctgcacggcagtctgtttatgaggaaaccttcaattgtaacaaagtatgtagaatcagatgatgaaaaacctttggatgatgaa

SEQ ID NO: 149867 - DNA, 100 bp, Homo sapiens
caagacctcatcaacaattaagctctggattaatcgaattacagctgctagccaggaacatggactgaagtatccagcgctcattgggaatttagttaag

SEQ ID NO: 149868 - DNA, 85 bp, Homo sapiens
gaaaatgaatgccaaatgggacacgccatcctggggtctccagctagtggaattcaaaacacaattggttctgttggcacagggc

SEQ ID NO: 149869 - DNA, 99 bp, Homo sapiens
atatgcagcaaagattacaccaagatctgtgctgaccacaggaattggatctactagtgcagagcagcccgacggccatggaggctgaagagacgatgg

SEQ ID NO: 149870 - DNA, 76 bp, Homo sapiens
gctgtattcagctcaggaccaggcaccttctgtggaagaacgtccagttgcggataatgagcgaatgtttgatgtt

SEQ ID NO: 149871 - DNA, 50 bp, Homo sapiens
atccggctgccgaaggtcctcgccagatccctgcatgtcactgagtccac

SEQ ID NO: 149872 - DNA, 100 bp, Homo sapiens
ccccatcattgggagaaatccccactcctccaagaaccaacccccaaattggctgggacagactcctgaaacagactactctttgcctttttgctgcagt

SEQ ID NO: 149873 - DNA, 100 bp, Homo sapiens
aggatctggaaagcatcatcagacccaagtgccaagttatttactttcccatcaggtttcctgatgtgagcaggcagcagaagatgtcgttttcattgga

SEQ ID NO: 149874 - DNA, 90 bp, Homo sapiens
ctgagaatcgtgcggttacagctgctgcagtttctttgcagattgccaccttccagagaagaggtacgagatgacaagacaaccataaag

SEQ ID NO: 149875 - DNA, 95 bp, Homo sapiens
gcccccacctttcctcaggagtcatttctgttccgcacaggcctgctgaactgggtgctttatatagggtcttcatcctccaggtccacctttag

SEQ ID NO: 149876 - DNA, 100 bp, Homo sapiens
gtcggaccaatgctgcaaggggtgtgaggagaggagccgctgtttttcactgagctgccataccccgaaagaggtcctatacgttgcttgtggaggcgtg

SEQ ID NO: 149877 - DNA, 75 bp, Homo sapiens
agtatcgtcgagaagcctatcatcggcgtgcaatggaattgagttttgccctggtaaatgggaataatatccgag

SEQ ID NO: 149878 - DNA, 90 bp, Homo sapiens
attgcagggagtatcaaatatgagaaagctaggccatctgaataactttactaagtgaggaggagctcccagatcataatgtggctgtgg

SEQ ID NO: 149879 - DNA, 90 bp, Homo sapiens
aaaccaccttcgtgatcatggtatcttccctgccaggcaccagttggagatgccaggacattactctcatctggctgccttctatgagga

SEQ ID NO: 149880 - DNA, 90 bp, Homo sapiens
cggggttcgggtgtctcgtgtgtgaacatcacagatgccatggacaatattaccaggcagaaccaattctacgatacccaagtcatcaaa

SEQ ID NO: 149881 - DNA, 100 bp, Homo sapiens
gcaactgttacaaaaccagttggtggtgacaagaacggcggtacccgggtggttaaacttcgcaaaatgatggtttcacccaaatatcactggtgtggag

SEQ ID NO: 149882 - DNA, 83 bp, Homo sapiens
ggcatcgtctttccgtcctctgaggcgacggccgcggctgcacagctcttccgccctctctggatgagggaacagaagtggag

SEQ ID NO: 149883 - DNA, 101 bp, Homo sapiens
cgcaagtcgagaggaaactgttgtgcctcttcatattggcgatcctgttgtggtccagattttggctatgtaactcgagggccccaaacagggggtatcag

SEQ ID NO: 149884 - DNA, 75 bp, Homo sapiens
gcctggatgtgagtttcagccagatcgaagcaaagctgagatggatttgaaggagctgagcgagtcggtccagca

SEQ ID NO: 149885 - DNA, 98 bp, Homo sapiens
gcaaatccagacagaacctttgacttggtgttgaaagtgaaatgtcatgcctctgaaaatgaagccccatctgctttgatatgattgaagaagcatac

SEQ ID NO: 149886 - DNA, 98 bp, Homo sapiens
atggaggccgtcggggagacgctgtggtgtgactggggcaggaccatcagccggctcagttcggggaagctgcaggagttcggcgtgggtgatggcag

SEQ ID NO: 149887 - DNA, 100 bp, Homo sapiens
tagcccttgaacagctatgcatgctgcttttgatgtctgacaacgtggatcgttgttttgaaacgttacaggaaatacaggaggcagaggaacaaataaa

SEQ ID NO: 149888 - DNA, 100 bp, Homo sapiens
agagagcttgtgaaactgagggaataggaaggatgccatcctgttaactgatgcttttgacttcaccgatcagtgtttaaattcagcacttggctgttat

SEQ ID NO: 149889 - DNA, 82 bp, Homo sapiens
gatgggaacttgtgtgttaaagtaacagatgatttagttatattgatgatgctcaaatacttccccgctcaactagagtcag

SEQ ID NO: 149890 - DNA, 50 bp, Homo sapiens
tctgcagcctctctgacaagtgccttaccaataattctaggatcgtagga

SEQ ID NO: 149891 - DNA, 50 bp, Homo sapiens
gctccggctggtctgtggtgaggcaccatgactcctgtgaggatgcagca

SEQ ID NO: 149892 - DNA, 75 bp, Homo sapiens
agtacgtcgtggagtccactggcgtcttcaccaccatggagaaggtgttacggaaatcggcctacaagattgtca

SEQ ID NO: 149893 - DNA, 82 bp, Homo sapiens
aaaaattggatgtggcaattttggagaattacgattaggctggacgtaaagaaagaagtgatgcactcaattctgcaataga

SEQ ID NO: 149894 - DNA, 75 bp, Homo sapiens
catggatctggcctcaagactggtgcgcataaagtcaggcagagatggcagtgggggctcccgtggcaaaagaga

SEQ ID NO: 149895 - DNA, 50 bp, Homo sapiens
gagagcctgttggagaaacacaaagaggggctggcaaggtttaattgctt

SEQ ID NO: 149896 - DNA, 107 bp, Homo sapiens
tttgaagtcaacattcgatttattggaggcctacttgcagcatattacctatcaggagaggagtttcggagcaacatcccctgtcacctggttgatatctcttgcgg

SEQ ID NO: 149897 - DNA, 82 bp, Homo sapiens
tctgccatattgtgtcttccccggccggtccctcgcctcccggccgagctgacgcgttttaccaacgaggatcatttggctg

SEQ ID NO: 149898 - DNA, 83 bp, Homo sapiens
cacggcttggcccccggccaccgcttcggcctagacaatgcagatcttcgtgaagactctgactggtaagaccatcaccctcg

SEQ ID NO: 149899 - DNA, 89 bp, Homo sapiens
tgaaagaatactacaattttattgggagctgaagttgccctcctataaaggccagtcccctcagttaagtctcagacggtattttgctg

SEQ ID NO: 149900 - DNA, 90 bp, Homo sapiens
gtgggagcctgcgaccctgcgccgggtgttcgtggtgggggttggcatgaccaagatgtgtcttgctgaatcagggctctcttatccctg

SEQ ID NO: 149901 - DNA, 76 bp, Homo sapiens
aatatgaggaagacctactggagcagtcgcagtgagtttaaaaacacttttctgtagaaggtcagttggaattcag

SEQ ID NO: 149902 - DNA, 97 bp, Homo sapiens
tgaagtttcgacacacctcctttaataaaggctcagctatgtgaaccatgcagaggacctggcctccaagctcctacaatgttccccaaagaacaga

SEQ ID NO: 149903 - DNA, 100 bp, Homo sapiens
tgtgacgatgagccagagacctacgtggcagctgtgaaaaaagccatttccgaagctgtcttttggggagacattgccttagatgaagatgacttgaagc

SEQ ID NO: 149904 - DNA, 82 bp, Homo sapiens
cttcggtggactccttcggcagtccacccaccgccgccgcctcccagggctcaggattccgctggaagaatctcagccagag

SEQ ID NO: 149905 - DNA, 83 bp, Homo sapiens
ggaaactgagacccagcaagggagacgaagtcgcagacgtcggtgacactcagcatcgtccactgccctcccgtcaccaccgc

SEQ ID NO: 149906 - DNA, 118 bp, Homo sapiens
cgtgaaggcaatgatttataccatgaaatgattgaatctggtgttatcaacttaaaagatgccacctctaagactgcaccttttaattttaatgataatgatttgctgccacctacgg

SEQ ID NO: 149907 - DNA, 50 bp, Homo sapiens
caatcccgagtgctctacttgagcgccatggctacttattctgccacatg

SEQ ID NO: 149908 - DNA, 75 bp, Homo sapiens
tcttgcccaaaccacgatgggaatgtggcaggttcaagaaagagattgtcgttgatggacagagctatctgctgc

SEQ ID NO: 149909 - DNA, 87 bp, Homo sapiens
ggtctattatatcatttaaaccacatggctatctaaagaggtaaactgtcttgagccccaccctcacctgcctgtgctggcaaccag

SEQ ID NO: 149910 - DNA, 75 bp, Homo sapiens
ctcccgagtagctgggattccagcaagctaccgactagaaatactataatcagttggacatctagcagggtggat

SEQ ID NO: 149911 - DNA, 75 bp, Homo sapiens
cggccatttccttgatgcgcaagttcattgcctaccagttcacagacacggctcaacgagaacctttgacaagag

SEQ ID NO: 149912 - DNA, 90 bp, Homo sapiens
gaaagcttctctcggagttcccgtcttatgagtcatcagagaactcacacagaaacaggtgagaatgaccactttaactcaccgggcccg

SEQ ID NO: 149913 - DNA, 80 bp, Homo sapiens
cccgaggagaaggaggagtggattaagtgcattaagctgaaggtgatgtggccgccctcaaccgacgcatccagctcgtt

SEQ ID NO: 149914 - DNA, 80 bp, Homo sapiens
cggcagtccacccaccgccgccgcctcccagatataattggtgattacaactttcctctataaattaactcttgacactc

SEQ ID NO: 149915 - DNA, 50 bp, Homo sapiens
agcccgcagaggacagcgaccacgatggaagcccttacacttggtgggtt

SEQ ID NO: 149916 - DNA, 75 bp, Homo sapiens
caaaacctattacgaactcaaaagtcaaccgctgaagagcagggtatttgaagtataccatacaactgttttgaa

SEQ ID NO: 149917 - DNA, 88 bp, Homo sapiens
cgactacggcgagcctgagcgcggcggcggcccacgcgcagcgacagggagagacaaatttacatgtattggagaccagaccagaagc

SEQ ID NO: 149918 - DNA, 90 bp, Homo sapiens
cacacaccagcggctgcaggactgggcacagcatgagatccaaaggcagggcaaggaaactggccacaatcaggatggctaaaggtgacc

SEQ ID NO: 149919 - DNA, 82 bp, Homo sapiens
ggaggggaagccctgagaggactgagaggatgggaaattctctgctgagagaaaacagtctggcttcagccttgtcatgaac

SEQ ID NO: 149920 - DNA, 100 bp, Homo sapiens
gccgattaggaggcctggttacagtgttgtgcttctttttcaatcatggagagagatggacagagacgtatgtgcgttggtctcctaagggcacctacct

SEQ ID NO: 149921 - DNA, 83 bp, Homo sapiens
ctgcagtcacgtctccaacaaccaaggtcccgcagcccccggaagccaatagactccctcagggactctcggtccctcagcta

SEQ ID NO: 149922 - DNA, 90 bp, Homo sapiens
cagaggtgtcacaggcaacagaacttcatgtcctggatgtggcagggaacaggaatggtggaaagcagcagacataattggagtgggttg

SEQ ID NO: 149923 - DNA, 96 bp, Homo sapiens
gagaaaccttggacagcagattttggtttaatatctgattgggacaacattcagacccatttccagtcatgaatagtgaattcctaagaagaaaat

SEQ ID NO: 149924 - DNA, 90 bp, Homo sapiens
cgggctcggcgggggcggcccctccttgggcctgcggctctctacgtccctgcggagcagccgaagagaagctgaatttggacgacagcc

SEQ ID NO: 149925 - DNA, 75 bp, Homo sapiens
caaaattgaaaaaatggttgacctcacccagatttgattagctatggacaagattggaggaaatactataaagtg

SEQ ID NO: 149926 - DNA, 74 bp, Homo sapiens
ggagtcctacgatgtgatcgccaaccagcctgtcgtgatcgacaacgctcccggggagctttctgtgaagtgag

SEQ ID NO: 149927 - DNA, 75 bp, Homo sapiens
aaagccagccgggccaggaccaaagccggtgatctccgagatacagccaccaaaaccctcaacaggggcatctct

SEQ ID NO: 149928 - DNA, 101 bp, Homo sapiens
aaaggaagctcaagtatatcaagcattcaaattgctcacagctgatcctaaggcacttcaggtggcaagacagctccttcttcagcagcaacagcagcagc

SEQ ID NO: 149929 - DNA, 78 bp, Homo sapiens
agaaaagcgagaccgcgtgcgaggaccgtagccacgatggaggtgatgaacctgatggagcagcctatcaaggtgact

SEQ ID NO: 149930 - DNA, 90 bp, Homo sapiens
ggatccagatgatgtcttggcagatgttgttgaagataaagacaagtcagcagataagcagagagccctagaagaaaccaaagcctacac

SEQ ID NO: 149931 - DNA, 100 bp, Homo sapiens
cgcggcgcagaagaaacccgcggcgaccacagccaaagcgggcgcttgcttccggcgtcatggctcaaagggccttcccgaatccttatgctgattataa

SEQ ID NO: 149932 - DNA, 90 bp, Homo sapiens
gaccgcttctgccagctgctgtggcggccccggcctcccacactcctgagccaggaacagatcaaggcgaacctcttcccggccgctctg

SEQ ID NO: 149933 - DNA, 90 bp, Homo sapiens
ggctttggaagtggtaactctttgggtgctgctataggctcagccctcagtggatttggttcatcaggtttattcttcagtccaaggaag

SEQ ID NO: 149934 - DNA, 75 bp, Homo sapiens
gatttggctgaaatgcctgagaaaggagataaccagttcaggatgtccatcctggaacgactggagcagatggag

SEQ ID NO: 149935 - DNA, 95 bp, Homo sapiens
aatgtttccatctcttcagagatgaaccaggcgggcaggaagacctatgccatggtgtccagccactcagctggtcattctctggcttcagaact

SEQ ID NO: 149936 - DNA, 50 bp, Homo sapiens
cctcctaagtagctgggactacagtctagatccgtcctggtgccttactg

SEQ ID NO: 149937 - DNA, 100 bp, Homo sapiens
caggtggaatacttagatctcgacttagattctgggaaatccacaccaccacgtaaggaaaatgtttataggaggccttagctgggacactacaaagaaa

SEQ ID NO: 149938 - DNA, 83 bp, Homo sapiens
ccacaatgcatcgctggaagtagccactgccactgcagagccccgccatggaagacacgccgttggtgatatcgaagcagaag

SEQ ID NO: 149939 - DNA, 75 bp, Homo sapiens
ggcagcatgtcggtggcggggctgaagaagcagttctacaaggcgagccaggtacgccatcccaccagagcacgg

SEQ ID NO: 149940 - DNA, 97 bp, Homo sapiens
aagaaaaaatgatgaatgactctattttacgccttcagacatgggacgaagcagtatttagggaaaaggaaaaaccatatggcatagttgaaaagaa

SEQ ID NO: 149941 - DNA, 98 bp, Homo sapiens
ccacaacgatgcgtctcctggatggccaaaccaaacaggaagcttacttttctctacctagccaatgatgtcatacagaacagcaagaggaaggggcc

SEQ ID NO: 149942 - DNA, 100 bp, Homo sapiens
agaaagcagagggtgagatggatgagtccagcattctaagacgaagagggctccagaatttcacggtccctcatggtgtctcactccagcagacagagga

SEQ ID NO: 149943 - DNA, 87 bp, Homo sapiens
aatagccatctcacctttgaaatcgccaaataagaaatttaaaagcctgttgattcaagaactttctaaagtatttccggaagacat

SEQ ID NO: 149944 - DNA, 89 bp, Homo sapiens
cttttttcgaaagctgggtttcccgggagatcccaggcggtgacagagtggagccatggctagaggccagaagcggactcctagaagag

SEQ ID NO: 149945 - DNA, 82 bp, Homo sapiens
cggctgcctaatttacagcaaccatgaggaccgtataatagacgctggccccaaaggaaactactctcgatttatgaatcac

SEQ ID NO: 149946 - DNA, 48 bp, Homo sapiens
aacgccgggagctgcgagtgtccagatgaaggatttgggggcagagca

SEQ ID NO: 149947 - DNA, 75 bp, Homo sapiens
gtcacatacagagatggccgagtggcacagctggagcaggtctcaccaacggctttgggggtgcgaggagcgagc

SEQ ID NO: 149948 - DNA, 100 bp, Homo sapiens
ttggagtgtgcgtgcgcgccgagcgggcgtgatggtgggcatgggtcagaaggattcctatgtgggcgacgaggcccagagcaagagaggcatcctcacc

SEQ ID NO: 149949 - DNA, 73 bp, Homo sapiens
caggctcccgtgtagctgggattacaggggacaagatgccaactggcaagcagctagctgacattggctataa

SEQ ID NO: 149950 - DNA, 100 bp, Homo sapiens
ggatatggaggatctcttcgggagcgacgccgacagcgaagctgagcgtaaagagtaccttcaagtttaaatctgagagtgatattcatttggcagaaca

SEQ ID NO: 149951 - DNA, 132 bp, Homo sapiens
aaacttccgtaacatccaggttgatgaagctaatttattgacttggcaagggcttattgttcctgcaatggatcacttggagtcctttattgctgaatgtgatcggagaactgagctcgccaagaagcggct

SEQ ID NO: 149952 - DNA, 100 bp, Homo sapiens
aggcaccttctccatgcattgcaaggagttctcagcctgaagttgactggaactttcagttaacaagtatttatcgaatacctgatctgtagtgttggac

SEQ ID NO: 149953 - DNA, 75 bp, Homo sapiens
tgaatagcaataaatattttcccagcagcctcttcagaagaaacttgactccttcccagctcaggacccttgcac

SEQ ID NO: 149954 - DNA, 75 bp, Homo sapiens
agatctttggagaattgtcttgaacagcagtcaaaatggagctgatgaccaaagaatcccctactttgaaactag

SEQ ID NO: 149955 - DNA, 135 bp, Homo sapiens
aaacacagtcgaaaagaatactgtgaattatgcaagcacagatttgcttttacaccaaatacatcgagatatttccaagcagaaggaatgaagttcgaacacatgtcggttcttataagggaaagaaaatcgcat

SEQ ID NO: 149956 - DNA, 50 bp, Homo sapiens
gccgcggatctcaccgccgctcaggttttcaccatggagcagctgagctc

SEQ ID NO: 149957 - DNA, 100 bp, Homo sapiens
gactggatggtatgggctgtctggagtttgatgaggagcgagcccaggtgtcatggagaaactccagctgggcccagagattctgcagcgggaaaatcca

SEQ ID NO: 149958 - DNA, 76 bp, Homo sapiens
aggataataaactagttgagaagcagaacccagctgaaggactggcaaaatactggagcactaatgcccatgagat

SEQ ID NO: 149959 - DNA, 101 bp, Homo sapiens
tgggggactaggcgttagcatggtggagtatgtgttgagctcatccccgggcgattcctgtctaagaaaaggaggatttgaaaattgggccgatttccacc

SEQ ID NO: 149960 - DNA, 75 bp, Homo sapiens
aaaagagtctttggaggatgcggctttgatgggtaccctgcatgcatatagctgctgattctactcctgctattg

SEQ ID NO: 149961 - DNA, 134 bp, Homo sapiens
gtgagggcttcgatcccttctctgatttgctgtcagccatgaacggatggatgtgatgcctgctagccaaaagggattcagtggtcccaatttaaaggctattttattttcaaactggagaaagtgatggatga

SEQ ID NO: 149962 - DNA, 87 bp, Homo sapiens
tattttgagattggagaattaagatgcccagcctacagagtctgagaaggaaatttataatcaggtgaatgtagtattaaaagatgc

SEQ ID NO: 149963 - DNA, 100 bp, Homo sapiens
aacgaggagcctctgctcacagcagatcaggtgcacatgaacttgaacagatgcagctgattttagaatctattcctgttgtacatgaggaagatcgtca

SEQ ID NO: 149964 - DNA, 60 bp, Homo sapiens
aagaggttttcagcagctggagaatatgatattctttcactggaagacccctctgtgttc

SEQ ID NO: 149965 - DNA, 101 bp, Homo sapiens
aaaattatttatccaacagctcctcccagtatgagcccagaggacctggtcggcccttgtaccaaagaagaatctcatctagctcagttcaaccttgttct

SEQ ID NO: 149966 - DNA, 75 bp, Homo sapiens
atcactttagaccctccacctaattgcaggatgcttgaggatgacctgaagctgagcagtgatgaagatgacctt

SEQ ID NO: 149967 - DNA, 90 bp, Homo sapiens
ggatccttgaatgttgaagatgtccttaccagctttgacaatacaggaaatgtttcatgacgtatcccagactttactcaaggcaacact

SEQ ID NO: 149968 - DNA, 96 bp, Homo sapiens
gctgtactgctcagaactcagccggttctatttcagctaatgccaccctgactgtcctagacatggctccttactatgaagccttgtgcaaatccc

SEQ ID NO: 149969 - DNA, 75 bp, Homo sapiens
gaatcattcccttggctgttaatttctcagagggtacctccttaggccaggtctccttctccaagctgggctcct

SEQ ID NO: 149970 - DNA, 121 bp, Homo sapiens
gaaaaattcaagaagttgaaaaacgcttttcacgtcacctggagagatgcacagttactccacaggatccgctgaacataggatgttgccacaaaatctacctcgtgtatttttctctttc

SEQ ID NO: 149971 - DNA, 107 bp, Homo sapiens
gaccgccatttcacatccagcagaggaggcgggggcagccgctgagacggtttttcacaaggtgcaaagttccccatcaagtggacggcccccgaggcagccctgta

SEQ ID NO: 149972 - DNA, 75 bp, Homo sapiens
tgagaccatcccggccaacatgggaagtaccactgcccagtgctgtttaccgtgttcaccaacaacacccacatc

SEQ ID NO: 149973 - DNA, 75 bp, Homo sapiens
ctgtgcggagctaggacgcggaacatcccagaggccagcatcaacatcggttcagcgaggaagaatgcctccaac

SEQ ID NO: 149974 - DNA, 82 bp, Homo sapiens
ggctccctgaggcccgcccagccgacgtggatccataaagaacccagccaacccgcagagggaggggaggggctgagctgtg

SEQ ID NO: 149975 - DNA, 83 bp, Homo sapiens
cggggaccagcagctgtcgccgccgctctcagactattgcccagaagaaaagatgtttggttttcacaagccaaagatgtacc

SEQ ID NO: 149976 - DNA, 50 bp, Homo sapiens
tgaagctgaaactctctgcacaaagcttcttggacacttaatgattgttg

SEQ ID NO: 149977 - DNA, 50 bp, Homo sapiens
aacttcattggtttaaatatcaggtccgaacaaggtcagttggtgaatgt

SEQ ID NO: 149978 - DNA, 50 bp, Homo sapiens
tccccttctattgttctgtggcccagccgaatttgccacatacctgaatt

SEQ ID NO: 149979 - DNA, 100 bp, Homo sapiens
gtccacaagaccttcaagtttgtcgtcgtcggggtcctgctgcaggcccaaggaagaagtaactgtcaagaaggagaagcgtgaaagggacagagaccga

SEQ ID NO: 149980 - DNA, 100 bp, Homo sapiens
gtggaagtggatgacgaaaactggatatacagagcccagcccagaaaagggtacagctctgccggggggggaaaaagtggtaccattttgggcgttcttg

SEQ ID NO: 149981 - DNA, 89 bp, Homo sapiens
aggatgtctgctatgtagatggtatctagaagagcagaagacagagaatggaaaagataaggaacagaaacaaacaaataccgataaag

SEQ ID NO: 149982 - DNA, 96 bp, Homo sapiens
cctataatcaagtaaaaacaatagctcaaggaaacctttccaacacagatgtccaagctgccaaggaatggccaaatccagtgctattgaaacagc

SEQ ID NO: 149983 - DNA, 98 bp, Homo sapiens
tgggccgaccccagagaggcgctggacagatatggccgcgtggaaagtgtcaaaattcttcccaagaggggatctgaaggaggagtggctgcctttgt

SEQ ID NO: 149984 - DNA, 90 bp, Homo sapiens
cacacgcgccggctgctgctactactaccactttgggctgatggcaactgattcagaatggacagtttagaagaacctcagaaaaaagtc

SEQ ID NO: 149985 - DNA, 98 bp, Homo sapiens
gaaattaaagatgcatgctgatggcgataagtcattaccacaggaagcccaggggagagggcaaaaagtgtcggaaggtgtacgggatggagaaccga

SEQ ID NO: 149986 - DNA, 100 bp, Homo sapiens
gtttggttgtgtcctcagtgtactgaagctgtatgtcaggccctgcccggctgtgaagagaacattcaagatagtgaggaaaatctggagagctgaagag

SEQ ID NO: 149987 - DNA, 75 bp, Homo sapiens
ccttctgctggcctctctgctcgcgtcctgctcctgtaacaaaggtgaccaagaatatggcccaggtgaccaaag

SEQ ID NO: 149988 - DNA, 89 bp, Homo sapiens
ggaatttcatggccccactgaacatatctacaaaactgatgctgggcagttttatgctaaatataaagaaacaagattgaaggaaaagg

SEQ ID NO: 149989 - DNA, 100 bp, Homo sapiens
cgcttccatgcggttcgggtccaagatgatgccgggctgaaatctctttaatgatggagggaagcaggcagacgcgagtgtctcggccatacaagatcag

SEQ ID NO: 149990 - DNA, 58 bp, Homo sapiens
tcggacgcgtctccccaagaaaggtgaaaggtgtagcagtcactcggcctacacccac

SEQ ID NO: 149991 - DNA, 100 bp, Homo sapiens
atgccaggcaaggcgtgcttctggtagccccgtggtttaaggttccatacccatcctcatttggccacaggcccagtgtcaacaccagggggcgccacag

SEQ ID NO: 149992 - DNA, 82 bp, Homo sapiens
gcaccatcctgctcggcgtctggtatctggccaccagcccctcgggttccaagatgcagctactggagacagagttctcaca

SEQ ID NO: 149993 - DNA, 95 bp, Homo sapiens
aatgggctaataatgctggcaaagtggaaaaatgtgcggttggcgtgcagtggtgtgatctcagctcattgcaacctctgcctcccggactcaag

SEQ ID NO: 149994 - DNA, 82 bp, Homo sapiens
ttcactcaagactaaaaactaaaggcctgggcctgagaactgaatcaggtgtccagtgtgaggtgcagctggtggagtctgg

SEQ ID NO: 149995 - DNA, 74 bp, Homo sapiens
ttgtgaagcagcaggcgccaagtgatgaagtggctatgattttggctatatggtaaagttgcttacagattctc

SEQ ID NO: 149996 - DNA, 51 bp, Homo sapiens
ggcttgaagtgtggggagaacttggtgctcagatccacctacttggaaaca

SEQ ID NO: 149997 - DNA, 82 bp, Homo sapiens
cagagtgtcattgacagccaagaaattggagatattgctggtgttgctgatgttacaatcagacagtcctatagactgatct

SEQ ID NO: 149998 - DNA, 110 bp, Homo sapiens
gcaggttcttcatcttcaaaaatgaacagtttggatgaatcttcaagtcatgaatgtaaccagcgcacaatccttctctatggagtcggcaaagagcgtgatgaagcaag

SEQ ID NO: 149999 - DNA, 90 bp, Homo sapiens
ccagaccatggaggagaagaaagcattcatgggacctcctggagaagacgcgcctgctgagccgggcctcgcccgccacccccgctggcc

SEQ ID NO: 150000 - DNA, 100 bp, Homo sapiens
atgcagtggaggccatcaggggccttgataacacagagtttcaaggcttctctgcagaatgtcaaacaaagatcgacacattgattccagctgttcgtcc

SEQ ID NO: 150001 - DNA, 75 bp, Homo sapiens
cccgagaacgtgcgggaagagaagatcatcgagcatttcaaacgagatgcagaggatgctatttatggaagaaat

SEQ ID NO: 150002 - DNA, 98 bp, Homo sapiens
ccactaccccgacatttacacgcgtgaggagctggcgctcaagatcgacctcactgaggctcgcgtgcagcttctcacctggggcgggtgggttctgc

SEQ ID NO: 150003 - DNA, 75 bp, Homo sapiens
gtgctgccgggcagccgggcgctgcggccgggcgactgcgaagatatttggagttcttacaacatggcagacatt

SEQ ID NO: 150004 - DNA, 75 bp, Homo sapiens
ggggaaatggaaggggcctccagggtctgcagacaaggcaggaatgcagtaatagtggccttgtcttcaaaatca

SEQ ID NO: 150005 - DNA, 100 bp, Homo sapiens
ggagaggttaagtgacatgctcaagacaacactgctgttacatggacacagaacagtatgaagaagcagtacgagactatgaaaaagtataccagacaga

SEQ ID NO: 150006 - DNA, 82 bp, Homo sapiens
cgggagcggcggcagcggcggcgcggaggcggctgaggtgcgagccgcaagagtgagccatggagctacgtgtggggaacaa

SEQ ID NO: 150007 - DNA, 50 bp, Homo sapiens
aagaccacagctggtgaacagtccaggctgatcagctgaccgaagaacag

SEQ ID NO: 150008 - DNA, 75 bp, Homo sapiens
ccaaaattgaaaaaatggttgacctcacccaggtatgaaaatgaaagtcttcagaatggaaggaagtcaactgaa

SEQ ID NO: 150009 - DNA, 100 bp, Homo sapiens
caggaagcgatgaaagagatgtctgcaactctaagaaggagctgatgtggaggagcagctgagacagttcaagatgacgaccacagtagccacagactat

SEQ ID NO: 150010 - DNA, 75 bp, Homo sapiens
tggataacactgtacaagctttcaaagtcaatgtatttcaagccaacaacgatgcaactgaggtggttctgaaca

SEQ ID NO: 150011 - DNA, 76 bp, Homo sapiens
gaagtccagagctgaggactgcctgtttgcaggaagcagtcaattatagatttcttcaaaccagcttcaaaacaag

SEQ ID NO: 150012 - DNA, 76 bp, Homo sapiens
tagccctgcagacagaggtgtgctgacgacctgctacaacagaaaaccccatgcatcccagctcaaggtggtcaga

SEQ ID NO: 150013 - DNA, 100 bp, Homo sapiens
ggatattatggctaataacacaacaagtttagggagtccatggccagaaaacttttggggtggtccattatggctgacatgcaaaatctggtagaaagat

SEQ ID NO: 150014 - DNA, 98 bp, Homo sapiens
acactatctcttctatgacggagaatccgtttcaggaaaggatctcatagatcagaacatactggagcctgtaacccgtgcacagagggtgtggatta

SEQ ID NO: 150015 - DNA, 46 bp, Homo sapiens
aggagcaatgagaggcaatcctgacactcatgaggaccatgatact

SEQ ID NO: 150016 - DNA, 51 bp, Homo sapiens
catagacatgcaatgaatgaactaggtactttgaactcaagtaaacaaaag

SEQ ID NO: 150017 - DNA, 100 bp, Homo sapiens
tgacctcaccagggtgaatcctgtgacactagagacaggtggtggaggtggatacagcagtcggagaacatctggcagagacaaatacggaccacctgtt

SEQ ID NO: 150018 - DNA, 87 bp, Homo sapiens
tgttattcagactcgtttctacactggagaactcgtcaaagccatagttgttagaacaggttccccacattggcagacaaaattaga

SEQ ID NO: 150019 - DNA, 75 bp, Homo sapiens
ctcctagaagtccattatgataatcccacttatgaggaagggaaatcctcattgacgattcaatttgttgaaggc

SEQ ID NO: 150020 - DNA, 75 bp, Homo sapiens
ctgccctacatgagctggcagggggagccccaagaagccgtcaggaaccagtgtatgctgatggtagcatatgtt

SEQ ID NO: 150021 - DNA, 75 bp, Homo sapiens
agaccaagccagagccaatggaagaagatcttccagagaataagaagcagaaatgagccgtcagactgctacagc

SEQ ID NO: 150022 - DNA, 75 bp, Homo sapiens
tggagtccgagctgagatccatctgcaccacggtgctgggagatgcagttaaagacttgatgcttcgctttctgg

SEQ ID NO: 150023 - DNA, 50 bp, Homo sapiens
gctggcagatattatcatagttgctgcagcgggtccatatggaatatttg

SEQ ID NO: 150024 - DNA, 75 bp, Homo sapiens
cttgtctctgcacctcctctgtgctgtctctttaagagggagtgcatccgccccaacccttttccccctcgtctc

SEQ ID NO: 150025 - DNA, 100 bp, Homo sapiens
agcggcttatcgaacagagccgggagttcaagaagaacactccagagggaactctaatgatccaggacaaagaagttaccctggagtatgtatcaagcct

SEQ ID NO: 150026 - DNA, 87 bp, Homo sapiens
caagtgttgttaaacacaaaccaccctttaaattttcaagggaaggacagaaaaggcgacggcggattgacagaagtatgattggag

SEQ ID NO: 150027 - DNA, 98 bp, Homo sapiens
ggggaaggcatgagtgacagacccacagcaaggcggtggggcttctcacctggggcgggtgggttctgcaccaccctcccaccctccttcctccgtgt

SEQ ID NO: 150028 - DNA, 111 bp, Homo sapiens
ctggttcaatgccctccgtgcagcccgtctgcagtacctaaaaatggcctttcctgaactcccagagtctgagactcctgcagctgcgaatggagaaggaggagatggaag

SEQ ID NO: 150029 - DNA, 75 bp, Homo sapiens
cttggaacaagcaactggctattgaaaagggcttctttcgccgcacaatccagaagaacctccatcccacctatt

SEQ ID NO: 150030 - DNA, 50 bp, Homo sapiens
ccagaacgtgccatggagacgcttaacgaaccactcacgaattcttgttt

SEQ ID NO: 150031 - DNA, 116 bp, Homo sapiens
ggaagctatgctgaatgaccgccgtcggatggctctggagaactacctggctgccttgcagtctgacccgccacggcctcgtcacgtgttcaatatgctaaagaagtatgtccgcg

SEQ ID NO: 150032 - DNA, 100 bp, Homo sapiens
gtgccgttcctaatcactccccagagaagaaggactctgatttcttcacagaacacactcaaggtgattctgggggcccacttgtctgtaatggtgtgct

SEQ ID NO: 150033 - DNA, 100 bp, Homo sapiens
ctgtgtggatggtactgagggagagccggatcctttcccagaagaatgagaatgagtgacaaatggcctacagctgtgagagcaaatggacatctcctcc

SEQ ID NO: 150034 - DNA, 97 bp, Homo sapiens
gtgcttttatcaaaaagaacccaccaggcatggatgaccaactttgggggaatcccggaggcaagacacttgaggagaggcgctccagcctggacgc

SEQ ID NO: 150035 - DNA, 75 bp, Homo sapiens
ggtgctgacaatcgagcaaggaaacctggggcatcgtgaacgaagtgcgccagtccatgcagctgatgctgagcc

SEQ ID NO: 150036 - DNA, 88 bp, Homo sapiens
gggaagatggcggcagcggcggcggcggctgcagaacaggttagtagcaaagatgaagattttcttgacctttctgttgatgtggagc

SEQ ID NO: 150037 - DNA, 75 bp, Homo sapiens
ggaaactaaaaacgcatctatctaacgtttaccctagcaaaccacctacaacacagcagtcccctcaggatgagc

SEQ ID NO: 150038 - DNA, 100 bp, Homo sapiens
gttcagttttcttcagaagaaggacttcggaatgcactacaacaggaaaatcatattatagatggagtaaagggagtggttttcagagacatttcagaaa

SEQ ID NO: 150039 - DNA, 76 bp, Homo sapiens
aaagttggtcagtctcgcactgggttactgaagctaaaggagatgtttaactccaagtttggatctattcccaagt

SEQ ID NO: 150040 - DNA, 82 bp, Homo sapiens
tggtggccaagtatgcgcccagcggattctacattgcctccggaggtactccaaagattcaggtttactcacgtcatccagc

SEQ ID NO: 150041 - DNA, 75 bp, Homo sapiens
ctgtacccatggtttaaacaggactggctacctcatttgcagattaatatttttggggacagatttgtgatgctt

SEQ ID NO: 150042 - DNA, 90 bp, Homo sapiens
gctgcgccacattgtggatgaggtcaatggattaataagtctatccttcactggagtctgatgatgatgaccctgctttgaaatctcgac

SEQ ID NO: 150043 - DNA, 75 bp, Homo sapiens
gaaagatgaaaatgcaactttagatggcggagatgttttattcacagggaaatcctcattgacgattcaatttgt

SEQ ID NO: 150044 - DNA, 75 bp, Homo sapiens
gtagcccgagtcggtcagcgccggagttattttaccaagaaaatggtttgcacgactttgaacatatactatcca

SEQ ID NO: 150045 - DNA, 100 bp, Homo sapiens
gataatcaagtgattcactgggaaatagaggataatcaggtggataattactgtaccttcctcatggaaaaagttttatttaaagtgttatttctcattg

SEQ ID NO: 150046 - DNA, 100 bp, Homo sapiens
gtgagttcaacatgatagagcagagtggaccaccccatgaacctcgatgacctcattccacctatggacttgcttgaaatgattgtcacctggatttttg

SEQ ID NO: 150047 - DNA, 100 bp, Homo sapiens
cgggatccttcagaagagattgagattcttctgcggtatggccagcaccccaacatcatcactctgaaagatctccagaaatcctgaactatgatcccat

SEQ ID NO: 150048 - DNA, 75 bp, Homo sapiens
cgaactgttgtaagaggtcagacgaacgtggggcaggatggacggcaagttctgcggcatgaggaatttgaagaa

SEQ ID NO: 150049 - DNA, 137 bp, Homo sapiens
ctgatctgagctcagacctgccaatttaccagagataattgataacaccctgtaacagctgacatcgagagtaaacatgaggttacgatcctgggaggacttaatgaatttgtagtgaagttttatggaccacaagg

SEQ ID NO: 150050 - DNA, 100 bp, Homo sapiens
cgctctcgtctggtttgatcacaagacgggcaagtgtgaagcctcagtttaggtcatctggtggttcagaacactcaacagagggctctgtatccttggg

SEQ ID NO: 150051 - DNA, 100 bp, Homo sapiens
aaggaagatcaggacctggacaaaatgtttggagcctggcttggagaactagacaaactcactcagaaagaatcttcaagagggagacatagggaaaagg

SEQ ID NO: 150052 - DNA, 83 bp, Homo sapiens
cttgtttgtcccggccgtaaaacgattttctgtgtcgtttgcaaagcatccgactaacgacatggccgcttaccaacaagaag

SEQ ID NO: 150053 - DNA, 76 bp, Homo sapiens
gcgtccggaacagtggaaggaaatagcaacagtggtgaaggatgatgatgctgaagctatccttgctgcagacttc

SEQ ID NO: 150054 - DNA, 51 bp, Homo sapiens
cagcactgactttcagctatggaatcgtgagctgaagagacgcctgaaagc

SEQ ID NO: 150055 - DNA, 100 bp, Homo sapiens
acacgtgcggagagccgactgacactcgcagccccctcgggaggcccgacgcgactgggcccctcaggtatggcacagtcacaagggtgggtgaaaagat

SEQ ID NO: 150056 - DNA, 100 bp, Homo sapiens
gcatctagtctttccgcttcttgaatttctctctgtaaaggaggtctcctctgagcctccggcctccataagacccaaaacagatgacacctcttcccag

SEQ ID NO: 150057 - DNA, 85 bp, Homo sapiens
tggggccagggaaccctggtcaccgtctcctcaggtatcgagaaccttccctgcgaacttcagaggaacttccagctgatgcgag

SEQ ID NO: 150058 - DNA, 73 bp, Homo sapiens
cagatggacctcattcagacagaatctattaccttgaaccctgccatcagcatcactgaaaacgtgctgcatt

SEQ ID NO: 150059 - DNA, 75 bp, Homo sapiens
gagctgaccacaactacagataacagagtatgcaagaggaggagacctgcacaactggatacacccagaaatgtc

SEQ ID NO: 150060 - DNA, 74 bp, Homo sapiens
accatcaacagatgcccctgataaaggatacgttggatgatgatgctgaagctatccttgctgcagacttcgaa

SEQ ID NO: 150061 - DNA, 75 bp, Homo sapiens
cgccgcgccaggccggggggcgtggcttgttgtcagaggccccaaatgaaaaactcttcttcgtggacactggct

SEQ ID NO: 150062 - DNA, 132 bp, Homo sapiens
acagaagaggattgcacggaggagctctttgacttcttgcatgcgagggaccattgccccggtcgccctcacccctcggaaaataccatagcgaccttgcctgcactcctgggtctccgccgccttgcagga

SEQ ID NO: 150063 - DNA, 82 bp, Homo sapiens
ctatgtggtggacttggacacgtcccagctctctctgggcatctggaaaggtgtcgtgaaaactacccctaaaagccaaaat

SEQ ID NO: 150064 - DNA, 96 bp, Homo sapiens
agaaggagagagatgttatcatgagggaattccggtcagggtcaagtcgtgttctgatcactactgacttgttggagctggtgactgccctcatgt

SEQ ID NO: 150065 - DNA, 74 bp, Homo sapiens
acattttaatctggaagagtcttgtgatttgggagacagacttcaaatcatcccaacaccagagaacactaaat

SEQ ID NO: 150066 - DNA, 100 bp, Homo sapiens
cagaagtcattttaaactatggacgactccgaggaacattgaggaagtgcacggctgtctataacgtgctgccgggtctcaggatggaggagtgaagtct

SEQ ID NO: 150067 - DNA, 100 bp, Homo sapiens
tagccaaggaaaaaaagcagagaggagcggggagcaatgcagaatatgagttggaagtaaagagggtgcaagacattctttcgggaatagagaaaccaca

SEQ ID NO: 150068 - DNA, 100 bp, Homo sapiens
ggaggcgggacatctccagcaccctcatcgccctggccgacaagcacgcaagtctccgatgatgacctcgacccatcctttactgtctcaaccagcaaag

SEQ ID NO: 150069 - DNA, 97 bp, Homo sapiens
agaatttagcatctattgggatgtcgattgcactttactgggggatttgcctcagatggagttacagacccctgtaaaagagcccaacagtgaaaat

SEQ ID NO: 150070 - DNA, 96 bp, Homo sapiens
aggctggttccggagggggcggagtagccctgaagaaagagatcggattggtcagtgcctgtggtatcatcgtagaagaagatagtggtgagctgg

SEQ ID NO: 150071 - DNA, 76 bp, Homo sapiens
aaacaccacagtactatcgtctatcattggatgaagtggctccggagattgtgcaccggcacagacatgaagctgc

SEQ ID NO: 150072 - DNA, 151 bp, Homo sapiens
cgaagagtcgtgagggggtgacgggttaagattcggagagagaggtgctagtggctggacttgacctggaaaggttggaatagactttacagcctccaacgggaatcccctcgacccttcctctttgcactatatcaaccctatgggcacc

SEQ ID NO: 150073 - DNA, 90 bp, Homo sapiens
tgtctacctggtaatagaggacttgaagcagaaagcaagtgaatacgagtcagaagagacgagttgtactgctgtcacaggaaatggacg

SEQ ID NO: 150074 - DNA, 87 bp, Homo sapiens
tcaactttcccagaagttgttctaacgctgcctttgctttaaaacagtattacttgcggttagtggatgacagatgtgtggtgcacc

SEQ ID NO: 150075 - DNA, 51 bp, Homo sapiens
tgacacccaggaggcatttgaagttccaacagtacaatgtagattataaac

SEQ ID NO: 150076 - DNA, 75 bp, Homo sapiens
atagaaaacggcgagagtgggcgagaacgtccactgcgggccggcgaaagctgtttgtgaatagcacaatggaag

SEQ ID NO: 150077 - DNA, 86 bp, Homo sapiens
gtggcttacagacgctgccagcatcgccgccgccagacctgcctagagctggaacgttacctccagagcgagccctgctatgtttc

SEQ ID NO: 150078 - DNA, 74 bp, Homo sapiens
aacagcatcttcgactccttcccgacctactcgccgaccttcatccgcgatgcctgctctgtgcctgtatctga

SEQ ID NO: 150079 - DNA, 98 bp, Homo sapiens
ccatgaagagatggtggattctcactgagttttgactagcggaagaaaagtttggaaattttagcattcaggtgccaggaatgcagatgggacagcca

SEQ ID NO: 150080 - DNA, 75 bp, Homo sapiens
cgaaagctgcccttccaagcagtcacagctcaacttgcaggtggcgggacaggcttcattgggacagccctaacc

SEQ ID NO: 150081 - DNA, 96 bp, Homo sapiens
ggtgtctcgtcggaccctttggggctcagtggagacctcaggatatcattgtgtttgtaattggaggagccacctatgaagaggctctaacagttt

SEQ ID NO: 150082 - DNA, 82 bp, Homo sapiens
gaaaccatttaaaacaggtctaaaggtcctcagtttgcagaagacccctcccagttgccttcaactcagttaccttcctcac

SEQ ID NO: 150083 - DNA, 75 bp, Homo sapiens
ggggagccgagctggagctgccgcggcgcagccagggctgaagaagatgcagagcagcctgaagctggtggactg

SEQ ID NO: 150084 - DNA, 129 bp, Homo sapiens
aaatcgacttcggtttcagttggagttggaatttgtgcaatgtttagccaacccaaattaccttaattaatgtgacagtgatgataacatgggtgccaaaaatacttcaataggagaagaatttatatc

SEQ ID NO: 150085 - DNA, 100 bp, Homo sapiens
ttgactggaaacaatggcatttacagaaagagtcaacagcagtggcaacagaaatgagccgtcagactgctacagcattacctaccggtacctcgaagtg

SEQ ID NO: 150086 - DNA, 100 bp, Homo sapiens
gggagaagcgagccgccccgaagagagcaggatgagactccagcccttccccgcgcacgtcagtcatatgaaattcggatgctggataatcggaaaatgg

SEQ ID NO: 150087 - DNA, 83 bp, Homo sapiens
gacacaggcacgactagaagcattgctagaagcagcaggtgctaaaatgatgtattttctggacaagtcaaggcaggagaaag

SEQ ID NO: 150088 - DNA, 90 bp, Homo sapiens
ggctgaggcggcgcggcagcggagggacggcagtctcgcgcggtgaaaggtgtagcagtcactcggcctacacccacagcatcgaccttg

SEQ ID NO: 150089 - DNA, 100 bp, Homo sapiens
gcagatctgtccttaggaaagatatttaccaacactggccaaaagaagaccctagacaagaaagatggaagacgaatgtcttttcagaaacctaaaggga

SEQ ID NO: 150090 - DNA, 50 bp, Homo sapiens
tagtactgtgagcatgaaccttgaggatgagctttctgatgttagccaag

SEQ ID NO: 150091 - DNA, 80 bp, Homo sapiens
catgtgtgtgcgcgcgaaggagcggaagaatggcagtgctcaaactcaccgaccaggaagaaggtagataatgactataa

SEQ ID NO: 150092 - DNA, 100 bp, Homo sapiens
gcaagccccagcatcatcccccggctgagggccattcgccgtttctctggaaacccccctggtaagtgtggaggaggcgggacactctgacccaagacga

SEQ ID NO: 150093 - DNA, 90 bp, Homo sapiens
acagacaagaatatgaagacatagctgtgaagctgggaactgatctagaatagagggagccatggatttgctgcgggagctgaaggccat

SEQ ID NO: 150094 - DNA, 74 bp, Homo sapiens
gagttggaattcaagaatgatgaaactgtgtttactcctggcttgggggcattaggaagcactggaggctcttc

SEQ ID NO: 150095 - DNA, 75 bp, Homo sapiens
ggtgaatttaaaggagcagccctggtgtcacctatcagtaaaagaactacctgaagaagcaggtcacacccctct

SEQ ID NO: 150096 - DNA, 82 bp, Homo sapiens
tgatcccacatctggaatctggaatgaaatcttccaagtccaaggatgtaaattgaagccaaggaagcttgtgattggctac

SEQ ID NO: 150097 - DNA, 100 bp, Homo sapiens
tgaggttggacgtggggaatttctcctggggctcagagtattccacctgctcctacgaagcccgactttgatggtcctcgagagaagatgcagaaactgg

SEQ ID NO: 150098 - DNA, 100 bp, Homo sapiens
gacaatgaattttactttcgctacccaagtaactgctggttccttgcagctgccgcctcccttactctgtatccccggctcctgcgccgggtggtccctc

SEQ ID NO: 150099 - DNA, 49 bp, Homo sapiens
caagtccaaaccgaataggattaggaacttccagagagtcaatgcaaag

SEQ ID NO: 150100 - DNA, 83 bp, Homo sapiens
atatggcagaagtgaagtcaatgttccgggaagttcttccaaagcaaggaaaggaaacagattcattgtctgtctgaggatga

SEQ ID NO: 150101 - DNA, 90 bp, Homo sapiens
gtaactttgcccgagcatatgcacagggtatcagccgaaccaagtactgggaggtgcagaacgacagcaacccttcagcttcccagccta

SEQ ID NO: 150102 - DNA, 98 bp, Homo sapiens
agacttggaccttgatggaaatgagagcccattggccctattgatgtctaacggcagagtctctggagctgatcgccacagcagcagagcactcgaat

SEQ ID NO: 150103 - DNA, 80 bp, Homo sapiens
gggatgccttgaaccaggccacgagccaggtggagagcaataagactttgaccccgacgcaggcttcagtgattgccgcg

SEQ ID NO: 150104 - DNA, 83 bp, Homo sapiens
ggggcgtccccggccgggacgcgggtcgcgtcgttgtcctccgcgagcgtccggattgcagccggcccgctggggctggaggc

SEQ ID NO: 150105 - DNA, 75 bp, Homo sapiens
ctttggggaaatgcgtgcactgcgtccctctagagggtcgtctactcaatttgagctgctccacagttcccacct

SEQ ID NO: 150106 - DNA, 50 bp, Homo sapiens
tccaaattcgcctccatctgtaccatggcagcctgcttctgcaaagtggt

SEQ ID NO: 150107 - DNA, 101 bp, Homo sapiens
ggcacgattctccctctcctagaggcgagaggagccatcaaaactcgatcaggatgttttggccgctcttgaatgtgcagacgtcgacccccatcagttcc

SEQ ID NO: 150108 - DNA, 82 bp, Homo sapiens
ggggtgaccaacaccattgactaccacaaaaccttggcgctcctctgctgaacagcccctgggcgggagactcaggaagctg

SEQ ID NO: 150109 - DNA, 98 bp, Homo sapiens
ggaggaggacctgctggtggtgcacacgaggcgctatcttaatgagctcaaggcccacgaggactcggagaagctgcgggagatcgtactgcccatgg

SEQ ID NO: 150110 - DNA, 100 bp, Homo sapiens
cgggtgcccctggagatcccggaggatcgggagaaccccctggagctgcgtctgtcgggctctggacccgcggagctgagcgccggggaggacgaagaag

SEQ ID NO: 150111 - DNA, 73 bp, Homo sapiens
ctgactcctgcttcccgggtgttgctcgtgatacatgtgctgcccttttgttctggacaaagatggagtcagt

SEQ ID NO: 150112 - DNA, 74 bp, Homo sapiens
tgaggacacacccaggaaaagactcaggacggacaagcacagtcttcggaagatatcccgatgtctgtgggtat

SEQ ID NO: 150113 - DNA, 100 bp, Homo sapiens
gctcgcccccaagatgatgaagaggcagctgcaccgcatgcggcagctggcccagacgggcagcttgggacgggtatcagctttcccagcctgacgctgc

SEQ ID NO: 150114 - DNA, 100 bp, Homo sapiens
ctttgctcgaggtttggagccggagcggattattggagctacagactccagtggagagctcatgttcctgatgaaatgccctggaagaaagcgggacttt

SEQ ID NO: 150115 - DNA, 99 bp, Homo sapiens
gaagatgagtgagcttgaccagttacggcaggaggccgagcaacttaagaaccagattcgaatcactggcgttatccttcttgcagttggcatttgggg

SEQ ID NO: 150116 - DNA, 97 bp, Homo sapiens
ggcgacagcagccaggagtcatgagcgacagcggcgagcagaactacggcgagcgggacaatgaaaagcgaaccccattgcacgccgcagcttacct

SEQ ID NO: 150117 - DNA, 89 bp, Homo sapiens
cttccgtactgccagtgtcagcatcaaccagacagagcccccatcacctcaggcttctcagttcccttagccgtcttactcaactgccc

SEQ ID NO: 150118 - DNA, 126 bp, Homo sapiens
cacttctgggctctgtcagccatgtgactgtagtccacatggagctctcagcataccgtgcaacagggtgataaaagaaaatgtggctgaagttacccgaagttcagcttgcagtgtaattcagaa

SEQ ID NO: 150119 - DNA, 100 bp, Homo sapiens
atcttaggaggaggtgatgtacttatgaatctatgtactttcatcagcgcggccagtaagtttgcacagctccagtgtctgtggaagacgagagactcag

SEQ ID NO: 150120 - DNA, 90 bp, Homo sapiens
attcacccatactgactagtttcacatctctttggtcaaaatgcagatcttcgtgaaaacccttaccggcaagaccatcacccttgaggt

SEQ ID NO: 150121 - DNA, 88 bp, Homo sapiens
gcgctcgatccagcaccatggggaagcgggacaatcgggtgaacgctttaccctgtacagctctaaaaaccttagacaagcatggaat

SEQ ID NO: 150122 - DNA, 100 bp, Homo sapiens
ctgaaagaacatggtccagaaaacattgtaatggccatcgctggaaacaagtgcgacctctcagatattaggactgatcctttgaaatactccagccatg

SEQ ID NO: 150123 - DNA, 100 bp, Homo sapiens
tcatggagatttcagactagataacatagttttccaccctaaagaggagtcggatggtcagggctgccctttctgtcgttgtgaaataaaaggaactgag

SEQ ID NO: 150124 - DNA, 75 bp, Homo sapiens
tcctcccttcgctcgcaccatgttatgatggttaacggtgatcacaggataggtatttttgccaagagagccatc

SEQ ID NO: 150125 - DNA, 100 bp, Homo sapiens
caagaggagtttgaagctacccttggggcatctgatcctaattcccttgctgatgatattggagtacttgattcttcagaaaacctccaaagtagatgtg

SEQ ID NO: 150126 - DNA, 75 bp, Homo sapiens
tacgcaagggaccagctgaggacatgtcttccaaactcaagtttttaacatgtggaactaaacttctatatcttt

SEQ ID NO: 150127 - DNA, 110 bp, Homo sapiens
tagagggggtcgacagtgactaccatgacgaaaacatgtactacagccagtcttctatgtttccacatcggtcagaaaaagatctaaaagatggcggcaaggcagcccag

SEQ ID NO: 150128 - DNA, 86 bp, Homo sapiens
cagggacatcagtggagccttctcagacccacagatcttgattttgccagccttgctcgaggttttgccctgctgaggatgcccaa

SEQ ID NO: 150129 - DNA, 75 bp, Homo sapiens
tcaaaagcagtgcaactggctcagtattcacagggaaagctgtgagggactgcatcaaaacatgtaaacaaggac

SEQ ID NO: 150130 - DNA, 83 bp, Homo sapiens
caatatctgtcttcggtggactccttcggcagtccacccaccgccgccgcctcccagctgatccaccttgagatcaagccggc

SEQ ID NO: 150131 - DNA, 75 bp, Homo sapiens
gtggctcccgcatctgcctccctgccccagcccatcctctctaaccaagcagcctcccgcgacgatgcccctcaa

SEQ ID NO: 150132 - DNA, 74 bp, Homo sapiens
ctccgaagagctgccgcgacgcccggcccgcagggcaggtatccacaaattacccattatcaaaaacaaatagt

SEQ ID NO: 150133 - DNA, 104 bp, Homo sapiens
cccagaccctggagcctcagttggaagcagccgatccagcctgcggagcctgtggggcagagaaacttgcccaggccaaagaagagaacgtgggcttacatcag

SEQ ID NO: 150134 - DNA, 98 bp, Homo sapiens
ggacccggacccaaagtgccatgtctttaatcatacacaagctgagggagaatgtctttcaagagcatcagacccttaaggagaaggaacttgaaaca

SEQ ID NO: 150135 - DNA, 73 bp, Homo sapiens
aagaatttcgatctccgccctggggtcattgtcagggctgatgcaaatcgtactgcccctagtggaagtgaat

SEQ ID NO: 150136 - DNA, 90 bp, Homo sapiens
ttggtgatgacccatgctctggagtggcccagcctaactgcccagtggcttccagatgtaaccaggtctgggacctgcgccagaacaagc

SEQ ID NO: 150137 - DNA, 75 bp, Homo sapiens
ccgcgcctgggctgccggcacttcgcggcagcttcaaggttactgactttttatgatgtttggtggctatgagac

SEQ ID NO: 150138 - DNA, 105 bp, Homo sapiens
tgcagatggccaatgagaaagccctgaagcagaagggcatcaccgtgaagcagaagagtgccctctggtggtcagaagatgctgtgctgtctcgttaggatgaat

SEQ ID NO: 150139 - DNA, 100 bp, Homo sapiens
caaccagccattgctgtttactggatacctggtacgcagtgatccgattcaaccagtacttcaaggtgaagcctcaagcgtcagccttggagatgccaaa

SEQ ID NO: 150140 - DNA, 100 bp, Homo sapiens
ccgagtggaggcgactgggggctgaagagcgcgccgccctctcgtcccactttccagattcgctcagcttattttgagttagtctctgcattgtgccagc

SEQ ID NO: 150141 - DNA, 80 bp, Homo sapiens
ttttctcagatgttggatatttgcttggaaaaacgtgtgggtacgaccttgtcacccacaaaagctgtatataatgccag

SEQ ID NO: 150142 - DNA, 74 bp, Homo sapiens
cccagagcattttagatgatgttgccatggtcagtcaggagatcctagagctattaaatactacaacagccaag

SEQ ID NO: 150143 - DNA, 83 bp, Homo sapiens
attacgccccctatcctatccgcaaacacatttgaagacacttcgtcacccttgcttgctaagatttttatcttgtactgtgg

SEQ ID NO: 150144 - DNA, 79 bp, Homo sapiens
ctggcctggtggacctctgctgccgcctgggcagatttattgggccaaagatatcgtcttcctggtaacagaacatgac

SEQ ID NO: 150145 - DNA, 90 bp, Homo sapiens
gagcgaggagtctctgtcatcgcaggccagcggggctggtggcgacctgcacatgacccagtttttccgaggcaatctggctggcttaac

SEQ ID NO: 150146 - DNA, 133 bp, Homo sapiens
gcggagcagagtcgactgggagcgaccgagcgggccgccgccgccgccatgaaccccgaatagtggtgaagcacttgcccaaagcccacatcttggcctgcgctccatccaactcaggggctgacctactctg

SEQ ID NO: 150147 - DNA, 78 bp, Homo sapiens
cggaaagtgtataacaaattggatagcaaagccattgctaagcaggacacagcattgttggttttgccatgtactatt

SEQ ID NO: 150148 - DNA, 100 bp, Homo sapiens
ggaatggccgtcttcgggttcgtcctcttcttggtgctgtggctgatgcatttcatggctatcatctacacctccagcagccacatttgcaaccttggcc

SEQ ID NO: 150149 - DNA, 100 bp, Homo sapiens
ggcgccgggaccggctgcagagacaggcgttcgaggagatcatcctgcagtatcgttctgaagtctccagcctgagttcagaggcccctgagacccctga

SEQ ID NO: 150150 - DNA, 50 bp, Homo sapiens
caatatccaggagctcaatgtctacaggaaagagttcctagagagagaag

SEQ ID NO: 150151 - DNA, 100 bp, Homo sapiens
aaaagagcatgtaccttgatattgaatgaaatgggtcctgatgaatatgaagagatggaagaagaggaggaggaggaagaggaggaagacgaggatgatg

SEQ ID NO: 150152 - DNA, 100 bp, Homo sapiens
ccacaaagggacctgatgaagcgaagatcaagctatccgtggtcctgaaccagttatgtgtgttgcatgagaaaacgccagtaagtgacagagtcaccaa

SEQ ID NO: 150153 - DNA, 75 bp, Homo sapiens
aagaagaatttcgatctccgccctggggtcattgtcagatgacctgagaattaatttatggcacttagaaatcac

SEQ ID NO: 150154 - DNA, 100 bp, Homo sapiens
ctggttggcccagctccttggggtttccggctgcagggcggtaaggatttcaacatgcctctgacaatctctagtaatgtctacacaaggaagtacagga

SEQ ID NO: 150155 - DNA, 88 bp, Homo sapiens
gctattcttcttatggccagagccagaacaagtgatggtgtgcaacaaacaacctacctcgcccagcagtactgccatgaagcaataa

SEQ ID NO: 150156 - DNA, 90 bp, Homo sapiens
gggagctctcgaggcaacgccggggcgcccgaggtctggaaggcgcaggcttcatatggggagaaattaaacagatgtgggatggcggac

SEQ ID NO: 150157 - DNA, 74 bp, Homo sapiens
ccgctggcagccgcggatctcaccgccgctcaggagacggtctcgccacattgcccagactggtctgaaagtct

SEQ ID NO: 150158 - DNA, 51 bp, Homo sapiens
atcaacccagtggagtcccggctggcaaatacttccctggacaagaaagcc

SEQ ID NO: 150159 - DNA, 98 bp, Homo sapiens
ccgtaaccttgtggagaagaccccggcgctggtgaacggtggaattctactaagtatcagtcggccctacaagacaaagcccacccacggcattggaa

SEQ ID NO: 150160 - DNA, 100 bp, Homo sapiens
gtctgtacctactgatggtgctgtaaccacctcacagattccagcttcggaacaagagaccctgaaatggctcagggaactgttggaggcgtgttcatca

SEQ ID NO: 150161 - DNA, 82 bp, Homo sapiens
caggaatatcgatacaacaccaacagacaatgcagatcttcgtgaagactctgactggtaagaccatcaccctcgaggttga

SEQ ID NO: 150162 - DNA, 101 bp, Homo sapiens
agtctgccggcggagaatataaggtccatggaaagaaattattccttagatttgatctagatgaagaaatggggccccctggcagcagcccaacaccagag

SEQ ID NO: 150163 - DNA, 83 bp, Homo sapiens
cttcgagtgacccgggtgccgaggagcgggaagagttgctggggctaagtcctatcagccatggaaacaccattgctctcttc

SEQ ID NO: 150164 - DNA, 74 bp, Homo sapiens
ggcaccactgaagtgaccgaatgagacaagttggatggcttgaggactggtactaaaaggaaacgtgactggga

SEQ ID NO: 150165 - DNA, 98 bp, Homo sapiens
gccgtcagcacctcgttcggttgcagggtgaacctggcgatttgcttgcagattgtgaaaactgctgagagagacttgcaatccagtcacataagtat

SEQ ID NO: 150166 - DNA, 82 bp, Homo sapiens
ggagattgtcttctgtgctgtcacctcgaatgagcaggtcaaggtgagaatgagatggtgatcatgagacctggaaacaaat

SEQ ID NO: 150167 - DNA, 50 bp, Homo sapiens
tctccatattctcaggcacagagaaagatattaggttgaaaaagctggtt

SEQ ID NO: 150168 - DNA, 75 bp, Homo sapiens
aacatgaggaaggtaactaaaggttcatgtgtgcccagctgcccaaccccgtcctggacagcatcagcatcatcg

SEQ ID NO: 150169 - DNA, 100 bp, Homo sapiens
gaagaaaggcggaagcaggaagaattgttacgcaaacagagctccaccttctccagccaagccccggaccccaaggtgaccagcatgttcgaactgagtg

SEQ ID NO: 150170 - DNA, 100 bp, Homo sapiens
gccgggctggctgcggccgccctgggccgggccccaccggacgatcctgaggaggatgaaggggctggccctggaggccgagagtgagctggagagacaa

SEQ ID NO: 150171 - DNA, 90 bp, Homo sapiens
gtcctttatatagaagggagagtaggtgtgattggcctctctctggctcagcatacatctcgggtccttgggattgaattgttggagcag

SEQ ID NO: 150172 - DNA, 93 bp, Homo sapiens
tgccagtggcggattacttcaagcagtggattaatctgaaaaagttctgcctcctggagacgctggtcacagccattgtggatgaggtgggga

SEQ ID NO: 150173 - DNA, 100 bp, Homo sapiens
gagcgcaggcctcgtgccgttacggccatcacggcggccgcagtggcgtcctggagccctcctcaggctccaccgaggacaccgcgtccagcttgtgtgg

SEQ ID NO: 150174 - DNA, 75 bp, Homo sapiens
ggtaacaaacgagggttcccgggattggaccgacgcagccatgtcttttagagattcctgccaaaaattctacca

SEQ ID NO: 150175 - DNA, 75 bp, Homo sapiens
ccgcggccctcagggcgtggaagacggggacaggaagtttgtttgcctgaatgacaacattgaccacaatcataa

SEQ ID NO: 150176 - DNA, 99 bp, Homo sapiens
ttgtcgccagaaggaagatggcggatctggaggagcagttgtctgatgaagagaagaggttggaaagaaccatgactgtattcaggaaggcacatgaac

SEQ ID NO: 150177 - DNA, 75 bp, Homo sapiens
actaaggcggaggaactgagacgtttcgaattccagtgtgaagattgctcctggagcagttgtatgtgtagaaag

SEQ ID NO: 150178 - DNA, 74 bp, Homo sapiens
ctctctttctggcctggaggctatccagctccagaatgacagggtccagaaactggcgagccacgagggacatg

SEQ ID NO: 150179 - DNA, 88 bp, Homo sapiens
aacccagtgttatcatcctactcagtctgttctccactcctcatgctttctacaagttctgattaaagtcagaaatagacacaatgat

SEQ ID NO: 150180 - DNA, 101 bp, Homo sapiens
atacaaccatgatctcttccaaagaatgccacagaatcaggggaggcatgcttcagactgtttattccatggctccgttccctttcccacaattggcagag

SEQ ID NO: 150181 - DNA, 100 bp, Homo sapiens
tcagatgactcggatttcagccccagtgagaaaggtcaccgcaagtacagagagtacagccccccatatgcgccgtgttctaagaacggaagcatctggg

SEQ ID NO: 150182 - DNA, 90 bp, Homo sapiens
atgaagagagagcagagacagctcgtctggattaagaccctccatgcccagattattgagaaggatgccatgatcaaagtactccagcag

SEQ ID NO: 150183 - DNA, 100 bp, Homo sapiens
gactttcacaataagagcagaggatggaacacttcagtgcattcaaggtgcttgaggaatccaaagccctcgtgcgctgcaacatgaagatggagctgga

SEQ ID NO: 150184 - DNA, 100 bp, Homo sapiens
ctgcgctcctgcatctgcctccccatgtaatagcctgcagctggtgttttgagaagccctactgctgaaaacttaacaattttgtgtaataaaaatggag

SEQ ID NO: 150185 - DNA, 82 bp, Homo sapiens
tggatggacttgattctgatgagagaacccttaggagaaatcttgagagtggacagcaattgtgaagatcgccagagagttc

SEQ ID NO: 150186 - DNA, 100 bp, Homo sapiens
atatccaaccctgaagatatttagagatggtgaagaagcaggtgcttatgatggacctaggactgctggcatccgtgtcattctggaccttactcccaac

SEQ ID NO: 150187 - DNA, 83 bp, Homo sapiens
gagctctgatagttgttccttgtgcagaagatgtggaagatgtgaaatttgtcatcaattatgactaccctaactcctcagag

SEQ ID NO: 150188 - DNA, 98 bp, Homo sapiens
tggccgcctccttctgtgacgatggagctcttgaggcctcctgatcacttgccacgtggcacgcatccctctgccagccggatacagagaagagattg

SEQ ID NO: 150189 - DNA, 100 bp, Homo sapiens
tcccgctgcagccgagatgccgggggagcggggccttccacaccccctccgtgggtgtgtggctgagtcatcactagagagtgggaagggcagcagcagc

SEQ ID NO: 150190 - DNA, 88 bp, Homo sapiens
ccagatctacctgacgggcctgcgagggttgaagattgtgaagcaatagcctaaggtgaagtcctgggctttgaaaatctcgtcttta

SEQ ID NO: 150191 - DNA, 96 bp, Homo sapiens
gaatgctagctggatttattacaacattatcattggctaaaaagaaaagccctgaatggttcaataaggcctggcaaaaagcacgaagtgatgggt

SEQ ID NO: 150192 - DNA, 78 bp, Homo sapiens
gccgcgccccacttgctcgtgcactttacacacatgagagtaatcaagtcagaggattatatgacttttatctgccta

SEQ ID NO: 150193 - DNA, 100 bp, Homo sapiens
ttttcctcttacccccccttctggagcggttgtgcgatcagatcgatctaagatggcgactgtcgaaccgatttgctttgaggtcacattgatatgaaat

SEQ ID NO: 150194 - DNA, 75 bp, Homo sapiens
tttcatgaagatggcgccaggacgaaggccctactgggcaagatcgtaaagctgaaaattgaaatcatgaaagta

SEQ ID NO: 150195 - DNA, 50 bp, Homo sapiens
agcagatcgtgaggaggaagctggtgtgtggatacataagtaaatgctac

SEQ ID NO: 150196 - DNA, 75 bp, Homo sapiens
gtgagttagtggtggacctgtttgtgcgcacagtgctggtctgcctgacatgtactccaaagattcaggtttact

SEQ ID NO: 150197 - DNA, 100 bp, Homo sapiens
gagatcctggagagcctgcaggacggcgcggcagagtccccgtacgcctacagtaacggaagaagacattgtcttggagaacacttggctcggatggaaa

SEQ ID NO: 150198 - DNA, 75 bp, Homo sapiens
accagcctgccaagatgaattgccttgaaggagcccggtgatgctgcgaaggctgtgaacaggggaggcggcact

SEQ ID NO: 150199 - DNA, 100 bp, Homo sapiens
ggcggaaaaggacgcaaagttctccggcgagaagtgatccagttgagtctgccagaagatcagaaactaagcatcactgcagcaactgtgggacaaagtg

SEQ ID NO: 150200 - DNA, 98 bp, Homo sapiens
gtggacggcaagtccttccccagcgagcttcacgtagctcactggaattctgcaaagtactccagccttgctgaagctgcctcaaaggctgatggttt

SEQ ID NO: 150201 - DNA, 87 bp, Homo sapiens
ggagccagccttcaatgtgtcctacaccaggcagcccccaaatcccggcccagaatctgtctatgatcttctcccaaaggagttaca

SEQ ID NO: 150202 - DNA, 100 bp, Homo sapiens
cggcgcagccccaaagcgagcgaagctagggtcgccgccactgccgcaggaggcgtgagagccccacagtcttcgttataacctcacggtgctgtcctgg

SEQ ID NO: 150203 - DNA, 48 bp, Homo sapiens
ccgtattttaaaggtgatgaaaggctggaggagattgatggattcttt

SEQ ID NO: 150204 - DNA, 100 bp, Homo sapiens
aaaatcagacctggtcaactggttcaaggcccatagagggccaggaagtaaaatgctcagcgttcatgatcccattgaagataccacgctgcatgtgtcc

SEQ ID NO: 150205 - DNA, 100 bp, Homo sapiens
aaaaaaccacaaatgtttttctgttttgcctgaatacatgatttaaacaagagatttccacagaaggtactacattaaaccttctgaagtttcctatttg

SEQ ID NO: 150206 - DNA, 82 bp, Homo sapiens
gttagcccgtcagtccctgctctgtgcgcgcctccatctgggccatggatggcattactctactgactggcagagacaggag

SEQ ID NO: 150207 - DNA, 75 bp, Homo sapiens
gcacttgttgcagaaacagccaagtgggacacagcaggccaggaaagatttcgaacaatcacctccagttattac

SEQ ID NO: 150208 - DNA, 83 bp, Homo sapiens
tcctcatcgacaagaacggctgcgtggtgaagcgctacggacccatggaggagcccctggattatatctgtccaagatgcgag

SEQ ID NO: 150209 - DNA, 90 bp, Homo sapiens
gtgattttttgcctttgttgattaactggacaaattcaggtgtttcaaaatcttgagtgctaatggtgaggcaaaagtattcagaccaag

SEQ ID NO: 150210 - DNA, 50 bp, Homo sapiens
tcgacaaggaagtgaaacaccaatgcagtactatactggcaattgctgga

SEQ ID NO: 150211 - DNA, 100 bp, Homo sapiens
cgcgagcgccagagcttctaccacctggtggccactgtggaggacgagggcaccccaaccctgtcgtcaggatctggtgattttgaagagaaaccacaac

SEQ ID NO: 150212 - DNA, 101 bp, Homo sapiens
ataacttgtgatgagttcaatggtgttccttcctgtgttccagatcatctccctggtaatttaccccgtgaagtacacccagaccttcacccttcatgcca

SEQ ID NO: 150213 - DNA, 97 bp, Homo sapiens
aaaattgaaggtaggcaatagcctggctgagggctcttgctcagcaatctttgtgtggaagatagatgataagcctgtaaaaattgacaagtgggat

SEQ ID NO: 150214 - DNA, 90 bp, Homo sapiens
tgggggtacatcaaagaggatgaggaacgactcctggtccccaagtgtgtgatgctgaaatccaggggaagccggggccacgtgagattc

SEQ ID NO: 150215 - DNA, 96 bp, Homo sapiens
cagcgcctgctgcctgagcccgccagcgacgtgcgcctcgggagtcggcctgtgagattccagagtcattaaaaagtatcacatggcagagattgg

SEQ ID NO: 150216 - DNA, 100 bp, Homo sapiens
agcgatgccacgggagatggaaccaaggagaaaccatttaaaacaggtctaaaggtcccgagcagccccgcccaacatggacccagacccccaggcgggc

SEQ ID NO: 150217 - DNA, 101 bp, Homo sapiens
aaaaaataaagaggagtccgttaactatctgttatccagaatacacaggcatgtggatatgtcaaatatgtcgacctaggaaaaaaggacgaaaacttcta

SEQ ID NO: 150218 - DNA, 100 bp, Homo sapiens
ggagcagaaacaccgcagtattgtccaaattatttatgatgagaatcggaatgtcacaggtagactaatggttggcctacgttggtggaatcacattgat

SEQ ID NO: 150219 - DNA, 88 bp, Homo sapiens
tgattgcagaattatttcttggatggccgctctacccaggagccttggagtatgatcaggcagctgagtatgtcccagagaaggtgaa

SEQ ID NO: 150220 - DNA, 98 bp, Homo sapiens
gggaaccaaaaaagacaaggaaaaggacaaggggaaatggaaggggcctccagggtctgcagacaaggcaggtaacaaatgtggcaattattttggat

SEQ ID NO: 150221 - DNA, 75 bp, Homo sapiens
caccgcggtgcggacccagcacgcctgggccgggggctgcagcatggttctgggccggagaaggggcgacgttcg

SEQ ID NO: 150222 - DNA, 98 bp, Homo sapiens
tggcagaagcaagtacgccaaaatctgctttgaggataacctccaagttctatagaaattttagagtattcatcagatagtgaaaaagaagatgattt

SEQ ID NO: 150223 - DNA, 50 bp, Homo sapiens
ctctttctggcctggaggctatccagcctcctactccaatgtggccagat

SEQ ID NO: 150224 - DNA, 83 bp, Homo sapiens
ccgctcccaccttctttcttcagccgaggccgccgccgcctctccttgctgcagccatggacttcctgggtctgcaggtccag

SEQ ID NO: 150225 - DNA, 98 bp, Homo sapiens
cgctcgacgtgttgcagcacatcctcatccgagcctttgatttgagtggaccccaagactgcttctgagacagaaacagatatctgtgctgaatggga

SEQ ID NO: 150226 - DNA, 90 bp, Homo sapiens
caaccactttaaccaacaaacacagaggaaatgaggtctctaccacacctctgttagcaaattggatcaaggtggtcggacattgtgtgg

SEQ ID NO: 150227 - DNA, 101 bp, Homo sapiens
catactcaccctgcttgctttgtggctatcatcaaaatcaccaaccaaaagattcacctttggatttcatcgcttagagacggggtttcgccatgttggcc

SEQ ID NO: 150228 - DNA, 83 bp, Homo sapiens
acggctcaagaatttcaagaacaaaggccgcgacttggagcagccccgggctcagctcctggttcccagtatggcacaatgac

SEQ ID NO: 150229 - DNA, 75 bp, Homo sapiens
ttcagatgggatctttccggatcaatccagatggcagccagtcagtggtggaggcagagatcctacaagaatcca

SEQ ID NO: 150230 - DNA, 51 bp, Homo sapiens
cggaccggagactttggggcctaactaggagttttacagcttcagatctgg

SEQ ID NO: 150231 - DNA, 100 bp, Homo sapiens
gggctctaacacctgtgagctaatctttgaagactgcaagattcctggtgggtcatgataactgggtacgtggagttctgttccattctggggggaagtt

SEQ ID NO: 150232 - DNA, 100 bp, Homo sapiens
ggggcgagcaggagcgattccgtcgccaaacagtgataatagagtgacatccttcagagacctcattcatgaccaagatgaagatgaggaggaagaggaa

SEQ ID NO: 150233 - DNA, 51 bp, Homo sapiens
taaaccaccgcttacagatattggtgtctcatagttgggggaggaccctgt

SEQ ID NO: 150234 - DNA, 98 bp, Homo sapiens
ccaccacttggggtactcattgctcccagcacagtacaacttaccctatgcagcagggcttttttgaagaagaagaaggtaaagagtatatttataaa

SEQ ID NO: 150235 - DNA, 100 bp, Homo sapiens
ccggcagcggctgcagcgctctcgtcttctgcggctctcggtgccctctccttttcgtttccggaaacatgctgcaccgttttgtgtctgtgagcaaact

SEQ ID NO: 150236 - DNA, 90 bp, Homo sapiens
ctgtgacctgcaggtactgggagttacatagctaagatgccaggacaccccgaaagccggaaaacggtcactcctggaagcaaggcggct

SEQ ID NO: 150237 - DNA, 97 bp, Homo sapiens
ataaattgattattcctcgcccacatctgtgccaggtagatgacaaggtgaatttccattttattctgtttaacaacgtggatggccacctctatga

SEQ ID NO: 150238 - DNA, 49 bp, Homo sapiens
tgcagctagaagtccatatcgatggagcagcatattgtatgggacgtat

SEQ ID NO: 150239 - DNA, 100 bp, Homo sapiens
gttttgttagccctacatgatcgagaaaaattgtatggcgacttcttgagctggaagctagaggaaacccttgcccagttccctttgcagcctgggaagg

SEQ ID NO: 150240 - DNA, 147 bp, Homo sapiens
ccatggctttctcgcttttcatctttttggatggctgcttgtcgcaatattgtcttcttcgctttagacaagtcctcaagaaggctgtctcagtagtgtgacttatgcctccatgatccctctccagatgatgcagaactacctcag

SEQ ID NO: 150241 - DNA, 100 bp, Homo sapiens
gcgcagggcagtcccgcctgcgtcccagaagtgcctgcagttcagacccttctctcccctccactttctcccggccacaatggtgcgcatgaatgtcctg

SEQ ID NO: 150242 - DNA, 75 bp, Homo sapiens
caaggagccgcagttgtcacggttcagaattccttcgacaatcctgagtggttttatcggcatgtggaagcacac

SEQ ID NO: 150243 - DNA, 111 bp, Homo sapiens
ctgggtttcccgggagatcccaggcggtgacagagtggagccatggctagaggaccaagaatcgccttcagccctgtctggtgcatccttggcagaaagtgaggaggaaaa

SEQ ID NO: 150244 - DNA, 102 bp, Homo sapiens
ctggcgctttaggcctcgacgcaaacctcttagcttctgccagctatgatgacacagtgaagctgtaccgggaggaagaggatgactgggtatgctgtgcca

SEQ ID NO: 150245 - DNA, 111 bp, Homo sapiens
cccgcgtcgaggtggagcgcgacaacctggccgaggacatcatgcgcctccgggagaataattcgccaaaatgacgaacacaaagggaaagaggagaggcacccgatatat

SEQ ID NO: 150246 - DNA, 90 bp, Homo sapiens
tcggcttctccccgcgggagcccccagcatggcctggcagtgagctggacaacttggaggagattttggatgatttgcagaatagtcaat

SEQ ID NO: 150247 - DNA, 100 bp, Homo sapiens
gtagggacttctcccgcagcgacgcggctggcaagactgtttgtgttgcgggggccggacttcaagaagccccatgtgccactcccctgatctgcagctt

SEQ ID NO: 150248 - DNA, 90 bp, Homo sapiens
cttgtgcctccattcccgggaggggggagcggcgttggaggccaccgtttccagtattagaaaggaagatatccacacgacaaagtagag

SEQ ID NO: 150249 - DNA, 75 bp, Homo sapiens
gtcagaccagaccgtccgggtgaaggggatatgcaacgaagcatgttgttgaaggtctggaaccaaggacgctgt

SEQ ID NO: 150250 - DNA, 75 bp, Homo sapiens
gaggagtctcagagctgtcagaaaggtttgctggttggctcccgagcagacagcaggaaagaagaagcccttcgt

SEQ ID NO: 150251 - DNA, 74 bp, Homo sapiens
aagagtccttcaaaaatgccagaaatcaacgccaagctgagatctgtatctgtggacctgaatgttgatccctc

SEQ ID NO: 150252 - DNA, 50 bp, Homo sapiens
ggagaaggccaagaaggcagagcagcttcccaagctcttccttcagtccc

SEQ ID NO: 150253 - DNA, 100 bp, Homo sapiens
cggcacctgcacacctggatccaggataacggaggctgggtacttcgtactggatttcgaggctggcatcctgcagtattttgtgaatgagcaaagcaaa

SEQ ID NO: 150254 - DNA, 75 bp, Homo sapiens
ggaagattgaccagttttgtaattctagcaacatggtccatagtggaatgttggctgtccgtgaaaaccgctaca

SEQ ID NO: 150255 - DNA, 136 bp, Homo sapiens
cgagggtctgaagttcacgactactagaaggggaggggagtggaaaggctctcagtgaaaaaggtcccctcttgctgttggctgcacatcaggaaggctgtgatgggaatgaaggtgaaaacttggagatttcact

SEQ ID NO: 150256 - DNA, 100 bp, Homo sapiens
gcgcgggcactgctttccactcggctcctgtcgtccgttctctcaggctcccgttcaggctgtggatctttccattgatgagtccagcttgacaggtgag

SEQ ID NO: 150257 - DNA, 74 bp, Homo sapiens
aacacagctgcatggggaggtcagcttgaggatgaagactccgggaaggctgacagcgacgtggctgacgacgt

SEQ ID NO: 150258 - DNA, 97 bp, Homo sapiens
ttcagctaatcagctaaaacgtcatatgatcacccactcaggaaggaaaggaggtgagctggcctcagctgtccacgcctacacaaaaacaggagac

SEQ ID NO: 150259 - DNA, 50 bp, Homo sapiens
ggaaacctctgaactcggaggcagtgatgctgtaccttcacagtcctggt

SEQ ID NO: 150260 - DNA, 82 bp, Homo sapiens
tgaactctgtccagttttcaaaccacacaggccaccagcccctcgggttccaagatgcagctactggagacagagttctcac

SEQ ID NO: 150261 - DNA, 100 bp, Homo sapiens
ggacatggagatgaagaagaagattaacctggagttaaggaacagatccccggaggagacattcacggcatggtgtaactcccacctccggaaggcgggg

SEQ ID NO: 150262 - DNA, 74 bp, Homo sapiens
tggaaaccttgttacagtccagttgtgattttggtttcacaagaagtactgtggctgtatacagtacctgtatg

SEQ ID NO: 150263 - DNA, 101 bp, Homo sapiens
acacaggagaagccaaacagcagtttccttttcattcagctttggagtttaacccttctgccaatccagaggcaagcacaatattccagaggaactctcaa

SEQ ID NO: 150264 - DNA, 90 bp, Homo sapiens
cttcagcctgctcaagaactgcagcattgcagccgccaagacggaattgaatgatctggcacgggaccctccagcacagtgttcagcagg

SEQ ID NO: 150265 - DNA, 83 bp, Homo sapiens
ggcattgttgggagcgctgttttcgtgatcttcagaccccaggttctttggaggatacgaagcgttttcggcttcctgcccgg

SEQ ID NO: 150266 - DNA, 87 bp, Homo sapiens
ttcatcctcacctatgcaaagaaagggaagctattgctgggattttgaggagattcagtttaaggagaaagtgctgtggaccgctat

SEQ ID NO: 150267 - DNA, 90 bp, Homo sapiens
tgcctatgccatctgcaaatacgcctttctcatatccactgccaaagggaccaggtggtgacttcacacgccataatggcactggtggca

SEQ ID NO: 150268 - DNA, 80 bp, Homo sapiens
ccgttgccagcctggattccattctctcactgaagcaggatgcagcacatttcagttggactgcgatgcagttcttcagc

SEQ ID NO: 150269 - DNA, 90 bp, Homo sapiens
ggactgggtgtttgtctcctctaaagacgccgatctcacaatttccgtgaatagcaacaatgttcagtctttgctggatgcagcaaacca

SEQ ID NO: 150270 - DNA, 82 bp, Homo sapiens
gtgagatgtttcatcccaacaagtatgaagatggtgatctgtcatcatggatcaacagggaaaggtttcagaattaccttgc

SEQ ID NO: 150271 - DNA, 88 bp, Homo sapiens
ccgctgtgcccgggcctgcaccatgagcgtcccggccttcatcgacatcagtgaagaagatcagaggcacagttgaatgctgttgatg

SEQ ID NO: 150272 - DNA, 75 bp, Homo sapiens
ctgttttcgtgatcttcagaccccaggttctttgccaaaacagagtggagtacgagaaaagggtccgagcacaag

SEQ ID NO: 150273 - DNA, 100 bp, Homo sapiens
gcgacagtgaaaccctttgccatcgacatatttcctgtcaccaacaaagatttcaggtacatcaggagcctcagggaacccagccagcacagcagcagca

SEQ ID NO: 150274 - DNA, 82 bp, Homo sapiens
gacaccaggacctggcctgaagacatttcctctcctcccctctggatttctcagagactggaaatagcaaaggctatgcatt

SEQ ID NO: 150275 - DNA, 149 bp, Homo sapiens
gggaaaacctgaggtgcttggaggtccagacacaagaagaggattggaaccagttccgatacagcacaatggcagcggaggaggagaaagagatggacctcccggactcggcctcgagggtcttctgcggccgcatcctgagcatggtg

SEQ ID NO: 150276 - DNA, 82 bp, Homo sapiens
agacataatatcagatggcaccaagaaagactctgggatggtacaaccggtaccagcagtatggtgcagaggagtgtgtcct

SEQ ID NO: 150277 - DNA, 83 bp, Homo sapiens
gccggacctcgaccctgagctctatctcagtgtacacggtctgggatctgccgatatgggggatatgaagacccctgattttg

SEQ ID NO: 150278 - DNA, 100 bp, Homo sapiens
cggacccactgggttgccaagctcgcgccggatgcggagcgcggtgctgccggtggagcttcagtgaaaaatgtgaggttttacaatattctgcaaggga

SEQ ID NO: 150279 - DNA, 150 bp, Homo sapiens
catcttccagcgcagcaccaaagagtctttcttcatctccactcagctctcctctaccaaactcacccagaatgattgattttgtagcccatgatgatattccttattcatctgctggcagtgatgatgtttataagcacatcaaggagg

SEQ ID NO: 150280 - DNA, 74 bp, Homo sapiens
gcgggtgacgctgggcctgcagcgcggagcagaaagcagaacccgcagggatgcttgaagatggaaagaaattt

SEQ ID NO: 150281 - DNA, 87 bp, Homo sapiens
gacatgccagcccagactttcatactctgggctgggaagccctgttggcccggcgcctgccaccgccctttgtgcccacgctgtccg

SEQ ID NO: 150282 - DNA, 87 bp, Homo sapiens
caagagggcggcggcagcgggtcctacgaggagggctgtcagagcctcatggagtacgacgccagcatgtctccggacgccaccaag

SEQ ID NO: 150283 - DNA, 100 bp, Homo sapiens
tctgctgggatcctagagctggaacaggtacgagcggctggaggagcagctcaacgacctgactgagcttcatcagaacgagatgacgaacctgaagcag

SEQ ID NO: 150284 - DNA, 100 bp, Homo sapiens
acatctctggccccagtcctcatcctcgaggtggccaatctcaggtcacaaacatgtcagacaaaagtgaattaaaggctgagttggaacgtaagaagca

SEQ ID NO: 150285 - DNA, 80 bp, Homo sapiens
cgactattctccgggagccgtccgtgtcaccgccggaacctggcgcagatcctgaggaggatgaaggggctggccctgga

SEQ ID NO: 150286 - DNA, 100 bp, Homo sapiens
ggcgtttctcgccctgctgggatcgctgctcctctctggggtcctggcggccgaccgagaacgcagcatccacgaagcacagatcagatttctaaaggcc

SEQ ID NO: 150287 - DNA, 98 bp, Homo sapiens
gaatatgccaaggaaaaactggagagcttcatcaaaaatagtgatagctttgataaaaatctcctgcaaagaagctgagccatgcaattagtaaatct

SEQ ID NO: 150288 - DNA, 97 bp, Homo sapiens
aggaagtgttacggctcggaggcaccaaggtgctaagagatgccgtttgcaggcctcatctctgcttgagaatcgggggctccaggcactagaagag

SEQ ID NO: 150289 - DNA, 88 bp, Homo sapiens
ggaacccgaagaagaaaggattcgttacagccagagattggtccaggtgcaggtacagcagtctccgcaacaggtctcggctcagctc

SEQ ID NO: 150290 - DNA, 50 bp, Homo sapiens
gacttggtactattctctctcccagacgctgttggaagctctgactgtgg

SEQ ID NO: 150291 - DNA, 100 bp, Homo sapiens
ccgaggcggtggcgctcaagtaccagcagcaccaggagtccctctccgcccagttacaagatcaacgtaagagtaactacaatggatgctgagctggaat

SEQ ID NO: 150292 - DNA, 82 bp, Homo sapiens
ctggactcatggaggctgagcatttattcaggttctacatgaaacattttctcaacacacattcctcatgaatggtctcatt

SEQ ID NO: 150293 - DNA, 75 bp, Homo sapiens
aaatgagatccgcttcctgcccaacgagaatagtgacagtggtacaggaaagaaagaaaaagaaaagaaaaacag

SEQ ID NO: 150294 - DNA, 82 bp, Homo sapiens
gagcggcggcaagaaaaatgccagccagaagaggcgttcgctgcgcgtgcacattccggtgctggagaatctggtaaaagca

SEQ ID NO: 150295 - DNA, 72 bp, Homo sapiens
gcaacctggacccctgtgccttgtatgcatctgaggagaccggggaggcccggcacagcctgtacatgttcc

SEQ ID NO: 150296 - DNA, 75 bp, Homo sapiens
cggccaccgagatcctgctgacgccggctagggtgtggacactgccagcggctgcagccgacttggaatgacctg

SEQ ID NO: 150297 - DNA, 73 bp, Homo sapiens
taacacctggcagactctgctccatgagagggatgctgagaacttgctggagtcacagccactgggatccttt

SEQ ID NO: 150298 - DNA, 75 bp, Homo sapiens
tcaacatctgacagtgcttgcaggatctctcctggacaaatcaatcaggccgccatggcatcagatgaaggcaaa

SEQ ID NO: 150299 - DNA, 100 bp, Homo sapiens
agaaaagaggctttggctttgttacttttgatgaccatgatcctgtggataaaatcgtataagcttccacctgttctcaatttgcaagaattagaggcgt

SEQ ID NO: 150300 - DNA, 83 bp, Homo sapiens
ccgggacgcgggctggggagccggggcgaggggcgacgccccgccgcccgagacaatgcagatcttcgtgaagactctgactg

SEQ ID NO: 150301 - DNA, 98 bp, Homo sapiens
gtggaggaaaacaacttcgagggcagagtgaagctcgtgtgtggagtgccacggtacaatcagacgacagatggacagtgtgacaaaagtgtcagaaa

SEQ ID NO: 150302 - DNA, 50 bp, Homo sapiens
cggcccgccgggcccgcagtgtgggctgagccaggcccctcctgtgtctt

SEQ ID NO: 150303 - DNA, 148 bp, Homo sapiens
gaagtaatgggcctcaaaagttttgcattgaaaaagttggcaaagacacttggttaccaagaagccatacatggtgtataaaacctctgaaggggggagaggaaaagccgcagtcaagtacattgtcattcacattctccaagtgcca

SEQ ID NO: 150304 - DNA, 98 bp, Homo sapiens
gaatttgtcacattctcctgccctggcgctgacaagggtccagcctccgatgatagagggaggaatcagcagcttggaaattcaagcacgtgatctgg

SEQ ID NO: 150305 - DNA, 51 bp, Homo sapiens
ctttttgaaccaaattatgctgcaaatgtcatctctgaatttgagcaatgg

SEQ ID NO: 150306 - DNA, 76 bp, Homo sapiens
gaagccttgaaaaagctgccctgagacggtgtcccgccgaaaggccttcacctaccaccatatccaggagatcatg

SEQ ID NO: 150307 - DNA, 90 bp, Homo sapiens
caggacggattcaagaatgggttcagcatcaccgatgaccaggataaaaaggtggaaactctcatggtaccatcaaaaaggcaagaagca

SEQ ID NO: 150308 - DNA, 83 bp, Homo sapiens
caattatgaaacaacctggcccatgagatgatagctgtggaaggttccaatacatatgaagaggcagctgcctatattcaatg

SEQ ID NO: 150309 - DNA, 75 bp, Homo sapiens
tgcagaggatcctggaggcctgggaagccaacgaccacacgcaggtgctttcttctgcgacctggtactcatcta

SEQ ID NO: 150310 - DNA, 90 bp, Homo sapiens
cctgtggaacatcttcatgatgttctgcatgattgtgtctgagaaagaaccccagtttaagtttatctacttcaaccacatgaatctcgc

SEQ ID NO: 150311 - DNA, 100 bp, Homo sapiens
ccagcagccgtccggagccagccaacgagcggaagctgatctggatgcagaattagaaaactgccatcattacatgcagtttgcagcagcggcctatggg

SEQ ID NO: 150312 - DNA, 75 bp, Homo sapiens
ggggaccttgccttgcccggggtagcacaggcggagtgcagcggaggcccctgccgctgccgtcatgccgttccc

SEQ ID NO: 150313 - DNA, 100 bp, Homo sapiens
gaatgatgatgtctcatatgtctcaggcttccatgcagcctgccttaccggtcttcgatgccaagaacatgatggctgcctgtgacccccgccacggccg

SEQ ID NO: 150314 - DNA, 50 bp, Homo sapiens
actaagtaacgatctggatgcccagaaggagcatttctaccagaggcagc

SEQ ID NO: 150315 - DNA, 82 bp, Homo sapiens
tgggacacagcggggcaggagcgcttccgcaccatcacctccacaaaacctcggatcaattctcagctggtggcacaacaag

SEQ ID NO: 150316 - DNA, 83 bp, Homo sapiens
ggcaggagattatagctctgtatgagaaggacaacacctacttaggtcagcccaaggctgccccctcggtcactctgttcccg

SEQ ID NO: 150317 - DNA, 100 bp, Homo sapiens
caggatttcctggttctgcgggcagagttggacctccaggccctgcttgataatatgcagcatgcatactgggaactgaagagagaaatgtctaatttac

SEQ ID NO: 150318 - DNA, 100 bp, Homo sapiens
cttagccatgtcgtccttgatcagaagggtgatcagcaccgcgaaagccccaggggccattggaccctacaggtctggagcccggcactgtggtcataac

SEQ ID NO: 150319 - DNA, 100 bp, Homo sapiens
tgcacggagtgccctgtcctgccggagccgctgtgtgcaaagttcctattgatggtccccccatagctgacagataaggcagtgaaggactattccgctt

SEQ ID NO: 150320 - DNA, 89 bp, Homo sapiens
aagttttgcagatcttcaacaagaggacccaggagaaattcgccctcaaagtggttgtgggaagagaagtttgcagaactgaaatggag

SEQ ID NO: 150321 - DNA, 83 bp, Homo sapiens
taatgaagatattctgtgtccacatggtcatcatcagatttgaaatatttaaagtggatacaaaactatttcagcaatgcaga

SEQ ID NO: 150322 - DNA, 50 bp, Homo sapiens
ggacaagcgaggaagtttctttaagaaagaagcttccggttctgaggtcc

SEQ ID NO: 150323 - DNA, 80 bp, Homo sapiens
aatgattaatccagtgccgcctggaggcagccggtccaacgtacaatgactcttcttgcttttcacctaagttgaataag

SEQ ID NO: 150324 - DNA, 80 bp, Homo sapiens
cgaccgcatcaaagacgaatttcagctactgcaagctcagtaccacagaattcagaaggagctggcggacatcactttag

SEQ ID NO: 150325 - DNA, 101 bp, Homo sapiens
atctttctgatgctccatcccactactctcaagatacgccaatgcgctcaaaggcaaaaagggtccaagtgtgcctgccatcaactaactatccaggctac

SEQ ID NO: 150326 - DNA, 106 bp, Homo sapiens
cagccccgtcccctccccgacgggcaccatcagggagatccaggacgaggagctgaagaagttctgttcccggatctgtaaactgctgcaggcggaggacttgggg

SEQ ID NO: 150327 - DNA, 100 bp, Homo sapiens
gccaatgccaagacagtggagtgggactggaaactgctcacctatgtcatggaggaagagatattggcaaaacacttgaatgatggtaaaatcaatcagc

SEQ ID NO: 150328 - DNA, 132 bp, Homo sapiens
tcacctattcctaatacagttgcagtaacagctgtggtgtcctctacaccatctgtggtcatgtcaacagtagcacaagagaatagtgacagtggtacaggaaagaaagaaaaagaaaagaaaaacagaaag

SEQ ID NO: 150329 - DNA, 100 bp, Homo sapiens
ggaaaggaatgaggagttacagagggccgagaaggacaggatcagtctttcccagggaactccgatgaagtgttccaacaaaatgagcgagtgaaccaag

SEQ ID NO: 150330 - DNA, 96 bp, Homo sapiens
ttttgaaagctgcctgcggcaaagaggtctcttcataattgaccccaatggagtcatcaagcatttgagcgtcaacgatctcccagtgggccgaag

SEQ ID NO: 150331 - DNA, 75 bp, Homo sapiens
aaagaggaaggatgggaaacatctcacacttcatgaggcacctctgtgggcatatattgcttgtgcctgtggcct

SEQ ID NO: 150332 - DNA, 95 bp, Homo sapiens
gcatgaacaccttctccgacagcagcacacccattttaggtgatgggcaagtcagaaagtcagatggatataactgatatcaacactccaaagcc

SEQ ID NO: 150333 - DNA, 88 bp, Homo sapiens
ccaaatggtaaagaaaaactttgagtgggttgcagagagagtagagcaaaagtactttgactcaggagactacaacatggccaaagcc

SEQ ID NO: 150334 - DNA, 100 bp, Homo sapiens
aaccgcagtatcatgctggccaagaagatcatcattaaggacggaggcacgactgaaagagcatattccttttgtggaactattgaatacatggcaccag

SEQ ID NO: 150335 - DNA, 96 bp, Homo sapiens
agcctctgagaccgttgggcaaagctgcttccctgttgctggagatcctgggcctcctgtgcaaaagcatgatcctgaccaagatgaagcagcagg

SEQ ID NO: 150336 - DNA, 100 bp, Homo sapiens
ccctagcatggactgtgatgtttccactctggttgcctgtgtggtggatgtcgaggtctttaccaatcaggaggttaagatttaaccacttatgatacag

SEQ ID NO: 150337 - DNA, 75 bp, Homo sapiens
gacctgaagacaaaaatccagaagtacaagcagtctgaaaggcctaaagaatgtatttgacgaagcaatattggc

SEQ ID NO: 150338 - DNA, 74 bp, Homo sapiens
cacggacgacagaagcgactttggtgagactctgatcttccaggagcaccccctgcatggctgctcagcctcca

SEQ ID NO: 150339 - DNA, 83 bp, Homo sapiens
ttcaacttccggctggattccaagtccgtcgtggaggctgaccccgcactacatctacccaccagccatcgtgcagcccagcg

SEQ ID NO: 150340 - DNA, 75 bp, Homo sapiens
ccaatcagacctctgtgggctgtacccagttggtgctagtggaagggggcaattgaaggaacagactaaaaatcg

SEQ ID NO: 150341 - DNA, 100 bp, Homo sapiens
caaccggctgcttctgcacttccagagcccacgggtcccaaggggcggtggcttcaggatccactatcaggactttcaaacctctggttgaaagaaatat

SEQ ID NO: 150342 - DNA, 100 bp, Homo sapiens
cgggacgtgtacagcactgactactacaggccctactgccaataaagggaaaataagagatgctcatcgacgaattatgcttttaaatcatcctgacaaa

SEQ ID NO: 150343 - DNA, 48 bp, Homo sapiens
ggtggccatggcccgcaagctccagaaccccgagatgcccctgtcctt

SEQ ID NO: 150344 - DNA, 90 bp, Homo sapiens
tactcagtttgtaaaaacatggcggatccagaattctggtgggccatgcacagacacagctcatgtctcattaatcacaccaacaaaaag

SEQ ID NO: 150345 - DNA, 100 bp, Homo sapiens
gcagaagttacggcgacagctcctcgcgcagcaggctccaaagactgatattcttgtggaattacctactttcactgaatctaaagagaacatggtggat

SEQ ID NO: 150346 - DNA, 82 bp, Homo sapiens
cgccctggcctccctcaccttggacacctcgcttgggacagagcgggatgccaccagcttgtccaaagggaagttccaggag

SEQ ID NO: 150347 - DNA, 82 bp, Homo sapiens
cagagacagaagcagatggattcgtccttttaggacagctgggaagtggtggaaggactgaggggggagatgaattacaccc

SEQ ID NO: 150348 - DNA, 100 bp, Homo sapiens
cccagagggcggaggcgcgcgctcgattccccccacgcggcggcgccgcctgtttacggggtgttccagtgcggccccgcttcggtcattggtgttcgag

SEQ ID NO: 150349 - DNA, 75 bp, Homo sapiens
caccctgctgcggagcagacgtgaagtcttactactttgaccgcgatgatgtggctttgaagaactttgccaaat

SEQ ID NO: 150350 - DNA, 100 bp, Homo sapiens
tttgacaagtgatgagaagctgtcggagcttcccaaggtgctactcgtgagcagtagtcgccatccagacagatggattgtccctggaggaggcatggag

SEQ ID NO: 150351 - DNA, 74 bp, Homo sapiens
gaaggtctttgaccgacacctccaccctacaagtactgaaaaggcacagattagaaatgatatttgccaaattt

SEQ ID NO: 150352 - DNA, 99 bp, Homo sapiens
tcagatggtcccctgaagcaaggactgcggctgtcacagactgctgaagagatggcggccaatctaacaggccttggacaagattcgctatgagagcct

SEQ ID NO: 150353 - DNA, 50 bp, Homo sapiens
cggctcactgcaagctccacctcccagggtcacaccattctcctgcctca

SEQ ID NO: 150354 - DNA, 100 bp, Homo sapiens
tttatccagctctaaactttatttcctcccagaagacactccccagggcagaaatagcgaccatggcgaggcatatcacacctgaaaaattttatgtgga

SEQ ID NO: 150355 - DNA, 98 bp, Homo sapiens
gcttgttcttactggccctgagtctttgggggcagcctgcagaggctgcggagctgtgcggtcttatgcattggaacttaatttgacagattcagaaa

SEQ ID NO: 150356 - DNA, 100 bp, Homo sapiens
ccaagaaacatctcaccaatttcaaatctggcctacaggatgatgaggatctacaggcgctgctgaagggcagccagctcctgaaggtgaagtccagctc

SEQ ID NO: 150357 - DNA, 100 bp, Homo sapiens
atattttgcagcaatctcagctctcaaagtgctctcggatacagccgacaccatgggtttcggagacctgaaaagccctgccggcctccaggtgctcaac

SEQ ID NO: 150358 - DNA, 74 bp, Homo sapiens
aagaaacaagccgtggaataggtgtatcaagtaatggtgcaaagcctgaagaaactcgaactatctaccagttt

SEQ ID NO: 150359 - DNA, 98 bp, Homo sapiens
tcgagtatgagctccggtgcctcctcaataagccaggagtggacagtgcaatgaaggaagaagtgcagaggctgcagtccagggtggacctgctggag

SEQ ID NO: 150360 - DNA, 80 bp, Homo sapiens
ttcaaagcacctagtacctcctaccattgtcaactggttcagagaagattcttcatgggaaatcaagttctaaaggtctt

SEQ ID NO: 150361 - DNA, 100 bp, Homo sapiens
cttgttgccgtcccttcgcctccttcaccgccgcagaccccttcaagttctagtcatgctgggagtgtccactcgccttccaccagcatggcaacgtctt

SEQ ID NO: 150362 - DNA, 74 bp, Homo sapiens
tgggcaatagagtcactgtatttgaccttaaaaagggcactatggcagacaaagttaggaggcagaggccgagg

SEQ ID NO: 150363 - DNA, 98 bp, Homo sapiens
gcagaatgcaacgccattcgccaggctcttcaggatctgctttcagagtacatgaacaacgattcagagaagatgtgcattgaaattgtctccctggc

SEQ ID NO: 150364 - DNA, 75 bp, Homo sapiens
gcctccacttcctactcctgggaaggaggatcgcaaaagctggttgctgcttttgctcagaggacatccatgacc

SEQ ID NO: 150365 - DNA, 80 bp, Homo sapiens
gagtacaaggtcattggctcctggactgaccacctgcaccttagaccaagaagtatgatgcgtttttggcctcagagtct

SEQ ID NO: 150366 - DNA, 82 bp, Homo sapiens
taaccaggtgcttggcaaaatcgagcgggccattgatcatgatgctgccgccaccgccgccaccacggagcgagaagcccag

SEQ ID NO: 150367 - DNA, 73 bp, Homo sapiens
agggctctgcaggctgccttggcagatcccgcccaatgacccccgcatcaagaaccaagccgactgcatcccg

SEQ ID NO: 150368 - DNA, 75 bp, Homo sapiens
atcttgacgaggctgcggtgtctgctgctattctccgagcttcgcaatggaaagaccacagcaagattctttcat

SEQ ID NO: 150369 - DNA, 83 bp, Homo sapiens
tccggcgccgctctccgagctcgatccgctgctcgcacgggagccagctgggtgggtgatcagcccatgacctaaacctccag

SEQ ID NO: 150370 - DNA, 100 bp, Homo sapiens
tgcggcaagtgagcgatttggtgaacagacactcccttctgtagatgggatcttactctgttgcccaggctggagtgcagtggtgcgatctcggctctct

SEQ ID NO: 150371 - DNA, 100 bp, Homo sapiens
ggctacttctcgctctgcttcatcccactattattttggcacaacaggaaggttgaaatcacaaagattagacacctttttagataggtgttcttcagca

SEQ ID NO: 150372 - DNA, 98 bp, Homo sapiens
cgaagattgacgccagtaagaacgaggaggatgaagggcgcggatcaagaagatcatgcagacggacgaagagattgggaaggtggcggcggcggtgc

SEQ ID NO: 150373 - DNA, 83 bp, Homo sapiens
aacaatgcctctgttcaaactcccagccttcaaaagtatgttcgggaacagattctactagcagtagcagtaattgtaaaaag

SEQ ID NO: 150374 - DNA, 74 bp, Homo sapiens
gtgagtcgcggtgggtcctcgcttgcagttcagcgaccacggctctggaagaggatctgaaccagaagaagcgg

SEQ ID NO: 150375 - DNA, 100 bp, Homo sapiens
gtgatgcagggacatcactgaattcaaatgactatggttatgggggacaaaaaagacctttagaagatggaggtggtgaagcagtattttccaatttgaa

SEQ ID NO: 150376 - DNA, 90 bp, Homo sapiens
ggctgccggcatggcacattacaacttcaagaaaattacggtggtgccgtccgccaagaggctgaggggatctggcggtggagcgctagg

SEQ ID NO: 150377 - DNA, 90 bp, Homo sapiens
ggccttgtcgatctgttcagccctgaaaagtccaaactcccaggtaccggggagaccaggatgccactatgtctatattggacatatcca

SEQ ID NO: 150378 - DNA, 50 bp, Homo sapiens
actgtgtccccgactaccacaaaaattatgctcctaagtgtgcagcctgt

SEQ ID NO: 150379 - DNA, 75 bp, Homo sapiens
acttccttgaagaaacaagcttacagagcttttcatcctactataaaggaggatttgaacagaaaatgagtaggc

SEQ ID NO: 150380 - DNA, 78 bp, Homo sapiens
ccccaaggaagcgtgcaaatgccagaaagaggatttggccagagcgttttgtgaccctgatgctcccataagacagaa

SEQ ID NO: 150381 - DNA, 96 bp, Homo sapiens
aaaaagtgattaagcagagaatggagaagaaggttgattccagtttgggaatacctgctactgcaattcagttcttcaagcactttatttttgtcg

SEQ ID NO: 150382 - DNA, 74 bp, Homo sapiens
atttttgtcacctccaacaacatccgcgagatcgagatgcttgtgaccacaccagaaaaatgggatgtagtgac

SEQ ID NO: 150383 - DNA, 75 bp, Homo sapiens
gaggtgcagtgtttaaaaaggatgatattggacgaaggaatgggcaagggaagaaggagaaagggccaacccctg

SEQ ID NO: 150384 - DNA, 100 bp, Homo sapiens
tattggattcataacctgctccatgcttgaaaacatggggattggaattcgacattgtatgcaaacctgttccattctttcttcgtggacaacccattcc

SEQ ID NO: 150385 - DNA, 98 bp, Homo sapiens
tgccttgtaattcttaatcagcctttggacaactattttcgtcatctttggaacaaagtttttgcagggcactatggcaatttgaatgcttagaattt

SEQ ID NO: 150386 - DNA, 100 bp, Homo sapiens
aagctcatatccggagatattccaggcccactccagggcagacctgcaggctgggacaatgaaaagaaaatagctattttacatgaaaattttacaaccg

SEQ ID NO: 150387 - DNA, 73 bp, Homo sapiens
agtgtcttcaatgcctgcttgctcaggcagctgtccaaggacctgttggtacagatttcaaacccttaaatag

SEQ ID NO: 150388 - DNA, 96 bp, Homo sapiens
tagacctggaatcgcccaagtccctctactcgcgaggcaatggtcgagacagttaacaacctccttcagccacaagctttgaatgcatggagagac

SEQ ID NO: 150389 - DNA, 76 bp, Homo sapiens
cagggcagcacccccagccgcagcccccgctgggacctcaggatggaaaccagcagcctgcaccgcccgagaaggt

SEQ ID NO: 150390 - DNA, 73 bp, Homo sapiens
ttatgaaatcagtaccaaccaatggctggaaatgcaaaattgagaggatccagaatccagatctctggaatag

SEQ ID NO: 150391 - DNA, 75 bp, Homo sapiens
ctgcgttacaaactcctaggagggcttgctgtgcggagactcagccttatggaagaggacgaggaagaagagtta

SEQ ID NO: 150392 - DNA, 80 bp, Homo sapiens
tgtgagtctctttcctgtttacctccagtgtcccttcttccacatgaaaaggataagcacaatcctggaggaagagaagg

SEQ ID NO: 150393 - DNA, 80 bp, Homo sapiens
atgtggtggtgaaaaatgaccctgaactggaccagcagcaattctgtggtgttcttggtcacacatttatggagtttctg

SEQ ID NO: 150394 - DNA, 127 bp, Homo sapiens
gcaatgaaatcctgctttcttttcctcagaactactatattcagtggctaaatggctccctgattcatgggccctccagaatttccacagcatacacctggacctgttcccaacagtttcagccagc

SEQ ID NO: 150395 - DNA, 50 bp, Homo sapiens
tcatcaagacctgggattttggtgggaagctatgcgaaattatttaaaag

SEQ ID NO: 150396 - DNA, 83 bp, Homo sapiens
ctctcttcctcggcgtccttgcttactgcacagccgaggcctgcctggagccccagatcaccccttcctactacaccacttct

SEQ ID NO: 150397 - DNA, 83 bp, Homo sapiens
cagcaagcaactttgagctgcacgttgcacaagcaatggctgccatccggaagaaactggtgattgttggtgatggagcctgt

SEQ ID NO: 150398 - DNA, 101 bp, Homo sapiens
aatgatgtgaaccttcgcattcagaatttgaccatcttggtgagaaacattaagacctactaccaggcaatgaatcgctccctggctaatgtgattcttgg

SEQ ID NO: 150399 - DNA, 100 bp, Homo sapiens
caggcattccccccggccttgtgtcgtccacttagttgcgcacaggtgagaatgagatggtgatcatgagacctggaaacaaatatgagtacaagttcgg

SEQ ID NO: 150400 - DNA, 100 bp, Homo sapiens
gtcaagcagctgtcggccaagctcatcgccaacgagagcaatgatgaggaccagcaacccagagcaaccggaaaacatcgacggagcctgggggctggat

SEQ ID NO: 150401 - DNA, 101 bp, Homo sapiens
cgggatttgggtcgcagttcttgtttgtggatcgctgtgatcgtcacttgccttatgccagcctggaccatcttggaggcagtgtaggatcatggaagaac

SEQ ID NO: 150402 - DNA, 76 bp, Homo sapiens
taacttgggcaccttttggaagctcagataagatggagatggcagaaacggtggacacaagcgaaatggtcaacgg

SEQ ID NO: 150403 - DNA, 101 bp, Homo sapiens
cgagccgcgaaccgagcgggcggcgggcgcgcgcaccatgggggagaaacccgggaccagattgctggactcgctgaagagagactacgcaggaaagcccc

SEQ ID NO: 150404 - DNA, 73 bp, Homo sapiens
gcgcagcctgcgttttctccggtacaggttgaggctactaagttttcggctttgtgagaaaccttaccatcaa

SEQ ID NO: 150405 - DNA, 100 bp, Homo sapiens
gaaggaagtgcgcaattctgactccacaaacacctttgtcactaatttccagaagcacatgattggtatatgtgtcacgttgacagtcataattgtgtgt

SEQ ID NO: 150406 - DNA, 98 bp, Homo sapiens
agatgcttacaagaaacagttctctcaatacataaagaacagcgtaactccagacatgaccctgaacaagagaaggaggctggagagccaggacgtcc

SEQ ID NO: 150407 - DNA, 75 bp, Homo sapiens
gccgagagaggaagcgaagggcaccatctttggcattggaatggatacttgtgtcattcctttgaggcacggtgg

SEQ ID NO: 150408 - DNA, 75 bp, Homo sapiens
tttgtccttctgctattgatcctgaaggtgtcagctgtgatgcatgtttaaaaggaaattttcgaggtcgcagat

SEQ ID NO: 150409 - DNA, 101 bp, Homo sapiens
aaaggttcaaaagctggtattgaacaagaaggatattggttgccaggagatgagattacctctgtgagtgaaagccttcagagggaagctgctaagaagca

SEQ ID NO: 150410 - DNA, 98 bp, Homo sapiens
gcggcgacagcggaggcagagaggaaggcggttctgagagcttcagagagcgatggaaagcagcagttcagagccccagttgcagacgacttgtcctg

SEQ ID NO: 150411 - DNA, 98 bp, Homo sapiens
cggcggcggcggcggcagcggcagcgcggcggggccggacttggagctgatgtctgtgctgtcctccggctctctggtccactcaaggaacagtatgc

SEQ ID NO: 150412 - DNA, 100 bp, Homo sapiens
tccgaggccaggaacgctccgtctggaacggcgcagggtttccaggcctgaggtgcccgccctggccccaggagaatgaaccagccgcagaggatggcgc

SEQ ID NO: 150413 - DNA, 98 bp, Homo sapiens
tacgactgaccctggagctgaaggccaggttttgcagtggtctgaggtgtctgatgatttgtgagcctcaagtgactactctgtggaatcatctgtcc

SEQ ID NO: 150414 - DNA, 83 bp, Homo sapiens
ggtgaaactgaccacagtgctcaccacccaccaccactgtcccaggggcagccactggcctcccagcccccggtcgtcgaccc

SEQ ID NO: 150415 - DNA, 88 bp, Homo sapiens
tccttctcaacttacctgttgccacttggaatatatatcggttggaagtgtatcctcccttcttattttttctagctgttggaggtgt

SEQ ID NO: 150416 - DNA, 82 bp, Homo sapiens
ttgagattgacgcggtgaactctgtccagttttcaaaccacacagcgtccgtctccaagagagtatgaagagagtgcgtctg

SEQ ID NO: 150417 - DNA, 96 bp, Homo sapiens
ctggtcggggcagctgaggcgatgaaagccggttgggatctcgaggagagtcagcccgaggccaaggtctccaccagctcctggccgggttcgagg

SEQ ID NO: 150418 - DNA, 74 bp, Homo sapiens
gcggggactgttggtctcggccctgcggaaggctctggaatgtttttgtcaggcagcatctgaagtaggcaaag

SEQ ID NO: 150419 - DNA, 83 bp, Homo sapiens
ggatcaccgagggcatttacggcagcctgtgggccaaagctgaccaactcccccaccgtcatcgtcatggtgggcctccccgc

SEQ ID NO: 150420 - DNA, 74 bp, Homo sapiens
caggtcgaggacggtcggactcccgcggcgggaggagcctgttcccctgagattgggtggatcacaagaactaa

SEQ ID NO: 150421 - DNA, 75 bp, Homo sapiens
acggaccgcgcccgccgggcacacaagaatggtcactatgtcggactgaatatgaagttaaagatcaagctgcaa

SEQ ID NO: 150422 - DNA, 100 bp, Homo sapiens
gctcctatgactggaaccattgaaaaggtatttaaaccatgtcagagctgcctcaccacaggaccttgctggaggctatacttcttctcttgcttgtcac

SEQ ID NO: 150423 - DNA, 95 bp, Homo sapiens
acggagataaattcccggaaccgcgattcggcgtgtcagtctcaaaccatgaattatgtgggacagctggctgggcaggtgattgtcactgtgaa

SEQ ID NO: 150424 - DNA, 75 bp, Homo sapiens
cacgagttccaggagaccaaggaccagctcaccacggagaacatcatccttgaacctcaagaaggcatgaagcca

SEQ ID NO: 150425 - DNA, 98 bp, Homo sapiens
atttaagcactgctgcactttatgagctcaaagcttggattctgccgtgccactcacgaatggcgacacagaagacgatgctgacaaaatgcacgttg

SEQ ID NO: 150426 - DNA, 50 bp, Homo sapiens
ccgcccctcctcaccgaggaaggccgatgaggtcgtgctcaagtttgaaa

SEQ ID NO: 150427 - DNA, 80 bp, Homo sapiens
ccgagtcctagcgcctggcctgcgcgccgctgcccgcgccacagatattgatgaccatgagatccctgctcagaaccccc

SEQ ID NO: 150428 - DNA, 98 bp, Homo sapiens
agcaaaagcatttacagcaacagcagttccttcagaggcaacagcaccttctcgcggaacagatgcaccgtggcctggcggcgagcccccggtcacct

SEQ ID NO: 150429 - DNA, 71 bp, Homo sapiens
agcctagccctggaggaaccggagaagatggggctgcaagctcacttcaagaaatctccatgtatgcacaa

SEQ ID NO: 150430 - DNA, 75 bp, Homo sapiens
atcaagacacaggcataggactagaagcaggagtaggacaaggagtaggagtcgccttgtcttaaaagaagaagc

SEQ ID NO: 150431 - DNA, 90 bp, Homo sapiens
gctggcactggtgtctatcaaagccatcggatggatgagcagtcacacagactttggactgaaagaggtgtccccactgcctctaaatct

SEQ ID NO: 150432 - DNA, 98 bp, Homo sapiens
ctgaatcacgccactcagagggggctgcgatttatccagttgaaaaatccttggagtcatttacgttggaaaggaagatacagtgaaaatgatgtaaa

SEQ ID NO: 150433 - DNA, 117 bp, Homo sapiens
cggcgcacgcaccacgacggcgccatcaccgagcgcttgatgtgcgcggagagcaatcgccgggacagctgcaagacatatctgaagagatggattaagaatgctttggattaagga

SEQ ID NO: 150434 - DNA, 100 bp, Homo sapiens
acgctgcagaaggctagactctccgacccccagggagcctggtgtgggctgcagggacagaacgcttctcagaggaggtctgccatcatggatgttctcg

SEQ ID NO: 150435 - DNA, 101 bp, Homo sapiens
tggagcatggtcccgctgccataagagaagctggcttgatgaaaaggctctccagtttgggggacaaaacatggatgatgtcatggttttggtggattcag

SEQ ID NO: 150436 - DNA, 75 bp, Homo sapiens
gccgccgcttgtgctgcagccatggttcagaacttggcagtaaggaatcaacaggcctcagctcaaggacctcag

SEQ ID NO: 150437 - DNA, 50 bp, Homo sapiens
ggagcttccgggagggcggctcgcaggtggcgggacaggcttcattggga

SEQ ID NO: 150438 - DNA, 51 bp, Homo sapiens
ggtgaatttccatgtcaacatagtcctgcttgaattcggagtgatttacca

SEQ ID NO: 150439 - DNA, 75 bp, Homo sapiens
agcgcgtccaggcctgacagctctgcggctcgggccctgagggtacaggcatccttcacctgctattgttgcaag

SEQ ID NO: 150440 - DNA, 100 bp, Homo sapiens
cgtggtgaaggtccggggcttgccctggtcttgctcggccgatgaagtgcagaggtttttttctggtcgtcagtgaggccacacagcagcagcatgaagt

SEQ ID NO: 150441 - DNA, 74 bp, Homo sapiens
ctacagtaaggctgaaatcattgaagtgcttggagtgcagaactgaaagagatacagccttttcctccctctcc

SEQ ID NO: 150442 - DNA, 101 bp, Homo sapiens
gcattcctcgtcagcaacatgctcctagcagaagcctatggatctggaggtatccgtacttgaaaactggaaggagagtgaagtgtataagctacagatca

SEQ ID NO: 150443 - DNA, 80 bp, Homo sapiens
cgcgtctctctgctgcggcgcggggaccgctgtgctctcgatggaaatcctgtatgaatgtggaagccattagcagagta

SEQ ID NO: 150444 - DNA, 100 bp, Homo sapiens
aattgctgaacttaaaaagcagtctaaacctgtgaccacccctgaagaaattgcacagggtcctgatgaagaagctgttgtggatcttggcaaaactagc

SEQ ID NO: 150445 - DNA, 100 bp, Homo sapiens
aaatgattttgaagttattggaagataaaaatggagaggtacagaatttagctgtcaaatggtgacaaacagcatgtttggtgcttcaagaaagaagttt

SEQ ID NO: 150446 - DNA, 90 bp, Homo sapiens
gcgcgtgcccgcgaggagccgccgcgcgcccgcgccctccgcgcgacgccagacgttcatcttcactgacggggaagatgaggccctggc

SEQ ID NO: 150447 - DNA, 76 bp, Homo sapiens
cgagatgacgggctttctgctgccgcccgcaagcagagacaattgcagcatgactttcccagggccctgattttca

SEQ ID NO: 150448 - DNA, 88 bp, Homo sapiens
aaagtaattacagatatacactggttgtctgacacatttgaggccttagaaaatttacgtgtatacctgtgtgagaaaatcatagctg

SEQ ID NO: 150449 - DNA, 100 bp, Homo sapiens
cgggcaacctcggagcttatactcctcccagtgacgggtctggagtgcgtgggggaccggctgttggcgggctttgatgaactaggtggacttctcaaac

SEQ ID NO: 150450 - DNA, 90 bp, Homo sapiens
cggagagactccttgggggtcgagcacataacggggttcgggtgtctcgtgtgtgaacatcacagtagaacttcatggaggaacacggag

SEQ ID NO: 150451 - DNA, 100 bp, Homo sapiens
ctaaggcggaggaactgagacgtttcgaattccaggactcaatgatctttgaggatgtggctgtgaactttacccaggaggagtgggctttgctggatcc

SEQ ID NO: 150452 - DNA, 90 bp, Homo sapiens
gccactgtggaagcagagcaatcgccatggagtttgtgatgaagcaggctctaggagctcaaaagccaaaagtctctgagaacgactttg

SEQ ID NO: 150453 - DNA, 103 bp, Homo sapiens
attcaagaatcatctgtaaacctgataacactgcatgaaatgttagagaggaattcctgacttatcttgaacactaccagctaactattccaataagggttga

SEQ ID NO: 150454 - DNA, 51 bp, Homo sapiens
aagcgcggcgggcaggcgctacgaggaaattgaaggatgtcccattactgc

SEQ ID NO: 150455 - DNA, 98 bp, Homo sapiens
gttcagtctggatacctccatgatgatcatcgagcccaccagcccttgccttctcccagaccctctgcaggaaccgtactaccagccaccctacacgc

SEQ ID NO: 150456 - DNA, 100 bp, Homo sapiens
ttgatctttacccaagagacttgtggaattttgtctttggacaggcctctttgacagatgcccagcctgactcctggagattgtgaatagctccatccag

SEQ ID NO: 150457 - DNA, 100 bp, Homo sapiens
ctcattagataaagtgtcgcatactctttgataagaagccctacaggtggcaactactagcccaactgccaatactactggtactgctactacttcctca

SEQ ID NO: 150458 - DNA, 100 bp, Homo sapiens
gaccatgataatttccccagagcgtcttgatccttttgcagatgatttgtgacccagaaggaaatctctgacctcagctgtggctcttggtgctggccag

SEQ ID NO: 150459 - DNA, 82 bp, Homo sapiens
ggcaggatgatgaccagagatcatcacactacgatgaactgcttgctgcagaggccagtttggagtttgagaatcagaagac

SEQ ID NO: 150460 - DNA, 102 bp, Homo sapiens
ttttttcatttccatttctaccttgtatgcctcaatttgctggatttaagcactgctgcactttatgagacttgtgcaccatggacaattttgctgagggag

SEQ ID NO: 150461 - DNA, 100 bp, Homo sapiens
acccgcgagtccagcgtcgccgcagccccccaatgcggccgcgagaagcagcgggggggcaggcgatcgaagcaattctgtggtgttcttggtcacacat

SEQ ID NO: 150462 - DNA, 83 bp, Homo sapiens
tagctgaagaggagcgccagatggtggaggaatacacttatttatgaagaactgtggctgcaccatctgtcttcatcttcccg

SEQ ID NO: 150463 - DNA, 83 bp, Homo sapiens
cgaggctggaagaggatcttgggcgccgccagttacctcgtgggagatgagctgtgggttgttatggaatacttggctggagg

SEQ ID NO: 150464 - DNA, 98 bp, Homo sapiens
gttcatgaatattcatccatctggagtaaaaactgagtcagctgtgctgatgacatcagataagaattggcagagggggtcgatttgggaggaaaggt

SEQ ID NO: 150465 - DNA, 82 bp, Homo sapiens
ctgtacttttggtggttggatcatttgaagtggtgtctacacttataaaacatgacgtatcccagactttactcaaggcaac

SEQ ID NO: 150466 - DNA, 99 bp, Homo sapiens
agaagtcagtgtctcgaagaaagtgcgcagcctgcaagattgtggtgcacacgccctgcatcgagcagctggagaagggccaccagactcctggagaga

SEQ ID NO: 150467 - DNA, 50 bp, Homo sapiens
cctgcttggagacggacttgcttccgggctgggcttcaacatcgtcggtg

SEQ ID NO: 150468 - DNA, 75 bp, Homo sapiens
ataaaggaaaatatcggctctgtgtttgggcagaagcaggaagagtctaacctgtctctgcaagctcttgagtcc

SEQ ID NO: 150469 - DNA, 50 bp, Homo sapiens
ggaagaagcaacacattgtcttctccaagctggagtgcagtggtgccatc

SEQ ID NO: 150470 - DNA, 95 bp, Homo sapiens
tggcggacagtgcggaactaaagacggaaatggagagctggatttctccacttttctgaccattatgcacatgcaaataaaacaagaagacccaa

SEQ ID NO: 150471 - DNA, 83 bp, Homo sapiens
gcaacactcgcttggttggggagatcggcgcttggccgacaatgcagatcttcgtgaagactctgactggtaagaccatcacc

SEQ ID NO: 150472 - DNA, 100 bp, Homo sapiens
gcggaggctctcactttccgtcatggcgctgaagtgtctttggtgcaacactaacaaggcttgtctggactacccagttacaagcgtcttgccaccggct

SEQ ID NO: 150473 - DNA, 101 bp, Homo sapiens
ctacgagctgctggagcgcgtggaggagccggtgctgcagaaccagatccgggagcacgtcatcgccatcgaaggaagtgaatactctggcaatgcctatg

SEQ ID NO: 150474 - DNA, 82 bp, Homo sapiens
ggagatcgccacctacagccgcttgctagaggttgaggacgctcaacaatgcagatcttcgtgaagactctgactggtaaga

SEQ ID NO: 150475 - DNA, 75 bp, Homo sapiens
taaaaacaggatgaaaaagactgattggctcttcctcaatgcttgtgtgggtcacagaacagaaagtgctggtgg

SEQ ID NO: 150476 - DNA, 151 bp, Homo sapiens
ggagttggcggggccctgcgccggaggaggaggaccaggcccgcgggctcagctctcgccgccagcgggccgcaggtactgcataagccgaccacagtataagacttcttgtggcatctcttcattaatttcttgttggaatttcttatac

SEQ ID NO: 150477 - DNA, 101 bp, Homo sapiens
agcagtgactctgctggctttggcgtatacacaggtgatctgcaactctttcaccatctgtaatgcggagatgcaggaagttggtgttggcctatatccca

SEQ ID NO: 150478 - DNA, 96 bp, Homo sapiens
ctgaatccaggaggagacccttctacgcctggttacccaagtgtcgggtcaaccattgataactttttacattcactgaggcgacagaacatagct

SEQ ID NO: 150479 - DNA, 75 bp, Homo sapiens
gtggatgaagttgttcattgtttgtcaccacaaaaaggacagaacattaaccaggtggtatttgttggaaatttc

SEQ ID NO: 150480 - DNA, 100 bp, Homo sapiens
ccgaattcagaaggatatcgacgtcgtgatccagaagtccagagctgaggactgcctgtttgcaggtatttatgagcctccatttcttatactactgcag

SEQ ID NO: 150481 - DNA, 50 bp, Homo sapiens
ttgcagaaacttcataaatatatgcagaataaggagtttgtgtgtcgagg

SEQ ID NO: 150482 - DNA, 104 bp, Homo sapiens
gtcctgaccaccgtgaacggacagtcccccccagtgcctacaccaactaatgttacaattgaatcctataacatgaaccctatcgtatattgggagtaccagat

SEQ ID NO: 150483 - DNA, 78 bp, Homo sapiens
ccctcccgctcggccccgccagcagcactgtggaggccgtcctcgagctggccacggtagtacggcggttctcccaga

SEQ ID NO: 150484 - DNA, 117 bp, Homo sapiens
tttgtagcattgatttcccggatctggtaacatggcaaaagatcctggagatttgaaaaagagaattgaatctctgatagacagagactatatggagagagacaaagacaatccgaa

SEQ ID NO: 150485 - DNA, 74 bp, Homo sapiens
cagtgctgcgacccttggaactaaaaacttttctcaaagttggaatccattacattgggcgtatggaagagggc

SEQ ID NO: 150486 - DNA, 51 bp, Homo sapiens
aaaatgcaaaaaaggaggccaaagactttggtactggaagatgaaagagac

SEQ ID NO: 150487 - DNA, 100 bp, Homo sapiens
accgaccagactcatggaggccagattttctccaattaaccagatcttgccctggtgcagacaagacttaggaagacaggcgcgatgatggactccccgt

SEQ ID NO: 150488 - DNA, 51 bp, Homo sapiens
ccatcttctaattttcattccttcaaaggatggatgacatccagctctgca

SEQ ID NO: 150489 - DNA, 97 bp, Homo sapiens
gcagcgtcaagagtctgagccagctgtagctggaaccactataacatgcagtacgcactagcagtttccaagcagcggggcacaaaacgctccctag

SEQ ID NO: 150490 - DNA, 75 bp, Homo sapiens
gagaaggaggaggtgaccacgcgcgaggaacttagtgatttggcccgtgaccctccagcacaatgttctgcaggt

SEQ ID NO: 150491 - DNA, 82 bp, Homo sapiens
cagttacaacagcatacagcatttctcccaccaggtcggttagaccccgtttaaccatctatgtctgccgggagcagccaag

SEQ ID NO: 150492 - DNA, 100 bp, Homo sapiens
acatcttgttttttcatattacatctacaagaggggacaagtacctttatgaaccagtgtatcccaagtacaagcctatgcagaaagtggatggggttgc

SEQ ID NO: 150493 - DNA, 100 bp, Homo sapiens
gtcacttctttacttggtgcaggaaggcagtctttgctacgtacagcaaaaggttcgttccaccagtcataaaccagatgaaatctatggcatgattgaa

SEQ ID NO: 150494 - DNA, 100 bp, Homo sapiens
ccgtgaacgaaagcagtgacggaggagcttgtaccaccgaggtgcccacgagtgtattcggggagaagcttcgagaacaagttgaagagcgactgtcctt

SEQ ID NO: 150495 - DNA, 82 bp, Homo sapiens
cctggtcagagtgtatgttgtaaagcaaaacccttgaagatcgtttgaaaattgaagcaaaaaatgggacattgagtgtatc

SEQ ID NO: 150496 - DNA, 100 bp, Homo sapiens
ttaccagctcacctctcaccgcgcatgtttggagctccggagaaggggtctggtcgaaccacggctgtgcgctcacgagaggaaacctcacctactccgt

SEQ ID NO: 150497 - DNA, 100 bp, Homo sapiens
atactcctcccagtgacgggtctggagtgcgtgggggaccggctgttggcgggcaatagccctctggaacaagacaattcatgtgagataagaaagaaga

SEQ ID NO: 150498 - DNA, 73 bp, Homo sapiens
tcaccagtgagctggagaagttccaggtcgagtcccagacaccagaagtctgaatttggagaaggctggggta

SEQ ID NO: 150499 - DNA, 100 bp, Homo sapiens
attttgatgtggatgatgccaaagttttattaggtgaactagagaagttgagaaaggaatggaatgcattggaaaccgaatgccattctctaaaaaggga

SEQ ID NO: 150500 - DNA, 100 bp, Homo sapiens
accgagccgcccagccccgctcccccggacccatcggcgcgctgcccacacctccaggcgaccggagtcgggccacaaaaagttaaaaagtaccatccag

SEQ ID NO: 150501 - DNA, 74 bp, Homo sapiens
tcaagcctgacttctagccaagggtgtcgtagtcattcttcagcacaattcttaattggagaccaagaaccctg

SEQ ID NO: 150502 - DNA, 82 bp, Homo sapiens
gggctgggagcagcttcatgactacgcggagcgggagagcggccacaccatgcgagaacaactctgctcatggtgattacat

SEQ ID NO: 150503 - DNA, 82 bp, Homo sapiens
ggaggaaggaacgaggcaaggagctaaagcagcgtgcgttcagccctggggctgctgacttgagtaaaccaatagataaaag

SEQ ID NO: 150504 - DNA, 83 bp, Homo sapiens
agaggctgagtgaaggccgggggctgccccctccccccagcgtccgtctccaagagagtatgaagagagtgcgtctgtagggc

SEQ ID NO: 150505 - DNA, 74 bp, Homo sapiens
agttaatcctcaatttaagcctgatctaacccctagaaacaggtttttggattcaaagcataaaaaccattaca

SEQ ID NO: 150506 - DNA, 100 bp, Homo sapiens
gaacagcaggcgcgcacgcgggttgggacccctgattttagcaggatggcccaatggaatcagctacagcagcttgacacacggtacctggagcagctcc

SEQ ID NO: 150507 - DNA, 73 bp, Homo sapiens
gagtccaagttcaaccaagccattgtggacccccaaaagtacaagggcatatttaacggattctcagttacac

SEQ ID NO: 150508 - DNA, 75 bp, Homo sapiens
cagagagatggagagagacctagttaggaagagagaagggcacagttacctaagtatcaacgtaatcttcctcgg

SEQ ID NO: 150509 - DNA, 73 bp, Homo sapiens
cgagcatgttcaccagggcccagctgttctccatagtggtgttcggctccatcgtgaacgagggctacctcaa

SEQ ID NO: 150510 - DNA, 75 bp, Homo sapiens
atcccctgtttgagaaaaggcctaagaattttggcattggatctgcctacaaactggtttgctactttaccaact

SEQ ID NO: 150511 - DNA, 129 bp, Homo sapiens
ccatggtgaagtataggctgaggctacctgtgaacagtacgcagtgaatgttgtggatcttgaacgcaccttcacgtttcgaaattcaaagcagacctactcagggattcccatcatcgtggccaacat

SEQ ID NO: 150512 - DNA, 50 bp, Homo sapiens
gaaaacttgctgcggttgctcaagatggctcatgatgccctcaatgcccc

SEQ ID NO: 150513 - DNA, 100 bp, Homo sapiens
gcacgggtgcgggagtggagagcggcaatggagataattgacgaccttgccaacctagtggagaacacagatgaaaaacttcgcaatgaaaccaggcggg

SEQ ID NO: 150514 - DNA, 50 bp, Homo sapiens
cggccttccctcacctacaagagacagagcgggatgccaccagcttgtcc

SEQ ID NO: 150515 - DNA, 75 bp, Homo sapiens
tgagatgtttctggaatatcaaaatcgtacatgtaaagtgcattttcctgatccaaacaagcttcattgttttca

SEQ ID NO: 150516 - DNA, 100 bp, Homo sapiens
aacaaaattgtatctgtttttctcagaagagaattccacaaggagaagacagactgctgctttggacctgttggtaatgatggcctgagctaaacatcta

SEQ ID NO: 150517 - DNA, 100 bp, Homo sapiens
aggcaagctacaaagcctagacctttcagccgctgccgaaatgctaggggtggccgtgtcacagtctggccaaggaaatgaaattgggagttgctgtgtg

SEQ ID NO: 150518 - DNA, 74 bp, Homo sapiens
gagcaggaggatcaggagccgcggccgcggcggcggcggccgggaaggagcaggttcaggagaagtggcacctg

SEQ ID NO: 150519 - DNA, 75 bp, Homo sapiens
gcgccgggtcgccacatactggctgtatagatcaattggagaatacgacgtcctccgtgggatttttaccagtga

SEQ ID NO: 150520 - DNA, 102 bp, Homo sapiens
cagcacttggagcgcagaaccggccgcgcccggtttcagtctacaggaaagttaacaggacacctaggccctgttatgtgccttactgtggatcagatttcc

SEQ ID NO: 150521 - DNA, 75 bp, Homo sapiens
tgaagactgtggtcattgtgcttgttgcaggaccagctctgccccctaattataaaagcagtagttcagattcat

SEQ ID NO: 150522 - DNA, 75 bp, Homo sapiens
caaggaggtgaaggacaagctcctacaaggcaggcagtattgggtgcagatatgtcttgtcgttcaagacttgca

SEQ ID NO: 150523 - DNA, 100 bp, Homo sapiens
ctgttgggctgaaagctcccaagagtacgttactcttcaaggtaccaaacgattccctggttatgattctgaaagcaaggaatttaatgcagaagtacat

SEQ ID NO: 150524 - DNA, 98 bp, Homo sapiens
cctggtcatggcgcagccgggcccggcttcccagcctgacggactttccttatcccagttgattgtgcagaatacactgcctgtcgcttgtcttctat

SEQ ID NO: 150525 - DNA, 100 bp, Homo sapiens
cctctccctccttgcgcgttccgggtctcggttgaaaggaggagcaggaggtactgatggacaaggaggtaccttccggtacacctttcatggcgatcct

SEQ ID NO: 150526 - DNA, 90 bp, Homo sapiens
aaagggttcagggttgaaaatgagctcagtgaaggtggtgtttttaaggctcatcttactttcccaaaagattatcccctccgacctcct

SEQ ID NO: 150527 - DNA, 75 bp, Homo sapiens
cggagcccggctcccgcaccatggaggaggacgacagctacgacataaaggtgagatggcctacatcgtggtgca

SEQ ID NO: 150528 - DNA, 100 bp, Homo sapiens
cacaggctccgatggcggcggccgccctgagggaccccgctcagatcgactcctttgagctgctctactattatgatgagtacctgggtcactgcatgtg

SEQ ID NO: 150529 - DNA, 50 bp, Homo sapiens
ctttgacctttttgaagcctttgcaaaagcctatcgctggatgattgact

SEQ ID NO: 150530 - DNA, 98 bp, Homo sapiens
catggaggctgagcatttattcaggaacctgttttgttcactggaacaatgaggaaaaacctggatccctttaatgagcacacggatgaggaactgtg

SEQ ID NO: 150531 - DNA, 75 bp, Homo sapiens
ctttgctccagcctggcttaatttccctactccaccatcatcaacaaagaattccttgtgtggatatcagatccg

SEQ ID NO: 150532 - DNA, 75 bp, Homo sapiens
ctggcattggaacttcctgttctgatagcgtggaaggttgttatggagttgatggagagagtgactctattatga

SEQ ID NO: 150533 - DNA, 100 bp, Homo sapiens
caagaattgagaactggcttagcaactgtagaagcacaggatcagttcttaagagcagccccggtaactggaggaatgggagccgttttgatgagaaaaa

SEQ ID NO: 150534 - DNA, 101 bp, Homo sapiens
ggcgcgctgctggacgaagagctctcctccttcttcctcaactatctcgctgacacgcagtaagactttgaccccgacgcaggcttcagtgattgccgcgg

SEQ ID NO: 150535 - DNA, 113 bp, Homo sapiens
ggtttggttctcccggcagcagcccgacgcaaaccaaggatctggggatcttcgcactatcccaagccactcatctctgcccagctgctgccctccccaggaggcctccatgg

SEQ ID NO: 150536 - DNA, 75 bp, Homo sapiens
gagacagccaacaaaatattcatggttcttgagactctgtttgctggctacacggacaacctggtgcgagtgtgg

SEQ ID NO: 150537 - DNA, 74 bp, Homo sapiens
tacctgtcgtagggagatttgggtagaagccctcatgctgaggttcatgaaccatcgagctccagccaatggcc

SEQ ID NO: 150538 - DNA, 83 bp, Homo sapiens
ccgcgtcttcctcaaggtggggttcggggggccaccgaatcgctgtcacgccggcaggattttttatcaagcagaaatgcatc

SEQ ID NO: 150539 - DNA, 100 bp, Homo sapiens
gccctgagcgcactctggagggattctggcatcagggaggctttcagccggagaagcgagtttcagctggaagatgatccctatgatcttgaagatgttt

SEQ ID NO: 150540 - DNA, 75 bp, Homo sapiens
gattctcttgaccatgtgacatctgatgctgtggaacttgcaaatcgaagtttatgccagttattcagacagaaa

SEQ ID NO: 150541 - DNA, 74 bp, Homo sapiens
agatctgatgaatgaaatgaggaggattacttcggacttcagaattgcctttaaagtatctagcatagattctt

SEQ ID NO: 150542 - DNA, 100 bp, Homo sapiens
aaaaagaagaaaaactgaattggaaatttttattcggaacatgaacgattggatgcccatcgccaaggagtatgatccactcaaagcgggcagcattgat

SEQ ID NO: 150543 - DNA, 82 bp, Homo sapiens
gctgatttgccttaaactccctaaaatctccgcagctctggttcctgttgcggccgagtgcctggtgaagaatgtgatggga

SEQ ID NO: 150544 - DNA, 88 bp, Homo sapiens
aaggtgatctggacaaaggaacaggtatctcaggtatctcattcagttgctaaacttatattagttaatttccactggcaagtttcag

SEQ ID NO: 150545 - DNA, 50 bp, Homo sapiens
agacacagtatggtagccacacccccagagtcaagggtccagagaaggag

SEQ ID NO: 150546 - DNA, 46 bp, Homo sapiens
gcgtgggggaccggctgttggcgggccaccagcccctcgggttcca

SEQ ID NO: 150547 - DNA, 100 bp, Homo sapiens
tcaacgctctgctgcccgctgtgagggaaaaggtaaaataccatgaagattttgaaaaaacaaaggggagaggctttactcccgtcgtggacgatcctgt

SEQ ID NO: 150548 - DNA, 75 bp, Homo sapiens
ccagcgggcctggactgtgggctggtgtgtggaactgctcccagggttgctagagctccttgtagaatatttccg

SEQ ID NO: 150549 - DNA, 83 bp, Homo sapiens
aggagtcctccacctcgtcgcagatcctgggtgtttggctgacctacagatacaggaaccagaaagacccccgcgcgaatcct

SEQ ID NO: 150550 - DNA, 100 bp, Homo sapiens
cgacgacgacgaggaagaggaggtttctgagcaccagcagacgtttttgaatcaactgagagaaattacggggattaatgacacccagatactacagcaa

SEQ ID NO: 150551 - DNA, 133 bp, Homo sapiens
ctgggatggaagtaaaagacaatgctggcaactgggctctaatctcctaaagatagacagctcaaatgaattgaagtctgggccaacggtcacaaaagttgtcactgttgtgacaaccaaaaaagcagttgtg

SEQ ID NO: 150552 - DNA, 75 bp, Homo sapiens
cgcacgtcctcctgaggaagcgggagtggaccatcgggcggagacgagtttaatggatcgagaagtggcgttgct

SEQ ID NO: 150553 - DNA, 75 bp, Homo sapiens
atcatcactgaatacatggagaatgatggcctgatatgaaggagtcacgcctcccgcctcccggagctgcccagt

SEQ ID NO: 150554 - DNA, 82 bp, Homo sapiens
atgcagggtgtgagcagggctgagatgggcaccgcggatctggggccgtcctcaggtgagaagccctaccactgcaactggg

SEQ ID NO: 150555 - DNA, 76 bp, Homo sapiens
ggaggacccaaaggagcagaagcttctgttaaggattctcagaagaatggtgattgcccacagtgagtatcaaaag

SEQ ID NO: 150556 - DNA, 74 bp, Homo sapiens
acaggacaggctaacaccaatggaggctttacttcagacaagcgcggagacccacatcaagggcttcacactga

SEQ ID NO: 150557 - DNA, 50 bp, Homo sapiens
gggctacgctcctccatcacgtgctcaggagcatctatcggctgcacgcc

SEQ ID NO: 150558 - DNA, 82 bp, Homo sapiens
cccagccccacagaccagcccagcattcaggagggccctcctggacccgggagcggaccctggtggcggtgaagcccgatgg

SEQ ID NO: 150559 - DNA, 100 bp, Homo sapiens
tgatgcacctgggattaaccagcgaggatcagttggaggacgagtaagtcgtgaattaaattatactcgccagaagattggagaagaggctatgtttaat

SEQ ID NO: 150560 - DNA, 89 bp, Homo sapiens
cggcgagccccaggagccgggggacgacttcttcaacatgctcatcaagtaccaggcacgtctgagaatggtggatgtggtggagaaag

SEQ ID NO: 150561 - DNA, 90 bp, Homo sapiens
ttggagaactacagaaacctcgtctccctggaatatgacagatacctagcatctagcaaaataatggcagctgcttaccttgaccccaac

SEQ ID NO: 150562 - DNA, 83 bp, Homo sapiens
ggcggaagaaaatacaaatcacacgcataatggatgaaaggaaccgacagatccccaagtaagcccttggcacggaaattaat

SEQ ID NO: 150563 - DNA, 88 bp, Homo sapiens
gaaaaagcaccattgtgaagcagatgaactcctgtcttcgttcctggctagaacaagacacctcctgtccaacatgcagaatgtctct

SEQ ID NO: 150564 - DNA, 100 bp, Homo sapiens
gacaacatcaccgtgaggcagggggacacagccatcctcaggggaaggggaggagttacagcccggccagttggagttgtagtaccacgagggacgccaa

SEQ ID NO: 150565 - DNA, 100 bp, Homo sapiens
ggaacagctacagtcgctgttaaatgtgcctgaaaagcaatttgcaatctttgcattagaggatgatgtggacctggaagccctggtgaacgatatgaat

SEQ ID NO: 150566 - DNA, 98 bp, Homo sapiens
agccatcaaggagagctgcacctgggccctgggcaggtgacagcagggacatgtctcgggagatgcaggatgtagacctcgctgaggtgaagcctttg

SEQ ID NO: 150567 - DNA, 100 bp, Homo sapiens
ggcgttgtcgatgccgctgaatgggctgaaggaggaggacaaagagcccctcatcgagctcttcgtcaaggtgactgaaaactcctgaggcatttcctgg

SEQ ID NO: 150568 - DNA, 76 bp, Homo sapiens
gcctcagcctcctgattagctgggattacagtaccacctgtactctgagcctcagtttaatgtccctgaaaagccg

SEQ ID NO: 150569 - DNA, 100 bp, Homo sapiens
ggcgtggtcaacatccctgccgcagaggacactgtaatttatgatcgactggcagagacgtcaaaatacaaagaaattaccctaaaacatttagagcagt

SEQ ID NO: 150570 - DNA, 100 bp, Homo sapiens
tctcagctgccacctgcctttgacctttttgaagcctttgcaaaaacatggaaggtctttaatgtaactttaaatggttcaccaaaggatgctctaatgg

SEQ ID NO: 150571 - DNA, 75 bp, Homo sapiens
ccacgacccacgagatcatggggcccaagaaaaagcacctggactgcctggaagaaacgctggtttatcctgcgg

SEQ ID NO: 150572 - DNA, 74 bp, Homo sapiens
gccgagtatgtcgcctatgttgccaaagaccctgtgaatcagagagctgggtccatggctggcagtggaaatcc

SEQ ID NO: 150573 - DNA, 101 bp, Homo sapiens
ggggactggcctggcgtgcactccgcacctcggggacattattgcgcgtggaacggctgcttttggaagtattaattttaaagacccacagtttgctgaag

SEQ ID NO: 150574 - DNA, 100 bp, Homo sapiens
ttcagagcgtcacggcgtacgccctcatggggaaaatctccccggtgactttcagcagaccatccgagagctgtttgatatgcccctggaggaaccttct

SEQ ID NO: 150575 - DNA, 100 bp, Homo sapiens
agcccgaccccagccggagcttcaggccttaccgagctgaagacaatgattcctatgcctctgagaccaagagcagtgatgaccttttagctggaatggc

SEQ ID NO: 150576 - DNA, 83 bp, Homo sapiens
cactggcagaattgcaaagatgcatgaggtggtggtcaccaatacaattccacatgaagtccagaagctccagtgccccaaga

SEQ ID NO: 150577 - DNA, 83 bp, Homo sapiens
ccgctcgctgcagtccgagaacgccgcgctgcgcatctccaacagcgacctgagcggtgagcgagtgctgtgctttcatgggc

SEQ ID NO: 150578 - DNA, 90 bp, Homo sapiens
cctttatgaaccagtgtatcccaaagcctgccttctggtacaagatgcctgtggaatgttcggtgaagtgcacttggagttcaccatgtc

SEQ ID NO: 150579 - DNA, 50 bp, Homo sapiens
aagcgaaatgggcacaccacagggtttttggagtctctggatgattttta

SEQ ID NO: 150580 - DNA, 97 bp, Homo sapiens
agtgaaccggagaccccgaaaacggaagcgcagggagaaggaagaggtgtttgaaaaggtctaacttcaaacttgtggctgttaattcaaaactcta

SEQ ID NO: 150581 - DNA, 75 bp, Homo sapiens
cccaggcatcctactatgcttcctgagtgcttctttcttggagctgaccatggagccaaggcaaagagggaccac

SEQ ID NO: 150582 - DNA, 100 bp, Homo sapiens
cccatgttctgcagcgtggcttcctttggtgccagctctttgtctaggtatctcagatgaagacatcatcaacattactcttcctactggagtccccatt

SEQ ID NO: 150583 - DNA, 90 bp, Homo sapiens
cctccaggccgtcagcctgatgcatagcgaatttgcccagctgcccgcgctttatgaaatgactgtcagtctctgttggatgaacccaat

SEQ ID NO: 150584 - DNA, 76 bp, Homo sapiens
tgcagccccaggatgcctcgcagtgttacctggaatgtcagagagctgaaagcagtcatattttgggatcatgcac

SEQ ID NO: 150585 - DNA, 83 bp, Homo sapiens
cggcagtccacccaccgccgccgcctcccagagcctggagacacaggccccatccttcccaatggggacacttcagggagcgg

SEQ ID NO: 150586 - DNA, 83 bp, Homo sapiens
gctcttcagaagtccccagcgccgttccttccagatcaggtgaaagaaaatggcccgaaccaagcagactgctcgtaagtcca

SEQ ID NO: 150587 - DNA, 75 bp, Homo sapiens
gcctttgggaagcatgtcaccaacccggccttcaccaaactccctgtcacgagaagagaatgccttctagatgca

SEQ ID NO: 150588 - DNA, 87 bp, Homo sapiens
gcggagactgggcggccggccgacccttcctgtcgctgacggcgactgcgggaggccagagtatggaagagttggagaagaatcatg

SEQ ID NO: 150589 - DNA, 76 bp, Homo sapiens
tcctatctgttcaattcttatagccattcttatagttgtaagtttctatgcagattttggaccgctgaacttggca

SEQ ID NO: 150590 - DNA, 85 bp, Homo sapiens
ggggggtaacttgcatggacaggcagagtctccgctgggcattagtggtgaaatagggccttctaaacctgtggagaagtgagag

SEQ ID NO: 150591 - DNA, 100 bp, Homo sapiens
caggatgtcctggtctggccttctccatggcctcaacacgtccctaacttgtgcccagtggttcccagacacaggtaatcttgggcacctccaagagcaa

SEQ ID NO: 150592 - DNA, 107 bp, Homo sapiens
gctcacccgtggaaagtacaggtcctgacagctggtttttcttcccccagtccctcagctgctgctgctgctcaggaggtcagatctgccactgatggtaataccag

SEQ ID NO: 150593 - DNA, 112 bp, Homo sapiens
gaaagctggctcccgcggaacatttacattgtggctggcgtcttcatcgccatctcgctgttgcagcagcgagtgacaagcacatccaatggctcctaggggcagatggcga

SEQ ID NO: 150594 - DNA, 51 bp, Homo sapiens
tcgacttcctcacccgcgcctgcgacctcgtctgcaaaatgaatgttcacc

SEQ ID NO: 150595 - DNA, 82 bp, Homo sapiens
cggaggctctcggcgagcgcggcgcggtaacaagtgggcgaggatgccgtacgagatcagccacgtgctgtacgccgacatc

SEQ ID NO: 150596 - DNA, 51 bp, Homo sapiens
ccgacatggaacagggactcactgggggtgaccatggaggctggtggcctc

SEQ ID NO: 150597 - DNA, 50 bp, Homo sapiens
ctaccacctagaactggattgtgcggttgtatgtaaactggaggtttatg

SEQ ID NO: 150598 - DNA, 51 bp, Homo sapiens
cttgtcaggctagtctttggatgggaaggttcctggtacagttcagacagg

SEQ ID NO: 150599 - DNA, 82 bp, Homo sapiens
cacatattctgtctgtccacgatagtgccaggcctatgttggaggtatgatctcgtgaaatcttgagagaaactgaatgacg

SEQ ID NO: 150600 - DNA, 100 bp, Homo sapiens
cgggatggcggaggcgcctcctgtctcagcttttatgatggtcaacagcctgtgctggctatcacagatcctgacatgatcaaaacagtgctagtgaaag

SEQ ID NO: 150601 - DNA, 98 bp, Homo sapiens
aaagaacagaggcgacggctagaagaggtttatcttgcagattatggactttcctacagatattgtcccaatgggaaccacaaacagtatcaggaaaa

SEQ ID NO: 150602 - DNA, 100 bp, Homo sapiens
ggcagtcggatagacaataccacaacaacacattttgcagaggtattgctggatgctgtgccaaaacaacagttgctccattggatcgagtaaaggtttt

SEQ ID NO: 150603 - DNA, 82 bp, Homo sapiens
ctggagcttctggactgagggccgcgaacctggagctggttgaaaaaggcttcagtaacttgaagaaacaaattgaaaatgc

SEQ ID NO: 150604 - DNA, 88 bp, Homo sapiens
gtcaatgggcatactttgttggttgcatctgctaaagaggatcctgccaacattttacaggtttgagcaggaagttctgggggctcca

SEQ ID NO: 150605 - DNA, 75 bp, Homo sapiens
tatcgaaccctctacatcgggacaggtactggtgtggcatactcggacagagaagcccaagatgaagcaggagga

SEQ ID NO: 150606 - DNA, 100 bp, Homo sapiens
atggagacgccattggatgttttgtccagggcagcatctctggtgcatgctgatgacgaaaaaccacttttccagccattaactccaggctctcgagaat

SEQ ID NO: 150607 - DNA, 85 bp, Homo sapiens
tgatactactgctctggatgaactgggacttagcaaatatttggagtctaatggaatcaagtatggcatgcagctgtaccagaat

SEQ ID NO: 150608 - DNA, 50 bp, Homo sapiens
ttcagacaactcaaggccaacaggaagtagaacgcaacctccaggatgcc

SEQ ID NO: 150609 - DNA, 90 bp, Homo sapiens
ccgtgaccgagagcgtgaccgagagcgcgaatatcgtcatcgttagaagaacgtcgaaatgctgagcagcatggattctgcatcggttcg

SEQ ID NO: 150610 - DNA, 74 bp, Homo sapiens
ggcagaaggtgtcattttaagacgagtaggcgaagcaaggacttgagtatcttcccagtcttgttattctcttt

SEQ ID NO: 150611 - DNA, 101 bp, Homo sapiens
gtttcagctcgctggcggaaggctacatgcggttagatgacagtgggattgggcatttgacactcttgcaaaagcattgaatcctggagagagcacagcct

SEQ ID NO: 150612 - DNA, 75 bp, Homo sapiens
gagttcgcctcagacgcggtggagccgccggagtctgagaaggtgaacattattcccatcatcgccaaggctgac

SEQ ID NO: 150613 - DNA, 98 bp, Homo sapiens
cgacctctcacctgtgacgggcacgacacctggggcagccccgtcgcagaatttagtctcaaaggaaacttcaaccacagcactgcaggcctctgttg

SEQ ID NO: 150614 - DNA, 90 bp, Homo sapiens
agtccccccaagtctcctgaagaggaaggagcggtgtcctcttaagaaaatggccctggtgcccttccacaacctgggccttctcatcgg

SEQ ID NO: 150615 - DNA, 101 bp, Homo sapiens
atcaacccagaacggatagctccctcctggaaaagtggtggacttgctttgtgaagagacagttcatgaacaagagtctttcaggacctggacagtgaagg

SEQ ID NO: 150616 - DNA, 75 bp, Homo sapiens
tcctggtgaccgagcacccgcctccgggcatcttcaactgttagcatggcctcattgaaagaactagatcaaaga

SEQ ID NO: 150617 - DNA, 90 bp, Homo sapiens
tatcacatgggtccaaccccagggtggtggatgacgacggcatgaccagtctgcataaggtggtgttcccactgatgaagagcaggcgac

SEQ ID NO: 150618 - DNA, 75 bp, Homo sapiens
ctgctacctgcagcgccgtgtggcacgacacaaaaatcaggccctggagggacaggaaagccagaaatggacttc

SEQ ID NO: 150619 - DNA, 100 bp, Homo sapiens
ccagaagcaaagaggctactgataaatctttacaagcttgtaaaatctcaggacatgatgagctacattgggcccaagaggacagcagtggtgcggggga

SEQ ID NO: 150620 - DNA, 96 bp, Homo sapiens
gacaaaaccaagttggatcctaacaaggttctcctgaaaagaaagctgaacattcatctataaatcaagaaaatggcactgcaaaccctatcaaga

SEQ ID NO: 150621 - DNA, 82 bp, Homo sapiens
tggggaagaagatcgtgtttgtaacggggaacgccaagaagctggaggagggggcaatggcggcttcctgtgttctactgca

SEQ ID NO: 150622 - DNA, 83 bp, Homo sapiens
cgcgtggtgcttgccgcagccagcaactatttcaggcctgtatccggtgtccgaggcgaactcagtaagatgatgttaagagg

SEQ ID NO: 150623 - DNA, 50 bp, Homo sapiens
aatcacctctcggaacgtcactcggactgtgccctgtccacggtgcctcc

SEQ ID NO: 150624 - DNA, 105 bp, Homo sapiens
cgccgagctgcgcccgctgccttcacaccccggacatccgcgccacactttggaaattttagcattcaggtgccaggaatgcagatgggacagccagtgccagaa

SEQ ID NO: 150625 - DNA, 98 bp, Homo sapiens
agtgggtcgagcagctgaacgagtgtaagcagctgaacgagaaccaagtgcggacgctgtgcgagaagggttacacatcattttggaatgactgtata

SEQ ID NO: 150626 - DNA, 80 bp, Homo sapiens
ggtgaatggcagcaaggtgggcccggacggcacaccctacgttaccgtgctcaagggtcagtatagaccttctgatttgc

SEQ ID NO: 150627 - DNA, 90 bp, Homo sapiens
aaataaattagtggcagagtaagggtgacttgaataggaaggagattcgcttgctttgcacagaggctgagccacaggagaaagcaaagc

SEQ ID NO: 150628 - DNA, 101 bp, Homo sapiens
cgacttcatgctcggcgccaaaggtactccaaagattcaggtttactcacgtcatccagcagagaatggaaagtcaaatttcctgaattgctatgtgtctg

SEQ ID NO: 150629 - DNA, 117 bp, Homo sapiens
gtctcaatatctgtcttcggtggactccttcggcagtccacccaccgccgccgcctcccagactgattcttgctattccaaatcctcttccacgttgacagcccttcagatatttca

SEQ ID NO: 150630 - DNA, 100 bp, Homo sapiens
aagccctccagcagttcccgtgccctccctcccactggctcttcgggcacatccaggaggaagcaatgaggctccccaagaacacacctgaggaaaagga

SEQ ID NO: 150631 - DNA, 50 bp, Homo sapiens
ctttaaagtgggcactgcaaaagtgattttcggacaagcaaacaccacgc

SEQ ID NO: 150632 - DNA, 75 bp, Homo sapiens
gaagacttgaacttaatacagcaagaaagaccatcaagtttaccagtggataatccagtttctgttttaacacaa

SEQ ID NO: 150633 - DNA, 100 bp, Homo sapiens
ctttctgatgctccatcccactactctcaagatacgccaatgcgctcaaaggcaaaaaggttgccgaggtactgtctgaatgccgcctgctcgcctacat

SEQ ID NO: 150634 - DNA, 90 bp, Homo sapiens
cccgattgctgcagccgcttgtcagtgtgatgaagattggcacccaggtttgctggttggctcccgagcagacagcaggaaagaagaagc

SEQ ID NO: 150635 - DNA, 75 bp, Homo sapiens
gcgggggccatcgcgcagggcctcatcagagcaggtgctcctgacctctgataaagctgcagccaatttctcaga

SEQ ID NO: 150636 - DNA, 101 bp, Homo sapiens
aaatggaacacggaggataaagtcagccatgtgagcactgggggtggtgccagtttggagctcctggaagatgtaggtgcaaaaaactacagacatctctg

SEQ ID NO: 150637 - DNA, 75 bp, Homo sapiens
attcatacgacccctatgacttcagtgacacagaggaggaaatgcctcaaggtgctggagaatctggtaaaagca

SEQ ID NO: 150638 - DNA, 101 bp, Homo sapiens
gcagatggttcccaggctcagaatctggagtcccggacaataattcggggcaagaggacccgcaaggttgaaggggcccggccaggactcggggaagggtg

SEQ ID NO: 150639 - DNA, 50 bp, Homo sapiens
ctgccatccactgactcgtaaatcaagtccatcatctccagaaccagcta

SEQ ID NO: 150640 - DNA, 104 bp, Homo sapiens
ctgcgttgaggatctttgctcttccatccgcctttgatcgtcttcctcttcagccatccaggtttacggggtgaaaatagacttttaaaaattctcttacctta

SEQ ID NO: 150641 - DNA, 100 bp, Homo sapiens
caaggcccccgagtgagcgcgggcgccgagatcagcttgaacgggtctttttacgacttggccatgctgaaacagatgaacaattacagaatattatatc

SEQ ID NO: 150642 - DNA, 75 bp, Homo sapiens
tgtacctgttaccactttcaaaacacttgaaaagtcttatgacacgtccttctggccttcatgatttctgctgaa

SEQ ID NO: 150643 - DNA, 80 bp, Homo sapiens
aaggattccaagtaactcttatttgctgctgcagaagaatattttgcctgctggaacctgctgtatctactcaagagtgg

SEQ ID NO: 150644 - DNA, 100 bp, Homo sapiens
ggagatccgcgaccgcatgtggctcaagatcaccatcgccaatgccgtcatcgtttgacaagtatgcgcccaagctggacagcccctacttccgacattc

SEQ ID NO: 150645 - DNA, 100 bp, Homo sapiens
atgccgcagtccaagtcccggaagatcgcgatcctgggctaccggtctgtggtgtaacctcacctccagctctcacacccttacatacagctactggaca

SEQ ID NO: 150646 - DNA, 100 bp, Homo sapiens
ggtcaacggtgatgccacagccggctccatccctgggatgttctgttcttgaaggactgtgtaggcccagaagtggagaaagcctgtgccaacccagctg

SEQ ID NO: 150647 - DNA, 107 bp, Homo sapiens
acaacagggacacctggttccagctgcagcacgtggacgctgactcggaagtgcagggggggccctcagcctcttggccttgaacgggctgttcatcttgattcaca

SEQ ID NO: 150648 - DNA, 75 bp, Homo sapiens
tgccctgagacggtgtcccgccgaaagcatcaacaacagcaacttgtgattggcggtgaccggatattcagttgc

SEQ ID NO: 150649 - DNA, 50 bp, Homo sapiens
ttcagtgaatattgtgagaatcaatttacctggatcatcattgaactaaa

SEQ ID NO: 150650 - DNA, 90 bp, Homo sapiens
gctgaatgtgttactccattgctgaggagtgatatgtgctgattagaaggctcacttgtgcagtgtggaggataaccagtgccttacaaa

SEQ ID NO: 150651 - DNA, 75 bp, Homo sapiens
ttgggagagctcctgggccacccctcctttcaggtcaaggtaaaggttgtggccagaaagcacgggcagcctggg

SEQ ID NO: 150652 - DNA, 100 bp, Homo sapiens
tgtatgaaaattcctactggacaagaatatgctgccaaaattatcaacaccaaaaagctttctgctagggcttcttctcagcctgttgataaccatgtta

SEQ ID NO: 150653 - DNA, 83 bp, Homo sapiens
gttaggagcgcagtggcggcgcaaccagccttctagggcggcggaggagcagagggagagccgggctcggcgaggccctcgag

SEQ ID NO: 150654 - DNA, 82 bp, Homo sapiens
gtcagagtccaaggtccgggtatcttaccagctctattaccaggttttaaacttcgccatgatcgtgtcttctgcactcatg

SEQ ID NO: 150655 - DNA, 83 bp, Homo sapiens
cttagatctcgacttagattctgggaaatccacaccaccacgtaaggtaatggaactgctggtccatctgaataaacgtataa

SEQ ID NO: 150656 - DNA, 83 bp, Homo sapiens
gcgctgcctacgaggctttctgccgctggagggaggtctccgccaaggactacaaagctgatgaagacccagcattattccag

SEQ ID NO: 150657 - DNA, 90 bp, Homo sapiens
cggggtcggggccggctgaccaggaacctgggcgagcagcggcgggggcccgaggggtcacggagctgctggacgtctccatggagctgg

SEQ ID NO: 150658 - DNA, 75 bp, Homo sapiens
atgcctgccagtgccattttgatatcaattatatccagatcgagagacagaagattctgaaagggttcaatgaaa

SEQ ID NO: 150659 - DNA, 147 bp, Homo sapiens
gcaccgcaaagcggggacccagaccctggagcctcagttggaagcagccgatccagcctgcggagcctgtggggcagcaaattgtggctactaatttgccccctgaagatcaagatggctctggggatgactctgacaacttctccg

SEQ ID NO: 150660 - DNA, 74 bp, Homo sapiens
aagaagttacatctcaatgtccagcctaaattaacaatggcgaaatgcaggcgaaatgtggaaaatttcctaga

SEQ ID NO: 150661 - DNA, 80 bp, Homo sapiens
ggctttgccagcaaaaccgaaacaggtgtgaccaattcagtgaaaggaacgaatgcgattctctggacctgtttgggact

SEQ ID NO: 150662 - DNA, 98 bp, Homo sapiens
ctacaaccagtggcagcagggtgaaaccagaatccgggcaatggataaggatgccaagaaaagaatccataatttctctgtcatcaatcctgttcctg

SEQ ID NO: 150663 - DNA, 75 bp, Homo sapiens
cttaagtccctcaccagcaagttcatgaccacattcagtcagctccgaggaatgtatcctgtcaggtataatgtc

SEQ ID NO: 150664 - DNA, 75 bp, Homo sapiens
agcaccatcagctggggtccgtcaccgacctttggggaactggtgactctgacatcattagaagcatgccagaac

SEQ ID NO: 150665 - DNA, 82 bp, Homo sapiens
cttctgcctggtgctctgcgtcctcatcgggcttatgttcgaggatttggagttccatggagtgatgagattttattttcaa

SEQ ID NO: 150666 - DNA, 100 bp, Homo sapiens
caaagctggaaaggacagtgggaaggccaaggctaaggcagtatctcgctcacagagagctgggctacaggagggagccatggatttgctgcgggagctg

SEQ ID NO: 150667 - DNA, 49 bp, Homo sapiens
cgagcgggaggcagccgtggccgagagaaagccacagatggctccctgc

SEQ ID NO: 150668 - DNA, 100 bp, Homo sapiens
gagaaagtaaatgttgacattatcaattttggggaagaggaagtaaaaggcctacaagcccagattgccagctctgggttgaccgtggaggtagatgccc

SEQ ID NO: 150669 - DNA, 100 bp, Homo sapiens
atgcactgcacaatattaaaactttacctgggatattcaagattaaagcagtgcaattggctgagaaactccttcctgcctttaacacacctactgggat

SEQ ID NO: 150670 - DNA, 75 bp, Homo sapiens
gacggaggacgatgaggcgcaggttgtttgatgtgtgcacagtgtcacgaacagacagagaaaccaaactaactt

SEQ ID NO: 150671 - DNA, 50 bp, Homo sapiens
ccgagctatagagaaaggagatgagggcgtctctggccgagcctcttttt

SEQ ID NO: 150672 - DNA, 90 bp, Homo sapiens
ctgactacctgctgtacaccctcaacaaacaccagcgctttgggcaatagccctctggaacaagacaattcatgtgagataagaaagaag

SEQ ID NO: 150673 - DNA, 50 bp, Homo sapiens
gaacagatgagaaacccggcaatgaaagctggagtgcagtggcacgatct

SEQ ID NO: 150674 - DNA, 100 bp, Homo sapiens
aaggatgttccaaagcacagctgggtctgggggagtacaagaggatgccctgatggcagttagcacactggtggaaggtaaccacatggtggatattggg

SEQ ID NO: 150675 - DNA, 100 bp, Homo sapiens
ggtgccggcctagcgtcctggaattacttcaatcaatcccttcagtctgaatatgttcattactaaggccttgccactccagtgaaagctgttcttctct

SEQ ID NO: 150676 - DNA, 100 bp, Homo sapiens
gctccttttcctccacctaccttcccgacttagaccatgctcagcctccaagcagccttgtcatcgacaaagaatctgaagtttacaagatgcttcagga

SEQ ID NO: 150677 - DNA, 50 bp, Homo sapiens
cctgggtccaaggccgatgtgggcccttctagcccaatccagagctgtac

SEQ ID NO: 150678 - DNA, 101 bp, Homo sapiens
cgctgccggcatggacaacacagtgaaggtgtgggacgtgcggactcaccggctgctgcagcattatcagtgagtcagagtcagaagcaaaggtagatgga

SEQ ID NO: 150679 - DNA, 101 bp, Homo sapiens
ctagcaaaccgagcgatcatgtcgcacaaacaaatttactattcggacaaatacgacgacgaggagtttgagtatcgaaatgcactcggtgatggaaagag

SEQ ID NO: 150680 - DNA, 100 bp, Homo sapiens
gtccacgggggcagaacctggtctggccagagacctgctggaagggctcctcgcacctaccccagcaactcaaattcaccacctcggactcctgcgaccg

SEQ ID NO: 150681 - DNA, 100 bp, Homo sapiens
ccagagtttgtagcctattggaggaaaacacaccaagtgtgctcactgatccgcctccagggccaccgccatgtcgagccgcggtgggaagaagaagtcc

SEQ ID NO: 150682 - DNA, 98 bp, Homo sapiens
gaagagcccgccgcccgcgcgaggaggtgaagatcgagaacttattcagagaaggaaagagaaatacagactagaactgttggaacaaatggctgagc

SEQ ID NO: 150683 - DNA, 90 bp, Homo sapiens
gccgtggaagcctttcagcacgctgtcagtggagacttcatgcttaaccagtacaccaagacatttagattttattccctcaaagttgcc

SEQ ID NO: 150684 - DNA, 75 bp, Homo sapiens
gcggcctgcctccgggcacacccggctccccggacgcctcggagaaaagccttacagatgctcatgggaagggtg

SEQ ID NO: 150685 - DNA, 100 bp, Homo sapiens
tgaacgtcttgcaacagtggccgcacgcataggcccctggccccaacatggcccgtcgctctcagagctcctcgcagggggacaacccactggcacccgg

SEQ ID NO: 150686 - DNA, 100 bp, Homo sapiens
aactcttaggagcagcttggcctaaaggtctgtgaatttctggtacgtgctggtgatgaatgatgagcacacagagaggcgatatctgctgtttttcctt

SEQ ID NO: 150687 - DNA, 75 bp, Homo sapiens
tggaactcacctacctgcccaccaatgccagcctgtccttcctgcagacatatctgaagagatggattaagaatg

SEQ ID NO: 150688 - DNA, 100 bp, Homo sapiens
cccggctctcgcaggcccccccgcgccgaccgcgttcctatggacagacgcacagacacctgcagtgggtgggaggacgctactcgctgtggtcggccat

SEQ ID NO: 150689 - DNA, 100 bp, Homo sapiens
tgtgcaggacaccgacatggaacagggactcactggggtttgcagacctgacagacgctgctgcccgcaacgcggagctgctccgccaggccaagcacga

SEQ ID NO: 150690 - DNA, 100 bp, Homo sapiens
aaaggacagaattgaatcacttgaaaagaggctcgaggtagttaaaccagagagcaatgacaaagaaacagaagctgcgtatgaatcagatatccccgag

SEQ ID NO: 150691 - DNA, 75 bp, Homo sapiens
cctcagagaacatccgctccgactctaccgaggctcagacaggaaatgactgctgtccatgcaggcaacataaac

SEQ ID NO: 150692 - DNA, 107 bp, Homo sapiens
tcaactctttgttgcagaaggaaaaccttcaaggtaatgattgatgaatccctttcatccgatgaccctgattcatatgtgacattgacggttgtccggtccccagg

SEQ ID NO: 150693 - DNA, 100 bp, Homo sapiens
gcgggactctgactccgaacctactgatgataggtggagttggcatgaacttaacagcagcagatactgtgatttttgttgacagtgactttaatcctca

SEQ ID NO: 150694 - DNA, 46 bp, Homo sapiens
catccaatggatgcaggaaaactgattgaaaatattgaacttccca

SEQ ID NO: 150695 - DNA, 82 bp, Homo sapiens
gacgttccatctgtggaaggacctaccaaccagttggaggagagcagattagtgccattggaaggggcatatgtgtgttgct

SEQ ID NO: 150696 - DNA, 74 bp, Homo sapiens
agaattacctggaacttcatcatcatctacttcacaggaattgccattttcttgactcgtctgctgaacaaatc

SEQ ID NO: 150697 - DNA, 83 bp, Homo sapiens
ccaccatggggaatgggatgaacaaggtgacagagctgaatgaacctctctccaatgaagatcgaaatctcctctctgtggcc

SEQ ID NO: 150698 - DNA, 90 bp, Homo sapiens
ccttgcccgtgaccgtcgctagaactcagttgtgcgttgcggccagtcgccactgcttactatactggcaattgctggagaagattttgc

SEQ ID NO: 150699 - DNA, 111 bp, Homo sapiens
aatagcaagaagtaccctgtggcccatttcattgaccaaactttgaaagccaaggcacagcagctacacagaagagatgggagaagaggctaatgatgacaagaagccaac

SEQ ID NO: 150700 - DNA, 98 bp, Homo sapiens
ggcggtggcagccatgttgttgttacacgacagatccatgagcatgagcaggagaacgagttgcgggaacagatgtcaggttataagcggatgcggcg

SEQ ID NO: 150701 - DNA, 90 bp, Homo sapiens
gaagagctgcacaaccaagaggtgcaaaaacgaaagcaactggagctcagttggtgacaaagttcctgctgatataaggttaacttccat

SEQ ID NO: 150702 - DNA, 96 bp, Homo sapiens
gcagcatctcctggacctcattgcagccaggtgctggacgtcattgctcctccttatacctctgacttcgtgcaacttttcctccccatcctggag

SEQ ID NO: 150703 - DNA, 100 bp, Homo sapiens
gtactggcagtattaagtttatccatcaagaatggccataggaaaaggatacagagtagagtttcatgaacctgaaacttggtggaaatttgatcctgaa

SEQ ID NO: 150704 - DNA, 75 bp, Homo sapiens
cgagaggtgcggcgaaggaggcagaggcacttatgcttgtcaggcagcaaaggaacagactcaagatttaatagt

SEQ ID NO: 150705 - DNA, 100 bp, Homo sapiens
gtttgaccaggcccagaggtccgtgcggcagcagctccagagctttgtcaaagaaaaccagcctggacaccaagtctgtgtcagaaggccacctcaagag

SEQ ID NO: 150706 - DNA, 100 bp, Homo sapiens
gaaaagttcttgctgaagctagaagggcaattactggatggaatgatattccaggcctatatgaacccaatagcaatggcgagatcaaggggtccaatcc

SEQ ID NO: 150707 - DNA, 75 bp, Homo sapiens
ttcagcagttggcacacatggttaaggaacaggaggaaaccattcagaggcagctgaaaaagttggatgaagata

SEQ ID NO: 150708 - DNA, 100 bp, Homo sapiens
ctcaatgaagaccttgcagaaatggagctatgccaagaccaagacgagagccgaggtgcggggcggtggccggaagccttggccgcagaaaggcactggg

SEQ ID NO: 150709 - DNA, 100 bp, Homo sapiens
gaagagccaaggaataaacatgcaatgaacccaaaagggtggtgttcccactgatgaagagcaggcgactgggttggagagggagatcatgctggctgca

SEQ ID NO: 150710 - DNA, 82 bp, Homo sapiens
ggaaccctggtcaccgtctcctcaggaagcgccgcggagccatcaacagcaagcagctcacctacctggagaaataccggcc

SEQ ID NO: 150711 - DNA, 74 bp, Homo sapiens
aggacggtctctgccagtataaatgcagtgacgcaccatatgaaggcggagtatggaaagttagagtggaccta

SEQ ID NO: 150712 - DNA, 76 bp, Homo sapiens
cagggatttctggattctctacgggatctcatagcagattcaaatccaatgccgtgtaggacgctccaaacaagca

SEQ ID NO: 150713 - DNA, 115 bp, Homo sapiens
ctggagagaccccgcggctgggcgttcatctaccacgctttcgtgtcctcgatgggcttcctggaatattggtgtgtttatttgcatcagatgtgctggaattcatagaaatctt

SEQ ID NO: 150714 - DNA, 100 bp, Homo sapiens
gccgccgccgccgccggagctaacctcggggaccgagatgcaggaaagaccacagcaagattctttcattcgtctcctcctagcctgggggaccaggctc

SEQ ID NO: 150715 - DNA, 98 bp, Homo sapiens
cttttctttcttctaatttttaaaaagcagcctctggagccagccatgtttggcactgaatcttcatgcgcagcagcttactgatctggaacaaaaat

SEQ ID NO: 150716 - DNA, 128 bp, Homo sapiens
aaataccttgcatacatggagtctaaaggagcccatcgtgcgggtcttgcaaaggttgcacactgggccacagaggatccagcaaggatgaagaaatggagcagcacagacttgggggcagctgcgga

SEQ ID NO: 150717 - DNA, 50 bp, Homo sapiens
gccagaaggaagacaatgctgggaaggaaactgaaaaggccaaggaacga

SEQ ID NO: 150718 - DNA, 100 bp, Homo sapiens
acaatgttgatgttcatgatatagaattgttacagtatatcaatgtggattgtgcaaaattaaaacgactcctgaaggggagagcttatggatggagacc

SEQ ID NO: 150719 - DNA, 75 bp, Homo sapiens
ggaaggcgagcggaagatttacttggcaattgaaataaatggggagcaggagaaccgagtgcagaagggaaatgg

SEQ ID NO: 150720 - DNA, 75 bp, Homo sapiens
cagatttgtaactggaaaactcatgagagtctttgatgaatcactaagcagcatctgttaagaacatcttcagcc

SEQ ID NO: 150721 - DNA, 115 bp, Homo sapiens
ctctgctgtgggcgctgctggcgctctggctgtgctgcgcgacccccgcgcatggtgagaagccctaccactgcaactgggacggctgcggctggaagtttgcgcgctcagacga

SEQ ID NO: 150722 - DNA, 83 bp, Homo sapiens
gaatgccagccaccagccatggtcctgacacagctctccctgaggagcagccacattccagctcccagtgcgcccctctccac

SEQ ID NO: 150723 - DNA, 101 bp, Homo sapiens
ggtgtggggttggtgtgattagcttcgcagtctggaaagctttaggagttcacagtaacaatatgatgcgtttgtgaagtttacgcatgatcaaataatgc

SEQ ID NO: 150724 - DNA, 96 bp, Homo sapiens
ctcgtgcttctgggccacatcttctatgtgctgggaaaccacaggcctgtgtccatggcggctccaacagcaatcacagaagcaggaacacagcct

SEQ ID NO: 150725 - DNA, 82 bp, Homo sapiens
agctacacttttcaccaaggaactggtgctgcagcgagaggaagtgggaaaactcttgcctttgccatcccaatgattcatg

SEQ ID NO: 150726 - DNA, 99 bp, Homo sapiens
attttccttgatggtcaaaagattaagctgagtcagtgctgattctctcaaatagagcttgaaggataaatcttcatttttgtttcaacaaaacttcga

SEQ ID NO: 150727 - DNA, 97 bp, Homo sapiens
gtggcgctcgagttcctggaccgtgagagcatcaagctcgtgtccatcggtgaactagagaagttgagaaaggaatggaatgcattggaaaccgaat

SEQ ID NO: 150728 - DNA, 90 bp, Homo sapiens
gttcggtgcagctgccagatccgctgatctagtgcttctcgaaaaaaaccttcaggcggcccatgggactatgatgatggatatggcact

SEQ ID NO: 150729 - DNA, 113 bp, Homo sapiens
caaagatctgacagaactggttcagcggagaataacatatcttcagtttgatggtatccatgtggtgagtggatctcttgatacatcaatccgtgtttgggatgtggagacag

SEQ ID NO: 150730 - DNA, 75 bp, Homo sapiens
agtcggtgaccgcgcgactcggcgcccgcccgcggatgacccctccggcgaaggtgtcctgccctcggcccgcgg

SEQ ID NO: 150731 - DNA, 97 bp, Homo sapiens
ccccgtgtcctgcaggtattgggagatccacagctaagacaccgggacctcctggaagccaaaaatggcatatagttggaaagagaggggacactag

SEQ ID NO: 150732 - DNA, 100 bp, Homo sapiens
cacctgcagcgagtgccaggaactcttctggggagaccccgacgtggagtgccgaggatccctccccgcggcggcgatggcccgagccatgagagtgagg

SEQ ID NO: 150733 - DNA, 90 bp, Homo sapiens
caaagagaaggtggtaatgaagctcaagaaactggagtccagtgtgagcactggtcgtaaatgtgctacagctcgagagggcagagccac

SEQ ID NO: 150734 - DNA, 97 bp, Homo sapiens
gctgtttgtatggggcaagaacatccgagggtgcctgggaatcggtcgcctggaggaccagtatttcccatggaggagagaactcgatgccaccgca

SEQ ID NO: 150735 - DNA, 74 bp, Homo sapiens
aagagatgtggggggattctcgacctgctaacagaactggaccttttcgtttccttgatggagaactatcaaag

SEQ ID NO: 150736 - DNA, 75 bp, Homo sapiens
gtaagcccagggacagccaggcaggcaatactgaacactgcgcagcttgcagaggtctcctggcagccctcatta

SEQ ID NO: 150737 - DNA, 118 bp, Homo sapiens
tgggcatcctcctgagactccggggtcagacgcccactccaggtgtcatggagaaactccagctgggcccagagattctgcagcgggaaaatccaaggcttatttatgccaggctgag

SEQ ID NO: 150738 - DNA, 87 bp, Homo sapiens
acccattgtgtcttctcaagaaggtacttggaaaaatggacaaggattgtgaaatgaaacgcaccacactggacagccctttgggga

SEQ ID NO: 150739 - DNA, 96 bp, Homo sapiens
cggcgctctcctggctcccttctgccccagctccgtctcggcggcggcggcctacaaggagaagatgaaggagctgtcggtgctgtcgctcatctg

SEQ ID NO: 150740 - DNA, 85 bp, Homo sapiens
agtacaccgtggtgacattgtatcattggtgaccctgatgctcccataagacagaaaatgccccttgatgatctggatagagaag

SEQ ID NO: 150741 - DNA, 74 bp, Homo sapiens
cccggcgcggcccagcgccctcaggttgtttgatgtgtgcacagtgtcacgaacagacagagaaaccaaactaa

SEQ ID NO: 150742 - DNA, 100 bp, Homo sapiens
agaaaattacctaaatgcactctttcgaaagaaagagctggactggccattatggaggaggagctgcagcattcccattgtgtgaattgtgtcagtagac

SEQ ID NO: 150743 - DNA, 77 bp, Homo sapiens
gccgatgggaaatcccaggctgccgcggctcctgtgtgctttgaagatctcacattcttgaaggtggcattgaagag

SEQ ID NO: 150744 - DNA, 50 bp, Homo sapiens
gtggtgaaggggcttctggactgctgaaaatggcctttgacgaggaggtg

SEQ ID NO: 150745 - DNA, 85 bp, Homo sapiens
aaggcaggaatcaatccattcaatgtgaaagatgtcatgtatatctgcccatttatgggagcagtgagtggaaccctgacagtga

SEQ ID NO: 150746 - DNA, 51 bp, Homo sapiens
atcccagcactttgagaggccaaggcaggtggatcatgaggtcaggagttc

SEQ ID NO: 150747 - DNA, 89 bp, Homo sapiens
tgacaggcatgttgtataaatgtacagggcaaccccgtggaactgataacaaaagctcgtctttttctgctgcagttaatacctcggtg

SEQ ID NO: 150748 - DNA, 113 bp, Homo sapiens
cgaccgctacgctgtctactggaacagcagcaaccccaggtgacagatcagtcagtgaaagcatttgctgaacactgtcctgagcttcaatatgtaggcttcatgggttgttc

SEQ ID NO: 150749 - DNA, 101 bp, Homo sapiens
actggaaagtgggaagatgataaagatgcagccaaggtcttagcagaagatgatgcagacagacatgctgaactatctggaagtccactgaaaagcaaaag

SEQ ID NO: 150750 - DNA, 75 bp, Homo sapiens
catggcggaacgcaggagacacaagaagcggatccagattttaggtgatgggcaagtcagaaagtcagatggata

SEQ ID NO: 150751 - DNA, 96 bp, Homo sapiens
gagcgtgctgtggtcagagtcgctgtttggtcagatgatgactggttgaagaagttttctgggaagacgcttgaagagaataaagaggaagaaggg

SEQ ID NO: 150752 - DNA, 83 bp, Homo sapiens
tgaaactgaacttataatcgtcactggattgaaataatgcaaaaggtgtcccaaggctcctgaccagtgaacaaagatttgag

SEQ ID NO: 150753 - DNA, 50 bp, Homo sapiens
gatgggccccgagaacctcgaaaatcttgtggaagaagaatgaagttgct

SEQ ID NO: 150754 - DNA, 75 bp, Homo sapiens
agctacaagatttaggccatcctccaaaagagctggctggagagatggtgctcctgatccaacagcaggtgctag

SEQ ID NO: 150755 - DNA, 100 bp, Homo sapiens
ttcctgagacagcagcctgccactcggacacagcagtctaacatctgggtgaatatgggcagcccttgacattagacagtcagtgtttggtggcaaaaat

SEQ ID NO: 150756 - DNA, 100 bp, Homo sapiens
ggtggttctcttcccaaagtggaagccaaattcatcaattatgtgaagaattgcttccggatgactgaccaagaggagccagatgaccaagatgctccag

SEQ ID NO: 150757 - DNA, 104 bp, Homo sapiens
ctgctgcagtccaggctgaagacagagggctctgatctgtgcgacagaacaatgcagatcttcgtgaagactctgactggtaagaccatcaccctcgaggttga

SEQ ID NO: 150758 - DNA, 101 bp, Homo sapiens
cttgagctccaggagttcgtctcttacgtctgcggaagtgcagctgcctcagttcttagcgcaggctcaaaaatgaccaggctaactactcgctcaacaca

SEQ ID NO: 150759 - DNA, 100 bp, Homo sapiens
ggacccggctaccctggacagcgcatcgccgcccgcccgggtcgccgcgccacagccgctgcggatcatggtgtgggttgctgaccgaggaaataaaaga

SEQ ID NO: 150760 - DNA, 100 bp, Homo sapiens
ggaggctgtgcgggccccgctccgcttcgaatggttgccaccttccagagaagaggtacgagatgacaagacaaccataaagtgtgaaacctccccgcct

SEQ ID NO: 150761 - DNA, 90 bp, Homo sapiens
aagatggcaaaggctgagatgatgggcattgccacctggggtatcgttgtcatggcagaccccaaagggaaggcctaccgcgttgtttga

SEQ ID NO: 150762 - DNA, 100 bp, Homo sapiens
cgagtttgacaatgctggcgccatgatgagtgtggacgagaccctcatgtgctctttccagctgattgggcagaaagtggcccatgctctggcagaggga

SEQ ID NO: 150763 - DNA, 74 bp, Homo sapiens
cttgaaggatgcaggtgatggtgttcgatacttgctcaggtccctccttgtggtccatttctgggcaccatggg

SEQ ID NO: 150764 - DNA, 74 bp, Homo sapiens
gcgcacattggtatgatgtggaaggtgtcatggagaaactccagctgggcccagagattctgcagcgggaaaat

SEQ ID NO: 150765 - DNA, 95 bp, Homo sapiens
ggagctcaaggtcacaagaagaaatgaaaggaacaatcagcagccctgttcagaaggtaggggtcccacggctgggtggtcctaagccactgggt

SEQ ID NO: 150766 - DNA, 50 bp, Homo sapiens
ctggctgtgggggctacaaaaggcattgatctggagaacattgtgtacta

SEQ ID NO: 150767 - DNA, 101 bp, Homo sapiens
atgaaaattccagaaccttttccactacctgcagtgggagacatttagtgaacgctcttcaagctcacaaactctgacccaatttgattctaacattgcac

SEQ ID NO: 150768 - DNA, 75 bp, Homo sapiens
ccacctccacaagggcttcctggccctctaccaaaccgtgggaatcactgaccctggaggatgtggctgtggagt

SEQ ID NO: 150769 - DNA, 51 bp, Homo sapiens
ctcctgagtagctgggattgcaggccttgaggagctggttctctcagagat

SEQ ID NO: 150770 - DNA, 100 bp, Homo sapiens
cgggacccggttccccggcccacagtgggggtgtgcaaacccgagagaactggtgagttattctccccacctcagaagtaccagcttttggtgtatcatg

SEQ ID NO: 150771 - DNA, 100 bp, Homo sapiens
attgtggccgactggggaaacagcaggatccaggaagagcgaaccaggctagcaaaagagctttcttcacttcgagaccaaagggaacagctaaaggcag

SEQ ID NO: 150772 - DNA, 95 bp, Homo sapiens
gcaaatgctcgtgctacctgccctggccctgctcagcgccagcggcactggctccgccgcccaagaggaccattcttagtggcactggggaaatc

SEQ ID NO: 150773 - DNA, 109 bp, Homo sapiens
aaagagacctctacttagctcagcaattcttaccttgtgtatactcttgatgtaccagatgcattctattactgttatagtccagaccctggtaatgcaaagggaaaag

SEQ ID NO: 150774 - DNA, 100 bp, Homo sapiens
aacgaaaaagaacgacatgatgcaatcttcaggaaagtaagagggtgtggcagctctcagaaaagaagcaaataaacgtgtgctcccagttggattggaa

SEQ ID NO: 150775 - DNA, 75 bp, Homo sapiens
tggaggacatctgggggccacaaatgctccttctcctggagacgcaactcaagtctgcaactgtgtctgatggcg

SEQ ID NO: 150776 - DNA, 111 bp, Homo sapiens
cggaaatgctccaggttcaattttctgagatttctcatcaggcacaccaaccagcaggaccaggttggtgttcgaggaagagacattgttgttcttggtgtggagaagaag

SEQ ID NO: 150777 - DNA, 97 bp, Homo sapiens
cttccaccactgagctgccccccgagtacctgaccagccccctgtctcagcagtcccaggcagtacgggctctggagcagtttgccactgtggtgga

SEQ ID NO: 150778 - DNA, 90 bp, Homo sapiens
ccaggagcagacagagaagctgctgcagtttcaggacctagatgtgaaggctggtggaggctgtgtaatgaccattggagaaatgctacg
